United States Patent Application Publication US 2021/0199660 A1 - sequence listing, part 19

SEQ ID NO: 261834 - DNA, 120 bp, Artificial Sequence
  ENSG00000125630_27 (sequence is synthesized)
gggatgttaattgagagtatggccgggaagtctgcagctttgcatggtctctgccatgatgctacacccttcatcttctcagaggagaactcggccttagaatactttggtgagatgtta

SEQ ID NO: 261835 - DNA, 120 bp, Artificial Sequence
  ENSG00000125630_28 (sequence is synthesized)
aaggctgctggctacaatttctatggcaccgagaggttatatagtggcatcagtgggctagaactggaagcagacatcttcataggagtggtttattatcagcgcttacgccatatggtc

SEQ ID NO: 261836 - DNA, 120 bp, Artificial Sequence
  ENSG00000125630_29 (sequence is synthesized)
tcagacaaatttcaagtaaggacaactggagcccgagacagagtcaccaaccagcctattgggggaagaaatgtccagggtggaatccgttttggggagatggaacgggatgcgctttta

SEQ ID NO: 261837 - DNA, 120 bp, Artificial Sequence
  ENSG00000125630_30 (sequence is synthesized)
gctcatggtacatcttttctccttcatgaccgcctcttcaactgctcagatcggtcggtagcccatgtgtgtgtgaagtgtggcagtttactctctccactgttggagaagccaccccct

SEQ ID NO: 261838 - DNA, 120 bp, Artificial Sequence
  ENSG00000125630_31 (sequence is synthesized)
tcttggtctgccatgcgcaacagaaaatacaactgtactctgtgtagtcgcagtgacactatcgatactgtttctgtgccttatgtttttcggtattttgtagctgaactggcagctatg

SEQ ID NO: 261839 - DNA, 120 bp, Artificial Sequence
  ENSG00000125630_32 (sequence is synthesized)
aacatcaaagtgaaactggatgttgtttaacttgatgttgaccttttggattaagaggactatcagattaaagcaaaatgtaattttaattcaatgaagatatcattaccaggttactct

SEQ ID NO: 261840 - DNA, 120 bp, Artificial Sequence
  ENSG00000125630_33 (sequence is synthesized)
tgagatttttcaacggtgttagaactctcaaccaagacctgaaaaccaagtatgcaaggtttctgaatctctctggtagattaactattgacaatgattttctgttatctttgttcaaaa

SEQ ID NO: 261841 - DNA, 120 bp, Artificial Sequence
  ENSG00000125630_34 (sequence is synthesized)
agttcatgtcttctcaaaatatgaaatattgataaatggaagagcatacggtgacaagtctcctttccaaccccaggttccctacaccctgctctcagcaggcagtgagtgtcacacacc

SEQ ID NO: 261842 - DNA, 120 bp, Artificial Sequence
  ENSG00000125630_35 (sequence is synthesized)
tgttaatccatcttgagcaggacagtactatacaaatagaatgcaagctgtaatgtaattttatattttcttatagccacgttgaagtaaaaacaaacaggtacagtgttttttaccagc

SEQ ID NO: 261843 - DNA, 120 bp, Artificial Sequence
  ENSG00000125630_36 (sequence is synthesized)
tttatagaagtacagttgttacatatttaatgaatacaatttgatgggtctgactatatgcacacacctttgataccatcaccacaatcagggtaataaacatacctgtcatctccacaa

SEQ ID NO: 261844 - DNA, 120 bp, Artificial Sequence
  ENSG00000125630_37 (sequence is synthesized)
agcgcggcgtccgccggcgcccttgccgcggcgaggccaatcccagggaggtggctgggaggtcacagtatgaccccagatgcatgtgctccttgatcctgacaggcttggctatacctc

SEQ ID NO: 261845 - DNA, 120 bp, Artificial Sequence
  ENSG00000125630_38 (sequence is synthesized)
atgaacaaacagtgcctactaaataggaaatggggggctattttataatcaatggcattgaaaaagtcatccgaatgttgattatgcctcggagaaattttcccattgcaatgataagac

SEQ ID NO: 261846 - DNA, 120 bp, Artificial Sequence
  ENSG00000125630_39 (sequence is synthesized)
aatgttggatgaagcattctgatgtgattgtgctgtttgtttcctttaccaggggtcactcccattgatggagctccccaccgatcatacagtgagtgctaccctgtcctgctggacggt

SEQ ID NO: 261847 - DNA, 90 bp, Artificial Sequence
  ENSG00000125630_40 (sequence is synthesized)
aacattcaccaccacacccggctaatttttaattttttttgtagaaacagggtcccactatgttgtacaggctggtctcaaactcctggg

SEQ ID NO: 261848 - DNA, 120 bp, Artificial Sequence
  ENSG00000125630_41 (sequence is synthesized)
ggtcccactatgttgtacaggctggtctcaaactcctgggctcatgtgatcctcctgtttcagcctcccaaagtgataggattggagacatgagccactgagcctggccagtttttgctg

SEQ ID NO: 261849 - DNA, 120 bp, Artificial Sequence
  ENSG00000125630_42 (sequence is synthesized)
tctagtgttcagtgttaatgaattaacaagattgaaaaatttcagcagcctacaattttcctgacaaaaattgaaagcaggcagcgaaaaactggaaggttggttagtgtctattaaaat

SEQ ID NO: 261850 - DNA, 120 bp, Artificial Sequence
  ENSG00000125630_43 (sequence is synthesized)
gttgagtttttgttttgtcttctgtggtaagaacacttaactcaagacctaccctcttaacaaatctttaagtgcacgatatagtattgttaattccaggcaccatgttgtacaacagat

SEQ ID NO: 261851 - DNA, 120 bp, Artificial Sequence
  ENSG00000125630_44 (sequence is synthesized)
ctttagaccttacttgtcttgcataactgaagctttatacctgttgaacaactctccatttccctggcccctagcaaccacccttctaccctgtttctatgagtttgactattacagata

SEQ ID NO: 261852 - DNA, 120 bp, Artificial Sequence
  ENSG00000125630_45 (sequence is synthesized)
tctcatatagtgggatcatgcaatatttgtcctgtgactggcttatttcacttagcatagtgaaataagattcatccattttggaagccaggcatggtgctgtgcatctatagtccctgc

SEQ ID NO: 261853 - DNA, 120 bp, Artificial Sequence
  ENSG00000125630_46 (sequence is synthesized)
ctgctatttgagaggctgaggtgggaggatcatttgagtgcaggagttcaaggacagcctgggtaatataggaagaccctgtcttgaagaccctgacctcaagtgatccacccacctcgg

SEQ ID NO: 261854 - DNA, 120 bp, Artificial Sequence
  ENSG00000125630_47 (sequence is synthesized)
acaggtgtgagccactgtgcctggcctccggtgagtattttatatttagtctacacttccatacttggcttttttctgcttttatattgatctgctttcatagcagtgtgtagagtgcca

SEQ ID NO: 261855 - DNA, 120 bp, Artificial Sequence
  ENSG00000125630_48 (sequence is synthesized)
agtgtgtagagtgccacttatgttttctttcttgtgtacagtattttattgtatggatttaccatcccctgtgtatttaagttgttccattctttggccattataacttttttctgcaaa

SEQ ID NO: 261856 - DNA, 120 bp, Artificial Sequence
  ENSG00000125630_49 (sequence is synthesized)
cagagacggggtctccctatgtggcccagcctggtctcaaactcctgagctcaagtagtcctcctctctcggtctcccaaatattgggattacaggctatacctccctttgaatttgctt

SEQ ID NO: 261857 - DNA, 120 bp, Artificial Sequence
  ENSG00000125630_50 (sequence is synthesized)
tttgctgaggtttagaaacatttttgattgccagtcttggctaaacttagtgatttggctttaattgtgtctaagaggttaagattgttcagaaagaaaatggttgaagcaattaagata

SEQ ID NO: 261858 - DNA, 120 bp, Artificial Sequence
  ENSG00000125633_0 (sequence is synthesized)
agctccgcggcagggacagcttcctccggacgcttggcgggcttcgctctcgccttacgacagcccggtcggatcatggggttgcccagggggccggagggccagggtctcccggaggtg

SEQ ID NO: 261859 - DNA, 120 bp, Artificial Sequence
  ENSG00000125633_1 (sequence is synthesized)
gaaacaagagaagatgaagaacaaaatgtcaagttgactgaaattctggagctcttggttgcagctgggtatttcagggcaagaattaaaggcttatcaccctttgacaaggtagtagga

SEQ ID NO: 261860 - DNA, 120 bp, Artificial Sequence
  ENSG00000125633_2 (sequence is synthesized)
ggaatgacttggtgtatcaccacttgcaactttgatgtagatgttgatttgctctttcaagaaaactctacgataggtcaaaaaatagctctgtcagaaaaaattgtctcggtcctgcca

SEQ ID NO: 261861 - DNA, 120 bp, Artificial Sequence
  ENSG00000125633_3 (sequence is synthesized)
aggatgaaatgcccacaccagctggagccccaccagatccaggggatggattttattcacatatttcctgttgttcagtggctggtgaaacgagctatagaaacaaaagaagagatgggt

SEQ ID NO: 261862 - DNA, 120 bp, Artificial Sequence
  ENSG00000125633_4 (sequence is synthesized)
gactatatccgctcctactctgtatcccagttccagaagacttacagtctccctgaggatgatgacttcataaagagaaaagaaaaggccatcaagacagttgtggacctctcagaagtg

SEQ ID NO: 261863 - DNA, 120 bp, Artificial Sequence
  ENSG00000125633_5 (sequence is synthesized)
tacaagccccgtcggaaatacaaacgccaccagggagcagaggagctacttgatgaagaatctcgaatccatgctacacttttggaatatggcaggagatatggatttagccgccagagc

SEQ ID NO: 261864 - DNA, 120 bp, Artificial Sequence
  ENSG00000125633_6 (sequence is synthesized)
aaaatggagaaggctgaggacaagaaaacggcacttccagcagggctgtcagctacagaaaaagctgatgcccacgaggaagatgagcttcgagcagctgaagagcagcgtattcagtcg

SEQ ID NO: 261865 - DNA, 120 bp, Artificial Sequence
  ENSG00000125633_7 (sequence is synthesized)
ctgatgaccaagatgaccgctatggcaaatgaggagagccgtctcaccgcaagctccgtgggccagattgtgggactctgctctgctgagatcaagcagattgtgtccgagtatgcagag

SEQ ID NO: 261866 - DNA, 120 bp, Artificial Sequence
  ENSG00000125633_8 (sequence is synthesized)
aagcagtctgagctatcagctgaagaaagtccagaaaaattaggaacctcccagctacatcgccggaaagtcatttccttgaacaaacagattgcgcaaaagaccaaacatcttgaagag

SEQ ID NO: 261867 - DNA, 120 bp, Artificial Sequence
  ENSG00000125633_9 (sequence is synthesized)
ctgcgagcaagtcacaccagcctacaagccagatataatgaagccaagaaaacgctgacagagctgaagacttacagtgagaaactggacaaagagcaagcagccctcgagaagatagaa

SEQ ID NO: 261868 - DNA, 120 bp, Artificial Sequence
  ENSG00000125633_10 (sequence is synthesized)
tccaaagctgatccaagtatcctacagaacctgagagcacttgtagccatgaatgaaaatctgaaaagtcaagaacaggaatttaaagcacattgtcgagaggagatgacacgactacag

SEQ ID NO: 261869 - DNA, 120 bp, Artificial Sequence
  ENSG00000125633_11 (sequence is synthesized)
caagaaattgaaaacctgaaagctgagagagcaccacgtggagatgaaaagaccctctccagtggagagccgcctggtaccttgacctctgcaatgactcatgacgaagacctagacaga

SEQ ID NO: 261870 - DNA, 120 bp, Artificial Sequence
  ENSG00000125633_12 (sequence is synthesized)
cggtataatatggagaaagagaaactttacaagatacgtttactacaggctcgaagaaatcgagaaatagcaattttgcaccgcaagattgatgaagtccctagccgtgccgagctaata

SEQ ID NO: 261871 - DNA, 120 bp, Artificial Sequence
  ENSG00000125633_13 (sequence is synthesized)
cagtatcagaagagatttattgaactctaccgccagatttcagcagtgcacaaagaaaccaagcagttcttcactttatataataccctggatgataaaaaggtttatttggaaaaagag

SEQ ID NO: 261872 - DNA, 120 bp, Artificial Sequence
  ENSG00000125633_14 (sequence is synthesized)
attagtctgctgaactcaattcatgagaacttctcacaggccatggcctcccctgctgcccgggaccagtttttacgtcagatggaacagattgtggaaggaattaagcaaagtagaatg

SEQ ID NO: 261873 - DNA, 120 bp, Artificial Sequence
  ENSG00000125633_15 (sequence is synthesized)
aagatggaaaagaaaaagcaagagaacaaaatgagaagagaccagttgaacgaccagtacttggagctgttagaaaagcagaggctatactttaagactgtgaaagagttcaaggaggag

SEQ ID NO: 261874 - DNA, 120 bp, Artificial Sequence
  ENSG00000125633_16 (sequence is synthesized)
ggccgcaagaacgagatgctgctgtccaaggtgaaagcgaaggcctcctgaacatccccagccgtggctgtatgtcattgattttacttttaagcaccgtatatcacctacaagatcatg

SEQ ID NO: 261875 - DNA, 120 bp, Artificial Sequence
  ENSG00000125633_17 (sequence is synthesized)
aaatggttctgaaagcgacagtagagagatgcagttgtgatgatttcaacaacctggatgttttctttctcctctttgcttccattcatctctgttggctgctgttgatggagtcagaca

SEQ ID NO: 261876 - DNA, 120 bp, Artificial Sequence
  ENSG00000125633_18 (sequence is synthesized)
gtaaacacgtggcttggataacacccatcatcctatgaagaatatagggagtacttgttctctgttgattcaacttttatgtctccagtaacattgcgcttatgaaggtacctgtatttg

SEQ ID NO: 261877 - DNA, 120 bp, Artificial Sequence
  ENSG00000125633_19 (sequence is synthesized)
tatggactctgaataaagaagaattcatttgtttagcaagtattagttcagcaaccactgagaaataagcactgaggaagattcagagacgtgtaaaacacagttcctactgcacaagta

SEQ ID NO: 261878 - DNA, 120 bp, Artificial Sequence
  ENSG00000125633_20 (sequence is synthesized)
cccagcaggtggcccagggaggcagatacagcacacttgaccgcagaactgggctatccaagatgtttttcagtaaacagaaggcatttagctgaaatgatcagcccatgtagtgttggt

SEQ ID NO: 261879 - DNA, 120 bp, Artificial Sequence
  ENSG00000125633_21 (sequence is synthesized)
cacttgggcctttcacctgccatggtaccttttgttcccagctcctccaggtgccagccagcaggcttggtggtgacagcaactggaacgaaagttcagtgttgttttaatttttatacg

SEQ ID NO: 261880 - DNA, 120 bp, Artificial Sequence
  ENSG00000125633_22 (sequence is synthesized)
ttactcaagttgatttctcagaaaattgaaaacagaccttgtgctgaggacacgtcaataaaaattataccttcccctgccccaatgttcatgtgagtcacagcatgcagaggggctgtg

SEQ ID NO: 261881 - DNA, 120 bp, Artificial Sequence
  ENSG00000125633_23 (sequence is synthesized)
catccccctcattgaaggcacatttgatgaggctacgctgcagatgggtcatggtctgagccaggagagagatagacactgttccctgcactcaaggcaagtagggtgtcaggaggaaga

SEQ ID NO: 261882 - DNA, 120 bp, Artificial Sequence
  ENSG00000125633_24 (sequence is synthesized)
gcagtagggtttgcagagatccagggaaacttcctggaggaggcagcatttgagccctatctaaagggagaatcggatgttgataggaagactgttttaaatgaaaatacactatgatta

SEQ ID NO: 261883 - DNA, 120 bp, Artificial Sequence
  ENSG00000125633_25 (sequence is synthesized)
aaaacccaagagagtgcagaggagtacaaggcatgcatgttgggaaaggagggaataagctagtctctgcaggaggcttcagagacccgtctgggaagtagggctgagactaggctttgg

SEQ ID NO: 261884 - DNA, 120 bp, Artificial Sequence
  ENSG00000125633_26 (sequence is synthesized)
agggccttgaagggcagctgagggttgattttaatccttggaaatgaccagtgcagatcaaacatggagctcctgctgccctggtcctcaggagtctggtaactcagtcatgttctgtag

SEQ ID NO: 261885 - DNA, 120 bp, Artificial Sequence
  ENSG00000125633_27 (sequence is synthesized)
gtttgtgctccattttgcataaatcttgcaaacataccaggtggcaggtttgcacagtaacacaaaagcttaaacatgtcaagcaagtggggcattcagcagccacagaaatgtgttcat

SEQ ID NO: 261886 - DNA, 120 bp, Artificial Sequence
  ENSG00000125633_28 (sequence is synthesized)
tacctgagccaggcggaagcagcagcttgcaaatagaaactgccacctgcgagcgcttcttgggtcatgtgcagctccacctcagctggtccctgagccgtggtcatgtgggggttttga

SEQ ID NO: 261887 - DNA, 120 bp, Artificial Sequence
  ENSG00000125633_29 (sequence is synthesized)
agggctaagttgaagcaagtaattgcaaaagaacaggtggcactctgagggcaggggaaggagacagaagtttgactgcgtttgaaattatttcagtcagggaaacatctgcgttgtctt

SEQ ID NO: 261888 - DNA, 120 bp, Artificial Sequence
  ENSG00000125633_30 (sequence is synthesized)
gttaagcagcttgtaggcccacccctggctaactgaactttgtgagcagttggggcagttatttgaatatttgtccaaaggtggtagggaggcagatgacattctggggttactggagtc

SEQ ID NO: 261889 - DNA, 120 bp, Artificial Sequence
  ENSG00000125633_31 (sequence is synthesized)
cacctctgtgctgatggggaaagtatggcatgatgaatccaaagcaaccagtaattctttttgaaagtgcaggcatttattttgagctgtatttcataggagtttcatttggtttggttt

SEQ ID NO: 261890 - DNA, 120 bp, Artificial Sequence
  ENSG00000125633_32 (sequence is synthesized)
tggtatagagaggtgtccatagatctctattccctttttttttttatcgacaaggcctactacggataaatcagtttttgttgcctgaatacactttgaattagactacagaagccagtt

SEQ ID NO: 261891 - DNA, 120 bp, Artificial Sequence
  ENSG00000125633_33 (sequence is synthesized)
tgagctcaaatttcacacttgctgcagacaactctcagtgtggacagtgcctttctgagtaattaggatgttacatgactttttggtgaagccgtatagggtaaggagatgccccaaggc

SEQ ID NO: 261892 - DNA, 120 bp, Artificial Sequence
  ENSG00000125633_34 (sequence is synthesized)
ccctgatcatttcagaagccacctggagcaccagaaggggtcatcttcccagggctatggctctgtgtgcttagacagacatagtatggaattgtgctctaagcccacaggcttctccgg

SEQ ID NO: 261893 - DNA, 120 bp, Artificial Sequence
  ENSG00000125633_35 (sequence is synthesized)
agttaaaaggaagcaagaacatccttaagttactttttcaaaatatgcgcttcaggaggaaccaggtttccccaggagagagaggctccctgctcaatcagcacagggagttgctagcgg

SEQ ID NO: 261894 - DNA, 120 bp, Artificial Sequence
  ENSG00000125633_36 (sequence is synthesized)
gcaggctgcccagtgctgtggaatctccgccagcctctgggttgggggctccctcccacttcttgcttcttatggagtacatgggactgctctgctttaagccgcgatcagagctgttgt

SEQ ID NO: 261895 - DNA, 120 bp, Artificial Sequence
  ENSG00000125633_37 (sequence is synthesized)
gagcaggacaagattgcgtgatcacgaggtgcgtggggagatgctaggacatttgttgatgtctttgacctgtgctccgtctctgttggatgactgggttagctaacaccactagaggga

SEQ ID NO: 261896 - DNA, 120 bp, Artificial Sequence
  ENSG00000125633_38 (sequence is synthesized)
ggtacagaatgttaaacagtcgtcagagtcacactgagggttgttttaacagagggcaaattcccagtttgtcaagcatatctctgttagagtccgaagttcatggttttaatggttcta

SEQ ID NO: 261897 - DNA, 120 bp, Artificial Sequence
  ENSG00000125633_39 (sequence is synthesized)
gctcgtagcccttaatattttcaggatagctgggtcctgccagtgtccgctgagtccatcagcacaaccagaaggtccagggtccaggcatgggaagcattctctgacaataccgagccc

SEQ ID NO: 261898 - DNA, 120 bp, Artificial Sequence
  ENSG00000125633_40 (sequence is synthesized)
tcgggacctcctgaaaccttgagcagaggctggagaagaccttcagacagtccttttactacctcacaaagtgccatgcccgggacctcagacctcagggttgtgacgttgttgatgttg

SEQ ID NO: 261899 - DNA, 120 bp, Artificial Sequence
  ENSG00000125633_41 (sequence is synthesized)
tcaggccccagtacgtctctagtgaccgaagcagacctgcctgaaagggcactccggacagtgagccctggctctaacctgtgccctcatatttctgctgcctcatatggtcttgtttgc

SEQ ID NO: 261900 - DNA, 120 bp, Artificial Sequence
  ENSG00000125633_42 (sequence is synthesized)
ccactctgtaggtgactgatcaccctaaaagggaggtaggtatctagcagtagcacagttactttgagcctgaccacttgttctgaagtgcagatgttgaaacatgcattgaggaagaac

SEQ ID NO: 261901 - DNA, 120 bp, Artificial Sequence
  ENSG00000125633_43 (sequence is synthesized)
actttaaggaagcactttatgatttactcatggctggtgttggcctcaaagtaaaagaacatcttaatgcagaacagtacaataaagagccccataggatggatgccatcatctgtcccc

SEQ ID NO: 261902 - DNA, 120 bp, Artificial Sequence
  ENSG00000125633_44 (sequence is synthesized)
atggttgggattgccaaggaaagtgccttgttctgtgcatcttcagaatcccccaggccctctcttgatccttttcatgaagtccagagcattccttctattacaggctgaagatgcatt

SEQ ID NO: 261903 - DNA, 120 bp, Artificial Sequence
  ENSG00000125633_45 (sequence is synthesized)
gtaaaaggtaatgctataatagtattccctcttctcaataaatgtgcaaaactggagaatctggtgctgatctgcagcatacttgacaacacagggaataccgtggatgttccacgccag

SEQ ID NO: 261904 - DNA, 120 bp, Artificial Sequence
  ENSG00000125633_46 (sequence is synthesized)
ccttacatccgtccccattgcctgcccatgtccagtggccctgcgcaacaaaagtaagggcttgtcttaccacactctccccagcatctagctcaaggtagatgactgactgggaaattc

SEQ ID NO: 261905 - DNA, 120 bp, Artificial Sequence
  ENSG00000125633_47 (sequence is synthesized)
cggttggataaaatggcttttccacattgcaactttgcatctctattaggaaaatttagattgaacctttcctctacttgatgcttagtttgagaacagttttcacaactttagagggtc

SEQ ID NO: 261906 - DNA, 120 bp, Artificial Sequence
  ENSG00000125633_48 (sequence is synthesized)
tctctcagagtatgttatactgtaaccttgaagtttgagatgaaacaaggtgtcagaggttttgaatctttcaaaggaattgccttttacagatttttttttttattccctaagaaggga

SEQ ID NO: 261907 - DNA, 120 bp, Artificial Sequence
  ENSG00000125633_49 (sequence is synthesized)
aaaagagagggaagaactacactaatgttagagataaggtatgttttggctcaaaatgtgtcatgaacctaaaggtaacttgatgggcagaaatgtctcagccatgtgaaccaagaagtg

SEQ ID NO: 261908 - DNA, 120 bp, Artificial Sequence
  ENSG00000125633_50 (sequence is synthesized)
ggaccacagtgcaaggctgtgggtggcagcactagatacggtggtggcaggagtgtgacatgtaggcactccatgggggacagctggacggtgtctatcaaaagtgcaaatgcataagct

SEQ ID NO: 261909 - DNA, 120 bp, Artificial Sequence
  ENSG00000125633_51 (sequence is synthesized)
ctttgaactagcaatgctactcctaagaattgtacctgtgtacaaggtacttgtgtacaagagtttttgttgaaacattgtaatagcaaaaagttggagagtgccaccaatacaggggaa

SEQ ID NO: 261910 - DNA, 120 bp, Artificial Sequence
  ENSG00000125633_52 (sequence is synthesized)
tggttaaatacattatggccagcttaaacaatggaatagtttgtagaaatttaaaacaatggatcctgtgtgtgtgtactaccatagaatgggccccaagatgcatgattaagtgaggaa

SEQ ID NO: 261911 - DNA, 120 bp, Artificial Sequence
  ENSG00000125633_53 (sequence is synthesized)
aaaagcccatggtatcctaatgtttggaatggagaaagtgtgtagatgtatgtgtgtgcatatgttttcacacagacgtatacacgtgtatatcatatgtccacctgcatatgcctagga

SEQ ID NO: 261912 - DNA, 120 bp, Artificial Sequence
  ENSG00000125633_54 (sequence is synthesized)
tgtctctgggaggatatctagcagcccggcagcctgaattgcctctgggaagaggggtgggaatgacttttcaatgtacaccttttgtaccttttgaattttgtaccatgtacatgtatt

SEQ ID NO: 261913 - DNA, 120 bp, Artificial Sequence
  ENSG00000125633_55 (sequence is synthesized)
atctattaaaaaatagttcttaatttttaatttggtatacttttcttaatagaaccaaaatggaagaaaattctgattctctaaatctgctttcttaaagataaagcctttgattcaaaa

SEQ ID NO: 261914 - DNA, 120 bp, Artificial Sequence
  ENSG00000125633_56 (sequence is synthesized)
gttatgaaagttacagggaaagtatgacaaaaaagattaacatgcaattataagaccaggctaatttccatgccttctcagaggtttagcatccttaattgcctgggatcccaggggccc

SEQ ID NO: 261915 - DNA, 120 bp, Artificial Sequence
  ENSG00000125633_57 (sequence is synthesized)
ttgctataatgtgcttgacaaaggtacatgcaagacttaacactgggtatgtgattcttactcttttagcccttctgctaagtatcttgtttacactctccttgagtacctgcaaaacta

SEQ ID NO: 261916 - DNA, 120 bp, Artificial Sequence
  ENSG00000125633_58 (sequence is synthesized)
aatgaagccaagaaaacgctgacagagagaactatcctcatccagacttgaaaagctgtcttccttgtgattttggtgcttggactatagccgtactatggaaggacctcgctgcaaggt

SEQ ID NO: 261917 - DNA, 120 bp, Artificial Sequence
  ENSG00000125633_59 (sequence is synthesized)
ccctacctcgtacttcctggacgatttggaagctaggatcttcaaagacgtctccgaaaccaacccagtatccctacttttctagaattcacatgacatttaccaatttaaaattcttac

SEQ ID NO: 261918 - DNA, 120 bp, Artificial Sequence
  ENSG00000125633_60 (sequence is synthesized)
ggcagttttgtgaccacacacctacacaccaccaaattgtgcttatttttctcattttgcagtcatctaggagaaacttgtcatggtctggactagcctggcatggagaagtcccagatc

SEQ ID NO: 261919 - DNA, 120 bp, Artificial Sequence
  ENSG00000125633_61 (sequence is synthesized)
atgtggctaatttttttttcatatgttactttaatcttcataaacaaggcatgtgttccttgcagaagcagtatgtggagacaggcaagcttgcagcagttgcagtagtgtggaaatctt

SEQ ID NO: 261920 - DNA, 120 bp, Artificial Sequence
  ENSG00000125637_0 (sequence is synthesized)
acattcactgggcaagccgactgtgagccaggaagtgctcttggggagcccaggccaagccatccattcttgggtcctttggagggtagatatggattcccagtttctccagcggccagt

SEQ ID NO: 261921 - DNA, 120 bp, Artificial Sequence
  ENSG00000125637_1 (sequence is synthesized)
gctccccctagtccacacagtgagaccgtgaaagcagatgctccggggcactcctgggcagcttttgctcagtggatgatgggtgactacagactccctgaccacccccagcccatggaa

SEQ ID NO: 261922 - DNA, 120 bp, Artificial Sequence
  ENSG00000125637_2 (sequence is synthesized)
attctcaacctgtacttgggagacagcctggagccccacccaggagagtgcccaagggaaacgtgcagccatgaggatccaccggagcctttcgaggagcaaacctgggccactgaccct

SEQ ID NO: 261923 - DNA, 120 bp, Artificial Sequence
  ENSG00000125637_3 (sequence is synthesized)
cctgaacctaccagacaaaatgttcctccctggggctccggtgtggagctcacacacctggggagctgggtccatcaggacgggctggagccttgccaggagcaaacccgggccactgac

SEQ ID NO: 261924 - DNA, 120 bp, Artificial Sequence
  ENSG00000125637_4 (sequence is synthesized)
cctcctgaatctaccagacaagatgctcctccctggggctccggtgtggagctcacacacctggggagcccctctgcccagagggagcacaggcagaacacagcatcaccagggtcacca

SEQ ID NO: 261925 - DNA, 120 bp, Artificial Sequence
  ENSG00000125637_5 (sequence is synthesized)
gtgaacagccatctaccggggagcccaaagcagaaccggagcacgtccacacaggtagtgttctgggcaggcatcctgcaggcccagatgtgtgtcctagacctggaggaggagctggag

SEQ ID NO: 261926 - DNA, 120 bp, Artificial Sequence
  ENSG00000125637_6 (sequence is synthesized)
aagacggaagggctcaaggctgggctgaaatgctgtctccccacgccccctgtggacctccccggggacacgggcctgcactccagcccacctgagaatgaagactcaggggaagacagc

SEQ ID NO: 261927 - DNA, 120 bp, Artificial Sequence
  ENSG00000125637_7 (sequence is synthesized)
agtgagcctgagggagagggccaggcatggctgagagagggaaccccagactcttccccacagtggggagctgaggaggagagcatgttcttcagcaaccccctcttcctggcgagtcct

SEQ ID NO: 261928 - DNA, 120 bp, Artificial Sequence
  ENSG00000125637_8 (sequence is synthesized)
tgctcagagaacagtgcttctggagagtgcttttcctggggggcttcagactcccatgcaggtgtgaggactggacctgagagcccagcgactctggagcctcccctcccagaagacaca

SEQ ID NO: 261929 - DNA, 120 bp, Artificial Sequence
  ENSG00000125637_9 (sequence is synthesized)
gtgctgtgggagctggaaagtgagccagatttgggggacggcgctgctatcagtgggcattgtacccctccattccctgtgcccatctataaaccacactccatctgctgggcctcagtg

SEQ ID NO: 261930 - DNA, 120 bp, Artificial Sequence
  ENSG00000125637_10 (sequence is synthesized)
gctgccgctgagggggctcctgcagcacctcctggtcacggggagagtgagggagataggcttggtcctgctccatctgcagcaccgtgtgtggacgaagcattgacctgggaatcagga

SEQ ID NO: 261931 - DNA, 120 bp, Artificial Sequence
  ENSG00000125637_11 (sequence is synthesized)
tgtgtcggatctgatcttggccctgctgcacatcctgtgcaaccttgggcctctctcagccctgagggctggcagagaggaggtcctttttggccccaggtgactcttaactcccaggac

SEQ ID NO: 261932 - DNA, 120 bp, Artificial Sequence
  ENSG00000125637_12 (sequence is synthesized)
agagatgagagggagggtggacacccccaggaatctcttccctgcaccttggccccctgcccctggaggagcccagcttcttctccagagcctagcagcccagaatctgagagcagaggc

SEQ ID NO: 261933 - DNA, 120 bp, Artificial Sequence
  ENSG00000125637_13 (sequence is synthesized)
cctggtcccaggcccagccctgcatcgtcccaggagggcagcccgcagcttcaacaccacagctcaggcattttgcccaagtggacactagatgcttcacagtcttcactcttggagacg

SEQ ID NO: 261934 - DNA, 120 bp, Artificial Sequence
  ENSG00000125637_14 (sequence is synthesized)
gatggggaacagccaagttccttgaagaaaaaggaggcaggggaggccccaaaaccaggcgaggaagtaaagagtgaaggaacagccaggcctgcagagactggagacgtccagcctgac

SEQ ID NO: 261935 - DNA, 120 bp, Artificial Sequence
  ENSG00000125637_15 (sequence is synthesized)
attcacctgacttctgcagaacatgagaatctgaggacaccgatgaactcttcttggcttcctgggagccctatgccccaagcacagtccccagaggaaggccagagaccaccagctgga

SEQ ID NO: 261936 - DNA, 120 bp, Artificial Sequence
  ENSG00000125637_16 (sequence is synthesized)
gacaagctagctaatggcgtcaggaacaacaaggtagcctggaacttggcctcacgcctctatcgcctggagggcttccggaagtctgaagtggctgcctacctgcagaagaacaatgac

SEQ ID NO: 261937 - DNA, 120 bp, Artificial Sequence
  ENSG00000125637_17 (sequence is synthesized)
tttagcagggctgtggctgaggagtacctgtccttcttccagtttggaggccagagtctggaccgagccctccggagcttcctccaggccttggtgctcagtggggagactcaggaacgg

SEQ ID NO: 261938 - DNA, 120 bp, Artificial Sequence
  ENSG00000125637_18 (sequence is synthesized)
gagcgaatcctctaccagttctccagacgcttccaccattgcaatccggggatcttcccctcagtagattctgtacacaccttgacatgtgcaatcatgctgcttaacacggacctgcat

SEQ ID NO: 261939 - DNA, 120 bp, Artificial Sequence
  ENSG00000125637_19 (sequence is synthesized)
ggacagaacattgggaagagcatgagctgccaggaattcataaccaacctgaatgggctgagggatggcgggaacttccccaaggagctgctgaaggccctctactggtctatccgcagc

SEQ ID NO: 261940 - DNA, 120 bp, Artificial Sequence
  ENSG00000125637_20 (sequence is synthesized)
gagaagctcgagtgggccgtggatgaagaagacacagccagacctgagaaggcccagccgtccctgccagctggcaagatgagcaagcccttccttcagctggctcaggatcccacagtg

SEQ ID NO: 261941 - DNA, 120 bp, Artificial Sequence
  ENSG00000125637_21 (sequence is synthesized)
cccacctacaagcagggcatcctggctcggaaaatgcatcaagatgcagacggcaagaagacgccatggggcaagcgtggctggaagatgttccacaccttactgcgagggatggttctc

SEQ ID NO: 261942 - DNA, 120 bp, Artificial Sequence
  ENSG00000125637_22 (sequence is synthesized)
tacttcctgaagcagggagaagaccactgtctggagggggagagcttggtggggcagatggtggatgagcccgtgggggtgcaccactcgctggccacccccgccacgcattacaccaag

SEQ ID NO: 261943 - DNA, 120 bp, Artificial Sequence
  ENSG00000125637_23 (sequence is synthesized)
aagccgcacgtcttccagctgcgcacggctgactggcgcctctacctcttccaggcacccactgccaaggagatgagctcctggatcgcgcgcatcaacttggctgcggccacgcactcc

SEQ ID NO: 261944 - DNA, 120 bp, Artificial Sequence
  ENSG00000125637_24 (sequence is synthesized)
gcgccgcccttccccgccgctgtgggctcccagcgcagattcgtgcggcccatcctgcccgtgggccccgcccagagctccctggaggagcagcatcgatcccacgagaactgcctggac

SEQ ID NO: 261945 - DNA, 120 bp, Artificial Sequence
  ENSG00000125637_25 (sequence is synthesized)
gctgccgcggacgacctgctggatctacagaggaacctgccggagcggcggggccgtggccgcgagctggaggagcaccgcctgcggaaggagtacctggagtacgagaaaacccgctac

SEQ ID NO: 261946 - DNA, 120 bp, Artificial Sequence
  ENSG00000125637_26 (sequence is synthesized)
gagacctacgtgcagctgctggtggcccgcctgcactgcccctctgatgctctggacctgtgggaggagcagctggggagggaagctggaggcactcgggagcccaagctcagcctgaag

SEQ ID NO: 261947 - DNA, 120 bp, Artificial Sequence
  ENSG00000125637_27 (sequence is synthesized)
aagtcccactcgagcccgtccctgcaccaggatgaggctcccaccacggccaaggtgaagcgcaacatctcagagcgcagaacctaccggaagatcatccctaagcggaaccgcaatcag

SEQ ID NO: 261948 - DNA, 120 bp, Artificial Sequence
  ENSG00000125637_28 (sequence is synthesized)
ctgtgaagccagcaccacctcagagacactgttccctgctccagggtagacctgagatgaacctccctggaggagacttatttcaatgagtccaccatgacggatgaggcacctcctttc

SEQ ID NO: 261949 - DNA, 120 bp, Artificial Sequence
  ENSG00000125637_29 (sequence is synthesized)
cctgctgaaggacaaaccttgtttccctgtggccctcattcttgtgctccctgaagctttcctaatattgctgtgctccccaccacccccatggcagtccctccgcagccccagtccctg

SEQ ID NO: 261950 - DNA, 120 bp, Artificial Sequence
  ENSG00000125637_30 (sequence is synthesized)
gccacgcccaagggaagagggaggtgaggacttgactttcctcccagagctcagcccatgtcaccctccaggccccagaatccagagtggcctcatttcctagacttgctgagaactcag

SEQ ID NO: 261951 - DNA, 120 bp, Artificial Sequence
  ENSG00000125637_31 (sequence is synthesized)
cacttgtttgagaaccagtgcttatgtggtgtgcccttggcttctgggggagagcttggggcagcagaggcccctgggcagcccagccaggggagccacagccccaaggatggtcttgct

SEQ ID NO: 261952 - DNA, 120 bp, Artificial Sequence
  ENSG00000125637_32 (sequence is synthesized)
ctgggaattaggtgaccttcctggggaggccccaggagagtgaatcagggactcttgagaaattcctaaccagcctcctgtgacccagggagcagggtcgctaaggtcctgcccactgag

SEQ ID NO: 261953 - DNA, 120 bp, Artificial Sequence
  ENSG00000125637_33 (sequence is synthesized)
gggacagccttctgggcagggacctcggggggcttcaagggctctgcacggctgtggggccctgtgcctttgtctccttgtgtctcctttcccccgaagtagatgaaacagtctcacata

SEQ ID NO: 261954 - DNA, 120 bp, Artificial Sequence
  ENSG00000125637_34 (sequence is synthesized)
cccaactgctcatcaacagagcagagctgatggcatgagtgagggctgggcggggtggggcctccagagctttgcagggaaccctggaaccctaggaacaaggagcctttgttccaacag

SEQ ID NO: 261955 - DNA, 120 bp, Artificial Sequence
  ENSG00000125637_35 (sequence is synthesized)
agcagagaaggaggttctctatgttcagaccactggagaggatagagaggtaaaaggtggcgacagtttcccttaggggtctgcctggcaggagccacagctcaggagagttgtgaggga

SEQ ID NO: 261956 - DNA, 120 bp, Artificial Sequence
  ENSG00000125637_36 (sequence is synthesized)
tgggacggaggctggcgaccaggcgaggcctaggccaggctcgggagacttttctgtgctcctttctacacatgccttaaaccttccttcctgtggggtgcctggaccccttccccatct

SEQ ID NO: 261957 - DNA, 120 bp, Artificial Sequence
  ENSG00000125637_37 (sequence is synthesized)
ctggcagctcagagggtctctgctgctctcccctgggaaatcccctcatcctgccctctggctgcctcccagctgggcttgttctctgagggaggttccggagactcatggacttggggc

SEQ ID NO: 261958 - DNA, 120 bp, Artificial Sequence
  ENSG00000125637_38 (sequence is synthesized)
tctgcctgtaggaaggaggctgggccggagggaccagccaccattgtctctgttcagccaagtgtgcaagtaggctgcccgccaagagggggcctctgctacccgctgctgcctgccggc

SEQ ID NO: 261959 - DNA, 120 bp, Artificial Sequence
  ENSG00000125637_39 (sequence is synthesized)
tgacacactgcctccccagccttcctgctaggccaccctcctcccttcccatgcttgtaaccagctctggggcttgcacctccacaaagtaaggttggcccttggaggccatgtttgggt

SEQ ID NO: 261960 - DNA, 120 bp, Artificial Sequence
  ENSG00000125637_40 (sequence is synthesized)
ctccggccagggcctagggctaggccatgcacccaatgggtgcacaataaataacaggtcaacaaagagggaggtgtgtcagtgtgtgaggaagggaggtcaggcagctaggaccacctg

SEQ ID NO: 261961 - DNA, 120 bp, Artificial Sequence
  ENSG00000125637_41 (sequence is synthesized)
cagtgtggcaggcttcatccctctttgctccaagtgtgtatgtgtgtctgtgcatgtgtgtagtgtctgtgtctgtgtgttcatgcatatgcaggagtcacacggtcataggccatcaaa

SEQ ID NO: 261962 - DNA, 120 bp, Artificial Sequence
  ENSG00000125637_42 (sequence is synthesized)
gctggaggagacctcagaatcattcattcacctacttgctcatttattcattcattcattttgcagataatatgggacgctttctatgtgccagtaccaggggattcacaaatgaattaa

SEQ ID NO: 261963 - DNA, 120 bp, Artificial Sequence
  ENSG00000125637_43 (sequence is synthesized)
acatgtccctgactccatgagttgacaatcttgcccactggtttcctgctctcagtttacagaggcacttttatcttgctggggaagtgtgctgaaaagacacattcccagcccacaccc

SEQ ID NO: 261964 - DNA, 120 bp, Artificial Sequence
  ENSG00000125637_44 (sequence is synthesized)
agggatgctgattcagtcagcctgggtcagagggatagataaatatgtttaaagctccttgggtaattctgatgtgtaagtagcagttagctgcagtagagtccaattgcctcatttgat

SEQ ID NO: 261965 - DNA, 120 bp, Artificial Sequence
  ENSG00000125637_45 (sequence is synthesized)
tgaagtggaatcccagcatcaagtggacatgacttttggcccaagactgatgcttacaaactaagtggagtaggttatttgacctcactgaacatgcatccttttttttttttttttttt

SEQ ID NO: 261966 - DNA, 120 bp, Artificial Sequence
  ENSG00000125637_46 (sequence is synthesized)
tttctaaaaccatgataaaaggtgaaagtctgaatgcatgtgtgtgtgacactttgatgctcctttgctcatgtagaaccggcacctctctttcacctgagcacgtggaatcttcagagc

SEQ ID NO: 261967 - DNA, 120 bp, Artificial Sequence
  ENSG00000125637_47 (sequence is synthesized)
cagatgatggtggctgcctggcctgccatagtcaatgctgcccaggcacctctgcctggagggtctgggttgtgggctgcagttatgacatgtgaccacttggaggcaggcttgcatctt

SEQ ID NO: 261968 - DNA, 120 bp, Artificial Sequence
  ENSG00000125637_48 (sequence is synthesized)
tctagcttctggctgctcaggtgtcctgctgtggagctgagctgtgctccctgaaaggcaggaagttattatgtgtgcccctgtgccatcaccgaaccaggaccttcaacttcgtaaaac

SEQ ID NO: 261969 - DNA, 120 bp, Artificial Sequence
  ENSG00000125637_49 (sequence is synthesized)
ccacagtggcctgggccaggactcccaccatctagggaagcctctcctagggaaaagactggggctctgacatcttcctgcagatggagagaaagaaagacatctcagaagtctatgggg

SEQ ID NO: 261970 - DNA, 120 bp, Artificial Sequence
  ENSG00000125637_50 (sequence is synthesized)
acagcctacagctccccacagggttgctccaggtaacgctggaaggtgaaagctgagcaggctccagtccccatcctaggtatggaacagatcaaaccaccacaggcctatgtctgacct

SEQ ID NO: 261971 - DNA, 120 bp, Artificial Sequence
  ENSG00000125637_51 (sequence is synthesized)
tgttcccaccccatgctcctctcccacctgtgtccttctctttgcaggagaagggacagacagaggttctcagtgatgagctcaggctctggaagggcacttgaagtttggctttagttc

SEQ ID NO: 261972 - DNA, 120 bp, Artificial Sequence
  ENSG00000125637_52 (sequence is synthesized)
ttcctttcccatataggggagctcagcttccagggtcctgggcctgctgtgacccaggttgttactcctgatataactgcttcctgggctctcatgatctcagctgagcctggctttctg

SEQ ID NO: 261973 - DNA, 120 bp, Artificial Sequence
  ENSG00000125637_53 (sequence is synthesized)
ctgatgatatttgtttgttgcttgccaggcaccagggtagataaaaagatcaccaagacccgcacctttttccttaggagggtctgagtcttcaggagacggagacatatggaatgtgtc

SEQ ID NO: 261974 - DNA, 120 bp, Artificial Sequence
  ENSG00000125637_54 (sequence is synthesized)
ggggttggaaggagcaggactggagggtcggggtgaggggggcagagggaaacagggccgtcagggtggcctgaggccagatcatacagggtctccaatgcagccaaggagagtggcttt

SEQ ID NO: 261975 - DNA, 120 bp, Artificial Sequence
  ENSG00000125637_55 (sequence is synthesized)
gtgatccagctgcctcggcctcccaaagcattgggatcacaggcgtgagccaacgtgcctggccagtgcagtgcaatttttaaagagaagagtgccaagctcagggcttggaggacagcc

SEQ ID NO: 261976 - DNA, 74 bp, Artificial Sequence
  ENSG00000125637_56 (sequence is synthesized)
cagtgcaatttttaaagagaagagtgccaagctcagggcttggaggacagcctagggattttgttttaagaaga

SEQ ID NO: 261977 - DNA, 84 bp, Artificial Sequence
  ENSG00000125637_57 (sequence is synthesized)
gaaaaagaaaaaaaagatgaaatgccttgaaaaagtaaggccaatgggtagggtcagaatatggcctgcaaatgcactgtacta

SEQ ID NO: 261978 - DNA, 120 bp, Artificial Sequence
  ENSG00000125637_58 (sequence is synthesized)
tgggtagggtcagaatatggcctgcaaatgcactgtactatttgtgtaacttatatgtaaatctgaaattatttcaaaataaatacaaaaagaaaaaaaggcaatatcccagaaccttgt

SEQ ID NO: 261979 - DNA, 120 bp, Artificial Sequence
  ENSG00000125637_59 (sequence is synthesized)
gaaaacctggccgtagcaggtcctttttcctcctgctgagctgagcaggcatgctcacagatcctcaaggtttcttgaatggctactgtcctccccactggcccctctgccaacacctct

SEQ ID NO: 261980 - DNA, 120 bp, Artificial Sequence
  ENSG00000125637_60 (sequence is synthesized)
gcccctcagcttttctgatgcccatgccccctcaccagctaactgtggcttgcacctttacctgttcccttcattttcccttctccagaggaagaggtgctctccacaagcctgtgacca

SEQ ID NO: 261981 - DNA, 120 bp, Artificial Sequence
  ENSG00000125637_61 (sequence is synthesized)
actgttcccctcagccggcacactggctcctcttctcctgcctgccacagacctctctccttcatgggcccactggggctctttgagcctattctctacccccttcattatcatgccttg

SEQ ID NO: 261982 - DNA, 120 bp, Artificial Sequence
  ENSG00000125637_62 (sequence is synthesized)
caaacaccatcatgagcaaaaatcaaagctggtgttagactctcttgctttccatagctgaccctggcttccctgctttctgtgatgaattcacggtatgtgtgggctttgccaactgtt

SEQ ID NO: 261983 - DNA, 120 bp, Artificial Sequence
  ENSG00000125637_63 (sequence is synthesized)
cccagcccttaccaggttcccattcatacctggctctaattcacaccttacaaatcggcgtccaccccacctttgcctgaaatggcacctcctagggcaattgatggctgcagtcatcaa

SEQ ID NO: 261984 - DNA, 120 bp, Artificial Sequence
  ENSG00000125637_64 (sequence is synthesized)
ctctgatgccttctcagccttcttccgccatcacctctcagcgacctttggccttgatagctatgtgatcatctaccagaccctgcacccaggctcagcctgatcttgccccagtggcca

SEQ ID NO: 261985 - DNA, 120 bp, Artificial Sequence
  ENSG00000125637_65 (sequence is synthesized)
ggcccttgagtgggactgccgggaattgagtccagcttttctagccatctgaccgtggccagttagcctcttatgttctgtttgcttctctataaaatggggataataacactacttatg

SEQ ID NO: 261986 - DNA, 120 bp, Artificial Sequence
  ENSG00000125637_66 (sequence is synthesized)
tcacaaggtcctcatgaagattaagtgaaattatgcacgtaaacatctcagaacaatgcctggcacagaagggacacctgtgaggttagctattaattcatagcctcaccagacttaccc

SEQ ID NO: 261987 - DNA, 120 bp, Artificial Sequence
  ENSG00000125637_67 (sequence is synthesized)
cacgtctgctcccctcctcctttgggctctggcttaggctctgccctcatgcatgccatcctgcttggatgctgggtagctttgcacttggctctgccttggcctgcaaataacaaatct

SEQ ID NO: 261988 - DNA, 120 bp, Artificial Sequence
  ENSG00000125637_68 (sequence is synthesized)
gagctcaaatgagctttagcagaaaaggactttgattggctccaatagctgaataatctgtatccaggtcaggtgaggcttcatctcgggcttcactctgattcaaggccccttttctct

SEQ ID NO: 261989 - DNA, 120 bp, Artificial Sequence
  ENSG00000125637_69 (sequence is synthesized)
cttgttcttttgggggctccatctcccaggcctatgagcaggaacaaccctcatgcttccaagatggccccaggaactctcaagatccattttcttggtgcaaatatagcagaaagtgac

SEQ ID NO: 261990 - DNA, 120 bp, Artificial Sequence
  ENSG00000125637_70 (sequence is synthesized)
tctctgcttcctggaagtttcaaactcaaatccaggaatagtctcctgtagcagcctgccttgggccgtgtgcccatatctgagccagtcactagagccaggggtttaaggagatcagag

SEQ ID NO: 261991 - DNA, 120 bp, Artificial Sequence
  ENSG00000125637_71 (sequence is synthesized)
tccacttctggagaggatgagagtgaagtcagcaccaccaaaacatagggaccagctgtggagaaattgtgagtactggaaggacaggataggaggaatggatgatggggagaaaaccga

SEQ ID NO: 261992 - DNA, 120 bp, Artificial Sequence
  ENSG00000125637_72 (sequence is synthesized)
ctaatatgcagatgccctttcctccaagaggccttccctaagtcttcctccttcagtttctattacatgaaactctgtaactctcctctcctctctcctcttcttttttttttttttttt

SEQ ID NO: 261993 - DNA, 120 bp, Artificial Sequence
  ENSG00000125637_73 (sequence is synthesized)
tgggattacaggcgtaagccaccacgccccggccctcttcatttctttttgcctctctgcttccagagcaacataaactccctgtgggcaggaactgggattgttgatttccactgcttc

SEQ ID NO: 261994 - DNA, 120 bp, Artificial Sequence
  ENSG00000125637_74 (sequence is synthesized)
ttccactgcttccccagggcctgatatctagagtcgaaagaatgcacatctcaaaactatgtcctggttctttttctactttcttgcatattctttttcaggcaggagtgcagtggcacg

SEQ ID NO: 261995 - DNA, 120 bp, Artificial Sequence
  ENSG00000125637_75 (sequence is synthesized)
tctcaaactcctgacctcgtgatccgccggcctctgcctcccaaagtactggtgcatattctttttctgtctttcctgctactccctcttgctcttcccacccctaaactatgtagcctc

SEQ ID NO: 261996 - DNA, 120 bp, Artificial Sequence
  ENSG00000125637_76 (sequence is synthesized)
ttgctcttcccacccctaaactatgtagcctcaaagatcttacctggctgactgctgggctttcaagatagtttctggaagaagtctctaaatctaagccttcaactctcatctctgttc

SEQ ID NO: 261997 - DNA, 120 bp, Artificial Sequence
  ENSG00000125637_77 (sequence is synthesized)
tgaatttcagacctggaattctaactgtccacaatacatggctcctcaatatatcttcctgaaattacaaatgaccatacggtacaggtgttactatattacctgtaagaccacactcgg

SEQ ID NO: 261998 - DNA, 120 bp, Artificial Sequence
  ENSG00000125637_78 (sequence is synthesized)
tgtcatctcctgcaaactagtcctctcctgactcctctgtttctgtgagtgattctgcgatggcttgaggtcatccgtttgctttgaaagatcacacaccaggatacatacagagatgtg

SEQ ID NO: 261999 - DNA, 120 bp, Artificial Sequence
  ENSG00000125637_79 (sequence is synthesized)
acccggatggatggacctttgcctcacaatcagggtagaagcctctggttttcttatttctttgtcctcctctgtggtgtgacacaggttcaggaggaggtacccagacacagaagagat

SEQ ID NO: 262000 - DNA, 120 bp, Artificial Sequence
  ENSG00000125637_80 (sequence is synthesized)
gctttccctgtgcaggcttgctgacagtcttgcccaccactcctggcctcctccctctacatgtccacattcgctgctctgaccctgagttggacccagctaggaattgtgacttcagtt

SEQ ID NO: 262001 - DNA, 120 bp, Artificial Sequence
  ENSG00000125637_81 (sequence is synthesized)
actagtatttcctctgagcctctagtcatggtcatgggctaatctgtatatgaaaacccacttgaaagaaatcccagtgctgaagaaagaattgaaacatacagatcgtttctttgctca

SEQ ID NO: 262002 - DNA, 120 bp, Artificial Sequence
  ENSG00000125637_82 (sequence is synthesized)
agggagtgtggatttcagtgctctcactgagcagaggctgagggtgaccaccttggatcttcctgcaggacacagcccagagaaactgagcctgaatttgctgccatgttttgaggacat

SEQ ID NO: 262003 - DNA, 120 bp, Artificial Sequence
  ENSG00000125637_83 (sequence is synthesized)
tatccacgctagtctctttcatctgggccgaggtgggtaattttccttagagtcaagtactagaaaaagttttgcttcttctaagagctggtacattgccctcttgtgaatgagagccat

SEQ ID NO: 262004 - DNA, 120 bp, Artificial Sequence
  ENSG00000125637_84 (sequence is synthesized)
gtatgtgaccacaacaccctttcagttgaccactaagagactgaaggccaattccggatcaactttacagccgcctacggcctgctataccacccatggcatagtttctgtggtctgatg

SEQ ID NO: 262005 - DNA, 120 bp, Artificial Sequence
  ENSG00000125637_85 (sequence is synthesized)
ctttattttttattgcattttactaatttatggcatgcatatcatatgagcagtctcaaatcctccccagaacaaggtgaggaatatattaatatttaaaataaaataaacaaaatgtca

SEQ ID NO: 262006 - DNA, 120 bp, Artificial Sequence
  ENSG00000125637_86 (sequence is synthesized)
ttttgtttccagcgggcattgcctgtgtgtggagagactctatatgtttgtttacgattgtatgtgttttcttgtgttggcatgttctgcatttgtgtgcatcctggtgagagactggag

SEQ ID NO: 262007 - DNA, 120 bp, Artificial Sequence
  ENSG00000125637_87 (sequence is synthesized)
gtggtgtgagggacagggggcatatgcacacttgcgtgtgtctgagtgtgtctggatgctggtgcccccacctacaacatttgtgttctgttcctggaacagcgccatggggcaagcgtg

SEQ ID NO: 262008 - DNA, 120 bp, Artificial Sequence
  ENSG00000125637_88 (sequence is synthesized)
cattcactgggcaagccgactgtgagccaggaagtgctcttggggagcccaggccaagccatccattcttgggtcctttggagggagataggcttggtcctgctccatctgcagcaccgt

SEQ ID NO: 262009 - DNA, 120 bp, Artificial Sequence
  ENSG00000125637_89 (sequence is synthesized)
tcattcttggatccatggttgccattaatgggtcccattatattgtgtttaagccagacagacttggggttaaatcctgcctctttaaaattaaatgaaggaaacgtacaaaaggaccag

SEQ ID NO: 262010 - DNA, 120 bp, Artificial Sequence
  ENSG00000125637_90 (sequence is synthesized)
catttcttaccgctgggtcttaatggtttagcaaaggtcctgagcccttagttgcctggaggcttgagtcctgggagcccgctgtctgctgcctctgcaagtgggagaggtcactgcccg

SEQ ID NO: 262011 - DNA, 120 bp, Artificial Sequence
  ENSG00000125637_91 (sequence is synthesized)
tctttattgataagaaatgccacggtcagaggtcgggtgcccggctagtggcagggctgtaactatgggaggctgagttctgagcagctggccagctgtgcaagcagccacaggaggggg

SEQ ID NO: 262012 - DNA, 120 bp, Artificial Sequence
  ENSG00000125637_92 (sequence is synthesized)
cgggaggagggtgacaggacggactctgtgtccccggggaccaacgacctcctttgccccagcactgccaaggagatgagctcctggatcgcgcgcatcaacttggctgcggccacgcac

SEQ ID NO: 262013 - DNA, 120 bp, Artificial Sequence
  ENSG00000125637_93 (sequence is synthesized)
aactgggaatgtgcacctggagccccaggactaactcggggaggctggaggcgggctgcgcacttggcctgggaaccgaggcggccaggggggcggcgcgcccgggcccggaaagcggcg

SEQ ID NO: 262014 - DNA, 120 bp, Artificial Sequence
  ENSG00000125637_94 (sequence is synthesized)
catcctgcagggactagaaagctgtctgggaggagctgtgtttgtgcctgggtgtttgccactacttggggtagtgggtgtgtgtttggagttggagagaagatgatatgtatgaatatc

SEQ ID NO: 262015 - DNA, 120 bp, Artificial Sequence
  ENSG00000125637_95 (sequence is synthesized)
ggccctgctgcacatcctgtgcaaccttgggcctctctcagccctgagggctggcagagaggaggtcctttttggccccaggtgactcttaactcccaggacagagcaaaggtcctgagc

SEQ ID NO: 262016 - DNA, 120 bp, Artificial Sequence
  ENSG00000125637_96 (sequence is synthesized)
gccctgccctagttctctctcccctgaccctgctgacacctgaggcttgtgggccccagggggtcctggtgggaatggccgtatgatcagaaattcttagaaagcggcagcaggaagagg

SEQ ID NO: 262017 - DNA, 120 bp, Artificial Sequence
  ENSG00000125637_97 (sequence is synthesized)
agctggggaccagggatgaagcccaggcatcgcctacttcctccccatccttggccaactttgccagcacagtatgccttttccttgtcagtgggataaagcctcccagttcagaacaca

SEQ ID NO: 262018 - DNA, 80 bp, Artificial Sequence
  ENSG00000125637_98 (sequence is synthesized)
gctcccggaaaccgagtccctcctgcgagcgcgcagagccggactggcccagccccccgcgcgcgcagccgaggccccgc

SEQ ID NO: 262019 - DNA, 120 bp, Artificial Sequence
  ENSG00000125637_99 (sequence is synthesized)
agctctcgccgcccccagccggcgcctgggcgcggggccgtggggcgcgcgggcccgcgggaggccggagcaggagcccggcgggaaatggggtagatatggattcccagtttctccagc

SEQ ID NO: 262020 - DNA, 120 bp, Artificial Sequence
  ENSG00000125637_100 (sequence is synthesized)
gtgccgatgcatgcacaggtgtgcagagagacagcccgcgttgaggacaggcagccagcccatgttccttcctcagtgcgtactgaacagtgaccatgtgctggatgctgtgtgaggcac

SEQ ID NO: 262021 - DNA, 120 bp, Artificial Sequence
  ENSG00000125637_101 (sequence is synthesized)
tagagggtaggtaggagaacccagacaaaacaggcctagttattcctgggccccagagtccctgtagtaaggtagagattagacaagtgtgtcaatgtctgcgaaaaaaatgtagcaaga

SEQ ID NO: 262022 - DNA, 80 bp, Artificial Sequence
  ENSG00000125648_0 (sequence is synthesized)
gtcaccacctcccgcaagtgccagagccgagcggactgcgcggaggctgcggagccggcggccgcgggagctgaccctgc

SEQ ID NO: 262023 - DNA, 120 bp, Artificial Sequence
  ENSG00000125648_1 (sequence is synthesized)
ggcctcccctcccccccgggcgggcgccatgcgggggagcccgggcgacgcggagcggcggcagcgctggggtcgcctgttcgaggagctggacagtaacaaggatggccgcgtggacgt

SEQ ID NO: 262024 - DNA, 120 bp, Artificial Sequence
  ENSG00000125648_2 (sequence is synthesized)
atggccgcgtggacgtgcacgagttgcgccaggggctggccaggctgggcgggggcaacccagaccccggcgcccaacagggtatctcctctgagggtgatgctgacccagatggcgggc

SEQ ID NO: 262025 - DNA, 120 bp, Artificial Sequence
  ENSG00000125648_3 (sequence is synthesized)
tcgacctggaggaattttcccgctatctgcaggagcgggaacagcgtctgctgctcatgtttcacagtcttgaccggaaccaggatggtcacattgatgtctctgagatccaacagagtt

SEQ ID NO: 262026 - DNA, 120 bp, Artificial Sequence
  ENSG00000125648_4 (sequence is synthesized)
tccgagctctgggcatttccatctcgctggagcaggctgagaaaattttgcacagcatggaccgagacggcacaatgaccattgactggcaagaatggcgcgaccacttcctgttgcatt

SEQ ID NO: 262027 - DNA, 120 bp, Artificial Sequence
  ENSG00000125648_5 (sequence is synthesized)
cgctggaaaatgtggaggacgtgctgtatttctggaagcattccacggtcctggacattggcgagtgcctgacagtgccggacgagttctcaaagcaagagaagctgacgggcatgtggt

SEQ ID NO: 262028 - DNA, 120 bp, Artificial Sequence
  ENSG00000125648_6 (sequence is synthesized)
ggaaacagctggtggccggcgcagtggcaggtgccgtgtcacggacaggcacggcccctctggaccgcctcaaggtcttcatgcaggtccatgcctcaaagaccaaccggctgaacatcc

SEQ ID NO: 262029 - DNA, 120 bp, Artificial Sequence
  ENSG00000125648_7 (sequence is synthesized)
ttggggggcttcgaagcatggtccttgagggaggcatccgctccctgtggcgcggcaatggtattaatgtactcaagattgcccccgagtcagctatcaagttcatggcctatgaacaga

SEQ ID NO: 262030 - DNA, 120 bp, Artificial Sequence
  ENSG00000125648_8 (sequence is synthesized)
tcaagagggccatcctggggcagcaggagacactgcatgtgcaggagcgcttcgtggctggctccctggctggtgccacagcccaaaccatcatttaccctatggaggtgctgaagacgc

SEQ ID NO: 262031 - DNA, 120 bp, Artificial Sequence
  ENSG00000125648_9 (sequence is synthesized)
ggctgaccttgcgccggacgggccagtataaggggctgctggactgcgccaggcgtatcctggagagggaggggccccgtgccttctaccgcggctacctccccaacgtgctgggcatca

SEQ ID NO: 262032 - DNA, 120 bp, Artificial Sequence
  ENSG00000125648_10 (sequence is synthesized)
tcccctatgcgggcatcgacctggccgtctacgagactctgaagaactggtggcttcagcagtacagccacgactcggcagacccaggcatcctcgtgctcctggcctgcggtaccatat

SEQ ID NO: 262033 - DNA, 120 bp, Artificial Sequence
  ENSG00000125648_11 (sequence is synthesized)
ccagcacctgcggccagatagccagttacccgctggccctggtccggacccgcatgcaggcacaagcctccatcgagggtggcccccagctgtccatgctgggtctgctacgtcacatcc

SEQ ID NO: 262034 - DNA, 120 bp, Artificial Sequence
  ENSG00000125648_12 (sequence is synthesized)
tgtcccaggagggcatgcggggcctctaccgggggatcgcccccaacttcatgaaggttattccagctgtgagcatctcctatgtggtctacgagaacatgaagcaggccttgggggtca

SEQ ID NO: 262035 - DNA, 120 bp, Artificial Sequence
  ENSG00000125648_13 (sequence is synthesized)
cgtccaggtgagggacccggagcccgtccccccaatccctcaccccccacacctcagccactggagactgatgatccaaccacaggatccctactctttggccacgagatcccagtaccc

SEQ ID NO: 262036 - DNA, 120 bp, Artificial Sequence
  ENSG00000125648_14 (sequence is synthesized)
atcctggatcctagactcctatgccccaaccattgggtcatgggatcccagcatccagatcctggatcctagactcctatgccccaaccactgggtcatgcgatccccacccttcagcca

SEQ ID NO: 262037 - DNA, 120 bp, Artificial Sequence
  ENSG00000125648_15 (sequence is synthesized)
ctagatcccagatccccctgtaaccataactgtggatcccttacttcagcaactcaagtctgctaccctaaccacaagattcaagattatccacaccccagcccttaatccccatccccc

SEQ ID NO: 262038 - DNA, 120 bp, Artificial Sequence
  ENSG00000125648_16 (sequence is synthesized)
aaatcactggatcctgcagccccacatcctaaggtggatcccacgcttccctgtgccccctactggatcctggacctctacgtcttaaccactggatcccacacaaatcagtgaatggat

SEQ ID NO: 262039 - DNA, 120 bp, Artificial Sequence
  ENSG00000125648_17 (sequence is synthesized)
cccaacaccccaaccacaggagcacggattccctgtacctcaacacccagaccctgcctccctcaggcaccagatccagtgtcctagtgaaacgctggatcctagatccccaaccccaga

SEQ ID NO: 262040 - DNA, 120 bp, Artificial Sequence
  ENSG00000125648_18 (sequence is synthesized)
tccccatgcctcgagccctggatctccaagctcagctgctggattctggatgtcaacaaacctcaccactggatcctgacaaccacaatgcctggatcctggggcccccatcactggatc

SEQ ID NO: 262041 - DNA, 120 bp, Artificial Sequence
  ENSG00000125648_19 (sequence is synthesized)
ccagatcccctcactccacccactggattcctgcattggtttttggttttttgtttttttttaacctcgacactgggtctcagatccttctgctgactgccagatccctgcatttcaagc

SEQ ID NO: 262042 - DNA, 120 bp, Artificial Sequence
  ENSG00000125648_20 (sequence is synthesized)
actacgccttccacccccaggcactggatcccagattcccaagccttcacccaccagattctggctcctaaaacaagtgcgggggccccagtggcacagcaagtggatcctggcaactgc

SEQ ID NO: 262043 - DNA, 120 bp, Artificial Sequence
  ENSG00000125648_21 (sequence is synthesized)
agctgctggattccagattctgggtccccaatccctctgcccagtccctcaatgttgaaacctcatctcttgaaggcagatcctgatattccaaggcactgaatcccaagccctgaatcc

SEQ ID NO: 262044 - DNA, 120 bp, Artificial Sequence
  ENSG00000125648_22 (sequence is synthesized)
ccggtttctgatctgaatcttccaggcgccgggtcccaaatgttcaggccccaagtctagatcctggcagcccagtcacagagtatcccacacacactggtgcccagagccggcttctca

SEQ ID NO: 262045 - DNA, 120 bp, Artificial Sequence
  ENSG00000125648_23 (sequence is synthesized)
tgacatgaaattgcatggtcgagggagtctgtggggaaggaagcccaggtcctggctgcaacctgcacggatgctggattccccctcaccccacctctgcatggccaccccctcccagcc

SEQ ID NO: 262046 - DNA, 120 bp, Artificial Sequence
  ENSG00000125648_24 (sequence is synthesized)
ctgtggggaaactgttccctggaaccactccactccctgcatccccacacttcacagcatcttccatccccctcccaccttctaggcgaatagtccccagagctgtgttcctccaagggg

SEQ ID NO: 262047 - DNA, 120 bp, Artificial Sequence
  ENSG00000125648_25 (sequence is synthesized)
tccgaggaatcactcactcctggaggctggcaaggagacagtctgaggccagggacacatgaagggatgtccccaccccagcactatcagggcctccccaggcttccagagttgaaagcc

SEQ ID NO: 262048 - DNA, 120 bp, Artificial Sequence
  ENSG00000125648_26 (sequence is synthesized)
aggagaaaatcggcaaagaccacccttccctaaacccaagcacccaatgatgcaaaaaacaaaaacaaaaaaaaaccaccaaatccccaaattcattccagatctatttttctaccagag

SEQ ID NO: 262049 - DNA, 120 bp, Artificial Sequence
  ENSG00000125648_27 (sequence is synthesized)
agaggagcaaagtcctcctcccctgcgcccttacattctgcacttcatagttggattctgagcttaggatcatctggagaccccatggagggacttggaaaggggaactgggatttgggg

SEQ ID NO: 262050 - DNA, 120 bp, Artificial Sequence
  ENSG00000125648_28 (sequence is synthesized)
aggggctggaggacttccgcacgcttccacctccttcgacctccactgcgccccacctccctgcctgtgtgtgttatttcaaaggaaaagaacaaaaggaataaattttctaagctcttt

SEQ ID NO: 262051 - DNA, 120 bp, Artificial Sequence
  ENSG00000125648_29 (sequence is synthesized)
atggagaggaccatgtggtaaggaactcagccaatagccatgtaactgagcttggaagaggatcttgctgtcctggccaacatctcactgcaattctatcagttgaattccctggatagt

SEQ ID NO: 262052 - DNA, 120 bp, Artificial Sequence
  ENSG00000125648_30 (sequence is synthesized)
ccaagctttgtggatccctccaccgaaacaactggatcccagtacctgaatcctgaatcttagactcttatacttcaaacactgatcacgggaacagccggctcagcggctcctgagttc

SEQ ID NO: 262053 - DNA, 120 bp, Artificial Sequence
  ENSG00000125648_31 (sequence is synthesized)
ctaatgctcagaatatgggtgagatgataaatgtttgttgtgttaagctgccaacctttggcgggggggtaattcgtcacatggcaacagctggctaatacatatatacctacatgtata

SEQ ID NO: 262054 - DNA, 120 bp, Artificial Sequence
  ENSG00000125648_32 (sequence is synthesized)
acggtgaggtgggggtggctttccccagctgaaggctgtgccctcttccccaggggggccttgctccgatctccccagggcttggatgggctggaccaggactttccagaaggagaaggc

SEQ ID NO: 262055 - DNA, 120 bp, Artificial Sequence
  ENSG00000125648_33 (sequence is synthesized)
tccacgctctcttctgctgggttctctgcctggataaaagattctacggctgaacagaatcgttcaaaaaccacggtcttggccaggcgcagtggctcacacctaaaatcccagcacttt

SEQ ID NO: 262056 - DNA, 120 bp, Artificial Sequence
  ENSG00000125648_34 (sequence is synthesized)
ccagcacctgcggccagatagccagttacccgctggccctggtccggacccgcatgcaggcacaaggctggagtacagtggctcgatttcagatcactgcaacctctgccttccaggttc

SEQ ID NO: 262057 - DNA, 120 bp, Artificial Sequence
  ENSG00000125648_35 (sequence is synthesized)
tattacaggatttcatcatgttgcccaggctcatctcgaactcgtggggtcaaggaattcgccagccttcagcctcccaacgtgctgggattacagccggtggtcatgccatgagcagcc

SEQ ID NO: 262058 - DNA, 120 bp, Artificial Sequence
  ENSG00000125648_36 (sequence is synthesized)
aaaacaaatctaagactgaatggctggggtctacaccttcagccaaccaggtcgacccggctcggcaggcctcctcccagctcccagttcacccaaaaacacctgcactataccaagact

SEQ ID NO: 262059 - DNA, 120 bp, Artificial Sequence
  ENSG00000125648_37 (sequence is synthesized)
cagtggtcatcaggactggggagaatgacttaacctccgcttccttatctgcaaagtgcgaacgccagtaccacctaccttatagggttttggcaaagacgactcgagagggtatctcct

SEQ ID NO: 262060 - DNA, 120 bp, Artificial Sequence
  ENSG00000125648_38 (sequence is synthesized)
gtccggacccgcatgcaggcacaagatgtgtcagtgtacaagacggacacggtccccaccctcatagagctcacaggccggagaggaaggaagatgctaaataaatcattctggaattaa

SEQ ID NO: 262061 - DNA, 120 bp, Artificial Sequence
  ENSG00000125648_39 (sequence is synthesized)
ttttaaaattcggttgttctcagggcatctgttttcaggagtagctatttctaggtgtcttcattcctggatgtagcgatttggtgggacagcttttccagggataaccaggttctcccc

SEQ ID NO: 262062 - DNA, 120 bp, Artificial Sequence
  ENSG00000125650_0 (sequence is synthesized)
atggccgtagggaagttcctgctgggctccctgctgctcctgtccctgcagctgggacagggctggggccccgatgcccgtggggttcccgtggccgatggagagttctcgtctgaacag

SEQ ID NO: 262063 - DNA, 120 bp, Artificial Sequence
  ENSG00000125650_1 (sequence is synthesized)
ctaggcctgggctacgcctcagaggagaaggtcatcttccgctactgcgccggcagctgcccccgtggtgcccgcacccagcatggcctggcgctggcccggctgcagggccagggccga

SEQ ID NO: 262064 - DNA, 120 bp, Artificial Sequence
  ENSG00000125650_2 (sequence is synthesized)
gcccacggcgggccctgctgccggcccactcgctacaccgacgtggccttcctcgatgaccgccaccgctggcagcggctgccccagctctcggcggctgcctgcggctgtggtggctga

SEQ ID NO: 262065 - DNA, 120 bp, Artificial Sequence
  ENSG00000125650_3 (sequence is synthesized)
ttacaggcgtgagccactgcacccacccacgcctggctgatgtttttattttactcatcctgactgaggtctgacaatcctagaagctgaagttcccgggcatccttttgtttcttctga

SEQ ID NO: 262066 - DNA, 120 bp, Artificial Sequence
  ENSG00000125650_4 (sequence is synthesized)
agctgaagttcccgggcatccttttgtttcttctgactccccttagtgatagattttcttgtgatttgggattggatgctcatggccagctgggggctctgtgggaatccggggtggcct

SEQ ID NO: 262067 - DNA, 120 bp, Artificial Sequence
  ENSG00000125650_5 (sequence is synthesized)
actttgcaggcagtccttccagatggttcagccttggctttcgctagctacccaggagcgccagccccagcccattttgtgtgtggttctcagcttgcaggtggccaccaaagccaaccc

SEQ ID NO: 262068 - DNA, 120 bp, Artificial Sequence
  ENSG00000125650_6 (sequence is synthesized)
cccccactgccccgattgtgggtccctatgtttgaggttcccggtgatgtttcggggggcttctcccttcttacaagctcggtcatgcatatatttgatctggcgttgccaggcattctg

SEQ ID NO: 262069 - DNA, 120 bp, Artificial Sequence
  ENSG00000125650_7 (sequence is synthesized)
taagggagggcttttccagttcctggaaatggaactggaaaatgtggctggaaacattaatatggctggaaatggaatttgcctgcagccactacttttgaacccatcttccgggcaatc

SEQ ID NO: 262070 - DNA, 120 bp, Artificial Sequence
  ENSG00000125650_8 (sequence is synthesized)
ccttctgtcttgccggtggttggaaacttgcaggtggaagtcttccccacccagttctgcagcccttggctgccgagcaggaatgcctgagatgtctggctaattcctcggaatgtccca

SEQ ID NO: 262071 - DNA, 120 bp, Artificial Sequence
  ENSG00000125650_9 (sequence is synthesized)
gttcaggccaacctccctcccccttctcccaccaggccttcttgggcagcagggaggcagctctggagggagccgctgcctcagcagtttcgccccagccacccccactgcctgggcctt

SEQ ID NO: 262072 - DNA, 120 bp, Artificial Sequence
  ENSG00000125650_10 (sequence is synthesized)
catgtaaggaggctgggtggtgaggccctgtggtgaggagcaggggttttgcattcacggaggacctgggttcaaataccaggaccgttgcttaattctgggtgacttcaggcttttttt

SEQ ID NO: 262073 - DNA, 89 bp, Artificial Sequence
  ENSG00000125650_11 (sequence is synthesized)
ctacacgccccaccacggtccagctaatttgttttttgggtttctgagacggagtttcatgctgctgcccaggctggagtgcagtggtg

SEQ ID NO: 262074 - DNA, 62 bp, Artificial Sequence
  ENSG00000125650_12 (sequence is synthesized)
gcctaatttttgtattttcgttagagacagggattcaccatgttggcctggctggtctcaaa

SEQ ID NO: 262075 - DNA, 71 bp, Artificial Sequence
  ENSG00000125650_13 (sequence is synthesized)
cgccaggcttttttgagacagtatcgctctgtcgcccaggtttgagtgcaatggcacaatctcagctcact

SEQ ID NO: 262076 - DNA, 62 bp, Artificial Sequence
  ENSG00000125650_14 (sequence is synthesized)
gaggcatgagccaccacgccaagcccaggcttttctttccatcggaaaattatcatctcaat

SEQ ID NO: 262077 - DNA, 120 bp, Artificial Sequence
  ENSG00000125650_15 (sequence is synthesized)
tcatcgaagcaatccctcacggatggagttgaggccacttccagactttcctaatatgaagaaggcatcagatgtccctgtgctggctgtttcacttgcctgtgtgggaggaaccccgca

SEQ ID NO: 262078 - DNA, 120 bp, Artificial Sequence
  ENSG00000125650_16 (sequence is synthesized)
aacagggctcctggggcagagggtgtaatttacaattccccagtagcagctgctcatccaaagagctgctagcaatttacacccccaccaacagcacagggtgcacctgggtcacacggg

SEQ ID NO: 262079 - DNA, 120 bp, Artificial Sequence
  ENSG00000125650_17 (sequence is synthesized)
ttgtgtgtgagggttttctgattttccccaatcttgtgggtgcttagagtcaagcaccccttcggacaatcacaagctgtttgcttgtttttgcattcgaagctacgggcactgccttac

SEQ ID NO: 262080 - DNA, 120 bp, Artificial Sequence
  ENSG00000125650_18 (sequence is synthesized)
actctaagtgcccatctctttcctcaccaagccgagtaggaggggttctgaggagctcccctgtaccggtgaggggactgggctcacacggggctgggtatggaagcctcgagagccctt

SEQ ID NO: 262081 - DNA, 120 bp, Artificial Sequence
  ENSG00000125650_19 (sequence is synthesized)
atctgtctgcatcgtgctagacgttaccatgacctggacagcctccatcgccccgggggctctgacatgctcagatcccaggatggggctgcagttataggggtctcaggttggccttcc

SEQ ID NO: 262082 - DNA, 120 bp, Artificial Sequence
  ENSG00000125650_20 (sequence is synthesized)
cgagacaggcgtccctgtccccttgtgtccccacccttggctgtccccaggcctctcccttttcctgttttgatgctggctcagccaggcccggagacaggggcatgatgtcctaatcct

SEQ ID NO: 262083 - DNA, 120 bp, Artificial Sequence
  ENSG00000125650_21 (sequence is synthesized)
ccaggcgggagccaccatggagggttcccgtggactcagtcccctgccaagccacctttcccagcactcacatatgctccacctggcacatgatacacgtgggggctcctgagccccagc

SEQ ID NO: 262084 - DNA, 120 bp, Artificial Sequence
  ENSG00000125650_22 (sequence is synthesized)
accctgacttagtggggagggaccccaccggggtcccatgaagccccctgacttccactccaggcagcaggtcgggggaacaccagttgcctgccctggccgccagcacagcactcgtaa

SEQ ID NO: 262085 - DNA, 120 bp, Artificial Sequence
  ENSG00000125650_23 (sequence is synthesized)
atcagggggtgtctggggcgtcggaaatggctgtgtggaatgtcggggtggggtaggctgggggtgagcccttaactcttagaagggtggggtgtggggcagaaggagcagatgcctgga

SEQ ID NO: 262086 - DNA, 120 bp, Artificial Sequence
  ENSG00000125650_24 (sequence is synthesized)
ttcgagggtgcaggagatgggctggtgcagacgtggggcctcctggctgcaggggccggcagtgaagaggttagctcccagcccaggcagggcataaatttggggcacagctcccactct

SEQ ID NO: 262087 - DNA, 120 bp, Artificial Sequence
  ENSG00000125650_25 (sequence is synthesized)
tgcagtgctgggggagctcggctgacttatttattggagacctggatgcagagacaacgaggaggggagtgggctggggcgaccagcagtgagtgcaataaaggacaccactctcccggc

SEQ ID NO: 262088 - DNA, 120 bp, Artificial Sequence
  ENSG00000125651_0 (sequence is synthesized)
ctcttccggttaccttttcccagcgccagaggcgcctagggttggggtcctcgctcaggcacagagacccgacaccgagcggcggcttccccgggatcgagggacgcgcacgccagagga

SEQ ID NO: 262089 - DNA, 120 bp, Artificial Sequence
  ENSG00000125651_1 (sequence is synthesized)
gacgaaaggaacccgggtcggaccagatcggaaccactgaccattgcccatggcggccctaggccctagcagccagaatgtcactgaatacgtcgttcgagttcctaagaatacaaccaa

SEQ ID NO: 262090 - DNA, 120 bp, Artificial Sequence
  ENSG00000125651_2 (sequence is synthesized)
aaaatataacatcatggcttttaatgcagccgacaaagtcaactttgctacgtggaatcaggctcggctggagcgggacttgagcaacaagaaaatctaccaagaggaggagatgcccga

SEQ ID NO: 262091 - DNA, 120 bp, Artificial Sequence
  ENSG00000125651_3 (sequence is synthesized)
atcgggcgcgggcagtgagttcaaccgcaagcttcgggaggaggctcggaggaagaagtacggcatcgtcctcaaggagttccggcccgaggaccagccctggctgctccgggtcaacgg

SEQ ID NO: 262092 - DNA, 120 bp, Artificial Sequence
  ENSG00000125651_4 (sequence is synthesized)
caaatcaggcaggaagttcaagggcatcaagaagggaggcgtaacagagaacacgtcctactacatcttcacccagtgccccgacggggccttcgaggccttccccgtgcacaactggta

SEQ ID NO: 262093 - DNA, 120 bp, Artificial Sequence
  ENSG00000125651_5 (sequence is synthesized)
caatttcacaccgctggcccggcatcgcacgctcactgccgaggaggccgaggaggagtgggagaggaggaacaaggtgctgaaccacttcagcatcatgcagcagcggcggctcaagga

SEQ ID NO: 262094 - DNA, 120 bp, Artificial Sequence
  ENSG00000125651_6 (sequence is synthesized)
tcaggaccaggacgaggatgaggaggagaaggagaaacgtggccgcaggaaggcgagcgagctgcgcatccacgacctggaggacgacctggagatgtcgtccgatgccagtgatgccag

SEQ ID NO: 262095 - DNA, 120 bp, Artificial Sequence
  ENSG00000125651_7 (sequence is synthesized)
tggtgaggaggggggcagagtccccaaggccaagaagaaggcgccgctggccaagggcggcaggaaaaagaagaagaagaagggttcagacgacgaggccttcgaggacagcgatgatgg

SEQ ID NO: 262096 - DNA, 120 bp, Artificial Sequence
  ENSG00000125651_8 (sequence is synthesized)
ggacttcgagggccaagaggtggactacatgtcagacggctccagtagctcccaagaagagcctgagagcaaggccaaggcgccgcagcaggaggaggggcccaagggtgtcgatgagca

SEQ ID NO: 262097 - DNA, 120 bp, Artificial Sequence
  ENSG00000125651_9 (sequence is synthesized)
gagcgacagtagtgaggagagtgaggaggagaagccgcctgaggaggacaaggaggaggaggaggagaagaaggcacccaccccgcaggagaagaagcgcaggaaagacagcagcgagga

SEQ ID NO: 262098 - DNA, 120 bp, Artificial Sequence
  ENSG00000125651_10 (sequence is synthesized)
gcgaggcctcctcagccctcttcatggcgaagaagaagacgccacccaagagagagcggaagccgtcgggagggagctcaaggggcaacagccgcccaggcacgcccagcgcagagggtg

SEQ ID NO: 262099 - DNA, 120 bp, Artificial Sequence
  ENSG00000125651_11 (sequence is synthesized)
gcagcacctcctccaccctgcgggcggctgccagcaaactcgagcaagggaagcgggtgagcgagatgcctgcagccaagcggttgcggctggacacgggaccccagagcctgtctggga

SEQ ID NO: 262100 - DNA, 120 bp, Artificial Sequence
  ENSG00000125651_12 (sequence is synthesized)
agtcgacaccccagccaccatcaggcaagacaacacccaacagcggcgacgtgcaggtgactgaggatgccgtgcgccgctacctgacacggaagcccatgaccactaaggacctgctga

SEQ ID NO: 262101 - DNA, 120 bp, Artificial Sequence
  ENSG00000125651_13 (sequence is synthesized)
aaaagttccagaccaagaagacagggctgagcagcgagcagacagtgaacgtgttggcccagatcctcaagcgactcaaccccgagcgcaagatgatcaacgacaaaatgcacttctccc

SEQ ID NO: 262102 - DNA, 120 bp, Artificial Sequence
  ENSG00000125651_14 (sequence is synthesized)
tcaaggagtgaggcttggtccaatacatggctctgccccccagaacttaaggctctcactgccccttcgccatcctagagtgaggctctgtccaatacatggctctgccctccagaactt

SEQ ID NO: 262103 - DNA, 120 bp, Artificial Sequence
  ENSG00000125651_15 (sequence is synthesized)
caggctctcagtgacccttcgacatcctgcttgctccctgactcccagggccccgtagttagcaattctggaaaagttaagccatctcctcctctggcccttccttctggaatcttcaga

SEQ ID NO: 262104 - DNA, 120 bp, Artificial Sequence
  ENSG00000125651_16 (sequence is synthesized)
tgcctgttaggccttcttattgtcctcctcctcctggctcggcctccctcacactgaccaagggcctgtgctgcccactgggtaacttctacagttctcccttccacttccctaagtctc

SEQ ID NO: 262105 - DNA, 120 bp, Artificial Sequence
  ENSG00000125651_17 (sequence is synthesized)
ctcccttccacttccctaagtctctcttcagctgtgacttatccaccacatagcccagtaagtcttcagttttggctgggcatgatggtgagcgcctgcagtcccagctacttgggaggc

SEQ ID NO: 262106 - DNA, 120 bp, Artificial Sequence
  ENSG00000125651_18 (sequence is synthesized)
ctgcattccagcctgggtgacagaatgaaatcctggcacaaaaaaaaaaaaaaagtagccaggcatggtggcgggagcctgttgtcccagctgttccgtaggctgaggcacgagattcac

SEQ ID NO: 262107 - DNA, 82 bp, Artificial Sequence
  ENSG00000125651_19 (sequence is synthesized)
atggtggcgggagcctgttgtcccagctgttccgtaggctgaggcacgagatcaccacgccactgcactccagcctgggtga

SEQ ID NO: 262108 - DNA, 120 bp, Artificial Sequence
  ENSG00000125651_20 (sequence is synthesized)
cctcagccctcttcatggcggtaaggcccagcccggtggcgggggaggcctgggcgtctgtttgcagactcacccacctcccaaccctgacctctgcagaagaagaagacgccacccaag

SEQ ID NO: 262109 - DNA, 120 bp, Artificial Sequence
  ENSG00000125651_21 (sequence is synthesized)
ctgctcttcttctgcctggggtcaggagaggatgggtctagcttctctggcagactgggaatccttggagtcttccgtatccagtgttgccaggcaaaacaggctgaatgaagctgggaa

SEQ ID NO: 262110 - DNA, 120 bp, Artificial Sequence
  ENSG00000125652_0 (sequence is synthesized)
cctctctcatgaccccgctccgggattatggccgggactgggctgctggcgctgcggacgctgccagggcccagctgggtgcgaggctcgggcccttccgtgctgagccgcctgcaggac

SEQ ID NO: 262111 - DNA, 120 bp, Artificial Sequence
  ENSG00000125652_1 (sequence is synthesized)
gcggccgtggtgcggcctggcttcctgagcacggcagaggaggagacgctgagccgagaactggagcccgagctgcgccgccgccgctacgaatacgatcactgggacgcggccatccac

SEQ ID NO: 262112 - DNA, 120 bp, Artificial Sequence
  ENSG00000125652_2 (sequence is synthesized)
ggcttccgagagacagagaagtcgcgctggtcagaagccagccgggccatcctgcagcgcgtgcaggcggccgcctttggccccggccagaccctgctctcctccgtgcacgtgctggac

SEQ ID NO: 262113 - DNA, 120 bp, Artificial Sequence
  ENSG00000125652_3 (sequence is synthesized)
ctggaagcccgcggctacatcaagccccacgtggacagcatcaagttctgcggggccaccatcgccggcctgtctctcctgtctcccagcgttatgcggctggtgcacacccaggagccg

SEQ ID NO: 262114 - DNA, 120 bp, Artificial Sequence
  ENSG00000125652_4 (sequence is synthesized)
tggaactcttgctggagccgggctccctctacatccttaggggctcagcccgttatgacttctcccatgagatccttcgggatgaagagtccttctttggggaacgccggattccccggg

SEQ ID NO: 262115 - DNA, 120 bp, Artificial Sequence
  ENSG00000125652_5 (sequence is synthesized)
gccggcgcatctccgtgatctgccgctccctccctgagggcatggggccaggggagtctggacagccgcccccagcctgctgacccccagctttctacagacaccagatttgtgaataaa

SEQ ID NO: 262116 - DNA, 120 bp, Artificial Sequence
  ENSG00000125652_6 (sequence is synthesized)
gttggggaatggacagcctaactgggacattgcagtggctgcttgctggggccgggatttgcaggggaacccaggatggcactggcccatagggagctccaggtgtggctggctggacac

SEQ ID NO: 262117 - DNA, 120 bp, Artificial Sequence
  ENSG00000125652_7 (sequence is synthesized)
atggtcaaagtcacaaggccgggagagtggtgtcctttattgcactcactgctggtcgccccagcccactcccctcctcgttgtctctgcatccaggtctccaataaataagtcagccga

SEQ ID NO: 262118 - DNA, 120 bp, Artificial Sequence
  ENSG00000125656_0 (sequence is synthesized)
gtagttccgccatcggacggaagccgaccggggcgtgcggagggatgtggcccggaatattggtagggggggcccgggtggcgtcatgcaggtaccccgcgctggggcctcgcctcgccg

SEQ ID NO: 262119 - DNA, 120 bp, Artificial Sequence
  ENSG00000125656_1 (sequence is synthesized)
ctcactttccagcgcagcggccgccgcagcggacactccagaacggcctggccctgcagcggtgcctgcacgcgacggcgacccgggctctcccgctcattcccatcgtggtggagcaga

SEQ ID NO: 262120 - DNA, 120 bp, Artificial Sequence
  ENSG00000125656_2 (sequence is synthesized)
cgggtcgcggcgagcgcgcctatgacatctactcgcggctgctgcgggagcgcatcgtgtgcgtcatgggcccgatcgatgacagcgttgccagccttgttatcgcacagctcctcttcc

SEQ ID NO: 262121 - DNA, 120 bp, Artificial Sequence
  ENSG00000125656_3 (sequence is synthesized)
tgcaatccgagagcaacaagaagcccatccacatgtacatcaacagccctggtggtgtggtgaccgcgggcctggccatctacgacacgatgcagtacatcctcaacccgatctgcacct

SEQ ID NO: 262122 - DNA, 120 bp, Artificial Sequence
  ENSG00000125656_4 (sequence is synthesized)
ggtgcgtgggccaggccgccagcatgggctccctgcttctcgccgccggcaccccaggcatgcgccactcgctccccaactcccgtatcatgatccaccagccctcaggaggcgcccggg

SEQ ID NO: 262123 - DNA, 120 bp, Artificial Sequence
  ENSG00000125656_5 (sequence is synthesized)
gccaagccacagacattgccatccaggcagaggagatcatgaagctcaagaagcagctctataacatctacgccaagcacaccaaacagagcctgcaggtgatcgagtccgccatggaga

SEQ ID NO: 262124 - DNA, 120 bp, Artificial Sequence
  ENSG00000125656_6 (sequence is synthesized)
gggaccgctacatgagccccatggaggcccaggagtttggcatcttagacaaggttctggtccaccctccccaggacggtgaggatgagcccacgctggtgcagaaggagcctgtagaag

SEQ ID NO: 262125 - DNA, 120 bp, Artificial Sequence
  ENSG00000125656_7 (sequence is synthesized)
cagcgccggcagcagaacctgtcccagctagcacctgagagctgggcctcctctccagaatcatgtggaggggccagaggcctgccagacccccagctgggccctgctcaccccttgttg

SEQ ID NO: 262126 - DNA, 120 bp, Artificial Sequence
  ENSG00000125656_8 (sequence is synthesized)
ctgggcttggaggggcctcttgaggaacttttaatttgcaggggtgcccgctatggacggggcattccagctgagacactgtgattttaaattaaatctttgtggtctttgctctgcgtc

SEQ ID NO: 262127 - DNA, 120 bp, Artificial Sequence
  ENSG00000125656_9 (sequence is synthesized)
tgggacaccctcccttctgcaccatgacagcgtgtacacatctgtgtttcacaggccccttctgcttttgtcctgaccccaagaggcaagccatgtcttccttcaacagattctcctgat

SEQ ID NO: 262128 - DNA, 120 bp, Artificial Sequence
  ENSG00000125656_10 (sequence is synthesized)
attccaggcagtgttcttttgtgaagaagacacaagaaaccctcctcaaaagagctccattcttgtggcagtagacagttactaaaaaaaacaaaacaggccaggcgcgctggctcacgc

SEQ ID NO: 262129 - DNA, 74 bp, Artificial Sequence
  ENSG00000125656_11 (sequence is synthesized)
gaggctgaggcagaagaattgcttgaacttaggaggtggaggttgcagtgagcaggatcacgccactgcccttc

SEQ ID NO: 262130 - DNA, 120 bp, Artificial Sequence
  ENSG00000125656_12 (sequence is synthesized)
tctgtctcaaaaaaaaaaaaaaacaaaaacaggaaaggtggcatgcaagtgtgagggtaagcgtgttacagttttttatggggtaatcagggaagccctcactgagaaggtggtggttga

SEQ ID NO: 262131 - DNA, 120 bp, Artificial Sequence
  ENSG00000125656_13 (sequence is synthesized)
ttgagcaaagcctcaaaggaggtgaggggtggagcctgtgtccaggcagagggcacagccagtgcaaaggccctgtgacaggactgtacctggcatgtgaggacctatgaggaggcccgt

SEQ ID NO: 262132 - DNA, 120 bp, Artificial Sequence
  ENSG00000125656_14 (sequence is synthesized)
gcatgtgaggacctatgaggaggcccgtggctgagggaaggtggaagagaggagatcaaaaagtagaggtgaaaattagccaggcgtgatggtgcacttgaacccgggaggcagaggttg

SEQ ID NO: 262133 - DNA, 120 bp, Artificial Sequence
  ENSG00000125656_15 (sequence is synthesized)
ccagcctgggcaacaaagcgagattctgtctccaaaaaaaaaaaagtggaggtgattgagaatagatcataaaaggcctgacatctaaaaggagggatgtgaaccatggagggttttgag

SEQ ID NO: 262134 - DNA, 120 bp, Artificial Sequence
  ENSG00000125656_16 (sequence is synthesized)
aagaggaaggaaaataaggatgactatgactcctgaggagtgcaccatgagcagaaactggagagcagttaggatagttggagtaatctagacgaaagctgatggcagccctggccgagt

SEQ ID NO: 262135 - DNA, 120 bp, Artificial Sequence
  ENSG00000125656_17 (sequence is synthesized)
gatgagaaaaagtcagattctagctaggtgggatgtgacagagagcagtttccagaaactccgagctgatggcccaaagcaggaagatggagacctgtcgcctgagatgggaagtgtagg

SEQ ID NO: 262136 - DNA, 120 bp, Artificial Sequence
  ENSG00000125656_18 (sequence is synthesized)
caaaggaacaggcttggggagggatcaggagttgattttggatatattatacctgatgttttgatatgtccctcgacatcagggtcaagaggttgaaataaaaacgtaggtgtcatcggc

SEQ ID NO: 262137 - DNA, 120 bp, Artificial Sequence
  ENSG00000125656_19 (sequence is synthesized)
gcggctgctgcgggagcgcatcgtgtgcgtcatgggcccggtgagcgccccgcgccgggaccctccccaggactctcccaagcgcctgccgacactccctgcgcccctccttccctggcc

SEQ ID NO: 262138 - DNA, 120 bp, Artificial Sequence
  ENSG00000125656_20 (sequence is synthesized)
ccagactttccctcaggctccgctccccttctaacccccttccctccccttctgactcccctcctggctcccggtcccccaacccgctcctcaccccttctctgctcctcggctcttaat

SEQ ID NO: 262139 - DNA, 120 bp, Artificial Sequence
  ENSG00000125656_21 (sequence is synthesized)
ctccgacttccttcctgacacctggcaccgctcccctcattcctacgctcaagactctccccagccattctcaccccttcctttcctgtgtccctagccccctgactccccccttcctgt

SEQ ID NO: 262140 - DNA, 120 bp, Artificial Sequence
  ENSG00000125656_22 (sequence is synthesized)
ctactctctccccatccccttctggggcctaaattcttccccatcccttttactttgggctctggtcccccttcctggttccctgacccatccccagcctcccttaaaactctctcccca

SEQ ID NO: 262141 - DNA, 73 bp, Artificial Sequence
  ENSG00000125656_23 (sequence is synthesized)
tggaattacaggcgtgagccaccgcgctgggccagccgggagtggatgtcttaaaatgtgcaggcacagaggc

SEQ ID NO: 262142 - DNA, 88 bp, Artificial Sequence
  ENSG00000125656_24 (sequence is synthesized)
acagaggcgggaggatcacgtgagctcaggagttcgaggccagccaggggaacataatgagaccttgtctctattaaagaaaaaaaaa

SEQ ID NO: 262143 - DNA, 120 bp, Artificial Sequence
  ENSG00000125657_0 (sequence is synthesized)
agtctctcgtcatggaatacgcctctgacgcttcactggaccccgaagccccgtggcctcccgcgccccgcgctcgcgcctgccgcgtactgccttgggccctggtcgcggggctgctgc

SEQ ID NO: 262144 - DNA, 120 bp, Artificial Sequence
  ENSG00000125657_1 (sequence is synthesized)
tgctgctgctgctcgctgccgcctgcgccgtcttcctcgcctgcccctgggccgtgtccggggctcgcgcctcgcccggctccgcggccagcccgagactccgcgagggtcccgagcttt

SEQ ID NO: 262145 - DNA, 120 bp, Artificial Sequence
  ENSG00000125657_2 (sequence is synthesized)
cgcccgacgatcccgccggcctcttggacctgcggcagggcatgtttgcgcagctggtggcccaaaatgttctgctgatcgatgggcccctgagctggtacagtgacccaggcctggcag

SEQ ID NO: 262146 - DNA, 120 bp, Artificial Sequence
  ENSG00000125657_3 (sequence is synthesized)
gcgtgtccctgacggggggcctgagctacaaagaggacacgaaggagctggtggtggccaaggctggagtctactatgtcttctttcaactagagctgcggcgcgtggtggccggcgagg

SEQ ID NO: 262147 - DNA, 120 bp, Artificial Sequence
  ENSG00000125657_4 (sequence is synthesized)
gctcaggctccgtttcacttgcgctgcacctgcagccactgcgctctgctgctggggccgccgccctggctttgaccgtggacctgccacccgcctcctccgaggctcggaactcggcct

SEQ ID NO: 262148 - DNA, 120 bp, Artificial Sequence
  ENSG00000125657_5 (sequence is synthesized)
tcggtttccagggccgcttgctgcacctgagtgccggccagcgcctgggcgtccatcttcacactgaggccagggcacgccatgcctggcagcttacccagggcgccacagtcttgggac

SEQ ID NO: 262149 - DNA, 120 bp, Artificial Sequence
  ENSG00000125657_6 (sequence is synthesized)
cccacctggacagagtccgaatcctactccatccttcatggagacccctggtgctgggtccctgctgctttctctacctcaaggggcttggcaggggtccctgctgctgacctccccttg

SEQ ID NO: 262150 - DNA, 120 bp, Artificial Sequence
  ENSG00000125657_7 (sequence is synthesized)
aggaccctcctcacccactccttccccaagttggaccttgatatttattctgagcctgagctcagataatatattatatatattatatatatatatatatttctatttaaagaggatcct

SEQ ID NO: 262151 - DNA, 120 bp, Artificial Sequence
  ENSG00000125657_8 (sequence is synthesized)
gagtttgtgaatggacttttttagaggagttgttttgggggggggggggtcttcgacattgccgaggctggtcttgaactcctggacttagacgatcctcctgcctcagcctcccaagca

SEQ ID NO: 262152 - DNA, 120 bp, Artificial Sequence
  ENSG00000125657_9 (sequence is synthesized)
actgggattcatcctttctattaattcattgtacttatttgcttatttgtgtgtattgagcatctgtaatgtgccagcattgtgcccaggctagggggctatagaaacatctagaaatag

SEQ ID NO: 262153 - DNA, 120 bp, Artificial Sequence
  ENSG00000125657_10 (sequence is synthesized)
actgaaagaaaatctgagttatggtaatacgtgaggaatttaaagactcatccccagcctccacctcctgtgtgatacttgggggctagcttttttctttctttcttttttttgagatgg

SEQ ID NO: 262154 - DNA, 120 bp, Artificial Sequence
  ENSG00000125657_11 (sequence is synthesized)
tcttgttctgtcaaccaggctagaatgcagcggtgcaatcatgagtcaatgcagcctccagcctcgacctcccgaggctcaggtgatcctcccatctcagcctctcgagtagctgggacc

SEQ ID NO: 262155 - DNA, 120 bp, Artificial Sequence
  ENSG00000125657_12 (sequence is synthesized)
acagttgtgtgccaccacacttggctaactttttaatttttttgcggagacggtattgctatgttgccaaggttgtttacatgccagtacaatttataataaacactcatttttcctccc

SEQ ID NO: 262156 - DNA, 120 bp, Artificial Sequence
  ENSG00000125675_0 (sequence is synthesized)
tgacgactcctgagttgcgcccatgctcttgtcagcttcgttttaggcgtagcatggccaggcagaagaaaatggggcaaagcgtgctccgggcggtcttctttttagtcctggggcttt

SEQ ID NO: 262157 - DNA, 120 bp, Artificial Sequence
  ENSG00000125675_1 (sequence is synthesized)
tgggtcattctcacggaggattccccaacaccatcagcataggtggacttttcatgagaaacacagtgcaggagcacagcgctttccgctttgccgtgcagttatacaacaccaaccaga

SEQ ID NO: 262158 - DNA, 120 bp, Artificial Sequence
  ENSG00000125675_2 (sequence is synthesized)
acaccaccgagaagcccttccatttgaattaccacgtagatcacttggattcctccaatagtttttccgtgacaaatgctttctgctcccagttctcgagaggggtgtatgccatctttg

SEQ ID NO: 262159 - DNA, 120 bp, Artificial Sequence
  ENSG00000125675_3 (sequence is synthesized)
gattctatgaccagatgtcaatgaacaccctgacctccttctgtggggccctgcacacatcctttgttacgcctagcttccccactgacgcagatgtgcagtttgtcatccagatgcgcc

SEQ ID NO: 262160 - DNA, 120 bp, Artificial Sequence
  ENSG00000125675_4 (sequence is synthesized)
cagccttgaagggcgctattctgagtcttctgggtcattacaagtgggagaagtttgtgtacctctatgacacagaacgaggattttccatcctccaagcgattatggaagcagcagtgc

SEQ ID NO: 262161 - DNA, 120 bp, Artificial Sequence
  ENSG00000125675_5 (sequence is synthesized)
aaaacaactggcaagtaacagcaaggtctgtgggaaacataaaggacgtccaagaattcaggcgcatcattgaagaaatggacaggaggcaggaaaagcgatacttgattgactgcgaag

SEQ ID NO: 262162 - DNA, 120 bp, Artificial Sequence
  ENSG00000125675_6 (sequence is synthesized)
tcgaaaggattaacacaattttggaacaggttgtgatcctagggaaacactcaagaggttatcactacatgctcgctaacctgggttttactgatattttactggaaagagtcatgcatg

SEQ ID NO: 262163 - DNA, 120 bp, Artificial Sequence
  ENSG00000125675_7 (sequence is synthesized)
ggggagccaacattacaggtttccagattgtcaacaatgaaaaccctatggttcagcagttcatacagcgctgggtgaggctggatgaaagggaattccctgaagccaagaatgcaccac

SEQ ID NO: 262164 - DNA, 120 bp, Artificial Sequence
  ENSG00000125675_8 (sequence is synthesized)
taaagtatacatctgcattgacacacgacgcaatactggtcatagcagaagctttccgctacctgaggaggcagcgagtagatgtgtcccggagaggaagtgctggagactgcttagcaa

SEQ ID NO: 262165 - DNA, 120 bp, Artificial Sequence
  ENSG00000125675_9 (sequence is synthesized)
atcctgctgtgccctggagtcaaggaattgatattgagagagctctgaaaatggtgcaagtacaaggaatgactggaaatattcaatttgacacttatggacgtaggacaaattatacca

SEQ ID NO: 262166 - DNA, 120 bp, Artificial Sequence
  ENSG00000125675_10 (sequence is synthesized)
tcgatgtgtatgaaatgaaagtcagtggctctcgaaaagctggctactggaatgagtatgaaaggtttgtgcctttctcagatcagcaaatcagcaatgacagtgcatcctcagagaatc

SEQ ID NO: 262167 - DNA, 120 bp, Artificial Sequence
  ENSG00000125675_11 (sequence is synthesized)
agacctagcctatgaaatagccaaacatgtaaggatcaaatacaaattgtccatcgttggtgacgggaaatatggtgcaagggatccagagactaaaatatggaacggcatggttgggga

SEQ ID NO: 262168 - DNA, 120 bp, Artificial Sequence
  ENSG00000125675_12 (sequence is synthesized)
acttgtctatgggagagctgatatagctgttgctccactcactataacattggtccgtgaagaagtcatagatttttcaaagccattcatgagcctgggcatctccatcatgataaagaa

SEQ ID NO: 262169 - DNA, 120 bp, Artificial Sequence
  ENSG00000125675_13 (sequence is synthesized)
gcctcagaaatcaaaaccaggcgtattctcatttctggatcccctggcttatgaaatctggatgtgcattgtctttgcttacattggagtcagcgtagttcttttcctagtcagcaggtt

SEQ ID NO: 262170 - DNA, 120 bp, Artificial Sequence
  ENSG00000125675_14 (sequence is synthesized)
cagtccttatgaatggcacttggaagacaacaatgaagaacctcgtgacccacaaagtcctcctgatcctccaaatgaatttggaatatttaacagtctttggttttccttgggtgcctt

SEQ ID NO: 262171 - DNA, 120 bp, Artificial Sequence
  ENSG00000125675_15 (sequence is synthesized)
tatgcagcaaggatgtgatatttctccaagatcactctccgggcgcattgttggaggggtttggtggttcttcaccctgatcataatttcttcctatactgccaatctcgctgctttcct

SEQ ID NO: 262172 - DNA, 120 bp, Artificial Sequence
  ENSG00000125675_16 (sequence is synthesized)
gactgtggagaggatggtttctcccatagagagtgctgaagacttagctaaacagactgaaattgcatatgggaccctggactccggttcaacaaaagaatttttcagaagatccaaaat

SEQ ID NO: 262173 - DNA, 120 bp, Artificial Sequence
  ENSG00000125675_17 (sequence is synthesized)
tgctgtgtacgagaaaatgtggtcttacatgaaatcagcggagccatctgtgtttaccaaaacaacagcagacggagtggcccgagtgcgaaagtccaagggaaagttcgccttcctgct

SEQ ID NO: 262174 - DNA, 120 bp, Artificial Sequence
  ENSG00000125675_18 (sequence is synthesized)
ggagtcaaccatgaatgagtacattgagcagagaaaaccatgtgatacgatgaaagttggtggaaatctggattccaaaggctatggtgtggcaacccctaaaggctcagcattaagaaa

SEQ ID NO: 262175 - DNA, 120 bp, Artificial Sequence
  ENSG00000125675_19 (sequence is synthesized)
tgctgttaacctggcagtattaaaactgaatgagcaaggcctcttggacaaattgaaaaacaaatggtggtacgacaaaggagagtgcggcagcgggggcggtgactccaaggacaagac

SEQ ID NO: 262176 - DNA, 120 bp, Artificial Sequence
  ENSG00000125675_20 (sequence is synthesized)
cagcgctctgagcctgagcaatgtggcaggcgttttctatatacttgtcggaggtctggggctggccatgatggtggctttgatagaattctgttacaaatcacgggcagagtccaaacg

SEQ ID NO: 262177 - DNA, 120 bp, Artificial Sequence
  ENSG00000125675_21 (sequence is synthesized)
catgaaactcacaaagaacacccaaaactttaagcctgctcctgccaccaacactcagaattatgctacatacagagaaggctacaacgtgtatggaacagagagtgttaagatctaggg

SEQ ID NO: 262178 - DNA, 120 bp, Artificial Sequence
  ENSG00000125675_22 (sequence is synthesized)
aagaaaggaagagagagcgagcgagagagagcgagcgaataagagagagagtaagagggagagagaagaagaggaagaagaggaggcggcggcagcggaggaggaggaggactagtgtgg

SEQ ID NO: 262179 - DNA, 120 bp, Artificial Sequence
  ENSG00000125675_23 (sequence is synthesized)
aacgtggctgcttcaaggatcctgagccagatttcactctccttggtgtcgggcatgacacgaatattgctgatggtgcaatgacctttcaataggaaaaactgatttttttttccttca

SEQ ID NO: 262180 - DNA, 120 bp, Artificial Sequence
  ENSG00000125675_24 (sequence is synthesized)
gtgccttatggaacactctgagactcgcgacaatgcaaaccatcattgaaatctttttgctttgcttgaaaaaaaataattaaaataaaaaccaacaaaaatggacatgcaagattccag

SEQ ID NO: 262181 - DNA, 120 bp, Artificial Sequence
  ENSG00000125675_25 (sequence is synthesized)
gcaagattccagtatgcgaaaaaaaatcttattaagtcaattcaacaaaagccattctttgataccactgcagagtatataaacaccatgttctttaatacacacacacacacacacaca

SEQ ID NO: 262182 - DNA, 120 bp, Artificial Sequence
  ENSG00000125675_26 (sequence is synthesized)
catttaaattccaattcagcaaagaggcccatctaagctaaaaaaattaattcttcctgattaaaaagaaaaaatctgtctcccagtgtttgggaagacggactggcatttcttctagga

SEQ ID NO: 262183 - DNA, 120 bp, Artificial Sequence
  ENSG00000125675_27 (sequence is synthesized)
tctgctgaccagatgtttttggtatttcctgttggtggtgatgttctgtgcactctatttcctttcaatgttgctgaaatgtgtatatctttagaatgtaaatgcaacacttaagaaaat

SEQ ID NO: 262184 - DNA, 120 bp, Artificial Sequence
  ENSG00000125675_28 (sequence is synthesized)
tcaaacactttggaaaagggactaaacagtgatttctctgtgttcttgaaatggttttgtgaaaatgctttgataacttcccactcaaagaagagatttacagagctttcgaaattgact

SEQ ID NO: 262185 - DNA, 120 bp, Artificial Sequence
  ENSG00000125675_29 (sequence is synthesized)
ttgtgtgtagcaagggacggggcactatcaggatacctcttggtgctttcctaaaatggatcccggggctttccaaggagcctggaatttcagctcacagatctgtttttcttgcttcag

SEQ ID NO: 262186 - DNA, 120 bp, Artificial Sequence
  ENSG00000125675_30 (sequence is synthesized)
tgtgcattttaagtcaatagagctgagtatctagcattgaggtgagggaaatgctgcctatactcccagatgtgtttagaatatctcagaaacaacactgtgtttagctcggctttctct

SEQ ID NO: 262187 - DNA, 120 bp, Artificial Sequence
  ENSG00000125675_31 (sequence is synthesized)
gctaagtatgcctttcaagtgtacaccacggagacaggaccgcgttgcaaggcgggacagcaggttcagaccacagttctcagtctgactttactcttgctaggtctgtcctactagctg

SEQ ID NO: 262188 - DNA, 120 bp, Artificial Sequence
  ENSG00000125675_32 (sequence is synthesized)
ttgcctgctaccgcccatggctctccatcggactgcatgtgtccttttctagtttgcaaagactaaaatgcattcccaaacctactgctaatctgagggcctcagcatcacttccagatc

SEQ ID NO: 262189 - DNA, 120 bp, Artificial Sequence
  ENSG00000125675_33 (sequence is synthesized)
cttgcttggagcagtctctctattgactctctcagatcgctccactgctccatgggctatcaagtaactaactgcatacctgccgttggcatcatcagaacagtccgaagaaatagtctc

SEQ ID NO: 262190 - DNA, 120 bp, Artificial Sequence
  ENSG00000125675_34 (sequence is synthesized)
cactcactaattacctcctatataacgacgtatgcttcctgtagttcagtagtttgctctcatcgataacgtgcattgggaagtttccagactgcaaaaactaggagctcgcattcattt

SEQ ID NO: 262191 - DNA, 120 bp, Artificial Sequence
  ENSG00000125675_35 (sequence is synthesized)
cccaagtgtgacccttagatgcttagttgactcgctgcatatttgctcttgtcttcagaaaagaaaggaagaagtatcgttccaacgaaatgtttccagaaaagtgtactataaactttc

SEQ ID NO: 262192 - DNA, 120 bp, Artificial Sequence
  ENSG00000125675_36 (sequence is synthesized)
attccaaaaatggtgtcataagcaaacaactcacttgtcaaatttcaaatggtattgaacaaaaaaagaaagctgttgtgtttttgttttgttttgttttcatgaaactgtgattttcaa

SEQ ID NO: 262193 - DNA, 120 bp, Artificial Sequence
  ENSG00000125675_37 (sequence is synthesized)
cttatgaatgctataatgtcccagcgcgggaagctcacgctgtgtgaacatgaagttgtataaaacaaaccaaccaacctacacacaaatgttttcataggcactgtataaagaaaaatg

SEQ ID NO: 262194 - DNA, 120 bp, Artificial Sequence
  ENSG00000125675_38 (sequence is synthesized)
tatgtttattaactcaaatcagtttttcagagaggaaacgtcactgagatgaagaggcgggtaaattggtttgttattttttaaaaaaaacttgcatgtttaaaaaaaagttgattgctt

SEQ ID NO: 262195 - DNA, 120 bp, Artificial Sequence
  ENSG00000125675_39 (sequence is synthesized)
caaatttctgctactaacttcaagctatgggagtttggcagtagtcacttgaggattttttttccaattcttttctttttgttgttaaagctgtacttcagtgaacagaaaaattgccaa

SEQ ID NO: 262196 - DNA, 120 bp, Artificial Sequence
  ENSG00000125675_40 (sequence is synthesized)
gcaaactaatggctataaaagcgtaatttgcatgtgtgggcataaactacagagcctcattgccatgaggtattgtacaaagttttaatacattttgtaaataaaattgtaaagaaagaa

SEQ ID NO: 262197 - DNA, 120 bp, Artificial Sequence
  ENSG00000125675_41 (sequence is synthesized)
tgcaaagatcatgggctgctgcacctaaaatgttcaccaggtggggcccgccaaaactgggcctattgtatctggggcgttacaggtgaactgtaagatgagaacaagatcacaagtcag

SEQ ID NO: 262198 - DNA, 120 bp, Artificial Sequence
  ENSG00000125675_42 (sequence is synthesized)
cactacctcctcccttcttgagttctcaactgagtgagcatcatggagggagaagaaagaaagaagttcagcctgggtgtgtgaagctgtaaagttgcaggttgaacccaaacccatttt

SEQ ID NO: 262199 - DNA, 120 bp, Artificial Sequence
  ENSG00000125675_43 (sequence is synthesized)
agagacagaagaaactaccctctggagataaaataaaaagatgaagctgagatgggacaggatcaaagttgatgaaatatcaagagaggttaataaaggaacattaatttattcctcaaa

SEQ ID NO: 262200 - DNA, 120 bp, Artificial Sequence
  ENSG00000125675_44 (sequence is synthesized)
aattgtgttcaaacttcctcagcttatgtgccctttgcttccaataaataaaatctaattctgttttaaaattgtatttaatattccaaataaatcaaaggttaagattaaaaaataaaa

SEQ ID NO: 262201 - DNA, 120 bp, Artificial Sequence
  ENSG00000125675_45 (sequence is synthesized)
ggttgtgatcctagggaaacactcaagaggttatcactacatgctcgctaacctgttccctttgatactgagctctatctggcaaagacatctttgtacatttacatggaacttcccctg

SEQ ID NO: 262202 - DNA, 120 bp, Artificial Sequence
  ENSG00000125675_46 (sequence is synthesized)
gtaacaatcctaaagtgagaagacttggatattccatgaatgctttaacgaagacctctcagaggtcaagatgtacatttcagagtggacaatgagctgcagaaaattctagcttgttga

SEQ ID NO: 262203 - DNA, 120 bp, Artificial Sequence
  ENSG00000125675_47 (sequence is synthesized)
accaggagtacaacccagagatgtgatctactcaggctagaagtggacatcccaatagagcaagactctctctaacatggcgctgtttgtcaacgttagtcccagaattagccatcatgt

SEQ ID NO: 262204 - DNA, 120 bp, Artificial Sequence
  ENSG00000125675_48 (sequence is synthesized)
gtacaatctgtcagtcaagcagcctctcaatctctcatggtcttcttcttctgttctctactttccctttctttgttccgacattttttatgttctaaataaaaaattcaaatgctcaaa

SEQ ID NO: 262205 - DNA, 120 bp, Artificial Sequence
  ENSG00000125676_0 (sequence is synthesized)
atccgggcttctgctactagtgagaggaagatggcggccgcggctgtggtggttcccgcagagtggataaagaactgggagaaatcagggagaggcgaatttttgcatttatgtcggatc

SEQ ID NO: 262206 - DNA, 120 bp, Artificial Sequence
  ENSG00000125676_1 (sequence is synthesized)
ctcagtgaaaataaaagccatgatagttcaacatacagagatttccagcaagctctctatgagttgtcatatcatgtaattaaaggaaatctaaagcatgaacaggcatctaatgttctt

SEQ ID NO: 262207 - DNA, 120 bp, Artificial Sequence
  ENSG00000125676_2 (sequence is synthesized)
agtgacattagtgaatttcgtgaggatatgccctccattcttgctgatgtattctgcatattagacattgagacaaattgtttagaagaaaaaagcaagagagactattttacacagttg

SEQ ID NO: 262208 - DNA, 120 bp, Artificial Sequence
  ENSG00000125676_3 (sequence is synthesized)
gtattagcatgtttgtatttagtttcagacacagttctaaaggaacgcctggatccagaaacactggaatcattagggcttatcaaacaatcacagcaattcaatcaaaagtcagttaaa

SEQ ID NO: 262209 - DNA, 120 bp, Artificial Sequence
  ENSG00000125676_4 (sequence is synthesized)
atcaagacaaaactcttttataagcagcaaaaattcaatttgttaagagaagagaatgaaggttatgccaagctgattgctgaattggggcaagatttatctggaagtattactagtgat

SEQ ID NO: 262210 - DNA, 120 bp, Artificial Sequence
  ENSG00000125676_5 (sequence is synthesized)
ttaatcttagaaaatatcaaatctttaataggatgctttaatctggatcccaatagagttttggatgtcattttagaagtgtttgaatgcaggccagaacacgatgacttctttatatct

SEQ ID NO: 262211 - DNA, 120 bp, Artificial Sequence
  ENSG00000125676_6 (sequence is synthesized)
ttgttagaatcttacatgagtatgtgtgaaccgcaaacactgtgtcatattcttgggttcaaattcaagttttaccaggaaccaaatggcgagacaccatcatctttatacagagttgca

SEQ ID NO: 262212 - DNA, 120 bp, Artificial Sequence
  ENSG00000125676_7 (sequence is synthesized)
gcagtacttctacaatttaatcttattgatttagatgatctttatgtacatcttcttccggctgataattgcattatggatgaacacaaacgagaaattgcggaagctaagcaaattgtt

SEQ ID NO: 262213 - DNA, 120 bp, Artificial Sequence
  ENSG00000125676_8 (sequence is synthesized)
agaaagcttacgatggttgtgttgtcttctgaaaaaatggatgagcgagagaaagaaaaggaaaaagaagaggagaaagtagagaaaccacctgataaccaaaaacttggcttgttggaa

SEQ ID NO: 262214 - DNA, 120 bp, Artificial Sequence
  ENSG00000125676_9 (sequence is synthesized)
gccttattaaagattggtgattggcaacatgcacagaacattatggatcagatgcctccatactatgcagcttcacacaagctaatagcccttgctatttgcaagctcattcatataact

SEQ ID NO: 262215 - DNA, 120 bp, Artificial Sequence
  ENSG00000125676_10 (sequence is synthesized)
attgagcctctctaccgaagagttggagttcctaaaggtgctaaaggctcacctgttaatgctttgcaaaacaagagagcaccaaaacaagctgagagctttgaagatttgaggagagac

SEQ ID NO: 262216 - DNA, 120 bp, Artificial Sequence
  ENSG00000125676_11 (sequence is synthesized)
gtgttcaatatgttctgttaccttggtcctcacctttctcacgatcccattttatttgcaaaagtggtgcgcataggcaagtcatttatgaaggagtttcagtctgatggaagcaaacaa

SEQ ID NO: 262217 - DNA, 120 bp, Artificial Sequence
  ENSG00000125676_12 (sequence is synthesized)
gaagataaagaaaaaacggaagttatccttagctgtttgcttagcattactgaccaggtactacttccatctctttctttgatggactgcaatgcttgtatgtctgaggaactatgggga

SEQ ID NO: 262218 - DNA, 120 bp, Artificial Sequence
  ENSG00000125676_13 (sequence is synthesized)
atgtttaaaacatttccatatcagcatagatatcgtctgtatggccagtggaagaatgaaacttataacagtcacccacttttagtaaaagttaaagctcaaacaatagacagagccaaa

SEQ ID NO: 262219 - DNA, 120 bp, Artificial Sequence
  ENSG00000125676_14 (sequence is synthesized)
tatatcatgaagcgcctaaccaaggaaaatgtgaagccttctggaagacaaattgggaagttgagccacagcaatccaaccattttgtttgattatatcttgtcacaaatacagaagtat

SEQ ID NO: 262220 - DNA, 120 bp, Artificial Sequence
  ENSG00000125676_15 (sequence is synthesized)
gataacttaataacacctgtagtagattcattgaaatacctcacttcactgaattatgatgtcttggcctattgtatcattgaagctttagctaatccagaaaaggaaagaatgaaacat

SEQ ID NO: 262221 - DNA, 120 bp, Artificial Sequence
  ENSG00000125676_16 (sequence is synthesized)
gatgacacaaccatctcaagctggcttcagagtctggctagtttctgtggtgcagtttttcgtaaatatccaattgatcttgctggtcttcttcagtatgttgccaatcagctaaaggcg

SEQ ID NO: 262222 - DNA, 120 bp, Artificial Sequence
  ENSG00000125676_17 (sequence is synthesized)
ggcaaaagttttgacctgcttatattgaaagaagtggtacaaaaaatggcaggaatagaaattacagaggaaatgacaatggagcaactagaggctatgactggtggagagcagctaaaa

SEQ ID NO: 262223 - DNA, 120 bp, Artificial Sequence
  ENSG00000125676_18 (sequence is synthesized)
gctgagggtggttattttggtcagatcagaaacactaaaaaatcctctcagagattaaaggatgctctattggaccatgatcttgcccttcctctctgtctgcttatggctcagcagaga

SEQ ID NO: 262224 - DNA, 120 bp, Artificial Sequence
  ENSG00000125676_19 (sequence is synthesized)
aatggggtaatctttcaggaaggtggagagaaacatttgaaacttgtgggaaagctctatgaccagtgtcatgataccctggtgcagtttggtgggtttttagcatctaatctgagcaca

SEQ ID NO: 262225 - DNA, 120 bp, Artificial Sequence
  ENSG00000125676_20 (sequence is synthesized)
gaagattatataaagcgagtgccttcaattgatgtactctgtaatgaatttcatacaccccatgatgcagcatttttcctgtctaggccaatgtatgcccatcatatttcgtcaaagtat

SEQ ID NO: 262226 - DNA, 120 bp, Artificial Sequence
  ENSG00000125676_21 (sequence is synthesized)
gatgaacttaaaaaatcagaaaagggaagtaaacagcaacataaagttcataagtacattacatcatgtgagatggtgatggcgcctgtccatgaagcagtggtctccttacatgtttcc

SEQ ID NO: 262227 - DNA, 120 bp, Artificial Sequence
  ENSG00000125676_22 (sequence is synthesized)
aaagtctgggatgacatcagccctcaattctatgctacattctggtcattgacaatgtatgaccttgcagttccacacaccagctatgaacgagaagtcaataaacttaaagtccagatg

SEQ ID NO: 262228 - DNA, 120 bp, Artificial Sequence
  ENSG00000125676_23 (sequence is synthesized)
gcttcttgaagaagaaaagaaacagatggaacatgtacagagagttctacagagattgaaactggaaaaggacaactggcttttagcaaaatctaccaaaaatgagaccatcacaaaatt

SEQ ID NO: 262229 - DNA, 120 bp, Artificial Sequence
  ENSG00000125676_24 (sequence is synthesized)
tctacagctgtgtatatttcctcgatgtattttttcagcaattgatgctgtttactgtgctcgttttgttgaattggtacatcaacagaaaactccaaatttttccacacttctttgcta

SEQ ID NO: 262230 - DNA, 120 bp, Artificial Sequence
  ENSG00000125676_25 (sequence is synthesized)
tgatcgagttttctctgacataatttacacagttgcaagctgtactgaaaatgaagccagtcgatacggaaggtttctttgctgcatgttagagactgtgaccaggtggcatagtgatag

SEQ ID NO: 262231 - DNA, 120 bp, Artificial Sequence
  ENSG00000125676_26 (sequence is synthesized)
agccacatatgaaaaggaatgtggaaactatccaggattccttaccatattacgggcaactggatttgatggtggaaataaggctgatcaattagactatgaaaattttcgacatgttgt

SEQ ID NO: 262232 - DNA, 120 bp, Artificial Sequence
  ENSG00000125676_27 (sequence is synthesized)
acataaatggcattacaaactaaccaaggcatcggtacattgccttgaaacaggcgaatatactcacatcaggaatatcttgattgtgctaacaaaaatacttccttggtacccaaaagt

SEQ ID NO: 262233 - DNA, 120 bp, Artificial Sequence
  ENSG00000125676_28 (sequence is synthesized)
tttgaatctgggtcaagctttggaaagaagagtacacaaaatctgccaagaagaaaaagagaagaggccagatctatatgcattggctatgggctactctgggcagttgaaaagtagaaa

SEQ ID NO: 262234 - DNA, 120 bp, Artificial Sequence
  ENSG00000125676_29 (sequence is synthesized)
gtcatacatgatacctgaaaatgagtttcatcacaaagacccccctccgaggaatgcagttgccagtgtgcaaaatgggcctggtggtgggccttcttcatcatcaataggaagtgcatc

SEQ ID NO: 262235 - DNA, 120 bp, Artificial Sequence
  ENSG00000125676_30 (sequence is synthesized)
taaatcggatgaaagcagtactgaggagactgataaatcaagggagagatctcagtgtggtgtgaaagctgttaataaagcttctagtaccacacctaaagggaattcaagcaatggaaa

SEQ ID NO: 262236 - DNA, 120 bp, Artificial Sequence
  ENSG00000125676_31 (sequence is synthesized)
tagtggctctaacagcaacaaagctgttaaagaaaatgacaaagaaaaagggaaagagaaagaaaaagagaaaaaagaaaagactccagctactactccagaggccagggtacttggtaa

SEQ ID NO: 262237 - DNA, 120 bp, Artificial Sequence
  ENSG00000125676_32 (sequence is synthesized)
agatggtaaagaaaaaccaaaggaagagcggccaaataaagatgaaaaagcaagagagaccaaggaaagaacgccgaagtctgacaaagagaaagaaaaattcaagaaggaagaaaaagc

SEQ ID NO: 262238 - DNA, 120 bp, Artificial Sequence
  ENSG00000125676_33 (sequence is synthesized)
taaagatgagaaatttaagaccactgtccccaacgcagaatcaaaatcaactcaagaaagggaaagagagaaggagccatccagagaaagagatatagcaaaggaaatgaaatcaaagga

SEQ ID NO: 262239 - DNA, 120 bp, Artificial Sequence
  ENSG00000125676_34 (sequence is synthesized)
aaatgttaaaggaggagaaaaaacaccagtttctgggtccttgaaatcacctgttcccagatcagatattccagagcctgaaagggaacaaaaacgccgcaaaattgatactcacccttc

SEQ ID NO: 262240 - DNA, 120 bp, Artificial Sequence
  ENSG00000125676_35 (sequence is synthesized)
tccatcacattcctccacagtaaaggacagtctcatcgaactcaaggaatcttcagcaaagctctacattaatcatactcctccaccactgtccaagagtaaggagagagaaatggacaa

SEQ ID NO: 262241 - DNA, 120 bp, Artificial Sequence
  ENSG00000125676_36 (sequence is synthesized)
gaaagatttggacaagtcaagggaaagatccagagaaagagagaaaaaagatgaaaaggacaggaaagagcggaaaagggatcactcaaacaacgaccgtgaagtgccaccggacttaac

SEQ ID NO: 262242 - DNA, 120 bp, Artificial Sequence
  ENSG00000125676_37 (sequence is synthesized)
caagagacgtaaagaggagaatggaacaatgggggtttcaaaacataaaagtgaaagtccttgtgaatctccttatccaaatgagaaagacaaggaaaaaaataagtcaaaatcttcagg

SEQ ID NO: 262243 - DNA, 120 bp, Artificial Sequence
  ENSG00000125676_38 (sequence is synthesized)
caaagaaaaaggcagtgattcatttaaatctgagaagatggataaaatctcctccggtggcaaaaaggagtccaggcatgataaagaaaagatagaaaagaaagagaaacgggacagttc

SEQ ID NO: 262244 - DNA, 120 bp, Artificial Sequence
  ENSG00000125676_39 (sequence is synthesized)
aggaggaaaggaagagaagaaacatcataagtcctcggacaagcacagataatgaagactttccatcaaggtgagatcggactggaactgttcggctgcgaccagaaatttattttcctg

SEQ ID NO: 262245 - DNA, 120 bp, Artificial Sequence
  ENSG00000125676_40 (sequence is synthesized)
agtaaattgccgagaattaagaatgaagagggccatttgcatctccttaaattattcagttacctgctttattgctccatgtggaaaacttaaaattgttaagttgtgcattactgtatt

SEQ ID NO: 262246 - DNA, 120 bp, Artificial Sequence
  ENSG00000125676_41 (sequence is synthesized)
ttaacttgttgcttagtttctacatgtttattttcagtaatggctgaaagtgttaactgttccatacttttagcacaatgtgctgcataaggttacctgtgtacagagttttactttaga

SEQ ID NO: 262247 - DNA, 120 bp, Artificial Sequence
  ENSG00000125676_42 (sequence is synthesized)
ttaactaaatattgcctgggttcagtttttatttccattctgaaatgcttcctttttattgtttgaaactgaaaataaacaattgttgaacccttttgattttacctcattttaaaactg

SEQ ID NO: 262248 - DNA, 120 bp, Artificial Sequence
  ENSG00000125676_43 (sequence is synthesized)
ttttaatttattatttggcttgttcttaatattagtcactaaaagcagtgggagcattgtcttatgaaatgcttaggaatcattttatatagtacatgtacaacattaaacgtgtttaaa

SEQ ID NO: 262249 - DNA, 120 bp, Artificial Sequence
  ENSG00000125676_44 (sequence is synthesized)
aaagaaaaaggtaccagcgatcacttgtcccttgccattttttcttgtaattatgttagacaaatcttggcggcggggggatcaaaacataattgttttaattctacagctgtaggagct

SEQ ID NO: 262250 - DNA, 120 bp, Artificial Sequence
  ENSG00000125676_45 (sequence is synthesized)
ttgtattgctgaactttcatctggaaaagtttcacagtgacatttttaaaagagaatttttttatctgccgaattctaccagtgtaaccttttttctaaataaacaatagttttctcaaa

SEQ ID NO: 262251 - DNA, 120 bp, Artificial Sequence
  ENSG00000125676_46 (sequence is synthesized)
agataatgaagactttccatcaaggtaatgcacttaatgctttatgtgagatttaaaaagtattttacccatcttaaataaattgtgtttccatcatagtggatacagtgttcagaccct

SEQ ID NO: 262252 - DNA, 120 bp, Artificial Sequence
  ENSG00000125676_47 (sequence is synthesized)
tcactctcagaatgatatctcccataattaagagcttctggtgctgtccatttaatgggaatctgctttaagtcagaagatgagtacacaccaccatcctcttgacgagacattccaaag

SEQ ID NO: 262253 - DNA, 120 bp, Artificial Sequence
  ENSG00000125676_48 (sequence is synthesized)
tcactgattttcagaacattattttcacctccaggcagtttcttacagcaaggtccctgtgtatacattttttactcgagatacaccatccagaatcagcatctaatgaaaatttcactg

SEQ ID NO: 262254 - DNA, 120 bp, Artificial Sequence
  ENSG00000125676_49 (sequence is synthesized)
gccgtctttgtgtgtgaactcctatacttttgacattactgggatgattatattgcttgaggattttggcttctagtaaaaattttaatttcagttcctggggaagacgttcttgacgtg

SEQ ID NO: 262255 - DNA, 120 bp, Artificial Sequence
  ENSG00000125676_50 (sequence is synthesized)
ttttaacagcaacagcaattttatcctttaatgtgaccttaaatgtgtcaccaaaatttcccttgcctcttgtaacgtggcacctttatgattgagaacccatttcttattctcctaatg

SEQ ID NO: 262256 - DNA, 120 bp, Artificial Sequence
  ENSG00000125676_51 (sequence is synthesized)
gccatactgtgataccatgatgctcttaattggaacattgactttttttttttttgcaatttaaacaattgagataaaattcatataacatcaaatttacctttcacttttttttttttc

SEQ ID NO: 262257 - DNA, 76 bp, Artificial Sequence
  ENSG00000125676_52 (sequence is synthesized)
tcatataacatcaaatttacctttcacttttttttttttcttttggagaccaagtctcgctgtgacctccgcctcc

SEQ ID NO: 262258 - DNA, 120 bp, Artificial Sequence
  ENSG00000125676_53 (sequence is synthesized)
gcctcaaacttgccatttttaaagtgtacaattcaatggtttttagtatatccactatgttgtgcaagcatcaccgctgtctaattccagagcatttctgtcaccccaaaaagaaactcc

SEQ ID NO: 262259 - DNA, 120 bp, Artificial Sequence
  ENSG00000125676_54 (sequence is synthesized)
atgcctattagcagtcactcccagttcttcccttcctcggcccctggaaaccagtaatgtactttctgtctctgtgattttgcctgttttggacatttcatttaaatggaattatgcaat

SEQ ID NO: 262260 - DNA, 120 bp, Artificial Sequence
  ENSG00000125676_55 (sequence is synthesized)
aatttgtggccttttgtgtttggctttcacttagcatcatgttctcaaggctcatccatgttgtggcatgtatcagtactgcattcctttttatggctaaatgatgtttcattgtatgag

SEQ ID NO: 262261 - DNA, 120 bp, Artificial Sequence
  ENSG00000125676_56 (sequence is synthesized)
tgtgtaccacattttatttatccattcagcaattaatggacaggaacaatggcttttaagtattaaattgtaagttcaacattaaatgtatccacagttattgataatatcaagattata

SEQ ID NO: 262262 - DNA, 120 bp, Artificial Sequence
  ENSG00000125676_57 (sequence is synthesized)
catggtgtgaacagaatgctgtgtcgaaatggtatgtaaattatttgtcagcatttcatgtaagtgattattttctaaggacccttctagccctggttttaagaaatatgtgaatgtagt

SEQ ID NO: 262263 - DNA, 120 bp, Artificial Sequence
  ENSG00000125676_58 (sequence is synthesized)
attttcatcaataaagtttaatgcattaagcattagcttaaaatttgaatgaaggcagatgtgaagatatttgccacatgttgtaataatcatgttttgaaattatttcaatatgaagta

SEQ ID NO: 262264 - DNA, 120 bp, Artificial Sequence
  ENSG00000125676_59 (sequence is synthesized)
aaaaatgtcaatacataaaggaaaggaaatgagtataattaagtcaatatatttttaaagcaatttttataatttagcagacactgcatcttaatataagttactattaaaattgtgtcc

SEQ ID NO: 262265 - DNA, 120 bp, Artificial Sequence
  ENSG00000125676_60 (sequence is synthesized)
gtccttgtgaaaaatgtgatgtcattttcctttttttgttgatcatgtaaaataggttacttttctttgctacattttctatttaataagctattgcttgccgttgtggaatgttttact

SEQ ID NO: 262266 - DNA, 120 bp, Artificial Sequence
  ENSG00000125676_61 (sequence is synthesized)
tgttgctccatttttttctccctacccccacccctctctcccacacgcacacaatgttcaattttttttttaagtcatcattagtgtgtttatctttaatggattctaagaatggacaaa

SEQ ID NO: 262267 - DNA, 120 bp, Artificial Sequence
  ENSG00000125676_62 (sequence is synthesized)
aagaaacacacaaatatttcatccttttctggggactcaagtctttgttaccgatggaactcattaacttcttgttctttcttaaatcttcctccctccttaccttttcctctccttcct

SEQ ID NO: 262268 - DNA, 120 bp, Artificial Sequence
  ENSG00000125676_63 (sequence is synthesized)
tctcttcttcttcctttcttctcccctccctccctccctcccttcttccctccctcctcctttcattctccttctctccttctcccttccttttctcctacctcctttgactaagcctcc

SEQ ID NO: 262269 - DNA, 120 bp, Artificial Sequence
  ENSG00000125676_64 (sequence is synthesized)
ctcccctactccctcctttccttccttccttccttcttctctatcaatataatcactttgtttctttcaggtgagatcggactggaactgttcggctgcgaccagaaatttattttcctg

SEQ ID NO: 262270 - DNA, 120 bp, Artificial Sequence
  ENSG00000125676_65 (sequence is synthesized)
gtgcaagagaaattttacccagaagtgcctcaactgctttaagcagtcttttttggagtgcaatggtagctacaagcaaacgaatcttttcagcagaatgaagcctatttttcagcatat

SEQ ID NO: 262271 - DNA, 120 bp, Artificial Sequence
  ENSG00000125676_66 (sequence is synthesized)
tgaagaatatatagcactgaagacttcctggatgacacaagataaacaagttacctctgaattcaagcttcttgatgagcatcataccgatgtgtgccttctaagaaggagtcttgaaag

SEQ ID NO: 262272 - DNA, 120 bp, Artificial Sequence
  ENSG00000125676_67 (sequence is synthesized)
gagttccattttaaagtctccttggtgatcagttctcctgtagttgtgtatattcagtgagcatgcagcttctgttgtatcttcccttggaggtttgtttatacccattgggttcccaac

SEQ ID NO: 262273 - DNA, 120 bp, Artificial Sequence
  ENSG00000125676_68 (sequence is synthesized)
tatcacagaacgagtacaatgctggcttagtattactttttattccctagataggagtatataagcgttaagaagtaatcagcttgctgtttctttctaattattctctaatcattttgc

SEQ ID NO: 262274 - DNA, 120 bp, Artificial Sequence
  ENSG00000125676_69 (sequence is synthesized)
ccttgctccatatttaattttaattctaaagtcatctaatttcatggaatctttgaatttgcagtacgttgaacttttaaaaaactgtaagttattaattgttcatcaagagcactgtgg

SEQ ID NO: 262275 - DNA, 120 bp, Artificial Sequence
  ENSG00000125676_70 (sequence is synthesized)
tggaatatcgtagttgatttctttttctttctttttttttaatgctttctttgtgtgtgggaggtgtgagattcaccatgataggcactttgcagaaaaaaaaagtgattactcttatat

SEQ ID NO: 262276 - DNA, 120 bp, Artificial Sequence
  ENSG00000125676_71 (sequence is synthesized)
attttgttttcttgttaatacaatgccactgaatttttcagctaggatgtgtatattcatattagagttaaaaataaagtaaaatgtgaatcctcccaattaaagaagaactatgaaaaa

SEQ ID NO: 262277 - DNA, 120 bp, Artificial Sequence
  ENSG00000125676_72 (sequence is synthesized)
tataaggcaatgttgttcttccacagtgacctccagtattttaaattttttgtggagaaaaaaatgttttgctttcttaaacctcttaactatagcttaagtagagagatatgaacaatg

SEQ ID NO: 262278 - DNA, 120 bp, Artificial Sequence
  ENSG00000125676_73 (sequence is synthesized)
cattgagtacatttaatttagtttttaacattccaattccattacatgtttttttttattgttgatattcatattgataatgacatcatgaaatttatcctcacaagaagtagctggttt

SEQ ID NO: 262279 - DNA, 120 bp, Artificial Sequence
  ENSG00000125676_74 (sequence is synthesized)
ccttcttgaagactcagggtagccattccttgctccatatttaattttaattctaaagtcatctaatttcatggaatctttgaatttgcagtacgttgaacttttaaaaaactgacagtc

SEQ ID NO: 262280 - DNA, 120 bp, Artificial Sequence
  ENSG00000125676_75 (sequence is synthesized)
agtaaggagagagaaatggacaagaaagatttggacaagtcaagggaaagatccagagaaagagagaaaaaagatgaaaaggacaggaaagagcggaaaagggtgagatcggactggaac

SEQ ID NO: 262281 - DNA, 120 bp, Artificial Sequence
  ENSG00000125676_76 (sequence is synthesized)
ctagatgacagaaggattctgaagactttaaaatgttttacagtgttgaagtttatcttctgccttcaggagattatgggagattatgcgatcatgtttccacaggctggtgagagttac

SEQ ID NO: 262282 - DNA, 120 bp, Artificial Sequence
  ENSG00000125676_77 (sequence is synthesized)
cacttctgattatcaacttccggtctatactggatgatagtttttttaaagtcatgtataatatttcttgattgggaggaaatataattttatcatcatagttaacagatcttcaagagt

SEQ ID NO: 262283 - DNA, 120 bp, Artificial Sequence
  ENSG00000125676_78 (sequence is synthesized)
aggttagtatagcctgaggaaggcagcgtccatgttaggctcacctgtttggaataccagtgtcctgacttccttcaagtcttatgccaagcattcactggagccactggaggttttata

SEQ ID NO: 262284 - DNA, 120 bp, Artificial Sequence
  ENSG00000125676_79 (sequence is synthesized)
gattatcaacttccggtctatactggatgatagtttttttaaagtcatgtataatatttcttgattgggaggaaatataattttatcatcatagttaacagatcttcaagagtaaaaaaa

SEQ ID NO: 262285 - DNA, 120 bp, Artificial Sequence
  ENSG00000125676_80 (sequence is synthesized)
aaaagccatcttagtttaaggattagtttatagtgaaattgtaatttttaagaaagctgggcgttctataaaaaccttcaagaacttattaaaaattggtattttttaattctctagaac

SEQ ID NO: 262286 - DNA, 120 bp, Artificial Sequence
  ENSG00000125686_0 (sequence is synthesized)
gaagttccgttggggaagatggcggcggcctcgagcacccttctcttcttgccgccggggacttcagattgatccttcccgggaagagtagggactgctggtgccctgcgtcccgggatc

SEQ ID NO: 262287 - DNA, 120 bp, Artificial Sequence
  ENSG00000125686_1 (sequence is synthesized)
ccgagccaacttgtttcctccgttagtggtggggaagggcttatccttttgtggcggatctagcttctcctcgccttcaggatgaaagctcagggggaaaccgaggagtcagaaaagctg

SEQ ID NO: 262288 - DNA, 120 bp, Artificial Sequence
  ENSG00000125686_2 (sequence is synthesized)
agtaagatgagttctctcctggaacggctccatgcaaaatttaaccaaaatagaccctggagtgaaaccattaagcttgtgcgtcaagtcatggagaagagggttgtgatgagttctgga

SEQ ID NO: 262289 - DNA, 120 bp, Artificial Sequence
  ENSG00000125686_3 (sequence is synthesized)
gggcatcaacatttggtcagctgtttggagacattgcagaaggctctcaaagtaacatctttaccagcaatgactgatcgtttggagtccatagcaagacagaatggactgggctctcat

SEQ ID NO: 262290 - DNA, 120 bp, Artificial Sequence
  ENSG00000125686_4 (sequence is synthesized)
ctcagtgccagtggcactgaatgttacatcacgtcagatatgttctatgtggaagtgcagttagatcctgcaggacagctttgtgatgtaaaagtggctcaccatggggagaatcctgtg

SEQ ID NO: 262291 - DNA, 120 bp, Artificial Sequence
  ENSG00000125686_5 (sequence is synthesized)
agctgtccggagcttgtacagcagctaagggaaaaaaattttgatgaattttctaagcaccttaagggccttgttaatctgtataaccttccaggggacaacaaactgaagactaaaatg

SEQ ID NO: 262292 - DNA, 120 bp, Artificial Sequence
  ENSG00000125686_6 (sequence is synthesized)
tacttggctctccaatccttagaacaagatctttctaaaatggcaattatgtactggaaagcaactaatgctggtcccttggataagattcttcatggaagtgttggctatctcacacca

SEQ ID NO: 262293 - DNA, 120 bp, Artificial Sequence
  ENSG00000125686_7 (sequence is synthesized)
aggagtgggggtcatttaatgaacctgaagtactatgtctctccttctgacctactggatgacaagactgcatctcccatcattttgcatgagaataatgtttctcgatctttgggcatg

SEQ ID NO: 262294 - DNA, 120 bp, Artificial Sequence
  ENSG00000125686_8 (sequence is synthesized)
aatgcatcagtgacaattgaaggaacatctgctgtgtacaaactcccaattgcaccattaattatggggtcacatccagttgacaataaatggaccccttccttctcctcaatcaccagt

SEQ ID NO: 262295 - DNA, 120 bp, Artificial Sequence
  ENSG00000125686_9 (sequence is synthesized)
gccaacagtgttgatcttcctgcctgtttcttcttgaaatttccccagccaatcccagtatctagagcatttgttcagaaactgcagaactgcacaggaattccattgtttgaaactcaa

SEQ ID NO: 262296 - DNA, 120 bp, Artificial Sequence
  ENSG00000125686_10 (sequence is synthesized)
ccaacttatgcacccctgtatgaactgatcactcagtttgagctatcaaaggaccctgaccccatacctttgaatcacaacatgagattttatgctgctcttcctggtcagcagcactgc

SEQ ID NO: 262297 - DNA, 120 bp, Artificial Sequence
  ENSG00000125686_11 (sequence is synthesized)
tatttcctcaacaaggatgctcctcttccagatggccgaagtctacagggaacccttgttagcaaaatcacctttcagcaccctggccgagttcctcttatcctaaatctgatcagacac

SEQ ID NO: 262298 - DNA, 120 bp, Artificial Sequence
  ENSG00000125686_12 (sequence is synthesized)
caagtggcctataacaccctcattggaagctgtgtcaaaagaactattctgaaagaagattctcctgggcttctccaatttgaagtgtgtcctctctcagagtctcgtttcagcgtatct

SEQ ID NO: 262299 - DNA, 120 bp, Artificial Sequence
  ENSG00000125686_13 (sequence is synthesized)
tttcagcaccctgtgaatgactccctggtgtgtgtggtaatggatgtgcaggactcaacacatgtgagctgtaaactctacaaagggctgtcggatgcactgatctgcacagatgacttc

SEQ ID NO: 262300 - DNA, 120 bp, Artificial Sequence
  ENSG00000125686_14 (sequence is synthesized)
attgccaaagttgttcaaagatgtatgtccatccctgtgacgatgagggctattcggaggaaagctgaaaccattcaagccgacaccccagcactgtccctcattgcagagacagttgaa

SEQ ID NO: 262301 - DNA, 120 bp, Artificial Sequence
  ENSG00000125686_15 (sequence is synthesized)
gacatggtgaaaaagaacctgcccccggctagcagcccagggtatggcatgaccacaggcaacaacccaatgagtggtaccactacaccaaccaacacctttccggggggtcccattacc

SEQ ID NO: 262302 - DNA, 120 bp, Artificial Sequence
  ENSG00000125686_16 (sequence is synthesized)
accttgtttaatatgagcatgagcatcaaagatcggcatgagtcggtgggccatggggaggacttcagcaaggtgtctcagaacccaattcttaccagtttgttgcaaatcacagggaac

SEQ ID NO: 262303 - DNA, 120 bp, Artificial Sequence
  ENSG00000125686_17 (sequence is synthesized)
ggggggtctaccattggctcgagtccgacccctcctcatcacacgccgccacctgtctcttcgatggccggcaacaccaagaaccacccgatgctcatgaaccttcttaaagataatcct

SEQ ID NO: 262304 - DNA, 120 bp, Artificial Sequence
  ENSG00000125686_18 (sequence is synthesized)
gcccaggatttctcaaccctttatggaagcagccctttagaaaggcagaactcctcttccggctcaccccgcatggaaatatgctcggggagcaacaagaccaagaaaaagaagtcatca

SEQ ID NO: 262305 - DNA, 120 bp, Artificial Sequence
  ENSG00000125686_19 (sequence is synthesized)
agattaccacctgagaaaccaaagcaccagactgaagatgactttcagagggagctattttcaatggatgttgactcacagaaccctatctttgatgtcaacatgacagctgacacgctg

SEQ ID NO: 262306 - DNA, 120 bp, Artificial Sequence
  ENSG00000125686_20 (sequence is synthesized)
gatacgccacacatcactccagctccaagccagtgtagcactcccccaacaacttacccacaaccagtacctcacccccaacccagtattcaaaggatggtccgactatccagttcagac

SEQ ID NO: 262307 - DNA, 120 bp, Artificial Sequence
  ENSG00000125686_21 (sequence is synthesized)
agcattggcccagatgtaactgacatcctttcagacattgcagaagaagcttctaaacttcccagcactagtgatgattgcccagccattggcacccctcttcgagattcttcaagctct

SEQ ID NO: 262308 - DNA, 120 bp, Artificial Sequence
  ENSG00000125686_22 (sequence is synthesized)
gggcattctcagagtaccctgtttgactctgatgtctttcaaactaacaataatgaaaatccatacactgatccagctgatcttattgcagatgctgctggaagccccagtagtgactct

SEQ ID NO: 262309 - DNA, 120 bp, Artificial Sequence
  ENSG00000125686_23 (sequence is synthesized)
cctaccaatcatttttttcatgatggagtagatttcaatcctgatttattgaacagccagagccaaagtggttttggagaagaatattttgatgaaagcagccaaagtggggataatgat

SEQ ID NO: 262310 - DNA, 120 bp, Artificial Sequence
  ENSG00000125686_24 (sequence is synthesized)
gatttcaaaggatttgcatctcaggcactaaatactttgggggtgccaatgcttggaggtgataatggggagaccaagtttaagggcaataaccaagccgacacagttgatttcagtatt

SEQ ID NO: 262311 - DNA, 120 bp, Artificial Sequence
  ENSG00000125686_25 (sequence is synthesized)
atttcagtagccggcaaagctttagctcctgcagatcttatggagcatcacagtggtagtcagggtcctttactgaccactggggacttagggaaagaaaagactcaaaagagggtaaag

SEQ ID NO: 262312 - DNA, 120 bp, Artificial Sequence
  ENSG00000125686_26 (sequence is synthesized)
gaaggcaatggcaccagtaatagtactctctcggggcccggattagacagcaaaccagggaagcgcagtcggaccccttctaatgatgggaaaagcaaagataagcctccaaagcggaag

SEQ ID NO: 262313 - DNA, 120 bp, Artificial Sequence
  ENSG00000125686_27 (sequence is synthesized)
aaggcagacactgagggaaagtctccatctcatagttcttctaacagaccttttaccccacctaccagtacaggtggatctaaatcgccaggcagtgcaggaagatctcagactccccca

SEQ ID NO: 262314 - DNA, 120 bp, Artificial Sequence
  ENSG00000125686_28 (sequence is synthesized)
ggtgttgccacaccacccattcccaaaatcactattcagattcctaagggaacagtgatggtgggcaagccttcctctcacagtcagtataccagcagtggttctgtgtcttcctcaggc

SEQ ID NO: 262315 - DNA, 120 bp, Artificial Sequence
  ENSG00000125686_29 (sequence is synthesized)
agcaaaagccaccatagccattcttcctcctcttcctcatctgcttccacctcagggaagatgaaaagcagtaaatcagaaggttcatcaagttccaagttaagtagcagtatgtattct

SEQ ID NO: 262316 - DNA, 120 bp, Artificial Sequence
  ENSG00000125686_30 (sequence is synthesized)
agccaggggtcttctggatctagccagtccaaaaattcatcccagtctggggggaagccaggctcctctcccataaccaagcatggactgagcagtggctctagcagcaccaagatgaaa

SEQ ID NO: 262317 - DNA, 120 bp, Artificial Sequence
  ENSG00000125686_31 (sequence is synthesized)
cctcaaggaaagccatcatcacttatgaatccttctttaagtaaaccaaacatatccccttctcattcaaggccacctggaggctctgacaagcttgcctctccaatgaagcctgttcct

SEQ ID NO: 262318 - DNA, 120 bp, Artificial Sequence
  ENSG00000125686_32 (sequence is synthesized)
ggaactcctccatcctctaaagccaagtcccctatcagttcaggttctggtggttctcatatgtctggaactagttcaagctctggcatgaagtcatcttcagggttaggatcctcaggc

SEQ ID NO: 262319 - DNA, 120 bp, Artificial Sequence
  ENSG00000125686_33 (sequence is synthesized)
agcatgggagttctaaaggaaaatctcccagcagaaacaagaagccgtccttgacagctgtcatagataaactgaagcatggggttgtcaccagtggccctgggggtgaagacccactgg

SEQ ID NO: 262320 - DNA, 120 bp, Artificial Sequence
  ENSG00000125686_34 (sequence is synthesized)
acggccagatgggggtgagcacaaattcttccagccatcctatgtcctccaaacataacatgtcaggaggagagtttcagggcaagcgtgagaaaagtgataaagacaaatcaaaggttt

SEQ ID NO: 262321 - DNA, 120 bp, Artificial Sequence
  ENSG00000125686_35 (sequence is synthesized)
ccacctccgggagttcagtggattcttctaagaagacctcagagtcaaaaaatgtggggagcacaggtgtggcaaaaattatcatcagtaagcatgatggaggctcccctagcattaaag

SEQ ID NO: 262322 - DNA, 120 bp, Artificial Sequence
  ENSG00000125686_36 (sequence is synthesized)
ccaaagtgactttgcagaaacctggggaaagtagtggagaagggcttaggcctcaaatggcttcttctaaaaactatggctctccactcatcagtggttccactccaaagcatgagcgtg

SEQ ID NO: 262323 - DNA, 120 bp, Artificial Sequence
  ENSG00000125686_37 (sequence is synthesized)
gctctcccagccatagtaagtcaccagcatataccccccagaatctggacagtgaaagtgagtcaggctcctccatagcagagaaatcttatcagaatagtcccagctcagacgatggta

SEQ ID NO: 262324 - DNA, 120 bp, Artificial Sequence
  ENSG00000125686_38 (sequence is synthesized)
tccgaccacttccagaatacagcacagagaaacataagaagcacaaaaaggaaaagaagaaagtaaaagacaaagatagggaccgagaccgggacaaagaccgagacaagaaaaaatctc

SEQ ID NO: 262325 - DNA, 120 bp, Artificial Sequence
  ENSG00000125686_39 (sequence is synthesized)
atagcatcaagccagagagttggtccaaatcacccatctcttcagaccagtccttgtctatgacaagtaacacaatcttatctgcagacagaccctcaaggctcagcccagactttatga

SEQ ID NO: 262326 - DNA, 120 bp, Artificial Sequence
  ENSG00000125686_40 (sequence is synthesized)
ttggggaggaagatgatgatcttatggatgtggccctgattgggaattaggaaccttatttcctaaaagaaacagggccagaggaaaaaaaactattgataagtttataggcaaaccacc

SEQ ID NO: 262327 - DNA, 120 bp, Artificial Sequence
  ENSG00000125686_41 (sequence is synthesized)
ataaggggtgagtcagacaggtctgatttggttaagaatcctaaatggcatggctttgacatcaagctgggtgaattagaaaggcatatccagaccctattaaagaaaccacagggtttg

SEQ ID NO: 262328 - DNA, 120 bp, Artificial Sequence
  ENSG00000125686_42 (sequence is synthesized)
attctggttaccaggaagtcttctttgttcctgtgccagaaagaaagttaaaatacttgcttaagaaagggaggggggtgggaggggtgtagggagagggaagggagggaaacagttttg

SEQ ID NO: 262329 - DNA, 120 bp, Artificial Sequence
  ENSG00000125686_43 (sequence is synthesized)
tgggaaatattcatatatattttcttctccctttttccatttttaggccatgttttaaactcattttagtgcatgtatatgaagggctgggcagaaaatgaaaaagcaatacattccttg

SEQ ID NO: 262330 - DNA, 120 bp, Artificial Sequence
  ENSG00000125686_44 (sequence is synthesized)
atgcatttgcatgaaggttgttcaactttgtttgaggtagttgtccgtttgagtcatgggcaaatgaaggactttggtcattttggacacttaagtaatgtttggtgtctgtttcttagg

SEQ ID NO: 262331 - DNA, 120 bp, Artificial Sequence
  ENSG00000125686_45 (sequence is synthesized)
agtgactgggggagggaagattattttagctatttatttgtaatattttaaccctttatctgtttgtttttatacagtgtttcgttctaaatctatgaggtttagggttcaaaatgatgg

SEQ ID NO: 262332 - DNA, 120 bp, Artificial Sequence
  ENSG00000125686_46 (sequence is synthesized)
aaggccgaagagcaaggcttatatggtggtagggagcttatagcttgtgctaatactgtagcatcaagcccaagcaaattagtcagagcccgcctttagagttaaatataatagaaaaac

SEQ ID NO: 262333 - DNA, 120 bp, Artificial Sequence
  ENSG00000125686_47 (sequence is synthesized)
caaaatgatatttttattttaggagggtttaaatagggttcagagatcataggaatattaggagttacctctctgtggaggtattgacttgtaatctcattttcctttcaaaaaaaaaaa

SEQ ID NO: 262334 - DNA, 120 bp, Artificial Sequence
  ENSG00000125686_48 (sequence is synthesized)
aaaaagctaaggtggcttgttgggatgtaaacatgttttcagatgcagtaaggtttagtgtaggacagccttcctgacccagtggcatgaaaaccattacaggattaatagttctcctac

SEQ ID NO: 262335 - DNA, 120 bp, Artificial Sequence
  ENSG00000125686_49 (sequence is synthesized)
ttccacaatgtgccaaaagtctgcatcccagcattttgtttgcaggagaactgatgccattcctaagagctggactcactgtttctcttcatcacaaggagaaggagtccaaactttaat

SEQ ID NO: 262336 - DNA, 120 bp, Artificial Sequence
  ENSG00000125686_50 (sequence is synthesized)
cactccactgtatgctccctgagataaaacagtaaaaaatccgcagccatagttcacttaaaacaatttcaagctcacttttgaagtaatgggggcctggaatgctaggtgagcatgaag

SEQ ID NO: 262337 - DNA, 120 bp, Artificial Sequence
  ENSG00000125686_51 (sequence is synthesized)
ataaacccttgctactatgtagcaacccaattggacctttttggagaaataggtctgagtctggattctgggggacatcaataagagcccttcacataaaaatatagaaatccaggagac

SEQ ID NO: 262338 - DNA, 120 bp, Artificial Sequence
  ENSG00000125686_52 (sequence is synthesized)
tgtttcgagtgcaacagaagttctcagtatttggagggtcctctcaaaaattctgcggccttactttgatattgacacctgcactgtgccattcctgattattccattcaggatctgtat

SEQ ID NO: 262339 - DNA, 120 bp, Artificial Sequence
  ENSG00000125686_53 (sequence is synthesized)
cagcgggatggggcatggtccccagcacaactcttctgggttaaaaaaaaaaagccaggtgattcctttgtgtgttatgtcgtaagtggagtgacttcatcatatatggaagaagatttc

SEQ ID NO: 262340 - DNA, 120 bp, Artificial Sequence
  ENSG00000125686_54 (sequence is synthesized)
tatattcagctttttctgcaggttggagtcagcatagagttggaaaatcagctttggctttctttcctgtctcatttcctctagtgttctcctttttattgtcatcagctctcaacaact

SEQ ID NO: 262341 - DNA, 120 bp, Artificial Sequence
  ENSG00000125686_55 (sequence is synthesized)
ctgccacttttgtgtcccaaggtaataagatgtaggaaacaaaacattgtaaagtggagcaagaaaagttatcaattaaccacatcagagtcaaatgtcttgggtgacactaaggaggat

SEQ ID NO: 262342 - DNA, 120 bp, Artificial Sequence
  ENSG00000125686_56 (sequence is synthesized)
atgggcaggtgataccagagtgctttatcttgtgatgttgatacagtagcagcctctcagacattcagccaggttggatttctcatgagtttgtcacctagttttgaatcctatcccgtt

SEQ ID NO: 262343 - DNA, 120 bp, Artificial Sequence
  ENSG00000125686_57 (sequence is synthesized)
ggtttctgcaggaaaaaaaaaaaaatttatgtggtttttaaaatttgttctgagtggggagaatcttagggggaatgtactgaatagtatcatgggctcagctcccccatgcagggccaa

SEQ ID NO: 262344 - DNA, 120 bp, Artificial Sequence
  ENSG00000125686_58 (sequence is synthesized)
caaataccaaaatgagtaaactgggaagcttttctctctttctgtcttcatcccagatcaaagaatcccgagttaggatctggatgaaggataagcccctgaattgtcgatgggctcacc

SEQ ID NO: 262345 - DNA, 120 bp, Artificial Sequence
  ENSG00000125686_59 (sequence is synthesized)
cccacactgacccagcatctgaacttgcttaacagggagccggggctaaactgcttcaccctgcctgagaaccagggagcactgcatttctccacagggtggaggagaagaggcagaata

SEQ ID NO: 262346 - DNA, 120 bp, Artificial Sequence
  ENSG00000125686_60 (sequence is synthesized)
aaccaagcctgggacacctccctcctgtctaggtgtactcattcttctgtttcaaaagaaggcaaggacatgaagtcaacttctacctatcttctgctgctggtgtcttatgtattctca

SEQ ID NO: 262347 - DNA, 120 bp, Artificial Sequence
  ENSG00000125686_61 (sequence is synthesized)
gtttgacctgattcctcttctgtcttttgacttaacattaggggttcttggtcataacctgctctgatgtacataaagatttcaggttcaatatcaatgtgtcttaaaacagaagtattt

SEQ ID NO: 262348 - DNA, 120 bp, Artificial Sequence
  ENSG00000125686_62 (sequence is synthesized)
tagcgggtggggggtggggtggtggggacaaacaacgcaggatataattgccaaaaccaggcttgaggttggtgactcttgaaagattttctttcttcaggcctagatcagaaaattaag

SEQ ID NO: 262349 - DNA, 120 bp, Artificial Sequence
  ENSG00000125686_63 (sequence is synthesized)
tgcagcaatatcatgaattctcagaagccctttcagggagccagtgagtcatacagtatccacagttgagtcacttaaagatgtcagtatacgaaacattattcacaatccttgggcaat

SEQ ID NO: 262350 - DNA, 120 bp, Artificial Sequence
  ENSG00000125686_64 (sequence is synthesized)
ctcatttttttttccttctcccctcctcccctgccccccatacatttctatccttgagttagttttggaggggcaggaagtacttaacatctcagaagctagattgggaaacatgctcag

SEQ ID NO: 262351 - DNA, 120 bp, Artificial Sequence
  ENSG00000125686_65 (sequence is synthesized)
ctataagaactgagctttaaattttgagtttaaaaatgtacatcaggagcagctggggagggtctttttttaaaaaaatctttcaaatttggttttctgtgcatatggccgttttgtaaa

SEQ ID NO: 262352 - DNA, 120 bp, Artificial Sequence
  ENSG00000125686_66 (sequence is synthesized)
tactttggggtttttcatttttttgaaagtagatgaaatctgttgtgggatttttttcccgaaacattacaaaataacctgtttatttacatgcaaataaacttctttgataaaaagtaa

SEQ ID NO: 262353 - DNA, 120 bp, Artificial Sequence
  ENSG00000125686_67 (sequence is synthesized)
taaaggaattaaaggttttgttcggtgcccagcttgcctttaatttctggtttgctattctctaatgagtttgttgaccttaccatttgcaccttatacacacaacacctcacacacgta

SEQ ID NO: 262354 - DNA, 120 bp, Artificial Sequence
  ENSG00000125686_68 (sequence is synthesized)
ctcacacacgtatatgtgtgttcacaagtacatacatatgtatatacacacatgcatatatacacacatacataataggagcttaataagtacttttgggctgggcacggtggctcacgc

SEQ ID NO: 262355 - DNA, 120 bp, Artificial Sequence
  ENSG00000125686_69 (sequence is synthesized)
gaaaccattaagcttgtgcgtcaagtcatgttttgcagattcagaaacctaattttattggtacatcaagattttatagagttttcatggctgggcgtggtggttcacatctgtaatccc

SEQ ID NO: 262356 - DNA, 81 bp, Artificial Sequence
  ENSG00000125686_70 (sequence is synthesized)
aggagaagagggttgtgatgagttctggagggcatcaacatttggtcagctgtttggagacattgcagaaggctctcaaag

SEQ ID NO: 262357 - DNA, 120 bp, Artificial Sequence
  ENSG00000125691_0 (sequence is synthesized)
ccggcgttcaagatgtcgaagcgaggacgtggtgggtcctctggtgcgaaattccggatttccttgggtcttccggtaggagctgtaatcaattgtgctgacaacacaggagccaaaaac

SEQ ID NO: 262358 - DNA, 120 bp, Artificial Sequence
  ENSG00000125691_1 (sequence is synthesized)
ctgtatatcatctccgtgaaggggatcaagggacggctgaacagacttcccgctgctggtgtgggtgacatggtgatggccacagtcaagaaaggcaaaccagagctcagaaaaaaggta

SEQ ID NO: 262359 - DNA, 120 bp, Artificial Sequence
  ENSG00000125691_2 (sequence is synthesized)
gaaagtcataccgtagaaaagatggcgtgtttctttattttgaagataatgcaggagtcatagtgaacaataaaggcgagatgaaaggttctgccattacaggaccagtagcaaaggagt

SEQ ID NO: 262360 - DNA, 120 bp, Artificial Sequence
  ENSG00000125691_3 (sequence is synthesized)
gtgcagacttgtggccccggattgcatccaatgctggcagcattgcatgattctccagtatatttgctggagtgcagtaacaccactgaagctcactgtaactttgaactgctggacttg

SEQ ID NO: 262361 - DNA, 120 bp, Artificial Sequence
  ENSG00000125691_4 (sequence is synthesized)
gaatcctcctgctgtggccttcaaagggctgcaattacaagtgtgagccactgcatcccacctcacattttattctttggagattttttttgacttggattaaaaaactttatatttaca

SEQ ID NO: 262362 - DNA, 77 bp, Artificial Sequence
  ENSG00000125691_5 (sequence is synthesized)
agtatatttgtaaaaaataaaaaaaaaaactaaacccattaaaaagtatttgtttgcagtgcttgtctccctgttca

SEQ ID NO: 262363 - DNA, 87 bp, Artificial Sequence
  ENSG00000125691_6 (sequence is synthesized)
aacgacaggcctctacagtgtttttgacataccctgaccatcacttttctgaaatggaaactctgggcattttttttttaaagcaat

SEQ ID NO: 262364 - DNA, 120 bp, Artificial Sequence
  ENSG00000125691_7 (sequence is synthesized)
tctgaaatggaaactctgggcattttttttttaaagcaatccttgcttttttgtgagtttgcagactttcagcatcttccaattgctgtatttacaattttggcctcaaaaagtattatt

SEQ ID NO: 262365 - DNA, 120 bp, Artificial Sequence
  ENSG00000125691_8 (sequence is synthesized)
tgggttttgagtcccaaaaataatagtagatactgctcaatgactggctatacatggtagcttctcctggagtgaggaaggcattcaaatggctgggcgcggtagctggcacctgtaatc

SEQ ID NO: 262366 - DNA, 82 bp, Artificial Sequence
  ENSG00000125691_9 (sequence is synthesized)
aggagttcaagaccaggctgaccaacgtggtgaaacctcctctttcgcctgtaatctcagctactgagagaatcgcttgaac

SEQ ID NO: 262367 - DNA, 120 bp, Artificial Sequence
  ENSG00000125691_10 (sequence is synthesized)
aatcgcttgaacctgggaggtggagtttgcagcgagtcgagattgcaccattgtactccatccagcctgggcaacggagcaagattccgttcccgcccccgccccaaaaaaaggcattga

SEQ ID NO: 262368 - DNA, 120 bp, Artificial Sequence
  ENSG00000125691_11 (sequence is synthesized)
ccgcccccgccccaaaaaaaggcattgaagttaagatagactatatagttagatcctggacacacacatggattttgaggaatgatgtgagtttgtttatgtatgtacattttagcagtt

SEQ ID NO: 262369 - DNA, 120 bp, Artificial Sequence
  ENSG00000125691_12 (sequence is synthesized)
gtggaagatgattaagttgatggtacctacaggtattttgctatgaaaatgttttgacaaacaggatgatcgtgtaatttatgttccaagctctagtttgagaatggaagaatgtggtaa

SEQ ID NO: 262370 - DNA, 120 bp, Artificial Sequence
  ENSG00000125691_13 (sequence is synthesized)
atttttgccaactgaacaggcataaagcgctgataataagggacttggccttaaggtaggaggttgttagcatttctttctaaacgtgtaagagtttatttaggtgacacccagcgtttt

SEQ ID NO: 262371 - DNA, 120 bp, Artificial Sequence
  ENSG00000125691_14 (sequence is synthesized)
ggaaaaatgggtgtttgtttagaacaataatttggagggaagtggactaaacagggtttttagattaaggtttgtgtttatgtatctgtatctgcaaatactcagccataaatgtttcta

SEQ ID NO: 262372 - DNA, 120 bp, Artificial Sequence
  ENSG00000125691_15 (sequence is synthesized)
cctgtaagttgggtataatacaagctccacttggtatcaaaaaggactacccttagtgtcttccatgactagttatggaatgtaccagacctagagaggagttgttctaacctggagctt

SEQ ID NO: 262373 - DNA, 120 bp, Artificial Sequence
  ENSG00000125691_16 (sequence is synthesized)
ttgaaaatgtttccggtccataccctagaccaattaagtcagactgcagaataggactcagacatcagaattgtgaagctcccaggagatgtcaaggtatacccaagactgagaaccagt

SEQ ID NO: 262374 - DNA, 120 bp, Artificial Sequence
  ENSG00000125691_17 (sequence is synthesized)
cccaggagatgtcaaggtatacccaagactgagaaccagtaccctgtctagactgaaccaggcttggttttagaagtattaaatctcgcctgggtacggtggctcacacctataatccca

SEQ ID NO: 262375 - DNA, 88 bp, Artificial Sequence
  ENSG00000125691_18 (sequence is synthesized)
aggtgggtggatcatctgaggtcaggagagtgagaccagcctgtccaacatgttgaaaccccatctctacttgtaatcccagctactt

SEQ ID NO: 262376 - DNA, 120 bp, Artificial Sequence
  ENSG00000125691_19 (sequence is synthesized)
ttgaaccccggagatggaggttgcagtgagctgaggtcgcacgattgtgctccagcctgggcaaccagtgaaactctggggggaaagaaaaaaaatgtattaaatctctagttttagaga

SEQ ID NO: 262377 - DNA, 120 bp, Artificial Sequence
  ENSG00000125691_20 (sequence is synthesized)
gttacaccataacatccctgagtatggtcaatttcaagtcagctttagtgtgacaagcccctaggcccaccatttatgtctttatatattatggcaatatatgatccttatatattaacc

SEQ ID NO: 262378 - DNA, 120 bp, Artificial Sequence
  ENSG00000125691_21 (sequence is synthesized)
cacaggtgaggtctttgcacgttgctatactcccccttttaaaagcactcaatgggcctgtggctaatgacctattgagccgtcaagaaaggggagagtgaaaacatcgcttttgggtga

SEQ ID NO: 262379 - DNA, 120 bp, Artificial Sequence
  ENSG00000125691_22 (sequence is synthesized)
atatcccagtgtcctttgaatcgacttccttttttcttttttccggcgttcaagatgtcgaagcgaggtgaggttttgtttctggaggatcctccaccatctgtcgtgcagtggctggcg

SEQ ID NO: 262380 - DNA, 120 bp, Artificial Sequence
  ENSG00000125691_23 (sequence is synthesized)
gattcgtcaggagcggtggccctaggcagctggggcgctttgctctccttcaggccggagagagagagccaggccaccgcgagagcactgccagggccctcgaaagtggcagtggggtgc

SEQ ID NO: 262381 - DNA, 120 bp, Artificial Sequence
  ENSG00000125691_24 (sequence is synthesized)
tggagagttgagatggcaggatcccgacgtgaatgtagtctggataccgcgagatcgctccgcgaatagggctatcgtaatggggttgaagttagactggattaggccctggtttgcgcg

SEQ ID NO: 262382 - DNA, 120 bp, Artificial Sequence
  ENSG00000125691_25 (sequence is synthesized)
acctctgcggttttatgccttgcaggagtaattgcgttttgcgaaagttagagcaagggttgagtcgtctaggtttcttaatttcgatgtcagagtgttaatagtaagaaataggctact

SEQ ID NO: 262383 - DNA, 120 bp, Artificial Sequence
  ENSG00000125691_26 (sequence is synthesized)
ttccgtgagaatcgggtggcacatggggacggcataagtaaaatccgagcgagctaatctatagcgtacagtctatcaaagcatgtgcggtgaattacagcttgagtatgagggggaact

SEQ ID NO: 262384 - DNA, 120 bp, Artificial Sequence
  ENSG00000125691_27 (sequence is synthesized)
tggggggacgctttcctttattggaaaatggatcagttttcaaggcctcaagtttgttttccattgagaggcagtgtgagataagtatcttaagtttttgctcatattgtgttggagggg

SEQ ID NO: 262385 - DNA, 84 bp, Artificial Sequence
  ENSG00000125691_28 (sequence is synthesized)
ataagtatcttaagtttttgctcatattgtgttggaggggggaccatcatcttgtcacttccataccttagttgtttttttgtt

SEQ ID NO: 262386 - DNA, 89 bp, Artificial Sequence
  ENSG00000125691_29 (sequence is synthesized)
tcaaaaaaaaatatattacaaaacgaaaacaagctgcccgttgcttattttattatttgtttttgagatggagtctcatatctgttcac

SEQ ID NO: 262387 - DNA, 120 bp, Artificial Sequence
  ENSG00000125691_30 (sequence is synthesized)
cagcctcccgagtagctgggatcataggtgtgcaccaccacacccggctaattgctcattacttaatctcaggctccccactcaaaatttttcctgtcaggtgtatgatttaaaggggga

SEQ ID NO: 262388 - DNA, 120 bp, Artificial Sequence
  ENSG00000125691_31 (sequence is synthesized)
ggcctcaaaatacttgcagcttgtgtcctgtctggctttagaacttctggtgtttggtgcattttaacttcagcgcttgcacttttttcctgtgcctgcctaatctgtctctaccctggg

SEQ ID NO: 262389 - DNA, 120 bp, Artificial Sequence
  ENSG00000125691_32 (sequence is synthesized)
atgtcttgctcttctaaagagttcctggccatcccttgatttacaaatgtgatgttgatttgtcagccctgtattacagttactcctattcctgtatccaccccacgatgctgtccagta

SEQ ID NO: 262390 - DNA, 120 bp, Artificial Sequence
  ENSG00000125691_33 (sequence is synthesized)
gatttttagcctttgggttagaaattgttttttgttcaccattaatatccatttgagggctgggtagcactgtgattgtgattcagcaattgcatgggctttttcctcttctcagaacac

SEQ ID NO: 262391 - DNA, 120 bp, Artificial Sequence
  ENSG00000125691_34 (sequence is synthesized)
ttcctgggtctgattggtggcccagggagctgtcagagaagagcagagcaaatggccttcactttgtagatgagatggcaggagggtggattgttggtctcagtcagtggtgggacagac

SEQ ID NO: 262392 - DNA, 120 bp, Artificial Sequence
  ENSG00000125691_35 (sequence is synthesized)
cagagctccgaacacttcagttttaaaactagttgtgagtttccaattctgttaatgtcttttttggtccttgtttctgctaaatgaatacatcccctccccttggaacttaatatcaat

SEQ ID NO: 262393 - DNA, 120 bp, Artificial Sequence
  ENSG00000125691_36 (sequence is synthesized)
aaataacaagcacagaaatatgcaaaaggaccaggtctacttgaagaatttgtgaggattaaatggtttatgagtagaggagggtcagtcagtaagtattggctacctcatgtgtgtccc

SEQ ID NO: 262394 - DNA, 120 bp, Artificial Sequence
  ENSG00000125691_37 (sequence is synthesized)
attactaacttggttagacttatctattttttgtgtagtcttcctgtcataaaaattctgtgtaaggaccccatgctagtatcagtgaagattgtgaatccaggtgtgtctgactctaca

SEQ ID NO: 262395 - DNA, 120 bp, Artificial Sequence
  ENSG00000125691_38 (sequence is synthesized)
atagttcttcacaagcattatatttcactgtgtagtgatacttcattttgaaagttgggaaaagcgtctttttcactttagtacagatgggtataaaagttacttaggacactagaaaac

SEQ ID NO: 262396 - DNA, 120 bp, Artificial Sequence
  ENSG00000125691_39 (sequence is synthesized)
agttcattaaaagtaaaacaaagcctggtgcttgggcccaggaattcaaactgttttccagtgtaaatctgaatagcttggtctctgctcattgccaggactgggaggagttgggggtcc

SEQ ID NO: 262397 - DNA, 120 bp, Artificial Sequence
  ENSG00000125691_40 (sequence is synthesized)
caggtcccatttctacatcccaattcagtgatactgggatcttaataacctacctgtaaggtgaagttggaaaaggcataggcaaggatagttgtcctgagagttttacacttgtgagaa

SEQ ID NO: 262398 - DNA, 120 bp, Artificial Sequence
  ENSG00000125691_41 (sequence is synthesized)
aatactggcagctttgattttaagatgtgaatagatgatcgtggttcatgcctttactccctatactcccagcactttgggaggccaggcttgccaacatggcaaaaccctgtctctatg

SEQ ID NO: 262399 - DNA, 120 bp, Artificial Sequence
  ENSG00000125691_42 (sequence is synthesized)
aaaaaaaaaaaatctgggcatggtagtgtgcacctgtagtccaagatactagagaggctgaggtgggaggatcaccttgaagattgatatttacactgtcactgtctcaaacgctgagtg

SEQ ID NO: 262400 - DNA, 120 bp, Artificial Sequence
  ENSG00000125691_43 (sequence is synthesized)
cttgttccttaggtctctgaggttgggtggattgtctagaagtacaggccaaggatcttctgtgtttgacgatgtcttaatctgtcccccacatgtttttattttattttattttatttt

SEQ ID NO: 262401 - DNA, 120 bp, Artificial Sequence
  ENSG00000125703_0 (sequence is synthesized)
aaagtacctgtagctgcggcgctgaggtcggaacgtctgcgtgtgtgcgggctggttttgtggcggctgctgctagagctggagcatttgccgggttggtggctcctgcacatttttaca

SEQ ID NO: 262402 - DNA, 120 bp, Artificial Sequence
  ENSG00000125703_1 (sequence is synthesized)
gttctccagtccttctctttcgtcagtataaaagattaaactctacagaagaatgcaatcaagtgatggcttttcctttagaatttgaatatggaggctacaggaacagatgaagttgac

SEQ ID NO: 262403 - DNA, 120 bp, Artificial Sequence
  ENSG00000125703_2 (sequence is synthesized)
aagctaaaaaccaaatttatatctgcttggaacaacatgaaatatagttgggtgttgaaaacaaagacgtattttagtagaaattctcctgtattattgcttggaaaatgttaccatttt

SEQ ID NO: 262404 - DNA, 120 bp, Artificial Sequence
  ENSG00000125703_3 (sequence is synthesized)
aaatatgaagatgaagataaaacgttacctgcagagtcgggatgtacaatagaggatcacgtaattgcaggaaatgtagaagaatttcgtaaagatttcatttctagaatatggctgacc

SEQ ID NO: 262405 - DNA, 120 bp, Artificial Sequence
  ENSG00000125703_4 (sequence is synthesized)
tacagggaagaattccctcaaatagaaggctcagctttgacaacagactgtgggtggggctgcacattgagaactggccagatgctcttggctcaaggactcatactacactttcttggt

SEQ ID NO: 262406 - DNA, 120 bp, Artificial Sequence
  ENSG00000125703_5 (sequence is synthesized)
agagcttggacctggcctgatgctttgaatattgaaaattcagactctgaatcatggacttcccacactgtcaaaaaatttactgcatcatttgaagcatcactttcaggggaaagagaa

SEQ ID NO: 262407 - DNA, 120 bp, Artificial Sequence
  ENSG00000125703_6 (sequence is synthesized)
ttcaaaaccccaacaatttctctgaaggaaacaattgggaaatattctgatgatcatgaaatgcgaaatgaagtttatcataggaaaatcatctcttggtttggtgattcccccttggct

SEQ ID NO: 262408 - DNA, 120 bp, Artificial Sequence
  ENSG00000125703_7 (sequence is synthesized)
ctttttggcttacatcaactaatagaatatggaaagaagtctgggaaaaaagcaggagattggtatggaccagctgtggttgctcacattttaagaaaagcagttgaagaagcaaggcat

SEQ ID NO: 262409 - DNA, 120 bp, Artificial Sequence
  ENSG00000125703_8 (sequence is synthesized)
cctgatttacaaggaataactatttatgttgcacaagattgtacagtttacaattctgatgtaattgataaacagagtgcttccatgacttctgataatgcagatgacaaagctgttatt

SEQ ID NO: 262410 - DNA, 120 bp, Artificial Sequence
  ENSG00000125703_9 (sequence is synthesized)
attctagttcctgttagacttggtggagaaagaaccaacaccgactacttagaatttgtgaagggtattttaagcctggaatattgtgtgggtattattggtggcaaacctaaacagtca

SEQ ID NO: 262411 - DNA, 120 bp, Artificial Sequence
  ENSG00000125703_10 (sequence is synthesized)
tattactttgctggatttcaagatgacagtttgatttacatggatcctcattactgccaatcttttgtagatgtcagcataaaggatttccctcttgagacattccactgcccttctccc

SEQ ID NO: 262412 - DNA, 120 bp, Artificial Sequence
  ENSG00000125703_11 (sequence is synthesized)
aaaaagatgtcttttcgaaaaatggatcccagctgtacaataggattttactgtcgaaatgttcaggacttcaaacgagcttctgaagaaatcaccaagatgctgaaattttcttctaag

SEQ ID NO: 262413 - DNA, 120 bp, Artificial Sequence
  ENSG00000125703_12 (sequence is synthesized)
caaccaatgaagaagaccttttttcagaggatgaaaagaaacaattaaaaagatttagcacggaagagtttgtcttgctttaaagattagcacatttgtgcttgataagaagaattccat

SEQ ID NO: 262414 - DNA, 120 bp, Artificial Sequence
  ENSG00000125703_13 (sequence is synthesized)
ccattgaaaggggaaaaatgaagagaaacaagtatatctgaaatgtttattttcacaaatatcttaattttatatgttctttaaaaaagaacatttgaaaatataacagttaaagatatt

SEQ ID NO: 262415 - DNA, 120 bp, Artificial Sequence
  ENSG00000125703_14 (sequence is synthesized)
taaaagagaaatgatttaatgaatcttgctttctaataaataaattgagtgattctggttgcattcctatttccctaagatctactagtgataattctaccttaactgtaagccttttag

SEQ ID NO: 262416 - DNA, 120 bp, Artificial Sequence
  ENSG00000125703_15 (sequence is synthesized)
tcttcaaagtcttccacctgagcccattgttctcatggaggttttgtgatattaaccctcccccaaagactgggatcaccaaatagtttcaaaattctcagtttgtactgaagaccagaa

SEQ ID NO: 262417 - DNA, 120 bp, Artificial Sequence
  ENSG00000125703_16 (sequence is synthesized)
gatcagagaaggaaactttaatgctgtctagcctcctgctattaatgcaatcaaagaatacttttgcatatgtcttgataattaaatagtatttgttaactgtgatatgcatacacttat

SEQ ID NO: 262418 - DNA, 120 bp, Artificial Sequence
  ENSG00000125703_17 (sequence is synthesized)
ataagcagaattatgagttaaagtaatacttagcaatatgattttataatggctcctcattatgcttgctgttgaaccttttatgaggagtgaatataaagtattggttttccctcacaa

SEQ ID NO: 262419 - DNA, 120 bp, Artificial Sequence
  ENSG00000125703_18 (sequence is synthesized)
atttaaagattatgttattaatactattataactgcatcaatcaagtcagataaaggcaactataaaatagtagtagtgtttgtttcctatctcaagggcgaaattttatgggaactcaa

SEQ ID NO: 262420 - DNA, 120 bp, Artificial Sequence
  ENSG00000125703_19 (sequence is synthesized)
tttattatgcagtttttaagtttaaaataccaagaaagatgtcactagattctcttctatgtgatttttgttttttatataaagcagtgtagtggtgtttagaagctgaggccacctgta

SEQ ID NO: 262421 - DNA, 120 bp, Artificial Sequence
  ENSG00000125703_20 (sequence is synthesized)
aggcaaatctgccttaagtgtattatgtgttacttaaaggcaaatttgtgatctaaaagtacaagagtgatttttgagctaggattataaaatacataataaagatgtgagaagataaaa

SEQ ID NO: 262422 - DNA, 120 bp, Artificial Sequence
  ENSG00000125703_21 (sequence is synthesized)
tgcttttgttttggttttaatgttgggattattttaatcctttcatttgaaaaatcagtgtctcaaatgaattctgttcatttataataaatgcatatattgctctgaaaacaatattaa

SEQ ID NO: 262423 - DNA, 120 bp, Artificial Sequence
  ENSG00000125703_22 (sequence is synthesized)
tttttttaagtggagctttcatgtttcagtgtagaaacgtgacttataaagacataaaattgtgtatcatctaaagtcattgatctcttccatcagaaaacctgtttgtttagagttgca

SEQ ID NO: 262424 - DNA, 120 bp, Artificial Sequence
  ENSG00000125703_23 (sequence is synthesized)
tgtaaagctgaaagagagggtgggcggattgttttagtatacctgatgagaaaaatcaggtttgacatttctcagtgaagattacttactgagttgaaataaatagtctgaaatctaaaa

SEQ ID NO: 262425 - DNA, 120 bp, Artificial Sequence
  ENSG00000125703_24 (sequence is synthesized)
attcagaaaaatttgagaatacataaatgaaacatgtaattattacatggttttgattgttttcccagttggtgcttttacagactaaagtaattttacagaataaaataacttaaatca

SEQ ID NO: 262426 - DNA, 120 bp, Artificial Sequence
  ENSG00000125726_0 (sequence is synthesized)
agagaggggcaggctggtcccctgacaggttgaagcaagtagacgcccaggagccccgggagggggctgcagtttccttccttccttctcggcagcgctccgcgcccccatcgcccctcc

SEQ ID NO: 262427 - DNA, 120 bp, Artificial Sequence
  ENSG00000125726_1 (sequence is synthesized)
tgcgctagcggaggtgatcgccgcggcgatgccggaggagggttcgggctgctcggtgcggcgcaggccctatgggtgcgtcctgcgggctgctttggtcccattggtcgcgggcttggt

SEQ ID NO: 262428 - DNA, 120 bp, Artificial Sequence
  ENSG00000125726_2 (sequence is synthesized)
gatctgcctcgtggtgtgcatccagcgcttcgcacaggctcagcagcagctgccgctcgagtcacttgggtgggacgtagctgagctgcagctgaatcacacaggacctcagcaggaccc

SEQ ID NO: 262429 - DNA, 120 bp, Artificial Sequence
  ENSG00000125726_3 (sequence is synthesized)
agctacgtatccatcgtgatggcatctacatggtacacatccaggtgacgctggccatctgctcctccacgacggcctccaggcaccaccccaccaccctggccgtgggaatctgctctc

SEQ ID NO: 262430 - DNA, 120 bp, Artificial Sequence
  ENSG00000125726_4 (sequence is synthesized)
ccgcctcccgtagcatcagcctgctgcgtctcagcttccaccaaggttgtaccattgcctcccagcgcctgacgcccctggcccgaggggacacactctgcaccaacctcactgggacac

SEQ ID NO: 262431 - DNA, 120 bp, Artificial Sequence
  ENSG00000125726_5 (sequence is synthesized)
ttttgccttcccgaaacactgatgagaccttctttggagtgcagtgggtgcgcccctgaccactgctgctgattagggttttttaaattttattttattttatttaagttcaagagaaaa

SEQ ID NO: 262432 - DNA, 120 bp, Artificial Sequence
  ENSG00000125726_6 (sequence is synthesized)
agtgtacacacaggggccacccggggttggggtgggagtgtggtggggggtagtggtggcaggacaagagaaggcattgagctttttctttcattttcctattaaaaaatacaaaaatca

SEQ ID NO: 262433 - DNA, 120 bp, Artificial Sequence
  ENSG00000125726_7 (sequence is synthesized)
atatggactgcacactgttttatcccattaactcagctcgtgttcatgcaagccctacaaagctggaggaatcatcattgttcccatttcacagatgaggaaaacagaggcgtaaaccgt

SEQ ID NO: 262434 - DNA, 120 bp, Artificial Sequence
  ENSG00000125726_8 (sequence is synthesized)
tgagtcatctgtccaaagttactggttttgtaacagctggaacctcagtatttaacagttgaggaaaatagtggcagaaaacctgagtcacaagcccgaggcaattcatctacatagtag

SEQ ID NO: 262435 - DNA, 120 bp, Artificial Sequence
  ENSG00000125726_9 (sequence is synthesized)
tttttgaccttcctgtttcctggaactcagccatggtggtgtgtcactttgtactttgcagacaagggcatcacctttgatgtgtcggaggcacttcagtgaaagaattttggctcctaa

SEQ ID NO: 262436 - DNA, 120 bp, Artificial Sequence
  ENSG00000125726_10 (sequence is synthesized)
agattttgcagaacagagatgacatgccagcccagactttcatttccaggaggccatgaattctgggaggacaccgttaacccactacagccatcgagaacagcagcaggaggctggatg

SEQ ID NO: 262437 - DNA, 120 bp, Artificial Sequence
  ENSG00000125730_0 (sequence is synthesized)
actcctccccatcctctccctctgtccctctgtccctctgaccctgcactgtcccagcaccatgggacccacctcaggtcccagcctgctgctcctgctactaacccacctccccctggc

SEQ ID NO: 262438 - DNA, 120 bp, Artificial Sequence
  ENSG00000125730_1 (sequence is synthesized)
tctggggagtcccatgtactctatcatcacccccaacatcttgcggctggagagcgaggagaccatggtgctggaggcccacgacgcgcaaggggatgttccagtcactgttactgtcca

SEQ ID NO: 262439 - DNA, 120 bp, Artificial Sequence
  ENSG00000125730_2 (sequence is synthesized)
cgacttcccaggcaaaaaactagtgctgtccagtgagaagactgtgctgacccctgccaccaaccacatgggcaacgtcaccttcacgatcccagccaacagggagttcaagtcagaaaa

SEQ ID NO: 262440 - DNA, 120 bp, Artificial Sequence
  ENSG00000125730_3 (sequence is synthesized)
ggggcgcaacaagttcgtgaccgtgcaggccaccttcgggacccaagtggtggagaaggtggtgctggtcagcctgcagagcgggtacctcttcatccagacagacaagaccatctacac

SEQ ID NO: 262441 - DNA, 120 bp, Artificial Sequence
  ENSG00000125730_4 (sequence is synthesized)
ccctggctccacagttctctatcggatcttcaccgtcaaccacaagctgctacccgtgggccggacggtcatggtcaacattgagaacccggaaggcatcccggtcaagcaggactcctt

SEQ ID NO: 262442 - DNA, 120 bp, Artificial Sequence
  ENSG00000125730_5 (sequence is synthesized)
gtcttctcagaaccagcttggcgtcttgcccttgtcttgggacattccggaactcgtcaacatgggccagtggaagatccgagcctactatgaaaactcaccacagcaggtcttctccac

SEQ ID NO: 262443 - DNA, 120 bp, Artificial Sequence
  ENSG00000125730_6 (sequence is synthesized)
tgagtttgaggtgaaggagtacgtgctgcccagtttcgaggtcatagtggagcctacagagaaattctactacatctataacgagaagggcctggaggtcaccatcaccgccaggttcct

SEQ ID NO: 262444 - DNA, 120 bp, Artificial Sequence
  ENSG00000125730_7 (sequence is synthesized)
ctacgggaagaaagtggagggaactgcctttgtcatcttcgggatccaggatggcgaacagaggatttccctgcctgaatccctcaagcgcattccgattgaggatggctcgggggaggt

SEQ ID NO: 262445 - DNA, 120 bp, Artificial Sequence
  ENSG00000125730_8 (sequence is synthesized)
tgtgctgagccggaaggtactgctggacggggtgcagaacccccgagcagaagacctggtggggaagtctttgtacgtgtctgccaccgtcatcttgcactcaggcagtgacatggtgca

SEQ ID NO: 262446 - DNA, 120 bp, Artificial Sequence
  ENSG00000125730_9 (sequence is synthesized)
ggcagagcgcagcgggatccccatcgtgacctctccctaccagatccacttcaccaagacacccaagtacttcaaaccaggaatgccctttgacctcatggtgttcgtgacgaaccctga

SEQ ID NO: 262447 - DNA, 120 bp, Artificial Sequence
  ENSG00000125730_10 (sequence is synthesized)
tggctctccagcctaccgagtccccgtggcagtccagggcgaggacactgtgcagtctctaacccagggagatggcgtggccaaactcagcatcaacacacaccccagccagaagccctt

SEQ ID NO: 262448 - DNA, 120 bp, Artificial Sequence
  ENSG00000125730_11 (sequence is synthesized)
gagcatcacggtgcgcacgaagaagcaggagctctcggaggcagagcaggctaccaggaccatgcaggctctgccctacagcaccgtgggcaactccaacaattacctgcatctctcagt

SEQ ID NO: 262449 - DNA, 120 bp, Artificial Sequence
  ENSG00000125730_12 (sequence is synthesized)
gctacgtacagagctcagacccggggagaccctcaacgtcaacttcctcctgcgaatggaccgcgcccacgaggccaagatccgctactacacctacctgatcatgaacaagggcaggct

SEQ ID NO: 262450 - DNA, 120 bp, Artificial Sequence
  ENSG00000125730_13 (sequence is synthesized)
gttgaaggcgggacgccaggtgcgagagcccggccaggacctggtggtgctgcccctgtccatcaccaccgacttcatcccttccttccgcctggtggcgtactacacgctgatcggtgc

SEQ ID NO: 262451 - DNA, 120 bp, Artificial Sequence
  ENSG00000125730_14 (sequence is synthesized)
cagcggccagagggaggtggtggccgactccgtgtgggtggacgtcaaggactcctgcgtgggctcgctggtggtaaaaagcggccagtcagaagaccggcagcctgtacctgggcagca

SEQ ID NO: 262452 - DNA, 120 bp, Artificial Sequence
  ENSG00000125730_15 (sequence is synthesized)
gatgaccctgaagatagagggtgaccacggggcccgggtggtactggtggccgtggacaagggcgtgttcgtgctgaataagaagaacaaactgacgcagagtaagatctgggacgtggt

SEQ ID NO: 262453 - DNA, 120 bp, Artificial Sequence
  ENSG00000125730_16 (sequence is synthesized)
ggagaaggcagacatcggctgcaccccgggcagtgggaaggattacgccggtgtcttctccgacgcagggctgaccttcacgagcagcagtggccagcagaccgcccagagggcagaact

SEQ ID NO: 262454 - DNA, 120 bp, Artificial Sequence
  ENSG00000125730_17 (sequence is synthesized)
tcagtgcccgcagccagccgcccgccgacgccgttccgtgcagctcacggagaagcgaatggacaaagtcggcaagtaccccaaggagctgcgcaagtgctgcgaggacggcatgcggga

SEQ ID NO: 262455 - DNA, 120 bp, Artificial Sequence
  ENSG00000125730_18 (sequence is synthesized)
gaaccccatgaggttctcgtgccagcgccggacccgtttcatctccctgggcgaggcgtgcaagaaggtcttcctggactgctgcaactacatcacagagctgcggcggcagcacgcgcg

SEQ ID NO: 262456 - DNA, 120 bp, Artificial Sequence
  ENSG00000125730_19 (sequence is synthesized)
ggccagccacctgggcctggccaggagtaacctggatgaggacatcattgcagaagagaacatcgtttcccgaagtgagttcccagagagctggctgtggaacgttgaggacttgaaaga

SEQ ID NO: 262457 - DNA, 120 bp, Artificial Sequence
  ENSG00000125730_20 (sequence is synthesized)
gccaccgaaaaatggaatctctacgaagctcatgaatatatttttgaaagactccatcaccacgtgggagattctggctgtgagcatgtcggacaagaaagggatctgtgtggcagaccc

SEQ ID NO: 262458 - DNA, 120 bp, Artificial Sequence
  ENSG00000125730_21 (sequence is synthesized)
aggtggaaatccgagccgttctctacaattaccggcagaaccaagagctcaaggtgagggtggaactactccacaatccagccttctgcagcctggccaccaccaagaggcgtcaccagc

SEQ ID NO: 262459 - DNA, 120 bp, Artificial Sequence
  ENSG00000125730_22 (sequence is synthesized)
agaccgtaaccatcccccccaagtcctcgttgtccgttccatatgtcatcgtgccgctaaagaccggcctgcaggaagtggaagtcaaggctgctgtctaccatcatttcatcagtgacg

SEQ ID NO: 262460 - DNA, 120 bp, Artificial Sequence
  ENSG00000125730_23 (sequence is synthesized)
gtgtcaggaagtccctgaaggtcgtgccggaaggaatcagaatgaacaaaactgtggctgttcgcaccctggatccagaacgcctgggccgtgaaggagtgcagaaagaggacatcccac

SEQ ID NO: 262461 - DNA, 120 bp, Artificial Sequence
  ENSG00000125730_24 (sequence is synthesized)
ctgcagacctcagtgaccaagtcccggacaccgagtctgagaccagaattctcctgcaagggaccccagtggcccagatgacagaggatgccgtcgacgcggaacggctgaagcacctca

SEQ ID NO: 262462 - DNA, 120 bp, Artificial Sequence
  ENSG00000125730_25 (sequence is synthesized)
ttgtgaccccctcgggctgcggggaacagaacatgatcggcatgacgcccacggtcatcgctgtgcattacctggatgaaacggagcagtgggagaagttcggcctagagaagcggcagg

SEQ ID NO: 262463 - DNA, 120 bp, Artificial Sequence
  ENSG00000125730_26 (sequence is synthesized)
gggccttggagctcatcaagaaggggtacacccagcagctggccttcagacaacccagctctgcctttgcggccttcgtgaaacgggcacccagcacctggctgaccgcctacgtggtca

SEQ ID NO: 262464 - DNA, 120 bp, Artificial Sequence
  ENSG00000125730_27 (sequence is synthesized)
aggtcttctctctggctgtcaacctcatcgccatcgactcccaagtcctctgcggggctgttaaatggctgatcctggagaagcagaagcccgacggggtcttccaggaggatgcgcccg

SEQ ID NO: 262465 - DNA, 120 bp, Artificial Sequence
  ENSG00000125730_28 (sequence is synthesized)
tgatacaccaagaaatgattggtggattacggaacaacaacgagaaagacatggccctcacggcctttgttctcatctcgctgcaggaggctaaagatatttgcgaggagcaggtcaaca

SEQ ID NO: 262466 - DNA, 120 bp, Artificial Sequence
  ENSG00000125730_29 (sequence is synthesized)
gcctgccaggcagcatcactaaagcaggagacttccttgaagccaactacatgaacctacagagatcctacactgtggccattgctggctatgctctggcccagatgggcaggctgaagg

SEQ ID NO: 262467 - DNA, 120 bp, Artificial Sequence
  ENSG00000125730_30 (sequence is synthesized)
ggcctcttcttaacaaatttctgaccacagccaaagataagaaccgctgggaggaccctggtaagcagctctacaacgtggaggccacatcctatgccctcttggccctactgcagctaa

SEQ ID NO: 262468 - DNA, 120 bp, Artificial Sequence
  ENSG00000125730_31 (sequence is synthesized)
aagactttgactttgtgcctcccgtcgtgcgttggctcaatgaacagagatactacggtggtggctatggctctacccaggccaccttcatggtgttccaagccttggctcaataccaaa

SEQ ID NO: 262469 - DNA, 120 bp, Artificial Sequence
  ENSG00000125730_32 (sequence is synthesized)
aggacgcccctgaccaccaggaactgaaccttgatgtgtccctccaactgcccagccgcagctccaagatcacccaccgtatccactgggaatctgccagcctcctgcgatcagaagaga

SEQ ID NO: 262470 - DNA, 120 bp, Artificial Sequence
  ENSG00000125730_33 (sequence is synthesized)
ccaaggaaaatgagggtttcacagtcacagctgaaggaaaaggccaaggcaccttgtcggtggtgacaatgtaccatgctaaggccaaagatcaactcacctgtaataaattcgacctca

SEQ ID NO: 262471 - DNA, 120 bp, Artificial Sequence
  ENSG00000125730_34 (sequence is synthesized)
aggtcaccataaaaccagcaccggaaacagaaaagaggcctcaggatgccaagaacactatgatccttgagatctgtaccaggtaccggggagaccaggatgccactatgtctatattgg

SEQ ID NO: 262472 - DNA, 120 bp, Artificial Sequence
  ENSG00000125730_35 (sequence is synthesized)
acatatccatgatgactggctttgctccagacacagatgacctgaagcagctggccaatggtgttgacagatacatctccaagtatgagctggacaaagccttctccgataggaacaccc

SEQ ID NO: 262473 - DNA, 120 bp, Artificial Sequence
  ENSG00000125730_36 (sequence is synthesized)
tcatcatctacctggacaaggtctcacactctgaggatgactgtctagctttcaaagttcaccaatactttaatgtagagcttatccagcctggagcagtcaaggtctacgcctattaca

SEQ ID NO: 262474 - DNA, 120 bp, Artificial Sequence
  ENSG00000125730_37 (sequence is synthesized)
acctggaggaaagctgtacccggttctaccatccggaaaaggaggatggaaagctgaacaagctctgccgtgatgaactgtgccgctgtgctgaggagaattgcttcatacaaaagtcgg

SEQ ID NO: 262475 - DNA, 120 bp, Artificial Sequence
  ENSG00000125730_38 (sequence is synthesized)
atgacaaggtcaccctggaagaacggctggacaaggcctgtgagccaggagtggactatgtgtacaagacccgactggtcaaggttcagctgtccaatgactttgacgagtacatcatgg

SEQ ID NO: 262476 - DNA, 120 bp, Artificial Sequence
  ENSG00000125730_39 (sequence is synthesized)
ccattgagcagaccatcaagtcaggctcggatgaggtgcaggttggacagcagcgcacgttcatcagccccatcaagtgcagagaagccctgaagctggaggagaagaaacactacctca

SEQ ID NO: 262477 - DNA, 120 bp, Artificial Sequence
  ENSG00000125730_40 (sequence is synthesized)
tgtggggtctctcctccgatttctggggagagaagcccaacctcagctacatcatcgggaaggacacttgggtggagcactggcccgaggaggacgaatgccaagacgaagagaaccaga

SEQ ID NO: 262478 - DNA, 120 bp, Artificial Sequence
  ENSG00000125730_41 (sequence is synthesized)
aacaatgccaggacctcggcgccttcaccgagagcatggttgtctttgggtgccccaactgaccacacccccattcccccactccagataaagcttcagttatatctcacgtgtctggag

SEQ ID NO: 262479 - DNA, 120 bp, Artificial Sequence
  ENSG00000125730_42 (sequence is synthesized)
ttctttgccaagagggagaggctgaaatccccagccgcctcacctgcagctcagctccatcctacttgaaacctcacctgttcccaccgcattttctcctggcgttcgcctgctagtgtg

SEQ ID NO: 262480 - DNA, 120 bp, Artificial Sequence
  ENSG00000125730_43 (sequence is synthesized)
caaatttctgaccacagccaaaggtgagggttggcctggaggggtgaagggagatgcatggctgaagttcagggcgggagatactgagctgggatgcatggcttttagctgagctgggac

SEQ ID NO: 262481 - DNA, 120 bp, Artificial Sequence
  ENSG00000125730_44 (sequence is synthesized)
agatgaccctaagccaagctgagatggatagtcctaaggtatcaagctgggatgcataaccctgagctgagctgggatgcacggctctaagttttcgcaggtcctcattgtaaaccacac

SEQ ID NO: 262482 - DNA, 120 bp, Artificial Sequence
  ENSG00000125730_45 (sequence is synthesized)
gagaaagtttgttgcgtcatttattcaacaaatgcgtattaagcattcatttcaaagggagaagtgagagttgatgaaacaagagaggtaaggcaggagccaagtaattgagagcctcga

SEQ ID NO: 262483 - DNA, 120 bp, Artificial Sequence
  ENSG00000125730_46 (sequence is synthesized)
atgtcagccaggacacccaaacaccaggaagtctagcatgcatctctttctgagctttctctgagccatccccaggctggacagagcagtgagcactggggatggggtatcttctttgca

SEQ ID NO: 262484 - DNA, 120 bp, Artificial Sequence
  ENSG00000125730_47 (sequence is synthesized)
ctagcatgcatctctttctgagctttctctgagccatccccaggctggacagagcagtgagcactggggatggggtatcttctttgcagataagaaccgctgggaggaccctggtaagca

SEQ ID NO: 262485 - DNA, 120 bp, Artificial Sequence
  ENSG00000125730_48 (sequence is synthesized)
tccctctatctctagcaagaattcttgcaaataatatccatgatattcagtactttccaagtacactgtgtatctgatactgttctaagtatccaccatgaggtagacaacacagacagt

SEQ ID NO: 262486 - DNA, 120 bp, Artificial Sequence
  ENSG00000125730_49 (sequence is synthesized)
cgcctcctccttgtttcttccgcacccctgggactccttcccccatcccggatccctccctgcgttccctgccactcaccctccccagcctgatgccagcctgtccccccagatcatgaa

SEQ ID NO: 262487 - DNA, 120 bp, Artificial Sequence
  ENSG00000125730_50 (sequence is synthesized)
gtatgtcaggttcttgaggagggggctcagggctcccctatccccggagagggagcaggggggctccgaggcctgagagaccactcatccgccctcctcacagcatgggccagtggaaga

SEQ ID NO: 262488 - DNA, 120 bp, Artificial Sequence
  ENSG00000125730_51 (sequence is synthesized)
tcgaaacgagcaggtggaaatccgagccgttctctacaattaccggcagaaccaagagctcaaggtgggtcccggggtggcagaggcttcttggaggctgccagggggtaggtagcctgt

SEQ ID NO: 262489 - DNA, 120 bp, Artificial Sequence
  ENSG00000125730_52 (sequence is synthesized)
agccaacctagggcctggggtctgatggttccaggggcctgagagtcccagaggaaagctgtacccggttctaccatccggaaaaggaggatggaaagctgaacaagctctgccgtgatg

SEQ ID NO: 262490 - DNA, 120 bp, Artificial Sequence
  ENSG00000125730_53 (sequence is synthesized)
attgagatgcaaggtgtatttgttgttttttttttcctttgtatgacacttacggagagtactttagttcaaaaaaatgcttgccttcttctctttgtataatttacaacatggagtaaa

SEQ ID NO: 262491 - DNA, 120 bp, Artificial Sequence
  ENSG00000125730_54 (sequence is synthesized)
catcttttctatgccttagtaccttgtcttgctcctttctaagtttggatcagcttccaatattttatcctttgagctttccatgacacaaaattcctccaagagttcctttaaagtgac

SEQ ID NO: 262492 - DNA, 120 bp, Artificial Sequence
  ENSG00000125730_55 (sequence is synthesized)
tttgtattctataatgtcccttcctctgggacatcttcatcctttttgtccccatgaccttccttatttatgctaatacatttgccttccctgagttcctctacactacctatctctcaa

SEQ ID NO: 262493 - DNA, 120 bp, Artificial Sequence
  ENSG00000125730_56 (sequence is synthesized)
atggcagcagggtcaacatcaccatagtctgctattctttgataactccatttatgctgtctttgaagttcacttctggcattatcacttttcatttctttgctgcatttttatctttgt

SEQ ID NO: 262494 - DNA, 120 bp, Artificial Sequence
  ENSG00000125730_57 (sequence is synthesized)
tggccagttccctcttttcgtgatacattgttgtaaaatctcatgggagttagccacctggagacagggaggcaacagaactacacactttgctgtctgtgcataaattgaagagcagaa

SEQ ID NO: 262495 - DNA, 120 bp, Artificial Sequence
  ENSG00000125730_58 (sequence is synthesized)
gctcagtgaccaatcactgatggactttgaaaggagtgacagtaattggccctcaattatgatgcttatcttttatttatgtcgtgatttctagactgaagagttagcaacaaagtttat

SEQ ID NO: 262496 - DNA, 120 bp, Artificial Sequence
  ENSG00000125730_59 (sequence is synthesized)
accatatgcaactactcgtgatcaatataccaaggtactgaaaaagaaccatgtcactgggctactagtgttatttaactgaatcatgcagagtgagggctgcctgtattcttgccttgt

SEQ ID NO: 262497 - DNA, 120 bp, Artificial Sequence
  ENSG00000125730_60 (sequence is synthesized)
tttctagaactgaagcatggagggtcaaataatgcatccaatgttatttagagctggaatttgaatccatgcagttgggtgcagagtctgagctcttaatcaccttgaccattacattac

SEQ ID NO: 262498 - DNA, 120 bp, Artificial Sequence
  ENSG00000125730_61 (sequence is synthesized)
cagaagtctcagtgcctgatcagacctccttgtccaggaacagacccttggggctgacccctccttgggacccaatgcccttctttctgcactatccaggtaccggggagaccaggatgc

SEQ ID NO: 262499 - DNA, 120 bp, Artificial Sequence
  ENSG00000125730_62 (sequence is synthesized)
atgccacgcccacaccattgtcacgcccctgcgccacgcccacaccacgccccttcctgacctgccattcttccctccagcctcagctacatcatcgggaaggacacttgggtggagcac

SEQ ID NO: 262500 - DNA, 120 bp, Artificial Sequence
  ENSG00000125731_0 (sequence is synthesized)
agcttccgcctggacccagcctcgtgggagccccgcgggtcctgcccagatgtggaagactgaggcctgttgaaagtgcagagctcagccctggcaccctctgttcccaagagctccatg

SEQ ID NO: 262501 - DNA, 120 bp, Artificial Sequence
  ENSG00000125731_1 (sequence is synthesized)
caggtgccacaggatggagaagaccttgctggccaaccttggtaccacggcctcctgtcccgccagaaggctgaagctcttcttcagcaaaatggcgacttcctggttcgcgcctctggg

SEQ ID NO: 262502 - DNA, 120 bp, Artificial Sequence
  ENSG00000125731_2 (sequence is synthesized)
tcccgtgggggcaaccccgtgatctcctgccgctggcggggctcagccctccattttgaggtgttccgtgtggccctgcgtccccggccaggccgacccacagccctctttcaactggag

SEQ ID NO: 262503 - DNA, 120 bp, Artificial Sequence
  ENSG00000125731_3 (sequence is synthesized)
gatgagcaattccccagcataccggctctggttcacagttatatgacaggcaggcgcccactgtcccaggccacaggggctgtggtctccaggcctgtgacttggcaggggcctctgcga

SEQ ID NO: 262504 - DNA, 120 bp, Artificial Sequence
  ENSG00000125731_4 (sequence is synthesized)
cgcagctttagcgaggacaccctgatggatggcccagctcggatagagcctctcagggcaaggaagtggagcaacagtcagcctgcagatttggcacatatggggcggtcaagagaagac

SEQ ID NO: 262505 - DNA, 120 bp, Artificial Sequence
  ENSG00000125731_5 (sequence is synthesized)
cccgctgggatggaagcctccaccatgcccatatctgccttgccccgaacgagcagtgacccggtgttgctgaaggcccctgctcccctgggaactgttgccgacagtctcagggcctcc

SEQ ID NO: 262506 - DNA, 120 bp, Artificial Sequence
  ENSG00000125731_6 (sequence is synthesized)
gatgggcagcttcaagccaaggcaccaacgaagcccccccggacaccctccttcgaactgcctgatgcctctgaacgtcccccgacgtactgcgagctggtgccccgagtgcccagtgtc

SEQ ID NO: 262507 - DNA, 120 bp, Artificial Sequence
  ENSG00000125731_7 (sequence is synthesized)
cagggaacatccccgagccaaagctgcccagagccagaggccccatggtgggaggccgaggaggatgaggaggaagagaatagatgttttacaagaccacaggctgagatctctttctgc

SEQ ID NO: 262508 - DNA, 120 bp, Artificial Sequence
  ENSG00000125731_8 (sequence is synthesized)
ccccatgatgccccctcctgcctgctgggcccccagaatcggcccctggaaccccaagtcctgcataccctccgtggcctgttcctggagcaccatcctgggagcaccgcccttcacctg

SEQ ID NO: 262509 - DNA, 120 bp, Artificial Sequence
  ENSG00000125731_9 (sequence is synthesized)
tattggtagactgccaggccacaggcctcctgggagtgaccagagatcagcggggcaacatgggagtctcatctggcctggagctgctcactcttccccatggacaccacttgaggttgg

SEQ ID NO: 262510 - DNA, 120 bp, Artificial Sequence
  ENSG00000125731_10 (sequence is synthesized)
aactgctggagaggcatcagacactggcgctggccggggcgctggcggtgctgggctgctcggggccgctggaggagcgcgcagccgcactgaggggactggtagagctggcgctggcgc

SEQ ID NO: 262511 - DNA, 120 bp, Artificial Sequence
  ENSG00000125731_11 (sequence is synthesized)
tgcggccaggggcggcgggggacctgcccgggctggctgcagtcatgggcgccctgctcatgccccaggtgtcccggttggagcacacgtggcgccagctccgaaggagccacacggagg

SEQ ID NO: 262512 - DNA, 120 bp, Artificial Sequence
  ENSG00000125731_12 (sequence is synthesized)
ctgcgctggcctttgagcaggagctgaagccgctgatgcgggctctggatgagggcgctggaccctgcgaccccggcgaggtggcgctgccgcacgtggcacccatggttcgcctactgg

SEQ ID NO: 262513 - DNA, 120 bp, Artificial Sequence
  ENSG00000125731_13 (sequence is synthesized)
agggcgaggaagtcgcggggccgctggacgagagctgtgagcggctgttgcgcaccctgcacggggcgcgtcacatggtccgggacgcacccaaattccgcaaggtggcagcccagcgcc

SEQ ID NO: 262514 - DNA, 120 bp, Artificial Sequence
  ENSG00000125731_14 (sequence is synthesized)
tgcgaggattccggcctaacccggagctgagggaggccctgaccaccggcttcgtgcggaggctgctctggggtagccggggcgcgggagctccgcgcgctgaacgctttgagaagttcc

SEQ ID NO: 262515 - DNA, 120 bp, Artificial Sequence
  ENSG00000125731_15 (sequence is synthesized)
agcgcgtcctcggcgtcctgtcgcagcgcctggagcctgaccgctgagagcgcagacacccttcttcacacccgggacccccaggtttttgcgaaccccagaagagaccaaaggagtcgt

SEQ ID NO: 262516 - DNA, 120 bp, Artificial Sequence
  ENSG00000125731_16 (sequence is synthesized)
cccaggctcctcgcgcctcaggtggaatcctgccctgtgcctcacagaagaggtggggaccgcagtcagggtcacctggaccatggtgaacatgtgacctgcagatctggcatcagaggc

SEQ ID NO: 262517 - DNA, 120 bp, Artificial Sequence
  ENSG00000125731_17 (sequence is synthesized)
cagagttcaaatgtgactccacctcttaaaagccgtgatttctagcagttgacttcacctctgtgtcggcctttaacaaaatcatagccatacagcagctcaggcctgtaatctcagcac

SEQ ID NO: 262518 - DNA, 120 bp, Artificial Sequence
  ENSG00000125731_18 (sequence is synthesized)
gaattcattaattacatttctgcaagatggggtggcatgttgtcatcttcagccattttttttttcttcgattgcattatatttggaacaggcacgatggtgacatctgtaatcccaact

SEQ ID NO: 262519 - DNA, 120 bp, Artificial Sequence
  ENSG00000125731_19 (sequence is synthesized)
acttgggaggctgaggctagaggattccttgagcccaggaattcaaggctaaagtgtgctatgatcacacctgtgaatagcactgcactccagcctgggcaacacataagacctctctct

SEQ ID NO: 262520 - DNA, 64 bp, Artificial Sequence
  ENSG00000125731_20 (sequence is synthesized)
cactgcactccagcctgggcaacacataagacctctctctttaaatgtaaaaaaaaaagtctgc

SEQ ID NO: 262521 - DNA, 70 bp, Artificial Sequence
  ENSG00000125731_21 (sequence is synthesized)
tcaggagttcaagaccagcctggcgaacacagtgaaaccctgtctctactacaaatataaaaaaagaaaa

SEQ ID NO: 262522 - DNA, 67 bp, Artificial Sequence
  ENSG00000125731_22 (sequence is synthesized)
cagcctgggttggagctgtctccaaaattaagaagaggatgaaaggagctgacccagacactcaagc

SEQ ID NO: 262523 - DNA, 120 bp, Artificial Sequence
  ENSG00000125731_23 (sequence is synthesized)
tcgagcctcaatttcttgctttagaaaatgatgacaatcacgatgacttaaaacatgcagggactttgtgggtgcttaaaatgtgtgtttacaaggctgagcgcggtggctcatgcctgt

SEQ ID NO: 262524 - DNA, 120 bp, Artificial Sequence
  ENSG00000125731_24 (sequence is synthesized)
aaaaaaaaaaaagtgtttacaattattccaaggagctgtacctgttctgaccacagcttaccttgctaacaacttctgctacgtaccctcctcatgctggtcacacagccctccttgcag

SEQ ID NO: 262525 - DNA, 120 bp, Artificial Sequence
  ENSG00000125731_25 (sequence is synthesized)
ttgttcgaaccctcaggcttttattcccgcctcggggcctttgcattttacatttccaccagtgacgggaacattctcattcccctaattttttcctgagtggctcctctccatccaggg

SEQ ID NO: 262526 - DNA, 120 bp, Artificial Sequence
  ENSG00000125731_26 (sequence is synthesized)
taagttcctcaaagcagttgagtctgacggtcttacctaaaggaggactcacctgaatgccccctcatgccccttttttcccatccttctcccaaccccattcaacatgagccgtccctg

SEQ ID NO: 262527 - DNA, 120 bp, Artificial Sequence
  ENSG00000125731_27 (sequence is synthesized)
catcccaggccctgcacggagtgctaggatacatcaacaaaccagaaagagacaaagatccctgcccgatgggagccaacagtccacgagaggacaacaaaccatgaaccacaaaaataa

SEQ ID NO: 262528 - DNA, 85 bp, Artificial Sequence
  ENSG00000125731_28 (sequence is synthesized)
agtccacgagaggacaacaaaccatgaaccacaaaaataaggcaattttgtttgcttcaagatgaaaattaaaacacaggaaggg

SEQ ID NO: 262529 - DNA, 86 bp, Artificial Sequence
  ENSG00000125731_29 (sequence is synthesized)
aatacaaaaattagccaggtgtagtggcatatgcctgtaatccaagctacttgggacagagtgagactgtctcaaaaaaaccgagt

SEQ ID NO: 262530 - DNA, 120 bp, Artificial Sequence
  ENSG00000125731_30 (sequence is synthesized)
acaaaaacaaaacaaaacaaaaaaaacagagtaagggagatagagactataaagatggagatgtatattgcaattttattttatttctatttatttatttatttttgagatagagttttg

SEQ ID NO: 262531 - DNA, 120 bp, Artificial Sequence
  ENSG00000125731_31 (sequence is synthesized)
tacaggcgtgagccattgtacccaagcaagcaattttaagtggtagtcaggaaaggccccattgcagaaaaaaataaaattgaaggaaatgagggagggaacaggtggataactggggga

SEQ ID NO: 262532 - DNA, 120 bp, Artificial Sequence
  ENSG00000125731_32 (sequence is synthesized)
taagcaggcaggaggaagaggcagtgcaaaggctcttgggtcagaacaagaatttaagctgttcattcaaccaaaaaatgagtgggtagctgggtgtggtgttgcacgcctgtggtccta

SEQ ID NO: 262533 - DNA, 120 bp, Artificial Sequence
  ENSG00000125731_33 (sequence is synthesized)
cacgcctgtggtcctagccacttgggaggttgaagcaggaggactccttgaacccagaaagtcaaggctgcagtgagccgtgatcgcaccattgcactccagcctgggccacagagtgag

SEQ ID NO: 262534 - DNA, 120 bp, Artificial Sequence
  ENSG00000125731_34 (sequence is synthesized)
taggtgccaggagaaagggggacagaacttggtgtgaaagttccccgtctttgcctgccacagaagtttcactgggaaggctgaagctcttcttcagcaaaatggcgacttcctggttcg

SEQ ID NO: 262535 - DNA, 120 bp, Artificial Sequence
  ENSG00000125731_35 (sequence is synthesized)
gggactggaggaagctggagtgcgggtgactgggaagactggagaggaggcgtgctcagatctcttctcccaggtgtcccggttggagcacacgtggcgccagctccgaaggagccacac

SEQ ID NO: 262536 - DNA, 120 bp, Artificial Sequence
  ENSG00000125731_36 (sequence is synthesized)
gatctccaaacagctccccactcatggttccccagggaagaagggagatggggcaatgccacctcctgtcccccctcacccctgcattacaaacctccccacttcccccagacccttgcc

SEQ ID NO: 262537 - DNA, 120 bp, Artificial Sequence
  ENSG00000125733_0 (sequence is synthesized)
gagtctccccggggagggcggcgggcggcgggcggcggggaccgggtgcggtggtggctgcggcggcggcggcgggagcagcatggattggggcactgagctgtgggatcagttcgaggt

SEQ ID NO: 262538 - DNA, 120 bp, Artificial Sequence
  ENSG00000125733_1 (sequence is synthesized)
gctcgagcgccacacgcagtgggggctggacctgttggacagatatgtaaagttcgtgaaagaacgcaccgaagtggaacaggcttacgccaaacaactgcggagcctggtgaaaaaata

SEQ ID NO: 262539 - DNA, 120 bp, Artificial Sequence
  ENSG00000125733_2 (sequence is synthesized)
tctgcccaagagacctgccaaggatgatcctgagtccaaattcagccagcaacagtccttcgtacagattctccaggaggtgaatgactttgcaggccagcgggagctggtggctgagaa

SEQ ID NO: 262540 - DNA, 120 bp, Artificial Sequence
  ENSG00000125733_3 (sequence is synthesized)
cctcagtgtccgtgtatgtcttgagctgaccaagtactcacaagagatgaaacaggagaggaagatgcacttccaagaagggcggcgggcccagcagcagctggaaaatggctttaaaca

SEQ ID NO: 262541 - DNA, 120 bp, Artificial Sequence
  ENSG00000125733_4 (sequence is synthesized)
gctggagaatagtaagcgtaaatttgagcgggactgccgggaggcagagaaggcagcccagactgctgaacggctagaccaggatatcaacgccaccaaggctgatgtggagaaggccaa

SEQ ID NO: 262542 - DNA, 120 bp, Artificial Sequence
  ENSG00000125733_5 (sequence is synthesized)
gcagcaagcccaccttcggagtcacatggccgaagaaagcaaaaacgaatatgcggctcaactgcagcgcttcaaccgagaccaagcccacttctatttttcacagatgccccagatatt

SEQ ID NO: 262543 - DNA, 120 bp, Artificial Sequence
  ENSG00000125733_6 (sequence is synthesized)
cgataagctccaagacatggatgaacgcagggccacccgcctgggtgccgggtatgggctcctgtcggaggccgagctggaggtggtgcccataatagccaagtgcttggagggcatgaa

SEQ ID NO: 262544 - DNA, 120 bp, Artificial Sequence
  ENSG00000125733_7 (sequence is synthesized)
ggtggctgcaaatgctgtggatcccaagaacgactcccacgtccttatagagctgcacaagtcaggttttgcccgcccgggcgacgtggaattcgaggacttcagccagcccatgaaccg

SEQ ID NO: 262545 - DNA, 120 bp, Artificial Sequence
  ENSG00000125733_8 (sequence is synthesized)
accgaggattttagccacttgcccccagagcagcagcgaaaacggcttcaacagcagttggaagaacgcagtcgtgaacttcagaaggaggttgaccagagggaagccctaaagaaaatg

SEQ ID NO: 262546 - DNA, 120 bp, Artificial Sequence
  ENSG00000125733_9 (sequence is synthesized)
aaggatgtctatgagaagacacctcagatgggggaccccgccagcttggagccccagatcgctgaaaccctgagcaacattgaacggctgaaattggaagtgcagaagtatgaggcgtgg

SEQ ID NO: 262547 - DNA, 120 bp, Artificial Sequence
  ENSG00000125733_10 (sequence is synthesized)
ctggcagaagctgaaagtcgagtccttagcaaccggggagacagcctgagccggcacgcccggcctcccgacccccccgctagcgccccgccagacagcagcagcaacagcgcatcacag

SEQ ID NO: 262548 - DNA, 120 bp, Artificial Sequence
  ENSG00000125733_11 (sequence is synthesized)
gacaccaaggagagctctgaagagcctccctcagaagagagccaggacacccccatttacacggagtttgatgaggatttcgaggaggaacccacatcccccataggtcactgtgtggcc

SEQ ID NO: 262549 - DNA, 120 bp, Artificial Sequence
  ENSG00000125733_12 (sequence is synthesized)
atctaccactttgaagggtccagcgagggcactatctctatggccgagggtgaagacctcagtcttatggaagaagacaaaggggacggctggacccgggtcaggcggaaagagggaggc

SEQ ID NO: 262550 - DNA, 120 bp, Artificial Sequence
  ENSG00000125733_13 (sequence is synthesized)
gagggctacgtgcccacctcctacctccgagtcacgctcaattgaaccctgccagagacgggaagaggggggctgtcggctgctgcttctgggccacggggagccccaggacctatgcac

SEQ ID NO: 262551 - DNA, 120 bp, Artificial Sequence
  ENSG00000125733_14 (sequence is synthesized)
tttatttctgaccccgtggcttcggctgagacctgtgtaacctgctgccccctccacccccaacccagtcctacctgtcacaccggacggacccgctgtgccttctaccatcgttccacc

SEQ ID NO: 262552 - DNA, 120 bp, Artificial Sequence
  ENSG00000125733_15 (sequence is synthesized)
attgatgtacatactcatgttttacatcttttctttctgccgctcggctccggccattttgttttatacaaaaatgggaaaaaaaaaaaagaaattatataaagttcctagagtcggtgt

SEQ ID NO: 262553 - DNA, 120 bp, Artificial Sequence
  ENSG00000125733_16 (sequence is synthesized)
tgcaccctccgacagcagtctgggcaccccctcggatggacggcctgaactccgaggcccgggtcgcagccgcaccaagcgctggccttttggcaagaagaacaagcctcgccccccacc

SEQ ID NO: 262554 - DNA, 120 bp, Artificial Sequence
  ENSG00000125733_17 (sequence is synthesized)
aatccggggggattaggggagcccgagctgggggagtggccctgtccccttccacgcccctcttggcggtcctatgtcggagacctccatctcccggccggggtggctggggcctgggcg

SEQ ID NO: 262555 - DNA, 120 bp, Artificial Sequence
  ENSG00000125733_18 (sequence is synthesized)
ctgttctccggcccttcccgggaaggggagggggttcccgccagtttcctgcctccccccgcgccacgccggggcggcgccgggaagccactccttctaggagcgcagagccttggccct

SEQ ID NO: 262556 - DNA, 120 bp, Artificial Sequence
  ENSG00000125733_19 (sequence is synthesized)
tgaacgccgagtctcgggcaggaattttcctcttggctgccagcccggactggagggaaggaaggcggccgattggcctgggagtcccccgaggcgaaggcgggggcagggtggggaggt

SEQ ID NO: 262557 - DNA, 120 bp, Artificial Sequence
  ENSG00000125733_20 (sequence is synthesized)
gcagggttgcggatccggagtcagggagctgccctctttgtcagacctggaccttccctcccccataggcttccagtactcccttgacccctacttactggatgacatcccaataatccc

SEQ ID NO: 262558 - DNA, 120 bp, Artificial Sequence
  ENSG00000125733_21 (sequence is synthesized)
aatgcagcgggagcagacaagggccacaaagcattaaataaactacctttcccagtatccccaaggacggacttcctcttcttgagccagggatgtggctcccagccagagctgaggctt

SEQ ID NO: 262559 - DNA, 120 bp, Artificial Sequence
  ENSG00000125733_22 (sequence is synthesized)
ttggtaaacacacgcatctgttcaggcctgacctgttttcctaatcttcctggtccacagagaggcctaaagctggcctcaggttaaagtttgaccctaggatgacctatgaccccaggc

SEQ ID NO: 262560 - DNA, 120 bp, Artificial Sequence
  ENSG00000125733_23 (sequence is synthesized)
tgagaccccagccttaggctaagccttttattccagagtgaggcaattggagccccacccccagattccaggctagaccggactccgggctgaactctgaccccaggatcagttcgaggt

SEQ ID NO: 262561 - DNA, 120 bp, Artificial Sequence
  ENSG00000125733_24 (sequence is synthesized)
cccaacccagacctgctttgctctgtgcatggcttcgctgtcaagaaccatggctggggaagggagtgaaatatctcagacgggtgcagagtctggcaggctagactccttgatcccaaa

SEQ ID NO: 262562 - DNA, 120 bp, Artificial Sequence
  ENSG00000125733_25 (sequence is synthesized)
agatgcaggcgcgaactggaaggcagctggggaaaggcctgggcctggcgccccaaggacggcctgtcttcagtttcccagcggagactctgggggagggaaggcaggatgcggtgcggg

SEQ ID NO: 262563 - DNA, 120 bp, Artificial Sequence
  ENSG00000125733_26 (sequence is synthesized)
agttaatggacctggccttggcgaaggcgcgtcctgggttggatcgaaaccctctcatccgccctgtggccggagggaccagaccattagtgggacgaacctagacgcctggagccgggc

SEQ ID NO: 262564 - DNA, 120 bp, Artificial Sequence
  ENSG00000125734_0 (sequence is synthesized)
ggagtcggggaggaggtggctccagagatggcagtgagcgagaggagggggctcggccgcgggagccccgcggagtgggggcagcggctacttctggtgctgctgctgggtggctgctcc

SEQ ID NO: 262565 - DNA, 120 bp, Artificial Sequence
  ENSG00000125734_1 (sequence is synthesized)
gggcgcatccaccagctggcgctgacgggggagaagcgagcggacatccagctgaacagcttcggtttctacaccaatggctctctggaggtggagttgagcgtcctgcggctgggcctc

SEQ ID NO: 262566 - DNA, 120 bp, Artificial Sequence
  ENSG00000125734_2 (sequence is synthesized)
cgggaggcagaagagaagtccctgctggtggggttcagtctcagccgggttcggtctggcagagttcgctcctattcaacccgggatttccaggactgccctctccagaaaaacagtagc

SEQ ID NO: 262567 - DNA, 120 bp, Artificial Sequence
  ENSG00000125734_3 (sequence is synthesized)
agtttcctggtcctgttcctcatcaacaccaaggatctgcaggtccaggtgcggaagtatggagagcagaagacgttgtttatctttcccgggctcctcccggaagcaccctccaaacca

SEQ ID NO: 262568 - DNA, 120 bp, Artificial Sequence
  ENSG00000125734_4 (sequence is synthesized)
gggctcccgaagccacaggccacagtcccccgcaaggtggatggcggagggacctctgcagccagcaagcccaagtcaacacccgcagtgattcagggtcctagtgggaaggacaaggac

SEQ ID NO: 262569 - DNA, 120 bp, Artificial Sequence
  ENSG00000125734_5 (sequence is synthesized)
ctggtgttgggcctgagccacctcaacaactcctacaacttcagtttccacgtggtgatcggctctcaggcggaagaaggccagtacagcctgaacttccacaactgcaacaattcagtg

SEQ ID NO: 262570 - DNA, 120 bp, Artificial Sequence
  ENSG00000125734_6 (sequence is synthesized)
ccaggaaaggagcatccattcgacatcacggtgatgatccgggagaagaaccccgatggcttcctgtcggcagcggagatgccccttttcaagctctacatggtcatgtccgcctgcttc

SEQ ID NO: 262571 - DNA, 120 bp, Artificial Sequence
  ENSG00000125734_7 (sequence is synthesized)
ctggccgctggcatcttctgggtgtccatcctctgcaggaacacgtacagcgtcttcaagatccactggctcatggcggccttggccttcaccaagagcatctctctcctcttccacagc

SEQ ID NO: 262572 - DNA, 120 bp, Artificial Sequence
  ENSG00000125734_8 (sequence is synthesized)
caacagccagggccaccccatcgaaggccttgccgtcatgtactacatcgcacacctgctgaagggcgccctcctcttcatcaccatcgccctgattggctcaggctgggccttcatcaa

SEQ ID NO: 262573 - DNA, 120 bp, Artificial Sequence
  ENSG00000125734_9 (sequence is synthesized)
gtacgtcctgtcggataaggagaagaaggtctttgggatcgtgatccccatgcaggtcctggccaacgtggcctacatcatcatcgagtcccgcgaggaaggcgccagcgactacgtgct

SEQ ID NO: 262574 - DNA, 120 bp, Artificial Sequence
  ENSG00000125734_10 (sequence is synthesized)
gtggaaggagattttgttcctggtggacctcatctgctgtggtgccatcctgttccccgtagtctggtccatccggcatctccaggatgcgtctggcacagacgggaaggtggcagtgaa

SEQ ID NO: 262575 - DNA, 120 bp, Artificial Sequence
  ENSG00000125734_11 (sequence is synthesized)
cctggccaagctgaagctgttccggcattactatgtcatggtcatctgctacgtctacttcacccgcatcatcgccatcctgctgcaggtggctgtgccctttcagtggcagtggctgta

SEQ ID NO: 262576 - DNA, 120 bp, Artificial Sequence
  ENSG00000125734_12 (sequence is synthesized)
ccagctcttggtggagggctccaccctggccttcttcgtgctcacgggctacaagttccagcccacaggaaacaacccgtacctgcagctgccccaggaggacgaggaggatgttcagat

SEQ ID NO: 262577 - DNA, 120 bp, Artificial Sequence
  ENSG00000125734_13 (sequence is synthesized)
ggagcaagtaatgacggactctgggttccgggaaggcctctccaaagtcaacaaaacagccagcgggcgggaactgttatgatcacctccacatctcagaccaaagggtcgtcctccccc

SEQ ID NO: 262578 - DNA, 120 bp, Artificial Sequence
  ENSG00000125734_14 (sequence is synthesized)
agcatttctcactcctgcccttcttccacagcgtatgtggggaggtggagggggtccatgtggaccaggcgcccagctccccgggaccccggttcccggacaagcccatttggaagaaga

SEQ ID NO: 262579 - DNA, 120 bp, Artificial Sequence
  ENSG00000125734_15 (sequence is synthesized)
gtcccttcctccccccaaatattgggcagccctgtccttaccccgggaccacccctcccttccagctatgtgtacaataatgaccaatctgtttggctacgccgttgtcttgcctttttg

SEQ ID NO: 262580 - DNA, 120 bp, Artificial Sequence
  ENSG00000125734_16 (sequence is synthesized)
ggggttggggtctacacggaggttgtgtttacaatgtagaaacctgttttcgctgtgtgtggcgggggcgcgggcacagggtccgtgtctttgtatattcaataaatattcattcagtaa

SEQ ID NO: 262581 - DNA, 120 bp, Artificial Sequence
  ENSG00000125734_17 (sequence is synthesized)
tcgctggggtcggccccctcccttcgggggcgaggctccatctcttggggactacaccccccttccccccaactgggtcttagtcctttaaattcttggaatcacttttggggcgctaga

SEQ ID NO: 262582 - DNA, 120 bp, Artificial Sequence
  ENSG00000125734_18 (sequence is synthesized)
gaccctggagccgcacagcggggtcctggggggctatagagtggggtcctctgggcacttaatgggatttggggggttctgttgaaatattgctgggagctcaactggaatgtaaaagtt

SEQ ID NO: 262583 - DNA, 120 bp, Artificial Sequence
  ENSG00000125734_19 (sequence is synthesized)
actgtccgtctctgattgtccaactattcaccccttcagctgtgactgttccctccattttttcagccccgattaccagttttgagtcccacccaccgtcctcattattcaactttctga

SEQ ID NO: 262584 - DNA, 120 bp, Artificial Sequence
  ENSG00000125734_20 (sequence is synthesized)
ccacccatctgatggtgacggtccgtgttcctaatcccccaccaccaccatcagcctcccacccctctgtgcgcctcactgtccgtctgtccatccacccccagatcaactactacttca

SEQ ID NO: 262585 - DNA, 120 bp, Artificial Sequence
  ENSG00000125734_21 (sequence is synthesized)
gggaccgggggctcgctcagatccttcgtctgcgtttccctggtgtgatgcccacacgcacctgggctgatcaggtgggatgagaagcagagagagaaagccacttactttttagttttg

SEQ ID NO: 262586 - DNA, 120 bp, Artificial Sequence
  ENSG00000125734_22 (sequence is synthesized)
ccttcaagtcttctgattgttggaaggaaggagagagggactccgcgggtgttggtgtctcagggcagaagacccggatacagagggttgttgtgagaatgaataacaattgttcgcaca

SEQ ID NO: 262587 - DNA, 120 bp, Artificial Sequence
  ENSG00000125734_23 (sequence is synthesized)
atagaggggtaccaggaggcccttctggaggtcctcgtgccagacccctggggctgggcaggcggaaagaggtctgaactgcctctgcctccttggtctccggcagggggagaagcgagc

SEQ ID NO: 262588 - DNA, 120 bp, Artificial Sequence
  ENSG00000125735_0 (sequence is synthesized)
cgagactccatctcaaaaacaaaacaaataaacgaacaaaaaaacccacaacgtattattttcttgtttacgaggtttcttgtctctctggctccaccagaagaggagcagggacccttc

SEQ ID NO: 262589 - DNA, 120 bp, Artificial Sequence
  ENSG00000125735_1 (sequence is synthesized)
ttgctgttgttcattgctgcatcccccacaccgagagcagagcctggcatgggcagaaagtcctcagtcgatatttggtggccccaagcgaatgaagcatccaagaagggaaagctgggg

SEQ ID NO: 262590 - DNA, 120 bp, Artificial Sequence
  ENSG00000125735_2 (sequence is synthesized)
gctccccactgcacttgccacctgagtcacattttcagaagcctctggaaagtcgtgcacagcccaggagtgttgagcaatttcggtttcctctgaggttgaaggacccaggcgtgtcag

SEQ ID NO: 262591 - DNA, 120 bp, Artificial Sequence
  ENSG00000125735_3 (sequence is synthesized)
ccctgctccagacaccttgggcatggaggagagtgtcgtacggccctcagtgtttgtggtggatggacagaccgacatcccattcacgaggctgggacgaagccaccggagacagtcgtg

SEQ ID NO: 262592 - DNA, 120 bp, Artificial Sequence
  ENSG00000125735_4 (sequence is synthesized)
cagtgtggcccgggtgggtctgggtctcttgctgttgctgatgggggccgggctggccgtccaaggctggttcctcctgcagctgcactggcgtctaggagagatggtcacccgcctgcc

SEQ ID NO: 262593 - DNA, 120 bp, Artificial Sequence
  ENSG00000125735_5 (sequence is synthesized)
tgacggacctgcaggctcctgggagcagctgatacaagagcgaaggtctcacgaggtcaacccagcagcgcatctcacaggggccaactccagcttgaccggcagcggggggccgctgtt

SEQ ID NO: 262594 - DNA, 120 bp, Artificial Sequence
  ENSG00000125735_6 (sequence is synthesized)
cctcagctaccacgatggggcccttgtggtcaccaaagctggctactactacatctactccaaggtgcagctgggcggtgtgggctgcccgctgggcctggccagcaccatcacccacgg

SEQ ID NO: 262595 - DNA, 120 bp, Artificial Sequence
  ENSG00000125735_7 (sequence is synthesized)
cctctacaagcgcacaccccgctaccccgaggagctggagctgttggtcagccagcagtcaccctgcggacgggccaccagcagctcccgggtctggtgggacagcagcttcctgggtgg

SEQ ID NO: 262596 - DNA, 120 bp, Artificial Sequence
  ENSG00000125735_8 (sequence is synthesized)
tgtggtacacctggaggctggggagaaggtggtcgtccgtgtgctggatgaacgcctggttcgactgcgtgatggtacccggtcttacttcggggctttcatggtgtgaaggaaggagcg

SEQ ID NO: 262597 - DNA, 120 bp, Artificial Sequence
  ENSG00000125735_9 (sequence is synthesized)
tgtgaaggaaggagcgtggtgcattggacatgggtctgacacgtggagaactcagagggtgcctcaggggaaagaaaactcacgaagcagaggctgggcgtggtggctctcgcctgtaat

SEQ ID NO: 262598 - DNA, 120 bp, Artificial Sequence
  ENSG00000125735_10 (sequence is synthesized)
atcacaccactgcactccaacctgggaaacgcagtgagactgtgcctcaaaaaaaagaaaggaagaaaaaagaaaactcaggaaacagatcttgggggacactccagggaacccaaaact

SEQ ID NO: 262599 - DNA, 120 bp, Artificial Sequence
  ENSG00000125735_11 (sequence is synthesized)
ggacactccagggaacccaaaactcaaaggcggagagctcagtgggcaccaccaaggcgagatgaagccccagcaggcaccttcagaagacccacgtagactgcagaccctgccacggac

SEQ ID NO: 262600 - DNA, 120 bp, Artificial Sequence
  ENSG00000125735_12 (sequence is synthesized)
aatactaaggacaaaaacccagagacttggggtctgtgggcccccaaacatggggtaaagttgatttgcctgatattcaggaagaaggggtgaggggtgggtatttatgcttttgattca

SEQ ID NO: 262601 - DNA, 120 bp, Artificial Sequence
  ENSG00000125735_13 (sequence is synthesized)
gaagaaagtggggcttgggattccagggacttggctgggggtgggaaacttcatccacttccctactctcatcatgagtacggacagggtgggcgggagactgatcatcgggactcatca

SEQ ID NO: 262602 - DNA, 120 bp, Artificial Sequence
  ENSG00000125735_14 (sequence is synthesized)
tgaagagcccagccccaccccacatactcagatcccacccacagactggtggccacacctcagcctggtcacaaagagttacactcagatacatgagcacggcagcgtgctcataactgt

SEQ ID NO: 262603 - DNA, 120 bp, Artificial Sequence
  ENSG00000125735_15 (sequence is synthesized)
ttaacaaccagctgtcctgggagggggacagctttgtaatgtttgccaatttccatggtgtaaatgctaccaccatggctgatttcatcactgccaagcatagacatccctaataggaca

SEQ ID NO: 262604 - DNA, 120 bp, Artificial Sequence
  ENSG00000125735_16 (sequence is synthesized)
ccacggatctgtccccggcatccggcccagggcctggcacaaagcatgctctagggaaatgcttgctgattgaaaggaaggaagaatgactctacagtcacacctatggcatcccacaaa

SEQ ID NO: 262605 - DNA, 120 bp, Artificial Sequence
  ENSG00000125735_17 (sequence is synthesized)
atctgtcacatggctgcataatctcagccactctttcacaactatagactcatacacgcgaagtgccagattcatgcacaaccacacaatcacatggaagtcacagacggcatcacagac

SEQ ID NO: 262606 - DNA, 120 bp, Artificial Sequence
  ENSG00000125735_18 (sequence is synthesized)
agtcacagcactgtgtgtatgttataacacaagcacacaaaactcagacagcatcccagctacacagccactcccagaggtgtcaccgtcacacttggtaattaatactcattacattag

SEQ ID NO: 262607 - DNA, 120 bp, Artificial Sequence
  ENSG00000125735_19 (sequence is synthesized)
acacagacagaccaagttatagtcagacctggttacacacatacacacacacaatatcaccatgacaaatacacattacacacacacaacatcacaatgacaaacacacattacacacac

SEQ ID NO: 262608 - DNA, 120 bp, Artificial Sequence
  ENSG00000125735_20 (sequence is synthesized)
acacacattacacacacaacatcacgatgacaaacacacattacacacacatcacaatgacaaacacaacattacacacacacaacatcacaatgacacacacatcacacacacatcaca

SEQ ID NO: 262609 - DNA, 120 bp, Artificial Sequence
  ENSG00000125735_21 (sequence is synthesized)
atgacaaacacacaacattacacacatatacacacagcctgagggccctccccagcccagactaacacatctcggggtgaggaccagaccttgttcataaccctgggcctcttaaccact

SEQ ID NO: 262610 - DNA, 120 bp, Artificial Sequence
  ENSG00000125735_22 (sequence is synthesized)
gatctttgaaataaatggcaaatagttgtacctggatctgtctagttcttaggggaacaaactgaagaagggtggagaggaattgtcaggcctaaagagccccacagggaaagggaggag

SEQ ID NO: 262611 - DNA, 120 bp, Artificial Sequence
  ENSG00000125735_23 (sequence is synthesized)
tcggatggggggcaaccatcagcaacaagtggtggctcctagaggcagagggatggaggtaatgacccatggaggtcattctacagatgaggaacctggacccagttggctcaagtccat

SEQ ID NO: 262612 - DNA, 120 bp, Artificial Sequence
  ENSG00000125735_24 (sequence is synthesized)
gcaggaaatgtgggggaaaccagagacctcacgtctggatctggcttcctctccaatccacaattcctgaggaagtagaggctacatcccgcaagacgcccttattagacacatccagga

SEQ ID NO: 262613 - DNA, 120 bp, Artificial Sequence
  ENSG00000125735_25 (sequence is synthesized)
cagaatgacaatccgccaagccagctggaagcataaaacacagggagctggtgggttgggtgggggcagataatgatatgcatacaaattagagggtctatgcaaatgagcattgctgca

SEQ ID NO: 262614 - DNA, 120 bp, Artificial Sequence
  ENSG00000125735_26 (sequence is synthesized)
gtgtggctggagggaatccttagttcctaggattctaggatatgggtttcgaccccagaggtgaatgtattgttattattgttttgttgttgttgtgaatgacaagtcaaaatttgtggg

SEQ ID NO: 262615 - DNA, 120 bp, Artificial Sequence
  ENSG00000125735_27 (sequence is synthesized)
ttattgttgttatcgccaatagtattcttgtcattgttgcacagtacagagatgaaggaaacagattttgcaatcagatgatcctgggttctgagtccactctgccactcaccagctata

SEQ ID NO: 262616 - DNA, 120 bp, Artificial Sequence
  ENSG00000125735_28 (sequence is synthesized)
tgacctccagcaatttccatcacctctcaatgcttcagtttccccatcggcaagatggttgtggggggagaggaacaacagtacagattcaccatcccaaattcaaaatgctccaaaatc

SEQ ID NO: 262617 - DNA, 63 bp, Artificial Sequence
  ENSG00000125735_29 (sequence is synthesized)
gtacagattcaccatcccaaattcaaaatgctccaaaatcacggataacctgaggtcaggagc

SEQ ID NO: 262618 - DNA, 120 bp, Artificial Sequence
  ENSG00000125735_30 (sequence is synthesized)
ctccagcctgggtgacagagcaaggctcccatctcaaaaaacaaaaaaacatgctccaaaatctgaaactctttgagccccagtgtgatgccacaagtgggaaattccacaactcatcac

SEQ ID NO: 262619 - DNA, 120 bp, Artificial Sequence
  ENSG00000125735_31 (sequence is synthesized)
atgtgatagattgcagtggaaatgcaggcacacaccacgaagtttactcagcatcctcaaaggaaatccccgtcagtagctatatatcattttctcacatgccagataggtatctctcat

SEQ ID NO: 262620 - DNA, 120 bp, Artificial Sequence
  ENSG00000125735_32 (sequence is synthesized)
cttttactgttaggtacttctgtgttgaataggtggaggaaaatgattgctggttagtagtatataaattcagagtcaggaaggatggtgatgtcggctgggtgcagtggctcatgcctg

SEQ ID NO: 262621 - DNA, 120 bp, Artificial Sequence
  ENSG00000125735_33 (sequence is synthesized)
taattccaatgtgataccctaccttgtgtttaacgtgattgactctcccttagctgagagggccaggcagactctattttggcttcttcgcttgcagtctctcacccaccccccttcctc

SEQ ID NO: 262622 - DNA, 120 bp, Artificial Sequence
  ENSG00000125735_34 (sequence is synthesized)
aaggacttaagctgactcccagcacatccaagaatgcgattactgataagatactgtgacaagctatatccacaattcccaggaattcgtccggttgatagcacccaaagcccccgcgtc

SEQ ID NO: 262623 - DNA, 120 bp, Artificial Sequence
  ENSG00000125735_35 (sequence is synthesized)
tatcaccttgtgatagatttaaagcccctgcacctggaactgtttgtttttctgttaccatttatctttttcactttcttgcctgttttgcttctgtaaaattgcttcagctcggctccc

SEQ ID NO: 262624 - DNA, 120 bp, Artificial Sequence
  ENSG00000125735_36 (sequence is synthesized)
tcttccccttctaaaccaaggtataaaaagaaacctagccccttctttggggtggagagaattttgagcgctagccgtctctcagtcgccggctaataaaggactcctgaattagtctaa

SEQ ID NO: 262625 - DNA, 120 bp, Artificial Sequence
  ENSG00000125740_0 (sequence is synthesized)
attcataagactcagagctacggccacggcagggacacgcggaaccaagacttggaaacttgattgttgtggttcttcttgggggttatgaaatttcattaatctttttttttccgggga

SEQ ID NO: 262626 - DNA, 120 bp, Artificial Sequence
  ENSG00000125740_1 (sequence is synthesized)
gaaagtttttggaaagattcttccagatatttcttcattttcttttggaggaccgacttactttttttggtcttctttattactcccctccccccgtgggacccgccggacgcgtggagg

SEQ ID NO: 262627 - DNA, 120 bp, Artificial Sequence
  ENSG00000125740_2 (sequence is synthesized)
agaccgtagctgaagctgattctgtacagcgggacagcgctttctgcccctgggggagcaacccctccctcgcccctgggtcctacggagcctgcactttcaagaggtacagcggcatcc

SEQ ID NO: 262628 - DNA, 120 bp, Artificial Sequence
  ENSG00000125740_3 (sequence is synthesized)
tgtgggggcctgggcaccgcaggaagactgcacagaaactttgccattgttggaacgggacgttgctccttccccgagcttccccggacagcgtactttgaggactcgctcagctcaccg

SEQ ID NO: 262629 - DNA, 120 bp, Artificial Sequence
  ENSG00000125740_4 (sequence is synthesized)
gggactcccacggctcaccccggacttgcaccttacttccccaacccggccatagccttggcttcccggcgacctcagcgtggtcacaggggcccccctgtgcccagggaaatgtttcag

SEQ ID NO: 262630 - DNA, 120 bp, Artificial Sequence
  ENSG00000125740_5 (sequence is synthesized)
gctttccccggagactacgactccggctcccggtgcagctcctcaccctctgccgagtctcaatatctgtcttcggtggactccttcggcagtccacccaccgccgccgcctcccaggag

SEQ ID NO: 262631 - DNA, 120 bp, Artificial Sequence
  ENSG00000125740_6 (sequence is synthesized)
tgcgccggtctcggggaaatgcccggttccttcgtgcccacggtcaccgcgatcacaaccagccaggacctccagtggcttgtgcaacccaccctcatctcttccatggcccagtcccag

SEQ ID NO: 262632 - DNA, 120 bp, Artificial Sequence
  ENSG00000125740_7 (sequence is synthesized)
gggcagccactggcctcccagcccccggtcgtcgacccctacgacatgccgggaaccagctactccacaccaggcatgagtggctacagcagtggcggagcgagtggcagtggtgggcct

SEQ ID NO: 262633 - DNA, 120 bp, Artificial Sequence
  ENSG00000125740_8 (sequence is synthesized)
tccaccagcggaactaccagtgggcctgggcctgcccgcccagcccgagcccggcctaggagaccccgagaggagacgctcaccccagaggaagaggagaagcgaagggtgcgccgggaa

SEQ ID NO: 262634 - DNA, 120 bp, Artificial Sequence
  ENSG00000125740_9 (sequence is synthesized)
cgaaataaactagcagcagctaaatgcaggaaccggcggagggagctgaccgaccgactccaggcggagacagatcagttggaggaagaaaaagcagagctggagtcggagatcgccgag

SEQ ID NO: 262635 - DNA, 120 bp, Artificial Sequence
  ENSG00000125740_10 (sequence is synthesized)
ctccaaaaggagaaggaacgtctggagtttgtgctggtggcccacaaaccgggctgcaagatcccctacgaagaggggcccgggccgggcccgctggcggaggtgagagatttgccgggc

SEQ ID NO: 262636 - DNA, 120 bp, Artificial Sequence
  ENSG00000125740_11 (sequence is synthesized)
tcagcaccggctaaggaagatggcttcagctggctgctgccgcccccgccaccaccgcccctgcccttccagaccagccaagacgcaccccccaacctgacggcttctctctttacacac

SEQ ID NO: 262637 - DNA, 120 bp, Artificial Sequence
  ENSG00000125740_12 (sequence is synthesized)
agtgaagttcaagtcctcggcgaccccttccccgttgttaacccttcgtacacttcttcgtttgtcctcacctgcccggaggtctccgcgttcgccggcgcccaacgcaccagcggcagt

SEQ ID NO: 262638 - DNA, 120 bp, Artificial Sequence
  ENSG00000125740_13 (sequence is synthesized)
gaccagccttccgatcccctgaactcgccctccctcctcgctctgtgaactctttagacacacaaaacaaacaaacacatgggggagagagacttggaagaggaggaggaggaggagaag

SEQ ID NO: 262639 - DNA, 120 bp, Artificial Sequence
  ENSG00000125740_14 (sequence is synthesized)
gaggagagagaggggaagagacaaagtgggtgtgtggcctccctggctcctccgtctgaccctctgcggccactgcgccactgccatcggacaggaggattccttgtgttttgtcctgcc

SEQ ID NO: 262640 - DNA, 120 bp, Artificial Sequence
  ENSG00000125740_15 (sequence is synthesized)
tgggaaggggatggacacccccagctgactgttggctctctgacgtcaacccaagctctggggatgggtggggaggggggcgggtgacgcccaccttcgggcagtcctgtgtgaggatta

SEQ ID NO: 262641 - DNA, 120 bp, Artificial Sequence
  ENSG00000125740_16 (sequence is synthesized)
agggacgggggtgggaggtaggctgtggggtgggctggagtcctctccagagaggctcaacaaggaaaaatgccactccctacccaatgtctcccacacccaccctttttttggggtgcc

SEQ ID NO: 262642 - DNA, 120 bp, Artificial Sequence
  ENSG00000125740_17 (sequence is synthesized)
taggttggtttcccctgcactcccgaccttagcttattgatcccacatttccatggtgtgagatcctctttactctgggcagaagtgagccccccccttaaagggaattcgatgcccccc

SEQ ID NO: 262643 - DNA, 120 bp, Artificial Sequence
  ENSG00000125740_18 (sequence is synthesized)
tagaataatctcatccccccacccgacttcttttgaaatgtgaacgtccttccttgactgtctagccactccctcccagaaaaactggctctgattggaatttctggcctcctaaggctc

SEQ ID NO: 262644 - DNA, 120 bp, Artificial Sequence
  ENSG00000125740_19 (sequence is synthesized)
cccaccccgaaatcagcccccagccttgtttctgatgacagtgttatcccaagaccctgccccctgccagccgaccctcctggccttcctcgttgggccgctctgatttcaggcagcagg

SEQ ID NO: 262645 - DNA, 120 bp, Artificial Sequence
  ENSG00000125740_20 (sequence is synthesized)
ggctgctgtgatgccgtcctgctggagtgatttatactgtgaaatgagttggccagattgtggggtgcagctgggtggggcagcacacctctggggggataatgtccccactcccgaaag

SEQ ID NO: 262646 - DNA, 120 bp, Artificial Sequence
  ENSG00000125740_21 (sequence is synthesized)
cctttcctcggtctcccttccgtccatcccccttcttcctcccctcaacagtgagttagactcaagggggtgacagaaccgagaagggggtgacagtcctccatccacgtggcctctctc

SEQ ID NO: 262647 - DNA, 120 bp, Artificial Sequence
  ENSG00000125740_22 (sequence is synthesized)
tctctcctcaggaccctcagccctggcctttttctttaaggtcccccgaccaatccccagcctaggacgccaacttctcccaccccttggcccctcacatcctctccaggaagggagtga

SEQ ID NO: 262648 - DNA, 120 bp, Artificial Sequence
  ENSG00000125740_23 (sequence is synthesized)
ggggctgtgacatttttccggagaagatttcagagctgaggctttggtacccccaaacccccaatatttttggactggcagactcaaggggctggaatctcatgattccatgcccgagtc

SEQ ID NO: 262649 - DNA, 120 bp, Artificial Sequence
  ENSG00000125740_24 (sequence is synthesized)
cgcccatccctgaccatggttttggctctcccaccccgccgttccctgcgcttcatctcatgaggatttctttatgaggcaaatttatattttttaatatcggggggtggaccacgccgc

SEQ ID NO: 262650 - DNA, 120 bp, Artificial Sequence
  ENSG00000125740_25 (sequence is synthesized)
cctccatccgtgctgcatgaaaaacattccacgtgccccttgtcgcgcgtctcccatcctgatcccagacccattccttagctatttatccctttcctggtttccgaaaggcaattatat

SEQ ID NO: 262651 - DNA, 120 bp, Artificial Sequence
  ENSG00000125740_26 (sequence is synthesized)
ctattatgtataagtaaatatattatatatggatgtgtgtgtgtgcgtgcgcgtgagtgtgtgagcgcttctgcagcctcggcctaggtcacgttggccctcaaagcgagccgttgaatt

SEQ ID NO: 262652 - DNA, 120 bp, Artificial Sequence
  ENSG00000125740_27 (sequence is synthesized)
ggaaactgcttctagaaactctggctcagcctgtctcgggctgacccttttctgatcgtctcggcccctctgattgttcccgatggtctctctccctctgtcttttctcctccgcctgtg

SEQ ID NO: 262653 - DNA, 120 bp, Artificial Sequence
  ENSG00000125740_28 (sequence is synthesized)
tccatctgaccgttttcacttgtctcctttctgactgtccctgccaatgctccagctgtcgtctgactctgggttcgttggggacatgagattttattttttgtgagtgagactgaggga

SEQ ID NO: 262654 - DNA, 120 bp, Artificial Sequence
  ENSG00000125740_29 (sequence is synthesized)
tcgtagatttttacaatctgtatctttgacaattctgggtgcgagtgtgagagtgtgagcagggcttgctcctgccaaccacaattcaatgaatccccgacccccctaccccatgctgta

SEQ ID NO: 262655 - DNA, 120 bp, Artificial Sequence
  ENSG00000125740_30 (sequence is synthesized)
cttgtggttctctttttgtattttgcatctgaccccggggggctgggacagattggcaatgggccgtcccctctccccttggttctgcactgttgccaataaaaagctcttaaaaacgca

SEQ ID NO: 262656 - DNA, 120 bp, Artificial Sequence
  ENSG00000125740_31 (sequence is synthesized)
agagagtagttaagccttcagagcagttccaggagtccatttacgggaggggggagatgagcgctgctgaggcttgggggctcaggtcccgcaccattccccctccgcgacaatctgaga

SEQ ID NO: 262657 - DNA, 120 bp, Artificial Sequence
  ENSG00000125740_32 (sequence is synthesized)
gagctccagtggttacttttatctacctgtccgttcaccctaaactgtcactcgtcagtctcactctgagaagagacagtaacttgaaacgttgttctaaactcctaggcccgtccccca

SEQ ID NO: 262658 - DNA, 120 bp, Artificial Sequence
  ENSG00000125740_33 (sequence is synthesized)
aacacccttttgactgggacccccgcccctgcatgggacctcgcgcagaggggggtgtgtatgtgtgtgagtgtagaggaaggcttggcctaaggcctctccttctccctccccttgcct

SEQ ID NO: 262659 - DNA, 120 bp, Artificial Sequence
  ENSG00000125740_34 (sequence is synthesized)
ctggggtgggggtggggtgttgtggctgtgtgtgtggctgtggctccgtcccgggggttctgtcacccggctgtgtccagcctcctctccaccccccatacctaagagtcaccaacccgg

SEQ ID NO: 262660 - DNA, 120 bp, Artificial Sequence
  ENSG00000125740_35 (sequence is synthesized)
ggtgtgattcaccacccgctggaaccgtgcaacctttccccgaggaagaaggaggaggtagaagccagttgagcagaaatcctctcattaaccactgcgtcacggtgtagtggaagggtg

SEQ ID NO: 262661 - DNA, 120 bp, Artificial Sequence
  ENSG00000125740_36 (sequence is synthesized)
ggtgttgtggctttttccctgtgacacacacatccacactcgctcaccctgtgctcactcacggggtcggtgtgtgttatgtgtgttgggtgtgtgtgtgtcggtgtctttgtttgtgtg

SEQ ID NO: 262662 - DNA, 120 bp, Artificial Sequence
  ENSG00000125740_37 (sequence is synthesized)
ggaagtttcttatgaatggaggggggctccactaaggcctcagtgttacagaaaccccaagatccttgctacacgagcgaggaccggaggcttgttttttggctcttgggggttctgaaa

SEQ ID NO: 262663 - DNA, 120 bp, Artificial Sequence
  ENSG00000125740_38 (sequence is synthesized)
gccccctctccacctgtacccttatcctgggttgagaactagacgttccacacatggaactaggtactgctgtggccagactgggtagcccagggcacaaacacagacccccatggactt

SEQ ID NO: 262664 - DNA, 120 bp, Artificial Sequence
  ENSG00000125740_39 (sequence is synthesized)
aagtcaactcctggtcccccccccatttcctgaccccacggactactctcctagccttcatttcatcccaaggggccacatggggcccttgaggagaggggcgcccccatcatttctccc

SEQ ID NO: 262665 - DNA, 120 bp, Artificial Sequence
  ENSG00000125740_40 (sequence is synthesized)
atctggtcttcagcaagtaacaacccattttgcctcagtttctccatctctgcaaaccctcatcaaatctcccgggctctttctacccttaacactctggaaagcctgtgaaatgaaatt

SEQ ID NO: 262666 - DNA, 120 bp, Artificial Sequence
  ENSG00000125740_41 (sequence is synthesized)
attccacctcctgccctagccacccacagctctcctggtgctggtggcatcccccaaaacccactcccttcctacgtcctcccttggtctgagagttccctgctgtatgcctgcagggtg

SEQ ID NO: 262667 - DNA, 120 bp, Artificial Sequence
  ENSG00000125740_42 (sequence is synthesized)
agctgttactccttgagggaacaagggaattgtcaactttccttctctactttttctcttccccgggaggtagagagggaggggtaatagaagggaacacattaaaaacacataacagtg

SEQ ID NO: 262668 - DNA, 120 bp, Artificial Sequence
  ENSG00000125741_0 (sequence is synthesized)
gttgaggcgccccgcccagtcagcaaggttgcgcgtgccctgtgagaccgccaagatggtggtgggcgcgttccctatggcgaagctgctatacttgggcatccggcaggtcagcaagcc

SEQ ID NO: 262669 - DNA, 120 bp, Artificial Sequence
  ENSG00000125741_1 (sequence is synthesized)
gcttgccaaccgtattaaggaggccgcccgccgaagcgagttcttcaagacctatatctgcctcccgccggctcaactgtatcactgggtggagatgcggaccaagatgcgcatcatggg

SEQ ID NO: 262670 - DNA, 120 bp, Artificial Sequence
  ENSG00000125741_2 (sequence is synthesized)
cttccggggcacggtcatcaagccgctgaacgaggaggcggcagctgagctgggcgcagagctgctgggcgaagccaccatcttcatcgtgggcggcggctgcctagtgctggagtactg

SEQ ID NO: 262671 - DNA, 120 bp, Artificial Sequence
  ENSG00000125741_3 (sequence is synthesized)
gcgccaccaggcgcagcagcgccacaaggaggaggagcagcgtgctgcctggaacgcgctgcgggacgaggtgggccacctggcgctggcgctggaagcgctgcaggcgcaggtgcaggc

SEQ ID NO: 262672 - DNA, 120 bp, Artificial Sequence
  ENSG00000125741_4 (sequence is synthesized)
ggcgccgccacagggcgccctggaggaactgcgcacagagctgcaagaggtgcgcgcccagctctgcaatcccggccggtccgcttcccacgcagtgcctgcgtccaagaaataggagct

SEQ ID NO: 262673 - DNA, 120 bp, Artificial Sequence
  ENSG00000125741_5 (sequence is synthesized)
tgctggatggaacctgaatttggacatggcctatgtacctaacgtggccttcttcccgcaccacccttgcctgcgctggcccagtggaaaccaccaggatcttgatgcaacttggcattt

SEQ ID NO: 262674 - DNA, 120 bp, Artificial Sequence
  ENSG00000125741_6 (sequence is synthesized)
ggttacccctgctgataagagcagccgttacctgccactgggaccagcaggtgaagcgttgcaacatagccccctccatcatccttcacctcctatcccccactccaaaccaggacgacc

SEQ ID NO: 262675 - DNA, 120 bp, Artificial Sequence
  ENSG00000125741_7 (sequence is synthesized)
tgcaaggtcccagccagcaggacaccgtgggcactctggcaaatgaaaaaatggaacctggtcttgagctgaatcaatgtgttattgttacccccacccccggtttacctgatcagtgtt

SEQ ID NO: 262676 - DNA, 120 bp, Artificial Sequence
  ENSG00000125741_8 (sequence is synthesized)
aacctttactgggacactcatctgttacactggaacaccttcttctttttgtcaatcggcacagaccactgtaaggaaatgcagtgtgttgcagtggccttttctccccctcaccttcta

SEQ ID NO: 262677 - DNA, 120 bp, Artificial Sequence
  ENSG00000125741_9 (sequence is synthesized)
gcagtgtgttgcagtggccttttctccccctcaccttctaaggtcagctctagctgagcatcagtgctctcttaaggaggaaaaaaacggtgcggctgggagcggtggctcacgcctgta

SEQ ID NO: 262678 - DNA, 120 bp, Artificial Sequence
  ENSG00000125741_10 (sequence is synthesized)
ttgcttgaacccatgaggtggaggttgcggtgagccaagatggcaccattgcaccctagcctgggcaacagagcaagacaccgtcttaaaaccaaaagttaaccgggcgtggtggtgggt

SEQ ID NO: 262679 - DNA, 78 bp, Artificial Sequence
  ENSG00000125741_11 (sequence is synthesized)
ctcacacctgcaatcccagcactttggaaggtcgaggtgggcgggtcatttgaagtcgggaggtcgggagatcgggag

SEQ ID NO: 262680 - DNA, 120 bp, Artificial Sequence
  ENSG00000125741_12 (sequence is synthesized)
gaggttgcagtgagccgagattgcgcaattgcatgccagcctgggtaacgagcaaaactccatcttaaaaaaacccacaaaaggtcctggcctgcagtcaatccctggaatcattgtacc

SEQ ID NO: 262681 - DNA, 120 bp, Artificial Sequence
  ENSG00000125741_13 (sequence is synthesized)
ctggaatcattgtaccttcccttgagacccgaagtggactattccaacagaaccccctcatccttgagtctatggcacaacccactggaatggcactacaggatcttttctgtgaatgtc

SEQ ID NO: 262682 - DNA, 120 bp, Artificial Sequence
  ENSG00000125741_14 (sequence is synthesized)
ctccaacccccctttccgtggtgggaaatttgatcctaactagggctaatccagcctgtccttcagcctcagccccctattttcctgtcctcagagtccctggagcttgtactgtgtggc

SEQ ID NO: 262683 - DNA, 120 bp, Artificial Sequence
  ENSG00000125741_15 (sequence is synthesized)
atgtcctttcttgccttccccaccttgctcagtagcatttctcagggacccagtcgaatccaagcccatggattcaattgtcacatccttcatcttccatccgtgtctcctaatctgtgt

SEQ ID NO: 262684 - DNA, 120 bp, Artificial Sequence
  ENSG00000125741_16 (sequence is synthesized)
gctcttgctttctttcctcggagctctggactgacccgacagcctgtcttcatgtagcagtaccctcctgcctccatagcccccggtcccacccccatcctaccaattaggccagcagtt

SEQ ID NO: 262685 - DNA, 120 bp, Artificial Sequence
  ENSG00000125741_17 (sequence is synthesized)
ggccttaactgcttgattaatttccttggactgccataacagatcaccattgggtggtgaacttgatggcttaagtccaacaggaatttaattcacacagttctggagtccagaagtctg

SEQ ID NO: 262686 - DNA, 120 bp, Artificial Sequence
  ENSG00000125741_18 (sequence is synthesized)
aaaccaaggtgctgacagggacacgctccctcttccagctcctggtgattccaggccttccttggctctgcctgcagcttcacatggccttttccctcttctattttgtctcttacaaga

SEQ ID NO: 262687 - DNA, 120 bp, Artificial Sequence
  ENSG00000125741_19 (sequence is synthesized)
acacctgtcattgcatttagggcccatcttaagttcaggatgatcccacctcaagacccttaattacatctgaaaaaacactttttccaaataaactgtcataagcacaggtcctggggg

SEQ ID NO: 262688 - DNA, 120 bp, Artificial Sequence
  ENSG00000125741_20 (sequence is synthesized)
aggtcctgggggttagtatgtggacttgtctgttgggggcacaccattcaagccattcagcccactattcctcctcaccccaagagtacgctggcgtccaggtgcagtggctcacacctg

SEQ ID NO: 262689 - DNA, 75 bp, Artificial Sequence
  ENSG00000125741_21 (sequence is synthesized)
cctgtaatcccagcactttgggagaccagggcaggagggatctctttgagcccaggagcgtaaaataaaaaatta

SEQ ID NO: 262690 - DNA, 89 bp, Artificial Sequence
  ENSG00000125741_22 (sequence is synthesized)
gctgaggcaggaggatcacctgagccctggaggtcgaggctgcagcgagccgtgatcgcgccactattctcagaaaaaaagtaccctgg

SEQ ID NO: 262691 - DNA, 120 bp, Artificial Sequence
  ENSG00000125741_23 (sequence is synthesized)
accctttctcagaaaaaaagtaccctgggactcctgccaaccccgcgggccatttggccttcctgctagctgagaggaacagtctaggaaccacccttttctactgggtttctcttccag

SEQ ID NO: 262692 - DNA, 120 bp, Artificial Sequence
  ENSG00000125741_24 (sequence is synthesized)
gatctgccactgaagcgggagggggtgggtcccagtagcctgcagtctgtccttccgactgtagctctctcattagaggagctgcaaggtgatgaaggcatcctgaggctgtacctgaac

SEQ ID NO: 262693 - DNA, 120 bp, Artificial Sequence
  ENSG00000125741_25 (sequence is synthesized)
caccatgtggatctccacaatgggtacagagcttattaaaatcaggagggaaactgggagggttctgatggggagaggcccaagagtcaccctatgagctggggaaactaaggccagggg

SEQ ID NO: 262694 - DNA, 120 bp, Artificial Sequence
  ENSG00000125741_26 (sequence is synthesized)
taagcaaagggacttgccagagatgccacagccagtgaggggctgactgcccagggtggtgaagtagtaggggcagagtgagaggcttggattaccccagctgcagagtgaggagggaga

SEQ ID NO: 262695 - DNA, 120 bp, Artificial Sequence
  ENSG00000125741_27 (sequence is synthesized)
ggcgatggctgagcagaggctgggagggtgacgatctctacacagaggcccagaccatcccagaggtggcgttgatagtgggagaccctctctatcccctctcagagcagccccagatca

SEQ ID NO: 262696 - DNA, 120 bp, Artificial Sequence
  ENSG00000125741_28 (sequence is synthesized)
caccagagatcatagcattgtgtaaactgggtgaccattccacctgggcccgcttttgggaagctgcaggtgaaagtgggagggccgggctttccccgacttccatcctcacctcccttc

SEQ ID NO: 262697 - DNA, 120 bp, Artificial Sequence
  ENSG00000125741_29 (sequence is synthesized)
agatctgcccagatagaaagccaagaaacaggttctgaaacttttcttttcttcttttctcttcttttttcttttcttttctttcggagacagtctagctccgtcaccctgacggagtgc

SEQ ID NO: 262698 - DNA, 90 bp, Artificial Sequence
  ENSG00000125741_30 (sequence is synthesized)
gtgcaatctcggctcactgcaacttctacctcccaggctcaaccaatgatcctgcctcagcttccgcacgcctggctaatttttgtattt

SEQ ID NO: 262699 - DNA, 67 bp, Artificial Sequence
  ENSG00000125741_31 (sequence is synthesized)
gattacatgtgcccaccacccacgcctggctaatttttgtattttagtggagacggggtttctccaa

SEQ ID NO: 262700 - DNA, 120 bp, Artificial Sequence
  ENSG00000125741_32 (sequence is synthesized)
tggcctgaaacagcatttcagttccttctggaagagggggagaagctggagcagagggaactgaccgagtgggtcctgagtgggctgtgtttaaaactgggagtgacccaggccagctca

SEQ ID NO: 262701 - DNA, 120 bp, Artificial Sequence
  ENSG00000125741_33 (sequence is synthesized)
tgacagagtgagactcaactcaaaaaaaaaaaacagaggtgggagtgtgaacacaggcaggagctccaattcctgaccccagcgctgtcctgacccagatggagtgctgctctcacatct

SEQ ID NO: 262702 - DNA, 120 bp, Artificial Sequence
  ENSG00000125741_34 (sequence is synthesized)
cagagacttcgcactcagccctgccctgccctgccctgacaggcagccagtcatcgtgggcagcagggccatctacttcccccactgcggcgtcaggggtggccagagtgtgtggaagtg

SEQ ID NO: 262703 - DNA, 120 bp, Artificial Sequence
  ENSG00000125741_35 (sequence is synthesized)
gaaagaacgtcctctcaaaatgcaagaggccagaggatggttcactgctcgtgtgttctgctagctagaattctgtgtaccttgtaatttggggagaggggttagaataaatttgtaaat

SEQ ID NO: 262704 - DNA, 120 bp, Artificial Sequence
  ENSG00000125741_36 (sequence is synthesized)
taatttggggagaggggttagaataaatttgtaaatgaagctgattatcttcaagttgatgcattcttttttcatatttaaaaagtccttgggactgggcgcagtggctcacacctgtaa

SEQ ID NO: 262705 - DNA, 120 bp, Artificial Sequence
  ENSG00000125741_37 (sequence is synthesized)
aaataaataaggtccatgtcaaccttaggaaaaatatcctttatttattctttcactcaaaaaactcactgaggtggtcccgcaccgggacatggacccagtgtccttggtagggcgtct

SEQ ID NO: 262706 - DNA, 120 bp, Artificial Sequence
  ENSG00000125741_38 (sequence is synthesized)
aaaaaaataaaaaaaataaaacacaaaactcactgagttacccactctctgccccaccctatgctggggtcacagtggtgacagagacagccccagccctgccgtcaccgggtcttacag

SEQ ID NO: 262707 - DNA, 120 bp, Artificial Sequence
  ENSG00000125741_39 (sequence is synthesized)
cgggtcttacagatgctcacacgtacatttcttttccagtgttccctgccccaccccatagttgtttaggaagcaggggctgggctgaatccggaatcctccctctggagtgactcagga

SEQ ID NO: 262708 - DNA, 120 bp, Artificial Sequence
  ENSG00000125741_40 (sequence is synthesized)
ctataaacccattcatcccagctcacaaaaccctgggaggtgccctgagggctgtgcccctcccatctcctggcaggccctgctgtccctcttgttggtttctctgtagggcaggccatt

SEQ ID NO: 262709 - DNA, 120 bp, Artificial Sequence
  ENSG00000125741_41 (sequence is synthesized)
gcctggagggaggcaaaatggctgagagccaccccaggagaaaatgggctttacataagccccaacctgatctattggctcacggagctactcctgggctggtcgctgtgttgctgagtg

SEQ ID NO: 262710 - DNA, 120 bp, Artificial Sequence
  ENSG00000125741_42 (sequence is synthesized)
gcaggcttgggtcccccagtggcaatggcttgtagctggagtcggtgtggacagagagaggagaagcatggcaactctgagtgtactgaggatcaactgcaccaggctccattctagtag

SEQ ID NO: 262711 - DNA, 120 bp, Artificial Sequence
  ENSG00000125741_43 (sequence is synthesized)
ccattctagtagctgggagccagttgggagcaagcagaggccctcactggagctgacattctagtgccagagaccggcaataaagaaggaaagagtggccaggcgtggtggctcacacct

SEQ ID NO: 262712 - DNA, 120 bp, Artificial Sequence
  ENSG00000125741_44 (sequence is synthesized)
catctcaaaaaaaaaaggaaaaagctaatccagcatagggtgatgaggactgagaggaatggaggcagggtaggagttccggacttacgggcaccgctgatctagacaggtgggcaggga

SEQ ID NO: 262713 - DNA, 120 bp, Artificial Sequence
  ENSG00000125741_45 (sequence is synthesized)
ggaggcagcgcttcagatggagggagataggaagagggctgtgagtatctgtgaaagtcctaggacagatgtggccttggcctgttcctggaacagcaagagtttctggctgtcagaata

SEQ ID NO: 262714 - DNA, 120 bp, Artificial Sequence
  ENSG00000125741_46 (sequence is synthesized)
gagcagaggctcgctgaccaaggcctttgggccaaatcaaggggacccttgcttcctgtctttgtaaataaagacttattggaacccaggcgctcattcgtttgcatattttccacagtt

SEQ ID NO: 262715 - DNA, 120 bp, Artificial Sequence
  ENSG00000125741_47 (sequence is synthesized)
gcttttgcagtacagtgacagagctgagtatttgcacagagatcctagggctctcgtactctctggccctttacagaaaaagtttaccatcccctggaatagagtaagcgaggggagaag

SEQ ID NO: 262716 - DNA, 120 bp, Artificial Sequence
  ENSG00000125741_48 (sequence is synthesized)
ttaggtgagggggccaggcaagcaaaggctgccccttgccttgattggcacaactgtggaggtcatcccagctctggagccccaacaggatcactcaggcctctgcttccaccacatctg

SEQ ID NO: 262717 - DNA, 120 bp, Artificial Sequence
  ENSG00000125741_49 (sequence is synthesized)
gcttcagcttccccctctgtggagtcctccctccctccctccttccccataggaaatgaccccagtgctcagcagtaacccccactgcgcgcagatctcagaacctccacctcaatctac

SEQ ID NO: 262718 - DNA, 81 bp, Artificial Sequence
  ENSG00000125741_50 (sequence is synthesized)
cccactgcgcgcagatctcagaacctccacctcaatctacagccacgtgccacaataagaagcagagtactttggaagacc

SEQ ID NO: 262719 - DNA, 72 bp, Artificial Sequence
  ENSG00000125741_51 (sequence is synthesized)
atgagaggctgacataggagaattgcttgagcccaggaggtggacgttgcagtgagccaagattgcactact

SEQ ID NO: 262720 - DNA, 89 bp, Artificial Sequence
  ENSG00000125741_52 (sequence is synthesized)
gagcccaggaggtggactccagcctaggtgccagagtgagacttggtctcaaaacaaaacaaaacaaaaaattagccaggcatggtggc

SEQ ID NO: 262721 - DNA, 84 bp, Artificial Sequence
  ENSG00000125741_53 (sequence is synthesized)
gaggcaggaggatcgcttgaacccgggtgtttaaggctgcagtgaactgagatcaggccacagcacctcaacctgggacagagt

SEQ ID NO: 262722 - DNA, 120 bp, Artificial Sequence
  ENSG00000125741_54 (sequence is synthesized)
ctgtctcaaaaaaaaaaaaaagcagagtttatgtaatccatcgtgtgcatatttatacaataatttacaattctatgtattttaaaagtgtataattcatatattatgtgacacaatata

SEQ ID NO: 262723 - DNA, 120 bp, Artificial Sequence
  ENSG00000125741_55 (sequence is synthesized)
tatgtgacacaatatataatggaatataaaatatatattttatgtcatgtgtaacataacatcatctattatatgtagtgtatgtgcttatgtacatatcattggaatgaaagtttcatt

SEQ ID NO: 262724 - DNA, 120 bp, Artificial Sequence
  ENSG00000125741_56 (sequence is synthesized)
cggaccaaaatgcgcatcatgggtttcaatgccgctgccatcaagccgctgaacgagggtgcagccgccgagctgggcgcggagctgctgggcgagggcatcatcttcatcaccgcctgc

SEQ ID NO: 262725 - DNA, 120 bp, Artificial Sequence
  ENSG00000125741_57 (sequence is synthesized)
agctgcctgatgctggagtattggcgccaccagttgcagcagcgccgcaaggaaaaggagcgacgtgttgccagggaggcgctgcggggcgaggtgggccacttggggctggcgctcgag

SEQ ID NO: 262726 - DNA, 120 bp, Artificial Sequence
  ENSG00000125741_58 (sequence is synthesized)
gagttgcaggcgcaggtgcaggcgacgtcgacgcagctcgccctggaggagctgcgcgctcagctgcaggaggtgcgagcccacctctgcctccgagacccgccgcctgcacccccagtt

SEQ ID NO: 262727 - DNA, 120 bp, Artificial Sequence
  ENSG00000125741_59 (sequence is synthesized)
gcgccggcgtccgagaaataggaggtctcggggccctggtcttggaggtgactgctgtctggactgcgaagtctctgtcttggcctattctccgcactgtcccatcctggaccggcccag

SEQ ID NO: 262728 - DNA, 120 bp, Artificial Sequence
  ENSG00000125741_60 (sequence is synthesized)
ctgacaccacccagtccttcgggggcgccggagagatcctgggctggagctgatcgaacctccctactaacctgcccagtggtaccttccactgggactctccgcctcctgcaggtggaa

SEQ ID NO: 262729 - DNA, 120 bp, Artificial Sequence
  ENSG00000125741_61 (sequence is synthesized)
cgttccaagaaggaccccgccctatcccaccccgcccctgccagcgcatttgttgagcactttggaaagacagcgtcttttatcagaccccacctccctaccgctaggtaggccagcagg

SEQ ID NO: 262730 - DNA, 120 bp, Artificial Sequence
  ENSG00000125741_62 (sequence is synthesized)
acgtccacctcttttggcaaaacaaaattctgcacccggatttagccacctctcattctgtcacccgcaccctcactcacctgagtggacccttcccctaggacgctcatcctttgcacc

SEQ ID NO: 262731 - DNA, 120 bp, Artificial Sequence
  ENSG00000125741_63 (sequence is synthesized)
cctcagtcttagggggaaaggtgggggtgaatcctggactgcgttagctccaatgagtcaccaccctgcggctcctgaccttaatccatcttagtacctgtcattgacatcctcccctcc

SEQ ID NO: 262732 - DNA, 120 bp, Artificial Sequence
  ENSG00000125741_64 (sequence is synthesized)
ctgagtggatcgatccaacataacccccctcttcttccacctatggcgcaccccactggcatggctatgctgggtcttccagggaaacgcctcccagcccggcattctgtggtctgttcc

SEQ ID NO: 262733 - DNA, 120 bp, Artificial Sequence
  ENSG00000125741_65 (sequence is synthesized)
agcaggacgtggccttttgggaggaaaaaccggtcttgaccagggctagtccattctggctttcaggctcagtcacttggtcaccagtccccagtcctggacctactgctactgtccttt

SEQ ID NO: 262734 - DNA, 120 bp, Artificial Sequence
  ENSG00000125741_66 (sequence is synthesized)
tatccggtcctccctcgctgtcctcttcagttgcctttgctagggaccggcctgtccctttactacctaagtcatcgtcagttcgcccaacttccctccaaatctgcccctcacggtacg

SEQ ID NO: 262735 - DNA, 120 bp, Artificial Sequence
  ENSG00000125741_67 (sequence is synthesized)
cagggatcgcccttccttcctgcctttggactggtccaggtcctcctccgccctccttcacgcaaaggcctcctccagggggactacctgtccctcagcccagaggtccccctgtccaag

SEQ ID NO: 262736 - DNA, 120 bp, Artificial Sequence
  ENSG00000125741_68 (sequence is synthesized)
cggggtattccaccaggccatatgacctacccacccgacaactgaagggggcgtggatgagctctgtgactctgaatgctactttataaatcgactgtcagcgttttctaattaaaggag

SEQ ID NO: 262737 - DNA, 120 bp, Artificial Sequence
  ENSG00000125741_69 (sequence is synthesized)
tttctaattaaaggagctctggggtaaagatcttaagaacgtgtctgagaaccataatgtgcgtctgcaaaatgtcattgaaattaggaaagaaggccggacacagtggctcacgcctgt

SEQ ID NO: 262738 - DNA, 120 bp, Artificial Sequence
  ENSG00000125741_70 (sequence is synthesized)
gaggccaaagcaggaggactgctggaggccaggagttagagaccaacctaggcaacacagcaagaccgcatctctacgaaaaatgaaaatattagctaggcgtcataccaaacgcctgta

SEQ ID NO: 262739 - DNA, 120 bp, Artificial Sequence
  ENSG00000125741_71 (sequence is synthesized)
agccgctgttctgccccgcgggggcatccgctgggtccccgcgccgttgtcaagaccggggacctggacgcagcggagagaggtgccgccgcccgccccgtccagtcgccgcgcgcagtg

SEQ ID NO: 262740 - DNA, 120 bp, Artificial Sequence
  ENSG00000125743_0 (sequence is synthesized)
agtagatacgtcagtaacgcgtcccagagggaagaggggcggtgcctgtctccgaagcgaggagcggattggcttcacggaggccgcgcccccgaagtcacggccggcgggcatttggaa

SEQ ID NO: 262741 - DNA, 120 bp, Artificial Sequence
  ENSG00000125743_1 (sequence is synthesized)
atagcttgtcatttccctccttcaacctgtaccattcttcaagaaacggtttgaatcagactgcctttccttttgtcttcattgtcataaacatctgcccccgtgtggttctgactggcc

SEQ ID NO: 262742 - DNA, 120 bp, Artificial Sequence
  ENSG00000125743_2 (sequence is synthesized)
gcgaacccctacccgaagcttttattccatcattgtgcaccgttggtggggaatgctgtggcaacaggccacgcctccacttactggttggctttgcgcaggcgccaacggaagtgggtc

SEQ ID NO: 262743 - DNA, 120 bp, Artificial Sequence
  ENSG00000125743_3 (sequence is synthesized)
tgaacggagagcgtagtgaccatcatgagcctcctcaacaagcccaagagtgagatgaccccagaggagctgcagaagcgagaggaggaggaatttaacaccggtccactctctgtgctc

SEQ ID NO: 262744 - DNA, 120 bp, Artificial Sequence
  ENSG00000125743_4 (sequence is synthesized)
acacagtcagtcaagaacaatacccaagtgctcatcaactgccgcaacaataagaaactcctgggccgcgtgaaggccttcgataggcactgcaacatggtgctggagaacgtgaaggag

SEQ ID NO: 262745 - DNA, 120 bp, Artificial Sequence
  ENSG00000125743_5 (sequence is synthesized)
atgtggactgaggtacccaagagtggcaagggcaagaagaagtccaagccagtcaacaaagaccgctacatctccaagatgttcctgcgcggggactcagtcatcgtggtcctgcggaac

SEQ ID NO: 262746 - DNA, 120 bp, Artificial Sequence
  ENSG00000125743_6 (sequence is synthesized)
ccgctcatcgccggcaagtaggggccgcctgtctgttgacagaactcactcctctgtcctatgaagaccgctgccattggtgttgagaataataaagctctgtgtttttttctagtggta

SEQ ID NO: 262747 - DNA, 62 bp, Artificial Sequence
  ENSG00000125743_7 (sequence is synthesized)
ggcagcagcaacgcggaggaaacgggagtgaacggagagcgtagtgaccatcattagagacc

SEQ ID NO: 262748 - DNA, 120 bp, Artificial Sequence
  ENSG00000125743_8 (sequence is synthesized)
gcagcgtcctgcttttctcctgatgagtttgagaacgggcgtggggcctttgacgcatcgtgacttcgggagaggggacagctttatcagataacgccctgggctgggcgcgggggctca

SEQ ID NO: 262749 - DNA, 120 bp, Artificial Sequence
  ENSG00000125743_9 (sequence is synthesized)
ttcctgtgatcccagcactttagtaggccaaggcggagcatcgctggaacacaggagttcgagactagcctaggcaacatagcgagacccccgtctctacaaaaaaaaaaaaaaatttaa

SEQ ID NO: 262750 - DNA, 120 bp, Artificial Sequence
  ENSG00000125743_10 (sequence is synthesized)
ttatgaaaaacatgttttaaacgataacgggagtggtcctagataattagtcctattgaaatgaatgttaaggggcagcgattttacgaatactgggggaggccgagcgcggtggctcag

SEQ ID NO: 262751 - DNA, 120 bp, Artificial Sequence
  ENSG00000125743_11 (sequence is synthesized)
aggcagcagcaacgcggaggaaacgggagtgaacggagagcgtagtgaccatcatgttttagcacaaccccctcagaccactctgtggagaacagactgtcagggaacgtgggtggaggc

SEQ ID NO: 262752 - DNA, 120 bp, Artificial Sequence
  ENSG00000125744_0 (sequence is synthesized)
gccccaccccccctactcctgtcctccgggttctactgaagtgggcaaaatccccgagaagcagcggtgtccccagcctctcactcggagccgatatggggagtaaagtggcggacctgc

SEQ ID NO: 262753 - DNA, 120 bp, Artificial Sequence
  ENSG00000125744_1 (sequence is synthesized)
tgtactggaaggacacgaggacgtcaggagtggtcttcacaggcctgatggtctccctcctctgcctcctgcactttagcatcgtgtccgtggccgcgcacttggctctgttgctgctct

SEQ ID NO: 262754 - DNA, 120 bp, Artificial Sequence
  ENSG00000125744_2 (sequence is synthesized)
gcggcaccatctctctcagggtttaccgcaaagtgctgcaggccgtgcaccggggggatggagccaaccctttccaggcctacctggatgtggacctcaccctgactcgggagcagacgg

SEQ ID NO: 262755 - DNA, 120 bp, Artificial Sequence
  ENSG00000125744_3 (sequence is synthesized)
aacgtttgtcccaccagatcacctcccgcgtggtctcggcggccacgcagctgcggcacttcttcctggtagaagacctcgtggattccctcaagctggccctcctcttctacatcttga

SEQ ID NO: 262756 - DNA, 120 bp, Artificial Sequence
  ENSG00000125744_4 (sequence is synthesized)
gtgattggtctattcaccatccccctgctgtaccggcagcaccaggctcagatcgaccaatatgtggggttggtgaccaatcagttgagccacatcaaagctaagatccgagctaaaatc

SEQ ID NO: 262757 - DNA, 120 bp, Artificial Sequence
  ENSG00000125744_5 (sequence is synthesized)
ccagggaccggagccctggcctctgcagcagccgcagtctccggatccaaagccaaagccgaatgagaacggtgtctctgcccgcaggacgcctgcccccagcccccgcagccctctggc

SEQ ID NO: 262758 - DNA, 120 bp, Artificial Sequence
  ENSG00000125744_6 (sequence is synthesized)
cccctccatctcttgtccgttcccacccacccccctcctcggcccgagccttttcccggtgggtgtcaggatcactcccactagggactctgcgctaattacctgagcgaccaggactac

SEQ ID NO: 262759 - DNA, 120 bp, Artificial Sequence
  ENSG00000125744_7 (sequence is synthesized)
atttcccaagaggctctgctccaggagtccaggaaagacgaggcaccttggccgcggggcctgctgggacttgtagttgcctagacagggcaccaccctgcacttccggacccgccgctg

SEQ ID NO: 262760 - DNA, 120 bp, Artificial Sequence
  ENSG00000125744_8 (sequence is synthesized)
gaggcgccgtgaggcgttggtgtctcctggatgctactagccccaacgccggggctttgcatggggcccaggggaggcctgagcttggatttacactgtaataaagactcctgtggaaaa

SEQ ID NO: 262761 - DNA, 80 bp, Artificial Sequence
  ENSG00000125744_9 (sequence is synthesized)
gcggcggcggcggcggctggagcagcccgggaggaggaggcggcgagaatggcagcggcgtcgtgggcgcggcggagatg

SEQ ID NO: 262762 - DNA, 120 bp, Artificial Sequence
  ENSG00000125744_10 (sequence is synthesized)
cggagatgagcgcccgcgaccccgggcccagggcggcacagccggagtgggcgggggtcccgatgcaggcccgaggggggccatggggcaggtcctgccggtcttcgcccactgcaattc

SEQ ID NO: 262763 - DNA, 120 bp, Artificial Sequence
  ENSG00000125744_11 (sequence is synthesized)
tcctgccggtcttcgcccactgcaattccaggactgggacacttctgtgattcggacagtctaagcttctaagagtcttcgattctttccctctcgcagaagaagctccgtctacagcct

SEQ ID NO: 262764 - DNA, 120 bp, Artificial Sequence
  ENSG00000125744_12 (sequence is synthesized)
cctcaactcctgattccacagaaggagggaacgacgactctgattttcgagagctgcacacagcccgggaattctcagaggaggacgaggaggagaccacgtcgcaggactggggcaccc

SEQ ID NO: 262765 - DNA, 120 bp, Artificial Sequence
  ENSG00000125744_13 (sequence is synthesized)
cccgggagctgaccttctcctacatcgcctttgatggtgtagtgggctccgggggccgcagggattcaactgcccgccgcccccgcccccagggccgctcagtctcggaaccacgagacc

SEQ ID NO: 262766 - DNA, 120 bp, Artificial Sequence
  ENSG00000125744_14 (sequence is synthesized)
agcaccctcagcccagcctgggcgacagcttggagagcatccccagcctgagccaatccccggagcctggacgacggggtgatcctgacaccgcgcctccatccgagcgccctctggaag

SEQ ID NO: 262767 - DNA, 120 bp, Artificial Sequence
  ENSG00000125744_15 (sequence is synthesized)
acctgaggcttcggttggaccatctgggctgggtggcccggggaacgggatccggggaggactcttccaccagcagctccaccccgctggaagacgaagaaccccaagaacccaacagat

SEQ ID NO: 262768 - DNA, 120 bp, Artificial Sequence
  ENSG00000125744_16 (sequence is synthesized)
tggagacaggagaagctggggaagaactggacctacgactccgacttgctcagccctcatcgcccgaggtcttgactccccagctcagtccgggctctgggacaccccaggccggtactc

SEQ ID NO: 262769 - DNA, 120 bp, Artificial Sequence
  ENSG00000125744_17 (sequence is synthesized)
cgtccccatcccgatcgcgagattcgaactctgggcccgaagagccattgctggaagaggaagaaaagcagtgggggccactggagcgagagccagtaaggggacagtgcctcgatagca

SEQ ID NO: 262770 - DNA, 120 bp, Artificial Sequence
  ENSG00000125744_18 (sequence is synthesized)
gttctactgaagtgggcaaaatccccgagaagcagcggtgtccccagcctctcactcggagccgatatggggagtaaagggcctacctggatgtggacctcaccctgactcgggagcaga

SEQ ID NO: 262771 - DNA, 120 bp, Artificial Sequence
  ENSG00000125744_19 (sequence is synthesized)
ggcaaaaggtgagaggattttgaattaaagggaccaacctcgcaaaggaacagtacatagtggaaaagggaagagatagacgtgatatcacatctggctagacgtgataaactccgcttt

SEQ ID NO: 262772 - DNA, 120 bp, Artificial Sequence
  ENSG00000125744_20 (sequence is synthesized)
ctcagtcctaactctggtcttctcccaaccgccattcctctcccttgtttcagctgcccctgcaccagtctgagctggtcacccactgagtcgccccacactcctttgtccccgcagggc

SEQ ID NO: 262773 - DNA, 120 bp, Artificial Sequence
  ENSG00000125744_21 (sequence is synthesized)
ctcaaggtggcctggagctctcagcccctcctgggttcccccattcacctctgcatggctagggggtgggagggcgactgttgggtaaattcacagcatgagagggaattcccggtgggc

SEQ ID NO: 262774 - DNA, 120 bp, Artificial Sequence
  ENSG00000125744_22 (sequence is synthesized)
ctcttctcattctgggtgagctgggaaggccgtaaggggcaaatggggacttggagtctggtgggggacagggctccagatggaactgttcatctcttgggaacaccctgacgcccccat

SEQ ID NO: 262775 - DNA, 120 bp, Artificial Sequence
  ENSG00000125744_23 (sequence is synthesized)
gtaagagcatggggcggaggtcgatgggagggggaagtgggggagcttgggaacctttcctttctactctcgctgtccgcaaatctcctggggtaatgtccccttgaaaaggctgaggag

SEQ ID NO: 262776 - DNA, 120 bp, Artificial Sequence
  ENSG00000125746_0 (sequence is synthesized)
agagccggtcccggctccacccccggccccgaagctccgccacccgccgccatgagtagctttggagctggcaaaaccaaagaagttatcttcagtgtggaggatggctccgtgaaaatg

SEQ ID NO: 262777 - DNA, 120 bp, Artificial Sequence
  ENSG00000125746_1 (sequence is synthesized)
ttcctgaggggccgccctgtgcccatgatgatcccagacgagctggcacccacctacagcctggacacacgctcggagctgccttcttgccggctcaagctggagtgggtctatggctac

SEQ ID NO: 262778 - DNA, 120 bp, Artificial Sequence
  ENSG00000125746_2 (sequence is synthesized)
cgtggccgagactgccgggccaacctttatttgctgcccaccggggagatagtgtactttgtggcctccgtagccgtgctatacagcgtggaggagcagaggcagcgacactacctggga

SEQ ID NO: 262779 - DNA, 120 bp, Artificial Sequence
  ENSG00000125746_3 (sequence is synthesized)
cacaacgatgacatcaaatgcttggccatccacccagatatggtcaccatcgccacgggacaggtggcgggaaccactaaggaagggaagccgctgccgccccacgtgcgcatctgggac

SEQ ID NO: 262780 - DNA, 120 bp, Artificial Sequence
  ENSG00000125746_4 (sequence is synthesized)
tcagtttccctctccaccttacacgtgctgggcttgggggtgtttgacagagccgtgtgctgtgtgggcttctccaaatctaatggaggcaacctgctgtgtgcagtggatgaatccaat

SEQ ID NO: 262781 - DNA, 120 bp, Artificial Sequence
  ENSG00000125746_5 (sequence is synthesized)
gatcacatgctctcggtgtgggactgggccaaggagaccaaggtggtggatgtcaagtgctccaatgaggctgtattggtggccaccttccaccccacggaccccactgtgcttatcacc

SEQ ID NO: 262782 - DNA, 120 bp, Artificial Sequence
  ENSG00000125746_6 (sequence is synthesized)
tgcgggaaatctcacatctacttctggaccttggaggggggcagcttgagcaagcggcaaggcctctttgagaaacatgagaaaccgaagtatgtgctgtgtgtgacctttttggaaggt

SEQ ID NO: 262783 - DNA, 120 bp, Artificial Sequence
  ENSG00000125746_7 (sequence is synthesized)
ggcgacgtggtcacgggggactctggggggaacctctatgtttggggcaaaggtgggaaccgtatcacacaggcggtgctgggcgcccacgacggcggcgtgtttgggctctgcgccctg

SEQ ID NO: 262784 - DNA, 120 bp, Artificial Sequence
  ENSG00000125746_8 (sequence is synthesized)
cgggacgggacgctggtgtctggagggggccgtgatcggcgggtggtcctctggggttctgactacagcaagctgcaggaagtggaggtccctgaggactttggccctgtgcgcaccgtg

SEQ ID NO: 262785 - DNA, 120 bp, Artificial Sequence
  ENSG00000125746_9 (sequence is synthesized)
agagctgtggggcctggccacacaccccagtcgggcccagtttgtgacctgcgggcaggataagctggtgcatctatggagctcagattcccaccagcccctgtggagcaggatcatcga

SEQ ID NO: 262786 - DNA, 120 bp, Artificial Sequence
  ENSG00000125746_10 (sequence is synthesized)
ggaccctgcccgctcagccggcttccaccccagtggctctgtcctggctgtgggtacagtgactggcagatggctgctgctggacacggagacccatgacctggtggctatccacacaga

SEQ ID NO: 262787 - DNA, 120 bp, Artificial Sequence
  ENSG00000125746_11 (sequence is synthesized)
cggcaatgaacagatctcagtggtcagcttctccccagacggggcgtacctggccgtgggctcccacgacaacttggtgtacgtgtacacggtggaccagggcggccgcaaggtcagccg

SEQ ID NO: 262788 - DNA, 120 bp, Artificial Sequence
  ENSG00000125746_12 (sequence is synthesized)
cctgggcaagtgctcgggccattccagttttatcacccacctggattgggcccaggacagcagctgctttgtcaccaactccggggactatgagattctgtactgggacccggctacctg

SEQ ID NO: 262789 - DNA, 120 bp, Artificial Sequence
  ENSG00000125746_13 (sequence is synthesized)
taagcagatcaccagtgcggatgctgtgaggaacatggaatgggccacagctacttgtgtcctagggtttggggtgtttgggatctggtctgagggggcggacggcactgatatcaacgc

SEQ ID NO: 262790 - DNA, 120 bp, Artificial Sequence
  ENSG00000125746_14 (sequence is synthesized)
tgtggcccgctctcatgatgggaagttgctggcttcagctgatgactttggcaaagttcacctgtttagctacccctgctgtcagcctcgagccctcagccacaagtacggtggacacag

SEQ ID NO: 262791 - DNA, 120 bp, Artificial Sequence
  ENSG00000125746_15 (sequence is synthesized)
cagccatgtgacaaatgtggccttcttgtgggatgacagcatggccctgaccacagggggcaaggacaccagtgtgctacagtggcgggtggtctgatgcggccagggaagagtcaggtg

SEQ ID NO: 262792 - DNA, 120 bp, Artificial Sequence
  ENSG00000125746_16 (sequence is synthesized)
tcagggcaggaattctattttcgggagatgtctattgccgagtagagtaatatatacccagagtatgtctatagcagagggggttatgggggcgggagggtagactgacatacagaagtc

SEQ ID NO: 262793 - DNA, 120 bp, Artificial Sequence
  ENSG00000125746_17 (sequence is synthesized)
tctatttatccgggtgggaagagggagtcacatcgctttggggatccattggtgtttggtttggggtgttttttaagttttttcttttatatcatccagaaataaagacacgtacactaa

SEQ ID NO: 262794 - DNA, 120 bp, Artificial Sequence
  ENSG00000125746_18 (sequence is synthesized)
actgcggagcccagagggccagctgcgcggcctgtggacgcgggatggcaggggcgagctccacgccctgtccccgtctaagctaccacctttacttccaccaggctgggaaccagggct

SEQ ID NO: 262795 - DNA, 120 bp, Artificial Sequence
  ENSG00000125746_19 (sequence is synthesized)
tccttggttgtggtcagcaatgagtctggatgacaatttgtcgggcacgagcggtatggaagtggacgaccgcgtgtcggcgctggagcagcggctgcagttacaggaagacgagctggc

SEQ ID NO: 262796 - DNA, 120 bp, Artificial Sequence
  ENSG00000125746_20 (sequence is synthesized)
ggtcctaaaggcggcgctggcggatgctctgcgtcgcctgcgggcatgcgaagaacagggagcggcgctacgcgcgcggggcacccccaagggccgggcgcctccgcgcttaggcaccac

SEQ ID NO: 262797 - DNA, 120 bp, Artificial Sequence
  ENSG00000125746_21 (sequence is synthesized)
tgcctcggtgtgtcagctcttgaaaggccttcccaccaggacgccccttaatggctcgggacccccgcggcgcgtgggtggctatgccacgtccccatcctctcccaagaaggaggcgac

SEQ ID NO: 262798 - DNA, 120 bp, Artificial Sequence
  ENSG00000125746_22 (sequence is synthesized)
ctccgggcgcagcagtgtccgccgctacttgtcaccagagcgcctcgcctcggtgcgccgtgaggacccccgcagccggaccacatcctccagcagcaactgtagcgccaaaaaggaagg

SEQ ID NO: 262799 - DNA, 120 bp, Artificial Sequence
  ENSG00000125746_23 (sequence is synthesized)
ttttaaacccagtgcctagggcccagctggtccttgcccatttgcaggcgggttttggcatgtccaggcagagataagtacagaaagcgagagtatgcctttaggaatttggagagcagt

SEQ ID NO: 262800 - DNA, 120 bp, Artificial Sequence
  ENSG00000125746_24 (sequence is synthesized)
gaagctccgccacccgccgccatgagtagctttggagctgggtgagaccctttcgcagaccaccccccatctcctctccgcgctcccggggcttagatctcagcaaaaccaaagaagtta

SEQ ID NO: 262801 - DNA, 120 bp, Artificial Sequence
  ENSG00000125746_25 (sequence is synthesized)
atactccggttgtgggcgggaccagacggtacctagggggatccgggcgcagccaatcctggccctaggattgtgttggggggcttggcaggcggtgtcccgacccccctttctgggcat

SEQ ID NO: 262802 - DNA, 120 bp, Artificial Sequence
  ENSG00000125746_26 (sequence is synthesized)
cctggggatgaccccagcgccgggcccggcgccggccgcctgatgccaggcgagctgagctggggatgctggaacgaagggcgttgctatggcaacgggaggcagggcctggttgggggg

SEQ ID NO: 262803 - DNA, 120 bp, Artificial Sequence
  ENSG00000125746_27 (sequence is synthesized)
accgggcccgggctgggaccgggggggccggcggtggctgtggtggggcgatggcggagcgcggcccggccttctgcggcctgtacgacacgtcctcgctgctgcgatactgcaacgatg

SEQ ID NO: 262804 - DNA, 120 bp, Artificial Sequence
  ENSG00000125746_28 (sequence is synthesized)
ccacggagacacactgtacgtggggaccacccgcaattccatcctgcagggctccgtgcacacaggcttctcactgctggtccaggtgcgcctctctcctctgcacccctcccctcttcc

SEQ ID NO: 262805 - DNA, 120 bp, Artificial Sequence
  ENSG00000125746_29 (sequence is synthesized)
cagctctttccctggccttccctgcatcatccactccccctccccactcccagttctcctcacctccctgctctgtcccttctctgacctggccctgacccaggaccccttcccaggatc

SEQ ID NO: 262806 - DNA, 120 bp, Artificial Sequence
  ENSG00000125746_30 (sequence is synthesized)
cagcaaccaagagtttaactccaagcacagcagaggggccccaggcccctgctccaactgtgctgcctcctgccactctgattgggggtggcacccttcaggttggtgagtgtccctaca

SEQ ID NO: 262807 - DNA, 120 bp, Artificial Sequence
  ENSG00000125746_31 (sequence is synthesized)
ggttgtcccacagctgcagacaccctggccacacacctctcagactccagctccacggattggggaaggtcctgctggagtctgcttgcatttcttctcgaagctcaaacgcctgctcct

SEQ ID NO: 262808 - DNA, 120 bp, Artificial Sequence
  ENSG00000125746_32 (sequence is synthesized)
gccctttcatcgggcatccgggtgctctttcgacccctcgtggccagtcttggacctgcatggaaaaatgtgccaagaaagttctgctggaaaagtgctggtgattctccacgtgaccct

SEQ ID NO: 262809 - DNA, 120 bp, Artificial Sequence
  ENSG00000125746_33 (sequence is synthesized)
cctccgcgcccccagggtcactctcagccttccttccccagctcggggccctgggagaccgccgtgtgcaaattctatcggcagggtcggtggagagaggtcagggtatttgcttcctgg

SEQ ID NO: 262810 - DNA, 120 bp, Artificial Sequence
  ENSG00000125746_34 (sequence is synthesized)
gcccctccctgcatcccgcactcacagtggctgtggttcccctcctctgagccgcagttcctctgggaactcgagctgtccctggagacgggtaacagactccctccctgtcccttctgc

SEQ ID NO: 262811 - DNA, 120 bp, Artificial Sequence
  ENSG00000125746_35 (sequence is synthesized)
cctaggctggcgatggcttcgtgcccacttcggatggtcccctggggccgccccatcctttgtggctttctccactctgcccatccctctataaactgcccataaatgctcccagttaaa

SEQ ID NO: 262812 - DNA, 86 bp, Artificial Sequence
  ENSG00000125746_36 (sequence is synthesized)
cgaactcctgacctcaggtgatccagccagatgctgtggctcatgctgcctcagatgcgggtttaaaagtagatgctcctgcttac

SEQ ID NO: 262813 - DNA, 120 bp, Artificial Sequence
  ENSG00000125746_37 (sequence is synthesized)
ccgtgtctagccctgcccacctgttctaaactcccattgtgttctaagtgctttttgtctagccctgcccatcacagtctggccccgcccacagtattctggccctgcccccatactcca

SEQ ID NO: 262814 - DNA, 120 bp, Artificial Sequence
  ENSG00000125746_38 (sequence is synthesized)
aaggcctgtgtatccttcctttagtccccttgtgttctcgccctacctctgtatttgacttccactttcctgatttaatcctgtccccctctccttggttccgccctctgcagctctaac

SEQ ID NO: 262815 - DNA, 63 bp, Artificial Sequence
  ENSG00000125746_39 (sequence is synthesized)
cacgtcttagtcatagcatcttaaagccagagcgagaggctcctgggttcacagactcttaga

SEQ ID NO: 262816 - DNA, 120 bp, Artificial Sequence
  ENSG00000125746_40 (sequence is synthesized)
aagccagagcgagaggctcctgggttcacagactcttagaaaataagagggaagggacttccccaaggtcacacggccagcgcgctgtggcagagaggagtgtgcggatgggttggagag

SEQ ID NO: 262817 - DNA, 120 bp, Artificial Sequence
  ENSG00000125746_41 (sequence is synthesized)
ctgtggggatttccttcccccttcagagtcctcttccttggctcatgtccaagtgtcccagccccaggtagcgggacaggaaaggggcgtggctggccccccgcttagacccaggaaggc

SEQ ID NO: 262818 - DNA, 120 bp, Artificial Sequence
  ENSG00000125746_42 (sequence is synthesized)
atctcgcttgctcacggcactcgcctgctggcctagaaggctctgcccccacctgtgtgctctcttttagcagtgtccgccgctacttgtcaccagagcgcctcgcctcggtgcgccgtg

SEQ ID NO: 262819 - DNA, 120 bp, Artificial Sequence
  ENSG00000125746_43 (sequence is synthesized)
cgcagaaagagatagggaggaaatggtcgagaaatgtagtcatgccccaggccacgaggtcgtaacctagagtggggccagctagttcaaaagcggggacggtgccagagccttggaggg

SEQ ID NO: 262820 - DNA, 120 bp, Artificial Sequence
  ENSG00000125746_44 (sequence is synthesized)
accaatcttgaggtggcacggtaacagtggaaggtctgggagggcggagtcaatattgaggggcgtggccagagtttttagaagctggacggtcaggtctactgggtgaggaagtcaggg

SEQ ID NO: 262821 - DNA, 120 bp, Artificial Sequence
  ENSG00000125746_45 (sequence is synthesized)
aggagcttggcttatgggcgtggttattaaggtacaggagaggccccgttgagtttcagggatgaagtcaaggcagcagccacagagtttctacaaggaaagagggagtctgaggaattt

SEQ ID NO: 262822 - DNA, 120 bp, Artificial Sequence
  ENSG00000125746_46 (sequence is synthesized)
aagggtgcagccacagtgttcgcctgggcgaaattaaaatctggggtacggagtaacagaggctgagaccaggtggaggcattccagattccagaagctttgacatcaaaatcggggggc

SEQ ID NO: 262823 - DNA, 120 bp, Artificial Sequence
  ENSG00000125746_47 (sequence is synthesized)
actgccaggttgaaaagggcgtggcttaaaggttgggcggggccgtaggggcgtggtcaaatgccaagaggtgcagccaacttggaggcctcgaaggtattcacataaggaatacgtgaa

SEQ ID NO: 262824 - DNA, 120 bp, Artificial Sequence
  ENSG00000125746_48 (sequence is synthesized)
aatggacgtaatcagaatgcctggcgggccggagaaggagcgttggcgggaggtagcagtcaattctcaagcaactgagtcaactcagggacagggttagaagggaggctcagaatgaca

SEQ ID NO: 262825 - DNA, 120 bp, Artificial Sequence
  ENSG00000125746_49 (sequence is synthesized)
ggcgtggtcaactccagaggcggggccatactgaagatctggacagagtcaaaaactaaggctatataattctagcagtttgggaggcggaggcgggaatcatcgcttgagctcaggagt

SEQ ID NO: 262826 - DNA, 120 bp, Artificial Sequence
  ENSG00000125746_50 (sequence is synthesized)
aggcggaggcgggaatcatcgcttgagctcaggagttcgagaccaggctgggcaaaatagcgagccctcgtctttactaaaaatgaaaataaattaggcctggcgcggtggctcacgcct

SEQ ID NO: 262827 - DNA, 120 bp, Artificial Sequence
  ENSG00000125746_51 (sequence is synthesized)
acatttcaactctgctcaaacatagcaaacacaaatacagcgttgtgtatactccaggcacttcccaataattaaccaatttcaccctcgcaactacccccgggaggtcaaaaccaaaga

SEQ ID NO: 262828 - DNA, 120 bp, Artificial Sequence
  ENSG00000125746_52 (sequence is synthesized)
ggtgcagcctgtctgacccctgagatcaagctctgagccaccatgccctcctgcctcccattgtgcaaagaagaaagcagaggtccctggagaaggggcaggatttgccttgagtcacac

SEQ ID NO: 262829 - DNA, 120 bp, Artificial Sequence
  ENSG00000125746_53 (sequence is synthesized)
accagggcatgggttcagatgcccaattgaggcccccttcagacatactgggaaaggtcttccctgggtcccgctggggcagggtgagttgctggggctcatctagcatttgtctggcat

SEQ ID NO: 262830 - DNA, 120 bp, Artificial Sequence
  ENSG00000125746_54 (sequence is synthesized)
caaaaccaaagaagttatcttcagtgtgggtgagtggggagatggggaagggctcggtggaagcttgcttgttggggtgacaggctggagccagaggtcaggagtcttggctactgggtc

SEQ ID NO: 262831 - DNA, 120 bp, Artificial Sequence
  ENSG00000125746_55 (sequence is synthesized)
tttgcctctctggcctcagtttccctgcctttaaaaaaataaataaataaagctggaagaggagagggaatagggatggggctggtgtcagtgcctgacctctgggggtgtcctggcaga

SEQ ID NO: 262832 - DNA, 120 bp, Artificial Sequence
  ENSG00000125746_56 (sequence is synthesized)
atagcagggggacagacagagggggtgggggtggatttggtgttgagttgagggcagagtgtgggactggaaagggacggccagaggactttgcttctaggatacctcccaaatcctctg

SEQ ID NO: 262833 - DNA, 120 bp, Artificial Sequence
  ENSG00000125746_57 (sequence is synthesized)
acttcgtgctgtgtgatctttggcgatcactgcctctctgggcctgtgtcttaggctctgcaagatcaaccgagcaaagcacacggcctgcagagaggcagcgctctgccccttactcgg

SEQ ID NO: 262834 - DNA, 120 bp, Artificial Sequence
  ENSG00000125746_58 (sequence is synthesized)
ccccgttttcatcggagacctccggggagcggtgggggtggaggaatggtttctccccttttctgaactgaatactaagaccctttttttttctttgtcctttcctgacagcaaaaccaa

SEQ ID NO: 262835 - DNA, 120 bp, Artificial Sequence
  ENSG00000125746_59 (sequence is synthesized)
gctgtgtgcagtggatgaatccaatgatcacatgctctcggtgtgggactgggccaaggagaccaaggtggtggatgtcaaggtccctgaggactttggccctgtgcgcaccgtggcaga

SEQ ID NO: 262836 - DNA, 120 bp, Artificial Sequence
  ENSG00000125753_0 (sequence is synthesized)
acagtagtaagagtaacactgtagccgccaccggcaaggggtgcgcgctggggagcggacgctgcatcccctttctgctgcaggaacctctcatcagaccgcctgagggaagcggcgccc

SEQ ID NO: 262837 - DNA, 120 bp, Artificial Sequence
  ENSG00000125753_1 (sequence is synthesized)
ggagacccgccccggcccggtccacattctccccaggaagccggactctatggggcgggaccctgggggagcctgagccgagcccggagccagccccgaacccctgaacctccagccagg

SEQ ID NO: 262838 - DNA, 120 bp, Artificial Sequence
  ENSG00000125753_2 (sequence is synthesized)
ggcgccccgggagcagccagcccgtgggcgagccgcccgcccgccgagcagccatgagcgagacggtcatctgttccagccgggccactgtgatgctttatgatgatggcaacaagcgat

SEQ ID NO: 262839 - DNA, 120 bp, Artificial Sequence
  ENSG00000125753_3 (sequence is synthesized)
ggctccctgctggcacgggtccccaggccttcagccgcgtccagatctaccacaaccccacggccaattcctttcgcgtcgtgggccggaagatgcagcccgaccagcaggtggtcatca

SEQ ID NO: 262840 - DNA, 120 bp, Artificial Sequence
  ENSG00000125753_4 (sequence is synthesized)
actgtgccatcgtccggggtgtcaagtataaccaggccacccccaacttccatcagtggcgcgacgctcgccaggtctggggcctcaacttcggcagcaaggaggatgcggcccagtttg

SEQ ID NO: 262841 - DNA, 120 bp, Artificial Sequence
  ENSG00000125753_5 (sequence is synthesized)
ccgccggcatggccagtgccctagaggcgttggaaggaggtgggccccctccacccccagcacttcccacctggtcggtcccgaacggcccctccccggaggaggtggagcagcagaaaa

SEQ ID NO: 262842 - DNA, 120 bp, Artificial Sequence
  ENSG00000125753_6 (sequence is synthesized)
ggcagcagcccggcccgtcggagcacatagagcgccgggtctccaatgcaggaggcccacctgctccccccgctgggggtccacccccaccaccaggacctccccctcctccaggtcccc

SEQ ID NO: 262843 - DNA, 120 bp, Artificial Sequence
  ENSG00000125753_7 (sequence is synthesized)
ccccacccccaggtttgcccccttcgggggtcccagctgcagcgcacggagcagggggaggaccaccccctgcaccccctctcccggcagcacagggccctggtggtgggggagctgggg

SEQ ID NO: 262844 - DNA, 120 bp, Artificial Sequence
  ENSG00000125753_8 (sequence is synthesized)
ccccaggcctggccgcagctattgctggagccaaactcaggaaagtcagcaagcaggaggaggcctcaggggggcccacagcccccaaagctgagagtggtcgaagcggaggtgggggac

SEQ ID NO: 262845 - DNA, 120 bp, Artificial Sequence
  ENSG00000125753_9 (sequence is synthesized)
caatcaggaggagccagaggccagagtcccggcccagagtgaatctgtgcggagaccctgggagaagaacagcacaaccttgccaaggatgaagtcgtcttcttcggtgaccacttccga

SEQ ID NO: 262846 - DNA, 120 bp, Artificial Sequence
  ENSG00000125753_10 (sequence is synthesized)
gacccaaccctgcacgcccagctccagtgattactcggacctacagagggtgaaacaggagcttctggaagaggtgaagaaggaattgcagaaagtgaaagaggaaatcattgaagcctt

SEQ ID NO: 262847 - DNA, 120 bp, Artificial Sequence
  ENSG00000125753_11 (sequence is synthesized)
cgtccaggagctgaggaagcggggttctccctgaccacagggacccagaagacccgcttctcctttccgcacacccggcctgtcaccctgctttccctgcctctacttgacttggaattg

SEQ ID NO: 262848 - DNA, 120 bp, Artificial Sequence
  ENSG00000125753_12 (sequence is synthesized)
gctgaagactacacaggaatgcatcgttcccactccccatcccacttggaaaactccaagggggtgtggcttccctgctcacacccacactggctgctgattggctggggaggcccccgc

SEQ ID NO: 262849 - DNA, 120 bp, Artificial Sequence
  ENSG00000125753_13 (sequence is synthesized)
ccttttctccctttggtccttcccctctgccatccccttggggccggtccctctgctggggatgcaccaatgaaccccacaggaagggggaaggaaggagggaatttcacattcccttgt

SEQ ID NO: 262850 - DNA, 120 bp, Artificial Sequence
  ENSG00000125753_14 (sequence is synthesized)
tctagattcactttaacgcttaatgccttcaaagttttggtttttttaagaaaaaaaaatatatatatatttgggttttgggggaaaagggaaatttttttttctctttggttttgataa

SEQ ID NO: 262851 - DNA, 120 bp, Artificial Sequence
  ENSG00000125753_15 (sequence is synthesized)
aatgggatgtgggagtttttaaatgctatagccctgggcttgccccatttggggcagctatttaaggggaggggatgtctcaccgggctgggggtgagatatccccccaccccagggact

SEQ ID NO: 262852 - DNA, 120 bp, Artificial Sequence
  ENSG00000125753_16 (sequence is synthesized)
ccccttccctctggctccttccccttttctatgaggaaataagatgctgtaactttttggaacctcagttttttgattttttatttgggtaggttttggggtccaggccattttttttac

SEQ ID NO: 262853 - DNA, 120 bp, Artificial Sequence
  ENSG00000125753_17 (sequence is synthesized)
cccttggaggaaataagatgagggagaaaggagaaggggaggaaacttctcccctcccaccttcacctttagcttcttgaaaatgggcccctgcagaataaatctgccagtttttataaa

SEQ ID NO: 262854 - DNA, 120 bp, Artificial Sequence
  ENSG00000125753_18 (sequence is synthesized)
ccgccgagcagccatgaggcagcagcccggcccgtcggagcacatagagcgccgggtctccaatgcaggaggcccacctgctccccccgctgggggtccacccccaccaccaggacctcc

SEQ ID NO: 262855 - DNA, 120 bp, Artificial Sequence
  ENSG00000125753_19 (sequence is synthesized)
tactggatgttctccagtacttttccggctccaaggatccagaattctcccctagaatcctccagtcactctgcgaccttgacagcgatgtcatggtgtcgatgtaggggagcttctgga

SEQ ID NO: 262856 - DNA, 120 bp, Artificial Sequence
  ENSG00000125753_20 (sequence is synthesized)
gggaagttgaggctgcaatgagctgtgatcatgccattgcaccctagcctgggcaacagagcaaggttccttctcaaaaaataaaagaagggggattcattcctgcaagtcccggtaccc

SEQ ID NO: 262857 - DNA, 120 bp, Artificial Sequence
  ENSG00000125753_21 (sequence is synthesized)
cctcctgattagttttaccccattaattttaggagcttctggaagaggtgaagaaggaattgcagaaagtgaaagaggaaatcattgaagccttcgtccaggagctgaggaagcggggtt

SEQ ID NO: 262858 - DNA, 120 bp, Artificial Sequence
  ENSG00000125753_22 (sequence is synthesized)
tctcttaggccgtaccatgagggtagggatagtgggatgtgtggggtttgaacctgaaagaggaaatgggcagaggtgtggcaggggctggctcatggcagttttatttcctaccagcag

SEQ ID NO: 262859 - DNA, 120 bp, Artificial Sequence
  ENSG00000125753_23 (sequence is synthesized)
gaggagccagaggccagagtcccggcccagagtggtgagtagagtgcccagtccagccacaggaactacaaatcccagaatactctgttctcacatgttaagcacccttataggagagtc

SEQ ID NO: 262860 - DNA, 120 bp, Artificial Sequence
  ENSG00000125753_24 (sequence is synthesized)
agtcttttgtccctgatctttctgatttcttgcctatccccagaatctgtgcggagaccctgggagaagaacagcacaaccttgccaaggtaggccatcggtcctggggcccttggggag

SEQ ID NO: 262861 - DNA, 80 bp, Artificial Sequence
  ENSG00000125753_25 (sequence is synthesized)
gggcagatccgacaccccatctctacaaaaattagccaggcgtggtagcacttacctgtggtcccagctactcaggaggc

SEQ ID NO: 262862 - DNA, 83 bp, Artificial Sequence
  ENSG00000125753_26 (sequence is synthesized)
agttgaggcctcagcgagccatcatcatgcctgcactccagcctgagaaatagaatgtgactgtctcaaaacaaaacacaaca

SEQ ID NO: 262863 - DNA, 120 bp, Artificial Sequence
  ENSG00000125753_27 (sequence is synthesized)
actcggggcggggccggcaagacacgctgcggaagcctcagagggtgtctgggctcagcccggagccggcgtgtgggggcgggggctcccgggagggtctcctcacctccgggccctcct

SEQ ID NO: 262864 - DNA, 120 bp, Artificial Sequence
  ENSG00000125753_28 (sequence is synthesized)
gagggctgggatgatcctgctgtcctccgcaggcgaaactgagtcagagcggggcgtgcgtgggccggaggctttacacaccaaagaagccggcgcctcctgcccaccccgggcgaatgc

SEQ ID NO: 262865 - DNA, 120 bp, Artificial Sequence
  ENSG00000125755_0 (sequence is synthesized)
gacgaacggaagatggcggcggcggcggcggcggagtgtaggaagaggcactgctgagggggcgcgaggggaacggaggccagagctgcgctgacagcagccatggcgagcggcagtgga

SEQ ID NO: 262866 - DNA, 120 bp, Artificial Sequence
  ENSG00000125755_1 (sequence is synthesized)
gacagcgtcacccgtcggagcgtggcatcacagtttttcactcaagaggaggggccgggcatcgatggcatgaccacctcagagagggtggtggatcttctgaaccaggcggcgctgatc

SEQ ID NO: 262867 - DNA, 120 bp, Artificial Sequence
  ENSG00000125755_2 (sequence is synthesized)
accaatgactcaaagatcacagtgctcaaacaggtccaggagctgatcatcaacaaagaccccacactactggacaacttcctggatgagatcatcgcattccaagcagacaagtcaatc

SEQ ID NO: 262868 - DNA, 120 bp, Artificial Sequence
  ENSG00000125755_3 (sequence is synthesized)
gaagtgcgaaaatttgtcatcggcttcatcgaggaggcatgcaagcgagacattgagttgctgctgaaactcattgcaaacctcaacatgctcttgagggacgagaatgtgaacgtggtg

SEQ ID NO: 262869 - DNA, 120 bp, Artificial Sequence
  ENSG00000125755_4 (sequence is synthesized)
aagaaggctatcctcaccatgacccagctctacaaggtggccctgcagtggatggtaaagtcacgggtcattagcgagctacaggaggcctgctgggacatggtatctgccatggcgggg

SEQ ID NO: 262870 - DNA, 120 bp, Artificial Sequence
  ENSG00000125755_5 (sequence is synthesized)
gacatcatcctgctattggactctgacaatgacggcatccgcacccacgccatcaagtttgtggagggcctcattgtcaccctgtcaccccgcatggctgactcagagataccccgacgc

SEQ ID NO: 262871 - DNA, 120 bp, Artificial Sequence
  ENSG00000125755_6 (sequence is synthesized)
caggagcatgatatcagcctggaccgcatccctcgtgaccacccctacatccagtacaacgtgctatgggaagagggcaaggcagccttggagcagctgcttaagttcatggtgcaccct

SEQ ID NO: 262872 - DNA, 120 bp, Artificial Sequence
  ENSG00000125755_7 (sequence is synthesized)
gccatctcctccatcaacctgaccacagcgctgggctcccttgccaatatcgcccgccagagacccatgttcatgtctgaggtgatccaggcctatgaaactctgcatgccaacctgccc

SEQ ID NO: 262873 - DNA, 120 bp, Artificial Sequence
  ENSG00000125755_8 (sequence is synthesized)
ccgacgctggccaaatcgcaggtgagcagtgtgcgtaagaatctgaagctgcacctgttgagtgtgctgaagcacccggcttccttggagttccaggcccagatcaccaccctgctggtg

SEQ ID NO: 262874 - DNA, 120 bp, Artificial Sequence
  ENSG00000125755_9 (sequence is synthesized)
gacctgggcacacctcaggccgagatcgcccgcaacatgccgagcagcaaggacacccgcaagcggccccgcgatgactcggactccacactcaagaagatgaagctggagcccaacctg

SEQ ID NO: 262875 - DNA, 120 bp, Artificial Sequence
  ENSG00000125755_10 (sequence is synthesized)
ggggaggacgatgaggacaaagacttggagccaggcccgtcggggacctcgaaggcctcagcgcagatctccggccagtcagacacggacatcacagctgagttcctgcagcctctgctg

SEQ ID NO: 262876 - DNA, 120 bp, Artificial Sequence
  ENSG00000125755_11 (sequence is synthesized)
acgcctgataatgtggctaatctggtcctcatcagcatggtgtacctacccgaggccatgccagcctccttccaggccatctacacccccgtggagtcagcaggcacggaagcccagatc

SEQ ID NO: 262877 - DNA, 120 bp, Artificial Sequence
  ENSG00000125755_12 (sequence is synthesized)
aagcacctggctcggctcatggccacacagatgacagctgccggactgggaccaggtgtagagcagaccaaacagtgcaaggaggagcccaaggaggagaaggtggtgaagacagagagc

SEQ ID NO: 262878 - DNA, 120 bp, Artificial Sequence
  ENSG00000125755_13 (sequence is synthesized)
gtcctgatcaagcggcgcctgtcagcccagggccaagccatctcggtggtgggttccctgagctccatgtcccccctggaggaagaggcaccgcaggccaagaggaggccagagcccatt

SEQ ID NO: 262879 - DNA, 120 bp, Artificial Sequence
  ENSG00000125755_14 (sequence is synthesized)
atccctgtcactcagccccggctggcaggcgctggtgggcgcaagaaaattttccgtctcagcgacgtgctgaagccccttaccgatgcccaggtggaagccatgaagctgggcgctgtg

SEQ ID NO: 262880 - DNA, 120 bp, Artificial Sequence
  ENSG00000125755_15 (sequence is synthesized)
aagcggatcctgcgggctgagaaggctgtggcctgcagcggggcagcccaggtccgcataaagatcctggccagcctggtgacacagttcaactcgggcctgaaggcggaggtcctgtcc

SEQ ID NO: 262881 - DNA, 120 bp, Artificial Sequence
  ENSG00000125755_16 (sequence is synthesized)
ctcatccgcctgttgtctggcctgcaggagaaaccagaccagaaggatgggatcttcaccaaggttgtgctggaggcgccactcatcacagagagtgccctggaggtggtccgcaagtac

SEQ ID NO: 262882 - DNA, 120 bp, Artificial Sequence
  ENSG00000125755_17 (sequence is synthesized)
tgcgaggatgagagtcgcacctatctgggcatgtccacacttcgagacctgatcttcaagcgcccgtcccgccagttccagtacctgcatgtcctcctcgacctcagctcccatgagaag

SEQ ID NO: 262883 - DNA, 120 bp, Artificial Sequence
  ENSG00000125755_18 (sequence is synthesized)
gacaaggtgcgctcccaggccctgctgttcatcaaacgcatgtatgagaaggagcagctgcgggagtatgtggagaaatttgccctcaactacctgcagctcctggtgcaccccaaccca

SEQ ID NO: 262884 - DNA, 120 bp, Artificial Sequence
  ENSG00000125755_19 (sequence is synthesized)
ccgtctgtgctgtttggagctgacaaggacacagaggtggcagcaccctggacggaggagacagtgaagcagtgtctgtacctctacctggccctcctgcctcagaaccacaagctgatc

SEQ ID NO: 262885 - DNA, 120 bp, Artificial Sequence
  ENSG00000125755_20 (sequence is synthesized)
cacgaactggcggccgtgtacactgaagccatcgccgacatcaagcggacggtgctgagggtcattgagcagccgatccgaggaatgggcatgaactccccggagctgctcctgctggtg

SEQ ID NO: 262886 - DNA, 120 bp, Artificial Sequence
  ENSG00000125755_21 (sequence is synthesized)
gaaaattgtcccaagggagcagagacactggtcacgagatgtctgcacagcctcacagacaaagtcccaccctccccagagctggtgaagcgggtccgggatctctaccacaagcgactg

SEQ ID NO: 262887 - DNA, 120 bp, Artificial Sequence
  ENSG00000125755_22 (sequence is synthesized)
ccagacgtccgcttcctcatcccggtgctcaatgggctggagaagaaagaggtgatccaggccctgcctaaactcatcaaactcaaccccatcgtggtgaaggaagtcttcaaccgcctg

SEQ ID NO: 262888 - DNA, 120 bp, Artificial Sequence
  ENSG00000125755_23 (sequence is synthesized)
ctgggcacccagcatggtgagggaaactcagccttgtccccgctgaaccctggagagctcctgatcgcattacacaacattgactccgtgaagtgcgacatgaaatccatcatcaaagcc

SEQ ID NO: 262889 - DNA, 120 bp, Artificial Sequence
  ENSG00000125755_24 (sequence is synthesized)
accaacctgtgctttgcggagcggaacgtgtacacgtcagaggtgctggccgtggtgatgcagcagctgatggagcagagccccctgcccatgctgctcatgaggaccgtcatccagtcc

SEQ ID NO: 262890 - DNA, 120 bp, Artificial Sequence
  ENSG00000125755_25 (sequence is synthesized)
ctgaccatgtacccccgcctggggggcttcgtcatgaacatcctgtcccgcctcatcatgaagcaggtgtggaagtaccccaaggtgtgggagggcttcatcaagtgctgccagcgcaca

SEQ ID NO: 262891 - DNA, 120 bp, Artificial Sequence
  ENSG00000125755_26 (sequence is synthesized)
aagccccagagcttccaggtcatcctgcagctgccgccccagcagctgggagccgtctttgacaagtgcccagagctccgggagcccctgctggcccatgtccgctccttcaccccccac

SEQ ID NO: 262892 - DNA, 120 bp, Artificial Sequence
  ENSG00000125755_27 (sequence is synthesized)
cagcaagctcacatccctaactccatcatgaccatcttggaggccagcggcaagcaggagccagaggccaaggaggcgcctgcggggcccttggaggaggatgatctggagcccctgacc

SEQ ID NO: 262893 - DNA, 120 bp, Artificial Sequence
  ENSG00000125755_28 (sequence is synthesized)
ttggccccggccccagcaccccggccccctcaggacctcatcggcctgcgactggcccaggagaaggccttaaagcggcagctggaggaggaacagaagctgaagccgggaggagtggga

SEQ ID NO: 262894 - DNA, 120 bp, Artificial Sequence
  ENSG00000125755_29 (sequence is synthesized)
gccccctcctcttcctccccctctccctctccgtcggcccggccaggcccgcccccgtctgaggaagccatggatttccgggaggaggggcctgagtgcgagaccccgggcatcttcatc

SEQ ID NO: 262895 - DNA, 120 bp, Artificial Sequence
  ENSG00000125755_30 (sequence is synthesized)
agcatggatgacgactcggggctgaccgaggccgcgctgttggactctagtctcgagggccccctacccaaggagacggcagcgggcgggctgaccttgaaggaggagcggagcccccag

SEQ ID NO: 262896 - DNA, 120 bp, Artificial Sequence
  ENSG00000125755_31 (sequence is synthesized)
accctcgcacctgttggagaagatgctatgaagactcccagcccggctgccgaggacgccagggaacccgaggccaaggggaacagctgacggggctcgagggggaaagggggtgggaca

SEQ ID NO: 262897 - DNA, 120 bp, Artificial Sequence
  ENSG00000125755_32 (sequence is synthesized)
gggactcggggctgggggacggggcggggcttgacctgcgggtgctttgccttaaaaagaaataaaagatgtgaacttgggcaagttactgaaaagaaaaaaaaaaagggatggcgggcc

SEQ ID NO: 262898 - DNA, 120 bp, Artificial Sequence
  ENSG00000125755_33 (sequence is synthesized)
atttcccggcggccctgggtgtgtggcgcgtgcgcaccgttcccggcgacgaacggaagatggcggcggcggcggcggcggagtgtaggaagaggcactgctgagggggcgcgaggggaa

SEQ ID NO: 262899 - DNA, 120 bp, Artificial Sequence
  ENSG00000125755_34 (sequence is synthesized)
gagtgtaggaagaggcactgctgagggggcgcgaggggaacggaggccagagctgcgggtctcactctgtcgcccaggctggcacgatcccagttcactgcaacctccacctccctggtt

SEQ ID NO: 262900 - DNA, 120 bp, Artificial Sequence
  ENSG00000125755_35 (sequence is synthesized)
tgcctcagcctcccaaagtgttgggagtacaggcatgagccactgcacctggcctcatttttcttttttttttgtaaaacagaaacatacagtcaacactgtcttcagctttgcttgttt

SEQ ID NO: 262901 - DNA, 120 bp, Artificial Sequence
  ENSG00000125755_36 (sequence is synthesized)
agaaacatacagtcaacactgtcttcagctttgcttgttttcacttaatgtatgcactctctatcagtgtctagagattgttctcatttttttgtttttttcttcctttcttgttacagt

SEQ ID NO: 262902 - DNA, 120 bp, Artificial Sequence
  ENSG00000125755_37 (sequence is synthesized)
tccatagtctttttcctttatttatatttatatgtttttcacttactttcacaggtgttgaagccccatggcctttgattatgtatgaactttttttcagccagtctccctatttgagaa

SEQ ID NO: 262903 - DNA, 120 bp, Artificial Sequence
  ENSG00000125755_38 (sequence is synthesized)
cacttgagttgcttctagtcttttgctattatgaatagttgtgtaattgacatatactgctacgttaatcattccataattttgcctgtgtgactgtgatggatgcctgaaagccccctt

SEQ ID NO: 262904 - DNA, 120 bp, Artificial Sequence
  ENSG00000125755_39 (sequence is synthesized)
cctcccttttaaaaacagcttcatgatattccagagagtggctgaaacataattattgaagcaggccttttgtgatgtattgagtgcctactatgtgccggactctgtgcctgatattcc

SEQ ID NO: 262905 - DNA, 85 bp, Artificial Sequence
  ENSG00000125755_40 (sequence is synthesized)
tgagtgcctactatgtgccggactctgtgcctgatattcctcagagctgtgtttttaaaagtttactctgggccaggcactgtgg

SEQ ID NO: 262906 - DNA, 75 bp, Artificial Sequence
  ENSG00000125755_41 (sequence is synthesized)
ccagaaagtttgctgtggtgcccagtccaaagcatatcccagatggagagaggggacacacggagacctgcaagg

SEQ ID NO: 262907 - DNA, 120 bp, Artificial Sequence
  ENSG00000125755_42 (sequence is synthesized)
atcccagatggagagaggggacacacggagacctgcaaggtggctgttgcacgttcatgtggcccatcgttcagcagctgtttgtggttggcccacttgaggctgagacttctggctctg

SEQ ID NO: 262908 - DNA, 120 bp, Artificial Sequence
  ENSG00000125755_43 (sequence is synthesized)
ccttgggagatgtcagtctcccccaagttacaggccccgtgcacatatccataagccagagacagaccctggaggggagagggacttgagaaggcctgactggggaggaacagcctggga

SEQ ID NO: 262909 - DNA, 120 bp, Artificial Sequence
  ENSG00000125755_44 (sequence is synthesized)
aggaggcttgggccctttgtaggtgttcgggtgacaatccagcccagcccatccgctggttccctgagcttgatccatcctcttctttcctggggacaagctgacagcagccatggcgag

SEQ ID NO: 262910 - DNA, 120 bp, Artificial Sequence
  ENSG00000125755_45 (sequence is synthesized)
tgtatgtatttactaaaagagagggtgagtttttctctttaagattgactgatactgatggagacccccagggtttgaagcatcagcttgtaaggcggaaagccacacgttagatctgag

SEQ ID NO: 262911 - DNA, 120 bp, Artificial Sequence
  ENSG00000125755_46 (sequence is synthesized)
ggtgaaggaacttttctagtagatgcctgcaagaccactgcccaagtttggggttgagaattaagactggcagcatgccatgagatcttccacaagacacagctcctgccactttcctca

SEQ ID NO: 262912 - DNA, 120 bp, Artificial Sequence
  ENSG00000125755_47 (sequence is synthesized)
gcccccactggaatctgccaagtcaaagactgtcactcacagccccacctcagagctctggagagccacctccctccctccctccttttcttgcctcctcttccctccctccctccctcc

SEQ ID NO: 262913 - DNA, 120 bp, Artificial Sequence
  ENSG00000125755_48 (sequence is synthesized)
ctcctccttccttcctcccaggttttaccctttacaacccacctttttctgcctctgatgtacctgctgtgccctggcacagagtgggcctaaagcagttgggtagccccacccctagcc

SEQ ID NO: 262914 - DNA, 120 bp, Artificial Sequence
  ENSG00000125755_49 (sequence is synthesized)
ccgaggaacagaaggaagcagggcacaccgtgagtggtagaggcgcagcagcagggcagacccagggctccagggcacttgtgggccagggtaggtgaggcaggagagcttgcctgcagg

SEQ ID NO: 262915 - DNA, 120 bp, Artificial Sequence
  ENSG00000125755_50 (sequence is synthesized)
gcggcagggttggtgacgaactggccgcctcacgatggcccccactcactgagcactctgcgctgggctctccctgaacgcctacaggcctgagcctgctggtccgccacttggtgggta

SEQ ID NO: 262916 - DNA, 120 bp, Artificial Sequence
  ENSG00000125755_51 (sequence is synthesized)
tgttcacttccattgtgtagacaggaaatggaggctccagagaggttaggtgacttactcagggccaagcagaagctaagtggtgtggtagaagaaacagaatctgaagtgaaacggacc

SEQ ID NO: 262917 - DNA, 120 bp, Artificial Sequence
  ENSG00000125755_52 (sequence is synthesized)
tgggtgggaatcccagctctgccggttccgcgtctaaggaccacctcccctgagagcgcccacccctccatccctcctgagcaaggtttctgggccaggagccatcctgtcccacggagc

SEQ ID NO: 262918 - DNA, 120 bp, Artificial Sequence
  ENSG00000125755_53 (sequence is synthesized)
tggacaccctcactgtcgccctctatactcagaagactgctgtcctttgatttctcttctcaccctcagacgggaaggggcttcctctctgtgctgcttactttcgtgttctagcttgaa

SEQ ID NO: 262919 - DNA, 120 bp, Artificial Sequence
  ENSG00000125755_54 (sequence is synthesized)
acagcttttcagtgacttacttcctaaccttcctctgcaagttctctgagaaacgtttaaggtcaagagagcagcttatggaaatgtcaaacccacattataaaacccaggaggcaccaa

SEQ ID NO: 262920 - DNA, 120 bp, Artificial Sequence
  ENSG00000125755_55 (sequence is synthesized)
ggcctctcgtgggagaccagcagggaggaaagatctccaggctcataggccagggctgtggtcttcacattccccgacccctttggtgatctgaggaaagttctagcccattcccaggac

SEQ ID NO: 262921 - DNA, 120 bp, Artificial Sequence
  ENSG00000125755_56 (sequence is synthesized)
agtatgctcatattatttgcatacagtttgagggggttcacacatacacacacacaccccaaggccatttgtggacccagattagaagccctgaggatcctaggtccagaagaaagggcc

SEQ ID NO: 262922 - DNA, 120 bp, Artificial Sequence
  ENSG00000125755_57 (sequence is synthesized)
ttgtcggaggccacacaggccaccaggagccaggcccctgaagatccttggcccaggagaaagggccttgccagaggccacacaggccaccaggagtgaggcccccagaggggtcagcag

SEQ ID NO: 262923 - DNA, 120 bp, Artificial Sequence
  ENSG00000125755_58 (sequence is synthesized)
ggcctaccctacaccaccccacccttcaacacgcccaggcgtgcacgctgcaggccagacaaccctccagctggtgtccccagcacccaacccaagtttttctcctgctcaggcaccagc

SEQ ID NO: 262924 - DNA, 120 bp, Artificial Sequence
  ENSG00000125755_59 (sequence is synthesized)
agtcttcctggttgcactctaagctccagatcacaaagtcgagtccttttgttgtgcactgttcactcccccgtagaccaccctgttcctctggggagcttgtctataactagacccact

SEQ ID NO: 262925 - DNA, 120 bp, Artificial Sequence
  ENSG00000125755_60 (sequence is synthesized)
cctggtagtccagcattaagaaaagtcagcacctctgctcacccatatccatcctgggtagtgctggggacacaggaaagacagccctagccctgtccttccagggcttacagtccaggg

SEQ ID NO: 262926 - DNA, 120 bp, Artificial Sequence
  ENSG00000125755_61 (sequence is synthesized)
agagacaagaagtccctggccagtaacaactgagaggggtggcctgggactgggcagcccagaggggccatgtaacccagcctgggtgtgggacatcagggaagacttcccgaaaaaggg

SEQ ID NO: 262927 - DNA, 120 bp, Artificial Sequence
  ENSG00000125755_62 (sequence is synthesized)
gacactcaggctgagaccaaggaaggatgagtaggcggcagcagcaggagactgcagggaccgagggaggtgcttgctggctggttctggacctaggggacgaaggagggggcctggtca

SEQ ID NO: 262928 - DNA, 120 bp, Artificial Sequence
  ENSG00000125755_63 (sequence is synthesized)
agggaggaggtcaggctgtcgccattgggaaaggtgcccctggggcctgcccacacaggagtctcgcaggccgaggtgggaatttgaccttgtttcttgagggtctctgggaggcaagtc

SEQ ID NO: 262929 - DNA, 120 bp, Artificial Sequence
  ENSG00000125755_64 (sequence is synthesized)
aggtctgagctttccaaaacacccttcaggctgctatatggagaatggatcggaggctcgggggaggcccaggtggggggctggggcaaagccgacagggaaggaagaggggaggggtga

SEQ ID NO: 262930 - DNA, 120 bp, Artificial Sequence
  ENSG00000125755_65 (sequence is synthesized)
ttctggagccttggggtggctgagcaggcaggaccagtgaccacctggccctgacgaggagcaggggcttcctcggtttctggcaggtcctcacctccactgtctgctctgcccattcag

SEQ ID NO: 262931 - DNA, 120 bp, Artificial Sequence
  ENSG00000125755_66 (sequence is synthesized)
cctcctccccacctgtctacgcccccccccttagagaccccacccctgttctccattagcctctcaaggatttggggggttggggtgctcttctggctcaataaagacttcctggttgac

SEQ ID NO: 262932 - DNA, 120 bp, Artificial Sequence
  ENSG00000125755_67 (sequence is synthesized)
ttcccccgccctccaaaccctgtcacctcagtctcaccctgggcgccagcatgccccgcaagccaccctgccgggcaacacctgaccctcccctaagctctcaccctgggtctggtcatc

SEQ ID NO: 262933 - DNA, 120 bp, Artificial Sequence
  ENSG00000125755_68 (sequence is synthesized)
aaggcctctggagggaggtcggggctgcttgttgcccatccagaggaatcttggatggtgggatttgggcatggtcttggcaaggtctttctcccagtgtcaaggctcggggggatgcct

SEQ ID NO: 262934 - DNA, 120 bp, Artificial Sequence
  ENSG00000125755_69 (sequence is synthesized)
cgcctgttgtctggcctgcaggagaaaccagaccagaaggatgggtgagggggctgaccctgcaccctcctgtccccgagaggcttcctctcctggtgctgccctccctttctgattgcg

SEQ ID NO: 262935 - DNA, 120 bp, Artificial Sequence
  ENSG00000125755_70 (sequence is synthesized)
accacctccctcttcgtcaccccccgagtcagtcctcctcgcacccatcccaagtctcctctcctcctccccctctggaggcacgttcaaggttgtagttttgcatgtgggctccaggtc

SEQ ID NO: 262936 - DNA, 120 bp, Artificial Sequence
  ENSG00000125755_71 (sequence is synthesized)
gcactccctgagctgttcctcagctctgccacttgctctgagcttgctctgcgtggctttgtcactccctctctctgccattttcccatctgtaaataacagtgctcacccatgggcctg

SEQ ID NO: 262937 - DNA, 120 bp, Artificial Sequence
  ENSG00000125755_72 (sequence is synthesized)
gagatagacttctctacaccccattcactacctgagttggttctgtagcttcctccctatccgtggcctccagcttactcgtctatcctccacacagcagctccaggaacattttattat

SEQ ID NO: 262938 - DNA, 120 bp, Artificial Sequence
  ENSG00000125755_73 (sequence is synthesized)
cagcctccttactgtgaccagtgaggccttatgtgacccaatctctttggctttaccccccgaacattagccacattggccttctgtctgttcctcgaacatgtcaaattcagggcgctg

SEQ ID NO: 262939 - DNA, 120 bp, Artificial Sequence
  ENSG00000125755_74 (sequence is synthesized)
gtgcttcctgttctgtccacctggaatgctcttccctcaactctatgtgtgggtggctccttctcatccaccagtgtactcaactgtaacttcaaagcggccttttgaggccaccatatc

SEQ ID NO: 262940 - DNA, 120 bp, Artificial Sequence
  ENSG00000125755_75 (sequence is synthesized)
taaaatacccacacccttctccacccgccatcattccctcccgttcttatgttcagtgaataaagttaggaatccctgtttgacaaacggaagaaatgagtttcagagaggtgcagtctc

SEQ ID NO: 262941 - DNA, 120 bp, Artificial Sequence
  ENSG00000125755_76 (sequence is synthesized)
tgcccagatcatccagccgccagcttttgaaccctgttctgttcacctccaaagctttataagcaggggcttgaacaagcagcccctgagggagggcctgctggccctgagctcctacaa

SEQ ID NO: 262942 - DNA, 120 bp, Artificial Sequence
  ENSG00000125755_77 (sequence is synthesized)
gtgcgcaccgttcccggcgacgaacggaagatggcggcggcggcggcggcggagtgtaggaagaggcactgctgagggggcgcgaggggaacggaggccagagctgcggtgttcgggtga

SEQ ID NO: 262943 - DNA, 120 bp, Artificial Sequence
  ENSG00000125755_78 (sequence is synthesized)
tgtgtgtaactgagatgcagacagaaggaagtctggaataggttctctctgactcccgagtcagtgccataaccactaagcctttgctgttctctttcctgtaaaaaaaaaaaaaaaaaa

SEQ ID NO: 262944 - DNA, 120 bp, Artificial Sequence
  ENSG00000125755_79 (sequence is synthesized)
ggcattcgaggtcaggtcaagtctgagccacagaggagtggcccgcaggaggacagcccagccagggctgggagctggagcaggcccatgtctggaggagctgcagggagatgccaagat

SEQ ID NO: 262945 - DNA, 120 bp, Artificial Sequence
  ENSG00000125755_80 (sequence is synthesized)
atgcccactcggaaggagactggagaaggggggtctcccttaacggagagtgggttgtgttgttggctgaggaaggggcagtggatgctaggcaggcagaattacaggcatcctttttca

SEQ ID NO: 262946 - DNA, 120 bp, Artificial Sequence
  ENSG00000125755_81 (sequence is synthesized)
ctgtggaacaggggaggctcacttatcagggtgaccattagaaagtcatcctggcgtcagggagactagcagtgagctgttgcagcagttcagttgggggtttctggaggcaaaagtggt

SEQ ID NO: 262947 - DNA, 120 bp, Artificial Sequence
  ENSG00000125772_0 (sequence is synthesized)
aaaccggtttgagcgtggctgcttcctgccgctcgacgccgcggcaggccgcctggggggagcgctggcgaggcacggacggcgggcgcccggtacctctgcccgcggtcctcgctctcg

SEQ ID NO: 262948 - DNA, 120 bp, Artificial Sequence
  ENSG00000125772_1 (sequence is synthesized)
ggcggggcggcggcgacgcggacctgcggactagcgaacccggagcacgacatcataaaataaatccatcagaatgacaccttctcaggttgcctttgaaataagaggaactcttttacc

SEQ ID NO: 262949 - DNA, 120 bp, Artificial Sequence
  ENSG00000125772_2 (sequence is synthesized)
aggagaagtttttgcgatatgtggaagctgtgatgctttgggaaactggaatcctcaaaatgctgtggctcttcttccagagaatgacacaggtgaaagcatgctatggaaagcaaccat

SEQ ID NO: 262950 - DNA, 120 bp, Artificial Sequence
  ENSG00000125772_3 (sequence is synthesized)
tgtactcagtagaggagtatcagttcagtatcgctacttcaaagggtactttttagaaccaaagactatcggtggtccatgtcaagtgatagttcacaagtgggagactcatctacaacc

SEQ ID NO: 262951 - DNA, 120 bp, Artificial Sequence
  ENSG00000125772_4 (sequence is synthesized)
acgatcaataacccctttagaaagcgaaattattattgacgatggacaatttggaatccacaatggtgttgaaactctggattctggatggctgacatgtcagactgaaataagattacg

SEQ ID NO: 262952 - DNA, 120 bp, Artificial Sequence
  ENSG00000125772_5 (sequence is synthesized)
tttgcattattctgaaaaacctcctgtgtcaataaccaagaaaaaattaaaaaaatctagatttagggtgaagctgacactagaaggcctggaggaagatgacgatgatagggtatctcc

SEQ ID NO: 262953 - DNA, 120 bp, Artificial Sequence
  ENSG00000125772_6 (sequence is synthesized)
cactgtactccacaaaatgtccaatagcttggagatatccttaataagcgacaatgagttcaagtgcaggcattcacagccggagtgtggttatggcttgcagcctgatcgttggacaga

SEQ ID NO: 262954 - DNA, 120 bp, Artificial Sequence
  ENSG00000125772_7 (sequence is synthesized)
gtacagcatacagacgatggaaccagataacctggaactaatctttgattttttcgaagaagatctcagtgagcacgtagttcagggtgatgcccttcctggacatgtgggtacagcttg

SEQ ID NO: 262955 - DNA, 120 bp, Artificial Sequence
  ENSG00000125772_8 (sequence is synthesized)
tctcttatcatccaccattgctgagagtggaaagagtgctggaattcttactcttcccatcatgagcagaaattcccggaaaacaataggcaaagtgagagttgactatataattattaa

SEQ ID NO: 262956 - DNA, 120 bp, Artificial Sequence
  ENSG00000125772_9 (sequence is synthesized)
gccattaccaggatacagttgtgacatgaaatcttcattttccaagtattggaagccaagaataccattggatgttggccatcgaggtgcaggaaactctacaacaactgcccagctggc

SEQ ID NO: 262957 - DNA, 120 bp, Artificial Sequence
  ENSG00000125772_10 (sequence is synthesized)
taaagttcaagaaaatactattgcttctttaagaaatgctgctagtcatggtgcagcctttgtagaatttgacgtacacctttcaaaggactttgtgcccgtggtatatcatgatcttac

SEQ ID NO: 262958 - DNA, 120 bp, Artificial Sequence
  ENSG00000125772_11 (sequence is synthesized)
ctgttgtttgactatgaaaaagaaatttgatgctgatccagttgaattatttgaaattccagtaaaagaattaacatttgaccaactccagttgttaaagctcactcatgtgactgcact

SEQ ID NO: 262959 - DNA, 120 bp, Artificial Sequence
  ENSG00000125772_12 (sequence is synthesized)
gaaatctaaggatcggaaagaatctgtggttcaggaggaaaattccttttcagaaaatcagccatttccttctcttaagatggttttagagtctttgccagaagatgtagggtttaacat

SEQ ID NO: 262960 - DNA, 120 bp, Artificial Sequence
  ENSG00000125772_13 (sequence is synthesized)
tgaaataaaatggatctgccagcaaagggatggaatgtgggatggtaacttatcaacatattttgacatgaatctgtttttggatataattttaaaaactgttttagaaaattctgggaa

SEQ ID NO: 262961 - DNA, 120 bp, Artificial Sequence
  ENSG00000125772_14 (sequence is synthesized)
gaggagaatagtgttttcttcatttgatgcagatatttgcacaatggttcggcaaaagcagaacaaatatccgatactatttttaactcaaggaaaatctgagatttatcctgaactcat

SEQ ID NO: 262962 - DNA, 120 bp, Artificial Sequence
  ENSG00000125772_15 (sequence is synthesized)
ggacctcagatctcggacaacccccattgcaatgagctttgcacagtttgaaaatctactggggataaatgtacatactgaagacttgctcagaaacccatcctatattcaagaggcaaa

SEQ ID NO: 262963 - DNA, 120 bp, Artificial Sequence
  ENSG00000125772_16 (sequence is synthesized)
agctaagggactagtcatattctgctggggtgatgataccaatgatcctgaaaacagaaggaaattgaaggaacttggagttaatggtctaatttatgataggatatatgattggatgcc

SEQ ID NO: 262964 - DNA, 120 bp, Artificial Sequence
  ENSG00000125772_17 (sequence is synthesized)
tgaacaaccaaatatattccaagtggagcaattggaacgcctgaagcaggaattgccagagcttaagagctgtttgtgtcccactgttagccgctttgttccctcatctttgtgtgggga

SEQ ID NO: 262965 - DNA, 120 bp, Artificial Sequence
  ENSG00000125772_18 (sequence is synthesized)
gtctgatatccatgtggatgccaacggcattgataacgtggagaatgcttagtttttattgcacagaggtcattttgggggcgtgcaccgctgttctgggtattcatttttcatcactga

SEQ ID NO: 262966 - DNA, 120 bp, Artificial Sequence
  ENSG00000125772_19 (sequence is synthesized)
gcattgttgatctatgccttttgggcttctcagttcaatgaagcaataatgaagtatttaactctttcactacagttcttgcaagtatgctatttaaattacttggccaggtataattgc

SEQ ID NO: 262967 - DNA, 120 bp, Artificial Sequence
  ENSG00000125772_20 (sequence is synthesized)
ggccaggtataattgccagtcagtctctttatagtgagaaaatttattggttagtaatataaatattttaaactaaatatataaatctataatgttaaacatatgttcattaaaagcata

SEQ ID NO: 262968 - DNA, 120 bp, Artificial Sequence
  ENSG00000125772_21 (sequence is synthesized)
tatataaatagctcatatttacacttacagcttttcatttgatcaggtctgaaatctttagcacttaaggaaaatgactatgcataattatacctgaccatgaaaaaaataagtacctca

SEQ ID NO: 262969 - DNA, 120 bp, Artificial Sequence
  ENSG00000125772_22 (sequence is synthesized)
gggttgacatgcacacaacaccattttcattcagtatgaaccttgaggctgctgccatttttccacttaaccaaaccagcctgaaggtgaacctcgaaacttgtttcataaatctttcaa

SEQ ID NO: 262970 - DNA, 120 bp, Artificial Sequence
  ENSG00000125772_23 (sequence is synthesized)
aagttgttttacatcaatgttaaaatttcaaaatgctgcagggtaatttaatgtataaaatattagtaagaaaaagtatgtattgcatacttagtagaatagatcacaacatacaaattc

SEQ ID NO: 262971 - DNA, 120 bp, Artificial Sequence
  ENSG00000125772_24 (sequence is synthesized)
aattcagtgcatgctttaggtgttaagcatgagattgtacatgtttactgttaggtccttgcatctgtggtgctaggtgagtatgagaagatgtcaaggactggacgtattttgttgcct

SEQ ID NO: 262972 - DNA, 120 bp, Artificial Sequence
  ENSG00000125772_25 (sequence is synthesized)
aaaaaaaaaaggctgtttgtaggcgttttaaatatgcttattttgtgtgtctctcactacctattacacactgttgctttgtgggtttgttttgtatgtgcgtgtgttatacagtagtta

SEQ ID NO: 262973 - DNA, 120 bp, Artificial Sequence
  ENSG00000125772_26 (sequence is synthesized)
aatttccatgcagaaaaataaatgtcctgaattttcatattagtattctttattgtatatcatgcatgtaatttatttagaaatgtaggtcttactaaatgtatatgcatgtatttcaga

SEQ ID NO: 262974 - DNA, 120 bp, Artificial Sequence
  ENSG00000125772_27 (sequence is synthesized)
ttatactaggatttcttggattagaagcagattgtgttaactgtaacttaaagaatgaatgttaaataaaatgatacagatttattttcttcattacaaaatgaaatttcaagaaggtgt

SEQ ID NO: 262975 - DNA, 120 bp, Artificial Sequence
  ENSG00000125772_28 (sequence is synthesized)
tacttttgtagaatggttttataatatgacaagaaattttaatatagtgtctaccctaaagggatggcttatttgcatctaccttttactgcatgtttttcacaaggcagtttattcata

SEQ ID NO: 262976 - DNA, 120 bp, Artificial Sequence
  ENSG00000125772_29 (sequence is synthesized)
tattgacatattttggtagtagctgagaacctaagacttgaaattatacattgtgtagtattttttaagctaagcaatgcaattttggtcagatcttatttgtgtgaagataggctctga

SEQ ID NO: 262977 - DNA, 120 bp, Artificial Sequence
  ENSG00000125772_30 (sequence is synthesized)
aatcctatggtattgcgtttgtaacgttgatattaatgcaaaatagtttaggaaatggagtcttctgcaagggttctgtatacttttcccacattgtatgagattttccaaaattttggt

SEQ ID NO: 262978 - DNA, 120 bp, Artificial Sequence
  ENSG00000125772_31 (sequence is synthesized)
gtgaattgggcacttttggaaaactcctgaaaaagaattagtttccttcatctgcagacctttgtccaatacggttaccatttctttatagtaactcgattagccatatatgtttgtttc

SEQ ID NO: 262979 - DNA, 120 bp, Artificial Sequence
  ENSG00000125772_32 (sequence is synthesized)
tagtcctgctcctttgctcctctcctatgccttcccagtgctggctccattttgaagactcaaggacagaggggaagcagatcataaagagaaaaaggagacagaagaaaggatgaagga

SEQ ID NO: 262980 - DNA, 120 bp, Artificial Sequence
  ENSG00000125772_33 (sequence is synthesized)
aggaggtcatggggagtgtggcttctgagcagtttagttgctggggagagcagacagtcactgcctacaatacagacagaaccttcctgctcactttctgtcctatctcttcctgacctt

SEQ ID NO: 262981 - DNA, 120 bp, Artificial Sequence
  ENSG00000125772_34 (sequence is synthesized)
atgaaccagtgttagtagatgattaaaacatgacaagcaatggctccttattttcacaggactaagtccgggccttcgtatcactagctgttgccttttacaccctgcttcagccaccct

SEQ ID NO: 262982 - DNA, 120 bp, Artificial Sequence
  ENSG00000125772_35 (sequence is synthesized)
gtccctgtcattggccctggacttcctctctgtgcccgtgtgtcctctgcctgggagccctctcctcccatagtcactttctctctgccaaactcatttcttcttgtgcccaagacctct

SEQ ID NO: 262983 - DNA, 120 bp, Artificial Sequence
  ENSG00000125772_36 (sequence is synthesized)
ctcctgagcccttgtggaaacttcaggaaggatgaatccgtctttgtgctccacggctcgtaccttgatcaggctgtgcatcacagtaattctgttctaggtaggcagagttgatctttg

SEQ ID NO: 262984 - DNA, 120 bp, Artificial Sequence
  ENSG00000125772_37 (sequence is synthesized)
tctcatctgccaggctgcaggctcttcaagggcagggaccttgtcatagtcatttttattttcacagtgcttggaacatggtggaaaatgaatgttggaattattggagtaatataattt

SEQ ID NO: 262985 - DNA, 120 bp, Artificial Sequence
  ENSG00000125772_38 (sequence is synthesized)
gtatcaaatgtccttttgaattaagagatttagttatgtttactaagaatgtaaactttgaattggtttgcattttaacaattaggatggtttattgatgtgaattttgaaatgtagagg

SEQ ID NO: 262986 - DNA, 120 bp, Artificial Sequence
  ENSG00000125772_39 (sequence is synthesized)
tataatgttaaattattttatactttatggaaatcaagtgaaatgtttgaaaaaatgccgccattatcctctggtattttctactctctggaattatgtgctgtaaatgatcggctgtaa

SEQ ID NO: 262987 - DNA, 120 bp, Artificial Sequence
  ENSG00000125772_40 (sequence is synthesized)
atgtgaggcacaccacccacccctgtgtggaaagtgttgtggcgcttcctgccacccacccacctctctgccgttgctccttgtgacacttgtctgtcgtctcccatccaaactccaagc

SEQ ID NO: 262988 - DNA, 120 bp, Artificial Sequence
  ENSG00000125772_41 (sequence is synthesized)
ttacagctacctcagtactgctttgcttgtctgaaacacctcctttgccttccttcagtgtcccgctcaggtgcagcctcctccctaaagctcatctcagcttttgatctgaatgatgat

SEQ ID NO: 262989 - DNA, 120 bp, Artificial Sequence
  ENSG00000125772_42 (sequence is synthesized)
ggaaacatgcagacagcctctcagtcttactatttaatgttgtagctgggaaaaaacccagagaggttaactgatatactgggttgggactaggatgtgggttttgtgactctgaatccc

SEQ ID NO: 262990 - DNA, 120 bp, Artificial Sequence
  ENSG00000125772_43 (sequence is synthesized)
atgttctcaaactacgctgccttccgaagtctggcatttgttagctcatgcttccttgtagtccagcttcttatgtgcctgttatattctccagtaagattgtaagccccttaagggcag

SEQ ID NO: 262991 - DNA, 120 bp, Artificial Sequence
  ENSG00000125772_44 (sequence is synthesized)
ggacgtctttgcatctctagcactgctatagtgttctatccttagttatgaactagataaataaatggtggtggcaacaatcctagtttcctaactcagattgtttcacgataaacacag

SEQ ID NO: 262992 - DNA, 120 bp, Artificial Sequence
  ENSG00000125772_45 (sequence is synthesized)
tcacagccatagtcatattttggggatgtcaaaactggcctcagaatacagaataagtaccatttcccattgttgaaagtacactttgcttctttattacatttgtttctttatcttctc

SEQ ID NO: 262993 - DNA, 120 bp, Artificial Sequence
  ENSG00000125772_46 (sequence is synthesized)
aacaacagtttttaattgcctcttaaaataaactttattagaaatatttacctagatatttttgttttcttgggttagattagtttattatgaaatattcactttcatttggaatggtta

SEQ ID NO: 262994 - DNA, 120 bp, Artificial Sequence
  ENSG00000125772_47 (sequence is synthesized)
ggaagtttataagataccattcttcttgactgagcatccatagctctatttgtttacttgctcaggcttaacgaacatttgaagaaaaaattaatccaaaacaaagattcttaaattttt

SEQ ID NO: 262995 - DNA, 120 bp, Artificial Sequence
  ENSG00000125772_48 (sequence is synthesized)
taatagagtaagttattctattttttcttttcttcttaatttttttaagagaaattggtaaatacttgaataaacttgtatgaatgaattcaaatttcttaaattccctattggctatgc

SEQ ID NO: 262996 - DNA, 120 bp, Artificial Sequence
  ENSG00000125772_49 (sequence is synthesized)
tttttttttgtctttttttttttgtaagttgttttcttttaaacacattaacttttcttatgcttaaatatggcatttctcttcatacaagtatttttgaatttcttagtccatattgaa

SEQ ID NO: 262997 - DNA, 120 bp, Artificial Sequence
  ENSG00000125772_50 (sequence is synthesized)
cttcatacaagtatttttgaatttcttagtccatattgaaaatcgaatttgaagttcacttcacatacattaaattacccacatgtattcatctgtaaattgactcagtgctgagaaatg

SEQ ID NO: 262998 - DNA, 120 bp, Artificial Sequence
  ENSG00000125772_51 (sequence is synthesized)
tatcttttagtttctaggtaaagttaaaattgaaagataactggatgccagttttctggtttaaattagaaagcagtgggagtttctgctttatcctggagtaaggacacatctcattta

SEQ ID NO: 262999 - DNA, 120 bp, Artificial Sequence
  ENSG00000125772_52 (sequence is synthesized)
aacagtatctcattccatcctctttattggattttctttttgtatgttttaatacatttttgatagtgtatttaggatttttatgagagtatacttaaaattataatattcccatactga

SEQ ID NO: 263000 - DNA, 120 bp, Artificial Sequence
  ENSG00000125772_53 (sequence is synthesized)
ggttggaacttactaggtattgaatgttttaaaaaattgtattttaaagcatcttgcagttaaatatattttattatgagaagtgggatgattttgtttctatcttttagaaaggaatgt

SEQ ID NO: 263001 - DNA, 120 bp, Artificial Sequence
  ENSG00000125772_54 (sequence is synthesized)
atacttttgagaaatataacttttgaacttaaaagctgtgtgaaacttaccagagaatctttactaggaactgtcacatccattttgcaagtatttcagactaacgtttaaagtaaactg

SEQ ID NO: 263002 - DNA, 120 bp, Artificial Sequence
  ENSG00000125772_55 (sequence is synthesized)
ggaagggaagtaggccaggaagataaattgtattttactcaaagggtggggttttacagcttttctcattgagttgaaatttctgttaggagaaggggttgtgctagcgtttattctttt

SEQ ID NO: 263003 - DNA, 120 bp, Artificial Sequence
  ENSG00000125772_56 (sequence is synthesized)
ggtagttcctcacagctctgtacatacaggtaagttcacgctgttcgtaaagcttttaactggcagtagtgaatagttgggatatgaggagaattacatttgagacaagttcagaatatg

SEQ ID NO: 263004 - DNA, 120 bp, Artificial Sequence
  ENSG00000125772_57 (sequence is synthesized)
cactacataagaataagcattttaattgtgccaagacctttggtttgaaaatcaagaaggagttatcgttgtccagcaacctgtgagtcttgtacattggttagtgtagaagttaatccc

SEQ ID NO: 263005 - DNA, 120 bp, Artificial Sequence
  ENSG00000125772_58 (sequence is synthesized)
agtgcctctagagcacctttctgaagagttttctttttcttctttttaacataatggacaatcaacgaagtatgtaagaaccattactgtttgctagcctcctttaaagggaattcttta

SEQ ID NO: 263006 - DNA, 120 bp, Artificial Sequence
  ENSG00000125772_59 (sequence is synthesized)
ttgagggctacaataaatatgcttattcaccttgggctgcttttaagctgtagatttaatattataaacgatctttaaggtgggtaatttctcagttgttcactgggtatgcatcaagag

SEQ ID NO: 263007 - DNA, 120 bp, Artificial Sequence
  ENSG00000125772_60 (sequence is synthesized)
aggaggccatcttttctctgctgatgggtagtgccagtgtcaggtcaccagaggctctttcagagttctccactctggacgtgtctgacgttattgagcagctttagagtagttcccacg

SEQ ID NO: 263008 - DNA, 120 bp, Artificial Sequence
  ENSG00000125775_0 (sequence is synthesized)
gggagaagcgtggactggggacgtggggggacccggggacggctccatcctcctttccccatccctacccccaccccagtgtctcctgaggcacagggtccccacgggccgggctgaccc

SEQ ID NO: 263009 - DNA, 120 bp, Artificial Sequence
  ENSG00000125775_1 (sequence is synthesized)
cctgccccctggtgtctgcagacagcggtctcgggccccgggcccggccagatggtggcaccggtaaccgggtacagcctgggcgtgcggcgagctgagatcaagcccggggtgcgcgag

SEQ ID NO: 263010 - DNA, 120 bp, Artificial Sequence
  ENSG00000125775_2 (sequence is synthesized)
atccacctgtgcaaggacgagcgcggcaagaccgggctgaggctgcggaaggtcgaccaggggctctttgtgcagttggtccaggccaacacccctgcatcccttgtggggctgcgcttt

SEQ ID NO: 263011 - DNA, 120 bp, Artificial Sequence
  ENSG00000125775_3 (sequence is synthesized)
ggggaccagctcctgcagattgacgggcgtgactgtgctgggtggagctcgcacaaagcccatcaggtggtgaagaaggcatcaggcgataagattgtcgtggtggttcgggacaggccg

SEQ ID NO: 263012 - DNA, 120 bp, Artificial Sequence
  ENSG00000125775_4 (sequence is synthesized)
ttccagcggactgtcaccatgcacaaggacagcatgggccacgtcggcttcgtgatcaagaaggggaagattgtctctctggtcaaagggagttctgcggcccgcaacgggctcctcacc

SEQ ID NO: 263013 - DNA, 120 bp, Artificial Sequence
  ENSG00000125775_5 (sequence is synthesized)
tggagattctggccacggctgggaacgttgtcaccctgaccatcatccccagtgtgatctacgagcacatggtcaaaaagttgcctccagtcctgctccaccacaccatggaccactcca

SEQ ID NO: 263014 - DNA, 120 bp, Artificial Sequence
  ENSG00000125775_6 (sequence is synthesized)
tcccagatgcctgaagccactgcagggcagggcaggcagggggggcttcccgccctcctgcagcaaagggcaaccaccctcggatgatgggttgcagccggcctgctgcttaaggtgggg

SEQ ID NO: 263015 - DNA, 120 bp, Artificial Sequence
  ENSG00000125775_7 (sequence is synthesized)
gctgccatgaggggggcgtgtccaggagggtgaccatgggatggcttatacacacaggcctccttggagcctcagactccaagctaggctgaggctcaggcagggcccacaggcagccga

SEQ ID NO: 263016 - DNA, 120 bp, Artificial Sequence
  ENSG00000125775_8 (sequence is synthesized)
ttctcttgtgctgatttaaatgctggacacggaggcaggctgtttaaacgctgcttaaagtcgcaactgggcccctttcaagaaattttgctctaccaggaaaacagttacacattttaa

SEQ ID NO: 263017 - DNA, 120 bp, Artificial Sequence
  ENSG00000125775_9 (sequence is synthesized)
gagaacagagctacgttctttgtgagagctttttccttgccttgacttgctctttgtcacagactgcataagttgtcagccttgactatcttttgaataaagatttgattttaaacaaaa

SEQ ID NO: 263018 - DNA, 120 bp, Artificial Sequence
  ENSG00000125775_10 (sequence is synthesized)
ctcaacactgggtcagaagtcacggccagacaagaaacggggtgttctgagaatcagccatgtcatccctgtacccatctctagaggacctaaaagtggaccaagccattcaggcccagg

SEQ ID NO: 263019 - DNA, 120 bp, Artificial Sequence
  ENSG00000125775_11 (sequence is synthesized)
tcagagcctcacccaagatgccagccctgccagtccaggcaacagccatttccccaccaccagttttgtacccaaacttggcagaactggaaaattatatgggtctttccctctccagcc

SEQ ID NO: 263020 - DNA, 120 bp, Artificial Sequence
  ENSG00000125775_12 (sequence is synthesized)
cccttcccacggctgccttagtacagaatcttataagtcctcctccttcagaggctacaaatggtgttccgaggccaggggagtttaaagctcgatttcacccgcgcagcctccaatccg

SEQ ID NO: 263021 - DNA, 120 bp, Artificial Sequence
  ENSG00000125775_13 (sequence is synthesized)
tgcacgcgctctcccgccaggcctcagagctcagagggcccgtccacagtaaggaaggtgcagagcgggcctcctaaccccagcggccaggctcttgcccccagtccctcctccccgaga

SEQ ID NO: 263022 - DNA, 120 bp, Artificial Sequence
  ENSG00000125775_14 (sequence is synthesized)
cccgggcggggctggtgctgggttgcgcagggccctccactggcctctccgtgggcttccgtcgctcggaggagcctcccttccccacctgcccttcgctgcccagggcatctagcttcc

SEQ ID NO: 263023 - DNA, 120 bp, Artificial Sequence
  ENSG00000125775_15 (sequence is synthesized)
aggcgacggtgtagacagccgacgccagggaagcccatgcctttgtgaatggtacagtggagtgtttcggagtgcagccccaggccagggttgaaatcctgactcacctgcttcctaact

SEQ ID NO: 263024 - DNA, 120 bp, Artificial Sequence
  ENSG00000125775_16 (sequence is synthesized)
atgaggcctagagtgtttcctccccggtaaatggggtaaccttggtgcctgccatgcagagctgtgtccctggcaccctgtaggttcctggagtatcaggaggaaaacaacaggttggaa

SEQ ID NO: 263025 - DNA, 120 bp, Artificial Sequence
  ENSG00000125775_17 (sequence is synthesized)
gagggatctgtgcctagggtgggccagggacactgactctggggccctgcctcccccaggggctctttgtgcagttggtccaggccaacacccctgcatcccttgtggggctgcgctttg

SEQ ID NO: 263026 - DNA, 120 bp, Artificial Sequence
  ENSG00000125775_18 (sequence is synthesized)
gcaagaccttacctgggagtctgctgggaccctcatctgacaggctcggggtccgaggcagccctgccctgcagtcagccatcagtggtgtcctctagcagtggccatgctgatccctcc

SEQ ID NO: 263027 - DNA, 120 bp, Artificial Sequence
  ENSG00000125779_0 (sequence is synthesized)
gggtggatgaggaggctcgggcccttccacccacgcgtccattgggcggcgccgccatcactctcttctgggctacaccgccttctcttcctccgcggaacccggatcccctcctccacc

SEQ ID NO: 263028 - DNA, 120 bp, Artificial Sequence
  ENSG00000125779_1 (sequence is synthesized)
accctctccccgccccgtcacgatagcctctcattggacggaggcacggtcaatcctcctcgagttagggagccgactggacgcgaggcctttgggccgtccccagcctcgtcggattgg

SEQ ID NO: 263029 - DNA, 120 bp, Artificial Sequence
  ENSG00000125779_2 (sequence is synthesized)
cttcctgcgcgttggcgcaacggaagaggcggccggccgagggcgcgcctctgctctggctggactgccgcggaggaggcgagaaggaatccgacgctggggggcttgctcgggcggcag

SEQ ID NO: 263030 - DNA, 120 bp, Artificial Sequence
  ENSG00000125779_3 (sequence is synthesized)
gcagcgactgctgctgcggatgggagggggccggctcggcgcgcccatggagcgccacggcagggcttccgccacctccgtctcgtcggctggggagcaggcggccggggaccccgaagg

SEQ ID NO: 263031 - DNA, 120 bp, Artificial Sequence
  ENSG00000125779_4 (sequence is synthesized)
cggcaggagccactgcggcgccgggcgagcagcgcgtcggtgcccgcggtcggggcctcggctgagggcacgaggcgggatcgactgggctcttacagcggccccacctcggtctcccgc

SEQ ID NO: 263032 - DNA, 120 bp, Artificial Sequence
  ENSG00000125779_5 (sequence is synthesized)
cagcgcgtcgaaagcctgaggaaaaagcggccgctttttccatggtttggactggatatcggtggaactctggtcaagctggtatattttgaacccaaagacatcactgctgaagaagaa

SEQ ID NO: 263033 - DNA, 120 bp, Artificial Sequence
  ENSG00000125779_6 (sequence is synthesized)
gaggaagaagtggaaagtcttaaaagcattcggaagtacctgacctccaatgtggcttatgggtctacaggcattcgggacgtgcacctcgagctgaaggacctgactctgtgtggacgc

SEQ ID NO: 263034 - DNA, 120 bp, Artificial Sequence
  ENSG00000125779_7 (sequence is synthesized)
aaaggcaatctgcactttatacgctttcccactcatgacatgcctgcttttattcaaatgggcagagataaaaacttctcgagtctccacactgtcttttgtgccactggaggtggagcg

SEQ ID NO: 263035 - DNA, 120 bp, Artificial Sequence
  ENSG00000125779_8 (sequence is synthesized)
tacaaatttgagcaggattttctcacaataggtgatcttcagctttgcaaactggatgaactagattgcttgatcaaaggaattttatacattgactcagtcggattcaatggacggtca

SEQ ID NO: 263036 - DNA, 120 bp, Artificial Sequence
  ENSG00000125779_9 (sequence is synthesized)
cagtgctattactttgaaaaccctgctgattctgaaaagtgtcagaagttaccatttgatttgaaaaatccgtatcctctgcttctggtgaacattggctcaggggttagcatcttagca

SEQ ID NO: 263037 - DNA, 120 bp, Artificial Sequence
  ENSG00000125779_10 (sequence is synthesized)
gtatattccaaagataattacaaacgggtcacaggtactagtcttggaggaggaactttttttggtctctgctgtcttcttactggctgtaccacttttgaagaagctcttgaaatggca

SEQ ID NO: 263038 - DNA, 120 bp, Artificial Sequence
  ENSG00000125779_11 (sequence is synthesized)
tctcgtggagatagcaccaaagtggataaactagtacgagatatttatggaggggactatgagaggtttggactgccaggctgggctgtggcttcaagctttggaaacatgatgagcaag

SEQ ID NO: 263039 - DNA, 120 bp, Artificial Sequence
  ENSG00000125779_12 (sequence is synthesized)
gagaagcgagaggctgtcagtaaagaggacctggccagagcgactttgatcaccatcaccaacaacattggctcaatagcaagaatgtgtgcccttaatgaaaacattaaccaggtggta

SEQ ID NO: 263040 - DNA, 120 bp, Artificial Sequence
  ENSG00000125779_13 (sequence is synthesized)
tttgttggaaatttcttgagaattaatacgatcgccatgcggcttttggcatatgctttggattattggtccaaggggcagttgaaagcacttttttcggaacacgagggttattttgga

SEQ ID NO: 263041 - DNA, 120 bp, Artificial Sequence
  ENSG00000125779_14 (sequence is synthesized)
gctgttggagcactccttgagctgttgaagatcccgtgatcattacctggggaggggttcctgaaaccttccacaatgggatctgtggactttcatttttttaagagacttactcaattt

SEQ ID NO: 263042 - DNA, 120 bp, Artificial Sequence
  ENSG00000125779_15 (sequence is synthesized)
catgactgtactacctgaaacaaagtgagaaaggacaggtgtatttttctaagtcatcaagataaatccttaagaattcagtctaaattagcaaccaggaaggaaaaatatattaaaaac

SEQ ID NO: 263043 - DNA, 120 bp, Artificial Sequence
  ENSG00000125779_16 (sequence is synthesized)
aacaaaaaagtggcacatgtccaggcagtgtgaggatttgctgtatataagttgcctgctttgtatttttgaaatctctgcatcactcattggaagtgcttctgaagagagctgctctgt

SEQ ID NO: 263044 - DNA, 120 bp, Artificial Sequence
  ENSG00000125779_17 (sequence is synthesized)
gttcagttgactggttttgtgtcctgtttgaacttgctgaatgtaaggcaggctactatgcgttataatctaatcacaatttgtcaatatggtcttggcaatcatctgtgcattactctg

SEQ ID NO: 263045 - DNA, 120 bp, Artificial Sequence
  ENSG00000125779_18 (sequence is synthesized)
gtttgcattaagcctgtgtgtgaacttactgtaaaacatgttttatttcaaggttctgcaaaattaattgggcaggttaattgtgtacctgaaacttaacaagcagtttttggaagggca

SEQ ID NO: 263046 - DNA, 89 bp, Artificial Sequence
  ENSG00000125779_19 (sequence is synthesized)
attcctcctggtctcaagcgatcttagacgggagccattgtgcccgacctggcagtcgtctactaagagctttggtaactcattagcct

SEQ ID NO: 263047 - DNA, 120 bp, Artificial Sequence
  ENSG00000125779_20 (sequence is synthesized)
taccacagggtgctgctccctgggccaactcctgtgaacttgctcacttcccatggagaccgaggctgctcagagctgggagaggcctgtgccactgctgtcagctacagagcctgatct

SEQ ID NO: 263048 - DNA, 120 bp, Artificial Sequence
  ENSG00000125779_21 (sequence is synthesized)
gtcaatcagaaaaatctggttgtgctcttggattagctgggcatttggggtaagggagggactgcagattctgatttgtacagaaaactaaaatttcagtatgttgcaataaaatgaaaa

SEQ ID NO: 263049 - DNA, 120 bp, Artificial Sequence
  ENSG00000125779_22 (sequence is synthesized)
ttggtaactcattagcctcgtggctctgagacagaactgctgcttgctttcatttccttctcccttctcttccctcttcaacttcctatgtcgaaatcattttttccatggtttggactg

SEQ ID NO: 263050 - DNA, 120 bp, Artificial Sequence
  ENSG00000125779_23 (sequence is synthesized)
tgggtagtgggcggactgttctgatgcaagtgggtacactggcagaagcagcacaatctggaggactaacatgagtcagcagggccactagaattgacaccccctcaggggatcagggag

SEQ ID NO: 263051 - DNA, 120 bp, Artificial Sequence
  ENSG00000125779_24 (sequence is synthesized)
aatctggtttttctttcaggctaagtagaaaaggaagaactgaagtgtctgtcaaagaactcatggggagtggggggtccttcagggcactgtggcacttgggaggtgagtctcagaaga

SEQ ID NO: 263052 - DNA, 120 bp, Artificial Sequence
  ENSG00000125779_25 (sequence is synthesized)
ctgcctgaggagagtgccaggctgcaggtgctcttggtaggggctgaagcttttctttctgctttgcagaataatttcaaaagcctttcccaaggagagaatgcaccttttatatctgag

SEQ ID NO: 263053 - DNA, 120 bp, Artificial Sequence
  ENSG00000125779_26 (sequence is synthesized)
tgcagcctccctgctcccctccgtttaaggctgtggtcagggagggatgggcagggtgccagccgcatggaggcagcagagacacccgtgttccagctggggcaaggggaactgatatgt

SEQ ID NO: 263054 - DNA, 120 bp, Artificial Sequence
  ENSG00000125779_27 (sequence is synthesized)
gggctgtgggctgttccactaggcgtggccacctctgcacatgggccttggcacttaggaaatatgggtgctgctgcattgggaccttgtgtgggtgcagagcaggatggctgctgcgtg

SEQ ID NO: 263055 - DNA, 120 bp, Artificial Sequence
  ENSG00000125779_28 (sequence is synthesized)
gagggtaattttgtcccctggagagtgattggtgaccctcttccctgctgctgctgtttgcaggctcctggcctatactacctctgacgccctgatcctgagttcctctgccctcctctg

SEQ ID NO: 263056 - DNA, 120 bp, Artificial Sequence
  ENSG00000125779_29 (sequence is synthesized)
ctgccagcagcgctgttggtggcctcaccctcctccagtacccaggcaccaaagatggcaccaccatcctcctgcttgtaccacagggtgctgctccctgggccaactcctgtgaacttg

SEQ ID NO: 263057 - DNA, 120 bp, Artificial Sequence
  ENSG00000125779_30 (sequence is synthesized)
ctcacttcccatggagaccgaggccagggcctgcccctctgaggcccctgttttgtggtcctgctgcctctgctgtgctgcgttcaggaggttgtccactgctcgacgtgggtcaccatg

SEQ ID NO: 263058 - DNA, 120 bp, Artificial Sequence
  ENSG00000125779_31 (sequence is synthesized)
cagcccttgctgttcccacaatttaacagaaaaggaaactgaacggatgagtaaggctgcccagggtcactcagctggaaaagagtagagctggactcaaacccgggactgtctgtctct

SEQ ID NO: 263059 - DNA, 120 bp, Artificial Sequence
  ENSG00000125779_32 (sequence is synthesized)
ggtgcctgagttgggaagacgctgttgatgtccccttctgcctcgctttgagcttcctcctccgtgggccctccccctactctagagaaactagtccattccctcatgttccaccttgtg

SEQ ID NO: 263060 - DNA, 89 bp, Artificial Sequence
  ENSG00000125779_33 (sequence is synthesized)
tctagagaaactagtccattccctcatgttccaccttgtgctcagtaaaccctgtcactccacagcagggtggagtgcagtggggcgat

SEQ ID NO: 263061 - DNA, 61 bp, Artificial Sequence
  ENSG00000125779_34 (sequence is synthesized)
caagcaattctcctgccttagcctcctgcgtagctgagactacaggcatgtgccaccatgg

SEQ ID NO: 263062 - DNA, 120 bp, Artificial Sequence
  ENSG00000125779_35 (sequence is synthesized)
ccaaagtgctgggaatacaggtgtgagcccctgcgcccggctcacagcagggttcttgataggccaccagtgaatcccatgccaccgaatctggcattcatttcacagcctcatctcagt

SEQ ID NO: 263063 - DNA, 120 bp, Artificial Sequence
  ENSG00000125779_36 (sequence is synthesized)
atctggcattcatttcacagcctcatctcagttctcactcagcagagccctcttgcctgtcctgccacccaggctactaatgttctggttcattctctgctgacagttagctgtggctgt

SEQ ID NO: 263064 - DNA, 120 bp, Artificial Sequence
  ENSG00000125779_37 (sequence is synthesized)
cctcagcctcagtcctgggtctccccaagcagtcattagcatcaccttgactgatttccagggaacacttcaaccaccccttacctctgagctccagccccgagacactgccttctctct

SEQ ID NO: 263065 - DNA, 120 bp, Artificial Sequence
  ENSG00000125779_38 (sequence is synthesized)
gcatttgttgatctctgtgcagcagtgcccacatcctcatcccagcttactgccgtctcaccaccttcaggttgtgaggtgcccataaactctgctgttaccattgccacttccctgtct

SEQ ID NO: 263066 - DNA, 120 bp, Artificial Sequence
  ENSG00000125779_39 (sequence is synthesized)
tagcagctgtccctttcagtctgccctccactagtggccatgaagggggctgtgaccgtggtccaggtgagaaaggaaggcctgaactaagatgggaggtgggtggccagaatggagagg

SEQ ID NO: 263067 - DNA, 120 bp, Artificial Sequence
  ENSG00000125779_40 (sequence is synthesized)
ggagaagtggatggccagaatggagagatgcttagagggctgtgttgggaagtggtgactggatacaggggagggaggagagatacaagagggcacctgggctcatttgtggactacgtg

SEQ ID NO: 263068 - DNA, 120 bp, Artificial Sequence
  ENSG00000125779_41 (sequence is synthesized)
attttgagactccaaataagcactgggtatttgggttggagatacagagctgagaatgatatgcatgtaggtgggcaaagcaagggggatttcatgagttctaaggtagggtgagaaaaa

SEQ ID NO: 263069 - DNA, 120 bp, Artificial Sequence
  ENSG00000125779_42 (sequence is synthesized)
taaccgagagttgagcagtgacggaggaagctgcaaagaaaacgactgctcagggagaggctggccaggggcctgtggctcaggggactgagaagaggagctctctaggcatctgaattg

SEQ ID NO: 263070 - DNA, 120 bp, Artificial Sequence
  ENSG00000125779_43 (sequence is synthesized)
aggttgcccacaattggttgcaagatcgtggctggccttgatggaagctgggaagccactcggtcctagtgaggggtggtgaggagagcagcaacggccacacaggaaggctttggacgt

SEQ ID NO: 263071 - DNA, 120 bp, Artificial Sequence
  ENSG00000125779_44 (sequence is synthesized)
tttttctcctgacactagttatttccaggcctgggatatagctaggggcttggggtgggggcaactctttgcagggtggtgtggcctgtggaggaaacaggctcagttccactactttgg

SEQ ID NO: 263072 - DNA, 90 bp, Artificial Sequence
  ENSG00000125779_45 (sequence is synthesized)
accccgtctctactgaaaatacaaaaataattagccgggaatggtggtgcgtgcctgtaatcccaggtactcgagaggctgaggcagact

SEQ ID NO: 263073 - DNA, 120 bp, Artificial Sequence
  ENSG00000125779_46 (sequence is synthesized)
agacctgtctctacaaaaaaataattacgaaaattagccaggtgtgctggtgtgcacctgtagacgcagctacagactgaggcgggaggatcacttgagtccaggaagttgaggctgcag

SEQ ID NO: 263074 - DNA, 120 bp, Artificial Sequence
  ENSG00000125779_47 (sequence is synthesized)
tgagctacaatggtgccactgcactccagtctgggtaacaagaccctgtctcaacaacaacgaaaagttgggagggaaagggagtagctccatgaactgacgctggacattcaggcatat

SEQ ID NO: 263075 - DNA, 120 bp, Artificial Sequence
  ENSG00000125779_48 (sequence is synthesized)
ccttcagttgctgctgctcaaactcctgcatcaaagacacaagagcttgcctaagtgaccacaacagttgcagccacacatcaccactggtcctcacttggaactggccaaggtagggga

SEQ ID NO: 263076 - DNA, 120 bp, Artificial Sequence
  ENSG00000125779_49 (sequence is synthesized)
actaactgaaaaaaataaggaactctggtcaaaagtggtgttttcaggctcagggctggtctgagatgggtgactgcagagccctcctctcccagaatgctttctgatgtgttctgtgct

SEQ ID NO: 263077 - DNA, 120 bp, Artificial Sequence
  ENSG00000125779_50 (sequence is synthesized)
gcacacttaactggagtctcgccaccatgtctggcccctggggaatgctgccaggcgctctatcttgctttcattgagtgaacactggagaacattataggtgatcttcagctttgcaaa

SEQ ID NO: 263078 - DNA, 120 bp, Artificial Sequence
  ENSG00000125779_51 (sequence is synthesized)
ccgcgcgcggacactgtccccgcacggtggtccctcgttggtgcgtggcctgacatccggctggaggcctcgggtgctccgaaagcggtaccttcgggggcccccccgcacccattgttt

SEQ ID NO: 263079 - DNA, 120 bp, Artificial Sequence
  ENSG00000125780_0 (sequence is synthesized)
gtctgtcagcactgtccgtgccattcccagaggagcctgagaagaggcagaggaaggcgaaacatggctgctctaggagtccagagtatcaactggcagacggccttcaaccgacaagcg

SEQ ID NO: 263080 - DNA, 120 bp, Artificial Sequence
  ENSG00000125780_1 (sequence is synthesized)
catcacacagacaagttctccagccaggagctcatcttgcggagaggccaaaacttccaggtcttaatgatcatgaacaaaggccttggctctaacgaaagactggagttcattgtctcc

SEQ ID NO: 263081 - DNA, 120 bp, Artificial Sequence
  ENSG00000125780_2 (sequence is synthesized)
acagggccttacccctcagagtcggccatgacgaaggctgtgtttccactctccaatggcagtagtggtggctggagtgcggtgcttcaggccagcaatggcaatactctgactatcagc

SEQ ID NO: 263082 - DNA, 120 bp, Artificial Sequence
  ENSG00000125780_3 (sequence is synthesized)
atctccagtcctgccagcgcacccataggacggtacacaatggccctccagatcttctcccagggcggcatctcctctgtgaaacttgggacgttcatactgctttttaacccctggctg

SEQ ID NO: 263083 - DNA, 120 bp, Artificial Sequence
  ENSG00000125780_4 (sequence is synthesized)
aatgtggatagcgtctttatgggtaaccacgctgagagagaagagtatgttcaggaagatgccggcatcatctttgtgggaagcacaaaccgaattggcatgattggctggaactttgga

SEQ ID NO: 263084 - DNA, 120 bp, Artificial Sequence
  ENSG00000125780_5 (sequence is synthesized)
cagtttgaagaagacattctcagcatctgcctctcaatcttggataggagtctgaatttccgccgtgacgctgctactgatgtggccagcagaaatgaccccaaatacgttggccgggtg

SEQ ID NO: 263085 - DNA, 120 bp, Artificial Sequence
  ENSG00000125780_6 (sequence is synthesized)
ctgagtgccatgatcaatagcaatgatgacaatggtgtgcttgctgggaattggagcggcacttacaccggtggccgggacccaaggagctggaacggcagcgtggagatcctcaaaaat

SEQ ID NO: 263086 - DNA, 120 bp, Artificial Sequence
  ENSG00000125780_7 (sequence is synthesized)
tggaaaaaatctggcttcagcccagtccgatatggccagtgctgggtctttgctgggaccctcaacacagcgctgcggtctttggggattccttcccgggtgatcaccaacttcaactca

SEQ ID NO: 263087 - DNA, 120 bp, Artificial Sequence
  ENSG00000125780_8 (sequence is synthesized)
gctcatgacacagaccgaaatctcagtgtggatgtgtactacgaccccatgggaaaccccctggacaagggtagtgatagcgtatggaatttccatgtctggaatgaaggctggtttgtg

SEQ ID NO: 263088 - DNA, 120 bp, Artificial Sequence
  ENSG00000125780_9 (sequence is synthesized)
aggtctgacctgggcccctcgtacggtggatggcaggtgttggatgctaccccgcaggaaagaagccaaggggtgttccagtgcggccccgcttcggtcattggtgttcgagagggtgat

SEQ ID NO: 263089 - DNA, 120 bp, Artificial Sequence
  ENSG00000125780_10 (sequence is synthesized)
gtgcagctgaacttcgacatgccctttatcttcgcggaggttaatgccgaccgcatcacctggctgtacgacaacaccactggcaaacagtggaagaattccgtgaacagtcacaccatt

SEQ ID NO: 263090 - DNA, 120 bp, Artificial Sequence
  ENSG00000125780_11 (sequence is synthesized)
aggtacatcagcaccaaggcggtgggcagcaatgctcgcatggacgtcacggacaagtacaagtacccagaaggctctgaccaggaaagacaagtgttccaaaaggctttggggaaactt

SEQ ID NO: 263091 - DNA, 120 bp, Artificial Sequence
  ENSG00000125780_12 (sequence is synthesized)
aaacccaacacgccatttgccgcgacgtcttcaatgggtttggaaacagaggaacaggagcccagcatcatcgggaagctgaaggtcgctggcatgctggcagtaggcaaagaagtcaac

SEQ ID NO: 263092 - DNA, 120 bp, Artificial Sequence
  ENSG00000125780_13 (sequence is synthesized)
ctggtcctactgctcaaaaacctgagcagggatacgaagacagtgacagtgaacatgacagcctggaccatcatctacaacggcacgcttgtacatgaagtgtggaaggactctgccaca

SEQ ID NO: 263093 - DNA, 120 bp, Artificial Sequence
  ENSG00000125780_14 (sequence is synthesized)
atgtccctggaccctgaggaagaggcagaacatcccataaagatctcgtacgctcagtatgagaagtacctgaagtcagacaacatgatccggatcacagcggtgtgcaaggtcccagat

SEQ ID NO: 263094 - DNA, 120 bp, Artificial Sequence
  ENSG00000125780_15 (sequence is synthesized)
gagtctgaggtggtggtggagcgggacatcatcctggacaaccccaccttgaccctggaggtgctgaacgaggctcgtgtgcggaagcctgtgaacgtgcagatgctcttctccaatcca

SEQ ID NO: 263095 - DNA, 120 bp, Artificial Sequence
  ENSG00000125780_16 (sequence is synthesized)
ctggatgagccggtgagggactgcgtgctgatggtggagggaagcggcctgctgttgggtaacctgaagatcgacgtgccgaccctagggcccaaggaggggtcccgggtccgttttgat

SEQ ID NO: 263096 - DNA, 120 bp, Artificial Sequence
  ENSG00000125780_17 (sequence is synthesized)
atcctgccctcccggagtggcaccaagcaactgctcgccgacttctcctgcaacaagttccctgcaatcaaggccatgttgtccatcgatgtagccgaatgaagggcgctggtggcctcc

SEQ ID NO: 263097 - DNA, 120 bp, Artificial Sequence
  ENSG00000125780_18 (sequence is synthesized)
cgtacaaacttggacaacacggagcagggagagctcaccatggaatgaaccccccgcccatgctgtccggcctgggaaaccctctccatctcccaaggctgccagacatggacctccagg

SEQ ID NO: 263098 - DNA, 120 bp, Artificial Sequence
  ENSG00000125780_19 (sequence is synthesized)
ctccagcacatccccctctcctctcccccaggttggggctgggtccaccctgtcctatgacttgatcacttttgcacattccctggccgcttctccccagagctgcctgctctgtgagcc

SEQ ID NO: 263099 - DNA, 120 bp, Artificial Sequence
  ENSG00000125780_20 (sequence is synthesized)
ccacagccctgctcattcctcacgcccttcaatgctgcaggatggactggcccctgacccagggactctccaaacgggatacaggagagaagctggtctagactgtttgctgatccccaa

SEQ ID NO: 263100 - DNA, 120 bp, Artificial Sequence
  ENSG00000125780_21 (sequence is synthesized)
cctgcacggggcattcctgcttctctctcaggccaccacagagggcaggggatggttagtcacctgccccagcactcacaccctaactcaaaataaatgttaaataagtgcgatcacaca

SEQ ID NO: 263101 - DNA, 120 bp, Artificial Sequence
  ENSG00000125787_0 (sequence is synthesized)
ctgcagctgcctgaaggagccatctcatccacagctcttccttgagcagccatggccagctccaggcgaggcctcctgctcctgctgctgctgactgcccaccttggaccctcagaggct

SEQ ID NO: 263102 - DNA, 120 bp, Artificial Sequence
  ENSG00000125787_1 (sequence is synthesized)
gaatgcccttaggcccccaggaagggccctggacactgcagcaggcagcccagtccagactgcccatggcctcccaagtgatgccctggctcccctggacgacagcatgccctgggaggg

SEQ ID NO: 263103 - DNA, 120 bp, Artificial Sequence
  ENSG00000125787_2 (sequence is synthesized)
caggaccacggcccagtggtcccttcacaggaagcgacacctggcacggacactgctgaccgcagcccgagagccccgccccgccccgccatcctccaataaagtgtgaggttctccgaa

SEQ ID NO: 263104 - DNA, 120 bp, Artificial Sequence
  ENSG00000125787_3 (sequence is synthesized)
gagaactcccctgaccatccatctatcctcccatccattggcctgaattcaggtctctgttcccctccaactttcttccacttctggaaactccttgaaggaaagatggatggacctgga

SEQ ID NO: 263105 - DNA, 120 bp, Artificial Sequence
  ENSG00000125787_4 (sequence is synthesized)
caagtgggagggccctcagagctggcaaggcaggtagcctctgtgccccaggctcagggagaaggctcgtcccctggagcatcatcccctgctgggccaggatcccccaggatctggacc

SEQ ID NO: 263106 - DNA, 120 bp, Artificial Sequence
  ENSG00000125787_5 (sequence is synthesized)
cctgtatgcttgggatgaggagcggtggcagagagggaagggcataaggagataccaaagctgcccctgagatgccagttttccaaagtggccctggaggaagtagggggatgtgggggt

SEQ ID NO: 263107 - DNA, 120 bp, Artificial Sequence
  ENSG00000125788_0 (sequence is synthesized)
atagagacttctggactctatagaacccactgcctcctgatgaagtccctactgttcacccttgcagtttttatgctcctggcccaattggtctcaggtaattggtatgtgaaaaagtgt

SEQ ID NO: 263108 - DNA, 120 bp, Artificial Sequence
  ENSG00000125788_1 (sequence is synthesized)
cggcaaacaaagggactgctgtgttccagctgacagacgtgctaattatcctgttttctgtgtccagacaaagactacaagaatttcaacagtaacagcaacaacagcaacaacaacttt

SEQ ID NO: 263109 - DNA, 120 bp, Artificial Sequence
  ENSG00000125788_2 (sequence is synthesized)
gatgatgactactgcttcgatgtcttcgatggctcctacccccgtttctcccactggttgaacattccagcctctgtctcctgctctaggatccccgactcattaaagcaaagaggctta

SEQ ID NO: 263110 - DNA, 120 bp, Artificial Sequence
  ENSG00000125798_0 (sequence is synthesized)
gctagaggggctgcttgcgccaggcgccggccgccccactgcgggtccctggcggccggtgtctgaggagtcggagagccgaggcggccagaccgtgcgccccgcgcttctcccgaggcc

SEQ ID NO: 263111 - DNA, 120 bp, Artificial Sequence
  ENSG00000125798_1 (sequence is synthesized)
gttccgggtctgaactgtaacagggaggggcctcgcaggagcagcagcgggcgagttaaagtatgctgggagcggtgaagatggaagggcacgagccgtccgactggagcagctactatg

SEQ ID NO: 263112 - DNA, 120 bp, Artificial Sequence
  ENSG00000125798_2 (sequence is synthesized)
cagagcccgagggctactcctccgtgagcaacatgaacgccggcctggggatgaacggcatgaacacgtacatgagcatgtcggcggccgccatgggcagcggctcgggcaacatgagcg

SEQ ID NO: 263113 - DNA, 120 bp, Artificial Sequence
  ENSG00000125798_3 (sequence is synthesized)
cgggctccatgaacatgtcgtcgtacgtgggcgctggcatgagcccgtccctggcggggatgtcccccggcgcgggcgccatggcgggcatgggcggctcggccggggcggccggcgtgg

SEQ ID NO: 263114 - DNA, 120 bp, Artificial Sequence
  ENSG00000125798_4 (sequence is synthesized)
cgggcatggggccgcacttgagtcccagcctgagcccgctcggggggcaggcggccggggccatgggcggcctggccccctacgccaacatgaactccatgagccccatgtacgggcagg

SEQ ID NO: 263115 - DNA, 120 bp, Artificial Sequence
  ENSG00000125798_5 (sequence is synthesized)
cgggcctgagccgcgcccgcgaccccaagacctacaggcgcagctacacgcacgcaaagccgccctactcgtacatctcgctcatcaccatggccatccagcagagccccaacaagatgc

SEQ ID NO: 263116 - DNA, 120 bp, Artificial Sequence
  ENSG00000125798_6 (sequence is synthesized)
tgacgctgagcgagatctaccagtggatcatggacctcttccccttctaccggcagaaccagcagcgctggcagaactccatccgccactcgctctccttcaacgactgtttcctgaagg

SEQ ID NO: 263117 - DNA, 120 bp, Artificial Sequence
  ENSG00000125798_7 (sequence is synthesized)
tgccccgctcgcccgacaagcccggcaagggctccttctggaccctgcaccctgactcgggcaacatgttcgagaacggctgctacctgcgccgccagaagcgcttcaagtgcgagaagc

SEQ ID NO: 263118 - DNA, 120 bp, Artificial Sequence
  ENSG00000125798_8 (sequence is synthesized)
aagcagctggcgctgaaggaggccgcaggcgccgccggcagcggcaagaaggcggccgccggagcccaggcctcacaggctcaactcggggaggccgccgggccggcctccgagactccg

SEQ ID NO: 263119 - DNA, 120 bp, Artificial Sequence
  ENSG00000125798_9 (sequence is synthesized)
gcaccgagtcgcctcactcgagcgcctccccgtgccaggagcacaagcgagggggcctgggagagctgaaggggacgccggctgcggcgctgagccccccagagccggcgccctctcccg

SEQ ID NO: 263120 - DNA, 120 bp, Artificial Sequence
  ENSG00000125798_10 (sequence is synthesized)
gcagcagcagcaggccgcggcccacctgctgggcccgccccaccacccgggcctgccgcctgaggcccacctgaagccggaacaccactacgccttcaaccacccgttctccatcaacaa

SEQ ID NO: 263121 - DNA, 120 bp, Artificial Sequence
  ENSG00000125798_11 (sequence is synthesized)
cctcatgtcctcggagcagcagcaccaccacagccaccaccaccaccaaccccacaaaatggacctcaaggcctacgaacaggtgatgcactaccccggctacggttcccccatgcctgg

SEQ ID NO: 263122 - DNA, 120 bp, Artificial Sequence
  ENSG00000125798_12 (sequence is synthesized)
cagcttggccatgggcccggtcacgaacaaaacgggcctggacgcctcgcccctggccgcagatacctcctactaccagggggtgtactcccggcccattatgaactcctcttaagaaga

SEQ ID NO: 263123 - DNA, 120 bp, Artificial Sequence
  ENSG00000125798_13 (sequence is synthesized)
cgacggcttcaggcccggctaactctggcaccccggatcgaggacaagtgagagagcaagtgggggtcgagactttggggagacggtgttgcagagacgcaagggagaagaaatccataa

SEQ ID NO: 263124 - DNA, 120 bp, Artificial Sequence
  ENSG00000125798_14 (sequence is synthesized)
cacccccaccccaacacccccaagacagcagtcttcttcacccgctgcagccgttccgtcccaaacagagggccacacagataccccacgttctatataaggaggaaaacgggaaagaat

SEQ ID NO: 263125 - DNA, 120 bp, Artificial Sequence
  ENSG00000125798_15 (sequence is synthesized)
ataaagttaaaaaaaagcctccggtttccactactgtgtagactcctgcttcttcaagcacctgcagattctgatttttttgttgttgttgttctcctccattgctgttgttgcagggaa

SEQ ID NO: 263126 - DNA, 120 bp, Artificial Sequence
  ENSG00000125798_16 (sequence is synthesized)
gtcttacttaaaaaaaaaaaaaaattttgtgagtgactcggtgtaaaaccatgtagttttaacagaaccagagggttgtactattgtttaaaaacaggaaaaaaaataatgtaagggtct

SEQ ID NO: 263127 - DNA, 120 bp, Artificial Sequence
  ENSG00000125798_17 (sequence is synthesized)
gttgtaaatgaccaagaaaaagaaaaaaaaagcattcccaatcttgacacggtgaaatccaggtctcgggtccgattaatttatggtttctgcgtgctttatttatggcttataaatgtg

SEQ ID NO: 263128 - DNA, 120 bp, Artificial Sequence
  ENSG00000125798_18 (sequence is synthesized)
tattctggctgcaagggccagagttccacaaatctatattaaagtgttatacccggttttatcccttgaatcttttcttccagatttttcttttctttacttggcttacaaaatatacag

SEQ ID NO: 263129 - DNA, 120 bp, Artificial Sequence
  ENSG00000125798_19 (sequence is synthesized)
gcttggaaattatttcaagaaggagggagggataccctgtctggttgcaggttgtattttattttggcccagggagtgttgctgttttcccaacattttattaataaaattttcagacat

SEQ ID NO: 263130 - DNA, 120 bp, Artificial Sequence
  ENSG00000125798_20 (sequence is synthesized)
cccgcccacttccaactaccgcctccggcctgcccagggagagagagggagtggagcccagggagagggagcgcgagagagggagggaggaggggacggtgctttggctgactttttttt

SEQ ID NO: 263131 - DNA, 120 bp, Artificial Sequence
  ENSG00000125798_21 (sequence is synthesized)
aaaagagggtgggggtggggggtgattgctggtcgtttgttgtggctgttaaattttaaactgccatgcactcggcttccagtatgctgggagcggtgaagatggaagggcacgagccgt

SEQ ID NO: 263132 - DNA, 120 bp, Artificial Sequence
  ENSG00000125810_0 (sequence is synthesized)
gtgtccttctctgcgccggagtggctgcagctcacccctcagctccccttggggcccagctgggagccgagatagaagctcctgtcgccgctgggcttctcgcctcccgcagagggccac

SEQ ID NO: 263133 - DNA, 120 bp, Artificial Sequence
  ENSG00000125810_1 (sequence is synthesized)
acagagaccgggatggccacctccatgggcctgctgctgctgctgctgctgctcctgacccagcccggggcggggacgggagctgacacggaggcggtggtctgcgtggggaccgcctgc

SEQ ID NO: 263134 - DNA, 120 bp, Artificial Sequence
  ENSG00000125810_2 (sequence is synthesized)
tacacggcccactcgggcaagctgagcgctgccgaggcccagaaccactgcaaccagaacgggggcaacctggccactgtgaagagcaaggaggaggcccagcacgtccagcgagtactg

SEQ ID NO: 263135 - DNA, 120 bp, Artificial Sequence
  ENSG00000125810_3 (sequence is synthesized)
gcccagctcctgaggcgggaggcagccctgacggcgaggatgagcaagttctggattgggctccagcgagagaagggcaagtgcctggaccctagtctgccgctgaagggcttcagctgg

SEQ ID NO: 263136 - DNA, 120 bp, Artificial Sequence
  ENSG00000125810_4 (sequence is synthesized)
gtgggcgggggggaggacacgccttactctaactggcacaaggagctccggaactcgtgcatctccaagcgctgtgtgtctctgctgctggacctgtcccagccgctccttcccagccgc

SEQ ID NO: 263137 - DNA, 120 bp, Artificial Sequence
  ENSG00000125810_5 (sequence is synthesized)
ctccccaagtggtctgagggcccctgtgggagcccaggctcccccggaagtaacattgagggcttcgtgtgcaagttcagcttcaaaggcatgtgccggcctctggccctggggggccca

SEQ ID NO: 263138 - DNA, 120 bp, Artificial Sequence
  ENSG00000125810_6 (sequence is synthesized)
ggtcaggtgacctacaccacccccttccagaccaccagttcctccttggaggctgtgccctttgcctctgcggccaatgtagcctgtggggaaggtgacaaggacgagactcagagtcat

SEQ ID NO: 263139 - DNA, 120 bp, Artificial Sequence
  ENSG00000125810_7 (sequence is synthesized)
tatttcctgtgcaaggagaaggcccccgatgtgttcgactggggcagctcgggccccctctgtgtcagccccaagtatggctgcaacttcaacaatgggggctgccaccaggactgcttt

SEQ ID NO: 263140 - DNA, 120 bp, Artificial Sequence
  ENSG00000125810_8 (sequence is synthesized)
gaagggggggatggctccttcctctgcggctgccgaccaggattccggctgctggatgacctggtgacctgtgcctctcgaaacccttgcagctccagcccatgtcgtgggggggccacg

SEQ ID NO: 263141 - DNA, 120 bp, Artificial Sequence
  ENSG00000125810_9 (sequence is synthesized)
tgcgtcctgggaccccatgggaaaaactacacgtgccgctgcccccaagggtaccagctggactcgagtcagctggactgtgtggacgtggatgaatgccaggactccccctgtgcccag

SEQ ID NO: 263142 - DNA, 120 bp, Artificial Sequence
  ENSG00000125810_10 (sequence is synthesized)
gagtgtgtcaacacccctgggggcttccgctgcgaatgctgggttggctatgagccgggcggtcctggagagggggcctgtcaggatgtggatgagtgtgctctgggtcgctcgccttgc

SEQ ID NO: 263143 - DNA, 120 bp, Artificial Sequence
  ENSG00000125810_11 (sequence is synthesized)
gcccagggctgcaccaacacagatggctcatttcactgctcctgtgaggagggctacgtcctggccggggaggacgggactcagtgccaggacgtggatgagtgtgtgggcccggggggc

SEQ ID NO: 263144 - DNA, 120 bp, Artificial Sequence
  ENSG00000125810_12 (sequence is synthesized)
cccctctgcgacagcttgtgcttcaacacacaagggtccttccactgtggctgcctgccaggctgggtgctggccccaaatggggtctcttgcaccatggggcctgtgtctctgggacca

SEQ ID NO: 263145 - DNA, 120 bp, Artificial Sequence
  ENSG00000125810_13 (sequence is synthesized)
ccatctgggccccccgatgaggaggacaaaggagagaaagaagggagcaccgtgccccgtgctgcaacagccagtcccacaaggggccccgagggcacccccaaggctacacccaccaca

SEQ ID NO: 263146 - DNA, 120 bp, Artificial Sequence
  ENSG00000125810_14 (sequence is synthesized)
agtagaccttcgctgtcatctgacgcccccatcacatctgccccactcaagatgctggcccccagtgggtccccaggcgtctggagggagcccagcatccatcacgccacagctgcctct

SEQ ID NO: 263147 - DNA, 120 bp, Artificial Sequence
  ENSG00000125810_15 (sequence is synthesized)
ggcccccaggagcctgcaggtggggactcctccgtggccacacaaaacaacgatggcactgacgggcaaaagctgcttttattctacatcctaggcaccgtggtggccatcctactcctg

SEQ ID NO: 263148 - DNA, 120 bp, Artificial Sequence
  ENSG00000125810_16 (sequence is synthesized)
ctggccctggctctggggctactggtctatcgcaagcggagagcgaagagggaggagaagaaggagaagaagccccagaatgcggcagacagttactcctgggttccagagcgagctgag

SEQ ID NO: 263149 - DNA, 120 bp, Artificial Sequence
  ENSG00000125810_17 (sequence is synthesized)
agcagggccatggagaaccagtacagtccgacacctgggacagactgctgaaagtgaggtggccctagagacactagagtcaccagccaccatcctcagagctttgaactccccattcca

SEQ ID NO: 263150 - DNA, 120 bp, Artificial Sequence
  ENSG00000125810_18 (sequence is synthesized)
aaggggcacccacatttttttgaaagactggactggaatcttagcaaacaattgtaagtctcctccttaaaggccccttggaacatgcaggtattttctacgggtgtttgatgttcctga

SEQ ID NO: 263151 - DNA, 120 bp, Artificial Sequence
  ENSG00000125810_19 (sequence is synthesized)
agtggaagctgtgtgttggcgtgccacggtggggatttcgtgactctataatgattgttactccccctcccttttcaaattccaatgtgaccaattccggatcagggtgtgaggaggccg

SEQ ID NO: 263152 - DNA, 120 bp, Artificial Sequence
  ENSG00000125810_20 (sequence is synthesized)
gggctaaggggctcccctgaatatcttctctgctcacttccaccatctaagaggaaaaggtgagttgctcatgctgattaggattgaaatgatttgtttctcttcctaggatgaaaacta

SEQ ID NO: 263153 - DNA, 120 bp, Artificial Sequence
  ENSG00000125810_21 (sequence is synthesized)
aatcaattaattattcaattaggtaagaagatctggttttttggtcaaagggaacatgttcggactggaaacatttctttacatttgcattcctccatttcgccagcacaagtcttgcta

SEQ ID NO: 263154 - DNA, 120 bp, Artificial Sequence
  ENSG00000125810_22 (sequence is synthesized)
aatgtgatactgttgacatcctccagaatggccagaagtgcaattaacctcttaggtggcaaggaggcaggaagtgcctctttagttcttacatttctaatagccttgggtttatttgca

SEQ ID NO: 263155 - DNA, 120 bp, Artificial Sequence
  ENSG00000125810_23 (sequence is synthesized)
aaggaagcttgaaaaatatgagaaaagttgcttgaagtgcattacaggtgtttgtgaagtcacataatctacggggctagggcgagagaggccagggatttgttcacagatacttgaatt

SEQ ID NO: 263156 - DNA, 120 bp, Artificial Sequence
  ENSG00000125810_24 (sequence is synthesized)
aattcatccaaatgtactgaggttaccacacacttgactacggatgtgatcaacactaacaaggaaacaaattcaaggacaacctgtctttgagccagggcaggcctcagacaccctgcc

SEQ ID NO: 263157 - DNA, 120 bp, Artificial Sequence
  ENSG00000125810_25 (sequence is synthesized)
tgtggccccgcctccacttcatcctgcccggaatgccagtgctccgagctcagacagaggaagccctgcagaaagttccatcaggctgtttcctaaaggatgtgtgaacgggagatgatg

SEQ ID NO: 263158 - DNA, 120 bp, Artificial Sequence
  ENSG00000125810_26 (sequence is synthesized)
cactgtgttttgaaagttgtcattttaaagcattttagcacagttcatagtccacagttgatgcagcatcctgagattttaaatcctgaagtgtgggtggcgcacacaccaagtagggag

SEQ ID NO: 263159 - DNA, 120 bp, Artificial Sequence
  ENSG00000125810_27 (sequence is synthesized)
aaagagatgactaactaaaatcatttttacagcaaaaactgctcaaagccatttaaattatatcctcattttaaaagttacatttgcaaatatttctccctatgataatgtagtcgatag

SEQ ID NO: 263160 - DNA, 89 bp, Artificial Sequence
  ENSG00000125810_28 (sequence is synthesized)
ggcaccattctgcctggggcactggaacacattcctgggggtcaccgatggtcagagtcactagaagttacctgagtatctctgggagg

SEQ ID NO: 263161 - DNA, 120 bp, Artificial Sequence
  ENSG00000125810_29 (sequence is synthesized)
ggtcagagtcactagaagttacctgagtatctctgggaggcctcatgtctcctgtgggctttttaccaccactgtgcaggagaacagacagaggaaatgtgtctccctccaaggccccaa

SEQ ID NO: 263162 - DNA, 120 bp, Artificial Sequence
  ENSG00000125810_30 (sequence is synthesized)
agcctcagagaaagggtgtttctggttttgccttagcaatgcatcggtctctgaggtgacactctggagtggttgaagggccacaaggtgcagggttaatactcttgccagttttgaaat

SEQ ID NO: 263163 - DNA, 120 bp, Artificial Sequence
  ENSG00000125810_31 (sequence is synthesized)
atagatgctatggttcagattgtttttaatagaaaactaaaggggcaggggaagtgaaaggaaagatggaggttttgtgcggctcgatggggcatttggaacttctttttaaagtcatct

SEQ ID NO: 263164 - DNA, 120 bp, Artificial Sequence
  ENSG00000125810_32 (sequence is synthesized)
catggtctccagttttcagttggaactctggtgtttaacacttaagggagacaaaggctgtgtccatttggcaaaacttccttggccacgagactctaggtgatgtgtgaagctgggcag

SEQ ID NO: 263165 - DNA, 120 bp, Artificial Sequence
  ENSG00000125810_33 (sequence is synthesized)
tctgtggtgtggagagcagccatctgtctggccattcagaggattctaaagacatggctggatgcgctgctgaccaacatcagcacttaaataaatgcaaatgcaacatttctccctctg

SEQ ID NO: 263166 - DNA, 120 bp, Artificial Sequence
  ENSG00000125810_34 (sequence is synthesized)
ggccttgaaaatccttgcccttatcatttggggtgaaggagacatttctgtccttggcttcccacagccccaacgcagtctgtgtatgattcctgggatccaacgagccctcctattttc

SEQ ID NO: 263167 - DNA, 120 bp, Artificial Sequence
  ENSG00000125810_35 (sequence is synthesized)
acagtgttctgattgctctcacagcccaggcccatcgtctgttctctgaatgcagccctgttctcaacaacagggaggtcatggaacccctctgtggaacccacaaggggagaaatgggt

SEQ ID NO: 263168 - DNA, 120 bp, Artificial Sequence
  ENSG00000125810_36 (sequence is synthesized)
gataaagaatccagttcctcaaaaccttccctggcaggctgggtccctctcctgctgggtggtgctttctcttgcacaccactcccaccacggggggagagccagcaacccaaccagaca

SEQ ID NO: 263169 - DNA, 120 bp, Artificial Sequence
  ENSG00000125810_37 (sequence is synthesized)
gctcaggttgtgcatctgatggaaaccactgggctcaaacacgtgctttattctcctgtttatttttgctgttactttgaagcatggaaattcttgtttgggggatcttggggctacagt

SEQ ID NO: 263170 - DNA, 120 bp, Artificial Sequence
  ENSG00000125810_38 (sequence is synthesized)
agtgggtaaacaaatgcccaccggccaagaggccattaacaaatcgtccttgtcctgaggggccccagcttgctcgggcgtggcacagtggggaatccaagggtcacagtatggggagag

SEQ ID NO: 263171 - DNA, 120 bp, Artificial Sequence
  ENSG00000125810_39 (sequence is synthesized)
gtgcaccctgccacctgctaacttctcgctagacacagtgtttctgcccaggtgacctgttcagcagcagaacaagccagggccatggggacgggggaagttttcacttggagatggaca

SEQ ID NO: 263172 - DNA, 120 bp, Artificial Sequence
  ENSG00000125810_40 (sequence is synthesized)
ccaagacaatgaagatttgttgtccaaataggtcaataattctgggagactcttggaaaaaactgaatatattcaggaccaactctctccctcccctcatcccacatctcaaagcagaca

SEQ ID NO: 263173 - DNA, 120 bp, Artificial Sequence
  ENSG00000125810_41 (sequence is synthesized)
atgtaaagagagaacatctcacacacccagctcgccatgcctactcattcctgaatttcaggtgccatcactgctctttctttcttctttgtcatttgagaaaggatgcaggaggacaat

SEQ ID NO: 263174 - DNA, 120 bp, Artificial Sequence
  ENSG00000125810_42 (sequence is synthesized)
tcccacagataatctgaggaatgcagaaaaaccagggcaggacagttatcgacaatgcattagaacttggtgagcatcctctgtagagggactccacccctgctcaacagcttggcttcc

SEQ ID NO: 263175 - DNA, 120 bp, Artificial Sequence
  ENSG00000125810_43 (sequence is synthesized)
aggcaagaccaaccacatctggtctctgccttcggtggcccacacacctaagcgtcatcgtcattgccatagcatcatgatgcaacacatctacgtgtagcactacgacgttatgtttgg

SEQ ID NO: 263176 - DNA, 120 bp, Artificial Sequence
  ENSG00000125810_44 (sequence is synthesized)
gtaatgtggggatgaactgcatgaggctctgattaaggatgtggggaagtgggctgcggtcactgtcggccttgcaaggccacctggaggcctgtctgttagccagtggtggaggagcaa

SEQ ID NO: 263177 - DNA, 120 bp, Artificial Sequence
  ENSG00000125810_45 (sequence is synthesized)
ggcttcaggaagggccagccacatgccatcttccctgcgatcaggcaaaaaagtggaattaaaaagtcaaacctttatatgcatgtgttatgtccattttgcaggatgaactgagtttaa

SEQ ID NO: 263178 - DNA, 120 bp, Artificial Sequence
  ENSG00000125810_46 (sequence is synthesized)
aagaatttttttttctcttcaagttgctttgtcttttccatcctcatcacaagcccttgtttgagtgtcttatccctgagcaatctttcgatggatggagatgatcattaggtacttttg

SEQ ID NO: 263179 - DNA, 120 bp, Artificial Sequence
  ENSG00000125810_47 (sequence is synthesized)
tttcaacctttattcctgtaaatatttctgtgaaaactaggagaacagagatgagatttgacaaaaaaaaattgaattaaaaataacacagtctttttaaaactaacataggaaagcctt

SEQ ID NO: 263180 - DNA, 120 bp, Artificial Sequence
  ENSG00000125810_48 (sequence is synthesized)
tcctattatttctcttcttagcttctccattgtctaaatcaggaaaacaggaaaacacagctttctagcagctgcaaaatggtttaatgccccctacatatttccatcaccttgaacaat

SEQ ID NO: 263181 - DNA, 120 bp, Artificial Sequence
  ENSG00000125810_49 (sequence is synthesized)
agctttagcttgggaatctgagatatgatcccagaaaacatctgtctctacttcggctgcaaaacccatggtttaaatctatatggtttgtgcattttctcaactaaaaatagagatgat

SEQ ID NO: 263182 - DNA, 120 bp, Artificial Sequence
  ENSG00000125810_50 (sequence is synthesized)
aatccgaattctccatatattcactaatcaaagacactattttcatactagattcctgagacaaatactcactgaagggcttgtttaaaaataaattgtgttttggtctgttcttgtaga

SEQ ID NO: 263183 - DNA, 120 bp, Artificial Sequence
  ENSG00000125810_51 (sequence is synthesized)
taatgcccttctattttaggtagaagctctggaatccctttattgtgctgttgctcttatctgcaaggtggcaagcagttcttttcagcagattttgcccactattcctctgagctgaag

SEQ ID NO: 263184 - DNA, 120 bp, Artificial Sequence
  ENSG00000125810_52 (sequence is synthesized)
ttctttgcatagatttggcttaagcttgaattagatccctgcaaaggcttgctctgtgatgtcagatgtaattgtaaatgtcagtaatcacttcatgaatgctaaatgagaatgtaagta

SEQ ID NO: 263185 - DNA, 120 bp, Artificial Sequence
  ENSG00000125810_53 (sequence is synthesized)
tttttaaatgtgtgtatttcaaatttgtttgactaattctggaattacaagatttctatgcaggatttaccttcatcctgtgcatgtttcccaaactgtgaggagggaaggctcagagat

SEQ ID NO: 263186 - DNA, 120 bp, Artificial Sequence
  ENSG00000125810_54 (sequence is synthesized)
cgagcttctcctctgagttctaacaaaatggtgctttgagggtcagcctttaggaaggtgcagctttgttgtcctttgagctttctgttatgtgcctatcctaataaactcttaaacaca

SEQ ID NO: 263187 - DNA, 120 bp, Artificial Sequence
  ENSG00000125812_0 (sequence is synthesized)
gttcctaccggcctggtccagcggacagcggctgcagcgggggcgccggctgggagctgtttttggaaggaagaaagatggaaagcggtgcagttctgctggaatccaaatcctccccat

SEQ ID NO: 263188 - DNA, 120 bp, Artificial Sequence
  ENSG00000125812_1 (sequence is synthesized)
ttaacctactgcatgagatgcatgagcttcgcctcctgggtcacctgtgtgacgtgacagtcagcgtggagtatcagggtgtccgcaaagacttcatggcccacaaggcagtgctggctg

SEQ ID NO: 263189 - DNA, 120 bp, Artificial Sequence
  ENSG00000125812_2 (sequence is synthesized)
ccaccagcaagttttttaaggaagtgttccttaatgagaagagtgtggatggtactaggactaatgtctacttaaatgaagtgcaggttgctgactttgcttcatttcttgagtttgtct

SEQ ID NO: 263190 - DNA, 120 bp, Artificial Sequence
  ENSG00000125812_3 (sequence is synthesized)
acactgcaaaggtacaggtggaagaagatcgggtgcagcgaatgctggaagtggctgaaaagctgaaatgtttggatttatcagaaacttgttttcaattaaagaaacagatgttagagt

SEQ ID NO: 263191 - DNA, 120 bp, Artificial Sequence
  ENSG00000125812_4 (sequence is synthesized)
cagtacttttggagttgcaaaatttctcagagtctcaggaggtggaggtgagcagtggctcccaagttagtgctgctcctgcccccagggcaagtgtggccaccgatggccctcacccca

SEQ ID NO: 263192 - DNA, 120 bp, Artificial Sequence
  ENSG00000125812_5 (sequence is synthesized)
gtggtctcacggattccttggactacccaggagagagagccagcaatggcatgtcttcagatttgccaccgaagaagtccaaggacaaactagacaagaagaaagaggtagttaaacctc

SEQ ID NO: 263193 - DNA, 120 bp, Artificial Sequence
  ENSG00000125812_6 (sequence is synthesized)
cctaccctaaaatcaggagagctagtggaaggctggctgggaggaaggtctttgtggagatccctaaaaagaaatatacgagaagactccgagagcagcagaaaactgctgagggtgatg

SEQ ID NO: 263194 - DNA, 120 bp, Artificial Sequence
  ENSG00000125812_7 (sequence is synthesized)
tgggggactacaggtgtccccaggaccaaagcccggacagggtgggcacggagatggagcaggtttccaaaaatgagggttgccaggcaggtgctgagttggaggaattgtcaaagaaag

SEQ ID NO: 263195 - DNA, 120 bp, Artificial Sequence
  ENSG00000125812_8 (sequence is synthesized)
gaggaggaagaggaggaggaggaggaggacgaagaaggggagaagaagaagagcaactttaagtgcagcatttgcgagaaggcgtttctgtatgagaagagcttcctgaagcacagcaag

SEQ ID NO: 263196 - DNA, 120 bp, Artificial Sequence
  ENSG00000125812_9 (sequence is synthesized)
acagcaagcaccgccacggcgtggccaccgaggtggtgtaccgctgcgacacctgcggccagaccttcgccaaccgctgcaacctgaagagccaccagcgccacgtgcacagcagcgagc

SEQ ID NO: 263197 - DNA, 120 bp, Artificial Sequence
  ENSG00000125812_10 (sequence is synthesized)
gccatttcccatgcgagctgtgcgggaagaagttcaagcgcaagaaggacgtgaagcggcacgtgctgcaggtgcatgagggcggcggcgagcggcaccgctgcggccagtgcggcaagg

SEQ ID NO: 263198 - DNA, 120 bp, Artificial Sequence
  ENSG00000125812_11 (sequence is synthesized)
gcctgagttccaagacagcgctgcggctgcacgagcgcacacacacgggagaccggccctacggctgcaccgagtgcggcgccaggttctcgcagccgtccgcgctcaagacgcacatga

SEQ ID NO: 263199 - DNA, 120 bp, Artificial Sequence
  ENSG00000125812_12 (sequence is synthesized)
gaattcatacaggggaaaaaccttttgtctgtgatgaatgtggtgcaagattcactcagaaccacatgctgatttatcataaaaggtgtcacacaggtgaaagaccttttatgtgtgaaa

SEQ ID NO: 263200 - DNA, 120 bp, Artificial Sequence
  ENSG00000125812_13 (sequence is synthesized)
catgtggcaagagttttgcttctaaggagtacttaaaacaccacaatagaatccatactggatccaaaccctttaaatgtgaagtatgtttcaggacttttgcccagcggaattcactgt

SEQ ID NO: 263201 - DNA, 120 bp, Artificial Sequence
  ENSG00000125812_14 (sequence is synthesized)
accagcatattaaagtccacacaggggagcgtccctactgctgtgaccagtgcggcaagcagttcacccagctcaacgccctccagcgccaccgccgcatccacacaggggagaggccat

SEQ ID NO: 263202 - DNA, 120 bp, Artificial Sequence
  ENSG00000125812_15 (sequence is synthesized)
tcatgtgcaatgcgtgcggacggacattcaccgacaagtccactcttcggcggcacacctcaatacacgataagaatactccatggaagtctttccttgtcattgtagatggctcgccca

SEQ ID NO: 263203 - DNA, 120 bp, Artificial Sequence
  ENSG00000125812_16 (sequence is synthesized)
agaacgatgacggacacaagactgaacagcctgacgaagagtatgtgtcatccaagctttcggataaattgctgtcttttgcagaaaatggccatttccacaacctggctgcagtccaag

SEQ ID NO: 263204 - DNA, 120 bp, Artificial Sequence
  ENSG00000125812_17 (sequence is synthesized)
acactgtacctaccatgcaggagaacagttctgctgacacagcctgcaaggcagatgactccgtggtgtcccaggacaccctcctggccaccaccatcagtgagcttagcgagctgaccc

SEQ ID NO: 263205 - DNA, 120 bp, Artificial Sequence
  ENSG00000125812_18 (sequence is synthesized)
cacagacagactcgatgcccacacagcttcactctttgagcaacatggaataagagcttcaagcagttcccatcctgttagtctgcgtgtgtggtagctgaactcaagatgatgtggggc

SEQ ID NO: 263206 - DNA, 120 bp, Artificial Sequence
  ENSG00000125812_19 (sequence is synthesized)
taagaaaaataattgtccatgtgcaaagatgtgggcaagaatggcctctgcagattttcctgaacttctgctaacttgcacggctttatcacagcatttttaaagctttccctcaaaaat

SEQ ID NO: 263207 - DNA, 120 bp, Artificial Sequence
  ENSG00000125812_20 (sequence is synthesized)
aaaaggcagtgaacataacctcacttaattctggtgtagggtgtatgtgctaatcgttctaattcttgattacctagtttatagataactgctggtcttaattgcagagtacagagaact

SEQ ID NO: 263208 - DNA, 120 bp, Artificial Sequence
  ENSG00000125812_21 (sequence is synthesized)
gaaccagctcctgatattgtagttagcagtcttcctggcttctcactctgccttatatttccatgtgggtttacttctctcataactactttcaaggtatttttcttccaagctgaaata

SEQ ID NO: 263209 - DNA, 120 bp, Artificial Sequence
  ENSG00000125812_22 (sequence is synthesized)
aaactggggccacatattttcagtcatttcttccctgttgaattgaagcaaatcagattttctgtggggaccctcaaatgcaactgaagaaatagattgttgcattcattcctccccacc

SEQ ID NO: 263210 - DNA, 120 bp, Artificial Sequence
  ENSG00000125812_23 (sequence is synthesized)
ccccatttgtaggcagtaaacaaagtatgactgacagattgaacacctgcaaaactgctagcgtaatctcagcacatacgcagctaggaagtttgtcataaaatcaacttagaaatgaga

SEQ ID NO: 263211 - DNA, 120 bp, Artificial Sequence
  ENSG00000125812_24 (sequence is synthesized)
tgaggctgttcagtttgtcttaaaaaaatcagattaggtaaaagctgtcctaccaaagagtctagcaaaacaatatagtatttttttgcagaggcatgaaaaattaagacgctttagagt

SEQ ID NO: 263212 - DNA, 120 bp, Artificial Sequence
  ENSG00000125812_25 (sequence is synthesized)
acttgaaagttgtgtagtcattttatttgcaaaatgaggtgactgtggcaaattatagaacacagagtattattacttttgccaggtttttctgacttgatttctgtaatttccagaaac

SEQ ID NO: 263213 - DNA, 120 bp, Artificial Sequence
  ENSG00000125812_26 (sequence is synthesized)
ccagacttctcatttccacacctagagatggaaacaggcaagtaactgacatgtctatttccttgggagcatgtgagaacatagcagtagggaccaaaagtctcagcacacttacctccg

SEQ ID NO: 263214 - DNA, 120 bp, Artificial Sequence
  ENSG00000125812_27 (sequence is synthesized)
attatgccttaaagagttgattgtgaagaaccagtaactttgtcccaaatgcttctttggctgtttcatgcaggacttaattattgcttttaaaaattcacaatgaaaagacgattctgc

SEQ ID NO: 263215 - DNA, 120 bp, Artificial Sequence
  ENSG00000125812_28 (sequence is synthesized)
tgtatttgttaaacgttgacatttggttctagggccttgagtatgtgccacgtgcttgtgaaatgctatgattcacatgtaacatttaaacattaatttaaaaagggaaccttggagaat

SEQ ID NO: 263216 - DNA, 120 bp, Artificial Sequence
  ENSG00000125812_29 (sequence is synthesized)
tcttttgttcactagttccttttttctctacatttttaatttattaaacttgctgtgaaaacactttgattttctaagaggaaggtactttaagttccagaatgaacatgtagctgcact

SEQ ID NO: 263217 - DNA, 120 bp, Artificial Sequence
  ENSG00000125812_30 (sequence is synthesized)
atgccagaaattaatgagggaagactttcttcctaagtgcttatgttttaacttatgttagtgaaaccactacaaggtgtttcaggcgctgataacatgcttcacacctgcccttggagg

SEQ ID NO: 263218 - DNA, 120 bp, Artificial Sequence
  ENSG00000125812_31 (sequence is synthesized)
tcacagtactaatttacttcaaatttagttatgacagtgtcactgtatcctagttatgtttacagcacaaataaataatgactgtcatacatccagaggagaccgaacctgcccagctga

SEQ ID NO: 263219 - DNA, 120 bp, Artificial Sequence
  ENSG00000125812_32 (sequence is synthesized)
tgtactgttttatggaataaagtcacttgatcagaaggaattgaaacaatagatcattttgttacctactggagggatttttgtcttgaatttgtttccttagaaattctacaaaaaaat

SEQ ID NO: 263220 - DNA, 120 bp, Artificial Sequence
  ENSG00000125812_33 (sequence is synthesized)
gttgttaataaatgtctgctttgtaaaagcagttttgcaattttttaaagatctatttctgttataatttaggttctgcagaaatatgattcttaattgaaacatataatttgcttaatt

SEQ ID NO: 263221 - DNA, 120 bp, Artificial Sequence
  ENSG00000125812_34 (sequence is synthesized)
acgtgaataatgaaatgtaaaatccgggtccataagcctttatttcatacagtcctaggattaagctgtttaactgcttggatcccagttggtctctggcagtgggatcctggagaggag

SEQ ID NO: 263222 - DNA, 120 bp, Artificial Sequence
  ENSG00000125812_35 (sequence is synthesized)
aaatcctggcctctgctcatgcgcaggccacaaccgggctggaagtgcggttgagctctctgccactttcttcaatgtaaaaagtaggcatcaaagatacgacttctactatatacattt

SEQ ID NO: 263223 - DNA, 120 bp, Artificial Sequence
  ENSG00000125812_36 (sequence is synthesized)
ctctgtccctgagaacagagaaacgtaaccctgtaggggactggttacagaggacctcctggagcatctgccccattcctccaagtccaagcacagccatgctgagtggaagcgaggcca

SEQ ID NO: 263224 - DNA, 120 bp, Artificial Sequence
  ENSG00000125812_37 (sequence is synthesized)
ccatctgagtggattggtcccaagtgtgtaatgaggaaagtggccaggtgccggcacagtgcctctcccagagcctcaagaagggccatttaggagcttgcttcaaccattttccaacca

SEQ ID NO: 263225 - DNA, 120 bp, Artificial Sequence
  ENSG00000125812_38 (sequence is synthesized)
ttttctgtgaaatgctgtcagcccaaactccaaagggatgtgcagcctttcgttttaccaaattctttgctgtcgtttggaaaaaatgggccatgtggtggagacctttatttaaggtga

SEQ ID NO: 263226 - DNA, 120 bp, Artificial Sequence
  ENSG00000125812_39 (sequence is synthesized)
tttttacagaaatgtgattttgctgtaggtgattatccaaacaagtaaatttgagtgtataatttaatttttaacctgttaaataaaccttgtccctccaaggagttcatttttgggaaa

SEQ ID NO: 263227 - DNA, 120 bp, Artificial Sequence
  ENSG00000125812_40 (sequence is synthesized)
ctcggggatgcgggagcgggggcagggggcggcccgagggcctgatccacgcggccccggatgcccgcgtcgggaggcggcgcgtcgggccgaggaggggcttctctgtggctgcagtag

SEQ ID NO: 263228 - DNA, 120 bp, Artificial Sequence
  ENSG00000125812_41 (sequence is synthesized)
tggctgcagtagtttgttctctgggtcgtctttggagtggccgagcggcgtccgggcgctggggcggccaagtggcgcgggaagggtgggaggtgccgtgagggcggcgaggacagcggc

SEQ ID NO: 263229 - DNA, 120 bp, Artificial Sequence
  ENSG00000125812_42 (sequence is synthesized)
ggatttaagccccactggaaaccccggcccttgtggccgtggactgggctgcgggtagcagcgtctcctggaagggctctggccccgtgagcctcggggattcaggggccgccgacgttg

SEQ ID NO: 263230 - DNA, 120 bp, Artificial Sequence
  ENSG00000125812_43 (sequence is synthesized)
cagactgccctgtcgccacctccagtgcctgcactccagtagccaagcaacataggaaatcgcgctcagaacccactttgttgattgagaaatcagacacgttgaatccgaggtgacatc

SEQ ID NO: 263231 - DNA, 120 bp, Artificial Sequence
  ENSG00000125812_44 (sequence is synthesized)
tgtggtctggccgaaggaggctagaaggaaggcatgtgctttggatggatggaaacaggaatcaaagaggaagctgtttttggaaggaagaaagatggaaagcggtgcagttctgctgga

SEQ ID NO: 263232 - DNA, 120 bp, Artificial Sequence
  ENSG00000125813_0 (sequence is synthesized)
aaattgattcccgcacgctgcagcctcccggtcagacgaatttctcccaatcggatgaagttcaccctgggcctggggtcgcgggcgtggagagtgtcctgggagggggcagcagcggcg

SEQ ID NO: 263233 - DNA, 80 bp, Artificial Sequence
  ENSG00000125813_1 (sequence is synthesized)
gcgcacagcgcgtctccagcccgcggctgggccgccgcggctctcggctctcgggcgccctccctctatgcctctcacgc

SEQ ID NO: 263234 - DNA, 120 bp, Artificial Sequence
  ENSG00000125813_2 (sequence is synthesized)
cggcgcccaagctctcccggactgcgccgggcccagccccggccaccccggccaccccggcgccaggcagctggccggcccgctcgctatggagcagacgtatggcgaggtgaaccagct

SEQ ID NO: 263235 - DNA, 120 bp, Artificial Sequence
  ENSG00000125813_3 (sequence is synthesized)
aaccagctgggcggtgtgttcgtcaacggccgccccctgcccaacgccatccgcttgcgcattgtggagctggcgcagctgggcatccgaccctgtgacatcagtcggcagctccgcgta

SEQ ID NO: 263236 - DNA, 120 bp, Artificial Sequence
  ENSG00000125813_4 (sequence is synthesized)
tcccacggctgcgtgagcaagatcctggcgcgctacaacgagaccggctccattctgcccggggccatcggggggagcaagccccgcgtcaccactcccaacgtggtcaagcacatccgg

SEQ ID NO: 263237 - DNA, 120 bp, Artificial Sequence
  ENSG00000125813_5 (sequence is synthesized)
gactacaagcaaggagaccctggcatctttgcctgggagatccgcgaccggctgctggccgacggcgtctgtgacaagtacaatgtgccttcggtgagctccatcagccgcatcctgcgc

SEQ ID NO: 263238 - DNA, 120 bp, Artificial Sequence
  ENSG00000125813_6 (sequence is synthesized)
aacaagatcggcagcctggcgcagcccggaccgtacgaggcaagtaagcagccgccgtcgcagcctacgctgccctacaaccacatctaccagtacccctaccccagtcccgtgtcgccc

SEQ ID NO: 263239 - DNA, 120 bp, Artificial Sequence
  ENSG00000125813_7 (sequence is synthesized)
acgggcgccaagatgggcagccaccccggggtcccgggcacggcgggccacgtcagcatcccgcgctcatggccctcggcacactcggtcagcaacatcctgggcatccggacgtttatg

SEQ ID NO: 263240 - DNA, 120 bp, Artificial Sequence
  ENSG00000125813_8 (sequence is synthesized)
gagcaaacaggggccctggctgggagcgaaggcaccgcttactctcccaagatggaagactgggccggcgtgaaccgcacggccttccccgccacccccgcagtgaatgggctagagaaa

SEQ ID NO: 263241 - DNA, 120 bp, Artificial Sequence
  ENSG00000125813_9 (sequence is synthesized)
cctgccttagaggcagacattaaatacactcagtcggcctccaccctctctgccgtgggcggctttctccccgcctgcgcctacccggcctccaaccagcacggcgtgtacagcgccccg

SEQ ID NO: 263242 - DNA, 120 bp, Artificial Sequence
  ENSG00000125813_10 (sequence is synthesized)
ggcggcggctacctcgccccgggcccgccgtggccgcctgcgcaaggtcctcctctggcgccccccggggccggcgtagctgtgcatggcggggaactcgcggcagcaatgaccttcaag

SEQ ID NO: 263243 - DNA, 120 bp, Artificial Sequence
  ENSG00000125813_11 (sequence is synthesized)
tcccggcctcgacctcctaggggcagctctccccggacccgagcccggagggaacggcaggcggacccgggcgcacaggtctgcgcggcggccccggcaatcggcacgggcaggatcgga

SEQ ID NO: 263244 - DNA, 120 bp, Artificial Sequence
  ENSG00000125813_12 (sequence is synthesized)
ggactcgcggaggaggaagccagtgccggcccgcggggtgcacgcccagccagcccccaggcccagccctgcctctggccggacccaccacacttcctttattggtctgggtttttaggc

SEQ ID NO: 263245 - DNA, 120 bp, Artificial Sequence
  ENSG00000125813_13 (sequence is synthesized)
ttctctgaacttgggttttagactgccgtaccctcctcacaatccttgctctgacgtggcctccttcgctctgccagcttcaaatttcttttttgtcactcccttgtccgtctccgtctc

SEQ ID NO: 263246 - DNA, 120 bp, Artificial Sequence
  ENSG00000125813_14 (sequence is synthesized)
gcctctctccctgtttccttcccccctctttctttctcactctccctcccttccctttctctttcccttcctccctaccttccaccccggctttccccgaccttccagggctccctctgc

SEQ ID NO: 263247 - DNA, 120 bp, Artificial Sequence
  ENSG00000125813_15 (sequence is synthesized)
ccttccactctcttttccttgctccgacctctgctccagtcccgcttcttcccccgtctcctctttctagtcctctatatgctatcagccctttttcctggtccatccctgtcgttcctt

SEQ ID NO: 263248 - DNA, 120 bp, Artificial Sequence
  ENSG00000125813_16 (sequence is synthesized)
ctctctctgtctctggttctactgtcaagggccctagttccctttgttttactgcttccccaaccctccctcagtccctgagagccctagagccatctcggtgacagtcccttctctggc

SEQ ID NO: 263249 - DNA, 120 bp, Artificial Sequence
  ENSG00000125813_17 (sequence is synthesized)
acctgggactttgtagccttcactcctctgagcccaccagccctaatggaggggggctcaaacctaggaagtggacagaaaagccacagcctttattttgtattttttttgtaataacaa

SEQ ID NO: 263250 - DNA, 120 bp, Artificial Sequence
  ENSG00000125813_18 (sequence is synthesized)
accctaaaaaaccctccatgaactgtcctctcccgtcgatccccgcagcatattgtctggaaatctgttttctttctcagagcccagtggccgccgggcttctcttcccttctgagatga

SEQ ID NO: 263251 - DNA, 120 bp, Artificial Sequence
  ENSG00000125813_19 (sequence is synthesized)
tgtcaccccaaagaagactggggtaggagtagggagcacaggggttgttggtgttttcagtgcttagaaaactgggttgtcctgcaggtgtctcctcccacccctccactcgcaacactt

SEQ ID NO: 263252 - DNA, 120 bp, Artificial Sequence
  ENSG00000125813_20 (sequence is synthesized)
gctagggaatccgaccagtggtaaacacatcagcactttttggtgttcaggggtcagcacatttgttaatttaaaccacagactgcttccaggtacaaaggttcatttggacttctggtt

SEQ ID NO: 263253 - DNA, 120 bp, Artificial Sequence
  ENSG00000125813_21 (sequence is synthesized)
tgcaagggatgagggttaaaaaaaacaaaacaaaacaaacaacaacaacaacaaaaacaacccagaaagtatcttctagagccagccgcaagagctgtgagctgcttccaagttaggcga

SEQ ID NO: 263254 - DNA, 120 bp, Artificial Sequence
  ENSG00000125813_22 (sequence is synthesized)
gctggtggtggtaccctggacataatgcaattctgtagtcagagcaatatccctggcgagagcctgacatcgcctgttaaaggtggctgcctctgaataaaggaaagcgtctgaaaggtg

SEQ ID NO: 263255 - DNA, 120 bp, Artificial Sequence
  ENSG00000125813_23 (sequence is synthesized)
aatgcgccgcgctccactccgcggctcctctgcgcccttgcccactccaagccagacccaggcggtttgcccttggactccgagctgtctggggacccacaggtcacctttggaagtgcg

SEQ ID NO: 263256 - DNA, 120 bp, Artificial Sequence
  ENSG00000125813_24 (sequence is synthesized)
tatgcagaaaccaccttgaaatgcagttaattctgaaaagagtaaaatgggcaaaaggcaatgagccagaatggaggatttcttcagaacatttctagtattctaaaagctaaagaagac

SEQ ID NO: 263257 - DNA, 120 bp, Artificial Sequence
  ENSG00000125813_25 (sequence is synthesized)
aatcccaggctaccaagtaatctagggggtttgcactacaaaggggcttccggctaattgtttttttttcctgcctctgtttgaccttctaaaactgatggaagagatttttgaattgaa

SEQ ID NO: 263258 - DNA, 120 bp, Artificial Sequence
  ENSG00000125813_26 (sequence is synthesized)
gttgctgtttgtgagtggagctgcctgcttggtgtgtgcactggtcccacctaggggactagtggtaaacagtttttgtttcaactctttttgatagtatctgttgaaggtatcaattat

SEQ ID NO: 263259 - DNA, 120 bp, Artificial Sequence
  ENSG00000125813_27 (sequence is synthesized)
aaaaaagtacttacttttttcctagagagactcttcttctcagattcaaagtctcttgtctttttttttttttttttttaaagtttcactttgtagacagtgttagtgatggctagggat

SEQ ID NO: 263260 - DNA, 120 bp, Artificial Sequence
  ENSG00000125813_28 (sequence is synthesized)
ttgatttattttctttagaccacatagcaaggtatgaattagagggcttgtgcttggaaactgggtgacactatctcatcagagaggcaggattgagacttggactttgagactgaagtc

SEQ ID NO: 263261 - DNA, 120 bp, Artificial Sequence
  ENSG00000125813_29 (sequence is synthesized)
ctcagccttccatggcagcatatcctgtagaagagcttgtcatactgataataggaaaaaagtatgacagagaagcatgttcccaagtcccccatcctctcagcctgtctccttgtgctt

SEQ ID NO: 263262 - DNA, 120 bp, Artificial Sequence
  ENSG00000125813_30 (sequence is synthesized)
agatgagcattgcatgctcagtggtgacatcctggacagaattttcatgcacccatttgtgctgcctggagaaggactggcttgctcaggccaggaggaagacatcacatccctttctga

SEQ ID NO: 263263 - DNA, 120 bp, Artificial Sequence
  ENSG00000125813_31 (sequence is synthesized)
aggaatgagaagaatctatatgacaacttctacctttgagttgtcaccatccccatttccctgctatggcccacttctgtgtttgagctgatcagggttatgggggagaagagctgggaa

SEQ ID NO: 263264 - DNA, 120 bp, Artificial Sequence
  ENSG00000125813_32 (sequence is synthesized)
atgcgccccagggtggatgcaaagcacctgtgttttaagtgccacctgcaaagggaggcatttttcaaatctgcctcttgttccctgtatcctgtggctggaggcgggtctttgagttcc

SEQ ID NO: 263265 - DNA, 120 bp, Artificial Sequence
  ENSG00000125813_33 (sequence is synthesized)
ctggctctggggcgagcattcactgaggataggcagccttcgtcccagagccagcaggctctgacatttcatgtggggtgtggagggacataccccctctctcgcggctgggggtcacgg

SEQ ID NO: 263266 - DNA, 120 bp, Artificial Sequence
  ENSG00000125813_34 (sequence is synthesized)
aacatcttagtgaacttggcttaaatctctgctccactgtatgtgtcaggggactgggacctcttggaacctgtctgtgaaatgtagccttcaatgcagtaacgcgcacggtgacctggc

SEQ ID NO: 263267 - DNA, 120 bp, Artificial Sequence
  ENSG00000125813_35 (sequence is synthesized)
ctgtaggaagactgccactggtgtggcctcacctctctggagacaattttgcttatctgttaacaaaagttagaggaatcacttgtaaggttggtgggagacccagaatttaaatatttt

SEQ ID NO: 263268 - DNA, 120 bp, Artificial Sequence
  ENSG00000125813_36 (sequence is synthesized)
ccaaaagatcccattggaatattgcacttttgctctttgttcgtatggatctgtggaggaactgagagctcataataaaattatgcagcaccacgtcaggtagaataatttgagaaacaa

SEQ ID NO: 263269 - DNA, 120 bp, Artificial Sequence
  ENSG00000125813_37 (sequence is synthesized)
tcactccctaaacgcagtttgtctttgcctttcatttttttaatttaagaataagttttttttagaaaaatatagagatgtaacccaaagaaaataaagacataatcagatagccctctg

SEQ ID NO: 263270 - DNA, 120 bp, Artificial Sequence
  ENSG00000125813_38 (sequence is synthesized)
attttttgaaagaatagaaataatatatgcgtatcactaaaaaactcaagcagtacagaaacattaaaatgaaaagtggaagttcttcctgctctcatttttgttcttaaaggtgaatgc

SEQ ID NO: 263271 - DNA, 120 bp, Artificial Sequence
  ENSG00000125813_39 (sequence is synthesized)
tgttatagtcttttgtgaatctttccaggaaaaacatgcatgcgggaaaatatgtttctgtctatgtgttatttgaaagtgcacactaatgagttgtgctgtgcacacacagacatgagc

SEQ ID NO: 263272 - DNA, 120 bp, Artificial Sequence
  ENSG00000125813_40 (sequence is synthesized)
tgaagatctgctctttgcgtaccaccagcttcagctccaatgtacccactttattctcgtgaatggatgtctattaccgaggatttattaaaaacagggtatttgtaaagagggccagct

SEQ ID NO: 263273 - DNA, 120 bp, Artificial Sequence
  ENSG00000125813_41 (sequence is synthesized)
tcgtgctttaaatgaataaagacaggattttgttgtgttcattattggaggaagtacttgcaatggattgtaataacttccctgccaaaggtagctgttttttggcaagaagtaaggaaa

SEQ ID NO: 263274 - DNA, 120 bp, Artificial Sequence
  ENSG00000125813_42 (sequence is synthesized)
acaaaccaaaggaaaggaggattgaggggcaagaggcatgaagttttgcccttcttgaatatgccccgagttgttctacagatcactgaagggcatttgaaggtgtgaggggaaggcttc

SEQ ID NO: 263275 - DNA, 120 bp, Artificial Sequence
  ENSG00000125813_43 (sequence is synthesized)
ctctcctttggagggagtcagtctctctgggccaggaaagagacatggaggcagaggggtgcgggaaaaccttgtgtgaagaaatactggctacaaataaagtttagattttcaatactg

SEQ ID NO: 263276 - DNA, 120 bp, Artificial Sequence
  ENSG00000125813_44 (sequence is synthesized)
ggccgctttggccgagtctgcccaggctttgactcagcagcagcctcccgttcgtgggaaaccggttgaaggctaggaggaccgggcagcaggcctggctgcctttcctccgccccaccc

SEQ ID NO: 263277 - DNA, 120 bp, Artificial Sequence
  ENSG00000125813_45 (sequence is synthesized)
ggagtggtgaacattccagtccctgccgcctcctggtggagtgtcaggccacctacaaattttgtgggacccctggccgtgtcttcagatacaaattgggtggttggccacacgtgtgcc

SEQ ID NO: 263278 - DNA, 120 bp, Artificial Sequence
  ENSG00000125814_0 (sequence is synthesized)
gtccctgcggccgccagagggagggttaaggcgcctgggcgcacagcgagccggctgagggggctgtggcggccgcggcgggcgacatggacaacgcggggaaggagcgtgaggcagtac

SEQ ID NO: 263279 - DNA, 120 bp, Artificial Sequence
  ENSG00000125814_1 (sequence is synthesized)
agctgatggcggaggccgagaagcgagtcaaggcctcccactccttcctccgagggctgtttggaggaaacacaagaatagaagaggcttgtgaaatgtataccagagctgcaaatatgt

SEQ ID NO: 263280 - DNA, 120 bp, Artificial Sequence
  ENSG00000125814_2 (sequence is synthesized)
tcaagatggctaaaaattggagtgctgcaggaaacgcattttgtcaggcagccaagctccacatgcagcttcagagcaaacatgactctgctaccagctttgtggatgctggaaatgctt

SEQ ID NO: 263281 - DNA, 120 bp, Artificial Sequence
  ENSG00000125814_3 (sequence is synthesized)
acaaaaaggcagatccccaagaggctatcaactgcttaaatgcagccatcgacatttacacagacatgggaaggtttacaattgcagccaagcaccacattactattgcagagatctatg

SEQ ID NO: 263282 - DNA, 120 bp, Artificial Sequence
  ENSG00000125814_4 (sequence is synthesized)
agactgaacttgtagacattgagaaggctattgcacattatgaacaatctgctgattattacaaaggagaagaatccaacagctcagcaaacaagtgtctgctgaaggtggcagcatatg

SEQ ID NO: 263283 - DNA, 120 bp, Artificial Sequence
  ENSG00000125814_5 (sequence is synthesized)
ctgcccagcttgagcagtaccagaaagccattgagatctatgagcaggttggggcaaacacaatggataatcctttgttgaaatacagtgcaaaggattacttcttcaaagctgccctct

SEQ ID NO: 263284 - DNA, 120 bp, Artificial Sequence
  ENSG00000125814_6 (sequence is synthesized)
gccacttcatagtagacgagttgaatgccaagcttgctcttgagaaatatgaggaaatgtttccagcatttactgattcaagagaatgtaaattattgaaaaaactcctagaagctcatg

SEQ ID NO: 263285 - DNA, 120 bp, Artificial Sequence
  ENSG00000125814_7 (sequence is synthesized)
aagaacagaacagtgaagcttacactgaagcagtgaaggaatttgactcaatatctcgcttggatcagtggctgaccaccatgttgcttcgcatcaaaaagtccatccaaggggatggag

SEQ ID NO: 263286 - DNA, 120 bp, Artificial Sequence
  ENSG00000125814_8 (sequence is synthesized)
aaggagatggagacctaaaatgaaatgtttttgtctttgtggcatgcagctaactcctctttagttttgtcttagggtcaagtgatctttatgggatgcctatttaatggcttaattttg

SEQ ID NO: 263287 - DNA, 120 bp, Artificial Sequence
  ENSG00000125814_9 (sequence is synthesized)
ttgcatatgagccagacggcctgtgtattgtttaagctcgccaagtctgtgttgctgtgaaatgaatgaaggagaggctcctgttcatcttgtggtaatgatgggttgtttcatgcttat

SEQ ID NO: 263288 - DNA, 120 bp, Artificial Sequence
  ENSG00000125814_10 (sequence is synthesized)
cagaacccccagcgttttctgagaagtacttcagaatctcattcctcatatttcattggtatttgtggagcctatgtttaatgttgccacgtgtttttatgtcctttttgttggacttga

SEQ ID NO: 263289 - DNA, 120 bp, Artificial Sequence
  ENSG00000125814_11 (sequence is synthesized)
gtactcagcccagttgttctcatagatgctttgcattttctctgtgctttggcatctgaatatgttctttaaatgtgtgtttagtttaggacagttactaggaatgagtttataacttca

SEQ ID NO: 263290 - DNA, 120 bp, Artificial Sequence
  ENSG00000125814_12 (sequence is synthesized)
ttagaaatcatttctatttttgttatcctgtgattattttgatggtgctagtgactagtttctttgctttttgtgttgttccgtatgctaacatgtgcatggcaaaaatttagaatagcc

SEQ ID NO: 263291 - DNA, 120 bp, Artificial Sequence
  ENSG00000125814_13 (sequence is synthesized)
agggtctgtaggcatcacattgtgaggaagggagctttctggaagtacttgcttcatgtatggatgagtgtcaaagtgaatttgatttgtacttagacacacgcgtttacacacacacac

SEQ ID NO: 263292 - DNA, 120 bp, Artificial Sequence
  ENSG00000125814_14 (sequence is synthesized)
atatcacaagatctgttagaaatggaatttttctctttttctggagatagttttcacttttagttggagtggaaatccctttatatttacattgaagtattttaattggcatagcctgct

SEQ ID NO: 263293 - DNA, 120 bp, Artificial Sequence
  ENSG00000125814_15 (sequence is synthesized)
tgtaattttcctgtttattgtacatgatgggttaggtggggtgaatgtggtacaggaatgtcctgtatgcccaagtgggcaagaaccccaacttgtttctcaggggacttgattgttctc

SEQ ID NO: 263294 - DNA, 120 bp, Artificial Sequence
  ENSG00000125814_16 (sequence is synthesized)
ttagctggtggaatatgttggcttatgtgtttgaactctgtcgtgtttaattggtttatataatatatgtatgctatcttgattcatgaacttgatcctattaatttatatgctgatatt

SEQ ID NO: 263295 - DNA, 120 bp, Artificial Sequence
  ENSG00000125814_17 (sequence is synthesized)
gtactttagacatacgcttgtctcctgaatgtcctctgaatatttatagttaaatgatttatatttgaaatgtgttgccagacttaacccagcagacactctgacatcacggagcttcac

SEQ ID NO: 263296 - DNA, 120 bp, Artificial Sequence
  ENSG00000125814_18 (sequence is synthesized)
tgatgacaggtaacgaaacttcctatgttatgtcaggtagtagtaagtagtattggaatgatgttttcatttttggtggctctcaactggaattggtagtgtttccaggccaagggtcga

SEQ ID NO: 263297 - DNA, 120 bp, Artificial Sequence
  ENSG00000125814_19 (sequence is synthesized)
ctgcaggttgtttgagaaatgatgagtaggtcagtctaggaagaaagagaaagtagcaggaaaggaagtgggaagggccagccaaggacagactgtagaggatccacatcaggtggccac

SEQ ID NO: 263298 - DNA, 120 bp, Artificial Sequence
  ENSG00000125814_20 (sequence is synthesized)
gaggacttgcaggctatagttatggtggtgacatgcatgaggtgggctggtagagcaggaagctctgtgatgtcagagcatctactgggactacaggtgcactgtagtccccactactgg

SEQ ID NO: 263299 - DNA, 120 bp, Artificial Sequence
  ENSG00000125814_21 (sequence is synthesized)
gggtggcaatgaagacactctgtctgttgggccctagaatttaatgtggatttcctccttccttccaagttctgagattcttaaatgagagctggctgtcttctagaggtaagacctgga

SEQ ID NO: 263300 - DNA, 120 bp, Artificial Sequence
  ENSG00000125814_22 (sequence is synthesized)
atggagtccagttggtactttttcactccctcttagaatctcttatgaaaaaatgatcagagagaaaagtggggttttgtttccccacctaataatatatcctacaaccagccaaatgca

SEQ ID NO: 263301 - DNA, 120 bp, Artificial Sequence
  ENSG00000125814_23 (sequence is synthesized)
cttttgtgaaaatggggtgtgaggagtggttctgcagcttgagtcctctggttttaagtagtttgtttctacttgtttaaagaatcttctggtctgaccacttaaagtaaaaactacatg

SEQ ID NO: 263302 - DNA, 120 bp, Artificial Sequence
  ENSG00000125814_24 (sequence is synthesized)
atttattttcgggcaattatgtttagctttcatcattatactccaacagacccgtctgaaggggtatttttttttaacaataatgtttgtaacattttgttgtgtcaattagagggtcac

SEQ ID NO: 263303 - DNA, 120 bp, Artificial Sequence
  ENSG00000125814_25 (sequence is synthesized)
ttgtttgtattgcaataaacactgggaccagttccggggttaagaattaatttttgtttttaatatttcacatgaaaagaatcaaagtaattgtaatggctagaagagacctgccagaag

SEQ ID NO: 263304 - DNA, 120 bp, Artificial Sequence
  ENSG00000125814_26 (sequence is synthesized)
attaaaaaaaagaatgagagaaaagcccagttagtggtgtgcaaacttacttcctttaaatgtcccatggatgtaggacagtgccatgtttcaagatgcctgtgagctaggtcttcaaga

SEQ ID NO: 263305 - DNA, 120 bp, Artificial Sequence
  ENSG00000125814_27 (sequence is synthesized)
tttatagaatgttacttatgaacaaaatataattatttatggtacaattcttgtactttagcaaatctggagttagttcatagtcaaagtcagttaatatttcttagaggaaagttttgc

SEQ ID NO: 263306 - DNA, 120 bp, Artificial Sequence
  ENSG00000125814_28 (sequence is synthesized)
tttttgtggcaacatttttatagcttgtgtgagttcttttttatttaatgatttgaaagcagtatttttgcacagtcgtgaccgtgtgtggtggcgtcactgtaaccaaagtatatgcac

SEQ ID NO: 263307 - DNA, 120 bp, Artificial Sequence
  ENSG00000125814_29 (sequence is synthesized)
cagcccttgtgcatttattgtttctcctgattttgtggatttaaatgtccaaatgcaaacctttgtgacttcctttggaggacttggcagcacagcatgcccccgtgacctgcctgctgt

SEQ ID NO: 263308 - DNA, 120 bp, Artificial Sequence
  ENSG00000125814_30 (sequence is synthesized)
ggtatgagctatgaccaagagcaggcttcctgctccatggagtcctgagttgctctggggcaggggattacgttatgaaaactaaccatgtgtaacaataaatctaccttagcagaaaaa

SEQ ID NO: 263309 - DNA, 120 bp, Artificial Sequence
  ENSG00000125814_31 (sequence is synthesized)
gtcctggtaaaaaggaatttttgtattttggaataatagagaattttgataaccttagggatttttcttttttaatcatttgggggcttttatgaggagaaattatgttaaatttatact

SEQ ID NO: 263310 - DNA, 120 bp, Artificial Sequence
  ENSG00000125814_32 (sequence is synthesized)
tactggctgtttactttatagcatcatttaattaaactcttatttatattgcattttagagaattttttggaaattacctttaattttatctaagacttcttatatcttaattttgtgaa

SEQ ID NO: 263311 - DNA, 120 bp, Artificial Sequence
  ENSG00000125814_33 (sequence is synthesized)
tttgaagaaaaatgcttttgttctgttaggtgacaacacctaagtgggattgggtatgaagtgaagttttaatctataaagtctgctaactgaggggccctggtactttcctgctttcgt

SEQ ID NO: 263312 - DNA, 120 bp, Artificial Sequence
  ENSG00000125814_34 (sequence is synthesized)
ctaacttggctcttgacttgtatatgagtatttcctcagttttgtgcaatatttggcaacattggtattatacttaaagtatatatttagaaatgggacttcatcttacagaactgtttt

SEQ ID NO: 263313 - DNA, 120 bp, Artificial Sequence
  ENSG00000125814_35 (sequence is synthesized)
ttaaaatatttttatgctaccagaaactcctagaagctcatgaagaacagaacagtgaagcttacactgaagcagtaagttatgcttttgggacatggtacattatttgaagatttaagt

SEQ ID NO: 263314 - DNA, 120 bp, Artificial Sequence
  ENSG00000125814_36 (sequence is synthesized)
taaagaaacttcttttccttttcattatgtgaattctaaacatttatttgaacatgactccagcataccttaagttgtattttccaaacgtcaccttttatatatcacacaaattaaaca

SEQ ID NO: 263315 - DNA, 120 bp, Artificial Sequence
  ENSG00000125814_37 (sequence is synthesized)
gttccattagccatgctgagattcgacttacactcaaaactaatttagctgtgagactagttcaggagcaaatattccatttatattcttataatttgctgttttaattttttcttttga

SEQ ID NO: 263316 - DNA, 120 bp, Artificial Sequence
  ENSG00000125814_38 (sequence is synthesized)
taattttttcttttgaaaataatctgacccataaataagtataaagtaaaattagttaaggccaggcacggcgtctcacacctgtaatcctggcactttcggaggccgaggcaggcagat

SEQ ID NO: 263317 - DNA, 120 bp, Artificial Sequence
  ENSG00000125815_0 (sequence is synthesized)
agagacccttgactgggccacaggcatgaactaagagtgctgaagacctaggagaaccactggtcaggtcagctcccagctccacagggagtaagaaggagctgcaggcacagcaggctg

SEQ ID NO: 263318 - DNA, 120 bp, Artificial Sequence
  ENSG00000125815_1 (sequence is synthesized)
aaagtccaccaagggctgaggccacaaggcctctggggcagccacagttttcatgatcacatcatacaggactgagaagcagataacaagagtgacgctcacagggctgggctgacgcta

SEQ ID NO: 263319 - DNA, 120 bp, Artificial Sequence
  ENSG00000125815_2 (sequence is synthesized)
acaggaggcagtgtgtggctcgaagattcttgaacccacagcagcagctgcggccaccccatcctgcccacagctccagccctgagacgacgaggaggagagtcgactttgcctcttgcc

SEQ ID NO: 263320 - DNA, 120 bp, Artificial Sequence
  ENSG00000125815_3 (sequence is synthesized)
ctggccctggtggccaggaaagacccaaaaaagaatgagacaggggtgctgaggaaattaaaacccgtcaatgcctcaaatgccaacgtgaagcagtgtctgtggtttgccatgcaagaa

SEQ ID NO: 263321 - DNA, 120 bp, Artificial Sequence
  ENSG00000125815_4 (sequence is synthesized)
tacaacaaagagagcgaggacaagtatgtcttcctggtggtcaagacactgcaagcccagcttcaggtcacaaatcttctggaataccttattgatgtagaaattgcccgcagcgattgc

SEQ ID NO: 263322 - DNA, 120 bp, Artificial Sequence
  ENSG00000125815_5 (sequence is synthesized)
agaaagcctttaagcactaatgaaatctgcgccattcaagaaaactccaagctgaaaaggaaattaagctgcagctttttggtaggagcacttccctggaatggtgaattcactgtgatg

SEQ ID NO: 263323 - DNA, 120 bp, Artificial Sequence
  ENSG00000125815_6 (sequence is synthesized)
gagaaaaagtgtgaagatgcttaatggtgttttgaggcatccctccaacctctgtgactactttatccatgaaaatgaagcaatggcaggtgggaggctcttcccaatgtgctttcttca

SEQ ID NO: 263324 - DNA, 120 bp, Artificial Sequence
  ENSG00000125816_0 (sequence is synthesized)
ccgactcctcgtcacaggctcagctgccgcggccgaggtggcggcgacgagcggccgccgcgtcctgccggcgcgcgccccaggcccccctacctggctgcccgccgagccatgtcgttg

SEQ ID NO: 263325 - DNA, 120 bp, Artificial Sequence
  ENSG00000125816_1 (sequence is synthesized)
ccgagccatgtcgttgagcccaaagcacacgacgcccttctccgtgtccgacatcctgagccccatcgaggagacctacaagaagttcagcggcgccatggacggcgcgccacccggcct

SEQ ID NO: 263326 - DNA, 80 bp, Artificial Sequence
  ENSG00000125816_2 (sequence is synthesized)
ccacctgggccctcctcgcaggcggcgaccgtggcgggcatgcagccttctcacgccatggcgggtcacaacgcggcggc

SEQ ID NO: 263327 - DNA, 120 bp, Artificial Sequence
  ENSG00000125816_3 (sequence is synthesized)
gcggcggcggcagcagctgcggcggcggcggccgccacctaccacatgccgcccggcgtctcgcagttcccgcacggcgccatgggcagctactgcaacggcggcctgggcaacatgggc

SEQ ID NO: 263328 - DNA, 120 bp, Artificial Sequence
  ENSG00000125816_4 (sequence is synthesized)
gggcgagctgcccgcctacacggacggcatgcggggcggcgcggccaccggctggtacggcgccaacccggacccacgctactcgtcaatctccaggttcatggggccgtcggcgggcgt

SEQ ID NO: 263329 - DNA, 120 bp, Artificial Sequence
  ENSG00000125816_5 (sequence is synthesized)
gaatgtggccggcatggggtcgctgaccggcatcgcggacgccgccaagtcgctgggcccgctgcacgcggcggcggcggcagccgctccgcgaaggaagcgccgcgtgctcttctcgca

SEQ ID NO: 263330 - DNA, 120 bp, Artificial Sequence
  ENSG00000125816_6 (sequence is synthesized)
ggcgcaggtctacgagctggagcggcgcttcaagcagcagaagtacctgtcggcgcccgagcgcgagcacctggccagcatgatccacctgacgcccacgcaggtcaagatctggttcca

SEQ ID NO: 263331 - DNA, 80 bp, Artificial Sequence
  ENSG00000125816_7 (sequence is synthesized)
ccccgcgccgcgtggcggtgcctgtgctggtcaaggacggcaagccgtgccagaacggcgccagcacgcccacccccggc

SEQ ID NO: 263332 - DNA, 80 bp, Artificial Sequence
  ENSG00000125816_8 (sequence is synthesized)
caggccggtccgcagccgccggccccgacgccagcacctgagctggaggagctgtcgcccagcccacccgcgctgcacgg

SEQ ID NO: 263333 - DNA, 120 bp, Artificial Sequence
  ENSG00000125816_9 (sequence is synthesized)
gagtacagcggcggcgtcctgggcgccaacctgctctatggcaggacgtggtgacagcgagggcgccccggggctaggtcctggtgcacccgaagggtctgcaagaaactgctagaacgg

SEQ ID NO: 263334 - DNA, 120 bp, Artificial Sequence
  ENSG00000125816_10 (sequence is synthesized)
atgggggaggcatgcgaaaaccgactcgcgcgtgtaaactgcgattcaaaacgaaccggtctcagagaggagcaggctgtgaacctcttgctgggggcgggggacagcgacagcccggaa

SEQ ID NO: 263335 - DNA, 120 bp, Artificial Sequence
  ENSG00000125816_11 (sequence is synthesized)
accgagtagtgtaacattatgccacgaggctttgaggtggtgattttctcctcctagaagttcttaaatgacgcgaaaaggtggagaagttcacacggcattcttaactacagctctcaa

SEQ ID NO: 263336 - DNA, 120 bp, Artificial Sequence
  ENSG00000125816_12 (sequence is synthesized)
agttggaaactttgttggcgtttgtaactataaaaatcaacccagctttaacaatcagtcctttttgaagtggaatttatcttgggagattaattttcgaagggccccctaagtgcaatt

SEQ ID NO: 263337 - DNA, 120 bp, Artificial Sequence
  ENSG00000125816_13 (sequence is synthesized)
tcattaatgtttgattgaaagtaaattgaagtgtagctcaaggtggatcatacacatagcaacattattgcagaggaattattgccatttaggtaatagagcaatggaatcaaaataaaa

SEQ ID NO: 263338 - DNA, 120 bp, Artificial Sequence
  ENSG00000125817_0 (sequence is synthesized)
gcggggggcgcgccgggatgggccccaagaggcgacagctgacgttccgggagaagtcacggatcatccaggaggtggaggagaatccggacctgcgcaagggcgagatcgcgcggcgct

SEQ ID NO: 263339 - DNA, 120 bp, Artificial Sequence
  ENSG00000125817_1 (sequence is synthesized)
tcaacatcccgccgtccacgctgagcacgatcctgaagaacaagcgcgccatcctggcgtcggagcgcaagtacggggtggcctccacctgccgcaagaccaacaagctgtctccctacg

SEQ ID NO: 263340 - DNA, 120 bp, Artificial Sequence
  ENSG00000125817_2 (sequence is synthesized)
acaagctcgagggcttgctcatcgcctggttccagcagatccgcgccgccggcctgccggtcaagggcatcatcctcaaggagaaggcgctgcgcatagccgaggagctgggcatggacg

SEQ ID NO: 263341 - DNA, 120 bp, Artificial Sequence
  ENSG00000125817_3 (sequence is synthesized)
catggacgacttcaccgcctccaacggctggctggaccgcttccgccggcgccacggcgtggtgtcctgcagcggcgtggcccgcgcccgcgcgcgaaacgctgccccccgcaccccggc

SEQ ID NO: 263342 - DNA, 120 bp, Artificial Sequence
  ENSG00000125817_4 (sequence is synthesized)
ccagtccggccgcggtgccctcggagggcagtggcgggagcactactggttggcgcgctcgggaggagcagccgccgtcggtggccgagggctacgcctcgcaggacgtgttcagcgcca

SEQ ID NO: 263343 - DNA, 120 bp, Artificial Sequence
  ENSG00000125817_5 (sequence is synthesized)
ccgagaccagtctatggtacgacttcctgcccgaccaggccgcggggctgtgcggaggcgacggacggccgcgtcaagccacccagcgcctgagcgtcctgctatgcgccaatgccgacg

SEQ ID NO: 263344 - DNA, 120 bp, Artificial Sequence
  ENSG00000125817_6 (sequence is synthesized)
gcagcgagaagctgcccccgctggtggccggcaagtcggccaagccccgcgcaggccaagccggcctgccctgcgactacaccgccaactccaagggtggtgtcaccacccaggccctgg

SEQ ID NO: 263345 - DNA, 120 bp, Artificial Sequence
  ENSG00000125817_7 (sequence is synthesized)
ccaagtacttgaaggccttggacacccgaatggctgcagagtctcgccgggtcctgctgttggccggccgcttggctgcccagtccttggacacctcgggcctgcggcatgtgcagctgg

SEQ ID NO: 263346 - DNA, 120 bp, Artificial Sequence
  ENSG00000125817_8 (sequence is synthesized)
ccttcttccctcccggcaccgtgcatccgctggagaggggagtggtccagcaggtgaagggccactaccgccaggccatgctgctcaaggccatggccgcgctagagggccaggatccct

SEQ ID NO: 263347 - DNA, 120 bp, Artificial Sequence
  ENSG00000125817_9 (sequence is synthesized)
caggcctgcagctgggtctcacggaggccctgcactttgtggctgccgcctggcaggcagtggagccttcggacatagccgcctgctttcgtgaggctggctttgggggtggccctaatg

SEQ ID NO: 263348 - DNA, 120 bp, Artificial Sequence
  ENSG00000125817_10 (sequence is synthesized)
cacttccctcaagagtgagggagaggaagaggaggaggaggaggaagaagaggaggaggaagagggtgaaggagaggaagaggaggaggaaggggaggaggaggaggaggaaggggggga

SEQ ID NO: 263349 - DNA, 120 bp, Artificial Sequence
  ENSG00000125817_11 (sequence is synthesized)
aggagaggaattgggggaggaagaggaggtggaggaggagggtgatgttgatagtgatgaagaagaggaggaagatgaggagagctcctcggagggcttggaggctgaggactgggccca

SEQ ID NO: 263350 - DNA, 120 bp, Artificial Sequence
  ENSG00000125817_12 (sequence is synthesized)
gggagtagtggaggccggtggcagcttcggggcttatggtgcccaggaggaagcccagtgccctactctgcatttcctggaaggtggggaggactctgattcagacagtgaggaagagga

SEQ ID NO: 263351 - DNA, 120 bp, Artificial Sequence
  ENSG00000125817_13 (sequence is synthesized)
cgatgaggaagaggatgatgaagatgaagacgacgatgatgatgaggaggatggtgatgaggtgcctgtacccagctttggggaggccatggcttactttgccatggtcaagaggtacct

SEQ ID NO: 263352 - DNA, 120 bp, Artificial Sequence
  ENSG00000125817_14 (sequence is synthesized)
gacctccttccccattgatgaccgcgtgcagagccacatcctccacttggaacacgatctggttcatgtgaccaggaagaaccacgccaggcaggcgggagttcgaggtcttggacatca

SEQ ID NO: 263353 - DNA, 120 bp, Artificial Sequence
  ENSG00000125817_15 (sequence is synthesized)
aagctgagtcactggacctagctgtgcccccaacctagattggcagcaccaccccagggcagaggactctctgggcacccgctgtgcatggagccagagtgcagagccccagatccttta

SEQ ID NO: 263354 - DNA, 120 bp, Artificial Sequence
  ENSG00000125817_16 (sequence is synthesized)
gtaatgcttcccctggtcctgcaacaggcccggtcacctcggccgggcccggggctgaggtcagcctcactgcctgcttattgcctctttctcagaatcctctttcctccccatttggcc

SEQ ID NO: 263355 - DNA, 120 bp, Artificial Sequence
  ENSG00000125817_17 (sequence is synthesized)
ctgggctcaggggaccaggtggggcgggtggggagctgtccggtgctaccacaccgtgccctcagtggactaaccacagcagcagccagggatgggccctggaggttcccggccggagag

SEQ ID NO: 263356 - DNA, 120 bp, Artificial Sequence
  ENSG00000125817_18 (sequence is synthesized)
tgcctctcccctctgccatccacgtcaggtctttggtggggggaccccaaagccattctgggaagggctccagaagaaggtccagcctaggccccctgcaaggctggcagcccccacccc

SEQ ID NO: 263357 - DNA, 120 bp, Artificial Sequence
  ENSG00000125817_19 (sequence is synthesized)
caccccccaggccgccttgagaagcacagtttaactcactgcgggctcctgagcctgcttctgcctgctttccacctccccagtccctttctctggccctgtccatgtgactttggccct

SEQ ID NO: 263358 - DNA, 120 bp, Artificial Sequence
  ENSG00000125817_20 (sequence is synthesized)
tggttttctttccagattggaggtttccaagaggccccccaccgtggaagtaaccaagggcgcttccttgtgggcagctgcaggccccatgcctctcctccctctctggcagggccccat

SEQ ID NO: 263359 - DNA, 120 bp, Artificial Sequence
  ENSG00000125817_21 (sequence is synthesized)
cctgggcagaggggcctggggctgggcccagagtccagccgtccagctgctcctttcccagtttgatttcaataaatctgtccactccccttttgtgggggtgaacgttttaacagccaa

SEQ ID NO: 263360 - DNA, 120 bp, Artificial Sequence
  ENSG00000125818_0 (sequence is synthesized)
agccaagttctttccatcatcctgggccctcacctctggcataggctcttggtagtgggggcccagacagggaggcacctgccacctgcttcccttctcagccacccacagccctcatag

SEQ ID NO: 263361 - DNA, 120 bp, Artificial Sequence
  ENSG00000125818_1 (sequence is synthesized)
ggcagaatgggactcttgctgatgtagacgccgaagtcgcgggcgctcatggcgggcctggaggtactgttcgcatcggcagcgccggccatcacctgcaggcaggacgcgctcgtctgc

SEQ ID NO: 263362 - DNA, 120 bp, Artificial Sequence
  ENSG00000125818_2 (sequence is synthesized)
ttcttgcattgggaagtggtgacacacggttacttcggcttgggtgtcggtgaccagccgggtcccaatgataagaagtcagaactgctgccagctgggtggaacaacaataaagacctg

SEQ ID NO: 263363 - DNA, 120 bp, Artificial Sequence
  ENSG00000125818_3 (sequence is synthesized)
tatgtcctccggtatgagtataaggatgggtccagaaagctccttgtgaaagccatcaccgtggagagcagcatgatcctcaatgtgctggaatatggctcacagcaagtggcagacttg

SEQ ID NO: 263364 - DNA, 120 bp, Artificial Sequence
  ENSG00000125818_4 (sequence is synthesized)
accctgaacttggatgattatatcgatgcagaacacctgggtgacttccacaggacctacaagaacagtgaggagcttcggtctcgtattgtgtctggaatcatcacacctatccatgag

SEQ ID NO: 263365 - DNA, 120 bp, Artificial Sequence
  ENSG00000125818_5 (sequence is synthesized)
cagtgggaaaaggctaatgtaagcagtccccaccgggagttcccccctgctaccgccagagaggtggacccactccggattcctccacaccacccacacaccagtcggcagcctccctgg

SEQ ID NO: 263366 - DNA, 120 bp, Artificial Sequence
  ENSG00000125818_6 (sequence is synthesized)
tgtgatcccctgggcccgtttgttgtcgggggagaagacttagacccttttgggcctcggagaggtggcatgattgtggatcccctgagatctggcttcccaagagcacttattgaccct

SEQ ID NO: 263367 - DNA, 120 bp, Artificial Sequence
  ENSG00000125818_7 (sequence is synthesized)
tcctcaggcctcccgaaccgacttcctccaggcgctgtgcccccaggagctcgctttgacccctttggacccattgggaccagcccacccggacctaacccagaccatctccccccgccg

SEQ ID NO: 263368 - DNA, 120 bp, Artificial Sequence
  ENSG00000125818_8 (sequence is synthesized)
ggctacgatgacatgtacctgtgaaggcctcaagaatgtaacatcccaggcttccctccattctcctggagctgccaccgctgtccccatcagcaaccatgttcttgcaggctgggggca

SEQ ID NO: 263369 - DNA, 120 bp, Artificial Sequence
  ENSG00000125818_9 (sequence is synthesized)
agggattctgctcatgtgtttgcagaccggctgggatagcctccccaccccttatcagagccaagacacctgctgcagctctccacctagctgcagatagctcccaaagagaaatcagtg

SEQ ID NO: 263370 - DNA, 120 bp, Artificial Sequence
  ENSG00000125818_10 (sequence is synthesized)
tgtctctttcaccatcagctcctcccctttcaccaccagctcctctccacttcccaagggagactccggcaaccttcagcaacatatatcctcgaccagatgcagtgctataagaacaga

SEQ ID NO: 263371 - DNA, 120 bp, Artificial Sequence
  ENSG00000125818_11 (sequence is synthesized)
acgcattttggatgttattattaagaaccaaatgtcaatacagaattcatgttgccggtttcccacttttctttttacattaatgcatagctgcttccatttatgagactttagagtttg

SEQ ID NO: 263372 - DNA, 120 bp, Artificial Sequence
  ENSG00000125818_12 (sequence is synthesized)
agtttctgtagggctgaatgactctttttcctgcccagggcccattcttgcttctcaggcaccttccgtttattaattgccattgctcctgacatcactaagatgggtccccttctggct

SEQ ID NO: 263373 - DNA, 120 bp, Artificial Sequence
  ENSG00000125818_13 (sequence is synthesized)
gcatgaatggaaatgagtgactggaaatcccataggccacaagaatgactttcacaagggcaggaacattgtggaaagactgcatcattctgatgaggcaaaatcctccagctattcctg

SEQ ID NO: 263374 - DNA, 120 bp, Artificial Sequence
  ENSG00000125818_14 (sequence is synthesized)
tctgggccagttttgtaggtccatctgtgcatgggcagcagtagtcaaaaagccaaggaaaaaacagagcagacctgaaggctaatcttatttttgccactaacttagtgaatgacccta

SEQ ID NO: 263375 - DNA, 120 bp, Artificial Sequence
  ENSG00000125818_15 (sequence is synthesized)
ttctgtgtttggtaacccctataaactggggcagaggaaaagaatgatggttcaaggccatacttcccttgaaccttgtgtggttcttgcctaactctgtggtttttggaccccatgggg

SEQ ID NO: 263376 - DNA, 120 bp, Artificial Sequence
  ENSG00000125818_16 (sequence is synthesized)
cccagacagagcacaggagcatgggctgcctctgagtgtggtgttgaacttcgggaggagcagggagccctgcaccttgtgtcctggcccacctgacctttggtgttctccggatccttt

SEQ ID NO: 263377 - DNA, 120 bp, Artificial Sequence
  ENSG00000125818_17 (sequence is synthesized)
tcagcccgaggcctgacagacgcgggcagtgatgagccctgttctggagtggaaagagcacgatagagcaccaggctaagaggcacgagatcaaggcggtagtcacttccgctctgcagc

SEQ ID NO: 263378 - DNA, 120 bp, Artificial Sequence
  ENSG00000125818_18 (sequence is synthesized)
tagcatttcaaccatatgtggatcctttcatttctcagctccctggattccttcccctaaattaggacctattatttacctgtaggtaagcaagctactgtagctcttctgaggtatctg

SEQ ID NO: 263379 - DNA, 120 bp, Artificial Sequence
  ENSG00000125818_19 (sequence is synthesized)
ccaggctgttttctgtagcctcagattgcctatctgcttagcctgagaacaggtagatgaaaactaaactgatgcctaggcccagggtcagtctcagatggaagctgggcctgggtgggg

SEQ ID NO: 263380 - DNA, 120 bp, Artificial Sequence
  ENSG00000125818_20 (sequence is synthesized)
aggctagcatgcgtggctccctgggtatttctgtcagtccccatggcaagcagtgatttagtaaaacaccccagagtcagggaagccaaccaccttgaaacctttagaacatctctgctt

SEQ ID NO: 263381 - DNA, 120 bp, Artificial Sequence
  ENSG00000125818_21 (sequence is synthesized)
tggagaaagacccagagatcaggcagaggtgcagattcaatcattactcataacctttgagagatggcaaatgggaggagtgttagtctttgttttggaattggaccattcttgcaacca

SEQ ID NO: 263382 - DNA, 120 bp, Artificial Sequence
  ENSG00000125818_22 (sequence is synthesized)
aaaggacttagagcagtttgctcataaagacatcctttattataaaaggaagtatttaaaggatgatagagaccatcagatagaagcagggaaggtagataacttttaggaccttgatgt

SEQ ID NO: 263383 - DNA, 120 bp, Artificial Sequence
  ENSG00000125818_23 (sequence is synthesized)
gaggaaaagataaaatttaaacaataaatttgccacttagattttctagcagcaaagtccgaaaagatagttatatacaaaattctgttttctgaaaacaaaattgtgattcaccttcag

SEQ ID NO: 263384 - DNA, 120 bp, Artificial Sequence
  ENSG00000125818_24 (sequence is synthesized)
aattggccattttttttgtgagtttccttgcatcaaggacactgagaaacacagtcattgtcttaggtgttctatgggaggaagtgaatagagcctttaggaacttcctggtcaagctta

SEQ ID NO: 263385 - DNA, 120 bp, Artificial Sequence
  ENSG00000125818_25 (sequence is synthesized)
tggtgcttattttgatctgggccacttccctccttccagtcatgagtaatcatcaaggagcaagttggagtgtttcaggtgtatattttgtagaacccaaaagattggagccttaacaat

SEQ ID NO: 263386 - DNA, 120 bp, Artificial Sequence
  ENSG00000125818_26 (sequence is synthesized)
aaacatcagcactaagtgacctgttcctccttttttaaatagcagctttattgagatataatttacatacccataatttacatacctgtttaaagtatacaattcagtggatttagtatg

SEQ ID NO: 263387 - DNA, 120 bp, Artificial Sequence
  ENSG00000125818_27 (sequence is synthesized)
ttcacagtgttgcacatccaccaccatttctaattcctgaacattttcaccacctcaaaaagaaaccacacacccattggcatgactccccattcccttgctcccagccccaggcaacca

SEQ ID NO: 263388 - DNA, 120 bp, Artificial Sequence
  ENSG00000125818_28 (sequence is synthesized)
ctaacatctgtctctaaagattttttttttttttctggacagttctcataagtggaatcactcagtattatggccttttgtgtctggcttctttcatttcatgtgatgttttcaagattc

SEQ ID NO: 263389 - DNA, 120 bp, Artificial Sequence
  ENSG00000125818_29 (sequence is synthesized)
attcatgctgtagcatgtatccatggtatggatatatcacattttgcttatccttttatcagttgatggacagttgggttgtttctacaaaaaggctattatgagtaatgcagccaagaa

SEQ ID NO: 263390 - DNA, 120 bp, Artificial Sequence
  ENSG00000125818_30 (sequence is synthesized)
ggcttccccgccccgccccgtccccgggcgtctccattttggtctcaggtgtggactcggcaagaaccagcgcaagagggaagcagagttatagctaccccggccgcggagccggctcac

SEQ ID NO: 263391 - DNA, 120 bp, Artificial Sequence
  ENSG00000125818_31 (sequence is synthesized)
tgtttgagtttcagatgttttcagttcatttgggtatataccaaggagtggaattgctggttcacatggtagctctatattctactttgtgaggaattgtcagactgttttccacggaag

SEQ ID NO: 263392 - DNA, 120 bp, Artificial Sequence
  ENSG00000125818_32 (sequence is synthesized)
ctgcaccattttacatttccactggtaatttatgagggttccagtttccccacatcttcaccaactcttgttatttttcatgcttatggccatcctagttagcgtgaagtagcatctcat

SEQ ID NO: 263393 - DNA, 120 bp, Artificial Sequence
  ENSG00000125818_33 (sequence is synthesized)
ggatgaacatggctggtgagctgcagagcagttgatttgacttttggggatggttctaggctggatgtgatacagggcaggttttgtctctagagaaagttctcatgaccttcaggtcta

SEQ ID NO: 263394 - DNA, 120 bp, Artificial Sequence
  ENSG00000125818_34 (sequence is synthesized)
atgagattcagatcatcactttggtttggtttgaaatttctttgtttatccagtgaattacaagtagaataaagatctggttctaaattgtcttttggtggtgaagtgccatagaccatt

SEQ ID NO: 263395 - DNA, 120 bp, Artificial Sequence
  ENSG00000125818_35 (sequence is synthesized)
tcggaccatttctatgatgtaccagcagcccccacatcacacctcctcttccttggcttgtctcttccccaattcttagagttagcagtgtttcttactgcattcatctcctcagtcata

SEQ ID NO: 263396 - DNA, 120 bp, Artificial Sequence
  ENSG00000125818_36 (sequence is synthesized)
agtgtctgtcaacctccgttgtgaagtcatgagtctcttgagactgaaactccaagaatgtattgtgctcacagtggcgatggtgttcctgtgctggatggtcagtggttgttgacatgt

SEQ ID NO: 263397 - DNA, 120 bp, Artificial Sequence
  ENSG00000125818_37 (sequence is synthesized)
agttagaaaataggtagcaagttccacgcagcctcactctttggaacctagtttctcctatggcctccctttctactgttgttaataacattctattaatgatccatgcctctcttcaca

SEQ ID NO: 263398 - DNA, 120 bp, Artificial Sequence
  ENSG00000125818_38 (sequence is synthesized)
ggaggaatattagaatctatggagcagttagtattctttgtcacctaaatttgtctacttctgtacatttccaataaggcaccaccagggcaagggaagattccccacatgtatatcccc

SEQ ID NO: 263399 - DNA, 120 bp, Artificial Sequence
  ENSG00000125818_39 (sequence is synthesized)
agctgtttctgtcataaaacttgcatgtgtataaaccactattgactttttgcaccaaaggagatattcaaggacagacatccaagtccccagccctttattgcccttgggataccacaa

SEQ ID NO: 263400 - DNA, 120 bp, Artificial Sequence
  ENSG00000125818_40 (sequence is synthesized)
ggcacagatacaggcagctgctgtgtggctctggagttcctaatccccagattgtagcaatgatgatgtgatcctgctgctctctggaccgtaacctttttggttacaaaaggtaaattt

SEQ ID NO: 263401 - DNA, 120 bp, Artificial Sequence
  ENSG00000125818_41 (sequence is synthesized)
ctgtttactgcatctgaaccccaggactaatgcgtcactgcattaaccccaggacacatggaccaagtcactgcggccgtacttggccctgaatctgtcctggagggtgggtcaaaaggc

SEQ ID NO: 263402 - DNA, 120 bp, Artificial Sequence
  ENSG00000125818_42 (sequence is synthesized)
aagggtggcaggtaggatggtaggcagtgaggggtggcaaggcctagctgactgaggacagacccagcaacaatgacaggaggtttgaacacctcacgagtggtagtgcccatgggaggt

SEQ ID NO: 263403 - DNA, 120 bp, Artificial Sequence
  ENSG00000125818_43 (sequence is synthesized)
gcgaagtggaaggcccagcccttgcttggaggaacgtgaggctgatggtgcagtgcaatagaggtcactggatgcccatttgaacagctgcgttccagatgagccacctaaggtggatgt

SEQ ID NO: 263404 - DNA, 120 bp, Artificial Sequence
  ENSG00000125818_44 (sequence is synthesized)
tgtgagagtcacagtgggtttagagggacaaggtagtgagaggatgctgctgacgcattagtcctgggattcagctgcagtaaacagaaatttaccttttgtaaccaaaaaggtaatggt

SEQ ID NO: 263405 - DNA, 120 bp, Artificial Sequence
  ENSG00000125818_45 (sequence is synthesized)
ccagagagcagcaggatcacatcatcattgctacaatctggggattaggaactccagagccacacagcagctgcctatatctgcaccaaaaagtagatgtccttcacactgccatctgga

SEQ ID NO: 263406 - DNA, 120 bp, Artificial Sequence
  ENSG00000125818_46 (sequence is synthesized)
caccactcagctagctcatccaagttcaaggctcaattgaatgcgtctggttgttggaacctacatggcctctcaaatggtactggcatggaatattggggagatgtctttattccctct

SEQ ID NO: 263407 - DNA, 120 bp, Artificial Sequence
  ENSG00000125818_47 (sequence is synthesized)
tcccacctttcctggaaggtgcactgggacagaggtctagtgagccaatcttctgtgttgtctacgccatggaccatgatataaatgggtaccacagccttgcatgcctgagcctaacca

SEQ ID NO: 263408 - DNA, 120 bp, Artificial Sequence
  ENSG00000125818_48 (sequence is synthesized)
tctcctgagatgcttgctctaagtacacattagtacatgctgggccccaatctagatctcaagggaacggccttcagatccatttttgacaagttccttttgtgagtcctatgatcatgc

SEQ ID NO: 263409 - DNA, 120 bp, Artificial Sequence
  ENSG00000125818_49 (sequence is synthesized)
aagtttgagaactgagaagggaggggaagacctacctccttgttactcagaccaccagcaacagcagcatcacctgggaacctgttacacatgcagaatctcaagccccaccccagacat

SEQ ID NO: 263410 - DNA, 120 bp, Artificial Sequence
  ENSG00000125818_50 (sequence is synthesized)
tgaatgagaatctgcattttaacaagttctccatgagatttgtgtaaacttaaagtgagagaagctcacatggactatgtctttttcctttacgtgaatatcgagtacaaagaattgagc

SEQ ID NO: 263411 - DNA, 120 bp, Artificial Sequence
  ENSG00000125818_51 (sequence is synthesized)
cagtcagtcctcttggttaatggcacattatgattaatgcatgcatgaactctgattcgaagttttcgttgattttacccccagtatccactccattcctttgcccccatgggtcactta

SEQ ID NO: 263412 - DNA, 120 bp, Artificial Sequence
  ENSG00000125818_52 (sequence is synthesized)
gatgtgtttcatgttatctttaaaaatgcagcacctttatagcatacattatatcttcaaaccataaccataatgaggtgttatccccatttcctgtaccagaaaaggaaggattgggaa

SEQ ID NO: 263413 - DNA, 120 bp, Artificial Sequence
  ENSG00000125818_53 (sequence is synthesized)
ggtccagtaatttgctcagggtcaagcaggagtctcagactcagtcaagcgtggttactcacagccctccctttctcagtgtgtggccttcctcatccacaaaatgagcatcacccctac

SEQ ID NO: 263414 - DNA, 120 bp, Artificial Sequence
  ENSG00000125818_54 (sequence is synthesized)
ctgcaggattcttgcaagatccaaccaaataatgtgtcttattaacagagagttggggctcggtgggtgcttgctgcaattgttactaaagtcatatgggtagataagggtgggactcaa

SEQ ID NO: 263415 - DNA, 120 bp, Artificial Sequence
  ENSG00000125818_55 (sequence is synthesized)
ggacaagagaggaaccttggaatatcccccagtgcaggaaacaagcatttatcaggtgcacacagcgtgctaggcttctcctcatcgcatgtagtacccctgacaaccccaaggtaaaca

SEQ ID NO: 263416 - DNA, 120 bp, Artificial Sequence
  ENSG00000125818_56 (sequence is synthesized)
cagctagtggcattagttgagatgctgcacctaccccctggggtggcagaaccgtgattggaacccaggtcagtgctcttttcagtagaactgctgtacccagacctcacatcctctcta

SEQ ID NO: 263417 - DNA, 120 bp, Artificial Sequence
  ENSG00000125818_57 (sequence is synthesized)
ggtgaggtgcatgggtccctgggcaaaacccattccagaagctgggaaaccacgtcaggacttgtgtgagaaaggagtgatgcttcataatccccaggatggtcttaaggctcctcagtc

SEQ ID NO: 263418 - DNA, 120 bp, Artificial Sequence
  ENSG00000125818_58 (sequence is synthesized)
agtcctatttgcacagcgtgcctcatgctcctgagtacctccacctgcagccacagtgcccagagcacctggttaggaggagcatctgaaaccacctgcacaacctccattccacagagg

SEQ ID NO: 263419 - DNA, 120 bp, Artificial Sequence
  ENSG00000125818_59 (sequence is synthesized)
aagaaacaggctcaagaaacccatatgtgatggggagctcctaacaggcttccctgggccacaggaatgggctcgggctctctgctgggctctgtcacctggctccatgtgctgctcacc

SEQ ID NO: 263420 - DNA, 120 bp, Artificial Sequence
  ENSG00000125818_60 (sequence is synthesized)
tcggccttctgagtttagtaggatggcagctagtcttccctattgacaggtgaaaaagcaggtccacagctgttgagtgactttcccaaggccacacagaccacaaatcctggctccaag

SEQ ID NO: 263421 - DNA, 120 bp, Artificial Sequence
  ENSG00000125818_61 (sequence is synthesized)
tccagggcgtttccagtaagcactgtccaaatcagtcatggaggtccctgagtgacaaaaatatgcaggaccccttctttccccctcccagttcccgcagctaggctgagtgttaagagg

SEQ ID NO: 263422 - DNA, 120 bp, Artificial Sequence
  ENSG00000125818_62 (sequence is synthesized)
aaggtgccatacaggttcagcaccctggtcagcgcccagcctccctaaagccgctggaggaggcctttggagccagctcaggtcagtgtctgctgcttccttacccaggatggcccactc

SEQ ID NO: 263423 - DNA, 120 bp, Artificial Sequence
  ENSG00000125818_63 (sequence is synthesized)
ttggggacagacaggcatcctgagaggagggggcctggacctaggtgtcttgccacccaatacagagccctgccctctccctctccttcagaaggaagtatgggagcagttccatcctca

SEQ ID NO: 263424 - DNA, 120 bp, Artificial Sequence
  ENSG00000125818_64 (sequence is synthesized)
aggtttcttggttcccaggacagaaatttgagtgagaagcatgtgaagagagggatggcccaggggcccttggccatggtggccttggacaagtttggctttccccatctgtaaaatgta

SEQ ID NO: 263425 - DNA, 120 bp, Artificial Sequence
  ENSG00000125818_65 (sequence is synthesized)
gataaggatggacccacctccccaagatcctgcctatctgtgagagtccatgactaagtgggccatgggctggactgagttcagtgctcccccaacctgccctcctcctctcccccacag

SEQ ID NO: 263426 - DNA, 120 bp, Artificial Sequence
  ENSG00000125818_66 (sequence is synthesized)
agcttcccaatttacatgtaaaccttgggcatcaaagtgacagctgatagcccaggtttgcccacaaatgtgctctgactggcgtgcatgttattaaatttgataagatgcatgatggca

SEQ ID NO: 263427 - DNA, 120 bp, Artificial Sequence
  ENSG00000125818_67 (sequence is synthesized)
gccctgtgcccctacaccctcacctctttctaatggggtggtaaacaaggaggggcaactcagatgcctaagaagcttgggcccaaatctcagagacagcgtggggctgttgcccccctc

SEQ ID NO: 263428 - DNA, 120 bp, Artificial Sequence
  ENSG00000125818_68 (sequence is synthesized)
acccaggtccagcaggcggcctgttcccccacttataaacaggccaagcgcaatgccaggagctatcagggccgccgccgccgccgtcgttgcagccagaataccacttccagggttcct

SEQ ID NO: 263429 - DNA, 120 bp, Artificial Sequence
  ENSG00000125818_69 (sequence is synthesized)
ggcccagatggagggcctccctgactttgtcaggagcaagagacatactatggaggagaaggtgatcaaggcctgcatcatgcccacagaaatacaataaagccctcaccctttcctgtg

SEQ ID NO: 263430 - DNA, 120 bp, Artificial Sequence
  ENSG00000125818_70 (sequence is synthesized)
ggctcttggtagtgggggcccagacagggaggcacctgccacctgcttcccttctcagccacccacagccctcatagggcagaatgggactcttgctgatgtagccgggtcccaatgata

SEQ ID NO: 263431 - DNA, 120 bp, Artificial Sequence
  ENSG00000125818_71 (sequence is synthesized)
caaattcatggagacgtttcctctttggggaacacacgccaaccccagagacagctttggtctgaatcgtgcaggttccgggaagacacggtgaccagctgaatcgtgtggtctcgctgc

SEQ ID NO: 263432 - DNA, 120 bp, Artificial Sequence
  ENSG00000125818_72 (sequence is synthesized)
agtctagtcatcagataaacatcagacaaatcccaatgaagaaaattctacaaaacatctgactagttctcctcaaaggtcatcaaaacaaggaaagtctgagaaattgtcacaaacgat

SEQ ID NO: 263433 - DNA, 120 bp, Artificial Sequence
  ENSG00000125818_73 (sequence is synthesized)
aggaacctaaaaagacataacgactcaatgtagtgtggtacccttgatagaatactggaacaggaaaaggaaattttgcaaaaactatggaaatataaataaagtatggactttagctaa

SEQ ID NO: 263434 - DNA, 120 bp, Artificial Sequence
  ENSG00000125818_74 (sequence is synthesized)
cccagatggagggcctccctgactttggcctggcccccatccccattgagctgtctcatgcgcaggttaatggagccgtaggtcttcctggagcccttgccggggacgaaggtcctccgg

SEQ ID NO: 263435 - DNA, 120 bp, Artificial Sequence
  ENSG00000125818_75 (sequence is synthesized)
cggtacagctcgcccttgcacagggagaccatgagcagcaccgacaagagcatgccgcccaccgtgagcagcccgaggcctgcgatgatgcacctgtccaggtgggagcctaggcgggcg

SEQ ID NO: 263436 - DNA, 120 bp, Artificial Sequence
  ENSG00000125818_76 (sequence is synthesized)
tagtacatctccagtcgttccatctcccgcgctgtcactgtgtccggattgactcgagcctcacgggggatggcgtatgctgtcaccaccagaagaatcccactcaccaggaaaacgagg

SEQ ID NO: 263437 - DNA, 120 bp, Artificial Sequence
  ENSG00000125818_77 (sequence is synthesized)
gcggaaacaaagccataatccaccgggcggctcacgggctccagggctggcccctcctctgaatgaagggacagatcatcccgctgggatcggggcagtgaggagacacccccaggggga

SEQ ID NO: 263438 - DNA, 120 bp, Artificial Sequence
  ENSG00000125818_78 (sequence is synthesized)
ctgggtgagctgcccagtctcgtgttcccagggttctggaaatgggtctcatgctcctctgaggagaagcaggcattctccacaccctccctggttggggccactgggcccaggggagct

SEQ ID NO: 263439 - DNA, 120 bp, Artificial Sequence
  ENSG00000125818_79 (sequence is synthesized)
gatctccttggggcttggggaccattgctcagtgtcttcagttccagaccagggggagatgccattgggaaggagggccccagctcatcccttggccccttggcagctggaagagaaaaa

SEQ ID NO: 263440 - DNA, 120 bp, Artificial Sequence
  ENSG00000125818_80 (sequence is synthesized)
agaaagtcagttgaatgtagcaacctctccctgttgtggaggacatcataccagtccctaagcacatgaaggtgagtcaggcacaattcccacttgggggtgtctgccagacagagggga

SEQ ID NO: 263441 - DNA, 120 bp, Artificial Sequence
  ENSG00000125818_81 (sequence is synthesized)
agacagggaataagacgatgacagaacagtgtgatccaagcccagatcccactctaccaccgggtggggtatggctgtgggcaattcactaatcctgtctggcttcagtttccccaccta

SEQ ID NO: 263442 - DNA, 120 bp, Artificial Sequence
  ENSG00000125818_82 (sequence is synthesized)
taaaataatactactactaccctctagttcgcaaagctggagtaggattgagataacctatacgaagtactcagaacactaagtgctcaaagttagcgatgagttcctattatactggag

SEQ ID NO: 263443 - DNA, 120 bp, Artificial Sequence
  ENSG00000125818_83 (sequence is synthesized)
ggaatgtaggtagtgtgaatatcaggctcaaatcccagcttcaccacttgggcttgggcaagtgatgtgacctctccagattcggtcttcatcttatctataaaatggtaatgaataaaa

SEQ ID NO: 263444 - DNA, 120 bp, Artificial Sequence
  ENSG00000125820_0 (sequence is synthesized)
ccattttttcctcgccaccagccgccaccgcgcgccgagcggccgccggagcccgagctgacgccgccttggcacccctcctggagttagaaactaaggccggggcccgcggcgctcggc

SEQ ID NO: 263445 - DNA, 120 bp, Artificial Sequence
  ENSG00000125820_1 (sequence is synthesized)
gcgcaggccgcccggcttcctgcgtccatttccgcgtgctttcaaagaagacagagagaggcactgggttgggcttcatttttttcctccccatccccagtttctttctctttttaaaaa

SEQ ID NO: 263446 - DNA, 120 bp, Artificial Sequence
  ENSG00000125820_2 (sequence is synthesized)
taataattatcccaataattaaagccaattcccccctcccctcccccagtccctccccccaactcccccctcccccgcccgccggggcaggggagcgccacgaattgaccaagtgaagct

SEQ ID NO: 263447 - DNA, 120 bp, Artificial Sequence
  ENSG00000125820_3 (sequence is synthesized)
acaactttgcgacataaattttggggtctcgaaccatgtcgctgaccaacacaaagacggggttttcggtcaaggacatcttagacctgccggacaccaacgatgaggagggctctgtgg

SEQ ID NO: 263448 - DNA, 120 bp, Artificial Sequence
  ENSG00000125820_4 (sequence is synthesized)
ccgaaggtccggaggaagagaacgaggggcccgagccagccaagagggccgggccgctggggcagggcgccctggacgcggtgcagagcctgcccctgaagaaccccttctacgacagca

SEQ ID NO: 263449 - DNA, 120 bp, Artificial Sequence
  ENSG00000125820_5 (sequence is synthesized)
gcgacaacccgtacacgcgctggctggccagcaccgagggccttcagtactccctgcacggtctggctgccggggcgccccctcaggactcaagctccaagtccccggagccctcggccg

SEQ ID NO: 263450 - DNA, 120 bp, Artificial Sequence
  ENSG00000125820_6 (sequence is synthesized)
acgagtcaccggacaatgacaaggagaccccgggcggcgggggggacgccggcaagaagcgaaagcggcgagtgcttttctccaaggcgcagacctacgagctggagcggcgctttcggc

SEQ ID NO: 263451 - DNA, 120 bp, Artificial Sequence
  ENSG00000125820_7 (sequence is synthesized)
agcagcggtacctgtcggcgcccgagcgcgaacacctggccagcctcatccgcctcacgcccacgcaggtcaagatctggttccagaaccaccgctacaagatgaagcgcgcccgggccg

SEQ ID NO: 263452 - DNA, 120 bp, Artificial Sequence
  ENSG00000125820_8 (sequence is synthesized)
gcgctcaaagcccaggacctggcagccgccaccttccaggcgggcattcccttttctgcctacagcgcgcagtcgctgcagcacatgcagtacaacgcccagtacagctcggccagcacc

SEQ ID NO: 263453 - DNA, 120 bp, Artificial Sequence
  ENSG00000125820_9 (sequence is synthesized)
ccccagtacccgacagcacaccccctggtccaggcccagcagtggacttggtgagcgccgccccaacgagactcgcggccccaggcccaggccccaccccggcggcggtggcggcgagga

SEQ ID NO: 263454 - DNA, 120 bp, Artificial Sequence
  ENSG00000125820_10 (sequence is synthesized)
ggcctcggtccttatggtggttattattattattataattattattatggagtcgagttgactctcggctccactagggaggcgccgggaggttgcctgcgtctccttggagtggcagat

SEQ ID NO: 263455 - DNA, 120 bp, Artificial Sequence
  ENSG00000125820_11 (sequence is synthesized)
tccacccacccagctctgcccatgcctctccttctgaaccttgggagagggctgaactctacgccgtgtttacagaatgtttgcgcagcttcgcttctttgcctctccccggggggacca

SEQ ID NO: 263456 - DNA, 120 bp, Artificial Sequence
  ENSG00000125820_12 (sequence is synthesized)
aaccgtcccagcgttaatgtcgtcacttgaaaacgagaaaaagaccgaccccccacccctgctttcgtgcattttgtaaaatatgtttgtgtgagtagcgatattgtcagccgtcttcta

SEQ ID NO: 263457 - DNA, 120 bp, Artificial Sequence
  ENSG00000125820_13 (sequence is synthesized)
aagcaagtggagaacactttaaaaatacagagaatttcttcctttttttaaaaaaaaataagaaaatgctaaatatttatggccatgtaaacgttctgacaactggtggcagatttcgct

SEQ ID NO: 263458 - DNA, 120 bp, Artificial Sequence
  ENSG00000125820_14 (sequence is synthesized)
tttcgttgtaaatatcggtggtgattgttgccaaaatgaccttcaggaccggcctgtttcccgtctgggtccaactcctttctttgtggcttgtttgggtttgttttttgttttgttttt

SEQ ID NO: 263459 - DNA, 120 bp, Artificial Sequence
  ENSG00000125820_15 (sequence is synthesized)
gtttttgcgttttcccctgctttcttcctttctctttttattttattgtgcaaacatttctcaaatatggaaaagaaaaccctgtaggcagggagccctctgccctgtcctccgggcctt

SEQ ID NO: 263460 - DNA, 120 bp, Artificial Sequence
  ENSG00000125820_16 (sequence is synthesized)
cagccccgaacttggagctcagctattcggcgcggttccccaacagcgccgggcgcagaaagctttcgattttttaaataagaattttaataaaaatcctgtgtttaaaaaagaaaaaaa

SEQ ID NO: 263461 - DNA, 120 bp, Artificial Sequence
  ENSG00000125821_0 (sequence is synthesized)
ctatcgccaggccgagagtgggcgtggccgacgtggggtgggtagcagccgaccgagtcggaccggccagttgggcgcgcttccgggtgtcacctccagagggcgccggctgcggagccg

SEQ ID NO: 263462 - DNA, 120 bp, Artificial Sequence
  ENSG00000125821_1 (sequence is synthesized)
ccctcagagtcgcgaggccggacgcagcgcggcgccgccccactcgccccagccgccgccatgaaggccgtggtgcagcgcgtcacccgggccagcgtcacagttggaggagagcagatt

SEQ ID NO: 263463 - DNA, 120 bp, Artificial Sequence
  ENSG00000125821_2 (sequence is synthesized)
agtgccattggaaggggcatatgtgtgttgctgggtatttccctggaggatacgcagaaggaactggaacacatggtccgaaagattctaaacctgcgtgtatttgaggatgagagtggg

SEQ ID NO: 263464 - DNA, 120 bp, Artificial Sequence
  ENSG00000125821_3 (sequence is synthesized)
aagcactggtcgaagagtgtgatggacaaacagtacgagattctgtgtgtcagccagtttaccctccagtgtgtcctgaagggaaacaagcctgatttccacctagcaatgcccacggag

SEQ ID NO: 263465 - DNA, 120 bp, Artificial Sequence
  ENSG00000125821_4 (sequence is synthesized)
caggcagagggcttctacaacagcttcctggagcagctgcgtaaaacatacaggccggagcttatcaaagatggcaagtttggggcctacatgcaggtgcacattcagaatgatgggcct

SEQ ID NO: 263466 - DNA, 120 bp, Artificial Sequence
  ENSG00000125821_5 (sequence is synthesized)
tcgaaaaacagcagcagaggaaagaaaagaccagagctaagggaccttctgaatcaagcaaggaaagaaacactccccgaaaagaagaccgcagtgccagcagcggggctgagggcgacg

SEQ ID NO: 263467 - DNA, 120 bp, Artificial Sequence
  ENSG00000125821_6 (sequence is synthesized)
tgtcctctgaacgggagccgtagctcaggaggcagaattcagtgtgttatcattgggcagaactggatcctgaaaaattcaagatgctaagcacctacactactttaagaatttggaact

SEQ ID NO: 263468 - DNA, 120 bp, Artificial Sequence
  ENSG00000125821_7 (sequence is synthesized)
gaaacatgaagaggaagacagaaataagaatttgggaacctgaatagctctgcaaaaaacaccaaaggaccgttttatcgttttctgttgttgctgtggtggagtgatgcagtgggcact

SEQ ID NO: 263469 - DNA, 120 bp, Artificial Sequence
  ENSG00000125821_8 (sequence is synthesized)
gccggtgggccagggggcgggtgcgcatgtggtagaaggtgtgcgctcgtgcctcccccacagaaaggctttgttggtttctaccacatcttggcttgcttttggaacaggctggcccag

SEQ ID NO: 263470 - DNA, 120 bp, Artificial Sequence
  ENSG00000125821_9 (sequence is synthesized)
catcatttgtcatcaagtccactgtggtgtattctgcgtgtccatggcgggggttctccaatacactcacactgtccatgttctttttattgccagggcccgtgttgaagtgtcaagaga

SEQ ID NO: 263471 - DNA, 120 bp, Artificial Sequence
  ENSG00000125821_10 (sequence is synthesized)
gcaatcatcaatgataatgtattgtgtgagacctttgcatcttgtaaattttctcttttttctaaaaataaataataataaaatcctaaatctcaacaaaccactttattatcaaacaaa

SEQ ID NO: 263472 - DNA, 120 bp, Artificial Sequence
  ENSG00000125821_11 (sequence is synthesized)
tacaggtgtgaactaccgcgcccagccaaagttcactaggttttttaaatgtcttttttctgctccgggataatgcaggattccacacggcatttagttgtcatttctgcttagtcttct

SEQ ID NO: 263473 - DNA, 120 bp, Artificial Sequence
  ENSG00000125821_12 (sequence is synthesized)
ccaatctgtgacagttcctcagcctttccttgtcttttgtgacattgatacttttcaagagtactagtctactgttttgtagaatgtttctcactttgggttttctatgattatattgag

SEQ ID NO: 263474 - DNA, 120 bp, Artificial Sequence
  ENSG00000125821_13 (sequence is synthesized)
gtaatacatgttgacaggaataggaaatagcacagaagtgatcttgtgcccttcatagtgcatcctaccaggaggtatgtggtattgatttgtcttgttacctgtgataccagccttatt

SEQ ID NO: 263475 - DNA, 120 bp, Artificial Sequence
  ENSG00000125821_14 (sequence is synthesized)
acttggttcaggtgaagtctaccagatacctccatgttagatgaagtgctaacctctttccccttgtctgtcctctggctcattcacagcagacagctctctctcagctttgcagggaaa

SEQ ID NO: 263476 - DNA, 120 bp, Artificial Sequence
  ENSG00000125821_15 (sequence is synthesized)
gaagccagcagatggcattgactctgcttctctatcccccttctgccaccgtggtagcagagctaccctttcctgggctgagtccagcctctccctggggccaggaccagctacataatt

SEQ ID NO: 263477 - DNA, 120 bp, Artificial Sequence
  ENSG00000125821_16 (sequence is synthesized)
agtgtaaaatgaaaatgtggggccccttgttcaaaaaatattacaaatttcaaggtggtgacatagagcataaaacgaaaggtggggcccctctgaagatggggcctgtgtgactgctcg

SEQ ID NO: 263478 - DNA, 120 bp, Artificial Sequence
  ENSG00000125821_17 (sequence is synthesized)
gctgtgggtctagactgacctgggctttggagcccttcccttccacctcctcagcagcttcctggaagcctctgtcctcttgttggttctgtctgcctctcacagtcatccatcttatcc

SEQ ID NO: 263479 - DNA, 120 bp, Artificial Sequence
  ENSG00000125821_18 (sequence is synthesized)
cattgggttttaaatatgcccaaatgtctccaattgagaaatgcttccatttcctcccttctgctctgccacagtgtccttgggtctgtaaaggttctcaccgagggccccagtgacctc

SEQ ID NO: 263480 - DNA, 120 bp, Artificial Sequence
  ENSG00000125821_19 (sequence is synthesized)
acattgctttatttcatgcccatttttcagaacacttttcttgccactgctgcccacttttgcccctggaaatggctggagccttgtttcccaggacgtcattctctctgggtttttgtc

SEQ ID NO: 263481 - DNA, 120 bp, Artificial Sequence
  ENSG00000125821_20 (sequence is synthesized)
ttgcctctggctactccctctggttttatttgatcattattccatagtttttagttattattctgctttaactctatttggagaaaaattttagtctttttttcattctaaatatttttc

SEQ ID NO: 263482 - DNA, 120 bp, Artificial Sequence
  ENSG00000125821_21 (sequence is synthesized)
tggaaatggtagaatagtacattttgcctttagaatcttcacctttctttcaaccagtaccctcttcttgtttaggtcaaagggtacaaagatgcagttattttgggtgagtaagtctca

SEQ ID NO: 263483 - DNA, 120 bp, Artificial Sequence
  ENSG00000125821_22 (sequence is synthesized)
agatctaatgtacaccataaggagtgcagtatcatattgtgcactgggagtagatttaggaattctcagcacacacagaataaaggacggtaactgtgtgagatgctggacatgtaattt

SEQ ID NO: 263484 - DNA, 120 bp, Artificial Sequence
  ENSG00000125821_23 (sequence is synthesized)
acttgactgtagtaatcacttcactatgtgtatgtagatcagagcatcatgctgtacaccttatacaataaatccctctccccaaatcaaaaaatcctcaagtaggcattttttaaactt

SEQ ID NO: 263485 - DNA, 120 bp, Artificial Sequence
  ENSG00000125821_24 (sequence is synthesized)
ctaacgagccatgttaacttataaggattaaaaaagacttttagttatttctgaatcctttaggagttttctcctcaaatacacaaattgtcttgcatcaacttcatttacatggaccag

SEQ ID NO: 263486 - DNA, 120 bp, Artificial Sequence
  ENSG00000125821_25 (sequence is synthesized)
tttcctggcccccagaagcctcagaccctgaacattgcactgcgctctgcccctagctctccagtaggtggcggtgggtaggcgcagaagcggcctgtgttaggttggtgctggcctgtg

SEQ ID NO: 263487 - DNA, 120 bp, Artificial Sequence
  ENSG00000125821_26 (sequence is synthesized)
cctggggcctctctctgccttttcttctgaattagaaggagtttcctcttggagcaaatagctaatttgcttgcttttgtgttgataggaggagcacagccaaattctttttactgatag

SEQ ID NO: 263488 - DNA, 120 bp, Artificial Sequence
  ENSG00000125821_27 (sequence is synthesized)
ataaacacgtgtttctatcaattaagcttttaattctcagtgttttatttttccattatattccaatcagtaatgaaaactgctacaattacattaaagaaaaatggttcttttggcaaa

SEQ ID NO: 263489 - DNA, 120 bp, Artificial Sequence
  ENSG00000125821_28 (sequence is synthesized)
acaggccggagcttatcaaagacacactgttttagttattgaggatttttactatgctttcctaccagatggcaagtttggggcctacatgcaggtgcacattcagaatgatgggcctgt

SEQ ID NO: 263490 - DNA, 120 bp, Artificial Sequence
  ENSG00000125821_29 (sequence is synthesized)
tctctctatgcgtatctacacttcttttcacataagtctctcgcaagagggccttctctaactggcccacacaggctcctgagtccaggtgggagcctgtctagccagtttacaattgat

SEQ ID NO: 263491 - DNA, 120 bp, Artificial Sequence
  ENSG00000125821_30 (sequence is synthesized)
gacatggtacttggaagtgagatgtcaggaaaagggagtgtgggtcagaagatagtccagtttcagaatggccacactgttctgagaccaagtgtggagccacatctggtgtatccagct

SEQ ID NO: 263492 - DNA, 120 bp, Artificial Sequence
  ENSG00000125821_31 (sequence is synthesized)
ttgggaggtggaggaaggcctcagcatggcgggtggtgcagataccctttatccagtagctacatggttgtccatgtatccaagtcaccacacccagcactctgggaagaaagaatcaca

SEQ ID NO: 263493 - DNA, 120 bp, Artificial Sequence
  ENSG00000125821_32 (sequence is synthesized)
ttctgccaaagtaatttctcagttaaatttcagtctactggtggcacactcagagtagtcattttttgacatatgatttaatagctttatttatatatctaataacgctcgcatatatgc

SEQ ID NO: 263494 - DNA, 120 bp, Artificial Sequence
  ENSG00000125821_33 (sequence is synthesized)
tctctggaaaatatttttgtatatagaagagacatccttaattgtgatttttataatgctgaaactctgtcttctgtgacctctataataacttctgaatccatctagtctgacccagtc

SEQ ID NO: 263495 - DNA, 120 bp, Artificial Sequence
  ENSG00000125821_34 (sequence is synthesized)
tggaaaacaaaaaagctcaaaacacatctcttggaatatagagttggaaaagggtctgccagactgctttgttctaaaccaattcagatggtccagtgtaattcacaatggtttaaacct

SEQ ID NO: 263496 - DNA, 120 bp, Artificial Sequence
  ENSG00000125821_35 (sequence is synthesized)
ctagatttgaagtcattacatcccagatgcagaccctggccagctccctaagctgtgtgggcagtgaggtcccagaagctctgctgtttgagttatctaagcagggttttacagagtgaa

SEQ ID NO: 263497 - DNA, 120 bp, Artificial Sequence
  ENSG00000125821_36 (sequence is synthesized)
ttcaaattcactttaaagctacttgaacctacatgtcgataaactcagttgtagggtttggcttgctggataactgtcatgtttctccaccacagcattttattgccaccaattaatgct

SEQ ID NO: 263498 - DNA, 120 bp, Artificial Sequence
  ENSG00000125821_37 (sequence is synthesized)
tattgaacagttgcagcctgtccttgtagtaaggggtaacgaggattgcatagagatacgacctaaggatcatgacatttggatggtggtaaaatgctaaaggcctttgttggtcacagc

SEQ ID NO: 263499 - DNA, 120 bp, Artificial Sequence
  ENSG00000125821_38 (sequence is synthesized)
ccagttcctggctcccattctaaagggacagagacataccagagagtgagcaccatgtggtcaagttgctgaagggtctgaaaccgtaaaggaagagctgaaggagctggggctgtttca

SEQ ID NO: 263500 - DNA, 120 bp, Artificial Sequence
  ENSG00000125821_39 (sequence is synthesized)
tctgggaggggaactctaaatgtttgaaagatgtggaagagaagctgggtcaggaacaaaaataggagcaatgggtgtaagttgcatcaacgtagattctggcattctaacaacatgatt

SEQ ID NO: 263501 - DNA, 120 bp, Artificial Sequence
  ENSG00000125821_40 (sequence is synthesized)
caaaagtggaaggtgatgttgggagcttttggtgtttgagcagaaattctgagcctatatgtgtgaggggggatctttgattaattaaaacatcttcctcacagtatgcaggaacatggt

SEQ ID NO: 263502 - DNA, 120 bp, Artificial Sequence
  ENSG00000125821_41 (sequence is synthesized)
aaaagaaagcatttactacttttgtaaacattttggattgaagagaacttttccatcatcctgaaaatcactttcaactcctgggatcagagaaatagcagtgaatacaccgaagtctgg

SEQ ID NO: 263503 - DNA, 120 bp, Artificial Sequence
  ENSG00000125821_42 (sequence is synthesized)
cctaagagggtcagatctaaccacagggccagattatagagaaaaatgaaagctcaagaagaaaccccataatatctgcagctgcctcaaaaaggtggttaatttccacccccacctaca

SEQ ID NO: 263504 - DNA, 120 bp, Artificial Sequence
  ENSG00000125821_43 (sequence is synthesized)
ctcctgaaggtcctttcctagttgctttgaaactaatggctaaaattagattttgggtggcattcttgtggagaataaatctctcagtctttacatctctcccaacatctctgcctcctt

SEQ ID NO: 263505 - DNA, 120 bp, Artificial Sequence
  ENSG00000125821_44 (sequence is synthesized)
ctttctgcttatttataaagcatactgcttattgtccattaaaacatcatttgaatgaggatgggagaggagaatcgtaccatgtatggcttttctgagaagccttggcagatcacagac

SEQ ID NO: 263506 - DNA, 120 bp, Artificial Sequence
  ENSG00000125821_45 (sequence is synthesized)
ccaggactttaaacagagtgctgtgccgataacactgcatagcaggacccatttaatcttgcctttggtggtttactttacaggagaccaagctcttgtggctacacaaaacatagacca

SEQ ID NO: 263507 - DNA, 120 bp, Artificial Sequence
  ENSG00000125821_46 (sequence is synthesized)
aataaaggcatctttgggggctggatgtccatagcagcacctcatggttagtggtcccagggagggcattttctctaccaagcagtgtcctggctcagatgggtgccagctggcatatat

SEQ ID NO: 263508 - DNA, 120 bp, Artificial Sequence
  ENSG00000125821_47 (sequence is synthesized)
atggacaatttggcatttcattgatttgatcataaggaacaaatagttccgcaaacaccctatttcctttgatatggtaacatttgagtaactccaaagccagagaggcaatcttttcta

SEQ ID NO: 263509 - DNA, 120 bp, Artificial Sequence
  ENSG00000125821_48 (sequence is synthesized)
tctctggtttgtcagattttctgccgtttttcagccaggcactttaagaattcttaatttgttgttcgttattgattcaggtcctttaaaaatagagttaaacaccctcatctcagaaga

SEQ ID NO: 263510 - DNA, 120 bp, Artificial Sequence
  ENSG00000125821_49 (sequence is synthesized)
gtcctttaaaaatagagttaaacaccctcatctcagaagacatggaataatatcaaaagtaaagccacccactggctgcatcagaaaagaagagggaggccgggcgcggtggctcacgcc

SEQ ID NO: 263511 - DNA, 120 bp, Artificial Sequence
  ENSG00000125823_0 (sequence is synthesized)
aagtttctgaggctgtagacatggggatcggatgctggagaaaccccctgctgctgctgattgccctggtcctgtcagccaagctgggtcacttccaaaggtgggagggcttccagcaga

SEQ ID NO: 263512 - DNA, 120 bp, Artificial Sequence
  ENSG00000125823_1 (sequence is synthesized)
agctcatgagcaagaagaacatgaattcaacactcaacttcttcattcaatcctacaacaatgccagcaacgacacctacttatatcgagtccagaggctaattcgaagtcagatgcagc

SEQ ID NO: 263513 - DNA, 120 bp, Artificial Sequence
  ENSG00000125823_2 (sequence is synthesized)
tgaagattggctggaccaaatgcaagaggaatgacacgagcaattcttcctgccccctgcaaagcaagaagctgagaaagagtttaatttgcgagtctttgatatacaccatgccctgga

SEQ ID NO: 263514 - DNA, 120 bp, Artificial Sequence
  ENSG00000125823_3 (sequence is synthesized)
taaactatttccagctctggaacaattcctgtctggaggccgagcatgtgggcagaaacctcagatgagggctcatatgattgagttgtgcactggctgttattaaactgtaaaggatca

SEQ ID NO: 263515 - DNA, 120 bp, Artificial Sequence
  ENSG00000125823_4 (sequence is synthesized)
agggggatcctgcaagcagaaatctgtggtgggcgggcggcaggtgagcaaggagaacgtgtctgtaaaggaagcacagggaacaggtggtggctttgtaagacagttggaacccaagga

SEQ ID NO: 263516 - DNA, 120 bp, Artificial Sequence
  ENSG00000125823_5 (sequence is synthesized)
agcctcccaagtagctgagattacagaggggacaagagcaggcgtggagggctgccaggtgcctctgggggcttcacgcccagctcctcccaactgaggctcctggtcaagtgacatcca

SEQ ID NO: 263517 - DNA, 120 bp, Artificial Sequence
  ENSG00000125823_6 (sequence is synthesized)
aagtgacatccagactctccagacctcagtttcttcacctgcaaagtgcctcagaataggagggaagcacttagcacagtgccaacatctggtagcacttataaaaaatctttgctgtta

SEQ ID NO: 263518 - DNA, 120 bp, Artificial Sequence
  ENSG00000125826_0 (sequence is synthesized)
cgcctgcggcccagctccttcccgcggctctgcgatgcggcccgcagggtgacccgggcgggagtccggggacccgcgatcagccccggaggacggggtggggtcgccccaaacaggagc

SEQ ID NO: 263519 - DNA, 120 bp, Artificial Sequence
  ENSG00000125826_1 (sequence is synthesized)
gccgggaccgctgggaccccgcactcggcgtccgccgccgccgggtagccgggcagtggaggtcccggatgaggcgacaatttttccggccccccctcccagtcccgccccacttccggg

SEQ ID NO: 263520 - DNA, 120 bp, Artificial Sequence
  ENSG00000125826_2 (sequence is synthesized)
gccgccactttcactttctcttccgccgaagccgctccccttgcgaagaactggggcctcccgggaggagagagggctttgccttgaaacccgggacgccaggggcgctcccgcaagtgg

SEQ ID NO: 263521 - DNA, 120 bp, Artificial Sequence
  ENSG00000125826_3 (sequence is synthesized)
gggtcctccgggacttggaacgccccggctgggtggtgtccgggcgtcctttccccgcttcttcccacctcggctggtcccgtttcctcctgcgcccagtgcggacctgtctcggcgccc

SEQ ID NO: 263522 - DNA, 120 bp, Artificial Sequence
  ENSG00000125826_4 (sequence is synthesized)
gctgccctctcaccgccccacgcaggatcccggcctggtcaccgggcagtgtgatgcttcccgactgccgcggggacagcgaggcacacacagggcttgggccgcgccggaggccacacg

SEQ ID NO: 263523 - DNA, 120 bp, Artificial Sequence
  ENSG00000125826_5 (sequence is synthesized)
gcctggctgagttgctcctggtctcccgcctctcccaggcgacccggaggtagcatttcccaggaggcacggtcccccccagggggatgggcacagccacgccagatggacgagaagacc

SEQ ID NO: 263524 - DNA, 120 bp, Artificial Sequence
  ENSG00000125826_6 (sequence is synthesized)
aagaaagcagaggaaatggccctgagcctcacccgagcagtggcgggcggggatgaacaggtggcaatgaagtgtgccatctggctggcagagcaacgggtgcccctgagtgtgcaactg

SEQ ID NO: 263525 - DNA, 120 bp, Artificial Sequence
  ENSG00000125826_7 (sequence is synthesized)
aagcctgaggtctccccaacgcaggacatcaggctgtgggtgagcgtggaggatgctcagatgcacaccgtcaccatctggctcacagtgcgccctgatatgacagtggcgtctctcaag

SEQ ID NO: 263526 - DNA, 120 bp, Artificial Sequence
  ENSG00000125826_8 (sequence is synthesized)
gacatggtttttctggactatggcttcccaccagtcttgcagcagtgggtgattgggcagcggctggcacgagaccaggagaccctgcactcccatggggtgcggcagaatggggacagt

SEQ ID NO: 263527 - DNA, 120 bp, Artificial Sequence
  ENSG00000125826_9 (sequence is synthesized)
gcctacctctatctgctgtcagcccgcaacacctccctcaaccctcaggagctgcagcgggagcggcagctgcggatgctggaagatctgggcttcaaggacctcacgctgcagccgcgg

SEQ ID NO: 263528 - DNA, 120 bp, Artificial Sequence
  ENSG00000125826_10 (sequence is synthesized)
ggccctctggagccaggccccccaaagcccggggtcccccaggaacccggacgggggcagccagatgcagtgcctgagcccccaccggtgggctggcagtgccccgggtgcaccttcatc

SEQ ID NO: 263529 - DNA, 120 bp, Artificial Sequence
  ENSG00000125826_11 (sequence is synthesized)
gcctggctgtgagatgtgctgccgggcgcgccccgaggcctaccaggtccccgcctcataccagcccgacgaggaggagcgagcgcgcctggcgggcgaggaggaggcgctgcgtcagta

SEQ ID NO: 263530 - DNA, 120 bp, Artificial Sequence
  ENSG00000125826_12 (sequence is synthesized)
ccagcagcggaagcagcagcagcaggaggggaactacctgcagcacgtccagctggaccagaggagcctggtgctgaacacggagcccgccgagtgccccgtgtgctactcggtgctggc

SEQ ID NO: 263531 - DNA, 120 bp, Artificial Sequence
  ENSG00000125826_13 (sequence is synthesized)
gcccggcgaggccgtggtgctgcgtgagtgtctgcacaccttctgcagggagtgcctgcagggcaccatccgcaacagccaggaggcggaggtctcctgccccttcattgacaacaccta

SEQ ID NO: 263532 - DNA, 120 bp, Artificial Sequence
  ENSG00000125826_14 (sequence is synthesized)
ctcgtgctcgggcaagctgctggagagggagatcaaggcgctcctgacccctgaggattaccagcgatttctagacctgggcatctccattgctgaaaaccgcagtgccttcagctacca

SEQ ID NO: 263533 - DNA, 120 bp, Artificial Sequence
  ENSG00000125826_15 (sequence is synthesized)
ttgcaagaccccagattgcaagggatggtgcttctttgaggatgatgtcaatgagttcacctgccctgtgtgtttccacgtcaactgcctgctctgcaaggccatccatgagcagatgaa

SEQ ID NO: 263534 - DNA, 120 bp, Artificial Sequence
  ENSG00000125826_16 (sequence is synthesized)
ctgcaaggagtatcaggaggacctggccctgcgggctcagaacgatgtggctgcccggcagacgacagagatgctgaaggtgatgctgcagcagggcgaggccatgcgctgcccccagtg

SEQ ID NO: 263535 - DNA, 120 bp, Artificial Sequence
  ENSG00000125826_17 (sequence is synthesized)
ccagatcgtggtacagaagaaggacggctgcgactggatccgctgcaccgtctgccacaccgagatctgctgggtcaccaagggcccacgctggggccctgggggcccaggagacaccag

SEQ ID NO: 263536 - DNA, 120 bp, Artificial Sequence
  ENSG00000125826_18 (sequence is synthesized)
cgggggctgccgctgcagggtaaatgggattccttgccacccaagctgtcagaactgccactgagctaaagatggtggggccacatgctgacccagccccacatccacattctgttagaa

SEQ ID NO: 263537 - DNA, 120 bp, Artificial Sequence
  ENSG00000125826_19 (sequence is synthesized)
tgtagctcagggagcttcgtggacggccttgcttgctgtagcgttgtaggggccctgcctgcactgcggttgtccacggtcacatctgccccagtgcctttgtccttcccttggggcttg

SEQ ID NO: 263538 - DNA, 120 bp, Artificial Sequence
  ENSG00000125826_20 (sequence is synthesized)
ccggccagacttctctcccctgcggctcccacctctgcctgaccccagccttaaacatagcccctggccagaggccttgctgggtggagcctctgtgtgactccatactcctcccaccac

SEQ ID NO: 263539 - DNA, 120 bp, Artificial Sequence
  ENSG00000125826_21 (sequence is synthesized)
aacactcatctgtcaaacaccaagcactctcagcctccccgccttcagctgtcagctttctggggctaacttctctgcctttgtggttggaggcctgaggcctcttggaactcttgctaa

SEQ ID NO: 263540 - DNA, 120 bp, Artificial Sequence
  ENSG00000125826_22 (sequence is synthesized)
cctgttcagagccaggaaggagactgcacagttttgaaagcacagcccgtcaggtccggctctgcgtctccctctctgcagcctgtgtaagctattataattaaaatggttttccgggaa

SEQ ID NO: 263541 - DNA, 120 bp, Artificial Sequence
  ENSG00000125826_23 (sequence is synthesized)
acatcagattcctcatggtgcaaaatggccattccagctccatccagccatcacatcacaggaggaagggaagaaagacacccctccacactcttctaaagagcatagctcaaaaattgt

SEQ ID NO: 263542 - DNA, 120 bp, Artificial Sequence
  ENSG00000125826_24 (sequence is synthesized)
acacacttcttccgttaattcctgtggaccagaactgattcccacagctacagttcagcttgaggggagactgtatagccaagatattcagctagaattcaggggttcgcttggtaaggg

SEQ ID NO: 263543 - DNA, 120 bp, Artificial Sequence
  ENSG00000125826_25 (sequence is synthesized)
aagggaagagaatggatactgtcggtctgtgctccaggagacttaaactcaatgctgaaacactttgcacaatgcctggcgtgttatgcactcaataataaacattagtgtctatcgtta

SEQ ID NO: 263544 - DNA, 120 bp, Artificial Sequence
  ENSG00000125826_26 (sequence is synthesized)
tctccccaacgcaggacatcaggagcaggggagagaagacagaagaggttggagaggtcagggaggtgccagatcatggaggccctcgtgtgctgccacgagttgattctaagagtagcg

SEQ ID NO: 263545 - DNA, 120 bp, Artificial Sequence
  ENSG00000125826_27 (sequence is synthesized)
gaaggtgaggctgggacagggccgaggcctagggattttaagttctgggatccaggtgggggctgggggcttcccagtaagggctgtgctcacacatccctggaggctctgacctccctt

SEQ ID NO: 263546 - DNA, 120 bp, Artificial Sequence
  ENSG00000125826_28 (sequence is synthesized)
ctggctgtcactcccatccggaggtgggacttaggccgaatggtcatgtcaggaagagcgtctgggtggagggtggagaccacaggaatgaagagggggttgctggatggagcctggcct

SEQ ID NO: 263547 - DNA, 120 bp, Artificial Sequence
  ENSG00000125826_29 (sequence is synthesized)
ggcagagccacacaggagagactccacagctctagagggtcaccaccttctccctgccatggggaggggccaggctgggtgactgccccagccccgccccagggccagcacctgccccac

SEQ ID NO: 263548 - DNA, 120 bp, Artificial Sequence
  ENSG00000125826_30 (sequence is synthesized)
gccggaggaggtgagggatgagattctgcaagtggagcccgcaggatctgctgatcgatgggacgaggaacgggagaaaaattaaagcggcgcatgaggcagacgaatgcaaacttcacc

SEQ ID NO: 263549 - DNA, 120 bp, Artificial Sequence
  ENSG00000125826_31 (sequence is synthesized)
ggaggcagggtggaggccttggtgatgggttggtgagagggatgggaaggaaggagatattgaggagaagtccacctggggtgactgagtgaggcccctggggtcaggccttgccatgtg

SEQ ID NO: 263550 - DNA, 120 bp, Artificial Sequence
  ENSG00000125827_0 (sequence is synthesized)
gagcaccgccagtctgcgccgctaggcgtaggcggggtggcccttgcgtctcccgcttccttgaaaaacccggcgggcgagcgaggctgcgggccggccgctgcccttccccacactccc

SEQ ID NO: 263551 - DNA, 120 bp, Artificial Sequence
  ENSG00000125827_1 (sequence is synthesized)
gagaagcctcgctcggcgcccaacatggcgggtgggcgctgcggcccgcagctaacggcgctcctggccgcctggatcgcggctgtggcggcgacggcaggccccgaggaggccgcgctg

SEQ ID NO: 263552 - DNA, 120 bp, Artificial Sequence
  ENSG00000125827_2 (sequence is synthesized)
gctgccgccggagcagagccgggtccagcccatgaccgcctccaactggacgctggtgatggagggcgagtggatgctgaaattttacgccccatggtgtccatcctgccagcagactga

SEQ ID NO: 263553 - DNA, 120 bp, Artificial Sequence
  ENSG00000125827_3 (sequence is synthesized)
ttcagaatgggaggcttttgcaaagaatggtgaaatacttcagatcagtgtggggaaggtagatgtcattcaagaaccaggtttgagtggccgcttctttgtcaccactctcccagcatt

SEQ ID NO: 263554 - DNA, 120 bp, Artificial Sequence
  ENSG00000125827_4 (sequence is synthesized)
ttttcatgcaaaggatgggatattccgccgttatcgtggcccaggaatcttcgaagacctgcagaattatatcttagagaagaaatggcaatcagtcgagcctctgactggctggaaatc

SEQ ID NO: 263555 - DNA, 120 bp, Artificial Sequence
  ENSG00000125827_5 (sequence is synthesized)
cccggcttctctaacgatgtctggaatggctggtctttttagcatctctggcaagatatggcatcttcacaactatttcacagtgactcttggaattcctgcttggtgttcttatgtctt

SEQ ID NO: 263556 - DNA, 120 bp, Artificial Sequence
  ENSG00000125827_6 (sequence is synthesized)
tttcgtcatagccaccttggtttttggcctttttatgggtctggtcttggtggtaatatcagaatgtttctatgtgccacttccaaggcatttatctgagcgttctgagcagaatcggag

SEQ ID NO: 263557 - DNA, 120 bp, Artificial Sequence
  ENSG00000125827_7 (sequence is synthesized)
atcagaggaggctcatagagctgaacagttgcaggatgcggaggaggaaaaagatgattcaaatgaagaagaaaacaaagacagccttgtagatgatgaagaagagaaagaagatcttgg

SEQ ID NO: 263558 - DNA, 120 bp, Artificial Sequence
  ENSG00000125827_8 (sequence is synthesized)
cgatgaggatgaagcagaggaagaagaggaggaggacaacttggctgctggtgtggatgaggagagaagtgaggccaatgatcaggggcccccaggagaggacggtgtgacccgggagga

SEQ ID NO: 263559 - DNA, 120 bp, Artificial Sequence
  ENSG00000125827_9 (sequence is synthesized)
agtagagcctgaggaggctgaagaaggcatctctgagcaaccctgcccagctgacacagaggtggtggaagactccttgaggcagcgtaaaagtcagcatgctgacaagggactgtagat

SEQ ID NO: 263560 - DNA, 120 bp, Artificial Sequence
  ENSG00000125827_10 (sequence is synthesized)
ttaatgatgcgttttcaagaatacacaccaaaacaatatgtcagcttccctttggcctgcagtttgtaccaaatccttaatttttcctgaatgagcaagcttctcttaaaagatgctctc

SEQ ID NO: 263561 - DNA, 120 bp, Artificial Sequence
  ENSG00000125827_11 (sequence is synthesized)
tagtcatttggtctcatggcagtaagcctcatgtatactaaggagagtcttccaggtgtgacaatcaggatatagaaaaacaaacgtagtgttgggatctgtttggagactgggatggga

SEQ ID NO: 263562 - DNA, 120 bp, Artificial Sequence
  ENSG00000125827_12 (sequence is synthesized)
acaagttcatttacttaggggtcagagagtctcgaccagaggaggccattcccagtcctaatcagcaccttccagagacaaggctgcaggccctgtgaaatgaaagccaagcaggagcct

SEQ ID NO: 263563 - DNA, 120 bp, Artificial Sequence
  ENSG00000125827_13 (sequence is synthesized)
tggctcctgagcatccccaaagtgtaacgtagaagccttgcatccttttcttgtgtaaagtatttatttttgtcaaattgcaggaaacatcaggcaccacagtgcatgaaaaatctttca

SEQ ID NO: 263564 - DNA, 120 bp, Artificial Sequence
  ENSG00000125827_14 (sequence is synthesized)
cagctagaaattgaaagggccttgggtatagagagcagctcagaagtcatcccagccctctgaatctcctgtgctatgttttatttcttacctttaatttttccagcatttccaccatgg

SEQ ID NO: 263565 - DNA, 120 bp, Artificial Sequence
  ENSG00000125827_15 (sequence is synthesized)
gcattcaggctctccacactcttcactattatctcttggtcagaggactccaataacagccaggtttacatgaactgtgtttgttcattctgacctaaggggtttagataatcagtaacc

SEQ ID NO: 263566 - DNA, 120 bp, Artificial Sequence
  ENSG00000125827_16 (sequence is synthesized)
ataacccctgaagctgtgactgccaaacatctcaaatgaaatgttgtggccatcagagactcaaaaggaagtaaggattttacaagacagattaaaaaaaaattgttttgtccaaaatat

SEQ ID NO: 263567 - DNA, 120 bp, Artificial Sequence
  ENSG00000125827_17 (sequence is synthesized)
agttgttgttgatttttttttaagttttctaagcaatatttttcaagccagaagtcctctaagtcttgccagtacaaggtagtcttgtgaagaaaagttgaatactgttttgttttcatc

SEQ ID NO: 263568 - DNA, 120 bp, Artificial Sequence
  ENSG00000125827_18 (sequence is synthesized)
tcaaggggttccctgggtcttgaactactttaataataactaaaaaaccacttctgattttccttcagtgatgtgcttttggtgaaagaattaatgaactccagtacctgaaagtgaaag

SEQ ID NO: 263569 - DNA, 120 bp, Artificial Sequence
  ENSG00000125827_19 (sequence is synthesized)
atttgattttgtttccatcttctgtaatcttccaaagaattatatctttgtaaatctctcaatactcaatctactgtaagtacccagggaggctaatttccttaaaaaaaaaaaatctat

SEQ ID NO: 263570 - DNA, 120 bp, Artificial Sequence
  ENSG00000125827_20 (sequence is synthesized)
ccatctacttctctcttacctgatttatgtgttagaataaattcatgaaattcgattccaagcatacgaaagatgcctaaagttgattctatgctccttagatccagacagaataatgag

SEQ ID NO: 263571 - DNA, 120 bp, Artificial Sequence
  ENSG00000125827_21 (sequence is synthesized)
tacaggtttatgaaattctaaaagtttctgtcgtctttaaaaaggaacgtgcagtatatttctatctggctgtttagataaccctttccttgtattaattgtgagcacggagctcactgg

SEQ ID NO: 263572 - DNA, 120 bp, Artificial Sequence
  ENSG00000125827_22 (sequence is synthesized)
tgggggaggttctgaaactctctgccctcctgtggttgaatgaagatgttgcaagacttgcacaaaggaggttattcttctgacagcatcaacttttagagatggttctttttcatcttt

SEQ ID NO: 263573 - DNA, 120 bp, Artificial Sequence
  ENSG00000125827_23 (sequence is synthesized)
ccaattcagttacttgacagtctccttccccagtatgctgaagtttgttaagagtcaccagtaattgtgcttttcagacagtagtgcagcttcaaaatcgaggccatcactgggctgatg

SEQ ID NO: 263574 - DNA, 120 bp, Artificial Sequence
  ENSG00000125827_24 (sequence is synthesized)
ggctgggagaaccttgccatgtgcctgcctgtttcctgcccccttagtcactgcccatttcctgcccccttggtcgctgacacaccttcacccaaagtgccatggttctgatggtggcag

SEQ ID NO: 263575 - DNA, 120 bp, Artificial Sequence
  ENSG00000125827_25 (sequence is synthesized)
agttctcaaagaacagtaaactcaggttcagaggtattatggaataagaatggtttcatagtttggcttttctatataattcctccctctcaaactgaaatattcatttttttagtggag

SEQ ID NO: 263576 - DNA, 120 bp, Artificial Sequence
  ENSG00000125827_26 (sequence is synthesized)
tatttgactagagagaaggtaaggcagaaatacagtctacactggcttttaaaaatgtaaagccaatttccaaccggaccccaaatagtacaggttgaacattccgttccaacaatccaa

SEQ ID NO: 263577 - DNA, 120 bp, Artificial Sequence
  ENSG00000125827_27 (sequence is synthesized)
aaccccaaatgctccaaaatcttaaactttgagttccagcattccgtcagaagtggaaaattttacacctgacctcatttgacaggtggcagttacagtgcaatcaaaactttgttccat

SEQ ID NO: 263578 - DNA, 120 bp, Artificial Sequence
  ENSG00000125827_28 (sequence is synthesized)
gcccaagattattaaaaatattggataaaattaccttcaagctatgttgtataaggtgtatataaaacaaatgaattttgtgtttagacttgggtctactcccaagatacctcattatat

SEQ ID NO: 263579 - DNA, 120 bp, Artificial Sequence
  ENSG00000125827_29 (sequence is synthesized)
atatacaaaaatccccaaatccaaaaacatttgaaacacttctggtcccacacattttggataagggatatttgacctatatctaattatataataagaaaaatgtattttctttttttt

SEQ ID NO: 263580 - DNA, 79 bp, Artificial Sequence
  ENSG00000125827_30 (sequence is synthesized)
ttttgagatggagtttcactcttgttgtcgcccaggctgcaatggcacaatcttggcttactacaacctccgcctccct

SEQ ID NO: 263581 - DNA, 120 bp, Artificial Sequence
  ENSG00000125827_31 (sequence is synthesized)
gggattacaggtgtgagccaccgtacctggcagaaaatgtactttctttctcagaaatacttttaaaaaaaattgaagggtgaggagaaaaacatcttggagaagaggacccattaaaac

SEQ ID NO: 263582 - DNA, 120 bp, Artificial Sequence
  ENSG00000125827_32 (sequence is synthesized)
gaggacccattaaaactttaaatatctgtgggaaccatttttcctgattttcccttttttaacatcatggcaaagatgggtttttttccaacaaaatttaatttaatatctttccacttg

SEQ ID NO: 263583 - DNA, 120 bp, Artificial Sequence
  ENSG00000125827_33 (sequence is synthesized)
aagattttaggtttgttttcaatacttaatgaatataaaactaaaggagaaaagccaacctgaaataatttaaactttatatgaacatttcgataagagtttgtggattttttctgtaga

SEQ ID NO: 263584 - DNA, 120 bp, Artificial Sequence
  ENSG00000125827_34 (sequence is synthesized)
taatatatttgatccggaactcaagtgcatggaaacatgattttgatttttaaaatctaaaaaaaaaaaaaattaaaatcatgcttccctctattgcagtatcagttatttagtcacaga

SEQ ID NO: 263585 - DNA, 120 bp, Artificial Sequence
  ENSG00000125827_35 (sequence is synthesized)
atggtattttatgtaaattaaaattaggtgaatgcaatgcaggtaactggttttggaatgggaatgtgcagtgctttatgtttggggagttggagcagggtatcttttcatcaattagaa

SEQ ID NO: 263586 - DNA, 120 bp, Artificial Sequence
  ENSG00000125827_36 (sequence is synthesized)
ggaaagtttgaaacttctgattacctttatgttggtttctcttattatttgtctcttgctagatctgctaaaccaacccagcttgctcagagatctcatattgaagcaacatacaggcaa

SEQ ID NO: 263587 - DNA, 120 bp, Artificial Sequence
  ENSG00000125827_37 (sequence is synthesized)
tccacatctttctttccctttgaagtatagtcattggatgggatgagggacagggcctgttgggttcacagggccttgcactgcatgggcacatacttaaaagctcttgtgcatggaatc

SEQ ID NO: 263588 - DNA, 120 bp, Artificial Sequence
  ENSG00000125827_38 (sequence is synthesized)
cctgtctgttagccacaggcctctttagctctatacattcaaaataactactgtagtagaaaatagataagcttcagctgagttggcttttgatagtggaaaaaaaacaaaatttgactt

SEQ ID NO: 263589 - DNA, 120 bp, Artificial Sequence
  ENSG00000125827_39 (sequence is synthesized)
tttatggccaaaattccttgttgacagctgtgatgttctaatatgatttgggaatatgtcagtctacagaacctgcatcctgtaaaaacacctttggggtagacgataaaagtcattttt

SEQ ID NO: 263590 - DNA, 120 bp, Artificial Sequence
  ENSG00000125827_40 (sequence is synthesized)
aaggcaaatacttaccatgtgactttttattaccaaatgcatcagtagtggagctggtatgttgtttcataggatggaaacattagaagtccagagaaaaataaattttaaaaaaaggtg

SEQ ID NO: 263591 - DNA, 120 bp, Artificial Sequence
  ENSG00000125827_41 (sequence is synthesized)
gaaaagttacggcaaacctgagatttcagcataaaatctttagtatgaagtgagagaaagaagagggaggctggttctgttgctcgtatcaataggttatctgtgtccctcatcttggtg

SEQ ID NO: 263592 - DNA, 120 bp, Artificial Sequence
  ENSG00000125827_42 (sequence is synthesized)
ttacagtgttatttctgtcagtattatgaatatgtggttgacccatcctgtcaaatgtaccaacattttcgaaagaattcattcaaatctcttatgccaacagaaaagttccttcttgtt

SEQ ID NO: 263593 - DNA, 120 bp, Artificial Sequence
  ENSG00000125827_43 (sequence is synthesized)
taatatctctttacctcagtcctacattttgattctctggaggagattttagcttgtcttaaaaagccaaatttggagtcatcaagcctgctgaacctgatggggcagctttttgaacag

SEQ ID NO: 263594 - DNA, 120 bp, Artificial Sequence
  ENSG00000125827_44 (sequence is synthesized)
ctttctggaagtaagaacttcagttgaaaagccctttgatcgcttcagcccgggacatgcccttcagatggcttattctcagtaaagctttatgtagactgtgacactgtatatgtgtga

SEQ ID NO: 263595 - DNA, 120 bp, Artificial Sequence
  ENSG00000125827_45 (sequence is synthesized)
ctcgtacaactttgacgtgtttctgaagtggtttaatcgtatttgttattagcttctttgtggaaatgcaatttttatactaaaaacattgcttatttgcaatgcaatatgttataaatt

SEQ ID NO: 263596 - DNA, 120 bp, Artificial Sequence
  ENSG00000125827_46 (sequence is synthesized)
tgttgtttatattactggtattagtcttagcctaatgaacctaattatttttctttctgtattctttgcttcctcaaatagcatctgcagcaattggaatgagaaatccagatatgtgtt

SEQ ID NO: 263597 - DNA, 120 bp, Artificial Sequence
  ENSG00000125827_47 (sequence is synthesized)
tcaagtagtacattgcctgaatcacaaatcacttgatcacagtattgtatataatccctgatcctatttgtttcattttattgtaaattcccatttgcatcaaaacctaatgatagtgat

SEQ ID NO: 263598 - DNA, 120 bp, Artificial Sequence
  ENSG00000125827_48 (sequence is synthesized)
tggtaagtaaaaacaaatggtgtattgcttttcatacaagtgttttcacaaaagccatttgcctaggcagcaaaaaatattaatttgttaaaaaaaattttccttcgtgtccatcctcca

SEQ ID NO: 263599 - DNA, 120 bp, Artificial Sequence
  ENSG00000125827_49 (sequence is synthesized)
tcagtgacatccacgtgcagtatgaatacgtagcacaggctaagcaagttacctgttgaagaaattgcagcacggtgaaggcaggccatttgtgtcgtagtcttccgtttgaagacctgg

SEQ ID NO: 263600 - DNA, 120 bp, Artificial Sequence
  ENSG00000125827_50 (sequence is synthesized)
attctgagcattttgatcaaagttctactaagtgaaaattgactggatctgttattgactgtctcatttctgcaaagataagaaaaagtcaggagaaaagagagtgtactgagaaacact

SEQ ID NO: 263601 - DNA, 120 bp, Artificial Sequence
  ENSG00000125831_0 (sequence is synthesized)
agtgtgattcgacttgtccctgaggagtacagagaacactcttcctgttcctctgcagctgaaggatgatggctgagccctggcaggccctacagctcctgttggccattctattgactc

SEQ ID NO: 263602 - DNA, 120 bp, Artificial Sequence
  ENSG00000125831_1 (sequence is synthesized)
tgatggccctcccctaccaagcaaggaagaaaacctttctaagcgtccatgaagtgatggcagtagaaaactatgcgaaggacagcttgcagtggatcaccgaccagtataacaaggaaa

SEQ ID NO: 263603 - DNA, 120 bp, Artificial Sequence
  ENSG00000125831_2 (sequence is synthesized)
ggaccacctgccaaaagccagagaccacgaactgtgtcccccaggaaagggagcttcacaagcaagtcaactgcttcttctcagtgtttgctgtaccctggtttgaacagtacaaaattt

SEQ ID NO: 263604 - DNA, 120 bp, Artificial Sequence
  ENSG00000125831_3 (sequence is synthesized)
tgaacaaaagctgcagcagtgactaggtgtcctggagtgtacaactgcggccactgcatgtgagagaatcctgcaatgggcaataatccttaatataggcaataaatgtttgtcaacata

SEQ ID NO: 263605 - DNA, 120 bp, Artificial Sequence
  ENSG00000125834_0 (sequence is synthesized)
gtcgacctttgcaggaccgggcggtgcagggctcactcggctggcgtcccgggggatgggccaccaggagtctccgctggcccgggcgccggcgggaggtgcagcttatgtaaagaggtt

SEQ ID NO: 263606 - DNA, 120 bp, Artificial Sequence
  ENSG00000125834_1 (sequence is synthesized)
atgtaaagggctcagctggcgcgaacacgtggaaagccacgggagcctaggagcccaggcttccccagcgagcgccgcggcagcagaaggatccgctacacgccgggctcgggccgccac

SEQ ID NO: 263607 - DNA, 120 bp, Artificial Sequence
  ENSG00000125834_2 (sequence is synthesized)
ctcccgcgctgctcggtcccggaggcagcccgggcccggagcggaccatccccaggcaggggctccaggggggaaacgggccgcccggaagtggaggtgcgcgggccaggtcacaatcca

SEQ ID NO: 263608 - DNA, 120 bp, Artificial Sequence
  ENSG00000125834_3 (sequence is synthesized)
tccaaggtccggctcctccgcgtcccagggccggacggagggatgaggcagggggggcccgggcagcgccgttgctgctccccccgccgcccgcagccatggaaacggggaaggacggcg

SEQ ID NO: 263609 - DNA, 120 bp, Artificial Sequence
  ENSG00000125834_4 (sequence is synthesized)
cagaggtacacaaagcccggagcggaaaaggcgaagcccagtgccgcgggcgcccagcacgaagctgaggccggcggcggcggcccgggccatggatccggtggcggccgaggccccggg

SEQ ID NO: 263610 - DNA, 120 bp, Artificial Sequence
  ENSG00000125834_5 (sequence is synthesized)
cgaggccttcctggcgcggcgacggcctgagggcggtggcgggtccgcgcggccgcgttacagcctgttggcggagatcgggcgcggcagctacggcgtggtttatgaggcagtggccgg

SEQ ID NO: 263611 - DNA, 120 bp, Artificial Sequence
  ENSG00000125834_6 (sequence is synthesized)
gcgcagcggggcccgggtggcggtcaagaagatccgctgcgacgcccccgagaacgtggagctggcgctggctgaattctgggccctcaccagcctcaagcggcgccaccagaacgtcgt

SEQ ID NO: 263612 - DNA, 120 bp, Artificial Sequence
  ENSG00000125834_7 (sequence is synthesized)
gcagtttgaggagtgcgtcctgcagcgcaatgggttagcccagcgcatgagtcacggcaacaagagctcgcagctttacctgcgcctggtggagacctcgctgaaaggagaaaggatcct

SEQ ID NO: 263613 - DNA, 120 bp, Artificial Sequence
  ENSG00000125834_8 (sequence is synthesized)
gggttatgctgaggagccctgctatctctggtttgtcatggagttctgtgaaggtggagacctgaatcagtatgtcctgtcccggaggccagacccagccaccaacaaaagtttcatgct

SEQ ID NO: 263614 - DNA, 120 bp, Artificial Sequence
  ENSG00000125834_9 (sequence is synthesized)
acagctgacgagcgccattgccttcctgcacaaaaaccatattgtgcacagggacctgaagccagacaacatcctcatcacagagcggtctggcacccccatcctcaaagtggccgactt

SEQ ID NO: 263615 - DNA, 120 bp, Artificial Sequence
  ENSG00000125834_10 (sequence is synthesized)
tggactaagcaaggtctgtgctgggctggcaccccgaggcaaagagggcaatcaagacaacaaaaatgtgaatgtgaataagtactggctgtcctcagcctgcggttcggacttctacat

SEQ ID NO: 263616 - DNA, 120 bp, Artificial Sequence
  ENSG00000125834_11 (sequence is synthesized)
ggctcctgaagtctgggagggacactacacagccaaggcggacatctttgccctgggcattatcatctgggcaatgatagaaagaatcacttttattgactctgagaccaagaaggagct

SEQ ID NO: 263617 - DNA, 120 bp, Artificial Sequence
  ENSG00000125834_12 (sequence is synthesized)
cctggggacctacattaaacaggggactgagatcgtccctgttggtgaggcgctgctagaaaacccaaagatggagttgcacatcccccaaaaacgcaggacttccatgtctgaggggat

SEQ ID NO: 263618 - DNA, 120 bp, Artificial Sequence
  ENSG00000125834_13 (sequence is synthesized)
caagcagctcttgaaagatatgttagctgctaacccacaggaccggcctgatgcctttgaacttgaaaccagaatggaccaggtcacatgtgctgcttaaaattcagggctaagcatttt

SEQ ID NO: 263619 - DNA, 120 bp, Artificial Sequence
  ENSG00000125834_14 (sequence is synthesized)
gggtgattttaaactaggtcgattcctcgggacccacagtctcaccacgtctcctccagaggacggcagagggtacaggtggtggcctggccggttggcgatctcccgacagctggatcc

SEQ ID NO: 263620 - DNA, 89 bp, Artificial Sequence
  ENSG00000125834_15 (sequence is synthesized)
ggtggcctggccggttggcgatctcccgacagctggatccggcaatgtgaagcttttgtttgggtttccccgcttctttttagttttgc

SEQ ID NO: 263621 - DNA, 120 bp, Artificial Sequence
  ENSG00000125834_16 (sequence is synthesized)
tcagaagagcaggacacaatgctgtggacaggcaccaatttctttaaagaaattcaatgtgggcaaggcatatgtgtaaatttcacttttactttttataaggggttagggagctatttt

SEQ ID NO: 263622 - DNA, 120 bp, Artificial Sequence
  ENSG00000125834_17 (sequence is synthesized)
tggttttgtccttcactttccctctgtcttccttctttatacttttctcagttctacttatgacacctcacttccctagagaaggcctgcctccccatagggaatctgggggtttcttct

SEQ ID NO: 263623 - DNA, 120 bp, Artificial Sequence
  ENSG00000125834_18 (sequence is synthesized)
ggaacggggcgtgaggacacaaggaggcctctgggccacgcctccctaccagatgcaggaactcctggactccttggtgggctggccctggctagcccttgggcctcggagatgatcaga

SEQ ID NO: 263624 - DNA, 120 bp, Artificial Sequence
  ENSG00000125834_19 (sequence is synthesized)
ggtgaagaaccgcctggaagaggaaggccagggtttggccaggagaactaagaaggtctcaactccaggctttgttgtgtttaagctattgagagccccaggccacaccaggacttgcag

SEQ ID NO: 263625 - DNA, 120 bp, Artificial Sequence
  ENSG00000125834_20 (sequence is synthesized)
tggtgggaatccattcctcttctgccctgtgttgcagggaactaggaggtaagggtggagggcgaccatctcgctcttgctggcggtggagcagccatccctgcctttctgttgggaaaa

SEQ ID NO: 263626 - DNA, 120 bp, Artificial Sequence
  ENSG00000125834_21 (sequence is synthesized)
actgttgtgccaaactcttgtgtggaacacagctgggtcttcagcaggcatctgtcactgccgtgaggtcagcgcttctcacctaactgcctcctggattgtcatcttcccagatgtgtc

SEQ ID NO: 263627 - DNA, 120 bp, Artificial Sequence
  ENSG00000125834_22 (sequence is synthesized)
ccatagtgtccaggtgtcacagagacggcctgaggccctaagatctggttgtgactttgccatgataacagggtgtcctgaactggctgccgttgtcgtgttctcacagtgaagggcgtg

SEQ ID NO: 263628 - DNA, 120 bp, Artificial Sequence
  ENSG00000125834_23 (sequence is synthesized)
ccctgtgtgccggggtccatggtgtcatatgcagtgacacacactgtcaagcgccatttccctcacccctggagacttactgttaggtgcctgccctcagtatagacgtatccaatggga

SEQ ID NO: 263629 - DNA, 120 bp, Artificial Sequence
  ENSG00000125834_24 (sequence is synthesized)
aaacagcggacctgcccagagcagggaggtgtcgtggaactgggtagaccccctgcagcgttaggggcccatttgtgggctcgccaccttcaggcttccccagccatgacacttcagccc

SEQ ID NO: 263630 - DNA, 120 bp, Artificial Sequence
  ENSG00000125834_25 (sequence is synthesized)
cgccacccatgcctgtctgctgcagccatccttgcactctccagcgacactctcgcacctccctaggggaagcttccctccccctgggctgctgctctgagcccatctgttctccccctg

SEQ ID NO: 263631 - DNA, 120 bp, Artificial Sequence
  ENSG00000125834_26 (sequence is synthesized)
aagggaatcattttgtgttcatttttgttttctgtttcacctaaaccagcataggattgataggggagacggttggcgggcatttccgtttctatgtgaccaaggcagcaggggctttta

SEQ ID NO: 263632 - DNA, 120 bp, Artificial Sequence
  ENSG00000125834_27 (sequence is synthesized)
cctgctaagcggcaatcctttggccctgagaatttgggagagaacagtgcatcaggccaggctcagcaatatgtttgctcacattctttcagccttctgtcacccccctcaacaccaaac

SEQ ID NO: 263633 - DNA, 120 bp, Artificial Sequence
  ENSG00000125834_28 (sequence is synthesized)
tttcttccttgtgagcagaaggttggctgctgttagcaggatcccacagtgataaccaggcccttcccttcctaagccaaaacccattgtgactgcctgtctctcctgtctctgacttct

SEQ ID NO: 263634 - DNA, 120 bp, Artificial Sequence
  ENSG00000125834_29 (sequence is synthesized)
caggcagcctcctgagtgcactgagttgtatccgagagggtgggaacagcagcatcccctaattgcagtacacggttccttttccgcccgccaccctgcctttccttgggggcagctgtc

SEQ ID NO: 263635 - DNA, 120 bp, Artificial Sequence
  ENSG00000125834_30 (sequence is synthesized)
tctctgtacatgagcaaatgggcaaaaacagtccccaaacccagcacccccctctccctggctgcagcccacactgtaacatccctagtgaggctccagcctaatgagccccttattttc

SEQ ID NO: 263636 - DNA, 120 bp, Artificial Sequence
  ENSG00000125834_31 (sequence is synthesized)
ttttttttccctccccaggtctagtagctctaactaaaaagttcttggagccatcgtgctccccctttgttatttttcttgctatcagagtagcaagaaacagcacccctgtaggtgaca

SEQ ID NO: 263637 - DNA, 120 bp, Artificial Sequence
  ENSG00000125834_32 (sequence is synthesized)
ggtgggcagcctggtaggggtcgccagcctccatgccccctcatcttccagttcttgcttagtggcacgacctctttccatagcataaatgcaggccagcgttttagccccaagtgcctg

SEQ ID NO: 263638 - DNA, 120 bp, Artificial Sequence
  ENSG00000125834_33 (sequence is synthesized)
cccttgcttcttacccctcccctgctttctcaaacacttgcccacctcaggcactcagcgggctccgccgtggtgagagaactggccgtggctcagccccgggtagcacctgtagtttca

SEQ ID NO: 263639 - DNA, 120 bp, Artificial Sequence
  ENSG00000125834_34 (sequence is synthesized)
gtgccactctccactgtccccttgtggaccagcttccactcactgtcacgtcccccctcctgcgtcttcactgggtctcaggctgccagcagctctctggtgcatcgtctcaacaccacc

SEQ ID NO: 263640 - DNA, 120 bp, Artificial Sequence
  ENSG00000125834_35 (sequence is synthesized)
aagtttgtaggacctgcccaagttctagtagtattcaaaacttcaaacggcagtcatttgttctcctcggctctgtggcaaggatagccctttggagggggactcttgacctcggctgtt

SEQ ID NO: 263641 - DNA, 120 bp, Artificial Sequence
  ENSG00000125834_36 (sequence is synthesized)
agggatctgaacttggttttcccgtcagaagaatcagcaggacagatcgtagtgccttattccattgtcctcccctggccaggcctcctggctcagctggaagtgcatggcttctttctc

SEQ ID NO: 263642 - DNA, 120 bp, Artificial Sequence
  ENSG00000125834_37 (sequence is synthesized)
cctatctgtgtcctctgtcacttgctctttcactctctctctcattcccagagagccacgggggagggatcaccctcacccccaacaccctcttcctgagggctgtagccaggtccgcat

SEQ ID NO: 263643 - DNA, 120 bp, Artificial Sequence
  ENSG00000125834_38 (sequence is synthesized)
ctccccaccaccaccagggcactcactcgcagctatagcccaggacagaaaaactgtgctttggacaggtgcacactctctgcctcttacctctagccaggaggatgcctcagtctgttc

SEQ ID NO: 263644 - DNA, 120 bp, Artificial Sequence
  ENSG00000125834_39 (sequence is synthesized)
attcgagactggccccgtctgaaccttctctgggcactggggactaaggttgcaggccttagcctcgtctcgtcccagaggcattggatcaggagaatgggaatttttttcctcccacct

SEQ ID NO: 263645 - DNA, 120 bp, Artificial Sequence
  ENSG00000125834_40 (sequence is synthesized)
ggacatagtttgcccctgtggctgcctttctgagggagtatactaaatgtttacttaagaaacaccctgtttacagccagaggagaaacacccaacactgagtggagatttgactctgga

SEQ ID NO: 263646 - DNA, 120 bp, Artificial Sequence
  ENSG00000125834_41 (sequence is synthesized)
cagggcctggcctccttagtggcactgccggggggccccagagcgaatgagggcagagatgcccggggcaggggcaaacgccctccgctccctctgctcccaaccctgtggtgctaggac

SEQ ID NO: 263647 - DNA, 120 bp, Artificial Sequence
  ENSG00000125834_42 (sequence is synthesized)
cactccccgccttccctacggcctcctcgccctgcacattccccacctccacattcccctcctccaagatctcagctccttaacatatcagttgtctcctagcctagaaaaccagtgttt

SEQ ID NO: 263648 - DNA, 120 bp, Artificial Sequence
  ENSG00000125834_43 (sequence is synthesized)
ggagcaataagatgattatttttgcttgaatctttttctaagagaaggaaaagagctggcattgtgggaattttctttttatgctgttagctgtttaccttcttagaagacatcctaata

SEQ ID NO: 263649 - DNA, 120 bp, Artificial Sequence
  ENSG00000125834_44 (sequence is synthesized)
ggatggatgtctgggttttagccttggggtatcttttggaaacttagaaaagcaggagtcaggctgccaccccctaaggagggaccctaacgttctgcccttgcctggttccatatggct

SEQ ID NO: 263650 - DNA, 120 bp, Artificial Sequence
  ENSG00000125834_45 (sequence is synthesized)
ccttccagccctgcccaccaagtgcagctcccactttccatcctgcccatacgcccctcttcccccgacatctgggggcgctggtggcacttactctaggttggtctcagactatccctc

SEQ ID NO: 263651 - DNA, 120 bp, Artificial Sequence
  ENSG00000125834_46 (sequence is synthesized)
cccttggctggttttccctcctaggcctgtctggcagcccccagacagacgtagctcctgggagtctcggccctggcaaccttggaagagccaagctgacattgtttagctcttcaggcc

SEQ ID NO: 263652 - DNA, 120 bp, Artificial Sequence
  ENSG00000125834_47 (sequence is synthesized)
actgggttttggaggcagaagtccagagatactggctctgccaagctgtcgtactgggctgtggcacagccttcgagacaacacgggtgtatctctgatcctgccctacctaggcttcaa

SEQ ID NO: 263653 - DNA, 120 bp, Artificial Sequence
  ENSG00000125834_48 (sequence is synthesized)
ggggcttctgtctggagaaatgccctcaaagggtaaccagtaggtgtggcattgaattggccagtgttagcatctacagccatcaccgagatgagtccactgccgttgcctgcccgaggg

SEQ ID NO: 263654 - DNA, 120 bp, Artificial Sequence
  ENSG00000125834_49 (sequence is synthesized)
ccccctaaggttatagacggtatcagcagggaggccgtcccgctggttttctaggagagcccacaggaggaagggagcctcttcaggggcactggaatcttttgtgccaggggcttcttt

SEQ ID NO: 263655 - DNA, 120 bp, Artificial Sequence
  ENSG00000125834_50 (sequence is synthesized)
tcatcagagccggggagtacattgcagtgacttcttaaacatttgtgtgggacagacgagcgtgagggaggttttaagccaggcacaaagttagtttccaatactagttaataaatctat

SEQ ID NO: 263656 - DNA, 120 bp, Artificial Sequence
  ENSG00000125834_51 (sequence is synthesized)
ttttcttcatttcctttttttgcacagaagctggtaatctaggacctacgtgtgaacaactttatatgaatattttttgtacttggtttacttgggttggtatgatacattatatttaag

SEQ ID NO: 263657 - DNA, 120 bp, Artificial Sequence
  ENSG00000125834_52 (sequence is synthesized)
ttccttgaacactgtggatcccctaatgtgtatgaatgactgaggctttgtaaattaagggacgtttgtgtgaataaagttatttgatggggtcaaagaagccatatgtgatttgaaaaa

SEQ ID NO: 263658 - DNA, 120 bp, Artificial Sequence
  ENSG00000125834_53 (sequence is synthesized)
aggtgctgttggacttcatggagctcatggcctcgagtgacatgtgtgggagtggacatttggacacagaggaggcatcaccccagtcctaggcaagggtctgctcccatctgtcatggg

SEQ ID NO: 263659 - DNA, 120 bp, Artificial Sequence
  ENSG00000125834_54 (sequence is synthesized)
aaggaggtcagatgagaccacagctaactttccttctggctccaacactctgtgttccaggattctccagaatggaacagtctgaccttggggattctagcaggatcaagtcaggtcccc

SEQ ID NO: 263660 - DNA, 120 bp, Artificial Sequence
  ENSG00000125834_55 (sequence is synthesized)
ttcatcatcccctctctccctctcatgccccgggaggcttccactcctgcagcatcaggcactgggaggcagagtccagctccacagtcatttttaacatattaaagttctggacagaaa

SEQ ID NO: 263661 - DNA, 120 bp, Artificial Sequence
  ENSG00000125835_0 (sequence is synthesized)
aactccagggctagtgagctggaccggaagtaggtttctacccgaccgcattttacgtggtgctgcatttccggtagcggcggcgggaaatcggctgtgggagagaggctaggcctctga

SEQ ID NO: 263662 - DNA, 120 bp, Artificial Sequence
  ENSG00000125835_1 (sequence is synthesized)
ggaggcgaatccggcgggtatcagagccatcagaaccgccaccatgacggtgggcaagagcagcaagatgctgcagcatattgattacaggatgaggtgcatcctgcaggacggccggat

SEQ ID NO: 263663 - DNA, 120 bp, Artificial Sequence
  ENSG00000125835_2 (sequence is synthesized)
cttcattggcaccttcaaggcttttgacaagcacatgaatttgatcctctgtgactgtgatgagttcagaaagatcaagccaaagaactccaaacaagcagaaagggaagagaagcgagt

SEQ ID NO: 263664 - DNA, 120 bp, Artificial Sequence
  ENSG00000125835_3 (sequence is synthesized)
cctcggtctggtgctgctgcgaggggagaatctggtctcaatgacagtagagggacctcctcccaaagatactggtattgctcgagttccacttgctggagctgccgggggcccagggat

SEQ ID NO: 263665 - DNA, 120 bp, Artificial Sequence
  ENSG00000125835_4 (sequence is synthesized)
tccgtggggttggcgggccatcccaacaggtgatgaccccacaaggaagaggtactgttgcagccgctgcagctgctgccacagccagtattgccggggctccaacccagtacccacctg

SEQ ID NO: 263666 - DNA, 120 bp, Artificial Sequence
  ENSG00000125835_5 (sequence is synthesized)
gccgtgggggtcctcccccacctatgggccgaggagcaccccctccaggcatgatgggcccacctcctggtatgagacctcctatgggtcccccaatggggatcccccctggaagaggga

SEQ ID NO: 263667 - DNA, 120 bp, Artificial Sequence
  ENSG00000125835_6 (sequence is synthesized)
ctccaatgggcatgccccctccgggaatgcggcctcctccccctgggatgcgaggccttctttgacccttggccacagagtatggaagtagctccgcagaggcgtgggctcgattcctca

SEQ ID NO: 263668 - DNA, 120 bp, Artificial Sequence
  ENSG00000125835_7 (sequence is synthesized)
gggccacgttaccacagacctgtttgtttcttatgctgttgttcgtggagtctcatgggattgtctggtttcccttacagggccccctcccccgggaatgcgcccaccaaggccctagac

SEQ ID NO: 263669 - DNA, 120 bp, Artificial Sequence
  ENSG00000125835_8 (sequence is synthesized)
tcatcttggccctcctcagctccctgcctgtttcccgtaaggctgtacatagtccttttatctccttgtggcctatgaaactggtttataataaactcttaagagaacattataattgca

SEQ ID NO: 263670 - DNA, 120 bp, Artificial Sequence
  ENSG00000125835_9 (sequence is synthesized)
tttgtaaagctgtagcctaaagggctctcccaatgcagcctggtctgaaactgctttaagaagcctctgaccctcttcagggccaaagaactccaaacaagcagaaagggaagagaagcg

SEQ ID NO: 263671 - DNA, 120 bp, Artificial Sequence
  ENSG00000125841_0 (sequence is synthesized)
gcctttgctcggcggagacagcaggcagagagtttctctctagggaaaaggacgcagttggtgtggagcagggcatcggtggtcctgtcaggaagagtggcgcgggtgccgatgaggaaa

SEQ ID NO: 263672 - DNA, 120 bp, Artificial Sequence
  ENSG00000125841_1 (sequence is synthesized)
ctgagacccagaaaggtggaagcacttgtctaaggtcacgcctccaggaagcagtgtgtccacgactccagtccaagtggtcaggctccagagcccacagtcccaggggtccatgatgcc

SEQ ID NO: 263673 - DNA, 120 bp, Artificial Sequence
  ENSG00000125841_2 (sequence is synthesized)
gagctgcaatcgttcctgcagctgcagccgcggccccagcgtggaggatggcaagtggtatggggtccgctcctacctgcacctcttctatgaggactgtgcaggcactgctctcagcga

SEQ ID NO: 263674 - DNA, 120 bp, Artificial Sequence
  ENSG00000125841_3 (sequence is synthesized)
cgaccctgagggacctccggtcctgtgcccccgccggccctggccctcactgtgttggaagatcagcctgtcctcggggaccctgcttctgctgctgggtgtggcggctctgaccactgg

SEQ ID NO: 263675 - DNA, 120 bp, Artificial Sequence
  ENSG00000125841_4 (sequence is synthesized)
ctatgcagtgccccccaagctggagggcatcggtgagggtgagttcctggtgttggatcagcgggcagccgactacaaccaggccctgggcacctgtcgcctggcaggcacagcgctctg

SEQ ID NO: 263676 - DNA, 120 bp, Artificial Sequence
  ENSG00000125841_5 (sequence is synthesized)
tgtggcagctggagttctgctcgccatctgcctcttctgggccatgataggctggctgagccaggacaccaaggcagagcccttggaccccgaagccgacagccacgtggaggtcttcgg

SEQ ID NO: 263677 - DNA, 120 bp, Artificial Sequence
  ENSG00000125841_6 (sequence is synthesized)
ggatgagccagagcagcagttgtcacccattttccgcaatgccagtggccagtcatggttctcgccacccgccagcccctttgggcaatcttctgtgcagactatccagcccaagaggga

SEQ ID NO: 263678 - DNA, 120 bp, Artificial Sequence
  ENSG00000125841_7 (sequence is synthesized)
ctcctgagctgcccacatggcctaagatgtgggtcctggatccttccccccttctcaccataaccccctctcagtgtttccccaacttctcccttttagcagggtccctttagagcccaa

SEQ ID NO: 263679 - DNA, 120 bp, Artificial Sequence
  ENSG00000125841_8 (sequence is synthesized)
tccctccccaggagtggggccccaactcttccaagataccagcattcctcaagtcctcccaaaacttcctacccacaccctcttcccaaggccctcaggggcagaaaacatctccttcaa

SEQ ID NO: 263680 - DNA, 120 bp, Artificial Sequence
  ENSG00000125841_9 (sequence is synthesized)
cccgtccccactccttcctctgcatgaccttgggcaaacccttgccctttcaagccatcagctcctgcctctctgccatgagggctttggatcagattcctcttctcgccaggatgagga

SEQ ID NO: 263681 - DNA, 120 bp, Artificial Sequence
  ENSG00000125841_10 (sequence is synthesized)
cacgcactgccctccatagacacagatgaaggggtgggggtcattcagctcgaatgggtcccagatgctcacttggcctttccctgcaggatgagtgaagacgtttgcctctcacagtgt

SEQ ID NO: 263682 - DNA, 120 bp, Artificial Sequence
  ENSG00000125841_11 (sequence is synthesized)
gtcttctacctgcattttggcatcagagccccccagcccacccaccacaggcaattactagccctagttgataggtgaggtgggtgaagaaggctggaggtgacatgtccgaggtcacac

SEQ ID NO: 263683 - DNA, 120 bp, Artificial Sequence
  ENSG00000125841_12 (sequence is synthesized)
aacaaagcagcatgcaggaactagaaacacatcttcagcctcctcctgggccagctcttgtgctacaggtggggcggagccagcccctcaccttcctggttccctgagggtcctcagggt

SEQ ID NO: 263684 - DNA, 120 bp, Artificial Sequence
  ENSG00000125841_13 (sequence is synthesized)
ggaggacaggtttggcccagaaagactagccagaggcctgatggtcccaggtggctctggatatactttggatatggatttaaatggtctctaagagccgggggtagggggcaggaaaag

SEQ ID NO: 263685 - DNA, 120 bp, Artificial Sequence
  ENSG00000125841_14 (sequence is synthesized)
tgggttgtctttgcccctcaaagtccacctacctagaaaccaagcccacggtcttggccgtgaccctgataataaatgggctctctcagaggcgccagcccctccctccccagccggagg

SEQ ID NO: 263686 - DNA, 120 bp, Artificial Sequence
  ENSG00000125841_15 (sequence is synthesized)
cgtcatctctcttctgtaccactagagggagctctgatgcagctggagagcagcgctcaaggctctcgcccctcccctccctaacccttaccttcagtctccaccagcctgaagggcctc

SEQ ID NO: 263687 - DNA, 120 bp, Artificial Sequence
  ENSG00000125841_16 (sequence is synthesized)
ctaggggatcctcaggcggcccccaccagggcacaccctactgtccttgtgcctcacgccccctcctcatcctgcaccccttccatcccaccttccctttcaataaacagctgggatgga

SEQ ID NO: 263688 - DNA, 120 bp, Artificial Sequence
  ENSG00000125841_17 (sequence is synthesized)
ccgccgtctgcagagccaggccctgaggcgggccggcgccccctcccccgccccgaactgcggcgcaggcgcgaaccggacccgcctttgctcggcggagacagcaggcagagagatgag

SEQ ID NO: 263689 - DNA, 120 bp, Artificial Sequence
  ENSG00000125841_18 (sequence is synthesized)
gtgacggcagcttcggtgaggagtctgaggggctgcgtgaggggctggggcccagggagtccgaggggtctctgtgagggcgctggggtgtccgagcgagcagggaactctggaagggga

SEQ ID NO: 263690 - DNA, 120 bp, Artificial Sequence
  ENSG00000125841_19 (sequence is synthesized)
ggacccgcctttgctcggcggagacagcaggcagagagtttctctctagggaaaaggacgcagttggtgtggagcagggcatcggtggtcctgtcaggaagagtggcgcggatgaggaaa

SEQ ID NO: 263691 - DNA, 120 bp, Artificial Sequence
  ENSG00000125841_20 (sequence is synthesized)
gagtgtgggctggactcagcaacttgcttctaacaagtagaatgtggaaaggcaaaaacagtgacttcacagtggaaaaatctggcagacaccaccttaaccaaatgaaggctggcacca

SEQ ID NO: 263692 - DNA, 120 bp, Artificial Sequence
  ENSG00000125841_21 (sequence is synthesized)
gttgatatcacagcctctgaaatgatgtggtgagaagggcacttggcctgagtggcattcttcccccaaatccgtaacgtcagcctaatcatgagaagacccattctacaaaagatctga

SEQ ID NO: 263693 - DNA, 120 bp, Artificial Sequence
  ENSG00000125841_22 (sequence is synthesized)
ccagcactcttcaaatgtgtccaggtcacgaaagacaaggaaaggacaagaaacggtctcaggttggaggagactaaggagacgtggctgaaggatacacaggatctccctgtactgtcc

SEQ ID NO: 263694 - DNA, 120 bp, Artificial Sequence
  ENSG00000125841_23 (sequence is synthesized)
gagggggatggagacctggaaaagggactgacggtgcagcgaggagaggaaggctcggttaagggatgggtcttccacgggaggggtggggaactgcgggagtgacggcagcttcgatga

SEQ ID NO: 263695 - DNA, 120 bp, Artificial Sequence
  ENSG00000125843_0 (sequence is synthesized)
gtgcgcaggcgcccacgggccgcgcagccgccattgctctcctgccacggaggggagcgcttggtggcagtccgcgggcccggacggaaggctgaggcgacgcctcgacgacagcggacc

SEQ ID NO: 263696 - DNA, 120 bp, Artificial Sequence
  ENSG00000125843_1 (sequence is synthesized)
ggagctgcaggggcaacacattcagggcggggtgccccatttaggcctggctgaccggagtaagaaactacaacccccgaagtgccttgcgcctcaaggttacggaggcagtgacgtaag

SEQ ID NO: 263697 - DNA, 120 bp, Artificial Sequence
  ENSG00000125843_2 (sequence is synthesized)
ctgtcttgaccgctaccatttctctagtagaggcgggacgcggcggcgcggagtgatgacgcgctctgctggcggctggagggttgcggagcacccaccctggagccatggtccacgcct

SEQ ID NO: 263698 - DNA, 120 bp, Artificial Sequence
  ENSG00000125843_3 (sequence is synthesized)
tcctcattcacaccttgagggccccgaatactgaggacacgggcctttgccgagtgctgtactcctgcgtcttcggtgctgagaagtcacctgatgacccacggccgcatggtgccgaga

SEQ ID NO: 263699 - DNA, 120 bp, Artificial Sequence
  ENSG00000125843_4 (sequence is synthesized)
gggacaggcttctccggaaggaacagattttagctgtggccaggcaggtagagtcaatgtgtcggctgcagcagcaggcatctggccggccccccatggacctgcagccgcaatcctcag

SEQ ID NO: 263700 - DNA, 120 bp, Artificial Sequence
  ENSG00000125843_5 (sequence is synthesized)
atgagcaagtgccgctgcacgaggccccacgtggggctttccgcctggcagcagagaaccctttccaggagccacggacggtggtgtggctgggcgtgctctcgttaggctttgccctgg

SEQ ID NO: 263701 - DNA, 120 bp, Artificial Sequence
  ENSG00000125843_6 (sequence is synthesized)
tgctggatgcccatgagaacctgctactggctgagggcacgctccggctgctgacacgcctcctccttgaccacctccggctgctggcgcccagcaccagccttctgctgcgggctgacc

SEQ ID NO: 263702 - DNA, 120 bp, Artificial Sequence
  ENSG00000125843_7 (sequence is synthesized)
gcattgagggcatcctcacccgcttcctgccacatggtcagctgcttttcctcaacgaccagtttgtccaaggcctggagaaggaattcagtgccgcttggccccgctgattcctcgttg

SEQ ID NO: 263703 - DNA, 120 bp, Artificial Sequence
  ENSG00000125843_8 (sequence is synthesized)
ccagatgaagcttggcatctccctcctacccagcagctctgatgtgctgctataccaggacaagtgggtgacacaagcctgcagaaagggggctgggcagagggtggaggaggtcctgcc

SEQ ID NO: 263704 - DNA, 120 bp, Artificial Sequence
  ENSG00000125843_9 (sequence is synthesized)
tgtcctcaggttagtggaaccacagaacttcctgagcctagagctgctgtgttacttagaccgctgccgtgcggcagccacgcttgtccttgaacccaccttcctccatccctgccagcc

SEQ ID NO: 263705 - DNA, 120 bp, Artificial Sequence
  ENSG00000125843_10 (sequence is synthesized)
tgtccttgaacccaccttcctccatccctgccagccgatagtgctagggtgaggagctgcctggagctcaccccgctcttcttccaaacccacagtcaaggccaggcgcggtggctcacg

SEQ ID NO: 263706 - DNA, 71 bp, Artificial Sequence
  ENSG00000125843_11 (sequence is synthesized)
tggcgcccacctgtaatcctagctgctcagggggctgagtcatgggaatcacttgaacctgggaggcagag

SEQ ID NO: 263707 - DNA, 76 bp, Artificial Sequence
  ENSG00000125843_12 (sequence is synthesized)
ctgggtgtatggcgcccacctgtaatcctagctgctcagggggctgagtcatggtgcgccacttcactccagcctg

SEQ ID NO: 263708 - DNA, 120 bp, Artificial Sequence
  ENSG00000125843_13 (sequence is synthesized)
tcccacagtcatcgaaacacaaaaggggtctcagactcccctgagggtggaggagctgtgcctgcatgctggcaggccacagcccctggctttgtgcccacttaggcagtattatcaaca

SEQ ID NO: 263709 - DNA, 120 bp, Artificial Sequence
  ENSG00000125843_14 (sequence is synthesized)
aggtcctgctcagtgtccagcccccgctgagttcagaaatgcatctgccaatcagcagcaggattctgcagctccttttgtgccaagcccgttcccaccaggcaggctcgagataaagtc

SEQ ID NO: 263710 - DNA, 120 bp, Artificial Sequence
  ENSG00000125843_15 (sequence is synthesized)
atcacagccttccctcatctgcagggagagaagttgctgtcagatgaatgtgagcagtctagcctggatgacatatttttcgttttgaattaaaagcactggctgtgtgattttaccctc

SEQ ID NO: 263711 - DNA, 120 bp, Artificial Sequence
  ENSG00000125843_16 (sequence is synthesized)
tttcgtggtcaaggatccccctaggaggcttcttgggatgcctccatctctcatccccacctcacctctgtctccttagaggcctcctttggatggtggcacacatttctccaccaaagt

SEQ ID NO: 263712 - DNA, 120 bp, Artificial Sequence
  ENSG00000125843_17 (sequence is synthesized)
atatgtcacaggtggcaggtggctgtggcagagccgtctgagaagcagtgcttgggctgagaattggtgcgagtggtttatgtggggtgggcggtgatcccgggaagcaggaaggggaca

SEQ ID NO: 263713 - DNA, 120 bp, Artificial Sequence
  ENSG00000125843_18 (sequence is synthesized)
cagtcctcgtgaatgcttgtcaagcctattaggactgtggtagggagctgagtgcctctagggggctgcacacagcagttgcctctgaattacctcacctgagaggtggcggctgtgggt

SEQ ID NO: 263714 - DNA, 120 bp, Artificial Sequence
  ENSG00000125843_19 (sequence is synthesized)
gtttgcctactgcctttagtcagtggttacaggttgatcccagggtgcatacattccctggctctttctgcccctgagaaaaagccttcaggcaatgtggagctgggcctgcctgcacca

SEQ ID NO: 263715 - DNA, 120 bp, Artificial Sequence
  ENSG00000125843_20 (sequence is synthesized)
tgttgagtcccaaagggatatgggtggggtaccaaaagtcggtggttaggaggtcttcaatcagcagcttctagtgaaggtttaaacttactcagttgggggcggggggtgggggaaaaa

SEQ ID NO: 263716 - DNA, 120 bp, Artificial Sequence
  ENSG00000125843_21 (sequence is synthesized)
ccacttcagtttacattgattttcatgatcttcctgttaccaaggaaggtgaggctttcttggcagaacgagcctcctaggtgctcagctctcatgcttgccatccatcagttgcccttt

SEQ ID NO: 263717 - DNA, 120 bp, Artificial Sequence
  ENSG00000125843_22 (sequence is synthesized)
ggccttctaccaccactgtcaacataattgggatgaggccaccttttccattttatggtgccacaaaccaccttgaccatgaagacctaaagggatgttactctgtgtgtgtggccaagt

SEQ ID NO: 263718 - DNA, 120 bp, Artificial Sequence
  ENSG00000125843_23 (sequence is synthesized)
cccaccagtggaaatgtcccacaggcctctagtagggacaccccttccctatacattctgttctcctggcccacccctcaccccaggctggcggtcctggtggattggctgtgttctcag

SEQ ID NO: 263719 - DNA, 120 bp, Artificial Sequence
  ENSG00000125843_24 (sequence is synthesized)
ggaacaggccattttgtcctctatggaaaggctcaagcttactgatctgaattctttctgcctttttttcaaacggaacttaaggaagaggttgagactctgctcccctgggagctgtgg

SEQ ID NO: 263720 - DNA, 120 bp, Artificial Sequence
  ENSG00000125843_25 (sequence is synthesized)
gaagttgaggttaggcgtggctggtggcctggttctcatgaggtggggcaaactgatggacaagagaatagtagagactgagaccacaccgtggggctgctgagctccagttcctgtcca

SEQ ID NO: 263721 - DNA, 120 bp, Artificial Sequence
  ENSG00000125843_26 (sequence is synthesized)
gctggaccagggttttcttaaccagatgagcttgcccagcacccttcccacacttcacacttctgccccagcctcttgggctgggtttccaccacaatttatgctcaccatatatttatc

SEQ ID NO: 263722 - DNA, 120 bp, Artificial Sequence
  ENSG00000125843_27 (sequence is synthesized)
gagcctcccttgggcctgatgctctgctgggtgcaatgcaggatacagaatgaccccaaagttccaggagagacagagctaaggccaggtgactgcagatgactgcaaagcagcaatggt

SEQ ID NO: 263723 - DNA, 120 bp, Artificial Sequence
  ENSG00000125843_28 (sequence is synthesized)
ttgagcatccctgaattgctgctcacaagtgctttaaacacctaaaggaagaaggggcacttcagtgacgaaggccaagtgaaggagccaggatttagaactaaaagtgagatggctatg

SEQ ID NO: 263724 - DNA, 120 bp, Artificial Sequence
  ENSG00000125843_29 (sequence is synthesized)
gaagcaaacttgcctccctctccaagcctcttccctttcttctccctgccccaggaaccctggccaaaccacatatccctcagcttcttgagagaactagagactttgagcagctagtag

SEQ ID NO: 263725 - DNA, 120 bp, Artificial Sequence
  ENSG00000125843_30 (sequence is synthesized)
tgttaccagtgtacctccacaaacactcctgggacaacagatgatgacaggagggcagtagagcccagagaagagagcttacctggaaggaggaagaagtcacaggttttgttttgtttt

SEQ ID NO: 263726 - DNA, 77 bp, Artificial Sequence
  ENSG00000125843_31 (sequence is synthesized)
acatctcctgaccttgtgatccgcccgccgtggcctctcaaagtaccgggattataggcgtgagccaccacgactga

SEQ ID NO: 263727 - DNA, 120 bp, Artificial Sequence
  ENSG00000125843_32 (sequence is synthesized)
tcaaagtaccgggattataggcgtgagccaccacgactgactggcatgaagtcacaggttttaaggcaggaactggcctgcatgtatgtgggtcactgattgggtcacatacactgcatg

SEQ ID NO: 263728 - DNA, 120 bp, Artificial Sequence
  ENSG00000125843_33 (sequence is synthesized)
tatgtgagccctgggatgggattggatcatcttgtctcctttagggcagggtgtttttttctagccctgtggtgctgcgcactgtccagcatccccccagggctcaatgttttcttttct

SEQ ID NO: 263729 - DNA, 120 bp, Artificial Sequence
  ENSG00000125843_34 (sequence is synthesized)
ggtgtgagccaccatgcctggcctcaatcttttcttttaaacaattattcctatattttattgtaatgcagttaaccgtgtttgtcagattcaatactctgtgacccgttaaccaagtct

SEQ ID NO: 263730 - DNA, 120 bp, Artificial Sequence
  ENSG00000125843_35 (sequence is synthesized)
tttgtcagattcaatactctgtgacccgttaaccaagtctctgtatgtttattactgcaattcaagtggccgtgaccgttttcttaaatatactttatttgtttagtgcaattttaggtt

SEQ ID NO: 263731 - DNA, 120 bp, Artificial Sequence
  ENSG00000125843_36 (sequence is synthesized)
cacagtaaaactgagcagagggtacagagagttctcatttactccctgtccccacacatgcacagcctcccttatcaccaacactgggcaccagagtggtcatttgttacaactgatgga

SEQ ID NO: 263732 - DNA, 120 bp, Artificial Sequence
  ENSG00000125843_37 (sequence is synthesized)
atagtttacattagggttcactcttggggtggtacattctataggtttggatgtattttcagtgacatgcatctaccattatagtatcatacagaagagtttccctgcccgaacagtcct

SEQ ID NO: 263733 - DNA, 120 bp, Artificial Sequence
  ENSG00000125843_38 (sequence is synthesized)
atacagaagagtttccctgcccgaacagtcctctgctgcacctgttcattcttccctcccctcaacccctagcaaccattgatccttttactgcttccatagttttgccttttccagaat

SEQ ID NO: 263734 - DNA, 120 bp, Artificial Sequence
  ENSG00000125843_39 (sequence is synthesized)
gttgtgtagttagattcatactgtatatgtagccttttcagattgacttccttcacttagtaatgtacatttaagattccttcaagtcttttcatggctgaatcatgagcttgacagctc

SEQ ID NO: 263735 - DNA, 120 bp, Artificial Sequence
  ENSG00000125843_40 (sequence is synthesized)
ttcaagtcttttcatggctgaatcatgagcttgacagctcattttggaagtactgctgaatagtattccattatgtggatgtacattatctgttcacctactgaaggacatcttggttgc

SEQ ID NO: 263736 - DNA, 120 bp, Artificial Sequence
  ENSG00000125844_0 (sequence is synthesized)
gaaggcaggaggcggcgatcccggcggagggggccgttcgccagctctgaggcagaaagtgccacgactccacacgcgcgcacgcagccagcgagcggccggagcggacggcagacgggg

SEQ ID NO: 263737 - DNA, 120 bp, Artificial Sequence
  ENSG00000125844_1 (sequence is synthesized)
cgggcggcgtcagggtcgcagcgtctacagctgctcgggggcggtttcttggcggaggcttggccggctcctctctcccggctccgcggcggctgcgaaggcggcggctcctgccctctc

SEQ ID NO: 263738 - DNA, 120 bp, Artificial Sequence
  ENSG00000125844_2 (sequence is synthesized)
gctttccctctcgcgtctctggctgcaggtgaaaggaaagcaagccaggatggatatttacgacactcaaaccttgggggttgtggtctttggaggattcatggttgtttctgccattgg

SEQ ID NO: 263739 - DNA, 120 bp, Artificial Sequence
  ENSG00000125844_3 (sequence is synthesized)
catcttcctggtgtcgactttctccatgaaggaaacgtcatatgaagaagccctagccaaccagcgcaaggagatggcgaaaactcaccaccagaaagtcgagaagaaaaagaaggagaa

SEQ ID NO: 263740 - DNA, 120 bp, Artificial Sequence
  ENSG00000125844_4 (sequence is synthesized)
aacagtggagaagaaaggaaagaccaagaaaaaggaagagaaacctaatgggaagatacctgatcatgatccagcccccaatgtgactgtcctccttcgagaaccagtgcgggctcctgc

SEQ ID NO: 263741 - DNA, 120 bp, Artificial Sequence
  ENSG00000125844_5 (sequence is synthesized)
tgtggctgtggctccaaccccagtgcagccccccattatcgttgctcctgtcgccacagttccagccatgccccaggagaagctggcctcctcccccaaggacaaaaagaagaaggagaa

SEQ ID NO: 263742 - DNA, 120 bp, Artificial Sequence
  ENSG00000125844_6 (sequence is synthesized)
aaaagtggcaaaagtggaaccagctgtcagctctgtagtgaattccatccaggttctcacttcgaaggctgccatcttggaaactgctcccaaggagggcagaaatacagatgtggccca

SEQ ID NO: 263743 - DNA, 120 bp, Artificial Sequence
  ENSG00000125844_7 (sequence is synthesized)
gagcccagaggcaccaaagcaagaggctcctgccaagaagaagtctggttcaaagaaaaaagggcccccagatgccgacggccctctctacctcccctacaagacgctggtctccacggt

SEQ ID NO: 263744 - DNA, 120 bp, Artificial Sequence
  ENSG00000125844_8 (sequence is synthesized)
tgggagcatggtgttcaacgagggcgaggcccagcggctcatcgagatcctgtctgagaaggctggcatcattcaggacacctggcacaaggccactcagaagggtgaccctgtggcgat

SEQ ID NO: 263745 - DNA, 120 bp, Artificial Sequence
  ENSG00000125844_9 (sequence is synthesized)
tctgaaacgccagctggaagagaaggaaaaactgctggccacagaacaggaagatgcggctgtcgccaagagcaaactgagggagctcaacaaggagatggcagcagaaaaggccaaagc

SEQ ID NO: 263746 - DNA, 120 bp, Artificial Sequence
  ENSG00000125844_10 (sequence is synthesized)
agcagccggggaggccaaagtgaaaaagcagctggtggcccgggagcaggagatcacggctgtgcaggcacgcatgcaggccagctaccgggagcacgtgaaggaggtgcagcagctgca

SEQ ID NO: 263747 - DNA, 120 bp, Artificial Sequence
  ENSG00000125844_11 (sequence is synthesized)
gggcaagatccggactcttcaggagcagctggagaatggccccaacacgcagctggcccgcctgcagcaggagaactccatcctgcgggatgccttgaaccaggccacgagccaggtgga

SEQ ID NO: 263748 - DNA, 120 bp, Artificial Sequence
  ENSG00000125844_12 (sequence is synthesized)
gagcaagcagaacgcagagctggccaagcttcggcaggagctcagcaaggtcagcaaagagctggtggagaagtcagaggctgtgcggcaagatgagcagcagcggaaagctctggaagc

SEQ ID NO: 263749 - DNA, 120 bp, Artificial Sequence
  ENSG00000125844_13 (sequence is synthesized)
caaggcagctgccttcgagaagcaggtcctgcagctgcaggcgtcccacagggagagtgaggaggccctgcagaagcgcctggacgaggtcagccgggagctgtgccacacgcagagcag

SEQ ID NO: 263750 - DNA, 120 bp, Artificial Sequence
  ENSG00000125844_14 (sequence is synthesized)
ccacgccagcctccgggcggatgccgagaaggcccaggagcaacagcagcagatggccgagctgcacagcaagttacagtcctccgaggcggaggtgcgcagcaaatgcgaggagctgag

SEQ ID NO: 263751 - DNA, 120 bp, Artificial Sequence
  ENSG00000125844_15 (sequence is synthesized)
cacgggcagctccaggaggccagggcggagaactcccagctcacagagagaatccgttccattgaggccctgctggaggcgggccaggcgcgggatgcccaggacgtccaggccagccag

SEQ ID NO: 263752 - DNA, 120 bp, Artificial Sequence
  ENSG00000125844_16 (sequence is synthesized)
gcggaggctgaccagcagcagactcgcctcaaggagctggagtcccaggtgtcgggtctggagaaggaggccatcgagctcagggaggccgtcgagcagcagaaagtgaagaacaatgac

SEQ ID NO: 263753 - DNA, 120 bp, Artificial Sequence
  ENSG00000125844_17 (sequence is synthesized)
ctccgggagaagaactggaaggccatggaggcactggccacggccgagcaggcctgcaaggagaagctgctctccctgacccaggccaaggaggaatcggagaagcagctctgtctgatt

SEQ ID NO: 263754 - DNA, 120 bp, Artificial Sequence
  ENSG00000125844_18 (sequence is synthesized)
gaggcgcagaccatggaggccctgctggctctgctcccagaactctctgtcttggcacaacagaattacaccgagtggctgcaggatctcaaagagaaaggccccacgctgctgaagcac

SEQ ID NO: 263755 - DNA, 120 bp, Artificial Sequence
  ENSG00000125844_19 (sequence is synthesized)
ccgccagctcccgcggagccctcctcggacctggcctccaagttgagggaggccgaggagacgcagagcacactgcaggccgagtgtgaccagtaccgcagcatcctggcggagacggag

SEQ ID NO: 263756 - DNA, 120 bp, Artificial Sequence
  ENSG00000125844_20 (sequence is synthesized)
ggcatgctcagagacctgcagaagagcgtggaggaggaggagcaggtgtggagggccaaggtgggcgccgcagaggaggagctccagaagtcccgggtcacagtgaagcatctcgaagag

SEQ ID NO: 263757 - DNA, 120 bp, Artificial Sequence
  ENSG00000125844_21 (sequence is synthesized)
attgtagagaagctaaaaggagaacttgaaagttcggaccaggtgagggagcacacgtcgcatttggaggcagagctggaaaagcacatggcggccgccagcgccgagtgccagaactac

SEQ ID NO: 263758 - DNA, 120 bp, Artificial Sequence
  ENSG00000125844_22 (sequence is synthesized)
gccaaggaggtggcagggctgaggcaacttctcctagaatctcaatctcagctcgatgccgccaagagcgaagcccagaaacagagcgatgagcttgccctggtcaggcagcagttgagt

SEQ ID NO: 263759 - DNA, 120 bp, Artificial Sequence
  ENSG00000125844_23 (sequence is synthesized)
gaaatgaagagccacgtagaggatggtgacatagctggggccccagcttcctccccagaggcgcccccagccgagcaggaccccgttcagctgaagacgcagctggagtggacagaagcc

SEQ ID NO: 263760 - DNA, 120 bp, Artificial Sequence
  ENSG00000125844_24 (sequence is synthesized)
atcctggaggatgagcagacacagcggcagaagctcacggccgagtttgaggaggctcagacctcggcatgtcggttacaagaagaattggagaagctccgcacagccggccccctagag

SEQ ID NO: 263761 - DNA, 120 bp, Artificial Sequence
  ENSG00000125844_25 (sequence is synthesized)
tcttcagaaacagaggaggcctcacagctgaaggagagactagaaaaagagaagaagttaacaagtgacctggggcgcgccgccacgagactgcaggagcttctgaagacgacccaggag

SEQ ID NO: 263762 - DNA, 120 bp, Artificial Sequence
  ENSG00000125844_26 (sequence is synthesized)
cagctggcaagggagaaggacacggtgaagaagctgcaggaacagctggaaaaggcagaggacggcagcagctcaaaggagggcacctctgtctgagtttcctctttggaaaaagaagtt

SEQ ID NO: 263763 - DNA, 120 bp, Artificial Sequence
  ENSG00000125844_27 (sequence is synthesized)
actgttcaacttaccaaaatgccttacacattccttacaaataaaccaaccaacctacacagcgttatccaggcccaacttccggtagctccgagagaagccatgagagacaagtctctt

SEQ ID NO: 263764 - DNA, 120 bp, Artificial Sequence
  ENSG00000125844_28 (sequence is synthesized)
agagccacagaagtagaccttccagagccccagtttgtaaatgaacctgtgtcacatttgataaacactatcctgggcgcagccccgggccaccgccgagtgacgccaaagccctggttg

SEQ ID NO: 263765 - DNA, 120 bp, Artificial Sequence
  ENSG00000125844_29 (sequence is synthesized)
actctgacagccccgtgggtgtgtgggaggccgggcgctctggggtctgtctgtcagtgcaatcgtttagtgttttttcagtggggcggggcgggaagcgggtgggaccgggcagccagt

SEQ ID NO: 263766 - DNA, 120 bp, Artificial Sequence
  ENSG00000125844_30 (sequence is synthesized)
tctcaaaggctgtggggccgactggaggccacagcccctcacccctagacgttgccaaccagaactgacgtgtgacctcctgggtgttgatgccattaaaaccaacgttggtgcccggtg

SEQ ID NO: 263767 - DNA, 120 bp, Artificial Sequence
  ENSG00000125844_31 (sequence is synthesized)
gcgtctctggctgcagaaagaagcttccggttctgaggtcctggaggtgccatttccctctctgttgaagcaaaggccggggcagacctcctagtgaaaggaaagcaagccaggatggat

SEQ ID NO: 263768 - DNA, 120 bp, Artificial Sequence
  ENSG00000125844_32 (sequence is synthesized)
aaggcggaggggactcagaatcaaagcaaaaaggctgaaggagccccaaaccagggcagaaaggcagagggaaccccaaaccagggcaaaaagacagagggaaccccaaaccaagggaaa

SEQ ID NO: 263769 - DNA, 120 bp, Artificial Sequence
  ENSG00000125844_33 (sequence is synthesized)
aaggcagagggaaccccaaaccaaggcaaaaaggcagaaggaaccccaaaccaaggcaaaaaggcggagggggcccagaaccagggtaaaaaggtagatacaaccccaaaccaggggaaa

SEQ ID NO: 263770 - DNA, 120 bp, Artificial Sequence
  ENSG00000125844_34 (sequence is synthesized)
aaggtggagggggccccaacccagggcagaaaggccgagggggctcagaaccaggccaaaaaggtagaaggggcccagaaccagggcaaaaaggcagagggggcccagaatcagggcaaa

SEQ ID NO: 263771 - DNA, 120 bp, Artificial Sequence
  ENSG00000125844_35 (sequence is synthesized)
aagggagagggggcccagaaccagggcaagaaggccgagggggcccagaatcagggcaagaaggccgagggggcccagaatcagggcaagaaggccgagggggcccagaatcagggcaag

SEQ ID NO: 263772 - DNA, 120 bp, Artificial Sequence
  ENSG00000125844_36 (sequence is synthesized)
aaggccgagggggcccagaatcagggcaagaaggctgagggggctcagaaccagggcaaaaaggccgagggggctcagaaccagggcaaaaaagtagaaggggcccagaaccagggcaag

SEQ ID NO: 263773 - DNA, 120 bp, Artificial Sequence
  ENSG00000125844_37 (sequence is synthesized)
aaggctgagggtgcccagaaccagggcaaaaaggccgagggggcccagaatcagggcaaaaaggccgagggggcccagaaccagggcaagaaggccgagggggcccagaaccagggcaag

SEQ ID NO: 263774 - DNA, 120 bp, Artificial Sequence
  ENSG00000125844_38 (sequence is synthesized)
aaggccgagggggcccagaaccagggcaagaaggccgagggggcccagaaccagggcaagaaggccgagggtgctcagaaccagggcaaaaaagtagaaggggcccagaaccagggcaag

SEQ ID NO: 263775 - DNA, 120 bp, Artificial Sequence
  ENSG00000125844_39 (sequence is synthesized)
aaggctgagggggcccagaaccagggcaagaaggccgagggggctcagaaccagggcaaaaaggccgagggagcccagaaccagggccaaaaaggagagggagcccagaatcagggtaaa

SEQ ID NO: 263776 - DNA, 120 bp, Artificial Sequence
  ENSG00000125844_40 (sequence is synthesized)
aagacagaaggggctcagggcaaaaaggcagaaaggagtcccaaccaaggcaaaaaaggagagggagctcccatccagggcaaaaaggcagattcggttgctaatcagggcacaaaggta

SEQ ID NO: 263777 - DNA, 120 bp, Artificial Sequence
  ENSG00000125844_41 (sequence is synthesized)
gagggtattacaaaccaggggaaaaaagcagaagggtcccccagtgaaggcaaaaaggcagaagggtcccccaaccaaggcaaaaaggcagacgcagctgccaatcagggtaaaaagaca

SEQ ID NO: 263778 - DNA, 120 bp, Artificial Sequence
  ENSG00000125844_42 (sequence is synthesized)
gagtcagcttctgtccagggcagaaatacagatgtggcccagagcccagaggcaccaaagcaagaggctcctgccaagaagaagtctggttcaaagaaaaaaggtgagcctgggccccca

SEQ ID NO: 263779 - DNA, 120 bp, Artificial Sequence
  ENSG00000125844_43 (sequence is synthesized)
tatcccagggccagcctgctccctgaggtgagtgccctttgagcagaggctgctggcgcatgcgtgtgcgtgtctgtgcatctgtccaggtgagggagcacacgtcgcatttggaggcag

SEQ ID NO: 263780 - DNA, 120 bp, Artificial Sequence
  ENSG00000125844_44 (sequence is synthesized)
agctggaaaagcacatggcggccgccagcgccgagtgccagaactacgccaaggaggtggcaggggtgagtctgccccccaaggagtgcagcccctgcccagcagatctgcggtcctccc

SEQ ID NO: 263781 - DNA, 120 bp, Artificial Sequence
  ENSG00000125844_45 (sequence is synthesized)
tgagctgcttctcctcagccctgtgggagcagctctcggtgacataagccttgaagtccgagtcctcaggcgtttgcccgaagcctcacaggcccctcgttgggctgtcaggcctgaggt

SEQ ID NO: 263782 - DNA, 120 bp, Artificial Sequence
  ENSG00000125844_46 (sequence is synthesized)
gtctctcagggcaggtttcaaaaaggcagcctcccagccaggacaggggcagagccaggcagccctgccccgagggaggcgtttgacgttctaggttatccctccgcaaggggattctct

SEQ ID NO: 263783 - DNA, 120 bp, Artificial Sequence
  ENSG00000125844_47 (sequence is synthesized)
gcctggcttgctgatgtcatatctggtggggagtggatttagatctgacactttttctgctcttcagaagcagaagcacaagcccagtatcccaattctggtttaatctcaaacttttgg

SEQ ID NO: 263784 - DNA, 120 bp, Artificial Sequence
  ENSG00000125844_48 (sequence is synthesized)
cccagcactttgaaaggctgaggtggattgctcgaggccagaaatttgagaccggcctgggcaacatagcaagaccgcatctctaccaaaaaaaaaaaaaaaagccaggcacactggtgg

SEQ ID NO: 263785 - DNA, 120 bp, Artificial Sequence
  ENSG00000125844_49 (sequence is synthesized)
aaaaaaaaaaagccaggcacactggtgggcacctccgttcccagctgcttaggaggctgatgcaggaggattgcctgagcccaagagttcaagaccagcgtggatgacagattgagacca

SEQ ID NO: 263786 - DNA, 120 bp, Artificial Sequence
  ENSG00000125844_50 (sequence is synthesized)
tctctgaaaaaaaaaatcatctccaacttttggcccttttttgccagagataatcagtaaacatttgtgaaggcctgaaagaggtacgcagtgaacaccattcttcctaagtcctcaaaa

SEQ ID NO: 263787 - DNA, 120 bp, Artificial Sequence
  ENSG00000125844_51 (sequence is synthesized)
aagaaatcgtagctgtaggaagcctggcgagccctgtgccggcccgatgctgtgaccctcctcagggttttggttaagtggatgtgttaggttttatgtttcggcgctaactcacgggga

SEQ ID NO: 263788 - DNA, 120 bp, Artificial Sequence
  ENSG00000125844_52 (sequence is synthesized)
agctttgcggtgattcccaggaagcctgagggttgtatcagatgaggacaactagctagggcaggaggtgaaggatggcctcaggccaccctgtgagagctatagttagactcctagaat

SEQ ID NO: 263789 - DNA, 120 bp, Artificial Sequence
  ENSG00000125844_53 (sequence is synthesized)
cttggccttgtagcccccagtgacctcagagactgtctggctaccatgtggtaaatgaagctgtgaccagagatgtcacctgacttgattgtggtcacacatccagatagaaggtggcct

SEQ ID NO: 263790 - DNA, 120 bp, Artificial Sequence
  ENSG00000125844_54 (sequence is synthesized)
ctgggtctccagcttgccttgactcacaactagaggcctcagtggtggtcgtgaggtcaagggtccacatgggtcacgggccctacctgtggataacttggccagccaggaagggcccgc

SEQ ID NO: 263791 - DNA, 120 bp, Artificial Sequence
  ENSG00000125844_55 (sequence is synthesized)
ttctcaggtgtgcgtcaggccagagggcgctgcgctcaggctgggtgtccggtggtcagcatccttcatgcacattccaggactctgcttgggggagttaacactccatcagctctgatc

SEQ ID NO: 263792 - DNA, 120 bp, Artificial Sequence
  ENSG00000125844_56 (sequence is synthesized)
gctggctgtcaggctgctgagtagggactgctgcttatctgctgcctaaagagccaagggccggcagctcacccttggcagtgctcgtggctctacggcgtggtggcttccttcgtggct

SEQ ID NO: 263793 - DNA, 120 bp, Artificial Sequence
  ENSG00000125844_57 (sequence is synthesized)
gtaagaacgcagggaagtgaagcaagggtttggaagttaagcagcatcagtttgtgatggggatggaccagacctggctttcactagacaggtcctgcagtcacaggccagctttctagg

SEQ ID NO: 263794 - DNA, 120 bp, Artificial Sequence
  ENSG00000125844_58 (sequence is synthesized)
ctctcgctttccctctcgcgtctctggctgcagaaagaagcttccggttctgaggtcctggaggtgccatttccctctctgttgaagcaaaggccggggcagacctcctaggcccccaga

SEQ ID NO: 263795 - DNA, 120 bp, Artificial Sequence
  ENSG00000125845_0 (sequence is synthesized)
ccgccgcgctgcgcccggctcgcgctgcgctagtcgctccgcttcccacaccccgccggggactggcagccgccgccgcacatctgccgccacagcctccgccggctacccgaacgttct

SEQ ID NO: 263796 - DNA, 120 bp, Artificial Sequence
  ENSG00000125845_1 (sequence is synthesized)
tgccgccacagcctccgccggctacccgaacgttctcggggccagcgccgagtggatcaccggggaccgcgaggcacccgcgcgccgcagaccccgcgcgggctggagcacccggcagag

SEQ ID NO: 263797 - DNA, 120 bp, Artificial Sequence
  ENSG00000125845_2 (sequence is synthesized)
cgcgccacagcgccgtggcctctgctgcccgggctgcgccagagccgcggacgggcgcgcagagcgccggggactccggagccgatccctagcgccgcgatgcggagcacctactgcagg

SEQ ID NO: 263798 - DNA, 120 bp, Artificial Sequence
  ENSG00000125845_3 (sequence is synthesized)
agatcgggggcctgggacgcgctggccgaggtgtgatcggaccccaggctagccacaaagggcacttggccccagggctaggagagcgaggggagagcacagccacccgcctcggcggcc

SEQ ID NO: 263799 - DNA, 120 bp, Artificial Sequence
  ENSG00000125845_4 (sequence is synthesized)
cgggactcggctcgactcgccggagaatgcgcccgaggacgacggggcgccagagccgcggtgctttcaactggcgagcgcgaatgggggtgcactggagtaaggcagagtgatgcgggg

SEQ ID NO: 263800 - DNA, 120 bp, Artificial Sequence
  ENSG00000125845_5 (sequence is synthesized)
gggcaactcgcctggcaccgagatcgccgccgtgcccttccctggacccggcgtcgcccaggatggctgccccgagccatgggccgcggcggagctagcgcggagcgcccgaccctcgac

SEQ ID NO: 263801 - DNA, 120 bp, Artificial Sequence
  ENSG00000125845_6 (sequence is synthesized)
ccccgagtcccggagccggccccgcgcggggccacgcgtccctcgggcgctggttcctaaggaggacgacagcaccagcttctcctttctcccttcccttccctgccccgcactcctccc

SEQ ID NO: 263802 - DNA, 120 bp, Artificial Sequence
  ENSG00000125845_7 (sequence is synthesized)
cctgctcgctgttgttgtgtgtcagcacttggctggggacttcttgaacttgcagggagaataacttgcgcaccccactttgcgccggtgcctttgccccagcggagcctgcttcgccat

SEQ ID NO: 263803 - DNA, 120 bp, Artificial Sequence
  ENSG00000125845_8 (sequence is synthesized)
ctccgagccccaccgcccctccactcctcggccttgcccgacactgagacgctgttcccagcgtgaaaagagagactgcgcggccggcacccgggagaaggaggaggcaaagaaaaggaa

SEQ ID NO: 263804 - DNA, 120 bp, Artificial Sequence
  ENSG00000125845_9 (sequence is synthesized)
cggacattcggtccttgcgccaggtcctttgaccagagtttttccatgtggacgctctttcaatggacgtgtccccgcgtgcttcttagacggactgcggtctcctaaaggtcgaccatg

SEQ ID NO: 263805 - DNA, 120 bp, Artificial Sequence
  ENSG00000125845_10 (sequence is synthesized)
gtggccgggacccgctgtcttctagcgttgctgcttccccaggtcctcctgggcggcgcggctggcctcgttccggagctgggccgcaggaagttcgcggcggcgtcgtcgggccgcccc

SEQ ID NO: 263806 - DNA, 120 bp, Artificial Sequence
  ENSG00000125845_11 (sequence is synthesized)
tcatcccagccctctgacgaggtcctgagcgagttcgagttgcggctgctcagcatgttcggcctgaaacagagacccacccccagcagggacgccgtggtgcccccctacatgctagac

SEQ ID NO: 263807 - DNA, 120 bp, Artificial Sequence
  ENSG00000125845_12 (sequence is synthesized)
ctgtatcgcaggcactcaggtcagccgggctcacccgccccagaccaccggttggagagggcagccagccgagccaacactgtgcgcagcttccaccatgaagaatctttggaagaacta

SEQ ID NO: 263808 - DNA, 120 bp, Artificial Sequence
  ENSG00000125845_13 (sequence is synthesized)
ccagaaacgagtgggaaaacaacccggagattcttctttaatttaagttctatccccacggaggagtttatcacctcagcagagcttcaggttttccgagaacagatgcaagatgcttta

SEQ ID NO: 263809 - DNA, 120 bp, Artificial Sequence
  ENSG00000125845_14 (sequence is synthesized)
ctcgaaattccccgtgaccagacttttggacaccaggttggtgaatcagaatgcaagcaggtgggaaagttttgatgtcacccccgctgtgatgcggtggactgcacagggacacgccaa

SEQ ID NO: 263810 - DNA, 120 bp, Artificial Sequence
  ENSG00000125845_15 (sequence is synthesized)
ccatggattcgtggtggaagtggcccacttggaggagaaacaaggtgtctccaagagacatgttaggataagcaggtctttgcaccaagatgaacacagctggtcacagataaggccatt

SEQ ID NO: 263811 - DNA, 120 bp, Artificial Sequence
  ENSG00000125845_16 (sequence is synthesized)
gctagtaacttttggccatgatggaaaagggcatcctctccacaaaagagaaaaacgtcaagccaaacacaaacagcggaaacgccttaagtccagctgtaagagacaccctttgtacgt

SEQ ID NO: 263812 - DNA, 120 bp, Artificial Sequence
  ENSG00000125845_17 (sequence is synthesized)
ggacttcagtgacgtggggtggaatgactggattgtggctcccccggggtatcacgccttttactgccacggagaatgcccttttcctctggctgatcatctgaactccactaatcatgc

SEQ ID NO: 263813 - DNA, 120 bp, Artificial Sequence
  ENSG00000125845_18 (sequence is synthesized)
cattgttcagacgttggtcaactctgttaactctaagattcctaaggcatgctgtgtcccgacagaactcagtgctatctcgatgctgtaccttgacgagaatgaaaaggttgtattaaa

SEQ ID NO: 263814 - DNA, 120 bp, Artificial Sequence
  ENSG00000125845_19 (sequence is synthesized)
taaagaactatcaggacatggttgtggagggttgtgggtgtcgctagtacagcaaaattaaatacataaatatatatatatatatatattttagaaaaaagaaaaaaacaaacaaacaaa

SEQ ID NO: 263815 - DNA, 120 bp, Artificial Sequence
  ENSG00000125845_20 (sequence is synthesized)
ccccaccccagttgacactttaatatttcccaatgaagactttatttatggaatggaatggaaaaaaaaacagctattttgaaaatatatttatatctacgaaaagaagttgggaaaaca

SEQ ID NO: 263816 - DNA, 120 bp, Artificial Sequence
  ENSG00000125845_21 (sequence is synthesized)
aatattttaatcagagaattattccttaaagatttaaaatgtatttagttgtacattttatatgggttcaaccccagcacatgaagtataatggtcagatttattttgtatttatttact

SEQ ID NO: 263817 - DNA, 120 bp, Artificial Sequence
  ENSG00000125845_22 (sequence is synthesized)
attataaccactttttaggaaaaaaatagctaatttgtatttatatgtaatcaaaagaagtatcgggtttgtacataattttccaaaaattgtagttgttttcagttgtgtgtatttaag

SEQ ID NO: 263818 - DNA, 120 bp, Artificial Sequence
  ENSG00000125845_23 (sequence is synthesized)
atgaaaagtctacatggaaggttactctggcaaagtgcttagcacgtttgcttttttgcagtgctactgttgagttcacaagttcaagtccagaaaaaaaaagtggataatccactctgc

SEQ ID NO: 263819 - DNA, 120 bp, Artificial Sequence
  ENSG00000125845_24 (sequence is synthesized)
tgactttcaagattattatattattcaattctcaggaatgttgcagagtgattgtccaatccatgagaatttacatccttattaggtggaatatttggataagaaccagacattgctgat

SEQ ID NO: 263820 - DNA, 120 bp, Artificial Sequence
  ENSG00000125845_25 (sequence is synthesized)
ctattatagaaactctcctcctgccccttaatttacagaaagaataaagcaggatccatagaaataattaggaaaacgatgaacctgcaggaaagtgaatgatggtttgttgttcttctt

SEQ ID NO: 263821 - DNA, 120 bp, Artificial Sequence
  ENSG00000125845_26 (sequence is synthesized)
tcctaaattagtgatcccttcaaaggggctgatctggccaaagtattcaataaaacgtaagatttcttcattattgatattgtggtcatatatatttaaaattgatatctcgtggccctc

SEQ ID NO: 263822 - DNA, 120 bp, Artificial Sequence
  ENSG00000125845_27 (sequence is synthesized)
atcaagggttggaaatttatttgtgttttacctttacctcatctgagagctctttattctccaaagaacccagttttctaactttttgcccaacacgcagcaaaattatgcacatcgtgt

SEQ ID NO: 263823 - DNA, 120 bp, Artificial Sequence
  ENSG00000125845_28 (sequence is synthesized)
tttctgcccaccctctgttctctgacctatcagcttgcttttctttccaaggttgtgtgtttgaacacatttctccaaatgttaaacctatttcagataataaatatcaaatctctggca

SEQ ID NO: 263824 - DNA, 120 bp, Artificial Sequence
  ENSG00000125846_0 (sequence is synthesized)
cgccgagcatcctgggaggtgtggtccgggcgctgtgccgaggattcggggtagtgtagtcctggcgccccgctggaggagctccccagctggtggctggagcgaccccttgttctttgg

SEQ ID NO: 263825 - DNA, 120 bp, Artificial Sequence
  ENSG00000125846_1 (sequence is synthesized)
tggcgctgatctaccttctgagatatcatccttcttcagggagataaggaaaaaaagccacagggtcccggagagccaggggaatgcttcaaaagttctgctgcctgagagtaacgtcac

SEQ ID NO: 263826 - DNA, 120 bp, Artificial Sequence
  ENSG00000125846_2 (sequence is synthesized)
agtaatggaacgggaagattctggaatctgtgtccccacctagacaacgattatactggcaggatctatcaggtgtacctattttggaactctggagtctagttgaaggcctccagttcc

SEQ ID NO: 263827 - DNA, 120 bp, Artificial Sequence
  ENSG00000125846_3 (sequence is synthesized)
cagggggaaggaagcatggaggtgtgtcctccatttggaagtagtgctaagaaaattaaaagaataaaactgggcaggggcatgagaataggatgcaaagatgaatttttggactgagtg

SEQ ID NO: 263828 - DNA, 120 bp, Artificial Sequence
  ENSG00000125846_4 (sequence is synthesized)
gccaagaagctccatggtgagcactcacagtctaaggctggaagtttaatgaactgttttctacatttcacaggcacacatggcattcagggatgtggctgtggatttcacccaggatga

SEQ ID NO: 263829 - DNA, 120 bp, Artificial Sequence
  ENSG00000125846_5 (sequence is synthesized)
gtggaggctgctgagccctgctcaaaggactctgtacagagaggtgatgctggagaactacagcaacctggtctcactgggaatttcattttctaaaccagaactcatcacccagctgga

SEQ ID NO: 263830 - DNA, 120 bp, Artificial Sequence
  ENSG00000125846_6 (sequence is synthesized)
gcaagggaaagagacctggagagaggaaaaaaaatgttcaccggcaacctgtccagatccagagccagagctctacctcgatcctttctgccctccgggtttctccagtcagaaattccc

SEQ ID NO: 263831 - DNA, 120 bp, Artificial Sequence
  ENSG00000125846_7 (sequence is synthesized)
catgcagcatgtgctgtgtaatcatcccccctggatcttcacatgcttgtgtgcagaaggtaacatccagcctggggatccgggcccaggggaccaggagaagcagcaacaagcctctga

SEQ ID NO: 263832 - DNA, 120 bp, Artificial Sequence
  ENSG00000125846_8 (sequence is synthesized)
ggggagaccctggagtgatcaagcagaaggtcctgagggagaaggtgccatgcctttgtttggaagaaccaagaaaaggactctgggagcgttctccaggccaccccagaggcagccagt

SEQ ID NO: 263833 - DNA, 120 bp, Artificial Sequence
  ENSG00000125846_9 (sequence is synthesized)
cagctctcggaacggcctcagaggggtggagttagaagccagcccagctcagtcagggaaccctgaggaaacagacaaattgttgaagaggatagaagtcttaggatttggaacagtcaa

SEQ ID NO: 263834 - DNA, 120 bp, Artificial Sequence
  ENSG00000125846_10 (sequence is synthesized)
ctgtggagagtgtggactgagcttcagcaagatgacaaacctgctcagtcaccagcggatacactcaggggagaagccctacgtgtgtggggtatgtgagaagggcttcagcctaaagaa

SEQ ID NO: 263835 - DNA, 120 bp, Artificial Sequence
  ENSG00000125846_11 (sequence is synthesized)
ggacgaggctttaaccggaagtcaacgctaatcatacacgaacggacacactccggtgagaaaccttacatgtgcagtgagtgtgggcgaggcttcagccagaagtcaaacctcatcata

SEQ ID NO: 263836 - DNA, 120 bp, Artificial Sequence
  ENSG00000125846_12 (sequence is synthesized)
caccagaggacacactcaggggaaaagccttacgtgtgccgggaatgtggcaaaggcttcagccagaagtcagctgtcgtgagacaccagaggacacacttggaggagaagaccatcgtg

SEQ ID NO: 263837 - DNA, 120 bp, Artificial Sequence
  ENSG00000125846_13 (sequence is synthesized)
tgcagtgactgtggcctgggcttcagcgacaggtcaaacctcatctcccaccagaggacgcactctggggagaagccctacgcctgcaaggagtgtgggcgatgcttcaggcagaggacc

SEQ ID NO: 263838 - DNA, 120 bp, Artificial Sequence
  ENSG00000125846_14 (sequence is synthesized)
acccttgtcaaccaccagaggacacactcaaaggagaagccctatgtgtgcggggtgtgtgggcacagcttcagccagaattcaaccctcatctctcacaggcggacacacactggggag

SEQ ID NO: 263839 - DNA, 120 bp, Artificial Sequence
  ENSG00000125846_15 (sequence is synthesized)
aagccgtatgtttgtggggtgtgtgggcgaggctttagtctcaagtcacacctcaacagacaccagaacatacactcaggagagaagcccattgtgtgcaaggactgtggccggggcttc

SEQ ID NO: 263840 - DNA, 120 bp, Artificial Sequence
  ENSG00000125846_16 (sequence is synthesized)
agccagcaatccaacctcatcagacaccagaggacgcactcaggcgagaagcccatggtgtgtggggagtgcgggcgaggcttcagccagaagtcaaaccttgttgcacaccagaggacg

SEQ ID NO: 263841 - DNA, 120 bp, Artificial Sequence
  ENSG00000125846_17 (sequence is synthesized)
cactcaggggagaggccgtatgtgtgccgagagtgcgggcgaggctttagccaccaggccggtctcatcaggcacaagcggaagcactcgagggagaagccctacatgtgcaggcagtgt

SEQ ID NO: 263842 - DNA, 120 bp, Artificial Sequence
  ENSG00000125846_18 (sequence is synthesized)
ggactgggctttggcaataagtcagctctaattacacacaagcgggctcactcggaagagaagccttgtgtgtgcagagagtgtggccaaggctttctccaaaagtcacacctcacctta

SEQ ID NO: 263843 - DNA, 120 bp, Artificial Sequence
  ENSG00000125846_19 (sequence is synthesized)
catcaaatgacacatacgggggagaagccatatgtgtgcaagacgtgtgggcggggcttcagcctcaagtctcacctcagcagacacaggaagaccacgtctgtccaccacagactgcca

SEQ ID NO: 263844 - DNA, 120 bp, Artificial Sequence
  ENSG00000125846_20 (sequence is synthesized)
gtgcagcccgaccctgagccgtgtgcagggcaaccttcggattccttatactctctctgaaggcaaagatggggacaaggactaagagtcagaatgttgacactttgatgaaatggagta

SEQ ID NO: 263845 - DNA, 120 bp, Artificial Sequence
  ENSG00000125846_21 (sequence is synthesized)
gagaaatgcattctgtaagtggtcaaaggacatttgactgtttactttctccacactaagtcttctccatgttttgtggccttcggttgtaataaacttggcttctttatacatctgtaa

SEQ ID NO: 263846 - DNA, 120 bp, Artificial Sequence
  ENSG00000125846_22 (sequence is synthesized)
gctcagaaggagggtcacagtagggccaggcactcttctcgggagctcctacgtgttttatgcacgtggttaagaaaaaagagggagaattcaggtgccacagtggccattctccggtga

SEQ ID NO: 263847 - DNA, 120 bp, Artificial Sequence
  ENSG00000125846_23 (sequence is synthesized)
atctaccttctgagatatcatccttcttcagggagataaggaaaaaaagccacagggtcccggagagccaggggaatgttttgtgttacaggcacacatggcattcagggatgtggctgt

SEQ ID NO: 263848 - DNA, 120 bp, Artificial Sequence
  ENSG00000125846_24 (sequence is synthesized)
cctgctggagaggatttcccttgattttcttgaacgctttttgttcttgttctgcctccctgtggctcctgtctgcccagagaggactgcctgctggggaaagggggtactcctgagctc

SEQ ID NO: 263849 - DNA, 90 bp, Artificial Sequence
  ENSG00000125846_25 (sequence is synthesized)
agagcttcagctgcagcaagaaagatttccttcagaaactggcatatttgaatcattaggagttcaattttcaattttatttatttttta

SEQ ID NO: 263850 - DNA, 120 bp, Artificial Sequence
  ENSG00000125846_26 (sequence is synthesized)
gcaatctcggctcactgcaacctccgccacgcaggttcaagcacctgcctcagcgtcctgggtagctgaaattataggtgcacaccaccacaaccagctaatttttatatttttagaaga

SEQ ID NO: 263851 - DNA, 81 bp, Artificial Sequence
  ENSG00000125846_27 (sequence is synthesized)
tcgactcagcctcccaaagtgctggtacaggcgtgagccgctacacctggcctgattttttttttttaatttagttattct

SEQ ID NO: 263852 - DNA, 120 bp, Artificial Sequence
  ENSG00000125846_28 (sequence is synthesized)
tacacctggcctgattttttttttttaatttagttattctcgagtttttaaattttaaatttgtgtcagtgcccattagtctctataaacctatcagtgcaggagcaccttagatttaaa

SEQ ID NO: 263853 - DNA, 120 bp, Artificial Sequence
  ENSG00000125846_29 (sequence is synthesized)
atattttataaataaattcattaacctggtaatattttgtgttaaaatttcttctaagactaaatattcctagtgtatacacagaatgccaaatttggtgaccaactgaaaaaactgact

SEQ ID NO: 263854 - DNA, 120 bp, Artificial Sequence
  ENSG00000125846_30 (sequence is synthesized)
aatggagaattaaagttttgtttttcttctgtcactccatacaaatgttaaaaccatgttgaattaagatttctctgaaggcgcttctataattctgaaatacatttagtgtaaataaaa

SEQ ID NO: 263855 - DNA, 120 bp, Artificial Sequence
  ENSG00000125846_31 (sequence is synthesized)
gcctgccactttacacataggcacagcagctagggctgtaataagcctacatatcagaagccttggttcttataagggtgggtgggaggtattacctgtgtcaaaattatagtcactgtg

SEQ ID NO: 263856 - DNA, 120 bp, Artificial Sequence
  ENSG00000125846_32 (sequence is synthesized)
cttaactcaggacagacacaggagttccttttactgctgaaagacctacttacccatgactatgccctaatatgtatgaaggtaagccaaggagatatgagctgttgcttcccttctcct

SEQ ID NO: 263857 - DNA, 120 bp, Artificial Sequence
  ENSG00000125846_33 (sequence is synthesized)
gtcgtattcaagagaaacaaaatagccaataaatcaaatctgacaactccacccaactcaagtttccataatgtcaaggaagttgctggccagaaatagaacacaaaatcagttatgagt

SEQ ID NO: 263858 - DNA, 120 bp, Artificial Sequence
  ENSG00000125846_34 (sequence is synthesized)
tgtggaacctcagacaacctagattaaaccaaataaacttagtgagaactcagtgaaagcaggtaggatttactgctgaaaaagggtcttgagggaccacccggcacctgtcctgaatac

SEQ ID NO: 263859 - DNA, 120 bp, Artificial Sequence
  ENSG00000125846_35 (sequence is synthesized)
aagggctggaagagcaggctttctctgcaggagctcctcagcactggcgtggggagaggcaggcatcaggttagattgttggttcctctgtctgtcatcaaagcctgaggtaaaggccac

SEQ ID NO: 263860 - DNA, 120 bp, Artificial Sequence
  ENSG00000125846_36 (sequence is synthesized)
cagagctactgaaaggagaaaagttgagcttatttactggccaggcagtgaaacacagaagggaagacattcacttgggcagtttgctgagtaggaagagtcaggaatttttaagtggta

SEQ ID NO: 263861 - DNA, 120 bp, Artificial Sequence
  ENSG00000125846_37 (sequence is synthesized)
agaaaaggtggttctgctcattgtaattaggattgaaaagtagcatttcgcgtagcatggaataattctggaatgtggatgtgtacacttttaataagcttgatttttcattggtcaaga

SEQ ID NO: 263862 - DNA, 120 bp, Artificial Sequence
  ENSG00000125846_38 (sequence is synthesized)
aaagagcattcgggtagatccatcgagatctctacctcgttactcatattgcctggtcattgattgccttcagctgactagacccagttgtgataaaacaatatactcaatgttgacatc

SEQ ID NO: 263863 - DNA, 120 bp, Artificial Sequence
  ENSG00000125846_39 (sequence is synthesized)
tcctacacaagaggcactataagtagaaatttcttcttttacactgatttttggggaaaattttatttacactaattatggaaataggttgggggtaccaggagggagcatcctttaaag

SEQ ID NO: 263864 - DNA, 120 bp, Artificial Sequence
  ENSG00000125846_40 (sequence is synthesized)
tcattggggacctgggctctgtgttgtccactgctgaaagcctactgcctcctagaaattctggcatagagtaatctaacaaatctttgttgagtggggagacagcagctcgggtgtgtc

SEQ ID NO: 263865 - DNA, 120 bp, Artificial Sequence
  ENSG00000125846_41 (sequence is synthesized)
gaaataaggaaggacatttccacatgagtcctagggttagacatctttccatcaaagaagaaagtacttgtggacatgatttatctcagtgtgcatggttgtgagttagaagcagatcca

SEQ ID NO: 263866 - DNA, 120 bp, Artificial Sequence
  ENSG00000125846_42 (sequence is synthesized)
aatgctgtacaatccaaggagcaagtcattgtggttgcccaggaagctgtcttggaaacccaaaatatatgtgtaacgggaggaagactgttctagcagatccagagccagagctctacc

SEQ ID NO: 263867 - DNA, 120 bp, Artificial Sequence
  ENSG00000125846_43 (sequence is synthesized)
tggagagaggaaaaaaaatgttcaccggcaacctgtccagatcatcaagaatatggaaacaactgtgacctacagaaagaagcagatccagagccagagctctacctcgatcctttctgc

SEQ ID NO: 263868 - DNA, 120 bp, Artificial Sequence
  ENSG00000125848_0 (sequence is synthesized)
gtgcagtaaactggaatgctctccctcgctcactcctcagtgtaggagtgatctgaagcaggacaagctcagcctgcagctgccgtgggctttgtgtggactggacgcagagcttgggag

SEQ ID NO: 263869 - DNA, 120 bp, Artificial Sequence
  ENSG00000125848_1 (sequence is synthesized)
acgggggagggctattactccaattcactgtcaatggaattacagctatagcggcagtgtatataggattgctttttctcgtcttcctggagatgctcagtcccagtatattttaaggaa

SEQ ID NO: 263870 - DNA, 120 bp, Artificial Sequence
  ENSG00000125848_2 (sequence is synthesized)
gagaaatataaaggaaatttagtatgcctccttttctttaaatgaagaatttagtttcctttacttcttaaaagagaatacctgttcttgtataacgtgactgcaccagacattctgaaa

SEQ ID NO: 263871 - DNA, 120 bp, Artificial Sequence
  ENSG00000125848_3 (sequence is synthesized)
aatcagcaagaagcaaaagctggaaatagctatttcacagcagggttctgaagtaacggaagctaccttgtataaagacctcaacactgctgaccatgatcagcgcagcctggagcatct

SEQ ID NO: 263872 - DNA, 120 bp, Artificial Sequence
  ENSG00000125848_4 (sequence is synthesized)
tcctcatcgggactaaaattgggctgttccttcaagtagcacctctatcagttatggctaaatcctgtccatctgtgtgtcgctgcgatgcgggtttcatttactgtaatgatcgctttc

SEQ ID NO: 263873 - DNA, 120 bp, Artificial Sequence
  ENSG00000125848_5 (sequence is synthesized)
tgacatccattccaacaggaataccagaggatgctacaactctctaccttcagaacaaccaaataaataatgctgggattccttcagatttgaaaaacttgctgaaagtagaaagaatat

SEQ ID NO: 263874 - DNA, 120 bp, Artificial Sequence
  ENSG00000125848_6 (sequence is synthesized)
acctataccacaacagtttagatgaatttcctaccaacctcccaaagtatgtaaaagagttacatttgcaagaaaataacataaggactatcacttatgattcactttcaaaaattccct

SEQ ID NO: 263875 - DNA, 120 bp, Artificial Sequence
  ENSG00000125848_7 (sequence is synthesized)
atctggaagaattacatttagatgacaactctgtctctgcagttagcatagaagagggagcattccgagacagcaactatctccgactgcttttcctgtcccgtaatcaccttagcacaa

SEQ ID NO: 263876 - DNA, 120 bp, Artificial Sequence
  ENSG00000125848_8 (sequence is synthesized)
ttccctggggtttgcccaggactatagaagaactacgcttggatgataatcgcatatccactatttcatcaccatctcttcaaggtctcactagtctaaaacgcctggttctagatggaa

SEQ ID NO: 263877 - DNA, 120 bp, Artificial Sequence
  ENSG00000125848_9 (sequence is synthesized)
acctgttgaacaatcatggtttaggtgacaaagttttcttcaacctagttaatttgacagagctgtccctggtgcggaattccctgactgctgcaccagtaaaccttccaggcacaaacc

SEQ ID NO: 263878 - DNA, 120 bp, Artificial Sequence
  ENSG00000125848_10 (sequence is synthesized)
tgaggaagctttatcttcaagataaccacatcaatcgggtgcccccaaatgctttttcttatctaaggcagctctatcgactggatatgtccaataataacctaagtaatttacctcagg

SEQ ID NO: 263879 - DNA, 120 bp, Artificial Sequence
  ENSG00000125848_11 (sequence is synthesized)
gtatctttgatgatttggacaatataacacaactgattcttcgcaacaatccctggtattgcgggtgcaagatgaaatgggtacgtgactggttacaatcactacctgtgaaggtcaacg

SEQ ID NO: 263880 - DNA, 120 bp, Artificial Sequence
  ENSG00000125848_12 (sequence is synthesized)
tgcgtgggctcatgtgccaagccccagaaaaggttcgtgggatggctattaaggatctcaatgcagaactgtttgattgtaaggacagtgggattgtaagcaccattcagataaccactg

SEQ ID NO: 263881 - DNA, 120 bp, Artificial Sequence
  ENSG00000125848_13 (sequence is synthesized)
caatacccaacacagtgtatcctgcccaaggacagtggccagctccagtgaccaaacagccagatattaagaaccccaagctcactaaggatcaccaaaccacagggagtccctcaagaa

SEQ ID NO: 263882 - DNA, 120 bp, Artificial Sequence
  ENSG00000125848_14 (sequence is synthesized)
aaacaattacaattactgtgaagtctgtcacctctgataccattcatatctcttggaaacttgctctacctatgactgctttgagactcagctggcttaaactgggccatagcccggcat

SEQ ID NO: 263883 - DNA, 120 bp, Artificial Sequence
  ENSG00000125848_15 (sequence is synthesized)
ttggatctataacagaaacaattgtaacaggggaacgcagtgagtacttggtcacagccctggagcctgattcaccctataaagtatgcatggttcccatggaaaccagcaacctctacc

SEQ ID NO: 263884 - DNA, 120 bp, Artificial Sequence
  ENSG00000125848_16 (sequence is synthesized)
tatttgatgaaactcctgtttgtattgagactgaaactgcaccccttcgaatgtacaaccctacaaccaccctcaatcgagagcaagagaaagaaccttacaaaaaccccaatttacctt

SEQ ID NO: 263885 - DNA, 120 bp, Artificial Sequence
  ENSG00000125848_17 (sequence is synthesized)
tggctgccatcattggtggggctgtggccctggttaccattgcccttcttgctttagtgtgttggtatgttcataggaatggatcgctcttctcaaggaactgtgcatatagcaaaggga

SEQ ID NO: 263886 - DNA, 120 bp, Artificial Sequence
  ENSG00000125848_18 (sequence is synthesized)
ggagaagaaaggatgactatgcagaagctggcactaagaaggacaactctatcctggaaatcagggaaacttcttttcagatgttaccaataagcaatgaacccatctcgaaggaggagt

SEQ ID NO: 263887 - DNA, 120 bp, Artificial Sequence
  ENSG00000125848_19 (sequence is synthesized)
ttgtaatacacaccatatttcctcctaatggaatgaatctgtacaaaaacaatcacagtgaaagcagtagtaaccgaagctacagagacagtggtattccagactcagatcactcacact

SEQ ID NO: 263888 - DNA, 120 bp, Artificial Sequence
  ENSG00000125848_20 (sequence is synthesized)
ggtgatggtaggaaccctgttctactgcaaaacactggaaaaagagactgaaaaaaagcaatgtactgtacatttgccatataatttatatttaagaactttttattaaaagtttcaaat

SEQ ID NO: 263889 - DNA, 120 bp, Artificial Sequence
  ENSG00000125848_21 (sequence is synthesized)
ttcaggttactgctgcgattgatgtagtggagatgcctgaacacaattctatattttagtattttttagtaatttgtactgtattttccttgcaaatattggagttataaaccatttact

SEQ ID NO: 263890 - DNA, 120 bp, Artificial Sequence
  ENSG00000125848_22 (sequence is synthesized)
ttgtgttctactgagtaagatgacttgttgactgtgaaagtgaattttcttgctgtgtcgaacaatcaggactgcattcatatgagatccttgtagtataagcacaggccatttttcact

SEQ ID NO: 263891 - DNA, 120 bp, Artificial Sequence
  ENSG00000125848_23 (sequence is synthesized)
ttggtattaataaaatgtaaaaaaaaaaaactggctgaatggctgaatgagataaaatttaattttaaaaaatggttatgaaataatgttccaattattaaatttgtattatcccagtgg

SEQ ID NO: 263892 - DNA, 120 bp, Artificial Sequence
  ENSG00000125848_24 (sequence is synthesized)
tattcaataaatcaaaatgtgtgaagtaatgggcaatatcaaacttcctgcatatctccatttttgctctaggcaaattaattatccttaaaaaagttaagcatatcttctgaactgaat

SEQ ID NO: 263893 - DNA, 120 bp, Artificial Sequence
  ENSG00000125848_25 (sequence is synthesized)
acatcagctggcataaaaggagcatgaagtctgttaaagccattgtcagcaaagctttgaaaataaaggacttcacaaaaacggtaatgtaaatgtgcttccaagttggggggaaaatgt

SEQ ID NO: 263894 - DNA, 120 bp, Artificial Sequence
  ENSG00000125848_26 (sequence is synthesized)
gtacttaggaaaacatggaaacttagacttgtatagtgtaatgaacacaaataccaaaactgcattttggttttgcctataccatcctgatttttgaaaagtgaattataaacacaaaat

SEQ ID NO: 263895 - DNA, 120 bp, Artificial Sequence
  ENSG00000125848_27 (sequence is synthesized)
tgttagtgtttatgatgtttttatcataaaggatgtcagagaaactttatgcatattaaaaatgtaatgtaattataagcgattcccctcaacaatccagagaaagtagttctttaaata

SEQ ID NO: 263896 - DNA, 120 bp, Artificial Sequence
  ENSG00000125848_28 (sequence is synthesized)
agagataatttaaagaaaaataaatactagacatcaaatttagatctggtttatgtcaaaggttttaacactgtacataaatgttcaatttacttttacaaagatcaagaatactgccca

SEQ ID NO: 263897 - DNA, 120 bp, Artificial Sequence
  ENSG00000125848_29 (sequence is synthesized)
ttactgtcacaattttccagatattatataatgaactcgtaatgtaacatttccttctagcttcctactgaattgtgagctgttacttgttgaaaaaccatatcacttttctgttgccat

SEQ ID NO: 263898 - DNA, 120 bp, Artificial Sequence
  ENSG00000125848_30 (sequence is synthesized)
gattttttttttttcaacaaaaaaccaaagtgcattgtacgccctttggccagtcttgtatgtgccttgatccaacgctacatgtattcagcttttaaaactccacaaatttttcatact

SEQ ID NO: 263899 - DNA, 120 bp, Artificial Sequence
  ENSG00000125848_31 (sequence is synthesized)
ccttaaatatgaaaaattatggtcttattgctgaataaaacttttaaaaagtacagaataattgtgcttgctttttcaggattgtgttactatcactaagtagcaaattgcccagcacat

SEQ ID NO: 263900 - DNA, 120 bp, Artificial Sequence
  ENSG00000125848_32 (sequence is synthesized)
tagtcctaaacgtcccatgtatttttctaggcataaaaataaaagttggctaaaaattttaaaaaatcaacatcttgaggttgtgtatcattttacttcaaagagttcagtgtttcatgt

SEQ ID NO: 263901 - DNA, 120 bp, Artificial Sequence
  ENSG00000125848_33 (sequence is synthesized)
ataaatgtatttcctcttacttatacactgtatagatggaaaatttaagaaatggtttcaaagcctttctctcttaggcgcactgctgccactgtcctgatactttttaaggtggtcttt

SEQ ID NO: 263902 - DNA, 120 bp, Artificial Sequence
  ENSG00000125848_34 (sequence is synthesized)
gaaaaactgtttttttaaaatagccttttagtagagtgagttggcatttgtgatactgtgaaatacacactttctctttgtccctgtttctggcatacaactcctaaaatccttgcaatc

SEQ ID NO: 263903 - DNA, 120 bp, Artificial Sequence
  ENSG00000125848_35 (sequence is synthesized)
ttcaaagtgatatattttcatatgctaatgagttcactgatagctggcaggccctaggtagcttcaagataaagtctgatcattgaaaagaccaagacatgattatagggttgggactta

SEQ ID NO: 263904 - DNA, 120 bp, Artificial Sequence
  ENSG00000125848_36 (sequence is synthesized)
caaccccaaaccctaacctccagagagggcgaagtggatgaagattaagttgatcaccagtgaccagtggtttaatcaagcatgcctatgtaatcaagcctccataaaaaaacaaaaggt

SEQ ID NO: 263905 - DNA, 120 bp, Artificial Sequence
  ENSG00000125848_37 (sequence is synthesized)
caagatttggagagcttccagattgctgaacatgtggtggttcctgcaggatggcatgcctggagagggcatggaagctctgtgcccacctagacctcaccttatgtttcctgccatctg

SEQ ID NO: 263906 - DNA, 120 bp, Artificial Sequence
  ENSG00000125848_38 (sequence is synthesized)
gatcctttgtaacatcctttataatacgtcagtaaatctgtttccttgcattttgtgagctgttgtagcaaattaatagaacacaaaaaggggatcctgggaaaccaaacttgaagctga

SEQ ID NO: 263907 - DNA, 120 bp, Artificial Sequence
  ENSG00000125848_39 (sequence is synthesized)
ctagtcttgcaactggtgtctgaagaggaggcagttttgtgggaataagccctcaacctgtgggatatgacacaatttccaggtagacagtgttgggattaaactgaattggaggacacc

SEQ ID NO: 263908 - DNA, 120 bp, Artificial Sequence
  ENSG00000125848_40 (sequence is synthesized)
cagctggtatctgctgaagaactgattgcttgcgtggtgtatggggcaaaacttgttaagacaagtcttctatgttgattattgttgaatgagagaattaaacacacatacacactttga

SEQ ID NO: 263909 - DNA, 120 bp, Artificial Sequence
  ENSG00000125848_41 (sequence is synthesized)
aaagctggaaatagctatttcacagcaggtaatcatacctcaggatgtagctactgtacaaagtttatacttggataatcctggatgggaataaaggtagggggtaactgcctgaaaaac

SEQ ID NO: 263910 - DNA, 120 bp, Artificial Sequence
  ENSG00000125848_42 (sequence is synthesized)
ctattactatacaggccttagcatcatgaatgactttcttcatgaggatctgaagttactatctctgaccacattgcacagaagagccaataagaatttcaaagagggcaatttccacta

SEQ ID NO: 263911 - DNA, 120 bp, Artificial Sequence
  ENSG00000125850_0 (sequence is synthesized)
aagtttcctggtgccttttctattccaccttatgaaactttttccccggcgtggtctcactcgcgatttaaggcataggtgtcgccgagccgggaggctgggagtcgccaggcgtgcggg

SEQ ID NO: 263912 - DNA, 120 bp, Artificial Sequence
  ENSG00000125850_1 (sequence is synthesized)
ggaggaagagggcaggcgaggcgggaaggtgggctctggccgccgggagccggggacggagccgccgccgttgcccctagcggggagcagccgggaggagggggccgcagtcgggagagg

SEQ ID NO: 263913 - DNA, 120 bp, Artificial Sequence
  ENSG00000125850_2 (sequence is synthesized)
agccgggaggagggggccgcagtcgggagaggggaccccaccatgcccaaagtcttcctggtgaagaggaggagcctgggggtctcggtccgcagctgggatgagctcccggatgagaaa

SEQ ID NO: 263914 - DNA, 120 bp, Artificial Sequence
  ENSG00000125850_3 (sequence is synthesized)
agggcagacacctacatcccagtgggcctaggccgcctgctccacgacccccccgaggactgccgcagcgacggcggcagcagcagcggcagcggcagcagcagcgcgggggagcctgga

SEQ ID NO: 263915 - DNA, 120 bp, Artificial Sequence
  ENSG00000125850_4 (sequence is synthesized)
ggagcagagagcagctcgtccccgcacgcccccgagagcgaaacccccgagcccggcgacgccgagggccccgatggacacctggcgaccaagcagcgcccggtcgccagatcgaaaatc

SEQ ID NO: 263916 - DNA, 120 bp, Artificial Sequence
  ENSG00000125850_5 (sequence is synthesized)
aagttcaccacaggcacgtgcagcgactcggtggttcacagctgtgacctgtgtggcaagggcttccgtctgcagcgcatgctgaaccgtcacctcaagtgccacaaccaggtgaaaaga

SEQ ID NO: 263917 - DNA, 120 bp, Artificial Sequence
  ENSG00000125850_6 (sequence is synthesized)
gggcttcaacgacaccttcgacctgaagaggcacgtccgcacacacacaggcattcgtccctacaaatgcaacgtctgcaataaagccttcacccagcgctgctctctggagtcccacct

SEQ ID NO: 263918 - DNA, 120 bp, Artificial Sequence
  ENSG00000125850_7 (sequence is synthesized)
gaagaaaatccatggggtgcagcagcagtatgcctataagcagcggcgggacaagctctacgtctgcgaggattgcggctacacgggccccacccaggaggacctgtacctgcacgtgaa

SEQ ID NO: 263919 - DNA, 120 bp, Artificial Sequence
  ENSG00000125850_8 (sequence is synthesized)
cagtgcccatccgggcagctcgtttctcaaaaagacatctaaaaaactggcagcccttctgcagggcaagctgacatccgcacaccaggagaataccagcctgagtgaggaggaggagag

SEQ ID NO: 263920 - DNA, 120 bp, Artificial Sequence
  ENSG00000125850_9 (sequence is synthesized)
gaagtgaggagaaggaaggggaggacagacgttcacactgccacgtatgtctacgtggatttttggttttcagcttcccccaccccactggctcttcttaattagaagtgaccagttcac

SEQ ID NO: 263921 - DNA, 120 bp, Artificial Sequence
  ENSG00000125850_10 (sequence is synthesized)
ctctgtgtccttttgaaacatcagcagtagggtccattccaagattgtcagttgccgttagtgacgtcaggccctgtaacctgtgtcctgtctggcgcagttgctcacattcaccaaagt

SEQ ID NO: 263922 - DNA, 120 bp, Artificial Sequence
  ENSG00000125850_11 (sequence is synthesized)
ttgttttcatgatcctgatggccaagaacaccgtgtgggatttttttttcccccaaggattttcacacacggaaggagaggtatttcttagagagatcatcattttatggtgccttgaaa

SEQ ID NO: 263923 - DNA, 120 bp, Artificial Sequence
  ENSG00000125850_12 (sequence is synthesized)
taaaaatacttctacttgaaatgctgtttaagcaaggcaagtgaattttgttattctgaaagagtttacagaaactattttaataaatgaaatgttcttgtgaagcttttaaaagcaaaa

SEQ ID NO: 263924 - DNA, 120 bp, Artificial Sequence
  ENSG00000125850_13 (sequence is synthesized)
gagaatggctgaggctgattgggacgcattaactggggctctggtgagccgactgagctgagtcccctgcagtgcctgtatgacctgcaccaacgtgggaattgccatctctcctgctgg

SEQ ID NO: 263925 - DNA, 120 bp, Artificial Sequence
  ENSG00000125850_14 (sequence is synthesized)
aaaatcagtgctgcctgtgggaagcccgccctggttggagctgcagtttcctaccagtttgctgagatctgtatctgtggacctgaatgttgatccctcgcttcagattgacatacctga

SEQ ID NO: 263926 - DNA, 120 bp, Artificial Sequence
  ENSG00000125850_15 (sequence is synthesized)
ctccagggcatccctgaccagacgcgcccccgcagcacccggcagctggcacacgtctgacgacctcctggaggagggcgaccgcagcgacacaagaggctgtgccggttgtcctgggcg

SEQ ID NO: 263927 - DNA, 120 bp, Artificial Sequence
  ENSG00000125851_0 (sequence is synthesized)
gctctttctctccggtacacacagctccccacattcgcacccctgcccgcgcgccgggccgcctgactgcacggcttcccctccagccagatgctggagaacacacactgattcgctgct

SEQ ID NO: 263928 - DNA, 120 bp, Artificial Sequence
  ENSG00000125851_1 (sequence is synthesized)
ttccaagaccctgttcagtctctttctctatacaaagatttttttaaaaactatatataagaattctttatttgcaccctccctccgagtcccctgctccgccagcctgcgcgcctccta

SEQ ID NO: 263929 - DNA, 120 bp, Artificial Sequence
  ENSG00000125851_2 (sequence is synthesized)
gcaccacttttcactcccaaagaaggatgaagggtggttgtgtctcccagtggaaggcggccgccgggttcctcttctgtgtcatggtttttgcatctgctgagcgaccggtcttcacga

SEQ ID NO: 263930 - DNA, 120 bp, Artificial Sequence
  ENSG00000125851_3 (sequence is synthesized)
atcattttcttgtggagttgcataaagggggagaggacaaagctcgccaagttgcagcagaacacggctttggagtccgaaagcttccctttgctgaaggtctgtaccacttttatcaca

SEQ ID NO: 263931 - DNA, 120 bp, Artificial Sequence
  ENSG00000125851_4 (sequence is synthesized)
atggccttgcaaaggccaagagaagacgcagcctacaccacaagcagcagctggagagagaccccagggtaaagatggctttgcagcaggaaggatttgaccgaaaaaagcgaggttaca

SEQ ID NO: 263932 - DNA, 120 bp, Artificial Sequence
  ENSG00000125851_5 (sequence is synthesized)
gagacatcaatgagatcgacatcaacatgaacgatcctctttttacaaagcagtggtatctgatcaatactgggcaagctgatggcactcctggccttgatttgaatgtggctgaagcct

SEQ ID NO: 263933 - DNA, 120 bp, Artificial Sequence
  ENSG00000125851_6 (sequence is synthesized)
gggagctgggatacacagggaaaggtgttaccattggaattatggatgatgggattgactatctccacccggacctggcctccaactataatgccgaagcaagttacgacttcagcagca

SEQ ID NO: 263934 - DNA, 120 bp, Artificial Sequence
  ENSG00000125851_7 (sequence is synthesized)
acgacccctatccttaccctcggtacacagatgactggtttaacagccacgggacccgatgtgcaggagaagtttctgctgccgccaacaacaatatctgtggagttggagtagcataca

SEQ ID NO: 263935 - DNA, 120 bp, Artificial Sequence
  ENSG00000125851_8 (sequence is synthesized)
actccaaggttgcaggcatccggatgctggaccagccattcatgacagacatcatcgaggcctcctccatcagtcatatgccacagctgattgacatctacagcgccagctggggcccca

SEQ ID NO: 263936 - DNA, 120 bp, Artificial Sequence
  ENSG00000125851_9 (sequence is synthesized)
cagacaacggcaagacagtggatgggccccgggagctcacgctgcaggccatggccgatggcgtgaacaagggccgcggcggcaaaggcagcatctacgtgtgggcctccggggacggcg

SEQ ID NO: 263937 - DNA, 120 bp, Artificial Sequence
  ENSG00000125851_10 (sequence is synthesized)
gcagctatgacgactgcaactgcgacggctacgcctccagcatgtggaccatctccatcaactcagccatcaacgacggcaggactgccctgtacgacgagagctgctcttccaccttgg

SEQ ID NO: 263938 - DNA, 120 bp, Artificial Sequence
  ENSG00000125851_11 (sequence is synthesized)
cttccaccttcagcaacgggaggaaaaggaaccccgaggccggtgtggcaaccacagatttgtacggcaactgcactctgaggcattctgggacatctgcagctgcccccgaggcagctg

SEQ ID NO: 263939 - DNA, 120 bp, Artificial Sequence
  ENSG00000125851_12 (sequence is synthesized)
gtgtgtttgcactggctctggaggctaacctgggtctgacctggcgggacatgcagcatctgactgtgctcacctccaaacggaaccagcttcacgacgaggtccatcagtggcggcgca

SEQ ID NO: 263940 - DNA, 120 bp, Artificial Sequence
  ENSG00000125851_13 (sequence is synthesized)
atggggtcggcctggaatttaatcacctctttggctacggggtccttgatgcaggtgccatggtgaaaatggctaaagactggaaaaccgtgcctgagagattccactgtgtgggaggct

SEQ ID NO: 263941 - DNA, 120 bp, Artificial Sequence
  ENSG00000125851_14 (sequence is synthesized)
ccgtgcaggaccctgagaaaataccatccactggcaagttggtgctgacactcacaaccgacgcctgtgaggggaaggaaaattttgtccgctacctggagcatgtccaggctgtcatca

SEQ ID NO: 263942 - DNA, 120 bp, Artificial Sequence
  ENSG00000125851_15 (sequence is synthesized)
cggtcaacgcaaccagaagaggagacctgaacatcaacatgacttcccctatgggcaccaagtccattttgctgagccggcgtccaagggatgacgactccaaggtgggctttgacaagt

SEQ ID NO: 263943 - DNA, 120 bp, Artificial Sequence
  ENSG00000125851_16 (sequence is synthesized)
ggcctttcatgaccactcacacgtggggggaagacgcccgaggcacctggaccctggagctgggatttgtcggcagcgccccgcagaagggggtgctgaaggagtggaccctgatgctgc

SEQ ID NO: 263944 - DNA, 120 bp, Artificial Sequence
  ENSG00000125851_17 (sequence is synthesized)
atggcactcagagtgccccgtacatcgaccaggtggtgcgggattaccagtccaagttggccatgtccaagaaagaggagctggaggaagagctggacgaagccgtggagagaagcctga

SEQ ID NO: 263945 - DNA, 120 bp, Artificial Sequence
  ENSG00000125851_18 (sequence is synthesized)
aaagcatccttaacaagaactagcgctgcacatccgcctttcccaccgccctccctccccagctccgcctctgtcctcgctccacgtttcaggcaggcacctagcaattccatcacccgt

SEQ ID NO: 263946 - DNA, 120 bp, Artificial Sequence
  ENSG00000125851_19 (sequence is synthesized)
cgtcttcttaatctgaagcttcactcactgtcaatgattattttcattacaatggaaacaatcttttttactctatgccccaaatatagcgttcccaacaacatccatgtcctatgtgtg

SEQ ID NO: 263947 - DNA, 120 bp, Artificial Sequence
  ENSG00000125851_20 (sequence is synthesized)
actctaaattctttatttctgtcattcaaatgggtgatatcctgaaaaaaaaaaaaaaaaaaaaactgggacagctttcccctcatttttttttttgtttctgagaaaagaacgtatttt

SEQ ID NO: 263948 - DNA, 120 bp, Artificial Sequence
  ENSG00000125851_21 (sequence is synthesized)
aaaagccacatagagtgactccaagaacaattgtccatggtctcaaacaaggggctgttacataacaagaaaatcaaagctgaggacagggtgtgagcgccacatctctgaaagcacagg

SEQ ID NO: 263949 - DNA, 120 bp, Artificial Sequence
  ENSG00000125851_22 (sequence is synthesized)
agacactgtgctataaatcctttggggagcgatgttttgaatttagtgagatttaccagggatgtagattaaggtgatgtgattcaaaagatgccattcatagagagccctagttactgc

SEQ ID NO: 263950 - DNA, 120 bp, Artificial Sequence
  ENSG00000125851_23 (sequence is synthesized)
atggggaaagagatccaggaagcatgagtgctggatattttactaccaatgccaagataattcactctactcagccggcgtggcaaatataaaacttacagagcgtggctgtgctctcac

SEQ ID NO: 263951 - DNA, 120 bp, Artificial Sequence
  ENSG00000125851_24 (sequence is synthesized)
cagctgctgctctgagttatgttaaaatccgctagagcagcccaaatttttctcagtttgtatagagttcatcccagccccaattttctggggctcctcacatagctacccaaaagagaa

SEQ ID NO: 263952 - DNA, 120 bp, Artificial Sequence
  ENSG00000125851_25 (sequence is synthesized)
aaaaaattaagacaagcctggcaacacacctggtgaagagtagtttactagcttttcaaacaagaatgtcccttttcctaagtcactttgaggtgtctcaatctgatctgagtgagaggc

SEQ ID NO: 263953 - DNA, 120 bp, Artificial Sequence
  ENSG00000125851_26 (sequence is synthesized)
gacaggagtatttttttttttttacagctttacacacacagatgtgggctttgatttccaagtaatataatggaagagaaatctcatactcccccacagtttgatgtcattaatgtgttg

SEQ ID NO: 263954 - DNA, 120 bp, Artificial Sequence
  ENSG00000125851_27 (sequence is synthesized)
ggaaaaaggcctctgtcccggaagagtcatgggaggtgaaaggggcacgtttgaagatgcgagcgctatcttcacatagttctccagttgtatggagcctcttctgccaagagagggcca

SEQ ID NO: 263955 - DNA, 120 bp, Artificial Sequence
  ENSG00000125851_28 (sequence is synthesized)
tgcaattcatcccagaggaacctgaggcctgaaggaggtgagagaagacctctgtgaggaaagcacacagtcaccttctcggcaactaagcagtccctgagaccatttaacatgcaaccc

SEQ ID NO: 263956 - DNA, 120 bp, Artificial Sequence
  ENSG00000125851_29 (sequence is synthesized)
gaaggttatggtcaatcccaaaagtcaccactccattcccaactagacattaccaaagtgacctacccagagattgcttctcatccccagtcccaatgcacatccattcccaagaaatgc

SEQ ID NO: 263957 - DNA, 120 bp, Artificial Sequence
  ENSG00000125851_30 (sequence is synthesized)
tttgtcttcagcctctccaggcaccatctcccttcctgtgggagcagagagcttagcctggagcacctttccttcaagccagcaacacagagcactaggttcaattccctgaaggtggcc

SEQ ID NO: 263958 - DNA, 120 bp, Artificial Sequence
  ENSG00000125851_31 (sequence is synthesized)
actttaagagagaaatctgaaaaccccatttgctttcttttctcccatattggcatggatttctgtcttctctaacaccttgtgaccttctctatatcatgctttaaagtgtaataatat

SEQ ID NO: 263959 - DNA, 120 bp, Artificial Sequence
  ENSG00000125851_32 (sequence is synthesized)
gattttttaaaagaaatttattacttgttgcaaaggtctttttaaaccagtttagatttcaagaaaaaataaatggaaatcatcgaaaattcatttcacattaatggtctaaaaataaac

SEQ ID NO: 263960 - DNA, 120 bp, Artificial Sequence
  ENSG00000125851_33 (sequence is synthesized)
caaaggacattatgtgtgcatgtgtgtataagtgcacacagaaatatatatacatatgtagactatatacatgtgtgtatatatgtgtatatatacatacacttgtataaatgtatatac

SEQ ID NO: 263961 - DNA, 120 bp, Artificial Sequence
  ENSG00000125851_34 (sequence is synthesized)
acatatacctataatgtgtgtatgtgtatttattgaagaaacagataccatactcatttctaaaagaatattcagagaatatcaagatgattctggctgaaaaaggccagtggaaattca

SEQ ID NO: 263962 - DNA, 120 bp, Artificial Sequence
  ENSG00000125851_35 (sequence is synthesized)
ggtgaaaatgttcatcaattcccattgcatcacctctgtaatttttcagctctctgtataaacattaaatgtcttatatagcagcaaaaatataaaatagttgtccatattttcacaggt

SEQ ID NO: 263963 - DNA, 120 bp, Artificial Sequence
  ENSG00000125851_36 (sequence is synthesized)
tcacaggtgtggtgtaatttataaaattagaaagcaacttatcagctacttaagagaaatggcaagttttgatatgagtatacaatatataaaaatatatatagtgctatatatataaat

SEQ ID NO: 263964 - DNA, 120 bp, Artificial Sequence
  ENSG00000125851_37 (sequence is synthesized)
tctatttcattttttgcatcagtattaatactaaaatatgtctcgctagtgatgtttttatgatatccctgatcctaactgaagagacagttatttatagtcatttattttaaaaaatga

SEQ ID NO: 263965 - DNA, 120 bp, Artificial Sequence
  ENSG00000125851_38 (sequence is synthesized)
aaataagtgaataataattaggttaacattgttgctccctgtgacaaaattttataagcaaatttcaaaagacatgttgtaaattaggaggctcaacaataaaacattatgctccagaaa

SEQ ID NO: 263966 - DNA, 120 bp, Artificial Sequence
  ENSG00000125851_39 (sequence is synthesized)
tggtttgctgcacccattaactcatcctttacatgaggtatttctcctaatgctatccctccccatccccccaccccccacacacacacatgacaggccccggtgtgatgttccccttcc

SEQ ID NO: 263967 - DNA, 120 bp, Artificial Sequence
  ENSG00000125851_40 (sequence is synthesized)
gtgatgttccccttcctgtgtccaagtgtggaacttgcttcttaatagaagaaggtctgcattcaagagcacatggatcatttgaactcttggttctgattcagatcttccaaccaatga

SEQ ID NO: 263968 - DNA, 120 bp, Artificial Sequence
  ENSG00000125851_41 (sequence is synthesized)
tgattcagatcttccaaccaatgaactttgcatatgttgaaattttatcaaatgagttatgttgctcctggtcctttgaattgtttgacttctgaagagaactgtagtgcaaggttttgc

SEQ ID NO: 263969 - DNA, 120 bp, Artificial Sequence
  ENSG00000125851_42 (sequence is synthesized)
caactttttgaccagaatcctcggtgagtaataaattttgcactgcagctcagcacacacacacacagctaccctccaagtatttcatgaaaaaatagcttcctgtattatgtgcagtgc

SEQ ID NO: 263970 - DNA, 120 bp, Artificial Sequence
  ENSG00000125851_43 (sequence is synthesized)
atactgcttttctattctgttccattcattttttaaaataataacaccaaccattaaatcactggttctcaacattggctgtctgttggaatggtctgagaagttttaacagtttccaat

SEQ ID NO: 263971 - DNA, 120 bp, Artificial Sequence
  ENSG00000125851_44 (sequence is synthesized)
gcctgggtctcactcccagagattctgatttacttggtctgggatgaggccctaggcatgagatcttcaatgcccctaggagaaaattttcatgggcagtcccaacaacctgtgcgataa

SEQ ID NO: 263972 - DNA, 120 bp, Artificial Sequence
  ENSG00000125851_45 (sequence is synthesized)
cctggcccaaaaacaaatcatgatttgcaatttgaaaaacatagacaatgtgtagtaatagacactaatttccaaaaacaataacatttacaagaagactagtttattcactgaacaatg

SEQ ID NO: 263973 - DNA, 120 bp, Artificial Sequence
  ENSG00000125851_46 (sequence is synthesized)
tgccaaggaccatcctggacactaaggatataaatatgctaaatataatttctctacccttgaagaactggtaccctccttttcaaaaatggaacacacccacatgccagttcccagatg

SEQ ID NO: 263974 - DNA, 120 bp, Artificial Sequence
  ENSG00000125851_47 (sequence is synthesized)
aagggacagcaagaccagcactcagaagctccctgtatccccttccagtcactgccccacgagactgaccactaacatgacctccaacagcatagattagtcattcttgtttttatattt

SEQ ID NO: 263975 - DNA, 120 bp, Artificial Sequence
  ENSG00000125851_48 (sequence is synthesized)
taaacagatggaatcatactttatggtctcttttctgcctggcttctttaggccaacatggtatttgtgagatttttccatgttgttcagagtacctggagttcattcattctcactgct

SEQ ID NO: 263976 - DNA, 120 bp, Artificial Sequence
  ENSG00000125851_49 (sequence is synthesized)
gtaggggtttcacagtttggggctaggagcattctagtacacaggtctggtgaatatgtacacatttggtcaggtatatgcctaggaaaagaatttccaggccatagcttaagcttaact

SEQ ID NO: 263977 - DNA, 120 bp, Artificial Sequence
  ENSG00000125851_50 (sequence is synthesized)
ttagaagatacagccaaacagttttccagtttagttggaattacttgcacgctcatccacaaagtacatgtgttccagttgctccacatcttcaacacttaacattgtcagtctttttca

SEQ ID NO: 263978 - DNA, 120 bp, Artificial Sequence
  ENSG00000125851_51 (sequence is synthesized)
ttttagccattccggtgtgtgtgttagaatagacttttgaaatcaatttatgtaagtaagaaaagcaagaagatttctttaattgacttatatagtggttttgaatggtgcatggacacc

SEQ ID NO: 263979 - DNA, 120 bp, Artificial Sequence
  ENSG00000125851_52 (sequence is synthesized)
ctcccttgaatttgagagttcacagagattccaaaatcttacaagaggtctgtgtcctgagtaatatttctcttaatcattgtgcctctctccctctctcaccctgccttttgcccttgc

SEQ ID NO: 263980 - DNA, 120 bp, Artificial Sequence
  ENSG00000125851_53 (sequence is synthesized)
aactagcaccctcgctgtccttgtgcagtggaacgtccccaggtctgagaatgcacctcccgccgtgtccaccccggccgcgtctctcctgaaggcagatcttggaggtgcagccaggac

SEQ ID NO: 263981 - DNA, 120 bp, Artificial Sequence
  ENSG00000125851_54 (sequence is synthesized)
tcctagaggagcctcctccagtcaccatcgcgggtggggcgagccgggtctcctgctgggcttcccagccgcttcgctccggacctgcctggagcctacaaaaaacaagggctcgtcctt

SEQ ID NO: 263982 - DNA, 120 bp, Artificial Sequence
  ENSG00000125851_55 (sequence is synthesized)
agttctcaactcccggctacaggagctggagaggtggattttgagggggattccctacggagaagtcgaggtgtcctctcctgatgcgtgggcggccagcctggctttcccactagagcg

SEQ ID NO: 263983 - DNA, 120 bp, Artificial Sequence
  ENSG00000125861_0 (sequence is synthesized)
atggtccgctgcctggggcctgcgctgctgctgctgctgttactggggtcggcgagctcggtcggagggaaccgatgtgtggacgcggccgaagcctgcacggcggacgcgcggtgccag

SEQ ID NO: 263984 - DNA, 80 bp, Artificial Sequence
  ENSG00000125861_1 (sequence is synthesized)
cgtttgcgctccgagtatgtggcgcagtgcctgggccgggctgcgcaggggggctgtccccgcgcccgctgccgccgggc

SEQ ID NO: 263985 - DNA, 120 bp, Artificial Sequence
  ENSG00000125861_2 (sequence is synthesized)
cacgcactgctcttctgcccgtgcgcgggccccgcgtgcgccgagcgtcggcgccagaccttcgtgccctcctgcgccttttcggggcccggccccgcgccgccctcctgccttgagccc

SEQ ID NO: 263986 - DNA, 120 bp, Artificial Sequence
  ENSG00000125861_3 (sequence is synthesized)
ttaaacttctgcgagcgcagccgggtctgcaggcctcgcctcctggcctttcaggtctcgtgcaccccagcgcccagcgcccccgacggctgcctgctggaccagggcgcccgctgcctg

SEQ ID NO: 263987 - DNA, 120 bp, Artificial Sequence
  ENSG00000125861_4 (sequence is synthesized)
cgcgcctacgcgggcctcgtgggcaccgccgtcacccctaactacgtggacaacgtgagcgcgcgcgtggcgccctggtgcgactgcggagccagcgggaaccggcgtgaggactgcgaa

SEQ ID NO: 263988 - DNA, 120 bp, Artificial Sequence
  ENSG00000125861_5 (sequence is synthesized)
cccggagcacagcctcctgcaggtgtcctccacaggcagggccctggagagacgctccctgctctccatacttcctgtcctggctctcccggccctgctctgattaggacagcgacctcg

SEQ ID NO: 263989 - DNA, 120 bp, Artificial Sequence
  ENSG00000125861_6 (sequence is synthesized)
gatagcacagccagctactccaccctgcctgcctgggccgcctctgtggcctactggccccttgagaaggggctggcttaccccccaagccggccctggtgctttcactccgctgccctt

SEQ ID NO: 263990 - DNA, 120 bp, Artificial Sequence
  ENSG00000125861_7 (sequence is synthesized)
tgtaggtttggacaccctgtgtgccgtcccctggggcaagggatgtaggctggggcctgactgtaaagcccccgtctccctgtcaggaggcatcttggttgtaagtccctttattcacag

SEQ ID NO: 263991 - DNA, 120 bp, Artificial Sequence
  ENSG00000125861_8 (sequence is synthesized)
accttgagaccactggggtctcccacaaggtggggtcaggagagggtcacttttgtagctgagacctctctggagacccagatcccctagagcaggtcagagaccatccagaatcccaga

SEQ ID NO: 263992 - DNA, 120 bp, Artificial Sequence
  ENSG00000125861_9 (sequence is synthesized)
attctaggaaattgtatcagcctcccaagcatataaccccctaaggaatccatcggacaagaccccgtctaacactgcatcctcccaactgggcattacccaccattgtagccacctgtg

SEQ ID NO: 263993 - DNA, 120 bp, Artificial Sequence
  ENSG00000125861_10 (sequence is synthesized)
cgccatgaccatgctggcagagtctttcctgttccccatatgctgcttgaggggccccaccctgtgccctgcctggcattggccctgtggccatcttccccctggtttcctgcagctgta

SEQ ID NO: 263994 - DNA, 120 bp, Artificial Sequence
  ENSG00000125863_0 (sequence is synthesized)
gtgccctcgcgcgacgcgaaggttgtcgggatccgcggcagcagcggctgcttgagatctgtttctggggcctctggcggtggcggcctggggcggcgcgacggctggtgcgcaggtaca

SEQ ID NO: 263995 - DNA, 120 bp, Artificial Sequence
  ENSG00000125863_1 (sequence is synthesized)
ctgatgctgaagtactatgagccttcggaacttgtggagagactacaaagttttggttgttatggtccctttagttgggctcatacatttggggtggtacagaatcaaaagcagccctgt

SEQ ID NO: 263996 - DNA, 120 bp, Artificial Sequence
  ENSG00000125863_2 (sequence is synthesized)
tttccaaatacctaaaaacgacgacattcctgagcaagatagtctgggactttcaaatcttcagaagagccaaatccaggggaagtagcaggcttgcaatcttcaggtaaagaagcagct

SEQ ID NO: 263997 - DNA, 120 bp, Artificial Sequence
  ENSG00000125863_3 (sequence is synthesized)
ttgaatctgagcttcatatcgaaagaagagatgaaaaataccagttggattagaaagaactggcttcttgtagctgggatatctttcataggtgtccatcttggaacatactttttgcag

SEQ ID NO: 263998 - DNA, 120 bp, Artificial Sequence
  ENSG00000125863_4 (sequence is synthesized)
aggtctgcaaagcagtctgtaaaatttcagtctcaaagcaaacaaaagagtattgaagagtgaagtaaaataaatatttggaattactaatttgtcattaaatcattctatgctgattag

SEQ ID NO: 263999 - DNA, 120 bp, Artificial Sequence
  ENSG00000125863_5 (sequence is synthesized)
cttcataaacattgaactttttgattttatagccacaatgctgcatattcatactttaattcctaaagaataatttttaatgttaaaacgtgataatgcaataaatagaaaaatgtggtt

SEQ ID NO: 264000 - DNA, 120 bp, Artificial Sequence
  ENSG00000125863_6 (sequence is synthesized)
tacaaaataaaaacggtcttcactagttaccacctgaagtaagatgtctcgtttggaagctaagaagccatcattgtgtaagagtgaaccactgacaactgagagagtcaggaccacact

SEQ ID NO: 264001 - DNA, 120 bp, Artificial Sequence
  ENSG00000125863_7 (sequence is synthesized)
ttctgtcttgaaaagaattgtaacatcatgctatggcccctcaggtaggctgaagcagctgcacaatggctttggaggttacgtgtgtacaacctcacagtcctcagctctgctcagtca

SEQ ID NO: 264002 - DNA, 120 bp, Artificial Sequence
  ENSG00000125863_8 (sequence is synthesized)
ccttttggtcacacatcccattttaaagatcctgacagcctccatacagaatcatgtgtcaagcttcagtgattgtggcttattcacagctattctttgctgcaacctgattgaaaatgt

SEQ ID NO: 264003 - DNA, 120 bp, Artificial Sequence
  ENSG00000125863_9 (sequence is synthesized)
tcagagattaggcttgacacccaccactgtcattagattaaataaacatcttttgagtctttgcatcagttatctcaagtctgagacctgtggttgtcgaatcccagtggactttagtag

SEQ ID NO: 264004 - DNA, 120 bp, Artificial Sequence
  ENSG00000125863_10 (sequence is synthesized)
tactcagatcctcctttgtttggtgcgtagtatattaacaagtaaacctgcctgtatgctcaccagaaaggaaacagagcatgtcagtgctttgatcctgagagcctttttgcttacaat

SEQ ID NO: 264005 - DNA, 120 bp, Artificial Sequence
  ENSG00000125863_11 (sequence is synthesized)
tccagaaaatgctgaaggccacatcattttaggaaagagtttaattgtacctttaaaaggtcaaagagttatagattccactgtattacctgggatactcattgaaatgtcagaagttca

SEQ ID NO: 264006 - DNA, 120 bp, Artificial Sequence
  ENSG00000125863_12 (sequence is synthesized)
attaatgaggctattacctatcaaaaaatcaactgccctcaaggtggcactcttttgtacaactttatccggagacacttctgacactggagaaggaactgtggtggtcagttatggggt

SEQ ID NO: 264007 - DNA, 120 bp, Artificial Sequence
  ENSG00000125863_13 (sequence is synthesized)
ttctcttgaaaatgcagtcttggaccagctgcttaacctaggaaggcagctaatcagtgaccacgtagatcttgtcctgtgccaaaaagttatacatccatctttgaagcagtttctcaa

SEQ ID NO: 264008 - DNA, 120 bp, Artificial Sequence
  ENSG00000125863_14 (sequence is synthesized)
tatgcatcgtattattgccatagacagaattggagtgactctgatggaacccctgactaaaatgacaggaacacagcctattggatccctaggctcaatatgtcctaatagttatggaag

SEQ ID NO: 264009 - DNA, 120 bp, Artificial Sequence
  ENSG00000125863_15 (sequence is synthesized)
tgtgaaagatgtgtgcactgcaaaatttggctccaaacatttttttcatcttattcctaatgaagcaacaatctgcagcttgcttctctgcaacagaaatgacactgcctgggatgagct

SEQ ID NO: 264010 - DNA, 120 bp, Artificial Sequence
  ENSG00000125863_16 (sequence is synthesized)
gaagctcacgtgtcagacggcactgcatgtcctgcagttaacactcaaggaaccatgggctttgttgggaggtggctgtactgaaactcatttggctgcatatatcagacacaagactca

SEQ ID NO: 264011 - DNA, 120 bp, Artificial Sequence
  ENSG00000125863_17 (sequence is synthesized)
caacgacccagaaagcattctcaaagatgatgaatgtactcaaacagaacttcaattaattgctgaagcattttgcagtgccctagaatctgttgttggctctttagaacatgatggagg

SEQ ID NO: 264012 - DNA, 120 bp, Artificial Sequence
  ENSG00000125863_18 (sequence is synthesized)
tgaaattctcactgacatgaagtatggacacctttggtcagttcaggcagattctccctgtgttgctaactggccagatttgctttcacagtgtggctgtggattatacaatagccagga

SEQ ID NO: 264013 - DNA, 120 bp, Artificial Sequence
  ENSG00000125863_19 (sequence is synthesized)
agaactcaactggtctttcttaagaagcacacgtcgtccatttgtgccacaaagctgccttccacatgaagctgtgggctcagccagcaacctgaccttggactgtttgactgcaaagct

SEQ ID NO: 264014 - DNA, 120 bp, Artificial Sequence
  ENSG00000125863_20 (sequence is synthesized)
tagtggcctacaggtggctgtagagacagccaatttgattttggatctttcatatgttattgaagataaaaactaagagaatagcatgttcgtattacaagagaaacaaataaactagtc

SEQ ID NO: 264015 - DNA, 120 bp, Artificial Sequence
  ENSG00000125863_21 (sequence is synthesized)
tgttggcaattgagaaaaattgtgagtgtatttgttttctcccaaagccctgttctacatatttggacaaatgactcataaaattatagatacacttatttaggaaaaaaggtgattcgt

SEQ ID NO: 264016 - DNA, 120 bp, Artificial Sequence
  ENSG00000125863_22 (sequence is synthesized)
gaatggaaatgccatgaaacaataaaaatatgaagcattatttatttaaaaatattatagttatcttagggattctatactggctgctgtacattgttctaaatttttgttatgttggca

SEQ ID NO: 264017 - DNA, 120 bp, Artificial Sequence
  ENSG00000125863_23 (sequence is synthesized)
tcattttgagagcaaacaaataaaaaagactcctaatccatgctctagtttggatatacatattttagatattttccagttagcagtaattacatatgcttaaagtataaaactagatct

SEQ ID NO: 264018 - DNA, 120 bp, Artificial Sequence
  ENSG00000125863_24 (sequence is synthesized)
caaagtgtcacaaaacattcagtatatattgctcaatcaaaagaagtattcaaactgcacatttagtaaaatttcacttttctccatgccctttatctcaagctatattcttcagtggtt

SEQ ID NO: 264019 - DNA, 120 bp, Artificial Sequence
  ENSG00000125863_25 (sequence is synthesized)
aggtaattgagtagaacctggtttgcctgcaatttgtagtttatatcacaactccacatttttgttattttggggaaatgtttgcttttggggggaaaaagtagatttatatagtaacca

SEQ ID NO: 264020 - DNA, 120 bp, Artificial Sequence
  ENSG00000125863_26 (sequence is synthesized)
aggctaaagcaacattgtaatgtcttcatttttaaagtgggaagaaggactggtttgttttacactggggtttctcaactttggcattattgacattctgagccccataattctttgttg

SEQ ID NO: 264021 - DNA, 120 bp, Artificial Sequence
  ENSG00000125863_27 (sequence is synthesized)
aaatgtcccccgaagagcaaaactgttgttggttgagaaccatagactgatagaaaaaggaaggacaataaggagtattctagcaggacttcagaaagcagcataaagggaaggggaagt

SEQ ID NO: 264022 - DNA, 120 bp, Artificial Sequence
  ENSG00000125863_28 (sequence is synthesized)
tatttctctagtcaatagtatgaaaaagaaagtagaaaatctcccatgttcaaagtagagacattatgtttcaccaagggatgtagtttgaattttatgcaaatataagatgtattgata

SEQ ID NO: 264023 - DNA, 120 bp, Artificial Sequence
  ENSG00000125863_29 (sequence is synthesized)
aattgaagaagaaatatagaaggcagccacatgaataagcatggagctataacaaatgttgtattaaactttaggaaaatattttggaaatttttgggaaacaaaccaacctaatagtca

SEQ ID NO: 264024 - DNA, 120 bp, Artificial Sequence
  ENSG00000125863_30 (sequence is synthesized)
atgatcagatctatagccatgataaagagaaatagaattgttaaacaatttcctctgatattcttgtaatcaaaaagaatttttactctgagccaaaggaaaaaactagcaatacaagca

SEQ ID NO: 264025 - DNA, 120 bp, Artificial Sequence
  ENSG00000125863_31 (sequence is synthesized)
gcaatgccatccatatatgttaggtatcagccccacctgaagtctcataaaatatttatcaaaagttttactccttttattattacaatcaaatagaagggcagtgtggtaggcagcctc

SEQ ID NO: 264026 - DNA, 120 bp, Artificial Sequence
  ENSG00000125863_32 (sequence is synthesized)
taaggtggccccacctcctagtttcagaccttgcataatttcctccccttgagcatgggctagacttagtgactcctttatgtctcccatttcccagctttgtggacagaatgttatggt

SEQ ID NO: 264027 - DNA, 120 bp, Artificial Sequence
  ENSG00000125863_33 (sequence is synthesized)
gatggttatggttatgccttatccataattttatgctgtgagtagaaggcagataacttttctctagtttcatgggtctacagatggaaagcaactgtgttccaggaactgtacttaaag

SEQ ID NO: 264028 - DNA, 120 bp, Artificial Sequence
  ENSG00000125863_34 (sequence is synthesized)
aactacctcctgaggaagcctggggtgattccagttatgatatcaccctgacttgattccaattatgagattctgaactttgagctgatgttgtaatgcaaaagtgaaacttttgaggat

SEQ ID NO: 264029 - DNA, 120 bp, Artificial Sequence
  ENSG00000125863_35 (sequence is synthesized)
ctgaggagtaggggggacgtattttgcatgtggtaggcagcctctaagatggttcccaataatctcacttcctggtggttcactctctgggtgtaggtgggacctaatgactagcttcta

SEQ ID NO: 264030 - DNA, 120 bp, Artificial Sequence
  ENSG00000125863_36 (sequence is synthesized)
atgaatagaatacagcagaagggacaggatatcacttctgatatttggtggtaaaaagatgagtttgtctcttgatgccttctctctcaatggaagccagctgtcatgttgggaactgcc

SEQ ID NO: 264031 - DNA, 120 bp, Artificial Sequence
  ENSG00000125863_37 (sequence is synthesized)
ccctggggaggcccacatagcaagggttgagggaggcttctagccaacagctcaaaaggaactgaatcgtaccaataaccacaagagtgaatttggaagcaggttctccccagtggaacc

SEQ ID NO: 264032 - DNA, 120 bp, Artificial Sequence
  ENSG00000125863_38 (sequence is synthesized)
ttgagttgagtatagccctaccactggagccacacgagagaccctgatgcaaaaaagccagctaagctactcccaggttggttcctaacccacaaaatctgtgagataataaatgttgtt

SEQ ID NO: 264033 - DNA, 120 bp, Artificial Sequence
  ENSG00000125863_39 (sequence is synthesized)
ttaagtcaaatttgggatgtactttcttatacagcaatagctatctaataaaggcaggaggaaaagcttatttgtaataaattatttactgaaaacttggtcacataaatggaaaaaagc

SEQ ID NO: 264034 - DNA, 120 bp, Artificial Sequence
  ENSG00000125863_40 (sequence is synthesized)
attcttgatgccatgcctttgcatttttatcatcaccccaacctaaaagaagggttctttatcacatgtgtttacaatgtgtcacataggagttgggtattgtcctggttctctttgccc

SEQ ID NO: 264035 - DNA, 120 bp, Artificial Sequence
  ENSG00000125863_41 (sequence is synthesized)
ttatcctgcattttttcaagttcctccaagaaggggtgacacagcgaacctctccaattgatcttatagattaggggcttctacttttcacgatagccactttttaaattctatcatttt

SEQ ID NO: 264036 - DNA, 120 bp, Artificial Sequence
  ENSG00000125863_42 (sequence is synthesized)
tagctttgccatacaatttgattacattccttagtgaaacatcaatgctcttattttgaatatatcacaaattcgttaaaatatatttacaaatacctctatgtttcctaaagttataat

SEQ ID NO: 264037 - DNA, 120 bp, Artificial Sequence
  ENSG00000125863_43 (sequence is synthesized)
aatccctagcagaaaacactggaaatagaaaaaaagagaaaaaaaaccttcctctatagttcaagaaaattagcgttcaaacttagatgataaaacatgaaatgaaaattcttgatgaaa

SEQ ID NO: 264038 - DNA, 120 bp, Artificial Sequence
  ENSG00000125863_44 (sequence is synthesized)
ataattttagaggagttccttttggcagaaataaatgataagtaaaaatagcaactaaggtaagcctcaggcagtgttttgtgacttaaagtaagattgaggtctgaatattgcattatg

SEQ ID NO: 264039 - DNA, 120 bp, Artificial Sequence
  ENSG00000125863_45 (sequence is synthesized)
aagtacctcaggagagagaatgggaaaccgtgatcgctgtggaaaaggaaagggagagtgtgaagaagaaaatgaagtcggtgacagctgctcaataatttcgtgggactctcaggacat

SEQ ID NO: 264040 - DNA, 120 bp, Artificial Sequence
  ENSG00000125863_46 (sequence is synthesized)
gtaacattaaacgttattcaaccataggagtccaacaggattatcatcttattaatcaaaaggcattaggattttagcagcaaggaagaaagtggagagctacagcaaataaaggaaact

SEQ ID NO: 264041 - DNA, 120 bp, Artificial Sequence
  ENSG00000125863_47 (sequence is synthesized)
tttaatcaaatacttatttggtcttatagatatcctaccctttaattcttccatttgtaccatattagagagtctttatatgttagacattgtaagtcaactgttagactgaagcacttt

SEQ ID NO: 264042 - DNA, 120 bp, Artificial Sequence
  ENSG00000125863_48 (sequence is synthesized)
atgtaagtgaagtattttacacaagatatttaaactatatcacattaatatcttttattataggtatccttgaactcatttggtttgtattatcaaagctacttaggcatttacattgta

SEQ ID NO: 264043 - DNA, 120 bp, Artificial Sequence
  ENSG00000125863_49 (sequence is synthesized)
gacaagaaatttgaagtaaccataaatcagccattgtactatgtattttcatattgttgttcatattgttgagcagttctttggataactttaaaataaaataatgttgtttaccatcac

SEQ ID NO: 264044 - DNA, 120 bp, Artificial Sequence
  ENSG00000125863_50 (sequence is synthesized)
atacattatgcaggttatttaaaattatcatgtaaaaaatcaatgcaggccttgacaaaacatacaattagttaggttattccttcctgataatctttggggaatagtcaaagagactaa

SEQ ID NO: 264045 - DNA, 120 bp, Artificial Sequence
  ENSG00000125863_51 (sequence is synthesized)
acatctcctacaaggccctgtttcagctgtctaaataaagctatctcttaatctgaaggaaaagtcaattttgaatatctgatatctttataatttttttcatgtagctaagtgcttcca

SEQ ID NO: 264046 - DNA, 120 bp, Artificial Sequence
  ENSG00000125863_52 (sequence is synthesized)
tttagtaactattgtatcccataatggaagtttttgccaatcatctacagaatttgaatttagatgcacctaaacccaatgttagcctacttttggattataagtagatttatatgctgc

SEQ ID NO: 264047 - DNA, 120 bp, Artificial Sequence
  ENSG00000125863_53 (sequence is synthesized)
tttactaagaatatagtaatattcatgaaagagaatgcaatccctgaaaactattcctaaatgtaagtgaagctgtttgttggagagacgattagtcttggcgcactaaaatccatagaa

SEQ ID NO: 264048 - DNA, 120 bp, Artificial Sequence
  ENSG00000125863_54 (sequence is synthesized)
tactatattacctgtaatgaagtgtgaatttagagggaaataaaacagcttgacaatctcctattaaaaattctctttgagaaaatacttataataaacatcttattttagccatcttga

SEQ ID NO: 264049 - DNA, 120 bp, Artificial Sequence
  ENSG00000125863_55 (sequence is synthesized)
gggaaaacactttaggttgagtgctgagagaaaggctctctgagtaggtgacatctgaactaagagctgaagcagaagaataagccatcctctgtggaccaaaggggacaagattctcta

SEQ ID NO: 264050 - DNA, 120 bp, Artificial Sequence
  ENSG00000125863_56 (sequence is synthesized)
cttttctgctacgcactaggaatatagcagagaagacaagtggctgctaccttctgttatcgtgggtggcagtgactagtttttctagatcttgactccctgccgtaactaaagatggag

SEQ ID NO: 264051 - DNA, 120 bp, Artificial Sequence
  ENSG00000125863_57 (sequence is synthesized)
gcgcgacgcgaaggttgtcgggatccgcggcagcagcggctgcttgagatctgtttctggggcctctggcggtggcggcctggggcggcgcgacggctggtgcgcaggctggagtgcaat

SEQ ID NO: 264052 - DNA, 120 bp, Artificial Sequence
  ENSG00000125864_0 (sequence is synthesized)
ctcctggagagccggctcggcgccgcccgcgcgcccgcgccagagcagccatgtaccggcgcagctacgtcttccagacccgcaaggagcagtacgagcacgccgacgaggcttcgcgcg

SEQ ID NO: 264053 - DNA, 120 bp, Artificial Sequence
  ENSG00000125864_1 (sequence is synthesized)
cgcaaggagcagtacgagcacgccgacgaggcttcgcgcgccgccgagcccgagcgcccggccgacgagggctgggctggggcaacgagcctggcggcgctgcaggggctcggcgagcgc

SEQ ID NO: 264054 - DNA, 120 bp, Artificial Sequence
  ENSG00000125864_2 (sequence is synthesized)
gccatgccgggctccggaggcagctggatgccttccagcgcctgggcgagctggccgggcccgaggacgccctcgcccgccaagtcgagagcaaccgccagcgcgtccgggacctggagg

SEQ ID NO: 264055 - DNA, 120 bp, Artificial Sequence
  ENSG00000125864_3 (sequence is synthesized)
ccgagcgcgcccggctggagcgccagggcaccgaggcgcagcgcgcgctcgacgagttccgaagcaagtatgaaaatgagtgcgaatgtcaactcctgctaaaagaaatgcttgaacggc

SEQ ID NO: 264056 - DNA, 120 bp, Artificial Sequence
  ENSG00000125864_4 (sequence is synthesized)
ttaacaaggaagctgatgaagccttgctgcataacctacgccttcagctggaagcccaatttctgcaagatgatatcagtgcggcaaaggacaggcacaagaagaatcttctggaagttc

SEQ ID NO: 264057 - DNA, 120 bp, Artificial Sequence
  ENSG00000125864_5 (sequence is synthesized)
agacctatatcagcatcctgcagcagatcatccacaccactcctccagcatccattgtgacgagtgggatgagggaggagaagctcctgacggagcgggaggtggccgccctgcggagtc

SEQ ID NO: 264058 - DNA, 120 bp, Artificial Sequence
  ENSG00000125864_6 (sequence is synthesized)
agctggaggagggccgggaggtgctctcccacctgcaggcgcagagagtggagctgcaggcacagacaacaactctggaacaagctattaaaagtgcccatgagtgttatgacgatgaga

SEQ ID NO: 264059 - DNA, 120 bp, Artificial Sequence
  ENSG00000125864_7 (sequence is synthesized)
ttcagctttataacgagcagattgagacactgcgcaaggagattgaggagacagagcgggtcctggagaagtcttcttacgactgccggcagctggcggtcgcccagcaaaccctgaaga

SEQ ID NO: 264060 - DNA, 120 bp, Artificial Sequence
  ENSG00000125864_8 (sequence is synthesized)
atgagctggaccggtatcatcgtatcatcgagattgaaggcaacaggctgacctctgccttcattgaaactcccattcccctgttcacccagagccatggagtctctctcagcactggat

SEQ ID NO: 264061 - DNA, 120 bp, Artificial Sequence
  ENSG00000125864_9 (sequence is synthesized)
aaaaagccctccccaagaatgttccaaggagaaaagagattataacaaaagacaaaaccaacggagctctggaagatgcaccattaaaaggtttggaagacacaaagctggtacaggtgg

SEQ ID NO: 264062 - DNA, 120 bp, Artificial Sequence
  ENSG00000125864_10 (sequence is synthesized)
tacttaaagaggaaagtgaatctaagtttgaatcagaaagtaaagaagtaagtcccctgacacaagaaggggctccagaggatgtgccagatggagggcagataagcaaaggctttggga

SEQ ID NO: 264063 - DNA, 120 bp, Artificial Sequence
  ENSG00000125864_11 (sequence is synthesized)
aactatacaggaaggtcaaggagaaagtgagaagccccaaagagcctgagacccccactgagctctacaccaaagagcggcacgtgctggtcacaggggatgccaattacgtggacccta

SEQ ID NO: 264064 - DNA, 120 bp, Artificial Sequence
  ENSG00000125864_12 (sequence is synthesized)
gattctatgtctcctccatcacagctaaaggtggggtggctgtttctgttgcggaagactctgtgctttatgacggccaggtggagccctctcctgagtcacccaagccccctttagaga

SEQ ID NO: 264065 - DNA, 120 bp, Artificial Sequence
  ENSG00000125864_13 (sequence is synthesized)
atgggcaggtgggtctgcaggagaaagaagatggacaaccaattgaccagcagcctatagacaaggagattgagccagatggtgcagagctggaaggccctgaagagaaacgtgagggtg

SEQ ID NO: 264066 - DNA, 120 bp, Artificial Sequence
  ENSG00000125864_14 (sequence is synthesized)
aggagcgggacgaagagtccaggagaccctgtgccatggtcacacccggtgcagaggaaccatctatacctgagcctccaaagcctgcggctgatcaggatggagctgaggtgcttggga

SEQ ID NO: 264067 - DNA, 120 bp, Artificial Sequence
  ENSG00000125864_15 (sequence is synthesized)
ctaggagcagaagcctgccagaaaaaggccctcccaaggctttggcctataagacagtggaagtggtggaatctatcgagaagatttccacggagagcattcagacatatgaagaaaccg

SEQ ID NO: 264068 - DNA, 120 bp, Artificial Sequence
  ENSG00000125864_16 (sequence is synthesized)
ctgtgatcgtggagaccatgattggaaagacaaagtcagacaagaagaaatcaggagagaagagctcttaaaatgcccaggcttgatgggataaaatgtatttggggccactgtaggggt

SEQ ID NO: 264069 - DNA, 120 bp, Artificial Sequence
  ENSG00000125864_17 (sequence is synthesized)
aatgctttgatattttagagcaaatgataaaagggtgagggttcctgtttggattagaccatagttgacccatctggcattgccaacgaagccttcattaaaatgttttctttgcttgca

SEQ ID NO: 264070 - DNA, 120 bp, Artificial Sequence
  ENSG00000125864_18 (sequence is synthesized)
cagattaacctggtttctgagaacatgaaatgaaaccgctggttggccgcctgtttctgtcctgagtggctgcaggaggacttcctggcttttccctgctgccctcgtctctaaagcagg

SEQ ID NO: 264071 - DNA, 120 bp, Artificial Sequence
  ENSG00000125864_19 (sequence is synthesized)
gtctcaaacatctcttctgtgctgcctcctccactcccacccgtggcattctgatggagaccgcttctcagaaaaatgatggtaaaggcataaaataaaatacagataatttaaaggaaa

SEQ ID NO: 264072 - DNA, 120 bp, Artificial Sequence
  ENSG00000125864_20 (sequence is synthesized)
aattttccatgctggaagtggaaggaattgcttgctcatttatattctctatcctgtggaaagccttccctcccaccccttgagccagtgagtcacttcctctctgcaaacctctaaagc

SEQ ID NO: 264073 - DNA, 120 bp, Artificial Sequence
  ENSG00000125864_21 (sequence is synthesized)
ctcctttctttctcagcccagacctggccctctggagagggttttggagtcctgggtaggcagggtacctcaggcagcaggcagcacaccttggatgtgagctgaatggattttcaaatt

SEQ ID NO: 264074 - DNA, 120 bp, Artificial Sequence
  ENSG00000125864_22 (sequence is synthesized)
gaggcgaccgtggccatgcagagtgctctgtgagtcaccgttaatttcagatggggtaaggtgaagagacgttccttgggagcccagaggagtacaggatctgatcccaagccctttacc

SEQ ID NO: 264075 - DNA, 120 bp, Artificial Sequence
  ENSG00000125864_23 (sequence is synthesized)
aacaggccgcatgacacagcacttgtgagtgaggctgaacaagagaaatgagacttctgcctcacccgctgcaactacagggcaggaaaaactcagaaccagcaaagcgcccaccccaga

SEQ ID NO: 264076 - DNA, 120 bp, Artificial Sequence
  ENSG00000125864_24 (sequence is synthesized)
agaaatgccaagataaacttggcccaagttcccttgggaattctcaggatcctacctggtgcagcagatcacaccagggagatgttactggatctttgatgagtggagcatccacagagg

SEQ ID NO: 264077 - DNA, 120 bp, Artificial Sequence
  ENSG00000125864_25 (sequence is synthesized)
acagaaggagcctccatgctggagaaagtatagacagggtctcactatgttgcccagaatggggtgcagtggctattcacaggaatgatcattgctcactgcagccttgaactcccggtc

SEQ ID NO: 264078 - DNA, 120 bp, Artificial Sequence
  ENSG00000125868_0 (sequence is synthesized)
gccccggggtaagctcgcgccgccgcgtcagctcagcgctgggtctctcggtcccgcagccgtgaggaggacggtctgcatactcgctgcccgccggctccctcccccgcgtccctgcga

SEQ ID NO: 264079 - DNA, 120 bp, Artificial Sequence
  ENSG00000125868_1 (sequence is synthesized)
ccgccgcggcgaagatggcctcaggagtgcaagtagctgatgaagtatgtcgcattttttatgacatgaaagttcgtaaatgctccacaccagaagaaatcaagaaaagaaagaaggctg

SEQ ID NO: 264080 - DNA, 120 bp, Artificial Sequence
  ENSG00000125868_2 (sequence is synthesized)
tcattttttgtctcagtgcagacaaaaagtgcatcattgtagaagaaggcaaagagatcttggttggagatgttggtgtaaccataactgatcctttcaagcattttgtgggaatgcttc

SEQ ID NO: 264081 - DNA, 120 bp, Artificial Sequence
  ENSG00000125868_3 (sequence is synthesized)
ctgaaaaagattgtcgctatgctttgtatgatgcaagctttgaaacaaaagaatccagaaaagaagagttgatgttttttttgtgggcaccagaactagcacctctgaaaagtaaaatga

SEQ ID NO: 264082 - DNA, 120 bp, Artificial Sequence
  ENSG00000125868_4 (sequence is synthesized)
tctatgcaagctccaaggatgcaattaaaaagaaatttcaaggcataaaacatgaatgtcaagcaaatggaccagaagatctcaatcgggcttgtattgctgaaaagttaggtggatcct

SEQ ID NO: 264083 - DNA, 120 bp, Artificial Sequence
  ENSG00000125868_5 (sequence is synthesized)
taattgtagcctttgaaggatgccctgtgtagattattcagtgccacaaattgaaagcttccatgtttaatgttatcctcttgctatataaataaagcaaatatatttaggccagggtct

SEQ ID NO: 264084 - DNA, 120 bp, Artificial Sequence
  ENSG00000125868_6 (sequence is synthesized)
cactgagggggagctgtcttgtcatcttttagagtaaactattctataaacatatgcaaacagccctaaataaatctaaagtctaaagttttattgatgtgaaattaaattcttattggc

SEQ ID NO: 264085 - DNA, 120 bp, Artificial Sequence
  ENSG00000125868_7 (sequence is synthesized)
caaatgcctgttttgatgagttgatttataaagatttttgttaagctcaggattttaaattacacagttcacaaacagtaaaggccatgtgaagagaattattacatctttattaacctc

SEQ ID NO: 264086 - DNA, 120 bp, Artificial Sequence
  ENSG00000125868_8 (sequence is synthesized)
agcatttactttgtttcttttgcttaggaaattgctcataatctggttataattttggtccaaattctttattcttccttgagctaagcagaataatggaatataatatgtcttcataat

SEQ ID NO: 264087 - DNA, 120 bp, Artificial Sequence
  ENSG00000125868_9 (sequence is synthesized)
ataacaacactaatacactaatagtaagattaagttaggcagtcttctaccaaatgtgtaatggagattgcctcaaaattgtgtccacataatccacgctcatcttgcaaagcgctattt

SEQ ID NO: 264088 - DNA, 120 bp, Artificial Sequence
  ENSG00000125868_10 (sequence is synthesized)
caggcacatcattggaatacaggaagtagccctgcacctgccagtgagctcgccattcactgattggaagagtgacctggcatcttggaaatcattgtgtgtcttcaggagaatgtgcag

SEQ ID NO: 264089 - DNA, 120 bp, Artificial Sequence
  ENSG00000125868_11 (sequence is synthesized)
tgtcttgtaacaactaattataatgcaaattagggctacattgtaatctgctttgttaatgaaaatgataaaacagaatattgacaagctaggacacctgtggtatctttaattgtatct

SEQ ID NO: 264090 - DNA, 120 bp, Artificial Sequence
  ENSG00000125868_12 (sequence is synthesized)
ccttcagaagtttgcttcttatggtataataaagtatggaagaatattgagtatatgtttactctgggcctgggagaacttaactttctagagcagtttgttgacttgtgtgcaatgggg

SEQ ID NO: 264091 - DNA, 120 bp, Artificial Sequence
  ENSG00000125868_13 (sequence is synthesized)
agaggtaccatgatgacactcacagggagccactgttcactgacacttggaagcggtcattgttaatatcacgggcgtaacactttgaacgatatagagatgcacaaacagttgaactta

SEQ ID NO: 264092 - DNA, 120 bp, Artificial Sequence
  ENSG00000125868_14 (sequence is synthesized)
ttacctctcgtgtaattttcatgtgtgaattgggaatacaggattttgccttccatatggggtaaggcattgaggtttgggtatttccaataattaagagttaaggttggctgagtgtgg

SEQ ID NO: 264093 - DNA, 120 bp, Artificial Sequence
  ENSG00000125868_15 (sequence is synthesized)
tcccagcattttgggaggccgaggcaagaggatagtttgaggccaggagtttgacaatcagcgtgggcaacatagtgggatctcatctactaaaaataaacaaaattagccgggtgtggt

SEQ ID NO: 264094 - DNA, 88 bp, Artificial Sequence
  ENSG00000125868_16 (sequence is synthesized)
gggcaacatagtgggatctcatctactaaaaataaacaaaattagccgggtgtggtggtgcacgtcagtagtcccagctactttggat

SEQ ID NO: 264095 - DNA, 120 bp, Artificial Sequence
  ENSG00000125868_17 (sequence is synthesized)
accttgtctcaaaaaaaaaaaaaaaagtcacaactccctctggtgaataagaaagttggtgtaaaagttgggaacgttttcaatgtttattacactataagtgtaataaatattatacaa

SEQ ID NO: 264096 - DNA, 120 bp, Artificial Sequence
  ENSG00000125868_18 (sequence is synthesized)
ttatacaaaattataaattcacatttaaaatttagaaaatagagaaaagggaaattatacattgtcctaccacatgccatcacatggttagcattttgatacacagctgtgcattattac

SEQ ID NO: 264097 - DNA, 120 bp, Artificial Sequence
  ENSG00000125868_19 (sequence is synthesized)
atgtcaaagactgcatatactatggtggtcccatacaattataatgtattttctactgtaattagatacacaaataccattgtgttacagttgccgacagtattcagtatagtaacgtgc

SEQ ID NO: 264098 - DNA, 120 bp, Artificial Sequence
  ENSG00000125868_20 (sequence is synthesized)
tgtccaggtttgtggtctaggagtaataggctctaccatacagcctaggtgtgtagtaggctatgccactaggtttaagtgcagtctagggtggggaacattttaatgttgatccacatg

SEQ ID NO: 264099 - DNA, 120 bp, Artificial Sequence
  ENSG00000125868_21 (sequence is synthesized)
ccaggtgtttgtgagacaagattatgctttaatcaaaatattttggaattgtctagaaaatagtgctggctgcttgtcattcatcctgaattgcttgtttctttactttgtagcaatgct

SEQ ID NO: 264100 - DNA, 90 bp, Artificial Sequence
  ENSG00000125868_22 (sequence is synthesized)
tcatcctgaattgcttgtttctttactttgtagcaatgcttttagtgtgggttttgttttttgagacagggtctcactctttccactcac

SEQ ID NO: 264101 - DNA, 120 bp, Artificial Sequence
  ENSG00000125868_23 (sequence is synthesized)
tgtgattacaggtgtgagccactgtgtcctgctagtgattgtgattaacaggcctccagggaagtgccataagcccaagactgccgtactcaaaagtcagccatgtaggtaaagcaagat

SEQ ID NO: 264102 - DNA, 120 bp, Artificial Sequence
  ENSG00000125868_24 (sequence is synthesized)
gtaggtaaagcaagatatttggtcaaggagttttagaaggagatttttcctgtggtgttggcttaagtgtggcactgttgtgcgtgtgtgaggtgtcttctgtgggaaggatttcaaaca

SEQ ID NO: 264103 - DNA, 120 bp, Artificial Sequence
  ENSG00000125868_25 (sequence is synthesized)
gtacaaagggatgtgatgtaagcatccagaactcactccagaaattgaataaaatgctagtagttagtctctaggggaacttttgagaaagtctcagtggattcctgaggcccaagaatt

SEQ ID NO: 264104 - DNA, 120 bp, Artificial Sequence
  ENSG00000125868_26 (sequence is synthesized)
gtgctaacaagcactcaaggcgattctggtacataattagggttcagacctcagctgattggtctactgttggtcaggaacaaaactgcaagtatactctgtttccagaaaatacgttta

SEQ ID NO: 264105 - DNA, 120 bp, Artificial Sequence
  ENSG00000125868_27 (sequence is synthesized)
cctcttcacaaatgctaacacactgcaaaaatatgtttgtggaaagctgacttagtctcatctagcggttactctcttgccctgacaaagcagcaaataaagccattgctaacaattcaa

SEQ ID NO: 264106 - DNA, 120 bp, Artificial Sequence
  ENSG00000125868_28 (sequence is synthesized)
ggcgaagatgattttcagttcacccactagaggcaaagacgtaagagagctaccagcgtattgagaggagatacacaggcactacgagaatggagtttagaagaaggtcagagccctggg

SEQ ID NO: 264107 - DNA, 120 bp, Artificial Sequence
  ENSG00000125869_0 (sequence is synthesized)
ggattgctttcagcactcgcagccgtggaccgccgtgcggtcctttcctccgcagtgagccgatttgctctgccagcagctgtcggtgccgcgctcgacaccgagtcctagctaggcgct

SEQ ID NO: 264108 - DNA, 120 bp, Artificial Sequence
  ENSG00000125869_1 (sequence is synthesized)
cacagaatacgcgctccctccctcccccttctctgtcccccgcctctcgctcaccccggcccactccagcggcgactttgagggattccctctctggcggcctctgcagcagcacagccg

SEQ ID NO: 264109 - DNA, 120 bp, Artificial Sequence
  ENSG00000125869_2 (sequence is synthesized)
gcctcattcggggcactgcgagtatggatctccaaggaagaggggtccccagcatcgacagacttcgagttctcctgatgttgttccatacaatggctcaaatcatggcagaacaagaag

SEQ ID NO: 264110 - DNA, 120 bp, Artificial Sequence
  ENSG00000125869_3 (sequence is synthesized)
tggaaaatctctcaggcctttccactaaccctgaaaaagatatatttgtggtgcgggaaaatgggacgacgtgtctcatggcagagtttgcagccaaatttattgtaccttatgatgtgt

SEQ ID NO: 264111 - DNA, 120 bp, Artificial Sequence
  ENSG00000125869_4 (sequence is synthesized)
gggccagcaactacgtagatctgatcacagaacaggccgatatcgcattgacccggggagctgaggtgaagggccgctgtggccacagccagtcggagctgcaagtgttctgggtggatc

SEQ ID NO: 264112 - DNA, 120 bp, Artificial Sequence
  ENSG00000125869_5 (sequence is synthesized)
gcgcatatgcactcaaaatgctctttgtaaaggaaagccacaacatgtccaagggacctgaggcgacttggaggctgagcaaagtgcagtttgtctacgactcctcggagaaaacccact

SEQ ID NO: 264113 - DNA, 120 bp, Artificial Sequence
  ENSG00000125869_6 (sequence is synthesized)
tcaaagacgcagtcagtgctgggaagcacacagccaactcgcaccacctctctgccttggtcacccccgctgggaagtcctatgagtgtcaagctcaacaaaccatttcactggcctcta

SEQ ID NO: 264114 - DNA, 120 bp, Artificial Sequence
  ENSG00000125869_7 (sequence is synthesized)
gaagacggtcaccatgatcctgtctgcggtccacatccaaccttttgacattatctcagattttgtcttcagtgaagagcataaatgcccagtggatgagcgggagcaactggaagaaac

SEQ ID NO: 264115 - DNA, 120 bp, Artificial Sequence
  ENSG00000125869_8 (sequence is synthesized)
cttgcccctgattttggggctcatcttgggcctcgtcatcatggtaacactcgcgatttaccacgtccaccacaaaatgactgccaaccaggtgcagatccctcgggacagatcccagta

SEQ ID NO: 264116 - DNA, 120 bp, Artificial Sequence
  ENSG00000125869_9 (sequence is synthesized)
taagcacatgggctagaggccgttaggcaggcaccccctattcctgctcccccaactggatcaggtagaacaacaaaagcacttttccatcttgtacacgagatacaccaacatagctac

SEQ ID NO: 264117 - DNA, 120 bp, Artificial Sequence
  ENSG00000125869_10 (sequence is synthesized)
aatcaaacaggcctgggtatctgaggcttgcttggcttgtgtccatgcttaaacccacggaagggggagactctttcggatttgtagggtgaaatggcaattattctctccatgctgggg

SEQ ID NO: 264118 - DNA, 120 bp, Artificial Sequence
  ENSG00000125869_11 (sequence is synthesized)
aggaggggaggagggtctcagacagctttcgtgctcatggtggcttggctttgactctccaaagagcaataaatgccacttggagctgtatctggccccaaagtttagggattgaaaaca

SEQ ID NO: 264119 - DNA, 120 bp, Artificial Sequence
  ENSG00000125869_12 (sequence is synthesized)
tgcttctttgaggaggaaacccctttaggttcagaagaatatggggtgctttgctcccttggacacagctggcttatcctatacagttgtcaatgcacacagaatacaacctcatgctcc

SEQ ID NO: 264120 - DNA, 120 bp, Artificial Sequence
  ENSG00000125869_13 (sequence is synthesized)
ctgcagcaagacccctgaaagtgattcatgcttctggctggcattctgcatgtttagtgattgtcttgggaatgtttcactgctacccgcatccagcgactgcagcaccagaaaacgact

SEQ ID NO: 264121 - DNA, 120 bp, Artificial Sequence
  ENSG00000125869_14 (sequence is synthesized)
aatgtaactatgcagagttgtttggacttcttcctgtgccaggtccaagtcgggggacctgaagaatcaatctgtgtgagtctgtttttcaaaatgaaataaaacacactattctctggc

SEQ ID NO: 264122 - DNA, 120 bp, Artificial Sequence
  ENSG00000125869_15 (sequence is synthesized)
agatgcgttttcagaagacagtactccagtgataaggtatctacaccacttaataactgtacctggtaaggagatttaataaggctgagggtggtattaagtttctcagaacagactcat

SEQ ID NO: 264123 - DNA, 120 bp, Artificial Sequence
  ENSG00000125870_0 (sequence is synthesized)
cctgcttttggttcttacagtagtcggcgtaggccttaggtgggttcgtgcgccttctacctcgctgtttcggttttcctggctcctcggcccttttctcccctgttgcagctgggagcg

SEQ ID NO: 264124 - DNA, 120 bp, Artificial Sequence
  ENSG00000125870_1 (sequence is synthesized)
gacgaagcgcgaagctgggattttttactgtctcctgaagaatttaacacaaacatggatatcagaccaaatcatacaatttatatcaacaatatgaatgacaaaattaaaaaggaagaa

SEQ ID NO: 264125 - DNA, 120 bp, Artificial Sequence
  ENSG00000125870_2 (sequence is synthesized)
ttgaagagatccctatatgccctgttttctcagtttggtcatgtggtggacattgtggctttaaagaccatgaagatgagggggcaggcctttgtcatatttaaggaactgggctcatcc

SEQ ID NO: 264126 - DNA, 120 bp, Artificial Sequence
  ENSG00000125870_3 (sequence is synthesized)
acaaatgccttgagacagctacaaggatttccattttatggtaaaccaatgcgaatacagtatgcaaaaacagattcggatataatatcaaaaatgcgtggaacttttgctgacaaagaa

SEQ ID NO: 264127 - DNA, 120 bp, Artificial Sequence
  ENSG00000125870_4 (sequence is synthesized)
aagaaaaaagaaaagaaaaaagccaaaactgtggaacagactgcaacaaccacaaacaaaaagcctggccagggaactccaaattcagctaatacccaaggaaattcaacaccaaatcct

SEQ ID NO: 264128 - DNA, 120 bp, Artificial Sequence
  ENSG00000125870_5 (sequence is synthesized)
caggtccctgattaccctccaaactatattttattccttaataacttaccagaagagactaatgagatgatgttatccatgctgtttaatcagttccctggcttcaaggaagtacgtctg

SEQ ID NO: 264129 - DNA, 120 bp, Artificial Sequence
  ENSG00000125870_6 (sequence is synthesized)
gtaccagggaggcatgacattgcttttgttgaatttgaaaatgatgggcaggctggagctgccagggatgctttacagggatttaagatcacaccgtcccatgctatgaagatcacctat

SEQ ID NO: 264130 - DNA, 120 bp, Artificial Sequence
  ENSG00000125870_7 (sequence is synthesized)
gccaagaaataacatttgggatagtcgtctttaaaagacttggtgttatttacagtgtttgttttgataacatttggctgggtcattttaatagttagagatgaggaggagtaaaagtga

SEQ ID NO: 264131 - DNA, 120 bp, Artificial Sequence
  ENSG00000125870_8 (sequence is synthesized)
aatttttgtgaaggacttaaattatccagtgtttctttagccttggtgaactatgaaatacgaaggccttaattttgtacaataaacttttatttgtattctgtgtatataatgctttct

SEQ ID NO: 264132 - DNA, 120 bp, Artificial Sequence
  ENSG00000125870_9 (sequence is synthesized)
tgattgacccatctccctatcatcaaatgacttctagtctagaacacacttaaggtttataaacttgtgtaataggatgcttttctagtgttactttggaggagctaattatacaacatc

SEQ ID NO: 264133 - DNA, 120 bp, Artificial Sequence
  ENSG00000125870_10 (sequence is synthesized)
caataaaagttaagtaaaattagatcacagaagctagtagatgactgttgtattaatggtaacaatgattgttctgggtattagaagaaaatgagacccaggcaggatctaaatttgatc

SEQ ID NO: 264134 - DNA, 120 bp, Artificial Sequence
  ENSG00000125870_11 (sequence is synthesized)
tttgtatccttttaagaaatgaatatattattttgctgctagtagggattccacaagttttcttcattcagtattaaataaaggctgttcttactgtttactgagaaaacagaaagggaa

SEQ ID NO: 264135 - DNA, 120 bp, Artificial Sequence
  ENSG00000125870_12 (sequence is synthesized)
tgctatcttcacactttgcatttaatgctgtttccttcatgaggcaggactgttctaaggttaatatgcaatctctttattgaaagacctccagggtaaaaattttttgatctatagtct

SEQ ID NO: 264136 - DNA, 120 bp, Artificial Sequence
  ENSG00000125870_13 (sequence is synthesized)
cttttcccccttaagacaaatagactgattaataaagagttgccagtgctaagcttgctacttctttgtaattcttaaacaccaatgttcaaatatttccaaagcccattttctttagct

SEQ ID NO: 264137 - DNA, 120 bp, Artificial Sequence
  ENSG00000125870_14 (sequence is synthesized)
tttgatttatgtttaaggctattgattcagtcctctgctgagtaaaccatgggtatctccagaagtggacaatttgtttttacaagtatggtacatattaatagtaacaacaacaaaaaa

SEQ ID NO: 264138 - DNA, 120 bp, Artificial Sequence
  ENSG00000125870_15 (sequence is synthesized)
gaaaacagtacttatttttctggtgttcctgttttagtattccttgaacaaaacctttatcacttggaatttttattgtctacttatggaaagacttttagacttacgtagacagtatca

SEQ ID NO: 264139 - DNA, 120 bp, Artificial Sequence
  ENSG00000125870_16 (sequence is synthesized)
catcactcttatgcatacataaagaggaaaaaaatgtttcctataactttgtcacagttagtctgactcttctgaataacttttttaatcccagtagtcaagctcctgtacttttgtaaa

SEQ ID NO: 264140 - DNA, 120 bp, Artificial Sequence
  ENSG00000125870_17 (sequence is synthesized)
atatattaacagtgaattactagaaaatgggccatgttcttgtatattacagtgatgtcaattgctgataaattttctaactgcttactctcggataccgtacttgtctaagaactgaaa

SEQ ID NO: 264141 - DNA, 120 bp, Artificial Sequence
  ENSG00000125870_18 (sequence is synthesized)
ataattcacagactgatcccatgcccagtcctggccatgctttgagtggctgtattggagcagaaaagccagggtggctcacctggggtgagaatgaggggggtgaatagtaagaggggt

SEQ ID NO: 264142 - DNA, 120 bp, Artificial Sequence
  ENSG00000125870_19 (sequence is synthesized)
cgtgtaggtcttcttcaggatttgcttatactctgagtgaaatgggggactattttagagaatttttttaaagtgggttagaatttacgtacaataaagttcacccatgttagtgttcca

SEQ ID NO: 264143 - DNA, 120 bp, Artificial Sequence
  ENSG00000125870_20 (sequence is synthesized)
ttctagacttgtcggcgctcgattgaggagcgtggctacgttgcttccggtgcctggctccgtttcctgcttttggttcttacagtagtcggcgtaggccttagattttttactgtctcc

SEQ ID NO: 264144 - DNA, 120 bp, Artificial Sequence
  ENSG00000125870_21 (sequence is synthesized)
cattatttcactttaatcaagaaattaatgatattgatgggacagtagatttgtaaatatgcttgaaactgtggctattgctttctgcttttaattatgtgtgtttgggtttatgtattt

SEQ ID NO: 264145 - DNA, 120 bp, Artificial Sequence
  ENSG00000125871_0 (sequence is synthesized)
attctggacctgctttgccttaggctgtgcctaattcgaaaccaaagcgcgggacggatgaaagtacgggtcgcgagaggttgttcgcgccttgagagttaagcgaagtgtggtggcttc

SEQ ID NO: 264146 - DNA, 120 bp, Artificial Sequence
  ENSG00000125871_1 (sequence is synthesized)
caaggaatacaaacataaaggccttcgaccgttgcaaatagactaaagtgaaaacaaatctgaatgaagatgaagttatttcagaccatttgcaggcagctcaggagttcaaagttttct

SEQ ID NO: 264147 - DNA, 120 bp, Artificial Sequence
  ENSG00000125871_2 (sequence is synthesized)
gtggaatcagctgcccttgtggctttctctacttcctcttactcatgtggccggaagaaaaaagtgaacccatatgaagaagtggaccaagaaaaatactctaatttagttcagtctgtc

SEQ ID NO: 264148 - DNA, 120 bp, Artificial Sequence
  ENSG00000125871_3 (sequence is synthesized)
ttgtcatccagaggcgtcgcccagaccccgggatcggtggaggaagatgctttgctctgtggacccgtgagcaagcataagctgccaaaccaaggtgaggacagacgagtgccacaaaac

SEQ ID NO: 264149 - DNA, 120 bp, Artificial Sequence
  ENSG00000125871_4 (sequence is synthesized)
tggtttcctatcttcaatccagagagaagtgataaaccaaatgcaagtgatccttcagttcctttgaaaatccccttgcaaaggaatgtgataccaagtgtgacccgagtccttcagcag

SEQ ID NO: 264150 - DNA, 120 bp, Artificial Sequence
  ENSG00000125871_5 (sequence is synthesized)
accatgacaaaacaacaggttttcttgttggagaggtggaaacagcggatgattctggaactgggagaagatggctttaaagaatacacttcaaacgtctttttacaagggaaacggttc

SEQ ID NO: 264151 - DNA, 120 bp, Artificial Sequence
  ENSG00000125871_6 (sequence is synthesized)
cacgaagccttggaaagcatactttcaccccaggaaaccttaaaagagagagatgaaaatctcctcaagtctggttacattgaaagtgtccagcatattctgaaagatgtcagtggagtg

SEQ ID NO: 264152 - DNA, 120 bp, Artificial Sequence
  ENSG00000125871_7 (sequence is synthesized)
cgagctcttgaaagtgctgttcaacatgaaaccttaaactatataggtctgctggactgtgtggctgagtatcagggcaagctctgtgtgattgattggaagacatcagagaaaccaaag

SEQ ID NO: 264153 - DNA, 120 bp, Artificial Sequence
  ENSG00000125871_8 (sequence is synthesized)
ccttttattcaaagtacatttgacaacccactgcaagttgtggcatacatgggtgccatgaaccatgataccaactacagctttcaggttcaatgtggcttaattgtggtggcctacaaa

SEQ ID NO: 264154 - DNA, 120 bp, Artificial Sequence
  ENSG00000125871_9 (sequence is synthesized)
tcgactagaagaatatacggaaaagaaaaagaaccagaatattcagaaaccagaatattcagaatagggagcaagttgctatttgggaacattcagcaccttctcacagtttgggaacat

SEQ ID NO: 264155 - DNA, 120 bp, Artificial Sequence
  ENSG00000125871_10 (sequence is synthesized)
atattgctgtttactccagtgtaaaaatgaggtgccactggatctgagtgctacacgaacacaagtagaagtattaatttgttgaaatgtgttgttaccaaaaagactgaaaagccccaa

SEQ ID NO: 264156 - DNA, 120 bp, Artificial Sequence
  ENSG00000125871_11 (sequence is synthesized)
agtctagatataaagacctagacttcggcacgcgaaatcccagctatgctacctcttatttacctgaaaggaggacacgcaggatgggcagtcatgctggtgactcttgtactcccttga

SEQ ID NO: 264157 - DNA, 120 bp, Artificial Sequence
  ENSG00000125871_12 (sequence is synthesized)
gggacattgggggggggggggcgtggtcccaggcaggatgcccagtctttgagctgagattggaaggcagtgaggctgagggtgccaagatttccccagggttcacccagaggggaaggg

SEQ ID NO: 264158 - DNA, 120 bp, Artificial Sequence
  ENSG00000125871_13 (sequence is synthesized)
gctacatgcccccagctgtgtgcagggaggacacatcagcccactaccgctgccaacaccaatgcctaaaacttgtttcatacattggggttttctatatatttcagctgggaaaagctt

SEQ ID NO: 264159 - DNA, 120 bp, Artificial Sequence
  ENSG00000125871_14 (sequence is synthesized)
acatttaaccttttgaaaaaataaatacgtgattagcctcaactaaacattgctgactataaagacagtatattcaccatgtcgctggcaatatgtcattgcgtaacaccaaataacccc

SEQ ID NO: 264160 - DNA, 120 bp, Artificial Sequence
  ENSG00000125871_15 (sequence is synthesized)
ccagaagtagccagaggccagtttgaacatcacaattctaagtgttttagtaactatttctggcgtgagtcaacagatcatgtagatagagtcaattattgtttgtggagtttttcagct

SEQ ID NO: 264161 - DNA, 120 bp, Artificial Sequence
  ENSG00000125871_16 (sequence is synthesized)
ataggggaggggaactattaaaatccatttgtttctattcaataggtaataaaaattagttgtccctgggtttgggaaacttaaatgcccattacagccctggggaagggttttctgtct

SEQ ID NO: 264162 - DNA, 120 bp, Artificial Sequence
  ENSG00000125871_17 (sequence is synthesized)
tatggagtgagtcttagcatttaagttatacagttgctgccttaaaatagtagcctgctacaatgacttctttgggtagccattttcataagaaataaaatacaagatatgagtaatgaa

SEQ ID NO: 264163 - DNA, 120 bp, Artificial Sequence
  ENSG00000125871_18 (sequence is synthesized)
tctgtcttgtcatccagaggcgtcgcccagaccccgggatcggtggaggaagatgctttgctctgtggacccgtgagcaagcataagctgccaaaccaaggttcaatgtggcttaattgt

SEQ ID NO: 264164 - DNA, 120 bp, Artificial Sequence
  ENSG00000125872_0 (sequence is synthesized)
aaagacaacagcgtcttgatgggaaaggaggagcaatgggaaagactggagtatctcagtccctctcagtggatgggggttgtgggagagaggcagctgggagacaggcctccctctgga

SEQ ID NO: 264165 - DNA, 120 bp, Artificial Sequence
  ENSG00000125872_1 (sequence is synthesized)
gttcatagctgagttgctgtccaaatcagtggtccctagaatctataaaacaaagctgagaacttcagaggtgcatccagagaagccacactccaaaaggaccacttccagacgccatgc

SEQ ID NO: 264166 - DNA, 120 bp, Artificial Sequence
  ENSG00000125872_2 (sequence is synthesized)
ggcaaaccctaccgctgctgctgctgacggtgctgcgccccagctgggcagaccctccccaggagaaggtcccgctcttccgggtcactcagcagggcccctgggggagcagtggcagca

SEQ ID NO: 264167 - DNA, 120 bp, Artificial Sequence
  ENSG00000125872_3 (sequence is synthesized)
acgccaccgactcgccctgcgaggggctgcccgccgcggatgcgacggccttgaccctggcgaaccgcaacctggagcgcctgcccggctgcctaccgcgcacactgcgcagcctcgacg

SEQ ID NO: 264168 - DNA, 120 bp, Artificial Sequence
  ENSG00000125872_4 (sequence is synthesized)
ccagccacaacctgctgcgcgccctgagcacttccgagctcggccacctggagcagctgcaggtgctgaccctgcgccacaaccgcatcgccgcgctgcgctggggcccgggtgggccgg

SEQ ID NO: 264169 - DNA, 120 bp, Artificial Sequence
  ENSG00000125872_5 (sequence is synthesized)
cggggctgcacaccctggacctcagctacaaccagctggccgctctgccgccgtgcaccgggcccgcgctgagcagcctccgcgccctggcgctcgccgggaatccgctgcgggcgctgc

SEQ ID NO: 264170 - DNA, 120 bp, Artificial Sequence
  ENSG00000125872_6 (sequence is synthesized)
agccccgggccttcgcctgcttccccgcgctgcagctcctcaacctctcctgcaccgcgctgggtcgcggagcccaggggggcatcgccgaggcggcgttcgctggagaggatggcgcgc

SEQ ID NO: 264171 - DNA, 120 bp, Artificial Sequence
  ENSG00000125872_7 (sequence is synthesized)
ccctggtcacgctcgaagtcctggatctcagcggcacgttccttgaacgggttgagtcagggtggatcagagacctgccgaagctcacatccctctacctgaggaagatgcctcggctga

SEQ ID NO: 264172 - DNA, 120 bp, Artificial Sequence
  ENSG00000125872_8 (sequence is synthesized)
cgaccctggagggggacattttcaagatgacccccaacctgcagcagctggactgtcaggactccccagcacttgcttctgtcgccacacacatctttcaagatactccacatctacagg

SEQ ID NO: 264173 - DNA, 120 bp, Artificial Sequence
  ENSG00000125872_9 (sequence is synthesized)
tccttctgttccagaactgcaacttgagttccttccctccttggaccctggattcctcccaggtcctatcgatcaacctctttggcaaccccctcacttgcagttgtgacttgtcttggc

SEQ ID NO: 264174 - DNA, 120 bp, Artificial Sequence
  ENSG00000125872_10 (sequence is synthesized)
tcctcacggatgcaaagagaactgtcctaagcagggcagcagacactatgtgcgcgccagctgcgggatccagcggccccttctcagcctccctgtcactctcccagctgcccggagtgt

SEQ ID NO: 264175 - DNA, 120 bp, Artificial Sequence
  ENSG00000125872_11 (sequence is synthesized)
gccagtccgaccaaagcaccactctcggggcttcacacccaccttgcttcaaccgctccacctacgcacagggtaccaccgtcgcgcccagcgcagcccccgccacccggcctgcgggag

SEQ ID NO: 264176 - DNA, 120 bp, Artificial Sequence
  ENSG00000125872_12 (sequence is synthesized)
gccgcacagcgatgcacgggaggggactgccccctccacgaccaactctgtagcaggtcacagcaactccagcgttttccccagggctgccagcaccaccaggacccagcaccgaggaga

SEQ ID NO: 264177 - DNA, 120 bp, Artificial Sequence
  ENSG00000125872_13 (sequence is synthesized)
acatgcccccgagcttgtccttgagcctgatatctcagctgcctccaccccactggccagcaagctcctgggccccttccctacctcgtgggaccgcagcataagctcgcctcagcccgg

SEQ ID NO: 264178 - DNA, 120 bp, Artificial Sequence
  ENSG00000125872_14 (sequence is synthesized)
ccagaggacacacgccacaccccaagcccccaacccgagtctttccgagggcgagattccagtcttgctgctggacgactacagtgaggaggaggaagggaggaaggaggaggtgggaac

SEQ ID NO: 264179 - DNA, 120 bp, Artificial Sequence
  ENSG00000125872_15 (sequence is synthesized)
gcctcaccaggacgtcccctgtgattaccatccctgcaagcacctgcagaccccgtgcgcggagctgcagaggcggtggcggtgccggtgccccggcctcagcggggaagacaccatccc

SEQ ID NO: 264180 - DNA, 120 bp, Artificial Sequence
  ENSG00000125872_16 (sequence is synthesized)
agacccgcccaggctgcagggggtgacggagaccacggacacgtcggcgctggtccactggtgtgcccccaactcggtagtgcatgggtaccagatccgctactctgcggagggctgggc

SEQ ID NO: 264181 - DNA, 120 bp, Artificial Sequence
  ENSG00000125872_17 (sequence is synthesized)
ggggaaccagtcggtggtgggggtcatctacgccacggcccggcagcaccctctgtacgggctgtcgccgggcaccacctaccgcgtgtgcgtgctggcggccaacagggcgggcttgag

SEQ ID NO: 264182 - DNA, 120 bp, Artificial Sequence
  ENSG00000125872_18 (sequence is synthesized)
ccagccacggtcttcgggctggaggagcccgtgcgccgccttcaccaccaagcccagcttcgcgctcctgctctctgggctgtgcgccgccagcggcctgttgctcgccagcaccgtggt

SEQ ID NO: 264183 - DNA, 120 bp, Artificial Sequence
  ENSG00000125872_19 (sequence is synthesized)
gctgtccgcatgtctctgcaggcggggccagacgctgggcctgcagcgctgcgacacgcacctggtggcctacaaaaacccggcctttgatgattacccgctggggctccagaccgtcag

SEQ ID NO: 264184 - DNA, 120 bp, Artificial Sequence
  ENSG00000125872_20 (sequence is synthesized)
ttagcccagcttctgggataacgcgtctcatcgaactggatctgagcgcaaaaaggaagacacagacggtcaaaaacgaccccatccgctcctagggtttctaattcccgtgaagccaga

SEQ ID NO: 264185 - DNA, 120 bp, Artificial Sequence
  ENSG00000125872_21 (sequence is synthesized)
atgccttgagcacacatggaacttgccacactgagtgtctgggtccaaggaactgctgccctcccttccttctacttaactctgttcccagaaacctgatggtcaatgccagatcgctcc

SEQ ID NO: 264186 - DNA, 120 bp, Artificial Sequence
  ENSG00000125872_22 (sequence is synthesized)
ccactgccgccaggccttcttgtgtgttgttggttcatttgcggttttcagcagtcagtgcctctctatccagtagaatagtgtatggacgtaggaagggatgaaacagagaagttgcat

SEQ ID NO: 264187 - DNA, 120 bp, Artificial Sequence
  ENSG00000125872_23 (sequence is synthesized)
aacccagcctctttgatcatgttagaaatcacatcctcaggtctttccagcggaagctccttcatggtcaagctctaagacacaacgagctctgttattcaagaaatcaattccagtgga

SEQ ID NO: 264188 - DNA, 80 bp, Artificial Sequence
  ENSG00000125875_0 (sequence is synthesized)
gcgcgccgctggccgacggaggggagcctgccgatgccgagcgggtgctacgtcccgcggtcggagccgcgtcttctccc

SEQ ID NO: 264189 - DNA, 120 bp, Artificial Sequence
  ENSG00000125875_1 (sequence is synthesized)
cccggggcatggccctccggagtgcgcagggcgacggccccacctccggccactgggacggcggcgcggagaaggcagactttaacgccaaaaggaaaaagaaagtggcagagatacacc

SEQ ID NO: 264190 - DNA, 120 bp, Artificial Sequence
  ENSG00000125875_2 (sequence is synthesized)
aggctctgaacagtgatcccactgatgtggctgcccttagacgcatggctatcagtgaaggagggctcctgactgatgagatcagacgaaaagtgtggcccaagctcctcaatgtcaatg

SEQ ID NO: 264191 - DNA, 120 bp, Artificial Sequence
  ENSG00000125875_3 (sequence is synthesized)
ccaatgacccacctcctatatcagggaagaacctacggcagatgagcaaggactaccaacaagtgttgctggacgtccggcggtcattgcggcggttccctcctggcatgccagaggaac

SEQ ID NO: 264192 - DNA, 120 bp, Artificial Sequence
  ENSG00000125875_4 (sequence is synthesized)
agagagaagggctccaggaagaactgattgacatcatcctcctcatcttggagcgcaaccctcagctgcactactaccagggctaccatgacattgtggtcacatttctgctggtggtag

SEQ ID NO: 264193 - DNA, 120 bp, Artificial Sequence
  ENSG00000125875_5 (sequence is synthesized)
gcgagaggctggcaacatccctggtagaaaaattatctacccaccacctcagggattttatggatccaacaatggacaacaccaagcatatattaaactatctgatgcccatcattgacc

SEQ ID NO: 264194 - DNA, 120 bp, Artificial Sequence
  ENSG00000125875_6 (sequence is synthesized)
aggtgaatccagagctccatgacttcatgcagagtgctgaggtagggaccatctttgccctcagctggctcatcacctggtttgggcatgtcctgtctgacttcaggcacgtcgtgcggt

SEQ ID NO: 264195 - DNA, 120 bp, Artificial Sequence
  ENSG00000125875_7 (sequence is synthesized)
tatatgacttcttcctggcctgccacccactgatgccgatttactttgcagccgtgattgtgttgtatcgcgagcaggaagtcctggactgtgactgtgacatggcctcggtccaccacc

SEQ ID NO: 264196 - DNA, 120 bp, Artificial Sequence
  ENSG00000125875_8 (sequence is synthesized)
tgttgtcccagatccctcaggacttgccctatgagacactgatcagcagagcaggagacctttttgttcagtttcccccatccgaacttgctcgggaggccgctgcccaacagcaagctg

SEQ ID NO: 264197 - DNA, 120 bp, Artificial Sequence
  ENSG00000125875_9 (sequence is synthesized)
agaggacggcagcctctactttcaaagactttgagctggcatcagcccagcagaggcctgatatggtgctgcggcagcggtttcggggacttctgcggcctgaagatcgaacaaaagatg

SEQ ID NO: 264198 - DNA, 120 bp, Artificial Sequence
  ENSG00000125875_10 (sequence is synthesized)
tcctgaccaagccaaggaccaaccgctttgtgaaattggcagtgatggggctgacagtggcacttggagcggctgcactggctgtggtgaaaagtgccctggaatgggcccctaagtttc

SEQ ID NO: 264199 - DNA, 120 bp, Artificial Sequence
  ENSG00000125875_11 (sequence is synthesized)
agctgcagctgtttccctgaaagccagagaagaccttcctcttacatcacattaaggtctcacccttccatggaaggattgggaggggtggaatttcctttattaaaagggtttctgtcc

SEQ ID NO: 264200 - DNA, 120 bp, Artificial Sequence
  ENSG00000125875_12 (sequence is synthesized)
agagttttttattcctgccaccctgccctgcccgtttgtgtttgcctttacttcagaggccagtagcagagcctacctgacacagaggggacctgggggcctggcacagaatcttatgcc

SEQ ID NO: 264201 - DNA, 120 bp, Artificial Sequence
  ENSG00000125875_13 (sequence is synthesized)
tctcccagtgggcttttggatgggctctctgccacctccctggtgttggaggaagtgggtttctgaagcttgcagctgcttttgcaacctgctgggcctgggctgccctagttaccggga

SEQ ID NO: 264202 - DNA, 120 bp, Artificial Sequence
  ENSG00000125875_14 (sequence is synthesized)
acctcctagtcaccccatagaaggtgaactggaacatgggatgccctcttactgctcctgcttgcctgcatcagatggacacagaaggagggggctgctgctgaaggagtcaggcttggg

SEQ ID NO: 264203 - DNA, 120 bp, Artificial Sequence
  ENSG00000125875_15 (sequence is synthesized)
atggagagcaagaggccaaaggactcgtctgggagcatgatcggcccctcttactagcagctccatcagctgatcagaaatcagagacagaagggaactaggttactcgttaaatcctac

SEQ ID NO: 264204 - DNA, 120 bp, Artificial Sequence
  ENSG00000125875_16 (sequence is synthesized)
ctattttcagcctagaaatcacatgggcgtttccagtcaagtgggaaggaagctcatttttagggcctagacctagactagttttgcctgcctttttttcctccctgctttcttctacaa

SEQ ID NO: 264205 - DNA, 120 bp, Artificial Sequence
  ENSG00000125875_17 (sequence is synthesized)
gccacacaacattgcttataaaaggtacttttattactatttttagaatatatacaccccatatgtaaattaccctcacttttaaagtaataatagttccttcacggaaaaaaaaatagt

SEQ ID NO: 264206 - DNA, 120 bp, Artificial Sequence
  ENSG00000125875_18 (sequence is synthesized)
cagaaggatgagcttctaagatcctgaattttactttctacttgattaacattttcgctttagccagagttgctatttgcaaacagctttccacttccaaagtgccactttctgaccggt

SEQ ID NO: 264207 - DNA, 120 bp, Artificial Sequence
  ENSG00000125875_19 (sequence is synthesized)
ttttcttcctgttttcctcaaatcatcctactcccaaataggcacccactcactaccttggcgtcgttttttgggtctgacttgactcgtcaactgctggtctctcccacctggttggaa

SEQ ID NO: 264208 - DNA, 120 bp, Artificial Sequence
  ENSG00000125875_20 (sequence is synthesized)
atgtcgttggaaacttgcaaagactctccagaccttagggaacaagaggcatcactcagtccttctgggacagcttccctgtaagcaaagccaggtttgttttagattcactctggcctg

SEQ ID NO: 264209 - DNA, 120 bp, Artificial Sequence
  ENSG00000125875_21 (sequence is synthesized)
aaaaaaaaagtgccttttgctgctttaaagaattggggtatatggtatgaagcagccatgtacttgtattttcctggtctttcctgggcactcttctctcttggcagatgttttcttaaa

SEQ ID NO: 264210 - DNA, 120 bp, Artificial Sequence
  ENSG00000125875_22 (sequence is synthesized)
gtgaacacaccagaagcactctaccccaccatatccagtcctctttgcatgcctgttgtgtgcagggtggagggtgtcccacgtgccagagcagctgggagccctgtccgctgagttaca

SEQ ID NO: 264211 - DNA, 77 bp, Artificial Sequence
  ENSG00000125875_23 (sequence is synthesized)
acgtgccagagcagctgggagccctgtccgctgagttacactaagcactttatttttatttattttattattatttt

SEQ ID NO: 264212 - DNA, 68 bp, Artificial Sequence
  ENSG00000125875_24 (sequence is synthesized)
actacgcactttaaaaccaaaaaaagctcaaagggatggatcattgtccatggctcaggagccccact

SEQ ID NO: 264213 - DNA, 120 bp, Artificial Sequence
  ENSG00000125875_25 (sequence is synthesized)
caaagggatggatcattgtccatggctcaggagccccactgtggggtaagtgtgatgtcgatggattaatttagacagtggtgtattcatcagggcaaaggaaattcttccagaggtgat

SEQ ID NO: 264214 - DNA, 120 bp, Artificial Sequence
  ENSG00000125875_26 (sequence is synthesized)
gatgcggcagatattcccagtgctctcccaaagcaagctggccctcttgtcatcctctcagtgggcggcaccagctgcccctccttccacaagtactcaagcctgtttgtaaatactgaa

SEQ ID NO: 264215 - DNA, 120 bp, Artificial Sequence
  ENSG00000125875_27 (sequence is synthesized)
ggaattgatggggttgaggaaaggaggtgcatgtgaccagggtcccaaggccacagcttttcagatcctaggaagcaagtggcatttgcttgagttgtggcctcggaaggagaatgttta

SEQ ID NO: 264216 - DNA, 120 bp, Artificial Sequence
  ENSG00000125875_28 (sequence is synthesized)
tctgttttctaactttgctgacaccaggattctccctgtcattgagaagaaagcattatctaattaccttcaggtggtttacttattctgtaaagaatatgtgtaaatattttgtacaga

SEQ ID NO: 264217 - DNA, 120 bp, Artificial Sequence
  ENSG00000125875_29 (sequence is synthesized)
gccctgtatcaaataaacagccatatgtggttactaatcacctcttctgtcattccgtccttggccaccgctcagtgggaatggtctctgatctggatgctcccaccttccatgtcaggc

SEQ ID NO: 264218 - DNA, 120 bp, Artificial Sequence
  ENSG00000125875_30 (sequence is synthesized)
ccagaactgtgccatggtctgtggactcctggtcagccttgactggctaggagaccttgggcagtacctacagtcttgctgtttctgtttcatctgcaagaattatgacccacacactcc

SEQ ID NO: 264219 - DNA, 120 bp, Artificial Sequence
  ENSG00000125875_31 (sequence is synthesized)
agctgcagcccagggcactgtgatattttatacgtgtgtagatgtttttgtccacagttcctggttcatcactcccataaccctttgttataatgttgggacactgcaggcctcagaaaa

SEQ ID NO: 264220 - DNA, 120 bp, Artificial Sequence
  ENSG00000125875_32 (sequence is synthesized)
cggaatctctgtctgtgaccttctcctgccccatttcacttgctcaacaccagactttaatctgactgtagctcataagaccctcattccagagagggtgctgccccatacccggaagga

SEQ ID NO: 264221 - DNA, 120 bp, Artificial Sequence
  ENSG00000125875_33 (sequence is synthesized)
ggaacgctgcacagagaggccaagaagcatctggacagacaggccttgctgggtttagaccttatgctttttgtccagtttcatctcaacacagctgccatgcttcagccatgcctatcc

SEQ ID NO: 264222 - DNA, 120 bp, Artificial Sequence
  ENSG00000125875_34 (sequence is synthesized)
aatgacgtctccataaaaggcccaggaacacgggagcttctgaagagctgaacatgtggagggaggggaacgagaacttgtccatgtgccaagagggtggcgcacccccactccatgggg

SEQ ID NO: 264223 - DNA, 120 bp, Artificial Sequence
  ENSG00000125875_35 (sequence is synthesized)
acagaagctccagcatttgcccaggacccgtccagacctcaccctgtgtgtatcttcatctggctgtttacttatttgtatccttttctaataatgtttgtaataaactggtaaacataa

SEQ ID NO: 264224 - DNA, 120 bp, Artificial Sequence
  ENSG00000125875_36 (sequence is synthesized)
actcactggcctgttttctggtcagcttttttaggagtttgagccctcgccaccctgagccctgatctaagtgtttggtaaccaggcttattgaattgtctccctccagggattttatgg

SEQ ID NO: 264225 - DNA, 120 bp, Artificial Sequence
  ENSG00000125875_37 (sequence is synthesized)
cacctgaaacactcctcacaagccgagcgcagtttcctcattgtcttgggtggatttgttaagttctccccagttgttccagtcaccagcaatctgggtaattcagttcttggagcattt

SEQ ID NO: 264226 - DNA, 120 bp, Artificial Sequence
  ENSG00000125875_38 (sequence is synthesized)
ttggggactgtgctctttgggggacatagcccatcccttgagtttacatctagtggggagaggtggataaggtatgtatgccaaggtaagatgttgaggttattgccacaagagaaacac

SEQ ID NO: 264227 - DNA, 120 bp, Artificial Sequence
  ENSG00000125875_39 (sequence is synthesized)
aaagtcctgtgggatccagtggcgagaaggggaaggccaacaatgggttgttttatttcccaagtaccaaagagaagaaatatttttttgcaaatcccatgtgatgttttgtttcttctc

SEQ ID NO: 264228 - DNA, 120 bp, Artificial Sequence
  ENSG00000125875_40 (sequence is synthesized)
tgtttagttggaaatgtgttcttggccaatgcctctttttttaaaattttttaaaaggtaatggctatgccttctttttttttgagatggagtattttctcttgttgcccaggctggagt

SEQ ID NO: 264229 - DNA, 68 bp, Artificial Sequence
  ENSG00000125875_41 (sequence is synthesized)
tctcgagctcccgatgctcaccgtgtctggcagctacatcttaagatatttcagttgtctcatgttaa

SEQ ID NO: 264230 - DNA, 120 bp, Artificial Sequence
  ENSG00000125875_42 (sequence is synthesized)
ggcagctacatcttaagatatttcagttgtctcatgttaacagaaaaattaatgcagtcatgttttcaggcttgggaatatgtacctgtgccccccagaagggtaagacttagtcagaag

SEQ ID NO: 264231 - DNA, 120 bp, Artificial Sequence
  ENSG00000125875_43 (sequence is synthesized)
gagaatcatggcgtagttctctgaaaacaactgcttctcgttcctgtagttgacatttgttggccagtaggcgagcacccagtgagataaagcagccaggaccctgttgtggtgttagtg

SEQ ID NO: 264232 - DNA, 120 bp, Artificial Sequence
  ENSG00000125875_44 (sequence is synthesized)
ttgtggtacaccttaaagactttgtattaaatattttgtaaggagaagatgctgaattcctaggtaactgaattttccagaaatcttattcctaaatgcttccttctcaccagcgctata

SEQ ID NO: 264233 - DNA, 120 bp, Artificial Sequence
  ENSG00000125877_0 (sequence is synthesized)
gtcactggacgccaaggagttttcggtggctcagctgggtaaccggggatcaccatggcggcctcattggtggggaagaagatcgtgtttgtaacggggaacgccaagaagctggaggag

SEQ ID NO: 264234 - DNA, 120 bp, Artificial Sequence
  ENSG00000125877_1 (sequence is synthesized)
gtcgttcagattctaggagataagtttccatgcactttggtggcacagaaaattgacctgccggagtaccagggggagccggatgagatttccatacagaaatgtcaggaggcagttcgc

SEQ ID NO: 264235 - DNA, 120 bp, Artificial Sequence
  ENSG00000125877_2 (sequence is synthesized)
caggtacaggggcccgtgctggttgaggacacttgtctgtgcttcaatgcccttggagggctccccggcccctacataaagtggtttctggagaagttaaagcctgaaggtctccaccag

SEQ ID NO: 264236 - DNA, 120 bp, Artificial Sequence
  ENSG00000125877_3 (sequence is synthesized)
ctcctggccgggttcgaggacaagtcagcctatgcgctctgcacgtttgcactcagcaccggggacccaagccagcccgtgcgcctgttcaggggccggacctcgggccggatcgtggca

SEQ ID NO: 264237 - DNA, 120 bp, Artificial Sequence
  ENSG00000125877_4 (sequence is synthesized)
taaggcggagaagaacgctgtctcccatcgcttccgggccctgctggagctgcaggagtactttggcagtttggcagcttgacttctgcagctggaggaggcccctcaggccggggatct

SEQ ID NO: 264238 - DNA, 120 bp, Artificial Sequence
  ENSG00000125877_5 (sequence is synthesized)
ggggagggctagcccaaaacctcccgcatcgggcaggcaccccctgaagtacttccttcagggtttcccctttgtgagggtgtcgagtagcctcaccggcctgtctggaggagcagctgg

SEQ ID NO: 264239 - DNA, 120 bp, Artificial Sequence
  ENSG00000125877_6 (sequence is synthesized)
ctctgctctgagaaactctggcaagtggacgccattctcttgcccttaggattcactgctctctcctacagccgccaggcctggggtcctgaaaggaccttgggtggtaaagctgtactt

SEQ ID NO: 264240 - DNA, 120 bp, Artificial Sequence
  ENSG00000125877_7 (sequence is synthesized)
ggtgggagtgagggcgtggggaggaaccatgcaaatcgccttccatggtttttaaatgcagtaaataacatttctggatgagacttgtttccaaaataaaccagctatatctgttttgaa

SEQ ID NO: 264241 - DNA, 120 bp, Artificial Sequence
  ENSG00000125877_8 (sequence is synthesized)
aagttttctgtcactggacgccaaggagttttcggtggctcagctggatggttggatttctctgtcttcctgtgacctgactttctgtgtgtctgtttccctgataagtgccggagtacc

SEQ ID NO: 264242 - DNA, 120 bp, Artificial Sequence
  ENSG00000125877_9 (sequence is synthesized)
cagacccacctttgagagggcacttcctactttctgttgtgtttggaatgcaaagatctggctgaaacggtggccacggagaaggggtgatagatttgagaggctggagggatgaggaag

SEQ ID NO: 264243 - DNA, 120 bp, Artificial Sequence
  ENSG00000125877_10 (sequence is synthesized)
actggacgccaaggagttttcggtggctcagctgggtaaccggggatcaccatggcggcctcattggtggggaagaagatcgtgtttgtaacggggaacgccaagaagctggaggagatg

SEQ ID NO: 264244 - DNA, 120 bp, Artificial Sequence
  ENSG00000125877_11 (sequence is synthesized)
gccttggggccagagatatctgtgccttgctgagaggctcccctgcgcagcataggtagaagtgctgtggatcctaggagggtggtggaaagggttccctggggccagagtagttgccta

SEQ ID NO: 264245 - DNA, 120 bp, Artificial Sequence
  ENSG00000125877_12 (sequence is synthesized)
cgccttgctgaggggtgcccctgggcaggacaatggaagtgttgtcaattctgaaacctgtttgacccctgaggctgttgtttcagggaaacagttggctaacagctcctgaggcctgat

SEQ ID NO: 264246 - DNA, 120 bp, Artificial Sequence
  ENSG00000125877_13 (sequence is synthesized)
agacccagaagtgcaaactgaaggtgacaattcccaaagctatttttttctgtttattttatttatttatttattttttgttagtgagaaaccacacttggatcaaagctacatctatag

SEQ ID NO: 264247 - DNA, 120 bp, Artificial Sequence
  ENSG00000125877_14 (sequence is synthesized)
agactcaccaaactcatactggccactgccctcctcgtgcttgtcctctggacccagttacacacctgtcccccctttcctgtggcagggccggatcgtggcacccagaggctgccagga

SEQ ID NO: 264248 - DNA, 80 bp, Artificial Sequence
  ENSG00000125878_0 (sequence is synthesized)
ggggcggccttgccattggcccctccctcgcctataaggcgggggccggcggggccgtgggagcgcgcgggagcgcacgg

SEQ ID NO: 264249 - DNA, 120 bp, Artificial Sequence
  ENSG00000125878_1 (sequence is synthesized)
gacgctgggacgcggcgcacggagggacgcggccggcgcccatggcgttcgcgctgctgcggcccgtcggcgcgcacgtgctgtacccggacgtgcggctgctgagcgaggacgaggaga

SEQ ID NO: 264250 - DNA, 120 bp, Artificial Sequence
  ENSG00000125878_2 (sequence is synthesized)
ggacgtgcggctgctgagcgaggacgaggagaaccgcagcgagagcgacgcgtcggaccagtcgttcggctgctgcgagggcccggaggcggcgcggcgcggcccgggccccgggggcgg

SEQ ID NO: 264251 - DNA, 120 bp, Artificial Sequence
  ENSG00000125878_3 (sequence is synthesized)
ccgtggtggtggtgcgacagcggcaggcggccaacgcgcgggagcgggaccgcactcagagcgtgaacacggccttcacggcgctgcgcacgctcatccccaccgagccggtggaccgca

SEQ ID NO: 264252 - DNA, 120 bp, Artificial Sequence
  ENSG00000125878_4 (sequence is synthesized)
agctgtccaagatcgagaccgtgcgcctggcgtccagctacatcgcgcacctggccaacgtgctgctgctgggcgactcggccgacgacgggcagccgtgcttccgtgccgcgggcagtg

SEQ ID NO: 264253 - DNA, 120 bp, Artificial Sequence
  ENSG00000125878_5 (sequence is synthesized)
ccaagggcgccgtccccgccgccgccgacggcggccgccagccgcgctccatctgcaccttctgcctcagcaaccagcgcaaggggggtggccgtcgtgacctggggggcagctgcttga

SEQ ID NO: 264254 - DNA, 120 bp, Artificial Sequence
  ENSG00000125878_6 (sequence is synthesized)
accccttctttgtgtagggaccgggggaccatggcctgttccgggacactctgggcagggccctcgggacatctccacccgatcctggagagctgtgaggatccattcagcctgcccagc

SEQ ID NO: 264255 - DNA, 120 bp, Artificial Sequence
  ENSG00000125878_7 (sequence is synthesized)
tctggctggtcagagacaaggcagaacttttggaaaaacaaagactgttggtgacagggtgtgtgtgtatctgtgcgtgagtgtgagtgtgtgtgagagagaattggtgagtttaaaata

SEQ ID NO: 264256 - DNA, 120 bp, Artificial Sequence
  ENSG00000125878_8 (sequence is synthesized)
aaagctatttttaaataaaagacgtcgttctgagctgaggagagtcccgtggacatcggaggtcagaggtgggccctcccctggacctagagagaggcacagatgttctgggggctgccc

SEQ ID NO: 264257 - DNA, 120 bp, Artificial Sequence
  ENSG00000125878_9 (sequence is synthesized)
tgagccctggaagggtgggggtggggcgggggaaggcaggcagagccccctctccgggcgccataaccaaactttcctcagtctgctgtttatcagatgttcttaacaactgttaggtgt

SEQ ID NO: 264258 - DNA, 120 bp, Artificial Sequence
  ENSG00000125878_10 (sequence is synthesized)
ctgatatggttggtaaagaaatcttaattttacttatttttgaataaggcctgtgttcatttcattcacatggttcaaaactcagaaggtaccagagggtatgtgttgaaaagtctccgt

SEQ ID NO: 264259 - DNA, 120 bp, Artificial Sequence
  ENSG00000125878_11 (sequence is synthesized)
gcccctgtcctccagccaccagctctcctctctgcaagcagcctagggcaccagtttcctgtgatgtcccattcactatgaatgatcaggcaaatacacaaatgacagcacatcgtacac

SEQ ID NO: 264260 - DNA, 120 bp, Artificial Sequence
  ENSG00000125879_0 (sequence is synthesized)
ccccgcttccagtcagagttcaagttaaaacagaaaaaaggaagatggcaagaatattgttacttttcctcccgggtcttgtggctgtatgtgctgtgcatggaatatttatggaccgtc

SEQ ID NO: 264261 - DNA, 120 bp, Artificial Sequence
  ENSG00000125879_1 (sequence is synthesized)
tagcttccaagaagctctgtgcagatgatgagtgtgtctatactatttctctggctagtgctcaagaagattataatgccccggactgtagattcattaacgttaaaaaagggcagcaga

SEQ ID NO: 264262 - DNA, 120 bp, Artificial Sequence
  ENSG00000125879_2 (sequence is synthesized)
tctatgtgtactcaaagctggtaaaagaaaatggagctggagaattttgggctggcagtgtttatggtgatggccaggacgagatgggagtcgtgggttatttccccaggaacttggtca

SEQ ID NO: 264263 - DNA, 120 bp, Artificial Sequence
  ENSG00000125879_3 (sequence is synthesized)
aggaacagcgtgtgtaccaggaagctaccaaggaagttcccaccacggatattgacttcttctgcgagtaataaattagttaaaactgcaaatagaaagaaaacaccaaaaataaagaaa

SEQ ID NO: 264264 - DNA, 120 bp, Artificial Sequence
  ENSG00000125879_4 (sequence is synthesized)
agagcaaaagtggccaaaaaatgcatgtctgtaattttggactgacgttttaagaatttgttaccttacagaagagcaagggcttaggggttggaggtggcagataaaagaggattttca

SEQ ID NO: 264265 - DNA, 120 bp, Artificial Sequence
  ENSG00000125879_5 (sequence is synthesized)
actcaaatcttgtttcctgctggcctggtctgcccacgagctagagcggggaaatgttgagctcaaatgggtaaattgagaccagaaaattattttttcaacctagagaatctcctctta

SEQ ID NO: 264266 - DNA, 120 bp, Artificial Sequence
  ENSG00000125879_6 (sequence is synthesized)
atttctaagtagtaattcttcccagctctttgatttgccatatataaaataggtgggtcgtatgtcttccctttagacatgatgttttctactcatttgtctctctggccaattgaatta

SEQ ID NO: 264267 - DNA, 120 bp, Artificial Sequence
  ENSG00000125879_7 (sequence is synthesized)
ttaataaaaggtctgtattatcaaagagtattctagtatttttgttacttttaatatttgatgccttttggaggtaaagctgttgggggaagaagagtttttggacccatagatgtttgg

SEQ ID NO: 264268 - DNA, 120 bp, Artificial Sequence
  ENSG00000125879_8 (sequence is synthesized)
atgatgtctctaatttgtcatttagaaaaatctcaaaaatgatttcagttgaataacttgccttctaaatgatcaatttacttctcccccaattttaaagaagtatgtgtatatttaata

SEQ ID NO: 264269 - DNA, 120 bp, Artificial Sequence
  ENSG00000125879_9 (sequence is synthesized)
ggggaaggtagtttatggaaatatttttaatggaatagttttcccttaatatgtatccttgctggatattattcaagctgcaagtcatcaaaagacccagaaaaaaaaaagtctgtaggt

SEQ ID NO: 264270 - DNA, 120 bp, Artificial Sequence
  ENSG00000125879_10 (sequence is synthesized)
tattttctctacttctatttcaactttgaatttcctcttcctgtgcaaattcctctagtcaagtgtgatatatcaagaaatctgaggaggatgcaggttttgtggtcctgatgggcccac

SEQ ID NO: 264271 - DNA, 120 bp, Artificial Sequence
  ENSG00000125879_11 (sequence is synthesized)
aagtttttctatatttaactggaaatatgctttgattttgtgttattaatataattcttttgatgtagtcatgagtttttctttgtttgcatataattaaaatgcctctacttaatgtca

SEQ ID NO: 264272 - DNA, 120 bp, Artificial Sequence
  ENSG00000125879_12 (sequence is synthesized)
aattcgaaagaatcagcgttcttcagttaaaatatacaggggcggtccctggggagggatgaagcagggatgattttctgtcctcatctgcaaccctaaaggcagatcctgtccgaagct

SEQ ID NO: 264273 - DNA, 120 bp, Artificial Sequence
  ENSG00000125879_13 (sequence is synthesized)
gctgaaagcatggagcatgggaagcacctgggaagaacacctggcactcaaaagcacaggaggtcaccaaagtgtgaatgatttggagaccaaggcaagaactctggctctggaatcaaa

SEQ ID NO: 264274 - DNA, 120 bp, Artificial Sequence
  ENSG00000125879_14 (sequence is synthesized)
aacctcatgcatttcctccagaaacagacacaagtggaggacccaaggttagggatgaggagcacatgatgatagggccatgtggcacctcagggacttgttaatcggtcatgtaattag

SEQ ID NO: 264275 - DNA, 120 bp, Artificial Sequence
  ENSG00000125879_15 (sequence is synthesized)
gagcctcttgcttggctctgcttgcattaatgtttgtgtggtttgtaatgtctgtgtaatgtgagaagagacaagccaaatagaaaataaagatggtttcttgcttctcatgagatgctt

SEQ ID NO: 264276 - DNA, 120 bp, Artificial Sequence
  ENSG00000125879_16 (sequence is synthesized)
tttgcaccctaattaattcgaaagaatcagcgttcttcagttaaaatatacaggggcggtccctggggagggatgaagcagggatgattttctgtcctcatctgcaaccctaaagcgccc

SEQ ID NO: 264277 - DNA, 120 bp, Artificial Sequence
  ENSG00000125879_17 (sequence is synthesized)
cctggaccccggagtgaaagggaggtattggcagctatgattctcactatcagcaaagaggacgcctgcgagtttctcagaagacactcagcatcagctttttcctgattgctattcttc

SEQ ID NO: 264278 - DNA, 120 bp, Artificial Sequence
  ENSG00000125885_0 (sequence is synthesized)
ctttgagcggaagttggatcactgaagcgccaaaaaagaatttaggggaagacctgattttcgcttgaggcatttttgcggcgctgtgcgctacagacaccttctggaagctgcggtggg

SEQ ID NO: 264279 - DNA, 120 bp, Artificial Sequence
  ENSG00000125885_1 (sequence is synthesized)
gaaactgagtttcccgagccgttgagacagatggggttcagcaccgcgcggggacgacaggaaagctgcggctgaagagaactgcggacttggcaggagtcgcctgaggagctaagatcc

SEQ ID NO: 264280 - DNA, 120 bp, Artificial Sequence
  ENSG00000125885_2 (sequence is synthesized)
cggagactcttagccccgtggtgcttctctacgggagggagggagggagaatccggccggacagatctgcgcgtatcctggagccggcccagttgtgaactaggagagctttgggacctc

SEQ ID NO: 264281 - DNA, 120 bp, Artificial Sequence
  ENSG00000125885_3 (sequence is synthesized)
tgtcccaagcaagtaagaactttagccttaggagatgtaaataaagtagtatttgaagaagcacaggagagatgaatggagagtatagaggcagaggatttggacgaggaagatttcaaa

SEQ ID NO: 264282 - DNA, 120 bp, Artificial Sequence
  ENSG00000125885_4 (sequence is synthesized)
gctggaaaaggggaagaggtggtgggaacttctcaggaaaatggagagaaagagaacacagacctgatctgagtaaaaccacaggaaaacgtacttctgaacaaaccccacagtttttgc

SEQ ID NO: 264283 - DNA, 120 bp, Artificial Sequence
  ENSG00000125885_5 (sequence is synthesized)
tttcaacaaagaccccacagtcaatgcagtcaacattggatcgattcataccatataaaggctggaagctttatttctctgaagtttacagcgatagctctcctttgattgagaagattc

SEQ ID NO: 264284 - DNA, 120 bp, Artificial Sequence
  ENSG00000125885_6 (sequence is synthesized)
aagcatttgaaaaatttttcacaaggcatattgatttgtatgacaaggatgaaatagaaagaaagggaagtattttggtagattttaaagaactgacagaaggtggtgaagtaactaact

SEQ ID NO: 264285 - DNA, 120 bp, Artificial Sequence
  ENSG00000125885_7 (sequence is synthesized)
tgataccagatatagcaactgaactaagagatgcacctgagaaaaccttggcttgcatgggtttggcaatacatcaggtgttaactaaggaccttgaaaggcatgcagctgagttacaag

SEQ ID NO: 264286 - DNA, 120 bp, Artificial Sequence
  ENSG00000125885_8 (sequence is synthesized)
cccaggaaggattgtctaatgatggagaaacaatggtaaatgtgccacatattcatgcaagggtgtacaactatgagcctttgacacagctcaagaatgtcagagcaaattactatggaa

SEQ ID NO: 264287 - DNA, 120 bp, Artificial Sequence
  ENSG00000125885_9 (sequence is synthesized)
aatacattgctctaagagggacagtggttcgtgtcagtaatataaagcctctttgcaccaagatggcttttctttgtgctgcatgtggagaaattcagagctttcctcttccagatggaa

SEQ ID NO: 264288 - DNA, 120 bp, Artificial Sequence
  ENSG00000125885_10 (sequence is synthesized)
aatacagtcttcccacaaagtgtcctgtgcctgtgtgtcgaggcaggtcatttactgctctccgcagctctcctctcacagttacgatggactggcagtcaatcaaaatccaggaattga

SEQ ID NO: 264289 - DNA, 120 bp, Artificial Sequence
  ENSG00000125885_11 (sequence is synthesized)
tgtctgatgatcagagagaagcaggtcggattccacgaacaatagaatgtgagcttgttcatgatcttgtggatagctgtgtcccgggagacacagtgactattactggaattgtcaaag

SEQ ID NO: 264290 - DNA, 120 bp, Artificial Sequence
  ENSG00000125885_12 (sequence is synthesized)
tctcaaatgcggaagaaggttctcgaaataagaatgacaagtgtatgttccttttgtatattgaagcaaattctattagtaatagcaaaggacagaaaacaaagagttctgaggatgggt

SEQ ID NO: 264291 - DNA, 120 bp, Artificial Sequence
  ENSG00000125885_13 (sequence is synthesized)
gtaagcatggaatgttgatggagttctcacttaaagacctttatgccatccaagagattcaagctgaagaaaacctgtttaaactcattgtcaactcgctttgccctgtcatttttggtc

SEQ ID NO: 264292 - DNA, 120 bp, Artificial Sequence
  ENSG00000125885_14 (sequence is synthesized)
atgaacttgttaaagcaggtttggcattagcactctttggaggaagccagaaatacgcagatgacaaaaacagaattccaattcggggagacccccacatccttgttgttggagatccag

SEQ ID NO: 264293 - DNA, 120 bp, Artificial Sequence
  ENSG00000125885_15 (sequence is synthesized)
tggcgtgtatgtttgtggtaacaccacgaccacctctggtctgacggtaactctttcaaaagatagttcctctggagattttgctttggaagctggtgccctggtacttggtgatcaagg

SEQ ID NO: 264294 - DNA, 120 bp, Artificial Sequence
  ENSG00000125885_16 (sequence is synthesized)
tatttgtggaatcgatgaatttgataagatggggaatcaacatcaagccttgttggaagccatggagcagcaaagtattagtcttgctaaggctggtgtggtttgtagccttcctgcaag

SEQ ID NO: 264295 - DNA, 120 bp, Artificial Sequence
  ENSG00000125885_17 (sequence is synthesized)
aacttccattattgctgctgcaaatccagttggaggacattacaataaagccaaaacagtttctgagaatttaaaaatggggagtgcactactatccagatttgatttggtctttatcct

SEQ ID NO: 264296 - DNA, 120 bp, Artificial Sequence
  ENSG00000125885_18 (sequence is synthesized)
gttagatactccaaatgagcatcatgatcacttactctctgaacatgtgattgcaataagagctggaaagcagagaaccattagcagtgccacagtagctcgtatgaatagtcaagattc

SEQ ID NO: 264297 - DNA, 120 bp, Artificial Sequence
  ENSG00000125885_19 (sequence is synthesized)
aaatacttccgtacttgaagtagtttctgagaagccattatcagaaagactaaaggtggttcctggagaaacaatagatcccattccccaccagctattgagaaagtacattggctatgc

SEQ ID NO: 264298 - DNA, 120 bp, Artificial Sequence
  ENSG00000125885_20 (sequence is synthesized)
tcggcagtatgtgtacccaaggctatccacagaagctgctcgagttcttcaagatttttaccttgagctccggaaacagagccagaggttaaatagctcaccaatcactaccaggcagct

SEQ ID NO: 264299 - DNA, 120 bp, Artificial Sequence
  ENSG00000125885_21 (sequence is synthesized)
ggaatctttgattcgtctgacagaggcacgagcaaggttggaattgagagaggaagcaaccaaagaagacgctgaggatatagtggaaattatgaaatatagcatgctaggaacttactc

SEQ ID NO: 264300 - DNA, 120 bp, Artificial Sequence
  ENSG00000125885_22 (sequence is synthesized)
tgatgaatttgggaacctagattttgagcgatcccagcatggttctggaatgagcaacaggtcaacagcgaaaagatttatttctgctctcaacaacgttgctgaaagaacttataataa

SEQ ID NO: 264301 - DNA, 120 bp, Artificial Sequence
  ENSG00000125885_23 (sequence is synthesized)
tatatttcaatttcatcaacttcggcagattgccaaagaactaaacattcaggttgctgattttgaaaattttattggatcactaaatgaccagggttacctcttgaaaaaaggcccaaa

SEQ ID NO: 264302 - DNA, 120 bp, Artificial Sequence
  ENSG00000125885_24 (sequence is synthesized)
agtttaccagcttcaaactatgtaaaaggacttcaccaagttagggcctcctgggtttattgcagattaaagccatctcagtgaagatatgcgtgcacgcacagacagacagacacacac

SEQ ID NO: 264303 - DNA, 120 bp, Artificial Sequence
  ENSG00000125885_25 (sequence is synthesized)
acacacacacacacacacacagtcaaatactgttctctgaaaaatgatgtcccaaaagtattataataggaaaaaagcattaaatataataaactaatttaagaagtgataaagtctcca

SEQ ID NO: 264304 - DNA, 120 bp, Artificial Sequence
  ENSG00000125885_26 (sequence is synthesized)
agtgataaagtctccagatgcagtagctcacactgtaatcacagtgactcaggaggctgaggtgagaggattccttgaggccagggttcgagaccaaccttgggcaacatagcaagaccc

SEQ ID NO: 264305 - DNA, 120 bp, Artificial Sequence
  ENSG00000125885_27 (sequence is synthesized)
catttcttaaaaaaaaaaaaaaaaaatttaaacttagctgggtatggtggcacatgcctatagtctcagctacttgtgaggctgaggcaggaggattctttgagcccaggagtttgaggt

SEQ ID NO: 264306 - DNA, 120 bp, Artificial Sequence
  ENSG00000125885_28 (sequence is synthesized)
tacagtgagccacaatcacaccaatcactgcactccagcctgggcaataaagtaactcttgactcaaaaaaataaaaaaaattgtagtggtagccatgtgttaattgttaaataaattct

SEQ ID NO: 264307 - DNA, 120 bp, Artificial Sequence
  ENSG00000125885_29 (sequence is synthesized)
ccaaagggctaaaagtaaattacttataaattttttatagttgtatttttgacctgccttttatatgtatgaatatttcatagttttgcatatcagatgtaggcatacagacaaatacat

SEQ ID NO: 264308 - DNA, 120 bp, Artificial Sequence
  ENSG00000125885_30 (sequence is synthesized)
aaaccaatgaatatattacatattctgtgttccaataaaactttatttatggacactaaaatttgaatttcataaaattttcccatgtcaagaatacaaaatacttgagttttgttttta

SEQ ID NO: 264309 - DNA, 120 bp, Artificial Sequence
  ENSG00000125885_31 (sequence is synthesized)
gcttgaaacaatagaaacagactgattaagcaggagaagttttttgaaagaattttgtttggctcacggaattattagaaggcaggtgaaccaggagggtaagcttccagcagcaatttg

SEQ ID NO: 264310 - DNA, 120 bp, Artificial Sequence
  ENSG00000125885_32 (sequence is synthesized)
taaaaccatgccttagaattggactaaggaagaagctgctgacactccactgccacacagggcactggaagaaagtgctgctgcctccctgccccacctttgccacttctgcagcaggaa

SEQ ID NO: 264311 - DNA, 120 bp, Artificial Sequence
  ENSG00000125885_33 (sequence is synthesized)
taggtagaagaatgcccccacccgcaccggaacagcaacaaaaggattctgcatgagatgcctccctaaattgctgaattcaaaaaagaagttgcatacaaagacatctgattgaaaaag

SEQ ID NO: 264312 - DNA, 120 bp, Artificial Sequence
  ENSG00000125885_34 (sequence is synthesized)
ggtatgttatatgcccctttcataggctgctagggagttttcctggttctactttcaggtggtgggatcaataagaccagaatttctcatatgttgtgagaggattcaaatgttacaggg

SEQ ID NO: 264313 - DNA, 120 bp, Artificial Sequence
  ENSG00000125885_35 (sequence is synthesized)
ttgccagccaaactatcaatcatgtataaatccaacaaacactttgtaacatacaagaactcaggaaatgtgaaccattgttggagaatctactaaaatacggcttcccgcaaacgaaga

SEQ ID NO: 264314 - DNA, 120 bp, Artificial Sequence
  ENSG00000125885_36 (sequence is synthesized)
tgaatggaaaatgtaaataaaaagaactggcagtgtatatcagatgtttaactataggaccagaactaagatgtggagactattgccatagaccacaatgtaaatttttaagtgaggaag

SEQ ID NO: 264315 - DNA, 120 bp, Artificial Sequence
  ENSG00000125885_37 (sequence is synthesized)
gaaaaatcaggaatcaaaaggggccaggtgcagtggctcacatctataatcccagagctttgggagttcgaggcaggaggatcacttgaagccagttttgagaccagcctatgcaacaca

SEQ ID NO: 264316 - DNA, 120 bp, Artificial Sequence
  ENSG00000125885_38 (sequence is synthesized)
ttgagaccctatctctacaaaaaatagattagctgggcacggtggtgcatgcctattgtcctacctactgtggaggctgaagtaggaaatcacttgagcccgagagtttgaggttacagt

SEQ ID NO: 264317 - DNA, 120 bp, Artificial Sequence
  ENSG00000125885_39 (sequence is synthesized)
cactccagcctgggcaagagagcaagaccttgtctcttaaagaaaaaaaaaaaaaatggagaaagtagatagtagtataaatatagtgaagtctttaaaagctaggagttaaaagatatt

SEQ ID NO: 264318 - DNA, 88 bp, Artificial Sequence
  ENSG00000125885_40 (sequence is synthesized)
gaaagtagatagtagtataaatatagtgaagtctttaaaagctaggagttaaaagatatttaaagcaaataactcactaaggaggctg

SEQ ID NO: 264319 - DNA, 120 bp, Artificial Sequence
  ENSG00000125885_41 (sequence is synthesized)
tgggcaacagagtgagactctttctccaaactaaataagagatatttaaagctgaaaaaaaatctattaatagaatttaaaacatttcacaaaagtcaacacataaataatatcaaccaa

SEQ ID NO: 264320 - DNA, 120 bp, Artificial Sequence
  ENSG00000125885_42 (sequence is synthesized)
acaaaagtcaacacataaataatatcaaccaaaataaagtggtagacagaagagaaaatatactaatttattgttcaaagaggaaaataagtctcaaaggttaaggctattatataaatt

SEQ ID NO: 264321 - DNA, 120 bp, Artificial Sequence
  ENSG00000125885_43 (sequence is synthesized)
tatttttaaaaagacataaacctacattttcagaagaagaagttccatgtttccttagattatgtatttagcatccattaatcacagggccaaactaacaacaaaagttgtttagctttc

SEQ ID NO: 264322 - DNA, 120 bp, Artificial Sequence
  ENSG00000125885_44 (sequence is synthesized)
ccttacaatccagcttttatgggtgtgcaaacatcacattacagtccctccaaccacaaaccccaacatatagtatttcacttcctgcccaatagtgggtgtccccacacctttcaacca

SEQ ID NO: 264323 - DNA, 120 bp, Artificial Sequence
  ENSG00000125885_45 (sequence is synthesized)
ctgtagcaacaaagctctggcctaggcttttcacttgcttctttactgcctgactgactttggtgtttcctcatgtggcctggtgtggcatggcacgccctcttgggagatgaaagtaat

SEQ ID NO: 264324 - DNA, 120 bp, Artificial Sequence
  ENSG00000125885_46 (sequence is synthesized)
cttccataggcaattgtttctgtgtcaccattgctgattaaaacaaatcctaagtacaaatgtcagaacagaaacatgcaaagcaagaaaacattacatcatgaaagtttcttttttttt

SEQ ID NO: 264325 - DNA, 61 bp, Artificial Sequence
  ENSG00000125885_47 (sequence is synthesized)
ttttaactcccgaactcaggtgattgcctgcctcggtctcccaaaaagtgccgggattaca

SEQ ID NO: 264326 - DNA, 120 bp, Artificial Sequence
  ENSG00000125885_48 (sequence is synthesized)
gattgcctgcctcggtctcccaaaaagtgccgggattacaggcgtgagccattgtgcccagccaaaagtttctttttcaagagatggtggtcttgccatgttgtccagtatggacttgaa

SEQ ID NO: 264327 - DNA, 86 bp, Artificial Sequence
  ENSG00000125885_49 (sequence is synthesized)
agactacaggcatgcaccactacacctggctgcgagatgaaattttaagagatgggggtcttgttctgtcgcccaggctggagtgc

SEQ ID NO: 264328 - DNA, 70 bp, Artificial Sequence
  ENSG00000125885_50 (sequence is synthesized)
aatgcaacaccatgcccagctaattttgatttttagtagagatgaggtcttcctttgttgcccaagctgg

SEQ ID NO: 264329 - DNA, 120 bp, Artificial Sequence
  ENSG00000125885_51 (sequence is synthesized)
catgcccagctaattttgatttttagtagagatgaggtcttcctttgttgcccaagctggtctcaaactccagggcttcctgagtagctgagactacaggtgtgagccaccatgcccagc

SEQ ID NO: 264330 - DNA, 120 bp, Artificial Sequence
  ENSG00000125885_52 (sequence is synthesized)
gtgttaagtaaattgtattggtggtaatcaacttgatcatttcatttttaggatagagatatcaaggtgagggtataactgaacgagaagaggaataaacaccaccctgtgattgatgga

SEQ ID NO: 264331 - DNA, 120 bp, Artificial Sequence
  ENSG00000125885_53 (sequence is synthesized)
tctttatagctctcctttgataaagaagggaaatatcgtacttacattagcatgttatagttgctgttgttatacagaagaatattaaacaatattcatatattgtttatgaatgcattg

SEQ ID NO: 264332 - DNA, 120 bp, Artificial Sequence
  ENSG00000125885_54 (sequence is synthesized)
aattcataaacaatggtatggatattgactagccaaagaggtggataaatgtagatacaatgatacggtgatttggtattcagtgtccattctgctctcctagtgtgccttcctataatg

SEQ ID NO: 264333 - DNA, 120 bp, Artificial Sequence
  ENSG00000125885_55 (sequence is synthesized)
caggggctggaaggtgagaaaataaccacatttcccagactccctttgcaggtagatttccagatgtgaattgggttccactgatcagacacccatgtgtgagatttggaatgcagaact

SEQ ID NO: 264334 - DNA, 120 bp, Artificial Sequence
  ENSG00000125885_56 (sequence is synthesized)
gaggagagagccatcttcctcttgcttgtgttctggtggcatgtgtggttgaggagacatttaatttccctgcagcagaattcttgcagtcagttgttgaggcaagtggcgtggtggatg

SEQ ID NO: 264335 - DNA, 120 bp, Artificial Sequence
  ENSG00000125885_57 (sequence is synthesized)
caaccctgattcttcacctttctcattattgtggggtagcagcgcctctggcaagccagacagacctgcagtgtttttctgggagttaattctggagacccagtatggaacccactccta

SEQ ID NO: 264336 - DNA, 120 bp, Artificial Sequence
  ENSG00000125885_58 (sequence is synthesized)
gcccttgtgacaatattgcaagcatccagttccctgttttacagtccttttaaatgtggctagctacagtagtttgtgtttcctgcaactaatcactcatacatctgtatctaaagcact

SEQ ID NO: 264337 - DNA, 120 bp, Artificial Sequence
  ENSG00000125885_59 (sequence is synthesized)
ccacctgggtcatgtactatacttaaaattataaggcaatattaattcacaaaactacctactcgttttatttaaccctcagaagaactgaaaacaaaagctataccaggcttgctctag

SEQ ID NO: 264338 - DNA, 120 bp, Artificial Sequence
  ENSG00000125885_60 (sequence is synthesized)
agcgtgggcttgggaatggaaaggcagagtgcacctattgaattccatcatcagtttttctataccatggagttacttaccatgtgtatacataacactgattaaaaattttaaaaaaaa

SEQ ID NO: 264339 - DNA, 120 bp, Artificial Sequence
  ENSG00000125888_0 (sequence is synthesized)
gggcctaagacataagctgaacctctggcctgcagttccagatccaaggtgactgagacaaactgccagctgccactggcttatcaggagcacctgaatctgctgacacatcaaggccac

SEQ ID NO: 264340 - DNA, 120 bp, Artificial Sequence
  ENSG00000125888_1 (sequence is synthesized)
ttttcttaggagccccctgacttccaaaatcagtgcctttggattcatctcttccgggagagttcagtgtcttctgaaatgttacaaaacgtccttcagagcaagaaggcgtacacgagg

SEQ ID NO: 264341 - DNA, 120 bp, Artificial Sequence
  ENSG00000125888_2 (sequence is synthesized)
gcgatcaatttggtcaccaaaggtatcaataaggcctacatcctgctgggacaattccttctgatgcacaagaatgaagccgagtttcagaggtggctcatttgctgttttggtgccact

SEQ ID NO: 264342 - DNA, 120 bp, Artificial Sequence
  ENSG00000125888_3 (sequence is synthesized)
gagtgtgaggcccagcagacttctcactgcctcaaggagtggtgtgcctgcttcctgtagacacaaacctcattgctgccccccaccaccctctggggaaaatgacgccttctccaccta

SEQ ID NO: 264343 - DNA, 120 bp, Artificial Sequence
  ENSG00000125888_4 (sequence is synthesized)
gatttgccccatgggcctaagacataagctgaacctctggcctgcagttccagatccaaggtgactgagacaaactgccagctgccactggcttatcaggagcacctggagatggacaac

SEQ ID NO: 264344 - DNA, 120 bp, Artificial Sequence
  ENSG00000125888_5 (sequence is synthesized)
gagactgatttgccccatgggcctaagacataagctgaacctctggcctgcagttccagatccaaggtgactgagacaaactgccagctgccactggcttatcaggagcacctgggctat

SEQ ID NO: 264345 - DNA, 120 bp, Artificial Sequence
  ENSG00000125888_6 (sequence is synthesized)
cttagtttccactgctgcagcctgtggcctggacatttgcccatggttgtgaggtccccatgcatgggacttcttcctcctgactccaggcttcagttcacccatcaggccttaaagcat

SEQ ID NO: 264346 - DNA, 120 bp, Artificial Sequence
  ENSG00000125888_7 (sequence is synthesized)
ctttttgctgcaaaaaccaagggcactgcctcaagcttatcttcccagccactgtttactgctgctacattgttgcccaagacacttcagaagtgactgttgttgtcatctcctgccaag

SEQ ID NO: 264347 - DNA, 120 bp, Artificial Sequence
  ENSG00000125888_8 (sequence is synthesized)
tcctggaaggcaagccaccaagtcccatgcaccattcccacagcccgacaaccttcctgactctacccactggaatctaaagagtctgcccacttctggatgtttgttcaggagatggac

SEQ ID NO: 264348 - DNA, 120 bp, Artificial Sequence
  ENSG00000125888_9 (sequence is synthesized)
tggaaggtggaggttgcagtgagccgctatcgtgccactgcactccaacctgggctatagagtgagactctgtctcaaaataaaagaagaagaaaaaaaaacacacaagagtttaaacct

SEQ ID NO: 264349 - DNA, 120 bp, Artificial Sequence
  ENSG00000125888_10 (sequence is synthesized)
acaggtgctcaggacctgcggacttgggcagagggcattgtaagcagctagagaacaagagagggcagagacagcttatctctgcttgacaaggcccagcattatggcctacatcctgct

SEQ ID NO: 264350 - DNA, 120 bp, Artificial Sequence
  ENSG00000125888_11 (sequence is synthesized)
aagcaaccctgcgctgaatgctgcgaggaacaaaggagatggacaacatgtctcccaggctgagagccttcctctccgaacccattggagaaaaggatgtctgctgggtggatggcatca

SEQ ID NO: 264351 - DNA, 120 bp, Artificial Sequence
  ENSG00000125895_0 (sequence is synthesized)
gactgcagatgaaattagtaactggtggggtcgtggggtgtgaatggtgggcgggagcagctatgtcagttggtgtgtttctgcttatgttagggtaattgggcacggcctttgtgtaac

SEQ ID NO: 264352 - DNA, 120 bp, Artificial Sequence
  ENSG00000125895_1 (sequence is synthesized)
tggtgaatatctctgaacctgggcatgaaacagagagatgtcctaactctgggtgagaggaatcctcatttttctctgccctctcactgtggcatcctaagaaaaaagttttgggttcct

SEQ ID NO: 264353 - DNA, 120 bp, Artificial Sequence
  ENSG00000125895_2 (sequence is synthesized)
gcagcatgaaggagagctctgctcccagaatttgggagctccagatttcttccagggtgtggaggcatcaatatatcagtctgggaaaggggttcctgggccactccaggagctgagttg

SEQ ID NO: 264354 - DNA, 120 bp, Artificial Sequence
  ENSG00000125895_3 (sequence is synthesized)
ggtggaaggtgctgagggtgtgggtgggggccacttctgagcacccatgtggcacccactgctggtccctgtttgtggctgggcactcaggaaaatgtttttggtgctaagagtaaaaag

SEQ ID NO: 264355 - DNA, 120 bp, Artificial Sequence
  ENSG00000125895_4 (sequence is synthesized)
ccaaccaacaaacacatctcttttttctgtctattcactggaaagtaaaagcagtctgggcgcaggctggggacccagatggaattcaaacttatgcctgctctcaaggtgctcacggtt

SEQ ID NO: 264356 - DNA, 120 bp, Artificial Sequence
  ENSG00000125895_5 (sequence is synthesized)
gctgataaacagctggataaaatgaagagtctatgagtgagggatgcagagccagggaaggctggtggagtgatgccaccagcacaggggtatgagtttgcagctgccaaggggccaagg

SEQ ID NO: 264357 - DNA, 120 bp, Artificial Sequence
  ENSG00000125895_6 (sequence is synthesized)
gatgagctggggccctccttcccaatggcatctccccctggtctggaactgaagacactgagcaatggtccccaagccccaaggagatcagctcccctgggcccagtggccccaaccagg

SEQ ID NO: 264358 - DNA, 120 bp, Artificial Sequence
  ENSG00000125895_7 (sequence is synthesized)
ccagaaccctgggaacacgagactgggcagctcacccagtccccctgggggtgtctcctcactgccccgatcccagcgggatgatctgtcccttcattcagaggaggggccagccctgga

SEQ ID NO: 264359 - DNA, 120 bp, Artificial Sequence
  ENSG00000125895_8 (sequence is synthesized)
gcccgtgagccgcccggtggattatggctttgtttccgccctcgttttcctggtgagtgggattcttctggtggtgacagcatacgccatcccccgtgaggctcgagtcaatccggacac

SEQ ID NO: 264360 - DNA, 120 bp, Artificial Sequence
  ENSG00000125895_9 (sequence is synthesized)
agtgacagcgcgggagatggaacgactggagatgtactacgcccgcctaggctcccacctggacaggtgcatcatcgcaggcctcgggctgctcacggtgggcggcatgctcttgtcggt

SEQ ID NO: 264361 - DNA, 120 bp, Artificial Sequence
  ENSG00000125895_10 (sequence is synthesized)
gctgctcatggtctccctgtgcaagggcgagctgtaccgccggaggaccttcgtccccggcaagggctccaggaagacctacggctccattaacctgcgcatgagacagctcaatgggga

SEQ ID NO: 264362 - DNA, 120 bp, Artificial Sequence
  ENSG00000125895_11 (sequence is synthesized)
tgggggccaggccctggtggagaatgaagttgtccaggtctcagagactagccacaccctccagaggtcttaagaactagcccaccttatctggctgctttagctccagtgctacaaggt

SEQ ID NO: 264363 - DNA, 120 bp, Artificial Sequence
  ENSG00000125895_12 (sequence is synthesized)
ccaccccctgctcccgcccacctgacccctgccaaggccctggggttttaaactgagctcacatagggccttgtggaagaagtactgggtgctggagggagagctcggggcccagcccat

SEQ ID NO: 264364 - DNA, 120 bp, Artificial Sequence
  ENSG00000125895_13 (sequence is synthesized)
gccccacacgggcaagcagcccactgatctgttttgtagctgaggttttgcatacggttttgtttggaggatggcttctgctgctaaaaatacaaaagtttggaaaccgctgctcttgga

SEQ ID NO: 264365 - DNA, 80 bp, Artificial Sequence
  ENSG00000125895_14 (sequence is synthesized)
gtacagctccgcgcggcgcgagtaggtacgtgcgcctcggcagtggctccgggccgggccgggaagggggcgggagaccg

SEQ ID NO: 264366 - DNA, 80 bp, Artificial Sequence
  ENSG00000125895_15 (sequence is synthesized)
ctgcgccgcaggagagagacccccgcaggcgagacccccgcaggcgtacgccggctgcaggaaggcggacgggcaccgga

SEQ ID NO: 264367 - DNA, 120 bp, Artificial Sequence
  ENSG00000125895_16 (sequence is synthesized)
gtgtgtgtgtgtgtgtgtgtgtacgcgcgtgtgcgtgtgacggggtactcgcgtggcccgaagatccgagggtcacactacgtgacttctgggtgtctgtgggtactgctgtgggaacag

SEQ ID NO: 264368 - DNA, 120 bp, Artificial Sequence
  ENSG00000125898_0 (sequence is synthesized)
ctttacaagtatgaactcatttaattccctcaactctgtgatataagcagtggccggtgtccagctgcctactttctgcccggatctctggctcctcatctctccggtctccgcagacta

SEQ ID NO: 264369 - DNA, 120 bp, Artificial Sequence
  ENSG00000125898_1 (sequence is synthesized)
aagccctcgggatatgcagcagccatgcctgtgcacacgctgagccccggagccccgtccgcccccgccctaccttgccgcctgcggaccagggtccctggctacctgctacgggggccg

SEQ ID NO: 264370 - DNA, 120 bp, Artificial Sequence
  ENSG00000125898_2 (sequence is synthesized)
gcagatggtggagcccggaaaccgagcgctgtggagcgcctggaggccgacaaggccaagtacgtcaagagcctgcacgtggccaacacccgccaggagcctgtgcagcccctgctgtcc

SEQ ID NO: 264371 - DNA, 120 bp, Artificial Sequence
  ENSG00000125898_3 (sequence is synthesized)
aaacagccgctctttagccctgagactcgccgcacagtgctcacgcccagccgccgagccctgcctggcccctgccgacggccccagctggacctggacatcctcagcagcctcatcgac

SEQ ID NO: 264372 - DNA, 120 bp, Artificial Sequence
  ENSG00000125898_4 (sequence is synthesized)
ttgtgtgacagccccgtgtcccctgccgaggccagccgcactcctggacgggccgagggagccggccgtcctcccccagccacccctccgcgaccgccgcccagtacctctgcggtccgc

SEQ ID NO: 264373 - DNA, 120 bp, Artificial Sequence
  ENSG00000125898_5 (sequence is synthesized)
cgccccctgcccgcctcgcctgcccggccctgcccatcacccggccctgccgccgcctccagcccagcccggccgccgggtttgcaacgctccaagtcggacttgagcgagcgcttttct

SEQ ID NO: 264374 - DNA, 120 bp, Artificial Sequence
  ENSG00000125898_6 (sequence is synthesized)
cccggaggaggcgagagggttgggtgtggcccacctggcacgggccagctcggatatcgtgtccctggcagggcccagtgctgggccgggcagctctgaagggggctgctcccgccgcag

SEQ ID NO: 264375 - DNA, 120 bp, Artificial Sequence
  ENSG00000125898_7 (sequence is synthesized)
ctcggtgactgttgaggagcgggcccgggagcgcgttccctatggcgtgtcggtggtggagcgcaatgcccgcgtgatcaagtggttgtatgggctaaggcaggctcgggagagcccagc

SEQ ID NO: 264376 - DNA, 120 bp, Artificial Sequence
  ENSG00000125898_8 (sequence is synthesized)
agctgaaggctaggcgccactgggcctggaattcgccacaggacggatcttacagaggcaagtggtccctggacctctcttgcatccattctctagacggccgtgtcagaggctccaccc

SEQ ID NO: 264377 - DNA, 120 bp, Artificial Sequence
  ENSG00000125898_9 (sequence is synthesized)
tgttgtgaacttggtatggaggcaaaggcttagaggctggaccagcattgttgggcaaggactgactctccaagggttttgttcttggctttggacacctgagaaccccctcctcccctc

SEQ ID NO: 264378 - DNA, 120 bp, Artificial Sequence
  ENSG00000125898_10 (sequence is synthesized)
ccccaatacaaggtttttgacatgagtgtactcctgcttagttcctcttgtggggctgcatttgcggtgctttgccctccccactgtgagtgaggggccaagggatctcctcaatcctgt

SEQ ID NO: 264379 - DNA, 120 bp, Artificial Sequence
  ENSG00000125898_11 (sequence is synthesized)
ctccccagcggctctgtttcctccttccttccttggcctctgtcctttgctgacttcctcttccttacccagcagaactcaccctggggtcggggcagtggggaggggcctatccactgc

SEQ ID NO: 264380 - DNA, 120 bp, Artificial Sequence
  ENSG00000125898_12 (sequence is synthesized)
tcttcctagtccttggcagctggcctaggtgggcagactataggagggactggttaggagtctgcattgctttgacttccctctccttggttaataaacacaaatgcttgtttctcaagg

SEQ ID NO: 264381 - DNA, 120 bp, Artificial Sequence
  ENSG00000125898_13 (sequence is synthesized)
cacccgctcagctcgaccgcggagggcagctccaaaggggaccccaaaggtgcccacgcggggctggggcctcctgggcgtcgttgggagcggccactaccggcccgggtccgagctgtc

SEQ ID NO: 264382 - DNA, 120 bp, Artificial Sequence
  ENSG00000125898_14 (sequence is synthesized)
agcctctccaaagcctgcgcgagaggagccgggacacgcctagcgcgggctccaggtggctgaccacgtccacgaccacatctgcctctaaactggaattcggttgctgacccagcccca

SEQ ID NO: 264383 - DNA, 120 bp, Artificial Sequence
  ENSG00000125898_15 (sequence is synthesized)
cagagcctccaggtgggtgtatggacactccaaaacagccatccctgtcaatgaatcagcctgcagggactgaattcattccttcattcatcaatatccattgagcacctactgtgtgcc

SEQ ID NO: 264384 - DNA, 120 bp, Artificial Sequence
  ENSG00000125898_16 (sequence is synthesized)
aaacactcttctaggaactgaagatgcaacagaaaacaaaacagataaaaatccctgccctcgaggagctgacattccagaggggacacagacaatacttgccagagtgaaaatgctaag

SEQ ID NO: 264385 - DNA, 120 bp, Artificial Sequence
  ENSG00000125898_17 (sequence is synthesized)
gagaaaaatgaagcagggaaggatggggaactagagattttttttcctttttttattgaggttgaattgataaacaataaaattggcccattttaggtgtacagttggatgcattttgac

SEQ ID NO: 264386 - DNA, 120 bp, Artificial Sequence
  ENSG00000125898_18 (sequence is synthesized)
agttgtatggcactacagacaagtgctagaattcctgtatcatcccaccatgttccttcacgccccccacagtcagcccctgactcccacccgctcccacccgaagaaactacagatcag

SEQ ID NO: 264387 - DNA, 120 bp, Artificial Sequence
  ENSG00000125898_19 (sequence is synthesized)
ttttctttcactgtagatcagctttgtctttcccagagttcatgcaaatggaatctggcttctctcagtcagcatcatggacttggttgagattcgcccgtgttgctgagtgtatctgta

SEQ ID NO: 264388 - DNA, 120 bp, Artificial Sequence
  ENSG00000125898_20 (sequence is synthesized)
gcttgttcctttttactgacgagtagtattccacagtgtggatgcactgtattttgtttattcatccaacttgttgacggacatacaggttgttcccatttcttggctattacaaataaa

SEQ ID NO: 264389 - DNA, 120 bp, Artificial Sequence
  ENSG00000125900_0 (sequence is synthesized)
gggcatctccaggacaggcattcaggcagagcaagctccaggtttcaccacaatgcccatccctgcctccccactccacccacctctgccttccttactgctgtatctgctgcttgaact

SEQ ID NO: 264390 - DNA, 120 bp, Artificial Sequence
  ENSG00000125900_1 (sequence is synthesized)
ggcaggagtcacacatgtgttccatgtgcaacaaacggagatgtcacagactgtatcaactggggagtcaatcatcttgagttgcagcgtacccaataccttaccaaatggacctgtctt

SEQ ID NO: 264391 - DNA, 120 bp, Artificial Sequence
  ENSG00000125900_2 (sequence is synthesized)
gtggttcaagggaacagggccaaaccggaaattaatctacaatttcaaacaaggtaactttcccagagtaaaagagattggagacaccaccaagcctggcaacacagacttttccacccg

SEQ ID NO: 264392 - DNA, 120 bp, Artificial Sequence
  ENSG00000125900_3 (sequence is synthesized)
gtgtttgttactgagcagaatccaagacctcccaagaacagacctgcaggcagagcaggctccagggcccaccatgatgcccatacctgcctctcggccctgcctgagagaaacagcaca

SEQ ID NO: 264393 - DNA, 120 bp, Artificial Sequence
  ENSG00000125900_4 (sequence is synthesized)
aactatttcgtccaaccctgctgctgcctccggctgctgggactcacaggcttgctgtcaaaataatccaaacagggaaggaacgtacaagtaaataacaaaagcccccatactcttctg

SEQ ID NO: 264394 - DNA, 120 bp, Artificial Sequence
  ENSG00000125900_5 (sequence is synthesized)
actccctggagacagctactttttaggagtttcatttgccttcttcaagagagctttcttccactgacataaaatgccagcttgatcgtacaataaatctgtctatttacctgggtccaa

SEQ ID NO: 264395 - DNA, 120 bp, Artificial Sequence
  ENSG00000125901_0 (sequence is synthesized)
catgctacgcgcgctgagccgcctgggcgcggggaccccgtgcaggccccgggcccctctggtgctgccagcgcgcggccgcaagacccgccacgacccgctggccaaatccaagatcga

SEQ ID NO: 264396 - DNA, 120 bp, Artificial Sequence
  ENSG00000125901_1 (sequence is synthesized)
ccaaatccaagatcgagcgagtgaacatgccgcccgcggtggaccctgcggagttcttcgtgctgatggagcgttaccagcactaccgccagaccgtgcgcgccctcaggatggagttcg

SEQ ID NO: 264397 - DNA, 120 bp, Artificial Sequence
  ENSG00000125901_2 (sequence is synthesized)
tgtccgaggtgcagaggaaggtgcacgaggcccgagccggggttctggcggagcgcaaggccctgaaggacgccgccgagcaccgcgagctgatggcctggaaccaggcggagaaccggc

SEQ ID NO: 264398 - DNA, 120 bp, Artificial Sequence
  ENSG00000125901_3 (sequence is synthesized)
ggctgcacgagctgcggatagcgaggctgcggcaggaggagcgggagcaggagcagcggcaggcgttggagcaggcccgcaaggccgaagaggtgcaggcctgggcgcagcgcaaggagc

SEQ ID NO: 264399 - DNA, 120 bp, Artificial Sequence
  ENSG00000125901_4 (sequence is synthesized)
gaggcacgggtggaagcagcattggactcccggaagaactacaactgggccatcaccagagaggggctggtggtcaggccacaacgcagggactcctaggggcccagtaaggacagtgcc

SEQ ID NO: 264400 - DNA, 120 bp, Artificial Sequence
  ENSG00000125901_5 (sequence is synthesized)
cgccagggaccatgtatgtatcatggcggaagagttggccctgacctggaataaagcagttggtgttgcttatgaggaaggttcagccttatccagcacagccttcacgttttgccctct

SEQ ID NO: 264401 - DNA, 120 bp, Artificial Sequence
  ENSG00000125901_6 (sequence is synthesized)
gctgtcaccacttggtcagaaacttccaaacgcagtgccctgttctgccggtgtgtacagcctcagcgcaccaggagaccctagagtggtttccatctcacagagaatcagacagggcca

SEQ ID NO: 264402 - DNA, 120 bp, Artificial Sequence
  ENSG00000125901_7 (sequence is synthesized)
cagccccctcaggcagccaggtcatctgagtatcattaagagtagtgatgggaagattacagtctgagggccaaacgtgcctgcttcctgtttttgtaaataaagttttgttggaacaca

SEQ ID NO: 264403 - DNA, 120 bp, Artificial Sequence
  ENSG00000125903_0 (sequence is synthesized)
agattcaaggcttcctctctggcacccaaccatgaagctcctttttcctatctttgccagcctcatgctacagtaccaggtgaacacagaatttattggcttgagacgctgtttaatggg

SEQ ID NO: 264404 - DNA, 120 bp, Artificial Sequence
  ENSG00000125903_1 (sequence is synthesized)
tttggggagatgcagggatcactgcaatgtggatgaaaaagagatacagaaatgcaagatgaaaaaatgttgtgttggaccaaaagtggttaaattgattaaaaactacctgcaatatgg

SEQ ID NO: 264405 - DNA, 120 bp, Artificial Sequence
  ENSG00000125903_2 (sequence is synthesized)
cccaaatcaaaagcactagcttttttgctaataccaactttgtcatcattccaaatgccacccctatgaactctgccaccatcagcactatgaccccaggacagatcacatacactgcta

SEQ ID NO: 264406 - DNA, 120 bp, Artificial Sequence
  ENSG00000125903_3 (sequence is synthesized)
cttctaccaagagtaacaccaaagaaagcagagattctgccactgcctcgccaccaccagcaccacctccaccaaacatactgccaacaccatcactggagctagaggaagcagaagagc

SEQ ID NO: 264407 - DNA, 120 bp, Artificial Sequence
  ENSG00000125903_4 (sequence is synthesized)
agtaatgtggatctttcccttaaaactccaagttcctctctatttttgctatctataaaatgacatagaactgtttcctctgtcatcagtcattcaataaacactgtttgagcacctaca

SEQ ID NO: 264408 - DNA, 120 bp, Artificial Sequence
  ENSG00000125910_0 (sequence is synthesized)
ctcagtcagcccccgggggaggccatgaacgccacggggaccccggtggcccccgagtcctgccaacagctggcggccggcgggcacagccggctcattgttctgcactacaaccactcg

SEQ ID NO: 264409 - DNA, 120 bp, Artificial Sequence
  ENSG00000125910_1 (sequence is synthesized)
tacaaccactcgggccggctggccgggcgcggggggccggaggatggcggcctgggggccctgcgggggctgtcggtggccgccagctgcctggtggtgctggagaacttgctggtgctg

SEQ ID NO: 264410 - DNA, 120 bp, Artificial Sequence
  ENSG00000125910_2 (sequence is synthesized)
agccacatgcggtcgcgacgctgggtctactattgcctggtgaacatcacgctgagtgacctgctcacgggcgcggcctacctggccaacgtgctgctgtcgggggcccgcaccttccgt

SEQ ID NO: 264411 - DNA, 120 bp, Artificial Sequence
  ENSG00000125910_3 (sequence is synthesized)
ctggcgcccgcccagtggttcctacgggagggcctgctcttcaccgccctggccgcctccaccttcagcctgctcttcactgcaggggagcgctttgccaccatggtgcggccggtggcc

SEQ ID NO: 264412 - DNA, 120 bp, Artificial Sequence
  ENSG00000125910_4 (sequence is synthesized)
gagagcggggccaccaagaccagccgcgtctacggcttcatcggcctctgctggctgctggccgcgctgctggggatgctgcctttgctgggctggaactgcctgtgcgcctttgaccgc

SEQ ID NO: 264413 - DNA, 120 bp, Artificial Sequence
  ENSG00000125910_5 (sequence is synthesized)
tgctccagccttctgcccctctactccaagcgctacatcctcttctgcctggtgatcttcgccggcgtcctggccaccatcatgggcctctatggggccatcttccgcctggtgcaggcc

SEQ ID NO: 264414 - DNA, 120 bp, Artificial Sequence
  ENSG00000125910_6 (sequence is synthesized)
ggcagaaggccccacgcccagcggcccgccgcaaggcccgccgcctgctgaagacggtgctgatgatcctgctggccttcctggtgtgctggggcccactcttcgggctgctgctggccg

SEQ ID NO: 264415 - DNA, 120 bp, Artificial Sequence
  ENSG00000125910_7 (sequence is synthesized)
acgtctttggctccaacctctgggcccaggagtacctgcggggcatggactggatcctggccctggccgtcctcaactcggcggtcaaccccatcatctactccttccgcagcagggagg

SEQ ID NO: 264416 - DNA, 120 bp, Artificial Sequence
  ENSG00000125910_8 (sequence is synthesized)
tgtgcagagccgtgctcagcttcctctgctgcgggtgtctccggctgggcatgcgagggcccggggactgcctggcccgggccgtcgaggctcactccggagcttccaccaccgacagct

SEQ ID NO: 264417 - DNA, 120 bp, Artificial Sequence
  ENSG00000125910_9 (sequence is synthesized)
ctctgaggccaagggacagctttcgcggctcccgctcgctcagctttcggatgcgggagcccctgtccagcatctccagcgtgcggagcatctgaagttgcagtcttgcgtgtggatggt

SEQ ID NO: 264418 - DNA, 120 bp, Artificial Sequence
  ENSG00000125910_10 (sequence is synthesized)
gcagccaccgggtgcgtgccaggcaggccctcctggggtacaggaagctgtgtgcacgcagcctcgcctgtatggggagcagggaacgggacaggcccccatggtcttcccggtggcctc

SEQ ID NO: 264419 - DNA, 120 bp, Artificial Sequence
  ENSG00000125910_11 (sequence is synthesized)
tcggggcttctgacgccaaatgggcttcccatggtcaccctggacaaggaggcaaccaccccacctccccgtaggagcagagagcaccctggtgtgggggcgagtgggttccccacaacc

SEQ ID NO: 264420 - DNA, 120 bp, Artificial Sequence
  ENSG00000125910_12 (sequence is synthesized)
ccgcttctgtgtgattctggggaagtcccggcccctctctgggcctcagtagggctcccaggctgcaaggggtggactgtgggatgcatgccctggcaacattgaagttcgatcatggta

SEQ ID NO: 264421 - DNA, 120 bp, Artificial Sequence
  ENSG00000125910_13 (sequence is synthesized)
cctttctgcttggtgacctccagtgacaaaaggcagctgcctccccagtcagttcctcgcatggagcctcccgacactgtcctgcttcagaactgaaccgggagcgctttgccaccatgg

SEQ ID NO: 264422 - DNA, 120 bp, Artificial Sequence
  ENSG00000125912_0 (sequence is synthesized)
gaggtgagtccgcgggagccgccgccgccgccgtcccgtcccagctgccgccccgcgcggccccgccgccggccaggatgctggaggaagcgggcgaggtgctggagaacatgctgaagg

SEQ ID NO: 264423 - DNA, 120 bp, Artificial Sequence
  ENSG00000125912_1 (sequence is synthesized)
aggtgctggagaacatgctgaaggcgtcttgtctgccgctcggcttcatcgtcttcctgcccgctgtgctgctgctggtggcgccgccgctgcctgccgccgacgccgcgcacgagttca

SEQ ID NO: 264424 - DNA, 120 bp, Artificial Sequence
  ENSG00000125912_2 (sequence is synthesized)
ccgtgtaccgcatgcagcagtacgacctgcagggccagccctacggcacacggaatgcagtgctgaacacggaggcgcgcacgatggcggcggaggtgctgagccgccgctgcgtgctca

SEQ ID NO: 264425 - DNA, 120 bp, Artificial Sequence
  ENSG00000125912_3 (sequence is synthesized)
tgcggctactggacttctcctacgagcagtaccagaaggccctgcggcagtcggcgggcgccgtggtcatcatcctgcccagggccatggccgccgtgccccaggacgtcgtccggcaat

SEQ ID NO: 264426 - DNA, 120 bp, Artificial Sequence
  ENSG00000125912_4 (sequence is synthesized)
tcatggagatcgagccggagatgctggccatggagaccgccgtccccgtgtactttgccgtggaggacgaggccctgctgtctatctacaagcagacccaggctgcctccgcctcccagg

SEQ ID NO: 264427 - DNA, 120 bp, Artificial Sequence
  ENSG00000125912_5 (sequence is synthesized)
gctccgcctctgctgctgaagtactgctgcgcacggccactgccaacggcttccagatggtcaccagcggggtacagagcaaggccgtgagtgactggctgattgccagcgtggaggggc

SEQ ID NO: 264428 - DNA, 120 bp, Artificial Sequence
  ENSG00000125912_6 (sequence is synthesized)
ggctgacggggctgggcggagaggaccttcccaccatcgtcatcgtggcccactacgacgcctttggagtggccccctggctgtcgctgggcgcggactccaacgggagcggcgtctctg

SEQ ID NO: 264429 - DNA, 120 bp, Artificial Sequence
  ENSG00000125912_7 (sequence is synthesized)
tgctgctggagctggcacgcctcttctcccggctctacacctacaagcgcacgcacgccgcctacaacctcctgttctttgcgtctggaggaggcaagtttaactaccagggaaccaagc

SEQ ID NO: 264430 - DNA, 120 bp, Artificial Sequence
  ENSG00000125912_8 (sequence is synthesized)
gctggctggaagacaacctggaccacacagactccagcctgcttcaggacaatgtggccttcgtgctgtgcctggacaccgtgggccggggcagcagcctgcacctgcacgtgtccaagc

SEQ ID NO: 264431 - DNA, 120 bp, Artificial Sequence
  ENSG00000125912_9 (sequence is synthesized)
cgcctcgggagggcaccctgcagcacgccttcctgcgggagctggagacggtggccgcgcaccagttccctgaggtacggttctccatggtgcacaagcggatcaacctggcggaggacg

SEQ ID NO: 264432 - DNA, 120 bp, Artificial Sequence
  ENSG00000125912_10 (sequence is synthesized)
tgctggcctgggagcacgagcgcttcgccatccgccgactgcccgccttcacgctgtcccacctggagagccaccgtgacggccagcgcagcagcatcatggacgtgcggtcccgggtgg

SEQ ID NO: 264433 - DNA, 120 bp, Artificial Sequence
  ENSG00000125912_11 (sequence is synthesized)
attctaagaccctgacccgtaacacgaggatcattgcagaggccctgactcgagtcatctacaacctgacagagaaggggacacccccagacatgccggtgttcacagagcagatgcaga

SEQ ID NO: 264434 - DNA, 120 bp, Artificial Sequence
  ENSG00000125912_12 (sequence is synthesized)
tccagcaggagcagctggactcggtgatggactggctcaccaaccagccgcgggccgcgcagctggtggacaaggacagcaccttcctcagcacgctggagcaccacctgagccgctacc

SEQ ID NO: 264435 - DNA, 120 bp, Artificial Sequence
  ENSG00000125912_13 (sequence is synthesized)
tgaaggacgtgaagcagcaccacgtcaaggctgacaagcgggacccagagtttgtcttctacgaccagctgaagcaagtgatgaatgcgtacagagtcaagccggccgtctttgacctgc

SEQ ID NO: 264436 - DNA, 120 bp, Artificial Sequence
  ENSG00000125912_14 (sequence is synthesized)
tcctggctgttggcattgctgcctacctcggcatggcctacgtggctgtccagcacttcagcctcctctacaagaccgtccagaggctgctcgtgaaggccaagacacagtgacacagcc

SEQ ID NO: 264437 - DNA, 120 bp, Artificial Sequence
  ENSG00000125912_15 (sequence is synthesized)
gccctgcagggacaggggccctctccctccccggcggtggttggaacactgaattacagagcttttttctgttgctctccgagactggggggggattgtttcttcttttccttgtctttg

SEQ ID NO: 264438 - DNA, 120 bp, Artificial Sequence
  ENSG00000125912_16 (sequence is synthesized)
aacttccttggaggagagcttgggagacgtcccggggccaggctacggacttgcggacgagccccccagtcctgggagccggccgccctcggtctggtgtaagcacacatgcacgattaa

SEQ ID NO: 264439 - DNA, 120 bp, Artificial Sequence
  ENSG00000125912_17 (sequence is synthesized)
agaggagacgccgggaccccctgcccgatcgcgcgcggcctccgcccaccgcctcctgccgcaaggggcctggactgcaggcctgacctgctccctgctccgtgtctgtcctaggacgtc

SEQ ID NO: 264440 - DNA, 120 bp, Artificial Sequence
  ENSG00000125912_18 (sequence is synthesized)
ccctcccgctccccgatggtggcgtggacatggttatttatctctgctccttcttgcctggaggagggcagtgccagccctggggttctgggattccagccctcctggagccttttgttc

SEQ ID NO: 264441 - DNA, 120 bp, Artificial Sequence
  ENSG00000125912_19 (sequence is synthesized)
cccatgtggtctcagtgacccgtccccctgacagtgggctcggggagctgcatcacccagccttccccttctccgactgcagggtctgatgtcatcattgacagcctttgcttcgtgggg

SEQ ID NO: 264442 - DNA, 120 bp, Artificial Sequence
  ENSG00000125912_20 (sequence is synthesized)
gcctggcagggcccctgcctccccgacccccgacccactgcaaatccccgttcccctgcactcctcttctcccagcccatccctccggcccctgtgcctctgcggccccagcccagctcc

SEQ ID NO: 264443 - DNA, 120 bp, Artificial Sequence
  ENSG00000125912_21 (sequence is synthesized)
cagggccgtcacctgcttggccctggcccagctccctgccctgagtcctgagccagtgcctggtgtttcctgggctcggtactgggcccccaggccatccaggctttgccacggccagtt

SEQ ID NO: 264444 - DNA, 120 bp, Artificial Sequence
  ENSG00000125912_22 (sequence is synthesized)
ggtcctccctggggaactgggtgcgggtggagtactgggaggcaggaggtggcccggggaggccttgtggctcctcccctcgctcctcgccctgggcctcagcttcctcatcaatagaaa

SEQ ID NO: 264445 - DNA, 120 bp, Artificial Sequence
  ENSG00000125912_23 (sequence is synthesized)
ggatgtgttcggggtgggggcgtcaggtgagaacgtttgctgggaaggagaggacttggggcatggcctctggggccacccttcctggaactcagagaggaaggtccgggccctcgggaa

SEQ ID NO: 264446 - DNA, 120 bp, Artificial Sequence
  ENSG00000125912_24 (sequence is synthesized)
gccttggacagaaccctccaccccgcagaccaggcgtcgtgtgtgtgtgggagagaaggaggcccgtgttgagctcagggagaccccggtgtgtccgttctttagcaatataacctaccc

SEQ ID NO: 264447 - DNA, 120 bp, Artificial Sequence
  ENSG00000125912_25 (sequence is synthesized)
agtgcgtgccgagcaggcttggtggggaagggacttgagctgggcaagtcctggcctggcacccgcagccgtctcccttccgtggcccagggaggtgtttgctgtccgaaggacctgggc

SEQ ID NO: 264448 - DNA, 120 bp, Artificial Sequence
  ENSG00000125912_26 (sequence is synthesized)
cggcccatgggagcctggggttctgtccagataggaccagggggtctcactttggccaccagttcttcggccagcacctctgccctccagaacctgcagcctggaggggtgaggggacaa

SEQ ID NO: 264449 - DNA, 120 bp, Artificial Sequence
  ENSG00000125912_27 (sequence is synthesized)
ccacccctctttcctccaggttggcaggggaccctcttctcccgtctgccctgcgggttgcccgcctcctccagagacttgcccaagggcccatcaccactggcctctgggcacttgtgc

SEQ ID NO: 264450 - DNA, 120 bp, Artificial Sequence
  ENSG00000125912_28 (sequence is synthesized)
tgagactctgggacccaggcagctgccaccttgtcaccatgagagaatttggggagtgcttgcatgctagccagcaggctcctgtctgggtgccacggggccagcattttggagggagct

SEQ ID NO: 264451 - DNA, 120 bp, Artificial Sequence
  ENSG00000125912_29 (sequence is synthesized)
tccttccttccttcctggacaggtcgtcatgatggatgcactgactgaccgtctggggctcaggctggtgtgggatgcagccggccgatgagaaaataaagccatattgaatgatcgcca

SEQ ID NO: 264452 - DNA, 120 bp, Artificial Sequence
  ENSG00000125912_30 (sequence is synthesized)
ttccttttctctttatccccaacttccttccaggtcgcaaggtcacgtcctgtccccacctttcgcccctcaccctagctcccccaacgccaaagacaaggttaagaaagtgatatcgcg

SEQ ID NO: 264453 - DNA, 120 bp, Artificial Sequence
  ENSG00000125912_31 (sequence is synthesized)
aaatagttttttaaagcattttattgcattttatgacttggagtttatgtgaaacctcaacggtattagccgaacagcctgccgcaccttccgggagttccagagtgggcctacaactcc

SEQ ID NO: 264454 - DNA, 120 bp, Artificial Sequence
  ENSG00000125912_32 (sequence is synthesized)
cacagggctccgcgagcgccggacggacggactacaattcccgacaggcagcgcggctggcggggcggttcgccgcggtgcccacaggacctcagggcgagtgcgggctgccccgcgcgg

SEQ ID NO: 264455 - DNA, 120 bp, Artificial Sequence
  ENSG00000125912_33 (sequence is synthesized)
cagtccctggggccgagcacgagtcgtcatgatggatgcactgactgaccgtctggggctcaggctggtgtgggatgcagccggccgatgagaaaataaagccatattgaatgatcgcca

SEQ ID NO: 264456 - DNA, 120 bp, Artificial Sequence
  ENSG00000125931_0 (sequence is synthesized)
acgagccaggacatgtgctaataatgccctaagccggttataaagacgtggaaattgaggggagaaaaaaaaagggaaaaaaagggtctgtccttcctgggattcctagccgaggccagt

SEQ ID NO: 264457 - DNA, 120 bp, Artificial Sequence
  ENSG00000125931_1 (sequence is synthesized)
ctgctgccgtgtgcgtgtgcgtcagggctctccgggcggcaatgggggcttgagagccgggtccccagcgccgggaagggagcgcggtggccgccaccgccaccgccccggagtccggcg

SEQ ID NO: 264458 - DNA, 80 bp, Artificial Sequence
  ENSG00000125931_2 (sequence is synthesized)
ccgaagctgcgggcgggcgggcgggcaccagctcggtcaggggctgcttggcgcggcactgtgcggtgcagcggcggcgc

SEQ ID NO: 264459 - DNA, 120 bp, Artificial Sequence
  ENSG00000125931_3 (sequence is synthesized)
ggccgcgggcgctgagcgcgaccggttcgcggtagcggtggcggcggcgtgcgtgccaggggctgggggctccgccgcctctcttgcggctcaccgagctccgcgcttccctctctccag

SEQ ID NO: 264460 - DNA, 120 bp, Artificial Sequence
  ENSG00000125931_4 (sequence is synthesized)
ccctctctccagggcaggcggcttctcagagcacaacagctccagctggcagcatcacttcccgccaatttatccaacttctgccaaggctctgaaatgccaacaacgtcgaggcctgca

SEQ ID NO: 264461 - DNA, 120 bp, Artificial Sequence
  ENSG00000125931_5 (sequence is synthesized)
aggaggatgccaaccaagagatgagctccgtggcctactccaaccttgcggtgaaagatcgcaaagcagtggccattctgcactaccctggggtagcctcaaatggaaccaaggccagtg

SEQ ID NO: 264462 - DNA, 120 bp, Artificial Sequence
  ENSG00000125931_6 (sequence is synthesized)
gggctcccactagttcctcgggatctccaataggctctcctacaaccacccctcccactaaacccccatccttcaacctgcaccccgcccctcacttgctggctagtatgcacctgcaga

SEQ ID NO: 264463 - DNA, 120 bp, Artificial Sequence
  ENSG00000125931_7 (sequence is synthesized)
aacttaatagccagtatcaggggatggctgctgccactccaggccaacccggggaggcaggacccctgcaaaactgggactttggggcccaggcgggaggggcagaatcactctctcctt

SEQ ID NO: 264464 - DNA, 120 bp, Artificial Sequence
  ENSG00000125931_8 (sequence is synthesized)
ctgctggtgcccagagccctgctatcatcgattcggacccagtggatgaggaagtgctgatgtcgctggtggtggaactggggttggaccgagccaatgagcttccggagctgtggctgg

SEQ ID NO: 264465 - DNA, 120 bp, Artificial Sequence
  ENSG00000125931_9 (sequence is synthesized)
ggcagaatgagtttgacttcactgcggactttccatctagctgctaatgccaagtgtccctaaagatggaggaataaagccaccaattctgttgtaaataaaaataaagttacttacaaa

SEQ ID NO: 264466 - DNA, 120 bp, Artificial Sequence
  ENSG00000125931_10 (sequence is synthesized)
ctataaaaatgtgcccggcggcaaagctgcagaaggggcaccgctgagctgccgagaggaagctcgctctgcccggctgccctcttgtagtccgccggcgaggggcagttctcggtgagg

SEQ ID NO: 264467 - DNA, 120 bp, Artificial Sequence
  ENSG00000125931_11 (sequence is synthesized)
gagtccctgcttcgcagagcaccggacttggagtcagagagacctggctgcgaatcccggctccgccactttctagcgctgtgaccttggttttcaggtggcgaaactgactggtctggt

SEQ ID NO: 264468 - DNA, 120 bp, Artificial Sequence
  ENSG00000125931_12 (sequence is synthesized)
tagagcgcgtccaagccaagccgcagtgctgtttggatttttaaatttctccttctgagtgagaaaatagcaatcgagatggaaccatccgcacaacagctccagctggcagcatcactt

SEQ ID NO: 264469 - DNA, 120 bp, Artificial Sequence
  ENSG00000125931_13 (sequence is synthesized)
gggaacggacgctcagggccccggtggcctgggtgcacgcgcccgccgtgcaagggatgctcccggccgcccccggttccgcggctccatctgggatgcggcgaggagggcagccgagct

SEQ ID NO: 264470 - DNA, 120 bp, Artificial Sequence
  ENSG00000125944_0 (sequence is synthesized)
gccatttctagtcgttttcaaagcgcctcgcgctgattctcacgggcccggctgccggcccccgctctgccctgcataataaaatggctaatcaggtgaatggtaatgcggtacagttaa

SEQ ID NO: 264471 - DNA, 120 bp, Artificial Sequence
  ENSG00000125944_1 (sequence is synthesized)
aagaagaggaagaaccaatggatacttccagtgtaactcacacagaacactacaagacactgatagaggcaggcctcccacagaaggtggcagaaagacttgatgaaatatttcagacag

SEQ ID NO: 264472 - DNA, 120 bp, Artificial Sequence
  ENSG00000125944_2 (sequence is synthesized)
gattggtagcttatgtcgatcttgatgaaagagcaattgatgctctcagggaatttaatgaagaaggagctctgtctgtactacagcagttcaaggaaagtgacttatcacatgttcaga

SEQ ID NO: 264473 - DNA, 120 bp, Artificial Sequence
  ENSG00000125944_3 (sequence is synthesized)
acaaaagtgcatttttatgtggagttatgaagacctacaggcagagagagaaacaggggagcaaggtgcaagagtccacaaagggacctgatgaagcgaagatcaaggccttgcttgaga

SEQ ID NO: 264474 - DNA, 120 bp, Artificial Sequence
  ENSG00000125944_4 (sequence is synthesized)
gaactggttatactctggatgtaaccacaggacagaggaagtatggtggtcctccaccagacagtgtgtactctggcgtgcaacctggaattggaacggaggtatttgtaggcaaaatac

SEQ ID NO: 264475 - DNA, 120 bp, Artificial Sequence
  ENSG00000125944_5 (sequence is synthesized)
caagggatttatatgaggatgagttggtgcccctttttgagaaggccggacccatttgggatctacgtcttatgatggatccactgtccggtcagaatagagggtatgcatttatcacct

SEQ ID NO: 264476 - DNA, 120 bp, Artificial Sequence
  ENSG00000125944_6 (sequence is synthesized)
tctgtggaaaggaagctgcacaggaagccgtgaaactgtgtgacagctatgaaattcgccctggtaaacaccttggagtgtgcatttctgtggcaaacaacagactttttgttggatcca

SEQ ID NO: 264477 - DNA, 120 bp, Artificial Sequence
  ENSG00000125944_7 (sequence is synthesized)
ttccgaagaataagactaaagaaaacattttggaagaattcagtaaagtcacagagggtttggtggacgttattctctatcatcaacccgatgacaaaaagaagaatcgggggttctgct

SEQ ID NO: 264478 - DNA, 120 bp, Artificial Sequence
  ENSG00000125944_8 (sequence is synthesized)
tccttgaatatgaggatcacaagtcagcagcacaagccagacgccggctgatgagtggaaaagtaaaagtgtggggaaatgtagttacagttgaatgggctgaccctgtggaagaaccag

SEQ ID NO: 264479 - DNA, 120 bp, Artificial Sequence
  ENSG00000125944_9 (sequence is synthesized)
atccagaagtcatggctaaggtaaaagttttgtttgtgagaaacttggctactacggtgacagaagaaatattggaaaagtcattttctgaatttggaaaactcgaaagagtaaagaagt

SEQ ID NO: 264480 - DNA, 120 bp, Artificial Sequence
  ENSG00000125944_10 (sequence is synthesized)
tgaaagattatgcatttgttcattttgaagacagaggagcagctgttaaggctatggatgaaatgaatggcaaagaaatagaaggggaagaaattgaaatagtcttagccaagccaccag

SEQ ID NO: 264481 - DNA, 120 bp, Artificial Sequence
  ENSG00000125944_11 (sequence is synthesized)
acaagaaaaggaaagagcgccaagctgctagacaggcctccagaagcactgcgtatgaagattattactaccaccctcctcctcgcatgccacctccaattagaggtcggggtcgtggtg

SEQ ID NO: 264482 - DNA, 120 bp, Artificial Sequence
  ENSG00000125944_12 (sequence is synthesized)
gggggagaggtggatatggctaccctccagattactacggctatgaagattactatgatgattactatggttatgattatcacgactatcgtggaggctatgaagatccctactacggct

SEQ ID NO: 264483 - DNA, 120 bp, Artificial Sequence
  ENSG00000125944_13 (sequence is synthesized)
atgatgatggctatgcagtaagaggaagaggaggaggaaggggagggcgaggtgctccaccaccaccaagggggaggggagcaccacctccaagaggtagagctggctattcacagaggg

SEQ ID NO: 264484 - DNA, 120 bp, Artificial Sequence
  ENSG00000125944_14 (sequence is synthesized)
gggcacctttgggaccaccaagaggctctaggggtggcagagggggtcctgctcaacagcagagaggccgtggttcccgtggatctcggggcaatcgtgggggcaatgtaggaggcaaga

SEQ ID NO: 264485 - DNA, 120 bp, Artificial Sequence
  ENSG00000125944_15 (sequence is synthesized)
gaaaggcagatgggtacaaccagcctgattccaagcgtcgtcagaccaacaaccaacagaactggggttcccaacccatcgctcagcagccgcttcagcaaggtggtgactattctggta

SEQ ID NO: 264486 - DNA, 120 bp, Artificial Sequence
  ENSG00000125944_16 (sequence is synthesized)
actatggttacaataatgacaaccaggaattttatcaggatacttatgggcaacagtggaagtagacaagtaagggcttgaaaatgatactggcaagatacgattggctctagatctaca

SEQ ID NO: 264487 - DNA, 120 bp, Artificial Sequence
  ENSG00000125944_17 (sequence is synthesized)
ttcttcaaaaaaaaaaattggcttaactgtttcatctttaagtagcattttgctgccatttgtattgggctgaagaaatcactattgtgtatatactcaagtctttttatttttcctctt

SEQ ID NO: 264488 - DNA, 120 bp, Artificial Sequence
  ENSG00000125944_18 (sequence is synthesized)
ttcataaatgctcttggacattattgggcttgcagagttcccttattctggggattacaatgcttttatcgtttcaggcttcattttagcttcaaaacaagctgggcacactgttaaatc

SEQ ID NO: 264489 - DNA, 120 bp, Artificial Sequence
  ENSG00000125944_19 (sequence is synthesized)
atgattttgcagaacctttggttttggacagtttcatttttttggatttgggatagattacataggagtatggagtatgctgtaaataaaaatacaagctagtgctttgtcttagtagtt

SEQ ID NO: 264490 - DNA, 120 bp, Artificial Sequence
  ENSG00000125944_20 (sequence is synthesized)
ttaagaaattaaagcaaacaaatttaagttttcttgtattgaaaataacctatgattgtatgttttgcattcctagaagtaggttaactgtgtttttaaattgttataacttcacacctt

SEQ ID NO: 264491 - DNA, 120 bp, Artificial Sequence
  ENSG00000125944_21 (sequence is synthesized)
tttgaaatctgccctacaaaatttgtttggcttaaacgtcaaaagccgtgacaatttgttctttgatgtgattgtatttccaatttcttgttcatgtaagatttcaataaaactaaaaaa

SEQ ID NO: 264492 - DNA, 120 bp, Artificial Sequence
  ENSG00000125944_22 (sequence is synthesized)
tctattcaaaacattacctatttcaaattcaattgtgtcctaaaacattattttattcgtaatccttgcaaggaatattgttttcaaagtataactgcctatgtgagtgatcaaattcat

SEQ ID NO: 264493 - DNA, 120 bp, Artificial Sequence
  ENSG00000125944_23 (sequence is synthesized)
gcaaaatttcttgtttattccaacatgtgttgtggatattagactgaggattagtctaaattcaagtatttattccaattagcactttcattgattggtgttctctcatagtctcttcta

SEQ ID NO: 264494 - DNA, 120 bp, Artificial Sequence
  ENSG00000125944_24 (sequence is synthesized)
attttgaaattttatcttttattaaaaaaaaaaaaacaggttcatagacttttgagcattcttgcaggcattggataatttgcattaaaacaaataaaatgtggctgggaaagcagactg

SEQ ID NO: 264495 - DNA, 120 bp, Artificial Sequence
  ENSG00000125944_25 (sequence is synthesized)
caatttattttgacccacattctttataagggataatttgtgactgaagaccttatttgctggataagtgaatgtacatacagggaaaattgttagtactgtggcgtcaattgcactgcg

SEQ ID NO: 264496 - DNA, 120 bp, Artificial Sequence
  ENSG00000125944_26 (sequence is synthesized)
gactttagttttagtgaaaatgatcgtgactaccatttcagttactggtttaggaatataatttcctattactatgtaaatttgctttgagaaacattcatgccttgtaagagaggctta

SEQ ID NO: 264497 - DNA, 120 bp, Artificial Sequence
  ENSG00000125944_27 (sequence is synthesized)
aaaatatccagtagtaatacctttgactttctgttaacacttcgtttatttttatttatctgctatccctgatgcccaaattttttgttggccaagacataacatctatttccctatttc

SEQ ID NO: 264498 - DNA, 120 bp, Artificial Sequence
  ENSG00000125944_28 (sequence is synthesized)
ctttagaaattctgatttattctaatgacttttttgcttgagaatgagaggaacaaaagaatctaagctttacggtacagaaaagtgaatcactttcaaattactattaagttttcccct

SEQ ID NO: 264499 - DNA, 120 bp, Artificial Sequence
  ENSG00000125944_29 (sequence is synthesized)
ccatcttattcttacgtggttctcaaatgtttttataatgataaaaatatcagaagccattggggaataattaaaatggatacaccattattctgtgttttgttcctgtttggtgtcttt

SEQ ID NO: 264500 - DNA, 120 bp, Artificial Sequence
  ENSG00000125944_30 (sequence is synthesized)
gtgataggaatattagatttcaaaatcataagccacttaattccgtgtaatcttggctagatcatattgggtttcatggcttcttttcatttcaatttaagattactatttactgatgaa

SEQ ID NO: 264501 - DNA, 120 bp, Artificial Sequence
  ENSG00000125944_31 (sequence is synthesized)
agtcaatatatttcatttctttttcaaagtacactcattacacagtatagtcatttaacagaccttattgatattttagttttttggaaactgataaaggaattatggtctgttgtatga

SEQ ID NO: 264502 - DNA, 120 bp, Artificial Sequence
  ENSG00000125944_32 (sequence is synthesized)
agtaaagacaccaaacattctttaaatgctgcttttaaactttgaaagtacaatttgaagttgtaactatacatctaattagacttaagtaaaaccctgatttttttcctggaaagaaca

SEQ ID NO: 264503 - DNA, 120 bp, Artificial Sequence
  ENSG00000125944_33 (sequence is synthesized)
aaatctacaaataaaatttgagttgtttgtatttcttaattaggtgttacaagctacaaagttgtcataaagaatgctaagaatggggatagaaatgattctgagaaaacaaaccctcgc

SEQ ID NO: 264504 - DNA, 120 bp, Artificial Sequence
  ENSG00000125944_34 (sequence is synthesized)
aaaaacataagattaaaacttgggttccatgtcaaaatcctttcctttaattgcaaattatattttgaattttaaagtggccacctcctcctctgtccttttcactaattaaaaatatat

SEQ ID NO: 264505 - DNA, 120 bp, Artificial Sequence
  ENSG00000125944_35 (sequence is synthesized)
ttgcagaggtaccctctaatatttggtttataggttttgtggctattttaaattgtaaagcataatcctataaacattaaaactcaagagcttttcttctttcatgtcttgtaaattaac

SEQ ID NO: 264506 - DNA, 120 bp, Artificial Sequence
  ENSG00000125944_36 (sequence is synthesized)
actgtagcagcattcagagaaaatagattcagagctcaacttttcacataaataaatctaacagtgtaatatataaacctgaaaaatgtcagttgagggaggtctttattctagattggc

SEQ ID NO: 264507 - DNA, 120 bp, Artificial Sequence
  ENSG00000125944_37 (sequence is synthesized)
atttttttttttttaaattaggtacaaattatgagtgtaaggaatttggtttcctgctctcctgtctttccatcttttttgttccccaagctaattgatttggctttatttatgagcctg

SEQ ID NO: 264508 - DNA, 120 bp, Artificial Sequence
  ENSG00000125944_38 (sequence is synthesized)
ttacagtaaagtgtgtgttgggaaatatattgaggtatagagctattctttgtaggtaccctggtgagaccgatacaaatatgcccctccccataatggaatactaatttttatttgatc

SEQ ID NO: 264509 - DNA, 120 bp, Artificial Sequence
  ENSG00000125944_39 (sequence is synthesized)
actcatttatagcagttgcttaaatgtatgtatttatatgaaggtattttaatttttaagagcaaaaaagttctaataagttgccagatttctaataaatgcaggtttatttggtgaaaa

SEQ ID NO: 264510 - DNA, 120 bp, Artificial Sequence
  ENSG00000125944_40 (sequence is synthesized)
gataaggaaaatgagttatgattctgtagtttttttaaaatgagttcagcataattgtttttcaggtttttttagttactggggttattctgcataagaaagcccaatgctttctgatag

SEQ ID NO: 264511 - DNA, 120 bp, Artificial Sequence
  ENSG00000125944_41 (sequence is synthesized)
taggagataatttttctctcttttgactttgaaatctgacttaggagatgaattctttttaaaaaggtcagcatgcaaaaaaataaattatatattttaaattctaaaagagaagggaca

SEQ ID NO: 264512 - DNA, 120 bp, Artificial Sequence
  ENSG00000125944_42 (sequence is synthesized)
taaaatttcactcctagcataaagccatataatattattcttgaaactcattacatcatttgcctcctgcccatttgaatataatcatacctacgttttattaattgtgcatttgtaaaa

SEQ ID NO: 264513 - DNA, 120 bp, Artificial Sequence
  ENSG00000125944_43 (sequence is synthesized)
ccaaacccttccagtaaatacttgctataaggctattgcttgtcaattatcaaggcttctaaatatgttaaaacttgtcattttgatttttcaaagataattttattatactgagctacc

SEQ ID NO: 264514 - DNA, 120 bp, Artificial Sequence
  ENSG00000125944_44 (sequence is synthesized)
aatattcttaaagaaaactaaccaaagttaatattagtgtagtccattattatgtggacaattattatgtggaatctcttaagtgagcaactaagaaaaagccttatagaaagactacac

SEQ ID NO: 264515 - DNA, 120 bp, Artificial Sequence
  ENSG00000125944_45 (sequence is synthesized)
tggatttataagtgtgtttatgtttctctaagaatgggagcttctgttaacttaggggtggagttgttctgaggaaaccagtagattggatgactgactggagaatccagaataacaaat

SEQ ID NO: 264516 - DNA, 120 bp, Artificial Sequence
  ENSG00000125944_46 (sequence is synthesized)
ccattagccagacatgtttacttttatattagaagtttgttgattaggtcttaattttcaaacgcaaacaccaagctttaaaaatattgcatatacaatgtattggtcagcaatttaata

SEQ ID NO: 264517 - DNA, 120 bp, Artificial Sequence
  ENSG00000125944_47 (sequence is synthesized)
ttaatttgaagttaattattgttaatccttctagaaaagttttttttctttaaataaaagtacatatatatacttttttatttagaggttaccagaagctctggttttgttttgttttgt

SEQ ID NO: 264518 - DNA, 120 bp, Artificial Sequence
  ENSG00000125944_48 (sequence is synthesized)
ttgttttgtttttttgtttttttaatcattttcagatgttatccagaaatctgcaagtgtacttttcctgttttaactccttccttttatcacctgactatcagggaagcgaggttgagg

SEQ ID NO: 264519 - DNA, 120 bp, Artificial Sequence
  ENSG00000125944_49 (sequence is synthesized)
ctgccctgacctgacatgtcatgatgtcgacttgctaggtggggttcgctggggacgataaccagtggaattgttggtaagaacttttttttcctatttttttttttatcagtagtgggg

SEQ ID NO: 264520 - DNA, 120 bp, Artificial Sequence
  ENSG00000125944_50 (sequence is synthesized)
cattaagtgtgggagaatgcccatatcctataagtgggcaattatgtcagccttgtagaaaaataggactttaatattaaattattttgttcttaataggaacatataataacacttcac

SEQ ID NO: 264521 - DNA, 120 bp, Artificial Sequence
  ENSG00000125944_51 (sequence is synthesized)
ttacttttaaattggtagcagatcagcaggaaaggcctgcaagtatgaagtaatgaaatactcagggtatattttaagtgagcaaaatagacaccttataatcttaaaaagtctcttgga

SEQ ID NO: 264522 - DNA, 120 bp, Artificial Sequence
  ENSG00000125944_52 (sequence is synthesized)
gagacaataaatttgctttaactgtcatttcagtctagtattatattttctatattttgttggatagattaacatataatgcatcttaaagagatatttattgcacactaattttagtga

SEQ ID NO: 264523 - DNA, 120 bp, Artificial Sequence
  ENSG00000125944_53 (sequence is synthesized)
aaacaagaagacattgatagaatggagggcttaaacaccaaagatactatttttaaaaatcttccaaagtaatcttaacactgtaaaatgaaactttaaaaagttttagcagtttgacaa

SEQ ID NO: 264524 - DNA, 120 bp, Artificial Sequence
  ENSG00000125944_54 (sequence is synthesized)
taatggcctcaatttagagatatgttgagacaatgactttgggtcaagaggaaattacatagctgaaatattaagaccttgaacatagcagaaacataaacctatgaacaacttgtgttt

SEQ ID NO: 264525 - DNA, 120 bp, Artificial Sequence
  ENSG00000125944_55 (sequence is synthesized)
tgtgtgaaagctagggtagctgataggattagcagatattggtagaattaagagtcaatatttaaattattgctaaagattaaaatccctcatcttatagtttgtaggggattccatgat

SEQ ID NO: 264526 - DNA, 120 bp, Artificial Sequence
  ENSG00000125944_56 (sequence is synthesized)
ggtaaggtatagattgaaattaaatttagtaactaggcatttctgaccataccatataaaaaataattgtaatatggtataaacactgattaaaagtaattatggattttcatgcctgaa

SEQ ID NO: 264527 - DNA, 120 bp, Artificial Sequence
  ENSG00000125944_57 (sequence is synthesized)
gaaccttctcagtattcttacagcactgtatcttctttattggttgagaatatcagtctagaaagactttcctagatgttaaatgtgctagtcagtgtcatgaatataaacccttacttg

SEQ ID NO: 264528 - DNA, 120 bp, Artificial Sequence
  ENSG00000125944_58 (sequence is synthesized)
taagtttgctatagactagttgtacaacactagaatgaaattatgtaatacttttaagaattgtagtgattgcagggttgtgttaaggtaacattttatgcatgtgtcagtgacagaaag

SEQ ID NO: 264529 - DNA, 120 bp, Artificial Sequence
  ENSG00000125944_59 (sequence is synthesized)
gatcagggtataaaacttagcactaaatagcatgctccttaggaagttttaaggtaagcagtaggaatattcatgtaattctgatgagtttatgtaagttaaggaaaatgcaatgccagt

SEQ ID NO: 264530 - DNA, 120 bp, Artificial Sequence
  ENSG00000125944_60 (sequence is synthesized)
ttgttgactttaaacactaaaaacaaaatacattttgtggaaccaacaaaggagacattctggggaaaaacttaaattgctcaaatttaaataagggctctcactttatatagtagattt

SEQ ID NO: 264531 - DNA, 120 bp, Artificial Sequence
  ENSG00000125944_61 (sequence is synthesized)
gtcaggatcccatgaacattgcttttcttgatttctcacatatgagggttgggcaaaagggacttctctagcctcttcgataatgtaggtagacttgtacttagtgaatcccattataat

SEQ ID NO: 264532 - DNA, 120 bp, Artificial Sequence
  ENSG00000125944_62 (sequence is synthesized)
gttaggtactatgttctaagactatttctataattggactgaaggctcctgcaaacataaattgctgatatggatatagtaacataagaaataccaaaatagggacatttgcaagacctt

SEQ ID NO: 264533 - DNA, 120 bp, Artificial Sequence
  ENSG00000125944_63 (sequence is synthesized)
ttccatttaatcatcagtttaataaaaatcatgcttttggtacagtgttcatgtaccataactgtattggaatatttgtacgatgttaaatatttttaataaaatttaacatgttcaaaa

SEQ ID NO: 264534 - DNA, 120 bp, Artificial Sequence
  ENSG00000125944_64 (sequence is synthesized)
gtctcagtccatcaggggggggagggggtggcgcgcgcgccatttctagtcgttttcaaagcgcctcgcgctgattctcacgggcccggctgccggcccccgctctgccctgcagcataa

SEQ ID NO: 264535 - DNA, 120 bp, Artificial Sequence
  ENSG00000125944_65 (sequence is synthesized)
atggaaattcacttgaagtaatgtgtgattcctctgtaatcagtgccattaatagcaaaaaatatttaaaaggaagatgattgggacctaatagtctataaacaaattgagtaagaaagc

SEQ ID NO: 264536 - DNA, 120 bp, Artificial Sequence
  ENSG00000125944_66 (sequence is synthesized)
attaagaaggactagtaatgtattctgccttgtttctttcaaatgaagactgttaaactgagttacggggaagaaaaagtgaataccctattgtttcaaggtaataaagagtaaacagta

SEQ ID NO: 264537 - DNA, 120 bp, Artificial Sequence
  ENSG00000125944_67 (sequence is synthesized)
gccttgcttgagagaactggttatactctggatgtaaccacaggacagaggaagtatggtggtcctccaccagacagtgtgtactctggcgtgcaacctggaattggaacggagtgtgac

SEQ ID NO: 264538 - DNA, 120 bp, Artificial Sequence
  ENSG00000125944_68 (sequence is synthesized)
gctgccgggatcgcgtctcagtccatcaggggggggagggggtggcgcgcgcgccatttctagtcgttttcaaagcgcctcgcgctgattctcacgggcccggctgccggcccccgctct

SEQ ID NO: 264539 - DNA, 120 bp, Artificial Sequence
  ENSG00000125944_69 (sequence is synthesized)
gtacattttgggttaagcattgtgagggaaacctaggcttttttgtgttagtatcttcttgaattttacagataatctcactcagtaacctcatttgtgcttcaaatccttgaaattgtc

SEQ ID NO: 264540 - DNA, 120 bp, Artificial Sequence
  ENSG00000125944_70 (sequence is synthesized)
gtataagaacagtggaagacctgtatgttgtatgctacatgtttattttaaaattctaatcctgagaagttaatctttgtctggctcgtattaatactggcatttttccccggctatgga

SEQ ID NO: 264541 - DNA, 120 bp, Artificial Sequence
  ENSG00000125944_71 (sequence is synthesized)
ctacctcttcttttaaaaaattagtttaaaggaaaaaaactgcttgtggcagagtttcagaagcccaagtataaagcaaaagttttctcccacccccttgtgcagtaagttattttaaaa

SEQ ID NO: 264542 - DNA, 120 bp, Artificial Sequence
  ENSG00000125945_0 (sequence is synthesized)
cttccctctccaaggctacagcgagctgggagctcttccccacgcagaatgcctgctttccccagtgctcgacttccattgtctaattccctcatcctggctggggaaagggagagctgc

SEQ ID NO: 264543 - DNA, 120 bp, Artificial Sequence
  ENSG00000125945_1 (sequence is synthesized)
gagtcctcccgttccgaggaactccagctgaatgcagcttagttgctggtggtttctcggccagcctctgtggtctcagggatctgcctatgagcctgtggtttctgagctgcctgcgag

SEQ ID NO: 264544 - DNA, 120 bp, Artificial Sequence
  ENSG00000125945_2 (sequence is synthesized)
tctgaggcctcgggaatctgagtctttaggatcagcctacgatatctgggcttcgcctgcaagtctacgaattcgagatctacctgcgggtctgagacctccgggacctgcccgtgctct

SEQ ID NO: 264545 - DNA, 120 bp, Artificial Sequence
  ENSG00000125945_3 (sequence is synthesized)
ctagaatcttcctgaacgccaggtctgagagaacgctgcggctctggaacccgttcgcggtctctcaggttttggagacgacgatctagtggatcttttgcgggacaggagcgctgtctg

SEQ ID NO: 264546 - DNA, 120 bp, Artificial Sequence
  ENSG00000125945_4 (sequence is synthesized)
ctagctgcttttcctgctctctctccctggaggcgaacccttgtgctcgagatggcagccaccctgctcatggctgggtcccaggcacctgtgacgtttgaagatatggccatgtatctc

SEQ ID NO: 264547 - DNA, 120 bp, Artificial Sequence
  ENSG00000125945_5 (sequence is synthesized)
acccgggaagaatggagacctctggacgctgcacagagggacctttaccgggatgttatgcaggagaattatggaaatgttgtctcactagattttgagatcaggagtgagaacgaggta

SEQ ID NO: 264548 - DNA, 120 bp, Artificial Sequence
  ENSG00000125945_6 (sequence is synthesized)
aatcccaagcaagagattagtgaagatgtacaatttgggactacatctgaaagacctgctgagaatgctgaggaaaatcctgaaagtgaagagggctttgaaagcggagataggtcagaa

SEQ ID NO: 264549 - DNA, 120 bp, Artificial Sequence
  ENSG00000125945_7 (sequence is synthesized)
agacaatggggagatttaacagcagaagagtgggtaagctatcctctccaaccagtcactgatctacttgtccacaaagaagtccacacaggcatccgctatcatatatgttctcattgt

SEQ ID NO: 264550 - DNA, 120 bp, Artificial Sequence
  ENSG00000125945_8 (sequence is synthesized)
ggaaaggccttcagtcagatctcagaccttaatcgacatcagaagacccacactggagacagaccctataaatgttatgaatgtggaaaaggcttcagtcgcagctcacaccttattcag

SEQ ID NO: 264551 - DNA, 120 bp, Artificial Sequence
  ENSG00000125945_9 (sequence is synthesized)
catcaaagaacacatactggggagaggccttatgactgtaacgagtgtgggaaaagttttggaagaagttctcacctgattcagcatcagacaatccacactggagagaagcctcacaaa

SEQ ID NO: 264552 - DNA, 120 bp, Artificial Sequence
  ENSG00000125945_10 (sequence is synthesized)
tgtaatgagtgtggaaaaagtttctgccgtctctctcacctaatccaacaccaaaggacccacagtggtgagaaaccctatgagtgtgaggagtgtgggaaaagcttcagccggagctct

SEQ ID NO: 264553 - DNA, 120 bp, Artificial Sequence
  ENSG00000125945_11 (sequence is synthesized)
cacctagctcagcaccagaggacccacacgggtgagaaaccttatgaatgtaacgaatgtggccgaggcttcagtgagagatctgatctcatcaaacactatcgagtccacacaggggag

SEQ ID NO: 264554 - DNA, 120 bp, Artificial Sequence
  ENSG00000125945_12 (sequence is synthesized)
aggccctacaagtgtgatgagtgtgggaagaatttcagtcagaactccgaccttgtgcgtcatcgcagagcccacacgggagagaagccataccactgtaacgaatgtggggaaaatttc

SEQ ID NO: 264555 - DNA, 120 bp, Artificial Sequence
  ENSG00000125945_13 (sequence is synthesized)
agccgcatctcacacttggttcagcaccagagaactcacactggagagaagccatatgaatgcaatgcttgtgggaaaagcttcagccggagctctcatctcatcacacaccagaaaatt

SEQ ID NO: 264556 - DNA, 120 bp, Artificial Sequence
  ENSG00000125945_14 (sequence is synthesized)
cacactggagagaagccttatgagtgtaatgagtgttggcgaagctttggtgaaaggtcagatctaattaaacatcagagaacccacacaggggagaagccctacgagtgtgtgcagtgt

SEQ ID NO: 264557 - DNA, 120 bp, Artificial Sequence
  ENSG00000125945_15 (sequence is synthesized)
gggaaaggtttcacccagagctccaacctcatcacacatcaaagagttcacacgggagagaaaccttatgaatgtaccgaatgtgagaagagtttcagcaggagctcagctcttattaaa

SEQ ID NO: 264558 - DNA, 120 bp, Artificial Sequence
  ENSG00000125945_16 (sequence is synthesized)
cataagagagttcatacggactaagctgtaattatgatggctgagaaatgattcatttgaagatacaattttatttgatatcaatgaacgccctcaagactgagctgcttttatcatact

SEQ ID NO: 264559 - DNA, 120 bp, Artificial Sequence
  ENSG00000125945_17 (sequence is synthesized)
ctcctagttgtgggccacgatttaaaccatcagagatgacaagccatttgaaattctgaccctcagctttgggaatgttatctcctccaaaatggtgatttttattcactcaatgggtta

SEQ ID NO: 264560 - DNA, 120 bp, Artificial Sequence
  ENSG00000125945_18 (sequence is synthesized)
aactggaaatctgaagaccaggggacaaatgctggtgaatgcttaggcctggaaatggagtaaatctttcaatgttattttctcccatccttggcccaaggaactatgctaagtgaaacg

SEQ ID NO: 264561 - DNA, 120 bp, Artificial Sequence
  ENSG00000125945_19 (sequence is synthesized)
tgggactgtaatagggtggtaatggctgctttggaaaaaggcaactagagactctgcctaaattgccacacctattcacacaccatagtagttgggcacacacatcttcccttccaaagg

SEQ ID NO: 264562 - DNA, 120 bp, Artificial Sequence
  ENSG00000125945_20 (sequence is synthesized)
gctttttccttgagttgctcatgcatttgtatcttttccatcttcctgagggcaagattttgcacgatgaaggcaatgattgtaacttttctccttctcattgtttctaattagctcctt

SEQ ID NO: 264563 - DNA, 120 bp, Artificial Sequence
  ENSG00000125945_21 (sequence is synthesized)
taaagcttgcatctttgtgaaggctaactgaagatacggttggaaaggaaaaatgagacacaggtttggggaccaaggacccatcaatgatggtgactttagcagaagatgcccacagtt

SEQ ID NO: 264564 - DNA, 120 bp, Artificial Sequence
  ENSG00000125945_22 (sequence is synthesized)
attactgccattaatcagatttatgaattttctttggggatcactatagggaatattgtatagaaaatatcttcaagaaaagataggaccatcagtgacagttaagtgtaaggagcaagt

SEQ ID NO: 264565 - DNA, 120 bp, Artificial Sequence
  ENSG00000125945_23 (sequence is synthesized)
ggaattgagtccttcagggaaggaaccacagagtcccttcccaaggaatgtaggtcgtttctgtgttctttcccttctaatctttaagatcaactcttcctatcctgctaactctaagat

SEQ ID NO: 264566 - DNA, 120 bp, Artificial Sequence
  ENSG00000125945_24 (sequence is synthesized)
ttgataagggccacatcccagtgtttatcttagcttgcatcagggcatgtgtatgtacagtaatgtgtattcctgtggtttttctaatagaaactgaatttacagagacttagcatgttc

SEQ ID NO: 264567 - DNA, 120 bp, Artificial Sequence
  ENSG00000125945_25 (sequence is synthesized)
ttgggtgatgtgagtcatgtgacagaagtacagacataactccaatgtgagaaatgtccttttttcattatggaaaataatttaaacactagtgctttagtgtgcactctcctgtaaggt

SEQ ID NO: 264568 - DNA, 120 bp, Artificial Sequence
  ENSG00000125945_26 (sequence is synthesized)
ctgtctttgtacagagctaagcacttgtttgtatgtgtttgtcaattgtggaagataatgaccagacaaataggtcgattgtcctattctcagaatgaattatcttctatggtaatgaag

SEQ ID NO: 264569 - DNA, 120 bp, Artificial Sequence
  ENSG00000125945_27 (sequence is synthesized)
aactctttggcttagtcagaaggaattaacgaacctcggtaggaatgtatttccatcctcccaccctacagatataagaggttaaaataacagttcgcccaatttaagcccagtagtgtc

SEQ ID NO: 264570 - DNA, 120 bp, Artificial Sequence
  ENSG00000125945_28 (sequence is synthesized)
agttttcctaatctcagtccaggtaggaattaagaaatatctcaagtgttgatgctatccaagcatgttggggtggaagggaattggtgcccagaaaatgggactggagtgaggaatatc

SEQ ID NO: 264571 - DNA, 120 bp, Artificial Sequence
  ENSG00000125945_29 (sequence is synthesized)
ttttcttttgagagtacccccagtttatttctactgtgctttattgctactgttctttattgtgaatgttgtaacattttaaaaatgttttgccatagctttttaggacttggtgttaaa

SEQ ID NO: 264572 - DNA, 120 bp, Artificial Sequence
  ENSG00000125945_30 (sequence is synthesized)
ggagccagtggtctctctgggtgggtactataatgagttattgtgacccacagctgtgtgggaccacatcacttgttaataacacaacctttaaagtaacccatcttccaggggggttcc

SEQ ID NO: 264573 - DNA, 120 bp, Artificial Sequence
  ENSG00000125945_31 (sequence is synthesized)
ttcatgttgccactcctttttaaggacaaactcaggcaaggagcatgtttttttgttatttacaaaatctagcagactgtgggtatccatattttaattgtcgggtgacacatgttcttg

SEQ ID NO: 264574 - DNA, 120 bp, Artificial Sequence
  ENSG00000125945_32 (sequence is synthesized)
gtaactaaactcaaatatgtcttttctcatatatgttgctgatggttttaataaatgtcaaagttctcctgttgcttctgtgagccactatgggtatcagcttgggagtggccatagatg

SEQ ID NO: 264575 - DNA, 120 bp, Artificial Sequence
  ENSG00000125945_33 (sequence is synthesized)
accgcatttccatgacctaactgtatttcacccccttttccttccctactgttcttgccccaccccaaccagttcctgctgctgcttttggcttcttggaggtgaagggcttaaaacaag

SEQ ID NO: 264576 - DNA, 120 bp, Artificial Sequence
  ENSG00000125945_34 (sequence is synthesized)
gcttctaagcacccagctatctccatacatgaacaatctagctgggaaacttaagggacaagggccacaccagctgtctcctctttctgccaattgttgcccgtttgctgtgttgaactt

SEQ ID NO: 264577 - DNA, 120 bp, Artificial Sequence
  ENSG00000125945_35 (sequence is synthesized)
tgtatagaactcatgcatcagactcccttcactaatgctttttgcatgccttctgctcccaagtccctggctgcctctgcacatcccgtgaacactttgtgcctgttttctatggttgtg

SEQ ID NO: 264578 - DNA, 120 bp, Artificial Sequence
  ENSG00000125945_36 (sequence is synthesized)
gagaattaatgaacaaatcaatatgtagaacagttttccttatggtattggtcacagttatcctagtgtttgtattattctaacaatattctataattaaaaatataatttttaaagtca

SEQ ID NO: 264579 - DNA, 120 bp, Artificial Sequence
  ENSG00000125945_37 (sequence is synthesized)
gccggaaaggacccggcctcgagatggcagagcggaggcgttccctgggctgagctgagcacctcctccctgagacagcagcggtctaacccccggcgcgggagggacccagccaggggg

SEQ ID NO: 264580 - DNA, 120 bp, Artificial Sequence
  ENSG00000125945_38 (sequence is synthesized)
ctgtcctagtagattccggcattgcctccaccccgctgtggcggagacgcagagggcgggtcgcgctcgagggtcagggaggagagtgacccggccctggtccagggccctccctgcccg

SEQ ID NO: 264581 - DNA, 120 bp, Artificial Sequence
  ENSG00000125952_0 (sequence is synthesized)
agtgaggaggtggttcttgcccgtgttgtgtgtgtgtgtgagtgagagagcgagtgagtgagtgagtgagtgtgtgtgtgggggggactcggcttgttgttgtcggtgacttccccctcc

SEQ ID NO: 264582 - DNA, 120 bp, Artificial Sequence
  ENSG00000125952_1 (sequence is synthesized)
ccttcaccccttcccctccccgccgccgctgcagtggccgctccctgggccgtaggaaatgagcgataacgatgacatcgaggtggagagcgacgaagagcaaccgaggtttcaatctgc

SEQ ID NO: 264583 - DNA, 120 bp, Artificial Sequence
  ENSG00000125952_2 (sequence is synthesized)
ggctgacaaacgggctcatcataatgcactggaacgaaaacgtagggaccacatcaaagacagctttcacagtttgcgggactcagtcccatcactccaaggagagaaggcatcccgggc

SEQ ID NO: 264584 - DNA, 120 bp, Artificial Sequence
  ENSG00000125952_3 (sequence is synthesized)
ccaaatcctagacaaagccacagaatatatccagtatatgcgaaggaaaaaccacacacaccagcaagatattgacgacctcaagcggcagaatgctcttctggagcagcaagtccgtgc

SEQ ID NO: 264585 - DNA, 120 bp, Artificial Sequence
  ENSG00000125952_4 (sequence is synthesized)
actggagaaggcgaggtcaagtgcccaactgcagaccaactacccctcctcagacaacagcctctacaccaacgccaagggcagcaccatctctgccttcgatgggggctcggactccag

SEQ ID NO: 264586 - DNA, 120 bp, Artificial Sequence
  ENSG00000125952_5 (sequence is synthesized)
ctcggagtctgagcctgaagagccccaaagcaggaagaagctccggatggaggccagctaagccactcggggcaggccagcaataaaaactgtctgtctccatcgtctcatcctcctttc

SEQ ID NO: 264587 - DNA, 120 bp, Artificial Sequence
  ENSG00000125952_6 (sequence is synthesized)
agttcgttggtagagccctcagaaccatttaagagactctttatttttctctttctcccttttttttttaaatttttatttttacgtagaagctcttggacaacagctctcgttctcctt

SEQ ID NO: 264588 - DNA, 120 bp, Artificial Sequence
  ENSG00000125952_7 (sequence is synthesized)
ccccatttccactgtatattttttaatgtattcccttcagggattccctgtccccaacaggaatttttaaaccaaaacaccccaacttggcagctttttctgtggaggacagacggccgg

SEQ ID NO: 264589 - DNA, 120 bp, Artificial Sequence
  ENSG00000125952_8 (sequence is synthesized)
gtggcctcctggcccgccctcacctctgatagactttgtgaatctgaactgctctactttgagaagatgaccggtttggagtaatcagaatgaaccctcctcctttttaagggttttttt

SEQ ID NO: 264590 - DNA, 120 bp, Artificial Sequence
  ENSG00000125952_9 (sequence is synthesized)
tttttcctttttctaaaaagctatgtatcgctcctattgaaagaccagatccttagagaagtttgtggtataaaaaggaagtggggacagattcgcagcacagagtcgctggcatgtttc

SEQ ID NO: 264591 - DNA, 120 bp, Artificial Sequence
  ENSG00000125952_10 (sequence is synthesized)
actcctgcttctctcagccagctgtttaagcctgcggcgccagcctcacggagggccgtgtgacactctcgtggtatgtatgggagatggcagcagtgaagcagcagccaccagggagtg

SEQ ID NO: 264592 - DNA, 120 bp, Artificial Sequence
  ENSG00000125952_11 (sequence is synthesized)
gccatttggggttgggacagggagggtgttttgggtggcatagaggttttgtattgagggccagtgatgatgttttgatatttatttcctgctacttaaatttgaatctgagtgaattgt

SEQ ID NO: 264593 - DNA, 120 bp, Artificial Sequence
  ENSG00000125952_12 (sequence is synthesized)
acctatttctgatgatgtcggtcttgcaaagcgacagattcataaagtaatgatgaaatctttctttcttcccgtgtgtatttctaagaaatagagccaactgattttgtatgtaaatac

SEQ ID NO: 264594 - DNA, 120 bp, Artificial Sequence
  ENSG00000125952_13 (sequence is synthesized)
caagagcaatttacctggtactaaacccgcaccccagtgcggacccttcccagccctcatcccacttcctttcctactgtcctggaacctgtctccattgtgtgatccagccctggttct

SEQ ID NO: 264595 - DNA, 120 bp, Artificial Sequence
  ENSG00000125952_14 (sequence is synthesized)
ggctgtggtcagcagatgccagtgaagggttttgtgtgtttaggcctcatttctttgtctttttcctactccgttcctggcatttgctgatttctagtgtatactctgtagtctcagttc

SEQ ID NO: 264596 - DNA, 120 bp, Artificial Sequence
  ENSG00000125952_15 (sequence is synthesized)
gtgtttgattccattccatggaaataaaaagtatgttgtacatactgccgaagaattgtcttgcaagttaaggcttccccctttactataagactataaataaaaacttattttatcctt

SEQ ID NO: 264597 - DNA, 120 bp, Artificial Sequence
  ENSG00000125952_16 (sequence is synthesized)
caagccgggctggcgtcgcctggatgcggtttcttccgggatttgtagtttttctggagctacccgggccgtctgttagagggacaagaactacaagtctcggctgccccagcgctgcga

SEQ ID NO: 264598 - DNA, 120 bp, Artificial Sequence
  ENSG00000125952_17 (sequence is synthesized)
ggagagaagggaacaaagatgaagttaaccctcccacctgtctttccttatgaacacttgccttttccaactgttttctgccatggctaatcagaaaaagtttcttaaggaaatggtggc

SEQ ID NO: 264599 - DNA, 120 bp, Artificial Sequence
  ENSG00000125952_18 (sequence is synthesized)
tttcaagctaccaagtgcacaagaaaaaagaatgcaagatttaaaaaatgattgttttgaccccttacacaaatgtcttactcctggctttaattaagctgcttgagggctgatagctct

SEQ ID NO: 264600 - DNA, 120 bp, Artificial Sequence
  ENSG00000125952_19 (sequence is synthesized)
gccttaccctggtaatcagcaaaatggtcctgtggctggggaggccctggcagcaggaagccttcaaggagccatgggtctgtgctgactctggccttacaaccttccagcctcctttgc

SEQ ID NO: 264601 - DNA, 120 bp, Artificial Sequence
  ENSG00000125952_20 (sequence is synthesized)
tggcattgatggggttccatttttgaatgaactagtttaatgtggatccaaatttattgtgcatattctttcgttttggttttcaaaagatggcttattcacatggaaatgtacaccagt

SEQ ID NO: 264602 - DNA, 120 bp, Artificial Sequence
  ENSG00000125952_21 (sequence is synthesized)
ttagccctgggccctccctttaccttcatatgtgtaaaagcttacacaggtttcagaaaataaatggtttcattttctctaaaataactagtacaaaataaaacagatgtcagttgttga

SEQ ID NO: 264603 - DNA, 120 bp, Artificial Sequence
  ENSG00000125952_22 (sequence is synthesized)
gtgctccagccaggtcaggctttggcacctgggcctgcagagtcagagccagtcatggagtatgtgctcagtagcaggcttggtcctgcttcttggggcctgagtaactgagtgttagag

SEQ ID NO: 264604 - DNA, 120 bp, Artificial Sequence
  ENSG00000125952_23 (sequence is synthesized)
ccgtcctgaggaaggacctgaggcgccagtgaggagacagtggaagctaggaagttggacatctggagacttgtatcttttctggcctgacctctccccttcttggggctcaggtgctct

SEQ ID NO: 264605 - DNA, 120 bp, Artificial Sequence
  ENSG00000125952_24 (sequence is synthesized)
gcctgcagtagggatcacacctggcatcaggtgtctgaaaagagctttgaggtccttggagtggaatgtgctgtgtaagtaccagagactccaggtgttcagggacagtgagccctcccc

SEQ ID NO: 264606 - DNA, 120 bp, Artificial Sequence
  ENSG00000125952_25 (sequence is synthesized)
attgtcaatggtagtccaatcagggcagcctatgggctaggcccatgctgttctcaatgctcacacccgccttttcctacaaccacaggggaaagcgagagctgatcaagttctttgttc

SEQ ID NO: 264607 - DNA, 120 bp, Artificial Sequence
  ENSG00000125952_26 (sequence is synthesized)
ctggggaattcacttctcttcctccctcatggaagatgcaagtaaaaggaaatgcaagtaaccacctgggttagaaaacctcaaataaaataaaataaaataaattaaatgggttgacct

SEQ ID NO: 264608 - DNA, 120 bp, Artificial Sequence
  ENSG00000125952_27 (sequence is synthesized)
tccaggctcaagctgagctgaaccaagggatgggcagtgggtggtgtcagtgggttggttactgggccaggcagcctgcatgtaggggctatttgaaaagcccaggtattttatgtgtat

SEQ ID NO: 264609 - DNA, 120 bp, Artificial Sequence
  ENSG00000125952_28 (sequence is synthesized)
tggtgacttgcttccaagtgtccagcttgtcattccaagtggatcttgtacacgagagctaagccaaaactgttctttggctgatacgtcttatgtcatcctttcctgctgttgtgtggc

SEQ ID NO: 264610 - DNA, 120 bp, Artificial Sequence
  ENSG00000125952_29 (sequence is synthesized)
ctcacaccttgtggagcctcatgctcctgggccagcttctcctctgttattgcactgctgaatcccacagggagctcacgctccagtctctccacggggcttccacggcaggacggtgac

SEQ ID NO: 264611 - DNA, 120 bp, Artificial Sequence
  ENSG00000125952_30 (sequence is synthesized)
atcacaagccttctcttcagagttgggtgggattgcagagtgtctgctggctcccaggtccagctgggaaaggcgggagggaaatgaagtgtgtgagtgaacagccacccgaagggagct

SEQ ID NO: 264612 - DNA, 120 bp, Artificial Sequence
  ENSG00000125952_31 (sequence is synthesized)
aatctgagcccaaaccttctactccagtgctgaacatggtgaaggattaagcctcctatcaagaaaaacaagcctgacagcctgtagactgatagagggaggtgtgccttctctccagaa

SEQ ID NO: 264613 - DNA, 120 bp, Artificial Sequence
  ENSG00000125952_32 (sequence is synthesized)
agcctacttctgcaggaacccaggagtatggaatgagccatgcaaagtctgattcaaaaaataacccaatgggcatgcacccccagtcactcatccggaatccggctggcagcctggcag

SEQ ID NO: 264614 - DNA, 120 bp, Artificial Sequence
  ENSG00000125952_33 (sequence is synthesized)
cccggcagcccatggctcccatgcacagtgcttgagagcttcattgtttcctgtctgctggtgccatcaacagctctggggtggcaggggcagatcttgggctaaaggacagtggccaac

SEQ ID NO: 264615 - DNA, 120 bp, Artificial Sequence
  ENSG00000125952_34 (sequence is synthesized)
agctttgggccaaaaggccacaacaagaccagccagctaagaggaggaatgtcatgtccacagcgaatacctactgcagcaaggctgtaggagactttggagaggaaggaccctgtttcc

SEQ ID NO: 264616 - DNA, 120 bp, Artificial Sequence
  ENSG00000125952_35 (sequence is synthesized)
aacaacttgaccatgtttcccatccagggacctctgtgcagagagtggtggtgagcaagtatttccaactgggagcccccacagagtcagtggctggtctgtgcacttgttactggactc

SEQ ID NO: 264617 - DNA, 120 bp, Artificial Sequence
  ENSG00000125952_36 (sequence is synthesized)
ctagcactgtgcttggcttgtgattcacaaatacttaccactgtgttccagttgcctacagtatccagtacggtgacaagctgcacaggtctaagtcaccacacctggggctgaagcaag

SEQ ID NO: 264618 - DNA, 120 bp, Artificial Sequence
  ENSG00000125952_37 (sequence is synthesized)
atctttctctccccacctccagctcttttcccttacaaatgaccagggtgcaagtcgagaggcagaggcacctcctggtgcaactccaccacagtcttacagagaactcatcttggtggg

SEQ ID NO: 264619 - DNA, 120 bp, Artificial Sequence
  ENSG00000125952_38 (sequence is synthesized)
acccaaagcccagccttggcatgaagcagacttattccacccatcggagggcacccagtctggtgactgaatggtggcgtgcaagtgggagtcagcagtggctctggatgccgtaatact

SEQ ID NO: 264620 - DNA, 120 bp, Artificial Sequence
  ENSG00000125952_39 (sequence is synthesized)
cagatgccattcatctctgtgtgatcgtcctggctggagagctggtgaggagggactgcttcctcctggcatgcactgttcaccaaccacaccacgtgggctgatagatttttggtttga

SEQ ID NO: 264621 - DNA, 120 bp, Artificial Sequence
  ENSG00000125952_40 (sequence is synthesized)
caggtgtggaaagaatttttaaaaccagccactgtgttctccaaacccagagccattggttttgtttgacaagaaagtaccaagagaaccacagctccactgaggctaaggcttgtgtag

SEQ ID NO: 264622 - DNA, 120 bp, Artificial Sequence
  ENSG00000125952_41 (sequence is synthesized)
cacagaatgcagtatgtattgaaacgtataaaccttgtctgactggggagatgggtgagcaaagagctgccgggacccaggtcctctagtcggttgcaggctctgccgatgtctcatcct

SEQ ID NO: 264623 - DNA, 120 bp, Artificial Sequence
  ENSG00000125952_42 (sequence is synthesized)
taagctcctcaaaacctgggactggcttctgtagaaagtatgtagtggcctggatcaccttgtctggtccaatgttgtacactgggtgagtgggctgctgcaaagagaagaaaaggtgcc

SEQ ID NO: 264624 - DNA, 120 bp, Artificial Sequence
  ENSG00000125952_43 (sequence is synthesized)
agttaatcaccccggtggtccttgaaaacataacacatcctttgctccatgaaaggcacttctaagaatttagtataaggaatcagagatacacacaaagcccaaaggttcaaaaatggt

SEQ ID NO: 264625 - DNA, 120 bp, Artificial Sequence
  ENSG00000125952_44 (sequence is synthesized)
gtatttgctaaaactatctagtacatgggacacaggttaatatacagccattataaacacgcatttaaatatttaacgatacaggcaaatacttacaacatattatgtgagaaaacagta

SEQ ID NO: 264626 - DNA, 120 bp, Artificial Sequence
  ENSG00000125952_45 (sequence is synthesized)
atgtagtcagagatattcaggtagcatggttgccttatttttgactgtttggaggatcactgcacaccttacgtactccagtttatccttaacaaaatatgtcagatataatggagctat

SEQ ID NO: 264627 - DNA, 120 bp, Artificial Sequence
  ENSG00000125952_46 (sequence is synthesized)
tgactccccaccctccgcttcctctgccgccggcattttctttcttattattgaatgttaagtgtaaaaataacttctatattttctatttttttttttctctcttattccaggaagagc

SEQ ID NO: 264628 - DNA, 120 bp, Artificial Sequence
  ENSG00000125952_47 (sequence is synthesized)
ctgcctgcagtagggatcacacctggcatcaggtgtctgaaaagagctttgaggtccttggagtggaatgtgctgtgggaaagcgagagctgatcaagttctttgttcctggggaattca

SEQ ID NO: 264629 - DNA, 120 bp, Artificial Sequence
  ENSG00000125962_0 (sequence is synthesized)
gaacttcgaaagactggaacacttccgcctgtcaggccagaagagatttcctgacaccacagctggaaacccatgtgcatttcagttcaggaaagaatgcgccgttttccctatatccgg

SEQ ID NO: 264630 - DNA, 120 bp, Artificial Sequence
  ENSG00000125962_1 (sequence is synthesized)
aattcgtccctgcgcattccaatacctgaagcggccacagggtacaggacagggagccctccgacagaaaagagtcgcggcgctaaacaaagcctgatatcactccgcttccataagccg

SEQ ID NO: 264631 - DNA, 120 bp, Artificial Sequence
  ENSG00000125962_2 (sequence is synthesized)
gatccccataaactacgctctagctcctcccactgccgttgtgggtaacgcggacgtggaagaacctcgtctgcggaggaaaaggtgccgagtcaatccccatacacagccgccgccatt

SEQ ID NO: 264632 - DNA, 120 bp, Artificial Sequence
  ENSG00000125962_3 (sequence is synthesized)
gcctcgagtccttgtgtctgactgtctgttcctgctgctgtatgacacagcacctcgaggcaaggaaataagaaaactgcctctgatccaagcagagaaggtagatctgtccccaggtct

SEQ ID NO: 264633 - DNA, 120 bp, Artificial Sequence
  ENSG00000125962_4 (sequence is synthesized)
gtggaactgtcagttgtgaagttttgtaaaatggtcacccaacttaaaactaggaaattacgaagaagagaaaattgccctgtatctgttaaggtctgcctgtagatctgctgtagggct

SEQ ID NO: 264634 - DNA, 120 bp, Artificial Sequence
  ENSG00000125962_5 (sequence is synthesized)
tgtcaccattggaagcaaggtcctacttcagtggcagatctggtggccttggagtggctgaagaccaccaccctccacagggctgggcccatgcacagccatccttccctaccttgagtg

SEQ ID NO: 264635 - DNA, 120 bp, Artificial Sequence
  ENSG00000125962_6 (sequence is synthesized)
agcttcctctgcatgttttctatatcactggcagagcctgtagttggaaaggggacagagtgactactggactttgtgtgaaaacaccaaccgggacaaaacttcagtcaaggctgagac

SEQ ID NO: 264636 - DNA, 120 bp, Artificial Sequence
  ENSG00000125962_7 (sequence is synthesized)
gggtgggggtatataacttgtccttacgttaaacttggaacatggttgactctgggacagaagcaagggctagaggaaaggctgaggctggcctgcaagatggaatcagtggtcctgcca

SEQ ID NO: 264637 - DNA, 120 bp, Artificial Sequence
  ENSG00000125962_8 (sequence is synthesized)
ctgctagagtgaatggtaaaacccaggccgaggcagtggctgaggcagaactgaaaacagaatcagtgacccaggccaaagctggtgatggagcaatgaccaggacacatacagtgacct

SEQ ID NO: 264638 - DNA, 120 bp, Artificial Sequence
  ENSG00000125962_9 (sequence is synthesized)
acagggaggctatggctgtgacaagggaagtgatcaaggtggaagatacaactaagactagagtcatggttgagactaagacaaaacccctggcagaacgcagtatagtgccacaaacca

SEQ ID NO: 264639 - DNA, 120 bp, Artificial Sequence
  ENSG00000125962_10 (sequence is synthesized)
agtcaaaggccatgcctatgtctagggtcagtactgtaaccaagtctgaagtcaaggttgttgctgtcattgaggcaaatattaggtcctatgccaagtcacatgataaggccaatactg

SEQ ID NO: 264640 - DNA, 120 bp, Artificial Sequence
  ENSG00000125962_11 (sequence is synthesized)
ggtccagacctgacagaagggaagagaccagcattgggatgaaatccagtgatgaggatgaagaaaatatatgctcctggttctggactggagaagagcctagtgtagggtcctggttct

SEQ ID NO: 264641 - DNA, 120 bp, Artificial Sequence
  ENSG00000125962_12 (sequence is synthesized)
tcttcaagtttataagcccctacctaagatccaggaaaagcccaagcccacacacaaacccacacttactataaaacaaaaggtaatagcatggtcaagggccaggtatattgtcctagt

SEQ ID NO: 264642 - DNA, 120 bp, Artificial Sequence
  ENSG00000125962_13 (sequence is synthesized)
tccagttgaaggaggggagcaatccttgcctccagaaggaaactggaccctggttgagaccttgattgaaactcctctggggattcgacctttgaccaagatcccaccttatcatgggcc

SEQ ID NO: 264643 - DNA, 120 bp, Artificial Sequence
  ENSG00000125962_14 (sequence is synthesized)
ttattaccagaccttagctgagatcaaaaaacagattaggcaaagggaaaagtatgggcctaatccgaaggcctgccactgcaaatcacgtggctttagtttagagcctaaagagtttga

SEQ ID NO: 264644 - DNA, 120 bp, Artificial Sequence
  ENSG00000125962_15 (sequence is synthesized)
taaacttgttgccctccttaagttaactaaggatcctttcattcatgaaatagctacaatgataatgggcatcagtcctgcttatccatttactcaagatataattcatgatgtaggtat

SEQ ID NO: 264645 - DNA, 120 bp, Artificial Sequence
  ENSG00000125962_16 (sequence is synthesized)
tactgttatgattgaaaacttggtcaataatcccaatgttaaagaacaccctggagctttaagtatggtggatgacagctctgagtcttccgaagaaccaaaatcaggggagtcatatat

SEQ ID NO: 264646 - DNA, 120 bp, Artificial Sequence
  ENSG00000125962_17 (sequence is synthesized)
acatcaagtttgtaaaggcataatctcttgccccttgaactcccctgtgcagctggctggactgaaattactagggcacttgagtataaaatttgaagatcactatgtgattaccagtta

SEQ ID NO: 264647 - DNA, 120 bp, Artificial Sequence
  ENSG00000125962_18 (sequence is synthesized)
tattccagatttcctcaccttgttaaacaagggaagtgtcaaaaccaagttttatgttttaaaagtgttttcgtgtttgtctaaaaatcacgccaatacaagagaattgatcagtgccaa

SEQ ID NO: 264648 - DNA, 120 bp, Artificial Sequence
  ENSG00000125962_19 (sequence is synthesized)
agtactgtcatcattggttgcaccctttaacaagaatgagtcaaaggccaatattcttaatattattgaaatatttgagaatataaattttcagttcaaaacaaaggcaaagctatttac

SEQ ID NO: 264649 - DNA, 120 bp, Artificial Sequence
  ENSG00000125962_20 (sequence is synthesized)
caaggaaaagttcactaaatctgagcttatttcaatattccaggaagcaaaacagtttggtcagaaactccaagacttagcagagcacagtgatcccgaagtgagagataaagtcatacg

SEQ ID NO: 264650 - DNA, 120 bp, Artificial Sequence
  ENSG00000125962_21 (sequence is synthesized)
attaatactaaaactctgaatacccctctgttctcataaagcctcaaacagttttttggagttgcaatatgaaaccaatgcatattgtaattataaattcaatacttatgttttccatgt

SEQ ID NO: 264651 - DNA, 120 bp, Artificial Sequence
  ENSG00000125962_22 (sequence is synthesized)
tgattgagggaggcaattttatggataccaattaatcttgagatcctgaacatgtgctgatttttattgtgctatatagtatataaattgagatatttttggtatttctgcaacgtgacc

SEQ ID NO: 264652 - DNA, 120 bp, Artificial Sequence
  ENSG00000125962_23 (sequence is synthesized)
tgataatgaatctattcatcctgagtaagctatacttctgtgctttatattgatatgtgtattcttttgagattttatttacatgttgttaataaagttgcatgctaaaactggtgaaaa

SEQ ID NO: 264653 - DNA, 120 bp, Artificial Sequence
  ENSG00000125962_24 (sequence is synthesized)
gctgctgatttagttgggagtcttggtaagttgtgggggtacagaatgctaagctgcctttcccactctccactgcttgtcctgctctcacgcttgaacctagtctaatctgaacgaggg

SEQ ID NO: 264654 - DNA, 120 bp, Artificial Sequence
  ENSG00000125962_25 (sequence is synthesized)
acattctagggcaatcactgaagaggaagatggtgggcaataggaaggaggaggaggagtagccctgaaacaaagcagtgggggagaggggataggaggagggaaacactagacaaaatc

SEQ ID NO: 264655 - DNA, 120 bp, Artificial Sequence
  ENSG00000125962_26 (sequence is synthesized)
actgccgttgtgggtaacgcggacgtggaagaacctcgtctgcggaggaaaaggtagatgttaaatggtaactacgcgcgaggttctgaggagccctgggaacaggaaggagaaaagaat

SEQ ID NO: 264656 - DNA, 120 bp, Artificial Sequence
  ENSG00000125962_27 (sequence is synthesized)
gatgtgggtatcagaggtgaacactggatacgcgacctggtcatgggaggcgggcggtgagaaggagagagagatgggtaattggaatggcacacaacaattaaaaaaaaatgatctacc

SEQ ID NO: 264657 - DNA, 120 bp, Artificial Sequence
  ENSG00000125962_28 (sequence is synthesized)
ttttgctagcttgatttccatacactcggttcacctcagaccatgcttgggaagaaaaaggttgcagcttctagcagggaaaaggcagactagatgaggaagagagggctacttccacag

SEQ ID NO: 264658 - DNA, 120 bp, Artificial Sequence
  ENSG00000125962_29 (sequence is synthesized)
gcgaggacagttgtctggggagccctgagagggagagaatgtaaaaagaggttgtaaatgtttgataatcaaggctctggatttgaaaagggtctcatgtcttggttactggtctgacca

SEQ ID NO: 264659 - DNA, 120 bp, Artificial Sequence
  ENSG00000125962_30 (sequence is synthesized)
ttaataaccacgtctctctctctgtcttttcatttgttctttgggtgtgtatcacgcgtttttatgtgtaaatctgttcctaagtttgcagcactccatgtttctgtaaagatctgtagg

SEQ ID NO: 264660 - DNA, 120 bp, Artificial Sequence
  ENSG00000125962_31 (sequence is synthesized)
ggacagcagacctcaaggggagaggagaaggaaaagaaaattggcctggtttgtacagagtgggcagtacttgggaggcagtacttggaggtggtagatggctaagattagagtaggcag

SEQ ID NO: 264661 - DNA, 120 bp, Artificial Sequence
  ENSG00000125962_32 (sequence is synthesized)
gagtgtaagggagcctccagaactctctgccagctttcctaacatgtcctcccttacccgcattatgttgcagaaaatgataggctttgggagagaggaaggaaacataggaacccagat

SEQ ID NO: 264662 - DNA, 120 bp, Artificial Sequence
  ENSG00000125962_33 (sequence is synthesized)
gaaatatggaaataaatacttttcattttttccccagcctccgtggtttgtctaggcatttcgtccctactaacaccactactactaccttgtagggatgtttgagttgtctctgtatag

SEQ ID NO: 264663 - DNA, 120 bp, Artificial Sequence
  ENSG00000125962_34 (sequence is synthesized)
gaattgtcagactttgagaatagagcagaggggcttggagatttaggagtgggagaaaaaggggagatagaaaatgtttgccaaacaggtacttatatccagaaagaaactgtgccctag

SEQ ID NO: 264664 - DNA, 120 bp, Artificial Sequence
  ENSG00000125962_35 (sequence is synthesized)
gtgctggtctctaccaaaaacagcctcaactgtctcctgtgtcttcatttattggtctctgtttttgtgaatccctgtaggtagatctgtccccaggtctgtggaactgtcagttgtgaa

SEQ ID NO: 264665 - DNA, 120 bp, Artificial Sequence
  ENSG00000125962_36 (sequence is synthesized)
gttttgtaaaatggtcacccaacttaaaactaggaaattacgaagaagagaaaattgccctgtatctgttaaggttggtgtaaaggtacagggacaggggggcaacttcgactagagaat

SEQ ID NO: 264666 - DNA, 120 bp, Artificial Sequence
  ENSG00000125962_37 (sequence is synthesized)
tcctgtttgtttatttgtccataggtctgcctgtagatctgctgtagggcttgtcaccattggaagcaaggtaaggaggagaaagttactccagatcagtgcaggttggtatgagtgtgg

SEQ ID NO: 264667 - DNA, 120 bp, Artificial Sequence
  ENSG00000125962_38 (sequence is synthesized)
ggattgcctgggtagacctgtaggatggagtagtggagagctgcttggctccagcaggggtcaagaaccactaaagggattcctcagcttctcatccagttttcctactccttatgctcc

SEQ ID NO: 264668 - DNA, 120 bp, Artificial Sequence
  ENSG00000125962_39 (sequence is synthesized)
tgtttggtgactggaaagaaggctgatggcacttggaagtgtagggagtgggtgaaatgaagggagagagagtttgctaattatctacctctctcacctagcactgaatcaccatattct

SEQ ID NO: 264669 - DNA, 120 bp, Artificial Sequence
  ENSG00000125965_0 (sequence is synthesized)
agttgtgcaggagaaagggggcggtcggctttctcctttcaagaacgagttattttcagctgctgactggagacggtgcacgtctggatacgagagcatttccactatgggactggatac

SEQ ID NO: 264670 - DNA, 120 bp, Artificial Sequence
  ENSG00000125965_1 (sequence is synthesized)
aaacacacacccggcagacttcaagagtctcagactgaggagaaagcctttccttctgctgctactgctgctgccgctgcttttgaaagtccactcctttcatggtttttcctgccaaac

SEQ ID NO: 264671 - DNA, 120 bp, Artificial Sequence
  ENSG00000125965_2 (sequence is synthesized)
cagaggcaccttcgctgctgccgctgttctctttggtgtcattcagcggctggccagaggatgagactccccaaactcctcactttcttgctttggtacctggcttggctggacctggaa

SEQ ID NO: 264672 - DNA, 120 bp, Artificial Sequence
  ENSG00000125965_3 (sequence is synthesized)
ttcatctgcactgtgttgggtgcccctgacttgggccagagaccccaggggaccaggccaggattggccaaagcagaggccaaggagaggccccccctggcccggaacgtcttcaggcca

SEQ ID NO: 264673 - DNA, 120 bp, Artificial Sequence
  ENSG00000125965_4 (sequence is synthesized)
gggggtcacagctatggtgggggggccaccaatgccaatgccagggcaaagggaggcaccgggcagacaggaggcctgacacagcccaagaaggatgaacccaaaaagctgccccccaga

SEQ ID NO: 264674 - DNA, 120 bp, Artificial Sequence
  ENSG00000125965_5 (sequence is synthesized)
ccgggcggccctgaacccaagccaggacaccctccccaaacaaggcaggctacagcccggactgtgaccccaaaaggacagcttcccggaggcaaggcacccccaaaagcaggatctgtc

SEQ ID NO: 264675 - DNA, 120 bp, Artificial Sequence
  ENSG00000125965_6 (sequence is synthesized)
cccagctccttcctgctgaagaaggccagggagcccgggcccccacgagagcccaaggagccgtttcgcccaccccccatcacaccccacgagtacatgctctcgctgtacaggacgctg

SEQ ID NO: 264676 - DNA, 120 bp, Artificial Sequence
  ENSG00000125965_7 (sequence is synthesized)
tccgatgctgacagaaagggaggcaacagcagcgtgaagttggaggctggcctggccaacaccatcaccagctttattgacaaagggcaagatgaccgaggtcccgtggtcaggaagcag

SEQ ID NO: 264677 - DNA, 120 bp, Artificial Sequence
  ENSG00000125965_8 (sequence is synthesized)
aggtacgtgtttgacattagtgccctggagaaggatgggctgctgggggccgagctgcggatcttgcggaagaagccctcggacacggccaagccagcggcccccggaggcgggcgggct

SEQ ID NO: 264678 - DNA, 120 bp, Artificial Sequence
  ENSG00000125965_9 (sequence is synthesized)
gctgggaggtgttcgacatctggaagctcttccgaaactttaagaactcggcccagctgtgcctggagctggaggcctgggaacggggcagggccgtggacctccgtggcctgggcttcg

SEQ ID NO: 264679 - DNA, 120 bp, Artificial Sequence
  ENSG00000125965_10 (sequence is synthesized)
accgcgccgcccggcaggtccacgagaaagccctgttcctggtgtttggccgcaccaagaaacgggacctgttctttaatgagattaaggcccgctctggccaggacgataagaccgtgt

SEQ ID NO: 264680 - DNA, 120 bp, Artificial Sequence
  ENSG00000125965_11 (sequence is synthesized)
atgagtacctgttcagccagcggcgaaaacggcgggccccactggccactcgccagggcaagcgacccagcaagaaccttaaggctcgctgcagtcggaaggcactgcatgtcaacttca

SEQ ID NO: 264681 - DNA, 120 bp, Artificial Sequence
  ENSG00000125965_12 (sequence is synthesized)
aggacatgggctgggacgactggatcatcgcaccccttgagtacgaggctttccactgcgaggggctgtgcgagttcccattgcgctcccacctggagcccacgaatcatgcagtcatcc

SEQ ID NO: 264682 - DNA, 120 bp, Artificial Sequence
  ENSG00000125965_13 (sequence is synthesized)
agaccctgatgaactccatggaccccgagtccacaccacccacctgctgtgtgcccacgcggctgagtcccatcagcatcctcttcattgactctgccaacaacgtggtgtataagcagt

SEQ ID NO: 264683 - DNA, 120 bp, Artificial Sequence
  ENSG00000125965_14 (sequence is synthesized)
atgaggacatggtcgtggagtcgtgtggctgcaggtagcagcactggccctctgtcttcctgggtggcacatcccaagagccccttcctgcactcctggaatcacagaggggtcaggaag

SEQ ID NO: 264684 - DNA, 120 bp, Artificial Sequence
  ENSG00000125965_15 (sequence is synthesized)
ctgtggcaggagcatctacacagcttgggtgaaaggggattccaataagcttgctcgctctctgagtgtgacttgggctaaaggcccccttttatccacaagttcccctggctgaggatt

SEQ ID NO: 264685 - DNA, 120 bp, Artificial Sequence
  ENSG00000125965_16 (sequence is synthesized)
gctgcccgtctgctgatgtgaccagtggcaggcacaggtccagggagacagactctgaatgggactgagtcccaggaaacagtgctttccgatgagactcagcccaccatttctcctcac

SEQ ID NO: 264686 - DNA, 120 bp, Artificial Sequence
  ENSG00000125965_17 (sequence is synthesized)
ctgggccttctcagcctctggactctcctaagcacctctcaggagagccacaggtgccactgcctcctcaaatcacatttgtgcctggtgacttcctgtccctgggacagttgagaagct

SEQ ID NO: 264687 - DNA, 120 bp, Artificial Sequence
  ENSG00000125965_18 (sequence is synthesized)
gactgggcaagagtgggagagaagaggagagggcttggatagagttgaggagtgtgaggctgttagactgttagatttaaatgtatattgatgagataaaaagcaaaactgtgcctaaaa

SEQ ID NO: 264688 - DNA, 120 bp, Artificial Sequence
  ENSG00000125965_19 (sequence is synthesized)
cgctgccactggttagcgataatactggcagcgcgaccggtttctgagggttgttcaccttgctgctcagacgctccgagaagcttcaggcagcataacacttacagtagagacagggtt

SEQ ID NO: 264689 - DNA, 80 bp, Artificial Sequence
  ENSG00000125966_0 (sequence is synthesized)
caggccccgcgctggagccgctggcgggtccctgggcggctgctgctgctgctgctgcccgcgctctgctgcctcccggg

SEQ ID NO: 264690 - DNA, 120 bp, Artificial Sequence
  ENSG00000125966_1 (sequence is synthesized)
ggtggcggtggcggtggcgcgggcggacgaggcggaggcgcccttcgccgggcagaactggttaaagtcctatggctatctgcttccctatgactcacgggcatctgcgctgcactcagc

SEQ ID NO: 264691 - DNA, 120 bp, Artificial Sequence
  ENSG00000125966_2 (sequence is synthesized)
gaaggccttgcagtcggcagtctccactatgcagcagttttacgggatcccggtcaccggtgtgttggatcagacaacgatcgagtggatgaagaaaccccgatgtggtgtccctgatca

SEQ ID NO: 264692 - DNA, 120 bp, Artificial Sequence
  ENSG00000125966_3 (sequence is synthesized)
cccccacttaagccgtaggcggagaaacaagcgctatgccctgactggacagaagtggaggcaaaaacacatcacctacagcattcacaactataccccaaaagtgggtgagctagacac

SEQ ID NO: 264693 - DNA, 120 bp, Artificial Sequence
  ENSG00000125966_4 (sequence is synthesized)
gcggaaagctattcgccaggctttcgatgtgtggcagaaggtgaccccactgacctttgaagaggtgccataccatgagatcaaaagtgaccggaaggaggcagacatcatgatcttttt

SEQ ID NO: 264694 - DNA, 120 bp, Artificial Sequence
  ENSG00000125966_5 (sequence is synthesized)
tgcttctggtttccatggcgacagctccccatttgatggagaagggggattcctggcccatgcctacttccctggcccagggattggaggagacacccactttgactccgatgagccatg

SEQ ID NO: 264695 - DNA, 120 bp, Artificial Sequence
  ENSG00000125966_6 (sequence is synthesized)
gacgctaggaaatgccaaccatgacgggaacgacctcttcctggtggctgtgcatgagctgggccacgcgctgggactggagcactccagcgaccccagcgccatcatggcgcccttcta

SEQ ID NO: 264696 - DNA, 120 bp, Artificial Sequence
  ENSG00000125966_7 (sequence is synthesized)
ccagtacatggagacgcacaacttcaagctgccccaggacgatctccagggcatccagaagatctatggacccccagccgagcctctggagcccacaaggccactccctacactccccgt

SEQ ID NO: 264697 - DNA, 120 bp, Artificial Sequence
  ENSG00000125966_8 (sequence is synthesized)
ccgcaggatccactcaccatcggagaggaaacacgagcgccagcccaggccccctcggccgcccctcggggaccggccatccacaccaggcaccaaacccaacatctgtgacggcaactt

SEQ ID NO: 264698 - DNA, 120 bp, Artificial Sequence
  ENSG00000125966_9 (sequence is synthesized)
caacacagtggccctcttccggggcgagatgtttgtctttaaggatcgctggttctggcgtctgcgcaataaccgagtgcaggagggctaccccatgcagatcgagcagttctggaaggg

SEQ ID NO: 264699 - DNA, 120 bp, Artificial Sequence
  ENSG00000125966_10 (sequence is synthesized)
cctgcctgcccgcatcgacgcagcctatgaaagggccgatgggagatttgtcttcttcaaaggtgacaagtattgggtgtttaaggaggtgacggtggagcctgggtacccccacagcct

SEQ ID NO: 264700 - DNA, 120 bp, Artificial Sequence
  ENSG00000125966_11 (sequence is synthesized)
gggggagctgggcagctgtttgccccgtgaaggcattgacacagctctgcgctgggaacctgtgggcaagacctactttttcaaaggcgagcggtactggcgctacagcgaggagcggcg

SEQ ID NO: 264701 - DNA, 120 bp, Artificial Sequence
  ENSG00000125966_12 (sequence is synthesized)
ggccacggaccctggctaccctaagcccatcaccgtgtggaagggcatcccacaggctccccaaggagccttcatcagcaaggaaggatattacacctatttctacaagggccgggacta

SEQ ID NO: 264702 - DNA, 120 bp, Artificial Sequence
  ENSG00000125966_13 (sequence is synthesized)
ctggaagtttgacaaccagaaactgagcgtggagccaggctacccgcgcaacatcctgcgtgactggatgggctgcaaccagaaggaggtggagcggcggaaggagcggcggctgcccca

SEQ ID NO: 264703 - DNA, 120 bp, Artificial Sequence
  ENSG00000125966_14 (sequence is synthesized)
ggacgacgtggacatcatggtgaccatcaacgatgtgccgggctccgtgaacgccgtggccgtggtcatcccctgcatcctgtccctctgcatcctggtgctggtctacaccatcttcca

SEQ ID NO: 264704 - DNA, 120 bp, Artificial Sequence
  ENSG00000125966_15 (sequence is synthesized)
gttcaagaacaagacaggccctcagcctgtcacctactataagcggccagtccaggaatgggtgtgagcagcccagagccctctctatccacttggtctggccagccaggcccttcctca

SEQ ID NO: 264705 - DNA, 120 bp, Artificial Sequence
  ENSG00000125966_16 (sequence is synthesized)
ccagggtctgaggggcagctctggccagtgctcaccagggccagcagggccctaggctggggtcgtacagctgaagtggtgggtgcattggcctaggctgagcgtggggcagggaattat

SEQ ID NO: 264706 - DNA, 120 bp, Artificial Sequence
  ENSG00000125966_17 (sequence is synthesized)
gcaaactactccctacttaagggaataggccaggctccatccggaggcagggaccatgccaggaggagcccctgtggtcacggcatcctgtggtgtccatgaggtaccacagctccactc

SEQ ID NO: 264707 - DNA, 120 bp, Artificial Sequence
  ENSG00000125966_18 (sequence is synthesized)
ctggctggaacccagcaccctctgtgggaagccagcactagctctcatcccccatccgggagataccaccagtcctggtccccttttgccaacacctgctggtcagatgtccccctaccc

SEQ ID NO: 264708 - DNA, 120 bp, Artificial Sequence
  ENSG00000125966_19 (sequence is synthesized)
ccaccccactgtcctccaaggctacaggacccctgcttctgacacagtgagcaacaagcctgggtttccctgctggcagacggcagatccctcaggaaacctgctccacttgtcagggtc

SEQ ID NO: 264709 - DNA, 120 bp, Artificial Sequence
  ENSG00000125966_20 (sequence is synthesized)
tcttcggagacccaggatttagggtcacatgctgcaggcagggctgtggcccagctgggtctgacaaggacccagctgtcacatcgtgaatatttaaatgtcctgtcactactgtcccat

SEQ ID NO: 264710 - DNA, 120 bp, Artificial Sequence
  ENSG00000125966_21 (sequence is synthesized)
tttgcaaaggctgcttgaggctttaggtgaactagaggtgactgtcttggtgatgaggccagcatagcggccctcccccaggcgacaaggaccaaggtgctgctaaggccactctagcgc

SEQ ID NO: 264711 - DNA, 120 bp, Artificial Sequence
  ENSG00000125966_22 (sequence is synthesized)
ccagacaccccagtagctgagctctgctcctatggctacagagctggggcagaagctgaccccatttctggaggaagatccgagtttgtgaccgtcctccactcccctctattgtcactg

SEQ ID NO: 264712 - DNA, 120 bp, Artificial Sequence
  ENSG00000125966_23 (sequence is synthesized)
tccccagctttgctccagtctgtcacttgcagcctggagctcagcctcaccagttaggtgaggcagagatggctgcagggccaacactggcagagcctgggagtccttcggaaggggacc

SEQ ID NO: 264713 - DNA, 120 bp, Artificial Sequence
  ENSG00000125966_24 (sequence is synthesized)
agggcgtctgaagtgctcagtgcccccactactctgaggccgactccagctactctgaggccgactcaatctctcggctggaagcagtgttttcccagagcttggcccttgctgacctcg

SEQ ID NO: 264714 - DNA, 120 bp, Artificial Sequence
  ENSG00000125966_25 (sequence is synthesized)
ctcactgggcccatcttcccacactgctcttagaaggacacccctaccggtagcagccccaagctgagggggctccctttttgaccttcactggcccgcccttcactgtctccagcagga

SEQ ID NO: 264715 - DNA, 120 bp, Artificial Sequence
  ENSG00000125966_26 (sequence is synthesized)
gttcctagggcttggcctgccttgctccacagtacggcggaggcagccctgcttgtcactgaggagccctagacaaggccaatgggttcatcaatgcccactggctctctgccaaagcca

SEQ ID NO: 264716 - DNA, 120 bp, Artificial Sequence
  ENSG00000125966_27 (sequence is synthesized)
aaaaggtgtcaggcagtctccagcgtgctggccgggtctcggatgccacccctgctcactgagcctgcatgggccttgcccccgaccctgtggtctctgggattggggtcggcttaccct

SEQ ID NO: 264717 - DNA, 120 bp, Artificial Sequence
  ENSG00000125966_28 (sequence is synthesized)
gtagcacagacagggactcctgctgccctgggagctgtctcaagcaaaatctcttgtcccagaggtgcccatgtgggtccgctgtgtcccctgtcatcatccttgttttttctcattttg

SEQ ID NO: 264718 - DNA, 120 bp, Artificial Sequence
  ENSG00000125966_29 (sequence is synthesized)
gccaagggcaggctccctgggacaggcagggaacaactgcggagatattagtgattcataggtttgtacagtgttttatactttgcaaagcactttattagctcacacctgtccactcac

SEQ ID NO: 264719 - DNA, 120 bp, Artificial Sequence
  ENSG00000125966_30 (sequence is synthesized)
atgaaactcgtgttaggccctgggaggccgacggtaactctcaccgtgccctcagatgaagcacagagaggttgttacttgcccgggccatccagtgggctggctgggtcttgtgtcccc

SEQ ID NO: 264720 - DNA, 120 bp, Artificial Sequence
  ENSG00000125966_31 (sequence is synthesized)
atctgtggacccctctagggtctgagatgagatgagaagtgtctcctgtatccacctcttcctggcctcccttcccccacttcctggtccctgtccactcctcaggttggtgctctcact

SEQ ID NO: 264721 - DNA, 120 bp, Artificial Sequence
  ENSG00000125966_32 (sequence is synthesized)
tcttgaaagctctaggcacccccgcctcccgccaggctccccattggctcctggcaggccagctgagaatgaacaggagatggaggcaggcagcccaggctgcagaggtgagggatgtgg

SEQ ID NO: 264722 - DNA, 120 bp, Artificial Sequence
  ENSG00000125966_33 (sequence is synthesized)
ggccaggcccagagggctcagcctagaggcttccaatctcagattctcctgcctgtggtcatctgtttgtccatcaccccaggacagggcagacagaggggcaaagcactgggggcccca

SEQ ID NO: 264723 - DNA, 120 bp, Artificial Sequence
  ENSG00000125966_34 (sequence is synthesized)
gagcctagcttcccctcagcctgggggacatcacagcatttcagtgtcagtcacattttaaactgatcagcctttgtataatgttttttaaatcatttctaaataaaacagaaatacaga

SEQ ID NO: 264724 - DNA, 80 bp, Artificial Sequence
  ENSG00000125967_0 (sequence is synthesized)
ccgcggcgtccagggtcggcagcaaccgcagccgagcccgagcgggtggcggcgccatggcgtgcgcggggctgctcacc

SEQ ID NO: 264725 - DNA, 120 bp, Artificial Sequence
  ENSG00000125967_1 (sequence is synthesized)
agaccccgcggcacccccagctcgcgcccgacccggggcccgccggacacacgctcttccaggacgttttccgcagagcagacaagaatgatgatgggaagctctcatttgaggaattcc

SEQ ID NO: 264726 - DNA, 120 bp, Artificial Sequence
  ENSG00000125967_2 (sequence is synthesized)
agaattactttgccgatggggttctcagcctgggggagctgcaggaactgttcagcggcattgatgggcatctcaccgacaatttagaaacagaaaaactgtgtgactacttctcagagc

SEQ ID NO: 264727 - DNA, 120 bp, Artificial Sequence
  ENSG00000125967_3 (sequence is synthesized)
acctgggtgtctaccggccggtgctggctgcattggaatcgctgaaccgtgcagtgctcgctgccatggatgccaccaagctggagtacgagagggcctccaaagtggaccagtttgtga

SEQ ID NO: 264728 - DNA, 120 bp, Artificial Sequence
  ENSG00000125967_4 (sequence is synthesized)
cgcgcttcctgctgcgggagacggtgagccagctgcaagcccttcagagctcgctggagggggcgtcagataccctggaggcccaggcccatggctggcggtcagatgcagagagcgtgg

SEQ ID NO: 264729 - DNA, 120 bp, Artificial Sequence
  ENSG00000125967_5 (sequence is synthesized)
aggcgcagagcaggctctgcggcagccggcgggcaggacgccgagccctgaggagtgtcagccggtcatccacctggtcccccggctcttctgacacagggcgcagctcagaggccgaga

SEQ ID NO: 264730 - DNA, 120 bp, Artificial Sequence
  ENSG00000125967_6 (sequence is synthesized)
tgcagtggcggctccaggtgaaccgcctccaggagctcatcgaccagctcgagtgcaaggtgagggccgtggggccagggccccacaagggaggaccctcctggtatccaccagagccag

SEQ ID NO: 264731 - DNA, 120 bp, Artificial Sequence
  ENSG00000125967_7 (sequence is synthesized)
gcccatgctggaggcccggcccacactctgtgccctcacaggccccccggctggaacccctgcgtgaagaggacctggccaaggggcctgacttgcacatcctcatggcccagaggcagg

SEQ ID NO: 264732 - DNA, 120 bp, Artificial Sequence
  ENSG00000125967_8 (sequence is synthesized)
cccagagccattgtctgcatgtgtccgcccagaagatgctggacggtgcctccttcaccctgtatgagttctggcaggatgaggcctcctggagaaggcaccagcagtcgcctggcagca

SEQ ID NO: 264733 - DNA, 120 bp, Artificial Sequence
  ENSG00000125967_9 (sequence is synthesized)
aggccttccagcgcatcctcatcgaccacctgcgggccccggacaccctcaccactgtgttcttcccagcctcctggtggataatgaataacaactgagccagacctgcacacgccgagg

SEQ ID NO: 264734 - DNA, 120 bp, Artificial Sequence
  ENSG00000125967_10 (sequence is synthesized)
gccccgggaccctgcctgcctccctctggagccttctggactggccagcccagcgcaaagaccaggacttgtctcctcctggacttgggcctggtggaagggctctcagcccagggatca

SEQ ID NO: 264735 - DNA, 120 bp, Artificial Sequence
  ENSG00000125967_11 (sequence is synthesized)
gggactgggctgcttgctttctatttattattgatttatttatccctgtattttattgtttgtcacttcagcctccaagctactttggcttctgcctggctcaggagacctggattctgg

SEQ ID NO: 264736 - DNA, 120 bp, Artificial Sequence
  ENSG00000125967_12 (sequence is synthesized)
tccctgctgtccctgcctggctgagcgacccagggcaggtcccgtccctgtctgggtgggcctcaggccatctggccgcctagcgagggtcctgctttcttcctgctgtcttgggaccag

SEQ ID NO: 264737 - DNA, 120 bp, Artificial Sequence
  ENSG00000125967_13 (sequence is synthesized)
gcttctgctcctcctcagccagcggcagaagcagggctgatgctcagggaccccccaaccctcaaaccttgcctccgaggctgggcctgagctgggtgccccgtcgccctcccaggccac

SEQ ID NO: 264738 - DNA, 120 bp, Artificial Sequence
  ENSG00000125967_14 (sequence is synthesized)
taggctctgactcttccagcacccatggatgtgccagaggcctctgggttggtttgcatgtcatttgcatatcgtttgcatgccctcatcccacccattctcagggcagtatgggaagcc

SEQ ID NO: 264739 - DNA, 120 bp, Artificial Sequence
  ENSG00000125967_15 (sequence is synthesized)
ccaaggtgacctggccaagtagcaataatttgggtccagggtcacctattgcccccagaggcctctgaaccccaggctgggaccccagcacagaggcaataaaggcagtggtcccttcca

SEQ ID NO: 264740 - DNA, 120 bp, Artificial Sequence
  ENSG00000125967_16 (sequence is synthesized)
gagaatcaatcaaggcacttcccagaggaagtgctgttctcagccaagtttggcaggatggagagtggagagaatgtggtttggccacggactggagataggggctgactttcacacagc

SEQ ID NO: 264741 - DNA, 120 bp, Artificial Sequence
  ENSG00000125967_17 (sequence is synthesized)
accctggcatggtgatgggcacttcctgtacgtggccctctgttgtcctcacaaccaccagctagattggaattcaccctatttcataaaggagcagagggccagagaggtgaagcaagt

SEQ ID NO: 264742 - DNA, 120 bp, Artificial Sequence
  ENSG00000125967_18 (sequence is synthesized)
gctttgctgttccgccccgtcagcccttgctgagatggctgacgagatggctaggactgatccttttagatcctaagaagcccccgggaggagcagaactttgagggcgaaggggccttg

SEQ ID NO: 264743 - DNA, 120 bp, Artificial Sequence
  ENSG00000125967_19 (sequence is synthesized)
tgcattttcgggcggggaagccatggcagggtagccatggcggggtgaaatgagactggctttggggctaggcctcggagtcccaggaggcttgtcttccccacccaggcttatcccgtc

SEQ ID NO: 264744 - DNA, 120 bp, Artificial Sequence
  ENSG00000125967_20 (sequence is synthesized)
cttgtccatgtcagccggcctctccttgcgggcctgcttgggtgctttggtccttttgtgggaactatagtttcccatggcagggctggtcaccactggggacgatggcccacactccgt

SEQ ID NO: 264745 - DNA, 120 bp, Artificial Sequence
  ENSG00000125967_21 (sequence is synthesized)
ctgctctgccccctgggccctggcaacattgtgacctcacgggctgacctcaccaattgcaggctctgagcaccgccttccagggcccacaggagtacgagagggcctccaaagtggacc

SEQ ID NO: 264746 - DNA, 120 bp, Artificial Sequence
  ENSG00000125967_22 (sequence is synthesized)
ccccgcctgcttccacccgagaatgcagtgcataaacacgcaaccatctaccccttgtgtgctcccacatctacgcgtcttggcaggagtgtgcacgctccttcccgtgcctgctcccag

SEQ ID NO: 264747 - DNA, 120 bp, Artificial Sequence
  ENSG00000125967_23 (sequence is synthesized)
ggctgggctcaggatataaggcctgcttggctgctgaggaattccagggggccagaatcccagggtgggtagatgggtgggggtccaggaacccttgagcacctcttctgcctgcagact

SEQ ID NO: 264748 - DNA, 120 bp, Artificial Sequence
  ENSG00000125967_24 (sequence is synthesized)
ccaagctggtgagtggagtggctgatggtgggggatccactgtgaggcagtgggcatctgctgtgctgtgggatcctccacagtcttgactcagggttatagagctaggggcttgggttc

SEQ ID NO: 264749 - DNA, 120 bp, Artificial Sequence
  ENSG00000125967_25 (sequence is synthesized)
aaatcctggctcccactttgtagctgtgccccttgacctctctgggcctgtttcctcatctgtaaaccatcataacaatagagctgcccttcatacatcactgtgaccagtgagaacgaa

SEQ ID NO: 264750 - DNA, 120 bp, Artificial Sequence
  ENSG00000125967_26 (sequence is synthesized)
ttgtagagatggggcctccctatgttgcccaggccaatctcaaactcctgggctgaagttatccacccaccttggcctaccaacgtgttgggattacaggcgtgagccaccttgaaagga

SEQ ID NO: 264751 - DNA, 120 bp, Artificial Sequence
  ENSG00000125967_27 (sequence is synthesized)
cccccatccacacccatatgggctcctgggatcctcatccttgggagagattttcgaattcctccctcaccccctaggacttctgcatacaaggcctagactcccagcatcccttcccac

SEQ ID NO: 264752 - DNA, 120 bp, Artificial Sequence
  ENSG00000125967_28 (sequence is synthesized)
cgcgcctcttgccgccgcagcagcagcagtaccggcatcctcggctcgcgctcgctaccttcgcccgctccgcgcaatctgggtgccgccggggagcccagcccagcgccggacgcgtag

SEQ ID NO: 264753 - DNA, 120 bp, Artificial Sequence
  ENSG00000125967_29 (sequence is synthesized)
tcaatccgttgcccagcgttggccagcggctgccgcttgtccagggggagaatcagcacgatcctggctctgagcaccgccttccagggcccacaggagtacgagagggcctccaaagtg

SEQ ID NO: 264754 - DNA, 120 bp, Artificial Sequence
  ENSG00000125967_30 (sequence is synthesized)
ctagccttggtttctcagctgtaaaactgggctaatgatcataaatgaggcaatgcatgtaaggtgcttagtggtgaatagagggggatttctgtggtttgggtatgaattttggccctg

SEQ ID NO: 264755 - DNA, 120 bp, Artificial Sequence
  ENSG00000125968_0 (sequence is synthesized)
attccacgttcttaactgttccattttccgtatctgcttcgggcttccacctcatttttttcgctttgcccattctgtttcagccagtcgccaagaatcatgaaagtcgccagtggcagc

SEQ ID NO: 264756 - DNA, 120 bp, Artificial Sequence
  ENSG00000125968_1 (sequence is synthesized)
accgccaccgccgccgcgggccccagctgcgcgctgaaggccggcaagacagcgagcggtgcgggcgaggtggtgcgctgtctgtctgagcagagcgtggccatctcgcgctgcgccggg

SEQ ID NO: 264757 - DNA, 120 bp, Artificial Sequence
  ENSG00000125968_2 (sequence is synthesized)
ggcgccggggcgcgcctgcctgccctgctggacgagcagcaggtaaacgtgctgctctacgacatgaacggctgttactcacgcctcaaggagctggtgcccaccctgccccagaaccgc

SEQ ID NO: 264758 - DNA, 120 bp, Artificial Sequence
  ENSG00000125968_3 (sequence is synthesized)
aaggtgagcaaggtggagattctccagcacgtcatcgactacatcagggaccttcagttggagctgaactcggaatccgaagttggaacccccgggggccgagggctgccggtccgggct

SEQ ID NO: 264759 - DNA, 120 bp, Artificial Sequence
  ENSG00000125968_4 (sequence is synthesized)
gatcagcgccctgacggccgaggcggcatgcgttcctgcggacgatcgcatcttgtgtcgctgaagcgcctcccccagggaccggcggaccccagccatccagggggcaagaggaattac

SEQ ID NO: 264760 - DNA, 120 bp, Artificial Sequence
  ENSG00000125968_5 (sequence is synthesized)
gtgctctgtgggtctcccccaacgcgcctcgccggatctgagggagaacaagaccgatcggcggccactgcgcccttaactgcatccagcctggggctgaggctgaggcactggcgagga

SEQ ID NO: 264761 - DNA, 120 bp, Artificial Sequence
  ENSG00000125968_6 (sequence is synthesized)
gagggcgctcctctctgcacacctactagtcaccagagactttagggggtgggattccactcgtgtgtttctattttttgaaaagcagacattttaaaaaatggtcacgtttggtgcttc

SEQ ID NO: 264762 - DNA, 120 bp, Artificial Sequence
  ENSG00000125968_7 (sequence is synthesized)
tcagatttctgaggaaattgctttgtattgtatattacaatgatcaccgactgaaaatattgttttacaatagttctgtggggctgtttttttgttattaaacaaataatttagatggtg

SEQ ID NO: 264763 - DNA, 120 bp, Artificial Sequence
  ENSG00000125968_8 (sequence is synthesized)
tacctggctatgcgggggtgcctaaggagcctggaaaaagcgctcccccgtcgtgcttcctggggaagggggcgttcgctgcgctcggagcggcgtcccttccaacccgccggtctcatt

SEQ ID NO: 264764 - DNA, 120 bp, Artificial Sequence
  ENSG00000125970_0 (sequence is synthesized)
gtcagtgcggcggggcgcgcgagcggcgccagctcggggcagcggaacccagagaagctgagggggcggtagcggcggcgacggcgacgacgacgactcccgcgcgtgtgcccagcctct

SEQ ID NO: 264765 - DNA, 120 bp, Artificial Sequence
  ENSG00000125970_1 (sequence is synthesized)
tcccgccgcagccgcccttttcctccctcccttacgtccccgagtgcggcagtaccgcctccttcccagccgcgcggcttcctccagacctctcggcgcgggtgagccctattcccagag

SEQ ID NO: 264766 - DNA, 120 bp, Artificial Sequence
  ENSG00000125970_2 (sequence is synthesized)
gcaggtggtgctgaccctgtaacccaaaggaggaaacagctggctaagctcatcattgttactggtgggcaccatgtccttgaagcttcaggcaagcaatgtaaccaacaagaatgaccc

SEQ ID NO: 264767 - DNA, 120 bp, Artificial Sequence
  ENSG00000125970_3 (sequence is synthesized)
caagtccatcaactctcgagtcttcattggaaacctcaacacagctctggtgaagaaatcagatgtggagaccatcttctctaagtatggccgtgtggccggctgttctgtgcacaaggg

SEQ ID NO: 264768 - DNA, 120 bp, Artificial Sequence
  ENSG00000125970_4 (sequence is synthesized)
ctatgcctttgttcagtactccaatgagcgccatgcccgggcagctgtgctgggagagaatgggcgggtgctggccgggcagaccctggacatcaacatggctggagagcctaagcctga

SEQ ID NO: 264769 - DNA, 120 bp, Artificial Sequence
  ENSG00000125970_5 (sequence is synthesized)
cagacccaaggggctaaagagagcagcatctgccatatacagtggctacatctttgactatgattactaccgggacgacttctacgacaggctcttcgactaccggggccgtctgtcgcc

SEQ ID NO: 264770 - DNA, 120 bp, Artificial Sequence
  ENSG00000125970_6 (sequence is synthesized)
cgtgccagtgcccagggcggtccctgtgaagcgaccccgggtcacagtccctttggtccggcgtgtcaaaactaacgtacctgtcaagctctttgcccgctccacagctgtcaccaccag

SEQ ID NO: 264771 - DNA, 120 bp, Artificial Sequence
  ENSG00000125970_7 (sequence is synthesized)
ctcagccaagatcaagttaaagagcagtgagctgcaggccatcaagacggagctgacacagatcaagtccaatatcgatgccctgctgagccgcttggagcagatcgctgcggagcaaaa

SEQ ID NO: 264772 - DNA, 120 bp, Artificial Sequence
  ENSG00000125970_8 (sequence is synthesized)
ggccaatccagatggcaagaagaagggtgatggaggtggcgccggcggcggcggcggtggtggtggcagcggtggcggtggcagtggtggtggcggtggcggtggcagcagccggccacc

SEQ ID NO: 264773 - DNA, 120 bp, Artificial Sequence
  ENSG00000125970_9 (sequence is synthesized)
agccccccaagagaacacaacttctgaggcaggcctgccccagggggaagcacggacccgagacgacggcgatgaggaagggctcctgacacacagcgaggaagagctggaacacagcca

SEQ ID NO: 264774 - DNA, 120 bp, Artificial Sequence
  ENSG00000125970_10 (sequence is synthesized)
ggacacagacgcggatgatggggccttgcagtaagcagcctgacaggagcaatggccaccagcaggtgaagggcatcgctgccccaggcctcaagccgggcacccaaccctggatgccac

SEQ ID NO: 264775 - DNA, 120 bp, Artificial Sequence
  ENSG00000125970_11 (sequence is synthesized)
cccccagcgggtaccagaggaaagctggcagcaggcgcctcctcccccaacgcatcccagccagtgccatgtcctctgcaggtggagttactggcctactccttccccatgagccctccc

SEQ ID NO: 264776 - DNA, 120 bp, Artificial Sequence
  ENSG00000125970_12 (sequence is synthesized)
tgtctgcactgcccaggccagagggtagagcacaggggtttccccatactacctcccctccccaggacactcccaggcttgggttttttctataggtttggcggggggccacagggaggg

SEQ ID NO: 264777 - DNA, 120 bp, Artificial Sequence
  ENSG00000125970_13 (sequence is synthesized)
gaccctgacaataaagagattggatcccaacctgttctgagatgggatggtttgtgttttctcatgaagatatcccggcccctctgccaaccaaaaagctggtctagggtgcctaatact

SEQ ID NO: 264778 - DNA, 120 bp, Artificial Sequence
  ENSG00000125970_14 (sequence is synthesized)
gatccatctggaccttagtgtcctcagtggtgattaaaatggccagtggggccactggggagggttggatatgctggcccatgagcatcttgctggctgaagtgtcaagcagttgtgacc

SEQ ID NO: 264779 - DNA, 120 bp, Artificial Sequence
  ENSG00000125970_15 (sequence is synthesized)
cacttggtttaccccatagtaggtcaagaccttatctctttccccagcttctaagtctggtctttcccagctcttaaaaggattctagagtctgccagtctctaccttctctcttctggc

SEQ ID NO: 264780 - DNA, 120 bp, Artificial Sequence
  ENSG00000125970_16 (sequence is synthesized)
ttaggacactataattttttcatttggacgttgtcctcccaccagcctcccagtcttctgcctctgccctgtaccatctcccagcagccacgcagtctttctgaaacgtatcccttccct

SEQ ID NO: 264781 - DNA, 120 bp, Artificial Sequence
  ENSG00000125970_17 (sequence is synthesized)
gcctaaaatccctttactgactcttcatcatcaggacaaaaccctacctcctgaatgtagggtgtaagatcctgcttactccagcctctcctgtttcttgtcaccacccctttcctgccc

SEQ ID NO: 264782 - DNA, 120 bp, Artificial Sequence
  ENSG00000125970_18 (sequence is synthesized)
ctgacacaaaccctacatctcagtctcacaaaacacacaagttcttcacactccgggcaggtttggtagcaaggaatagagcgtactccagtgacagcaatcagtaggaagtttgcatcc

SEQ ID NO: 264783 - DNA, 120 bp, Artificial Sequence
  ENSG00000125970_19 (sequence is synthesized)
ggagacacgcagcctgtctgcccctgtcttgggccacccgtctagacatttgttctctaacaatcagccgggttccttcaaacgtgtgctgcttatacatgctcattgtgtactgctaat

SEQ ID NO: 264784 - DNA, 120 bp, Artificial Sequence
  ENSG00000125970_20 (sequence is synthesized)
gtcacctacttcccccttcattccccacaatgaatggatccattttccccatgttcaagttcccaagagagaatcgactgccactgtaattttttttcctaatcactcataggttacaag

SEQ ID NO: 264785 - DNA, 120 bp, Artificial Sequence
  ENSG00000125970_21 (sequence is synthesized)
tacctaccctggtccagtgaactgcgggattcatatgtggccacttaggctggtctcgttggtatggagctgtgggagggcagcacccagaaataggctttgttccaggcctggcacgta

SEQ ID NO: 264786 - DNA, 120 bp, Artificial Sequence
  ENSG00000125970_22 (sequence is synthesized)
ctcctcctgctcctactttctctacctgggaaatagccgctcaggacgaagctgctgctgtggtgtcgccacctctgagaagtctcccagaccctccgactgctctttaattgcctgttc

SEQ ID NO: 264787 - DNA, 120 bp, Artificial Sequence
  ENSG00000125970_23 (sequence is synthesized)
tctcctctggaagccttcccccaacacagaaaaattcaatcccatcatcaaaaagggctttaggttttccctccatctttacgtgttgatcaaagtttgcagatctgctggaatccttat

SEQ ID NO: 264788 - DNA, 120 bp, Artificial Sequence
  ENSG00000125970_24 (sequence is synthesized)
tgaaaactccccatttcaaaccaacccggtctacagcctccagggaagcttcctcctgggctttggctccatgttttggtagagggtggaggctttgggcagtgctcaaactccaccggg

SEQ ID NO: 264789 - DNA, 120 bp, Artificial Sequence
  ENSG00000125970_25 (sequence is synthesized)
gctctgctggggcctgactaggccagccccaaggtggccagagttctggcttcatacctgagccaaaagccccaatccatgcttggccattgcctgagtattagctgccccagggggatc

SEQ ID NO: 264790 - DNA, 120 bp, Artificial Sequence
  ENSG00000125970_26 (sequence is synthesized)
acggtccccatatatttgcttgccatggaccctgggcagcagggagagagtagagatttgtcaagagcccatggtggaggctgaggccctgaggccatgagatgcaggcatggggtgaga

SEQ ID NO: 264791 - DNA, 120 bp, Artificial Sequence
  ENSG00000125970_27 (sequence is synthesized)
aacaggccccttggaattgggctgggccttggcccagcttagtcaaatcaaaaggcttctatttggagagctgaagagggtgtacagaggaaggggctaggtctgcaaggagtgcctcat

SEQ ID NO: 264792 - DNA, 120 bp, Artificial Sequence
  ENSG00000125970_28 (sequence is synthesized)
ctccctgaagagctctcagtggaacatacttcacccatccatgtacccacatctttccttgcccagaaggcgagagccagctataacagacccatttcaataccctggcaagtcattact

SEQ ID NO: 264793 - DNA, 120 bp, Artificial Sequence
  ENSG00000125970_29 (sequence is synthesized)
gcccttagctcttggtgtccccatctgtgaaacatgggggacagctgctagcctggattggaacttgggcaaagtccaaagaatgggatttagagctgaatgaacctcacactgagggca

SEQ ID NO: 264794 - DNA, 120 bp, Artificial Sequence
  ENSG00000125970_30 (sequence is synthesized)
caatagcactaggcactgcccccagagcctagtgctatatgcctgctgcaggtcctacccaagcatgctttactgaggaactcaacgtttcagagcttgagggtcaggttgatcatgggc

SEQ ID NO: 264795 - DNA, 120 bp, Artificial Sequence
  ENSG00000125970_31 (sequence is synthesized)
ttgtgaccataggcttccttagtatgccaggcttggagaaccgtgagaaaagcagggaagataccttcaagggtagcaggcatcagctctactcaccttggcccataaggctttgcctgg

SEQ ID NO: 264796 - DNA, 120 bp, Artificial Sequence
  ENSG00000125970_32 (sequence is synthesized)
tcatgctggcaccgggtcatatgctggacagggagaacgagagtcccatcctggaactccagaaaagcccctggatgctccagcccctgggaaagcacacagccaggcccttgggtggga

SEQ ID NO: 264797 - DNA, 120 bp, Artificial Sequence
  ENSG00000125970_33 (sequence is synthesized)
ggttggcttctaacagtgcatacacatgcccttcctctgagtcggggcagcaaaaacatccattccgctgcgcaacagttgtcatttttctaacatctgaaaactccagaaggagatggt

SEQ ID NO: 264798 - DNA, 120 bp, Artificial Sequence
  ENSG00000125970_34 (sequence is synthesized)
gataaatgtggtaccggattctgcctaaaggatcagtctttagatgttttcagattgaaagcctcatttgtgatcctcacagccatcttgaaagaatagagcagccagtgggtatactgg

SEQ ID NO: 264799 - DNA, 120 bp, Artificial Sequence
  ENSG00000125970_35 (sequence is synthesized)
attgtgagctaagaggcctgggactttccccctgttgctgccagccaggttgatgaccctgggcaagtctttttccttaccaggtctcagtttcctcagctgtaaaatgagaggttgatc

SEQ ID NO: 264800 - DNA, 120 bp, Artificial Sequence
  ENSG00000125970_36 (sequence is synthesized)
tggatcagggatagtaaatgggcctttgttcagttactgactgttgtataacaaaccacccccaaatttagtagccttaataaacatttattagctcctgagtgagtggcttggcagttt

SEQ ID NO: 264801 - DNA, 120 bp, Artificial Sequence
  ENSG00000125970_37 (sequence is synthesized)
gggctgtgttcagtgtggtggttcttatctcatctgggccctcgtgtggctgaagtgagctggcagatcagctggggactggctggtctcagatggcctcgcccgcctgtcaggtggttg

SEQ ID NO: 264802 - DNA, 120 bp, Artificial Sequence
  ENSG00000125970_38 (sequence is synthesized)
gctgggcaactgggccacacgttccagcatctagcaggctgacccaggattctagacatcatggctgagttccaaaaaccgcaagagaagacaagcccagtatgcgagtgctcttgagga

SEQ ID NO: 264803 - DNA, 120 bp, Artificial Sequence
  ENSG00000125970_39 (sequence is synthesized)
tattgctatgacgtatcttttggccaaagtaagtcacatggctaagcccaaattcttcttaacaggaggagcttcaaaatatggccatatttaaaaaatctacctcaggactcatttcac

SEQ ID NO: 264804 - DNA, 120 bp, Artificial Sequence
  ENSG00000125970_40 (sequence is synthesized)
ttgccaactcagaacttttagtagcagctgcctggagtgccttttgaggatctgcagcaattttcagactgtttggaaatactgacatgatagtttggcagtttctcttatgagcatgga

SEQ ID NO: 264805 - DNA, 120 bp, Artificial Sequence
  ENSG00000125970_41 (sequence is synthesized)
attcaagtgtgggcacgtgagcgtcaggtatttgccatccctggccaggttgacccgtaaggtcataacctgccccataggatgttatatgcagtaggcctgtctgacaagaccacagaa

SEQ ID NO: 264806 - DNA, 120 bp, Artificial Sequence
  ENSG00000125970_42 (sequence is synthesized)
atagagaaggcaaagcagagcaaaagattctgagccaggcatccttggttttcatcccaaccagatcattgattgattgaggttttaggcaaatcaaaatccctccaccagtagccagat

SEQ ID NO: 264807 - DNA, 120 bp, Artificial Sequence
  ENSG00000125970_43 (sequence is synthesized)
tcttcataataaacttcctccataacagtaaaccatttcctgaacacctgctgttaaaaagcacattttacatttacttaatctccacaaccaccctcagtaggtgtagtaaggacttct

SEQ ID NO: 264808 - DNA, 120 bp, Artificial Sequence
  ENSG00000125970_44 (sequence is synthesized)
ggttacaagttacagaaactgaattcagtcctgcttagtgggaggaagtttattggctcacaaattgtaaagtccagggatcttcagacatggggacttgggttcaaaagctgccatcga

SEQ ID NO: 264809 - DNA, 120 bp, Artificial Sequence
  ENSG00000125970_45 (sequence is synthesized)
gaatccggttagccaggcatggtgacacgtgcctgtagtccccgctacttgggggactacagtgggagatcatttgcacctaggaggttaatgctgcggtgagccatgatcctgccgctg

SEQ ID NO: 264810 - DNA, 120 bp, Artificial Sequence
  ENSG00000125970_46 (sequence is synthesized)
ccagcctgggtgacaaagcgagaccccaactcaaggggaaaaaatctggttttcgggcaggttccaagaagtggtagagcatggccatagggcctgtgagaatagagggacagaggggag

SEQ ID NO: 264811 - DNA, 120 bp, Artificial Sequence
  ENSG00000125970_47 (sequence is synthesized)
ggagaatccccaaaaggagagcaaggcttggctaacaaaaacaggcatccactgtgtggttatgtctattctatagattttgtagatgaggtttaaaagcatggccccaagtaaaggtgg

SEQ ID NO: 264812 - DNA, 120 bp, Artificial Sequence
  ENSG00000125970_48 (sequence is synthesized)
catctctatcctatcctcgcctttatctaaactctgtgaccgatcaatagcatatgatggtggtggtgctctgccagtctcccagtcccagactgaagcactagcagcttccacttatta

SEQ ID NO: 264813 - DNA, 120 bp, Artificial Sequence
  ENSG00000125970_49 (sequence is synthesized)
tctcttgggactctagctcttgggacccaaccaccatgctgtgaagcagcccaggccacacagagaggccacgtgtacatgttcagctgacagcagtatcaaatgtcagacatgagagag

SEQ ID NO: 264814 - DNA, 120 bp, Artificial Sequence
  ENSG00000125970_50 (sequence is synthesized)
gaaggcttcaagatgactccagcccagccaccgtctgagaacaaagtaagaactgcctcactgatgccattcaaagcccagcaccatgagagataataaaacgttgtttgaagatgctaa

SEQ ID NO: 264815 - DNA, 120 bp, Artificial Sequence
  ENSG00000125970_51 (sequence is synthesized)
tctggacctttccaaagccaggctgagagggtggggagagcccatgcgcctgggaagccgggctgtttctgggcggggctgcagactcctcgtgctcgtgtcaccgtgtccttcccagga

SEQ ID NO: 264816 - DNA, 120 bp, Artificial Sequence
  ENSG00000125970_52 (sequence is synthesized)
tcccaggagacagagaaggaggagagcccggaaccagggccggagcggcgggcggagccgagctgcggggagccgctccgggtgcccccacccccgcgcgcctcagtggtgccggccgag

SEQ ID NO: 264817 - DNA, 120 bp, Artificial Sequence
  ENSG00000125970_53 (sequence is synthesized)
tttacattggaacatagataaaacaacaagtcttccacagttctgctgctctaacacagccaagtattttcatgcatttctaagaggaaacagctgatgttttaggaggaggggttgtgt

SEQ ID NO: 264818 - DNA, 120 bp, Artificial Sequence
  ENSG00000125970_54 (sequence is synthesized)
gatatcaccagaagacagcctcacaagtgccttcttatcccctgaaaaaccttatggtctacagctaaacagtttggttgtagccttgtaaaggataataaacatccaggaatcataaac

SEQ ID NO: 264819 - DNA, 120 bp, Artificial Sequence
  ENSG00000125970_55 (sequence is synthesized)
gttactgtcttcatttccctatttgtaaagttggagtgcctccctgtcccctcacgtctcatgtgtgtactcctaccatgcaggtgggcaccatgtccttgaagcttcaggcaagcaatg

SEQ ID NO: 264820 - DNA, 120 bp, Artificial Sequence
  ENSG00000125970_56 (sequence is synthesized)
gcctgagctggttgcccccactgtgaacttcctgttctctccttcccaggggttctggtcctgggggaaagagggaagaatgagcagggggcacttgcctatctcagacaccatcagaag

SEQ ID NO: 264821 - DNA, 120 bp, Artificial Sequence
  ENSG00000125970_57 (sequence is synthesized)
tcccactgaggcctagggcagacctcccccaaatgcgggcacattctggcctccggtttccacatgagttggagaatgggagattcggacataagggagcacacacggcctgcagagctt

SEQ ID NO: 264822 - DNA, 120 bp, Artificial Sequence
  ENSG00000125970_58 (sequence is synthesized)
cagagcagggctggggtggcttgtggaggccacagccaggaggtgggtttttctaaaagccattgctgcttaagcatgaagcaaaagctgtctcataagggggtgagctccccgcctgtt

SEQ ID NO: 264823 - DNA, 120 bp, Artificial Sequence
  ENSG00000125971_0 (sequence is synthesized)
cacaggactcgctaagtgttcgctacgcggggctaccggatcggtcggaaatggcagaggtggaggagacactgaagcgactgcagagccagaagggagtgcagggaatcatcgtcgtga

SEQ ID NO: 264824 - DNA, 120 bp, Artificial Sequence
  ENSG00000125971_1 (sequence is synthesized)
acacagaaggcattcccatcaagagcaccatggacaaccccaccaccacccagtatgccagcctcatgcacagcttcatcctgaaggcacggagcaccgtgcgtgacatcgacccccaga

SEQ ID NO: 264825 - DNA, 120 bp, Artificial Sequence
  ENSG00000125971_2 (sequence is synthesized)
ttgtgattcagaatccaaccgaataagccactctcttggctccctgtgtcattccttaatttaatgccccccaagaatgttaatgtcaatcatgtcagtggactagcacatggcagtcgc

SEQ ID NO: 264826 - DNA, 120 bp, Artificial Sequence
  ENSG00000125971_3 (sequence is synthesized)
ttggaacccactcacaccaatccagtgaccgtgtgtgggctggcggctcttctcccccaccaacggaacccctgtgtgcaccaaccttccccagagctccggagcgccctctcctcactt

SEQ ID NO: 264827 - DNA, 120 bp, Artificial Sequence
  ENSG00000125971_4 (sequence is synthesized)
ccaggttttggagcaagagcttgcaggaagcccgcacccagcttccttctgaccttcagttcactttgtcgcccttggagaaagctgtttttctttaactaaaaataaccaaaatgctta

SEQ ID NO: 264828 - DNA, 120 bp, Artificial Sequence
  ENSG00000125971_5 (sequence is synthesized)
ggagacaggagcaggccccctgctcagggctgcccctgatcagttgggtggcctgaggcaactcctttccccgcttcagccctcaactgcctcgagtcctgtgatggtccagggaatctc

SEQ ID NO: 264829 - DNA, 120 bp, Artificial Sequence
  ENSG00000125971_6 (sequence is synthesized)
ttttgggcacttcttgctctaagacctgaaagacttttgtcactaagagagaaactgtcttctgggactggacattttgactccaaggagacaaccccaggggccaacagccccagctgt

SEQ ID NO: 264830 - DNA, 120 bp, Artificial Sequence
  ENSG00000125971_7 (sequence is synthesized)
gacccccaggcttccacatgaactcacaaaggagaggccctcattcttgccttaaaactgcccctaaagccaagccttttcactgggaagccctagctgcttaccttttggatactagtg

SEQ ID NO: 264831 - DNA, 120 bp, Artificial Sequence
  ENSG00000125971_8 (sequence is synthesized)
agtgctgcttttttgtatactcatggggctgattgcaccatagctgagaacgtggaatgcagaatgagcccacctggctttgaatctgggccctacttaacttatcagctatgtggtttt

SEQ ID NO: 264832 - DNA, 120 bp, Artificial Sequence
  ENSG00000125971_9 (sequence is synthesized)
gggcataagccactttctctgttaagttttctcatttgtaaaatgtgggtcataattctgccttcctctaggggaagcttttagaatagtgcctggcatgaaatgcctatgaatgtctca

SEQ ID NO: 264833 - DNA, 120 bp, Artificial Sequence
  ENSG00000125971_10 (sequence is synthesized)
tgcgtcccattctcagggcccccacatcagtgtctcgtttacatctcacacagtgaccctgcgaggcaagggtttgcccagtttgcagatgagaaacccaaagctgagagaggtgtgggg

SEQ ID NO: 264834 - DNA, 120 bp, Artificial Sequence
  ENSG00000125971_11 (sequence is synthesized)
aaccgcccaaggtcacccagctgtgaatgaacgtggtcagaacacagaatctgagttggtcacacttcccactgatccatggggcctttaagccctctggaagcttccattaaagatgat

SEQ ID NO: 264835 - DNA, 120 bp, Artificial Sequence
  ENSG00000125971_12 (sequence is synthesized)
tatttgaggataattgtattgggatgcctatgatcttatctagggttttcctacccatccccaacattcagctcagctgcctctttcttgaggacaccctcactgatcaccccagcccag

SEQ ID NO: 264836 - DNA, 120 bp, Artificial Sequence
  ENSG00000125971_13 (sequence is synthesized)
ccagagtggttgctcctgctcctgcccctgaacctatgacatacccaagtcccaatactttcgagccatctgccactgccttttgacatctctgccttggctagattcaaatggtgtttc

SEQ ID NO: 264837 - DNA, 120 bp, Artificial Sequence
  ENSG00000125971_14 (sequence is synthesized)
ataataaaagtctgagtttaagcagctttaccgaaaacgcaagggaagtttcattccatttatacttctccagaccccctgccatcctctgctgctacccacacaggcagaataaaaggc

SEQ ID NO: 264838 - DNA, 120 bp, Artificial Sequence
  ENSG00000125971_15 (sequence is synthesized)
ttaaatgtgtaagtcccatgaaggcaaagattggtctcttgtgttcactgctgtctgtagtacttaggatggtgttggcccagagttggtgtttgattaaagtatctgttgaatttttta

SEQ ID NO: 264839 - DNA, 120 bp, Artificial Sequence
  ENSG00000125971_16 (sequence is synthesized)
ggaaatggtgagcgtgcgccggggtcttgtggctggcggccgcccaccaccccacgccaggccttcagtcttccgaggatgaggggatctcagagctccggacagggaatcggtggtggc

SEQ ID NO: 264840 - DNA, 120 bp, Artificial Sequence
  ENSG00000125971_17 (sequence is synthesized)
tgggcgtggccgggcccgggccccagccgacttgagggtggaacccggcggcggaggcctctaaagcctgaccgaggcggggccgccggatcccgctgccccttgaccggaagcgggagc

SEQ ID NO: 264841 - DNA, 120 bp, Artificial Sequence
  ENSG00000125971_18 (sequence is synthesized)
ccagcctcggccaggaagagatgatgggcgaggggtgggcggcggccctgcagcctagagttttggggccttggtgcgcgatggcaaccctggcaacgtttcccgggagctcagtttgtg

SEQ ID NO: 264842 - DNA, 120 bp, Artificial Sequence
  ENSG00000125975_0 (sequence is synthesized)
actgaggtattccttcccctctcaggactagccacatgctgtctctctgccctggcctcttccaccccatgcccagtcagagaccgttttgagggtagagaagccagtctacggcccacc

SEQ ID NO: 264843 - DNA, 120 bp, Artificial Sequence
  ENSG00000125975_1 (sequence is synthesized)
acgggagccaccgcctgggccagacatgaagcgctggcagatttttgtcctgtgggtcttttgggtgctcatcctctggctgatgaccccctatctggatctgacacctgaatcagcacc

SEQ ID NO: 264844 - DNA, 120 bp, Artificial Sequence
  ENSG00000125975_2 (sequence is synthesized)
ccaggaaaaacgaatgtacttggtaccacagcattgcgactgcccttggttcagttccgggaagtgtggctgcccttctgagaccctcaactgctcctcctgccaccacacagccgacga

SEQ ID NO: 264845 - DNA, 120 bp, Artificial Sequence
  ENSG00000125975_3 (sequence is synthesized)
atggaactggcttgatgcgtgctccaggaagactatggggtacctgatgaggacaagagagtctatgacctctgacactgtgctctggtggttgggcatgaactcagggagcgagcttgg

SEQ ID NO: 264846 - DNA, 120 bp, Artificial Sequence
  ENSG00000125975_4 (sequence is synthesized)
gggattcccaggctctcggtgagccattttgatttctattgtgggacttgtgtgctgttggggcgcccacagatcccgcagggctccagccttggcaacgacatcgaccaataccccgtg

SEQ ID NO: 264847 - DNA, 120 bp, Artificial Sequence
  ENSG00000125975_5 (sequence is synthesized)
gttttcaggaatgccagcgaccagggctcctggatgcagctggagatgctactgcggaagctctctgacctggtgtggacttcagatgctctaagtgataagattttggaagatggtctg

SEQ ID NO: 264848 - DNA, 120 bp, Artificial Sequence
  ENSG00000125975_6 (sequence is synthesized)
gttccctagtggagtggaagatagcaaagacacgcctcttcttcccggtgccaggtgtcggggccaatctactgtctgccaggggcaccatcatcagggccagagatcatgattcgatac

SEQ ID NO: 264849 - DNA, 120 bp, Artificial Sequence
  ENSG00000125975_7 (sequence is synthesized)
aggagtttgggcctggtggctgcctatgtcctttcattgtggctgatcacctccttcctacaccagcactccagccagaaggacctccgtaatatggccaagatacacccaggaatctgc

SEQ ID NO: 264850 - DNA, 120 bp, Artificial Sequence
  ENSG00000125975_8 (sequence is synthesized)
gtttctatcactggaaggaggataatcagaccaagggctccaaggaaatactgcccacgtctagtgcaggagcagaaatcgaagtcatccatcagctagcgtgtggacaagctcactatt

SEQ ID NO: 264851 - DNA, 120 bp, Artificial Sequence
  ENSG00000125975_9 (sequence is synthesized)
cacacaagctcagcctagctgagtccatacaaatcctatttctgggtgggtaaagggcaggaggaaattgtaagatcagtctggtactgaataaaatcctggcctgattgtcttacctgt

SEQ ID NO: 264852 - DNA, 120 bp, Artificial Sequence
  ENSG00000125975_10 (sequence is synthesized)
gttggtcagtggtcaacactgggcccggccatatcccccatgctttccgggcctcacccatctcccactttccgcccaaatccctgcccttggccctgtcttcacagcctctggatggag

SEQ ID NO: 264853 - DNA, 120 bp, Artificial Sequence
  ENSG00000125975_11 (sequence is synthesized)
atctcacccacccagctctgttttctctcccctgggcccagcccccaatctccctcttgctgtttccagggcatgaactcagggagcgagcttgggaaattgtggaggaagctgtttaaa

SEQ ID NO: 264854 - DNA, 120 bp, Artificial Sequence
  ENSG00000125977_0 (sequence is synthesized)
gtcgtttcctttcgctgatgcaagagcctagtgcggtggtgggagaggtatcggcaggggcagcgctgccgccggggcctggggctgacccgtctgacttcccgtccgtgccgagcccac

SEQ ID NO: 264855 - DNA, 120 bp, Artificial Sequence
  ENSG00000125977_1 (sequence is synthesized)
tcgagccgcagccatgtctggggacgagatgatttttgatcctactatgagcaagaagaaaaagaagaagaagaagccttttatgttagatgaggaaggggatacccaaacagaggaaac

SEQ ID NO: 264856 - DNA, 120 bp, Artificial Sequence
  ENSG00000125977_2 (sequence is synthesized)
ccagccttcagaaacaaaagaagtggagccagagccaactgaggacaaggatttggaagctgatgaagaggacactaggaaaaaagatgcttctgatgatctagatgacttgaacttctt

SEQ ID NO: 264857 - DNA, 120 bp, Artificial Sequence
  ENSG00000125977_3 (sequence is synthesized)
taatcaaaagaaaaagaagaaaaaaactaaaaagatatttgatattgatgaagctgaagaaggtgtaaaggatcttaagattgaaagtgatgttcaagaaccaactgaaccagaggatga

SEQ ID NO: 264858 - DNA, 120 bp, Artificial Sequence
  ENSG00000125977_4 (sequence is synthesized)
ccttgacattatgcttggcaataaaaagaagaaaaagaagaatgttaagttcccagatgaggatgaaatactagagaaagatgaagctctagaagatgaagacaacaaaaaagatgatgg

SEQ ID NO: 264859 - DNA, 120 bp, Artificial Sequence
  ENSG00000125977_5 (sequence is synthesized)
tatctcattcagtaatcagacaggccctgcttgggcaggctcagaaagagactacacatacgaggagctgctgaatcgagtgttcaacatcatgagggaaaagaatccagatatggttgc

SEQ ID NO: 264860 - DNA, 120 bp, Artificial Sequence
  ENSG00000125977_6 (sequence is synthesized)
tggggagaaaaggaaatttgtcatgaaacctccacaagtcgtccgagtaggaaccaagaaaacttcttttgtcaactttacagatatctgtaaactattacatcgtcagcccaaacatct

SEQ ID NO: 264861 - DNA, 120 bp, Artificial Sequence
  ENSG00000125977_7 (sequence is synthesized)
ccttgcatttttgttggctgaattgggtacaagtggttctatagatggtaataaccaacttgtaatcaaaggaagattccaacagaaacagatagaaaatgtcttgagaagatatatcaa

SEQ ID NO: 264862 - DNA, 120 bp, Artificial Sequence
  ENSG00000125977_8 (sequence is synthesized)
ggaatatgtcacttgtcacacatgccgatcaccggacacaatcctgcagaaggacacacgactctatttcctacagtgcgaaacttgtcattctagatgttctgttgccagtatcaaaac

SEQ ID NO: 264863 - DNA, 120 bp, Artificial Sequence
  ENSG00000125977_9 (sequence is synthesized)
cggcttccaggctgtcacgggcaagcgagcacagctccgtgccaaagctaactaatttgctaatcactgattttgcaaagcttgttgtggagatgtggctggacaggtttgccatcagag

SEQ ID NO: 264864 - DNA, 120 bp, Artificial Sequence
  ENSG00000125977_10 (sequence is synthesized)
ctgccaagatttttggcgagtggttggtctgaagtccttgcaagacgctgatgctcaagctgttgacatactcattgcctactttaacacctgtcagagaaacgtgatatggggtaagga

SEQ ID NO: 264865 - DNA, 120 bp, Artificial Sequence
  ENSG00000125977_11 (sequence is synthesized)
ggtgcttttttaaaatcgttcatagacttctgtaaaatgcaagataaattaaagttattataacagtgattctttcaatttggtttgtccttcagttttcttttctataaatgtgcttgg

SEQ ID NO: 264866 - DNA, 120 bp, Artificial Sequence
  ENSG00000125977_12 (sequence is synthesized)
tgaaatcagcaagaaaccaaccatataaaacagtgtgtgccgggctctgactgagaaactgaacaatggcaggcgcttcatctgggcagccatttttcttctctgcttctcttgagatac

SEQ ID NO: 264867 - DNA, 120 bp, Artificial Sequence
  ENSG00000125977_13 (sequence is synthesized)
atagttaaagtagacacggcctcccacgcgagtgtggtgggaccttgagacttaggaggattgcctgttttcagtgtccagggaatgactccatagatttgaattcttttccgtatgtgg

SEQ ID NO: 264868 - DNA, 120 bp, Artificial Sequence
  ENSG00000125977_14 (sequence is synthesized)
ggatggttgctactacctcaccgccaagtcctcccccagctgttaccacatgagggaatacaaggtgctaggtaccctccttcctcgttggccactaagaggtcttagaaacatagcctg

SEQ ID NO: 264869 - DNA, 120 bp, Artificial Sequence
  ENSG00000125977_15 (sequence is synthesized)
taaatgtgtcttgtaactggcacactaaaaaagatcctagttgagcatctctcttggtgaggaagcgatgtgtgtgcggttcaggaaactcctccaagaggaggaggagtccaaacaggg

SEQ ID NO: 264870 - DNA, 120 bp, Artificial Sequence
  ENSG00000125977_16 (sequence is synthesized)
atgccagaggaagctttccgttttcctagccaacttgtgttctgggtttgaaaaagacccaccacaaatgctttttctattttctgatttaaaagtcgcttttgaatatgaccatgagaa

SEQ ID NO: 264871 - DNA, 120 bp, Artificial Sequence
  ENSG00000125977_17 (sequence is synthesized)
accaagaaatgctgcttgtgtggtgctctgcttcctgaggatttggctggaaggggattctccgctggcacatgggagaaggccatcttctgtgtcggtgctgtgatctgccttgttctc

SEQ ID NO: 264872 - DNA, 120 bp, Artificial Sequence
  ENSG00000125977_18 (sequence is synthesized)
acttgctgaggataagggcatacacgctgctcctcgctttcttgttgcccgacttcgtactaagcagctcaggagcagtcactcagacccaaatgtcttgactgtgttgtttttaatcac

SEQ ID NO: 264873 - DNA, 120 bp, Artificial Sequence
  ENSG00000125977_19 (sequence is synthesized)
tgtgacccttaaagtacaggccaagtgttgtcaaacaccttggctaaaacagtggagggtgatgggtaaagcagtagagggccctcaacccacacactggctgaaactgccaccaactgc

SEQ ID NO: 264874 - DNA, 120 bp, Artificial Sequence
  ENSG00000125977_20 (sequence is synthesized)
cacgatgaacccaactgctgtttatgcccccattttcctttttttgtatctacacccacacgattcccaatgttggatatttctacatgaataaagcaaggatcagtgcctcttatgtaa

SEQ ID NO: 264875 - DNA, 120 bp, Artificial Sequence
  ENSG00000125991_0 (sequence is synthesized)
ggccggaagagggagtctgtaggggcgggccggctggcgtcccctttccggccggtccccatggaggcgctggggaagctgaagcagttcgatgcctaccccaagactttggaggacttc

SEQ ID NO: 264876 - DNA, 120 bp, Artificial Sequence
  ENSG00000125991_1 (sequence is synthesized)
cgggtcaagacctgcgggggcgccaccgtgaccattgtcagtggccttctcatgctgctactgttcctgtccgagctgcagtattacctcaccacggaggtgcatcctgagctctacgtg

SEQ ID NO: 264877 - DNA, 120 bp, Artificial Sequence
  ENSG00000125991_2 (sequence is synthesized)
gacaagtcgcggggagataaactgaagatcaacatcgatgtactttttccgcacatgccttgtgcctatctgagtattgatgccatggatgtggccggagaacagcagctggatgtggaa

SEQ ID NO: 264878 - DNA, 120 bp, Artificial Sequence
  ENSG00000125991_3 (sequence is synthesized)
cacaacctgttcaagcaacgactagataaagatggcatccccgtgagctcagaggctgagcggcatgagcttgggaaagtcgaggtgacggtgtttgaccctgactccctggaccctgat

SEQ ID NO: 264879 - DNA, 120 bp, Artificial Sequence
  ENSG00000125991_4 (sequence is synthesized)
cgctgtgagagctgctatggtgctgaggcagaagatatcaagtgctgtaacacctgtgaagatgtgcgggaggcatatcgccgtagaggctgggccttcaagaacccagatactattgag

SEQ ID NO: 264880 - DNA, 120 bp, Artificial Sequence
  ENSG00000125991_5 (sequence is synthesized)
agcagaagaatgaaggctgccaggtgtatggcttcttggaagtcaataaggtggccggaaacttccactttgcccctgggaagagcttccagcagtcccatgtgcacgtacatgctgtgg

SEQ ID NO: 264881 - DNA, 120 bp, Artificial Sequence
  ENSG00000125991_6 (sequence is synthesized)
agatccatgacttgcagagctttggccttgacaacatcaacatgacccactacatccagcacctgtcatttggggaggactatccaggcattgtgaaccccctggaccacaccaatgtca

SEQ ID NO: 264882 - DNA, 120 bp, Artificial Sequence
  ENSG00000125991_7 (sequence is synthesized)
ctgcgccccaagcctccatgatgttccagtactttgtgaaggtggtgcccactgtgtacatgaaggtggacggagaggtactgaggacaaatcagttctctgtgaccagacatgagaagg

SEQ ID NO: 264883 - DNA, 120 bp, Artificial Sequence
  ENSG00000125991_8 (sequence is synthesized)
ttgccaatgggctgttgggcgaccaaggccttcccggagtcttcgtcctctatgagctctcgcccatgatggtgaagctgacggagaagcacaggtccttcacccacttcctgacaggtg

SEQ ID NO: 264884 - DNA, 120 bp, Artificial Sequence
  ENSG00000125991_9 (sequence is synthesized)
tgtgcgccatcattgggggcatgttcacagtggctggactcatcgattcgctcatctaccactcagcacgagccatccagaagaaaattgatctagggaagacaacgtagtcaccctcgg

SEQ ID NO: 264885 - DNA, 120 bp, Artificial Sequence
  ENSG00000125991_10 (sequence is synthesized)
tgcttcctctgtctcctctttctccctggcctgtggttgtcccccagcctctgccaccctccacctcctcggtcagccccagccccaggttgataaatctattgattgattgtgatagta

SEQ ID NO: 264886 - DNA, 120 bp, Artificial Sequence
  ENSG00000125991_11 (sequence is synthesized)
tgtgtacccgctcccaaggctgccctggcctgtggagcagcatctcagcagagtggcaggatgcgaggggctgagggcagaggaagtcaggtcagccttggtgcgtctttggagagctgc

SEQ ID NO: 264887 - DNA, 120 bp, Artificial Sequence
  ENSG00000125991_12 (sequence is synthesized)
gaactctcacacaggcccaaggcttgccctttctggctgtccttaagcaggaccaggaggtgccaggctggagaaggaatgaggggcagagaagacaggtggtttgcagtccagggggag

SEQ ID NO: 264888 - DNA, 120 bp, Artificial Sequence
  ENSG00000125991_13 (sequence is synthesized)
gtgcttaatgcctgacccgtagcatgtactatatgaatattagttattataacttttattatccctaagcaaagggcttgtgcagactggagccaccgatttcactgtgtctggccccag

SEQ ID NO: 264889 - DNA, 120 bp, Artificial Sequence
  ENSG00000125991_14 (sequence is synthesized)
tgcacggtgagtgatctgcactagctggggagatttagatgctggccaccttcttggtgagcttgagtggtcctcttctgcctgctgctcatttgtcttgggcaaccatttggccagagc

SEQ ID NO: 264890 - DNA, 120 bp, Artificial Sequence
  ENSG00000125991_15 (sequence is synthesized)
ccaaatgctgccaggataggtaaactgtaaagacttggcacctggaggggaaggctgaggccaagactaggagagggggtctggcgggccaggccttgcagtgcaggccactagcacggt

SEQ ID NO: 264891 - DNA, 120 bp, Artificial Sequence
  ENSG00000125991_16 (sequence is synthesized)
gctgtgttctctccttacacggccaaggctcaacaggaaaggggaaggagcaggggtggggctgatggtggctggagccaggtcctagccctagccctggcccaggctcccctcccaccc

SEQ ID NO: 264892 - DNA, 120 bp, Artificial Sequence
  ENSG00000125991_17 (sequence is synthesized)
ttcagaccttactggctgtgtgactttgagaaggtttcttaatctttttgactcctgttttctactttataaaatgttgtgagggcacttatctcacagggtgtgtgtgcaggttaaaga

SEQ ID NO: 264893 - DNA, 120 bp, Artificial Sequence
  ENSG00000125991_18 (sequence is synthesized)
tgatagcacggagcctggcttgtggtaggtacttgttgaaatggtagccccccgtgtccgatgatgacctgtgcatgaggctttgggagaagcagagctaggttggagcacaggttctgc

SEQ ID NO: 264894 - DNA, 120 bp, Artificial Sequence
  ENSG00000125991_19 (sequence is synthesized)
cacacctgggctatgtcatatttgggccctatttagttgcttcttctgtaaaatggggatgatgataatagtacccactcacagggctgttggggtgaacaaatgagatttattctcatt

SEQ ID NO: 264895 - DNA, 120 bp, Artificial Sequence
  ENSG00000125991_20 (sequence is synthesized)
catttgttcattcatgcattcacaaaatatttagtaatcacctactagtctagttgctaagggtacagtagtgaacaatctgtgccctcagaacattctagtaaagaaatagacaataag

SEQ ID NO: 264896 - DNA, 120 bp, Artificial Sequence
  ENSG00000125991_21 (sequence is synthesized)
tatataaaatataaatagtccccaattaacaatggttcagcttgcaatttttaacttcatgatgggtattacatgcatttttcacttaacgatattttctttttcttttttgagacagag

SEQ ID NO: 264897 - DNA, 120 bp, Artificial Sequence
  ENSG00000125991_22 (sequence is synthesized)
cgcagcggggccggggtcgcgtggaggggggcgtcctagagcttagcccgggctcctggactctgactggcctgccggtgtctgagggagcggattcgaggccattctgaccctcgcccc

SEQ ID NO: 264898 - DNA, 120 bp, Artificial Sequence
  ENSG00000125991_23 (sequence is synthesized)
ggacaccagtggaaccaacataatttgctataggactggatgtggagtggaggagagcaaagtcatggttgttgattccaacgctttcagcctgagcaaatgaatgacttgagatggaga

SEQ ID NO: 264899 - DNA, 120 bp, Artificial Sequence
  ENSG00000125991_24 (sequence is synthesized)
tgactggaggagaaggtttttttggtgggagggaggagtggctattggatatccactgctgtgtaacaaagtactccaaaagttagtagtttgatacaataaaaatgtgttttttcagtt

SEQ ID NO: 264900 - DNA, 120 bp, Artificial Sequence
  ENSG00000125991_25 (sequence is synthesized)
gagctcagaggctgagcggcatggtaaccaggggagggggccgggtctcagatcccaaagctggatgtacccaagcctatctgctagcaagtgaactgtggcaggcatagtgatacatta

SEQ ID NO: 264901 - DNA, 120 bp, Artificial Sequence
  ENSG00000125991_26 (sequence is synthesized)
aacaactaagagctagagaagtcaagtgacttgcctagggtcccccagctagtaagagtcagagtgagctaaaatcctctatacatatcgagtcaggtaatctacctggctattattctc

SEQ ID NO: 264902 - DNA, 120 bp, Artificial Sequence
  ENSG00000125991_27 (sequence is synthesized)
agaggtcctcaatacctgcagatggtagtttgaataccagaggtttgaagataggtcttatgtgctcttgccttggtagaactgtctagatggacccaggcttctttgagtgtttgcttt

SEQ ID NO: 264903 - DNA, 120 bp, Artificial Sequence
  ENSG00000125991_28 (sequence is synthesized)
cccagcccattggcttaattcagcccttaatgctcttcccctttggaatgcaggtggtttaatgagaatttaggttctcaagtcagattgcctgggttcacatctagctttgtctcctgc

SEQ ID NO: 264904 - DNA, 120 bp, Artificial Sequence
  ENSG00000125991_29 (sequence is synthesized)
agtctgtgagcttcagctagaaagtggtaataaaacagtagtaccaaccacatggaattgtaagatcaaatgaagtcatatgtgtaaaatgcctggtacagagtgggtacccacttttac

SEQ ID NO: 264905 - DNA, 120 bp, Artificial Sequence
  ENSG00000125991_30 (sequence is synthesized)
cttcctttcctttatcttggtggcttcccaattcccttcgttaactcagtttcccaccacagcaaactgtcctcaaagctgggatttctaacaccttagagattactctggtggggagtt

SEQ ID NO: 264906 - DNA, 84 bp, Artificial Sequence
  ENSG00000125991_31 (sequence is synthesized)
tttaggagtggcttgtttgggtgattcgggattagggtatctcacgaggttgcagtcatctaaggattgatggggcactgaaga

SEQ ID NO: 264907 - DNA, 120 bp, Artificial Sequence
  ENSG00000125991_32 (sequence is synthesized)
caggcatgagccactgcgcctggcctacttatttgttgtttaaatttattttttttctgtcaaggtgttctttatttcagagagagggcaggacagggggctcagtctttcttggcatca

SEQ ID NO: 264908 - DNA, 120 bp, Artificial Sequence
  ENSG00000125991_33 (sequence is synthesized)
atcagctttcctcatgatggctgggacattgctcagctcctcctgcctcctcttagtgcggatgtgcgtccccactcttttcttgatgaacttgagggcccgtttgtccttggagacctt

SEQ ID NO: 264909 - DNA, 120 bp, Artificial Sequence
  ENSG00000125991_34 (sequence is synthesized)
gagtaacaccatggcgtgccgctcatacggggcgaaaccacacacctctcggatcatgtcccacatgaatttggtgtttggtcaggcgcccgcggcggcagctgtgcctgggcttgctca

SEQ ID NO: 264910 - DNA, 120 bp, Artificial Sequence
  ENSG00000125991_35 (sequence is synthesized)
tgttcttggtcatcttgtggcccttgtcaaggcacacggccatagtgggtagcacagagccatggctgctgctctccaatggcagctgtggcagaagggctggtgccacgcggggatcta

SEQ ID NO: 264911 - DNA, 68 bp, Artificial Sequence
  ENSG00000125991_36 (sequence is synthesized)
ggcagctgtggcagaagggctggtgccacgcggggatctactttttttttttttttttttttgagtca

SEQ ID NO: 264912 - DNA, 80 bp, Artificial Sequence
  ENSG00000125991_37 (sequence is synthesized)
ctctgcctcccggcttcaagtgattcacctgcctcagccttctgagtagctggggttacaggcgcctgcccccacacccg

SEQ ID NO: 264913 - DNA, 120 bp, Artificial Sequence
  ENSG00000125991_38 (sequence is synthesized)
agtgttgggattacaggcatgggccaccacgcccagcaggggatctgcttttaaagggctcactcatagggctgttggcaggatgcctcagtgcctcaccacatgggcctctcagtaggg

SEQ ID NO: 264914 - DNA, 120 bp, Artificial Sequence
  ENSG00000125991_39 (sequence is synthesized)
acatgggcctctcagtagggttgcttgtgtgtccttgtatcacggcaactggcttcccccacttggatcttgcaagtgagctgagagaacaaagtagaaaccataacctttggccaggca

SEQ ID NO: 264915 - DNA, 120 bp, Artificial Sequence
  ENSG00000125991_40 (sequence is synthesized)
ccccctggaccacaccaatgtcactgcgccccaagcctccatgatgttccagtactttgtgaaggtggtgcccactgtgtacatgaaggtggacggagaggctcccctcccaccccaggt

SEQ ID NO: 264916 - DNA, 120 bp, Artificial Sequence
  ENSG00000125991_41 (sequence is synthesized)
tctcctagtccatgacttgcagagctttggccttgacaaccctccatgatgttccagtactttgtgaaggtggtgcccactgtgtacatgaaggtggacggagaggtgagtcagggagct

SEQ ID NO: 264917 - DNA, 120 bp, Artificial Sequence
  ENSG00000125991_42 (sequence is synthesized)
ggagttcctgcatttcgttccgtcagcctggggagtgaaagctgcctcgtcctcacatggcgaataaaagactgaggcacagagagggtgggggatttgccctcccaggcagagtgcagg

SEQ ID NO: 264918 - DNA, 120 bp, Artificial Sequence
  ENSG00000125991_43 (sequence is synthesized)
cctggggctgttagatttaaagcgcctgctctttctgctgccctcaccgcttctatccgttcctccggtgcccaccgtctgcctgcctcactgttctctgtggtctgcctgggctggggg

SEQ ID NO: 264919 - DNA, 120 bp, Artificial Sequence
  ENSG00000125995_0 (sequence is synthesized)
ggtgaggtaggcgccgggcgacgcggggccggaacgcgaagagggtggtggagtcgggctacccactgattttccttcccttacttcccctgagcccttgggcccacttcccagcctacc

SEQ ID NO: 264920 - DNA, 120 bp, Artificial Sequence
  ENSG00000125995_1 (sequence is synthesized)
gcttccgtccccgcccgactcttgggccagcgcctgggcccacactttcctatcccccgcagatgccggtggccgtgggtccctacggacagtcccagccaagctgcttcgaccgtgtca

SEQ ID NO: 264921 - DNA, 120 bp, Artificial Sequence
  ENSG00000125995_2 (sequence is synthesized)
gggttgcgccgtgggcatggcggccggggcgctcttcggcaccttttcctgtctcaggatcggaatgcggggtcgagagctgatgggcggcattgggaaaaccatgatgcagagtggcgg

SEQ ID NO: 264922 - DNA, 120 bp, Artificial Sequence
  ENSG00000125995_3 (sequence is synthesized)
cacctttggcacattcatggccattgggatgggcatccgatgctaaccatggttgccaactacatctgtcccttcccatcaatcccagcccatgtactaataaaagaaagtctttgagta

SEQ ID NO: 264923 - DNA, 120 bp, Artificial Sequence
  ENSG00000125995_4 (sequence is synthesized)
gcggctcggagcagcatggtcccgctggcagagcccaccttccgaagccgctgcagtcctgggccccaggctcccggaagtgctgcccggcgctccggaagcgattcatcgggccgcgag

SEQ ID NO: 264924 - DNA, 120 bp, Artificial Sequence
  ENSG00000125998_0 (sequence is synthesized)
gccacacacacagcgagcgggcgggcagaaggcggttctgctggtctcctcttcctgctgcagccagcccagcgtgcgggccatgggccctgccggcgggtgaggcagccgcgtggcagg

SEQ ID NO: 264925 - DNA, 120 bp, Artificial Sequence
  ENSG00000125998_1 (sequence is synthesized)
catgttcggaggcccggggcctggggtcctgggagcccagggcatggcgggacccctgcggggccgggtggaagagctgaagctgccgtggtggcgggagagctcaccgctggtgctgcg

SEQ ID NO: 264926 - DNA, 120 bp, Artificial Sequence
  ENSG00000125998_2 (sequence is synthesized)
gcacagcgaggcggctcggctggcggccgacgccctcctggagcggggtgaggctgcctacctgcgggtcatctccgaggagcgggagctgcccttcctgagcgccctggatgtggacta

SEQ ID NO: 264927 - DNA, 120 bp, Artificial Sequence
  ENSG00000125998_3 (sequence is synthesized)
catgaccagccatgtgcgcgggggccctgagctcagcgaggctcaggggcaggaggcctccgggccagaccgcctcagcctgctctctgaagtcacctcagggacttacttccccatggc

SEQ ID NO: 264928 - DNA, 120 bp, Artificial Sequence
  ENSG00000125998_4 (sequence is synthesized)
ctctgacatagaccccccagacctggacctgggctggcccgaggtgccacaggccacaggcttcagccccacccaggctgtggtccacttccagagggacaaggccaagaacatcaagga

SEQ ID NO: 264929 - DNA, 120 bp, Artificial Sequence
  ENSG00000125998_5 (sequence is synthesized)
cctgctgcgcttccttttcagccaggcccacacggtggtggctgtggtgatggacatattcactgacatggagcttctgtgtgacctcatggaggcctcaagccggcgtggtgtccctgt

SEQ ID NO: 264930 - DNA, 120 bp, Artificial Sequence
  ENSG00000125998_6 (sequence is synthesized)
gtacctgctccttgcccaggagcacctgaggcacttcctggagatgtgctacaagatggacctcaatggggagcacctgccgaacatgcgtgtgcggagcacgtgtggggacacatactg

SEQ ID NO: 264931 - DNA, 120 bp, Artificial Sequence
  ENSG00000125998_7 (sequence is synthesized)
cagcaaggctggccgccgcttcacggggcaggccctggagaagttcgtcctcattgactgtgagcaagtggtggcgggcagttacagcttcacctggctttgcagccaggcccacactag

SEQ ID NO: 264932 - DNA, 120 bp, Artificial Sequence
  ENSG00000125998_8 (sequence is synthesized)
catggtgctgcagctgaggggccgcatcgtggaagactttgaccgggagttccgctgtctgtacgctgagtcgcagcctgtggagggcttctgtggcggtgaggacccgctgtctccccg

SEQ ID NO: 264933 - DNA, 120 bp, Artificial Sequence
  ENSG00000125998_9 (sequence is synthesized)
ggcactgcgtcctccccctgtggccctagccttcaggcctgatgtcccaagccccacgtcgtccctgccctccagcaccagcctcagcagcatcaagcagtcaccgcttatgggtcgctc

SEQ ID NO: 264934 - DNA, 120 bp, Artificial Sequence
  ENSG00000125998_10 (sequence is synthesized)
ctcctacctcgctctaccaggaggtggtgattgcagtgatacgggtgtggtgtcctcgtccctgggtcctgcccgccgtgaggccagtggccagccctccctacatcgccaactgtcaga

SEQ ID NO: 264935 - DNA, 120 bp, Artificial Sequence
  ENSG00000125998_11 (sequence is synthesized)
ccctaaccacggctcccctcctgggctctatagggccaatctcggcaagctaggggcatacccatggtcccagtcctcccctgccctcaaccataatagtaccagccccttaaccttggc

SEQ ID NO: 264936 - DNA, 120 bp, Artificial Sequence
  ENSG00000125998_12 (sequence is synthesized)
agtggggtcacctctgcttcctcgctcccggcccctcctccagttccatcggggtgccccagctctgtcccggttcccagagaatgggctcccaggaagccaagagcccagccccctgcg

SEQ ID NO: 264937 - DNA, 120 bp, Artificial Sequence
  ENSG00000125998_13 (sequence is synthesized)
aagaaggcatctccaagtcagagccgtggccagctggatctccttgtccccttccccagagcccgagaagtgggagaccctgactctggggttacccccaactcaggcccccttcggcct

SEQ ID NO: 264938 - DNA, 120 bp, Artificial Sequence
  ENSG00000125998_14 (sequence is synthesized)
ggcgagcaggccccagaggacaggaggttgtccccaagccaggccgacagccagctggatctcctgtcccgagccctgggtactgggggtgcccctgagttgggttccctcagacctggt

SEQ ID NO: 264939 - DNA, 120 bp, Artificial Sequence
  ENSG00000125998_15 (sequence is synthesized)
gatcgggccctggaggacaggaggctgtccctaaaccaaagccgtggccaatcagacctcctgatgcagtaccccaaggcccagggttccagagtgccccttgaaaccaactcctcagcc

SEQ ID NO: 264940 - DNA, 120 bp, Artificial Sequence
  ENSG00000125998_16 (sequence is synthesized)
agacctgccagacgggcaccagatgagcggcggcagaccctggggcacagccagctggacctcatcacaaagttcggcccattccgtggtgaggggcctgggcccaatggtctcccgata

SEQ ID NO: 264941 - DNA, 120 bp, Artificial Sequence
  ENSG00000125998_17 (sequence is synthesized)
tcaagccctgctcgcacggctggagctgggtctggggatgagaaacggctaaccctgggccacagcaagctggacctcatcaccaagtatcatcagttgcacggggccaggcagggaact

SEQ ID NO: 264942 - DNA, 120 bp, Artificial Sequence
  ENSG00000125998_18 (sequence is synthesized)
gagcctgggggtcccaagggtggccatctcaatggtggtaacagtgacctggtcagggatgagaaacggctgaccctgggtcacagcaaactggacctcatcactaagtacaacaagtcc

SEQ ID NO: 264943 - DNA, 120 bp, Artificial Sequence
  ENSG00000125998_19 (sequence is synthesized)
aagttcaagcagctccgaagccgctttgagtcctagccaaaggactggcatcgggggtgcactggcaagggcaggcccctcctctgtccaccgagactctggacttgctcaggtcccaga

SEQ ID NO: 264944 - DNA, 120 bp, Artificial Sequence
  ENSG00000125998_20 (sequence is synthesized)
caccgagactctggacttgctcaggtcccagactggggaagggaggtgtctagaaacccaggtcagacacactctctgggctcaagattcttgtgtacacacacacacacacacacacac

SEQ ID NO: 264945 - DNA, 120 bp, Artificial Sequence
  ENSG00000125998_21 (sequence is synthesized)
aggctgtgtttccagccctgtgctgggcctgtagagctgacaggtgggtcacactcagacctggggacagaggtgaaatgcacaagctgctggagaaggggtcagagccatatcaagtta

SEQ ID NO: 264946 - DNA, 120 bp, Artificial Sequence
  ENSG00000125998_22 (sequence is synthesized)
aaggttaaccagttacagagggtgttagaaaacaaagggcagagagtcctggagaaggtggagtagtcagaaaactttcttagaggagatggaggtggcctttgagccaggccctgaagg

SEQ ID NO: 264947 - DNA, 120 bp, Artificial Sequence
  ENSG00000125998_23 (sequence is synthesized)
atggggaggttttggacagagggaggagagagttagaaaaatttttggtagagagaatcaggtgaaagagatgccctaaagaggactgagtgggtctgaggtgaatgagtgaggaagagc

SEQ ID NO: 264948 - DNA, 120 bp, Artificial Sequence
  ENSG00000125998_24 (sequence is synthesized)
agagtatgtggatacccggaaacacacacacacacacatcatcattatcatcatcatcattgtcgtcgtcatcatcttgctgagtcatcatcatcatcatcatcattgtcgtcgtcatca

SEQ ID NO: 264949 - DNA, 120 bp, Artificial Sequence
  ENSG00000125998_25 (sequence is synthesized)
tcttgctgagtgtctcttgaagtacaggctgtgacaggttgtgggccattttcctgaactcaccacttacccgggatagtaaacatgatacacatcaataaaggcagactttattgtgaa

SEQ ID NO: 264950 - DNA, 120 bp, Artificial Sequence
  ENSG00000125999_0 (sequence is synthesized)
gggagaggagaggagcgggccgaggactccagcgtgcccaggtctggcatcctgcacttgctgccctctgacacctgggaagatggccggcccgtggaccttcacccttctctgtggttt

SEQ ID NO: 264951 - DNA, 120 bp, Artificial Sequence
  ENSG00000125999_1 (sequence is synthesized)
gctggcagccaccttgatccaagccaccctcagtcccactgcagttctcatcctcggcccaaaagtcatcaaagaaaagctgacacaggagctgaaggaccacaacgccaccagcatcct

SEQ ID NO: 264952 - DNA, 120 bp, Artificial Sequence
  ENSG00000125999_2 (sequence is synthesized)
gcagcagctgccgctgctcagtgccatgcgggaaaagccagccggaggcatccctgtgctgggcagcctggtgaacaccgtcctgaagcacatcatctggctgaaggtcatcacagctaa

SEQ ID NO: 264953 - DNA, 120 bp, Artificial Sequence
  ENSG00000125999_3 (sequence is synthesized)
catcctccagctgcaggtgaagccctcggccaatgaccaggagctgctagtcaagatccccctggacatggtggctggattcaacacgcccctggtcaagaccatcgtggagttccacat

SEQ ID NO: 264954 - DNA, 120 bp, Artificial Sequence
  ENSG00000125999_4 (sequence is synthesized)
gacgactgaggcccaagccaccatccgcatggacaccagtgcaagtggccccacccgcctggtcctcagtgactgtgccaccagccatgggagcctgcgcatccaactgctgcataagct

SEQ ID NO: 264955 - DNA, 120 bp, Artificial Sequence
  ENSG00000125999_5 (sequence is synthesized)
ctccttcctggtgaacgccttagctaagcaggtcatgaacctcctagtgccatccctgcccaatctagtgaaaaaccagctgtgtcccgtgatcgaggcttccttcaatggcatgtatgc

SEQ ID NO: 264956 - DNA, 120 bp, Artificial Sequence
  ENSG00000125999_6 (sequence is synthesized)
gggtgacaccattcagctctacctgggggccaagttgttggactcacagggaaaggtgaccaagtggttcaataactctgcagcttccctgacaatgcccaccctggacaacatcccgtt

SEQ ID NO: 264957 - DNA, 120 bp, Artificial Sequence
  ENSG00000125999_7 (sequence is synthesized)
cagcctcatcgtgagtcaggacgtggtgaaagctgcagtggctgctgtgctctctccagaagaattcatggtcctgttggactctgtgcttcctgagagtgcccatcggctgaagtcaag

SEQ ID NO: 264958 - DNA, 120 bp, Artificial Sequence
  ENSG00000125999_8 (sequence is synthesized)
catcgggctgatcaatgaaaaggctgcagataagctgggatctacccagatcgtgaagatcctaactcaggacactcccgagttttttatagaccaaggccatgccaaggtggcccaact

SEQ ID NO: 264959 - DNA, 120 bp, Artificial Sequence
  ENSG00000125999_9 (sequence is synthesized)
gatcgtgctggaagtgtttccctccagtgaagccctccgccctttgttcaccctgggcatcgaagccagctcggaagctcagttttacaccaaaggtgaccaacttatactcaacttgaa

SEQ ID NO: 264960 - DNA, 120 bp, Artificial Sequence
  ENSG00000125999_10 (sequence is synthesized)
taacatcagctctgatcggatccagctgatgaactctgggattggctggttccaacctgatgttctgaaaaacatcatcactgagatcatccactccatcctgctgccgaaccagaatgg

SEQ ID NO: 264961 - DNA, 120 bp, Artificial Sequence
  ENSG00000125999_11 (sequence is synthesized)
caaattaagatctggggtcccagtgtcattggtgaaggccttgggattcgaggcagctgagtcctcactgaccaaggatgcccttgtgcttactccagcctccttgtggaaacccagctc

SEQ ID NO: 264962 - DNA, 120 bp, Artificial Sequence
  ENSG00000125999_12 (sequence is synthesized)
tcctgtctcccagtgaagacttggatggcagccatcagggaaggctgggtcccagctgggagtatgggtgtgagctctatagaccatccctctctgcaatcaataaacacttgcctgtga

SEQ ID NO: 264963 - DNA, 85 bp, Artificial Sequence
  ENSG00000125999_13 (sequence is synthesized)
attcggattgagccgttactaggtgccagttgtatacatgaagcaggaattactattctaccgcccccaaagagttcttccaatc

SEQ ID NO: 264964 - DNA, 120 bp, Artificial Sequence
  ENSG00000125999_14 (sequence is synthesized)
gtcagatatttgtacatgtgctgccctggcgggcactataccctcattttaagacgaggaaacagattcagacgcgagaagagaccagccaaggtcactggggctcaaaccgaagtccag

SEQ ID NO: 264965 - DNA, 120 bp, Artificial Sequence
  ENSG00000125999_15 (sequence is synthesized)
aatgaaaagctgcagtaacacaggacaggttctaggggccatgagaacactctgggcccctgatacagtctgggacgtcagggaggcctccctgaagggaagggcattccagacagaggg

SEQ ID NO: 264966 - DNA, 120 bp, Artificial Sequence
  ENSG00000125999_16 (sequence is synthesized)
caaagtatagaaacctctgctggggataatgggagcccctgatggttcttgagcaagagcgtaagagaatgcaaattaagatctggggtcccagtgtcattggtgaaggccttgggattc

SEQ ID NO: 264967 - DNA, 120 bp, Artificial Sequence
  ENSG00000125999_17 (sequence is synthesized)
gaggcagctgagtcctcactgaccaaggcaagccatgcttctgagtgcttgaggccaccgaaatgaacaaatggaaaacactcccatctttttcaagcctaccttttagcagaagaggca

SEQ ID NO: 264968 - DNA, 120 bp, Artificial Sequence
  ENSG00000125999_18 (sequence is synthesized)
gatacacaagccctaaagatgtaacatcaggctgagtggaggaaggctgagaagaaaaataaagcaggctcaggaggagagagtgatgtcagggaagggggtgctgtttcagatggggtg

SEQ ID NO: 264969 - DNA, 120 bp, Artificial Sequence
  ENSG00000125999_19 (sequence is synthesized)
gccagggagggcctctctgaggaggtaacatttgagccaatgcctgaggaggtgaggggtgagccctgtgggtagctgggagaagtgtcccgtcagagggacagcgtattaggccgttct

SEQ ID NO: 264970 - DNA, 74 bp, Artificial Sequence
  ENSG00000125999_20 (sequence is synthesized)
gaggttgcagtgacccatcccccccccaaaaaaaaaaggaaagaaaataaatacctgagactgggtaattcatg

SEQ ID NO: 264971 - DNA, 120 bp, Artificial Sequence
  ENSG00000125999_21 (sequence is synthesized)
acaacttcaagggaggtgccctgtggttgccccatgcttccctcctggccaccaggaatcaggacaagcaaagaacacgacattcacagtccagggaggtcacacagtccggaaaggtac

SEQ ID NO: 264972 - DNA, 120 bp, Artificial Sequence
  ENSG00000126001_0 (sequence is synthesized)
agtcccacccgccacccgactctggagctcccattcttcaggaccctgctgaagtatcgcttctcagccgccttctccaggcgcagctgcattcgcttctcggtttttgcactcgctgtg

SEQ ID NO: 264973 - DNA, 120 bp, Artificial Sequence
  ENSG00000126001_1 (sequence is synthesized)
caccgagttactttcccggcccctcgttgacaccgttcacaggtggctgttggtctttagtaagggtgctgtcttccctgtctgatccttagcaaaagtaggaaggtagagttgttggca

SEQ ID NO: 264974 - DNA, 120 bp, Artificial Sequence
  ENSG00000126001_2 (sequence is synthesized)
gaaatcctgggataagagaatagtttcctggaagatctgtgcctccaaccagcagagagggattgagcttcattgaactcaacagagccaacatttcatagcaccatgttcaagaggagg

SEQ ID NO: 264975 - DNA, 120 bp, Artificial Sequence
  ENSG00000126001_3 (sequence is synthesized)
ttgaagtggcatggcaatggttagagaccctgctgggcgtgaacaccctctggctacctagggacctgtgggcctaccacctggtgccctcatggagacaagaagccctgggttgaacaa

SEQ ID NO: 264976 - DNA, 120 bp, Artificial Sequence
  ENSG00000126001_4 (sequence is synthesized)
catgaagccccagtcactgcagctggtactggaagagcaggtgctggcactacagcagcagatggcagagaatcaggcagcctcctggcggaagctgaagaactcccaggaggcccagca

SEQ ID NO: 264977 - DNA, 120 bp, Artificial Sequence
  ENSG00000126001_5 (sequence is synthesized)
gagacaagcaacccttgtgaggaagctgcaggccaaggtgctgcagtaccgaagctggtgccaagagctggagaagcggctagaagccactggaggaccaatcccccagaggtgggaaaa

SEQ ID NO: 264978 - DNA, 120 bp, Artificial Sequence
  ENSG00000126001_6 (sequence is synthesized)
tgtggaggagccaaacctggatgagctgctggtccgattggaggaggagcaacagaggtgtgagagtctagcagaggtgaacacccagcttcgactgcacatggaaaaagctgacgtggt

SEQ ID NO: 264979 - DNA, 120 bp, Artificial Sequence
  ENSG00000126001_7 (sequence is synthesized)
gaataaagcccttagggaagatgtggaaaaactgacagtggactggagccgggcccgggatgagctaatgaggaaggagagccagtggcagatggagcaggagttcttcaagggctacct

SEQ ID NO: 264980 - DNA, 120 bp, Artificial Sequence
  ENSG00000126001_8 (sequence is synthesized)
gaaaggggagcacggtcgccttctcagtctatggcgggaggttgtgacattccgacgccacttcctggaaatgaagtcagctactgacagagatctgatggagctaaaagctgagcatgt

SEQ ID NO: 264981 - DNA, 120 bp, Artificial Sequence
  ENSG00000126001_9 (sequence is synthesized)
gaggctttcagggtctctgttgacctgttgtctgcgcttgactgtgggagcacagtctcgggaacccaacggatctggaagaatggatgggcgggagccggcccagctgctgctgctact

SEQ ID NO: 264982 - DNA, 120 bp, Artificial Sequence
  ENSG00000126001_10 (sequence is synthesized)
agccaagacccaggagctggagaaggaagcccatgaaaggagccaggagttaatacagctgaagagtcaaggggatctggagaaggctgaacttcaggaccgggtgaccgagctctctgc

SEQ ID NO: 264983 - DNA, 120 bp, Artificial Sequence
  ENSG00000126001_11 (sequence is synthesized)
tctgttgacccagtctcagaagcaaaatgaagattatgaaaagatgataaaggctctgagagagacagtggagatcctggagacaaatcacacagaattaatggaacatgaagcatctct

SEQ ID NO: 264984 - DNA, 120 bp, Artificial Sequence
  ENSG00000126001_12 (sequence is synthesized)
tagtaggaatgcgcaagaggagaagttgtctttacagcaggtgatcaaggatataacccaggtcatggtggaagaaggggacaatatagcccaaggctctggtcatgagaactctttgga

SEQ ID NO: 264985 - DNA, 120 bp, Artificial Sequence
  ENSG00000126001_13 (sequence is synthesized)
attggactctagtatcttctcccagtttgattaccaggatgcagacaaggctcttactctggtgcgttcagtgctgactcggagacgccaggctgtgcaggacctaaggcagcagcttgc

SEQ ID NO: 264986 - DNA, 120 bp, Artificial Sequence
  ENSG00000126001_14 (sequence is synthesized)
aggctgtcaagaggctgtgaacttgttgcaacagcagcatgatcagtgggaggaagagggcaaagccttgagacagcggctgcagaagctcactggggagcgggacactctggcagggca

SEQ ID NO: 264987 - DNA, 120 bp, Artificial Sequence
  ENSG00000126001_15 (sequence is synthesized)
gactgtggacctccagggagaggtggactctctcagcaaggagcgagagctgctgcagaaggccagggaagagctgcggcagcagctggaggtgctagagcaggaggcatggcgcctgcg

SEQ ID NO: 264988 - DNA, 120 bp, Artificial Sequence
  ENSG00000126001_16 (sequence is synthesized)
aagggtaaatgtggagcttcagctgcagggggactctgcccagggccagaaggaggaacagcaggaggagctgcacctggctgtccgggagagggagcgtcttcaggagatgctgatggg

SEQ ID NO: 264989 - DNA, 120 bp, Artificial Sequence
  ENSG00000126001_17 (sequence is synthesized)
cctggaagccaaacagtcagaatcactcagtgaactgatcactcttcgggaagccctggagtcaagtcacctggaaggggagttactgaggcaagagcaaacggaagtgaccgcagcgct

SEQ ID NO: 264990 - DNA, 120 bp, Artificial Sequence
  ENSG00000126001_18 (sequence is synthesized)
ggctagggcagagcagtcaattgcagagctgtcgagttctgaaaacaccctgaagacagaagtagctgatcttcgggctgcagctgtcaagctcagtgccttaaatgaggctttggcgtt

SEQ ID NO: 264991 - DNA, 120 bp, Artificial Sequence
  ENSG00000126001_19 (sequence is synthesized)
agataaagttgggctgaaccagcagcttctccagttagaggaggagaaccagtctgtgtgcagcagaatggaggccgcagagcaggcgagaaatgctttgcaggtcgacctggcggaggc

SEQ ID NO: 264992 - DNA, 120 bp, Artificial Sequence
  ENSG00000126001_20 (sequence is synthesized)
agagaagaggagggaagccctgtgggaaaagaacactcacctggaggctcagctgcagaaagctgaggaggctggggctgagctgcaggcagatctcagggacatccaagaagagaagga

SEQ ID NO: 264993 - DNA, 120 bp, Artificial Sequence
  ENSG00000126001_21 (sequence is synthesized)
agaaattcaaaagaaactaagtgagtcacgtcaccagcaggaggcagccacgactcagctggagcagctacatcaggaggcaaagcgacaggaagaagtgcttgccagggcagtccagga

SEQ ID NO: 264994 - DNA, 120 bp, Artificial Sequence
  ENSG00000126001_22 (sequence is synthesized)
gaaggaggccctagtacgagagaaagcggctctagaggtgcggctgcaggccgtggagcgtgaccggcaggacctcgctgaacaactacaggggctcagctcagccaaggagctactgga

SEQ ID NO: 264995 - DNA, 120 bp, Artificial Sequence
  ENSG00000126001_23 (sequence is synthesized)
gagcagtctgtttgaagcccaacaacaaaattctgtgatagaggtcaccaaggggcagctggaggtccagattcaaactgtcactcaagccaaggaagtaatccaaggggaagtgaggtg

SEQ ID NO: 264996 - DNA, 120 bp, Artificial Sequence
  ENSG00000126001_24 (sequence is synthesized)
cctgaagctggaactggacactgaacggagtcaggcagagcaggagcgggatgctgcagccagacagctggcccaggctgagcaagaagggaagactgccttggagcagcagaaggcagc

SEQ ID NO: 264997 - DNA, 120 bp, Artificial Sequence
  ENSG00000126001_25 (sequence is synthesized)
ccatgagaaagaggtgaaccagctccgggagaaatgggagaaggagcgctcctggcaccagcaggagctggcaaaggctctggagagcttagaaagggaaaaaatggagctggaaatgag

SEQ ID NO: 264998 - DNA, 120 bp, Artificial Sequence
  ENSG00000126001_26 (sequence is synthesized)
gctaaaggagcagcagacagaaatggaggccatccaggcccagagggaagaagaacggacccaggcagagagtgccctatgccagatgcagctggaaacagagaaggagagagtatccct

SEQ ID NO: 264999 - DNA, 120 bp, Artificial Sequence
  ENSG00000126001_27 (sequence is synthesized)
cctggagacactgctgcagacgcagaaggagctagcagatgccagccaacaactggaacgactgaggcaggacatgaaagtccagaaattaaaggagcaggagaccactgggatactaca

SEQ ID NO: 265000 - DNA, 120 bp, Artificial Sequence
  ENSG00000126001_28 (sequence is synthesized)
gacccagctccaggaggctcaacgggagctgaaggaggcagcccggcagcacagagatgaccttgctgccctccaagaagagagcagctccctgctgcaggataagatggacctgcagaa

SEQ ID NO: 265001 - DNA, 120 bp, Artificial Sequence
  ENSG00000126001_29 (sequence is synthesized)
gcaggtggaggacttgaagtctcagctggtggcccaggatgactcccagaggctggtggagcaggaggttcaggagaagctgagagagacccaggagtataaccgaattcagaaggagct

SEQ ID NO: 265002 - DNA, 120 bp, Artificial Sequence
  ENSG00000126001_30 (sequence is synthesized)
ggagagagagaaagccagcctgactctctcactgatggaaaaggaacagagactccttgttttacaagaagctgactctattcgacaacaagagctgagtgccctgcgccaggacatgca

SEQ ID NO: 265003 - DNA, 120 bp, Artificial Sequence
  ENSG00000126001_31 (sequence is synthesized)
ggaggcccagggagaacagaaagagctcagtgctcagatggaattactaaggcaagaggtgaaggaaaaggaggctgactttctggcccaggaagcacagctgctggaggagctggaggc

SEQ ID NO: 265004 - DNA, 120 bp, Artificial Sequence
  ENSG00000126001_32 (sequence is synthesized)
gtctcatatcacggagcagcagctgcgagcctccttgtgggcccaggaagccaaggcagcccaactacagctgcgactgcgcagcacagagagccagctagaagcgctggccgcagagca

SEQ ID NO: 265005 - DNA, 120 bp, Artificial Sequence
  ENSG00000126001_33 (sequence is synthesized)
gcagcccgggaaccaggcccaggcccaggcccagctggccagcctctactctgccctgcagcaggccctggggtctgtttgtgagagcaggcctgagctgagtggtgggggagactctgc

SEQ ID NO: 265006 - DNA, 120 bp, Artificial Sequence
  ENSG00000126001_34 (sequence is synthesized)
tccttccgtctggggccttgagccagaccagaatggagctaggagcctctttaagagagggcccctgctgactgctctctccgctgaggcagtagcatctgccctccacaagcttcatca

SEQ ID NO: 265007 - DNA, 120 bp, Artificial Sequence
  ENSG00000126001_35 (sequence is synthesized)
agacctgtggaagactcaacagacccgggatgttctgagggatcaggtccagaaactggaagagcgtctaactgatactgaggctgagaagagccaggtccacacagagttgcaggatct

SEQ ID NO: 265008 - DNA, 120 bp, Artificial Sequence
  ENSG00000126001_36 (sequence is synthesized)
gcagagacagctctcccagaatcaggaagagaaatctaagtgggaaggaaagcagaactccctagaatctgagctgatggaactacatgaaactatggcatccttacagagtcgcctgcg

SEQ ID NO: 265009 - DNA, 120 bp, Artificial Sequence
  ENSG00000126001_37 (sequence is synthesized)
gagagcagagctacagcgaatggaagcccagggtgagcgagagttacttcaggcagccaaggagaacctgacagcccaggtggaacacctgcaagcagctgtcgtagaagccagggctca

SEQ ID NO: 265010 - DNA, 120 bp, Artificial Sequence
  ENSG00000126001_38 (sequence is synthesized)
ggcaagtgctgctggcatcctggaagaagacctgagaacggctcgctcagcactgaagctgaaaaatgaggaagtagagagtgagcgtgagagagcccaggctctgcaagagcagggcga

SEQ ID NO: 265011 - DNA, 120 bp, Artificial Sequence
  ENSG00000126001_39 (sequence is synthesized)
actgaaggtggcccaagggaaggctctgcaagagaatttggccctcctgacccagaccctagctgaaagagaagaggaggtggagactctgcggggacaaatccaggaactggagaagca

SEQ ID NO: 265012 - DNA, 120 bp, Artificial Sequence
  ENSG00000126001_40 (sequence is synthesized)
acgggaaatgcagaaggctgctttggaattgctgtctctggacctgaagaagaggaaccaagaggtagatctgcagcaagaacagattcaggagctagagaagtgtaggtctgttttaga

SEQ ID NO: 265013 - DNA, 120 bp, Artificial Sequence
  ENSG00000126001_41 (sequence is synthesized)
gcatctgcccatggccgtccaggagcgagagcagaagctgactgtgcagagggagcagatcagagagctcgagaaggatcgggagactcagaggaacgtcttggagcatcagcttctaga

SEQ ID NO: 265014 - DNA, 120 bp, Artificial Sequence
  ENSG00000126001_42 (sequence is synthesized)
acttgagaagaaagaccaaatgattgagtcccagagaggacaggttcaggacctgaaaaagcagttggttactctggaatgcctggccctggaactggaggaaaaccatcacaagatgga

SEQ ID NO: 265015 - DNA, 120 bp, Artificial Sequence
  ENSG00000126001_43 (sequence is synthesized)
gtgccagcaaaaactgatcaaggagctggagggccagagggaaacccagagagtggctttgacccaccttacgctggacctagaagaaaggagccaggagctgcaggcacaaagcagcca

SEQ ID NO: 265016 - DNA, 120 bp, Artificial Sequence
  ENSG00000126001_44 (sequence is synthesized)
gatccatgacctggagagccacagcaccgttctggcaagagagctgcaggagagggaccaggaggtgaagtctcagcgagaacagatcgaggagctgcagaggcagaaagagcatctgac

SEQ ID NO: 265017 - DNA, 120 bp, Artificial Sequence
  ENSG00000126001_45 (sequence is synthesized)
tcaggatctcgagaggagagaccaggagctgatgctgcagaaggagaggattcaggttctcgaggatcagaggacccggcagaccaagatcctggaggaggacctggaacagatcaagct

SEQ ID NO: 265018 - DNA, 120 bp, Artificial Sequence
  ENSG00000126001_46 (sequence is synthesized)
gtccttgagagagcgaggccgggagctgaccactcagaggcagctgatgcaggaacgggcagaggaagggaagggcccaagtaaagcacagcgcgggagcctagagcacatgaagctgat

SEQ ID NO: 265019 - DNA, 120 bp, Artificial Sequence
  ENSG00000126001_47 (sequence is synthesized)
cctgcgtgataaggagaaggaggtggaatgtcagcaggagcatatccatgaactccaggagctcaaagaccagctggagcagcagctccagggcctgcacaggaaggtaggtgagaccag

SEQ ID NO: 265020 - DNA, 120 bp, Artificial Sequence
  ENSG00000126001_48 (sequence is synthesized)
cctcctcctgtcccagcgagagcaggaaatagtggtcctgcagcagcaactgcaggaagccagggaacaaggggagctgaaggagcagtcacttcagagtcaactggatgaggcccagag

SEQ ID NO: 265021 - DNA, 120 bp, Artificial Sequence
  ENSG00000126001_49 (sequence is synthesized)
agccctagcccagagggaccaggaactggaggctctgcagcaagaacagcagcaggcccagggacaggaggagagggtgaaggaaaaggcagacgccctccagggagctctggagcaagc

SEQ ID NO: 265022 - DNA, 120 bp, Artificial Sequence
  ENSG00000126001_50 (sequence is synthesized)
ccatatgacactgaaggagcgtcatggagagcttcaggaccacaaggaacaggcacgaaggctggaggaagagctggcagtggagggacggcgggtccaggccctggaggaggtgctggg

SEQ ID NO: 265023 - DNA, 120 bp, Artificial Sequence
  ENSG00000126001_51 (sequence is synthesized)
agacctaagggctgagtctcgggaacaggagaaagctctgttggccctccagcagcagtgtgctgagcaggcacaggagcatgaggtggagaccagggccctgcaggacagctggctgca

SEQ ID NO: 265024 - DNA, 120 bp, Artificial Sequence
  ENSG00000126001_52 (sequence is synthesized)
ggcccaggcagtgctcaaggaacgggaccaggagctggaagctctgcgggcagaaagtcagtcctcccggcatcaggaggaggctgcccgggcccgggctgaggctctgcaggaggccct

SEQ ID NO: 265025 - DNA, 120 bp, Artificial Sequence
  ENSG00000126001_53 (sequence is synthesized)
tggcaaggctcatgctgccctgcaggggaaagagcagcatctcctcgagcaggcagaattgagccgcagtctggaggccagcactgcaaccctgcaagcctccctggatgcctgccaggc

SEQ ID NO: 265026 - DNA, 120 bp, Artificial Sequence
  ENSG00000126001_54 (sequence is synthesized)
acacagtcggcagctggaggaggctctgaggatacaagaaggtgagatccaggaccaggatctccgataccaggaggatgtgcagcagctgcagcaggcacttgcccagagggatgaaga

SEQ ID NO: 265027 - DNA, 120 bp, Artificial Sequence
  ENSG00000126001_55 (sequence is synthesized)
gctgagacatcagcaggaacgggagcagctgctggagaagtctctggcccagagggtccaagagaatatgatccaagagaagcagaatctggggcaagagagagaagaggaggagataag

SEQ ID NO: 265028 - DNA, 120 bp, Artificial Sequence
  ENSG00000126001_56 (sequence is synthesized)
gggccttcatcagagtgtaagggagctacagctgactctagcccaaaaggaacaggagattctggagctgagggagacccagcaaaggaacaacctggaagccttaccccacagccacaa

SEQ ID NO: 265029 - DNA, 120 bp, Artificial Sequence
  ENSG00000126001_57 (sequence is synthesized)
aacctccccaatggaggaacaatctctaaaacttgattctttagagcccaggctgcagcgggagctggagcggctacaggcagccctgagacagacagaagccagggagattgagtggag

SEQ ID NO: 265030 - DNA, 120 bp, Artificial Sequence
  ENSG00000126001_58 (sequence is synthesized)
ggagaaggcccaggacttggcactctccctagcgcagaccaaggccagtgtcagcagtctgcaggaggtagccatgttcctacaagcctctgtcctggagcgggactcagaacagcaaag

SEQ ID NO: 265031 - DNA, 120 bp, Artificial Sequence
  ENSG00000126001_59 (sequence is synthesized)
gctgcaggatgaactggagctcaccagacgggctctggagaaggagcggctacacagcccaggtgcaaccagcacagcagaactggggtccagaggggagcagggtgtgcagctgggaga

SEQ ID NO: 265032 - DNA, 120 bp, Artificial Sequence
  ENSG00000126001_60 (sequence is synthesized)
ggtctcaggagtggaggctgagcctagtcctgatggaatggagaagcagtcatggagacaaaggcttgaacacctgcagcaagcagtggcccggctggagattgacaggagcaggctgca

SEQ ID NO: 265033 - DNA, 120 bp, Artificial Sequence
  ENSG00000126001_61 (sequence is synthesized)
gcgccacaatgtccagctgcggagtaccttggagcaggtggagcgagaacggaggaagctgaagagggaggccatgcgtgcggcccaggcagggtccctagagatcagcaaggccacggc

SEQ ID NO: 265034 - DNA, 120 bp, Artificial Sequence
  ENSG00000126001_62 (sequence is synthesized)
ttcttcacccacacagcaggatgggagaggacagaagaactcagatgccaagtgtgtggctgaactgcagaaagaggtggtcctgctgcaagctcagctgactttggagcggaagcagaa

SEQ ID NO: 265035 - DNA, 120 bp, Artificial Sequence
  ENSG00000126001_63 (sequence is synthesized)
gcaggactacatcacccgctcagcacagaccagccgtgagctagcaggcctgcaccacagcctctcacactcacttcttgccgtggcccaggcccctgaggccactgtcctggaggcaga

SEQ ID NO: 265036 - DNA, 120 bp, Artificial Sequence
  ENSG00000126001_64 (sequence is synthesized)
gcactacccaagccgcctccaggtagcagccacagccaggagcacacagacagaagactgtgtcatgggtcatggcccctccgcacacctacaggtttgccaaaggaaaagcctggctct

SEQ ID NO: 265037 - DNA, 120 bp, Artificial Sequence
  ENSG00000126001_65 (sequence is synthesized)
gttaggcacccaggagccccaggtcggcgggtgttcccaggaagaggaagtaaatctgcaaccctggggaggaccccaactcacctgggaatgaggcaaattgcatttgcttgctcccta

SEQ ID NO: 265038 - DNA, 120 bp, Artificial Sequence
  ENSG00000126001_66 (sequence is synthesized)
tggaatcacccagaggggtgccttgccctggctgagggacatgtactgcctctcatctagaatttattttcctagcacttcaccacctccttcatcttctccttcaacaataaaccctgg

SEQ ID NO: 265039 - DNA, 120 bp, Artificial Sequence
  ENSG00000126001_67 (sequence is synthesized)
gatctttgcattcattttctgctgctgtctccacttgtgcagctgggtggcagcaccacatcaagggagtttatctgggaagaacttgccaaagattcctgttgaggtagcatgcattta

SEQ ID NO: 265040 - DNA, 120 bp, Artificial Sequence
  ENSG00000126001_68 (sequence is synthesized)
ttgtacaccatgcactgtgatagggaagggttacagagaacacacaagacaaagcccctgtccacagacagcctacagtccagttgatgagaacaggctaacactcatttatgagtcaga

SEQ ID NO: 265041 - DNA, 120 bp, Artificial Sequence
  ENSG00000126001_69 (sequence is synthesized)
ggcaattctgtgtactgactagaagaactgtagaaattccaggggctgaggaagggaggcacgaactggcccttgaaagatggagtggggttggaggtgttgccaagcacacagtgagaa

SEQ ID NO: 265042 - DNA, 120 bp, Artificial Sequence
  ENSG00000126001_70 (sequence is synthesized)
gactggtctgactgtggcagggggttggggctgagcttgggtgggttgagcggggagattttggagggttaaaagaagttctggggcctcaaaaacacagcgttgacctttagctaaagt

SEQ ID NO: 265043 - DNA, 120 bp, Artificial Sequence
  ENSG00000126001_71 (sequence is synthesized)
cagagtctctgagttcagaagctccacatggcctcattcctcttctactctgggtgaatgtccttgagatgtcgcttcctgggcatatcagctggaactgatctggtcgcctgtagtcca

SEQ ID NO: 265044 - DNA, 120 bp, Artificial Sequence
  ENSG00000126001_72 (sequence is synthesized)
accatgtgtcaagccaatcagaaggatggactatggcggaacttctcacccatggactggtcctagtggaggctggacagaacccagctcacaggcttaagacctattgctggcaacctc

SEQ ID NO: 265045 - DNA, 120 bp, Artificial Sequence
  ENSG00000126001_73 (sequence is synthesized)
ctcaaagcctaaaaattgtttaatttttttaagagacagggttttgtcctgtcttccaagctggagtgcagtggcacaatcacatcttactgcagcctgaaactcctgggctcaagtgat

SEQ ID NO: 265046 - DNA, 120 bp, Artificial Sequence
  ENSG00000126001_74 (sequence is synthesized)
gctgggattaccggtgtgagccaccatgcccaaccagaacagttttccttaaagaagcaggccattaccttcctctggcactcccaccataatctggaattcctctttactaagcctggg

SEQ ID NO: 265047 - DNA, 120 bp, Artificial Sequence
  ENSG00000126001_75 (sequence is synthesized)
gaattcctctttactaagcctggggatggaactgagacctagccaagaatctgggaggggtaagagcagcacccactcacccagacctcctaatttggggctcagccccattatgtctca

SEQ ID NO: 265048 - DNA, 120 bp, Artificial Sequence
  ENSG00000126001_76 (sequence is synthesized)
ttgcaccacacagagtggaaatggggctgttcacagcgactagagctttgttccagaaacctacacatgcagctcagcaacagatgcttagtgaaaacttctgaaaccccagaaacagat

SEQ ID NO: 265049 - DNA, 120 bp, Artificial Sequence
  ENSG00000126001_77 (sequence is synthesized)
ctggggccccagaaatgctgtcctggtccctatttccagtcagattccctgtagcttaaaatccttacctggcttttaggccatttatttctttttcctttttttttttttgagacagag

SEQ ID NO: 265050 - DNA, 71 bp, Artificial Sequence
  ENSG00000126001_78 (sequence is synthesized)
ttgttgcccaggctggagtgcagtgacgtaatctcggctcaccagtgtgtatctgggattatagacacgtg

SEQ ID NO: 265051 - DNA, 120 bp, Artificial Sequence
  ENSG00000126001_79 (sequence is synthesized)
attacgggcatgagccaccgcgcccggccctttaggccatttttatgctaggagttgtcagagacaagacttctcttggttgttcacttgttacatcctccagccctggttctcaggctc

SEQ ID NO: 265052 - DNA, 120 bp, Artificial Sequence
  ENSG00000126001_80 (sequence is synthesized)
tcaggctcgggctgacagagggtccctgttttttaccttagagtttcttctcagcatcattttctgtaggtcatgagccagggccttaggccccacataccttctgggcctcagagaggt

SEQ ID NO: 265053 - DNA, 120 bp, Artificial Sequence
  ENSG00000126001_81 (sequence is synthesized)
tccagcagctgaaagacatcttagaggctgccaagcagggtctttattcaggactagactaatctgtatttgctcttctctttccatccaaccctcaagagccccccagctccattatag

SEQ ID NO: 265054 - DNA, 120 bp, Artificial Sequence
  ENSG00000126001_82 (sequence is synthesized)
acctcggcctagggtctcccctccccaccagatattcagagcagggctggccttcagttcaagtgtagactgtgctcttgccctcacactcgagcttgtggatgatcttccactccggct

SEQ ID NO: 265055 - DNA, 120 bp, Artificial Sequence
  ENSG00000126001_83 (sequence is synthesized)
ttctaaagtacactttccttgcccagtagcaggattgcctctgtggagtgtcccaccaataatggtgacaactgctgttttcatcagctccagacccaaagagacctgaagtggggaagt

SEQ ID NO: 265056 - DNA, 120 bp, Artificial Sequence
  ENSG00000126001_84 (sequence is synthesized)
gtgaaggaaggaatatgtgtcatccaggggggacccaactttgcctaagggcatgaggccggagcctcctttcctgaccttgtcacatgtggcagggtataaccagaatggtgaatccag

SEQ ID NO: 265057 - DNA, 120 bp, Artificial Sequence
  ENSG00000126001_85 (sequence is synthesized)
cagacgggaggagtccctggcagtccagccagttctcgtggatgtacttgaggaaggtgcaattggccaccagaacatgcaggagtagaggttagagctcagccacagagattatcttct

SEQ ID NO: 265058 - DNA, 120 bp, Artificial Sequence
  ENSG00000126001_86 (sequence is synthesized)
tgcagaaaacttttttcccccttcctaatcttgtctgctttgatagaagctggtactggctggaaaggcctgaaagcaggaggggacaagagtcgtcagaggctgggcaatgttcttgtt

SEQ ID NO: 265059 - DNA, 120 bp, Artificial Sequence
  ENSG00000126001_87 (sequence is synthesized)
tccggggagtgctgaggtccggcgggtgctgcccctgttctctcaaggatcccacgtgctttgtgtgttagagcagtgaccatcacctcccaacccaaggacctttgctgctctgcttcc

SEQ ID NO: 265060 - DNA, 120 bp, Artificial Sequence
  ENSG00000126001_88 (sequence is synthesized)
cacatgggactgccagcaccctgaaggcagaaaaactgaatgtacccgttaaaggaggagaagctggtggtgtatgttgagataaggagggtggggagtgtacagttacaggctgcacag

SEQ ID NO: 265061 - DNA, 120 bp, Artificial Sequence
  ENSG00000126001_89 (sequence is synthesized)
ggagggcaagatcaatgttgacaccaaagtgccaaaggctgtctgcgccaggtctggggcccccactggtcataccgcctgataaaaccattgcagtccacactaggtctggaggcttcg

SEQ ID NO: 265062 - DNA, 120 bp, Artificial Sequence
  ENSG00000126001_90 (sequence is synthesized)
acacccacagcatgtgggtgttctcatgcaggccatgagtattcggggtgctttaagtgcaggggagttctgttgtccacgttattcttaaagcccagaataggccctgttttattctac

SEQ ID NO: 265063 - DNA, 120 bp, Artificial Sequence
  ENSG00000126001_91 (sequence is synthesized)
agagataggaaggcactggggctcacagagtggtgctgcttcccaccctcacccttctgcccccacctgagcacagtgtggtgctcagtgatggttatcctatattccaaatacgcatgg

SEQ ID NO: 265064 - DNA, 120 bp, Artificial Sequence
  ENSG00000126001_92 (sequence is synthesized)
cccaggactggcagagtcggagctcggggtctagctgtgacctggggatcggttggagtagcttcttgaccagccggaattgggttaggtgtcctagcattggtgcctatggagaagaac

SEQ ID NO: 265065 - DNA, 120 bp, Artificial Sequence
  ENSG00000126001_93 (sequence is synthesized)
acagactgtttatcactcacccctggttccagtaccaaggaaaggctggagccattgcaactggaggcccagcggaggaagggatcaagaagaggatgcagcccagagcccaggaccgag

SEQ ID NO: 265066 - DNA, 120 bp, Artificial Sequence
  ENSG00000126001_94 (sequence is synthesized)
catccaccggcctctggagatggcgtggtctccagttgcatcggggcttcagggcccatctgaagtgctgatcaaaccaggcagacacaccatgctggtgaaggcaggctttgtagatgc

SEQ ID NO: 265067 - DNA, 120 bp, Artificial Sequence
  ENSG00000126001_95 (sequence is synthesized)
ggggctgaattgagcagccacagaacctctgcagctctggggccagtggcagaacttctagaagtacctgtggggtgggaaaccccagccacaaaagcagtgagctgacttccaggcctg

SEQ ID NO: 265068 - DNA, 120 bp, Artificial Sequence
  ENSG00000126001_96 (sequence is synthesized)
aggctttgcctgcaggcctcatctcagcccatgggacagattcctggtttttttagtttggccttggggtagatgataccttcagctgtccaccctgcaatacctcacctcctgccttct

SEQ ID NO: 265069 - DNA, 120 bp, Artificial Sequence
  ENSG00000126001_97 (sequence is synthesized)
gacccagtactctgcagagcgggggaatggggccaggggacaggggcagggaagaggaagaagcaagagctgccagtgtgctccaaaccaagagagccctccacatgattctgggcacag

SEQ ID NO: 265070 - DNA, 120 bp, Artificial Sequence
  ENSG00000126001_98 (sequence is synthesized)
ctgaggaggagtgcaagctcaactctgctcaccacacttaagaagcaggcaagggaggatgaagggcaaaaacatggggtcctgaggcccttttactccctctaccctgctggaggtgag

SEQ ID NO: 265071 - DNA, 120 bp, Artificial Sequence
  ENSG00000126001_99 (sequence is synthesized)
gatgagaggtgagacttcgttggactgtgctcctggccagttgatctcacccaactcattacatcagtagcctggtcacagggtggacactctgacctcttcttagcctttcattggcaa

SEQ ID NO: 265072 - DNA, 120 bp, Artificial Sequence
  ENSG00000126001_100 (sequence is synthesized)
tactaccagctctatatatgcccttatagggcctgaaccttggctcaggtggatgggcttggaggtaaaataattgaatgggtcaggggtaggaggagagatgagtctctgccaaggctg

SEQ ID NO: 265073 - DNA, 120 bp, Artificial Sequence
  ENSG00000126001_101 (sequence is synthesized)
tgtgatgtgtcatctgagagagtgggtaacccctattcccagcacatggccatttatttagagccagggagggggacgagaattcatattcaaatgtgattctttcttaattactaccag

SEQ ID NO: 265074 - DNA, 120 bp, Artificial Sequence
  ENSG00000126001_102 (sequence is synthesized)
ttgttcaggtgagggaatcagggaaggccagattaataatccacacattgcccttgcacctcctgtcttggtttcctatcaaaacctctcccgtatctatgaacattccagccctgcagg

SEQ ID NO: 265075 - DNA, 120 bp, Artificial Sequence
  ENSG00000126001_103 (sequence is synthesized)
tcagattgctggccaggagtagtctcacattctagctgactgatggcctcggcttctgctgttgtatgtggtttgatgattcatgctggagcctttggctataactctcttccctgtata

SEQ ID NO: 265076 - DNA, 120 bp, Artificial Sequence
  ENSG00000126001_104 (sequence is synthesized)
agggccatctgaagtttgtctgcctgactccattacctggtgaatgagattggctagctgctgctcctgccccagctattcagtcatttggcaaatactcatttaaacaaagctccacag

SEQ ID NO: 265077 - DNA, 120 bp, Artificial Sequence
  ENSG00000126001_105 (sequence is synthesized)
ggatctctgagaaggagctcacctctaggcacacagaacctggacacagatgaaagtttgcagaatgacccagttgtgcagaagagacccactggctgctctcagtgaggccagggagag

SEQ ID NO: 265078 - DNA, 120 bp, Artificial Sequence
  ENSG00000126001_106 (sequence is synthesized)
tcaaacagagcatcttggacaaagagagggcttgaaggccctttcaaagtgtcaagccagttggatgcacgggttgtgtggagtccaggggtacatccagaagcaatggcaggtgttatc

SEQ ID NO: 265079 - DNA, 120 bp, Artificial Sequence
  ENSG00000126001_107 (sequence is synthesized)
cattcattcaggttagacctctgagcagacggcagaaacgtcagccacaggtgagcataagctcaaacccccccattgaaggctacattcttgtcccacagggcagagcacatggcaagt

SEQ ID NO: 265080 - DNA, 120 bp, Artificial Sequence
  ENSG00000126001_108 (sequence is synthesized)
ggcatgctgactcagacaccgggcactgagaaaagtgggaagccatggtcacagactctacattcccctctcctgttggcctccatcccttcctcaaccgtccgcagaacacctccttcc

SEQ ID NO: 265081 - DNA, 120 bp, Artificial Sequence
  ENSG00000126001_109 (sequence is synthesized)
agcaccttagctcctgcctccctctggacctattcagtcctcaagggtgccctgctaaaggctgggctgaaagctaagaggagaggtggcattcaatgtgtcctgtgtcctccctggggt

SEQ ID NO: 265082 - DNA, 120 bp, Artificial Sequence
  ENSG00000126001_110 (sequence is synthesized)
tgattaaggggtcgatgcccaatagagtccttcatcttggtgttcagcccagggtccagctgccaagggaaggcttggcaatcaagggtgatggagataagaatgaaaaggggcaccacc

SEQ ID NO: 265083 - DNA, 120 bp, Artificial Sequence
  ENSG00000126001_111 (sequence is synthesized)
ctgtgccaaagctggcatgttgtatatctgagagaggagctgcctattcacagtgtagggttgtcaagctggaggcagggagagaaaagcaagagctttttggttcctcttgaggataga

SEQ ID NO: 265084 - DNA, 120 bp, Artificial Sequence
  ENSG00000126001_112 (sequence is synthesized)
atctataggaaaatgtaagagggttaaaaataaatttcccatgcatccaaacttttttctttggtagactttcttgtcatctatttaaaatgaaacaagtgcatgtacgtggttaagaca

SEQ ID NO: 265085 - DNA, 85 bp, Artificial Sequence
  ENSG00000126001_113 (sequence is synthesized)
gagatcataccactgcactccagcctgagtgatataaagaagttaaacagtgccgggcttgggggctcacgcctgtaatcccagc

SEQ ID NO: 265086 - DNA, 90 bp, Artificial Sequence
  ENSG00000126001_114 (sequence is synthesized)
actttgggaggcccaggcaggcagattgcttgggctcaggaattcaagaccatcctaagcgaaaaaatataaaaattagctcagtgtgat

SEQ ID NO: 265087 - DNA, 70 bp, Artificial Sequence
  ENSG00000126001_115 (sequence is synthesized)
ggatcacctgagcccagggaggtcaaggttgcagtgaaccatgatcatgtcactgcactgaaattaaata

SEQ ID NO: 265088 - DNA, 120 bp, Artificial Sequence
  ENSG00000126001_116 (sequence is synthesized)
atagcagtttcccacctcattcttctcaaactcctcttcagaggcagcgggttttgttttttttttaactatgtttttctactggctcactttattcctctaaaatagtaacttgtctat

SEQ ID NO: 265089 - DNA, 120 bp, Artificial Sequence
  ENSG00000126001_117 (sequence is synthesized)
gtggtgccataacgggtccagtatctggacacgaggccgcactacctacacctttggggattctcggatcctgactctgagctacctcattcctagacacctggtgcaccacaatgtgtc

SEQ ID NO: 265090 - DNA, 120 bp, Artificial Sequence
  ENSG00000126001_118 (sequence is synthesized)
agggatgtcggtttatgtgggatatttgcattttgttaggttgtgtgtggtagttgagcagccaagggggtagcatgcggtggatatttgttttagatacacagtaactggaaactcatt

SEQ ID NO: 265091 - DNA, 120 bp, Artificial Sequence
  ENSG00000126001_119 (sequence is synthesized)
tactgaggctatttggttaccctgaactactgtttctaccaaaaaggcaggataaatgctccctcaacacacacctttaattaccaattttcagagtaaggggttgaggtaatagccacc

SEQ ID NO: 265092 - DNA, 120 bp, Artificial Sequence
  ENSG00000126001_120 (sequence is synthesized)
gccagttttccctttctctttgagtatcattatgagctcaaagttttttatatattcactatgattcaatcatgacagttgctatttttgatgctcaaattgccgcaaatctaatgtcca

SEQ ID NO: 265093 - DNA, 120 bp, Artificial Sequence
  ENSG00000126001_121 (sequence is synthesized)
aaattgccgcaaatctaatgtccaagtgttcttgtacttgtctaggcctagaatcttttagtgaagaaaaagtatttagaagacaaaaatcaggctgagtgcagtggctcacgcctgtaa

SEQ ID NO: 265094 - DNA, 120 bp, Artificial Sequence
  ENSG00000126001_122 (sequence is synthesized)
aaaaaatacgaaaaacaaaaaacataatctggattgcagggctgatcgttgctaatggagtgttatggctgttcagatgacagagggagaaaatgtactttgtaaactgttagttcaatg

SEQ ID NO: 265095 - DNA, 120 bp, Artificial Sequence
  ENSG00000126001_123 (sequence is synthesized)
aggttatgattgcacaacaatgtgaacatacttaatgccactgaactttattgccattgataacttttaaatggtaaattttgtgtattattttgtcacaataaaaagtttgaaaatcga

SEQ ID NO: 265096 - DNA, 120 bp, Artificial Sequence
  ENSG00000126001_124 (sequence is synthesized)
agttgggcgtgggcttgtaggttccttgtgctttatggacagatagtgcaggataccagttacatattccatgatgaaatcctctaaagctaaaaaataaattttggctgaatctgaaaa

SEQ ID NO: 265097 - DNA, 120 bp, Artificial Sequence
  ENSG00000126001_125 (sequence is synthesized)
aggaggaacagcaggaggagctgcacctggctgtccgggagagggagcgtctggttgctgggaagatgagagcaatgttttggaaaacgccagcatagaacctggcatatgtcaggagat

SEQ ID NO: 265098 - DNA, 120 bp, Artificial Sequence
  ENSG00000126001_126 (sequence is synthesized)
ggagcaactagccgggcgtctgcgggagccgagcgtggtgaggtggggcctcaggggcaggtgggaggtgctcgggttaaccgtccgaggcccggagacccgcccgtctagggcgcctga

SEQ ID NO: 265099 - DNA, 120 bp, Artificial Sequence
  ENSG00000126001_127 (sequence is synthesized)
gggaatcccgttcgggcagcggcctcttgttacccgggaggaacccgaggcccagagaggggctgggacgcgtcgttagggcccggggcccgcttgcctcagcttcttgctgccgccagc

SEQ ID NO: 265100 - DNA, 120 bp, Artificial Sequence
  ENSG00000126001_128 (sequence is synthesized)
gtgtaggaattggtagaatcgccagagcattggaaatggccactgactatggtaaacctcgaaggaccctgaagccctaggtgaggagcatcttcccaccggccccctgccctgccatct

SEQ ID NO: 265101 - DNA, 120 bp, Artificial Sequence
  ENSG00000126003_0 (sequence is synthesized)
acaatgcaccgcacaatggcccgaccgccgccactaccggggcctgagggggcctggcggagcccgagcgcggcccggcccgcagcgtggggccccgagcgcggtgaagagattgttttc

SEQ ID NO: 265102 - DNA, 120 bp, Artificial Sequence
  ENSG00000126003_1 (sequence is synthesized)
tgaaagctgcgttggaggctgtgacagagctgagagcctgtgtggagcggatggggaggctttctcaataacatggccctttgccattagccttgccatgaccacatttttcaccagcgt

SEQ ID NO: 265103 - DNA, 120 bp, Artificial Sequence
  ENSG00000126003_2 (sequence is synthesized)
ccccccctggattcaagatgcaaagcaggaggaggaagtgggctggaaactagttcccaggcctcggggccgggaggcggagagtcaagtgaagtgccaatgtgaaatttcgggaacacc

SEQ ID NO: 265104 - DNA, 120 bp, Artificial Sequence
  ENSG00000126003_3 (sequence is synthesized)
tttctcaaatggggagaagctgaggcctcacagcctcccgcaaccagagcagagaccatatagctgccctcagctgcactgtggcaaggcttttgcttccaaatacaagctgtataggca

SEQ ID NO: 265105 - DNA, 120 bp, Artificial Sequence
  ENSG00000126003_4 (sequence is synthesized)
catggccacccactcagcccagaaaccccaccagtgtatgtactgtgataagatgtttcaccgcaaggaccatctgcggaaccatctgcagacccatgatcctaacaaagaggccctcca

SEQ ID NO: 265106 - DNA, 120 bp, Artificial Sequence
  ENSG00000126003_5 (sequence is synthesized)
ctgctctgagtgcggtaagaattacaatacgaagctgggctaccggcgccacctggccatgcatgctgccagcagcggtgacctcagctgcaaggtgtgcctgcagacctttgagagtac

SEQ ID NO: 265107 - DNA, 120 bp, Artificial Sequence
  ENSG00000126003_6 (sequence is synthesized)
ccaggccctgctagagcacctgaaggcccactcacgccgggtagcaggcggtgccaaggagaagaagcacccctgtgaccactgcgaccggcggttctatactcgtaaggatgtacggcg

SEQ ID NO: 265108 - DNA, 120 bp, Artificial Sequence
  ENSG00000126003_7 (sequence is synthesized)
gcacctagtggtgcacacaggccgtaaggacttcctgtgccagtactgtgcccagcggtttggccgtaaggaccacctgacgcgtcatgtcaagaagagccactcgcaggagctgctcaa

SEQ ID NO: 265109 - DNA, 120 bp, Artificial Sequence
  ENSG00000126003_8 (sequence is synthesized)
gatcaagacagagcccgtggacatgttaggcctactcagctgcagctccacagtcagtgtgaaggaagagctgagccctgtgctgtgcatggcctctcgggacgtaatggggaccaaggc

SEQ ID NO: 265110 - DNA, 120 bp, Artificial Sequence
  ENSG00000126003_9 (sequence is synthesized)
cttccctggcatgttgcccatgggcatgtatggtgcccacatccctaccatgcccagcacgggcgtgccacactccctggtgcacaacacgctgcccatgggtatgagctaccctctgga

SEQ ID NO: 265111 - DNA, 120 bp, Artificial Sequence
  ENSG00000126003_10 (sequence is synthesized)
atcctcacctatctcttccccagctcagctccctccaaaataccagcttggatctacctcatacttgcccgacaaattgcccaaagtggaggtggatagttttctggcggagcttcctgg

SEQ ID NO: 265112 - DNA, 120 bp, Artificial Sequence
  ENSG00000126003_11 (sequence is synthesized)
aagcctgtctctctcatccgctgaaccccagcccgcctcacctcagccggcggcagctgcggccctcctagatgaagcactgcttgccaagagccccgccaacctctctgaggccctctg

SEQ ID NO: 265113 - DNA, 120 bp, Artificial Sequence
  ENSG00000126003_12 (sequence is synthesized)
cgctgctaatgtggacttctcccacctactgggctttcttccactcaacctgcccccgtgtaacccacctggggccacaggaggcctggtcatgggctactcccaggctgaggcacagcc

SEQ ID NO: 265114 - DNA, 120 bp, Artificial Sequence
  ENSG00000126003_13 (sequence is synthesized)
cctgcttaccactttgcaagctcagcctcaagattccccaggagctgggggaccactgaactttgggcctctgcactccttgcctcctgtcttcacgtctggcctgagtagcaccaccct

SEQ ID NO: 265115 - DNA, 120 bp, Artificial Sequence
  ENSG00000126003_14 (sequence is synthesized)
gcctcgtttccatcaagcattccagtagcccccacagaggccctcagctcagtttttggctctgttatggagccttagtacccaccccgtctgtgtcccccatgaaggcagctgagcttt

SEQ ID NO: 265116 - DNA, 120 bp, Artificial Sequence
  ENSG00000126003_15 (sequence is synthesized)
cagagctgggttcaaaaaaaaaaattccagtgtctgtatacaggagcacttggtttgggggttcaggctctaggatcgattccagaaggagccttgagccccaaccccgtgaaaagatct

SEQ ID NO: 265117 - DNA, 120 bp, Artificial Sequence
  ENSG00000126003_16 (sequence is synthesized)
cataccgtaggacttcaggtattatttacttttatttttttgacctgaatcgggagccacacttggccctcttcctctccaaagcgccagaacctccttctctttggagaatggggaggc

SEQ ID NO: 265118 - DNA, 120 bp, Artificial Sequence
  ENSG00000126003_17 (sequence is synthesized)
ctcttggagacacagagggtttcaccttggatgacctctagagaaattgcccaagaagcccaccttctggtcccaacctgcagaccccacagcagtcagttggtcaggccctgctgtaga

SEQ ID NO: 265119 - DNA, 120 bp, Artificial Sequence
  ENSG00000126003_18 (sequence is synthesized)
aggtcacttggctccattgcctgcttccaaccaatgggcaggagagaaggcctttatttctcgcccacccattcctcctgtaccagcacctccgttttcagtcagtgttgtccagcaacg

SEQ ID NO: 265120 - DNA, 120 bp, Artificial Sequence
  ENSG00000126003_19 (sequence is synthesized)
gtaccgtttacacagtcacctcagacacaccatttcacctcccttgccaagctgttagccttagagtgattgcagtgaacactgtttacacaccgtgaatccattcccatcagtccattc

SEQ ID NO: 265121 - DNA, 120 bp, Artificial Sequence
  ENSG00000126003_20 (sequence is synthesized)
cagttggcaccagcctgaaccatttggtacctggtgttaactggagtcctgtttacaaggtggagtcggggcttgctgacttctcttcatttgaggtcacatttttcccccgtggggaaa

SEQ ID NO: 265122 - DNA, 120 bp, Artificial Sequence
  ENSG00000126003_21 (sequence is synthesized)
taaactgactttggactgcttcagtctctgccatcttccatgactgcatttgttcctgcctgcctcggcggtatccacagaagacaggcaagaggattggagcagttttctcacaggtct

SEQ ID NO: 265123 - DNA, 120 bp, Artificial Sequence
  ENSG00000126003_22 (sequence is synthesized)
gcaattctgtttttctccaagtacattatgaccccctcatccttctcttgaactggagaggggaagaaatgaaaggcatgcccacgtccgtcacctccccatcccctagtccccaccttg

SEQ ID NO: 265124 - DNA, 120 bp, Artificial Sequence
  ENSG00000126003_23 (sequence is synthesized)
gttattagtcttggaagcagagtctgggttggtgtggatagcaaaggaggaagtctgagcccctcattggtcttcctcccacctgtcccttttccgggaagttgtggaattgttggaaga

SEQ ID NO: 265125 - DNA, 120 bp, Artificial Sequence
  ENSG00000126003_24 (sequence is synthesized)
agagtttgcagaaggttaggaatgggtagatagctaagtcctaatctatgggtacattgttgtgtcccaaaccaaaattttccttatccacaatgtcccttctgtctcttccactttaca

SEQ ID NO: 265126 - DNA, 120 bp, Artificial Sequence
  ENSG00000126003_25 (sequence is synthesized)
gtggactcggccactgtgcataggcttctctgctctccatcaaatcacttccactttcctgtgcccccacccccgcctccagttttccgctagtatccggcaaggtttcttgcaacaaat

SEQ ID NO: 265127 - DNA, 120 bp, Artificial Sequence
  ENSG00000126003_26 (sequence is synthesized)
gattagttcttttcttctgactcgtggggctccctgctgcagagagcacagcccttgcctggagcccaggaaccccatccttgcttcatctcagttcttcatgggcttcactcttcccac

SEQ ID NO: 265128 - DNA, 120 bp, Artificial Sequence
  ENSG00000126003_27 (sequence is synthesized)
tcacggaagggaggtagctcagggacctccactgtgggacccttgagacgcttccactctgattcagaaacacacttctacctctttactgttaactcttaacagatgcagtcagcagtt

SEQ ID NO: 265129 - DNA, 120 bp, Artificial Sequence
  ENSG00000126003_28 (sequence is synthesized)
tctgggcacttctctcagtaggtgcctcatgctgacttctccagtagggtttcaggacaaactaccaaggaattgcctcagcctcctaccagtcctccctcacccaccttctgtctaggt

SEQ ID NO: 265130 - DNA, 120 bp, Artificial Sequence
  ENSG00000126003_29 (sequence is synthesized)
tcacttggtttgtcatcaggaactgagcaggtccaggactcagctttctgcttcagcctaagccagtactccttgtttgaggtaaaagccttaaaatttagctccctagctcttgattag

SEQ ID NO: 265131 - DNA, 120 bp, Artificial Sequence
  ENSG00000126003_30 (sequence is synthesized)
aagcaatttggagtaagtgtgttttgatttaggcagggtagcttgggatacctttttaaaaacaccagatattaaaatgtctggcaaggttagaatcagactagatgatttgcttctaaa

SEQ ID NO: 265132 - DNA, 120 bp, Artificial Sequence
  ENSG00000126003_31 (sequence is synthesized)
aattagtttcagtgagtcccagggactaattaaggtttattttaaaaagtgtctaccttggtacgcagccacctcctgcatgctgtgcatgttattgggacttgtattataggtgatggt

SEQ ID NO: 265133 - DNA, 120 bp, Artificial Sequence
  ENSG00000126003_32 (sequence is synthesized)
atgtgagaatccagttgggactcgctgttgccatcctctttgttgtatctggttttcatcactagactcagcaacccttctcaccttaactgccaccttccctacactctcagtttacag

SEQ ID NO: 265134 - DNA, 120 bp, Artificial Sequence
  ENSG00000126003_33 (sequence is synthesized)
aggccactgggcctctggctgcagaatacaaagtcccgggctgttagaggagtcctttcctctctgcctgccctttcctgtccctccctcgaattctctctccccgtaagtgatgctgga

SEQ ID NO: 265135 - DNA, 120 bp, Artificial Sequence
  ENSG00000126003_34 (sequence is synthesized)
aaagtcataggactggcaaagcaactgtttaaaccctttgtaaccggggccttgcccccacctcctgtcttttctccttgccttccccactcctgtgtcctcccatctatcctgtctttc

SEQ ID NO: 265136 - DNA, 120 bp, Artificial Sequence
  ENSG00000126003_35 (sequence is synthesized)
ctttcctcctctcagtgtcctcagcacccacaaggaattttcctatcactgtgaactttgctggtacagaggaataatatctgccttcacctttttttttttggaccatagctagccagt

SEQ ID NO: 265137 - DNA, 120 bp, Artificial Sequence
  ENSG00000126003_36 (sequence is synthesized)
catttcttaaacctcccttcctaaaatctggggggtcggggggaaagaaaaaaaaagccttagtggcctggttgttcaaaggataagaatagctttatcctgcactcagtacccgaactc

SEQ ID NO: 265138 - DNA, 120 bp, Artificial Sequence
  ENSG00000126003_37 (sequence is synthesized)
acttcagtatgcttactgaggccatgagaacctgaggggcatctgcccaggacaggagccatggcatatgacaaagaccaatgagggaccaggaaaaaaagtgatgtcccctttccctgc

SEQ ID NO: 265139 - DNA, 120 bp, Artificial Sequence
  ENSG00000126003_38 (sequence is synthesized)
cacctccagcctctgccagcaatgagctgtccccctcccaccctacacagtagctggtcagggctgagtacagtcctgggggtaaggggatgacatgcccaggtgtcagctcaaaggatc

SEQ ID NO: 265140 - DNA, 120 bp, Artificial Sequence
  ENSG00000126003_39 (sequence is synthesized)
tctgcatcatcttgaggtgggaggcagggaaaggagcgccaatgaggttccctgcaacccccgccctccagcccaccgcccaaccttttacaaatggcattttcttaattgaaaatccgg

SEQ ID NO: 265141 - DNA, 120 bp, Artificial Sequence
  ENSG00000126003_40 (sequence is synthesized)
gaagcaggtgtgattacttttttgctcgtagatattgtcctaagttggaattctcccactgccctaaaactttccctagtagtcctttaaactcccccctccctttttggtagctgtttt

SEQ ID NO: 265142 - DNA, 120 bp, Artificial Sequence
  ENSG00000126003_41 (sequence is synthesized)
ctccgtcctctctccacctgccctcttatctaggagctgtttgtaagcacgatttttttaacaggttatattgtacaggatcaatattttgctttttaacaaggatatttatgtaataag

SEQ ID NO: 265143 - DNA, 120 bp, Artificial Sequence
  ENSG00000126003_42 (sequence is synthesized)
aaactttgccttaggcaggtgttggccagaaaagtccagattcctctgggatcccaccctggcctctcctggaactctgaacctgctgtggaaggaattggccatgaccttcacctctgg

SEQ ID NO: 265144 - DNA, 120 bp, Artificial Sequence
  ENSG00000126003_43 (sequence is synthesized)
agagtagggtctatggcgagggaaaagggtgttcaccatgataacctagtgcctccatagaggggtttggaaaaattccagtccgatttctttgtgtgtcagctgacttccttagctgat

SEQ ID NO: 265145 - DNA, 120 bp, Artificial Sequence
  ENSG00000126003_44 (sequence is synthesized)
tgttcccacttgcacctctccacctttggcactagaactcctgagacaccacttctcatgcttctccctccctaccagcggtcaaggctttggagccactcttttgtaactccagattat

SEQ ID NO: 265146 - DNA, 120 bp, Artificial Sequence
  ENSG00000126003_45 (sequence is synthesized)
ttaaagagaaaagtacaagacagaaatcttctagcactttgtaaacacagtgaataacctcttggagtatttttggctttatataaaacaaggtttttaattgtaaagtataagtgccat

SEQ ID NO: 265147 - DNA, 120 bp, Artificial Sequence
  ENSG00000126003_46 (sequence is synthesized)
tagaaaatgcacagggcatatctttgttaaagtagatttttcaatgttttacagaattacattttcaaaaaaaggtttttataatgaagttgtttattaaaaacttctgaatgatgtgtt

SEQ ID NO: 265148 - DNA, 120 bp, Artificial Sequence
  ENSG00000126005_0 (sequence is synthesized)
gtcccttctttccgctccaacgcacggagggtgaggtcggtacgcggtggtggcgtcacggcgccagctcctcccgacgccgagaccatgggggctcagctaagcggcggccgcggcgcc

SEQ ID NO: 265149 - DNA, 80 bp, Artificial Sequence
  ENSG00000126005_1 (sequence is synthesized)
ccggagcctgcgcaaacccagccccagccccagccccagcctgcggcgccggagggcccggaacagccccggcatccgcc

SEQ ID NO: 265150 - DNA, 120 bp, Artificial Sequence
  ENSG00000126005_2 (sequence is synthesized)
cccagcccgtgggggccgctggacgacgtgcgcttcctcatcgcctgcacttcctggtactgacggcgtcctccgcaggatgtcgcccgtctgtccgccgtcccctgtggttcttgcctg

SEQ ID NO: 265151 - DNA, 120 bp, Artificial Sequence
  ENSG00000126005_3 (sequence is synthesized)
gtctcttacaccccctcccacccgaggctccccagagatagcagagaattcgaagaggtcgccggggactggaaagaagtcccggcagggccgccttcgcagtctacaccccagcctgct

SEQ ID NO: 265152 - DNA, 120 bp, Artificial Sequence
  ENSG00000126005_4 (sequence is synthesized)
tcccagcctacacccagacccagctcagaccttcgtgaccaccccatccctttctccggctggctgggtcgggggcatccctctctgtcgctggcttccagaggcaggacaggcctcctg

SEQ ID NO: 265153 - DNA, 120 bp, Artificial Sequence
  ENSG00000126005_5 (sequence is synthesized)
gtaagcccgcaaagttgctgacctcctgacttcgtctgccttttattaatatctgtattgctgataaccgtgctcttgactatgtgtcccaggtcatgtcccaggtcatggagaagcccg

SEQ ID NO: 265154 - DNA, 120 bp, Artificial Sequence
  ENSG00000126005_6 (sequence is synthesized)
tgccacagtgaccctccccatactcctgggggggctgctctccatcctggatcgtaaggaggcatcatcaggctgtgttcctggaaccccaataaccctgggcccccagggccagcctgt

SEQ ID NO: 265155 - DNA, 120 bp, Artificial Sequence
  ENSG00000126005_7 (sequence is synthesized)
ctttccgctccaacgcacggagggtgaggtcggtacgcggtggtggcgtcacggcgccagctcctcccgacgccgaggtgggttccgggagacccgcgggtctggctgcgagagaccatg

SEQ ID NO: 265156 - DNA, 120 bp, Artificial Sequence
  ENSG00000126005_8 (sequence is synthesized)
tctcttcccagagcgtcctaaggttactcttggaacctgatctttgttccctcatcccagggaaatgacacactctgtatttctgttttatttagaaatgatttaaaaaacattatacaa

SEQ ID NO: 265157 - DNA, 120 bp, Artificial Sequence
  ENSG00000126005_9 (sequence is synthesized)
aggctgatcagtttaaaatgtgactgacactgaaatgctgtgatgtcccccaggctgaggggaagctaggctctggggcccccagtgctttgcccctctgtctgccctgtcctggggtga

SEQ ID NO: 265158 - DNA, 120 bp, Artificial Sequence
  ENSG00000126005_10 (sequence is synthesized)
tggacaaacagatgaccacaggcaggagaatctgagattggaagcctctaggctgagccctctgggcctggccccacatccctcacctctgcagcctgggctgcctgcctccatctcctg

SEQ ID NO: 265159 - DNA, 120 bp, Artificial Sequence
  ENSG00000126005_11 (sequence is synthesized)
ttcattctcagctggcctgccaggagccaatggggagcctggcgggaggcgggggtgcctagagctttcaagaagtgagagcaccaacctgaggagtggacagggaccaggaagtggggg

SEQ ID NO: 265160 - DNA, 120 bp, Artificial Sequence
  ENSG00000126005_12 (sequence is synthesized)
aagggaggccaggaagaggtggatacaggagacacttctcatctcatctcagaccctagaggggtccacagatggggacacaagacccagccagcccactggatggcccgggcaagtaac

SEQ ID NO: 265161 - DNA, 120 bp, Artificial Sequence
  ENSG00000126005_13 (sequence is synthesized)
aacctctctgtgcttcatctgagggcacggtgagagttaccgtcggcctcccagggcctaacacgagtttcatgtgagtggacaggtgtgagctaataaagtgctttgcaaagtataaaa

SEQ ID NO: 265162 - DNA, 120 bp, Artificial Sequence
  ENSG00000126005_14 (sequence is synthesized)
caagtgtgagccaccacgcccggccttgtgtggttttaatttattaaaaattgttaaagtttactttatgacccagaatatgatctatctgggtatatgttctgtgggcacttggaaaga

SEQ ID NO: 265163 - DNA, 120 bp, Artificial Sequence
  ENSG00000126005_15 (sequence is synthesized)
gtatatgttctgtgggcacttggaaagaatatgtattctgttgctcttgagtagagtgttttataaatgtccgttatattaaaccagttgataatgttatccaggttttatatatccttt

SEQ ID NO: 265164 - DNA, 120 bp, Artificial Sequence
  ENSG00000126005_16 (sequence is synthesized)
ttgatttccatctatttgtttatcagttattgagaacagagttattgaagtctcccagttatgactgtggatttttccatgtctcttttagttctatcaatttttgcttcatttattttg

SEQ ID NO: 265165 - DNA, 120 bp, Artificial Sequence
  ENSG00000126005_17 (sequence is synthesized)
gatctttgttagttgcatactatatttcagtgtttatcttcttggtgaattgacccttttatcattatgtaacttccctatatttatatctttatatttaaaatagatttccttaaacca

SEQ ID NO: 265166 - DNA, 120 bp, Artificial Sequence
  ENSG00000126005_18 (sequence is synthesized)
gtttttttctttttccaatccgataatctttgtcttttttttttttttggaaatggaatcttgctctaccacctggactggaatgcaatgacgtgatctcagctcactgcagcctccacc

SEQ ID NO: 265167 - DNA, 69 bp, Artificial Sequence
  ENSG00000126005_19 (sequence is synthesized)
gggagttttctattatttatttcttgtttaattttggtatagccagagaacatgctttatgtggtttta

SEQ ID NO: 265168 - DNA, 120 bp, Artificial Sequence
  ENSG00000126005_20 (sequence is synthesized)
aattttggtatagccagagaacatgctttatgtggttttattaaaaattgttagtttattttatgacccagaatatgatctatctgggtatatgttctgtgggcacttggaaagaatatg

SEQ ID NO: 265169 - DNA, 120 bp, Artificial Sequence
  ENSG00000126005_21 (sequence is synthesized)
tattctgttgttcttgggtagagtgttttttgtaaatgtccattatattaaaccagttgataacgttatccaggtttgatatatcctttttgatttccatctatttgtttatcagtcatt

SEQ ID NO: 265170 - DNA, 120 bp, Artificial Sequence
  ENSG00000126005_22 (sequence is synthesized)
gagaatggacttattgagtctcccagttatgactgtggatttttccatatctcttttagttctatcaatttttgcttcatttattttggatctttgttagttgcatattatatttcagtg

SEQ ID NO: 265171 - DNA, 120 bp, Artificial Sequence
  ENSG00000126005_23 (sequence is synthesized)
agtgtttatcttcttggtgaattgacccttttatcattatgtaatttccctatatttatatctttatatttaaaataggtttccttaacatttgagaagtaaaaataaaataaaatgtaa

SEQ ID NO: 265172 - DNA, 120 bp, Artificial Sequence
  ENSG00000126005_24 (sequence is synthesized)
gagtcccttctttccgctccaacgcacggagggtgaggtcggtacgcggtggtggcgtcacggcgccagctcctcccgacgccgagattgggtaactcaaggcgtccctggagtacactg

SEQ ID NO: 265173 - DNA, 120 bp, Artificial Sequence
  ENSG00000126005_25 (sequence is synthesized)
aggataagtgtttgagaaatgctgtctgaaggaatgaagtcagtctatgacaacgtctctctgccgtgaatcattcctgcagatgaaaaagtgtgacttggcagctgccaatctaaaaag

SEQ ID NO: 265174 - DNA, 120 bp, Artificial Sequence
  ENSG00000126005_26 (sequence is synthesized)
ctgttggctgccatcggctcttgagtgggtggatgggggtgagaaaagagacagatttaagagacaatgggcatacaagaagagggaaaggagtttggagtgatggcaaatcgagaaaga

SEQ ID NO: 265175 - DNA, 120 bp, Artificial Sequence
  ENSG00000126005_27 (sequence is synthesized)
tggatggtagcatcttcacagaaacggagtcctcatgtggaggaactggcttgaaggaggtgacaaggagctcggttttagacttgctgaaactggggtgaccacaagatctgtgagatg

SEQ ID NO: 265176 - DNA, 120 bp, Artificial Sequence
  ENSG00000126005_28 (sequence is synthesized)
ggagggtgaggtcggtacgcggtggtggcgtcacggcgccagctcctcccgacgccgaggtgggttccgggagacccgcgggtctggctgcgagagattgggtaactcaaggcgtccctg

SEQ ID NO: 265177 - DNA, 120 bp, Artificial Sequence
  ENSG00000126005_29 (sequence is synthesized)
ggccaagagttccatcctgagacatacatattcagagcctgagaaaagtcaagccaaaagtgaatctaaagattgtccaaaaagactgaagaatcaggattgtggagtatcaccggaaag

SEQ ID NO: 265178 - DNA, 120 bp, Artificial Sequence
  ENSG00000126005_30 (sequence is synthesized)
tggggtccatttcaagccgcggtaaggctggagatctcaagcgataatggagagacagcaaggcgcacgtggacggcgtgttcaccaattaccaaactttttgacctgagcaactagaag

SEQ ID NO: 265179 - DNA, 120 bp, Artificial Sequence
  ENSG00000126005_31 (sequence is synthesized)
actagaagaatggagttgccattatttgacacaaagaagactgcaggagggacaggtttgagtagaaatatgaagagctcacccaagtggatgtgagacaggatctcactctgtcaccca

SEQ ID NO: 265180 - DNA, 120 bp, Artificial Sequence
  ENSG00000126005_32 (sequence is synthesized)
aacacccaaaaacaaaaacaaaaaagagaaggccgatttcctggagtgcagaggtttacagcttgatgagaaaacataaacgcaaagaaaaacagaatggcaaacaccacgtgtcaacaa

SEQ ID NO: 265181 - DNA, 120 bp, Artificial Sequence
  ENSG00000126005_33 (sequence is synthesized)
ggatacaggcggctgctccaggggtcgagggagacctgatgaggggctggggaagttaggaaaaagtgtaatggaggagggtgggactctagctaggacctgaaggaaaggctggattta

SEQ ID NO: 265182 - DNA, 120 bp, Artificial Sequence
  ENSG00000126005_34 (sequence is synthesized)
aaccaggggaggggagaggagagggcatttcagggaggaagttgagggtgtacaggatgtgcctgaggcggcagataagtttctctggagcacagggttcctataggaaagtgttgggaa

SEQ ID NO: 265183 - DNA, 120 bp, Artificial Sequence
  ENSG00000126005_35 (sequence is synthesized)
gagggtgaggtcggtacgcggtggtggcgtcacggcgccagctcctcccgacgccgaggtgggttccgggagacccgcgggtctggctgcgagagttgttccctgcctgtcccagggagc

SEQ ID NO: 265184 - DNA, 120 bp, Artificial Sequence
  ENSG00000126005_36 (sequence is synthesized)
tgacaggggacacagcggacccacatgggcacctctgggacaagagattttgcttgagacagctcccagggcagcaggagtccctgtctgtgctacaggattgggtaactcaaggcgtcc

SEQ ID NO: 265185 - DNA, 120 bp, Artificial Sequence
  ENSG00000126005_37 (sequence is synthesized)
tctctctgccgtgaatcattcctgcagatgaaaaagtgtgacttggcagctggtgattctgctgtgccctacagtttgagaaccatggaagcttagcatgatggctgacagcatgggctc

SEQ ID NO: 265186 - DNA, 120 bp, Artificial Sequence
  ENSG00000126005_38 (sequence is synthesized)
tgggaccttaggtaggtgacttaatgtttctctatatctcagtttacctatctgtaaaatgaagatagcaatatttacctataataataatttaacattatatattgcttaatacataaa

SEQ ID NO: 265187 - DNA, 120 bp, Artificial Sequence
  ENSG00000126005_39 (sequence is synthesized)
ttataatgtattaatagatataatagtttccacacataatgggtggcaagcacttggcacgggcctcagaacaccagcatacccactaattatcatctcttataatccaaaagccacact

SEQ ID NO: 265188 - DNA, 120 bp, Artificial Sequence
  ENSG00000126005_40 (sequence is synthesized)
tcctcccacctcagtctcctgagtagctatgactacgggtacgtgtcatcatgcctgactaattttaattttttttttaaaatggaggtctcactatgttggccatccatggccaatata

SEQ ID NO: 265189 - DNA, 120 bp, Artificial Sequence
  ENSG00000126005_41 (sequence is synthesized)
gaggtctcactatgttggccatccatggccaatataacagccatgtaacagtcaccgtgcctgactgcagcagttctcaatgtatgaggaaaatgggttgtgacactgttgtaatgaggc

SEQ ID NO: 265190 - DNA, 120 bp, Artificial Sequence
  ENSG00000126005_42 (sequence is synthesized)
aagaaaagttaagaactgaactcaagctgctgaagatccaagatactgtgctctttatgctctgcaaaactcccccacccttgcccctacccccaccaaattgcattggcctctcactgc

SEQ ID NO: 265191 - DNA, 120 bp, Artificial Sequence
  ENSG00000126010_0 (sequence is synthesized)
aaatatcaggaaagacgctgtgggaaaatagcaggccaaaagttcttagtaaactgcagccagggagactcagactagaatggaggtagaaagaactgatgcagagtgggtttaattcta

SEQ ID NO: 265192 - DNA, 120 bp, Artificial Sequence
  ENSG00000126010_1 (sequence is synthesized)
agcctttttgtggctaagttttgttgttgttaacttattgaatttagagttgtattgcactggtcatgtgaaagccagagcagcaccagtgtcaaaatagtgacagagagttttgaatac

SEQ ID NO: 265193 - DNA, 120 bp, Artificial Sequence
  ENSG00000126010_2 (sequence is synthesized)
catagttagtatatatgtactcagagtatttttattaaagaaggcaaagagcccggcatagatcttatcttcatcttcactcggttgcaaaatcaatagttaagaaatagcatctaaggg

SEQ ID NO: 265194 - DNA, 120 bp, Artificial Sequence
  ENSG00000126010_3 (sequence is synthesized)
aacttttaggtgggaaaaaaaatctagagatggctctaaatgactgtttccttctgaacttggaggtggaccatttcatgcactgcaacatctccagtcacagtgcggatctccccgtga

SEQ ID NO: 265195 - DNA, 120 bp, Artificial Sequence
  ENSG00000126010_4 (sequence is synthesized)
acgatgactggtcccacccggggatcctctatgtcatccctgcagtttatggggttatcattctgataggcctcattggcaacatcactttgatcaagatcttctgtacagtcaagtcca

SEQ ID NO: 265196 - DNA, 120 bp, Artificial Sequence
  ENSG00000126010_5 (sequence is synthesized)
tgcgaaacgttccaaacctgttcatttccagtctggctttgggagacctgctcctcctaataacgtgtgctccagtggatgccagcaggtacctggctgacagatggctatttggcagga

SEQ ID NO: 265197 - DNA, 120 bp, Artificial Sequence
  ENSG00000126010_6 (sequence is synthesized)
ttggctgcaaactgatcccctttatacagcttacctctgttggggtgtctgtcttcacactcacggcgctctcggcagacagatacaaagccattgtccggccaatggatatccaggcct

SEQ ID NO: 265198 - DNA, 120 bp, Artificial Sequence
  ENSG00000126010_7 (sequence is synthesized)
ctcatgccctgatgaagatctgcctcaaagccgcctttatctggatcatctccatgctgctggccattccagaggccgtgttttctgacctccatcccttccatgaggaaagcaccaacc

SEQ ID NO: 265199 - DNA, 120 bp, Artificial Sequence
  ENSG00000126010_8 (sequence is synthesized)
agaccttcattagctgtgccccatacccacactctaatgagcttcaccccaaaatccattctatggcttcctttctggtcttctacgtcattccactgtcgatcatctctgtttactact

SEQ ID NO: 265200 - DNA, 120 bp, Artificial Sequence
  ENSG00000126010_9 (sequence is synthesized)
acttcattgctaaaaatctgatccagagtgcttacaatcttcccgtggaagggaatatacatgtcaagaagcagattgaatcccggaagcgacttgccaagacagtgctggtgtttgtgg

SEQ ID NO: 265201 - DNA, 120 bp, Artificial Sequence
  ENSG00000126010_10 (sequence is synthesized)
tggctccccaatcatgtcatctacctgtaccgctcctaccactactctgaggtggacacctccatgctccactttgtcaccagcatctgtgcccgcctcctggccttcaccaactcctgc

SEQ ID NO: 265202 - DNA, 120 bp, Artificial Sequence
  ENSG00000126010_11 (sequence is synthesized)
gtgaacccctttgccctctacctgctgagcaagagtttcaggaaacagttcaacactcagctgctctgttgccagcctggcctgatcatccggtctcacagcactggaaggagtacaacc

SEQ ID NO: 265203 - DNA, 120 bp, Artificial Sequence
  ENSG00000126010_12 (sequence is synthesized)
tgcatgacctccctcaagagtaccaacccctccgtggccacctttagcctcatcaatggaaacatctgtcacgagcggtatgtctagattgacccttgattttgccccctgagggacggt

SEQ ID NO: 265204 - DNA, 120 bp, Artificial Sequence
  ENSG00000126010_13 (sequence is synthesized)
tttgctttatggctagacaggaacccttgcatccattgttgtgtctgtgccctccaaagagccttcagaatgctcctgagtggtgtaggtgggggtggggaggcccaaatgatggatcac

SEQ ID NO: 265205 - DNA, 120 bp, Artificial Sequence
  ENSG00000126010_14 (sequence is synthesized)
cattatattttgaaagaagccatcaagtcttaagtttttcatttcaacttgtgaacgtttcttctgatgtgaagcaaaccttcccttttcagaaaagggaacaagtagaaaattattttt

SEQ ID NO: 265206 - DNA, 120 bp, Artificial Sequence
  ENSG00000126010_15 (sequence is synthesized)
taagcctcaagccctgttaaatggtcgtggccaattatgtcatagaaactgtatgaacaaccagatttacatagcagagaaatcatacattgaatgcttactttgtgaaagacttcacct

SEQ ID NO: 265207 - DNA, 120 bp, Artificial Sequence
  ENSG00000126010_16 (sequence is synthesized)
tgtcatttctttaagcagacgctagtactttagaaatataacttgactctgttttcaggaatatctgtaatacacaaaccaaggaacaacttttatttacactcctaatatgaaaagtca

SEQ ID NO: 265208 - DNA, 120 bp, Artificial Sequence
  ENSG00000126010_17 (sequence is synthesized)
atcctgtgagagagctccatgtatgagggacactctccaagttgataacaatggaagcgagtttaatataaaacaattccctaagcatttattttttttttaaaaagatgttactgagga

SEQ ID NO: 265209 - DNA, 120 bp, Artificial Sequence
  ENSG00000126010_18 (sequence is synthesized)
cctagaagaaatgctcaatacatactttgaaagcaaaaatacaatcaaacacattgacacgtatataaagatccacgcgtggctgtgcgtgatatctcacactctgaattcttacttgat

SEQ ID NO: 265210 - DNA, 120 bp, Artificial Sequence
  ENSG00000126010_19 (sequence is synthesized)
ggaggttttgtttgctgctacggttttaatcatccagggtgccattccaccatagaagagcaatccttttaggaaaaaaaaaatcatgctattaattaatcaaatatctataaatgcata

SEQ ID NO: 265211 - DNA, 120 bp, Artificial Sequence
  ENSG00000126012_0 (sequence is synthesized)
cttgttcctccgccgttgcaatgaactattttctctcagtccggggtggtacttttgagtaaccccttccaaatagaaacccataccagcctatttagctcggtctccactatatgaagg

SEQ ID NO: 265212 - DNA, 120 bp, Artificial Sequence
  ENSG00000126012_1 (sequence is synthesized)
tttcctagggcttggtgtgacgcaacgtatacgaggctcggaaggacaccccgcggaaggatccggtttgttgtggtgtggggaggggagacgctgacaaaccaagatggcggcggcggc

SEQ ID NO: 265213 - DNA, 120 bp, Artificial Sequence
  ENSG00000126012_2 (sequence is synthesized)
gctgaaggccgcggcgtttgggaggtaactgtggtggcgaaggctgcggtagtggggaggcaaccacacagtttggaagaaacggagcgggacgaagaggcggtagcagtagagtcagcc

SEQ ID NO: 265214 - DNA, 120 bp, Artificial Sequence
  ENSG00000126012_3 (sequence is synthesized)
tgagactctcagagcacgacggccacacgcccccttaggccctcggcgggcggcggctgccccgcttagggcctagcctccgagcattgcctcggcttcaaacagcggcggcgccatgag

SEQ ID NO: 265215 - DNA, 120 bp, Artificial Sequence
  ENSG00000126012_4 (sequence is synthesized)
tccttaagggcggtccaagcctcccgatccctggcccagacctcgggcccaccatggagccggggtccgacgatttcctaccgccaccggagtgcccggtgttcgagcctagctgggccg

SEQ ID NO: 265216 - DNA, 120 bp, Artificial Sequence
  ENSG00000126012_5 (sequence is synthesized)
agttccgagaccctcttggctacatcgcgaaaatcaggcccatcgcagagaaatcgggcatttgcaagatccgcccacccgcggactggcagccaccctttgctgtggaagtggacaact

SEQ ID NO: 265217 - DNA, 120 bp, Artificial Sequence
  ENSG00000126012_6 (sequence is synthesized)
tcaggtttaccccccgaatccagaggctgaatgagctagaggcccagacgagagtgaaactgaactacttggaccagattgccaaattctgggaaatccagggctcctccttaaagattc

SEQ ID NO: 265218 - DNA, 120 bp, Artificial Sequence
  ENSG00000126012_7 (sequence is synthesized)
ccaatgtagaacggcggatcttggacctctacagtctcagcaaaattgtggtggaggaaggtggttatgaagctatctgcaaggaccgtcggtgggctcgggtagcccagcgcctcaact

SEQ ID NO: 265219 - DNA, 120 bp, Artificial Sequence
  ENSG00000126012_8 (sequence is synthesized)
atccaccaggcaaaaatattggctccttgctacgctcccactacgaacgcattgtttatccctatgaaatgtaccagtctggagccaaccttgtgcagtgtaacacacgtccatttgata

SEQ ID NO: 265220 - DNA, 120 bp, Artificial Sequence
  ENSG00000126012_9 (sequence is synthesized)
atgaggagaaggacaaggaatacaaaccccacagcatccccctacgacagtctgtgcagccttccaagttcaacagctatggccggcgggccaagagactgcagcctgatccggaaccca

SEQ ID NO: 265221 - DNA, 120 bp, Artificial Sequence
  ENSG00000126012_10 (sequence is synthesized)
cagaggaagacattgagaagaatccagagctgaaaaagctacagatctatggggcaggccccaagatgatgggcctgggcctcatggccaaagacaagactctgcggaagaaagataagg

SEQ ID NO: 265222 - DNA, 120 bp, Artificial Sequence
  ENSG00000126012_11 (sequence is synthesized)
aggggcctgagtgtccccccacagtagtggtgaaggaggagttaggtggggatgtgaaggtggagtcaacatcgcctaagaccttcctggagagcaaggaggagctgagtcacagcccag

SEQ ID NO: 265223 - DNA, 120 bp, Artificial Sequence
  ENSG00000126012_12 (sequence is synthesized)
aaccctgcaccaagatgaccatgaggctacggaggaaccacagcaatgcccagtttattgagtcatatgtctgccggatgtgttctcgaggggatgaggatgacaagctcctgctgtgtg

SEQ ID NO: 265224 - DNA, 120 bp, Artificial Sequence
  ENSG00000126012_13 (sequence is synthesized)
atggctgtgatgacaactaccacatcttctgcctgctgcctcctctgcctgagatccccaagggtgtctggcggtgcccaaagtgtgtcatggcggagtgtaagcggcccccagaagcct

SEQ ID NO: 265225 - DNA, 120 bp, Artificial Sequence
  ENSG00000126012_14 (sequence is synthesized)
ttggctttgagcaggctacccgggaatacactctgcagagctttggcgagatggccgactcctttaaagctgactacttcaacatgcccgtgcatatggtgcccacagaacttgtggaga

SEQ ID NO: 265226 - DNA, 120 bp, Artificial Sequence
  ENSG00000126012_15 (sequence is synthesized)
aggagttctggaggctggtaaatagcattgaggaagatgtgactgttgagtatggagctgacatccattccaaagaatttggcagcggtttccctgtcagtgacagtaaacggcacctaa

SEQ ID NO: 265227 - DNA, 120 bp, Artificial Sequence
  ENSG00000126012_16 (sequence is synthesized)
cccccgaagaggaggagtatgctaccagtggttggaacctaaatgtgatgccggtgttggaacagtctgtactgtgccacatcaatgcagatatctctggcatgaaggtgccctggctct

SEQ ID NO: 265228 - DNA, 120 bp, Artificial Sequence
  ENSG00000126012_17 (sequence is synthesized)
acgtgggcatggtcttctcagccttttgctggcatattgaggatcactggagttactccattaactacctccactggggtgagccgaagacctggtatggggtgccctcacttgcagcag

SEQ ID NO: 265229 - DNA, 120 bp, Artificial Sequence
  ENSG00000126012_18 (sequence is synthesized)
aacatttggaagaagtgatgaagaagctgacacctgaactatttgatagccagcctgacctcctgcaccaacttgtcaccctcatgaatcccaacaccctcatgtcccatggtgtgccag

SEQ ID NO: 265230 - DNA, 120 bp, Artificial Sequence
  ENSG00000126012_19 (sequence is synthesized)
ttgtccgcacaaaccagtgtgcaggagagtttgtcatcaccttcccccgtgcttaccacagcggcttcaaccaaggctacaactttgccgaggctgtcaacttttgcactgctgactggt

SEQ ID NO: 265231 - DNA, 120 bp, Artificial Sequence
  ENSG00000126012_20 (sequence is synthesized)
tgcctgctgggcgccagtgcattgagcactaccgccggctccggagatactgcgtcttctcccatgaggagcttatctgcaagatggctgcctgcccagagaagctagacctgaacctgg

SEQ ID NO: 265232 - DNA, 120 bp, Artificial Sequence
  ENSG00000126012_21 (sequence is synthesized)
cggcagctgtgcataaggagatgttcatcatggtgcaagaagagcggcgtctacgaaaggccctgctggagaagggtatcacagaggctgagcgagaggctttcgagctgctcccagatg

SEQ ID NO: 265233 - DNA, 120 bp, Artificial Sequence
  ENSG00000126012_22 (sequence is synthesized)
atgagcgccagtgtatcaagtgcaagactacgtgtttcctgtcagccctggcctgctacgactgcccagacggccttgtctgcctttcccacatcaatgatctctgcaagtgctccagta

SEQ ID NO: 265234 - DNA, 120 bp, Artificial Sequence
  ENSG00000126012_23 (sequence is synthesized)
gccggcagtacctgcggtatcggtataccttggatgagcttcctgccatgctgcataagctgaaggttcgggctgagtcctttgacacctgggccaacaaagtgcgagtggccctggagg

SEQ ID NO: 265235 - DNA, 120 bp, Artificial Sequence
  ENSG00000126012_24 (sequence is synthesized)
tggaggatgggcggaagcgcagccttgaagaactgagggcactagagtctgaagcccgtgagcggaggtttcctaatagtgagctgctgcagcaactaaagaactgcctgagtgaggcag

SEQ ID NO: 265236 - DNA, 120 bp, Artificial Sequence
  ENSG00000126012_25 (sequence is synthesized)
cagcggccaggaagctggcccccacagggtggctggtctacagatgaccctgactgagctccgggcctttctggaccagatgaacaacctgccttgcgccatgcaccagattggggatgt

SEQ ID NO: 265237 - DNA, 120 bp, Artificial Sequence
  ENSG00000126012_26 (sequence is synthesized)
caagggtgttctggaacaggtggaggcctaccaggctgaggctcgtgaggccctggcctcactgccctccagtccagggctactgcagtccctgttggagagggggcggcagctgggggt

SEQ ID NO: 265238 - DNA, 120 bp, Artificial Sequence
  ENSG00000126012_27 (sequence is synthesized)
ggaggtgcctgaggcccagcagctccagcggcaggtggaacaggcgcgatggctggatgaggtgaaacgcacactggccccctcagcccgaaggggcaccttggctgtcatgcgaggact

SEQ ID NO: 265239 - DNA, 120 bp, Artificial Sequence
  ENSG00000126012_28 (sequence is synthesized)
gttggtcgcgggtgccagtgtagcccctagccctgctgtggataaagcccaggccgagctgcaggaactgctgaccattgctgaacgctgggaggagaaagcccacctctgcctggaggc

SEQ ID NO: 265240 - DNA, 120 bp, Artificial Sequence
  ENSG00000126012_29 (sequence is synthesized)
caggcagaagcatccaccagccacacttgaggccataatccgtgaagcggaaaacatccctgttcacctgcccaacatccaggctctcaaggaggctcttgctaaggcccgggcctggat

SEQ ID NO: 265241 - DNA, 120 bp, Artificial Sequence
  ENSG00000126012_30 (sequence is synthesized)
tgctgatgttgatgagatccaaaatggtgaccactacccctgcctggatgacttggagggcctagtagctgtgggccgggacctacctgtggggctggaggagctgagacagctagagct

SEQ ID NO: 265242 - DNA, 120 bp, Artificial Sequence
  ENSG00000126012_31 (sequence is synthesized)
acaggtactgacagcgcactcctggagggagaaggcctccaagaccttcctcaagaaaaattcttgctacacgctgctggaggttctctgcccatgtgcagatgccggctcagacagcac

SEQ ID NO: 265243 - DNA, 120 bp, Artificial Sequence
  ENSG00000126012_32 (sequence is synthesized)
caagcgcagccggtggatggagaaggagctggggttgtacaaatctgacacagagctgctggggctgtctgcgcaggacctcagggacccaggctctgtgatcgtggccttcaaggaggg

SEQ ID NO: 265244 - DNA, 120 bp, Artificial Sequence
  ENSG00000126012_33 (sequence is synthesized)
ggaacagaaggagaaggagggtatcctgcagctgcgtcgcaccaattcggccaagcccagtccactggcatcatcgagcacggcctcctctacaacctctatctgtgtgtgtgggcaggt

SEQ ID NO: 265245 - DNA, 120 bp, Artificial Sequence
  ENSG00000126012_34 (sequence is synthesized)
gctggctggggcgggagctctgcagtgtgacctgtgtcaggactggttccatgggcggtgtgtgtcagtgcctcgcctcctcagctctccgaggcccaatcccacctcatccccactgct

SEQ ID NO: 265246 - DNA, 120 bp, Artificial Sequence
  ENSG00000126012_35 (sequence is synthesized)
ggcctggtgggaatgggacaccaaattcctgtgtccactgtgtatgcgctcaaggcgcccgcgcctggagaccatcctggcactgctggtagccctgcagagactgcctgtgcggctgcc

SEQ ID NO: 265247 - DNA, 120 bp, Artificial Sequence
  ENSG00000126012_36 (sequence is synthesized)
cgagggcgaggccctgcagtgcctcacagagagggccatcagctggcaaggccgcgccaggcaggctctggcctctgaagatgtgactgctcttttgggacggctggctgagctccgcca

SEQ ID NO: 265248 - DNA, 120 bp, Artificial Sequence
  ENSG00000126012_37 (sequence is synthesized)
acggctacaggctgaacctagacctgaggagcctcctaactaccctgcagcccctgcttctgaccccctcagagagggcagtggcaaggatatgcctaaggtccagggcttactggagaa

SEQ ID NO: 265249 - DNA, 120 bp, Artificial Sequence
  ENSG00000126012_38 (sequence is synthesized)
tggagacagtgtgaccagtcctgagaaggtagccccggaggagggctcaggtaagagagatctggagctgctgtcctcgctgttgccacagttgactggccctgtgttggaactgcctga

SEQ ID NO: 265250 - DNA, 120 bp, Artificial Sequence
  ENSG00000126012_39 (sequence is synthesized)
ggcaacccgggcccccttggaggagctcatgatggagggggacctgctcgaggtgaccctggatgagaaccacagcatatggcagctgctgcaggctggacagcccccagacctggagag

SEQ ID NO: 265251 - DNA, 120 bp, Artificial Sequence
  ENSG00000126012_40 (sequence is synthesized)
gatccgcacacttctggagctggagaaggcagagcgtcacgggagtcgggctcggggccgggccctggagaggcggcggcggcggaaggtggatcggggtggggagggcgatgacccagc

SEQ ID NO: 265252 - DNA, 120 bp, Artificial Sequence
  ENSG00000126012_41 (sequence is synthesized)
ccgagaggagctagagccaaagagggtacggagctcagggccagaggctgaggaggtccaggaggaggaagagctggaggaggagactgggggtgagggcccccctgcacccatccccac

SEQ ID NO: 265253 - DNA, 120 bp, Artificial Sequence
  ENSG00000126012_42 (sequence is synthesized)
cactggcagccccagcacccaggagaaccagaatggcttggaaccggcggaagggaccacttcaggcccctcggcccctttctccactctgactccccggctgcatctgccctgcccaca

SEQ ID NO: 265254 - DNA, 120 bp, Artificial Sequence
  ENSG00000126012_43 (sequence is synthesized)
gcagccgcctcagcaacagttgtgacagtggctgagcctagcacagaccctgacagagacccccctcggcctcaaggatcctctttctgaccatcaagcctgcttcttggggggtgggcg

SEQ ID NO: 265255 - DNA, 120 bp, Artificial Sequence
  ENSG00000126012_44 (sequence is synthesized)
ggtaggggggtggccatccctgctacccgcccacccctgagtcccttgacttttgtattctgactccaaggtattgttcagacctcagctcctgggggccggcccctggagtcttccctc

SEQ ID NO: 265256 - DNA, 120 bp, Artificial Sequence
  ENSG00000126012_45 (sequence is synthesized)
cctggtagcctctaaccagcattcccagacacctgaggcagatagatggatgggctggtgggcaggggggtggctggggctgggccatcaccattccagagacaaggccagtgtatatgc

SEQ ID NO: 265257 - DNA, 120 bp, Artificial Sequence
  ENSG00000126012_46 (sequence is synthesized)
aaactgggggactctcctcccttctctccccagttctggtcctggccaggccatgctacactaacccctgcccccactctcctcccctcttttccttccttcctacccccttctccctct

SEQ ID NO: 265258 - DNA, 120 bp, Artificial Sequence
  ENSG00000126012_47 (sequence is synthesized)
cccttcccctgactgttccacccaggaggaggaaacttcacatagccgtgctcacagttttttattttaaaggaatttggctggggagctgaacagggctccctgtgatctgaagaaagc

SEQ ID NO: 265259 - DNA, 120 bp, Artificial Sequence
  ENSG00000126012_48 (sequence is synthesized)
ttttggtgcttgtcctcacaaccacctcagtcctccctccctgtcctcccctgtctcctttcctcctcctgggttcatgttgtaataaaagaagattgttggtgtgtaattaatttgttc

SEQ ID NO: 265260 - DNA, 120 bp, Artificial Sequence
  ENSG00000126012_49 (sequence is synthesized)
aaaagaaaaaaaaaagcaaaacaagaaacttggttccaactgaagcctattttaattttattttattattttcctcttgttagaaataaaacccttagaaacattttttggaaacatgtt

SEQ ID NO: 265261 - DNA, 120 bp, Artificial Sequence
  ENSG00000126012_50 (sequence is synthesized)
tgaaatcaagttccaccagcttcttaaccttgggcaagacattctgatcctcccccgactctaaccccaagccactttccctcaagtccaaacagatgggctcgggccccctcacccaaa

SEQ ID NO: 265262 - DNA, 120 bp, Artificial Sequence
  ENSG00000126012_51 (sequence is synthesized)
ctcctacactacaacctcccccagttgatgccctccagtttatcctcctcaagctcccaaagggatttttttgttaatggctttattgagatataatttacatactataaaattcacttg

SEQ ID NO: 265263 - DNA, 120 bp, Artificial Sequence
  ENSG00000126012_52 (sequence is synthesized)
tttgaaatgtacaattcagtgatttggggggtttctaaagtgtagatctgattatatactgcttaaaaccttccatgatgctttattgcccttaagattatacatagaatctcgttcttc

SEQ ID NO: 265264 - DNA, 120 bp, Artificial Sequence
  ENSG00000126012_53 (sequence is synthesized)
ctagaatgttttcctgtctaacccatctactgcataattccctgatttttctccacaggttatgcccctgatgaatggggactaaagctcagatgtgtggtcatttgcaacccctgagtt

SEQ ID NO: 265265 - DNA, 120 bp, Artificial Sequence
  ENSG00000126012_54 (sequence is synthesized)
cacttttttaagacagcttattgatatatataatgtacataccatacagtcacccacttaaaagtatacaattaaatagcttttagtatattcagagttgtgcagccatcattcgaaaaa

SEQ ID NO: 265266 - DNA, 120 bp, Artificial Sequence
  ENSG00000126012_55 (sequence is synthesized)
aaatttcagaacattttcatcactgcagaaagaaactccatatcccttaggcgtcctttacccctcatcccatttgcctattctggacattttacataaatggaatcgtataatatgtga

SEQ ID NO: 265267 - DNA, 120 bp, Artificial Sequence
  ENSG00000126012_56 (sequence is synthesized)
atcctcccattctttgccaccacagtcaggcatcccagcacttacccccaccccctggggcttcctcccctgcctcttcctgtaccaggcaggtgtatgagagaggatctacaggaagcc

SEQ ID NO: 265268 - DNA, 80 bp, Artificial Sequence
  ENSG00000126012_57 (sequence is synthesized)
tctacagtcagccgtgattgcaccactccattccagcttgggcgacagagcaagaccgtctcaaaaaaacaaaaacgaaa

SEQ ID NO: 265269 - DNA, 120 bp, Artificial Sequence
  ENSG00000126012_58 (sequence is synthesized)
ggcgacagagcaagaccgtctcaaaaaaacaaaaacgaaagaaatgagagtgaggtggggctaagcactgcctagagtctgggatccggttcattgggagaaaccctgggtagtgaaagt

SEQ ID NO: 265270 - DNA, 120 bp, Artificial Sequence
  ENSG00000126012_59 (sequence is synthesized)
gtggagtgctgtattcctctgttctcccctaagactggacccaaagatagtggtcagtgggagggggtggccagcctctttgagccatttcttcttcaggcccagacgagagtgaaactg

SEQ ID NO: 265271 - DNA, 120 bp, Artificial Sequence
  ENSG00000126012_60 (sequence is synthesized)
accatgaggctacggaggaaccacagcaatgcccagtttgtaaggacccagccctgacttcttaatgctctgcttcttgtcccttcaataagcattcccctgcatggcactggaccagtt

SEQ ID NO: 265272 - DNA, 120 bp, Artificial Sequence
  ENSG00000126012_61 (sequence is synthesized)
atcgggcatttgcaagatccgcccacccgcgtcaggcatcccagcacttacccccaccccctggggcttcctcccctgcctcttcctgtaccaggcaggtgtatgagagaggatctacag

SEQ ID NO: 265273 - DNA, 120 bp, Artificial Sequence
  ENSG00000126012_62 (sequence is synthesized)
atagagactttctttaaaaaaagaaaagtaggttcttcacaccatttctcaggaaactgttggaggatgttcttaagcatagcaaaggaataaaccaagaaagaggaagacgtgggatct

SEQ ID NO: 265274 - DNA, 120 bp, Artificial Sequence
  ENSG00000126012_63 (sequence is synthesized)
aggaaataggagatctgtcacaagagagtgatgatccagggaggacagctggtccagattgggacagatcagaaggttgcatgagactgctacagaaagatgaaaattgataggaaaaga

SEQ ID NO: 265275 - DNA, 120 bp, Artificial Sequence
  ENSG00000126012_64 (sequence is synthesized)
gatttaaatattggtcagaaaattagggatatatgcataaaaaactgagcaaattgagaaacaggaggctgtttttaacatagtctagaagcatgttatttaaggtagttataatcaacg

SEQ ID NO: 265276 - DNA, 120 bp, Artificial Sequence
  ENSG00000126012_65 (sequence is synthesized)
ccaaaataatcagaagaggtggaagtgattggctgtggggaagggagaatggcaaggctggctgattttataacagatctttatagagccatttgactctacaaactgcatatataactg

SEQ ID NO: 265277 - DNA, 120 bp, Artificial Sequence
  ENSG00000126012_66 (sequence is synthesized)
atgaaagtaaataactaaaaaagcttgtccagcttgattaaaagtgatatttataatttttgcaaaaattactaaggaagttggaatattttgacagatatattttttaatctcaaatct

SEQ ID NO: 265278 - DNA, 120 bp, Artificial Sequence
  ENSG00000126012_67 (sequence is synthesized)
ccagtggtccttcctttcagagttggagagtctgggattctgttgtcagactgtgttccctgaggcttttctttgtctccttaattaccttgcacttaagtcaggtctgtatacaggaaa

SEQ ID NO: 265279 - DNA, 120 bp, Artificial Sequence
  ENSG00000126012_68 (sequence is synthesized)
agagtaccccagatcaagcaccctattctggtggaagttcggggaggcagaggcagcaccaagaagatgtagcctctactcttggcgtatagtgaaaagaactagatgcatctcgattga

SEQ ID NO: 265280 - DNA, 120 bp, Artificial Sequence
  ENSG00000126012_69 (sequence is synthesized)
aaaccacataccattctctgctataccctttaccagcaaccttaagtcgatttacttcattgtcagttttcccctctgaaaaatgggattatgataatgcttatctttttggatagttga

SEQ ID NO: 265281 - DNA, 120 bp, Artificial Sequence
  ENSG00000126012_70 (sequence is synthesized)
tctcaaaaaaacaaaaacgaaagaaatgagagtgaggcccagacgagagtgaaactgaactacttggaccagattgccaaattctgggaaatccagggctcctccttaaagattcccaat

SEQ ID NO: 265282 - DNA, 120 bp, Artificial Sequence
  ENSG00000126016_0 (sequence is synthesized)
ccaggagctgccttggcagtcacgccccttccttccgaggagctttctggctgcctaaactggtagaccccctgaattactcctccatctccgctctctttcgcctcctcttctcttagt

SEQ ID NO: 265283 - DNA, 120 bp, Artificial Sequence
  ENSG00000126016_1 (sequence is synthesized)
tctctccgcctccccctcaactaccaccacctccagtcagtctcgcctccggctatccgctgctccaccctctggcccggtatcctgcctgtccgctgccaccaaggagagcccggacgg

SEQ ID NO: 265284 - DNA, 120 bp, Artificial Sequence
  ENSG00000126016_2 (sequence is synthesized)
agcagcgaggaggggagcagccgggagttggggcttcccccctgcccatccctggccgctggcccgggaccgaagccacttgagcgagcagagagtcgtcaccttgtcttctttgccttc

SEQ ID NO: 265285 - DNA, 120 bp, Artificial Sequence
  ENSG00000126016_3 (sequence is synthesized)
agggagctgctaagaaggacaaataagatagcagagtgaaagagcttttgtctccttagaaggaaggctgagaaactaaaggccagcgcaggacatctcattgccattgtcagccaggaa

SEQ ID NO: 265286 - DNA, 120 bp, Artificial Sequence
  ENSG00000126016_4 (sequence is synthesized)
ctcgcagcctcacagccctacttcttctctgacctctggggggtccttgcccttgctacaatctccaccatccactagattgtctcctgcccgacaccccttggtcccaaaccagggaga

SEQ ID NO: 265287 - DNA, 120 bp, Artificial Sequence
  ENSG00000126016_5 (sequence is synthesized)
ccattcagctcacctgcctaggccgcagcagcatttccttcctaatcaggctcaccagggggatcattaccgtctctcccaacctggcctgagtcagcagcagcagcaacagcagcagca

SEQ ID NO: 265288 - DNA, 120 bp, Artificial Sequence
  ENSG00000126016_6 (sequence is synthesized)
gcaccatcatcaccatcaccaccaacaacagcagcagcagcagccacagcagcagccaggagaagcctattcagctatgcctcgggctcagccatcctctgcttcttatcagccagtgcc

SEQ ID NO: 265289 - DNA, 120 bp, Artificial Sequence
  ENSG00000126016_7 (sequence is synthesized)
agcagacccttttgccattgtttccagagcccagcagatggttgagatcctctcagacgagaaccggaacttgaggcaagagttggaaggatgctatgagaaggtggcaagactgcagaa

SEQ ID NO: 265290 - DNA, 120 bp, Artificial Sequence
  ENSG00000126016_8 (sequence is synthesized)
ggtggagacagaaatccagcgcgtctcggaggcatatgagaacctcgtgaagtcatcctccaaaagagaggccctagagaaagccatgagaaacaagctagagggcgagattcggaggat

SEQ ID NO: 265291 - DNA, 120 bp, Artificial Sequence
  ENSG00000126016_9 (sequence is synthesized)
gcatgatttcaacagggatctgagagagcgtctagagactgccaacaagcagcttgcagagaaggaatatgaggggtcagaggacaccagaaaaaccatctcgcagctctttgcaaaaaa

SEQ ID NO: 265292 - DNA, 120 bp, Artificial Sequence
  ENSG00000126016_10 (sequence is synthesized)
taaagaaagccagcgtgagaaggagaagctggaagcggagctggccactgcccgttctaccaatgaggaccaaagacgacacatcgaaatccgagatcaggccctgagtaatgcccaggc

SEQ ID NO: 265293 - DNA, 120 bp, Artificial Sequence
  ENSG00000126016_11 (sequence is synthesized)
caaggtggtaaagctggaagaagagctgaaaaagaagcaagtgtacgttgacaaggtggagaagatgcagcaggcccttgtacagctccaggcagcatgtgaaaaacgtgagcagctaga

SEQ ID NO: 265294 - DNA, 120 bp, Artificial Sequence
  ENSG00000126016_12 (sequence is synthesized)
gcaccgtctccggacacgactggagagggaactggaatccctgagaatccagcagcgtcagggcaactgtcagcccaccaacgtttcagaatacaatgctgctgcactgatggagctcct

SEQ ID NO: 265295 - DNA, 120 bp, Artificial Sequence
  ENSG00000126016_13 (sequence is synthesized)
tcgggagaaagaggagaggattctggctctggaagctgatatgacaaagtgggagcagaaatatttggaggagaatgtgatgagacattttgctctggatgctgctgcaactgtggctgc

SEQ ID NO: 265296 - DNA, 120 bp, Artificial Sequence
  ENSG00000126016_14 (sequence is synthesized)
tcagagggacacaacagtcatcagtcactctcctaacaccagctatgacacagctctagaagctcgcatccagaaagaggaggaagaaatcttgatggccaataagcgttgccttgacat

SEQ ID NO: 265297 - DNA, 120 bp, Artificial Sequence
  ENSG00000126016_15 (sequence is synthesized)
ggagggcaggattaagaccctccatgcccagattattgagaaggatgccatgatcaaagtactccagcagcgttcccggaaggagccgagcaagacagagcagctgtcgtgcatgcggcc

SEQ ID NO: 265298 - DNA, 120 bp, Artificial Sequence
  ENSG00000126016_16 (sequence is synthesized)
agcgaagtctctgatgtccatttccaatgctggatcaggcttgctctcccactcatccaccctgactggctcccccatcatggaagaaaagcgagacgacaagagctggaaggggagcct

SEQ ID NO: 265299 - DNA, 120 bp, Artificial Sequence
  ENSG00000126016_17 (sequence is synthesized)
aggcattctcctgggtggagactaccgtgctgaatatgtcccttccacaccctcgcctgtgccaccctcgactcccctgctctcggctcactccaagacaggcagccgagactgcagtac

SEQ ID NO: 265300 - DNA, 120 bp, Artificial Sequence
  ENSG00000126016_18 (sequence is synthesized)
ccaaactgaacgtgggacggaatcgaacaaaactgcagctgttgctcccatctctgttcctgctccagttgctgctgccgccactgctgccgccatcactgccactgctgccaccatcac

SEQ ID NO: 265301 - DNA, 120 bp, Artificial Sequence
  ENSG00000126016_19 (sequence is synthesized)
caccaccatggtagctgctgctccagttgctgttgctgctgctgctgctccagctgctgctgctgccccgtctccagccactgccgctgctactgctgctgctgtttctccagctgctgc

SEQ ID NO: 265302 - DNA, 120 bp, Artificial Sequence
  ENSG00000126016_20 (sequence is synthesized)
tggtcagattccagctgctgcctctgttgcctcagctgctgccgttgctccttctgctgctgctgctgctgctgttcaggttgctccagctgctccggctccagttccagctccggctct

SEQ ID NO: 265303 - DNA, 120 bp, Artificial Sequence
  ENSG00000126016_21 (sequence is synthesized)
ggttccggttccagctccagcagcggctcaggcttctgctcctgctcagactcaggcaccaacttcagctccggctgtggctccaactccagctccaactccaactccagctgtggctca

SEQ ID NO: 265304 - DNA, 120 bp, Artificial Sequence
  ENSG00000126016_22 (sequence is synthesized)
ggctgaggttcctgcaagtccagctaccggtcctggaccacatcgtttgtctataccaagtttgacctgcaatccagacaaaacagatgggcctgtgttccactccaatactctggaaag

SEQ ID NO: 265305 - DNA, 120 bp, Artificial Sequence
  ENSG00000126016_23 (sequence is synthesized)
aaaaactcccattcagatcctgggacaagagcctgatgcagagatggtggaatatctcatctaaacggccaaatcaagagctgcagattatcagcaaaaatgcttttaatcattttcccc

SEQ ID NO: 265306 - DNA, 120 bp, Artificial Sequence
  ENSG00000126016_24 (sequence is synthesized)
cttttattggttcttgttttgagggtgaggacaagggttgtggggaggggatgttttttaacaggactttttattggaacaatgtactacttgagtaataccatgtgaacaccagtctat

SEQ ID NO: 265307 - DNA, 120 bp, Artificial Sequence
  ENSG00000126016_25 (sequence is synthesized)
tttggtatgcttagggagtacctctaaagacagattaatcagaatgtgctctaaagcttattgtttgaatttatacgaatactgggactgttaacaggtggctatacatcgacgttttca

SEQ ID NO: 265308 - DNA, 120 bp, Artificial Sequence
  ENSG00000126016_26 (sequence is synthesized)
atgtgcttaaatttgtttaaattttccatattctagatcattttttattgaagagcacagtatgtgtggaagacagtgtataacacgtagtttggaagtgggaagctagagagaattgag

SEQ ID NO: 265309 - DNA, 120 bp, Artificial Sequence
  ENSG00000126016_27 (sequence is synthesized)
tgtgtgctgttttgtatagttactatcctgtgcagcagctggagaaagcactcacctcaggcttacaaaagggaatagtttcaggagctatgtaagctggaaaaaaggtagggagttttg

SEQ ID NO: 265310 - DNA, 120 bp, Artificial Sequence
  ENSG00000126016_28 (sequence is synthesized)
accctgccccagggaattgtgtttgtcttcatttcagtggtgctttggaaatggattcttttggttccctcctggaggttcatacattcatatatatgctctggagtaatttatgcattt

SEQ ID NO: 265311 - DNA, 120 bp, Artificial Sequence
  ENSG00000126016_29 (sequence is synthesized)
ggataattaatatattgctttcagatgctgggagagtacattaactgagtgatgcgcaacttcctctctcttagggaattagaccatcagaggccttgatggagagttgcatggggtgct

SEQ ID NO: 265312 - DNA, 120 bp, Artificial Sequence
  ENSG00000126016_30 (sequence is synthesized)
atatgcagacttccatggtttgtgtgtagccatgaacacagcttgcttgcatttagtaagaccaatcagcttagtgtttatttcttctacagcacagattcactggctgggtctccagtc

SEQ ID NO: 265313 - DNA, 120 bp, Artificial Sequence
  ENSG00000126016_31 (sequence is synthesized)
tcaaattgccaatcatttgcaaagtgaggaaggatctttgttgacaggttgaatgctttgaatttctggtgactactttgaaataacttgttttgtttgtcaaattctaagcatatgtct

SEQ ID NO: 265314 - DNA, 120 bp, Artificial Sequence
  ENSG00000126016_32 (sequence is synthesized)
taaaaggcatttttgactatcacctccaagggaatagcttgagaaacccaaagtactatgctgcagtcgggggagaggtggattgcagcagtatcctcaactacctcttctcactgtcag

SEQ ID NO: 265315 - DNA, 120 bp, Artificial Sequence
  ENSG00000126016_33 (sequence is synthesized)
tgacaccatcttggaatacctttgggaagcagcaggaaatgtgcatgtgggtagagatcaaaggaggcaatggctccaagccttgccatagggctgcctccaaggacacagaaggatgcc

SEQ ID NO: 265316 - DNA, 120 bp, Artificial Sequence
  ENSG00000126016_34 (sequence is synthesized)
agttgccacaggtccctgccctgtgtcacctgtctgcccttcattaaggtgagaaatctgcagatagcatcattaagatcagttttaaggggtatagggagggtgagggaagtggggggt

SEQ ID NO: 265317 - DNA, 120 bp, Artificial Sequence
  ENSG00000126016_35 (sequence is synthesized)
gttaggtaagggttgggggtagaggttttgggatgtcttagttagaaaccagattaatagaagagtaggcctgatatattacatcatgagccatagtggtgggaaagaactttagcaata

SEQ ID NO: 265318 - DNA, 120 bp, Artificial Sequence
  ENSG00000126016_36 (sequence is synthesized)
tagccctacctcctcattttagtgatgaggaatctgagaactggagaggttcagtgactttttgaaagtcatacaacacagctaaccattatgccaatcaccatgcttattttgggaaac

SEQ ID NO: 265319 - DNA, 120 bp, Artificial Sequence
  ENSG00000126016_37 (sequence is synthesized)
tctttatcttttttaaattccattttatgaaaaggcatcttcatggtccagggaatatgtatcttgtaaaatgtacctggttggagtagcttgtccagtcttgacaaactactgaatttc

SEQ ID NO: 265320 - DNA, 120 bp, Artificial Sequence
  ENSG00000126016_38 (sequence is synthesized)
tgtcttgcctctccttcagtgccttttaaaaggttttcccttttctgatctgcatttcaacatagagtcacataaatgtccccctgagaaaccaatcccacttctttctaggagattggg

SEQ ID NO: 265321 - DNA, 120 bp, Artificial Sequence
  ENSG00000126016_39 (sequence is synthesized)
tatcttagataatcttttggggttcctctgtgagtataggaatggtatccttcctaattatcttccaaaggaattattttgtgtgtgtgcctgtgtgtgtgtagagacataaaggagggt

SEQ ID NO: 265322 - DNA, 120 bp, Artificial Sequence
  ENSG00000126016_40 (sequence is synthesized)
gatgtgattttcagctagtcctttcacattttcaataatgaggtaatcatgttacatacacattagtcctcagttataaagtgaatctcagatagaaattaaaagtgcagttgtgttaag

SEQ ID NO: 265323 - DNA, 120 bp, Artificial Sequence
  ENSG00000126016_41 (sequence is synthesized)
actctttcatactaccctttagtcataaggagaaaaaaacactcaaatagtagaagcagcaagtagcaaacttcaggagagctactttctatccaaataatttaaaaaacacttttcacc

SEQ ID NO: 265324 - DNA, 120 bp, Artificial Sequence
  ENSG00000126016_42 (sequence is synthesized)
tactcctttcatggttataacacattggcagactttttgctggctctgggagccatgattttaatcacattctgcaaggtgacaaatgtcatacattccacattgtgtggtagccatctc

SEQ ID NO: 265325 - DNA, 120 bp, Artificial Sequence
  ENSG00000126016_43 (sequence is synthesized)
tttagactcatgtgttttggggaaaggaagaagttcttggctgagtactattttgaactttccagaaccctctcacaccagagacagttcttctctgttcagtttccaatccccgataat

SEQ ID NO: 265326 - DNA, 120 bp, Artificial Sequence
  ENSG00000126016_44 (sequence is synthesized)
ttgctaaaataacattgtacatccaagagagggaagaagagtatgtcagtatattatgcagaagatagatacagccttttcagaagatctccactagtttttgttccaaaaattcaagtt

SEQ ID NO: 265327 - DNA, 120 bp, Artificial Sequence
  ENSG00000126016_45 (sequence is synthesized)
tatgggagaaatctcaattagccaccttttcacagttgtgtggatataacatttgggggatctttctggactcctacctatctgtgcattttaccggcacctcaggaaaggagggtgacc

SEQ ID NO: 265328 - DNA, 120 bp, Artificial Sequence
  ENSG00000126016_46 (sequence is synthesized)
aggttgtcttagcttgtactgcttggtgatctctgaggaccttctaattcagttgtaccccagtgttccatgtatagaaaaacttcattagaacaaactttacttgatatgaaactccta

SEQ ID NO: 265329 - DNA, 120 bp, Artificial Sequence
  ENSG00000126016_47 (sequence is synthesized)
ttaacagtctttttttgaaataaaaagtagcttgagctttcttttaaaatcatgtatcttgattgttgatttaatgaaggatttccttttaatgctgcttttgagcttcaaggtaatagg

SEQ ID NO: 265330 - DNA, 120 bp, Artificial Sequence
  ENSG00000126016_48 (sequence is synthesized)
acagcaggaacctaaaatatctgccatcatctgccataggaaagatacccagagacccatcatgttctctttttgttgttacactgttgggtgggtataacaattggaaaatgaacaaac

SEQ ID NO: 265331 - DNA, 120 bp, Artificial Sequence
  ENSG00000126016_49 (sequence is synthesized)
tgattgattgtgcaaactactttttatgacaagcctaaaccctcataatgcggcagcttaaagtgtatacatatgcactaactttgatcaattatattctcatatctgttagctacacag

SEQ ID NO: 265332 - DNA, 120 bp, Artificial Sequence
  ENSG00000126016_50 (sequence is synthesized)
tctcctattatctcaattgcttatgtgcatatggaatatgttacttaaaacgtgtgcattcttactgaaaatgttttcaaaggaaggtatcagctgtgggctaattgccaccaatttcag

SEQ ID NO: 265333 - DNA, 120 bp, Artificial Sequence
  ENSG00000126016_51 (sequence is synthesized)
cctgccacgattcttggaaatatgtcttccaagtgccatccatcatcagtaggacaagtgtcgggagtttgtttatttttttccagtagcaacgatgggttacatggagccatgaaacct

SEQ ID NO: 265334 - DNA, 120 bp, Artificial Sequence
  ENSG00000126016_52 (sequence is synthesized)
ccttctggcctcccttgtgattaatggcatgtgtttgtaaaatggatagctggggttggcagatggctagagaagaatcgcctttggtttaaaatgtatgtggtcccctaatgattgtga

SEQ ID NO: 265335 - DNA, 120 bp, Artificial Sequence
  ENSG00000126016_53 (sequence is synthesized)
ccccattctgtaatcaactgagctagttccaataaagttaagcaggtttaaatccactttgtgcctatcttttcactgacaataaagttagctattttaaaatgcagtaccgtgtggaaa

SEQ ID NO: 265336 - DNA, 120 bp, Artificial Sequence
  ENSG00000126016_54 (sequence is synthesized)
atgctttggtgtttacccgacagaggctttatttgtgctgtatcagtgattactttcaattcagtatgcagtgaaattgcctttcaagggcagcgtgcagcagaatttgcatttgcttga

SEQ ID NO: 265337 - DNA, 120 bp, Artificial Sequence
  ENSG00000126016_55 (sequence is synthesized)
agtatggaatgtgattatagattataaagtattaagacaacaccacaggccgcatgctctaatcggtctctttatatactcaggcagcatatattaaaagctttgcatctttttatcttc

SEQ ID NO: 265338 - DNA, 120 bp, Artificial Sequence
  ENSG00000126016_56 (sequence is synthesized)
tggtttctagggataaaatgatggccacccaaagcagagaatttatcctttggttagcattttggaaggccccttgatattccttttgtacccttgttctgatgccaattcatcagtttt

SEQ ID NO: 265339 - DNA, 120 bp, Artificial Sequence
  ENSG00000126016_57 (sequence is synthesized)
gtcactggccaccagtggagttaaggcccatccacctgttaccagtgctcccctctccccaccacaacccaatgacctctacaagaatcccacaagttccagtgaattctacaaggccca

SEQ ID NO: 265340 - DNA, 120 bp, Artificial Sequence
  ENSG00000126016_58 (sequence is synthesized)
agggccacttcctaaccagcatagcctgaagggcatggaacaccgaggccccccaccagaatatcccttcaagggcatgccaccccaatctgtagtgtgcaagccccaagagccagggca

SEQ ID NO: 265341 - DNA, 120 bp, Artificial Sequence
  ENSG00000126016_59 (sequence is synthesized)
cttctatagtgagcatcgcctgaaccagccagggagaacagaggggcaactgatgaggtatcagcatccccctgagtatggagcagccaggccagcgcaggacatctcattgccattgtc

SEQ ID NO: 265342 - DNA, 120 bp, Artificial Sequence
  ENSG00000126016_60 (sequence is synthesized)
gagataagcacccatgcttaaggaaaagggatgatggtccaggttctagagaggaaggtgtaccagggttttggagtttttttttcctcctgagaccctagttccacattctggagctcc

SEQ ID NO: 265343 - DNA, 120 bp, Artificial Sequence
  ENSG00000126016_61 (sequence is synthesized)
tccacactttgaagtctcccggtgagaataccgattgaggccaaggcttagaggacaagaatcttgagtttcatttgggtgtcaaggaagataactctaatttcctctaaactattctca

SEQ ID NO: 265344 - DNA, 120 bp, Artificial Sequence
  ENSG00000126016_62 (sequence is synthesized)
gatttggcctttgccatgtggcacctttatctttctccaaagcccatgtggcctttgtgtcgttccaaatgtcaaaattccggcatttctgtgttccttcctcctctataataggagaac

SEQ ID NO: 265345 - DNA, 120 bp, Artificial Sequence
  ENSG00000126016_63 (sequence is synthesized)
ccagagttttagttacactaaatcgtttgggtagcaggttttgttcccacagtgttgtgagatgagaacagaatgtactttttcattccgttcctgtccattccctcccctctaatcaaa

SEQ ID NO: 265346 - DNA, 120 bp, Artificial Sequence
  ENSG00000126016_64 (sequence is synthesized)
atgagaaattctgaagaacagccaagtggagggaccacggtattgcagcgtttgctacaagagcagcttcgctatggcaatcctagtgagaatcgcagcctgcttgccatacaccagcaa

SEQ ID NO: 265347 - DNA, 120 bp, Artificial Sequence
  ENSG00000126016_65 (sequence is synthesized)
gccacagggaatggccctcctttccccagtggcagtgggaacccgggccctcagagtgatgtgttgagtccccaagaccaccaccaacagcttgtggctcatgctgctcgacaagaaccc

SEQ ID NO: 265348 - DNA, 120 bp, Artificial Sequence
  ENSG00000126016_66 (sequence is synthesized)
caggggcaggaaatccagtcagaaaacctcatcatggagaagcagctgtctcctcgaatgcaaaataatgaagaactcccgacctatgaagaagccaaggtccagtcccagtactttcgg

SEQ ID NO: 265349 - DNA, 120 bp, Artificial Sequence
  ENSG00000126016_67 (sequence is synthesized)
ggccaacagcatgccagtgttggagctgccttctatgtcactggagtcaccaaccagaagatgaggactgagggacgcccatcagttcagcggctcaatcctggaaagatgcaccaagat

SEQ ID NO: 265350 - DNA, 120 bp, Artificial Sequence
  ENSG00000126016_68 (sequence is synthesized)
agcttttgtctccttagaaggaaggctgagaaactaaagagtgaccagtggttggactcttggcggcgcttaccctgaacctgagtgttaggggagagggaatctgccgttgcggtttct

SEQ ID NO: 265351 - DNA, 120 bp, Artificial Sequence
  ENSG00000126016_69 (sequence is synthesized)
ggagctgctcataagcaagaattccctatcctgatcaaggctttaagcctaaaagaaagcagaaataggtcaagggcagcccaggtgcccaatttctctctctcttcacaaggcaccacc

SEQ ID NO: 265352 - DNA, 120 bp, Artificial Sequence
  ENSG00000126062_0 (sequence is synthesized)
acccctgtttgtcggccccccgagagaagaggtacggtcgaagccaggagccaggccgagcgggagctgaccaggcttgactcgggtacagaacgaggcaccagtccccttgcgaaccga

SEQ ID NO: 265353 - DNA, 120 bp, Artificial Sequence
  ENSG00000126062_1 (sequence is synthesized)
agggcctcgcagtggatggaggaggcccagccctgaggtcaacgccaaccaggctagcctggcacggggcctacagggtgggtaggcgggcgtgccgcagccgtccagggccttccctca

SEQ ID NO: 265354 - DNA, 120 bp, Artificial Sequence
  ENSG00000126062_2 (sequence is synthesized)
ggtcccgggcgaggggcctacgctgcggcccggcaacaaggcccgactcggcccctcgggaccagagccccacccgatcggaagcggatcctttaccagggccataggccagtgactagg

SEQ ID NO: 265355 - DNA, 120 bp, Artificial Sequence
  ENSG00000126062_3 (sequence is synthesized)
ccgggcctgggcctcccatcggggccggactaggacgaggccccggggaggcccctggcctaccagacccttttctcaggccgacagccgccaggaagatgcaacgtgccctgccaggcg

SEQ ID NO: 265356 - DNA, 120 bp, Artificial Sequence
  ENSG00000126062_4 (sequence is synthesized)
cccgccagcacttgggggccattctggccagcgccagcgtggtggtgaaggctctgtgtgcggcggtactattcctctacctgctctccttcgccgtggacacaggctgcctggcggtca

SEQ ID NO: 265357 - DNA, 120 bp, Artificial Sequence
  ENSG00000126062_5 (sequence is synthesized)
ccccgggctacctctttcctcccaacttctggatctggaccctggccacccatgggctgatggagcagcatgtgtgggacgtggccatcagcctgacaacggtggtggtggccgggcgtt

SEQ ID NO: 265358 - DNA, 120 bp, Artificial Sequence
  ENSG00000126062_6 (sequence is synthesized)
tgctggagcccctctggggggccttggagctgctcatcttcttctcagtggtgaatgtgtctgtagggctgctgggggccttcgcctacctcctcacctacatggcttccttcaacctgg

SEQ ID NO: 265359 - DNA, 120 bp, Artificial Sequence
  ENSG00000126062_7 (sequence is synthesized)
tctacctgttcactgtccgtatccacggcgccttgggcttcctaggtggcgtcctggtggcactcaagcaaaccatgggggactgtgtggtcctgcgagtgccccaggtgcgcgtcagtg

SEQ ID NO: 265360 - DNA, 120 bp, Artificial Sequence
  ENSG00000126062_8 (sequence is synthesized)
gctggcttcctatggcttcgggctgctctccagttgggtatatcttcgcttctaccagcgccatagccggggccgaggggacatggctgaccactttgctttcgccactttcttccctga

SEQ ID NO: 265361 - DNA, 120 bp, Artificial Sequence
  ENSG00000126062_9 (sequence is synthesized)
gatcctgcagcctgtggtgggtttgctggcgaacttggtgcacagcctcctggtgaaggtaaagatatgccagaagacggtgaagcgctacgatgtgggtgccccatcctccatcaccat

SEQ ID NO: 265362 - DNA, 120 bp, Artificial Sequence
  ENSG00000126062_10 (sequence is synthesized)
cagcctgccaggcacagaccctcaagacgccgagcggagaaggcaactggccctgaaggcactcaatgagcggctgaagagagtggaagaccagtccatctggcccagcatggatgatga

SEQ ID NO: 265363 - DNA, 120 bp, Artificial Sequence
  ENSG00000126062_11 (sequence is synthesized)
tgaagaggagtctggggccaaggtggacagccccctgccctcagacaaagctcccacacccccagggaagggggctgccccagaatccagtctaatcaccttcgaggcagctcccccgac

SEQ ID NO: 265364 - DNA, 120 bp, Artificial Sequence
  ENSG00000126062_12 (sequence is synthesized)
gctgtaactccagaccaccttgagtgtggcacctcccctcccaagccccccttgacatcctctcagctactccagggcacctgactgctctgaggagagggaagaaggcctgctggggct

SEQ ID NO: 265365 - DNA, 120 bp, Artificial Sequence
  ENSG00000126062_13 (sequence is synthesized)
ttccatggccttctgctgtttctcgccaacactacccaggactcttgctacctggttccaactccagacaaccactatgccaggcccggagcctctgaggcatcggccagtccaggccct

SEQ ID NO: 265366 - DNA, 120 bp, Artificial Sequence
  ENSG00000126062_14 (sequence is synthesized)
catctgaggtaagaatgtacatcagctggcagccccaagcaagtggctgcagggacactgatgccacagctcctgggccggccctcacatctgaaactggttgccgagagccctgagcca

SEQ ID NO: 265367 - DNA, 120 bp, Artificial Sequence
  ENSG00000126062_15 (sequence is synthesized)
aggcaaggatttgccaaaaatgttctgggggcccagcaaatgcaggagccgacctggggctgcacatccctgcccatccccagaaagactgttcctgtcaggatttgtttccctctgctg

SEQ ID NO: 265368 - DNA, 120 bp, Artificial Sequence
  ENSG00000126062_16 (sequence is synthesized)
tggcggtgactgcttctggaccagaacagctccagctcccaggtattttctacaggaccacttgagtgggcagccaagcccaggctcgcagtatcaataaagcagttctctgaggaatga

SEQ ID NO: 265369 - DNA, 120 bp, Artificial Sequence
  ENSG00000126067_0 (sequence is synthesized)
aatcttcgctctgaggtgctgtctcaccggtgagacctggaagcgggcgagtctcgtgctgtgtcggacctgcagcccctggccttccgccaccatggagtacctcatcggtatccaagg

SEQ ID NO: 265370 - DNA, 120 bp, Artificial Sequence
  ENSG00000126067_1 (sequence is synthesized)
ccccgactatgttcttgtcgcctccgaccgggtggccgccagcaatattgtccagatgaaggacgatcatgacaagatgtttaagatgagtgaaaagatattactcctgtgtgttggaga

SEQ ID NO: 265371 - DNA, 120 bp, Artificial Sequence
  ENSG00000126067_2 (sequence is synthesized)
ggctggagacactgtacagtttgcagaatatattcagaaaaacgtgcaactttataagatgcgaaatggatatgaattgtctcccacggcagcagctaacttcacacgccgaaacctggc

SEQ ID NO: 265372 - DNA, 120 bp, Artificial Sequence
  ENSG00000126067_3 (sequence is synthesized)
tgactgtcttcggagtcggaccccatatcatgtgaacctcctcctggctggctatgatgagcatgaagggccagcgctgtattacatggactacctggcagccttggccaaggccccttt

SEQ ID NO: 265373 - DNA, 120 bp, Artificial Sequence
  ENSG00000126067_4 (sequence is synthesized)
tgcagcccacggctatggtgccttcctgactctcagtatcctcgaccgatactacacaccgactatctcacgtgagagggcagtggaactccttaggaaatgtctggaggagctccagaa

SEQ ID NO: 265374 - DNA, 120 bp, Artificial Sequence
  ENSG00000126067_5 (sequence is synthesized)
acgcttcatcctgaatctgccaaccttcagtgttcgaatcattgacaaaaatggcatccatgacctggataacatttccttccccaaacagggctcctaacatcatgtcctccctcccac

SEQ ID NO: 265375 - DNA, 120 bp, Artificial Sequence
  ENSG00000126067_6 (sequence is synthesized)
ttgccagggaacttttttttgatgggctcctttatttttttctactcttttcaggcgcactcttgataaatggttaattcagaataaaggtgactatggatataattgagccctctggtc

SEQ ID NO: 265376 - DNA, 120 bp, Artificial Sequence
  ENSG00000126067_7 (sequence is synthesized)
caggtctcagtttacctaatattacctcagaaaggatatggagggaagatgatctttttgccaggtctgacttttcttcctgctccgccctccattaacgctcagtaccctttagcagct

SEQ ID NO: 265377 - DNA, 120 bp, Artificial Sequence
  ENSG00000126067_8 (sequence is synthesized)
gacggccccacgttctactccatgcttggcttcctttccaactagctctttcatatattttacttgctagtatctccattctctctaaagtagtggttctttttgcccttaaacttaaat

SEQ ID NO: 265378 - DNA, 120 bp, Artificial Sequence
  ENSG00000126067_9 (sequence is synthesized)
ttttaaattaattaacctgaattaataatacatgcacttaatgtaacatgcaaacagtacaaaaacatgtagtgaaaaatatttcttccagagctgggtgtggtggctcatacctgtaat

SEQ ID NO: 265379 - DNA, 120 bp, Artificial Sequence
  ENSG00000126067_10 (sequence is synthesized)
actccgtctcaaaaaaagaaggaaaaatgtttcttccatccctataatccagtcatctgcttcctgcttcccttcctggaggaaacttcagctactaatttcttatgttttttaagagat

SEQ ID NO: 265380 - DNA, 120 bp, Artificial Sequence
  ENSG00000126067_11 (sequence is synthesized)
cagctactaatttcttatgttttttaagagatattctgttactgtgtaaagtatacatacatacagacacatgccccctttaaattttttagatttatttatttatttagagacagggtc

SEQ ID NO: 265381 - DNA, 67 bp, Artificial Sequence
  ENSG00000126067_12 (sequence is synthesized)
atgcccagctagtttttgtgtttttcatagagacagggtctcaccatgtcattcaggttggtcttga

SEQ ID NO: 265382 - DNA, 85 bp, Artificial Sequence
  ENSG00000126067_13 (sequence is synthesized)
gcgcacaccaccaatgcccagctagtttttgtgtttttcatagagacagggtctcaccatgtcattgcctgccttggcttcccag

SEQ ID NO: 265383 - DNA, 120 bp, Artificial Sequence
  ENSG00000126067_14 (sequence is synthesized)
agtatttttaagttctgcatattgcttatttcacttaacactatattagagattgttttatatcaatacatatagatatgcttattcttgttgacagttgcataattttccattaaattg

SEQ ID NO: 265384 - DNA, 120 bp, Artificial Sequence
  ENSG00000126067_15 (sequence is synthesized)
atgtatcatgggcagttaaccagttactcgttttactcttagcataactttagggaacaatgtggatgttttgtggttaaagctattaaaacagtggttcttgaccagatgtgtgtttca

SEQ ID NO: 265385 - DNA, 120 bp, Artificial Sequence
  ENSG00000126067_16 (sequence is synthesized)
tgtgctcctcttaatatcatatacagataggtttttgttttgtctgtgattaaatgtatcatctaagatactacctactgatcataacgttcatattaaagtattgggttaacattagat

SEQ ID NO: 265386 - DNA, 120 bp, Artificial Sequence
  ENSG00000126067_17 (sequence is synthesized)
ttgggtgtcttatacactatttaatacgccaatgataaatgccttacaccataagaagaaagctaatcattgagtaaatgggagaaaagagatgattcacgtcactacagttgattcaac

SEQ ID NO: 265387 - DNA, 120 bp, Artificial Sequence
  ENSG00000126067_18 (sequence is synthesized)
gattcaacctccaacaccaccatgaatatgcataggtttgagcttttagctagattcctgagtgtaaggcatctattttaaaagtgccacaggttggccgggtgcggtggctcatgcctg

SEQ ID NO: 265388 - DNA, 120 bp, Artificial Sequence
  ENSG00000126067_19 (sequence is synthesized)
aaaaaaaaaaaaaaaaaaaaaaagcgccacagatgattctgacgccctacccagtggagtgctgctactaaagcacagactatcctgctacatgattttcccatctgtacaatgactgaa

SEQ ID NO: 265389 - DNA, 120 bp, Artificial Sequence
  ENSG00000126067_20 (sequence is synthesized)
ccatctgtacaatgactgaaatagcacctattctatgtggtagatatgagaattccatgaagtaatataggtaaacatttagttcagggcttggcatgtggtaagtgctcagtaagtgta

SEQ ID NO: 265390 - DNA, 120 bp, Artificial Sequence
  ENSG00000126067_21 (sequence is synthesized)
taatgattggtaaacttgttattctgcattcaggcctcaccagggatgacatacggttctctgcctttgaatgtaagtgtccccagggcaatctcaggcaagcctgcaaacccatcctga

SEQ ID NO: 265391 - DNA, 120 bp, Artificial Sequence
  ENSG00000126067_22 (sequence is synthesized)
ctctcagtgtttttttgccaatctggatctctttcctgagctccaaatcaactcattcctagatagctcaccctccagatttagggacatcgaactcagtatgtctaaagctgagcctta

SEQ ID NO: 265392 - DNA, 120 bp, Artificial Sequence
  ENSG00000126067_23 (sequence is synthesized)
ccatctgcccctctccaaaccgcctctatgacattctgtcttagagaattagagctacctggtttcccaagtgcccaagtcagaaacccaggcatcatttatttttaataaatgttttat

SEQ ID NO: 265393 - DNA, 120 bp, Artificial Sequence
  ENSG00000126067_24 (sequence is synthesized)
tttggaataaatttggttttacagaaaagttgcaaagataatatggtgtccttataccccttattcagtttctgtaatgttaacatcttctatataccacagtatgtttgtcaaaactga

SEQ ID NO: 265394 - DNA, 120 bp, Artificial Sequence
  ENSG00000126067_25 (sequence is synthesized)
gaaaccaacattggttggtgtattagtattactaagctccaggctttattcagattttaccagtttttccactaattttcttctgttctaggatataatccaagatacaacattgcattt

SEQ ID NO: 265395 - DNA, 120 bp, Artificial Sequence
  ENSG00000126067_26 (sequence is synthesized)
agctgggcatcatttttatgccattctttatctcctgtctctacatggccaccaagttctggcatttctacatcctaaatcttttaattttattataattttttattgttgtttttcaga

SEQ ID NO: 265396 - DNA, 120 bp, Artificial Sequence
  ENSG00000126067_27 (sequence is synthesized)
gacagggtcttgctccatcacctaggctggagtacagtggcacgatcgtagcttactgcagtaagttcacttgaactcctgggctcaagtgaacctcttaccccagcctcccaactagct

SEQ ID NO: 265397 - DNA, 86 bp, Artificial Sequence
  ENSG00000126067_28 (sequence is synthesized)
gggctcaagtgaacctcttaccccagcctcccaactagctgggactagaggggtgcaccactgcacccagctaattttgtcaaata

SEQ ID NO: 265398 - DNA, 120 bp, Artificial Sequence
  ENSG00000126067_29 (sequence is synthesized)
gattacagatgtgagccactgcacccagcctaatctttataaatctccatccccattactctggttcaccccctatcgtttcttagactatttaacagcctcctaacttcactctacttt

SEQ ID NO: 265399 - DNA, 120 bp, Artificial Sequence
  ENSG00000126067_30 (sequence is synthesized)
tcctaacttcactctacttttaatctcttccctctccaggtctttctccatattttaaaaaactagtttcaccatccattcctctctgcccttaaaactttctggtggttttccatggct

SEQ ID NO: 265400 - DNA, 120 bp, Artificial Sequence
  ENSG00000126067_31 (sequence is synthesized)
taagagaataaagcccaattctttgatttgacatgctaggcattccataatcctctccgaacctaactccccacttcctttccctcctttacacctcataaagcctgtgttccaactaaa

SEQ ID NO: 265401 - DNA, 120 bp, Artificial Sequence
  ENSG00000126067_32 (sequence is synthesized)
agtactaaccagctatttcatagctgttgcatgaggaaagggactagagtaggattgtacccctcagtctatgctttgtttactctgagtgtacaaaagatggatatgaattgtctccca

SEQ ID NO: 265402 - DNA, 120 bp, Artificial Sequence
  ENSG00000126070_0 (sequence is synthesized)
aggtcggcggcggcggcccgcagtcgtggaggagcggtgggagcgtcggcggccgcgggcgatgcaacttccggacgggactcccctctgtccgcgcctcacatctccccttcctctcgc

SEQ ID NO: 265403 - DNA, 120 bp, Artificial Sequence
  ENSG00000126070_1 (sequence is synthesized)
ctagtcctgtgccgttttccgtccgcgactcttccggcccagagctttcggagtgcggttgctcaggggaagccgtcgccgcccccgcctcggggccgagtgagagtgcccgtcgcgtcg

SEQ ID NO: 265404 - DNA, 120 bp, Artificial Sequence
  ENSG00000126070_2 (sequence is synthesized)
cgccgcgtcgccccccgggccgcctccttgccgccagtggcgggctccgttctccctcgaagcactccccccagctccatgaatggaaatcggctccgcaggacccgctggggcccagcc

SEQ ID NO: 265405 - DNA, 120 bp, Artificial Sequence
  ENSG00000126070_3 (sequence is synthesized)
cctactcatggtgcccagaagacctggctatggcaccatgggcaaacccattaaactgctggctaactgttttcaagttgaaatcccaaagattgatgtctacctctatgaggtagatat

SEQ ID NO: 265406 - DNA, 120 bp, Artificial Sequence
  ENSG00000126070_4 (sequence is synthesized)
taaaccagacaagtgtcctaggagagtgaacagggaggtggttgactcaatggttcagcattttaaagtaactatatttggagaccgtagaccagtttatgatggaaaaagaagtcttta

SEQ ID NO: 265407 - DNA, 120 bp, Artificial Sequence
  ENSG00000126070_5 (sequence is synthesized)
caccgccaatccacttcctgtggcaactacaggggtagatttagacgttactttacctggggaaggtggaaaagatcgacctttcaaggtgtcaatcaaatttgtctctcgggtgagttg

SEQ ID NO: 265408 - DNA, 120 bp, Artificial Sequence
  ENSG00000126070_6 (sequence is synthesized)
gcacctactgcatgaagtactgacaggacggaccttgcctgagccactggaattagacaagccaatcagcactaaccctgtccatgccgttgatgtggtgctacgacatctgccctccat

SEQ ID NO: 265409 - DNA, 120 bp, Artificial Sequence
  ENSG00000126070_7 (sequence is synthesized)
gaaatacacacctgtggggcgttcatttttctccgctccagaaggatatgaccaccctctgggagggggcagggaagtgtggtttggattccatcagtctgttcggcctgccatgtggaa

SEQ ID NO: 265410 - DNA, 120 bp, Artificial Sequence
  ENSG00000126070_8 (sequence is synthesized)
aatgatgcttaatatcgatgtttctgccactgccttctacaaagcacaacctgtaattcagttcatgtgtgaagttcttgatattcataatattgatgagcaaccaagacctctgactga

SEQ ID NO: 265411 - DNA, 120 bp, Artificial Sequence
  ENSG00000126070_9 (sequence is synthesized)
ttctcatcgggtaaaattcaccaaagagataaaaggtttgaaggttgaagtgactcattgtggaacaatgagacggaaataccgtgtttgtaatgtaacaaggaggcctgccagtcatca

SEQ ID NO: 265412 - DNA, 120 bp, Artificial Sequence
  ENSG00000126070_10 (sequence is synthesized)
aacctttcctttacagttagaaaacggccaaactgtggagagaacagtagcgcagtatttcagagaaaagtatactcttcagctgaagtacccgcaccttccctgtctgcaagtcgggca

SEQ ID NO: 265413 - DNA, 120 bp, Artificial Sequence
  ENSG00000126070_11 (sequence is synthesized)
ggaacagaaacacacctacctgccactagaagtctgtaatattgtggcagggcaacgatgtatcaagaagctaacagacaatcagacttccactatgatcaaggcaacagcaagatctgc

SEQ ID NO: 265414 - DNA, 120 bp, Artificial Sequence
  ENSG00000126070_12 (sequence is synthesized)
accagatagacaagaggaaattagcagattggtaagaagtgcaaattatgaaacagatccatttgttcaggagtttcaatttaaagttcgggatgaaatggctcatgtaactggacgcgt

SEQ ID NO: 265415 - DNA, 120 bp, Artificial Sequence
  ENSG00000126070_13 (sequence is synthesized)
acttccagcacctatgctccagtatggaggacggaatcggacagtagcaacaccgagccatggagtatgggacatgcgagggaaacaattccacacaggagttgaaatcaaaatgtgggc

SEQ ID NO: 265416 - DNA, 120 bp, Artificial Sequence
  ENSG00000126070_14 (sequence is synthesized)
tatcgcttgttttgccacacagaggcagtgcagagaagaaatattgaagggtttcacagaccagctgcgtaagatttctaaggatgcagggatgcccatccagggccagccatgcttctg

SEQ ID NO: 265417 - DNA, 120 bp, Artificial Sequence
  ENSG00000126070_15 (sequence is synthesized)
caaatatgcacagggggcagacagcgtagagcccatgttccggcatctcaagaacacatattctggcctacagcttattatcgtcatcctgccggggaagacaccagtgtatgcggaagt

SEQ ID NO: 265418 - DNA, 120 bp, Artificial Sequence
  ENSG00000126070_16 (sequence is synthesized)
gaaacgtgtaggagacacacttttgggtatggctacacaatgtgttcaagtcaagaatgtaataaaaacatctcctcaaactctgtcaaacttgtgcctaaagataaatgttaaactcgg

SEQ ID NO: 265419 - DNA, 120 bp, Artificial Sequence
  ENSG00000126070_17 (sequence is synthesized)
agggatcaataatattcttgtacctcatcaaagaccttctgtgttccagcaaccagtgatctttttgggagccgatgtcactcatccacctgctggtgatggaaagaagccttctattgc

SEQ ID NO: 265420 - DNA, 120 bp, Artificial Sequence
  ENSG00000126070_18 (sequence is synthesized)
tgctgttgtaggtagtatggatgcacacccaagcagatactgtgccacagtaagagttcagagaccccgacaggagatcatccaggacttggcctccatggtccgggaacttcttattca

SEQ ID NO: 265421 - DNA, 120 bp, Artificial Sequence
  ENSG00000126070_19 (sequence is synthesized)
attttataagtcaactcggttcaagcctactcgtatcatcttttatcgggatggtgtttcagaggggcagtttaggcaggtattatattatgaactactagcaattcgagaagcctgcat

SEQ ID NO: 265422 - DNA, 120 bp, Artificial Sequence
  ENSG00000126070_20 (sequence is synthesized)
cagtttggagaaagactatcaacctggaataacctacattgtagttcagaagagacatcacactcgattattttgtgctgataggacagaaagggttggaagaagtggcaatatcccagc

SEQ ID NO: 265423 - DNA, 120 bp, Artificial Sequence
  ENSG00000126070_21 (sequence is synthesized)
tggaacaacagttgatacagacattacacacccatatgagttcgatttttacctctgtagccatgctggaatacagggtaccagtcgtccttcacactatcatgttttatgggatgataa

SEQ ID NO: 265424 - DNA, 120 bp, Artificial Sequence
  ENSG00000126070_22 (sequence is synthesized)
ctgctttactgcagatgaacttcagctgctaacttaccagctctgccacacttacgtacgctgtacacgatctgtttctatacctgcaccagcgtattatgctcacctggtagcatttag

SEQ ID NO: 265425 - DNA, 120 bp, Artificial Sequence
  ENSG00000126070_23 (sequence is synthesized)
agccagatatcatcttgtggacaaagaacatgacagtgctgaaggaagtcacgtttcaggacaaagcaatgggcgagatccacaagctcttgccaaggctgtacagattcaccaagatac

SEQ ID NO: 265426 - DNA, 120 bp, Artificial Sequence
  ENSG00000126070_24 (sequence is synthesized)
cttacgcacaatgtacttcgcttaaatagtccaagtatattctctgagaggaagtactgaaagatgaattgacatacaacgtatgtttccagtgaagtcaattgagtaaggacacctcca

SEQ ID NO: 265427 - DNA, 120 bp, Artificial Sequence
  ENSG00000126070_25 (sequence is synthesized)
gccatacagaaaccaacactgtgtgggggccaaggtctgatccttatgttaatacaaggaagattgtttacttcatcaaggaacacagcatcattatgcaatatgaaaccagccaactgc

SEQ ID NO: 265428 - DNA, 120 bp, Artificial Sequence
  ENSG00000126070_26 (sequence is synthesized)
tttttgtgcggtctcctataggaagtatcgcaattgttttgttttcatttcttgtagtctaacccttttaatgcctttacctcaagttgcttggcagcacaactatctttgcaaaaaaaa

SEQ ID NO: 265429 - DNA, 120 bp, Artificial Sequence
  ENSG00000126070_27 (sequence is synthesized)
gtaaagaaaaagtaaatgatggtttaaaaaatacacaccttcatgaataatcaaagtgatttttcagaattatgtgtgcaaaaaattaatgtgcattcatatattcttgtaaaaggtgtc

SEQ ID NO: 265430 - DNA, 120 bp, Artificial Sequence
  ENSG00000126070_28 (sequence is synthesized)
tgtgtatttttaaaatatatacatccatacttcatatgcatatatatctagatctggattgataatagatatatatgtgtctgttatatattttagagttcattccattggggaattttc

SEQ ID NO: 265431 - DNA, 120 bp, Artificial Sequence
  ENSG00000126070_29 (sequence is synthesized)
tttcccttttattctacccccactaccgcctttatttctctatttcccttgccttcatcacctacatttttttcccagtcctaccagtgacattcaaatgttgatgtatctggttcgttt

SEQ ID NO: 265432 - DNA, 120 bp, Artificial Sequence
  ENSG00000126070_30 (sequence is synthesized)
gaatataaaatatggcaaactagaattctacttttattttgcataccctactcctgactcctatctcatacacaattctgagttctcaactcttgatattgctgtcttaagaaacaaaat

SEQ ID NO: 265433 - DNA, 120 bp, Artificial Sequence
  ENSG00000126070_31 (sequence is synthesized)
tttatatatatatgtatacatacatacacagacacagacacacacatatatatacataaaataactttctgtgagagtgcgtctctcccctcccactcagaacatacatttaccatttgc

SEQ ID NO: 265434 - DNA, 74 bp, Artificial Sequence
  ENSG00000126070_32 (sequence is synthesized)
gtctctcccctcccactcagaacatacatttaccatttgcgcaatttgtatataagcagtagcaacctgaacta

SEQ ID NO: 265435 - DNA, 120 bp, Artificial Sequence
  ENSG00000126070_33 (sequence is synthesized)
actattctttttctttagtgagtttgttaaagctgctataaatataaaacctgtcagaagttgtaactttctctctggtaagtgatgtgtattctgaagccttctgtttctatgggttat

SEQ ID NO: 265436 - DNA, 120 bp, Artificial Sequence
  ENSG00000126070_34 (sequence is synthesized)
acatggaaattctttaaaggttttataaagggtaaatattttaaaagattagagctctgtagggttgagacctctgaaattgagtagagagaagagtttgttgagggatttttttgtttt

SEQ ID NO: 265437 - DNA, 120 bp, Artificial Sequence
  ENSG00000126070_35 (sequence is synthesized)
gttttttgatagtttacttgctgcctctcataccttaatgtgattttcatatattttttatatatatatatgtatgtgtgtgtatataaacacatatgtatgtgtttggaagtatagctt

SEQ ID NO: 265438 - DNA, 120 bp, Artificial Sequence
  ENSG00000126070_36 (sequence is synthesized)
ccttttcttttatatttattagaatagtgctttaataattatagaattgtattggcagcatcttttatagaaatataatcatgtttattttaagaactgacaacttgtttttgctatctt

SEQ ID NO: 265439 - DNA, 120 bp, Artificial Sequence
  ENSG00000126070_37 (sequence is synthesized)
ttagtgcaataagcagttttaaaggaaagttgtgtctgcatctttaccatggatagtaggaggaacaggcacctccatagtttaaaagggcaaagaatacagccttaatttcagaaggaa

SEQ ID NO: 265440 - DNA, 120 bp, Artificial Sequence
  ENSG00000126070_38 (sequence is synthesized)
tttaaaagggcaaagaatacagccttaatttcagaaggaaagttttgtaattttcagttttaaagcatatcttttaaaattcatcatgataaaaggctggacgcggtggctcatgcctgt

SEQ ID NO: 265441 - DNA, 81 bp, Artificial Sequence
  ENSG00000126070_39 (sequence is synthesized)
ccaaaactccgtctcaaaagaaaaaaaaatcataatgaaaatgaagtgaaattgcctaaatgagtccaacttgaatattag

SEQ ID NO: 265442 - DNA, 120 bp, Artificial Sequence
  ENSG00000126070_40 (sequence is synthesized)
tgaagtgaaattgcctaaatgagtccaacttgaatattagaaataaagttgaacttttatataattgtgaatagcttaacatatttaaattatttgcaaatagattgtgtttattgaaga

SEQ ID NO: 265443 - DNA, 120 bp, Artificial Sequence
  ENSG00000126070_41 (sequence is synthesized)
atcatattggctagatgcccattttcatttactaaaatgaatcaggaaaatgcaagatgatattttaaaacttttgctaatgtatcaccagtataactttccttttaaaattaaggtgat

SEQ ID NO: 265444 - DNA, 120 bp, Artificial Sequence
  ENSG00000126070_42 (sequence is synthesized)
agtaacaaaggaagttaggactttgatcattttaaatcagttaaatcactgaaacgtgggaaattgttttacaaaacttttattgattacactttaaggtattaaaaagtactataaagc

SEQ ID NO: 265445 - DNA, 120 bp, Artificial Sequence
  ENSG00000126070_43 (sequence is synthesized)
tatcaaaactgagtttatcagtaacattggattcaggggagctttgcactttgtaactcatgaaaattgcattttgattttttttttttttgcactggttcagagtatagatactacaga

SEQ ID NO: 265446 - DNA, 120 bp, Artificial Sequence
  ENSG00000126070_44 (sequence is synthesized)
ttgtttccagtgggcattgttgttagcctttcagaattccatctgcacgtgaaacctaatggatttagatctttagtttctctcttacctgtaatccactattattgccaattcactgta

SEQ ID NO: 265447 - DNA, 120 bp, Artificial Sequence
  ENSG00000126070_45 (sequence is synthesized)
ttttgagcctaaaatctgagcccatgtcctctgacaggcatgaaatcttttgtccctctgccagaaaactaagaaagtactgtattttgtatgtttattattttgaagtgtctgaaatgc

SEQ ID NO: 265448 - DNA, 120 bp, Artificial Sequence
  ENSG00000126070_46 (sequence is synthesized)
aatttacaacactgttgcaaagaactttacaaaaggtaatatttgtatcgtatatacattttttctcccagccttctcccatctcctccagaaaaatttcctataaagatggattttttt

SEQ ID NO: 265449 - DNA, 120 bp, Artificial Sequence
  ENSG00000126070_47 (sequence is synthesized)
acactgaaattttactgaatatagtcaggatcatgggcaagagaagaaaatagtatacccaagatgataaaaatttaattcgtctatgcttgatcagtgtgagtaaaacatcttccttta

SEQ ID NO: 265450 - DNA, 120 bp, Artificial Sequence
  ENSG00000126070_48 (sequence is synthesized)
tcatgggagctgcacagattcatgtgggaaactttagggaatgactgtagataccctttctctatgtactctctcacctaattttcagtcactcatatatgctagagtggagcccttaat

SEQ ID NO: 265451 - DNA, 120 bp, Artificial Sequence
  ENSG00000126070_49 (sequence is synthesized)
ttaaatctatttggaaggacttttttaagaggaaaaatattttttctaaattataaagctttaccttttgagtgatttcttttttagagtgctcttacactagtcagcattgctagttta

SEQ ID NO: 265452 - DNA, 120 bp, Artificial Sequence
  ENSG00000126070_50 (sequence is synthesized)
aagttgattaacttgaaagagtatgtatactatatttctattttgctaacaaattggtatattaattaccattggttcttaattacaagaaaacttgtgcttagaattttaagataaaag

SEQ ID NO: 265453 - DNA, 120 bp, Artificial Sequence
  ENSG00000126070_51 (sequence is synthesized)
gctaagtgacaaatgcttcttgaaatttgtcctatttattgttgcatttctggtgtagaatttctaatcttttttattttaaaaaagtttttttttttaagttaaacatgaaattcacag

SEQ ID NO: 265454 - DNA, 120 bp, Artificial Sequence
  ENSG00000126070_52 (sequence is synthesized)
tgacccttctgctcctgcccttgctcactaactatatcatgaatgctagattttggtcttcttttttctgtgatgtatcttacgagactgactgtaaaatatcagtctggcaactagata

SEQ ID NO: 265455 - DNA, 120 bp, Artificial Sequence
  ENSG00000126070_53 (sequence is synthesized)
attgattttcatatgaagaagagttgggagtttaatgtatattcttgatggttaatgtgtctacataaagtgctgatacatgtattatatcacagtatcaggttactggcatggaggacc

SEQ ID NO: 265456 - DNA, 120 bp, Artificial Sequence
  ENSG00000126070_54 (sequence is synthesized)
atacacttacaatattgtagctgctatatttatttaagtagattctgacagttactgcactaaacagtaaggagataagcaggattcaaggctagtgttagacccttttttttcctaaga

SEQ ID NO: 265457 - DNA, 120 bp, Artificial Sequence
  ENSG00000126070_55 (sequence is synthesized)
gtaaggacacggaatatcaaagtaacaaagggtgctgccattttagtttcaatttaatatcaggatattctttgttttagaaatgtagattttgacttttacagtttgaaaaagggtacc

SEQ ID NO: 265458 - DNA, 120 bp, Artificial Sequence
  ENSG00000126070_56 (sequence is synthesized)
tcagcctcttcagtactggttttttggcacatttcaacagaaatattagattccctttctttttcttaatagtgatcttctaacaagtttcttggaaaaactatcattctaagggaaatc

SEQ ID NO: 265459 - DNA, 120 bp, Artificial Sequence
  ENSG00000126070_57 (sequence is synthesized)
cctgtttataacctattaatatatttctattcctagaagagagtctagcagggattctagtaggaattactgagtgttttggaaggcacttgatagaggcatctctgctttccagcacag

SEQ ID NO: 265460 - DNA, 120 bp, Artificial Sequence
  ENSG00000126070_58 (sequence is synthesized)
ggattctcagccttctaaagatctagaccagtttccaagctagcttctccacagcccaccactgcctagtgtttgcttgtgtattctctaatggattttaggaggataggccttctgaca

SEQ ID NO: 265461 - DNA, 120 bp, Artificial Sequence
  ENSG00000126070_59 (sequence is synthesized)
gagtcatgaaagactgaaggcatgtctagggaaataaaacctgacttgcccttcagcaggaatgactggcagcggatctctgtgttcaaggaaagggtgagcgctaagcatgccagtgat

SEQ ID NO: 265462 - DNA, 120 bp, Artificial Sequence
  ENSG00000126070_60 (sequence is synthesized)
ggatccgaagtatttagatggattgcagaccaggaattagagaccgtttgtgactcaaggaacttgatggatctgtttagagccctacatgaatttgccaagggcagtgatttttatgaa

SEQ ID NO: 265463 - DNA, 120 bp, Artificial Sequence
  ENSG00000126070_61 (sequence is synthesized)
attcaagaagcaaacgacttcgatacagctagaatatgttgcagtcttcctatttcaaacttgattttaatatttttaccaagaagtttaactgacaactctgcaaaattttcattcagt

SEQ ID NO: 265464 - DNA, 120 bp, Artificial Sequence
  ENSG00000126070_62 (sequence is synthesized)
atcattaaacctgagttaaatgtttgcttagcttatcctcttagatgttcttctgttgaacaggcaggttgcccttaacagtaacttgctacttaaattaccttttattagttagtcaag

SEQ ID NO: 265465 - DNA, 120 bp, Artificial Sequence
  ENSG00000126070_63 (sequence is synthesized)
ctgcaaaaatatcattagtgtggcgtctttattttggctttatccatatgaagtattcattattttcattctttttgagaattcataaatgtcttaaagcttcagtaagaattgttggga

SEQ ID NO: 265466 - DNA, 120 bp, Artificial Sequence
  ENSG00000126070_64 (sequence is synthesized)
ggtttgacatcaagtaacgccttcctgtgtagcagtataaccctaatttagaactcttgttttcctatttcagtcctcatatttgatcatagaaaagcacttttgtgattctataggagt

SEQ ID NO: 265467 - DNA, 120 bp, Artificial Sequence
  ENSG00000126070_65 (sequence is synthesized)
caaaaaatcagccaagagtaggtaagtcagtcagcacagaaatcagaaagtgagaattttctccaaaaaatctttttaaaaaagtcctgcttatactaagaacattcttgatccgttgca

SEQ ID NO: 265468 - DNA, 120 bp, Artificial Sequence
  ENSG00000126070_66 (sequence is synthesized)
gtgttagaaatgacactgtgattagtgaaagccaagctgagtcccaggaagcagggagggggagtgtgtgtgtgtgtatatgtatgagtgtgtatatatataatctcacacacacacaca

SEQ ID NO: 265469 - DNA, 120 bp, Artificial Sequence
  ENSG00000126070_67 (sequence is synthesized)
aagggaaaaattattttgacttttttcctacttttaaaatggtacatttaagtttataattttccatgtcagtcaacataattttttaaactaaggtataatggtcaaggcttgtgctaa

SEQ ID NO: 265470 - DNA, 120 bp, Artificial Sequence
  ENSG00000126070_68 (sequence is synthesized)
tattacctactactcattgaaatttatattactttacccatcaaaactagtactccagatgtttacatcattgattaaatctcaagaatcttttgttcttaaaatatggaagttaaagat

SEQ ID NO: 265471 - DNA, 120 bp, Artificial Sequence
  ENSG00000126070_69 (sequence is synthesized)
tttaatttgaattaaagatagaaggatggtaaattcaatatagagggttgagatttaccagtgagaaaccctgttgaagtatcaggtaaatggtgtgacaaaattagaatcctgtcaaat

SEQ ID NO: 265472 - DNA, 120 bp, Artificial Sequence
  ENSG00000126070_70 (sequence is synthesized)
cacctatccagccatcggggtcccttccttttttagactaatttctaaggtaaccagaatctaatgtatctatgttagggtctcagtaaagcaaagacgtttgtcagggcgtagactctt

SEQ ID NO: 265473 - DNA, 120 bp, Artificial Sequence
  ENSG00000126070_71 (sequence is synthesized)
gagttaaattttttaatcattttttaaagcaaggcggttcttagaaagtgccttttcagaagatggtgctgtagatttttatttttcaagtagcacgaagctaagaattttaaagataaa

SEQ ID NO: 265474 - DNA, 120 bp, Artificial Sequence
  ENSG00000126070_72 (sequence is synthesized)
ttattttagaactccaagagtgtgacagtttcataaaaataatgttagttgttgtcttgaatctcgtccaagggaaccaaggaaagcttttatgcagtaaagtatctaggtaaatgctca

SEQ ID NO: 265475 - DNA, 120 bp, Artificial Sequence
  ENSG00000126070_73 (sequence is synthesized)
ccaaatttattttgtaaatttgaaaacaaaatatttagtagaattacctcttttaattcccaactgtgttggaggaaatccataatgcacataaaacagcaaacctacttaactttttaa

SEQ ID NO: 265476 - DNA, 120 bp, Artificial Sequence
  ENSG00000126070_74 (sequence is synthesized)
cagcaaacctacttaactttttaacaagattatgggtatagtaccaatgtccaaagggaaatgtaacttgcctggaatcataggcaacattttctaattaatcttttttttttttttttt

SEQ ID NO: 265477 - DNA, 120 bp, Artificial Sequence
  ENSG00000126070_75 (sequence is synthesized)
cccggccctaattagtcattattaaggaggactgctcataaaggcagtaccaaatcatcattcagatcagcttaagtgagaaagcaaaatgataatctctattgttagagaaattttctt

SEQ ID NO: 265478 - DNA, 120 bp, Artificial Sequence
  ENSG00000126070_76 (sequence is synthesized)
ttctagacaccaaggaatattttaaatgattttttattttttctaggatgcaggaactatgaaaaatgatgacaaggcatttaaaagggtatgatcagttaaatagaagtagggtctgca

SEQ ID NO: 265479 - DNA, 120 bp, Artificial Sequence
  ENSG00000126070_77 (sequence is synthesized)
accaggaagcagtaaatagcagtaaatgatcacctaggcacttctttcctgtgaatttggtgagcattcttccagaaaagaagactaaaagcaaacaacaacaacaacaaaaaataccac

SEQ ID NO: 265480 - DNA, 120 bp, Artificial Sequence
  ENSG00000126070_78 (sequence is synthesized)
acctcagtaaccttgtatgctgcattatataataatgatagtaaaattatattgtttggagtgtactgtgtctgtttgcaaatatacatgcacattaaacttttttgtttttataatgtc

SEQ ID NO: 265481 - DNA, 120 bp, Artificial Sequence
  ENSG00000126070_79 (sequence is synthesized)
ttaatagcaattatgagtttatttttgttaagattaatttttctattgtgatgtttatatttattggcaatttgtatgcaacttttatattttgcttgtcggttttaaggtattttattt

SEQ ID NO: 265482 - DNA, 120 bp, Artificial Sequence
  ENSG00000126070_80 (sequence is synthesized)
ttatagatatttctagctttcctcattctttgtaatagcagcaaagattaagatggagtgttaatataccaaccaaactacgaattccataaactctagagtttggatttttaccaataa

SEQ ID NO: 265483 - DNA, 120 bp, Artificial Sequence
  ENSG00000126070_81 (sequence is synthesized)
accattaacactattttgtaacttagaatatttaatgttgtttatatagtgggcattaaagacagtctttagacagatttctacatgtggaggggaggtggggctttcctgtaagtttga

SEQ ID NO: 265484 - DNA, 120 bp, Artificial Sequence
  ENSG00000126070_82 (sequence is synthesized)
tcctttttttcccctttagtagcaaactaacataacagattggatttattttacctgactacagttttggggaaacctgtcaaataaataattgttacatgccttttttttttaaattta

SEQ ID NO: 265485 - DNA, 120 bp, Artificial Sequence
  ENSG00000126070_83 (sequence is synthesized)
agcacattgaaactgcttaaatggtcacatttttcagcattaggattaagataccatttttgtaggcctggaaaacaaatagcaaatgattcaaaattcattgaattgactttgaaatga

SEQ ID NO: 265486 - DNA, 120 bp, Artificial Sequence
  ENSG00000126070_84 (sequence is synthesized)
aacttttcccccataatttgttatatggaagatttgctaccctgatcttttccctagcatacttctaaagttgattgaatccctgagtatcaatgaagaaatcagagtttaagtggctag

SEQ ID NO: 265487 - DNA, 120 bp, Artificial Sequence
  ENSG00000126070_85 (sequence is synthesized)
ggagagccaggtataaagactgattaatagagtacttcagctaattaaaaatttaaatagtaataatttatgaatgtgaataaattggaaggcagcaaaaagcatgattatagaatatta

SEQ ID NO: 265488 - DNA, 120 bp, Artificial Sequence
  ENSG00000126070_86 (sequence is synthesized)
agttcaattatatatagacagtccagtttcctagtgaataggtcaagattatttgttttgttttgtggcactatcatagttcactataacttcaaactcctgggctcaggctatcctccc

SEQ ID NO: 265489 - DNA, 120 bp, Artificial Sequence
  ENSG00000126070_87 (sequence is synthesized)
tcccacctcagcctctgaagtagctgggactactcacatgcgccaccatgcccagctaatggtttttttctttagagatgggggtcactatactgcccaggctggtcttgaactcctaag

SEQ ID NO: 265490 - DNA, 86 bp, Artificial Sequence
  ENSG00000126070_88 (sequence is synthesized)
tctggccaagatcaagattatggatattggtatgttaacttttaaaataaaagtacatgggctgggcgcagtggctaacgcctgta

SEQ ID NO: 265491 - DNA, 120 bp, Artificial Sequence
  ENSG00000126070_89 (sequence is synthesized)
caagagtgaaactccatctcagaaaataaaaataaaaataaataaaagtacatgaaaaaagtatattcccttaagcaggtaaaatacttgcattgtatttttacatcatgaatttgcttg

SEQ ID NO: 265492 - DNA, 120 bp, Artificial Sequence
  ENSG00000126070_90 (sequence is synthesized)
ttacatcatgaatttgcttgttaagaaatttcttttctgtaagtggttaaaagataaactgtattccatcctctgggttttcaattctaaattattggagctcaatgtatgacattttac

SEQ ID NO: 265493 - DNA, 120 bp, Artificial Sequence
  ENSG00000126070_91 (sequence is synthesized)
tgtagtgtattccactgagaggcaaggaaatgggaaagtgtcaggtaattataaatgggaaaattttatttttatatgatgtaaagttttacagtttaaaatagatcagcatgtgatttc

SEQ ID NO: 265494 - DNA, 120 bp, Artificial Sequence
  ENSG00000126070_92 (sequence is synthesized)
ttgtagagattagccatttcatttctttttgcatttttgccagttacattagtttgccctatgatatactattctgagatacttcagccccgcacacatcaagtactaattgtatacaga

SEQ ID NO: 265495 - DNA, 120 bp, Artificial Sequence
  ENSG00000126070_93 (sequence is synthesized)
cccgcacacatcaagtactaattgtatacagatagtacagatttgtactctgattataagaatttgttactactaattaaaagcaaattaatgtggctgggcgtggtagctcacacctgt

SEQ ID NO: 265496 - DNA, 69 bp, Artificial Sequence
  ENSG00000126070_94 (sequence is synthesized)
ttggcggtacgtgcctgtaatcccagctactgggaaggccgaggcaggagaatggcttgaacccaggag

SEQ ID NO: 265497 - DNA, 120 bp, Artificial Sequence
  ENSG00000126070_95 (sequence is synthesized)
caaaatatttttgctgtgattgtatgtccccttttaaggatatttattgcgcttataaccttaatagttgtattcattacatttcaacatgtccaaggttagcagacatgtagttcctga

SEQ ID NO: 265498 - DNA, 65 bp, Artificial Sequence
  ENSG00000126070_96 (sequence is synthesized)
atttcaacatgtccaaggttagcagacatgtagttcctgaaaaccaacattttaaaagttgcctc

SEQ ID NO: 265499 - DNA, 84 bp, Artificial Sequence
  ENSG00000126070_97 (sequence is synthesized)
tacaaacaaaaaaaggtgcctctggtcctgtgttttctttttccttctgaaagttcatagaaacctggcatatagagcttattt

SEQ ID NO: 265500 - DNA, 120 bp, Artificial Sequence
  ENSG00000126070_98 (sequence is synthesized)
ttctgaaagttcatagaaacctggcatatagagcttattttgctgttttaactggttggctccacaaatcctgctacctgacatcagtacagcttgaccgcagtgaagtacttgatggct

SEQ ID NO: 265501 - DNA, 78 bp, Artificial Sequence
  ENSG00000126070_99 (sequence is synthesized)
acatcagtacagcttgaccgcagtgaagtacttgatggcttgttcatgtttagttcacctctttagaaagaaagcttt

SEQ ID NO: 265502 - DNA, 120 bp, Artificial Sequence
  ENSG00000126070_100 (sequence is synthesized)
gactctgtctcaaaaaaaaaaaaaaatcgttgtgcagtaatagatcatcccaaaaaagaattgccatgaacagcgttatgcgtagaaaacagatggaagtgttggtcattagagccttgc

SEQ ID NO: 265503 - DNA, 120 bp, Artificial Sequence
  ENSG00000126070_101 (sequence is synthesized)
agccttgctttttaaattttattctttccaaaaattggcggtatgctatctataattttatgtttgatgttgaagaggcaacaccagagactagagagggagattactctgatatttagt

SEQ ID NO: 265504 - DNA, 120 bp, Artificial Sequence
  ENSG00000126070_102 (sequence is synthesized)
caagagtgaaactccgtctcaaaaaataataataattttaaaaataaaagacaaaactttcatctttatttcatggctttatttcatctttatttcatttttggttgggaaaacaaacaa

SEQ ID NO: 265505 - DNA, 120 bp, Artificial Sequence
  ENSG00000126070_103 (sequence is synthesized)
atttcatctttatttcatttttggttgggaaaacaaacaaaaatctcttaagttagtcctttaatagtctttttagaaccaaagaaggaaagactgcaaaaatgttgcatacgtgactct

SEQ ID NO: 265506 - DNA, 120 bp, Artificial Sequence
  ENSG00000126070_104 (sequence is synthesized)
ttattgtcagaatctgtagaaactggaggtctttgtaaagaaatagactagtaggattgtgagaatatatagtgaggggggatttaggataaggcttccttgctgggatccttggacaga

SEQ ID NO: 265507 - DNA, 120 bp, Artificial Sequence
  ENSG00000126070_105 (sequence is synthesized)
aaccttacaattgtttaatatttgcagagtaaaagagcagctattgctatttgaacctacagaagagacctaagacgagcgtctctgtaatctaaatttatatgataatgttgtcccaga

SEQ ID NO: 265508 - DNA, 120 bp, Artificial Sequence
  ENSG00000126070_106 (sequence is synthesized)
cccaaaggcacacctattctcagtaacttagagaagtcttggaagttgcttctgaattacagtaaagaaattaaatgaagtctttatccttaaatagggccaggcattgctatcaacata

SEQ ID NO: 265509 - DNA, 120 bp, Artificial Sequence
  ENSG00000126070_107 (sequence is synthesized)
gtgtctttggttttcccctttaaatagaaaacaccaagcagggcctttccagacaatgtagtctttcctgtaaagaaaatggttttggtgtgggatttggtaaaaacactggttagtttg

SEQ ID NO: 265510 - DNA, 120 bp, Artificial Sequence
  ENSG00000126070_108 (sequence is synthesized)
taatgaagaaagaattttggcatagacagtccgacccagttcatggatacagtttgatcccagggagtttaacaaaaggaagctttggttttgctagcaacagacttgatcttctatagt

SEQ ID NO: 265511 - DNA, 120 bp, Artificial Sequence
  ENSG00000126070_109 (sequence is synthesized)
aattaattgcaattaaggttttccaggagctttctcatttcttagcccagggtccaaccccattccctctttaaaaaagaaagaataggccgggagcagtggctcatgcctgcaatccca

SEQ ID NO: 265512 - DNA, 120 bp, Artificial Sequence
  ENSG00000126070_110 (sequence is synthesized)
cctgaggctgaggcaggagaatcctgctagtctgaattacaataaggaaattaaatgaaggatttatctttaatagagccaggcattgctatcaacataacatgtttggttttccccttt

SEQ ID NO: 265513 - DNA, 80 bp, Artificial Sequence
  ENSG00000126070_111 (sequence is synthesized)
aggcattgctatcaacataacatgtttggttttcccctttaaatagaaaacaccaagcagggcctttccagacaaggtag

SEQ ID NO: 265514 - DNA, 120 bp, Artificial Sequence
  ENSG00000126070_112 (sequence is synthesized)
gtctcaaaaaaaaaaaaaagaaggaataggaaaaggacttagaggcagttgatatagaattctactgggggtaaatgacactctcaaaatacttgggaaagaagaatcacatgccacaag

SEQ ID NO: 265515 - DNA, 120 bp, Artificial Sequence
  ENSG00000126070_113 (sequence is synthesized)
ctatagcttgattaatattttagcatgttttccatgtttgtattctaaagtttgtttcctttgacattccattatcttacttactagagtgccaccattcttatttgtaatacaatcagt

SEQ ID NO: 265516 - DNA, 120 bp, Artificial Sequence
  ENSG00000126070_114 (sequence is synthesized)
gttttatgccatttgtgaatcacacaattgttcttttttccccatcacacacactcacacacaaacacacacactgttaaaaataaaagaggggaaggataaaacaaaaatagatagaat

SEQ ID NO: 265517 - DNA, 120 bp, Artificial Sequence
  ENSG00000126070_115 (sequence is synthesized)
gatgattattacaatgtaactttaacatatatgaagagaaattctaactcagttaagtgagaattaagattgaaagtattaatgttgcaagtattatctctagccatggaattttttgct

SEQ ID NO: 265518 - DNA, 120 bp, Artificial Sequence
  ENSG00000126070_116 (sequence is synthesized)
ggctatagaatgctaatgtgaacagagtatatatcaggaatatgatgtattatggcacagtgataatattattgttgatattagccagatgtggtggtttgcacctgtagtccgaacttc

SEQ ID NO: 265519 - DNA, 120 bp, Artificial Sequence
  ENSG00000126070_117 (sequence is synthesized)
tcaggaggatgaggcaggaggatagttgagcccaggagtttaaagcaagcctgggcaatacagcaagaccccaatctttaaaataaataaataaataagaattattcttgaaagtaatat

SEQ ID NO: 265520 - DNA, 120 bp, Artificial Sequence
  ENSG00000126070_118 (sequence is synthesized)
tctaaccttctgccaaccaacagagatcctcatattcttaaagaaaattaatatagcttatggttttgataaattggactctgatttaaactttaaaatgttatgacttttattctgata

SEQ ID NO: 265521 - DNA, 120 bp, Artificial Sequence
  ENSG00000126070_119 (sequence is synthesized)
catggcttctaaaatatgtaaaaaattatattgaatgaattaatacttaacctgttcatttctcttaatttatgtatttattctgactttattatacagcttatgtctcacatctgcctt

SEQ ID NO: 265522 - DNA, 120 bp, Artificial Sequence
  ENSG00000126070_120 (sequence is synthesized)
cttgatatgtgcaaaatattgtgtaaaaatagtttaaaactcatcccagttcctagtcaagcgtgggctataagagagaaggcttaaggtgttctttaatggaggaacttttgaaagatc

SEQ ID NO: 265523 - DNA, 120 bp, Artificial Sequence
  ENSG00000126070_121 (sequence is synthesized)
acaaatggaaaaagcctattgagaatttattgcctttgagagtagaaagggctctagaatatgagccagagacttggaatttagtaataggtctcccactgatttgctccgtgtccttag

SEQ ID NO: 265524 - DNA, 120 bp, Artificial Sequence
  ENSG00000126070_122 (sequence is synthesized)
gcaattcgtttaatctctgtgtgcctagtttccccttgtaaataagagtggtaatacctgtcctcacctacctcactaaattgttggagttcttttgttctgagtcagggtctcactctg

SEQ ID NO: 265525 - DNA, 120 bp, Artificial Sequence
  ENSG00000126070_123 (sequence is synthesized)
gttctgagtcagggtctcactctgttgcccaggctgaactacagtagtgtgatcatagctcactacagcctccaactcctgggcccaaactatcctcctgcttcagcctcccaagtagct

SEQ ID NO: 265526 - DNA, 120 bp, Artificial Sequence
  ENSG00000126070_124 (sequence is synthesized)
agctgggactagaggtacatgccaccacacccagctaattattttcttttattgcagagatggggtctcacatgttgccaaggctgatctctaactcctgagctcaagcagtcctcctgc

SEQ ID NO: 265527 - DNA, 120 bp, Artificial Sequence
  ENSG00000126070_125 (sequence is synthesized)
ggcatgatcactaaattgttgtaagaataagataatgtttgcggaagcatttgagttctccaaaggaaaagctattcagacgttcaagataatagaagagtgttgtgtgaaggattcctt

SEQ ID NO: 265528 - DNA, 120 bp, Artificial Sequence
  ENSG00000126070_126 (sequence is synthesized)
tccagtttgcctctgtgaaaatgtctttgttgtagatcattttatgaaataggaataagagaaacataggccttatcatggtgtagtgttcacttacaaacatatcctgttgtttcttcc

SEQ ID NO: 265529 - DNA, 120 bp, Artificial Sequence
  ENSG00000126070_127 (sequence is synthesized)
ctgcaagatatccagcacacaggctgaatttttctttataataatccttggcaaaagcataacttttcaaaaaccaaatgattttagtggtgctatggcagctgcagttttgagttagat

SEQ ID NO: 265530 - DNA, 73 bp, Artificial Sequence
  ENSG00000126070_128 (sequence is synthesized)
attttagtggtgctatggcagctgcagttttgagttagattaatgtggtgaaaaccatcaaatacttagaaat

SEQ ID NO: 265531 - DNA, 120 bp, Artificial Sequence
  ENSG00000126070_129 (sequence is synthesized)
cactccagcctgggcaacaaagcgaagctctgtctcaataaaaaaaaaaataataataataaaatacaaatacttagaaattaacttcgcctttgccttcaggcacttttgctacatgtt

SEQ ID NO: 265532 - DNA, 120 bp, Artificial Sequence
  ENSG00000126070_130 (sequence is synthesized)
ttaacttcgcctttgccttcaggcacttttgctacatgttagcatcagaggctattgtacaactagatggttattccctgtttcttggccgatttttggtacctttctttgaagaagagg

SEQ ID NO: 265533 - DNA, 120 bp, Artificial Sequence
  ENSG00000126070_131 (sequence is synthesized)
gttagattttaagaaagaaagtgtgcttatttcactcatgtctttgcagaatttaactttgctttactttaaaaattccaatcatcatgtacctataaaggttaaaatatagtgaaagtt

SEQ ID NO: 265534 - DNA, 120 bp, Artificial Sequence
  ENSG00000126070_132 (sequence is synthesized)
tctgcttcatgtgaattcaattctgagcacctgcaggtcatatcaggtgtctgatgcagttacctttatagatcgtggcaggtccttacatttcaacaggcttatgcatttccatggggg

SEQ ID NO: 265535 - DNA, 120 bp, Artificial Sequence
  ENSG00000126070_133 (sequence is synthesized)
gaagagattctgtttctaggaaattacaaagggcacaccactgcagggagtgtaaacaattctttgttgcaacagacaagattttttttaaaaaaagaaaaaaggatgcattttaggtac

SEQ ID NO: 265536 - DNA, 120 bp, Artificial Sequence
  ENSG00000126070_134 (sequence is synthesized)
acagggtatggacgcattcaacatttacttttatctccacagatgccaacctccccttgttgcaggcagttgggcttttccaactcattgctaacaaagctggcatctgcattaatttca

SEQ ID NO: 265537 - DNA, 120 bp, Artificial Sequence
  ENSG00000126070_135 (sequence is synthesized)
atgagaatttcaagtactgaagatgaaaagttggggagattcatgtttgaaaaatgaaaaatgaacaaaaaatccaccttgtgcagtgagatagctaacgctgatatatcaggaataatt

SEQ ID NO: 265538 - DNA, 120 bp, Artificial Sequence
  ENSG00000126070_136 (sequence is synthesized)
ttaaactatttttgctgtaatgtgtagctttaatgtctcttttcagttatggacccataaaagtattcctatatcttgtgaataaagatcattcttgtggactagtacgtggatgcattc

SEQ ID NO: 265539 - DNA, 120 bp, Artificial Sequence
  ENSG00000126070_137 (sequence is synthesized)
ataggctttgggaagcagtggtgtgcgtatgtgtgtctatatcaatattttatgtttataactctgcgtattaagtttatatagaaaaaaataatgtctttctttagtgtttgggggact

SEQ ID NO: 265540 - DNA, 120 bp, Artificial Sequence
  ENSG00000126070_138 (sequence is synthesized)
caatggtaatatgaccattgcagtgtaatctgactgctcactctagagaacacttctgttatacacaatgcacatacaaacatacacccctaaagcgtagctaactgctcccactagata

SEQ ID NO: 265541 - DNA, 120 bp, Artificial Sequence
  ENSG00000126070_139 (sequence is synthesized)
attgctgctaaaaacaaaacaaaacaaaacaatacaaaacaaaaaaaaccctaagtaatggaggaagaaatagcattcttttaaaaggggcttttctgaagagtaaaatgtaaatacagg

SEQ ID NO: 265542 - DNA, 120 bp, Artificial Sequence
  ENSG00000126070_140 (sequence is synthesized)
acatgtggggagggtggggccgcctgcaaaatgtcctgaagatggacaaatagccttttaaattctactttttaaccatctttaccgtgtgtgcctatttgtattgcagatgtgaactac

SEQ ID NO: 265543 - DNA, 120 bp, Artificial Sequence
  ENSG00000126070_141 (sequence is synthesized)
tatttttggaggttgatatcagtatgttttgaaactgaattattacataaaatcagagtaacctctttctccatcctccttttccacactattcttgccaaatatttctactgaaaccca

SEQ ID NO: 265544 - DNA, 120 bp, Artificial Sequence
  ENSG00000126070_142 (sequence is synthesized)
gtttcagcaaggcaaaatgatgggactctcaaacctccctcctcatcttcccttcccctctgtcttatgcctggcctggccttttttgttgttgttggcttttcataagtaagaaaaatt

SEQ ID NO: 265545 - DNA, 120 bp, Artificial Sequence
  ENSG00000126070_143 (sequence is synthesized)
tattgtagtatttcaagactgcagaatttcaagtgtatatctataaatctttttttaaaatcttcggctacacagtaacatcaattaaaacagaagagtgagtctaagtctgtaatatgc

SEQ ID NO: 265546 - DNA, 120 bp, Artificial Sequence
  ENSG00000126070_144 (sequence is synthesized)
tgtaggaccagataagattttgaatgagactaaacttgactgccatattttaagaggaaattgaaactttatggtggagaatggatgagagcaagtctatgatatatatgtagtcattgt

SEQ ID NO: 265547 - DNA, 120 bp, Artificial Sequence
  ENSG00000126070_145 (sequence is synthesized)
ataattagaaacaccaaatgctgaatcctatcactgtgttcttgggggccaggccttggatttggttgtcatttaaactccttgaagattatatgtaattataatgagcagaaggcaaat

SEQ ID NO: 265548 - DNA, 120 bp, Artificial Sequence
  ENSG00000126070_146 (sequence is synthesized)
aaagtttttgaacaaaagtccttgttttcagtatttaaaatttggtaatatattttctttttcagttaaactatcttccccacaaaaaatattatacttcagttaaactatcttccccac

SEQ ID NO: 265549 - DNA, 120 bp, Artificial Sequence
  ENSG00000126070_147 (sequence is synthesized)
agaaattattatactacgaacaagttatgagtgagactgagaagcttgaagaagctggtttttaagcagctcatataatattttgtgttaaagaaagtgtcattgtttcctgttgggagg

SEQ ID NO: 265550 - DNA, 120 bp, Artificial Sequence
  ENSG00000126070_148 (sequence is synthesized)
caaataacaacaacaacaaaagaaattgtcatgattctttctgagccaaactgtcacgaaatgttctgtgacagaaccactactcttttttctgccattctgcctactggagagttctat

SEQ ID NO: 265551 - DNA, 120 bp, Artificial Sequence
  ENSG00000126070_149 (sequence is synthesized)
gttgtatttgtttttaatccttgattttaaaaatattaatggttttagtgttgcttagcttcagtttgaagtataactttcactaataactgcaataaaaagaaaagctttgctcttaaa

SEQ ID NO: 265552 - DNA, 120 bp, Artificial Sequence
  ENSG00000126070_150 (sequence is synthesized)
gcaacatgtaagaataggaactaggacctgcgtagtctgctctgaatgactgcttaagtcatatttcaaggtgaaagtagtgaaatgtaggatcagcctatgtattcatacattttttaa

SEQ ID NO: 265553 - DNA, 120 bp, Artificial Sequence
  ENSG00000126070_151 (sequence is synthesized)
caggtaatataaaagcataacaggttctcacccaaatcccaatattgtctgcatggtaggattttcaagttccacaagctattagcggagtcagtgatccatgtgaaaaatgatgacaga

SEQ ID NO: 265554 - DNA, 120 bp, Artificial Sequence
  ENSG00000126070_152 (sequence is synthesized)
attcaactgctgcccgaagagcatggactcgatcttaacttcaactgctcaggggcccaaagaaatgactgaaaaaatgactagaaagcataataaagttgatgttatagtgaaggtttg

SEQ ID NO: 265555 - DNA, 120 bp, Artificial Sequence
  ENSG00000126070_153 (sequence is synthesized)
aggcttttcaatcactagttcaggtaagagatggtgatggtctaatgtgggatggagaggaaggattaagctgaaaaaataggtttaagaaccatgtccagaaaaaaaaaactttgggtg

SEQ ID NO: 265556 - DNA, 120 bp, Artificial Sequence
  ENSG00000126070_154 (sequence is synthesized)
tagtactggtacatggaacggattggaaaaaaatagaccagagctttactagatttttgaaagaattgtttttgcaaataaactacaagcctggcatatcagtcaaggttcagaacctag

SEQ ID NO: 265557 - DNA, 120 bp, Artificial Sequence
  ENSG00000126070_155 (sequence is synthesized)
agaagcagaaccagtacgaagtatagagagagagtttatgcaattgtaggggctagctaggcaagtctgaaattttgggggcaggctgtcaggaagggcagggaaattcaggcatgggct

SEQ ID NO: 265558 - DNA, 120 bp, Artificial Sequence
  ENSG00000126070_156 (sequence is synthesized)
gaagcagttatctataagtggaatttcttgctctcagggaagcttcagccctacttttaagacctttcacctaattgaatcaggcccatccacattattcaggataatctccattactta

SEQ ID NO: 265559 - DNA, 120 bp, Artificial Sequence
  ENSG00000126070_157 (sequence is synthesized)
aagtcaacagattatggattttaattacatctacaaaataccttcatagcaacacctagattagtgtttgattaaacaaatggcagctggtagcctagcaagttaacacattaaaaacaa

SEQ ID NO: 265560 - DNA, 69 bp, Artificial Sequence
  ENSG00000126070_158 (sequence is synthesized)
tggcagctggtagcctagcaagttaacacattaaaaacaacacctgccatgatggcttattaggagttt

SEQ ID NO: 265561 - DNA, 120 bp, Artificial Sequence
  ENSG00000126088_0 (sequence is synthesized)
agacagctgaccatggaagcgaatgggttgggacctcagggttttccggagctgaagaatgacacattcctgcgagcagcctggggagaggaaacagactacactcccgtttggtgcatg

SEQ ID NO: 265562 - DNA, 120 bp, Artificial Sequence
  ENSG00000126088_1 (sequence is synthesized)
cgccaggcaggccgttacttaccagagtttagggaaacccgggctgcccaggactttttcagcacgtgtcgctctcctgaggcctgctgtgaactgactctgcagccactgcgtcgcttc

SEQ ID NO: 265563 - DNA, 120 bp, Artificial Sequence
  ENSG00000126088_2 (sequence is synthesized)
cctctggatgctgccatcattttctccgacatccttgttgtaccccaggcactgggcatggaggtgaccatggtacctggcaaaggacccagcttcccagagccattaagagaagagcag

SEQ ID NO: 265564 - DNA, 120 bp, Artificial Sequence
  ENSG00000126088_3 (sequence is synthesized)
gacctagaacgcctacgggatccagaagtggtagcctctgagctaggctatgtgttccaagccatcacccttacccgacaacgactggctggacgtgtgccgctgattggctttgctggt

SEQ ID NO: 265565 - DNA, 120 bp, Artificial Sequence
  ENSG00000126088_4 (sequence is synthesized)
cctcactgatgctctggtcccatatctggtaggacaagtggtggctggtgcccaggcattgcagctgtttgagtcccatgcagggcatcttggcccacagctcttcaacaagtttgcact

SEQ ID NO: 265566 - DNA, 120 bp, Artificial Sequence
  ENSG00000126088_5 (sequence is synthesized)
gccttacatccgtgatgtggccaagcaagtgaaggccaggttgcgggaggcaggcctggcaccagtgcccatgatcatctttgctaaggatgggcattttgccctggaggagctggccca

SEQ ID NO: 265567 - DNA, 120 bp, Artificial Sequence
  ENSG00000126088_6 (sequence is synthesized)
agctggctatgaggtggttgggcttgactggacagtggccccaaagaaagcccgggagtgtgtggggaagacggtgacattgcagggcaacctggacccctgtgccttgtatgcatctga

SEQ ID NO: 265568 - DNA, 120 bp, Artificial Sequence
  ENSG00000126088_7 (sequence is synthesized)
ggaggagatcgggcagttggtgaagcagatgctggatgactttggaccacatcgctacattgccaacctgggccatgggctttatcctgacatggacccagaacatgtgggcgcctttgt

SEQ ID NO: 265569 - DNA, 120 bp, Artificial Sequence
  ENSG00000126088_8 (sequence is synthesized)
ggatgctgtgcataaacactcacgtctgcttcgacagaactgagtgtatacctttaccctcaagtaccactaacacagatgattgatcgtttccaggacaataaaagtttcggagttgaa

SEQ ID NO: 265570 - DNA, 120 bp, Artificial Sequence
  ENSG00000126088_9 (sequence is synthesized)
ggatttggtctgtaaggaccagaagcaagagtgtcctaaacctgagagggcaggggtcttaatgccagggatgaaagaaccttggcctccagtgatctagcggagcagccaagcccatcc

SEQ ID NO: 265571 - DNA, 120 bp, Artificial Sequence
  ENSG00000126088_10 (sequence is synthesized)
ggtagatagcggtcctggactgaatcggccttatgaacccgcgctttccccagcctccagcgtagcatactgacacctacccccacccccacctgatcgccagacctcagggttttccgg

SEQ ID NO: 265572 - DNA, 120 bp, Artificial Sequence
  ENSG00000126088_11 (sequence is synthesized)
gtgacaccatctttctatccttctctagtggaccctgatgacatacatggttgagggtggtggctcaagcaccatggctcaggccaagcgctggctctatcagagacctcaggctagtca

SEQ ID NO: 265573 - DNA, 120 bp, Artificial Sequence
  ENSG00000126088_12 (sequence is synthesized)
cctctggatgctgccatcattttctccgacatccttgttgtaccccagaacctttcctcctggattccattttgggaacccagatgttttctccccctccaggcactgggcatggaggtg

SEQ ID NO: 265574 - DNA, 120 bp, Artificial Sequence
  ENSG00000126088_13 (sequence is synthesized)
ggctggataagactgttggtatcatgagtgggacttgcgccaagcctccggatacccagactgtcagatgagaacaaattcctcatgtcaccgtaagatacatttacagcggagttttct

SEQ ID NO: 265575 - DNA, 120 bp, Artificial Sequence
  ENSG00000126088_14 (sequence is synthesized)
gtaaatttttttttttttaattactgggtttttagggtcaggcagtatcagggattgaagtcatttggggaaaattgaggtggattttgtatgtgggggaaacttcctctttgtgtgtta

SEQ ID NO: 265576 - DNA, 120 bp, Artificial Sequence
  ENSG00000126088_15 (sequence is synthesized)
cgggaggcaggcctggcaccagtgcccatggtgaggattgggatgggttgagtgaaggtggtcctgtggagctttcaggctaagtcctgcatggactggagtgaccactggagggcagca

SEQ ID NO: 265577 - DNA, 120 bp, Artificial Sequence
  ENSG00000126088_16 (sequence is synthesized)
ctcctgtggctgtggctgtattattctgtgtgcacttgtttttaatgtctgtctgtccttttcttctactctgtacaacataagccctagaaagaccggactttttgttgctgttgttca

SEQ ID NO: 265578 - DNA, 120 bp, Artificial Sequence
  ENSG00000126088_17 (sequence is synthesized)
tttgtgtttatgcttcatgcctgggtccatactagggatctgataaattttattgaatgactgaataacactgagtagaagcatgcctacatatgcgtttgtcactagtatatataggga

SEQ ID NO: 265579 - DNA, 120 bp, Artificial Sequence
  ENSG00000126088_18 (sequence is synthesized)
ggacaaaggcttgctggtcctcctgtagccagtgccctgttggtcccccaggaggagatcgggcagttggtgaagcagatgctggatgactttggaccacatcgctacattgccaacctg

SEQ ID NO: 265580 - DNA, 120 bp, Artificial Sequence
  ENSG00000126088_19 (sequence is synthesized)
ccaaagaaagcccggtaagccatggaagggtgaggccttgaggttgaggtgggggtgttggctgggggagctgccatgtatgcagttaccagaacgtggcgctggctttgcttccaggga

SEQ ID NO: 265581 - DNA, 120 bp, Artificial Sequence
  ENSG00000126088_20 (sequence is synthesized)
cagattcaggttaaattgtggattgagctcgcagttacagacagctgaccatggaagcgaatgggttgggcctccagcgtagcatactgacacctacccccacccccacctgatcgccag

SEQ ID NO: 265582 - DNA, 120 bp, Artificial Sequence
  ENSG00000126088_21 (sequence is synthesized)
ctatcagtccagtcaaggtttacaataagcacttatcctaactggatcgagggaaaaactaaggttgaaagaaatggagtttggcagagttttattctccttttccttcctcctggaatg

SEQ ID NO: 265583 - DNA, 120 bp, Artificial Sequence
  ENSG00000126088_22 (sequence is synthesized)
gcgcggaggggcccggagccggtaccgggggctgggcctgcggcgcccacacgcagccccaggccctctgcctcccacaccggcagaagcacgcgcgacggtcccgctgggtccttgtaa

SEQ ID NO: 265584 - DNA, 120 bp, Artificial Sequence
  ENSG00000126088_23 (sequence is synthesized)
agaagcacgcgcgacggtcccgctgggtccttgtaaagcttgtagagcacctctcgcggcacgaaagccagcgctgctggcagcggccgcccggcgcggaggctccgcgctgcctctgcc

SEQ ID NO: 265585 - DNA, 120 bp, Artificial Sequence
  ENSG00000126088_24 (sequence is synthesized)
aagaagcgcacgcggcccagcagctgccggggggactccagcaccgcgcccgggccaggacccgccatggcgaagtggcggaggtgagcacctagaggcgaccctgcccggggaacagct

SEQ ID NO: 265586 - DNA, 120 bp, Artificial Sequence
  ENSG00000126088_25 (sequence is synthesized)
ggcgcgaccgcggacagagcttcccaccacgcccttccccgcctttggccagcctttgccgtatgttctggactaagcgcaccccagctctcactgtattggactgtgtactcccacact

SEQ ID NO: 265587 - DNA, 120 bp, Artificial Sequence
  ENSG00000126088_26 (sequence is synthesized)
caaccatattacttatctctgtgccaccctaacccagccgaccaaacccaagattggtgattgctacctgatcaatctccctctctccatttccttgtgactaccattttatctctactg

SEQ ID NO: 265588 - DNA, 120 bp, Artificial Sequence
  ENSG00000126088_27 (sequence is synthesized)
ctactaccctcattcaagtcaccattctagctagcctgggtcattgccaacagtcatttttctggttcttcggcctgctgtttttcctcccactcccagcgaatctgctggactccctat

SEQ ID NO: 265589 - DNA, 120 bp, Artificial Sequence
  ENSG00000126088_28 (sequence is synthesized)
cctatgggtggtgtgattaaagtgtttgagacaatggccccttcccctgccactgacaggagtcttgagtcattagggttgattctgtttgtcactcctaatcccaaggacactggagat

SEQ ID NO: 265590 - DNA, 120 bp, Artificial Sequence
  ENSG00000126088_29 (sequence is synthesized)
cattattcattttaatgtgattgctgatttctgtttccccagtcttgtagctccttaaaggctggggctgtcttgagcagagctaacctctgcacctactataggtccaggctatagtat

SEQ ID NO: 265591 - DNA, 80 bp, Artificial Sequence
  ENSG00000126091_0 (sequence is synthesized)
ctgcgtccccactatggcggcgcccatgcagcccagcgcgttgtgggctcccgccggggtcccccgcggctgtcgccgcc

SEQ ID NO: 265592 - DNA, 120 bp, Artificial Sequence
  ENSG00000126091_1 (sequence is synthesized)
gcctacgccgctgcctccgccttcctgccccgcgtcgggccgggcgccacctcccccctgcctccctctccgctgtggtcatttaggaaatcgtaaatcatgtgaagatgggactcttgg

SEQ ID NO: 265593 - DNA, 120 bp, Artificial Sequence
  ENSG00000126091_2 (sequence is synthesized)
tatttgtgcgcaatctgctgctagccctctgcctctttctggtactgggatttttgtattattctgcgtggaagctacacttactccagtgggaggaggactccaattcagtggttcttt

SEQ ID NO: 265594 - DNA, 120 bp, Artificial Sequence
  ENSG00000126091_3 (sequence is synthesized)
cctttgactccgctggacaaacactaggctcagagtatgatcggttgggcttcctcctgaatctggactctaaactgcctgctgaattagccaccaagtacgcaaacttttcagagggag

SEQ ID NO: 265595 - DNA, 120 bp, Artificial Sequence
  ENSG00000126091_4 (sequence is synthesized)
cttgcaagcctggctatgcttcagccttgatgacggccatcttcccccggttctccaagccagcacccatgttcctggatgactcctttcgcaagtgggctagaatccgggagttcgtgc

SEQ ID NO: 265596 - DNA, 120 bp, Artificial Sequence
  ENSG00000126091_5 (sequence is synthesized)
cgccttttgggatcaaaggtcaagacaatctgatcaaagccatcttgtcagtcaccaaagagtaccgcctgacccctgccttggacagcctccgctgccgccgctgcatcatcgtgggca

SEQ ID NO: 265597 - DNA, 120 bp, Artificial Sequence
  ENSG00000126091_6 (sequence is synthesized)
atggaggcgttcttgccaacaagtctctggggtcacgaattgacgactatgacattgtggtgagactgaattcagcaccagtgaaaggctttgagaaggacgtgggcagcaaaacgacac

SEQ ID NO: 265598 - DNA, 120 bp, Artificial Sequence
  ENSG00000126091_7 (sequence is synthesized)
tgcgcatcacctaccccgagggcgccatgcagcggcctgagcagtacgagcgcgattctctctttgtcctcgccggcttcaagtggcaggactttaagtggttgaaatacatcgtctaca

SEQ ID NO: 265599 - DNA, 120 bp, Artificial Sequence
  ENSG00000126091_8 (sequence is synthesized)
aggagagagtgagtgcatcggatggcttctggaaatctgtggccactcgagtgcccaaggagccccctgagattcgaatcctcaacccatatttcatccaggaggccgccttcaccctca

SEQ ID NO: 265600 - DNA, 120 bp, Artificial Sequence
  ENSG00000126091_9 (sequence is synthesized)
tggcctcatgggccgggggaacatccctacccttggcagtgtggcagtgaccatggcactacacggctgtgacgaggtggcagtcgcaggatttggctatgacatgagcacacccaacgc

SEQ ID NO: 265601 - DNA, 120 bp, Artificial Sequence
  ENSG00000126091_10 (sequence is synthesized)
acccctgcactactatgagaccgttcgcatggcagccatcaaagagtcctggacgcacaatatccagcgagagaaagagtttctgcggaagctggtgaaagctcgcgtcatcactgatct

SEQ ID NO: 265602 - DNA, 120 bp, Artificial Sequence
  ENSG00000126091_11 (sequence is synthesized)
aagcagtggcatctgagtgggcccagcacatggccatagaggcccaggcaccaccaggagcagcagccagcaccacctacacaggagtcttcagacccagagaaggacggtgccaagggc

SEQ ID NO: 265603 - DNA, 120 bp, Artificial Sequence
  ENSG00000126091_12 (sequence is synthesized)
cccaggggcagcaaggccttggtggagcagccagagctgtgcctgctcagcagccagtctcagagaccagcactcagcctcattcagcatgggtccttgatgccagagggccagcaggct

SEQ ID NO: 265604 - DNA, 120 bp, Artificial Sequence
  ENSG00000126091_13 (sequence is synthesized)
cctggctgtgcccagcaggcccagcatgcaggtggtgggacactgggcagcaaggctgctgccggaatcacttctccaatcagtgtttggtgtattatcattttgtgaatttgggtaggg

SEQ ID NO: 265605 - DNA, 120 bp, Artificial Sequence
  ENSG00000126091_14 (sequence is synthesized)
gggagggtagggataatttatttttaaataaggttggagatgtcaagttgggttcacttgccatgcaggaagaggcccactagagggcccatcaggcagtgttacctgttagctccctgt

SEQ ID NO: 265606 - DNA, 120 bp, Artificial Sequence
  ENSG00000126091_15 (sequence is synthesized)
ggggcaggagtgccaggaccagcctgtaccttgctgtggggctacaggatggtgggcaggatctcaagccagccccctccagctcatgacactgtttggcctttcttggggagaaggcgg

SEQ ID NO: 265607 - DNA, 120 bp, Artificial Sequence
  ENSG00000126091_16 (sequence is synthesized)
ggtattcccactcaccagccctagctgtcccatggggaaaccctggagccatcccttcggagccaacaagaccgccccagggctatagcagaaagaactttaaagctcaggagggtgacg

SEQ ID NO: 265608 - DNA, 120 bp, Artificial Sequence
  ENSG00000126091_17 (sequence is synthesized)
cccagctccgcctgctgggaagagctcccctccacagctgcagctgatccataggactaccgcaggcccggactcaccaacttgccacatgttctaggtttcagcaacaagactgccagg

SEQ ID NO: 265609 - DNA, 120 bp, Artificial Sequence
  ENSG00000126091_18 (sequence is synthesized)
tggttgggttctgcctttagcctggaccaaagggaagtgaggcccaaggagcttacccaagctgtggcagccgtcccaggccacccccatggaagcaataaagctcttccctgagcctgg

SEQ ID NO: 265610 - DNA, 120 bp, Artificial Sequence
  ENSG00000126091_19 (sequence is synthesized)
gggcacggcccagtcgtccttcgggctgggggcccagtacctggatgacctctcctgggtgggggccgccgagcctgggggaaaggccggccggacgcaggccaggaggtctgagatcat

SEQ ID NO: 265611 - DNA, 120 bp, Artificial Sequence
  ENSG00000126091_20 (sequence is synthesized)
ctccgtgtgaaaccccgcagcgctgcgcaccttggcgcagagcacggacaccgtcattcgggccctgctgtgggaaaaggaaagaaaagtccagggagcgcctgagcgggaatcggcagc

SEQ ID NO: 265612 - DNA, 120 bp, Artificial Sequence
  ENSG00000126091_21 (sequence is synthesized)
ctcccccctgcctccctctccgctgtgggtctccctctgtcacccatgctggagtgcagtgaatgtggctctctgcagccttgactttctggactcaggcgatcctcccacctcagcttc

SEQ ID NO: 265613 - DNA, 120 bp, Artificial Sequence
  ENSG00000126091_22 (sequence is synthesized)
actcctacagctagccaaataaagactgaccaggcctactccctcagactcaggctccactgaacaagatctgtcaaacccctcgacagctacccagtgaacaggctgggtggagggggg

SEQ ID NO: 265614 - DNA, 120 bp, Artificial Sequence
  ENSG00000126091_23 (sequence is synthesized)
tatgccggaatgcagagggggcttccagcagatcctttgccaagaccgacgtacggaagtgccaccagtaatccagactgttgcgtttttgtgatcctcagcagtcctgttatattccag

SEQ ID NO: 265615 - DNA, 120 bp, Artificial Sequence
  ENSG00000126091_24 (sequence is synthesized)
ggggtcaccatttttctctctttcaggagcatggaagttaaaaggaaaaataagggggaatatgagaagtcaactgacttgaaactgagcgtatcctgcagaggtggtcttttttttttt

SEQ ID NO: 265616 - DNA, 78 bp, Artificial Sequence
  ENSG00000126091_25 (sequence is synthesized)
gaggtggttaggcacaagtttcactcttgttgctggagtgtgatggcataatctctgctcaccgcaacctccgcctcc

SEQ ID NO: 265617 - DNA, 66 bp, Artificial Sequence
  ENSG00000126091_26 (sequence is synthesized)
gtgatcctttttttaatcctatatgtatatttgctttttgtcatgatggacagatttcctggaatc

SEQ ID NO: 265618 - DNA, 120 bp, Artificial Sequence
  ENSG00000126091_27 (sequence is synthesized)
atatttgctttttgtcatgatggacagatttcctggaatctagagcgcttgtgacagactcagccttccatcatgagctcattgcttacgtcttattctctccagctacacgcttggtgc

SEQ ID NO: 265619 - DNA, 120 bp, Artificial Sequence
  ENSG00000126091_28 (sequence is synthesized)
cttacgtcttattctctccagctacacgcttggtgccctttcctattgcagtgattttttttggtttgtttgtttttgtttttgagacaggttctcactctgtcatccaggctggagtgc

SEQ ID NO: 265620 - DNA, 120 bp, Artificial Sequence
  ENSG00000126091_29 (sequence is synthesized)
ctggctcaagcgatcccatggccccagtgtcccttgcagtgattttttttttagagaaagttttaaaatttgtattcagtagagttgtttaataaaatgatgaaatactttttcttggca

SEQ ID NO: 265621 - DNA, 120 bp, Artificial Sequence
  ENSG00000126091_30 (sequence is synthesized)
tcaccgaggactctctgcacggtggtttttggccttgactgcatattggaatcacctggagagcctaaaaaattactgatgcctgcatcccaccctctagagattttgaagtcactgagc

SEQ ID NO: 265622 - DNA, 120 bp, Artificial Sequence
  ENSG00000126091_31 (sequence is synthesized)
ccgagctaagagaaatggtgcatggagacaaaaacatatccaggcatatgtgctccgccagaggtgaagacagaggattgtggggacacagagaaggcccttcagctggaggagtgatga

SEQ ID NO: 265623 - DNA, 120 bp, Artificial Sequence
  ENSG00000126091_32 (sequence is synthesized)
catgtggaaaatctgaacccttctgaactccgcttgccacacttctgctttgaccaccagccttccactgatcccagcctgaaacctggaaatcttgggccagttcttcaacagcttctc

SEQ ID NO: 265624 - DNA, 120 bp, Artificial Sequence
  ENSG00000126091_33 (sequence is synthesized)
gtgatctgcccacctcagcctcgcacggtgctagaatatatttaacagcttgatagcttgcctcataactttcagatatttagaattaaattttagacacgtgatatgtgtgtaatacgt

SEQ ID NO: 265625 - DNA, 120 bp, Artificial Sequence
  ENSG00000126091_34 (sequence is synthesized)
ccatttgtaattttgtccttggcccaacaatgttaggggttgaacctacatggatatggtggcagtggctggagatgaggctaggtgagcaggggacagatggtgaagggtcttaaaagc

SEQ ID NO: 265626 - DNA, 120 bp, Artificial Sequence
  ENSG00000126091_35 (sequence is synthesized)
caaagtctcatcaaggagcctggaccttatcctgaggaccaataatagcagaagctaacaagagctgactttgtgccaaacatattatatgcatgacttcaaactgtcataacacaaaaa

SEQ ID NO: 265627 - DNA, 120 bp, Artificial Sequence
  ENSG00000126091_36 (sequence is synthesized)
cactataaaggagagctagtattactgcccttattttataggagaggatgatgagacttagaagagtaaagaacttgcttaggggtacagagttagagtagttgggggtgtgagggttca

SEQ ID NO: 265628 - DNA, 120 bp, Artificial Sequence
  ENSG00000126091_37 (sequence is synthesized)
caatcagacctgcactcttaattgtcaacacaagctgttgcagtgggcagtggaaagccactgaagattttaagcctgagaatgtcgagatcagatttgtgcagggatgtgaataaactg

SEQ ID NO: 265629 - DNA, 120 bp, Artificial Sequence
  ENSG00000126091_38 (sequence is synthesized)
aagggaaagcaagagggagtcagagagagctgatggctgttagagtcaccccaggagagttggtggtccgtcctaaggcagtagcagcagggagcataggcgtggacacatctgcctact

SEQ ID NO: 265630 - DNA, 120 bp, Artificial Sequence
  ENSG00000126091_39 (sequence is synthesized)
cttgctgtgaaagcctaccatggttaatctctattcccagacctgtgagcacaccaggaaacattctctcaggagcctggtggggaaagtgctttcttcccagatgttttccccattgct

SEQ ID NO: 265631 - DNA, 120 bp, Artificial Sequence
  ENSG00000126091_40 (sequence is synthesized)
cctggatgttctgacaagagcagaacaggttgcatcagcaggagtctggcagcttcacacaggggagctgggtccagacttgactgaggcagggacattcctgaaggaggagggatttga

SEQ ID NO: 265632 - DNA, 120 bp, Artificial Sequence
  ENSG00000126091_41 (sequence is synthesized)
agcactggctggctttgtaggcctctgttgtgtcctgtggattggggaaatgagatgtgagaagccttgggccagatgtggacacttgcaggcagaggccttgtggaataggactgtgtg

SEQ ID NO: 265633 - DNA, 120 bp, Artificial Sequence
  ENSG00000126091_42 (sequence is synthesized)
ctggcagcagggctggcagtgtctccagcagcaggcagacctccccaccgggagccagggggaaaggctggctctcccattcaaatgcatgtacgtgtgcaggtatggatatgtgaatgt

SEQ ID NO: 265634 - DNA, 120 bp, Artificial Sequence
  ENSG00000126091_43 (sequence is synthesized)
gttccggcctctccggtggctgatgttgctgaccacaccctccgcttcactctcctggcctctgtgacactcactataatcataataagtaagatttattgagcttgctgtataccagac

SEQ ID NO: 265635 - DNA, 120 bp, Artificial Sequence
  ENSG00000126091_44 (sequence is synthesized)
cccgtgccagatgctgtaaaacgcacagcatctctaatccttacagctatctgggaagtaggtcttctcagccctattgtatgcacaaggaacttgaggcttaaagagaggacacaatgt

SEQ ID NO: 265636 - DNA, 120 bp, Artificial Sequence
  ENSG00000126091_45 (sequence is synthesized)
gcccctggtcacagagatgtggagctgggattaagcctctgtttttcacactcccaaagctgcagtggtacacagatgttctgtgtatgtgcctgtggacgtttttctgagaagaggagt

SEQ ID NO: 265637 - DNA, 120 bp, Artificial Sequence
  ENSG00000126091_46 (sequence is synthesized)
tacagcttttttttttaggaaacaggctgaggttttgttggtacttgatatttttgtggctggggaaacacggaaatgcccaaaccatatcttggtcttactgtttctcctttccctgaa

SEQ ID NO: 265638 - DNA, 120 bp, Artificial Sequence
  ENSG00000126091_47 (sequence is synthesized)
atctctgaggaaactacaccaggacagtggcagacaagaaagaataaaaggagcgctggactgtcgctgtgtcgggctcccagttctccagtgcagggctccctgggatcgtgacctaaa

SEQ ID NO: 265639 - DNA, 120 bp, Artificial Sequence
  ENSG00000126091_48 (sequence is synthesized)
acagggctccttccccagggtcccaacatgactctcagccgctgctggccgagtaagaaccgagggcagtaagacctcagcgcagtgagccacgaagggcagaggcagaggtggcctgct

SEQ ID NO: 265640 - DNA, 120 bp, Artificial Sequence
  ENSG00000126091_49 (sequence is synthesized)
ccaaggaggaggccctgcccagctcacccaccgccatgcagaggcagcaactcaggaagggctgcctttgtgggagagaattttcacctcacaccagtaatcgtgacacactcagtatcc

SEQ ID NO: 265641 - DNA, 120 bp, Artificial Sequence
  ENSG00000126091_50 (sequence is synthesized)
tcaaatctaagcagtcccatcaggcatttctcctcccaggaaagagtaaagatgagaagagacgtggcagctttcccctccccatcagatcgccaagggggttgagttaataagcgaatt

SEQ ID NO: 265642 - DNA, 120 bp, Artificial Sequence
  ENSG00000126091_51 (sequence is synthesized)
tcctgccatttgagatggtgattaaatccgggacttttagcatatggaacagaccaagagggattgtttcagagagggcatctcatgtgcagaaaaacaggttgtgaagtcaaacgcagc

SEQ ID NO: 265643 - DNA, 120 bp, Artificial Sequence
  ENSG00000126091_52 (sequence is synthesized)
tcagattctcaccagctgtgcgtgtaccctgacgagtcccctcaccattctgggccttagtcccctctgaaaaatgggacatgggcaccagagagactcctgagagctcccttagtgctc

SEQ ID NO: 265644 - DNA, 120 bp, Artificial Sequence
  ENSG00000126091_53 (sequence is synthesized)
ttagaggagacaggggaggtctcctttatctttgacccctaacccctcagacttccagaggcgggaactgcagcgatgatacaaatggtgtggtggaaagaatgccgttttggagtcagg

SEQ ID NO: 265645 - DNA, 120 bp, Artificial Sequence
  ENSG00000126091_54 (sequence is synthesized)
acacctgggtttgaatccacttgcagccacttgcaggctgcttgaccttgaacgtatcgtgtcgtatcgtttcaccttgggatctgtacctgtgaagtgggtgaaagttaaagagataat

SEQ ID NO: 265646 - DNA, 120 bp, Artificial Sequence
  ENSG00000126091_55 (sequence is synthesized)
gaaggcaccgagccctggaaggggcagtaaaggtttgagcaaaggcccaactgatcacttcatctctcctttcagtcctggacgcacaatatccagcgagagaaagagtttctgcggaag

SEQ ID NO: 265647 - DNA, 120 bp, Artificial Sequence
  ENSG00000126091_56 (sequence is synthesized)
ttcagagatgggcaatgagagtaaactgaacatttctgggactttggcctagaaattgcctgccattttagctggtataggctgagaactttgatgttttttaaaaactgcatgccatga

SEQ ID NO: 265648 - DNA, 120 bp, Artificial Sequence
  ENSG00000126091_57 (sequence is synthesized)
caaatctcagttccttttacaaacttggtgagaatgtgctattcttcaataaaaacccaaactatactcatacttctagttcttgaacgcttttgttctttctaattgctgtagcatatt

SEQ ID NO: 265649 - DNA, 120 bp, Artificial Sequence
  ENSG00000126091_58 (sequence is synthesized)
gccactctattttgccatttattgccttagggattagtattgaagttggtttccatctgcccttaaaacattcatctttatgttgaattttcaacataatattgtctctgttttgttttc

SEQ ID NO: 265650 - DNA, 120 bp, Artificial Sequence
  ENSG00000126091_59 (sequence is synthesized)
cctaaagaaacgttgtctactgaatctttgtagccgttgctgctattgaacttgcacctggctacaataatggcttattttccctacccagtaactcctaatttttttcttctctttgtg

SEQ ID NO: 265651 - DNA, 120 bp, Artificial Sequence
  ENSG00000126091_60 (sequence is synthesized)
cactttgtctcatgtgttacatagtgttttccacatagcctgaatcccactggtttggtttctgtttacctgatgtggcctgtgttttggttctaggcttgcagttgaagggcttacatt

SEQ ID NO: 265652 - DNA, 120 bp, Artificial Sequence
  ENSG00000126091_61 (sequence is synthesized)
gatcagcaccagcctttgcacattgttttcttggctgtagcttgaaatatcacacagtgaccatagtggttttctttttggttattttgtctgactgttatctgagcttggtgtgggaaa

SEQ ID NO: 265653 - DNA, 120 bp, Artificial Sequence
  ENSG00000126091_62 (sequence is synthesized)
tagtataaaatcagaacagagtggcctgttttgacctgcagtgatatgtcttctcttaaaatagttttatttttactaacatctaccagataccagtatagaactcacttgagaagagag

SEQ ID NO: 265654 - DNA, 120 bp, Artificial Sequence
  ENSG00000126091_63 (sequence is synthesized)
tcagtctctaggtacaaggtgaaagtgagctgcagtgagtgggaagaagcaacgggcaattggcctgctgttgttctaagaccctaacatgggaagtattacagtgaagtagctcattta

SEQ ID NO: 265655 - DNA, 120 bp, Artificial Sequence
  ENSG00000126091_64 (sequence is synthesized)
tttctcccatggctcaaactactgaggcagtttcaagccagtttttaaaatatagtgttatatccttaatttactgttttatatagaatatttaagtgccttttaaatgcttagcttata

SEQ ID NO: 265656 - DNA, 120 bp, Artificial Sequence
  ENSG00000126091_65 (sequence is synthesized)
attatcactaattacttgtgtttcaaaagtttacttaaatttctctgcactgacttatttttaaaaccaaggagactacccaggataaggagtgtttgtatcagtgaaatgcagaattct

SEQ ID NO: 265657 - DNA, 120 bp, Artificial Sequence
  ENSG00000126091_66 (sequence is synthesized)
cgctaagggctgctgacctgtagaagatataaccaaggatcagataagattttcctagatcagtagggaagggaattaactttatggaagactcattgtgtttcaggcattaggctagac

SEQ ID NO: 265658 - DNA, 120 bp, Artificial Sequence
  ENSG00000126091_67 (sequence is synthesized)
aatttacaaatataatttcatttaatgtaattcttactgcagttttgtgaagatgccattattatccccattttccagttgagcaaactgaaacactttaatttaccaaggttatattgt

SEQ ID NO: 265659 - DNA, 120 bp, Artificial Sequence
  ENSG00000126091_68 (sequence is synthesized)
tggaactggaattcaattcctgtctttaaaacctatgttcattattttattgaaaaatataataaatactgaaggcagaacttaatttaatattctacctggtaaaaagagagagagaaa

SEQ ID NO: 265660 - DNA, 120 bp, Artificial Sequence
  ENSG00000126091_69 (sequence is synthesized)
ggggctcagagaagtaatagtagagagtgtcaggaagggggtgtgaaaagaaaaggagggaaagagagaaagttatcaaaagaagacagagaggcttattaggtttgaaggtgacaagct

SEQ ID NO: 265661 - DNA, 120 bp, Artificial Sequence
  ENSG00000126091_70 (sequence is synthesized)
gctattcacttgggccgtaggcttcagaagtttattgctagttatctgctgtcctttccattaattgttagctgactaaccagtatttatagcttttctattctgactcctaagcctttt

SEQ ID NO: 265662 - DNA, 120 bp, Artificial Sequence
  ENSG00000126091_71 (sequence is synthesized)
agatgtttgactttgaataggttgtttagaccatctgaccaaagcatactattttatgtgctgtaatatcagagaacagagtaataggacccaccctgcatggcttactaaatcagacgg

SEQ ID NO: 265663 - DNA, 120 bp, Artificial Sequence
  ENSG00000126091_72 (sequence is synthesized)
gagatgaggtctcactctgttgcccaggccagagtgcagtggtgcagtcatagctcactgtagcctcaacctgccaggctcaagcgatcctcctacctcaacctctcgaagtagccggga

SEQ ID NO: 265664 - DNA, 120 bp, Artificial Sequence
  ENSG00000126091_73 (sequence is synthesized)
cctcctacctcaacctctcgaagtagccgggaccacagactcacaccaccattcctggctaatttttgtgtcttttgtagagatggggtttagtcatgttgcccaggctggtctcaaact

SEQ ID NO: 265665 - DNA, 120 bp, Artificial Sequence
  ENSG00000126091_74 (sequence is synthesized)
cctgggctcaagtggtctgcttgccttggcttcccaaagtggtgggattccaggcatgagccactgcgcccggccggagaggagtcctttacttagagtcaagctgaaggagcatcacaa

SEQ ID NO: 265666 - DNA, 120 bp, Artificial Sequence
  ENSG00000126091_75 (sequence is synthesized)
ccccaaagactgttatgttgtgaaatttaggctgtgttttaataatactgatgatgataagatgaaatagtaatttattgattactatatctactatatgtccgtaagatagcagggtct

SEQ ID NO: 265667 - DNA, 120 bp, Artificial Sequence
  ENSG00000126091_76 (sequence is synthesized)
ttatactcggaatctcatttgatcctcatagtttttattggttattattatcctcattttacagatacagaaactgaggcttcagagaggctgtgtaatcaagagtttgtatgcctttca

SEQ ID NO: 265668 - DNA, 120 bp, Artificial Sequence
  ENSG00000126091_77 (sequence is synthesized)
tctgaggaggttgaggacaatcccaagttagaaaaataaatgtctttagcattatttttccttaatgtttagaatattaataagttactcagataatctattggaatttcttcatggcag

SEQ ID NO: 265669 - DNA, 88 bp, Artificial Sequence
  ENSG00000126091_78 (sequence is synthesized)
taagttactcagataatctattggaatttcttcatggcagggggaagaggctagagttggtttttggtttttgtttttggctttgtgg

SEQ ID NO: 265670 - DNA, 120 bp, Artificial Sequence
  ENSG00000126091_79 (sequence is synthesized)
gtatgatcggttgggcttcctcctgaatctggactctaaactgtgagtagaatgagaagataccttggctctgtggcagagaggtctgtgagagctgggtctcactttgaagggcctgct

SEQ ID NO: 265671 - DNA, 120 bp, Artificial Sequence
  ENSG00000126091_80 (sequence is synthesized)
atgggactcttggtatttgtgcgcaatctgctgctagccctctgcctctttctggtactgggatttttgtattattctgcgtggaagctacacttactccagtgggaggaggactccagc

SEQ ID NO: 265672 - DNA, 120 bp, Artificial Sequence
  ENSG00000126091_81 (sequence is synthesized)
ctacctcttaatactatcacattggatatcaggttccagcacatgaattcacaggggacacccaacattcagaccatttcagtacagtgacagctgattggaatttgtggtggttcatta

SEQ ID NO: 265673 - DNA, 120 bp, Artificial Sequence
  ENSG00000126091_82 (sequence is synthesized)
caatgaaaaaaggaagtgggtcactcacaacggaaatgccagtagcatgttaggctcatcatgtacaaccgtattccttgaaattccattctggggctcagtagcctgaaggtgaggcta

SEQ ID NO: 265674 - DNA, 120 bp, Artificial Sequence
  ENSG00000126091_83 (sequence is synthesized)
tggcttcaggaaccttcaagaagctctctcttttgtcctggaacaggatgtgactgcacagcctggtgctcccaactgcacgtcagaatgtaggtaggaagtaatacttatgtgctatac

SEQ ID NO: 265675 - DNA, 120 bp, Artificial Sequence
  ENSG00000126091_84 (sequence is synthesized)
taggacaaataggagaggacttggagttgtctacatagggcattgtgaaaacatttgtgatttttttttttttttaatattacagaactgtgatgaacaggccaggtatggtggctcaca

SEQ ID NO: 265676 - DNA, 120 bp, Artificial Sequence
  ENSG00000126091_85 (sequence is synthesized)
taacagggtgaggaaggaggaggatctggggtgaggtgagacgtgagcattgggccctttaacctgtggtttggcttttttttggagacagtgagaaggttcgaaccttcatggcatggt

SEQ ID NO: 265677 - DNA, 120 bp, Artificial Sequence
  ENSG00000126091_86 (sequence is synthesized)
tggcatggtatggttgatgatttatcatcctggcctcctcgagagaatggactctgagagaaagacaagagcagaagctgcacattgaccatcatagtggtccagaaatgattatttgga

SEQ ID NO: 265678 - DNA, 120 bp, Artificial Sequence
  ENSG00000126091_87 (sequence is synthesized)
acaggcatgagccactgcgcctggctgattcttttaggttttctatgcaaataacagttcggttggagcccgtggtttggcagtgccgccagtctgcagggttggtttgtgacctccagc

SEQ ID NO: 265679 - DNA, 120 bp, Artificial Sequence
  ENSG00000126091_88 (sequence is synthesized)
agtgctcaggagcccagctgtaaaggtagaaaaagaggatgtatgggttgatcccaagttcgggatttccctagactagggcaatagaaggacaaggggcagagtactggaggagctcac

SEQ ID NO: 265680 - DNA, 120 bp, Artificial Sequence
  ENSG00000126091_89 (sequence is synthesized)
aagagagtagctgatgtaatatacttcagggtctagacaaggaggggtggacgcactgaacagtaagggctggggagctaaaggcctctgtgttgtggagagggaggaagagagagactt

SEQ ID NO: 265681 - DNA, 120 bp, Artificial Sequence
  ENSG00000126091_90 (sequence is synthesized)
gaaaggaggggaagctgtgccccagaatggacactgggatgtcggatttcagaggtgatgcctttctagtacagtgcagagaccctccggtaagaatgatcccgttttatggttaaagaa

SEQ ID NO: 265682 - DNA, 120 bp, Artificial Sequence
  ENSG00000126091_91 (sequence is synthesized)
acaggcttggagagcttgttgcccagtcacccaactctagtcaacagcagtgttggtctgctatactctacttgctcacgctctgtctccatttttcaggtccactctagaacagtcgat

SEQ ID NO: 265683 - DNA, 120 bp, Artificial Sequence
  ENSG00000126091_92 (sequence is synthesized)
ggagagagccaggagagagcagcaagggaagtgggagcacaggagggcagacaggagagagggcaggcacctcccagcccctcagctgctgcagatagggaggcagggcagctgcactgc

SEQ ID NO: 265684 - DNA, 120 bp, Artificial Sequence
  ENSG00000126091_93 (sequence is synthesized)
tgggtcttcttattggcccaggagccccctcaggccacagcagcacacccacagcatcccacatcctgtgcctgcccgacgactcccttcgtatcctcctctgttacacactggagcccc

SEQ ID NO: 265685 - DNA, 120 bp, Artificial Sequence
  ENSG00000126091_94 (sequence is synthesized)
accacacgctctcttcaccatcattccccttgtccctgtcacacactccatttccccaaacacagatgggcttcctacaccacaggccctgggttccccattaaacgcctcatgctcccg

SEQ ID NO: 265686 - DNA, 120 bp, Artificial Sequence
  ENSG00000126091_95 (sequence is synthesized)
agattcctgtttctgtaagtctgggggctctggtctcagccctcattcctgcttatcagtcttcttatctatccttctccatcatccccctccactattccagagccttccatgccccaa

SEQ ID NO: 265687 - DNA, 120 bp, Artificial Sequence
  ENSG00000126091_96 (sequence is synthesized)
aagctcctccctcttccagtgaagaaactgaagccacagaggggactctgatctgtcgggctctgcactgtactcccacttggcccttcaccccttgcagcctggctcccctcacacctg

SEQ ID NO: 265688 - DNA, 120 bp, Artificial Sequence
  ENSG00000126091_97 (sequence is synthesized)
acccagctcccatcaaggtcaccacctcaaggtggccaattccagtggacacaacgtcatctttcctgatctctcagaaacacttttcgtgttggccactccttcttctttgaacttctg

SEQ ID NO: 265689 - DNA, 120 bp, Artificial Sequence
  ENSG00000126091_98 (sequence is synthesized)
agtcagtaatttccaacattcctcttatttcactcaccattctctcacattctctttctcagcatcatcaattctgatctacgccttaaaattcatcatagctgggcacagtggctcatg

SEQ ID NO: 265690 - DNA, 82 bp, Artificial Sequence
  ENSG00000126091_99 (sequence is synthesized)
gtgaaaccccatctctactaaaaataggaaaaattggctgggcgcggtggctcacgcagccccgaggtcaggagttcaagac

SEQ ID NO: 265691 - DNA, 120 bp, Artificial Sequence
  ENSG00000126091_100 (sequence is synthesized)
gtctgtctggctagttgggctggaggtcaacggaagcctcaagaactctgggttggagggctttggaacagacaactagcgggggcacctggggagaataggtccaggtgacctggactc

SEQ ID NO: 265692 - DNA, 120 bp, Artificial Sequence
  ENSG00000126091_101 (sequence is synthesized)
cctattctccatgcctgggatagtctggggtcatggtgccttcccaaacacaggcccaggctctgagtgggcctgctctctgtagactgaattcagcaccagtgaaaggctttgagaagg

SEQ ID NO: 265693 - DNA, 120 bp, Artificial Sequence
  ENSG00000126091_102 (sequence is synthesized)
gaaaacaagagaagatgacatgttagagaatgactgcggcaggaaacccactttagacagaagagtcagagaagacgtccctgaggaggtgacatttcaacagaaatctgaatgaaaaca

SEQ ID NO: 265694 - DNA, 120 bp, Artificial Sequence
  ENSG00000126091_103 (sequence is synthesized)
gaaactctgcctctcacagccagtcatgttctcctatgctctggaaaccatgggttcctggaaaggactctgcctttaagttggttcctactccagtcctactccatgccgttgctttgc

SEQ ID NO: 265695 - DNA, 120 bp, Artificial Sequence
  ENSG00000126091_104 (sequence is synthesized)
cttactcccatcctgcctctggagcttgcaccttgtggcacagcctgtttctgcagaaggataacctacatggttgccgcatgcaagccaggtatccagaggcagccagagaaggctgcc

SEQ ID NO: 265696 - DNA, 120 bp, Artificial Sequence
  ENSG00000126091_105 (sequence is synthesized)
aagcacagaagctcctagacctagtatcagtggccaaagaaacttttttggaagcttggaccaactagctggcttcagggaggcatatccaaataaagcagggaacaaagagaaatttct

SEQ ID NO: 265697 - DNA, 120 bp, Artificial Sequence
  ENSG00000126091_106 (sequence is synthesized)
gaggctgtcttgagttttagcactttccttctctgtccattttgcattctggagctgctgacttctttggcacctgaaagaatctgtgcataacccagggagttccttttaccgaatgct

SEQ ID NO: 265698 - DNA, 120 bp, Artificial Sequence
  ENSG00000126091_107 (sequence is synthesized)
gctaaggggtcttgcttactgatccaccttctcctttttggttttcttttctgaagccttggtgtggaaaaggagctgaagtgctgagattgtctttggagtgcagtgagactgtcaggg

SEQ ID NO: 265699 - DNA, 120 bp, Artificial Sequence
  ENSG00000126091_108 (sequence is synthesized)
tcatttcgttccttctgatttggaggggctgaaggaaaggctgcctaggattgtctgggcacttggaccaccagaggagtgctaggggtgggctctgctcactgggggaaggacttgcct

SEQ ID NO: 265700 - DNA, 120 bp, Artificial Sequence
  ENSG00000126091_109 (sequence is synthesized)
cccatcccttagaaggctgaggttaggacacgtaatgtgcttgcaaaggaatgctgagaaacagctcgccccaaagtgactccggtatatttggtttttatgctccctttcttttctaac

SEQ ID NO: 265701 - DNA, 120 bp, Artificial Sequence
  ENSG00000126091_110 (sequence is synthesized)
gtgagcagtctcagcttagctccttgtgtaaagcaagggctatgctggctgagtatctggtgctcagatagagatctctttgtccagggtctgccttctgaattgattccaaatattttg

SEQ ID NO: 265702 - DNA, 120 bp, Artificial Sequence
  ENSG00000126091_111 (sequence is synthesized)
cttcctccagctatttattgagtgcccctgtgtctggctttttgtgttctgtattcttaacacaggtttttgcaagcctatacgactcagtccttagcccagacacttgtgagttttcct

SEQ ID NO: 265703 - DNA, 120 bp, Artificial Sequence
  ENSG00000126091_112 (sequence is synthesized)
ttaccagtatataggtttcgtttgctttttctaattgaaagtaatacaggcatgtggaaacaaaacaaaacaaaaaaacctcaaacagtacaaaaggttatatactgccactccagactc

SEQ ID NO: 265704 - DNA, 120 bp, Artificial Sequence
  ENSG00000126091_113 (sequence is synthesized)
cttccccagagacagccaatattaccaaaagtgggaacataactgtatttaatattctgtactgtgtattaggccgttcttgcatgtctatgaaaaaacatctgagactgggcaaattgt

SEQ ID NO: 265705 - DNA, 120 bp, Artificial Sequence
  ENSG00000126091_114 (sequence is synthesized)
aaaagaggtttaattggcttatggttcatcaggctttacaggaagtatggtgctggcacctgcttcacttctaggaaggcctcaggaaacttaaaatcatgccagaaagcaaagggggag

SEQ ID NO: 265706 - DNA, 120 bp, Artificial Sequence
  ENSG00000126091_115 (sequence is synthesized)
ggagcaggcacgtcatatggcaaaagcaggagcaagtgagtgaaggagagagaaagagaggaagtgctacgcacttttaaacaaccagatctcacaagaattcactcattttcacaagaa

SEQ ID NO: 265707 - DNA, 120 bp, Artificial Sequence
  ENSG00000126091_116 (sequence is synthesized)
agaacagcaccagggggatggtgctaagtcattcatgagagaccaccgccatgatccagtcacctaccaccaggccccattggagattacatttttttcccttccttttttttttttttt

SEQ ID NO: 265708 - DNA, 90 bp, Artificial Sequence
  ENSG00000126091_117 (sequence is synthesized)
ggggctcaagcaattagccacctcagcctcccaagtagttgggactccaggcgcatgcaaccacacgtggctaatttttgtatttctggt

SEQ ID NO: 265709 - DNA, 78 bp, Artificial Sequence
  ENSG00000126091_118 (sequence is synthesized)
caattagccacctcagcctcccaagtagttgggactccaggcgcatgcaaccacacgtggctaatttttgtatttctg

SEQ ID NO: 265710 - DNA, 120 bp, Artificial Sequence
  ENSG00000126091_119 (sequence is synthesized)
gtccctggcctccacaaatcttatgtccttctcacatttcaacatacagtcatcccttctcaatagtccctgcgaaatcttaactcattctagcattaactcaaaagtcctactgtggtc

SEQ ID NO: 265711 - DNA, 80 bp, Artificial Sequence
  ENSG00000126091_120 (sequence is synthesized)
taactcattctagcattaactcaaaagtcctactgtggtcctgtgatctcgccctgcctgatgtctgtcacccacaccta

SEQ ID NO: 265712 - DNA, 66 bp, Artificial Sequence
  ENSG00000126091_121 (sequence is synthesized)
ccaagtccctttatttctcaagctggccgacgcttaggaaaaatagaaaagaacctacgtgattat

SEQ ID NO: 265713 - DNA, 120 bp, Artificial Sequence
  ENSG00000126091_122 (sequence is synthesized)
ccgacgcttaggaaaaatagaaaagaacctacgtgattatcagggcaggtcccctgatactaagtcccaaatctaaattcttatctggaaatgagttcctttcacctatgagactgtaaa

SEQ ID NO: 265714 - DNA, 120 bp, Artificial Sequence
  ENSG00000126091_123 (sequence is synthesized)
acaatgggggtataggcattgggtaaacatcccattccaaaaaggggtaatcagccataagaaaggggctatacgccccatgcaagtttgaaacccagcaaggcagtcattaaatcttaa

SEQ ID NO: 265715 - DNA, 120 bp, Artificial Sequence
  ENSG00000126091_124 (sequence is synthesized)
agtcattaaatcttaaagctccaaaattatctcttttgactctgtgccccacattcagggcacactggtgcaagaagtgggcccccaagatcttgggcagctccgcccctgtggctttgc

SEQ ID NO: 265716 - DNA, 120 bp, Artificial Sequence
  ENSG00000126091_125 (sequence is synthesized)
ctgtggctttgcagggtgcagcccctgtggctgctctcatgggctggcgttgagtgcctgaggctttttcaggtgcagggtgtaaactgctggtggatctaccattctggggactagagg

SEQ ID NO: 265717 - DNA, 120 bp, Artificial Sequence
  ENSG00000126091_126 (sequence is synthesized)
atggtggcccccttctcacagctccacaaggcagtgtcccagtggggaccctgtgtgaaggctccaatcccatgtttcccctccacactgccctagtagaggttttctgtgagggctcca

SEQ ID NO: 265718 - DNA, 120 bp, Artificial Sequence
  ENSG00000126091_127 (sequence is synthesized)
ctcctgcagcaggcttttgcttgggaagccaagcttttccatacatcctctgaaatctaggtggaagcatccaagaatcctccattcttgcactctgtgcactcttaataccacatggaa

SEQ ID NO: 265719 - DNA, 120 bp, Artificial Sequence
  ENSG00000126091_128 (sequence is synthesized)
gctgtcaaagtttacagcttgcattcttcaaagtggcagcctgagctgtaccttgccctttttgagacatggctagagctggagccgccagaatgtggggagcagtgtcctgaagttgca

SEQ ID NO: 265720 - DNA, 120 bp, Artificial Sequence
  ENSG00000126091_129 (sequence is synthesized)
taggggtgaggccctgggcctgacccatgaaaccatttttgtctcctgggcctcaggaactatgatggaaggggctacctcaataatctctaaaatgcctttgaggctttttccctattg

SEQ ID NO: 265721 - DNA, 120 bp, Artificial Sequence
  ENSG00000126091_130 (sequence is synthesized)
tcttagatattagcatttggctcttttttagttatgcaaatgtctctagcaagtggttactccacagcctgcttgaattcctcttctgaaaaagctttttctttctttgccatgtggctt

SEQ ID NO: 265722 - DNA, 120 bp, Artificial Sequence
  ENSG00000126091_131 (sequence is synthesized)
ggctgcaaattttcccaatttttatgctctgcttcccttttaaatataaattccaactttaagtcatttacttgcacctgtatctgagtgtaagctgttaggagcagccagtcatatctt

SEQ ID NO: 265723 - DNA, 120 bp, Artificial Sequence
  ENSG00000126091_132 (sequence is synthesized)
tgctgcttagaaatttcttctgccaaatatgcaatcatcactctcaacttcaaacttccacagattccttgggaaagggcacaatgcaaccaagctgtttgctaaggcataacatgttat

SEQ ID NO: 265724 - DNA, 120 bp, Artificial Sequence
  ENSG00000126091_133 (sequence is synthesized)
catgttatgacctttgctccatttcccaatgagttcctcatttcaatctgagaccttgttggcctagatttcattggccatatccctatcaacattttggttacaaccatttaaccagtc

SEQ ID NO: 265725 - DNA, 120 bp, Artificial Sequence
  ENSG00000126091_134 (sequence is synthesized)
tctaagaagttccaaacttgctctcatcttcctgtcttcttgtgagccctccaaactcttccaacctctatccattacccggttccgaagtcacttccacatttttagatatctttctaa

SEQ ID NO: 265726 - DNA, 120 bp, Artificial Sequence
  ENSG00000126091_135 (sequence is synthesized)
caataccctactcctggtaccaattttatgtattaggccattcttgcattgctacaaaaaaaaaatctgagctctccatttgccttctgccatgattgtaagctttctgatgcctcccta

SEQ ID NO: 265727 - DNA, 78 bp, Artificial Sequence
  ENSG00000126091_136 (sequence is synthesized)
tgccttctgccatgattgtaagctttctgatgcctccctaggaggtaagcagatgccagcaccactcttttacccagt

SEQ ID NO: 265728 - DNA, 67 bp, Artificial Sequence
  ENSG00000126091_137 (sequence is synthesized)
cgtggtggtgttgggaggcgaaggttgtaatgagccgagatcacgccactgcactctacacaaagca

SEQ ID NO: 265729 - DNA, 70 bp, Artificial Sequence
  ENSG00000126091_138 (sequence is synthesized)
aggctcagagtatgatcggttgggcttcctcctgaatctggactctaaacttctcactgcaacctccgcc

SEQ ID NO: 265730 - DNA, 120 bp, Artificial Sequence
  ENSG00000126091_139 (sequence is synthesized)
actgctgccccatttgatacatctttgttgaactggcctaagttcatgccagcatctgtgctctatacaaattgtggaaccagtgggaaggatgggtgcattttaggtgcttgaaaagca

SEQ ID NO: 265731 - DNA, 120 bp, Artificial Sequence
  ENSG00000126091_140 (sequence is synthesized)
atctgatcaaagccatcttgtcagtcaccaaagagtaccgcctgacccctgccttggacaggtgagccacacactgtgcagcctcctacccaccgctgcctggtggtgtgcagaggtgtt

SEQ ID NO: 265732 - DNA, 120 bp, Artificial Sequence
  ENSG00000126091_141 (sequence is synthesized)
tttgaagtcactgagcgaggacacagcctttgcattaggatttttaaagctgcccagtaccattcagctcatgctggatacatcatttcatgaggctgcgctatccttcctgagacctgg

SEQ ID NO: 265733 - DNA, 120 bp, Artificial Sequence
  ENSG00000126091_142 (sequence is synthesized)
gagtatctcaaagatgggactgctttgttggtcatgaacacacaccagtgtcagagagtgcagggaaagtgtaaatggcctgctgaattagccaccaagtacgcaaacttttcagaggga

SEQ ID NO: 265734 - DNA, 120 bp, Artificial Sequence
  ENSG00000126091_143 (sequence is synthesized)
ctgccttggacagcctggtcctggacaagggcgtggggtcaagggccaaaggagcagggaaagagacctggtgggcagctctctgtacagaggtctccgcctctctcccctcagcctccg

SEQ ID NO: 265735 - DNA, 120 bp, Artificial Sequence
  ENSG00000126091_144 (sequence is synthesized)
aggccaagtacaggcagtgtcaagtaggtagcaagcaagagagaagacagaagtcaggtccagaaattcaggacctttctctttcacccagactagagtgcagtggctcgatcacggctc

SEQ ID NO: 265736 - DNA, 120 bp, Artificial Sequence
  ENSG00000126091_145 (sequence is synthesized)
attcctgaactcgagtgattcttccacctcagccccccgagtggctgggaccacagcctcatgcccagctaattattctatttcttgtaaagacattgtctcactatattgcccaggctg

SEQ ID NO: 265737 - DNA, 90 bp, Artificial Sequence
  ENSG00000126091_146 (sequence is synthesized)
ctggccaccgcacctggcccaaaattcttagaagatatcattttgataactgtgacattcttttacataaatgtatcatttaatgaaacc

SEQ ID NO: 265738 - DNA, 120 bp, Artificial Sequence
  ENSG00000126091_147 (sequence is synthesized)
tgtgacattcttttacataaatgtatcatttaatgaaacctctgttgtaaacttttggatttttttctgttttttcactttgtaagtaatactgtaataaagagctttttacaaaggtct

SEQ ID NO: 265739 - DNA, 120 bp, Artificial Sequence
  ENSG00000126106_0 (sequence is synthesized)
gggcggcgcccaggaggcgcccgggtgaggcacgggtgcgcaagcgggagttccggctggagacccgtgctctgggccggcgccttcaccatggcctcggcagagctggactacaccatc

SEQ ID NO: 265740 - DNA, 120 bp, Artificial Sequence
  ENSG00000126106_1 (sequence is synthesized)
gagatcccggatcagccctgctggagccagaagaacagccccagcccaggtgggaaggaggcagaaactcggcagcctgtggtgattctcttgggctggggtggctgcaaggacaagaac

SEQ ID NO: 265741 - DNA, 120 bp, Artificial Sequence
  ENSG00000126106_2 (sequence is synthesized)
cttgccaagtacagtgccatctaccacaaaaggggctgcatcgtaatccgatacacagccccgtggcacatggtcttcttctccgagtcactgggtatcccttcacttcgtgttttggcc

SEQ ID NO: 265742 - DNA, 120 bp, Artificial Sequence
  ENSG00000126106_3 (sequence is synthesized)
cagaagctgctcgagctgctctttgattatgagattgagaaggagcccctgctcttccatgtcttcagcaacggtggcgtcatgctgtaccgctacgtgctggagctcctgcagacccgt

SEQ ID NO: 265743 - DNA, 120 bp, Artificial Sequence
  ENSG00000126106_4 (sequence is synthesized)
cgcttctgccgcctgcgtgtggtgggcaccatctttgacagcgctcctggtgacagcaacctggtaggggctctgcgggccctggcagccatcctggagcgccgggccgccatgctgcgc

SEQ ID NO: 265744 - DNA, 120 bp, Artificial Sequence
  ENSG00000126106_5 (sequence is synthesized)
ctgttgctgctggtggcctttgccctggtggtcgtcctgttccacgtcctgcttgctcccatcacagccctcttccacacccacttctatgacaggctacaggacgcgggctctcgctgg

SEQ ID NO: 265745 - DNA, 120 bp, Artificial Sequence
  ENSG00000126106_6 (sequence is synthesized)
cccgagctctacctctactcgagggctgacgaagtagtcctggccagagacatagaacgcatggtggaggcacgcctggcacgccgggtcctggcgcgttctgtggatttcgtgtcatct

SEQ ID NO: 265746 - DNA, 120 bp, Artificial Sequence
  ENSG00000126106_7 (sequence is synthesized)
gcacacgtcagccacctccgtgactaccctacttactacacaagcctctgtgtcgacttcatgcgcaactgcgtccgctgctgaggccattgctccatctcacctctgctccagaaataa

SEQ ID NO: 265747 - DNA, 120 bp, Artificial Sequence
  ENSG00000126106_8 (sequence is synthesized)
atgcctgacacctccccacaacctgcaatctgtcgggcactcttctcgttcaactccctgtagccctttgggactttgcggtcccctaagtagaaaattcctatgggcctgtctcctggg

SEQ ID NO: 265748 - DNA, 120 bp, Artificial Sequence
  ENSG00000126106_9 (sequence is synthesized)
cttgcagtcagttgtgtttggacaagtgcaacagtcaggctgctgattcctgtggcatgcaggctgtagaggttgacaaatggaggggggtgttgagggtgagccctagttgatttttta

SEQ ID NO: 265749 - DNA, 120 bp, Artificial Sequence
  ENSG00000126106_10 (sequence is synthesized)
gttgattttttaaaatttaaactctggtaagaacatttaatatgagacctactctctttttttctttacttatttatttatctatttatttcaagacagggtctcactctgtcacctagg

SEQ ID NO: 265750 - DNA, 120 bp, Artificial Sequence
  ENSG00000126106_11 (sequence is synthesized)
aaaattgtaagtgtgtacgatacttaaaatttaagagattatgtgcacggcagacctctagaactgaatagtcttgcatcttgcataattcagaacttcatcatcttgcataactgaaac

SEQ ID NO: 265751 - DNA, 120 bp, Artificial Sequence
  ENSG00000126106_12 (sequence is synthesized)
tttgtgcctgttaccagagttgagttttgattccttgaatggaaggtgacctttgtggggagatgccagagggaaggtatatcggtcaggggtagcgtcaggctgcggataggggctatg

SEQ ID NO: 265752 - DNA, 120 bp, Artificial Sequence
  ENSG00000126106_13 (sequence is synthesized)
atctttgctccagcagggcgaagccctacagtgtaaagtaccattcacatggctcccacttggcagttcactcagagaggctcctctgaccccattgcctgggagtctgaggtagaagcc

SEQ ID NO: 265753 - DNA, 120 bp, Artificial Sequence
  ENSG00000126106_14 (sequence is synthesized)
agatgaggagctgaggttaggggcctgcctggctctaccacactttgctaggaagccgctgggtctgggaaagttgcaagctgaaagttgccagagacagtggggggcaggaaggcagca

SEQ ID NO: 265754 - DNA, 120 bp, Artificial Sequence
  ENSG00000126106_15 (sequence is synthesized)
gcattgtaacaggagctgggatgagctaactcccaagccctaaagaccagaaccagggtaaggggatttgggctgaaatagcaaactccttcatcttctggaagggagacccacttagat

SEQ ID NO: 265755 - DNA, 120 bp, Artificial Sequence
  ENSG00000126106_16 (sequence is synthesized)
actctctaggcagaagaggtgaattcagcctgatagttcagtatcattgatcattctagaagtcactactgcacaatgttggcatatagtaggtattcaataaatatttgattgaatgag

SEQ ID NO: 265756 - DNA, 120 bp, Artificial Sequence
  ENSG00000126106_17 (sequence is synthesized)
tcccggatcagccctgctggagccagagtcttctgcatggcctcctgcttgctgctttcaccattgctggtggatggcatctctgctgggacagaggggcaactcacactccggccagac

SEQ ID NO: 265757 - DNA, 120 bp, Artificial Sequence
  ENSG00000126106_18 (sequence is synthesized)
tgggcagcacaggtgctaacgcggcttggctgtcaccttcaatgcatcacccgaagctgagagccccccttcgtcactcctagcttgcagcctcacaattccatttccccacccaaatac

SEQ ID NO: 265758 - DNA, 120 bp, Artificial Sequence
  ENSG00000126106_19 (sequence is synthesized)
atccattttaatatgcacatcacaggcaggcagcacggtcacaaaggagccccaccagcagcagtccccacgtggtggaacggatggatgaccagccaccagcctcggcctcttggcttc

SEQ ID NO: 265759 - DNA, 120 bp, Artificial Sequence
  ENSG00000126106_20 (sequence is synthesized)
cagcagatggatacccagcagaggcctggcaccagagtgccaatgtctacgtgtcagctgcttgtacctcggaagccaccttccaggagagtggtggcccgtatccgcttctgtccacac

SEQ ID NO: 265760 - DNA, 120 bp, Artificial Sequence
  ENSG00000126106_21 (sequence is synthesized)
cactcatactcctcaaagcggttgttgttctcatgctcgatgtccacagcatcatcctcagccatgcaggagccttccctctgtgaagagcagagcaggatcatgctgggcccaggccat

SEQ ID NO: 265761 - DNA, 120 bp, Artificial Sequence
  ENSG00000126106_22 (sequence is synthesized)
cacagctctagccccagctgtggtgtgccaagtgggccctcagctctagggctcctttgaagcaaaccaatttagaggtcaaagacctgggcctcttcccaatagttttccgctggagcc

SEQ ID NO: 265762 - DNA, 120 bp, Artificial Sequence
  ENSG00000126106_23 (sequence is synthesized)
caaggagggaatgagtgagagtgaaagcaaaaggagagagcagtggtcagaagggaagaagctgctgagaccacatggagaccccaagagcccacagattcaggggcagtcagcagctag

SEQ ID NO: 265763 - DNA, 120 bp, Artificial Sequence
  ENSG00000126106_24 (sequence is synthesized)
tgtcgggggaagggagcggggaaggaaggtgggtggtgatggcccctctaccttagaaaggcaatgctccacatgcctactcatctcctgctccgatcctgccagggggcggttgcacag

SEQ ID NO: 265764 - DNA, 120 bp, Artificial Sequence
  ENSG00000126106_25 (sequence is synthesized)
gggacatacctgcccttcatcttgcttcctccgtttcattttcccaatccgagctgcacggggaaaccgaaaacaaagcacagaacaagcagacggtcactgcagcccccagggtcccag

SEQ ID NO: 265765 - DNA, 120 bp, Artificial Sequence
  ENSG00000126106_26 (sequence is synthesized)
tggagctgacacatcctgacctcttgccagccattggcctttttattcagtgcctgatctggccctcatcttgaaatacctcctgctcctttggggactgggctttgccaagagcacctg

SEQ ID NO: 265766 - DNA, 120 bp, Artificial Sequence
  ENSG00000126106_27 (sequence is synthesized)
gggaggagactggtgctaactaagccagtgagtaagtccactctttggctgcagctggtgcaaggtctacccatacctttctatttgcagtgtttaataaaaatccagtgagcaaagaca

SEQ ID NO: 265767 - DNA, 120 bp, Artificial Sequence
  ENSG00000126106_28 (sequence is synthesized)
gcaagcgggagttccggctggagacccgtgctctgggccggcgccttcaccatggcctcggcagagctggactacaccatcgagatcccggatcagccctgctggagccagaggctgcat

SEQ ID NO: 265768 - DNA, 120 bp, Artificial Sequence
  ENSG00000126107_0 (sequence is synthesized)
gtccgcggtcgcgccagctgttccccgggcagggtcgcctctaggtgctcacctccgccacttcgccatggcgggtcctggcccgggcgcggtgctggagtccccccggcagctgctggg

SEQ ID NO: 265769 - DNA, 120 bp, Artificial Sequence
  ENSG00000126107_1 (sequence is synthesized)
ccgcgtgcgcttcttggcagaggcagcgcggagcctccgcgccgggcggccgctgccagcagcgctggctttcgtgccgcgagaggtgctctacaagctttacaaggacccagcgggacc

SEQ ID NO: 265770 - DNA, 120 bp, Artificial Sequence
  ENSG00000126107_2 (sequence is synthesized)
gctttacaaggacccagcgggaccgtcgcgcgtgcttctgccggtgtgggaggcagagggcctggggctgcgtgtgggcgccgcaggcccagcccccggtaccggctccgggcccctccg

SEQ ID NO: 265771 - DNA, 120 bp, Artificial Sequence
  ENSG00000126107_3 (sequence is synthesized)
ccggcgcggcgcctgcgtgcgcaccacgggcgaggagctgtgcaatggccacgggctctgggtgaagctgacaaaggagcagctggcagagcacctgggcgactgcgggctgcaggaagg

SEQ ID NO: 265772 - DNA, 120 bp, Artificial Sequence
  ENSG00000126107_4 (sequence is synthesized)
ctggctgctggtgtgccgcccggcggagggcggagcccgcctggtacccatcgacactcccaaccacctccagcggcagcagcagctctttggcgtggattatcggccggtgctcaggtg

SEQ ID NO: 265773 - DNA, 120 bp, Artificial Sequence
  ENSG00000126107_5 (sequence is synthesized)
ggaacaggtggtggacctgacatactcacatcgcctgggatcgagacctcagccggcagaggcatacgcagaagctgtacaaaggctactctatgtacccccgacatggacctacgagtg

SEQ ID NO: 265774 - DNA, 120 bp, Artificial Sequence
  ENSG00000126107_6 (sequence is synthesized)
cgacgaggacctgatccacttcttgtatgaccacctgggcaaggaggatgagaacctgggtagcgtgaagcagtatgtggagagcatagacgtttcctcctacacggaggagttcaacgt

SEQ ID NO: 265775 - DNA, 120 bp, Artificial Sequence
  ENSG00000126107_7 (sequence is synthesized)
gtcctgcctgacagacagcaatgccgatacctactgggagagcgatgggtcccagtgccaacactgggtacggcttactatgaagaagggcaccattgtcaagaagctgctactcacagt

SEQ ID NO: 265776 - DNA, 120 bp, Artificial Sequence
  ENSG00000126107_8 (sequence is synthesized)
ggataccacagatgacaactttatgccaaagcgggtggtggtctatgggggtgaaggggacaacctgaagaagctgagtgacgtgagcattgacgagaccctcatcggggatgtctgtgt

SEQ ID NO: 265777 - DNA, 120 bp, Artificial Sequence
  ENSG00000126107_9 (sequence is synthesized)
cctggaggacatgaccgtccacctcccgatcatcgagatccgcatcgtggagtgccgagatgatgggattgatgttcgtctccgaggggtcaagatcaagtcatctagacagcgggaact

SEQ ID NO: 265778 - DNA, 120 bp, Artificial Sequence
  ENSG00000126107_10 (sequence is synthesized)
agggttgaatgcagacctgttccagccaactagtctggtgcgatatccacgcctagaaggcaccgaccctgaagtactgtaccgcagagctgtcctcctgcagagattcatcaagatcct

SEQ ID NO: 265779 - DNA, 120 bp, Artificial Sequence
  ENSG00000126107_11 (sequence is synthesized)
cgatagtgtcctgcaccacctggtacctgcctgggaccacacactgggcaccttcagtgagattaagcaagtgaagcagttcctactgctgtcccgccagcggccaggcctggtggctca

SEQ ID NO: 265780 - DNA, 120 bp, Artificial Sequence
  ENSG00000126107_12 (sequence is synthesized)
gtgcctgcgtgactctgagagcagcaagcccagcttcatgccacgcctatacatcaaccgccgtcttgccatggaacaccgtgcctgcccctctcgagaccctgcctgcaagaatgcagt

SEQ ID NO: 265781 - DNA, 120 bp, Artificial Sequence
  ENSG00000126107_13 (sequence is synthesized)
cttcacccaggtatatgaaggcctcaagccctctgacaaatatgaaaagcccctggactacaggtggcccatgcgctatgaccagtggtgggagtgtaaatttattgcagaaggcatcat

SEQ ID NO: 265782 - DNA, 120 bp, Artificial Sequence
  ENSG00000126107_14 (sequence is synthesized)
tggcactggtgaggctcgggacatgtatgtacccaacccctcctgccgagactttgccaagtatgaatggatcggacagctgatgggggctgcccttcggggtaaggagttcctggtcct

SEQ ID NO: 265783 - DNA, 120 bp, Artificial Sequence
  ENSG00000126107_15 (sequence is synthesized)
ggccctgcctggttttgtgtggaagcagctttctggtgaggaggtgagctggagcaaggacttcccagctgtggactctgtgctggtgaagctcctggaagtgatggaaggaatggacaa

SEQ ID NO: 265784 - DNA, 120 bp, Artificial Sequence
  ENSG00000126107_16 (sequence is synthesized)
ggagacgtttgagttcaagtttgggaaggaactaacattcaccactgtactgagtgaccaacaggtggtggagctgatccctgggggtgcaggcatcgtcgtgggatatggggaccgttc

SEQ ID NO: 265785 - DNA, 120 bp, Artificial Sequence
  ENSG00000126107_17 (sequence is synthesized)
tcgtttcatccaactggtccagaaggcacggctagaggagagcaaggagcaggtggcagctatgcaggcaggtctgctgaaggtggtaccacaggctgtgctggacttgctgacctggca

SEQ ID NO: 265786 - DNA, 120 bp, Artificial Sequence
  ENSG00000126107_18 (sequence is synthesized)
agagttggagaagaaagtgtgtggggatccagaggtcactgtggatgctctgcgcaagctcacccggtttgaggacttcgagccatctgactcgcgggtgcagtatttctgggaggcact

SEQ ID NO: 265787 - DNA, 120 bp, Artificial Sequence
  ENSG00000126107_19 (sequence is synthesized)
gaacaacttcaccaacgaggaccggagccgcttcctgcgctttgtcacgggccgcagtcgcctgccagcacggatctacatctacccagacaagctgggctacgagaccacagacgcgct

SEQ ID NO: 265788 - DNA, 120 bp, Artificial Sequence
  ENSG00000126107_20 (sequence is synthesized)
gcccgagtcttccacttgctccagcaccctcttcctgccacactatgccagtgccaaggtatgcgaggagaagctccgctatgcggcctacaactgcgtggccatcgacactgacatgag

SEQ ID NO: 265789 - DNA, 120 bp, Artificial Sequence
  ENSG00000126107_21 (sequence is synthesized)
cccttgggaggagtgaggcgtgccgccggctgtgggaccagcaagactgcacgtgtccctcttggccttgcccagggcgaagacaccttccctgccctggtttggctgacgtgctcagca

SEQ ID NO: 265790 - DNA, 120 bp, Artificial Sequence
  ENSG00000126107_22 (sequence is synthesized)
aaaccccatgtgccctgctcctgtgtgcagttggggtaggggcagctggcatggtcaggtaacactagtggcccagccccgcagacccacaagccctacccgtgctggggcttgcttccc

SEQ ID NO: 265791 - DNA, 120 bp, Artificial Sequence
  ENSG00000126107_23 (sequence is synthesized)
gaggtatttcacctcttaagagggaatcttccacaagcccagcacaagctgccaggcctgagctacttgaagggggccatctaggtccccaacccatggactttgcctccattttcagct

SEQ ID NO: 265792 - DNA, 120 bp, Artificial Sequence
  ENSG00000126107_24 (sequence is synthesized)
ccgccttttttctcctattttctctctggctttcttcagccatgactcacaactaaaaacataaaacactggaggttagtggaggcccctccccaagcagggagcctgggatgggcaggg

SEQ ID NO: 265793 - DNA, 120 bp, Artificial Sequence
  ENSG00000126107_25 (sequence is synthesized)
agtgatagccaaactccttggtcacctgctccaagaaggaagcagtagctgagcacctgccctcacattctgctcttttcccctctccctccataccagagatgtggtgagctctgttct

SEQ ID NO: 265794 - DNA, 120 bp, Artificial Sequence
  ENSG00000126107_26 (sequence is synthesized)
tctaccaacccagtctcaacacacaaagtgccaccaccttccctgactcagaacccacatccactcaatgtgaactctactaccacgacctccccatattcctcacttctccatcacctc

SEQ ID NO: 265795 - DNA, 120 bp, Artificial Sequence
  ENSG00000126107_27 (sequence is synthesized)
cagcctgactccctgtctgccctttcacccccaagattttgcacaggttaaggccagttatggcctttttgaaatctgtaatagctcccctttccccaactctaaagcctagaccttaaa

SEQ ID NO: 265796 - DNA, 120 bp, Artificial Sequence
  ENSG00000126107_28 (sequence is synthesized)
cctgttcctagagctatgcacacccctgccccagtttaccgttcctccctcagggcctccgtgacactccatgaaaagaagttcttgcataccggaaagttgaataaatggatgaattca

SEQ ID NO: 265797 - DNA, 120 bp, Artificial Sequence
  ENSG00000126107_29 (sequence is synthesized)
ctgtcctcctgcagaggtggctgtggtcctggacctatgggcccttcccttcccccaacattgagccttgtgtgtctgcatggaggaggttcccaaggtctcatagtataagctgttcaa

SEQ ID NO: 265798 - DNA, 120 bp, Artificial Sequence
  ENSG00000126107_30 (sequence is synthesized)
gggtcagagaagcccccaggtcctgccttttcctgtccctttatgttggggagttgggggtgttacaggtatgctaaactctttagctgcagtctatctacccatgccagattcatcaag

SEQ ID NO: 265799 - DNA, 120 bp, Artificial Sequence
  ENSG00000126107_31 (sequence is synthesized)
atgtatctgtaccctcgacgtttgccccaagatggcatctcaggctcagtgtgttctttatcttctccgaagactactcccctctagggctcctgcctcagaagggcaccatgtcccact

SEQ ID NO: 265800 - DNA, 120 bp, Artificial Sequence
  ENSG00000126107_32 (sequence is synthesized)
cctccccatcccaaagcccacagggccatccttcaccccttcttctccctcgccaccatattcttaagtcttcctctgtaatctgtttgcttttcctgtctcactactgtctccctgcct

SEQ ID NO: 265801 - DNA, 120 bp, Artificial Sequence
  ENSG00000126107_33 (sequence is synthesized)
ggttgaggacacctttcctccttagctaatcacttactaaaaagctggtgtccctgtctccgttcttacccgtttggtctccatgcagccacagtaattcatttcactctccttatttaa

SEQ ID NO: 265802 - DNA, 120 bp, Artificial Sequence
  ENSG00000126107_34 (sequence is synthesized)
actcattgatggctcggccctgggcttaggatagaatgcagaatctgtaaaggccttacgtgaaccctgtgtctccagccacttggttcacattcaggctccagccacacagtttcctta

SEQ ID NO: 265803 - DNA, 120 bp, Artificial Sequence
  ENSG00000126107_35 (sequence is synthesized)
ggccttttgctctttccagctttctccaagatgttctctctcctaacttcccttatgtcccagccatcatttgggtctcagctgagacaccattttccacaggatgcctcctctggcctc

SEQ ID NO: 265804 - DNA, 120 bp, Artificial Sequence
  ENSG00000126107_36 (sequence is synthesized)
caaggctggttaggtgttgtcttgatgcttttacagctcttgtactgacaccctcattccctgctgcctccatggggactgccttgcctggctgtctctgcttccctgtgagcatcttgt

SEQ ID NO: 265805 - DNA, 120 bp, Artificial Sequence
  ENSG00000126107_37 (sequence is synthesized)
gcacccctcgccatgactgcttttcccaggtggtctctgagctgatgaattgtgctgcacctggccccacataatgacaaatctgcccacgttttttgcaggtggcccatgcgctatgac

SEQ ID NO: 265806 - DNA, 120 bp, Artificial Sequence
  ENSG00000126107_38 (sequence is synthesized)
ctgcccagcccctaaaggttggtcctccctaaggctgttctgtaccttgttctttcaccacacacaagatccctctccaatccatccactcccatggcttcaactactgtctgtagactc

SEQ ID NO: 265807 - DNA, 120 bp, Artificial Sequence
  ENSG00000126214_0 (sequence is synthesized)
cgcaggcggccgagcgggactggctgggtcggctgggctgctggtgcgaggagccgcggggctgtgctcggcggccaaggggacagcgcgtgggtggccgaggatgctgcggggcggtag

SEQ ID NO: 265808 - DNA, 120 bp, Artificial Sequence
  ENSG00000126214_1 (sequence is synthesized)
gtagctccggcgcccctagctggtgactgctgcgccgtgcctcacacagccgaggcgggctcggcgcacagtcgctgctccgcgcgcgcgcccggcggcgctccaggtgctgacagcgcg

SEQ ID NO: 265809 - DNA, 120 bp, Artificial Sequence
  ENSG00000126214_2 (sequence is synthesized)
agagagcgcggccctcaggagcaaggcgaatgtatgacaacatgtccacaatggtgtacataaaggaagacaagttggagaagcttacacaggatgaaattatttctaagacaaagcaag

SEQ ID NO: 265810 - DNA, 120 bp, Artificial Sequence
  ENSG00000126214_3 (sequence is synthesized)
taattcaggggctggaagctttgaagaatgagcacaattccattttacaaagtttgctggagacactgaagtgtttgaagaaagatgatgaaagtaatttggtggaggagaaatcaaaca

SEQ ID NO: 265811 - DNA, 120 bp, Artificial Sequence
  ENSG00000126214_4 (sequence is synthesized)
tgatccggaagtcactggagatgttggagctcggcctgagtgaggcacaggttatgatggctttgtcaaatcacctgaatgctgtggagtccgagaagcagaaactgcgtgcgcaggttc

SEQ ID NO: 265812 - DNA, 120 bp, Artificial Sequence
  ENSG00000126214_5 (sequence is synthesized)
gtcgtctgtgccaggagaatcagtggctacgggatgaactggccaacacgcagcagaaactgcagaagagtgagcagtctgtggctcaactggaggaggagaagaagcatctggagttta

SEQ ID NO: 265813 - DNA, 120 bp, Artificial Sequence
  ENSG00000126214_6 (sequence is synthesized)
tgaatcagctaaaaaaatatgatgacgacatttccccatccgaggacaaagacactgattctaccaaagagcctctggatgaccttttccccaatgatgaagacgacccagggcaaggaa

SEQ ID NO: 265814 - DNA, 120 bp, Artificial Sequence
  ENSG00000126214_7 (sequence is synthesized)
tccagcagcagcacagcagtgcagccgcggctgcccagcagggcggctacgagatccccgcgcggctgcggacgctccacaacctggtgatccagtacgcctcgcaggggcgctacgagg

SEQ ID NO: 265815 - DNA, 120 bp, Artificial Sequence
  ENSG00000126214_8 (sequence is synthesized)
tagctgtgcccctctgcaagcaggccctggaggacctggagaagacttcaggacacgaccacccggacgtggccaccatgctcaacatcctggccttggtgtacagggatcagaataaat

SEQ ID NO: 265816 - DNA, 120 bp, Artificial Sequence
  ENSG00000126214_9 (sequence is synthesized)
acaaagatgcagctaacctactgaatgatgccttggctattcgtgagaaaactttgggcaaagatcatcctgcggtggcggcgactttgaataaccttgcagtcctttatggtaaaagag

SEQ ID NO: 265817 - DNA, 120 bp, Artificial Sequence
  ENSG00000126214_10 (sequence is synthesized)
ggaagtacaaagaagcagagccgttgtgtaaaagagctctggaaatccgagaaaaggttttggggaaggatcaccccgatgttgccaagcagttaaataacttggccttactgtgccaga

SEQ ID NO: 265818 - DNA, 120 bp, Artificial Sequence
  ENSG00000126214_11 (sequence is synthesized)
accagggcaagtatgaagaagtagaatattattatcaaagagccctcgagatctaccagacaaaactgggacctgatgaccccaacgtggctaagacgaaaaataacctggcatcctgct

SEQ ID NO: 265819 - DNA, 120 bp, Artificial Sequence
  ENSG00000126214_12 (sequence is synthesized)
atttgaaacaaggaaagttcaagcaagcagaaacactgtacaaagagattctcactcgtgcacatgaaagggagtttggttctgtagatgatgaaaataaacccatctggatgcatgctg

SEQ ID NO: 265820 - DNA, 120 bp, Artificial Sequence
  ENSG00000126214_13 (sequence is synthesized)
agaatgcaaaggaaagcaaaaggatgggacatcttttggagagtatggcggctggtacaaagcctgcaaagttgatagtccaactgttacaaccactctaaaaaaccttggggcacttta

SEQ ID NO: 265821 - DNA, 120 bp, Artificial Sequence
  ENSG00000126214_14 (sequence is synthesized)
cagacgtcaaggcaaatttgaagctgcagaaacgttagaagaagctgctatgaggtctcgtaaacagggtcttgacaatgttcacaaacagagggtggcagaagtgctcaatgaccctga

SEQ ID NO: 265822 - DNA, 120 bp, Artificial Sequence
  ENSG00000126214_15 (sequence is synthesized)
gaacatggagaagcgcaggagccgtgagagcctcaacgtggacgtggtcaagtacgagagtggccctgacggaggggaggaagtgagtatgagcgtagagtggaacgggatgaggaaaat

SEQ ID NO: 265823 - DNA, 120 bp, Artificial Sequence
  ENSG00000126214_16 (sequence is synthesized)
gaagctcgggctggttaactgacttgctcagcgtcccatggcctagccgcccgtgactctcacactgtctcctgcatgacgggtggcgcctcccgcagcttcccttctctctccagtgct

SEQ ID NO: 265824 - DNA, 120 bp, Artificial Sequence
  ENSG00000126214_17 (sequence is synthesized)
gcccgctgtgtctagcagcctctaggatcttgtcagagctgcacctctctgtgaactggccattcctttcggtgctgctgtcctttttgggggggttcctgatttctgtatacatgtagc

SEQ ID NO: 265825 - DNA, 120 bp, Artificial Sequence
  ENSG00000126214_18 (sequence is synthesized)
tttgccagatatgtacttagtaatataaactgtattaataaaatccatttactgtgtaatacacgagtttaaaaattaagagcgattagctgttcactttggtaacaggtagttaagtgt

SEQ ID NO: 265826 - DNA, 120 bp, Artificial Sequence
  ENSG00000126214_19 (sequence is synthesized)
cacacaaggtgttgttgcaatggcatgacggtgacctgttgacgtaactaagccttacagcaaggcatgtgccgcacgtgctccgtggtacttagagccctgggggccccgctcggactc

SEQ ID NO: 265827 - DNA, 120 bp, Artificial Sequence
  ENSG00000126214_20 (sequence is synthesized)
cgggtctccctaggatatgccccagtagcatttgctgtgtagtctgtgtgtgaaatttgggcattctgcttttctctactaatcttgaagtgctcagtgatttgtgtatttgtgtctttc

SEQ ID NO: 265828 - DNA, 120 bp, Artificial Sequence
  ENSG00000126214_21 (sequence is synthesized)
taacttctaataaactcactccgactgacctgtgtcttggtgtctgtctgcttggtagaacttctcactctttatccatgaaacgccgcatggcacagctgctaggggtcatggggtgac

SEQ ID NO: 265829 - DNA, 120 bp, Artificial Sequence
  ENSG00000126214_22 (sequence is synthesized)
agttcatctcaccaaggagttccttccaagaagaaatgctgctgtatgcacatcttcttcactctgtgttttttattttcatgttcagatactgccaagtatttcacttattaatacctg

SEQ ID NO: 265830 - DNA, 120 bp, Artificial Sequence
  ENSG00000126214_23 (sequence is synthesized)
aatcaattaagatgagagctgggcactctcacctccctacaaggttgtctgaggatttttagttatttgtatagaatgggcattttatttaattttccaaccacctttgtagttaacatt

SEQ ID NO: 265831 - DNA, 120 bp, Artificial Sequence
  ENSG00000126214_24 (sequence is synthesized)
taatgaaactgttctgtaaaatttactgaaggaaacagtacctccaactattgcatttagacgaaactgttaaaaggaagagcctctgtcagatccaaatggtttgggtcctgtactgtg

SEQ ID NO: 265832 - DNA, 120 bp, Artificial Sequence
  ENSG00000126214_25 (sequence is synthesized)
ttacttgtaccagatgcttatgtatctgttaaatgtggaagtcgattttgatgatattcttagaagctgctttaattttcctgagactttgtgtgttggcttttgtctcaaaatagcagg

SEQ ID NO: 265833 - DNA, 120 bp, Artificial Sequence
  ENSG00000126214_26 (sequence is synthesized)
attcacattgcttttgggatgcgatcacttgtttgaatgagcttccttatgtccaaaggttttcatgatcattggattatctttaatgaaacttaaaaagaacaatttctagttaaagta

SEQ ID NO: 265834 - DNA, 120 bp, Artificial Sequence
  ENSG00000126214_27 (sequence is synthesized)
taactgacttgctcagcgtcccatggtgagtccgagcgggcggggcgcaggccctgccgtctggcgcttctgtcgagacgtcggctttccaacctggcaggacccaggacgcattgctgc

SEQ ID NO: 265835 - DNA, 120 bp, Artificial Sequence
  ENSG00000126214_28 (sequence is synthesized)
ctgtggaaattaattttcttttggattatcaactgcatgtttaaaatgggctgtagacttttaaagtccgtggtttcctaaagtttctgaaatgtctaaaatgtgtttttaagagaatga

SEQ ID NO: 265836 - DNA, 120 bp, Artificial Sequence
  ENSG00000126214_29 (sequence is synthesized)
aagtcatacctgtagcctttattttggtccctatgtttttcattgcataatctccttatatacagttacttgtaaagccttttacaccaagtgtcaaggagatttctaatacgttgccaa

SEQ ID NO: 265837 - DNA, 120 bp, Artificial Sequence
  ENSG00000126214_30 (sequence is synthesized)
tctttacgcttaaagtgttgacatttactttgatgaccattgggaatggaccagtctggattctgtgaaatgcaccatgaggcccagcacctgctttatgctggactggtagaagcaggc

SEQ ID NO: 265838 - DNA, 120 bp, Artificial Sequence
  ENSG00000126214_31 (sequence is synthesized)
agaaggtcatcccagtcctaaagccactcagaaggctgctgagacttgtgacctagaaatactgtaagccaggctgttatgcagagcctgttgcctttcctcgccgcggtttcacgtggg

SEQ ID NO: 265839 - DNA, 120 bp, Artificial Sequence
  ENSG00000126214_32 (sequence is synthesized)
tgagaagctggttaggaagctgaagggaggaagttcacgagagagtgagccaaagaaccccggggcgtctctggccgagcctctttttgtggaaaacgacagcagcagcagtggcctgga

SEQ ID NO: 265840 - DNA, 120 bp, Artificial Sequence
  ENSG00000126214_33 (sequence is synthesized)
agacgccaccgctaactgaccccgacctggccccgctccaggatgggactgccgagtgtggcccggagctggcccgggacagccagggcggcagggagggcccctggccgggagccgcag

SEQ ID NO: 265841 - DNA, 120 bp, Artificial Sequence
  ENSG00000126214_34 (sequence is synthesized)
cgctcactcatttctcctgcgtctgtgtgcataggacatgatactaataaccacacggctggcgtgaccttggggctggggctgggcctaagctggtgccctggtgcggcgtggtctctc

SEQ ID NO: 265842 - DNA, 120 bp, Artificial Sequence
  ENSG00000126214_35 (sequence is synthesized)
ccaggagacctggggcatgagctgggcccacggctcccttcccatgtgtaacttcctcacgttgtgtgcgataacgtattttattgtacatttttttaaattaaaagtttatatgcctta

SEQ ID NO: 265843 - DNA, 120 bp, Artificial Sequence
  ENSG00000126214_36 (sequence is synthesized)
tctgaatgtccttaacgtgggtggcaaggctgctgaagatcgctttcaagaacgaaataattgtctggccgactcgcgagctctgagtgccagccacactgacctggcccactgagagcc

SEQ ID NO: 265844 - DNA, 120 bp, Artificial Sequence
  ENSG00000126214_37 (sequence is synthesized)
agcagggctaggtaacctgtcttgggagtgtgagaccgccccgccctgccacgcccctcaccgccctgcccggaggcgccagccgcactccttggcttcctttcctagatagtgacgtcc

SEQ ID NO: 265845 - DNA, 74 bp, Artificial Sequence
  ENSG00000126214_38 (sequence is synthesized)
tttaaattaaaagtttatatgccttatgctttacttgaaagtttttataagacctcttagaagtgggggaaggc

SEQ ID NO: 265846 - DNA, 89 bp, Artificial Sequence
  ENSG00000126214_39 (sequence is synthesized)
gatacaaagaattagctgggcgtgttggtgggcgcctgtagtcccacctactctggaggctaaggcaagagaatggcgtgaacccggga

SEQ ID NO: 265847 - DNA, 88 bp, Artificial Sequence
  ENSG00000126214_40 (sequence is synthesized)
taaaaaaaaaaaagagaagtgggggaaggcccacccaggagctgctctgccaggccacagccatgtctagggtgggctggacatggca

SEQ ID NO: 265848 - DNA, 120 bp, Artificial Sequence
  ENSG00000126214_41 (sequence is synthesized)
gccaggccacagccatgtctagggtgggctggacatggcagccgctccccctgcacagggtggaatttccttacttgcctttggtcaggggtttactcccaaacgtcccatcttttcttc

SEQ ID NO: 265849 - DNA, 120 bp, Artificial Sequence
  ENSG00000126214_42 (sequence is synthesized)
tgcgtcttttctacttcatcacttctccctcccaggatgatgtctataaactaagcactgacagctcacagcactgctgccccagctgcagggatgggtcccagcctctcttgcctgctt

SEQ ID NO: 265850 - DNA, 120 bp, Artificial Sequence
  ENSG00000126214_43 (sequence is synthesized)
cttggctacaggacggactccactggcccccggtgagtggcccctgctctctgcaaggccctgccataggtccctcctccaagcccagccagtgtctgcagggaagccagcagccaggca

SEQ ID NO: 265851 - DNA, 120 bp, Artificial Sequence
  ENSG00000126214_44 (sequence is synthesized)
gtggtcaaggatctgaggtcacctgtctgagctgggtgcccagcaggccttggccaggtggagcccctgtgcccctagtgagggccgtcttcccctcaggggcaaggggaaaccaacaca

SEQ ID NO: 265852 - DNA, 120 bp, Artificial Sequence
  ENSG00000126214_45 (sequence is synthesized)
gctatctcaccagggcagcagcctggagagcaggtcgcatccttctcagggcggtggtctcctggggcagctggtcaggggcccacagcccagaggaggtccttgccacccgcctggggc

SEQ ID NO: 265853 - DNA, 120 bp, Artificial Sequence
  ENSG00000126214_46 (sequence is synthesized)
ttctcttccccactccgtcttcatgggcaaggttgacagatggtgtacaggcgcccagttacatctgagtttcagatcatgaagaaagttgatctgaatatgggcatcctcattctagaa

SEQ ID NO: 265854 - DNA, 120 bp, Artificial Sequence
  ENSG00000126214_47 (sequence is synthesized)
cacgcttcaaagctgcctgagattcagatgtaactgggtgtcgcagcctgccgccctgcctgcctggcccacagccactcctggccaggattctgtttggccaaactgccgtcaggctcc

SEQ ID NO: 265855 - DNA, 120 bp, Artificial Sequence
  ENSG00000126214_48 (sequence is synthesized)
tgagcctcctcctaggcccatctgtgcacgtcctcatgaaatccagttttggcaatccctgctgagattgtagcaggacccctgctctccgtatccagtcgccctcagtagctgactggt

SEQ ID NO: 265856 - DNA, 120 bp, Artificial Sequence
  ENSG00000126214_49 (sequence is synthesized)
ccatcctccacagtccccagaggccgtctgatccccaaggcacaccttcagcaagggtcctggcaggatgctttagccagaattccctcccctgccagttcctctcagtcactctccatc

SEQ ID NO: 265857 - DNA, 120 bp, Artificial Sequence
  ENSG00000126214_50 (sequence is synthesized)
ctctgaccccacctgctcctcgggcgtaaacccccatgacccatgctgtgttcagagctgagccccaactctccctgccctgctgtgagaccccattgccgtggtggctacacctgcccc

SEQ ID NO: 265858 - DNA, 120 bp, Artificial Sequence
  ENSG00000126214_51 (sequence is synthesized)
aatggtcctgaatagcttgccttgggggtgtcatggggcttctcccacactcaccacatcggccacgtgctcgatgaagatctggctgccaaatcggagcttctgaagcagctctcctgg

SEQ ID NO: 265859 - DNA, 120 bp, Artificial Sequence
  ENSG00000126214_52 (sequence is synthesized)
aacgtcagtgcgcagccgcggctgctgggccatgagctgctgcaggcgcttgtgcgggaaggcgtcttccgtgcagatgtagacggctcctgggaagcaagagtgcctgatgtgcccagg

SEQ ID NO: 265860 - DNA, 120 bp, Artificial Sequence
  ENSG00000126214_53 (sequence is synthesized)
ggactccagacgggcctgtgactgccacacaaatcaagtgcagatgtctcccgccatttctaactctctgcccctcacaggttctttgcccctcgcctggggagggaggaggctggtgct

SEQ ID NO: 265861 - DNA, 120 bp, Artificial Sequence
  ENSG00000126214_54 (sequence is synthesized)
ttttctcaccctcccactggcagccacctccggggccaggtgacccctcaggaggaatatgggctgggtctccacttctgacacccaggcaaggacttcccctgtcctgggccctgggct

SEQ ID NO: 265862 - DNA, 120 bp, Artificial Sequence
  ENSG00000126214_55 (sequence is synthesized)
ggaatggccacagatgggaggcctctcctgctccaccctgcccctccttccccctgtgaacctccgttccccactgcagggcagggagcaagtggcagcatcagggcaacgccttctgga

SEQ ID NO: 265863 - DNA, 120 bp, Artificial Sequence
  ENSG00000126214_56 (sequence is synthesized)
aatggcccctgagccccgacacatggccaccctcaaggcccccactgagcaagcgtttcctctcttcaaagctcctgcaatctgggctccatggtgaaattcaaaaagccagcttgaaaa

SEQ ID NO: 265864 - DNA, 120 bp, Artificial Sequence
  ENSG00000126214_57 (sequence is synthesized)
gacacgtgttggtgaggatgtgtaggaggcagacccctgacccctgtgcactgccgctaggaatgtaaaatggtgcagctcggaaaacaatcggtacttccttaaaaagttaaacaaatc

SEQ ID NO: 265865 - DNA, 120 bp, Artificial Sequence
  ENSG00000126214_58 (sequence is synthesized)
acatgactcagcagccccactcctaggtagatacccaagagaaagaacgtccaccgtagcacgtttcatgacagcccggggggagacggcccaaaggccatcaactgaggagtggacgaa

SEQ ID NO: 265866 - DNA, 120 bp, Artificial Sequence
  ENSG00000126214_59 (sequence is synthesized)
tgaagtgcggcccatccttacagtgggatgatcgaatcttaaaagggaaggcagttctgacacctgctccagcacggatgaacctcgaaaacacaatgccaatgcaggaagcctgtcacg

SEQ ID NO: 265867 - DNA, 120 bp, Artificial Sequence
  ENSG00000126214_60 (sequence is synthesized)
agaccacgtgctgtccggctgcacttgcatggagctcccaggacaggaagagtcacaggtagggaaaggggaggcaggctgctgggggtgggggctgactgctcatgggtagggtttcct

SEQ ID NO: 265868 - DNA, 120 bp, Artificial Sequence
  ENSG00000126214_61 (sequence is synthesized)
tttggggtgagggaactgttctggaattggatagtggtgacgggcacagaactttgtgcttctattaaaagccactgaatttatttattttattttaatttttgagagacaagagactca

SEQ ID NO: 265869 - DNA, 120 bp, Artificial Sequence
  ENSG00000126214_62 (sequence is synthesized)
tgggattacaggcatgaggtactgcgcctatcaggccgaactgtacacttttagagggaattttatggcatgtaaattacatctcaatttaaaaaacaggaaggcttagggggactgatt

SEQ ID NO: 265870 - DNA, 120 bp, Artificial Sequence
  ENSG00000126214_63 (sequence is synthesized)
tgagtaataataaaactccagtttcctgcaaaacaaaaacaaaaagacaaggccggcgagctctctaagcactgactatgccaggaaggctgcccagccaggaccccgtggcccacgggg

SEQ ID NO: 265871 - DNA, 120 bp, Artificial Sequence
  ENSG00000126214_64 (sequence is synthesized)
cgtcgtcctgttcctgcagtggcacatgcagttgtgggagagccagtgcccccacgccgtgtcatgcagcctgtttgtgagtgtccgcgtaacctttaattctgagctgattttgctttg

SEQ ID NO: 265872 - DNA, 120 bp, Artificial Sequence
  ENSG00000126214_65 (sequence is synthesized)
acagaatttcaaacgtaaagaagagttgcaaaaatgggtcaggaaccccccgccccattctgtgtcagaactaagcttctgagaagcatctggcccgcttgaggccaggaacgtataaat

SEQ ID NO: 265873 - DNA, 120 bp, Artificial Sequence
  ENSG00000126214_66 (sequence is synthesized)
actgccttgggaggccacatcccttttgtggctggttcccttccccaccagtgtccccagcagtgactgtgcccctagtcaggagccacaggaaggtcggggccctgggcttcctccgtc

SEQ ID NO: 265874 - DNA, 120 bp, Artificial Sequence
  ENSG00000126214_67 (sequence is synthesized)
ctgttggctggagagaggctgggctggaaggctcggaagcaggtggaaccggtcaagcagcgtgtttttgttggggtgacgttatgtaggggctgcacagtcatggggacatcgtgaagc

SEQ ID NO: 265875 - DNA, 120 bp, Artificial Sequence
  ENSG00000126214_68 (sequence is synthesized)
tggcaggagggtggctgtggacagcccagcggtgggcggggccccagcaggcctgggagagcctcacgcggcttaagcacgggagtcggaatcacttcagagcccgcctgccgctttctt

SEQ ID NO: 265876 - DNA, 120 bp, Artificial Sequence
  ENSG00000126214_69 (sequence is synthesized)
ttcaaaattcgggcctttagattggatccaggaaaggaagtcatttccccaggaaagcacatctgacccctaaccttgcatgtggtcacggtggccgtggggccccctcccttcccctgg

SEQ ID NO: 265877 - DNA, 120 bp, Artificial Sequence
  ENSG00000126214_70 (sequence is synthesized)
cccgcaaggctggactgtgctgtcatcccgcagcagtcactgggctgggcacagctgggggattcagggagggtgtcctaaggcttctgtgtccctgggtatcggggagtgtgggcttca

SEQ ID NO: 265878 - DNA, 120 bp, Artificial Sequence
  ENSG00000126214_71 (sequence is synthesized)
ctgaaaaggccaacggggtggaagctgagggggagtcattgcacaaatcagatttgcacgaagcctggcacggaggacgctggagaatgagggcggctcccgtcccgttcctgagcacgc

SEQ ID NO: 265879 - DNA, 120 bp, Artificial Sequence
  ENSG00000126214_72 (sequence is synthesized)
tcgagtcccgcctccacctcacagcagctcttccgtgcggtaagcgggagactcccattttcaaggccaactcctgtcctcccggcttctggctgtctccaggctcatccccaagaccag

SEQ ID NO: 265880 - DNA, 120 bp, Artificial Sequence
  ENSG00000126214_73 (sequence is synthesized)
ccgcagggactcaggcacctgacaagagggtgccctcccctgggctgcagggacaaaaatgcctgtggcgtgagcagaccccagctgggctctcaggagacccctcaccctccacccgac

SEQ ID NO: 265881 - DNA, 120 bp, Artificial Sequence
  ENSG00000126214_74 (sequence is synthesized)
acggaggctcaggagacccctcaccctccacccagcactgaagctcaggcaggcacagcacaccctgggtcctggggatgacgctgacctgagggtggcagaggtgaggttcccagccac

SEQ ID NO: 265882 - DNA, 120 bp, Artificial Sequence
  ENSG00000126214_75 (sequence is synthesized)
accgctgctggcaggtcaggcccgtgaggaggtggctggctgggcctgtgggtccagggcctggggtccggccctgtgtgggaagtgagcctagcagatgtgctcggaggtgccaccgat

SEQ ID NO: 265883 - DNA, 120 bp, Artificial Sequence
  ENSG00000126214_76 (sequence is synthesized)
gaaaaaatactgccactctgttcacgtggagtttaagacaacgtgggaatcgcatgttgacaccagggaattagtttaaaagttaaggagctactgagaaacatctctcctcctcacagc

SEQ ID NO: 265884 - DNA, 120 bp, Artificial Sequence
  ENSG00000126214_77 (sequence is synthesized)
tcacagtttaaaactacgtgaacttttaacacctgagagacccaggcaggcatgctctgaacgctttagtccaatgcagggaaccctcgtttcacagacagagcgtacaggctcacgggg

SEQ ID NO: 265885 - DNA, 120 bp, Artificial Sequence
  ENSG00000126214_78 (sequence is synthesized)
ttggcagctgtgcggaacgtgggccggcatcgctgtgctcagccagcgacccctgggggcctagctctgctgagggccggctgcctggtggtggggttcgtaccctcccacccctcctgc

SEQ ID NO: 265886 - DNA, 120 bp, Artificial Sequence
  ENSG00000126214_79 (sequence is synthesized)
tgtcagctgagcccagcctcacttccccctccctgttctggaaggagcgagggcaatcagggtgagaaggagggagacgcaatggtaggaacagcgcaagaggcggccactgccccacct

SEQ ID NO: 265887 - DNA, 120 bp, Artificial Sequence
  ENSG00000126214_80 (sequence is synthesized)
caacggaaagctgtcccacacaaagcaggggccgcccacctgcccagaccccacggaaggggtggccactcaccagcctccaggcctccgtgctgccgcgggaactgcacagccaggcag

SEQ ID NO: 265888 - DNA, 120 bp, Artificial Sequence
  ENSG00000126214_81 (sequence is synthesized)
agctgcagcgccagctgggtcttccctgccgagctgcgtccggccagctcagtgatgccgtccaggggcaggccaccgcggagcagcgcgtccagcaccgggcagcccaggctcaggcgc

SEQ ID NO: 265889 - DNA, 120 bp, Artificial Sequence
  ENSG00000126214_82 (sequence is synthesized)
tggtgctgcgtggggaaccgctccttctgctggtgcagctgcagtgctaaagggcagggatagtgtcaggcctgactctcctgggcctgcgggcagggctggggactgcgggaggcatgg

SEQ ID NO: 265890 - DNA, 120 bp, Artificial Sequence
  ENSG00000126214_83 (sequence is synthesized)
tcagcctgcctgtgccaggtgcagtgtggctggagcacaggtgcctgcggtcatgggggtgagcaaggtgctgagggcagggaggggggcccagccgggaagggcgggtgcacctgagat

SEQ ID NO: 265891 - DNA, 120 bp, Artificial Sequence
  ENSG00000126214_84 (sequence is synthesized)
gcagagtcagggggagccccagggccaccatcacatgcccgcagggatccccctatggggcaattgcagcaccagacgccttcagccaaagcttccagagagccccgaggcgctccctaa

SEQ ID NO: 265892 - DNA, 120 bp, Artificial Sequence
  ENSG00000126214_85 (sequence is synthesized)
cagcctccatgtgaagaaaaaggcacagctctgtccagctgggatgccctggggtgctgaacagttctcaagcggctttaatgggctcccgcaggcgcgcacacatgcacaccacatgcc

SEQ ID NO: 265893 - DNA, 120 bp, Artificial Sequence
  ENSG00000126214_86 (sequence is synthesized)
gtcagttctctgtgacagataccattctggagcaatgctggtctcagcctcttggctaaagggccttggatgagccatttgacacagcctcctccacgacaccgaagcccctcagggcaa

SEQ ID NO: 265894 - DNA, 120 bp, Artificial Sequence
  ENSG00000126214_87 (sequence is synthesized)
ggctcaaggtgggacatgcggtgcaggctgcgctcttggcctggggcctgggccgggaggagcagcccctcccttggagtctgcacactgccttgggcaccccgtccaggtggagcaggc

SEQ ID NO: 265895 - DNA, 120 bp, Artificial Sequence
  ENSG00000126214_88 (sequence is synthesized)
caccctgactgtgaggcctgcccagagccctgcccacagcaccgtgtgtgtggccgtggcacctgcccaccacggcagccccaagttcagcacgttcctcggggcctgggccactgagcc

SEQ ID NO: 265896 - DNA, 120 bp, Artificial Sequence
  ENSG00000126214_89 (sequence is synthesized)
acctgcaggggagagagggccctgctcatgccaggaccccgctgcctactagggcctgctgagatgcagggatggaaaccttgtccgtccaggcgcatggggttccctgggtacctcctt

SEQ ID NO: 265897 - DNA, 120 bp, Artificial Sequence
  ENSG00000126214_90 (sequence is synthesized)
cccctgctgagacctggtttcccacacgtggtggtgggaccgtggccagggccccatctcacaccgttcccaccctgccagagcctgaagggctctgggtgctgactgccaaatccaccc

SEQ ID NO: 265898 - DNA, 120 bp, Artificial Sequence
  ENSG00000126214_91 (sequence is synthesized)
ctgcttcctgcaccccctcctctggtccatggagcaaggtccccaggaggtcccacagcccgtgtccacctcacgcatcttctgacccgatgctgtgaccacagccccatgggtgtagga

SEQ ID NO: 265899 - DNA, 120 bp, Artificial Sequence
  ENSG00000126214_92 (sequence is synthesized)
caagcaagatgggaactctggggctggagcagctgccacacgccctgaggctggtccctgggtgaagtctgcacagcccctgccctgcaccactgggaccatgatgctggagccacatgt

SEQ ID NO: 265900 - DNA, 120 bp, Artificial Sequence
  ENSG00000126214_93 (sequence is synthesized)
cacccctggcagagatgccagggcccacctacctgtaaggatgctgcttccccgcaagtgtaaggaggccgttctcagcaagtgccagacctcggggctggagaggttggtcagtctctt

SEQ ID NO: 265901 - DNA, 120 bp, Artificial Sequence
  ENSG00000126214_94 (sequence is synthesized)
caagtctggtccagaaaagtgtaaaacctcctttaccgatttcagtttggctgaaataacacagataaattacaggaaaatgtcagactgtcacaacgcagggcaacacagtgacaaaag

SEQ ID NO: 265902 - DNA, 120 bp, Artificial Sequence
  ENSG00000126214_95 (sequence is synthesized)
gtgctttgttaagagcactgtgagagcaccgtgcttccgattctggggacaaggtgggtagggaccggatcccctgctccctggaaaccctggacacagtgtggccgatgcacaggcacg

SEQ ID NO: 265903 - DNA, 120 bp, Artificial Sequence
  ENSG00000126214_96 (sequence is synthesized)
aggaaagggctgctggacactgcgccctgagtcctggcactcggacagataccagcctcgtgagctggggcagaagccagaagacagggctgggcaggtcccggtgctgagagcaggttc

SEQ ID NO: 265904 - DNA, 120 bp, Artificial Sequence
  ENSG00000126214_97 (sequence is synthesized)
cggtactgagaagaaacgacaggcacccagttccatgccagctggagacagtgctccagaagggggcaggaaaaaaccagcaccgagctttccaccacccgcccaccaggcatggatctg

SEQ ID NO: 265905 - DNA, 120 bp, Artificial Sequence
  ENSG00000126214_98 (sequence is synthesized)
ggctgagccgcgggagaggacatgtgccctggggaggggagcgctgggagggtagcagagcccaggtccaaacgccagctgcgcagggcagtcagggcagggggcagagcatgtgcgaat

SEQ ID NO: 265906 - DNA, 120 bp, Artificial Sequence
  ENSG00000126214_99 (sequence is synthesized)
cagaacggcggtggcagcagttacaggggtgcagatccccaggacctgccatctggggaggagggcaaggaagttaattttggactcagataagtgcatcactttctaatttcaaacttg

SEQ ID NO: 265907 - DNA, 120 bp, Artificial Sequence
  ENSG00000126214_100 (sequence is synthesized)
tagaaagacgacaaatgctgcagactgatcagccgatcagggaagtgcgaggaagcgcacacgagagggagcagtggtggacgaagcgccccacccggccacggggacttacacccacca

SEQ ID NO: 265908 - DNA, 120 bp, Artificial Sequence
  ENSG00000126214_101 (sequence is synthesized)
catcagaaaccccctcaacacgggtgcgctgaacgctgcagtgaaaagacaaccattgtgcggctggaaaacagtaagcactggtgtgatcttcagaaaagccacacagaaaacacaagg

SEQ ID NO: 265909 - DNA, 120 bp, Artificial Sequence
  ENSG00000126214_102 (sequence is synthesized)
agatggaagggtgggaatgaagaaagcgcccctgggtttcaccagatccagcggagggggcttcccgcagacaggctgctccagaaggctctgtgggccctgaggactcaccgggatcgg

SEQ ID NO: 265910 - DNA, 120 bp, Artificial Sequence
  ENSG00000126214_103 (sequence is synthesized)
ggctgtggcagggcgctccccctggtaagcctcacagccccagcccccttcacagccgtgaagtctgcagggacttctggaaacattggtttttggataagagacacaggtgagaaagga

SEQ ID NO: 265911 - DNA, 120 bp, Artificial Sequence
  ENSG00000126214_104 (sequence is synthesized)
actccctggctgagcccttctctgtccctggtctgcaagcgtcgtgtctgcagctgtggcagcagctgtgatcacaaggccaccaacaggaggataaaaaccaacagccaaggatggagg

SEQ ID NO: 265912 - DNA, 120 bp, Artificial Sequence
  ENSG00000126214_105 (sequence is synthesized)
gtcaggacagcgaggccctgccctgtcaccaggctgctgcggcagctccatgagcactccggcttctcgccacagacagcgtgctgaggttcacgtagctgaggcccggggagacggggg

SEQ ID NO: 265913 - DNA, 120 bp, Artificial Sequence
  ENSG00000126214_106 (sequence is synthesized)
aggatggaagctggcaggagggtccccggatgacagccaggcggctggcatggggagcagggggcaggggctgcacgtggggcctgagttttgagcatttactaactcgggcgaaaaaag

SEQ ID NO: 265914 - DNA, 120 bp, Artificial Sequence
  ENSG00000126214_107 (sequence is synthesized)
atgctgtaagaaagaaaaccatcccctgcaccaccacaccaggttcaacaatggccagtatgcacccagtcacaaccctgacagctgatgtcacccaaactaggttctaagtatgggcag

SEQ ID NO: 265915 - DNA, 120 bp, Artificial Sequence
  ENSG00000126214_108 (sequence is synthesized)
ggagctggggggagaggaagttggggtacacaggtgtaggcacgctcagtcctcacagcccccaagagaagtccatggataatcagtaacactgacaaatcaaacattacaacataaaca

SEQ ID NO: 265916 - DNA, 87 bp, Artificial Sequence
  ENSG00000126214_109 (sequence is synthesized)
aatcagtaacactgacaaatcaaacattacaacataaacacgtttaggagcccagatgtaaatattttttaaaaaaataactaaaag

SEQ ID NO: 265917 - DNA, 70 bp, Artificial Sequence
  ENSG00000126214_110 (sequence is synthesized)
agaccatcctggctaaaacagtgaaaccctgtctctactaaatttacaaaaaaattagccgggcgtggtg

SEQ ID NO: 265918 - DNA, 71 bp, Artificial Sequence
  ENSG00000126214_111 (sequence is synthesized)
tgacaaaaaaaaaaaactaaaagactttatgtggctccattttaccttttagacaatatgcatgtattact

SEQ ID NO: 265919 - DNA, 120 bp, Artificial Sequence
  ENSG00000126214_112 (sequence is synthesized)
aaagactttatgtggctccattttaccttttagacaatatgcatgtattactttgataaaaataaaagtaactgaaagaaatccatgtagttaagaacacacacacacacacacacacac

SEQ ID NO: 265920 - DNA, 120 bp, Artificial Sequence
  ENSG00000126214_113 (sequence is synthesized)
atcccatagtacatcccgccctcggtttaataatcagggtaggcaaaggaaggaaggcttagccagccagcgttttgttaacctgccttatataaactgcacacacccacccacaccctt

SEQ ID NO: 265921 - DNA, 120 bp, Artificial Sequence
  ENSG00000126214_114 (sequence is synthesized)
tatgtaaatagaaataaatgtacctttcttaattgcagcaataattctgggattcaggtccagtagatccaaatccattttgtcggtgggctggccaccaggatgaataacttcccagga

SEQ ID NO: 265922 - DNA, 120 bp, Artificial Sequence
  ENSG00000126214_115 (sequence is synthesized)
aagacagaacaatggatgcaaattctgaggcactcgccttcaattcaaagcctgtgggaggcccgaaccagggaagtgacagcagccgaggtgtccgtgtcatcggggctctgtcactga

SEQ ID NO: 265923 - DNA, 120 bp, Artificial Sequence
  ENSG00000126214_116 (sequence is synthesized)
gggtggaggagacttcactgtagagggaaggctgtctagctacatctagggcaacatgtctgtcatttacctctaagaattatttagcagcttagaacccattccagacactgatgcatt

SEQ ID NO: 265924 - DNA, 120 bp, Artificial Sequence
  ENSG00000126214_117 (sequence is synthesized)
tgaaaaaccccccaaacccaccacatttacctcctgtggaaagtgctagaaataagaccatcctcctgcagcagttgagtgccctgcccgactcacctctctggggcttggggatgaccc

SEQ ID NO: 265925 - DNA, 120 bp, Artificial Sequence
  ENSG00000126214_118 (sequence is synthesized)
gcgtgtttttggctgacttgactgaggcatctcttgcactctgcagtttaatttcccttaagtgtctccctggggactctggaaagagtgggaaggtgagtctgggattggcagggtgct

SEQ ID NO: 265926 - DNA, 120 bp, Artificial Sequence
  ENSG00000126214_119 (sequence is synthesized)
cagggatccaaacatcagtcgcccccagcagccaacagcagaagacagcttcctgtgggacgggaggaaggtgctgtggaccccacccagcctctcccaggaagggagctggcagccatt

SEQ ID NO: 265927 - DNA, 120 bp, Artificial Sequence
  ENSG00000126214_120 (sequence is synthesized)
ccacagcccgagcctggcccagcaagggagaagctcagctcttctcccctccggcctcagcaggctgctcagggactcagcctggggtcacataaggcctttccaacaggccactctgca

SEQ ID NO: 265928 - DNA, 120 bp, Artificial Sequence
  ENSG00000126214_121 (sequence is synthesized)
tcccctgtcggcctcccaaatggtgagaccaagagtgtccaggacatggggaaactggaaggcagcagcctcgagggccgggtccaggatccatgtcctccagtgaggcctggcgccctt

SEQ ID NO: 265929 - DNA, 120 bp, Artificial Sequence
  ENSG00000126214_122 (sequence is synthesized)
ggccgtaacccagcagaggaaagggcgggccgtggacttggagaaggttttcccttggaccacacagaatgcggcactggcctggacacgatcacgctggtcactcgtatgcccatgttc

SEQ ID NO: 265930 - DNA, 120 bp, Artificial Sequence
  ENSG00000126214_123 (sequence is synthesized)
agcctgctcagggagacaggaacagactacaggagcagcaggctgaggcacgcccccaggcaccccgtgaggcgggcagggcagggaagctggtgctccaggatgcgtttcctgcccgcg

SEQ ID NO: 265931 - DNA, 120 bp, Artificial Sequence
  ENSG00000126214_124 (sequence is synthesized)
caccaggcttggctcccgggcccccacagcctgtgggttttctgagcaagggacagggaggtgcccaggcctggttgcccaggcaggcctgacaggaactggcgagaagccaccctggag

SEQ ID NO: 265932 - DNA, 120 bp, Artificial Sequence
  ENSG00000126214_125 (sequence is synthesized)
ggccgggcgcaggccaaggcagggcggtggggcgctgaaccagctccaaactgctggcagagctggccagagtgaggaagtgaggttcccaagcacagaaggcaaatcaaaaaggaatgc

SEQ ID NO: 265933 - DNA, 120 bp, Artificial Sequence
  ENSG00000126214_126 (sequence is synthesized)
cacctccagggaagacactacactgccaaaggagatgcggccttgcccggctcgaaaagaggtcattttcagaacatgggactctccaagccctgaggacaggaggcagcctggggagta

SEQ ID NO: 265934 - DNA, 120 bp, Artificial Sequence
  ENSG00000126214_127 (sequence is synthesized)
tgaacctcgcacctggtaggggaccccacacccgaggtaccacccaaaacacagcccagatctgcacggagggatggttccctgagcaggcgtgactgtcacagacaggctgggcctggg

SEQ ID NO: 265935 - DNA, 120 bp, Artificial Sequence
  ENSG00000126214_128 (sequence is synthesized)
ggctgtcgggaggctgctgtcccaggctgggtctggatacaaaacttggactgtgtcaagcagcgggacgctggcaggagcaccgggaaggccagcacgtggctgcaacgtctcccgcct

SEQ ID NO: 265936 - DNA, 120 bp, Artificial Sequence
  ENSG00000126214_129 (sequence is synthesized)
tcaggacgcgggccgaggccaaggcacctggaagcagagtgtccactgacggataacagactcaccggttggccaacggcagtccggctcctgaggctcctcctgggccctctgtgcaca

SEQ ID NO: 265937 - DNA, 120 bp, Artificial Sequence
  ENSG00000126214_130 (sequence is synthesized)
tcctgctgagaacttggtttaacaggcctggctcaaagtctgtttagtgacgacctcctcccgtgtcccatcacccttgacagctgattaggcgcctcatcttccactgtcccccgggcg

SEQ ID NO: 265938 - DNA, 120 bp, Artificial Sequence
  ENSG00000126214_131 (sequence is synthesized)
gcctgatctggcaggtcagttgaacctgcatccccttcgcccctgggggttcctcttagcaaccttccatcctctgcccctgcccagctctggagctgtaagccgccaccagcccatggc

SEQ ID NO: 265939 - DNA, 120 bp, Artificial Sequence
  ENSG00000126214_132 (sequence is synthesized)
ctgttcagagctgagcccagcctctctcccactgcaagaccgcagtgtggtggttcccacatctctcaaaggttctgaatgaaagcctggtctctgcctaacgtgctttcacagatatcc

SEQ ID NO: 265940 - DNA, 120 bp, Artificial Sequence
  ENSG00000126214_133 (sequence is synthesized)
tggaatattttccctttaacaccaagcacctgccgcatcccagacactggcctgggagctccacagacagcccggcacatgcctctgtcctctcgccgctgtgaggggcaggggtgtgac

SEQ ID NO: 265941 - DNA, 120 bp, Artificial Sequence
  ENSG00000126214_134 (sequence is synthesized)
cagcccatctctctacaccggggtgaaggccacacacagggagcagcccacagcaggcaaggggctggcccaagacagacctgtatgtcttcctgcagcacccgagctgagcaatgactt

SEQ ID NO: 265942 - DNA, 120 bp, Artificial Sequence
  ENSG00000126214_135 (sequence is synthesized)
cagggggagagctgatgtcacgtgctgctaggtgagtacggacggtcacaccagagctgttaggctcacacaccagactctggaaatgccgtggttactgcctggagctgctctgagcct

SEQ ID NO: 265943 - DNA, 120 bp, Artificial Sequence
  ENSG00000126214_136 (sequence is synthesized)
tccgaggtggactcactcctctgccttgggccctgggacctgctgtgtagctttgaagtgattcacagcacttacatagtctgatgttttggggtgacctgacccccctgcaagagtgtg

SEQ ID NO: 265944 - DNA, 120 bp, Artificial Sequence
  ENSG00000126214_137 (sequence is synthesized)
atgtcttatcagaccacatatgtgaggacttgagtgaactccgcaaccttgggaatgccacttaaaccttgtcagacactcccttatgtgagttactgaccctgactgctggactgcaaa

SEQ ID NO: 265945 - DNA, 120 bp, Artificial Sequence
  ENSG00000126214_138 (sequence is synthesized)
aacagacatcagcttgaaggttgtgcagatgctttgaggcaagctatacgctgctggcctgggagctggacctcggtcccagcttctcagagagctcccgctctcacgctctccactgct

SEQ ID NO: 265946 - DNA, 120 bp, Artificial Sequence
  ENSG00000126214_139 (sequence is synthesized)
accaaggcaaacctcgaactctcaccagatctcactctccaggggcccgctccatcccagcagagcaaccggaccctggccgttctgccactcacctccctgccgtgaatgcaccccatc

SEQ ID NO: 265947 - DNA, 120 bp, Artificial Sequence
  ENSG00000126214_140 (sequence is synthesized)
catggaggccctgcttccctgccaggtgtcttcacctcctcccctctcctcccctctgagcactgtgaacccgagaacaaatcttctttgacaataaaccgtgtgattcgtggaatcata

SEQ ID NO: 265948 - DNA, 120 bp, Artificial Sequence
  ENSG00000126214_141 (sequence is synthesized)
tgatcattggattatctttaatgaaacttaaaaagaacaatttctagttaaagtatattcacgtacatggtaattggtggtttctgcaagactctgtcagcagtgagctgctggcaagca

SEQ ID NO: 265949 - DNA, 120 bp, Artificial Sequence
  ENSG00000126214_142 (sequence is synthesized)
gggcggccttggtggagctcttatttgcacccggtgtggctcttgtgggaaggagggagaaccacctgcagcttcacgtttgttcacgtttttttcaggatggcactggatctttaaaac

SEQ ID NO: 265950 - DNA, 120 bp, Artificial Sequence
  ENSG00000126214_143 (sequence is synthesized)
acagcgggcacgtgctccgggaggcgcccccaagtggcgcttgccaggccttcctcctgtctcatgtgctagaccttctgcttttctcaaattaagtgccaattaagctttctgtaagtt

SEQ ID NO: 265951 - DNA, 120 bp, Artificial Sequence
  ENSG00000126214_144 (sequence is synthesized)
cttcacttctgctaatactgaagtctgttatttgtttaaagtggtaattttcttctcaggaatccatgaaagctgtttggcttaactttgagcacttaaatgctgattgagtgtcctggc

SEQ ID NO: 265952 - DNA, 120 bp, Artificial Sequence
  ENSG00000126214_145 (sequence is synthesized)
cctgcagccccagtgccaggagccaccccgaccgcgacccggccaggctggctcagggaggccgaggtggcgctgaggtggcttcagcacgctggggattggctcctgctcacggatgct

SEQ ID NO: 265953 - DNA, 120 bp, Artificial Sequence
  ENSG00000126214_146 (sequence is synthesized)
gttgcatttcctgcctgccacctttttgccatgacaccagactctcttttaaattgtaatattgtaataaggctgtaaattaagaatctggaaacataaagtacccctttcagaacgata

SEQ ID NO: 265954 - DNA, 120 bp, Artificial Sequence
  ENSG00000126214_147 (sequence is synthesized)
tgtgttctgccaagcatttagttgaggtgtattataaactactgtagtgtagcgctgagttttgaaatgaacagcaggggctgcactgttaatgacgatacgttagcattttagcatcct

SEQ ID NO: 265955 - DNA, 120 bp, Artificial Sequence
  ENSG00000126214_148 (sequence is synthesized)
aagcgtgccagctctctgaatgtccttaacgtgggtggcaaggctgctgaagatcgctttcaaggcgtctctggccgagcctctttttgtggaaaacgacagcagcagcagtggcctgga

SEQ ID NO: 265956 - DNA, 120 bp, Artificial Sequence
  ENSG00000126214_149 (sequence is synthesized)
ggtttcaccctctccccctcacaggtcagcagcaaccagccccctccttcagtggccccgcaccaggtactcagaccacccaaacctggccacagtgccaccaaagccagcccgtggtgg

SEQ ID NO: 265957 - DNA, 120 bp, Artificial Sequence
  ENSG00000126214_150 (sequence is synthesized)
ccatgacctcttcagacgctcagcaaggcaggggcctgatgcccttcaggcgttactcaggcgagtcaggcctggcctgcctctgccaaggcgtggggcactctgggagaccacctgggg

SEQ ID NO: 265958 - DNA, 120 bp, Artificial Sequence
  ENSG00000126214_151 (sequence is synthesized)
gtcaggatggggctgtaggttgagacaccctcaaggccagtgcctcccgtgcatccaggccttagccctgtgctctgagctggcctggcctggccaaggggtggaaacagccctgtgccc

SEQ ID NO: 265959 - DNA, 120 bp, Artificial Sequence
  ENSG00000126214_152 (sequence is synthesized)
accagctcccaggagagcttccaggggaggacccccccagtgaaggcaggtgtcctcggcctccctctgggtgctgccgtggcctgtgggtgccagagccattggcatggctggcctggc

SEQ ID NO: 265960 - DNA, 120 bp, Artificial Sequence
  ENSG00000126214_153 (sequence is synthesized)
tgtagttcaggccccacgggccttgccagcagctctggccagatggaggctgctaaggggcccctaggctgtccctcaagtccaaggtctgcagccacacgctggtgtcacgcccggagc

SEQ ID NO: 265961 - DNA, 120 bp, Artificial Sequence
  ENSG00000126214_154 (sequence is synthesized)
tctgaagacgcctgagggccgcctgcacgccctgagtgaaactcgtctgtgcttcatctccagggcgtctctggccgagcctctttttgtggaaaacgacagcagcagcagtggcctgga

SEQ ID NO: 265962 - DNA, 120 bp, Artificial Sequence
  ENSG00000126215_0 (sequence is synthesized)
actcagggtgctaggcgcctattggaggagaaggccgagaggagcaggacggcgggaagaggagtgcggaacccgcgggagagtccccagggagacacttaagggaaattaaactgcaga

SEQ ID NO: 265963 - DNA, 120 bp, Artificial Sequence
  ENSG00000126215_1 (sequence is synthesized)
gtgcaagagatgcctcagtcaagtcagccaaaaacacgcgggtcatccccaagccccagagagtgacagagccccgatgacacggacacctcggctgctgtcacttccctggttcgggcc

SEQ ID NO: 265964 - DNA, 120 bp, Artificial Sequence
  ENSG00000126215_2 (sequence is synthesized)
tcccacaggctttgaattgaaggcgagtgcctcagaatttgcatccattgttctgtctttcctgggaagttattcatcctggtggccagcccaccgacaaaatggatttggatctactgg

SEQ ID NO: 265965 - DNA, 120 bp, Artificial Sequence
  ENSG00000126215_3 (sequence is synthesized)
acctgaatcccagaattattgctgcaattaagaaagccaaactgaaatcggtaaaggaggttttacacttttctggaccagacttgaagagactgaccaacctctccagccccgaggtct

SEQ ID NO: 265966 - DNA, 120 bp, Artificial Sequence
  ENSG00000126215_4 (sequence is synthesized)
ggcacttgctgagaacggcctccttacacttgcggggaagcagcatccttacagcactgcagctgcaccagcagaaggagcggttccccacgcagcaccagcgcctgagcctgggctgcc

SEQ ID NO: 265967 - DNA, 120 bp, Artificial Sequence
  ENSG00000126215_5 (sequence is synthesized)
cggtgctggacgcgctgctccgcggtggcctgcccctggacggcatcactgagctggccggacgcagctcggcagggaagacccagctggcgctgcagctctgcctggctgtgcagttcc

SEQ ID NO: 265968 - DNA, 120 bp, Artificial Sequence
  ENSG00000126215_6 (sequence is synthesized)
cgcggcagcacggaggcctggaggctggagccgtctacatctgcacggaagacgccttcccgcacaagcgcctgcagcagctcatggcccagcagccgcggctgcgcactgacgttccag

SEQ ID NO: 265969 - DNA, 120 bp, Artificial Sequence
  ENSG00000126215_7 (sequence is synthesized)
gagagctgcttcagaagctccgatttggcagccagatcttcatcgagcacgtggccgatgtggacaccttgttggagtgtgtgaataagaaggtccccgtactgctgtctcggggcatgg

SEQ ID NO: 265970 - DNA, 120 bp, Artificial Sequence
  ENSG00000126215_8 (sequence is synthesized)
ctcgcctggtggtcatcgactcggtggcagccccattccgctgtgaatttgacagccaggcctccgcccccagggccaggcatctgcagtccctgggggccacgctgcgtgagctgagca

SEQ ID NO: 265971 - DNA, 120 bp, Artificial Sequence
  ENSG00000126215_9 (sequence is synthesized)
gtgccttccagagccctgtgctgtgcatcaaccaggtgacagaggccatggaggagcagggcgcagcacacgggccgctggggttctgggacgaacgtgtttccccagcccttggcataa

SEQ ID NO: 265972 - DNA, 120 bp, Artificial Sequence
  ENSG00000126215_10 (sequence is synthesized)
ccgcgaggaagaggctgccctcggctgcccagcccggaccctgcgggtgctctctgccccccacctgcccccctcctcctgttcctacacgatcagtgccgaaggggtgcgagggacacc

SEQ ID NO: 265973 - DNA, 120 bp, Artificial Sequence
  ENSG00000126215_11 (sequence is synthesized)
tgggacccagtcccactgacacggtggcggctgcacaacagccctgcctgagaagccccgacacacggggctcgggcctttaaaacgcgtctgcctgggccgtggcacagctgggagcct

SEQ ID NO: 265974 - DNA, 120 bp, Artificial Sequence
  ENSG00000126215_12 (sequence is synthesized)
ggttcagacacagctcttccagggcagcggctccactttctcatccgaagatggtggccacagactgacccccatctgagctggggggatgttctgcctctccctgggtctggggacagg

SEQ ID NO: 265975 - DNA, 120 bp, Artificial Sequence
  ENSG00000126215_13 (sequence is synthesized)
cccgcttgctgggtacctggtccccactgctgagctggcccttggggagaggtgattctcagggctggagcctggggtgtcctacagtgactccctgggagccgcctgcttcttctctcc

SEQ ID NO: 265976 - DNA, 120 bp, Artificial Sequence
  ENSG00000126215_14 (sequence is synthesized)
acatggaagcccaactggggttgcgtctgaggcctgccccctgggctggggcctcagaccccctcagccttgggaccgtgcccacgagggtctcccctcctgcacacagggcagtcctta

SEQ ID NO: 265977 - DNA, 120 bp, Artificial Sequence
  ENSG00000126215_15 (sequence is synthesized)
ctcccccaccactcaggccacagtggggctgcaggcaggcggctcctcctcacccacctctgggtccttggctcccgggggccccacctcggcacacactgtgccccacaaaacttcagt

SEQ ID NO: 265978 - DNA, 120 bp, Artificial Sequence
  ENSG00000126215_16 (sequence is synthesized)
gtggtacaaggtggagaaagcatatcccaccaacctccagtgtcagggtccaggagagcctgggggtggggggactgccttgtctctagtagtgtggcctgtgccagcaccacagccggt

SEQ ID NO: 265979 - DNA, 120 bp, Artificial Sequence
  ENSG00000126215_17 (sequence is synthesized)
cagaggagcgcaggcagcgcagggctggcacgtgacaggctcgtcagccacctgggaacacagttctgggcaaagaggatccgaggttgagaggaaggagggtcccggtgtatcctggcc

SEQ ID NO: 265980 - DNA, 120 bp, Artificial Sequence
  ENSG00000126215_18 (sequence is synthesized)
ctgggggtctgggcgtccagctcagccctggcctggctgggtggtattctggtagggatatggcaggactcctggcagggccacctgcaggaccctgtcctgcagtcccacactgtgcag

SEQ ID NO: 265981 - DNA, 120 bp, Artificial Sequence
  ENSG00000126215_19 (sequence is synthesized)
acccagtcccacactgtggccaggccttacatctggctggaaagcagagcctcctgggaacacatctggctgcacaggctgaaatatccacccagcaggcagagtggcgtggcctcccca

SEQ ID NO: 265982 - DNA, 120 bp, Artificial Sequence
  ENSG00000126215_20 (sequence is synthesized)
tgggcacagtggtgacccccttgattcccaccgtacaaccccctccaccccccactcagtgcctccacatgctgcctggcacagaccaggcctttgacaaataaatgttcaatggatgca

SEQ ID NO: 265983 - DNA, 120 bp, Artificial Sequence
  ENSG00000126215_21 (sequence is synthesized)
ctccctgagcaggctgaacatgggcatacgagtgaccagcgtgatcgtgtccaggccagtgccgcattctgtgtggtccaagggaaaaccttctccaagtccacggcccgccctttcctc

SEQ ID NO: 265984 - DNA, 120 bp, Artificial Sequence
  ENSG00000126215_22 (sequence is synthesized)
tgctgggttacggccaagggcgccaggcctcactggaggacatggatcctggacccggccctcgaggctgctgccttccagtttccccatgtcctggacactcttggtctcaccatttgg

SEQ ID NO: 265985 - DNA, 120 bp, Artificial Sequence
  ENSG00000126215_23 (sequence is synthesized)
gaggccgacaggggatgcagagtggcctgttggaaaggccttatgtgaccccaggctgagtccctgagcagcctgctgaggccggaggggagaagagctgagcttctcccttgctgggcc

SEQ ID NO: 265986 - DNA, 120 bp, Artificial Sequence
  ENSG00000126215_24 (sequence is synthesized)
aggctcgggctgtggaatggctgccagctcccttcctgggagaggctgggtggggtccacagcaccttcctcccgtcccacaggaagctgtcttctgctgttggctgctgggggcgactg

SEQ ID NO: 265987 - DNA, 120 bp, Artificial Sequence
  ENSG00000126215_25 (sequence is synthesized)
gagtgcggaacccgcgggagactttgagccaggcctgttaaaccaagttctcagcaggatgtgcacagagggcccaggaggagcctcaggagccggactgccgttggccaaccgagtccc

SEQ ID NO: 265988 - DNA, 120 bp, Artificial Sequence
  ENSG00000126215_26 (sequence is synthesized)
cacacagggccggaccccaggccctggacccacaggcccagccagccacctcctcacgggcctgacctgccagcagcggtgtggctgggaacctcacctctgccaccctcagcccagggg

SEQ ID NO: 265989 - DNA, 120 bp, Artificial Sequence
  ENSG00000126215_27 (sequence is synthesized)
agggcaccctcttgtcaggtgcctgagtccctgcggctggtcttggggatgagcctggagacagccagaagccgggaggacaggagttggccttgaaaatgggagtctcccgcttaccgc

SEQ ID NO: 265990 - DNA, 120 bp, Artificial Sequence
  ENSG00000126215_28 (sequence is synthesized)
acggaagagctgctgtgaggtggaggcgggactcgagcgtgctcaggaacgggacgggagccgccctcattctccagcgtcctccgtgccaggcttcgtgcaaatctgatttgtgcaatg

SEQ ID NO: 265991 - DNA, 120 bp, Artificial Sequence
  ENSG00000126215_29 (sequence is synthesized)
gacaccctccctgaatcccccagctgtgcccagcccagtgactgctgcgggatgacagcacagtccagccttgcgggccaggggaagggagggggccccacggccaccgtgaccacatgc

SEQ ID NO: 265992 - DNA, 120 bp, Artificial Sequence
  ENSG00000126215_30 (sequence is synthesized)
aaggttaggggtcagatgtgctttcctggggaaatgacttcctttcctggatccaatctaaaggcccgaattttgaaaagaaagcggcaggcgggctctgaagtgattccgactcccgtg

SEQ ID NO: 265993 - DNA, 120 bp, Artificial Sequence
  ENSG00000126215_31 (sequence is synthesized)
cttaagccgcgtgaggctctcccaggcctgctggggccccgcccaccgctgggctgtccacagccaccctcctgccagcttcacgatgtccccatgactgtgcagcccctacataacgtc

SEQ ID NO: 265994 - DNA, 120 bp, Artificial Sequence
  ENSG00000126215_32 (sequence is synthesized)
accccaacaaaaacacgctgcttgaccggttccacctgcttccgagccttccagcccagcctctctccagccaacaggacggaggaagcccagggccccgaccttcctgtggctcctgac

SEQ ID NO: 265995 - DNA, 120 bp, Artificial Sequence
  ENSG00000126215_33 (sequence is synthesized)
taggggcacagtcactgctggggacactggtggggaagggaaccagccacaaaagggatgtggcctcccaaggcagtatttatacgttcctggcctcaagcgggccagatgcttctcaga

SEQ ID NO: 265996 - DNA, 120 bp, Artificial Sequence
  ENSG00000126215_34 (sequence is synthesized)
agcttagttctgacacagaatggggcggggggttcctgacccatttttgcaactcttctttacgtttgaaattctgtcaaagcaaaatcagctcagaattaaaggttacgcggacactca

SEQ ID NO: 265997 - DNA, 120 bp, Artificial Sequence
  ENSG00000126215_35 (sequence is synthesized)
caaacaggctgcatgacacggcgtgggggcactggctctcccacaactgcatgtgccactgcaggaacaggacgacgccccgtgggccacggggtcctggctgggcagccttcctggcat

SEQ ID NO: 265998 - DNA, 120 bp, Artificial Sequence
  ENSG00000126215_36 (sequence is synthesized)
ggccacggggtcctggctgggcagccttcctggcatagtcagtgcttagagagctcgccggccttgtctttttgtttttgttttgcaggaaactggagttttattattactcaaatcagt

SEQ ID NO: 265999 - DNA, 120 bp, Artificial Sequence
  ENSG00000126215_37 (sequence is synthesized)
ccccctaagccttcctgttttttaaattgagatgtaatttacatgccataaaattccctctaaaagtgtacagttcggcctgataggcgcagtacctcatgcctgtaatcccagcacttt

SEQ ID NO: 266000 - DNA, 120 bp, Artificial Sequence
  ENSG00000126215_38 (sequence is synthesized)
gtgtccagggtttccagggagcaggggatccggtccctacccaccttgtccccagaatcggaagcacggtgctctcacagtgctcttaacaaagcaccttttgtcactgtgttgccctgc

SEQ ID NO: 266001 - DNA, 120 bp, Artificial Sequence
  ENSG00000126215_39 (sequence is synthesized)
tgtcgttttccacaaaaagaggctcggccagagacgccctggagatgaagcacagacgagtttcactcagggcgtgcaggcggccctcaggcgtcttcagagctccgggcgtgacaccag

SEQ ID NO: 266002 - DNA, 120 bp, Artificial Sequence
  ENSG00000126215_40 (sequence is synthesized)
cgtgtggctgcagaccttggacttgagggacagcctaggggccccttagcagcctccatctggccagagctgctggcaaggcccgtggggcctgaactacactgcttggtgccaggagca

SEQ ID NO: 266003 - DNA, 120 bp, Artificial Sequence
  ENSG00000126215_41 (sequence is synthesized)
caggagagctgcttcagaagctccgatttggcagccagatcttcatcgagcacgtggccgatgtgatgtaactgggcgcctgtacaccatctgtcaaccttgcccatgaagacggagtgg

SEQ ID NO: 266004 - DNA, 120 bp, Artificial Sequence
  ENSG00000126215_42 (sequence is synthesized)
ggaagagaagccccaggcgggtggcaaggacctcctctgggctgtgggcccctgaccagctgccccaggagaccaccgccctgagaaggatgcgacctgctctccaggctgctgccctgg

SEQ ID NO: 266005 - DNA, 120 bp, Artificial Sequence
  ENSG00000126215_43 (sequence is synthesized)
gaggggaagacggccctcactaggggcacaggggctccacctggccaaggcctgctgggcacccagctcagacaggtgacctcagatccttgaccactgcctggctgctggcttccctgc

SEQ ID NO: 266006 - DNA, 120 bp, Artificial Sequence
  ENSG00000126215_44 (sequence is synthesized)
agacactggctgggcttggaggagggacctatggcagggccttgcagagagcaggggccactcaccgggggccagtggagtccgtcctgtagccaagaagcaggcaagagaggctgggac

SEQ ID NO: 266007 - DNA, 120 bp, Artificial Sequence
  ENSG00000126215_45 (sequence is synthesized)
ccatccctgcagctggggcagcagtgctgtgagctgtcagtgcttagtttatagacatcatcctgggagggagaagtgatgaagtagaaaagacgcagaagaaaagatgggacgtttggg

SEQ ID NO: 266008 - DNA, 120 bp, Artificial Sequence
  ENSG00000126215_46 (sequence is synthesized)
ggggtgacatgtggctccagcatcatggtcccagtggtgcagggcaggggctgtgcagacttcacccagggaccagcctcagggcgtgtggcagctgctccagccccagagttcccatct

SEQ ID NO: 266009 - DNA, 120 bp, Artificial Sequence
  ENSG00000126215_47 (sequence is synthesized)
tgcttgtcctacacccatggggctgtggtcacagcatcgggtcagaagatgcgtgaggtggacacgggctgtgggacctcctggggaccttgctccatggaccagaggagggggtgcagg

SEQ ID NO: 266010 - DNA, 120 bp, Artificial Sequence
  ENSG00000126215_48 (sequence is synthesized)
aagcaggggtggatttggcagtcagcacccagagcccttcaggctctggcagggtgggaacggtgtgagatggggccctggccacggtcccaccaccacgtgtgggaaaccaggtctcag

SEQ ID NO: 266011 - DNA, 120 bp, Artificial Sequence
  ENSG00000126215_49 (sequence is synthesized)
caggggaaggaggtacccagggaaccccatgcgcctggacggacaaggtttccatccctgcatctcagcaggccctagtaggcagcggggtcctggcatgagcagggccctctctcccct

SEQ ID NO: 266012 - DNA, 120 bp, Artificial Sequence
  ENSG00000126215_50 (sequence is synthesized)
gcaggtggctcagtggcccaggccccgaggaacgtgctgaacttggggctgccgtggtgggcaggtgccacggccacacacacggtgctgtgggcagggctctgggcaggcctcacagtc

SEQ ID NO: 266013 - DNA, 120 bp, Artificial Sequence
  ENSG00000126215_51 (sequence is synthesized)
agggtggcctgctccacctggacggggtgcccaaggcagtgtgcagactccaagggaggggctgctcctcccggcccaggccccaggccaagagcgcagcctgcaccgcatgtcccacct

SEQ ID NO: 266014 - DNA, 120 bp, Artificial Sequence
  ENSG00000126215_52 (sequence is synthesized)
tgagccttgccctgaggggcttcggtgtcgtggaggaggctgtgtcaaatggctcatccaaggccctttagccaagaggctgagaccagcattgctccagaatggtatctgtcacagaga

SEQ ID NO: 266015 - DNA, 120 bp, Artificial Sequence
  ENSG00000126215_53 (sequence is synthesized)
actgacggcatgtggtgtgcatgtgtgcgcgcctgcgggagcccattaaagccgcttgagaactgttcagcaccccagggcatcccagctggacagagctgtgcctttttcttcacatgg

SEQ ID NO: 266016 - DNA, 120 bp, Artificial Sequence
  ENSG00000126215_54 (sequence is synthesized)
aggctgttagggagcgcctcggggctctctggaagctttggctgaaggcgtctggtgctgcaattgccccatagggggatccctgcgggcatgtgatggtggccctggggctccccctga

SEQ ID NO: 266017 - DNA, 120 bp, Artificial Sequence
  ENSG00000126215_55 (sequence is synthesized)
ctctgcatctcaggtgcacccgcccttcccggctgggcccccctccctgccctcagcaccttgctcacccccatgaccgcaggcacctgtgctccagccacactgcacctggcacaggca

SEQ ID NO: 266018 - DNA, 120 bp, Artificial Sequence
  ENSG00000126215_56 (sequence is synthesized)
ggctgaccatgcctcccgcagtccccagccctgcccgcaggcccaggagagtcaggcctgacactatccctgccctttagcactgcagctgcaccagcagaaggagcggttccccacgca

SEQ ID NO: 266019 - DNA, 120 bp, Artificial Sequence
  ENSG00000126215_57 (sequence is synthesized)
agatttgttctcgggttcacagtgctcagaggggaggagaggggaggaggtgaagacacctggcagggaagcagggcctccatggatggggtgcattcacggcagggagttctcagcagg

SEQ ID NO: 266020 - DNA, 120 bp, Artificial Sequence
  ENSG00000126215_58 (sequence is synthesized)
ctattggaggagaaggccgagaggagcaggacggcgggaagaggagtgcggaacccgcgggaggaagctgtcttctgctgttggctgctgggggcgactgatgtttggatccctgagcac

SEQ ID NO: 266021 - DNA, 120 bp, Artificial Sequence
  ENSG00000126215_59 (sequence is synthesized)
gtatgattccacgaatcacacggtttattgtcaaagaagatttgttctcgggttcacagtgctcagaggggaggagaggggaggaggtgaagacacctggcagggaagcagggcctccat

SEQ ID NO: 266022 - DNA, 120 bp, Artificial Sequence
  ENSG00000126216_0 (sequence is synthesized)
gcgctttcggcgggttccgttaaaatggcgccctggtggccggcggcgcccgcgccttagcctgtcaggagcagggagcttgcggggcgcaggaagggcgcgggccgcggtccctgcgcg

SEQ ID NO: 266023 - DNA, 120 bp, Artificial Sequence
  ENSG00000126216_1 (sequence is synthesized)
tgcggcggcagtggcggctctgcccggaccaccgtgcacggctccgggcgaggatggcgaccccggaccagaagtcgccgaacgttctgctgcagaacctgtgctgcaggatcctgggca

SEQ ID NO: 266024 - DNA, 120 bp, Artificial Sequence
  ENSG00000126216_2 (sequence is synthesized)
ggagcgaagctgatgtagcccagcagttccagtatgctgtgcgggtgattggcagcaacttcgccccaactgttgaaagagatgaatttttagtagctgaaaaaatcaagaaagagctta

SEQ ID NO: 266025 - DNA, 120 bp, Artificial Sequence
  ENSG00000126216_3 (sequence is synthesized)
ttcgacaacgaagagaagcagatgctgcattattttcagaactccacagaaaacttcattcacagggagttttgaaaaataaatggtcaatactctacctcttgctgagcctcagtgagg

SEQ ID NO: 266026 - DNA, 120 bp, Artificial Sequence
  ENSG00000126216_4 (sequence is synthesized)
acccacgcaggcagccaagcaaggtttctagctatgctacgttatttgctcaggccttaccaagagatgcccactcaaccccttactactatgccaggcctcagacccttcccctgagct

SEQ ID NO: 266027 - DNA, 120 bp, Artificial Sequence
  ENSG00000126216_5 (sequence is synthesized)
accaagatcggagtgcccagtcagcccagagctccggcagcgtgggcagcagtggcatcagcagcattggcctgtgtgccctcagtggccccgcgcctgcgccacaatctctcctcccag

SEQ ID NO: 266028 - DNA, 120 bp, Artificial Sequence
  ENSG00000126216_6 (sequence is synthesized)
gacagtctaatcaagctccaggagtaggagattgccttcgacagcagttggggtcacgactcgcatggactttaactgcaaatcagccttcttcacaagccactacctcaaaaggtgtcc

SEQ ID NO: 266029 - DNA, 120 bp, Artificial Sequence
  ENSG00000126216_7 (sequence is synthesized)
ccagtgctgtgtctcgcaacatgacaaggtccaggagagaaggggatacgggtggtactatggaaattacagaagcagctctggtaagggacattttgtacgtctttcagggcatagatg

SEQ ID NO: 266030 - DNA, 120 bp, Artificial Sequence
  ENSG00000126216_8 (sequence is synthesized)
gcaaaaacatcaaaatgaacaacactgaaaattgttacaaagtagaaggaaaggcaaatctaagtaggtctttgagagacacagcagtcaggctttctgagttgggatggttgcataata

SEQ ID NO: 266031 - DNA, 120 bp, Artificial Sequence
  ENSG00000126216_9 (sequence is synthesized)
aaatcagaagatacacggaccagaggagcctggaccgctcattcggactcgtcgggcagagcttttgtgctgccttgcaccaggaactcagagaatactatcgattgctctctgttttac

SEQ ID NO: 266032 - DNA, 120 bp, Artificial Sequence
  ENSG00000126216_10 (sequence is synthesized)
attctcagctacaactagaggatgaccagggtgtgaatttgggacttgagagtagtttaacacttcggcgcctcctggtttggacctatgatcccaaaatacgactgaagacccttgcgg

SEQ ID NO: 266033 - DNA, 120 bp, Artificial Sequence
  ENSG00000126216_11 (sequence is synthesized)
ccctagtggaccactgccaaggaaggaaaggaggtgagctggcctcagctgtccacgcctacacaaaaacaggagacccgtacatgcggtctctggtgcagcacatcctcagcctcgtgt

SEQ ID NO: 266034 - DNA, 120 bp, Artificial Sequence
  ENSG00000126216_12 (sequence is synthesized)
ctcatcctgttttgagcttcctgtaccgctggatatatgatggggagcttgaggacacttaccacgaattttttgtagcatcagatccaacagttaaaacagatcgactgtggcacgaca

SEQ ID NO: 266035 - DNA, 120 bp, Artificial Sequence
  ENSG00000126216_13 (sequence is synthesized)
agtatactttgaggaaatcgatgattccttcgtttatgacgatggatcagtctaggaaggtccttttgataggaaaatcaataaatttcttgcaccaagtttgtcatgatcagactccca

SEQ ID NO: 266036 - DNA, 120 bp, Artificial Sequence
  ENSG00000126216_14 (sequence is synthesized)
ctacaaagatgatagctgtgaccaagtctgcagagtcaccccaggacgctgcagacctattcacagacttggaaaatgcatttcaggggaagattgatgctgcttattttgagaccagca

SEQ ID NO: 266037 - DNA, 120 bp, Artificial Sequence
  ENSG00000126216_15 (sequence is synthesized)
aatacctgttggatgttctcaataaaaagtacagcttgctggaccacatgcaggcaatgaggcggtacctgcttcttggtcaaggagactttataaggcacttaatggacttgctaaaac

SEQ ID NO: 266038 - DNA, 120 bp, Artificial Sequence
  ENSG00000126216_16 (sequence is synthesized)
acttgactggaattctagaaaccgctgtcagagccaccaacgcacagtttgacagtcctgagatcctgcgaaggctggacgtgcggctgctggaggtctctccaggtgacactggatggg

SEQ ID NO: 266039 - DNA, 120 bp, Artificial Sequence
  ENSG00000126216_17 (sequence is synthesized)
atgtcttcagcctcgattatcatgttgacggaccaattgcaactgtgtttactcgagaatgtatgagccactacctaagagtatttaacttcctctggagggcgaagcggatggaataca

SEQ ID NO: 266040 - DNA, 120 bp, Artificial Sequence
  ENSG00000126216_18 (sequence is synthesized)
tcctcactgacatacggaagggacacatgtgcaatgcaaagctcctgagaaacatgccagagttctccggggtgctgcaccagtgtcacattttggcctctgagatggtccatttcattc

SEQ ID NO: 266041 - DNA, 120 bp, Artificial Sequence
  ENSG00000126216_19 (sequence is synthesized)
atcagatgcagtattacatcacatttgaggtgcttgaatgttcttgggatgagctttggaacaaagtccagcaggcccaggatttggatcacatcattgctgcacacgaggtgttcttag

SEQ ID NO: 266042 - DNA, 120 bp, Artificial Sequence
  ENSG00000126216_20 (sequence is synthesized)
acaccatcatctcccgctgcctgctggacagtgactccagggcacttttaaatcaacttagagctgtgtttgatcaaattattgaacttcagaatgctcaagatgcaatatacagagctg

SEQ ID NO: 266043 - DNA, 120 bp, Artificial Sequence
  ENSG00000126216_21 (sequence is synthesized)
ctctggaagaattgcagagacgattacagtttgaagagaaaaagaaacagcgtgaaattgagggccagtggggagtgacggcagcagaggaagaggaggaaaataagaggattggagaat

SEQ ID NO: 266044 - DNA, 120 bp, Artificial Sequence
  ENSG00000126216_22 (sequence is synthesized)
ttaaagaatctataccaaaaatgtgctcacagttgcgaatattgacccatttctaccagggtatcgtgcagcagtttttggtgttactgacgaccagctctgacgagagtcttcggtttc

SEQ ID NO: 266045 - DNA, 120 bp, Artificial Sequence
  ENSG00000126216_23 (sequence is synthesized)
ttagcttcaggctggacttcaacgagcattacaaagccagggagcccaggctccgtgtgtctctgggtaccagggggcggcgcagctcccacacgtgaagctcgcggtcctcccagggag

SEQ ID NO: 266046 - DNA, 120 bp, Artificial Sequence
  ENSG00000126216_24 (sequence is synthesized)
ctgcgggtgatgttcgttgcactgctagacacgaaattcccattgacgtcctgcaggaactgcatgctgcaggtgtcctgcccttccgcccacgagtgcgccatgtttcagcggagcggc

SEQ ID NO: 266047 - DNA, 120 bp, Artificial Sequence
  ENSG00000126216_25 (sequence is synthesized)
gtgtgggagaagccacgtcgtgtttcacatgtcggagtcgaatgcatttgtaaatccctaagtcaagtaggctggctgcactgttcacatttgtctctaaaagtcttcatcgctaaaaga

SEQ ID NO: 266048 - DNA, 120 bp, Artificial Sequence
  ENSG00000126216_26 (sequence is synthesized)
taccataatttgctgaggcttcttaagctttctatgttataatttatatttgtcactttaaaaaatccatttcttttagaaaaaattagggtgataggatattcattagttaagatggta

SEQ ID NO: 266049 - DNA, 120 bp, Artificial Sequence
  ENSG00000126216_27 (sequence is synthesized)
acgtcattgctatttttttaacatcctctttagaggtaatttttgttaacataaccaaaaattaaattgaaacaaaatgtcccaactaagaaaatatatagagcattttattttttttta

SEQ ID NO: 266050 - DNA, 120 bp, Artificial Sequence
  ENSG00000126216_28 (sequence is synthesized)
gtgttgtaaaatattaacctctgtgagatcctttgtatcttaatgcattacctttacacatatttattcttattttctctcctttcagagtttacatttttatatttaatttactatttc

SEQ ID NO: 266051 - DNA, 120 bp, Artificial Sequence
  ENSG00000126216_29 (sequence is synthesized)
agatttttaaaatagtatagaaaaaagtaggagtgatagagaacaaaaatactcttatacagtgcaacccaaataccgcgaatgcatcagctaaagcagcgtgtaaataggagtgacgag

SEQ ID NO: 266052 - DNA, 120 bp, Artificial Sequence
  ENSG00000126216_30 (sequence is synthesized)
aaagttaatggagtattttattttcaaagttcctgataagcattggaaagaaatcgacatggataatgaagatttcctttttccttgcctattttttcattgtaaatatttatatactac

SEQ ID NO: 266053 - DNA, 120 bp, Artificial Sequence
  ENSG00000126216_31 (sequence is synthesized)
tgaccaagatgttggggtgggggggattgttttttgtaaaaatgtcattatcaggtcacataaatctgcctttatgttgcataagtgaaaatttagaaaattaaaagcaattatctttca

SEQ ID NO: 266054 - DNA, 120 bp, Artificial Sequence
  ENSG00000126216_32 (sequence is synthesized)
gtaactgccgtgttttcctactgtttaaagggttgaaggttggatttgatataaaactattctgggaaagttcacatggcgaatattgttactaataagcaaaactaatcctatacgagc

SEQ ID NO: 266055 - DNA, 120 bp, Artificial Sequence
  ENSG00000126216_33 (sequence is synthesized)
attgcttttcaactagagccatgcattggaatcgcctgtgatttcacaagaacctgataacgttgattgcctgtgggaaggggagctggtggccagtggttgagaacaggactttttatg

SEQ ID NO: 266056 - DNA, 120 bp, Artificial Sequence
  ENSG00000126216_34 (sequence is synthesized)
gcctatactgcgtttgaagtcccgagaaatcactgacagttgtaaagagggaggggccaccctcactggcatcatcatcctgtttcacaaaataaataaaaacagcagcattcatgagaa

SEQ ID NO: 266057 - DNA, 120 bp, Artificial Sequence
  ENSG00000126216_35 (sequence is synthesized)
ctttcccacgcgcgactttcccatgcacgtctttcccacgcgcgtctttcccacgcgcgtctggcactcgctttgtttcagaactcgtttgtagggtgcgccatccaggcttgcttttgt

SEQ ID NO: 266058 - DNA, 120 bp, Artificial Sequence
  ENSG00000126216_36 (sequence is synthesized)
gtcctgcccgtttttgtccttaatggccgtgttgattcgataggaatcgacagatgggagccaagaggggacgtaaccacttgccagtgtggcccagtatttatatggtagaagctcggg

SEQ ID NO: 266059 - DNA, 120 bp, Artificial Sequence
  ENSG00000126216_37 (sequence is synthesized)
ctggcattgagatggaggtgggaaagaggagggtgtctcgtgtttaaagatttctctcttgtgtggtccttggttatggctccccatggtgcttgctgctcccttggtcgcctttccttg

SEQ ID NO: 266060 - DNA, 120 bp, Artificial Sequence
  ENSG00000126216_38 (sequence is synthesized)
cattttgctttttgcctttagtccttctgcagtcagggaccatgttggtgactctcggtcagatgttcccatatttgcatgtcttgctttggcctctctggctctaggttctgtattgct

SEQ ID NO: 266061 - DNA, 120 bp, Artificial Sequence
  ENSG00000126216_39 (sequence is synthesized)
agttgctttctgacattttttctcattgtttgtgctaccttggccaagaacctctttgccttctccctcgtttgtaacattgagatcctagtagcagttacttcttagggttgttaggat

SEQ ID NO: 266062 - DNA, 120 bp, Artificial Sequence
  ENSG00000126216_40 (sequence is synthesized)
gacatgagatgggcgagttggccatctgccacacaagagttcccttctcactgccatcctctgcccagggtgttccccagaatctgcagggccccattggtcatcttgctgtctgcacac

SEQ ID NO: 266063 - DNA, 120 bp, Artificial Sequence
  ENSG00000126216_41 (sequence is synthesized)
cttcctctctcacctcttggcacttccctcaaaaaagagagaagtggagcacagtaaataaacgccagcgttttctccagttcccagcacctctccggaactggatcccccaaactcctc

SEQ ID NO: 266064 - DNA, 120 bp, Artificial Sequence
  ENSG00000126216_42 (sequence is synthesized)
tgtcactttctgtgtccagcgggcccctggggtccttcactgtcttcactctgctcagcctgtgcgcttggccttggtgctgtagggactgttataagagctgctgtccgatccccatat

SEQ ID NO: 266065 - DNA, 120 bp, Artificial Sequence
  ENSG00000126216_43 (sequence is synthesized)
tcaatctcacagccccactttgtgtacacacaccagagccatcttcttaaaatcagatcctgtcactcctctccctaaaatctaccagtggtctaataaaatcttgaatttttagcataa

SEQ ID NO: 266066 - DNA, 120 bp, Artificial Sequence
  ENSG00000126216_44 (sequence is synthesized)
acgaagtaaggatcggtgttcggttctgagacttggatttaaaaagcatgggcacgcagttatgctgtttcatttttcccctcatgattaccatgttctcctaacaggaatgcaactgca

SEQ ID NO: 266067 - DNA, 120 bp, Artificial Sequence
  ENSG00000126216_45 (sequence is synthesized)
cttccattgaataccatatacattttacacagtgcctcgacagctggttatctcactgaacagcagataagttcacgagttctttggttagtggagaattgtcccagtttattcctcagc

SEQ ID NO: 266068 - DNA, 120 bp, Artificial Sequence
  ENSG00000126216_46 (sequence is synthesized)
aaggtggaatcactcgtccgagtttactagcacgtggatggcaaaacaggacgaggcctcctgagtcttggggcagtcatcatcgcagattctgctgctttgccatgattactttgcaaa

SEQ ID NO: 266069 - DNA, 120 bp, Artificial Sequence
  ENSG00000126216_47 (sequence is synthesized)
tctgtaacgcagcatgtgctgcttaaaaatcactgttgtgtaaatcacatgatagaaatgatagggcttttggtggaaggtagggtgaggggcaccacactcaaaacctttgtcagtaag

SEQ ID NO: 266070 - DNA, 120 bp, Artificial Sequence
  ENSG00000126216_48 (sequence is synthesized)
acaggaatctaacaaaagttgtagtgcagtttaacacgttaaagtttaagaaatacataagcactgccataaatatcacattggccttggaaaaaccctggcgctttcttgtgggagtgg

SEQ ID NO: 266071 - DNA, 120 bp, Artificial Sequence
  ENSG00000126216_49 (sequence is synthesized)
gccgtcggggccgcagactgtgtgtggcgggaagtggcggaggcctggccatctgaaacaggtgtgccttgtgtgggcgctgctggctgcagtggcctgtgttctcctgccgtttctcat

SEQ ID NO: 266072 - DNA, 120 bp, Artificial Sequence
  ENSG00000126216_50 (sequence is synthesized)
ggatgaaattgcaaataagcaagcgtgaggtttgtattacattcaatttgttttctaatttattgtttgtgctgttacaagttgtttttaaagcaagcgtttgggcagaatggagtctct

SEQ ID NO: 266073 - DNA, 120 bp, Artificial Sequence
  ENSG00000126216_51 (sequence is synthesized)
ggtgctctgtgtgcttttgaaacacatgggcggcatggcgtgtgtgcatctgcgttgggcgagttgcttagcctgtcttgtagcactttcccgatggtgtgtgtagtttttctttattac

SEQ ID NO: 266074 - DNA, 120 bp, Artificial Sequence
  ENSG00000126216_52 (sequence is synthesized)
tgcatattatttcacagtagggacagatatgtttttatctagctactgtcctgttgatggagatgatgttttctttgtagtttttaatcttatgaacagtattaaaatgaacatcctttt

SEQ ID NO: 266075 - DNA, 120 bp, Artificial Sequence
  ENSG00000126216_53 (sequence is synthesized)
agtatgtctcaagtagaaaaggcatgaaaagtcatgtgaactttagattgtgtagccggcaattttttgctactttttgtttctgaaaaattcctcagcagtcctaaagagaagagtgac

SEQ ID NO: 266076 - DNA, 120 bp, Artificial Sequence
  ENSG00000126216_54 (sequence is synthesized)
tcacacacttgtgtaaagccagggttggagtctggacctcctggtttctgaatcatgacatgttactgctgcttctaggtccaaagtggtattaactgtaagaaaacaaatgctctttat

SEQ ID NO: 266077 - DNA, 120 bp, Artificial Sequence
  ENSG00000126216_55 (sequence is synthesized)
catgagcatcccaggggtccacagcctgggcctggagattttcacccaagtgtttagaagaatgaaacttcttttctggtgttccttttaggacacttaaaaccagaacttgtccgtcca

SEQ ID NO: 266078 - DNA, 120 bp, Artificial Sequence
  ENSG00000126216_56 (sequence is synthesized)
gttgaacagtacagagaggcataaaaagcagacacctcctgctcctcacatacctgttttcagccctactctgtaatctgttttccatcgtgattttactgacatttggtacttttgatt

SEQ ID NO: 266079 - DNA, 120 bp, Artificial Sequence
  ENSG00000126217_0 (sequence is synthesized)
agggacatcgaatcggaggccctgggaggagcagccggctggctgccctgcagaggccaggtctgcccagcaaacccaggaaggtgtggcgtccccgcttcgcggccaagatggtgctgg

SEQ ID NO: 266080 - DNA, 120 bp, Artificial Sequence
  ENSG00000126217_1 (sequence is synthesized)
tgctgcgccatcctttgtgtgcccgggaagggcgttccgggagccgggtcgggggctcctgactcgcactgggcagcatgacggtgcgccggctgtcactgctgtgccgggacctctggg

SEQ ID NO: 266081 - DNA, 120 bp, Artificial Sequence
  ENSG00000126217_2 (sequence is synthesized)
cgctgtggctgctgctgaaggccggcgcagatgaaatcatgcaccaggacatcgtcccgctctgtgctgccgacatccaggaccagctaaagaagcgctttgcttacctgtccggtgggc

SEQ ID NO: 266082 - DNA, 120 bp, Artificial Sequence
  ENSG00000126217_3 (sequence is synthesized)
gggggcaggacggaagcccggttatcaccttccctgactacccggccttcagcgagattccggacaaggagttccagaatgtcatgacctacctcaccagcatccccagcctgcaggacg

SEQ ID NO: 266083 - DNA, 120 bp, Artificial Sequence
  ENSG00000126217_4 (sequence is synthesized)
ctggcatcggattcatcctggtgatagaccggcgacgggacaaatggacctccgtgaaggcgtccgtcctgcgcatcgcagcatctttcccggcaaacctgcagctcgtcctcgtgcttc

SEQ ID NO: 266084 - DNA, 120 bp, Artificial Sequence
  ENSG00000126217_5 (sequence is synthesized)
gcccgacgggttttttccaaaggactctctccgacatcgctttcaaattcaatagagatgactttaagatgaaggtgccggtcataatgctgagctccgtaccagacttacacggttaca

SEQ ID NO: 266085 - DNA, 120 bp, Artificial Sequence
  ENSG00000126217_6 (sequence is synthesized)
tcgataagtcgcagctgaccgaggacctgggtgggaccctggactactgccactcccggtggctgtgccagcgcacggccatcgaaagtttcgccctcatggtgaagcagacggctcaga

SEQ ID NO: 266086 - DNA, 120 bp, Artificial Sequence
  ENSG00000126217_7 (sequence is synthesized)
tgctgcagtccttcgggaccgagctggctgaaacagagctgcccaatgacgtccagtcgacaagctcagtgctgtgtgcgcacacagagaagaaggacaaggcgaaggaggatttgaggc

SEQ ID NO: 266087 - DNA, 120 bp, Artificial Sequence
  ENSG00000126217_8 (sequence is synthesized)
tggcactgaaagaggggcacagtgtcctggagagcctcagggagctgcaggctgagggctcagagcccagtgtgaaccaggaccagcttgacaaccaggccaccgtgcagaggctcctgg

SEQ ID NO: 266088 - DNA, 120 bp, Artificial Sequence
  ENSG00000126217_9 (sequence is synthesized)
cccagctgaacgaaaccgaggctgccttcgatgagttctgggcaaagcatcagcagaaactggagcagtgtctgcagctccggcactttgagcagggcttccgggaggtcaaagccatct

SEQ ID NO: 266089 - DNA, 120 bp, Artificial Sequence
  ENSG00000126217_10 (sequence is synthesized)
tggacgcagcgtcccagaagatagcaaccttcacagacatcggcaacagcctggcgcatgtggagcacctgctgagggacctggccagcttcgaggagaaatcaggcgtggccgtggaga

SEQ ID NO: 266090 - DNA, 120 bp, Artificial Sequence
  ENSG00000126217_11 (sequence is synthesized)
gggcccgggccctgtctctggacggcgagcagctcattgggaacaagcactacgcggtagactccatccgcccaaagtgccaggagctccggcacctctgtgaccagttctctgcggaga

SEQ ID NO: 266091 - DNA, 120 bp, Artificial Sequence
  ENSG00000126217_12 (sequence is synthesized)
tcgcaaggaggagggggctgctcagcaagtccctggagctgcaccgccgcctggagacgtccatgaagtggtgtgatgaagggatttacctgctggcctcacaacctgtggacaagtgcc

SEQ ID NO: 266092 - DNA, 120 bp, Artificial Sequence
  ENSG00000126217_13 (sequence is synthesized)
agtcccaggacggcgcggaggctgccctccaggaaatcgagaagtttttggagaccggtgcggaaaataagatccaggagctcaacgcgatttacaaggaatacgaatccatcctcaacc

SEQ ID NO: 266093 - DNA, 120 bp, Artificial Sequence
  ENSG00000126217_14 (sequence is synthesized)
aagatctcatggagcacgtgcgaaaggtcttccagaagcaggcaagcatggaggaggtgttccaccgcaggcaggccagcctgaagaagctggcggccaggcagacgcggcccgtgcagc

SEQ ID NO: 266094 - DNA, 120 bp, Artificial Sequence
  ENSG00000126217_15 (sequence is synthesized)
cggtggcccccagacccgaggcactggcaaagtcgccctgcccctccccaggcattcggcgaggctctgagaactccagctccgagggcggtgcgctccggagagggccctaccggaggg

SEQ ID NO: 266095 - DNA, 120 bp, Artificial Sequence
  ENSG00000126217_16 (sequence is synthesized)
ccaagagtgagatgagtgagagccggcagggccgcggctcagcgggggaggaggaggaaagcctggccatcctgcgcaggcacgtgatgagcgagctcctggacacagaacgggcctacg

SEQ ID NO: 266096 - DNA, 120 bp, Artificial Sequence
  ENSG00000126217_17 (sequence is synthesized)
tggaggagctgctgtgcgtcctggagggctacgccgcggagatggataacccactgatggctcacctcctgtcaacaggccttcacaacaagaaggatgttttgtttggaaacatggagg

SEQ ID NO: 266097 - DNA, 120 bp, Artificial Sequence
  ENSG00000126217_18 (sequence is synthesized)
aaatctatcacttccacaacaggatattcctcagggagctggaaaactacactgactgcccagaactggttggaagatgctttctggagaggatggaagatttccagatctatgagaagt

SEQ ID NO: 266098 - DNA, 120 bp, Artificial Sequence
  ENSG00000126217_19 (sequence is synthesized)
actgtcagaacaagccccgctctgagagcctgtggagacagtgctccgactgcccgtttttccaggaatgccagagaaagctggaccacaagctgagcctggactcctacctgctgaagc

SEQ ID NO: 266099 - DNA, 120 bp, Artificial Sequence
  ENSG00000126217_20 (sequence is synthesized)
cagtgcagaggatcaccaagtaccagctgctgctcaaggaaatgctgaaatacagcaggaactgcgagggggctgaggacctgcaggaggcgctgagctccatcctgggcatcctgaagg

SEQ ID NO: 266100 - DNA, 120 bp, Artificial Sequence
  ENSG00000126217_21 (sequence is synthesized)
ccgtgaacgactccatgcacctcatcgctatcaccggctatgacgggaatctcggcgacctgggcaagctgctgatgcagggctcgttcagcgtctggaccgaccacaagaggggccaca

SEQ ID NO: 266101 - DNA, 120 bp, Artificial Sequence
  ENSG00000126217_22 (sequence is synthesized)
ccaaggtgaaggagctggccaggttcaagcccatgcagcggcacctgttcctgcacgagaaggcagtgctcttctgcaagaagagggaggagaatggggaggggtatgagaaagctccct

SEQ ID NO: 266102 - DNA, 120 bp, Artificial Sequence
  ENSG00000126217_23 (sequence is synthesized)
cctacagctacaagcagtccttaaacatggctgccgttggcattacggagaacgtgaagggagatgctaagaagttcgagatctggtacaacgcgcgcgaggaggtctacatcgtccagg

SEQ ID NO: 266103 - DNA, 120 bp, Artificial Sequence
  ENSG00000126217_24 (sequence is synthesized)
cgccaactcctgagattaaagccgcgtgggtgaatgaaattcggaaagtgctgaccagccagctgcaggcttgtagagaagccagccagcaccgggcgctggagcagtcacagagcctgc

SEQ ID NO: 266104 - DNA, 120 bp, Artificial Sequence
  ENSG00000126217_25 (sequence is synthesized)
ccctgccggccccgaccagcaccagtccctcaagaggaaactcaaggaacatcaagaagctggaagaaaggaaaacagaccccctaagcctggagggatacgtcagctcagcgccactga

SEQ ID NO: 266105 - DNA, 120 bp, Artificial Sequence
  ENSG00000126217_26 (sequence is synthesized)
agaggagcagattaactcgtccgacgcagaggaggacggcgggttgggccccaagaagctggttccaggtaaatacacggtcgtggcggaccacgagaagggaggccccgatgcgctgcg

SEQ ID NO: 266106 - DNA, 120 bp, Artificial Sequence
  ENSG00000126217_27 (sequence is synthesized)
cgtgaggagcggggacgtggtggagctggtgcaggagggcgacgagggcctctggtacgtcagggacccgaccactggcaaggagggctgggtgccggccagcagcctgtccgtccggct

SEQ ID NO: 266107 - DNA, 120 bp, Artificial Sequence
  ENSG00000126217_28 (sequence is synthesized)
cggcccgtccggctcggcccagtgcctgagcagctcagagtcgagcccggggtcggccgtgctgagcaactcgtccagctgcagcgagggcggccaggcccccttctccgacctgcaggg

SEQ ID NO: 266108 - DNA, 80 bp, Artificial Sequence
  ENSG00000126217_29 (sequence is synthesized)
ggctgcggtggcgtggggagggcgcggcccccggacgccccgaggaaggggcacctcaccgcccccacccagagcgcctg

SEQ ID NO: 266109 - DNA, 120 bp, Artificial Sequence
  ENSG00000126217_30 (sequence is synthesized)
gccgtgcgggctgcagaggacccctccggggcagaggcaggttccacggaagaccccggcccgctggggcttccccggagactccagagcccacagaggaggggccgcagggaacagccc

SEQ ID NO: 266110 - DNA, 120 bp, Artificial Sequence
  ENSG00000126217_31 (sequence is synthesized)
cgggcggcaggcgccgggcagcggcatctcgtcctggctccaccgtgctgcttctgcctctggacggtgctttcaggggacgcgcggaccgtggtggagctgcttccggagaagtggagg

SEQ ID NO: 266111 - DNA, 120 bp, Artificial Sequence
  ENSG00000126217_32 (sequence is synthesized)
atcctctggccaacggcctgaggagagcggggcacggggtctctttagcttttacaagttttaggattttttcaagcagggatcaatcccgtggccattttttgtggtactttggcctca

SEQ ID NO: 266112 - DNA, 120 bp, Artificial Sequence
  ENSG00000126217_33 (sequence is synthesized)
attcttcaccaggaatcactgtgtttacatgaaatgacaatttgatactgtatttgatagaaaactatttttttgttaccggggtttacatagaagcacgttgtttataccactaagtga

SEQ ID NO: 266113 - DNA, 120 bp, Artificial Sequence
  ENSG00000126217_34 (sequence is synthesized)
ctttgggggggctctcccatggaaacggatggcactccctgaagctccctggtcacaggtggatgaaaacgtgtccgtgggtgacatcaggtggtgtctccaccaccaaaagcagttaga

SEQ ID NO: 266114 - DNA, 120 bp, Artificial Sequence
  ENSG00000126217_35 (sequence is synthesized)
agccaaggagattcctttatctacctagggttcattttcaaaagaaaatttaaactataatttaaacaattaacgttcttttctacaaaaaaaatgcagggacttgatttttttaaagag

SEQ ID NO: 266115 - DNA, 120 bp, Artificial Sequence
  ENSG00000126217_36 (sequence is synthesized)
cttcactgaattaggatatttttattgcttttaaagaaaatacaaagatgcagtttctgcagggtgtggcgtggaccagtgctgccgaccatagctcagagagccctgcccctgcctcac

SEQ ID NO: 266116 - DNA, 120 bp, Artificial Sequence
  ENSG00000126217_37 (sequence is synthesized)
tgcactgcagcctcctcggaggccgcacctccactccactccccacgcgccccctgcctcccacccaggtccacctgccacctggtgaccaccttgagtacagaagtgaaagtggggaga

SEQ ID NO: 266117 - DNA, 120 bp, Artificial Sequence
  ENSG00000126217_38 (sequence is synthesized)
gtattttattcaagtcacagcagaactggaaaaaaactcttctgttttaccaacttcttgtgtttcagaaacatattctgttcaaaacttttgaagccctttcggtgtctagtctgcaga

SEQ ID NO: 266118 - DNA, 120 bp, Artificial Sequence
  ENSG00000126217_39 (sequence is synthesized)
tgtttttgtatgtgtgcacctctgaccatgtgtgtacatatgtgtcttgctggaaaggacatattcgctgtccccgtgctgctgggagggccgcctcacagcctcacggttcccagcccc

SEQ ID NO: 266119 - DNA, 120 bp, Artificial Sequence
  ENSG00000126217_40 (sequence is synthesized)
agcacagtggaggcaggcgtggctgcattcccctcacgctaccctcccagcggcttgtagccgtcactggccagacctccagggtgcggaatcaaataggaagcatgcagagactcggca

SEQ ID NO: 266120 - DNA, 120 bp, Artificial Sequence
  ENSG00000126217_41 (sequence is synthesized)
gcttttcctctgatgtgtaagttatttggaacgcgtgctgtgtcccgcgatgtccctgatgtactgtgcaggcgcggtgcctccgtctcgtcgcacagctgcgcgcccttgtgtgaccct

SEQ ID NO: 266121 - DNA, 120 bp, Artificial Sequence
  ENSG00000126217_42 (sequence is synthesized)
ccccataaaggcactttacagcttcatgtttcatccactgtcacttttttttaactgctgatgtaaatggaattttaaaagcagagttctttattgtatggatgacgtttgaataaatat

SEQ ID NO: 266122 - DNA, 120 bp, Artificial Sequence
  ENSG00000126217_43 (sequence is synthesized)
cagcaactcctgccatctgcctttgtctgtcaagacacagaacgtctcagcagtcggggtttccagggccgcagtgcactgtgcttgcacatggtaagtcattgttgggacggaaaagaa

SEQ ID NO: 266123 - DNA, 120 bp, Artificial Sequence
  ENSG00000126217_44 (sequence is synthesized)
gccggcagtgggcagggcccagcgtgcggctcaggcaccgagcaaccgctttgctttcttctgtcagacggcgatgatgacaaaatagcaacaaggttgtgcgtgtcagaaacgcaaagg

SEQ ID NO: 266124 - DNA, 120 bp, Artificial Sequence
  ENSG00000126217_45 (sequence is synthesized)
cagcagaggaagcgtagtggaaccattacagaatcacaatgcagccgacactctccagaccagaaaagggagcataaagaaagggtattgatccaatagaagaagggaagggtggagaaa

SEQ ID NO: 266125 - DNA, 120 bp, Artificial Sequence
  ENSG00000126217_46 (sequence is synthesized)
ggggaaagcatggttaacaggaaacaacatgtaacggaagagacagcccagatgtgtctggctcacaacagacgtgatcatgttatgctggcctggaagagcatcggatcagacgtgaca

SEQ ID NO: 266126 - DNA, 120 bp, Artificial Sequence
  ENSG00000126217_47 (sequence is synthesized)
agtcactgcttagagaccatcaagcaaatttatatatagattggagatttaaaataaaagaagacagaacagacaaacaccataagaaagctggtgtagcagtatcgatgacctgaaatg

SEQ ID NO: 266127 - DNA, 120 bp, Artificial Sequence
  ENSG00000126217_48 (sequence is synthesized)
ggattcaggacagttcatagagtaaagggggctgcgtggcaatcaggaactcataagccactgactataaagctcaaaacacagcaaagttggcagtcggcagacagcaatgttgactgt

SEQ ID NO: 266128 - DNA, 120 bp, Artificial Sequence
  ENSG00000126217_49 (sequence is synthesized)
catgaaaagtgatccctgtttgcccctaaacgtagagaaatctgcgttattttccagcacacatggagcacaaacaaaatatttgcaaaacaatgggaagatcattgaaacactgtttgg

SEQ ID NO: 266129 - DNA, 120 bp, Artificial Sequence
  ENSG00000126217_50 (sequence is synthesized)
caatttaaaagcttgtttctaactcacgggatgcgggcagtctgctctctagaactggacagcgtgcacagagccacgggagggagcagccacggccagctcagattggtgtcgacagct

SEQ ID NO: 266130 - DNA, 120 bp, Artificial Sequence
  ENSG00000126217_51 (sequence is synthesized)
tagtggtgtctgattttatacatgacaaaatgaacgagttaaccatttaagccaaaaaaataagactagcgtaacccaaagaaagtatttaaatacttctgtcaattaggacagttgaga

SEQ ID NO: 266131 - DNA, 120 bp, Artificial Sequence
  ENSG00000126217_52 (sequence is synthesized)
aaagagaataacaaaatcaaaagcaaaactcaaactttgtacctgaaaaatctaataaaactgactaatttatagaaaacctaagaaactccatatcaaataaaaaattttaaatatgag

SEQ ID NO: 266132 - DNA, 120 bp, Artificial Sequence
  ENSG00000126217_53 (sequence is synthesized)
acctgcggggcgcggagctcggcggacgcgggagggcagcaccacgggcggcagcctcatgtttgactgttggagatttatcctgtgcaagagacctggaagcaacagttattcttcccc

SEQ ID NO: 266133 - DNA, 120 bp, Artificial Sequence
  ENSG00000126217_54 (sequence is synthesized)
acaacggcccaatgaggccaaaaaggaggaaacggatcaccaaattgatgtgtctgacgtcatcaggcttgttcaagacacaccggaggcgacggccatggccacagatgaaatcatgca

SEQ ID NO: 266134 - DNA, 120 bp, Artificial Sequence
  ENSG00000126217_55 (sequence is synthesized)
gtccggctcggcccagtgcctgagcagctcaggtaaggcccacgtgccccgagcccacccgtgacgctgccaagggcccgggcgaggaagctgccccgtgtgtgcccggcagagccgacg

SEQ ID NO: 266135 - DNA, 120 bp, Artificial Sequence
  ENSG00000126217_56 (sequence is synthesized)
tggaggctgaaagcgctgccgtggccccctccccgcctccgccgcgccccctccgcactcgcacggccccacccgcaggcgccccccgtgcggaggaagcggatctgccaggatcatttt

SEQ ID NO: 266136 - DNA, 120 bp, Artificial Sequence
  ENSG00000126217_57 (sequence is synthesized)
tgcggaggaagcggatctgccaggatcatttttgttgtgtcggaggatgaggttttggctgaggactgaagagatggccttggaagaaatggtgcagagattaaatgcggtttccaagca

SEQ ID NO: 266137 - DNA, 120 bp, Artificial Sequence
  ENSG00000126217_58 (sequence is synthesized)
tgctcgtcccagcctccaggaagatgctgagaatgtcagcctcacaccagacagtgtagttgctgcttccatttggggtatagtgaacacacaccaagtaaaaacagaaatatccttaaa

SEQ ID NO: 266138 - DNA, 120 bp, Artificial Sequence
  ENSG00000126217_59 (sequence is synthesized)
agaacttgcacacagcaggcaggcccagcggctgggtttctctagcacctcggcattgtctgcctgctcttccaggcgtgcagggcagtggtggctcgggccaggctctgggaggccggg

SEQ ID NO: 266139 - DNA, 120 bp, Artificial Sequence
  ENSG00000126217_60 (sequence is synthesized)
cactctgaggaggtggctcagccctcttgggttctttcttgtgagttggcgaagcccagagtcaccagggtcctgagcacctgtctcttgtgaccatgcggcacccgcccggcttttagc

SEQ ID NO: 266140 - DNA, 120 bp, Artificial Sequence
  ENSG00000126217_61 (sequence is synthesized)
tgtcgcagcagagacccgaaggctgtggctctagcatcagggggtcgcctgtggtccctgcgtgaagaaccagagctgcctccgctttgtagcagcctttgtgacagggcggttcgatgg

SEQ ID NO: 266141 - DNA, 120 bp, Artificial Sequence
  ENSG00000126217_62 (sequence is synthesized)
aaggaactcagtgaccacagacggatgagaacagcggacgcagctgcctcccaggcactcaaaggctcaactccccacaggcgtgtgttgccaggggcagaaggcttggcccctgggtca

SEQ ID NO: 266142 - DNA, 120 bp, Artificial Sequence
  ENSG00000126217_63 (sequence is synthesized)
tggtttggggcagagtccctgtgagatttcaccagggtggggtccctgcaactatgggatgaggcagagtccctgtgagatttccctgtcatggggtccccgtgactgtgggtcggggca

SEQ ID NO: 266143 - DNA, 120 bp, Artificial Sequence
  ENSG00000126217_64 (sequence is synthesized)
accaggctcatccgaggacggaggctgtcgttatacaacgcgcaagtgtggtctctgtcacagatgtggctgtcgcagagagtgctgcctcctctcccgtttccagcagatgcttgggaa

SEQ ID NO: 266144 - DNA, 120 bp, Artificial Sequence
  ENSG00000126217_65 (sequence is synthesized)
tgctccgatgcccacaaccttcatcgttttggtgcaagcctgtccctgagccgctggttctcatcgaagtctttaggatgaggcatctccttgcacccccacggcacctctctgcccctc

SEQ ID NO: 266145 - DNA, 120 bp, Artificial Sequence
  ENSG00000126217_66 (sequence is synthesized)
gccgcggcggatccccgttcctgaccctgactcaacctggcacacaccacctatggcatcgttatctgaaataattcaaaacgcttcaggatgcttccaaaaaagtagacgtgtatagaa

SEQ ID NO: 266146 - DNA, 120 bp, Artificial Sequence
  ENSG00000126217_67 (sequence is synthesized)
gggttttgctaacctcaaaggtcagaaagcttctcctaccagtcctgacaaaaaagccaagcggcatgaagtaaagagcgacccgactccctttggtgtgcgaggttggagcaaaacgtc

SEQ ID NO: 266147 - DNA, 120 bp, Artificial Sequence
  ENSG00000126217_68 (sequence is synthesized)
cccagaaggagcctcggccgagcgtgcaacccggagccgccttgggccctccctgcgacagccggacccgcctccgcatcgggttgcgatgccctctgcatagtttctttctcttccttc

SEQ ID NO: 266148 - DNA, 120 bp, Artificial Sequence
  ENSG00000126217_69 (sequence is synthesized)
atagatgacacggtcactagctctgcctcagaaagctctgcgctttccagaaagcgctttaccctgcagggttttgctaacctcaaaggtcagaaaggtaaaagtagtgcctgccccaaa

SEQ ID NO: 266149 - DNA, 89 bp, Artificial Sequence
  ENSG00000126217_70 (sequence is synthesized)
gtgccacctactctatcccagatgggccaaggtaaccgagtcgcactgtgcagggagggccttcctcctgaggacacagccaccctgct

SEQ ID NO: 266150 - DNA, 120 bp, Artificial Sequence
  ENSG00000126217_71 (sequence is synthesized)
gtgcagggacccttctcccagactcctcttctcatcttgggtgcaggttgacgtttgagaagcaaagacaccaagggtccccttcctcccacccaggcctcacgtcccctcagcgcctcc

SEQ ID NO: 266151 - DNA, 120 bp, Artificial Sequence
  ENSG00000126217_72 (sequence is synthesized)
tggccacgcactgttgattcctaaggtctgctgccctctgcaagcactgctcctcccgtgtcctggcctccacctgcccctgccctgggacaaagcatcctcctcgcccccaccatgtcc

SEQ ID NO: 266152 - DNA, 120 bp, Artificial Sequence
  ENSG00000126217_73 (sequence is synthesized)
acgcagcagaggcagatgtccaggcactgggggaacgtggtgctggggcctccccgccccactggtagagaggagccagcctctgcttgcagaccatccctcacgctctgctcctgtcca

SEQ ID NO: 266153 - DNA, 120 bp, Artificial Sequence
  ENSG00000126217_74 (sequence is synthesized)
gtgagctgtggttgcacccgcaggccagtgggctgtctgcccacatgggtgggggaccatggggctcccaaggtcacgagccctgagtggtttgggtctctgtcacagaagacgcagcca

SEQ ID NO: 266154 - DNA, 120 bp, Artificial Sequence
  ENSG00000126217_75 (sequence is synthesized)
gttggaacattcctgaaactttatgagaccgctgggccttttttacttatttgggccaaaactgagcgacagtgactgccccattaacaccacctggaaaccagtccgtccttctcgttg

SEQ ID NO: 266155 - DNA, 120 bp, Artificial Sequence
  ENSG00000126217_76 (sequence is synthesized)
agaaactgatttcctagtatgcattttttgaatcgaataaatttatgacaccttagatttcacttgcaattttgacttctaaaaaatgttttagtcgttggtaactggtttctcattgaa

SEQ ID NO: 266156 - DNA, 120 bp, Artificial Sequence
  ENSG00000126217_77 (sequence is synthesized)
aacggatgcctatttgtgatactggtgttcccattacaatgtaacacaaagatttaaacgtagagtgagtggaagccccacacaggcaggccgggcggcatccagtggcatcgggcgcct

SEQ ID NO: 266157 - DNA, 120 bp, Artificial Sequence
  ENSG00000126217_78 (sequence is synthesized)
ttttcgtggctgcagcgtcagcctgcactgccgggtgtgaggcagacgcgcacttaacggcgtgagaagccagatgtgggaggcaccgggcactgtgggcagtgaggcaggagcttggcc

SEQ ID NO: 266158 - DNA, 120 bp, Artificial Sequence
  ENSG00000126217_79 (sequence is synthesized)
gcgtgtggggcagaagctccatggctagaatgggatgtgtttgggtcacgggtctgggggagggtgcgttctggctataactggatgtgtttgggccacagaggtctggggggtgcattc

SEQ ID NO: 266159 - DNA, 120 bp, Artificial Sequence
  ENSG00000126217_80 (sequence is synthesized)
tgcatccagcagctctcacatggcagtcgtggtccccgttgctggtctgggctgttgtggagtagcgggggcatttgtgggcgaacccagaggctgaaattccaccccaatcagagctct

SEQ ID NO: 266160 - DNA, 120 bp, Artificial Sequence
  ENSG00000126217_81 (sequence is synthesized)
attccagggaaaaggggagaaattgagtcaggctttgttgttctgcaaaacagtgacgccgctcaggcagcgctgcgggttacagcatactcagtggcttcatttcactctcacggtaac

SEQ ID NO: 266161 - DNA, 120 bp, Artificial Sequence
  ENSG00000126217_82 (sequence is synthesized)
cgctgggggtggattctacgattgtcctcatttttacagaaaaggaagcagagatggttcacagccaagtcacctgtccagggtgatgcctttgcggggcccaccagagcccgccagtgt

SEQ ID NO: 266162 - DNA, 120 bp, Artificial Sequence
  ENSG00000126217_83 (sequence is synthesized)
cgcagaggcggtgagcccctcccgcccaacacacagccccttggcaggggctcttgagcaaacctgcaggtgggcagcttggggcgtttctcagctagcatcacccctgcttcaggactt

SEQ ID NO: 266163 - DNA, 120 bp, Artificial Sequence
  ENSG00000126217_84 (sequence is synthesized)
gaaagcatttgactgggttcgctggcctgaggattacgtgctcggtggaaattagtcattctgggctcttctctccttcactctaggaggactgggacccagagagctccgggatcagct

SEQ ID NO: 266164 - DNA, 120 bp, Artificial Sequence
  ENSG00000126217_85 (sequence is synthesized)
ccctggcttggagtccaaaggcagctctgaccacgccgcctggggcaagagggagggcagctgggttccatctccgtggcctggcacatccaaggtccctttgtggaaaaggcacgtgta

SEQ ID NO: 266165 - DNA, 120 bp, Artificial Sequence
  ENSG00000126217_86 (sequence is synthesized)
gcacctgttactggaggataacctgtaactttgtgcctctcccaagggagcacacaggtctacacgggaagtaagattccctgtacccactgtgtctcacagttcagaaaaagtcgtcaa

SEQ ID NO: 266166 - DNA, 120 bp, Artificial Sequence
  ENSG00000126217_87 (sequence is synthesized)
acccactgtgtctcacagttcagaaaaagtcgtcaaagtgctcagactcaagaagtaaataaggaaatatgaaaacatgactttatttctttctttttttgagacagtctcgctctgttg

SEQ ID NO: 266167 - DNA, 88 bp, Artificial Sequence
  ENSG00000126217_88 (sequence is synthesized)
agactccccctcagctaatctttgtatttttcatagagacagggtctcatcatgttacccaggctgatctcgaactcctgggctccag

SEQ ID NO: 266168 - DNA, 83 bp, Artificial Sequence
  ENSG00000126217_89 (sequence is synthesized)
actcagctaatctttgtatttttcatagagacagggtctcatcatgttacccaggctgatctcgaactcctgggctccagtca

SEQ ID NO: 266169 - DNA, 120 bp, Artificial Sequence
  ENSG00000126217_90 (sequence is synthesized)
aaaaatcttagctccgtaagaactaagccagatcagaaaacgaattctgtctgtggcccccacagctgtgaaatggagtcgctgactcgccatgctcgtgcacgtgcttagtgcccactg

SEQ ID NO: 266170 - DNA, 120 bp, Artificial Sequence
  ENSG00000126217_91 (sequence is synthesized)
cagaaggctgctttgaatgaaagctagtgtttattcgtgtactcacccagaaggtttctgctgttattgaatcaaattaccctacatgtgaggcatttttcacggccagatgcagacagg

SEQ ID NO: 266171 - DNA, 120 bp, Artificial Sequence
  ENSG00000126217_92 (sequence is synthesized)
gacacagacgcagcagcacccaccacacatgaacgttcgggggtcactgcctcgtcttcatgtcttgggagttgctgtttctgtctttaaatccgagcgtcagaaggatctgagacaccc

SEQ ID NO: 266172 - DNA, 120 bp, Artificial Sequence
  ENSG00000126217_93 (sequence is synthesized)
gattttcatgtaaacctaggacatgttcagagacttggaagttagcgattctagcccctgccttaggcatgcccgtgtggttgtttctgctttggattggctggtggtagcagctgctgg

SEQ ID NO: 266173 - DNA, 120 bp, Artificial Sequence
  ENSG00000126217_94 (sequence is synthesized)
atgccaccacgagtgaatccttaacgtggaccagcacgggcacctcagatgccaggaccggcgtgatgtatgcgccataagactgttttggagggtttagtcagctggtcacccaggaaa

SEQ ID NO: 266174 - DNA, 120 bp, Artificial Sequence
  ENSG00000126217_95 (sequence is synthesized)
ggaaaatgactcggctcttactgtggaatagcaaatgactgagctcgggagagatggttctgcctcaatctgtgactcgaggtggttggtgttaggctgagaaataagaacacaccaaaa

SEQ ID NO: 266175 - DNA, 120 bp, Artificial Sequence
  ENSG00000126217_96 (sequence is synthesized)
gtgcctgcccttccgtagatgagagcaggttctgggactgcggggatggggctgccggggcccccgtgtgccatgcctctcacctggtattgcagaaatggcatcatgaatatgggggat

SEQ ID NO: 266176 - DNA, 120 bp, Artificial Sequence
  ENSG00000126217_97 (sequence is synthesized)
cgctctcccaagaggttttctgagggatttcgtgggcagccggcttcccacctgcacacattaacggcggcgtctcttcctcactgcagcctgcaggacgctggcatcggattcatcctg

SEQ ID NO: 266177 - DNA, 120 bp, Artificial Sequence
  ENSG00000126217_98 (sequence is synthesized)
gtgatagaccggcgacgggacaaatggacctccgtgaaggcgtccgtcctgcgcatcgcagtaagtgccacccggggctctgccctgcgcccggcccctccctgggctgcatgaccgcat

SEQ ID NO: 266178 - DNA, 120 bp, Artificial Sequence
  ENSG00000126217_99 (sequence is synthesized)
ggtgcccttcctctgtgtctgccgcagttcctgctttgtgctgagtgggacagagcccagtcccggcgggtggaggccggcgccaaggccccccctgcttgggctcccaaggcactggtg

SEQ ID NO: 266179 - DNA, 120 bp, Artificial Sequence
  ENSG00000126217_100 (sequence is synthesized)
cctgggtgtgagttttcccagatgaaggaactcttagggagcccaatgtgacttgcaaacaatttccccaggcagagcagcccatatgtttccgaacaccaagtctgagatgctcgggac

SEQ ID NO: 266180 - DNA, 120 bp, Artificial Sequence
  ENSG00000126217_101 (sequence is synthesized)
tgaatatgcctcttacatatttatacattagtgattttctcctttccaaatcgggccatctatctttagctgtgacactgaacgagccaccaccgcctcccttccccagtgggattgaac

SEQ ID NO: 266181 - DNA, 120 bp, Artificial Sequence
  ENSG00000126217_102 (sequence is synthesized)
atgcacttcctcttacacaaagcacaacagtcctgaccaggcaggacgggggctgtgtgcagagacgctccaggctggaagttggaagtggtactgcacagctttcctatgtgattttct

SEQ ID NO: 266182 - DNA, 120 bp, Artificial Sequence
  ENSG00000126217_103 (sequence is synthesized)
cctttccaaatcaggccatctagctgcgacactgaactagccaccaccgcctcccttccccagtaacccagcctcgcatgtagccaccctcctttccaaggactttcccttggcatccga

SEQ ID NO: 266183 - DNA, 120 bp, Artificial Sequence
  ENSG00000126217_104 (sequence is synthesized)
gagtctgtttgcagattctgcacgctgccttccatagcagaaggggagctgggtttgctgttggttttaacccagagtaatcatttaagagggaagagattaagtcagcagaagccccca

SEQ ID NO: 266184 - DNA, 120 bp, Artificial Sequence
  ENSG00000126217_105 (sequence is synthesized)
aatcttatttttgtcggtagctcccacccgtatgcatgaccccggcatggagcatttttcacccacgctcgctctccccgcctgtccgtccaaatttcattgctgccaaaggaccaaaaa

SEQ ID NO: 266185 - DNA, 120 bp, Artificial Sequence
  ENSG00000126217_106 (sequence is synthesized)
aggctgcctgtctgccaagaggtgacccagagcctgggtccaggcacctgcatgttctcacgcccgccacagcccgtccctcccaggctctgggaccctgggtcctcagctgtgatggca

SEQ ID NO: 266186 - DNA, 120 bp, Artificial Sequence
  ENSG00000126217_107 (sequence is synthesized)
caattgctccaagcattccccagcaccaaaccccagtgaagtcagattctcccagtgaagtcagattctcctggcctttcctgggtcccgcgttcagactacctttgggttccccagcct

SEQ ID NO: 266187 - DNA, 120 bp, Artificial Sequence
  ENSG00000126217_108 (sequence is synthesized)
ttcctttgttttaacagtgcgttcgtttgcttttgcgtcactataaagacgtacttgagctgggtaattgataaagaaagaggcgtaattggctcacagttctgcaggctgcacaggctt

SEQ ID NO: 266188 - DNA, 120 bp, Artificial Sequence
  ENSG00000126217_109 (sequence is synthesized)
agcacctgcatcttctcagcttctgagggggcctcagggagctgccagtcgtggtggaaggcagcggggagccggcatcacatggtgagagagggagcgagagagaagggggaggtccca

SEQ ID NO: 266189 - DNA, 120 bp, Artificial Sequence
  ENSG00000126217_110 (sequence is synthesized)
gacttttgaacagccagatctccagtgaacttactgagcgagaactcacccgtcaccaaggggatggcgctgagccattcataaggggtcacgcccagacttaatcacctcccaccaggc

SEQ ID NO: 266190 - DNA, 120 bp, Artificial Sequence
  ENSG00000126217_111 (sequence is synthesized)
cccacctcagcactgggaatcgcatttcaacatgagacttggaggggacaaaaatcccatccatatcaagcatccccagaaatgcagaaagttctttagataaaagccatcaccagctaa

SEQ ID NO: 266191 - DNA, 120 bp, Artificial Sequence
  ENSG00000126217_112 (sequence is synthesized)
agcccggttatcaccttccctgactacccggccttcagcgagattccggacaaggagttccagaatgtcatgacctacctcaccagcatccccagcattttgttcatggagtctgctgct

SEQ ID NO: 266192 - DNA, 120 bp, Artificial Sequence
  ENSG00000126217_113 (sequence is synthesized)
ctgagcactggggacaagtcgcggaggccctgccattccttcctccgggttctgcacgcaccgcggtgaccacctccccccgaggtcctctccccgcaccttcccaaaacgtgttcccca

SEQ ID NO: 266193 - DNA, 120 bp, Artificial Sequence
  ENSG00000126217_114 (sequence is synthesized)
ggtccttttctgttactgctgttgaattcaacagctactgaccacctgtggccatttaaatgtaaaatgaaagcaaaataaaattaaaaatccagcccatggcaggcagggctgcctctt

SEQ ID NO: 266194 - DNA, 120 bp, Artificial Sequence
  ENSG00000126217_115 (sequence is synthesized)
tgcaggaacagggtccacgcccattgttttcctcacccggtccagcgtctctgattccggctctaacgtcttcttcatctgttaacacagagacacaaacaaactttcaaatgcatattt

SEQ ID NO: 266195 - DNA, 120 bp, Artificial Sequence
  ENSG00000126217_116 (sequence is synthesized)
tttatataaacttgtgtttactgtttggctactgtcagacaaatgtagttggtgaggtttcagttgctctgaaattaaatatataatgtcaagctggataggtgtggcttggagcagacc

SEQ ID NO: 266196 - DNA, 120 bp, Artificial Sequence
  ENSG00000126217_117 (sequence is synthesized)
ttaaggaaggtgatttgaacttggggagggtttttcaaacagggttccccaaagtacccagttctacaaagttcccagcatgtcctgttgctttagctgcattggtaaatacatgcagcg

SEQ ID NO: 266197 - DNA, 120 bp, Artificial Sequence
  ENSG00000126217_118 (sequence is synthesized)
attgttttctgagtctctaagaatattaactcagaaaccagtgaactctttttctatctccagactacagtgctgtggtcatcacacatatctgttcctaagttcatccaggtcagccca

SEQ ID NO: 266198 - DNA, 120 bp, Artificial Sequence
  ENSG00000126217_119 (sequence is synthesized)
gtgagtacatccttcacctctgtgtctacagacccggcctccccgcccagcatgggttgaagccaggctaaggcgttgatcccaaggggctgtctgcaggggtttggggcaggcctgagc

SEQ ID NO: 266199 - DNA, 120 bp, Artificial Sequence
  ENSG00000126217_120 (sequence is synthesized)
attcaccccagcgtcctgtgcaaacgtcttcgtcaggagcgcacttgggaagtcctacactagcgcagagggtgcgcagccagcgggtctatcaacttggatgcaggtagtgctcagtgg

SEQ ID NO: 266200 - DNA, 120 bp, Artificial Sequence
  ENSG00000126217_121 (sequence is synthesized)
catttggaggagagtctaataaccaagaggatgaatctctttgaaggatctgatggaaacaagaaatgaagagggttgttttgttttgtttgttttatgagacagagtcctgctctgttg

SEQ ID NO: 266201 - DNA, 90 bp, Artificial Sequence
  ENSG00000126217_122 (sequence is synthesized)
ttgttttgtttgttttatgagacagagtcctgctctgttgcccaagctcttgcggccgccgcctcctgggttccagctattctcctgcct

SEQ ID NO: 266202 - DNA, 120 bp, Artificial Sequence
  ENSG00000126217_123 (sequence is synthesized)
caggcatgagccactgtgcctggccacgaaatgaagagattttactacctgaaccttaaaactgttcctgagaaatcaccaagaagactgaccagcaaatgaaaacctggaaaaaaattg

SEQ ID NO: 266203 - DNA, 120 bp, Artificial Sequence
  ENSG00000126217_124 (sequence is synthesized)
acctggaaaaaaattgcaacaaaggatagatatttatctatgcatctgtcttacatagcagagtgaaaaggaggcacacgttcatagaaagtgaatataaagcttgcacagaaataggct

SEQ ID NO: 266204 - DNA, 120 bp, Artificial Sequence
  ENSG00000126217_125 (sequence is synthesized)
gacctgttcagtttaaagaaatgtaatgctgaccacaaggtctctttctctttccatttttatggccaaaaattccaagcctgctggtaggaatgccagtccttatcgatatactggaaa

SEQ ID NO: 266205 - DNA, 120 bp, Artificial Sequence
  ENSG00000126217_126 (sequence is synthesized)
acaactgatgtcagtaaaagtcttcaaatatttttagttttcgtcagcaatgttcacttctaagaatttaaaagaagaaaatgataaaaatattgtcacaaacattcatgaacaaaggtg

SEQ ID NO: 266206 - DNA, 120 bp, Artificial Sequence
  ENSG00000126217_127 (sequence is synthesized)
atcatcacagccgttatttataattatgaacacttgcaggaaagcaaaattacagcagtaagggtttggaaatgatttagttgttgagatcataattctccctggcacatcttacactat

SEQ ID NO: 266207 - DNA, 120 bp, Artificial Sequence
  ENSG00000126217_128 (sequence is synthesized)
aataagtgaaattgccagttataaaaacgatacacagtcttcaattttgtaaacaccaaatatgtgcagttttgtaaaagacttaagatatgcacctaaatataaatgtttttaatcata

SEQ ID NO: 266208 - DNA, 120 bp, Artificial Sequence
  ENSG00000126217_129 (sequence is synthesized)
ccatcgcaaggaaacgcttgcttccagtggtaccaaataggatttggaaccagtttgtgcccaagctcaaatctcgttagcatctgcctgtttccctggtgtgcatgtgtcctgcctcga

SEQ ID NO: 266209 - DNA, 120 bp, Artificial Sequence
  ENSG00000126217_130 (sequence is synthesized)
tgcatttggcagcaggtgggatgcgctgggcctgctgcctggttgctggctttgcgtgtttatttagccccaatggcgtctcccatctcccccgcatgggaaaggccggtgctgccctct

SEQ ID NO: 266210 - DNA, 120 bp, Artificial Sequence
  ENSG00000126217_131 (sequence is synthesized)
gggagcctggcaggaggaacactgggttggggaggggggcatgtgtggtcccaagtctggaagaagctccttcctcttctcccgctgggagctgcgtggccgatgggagcccatctccac

SEQ ID NO: 266211 - DNA, 120 bp, Artificial Sequence
  ENSG00000126217_132 (sequence is synthesized)
cgcggcacctgcatggtctcagccttccggttcggtgccgctgtgccgggggctactctcttgccagtggggaccacagccctcggtatcccataggtcaagggcgtcaggccctctcag

SEQ ID NO: 266212 - DNA, 120 bp, Artificial Sequence
  ENSG00000126217_133 (sequence is synthesized)
tgagcttcagtcattcactttagaaactgcttcccggctcggtctgctaggtgttgaacatgaccgtggcactcactgaaaacacctgcctgggagggcatctgcggcaggaaggctgct

SEQ ID NO: 266213 - DNA, 120 bp, Artificial Sequence
  ENSG00000126217_134 (sequence is synthesized)
tccctcctggctgaggggcactgccctgcctgacaagggcgtggcttcccagggcctggggatcgaggtctcccacagggtggcccagcaattggaagcagatggtctcaaaccctgaaa

SEQ ID NO: 266214 - DNA, 120 bp, Artificial Sequence
  ENSG00000126217_135 (sequence is synthesized)
cgtgccaggcattctggaagtttgcaggggtgtcctgctcagctctttatgaacccgggaagatgacaggctctgttgggggcccacggcacacatttcagggggtctgtgggacttagc

SEQ ID NO: 266215 - DNA, 120 bp, Artificial Sequence
  ENSG00000126217_136 (sequence is synthesized)
tgaccccacctcagacagatgcagacagcggctcatcaccggggggtccctcacgggtgtctgtctctcttaggttggagcaaaacgtcccactcactggaggcacctgaggacgacggg

SEQ ID NO: 266216 - DNA, 120 bp, Artificial Sequence
  ENSG00000126217_137 (sequence is synthesized)
ttgactttggcttaatgcagaaaagtctccgcttgccaggtggagcctgtgagattaagtcaggctgagccttgaaatgcacgattgatgactgcgtcattgtatagaaaggtgattgaa

SEQ ID NO: 266217 - DNA, 120 bp, Artificial Sequence
  ENSG00000126217_138 (sequence is synthesized)
cgcttccctcactgggtcctgcgtccttgggcaggcgatgcccctgcggggaggggctggtccatccccggccagccacggacccacgcatggacccagcgacccacggacctgcttacc

SEQ ID NO: 266218 - DNA, 120 bp, Artificial Sequence
  ENSG00000126217_139 (sequence is synthesized)
tgggcgcggcgcgggtggcatgcggccacacggaaggggcgcgctgggctgctgcggcctctgcagcttctacacctgccacggggcggccggagatgaaatcatgcaccaggacatcgt

SEQ ID NO: 266219 - DNA, 120 bp, Artificial Sequence
  ENSG00000126217_140 (sequence is synthesized)
gctccagtccggacccctcccccgggcactgcaccgccctgcctccgcagagcctccacccgcatcctacaggtctcccagagccgcgtcatccactgcagctccatccaccatagttca

SEQ ID NO: 266220 - DNA, 120 bp, Artificial Sequence
  ENSG00000126217_141 (sequence is synthesized)
ctgcacctctccgtccagttcctttggccagaaaccccatcgtcctcatctgtgttttcactcatgcccgtatccgacctcccgggaaatcctgttggctgtgcctccagaacagatcca

SEQ ID NO: 266221 - DNA, 120 bp, Artificial Sequence
  ENSG00000126217_142 (sequence is synthesized)
gaatccagccaggctaccgccctgtctcccactttgaggtcgcgctgcctctgcgcctgtccctccccaccgccgtctcgcagaacagcaagcggtgacctctcgaaggaggcgtgatta

SEQ ID NO: 266222 - DNA, 120 bp, Artificial Sequence
  ENSG00000126217_143 (sequence is synthesized)
acaaagagccaaaatggcaaactgtgtggaggccgtggcgtgggctgttcctcgagagccgtgcttgtagggctggcctgggagggcatccctggtccgcagaggccggtctgtgccgca

SEQ ID NO: 266223 - DNA, 120 bp, Artificial Sequence
  ENSG00000126217_144 (sequence is synthesized)
aagcctgggcgcaggcacgggagtggcaggagggtcctggagtcaagggagcagctaaatttcaatgcagcagcttctttttgccagagatccaggttaaaaaaagaaaatgtttcacct

SEQ ID NO: 266224 - DNA, 120 bp, Artificial Sequence
  ENSG00000126217_145 (sequence is synthesized)
tttaaaaaatatcatacttaagacctgcatttgttctatacccagatcatctttttagagccaaaacatcaagaaatatggcctgaaaaaggctcatgaaaatactgttctgagaattaa

SEQ ID NO: 266225 - DNA, 120 bp, Artificial Sequence
  ENSG00000126217_146 (sequence is synthesized)
gtgttaatgacattctgaaacctcactgtttaaagagatccactgctagtataacaggacccctgatatatttatgcatttataaatttataaaattcattgttaaaatcgagcaatgct

SEQ ID NO: 266226 - DNA, 120 bp, Artificial Sequence
  ENSG00000126217_147 (sequence is synthesized)
ggaagcgtctggcccacggatgatgaggaggcagagttttcagaggatgctggaggacagtgcacagctccctgccagtggctgcggctttcaggctgctgggacagtggccggatgcag

SEQ ID NO: 266227 - DNA, 120 bp, Artificial Sequence
  ENSG00000126217_148 (sequence is synthesized)
acctgtgtggagcagctgctgctgctgcagcgaggttggccacataggtgacgccctgctaggcgcatccaggtccagcctcgaggttgtccactttgaggccaggtctgctgggaatcc

SEQ ID NO: 266228 - DNA, 120 bp, Artificial Sequence
  ENSG00000126217_149 (sequence is synthesized)
tcaaactctacatgcatttcgtatgacatctctggatttcatcagctccgagtaaaccaagccttacttacagccaggaaggcattcaatacccagatctggtcacattctgcccattgg

SEQ ID NO: 266229 - DNA, 120 bp, Artificial Sequence
  ENSG00000126217_150 (sequence is synthesized)
tgcatgttttagaagcatgtgtgtgtttctgcccacctcatggctgctgaggaacagtggctactgcgtgtcgttcttgtgatgcctttgtgattttgtgtgcagagccttatttacagg

SEQ ID NO: 266230 - DNA, 120 bp, Artificial Sequence
  ENSG00000126217_151 (sequence is synthesized)
ccgcccccgagagcaaaggataatggtgcattatctgttgacgtgaccctggagagctctaactgaactgcacaaatgggagaatcctcccctaccggcccctgctgctcacagacagta

SEQ ID NO: 266231 - DNA, 120 bp, Artificial Sequence
  ENSG00000126217_152 (sequence is synthesized)
cgctcagctcagcaggggctgctcttacaaatgccatcgcagcacaggcggtcaatgcttggcattttctggggcccctggtttccttttagaggacgcagtattttcagaaatggagtt

SEQ ID NO: 266232 - DNA, 120 bp, Artificial Sequence
  ENSG00000126217_153 (sequence is synthesized)
cacatgtgtgctcatcagtcagcagcagtcagctgtgatgtctccaaactgtagaggctttggactttttggcccactttcttcatagaacgatagagatttaggatcttactgccctag

SEQ ID NO: 266233 - DNA, 120 bp, Artificial Sequence
  ENSG00000126217_154 (sequence is synthesized)
tttaatcttggtttgcagatgagaggccgaggccccggggtcctgagccacgtgagctgggcttccaccctggactccatgccgcgcctcctcgccagatagacgccagatagacgccag

SEQ ID NO: 266234 - DNA, 120 bp, Artificial Sequence
  ENSG00000126217_155 (sequence is synthesized)
atagacgtggccagtcgtgctgtttcaaggtcttattccagtcaggtttttgttttattgatttttttgttcatgaagtagaatatggttcatgtattacatacttttctgtgtgtgtgt

SEQ ID NO: 266235 - DNA, 120 bp, Artificial Sequence
  ENSG00000126217_156 (sequence is synthesized)
ttttattacaatatctcattttcatgggtttttataacttaagttacctctaacctatgacccttgtagtctcttcttccaccttgtgtatcctaatgtgggaattctgctttggtggat

SEQ ID NO: 266236 - DNA, 120 bp, Artificial Sequence
  ENSG00000126217_157 (sequence is synthesized)
gacttttgtgaagtgaattaacatacatttcatttagaataatgctttgagcaactcaaagaaagtgaatttaattttatcacttagtttttattttatacttaaagagctctatttgcc

SEQ ID NO: 266237 - DNA, 120 bp, Artificial Sequence
  ENSG00000126217_158 (sequence is synthesized)
ttattcagatttttgctatcagtgttgtatatacacaaagggaagctaagcaaaataacttggttagattttcctaaaatttcttcattcagcatccaactcttctgactcccttacctg

SEQ ID NO: 266238 - DNA, 120 bp, Artificial Sequence
  ENSG00000126217_159 (sequence is synthesized)
ggacgttccccagctgtcgccgtcagtcttcctcagatgccagtttgttgaggtgtttctctttccctgatgcctcttgtgccaacaaataaagactttcagctcttcctgggctctcga

SEQ ID NO: 266239 - DNA, 120 bp, Artificial Sequence
  ENSG00000126217_160 (sequence is synthesized)
tttgctcacagaagctcctttttcatcggtggaaaggggccacaacgtcggtgtccccttccagcacgagcgcgggtcagcctcctcgccgcctccctccgtccttcacactctctctcc

SEQ ID NO: 266240 - DNA, 120 bp, Artificial Sequence
  ENSG00000126217_161 (sequence is synthesized)
gggccccaagaagctggtaaccacggcttccctgtgggcacttggggtgggggctgccctccggggattaggggtgcttctggcaggtccacccaggcttgggtcttaggacacagcccc

SEQ ID NO: 266241 - DNA, 120 bp, Artificial Sequence
  ENSG00000126217_162 (sequence is synthesized)
agctcctcctaaccctggaaggtccacatgggcctgggtcttacgggcagtgccagctcctcctaactctctctggaaggtccacccagacctgggtcttggggcacagccccagctcct

SEQ ID NO: 266242 - DNA, 120 bp, Artificial Sequence
  ENSG00000126217_163 (sequence is synthesized)
ataaacaaatcaacaaaccacaccataaatggccttctaagaatggctgcggtggaaccccgtctccactccacgcctgtgctctgggaagtcaggggctctgggacagggagccccatt

SEQ ID NO: 266243 - DNA, 120 bp, Artificial Sequence
  ENSG00000126217_164 (sequence is synthesized)
aatggagggcaggccccccagcggagcctgggagccagtgccggccctcggaagctatggggccagcagcaatgcctcgcagggccgggaagacgctgcgtgatgcggtgcccgtccctc

SEQ ID NO: 266244 - DNA, 120 bp, Artificial Sequence
  ENSG00000126217_165 (sequence is synthesized)
ctcgttgcacggagtcagaacccctgcatcccggtggctcaggcatttgagtgaaggtcggatcaggagggaggggagatgcagctgccccacgcatggaggagaagagctgtgagctgc

SEQ ID NO: 266245 - DNA, 120 bp, Artificial Sequence
  ENSG00000126217_166 (sequence is synthesized)
agcagcctcgtgtctttttcctctcaactttcagttcagaaaaatttcagacctacagaaaacttgggagagtctcacagtgaacaaacctcagctgtggccataaacaaagtgcccatt

SEQ ID NO: 266246 - DNA, 120 bp, Artificial Sequence
  ENSG00000126217_167 (sequence is synthesized)
gtctgctgcaccttctgtgctgtgcgtggtccatgccccaaggctggaggtgcaaaggggacaggtcccggaggctctggaagggcagagaagccaggcgtggaagggtagggagagccc

SEQ ID NO: 266247 - DNA, 120 bp, Artificial Sequence
  ENSG00000126217_168 (sequence is synthesized)
tcggggcctctggcctctcccacagagacagcatgaaggaaggcctgggcgtgagaacagatgtgggggacacagaggcggaggccacgtggcaggaggggaaacaggctggtggaacag

SEQ ID NO: 266248 - DNA, 120 bp, Artificial Sequence
  ENSG00000126217_169 (sequence is synthesized)
ggtgcacggggcctggggagggatttggatctcattctttgtggggtgtggggagtgatcctggctactctgggcaccacagaggcaggagccagtacaggccatcacgtgagggcaggc

SEQ ID NO: 266249 - DNA, 120 bp, Artificial Sequence
  ENSG00000126217_170 (sequence is synthesized)
agcccagtcaccgtcctcttgctccaggccatcatgtgagagcaggtggcccagtcaccgtcctcctgctccaggccatcacgtgagggcaggtggcccagtcaccgtcctcctgctcca

SEQ ID NO: 266250 - DNA, 120 bp, Artificial Sequence
  ENSG00000126217_171 (sequence is synthesized)
ggccctgcagccggcagcacccctccgcagcccaccacacgcagcaccaggaggctgtgaatctccccactctgtaggaacagctgccgcttcctgggtccccattccccaacggaacgt

SEQ ID NO: 266251 - DNA, 120 bp, Artificial Sequence
  ENSG00000126217_172 (sequence is synthesized)
gttccatgacatctgtgcagcatccgctgtgtgccaggcacagttctaggccccggagacaaagcgggaacagcacagacaggaacctccactcttacagtgaggagagaaagaggagtg

SEQ ID NO: 266252 - DNA, 120 bp, Artificial Sequence
  ENSG00000126217_173 (sequence is synthesized)
aggcttggggaggttgggcaggacagctgcagggagagggagggcagaggacgggcgagtcggggagtaccaaggaaggcctcagcaaagcagcatggaaataagacctgaaagcacgga

SEQ ID NO: 266253 - DNA, 120 bp, Artificial Sequence
  ENSG00000126217_174 (sequence is synthesized)
agggccctccgggaggcgggtatgcaggcgcaaaggccctggggccgagagctgtgtgtggagaccagcgtgaggggctggggcagctgggcccaaagacagattcacagacgccttcca

SEQ ID NO: 266254 - DNA, 120 bp, Artificial Sequence
  ENSG00000126217_175 (sequence is synthesized)
tcgccgctgcggtagtcatgccctgcggcgtagcctcctcccaaggctggagcccttccccggagctggtcgtggccaggagctcccaccggggcagggcgctaaggcccggcactccgc

SEQ ID NO: 266255 - DNA, 120 bp, Artificial Sequence
  ENSG00000126217_176 (sequence is synthesized)
ctggctgctgtggggctgctgccggggcgggtgctgacgctgtctgtgcccctgcccgtctcccaccaggttccaggtaaatacacggtcgtggcggaccacgagaagggaggccccgat

SEQ ID NO: 266256 - DNA, 120 bp, Artificial Sequence
  ENSG00000126217_177 (sequence is synthesized)
gaggacggcgggttgggccccaagaagctggtgcccacccagcctcctgtagagcccactcgtgggtgcaccttcctcagaggagacagtccccacccccctaccctttatgtcatagaa

SEQ ID NO: 266257 - DNA, 120 bp, Artificial Sequence
  ENSG00000126217_178 (sequence is synthesized)
tgctgtcactgagccttcctaactatacatacaattctcattttgtaagaaaatggaactgctaagcatggatttgcatttgaaaaaacattcattgttaatgtcagaagcaagaaaaag

SEQ ID NO: 266258 - DNA, 120 bp, Artificial Sequence
  ENSG00000126217_179 (sequence is synthesized)
agcgggagtttgtgtcagcagcacgtaagaccaagaagtcagcaggcttgagatgccttttgatggcaattagctcggcaacctctccgacgagaacggaataaaaggagtgtaaatgaa

SEQ ID NO: 266259 - DNA, 120 bp, Artificial Sequence
  ENSG00000126217_180 (sequence is synthesized)
gggttttgctaacctcaaaggtcagaaaggttggagcaaaacgtcccactcactggaggcacctgaggacgacgggggctggtcaagtgcagaggagcagattaactcgtccgacgcaga

SEQ ID NO: 266260 - DNA, 120 bp, Artificial Sequence
  ENSG00000126217_181 (sequence is synthesized)
tttttcctcaagttcctctcgggcgggcacggtgtgtcgcctggacctgcatgtaaacatcagggcggagcaggaatcggcctccaggagggtaattgcctggcgtactctgtcccaggt

SEQ ID NO: 266261 - DNA, 120 bp, Artificial Sequence
  ENSG00000126217_182 (sequence is synthesized)
agtgggtgaaatgaaagtaaaaagccagctggtccctcatgcagattttaggggacaaagttcagcatagaaaggtcctgttacaaggagagggttgtggcgagcccagggcagcgcgcg

SEQ ID NO: 266262 - DNA, 120 bp, Artificial Sequence
  ENSG00000126218_0 (sequence is synthesized)
gactttgctccagcagcctgtcccagtgaggacagggacacagtactcggccacaccatggggcgcccactgcacctcgtcctgctcagtgcctccctggctggcctcctgctgctcggg

SEQ ID NO: 266263 - DNA, 120 bp, Artificial Sequence
  ENSG00000126218_1 (sequence is synthesized)
gaaagtctgttcatccgcagggagcaggccaacaacatcctggcgagggtcacgagggccaattcctttcttgaagagatgaagaaaggacacctcgaaagagagtgcatggaagagacc

SEQ ID NO: 266264 - DNA, 120 bp, Artificial Sequence
  ENSG00000126218_2 (sequence is synthesized)
tgctcatacgaagaggcccgcgaggtctttgaggacagcgacaagacgaatgaattctggaataaatacaaagatggcgaccagtgtgagaccagtccttgccagaaccagggcaaatgt

SEQ ID NO: 266265 - DNA, 120 bp, Artificial Sequence
  ENSG00000126218_3 (sequence is synthesized)
aaagacggcctcggggaatacacctgcacctgtttagaaggattcgaaggcaaaaactgtgaattattcacacggaagctctgcagcctggacaacggggactgtgaccagttctgccac

SEQ ID NO: 266266 - DNA, 120 bp, Artificial Sequence
  ENSG00000126218_4 (sequence is synthesized)
gaggaacagaactctgtggtgtgctcctgcgcccgcgggtacaccctggctgacaacggcaaggcctgcattcccacagggccctacccctgtgggaaacagaccctggaacgcaggaag

SEQ ID NO: 266267 - DNA, 120 bp, Artificial Sequence
  ENSG00000126218_5 (sequence is synthesized)
aggtcagtggcccaggccaccagcagcagcggggaggcccctgacagcatcacatggaagccatatgatgcagccgacctggaccccaccgagaaccccttcgacctgcttgacttcaac

SEQ ID NO: 266268 - DNA, 120 bp, Artificial Sequence
  ENSG00000126218_6 (sequence is synthesized)
aatgaggaaaacgagggtttctgtggtggaaccattctgagcgagttctacatcctaacggcagcccactgtctctaccaagccaagagattcaaggtgagggtaggggaccggaacacg

SEQ ID NO: 266269 - DNA, 120 bp, Artificial Sequence
  ENSG00000126218_7 (sequence is synthesized)
gagcaggaggagggcggtgaggcggtgcacgaggtggaggtggtcatcaagcacaaccggttcacaaaggagacctatgacttcgacatcgccgtgctccggctcaagacccccatcacc

SEQ ID NO: 266270 - DNA, 120 bp, Artificial Sequence
  ENSG00000126218_8 (sequence is synthesized)
ttccgcatgaacgtggcgcctgcctgcctccccgagcgtgactgggccgagtccacgctgatgacgcagaagacggggattgtgagcggcttcgggcgcacccacgagaagggccggcag

SEQ ID NO: 266271 - DNA, 120 bp, Artificial Sequence
  ENSG00000126218_9 (sequence is synthesized)
tccaccaggctcaagatgctggaggtgccctacgtggaccgcaacagctgcaagctgtccagcagcttcatcatcacccagaacatgttctgtgccggctacgacaccaagcaggaggat

SEQ ID NO: 266272 - DNA, 120 bp, Artificial Sequence
  ENSG00000126218_10 (sequence is synthesized)
gcctgccagggggacagcgggggcccgcacgtcacccgcttcaaggacacctacttcgtgacaggcatcgtcagctggggagagggctgtgcccgtaaggggaagtacgggatctacacc

SEQ ID NO: 266273 - DNA, 120 bp, Artificial Sequence
  ENSG00000126218_11 (sequence is synthesized)
aaggtcaccgccttcctcaagtggatcgacaggtccatgaaaaccaggggcttgcccaaggccaagagccatgccccggaggtcataacgtcctctccattaaagtgagatcccactcaa

SEQ ID NO: 266274 - DNA, 120 bp, Artificial Sequence
  ENSG00000126218_12 (sequence is synthesized)
ggattcgaaggcaaaaactgtgaattatgcatgttgatctttgcactgtgattactttttcatcaaaagccacacagagggatgtggagtgaccgtaatgtgagtgctgctggggcaggg

SEQ ID NO: 266275 - DNA, 120 bp, Artificial Sequence
  ENSG00000126218_13 (sequence is synthesized)
ggtaccggccatcccggaggtgtgaggggcaggtacctggagcctggcttctggctacaccgggcactgcaccatgagctccccgtgacccgtgaggttgcccttcaaggcaagtgtacc

SEQ ID NO: 266276 - DNA, 120 bp, Artificial Sequence
  ENSG00000126218_14 (sequence is synthesized)
tctggccctttgctcaacccaatggccgctttgtggctgacaggcaagtggatgtagctggcacccttgggccagcccagcctccatttctccagctgtccccagagccaacgtgcctct

SEQ ID NO: 266277 - DNA, 120 bp, Artificial Sequence
  ENSG00000126218_15 (sequence is synthesized)
acagtaggatgtcccctcgggcctgctggagagaccacctgtcccgctgtgcacctcggggaggccagcctgacacttggaatagcaatccgggaaggaactgttccgaactaggacaga

SEQ ID NO: 266278 - DNA, 120 bp, Artificial Sequence
  ENSG00000126218_16 (sequence is synthesized)
acgccaggccacgaacccagtactgctcctgcacagcagaagcactagcactgaggccgggcggcgaacccggcactgcgcctgcgcagcaaaaggacacgcactgaggccaggccgcga

SEQ ID NO: 266279 - DNA, 120 bp, Artificial Sequence
  ENSG00000126218_17 (sequence is synthesized)
acccagcacggtgcctgcgcagcaggaagaccggcatccacaccggacgacgaacccagcatcgcgcctgcgcagtaggaggagagcaatgccaccaggccgcgattgcgcagccgcagc

SEQ ID NO: 266280 - DNA, 120 bp, Artificial Sequence
  ENSG00000126226_0 (sequence is synthesized)
gtagggggtggcgctctccgttcggcggcgctcccatggcgcacattaccattaaccagtacctgcagcaggtgtacgaagccatcgacagcagagatggagcatcttgtgcagagttgg

SEQ ID NO: 266281 - DNA, 120 bp, Artificial Sequence
  ENSG00000126226_1 (sequence is synthesized)
tgtcttttaaacatcctcatgttgcaaacccacgacttcaaatggcctctccagaggagaagtgtcaacaagtcttggaacccccttatgatgaaatgtttgcagctcatttaaggtgca

SEQ ID NO: 266282 - DNA, 120 bp, Artificial Sequence
  ENSG00000126226_2 (sequence is synthesized)
cttatgcagtggggaatcatgacttcatagaggcatacaagtgccagaccgtgatagtccaatcattcttgcgagcattccaggcccacaaagaagaaaactgggctctgcctgtcatgt

SEQ ID NO: 266283 - DNA, 120 bp, Artificial Sequence
  ENSG00000126226_3 (sequence is synthesized)
atgcagtagcgcttgaccttcgagtgtttgccaataatgcagatcaacagttggtaaagaaaggaaaaagcaaagttggggacatgttggaaaaagcagcagagttactgatgagctgtt

SEQ ID NO: 266284 - DNA, 120 bp, Artificial Sequence
  ENSG00000126226_4 (sequence is synthesized)
tccgggtctgtgccagcgacacccgtgctggtatagaggactctaagaagtggggcatgctgtttctggtgaaccagctgtttaaaatctacttcaagatcaacaaactccatttatgta

SEQ ID NO: 266285 - DNA, 120 bp, Artificial Sequence
  ENSG00000126226_5 (sequence is synthesized)
aacccctaattagagcaattgacagctcaaacctgaaagacgattacagcactgcacagagagtaacatacaaatactacgttggacgcaaggctatgtttgacagcgattttaagcaag

SEQ ID NO: 266286 - DNA, 120 bp, Artificial Sequence
  ENSG00000126226_6 (sequence is synthesized)
ctgaggagtacctgtcatttgcctttgagcattgtcaccgttctagtcagaagaacaaaaggatgattctgatctatttgcttccagtaaaaatgctattgggtcacatgcccactgtgg

SEQ ID NO: 266287 - DNA, 120 bp, Artificial Sequence
  ENSG00000126226_7 (sequence is synthesized)
cgaggccttcttcattcgctgcggaatcttcctcatcctggagaagctgaagatcatcacctacaggaacctctttaagaaagtgtatttgttactgaaaacacaccagctgtctctgga

SEQ ID NO: 266288 - DNA, 120 bp, Artificial Sequence
  ENSG00000126226_8 (sequence is synthesized)
tgcttttctggttgccttgaagttcatgcaggtggaggacgtggacattgacgaagttcagtgtattctggctaacttgatatacatgggacacgtcaaaggctacatatcgcatcagca

SEQ ID NO: 266289 - DNA, 120 bp, Artificial Sequence
  ENSG00000126226_9 (sequence is synthesized)
tcagaagctggtggtcagcaagcagaacccatttcctcccctgtccacggtgtgttgaaagtacacggagccccgaggacgggtgagcagttgtttctttccactttggttgtgctgatg

SEQ ID NO: 266290 - DNA, 120 bp, Artificial Sequence
  ENSG00000126226_10 (sequence is synthesized)
agaccggtccggtactgcaacaaggctccctgaagccggaactcttggaggcgcttttcccagggatgctgaggctgagattttcagcacacccgagttaatctccttcatttgtaacta

SEQ ID NO: 266291 - DNA, 120 bp, Artificial Sequence
  ENSG00000126226_11 (sequence is synthesized)
atttcagcctgatgaaaacctggaattcctttttcacagactcggctggttctggagtctttgtgagacttctttgaaggaggctttgcgtgaaggctgctcggctcacttttcctaagt

SEQ ID NO: 266292 - DNA, 120 bp, Artificial Sequence
  ENSG00000126226_12 (sequence is synthesized)
gtggttcctgaaggctgtctttgtaactttttgtagttctttgtgtaaaaagcgtattctgaatttatacacatggcatgttcttcattatatcttccaggatacatctatttttatata

SEQ ID NO: 266293 - DNA, 120 bp, Artificial Sequence
  ENSG00000126226_13 (sequence is synthesized)
ttaaatttgaatgtgttatcaaaatgcttggttaacttaaggcacctttttaaaagcagaatttaatttgatttaaattttccagattttatagcttgcctgtatggatgctcctcaatt

SEQ ID NO: 266294 - DNA, 120 bp, Artificial Sequence
  ENSG00000126226_14 (sequence is synthesized)
tatgatagggttacatcccaataaacttattttatttgcctttgctttgttggttaaaaaaaaatttcttttaaaaaaccatcttaaattgaaaatacatttaatacacctgctactaaa

SEQ ID NO: 266295 - DNA, 120 bp, Artificial Sequence
  ENSG00000126226_15 (sequence is synthesized)
gtttaacgcccttcactctccgagcacaatgcacacttcatatcgctcggtacatgcgtctgacagatgttgttcaacagcttgtgtacgaagccatcgacagcagagatggagcatctt

SEQ ID NO: 266296 - DNA, 120 bp, Artificial Sequence
  ENSG00000126226_16 (sequence is synthesized)
gggaaggcagttcctgaaagtgggacgtagagctaccatgtgacccagcatttccaccctgaggggacactcagaagacagggcagatccccagtgacatctctttcccgttggggtttg

SEQ ID NO: 266297 - DNA, 120 bp, Artificial Sequence
  ENSG00000126226_17 (sequence is synthesized)
ttcatggcagctgtcccgcatagaacacatgcagtggattacttgggacttgagacccggaaacactgggccagttgctcatttctgcagttagaaaggaatgacagtgttttggaacag

SEQ ID NO: 266298 - DNA, 120 bp, Artificial Sequence
  ENSG00000126226_18 (sequence is synthesized)
ttcatggatatgaaacccaccgtggatatagagggttgattgtatttatttttactcattgtcttcccgctgaactgaactgtgccgctcttggggaagaatgctaatgccaaattaatt

SEQ ID NO: 266299 - DNA, 120 bp, Artificial Sequence
  ENSG00000126226_19 (sequence is synthesized)
gttcggcggcgctcccatggcgcacattaccattaaccagtacctgcagcaggtgggtcctagccggggagcgcgcggcggcgtggttggccctcggcgtgttccgtgtgtcccctcctg

SEQ ID NO: 266300 - DNA, 120 bp, Artificial Sequence
  ENSG00000126226_20 (sequence is synthesized)
ccttggaccctcaggccttttcctttcccgcctcgccacccttcttccgttcgggtccccggcgggcagccgcgcgagccgaacagcggcggccgggactcgggaaggcggcccgagttc

SEQ ID NO: 266301 - DNA, 120 bp, Artificial Sequence
  ENSG00000126226_21 (sequence is synthesized)
tcccctgcagggccgccgtgggggccgggcggtgtccgtggatcgcggagtcgtcgcggtgtaagtagacgcggcggtcccaggtcgctgccctcacttgctggcacgtgtggccgcgct

SEQ ID NO: 266302 - DNA, 120 bp, Artificial Sequence
  ENSG00000126226_22 (sequence is synthesized)
cccaggcggtccgaagggcctgcgggccacgccgagggcccgctgtgggcggtgctgtgtcggatggacgctgtttcccagcaggatgcgggatgaattcggggactccaggaggcgatg

SEQ ID NO: 266303 - DNA, 120 bp, Artificial Sequence
  ENSG00000126226_23 (sequence is synthesized)
ttttgtccttttacggcgtcttcccgtcattgtcatggtgattgtcagccgctgtggcactggtgggagtgtcacggagcatgcaaatgaggttgtaatgaagttggaggccctgcaaag

SEQ ID NO: 266304 - DNA, 120 bp, Artificial Sequence
  ENSG00000126226_24 (sequence is synthesized)
gccaggtggacttccacttagcatcctgctggtcttagctggtttaaccaagaggggagcctctgacctcaggcatcctattgctgaagataggcagagtttgagttgtgcaactgttca

SEQ ID NO: 266305 - DNA, 120 bp, Artificial Sequence
  ENSG00000126226_25 (sequence is synthesized)
gccaagcctacaagatgtatagtgctgtgggggtaacatggcctccctacccagcctcgcttcagaactttcgtaccaaggctggactgtagaaaagtccttcctatgccatggcacttt

SEQ ID NO: 266306 - DNA, 120 bp, Artificial Sequence
  ENSG00000126226_26 (sequence is synthesized)
cccactgaggcctcccatgggtgccgtttcctttgctggaaggttctcctcgactcctggcagtctatactcatttaaaggtttccgccttctctaaagcctctcactgctggacttcac

SEQ ID NO: 266307 - DNA, 120 bp, Artificial Sequence
  ENSG00000126226_27 (sequence is synthesized)
ggtggatcagatttcccttttataaacattcatagcagactgtacatttctttcactgcgtttaccaaacgatttgatggcgaagtgcgtcagggcgtgggccttctccatcactagcgt

SEQ ID NO: 266308 - DNA, 120 bp, Artificial Sequence
  ENSG00000126226_28 (sequence is synthesized)
tccttgcaccccaggagctcaatccgtgtttcctaaatgaatacttgacatttcgcttgatcgtatatttttgcacagcagtgatcttcacgacctttgattaggcagtggcttctcaga

SEQ ID NO: 266309 - DNA, 120 bp, Artificial Sequence
  ENSG00000126226_29 (sequence is synthesized)
tacgacaacaaaagcataagcaaccaaaggaaaaaattaattggacttcatcaaaattaaaaactttagacttcaaaggacattctcaaaaaagtaaaaaacaaccataacctagcaaat

SEQ ID NO: 266310 - DNA, 120 bp, Artificial Sequence
  ENSG00000126226_30 (sequence is synthesized)
aatacatctgataagggcctaatatccagaatatataaagaattattacaattcaacagtaaaaagacaatccaattcaaattctttaaaatgtttaaagaatttgaaaaatcttccaaa

SEQ ID NO: 266311 - DNA, 120 bp, Artificial Sequence
  ENSG00000126226_31 (sequence is synthesized)
caaaatacgcaagtgaccagtaagtgcatgaaaagatgctcaaggtcattaatcaccagtgacttagtcaccaatgactaatgcatcagtcacttgaaatgcacatcagaacctctgaga

SEQ ID NO: 266312 - DNA, 120 bp, Artificial Sequence
  ENSG00000126226_32 (sequence is synthesized)
gctgccaggccacacccagtgggatgactgtaatcagaaagacgggcggcgccagtgaggatgcagggagactggagcctcgtacacatcgccaggggaacaaaaacagtgcagctgctg

SEQ ID NO: 266313 - DNA, 120 bp, Artificial Sequence
  ENSG00000126226_33 (sequence is synthesized)
ggtttttccatagctctttgaagtcatagaacagtattattatttgtctccgttttcagatgaggaaaacgagaccttgagagacttttgtttgaggtcatgcacgtagggaatgataaa

SEQ ID NO: 266314 - DNA, 120 bp, Artificial Sequence
  ENSG00000126226_34 (sequence is synthesized)
agtcatagacctgcttagagcagctcacaggcagttataaaacagggtttgatattttaaaattgtatttttacattattttaagtgtttctatatggacacattttggtctttaagagt

SEQ ID NO: 266315 - DNA, 120 bp, Artificial Sequence
  ENSG00000126226_35 (sequence is synthesized)
aattttatgttctgtggcttgtaaaccacctgcttgttttctgtactgggcacttttgtatttttgtgccttgactttgagtgattttatcattttgttaacaccacagagtgtacttcg

SEQ ID NO: 266316 - DNA, 120 bp, Artificial Sequence
  ENSG00000126226_36 (sequence is synthesized)
taaaccgagatggcgtggcctgctacacacccccgctgtgtggcgcagcctgtgggtcctaggctgcgaggagcaagagctgcactaaatgctgtaggcagctggaacacagtgggaatt

SEQ ID NO: 266317 - DNA, 120 bp, Artificial Sequence
  ENSG00000126226_37 (sequence is synthesized)
atttgtgtgtctaaacagatctaaacacagaaaagatgcagtaaaaatacagtgtgagactccgtagggccccatctcacatgtggtcaagtgtgagactccgtagggccccatctcaca

SEQ ID NO: 266318 - DNA, 120 bp, Artificial Sequence
  ENSG00000126226_38 (sequence is synthesized)
tggtcaagtgtgagactccgtagggccccatctcacatgtggtcaagtgtgagactccgtagggccccatctcacatgtggtcaagtgtgagactctgtagggccccatctcacatgtgg

SEQ ID NO: 266319 - DNA, 120 bp, Artificial Sequence
  ENSG00000126226_39 (sequence is synthesized)
tcatctgtagttgaccgaaatgttgtgtaacatgtgactgtttccaggttaattgcagacagtggcacaccctcccctaggttcttcagtttctgttttttcagtcttttgaggtaaaat

SEQ ID NO: 266320 - DNA, 120 bp, Artificial Sequence
  ENSG00000126226_40 (sequence is synthesized)
ttgcatgcagtgaactacctacagtattatctgtctgcttgctgctgaggtataggacatgattgccaccccagaaacttccctcatccctcatgtggggcaggccctttcagctgtctg

SEQ ID NO: 266321 - DNA, 120 bp, Artificial Sequence
  ENSG00000126226_41 (sequence is synthesized)
gatttgttccactgtgggttgcttcctgcctgttcggtgacttcatgtaaatggaccaccacagtgtgtactttttgtgtctgccttggtgggactcatcctctttgtgtgttttactgg

SEQ ID NO: 266322 - DNA, 87 bp, Artificial Sequence
  ENSG00000126226_42 (sequence is synthesized)
gtatttttccagacggagtcacgctgtgtcacccaggctgaagtgcattggcccgggtttgagtgattctcctgcctcagcctcctg

SEQ ID NO: 266323 - DNA, 120 bp, Artificial Sequence
  ENSG00000126226_43 (sequence is synthesized)
ggattacaggcacacaccaccatgccctatttttccatttttcaaaaacggtttataacaattaacttttacgcattgttgctgcaaatgaggcagtttttagctggtgccgcggaggaa

SEQ ID NO: 266324 - DNA, 120 bp, Artificial Sequence
  ENSG00000126226_44 (sequence is synthesized)
tgaggcagtttttagctggtgccgcggaggaaggatgttactcaagtagttaattgggattttcctggtttgttttctcttttatttttacccatcaggtaagacatcttttttcataat

SEQ ID NO: 266325 - DNA, 120 bp, Artificial Sequence
  ENSG00000126226_45 (sequence is synthesized)
gttattttgtttgatgaatatgacttgatatgaataagttgatatgaatatgacttgagctttgggacttacctcaagatattaatttgtttaggcagtttattttgtgatttataaata

SEQ ID NO: 266326 - DNA, 120 bp, Artificial Sequence
  ENSG00000126226_46 (sequence is synthesized)
cattgcagcgttcaccctttctggcctgtgtttattgttgacacatatttcatttctacacatgctataatcccacaaccattgttatttttgctttaaaaagttgattgttttgtaaag

SEQ ID NO: 266327 - DNA, 120 bp, Artificial Sequence
  ENSG00000126226_47 (sequence is synthesized)
gagagtagtgaccatctgttacattttgattgttctgtcttctttcaaagtaggggaaaatgaattttcccctgtgtggcattcagtgtattgttgtaggttctattcgaacagaatatt

SEQ ID NO: 266328 - DNA, 120 bp, Artificial Sequence
  ENSG00000126231_0 (sequence is synthesized)
ggtgggaatggcaggctgcgtcccactgctccagggcctggtcctggtcctcgccctccatcgtgtggagccctcagtatttctcccggcctccaaagcaaacgacgttctggtgaggtg

SEQ ID NO: 266329 - DNA, 120 bp, Artificial Sequence
  ENSG00000126231_1 (sequence is synthesized)
gaagcgtgcgggctcctatcttctggaagaactcttcgagggaaacttggaaaaagaatgttatgaagaaatctgtgtctatgaagaagcaagagaagtgtttgaaaatgaagtagtcac

SEQ ID NO: 266330 - DNA, 120 bp, Artificial Sequence
  ENSG00000126231_2 (sequence is synthesized)
tgatgaattctggagacgatataagggcggctccccgtgcatctcccagccctgcctccacaacggctcttgccaggacagcatctggggctacacctgcacctgctcccccggctatga

SEQ ID NO: 266331 - DNA, 120 bp, Artificial Sequence
  ENSG00000126231_3 (sequence is synthesized)
gggcagcaactgcgagctggctaaaaatgaatgtcacccagagcggactgatgggtgtcaacacttctgcctcccaggacaggaatcctacacatgcagctgtgctcagggctacaggct

SEQ ID NO: 266332 - DNA, 120 bp, Artificial Sequence
  ENSG00000126231_4 (sequence is synthesized)
tggtgaggaccacaaacagtgtgtgccccacgaccagtgtgcctgcggggtgctgacctctgagaagcgtgcaccggatctacaggacctcccgtggcaggtaaagttaacaaattccga

SEQ ID NO: 266333 - DNA, 120 bp, Artificial Sequence
  ENSG00000126231_5 (sequence is synthesized)
aggaaaagacttctgtggtggtgttataatacgggaaaattttgtactgacaacagcaaaatgttcactgttacacaggaatattactgtaaaaacatattttaacagaacgagccaaga

SEQ ID NO: 266334 - DNA, 120 bp, Artificial Sequence
  ENSG00000126231_6 (sequence is synthesized)
cgcggacgcgggggagaatgacctgtcactgctggagctggagtggcccatccagtgcccaggtgcggggctccccgtgtgcacccctgagaaagacttcgctgagcacctcctcatccc

SEQ ID NO: 266335 - DNA, 120 bp, Artificial Sequence
  ENSG00000126231_7 (sequence is synthesized)
acgcaccaggggcctcctcagcggctgggcacgcaatggcactgacctgggcaactcgctgaccacgcggcctgtcacacttgtggagggggaggagtgcgggcaggtcctgaatgtgac

SEQ ID NO: 266336 - DNA, 120 bp, Artificial Sequence
  ENSG00000126231_8 (sequence is synthesized)
tgtcaccaccaggacctactgtgagagaagcagcgtggcggccatgcactggatggatggaagtgtggtcaccagagaacacagaggctcctggtttctcacgggggtcctgggctcgca

SEQ ID NO: 266337 - DNA, 120 bp, Artificial Sequence
  ENSG00000126231_9 (sequence is synthesized)
gccagtaggagggcaggctcacatggtccttgtcaccaaggtctccaggtactcactctggtttaaacagatcatgaactaactgaaactcagctagccagaatgaacaacacaaccgga

SEQ ID NO: 266338 - DNA, 120 bp, Artificial Sequence
  ENSG00000126231_10 (sequence is synthesized)
agcgggattccaagctggcactgccactgtggagggcgctgaaacttcatcacacactgagaggccgtcacagccccagaccacccgcttggcccacgcagcagcagagccgccgtttgc

SEQ ID NO: 266339 - DNA, 120 bp, Artificial Sequence
  ENSG00000126231_11 (sequence is synthesized)
tgggttgtttaccgagcactgtgacctttctttccctggaactctttatctcaatagagaccttaaaagaaaacatgagatacgttaaataataaaataagataatctgtcagtcataaa

SEQ ID NO: 266340 - DNA, 120 bp, Artificial Sequence
  ENSG00000126231_12 (sequence is synthesized)
gctccgggtgggaatggcaggctgcgtcccactgctccagggcctggtcctggtcctcgccctccatcgtgtggagccctcagccacttcactgaaggaacgacatggactccattctga

SEQ ID NO: 266341 - DNA, 120 bp, Artificial Sequence
  ENSG00000126231_13 (sequence is synthesized)
gcctcaggggccccccttgtaaagttaacaaattccgaaggaaaagacttctgtggtggtgttataatacgggaaaattttgtactgacaacagcaaaatgttcactgttacacaggaat

SEQ ID NO: 266342 - DNA, 120 bp, Artificial Sequence
  ENSG00000126233_0 (sequence is synthesized)
atcacttctgagcacggagcaatggcctctcgctgggctgtgcagctgctgctcgtggcagcctggagcatgggctgtggtgaggccctcaagtgctacacctgcaaggagcccatgacc

SEQ ID NO: 266343 - DNA, 120 bp, Artificial Sequence
  ENSG00000126233_1 (sequence is synthesized)
agtgcttcctgcaggaccattacccgctgcaagccagaggacacagcctgcatgaccacgctggtgacggtggaggcagagtaccccttcaaccagagccccgtggtgacccgctcctgc

SEQ ID NO: 266344 - DNA, 120 bp, Artificial Sequence
  ENSG00000126233_2 (sequence is synthesized)
cctgatcttctgctgcttccgagacctctgcaactcggaactctgaacccagggcggcagggcggaaggtgctcctcaggcacctcctctctgacggggcctggctccacctgtgatcac

SEQ ID NO: 266345 - DNA, 120 bp, Artificial Sequence
  ENSG00000126233_3 (sequence is synthesized)
ctccccctgcttcctgctgctgtggcacagctcactcatggggtctgaggggagagaagcacaccaggggcgccctctgccttccataccccacgcttataaaacataactaagccaaga

SEQ ID NO: 266346 - DNA, 120 bp, Artificial Sequence
  ENSG00000126243_0 (sequence is synthesized)
ccaaggggcctgaacccgagtttgggcctgaagtccttgctgcagacctgagtgcttaaatctggggcttgagacctcccaatcttgactcagcaccccaatatctgaatgcagaacccc

SEQ ID NO: 266347 - DNA, 120 bp, Artificial Sequence
  ENSG00000126243_1 (sequence is synthesized)
gggatcggatctcagactctaaaccccaccgtttggctgcttagcatcccaagactggacctgggagaccctgaccctgaacaacccaaactggacccgtaaaactggaccctagaggcc

SEQ ID NO: 266348 - DNA, 120 bp, Artificial Sequence
  ENSG00000126243_2 (sequence is synthesized)
caatatttaggggtctggaaccccgagtattaaggtctggagactccgttgccacagatttgagccgagtcaggacacagtccctctacagaagccttggggacaggaaaagcatgacca

SEQ ID NO: 266349 - DNA, 120 bp, Artificial Sequence
  ENSG00000126243_3 (sequence is synthesized)
gatgctccctccagagccctgacctctgactcccctggagctaggactctgctccctggggctgcttctagctcaggacacccctgcccgcgatggccatcctcccgttgctcctgtgcc

SEQ ID NO: 266350 - DNA, 120 bp, Artificial Sequence
  ENSG00000126243_4 (sequence is synthesized)
tgctgccgctggcccctgcctcatccccaccccagtcagccacacccagcccatgtccccgccgctgccgctgccagacacagtcgctgcccctaagcgtgctgtgcccaggggcaggcc

SEQ ID NO: 266351 - DNA, 120 bp, Artificial Sequence
  ENSG00000126243_5 (sequence is synthesized)
tcctgttcgtgccaccctcgctggaccgccgggcagccgagctgcggctggcagacaacttcatcgcctccgtgcgccgccgcgacctggccaacatgacaggcctgctgcatctgagcc

SEQ ID NO: 266352 - DNA, 120 bp, Artificial Sequence
  ENSG00000126243_6 (sequence is synthesized)
tgtcgcggaacaccatccgccacgtggctgccggcgccttcgccgacctgcgggccctgcgtgccctgcacctggatggcaaccggctgacctcactgggcgagggccagctgcgcggcc

SEQ ID NO: 266353 - DNA, 120 bp, Artificial Sequence
  ENSG00000126243_7 (sequence is synthesized)
tggtcaacttgcgccacctcatcctcagcaacaaccagctggcagcgctggcggccggcgccctggatgattgtgccgagacactggaggacctcgacctctcctacaacaacctcgagc

SEQ ID NO: 266354 - DNA, 120 bp, Artificial Sequence
  ENSG00000126243_8 (sequence is synthesized)
agctgccctgggaggccctgggccgcctgggcaacgtcaacacgttgggcctcgaccacaacctgctggcttctgtgcccgccggcgctttttcccgcctgcacaagctggcccggctgg

SEQ ID NO: 266355 - DNA, 120 bp, Artificial Sequence
  ENSG00000126243_9 (sequence is synthesized)
acatgacctccaaccgcctgaccacaatcccacccgacccactcttctcccgcctgcccctgctcgccaggccccggggctcgcccgcctctgccctggtgctggcctttggcgggaacc

SEQ ID NO: 266356 - DNA, 120 bp, Artificial Sequence
  ENSG00000126243_10 (sequence is synthesized)
gaggaggagtttgtctgcgagccgcccgtggtgactcaccgctcaccacctctggctgtgcccgcaggtcggccggctgccctgcgctgccgggcagtgggggacccagagccccgtgtg

SEQ ID NO: 266357 - DNA, 120 bp, Artificial Sequence
  ENSG00000126243_11 (sequence is synthesized)
cgttgggtgtcaccccagggccggctgctaggcaactcaagccgtgcccgcgccttccccaatgggacgctggagctgctggtcaccgagccgggtgatggtggcatcttcacctgcatt

SEQ ID NO: 266358 - DNA, 120 bp, Artificial Sequence
  ENSG00000126243_12 (sequence is synthesized)
gcggccaatgcagctggcgaggccacagctgctgtggagctgactgtgggtcccccaccacctcctcagctagccaacagcaccagctgtgaccccccgcgggacggggatcctgatgct

SEQ ID NO: 266359 - DNA, 120 bp, Artificial Sequence
  ENSG00000126243_13 (sequence is synthesized)
ctcaccccaccctccgctgcctctgcttctgccaaggtggccgacactgggccccctaccgaccgtggcgtccaggtgactgagcacggggccacagctgctcttgtccagtggccggat

SEQ ID NO: 266360 - DNA, 120 bp, Artificial Sequence
  ENSG00000126243_14 (sequence is synthesized)
cagcggcctatcccgggcatccgcatgtaccagatccagtacaacagctcggctgatgacatcctcgtctacaggatgatcccggcggagagccgctcgttcctgctgacggacctggcg

SEQ ID NO: 266361 - DNA, 120 bp, Artificial Sequence
  ENSG00000126243_15 (sequence is synthesized)
tcaggccggacctacgatctgtgcgtgctcgccgtgtatgaggacagcgccacggggctcacggccacgcggcctgtgggctgcgcccgcttctccaccgaacctgcgctgcggccatgc

SEQ ID NO: 266362 - DNA, 120 bp, Artificial Sequence
  ENSG00000126243_16 (sequence is synthesized)
ggggcgccgcacgctcccttcctgggcggcacgatgatcatcgcgctgggcggcgtcatcgtagcctcggtactggtcttcatcttcgtgctgctaatgcgctacaaggtgcacggcggc

SEQ ID NO: 266363 - DNA, 120 bp, Artificial Sequence
  ENSG00000126243_17 (sequence is synthesized)
cggcaaggccaagattcccgcgcctgttagcagcgtttgctcccagaccaacggcgccctgggccccacgcccacgcccgccccgcccgccccggagcccgcggcgctcagggcccacac

SEQ ID NO: 266364 - DNA, 120 bp, Artificial Sequence
  ENSG00000126243_18 (sequence is synthesized)
gcccacaccgtggtccagctggactgcgagccctgggggcccggccacgaacctgtgggaccctagccaggcgcccccccctctaagggtcctctggccccacggacagcaggacccgga

SEQ ID NO: 266365 - DNA, 120 bp, Artificial Sequence
  ENSG00000126243_19 (sequence is synthesized)
caccctgtgggacctggcctcaaactcaccaaatcgctcatggtttttaaaactctgatggggagggtgtcggggacaccggggcaaaacaagaaagtcctatttttccaagcttgggcg

SEQ ID NO: 266366 - DNA, 89 bp, Artificial Sequence
  ENSG00000126243_20 (sequence is synthesized)
ctccatgttggccaggctggtctccaacgcctgatctcaaaagatccgcccgccttggcctcccaacgagcctgtcagtgtgtcttgag

SEQ ID NO: 266367 - DNA, 120 bp, Artificial Sequence
  ENSG00000126243_21 (sequence is synthesized)
gtctttccctaatcccagatggcacaagttttccctcttgcaggcagagaaaggagccttgggaaggagcccctctggcctgaaagatcaagcctattgctgggcatggccagattgaat

SEQ ID NO: 266368 - DNA, 120 bp, Artificial Sequence
  ENSG00000126243_22 (sequence is synthesized)
cgggaattccggaaacccgagcctggaaccctgatctgggaccagcaccccgagatccggccgtggaaccccaagatctggagcctgaaccccagtatatggggctggaatctcaacatc

SEQ ID NO: 266369 - DNA, 120 bp, Artificial Sequence
  ENSG00000126243_23 (sequence is synthesized)
ggtcactgggacctcaatatttggagccggaaccccacaatttggaacacagaccccaatatttggagcagaaccccaagatttgacatctaaaacctcaagcctggagctgaactctga

SEQ ID NO: 266370 - DNA, 120 bp, Artificial Sequence
  ENSG00000126243_24 (sequence is synthesized)
attctgggcctgggaccttgaaatctgggactggatttccagtactgtaccctggaacccactcttggggacctgaaccctgggattcaggcctcaaattccaagatctggactgtggga

SEQ ID NO: 266371 - DNA, 120 bp, Artificial Sequence
  ENSG00000126243_25 (sequence is synthesized)
cgcccagttcagtctgaggaccccggaggaggctgaggatggcgatccattcagacaatagatgttccctgcgtgtcggctctgagcatgccctgggttgggggatgctgtggtgatcca

SEQ ID NO: 266372 - DNA, 120 bp, Artificial Sequence
  ENSG00000126243_26 (sequence is synthesized)
gatagccctgagccctgcccgcaggggcctaaagtcaaatgggagacagacacatccccagacagtgatagcacagagtgaccagggatgtggggatgagggaagcctgggggattgtga

SEQ ID NO: 266373 - DNA, 120 bp, Artificial Sequence
  ENSG00000126243_27 (sequence is synthesized)
cagtccagaagaggtacccttgctcagccccaggtgtggtcagggagggcttcctggaggaggacacatgtgatctgagaatgacatatgaaggagataactgggcaaagagcagaagga

SEQ ID NO: 266374 - DNA, 120 bp, Artificial Sequence
  ENSG00000126243_28 (sequence is synthesized)
aagctctttcaggcagagggcacagcacaagcaaggtggtggtgtgccctgggcactgggggtgctatggtagaggtgaggcaggagggttgagcagggtctaggacctccaggctgagg

SEQ ID NO: 266375 - DNA, 120 bp, Artificial Sequence
  ENSG00000126243_29 (sequence is synthesized)
acaagttttccctcttgcaggcagagaaaggagccttgggaaggagcccctctggcctgaaagatcaagcctattgctgggcatggccaggcctcgccccacccggccctggggctgccc

SEQ ID NO: 266376 - DNA, 120 bp, Artificial Sequence
  ENSG00000126243_30 (sequence is synthesized)
cagccggtcccctccctcccagtcagcctccgccgcagcccaggaagccagccgggacgccgccgccccggaccccgcgccctaacctccacctcgggggcctgcacccccagattgaat

SEQ ID NO: 266377 - DNA, 120 bp, Artificial Sequence
  ENSG00000126246_0 (sequence is synthesized)
gccacaacttcagctgaggaacttggcacggccagcttgggacccaggaccctaacgcagaggcgctgtgtttggaagtcccgctatcacggccccccagatggggcctggacgatgcct

SEQ ID NO: 266378 - DNA, 120 bp, Artificial Sequence
  ENSG00000126246_1 (sequence is synthesized)
cctgacggccttgttgcttctggccctggcgccaccgccggaagcctcccagtactgcggccgccttgaatactggaacccagacaacaagtgctgcagcagctgcctgcaacgcttcgg

SEQ ID NO: 266379 - DNA, 120 bp, Artificial Sequence
  ENSG00000126246_2 (sequence is synthesized)
gccgcccccctgcccggactatgagttccgggaaaactgcggactcaatgaccacggcgatttcgtaacgcccccgttccgaaagtgttcttctgggcagtgcaaccccgacggcgcgga

SEQ ID NO: 266380 - DNA, 120 bp, Artificial Sequence
  ENSG00000126246_3 (sequence is synthesized)
gctatgtagcccctgcggcggcggagccgtgacccctactcccgccgcgggcgggggcagaaccccgtggcgctgcagagagaggccggtccctgccaaggggcactgccccctcacacc

SEQ ID NO: 266381 - DNA, 120 bp, Artificial Sequence
  ENSG00000126246_4 (sequence is synthesized)
tggaaacccaggcgcccctagctcccaggagcgcagctcaccagcaagttccattgcctggaggacccctgagcctgtccctcagcaggcctggccgaatttccttccgctcgtggtgct

SEQ ID NO: 266382 - DNA, 120 bp, Artificial Sequence
  ENSG00000126246_5 (sequence is synthesized)
ggtcctgctcctgaccttggcggtgatagcgatcctcctgtttattctgctctggcatctctgctggcccaaggagaaagccgacccctatccctatcctggcttggtctgcggagtccc

SEQ ID NO: 266383 - DNA, 120 bp, Artificial Sequence
  ENSG00000126246_6 (sequence is synthesized)
actcctgagcagggaactgtccagtctggcgtcacaacccctgtctcgcctcctggatgagctggaggtgctggaagagctgattgtactgctggaccctgagcctgggccaggtggggg

SEQ ID NO: 266384 - DNA, 120 bp, Artificial Sequence
  ENSG00000126246_7 (sequence is synthesized)
tatggcccatggcactactcgacacctggccgcaagatatgggctgcctgctgcctggtccacctttgcctattcgctgaggccgagtcgctcgccgctgcgggctctgattgagatggt

SEQ ID NO: 266385 - DNA, 120 bp, Artificial Sequence
  ENSG00000126246_8 (sequence is synthesized)
ggtggcaagggagccctctgcctccctgggccagcttggcacacacctcgcccagctagggcgggcagatgcattgcgggtgctgtccaagcttggctcatctggggtttgctgggctta

SEQ ID NO: 266386 - DNA, 120 bp, Artificial Sequence
  ENSG00000126246_9 (sequence is synthesized)
acacccaataaagaactttgctgactactaagcccagtatacaattagcactgaagtacttcttgaagtacaatcctaattgggcaaagacccaacagatagcctcactgctcttcgccc

SEQ ID NO: 266387 - DNA, 120 bp, Artificial Sequence
  ENSG00000126246_10 (sequence is synthesized)
tagaagggcctattccaacatacacacagggccacatgtgggagggctgaccccaggtgcctctgggccaccagaatcccctctgggaaacaaccctgctacagacagttgctgtgttgt

SEQ ID NO: 266388 - DNA, 120 bp, Artificial Sequence
  ENSG00000126246_11 (sequence is synthesized)
gttgttctgaagccgtaacagaccccatgactgacttctaattctgaatgatggcctcacctacctgttgaggctgatgaacttccttgggtcatgatgggtgggtgtgtagaagtgggg

SEQ ID NO: 266389 - DNA, 120 bp, Artificial Sequence
  ENSG00000126246_12 (sequence is synthesized)
ttcctacctgcccccacagcctacaaatgggaagaccacctctccaaacattgacagactttattgtgggggggttcccacctgggaccccacctcttaaataaaaaagtgcatagaaaa

SEQ ID NO: 266390 - DNA, 120 bp, Artificial Sequence
  ENSG00000126246_13 (sequence is synthesized)
gttgggggatgagggctcgggggtagattcccggcttccgaagaggcgtgagaattctgttcccccacatcaccgcgtcctttcttctgcccgatttccccggaaagtgtagcagaggcg

SEQ ID NO: 266391 - DNA, 120 bp, Artificial Sequence
  ENSG00000126246_14 (sequence is synthesized)
taattctccacaataaccctatgagacagcagaggcgctgtgtttggaagtcccgctatcacggccccccagatggggcctggacgatgcctcctgacggccttgttgcttctggccctg

SEQ ID NO: 266392 - DNA, 120 bp, Artificial Sequence
  ENSG00000126246_15 (sequence is synthesized)
gatagggagcggggaaggggcgaggtctgtgggctacgggccagagaggcttgcttaggggtctaagcggtgggccttatgcagatcagacagggatggcaggcagagcctgtgcagata

SEQ ID NO: 266393 - DNA, 120 bp, Artificial Sequence
  ENSG00000126246_16 (sequence is synthesized)
gtgcgggctaccgtagggcaacagcgaatggatatggctggagaggcgggataggggccgcgtggaaagggtgggctttatgtagagaagccgggagtgggcggagcttcgtgcggagca

SEQ ID NO: 266394 - DNA, 120 bp, Artificial Sequence
  ENSG00000126247_0 (sequence is synthesized)
gagtcaccggccccgccctccggagccggacgctgcgggaggcccgggagcggcagtggaaccgactcccagaactccggacgtgtgcggcgcagtgagtcgcagccatgttcctggtta

SEQ ID NO: 266395 - DNA, 120 bp, Artificial Sequence
  ENSG00000126247_1 (sequence is synthesized)
cctggttaactcgttcttgaagggcggcggcggcggcggcgggggaggcgggggcctgggtgggggcctgggaaatgtgcttggaggcctgatcagcggggccgggggcggcggcggcgg

SEQ ID NO: 266396 - DNA, 120 bp, Artificial Sequence
  ENSG00000126247_2 (sequence is synthesized)
gcggcggcggtggtggaggcggcggtggcggtggaacggccatgcgcatcctaggcggagtcatcagcgccatcagcgaggcggctgcgcagtacaacccggagcccccgcccccacgca

SEQ ID NO: 266397 - DNA, 120 bp, Artificial Sequence
  ENSG00000126247_3 (sequence is synthesized)
cacattactccaacattgaggccaacgagagtgaggaggtccggcagttccggagactctttgcccagctggctggagatgacatggaggtcagcgccacagaactcatgaacattctca

SEQ ID NO: 266398 - DNA, 120 bp, Artificial Sequence
  ENSG00000126247_4 (sequence is synthesized)
ataaggttgtgacacgacaccctgatctgaagactgatggttttggcattgacacatgtcgcagcatggtggccgtgatggatagcgacaccacaggcaagctgggctttgaggaattca

SEQ ID NO: 266399 - DNA, 120 bp, Artificial Sequence
  ENSG00000126247_5 (sequence is synthesized)
cagggttccacctgaatgagcatctctataacatgatcatccgacgctactcagatgaaagtgggaacatggattttgacaacttcatcagctgcttggtcaggctggacgccatgttcc

SEQ ID NO: 266400 - DNA, 120 bp, Artificial Sequence
  ENSG00000126247_6 (sequence is synthesized)
gtgccttcaaatctcttgacaaagatggcactggacaaatccaggtgaacatccaggagtggctgcagctgactatgtattcctgaactggagccccagacccgccccctcactgccttg

SEQ ID NO: 266401 - DNA, 120 bp, Artificial Sequence
  ENSG00000126247_7 (sequence is synthesized)
ctataggagtcacctggagcctcggtctctcccagggccgatcctgtctgcagtcacatctttgtggggcctgctgacccacaagcttttgttctctcagtacttgttacccagcttctc

SEQ ID NO: 266402 - DNA, 120 bp, Artificial Sequence
  ENSG00000126247_8 (sequence is synthesized)
aacatccagggcccaatttgccctgcctggagttccccctggctctaggacactctaacaagctctgtccacgggtctccccattcccaccaggccctgcacacacccactccgtaacct

SEQ ID NO: 266403 - DNA, 120 bp, Artificial Sequence
  ENSG00000126247_9 (sequence is synthesized)
ctcccctgtacctgtgccaagcctagcacttgtgatgcctccatgccccgagggccctctctcagttctgggaggatgactccagtccctgcacgccctggcacacccttcacggttgct

SEQ ID NO: 266404 - DNA, 120 bp, Artificial Sequence
  ENSG00000126247_10 (sequence is synthesized)
acccaggcggccaagctccagaccgtgccagacccaggtgccccagtgcctttgtctatattctgctcccagcctgccaggcccaggaggaaataaacatgccccagttgctgatctcta

SEQ ID NO: 266405 - DNA, 120 bp, Artificial Sequence
  ENSG00000126247_11 (sequence is synthesized)
ccgactcccagaactccggacgtgtgcggcggtaagcgcccggcccgtaccccctccgcaccccgcaactccgactttggcggcccccagacccggcgaaaccgtgaagtctcggcctca

SEQ ID NO: 266406 - DNA, 120 bp, Artificial Sequence
  ENSG00000126247_12 (sequence is synthesized)
ccaggaggtaaggacccccatattggggtatgggtgcctgggaggaccccacccctcagcccttcataccagctctgagctgcagtccccttcctcctattttgccagccgtccctgggt

SEQ ID NO: 266407 - DNA, 120 bp, Artificial Sequence
  ENSG00000126247_13 (sequence is synthesized)
gcatcctaggcggagtcatcagcgccatcagcgaggcggctgcgcagtacaacccggagcccccgcccccacgcacacattactccaacattgaggacactctaacaagctctgtccacg

SEQ ID NO: 266408 - DNA, 120 bp, Artificial Sequence
  ENSG00000126247_14 (sequence is synthesized)
tttgctccgcgcccatgacctgccaaggacctctacattcaggctgggctctggatctcacattctagcgcccagacatgtcgggaacgccttacgccaacttggggtccccaccaagag

SEQ ID NO: 266409 - DNA, 120 bp, Artificial Sequence
  ENSG00000126247_15 (sequence is synthesized)
aacccccaccagatctgcaccctccccttcacgcgtgcacccagtccaggctccctcaagccccacgggtgccttttagacctgaggaggttgcaaacctgatcccccatacctgcccca

SEQ ID NO: 266410 - DNA, 120 bp, Artificial Sequence
  ENSG00000126247_16 (sequence is synthesized)
tttacggaaggggcttgacttatgagtgtggtcagaggttttaggtgggttaatgaggaggtgagcccaggaggaagcaagacctaatgggcgaggcggctgcgcagtacaacccggagc

SEQ ID NO: 266411 - DNA, 120 bp, Artificial Sequence
  ENSG00000126247_17 (sequence is synthesized)
tggccgtgatggatctgtcactcttcttaacaccctcccaccagagcgacaccacaggcaagctgggctttgaggaattcaagtacttgtggaacaacatcaaaaggtggcaggccatat

SEQ ID NO: 266412 - DNA, 120 bp, Artificial Sequence
  ENSG00000126247_18 (sequence is synthesized)
cgggagcggcagtggaaccgactcccagaactccggacgtgtgcggcggcccataggtttcagagataccctgtgaattcttccttggggtgtcctgaaccgcgatcgtagatctgtgcc

SEQ ID NO: 266413 - DNA, 85 bp, Artificial Sequence
  ENSG00000126247_19 (sequence is synthesized)
gcctgcttcggcctcccaaagtgctggattgcaggcgggagccaccgtgcgtggcctattaagaattttctgaatgagcaattaa

SEQ ID NO: 266414 - DNA, 120 bp, Artificial Sequence
  ENSG00000126247_20 (sequence is synthesized)
cgtgcgtggcctattaagaattttctgaatgagcaattaacaactcttcaggcaaggaatttgtactttagagtagttgaatataattcctcatggttatgtttaaagagaatccctatt

SEQ ID NO: 266415 - DNA, 120 bp, Artificial Sequence
  ENSG00000126247_21 (sequence is synthesized)
aaaatagaataggattaacctggaggctaacctgggtacatgaattaggccggggaggcctggtttgagagttctgctgtaagggggtggaccccagtgaggcggatatcagtcattggg

SEQ ID NO: 266416 - DNA, 120 bp, Artificial Sequence
  ENSG00000126247_22 (sequence is synthesized)
ggcggtgcttgatatgggagtagtctgattgtgtgggaccaggacaatgtggtcctgaggggactgatgtggagttttggcgggtggggcttatgggtctgggctcagcctgcattggct

SEQ ID NO: 266417 - DNA, 120 bp, Artificial Sequence
  ENSG00000126249_0 (sequence is synthesized)
agtttgcgttttcacctggtcgcccggcggccatggcggccgttctgaagccggtgctgctgggccttcgagatgcgccggtgcacggcagccccacagggccgggtgcctggactgcta

SEQ ID NO: 266418 - DNA, 120 bp, Artificial Sequence
  ENSG00000126249_1 (sequence is synthesized)
gcaagctgggcggcattccggatgctctgcccaccgtggctgcgcccaggcccgtgtgtcagcgctgcgggcagccgctcgctctggtcgtgcaggtgtattgcccgctggaaggctccc

SEQ ID NO: 266419 - DNA, 120 bp, Artificial Sequence
  ENSG00000126249_2 (sequence is synthesized)
cgtttcaccgtctgctgcacgtgttcgcgtgcgcctgccccggctgtagcaccggcggtgcgcgcagctggaaggtgttccgctcccagtgcctgcaggtgccagagagagaggcgcagg

SEQ ID NO: 266420 - DNA, 120 bp, Artificial Sequence
  ENSG00000126249_3 (sequence is synthesized)
acgctcagaaacagggaaacagccttgcagctgaggactggtgtgaaggtgctgatgactggggaagtgatactgaggaggggccttcaccacagtttaccttggattttgggaatgatg

SEQ ID NO: 266421 - DNA, 120 bp, Artificial Sequence
  ENSG00000126249_4 (sequence is synthesized)
catcctgtgcctcctgggctgccgctcttcctgccctactacatctgtgttgcagatgaggatgattacagggactttgtcaacctggatcatgcccacagccttctgagggactatcag

SEQ ID NO: 266422 - DNA, 120 bp, Artificial Sequence
  ENSG00000126249_5 (sequence is synthesized)
cagagagaaggcattgccatggatcagttgctttcccaaagccttcctaatgatggtgatgaaaaatatgagaagaccataattaaaagtggagatcagacgttttacaaattcatgaag

SEQ ID NO: 266423 - DNA, 120 bp, Artificial Sequence
  ENSG00000126249_6 (sequence is synthesized)
cgaattgctgcttgtcaggagcagattttgaggtattcctggagtggagagccactctttttgacctgccctacatcagaagtcaccgagctcccagcctgcagccagtgtggaggccaa

SEQ ID NO: 266424 - DNA, 120 bp, Artificial Sequence
  ENSG00000126249_7 (sequence is synthesized)
aggatatttgagtttcagcttatgccagcactggtcagcatgctcaagagtgctaatttaggtctttctgtggaatttggaacaattctagtttacacatgtgagaagagttgctggccc

SEQ ID NO: 266425 - DNA, 120 bp, Artificial Sequence
  ENSG00000126249_8 (sequence is synthesized)
ccaaatcatcagactcccatggaagaattttgtattatacaagaagacccagatgaattattgtttaagtagagcatttccttttattaatataaattaaaacaaatgtttacatccaaa

SEQ ID NO: 266426 - DNA, 120 bp, Artificial Sequence
  ENSG00000126249_9 (sequence is synthesized)
agtcccagagctgctccaggggtgtcctttccagcgggctggggcgggccggcgggctggagtcggggtgcagccctcacggccctttgtcttcaccccgaagctggaaggtgttccgct

SEQ ID NO: 266427 - DNA, 120 bp, Artificial Sequence
  ENSG00000126251_0 (sequence is synthesized)
cccctttttgcatactgaccagccctggcaacggagctcaaggcatctttgtgccactgctcaacagtgagtgatgtcatgggcacggccaggtctttatcagttctgccggataaatag

SEQ ID NO: 266428 - DNA, 120 bp, Artificial Sequence
  ENSG00000126251_1 (sequence is synthesized)
ccaactgcactaggtctggagagacagcaaggtgctgtgcggcagagcatttggggtctcaaagaagcagtggccaccaccatggatacaggccccgaccagtcctacttctccggcaat

SEQ ID NO: 266429 - DNA, 120 bp, Artificial Sequence
  ENSG00000126251_2 (sequence is synthesized)
cactggttcgtcttctcggtgtaccttctcactttcctggtggggctccccctcaacctgctggccctggtggtcttcgtgggcaagctgcggtgccgcccggtggccgtggacgtgctc

SEQ ID NO: 266430 - DNA, 120 bp, Artificial Sequence
  ENSG00000126251_3 (sequence is synthesized)
ctgctcaacctgaccgcctcggacctgctcctgctgctgttcctgcctttccgcatggtggaggcagccaatggcatgcactggcccctgcccttcatcctctgcccactctctggattc

SEQ ID NO: 266431 - DNA, 120 bp, Artificial Sequence
  ENSG00000126251_4 (sequence is synthesized)
atcttcttcaccaccatctatctcaccgccctcttcctggcagctgtgagcattgaacgcttcctgagtgtggcccacccactgtggtacaagacccggccgaggctggggcaggcaggt

SEQ ID NO: 266432 - DNA, 120 bp, Artificial Sequence
  ENSG00000126251_5 (sequence is synthesized)
ctggtgagtgtggcctgctggctgttggcctctgctcactgcagcgtggtctacgtcatagaattctcaggggacatctcccacagccagggcaccaatgggacctgctacctggagttc

SEQ ID NO: 266433 - DNA, 120 bp, Artificial Sequence
  ENSG00000126251_6 (sequence is synthesized)
tggaaggaccagctagccatcctcctgcccgtgcggctggagatggctgtggtcctctttgtggtcccgctgatcatcaccagctactgctacagccgcctggtgtggatcctcggcaga

SEQ ID NO: 266434 - DNA, 120 bp, Artificial Sequence
  ENSG00000126251_7 (sequence is synthesized)
gcagccaccgccggcagaggagggtggcggggctggtggcggccacgctgctcaacttccttgtctgctttgggccctacaacgtgtcccatgtcgtgggctatatctgcggtgaaagcc

SEQ ID NO: 266435 - DNA, 120 bp, Artificial Sequence
  ENSG00000126251_8 (sequence is synthesized)
cggtgtggaggatctacgtgacgcttctcagcaccctgaactcctgtgtcgacccctttgtctactacttctcctcctccgggttccaagccgactttcatgagctgctgaggaggttgt

SEQ ID NO: 266436 - DNA, 120 bp, Artificial Sequence
  ENSG00000126251_9 (sequence is synthesized)
gtgggctctggggccagtggcagcaggagagcagcatggagctgaaggagcagaagggaggggaggagcagagagcggaccgaccagctgaaagaaagaccagtgaacactcacagggct

SEQ ID NO: 266437 - DNA, 120 bp, Artificial Sequence
  ENSG00000126251_10 (sequence is synthesized)
gtggaactggtggccaggtggcctgtgctgaaaactaggtcctccgggggaggagggtgtagctggcgtgtcatcctcagggcgcttcctcgctcacgccaggagggacttggagtggcg

SEQ ID NO: 266438 - DNA, 120 bp, Artificial Sequence
  ENSG00000126251_11 (sequence is synthesized)
agctggggcccgatggggcttgggggcagagtagacatctagcctccctaagggtatgcgcgctaaagcccagctctcgatctcacctccatccccatccacccacacactatggattgg

SEQ ID NO: 266439 - DNA, 120 bp, Artificial Sequence
  ENSG00000126251_12 (sequence is synthesized)
gctctgggaaggggtcagggtgagaggctgctctggagaacaatgaggtcctcatagcagcaggcagctcctgtgttttcttgagggtggcagaggagctaagagcagtgcccaggtctg

SEQ ID NO: 266440 - DNA, 120 bp, Artificial Sequence
  ENSG00000126251_13 (sequence is synthesized)
agggggctgcccagtgagtggcaggggcaggagaggggagaaccccatcctcagagctgctcccagccagcgagtcaggagcgggggagacagggctccagggatgaggccgcattctgc

SEQ ID NO: 266441 - DNA, 120 bp, Artificial Sequence
  ENSG00000126251_14 (sequence is synthesized)
tcccacagtgccttttccagaaagttcccattgctcaataaatgtggatcatcagagacatttatgaacaatgacagaagaaaaattacccaaataaatgtggaagcaagcaaaagagaa

SEQ ID NO: 266442 - DNA, 120 bp, Artificial Sequence
  ENSG00000126254_0 (sequence is synthesized)
gcttttgctggacgtcatcctcgggagcccacccggacgaagggggagagtagacagcagaaccagcggcggcggctaagcagagactgtagtagcggcgacagcgacgacggcagcgat

SEQ ID NO: 266443 - DNA, 120 bp, Artificial Sequence
  ENSG00000126254_1 (sequence is synthesized)
ggctggggcggggccagccccgggactcccgggtgcaggaggacccgtggtcccgggtcctggcgctggcatcccgggcaaaagcggcgaggaacgcttgaaggaaatggaggcggagat

SEQ ID NO: 266444 - DNA, 120 bp, Artificial Sequence
  ENSG00000126254_2 (sequence is synthesized)
ggccctgtttgagcaggaagttctgggggctccagtacctggaatcccaactgctgtgcctgcggtgcccactgtccccacggtccccacagtagaagcgatgcaggtcccagcggctcc

SEQ ID NO: 266445 - DNA, 120 bp, Artificial Sequence
  ENSG00000126254_3 (sequence is synthesized)
tgtgatccgcccaattatcgcgaccaacacataccagcaggtccagcagactctggaggcccgagcagctgctgcagccacagtagttcctcccatggtgggtggccctccttttgtagg

SEQ ID NO: 266446 - DNA, 120 bp, Artificial Sequence
  ENSG00000126254_4 (sequence is synthesized)
ccctgttggctttggccctggtgatcggagtcacctggacagcccagaggctcgagaagccatgttcctgcggcgggcagctgtggccccccagagggcccctatcctgcgtccagcctt

SEQ ID NO: 266447 - DNA, 120 bp, Artificial Sequence
  ENSG00000126254_5 (sequence is synthesized)
cgtcccccacgtgctacagagagcagattccgctctctcctctgcagcagccggcccccgccctatggccctacggccccctcaccaggccctcgtgggcccccctctgcctgggccccc

SEQ ID NO: 266448 - DNA, 120 bp, Artificial Sequence
  ENSG00000126254_6 (sequence is synthesized)
tggaccacccatgatgctgccaccaatggctcgggctccagggcccccgctgggctccatggctgcactgaggccccctctggaagagccagcagcaccccgagagctgggcctaggcct

SEQ ID NO: 266449 - DNA, 120 bp, Artificial Sequence
  ENSG00000126254_7 (sequence is synthesized)
gaaagagaaggaagaggcagtggtggcggcggcggctgggctggaggaggctagcgcggctgtggccgtgggggcaggaggtgccccagctggccctgcagtcattgggcccagcctgcc

SEQ ID NO: 266450 - DNA, 120 bp, Artificial Sequence
  ENSG00000126254_8 (sequence is synthesized)
gctggccctggccatgccattgcccgagcctgagcccctgcccctcccgttggaggtcgtccgcggcctcctgcccccgctgcgcattcctgaactcctgtccctgcgtcctcggccccg

SEQ ID NO: 266451 - DNA, 120 bp, Artificial Sequence
  ENSG00000126254_9 (sequence is synthesized)
gccccctcggccagagccacccccaggcctcatggctcttgaggtcccagagcccctgggtgaagacaagaagaaggggaagccagagaaattgaaacggtgcattcgcacagcggcagg

SEQ ID NO: 266452 - DNA, 120 bp, Artificial Sequence
  ENSG00000126254_10 (sequence is synthesized)
gagcagctgggaggaccccagcctgctggagtgggatgcagatgacttccggatcttctgtggggatctgggcaatgaggtgaacgatgacatcttggcacgcgccttcagccgcttccc

SEQ ID NO: 266453 - DNA, 120 bp, Artificial Sequence
  ENSG00000126254_11 (sequence is synthesized)
atccttccttaaggccaaggtgatccgtgacaagcgcacaggcaagaccaagggctacggcttcgtcagcttcaaggaccccagcgactacgtgcgcgccatgcgtgagatgaatgggaa

SEQ ID NO: 266454 - DNA, 120 bp, Artificial Sequence
  ENSG00000126254_12 (sequence is synthesized)
gtatgtgggctcgcgccccatcaagcttcgcaagagcatgtggaaggaccggaatctggacgtggtccgcaagaagcagaaggaaaagaagaagctgggcctgagatagggtctgtggcc

SEQ ID NO: 266455 - DNA, 120 bp, Artificial Sequence
  ENSG00000126254_13 (sequence is synthesized)
aggcacccgctcccacctggccgggcgctggctcctccctcagttctctttggaaaacccccagctgtccacccatcccctgccccaaaaccagtttcaataaatttacgttcatttcca

SEQ ID NO: 266456 - DNA, 120 bp, Artificial Sequence
  ENSG00000126254_14 (sequence is synthesized)
tttaatcaggcactcttgtttacatgacttcagcctcttgcctaaatccttgctctaaattaccctttgcctttgatcccaacttgatgttgtcatcctaaagcacgaacctgatcatgt

SEQ ID NO: 266457 - DNA, 120 bp, Artificial Sequence
  ENSG00000126254_15 (sequence is synthesized)
cctttctgatgatgtcaattttgttttaacctgatcattgcaaaccaaccctcctgctgtcagtcctaattcccagttaccacagcacttaacacctcataacaagctatataatttctt

SEQ ID NO: 266458 - DNA, 120 bp, Artificial Sequence
  ENSG00000126254_16 (sequence is synthesized)
atttactatggctatcatcttttgcatcctctaaaataaaagctccatgaggggcagaagtctcagtatctgccacataggaagcattatgtactgtctgttgatgggatgaacggactg

SEQ ID NO: 266459 - DNA, 120 bp, Artificial Sequence
  ENSG00000126254_17 (sequence is synthesized)
ttgagacaagcgccaggcttttcccctggcagtcacaaccctacatgaccttgcttcttgcagggagagatccccagcagcccgaacatttctgggatgtgccagcagtgcttttgttaa

SEQ ID NO: 266460 - DNA, 120 bp, Artificial Sequence
  ENSG00000126259_0 (sequence is synthesized)
ccgcggaactggcaggcgtttcagagcgtcagaggctgcggatgagcagacttggaggactccaggccagagactaggctgggcgaagagtcgagcgtgaagggggctccgggccagggt

SEQ ID NO: 266461 - DNA, 120 bp, Artificial Sequence
  ENSG00000126259_1 (sequence is synthesized)
gacaggaggcgtgcttgagaggaagaagttgacgggaaggccagtgcgacggcaaatctcgtgaaccttgggggacgaatgctcaggatgcgggtccccgccctcctcgtcctcctcttc

SEQ ID NO: 266462 - DNA, 120 bp, Artificial Sequence
  ENSG00000126259_2 (sequence is synthesized)
tgcttcagagggagagcaggcccgtcgccccatttcctgcaacagccagaggacctggtggtgctgctgggggaggaagcccggctgccgtgtgctctgggcgcctactgggggctagtt

SEQ ID NO: 266463 - DNA, 120 bp, Artificial Sequence
  ENSG00000126259_3 (sequence is synthesized)
cagtggactaagagtgggctggccctagggggccaaagggacctaccagggtggtcccggtactggatatcagggaatgcagccaatggccagcatgacctccacattaggcccgtggag

SEQ ID NO: 266464 - DNA, 120 bp, Artificial Sequence
  ENSG00000126259_4 (sequence is synthesized)
ctagaggatgaagcatcatatgaatgtcaggctacacaagcaggcctccgctccagaccagcccaactgcacgtgctggtccccccagaagccccccaggtgctgggcggcccctctgtg

SEQ ID NO: 266465 - DNA, 120 bp, Artificial Sequence
  ENSG00000126259_5 (sequence is synthesized)
tctctggttgctggagttcctgcgaacctgacatgtcggagccgtggggatgcccgccctacccctgaattgctgtggttccgagatggggtcctgttggatggagccaccttccatcag

SEQ ID NO: 266466 - DNA, 120 bp, Artificial Sequence
  ENSG00000126259_6 (sequence is synthesized)
accctgctgaaggaagggacccctgggtcagtggagagcaccttaaccctgacccctttcagccatgatgatggagccacctttgtctgccgggcccggagccaggccctgcccacagga

SEQ ID NO: 266467 - DNA, 120 bp, Artificial Sequence
  ENSG00000126259_7 (sequence is synthesized)
agagacacagctatcacactgagcctgcagtaccccccagaggtgactctgtctgcttcgccacacactgtgcaggagggagagaaggtcattttcctgtgccaggccacagcccagcct

SEQ ID NO: 266468 - DNA, 120 bp, Artificial Sequence
  ENSG00000126259_8 (sequence is synthesized)
cctgtcacaggctacaggtgggcaaaagggggctctccggtgctcggggcccgcgggccaaggttagaggtcgtggcagacgcctcgttcctgactgagcccgtgtcctgcgaggtcagc

SEQ ID NO: 266469 - DNA, 120 bp, Artificial Sequence
  ENSG00000126259_9 (sequence is synthesized)
aacgccgtgggtagcgccaaccgcagtactgcgctggatgtgctgtttgggccgattctgcaggcaaagccggagcccgtgtccgtggacgtgggggaagacgcttccttcagctgcgcc

SEQ ID NO: 266470 - DNA, 120 bp, Artificial Sequence
  ENSG00000126259_10 (sequence is synthesized)
tggcgcgggaacccgcttccacgggtaacctggacccgccgcggtggcgcgcaggtgctgggctctggagccacactgcgtcttccgtcggtggggcccgaggacgcaggcgactatgtg

SEQ ID NO: 266471 - DNA, 120 bp, Artificial Sequence
  ENSG00000126259_11 (sequence is synthesized)
tgcagagctgaggctgggctatcgggcctgcggggcggcgccgcggaggctcggctgactgtgaacgctcccccagtagtgaccgccctgcactctgcgcctgccttcctgaggggccct

SEQ ID NO: 266472 - DNA, 120 bp, Artificial Sequence
  ENSG00000126259_12 (sequence is synthesized)
tgagggcttcctggaggcggggtcgcagggccggttcctggtggagacattccctgccccagagagccgcgggggactgggtccgggcctgatctctgtgctacacatttcggggaccca

SEQ ID NO: 266473 - DNA, 120 bp, Artificial Sequence
  ENSG00000126259_13 (sequence is synthesized)
ggagtctgactttagcaggagctttaactgcagtgcccggaaccggctgggcgagggaggtgcccaggccagcctgggccgtagagacttgctgcccactgtgcggatagtggccggagt

SEQ ID NO: 266474 - DNA, 120 bp, Artificial Sequence
  ENSG00000126259_14 (sequence is synthesized)
ggccgctgccaccacaactctccttatggtcatcactggggtggccctctgctgctggcgccacagcaaggcctcagcctctttctccgagcaaaagaacctgatgcgaatccctggcag

SEQ ID NO: 266475 - DNA, 120 bp, Artificial Sequence
  ENSG00000126259_15 (sequence is synthesized)
cagcgacggctccagttcacgaggtcctgaagaagaggagacaggcagccgcgaggaccggggccccattgtgcacactgaccacagtgatctggttctggaggaggaagggactctgga

SEQ ID NO: 266476 - DNA, 120 bp, Artificial Sequence
  ENSG00000126259_16 (sequence is synthesized)
gaccaaggacccaaccaacggttactacaaggtccgaggagtcagtgtgagcctgagccttggcgaagcccctggaggaggtctcttcctgccaccaccctccccccttgggcccccagg

SEQ ID NO: 266477 - DNA, 120 bp, Artificial Sequence
  ENSG00000126259_17 (sequence is synthesized)
gacccctaccttctatgacttcaacccacacctgggcatggtccccccctgcagactttacagagccagggcaggctatctcaccacaccccaccctcgagctttcaccagctacatcaa

SEQ ID NO: 266478 - DNA, 120 bp, Artificial Sequence
  ENSG00000126259_18 (sequence is synthesized)
acccacatcctttgggcccccagatctggcccccgggactccccccttcccatatgctgccttccccacacctagccacccgcgtctccagactcacgtgtgacatctttccaatggaag

SEQ ID NO: 266479 - DNA, 120 bp, Artificial Sequence
  ENSG00000126259_19 (sequence is synthesized)
agtcctgggatctccaacttgccataatggattgttctgatttctgaggagccaggacaagttggcgaccttactcctccaaaactgaacacaaggggagggaaagatcattacatttgt

SEQ ID NO: 266480 - DNA, 120 bp, Artificial Sequence
  ENSG00000126259_20 (sequence is synthesized)
caggagcatttgtatacagtcagctcagccaaaggagatgccccaagtgggagcaacatggccacccaatatgcccacctattccccggtgtaaaagagattcaagatggcaggtaggcc

SEQ ID NO: 266481 - DNA, 120 bp, Artificial Sequence
  ENSG00000126259_21 (sequence is synthesized)
ctttgaggagagatggggacagggcagtgggtgttgggagtttggggccgggatggaagttgtttctagccactgaaagaagatatttcaagatgaccatctgcattgagaggaaaggta

SEQ ID NO: 266482 - DNA, 120 bp, Artificial Sequence
  ENSG00000126259_22 (sequence is synthesized)
gcataggatagatgaagatgaagagcataccaggccccaccctggctctccctgaggggaactttgctcggccaatggaaatgcagccaagatggccatatactccctaggaacccaaga

SEQ ID NO: 266483 - DNA, 120 bp, Artificial Sequence
  ENSG00000126259_23 (sequence is synthesized)
tggccaccatcttgattttactttccttaaagactcagaaagacttggacccaaggagtggggatacagtgagaattaccactgttggggcaaaatattgggataaaaatatttatgttt

SEQ ID NO: 266484 - DNA, 120 bp, Artificial Sequence
  ENSG00000126259_24 (sequence is synthesized)
cactgagcgcagtccctctaggacctgggctgagcaagtttcttccactctctcccttccctcctcctcaccccttgcctgcccctcaaccccggcagggcgcaggtgtccaacccagcc

SEQ ID NO: 266485 - DNA, 120 bp, Artificial Sequence
  ENSG00000126259_25 (sequence is synthesized)
gggaccccctccctcctcgaacccaggtgttccggctcccagaccccaattgagctgggggcgcccacccgccgggggatcccgccctgcgtcccccattcatccgcgtctcagccgcgg

SEQ ID NO: 266486 - DNA, 120 bp, Artificial Sequence
  ENSG00000126259_26 (sequence is synthesized)
tgcacttgagtgcaccttgagtctccagcctctcaaggaaccgggagatcaggccatcagcgtctcagccagcaaaggcctgaaccaccagtcccttataaccctgcgtttcagagcgtc

SEQ ID NO: 266487 - DNA, 120 bp, Artificial Sequence
  ENSG00000126261_0 (sequence is synthesized)
tcgtggttgtcccgccatggcactgtcgcgggggctgccccgggagctggctgaggcggtggccgggggccgggtgctggtggtgggggcgggcggcatcggctgcgagctcctcaagaa

SEQ ID NO: 266488 - DNA, 120 bp, Artificial Sequence
  ENSG00000126261_1 (sequence is synthesized)
gggggcgggcggcatcggctgcgagctcctcaagaatctcgtgctcaccggtttctcccacatcgacctgattgatctggatactattgatgtaagcaacctcaacagacagtttttgtt

SEQ ID NO: 266489 - DNA, 120 bp, Artificial Sequence
  ENSG00000126261_2 (sequence is synthesized)
tcaaaagaaacatgttggaagatcaaaggcacaggttgccaaggaaagtgtactgcagttttacccgaaagctaatatcgttgcctaccatgacagcatcatgaaccctgactataatgt

SEQ ID NO: 266490 - DNA, 120 bp, Artificial Sequence
  ENSG00000126261_3 (sequence is synthesized)
ggaatttttccgacagtttatactggttatgaatgctttagataacagagctgcccgaaaccatgttaatagaatgtgcctggcagctgatgttcctcttattgaaagtggaacagctgg

SEQ ID NO: 266491 - DNA, 120 bp, Artificial Sequence
  ENSG00000126261_4 (sequence is synthesized)
gtatcttggacaagtaactactatcaaaaagggtgtgaccgagtgttatgagtgtcatcctaagccgacccagagaacctttcctggctgtacaattcgtaacacaccttcagaacctat

SEQ ID NO: 266492 - DNA, 120 bp, Artificial Sequence
  ENSG00000126261_5 (sequence is synthesized)
acattgcatcgtttgggcaaagtacttgttcaaccagttgtttggggaagaagatgctgatcaagaagtatctcctgacagagctgaccctgaagctgcctgggaaccaacggaagccga

SEQ ID NO: 266493 - DNA, 120 bp, Artificial Sequence
  ENSG00000126261_6 (sequence is synthesized)
agccagagctagagcatctaatgaagatggtgacattaaacgtatttctactaaggaatgggctaaatcaactggatatgatccagttaaactttttaccaagctttttaaagatgacat

SEQ ID NO: 266494 - DNA, 120 bp, Artificial Sequence
  ENSG00000126261_7 (sequence is synthesized)
caggtatctgttgacaatggacaaactatggcggaaaaggaaacctccagttccgttggactgggctgaagtacaaagtcaaggagaagaaacgaatgcatcagatcaacagaatgaacc

SEQ ID NO: 266495 - DNA, 120 bp, Artificial Sequence
  ENSG00000126261_8 (sequence is synthesized)
ccagttaggcctgaaagaccagcaggttctagatgtaaagagctatgcacgtcttttttcaaagagcatcgagactttgagagttcatttagcagaaaagggggatggagctgagctcat

SEQ ID NO: 266496 - DNA, 120 bp, Artificial Sequence
  ENSG00000126261_9 (sequence is synthesized)
atgggataaggatgacccatctgcaatggattttgtcacctctgctgcaaacctcaggatgcatattttcagtatgaatatgaagagtagatttgatatcaaatcaatggcagggaacat

SEQ ID NO: 266497 - DNA, 120 bp, Artificial Sequence
  ENSG00000126261_10 (sequence is synthesized)
tattcctgctattgctactactaatgcagtaattgctgggttgatagtattggaaggattgaagattttatcaggaaaaatagaccagtgcagaacaatttttttgaataaacaaccaaa

SEQ ID NO: 266498 - DNA, 120 bp, Artificial Sequence
  ENSG00000126261_11 (sequence is synthesized)
cccaagaaagaagcttcttgtgccttgtgcactggatcctcccaaccccaattgttatgtatgtgccagcaagccagaggtgactgtgcggctgaatgtccataaagtgactgttctcac

SEQ ID NO: 266499 - DNA, 120 bp, Artificial Sequence
  ENSG00000126261_12 (sequence is synthesized)
cttacaagacaagatagtgaaagaaaaatttgctatggtagcaccagatgtccaaattgaagatgggaaaggaacaatcctaatatcttccgaagagggagagacggaagctaataatca

SEQ ID NO: 266500 - DNA, 120 bp, Artificial Sequence
  ENSG00000126261_13 (sequence is synthesized)
caagaagttgtcagaatttggaattagaaatggcagccggcttcaagcagatgacttcctccaggactatactttattgatcaacatccttcatagtgaagacctaggaaaggacgttga

SEQ ID NO: 266501 - DNA, 120 bp, Artificial Sequence
  ENSG00000126261_14 (sequence is synthesized)
atttgaagttgttggtgatgccccggaaaaagtggggcccaaacaagctgaagatgctgccaaaagcataaccaatggcagtgatgatggagctcagccctccacctccacagctcaaga

SEQ ID NO: 266502 - DNA, 120 bp, Artificial Sequence
  ENSG00000126261_15 (sequence is synthesized)
gcaagatgacgttctcatagttgattcagatgaagaagattcttcaaataatgccgacgtcagtgaagaagagagaagccgcaagaggaaattagatgagaaagagaatctcagtgcaaa

SEQ ID NO: 266503 - DNA, 120 bp, Artificial Sequence
  ENSG00000126261_16 (sequence is synthesized)
attagattgaacagaaatgcctctaaacagaaccctcttactatttagtttatctgggcagaaccagattgttatgtcctttgttccaaagggaaaaaattgacagcagtgacttgaaaa

SEQ ID NO: 266504 - DNA, 120 bp, Artificial Sequence
  ENSG00000126261_17 (sequence is synthesized)
tgattctgctccctttgaaagcattcattttgctagaactgttagacacattgcagtatgctgtattgaaagtaggaatatagttttaaaaaccctttgaacaaagtgtgtgcataacca

SEQ ID NO: 266505 - DNA, 120 bp, Artificial Sequence
  ENSG00000126261_18 (sequence is synthesized)
gtcatgagataaaacaacacaatgcatgttgcctttttaatgtaaatacccgtaggtatcattaatagtttcaaaatattgtggtttagtaaagttgatacctggttataaatattatgc

SEQ ID NO: 266506 - DNA, 120 bp, Artificial Sequence
  ENSG00000126261_19 (sequence is synthesized)
ctttatttttggctagaagaagaattatttttagcctagatctaaccattttcatactcttaactgattgaaacagattcaaagaagtatcgagtgctatgcattgaaacttgtttttaa

SEQ ID NO: 266507 - DNA, 120 bp, Artificial Sequence
  ENSG00000126261_20 (sequence is synthesized)
atgttagatggcactatgtatattaatgtaaaacaatgttaatttactcaagttttcagtttgtaccgcctggtatgtctgtgtaagaagccaatttttgtgtattgttacagtttcagg

SEQ ID NO: 266508 - DNA, 120 bp, Artificial Sequence
  ENSG00000126261_21 (sequence is synthesized)
ttatttatattcgatgttttgtaaaactcaaataacgactatacttatggaccaaataaatggcatctgcattcttgttacacatgcctgcacagttcctgtttctgctgccttatatct

SEQ ID NO: 266509 - DNA, 80 bp, Artificial Sequence
  ENSG00000126261_22 (sequence is synthesized)
cacatgcctgcacagttcctgtttctgctgccttatatctactgcaggaatgtcaaattcttttcattaaaaaaagaact

SEQ ID NO: 266510 - DNA, 120 bp, Artificial Sequence
  ENSG00000126261_23 (sequence is synthesized)
ttgcagtgagccaagattgtgctattgctactccagccagggcgatgagtgaaactccatctcaaaaaaggttcagaagatctccactgtttgccaaagacgagtactttcttttcttta

SEQ ID NO: 266511 - DNA, 120 bp, Artificial Sequence
  ENSG00000126261_24 (sequence is synthesized)
aagacgagtactttcttttctttattcttggagacttcacatgtaggaagagtactttctaaaataaagctcttcctgcgtgtggtggtggtgcacatctgtgttccagctactcaggag

SEQ ID NO: 266512 - DNA, 90 bp, Artificial Sequence
  ENSG00000126261_25 (sequence is synthesized)
ctaaaaaataagtaaataaaataaagcttttaatggcagtgggttttttgttcgtttttgagatgaagcctcacactgtcatctggcctg

SEQ ID NO: 266513 - DNA, 86 bp, Artificial Sequence
  ENSG00000126261_26 (sequence is synthesized)
agtaaataaaataaagcttttaatggcagtgggttttttgttcgtttttgagatgaagcctcacactgtcatctggcgcctccgcc

SEQ ID NO: 266514 - DNA, 120 bp, Artificial Sequence
  ENSG00000126261_27 (sequence is synthesized)
gcgtgagccactgcgcctggcctaatggcagtgtttttaaaatttggattgtcagcagttggcctttgttgagaaaatgtgtgactttgcccaagcccagtaacttggagccttgaattt

SEQ ID NO: 266515 - DNA, 120 bp, Artificial Sequence
  ENSG00000126261_28 (sequence is synthesized)
aagcccagtaacttggagccttgaatttgagatgctggaaagggagtccttcctcctttctgcagtgtttgtctgggttgtcccctagtttaccaaagtccattttgaatgtaccatccc

SEQ ID NO: 266516 - DNA, 120 bp, Artificial Sequence
  ENSG00000126261_29 (sequence is synthesized)
cagcccaactccagcctacagatagtgccagaccgccagtaggtggagtagcactgtcttcctggtcccggacctcagagggctttgcctgttagggtactcttatcactcagagatggg

SEQ ID NO: 266517 - DNA, 120 bp, Artificial Sequence
  ENSG00000126261_30 (sequence is synthesized)
ccttgagttttcagagaacagaaagccattaagctgtttcccctattgtattcatgtgccctttgtgtttctggcaataatttattttatatttcaactaaattttaaatttctaattca

SEQ ID NO: 266518 - DNA, 120 bp, Artificial Sequence
  ENSG00000126261_31 (sequence is synthesized)
gcttaggctggtcttgaaggtctgggctcaagcgattctctcactttgtcctcccaaagtgttgggattacagattgatctggatactattgatgtaagcaacctcaacagacagttttt

SEQ ID NO: 266519 - DNA, 120 bp, Artificial Sequence
  ENSG00000126261_32 (sequence is synthesized)
gattattaggaacattgaccataaatccataaaactactagagctcaagagcaagatgacgttctcatagttgattcagatgaagaagattcttcaaataatgccgacgtcagtgaagaa

SEQ ID NO: 266520 - DNA, 120 bp, Artificial Sequence
  ENSG00000126261_33 (sequence is synthesized)
aaaacaaattcccggctgttaggagatgcgggagaggattgagtccctcgcggatgttgtgactttaattttgaggtccctgtcgtaactccgaagtaacgacgcggggcggaggatggc

SEQ ID NO: 266521 - DNA, 120 bp, Artificial Sequence
  ENSG00000126261_34 (sequence is synthesized)
aatgatagcgaccaacgcgtcccgagcgctggtcacgagcgggtttacacacggaacgcgcaccatcttcataccacccgaggagtgcaaacgctatttccaccctgctttatttttaac

SEQ ID NO: 266522 - DNA, 120 bp, Artificial Sequence
  ENSG00000126261_35 (sequence is synthesized)
agatgaggaaagggagacgcaatggggttgagtaacttaccctgggtcacggagcgagtggcagggctcccgcaggctgcgtgactgtcattgctctcacagtagacgattgatctggat

SEQ ID NO: 266523 - DNA, 120 bp, Artificial Sequence
  ENSG00000126262_0 (sequence is synthesized)
atgctgccggactggaagagctccttgatcctcatggcttacatcatcatcttcctcactggcctccctgccaacctcctggccctgcgggcctttgtggggcggatccgccagccccag

SEQ ID NO: 266524 - DNA, 120 bp, Artificial Sequence
  ENSG00000126262_1 (sequence is synthesized)
cctgcacctgtgcacatcctcctgctgagcctgacgctggccgacctcctcctgctgctgctgctgcccttcaagatcatcgaggctgcgtcgaacttccgctggtacctgcccaaggtc

SEQ ID NO: 266525 - DNA, 120 bp, Artificial Sequence
  ENSG00000126262_2 (sequence is synthesized)
gtctgcgccctcacgagttttggcttctacagcagcatctactgcagcacgtggctcctggcgggcatcagcatcgagcgctacctgggagtggctttccccgtgcagtacaagctctcc

SEQ ID NO: 266526 - DNA, 120 bp, Artificial Sequence
  ENSG00000126262_3 (sequence is synthesized)
cgccggcctctgtatggagtgattgcagctctggtggcctgggttatgtcctttggtcactgcaccatcgtgatcatcgttcaatacttgaacacgactgagcaggtcagaagtggcaat

SEQ ID NO: 266527 - DNA, 120 bp, Artificial Sequence
  ENSG00000126262_4 (sequence is synthesized)
gaaattacctgctacgagaacttcaccgataaccagttggacgtggtgctgcccgtgcggctggagctgtgcctggtgctcttcttcatccccatggcagtcaccatcttctgctactgg

SEQ ID NO: 266528 - DNA, 120 bp, Artificial Sequence
  ENSG00000126262_5 (sequence is synthesized)
cgttttgtgtggatcatgctctcccagccccttgtgggggcccagaggcggcgccgagccgtggggctggctgtggtgacgctgctcaatttcctggtgtgcttcggaccttacaacgtg

SEQ ID NO: 266529 - DNA, 120 bp, Artificial Sequence
  ENSG00000126262_6 (sequence is synthesized)
tcccacctggtggggtatcaccagagaaaaagcccctggtggcggtcaatagccgtggtgttcagttcactcaacgccagtctggaccccctgctcttctatttctcttcttcagtggtg

SEQ ID NO: 266530 - DNA, 120 bp, Artificial Sequence
  ENSG00000126262_7 (sequence is synthesized)
cgcagggcatttgggagagggctgcaggtgctgcggaatcagggctcctccctgttgggacgcagaggcaaagacacagcagaggggacaaatgaggacaggggtgtgggtcaaggagaa

SEQ ID NO: 266531 - DNA, 120 bp, Artificial Sequence
  ENSG00000126262_8 (sequence is synthesized)
ttcggacttcactacagagtagcagtttccctggaccttcagaggtcgcctgggttacacaggagctgggaagcctgggagaggcggagcaggaaggctcccatccagattcagaaatcc

SEQ ID NO: 266532 - DNA, 120 bp, Artificial Sequence
  ENSG00000126262_9 (sequence is synthesized)
ttagacccagcccaggactgcgactttgaaaaaaatgcctttcaccagcttggtatcccttcctgactgaattgtcctactcaaaggagcataagtcagagatgcacgaagaagtagtta

SEQ ID NO: 266533 - DNA, 84 bp, Artificial Sequence
  ENSG00000126262_10 (sequence is synthesized)
agcaagactcttcaggctggagaagcagcgtagctaacacaagtccagtccttgtgatgtggctggtagttggggatggccagg

SEQ ID NO: 266534 - DNA, 120 bp, Artificial Sequence
  ENSG00000126262_11 (sequence is synthesized)
ccagtccttgtgatgtggctggtagttggggatggccaggctgaagcagagagtcctagagaaatctcgatacaagcttcaaagcaacacctagacactgctctagcggttgatcctgga

SEQ ID NO: 266535 - DNA, 120 bp, Artificial Sequence
  ENSG00000126262_12 (sequence is synthesized)
gataaaccaacaagagagagatggaagagaaatactaaatgaggtcaaagaagactcagaaaggttctgagcctggagatgagcagggaggcctcagggcttagacctttaatgataggg

SEQ ID NO: 266536 - DNA, 120 bp, Artificial Sequence
  ENSG00000126262_13 (sequence is synthesized)
gtttccctgcattggtttgacctgttgcctttttgatgtgctctgtttgttttcatgtgttgtcttgtctcccctgctaaactgggagctgccaggggtctgggtcttatctccttcctc

SEQ ID NO: 266537 - DNA, 120 bp, Artificial Sequence
  ENSG00000126262_14 (sequence is synthesized)
catggtaccccacacaggccaggatgtggtttggtacccagcaatcagagattggcactccctcatacaggggaaagcaacctggtctagcaaattgaaaataaagatgataaaactctg

SEQ ID NO: 266538 - DNA, 120 bp, Artificial Sequence
  ENSG00000126264_0 (sequence is synthesized)
acagttcctctggacttctctggaccacagtcctctgccagacccctgccagaccccagtccaccatgatccatctgggtcacatcctcttcctgcttttgctcccagtggctgcagctc

SEQ ID NO: 266539 - DNA, 120 bp, Artificial Sequence
  ENSG00000126264_1 (sequence is synthesized)
agacgactccaggagagagatcatcactccctgccttttaccctggcacttcaggctcttgttccggatgtgggtccctctctctgccgctcctggcaggcctcgtggctgctgatgcgg

SEQ ID NO: 266540 - DNA, 120 bp, Artificial Sequence
  ENSG00000126264_2 (sequence is synthesized)
tcaacatgccaggcaggggctgaccctcctgcagcttggacctttgacttctgaccctctcatcctggatggtgtgtggtggcacaggaacccccgccccaacttttggattgtaataaa

SEQ ID NO: 266541 - DNA, 120 bp, Artificial Sequence
  ENSG00000126264_3 (sequence is synthesized)
acaattgaaacacctgtagtcgtattctttctcaaagaaccccagagttcccaaagcctccctcccatgaactgtttctggatccaaggccccctcagaacccccacatgtccccatccc

SEQ ID NO: 266542 - DNA, 120 bp, Artificial Sequence
  ENSG00000126266_0 (sequence is synthesized)
atggacctgcccccgcagctctccttcggcctctatgtggccgcctttgcgctgggcttcccgctcaacgtcctggccatccgaggcgcgacggcccacgcccggctccgtctcacccct

SEQ ID NO: 266543 - DNA, 120 bp, Artificial Sequence
  ENSG00000126266_1 (sequence is synthesized)
agcctggtctacgccctgaacctgggctgctccgacctgctgctgacagtctctctgcccctgaaggcggtggaggcgctagcctccggggcctggcctctgccggcctcgctgtgcccc

SEQ ID NO: 266544 - DNA, 120 bp, Artificial Sequence
  ENSG00000126266_2 (sequence is synthesized)
gtcttcgcggtggcccacttcttcccactctatgccggcgggggcttcctggccgccctgagtgcaggccgctacctgggagcagccttccccttgggctaccaagccttccggaggccg

SEQ ID NO: 266545 - DNA, 120 bp, Artificial Sequence
  ENSG00000126266_3 (sequence is synthesized)
tgctattcctggggggtgtgcgcggccatctgggccctcgtcctgtgtcacctgggtctggtctttgggttggaggctccaggaggctggctggaccacagcaacacctccctgggcatc

SEQ ID NO: 266546 - DNA, 120 bp, Artificial Sequence
  ENSG00000126266_4 (sequence is synthesized)
aacacaccggtcaacggctctccggtctgcctggaggcctgggacccggcctctgccggcccggcccgcttcagcctctctctcctgctcttttttctgcccttggccatcacagccttc

SEQ ID NO: 266547 - DNA, 120 bp, Artificial Sequence
  ENSG00000126266_5 (sequence is synthesized)
tgctacgtgggctgcctccgggcactggcccgctccggcctgacgcacaggcggaagctgcgggccgcctgggtggccggcggggccctcctcacgctgctgctctgcgtaggaccctac

SEQ ID NO: 266548 - DNA, 120 bp, Artificial Sequence
  ENSG00000126266_6 (sequence is synthesized)
aacgcctccaacgtggccagcttcctgtaccccaatctaggaggctcctggcggaagctggggctcatcacgggtgcctggagtgtggtgcttaatccgctggtgaccggttacttggga

SEQ ID NO: 266549 - DNA, 120 bp, Artificial Sequence
  ENSG00000126266_7 (sequence is synthesized)
aggggtcctggcctgaagacagtgtgtgcggcaagaacgcaagggggcaagtcccagaagtaacgccactgctcgggggaaggagcatggggcaggagggcccggctgcttctccaggcc

SEQ ID NO: 266550 - DNA, 120 bp, Artificial Sequence
  ENSG00000126266_8 (sequence is synthesized)
cctgcggggggctgcttcggaggaactgcagggcagcctggcccggaggcctccctggagccactcaagcagagagcggcgcctgctgagggcagcaccccagtcaagagaggagcaccg

SEQ ID NO: 266551 - DNA, 120 bp, Artificial Sequence
  ENSG00000126266_9 (sequence is synthesized)
ttgcccctgcacgtgtcgaggaagtttgtcccttcctcgcctatctttctctcccctctgcacgtcctcacctgcctgtcttccgtgggccgcgagcagaggccttgtacttacgggaag

SEQ ID NO: 266552 - DNA, 120 bp, Artificial Sequence
  ENSG00000126266_10 (sequence is synthesized)
gaggaggcagtctgtttctgacccacaggaactgccactccggtgatgcacttgaggacagctactctgaaatcagttcccaggagagaacatttgatttccgagtaggagaggaggcag

SEQ ID NO: 266553 - DNA, 120 bp, Artificial Sequence
  ENSG00000126266_11 (sequence is synthesized)
gaggcaggataatgacgctgttataccatgtgaaactcgcaagggggcagccttggagcttggaacggaggctggcaggaaaagatgcttcagccggggagggaaaatgcaaggtcccgc

SEQ ID NO: 266554 - DNA, 120 bp, Artificial Sequence
  ENSG00000126266_12 (sequence is synthesized)
agtgatgggcaaaggctacggagttgactcttgaacaacgtggggatggggtgccgaaccccacgcagtggaaaatctgtgcatgactttgactcccccaaagttcaactactaatagcc

SEQ ID NO: 266555 - DNA, 120 bp, Artificial Sequence
  ENSG00000126266_13 (sequence is synthesized)
gactttgactcccccaaagttcaactactaatagcctactgttgaccaaaagctttacccagtatataaacaattgagtaagacatatttgaagccaggcacagtggcttatgcctgtaa

SEQ ID NO: 266556 - DNA, 120 bp, Artificial Sequence
  ENSG00000126266_14 (sequence is synthesized)
ggccgaggcgggaagactgctcgaagccaggagttcaagagcagcctgggcaagatagtgagacccccacctctacaaataataaaaataaaaataattagctgggcgtggtggtgcgtg

SEQ ID NO: 266557 - DNA, 64 bp, Artificial Sequence
  ENSG00000126266_15 (sequence is synthesized)
cccaggattgaggctgcaaggaaaaaaaagaaaaaagacatattttgtatgttatatatattat

SEQ ID NO: 266558 - DNA, 120 bp, Artificial Sequence
  ENSG00000126266_16 (sequence is synthesized)
tacaataaagtaagctagagaaaagtacatgttactgaaaacattattagaaagagaaaataccttcacagcactgtgctgtatttatcaatactgtaagttttgttgtctgtttataag

SEQ ID NO: 266559 - DNA, 120 bp, Artificial Sequence
  ENSG00000126266_17 (sequence is synthesized)
gtatttatcaatactgtaagttttgttgtctgtttataagagaagttgtctgtctcaagcggcagtaaccgcggctgcagatctcaatctgtggtagatatcaagcagttcaaccctttt

SEQ ID NO: 266560 - DNA, 120 bp, Artificial Sequence
  ENSG00000126266_18 (sequence is synthesized)
ttataatgtcatgacttttctttgcttcttggaagcagctctggcatcactagtggccccgcatttggggccaagggggttattcaaagtttacggtattgcattaaacatggtgaaaca

SEQ ID NO: 266561 - DNA, 120 bp, Artificial Sequence
  ENSG00000126267_0 (sequence is synthesized)
catcctcccttttggacgttggaggggccgcagcgtcatctccgatgcaccctcatcctcagataccgggtagagatctcgccggattcagcaccatggcggaagacatggagaccaaaa

SEQ ID NO: 266562 - DNA, 120 bp, Artificial Sequence
  ENSG00000126267_1 (sequence is synthesized)
acctggacttccaccgctgtcagaaggcaatgaccgctaaaggaggcgatatctctgtgtgcgaatggtaccagcgtgtgtaccagtccctctgccccacatcctgggtcacagactggg

SEQ ID NO: 266563 - DNA, 120 bp, Artificial Sequence
  ENSG00000126267_2 (sequence is synthesized)
atgagcaacgggctgaaggcacgtttcccgggaagatctgaactggctgcatctccctttcctctgtcctccatccttctcccaggatggtgaagggggacctggtacccagtgatcccc

SEQ ID NO: 266564 - DNA, 120 bp, Artificial Sequence
  ENSG00000126267_3 (sequence is synthesized)
tagggcctgcgattatccccttttgtcagtaaacaggctcagagataccaagcgacctagctgaacctacacagcgaccaggatttggcccaggagtttgtcctccagggctcttcatgg

SEQ ID NO: 266565 - DNA, 120 bp, Artificial Sequence
  ENSG00000126267_4 (sequence is synthesized)
ctaattcacaggcgtggcctctcgcggcttgcctgggccgcagcctggctcccgggtgtccagtccatcctcccttttggacgttggaggggccgcagcgtcatctccgatgcaccctca

SEQ ID NO: 266566 - DNA, 120 bp, Artificial Sequence
  ENSG00000126267_5 (sequence is synthesized)
agtagttccgcttcctgtccgactgtggtgtctttgctgagggtcacattgagctgcaggttgaatccggggtgcctttaggattcagcaccatggcggaagacatggagaccaaaatca

SEQ ID NO: 266567 - DNA, 82 bp, Artificial Sequence
  ENSG00000126267_6 (sequence is synthesized)
tcgtaccagtgaaaaaaaaaaacattcagcgagaggtttctgggattcatcagactgctgaggagtttgtggcaccaaaaag

SEQ ID NO: 266568 - DNA, 120 bp, Artificial Sequence
  ENSG00000126267_7 (sequence is synthesized)
ggattcatcagactgctgaggagtttgtggcaccaaaaagattaagaatctttgcagtgtagattatgccaacaacggaggcagcccaccagttatttttatgccgtttaaccgtaggaa

SEQ ID NO: 266569 - DNA, 120 bp, Artificial Sequence
  ENSG00000126267_8 (sequence is synthesized)
gtcacttagacaccctgttccttcctcgtctgggcaatggtgatagtaatagttcctaccttttagagtggctataggagtaaagtgtgtagaacagcgcctggcatgtagtaagcactc

SEQ ID NO: 266570 - DNA, 120 bp, Artificial Sequence
  ENSG00000126267_9 (sequence is synthesized)
ctgccgcgacctcgacactcagatgtgtggattcgccctgcccctcatctctgtgtatgttgagaggcaggaacttgttcacacccagcccattgttccgtgcctgccctcttccattga

SEQ ID NO: 266571 - DNA, 120 bp, Artificial Sequence
  ENSG00000126267_10 (sequence is synthesized)
tcctgggtagtctggcttgctcagggcccctggggcccctgctgacacccactcctttcgcctccaggattcagcaccatggcggaagacatggagaccaaaatcaagaactacaagacc

SEQ ID NO: 266572 - DNA, 120 bp, Artificial Sequence
  ENSG00000126337_0 (sequence is synthesized)
atggccacccagacctgcacccctaccttctccactgggtctatcaagggcctctgtggcacagcaggcggcatctctcgggtgtcctccatccgttctgtgggctcctgcagggtcccc

SEQ ID NO: 266573 - DNA, 120 bp, Artificial Sequence
  ENSG00000126337_1 (sequence is synthesized)
agtctcgccggtgctgcagggtacatctcttctgctaggtcgggcctctctggccttgggagctgcttgcctggctcctacctgtcttctgagtgccacacctctggctttgtggggagc

SEQ ID NO: 266574 - DNA, 120 bp, Artificial Sequence
  ENSG00000126337_2 (sequence is synthesized)
gggggctggttctgcgagggctccttcaacggcagcgagaaggagactatgcagttcctgaacgaccgcctggccaactacctggagaaggtgcgtcagctggagcgggagaacgcggag

SEQ ID NO: 266575 - DNA, 120 bp, Artificial Sequence
  ENSG00000126337_3 (sequence is synthesized)
ctggagagccgcatccaggagtggtacgagtttcagatcccatacatctgcccagactaccagtcctacttcaagaccatcgaagatttccagcagaagatcctgctgactaagtctgag

SEQ ID NO: 266576 - DNA, 120 bp, Artificial Sequence
  ENSG00000126337_4 (sequence is synthesized)
aatgccaggctggtcctgcagattgataatgccaagctggctgctgacgacttccggaccaagtatgagacagagctgtctctgcggcagctagtggaggccgacatcaacggcctgcgt

SEQ ID NO: 266577 - DNA, 120 bp, Artificial Sequence
  ENSG00000126337_5 (sequence is synthesized)
aggatcctggatgagctgaccctgtgcaaggctgacctggaggctcaggtggagtccctgaaggaggagctgatgtgcctcaagaagaatcacgaggaggaagtcagtgtactccgttgc

SEQ ID NO: 266578 - DNA, 120 bp, Artificial Sequence
  ENSG00000126337_6 (sequence is synthesized)
tacgaggccctggtggagaataaccgcagagatgtggaggcctggttcaacacccagactgaggagctgaaccagcaggtggtgtccagctcggagcagctgcagtgctgccagacggag

SEQ ID NO: 266579 - DNA, 120 bp, Artificial Sequence
  ENSG00000126337_7 (sequence is synthesized)
atcatcgagctgagacgtacggtcaacgcgctagagattgagctgcaggctcagcacagcatgcggaattccttggaatccaccctggccgaaaccgaggcccgctacagctcccagctg

SEQ ID NO: 266580 - DNA, 120 bp, Artificial Sequence
  ENSG00000126337_8 (sequence is synthesized)
gcccagatgcagtgcctgatcagcaacgtggaggcccagctgtctgagatccgctgcgacctggagcggcagaaccaggagtaccaggtgttactggacgtcaaggcccggctggagggc

SEQ ID NO: 266581 - DNA, 120 bp, Artificial Sequence
  ENSG00000126337_9 (sequence is synthesized)
gagatcgctacctaccgccacctgctggagggagaggactgcaagcttcctccccaaccttgtgccacggcatgcaagcctgttattagagttccttctgtccccccggtgccctgtgtc

SEQ ID NO: 266582 - DNA, 120 bp, Artificial Sequence
  ENSG00000126337_10 (sequence is synthesized)
ccctctgtgccctgcaccccggctccccaggttggcactcagatccgcaccatcaccgaggagatcagagatgggaaagtcatctcctccagggagcacgtgcagtcccgcccgctgtga

SEQ ID NO: 266583 - DNA, 120 bp, Artificial Sequence
  ENSG00000126337_11 (sequence is synthesized)
cagcccacttggtccaccagggcagggccctgaccacaggaaggaggacacccctgtggctcctggaggcttaacgaccctgcccttctctagaggggtccccctacgcttagcaggttt

SEQ ID NO: 266584 - DNA, 120 bp, Artificial Sequence
  ENSG00000126337_12 (sequence is synthesized)
ttctaccaaaacactccccgtattgtgtttccggacttaactgtgcttttacgccatgcaaaaccaggtttcctggaaatttacccaataaagtgtgttctcctggcatagcaaactcaa

SEQ ID NO: 266585 - DNA, 120 bp, Artificial Sequence
  ENSG00000126337_13 (sequence is synthesized)
gcagcttgaacttagttctcgctgagtcccggctcagggcccttcccttgggtcggggggttggctgtgcagtcaacaataaggaaaaaggcaagacactgagggcagctgaaagacttt

SEQ ID NO: 266586 - DNA, 120 bp, Artificial Sequence
  ENSG00000126337_14 (sequence is synthesized)
tacctttgacgagctggtcacctgctccagggaaggtacattcctctccccacaaccctagaggcacctctctggtccacagtgtccctcctgatgctcaggtcgggcctctctggcctt

SEQ ID NO: 266587 - DNA, 80 bp, Artificial Sequence
  ENSG00000126351_0 (sequence is synthesized)
gcgctcactcgcactcacacccgggcgcaggaggcgggcggcccgggccccaccggccccccatggacgcccccagcacg

SEQ ID NO: 266588 - DNA, 120 bp, Artificial Sequence
  ENSG00000126351_1 (sequence is synthesized)
ccatggacgcccccagcacggggcgctgagacccccgcgtcgctgcccagcccggtccggcgcgccacgccgagggatctctggacaggacaagactccgaagctactcccccagcacac

SEQ ID NO: 266589 - DNA, 120 bp, Artificial Sequence
  ENSG00000126351_2 (sequence is synthesized)
agcccgggacccacaaacccagcttgcccccagccctcccacctgccactccctggcccctcccaccgcccgccccccttggggcgcagggcatggtgtgaaaggccaagtgctgaggcg

SEQ ID NO: 266590 - DNA, 120 bp, Artificial Sequence
  ENSG00000126351_3 (sequence is synthesized)
ggtatcatgggtgctgtgccctagggcctgggtggcagggggtgggtggcctgtgggtgtgccgggggggccagtgtgcccaccccagtctcttggcgtgctggagggcatcctggatgg

SEQ ID NO: 266591 - DNA, 120 bp, Artificial Sequence
  ENSG00000126351_4 (sequence is synthesized)
aattgaagtgaatggaacagaagccaagcaaggtggagtgtgggtcagacccagaggagaacagtgccaggtcaccagatggaaagcgaaaaagaaagaacggccaatgttccctgaaaa

SEQ ID NO: 266592 - DNA, 120 bp, Artificial Sequence
  ENSG00000126351_5 (sequence is synthesized)
ccagcatgtcagggtatatccctagttacctggacaaagacgagcagtgtgtcgtgtgtggggacaaggcaactggttatcactaccgctgtatcacttgtgagggctgcaagggcttct

SEQ ID NO: 266593 - DNA, 120 bp, Artificial Sequence
  ENSG00000126351_6 (sequence is synthesized)
ttcgccgcacaatccagaagaacctccatcccacctattcctgcaaatatgacagctgctgtgtcattgacaagatcacccgcaatcagtgccagctgtgccgcttcaagaagtgcatcg

SEQ ID NO: 266594 - DNA, 120 bp, Artificial Sequence
  ENSG00000126351_7 (sequence is synthesized)
ccgtgggcatggccatggacttggttctagatgactcgaagcgggtggccaagcgtaagctgattgagcagaaccgggagcggcggcggaaggaggagatgatccgatcactgcagcagc

SEQ ID NO: 266595 - DNA, 120 bp, Artificial Sequence
  ENSG00000126351_8 (sequence is synthesized)
gaccagagcccactcctgaagagtgggatctgatccacattgccacagaggcccatcgcagcaccaatgcccagggcagccattggaaacagaggcggaaattcctgcccgatgacattg

SEQ ID NO: 266596 - DNA, 120 bp, Artificial Sequence
  ENSG00000126351_9 (sequence is synthesized)
gccagtcacccattgtctccatgccggacggagacaaggtggacctggaagccttcagcgagtttaccaagatcatcaccccggccatcacccgtgtggtggactttgccaaaaaactgc

SEQ ID NO: 266597 - DNA, 120 bp, Artificial Sequence
  ENSG00000126351_10 (sequence is synthesized)
ccatgttctccgagctgccttgcgaagaccagatcatcctcctgaaggggtgctgcatggagatcatgtccctgcgggcggctgtccgctacgaccctgagagcgacaccctgacgctga

SEQ ID NO: 266598 - DNA, 120 bp, Artificial Sequence
  ENSG00000126351_11 (sequence is synthesized)
gtggggagatggctgtcaagcgggagcagctcaagaatggcggcctgggcgtagtctccgacgccatctttgaactgggcaagtcactctctgcctttaacctggatgacacggaagtgg

SEQ ID NO: 266599 - DNA, 120 bp, Artificial Sequence
  ENSG00000126351_12 (sequence is synthesized)
ctctgctgcaggctgtgctgctaatgtcaacagaccgctcgggcctgctgtgtgtggacaagatcgagaagagtcaggaggcgtacctgctggcgttcgagcactacgtcaaccaccgca

SEQ ID NO: 266600 - DNA, 120 bp, Artificial Sequence
  ENSG00000126351_13 (sequence is synthesized)
aacacaacattccgcacttctggcccaagctgctgatgaaggtgactgacctccgcatgatcggggcctgccacgccagccgcttcctccacatgaaagtcgagtgccccaccgaactct

SEQ ID NO: 266601 - DNA, 120 bp, Artificial Sequence
  ENSG00000126351_14 (sequence is synthesized)
tccccccactcttcctcgaggtctttgaggatcaggaagtctaaagcctcaggcggccagagggtgtgcggagctggtggggaggagcctggagagaaggggcagagctgggggctgagg

SEQ ID NO: 266602 - DNA, 120 bp, Artificial Sequence
  ENSG00000126351_15 (sequence is synthesized)
gagacccccccacaccccttctctccttcctctcgtccttggatagattcagctcccacacacacacccgcactgcccaggtccctcctcagacctccagccctgggacagggcaaacaa

SEQ ID NO: 266603 - DNA, 120 bp, Artificial Sequence
  ENSG00000126351_16 (sequence is synthesized)
ctgaacttgctatggaaaggacagtgtgggaggctgggggagctgtgtcctgcagttcccaggaccccatcctctcagaaggtaggggaagggcgggaggattgagaagggacaagccac

SEQ ID NO: 266604 - DNA, 120 bp, Artificial Sequence
  ENSG00000126351_17 (sequence is synthesized)
cttgaccgtaggggaaggaggaatgtgggctgggggaagatgccctcaactcaccccctacacacacatgagagagagcccccacccagttccttggcctaggtctcccctccaggctga

SEQ ID NO: 266605 - DNA, 120 bp, Artificial Sequence
  ENSG00000126351_18 (sequence is synthesized)
gggcctctctacttccccagatgcctgggtgcaaagaacggcttggcttggctcctcctctggaggttaaaatttatagtcattctaactgcactttggaaaccaagcaaggggagaaga

SEQ ID NO: 266606 - DNA, 120 bp, Artificial Sequence
  ENSG00000126351_19 (sequence is synthesized)
caaatgaagaaaaactagacagagagaaaaatacaaaaaagagagagcgagcgatagagagagatgatattaagttattaactgaggctgaccagaggggaggaccccccctttaccacc

SEQ ID NO: 266607 - DNA, 120 bp, Artificial Sequence
  ENSG00000126351_20 (sequence is synthesized)
agttaacacaacagggtcctggccaccccccttgccataccccgccctctgtgcccctttggcaccccccaaccctagtatgtcctctgctttctgccactcgtgcccgctgagttccat

SEQ ID NO: 266608 - DNA, 120 bp, Artificial Sequence
  ENSG00000126351_21 (sequence is synthesized)
ctacctctcatgctggatgccagctggcccctcaccagcctgccctgctgcccacacagctcccctttaagtgcccagccctaggggcctctccccatccacctcctccttccacacctt

SEQ ID NO: 266609 - DNA, 120 bp, Artificial Sequence
  ENSG00000126351_22 (sequence is synthesized)
ggcacccacccaggaaaaaactgtggctccaactcctaccctccttatatcctgcagtattagctagaaaccggatgctgctgcattggttgggtcgggggtaggagggctgtgcgtgag

SEQ ID NO: 266610 - DNA, 120 bp, Artificial Sequence
  ENSG00000126351_23 (sequence is synthesized)
cgtctcccagaaccctccacccctttagcactctgtttccctgtttcccatctgtcttctgggctctctctaacctctgccctcctccccagctcctactcactgcactaactctgggcg

SEQ ID NO: 266611 - DNA, 120 bp, Artificial Sequence
  ENSG00000126351_24 (sequence is synthesized)
ggcaggtaccagaatgggggtgtttagataagtgacacttagttggggccccaggggaggggtggtcggtgctcctttttctttaaagctcttttggccagctgcccctctgccccggga

SEQ ID NO: 266612 - DNA, 120 bp, Artificial Sequence
  ENSG00000126351_25 (sequence is synthesized)
ccccttcccctcttcttttctctaattcagggactttggcttgagcccctctcgccctcctggtgagggtgctctgttggtctgcacttgggtgagctgtcctcctccccctccctgtgg

SEQ ID NO: 266613 - DNA, 120 bp, Artificial Sequence
  ENSG00000126351_26 (sequence is synthesized)
ctgccgcccactcctcaggggagagagggagagaggaggtggtcctcccatgggagcaggaggtggggtgggacagagcagaccagagggtgctgggctcagggctgcatgtcggcaggg

SEQ ID NO: 266614 - DNA, 120 bp, Artificial Sequence
  ENSG00000126351_27 (sequence is synthesized)
atggatgggtggacacagatgcccccggaagccatggggattggggcagggggtggggggaggggtgccagggcttcctgcgctttgcactattggggcaaaaatgtcttaagcagtggg

SEQ ID NO: 266615 - DNA, 77 bp, Artificial Sequence
  ENSG00000126351_28 (sequence is synthesized)
cgctttgcactattggggcaaaaatgtcttaagcagtggggaacctgccaccccaccctgaccctcagcctgccaca

SEQ ID NO: 266616 - DNA, 120 bp, Artificial Sequence
  ENSG00000126351_29 (sequence is synthesized)
gctgcccgtcagggcactgtccttccccaatcgttcaggtgttccaacaggggtggagggcctggaggagcacccgctgtcacctgtgcatgtgcctgtcccaccctgctggggcctcgg

SEQ ID NO: 266617 - DNA, 120 bp, Artificial Sequence
  ENSG00000126351_30 (sequence is synthesized)
gctgcccgcgctgtctttgtctctatcctctctctctctcctggagtactgaatcctgtattactccagtcccatgggtaggccctcttgtaccttcctaccacgcctgggggcccagtg

SEQ ID NO: 266618 - DNA, 120 bp, Artificial Sequence
  ENSG00000126351_31 (sequence is synthesized)
gaattcctgacctgtctgctgtcttccccatccctccatccccaccccaacccctccatccccattctcagccatggacacggcagagaaaaggccttgaagagccttagcctcttatag

SEQ ID NO: 266619 - DNA, 120 bp, Artificial Sequence
  ENSG00000126351_32 (sequence is synthesized)
gcacttgggactcccccaccctccccaatcatatgagctgtgatcccatcctccccggacccctcccttccccctcggtgatgtggggtgtatgtgtgcgttcctctgcgtgaatgtgtg

SEQ ID NO: 266620 - DNA, 120 bp, Artificial Sequence
  ENSG00000126351_33 (sequence is synthesized)
agtgagtacacatggtaggggaggagccagggcgactcaggagtgccacgcacctgctctagagcggcagctgtcccagtccctgctgtggaagtgggggacagggccctctcctggggg

SEQ ID NO: 266621 - DNA, 120 bp, Artificial Sequence
  ENSG00000126351_34 (sequence is synthesized)
ccattggtgctaatgagggggatggccttgatgtgggtgctcagcatgcctcccccagtattggcccggggcactagggcaggcagggtggagcagcaggtgcagtatcggtgggaggac

SEQ ID NO: 266622 - DNA, 120 bp, Artificial Sequence
  ENSG00000126351_35 (sequence is synthesized)
gggttgctgggaataggacgagggggccaggccaggacaaggggttgccagagccatgaccactaccccgcccccaccacccgcctctccatctcagtattgcccctcccatcactcata

SEQ ID NO: 266623 - DNA, 120 bp, Artificial Sequence
  ENSG00000126351_36 (sequence is synthesized)
acacacatacctcatccagcctcctccctgctcagacttggggagggtgggggaggagcccctaccccttctcctggtggcgggtctgcagggctgggagagggcagggcgttgtgagag

SEQ ID NO: 266624 - DNA, 120 bp, Artificial Sequence
  ENSG00000126351_37 (sequence is synthesized)
agagaccgtccataaggaggacagtaactcctgccctgggaactcctgggcgggggggagggggacactgcccagaggcgctactgaatgtatgagaagctggtgctgggctggggggag

SEQ ID NO: 266625 - DNA, 120 bp, Artificial Sequence
  ENSG00000126351_38 (sequence is synthesized)
gggggttgtggccagaaacagggaaggaggtaggtctcttccccagggaggggtgggaccggcaggggtgacttgaggggctcctactcctgccccacgttgacaatcagtatgtctgtt

SEQ ID NO: 266626 - DNA, 120 bp, Artificial Sequence
  ENSG00000126351_39 (sequence is synthesized)
atgtgcgatttttcaccccgttgtgttttgggtcaggattttaaagaaagatatttttatggtaattgttgctcgtctattttactatatatttatgtaataaatatatgatgaaaataa

SEQ ID NO: 266627 - DNA, 120 bp, Artificial Sequence
  ENSG00000126351_40 (sequence is synthesized)
gtgcacgcatccatgtgagagtgtttttgtgcatgtgtgggctggggagggctctgaatatctcctggaacggtacccagagccctgtggctctgcgcatgcgggggatctctggacagg

SEQ ID NO: 266628 - DNA, 120 bp, Artificial Sequence
  ENSG00000126351_41 (sequence is synthesized)
agtgcagagttcgattctgtacaagggggcagcggcagaaggccggccgggcgggtcactgggcgtccacccggaaggacagcagcttctcggaatgcatgttgttcagggtccgcaggt

SEQ ID NO: 266629 - DNA, 120 bp, Artificial Sequence
  ENSG00000126351_42 (sequence is synthesized)
ccggcagcttgagcagcagcttggtgaagcgggaagtctccaagggccggttcttcagcaccagagcccgaagagcccgcagcagcgtctcctggagctgctccaccgaagcggaattct

SEQ ID NO: 266630 - DNA, 120 bp, Artificial Sequence
  ENSG00000126351_43 (sequence is synthesized)
ccatgcccgagcggtctgtggggaagacgacagcagtgaggcggactccccgagctcctctgaggaggaaccggaggtctgcgaggacctggcaggcaatgcagcctctccctgaagccc

SEQ ID NO: 266631 - DNA, 120 bp, Artificial Sequence
  ENSG00000126351_44 (sequence is synthesized)
cccagaaggccgatggggaaggagaaggagtgccataccttctcccaggcctctgccccaagagcaggaggtgcctgaaagctgggagcgtgggctcagcagggctggtcacctcccatc

SEQ ID NO: 266632 - DNA, 120 bp, Artificial Sequence
  ENSG00000126351_45 (sequence is synthesized)
ccgtaagaccaccttcccttcctcagcaggccaaacatggccagactcccttgctttttgctgtgtagttccctctgcctgggatgcccttccccctttctctgcctggcaacatcttac

SEQ ID NO: 266633 - DNA, 120 bp, Artificial Sequence
  ENSG00000126351_46 (sequence is synthesized)
ttgtcctttgaggccccaactcaagtgtcacctccttccccagctcccccaggcagaaatagttgtctgtgcttccttggttcatgcttctactgtgacacttatctcactgttttataa

SEQ ID NO: 266634 - DNA, 120 bp, Artificial Sequence
  ENSG00000126351_47 (sequence is synthesized)
ttagtcgggcatgagtctgtttcccaagctagactgtgtctgaatcatgtctgtatccccagtgcccggtgcagggcctggcatagagtaggtactccataaaaggtgtgttgaattgaa

SEQ ID NO: 266635 - DNA, 120 bp, Artificial Sequence
  ENSG00000126351_48 (sequence is synthesized)
acatttggagttaaggctgggcaggagagagggatggggaaataaacatggtggcttaggttggcactgctccaggtctgcaatgtagcaactgggatctctggacaggacaagactccg

SEQ ID NO: 266636 - DNA, 120 bp, Artificial Sequence
  ENSG00000126351_49 (sequence is synthesized)
agcagattgttgggggaaatggctggtgacagagaatagaaagagcctatatggagaagggtgacgttggaaaagggaggcagtggatcggtattgatgttagaaatgagaggggaggga

SEQ ID NO: 266637 - DNA, 120 bp, Artificial Sequence
  ENSG00000126351_50 (sequence is synthesized)
ggtaacagggaatgaacccccacaaggatgaaaaacgtaagatgattgaagttaaaaggacatcaggggtcacctgcccagccctcgcagctgaagcttgaggaagctctgcccccgaca

SEQ ID NO: 266638 - DNA, 120 bp, Artificial Sequence
  ENSG00000126351_51 (sequence is synthesized)
atactcccagcacaaagagaagtgctgtgatcctgaggccgacagtggctgggaagggagggcagcctgccatttcctttgtatggcccctccctccaggccctgagagctgctctgctt

SEQ ID NO: 266639 - DNA, 120 bp, Artificial Sequence
  ENSG00000126351_52 (sequence is synthesized)
gcagtggcgatttgtcaaggtcacacagtgagttaccggcggagaagggacccgaactcccaaacaaactacacctgcaagcgtttggtgtttagactttctccccgatgtataagggat

SEQ ID NO: 266640 - DNA, 120 bp, Artificial Sequence
  ENSG00000126351_53 (sequence is synthesized)
gggattaatcatgatccgggttgtgctgcccaactgctaggtgatttgggaagtcatttagcctccatggccctcggtttctccaacctgtactctaggaagagtagtttccgggagcat

SEQ ID NO: 266641 - DNA, 120 bp, Artificial Sequence
  ENSG00000126351_54 (sequence is synthesized)
atgctgtgctggagggaaacctgctcccccggtcacccagtacaggctcatctgaggttctctggacaaggagcaattcctgtaggtcaacatacacagataacatacacagacacacac

SEQ ID NO: 266642 - DNA, 120 bp, Artificial Sequence
  ENSG00000126353_0 (sequence is synthesized)
agacaggggtagtgcgaggccgggcacagccttcctgtgtggttttaccgcccagagagcgtcatggacctggggaaaccaatgaaaagcgtgctggtggtggctctccttgtcattttc

SEQ ID NO: 266643 - DNA, 120 bp, Artificial Sequence
  ENSG00000126353_1 (sequence is synthesized)
caggtatgcctgtgtcaagatgaggtcacggacgattacatcggagacaacaccacagtggactacactttgttcgagtctttgtgctccaagaaggacgtgcggaactttaaagcctgg

SEQ ID NO: 266644 - DNA, 120 bp, Artificial Sequence
  ENSG00000126353_2 (sequence is synthesized)
ttcctccctatcatgtactccatcatttgtttcgtgggcctactgggcaatgggctggtcgtgttgacctatatctatttcaagaggctcaagaccatgaccgatacctacctgctcaac

SEQ ID NO: 266645 - DNA, 120 bp, Artificial Sequence
  ENSG00000126353_3 (sequence is synthesized)
ctggcggtggcagacatcctcttcctcctgacccttcccttctgggcctacagcgcggccaagtcctgggtcttcggtgtccacttttgcaagctcatctttgccatctacaagatgagc

SEQ ID NO: 266646 - DNA, 120 bp, Artificial Sequence
  ENSG00000126353_4 (sequence is synthesized)
ttcttcagtggcatgctcctacttctttgcatcagcattgaccgctacgtggccatcgtccaggctgtctcagctcaccgccaccgtgcccgcgtccttctcatcagcaagctgtcctgt

SEQ ID NO: 266647 - DNA, 120 bp, Artificial Sequence
  ENSG00000126353_5 (sequence is synthesized)
gtgggcatctggatactagccacagtgctctccatcccagagctcctgtacagtgacctccagaggagcagcagtgagcaagcgatgcgatgctctctcatcacagagcatgtggaggcc

SEQ ID NO: 266648 - DNA, 120 bp, Artificial Sequence
  ENSG00000126353_6 (sequence is synthesized)
tttatcaccatccaggtggcccagatggtgatcggctttctggtccccctgctggccatgagcttctgttaccttgtcatcatccgcaccctgctccaggcacgcaactttgagcgcaac

SEQ ID NO: 266649 - DNA, 120 bp, Artificial Sequence
  ENSG00000126353_7 (sequence is synthesized)
aaggccatcaaggtgatcatcgctgtggtcgtggtcttcatagtcttccagctgccctacaatggggtggtcctggcccagacggtggccaacttcaacatcaccagtagcacctgtgag

SEQ ID NO: 266650 - DNA, 120 bp, Artificial Sequence
  ENSG00000126353_8 (sequence is synthesized)
ctcagtaagcaactcaacatcgcctacgacgtcacctacagcctggcctgcgtccgctgctgcgtcaaccctttcttgtacgccttcatcggcgtcaagttccgcaacgatctcttcaag

SEQ ID NO: 266651 - DNA, 120 bp, Artificial Sequence
  ENSG00000126353_9 (sequence is synthesized)
tgggctgcctcagccaggagcagctccggcagtggtcttcctgtcggcacatccggcgctcctccatgagtgtggaggccgagaccaccaccaccttctccccataggcgactcttctgc

SEQ ID NO: 266652 - DNA, 120 bp, Artificial Sequence
  ENSG00000126353_10 (sequence is synthesized)
ctggactagagggacctctcccagggtccctggggtggggatagggagcagatgcaatgactcaggacatccccccgccaaaagctgctcagggaaaagcagctctcccctcagagtgca

SEQ ID NO: 266653 - DNA, 120 bp, Artificial Sequence
  ENSG00000126353_11 (sequence is synthesized)
agcccctgctccagaagatagcttcaccccaatcccagctacctcaaccaatgccaaaaaaagacagggctgataagctaacaccagacagacaacactgggaaacagaggctattgtcc

SEQ ID NO: 266654 - DNA, 120 bp, Artificial Sequence
  ENSG00000126353_12 (sequence is synthesized)
cctaaaccaaaaactgaaagtgaaagtccagaaactgttcccacctgctggagtgaaggggccaaggagggtgagtgcaaggggcgtgggagtggcctgaagagtcctctgaatgaacct

SEQ ID NO: 266655 - DNA, 120 bp, Artificial Sequence
  ENSG00000126353_13 (sequence is synthesized)
tctggcctcccacagactcaaatgctcagaccagctcttccgaaaaccaggccttatctccaagaccagagatagtggggagacttcttggcttggtgaggaaaagcggacatcagctgg

SEQ ID NO: 266656 - DNA, 120 bp, Artificial Sequence
  ENSG00000126353_14 (sequence is synthesized)
tcaaacaaactctctgaacccctccctccatcgttttcttcactgtcctccaagccagcgggaatggcagctgccacgccgccctaaaagcacactcatcccctcacttgccgcgtcgcc

SEQ ID NO: 266657 - DNA, 120 bp, Artificial Sequence
  ENSG00000126353_15 (sequence is synthesized)
ctcccaggctctcaacaggggagagtgtggtgtttcctgcaggccaggccagctgcctccgcgtgatcaaagccacactctgggctccagagtggggatgacatgcactcagctcttggc

SEQ ID NO: 266658 - DNA, 120 bp, Artificial Sequence
  ENSG00000126353_16 (sequence is synthesized)
tccactgggatgggaggagaggacaagggaaatgtcaggggcggggagggtgacagtggccgcccaaggcccacgagcttgttctttgttctttgtcacagggactgaaaacctctcctc

SEQ ID NO: 266659 - DNA, 120 bp, Artificial Sequence
  ENSG00000126353_17 (sequence is synthesized)
atgttctgctttcgattcgttaagagagcaacattttacccacacacagataaagttttcccttgaggaaacaacagctttaaaagaaaaagaaaaaaaaagtctttggtaaatggcaaa

SEQ ID NO: 266660 - DNA, 120 bp, Artificial Sequence
  ENSG00000126353_18 (sequence is synthesized)
ctctagatgagtcagtggagggcgggtggagcgttgaaccgtgaagagtgtggttgggcgtaaacgtggacttaaactcaggagctaaggggtaattcagtgaaaaaggggaatgagcgg

SEQ ID NO: 266661 - DNA, 120 bp, Artificial Sequence
  ENSG00000126353_19 (sequence is synthesized)
tggggagctctgttgcaacagggtccaatcgcagcaggactacaaatgcccgagcgcaggctgggaacgaggggacagcggctgcctgtccccagaatagaaaatgcagctaggaagccc

SEQ ID NO: 266662 - DNA, 120 bp, Artificial Sequence
  ENSG00000126353_20 (sequence is synthesized)
tctttgagtggacagcggaggactggactgccaggccaagcatcaggggcttcatcctcagggccggttagagcccctgaggatttaggaggaagggaaaccaatgaaaagcgtgctggt

SEQ ID NO: 266663 - DNA, 120 bp, Artificial Sequence
  ENSG00000126368_0 (sequence is synthesized)
agagtgaaatattactgccgagggaacgtagcagggcacacgtctcgcctctttgcgactcggtgccccgtttctccccatcacctacttacttcctggttgcaacctctcttcctctgg

SEQ ID NO: 266664 - DNA, 120 bp, Artificial Sequence
  ENSG00000126368_1 (sequence is synthesized)
gacttttgcaccgggagctccagattcgccaccccgcagcgctgcggagccggcaggcagaggcaccccgtacactgcagagacccgaccctccttgctaccttctagccagaactactg

SEQ ID NO: 266665 - DNA, 120 bp, Artificial Sequence
  ENSG00000126368_2 (sequence is synthesized)
caggctgattccccctacacactctctctgctcttcccatgcaaagcagaactccgttgcctcaacgtccaacccttctgcagggctgcagtccggccaccccaagaccttgctgcaggg

SEQ ID NO: 266666 - DNA, 120 bp, Artificial Sequence
  ENSG00000126368_3 (sequence is synthesized)
tgcttcggatcctgatcgtgagtcgcggggtccactccccgcccttagccagtgcccagggggcaacagcggcgatcgcaacctctagtttgagtcaaggtccagtttgaatgaccgctc

SEQ ID NO: 266667 - DNA, 120 bp, Artificial Sequence
  ENSG00000126368_4 (sequence is synthesized)
tcagctggtgaagacatgacgaccctggactccaacaacaacacaggtggcgtcatcacctacattggctccagtggctcctccccaagccgcaccagccctgaatccctctatagtgac

SEQ ID NO: 266668 - DNA, 120 bp, Artificial Sequence
  ENSG00000126368_5 (sequence is synthesized)
aactccaatggcagcttccagtccctgacccaaggctgtcccacctacttcccaccatcccccactggctccctcacccaagacccggctcgctcctttgggagcattccacccagcctg

SEQ ID NO: 266669 - DNA, 120 bp, Artificial Sequence
  ENSG00000126368_6 (sequence is synthesized)
agtgatgacggctccccttcttcctcatcttcctcgtcgtcatcctcctcctccttctataatgggagcccccctgggagtctacaagtggccatggaggacagcagccgagtgtccccc

SEQ ID NO: 266670 - DNA, 120 bp, Artificial Sequence
  ENSG00000126368_7 (sequence is synthesized)
agcaagagcaccagcaacatcaccaagctgaatggcatggtgttactgtgtaaagtgtgtggggacgttgcctcgggcttccactacggtgtgcacgcctgcgagggctgcaagggcttt

SEQ ID NO: 266671 - DNA, 120 bp, Artificial Sequence
  ENSG00000126368_8 (sequence is synthesized)
ttccgtcggagcatccagcagaacatccagtacaaaaggtgtctgaagaatgagaattgctccatcgtccgcatcaatcgcaaccgctgccagcaatgtcgcttcaagaagtgtctctct

SEQ ID NO: 266672 - DNA, 120 bp, Artificial Sequence
  ENSG00000126368_9 (sequence is synthesized)
gtgggcatgtctcgagacgctgtgcgttttgggcgcatccccaaacgagagaagcagcggatgcttgctgagatgcagagtgccatgaacctggccaacaaccagttgagcagccagtgc

SEQ ID NO: 266673 - DNA, 120 bp, Artificial Sequence
  ENSG00000126368_10 (sequence is synthesized)
gctgacgcctcccagatccccaagccctgagcccacagtggaggatgtgatatcccaggtggcccgggcccatcgagagatcttcacctacgcccatgacaagctgggcagctcacctgg

SEQ ID NO: 266674 - DNA, 120 bp, Artificial Sequence
  ENSG00000126368_11 (sequence is synthesized)
caacttcaatgccaaccatgcatcaggtagccctccagccaccaccccacatcgctgggaaaatcagggctgcccacctgcccccaatgacaacaacaccttggctgcccagcgtcataa

SEQ ID NO: 266675 - DNA, 120 bp, Artificial Sequence
  ENSG00000126368_12 (sequence is synthesized)
cgaggccctaaatggtctgcgccaggctccctcctcctaccctcccacctggcctcctggccctgcacaccacagctgccaccagtccaacagcaacgggcaccgtctatgccccaccca

SEQ ID NO: 266676 - DNA, 120 bp, Artificial Sequence
  ENSG00000126368_13 (sequence is synthesized)
cgtgtatgcagccccagaaggcaaggcacctgccaacagtccccggcagggcaactcaaagaatgttctgctggcatgtcctatgaacatgtacccgcatggacgcagtgggcgaacggt

SEQ ID NO: 266677 - DNA, 120 bp, Artificial Sequence
  ENSG00000126368_14 (sequence is synthesized)
gcaggagatctgggaggatttctccatgagcttcacgcccgctgtgcgggaggtggtagagtttgccaaacacatcccgggcttccgtgacctttctcagcatgaccaagtcaccctgct

SEQ ID NO: 266678 - DNA, 120 bp, Artificial Sequence
  ENSG00000126368_15 (sequence is synthesized)
taaggctggcacctttgaggtgctgatggtgcgctttgcttcgttgttcaacgtgaaggaccagacagtgatgttcctaagccgcaccacctacagcctgcaggagcttggtgccatggg

SEQ ID NO: 266679 - DNA, 120 bp, Artificial Sequence
  ENSG00000126368_16 (sequence is synthesized)
catgggagacctgctcagtgccatgttcgacttcagcgagaagctcaactccctggcgcttaccgaggaggagctgggcctcttcaccgcggtggtgcttgtctctgcagaccgctcggg

SEQ ID NO: 266680 - DNA, 120 bp, Artificial Sequence
  ENSG00000126368_17 (sequence is synthesized)
catggagaattccgcttcggtggagcagctccaggagacgctgctgcgggctcttcgggctctggtgctgaagaaccggcccttggagacttcccgcttcaccaagctgctgctcaagct

SEQ ID NO: 266681 - DNA, 120 bp, Artificial Sequence
  ENSG00000126368_18 (sequence is synthesized)
gccggacctgcggaccctgaacaacatgcattccgagaagctgctgtccttccgggtggacgcccagtgacccgcccggccggccttctgccgctgcccccttgtacagaatcgaactct

SEQ ID NO: 266682 - DNA, 120 bp, Artificial Sequence
  ENSG00000126368_19 (sequence is synthesized)
gcacttctctctcctttacgagacgaaaaggaaaagcaaaccagaatcttatttatattgttataaaatattccaagatgagcctctggccccctgagccttcttgtaaatacctgcctc

SEQ ID NO: 266683 - DNA, 120 bp, Artificial Sequence
  ENSG00000126368_20 (sequence is synthesized)
cctcccccatcaccgaacttcccctcctcccctatttaaaccactctgtctcccccacaaccctcccctggccctctgatttgttctgttcctgtctcaaatccaatagttcacagctga

SEQ ID NO: 266684 - DNA, 120 bp, Artificial Sequence
  ENSG00000126391_0 (sequence is synthesized)
gtcgcttcccggtcagctgcgtccttagcgggagcccgagtgcgggcggtggcgggcttggcggcggggcaggattccaggcaggagccttgcctctcaggtggcgggctctgcgaccct

SEQ ID NO: 266685 - DNA, 120 bp, Artificial Sequence
  ENSG00000126391_1 (sequence is synthesized)
gcgagatggacgggacagaaggcagtgccgggcagcccggccccgctgagcgatcccaccgaagcagcgtgtcctccgtgggagcccgagcggctgacgtgctggtatacctagcggatg

SEQ ID NO: 266686 - DNA, 120 bp, Artificial Sequence
  ENSG00000126391_2 (sequence is synthesized)
acacggtggtgcccctggctgtggagaacctgccctcgctcagtgcccatgagctgcaccgcgctgtccgcgaggtcctgcagcttccagacatcgccctggatgtcttcgcgctctggc

SEQ ID NO: 266687 - DNA, 120 bp, Artificial Sequence
  ENSG00000126391_3 (sequence is synthesized)
tggtctcccctctgctggaggtgcagctgaaacccaagcaccagccctacaagctgggacgccagtggccggagctgctgctgcgcttcaccagtgccccagacgatgacgtggccatgg

SEQ ID NO: 266688 - DNA, 120 bp, Artificial Sequence
  ENSG00000126391_4 (sequence is synthesized)
atgagcctttcctgcagttccgaaggaacgtgttcttcccaaagcggcgggagctccagatccatgacgaggaggtcctgcggctgctctatgaggaggccaagggcaacgtgctggctg

SEQ ID NO: 266689 - DNA, 120 bp, Artificial Sequence
  ENSG00000126391_5 (sequence is synthesized)
cacggtacccgtgcgacgtggaggactgcgaggctctgggcgccctggtgtgccgcgtgcagcttgggccctaccagcccggccggccggcagcctgcgacctgagggagaagctggact

SEQ ID NO: 266690 - DNA, 120 bp, Artificial Sequence
  ENSG00000126391_6 (sequence is synthesized)
ccttcctccctgcccacctctgtaagcggggccagagtctctttgctgccctccggggccgtggggccagggccgggccgggcgagcagggcctgctgaacgcctaccgccaggtgcagg

SEQ ID NO: 266691 - DNA, 120 bp, Artificial Sequence
  ENSG00000126391_7 (sequence is synthesized)
aggtcagcagcgacggcgggtgcgaggccgccctgggcacccactaccgcgcctatctcctcaagtgccacgagctgccgttttatgggtgtgccttcttccacggtgaggttgacaagc

SEQ ID NO: 266692 - DNA, 120 bp, Artificial Sequence
  ENSG00000126391_8 (sequence is synthesized)
cggcccaaggctttttgcaccggggtgggcgcaagccagtttctgtggccatcagtctggaaggcgtgcacgtcatcgatagcagagagaagcatgtcctgctgggcctgcgcttccagg

SEQ ID NO: 266693 - DNA, 120 bp, Artificial Sequence
  ENSG00000126391_9 (sequence is synthesized)
agctgtcgtgggaccacacctcccccgaggaggaggagcccatcttgtggctggagttcgacggggacagcgagggcacacctgtcaacaagctcctcaagatctactccaagcaggccg

SEQ ID NO: 266694 - DNA, 120 bp, Artificial Sequence
  ENSG00000126391_10 (sequence is synthesized)
aactgatgagcagtctcattgagtactgcatcgaactgagccaggcggcggagcccgcaggcccccaggacagtgcgactggctcgccctcggaccccagctcctcactggctcctgttc

SEQ ID NO: 266695 - DNA, 120 bp, Artificial Sequence
  ENSG00000126391_11 (sequence is synthesized)
agcgccccaagctgcggaggcagggcagtgtggtgtccagccggatccagcatctctccaccatcgactacgtggaggacggcaaggggatcaggcgagtgaagccgaagcgcaccacat

SEQ ID NO: 266696 - DNA, 120 bp, Artificial Sequence
  ENSG00000126391_12 (sequence is synthesized)
ccttcttcagccggcagctgtccttgggccaggggagctacaccgtggtgcagcccggcgacagcctggagcagggctgaggacgctgcacccggcaggaggagggcgactgggggccct

SEQ ID NO: 266697 - DNA, 120 bp, Artificial Sequence
  ENSG00000126391_13 (sequence is synthesized)
ggcccggcactgtcctcctgaggggcaggcgccggctgcaacagtctcatgggtcaccacgtggggagggctgcctcagcaggtttctcagaccacggagaagtgacttttgggcccggg

SEQ ID NO: 266698 - DNA, 120 bp, Artificial Sequence
  ENSG00000126391_14 (sequence is synthesized)
gccatgcccgggctgtgcaaagctggccagggcctcctgtagggctcctctgcagcctgccctcccttcccccggatgctgggccctgctgctctctcaggaccatccgatcaagctgca

SEQ ID NO: 266699 - DNA, 120 bp, Artificial Sequence
  ENSG00000126391_15 (sequence is synthesized)
agtggtagaggaccaaggattgaggtttgggacctgaagctccagtgtgtgcctttggcctcttccctggacttgggtgaccagtctccgtcttcctcctgctagtgctccaccccccgg

SEQ ID NO: 266700 - DNA, 120 bp, Artificial Sequence
  ENSG00000126391_16 (sequence is synthesized)
acttggatgaccagtttcccaccttcctcctgctggtgctccatcccccaataccaggctgggccaccactctgaggagggtaggaggggcctccctggattgaaccgggacagaaacac

SEQ ID NO: 266701 - DNA, 120 bp, Artificial Sequence
  ENSG00000126391_17 (sequence is synthesized)
ggtgagggcccccaccacacctccctggttgaatcaggaatggagggagccaggcagggccctacctggggtcctgtgcccctcgttctggtctcctttgcaggcacgagataccagaaa

SEQ ID NO: 266702 - DNA, 120 bp, Artificial Sequence
  ENSG00000126391_18 (sequence is synthesized)
gagcatgcctttctgatagcctttggtgatgtcactgctgggaggtggctatcctgtggaccacctggcctccagacccacactcacagtctgtgaaaaactgaaaatcccctggtgggc

SEQ ID NO: 266703 - DNA, 120 bp, Artificial Sequence
  ENSG00000126391_19 (sequence is synthesized)
actccctggagcccaagcagctcccctaggggactgaccggacctgacctcccctccctgtgtctgggtcttcaggttttagtttggtctttgttcatctgagttgtgctggggcaacgc

SEQ ID NO: 266704 - DNA, 120 bp, Artificial Sequence
  ENSG00000126391_20 (sequence is synthesized)
caggaagtgccctgggtacctctgctgtgcgctccttcccaggtggcgccatggattcctctgggggctggcgcatgcccaggaaagcctgggccacacgggacactctcttctttatcg

SEQ ID NO: 266705 - DNA, 120 bp, Artificial Sequence
  ENSG00000126391_21 (sequence is synthesized)
aggacacttggaaaggtgactgatatgggtgcttggcttctctggtcccagcttgccctccggggagcaggggctctgtcttgtcccagatgagctgagagcccctgagaggagggcttt

SEQ ID NO: 266706 - DNA, 120 bp, Artificial Sequence
  ENSG00000126391_22 (sequence is synthesized)
cccagccctgggaccctccgaggtgggtgtgcgggtctcacaggtgcttcctgggacttcctgtggctgcacagggcttggctttgtcttcgttcccggtggaaaaccgtgggagaggaa

SEQ ID NO: 266707 - DNA, 120 bp, Artificial Sequence
  ENSG00000126391_23 (sequence is synthesized)
gcttgggcctctactccaagtatcagagcctgttcaccctcctccctttggtagcttgtgaatgtgccaggtgtttcgaggtaggcttgccttctggcagcatggactttgttaaaataa

SEQ ID NO: 266708 - DNA, 120 bp, Artificial Sequence
  ENSG00000126391_24 (sequence is synthesized)
taggcggaaagaagaggcctgggaagggcccccagtcttttggaatgtcctggtcacagggtcatgtcagctgccagttctcgtctcccgtcctggagttgctcggtcttgcggagctgc

SEQ ID NO: 266709 - DNA, 120 bp, Artificial Sequence
  ENSG00000126391_25 (sequence is synthesized)
ctcccgtcctggagttgctcggtcttgcggagctgcccgcctgcctgttctggcggctccagcgcaggctgtccctgctgctttgattccaggtgattttattttttttatttttttatt

SEQ ID NO: 266710 - DNA, 120 bp, Artificial Sequence
  ENSG00000126391_26 (sequence is synthesized)
tgattccaggcgaattcttctctgatgggcgggcgagggtgtgttcgtgtgatgggttggagtgtgtgtgtctgagtacacagatgatgtgttttcccttcagcttcttacgttttctga

SEQ ID NO: 266711 - DNA, 120 bp, Artificial Sequence
  ENSG00000126391_27 (sequence is synthesized)
gcatccattgtgccttaacattttctgcttgtcctttgggacaaagcagtattttactcattctttgaatgttctcattcttttgtatcatgtgacttattaaaatcagtttctaacaaa

SEQ ID NO: 266712 - DNA, 120 bp, Artificial Sequence
  ENSG00000126391_28 (sequence is synthesized)
ctcttccacaccctcctgggaccccagccctggagaagtagctctggcttgtcttctttttcattaaagataatttatgtatcgactaagaaataataaggtacattcagatgtggaaaa

SEQ ID NO: 266713 - DNA, 120 bp, Artificial Sequence
  ENSG00000126432_0 (sequence is synthesized)
cttccgcagggtgtcgccgctgtgccgctagcggtgccccgcctgctgcggtggcaccagccaggaggcggagtggaagtggccgtggggcgggtatgggactagctggcgtgtgcgccc

SEQ ID NO: 266714 - DNA, 120 bp, Artificial Sequence
  ENSG00000126432_1 (sequence is synthesized)
tgagacgctcagcgggctatatactcgtcggtggggccggcggtcagtctgcggcagcggcagcaagacggtacagtgaaggagagtgggcgtctggcggggtccgcagtttcagcagag

SEQ ID NO: 266715 - DNA, 120 bp, Artificial Sequence
  ENSG00000126432_2 (sequence is synthesized)
ccgctgcagccatggccccaatcaaggtgggagatgccatcccagcagtggaggtgtttgaaggggagccagggaacaaggtgaacctggcagagctgttcaagggcaagaagggtgtgc

SEQ ID NO: 266716 - DNA, 120 bp, Artificial Sequence
  ENSG00000126432_3 (sequence is synthesized)
ttcacccctggatgttccaagacacacctgccagggtttgtggagcaggctgaggctctgaaggccaagggagtccaggtggtggcctgtctgagtgttaatgatgcctttgtgactggc

SEQ ID NO: 266717 - DNA, 120 bp, Artificial Sequence
  ENSG00000126432_4 (sequence is synthesized)
gagtggggccgagcccacaaggcggaaggcaaggttcggctcctggctgatcccactggggcctttgggaaggagacagacttattactagatgattcgctggtgtccatctttgggaat

SEQ ID NO: 266718 - DNA, 120 bp, Artificial Sequence
  ENSG00000126432_5 (sequence is synthesized)
cgacgtctcaagaggttctccatggtggtacaggatggcatagtgaaggccctgaatgtggaaccagatggcacaggcctcacctgcagcctggcacccaatatcatctcacagctctga

SEQ ID NO: 266719 - DNA, 120 bp, Artificial Sequence
  ENSG00000126432_6 (sequence is synthesized)
ggccctgggccagattacttcctccacccctccctatctcacctgcccagccctgtgctggggccctgcaattggaatgttggccagatttctgcaataaacacttgtggtttgcggcca

SEQ ID NO: 266720 - DNA, 120 bp, Artificial Sequence
  ENSG00000126453_0 (sequence is synthesized)
ccatcctctttcccgctcctcgctctcggacgccaccaacgctctcccgggctcttccgcgttacctacgatggaaggtcggggcgtgcgggcagctggaacccacccctgtcttggagc

SEQ ID NO: 266721 - DNA, 120 bp, Artificial Sequence
  ENSG00000126453_1 (sequence is synthesized)
tccgggtagctctcaaactcgaggctgcgcaccccctttcccgtcagctgagctctagagcgctggggctttctttttgatcgacttcttgaaataaaaccaactttatcattctttggg

SEQ ID NO: 266722 - DNA, 120 bp, Artificial Sequence
  ENSG00000126453_2 (sequence is synthesized)
taacagacccaaaagccgatgggacggcccgctgggctgttcccgcccctatgcccttttttgggtttccggccagaggcatgctgggagcgtcacatgcaaattgagcgtgcacccagc

SEQ ID NO: 266723 - DNA, 120 bp, Artificial Sequence
  ENSG00000126453_3 (sequence is synthesized)
gttccgccctttctacgctgggccggttatcgacccggcccagtgcgcaggcgcgggaaagttgaactaataaagtttgtacgagttcagtggaggagaccgcaagttgagtggaggagg

SEQ ID NO: 266724 - DNA, 120 bp, Artificial Sequence
  ENSG00000126453_4 (sequence is synthesized)
cggcggtggggccccggaccaggtgcctccatggcaggctctgaagagctggggctccgggaagacacgctgagggtcctagctgccttccttaggcgtggtgaggctgccgggtctcct

SEQ ID NO: 266725 - DNA, 120 bp, Artificial Sequence
  ENSG00000126453_5 (sequence is synthesized)
cctcggccttgctctctgcccatccgcccctgctatggtttagagcctggcccagctactccagacttctatgctttggtggcccagcggctggaacagctggtccaagagcagctgaaa

SEQ ID NO: 266726 - DNA, 120 bp, Artificial Sequence
  ENSG00000126453_6 (sequence is synthesized)
tctccgcccagcccagaattacagggtcccccatcgacagagaaggaagccatactgcggaggctggtggccctgctggaggaggaggcagaagtcattaaccagaagctggcctcggac

SEQ ID NO: 266727 - DNA, 120 bp, Artificial Sequence
  ENSG00000126453_7 (sequence is synthesized)
cccgccctgcgcagcaagctggtccgcctgtcctccgactctttcgcccgcctggtggagctgttctgtagccgggatgacagctctcgcccaagccgagcatgccccgggcccccgcct

SEQ ID NO: 266728 - DNA, 120 bp, Artificial Sequence
  ENSG00000126453_8 (sequence is synthesized)
ccttccccggagcccctggcccgcctggccctagccatggagctgagccggcgcgtggccgggctggggggcaccctggccggactcagcgtggagcacgtgcacagcttcacgccctgg

SEQ ID NO: 266729 - DNA, 120 bp, Artificial Sequence
  ENSG00000126453_9 (sequence is synthesized)
atccaggcccacgggggctgggagggcatcctggctgtttcacccgtggacttgaacttgccattggactgagctctttctcagaagctgctacaagatgacacctcatgtccctgccct

SEQ ID NO: 266730 - DNA, 120 bp, Artificial Sequence
  ENSG00000126453_10 (sequence is synthesized)
cttcgtgtgcttttccaagtcttcctattccactcagggctgtggggtggtggttgccctacctgtttttgccaaaaataaattgtttaaaacttttcttattaaaaacgttacaaagta

SEQ ID NO: 266731 - DNA, 120 bp, Artificial Sequence
  ENSG00000126453_11 (sequence is synthesized)
aagtaagtatccccactttcagggtagcatcctctttccctagttatttcagtgcagaatcgattcacgtgtaagcctctacctcctgcacttaccccaatgtagacccccttccacagt

SEQ ID NO: 266732 - DNA, 120 bp, Artificial Sequence
  ENSG00000126453_12 (sequence is synthesized)
ccccctacagaagatctcccaaaacatttccaacacagaacttccattcaattcccctccgactgcccgcctccctcctccaggacagagcacgccccaggtttcgagactgaactaccc

SEQ ID NO: 266733 - DNA, 120 bp, Artificial Sequence
  ENSG00000126453_13 (sequence is synthesized)
ccatctacggagtccacccctccctctctagaaccccctcagtgtagacgcctcctcttttcctctttcctccctactttttctagtttttctgcagccgacctccagcgtcggccactg

SEQ ID NO: 266734 - DNA, 120 bp, Artificial Sequence
  ENSG00000126453_14 (sequence is synthesized)
tccacctaggtaagaggagtggcccttctcccccaggggccagcatttgaggctccctcctaactcttgctcctggtctcagtctgtctcctctctttatatctggctctattctctgtc

SEQ ID NO: 266735 - DNA, 120 bp, Artificial Sequence
  ENSG00000126453_15 (sequence is synthesized)
tttggggttttggagagaggtcctcagcgggggagggagggagttggggaaagagactgcttgcaggggatctctggtggggtcagtctctgaagtcctcctctccagaagccctgccca

SEQ ID NO: 266736 - DNA, 120 bp, Artificial Sequence
  ENSG00000126456_0 (sequence is synthesized)
gctaccctgaaagtggggatacttactttcgatgatgtgggggagggaggaggtctatactggcggaattgagggagtggagggtctgcactgaagacgctggggaaggatgtgccatgg

SEQ ID NO: 266737 - DNA, 120 bp, Artificial Sequence
  ENSG00000126456_1 (sequence is synthesized)
atatgggaaggaaccctagctgattagagagcctctcgggaggatgggaggatgggaagaggaggtttcctgtttgtacccccgaaaatatgggtgaaggacctgtgccgtggcccgtga

SEQ ID NO: 266738 - DNA, 120 bp, Artificial Sequence
  ENSG00000126456_2 (sequence is synthesized)
gaaggaggtctgggtgcggaaactccaggccaggtgggtccgggggaggccggtcgcgcccaggaaatgccctatacgcgcaggccggaccatgggaaccccaaagccacggatcctgcc

SEQ ID NO: 266739 - DNA, 120 bp, Artificial Sequence
  ENSG00000126456_3 (sequence is synthesized)
ctggctggtgtcgcagctggacctggggcaactggagggcgtggcctgggtgaacaagagccgcacgcgcttccgcatcccttggaagcacggcctacggcaggatgcacagcaggagga

SEQ ID NO: 266740 - DNA, 120 bp, Artificial Sequence
  ENSG00000126456_4 (sequence is synthesized)
tttcggaatcttccaggcctgggccgaggccactggtgcatatgttcccgggagggataagccagacctgccaacctggaagaggaatttccgctctgccctcaaccgcaaagaagggtt

SEQ ID NO: 266741 - DNA, 120 bp, Artificial Sequence
  ENSG00000126456_5 (sequence is synthesized)
gcgtttagcagaggaccggagcaaggaccctcacgacccacataaaatctacgagtttgtgaactcaggagttggggacttttcccagccagacacctctccggacaccaatggtggagg

SEQ ID NO: 266742 - DNA, 120 bp, Artificial Sequence
  ENSG00000126456_6 (sequence is synthesized)
cagtacttctgatacccaggaagacattctggatgagttactgggtaacatggtgttggccccactcccagatccgggacccccaagcctggctgtagcccctgagccctgccctcagcc

SEQ ID NO: 266743 - DNA, 120 bp, Artificial Sequence
  ENSG00000126456_7 (sequence is synthesized)
ccagcttggacaatcccactcccttcccaaacctggggccctctgagaacccactgaagcggctgttggtgccgggggaagagtgggagttcgaggtgacagccttctaccggggccgcc

SEQ ID NO: 266744 - DNA, 120 bp, Artificial Sequence
  ENSG00000126456_8 (sequence is synthesized)
aagtcttccagcagaccatctcctgcccggagggcctgcggctggtggggtccgaagtgggagacaggacgctgcctggatggccagtcacactgccagaccctggcatgtccctgacag

SEQ ID NO: 266745 - DNA, 120 bp, Artificial Sequence
  ENSG00000126456_9 (sequence is synthesized)
acaggggagtgatgagctacgtgaggcatgtgctgagctgcctgggtgggggactggctctctggcgggccgggcagtggctctgggcccagcggctggggcactgccacacatactggg

SEQ ID NO: 266746 - DNA, 120 bp, Artificial Sequence
  ENSG00000126456_10 (sequence is synthesized)
cagtgagcgaggagctgctccccaacagcgggcatgggcctgatggcgaggtccccaaggacaaggaaggaggcgtgtttgacctggggcccttcattgtagatctgattaccttcacgg

SEQ ID NO: 266747 - DNA, 120 bp, Artificial Sequence
  ENSG00000126456_11 (sequence is synthesized)
aaggaagcggacgctcaccacgctatgccctctggttctgtgtgggggagtcatggccccaggaccagccgtggaccaagaggctcgtgatggtcaaggttgtgcccacgtgcctcaggg

SEQ ID NO: 266748 - DNA, 120 bp, Artificial Sequence
  ENSG00000126456_12 (sequence is synthesized)
ccttggtagaaatggcccgggtagggggtgcctcctccctggagaatactgtggacctgcacatttccaacagccacccactctccctcacctccgaccagtacaaggcctacctgcagg

SEQ ID NO: 266749 - DNA, 120 bp, Artificial Sequence
  ENSG00000126456_13 (sequence is synthesized)
acttggtggagggcatggatttccagggccctggggagagctgagccctcgctcctcatggtgtgcctccaacccccctgttccccaccacctcaaccaataaactggttcctgctatga

SEQ ID NO: 266750 - DNA, 120 bp, Artificial Sequence
  ENSG00000126456_14 (sequence is synthesized)
ataggggcgggaacagcccagcgggccgtcccatcggcttttgggtctgttacccaaagaatgataaagttggttttatttcaagaagtcgatcaaaaagaaagccccagcgctctagag

SEQ ID NO: 266751 - DNA, 120 bp, Artificial Sequence
  ENSG00000126456_15 (sequence is synthesized)
ctcagctgacgggaaagggggtgcgcagcctcgagtttgagagctacccggagctccaagacaggggtgggttccagctgcccgcacgccccgaccttccatcgtaggccggaccatggg

SEQ ID NO: 266752 - DNA, 120 bp, Artificial Sequence
  ENSG00000126456_16 (sequence is synthesized)
gcccgggagagcgttggtggcgtccgagagcgaggagcgggaaagaggatgggtctgcacggagagtggaaaggcaggctgtgtactctggggaaagtggagcaaggaaggagctacagt

SEQ ID NO: 266753 - DNA, 120 bp, Artificial Sequence
  ENSG00000126456_17 (sequence is synthesized)
tgacgggaaagggggtgcgcagcctcgagtttgagagctacccggagctccaagacaggggtgggttccagctgcccgcacgccccgaccttccatcgtaggagttggggacttttccca

SEQ ID NO: 266754 - DNA, 120 bp, Artificial Sequence
  ENSG00000126456_18 (sequence is synthesized)
gatgggagggagggagggagggaaggaggggactttccccaaacaagcagtcccctggtcgaggcagcagagggccttaggtcaggggaggtggtgggggttatcattcaagtttacggg

SEQ ID NO: 266755 - DNA, 120 bp, Artificial Sequence
  ENSG00000126456_19 (sequence is synthesized)
gtttgtgaactcaggtctgccagcttggggttcgtgtgggaggctggggccccaagggttcctggcactcctactcccctcaccacttttctcaacaggagttggggacttttcccagcc

SEQ ID NO: 266756 - DNA, 120 bp, Artificial Sequence
  ENSG00000126456_20 (sequence is synthesized)
cattccagcctgggtgacaggagtgaaactccatctcaaaaagaaaaaaagccttttgaaaactagaggtgggggatggaggtaggtgggacggggggatttggggatggaccttgcaga

SEQ ID NO: 266757 - DNA, 120 bp, Artificial Sequence
  ENSG00000126456_21 (sequence is synthesized)
ggccgacgctggaggtcggctgcagaaaaactagaaaaagtagggaggaaagaggaaaagaggaggcgtctacactgagggggttctagagagggaggggtggactccgtagatgggggt

SEQ ID NO: 266758 - DNA, 120 bp, Artificial Sequence
  ENSG00000126456_22 (sequence is synthesized)
agttcagtctcgaaacctggggcgtgctctgtcctggaggagggaggcgggcagtcggaggggaattgaatggaagttctgtgttggaaatgttttgggagatcttctgtagggggactg

SEQ ID NO: 266759 - DNA, 73 bp, Artificial Sequence
  ENSG00000126456_23 (sequence is synthesized)
attgtaggtgagtgagacaggggcttcgacctggccagtacaaagcagcctgcacagtggttaacaactcagg

SEQ ID NO: 266760 - DNA, 120 bp, Artificial Sequence
  ENSG00000126456_24 (sequence is synthesized)
gcaccactgcactctagcctggtgacagagtaagactccatctcgaacaacaaaaaaaaaagaactcatgattaggactgaattcagacgctggctgcccttggcccgctgtataaccga

SEQ ID NO: 266761 - DNA, 120 bp, Artificial Sequence
  ENSG00000126456_25 (sequence is synthesized)
cgctggctgcccttggcccgctgtataaccgaggcaaaggactttgccctgagcccgtggaatccaaggatggtctcctctctctacctgcctgccagcgctgggatctgattaccttca

SEQ ID NO: 266762 - DNA, 120 bp, Artificial Sequence
  ENSG00000126456_26 (sequence is synthesized)
agcacggcctacggcaggatgcacagcaggaggatttcggaatcttccaggtgcgtgcgacgacctgggacgctggaaacccggagctgcgcgctgggcggaaaggactcctagtgggcc

SEQ ID NO: 266763 - DNA, 120 bp, Artificial Sequence
  ENSG00000126456_27 (sequence is synthesized)
tagtgggcccggctgagaaggcggaggcctgggccgaggccactggtgcatatgttcccgggagggataagccagacctgccaacctggaagaggaatttccgctctgccctcaaccgca

SEQ ID NO: 266764 - DNA, 120 bp, Artificial Sequence
  ENSG00000126457_0 (sequence is synthesized)
attgccaatgaaatcttccagcggggtcgcggtaggcgggccgtggaccctctggtataaggcggtcccgggggagtgaggagaaagggggggtcttggcggccggaggaggagtaggtg

SEQ ID NO: 266765 - DNA, 120 bp, Artificial Sequence
  ENSG00000126457_1 (sequence is synthesized)
cgggtgaagatggcggcagccgaggccgcgaactgcatcatggaggtgtcctgtggccaggcggaaagcagtgagaagcccaacgctgaggacatgacatccaaagattactactttgac

SEQ ID NO: 266766 - DNA, 120 bp, Artificial Sequence
  ENSG00000126457_2 (sequence is synthesized)
tcctacgcacactttggcatccacgaggagatgctgaaggacgaggtgcgcaccctcacttaccgcaactccatgtttcataaccggcacctcttcaaggacaaggtggtgctggacgtc

SEQ ID NO: 266767 - DNA, 120 bp, Artificial Sequence
  ENSG00000126457_3 (sequence is synthesized)
ggctcgggcaccggcatcctctgcatgtttgctgccaaggccggggcccgcaaggtcatcgggatcgagtgttccagtatctctgattatgcggtgaagatcgtcaaagccaacaagtta

SEQ ID NO: 266768 - DNA, 120 bp, Artificial Sequence
  ENSG00000126457_4 (sequence is synthesized)
gaccacgtggtgaccatcatcaaggggaaggtggaggaggtggagctcccagtggagaaggtggacatcatcatcagcgagtggatgggctactgcctcttctacgagtccatgctcaac

SEQ ID NO: 266769 - DNA, 120 bp, Artificial Sequence
  ENSG00000126457_5 (sequence is synthesized)
tgacggccatcgaggaccggcagtacaaagactacaagatccactggtgggagaacgtgtatggcttcgacatgtcttgcatcaaagatgtggccattaaggagcccctagtggatgtcg

SEQ ID NO: 266770 - DNA, 120 bp, Artificial Sequence
  ENSG00000126457_6 (sequence is synthesized)
tggaccccaaacagctggtcaccaacgcctgcctcataaaggaggtggacatctataccgtcaaggtggaagacctgaccttcacctccccgttctgcctgcaagtgaagcggaatgact

SEQ ID NO: 266771 - DNA, 120 bp, Artificial Sequence
  ENSG00000126457_7 (sequence is synthesized)
acgtgcacgccctggtggcctacttcaacatcgagttcacacgctgccacaagaggaccggcttctccaccagccccgagtccccgtacacgcactggaagcagacggtgttctacatgg

SEQ ID NO: 266772 - DNA, 120 bp, Artificial Sequence
  ENSG00000126457_8 (sequence is synthesized)
aggactacctgaccgtgaagacgggcgaggagatcttcggcaccatcggcatgcggcccaacgccaagaacaaccgggacctggacttcaccatcgacctggacttcaagggccagctgt

SEQ ID NO: 266773 - DNA, 120 bp, Artificial Sequence
  ENSG00000126457_9 (sequence is synthesized)
gcgagctgtcctgctccaccgactaccggatgcgctgaggcccggctctcccgccctgcacgagcccaggggctgagcgttcctaggcggtttcggggctcccccttcctctccctccct

SEQ ID NO: 266774 - DNA, 120 bp, Artificial Sequence
  ENSG00000126457_10 (sequence is synthesized)
cccgcagaagggggttttaggggcctgggctggggggatggggagggcacatcgtgactgtgtttttcataacttatgtttttatatggttgcatttacgccaataaatcctcagctggg

SEQ ID NO: 266775 - DNA, 120 bp, Artificial Sequence
  ENSG00000126457_11 (sequence is synthesized)
cgggtgaagatggcggcagccgaggccgcgaactgcatcatggagaattttgtagccaccttggctaatgggatgagcctccagccgcctcttgaagaagtgtcctgtggccaggcggaa

SEQ ID NO: 266776 - DNA, 120 bp, Artificial Sequence
  ENSG00000126457_12 (sequence is synthesized)
agagttggcaaacccctgacctatgatggacgtattctctagccaattactagacggtattctcagacgggccgcctccattgccaatgaaatcttccagcggggtcgcggtgtcctgtg

SEQ ID NO: 266777 - DNA, 120 bp, Artificial Sequence
  ENSG00000126457_13 (sequence is synthesized)
ctggccctggcatgggactttggggcccagaatgttggcctgaggtctcagagcctgatctgccagccagaggtggtgctagaggcccaggaaagacacttcgtcctttaaatatctttg

SEQ ID NO: 266778 - DNA, 120 bp, Artificial Sequence
  ENSG00000126457_14 (sequence is synthesized)
ggaaacccaccccccggccagagcccaggttccgccacccagccctcccacagccactcccagtagctaatcctttttccctgttactctctcctagaattttgtagccaccttggctaa

SEQ ID NO: 266779 - DNA, 120 bp, Artificial Sequence
  ENSG00000126457_15 (sequence is synthesized)
ttttcttttttatgaaagaagcaatcactgcattgctgatgggaatcatcctgatggagaaatccaagggcaagggacagcagctgggctctactcctgacgggacctggacttcaccat

SEQ ID NO: 266780 - DNA, 120 bp, Artificial Sequence
  ENSG00000126457_16 (sequence is synthesized)
tggctgccattctgtggatctgcgtctcccgtcccccgtctctaggcctcttgctccccttccttggttccttctcggggtccctgtcctccacagctgtctctcagggtctttgtccaa

SEQ ID NO: 266781 - DNA, 120 bp, Artificial Sequence
  ENSG00000126457_17 (sequence is synthesized)
ctcttttcatccctctcctgggtctgcgcccctcccctctgcggtacccgtgtcctgcctagtaggggatgggggtggctttccagcacagccagccctcaagtttcccagaacagtctc

SEQ ID NO: 266782 - DNA, 120 bp, Artificial Sequence
  ENSG00000126457_18 (sequence is synthesized)
cccacctccccccaacactcgacattgttcctctctggctgttttttcctgttcgggtcccttcaaggcccaactgtgcccagccctctgcagctggggacactgagtgggttgggggtg

SEQ ID NO: 266783 - DNA, 120 bp, Artificial Sequence
  ENSG00000126457_19 (sequence is synthesized)
tatgtttgcaaggatagaatttctcatgggggagtggccctgcttcctcccctagaatggcttggggcttagggctggggacttgccctccatggaggtcagtgggagttgcagctgtaa

SEQ ID NO: 266784 - DNA, 120 bp, Artificial Sequence
  ENSG00000126457_20 (sequence is synthesized)
gcctcataaagccagaggtggtgctagaggcccaggaaagacacttcgtcctttaaatatctttgtgagcgctgctgtgtgagaaccatgcttggcacttggcttctggcggaggaaaca

SEQ ID NO: 266785 - DNA, 120 bp, Artificial Sequence
  ENSG00000126457_21 (sequence is synthesized)
ggaccccagggcgatgagcggatgcacatgcacgcgggccactgcagaagagcacggggccaggctgggctccgagatgtgcctgaggtcccagctactcgggaggatcacttgggcctg

SEQ ID NO: 266786 - DNA, 73 bp, Artificial Sequence
  ENSG00000126457_22 (sequence is synthesized)
tcccagctactcgggaggatcacttgggcctgtttggtgacaatgttttgttttgttttttccttttgttttt

SEQ ID NO: 266787 - DNA, 120 bp, Artificial Sequence
  ENSG00000126457_23 (sequence is synthesized)
gctgtatgtgacggccatcgaggaccggcagtacaaagactacaagatccactgtgagcgcggcccgggagctggcgggcggggcctcgggtgggctgctgcgggctcaccccctccctg

SEQ ID NO: 266788 - DNA, 120 bp, Artificial Sequence
  ENSG00000126457_24 (sequence is synthesized)
cctgcctccccagggtgggagaacgtgtatggcttcgacatgtcttgcatcaaagatgtggccattaaggagcccctagtggatgtcgtggaccccaaacagctggtcaccaacgcctgc

SEQ ID NO: 266789 - DNA, 120 bp, Artificial Sequence
  ENSG00000126457_25 (sequence is synthesized)
tgcccagactggtctcgaactcctgatgtcaagtgatccgcctgcctccgcctcctaaagtgctggaattacacccgtgagccatcgcgcccgaaccctattgtaaattttaagtctcag

SEQ ID NO: 266790 - DNA, 120 bp, Artificial Sequence
  ENSG00000126457_26 (sequence is synthesized)
gaaccctattgtaaattttaagtctcaggcgtttgccagcggcacgccagagagtatagcctgcgcggaggcccagaaaccaaagagcgagctcattccgggattggagagaagtgtgag

SEQ ID NO: 266791 - DNA, 120 bp, Artificial Sequence
  ENSG00000126457_27 (sequence is synthesized)
cttcggcatccggcctagcggagggtcttatcccccctcccacgtggaggagggctgggggcgcttccggccaggcccccacgtggccgctgcgcgaattttgtagccaccttggctaat

SEQ ID NO: 266792 - DNA, 120 bp, Artificial Sequence
  ENSG00000126457_28 (sequence is synthesized)
gggatgagcctccagccgcctcttgaagaagtaaccccctttgcccttccctgtgtctgcccccattttccttcccctcccctccccagctgtgggctgagctagagacggggtcagaga

SEQ ID NO: 266793 - DNA, 77 bp, Artificial Sequence
  ENSG00000126457_29 (sequence is synthesized)
cctgatacccagtccacataaaatttctgctcctgcctcaaaaatgtccagaacgatgtatgaattttaaaactgtt

SEQ ID NO: 266794 - DNA, 120 bp, Artificial Sequence
  ENSG00000126457_30 (sequence is synthesized)
aggtgcgggtgaagatggcggcagccgaggccgcgaactgcatcatggagaattttgtagccaccttggctaatgggatgagcctccagccgcctcttgaagaagtaaatatccttttgt

SEQ ID NO: 266795 - DNA, 120 bp, Artificial Sequence
  ENSG00000126457_31 (sequence is synthesized)
tcttgaggtctaaccatacccctcttgcttcaaaccagtttaccccaggcccccagacacttagtagcaacccctccaggttcacagcccccgctggcctcccccagtatcgccgctact

SEQ ID NO: 266796 - DNA, 120 bp, Artificial Sequence
  ENSG00000126457_32 (sequence is synthesized)
cgcagggtttaggttggcatttgtgttgccgtttgaagccatcatgttgttggacttgtcaaggggttggggagacagtggagtggggcgcctgcattctaggaggtctggacagagtta

SEQ ID NO: 266797 - DNA, 120 bp, Artificial Sequence
  ENSG00000126457_33 (sequence is synthesized)
gggtggcactgccaggtttgggtgttggagaggagggagcaaggaatctgggctcgaacccacatggtttattgggagccggataggcaggatgcagagtgaaggaggagccgaggctgg

SEQ ID NO: 266798 - DNA, 120 bp, Artificial Sequence
  ENSG00000126457_34 (sequence is synthesized)
acaggccctctgggagcttaagggagggaggaggggatgaagcgaggtggggacgcatcccggagctcgccctctcatgtcctgcaggaggtggacatctataccgtcaaggtggaagac

SEQ ID NO: 266799 - DNA, 80 bp, Artificial Sequence
  ENSG00000126458_0 (sequence is synthesized)
ggctcccccgcaggcggtagcgaaggcagcagcagcggtggcgacatgagcagcggggcggcgtccgggacagggcgggg

SEQ ID NO: 266800 - DNA, 120 bp, Artificial Sequence
  ENSG00000126458_1 (sequence is synthesized)
cccagcgagacacacaagctggtggtcgtgggcggcggcggcgtgggcaagagcgcgctgaccatccagttcatccagtcctacttcgtgtctgactacgaccccactattgaggactcc

SEQ ID NO: 266801 - DNA, 120 bp, Artificial Sequence
  ENSG00000126458_2 (sequence is synthesized)
tacacgaagatctgcagtgtggatggcatcccagcccggctggacatcctggacaccgcgggccaggaagagttcggggccatgagagagcagtacatgcgtgctggccacggcttcctg

SEQ ID NO: 266802 - DNA, 120 bp, Artificial Sequence
  ENSG00000126458_3 (sequence is synthesized)
ctggtgttcgccattaacgaccggcagagtttcaacgaggtgggcaagctcttcacgcagattctgcgggtcaaggaccgcgacgacttccccgttgtgttggtcgggaacaaggcagat

SEQ ID NO: 266803 - DNA, 120 bp, Artificial Sequence
  ENSG00000126458_4 (sequence is synthesized)
atcagaagcctctgccttcggcgcctcccaccacgtggcctactttgaggcctcggccaaactgcgtctcaacgtggacgaggcttttgagcagctggtgcgggctgtccggaaatacca

SEQ ID NO: 266804 - DNA, 120 bp, Artificial Sequence
  ENSG00000126458_5 (sequence is synthesized)
ggaacaagagctcccaccgagccctcccagtgcccccaggaagaagggcgggggctgcccctgcgtcctcctgtagcccaggcaagagagaagcaaccaccacaagctctcgggactagc

SEQ ID NO: 266805 - DNA, 120 bp, Artificial Sequence
  ENSG00000126458_6 (sequence is synthesized)
tgccttcgcaccttgctgtgtgacctgaggccctcactgagcctcaatttcctcatctgggtctcccaggacacatcacatacccacccttacttcctggcctcttctgggctactgcca

SEQ ID NO: 266806 - DNA, 120 bp, Artificial Sequence
  ENSG00000126458_7 (sequence is synthesized)
ctgtgtgccttctgccaacgcctcctgtccccacctaagcctggtgggggtgaggggctccgggtcactgctgtatataactcccctcccccagaaaaataaatgtcactgccaacgtca

SEQ ID NO: 266807 - DNA, 120 bp, Artificial Sequence
  ENSG00000126458_8 (sequence is synthesized)
gcaaggatggatgatggatgggggtggtgtcagtgggggctgagggctcttgggggtgactgcggggagcctggtccccacgatggcccctctccctgtctctgcagtcctggacaccgc

SEQ ID NO: 266808 - DNA, 120 bp, Artificial Sequence
  ENSG00000126460_0 (sequence is synthesized)
agttccgcccacctgccagaaacggggatcaggcctggttaccgggagtggggcgcccctcctccttatcccctcccctcttccctgtcccctttcacagctggctgtagctggccaagg

SEQ ID NO: 266809 - DNA, 120 bp, Artificial Sequence
  ENSG00000126460_1 (sequence is synthesized)
agttctcgattaaagaggaaggggcagtgctcacatttctgggcaggtgtctggaaaatatgaggggccacccctctctgctgctgctatatatggcattaaccacctgcctggatactt

SEQ ID NO: 266810 - DNA, 120 bp, Artificial Sequence
  ENSG00000126460_2 (sequence is synthesized)
cacccagtgaggagacagaccaagaagtcttcctgggtcccccagaggcccagagcttcctgagtagccatacccggattccaagagccaaccactgggacctggagctgctcacaccag

SEQ ID NO: 266811 - DNA, 120 bp, Artificial Sequence
  ENSG00000126460_3 (sequence is synthesized)
ggaacctggaacgggagtgtctggaagagaggtgttcctgggaagaggccagggagtattttgaggacaacactctcacggagcgcttttgggagagctacatctacaatggcaaaggag

SEQ ID NO: 266812 - DNA, 120 bp, Artificial Sequence
  ENSG00000126460_4 (sequence is synthesized)
ggcgtggacgagtggatgtggccagcctggctgtggggctgacaggtggcatcctgctcattgtcctggccggcctgggagccttttggtatctgcgctggcgacagcaccgaggccagc

SEQ ID NO: 266813 - DNA, 120 bp, Artificial Sequence
  ENSG00000126460_5 (sequence is synthesized)
ccacccccacccccaggcctccccacctatgagcaggcgctggcagcctctggggtacacgacgcacctccacccccctacaccagcctcaggaggcctcactgaagagctgctttcgag

SEQ ID NO: 266814 - DNA, 120 bp, Artificial Sequence
  ENSG00000126460_6 (sequence is synthesized)
acccggctctccgaaccgtgcccctgattcataccggattccggaagccgctaggcctcatagacgccgaagctggacttggagtggggaatggtgggagtaggggtcatccggcccgag

SEQ ID NO: 266815 - DNA, 120 bp, Artificial Sequence
  ENSG00000126460_7 (sequence is synthesized)
gcctgccctggcacacgcgtttccgccgcgtatggatatacacatgttttcggcaacgtgttcccgtgtcctggcccctcacgggcccccacactctcctgaccgtgagggcactggtca

SEQ ID NO: 266816 - DNA, 120 bp, Artificial Sequence
  ENSG00000126460_8 (sequence is synthesized)
gttccgcccccgtggtaggcagacgcgcggggaaattcggacccaggagcccagccccggctgtgccatcttgtgtatgggcagatatgacctgacagccccctccagtgccacagggta

SEQ ID NO: 266817 - DNA, 120 bp, Artificial Sequence
  ENSG00000126460_9 (sequence is synthesized)
cgcacacgcagagccccgcctgtgcacacgcgtgtcttcgtgcactccccgtgcggtacaggggcacttcgtaacccagggaaagggcggggggcatatttgcaagcgcgctcggtgcgg

SEQ ID NO: 266818 - DNA, 120 bp, Artificial Sequence
  ENSG00000126460_10 (sequence is synthesized)
gcaggctcgcattgcacccagggagctggagttgagctgttcccctaaataaaaacccttcggaaaggagaccaaaaaaagcagaaataatgcaaaaaataataatgaaatgaactgcga

SEQ ID NO: 266819 - DNA, 120 bp, Artificial Sequence
  ENSG00000126460_11 (sequence is synthesized)
tggcgttggcctccccctgactcaggaatgtttctagtccttcctcttccaggagtccaggacccagccccttcctccttcagacccaggaatctggattcccagcccctgctccttcct

SEQ ID NO: 266820 - DNA, 120 bp, Artificial Sequence
  ENSG00000126461_0 (sequence is synthesized)
gcgccggggccggagccgcagcccgagcggcggggtgaccatggaggaagaagatgagtctcgagggaagacagaggagtcgggggaggatcggggcgatggtccgccagacagagaccc

SEQ ID NO: 266821 - DNA, 120 bp, Artificial Sequence
  ENSG00000126461_1 (sequence is synthesized)
cacgctttctccttctgcctttatcctgcgagccatccagcaggctgtgggaagctccctgcagggggacctgcccaatgataaagatggctctcggtgtcatggccttcgatggcggcg

SEQ ID NO: 266822 - DNA, 120 bp, Artificial Sequence
  ENSG00000126461_2 (sequence is synthesized)
ctgccggagtccacggtcagagccccgttcccaggaatcagggggcactgacacggctactgtgttggacatggccacggacagcttcctcgcagggctggtgagtgtcctggatccccc

SEQ ID NO: 266823 - DNA, 120 bp, Artificial Sequence
  ENSG00000126461_3 (sequence is synthesized)
ggatacctgggttcccagccgcctggacctgcggcctggcgaaagtgaggacatgctggagctggtggctgaggtccgaatcggggacagagatcccatccctctgcctgtgcccagcct

SEQ ID NO: 266824 - DNA, 120 bp, Artificial Sequence
  ENSG00000126461_4 (sequence is synthesized)
gctgccccgtctcagggcctggaggacgggcaaaacggtttctccacagtcgaactcctctaggcccacctgtgcccgtcacctcaccttgggcacgggagacgggggccctgccccacc

SEQ ID NO: 266825 - DNA, 120 bp, Artificial Sequence
  ENSG00000126461_5 (sequence is synthesized)
ccctgccccctcctctgcatcctcctccccttccccttctccctcatcttcctccccttcccctcccccacccccaccgccccctgcacccccagccccacctgccccccgattcgatat

SEQ ID NO: 266826 - DNA, 120 bp, Artificial Sequence
  ENSG00000126461_6 (sequence is synthesized)
ctatgaccccttccaccccaccgacgaggcctactctccaccgcctgctccggagcaaaagtacgacccttttgagcccaccggctccaaccccagctcatcagcggggaccccctcacc

SEQ ID NO: 266827 - DNA, 120 bp, Artificial Sequence
  ENSG00000126461_7 (sequence is synthesized)
tgaggaggaagaggaggaggaagaggaagaagaagaggaagaggaagacgaggaggaggaggaaggcctgtcccagagcatcagccgcatctcggagaccctggcgggcatctacgatga

SEQ ID NO: 266828 - DNA, 120 bp, Artificial Sequence
  ENSG00000126461_8 (sequence is synthesized)
caacagcctgagccaggacttcccaggtgacgagagcccccgcccggacgcgcagcccacacagccgactcccgcccctggaacgccgccccaggtggactccacccgggctgatggagc

SEQ ID NO: 266829 - DNA, 120 bp, Artificial Sequence
  ENSG00000126461_9 (sequence is synthesized)
catgcgccggcgggtcttcgtggtggggaccgaggcagaggcttgtcgggaaggcaaggtctcggtggaggtggtgaccgctggtggagccgccctcccgccgcccctgctgccgcccgg

SEQ ID NO: 266830 - DNA, 120 bp, Artificial Sequence
  ENSG00000126461_10 (sequence is synthesized)
cgactcggagatcgaggaaggggagatcgtccagccggaggaggagcccaggctggcgctgtccctcttccgccccggcggccgggccgcccggcctacaccggccgcctcggccacccc

SEQ ID NO: 266831 - DNA, 120 bp, Artificial Sequence
  ENSG00000126461_11 (sequence is synthesized)
cacggcccagccccttcctcagcctcccgctccgcgggcccccgagggggacgacttcttgtccctgcatgcggagtcggacggcgagggcgccctgcaggtggacctaggggagccggc

SEQ ID NO: 266832 - DNA, 120 bp, Artificial Sequence
  ENSG00000126461_12 (sequence is synthesized)
gtggacctaggggagccggctcccgcgccgcccgccgccgactcgcgctggggcggcctggacctgcgccgcaagatcctgacccaacggcgggagcgctaccgccagcgctcgccctcc

SEQ ID NO: 266833 - DNA, 120 bp, Artificial Sequence
  ENSG00000126461_13 (sequence is synthesized)
gccgctgctggtccgcccacgcgcaagaagtccaggcgggaacgcaagcgcagcggcgaggccaaggaggccgcctcgtcctcgtcgggcacccagccagcgccgcccgccccggcctcg

SEQ ID NO: 266834 - DNA, 80 bp, Artificial Sequence
  ENSG00000126461_14 (sequence is synthesized)
ctcgccctgggactccaagaagcaccgctcgcgggaccgcaagcccggctcccacgcctcgtcgtccgcccgccgccgct

SEQ ID NO: 266835 - DNA, 120 bp, Artificial Sequence
  ENSG00000126461_15 (sequence is synthesized)
gggcagccgcaggtcgcggtcccgggagaagcggcgacggcggcggcgctccgcctccccgcccccggccacttcctcatcgtcgtcctcgaggcgcgagcggcaccgcgggaaacaccg

SEQ ID NO: 266836 - DNA, 120 bp, Artificial Sequence
  ENSG00000126461_16 (sequence is synthesized)
cgagcggcaccgcgggaaacaccgggacggtggcggcagcaagaagaagaagaagcggtcgcggtcccggggtgagaagcggtctggggatggcagcgagaaggccccggcgcccgcccc

SEQ ID NO: 266837 - DNA, 120 bp, Artificial Sequence
  ENSG00000126461_17 (sequence is synthesized)
tgtggtgaccgcgacagccgccgccggggggccgtgccaccctccatccaggacctcacggaccacgacctcttcgccatcaagcggaccatcacggtgggccggcttgacaagtccgac

SEQ ID NO: 266838 - DNA, 120 bp, Artificial Sequence
  ENSG00000126461_18 (sequence is synthesized)
ccccgaggaccctctcctgctccggcctcctcacctaagcgggaggtcctgtacgactccgagggactgagcggcgaggagcggggcggcaagagcagccagaaggatcggcgccgctcg

SEQ ID NO: 266839 - DNA, 120 bp, Artificial Sequence
  ENSG00000126461_19 (sequence is synthesized)
ggggccgcctcctcctcctcctcttcccgggagaaggggtctcgtcggaaggcgctggacgggggtgaccgggatcgggacagggacagagatagggacagggacaggtcatccaagaag

SEQ ID NO: 266840 - DNA, 120 bp, Artificial Sequence
  ENSG00000126461_20 (sequence is synthesized)
gcccggccccccaaggagtcggcgccttcctcagggcccccgccaaagccaccagtcagcagcggctcaggctcttcatcctcgtcgtcctcctgttcttcccggaaggtgaagctgcag

SEQ ID NO: 266841 - DNA, 120 bp, Artificial Sequence
  ENSG00000126461_21 (sequence is synthesized)
tccaaggtggcggtgctgatccgcgagggtgtcagcagcaccaccccggccaaggatgccgcgtcagccggcctgggctccattggcgtcaaattcagccgtgaccgcgagagtcgctcc

SEQ ID NO: 266842 - DNA, 120 bp, Artificial Sequence
  ENSG00000126461_22 (sequence is synthesized)
cccttcctcaaacctgacgagcgggcccccactgagatggccaaagcagctccgggcagcaccaagcccaaaaagaccaaggtcaaggccaaggcaggggccaagaaaaccaaggggacc

SEQ ID NO: 266843 - DNA, 120 bp, Artificial Sequence
  ENSG00000126461_23 (sequence is synthesized)
aagggaaagaccaagccatccaagaccaggaaaaaggtccgcagtggaggtggcagcgggggcagtggtggccaggtgtcgctgaagaagtccaaggcggatagctgcagccaggcggca

SEQ ID NO: 266844 - DNA, 120 bp, Artificial Sequence
  ENSG00000126461_24 (sequence is synthesized)
ggcaccaagggggcggaggagacttcctggtccggggaggagcgggcagccaaggttcctagcaccccgccccccaaggcagccccaccaccccctgccctcactccggactcgcagacc

SEQ ID NO: 266845 - DNA, 120 bp, Artificial Sequence
  ENSG00000126461_25 (sequence is synthesized)
gtggacagcagctgcaagacacctgaggtctccttcctgcccgaggaggccactgaggaggctggggtccgaggtggggcggaggaggaggaggaggaagaagaagaggaggaggaagag

SEQ ID NO: 266846 - DNA, 120 bp, Artificial Sequence
  ENSG00000126461_26 (sequence is synthesized)
gaagaggaggaggagcagcagcctgctaccaccacggccaccagcactgctgcagccgccccaagcactgcccccagcgcggggtccacagccggtgactcgggggcggaggacgggcca

SEQ ID NO: 266847 - DNA, 120 bp, Artificial Sequence
  ENSG00000126461_27 (sequence is synthesized)
gcttcccgtgtctcccagctgcccacgttgcccccgcccatgccctggaatctgccagctggtgtggactgcaccaccagcggcgtcctggccttgactgcacttctcttcaagatggaa

SEQ ID NO: 266848 - DNA, 120 bp, Artificial Sequence
  ENSG00000126461_28 (sequence is synthesized)
gaagccaacctggcgagccgagcgaaggcccaggagctgatccaggccaccaaccagatcctcagccacagaaagccaccctcaagtctggggatgaccccagctcctgtgcccacctct

SEQ ID NO: 266849 - DNA, 120 bp, Artificial Sequence
  ENSG00000126461_29 (sequence is synthesized)
ttgggtctgccccctggcccctccagctacctgcttcctggcagcctccctctggggggctgcggttcgaccccccccacccccaccgggctggctgccacgtctgacaagagagagggc

SEQ ID NO: 266850 - DNA, 120 bp, Artificial Sequence
  ENSG00000126461_30 (sequence is synthesized)
agcagcagctctgagggccgtggggacacagataagtatctgaagaagctgcacacgcaggagcgggcggtggaggaggtgaagctggccatcaagccatactatcagaagaaggacatc

SEQ ID NO: 266851 - DNA, 120 bp, Artificial Sequence
  ENSG00000126461_31 (sequence is synthesized)
accaaggaggagtacaaggacatcctgaggaaggccgtccacaagatctgccacagcaaaagtggggaaatcaacccagtgaaggtgagcaacctggtgcgggcctacgtccagcgctac

SEQ ID NO: 266852 - DNA, 120 bp, Artificial Sequence
  ENSG00000126461_32 (sequence is synthesized)
cgctacttccgcaagcacggtcgcaagccaggggaccccccagggcccccacggccgcccaaggagccagggcccccagacaagggtggcccgggcctgcccctgccccctctctgagag

SEQ ID NO: 266853 - DNA, 120 bp, Artificial Sequence
  ENSG00000126461_33 (sequence is synthesized)
ccctggccagctcttcgcccctcacctctttgaaactctggacgtatttatggctccacctccccacctccctcccccgtcagtgggatgactgggggagggttgctgcagggaagagga

SEQ ID NO: 266854 - DNA, 120 bp, Artificial Sequence
  ENSG00000126461_34 (sequence is synthesized)
gagccccctgccctgccctgccccgtgtccacctcccttgcccccaagcctgtccccagtgcccctcccttctgtttgtgcccctctccccaatttcattaaagatttcatgaaacatta

SEQ ID NO: 266855 - DNA, 120 bp, Artificial Sequence
  ENSG00000126461_35 (sequence is synthesized)
ggagatagtgtggggcccttgaggtcttcatgtctatcctctacttccatcctttctcccgggacctccactccaaactctcccccctggacccccaggtgaccatggaggaagaagatg

SEQ ID NO: 266856 - DNA, 120 bp, Artificial Sequence
  ENSG00000126461_36 (sequence is synthesized)
agggggcactgacacggctactgtgagtgttggacatggccacggacagcttcctcgcagggctggtgagtgtcctggatcccccggatacctgggttcccagccgcctggacctgcggc

SEQ ID NO: 266857 - DNA, 120 bp, Artificial Sequence
  ENSG00000126464_0 (sequence is synthesized)
ccccctcccccagccgccttgtgcaaagatggctgcaccgtgagcgcagaggaggaggaggcggcggcggcggcggcgagagagcgagcacccagcgcctgcacccaccccggggccgcc

SEQ ID NO: 266858 - DNA, 120 bp, Artificial Sequence
  ENSG00000126464_1 (sequence is synthesized)
cgggacgccccctcccgagcgcgcgcccccccttttctctcgcaagcgccggggcaaaggcggagacagcggggtccctcctccccccttccctcctctagggggaaccccccttccccc

SEQ ID NO: 266859 - DNA, 120 bp, Artificial Sequence
  ENSG00000126464_2 (sequence is synthesized)
ttccttggctcagcgactgcaccccctcccttgcccgcccctccgcccctgccccctccctcccccgcccggggccttcccgggccttcggcggctgcaaagaaaaaaagagagagagaa

SEQ ID NO: 266860 - DNA, 120 bp, Artificial Sequence
  ENSG00000126464_3 (sequence is synthesized)
aaggggggaaaaaaaagcagcagcggagggagcggcggcggaggagagcgcgcgcgcgccccctccctccctccctccctccccctccccccaatttccaccgcggccaattcatggaca

SEQ ID NO: 266861 - DNA, 120 bp, Artificial Sequence
  ENSG00000126464_4 (sequence is synthesized)
ggaactaccccagcgccggcttcggggacccgctcggcgccggggcgggatggagttacgagaggtcagcgaaagctagcttggtttatggcagctccaggacctcgcaccccgagacgg

SEQ ID NO: 266862 - DNA, 120 bp, Artificial Sequence
  ENSG00000126464_5 (sequence is synthesized)
acatcttacaccgccaggcctatgcggccccccacccactgcaaagctatgccaccaaccaccacccggcaggcctctctggactcttcgacactggcctccaccacgcgggctcagcag

SEQ ID NO: 266863 - DNA, 120 bp, Artificial Sequence
  ENSG00000126464_6 (sequence is synthesized)
ggcccgacgcctccgtcatgaaccttatctcggccctggaatcccggggcccccagcctggcccctccgcctcctctctcctctcccagttccgcagtccttcctggcaaacagccatgc

SEQ ID NO: 266864 - DNA, 120 bp, Artificial Sequence
  ENSG00000126464_7 (sequence is synthesized)
acacgccaggccccacggagctcttcatctcgggtgccctgccgggttccagcacctttccgtcctcatctgccctgtcggcttaccaacacccggcttccttcggcagccgccccttcc

SEQ ID NO: 266865 - DNA, 120 bp, Artificial Sequence
  ENSG00000126464_8 (sequence is synthesized)
cagtgccctcgtccctcagcctccaggaccccccattcagccctccagctaacgggctcctgtcccctcatgacgtgctgcacctgaagccctcgcaggcacccacggtgccctcttcac

SEQ ID NO: 266866 - DNA, 120 bp, Artificial Sequence
  ENSG00000126464_9 (sequence is synthesized)
tgggcttcgagcgcctggcagggggcggtgtcttggggccagctggtctcggtccagcccagacccccccttaccgccctggccccccagacccaccaccacctcctcgccacctcccaa

SEQ ID NO: 266867 - DNA, 120 bp, Artificial Sequence
  ENSG00000126464_10 (sequence is synthesized)
ctcagttcaacctgctggcttcctcttccgctgccgccgccgctgccgagcagtcctccccacagctctataacttctcgggtgctgccccgggcccaccgccgcctgagcgggccctgc

SEQ ID NO: 266868 - DNA, 120 bp, Artificial Sequence
  ENSG00000126464_11 (sequence is synthesized)
cacgccaggacacggtcatcaagcactaccagcggccagccagtgcccagcccccaccacccccgccaccagcccatgcgctccagcactatctgagctgtggaggcagctacccctcca

SEQ ID NO: 266869 - DNA, 120 bp, Artificial Sequence
  ENSG00000126464_12 (sequence is synthesized)
tccatgggccaccgggccaacctggcctgcagccccctgggtggtggggagccctccccgggtgctggggagcctagcaaggctggtcccagcggagccacggctggggcatctggccgg

SEQ ID NO: 266870 - DNA, 120 bp, Artificial Sequence
  ENSG00000126464_13 (sequence is synthesized)
cgggccctgaggcagcagggggcggtggggctgggggtggtggtggaggttaccgccccatcattcagtcgcctgggtacaagacgggcaaaggtggttatggagcagctgccgggggtg

SEQ ID NO: 266871 - DNA, 120 bp, Artificial Sequence
  ENSG00000126464_14 (sequence is synthesized)
ccaccaggccccccccaccccgttcgaccgccacccccaaatgtcagagcctgggtgggccagcagccgcctatgccactgggaaggcctctggggctggaggggcagggggccaggctt

SEQ ID NO: 266872 - DNA, 120 bp, Artificial Sequence
  ENSG00000126464_15 (sequence is synthesized)
attcccccggtcagcctcaagggcttctgggaccccaggcctacgggcaagggtttggaggggggcaggcacaggacttgagcaaagcccccagctactcagggggccccccacagcccc

SEQ ID NO: 266873 - DNA, 120 bp, Artificial Sequence
  ENSG00000126464_16 (sequence is synthesized)
ccagcggcccccctcctcctggcctggccacatgtcagagctactccccggaccagctgcaggggcagctgtatggggtgcagggcgagccatacccagggccagccgcccactcccagg

SEQ ID NO: 266874 - DNA, 120 bp, Artificial Sequence
  ENSG00000126464_17 (sequence is synthesized)
ggctgcccacagccagcccctcgctcagctacagtaccggccattccccagcgctctcgggccatgggggtggctggggacccagctccctgggaggcggcggtgaggccagcccatctc

SEQ ID NO: 266875 - DNA, 120 bp, Artificial Sequence
  ENSG00000126464_18 (sequence is synthesized)
acatcattcgtccgctccagtcaccgcctgccaccggccgtccacctggagtcggctctccaggagcccctggcaaatacctgagctcagtcttggcctcagcgcctttcctggcacctc

SEQ ID NO: 266876 - DNA, 120 bp, Artificial Sequence
  ENSG00000126464_19 (sequence is synthesized)
cgggagctggcagctatgcagccggagcaggtggctacaagggcaagggggatggctcggagctgctggcgggcccaggtgggcctcctgcggagcgcacagaggatgaggagttcctta

SEQ ID NO: 266877 - DNA, 120 bp, Artificial Sequence
  ENSG00000126464_20 (sequence is synthesized)
tccagcacctcttgcaggcgcccagccctcctcggacctcaggggcggacggcttggtgggcgaggacggggcagcagatgcctctaagggacttggggggagtggcggggccgggggac

SEQ ID NO: 266878 - DNA, 120 bp, Artificial Sequence
  ENSG00000126464_21 (sequence is synthesized)
caccgggtacaccctacgagttggccaaggaagacccccagaggtaccacctgcagagtgtcatccgcaccagtgccagcctggatgagggtgccactgcggcactggagctgggcctgg

SEQ ID NO: 266879 - DNA, 120 bp, Artificial Sequence
  ENSG00000126464_22 (sequence is synthesized)
ggaggctgaaggagaagaagaaagggccagagcggggtggcgagacccccgaggggctggccacctctgttgtccactacggggcaggcgccaaggagctgggggccttcttgcaaaaga

SEQ ID NO: 266880 - DNA, 120 bp, Artificial Sequence
  ENSG00000126464_23 (sequence is synthesized)
gccctccgcccccacctcccacggcccagtctacccagcccactccccatggcctccttctggaggccgggggccctgacctcccactggtgctgcctccgcctcccccccagctgctcc

SEQ ID NO: 266881 - DNA, 120 bp, Artificial Sequence
  ENSG00000126464_24 (sequence is synthesized)
cctcggtcctcagccatgcccccagtccctctcccagcgcctccaaagtcggcgtccacctccttgagccagccacccgcgatggggcaccccagccacctccaccgccacccccgcctc

SEQ ID NO: 266882 - DNA, 120 bp, Artificial Sequence
  ENSG00000126464_25 (sequence is synthesized)
caccacccatgcccctgcagctcgaggcccacctccgcagccatggcctggagcccgcggcccccagcccccgcctgcgacccgaggagagcctggatccgccaggcgccatgcaggaat

SEQ ID NO: 266883 - DNA, 120 bp, Artificial Sequence
  ENSG00000126464_26 (sequence is synthesized)
tgctcggggctctggagccgctgcccccggcgcctggggatactggcgtaggcccaccaaactcggagggcaaggatcccgcaggcgcctaccgcagccccagcccgcaaggcaccaagg

SEQ ID NO: 266884 - DNA, 120 bp, Artificial Sequence
  ENSG00000126464_27 (sequence is synthesized)
cgccgcgtttcgtgccgctcacctccatctgcttccctgactccttgctccaagacgaggagcgcagcttcttccccaccatggaggagatgttcggtggaggggccgcggacgactacg

SEQ ID NO: 266885 - DNA, 120 bp, Artificial Sequence
  ENSG00000126464_28 (sequence is synthesized)
gcaaggccgggccacctgaggacgagggggaccccaaggctggcgctgggccaccccccggcccccctgcttatgatccctatgggccctactgtcctggccgggcgtcgggagccgggc

SEQ ID NO: 266886 - DNA, 120 bp, Artificial Sequence
  ENSG00000126464_29 (sequence is synthesized)
ccgagacaccgggcctgggcctggaccccaacaaaccgcctgaactgccctccacggtcaacgccgagccgctgggcctgatccagagtggcccccaccaggcggcgccaccacccccgc

SEQ ID NO: 266887 - DNA, 120 bp, Artificial Sequence
  ENSG00000126464_30 (sequence is synthesized)
catcctccttccacctgctgcggcgccgcgacccacccttccagacccccaagaagctgtacgcccaggagtacgagttcgaggcggacgaggacaaggccgatgttcccgccgacatcc

SEQ ID NO: 266888 - DNA, 120 bp, Artificial Sequence
  ENSG00000126464_31 (sequence is synthesized)
gcctcaacccccggcgcttgcctgacctggtctccagctgccgctcccgtccggccctctcgccactgggggacatcgacttctgcccacccaacccaggacccgatggcccccggcgcc

SEQ ID NO: 266889 - DNA, 120 bp, Artificial Sequence
  ENSG00000126464_32 (sequence is synthesized)
ccgcaagcccacgaaggcgaaacgtgatgggccaccccggccacgggggaggccccggatccgccccctggaggtcccgaccactgcggggcccgcctcggcctccacgcccaccgatgg

SEQ ID NO: 266890 - DNA, 120 bp, Artificial Sequence
  ENSG00000126464_33 (sequence is synthesized)
atggcgccaagaaaccccggggccggggccgaggccggggtcgaaaggctgaggaggcagggggcacccggttggagcccctgaagccacttaagatcaagctgtctgtgcccaaggctg

SEQ ID NO: 266891 - DNA, 120 bp, Artificial Sequence
  ENSG00000126464_34 (sequence is synthesized)
gcgagggtctgggaacctcatcgggtgatgccatatcaggcactgaccacaacagcctggactcgagcctgactcgggagaagatcgaggccaagattaaggaggtggaggagaagcagc

SEQ ID NO: 266892 - DNA, 120 bp, Artificial Sequence
  ENSG00000126464_35 (sequence is synthesized)
cggagatgaagtcgggtttcatggcctccttcttggacttcctcaagtcaggcaagcgccacccaccactctaccaggcgggcctgacgcctccgctcagccctcccaagagtgtgccac

SEQ ID NO: 266893 - DNA, 120 bp, Artificial Sequence
  ENSG00000126464_36 (sequence is synthesized)
cctctgtgccagcccgaggcctgcagccccagccccctgccacccctgctgtgccacatcccccaccttccggagcctttgggcttgggggcgccctggaggctgcagagagtgagggtc

SEQ ID NO: 266894 - DNA, 120 bp, Artificial Sequence
  ENSG00000126464_37 (sequence is synthesized)
tggggcttggctgcccttcaccctgcaagcggcttgatgaggagctgaagcggaacctcgagacgctgccctccttctcctcggatgaggaagactctgtcgccaagaaccgagacctgc

SEQ ID NO: 266895 - DNA, 120 bp, Artificial Sequence
  ENSG00000126464_38 (sequence is synthesized)
aggagagcatctcctccgccatctctgccctcgatgacccaccccttgctgggccaaaagacacttccaccccagatgggccgcccttggcccccgcggctgcagttccagggccacccc

SEQ ID NO: 266896 - DNA, 120 bp, Artificial Sequence
  ENSG00000126464_39 (sequence is synthesized)
ctcttccggggctccccagtgccaacagcaatggcactcccgagcccccgctgctggaggagaaacccccacccactccacctcctgccccgactcctcagcctcagcctccgccacccc

SEQ ID NO: 266897 - DNA, 120 bp, Artificial Sequence
  ENSG00000126464_40 (sequence is synthesized)
cgctggtggcccccacgcccagctcaccaccgccaccgccgctgccgccgccacctccaccagccatgccctcgcctccaccaccacccccaccagccgctgccccactggctgctcctc

SEQ ID NO: 266898 - DNA, 120 bp, Artificial Sequence
  ENSG00000126464_41 (sequence is synthesized)
cacccccaccagccgctgccccactggctgctcctcctgaggagcccgccgccccgtctcccgaagaccccgagctgccggacacccggcccctgcatctggccaaaaagcaggagacgg

SEQ ID NO: 266899 - DNA, 120 bp, Artificial Sequence
  ENSG00000126464_42 (sequence is synthesized)
cggcagtgtgtggggagacggacgaggaggccggcgagagtggcggagagggcatcttccgggaacgggacgagttcgtcatccgtgctgaggacatcccttccctcaagctggcgttgc

SEQ ID NO: 266900 - DNA, 120 bp, Artificial Sequence
  ENSG00000126464_43 (sequence is synthesized)
agacggggcgtgaacccccacccatctggcgagtccagaaggcccttctgcagaaattcactccggagatcaaggacggccagaggcagttttgtgccaccagtaattatttggggtatt

SEQ ID NO: 266901 - DNA, 120 bp, Artificial Sequence
  ENSG00000126464_44 (sequence is synthesized)
ttggggatgcaaaaaatcggtaccagcgcctctatgtaaagttcctggaaaatgtcaataagaaggactacgtgagggtctgtgctcggaaaccctggcatcggcccccagtgccagtca

SEQ ID NO: 266902 - DNA, 120 bp, Artificial Sequence
  ENSG00000126464_45 (sequence is synthesized)
gacgctctgggcaggccaagaaccccgtatctgctgggggtagctctgcacctccccctaaggccccagcaccacctcccaagcctgagacccctgaaaagacgacatctgagaagcccc

SEQ ID NO: 266903 - DNA, 120 bp, Artificial Sequence
  ENSG00000126464_46 (sequence is synthesized)
cagagcagactcctgagacggccatgcctgagccccctgcccccgagaagccctccctcctgcggcctgttgagaaggaaaaggagaaggagaaggtgacacgtggagagcggccattgc

SEQ ID NO: 266904 - DNA, 120 bp, Artificial Sequence
  ENSG00000126464_47 (sequence is synthesized)
ggggtgagcgggccaccagcggacggcagacacggccagagcggagtctcgccacgggacaacctgccacatcccggctgcccaaagcccggcctaccaaggtgaaggctgaaccgcccc

SEQ ID NO: 266905 - DNA, 120 bp, Artificial Sequence
  ENSG00000126464_48 (sequence is synthesized)
ctaagaagaggaagaaatggctgaaggaggcaggcggcaacgctacagcaggcgggggcccaccaggcagctcctcggactcggagtcctcccctggagcccccagcgaggacgagcggg

SEQ ID NO: 266906 - DNA, 120 bp, Artificial Sequence
  ENSG00000126464_49 (sequence is synthesized)
cagtacctgggcgtctgctcaaaaccagggcgatgcgggagatgtaccggagctacgtggagatgttggtgagcacagcacttgacccagacatgatccaggccctggaggacacgcatg

SEQ ID NO: 266907 - DNA, 120 bp, Artificial Sequence
  ENSG00000126464_50 (sequence is synthesized)
acgagctgtacctgccccccatgcggaagatagacggcctgctgaatgagcacaagaagaaagtcctgaagcggctgtcgctaagcccagccctgcaggatgctctgcacacgttcccac

SEQ ID NO: 266908 - DNA, 120 bp, Artificial Sequence
  ENSG00000126464_51 (sequence is synthesized)
agctgcaagtggagcagagtggggagggctctccggaagagggggctgtgcggctgcggcctgctggggaaccctacaaccgcaagacgctcagcaagctcaagaggagcgtggtcagag

SEQ ID NO: 266909 - DNA, 120 bp, Artificial Sequence
  ENSG00000126464_52 (sequence is synthesized)
cccaggagttcaaggttgagctggaaaagtcgggatactatacactctaccattcgctccaccactataaataccacaccttcctgcgctgccgggaccagaccctggccatcgagggcg

SEQ ID NO: 266910 - DNA, 120 bp, Artificial Sequence
  ENSG00000126464_53 (sequence is synthesized)
gcgccgaggacctgggccaggaggaggtggtccagcagtgcatgcggaaccagccgtggctggaacagctctttgactccttcagtgacctgctggcccaagcacaggcccacagccgct

SEQ ID NO: 266911 - DNA, 120 bp, Artificial Sequence
  ENSG00000126464_54 (sequence is synthesized)
gcgggtgaccccgccccagcttgtgaggggggcgcctcctccatgaaccgagaattgggacagaaccgtgtcctcaggagctaacacctgggctccatcgccggggaaagggggtcatgg

SEQ ID NO: 266912 - DNA, 120 bp, Artificial Sequence
  ENSG00000126464_55 (sequence is synthesized)
gtcagggtgtgtctgtgctgccccctccagggcagggttcaaagtccgactccccccctctcccaagccccctccactccctccccattcctcccactgttcggtgtacagagaaattat

SEQ ID NO: 266913 - DNA, 120 bp, Artificial Sequence
  ENSG00000126464_56 (sequence is synthesized)
ttatatatatgtataaatgtctatttagtaacggtttccctctccccttgccccgaccccccctccacagccacagcccccgccccctccaccttgtacataatgtataggaaaagtcta

SEQ ID NO: 266914 - DNA, 120 bp, Artificial Sequence
  ENSG00000126464_57 (sequence is synthesized)
tgtatggctggggggggtggggtggcttcagagagctgggggaccccttccccccaagtcccccctgcaggccaagatctttgctaaaggccattccctccgcagggcatttggcgtcgg

SEQ ID NO: 266915 - DNA, 120 bp, Artificial Sequence
  ENSG00000126464_58 (sequence is synthesized)
gtgggaggggaaaacgcatcttgttaattatttttaatcttatttattgtacatacctggggcaggggcttggggaggtggaggggggagaagggtcccctctctctgcccctcccactc

SEQ ID NO: 266916 - DNA, 120 bp, Artificial Sequence
  ENSG00000126464_59 (sequence is synthesized)
cttttctacggcgatttgtctgtgtctggcccccacccactgcccatcccccattgttgtctggatgtggttctattttttatcggtctcctttcccctcctccccgttctcgcccccgc

SEQ ID NO: 266917 - DNA, 120 bp, Artificial Sequence
  ENSG00000126464_60 (sequence is synthesized)
cccaccccctgctcccactaccctttgtctcttgctctttcttgggcttctgtacaactcaacttgtatacactgtgtacacacaaccagccaaacgaaaacccaacggcaaacacttta

SEQ ID NO: 266918 - DNA, 120 bp, Artificial Sequence
  ENSG00000126464_61 (sequence is synthesized)
agggggtgtctggggcccagggtccacatggagaagacatgtacgtgtcggccgctgttggcgggggtgatccttggaaggagatcgtccttctgggctcagatgggagaaaagttgagg

SEQ ID NO: 266919 - DNA, 120 bp, Artificial Sequence
  ENSG00000126467_0 (sequence is synthesized)
acagtaggtaggaagtctcagaggaaggagcccctccctgggagccagacccccacaccatggcgagcgtggtggtgaagacgatctggcagtccaaagagatccatgaggccggggaca

SEQ ID NO: 266920 - DNA, 120 bp, Artificial Sequence
  ENSG00000126467_1 (sequence is synthesized)
cccccacgggggtggagagctgctcccagctagtcccagaggctccccggagggtgaccagccgggccaaggggatcccgaagaaaaagaaggccgtgtcgttccacggggtggagcccc

SEQ ID NO: 266921 - DNA, 120 bp, Artificial Sequence
  ENSG00000126467_2 (sequence is synthesized)
agatgtcccatcagcccatgcactggtgcctgaacctcaaacggtcctcggcctgcaccaacgtgtcactgctcaacctggccgccatggagcccactgactccacggggacagactcca

SEQ ID NO: 266922 - DNA, 120 bp, Artificial Sequence
  ENSG00000126467_3 (sequence is synthesized)
cagtggaagacctcagcggccaactcacactggctgggccccctgcctcccctaccctaccctgggatccggatgacgcagacatcacggaaatcctgagtggggtcaacagtggattgg

SEQ ID NO: 266923 - DNA, 120 bp, Artificial Sequence
  ENSG00000126467_4 (sequence is synthesized)
tccgcgccaaagactccatcaccagcttgaaggaaaagaccaaccgggttaaccagcacgtgcagtctctgcagagcgagtgttctgtgctgagcgagaatctggagagaaggcggcaag

SEQ ID NO: 266924 - DNA, 120 bp, Artificial Sequence
  ENSG00000126467_5 (sequence is synthesized)
aggcagaagagttggaggggtactgcattcaactcaaggagaactgctggaaggtgacccggtctgtggaagatgctgaaatcaaaaccaacgtcttgaagcagaattctgccctgctgg

SEQ ID NO: 266925 - DNA, 120 bp, Artificial Sequence
  ENSG00000126467_6 (sequence is synthesized)
aggagaagctgcgctacctccagcagcagctgcaggatgagacgccgcgacggcaggaggccgagctgcaggagccggaggagaagcaggagccggaggagaagcaggagccggaggaga

SEQ ID NO: 266926 - DNA, 120 bp, Artificial Sequence
  ENSG00000126467_7 (sequence is synthesized)
cccagggctgccccggcccgccagggagtcccgacaaaccctcgcggccacacggcctggtccccgcaggctggggaatggggcctcgggctggcgagggcccctacgtgagcgagcagg

SEQ ID NO: 266927 - DNA, 120 bp, Artificial Sequence
  ENSG00000126467_8 (sequence is synthesized)
aattgcagaagctgttcaccggcatcgaagagctgaggagagaggtgtcctcactgaccgcccggtggcatcaggaggagggggcggtgcaggaagccctgcggctgctcgggggcctgg

SEQ ID NO: 266928 - DNA, 120 bp, Artificial Sequence
  ENSG00000126467_9 (sequence is synthesized)
gcggcagggtcgacggcttcctaggccagtgggagcgggcacagcgcgaacaggcacagacggcgcgggacttgcaggagctgcgaggtcgggcggatgagctgtgcaccatggtggagc

SEQ ID NO: 266929 - DNA, 120 bp, Artificial Sequence
  ENSG00000126467_10 (sequence is synthesized)
ggtcagcagtgtctgtggcttcactgaggagcgaactggaggggctgggcccactgaaacccattctggaggagttcgggcggcaatttcagaactctcgaagagggcctgacctctcca

SEQ ID NO: 266930 - DNA, 120 bp, Artificial Sequence
  ENSG00000126467_11 (sequence is synthesized)
tgaacctggatcggtcccaccaaggcaactgtgcccgctgtgccagccaggggtcgcagttgtctacggagtccctgcagcagctgctggaccgagcactgacctcactagtggacgagg

SEQ ID NO: 266931 - DNA, 120 bp, Artificial Sequence
  ENSG00000126467_12 (sequence is synthesized)
tgaagcagaggggcctgactcctgcctgtcccagctgtcagaggctacacaagaagattctggagctggagcgccaggccttagccaaacacgtcagggcagaggccctgagctccaccc

SEQ ID NO: 266932 - DNA, 120 bp, Artificial Sequence
  ENSG00000126467_13 (sequence is synthesized)
ttcggctggcccaagacgaggccctgcgggccaagaacctactgctgacagacaagatgaagccagaggagaagatggccactctggaccatctacacttgaagatgtgctccctccacg

SEQ ID NO: 266933 - DNA, 120 bp, Artificial Sequence
  ENSG00000126467_14 (sequence is synthesized)
atcatctcagcaacctgccacttgaggggtccacgggaacaatggggggaggcagcagtgcaggaacccccccaaaacaggggggctcagcccctgaacaataaatggcctctcatgcta

SEQ ID NO: 266934 - DNA, 120 bp, Artificial Sequence
  ENSG00000126467_15 (sequence is synthesized)
tcagtctcaagctcaaggcatgatgggaaactctgagggagaaatgtgggccccatgggaccctaccctttgccctccgcaatccagttccccctccacccccagcccagtccagcaagc

SEQ ID NO: 266935 - DNA, 120 bp, Artificial Sequence
  ENSG00000126467_16 (sequence is synthesized)
gggggcagtcccaggatttgtgggaggaggtcagatgcacgagggactcaagatacacttttaggtggaactccctgccccgacaccaccaccacactgcaccttcgtgcacatagtcat

SEQ ID NO: 266936 - DNA, 120 bp, Artificial Sequence
  ENSG00000126500_0 (sequence is synthesized)
tggcaggtgaggaagcaggcagtgggcgagaagatggattcctttttggacagacaagaccagagagtgaagcgggaataactcatcctccctacctccccagcaaggaaacctctacaa

SEQ ID NO: 266937 - DNA, 120 bp, Artificial Sequence
  ENSG00000126500_1 (sequence is synthesized)
acaggagcagccaagcaggactgaggcccttgccccccaagcatcttctcaaagaagggcatgtgggggcctgacagctcagctgcatgtgtcagcagctccagccccaccatgaacatc

SEQ ID NO: 266938 - DNA, 120 bp, Artificial Sequence
  ENSG00000126500_2 (sequence is synthesized)
tgaactcctcagcggggtaatggaccccctcctttcccccggagacacagcctgagtggcaggaatacagagcctttggagagtggctccctctcagctccgtcatgcaagaacactctc

SEQ ID NO: 266939 - DNA, 120 bp, Artificial Sequence
  ENSG00000126500_3 (sequence is synthesized)
tgcacccagcccattctgccaagtgacttaaaggaattaaaaaaaaaaaaagccttggtaaacaaaaagggggtaaaagccacgcagaggcccttcagaagaggtggcgggctgcagaca

SEQ ID NO: 266940 - DNA, 120 bp, Artificial Sequence
  ENSG00000126500_4 (sequence is synthesized)
aaagggcaagagttgaaaagggctgtggaggtagcaagcagcagaggccaccctgctcagggctgggtgccaggccacagggcatgcccgacgaacagggagtcggaaccccctcaggcc

SEQ ID NO: 266941 - DNA, 120 bp, Artificial Sequence
  ENSG00000126500_5 (sequence is synthesized)
accctcgggagtcctggggtccagaggggtgtccctgtaccccttgcacacaggaccctcactctgcagggataagccagctgcgcctgcagcctagggtgccaaggaggctgctgattg

SEQ ID NO: 266942 - DNA, 120 bp, Artificial Sequence
  ENSG00000126500_6 (sequence is synthesized)
tggcccacagcctcatctgaacgccaggagaccaggataccgaggcaccggatcccctctctgtgccctggggagccccagtgctgcccagtcaccccagggctgaggtctgcgtcccta

SEQ ID NO: 266943 - DNA, 120 bp, Artificial Sequence
  ENSG00000126500_7 (sequence is synthesized)
gtggtgcaaggcctggtaggaccacggggcagggaatgtgagcgccatctgagctcacggtgtcctgagtcgcggcttcgtgactttggcaggggcctccggaccagtgaccccagtcaa

SEQ ID NO: 266944 - DNA, 120 bp, Artificial Sequence
  ENSG00000126500_8 (sequence is synthesized)
acccagagggtcttgggcggcagcgacgaaggaggtattcaggctccaggccaggtggggccggacgcccccagccatccaccatggtggtggcacaccccaccgccactgccaccacca

SEQ ID NO: 266945 - DNA, 120 bp, Artificial Sequence
  ENSG00000126500_9 (sequence is synthesized)
cgcccactgccactgtcacggccaccgttgtgatgaccacggccaccatggacctgcgggactggctgttcctctgctacgggctcatcgccttcctgacggaggtcatcgacagcacca

SEQ ID NO: 266946 - DNA, 120 bp, Artificial Sequence
  ENSG00000126500_10 (sequence is synthesized)
cctgcccctcggtgtgccgctgcgacaacggcttcatctactgcaacgaccggggactcacatccatccccgcagatatccctgatgatgccaccaccctctacctgcagaacaaccaga

SEQ ID NO: 266947 - DNA, 120 bp, Artificial Sequence
  ENSG00000126500_11 (sequence is synthesized)
tcaacaacgccggcatcccccaggacctcaagaccaaggtcaacgtgcaggtcatctacctatacgagaatgacctggatgagttccccatcaacctgccccgctccctccgggagctgc

SEQ ID NO: 266948 - DNA, 120 bp, Artificial Sequence
  ENSG00000126500_12 (sequence is synthesized)
acctgcaggacaacaatgtgcgcaccattgccagggactcgctggcccgcatcccgctgctggagaagctgcacctggatgacaactccgtgtccaccgtcagcattgaggaggacgcct

SEQ ID NO: 266949 - DNA, 120 bp, Artificial Sequence
  ENSG00000126500_13 (sequence is synthesized)
tcgccgacagcaaacagctcaagctgctcttcctgagccggaaccacctgagcagcatcccctcggggctgccgcacacgctggaggagctgcggctggatgacaaccgcatctccacca

SEQ ID NO: 266950 - DNA, 120 bp, Artificial Sequence
  ENSG00000126500_14 (sequence is synthesized)
tcccgctgcatgccttcaagggcctcaacagcctgcggcgcctggtgctggacggtaacctgctggccaaccagcgcatcgccgacgacaccttcagccgcctacagaacctcacagagc

SEQ ID NO: 266951 - DNA, 120 bp, Artificial Sequence
  ENSG00000126500_15 (sequence is synthesized)
tctcgctggtgcgcaattcgctggccgcgccacccctcaacctgcccagcgcccacctgcagaagctctacctgcaggacaatgccatcagccacatcccctacaacacgctggccaaga

SEQ ID NO: 266952 - DNA, 120 bp, Artificial Sequence
  ENSG00000126500_16 (sequence is synthesized)
ttggttttgtggctgcaacctcatgtggctgcgggactgggtgaaggcacgggcggccgtggtcaacgtgcggggcctcatgtgccagggccctgagaaggtccggggcatggccatcaa

SEQ ID NO: 266953 - DNA, 120 bp, Artificial Sequence
  ENSG00000126500_17 (sequence is synthesized)
ggacattaccagcgagatggacgagtgttttgagacggggccgcagggcggcgtggccaatgcggctgccaagaccacggccagcaaccacgcctctgccaccacgccccagggttccct

SEQ ID NO: 266954 - DNA, 120 bp, Artificial Sequence
  ENSG00000126500_18 (sequence is synthesized)
gtttaccctcaaggccaaaaggccagggctgcgcctccccgactccaacattgactaccccatggccacgggtgatggcgccaagaccctggccatccacgtgaaggccctgacggcaga

SEQ ID NO: 266955 - DNA, 120 bp, Artificial Sequence
  ENSG00000126500_19 (sequence is synthesized)
ctccatccgcatcacgtggaaggccacgctccccgcctcctctttccggctcagttggctgcgcctgggccacagcccagccgtgggctccatcacggagaccttggtgcagggggacaa

SEQ ID NO: 266956 - DNA, 120 bp, Artificial Sequence
  ENSG00000126500_20 (sequence is synthesized)
gacagagtacctgctgacagccctggagcccaagtccacctacatcatctgcatggtcaccatggagaccagcaatgcctacgtagctgatgagacacccgtgtgtgccaaggcagagac

SEQ ID NO: 266957 - DNA, 120 bp, Artificial Sequence
  ENSG00000126500_21 (sequence is synthesized)
agccgacagctatggccctaccaccacactcaaccaggagcagaacgctggccccatggcgagcctgcccctggcgggcatcatcggcggggcagtggctctggtcttcctcttcctggt

SEQ ID NO: 266958 - DNA, 120 bp, Artificial Sequence
  ENSG00000126500_22 (sequence is synthesized)
cctgggggccatctgctggtacgtgcaccaggctggcgagctgctgacccgggagagggcctacaaccggggcagcaggaaaaaggatgactatatggagtcagggaccaagaaggataa

SEQ ID NO: 266959 - DNA, 120 bp, Artificial Sequence
  ENSG00000126500_23 (sequence is synthesized)
ctccatcctggaaatccgcggccctgggctgcagatgctgcccatcaacccgtaccgcgccaaagaagagtacgtggtccacactatcttcccctccaacggcagcagcctctgcaaggc

SEQ ID NO: 266960 - DNA, 120 bp, Artificial Sequence
  ENSG00000126500_24 (sequence is synthesized)
cacacacaccattggctacggcaccacgcggggctaccgggacggcggcatccccgacatagactactcctacacatgatgcccgcccacccgggctgccccgcctcagccccagctgcc

SEQ ID NO: 266961 - DNA, 120 bp, Artificial Sequence
  ENSG00000126500_25 (sequence is synthesized)
ctggcgtggccatgtggctttgcccagcctgctgcaatccaagagagcaaggaagagaaattccatgggtgactttcctccgcagaaagcaaagtttggggagggctgacgattttgtag

SEQ ID NO: 266962 - DNA, 120 bp, Artificial Sequence
  ENSG00000126500_26 (sequence is synthesized)
aacacaacagtgacaattttttttaaaagaatagaaggcaggagggggaattcgacattgttgaagacataatttataccaagttatgccagttggggagggaaggactaaaaataatat

SEQ ID NO: 266963 - DNA, 120 bp, Artificial Sequence
  ENSG00000126500_27 (sequence is synthesized)
tgcaggcagggctgggttgggttttttttttttcccccctgaactggaaggatactacctgtacaacatctgtggacacctcatgctctgttcaaggccatcacaaaggaaccgccaggg

SEQ ID NO: 266964 - DNA, 120 bp, Artificial Sequence
  ENSG00000126500_28 (sequence is synthesized)
agaagcagccggctctcaaagctcccacgcagctctcccgccactggccactcgctggcgacccgatggaaggttttcaggctcctcacaaaggagagagggaagaaaagatcttttgcc

SEQ ID NO: 266965 - DNA, 120 bp, Artificial Sequence
  ENSG00000126500_29 (sequence is synthesized)
ctggagatatggtcctgaaatctctcccctggcttattccataccatttcccttgcagatttgcagaaacatggcatctttcactgcattctttgaacaatcatgtagtcgattaaaaaa

SEQ ID NO: 266966 - DNA, 120 bp, Artificial Sequence
  ENSG00000126500_30 (sequence is synthesized)
aaaaaacaaacttttttttcctaggctgaagccctcttcagttccatgcaccacgctccgtagaagccccggcggaagccgtagctttccctgccacctggaggtgcatctgtctgcctg

SEQ ID NO: 266967 - DNA, 120 bp, Artificial Sequence
  ENSG00000126500_31 (sequence is synthesized)
tctatccctgtcgcggtgtctctaagtacagatgggtagatagagccacatgcacggtccttaccgttcttcttgggtcagttcttaccatttcctgaacaatagaattgtgaaagtgtt

SEQ ID NO: 266968 - DNA, 120 bp, Artificial Sequence
  ENSG00000126522_0 (sequence is synthesized)
agtggcgggcgcgacactatccgtgcggccaggcggagacccggaggaccgaagcttccggacgacgaggaaccgcccaacatggcctcggagagtgggaagctttggggtggccggttt

SEQ ID NO: 266969 - DNA, 120 bp, Artificial Sequence
  ENSG00000126522_1 (sequence is synthesized)
gtgggtgcagtggaccccatcatggagaagttcaacgcgtccattgcctacgaccggcacctttgggaggtggatgttcaaggcagcaaagcctacagcaggggcctggagaaggcaggg

SEQ ID NO: 266970 - DNA, 120 bp, Artificial Sequence
  ENSG00000126522_2 (sequence is synthesized)
ctcctcaccaaggccgagatggaccagatactccatggcctagacaaggtggctgaggagtgggcccagggcaccttcaaactgaactccaatgatgaggacatccacacagccaatgag

SEQ ID NO: 266971 - DNA, 120 bp, Artificial Sequence
  ENSG00000126522_3 (sequence is synthesized)
cgccgcctgaaggagctcattggtgcaacggcagggaagctgcacacgggacggagccggaatgaccaggtggtcacagacctcaggctgtggatgcggcagacctgctccacgctctcg

SEQ ID NO: 266972 - DNA, 120 bp, Artificial Sequence
  ENSG00000126522_4 (sequence is synthesized)
ggcctcctctgggagctcattaggaccatggtggatcgggcagaggcggaacgtgatgttctcttcccggggtacacccatttgcagagggcccagcccatccgctggagccactggatt

SEQ ID NO: 266973 - DNA, 120 bp, Artificial Sequence
  ENSG00000126522_5 (sequence is synthesized)
ctgagccacgccgtggcactgacccgagactctgagcggctgctggaggtgcggaagcggatcaatgtcctgcccctggggagtggggccattgcaggcaatcccctgggtgtggaccga

SEQ ID NO: 266974 - DNA, 120 bp, Artificial Sequence
  ENSG00000126522_6 (sequence is synthesized)
gagctgctccgagcagaactcaactttggggccatcactctcaacagcatggatgccactagtgagcgggactttgtggccgagttcctgttctgggcttcgctgtgcatgacccatctc

SEQ ID NO: 266975 - DNA, 120 bp, Artificial Sequence
  ENSG00000126522_7 (sequence is synthesized)
agcaggatggccgaggacctcatcctctactgcaccaaggaattcagcttcgtgcagctctcagatgcctacagcacgggaagcagcctgatgccccagaagaaaaaccccgacagtttg

SEQ ID NO: 266976 - DNA, 120 bp, Artificial Sequence
  ENSG00000126522_8 (sequence is synthesized)
aggacaaggaagctgtgtttgaagtgtcagacactatgagtgccgtgctccaggtggccactggcgtcatctctacgctgcagattcaccaagagaacatgggacaggctctcagccccg

SEQ ID NO: 266977 - DNA, 120 bp, Artificial Sequence
  ENSG00000126522_9 (sequence is synthesized)
acatgctggccactgaccttgcctattacctggtccgcaaagggatgccattccgccaggcccacgaggcctccgggaaagctgtgttcatggccgagaccaagggggtcgccctcaacc

SEQ ID NO: 266978 - DNA, 120 bp, Artificial Sequence
  ENSG00000126522_10 (sequence is synthesized)
agctgtcactgcaggagctgcagaccatcagccccctgttctcgggcgacgtgatctgcgtgtgggactacgggcacagtgtggagcagtatggtgccctgggcggcactgcgcgctcca

SEQ ID NO: 266979 - DNA, 120 bp, Artificial Sequence
  ENSG00000126522_11 (sequence is synthesized)
gcgtcgactggcagatccgccaggtgcgggcgctactgcaggcacagcaggcctaggtcctcccacacctgccccctaataaagtgggcgcgagaggaggctgctgtgtgtttcctgccc

SEQ ID NO: 266980 - DNA, 120 bp, Artificial Sequence
  ENSG00000126522_12 (sequence is synthesized)
cagcctggctccctcgttgctgggctttcggggctggccagtggggacagtcagggactggagaggcagggcagggtggcctgtaatcccagcactttggaagggcaaggtgcgaggatg

SEQ ID NO: 266981 - DNA, 120 bp, Artificial Sequence
  ENSG00000126522_13 (sequence is synthesized)
cttgaggccaggagtttgacacagcctgggcaacacagggagacccccatctctactcaataataaaacaaatagcctggcgtggtggcccatgcatatagtcccagctacttgtaaggc

SEQ ID NO: 266982 - DNA, 120 bp, Artificial Sequence
  ENSG00000126522_14 (sequence is synthesized)
tgcagtgagctatgatcacgccactgcattccagcctggataacagagtgagaacctatctctaaaaataaataaataaacgaaaaataaatggaagcggagaaaactgggcaagggcaa

SEQ ID NO: 266983 - DNA, 120 bp, Artificial Sequence
  ENSG00000126522_15 (sequence is synthesized)
aaataaatggaagcggagaaaactgggcaagggcaatgagagtcgtagacgggaagggaagagggggctcccatcatagcctctgctctgtccaggccccatccccttcagacagggtat

SEQ ID NO: 266984 - DNA, 84 bp, Artificial Sequence
  ENSG00000126522_16 (sequence is synthesized)
ctctgctctgtccaggccccatccccttcagacagggtatcacagtgacctcctaggccaggagcgatgggcaacaggaagact

SEQ ID NO: 266985 - DNA, 120 bp, Artificial Sequence
  ENSG00000126522_17 (sequence is synthesized)
gcgtggaggacgccgagcaccgtggcgcgcgctcacgtccgcgtccccaagggctgcgctccctcaagcgcagtgcccagaactcggagccagcccggcccgggggaccctgctggccaa

SEQ ID NO: 266986 - DNA, 120 bp, Artificial Sequence
  ENSG00000126522_18 (sequence is synthesized)
agctgggaagtgcagagtgggacagaaaaccgccttatctgctcagcgggggactctgcatggagccccagctctcgctaaggtgacgaccaagccattgaatgtgtctgagcagggcca

SEQ ID NO: 266987 - DNA, 120 bp, Artificial Sequence
  ENSG00000126522_19 (sequence is synthesized)
gagccctccagcaaggctcctggcaagcccagcctgctgccctcagcctgacatgtgggaacatgtgtcaggagacaagtgtcctgcacccagggtgacttagtgcttggggacaagtgt

SEQ ID NO: 266988 - DNA, 120 bp, Artificial Sequence
  ENSG00000126522_20 (sequence is synthesized)
tttgtggacacttggggacaagtattctgtacccaaggagactgggccagggaagaggctaagcgccaggtggttgccctggcaaccaggacttggttctctgtgtgtgcgttcgtgtgt

SEQ ID NO: 266989 - DNA, 120 bp, Artificial Sequence
  ENSG00000126522_21 (sequence is synthesized)
gcctgccaggagccctggtcaccatgaatccctgtccctgcagtggggccattgcaggcaatcccctgggtgtggaccgagagctgctccgagcaggtgagacgtcctgcccctcctccc

SEQ ID NO: 266990 - DNA, 120 bp, Artificial Sequence
  ENSG00000126522_22 (sequence is synthesized)
cagggagaatcaccctcagcacccgccaagacctgcagacacacctgaaaccagagggcaggggcctgtggctcctggtgaaaccttcattcattgcctatgggcactgaggtcatcaag

SEQ ID NO: 266991 - DNA, 120 bp, Artificial Sequence
  ENSG00000126522_23 (sequence is synthesized)
ttcaggggtcactcatggcagggatgcctggtactgagagactcagggctcctgcctccctcctgggactgtgcaaaagatccctccccccagctgttgccccaccctgatcaggggagg

SEQ ID NO: 266992 - DNA, 69 bp, Artificial Sequence
  ENSG00000126522_24 (sequence is synthesized)
gctcacacctgtaatcccagcactgtaggaggctgaggcgaaccccatctctaataaaaatacaaaaat

SEQ ID NO: 266993 - DNA, 63 bp, Artificial Sequence
  ENSG00000126522_25 (sequence is synthesized)
gtggcgcatgcccgttgcagcaagccaagactgcattactgcactccagcctgggccacagag

SEQ ID NO: 266994 - DNA, 120 bp, Artificial Sequence
  ENSG00000126522_26 (sequence is synthesized)
agcctgggccacagagcaagactctgtctaaaaacaacaacaaaaactagccagttgtggtggtatgtgcctatagtcccagctacgtggaaggctgaggcgggaggattgcttgagccc

SEQ ID NO: 266995 - DNA, 120 bp, Artificial Sequence
  ENSG00000126522_27 (sequence is synthesized)
agtgagctgtgatggcaccactgtcctccagtctgggaaacagagcaagaccctgtccctaaaagacaaaaaataagaaatgtctgaaacttatattttattaacaacaaagacaaacaa

SEQ ID NO: 266996 - DNA, 120 bp, Artificial Sequence
  ENSG00000126522_28 (sequence is synthesized)
ttaacaacaaagacaaacaagctaaactcaaggaagaatgaataacccctaccacgtgattttgggagcaatgacagattttgttaaagaaccaaggctgggtgcagtggctcacgcctg

SEQ ID NO: 266997 - DNA, 120 bp, Artificial Sequence
  ENSG00000126522_29 (sequence is synthesized)
caaaaaaaaaaaaagaaccaaaagccagaccccagcagtgaggatgtgacaccaaatccccaaaagggtcaaagctctgggtcacagataaaatcttccagagcagttgttctcagactg

SEQ ID NO: 266998 - DNA, 120 bp, Artificial Sequence
  ENSG00000126522_30 (sequence is synthesized)
gtcacagataaaatcttccagagcagttgttctcagactgtcattcctggccatcataattttcaccaaggagcttagaaatgcaaactttctggctgggcacagtggcttatgcctgta

SEQ ID NO: 266999 - DNA, 120 bp, Artificial Sequence
  ENSG00000126522_31 (sequence is synthesized)
gagcccagggggcagttagagttctgcagcggtcctggctcctcagggaagcaacacatcggcctccctgagcaccatctcctccttgcacaggtggtcacagacctcaggctgtggatg

SEQ ID NO: 267000 - DNA, 120 bp, Artificial Sequence
  ENSG00000126522_32 (sequence is synthesized)
cggcagacctgctccacgctctcgggcctcctctgggagctcattaggaccatggtggatcgggcagaggcgtgagtcctacagggacacccagggggcagacagaggtgtgatggaagc

SEQ ID NO: 267001 - DNA, 120 bp, Artificial Sequence
  ENSG00000126522_33 (sequence is synthesized)
ctgaacaggagacctagggggcaggggtgaacagcgtgggggtgccaggccctgggggacaggggcatcccagaactccaggatcgaggcagagcagccaggagtgggccatttcctgca

SEQ ID NO: 267002 - DNA, 120 bp, Artificial Sequence
  ENSG00000126522_34 (sequence is synthesized)
tttgggcggtgtgccgggctcctgatgaccctcaagggacttcccagcacctacaacaaagacttacagcaggcctaggtcctcccacacctgccccctaataaagtgggcgcgagagga

SEQ ID NO: 267003 - DNA, 120 bp, Artificial Sequence
  ENSG00000126522_35 (sequence is synthesized)
ggccagaaaagccctggccagtggcgggcgcgacactatccgtgcggccaggcggagacccggaggaccgaagcttccggacgacgaggaaccgcccaacatggcctcggaggtggctga

SEQ ID NO: 267004 - DNA, 120 bp, Artificial Sequence
  ENSG00000126522_36 (sequence is synthesized)
cccctgccctgtgcctcactttagtccttcagcccagcttctctccagtttcctcccacacctccacggacaggctggttgtggtgatattgtacactgaagtataaaccttaaatgggt

SEQ ID NO: 267005 - DNA, 76 bp, Artificial Sequence
  ENSG00000126522_37 (sequence is synthesized)
gtggtgatattgtacactgaagtataaaccttaaatgggtaaagtgggtggggcatggtggttcaccatgcccagc

SEQ ID NO: 267006 - DNA, 73 bp, Artificial Sequence
  ENSG00000126522_38 (sequence is synthesized)
aaaataaaataaaataaaataaaaataaataggccaggcatggtggctcacgcccgtaatccttaagaccagc

SEQ ID NO: 267007 - DNA, 79 bp, Artificial Sequence
  ENSG00000126522_39 (sequence is synthesized)
gcctgtgcattgggataaattgtatgtgagtgataactcagtaaagctggtttatttaaaacaacaacaataacaaaaa

SEQ ID NO: 267008 - DNA, 120 bp, Artificial Sequence
  ENSG00000126522_40 (sequence is synthesized)
tggataaattgtatgtgagtgataactcagtaaagctggtttatttaaaacaacaacaataacaaaaaacacgctaggtgcaatggcttacgtttgtaatcctagcactttgggaggcca

SEQ ID NO: 267009 - DNA, 120 bp, Artificial Sequence
  ENSG00000126522_41 (sequence is synthesized)
tttcagaacagcttgggcgacatagcacgaccccatctttgcgaaaaatgaaaatttagccgggtccccccaccgcctaacctcctcctgccccctgtatggtcaggctgggtggggatg

SEQ ID NO: 267010 - DNA, 120 bp, Artificial Sequence
  ENSG00000126524_0 (sequence is synthesized)
agacacactgtgacggctgcctgaagctagtgagtcgcggcgccgcgcactggtggttgggtcagtgccgcgcgccgatcggtcgttaccgcgaggcgctggtggccttcaggctggacg

SEQ ID NO: 267011 - DNA, 120 bp, Artificial Sequence
  ENSG00000126524_1 (sequence is synthesized)
gcgcgggtcagccctggttcgccggcttctgggtctttgaacagccgcgatgtcgatcttcacccccaccaaccagatccgcctaaccaatgtggccgtggtacggatgaagcgtgccgg

SEQ ID NO: 267012 - DNA, 120 bp, Artificial Sequence
  ENSG00000126524_2 (sequence is synthesized)
gaagcgcttcgaaatcgcctgctacaaaaacaaggtcgtcggctggcggagcggcgtggaaaaagacctcgatgaagttctgcagacccactcagtgtttgtaaatgtttctaaaggtca

SEQ ID NO: 267013 - DNA, 120 bp, Artificial Sequence
  ENSG00000126524_3 (sequence is synthesized)
ggttgccaaaaaggaagatctcatcagtgcgtttggaacagatgaccaaactgaaatctgtaagcagattttgactaaaggagaagttcaagtatcagataaagaaagacacacacaact

SEQ ID NO: 267014 - DNA, 120 bp, Artificial Sequence
  ENSG00000126524_4 (sequence is synthesized)
ggagcagatgtttagggacattgcaactattgtggcagacaaatgtgtgaatcctgaaacaaagagaccatacaccgtgatccttattgagagagccatgaaggacatccactattcggt

SEQ ID NO: 267015 - DNA, 120 bp, Artificial Sequence
  ENSG00000126524_5 (sequence is synthesized)
gaaaaccaacaagagtacaaaacagcaggctttggaagtgataaagcagttaaaagagaaaatgaagatagaacgtgctcacatgaggcttcggttcatccttccagtcaatgaaggcaa

SEQ ID NO: 267016 - DNA, 120 bp, Artificial Sequence
  ENSG00000126524_6 (sequence is synthesized)
atggccaacagttagaaatcgtatgtctgattgacccgggctgcttccgagaaattgatgagctaataaaaaaggaaactaaaggcaaaggttctttggaagtactcaatctgaaagatg

SEQ ID NO: 267017 - DNA, 120 bp, Artificial Sequence
  ENSG00000126524_7 (sequence is synthesized)
tagaagaaggagatgagaaatttgaatgacacccatcaatctcttcacctctaaaacactaaagtgtttccgtttccgacggcactgtttcatgtctgtggtctgccaaatacttgctta

SEQ ID NO: 267018 - DNA, 120 bp, Artificial Sequence
  ENSG00000126524_8 (sequence is synthesized)
aactatttgacattttctatctttgtgttaacagtggacacagcaaggctttcctacataagtataataatgtgggaatgatttggttttaattataaactggggtctaaatcctaaagc

SEQ ID NO: 267019 - DNA, 120 bp, Artificial Sequence
  ENSG00000126524_9 (sequence is synthesized)
aaaattgaaactccaagatgcaaagtccagagtggcattttgctactctgtctcatgccttgatagctttccaaaatgaaagttacttgaggcagctcttgtgggtgaaaagttatttgt

SEQ ID NO: 267020 - DNA, 120 bp, Artificial Sequence
  ENSG00000126524_10 (sequence is synthesized)
acagtagagtaagattattaggggtatgtctatacaacaaaagggggggtctttcctaaaaaagaaaacatatgatgcttcatttctacttaatggaacttgtgttctgagggtcattat

SEQ ID NO: 267021 - DNA, 120 bp, Artificial Sequence
  ENSG00000126524_11 (sequence is synthesized)
ggtatcgtaatgtaaagcttggatgatgttcctgattatctgagaaacagatatagaaaaattgtgccggacttacctttcattgaacatgctgccataacttagattattcttggttaa

SEQ ID NO: 267022 - DNA, 120 bp, Artificial Sequence
  ENSG00000126524_12 (sequence is synthesized)
tcaaggtcatagaaagtgaagattatggccaacagttagaaatcgtaagagtcaaatattttctttgcttcatgttacctaaatattgtattctctagtaataaatttgtagcaaacatt

SEQ ID NO: 267023 - DNA, 120 bp, Artificial Sequence
  ENSG00000126545_0 (sequence is synthesized)
atcatcttggtcatcaacacaacttgcttctctccagacttgggcttaaggctctgataaccatgaggcttctcattctcacctgtcttgtggctgttgctcttgccaggcctaaacttc

SEQ ID NO: 267024 - DNA, 120 bp, Artificial Sequence
  ENSG00000126545_1 (sequence is synthesized)
ctcttagatacccagaacgccttcagaatccatcagagagcagtgagcctataccattagaatcaagagaggaatacatgaatggtatgaacaggcagagaaacattctgagagaaaaac

SEQ ID NO: 267025 - DNA, 120 bp, Artificial Sequence
  ENSG00000126545_2 (sequence is synthesized)
agactgatgaaatcaaggatactaggaatgagtctactcagaactgtgttgtggcagagcctgagaagatggaatccagcatcagttcatcgagtgaggaaatgtctctcagtaagtgtg

SEQ ID NO: 267026 - DNA, 120 bp, Artificial Sequence
  ENSG00000126545_3 (sequence is synthesized)
cggaacagttttgtagactgaacgaatacaaccaacttcagctgcaagctgcccatgcccaggagcaaattcgcagaatgaatgaaaacagccatgtccaagtgcctttccagcagctca

SEQ ID NO: 267027 - DNA, 120 bp, Artificial Sequence
  ENSG00000126545_4 (sequence is synthesized)
ccacaaatcatgcagtatgttcctttcccaccgttttccgacatctccaatcccactgctcatgaaaattatgaaaaaaataacgtcatgctacagtggtgatatgattgaaaatttcat

SEQ ID NO: 267028 - DNA, 120 bp, Artificial Sequence
  ENSG00000126545_5 (sequence is synthesized)
tctctgaatttctcctctcaaggaaaaccatcttatctgaagactggactgttgttttagaatagtaaaatcccatattgaaggaaattgttctttttgagttatctacttaatagcata

SEQ ID NO: 267029 - DNA, 120 bp, Artificial Sequence
  ENSG00000126545_6 (sequence is synthesized)
tcattctttttcttaagctaaattttcctagagagtttattgtctaaatttcagttgtgtcttgccatatggagggcacctaatcagagggtattaaagtgtttactaagttttctagtg

SEQ ID NO: 267030 - DNA, 120 bp, Artificial Sequence
  ENSG00000126545_7 (sequence is synthesized)
gacattttgtttaaaaagtctttgaattgccagttctgtaagtgccatcaattaaaatagttttgtgcagtgacagagattttcttttttcttttcaataaattacactttaaggcaaaa

SEQ ID NO: 267031 - DNA, 120 bp, Artificial Sequence
  ENSG00000126549_0 (sequence is synthesized)
atcatctcttgaagcttcacttcaacttcactacttctgtagtctcatcttgagtaaaagagaacccagccaactatgaagttccttgtctttgccttcatcttggctctcatggtttcc

SEQ ID NO: 267032 - DNA, 120 bp, Artificial Sequence
  ENSG00000126549_1 (sequence is synthesized)
atgattggagctgattcatctgaagagaaatttttgcgtagaattggaagattcggttatgggtatggcccttatcagccagttccagaacaaccactatacccacaaccataccaacca

SEQ ID NO: 267033 - DNA, 120 bp, Artificial Sequence
  ENSG00000126549_2 (sequence is synthesized)
ctacatccatattctcatctttcataccatatcacactactaccactttttgaagaatcatcaaagagcaatgcaaatgaaaaacactataatttactgtatactctttgtttcaggata

SEQ ID NO: 267034 - DNA, 120 bp, Artificial Sequence
  ENSG00000126549_3 (sequence is synthesized)
cttgccttttcaattgtcacttgatgatataattgcaatttaaactgttaagctgtgttcagtactgtttctgaataatagaaatcacttctctaaaagcaataaatttcaagcacattt

SEQ ID NO: 267035 - DNA, 120 bp, Artificial Sequence
  ENSG00000126549_4 (sequence is synthesized)
ttacatgtatgctccttatttttctcttttctatttataggaataatgatttctttcatcatcttctttcccagtttgactagcacagattgaagcccataatgtcagaggtccttattt

SEQ ID NO: 267036 - DNA, 120 bp, Artificial Sequence
  ENSG00000126549_5 (sequence is synthesized)
agtataatcaataaacttttgatgggcgaatgcaagaaaaaatgtgatactgaatttccacatatgttttcagagaacccagccaactatgaagttccttgtctttgccttcatcttggc

SEQ ID NO: 267037 - DNA, 120 bp, Artificial Sequence
  ENSG00000126549_6 (sequence is synthesized)
agtgttctctgataatgctgtgtagtccaaataaattgtgttctctgattacttattcttctagaagaaccaatacttatttctcaaatatgtgtagtagttgcaaaagtgtgctttgtt

SEQ ID NO: 267038 - DNA, 120 bp, Artificial Sequence
  ENSG00000126549_7 (sequence is synthesized)
ttcctctatttatgatacacaggtaacagtcacaaatgtattgtgtcctaacaacatttaagttgaaactcatagtgccaacctgaagaaaccagttactccctgagccctcaagtatca

SEQ ID NO: 267039 - DNA, 120 bp, Artificial Sequence
  ENSG00000126549_8 (sequence is synthesized)
tctcctaagtaatcactttgacctaaaaaatagttgaaattctaattctgttaattataatatatgcctcatggagcataaaggctgataattacacataaaatatggtaagtttgcacc

SEQ ID NO: 267040 - DNA, 120 bp, Artificial Sequence
  ENSG00000126549_9 (sequence is synthesized)
acaatctaagcttctaataaaaacgcttgcactgtcattatctcaattttctgcaattttctttctccttgtgtgtatacagtatgggtatggcccttatcagccagttccagaacaacc

SEQ ID NO: 267041 - DNA, 120 bp, Artificial Sequence
  ENSG00000126549_10 (sequence is synthesized)
atgattgtaagtatatcaggacatttgaagaatatgttctcagtacctatcccaagagtctctctattccttgtgttctggcatatattggtgtttacttgaatacagctttatatgttt

SEQ ID NO: 267042 - DNA, 120 bp, Artificial Sequence
  ENSG00000126549_11 (sequence is synthesized)
aaatgtttccatatgaacttttttttgtactaacctacataagctatataaggatttagaataaatagtcattattcatctacagacactaaagtatatttagcttagtgtgaaataaaa

SEQ ID NO: 267043 - DNA, 120 bp, Artificial Sequence
  ENSG00000126549_12 (sequence is synthesized)
tgtaatgctctagacaatctgaagttagaaatctcaggaatgaactaggtgcacttgagtggaattcaagtattagaagatgtcaaagtagaaattttcaagtcattccttgcaaaaact

SEQ ID NO: 267044 - DNA, 120 bp, Artificial Sequence
  ENSG00000126549_13 (sequence is synthesized)
aacttaaaattagtatacaattatttagcacacactttctaaaataaagctgcttatttttaactataaaacaaaacttcagatctatgacatgttatgagttcccagcttttattgtca

SEQ ID NO: 267045 - DNA, 120 bp, Artificial Sequence
  ENSG00000126549_14 (sequence is synthesized)
tttactactatgtatcactaggtaaagcacttgacttctctggagctctttcttctactctacttccttctatttctcctgtcccttttctatgacattagtaggaaactggccatgaaa

SEQ ID NO: 267046 - DNA, 120 bp, Artificial Sequence
  ENSG00000126549_15 (sequence is synthesized)
attggagctgattcatctgaagaggtgagtcattttcattcactggaaaacttgttttcagttttgtcctccctacatttgtattgaattattaaacttttcttcatttttcacagaaat

SEQ ID NO: 267047 - DNA, 120 bp, Artificial Sequence
  ENSG00000126549_16 (sequence is synthesized)
tagcaaatttcatttatttaacatttttcttaatgtatgtatcttgatgtcccagtatgttgacatataatgtcaatgtgatagggttgcaaaagatcccctaactaatatagtgaatac

SEQ ID NO: 267048 - DNA, 120 bp, Artificial Sequence
  ENSG00000126550_0 (sequence is synthesized)
atctcttgagacttcacttcagcttcactgacttcttgactctcctcttgagtaaaaggactcagccaactatgaagttttttgtctttgctttagtcttggctctcatgatttccatga

SEQ ID NO: 267049 - DNA, 120 bp, Artificial Sequence
  ENSG00000126550_1 (sequence is synthesized)
ttagcgctgattcacatgaaaagagacatcatgggtatagaagaaaattccatgaaaagcatcattcacatcgagaatttccattttatggggactatggatcaaattatctatatgaca

SEQ ID NO: 267050 - DNA, 120 bp, Artificial Sequence
  ENSG00000126550_2 (sequence is synthesized)
tttattctcattcatcataccgcatcacactaccactgctttttgaagaattatcataaggcaatggagaataaaagaaagaccatgatttagtgaattctgtgtttcatgatacttccc

SEQ ID NO: 267051 - DNA, 120 bp, Artificial Sequence
  ENSG00000126550_3 (sequence is synthesized)
ttcctaattatcatttgattagatacttgcaatttaaactgttaagctgttttcactgctgtttctgagtaatagaaattcattcctctccaaaagcaataaatttctagcacattatta

SEQ ID NO: 267052 - DNA, 120 bp, Artificial Sequence
  ENSG00000126550_4 (sequence is synthesized)
ggcatgattatagaggtaagctgactctagttgcttgtctttctagaagtgtcaacactgacagtttaaaaaaaaagccataagctaacaaccattccagtttaagaaatgtagcatggg

SEQ ID NO: 267053 - DNA, 84 bp, Artificial Sequence
  ENSG00000126550_5 (sequence is synthesized)
taagctaacaaccattccagtttaagaaatgtagcatgggttagctccttgaagtgtattcatttgtataaatgcttctgaagc

SEQ ID NO: 267054 - DNA, 120 bp, Artificial Sequence
  ENSG00000126550_6 (sequence is synthesized)
tgggaggatggcttgagaccagatggtccaggctgcagtgatctgtgctcatgcccctgcactccagcctggaaaacagagcatgtctcccaatgctttgaagcatagtgtcatcaatag

SEQ ID NO: 267055 - DNA, 120 bp, Artificial Sequence
  ENSG00000126550_7 (sequence is synthesized)
tgtgatgccttcagctttgttcttttgcttacaattgtcttgggtatatgagcttttctttggatccatatgaaatttaaagtagttatttctaattctgtgaagaatgtcaatggtcat

SEQ ID NO: 267056 - DNA, 83 bp, Artificial Sequence
  ENSG00000126550_8 (sequence is synthesized)
tgagcttttctttggatccatatgaaatttaaagtagttatttctaattctgtgaagaatgtcaatggtcaatcagtatggcc

SEQ ID NO: 267057 - DNA, 120 bp, Artificial Sequence
  ENSG00000126550_9 (sequence is synthesized)
tgtgaatgggagttcattcatgatttgggtctctgcttgccatctgatattcaacaaacctgacaaaacaagtaatcaagaaaggatctcctattgaataaatgatgctgagaaaactgg

SEQ ID NO: 267058 - DNA, 89 bp, Artificial Sequence
  ENSG00000126550_10 (sequence is synthesized)
agattaaaaacttaaatgtaataccccaaaccatgaaaacctgagaagaaaacttaggtgataccattcaggacagccgttggcaaaga

SEQ ID NO: 267059 - DNA, 89 bp, Artificial Sequence
  ENSG00000126550_11 (sequence is synthesized)
acttaaatgtaataccccaaaccatgaaaacctgagaagaaaacttaggtgataccattcaggacagccgttggcaaagacttcatgta

SEQ ID NO: 267060 - DNA, 120 bp, Artificial Sequence
  ENSG00000126550_12 (sequence is synthesized)
tttacaagacaaaaacaaacaaccccatctaaaagtgggcaaaggacatgaacagatagttctcagaagaagacattcatgcagccaacaaacaagaaaaaaagcttatcatcactgatc

SEQ ID NO: 267061 - DNA, 120 bp, Artificial Sequence
  ENSG00000126550_13 (sequence is synthesized)
attagagaaatgcaaataaaaatcacaatgagataccatctcactaccagtcagaatgctgattattaaaaagtcaagaaacaatagatgcaggtgatgctgtggagagacaagaacact

SEQ ID NO: 267062 - DNA, 70 bp, Artificial Sequence
  ENSG00000126550_14 (sequence is synthesized)
tgcagcaatcccatgactgggtatatacccaaaggaacgtaaatcattctactataaagacatatgccta

SEQ ID NO: 267063 - DNA, 78 bp, Artificial Sequence
  ENSG00000126550_15 (sequence is synthesized)
taccatttgatgcagcaatcccatgactgggtatatacccaaaggaacgtaaatcattctactataaagacatatgcc

SEQ ID NO: 267064 - DNA, 120 bp, Artificial Sequence
  ENSG00000126550_16 (sequence is synthesized)
aagtgggagctgaacagtgagaacacgtgaagacagggaggggacaacacaaaccagggatggaggggagggagtaagggaaggtaacagaggactgatcaataggtgcagcaaaccacc

SEQ ID NO: 267065 - DNA, 120 bp, Artificial Sequence
  ENSG00000126550_17 (sequence is synthesized)
caccatggcacacatatacctatgtaacagaactgcatgttctgcatatgtattctagaacttaaagtaaaattaaaaaataaaatgaaataaaataaaaatgcctccgagggaaagctt

SEQ ID NO: 267066 - DNA, 120 bp, Artificial Sequence
  ENSG00000126550_18 (sequence is synthesized)
aaataaaaatgcctccgagggaaagcttctgttcaccagtgttaagatgctgagttctgggtaggaactatagttccagttctgacctggaactattcctaatcttctccatacctcagt

SEQ ID NO: 267067 - DNA, 120 bp, Artificial Sequence
  ENSG00000126550_19 (sequence is synthesized)
tttctaatcgacaaatacatattataatactacttaagctttttatagagttggaaagactattgagagacattatatagaagcccttgttctggaaggtgtatggttgtggccataggc

SEQ ID NO: 267068 - DNA, 120 bp, Artificial Sequence
  ENSG00000126550_20 (sequence is synthesized)
ttctctgccactaacactgtacatggatgttatttgaagttttctgtcctaaaatgaaatctttgaagaagttgcacaaccaccatctgggaactcataaaaaatttacattttatgcct

SEQ ID NO: 267069 - DNA, 120 bp, Artificial Sequence
  ENSG00000126550_21 (sequence is synthesized)
aagcaactctaatgagcaattgctataggaatgactaatataacatcaacaaggagatgggaattttcaaggaaatagaaaatggtaacaatttccttttcataaagtcagttttattta

SEQ ID NO: 267070 - DNA, 120 bp, Artificial Sequence
  ENSG00000126550_22 (sequence is synthesized)
tctatattcacagcataaaatgttccaaaatctatgagatactaaagattacatttcaaaataaagcaatattttggagataacagagtactgttctacaattcaaagctgaaatagttc

SEQ ID NO: 267071 - DNA, 120 bp, Artificial Sequence
  ENSG00000126550_23 (sequence is synthesized)
aaaaggtgtcaaatattttttaatgtattgggacattttattcatattgaattcctgctctttgtgatatcagaaaaagcctgatctttatcctccaggtgttagataattgctgatgac

SEQ ID NO: 267072 - DNA, 120 bp, Artificial Sequence
  ENSG00000126550_24 (sequence is synthesized)
atttaatcaggggaggatatatttaaaatattatttgggggagatagatgaaatgtgtaggctatatttaagtggaagaataaagtaagatgatgatggaaaacctcaagaaaaatttaa

SEQ ID NO: 267073 - DNA, 120 bp, Artificial Sequence
  ENSG00000126550_25 (sequence is synthesized)
atttaattgcaaatgctgaatgataatttttatttattctgatacccacttaatgagtatttaattgtctactctatatcaaatagtattttggtccctgcattataataaataaaacta

SEQ ID NO: 267074 - DNA, 120 bp, Artificial Sequence
  ENSG00000126550_26 (sequence is synthesized)
tctataaatacatactttctgccagcaagagtataaatttatttataggagtatccattttgaagataaagtgttattttctttttcttcacaggtttgactggcaaattcactttttac

SEQ ID NO: 267075 - DNA, 120 bp, Artificial Sequence
  ENSG00000126550_27 (sequence is synthesized)
ttagcgctgattcacatgaaaaggtaagacattttcatttacgggaaaacttgataaataaacatatattgaatttttaatcttttctttttatttcatagagacatcatgggtatagaa

SEQ ID NO: 267076 - DNA, 120 bp, Artificial Sequence
  ENSG00000126561_0 (sequence is synthesized)
agacaggatattcactgctgtggcaaggcctgtagagagtttcgaagttaggaggactcaagacggtccctccctggacttttctgaaggggctcaaaagatgacacgcgccagagctgg

SEQ ID NO: 267077 - DNA, 120 bp, Artificial Sequence
  ENSG00000126561_1 (sequence is synthesized)
aaggcgtcgccaattggtccacttttccctcctccctttttgcggatgagaaaactgaggcccaggtttgggatttccagagcccgggatttcccggcaacgcccgacaaccacattccc

SEQ ID NO: 267078 - DNA, 120 bp, Artificial Sequence
  ENSG00000126561_2 (sequence is synthesized)
cgacaaccacattcccccggctattctgacccgccccggttccgggacgctccctgggagccgccgccgagggcctgctgggactcccgggggaccccgccgtcggggcagcccccacgc

SEQ ID NO: 267079 - DNA, 120 bp, Artificial Sequence
  ENSG00000126561_3 (sequence is synthesized)
ggaacggccgccgctgttgcgcacttgcaggggagccggcgactgagggcgaggcagggagggagcaagcggggctgggagggctgctggcgcgggctcgcgcgctgtgtatggtctatc

SEQ ID NO: 267080 - DNA, 120 bp, Artificial Sequence
  ENSG00000126561_4 (sequence is synthesized)
gcaggcagctgacctttgaggaggaaatcgctgctctccgctccttcctgtagtaacagccgccgctgccgccgccgccaggaaccccggccgggagcgagagccgcggggcgcagagcc

SEQ ID NO: 267081 - DNA, 120 bp, Artificial Sequence
  ENSG00000126561_5 (sequence is synthesized)
ggcccggctgccggacggtgcggccccaccaggtgaacggccatggcgggctggatccaggcccagcagctgcagggagacgcgctgcgccagatgcaggtgctgtacggccagcacttc

SEQ ID NO: 267082 - DNA, 120 bp, Artificial Sequence
  ENSG00000126561_6 (sequence is synthesized)
cccatcgaggtccggcactacttggcccagtggattgagagccagccatgggatgccattgacttggacaatccccaggacagagcccaagccacccagctcctggagggcctggtgcag

SEQ ID NO: 267083 - DNA, 120 bp, Artificial Sequence
  ENSG00000126561_7 (sequence is synthesized)
gagctgcagaagaaggcggagcaccaggtgggggaagatgggtttttactgaagatcaagctggggcactacgccacgcagctccagaaaacatatgaccgctgccccctggagctggtc

SEQ ID NO: 267084 - DNA, 120 bp, Artificial Sequence
  ENSG00000126561_8 (sequence is synthesized)
cgctgcatccggcacattctgtacaatgaacagaggctggtccgagaagccaacaattgcagctctccggctgggatcctggttgacgccatgtcccagaagcaccttcagatcaaccag

SEQ ID NO: 267085 - DNA, 120 bp, Artificial Sequence
  ENSG00000126561_9 (sequence is synthesized)
acatttgaggagctgcgactggtcacgcaggacacagagaatgagctgaagaaactgcagcagactcaggagtacttcatcatccagtaccaggagagcctgaggatccaagctcagttt

SEQ ID NO: 267086 - DNA, 120 bp, Artificial Sequence
  ENSG00000126561_10 (sequence is synthesized)
gcccagctggcccagctgagcccccaggagcgtctgagccgggagacggccctccagcagaagcaggtgtctctggaggcctggttgcagcgtgaggcacagacactgcagcagtaccgc

SEQ ID NO: 267087 - DNA, 120 bp, Artificial Sequence
  ENSG00000126561_11 (sequence is synthesized)
gtggagctggccgagaagcaccagaagaccctgcagctgctgcggaagcagcagaccatcatcctggatgacgagctgatccagtggaagcggcggcagcagctggccgggaacggcggg

SEQ ID NO: 267088 - DNA, 120 bp, Artificial Sequence
  ENSG00000126561_12 (sequence is synthesized)
ccccccgagggcagcctggacgtgctacagtcctggtgtgagaagttggccgagatcatctggcagaaccggcagcagatccgcagggctgagcacctctgccagcagctgcccatcccc

SEQ ID NO: 267089 - DNA, 120 bp, Artificial Sequence
  ENSG00000126561_13 (sequence is synthesized)
ggcccagtggaggagatgctggccgaggtcaacgccaccatcacggacattatctcagccctggtgaccagcacattcatcattgagaagcagcctcctcaggtcctgaagacccagacc

SEQ ID NO: 267090 - DNA, 120 bp, Artificial Sequence
  ENSG00000126561_14 (sequence is synthesized)
aagtttgcagccaccgtacgcctgctggtgggcgggaagctgaacgtgcacatgaatcccccccaggtgaaggccaccatcatcagtgagcagcaggccaagtctctgcttaaaaatgag

SEQ ID NO: 267091 - DNA, 120 bp, Artificial Sequence
  ENSG00000126561_15 (sequence is synthesized)
aacacccgcaacgagtgcagtggtgagatcctgaacaactgctgcgtgatggagtaccaccaagccacgggcaccctcagtgcccacttcaggaacatgtcactgaagaggatcaagcgt

SEQ ID NO: 267092 - DNA, 120 bp, Artificial Sequence
  ENSG00000126561_16 (sequence is synthesized)
gctgaccggcggggtgcagagtccgtgacagaggagaagttcacagtcctgtttgagtctcagttcagtgttggcagcaatgagcttgtgttccaggtgaagactctgtccctacctgtg

SEQ ID NO: 267093 - DNA, 120 bp, Artificial Sequence
  ENSG00000126561_17 (sequence is synthesized)
caaagtgctgtggccgcagctgtgtgaggcgctcaacatgaaattcaaggccgaagtgcagagcaaccggggcctgaccaaggagaacctcgtgttcctggcgcagaaactgttcaacaa

SEQ ID NO: 267094 - DNA, 120 bp, Artificial Sequence
  ENSG00000126561_18 (sequence is synthesized)
cagcagcagccacctggaggactacagtggcctgtccgtgtcctggtcccagttcaacagggagaacttgccgggctggaactacaccttctggcagtggtttgacggggtgatggaggt

SEQ ID NO: 267095 - DNA, 120 bp, Artificial Sequence
  ENSG00000126561_19 (sequence is synthesized)
gttgaagaagcaccacaagccccactggaatgatggggccatcctaggttttgtgaataagcaacaggcccacgacctgctcatcaacaagcccgacgggaccttcttgttgcgctttag

SEQ ID NO: 267096 - DNA, 120 bp, Artificial Sequence
  ENSG00000126561_20 (sequence is synthesized)
tgactcagaaatcgggggcatcaccatcgcctggaagtttgactccccggaacgcaacctgtggaacctgaaaccattcaccacgcgggatttctccatcaggtccctggctgaccggct

SEQ ID NO: 267097 - DNA, 120 bp, Artificial Sequence
  ENSG00000126561_21 (sequence is synthesized)
gggggacctgagctatctcatctatgtgtttcctgaccgccccaaggatgaggtcttctccaagtactacactcctgtgctggctaaagctgttgatggatatgtgaaaccacagatcaa

SEQ ID NO: 267098 - DNA, 120 bp, Artificial Sequence
  ENSG00000126561_22 (sequence is synthesized)
gcaagtggtccctgagtttgtgaatgcatctgcagatgctgggggcagcagcgccacgtacatggaccaggccccctccccagctgtgtgcccccaggctccctataacatgtacccaca

SEQ ID NO: 267099 - DNA, 120 bp, Artificial Sequence
  ENSG00000126561_23 (sequence is synthesized)
gaaccctgaccatgtactcgatcaggatggagaattcgacctggatgagaccatggatgtggccaggcacgtggaggaactcttacgccgaccaatggacagtcttgactcccgcctctc

SEQ ID NO: 267100 - DNA, 120 bp, Artificial Sequence
  ENSG00000126561_24 (sequence is synthesized)
gccccctgccggtcttttcacctctgccagaggctccctctcatgaatgtttgaatcccacgcttctctttggaaacaatatgcaatgtgaagcggtcgtgttgtgagtttagtaaggct

SEQ ID NO: 267101 - DNA, 120 bp, Artificial Sequence
  ENSG00000126561_25 (sequence is synthesized)
gtgtacactgacacctttgcaggcatgcatgtgcttgtgtgtgtgtgtgtgtgtgtgtccttgtgcatgagctacgcctgcctcccctgtgcagtcctgggatgtggctgcagcagcggt

SEQ ID NO: 267102 - DNA, 120 bp, Artificial Sequence
  ENSG00000126561_26 (sequence is synthesized)
ggcctcttttcagatcatggcatccaagagtgcgccgagtctgtctctgtcatggtagagaccgagcctctgtcactgcaggcactcaatgcagccagacctattcctcctgggcccctc

SEQ ID NO: 267103 - DNA, 120 bp, Artificial Sequence
  ENSG00000126561_27 (sequence is synthesized)
atctgctcagcagctatttgaatgagatgattcagaaggggaggggagacaggtaacgtctgtaagctgaagtttcactccggagtgagaagctttgccctcctaagagagagagacaga

SEQ ID NO: 267104 - DNA, 120 bp, Artificial Sequence
  ENSG00000126561_28 (sequence is synthesized)
gagacagagagagagaaagagagagtgtgtgggtctatgtaaatgcatctgtcctcatgtgttgatgtaaccgattcatctctcagaagggaggctggggttcattttcgagtagtattt

SEQ ID NO: 267105 - DNA, 120 bp, Artificial Sequence
  ENSG00000126561_29 (sequence is synthesized)
tatactttagtgaacgtggactccagactctctgtgaaccctatgagagcgcgtctgggcccggccatgtccttagcacaggggggccgccggtttgagtgagggtttctgagctgctct

SEQ ID NO: 267106 - DNA, 120 bp, Artificial Sequence
  ENSG00000126561_30 (sequence is synthesized)
gaattagtccttgcttggctgcttggccttgggcttcattcaagtctatgatgctgttgcccacgtttcccgggatatatattctctcccctccgttgggccccagccttctttgcttgc

SEQ ID NO: 267107 - DNA, 120 bp, Artificial Sequence
  ENSG00000126561_31 (sequence is synthesized)
ctctctgtttgtaaccttgtcgacaaagaggtagaaaagattgggtctaggatatggtgggtggacaggggccccgggacttggagggttggtcctcttgcctcctggaaaaaacaaaaa

SEQ ID NO: 267108 - DNA, 120 bp, Artificial Sequence
  ENSG00000126561_32 (sequence is synthesized)
caaaaaactgcagtgaaagacaagctgcaaatcagccatgtgctgcgtgcctgtggaatctggagtgaggggtaaaagctgatctggtttgactccgctggaggtggggcctggagcagg

SEQ ID NO: 267109 - DNA, 120 bp, Artificial Sequence
  ENSG00000126561_33 (sequence is synthesized)
ccttgcgctgttgcgtaactggctgtgttctggtgaggccttgctcccaaccccacacgctcctccctctgaggctgtaggactcgcagtcaggggcagctgaccatggaagattgagag

SEQ ID NO: 267110 - DNA, 120 bp, Artificial Sequence
  ENSG00000126561_34 (sequence is synthesized)
cccaaggtttaaacttctctgaagggaggtggggatgagaagaggggtttttttgtactttgtacaaagaccacacatttgtgtaaacagtgttttggaataaaatatttttttcataaa

SEQ ID NO: 267111 - DNA, 120 bp, Artificial Sequence
  ENSG00000126561_35 (sequence is synthesized)
agatggccggagtaaaagaaggagggaggtgctgcggtggtgggggtgatcttggcttcactagaatccccagttcttcccctctctacagttttgtctctgaggtcacaaaacctgtgg

SEQ ID NO: 267112 - DNA, 120 bp, Artificial Sequence
  ENSG00000126561_36 (sequence is synthesized)
ccttgttggaggggatgggcggccctccactcctcaccatctctgttcccgcacaggaaagctatctgtgggaggggaggggcctggcctggccgcggtccagggataggtaggcatggc

SEQ ID NO: 267113 - DNA, 120 bp, Artificial Sequence
  ENSG00000126561_37 (sequence is synthesized)
gaagtcagtaacccagaaagacgccaagaaacactcttaggggatacggggcaggggctgctggcagggctgacctgagcgaagaccccagcccgaggtgtggacaggaccatgctcctg

SEQ ID NO: 267114 - DNA, 120 bp, Artificial Sequence
  ENSG00000126561_38 (sequence is synthesized)
atcatcttgttccagcatcagaacccctgggttttttcctggcctggccactgactcaccatgtgaccacgaacttattgggaacttttcttcgatttcccccaccccctctttctaaat

SEQ ID NO: 267115 - DNA, 120 bp, Artificial Sequence
  ENSG00000126561_39 (sequence is synthesized)
gccgccgccaggaaccccggccgggagcgagagccgcggggcgcagagccggcccggctgccggacggtgcggccccaccagaggagagcgcttcagcgctcggctcgccctaggtgaac

SEQ ID NO: 267116 - DNA, 120 bp, Artificial Sequence
  ENSG00000126561_40 (sequence is synthesized)
gcatttgtgtcacctttctggatctgtctcagtctcctctgtctctaggtgtctgtgtatcttgtgtgtgtgtgaatatttccaactccctcaatctaccttttcccctctcttgtctcc

SEQ ID NO: 267117 - DNA, 120 bp, Artificial Sequence
  ENSG00000126561_41 (sequence is synthesized)
aggatccagagctctggttaggcccaagtccaggaggagtgagatcagccaggaaaacagagcattttgaagctagacatagcagggtcaagtcctcactctagtactaactgtgtgatc

SEQ ID NO: 267118 - DNA, 120 bp, Artificial Sequence
  ENSG00000126561_42 (sequence is synthesized)
cttgggctgcgccgtggggacttccccaggaggagcctaggggccatgtcccctgtgggttttggcccatggggtggtggagaggatttcagggctcacaaatgaggagagggaacgaga

SEQ ID NO: 267119 - DNA, 120 bp, Artificial Sequence
  ENSG00000126561_43 (sequence is synthesized)
aacccgtcccagctctcttctctgcaaagtgaaagctgcatggattctcacttctgcaccctcggaggaaggggtggcagcactgtagggagtggccgggatcattcgagcccacagata

SEQ ID NO: 267120 - DNA, 120 bp, Artificial Sequence
  ENSG00000126561_44 (sequence is synthesized)
gtgctccgctccccacctcaccagctgctctccacaccctgctcacaaaccttcccccgagtggagtgcaggcagcaaaagggagaagtctctcttcttccagctgccccaaatccattg

SEQ ID NO: 267121 - DNA, 120 bp, Artificial Sequence
  ENSG00000126562_0 (sequence is synthesized)
ggagcgcagcgcacccagcgagtccgtctgtcaggccgcctcctctccggccgtctgattttctacccttcggcgccctgctcttcctcatgttggcatccccggccacggagaccaccg

SEQ ID NO: 267122 - DNA, 120 bp, Artificial Sequence
  ENSG00000126562_1 (sequence is synthesized)
tcctcatgtcccagactgaggccgacctggccctgcggcccccgcctcctcttggcaccgcggggcagccccgcctcgggccccctcctcgccgagcgcgccgcttctccgggaaggctg

SEQ ID NO: 267123 - DNA, 120 bp, Artificial Sequence
  ENSG00000126562_2 (sequence is synthesized)
agccccggccgcgctcttctcgtctcagccgccgtagctcagtcgacttggggctgctgagctcttggtccctgccagcctcacccgctccggacccccccgatcctccggactccgctg

SEQ ID NO: 267124 - DNA, 120 bp, Artificial Sequence
  ENSG00000126562_3 (sequence is synthesized)
gtcctggccccgcgaggagcccaccgcctagctccaaagaaccccccgagggcacgtggaccgagggagcccctgtgaaggctgcggaagactccgcgcgtcccgagctcccggactctg

SEQ ID NO: 267125 - DNA, 120 bp, Artificial Sequence
  ENSG00000126562_4 (sequence is synthesized)
cagtgggcccggggtccagggagccgctaagggtccctgaagctgtggccctagagcggcggcgggagcaggaagaaaaggaggacatggagacccaggctgtggcaacgtcccccgatg

SEQ ID NO: 267126 - DNA, 120 bp, Artificial Sequence
  ENSG00000126562_5 (sequence is synthesized)
gccgatacctcaagtttgacatcgagattggacgtggctccttcaagacggtgtatcgagggctagacaccgacaccacagtggaggtggcctggtgtgagctgcagactcggaaactgt

SEQ ID NO: 267127 - DNA, 120 bp, Artificial Sequence
  ENSG00000126562_6 (sequence is synthesized)
ctagagctgagcggcagcgcttctcagaggaggtggagatgctcaaggggctgcagcaccccaacatcgtccgcttctatgattcgtggaagtcggtgctgaggggccaggtttgcatcg

SEQ ID NO: 267128 - DNA, 120 bp, Artificial Sequence
  ENSG00000126562_7 (sequence is synthesized)
tgctggtcaccgaactcatgacctcgggcacgctcaagacgtacctgaggcggttccgggagatgaagccgcgggtccttcagcgctggagccgccaaatcctgcggggacttcatttcc

SEQ ID NO: 267129 - DNA, 120 bp, Artificial Sequence
  ENSG00000126562_8 (sequence is synthesized)
tacactcccgggttcctcccatcctgcaccgggatctcaagtgcgacaatgtctttatcacgggacctactggctctgtcaaaatcggggacctgggcctggccacgctcaagcgcgcct

SEQ ID NO: 267130 - DNA, 120 bp, Artificial Sequence
  ENSG00000126562_9 (sequence is synthesized)
cctttgccaagagtgtcatcgggaccccggaattcatggcccccgagatgtacgaggaaaagtacgatgaggccgtggacgtgtacgcgttcggcatgtgcatgctggagatggccacct

SEQ ID NO: 267131 - DNA, 120 bp, Artificial Sequence
  ENSG00000126562_10 (sequence is synthesized)
ctgagtacccgtactccgagtgccagaatgccgcgcaaatctaccgcaaggtcacttcgggcagaaagccgaacagcttccacaaggtgaagatacccgaggtgaaggagatcattgaag

SEQ ID NO: 267132 - DNA, 120 bp, Artificial Sequence
  ENSG00000126562_11 (sequence is synthesized)
gctgcatccgcacggataagaacgagaggttcaccatccaggacctcctggcccacgccttcttccgcgaggagcgcggtgtgcacgtggaactagcggaggaggacgacggcgagaagc

SEQ ID NO: 267133 - DNA, 120 bp, Artificial Sequence
  ENSG00000126562_12 (sequence is synthesized)
cgggcctcaagctctggctgcgcatggaggacgcgcggcgcggggggcgcccacgggacaaccaggccatcgagttcctgttccagctgggccgggacgcggccgaggaggtggcacagg

SEQ ID NO: 267134 - DNA, 120 bp, Artificial Sequence
  ENSG00000126562_13 (sequence is synthesized)
agatggtggctctgggcttggtctgtgaagccgattaccagccagtggcccgtgcagtacgtgaacgggttgctgccatccagcgaaagcgtgagaagctgcgtaaagcaagggaattgg

SEQ ID NO: 267135 - DNA, 120 bp, Artificial Sequence
  ENSG00000126562_14 (sequence is synthesized)
aggcactcccaccagagccaggacctccaccagcaactgtgcccatggcccccggtccccccagtgtcttcccccctgagcctgaggagccagaggcagaccagcaccagcccttccttt

SEQ ID NO: 267136 - DNA, 120 bp, Artificial Sequence
  ENSG00000126562_15 (sequence is synthesized)
tccgccacgccagctactcatctaccacttcggattgcgagactgatggctacctcagctcctccggcttcctggatgcctcagaccctgcccttcagccccctgggggggtgccatcca

SEQ ID NO: 267137 - DNA, 120 bp, Artificial Sequence
  ENSG00000126562_16 (sequence is synthesized)
gcctggctgagtcccatctctgcctgccctcggcttttgccctatccattccacgttctggccctggaagtgacttttcccccggggacagctatgcctcagatgcagcttcaggcctta

SEQ ID NO: 267138 - DNA, 120 bp, Artificial Sequence
  ENSG00000126562_17 (sequence is synthesized)
tgccagctacagacccataacagcaagatggtgaccttccgatttgatctggatggggacagcccggaagagattgcagctgccatggtatataacgagttcattctgccttcggagcga

SEQ ID NO: 267139 - DNA, 120 bp, Artificial Sequence
  ENSG00000126562_18 (sequence is synthesized)
gatggatttctcagacggattcgggagattatccagcgagtggagaccctgttgaagagagacactggccccatggaggctgctgaagacaccctaagcccccaggaggagccagcacca

SEQ ID NO: 267140 - DNA, 120 bp, Artificial Sequence
  ENSG00000126562_19 (sequence is synthesized)
ttacctgccctgcccgtccccctcccagacccatccaatgaagagctccagagcagcacctccctggagcacaggagctggacagccttctccacctcctcatcttctcctggaactcct

SEQ ID NO: 267141 - DNA, 120 bp, Artificial Sequence
  ENSG00000126562_20 (sequence is synthesized)
ttgtctcctggaaacccattttcccctggaacccccatttccccaggtcccatcttccccatcacttctcccccatgtcatcccagcccctccccattctcccccatttcttcccaggtc

SEQ ID NO: 267142 - DNA, 120 bp, Artificial Sequence
  ENSG00000126562_21 (sequence is synthesized)
tcctcaaatccctctccacaccccaccagctctccacttccattctcctccagcacacccgagtttccggtcccactctctcagtgtccctggagttctctccccacgacttctccacct

SEQ ID NO: 267143 - DNA, 120 bp, Artificial Sequence
  ENSG00000126562_22 (sequence is synthesized)
acgttctctcccacttgttctcaggtcactcttagttcccctttctttcctccgtgcccctccacttcttccttcccctccaccacagcagcccctctcctttctctggctagtgccttc

SEQ ID NO: 267144 - DNA, 120 bp, Artificial Sequence
  ENSG00000126562_23 (sequence is synthesized)
tcactggctgtgatgactgtggcccagtccctgctgtccccctcacctgggctcctttcccagtctcctccagcccctcctagtcccctccctagcctgccccttccccctcccgttgct

SEQ ID NO: 267145 - DNA, 120 bp, Artificial Sequence
  ENSG00000126562_24 (sequence is synthesized)
cctggtggccaggaaagcccttcaccccacacagctgaggtggagagtgaggcctcaccacctcctgctcggcccctcccaggggaagccaggctggcgcccatctctgaagagggaaag

SEQ ID NO: 267146 - DNA, 120 bp, Artificial Sequence
  ENSG00000126562_25 (sequence is synthesized)
ccgcagcttgttgggcgtttccaagtgacttcatccaaggaaccggctgagcctcttcccttgcagccaacatcccccactctctctggttctccaaaaccttcaacccctcagctcact

SEQ ID NO: 267147 - DNA, 120 bp, Artificial Sequence
  ENSG00000126562_26 (sequence is synthesized)
tcagagagctcagatacagaggacagtgctggaggcgggccagagaccagggaagctctggctgagagcgaccgtgcagctgagggtctgggggctggagttgaggaggaaggagatgat

SEQ ID NO: 267148 - DNA, 120 bp, Artificial Sequence
  ENSG00000126562_27 (sequence is synthesized)
gggaaggaaccccaagttgggggcagcccccaacccctgagccatcccagcccagtgtggatgaactactcctacagcagcctgtgtttgagcagcgaggagtcagaaagcagtggggaa

SEQ ID NO: 267149 - DNA, 120 bp, Artificial Sequence
  ENSG00000126562_28 (sequence is synthesized)
gatgaggagttctgggctgagctgcagagtcttcggcagaagcacttgtcagaggtggaaacactacagacactacagaaaaaagaaattgaagatttgtacagccggctggggaagcag

SEQ ID NO: 267150 - DNA, 120 bp, Artificial Sequence
  ENSG00000126562_29 (sequence is synthesized)
cccccaccgggtattgtggccccagctgctatgctgtccagccgccagcgccgcctctccaagggcagcttccccacctcccgccgcaacagcctacagcgctctgagcccccaggccct

SEQ ID NO: 267151 - DNA, 120 bp, Artificial Sequence
  ENSG00000126562_30 (sequence is synthesized)
ggcatcatgcgaaggaactctctgagtggcagcagcaccggctcccaggagcagcgggcaagcaagggggtgacattcgccggggatgttggcaggatgtgaattcagaacagaagccat

SEQ ID NO: 267152 - DNA, 120 bp, Artificial Sequence
  ENSG00000126562_31 (sequence is synthesized)
gtatctcccccacaccagggcccaccatggagcttgtgttctcagaatctgatgctttctgatcaacaaaactgagcaaggaagatcccaacactgaaggggtagaaggccaggggggca

SEQ ID NO: 267153 - DNA, 120 bp, Artificial Sequence
  ENSG00000126562_32 (sequence is synthesized)
tggagagtgcagctccattatagtgaagagccaaacatatgtgaactgtttgctgtgtggaggtgttagttctgctgcctaccatcttcatctctagcacctcccctgccaagagtcaac

SEQ ID NO: 267154 - DNA, 120 bp, Artificial Sequence
  ENSG00000126562_33 (sequence is synthesized)
cactaagcaatcccacccaagcctggatgcttctagaggggcccactcccagctgggagagtgtaggggatatgctcacaccacattagcagcaaccaataaaaatgctggaaacaagaa

SEQ ID NO: 267155 - DNA, 120 bp, Artificial Sequence
  ENSG00000126562_34 (sequence is synthesized)
cattcaagatgcaacacaaaagtatttcctctccgaagctctccctcatgcttggggcagttagtcatcccttcctgcgctcccacagcaccttggccgaggccctatctatcaatttac

SEQ ID NO: 267156 - DNA, 120 bp, Artificial Sequence
  ENSG00000126562_35 (sequence is synthesized)
ttcccaacccgtttggtaacgtcatgtctatccaccatgccccctgactcagtttctccctggggccgggcagacataggctaggagaatgctggcagaagatgcggaggcggcagcagg

SEQ ID NO: 267157 - DNA, 120 bp, Artificial Sequence
  ENSG00000126562_36 (sequence is synthesized)
tgagggaaagccgcagcttgttgggcgtttccaagtgacttcatccaaggaaccggctgagcctcttcccttgcagccaacatcccccactctctctggttctccaaaaccttcaacccc

SEQ ID NO: 267158 - DNA, 120 bp, Artificial Sequence
  ENSG00000126562_37 (sequence is synthesized)
atggactctctgctccagggtttattactctctgccctcagcggtccccttggatttaactcctcttcatctctgggaccctaaaacagtggcgcttttttttttttttgagatggagtc

SEQ ID NO: 267159 - DNA, 120 bp, Artificial Sequence
  ENSG00000126562_38 (sequence is synthesized)
aggtgtgagccaccgtgcctggcctaaaacagtggctcttagcccatttgagaatatgatgaaagccatggactcttgttctagaaaacttgttcaatacatacttttcttttaactcat

SEQ ID NO: 267160 - DNA, 120 bp, Artificial Sequence
  ENSG00000126562_39 (sequence is synthesized)
tattttgaaataatttcagacttgtggagagaagttgcaagaattatataaagaaccactggataccctttgcccagatttgccacttgttagtgttttgccaccttagcgtcatcattg

SEQ ID NO: 267161 - DNA, 120 bp, Artificial Sequence
  ENSG00000126562_40 (sequence is synthesized)
tctcttcctctcccctctgtatgtgtgcatacataatatatttttcggaaccacttaagagtaagttgcagacatcatgcccttttacctctatacatttcagcacatatgcttctgaat

SEQ ID NO: 267162 - DNA, 120 bp, Artificial Sequence
  ENSG00000126581_0 (sequence is synthesized)
gctgaagacagagcgatggtagttctggaggcctcgctccggggccgacccgaggccacagtgcctccgcggtagaccggacttgggtgacgggctccgggctcccgaggtgaagagcat

SEQ ID NO: 267163 - DNA, 120 bp, Artificial Sequence
  ENSG00000126581_1 (sequence is synthesized)
cgggggctgagggatggaagggtctaagacgtccaacaacagcaccatgcaggtgagcttcgtgtgccagcgctgcagccagcccctgaaactggacacgagtttcaagatcctggaccg

SEQ ID NO: 267164 - DNA, 120 bp, Artificial Sequence
  ENSG00000126581_2 (sequence is synthesized)
tgtcaccatccaggaactcacagctccattacttaccacagcccaggcgaaaccaggagagacccaggaggaagagactaactcaggagaggagccatttattgaaactcctcgccagga

SEQ ID NO: 267165 - DNA, 120 bp, Artificial Sequence
  ENSG00000126581_3 (sequence is synthesized)
tggtgtctctcgcagattcatccccccagccaggatgatgtccacagaaagtgccaacagcttcactctgattggggaggcatctgatggcggcaccatggagaacctcagccgaagact

SEQ ID NO: 267166 - DNA, 120 bp, Artificial Sequence
  ENSG00000126581_4 (sequence is synthesized)
gaaggtcactggggacctttttgacatcatgtcgggccagacagatgtggatcacccactctgtgaggaatgcacagatactcttttagaccagctggacactcagctcaacgtcactga

SEQ ID NO: 267167 - DNA, 120 bp, Artificial Sequence
  ENSG00000126581_5 (sequence is synthesized)
aaatgagtgtcagaactacaaacgctgtttggagatcttagagcaaatgaatgaggatgacagtgaacagttacagatggagctaaaggagctggcactagaggaggagaggctgatcca

SEQ ID NO: 267168 - DNA, 120 bp, Artificial Sequence
  ENSG00000126581_6 (sequence is synthesized)
ggagctggaagacgtggaaaagaaccgcaagatagtggcagaaaatctcgagaaggtccaggctgaggctgagagactggatcaggaggaagctcagtatcagagagaatacagtgaatt

SEQ ID NO: 267169 - DNA, 120 bp, Artificial Sequence
  ENSG00000126581_7 (sequence is synthesized)
taaacgacagcagctggagctggatgatgagctgaagagtgttgaaaaccagatgcgttatgcccagacgcagctggataagctgaagaaaaccaacgtctttaatgcaaccttccacat

SEQ ID NO: 267170 - DNA, 120 bp, Artificial Sequence
  ENSG00000126581_8 (sequence is synthesized)
gaatgagattaatgctgcttggggccagactgtgttgctgctccatgctctggccaataagatgggtctgaaatttcagagataccgacttgttccttacggaaaccattcatatctgga

SEQ ID NO: 267171 - DNA, 120 bp, Artificial Sequence
  ENSG00000126581_9 (sequence is synthesized)
gtctctgacagacaaatctaaggagctgccgttatactgttctggggggttgcggtttttctgggacaacaagtttgaccatgcaatggtggctttcctggactgtgtgcagcagttcaa

SEQ ID NO: 267172 - DNA, 120 bp, Artificial Sequence
  ENSG00000126581_10 (sequence is synthesized)
agaagaggttgagaaaggcgagacacgtttttgtcttccctacaggatggatgtggagaaaggcaagattgaagacacaggaggcagtggcggctcctattccatcaaaacccagtttaa

SEQ ID NO: 267173 - DNA, 120 bp, Artificial Sequence
  ENSG00000126581_11 (sequence is synthesized)
ctctgaggagcagtggacaaaagctctcaagttcatgctgacgaatcttaagtggggtcttgcttgggtgtcctcacaattttataacaaatgacttttttccttagggggaggtttgcc

SEQ ID NO: 267174 - DNA, 120 bp, Artificial Sequence
  ENSG00000126581_12 (sequence is synthesized)
ttaaaggcttttaattttgttttgtttgcaaacatgttttaaattaaattcgggtaatattaaacagtacatgtttacaataccaaaaaagaaaaaatccacaaaagccactttatttta

SEQ ID NO: 267175 - DNA, 120 bp, Artificial Sequence
  ENSG00000126581_13 (sequence is synthesized)
aaatatcatgtgacagatactttccagagctacaacatgccatctatagttgccagccctggtcagttttgattcttaaccccatggactcctttccctttcttctctgaaaaaaactaa

SEQ ID NO: 267176 - DNA, 120 bp, Artificial Sequence
  ENSG00000126581_14 (sequence is synthesized)
tttaaatttgcttttcttttttttaactgagttgaattgagattgatgtgttttcactggatttttatctctctcaacttcctgcacttaacaatatgaaatagaaacttttgtctttac

SEQ ID NO: 267177 - DNA, 120 bp, Artificial Sequence
  ENSG00000126581_15 (sequence is synthesized)
tgagatgaggatatgtttgagatgcacagttggataatgtgggaaaatgacatctaagctttacctggtcaccatgtgatgtgatcagatgcttgaaatttaacacttttcacttggttc

SEQ ID NO: 267178 - DNA, 120 bp, Artificial Sequence
  ENSG00000126581_16 (sequence is synthesized)
ttatactgaatgccgactctgctctgtgttagagatatgaaatggtgtttgatactgtttgagacattatggagagatttaattatttgtaataaaagatttgctgcagtctgaaaactg

SEQ ID NO: 267179 - DNA, 120 bp, Artificial Sequence
  ENSG00000126581_17 (sequence is synthesized)
tctcgcagattcatccccccagccaggtgcctactacttctcagcccccattccttgccaaaggctagtagaattttaattaaatccaggaatcgagacctggagccaggtgatagagat

SEQ ID NO: 267180 - DNA, 120 bp, Artificial Sequence
  ENSG00000126581_18 (sequence is synthesized)
gcatcatcacctagccttttggccctttcagaaaagatgtattcccttatacctggcccgtcaccttccagtatggattttttcctgtagctgttcacagagtgggaaaggatagtagct

SEQ ID NO: 267181 - DNA, 120 bp, Artificial Sequence
  ENSG00000126581_19 (sequence is synthesized)
ttaatgatgaagtattgaaaaaaattgagggagtgattgaccaatcaccaagagatgggctcttgagaagtttcaaactagcaaatgttgttagatgttcaggtccttagttctcattgc

SEQ ID NO: 267182 - DNA, 120 bp, Artificial Sequence
  ENSG00000126581_20 (sequence is synthesized)
tgcaggtaaagagcttgctggcaaggggtataatattttctaaaatggcctttcctggttctcccttcttttccactgtagacatatgaattttttatgctccctctccctccttagtcc

SEQ ID NO: 267183 - DNA, 120 bp, Artificial Sequence
  ENSG00000126581_21 (sequence is synthesized)
accaaggccaaccttcatgctgagtgtccctgtggaagaccagcatggccttcctttgggagagaggtacccttgggaggtcagtcgggctaggagtgggtatgttccttgaggcccctc

SEQ ID NO: 267184 - DNA, 120 bp, Artificial Sequence
  ENSG00000126581_22 (sequence is synthesized)
agctggtgcttgagagtctctgccactggcattgtagtaggtggaggaagcctctctgttccctcatgtggcccgtgggcggggggctgtctgcaggatgatgtccacagaaagtgccaa

SEQ ID NO: 267185 - DNA, 120 bp, Artificial Sequence
  ENSG00000126581_23 (sequence is synthesized)
tgatataatttgtatctccaacctggtactgctgtccaccatgtcaggagcccttgctgcccacagactgggagttttctgtggctgaagagctgtcagcatctgattttcccctcatca

SEQ ID NO: 267186 - DNA, 120 bp, Artificial Sequence
  ENSG00000126581_24 (sequence is synthesized)
cagggctctctccactgatcacacagtcactgagttgcgtgactatagcatagttcccagcctacagtccccagagccttagtgttcctcaggatattttcagtttttgtttcttaaatt

SEQ ID NO: 267187 - DNA, 120 bp, Artificial Sequence
  ENSG00000126581_25 (sequence is synthesized)
taaaccaaaacataacatttgttcatggaaggcccccaggcaattatataataaatgtagtttgttcattaaacaaaatcttttaaacatggattcaatggggaggtgggagagggagtt

SEQ ID NO: 267188 - DNA, 120 bp, Artificial Sequence
  ENSG00000126581_26 (sequence is synthesized)
gagcataataaaagaagcccttggccagaatgaagagtgaaatcattgggttgtaacttcccaataatcactttgggaggagtcctgtatccatctctgtttgtatctctattttagata

SEQ ID NO: 267189 - DNA, 120 bp, Artificial Sequence
  ENSG00000126581_27 (sequence is synthesized)
gtgaagctccattttcactggaatacagagttcttatatctcttaagaaaatggatggtttgctttgatattggcattcaatttattttttagacctagatatgaagagccagtatattg

SEQ ID NO: 267190 - DNA, 120 bp, Artificial Sequence
  ENSG00000126581_28 (sequence is synthesized)
ttcaatatcttgtctagttcaggtttagttttgggggtcttgtagacagaaatcaggttttgacagtctgttgagaagggatatgggcaggtcagaagagggtgtgtgcactaggctagg

SEQ ID NO: 267191 - DNA, 120 bp, Artificial Sequence
  ENSG00000126581_29 (sequence is synthesized)
aaaagaatcaccgtgagatagatgtttacaggttgagtatcaccagaagtgttttagattttggattttttttttcagattttgggatattggcatatagatactaagatatcttgggaa

SEQ ID NO: 267192 - DNA, 78 bp, Artificial Sequence
  ENSG00000126581_30 (sequence is synthesized)
tcaggtatggaattttccccttgtggcatcatatcaatggtcaaaaagtttcaggttttgtagcattttttattattt

SEQ ID NO: 267193 - DNA, 74 bp, Artificial Sequence
  ENSG00000126581_31 (sequence is synthesized)
tatcaggtatggaattttccccttgtggcatcatatcaatggtcaaaaagtttcaggttttgtagcatttttta

SEQ ID NO: 267194 - DNA, 79 bp, Artificial Sequence
  ENSG00000126581_32 (sequence is synthesized)
gtgcagtggcgtgatctcggctcattgcaggctctgcctcccaggttcacgcagttctcctgcctcagcctcctcctgg

SEQ ID NO: 267195 - DNA, 85 bp, Artificial Sequence
  ENSG00000126581_33 (sequence is synthesized)
tctatttatttatttttcttttcccatgtactcttcctggaaaggttttgtagcaatttggatttttggattaaggatgctcaac

SEQ ID NO: 267196 - DNA, 120 bp, Artificial Sequence
  ENSG00000126581_34 (sequence is synthesized)
ttttgtagcaatttggatttttggattaaggatgctcaacctatggtacattttcattgatagtgaaacagttctaagtgcattgttacttgcccaagcttattgtagttgttcaaatct

SEQ ID NO: 267197 - DNA, 120 bp, Artificial Sequence
  ENSG00000126581_35 (sequence is synthesized)
atggaagatagagtccagctacaatacaagtttccagtgggatacagacagaacatgacttgagagattgataggattgggaacaatctctggaagcctttcttggtgccagatccatag

SEQ ID NO: 267198 - DNA, 120 bp, Artificial Sequence
  ENSG00000126581_36 (sequence is synthesized)
gccctctcccctatcctcctcatgtagtaaacattccaaatgagagatatgatatgaaaacaggaatgcaggcttggtttctgcaggctacttggcgcttctagagctcccggacttttg

SEQ ID NO: 267199 - DNA, 120 bp, Artificial Sequence
  ENSG00000126581_37 (sequence is synthesized)
ggatctctgggtaatgagacattctacatgatcaggctgctatgcaccattggaggtacagatctgcacctgaggtcacagggttactgaattagtcattttaaaatgttggaaagggct

SEQ ID NO: 267200 - DNA, 120 bp, Artificial Sequence
  ENSG00000126581_38 (sequence is synthesized)
atggctttggacgctcccagcggggttcacactgccggggtcaagtgtcgggtaggggtaaagtaaaaaggagagctgtggggaatggtgcgctgagaactgagcctccgagagactcgg

SEQ ID NO: 267201 - DNA, 120 bp, Artificial Sequence
  ENSG00000126581_39 (sequence is synthesized)
aaacggtgcggccctctctgttgtcccggaactcgccttcaccgaagggaccttctcagccgctgcactcccggggacaacgccgtcgcgccccagtaccctctgtgctcttgctgttcc

SEQ ID NO: 267202 - DNA, 120 bp, Artificial Sequence
  ENSG00000126581_40 (sequence is synthesized)
agagtgttgaaaaccagatgcgttatgcccagacgcagctggataagctgaagaaaaccaacgtctttaatgcaaccttccacatctgtgatgggataggcacagtagggattggaattc

SEQ ID NO: 267203 - DNA, 120 bp, Artificial Sequence
  ENSG00000126581_41 (sequence is synthesized)
tcatcagtaggaatctaaaggaaaagaatagtagcattgaatttggagaaaagtggaaagatccaagatatttagcaggtagaatcaggagaggttggcagttttgcacggaaggagctg

SEQ ID NO: 267204 - DNA, 120 bp, Artificial Sequence
  ENSG00000126581_42 (sequence is synthesized)
agggagcattcaaggataccacccaggtttctgctttggcatctgagcagcagggaaaaagatgatgactcaagttttggacatgtatttaaagtgccaagtacagcttgcatatatgga

SEQ ID NO: 267205 - DNA, 120 bp, Artificial Sequence
  ENSG00000126581_43 (sequence is synthesized)
tggtaatgagagctaggggatgaggagcactgcacatatctagaccttagctgttgaccactaagcctgggtgcccacttcccacaaaagagggactgtaggttatcttcacccaactag

SEQ ID NO: 267206 - DNA, 120 bp, Artificial Sequence
  ENSG00000126581_44 (sequence is synthesized)
gtttctttcattcatagtgatgggataggcacagtagggattggaattctagagcttggtgacatccgcccttctaaagaaaggaaaaggcctgagcccttcagccacttaaaaacctgg

SEQ ID NO: 267207 - DNA, 120 bp, Artificial Sequence
  ENSG00000126581_45 (sequence is synthesized)
gtgtgtccaggtcgttctagagcattgatttgcatctgttgttctagctagttgttaatatccactcctttccattctcaaaagcatcctggttaggacagtgaattgtatgattgccct

SEQ ID NO: 267208 - DNA, 120 bp, Artificial Sequence
  ENSG00000126583_0 (sequence is synthesized)
acatttcagcaggtgccggagctggagctcccaccgccgccgcccgtgcctccggctgccggcgcccctgcctttggctcttcctccccactcgcccgctccccctggcggagccggcgc

SEQ ID NO: 267209 - DNA, 120 bp, Artificial Sequence
  ENSG00000126583_1 (sequence is synthesized)
gcccggggtgccgctccctgcctggcgcgctccgcacctggaggtgccttgcccctctcctgcccacctcggaatttccctgtggctcctttgatccttcgagtctccagctcctctccc

SEQ ID NO: 267210 - DNA, 120 bp, Artificial Sequence
  ENSG00000126583_2 (sequence is synthesized)
ttccacctgtttcccccaagaaaggcaggatcctggtccctgctacgtttctggggccatggctggtctgggccccggcgtaggcgattcagaggggggaccccggcccctgttttgcag

SEQ ID NO: 267211 - DNA, 120 bp, Artificial Sequence
  ENSG00000126583_3 (sequence is synthesized)
aaagggggccctgaggcagaaggtggtccacgaagtcaagagccacaagttcaccgctcgcttcttcaagcagcccaccttctgcagccactgcaccgacttcatctggggtatcggaaa

SEQ ID NO: 267212 - DNA, 120 bp, Artificial Sequence
  ENSG00000126583_4 (sequence is synthesized)
gcagggcctgcaatgtcaagtctgcagctttgtggttcatcgacgatgccacgaatttgtgaccttcgagtgtccaggcgctgggaagggcccccagacggacgacccccggaacaaaca

SEQ ID NO: 267213 - DNA, 120 bp, Artificial Sequence
  ENSG00000126583_5 (sequence is synthesized)
caagttccgcctgcatagctacagcagccccaccttctgcgaccactgtggctccctcctctacgggcttgtgcaccagggcatgaaatgctcctgctgcgagatgaacgtgcaccggcg

SEQ ID NO: 267214 - DNA, 120 bp, Artificial Sequence
  ENSG00000126583_6 (sequence is synthesized)
ctgtgtgcgtagcgtgccctccctgtgcggtgtggaccacaccgagcgccgcgggcgcctgcagctggagatccgggctcccacagcagatgagatccacgtaactgttggcgaggcccg

SEQ ID NO: 267215 - DNA, 120 bp, Artificial Sequence
  ENSG00000126583_7 (sequence is synthesized)
taacctaattcctatggaccccaatggtctctctgatccctatgtgaaactgaagctcatcccagaccctcggaacctgacgaaacagaagacccgaacggtgaaagccacgctaaaccc

SEQ ID NO: 267216 - DNA, 120 bp, Artificial Sequence
  ENSG00000126583_8 (sequence is synthesized)
tgtgtggaatgagacctttgtgttcaacctgaagccaggggatgtggagcgccggctcagcgtggaggtgtgggactgggaccggacctcccgcaacgacttcatgggggccatgtcctt

SEQ ID NO: 267217 - DNA, 120 bp, Artificial Sequence
  ENSG00000126583_9 (sequence is synthesized)
tggcgtctcggagctgctcaaggcgcccgtggatggctggtacaagttactgaaccaggaggagggcgagtattacaatgtgccggtggccgatgctgacaactgcagcctcctccagaa

SEQ ID NO: 267218 - DNA, 120 bp, Artificial Sequence
  ENSG00000126583_10 (sequence is synthesized)
gtttgaggcttgtaactaccccctggaattgtatgagcgggtgcggatgggcccctcttcctctcccatcccctccccttcccctagtcccaccgaccccaagcgctgcttcttcggggc

SEQ ID NO: 267219 - DNA, 120 bp, Artificial Sequence
  ENSG00000126583_11 (sequence is synthesized)
gagtccaggacgcctgcacatctccgacttcagcttcctcatggttctaggaaaaggcagttttgggaaggtgatgctggccgagcgcaggggctctgatgagctctacgccatcaagat

SEQ ID NO: 267220 - DNA, 120 bp, Artificial Sequence
  ENSG00000126583_12 (sequence is synthesized)
cttgaaaaaggacgtgatcgtccaggacgacgatgtggactgcacgctggtggagaaacgtgtgctggcgctggggggccggggtcctggcggccggccccacttcctcacccagctcca

SEQ ID NO: 267221 - DNA, 120 bp, Artificial Sequence
  ENSG00000126583_13 (sequence is synthesized)
atttcgtgatggagtacgtcaccgggggagacttgatgtaccacattcaacagctgggcaagtttaaggagccccatgcagcgttctacgcggcagaaatcgctatcggcctcttcttcc

SEQ ID NO: 267222 - DNA, 120 bp, Artificial Sequence
  ENSG00000126583_14 (sequence is synthesized)
ttcacaatcagggcatcatctacagggacctgaagctggacaatgtgatgctggatgctgagggacacatcaagatcactgactttggcatgtgtaaggagaacgtcttccccgggacga

SEQ ID NO: 267223 - DNA, 120 bp, Artificial Sequence
  ENSG00000126583_15 (sequence is synthesized)
caacccgcaccttctgcgggaccccggactacatagccccggagatcattgcctaccagccctatgggaagtctgtcgattggtggtcctttggagttctgctgtatgagatgttggcag

SEQ ID NO: 267224 - DNA, 120 bp, Artificial Sequence
  ENSG00000126583_16 (sequence is synthesized)
gacagcctcccttcgatggggaggacgaggaggagctgtttcaggccatcatggaacaaactgtcacctaccccaagtcgctttcccgggaagccgtggccatctgcaaggggttcctga

SEQ ID NO: 267225 - DNA, 120 bp, Artificial Sequence
  ENSG00000126583_17 (sequence is synthesized)
ccaagcacccagggaagcgcctgggctcagggcctgatggggaacctaccatccgtgcacatggctttttccgctggattgactgggagcggctggaacgattggagatcccgcctcctt

SEQ ID NO: 267226 - DNA, 120 bp, Artificial Sequence
  ENSG00000126583_18 (sequence is synthesized)
tcagaccccgcccgtgtggccgcagcggcgagaactttgacaagttcttcacgcgggcggcgccagcgctgacccctccagaccgcctagtcctggccagcatcgaccaggccgatttcc

SEQ ID NO: 267227 - DNA, 120 bp, Artificial Sequence
  ENSG00000126583_19 (sequence is synthesized)
agggcttcacctacgtgaaccccgacttcgtgcacccggatgcccgcagccccaccagcccagtgcctgtgcccgtcatgtaatctcacccgccgccactaggtgtccccaacgtcccct

SEQ ID NO: 267228 - DNA, 120 bp, Artificial Sequence
  ENSG00000126583_20 (sequence is synthesized)
ccgccgtgccggcggcagccccacttcacccccaacttcaccaccccctgtcccattctagatcctgcaccccagcattccagctctgcccccgcgggttctagacgcccctcccaagcg

SEQ ID NO: 267229 - DNA, 120 bp, Artificial Sequence
  ENSG00000126583_21 (sequence is synthesized)
ttcctggccttctgaactccatacagcctctacagccgtcccgcgttcaagacttgagcggagcccgatattctccctgaccttagcgttctggactctgccccaatcgggtccagagac

SEQ ID NO: 267230 - DNA, 120 bp, Artificial Sequence
  ENSG00000126583_22 (sequence is synthesized)
cacaccactaaccatccccaactccatggggttcgagactccatcttggtagttctgtgcctccccccagaccccgcccctggggaaatagcctcacggggttggctgttccagactcag

SEQ ID NO: 267231 - DNA, 120 bp, Artificial Sequence
  ENSG00000126583_23 (sequence is synthesized)
gttccagaacagccctcggcctccgaggctccccgcctccactctagttctagatgagtgggaggcgtgcccccctcctccagtacgtcccgctgctgtgctctggggatttctgggata

SEQ ID NO: 267232 - DNA, 120 bp, Artificial Sequence
  ENSG00000126583_24 (sequence is synthesized)
tatggaggattctttccccagaggctcccaatcagcttttgttctagacttccccatcccgaagccatcacttctccccgcagcccgcctgccgtgcatggctcctgtctggctcggacc

SEQ ID NO: 267233 - DNA, 120 bp, Artificial Sequence
  ENSG00000126583_25 (sequence is synthesized)
caccccaactctccccagtgcctgccactctctgggactctcctcctcccctcctcttcccttagcctctcccacccggccacagctgctggagaataaatttgggatgctgatgctgaa

SEQ ID NO: 267234 - DNA, 120 bp, Artificial Sequence
  ENSG00000126583_26 (sequence is synthesized)
attcctaggtcggtttcggggccatccccgccgcctatccttcgccctaggtcacctggaggtggctggaaggccagtggactccacatttagggagagtggttacaagaggactcggat

SEQ ID NO: 267235 - DNA, 120 bp, Artificial Sequence
  ENSG00000126602_0 (sequence is synthesized)
gctctgggagtacgacatggcgcgcgagctgcgggcgctgctgctgtggggccgccgcctgcggcctttgctgcgggcgccggcgctggcggccgtgccgggaggaaaaccaattctgtg

SEQ ID NO: 267236 - DNA, 120 bp, Artificial Sequence
  ENSG00000126602_1 (sequence is synthesized)
tcctcggaggaccacagcccagttgggccccaggcgaaacccagcctggagcttgcaggcaggacgactgttcagcacgcagaccgccgaggacaaggaggaacccctgcactcgattat

SEQ ID NO: 267237 - DNA, 120 bp, Artificial Sequence
  ENSG00000126602_2 (sequence is synthesized)
cagcagcacagagagcgtgcagggttccacttccaaacatgagttccaggccgagacaaagaagcttttggacattgttgcccggtccctgtactcagaaaaagaggtgtttatacggga

SEQ ID NO: 267238 - DNA, 120 bp, Artificial Sequence
  ENSG00000126602_3 (sequence is synthesized)
gctgatctccaatgccagcgatgccttggaaaaactgcgtcacaaactggtgtctgacggccaagcactgccagaaatggagattcacttgcagaccaatgccgagaaaggcaccatcac

SEQ ID NO: 267239 - DNA, 120 bp, Artificial Sequence
  ENSG00000126602_4 (sequence is synthesized)
catccaggatactggtatcgggatgacacaggaagagctggtgtccaacctggggacgattgccagatcggggtcaaaggccttcctggatgctctgcagaaccaggctgaggccagcag

SEQ ID NO: 267240 - DNA, 120 bp, Artificial Sequence
  ENSG00000126602_5 (sequence is synthesized)
caagatcatcggccagtttggagtgggtttctactcagctttcatggtggctgacagagtggaggtctattcccgctcggcagccccggggagcctgggttaccagtggctttcagatgg

SEQ ID NO: 267241 - DNA, 120 bp, Artificial Sequence
  ENSG00000126602_6 (sequence is synthesized)
ttctggagtgtttgaaatcgccgaagcttcgggagttagaaccgggacaaaaatcatcatccacctgaaatccgactgcaaggagttttccagcgaggcccgggtgcgagatgtggtaac

SEQ ID NO: 267242 - DNA, 120 bp, Artificial Sequence
  ENSG00000126602_7 (sequence is synthesized)
gaagtacagcaacttcgtcagcttccccttgtacttgaatggaaggcggatgaacaccttgcaggccatctggatgatggaccccaaggatgtccgtgagtggcaacatgaggagttcta

SEQ ID NO: 267243 - DNA, 120 bp, Artificial Sequence
  ENSG00000126602_8 (sequence is synthesized)
ccgctacgtcgcgcaggctcacgacaagccccgctacaccctgcactataagacggacgcaccgctcaacatccgcagcatcttctacgtgcccgacatgaaaccgtccatgtttgatgt

SEQ ID NO: 267244 - DNA, 120 bp, Artificial Sequence
  ENSG00000126602_9 (sequence is synthesized)
cacggacatcctgcccaagtggctgcgcttcatccgaggtgtggtggacagtgaggacattcccctgaacctcagccgggagctgctgcaggagagcgcactcatcaggaaactccggga

SEQ ID NO: 267245 - DNA, 120 bp, Artificial Sequence
  ENSG00000126602_10 (sequence is synthesized)
cgttttacagcagaggctgatcaaattcttcattgaccagagtaaaaaagatgctgagaagtatgcaaagttttttgaagattacggcctgttcatgcgggagggcattgtgaccgccac

SEQ ID NO: 267246 - DNA, 120 bp, Artificial Sequence
  ENSG00000126602_11 (sequence is synthesized)
cgagcaggaggtcaaggaggacatagcaaagctgctgcgctacgagtcctcggcgctgccctccgggcagctaaccagcctctcagaatacgccagccgcatgcgggccggcacccgcaa

SEQ ID NO: 267247 - DNA, 120 bp, Artificial Sequence
  ENSG00000126602_12 (sequence is synthesized)
catctactacctgtgcgcccccaaccgtcacctggcagagcactcaccctactatgaggccatgaagaagaaagacacagaggttctcttctgctttgagcagtttgatgagctcaccct

SEQ ID NO: 267248 - DNA, 120 bp, Artificial Sequence
  ENSG00000126602_13 (sequence is synthesized)
gctgcaccttcgtgagtttgacaagaagaagctgatctctgtggagacggacatagtcgtggatcactacaaggaggagaagtttgaggacaggtccccagccgccgagtgcctatcaga

SEQ ID NO: 267249 - DNA, 120 bp, Artificial Sequence
  ENSG00000126602_14 (sequence is synthesized)
gaaggagacggaggagctcatggcctggatgagaaatgtgctggggtcgcgtgtcaccaacgtgaaggtgaccctccgactggacacccaccctgccatggtcaccgtgctggagatggg

SEQ ID NO: 267250 - DNA, 120 bp, Artificial Sequence
  ENSG00000126602_15 (sequence is synthesized)
ggctgcccgccacttcctgcgcatgcagcagctggccaagacccaggaggagcgcgcacagctcctgcagcccacgctggagatcaaccccaggcacgcgctcatcaagaagctgaatca

SEQ ID NO: 267251 - DNA, 120 bp, Artificial Sequence
  ENSG00000126602_16 (sequence is synthesized)
gctgcgcgcaagcgagcctggcctggctcagctgctggtggatcagatatacgagaacgccatgattgctgctggacttgttgacgaccctagggccatggtgggccgcttgaatgagct

SEQ ID NO: 267252 - DNA, 120 bp, Artificial Sequence
  ENSG00000126602_17 (sequence is synthesized)
gcttgtcaaggccctggagcgacactgacagccagggggccagaaggactgacaccacagatgacagccccacctccttgagctttatttacctaaatttaaaggtatttcttaacccga

SEQ ID NO: 267253 - DNA, 120 bp, Artificial Sequence
  ENSG00000126602_18 (sequence is synthesized)
cgccgaggacaaggaggaacccctgcactcgattatcagcagcacagagagcgtgcagggccgagtgctgtagtgcaatcatggctcactgaagcctcgacctccctggctcaagtgatc

SEQ ID NO: 267254 - DNA, 120 bp, Artificial Sequence
  ENSG00000126602_19 (sequence is synthesized)
tgggatcactgttgggccttcaaccgtctggagcctctatgtcttcctctgatagattcccagaacaatcatttcaccttctaagaagccatcctgcccctgcagcctgtggcttgtgga

SEQ ID NO: 267255 - DNA, 120 bp, Artificial Sequence
  ENSG00000126602_20 (sequence is synthesized)
gtctccagcactctcacttctccctcgtggatctcttttctgtctgtgtcagtcaatgctgccatgtaacagccacctgcaaactcagtgtatacacatgcatttctctcacactgccag

SEQ ID NO: 267256 - DNA, 120 bp, Artificial Sequence
  ENSG00000126602_21 (sequence is synthesized)
gtctgctggggtggctctgctgcctgggcctcgtcctggggctgggctggagagactgcagctccctgggcaccctcttcccacagtgtggaaggtggaggctcccagggcacaagcaga

SEQ ID NO: 267257 - DNA, 120 bp, Artificial Sequence
  ENSG00000126602_22 (sequence is synthesized)
gtgctcctcagctgcacaggccacattgcaggtgctcggcaggctgtcgcattgcacctggcagaacgttcctgttgttggagaaagttccatcggacaacgtgggccagggcagtgggc

SEQ ID NO: 267258 - DNA, 120 bp, Artificial Sequence
  ENSG00000126602_23 (sequence is synthesized)
gtgtgtattttacttgactttggccttaggacctttggcagtattatagtagaaaaatgaagtgctgtgcggtgcttacagacgcatgcgcgtgatttctactctttttcccacaaagtg

SEQ ID NO: 267259 - DNA, 120 bp, Artificial Sequence
  ENSG00000126602_24 (sequence is synthesized)
tagagtccaggagacttgaatatggaagccagtttggagcctctcctcactcctggccttcctatggaaggagcttattcaagggaaagagcttattcaagctgctctttccccaccccc

SEQ ID NO: 267260 - DNA, 120 bp, Artificial Sequence
  ENSG00000126602_25 (sequence is synthesized)
aggtgtgacccacaggcctccacctgtctgggacaggcaggactgtgagctttgggaatcaaatggaaaacacacttgtcccactgctgccagctggttgtcctagggctaatgtgtcac

SEQ ID NO: 267261 - DNA, 120 bp, Artificial Sequence
  ENSG00000126602_26 (sequence is synthesized)
ctctctgtgacttagctcttcacgtgtagaatggggtggaaaagtactcggtgtggctgttttcaggatgaaggggtcttagcggtgctcgcagaagagccacggtgttgggagtgtctg

SEQ ID NO: 267262 - DNA, 120 bp, Artificial Sequence
  ENSG00000126602_27 (sequence is synthesized)
agtacgacatggcgcgcgagctgcgggcgctgctgctgtggggccgccgcctgcggcctttgctgcgggcgccggcgctggcggccgtgccgggaggctcccgtagggccattgaaatgt

SEQ ID NO: 267263 - DNA, 120 bp, Artificial Sequence
  ENSG00000126602_28 (sequence is synthesized)
agcgctggtccaggggagtccttgagaccccgcctgctacctcgtggtctgggtgaccttcacccctggtaagatcctgccagccctctcacattgggaacctctatcaccctcaacccc

SEQ ID NO: 267264 - DNA, 89 bp, Artificial Sequence
  ENSG00000126602_29 (sequence is synthesized)
caaaaaacccaccctaactgtgacttgacccccacgttacgtcttttgttgtatttctctcgaggttggtctgctgtcctgtgtagcgg

SEQ ID NO: 267265 - DNA, 120 bp, Artificial Sequence
  ENSG00000126602_30 (sequence is synthesized)
tggatggagtcacacggcatgctgtcctcagtgactgacttccccctcgcggctcagctgcggtgcagcgtgggtcgtcatcgctctcacggcccacactgtattcgtcagctcgcccct

SEQ ID NO: 267266 - DNA, 120 bp, Artificial Sequence
  ENSG00000126602_31 (sequence is synthesized)
gctgggcagcgtcatcctctcccacaggccccctcaggtcccggctggtcctcctgacatgttgtcctgaggagctcctgccccagagccttgtgtgtctcccctgcactacccggcata

SEQ ID NO: 267267 - DNA, 120 bp, Artificial Sequence
  ENSG00000126602_32 (sequence is synthesized)
tgggattatagacgtgagccaccacgcctggctccgagggctttttagcaggtgagccgcttccagccagccgaggcgtcctccctccgtgatgccatttctgctccacagtgtgtgcac

SEQ ID NO: 267268 - DNA, 120 bp, Artificial Sequence
  ENSG00000126602_33 (sequence is synthesized)
agagtaaacttaggccaaggcatcaacatggccctgccgggggattcccccctcctgtgcttcggagatggttttctgctcttcttagggggcgcctgtccccctggcctttgtttttgc

SEQ ID NO: 267269 - DNA, 120 bp, Artificial Sequence
  ENSG00000126602_34 (sequence is synthesized)
ccctgggcatctggcacccgatttggagctgggccagtcccccacagtgccccaggcctgcttttgggttctggagtgtttgaaatcgccgaagcttcgggagttagaaccgggacaaaa

SEQ ID NO: 267270 - DNA, 120 bp, Artificial Sequence
  ENSG00000126602_35 (sequence is synthesized)
atttggtcctgtggatttctctttcagcaacagcccgacttagagatgtccacgctagcttctgctagacacccttgatgggacgaattaccatattgtttctcgtgtcttcctaattct

SEQ ID NO: 267271 - DNA, 120 bp, Artificial Sequence
  ENSG00000126602_36 (sequence is synthesized)
aatccttcgtctatgaagtgtccccacatcaaaactgcattagtcgtgctgtcgcctaggctcgagtgcagagatgcaatttcagctcactgaacctctgcctcccaggttcaagcgatt

SEQ ID NO: 267272 - DNA, 120 bp, Artificial Sequence
  ENSG00000126602_37 (sequence is synthesized)
tgcacggtggtggagaagacgtgcgtggtgaacacgacgccctccccgccgatctccgtttccaggccatctggatgatggaccccaaggatgtccgtgagtggcaacatgaggagttct

SEQ ID NO: 267273 - DNA, 120 bp, Artificial Sequence
  ENSG00000126603_0 (sequence is synthesized)
agatgcctcacctctaggggatgctgattctgggatgcctttttcgtctcctaggctcctcaaggccaactgcgctgggaagagggggtgtccaacagcaggagggctgtttttttgaac

SEQ ID NO: 267274 - DNA, 120 bp, Artificial Sequence
  ENSG00000126603_1 (sequence is synthesized)
tacaatttgccagcatacagcagagcagcaagaagataacagggcggggggcacgggattagcccaaacaaaacacactcaagaacgcgagtctgtggttcaacacgaggcagaaaacag

SEQ ID NO: 267275 - DNA, 120 bp, Artificial Sequence
  ENSG00000126603_2 (sequence is synthesized)
ctgggccgggtgcggggcttctccctcgcgtgtatccgctcactgcactcgctgccctggccgcgggcgccgcgcagggtgctgatgtccaggagggatctagacctcccgcggcgctcg

SEQ ID NO: 267276 - DNA, 120 bp, Artificial Sequence
  ENSG00000126603_3 (sequence is synthesized)
ggctagtggacgcaggtggtcccaaatgctgggaccaagctaggaaccaagcggaagctcggattgctcggcatcgggcctcgtcgttattctaccgtgagggaaactgagaccgagggc

SEQ ID NO: 267277 - DNA, 120 bp, Artificial Sequence
  ENSG00000126603_4 (sequence is synthesized)
acggcagggagtcgcccgccgtctcaccagcgtgaggggttgcgccgggccccgaaaactggtttgcgccgcccggcatcgggatccgggacctctgcccgccgggcgctgcctgcgcgt

SEQ ID NO: 267278 - DNA, 120 bp, Artificial Sequence
  ENSG00000126603_5 (sequence is synthesized)
tcctggaactgggctgggcggagaaatcagggcccgcagagaggcattcctgccgccttccccgccgcccggggccgcaggggggcctggccaaggcttccagcacagaggagcttcggg

SEQ ID NO: 267279 - DNA, 120 bp, Artificial Sequence
  ENSG00000126603_6 (sequence is synthesized)
gaggctggattgcgcctgtgtctaaaaataaacaggttcctgcgtgaagaccagctgggagcccactgcctgctgccacctccaactccggccccctcaccatgcactccctggacgagc

SEQ ID NO: 267280 - DNA, 120 bp, Artificial Sequence
  ENSG00000126603_7 (sequence is synthesized)
cgctcgacctgaagctgagtatcaccaagctccgggcggcaagagagaagcgggagaggacgctgggtgtggtccggccccgtgctctgcacagggagctgggcctggtggatgacagcc

SEQ ID NO: 267281 - DNA, 120 bp, Artificial Sequence
  ENSG00000126603_8 (sequence is synthesized)
ccacacctggctctccaggctccccgccctcaggcttcctgctgaactccaagttccccgagaaggtggagggacgcttttcagcagcccctctcgtggacctcagcctgtcaccaccat

SEQ ID NO: 267282 - DNA, 120 bp, Artificial Sequence
  ENSG00000126603_9 (sequence is synthesized)
ctgggctggactcccccaatggcagcagctcgctgtcccccgagcgccagggcaacggggacctgcctccagtgcccagtgcctcggacttccagccactgcgctatttggatggtgtcc

SEQ ID NO: 267283 - DNA, 120 bp, Artificial Sequence
  ENSG00000126603_10 (sequence is synthesized)
ccagctccttccagttcttcctgcccctcggctccgggggggccctgcacctgcctgcctcctccttccttacccctcccaaggacaagtgcctctcgccagacctgcccctgcccaagc

SEQ ID NO: 267284 - DNA, 120 bp, Artificial Sequence
  ENSG00000126603_11 (sequence is synthesized)
agctggtgtgtcgctgggccaagtgtaaccagctctttgagctcctgcaagacctggtggaccatgtcaacgattaccatgtcaagcccgagaaggatgcggggtactgctgccactggg

SEQ ID NO: 267285 - DNA, 120 bp, Artificial Sequence
  ENSG00000126603_12 (sequence is synthesized)
agggctgcgcccgccatggccgaggtttcaacgccaggtacaagatgctcatccacatccgcacacacaccaacgagaagccacaccgctgtccgacctgcagcaagagcttctcccgcc

SEQ ID NO: 267286 - DNA, 120 bp, Artificial Sequence
  ENSG00000126603_13 (sequence is synthesized)
tggagaacctgaagatccacaaccggtcgcacacaggtgagaagccctacgtctgcccctacgagggctgcaacaagcgctattccaactccagtgaccgctttaagcacacgcgcaccc

SEQ ID NO: 267287 - DNA, 120 bp, Artificial Sequence
  ENSG00000126603_14 (sequence is synthesized)
actatgtggacaagccctactactgcaagatgcccggctgccacaagcgctacacggaccccagctcactgcgcaagcacatcaaggcccatggccactttgtgtcccacgagcagcaag

SEQ ID NO: 267288 - DNA, 120 bp, Artificial Sequence
  ENSG00000126603_15 (sequence is synthesized)
agctcctgcagctgcgcccaccccccaagccgccactgcccgcccccgacggcggcccctatgtcagtggggcccagatcatcatccccaacccagctgccctctttggaggccctggcc

SEQ ID NO: 267289 - DNA, 120 bp, Artificial Sequence
  ENSG00000126603_16 (sequence is synthesized)
ttacccctacccctggcccccggcccccttgacctcagtgccctggcctgtggcaacggtgggggcagtgggggtggggggggcatgggccctgggctgccaggccccgtcctgcctctc

SEQ ID NO: 267290 - DNA, 120 bp, Artificial Sequence
  ENSG00000126603_17 (sequence is synthesized)
tgcctctcaatctggccaagaacccgctgctgccctcgccctttggggctggcggactgggcttgcctgtggtctccctccttgctggcgcagctggtggcaaggccgagggggagaagg

SEQ ID NO: 267291 - DNA, 120 bp, Artificial Sequence
  ENSG00000126603_18 (sequence is synthesized)
ggcatggagggccacaagacgccccttgaaaggacggagagcagctgctcccggccaagccccgatggactccccctgctgccaggcaccgtgctggacctgtccacgggcgtcaactca

SEQ ID NO: 267292 - DNA, 120 bp, Artificial Sequence
  ENSG00000126603_19 (sequence is synthesized)
gctgccagcagcccagaggcgttggcccctggctgggtggtcatcccgccgggctcggtgctgctcaaaccggctgtggtgaactgagcccatcctgcggacagttgtggtgcccccccg

SEQ ID NO: 267293 - DNA, 120 bp, Artificial Sequence
  ENSG00000126603_20 (sequence is synthesized)
gcagctcccggcactgcccccgacgaacggaaactcttctgtgaaatagcaataatgtcctactgcccgggcagccccagcccagcccgccgggagcaaggatggtgctaggtcattcat

SEQ ID NO: 267294 - DNA, 120 bp, Artificial Sequence
  ENSG00000126603_21 (sequence is synthesized)
ggctggcctcccagcccccgggtggggacctggcctgtcatgcagggagagctgtgctcctgggtgctgaagcctcgctcctgtctgtcccccaccacctggccctcagcttctgagagg

SEQ ID NO: 267295 - DNA, 120 bp, Artificial Sequence
  ENSG00000126603_22 (sequence is synthesized)
ctttcccctgcccgacctcctcccgtttccctctcccaccctggcacctccctcacctagtgaccacccatggcaagttgccctctcccagcagagggggtgggtggggtggcatctgcc

SEQ ID NO: 267296 - DNA, 120 bp, Artificial Sequence
  ENSG00000126603_23 (sequence is synthesized)
ctccctgctagcaccaggctcccccttcctgagaggagcccccagggaccagaggcctgcccttccctcctaggcttacccagcccctgccctgggggctccttggacccctttccctct

SEQ ID NO: 267297 - DNA, 120 bp, Artificial Sequence
  ENSG00000126603_24 (sequence is synthesized)
gaccctgcctccagagggaaagcaagacagatgcaggcccctgcaaagccccaggtagaagcatgccccccaggacaaggcgcctcccactagttaggaggaggcccgctctgcagccgc

SEQ ID NO: 267298 - DNA, 120 bp, Artificial Sequence
  ENSG00000126603_25 (sequence is synthesized)
cgtcctcaccccaggccaggcctgcagtaccagacgggatagctggccactccacccctgcaccccagggtctcctccctctaccttttggggcaccctgggagcgtgggaagcaggtcc

SEQ ID NO: 267299 - DNA, 120 bp, Artificial Sequence
  ENSG00000126603_26 (sequence is synthesized)
gagggcccctgagctggcaaggggaggtgccaggccagctgtggtgccaagatactgagtgacctgggccctggctcagggagcatgtggggccaggcccagcgccccgtcttcctcctt

SEQ ID NO: 267300 - DNA, 120 bp, Artificial Sequence
  ENSG00000126603_27 (sequence is synthesized)
ctacccccgctgggcctggcctgggcagcgccccctgcagaggcctttgggtccttggtcctgtaacaggaagggggaggctggctggggacgaccgaccacaggctgggacacagctcc

SEQ ID NO: 267301 - DNA, 120 bp, Artificial Sequence
  ENSG00000126603_28 (sequence is synthesized)
tggtctgggggctccaagtgacagcatgcaggggagggggctcccagtcagtgctgtgttgggagctttctggaggctgtggactgaaggccttgagggaagcagtggctggaggagggt

SEQ ID NO: 267302 - DNA, 120 bp, Artificial Sequence
  ENSG00000126603_29 (sequence is synthesized)
gctggacccatgacacgttgcttcctctggcttttccctgctgggccgctttctcagaggcacttccccacccctaacacccagtgggcccccccaggttctgtgccactcagagggacc

SEQ ID NO: 267303 - DNA, 120 bp, Artificial Sequence
  ENSG00000126603_30 (sequence is synthesized)
ctggcaggggccagaaccacttaagggtggtgctggagggccttgtgccccagtcccatcccaggacgccctgagggatggacgcagccatgcaccccccatctggggcctctccctgct

SEQ ID NO: 267304 - DNA, 120 bp, Artificial Sequence
  ENSG00000126603_31 (sequence is synthesized)
ccctctcccacctggcagctgggagttctggcttctaggcctgccctgtcaccaggcctctgagtggccaggcccttccacctccccatctgtaaaacgaggcagctgcccggacagcct

SEQ ID NO: 267305 - DNA, 120 bp, Artificial Sequence
  ENSG00000126603_32 (sequence is synthesized)
tggggtccttagtggccctgcaggtcctctggcagctctgctgaccccaccctctcccggactgcccttctgtcccagaggggtcaccctgacccggcccaccttgccactgggctttgg

SEQ ID NO: 267306 - DNA, 120 bp, Artificial Sequence
  ENSG00000126603_33 (sequence is synthesized)
actccagccctgacagggcccagccacactggctctgcccctcgaaggggctatgagcaaggtaggagggagctggtctcctttcttcgggccccacccaggccctgagcaccccccacc

SEQ ID NO: 267307 - DNA, 120 bp, Artificial Sequence
  ENSG00000126603_34 (sequence is synthesized)
cctgtgagggccccaggccttaagtccctggcggggtcatgggtttgcgacttgagcagagcggaggaacagggcactggaaggccgacgagctcagcatgcgactcggtgacggaccag

SEQ ID NO: 267308 - DNA, 120 bp, Artificial Sequence
  ENSG00000126603_35 (sequence is synthesized)
gctcggcagggccggtgtactttttgtggttgtcattggtgtgttgttgcacattccaggacgtcagtattttaacaggttctaagtgcctttctatcgtagcttatgttttcctcctct

SEQ ID NO: 267309 - DNA, 120 bp, Artificial Sequence
  ENSG00000126603_36 (sequence is synthesized)
tggctccattgctgttagcatagagttttaaaaaaagagataagctaatgactataacaatatattcctccatgggagaggaagtttataaagaaacaataaaagtgagttgcaaagatg

SEQ ID NO: 267310 - DNA, 120 bp, Artificial Sequence
  ENSG00000126653_0 (sequence is synthesized)
ggccacgttcagcggacacgggagcaagatggcgattccgggcaggcagtatgggcttattttgccaaagaaaacacagcagttgcaccctgttttgcaaaaaccatcagtgtttgggaa

SEQ ID NO: 267311 - DNA, 120 bp, Artificial Sequence
  ENSG00000126653_1 (sequence is synthesized)
tgattctgatgatgatgatgagacctctgtgagtgaaagccttcagagggaagctgctaagaagcaggccatgaaacagaccaaactggaaatccagaaggcccttgcagaagatgctac

SEQ ID NO: 267312 - DNA, 120 bp, Artificial Sequence
  ENSG00000126653_2 (sequence is synthesized)
tgtgtatgaatatgacagtatttatgatgaaatgcagaaaaaaaaggaggaaaataatcccaaattgcttttggggaaagacagaaagcccaagtatattcacaacttgctaaaagcagt

SEQ ID NO: 267313 - DNA, 120 bp, Artificial Sequence
  ENSG00000126653_3 (sequence is synthesized)
tgagatcagaaaaaaggaacaggaaaaaagaatggaaaagaaaatacagagagaacgagaaatggaaaagggggagtttgatgataaagaagcatttgtgacatctgcatataagaaaaa

SEQ ID NO: 267314 - DNA, 120 bp, Artificial Sequence
  ENSG00000126653_4 (sequence is synthesized)
actgcaagagagagctgaagaagaagaaagagaaaagagggctgctgcactggaagcatgtttggatgtaaccaagcagaaagatctcagtggattttataggcacctattaaatcaagc

SEQ ID NO: 267315 - DNA, 120 bp, Artificial Sequence
  ENSG00000126653_5 (sequence is synthesized)
agttggtgaagaggaagtacctaaatgcagctttcgtgaagccagatctggtataaaggaagaaaaatcaaggggcttctccaatgaagtaagttcaaaaaacagaataccacaagagaa

SEQ ID NO: 267316 - DNA, 120 bp, Artificial Sequence
  ENSG00000126653_6 (sequence is synthesized)
atgcattcttcaaactgatgtgaaagtagaggaaaacccagatgcagacagtgacttcgatgctaagagcagtgcggatgatgaaatagaagaaactagagtgaactgcagaagggaaaa

SEQ ID NO: 267317 - DNA, 120 bp, Artificial Sequence
  ENSG00000126653_7 (sequence is synthesized)
ggtcatagagacccctgagaatgacttcaagcaccacaggagtcaaaaccactctcggtcacctagtgaagaaagagggcacagtaccaggcaccacacgaaaggatcacgaacgtcgag

SEQ ID NO: 267318 - DNA, 120 bp, Artificial Sequence
  ENSG00000126653_8 (sequence is synthesized)
aggacatgagaaaagggaagatcagcaccagcagaagcaatccagagaccaagagaaccattacactgaccgtgattaccggaaagaaagggattctcataggcacagagaggccagtca

SEQ ID NO: 267319 - DNA, 120 bp, Artificial Sequence
  ENSG00000126653_9 (sequence is synthesized)
tagagattcccattggaagaggcatgaacaggaagataaaccaagggcgagggaccaaagagaaagaagtgacagagtatggaaaagggagaaagatagggagaaatattcccaaagaga

SEQ ID NO: 267320 - DNA, 120 bp, Artificial Sequence
  ENSG00000126653_10 (sequence is synthesized)
agatatgaaaataatgataaatacagagatagagaaaaacgagaggtaggtgttcagtcttcagaaagaaatcaagacagaaaggaaagcagcccaaattctagggcaaaggataaattt

SEQ ID NO: 267321 - DNA, 120 bp, Artificial Sequence
  ENSG00000126653_11 (sequence is synthesized)
cttgaccaagaaagatccaacaaaatgagaaacatggcaaaggacaaagaaagaaaccaagagaaaccctctaattctgaatcatcactgggagcaaaacacagactcacagaggaaggg

SEQ ID NO: 267322 - DNA, 120 bp, Artificial Sequence
  ENSG00000126653_12 (sequence is synthesized)
caagagaagggtaaagaacaagagagaccacctgaggcagtgagcaagtttgcaaagcggaacaatgaagaaactgtaatgtcagctagagacaggtacttggccaggcagatggcgcgg

SEQ ID NO: 267323 - DNA, 120 bp, Artificial Sequence
  ENSG00000126653_13 (sequence is synthesized)
gttaatgcaaagacctatattgagaaagaagatgattgatggctaccccaagagaaagatttaaggaagcacagaaaactgtaattcctggaacctgctgcgtaaaaccataaaggagtg

SEQ ID NO: 267324 - DNA, 120 bp, Artificial Sequence
  ENSG00000126653_14 (sequence is synthesized)
tgttaccagtagtttggagggcatttttaaatttattttcaaaattttaagttaaaagtcagtcttacagcttggatgtttggatgtggatgtttggctgaatttatatatagtgtgtac

SEQ ID NO: 267325 - DNA, 120 bp, Artificial Sequence
  ENSG00000126653_15 (sequence is synthesized)
tcatcaataccacattctttgttgtattcaagaaccgttaagagtgtgctaattccctgtaggtacataatgaggaaaatttgctccactacaaccattaaaaaataattttggccagat

SEQ ID NO: 267326 - DNA, 120 bp, Artificial Sequence
  ENSG00000126653_16 (sequence is synthesized)
acggtagctcgtgcctgtaataccaacattttgggaggccaaggcagaaggatattgaggctaggcattcaagaccagcctaggcaggataataagaccttgtctctatttaaaaaacaa

SEQ ID NO: 267327 - DNA, 120 bp, Artificial Sequence
  ENSG00000126653_17 (sequence is synthesized)
aaagcctagcatggtagtccatgcctgtagtcccagctgttcgagaggctgaggcaagaagatcacttgagcctaggaatttgatgttacagtgaggtatgatcatgccactgcactcca

SEQ ID NO: 267328 - DNA, 120 bp, Artificial Sequence
  ENSG00000126653_18 (sequence is synthesized)
acctgggcaacagaatgagaccctgtctctaaaaaattttttttaaataaataatttaactcttctaataatgttttgttgcaggaaatgtatttcagataaaatatggatttgaaaaac

SEQ ID NO: 267329 - DNA, 120 bp, Artificial Sequence
  ENSG00000126653_19 (sequence is synthesized)
agaaaatatactttatgttctgaaatttgtatttaagtataaaatgtgaatcatcttgtctaaatagcttacagcatagttggcttaaatgaaaataaaatgatatgcttatacatttta

SEQ ID NO: 267330 - DNA, 120 bp, Artificial Sequence
  ENSG00000126653_20 (sequence is synthesized)
cttgcttcctaacccgcgcttgagtttctccccgcttggatgctctcaggggcagtgtgaagagagacagttcctggcttccttagagggccttgttctccttggcagaagctcaagtcc

SEQ ID NO: 267331 - DNA, 120 bp, Artificial Sequence
  ENSG00000126653_21 (sequence is synthesized)
taaagtttggaataagagtacctgaattggaatcttgctttgccattcaccagctgtttgtccttaaattctctcaggtttttggcatttaatcgtcatccttagtggtaattgttaaag

SEQ ID NO: 267332 - DNA, 120 bp, Artificial Sequence
  ENSG00000126653_22 (sequence is synthesized)
cgagaagtcctgaggaacatagattcccctcccccgtacattttcccggatggaagcccgaagtttgagggagaaacttgtgaggaaataaaggaagttaggctgaggggcagagagcga

SEQ ID NO: 267333 - DNA, 120 bp, Artificial Sequence
  ENSG00000126653_23 (sequence is synthesized)
caccctgttttgcaaaaaccatcagtgtttgggaatgattctgatgatgatgatgaggatcttgctctttcacccaggatggagtgcaatttgtgcagtcacaactcatggcagcctcaa

SEQ ID NO: 267334 - DNA, 68 bp, Artificial Sequence
  ENSG00000126653_24 (sequence is synthesized)
aatttattttttgtagagacagagtctcactgcgttgcctaggctgctcttgaactcctgggctcaag

SEQ ID NO: 267335 - DNA, 120 bp, Artificial Sequence
  ENSG00000126653_25 (sequence is synthesized)
aacatccttatctcagtaattgatctctttggctgctctgagactagctgggaatgaaccaagagtgaatgagtgcacagatgtgggcagagttttcaaaaagattttgaggcagccggt

SEQ ID NO: 267336 - DNA, 120 bp, Artificial Sequence
  ENSG00000126653_26 (sequence is synthesized)
gggctccgaaacaaaacagaggtcactggatccgattcccagtaccatagaagtgactcaaaccagcgattcaaccgacaagcaggatccgggccacccaaagccgcgcgagagtttacg

SEQ ID NO: 267337 - DNA, 120 bp, Artificial Sequence
  ENSG00000126653_27 (sequence is synthesized)
ataaagcttatgacatgttttgatttggtagcttcatgtggaagaggttgagtatccctttctgaaatgcttggggccaggtgtggtggctggcgcctgtaatcccagcactttctgagg

SEQ ID NO: 267338 - DNA, 120 bp, Artificial Sequence
  ENSG00000126653_28 (sequence is synthesized)
ctgaggcgagaggattgcttcagccctggagttcaagaacagctgggcaacacagtgataccctgtctctacaaaacactaaaaaattacctgtgtgtagtggtacatacccgtagtccc

SEQ ID NO: 267339 - DNA, 120 bp, Artificial Sequence
  ENSG00000126653_29 (sequence is synthesized)
gtgtgagccactgcacctggctgtgaacttagtatgtgtatatatgtatatgtagttatatatatatataaaattatatatataaaattactcagaagccatagtatattccttttatag

SEQ ID NO: 267340 - DNA, 120 bp, Artificial Sequence
  ENSG00000126653_30 (sequence is synthesized)
cacgttcagcggacacgggagcaagatggcgattccgggcaggcatagagacggggcttcatcaggttggccacgctgatctcaaactcctgagctcaagtgatccagccgcctcagcct

SEQ ID NO: 267341 - DNA, 120 bp, Artificial Sequence
  ENSG00000126698_0 (sequence is synthesized)
agaagggtcacgtggtggctgggccggggaaatggcggcttcaggagagagcgggacttcaggcggcggaggcagcaccgaggaagcatttatgaccttctacagtgaggtgaaacaaat

SEQ ID NO: 267342 - DNA, 120 bp, Artificial Sequence
  ENSG00000126698_1 (sequence is synthesized)
agagaagagagactcggttctaacttcgaaaaatcagattgaaagactgacccgtcctggttcctcttacttcaatttgaacccatttgaggttcttcagatagatcctgaagttacaga

SEQ ID NO: 267343 - DNA, 120 bp, Artificial Sequence
  ENSG00000126698_2 (sequence is synthesized)
tgaagaaataaaaaagaggtttcggcagttatccatcttggtgcatcctgacaaaaatcaagatgatgctgacagagcacaaaaggcttttgaagctgtggacaaagcttacaagttgct

SEQ ID NO: 267344 - DNA, 120 bp, Artificial Sequence
  ENSG00000126698_3 (sequence is synthesized)
actggatcaggagcaaaagaagagggccctggatgtaattcaggcaggaaaagaatacgtggaacacactgtgaaagagcgaaaaaaacaattaaagaaggaaggaaaacctacaattgt

SEQ ID NO: 267345 - DNA, 120 bp, Artificial Sequence
  ENSG00000126698_4 (sequence is synthesized)
agaggaggatgatcctgagctgttcaaacaagctgtatataaacagacaatgaaactctttgcagagctggaaattaaaaggaaagagagagaagccaaagagatgcatgaaaggaaacg

SEQ ID NO: 267346 - DNA, 120 bp, Artificial Sequence
  ENSG00000126698_5 (sequence is synthesized)
acaaagggaagaagagattgaagctcaagaaaaagccaaacgggaaagagagtggcagaaaaactttgaggaaagtcgagatggtcgtgtggacagctggcgaaacttccaagccaatac

SEQ ID NO: 267347 - DNA, 120 bp, Artificial Sequence
  ENSG00000126698_6 (sequence is synthesized)
gaaggggaagaaagagaagaaaaatcggaccttcctgagaccaccgaaagtaaaaatggagcaacgtgagtgaccgcccaaggtcacaggcacagaacctttcccctgctatctcccttc

SEQ ID NO: 267348 - DNA, 120 bp, Artificial Sequence
  ENSG00000126698_7 (sequence is synthesized)
acgatttaatatcgatcagagtaattcttttgtacattgaaatgaggggcttggtttaaaaaaagacctttccctctccctgcccctagaacaaccagtattagaaggtgccaccattgg

SEQ ID NO: 267349 - DNA, 120 bp, Artificial Sequence
  ENSG00000126698_8 (sequence is synthesized)
tgctgccttctcttcccacagcctgtaactcagtgttttgtacttcactgaattgtgatggttagaaacttcgtggatagtttgtggaaatcatccaattaaacatactgcttaaaacag

SEQ ID NO: 267350 - DNA, 120 bp, Artificial Sequence
  ENSG00000126698_9 (sequence is synthesized)
tgttgctgtgacttcagagacaagcctggaaggggcaccttaggaagccccttcgcttcagttgctcgcttctgggtgtgctcccttcgaaggcccagataagacagggaacacttgtga

SEQ ID NO: 267351 - DNA, 120 bp, Artificial Sequence
  ENSG00000126698_10 (sequence is synthesized)
gcacacagagcagcatctgatgccctgtggtgtttggcatgtgccccctgtctactgaccaatcagtgtggcatgaggcccacgccacccaaacctttcactttccaaagagctagccgt

SEQ ID NO: 267352 - DNA, 120 bp, Artificial Sequence
  ENSG00000126698_11 (sequence is synthesized)
cctccacccagtaccatgtcctagcctgtctgcatttgttagtggtaatattctttatgtataataaatttttatacccaagccattgatgtacttttccttgtactctcccttgtgggt

SEQ ID NO: 267353 - DNA, 120 bp, Artificial Sequence
  ENSG00000126698_12 (sequence is synthesized)
cccttgtctggcttggctgaaccccaaaatgctttggggttggacagacctggctgaaccttagtttcttcatctatgaaatgggaatatgaattactgcagcagcttttagggcagatt

SEQ ID NO: 267354 - DNA, 120 bp, Artificial Sequence
  ENSG00000126698_13 (sequence is synthesized)
tgccatggcatatacaaggtaactaccatagtgctccttgggtattgccaatatcctattatttctgtgtaaaatgaagatactgattgttttgaggattaaatgaagtaatatatgaaa

SEQ ID NO: 267355 - DNA, 120 bp, Artificial Sequence
  ENSG00000126698_14 (sequence is synthesized)
gggtcacgtggtggctgggccggggaaatggcggcttcaggagagagcgggacttcaggcggcggaggcagcaccgaggaagcatttatgaccttctacagtgaggaataaagatggcat

SEQ ID NO: 267356 - DNA, 120 bp, Artificial Sequence
  ENSG00000126698_15 (sequence is synthesized)
taactgttccttgtcctagatcaagcaaagactgttatagttttgtcttctggtcaccaagaagctgtggttttcagtagagcagttgccatttcaaagcagaatgttgttgtttaagaa

SEQ ID NO: 267357 - DNA, 120 bp, Artificial Sequence
  ENSG00000126698_16 (sequence is synthesized)
gtagaccttaactttgctttgttaaaacttttatatgccaacaaagactgttattgcataggatcattttttttctttgaacataaagaattttatcactgaattaaatccagatgtagt

SEQ ID NO: 267358 - DNA, 120 bp, Artificial Sequence
  ENSG00000126698_17 (sequence is synthesized)
gtatttagccttgagtatatatttaattttttccaaggctcttaaggaaagtcattgctatagttgaatgttttttttaacttagtttaacgacagtaaataattaaagtagggaatgct

SEQ ID NO: 267359 - DNA, 120 bp, Artificial Sequence
  ENSG00000126698_18 (sequence is synthesized)
tcggaccttcctgagaccaccgaaagtaaaaatggagcaacggacagaatcagccctcaggaggggcccaaagtgagaaggggaaaggtgacacttgaaatgtgaagatacaggaaacta

SEQ ID NO: 267360 - DNA, 80 bp, Artificial Sequence
  ENSG00000126698_19 (sequence is synthesized)
ggcttgttgtggcagaaggtgaagaggaaggaggcacgtcttacatggccggagcaggaggaagagagcgcagggagagg

SEQ ID NO: 267361 - DNA, 120 bp, Artificial Sequence
  ENSG00000126698_20 (sequence is synthesized)
tgccacagattctgtagcttcttctaaaacttgacagatatatttgctttgctctaaacacataaccacaagccaagaaaggtaaataagtagtctgtttcaaagactttttggatctga

SEQ ID NO: 267362 - DNA, 120 bp, Artificial Sequence
  ENSG00000126698_21 (sequence is synthesized)
tgagttggggacaacctcccgttggtcccctttcatctttcattcttcctggtagattggattttagatgagattagaaaaaggacttgtggttcctaattttccttgattctgttgttc

SEQ ID NO: 267363 - DNA, 120 bp, Artificial Sequence
  ENSG00000126698_22 (sequence is synthesized)
tattgtatgtgtacagcccagtggatattctcaaagcacagatgctcgtcttttgatgaaaaaaaattctttttaggtgaaagagcgaaaaaaacaattaaagaaggaaggaaaacctac

SEQ ID NO: 267364 - DNA, 120 bp, Artificial Sequence
  ENSG00000126705_0 (sequence is synthesized)
tccagcggagttagcggcggagaatgtgagccgaggcgcgagccatgctgtcagcgacggcgggcggctcagggctcctccacgactcctctcctcagcagccgggcgcccgcgtcgctg

SEQ ID NO: 267365 - DNA, 120 bp, Artificial Sequence
  ENSG00000126705_1 (sequence is synthesized)
ccaccgccggaagacagacgtcccccaaaacccctcgcctggctcggacccacggagccggcagcccagcactccgatgggagcttgcctgattgtcaacccatcggcctggaccccaga

SEQ ID NO: 267366 - DNA, 120 bp, Artificial Sequence
  ENSG00000126705_2 (sequence is synthesized)
gcccacccagttgagcgtgtgcagagggccccgagtgcggggcgacgctcaggccgttgcagagaccaccctggagatgctgatgaagacaggcctttcctgctgagcccagcctatctt

SEQ ID NO: 267367 - DNA, 120 bp, Artificial Sequence
  ENSG00000126705_3 (sequence is synthesized)
cgcagcctgctcaggcgctgtccacgccccgaggcctgggctcaggccgaagttgctccacagcacccccagctgacagccagcgactggcagagcccccaggcacgggggccctctctc

SEQ ID NO: 267368 - DNA, 120 bp, Artificial Sequence
  ENSG00000126705_4 (sequence is synthesized)
ttccagagatctccagtgtgacagcccaggcggcagagccgagggtcctggtcccggcttctcgcaccctcatgtcagccccggccccgcccggcggcctgcggaggacaaggtcaggat

SEQ ID NO: 267369 - DNA, 120 bp, Artificial Sequence
  ENSG00000126705_5 (sequence is synthesized)
gcgtgtgaagccccagggcctggtggtgacttccagtgccgtgtgcagctctcctgactacctccgggaacccaagtactaccccggcggcccccccaccccccggcccctgcttcccac

SEQ ID NO: 267370 - DNA, 120 bp, Artificial Sequence
  ENSG00000126705_6 (sequence is synthesized)
ccggccccctgccagcccacctgacaaggccttctccacccacgccttctccgagaacccacgcccacccccacgccgggaccccagcacccggcgcccaccagtccttgccaaggggga

SEQ ID NO: 267371 - DNA, 120 bp, Artificial Sequence
  ENSG00000126705_7 (sequence is synthesized)
cgacccgctgcccccacgggcagcccgtcctgtctcacaggcccgctgccccacaccggtcggagacggcagcagctcccgacgctgctgggacaacgggcgggtgaacctgcgaccagt

SEQ ID NO: 267372 - DNA, 120 bp, Artificial Sequence
  ENSG00000126705_8 (sequence is synthesized)
ggtgcagctgattgacatcatgaaggacctgacacgcctctcccaggacctgcagcacagtggtgtacacctggactgtggtgggctccgactgagccgcccgcctgcaccgccacccgg

SEQ ID NO: 267373 - DNA, 120 bp, Artificial Sequence
  ENSG00000126705_9 (sequence is synthesized)
cgacctacagtacagcttcttctcctcacccagtttggccaacagcatccgtagccctgaggagcgggccaccccacacgccaagtcggagcggcccagccatcccctctacgagcctga

SEQ ID NO: 267374 - DNA, 120 bp, Artificial Sequence
  ENSG00000126705_10 (sequence is synthesized)
gcctgagcctagggacagtccccagcctggccaaggccatagtcccggagccacggctgcggccacgggtctgcccccagagcctgagccagacagcactgattactcagaacttgctga

SEQ ID NO: 267375 - DNA, 120 bp, Artificial Sequence
  ENSG00000126705_11 (sequence is synthesized)
cgccgacatccttagtgagctggcctccctcacttgcccagaggcccagctgctagaggcccaggccctcgagccaccatcgcccgagccggagcctcagctcctggacccccagccccg

SEQ ID NO: 267376 - DNA, 120 bp, Artificial Sequence
  ENSG00000126705_12 (sequence is synthesized)
cttcctggacccgcaggcactagagccgctcggggaagctctggagctgccacccctgcaacctcttgctgatcctctggggctgccgggcctggctctccaggccctggacaccctgcc

SEQ ID NO: 267377 - DNA, 120 bp, Artificial Sequence
  ENSG00000126705_13 (sequence is synthesized)
tgactccttggagtcgcagctgcttgacccccaggcactcgaccccctgcccaagctgcttgacgtcccaggtcgccgtctggagccccagcagcccctggggcactgcccactggccga

SEQ ID NO: 267378 - DNA, 120 bp, Artificial Sequence
  ENSG00000126705_14 (sequence is synthesized)
gcccttgcgcctggacttgtgctcaccgcacggcccccccgggcctgagggtcaccccaagtacgccttgcggcgcactgataggccaaagatcctgtgtcgccggcggaaagccggacg

SEQ ID NO: 267379 - DNA, 120 bp, Artificial Sequence
  ENSG00000126705_15 (sequence is synthesized)
gggacgcaaggcagacgccggacccgagggccgcctactgcccctgcctatgcccacggggctggtggctgccctggccgaacccccaccaccaccgcctcctccaccccctgccctgcc

SEQ ID NO: 267380 - DNA, 120 bp, Artificial Sequence
  ENSG00000126705_16 (sequence is synthesized)
aggcccaggcccggtctcagtcccagagttgaagccggaatcttcccagaccccagtggtctctacccgcaaaggcaagtgccggggcgtgcggcgcatggtggtgaagatggccaagat

SEQ ID NO: 267381 - DNA, 120 bp, Artificial Sequence
  ENSG00000126705_17 (sequence is synthesized)
ccccgtatcgctggggcggcggaacaagaccacatacaaagtgtcttccttgagcagcagcctgagcgtggagggcaaggagctgggcctgcgcgtgtcggctgagcccaccccgctgct

SEQ ID NO: 267382 - DNA, 120 bp, Artificial Sequence
  ENSG00000126705_18 (sequence is synthesized)
gaagatgaagaacaatgggcggaacgtggtagtggtcttcccacccggtgagatgcccattattctcaaacgtaagcgcggccgccctcctaagaacctgctgctgggtcccggcaagcc

SEQ ID NO: 267383 - DNA, 120 bp, Artificial Sequence
  ENSG00000126705_19 (sequence is synthesized)
caaggagccagctgtggtggcggccgaggcagccactgtggcagcggccaccatggccatgccagaggtaaaaaaacgacggcggcggaagcagaagctggcatctccccagccatccta

SEQ ID NO: 267384 - DNA, 120 bp, Artificial Sequence
  ENSG00000126705_20 (sequence is synthesized)
tgcagcagacgccaacgacagcaaggccgagtactcagacgtcctggccaagctggccttcctgaaccgccagagccagtgcgctggacggtgctcaccgccccgctgctggacacccag

SEQ ID NO: 267385 - DNA, 120 bp, Artificial Sequence
  ENSG00000126705_21 (sequence is synthesized)
tgagccggagtcggtgcaccaggcccccgacacccagagcatctcccacttcctgcatcgtgtgcagggcttccggcggcgtgggggcaaagcaggcggttttggtggccggggtggggg

SEQ ID NO: 267386 - DNA, 120 bp, Artificial Sequence
  ENSG00000126705_22 (sequence is synthesized)
ccatgcggccaagtcagcccgatgctccttcagtgacttctttgagggcatcggcaagaaaaagaaggtggtggccgtggcagccgctggggtcgggggcccgggccttactgagttggg

SEQ ID NO: 267387 - DNA, 120 bp, Artificial Sequence
  ENSG00000126705_23 (sequence is synthesized)
gcacccacgcaaacggggccggggggaggtagacgctgtgactgggaagccaaagcgcaagagacggtcccggaagaatgggactctgttcccagagcaggtgcccagtggcccaggctt

SEQ ID NO: 267388 - DNA, 120 bp, Artificial Sequence
  ENSG00000126705_24 (sequence is synthesized)
tggggaggcaggtgctgagtgggccggggataagggtggtggctgggcccctcaccatgggcacccaggcggacaagctggccgaaactgtgggtttcaggggaccgaggcccgggcctt

SEQ ID NO: 267389 - DNA, 120 bp, Artificial Sequence
  ENSG00000126705_25 (sequence is synthesized)
tgcctccactgggctggagagtggagcctcaggccgtggcagctactacagcacgggtgcaccctcaggccagaccgagctcagccaggagcgccaaaacctcttcaccggctactttcg

SEQ ID NO: 267390 - DNA, 120 bp, Artificial Sequence
  ENSG00000126705_26 (sequence is synthesized)
ggccacccaccagtgccctgcctgcccagcggggcctggccaccttccctagccggggagccaaggccagcccagtggcagtgggtagcagcggggctggggcggacccctcctttcagc

SEQ ID NO: 267391 - DNA, 120 bp, Artificial Sequence
  ENSG00000126705_27 (sequence is synthesized)
ctgtcctgtccgcgcgccagaccttcccaccaggacgagcagcaagctatgggctaactccagccgcttcagactgccgggcagccgagaccttccccaagctggtgcccccgccctcag

SEQ ID NO: 267392 - DNA, 120 bp, Artificial Sequence
  ENSG00000126705_28 (sequence is synthesized)
ccatggcccgctcacctaccacccacccgcctgccaacacctacctgccccagtacggcggctatggggccggacaaagcgtattcgccccaactaagccctttacaggccaggactgcg

SEQ ID NO: 267393 - DNA, 120 bp, Artificial Sequence
  ENSG00000126705_29 (sequence is synthesized)
ctaacagcaaggactgcagcttcgcctatggcagtggcaacagcctccctgcctcacccagcagcgcccacagcgccggctatgccccaccgcctaccgggggcccctgcctgccaccaa

SEQ ID NO: 267394 - DNA, 120 bp, Artificial Sequence
  ENSG00000126705_30 (sequence is synthesized)
gcaaggcctccttcttcagcagctctgagggggcccccttctctggttcagcccccacgcccctgcgctgtgacagccgggccagcacagtctcgcccggtggctacatggtacccaagg

SEQ ID NO: 267395 - DNA, 120 bp, Artificial Sequence
  ENSG00000126705_31 (sequence is synthesized)
gcaccacagcctctgccacctctgcagcctctgccgcctcctcctcctcctcctccttccagccctcgcccgagaactgtcggcagtttgcgggggcttctcagtggcctttccggcagg

SEQ ID NO: 267396 - DNA, 120 bp, Artificial Sequence
  ENSG00000126705_32 (sequence is synthesized)
gctatggaggcctggactgggcctcagaggcctttagtcagctctacaatcccagttttgactgccacgtcagcgagcccaacgtgatcctggacatctccaactacacaccgcagaagg

SEQ ID NO: 267397 - DNA, 120 bp, Artificial Sequence
  ENSG00000126705_33 (sequence is synthesized)
tgaagcagcagacggctgtgtcggagaccttctctgagtcatcctccgacagcacccagttcaatcagccggttggtggcggggggtttcggcgtgccaacagcgaggcctcaagtagtg

SEQ ID NO: 267398 - DNA, 120 bp, Artificial Sequence
  ENSG00000126705_34 (sequence is synthesized)
agggccagtcgagcctgtccagcctggagaaactgatgatggactggaacgaggcatcatctgcccccggctacaactggaaccagagtgtcctctttcagagtagctccaagccgggcc

SEQ ID NO: 267399 - DNA, 120 bp, Artificial Sequence
  ENSG00000126705_35 (sequence is synthesized)
gtggacggcggaagaaggtggacctgttcgaggcctcacatctgggcttcccgacatccgcctctgccgctgcctcaggctacccatccaaacggagcactgggccccggcagccgcgag

SEQ ID NO: 267400 - DNA, 120 bp, Artificial Sequence
  ENSG00000126705_36 (sequence is synthesized)
gtggacggggcggtggggcctgctcagccaagaaggagcggggtggcgcagcggccaaagccaagttcatccccaagccacagccagtcaacccactgttccaggacagtcctgacctcg

SEQ ID NO: 267401 - DNA, 120 bp, Artificial Sequence
  ENSG00000126705_37 (sequence is synthesized)
gcctggactactatagcggggacagcagcatgtcaccactgccctcacagtcgagggccttcggcgtgggagagcgagacccctgtgacttcataggaccctactccatgaacccgtcca

SEQ ID NO: 267402 - DNA, 120 bp, Artificial Sequence
  ENSG00000126705_38 (sequence is synthesized)
cgccttccgatggcacctttggccaaggcttccactgcgactcgcccagcctgggtgctcccgagcttgatggcaagcatttcccaccgctggcccacccacccacggtgtttgacgccg

SEQ ID NO: 267403 - DNA, 120 bp, Artificial Sequence
  ENSG00000126705_39 (sequence is synthesized)
gcctgcagaaggcatactcgcccacctgctcgcctacactgggcttcaaggaagagctgcggccaccgcccacaaagctggctgcctgcgagcccctcaagcatggactccagggggcca

SEQ ID NO: 267404 - DNA, 120 bp, Artificial Sequence
  ENSG00000126705_40 (sequence is synthesized)
gcctgggccacgcagctgcagcccaggcccacctgagctgccgggacctgccgctgggccagccccactacgattcccccagctgcaagggcacagcctattggtaccctccaggctcag

SEQ ID NO: 267405 - DNA, 120 bp, Artificial Sequence
  ENSG00000126705_41 (sequence is synthesized)
ctgcccgcagcccgccctatgaaggcaaggtgggtacagggctgctggctgacttcctgggcaggacggaggccgcgtgcctcagtgcccctcacctggctagcccaccagccacgccca

SEQ ID NO: 267406 - DNA, 120 bp, Artificial Sequence
  ENSG00000126705_42 (sequence is synthesized)
aggccgacaaggagccactggaaatggcccggccccctggcccaccccgtggccctgctgcagccgctgctggctatggctgcccactccttagtgacttgaccctgtcccccgtgccga

SEQ ID NO: 267407 - DNA, 120 bp, Artificial Sequence
  ENSG00000126705_43 (sequence is synthesized)
gggactcgctgctgcccctgcaggacaccgcctacaggtacccaggctttatgccccaggcgcatcctggcctgggtgggggccccaagagcggcttcctggggcccatggcggaacctc

SEQ ID NO: 267408 - DNA, 120 bp, Artificial Sequence
  ENSG00000126705_44 (sequence is synthesized)
accccgaggacacattcaccgtcacatccctgtagtgccaactgaagtgccgactggaccgcgaggttttgttcctggctttcagaaaaccaacgccaagatccctcccagcgtccacat

SEQ ID NO: 267409 - DNA, 120 bp, Artificial Sequence
  ENSG00000126705_45 (sequence is synthesized)
cgtcctctggcaggagctcctgcccctctgcctcccaccctgccccctacaccccctgcagacccatctccctccaccccctcccacccatctcctccacgcagaagccgaaggtgagcc

SEQ ID NO: 267410 - DNA, 120 bp, Artificial Sequence
  ENSG00000126705_46 (sequence is synthesized)
ctttctgcacaaaaccagcaattgtaaatactttttaaaaatgtacaaaacttaaaaacaaaacacagttttagaaaaagacaaaaaaaaaaaagagagagagagagcgagagagcgagc

SEQ ID NO: 267411 - DNA, 120 bp, Artificial Sequence
  ENSG00000126705_47 (sequence is synthesized)
gtgtgcaagaggttgcgagcggggccccgaggtgtccagagcccctgcaagtatgcactgagaaatttatctacaggtcgtttgacaaaaatgaacaatatcctatttattgtatatact

SEQ ID NO: 267412 - DNA, 120 bp, Artificial Sequence
  ENSG00000126705_48 (sequence is synthesized)
gttttattataaatcgtggattgtatattgcattctgtaaacctgctgtggtcccgtggtgtgcaaattcgcatggtgggggggagggagaagaacctcttgcgggagctttttttttct

SEQ ID NO: 267413 - DNA, 120 bp, Artificial Sequence
  ENSG00000126705_49 (sequence is synthesized)
ttcttatttttcactcttttgggttttctcttctgttgttgttgttgttgttttctgttggcaggacacacccaaagatccaagtttgtattaaaaagaaatgaaaaaaagcaaaaaaaa

SEQ ID NO: 267414 - DNA, 120 bp, Artificial Sequence
  ENSG00000126705_50 (sequence is synthesized)
aaaaaaaaacaaaaaaaaaaaaccaaccttgtgtcttgtgaaagggggagtgagggtggagggaatggaagggacaccgctgggttttgtcaccagctactggttctccagaggagttga

SEQ ID NO: 267415 - DNA, 120 bp, Artificial Sequence
  ENSG00000126705_51 (sequence is synthesized)
ttgaaatacctacacgtgttcctggccactgagttttcccttctgcctgagatctgggttccccctcatttcactccaggccctgcgtctcccctgcctctgagctccccactctgctgc

SEQ ID NO: 267416 - DNA, 120 bp, Artificial Sequence
  ENSG00000126705_52 (sequence is synthesized)
gccttgatgacctgagagaactgggaggagaaaggggttgtgacaatgaccaggactcagggcagaggtggaaaccagagtgcctgatgtgtgcagctgctgacccccccaggacacctc

SEQ ID NO: 267417 - DNA, 120 bp, Artificial Sequence
  ENSG00000126705_53 (sequence is synthesized)
tctaccggagtctgtggaagcagagaactgggaggccaaggattggtatgaagaattaaatgaaacgatgcctggacagcttccagcccagtacctggcgcgcagtaggtgctcactaaa

SEQ ID NO: 267418 - DNA, 120 bp, Artificial Sequence
  ENSG00000126705_54 (sequence is synthesized)
agctcgcagaggcagcggcggcggcggcggagacggagagagcttggagagcagagaaaggcagagagagcgagaaatagagacagtctgagagacagacagacagccagagagagcggg

SEQ ID NO: 267419 - DNA, 120 bp, Artificial Sequence
  ENSG00000126705_55 (sequence is synthesized)
agggcagtaccagcactactgccagcgctagctgccatccactgagcagtttgctcagtgtacccccacactgctccatggaatggcttaccggctgcatttctgcgggctgtccacctt

SEQ ID NO: 267420 - DNA, 120 bp, Artificial Sequence
  ENSG00000126705_56 (sequence is synthesized)
caaactatgggcttttattgttgactcccggtgtgattgctctgacctcaggcatcttcactttttctttgcagctcttatcccactagtaattaagtcatttataatgatctgatcagt

SEQ ID NO: 267421 - DNA, 120 bp, Artificial Sequence
  ENSG00000126705_57 (sequence is synthesized)
gtctgtctgtccagtccttgtccaaagtaggtactttataactaatgagtgtatgaatgaatgatgttacttttatctctgagcctccatttcttcatctgcaaaatggggttattaata

SEQ ID NO: 267422 - DNA, 120 bp, Artificial Sequence
  ENSG00000126705_58 (sequence is synthesized)
ggtgagtggtgggggttctcctggagccctttcggggtaagaaggagggaggccgtgcccttgttagaacttcctggccttctccttaagtttgatcaccctgctgatgtgcttccctct

SEQ ID NO: 267423 - DNA, 120 bp, Artificial Sequence
  ENSG00000126705_59 (sequence is synthesized)
aacctccgctcgatccagagccccccggtggagacaaggaacacagggaccattcttaacccttggggaggatcttcgcccgttggtaaacgaggacgcgctccagccagacgagcccca

SEQ ID NO: 267424 - DNA, 80 bp, Artificial Sequence
  ENSG00000126705_60 (sequence is synthesized)
gcgcgcggagcggccggggcggggactacaagtcccggcgtgccgcgcgcgcgctcccccctggggttccggatggtgag

SEQ ID NO: 267425 - DNA, 76 bp, Artificial Sequence
  ENSG00000126705_61 (sequence is synthesized)
tctcaaaggcaggggtcctgttcttcctgagtgcatagccagattcccaaaggggatgagctgtcaataagtgaaa

SEQ ID NO: 267426 - DNA, 120 bp, Artificial Sequence
  ENSG00000126705_62 (sequence is synthesized)
gaaggtaaggcgagctcgcagaggcagcggcggcggcggcggagacggagagaggcaggcaggcagggcgagggcgagagacggagggagggagcgagcgaggcggaccagacagacaga

SEQ ID NO: 267427 - DNA, 120 bp, Artificial Sequence
  ENSG00000126705_63 (sequence is synthesized)
caggcgggcgggcgggcagagcgagccacccgccaggctgcgctcagccccgctcgcagcggagagagcagaaggcaggaggagggaggggaggagggggagggagggagagagggaatc

SEQ ID NO: 267428 - DNA, 120 bp, Artificial Sequence
  ENSG00000126709_0 (sequence is synthesized)
gtgcccatctatcagcaggctccgggctgaagattgcttctcttctctcctccaaggtctagtgacggagcccgcgcgcggcgccaccatgcggcagaaggcggtatcgcttttcttgtg

SEQ ID NO: 267429 - DNA, 120 bp, Artificial Sequence
  ENSG00000126709_1 (sequence is synthesized)
ctacctgctgctcttcacttgcagtggggtggaggcaggtgagaatgcgggtaaggatgcaggtaagaaaaagtgctcggagagctcggacagcggctccgggttctggaaggccctgac

SEQ ID NO: 267430 - DNA, 120 bp, Artificial Sequence
  ENSG00000126709_2 (sequence is synthesized)
cttcatggccgtcggaggaggactcgcagtcgccgggctgcccgcgctgggcttcaccggcgccggcatcgcggccaactcggtggctgcctcgctgatgagctggtctgcgatcctgaa

SEQ ID NO: 267431 - DNA, 120 bp, Artificial Sequence
  ENSG00000126709_3 (sequence is synthesized)
cgccacccacaagtatctcgatagtgaggaggatgaggagtagccagcagctcccagaacctcttcttccttcttggcctaactcttccagttaggatctagaactttgccttttttttt

SEQ ID NO: 267432 - DNA, 120 bp, Artificial Sequence
  ENSG00000126709_4 (sequence is synthesized)
ttttttttttttttgagatgggttctcactatattgtccaggctagagtgcagtggctattcacagatgcgaacatagtacactgcagcctccaactcctagcctcaagtgatcctcctg

SEQ ID NO: 267433 - DNA, 120 bp, Artificial Sequence
  ENSG00000126709_5 (sequence is synthesized)
tctcaacctcccaagtaggattacaagcatgcgccgacgatgcccagaatccagaactttgtctatcactctccccaacaacctagatgtgaaaacagaataaacttcacccagaaaaca

SEQ ID NO: 267434 - DNA, 120 bp, Artificial Sequence
  ENSG00000126733_0 (sequence is synthesized)
actgtttgttgagcttgagcgtgagccggctgctgaagacttgcgaacagttcggagccagcgagagcgcgccagagagagcgagagtgagggagtgagtgcgaggggatctagaggagt

SEQ ID NO: 267435 - DNA, 120 bp, Artificial Sequence
  ENSG00000126733_1 (sequence is synthesized)
cagggcgagaaagcgagggccggaggacccacgatagagacagagtgaccatggctgtctccgcatctccagtgatctctgcaacttccagcggcgccggcgtcccggggggcttattcc

SEQ ID NO: 267436 - DNA, 120 bp, Artificial Sequence
  ENSG00000126733_2 (sequence is synthesized)
gggccgaacccctgtactcgactcccagagagccccctcgtcttactcctaatatgatcaatagtttcgtggttaataaccacagcaacagtgccggaggcggcggcaggggcaacacca

SEQ ID NO: 267437 - DNA, 120 bp, Artificial Sequence
  ENSG00000126733_3 (sequence is synthesized)
acaccaacgagtgccgcatggtcgacatgcacgggatgaaggtggcttcgttcctgatggacggccaggaactgatctgcctgccgcaagtctttgatctttttctcaagcacctggtgg

SEQ ID NO: 267438 - DNA, 120 bp, Artificial Sequence
  ENSG00000126733_4 (sequence is synthesized)
gaggcttgcacactgtgtacaccaagctgaagagactggatatatcccccgtggtgtgtactgttgagcaggtccggatcctccgcgggctgggggccatccagcccggggtaaaccgct

SEQ ID NO: 267439 - DNA, 120 bp, Artificial Sequence
  ENSG00000126733_5 (sequence is synthesized)
gcaaactcatcaccaggaaagacttcgaaactttgttcaccgattgcaccaatgccagaaggaagaggcaaatgacaagaaaacaagctgttaacagttcaagacccggcaggcccccta

SEQ ID NO: 267440 - DNA, 120 bp, Artificial Sequence
  ENSG00000126733_6 (sequence is synthesized)
agcgttctttgggagtgttgcaggaaaatgcccgccttctgacccatgcagtcccaggcctcttatcgccaggacttatcactccgacaggtataacagctgcagcgatggctgaggcga

SEQ ID NO: 267441 - DNA, 120 bp, Artificial Sequence
  ENSG00000126733_7 (sequence is synthesized)
tgaaacttcagaagatgaagcttatggctatgaacactcttcagggaaatggaagccaaaatgggaccgaatcagagcctgatgatcttaattctaacacaggtggaagtgaatcctcct

SEQ ID NO: 267442 - DNA, 120 bp, Artificial Sequence
  ENSG00000126733_8 (sequence is synthesized)
gggataaagataagatgcagtctccatttgctgcacctggaccccaacatggaattgctcatgcagccctagctggccagccaggcattgggggtgctccaaccctcaatccactgcagc

SEQ ID NO: 267443 - DNA, 120 bp, Artificial Sequence
  ENSG00000126733_9 (sequence is synthesized)
agaaccacctgctaaccaatagactggatctgccatttatgatgatgcctcatcccctacttccagtcagcttacctcctgcatcagttgccatggcaatgaatcagatgaaccatctca

SEQ ID NO: 267444 - DNA, 120 bp, Artificial Sequence
  ENSG00000126733_10 (sequence is synthesized)
gctgctgcagcacagattcacagtccactctccagagctggtacctctgttataaaggagcggatcccagagagtccttctcctgctccttctctagaagagaatcatcgtcctgggagc

SEQ ID NO: 267445 - DNA, 120 bp, Artificial Sequence
  ENSG00000126733_11 (sequence is synthesized)
cagacctcttcccacaccagcagcagtgtgtccagctctccctctcagatggatcatcatttggaaagaatggaagaggtaccagttcaaattccaataatgaagtcacccttggacaag

SEQ ID NO: 267446 - DNA, 120 bp, Artificial Sequence
  ENSG00000126733_12 (sequence is synthesized)
atacagctgactcctgggcaggcattgcccgctggattccctggaccattcatttttgctgatagtctgtcctccgtggagactctgttgaccaacattcagggtctgctgaaagttgct

SEQ ID NO: 267447 - DNA, 120 bp, Artificial Sequence
  ENSG00000126733_13 (sequence is synthesized)
ttggataatgctcgcatccaggagaagcagattcaacaagaaaagaaggagctgcgactggagctctatagagagagagaaattagagaaaaccttgaaagacaacttgcagttgagctt

SEQ ID NO: 267448 - DNA, 120 bp, Artificial Sequence
  ENSG00000126733_14 (sequence is synthesized)
caaagcagaactactatgcaaaagcgcctgaagaaggagaaaaaaaccaagagaaaattgcaggaagccttggaatttgaatcaaagcgccgggagcaagtggagcaggcacttaagcaa

SEQ ID NO: 267449 - DNA, 120 bp, Artificial Sequence
  ENSG00000126733_15 (sequence is synthesized)
gccaccactagtgacagtggcctgaggatgttaaaagatactggaattccagatattgaaatagaaaacaatgggactcctcatgatagtgctgctatgcaaggaggtaactattactgt

SEQ ID NO: 267450 - DNA, 120 bp, Artificial Sequence
  ENSG00000126733_16 (sequence is synthesized)
ttagaaatggcacaacagttgtattcagcctgaaaggtcctcgctggctttacataaatgaagatgcttgtgattccagtttatctctgaaactattcaacatggagttatttcagtttt

SEQ ID NO: 267451 - DNA, 120 bp, Artificial Sequence
  ENSG00000126733_17 (sequence is synthesized)
gtttatcagcaaagctttgtttactgaaggagctatttaatctatgttacattaaaaaagaaacgcgtgtacattttaaaagcaatgatgtaaactttgttcttgcattagactgaccag

SEQ ID NO: 267452 - DNA, 120 bp, Artificial Sequence
  ENSG00000126733_18 (sequence is synthesized)
tttaaaaatatgaactaaaacctaatggctaaagtaacttgaccatatttgatgcttttctatgctcatttcaacttggctttttgtcttttaaatttttaaaaaatgcagtagtgtgtt

SEQ ID NO: 267453 - DNA, 120 bp, Artificial Sequence
  ENSG00000126733_19 (sequence is synthesized)
agagactagaaagttatatgtatggtttccctgttctactatacataacgttaaagtacaccttctttgttaaaaatgtacttgctaaacttcagcgtaaataaaaacattttgactttg

SEQ ID NO: 267454 - DNA, 75 bp, Artificial Sequence
  ENSG00000126733_20 (sequence is synthesized)
caccaggaaagacttcgaaactttgttcaccgattgcaccaatgccagagttgctgcaacttccgcctcccaggt

SEQ ID NO: 267455 - DNA, 120 bp, Artificial Sequence
  ENSG00000126733_21 (sequence is synthesized)
tcatactcaaatccttaaaatatggaacctttaattactgtttgttcattactgataaatagaaccttacacatacaggaaaaatgtcctagagaatgggtttcacaggtttttagggga

SEQ ID NO: 267456 - DNA, 120 bp, Artificial Sequence
  ENSG00000126733_22 (sequence is synthesized)
tagtcataataatgactgaacacattttacacttctttaacctctttctttcaaggagttagttcatagtgcttcaaaaacattatcacattaattcacacagaatcctagtggggtaag

SEQ ID NO: 267457 - DNA, 120 bp, Artificial Sequence
  ENSG00000126733_23 (sequence is synthesized)
taggtggaagaatttttaagacagagaaaatgctatttctaaatggtgtgagacaaattaaaatgcaggcacacctactttaagctgcaattactgtgaaataacttcttgtctgacctg

SEQ ID NO: 267458 - DNA, 120 bp, Artificial Sequence
  ENSG00000126733_24 (sequence is synthesized)
gtatttaacaggaattatatcaggtggtgaatcatttgtgcaaatgatcgatatttgttatcactgctttggagctctcatttctaaaagaaacacttggcctgtagtgttctctaagaa

SEQ ID NO: 267459 - DNA, 120 bp, Artificial Sequence
  ENSG00000126733_25 (sequence is synthesized)
aatataaggagctctagtttttagattttaccacacccagtttttcctttgaactgttgatggtggagcaagtcctttaacccctttctactagcacattcctgatttgtaaagaatgca

SEQ ID NO: 267460 - DNA, 120 bp, Artificial Sequence
  ENSG00000126733_26 (sequence is synthesized)
atgataaaaacagatacccaagctgctaaaaatacccctttactattttcttctctcctcccatccccaatcttgcttcctctttattaagctattaacaagcaaacagaatgaaaaatc

SEQ ID NO: 267461 - DNA, 120 bp, Artificial Sequence
  ENSG00000126733_27 (sequence is synthesized)
tataggcataagaaaagagaaagatgggtcagtgagattatggatattttatactgttcactctctggtctagacatagccagattcctaacatgttcaaatgattaggaacatttggct

SEQ ID NO: 267462 - DNA, 120 bp, Artificial Sequence
  ENSG00000126733_28 (sequence is synthesized)
tgaattgcccaggaaatggcctcaaatatttttaactgtttacttagaggagatctgaccattggctgggggcagatacctgttatcattattttgatgcctactaaaaatctaatagag

SEQ ID NO: 267463 - DNA, 120 bp, Artificial Sequence
  ENSG00000126733_29 (sequence is synthesized)
cagcattccaatgtgttatatggtactctaatgatcaaaaagatttaatgctcctcctaaagtgccctccttatattaaacaatatataatccattgtgttgttttcacgtctgccctag

SEQ ID NO: 267464 - DNA, 120 bp, Artificial Sequence
  ENSG00000126733_30 (sequence is synthesized)
cattaagttctgatgtgacagaagcaccaagcatctcctgcaaaaagccaactgagtttttatccattttctagtaagaggttccccatggcagtacatgcaatttctgccggaatggcc

SEQ ID NO: 267465 - DNA, 120 bp, Artificial Sequence
  ENSG00000126733_31 (sequence is synthesized)
acccactctaaacacttaaaaatattacattaattcatatcgatgtgacatttcagtaattccaagctctgaaggaatgttttctaaagcataagcatttggattctggtattcttcatg

SEQ ID NO: 267466 - DNA, 120 bp, Artificial Sequence
  ENSG00000126733_32 (sequence is synthesized)
ggctgtagaaggtctgcttatatagagtaggtatactgttttagcccaattcagtgaaataatgccaaattagaaataagtcatggagaaggattgaagcaagtcaaataaaaactttta

SEQ ID NO: 267467 - DNA, 120 bp, Artificial Sequence
  ENSG00000126733_33 (sequence is synthesized)
ttaatatcaaatatctgaaataaataacagtgacaggtgactaaaaatataacatccaagaaagtctcatcattaaatggaatttccaaattaagttacttcaaaataaactagtgtctt

SEQ ID NO: 267468 - DNA, 120 bp, Artificial Sequence
  ENSG00000126733_34 (sequence is synthesized)
ttgtttaaataagtagataagtttaacttaccttgtttgaactatgaggactcctcatgtgtatttttttctggccttttcccatatatctgccttgtttatgatacatgattttagcta

SEQ ID NO: 267469 - DNA, 120 bp, Artificial Sequence
  ENSG00000126733_35 (sequence is synthesized)
ttccggctcataggcttaggatatataccacagggcaagtctcacatttacttgagtttggagcagctatttgtggcccagtaaagataactcaactgattaggagaggttcatctcctg

SEQ ID NO: 267470 - DNA, 120 bp, Artificial Sequence
  ENSG00000126733_36 (sequence is synthesized)
tgtggagtgtccacactgaccttctgtgtcatggcatatgcccatgtcaggcagtgctgtgctaaaggaaggattacatggacttttgtttttactttaaaaatggtcacatttgtatgt

SEQ ID NO: 267471 - DNA, 120 bp, Artificial Sequence
  ENSG00000126733_37 (sequence is synthesized)
caaatgtcagtgtgtgtccctctttttaagttctcaagctcggtaacattcccctggagagactttgttagtttctcttcctgatctttaatcttattgacatccagagttcatatcaga

SEQ ID NO: 267472 - DNA, 120 bp, Artificial Sequence
  ENSG00000126733_38 (sequence is synthesized)
tcatctctgtttagagctcaagaacaaacccttataagaacatgaaacattccattactaattagctgtttcctgttcctaatgaagcgagcacactgggtctggattaaaattcagcta

SEQ ID NO: 267473 - DNA, 120 bp, Artificial Sequence
  ENSG00000126733_39 (sequence is synthesized)
ctactcctctctgtttatggttccagatgtttttggtttatgtaggagattactttgacagctactactaagtgataaatcactcatattatagctgaaatgcattttgaaattgaaatg

SEQ ID NO: 267474 - DNA, 120 bp, Artificial Sequence
  ENSG00000126733_40 (sequence is synthesized)
tggcaaactttgagattgctccaaggatcagtgtcagcagttcattactggcatcttccttatgatcattcagcattggcacatgtaaaacagtaaccaaatatgtgtcaacattataca

SEQ ID NO: 267475 - DNA, 120 bp, Artificial Sequence
  ENSG00000126733_41 (sequence is synthesized)
acatgctacacaggggtctgtttcgctactgtcctcaaaattgggagaaaaagttttactacggtgaaatctcaatttattgtattctggtagaaaagttgattcacttaatattgtttt

SEQ ID NO: 267476 - DNA, 120 bp, Artificial Sequence
  ENSG00000126733_42 (sequence is synthesized)
cttcttgctagcctagtttttctttcaatttttgagcagctatgggaactattcctaataggccttgtaagcagacacataaaggatgtgggcaaatatttctgtctctaaataaaggca

SEQ ID NO: 267477 - DNA, 120 bp, Artificial Sequence
  ENSG00000126733_43 (sequence is synthesized)
agaaataaacataacaaaagtagaaatttttcagaaactgcatttttctaaaggacaaatggtgattgtctttcgctattcattgctgagttcatgtaccctttttaaggggacatagtg

SEQ ID NO: 267478 - DNA, 120 bp, Artificial Sequence
  ENSG00000126733_44 (sequence is synthesized)
tgtgctattgctttccagtttgtaatgttcacagtttgtgttgcatgatttaagctttagctatattgtataaatttcaatcctggtaaaatgactgtcatttcatgtcaaagagctttc

SEQ ID NO: 267479 - DNA, 120 bp, Artificial Sequence
  ENSG00000126733_45 (sequence is synthesized)
ctttgacatttaggctgtgtatacaaaggatgaggtagactggaggactgagcaaatatttggtcaattcatcagagtaaatattctcagactccacaaaggagttggaacaattaccag

SEQ ID NO: 267480 - DNA, 120 bp, Artificial Sequence
  ENSG00000126733_46 (sequence is synthesized)
tgtccaaaaattcaagctttgttttcttctggtccctggaaaagtttaagtgaattccatgggcttcttgggaaaatgtctggttgccctctgatgaagtccaaccctccataagtctga

SEQ ID NO: 267481 - DNA, 120 bp, Artificial Sequence
  ENSG00000126733_47 (sequence is synthesized)
ctaacccaaaccccaaatcttttattcatctattaccttactacatctttatttttggttctgaggtattatctagaaaattctgccactcaccatgataccttatacacagaaagaata

SEQ ID NO: 267482 - DNA, 120 bp, Artificial Sequence
  ENSG00000126733_48 (sequence is synthesized)
aagattttaaagatattatacacaaggttaaaaaagggtatactttcctcctaataagcttgaccagattgacttaatattttagattagacatattagtccaacaatgataatgtcctc

SEQ ID NO: 267483 - DNA, 120 bp, Artificial Sequence
  ENSG00000126733_49 (sequence is synthesized)
tccattatatgtgaaaataaagcacttgactcagaaacattatctttaagtatttctcaagcacaggtaatggatttgtacggattcatccacatttcttttcctacttcttttgtaacc

SEQ ID NO: 267484 - DNA, 120 bp, Artificial Sequence
  ENSG00000126733_50 (sequence is synthesized)
aaaagccaatctttgtgatgtatctaaatagagactcaggttataagccattgctatggaaaataacaaggtttgacaaaaagaggtagaataaatttttttttaaaaatttccaacaat

SEQ ID NO: 267485 - DNA, 120 bp, Artificial Sequence
  ENSG00000126733_51 (sequence is synthesized)
aacttttacccacccaaattaaatattatctaactctaggatggcatgggctcttttaatgactatcatttagagggataccggtttgactaaacactgtagctgaaacgatattccaaa

SEQ ID NO: 267486 - DNA, 120 bp, Artificial Sequence
  ENSG00000126733_52 (sequence is synthesized)
ctagtctcccttcatgcagtatacacagtctcagggttaacccgggagaggaaattttaaatgtacaaagctgtcattatcttagatcataaccagatactcttttccccctgttttggt

SEQ ID NO: 267487 - DNA, 120 bp, Artificial Sequence
  ENSG00000126733_53 (sequence is synthesized)
aaaccacagggatggtatttcagatgcaccattatatacaaaaaaaaaagtaatatagattattacagacattataatatagttcatgaagagcctttatcagtcttcaatgtctccggt

SEQ ID NO: 267488 - DNA, 120 bp, Artificial Sequence
  ENSG00000126733_54 (sequence is synthesized)
gctgtggaaagaagaacagaagctatagcatgaaatttgaaggatctttgaaaactgacagatgaaaatatagaaatgttaagaaatgttaaattttaccaacactaaattgagcctgtt

SEQ ID NO: 267489 - DNA, 120 bp, Artificial Sequence
  ENSG00000126733_55 (sequence is synthesized)
acatcagatcattttaggttcctgaagatagaagttttagtatttttaagcacgtatcagaatgactcttcataagaactaacttgttttctttttttttaaggaggtaactattactgt

SEQ ID NO: 267490 - DNA, 120 bp, Artificial Sequence
  ENSG00000126746_0 (sequence is synthesized)
cgcgttccgtgcgtgtgagtgtgtgggtctgtctcgctccagaagtgcgtgcccgcgcgctgcgccttgcgctttttcccctccctcgccccttcctggtcctcccaccctcctcggctc

SEQ ID NO: 267491 - DNA, 120 bp, Artificial Sequence
  ENSG00000126746_1 (sequence is synthesized)
cctcctttcccagcaaacgccgcccctcccgcgccctggctcaggctctggcgccgccgcagccgtcgccgcccgaaagttcaggagccctggaaaggagaaggaataagacggcaggag

SEQ ID NO: 267492 - DNA, 120 bp, Artificial Sequence
  ENSG00000126746_2 (sequence is synthesized)
gaagagagagagagggtagaatggaagaatctcacttcaattctaacccgtacttctggccttctatccccacagtctcaggtcagatcgagaacacaatgttcatcaacaagatgaagg

SEQ ID NO: 267493 - DNA, 120 bp, Artificial Sequence
  ENSG00000126746_3 (sequence is synthesized)
atcagctgttgccagagaagggctgtggtctggccccacctcactaccccaccttgctgacagtgcctgcctcagtgtccctgccctcaggcatcagtatggacacagagtccaagtcag

SEQ ID NO: 267494 - DNA, 120 bp, Artificial Sequence
  ENSG00000126746_4 (sequence is synthesized)
accagctgaccccacacagccaagcgtccgttacccagaatatcacggtggtccctgtgccgtctacaggactgatgactgctggagtctcctgttctcagaggtggagaagagaaggga

SEQ ID NO: 267495 - DNA, 120 bp, Artificial Sequence
  ENSG00000126746_5 (sequence is synthesized)
gtcaatcaaggggtccgggtttggtaatcacgtccccctcaggctctcttgtgaccacagcatcatcagctcagaccttccccatttcggctcccatgattgtctcagctcttccccctg

SEQ ID NO: 267496 - DNA, 120 bp, Artificial Sequence
  ENSG00000126746_6 (sequence is synthesized)
gctcacaagccctgcaggttgtccctgacctctccaagaaggtagcatcgaccctaaccgaggaaggaggcggaggtggtggtggaggtggcagtgtggctcctaagccaccccggggcc

SEQ ID NO: 267497 - DNA, 120 bp, Artificial Sequence
  ENSG00000126746_7 (sequence is synthesized)
ggaagaagaagcggatgctggaatcagggctgcccgagatgaatgacccttatgtcctctcccctgaggatgatgatgaccatcagaaagacggcaagacctacaggtgccggatgtgct

SEQ ID NO: 267498 - DNA, 120 bp, Artificial Sequence
  ENSG00000126746_8 (sequence is synthesized)
cactgacattctactccaagtcggagatgcagatccactccaagtcacacaccgagaccaagccccacaagtgcccacattgctccaagaccttcgccaacagctcctacctggcccagc

SEQ ID NO: 267499 - DNA, 120 bp, Artificial Sequence
  ENSG00000126746_9 (sequence is synthesized)
acatccgtatacactcaggggctaagccctacagttgtaacttctgtgagaaatccttccgccagctctcccaccttcagcagcacacccggatccactccaagatgcacacggagacca

SEQ ID NO: 267500 - DNA, 120 bp, Artificial Sequence
  ENSG00000126746_10 (sequence is synthesized)
tcaagccccacaagtgcccgcactgctccaagaccttcgccaacacctcctacctggcccagcacctccgtatccactcgggggccaagccctacaactgttcctactgccagaaggcct

SEQ ID NO: 267501 - DNA, 120 bp, Artificial Sequence
  ENSG00000126746_11 (sequence is synthesized)
tccgccagctctcccacctccagcagcacacacgaatccacactggtgatagaccatacaaatgtgcacacccaggctgtgagaaagccttcacacaactctccaatctgcagtcccaca

SEQ ID NO: 267502 - DNA, 120 bp, Artificial Sequence
  ENSG00000126746_12 (sequence is synthesized)
gtgaagcatgccaaggtgtacacctgcactatctgcagtcgggcatacacatcagaaacataccttatgaaacatatgcgcaaacacaacccgcctgatcttcagcaacaggtgcaggca

SEQ ID NO: 267503 - DNA, 120 bp, Artificial Sequence
  ENSG00000126746_13 (sequence is synthesized)
gcagcagcagcggcagcagtggcccaggcccaggctcaagctcaagcccaggctcaggctcaggctcaagcccaggcccaggcccaggcctcccaggcatcacagcagcagcagcagcag

SEQ ID NO: 267504 - DNA, 120 bp, Artificial Sequence
  ENSG00000126746_14 (sequence is synthesized)
agcagcagcagcagcagcagcaacagccaccaccacacttccagtctcctggggcagccccccagggtgggggtggtggggacagcaatcccaaccctccaccccagtgttcctttgacc

SEQ ID NO: 267505 - DNA, 120 bp, Artificial Sequence
  ENSG00000126746_15 (sequence is synthesized)
gacctgaccccgtataagacggcggagcatcataaggacatctgcctcactgtcaccaccagcaccatccaggtggagcacctggccagctcttagagatccgtgctgccacccactggg

SEQ ID NO: 267506 - DNA, 120 bp, Artificial Sequence
  ENSG00000126746_16 (sequence is synthesized)
aagaggaagaagtagtcctggtgtcttctttctccaactcttggtgggaaaagtccttttcttccttgacaggccttggctccatctccttgggcctctgtcacggctttccttcacagg

SEQ ID NO: 267507 - DNA, 120 bp, Artificial Sequence
  ENSG00000126746_17 (sequence is synthesized)
ataccatcctttttctgaactcttcttcaaaaggaacatcagccctcctgattgcaaaggaatactgagctgatggtgtcatccagcagcctcccctcccaagcaaagcttctaaaactg

SEQ ID NO: 267508 - DNA, 120 bp, Artificial Sequence
  ENSG00000126746_18 (sequence is synthesized)
ggggtcggtgctcaagggaaggatttgctatgacctcatagaaccttgtccagtgtggccacttaccctatccttaccctccttatcctcaaagtttgggctgatgtaagactagaggct

SEQ ID NO: 267509 - DNA, 120 bp, Artificial Sequence
  ENSG00000126746_19 (sequence is synthesized)
ggccctcccagataacagagaaaagggagccccaaatgcaaccagcctcttgttctattcttgcctgcaaaagaacagaggtttctcaaatgcctcagtccctgagagccatttcttccc

SEQ ID NO: 267510 - DNA, 120 bp, Artificial Sequence
  ENSG00000126746_20 (sequence is synthesized)
ctacatcgtctcactttgcttcctattgactgctggtagaaggagatttggggtaggggctagacctccttttatttgaagggggcaagggctgagatgtggtccccaaggggccagaaa

SEQ ID NO: 267511 - DNA, 120 bp, Artificial Sequence
  ENSG00000126746_21 (sequence is synthesized)
ttcccaagttggtcacaggtggcttagaagtgtgtgttatggttttacggatttccttgaagcctctctccttctctgcctacaaagaccctatactctcagtctccccaacccaccccc

SEQ ID NO: 267512 - DNA, 120 bp, Artificial Sequence
  ENSG00000126746_22 (sequence is synthesized)
aaggagctgtgggaggctttgtgttatctgtgaaactccaaaacaggggtgttgcggagaagggagagttcaaggcaaacgcaaggactggacttagctccctaggtgccacagtcagat

SEQ ID NO: 267513 - DNA, 120 bp, Artificial Sequence
  ENSG00000126746_23 (sequence is synthesized)
gccggacacggatttatatataaatatatatatataaatatattatactcactcatcacggccatctttgttgtaaccatttctgtgtttataaatgcattatctctgagaattttcata

SEQ ID NO: 267514 - DNA, 120 bp, Artificial Sequence
  ENSG00000126746_24 (sequence is synthesized)
gctatttccctccctccccccttttcgtttccggcgctcccgccttctctccgcagagctcttctctgagcctgttggggggagggaggggggcgtggaggaactggggttcgcgggagc

SEQ ID NO: 267515 - DNA, 120 bp, Artificial Sequence
  ENSG00000126746_25 (sequence is synthesized)
tcaggggcacagaccctcctcctcctccatctctaatgttctctgacccctggttacctgtggcctgggaacgaacaaggaccagtctctgagcctaggagtgaaacccaaacgctggtg

SEQ ID NO: 267516 - DNA, 120 bp, Artificial Sequence
  ENSG00000126746_26 (sequence is synthesized)
atagaattcgtcttagtttctgggaattggatttatttctcttgtatccacgtagagggtagcactagactgctgttattatatccacccgtctttggattgctggctggggggtctgcc

SEQ ID NO: 267517 - DNA, 120 bp, Artificial Sequence
  ENSG00000126746_27 (sequence is synthesized)
tgccttccagactgactgctgacaaataattcctgaggttctccacagttctctggtggctgcaccctgcctggcccctgtaacctagacaatttgtttacagaaagttcaggagccctg

SEQ ID NO: 267518 - DNA, 120 bp, Artificial Sequence
  ENSG00000126746_28 (sequence is synthesized)
cacaacaacccgcatgcggggggcgggggagagacctggctggaggagagacctggctggcatctgggagaaggaagaccaaacaacactggagattcaagtggacacagagcttctctg

SEQ ID NO: 267519 - DNA, 120 bp, Artificial Sequence
  ENSG00000126746_29 (sequence is synthesized)
gggcaagagctacgtcggggagctgcagtgactatatgatattcactgatccatgggagacagacacgtacctggagtagaaacaacttttctctaattttcctccctgaaaatactcat

SEQ ID NO: 267520 - DNA, 120 bp, Artificial Sequence
  ENSG00000126746_30 (sequence is synthesized)
gtcaggtaagtggtgttgctttcttgctctctccaagtctcagtagtaagttctgttactatggagactgaaggtacaccacatgctgttttactgggtcccccacccctgagaattatc

SEQ ID NO: 267521 - DNA, 120 bp, Artificial Sequence
  ENSG00000126746_31 (sequence is synthesized)
tagtgtttctgcctgggcttctctctagaaggccagaggtatgaagtgctcatccttgatccctaaggaggacagacactgaagtgtgctcacgagcaagcagaatcagcctctcaggct

SEQ ID NO: 267522 - DNA, 90 bp, Artificial Sequence
  ENSG00000126746_32 (sequence is synthesized)
aatgcattatctctgagaattttcatatttgatgttttgtttatttttgtcctttttttccctctctccacccctgtcctctagccacag

SEQ ID NO: 267523 - DNA, 120 bp, Artificial Sequence
  ENSG00000126746_33 (sequence is synthesized)
aaaatcaggaaaccagttgttataaagtaatttaaaaatgaagaaaaaaagaaaaaaacttatgtacaaaccaaggggtgtttttagaacattgtatagaaataaattcatgtaaaagga

SEQ ID NO: 267524 - DNA, 120 bp, Artificial Sequence
  ENSG00000126746_34 (sequence is synthesized)
gaagtcctcgaagaagtggggggaaggctagaggaagtggctgggcctgaactggcactgtgcctgccacaaggtcttgtgcatcccccagccctcagctttgccttctgaagccactcc

SEQ ID NO: 267525 - DNA, 120 bp, Artificial Sequence
  ENSG00000126746_35 (sequence is synthesized)
ttctccaatctgaggtgttgatcttccatgatcagtaccccaggctggagggctccaaggacatggggagtgggatatgtgtttgattattcaatcaaatttttattaagtgcctactgt

SEQ ID NO: 267526 - DNA, 120 bp, Artificial Sequence
  ENSG00000126746_36 (sequence is synthesized)
aaggaagggtctttgagaaaggggtaggggacgacatcaggagaaggctcccaggaactgtctcaggggagcgaaggttttgaggggacagctggggtctccagtagatagaccacggtg

SEQ ID NO: 267527 - DNA, 120 bp, Artificial Sequence
  ENSG00000126746_37 (sequence is synthesized)
tgaaccctaagaccatgttgcctgcacctactcctctctccacatgtattattctttccctttcacctttgcccattggtagcctcaacctcctattactgtctgtggaaattatatatc

SEQ ID NO: 267528 - DNA, 120 bp, Artificial Sequence
  ENSG00000126749_0 (sequence is synthesized)
attgttgcaagatggccgcgcccagtgatggattcaagcctcgtgaacgaagcggtggggagcaggcacaggactgggatgctctgccacccaagcggccccgactaggggcaggaaaca

SEQ ID NO: 267529 - DNA, 120 bp, Artificial Sequence
  ENSG00000126749_1 (sequence is synthesized)
agatcggaggccgtaggcttattgtggtgctggaaggggccagtctggagacagtcaaggtagggaagacatatgagctactcaactgtgacaagcacaagtctatattgttgaagaatg

SEQ ID NO: 267530 - DNA, 120 bp, Artificial Sequence
  ENSG00000126749_2 (sequence is synthesized)
gacgggaccctggggaagcgcggccagatatcacccaccagagtttgctgatgctgatggatagtcccctgaaccgagctggcttgctacaggtttatatccatacacagaagaatgttc

SEQ ID NO: 267531 - DNA, 120 bp, Artificial Sequence
  ENSG00000126749_3 (sequence is synthesized)
tgattgaagtgaatccccagacccgaattcccagaacctttgaccgcttttgtggcctcatggttcaacttttacacaagctcagtgttcgagcagctgatggcccccagaagcttttga

SEQ ID NO: 267532 - DNA, 120 bp, Artificial Sequence
  ENSG00000126749_4 (sequence is synthesized)
aggtaattaagaatccagtatcagatcactttccagttggatgtatgaaagttggcacttctttttccatcccggttgtcagtgatgtgcgtgagctggtgcccagcagtgatcctattg

SEQ ID NO: 267533 - DNA, 120 bp, Artificial Sequence
  ENSG00000126749_5 (sequence is synthesized)
tttttgtggtaggggcctttgcccatggcaaggtcagtgtggagtatacagagaagatggtgtccatcagtaactaccccctttctgctgccctcacctgtgcaaaacttaccacagcct

SEQ ID NO: 267534 - DNA, 120 bp, Artificial Sequence
  ENSG00000126749_6 (sequence is synthesized)
ttgaggaagtatggggggtcatttgacagtagtagaacctgttctgaaaccagaaactgttgatgtcacatcctttgaccctggtctgagctgactgctggaagatgatctttctgcact

SEQ ID NO: 267535 - DNA, 120 bp, Artificial Sequence
  ENSG00000126749_7 (sequence is synthesized)
gagactgtggagtttggggaagccaaggctgtacatttgctatttgtttatcctatgaatactgttcttgcaaacctggttgttttggggttcctaaagtatccagtggtgtaaaactgt

SEQ ID NO: 267536 - DNA, 120 bp, Artificial Sequence
  ENSG00000126749_8 (sequence is synthesized)
ttgttccccgggacttcagggacagataggaggttacagagtttgcagtttggttccatgctttgaaggcaggctttagctcccagattcccatgtgctaaaggagagaaccctgatgat

SEQ ID NO: 267537 - DNA, 120 bp, Artificial Sequence
  ENSG00000126749_9 (sequence is synthesized)
ggagaagaactgtgaaagagagcagtcaggaatgctagtggtgaaaaactgaacaaacagaagtgattttatctaatacagttccaaggtagaaaaagtggagcaggcagggccttgcac

SEQ ID NO: 267538 - DNA, 120 bp, Artificial Sequence
  ENSG00000126749_10 (sequence is synthesized)
ccctctccacccccccatggggggggtggtggtagcggcacatacacaatcatagtaaattggcagaagaaaaacacaatagattcctggctagatggggagagataaggcaatgtgcat

SEQ ID NO: 267539 - DNA, 120 bp, Artificial Sequence
  ENSG00000126749_11 (sequence is synthesized)
agattcctggctagatggggagagataaggcaatgtgcatgggggaatcagaggggagatgtgagcccctctgctcctcccacaagagtttcccctttgggccgggcacggtggctcacg

SEQ ID NO: 267540 - DNA, 120 bp, Artificial Sequence
  ENSG00000126749_12 (sequence is synthesized)
ggtggaggttgcggtgagctgagatcccgccactgcattccagcgtgggtgacaaagcaagacgccttctccaaaaaaaagtttcccctttggccccaaatgaagacttggctggcagca

SEQ ID NO: 267541 - DNA, 120 bp, Artificial Sequence
  ENSG00000126749_13 (sequence is synthesized)
gccccaaatgaagacttggctggcagcagaggcacagctggaagcatcgatcttccacctccctggcttttccattctctgctctggggcaaaggagtgctgtgaaaagggagacgagta

SEQ ID NO: 267542 - DNA, 120 bp, Artificial Sequence
  ENSG00000126749_14 (sequence is synthesized)
gtttctgcaccagtcccgcacaggccacctgcaagacaagaggagtttggaaggctggttagttactcctgtaattcctggtctatagcccttccagatgtttcctagcatgcctcaata

SEQ ID NO: 267543 - DNA, 120 bp, Artificial Sequence
  ENSG00000126749_15 (sequence is synthesized)
agtcacagtagtcattgcccatactgtgttccttagtagccaggctaatccttggaattcaccccagatttctaatactattgtttttttccagtctgttgctctattctgtaacctggt

SEQ ID NO: 267544 - DNA, 120 bp, Artificial Sequence
  ENSG00000126749_16 (sequence is synthesized)
ggtagttttagtttagctgtattaacttaccagggaaatggattattccatcttctttaacttctctttccttggcaccattgctttgtgaatataaggcaatatgaatagtaggctcag

SEQ ID NO: 267545 - DNA, 120 bp, Artificial Sequence
  ENSG00000126749_17 (sequence is synthesized)
gaagaagatgtggccaaggaaatagatggatttatacacctgtggagagagaggccactaaggtagacaggcctggagtgtcctttgcaacctttgaggttgcagtgagtccctcccagt

SEQ ID NO: 267546 - DNA, 120 bp, Artificial Sequence
  ENSG00000126749_18 (sequence is synthesized)
ctcacaagcaggccttcacttgccttaagccatttgtcccacgtgaagaggcagaaggcagtcatggagtaacccatgaagagccagtggatggtctgttgcaccaaatagtagaagggc

SEQ ID NO: 267547 - DNA, 120 bp, Artificial Sequence
  ENSG00000126749_19 (sequence is synthesized)
ggaggagctcatcagcatcttgtcccttatattccccttcacccccaccctggaggcctacctgtctttccacaataacaatgaggaattccatctggaagcagaccaggtatcctgagt

SEQ ID NO: 267548 - DNA, 120 bp, Artificial Sequence
  ENSG00000126749_20 (sequence is synthesized)
gcaggccgtgccagagggccaggaatagcaacgagagaccctgagagagttctttatttccaaggaacttgagtcgtttgaagatgtagctggagaaaagggtgggtggggcgaccctca

SEQ ID NO: 267549 - DNA, 120 bp, Artificial Sequence
  ENSG00000126749_21 (sequence is synthesized)
aactgactggtccttgcatcccgccacctgcctctgggtcctcaccctgaggattggattggagtgctggtgggttcccacgtgtagcccccagagggtacaggaggcagtgctgactga

SEQ ID NO: 267550 - DNA, 120 bp, Artificial Sequence
  ENSG00000126749_22 (sequence is synthesized)
ttacttttagagatggaaagcagacccaaggcggagctggagaccgtgtgcgcacgagccacttggttcagcagcagtgactgaggctgatgctgagatcagtggtgaaccagacactct

SEQ ID NO: 267551 - DNA, 120 bp, Artificial Sequence
  ENSG00000126749_23 (sequence is synthesized)
actcaagctgcccacactctagtggtggggacaaacaagtaaagctgttgataaacagggcagtggaggacataagtccattggcagagctggagtaacacccaggtcttaacgcacttt

SEQ ID NO: 267552 - DNA, 120 bp, Artificial Sequence
  ENSG00000126749_24 (sequence is synthesized)
tatatcttgcctttttttcaaatatgacagtaatggtttttttgggaggggggtataggtgggggtcaaagtcagtgtgagcgacagggggttctgcccagatgggaaagacgcataggg

SEQ ID NO: 267553 - DNA, 120 bp, Artificial Sequence
  ENSG00000126749_25 (sequence is synthesized)
gtgacatggtacacccctgccctccaatctgggaagacagtggaaggaaggaaccagggtccaggctccccaccagcagctcaccgggccacccaggcgttggtgttgatgttgaatgag

SEQ ID NO: 267554 - DNA, 120 bp, Artificial Sequence
  ENSG00000126749_26 (sequence is synthesized)
gcaatggtgccagtgaagcgggggtttgtttcaaagagccacaccttcatgttggcacaggcatcccactttgccttgcccttttcttcaaagccattgaagcccaggcccgtcaaaatg

SEQ ID NO: 267555 - DNA, 120 bp, Artificial Sequence
  ENSG00000126749_27 (sequence is synthesized)
catactccttcctgagagggaatagctcagttagggctcttgccactccccatactggcccccatggcttgtctaaataggaccttgtttcaacttttctacttactgtgaccagccaac

SEQ ID NO: 267556 - DNA, 120 bp, Artificial Sequence
  ENSG00000126749_28 (sequence is synthesized)
aggtgacatatttgtacagcacaaacttgccccagatcagcatgtacatgcagcggaaccagaaggggtggttcttgagggaagaaagcacagtgcattagggatatcacatgactaggc

SEQ ID NO: 267557 - DNA, 120 bp, Artificial Sequence
  ENSG00000126749_29 (sequence is synthesized)
agtttctctcagcactcttccttttcacacttgtggctggctacttcatacctgcctgagtcctgctgccagatgccctcaatagtctggcctgattgccttcacaataggcagagagga

SEQ ID NO: 267558 - DNA, 120 bp, Artificial Sequence
  ENSG00000126749_30 (sequence is synthesized)
ataagcagagggcctggagaatattcattcgcctttcccttggagagcctcaagggcagcactgtatttaacttctctactgtttgccttcgttggcaaagtgtttggaatgagcatttg

SEQ ID NO: 267559 - DNA, 120 bp, Artificial Sequence
  ENSG00000126749_31 (sequence is synthesized)
gaatgttaagtacagaggggcccatattggattttaatttaaggagagaaacctgcccagaattactgaactgttttcaagcctttcagctgggcaggagcaaaagccagcacttccccc

SEQ ID NO: 267560 - DNA, 120 bp, Artificial Sequence
  ENSG00000126749_32 (sequence is synthesized)
cttcccttggtttctgaattccctagaagtgcccaaatgtatcagtcaagagaagaaaataggatggagaatcagaagctgctgtgctctgaggggtcacgtggatgtgataaggcaagc

SEQ ID NO: 267561 - DNA, 120 bp, Artificial Sequence
  ENSG00000126749_33 (sequence is synthesized)
taggagcggctcctagagaaggcaacgggtgctaaatgtgcacctggcacagccctgtgcccgcgaaggttgttcagtgctggctgatgaacatgtcccagcacggctggcattgacaac

SEQ ID NO: 267562 - DNA, 120 bp, Artificial Sequence
  ENSG00000126749_34 (sequence is synthesized)
tcacagatctagagcaaaaccaacatgcacttgtagatgatatttcctacttctctgctatctgtagggatccttgcctgtccattttctagctctggtgcagtcatgctgctgctgctt

SEQ ID NO: 267563 - DNA, 120 bp, Artificial Sequence
  ENSG00000126749_35 (sequence is synthesized)
tagtagacactcacgtcatagtcttcagtgaggagatagtcttctgtgatgtgggggctgagcagtgtgtagcccactaggtagaaaaggcccagactcaggcgcttgagagcaggaatg

SEQ ID NO: 267564 - DNA, 120 bp, Artificial Sequence
  ENSG00000126749_36 (sequence is synthesized)
atgctggaaaggaacgagtgaagttcctggtcacagagagcagagactattcccttcaccctctgaccttcagttatggagaggagtgtttaggggtgtggttgtctacctggaatggga

SEQ ID NO: 267565 - DNA, 120 bp, Artificial Sequence
  ENSG00000126749_37 (sequence is synthesized)
tgagaagctctgctgcccaaagtgtttcctgtttcagggaaagatttctatggctggctatgaggaatggggactgcaaacctcttaagagttgtaggaaagtcagggcagcagacagtg

SEQ ID NO: 267566 - DNA, 120 bp, Artificial Sequence
  ENSG00000126749_38 (sequence is synthesized)
gaccagtcttgtgtttacccctcagggatgctactgatctcaaggtcttgccaggtctcacaatctccattgggactgaaaacccagtggaggtaagataataaaaataaccactttgaa

SEQ ID NO: 267567 - DNA, 120 bp, Artificial Sequence
  ENSG00000126749_39 (sequence is synthesized)
cctttgcccatggcaaggtgtctggatcgtatctattccagagtaaagtcatgatggctttatgacgttctgaggtgcgttttgcaggaggggacgttgttgagttccaaacaggtgagg

SEQ ID NO: 267568 - DNA, 120 bp, Artificial Sequence
  ENSG00000126749_40 (sequence is synthesized)
tattgcacactagcaaacacatgagaagaaggcggaggaattgggagaaaaataaaaagaatgcagcaggccaggttagcaggaacgttaagacggtgacggagaacagcaaagcctgga

SEQ ID NO: 267569 - DNA, 82 bp, Artificial Sequence
  ENSG00000126749_41 (sequence is synthesized)
acagctcactgcagtttcaacttcctgggttcaagtgatcctcctgcctgagcctcccaagtagctaggactataggtatgt

SEQ ID NO: 267570 - DNA, 120 bp, Artificial Sequence
  ENSG00000126749_42 (sequence is synthesized)
tttcaacttcctgggttcaagtgatcctcctgcctgagcctcccaagtagctaggactataggtatgtgccgccatgcccccaaaacaacagcaaattatgtgtgtgtgtgtgtgtgtgt

SEQ ID NO: 267571 - DNA, 120 bp, Artificial Sequence
  ENSG00000126749_43 (sequence is synthesized)
gcaagagatgcgacttgctctgttgtccagacttgagtgcagtagctcaatcatagctcactgcagccttgaattccgggctaccacacccagcttgttactgtatttttgaatgtctga

SEQ ID NO: 267572 - DNA, 120 bp, Artificial Sequence
  ENSG00000126749_44 (sequence is synthesized)
gaggaaaagggagaactaaatgtggatttttaagcgagaaaatgggagaacaacatgattaataccaggacaaggactgttattatttttctatgtttgtggaaactccactcctgttct

SEQ ID NO: 267573 - DNA, 120 bp, Artificial Sequence
  ENSG00000126749_45 (sequence is synthesized)
aaagagggagtctgaacccatcactgtacagctagccatatgcttggcaactgtttgttcctaacatttcaggagtccagtctagatataaagcacacagggaactcatcttatccatgg

SEQ ID NO: 267574 - DNA, 120 bp, Artificial Sequence
  ENSG00000126749_46 (sequence is synthesized)
ggttttccttgttcgatgactggacagaaggactgtggtctccatctagctctgaactcttttttcccccttctagttcaacttttacacaagctcagtgttcgagcagctgatggcccc

SEQ ID NO: 267575 - DNA, 120 bp, Artificial Sequence
  ENSG00000126749_47 (sequence is synthesized)
taacaatgcttacaatgagctagaagacacatgacagttccacaccctgccccagggcacatcctttgagggctgctgccataattggaagtcacagttaggaccttcttcatcctttgt

SEQ ID NO: 267576 - DNA, 120 bp, Artificial Sequence
  ENSG00000126749_48 (sequence is synthesized)
gccagatatcacccaccaggtaactccagggacagtgctcacaaccctttgagcctctgtatggaagggttggcagctgagtgctgcctctcttcagccttaaccatgtctcggtttctg

SEQ ID NO: 267577 - DNA, 120 bp, Artificial Sequence
  ENSG00000126752_0 (sequence is synthesized)
tcctggagcaatgacattgcagaatattttctcctcctccagccacactttgtcaccaactgctgccaactcgccaccactgctgccgacctcgcaaccactgctttgtctctgaagtga

SEQ ID NO: 267578 - DNA, 120 bp, Artificial Sequence
  ENSG00000126752_1 (sequence is synthesized)
gactgctcctggtgccatgaacggagacgacacctttgcaaagagacccagggatgatgctaaagcatcagagaagagaagcaaggcctttgatgatattgccacatacttctctaagaa

SEQ ID NO: 267579 - DNA, 120 bp, Artificial Sequence
  ENSG00000126752_2 (sequence is synthesized)
agagtggaaaaagatgaaatactcggagaaaatcagctatgtgtatatgaagagaaactataaggccatgactaaactaggtttcaaagtcaccctcccacctttcatgtgtaataaaca

SEQ ID NO: 267580 - DNA, 120 bp, Artificial Sequence
  ENSG00000126752_3 (sequence is synthesized)
ggccacagacttccaggggaatgattttgataatgaccataaccgcaggattcaggttgaacatcctcagatgactttcggcaggctccacagaatcatcccgaagatcatgcccaagaa

SEQ ID NO: 267581 - DNA, 120 bp, Artificial Sequence
  ENSG00000126752_4 (sequence is synthesized)
gccagcagaggacgaaaatgattcgaagggagtgtcagaagcatctggcccacaaaacgatgggaaacaactgcaccccccaggaaaagcaaatatttctgagaagattaataagagatc

SEQ ID NO: 267582 - DNA, 120 bp, Artificial Sequence
  ENSG00000126752_5 (sequence is synthesized)
agatgacgagtaactcccctgggggatacgacacatgcccttgatgagaagcagaacgtggtgacctttcacgaacatgggcatggctgcggctccctcgtcatcaggtgcatagcaagt

SEQ ID NO: 267583 - DNA, 120 bp, Artificial Sequence
  ENSG00000126752_6 (sequence is synthesized)
ttcttagtgtgccaagagttcgatgttagtgtttccattgtattttcttacagtgtgccattctgttagatactatccttataattgatgagcaagacatactgaatgcatatttcggtt

SEQ ID NO: 267584 - DNA, 120 bp, Artificial Sequence
  ENSG00000126752_7 (sequence is synthesized)
tgagcaagacatactgaatgcatatttcggtttgtgtatccatgcacctacgtcagaaaacaagtattgtcaggtattctctccatagaacagcactatcctcatctctccccagatgtg

SEQ ID NO: 267585 - DNA, 120 bp, Artificial Sequence
  ENSG00000126752_8 (sequence is synthesized)
ctccatagaacagcactatcctcatctctccccagatgtgactactgagggcagttctgagtgtttaatttcagactttttcctctgcatttacacacacacacacacacacacgcacac

SEQ ID NO: 267586 - DNA, 120 bp, Artificial Sequence
  ENSG00000126752_9 (sequence is synthesized)
ttcccattgccatgcgtcctggtcaagcccccctcactctgtttcctgttcagcatgtactcccctcatccgattcccctgtatcagtcactgacagttaataaacctttgcaaacgttc

SEQ ID NO: 267587 - DNA, 120 bp, Artificial Sequence
  ENSG00000126756_0 (sequence is synthesized)
cggaagccgcggttcctaccaaccgttcttattgctggcggcctgaggagcccatcatggcgacgccccctaagcggcgggcggtggaggccacgggggagaaagtgctgcgctacgaga

SEQ ID NO: 267588 - DNA, 120 bp, Artificial Sequence
  ENSG00000126756_1 (sequence is synthesized)
ccttcatcagtgacgtgctgcagcgggacttgcgaaaggtgctggaccatcgagacaaggtatatgagcagctggccaaataccttcaactgagaaatgtcattgagcgactccaggaag

SEQ ID NO: 267589 - DNA, 120 bp, Artificial Sequence
  ENSG00000126756_2 (sequence is synthesized)
gggatatggttttttcctggagttgacactggcagaagctctcaagttcattgatcgtaagagctctctcctcacagagctcagcaacagcctcaccaaggactccatgaatatcaaagc

SEQ ID NO: 267590 - DNA, 120 bp, Artificial Sequence
  ENSG00000126756_3 (sequence is synthesized)
ccatatccacatgttgctagaggggcttagagaactacaaggcctgcagaatttcccagagaagcctcaccattgacttcttccccccatcctcagacattaaagagcctgaatgccttt

SEQ ID NO: 267591 - DNA, 120 bp, Artificial Sequence
  ENSG00000126756_4 (sequence is synthesized)
gattgggtaccatttttttggtatgtgtgggcaagggagggaaatgggaagagagactccagacccaaccctgtcacctgacctaagagttcaccactgacccctacctctttttccctg

SEQ ID NO: 267592 - DNA, 120 bp, Artificial Sequence
  ENSG00000126756_5 (sequence is synthesized)
aacttcttcgttgacacagtggtgtgagtgtctacccgcccctctgagcccacagggttcagcttaccccttccctcatgcaacttatatttttttgagtatcttctatgtaccaggcac

SEQ ID NO: 267593 - DNA, 120 bp, Artificial Sequence
  ENSG00000126756_6 (sequence is synthesized)
tatgcgaggttttatatcccagtaggatataagctaggtgctggggatgtgacagtgaataaaataggacaaaatccctgccttcccagagcctcaatttggggaagggtggggagcaaa

SEQ ID NO: 267594 - DNA, 120 bp, Artificial Sequence
  ENSG00000126756_7 (sequence is synthesized)
ccgcgcttgggtgtccctgggtggtcgggtccccgagttgggaggggcggaaggctgaacctccagcttgagccggacaagccgattcccagcgttgagagggtagagatgaactgtgtg

SEQ ID NO: 267595 - DNA, 120 bp, Artificial Sequence
  ENSG00000126759_0 (sequence is synthesized)
gagcaccgcacactcacttcaccctggttcaacacccccacgaggttgaccccgtcattatgttagagattatgcattttccacatagggaaactgaggctcaggggtgttaagtgactc

SEQ ID NO: 267596 - DNA, 120 bp, Artificial Sequence
  ENSG00000126759_1 (sequence is synthesized)
acccaaggtcacacggctaggaagttgctgcacgctcctatgctccatttcctctgggagcctatcaacccagataaagcgggacctcctctctggtagaggtgcagggggcagtactca

SEQ ID NO: 267597 - DNA, 120 bp, Artificial Sequence
  ENSG00000126759_2 (sequence is synthesized)
acatgatcacagagggagcgcaggcccctcgattgttgctgccgccgctgctcctgctgctcaccctgccagccacaggctcagaccccgtgctctgcttcacccagtatgaagaatcct

SEQ ID NO: 267598 - DNA, 120 bp, Artificial Sequence
  ENSG00000126759_3 (sequence is synthesized)
ccggcaagtgcaagggcctcctggggggtggtgtcagcgtggaagactgctgtctcaacactgcctttgcctaccagaaacgtagtggtgggctctgtcagccttgcaggtccccacgat

SEQ ID NO: 267599 - DNA, 120 bp, Artificial Sequence
  ENSG00000126759_4 (sequence is synthesized)
ggtccctgtggtccacatgggccccctgttcggtgacgtgctctgagggctcccagctgcggtaccggcgctgtgtgggctggaatgggcagtgctctggaaaggtggcacctgggaccc

SEQ ID NO: 267600 - DNA, 120 bp, Artificial Sequence
  ENSG00000126759_5 (sequence is synthesized)
tggagtggcagctccaggcctgtgaggaccagcagtgctgtcctgagatgggcggctggtctggctgggggccctgggagccttgctctgtcacctgctccaaagggacccggacccgca

SEQ ID NO: 267601 - DNA, 120 bp, Artificial Sequence
  ENSG00000126759_6 (sequence is synthesized)
ggcgagcctgtaatcaccctgctcccaagtgtgggggccactgcccaggacaggcacaggaatcagaggcctgtgacacccagcaggtctgccccacacacggggcctgggccacctggg

SEQ ID NO: 267602 - DNA, 120 bp, Artificial Sequence
  ENSG00000126759_7 (sequence is synthesized)
gtggaccccacgaacctaaggagacacgaagccgcaagtgttctgcacctgagccctcccagaaacctcctgggaagccctgcccggggctagcctacgagcagcggaggtgcaccggcc

SEQ ID NO: 267603 - DNA, 120 bp, Artificial Sequence
  ENSG00000126759_8 (sequence is synthesized)
tgccaccctgcccagtggctgggggctgggggccttggggccctgtgagcccctgccctgtgacctgtggcctgggccagaccatggaacaacggacgtgcaatcaccctgtgccccagc

SEQ ID NO: 267604 - DNA, 120 bp, Artificial Sequence
  ENSG00000126759_9 (sequence is synthesized)
atgggggccccttctgtgctggcgatgccacccggacccacatctgcaacacagctgtgccctgccctgtggatggggagtgggactcgtggggggagtggagcccctgtatccgacgga

SEQ ID NO: 267605 - DNA, 120 bp, Artificial Sequence
  ENSG00000126759_10 (sequence is synthesized)
acatgaagtccatcagctgtcaagaaatcccgggccagcagtcacgcgggaggacctgcaggggccgcaagtttgacggacatcgatgtgccgggcaacagcaggatatccggcactgct

SEQ ID NO: 267606 - DNA, 120 bp, Artificial Sequence
  ENSG00000126759_11 (sequence is synthesized)
acagcatccagcactgccccttgaaaggatcatggtcagagtggagtacctgggggctgtgcatgcccccctgtggacctaatcctacccgtgcccgccagcgcctctgcacacccttgc

SEQ ID NO: 267607 - DNA, 120 bp, Artificial Sequence
  ENSG00000126759_12 (sequence is synthesized)
tccccaagtacccgcccaccgtttccatggtcgaaggtcagggcgagaagaacgtgaccttctgggggagaccgctgccacggtgtgaggagctacaagggcagaagctggtggtggagg

SEQ ID NO: 267608 - DNA, 120 bp, Artificial Sequence
  ENSG00000126759_13 (sequence is synthesized)
agaaacgaccatgtctacacgtgcctgcttgcaaagaccctgaggaagaggaactctaacacttctctcctccactctgagccccctgaccttccaaacctcaataaactagcctcttcg

SEQ ID NO: 267609 - DNA, 120 bp, Artificial Sequence
  ENSG00000126759_14 (sequence is synthesized)
ctgggacttccaagggtggccctgaggccctgatcgtgaccatacctcagggtttctcaaccttgttactattgacatttggggctggaaattcttggctgggggaggggattgcttacc

SEQ ID NO: 267610 - DNA, 120 bp, Artificial Sequence
  ENSG00000126759_15 (sequence is synthesized)
tgtgtattgtgggatgttttgtaacacccctagccttccactagatgccagtagcaattctccccaccagctgtgacaaccaaacatgtcagcagacattgccaaatgtcccctgggggt

SEQ ID NO: 267611 - DNA, 120 bp, Artificial Sequence
  ENSG00000126759_16 (sequence is synthesized)
caaaatcacccctgattgagaaccactgacatagctcacacatattgagcacctcctgcacactggaagcattgcaggtggggtgcagcttggtatttccctaattttgatgacagctca

SEQ ID NO: 267612 - DNA, 120 bp, Artificial Sequence
  ENSG00000126759_17 (sequence is synthesized)
tgtttattgagtgcttactgtatatggacacactgtgggggcgggaaagtttggggaattcaaagggcagctctaggcccctaattatgatgacacttcacattcattgagcactccctg

SEQ ID NO: 267613 - DNA, 120 bp, Artificial Sequence
  ENSG00000126759_18 (sequence is synthesized)
tataccagctgcatggcagggttgggagatgagcttgaggatttctgagggtagctctagtctcctgatcatgatttccagcttgcatggattgagcccttaccgtatgccagacctgtt

SEQ ID NO: 267614 - DNA, 120 bp, Artificial Sequence
  ENSG00000126759_19 (sequence is synthesized)
ttctacttgtttactatatatcccagatacaccgtgggcatggggagcttggggatttttgagggcagctctgggccccaagtcatgtcaacagttcatcacatctatttggcatgaaca

SEQ ID NO: 267615 - DNA, 120 bp, Artificial Sequence
  ENSG00000126759_20 (sequence is synthesized)
gcatacctagggctatgcagtgggttggggatagatctggggttatttctgaggaggcctctgaggtcatagggatgatggctcaggtttattaagcactttctatttacctactaccgt

SEQ ID NO: 267616 - DNA, 120 bp, Artificial Sequence
  ENSG00000126759_21 (sequence is synthesized)
gtagtgtggtgatctggtgggtttctgacagcagcccttggtttctagtccttacctttgcttactgcggacctggtgttggccatgcagccttccaatggtaactccagatgcctgatt

SEQ ID NO: 267617 - DNA, 120 bp, Artificial Sequence
  ENSG00000126759_22 (sequence is synthesized)
gtgaaggtaaatgacattatcaagcacttattgtatatccactgcttcccatcagtatcccaatatccctaaaaggtaaggacttatcaatccatcgcacacgcacttgcctagcaaccc

SEQ ID NO: 267618 - DNA, 120 bp, Artificial Sequence
  ENSG00000126759_23 (sequence is synthesized)
ggctaccccaggaaaccagggtttccactgctgaatctaaggtatctgccttgccgagtgccacctcccagctgcaggaagtggggagaaactaagaagatgagaaagaagttcttggag

SEQ ID NO: 267619 - DNA, 120 bp, Artificial Sequence
  ENSG00000126759_24 (sequence is synthesized)
gataattcgtagcctctgtgcccctcagtcacctgttcagtcactcatccacttagtccttcatgtgtcattgactccgaccttcagttacccatgcttttagctgccatcactcaggcc

SEQ ID NO: 267620 - DNA, 120 bp, Artificial Sequence
  ENSG00000126759_25 (sequence is synthesized)
tccattcactgcctgcctcccacagtcactcatgcctccatccactttgtcagcatctcactgagccaaggcactccaaggctttttcagcaacagttgcagatacacacagcccagatc

SEQ ID NO: 267621 - DNA, 120 bp, Artificial Sequence
  ENSG00000126759_26 (sequence is synthesized)
ctgtggatcctccaagggacccagctgagcaagcccctgacaggaggcatatgaggaacagctggtgcatgcaacaggtgctgccacctcaacctaggtccaggaagctgactgggcctc

SEQ ID NO: 267622 - DNA, 120 bp, Artificial Sequence
  ENSG00000126759_27 (sequence is synthesized)
ccagggcaggtaggggttgggaaaggcattcctggcatcaagactgtgaacggagccttggagctaggtgattagccgctataagtgtttccaggtgccagaggggcccaggtgttagag

SEQ ID NO: 267623 - DNA, 120 bp, Artificial Sequence
  ENSG00000126759_28 (sequence is synthesized)
agggttaaaatgttcatcccttttcttccttccacatacatcaagctactagattaagtgaactattcccagctcgtggaagggctgccatctgggaagggatctcccggctgagggggt

SEQ ID NO: 267624 - DNA, 120 bp, Artificial Sequence
  ENSG00000126759_29 (sequence is synthesized)
tagagtggggcctgaagattagaggtgttgaatggaggcacaaaggacttgagtgagcgagagactgagtggaggaagaagcaattgagagaactgggatgggagtgaatggagggcttt

SEQ ID NO: 267625 - DNA, 120 bp, Artificial Sequence
  ENSG00000126759_30 (sequence is synthesized)
cctagtgggacaaataacccaggtaaagacctttctggacagggactgagcttgaataaagtggaggagacagagagagagattggcttggggcagggatttgggcccaacaataaggcc

SEQ ID NO: 267626 - DNA, 120 bp, Artificial Sequence
  ENSG00000126759_31 (sequence is synthesized)
ttgaatgtcaggacaaggcattgggttttttcctggaggcagtggaaagagatataaagggtatatatttcggaggtaaaagaaagtagctcatgccaacaagtaacattcaccagcatt

SEQ ID NO: 267627 - DNA, 120 bp, Artificial Sequence
  ENSG00000126759_32 (sequence is synthesized)
tattgagcacttgctgtgtgccaggcactgctctgagcactttacctgaattaactcatttatcctcattcaaccccgtgaggtgagtattaatattactattcctaccattctcatttt

SEQ ID NO: 267628 - DNA, 120 bp, Artificial Sequence
  ENSG00000126759_33 (sequence is synthesized)
attcctaccattctcattttgcagatgagggaaaccgaggcacagagaagctaaagaaattgcccaatatcctatagctaaaaagtagtgttgggaggccaggcacagtggctcacgcct

SEQ ID NO: 267629 - DNA, 120 bp, Artificial Sequence
  ENSG00000126759_34 (sequence is synthesized)
cagcacagcacgggccaagacacagcagcctgttgcggaaaacagtattttccactgtggtcgcaggttggcaggagtgaaagcgagtgtgcagtcccagcctctccccgccgctgccat

SEQ ID NO: 267630 - DNA, 120 bp, Artificial Sequence
  ENSG00000126759_35 (sequence is synthesized)
aaccccaatgtctgggccctgcgcagcccccttagagcctcagggccgcccggcacgttcctctgcagagctccgcgttacgggtttcctgattggctacttgtcctggcaggcacttct

SEQ ID NO: 267631 - DNA, 120 bp, Artificial Sequence
  ENSG00000126759_36 (sequence is synthesized)
tgattggccggcgtgcttgttcgttgtctccccgtctcctggacctccctagattcccaccagccggaaccctggaggagcctctgccggccgactccgactccgcgtcagtcgaggatg

SEQ ID NO: 267632 - DNA, 120 bp, Artificial Sequence
  ENSG00000126759_37 (sequence is synthesized)
aacggcagaggcgtggccgaggctggcaccctgccgcccgagcacctgcacccacccactcccgacagcccagctccaatgccacaattaccagcgacaaatagctcggcgaggcggggg

SEQ ID NO: 267633 - DNA, 120 bp, Artificial Sequence
  ENSG00000126759_38 (sequence is synthesized)
gcgggccgaggaagtgcctgtgttgcgctctgagctgaggaggggcaaagaagctagagtcagtatccgcccggaggagcccccaagacaaatccagacactttcctctggtaatttgtt

SEQ ID NO: 267634 - DNA, 120 bp, Artificial Sequence
  ENSG00000126759_39 (sequence is synthesized)
cattcattcaacacttattagcgcctgctgtatgctaaagctgagtctgagcatctagggtggaggagggctggtagaaagaggacatctgagtgagggaacagactcagaaggtattcc

SEQ ID NO: 267635 - DNA, 120 bp, Artificial Sequence
  ENSG00000126759_40 (sequence is synthesized)
tttcgtgtgaacatctattcaacacttaacgcctactgtatactaacaatagtgctggacatcacggagaatagagaagaagaggaatcagagcgttacgtgtctccgcagtaaagggaa

SEQ ID NO: 267636 - DNA, 120 bp, Artificial Sequence
  ENSG00000126759_41 (sequence is synthesized)
caaagccagacaccagtgcttttagcatttgctcattcatttaccacttactgaatgccgggccccttgtgaagagacgcatcataagaatcataataatcatggtaatagctactactt

SEQ ID NO: 267637 - DNA, 120 bp, Artificial Sequence
  ENSG00000126767_0 (sequence is synthesized)
cgcgtatggagcccccgccccccggagctgccaacattgccaacgccaccgccacgctacacacaggtacccctgggatggcgtgagcactcccccagcgatggacccatctgtgacgct

SEQ ID NO: 267638 - DNA, 120 bp, Artificial Sequence
  ENSG00000126767_1 (sequence is synthesized)
gtggcagtttctgctgcagctgctgagagagcaaggcaatggccacatcatctcctggacttcacgggatggtggtgaattcaagctggtggatgcagaggaggtggcccggctgtgggg

SEQ ID NO: 267639 - DNA, 120 bp, Artificial Sequence
  ENSG00000126767_2 (sequence is synthesized)
gctacgcaagaacaagaccaacatgaattacgacaagctcagccgggccttgcggtactactatgacaagaacatcatccgcaaggtgagcggccagaagttcgtctacaagtttgtgtc

SEQ ID NO: 267640 - DNA, 120 bp, Artificial Sequence
  ENSG00000126767_3 (sequence is synthesized)
ctaccctgaggtcgcagggtgctccactgaggactgcccgccccagccagaggtgtctgttacctccaccatgccaaatgtggcccctgctgctatacatgccgccccaggggacactgt

SEQ ID NO: 267641 - DNA, 120 bp, Artificial Sequence
  ENSG00000126767_4 (sequence is synthesized)
ctctggaaagccaggcacacccaagggtgcaggaatggcaggcccaggcggtttggcacgcagcagccggaacgagtacatgcgctcgggcctctattccaccttcaccatccagtctct

SEQ ID NO: 267642 - DNA, 120 bp, Artificial Sequence
  ENSG00000126767_5 (sequence is synthesized)
gcagccgcagccaccccctcatcctcggcctgctgtggtgctccccagtgcagctcctgcaggggcagcagcgcccccctcggggagcaggagcaccagtccaagccccttggaggcctg

SEQ ID NO: 267643 - DNA, 120 bp, Artificial Sequence
  ENSG00000126767_6 (sequence is synthesized)
tctggaggctgaagaggccggcttgcctctgcaggtcatcctgaccccgcccgaggccccaaacctgaaatcggaagagcttaatgtggagccgggtttgggccgggctttgcccccaga

SEQ ID NO: 267644 - DNA, 120 bp, Artificial Sequence
  ENSG00000126767_7 (sequence is synthesized)
agtgaaagtagaagggcccaaggaagagttggaagttgcgggggagagagggtttgtgccagaaaccaccaaggccgagccagaagtccctccacaggagggcgtgccagcccggctgcc

SEQ ID NO: 267645 - DNA, 120 bp, Artificial Sequence
  ENSG00000126767_8 (sequence is synthesized)
cgcggttgttatggacaccgcagggcaggcgggcggccatgcggcttccagccctgagatctcccagccgcagaagggccggaagccccgggacctagagcttccactcagcccgagcct

SEQ ID NO: 267646 - DNA, 120 bp, Artificial Sequence
  ENSG00000126767_9 (sequence is synthesized)
gctaggtgggccgggacccgaacggaccccaggatcgggaagtggctccggcctccaggctccggggccggcgctgaccccatccctgcttcctacgcatacattgaccccggtgctgct

SEQ ID NO: 267647 - DNA, 120 bp, Artificial Sequence
  ENSG00000126767_10 (sequence is synthesized)
gacacccagctcgctgcctcctagcattcacttctggagcaccctgagtcccattgcgccccgtagcccggccaagctctccttccagtttccatccagtggcagcgcccaggtgcacat

SEQ ID NO: 267648 - DNA, 120 bp, Artificial Sequence
  ENSG00000126767_11 (sequence is synthesized)
cagaagccatgactactaccaccaccaccaccaccccttctggggtcactccatccatgctctctccagccagccatctcaaggagaaacatagttcaactgaaagactcatgctctgat

SEQ ID NO: 267649 - DNA, 120 bp, Artificial Sequence
  ENSG00000126767_12 (sequence is synthesized)
tgtggtggggtggggatccttgggaagaattactcccaagagtaactctcattatctcctccacagaaaacacacagcttccacaacttctctgttttctgtcagtcccccagtggccgc

SEQ ID NO: 267650 - DNA, 120 bp, Artificial Sequence
  ENSG00000126767_13 (sequence is synthesized)
ccttacacgtctcctacttcaatggtaggggcggtttatttatttattttttgaaggccactgggaggagcctgacctaaccttttagggtggttaggacatctcccccacctccccact

SEQ ID NO: 267651 - DNA, 120 bp, Artificial Sequence
  ENSG00000126767_14 (sequence is synthesized)
tttttccccaagacaagacaatcgaggtctggcttgagaacgacctttctttctttatttctcagcctgcccttggggagatgagggagccctgtctgcgtttttggatgtgagtagaag

SEQ ID NO: 267652 - DNA, 120 bp, Artificial Sequence
  ENSG00000126767_15 (sequence is synthesized)
agttagtttgttttgttttattattcctggccatactcaggggtccaggaagaatttgtaccatttaatgggttgggagtcttggccaaggaagaatcacacccttggaatagaaatttc

SEQ ID NO: 267653 - DNA, 120 bp, Artificial Sequence
  ENSG00000126767_16 (sequence is synthesized)
cacctccccaacctttctctcagacagcttatccttttcaaccaactttttggccagggaggaatgtcccttttgttcttccccctgagaagccattcctttgtctgccaacctccctgg

SEQ ID NO: 267654 - DNA, 120 bp, Artificial Sequence
  ENSG00000126767_17 (sequence is synthesized)
ggtcctgcctgtttcctcccaatggagggtttttttggggggtggtccccgtctggggggcccctccagccagtactccaggtctccctgtctctcccccgctgccattttgatagtata

SEQ ID NO: 267655 - DNA, 120 bp, Artificial Sequence
  ENSG00000126767_18 (sequence is synthesized)
atctatttttaaatggggcttttcaataggggagagggagtcatctcttcctatatttggtggggtgggtgggaaggaagggatttgggggggaatcttcctgccgcctcccccactcca

SEQ ID NO: 267656 - DNA, 120 bp, Artificial Sequence
  ENSG00000126767_19 (sequence is synthesized)
agtgtttatttttgataccaaacatgaattttcagttccctccctcccagccccccaatttcctgcgggcgggtacaaaggaccctttcaatgtccctggagttgggagggaggaatggg

SEQ ID NO: 267657 - DNA, 120 bp, Artificial Sequence
  ENSG00000126767_20 (sequence is synthesized)
ggacataaagcctgtcctgtctctattctaggcaagagagagtgggttcaaaagactcctgggctcacctgttagcgctggcccagcccaggccttgggacctgggggttggtgatttgg

SEQ ID NO: 267658 - DNA, 120 bp, Artificial Sequence
  ENSG00000126767_21 (sequence is synthesized)
gggacagtgctacactcgtctccactgtttgttttacttccccaaaatggaccttttttttttctaaagagtcccagagaatggggaattgttcctgtaaatatatatttttcaaagtga

SEQ ID NO: 267659 - DNA, 120 bp, Artificial Sequence
  ENSG00000126767_22 (sequence is synthesized)
ctaggtgctgccgccgccaccgccaccaccacctccaccgccgcctcggaacccaggcctggggggcggtggggccgcgtatggagcccccgccccccggagctgccaacattgccaacg

SEQ ID NO: 267660 - DNA, 120 bp, Artificial Sequence
  ENSG00000126767_23 (sequence is synthesized)
ccaccgccacgctacacacagcctcaactttcaggagacccgtccgtggccttatttattccacccttcctgtacatcgtagcgaatcaatccgtggcgccgcactcctccgcatccctc

SEQ ID NO: 267661 - DNA, 120 bp, Artificial Sequence
  ENSG00000126767_24 (sequence is synthesized)
tacaataagtgaatacattagcgccagtgatgatagtaatgccaataggagctagcgtttattgagcacctgccgtatatcaggcagagtgtttcatatgaatgagttcctttaatcctc

SEQ ID NO: 267662 - DNA, 120 bp, Artificial Sequence
  ENSG00000126767_25 (sequence is synthesized)
accacaaccccatgagataggtagtgagggaattgggccatagggaggttaaattccttactcaaaggtggcccaggaagtactcaggacacaggataatttttgaggctcccctcttag

SEQ ID NO: 267663 - DNA, 120 bp, Artificial Sequence
  ENSG00000126767_26 (sequence is synthesized)
atctcatcccaccccacgtgaggcctcagtccttaaaaaccaaattagttctcacctccaagcttttgttcttgctgttccctctgcctgcagagcagtcttcattcctcaccttctctc

SEQ ID NO: 267664 - DNA, 120 bp, Artificial Sequence
  ENSG00000126768_0 (sequence is synthesized)
tgggggagcagagggcagcacttcctccagctccaaaagagtgcacccaccccaacgttaccaatacactcgtgcaggcggaaagctccgacgccggtgtgcgtctacgctgggggcgtg

SEQ ID NO: 267665 - DNA, 120 bp, Artificial Sequence
  ENSG00000126768_1 (sequence is synthesized)
gcctgactgcgcggccagacgccagcgccatggaggagtacgctcgggagccctgcccatggcgaattgtggatgattgcggtggagccttcactatgggtgtcatcggtggcggagtct

SEQ ID NO: 267666 - DNA, 120 bp, Artificial Sequence
  ENSG00000126768_2 (sequence is synthesized)
tccaggccatcaagggtttccgcaatgcccctgttggaattcggcaccggttgagaggtagtgccaatgctgtgaggatccgagccccccagattggaggtagcttcgcagtgtgggggg

SEQ ID NO: 267667 - DNA, 120 bp, Artificial Sequence
  ENSG00000126768_3 (sequence is synthesized)
ggcccactggccatggtgggctcagcaatgatggggggcatcctgttggccctcattgagggcgttggcatcctcctcactcgctacacagcccagcagttccgaaatgcgcccccattc

SEQ ID NO: 267668 - DNA, 120 bp, Artificial Sequence
  ENSG00000126768_4 (sequence is synthesized)
ctggaggaccccagccagctgccccctaaggatggcaccccggccccaggctaccccagctatcagcagtaccactgaggaagccactgccaccatgggagctacttctcggttccctcc

SEQ ID NO: 267669 - DNA, 120 bp, Artificial Sequence
  ENSG00000126768_5 (sequence is synthesized)
ccgatggtctacctcgaagggagggctggctcccagttagccctgggaccctccagagagggtttctactctgctccctagtcccagggtgggggtggggcaccccagctgccctgacag

SEQ ID NO: 267670 - DNA, 120 bp, Artificial Sequence
  ENSG00000126768_6 (sequence is synthesized)
atgggtcccctttttctctctcagggcaccccagccccacactcacatgtacgaagttctcaccccagctcctttgtgtggcaccctgatgagtatttaaagcccgttttgaaatgccta

SEQ ID NO: 267671 - DNA, 120 bp, Artificial Sequence
  ENSG00000126768_7 (sequence is synthesized)
caagggtttccgcaatgcccctgttgtgagtccaggccttccctgggttggtgtggggttagctatcttgcccacaagggaggctgctctgaaaactgcttggagctgccagtcacgtgc

SEQ ID NO: 267672 - DNA, 120 bp, Artificial Sequence
  ENSG00000126768_8 (sequence is synthesized)
acttattcattctggtgcccactcacctactatgtgccgagcctggctcctgtatctgggattttgtagggattgcaaacatggcctctgtcttccaccctccaccccacccaactggag

SEQ ID NO: 267673 - DNA, 120 bp, Artificial Sequence
  ENSG00000126768_9 (sequence is synthesized)
cctccaccccacccaactggagctcctctgtggaaatgctgtgtcgttcaaagagtcatcaccaaattttaaatgtatgtgcaaagccagacagttttttttttttttgagacagtcttg

SEQ ID NO: 267674 - DNA, 64 bp, Artificial Sequence
  ENSG00000126768_10 (sequence is synthesized)
ctgcctcctgggttcagacctgacgaatttttgtaattttagtagaaatggggtttcactatgt

SEQ ID NO: 267675 - DNA, 120 bp, Artificial Sequence
  ENSG00000126768_11 (sequence is synthesized)
tttccgcaatgcccctgtttgcagattgctgtctgaagctcccttgtttatctactcttgctcaagatctgtgtctcccaccgttaatgtgagctctgagagggcagagagcagacctac

SEQ ID NO: 267676 - DNA, 120 bp, Artificial Sequence
  ENSG00000126768_12 (sequence is synthesized)
ggaggagtacgctcgggagccctggtacggcaatgggcacaggcatccggaatattgctgcgacgccaaggccagccgtgggggtcgggcgggggaggcatcggccgcacagagccatgt

SEQ ID NO: 267677 - DNA, 120 bp, Artificial Sequence
  ENSG00000126768_13 (sequence is synthesized)
accagactcgggggactcttaacgtatctcccgctacccccactcggttcctgtcattcgggctccgttatgaggggccacaaccagagaagcccatggcgaattgtggatgattgcggt

SEQ ID NO: 267678 - DNA, 120 bp, Artificial Sequence
  ENSG00000126768_14 (sequence is synthesized)
catcggtggcggagtcttccaggccatcaagggtttccgcaatgcccctgttagacggggtttcaacgtgttgcttaggctggtctctaattcctgaactcaagtgatccacccacctca

SEQ ID NO: 267679 - DNA, 120 bp, Artificial Sequence
  ENSG00000126768_15 (sequence is synthesized)
ggtgttagccactgcgcattttacctagaggcagattctggctcagaaacccggatagaggaaaatgacaggaatttaattggcagacggaagacagccttgaagttgagagaattcttt

SEQ ID NO: 267680 - DNA, 120 bp, Artificial Sequence
  ENSG00000126768_16 (sequence is synthesized)
taacataattctttttctctgaccacctcccctcccagaagatcgcaaatgccatgactttaaatgccatctattagccaaggtctctgcaatttatatatgtagccccgtccctcccct

SEQ ID NO: 267681 - DNA, 120 bp, Artificial Sequence
  ENSG00000126768_17 (sequence is synthesized)
agactcctggaactctcctccctggatctttgcccaagtttgtcatcctcaaggtctcagcacagattccccctccttcaagaggcctttcctgacccctcagccccagtcatatttctt

SEQ ID NO: 267682 - DNA, 120 bp, Artificial Sequence
  ENSG00000126768_18 (sequence is synthesized)
ggagcattgaccggggctgtgctggctgcccgcagtgagtgacccctggccctggccccagccccttccaccctgttctgcctgctctcacctctgtttctctgcctccaactcccccag

SEQ ID NO: 267683 - DNA, 120 bp, Artificial Sequence
  ENSG00000126768_19 (sequence is synthesized)
ggtgcgacgcggtcctgctttgctgacagtctgtcttggctagttaacacgcctatgtcgcttattgaaacgtcaactctgcgtgtgccaattcatttaatctttgatcacagtaaaacc

SEQ ID NO: 267684 - DNA, 120 bp, Artificial Sequence
  ENSG00000126773_0 (sequence is synthesized)
aacgacgctcttgcgtaaaggcccggcccaagggaacgttcagggcgtctcggctttccccgctgctgcttctgctaggcccagtgcgagaccagagcacgagcgactcccgtcgtcccc

SEQ ID NO: 267685 - DNA, 120 bp, Artificial Sequence
  ENSG00000126773_1 (sequence is synthesized)
ggccaggcagatgttggcctagtcctggcgcgaacgaagcgcgctatttccctgcttcctctaggccaagcctgctttacggcagggcccgcctcgggagcgagcacagaccggggcagc

SEQ ID NO: 267686 - DNA, 120 bp, Artificial Sequence
  ENSG00000126773_2 (sequence is synthesized)
gaggccagccaggcgccgacgaggtccccgaacgcgcacgcgctccgttcagctccgggtggcggccgccggagtagacgttagccatggaaaccgagagctggcccgggcggggccgcg

SEQ ID NO: 267687 - DNA, 120 bp, Artificial Sequence
  ENSG00000126773_3 (sequence is synthesized)
gtgagctcgttattcggccgccgcagcttttctgcctccgcattcgggcactaaccaacctcccggcgggagcgcccagcccgagtttacctgcaaaaatgcggtccctgggatgccttc

SEQ ID NO: 267688 - DNA, 120 bp, Artificial Sequence
  ENSG00000126773_4 (sequence is synthesized)
gcgtcttctcttccctcgggtgacttgaggtttgtggtaaatatgccagctctagaacacatgaatcagattttacacatcttgtttgtatttttaccctttctgtgggcacttgggact

SEQ ID NO: 267689 - DNA, 120 bp, Artificial Sequence
  ENSG00000126773_5 (sequence is synthesized)
ctgcccccacccgatgcacttctcttatgggcaatggagcaggttttagagttcggccttggaggctcatctatgtcaacccacttacggttattagtaatgttcatcatgtctgctgga

SEQ ID NO: 267690 - DNA, 120 bp, Artificial Sequence
  ENSG00000126773_6 (sequence is synthesized)
acagctatagcatcatatttcattccaagcactgttggtgtggttcttttcatgactggatttggtttcttgctgagtctgaacttaagtgatatgggtcacaaaattggaaccaaatct

SEQ ID NO: 267691 - DNA, 120 bp, Artificial Sequence
  ENSG00000126773_7 (sequence is synthesized)
aaggatttacccagtggtccggaaaaacatttttcatggaaggaatgccttttctacatcattatattagtcttggctcttttagaaactagcttgcttcatcactttgctggcttctca

SEQ ID NO: 267692 - DNA, 120 bp, Artificial Sequence
  ENSG00000126773_8 (sequence is synthesized)
cagatttctaaaagcaattcccaggctattgtgggctatggtttgatgatattacttataatactgtggatacttagagaaattcaaagcgtatatatcattggaattttccgaaatccc

SEQ ID NO: 267693 - DNA, 120 bp, Artificial Sequence
  ENSG00000126773_9 (sequence is synthesized)
ttttatccgaaggatgtgcaaactgtgactgtattctttgagaagcaaactaggctcatgaagattggtattgtcagacggattttgctaactttagtatcaccttttgccatgatagca

SEQ ID NO: 267694 - DNA, 120 bp, Artificial Sequence
  ENSG00000126773_10 (sequence is synthesized)
tttctttcattggacagttccttacaagggctccactcagtgtctgtctgtattggattcacaagagcctttagaatggtatggcagaatacagaaaatgctttattggagacagtcatt

SEQ ID NO: 267695 - DNA, 120 bp, Artificial Sequence
  ENSG00000126773_11 (sequence is synthesized)
gtatcaacagtacacttgatctccagtacagacatatggtggaacagaagcctggatacaggactcagactcttactggttggtatcatacgtgatcgtttgattcagttcatctctaaa

SEQ ID NO: 267696 - DNA, 120 bp, Artificial Sequence
  ENSG00000126773_12 (sequence is synthesized)
ttgcagtttgccgtgactgtgcttttgacatcatggacagagaaaaaacaacgtcgaaaaacaactgccactttatgtatactcaacattgtcttttctccattcgtgttggtcatcata

SEQ ID NO: 267697 - DNA, 120 bp, Artificial Sequence
  ENSG00000126773_13 (sequence is synthesized)
gttttttctacactactctcttctcccttactccctcttttcacccttcctgtgttcttggtggggtttccccgacctattcagagttggccaggagcagcaggcaccacagcctgtgtg

SEQ ID NO: 267698 - DNA, 120 bp, Artificial Sequence
  ENSG00000126773_14 (sequence is synthesized)
tgtgcagatacagtgtactactaccaaatggtgcccaggttgactgctgtactgcagactgcaatggcagctggaagtttaggtctcctcctacctggatctcattacttgggccgtttt

SEQ ID NO: 267699 - DNA, 120 bp, Artificial Sequence
  ENSG00000126773_15 (sequence is synthesized)
caggatcgtttaatgtggataatgattctggaatgtggctatacttactgctctattaacattaaggggttagaattgcaggaaacatcctgtcatactgcagaagctcgcagagttgat

SEQ ID NO: 267700 - DNA, 120 bp, Artificial Sequence
  ENSG00000126773_16 (sequence is synthesized)
gaagtttttgaagatgcttttgagcaagaatacacaagagtatgttcccttaatgaacactttggaaatgtcttgacaccctgtactgttttgcctgtgaaattgtattctgatgccagg

SEQ ID NO: 267701 - DNA, 120 bp, Artificial Sequence
  ENSG00000126773_17 (sequence is synthesized)
aatgttctatcaggcataattgattctcatgaaaacttaaaagaatttaaaggtgacctcattaaagtacttgtgtggatacttgttcaatactgctccaaaaggcctggcatgaaagag

SEQ ID NO: 267702 - DNA, 120 bp, Artificial Sequence
  ENSG00000126773_18 (sequence is synthesized)
aatgttcacaacactgaaaataaagggaaagcacctctaatgttgcctgctttgaacactttgccacctcccaaatccccagaagacatagacagtttaaattcagaaacttttaatgac

SEQ ID NO: 267703 - DNA, 120 bp, Artificial Sequence
  ENSG00000126773_19 (sequence is synthesized)
tggtctgatgataatatttttgatgatgagccaactatcaaaaaagtaatagaagaaaaacatcagttgaaagatttgccaggtacaaatttgtttattccaggatcagtagaatcacag

SEQ ID NO: 267704 - DNA, 120 bp, Artificial Sequence
  ENSG00000126773_20 (sequence is synthesized)
agggttggtgatcattctacaggcactgttcctgaaaacgatctttacaaagcagttctattaggataccctgctgttgacaaaggaaaacaagaggacatgccatatattcctctcatg

SEQ ID NO: 267705 - DNA, 120 bp, Artificial Sequence
  ENSG00000126773_21 (sequence is synthesized)
gagttcagttgttcacattctcacttagtatgcttacccgcagagtggaggactagctgtatgcccagttccaaaatgaaggagatgagctcgttatttccagaagactggtaccaattt

SEQ ID NO: 267706 - DNA, 120 bp, Artificial Sequence
  ENSG00000126773_22 (sequence is synthesized)
gttctaaggcagttggaatgttatcattcagaagagaaggcctcaaatgtactggaagaaattgccaaggacaaagttttaaaagacttttatgttcatacagtaatgacttgttatttt

SEQ ID NO: 267707 - DNA, 120 bp, Artificial Sequence
  ENSG00000126773_23 (sequence is synthesized)
agtttatttggaatagacaatatggctcctagtcctggtcatatattgagagtttacggtggtgttttgccttggtctgttgctttggactggctcacagaaaagccagaactgtttcaa

SEQ ID NO: 267708 - DNA, 120 bp, Artificial Sequence
  ENSG00000126773_24 (sequence is synthesized)
ctagcactgaaagcattcaggtatactctgaaactaatgattgataaagcaagtttaggtccaatagaagactttagagaactgattaagtaccttgaagaatatgaacgtgactggtac

SEQ ID NO: 267709 - DNA, 120 bp, Artificial Sequence
  ENSG00000126773_25 (sequence is synthesized)
attggtttggtatctgatgaaaagtggaaggaagcaattttacaagaaaagccatacttgttttctctggggtatgattctaatatgggaatttacactgggagagtgcttagccttcaa

SEQ ID NO: 267710 - DNA, 120 bp, Artificial Sequence
  ENSG00000126773_26 (sequence is synthesized)
gaattattgatccaagtgggaaagttaaatcctgaagctgttagaggtcagtgggccaatctttcatgggaattactttatgccacaaacgatgatgaagaacgttatagtatacaagct

SEQ ID NO: 267711 - DNA, 120 bp, Artificial Sequence
  ENSG00000126773_27 (sequence is synthesized)
catccactacttttaagaaatcttacggtacaagcagcagaacctcccctgggatatccgatttattcttcaaaacctctccacatacatttgtattagagctcattttgactgtaatgt

SEQ ID NO: 267712 - DNA, 120 bp, Artificial Sequence
  ENSG00000126773_28 (sequence is synthesized)
catcaaatgcaatgtttttattttttcatcctaaaaaagtaactgtgattcttgtaacttgaggacttctccacacccccattcagatgcctgagaacagctaagctccgtaaagttggt

SEQ ID NO: 267713 - DNA, 120 bp, Artificial Sequence
  ENSG00000126773_29 (sequence is synthesized)
tctcttagccatcttaatggttctaaaaaacagcaaaaacatctttatgtctaagataaaagaactatttggccaatatttgtgccctctggactttagtaggctttggtaaatgtgaga

SEQ ID NO: 267714 - DNA, 120 bp, Artificial Sequence
  ENSG00000126773_30 (sequence is synthesized)
aaacttttgtagaattatcatataatgaattttgtaatgctttcttaaatgtgttataggtgaattgccatacaaagttaacagctatgtaatttttacatacttaagagataaacatat

SEQ ID NO: 267715 - DNA, 120 bp, Artificial Sequence
  ENSG00000126773_31 (sequence is synthesized)
cagtgttctaagtagtgataatggatcctgttgaaggttaacataatgtgtatatatttgtttgaaatataatttatagtattttcaaatgtgctgatttattttgacatctaatatctg

SEQ ID NO: 267716 - DNA, 120 bp, Artificial Sequence
  ENSG00000126773_32 (sequence is synthesized)
aatgtttttgtatcaagtagtttgttttcatagacttcaattcataaactttaaaaaacttttaataaaatattttccttccttttcaaatatccttctaatatatgtgaaaggagcggg

SEQ ID NO: 267717 - DNA, 120 bp, Artificial Sequence
  ENSG00000126773_33 (sequence is synthesized)
gttcatcccattcatcatgtgaatattcacaggaagagcaatgttagggtaatctgcatatgactactaaagcatatatctgactcattatgtatttctttcaactgaatttactgcttc

SEQ ID NO: 267718 - DNA, 120 bp, Artificial Sequence
  ENSG00000126773_34 (sequence is synthesized)
tgaaaaatgatttacccaacaggactaccagttactagtgtcttaaggtatatgaactaaagtcagaaggagatggaagaaaatttttataatacgatctgaattttattttcattctct

SEQ ID NO: 267719 - DNA, 120 bp, Artificial Sequence
  ENSG00000126773_35 (sequence is synthesized)
tcttgcttaggaacgttttacagatacatgtaagggggattaataatgaatccacatcagttgagagatcagtttcctctaattcttacttaatttccaatgaaatcagtaggagccccc

SEQ ID NO: 267720 - DNA, 120 bp, Artificial Sequence
  ENSG00000126773_36 (sequence is synthesized)
tagatttataataatgtattctccttagaaatcattcaaattatatgaaatgtaccagttaagttgttattagtattccatttatttagtatgtggacgagttcactctaacaatgttaa

SEQ ID NO: 267721 - DNA, 120 bp, Artificial Sequence
  ENSG00000126773_37 (sequence is synthesized)
aggataaactttttggaccaattttcagttaatgaattcaagagatttgtatgttattctttttttggaggtaatatagtacagttactaagataggattttgtattactctgagtttac

SEQ ID NO: 267722 - DNA, 120 bp, Artificial Sequence
  ENSG00000126773_38 (sequence is synthesized)
atctcagacttatgatttaatttacatgattgagatttgctagctgtacacctttatatctttgtcatgtagaaatattttctcatgtcgttaaaagtacttgtaattatcagctttttt

SEQ ID NO: 267723 - DNA, 120 bp, Artificial Sequence
  ENSG00000126773_39 (sequence is synthesized)
ggcgtgagccaccgtgcccagccataattatcacttttaatgacagcataaaattccattgatagatattatttattggactactgtcccccaaataatgtgaattttaagttgtttaga

SEQ ID NO: 267724 - DNA, 120 bp, Artificial Sequence
  ENSG00000126773_40 (sequence is synthesized)
aatgtgaattttaagttgtttagagattttcactgtgataataatgtcaagctatgccttcgcttaaccttgcatcctcctcaaagtgctcccatatctccatttcattcatagccaggt

SEQ ID NO: 267725 - DNA, 120 bp, Artificial Sequence
  ENSG00000126773_41 (sequence is synthesized)
tttctctttcatttacttgtcaaatcattccaatctggatcccatctccatgactctcccaaattaaaaaaaaaaaaagtttttattaaggtcactattgacctttttattgtcaaacca

SEQ ID NO: 267726 - DNA, 120 bp, Artificial Sequence
  ENSG00000126773_42 (sequence is synthesized)
gctagtagtaattgacacatttgaccattccttgaagcagcttttgtgttttcttttgaactttcctgacactacattatctttgttttcttcttatcttcctagcaactcctcaaacat

SEQ ID NO: 267727 - DNA, 120 bp, Artificial Sequence
  ENSG00000126773_43 (sequence is synthesized)
ctttgctgcctctcctcttctacctgacctctaaattttagaatttctcaacaattgattctaggcccccctttgtgtttctgcaatcaccatagataatctcatctacttcaagacttg

SEQ ID NO: 267728 - DNA, 120 bp, Artificial Sequence
  ENSG00000126773_44 (sequence is synthesized)
aaatatcatcaataaattgatgatgatcaaatatatgtacctaacccaacctctcttcttacactgaacctatatatatcacttatttggtatcttcacttggtatattaaaaactgact

SEQ ID NO: 267729 - DNA, 120 bp, Artificial Sequence
  ENSG00000126773_45 (sequence is synthesized)
gttagattttgaagggaaggtgagagttaaagaaagacacacagagggcagcttgacagcaaatgcagactttatgtctagcataaaacctacagaagtgggggaccagcttaatgccag

SEQ ID NO: 267730 - DNA, 120 bp, Artificial Sequence
  ENSG00000126773_46 (sequence is synthesized)
agcccaccgctgcttacaggctgggcgtacttataggcatgggtgagaggggtctgggcagtatggcttgctgctcggcaggatattgataagatgctcccatgatgaggtggttctggc

SEQ ID NO: 267731 - DNA, 120 bp, Artificial Sequence
  ENSG00000126773_47 (sequence is synthesized)
ccttgttgtggtgggatgtcatcatagtattccttggaactttgcccagcaagatatgatagggatatttcttaggttgggcctttttccgccttgtggtcaggtggttaggcagcatgt

SEQ ID NO: 267732 - DNA, 120 bp, Artificial Sequence
  ENSG00000126773_48 (sequence is synthesized)
ttctcactgcccgaacccctgtgaaatgttttactttgatcaaggtctgcaaaatagcggggagcttacaaaatggtgcagtttggactaacactaacgttactgaattttccctaaaac

SEQ ID NO: 267733 - DNA, 120 bp, Artificial Sequence
  ENSG00000126773_49 (sequence is synthesized)
ctacttttctacttctaacttttagtggtgcattcataccaactatttcagagaactagcaatgccaggcaaaatagtattttaaaatctgcttaaaggcattagagaaccaaaagacag

SEQ ID NO: 267734 - DNA, 120 bp, Artificial Sequence
  ENSG00000126773_50 (sequence is synthesized)
tgaagaataacatcactaagatctaagacagaatgaaacttagagacctgagctcagcatttgggctgcttttcttataggagacatgccaattcaggataaggtggttgagagtctgag

SEQ ID NO: 267735 - DNA, 120 bp, Artificial Sequence
  ENSG00000126773_51 (sequence is synthesized)
acgctaagtaacacttataacagccttgctgctgagttagagggacaaaaactggagaccaagactctccaaggaagtaggggaggggaaaggaatcctagttaactgaccatacattgg

SEQ ID NO: 267736 - DNA, 120 bp, Artificial Sequence
  ENSG00000126773_52 (sequence is synthesized)
gttgtgaccccaaggaccatatccaaattgtaagggtgaagaaaaaccagatgcagttaggatcttctcacttcccaaaactggattcaggtgaccctttgctgcagccgctacccagag

SEQ ID NO: 267737 - DNA, 120 bp, Artificial Sequence
  ENSG00000126773_53 (sequence is synthesized)
caaatgtaaatcctctctggactgatcttttgagttatttttataacttttcatgtttagtgttggaaagttatttaaggtatctgaggaaacaagacaacatgatgaaaatccgaaaga

SEQ ID NO: 267738 - DNA, 120 bp, Artificial Sequence
  ENSG00000126773_54 (sequence is synthesized)
agcgacagatgatgggacagagccacaggggacccagataatgagctatacaacacagggtctaaaattactatgtttagtgtgtttaaagatctaaaacacaagattgagaatttcagc

SEQ ID NO: 267739 - DNA, 120 bp, Artificial Sequence
  ENSG00000126773_55 (sequence is synthesized)
gagaatttcagcagaaaatcagaaactatatagaagaatcaatcaacaagtccccaacttaaaagtacattaatcaagtttaagaattcagtgaataggccgggcgcggtggctcacgcc

SEQ ID NO: 267740 - DNA, 120 bp, Artificial Sequence
  ENSG00000126773_56 (sequence is synthesized)
tccatctcaaaaagaaaaaaaaaaaaaaaggattcagtgaatagatttgatagaaagtgcatacagtgaagtaagaattagtgaactagaagttatgtcagaagtaaataccagatgtga

SEQ ID NO: 267741 - DNA, 120 bp, Artificial Sequence
  ENSG00000126773_57 (sequence is synthesized)
aaaactaagagacaaaagaatagaaaatatagtagagagtataagagacatagagttaacttgagaagatctaacatacacgtaactggatttccaggagaagagagaatatggcagaag

SEQ ID NO: 267742 - DNA, 120 bp, Artificial Sequence
  ENSG00000126773_58 (sequence is synthesized)
caacctgtgaggagataatgactgagaattctccaagtttttaagacatgaagacctgcaagatcaaagcatgataaataaaaacaaaattacaacttagcacatcctaagaaaaaataa

SEQ ID NO: 267743 - DNA, 120 bp, Artificial Sequence
  ENSG00000126773_59 (sequence is synthesized)
aacacaaaaagaaaatcattaaaggagccagacaatgataaaagacattacttttaaaggaggcacaattttattaaactgacagctaacttctcaacagaaaatatgggaagcagaaat

SEQ ID NO: 267744 - DNA, 120 bp, Artificial Sequence
  ENSG00000126773_60 (sequence is synthesized)
caatggcatgatattttcaggttactgaaagaaaatatctgcaattttagaattcaatacccagcctttccccaaaaacaattcttaagaatgaaggcaaagacactttcaaacgcaaca

SEQ ID NO: 267745 - DNA, 120 bp, Artificial Sequence
  ENSG00000126773_61 (sequence is synthesized)
aatttaatagcagattgtcattaaaggtgatagtaaagggtattcttcagacagaaggaaaaagatcccagaaaaaggttagagataaaggtaggaatgaacagtaatttaaaaatatat

SEQ ID NO: 267746 - DNA, 120 bp, Artificial Sequence
  ENSG00000126773_62 (sequence is synthesized)
atatacagtttaagtgaatattaactatataaaatagtcttcgaggttaaaataaataatgttaaaatgtgacaataatatacaaatttggtgcaggaattctaaggtcagaattatcag

SEQ ID NO: 267747 - DNA, 120 bp, Artificial Sequence
  ENSG00000126773_63 (sequence is synthesized)
aaagaagattaaagtataaataagactgctgtgtcatctatagggtaaccactaaaagaacagcaaaaagcaaaataaaacaatcgtagaactacaaagctaatacagggctaaagtgga

SEQ ID NO: 267748 - DNA, 120 bp, Artificial Sequence
  ENSG00000126773_64 (sequence is synthesized)
ataataaggcaaaaaggtagagaaaatatagaacaaataggacaaatagaaatcaaacagtagattaggaggtttaaatatcagttacaacattcatatgaatagacagtgtaccaatta

SEQ ID NO: 267749 - DNA, 120 bp, Artificial Sequence
  ENSG00000126773_65 (sequence is synthesized)
aatgcaaagatcatcaaagtgaaaagaaagaaaacccacaaagtacctttatgcaagagatgtcttaagtataggaatacaaaggtttgaagtaaacaagaatggaaaaattataatatg

SEQ ID NO: 267750 - DNA, 120 bp, Artificial Sequence
  ENSG00000126773_66 (sequence is synthesized)
aaatacaaaaaacaaaaacgatagggcaggggactatggtggctattgcaacattattcaatgtagaccttaaggtgaaaagtattacaaagagagacaatttgtaatgataaaagattt

SEQ ID NO: 267751 - DNA, 120 bp, Artificial Sequence
  ENSG00000126773_67 (sequence is synthesized)
gattcaccagaaagtttcaacaggtctaatattttaatgatttaacaatatagcctcaaatatataagcagaaatgaacagaactaaaatgagaaaagacaagtctgcattcccagattt

SEQ ID NO: 267752 - DNA, 120 bp, Artificial Sequence
  ENSG00000126773_68 (sequence is synthesized)
aataatactttaaaacttaacctaattggcatatatgaaacagaatacccaacaactgcaaaatacacattattttcaaatgcagatagaatatttatcaaaactgaccatattccaagt

SEQ ID NO: 267753 - DNA, 120 bp, Artificial Sequence
  ENSG00000126773_69 (sequence is synthesized)
ggaatggaatatattctttggccatgtatcattcacttagaaatcaataataatttcaaaaatagaaaaattctattaagttcataaattaagaaatacacttttaaataactcatggat

SEQ ID NO: 267754 - DNA, 120 bp, Artificial Sequence
  ENSG00000126773_70 (sequence is synthesized)
ggatcagacaataaattacaatgaaaattagaatatatttgaactgagtagtgaaagtgctacatgtcaaaacttatggtagacgcctaaagccatgcttagaaggaaatttatagtctt

SEQ ID NO: 267755 - DNA, 120 bp, Artificial Sequence
  ENSG00000126773_71 (sequence is synthesized)
aaacgcacattaaaaaaaaaagattgaaaatgaacctagtagttaaaatattctaagaatagcaaattaaacctgaagaaaataaaggaaataataaagaacaagaattaatggagtaga

SEQ ID NO: 267756 - DNA, 120 bp, Artificial Sequence
  ENSG00000126773_72 (sequence is synthesized)
aaatgaagataaagtggatcaactaagccaaaagttgattctttgaaaagataattgataagtgtctggtagactgaaaaaggaagaaacacaaacaaccaatatcaggaatgaaaggat

SEQ ID NO: 267757 - DNA, 120 bp, Artificial Sequence
  ENSG00000126773_73 (sequence is synthesized)
attacaaatcctagagtcatctgacaaaatatgtgcacaacttcatgccaattagttggaaattttagatgaagtgaataaattctttaaactatggaagagccaaaattgacaaatgaa

SEQ ID NO: 267758 - DNA, 120 bp, Artificial Sequence
  ENSG00000126773_74 (sequence is synthesized)
aaaatagaaaattcgagtagttccctatctgctaaagaagtggaacctatagttactttatttgcttttccatagtgaaacaacaagcctagatggattgattcgtcaatggaaagacaa

SEQ ID NO: 267759 - DNA, 120 bp, Artificial Sequence
  ENSG00000126773_75 (sequence is synthesized)
tcttaaattcttacaaagagcagtagaaatgcaggaaccctccccaactcattttatgatgccagaaaacctagataccaaaacctggcaaaaactttatgagaaagggacctatttcat

SEQ ID NO: 267760 - DNA, 120 bp, Artificial Sequence
  ENSG00000126773_76 (sequence is synthesized)
tccccccaacatcaatgcaaaaatcccaaacaaaatactagcaaactaaactacacacatacacacacacacacacacccctacacacacagaataatcacaatcaagttgggtttcttc

SEQ ID NO: 267761 - DNA, 120 bp, Artificial Sequence
  ENSG00000126773_77 (sequence is synthesized)
ctgaaaaagtgaggttggtgtgatagttgcaaatcaatcaatatgattcaacacattaacagaatgaaaggagaaaaataatatttcagtagatccagaaaaagtatttgataaaccagt

SEQ ID NO: 267762 - DNA, 120 bp, Artificial Sequence
  ENSG00000126773_78 (sequence is synthesized)
atccactcataaaaagtttgctttttaatattcatctttatttttcttatcttgagtatgcacataagatgttcagagtcagagatagatttcttattactcagggtaaacaagtgcacc

SEQ ID NO: 267763 - DNA, 120 bp, Artificial Sequence
  ENSG00000126773_79 (sequence is synthesized)
tgcccacctttgcactcgtccatatcccccagagcaacctgataagaaactcatgggattttggctatgtaagtggccaaatactgcataggcaagggacagggaaaattaattttccct

SEQ ID NO: 267764 - DNA, 120 bp, Artificial Sequence
  ENSG00000126773_80 (sequence is synthesized)
acttataaagatgaaagaggcagccatcctcttcccttcctgaaagagtctgcttttactctattcttgtggtagacaaagtctctccaaaagccagatagccaaccccatgtgtctcca

SEQ ID NO: 267765 - DNA, 120 bp, Artificial Sequence
  ENSG00000126773_81 (sequence is synthesized)
agagctgtctcctacatcccagggaatacctaggaagatagcatattagaaatgaggaaaggtctcagcacaataacctaagttcccaccacaagaaacaagaaaaagaatagcaaaata

SEQ ID NO: 267766 - DNA, 120 bp, Artificial Sequence
  ENSG00000126773_82 (sequence is synthesized)
agcccaaagcaggcaaaagaaaggaaataaccaaaagcagaaatcaatgaaactgcaaatagaaaaatacataaacaaaaaactggttcttcaaaaaacaatcaagaaaatccataaacc

SEQ ID NO: 267767 - DNA, 120 bp, Artificial Sequence
  ENSG00000126773_83 (sequence is synthesized)
tgtagaaagactgacaaaaagaaaaaacacaaatcattattatcaagaatgaaatgaagagtatcactataaatcaggcagtcattaaaaagataatgaggaaatactgtaactttcggc

SEQ ID NO: 267768 - DNA, 120 bp, Artificial Sequence
  ENSG00000126773_84 (sequence is synthesized)
ttatacacatgacaacttagaagaaataatctgattcttgaaaaccacaaactattaaaactcaaccaagatgaaataatctgaatatcctataaccattaaagaattaaattcataatt

SEQ ID NO: 267769 - DNA, 120 bp, Artificial Sequence
  ENSG00000126773_85 (sequence is synthesized)
taaaatctcctgataaaagaaatctccagacccagatgccctggcttctttgaggttcttccatgttgttttatgtatcaatcattcattattttttatcgctgagtagtgctgcatggt

SEQ ID NO: 267770 - DNA, 120 bp, Artificial Sequence
  ENSG00000126773_86 (sequence is synthesized)
atagaatataacagtttgtttataccattcacctgttgatggacatttgttggttccagttttgggctattatgtaaagctgctatgagcattcatttacaagtctttatgtggacataa

SEQ ID NO: 267771 - DNA, 120 bp, Artificial Sequence
  ENSG00000126773_87 (sequence is synthesized)
gctttcatttctcttgggcaaatacctaggactgggatggctaaatcatatgataagtgtatatttaaatttttaaggaactgctaaaagtctttttcaagttaattgtaccttttgaca

SEQ ID NO: 267772 - DNA, 120 bp, Artificial Sequence
  ENSG00000126773_88 (sequence is synthesized)
ttcccgccagcagtttatgtgtacaaaatgtataattacatttatgtaaaactataaaatgcaaactaatctataataatgcaagcacatcattggttgcctggaatggggtgggcgagg

SEQ ID NO: 267773 - DNA, 120 bp, Artificial Sequence
  ENSG00000126773_89 (sequence is synthesized)
ggaaatgattacaaaagggcaaagggaaacttctggggctgatatatgtgtttactctcttgattgtggttatggttcacaagtgtagccatatggcaaaacttaacaaattgtacactt

SEQ ID NO: 267774 - DNA, 120 bp, Artificial Sequence
  ENSG00000126773_90 (sequence is synthesized)
taaatatatgcagtttatcatacatcaattatacctcagtaaaggtgtcagaaataacaggatatttatatttaaatctacctttgaattaccgattgtgactgaggtctcatgtggctt

SEQ ID NO: 267775 - DNA, 120 bp, Artificial Sequence
  ENSG00000126773_91 (sequence is synthesized)
actggtgaatccagtagttgaggaaacgaaagccgtcacttctgctaactcttttaccaactcacctgctgtcaccttacacaaccccaactgtgtttcagctttggagtaatgaacaca

SEQ ID NO: 267776 - DNA, 120 bp, Artificial Sequence
  ENSG00000126773_92 (sequence is synthesized)
ccattttcttcctacttaaaagtccactcaggataatgattaagaaatacattgatgccgagtaataaatactttaaaaaaagttaaatgtgaacatttggctttcacagctcttgactg

SEQ ID NO: 267777 - DNA, 120 bp, Artificial Sequence
  ENSG00000126773_93 (sequence is synthesized)
tctttggcgaaccttgacataaagctgccttttccatcttgggctgctgacaaaaaagcctaagaaagaaagagggtgtgtacagaaaattacatgccatagaaaaataccatacacagg

SEQ ID NO: 267778 - DNA, 84 bp, Artificial Sequence
  ENSG00000126773_94 (sequence is synthesized)
gtattgcggtgaactgagatagtgccactgtactctagcctgggcgacacagtaagactccatctccaaaagaaagaaagaaag

SEQ ID NO: 267779 - DNA, 120 bp, Artificial Sequence
  ENSG00000126773_95 (sequence is synthesized)
cgacacagtaagactccatctccaaaagaaagaaagaaagaaagaaaaaaatgccatacagatgaatctttaaagattttaatttatatatacctcttctaccattcattggctggagta

SEQ ID NO: 267780 - DNA, 120 bp, Artificial Sequence
  ENSG00000126773_96 (sequence is synthesized)
gttgaacagacatcagcaggcacaatgctaggcaggcactggagattcagtgatgaataaaacaaaactgacctggaacctggcctcctgaagcttctcttcatctgtctaaattccttt

SEQ ID NO: 267781 - DNA, 120 bp, Artificial Sequence
  ENSG00000126773_97 (sequence is synthesized)
ctttcaaggcccagtgcaagtgacaccttcatcaggaagggcttccacatgattctatctgcaaatctcccttttctgaactattatgcttatagtctgtaccaggccacatgacatatg

SEQ ID NO: 267782 - DNA, 120 bp, Artificial Sequence
  ENSG00000126773_98 (sequence is synthesized)
ttattttgtggcattctagaattattccaatcttttcattcttataattggtgtgttgtattcaataaataatgttgttattccagttttcatcactggtcacgcaagagtcctctcttt

SEQ ID NO: 267783 - DNA, 120 bp, Artificial Sequence
  ENSG00000126773_99 (sequence is synthesized)
attatattttatccccatagttcaccccgtttcctccccatcctaagtaactattaccatacctaaatatatatctaattaggttgtatgttttcttgcaaaatgagcactatcttctgt

SEQ ID NO: 267784 - DNA, 120 bp, Artificial Sequence
  ENSG00000126773_100 (sequence is synthesized)
gcacatatatttgtgtatgtgaacagtattgtgttagcgttgcttctttatttcttcacttatgactatgcctctagtacatatccatgttgttatgtatgcatttattccattgcttct

SEQ ID NO: 267785 - DNA, 120 bp, Artificial Sequence
  ENSG00000126773_101 (sequence is synthesized)
acccgctatacctcatcgtgtacctctaccacatgtcatcttcccccttttccaaggacagccacttgggtggcttccaacttgcccaacaactattctacagttattttatgtatgtta

SEQ ID NO: 267786 - DNA, 120 bp, Artificial Sequence
  ENSG00000126773_102 (sequence is synthesized)
ctttggctccagctcaattgtgaactgcttgtagataaggaccatgtttttctttacctgttactcctgctgatttcctattagtgcctgtgcatgttttctgctgtaaggtgttaaatg

SEQ ID NO: 267787 - DNA, 120 bp, Artificial Sequence
  ENSG00000126773_103 (sequence is synthesized)
ttaaagtaaaattaataatagtagaagtaaggagttgccagtggaatcttcctgagctgaatctaatcatggctttaccccttactagctttgtgaccttgaccttggaaaagtaaaacc

SEQ ID NO: 267788 - DNA, 120 bp, Artificial Sequence
  ENSG00000126773_104 (sequence is synthesized)
ttgttggtctttcttcatctatcaaggtaggtaataccatctatcttagtgggctgttatgaggaatgagttaattaactaatactaagcactccagtacagtagaagacatacaacagg

SEQ ID NO: 267789 - DNA, 120 bp, Artificial Sequence
  ENSG00000126773_105 (sequence is synthesized)
tgtttaatgaataataggtgcaatgaatcctacctgctgcttcaaattacagccatctgtacctgtcaacttttctaagagtataagcatcttggaggtaaggtcatttcaaatacttct

SEQ ID NO: 267790 - DNA, 120 bp, Artificial Sequence
  ENSG00000126773_106 (sequence is synthesized)
ttatatctggtcattacccagcactctgctttgtgtgaaatattctatacatttatgttgctatggtttggatgtttttgtcccctccaaaattcatgtcgaaacttaatccccaaagca

SEQ ID NO: 267791 - DNA, 120 bp, Artificial Sequence
  ENSG00000126773_107 (sequence is synthesized)
acagtattaaaggatgtggcctttaagaggtgactgagtaatgaatgagattaaatgctcttttgaaagcattttgctcctctttcccttctgtcccttccaccatgtgaggacatacat

SEQ ID NO: 267792 - DNA, 120 bp, Artificial Sequence
  ENSG00000126773_108 (sequence is synthesized)
tcctccactgtggaggatgcagcaatgaggtgccatcttggaagcagagatcagccttcaccagacactaattctgctggtgcattggtcttggaattcccagcctcaagagccaggaaa

SEQ ID NO: 267793 - DNA, 120 bp, Artificial Sequence
  ENSG00000126773_109 (sequence is synthesized)
aacagatttctgttgtttataaattaccaaatctgtggtattttgttatagcagcacaaatggactaagacaaatctgttaacttagattttaagcatatgtgctaaagtattttaaaag

SEQ ID NO: 267794 - DNA, 120 bp, Artificial Sequence
  ENSG00000126773_110 (sequence is synthesized)
gttattttatccaagaatatagtatgagttaataccttttttgcaagattcatggcaatcttttattatttattttttatttcattccatgttggaagcaaagtcatatctattaaaaag

SEQ ID NO: 267795 - DNA, 120 bp, Artificial Sequence
  ENSG00000126773_111 (sequence is synthesized)
taaaatcacaaattagtctttgattattcagaagcataagaagattgctgttttcatgttttccatttctccctccagtggcttgaaaagtacaggtgctcttttcagtcatgttttgtc

SEQ ID NO: 267796 - DNA, 120 bp, Artificial Sequence
  ENSG00000126773_112 (sequence is synthesized)
ttaaagattttaaaataagaagagtctgcatcctgtaaaagagggacagaaacatggatcagtacctactcctatttactccagtttttaacatttaagtccttctgttttgaggagctg

SEQ ID NO: 267797 - DNA, 120 bp, Artificial Sequence
  ENSG00000126773_113 (sequence is synthesized)
tatcattatgattcactattaagaatctttacaaaagttcagaaactgcttaaattagaatttaaaaatcatagccaaaattctagatgtacacaaaagtacttctaatgagtttagcat

SEQ ID NO: 267798 - DNA, 120 bp, Artificial Sequence
  ENSG00000126773_114 (sequence is synthesized)
catctctggtttagaggaggtataaatagcattggactgcaatgctaaattctctataatgacttttctggatcagcatatcatacctacactgacttgccctaataaataaaaacaatg

SEQ ID NO: 267799 - DNA, 120 bp, Artificial Sequence
  ENSG00000126773_115 (sequence is synthesized)
acactgacttgccctaataaataaaaacaatgagtcagattatgtagaattgagatatatggaagataactctttaaaattatttgtggccaggcaggcactgtggctcatgcctgtaat

SEQ ID NO: 267800 - DNA, 89 bp, Artificial Sequence
  ENSG00000126773_116 (sequence is synthesized)
tgagactgggaaactctgtctcaaaaaaaataaaaagaaaaaaaaattatttgtgaactttttgtatattgcttaaggaataaaacaag

SEQ ID NO: 267801 - DNA, 120 bp, Artificial Sequence
  ENSG00000126773_117 (sequence is synthesized)
tttgtgaactttttgtatattgcttaaggaataaaacaaggcaacctgataatccccaagatgtgatgtttcttttcagaagatatgcatttaccactttcaaaactttgcactaagaaa

SEQ ID NO: 267802 - DNA, 120 bp, Artificial Sequence
  ENSG00000126773_118 (sequence is synthesized)
gacaaaataataataatgataatacaaaattcagtgtagccactgttcttgatccctaaaaataataaagattcataaaaacaaagttccagacatacagactaaagaagcaaattctag

SEQ ID NO: 267803 - DNA, 120 bp, Artificial Sequence
  ENSG00000126773_119 (sequence is synthesized)
ttaacaagtactattagcttgaaataagctatgctagcattttcttaacttagacgcttatcaataagaaaatttatatatatacatatatataaaatataaaatagtgggagagaggaa

SEQ ID NO: 267804 - DNA, 120 bp, Artificial Sequence
  ENSG00000126773_120 (sequence is synthesized)
gagtacagactataaagaatgaggtattatgtcctaaaaattgctttgagaaatgacagaatgcccagcttataataaagagtgacaaagtagtaagactatataataagcaatatttca

SEQ ID NO: 267805 - DNA, 120 bp, Artificial Sequence
  ENSG00000126773_121 (sequence is synthesized)
aagatggtggtaggaagaaaaaggctgtcatttttttagaaaaacctagatgtaaaaaaaatgcgagatttgctaaatgatgtttatattttacagttagatattctctaaacaaaacaa

SEQ ID NO: 267806 - DNA, 120 bp, Artificial Sequence
  ENSG00000126773_122 (sequence is synthesized)
aatatccttcatatggacatttctggaagtactactacagtgggactgaaattctctagtccctggtccctctttcccctttgaaaaaaaaatcacttctataatatattctttctctgc

SEQ ID NO: 267807 - DNA, 120 bp, Artificial Sequence
  ENSG00000126773_123 (sequence is synthesized)
cctattatttaaattgagaatgtgaaccagtacagacattatggaaaatacggaaattcctcaaaaaattaaaaatagaattaccatctgatccagcaattccacttaagggtataaatc

SEQ ID NO: 267808 - DNA, 120 bp, Artificial Sequence
  ENSG00000126773_124 (sequence is synthesized)
taaaggaagtgaaatcagtaccttgaagtgatacctacactcccatgttcattttagcattattcataatagccaagatatggaaacaacctaagtgtccattagtgaatgaatggataa

SEQ ID NO: 267809 - DNA, 120 bp, Artificial Sequence
  ENSG00000126773_125 (sequence is synthesized)
agaaaatgtgtgtgtgtgtctgtgtgtgtatatatatatatggaatattattccacaatggaatatttttcagccataaaacaatggaactcctggcatttgtgaaaacatggataatga

SEQ ID NO: 267810 - DNA, 120 bp, Artificial Sequence
  ENSG00000126773_126 (sequence is synthesized)
atggacgttaatgctaagtgatataagcaagatacagaaaaacaagtactatgtgatttcacttctgtggaatctaaaaagtcatactcaaaagcagagtagaatgatggttgccaggag

SEQ ID NO: 267811 - DNA, 120 bp, Artificial Sequence
  ENSG00000126773_127 (sequence is synthesized)
tgatggttgccaggagccagaagatggaggaaatggggagatcttggtcaaaaggtacacattttggccaggcacagtggctcacacctatgatcccaacactttgggaggccaaggtag

SEQ ID NO: 267812 - DNA, 120 bp, Artificial Sequence
  ENSG00000126773_128 (sequence is synthesized)
caggagtttgagactagcctgggcaacgtggcaaaaacccgtctctacaaaaactacaaaacctagccaggcatggtggtgtgcgcctatagtctcagctactcaggaggctggggtggg

SEQ ID NO: 267813 - DNA, 82 bp, Artificial Sequence
  ENSG00000126773_129 (sequence is synthesized)
ggctggggtgggaggattgcttgagcctgggaggtagagatgggagtgagccatgatcacgccactgcaggaaaaaaaatgg

SEQ ID NO: 267814 - DNA, 120 bp, Artificial Sequence
  ENSG00000126773_130 (sequence is synthesized)
gttataagataaataacttatgttattataatttacagattctaaggatctaatataccgcatggtgactacagttaataatactgtatagcatatttgaaatttgctaagaagatttta

SEQ ID NO: 267815 - DNA, 120 bp, Artificial Sequence
  ENSG00000126773_131 (sequence is synthesized)
agtgttctcaccacacacaaaaaaaggtaactgggtgacatgtattaattagcttgattgtggtaatcattttacagtgtatattagatcatcacaatgtataccttaaatatatataat

SEQ ID NO: 267816 - DNA, 120 bp, Artificial Sequence
  ENSG00000126773_132 (sequence is synthesized)
ttttatgtgtcaattataaagaaaatctttgatcattaaggaagctgaatatcctgctatatctaactcaagctgagaagggggaaaaagcacaatagctaacacttagaacactccaag

SEQ ID NO: 267817 - DNA, 120 bp, Artificial Sequence
  ENSG00000126773_133 (sequence is synthesized)
ttgtgttttaagtgcttttcatatattaaattcatgtaattcccataacaatcctgtgactgggcactattatcatcattaatctccatcttatattaatagatggggagactgagtgat

SEQ ID NO: 267818 - DNA, 120 bp, Artificial Sequence
  ENSG00000126773_134 (sequence is synthesized)
agagaagtaacttgctttaagggcatggggcagagctgggatttgaacccaggtagcctagcaccaggctgcatgctctgccaggaggctgtgcttcctctgtagtaaggtggcctgtcc

SEQ ID NO: 267819 - DNA, 120 bp, Artificial Sequence
  ENSG00000126773_135 (sequence is synthesized)
ctctcaactctttccatcactgggcacaaagctactgcatcagctgtcctccatatttaaaactcaggtatactctttgatgaaactctacctttagagcttctacccacactaccaagt

SEQ ID NO: 267820 - DNA, 120 bp, Artificial Sequence
  ENSG00000126773_136 (sequence is synthesized)
cccaacaataccaaaacactcataagggatctggcccaaagcaaactgttccacattactacttggtagaaaacgaaaagctcctttttgatttttcacactctggacattttagtgtgt

SEQ ID NO: 267821 - DNA, 120 bp, Artificial Sequence
  ENSG00000126773_137 (sequence is synthesized)
catgacccagtctgataaccttttatgtctcttaagcattttgttgtgtttgtaactttttaccccctaattcattttcactgtcctgcaaagagttggaataaattaaatgtctaacaa

SEQ ID NO: 267822 - DNA, 120 bp, Artificial Sequence
  ENSG00000126773_138 (sequence is synthesized)
ccctcgggtgacttgagaaactgctgtgttacagaaaagcatgtgactttcagaataatcccgagtgaggatgagtccagatgtgcctctactgaatgattacaagcaggacttctttct

SEQ ID NO: 267823 - DNA, 120 bp, Artificial Sequence
  ENSG00000126773_139 (sequence is synthesized)
gaagcgctttccacagactgttcttggaggccctcgattcaaattaggctattgtgcccctccttacatatatgttaatcaaattattctttttctaatgccatgggtttggggtggagt

SEQ ID NO: 267824 - DNA, 120 bp, Artificial Sequence
  ENSG00000126773_140 (sequence is synthesized)
cggaacacttttataccagttaggcatcctgaaagactattatacagcagcactttcaggtggattaatgctttttactgcatttgtcatccagttcacaagtttatacgccaaaaacaa

SEQ ID NO: 267825 - DNA, 120 bp, Artificial Sequence
  ENSG00000126773_141 (sequence is synthesized)
atcaacaacagtagaaagaatactaaccacggatatcttagcagaggaggatgagcatgaatttaccagttgtactggtgctgagactgtcaaatttctcattcctggcaagaaatatgt

SEQ ID NO: 267826 - DNA, 120 bp, Artificial Sequence
  ENSG00000126773_142 (sequence is synthesized)
agccaatacagtttttcattctattcttgctggattagcgtgtggtcttggaacatggtatctgctcccaaatagaataaccttgctgtatggcagtacaggaggcactgctctactatt

SEQ ID NO: 267827 - DNA, 120 bp, Artificial Sequence
  ENSG00000126773_143 (sequence is synthesized)
cttctttggatggatgacactatgtatagcagaatattctttaattgtaaacacagctacagagactgcgactttccaaacacaggatacttatgaaattattcctcttatgagacctct

SEQ ID NO: 267828 - DNA, 120 bp, Artificial Sequence
  ENSG00000126773_144 (sequence is synthesized)
caaaaaaatgaatccatggattaaaaatcatcaaaccattgggtgacaggttattttgataattattcttttaggattaatctctgtaaaacatactaaagcaatagttaaaacttatta

SEQ ID NO: 267829 - DNA, 120 bp, Artificial Sequence
  ENSG00000126773_145 (sequence is synthesized)
aagagtttttttaaaaaaccctttttgagataaggaacttttcaattttgtgtttcactttaaataaggagctttgagtttttaagatagcctggctaaaacctgtgtaaggagatggaa

SEQ ID NO: 267830 - DNA, 120 bp, Artificial Sequence
  ENSG00000126773_146 (sequence is synthesized)
ctttcctgtggggggaaagaagaaattaaaatttatacatataaatattatatacagattgaatgaatttaagacaaatacaaaatttatttctaattttatgatagcaacaatagtaga

SEQ ID NO: 267831 - DNA, 120 bp, Artificial Sequence
  ENSG00000126773_147 (sequence is synthesized)
agtaatattgattttttaaaaaccaacttgttacagaagaaaagtagaaaatagtttttttaacagacataattgttcacaaaattgtttgataaccccttttacttgccttttcaagtt

SEQ ID NO: 267832 - DNA, 120 bp, Artificial Sequence
  ENSG00000126773_148 (sequence is synthesized)
tgacttttctttctccgtctccgtagattgcagctttcttttcttaggttagtgtccaggtagaaatgttcagcatgttatggactgaatatttgtgtctctccagaattcatatattac

SEQ ID NO: 267833 - DNA, 120 bp, Artificial Sequence
  ENSG00000126773_149 (sequence is synthesized)
agagagcttgatttgtccctctctgtgccatctaaggacacagcaaaaatgtggccacctgcaagtcaaagaagagagctctcatcaaaacctgaccatactggcagcctgatcatggtc

SEQ ID NO: 267834 - DNA, 120 bp, Artificial Sequence
  ENSG00000126773_150 (sequence is synthesized)
tttcggccttcagaagtgtgagaaagtaaattgatgttgtttaagccactcagcttatggcatttttttatggcagcccatgctgattaagattttgctaccaagaagtgggatgccttt

SEQ ID NO: 267835 - DNA, 120 bp, Artificial Sequence
  ENSG00000126773_151 (sequence is synthesized)
gtaccaaatacctaaaaatgtggaaatggctttgtaactgttggtaatgggtagaggctgaaagaggtttttttgtttgtttctttgttttgttttgtttgagatggagtcttcactctc

SEQ ID NO: 267836 - DNA, 120 bp, Artificial Sequence
  ENSG00000126773_152 (sequence is synthesized)
gcagtggcacaatcttggcccactgcaacgtccgcctcctggcttcaagtgatactcctccctgagcctcctgagtagctggaattacagacatgcgccaccatgcccggctaattttta

SEQ ID NO: 267837 - DNA, 120 bp, Artificial Sequence
  ENSG00000126773_153 (sequence is synthesized)
ggcttgagccatcacacccagccaagggttttgatgtgcatgctagaaatatggacattaagggtgattctgatgaagtctgaagtcccctgaacccagaggaaaggcagtccttgttac

SEQ ID NO: 267838 - DNA, 120 bp, Artificial Sequence
  ENSG00000126773_154 (sequence is synthesized)
aaagcgtcaaagaacttagctgaactgtgtcctagtgttttgtggagccatgaagttggatacctacgtaaggagagttcaaagcagtgttgaaaggagcagttggcttctcctgtttct

SEQ ID NO: 267839 - DNA, 120 bp, Artificial Sequence
  ENSG00000126773_155 (sequence is synthesized)
agtaaaatgtgaaaggagagagatggattgaagaagggattgttaagcaagagaaggaaccagaacttgaagatttggaaaattttcagcctggattatccatattgtaaaacatgagaa

SEQ ID NO: 267840 - DNA, 120 bp, Artificial Sequence
  ENSG00000126773_156 (sequence is synthesized)
agcatattctgaagagaacaccaaaagtgtggggctggactgtccctcagtaaagagcttttggcattatgtgagtagaaacactgccagtttgaattgaagtggttggagacaggaagt

SEQ ID NO: 267841 - DNA, 120 bp, Artificial Sequence
  ENSG00000126773_157 (sequence is synthesized)
aatgaaggccgacagttgaacttcttggatttgacaggatgtaatgatagaactgttcagctacaaaagtgcagtattcttcaagaaaaggggaaaattatgccaaaggtgatttaaggg

SEQ ID NO: 267842 - DNA, 120 bp, Artificial Sequence
  ENSG00000126773_158 (sequence is synthesized)
tcttgagggctaccacctgtttcaacaagtcagctagcctctacccaaagcctcgggagcagaactgaacttcagagccacagaagcaggaccctcacctagagcactggcggtgacctg

SEQ ID NO: 267843 - DNA, 120 bp, Artificial Sequence
  ENSG00000126773_159 (sequence is synthesized)
ccaccccagtggcctggtgggcagagtatggaaccaaacagaattattctcaagctctaagatctaatggaatttgccttgctaggttttgacttccttgggatcatcaccctttttttc

SEQ ID NO: 267844 - DNA, 120 bp, Artificial Sequence
  ENSG00000126773_160 (sequence is synthesized)
ctgtttctcctattggagtggggatgtctcttctatacctgccctacccttagattttggaagcacgtaactcatctggtttcacagattcacagctggagaggaattttgcctcaggat

SEQ ID NO: 267845 - DNA, 120 bp, Artificial Sequence
  ENSG00000126773_161 (sequence is synthesized)
ggattgtacctaggtctcatccatatctgatttagatgagactttgaattttagccatcagagttaatgctagaatgagtgaagactttgggggatatggggatggaatgaatgtctttt

SEQ ID NO: 267846 - DNA, 120 bp, Artificial Sequence
  ENSG00000126773_162 (sequence is synthesized)
gcatttgaatttggaaaggacatgagttttgaggggccagggatggaatgttatagactaattgtgttccctcaaaaatgtttatgttgaagccctaacccccaatgtgttggtatttgg

SEQ ID NO: 267847 - DNA, 120 bp, Artificial Sequence
  ENSG00000126773_163 (sequence is synthesized)
agatgggcctctgggaggtagtttatgaaggtgagaccctagtctgataggattagtgcccttaggagagatgccaaagagcttgatgtctctctttttgctacaaaaagacacagcaaa

SEQ ID NO: 267848 - DNA, 120 bp, Artificial Sequence
  ENSG00000126773_164 (sequence is synthesized)
aaggcagccatgtgtaagccaggaagagagtcttcaccagaacctgactatactggcagcctgatcttgtacttgtagcccccagaactgttagaaaataaatttctgttgtttaagcca

SEQ ID NO: 267849 - DNA, 120 bp, Artificial Sequence
  ENSG00000126773_165 (sequence is synthesized)
tcatctatgtcaacccacttacggtatttatttttaaatattgatgttatatgtaatattcttaaagaacatttttcttttcaagtaaatatttttttcttttttttttctgtacaggtt

SEQ ID NO: 267850 - DNA, 120 bp, Artificial Sequence
  ENSG00000126773_166 (sequence is synthesized)
ttaaatcatactccatcccattggcttgcaaacatgctgacactcctcataatttcactcttcataaaccaaagcataaggtcagaggagaacttgacatattagaacacttaggcattg

SEQ ID NO: 267851 - DNA, 120 bp, Artificial Sequence
  ENSG00000126773_167 (sequence is synthesized)
aaagtggttagtctaactaacccattgaagttttggagaacctgggactcaaattttggaagatgtgacagatgatatgttaacatacattgcaccgaggctgaagtgggaggattgctt

SEQ ID NO: 267852 - DNA, 83 bp, Artificial Sequence
  ENSG00000126773_168 (sequence is synthesized)
taacatacattgcaccgaggctgaagtgggaggattgcttgagactgcctggaaggcagaagttgcagtgagccgagactgat

SEQ ID NO: 267853 - DNA, 120 bp, Artificial Sequence
  ENSG00000126773_169 (sequence is synthesized)
actaaccttaaagaatggatataagttataaagtatttgaactaagtgataaatgatataacgttatagctgtgatatattaattatagttttaaggcatttgtaatcatgactttttgg

SEQ ID NO: 267854 - DNA, 120 bp, Artificial Sequence
  ENSG00000126773_170 (sequence is synthesized)
gcatttgtaatcatgactttttggctaagctagatgaactctagaatagctgatttctctacttttgccaactgaagaggagccaattaaaaatgttgtgtagccatagtgcaatgcctg

SEQ ID NO: 267855 - DNA, 120 bp, Artificial Sequence
  ENSG00000126773_171 (sequence is synthesized)
acctataagagagctaagtatgtgtagtatgctataacatatttgattaaatggattgtattcctgtgttcaagtgtatgaatcatcacttggatttgactcctagaaaaatttatctgt

SEQ ID NO: 267856 - DNA, 120 bp, Artificial Sequence
  ENSG00000126773_172 (sequence is synthesized)
taaatgtgctcataaaaaatgtgtatttgccagaataaaatatggtagaaggagctattttgccttaattaaatttctctctttttgttttgttttagtatcaccttttgccatgatagc

SEQ ID NO: 267857 - DNA, 120 bp, Artificial Sequence
  ENSG00000126773_173 (sequence is synthesized)
tatgcatcgctgaggcaacagatcagaaaaggcagacaaagagaagtgactaagattttgcctaatggtgattgagatggctgccaggaaacttttatttaaagaaccaaggaagtagag

SEQ ID NO: 267858 - DNA, 120 bp, Artificial Sequence
  ENSG00000126773_174 (sequence is synthesized)
ggtgactacagttaataatactgtatagcatatttgaaatttgctaagaagattttaagtgttctcaccacacacaaaaaaagccaggaccagccttggagataagcagagtgaacagaa

SEQ ID NO: 267859 - DNA, 120 bp, Artificial Sequence
  ENSG00000126775_0 (sequence is synthesized)
aaaatcccacgtgactggctctcctctcaggccatcatggcgtctcccagtgggaagggagcccgggcgctggaggctcctggctgcgggccccggccgctcgcccgggacctggtggac

SEQ ID NO: 267860 - DNA, 120 bp, Artificial Sequence
  ENSG00000126775_1 (sequence is synthesized)
tccgtggacgatgcggaggggctgtacgtggctgtggagcgctgcccgctgtgcaacactacccgccggcggctgacctgcgccaaatgcgttcagagcggcgatttcgtctacttcgac

SEQ ID NO: 267861 - DNA, 120 bp, Artificial Sequence
  ENSG00000126775_2 (sequence is synthesized)
ggccgcgaccgggagaggtttatcgacaagaaggaaaggttaagccgacttaagagcaagcaagaagaatttcagaaagaagtgttaaaagctatggaaggaaaatggataacagatcag

SEQ ID NO: 267862 - DNA, 120 bp, Artificial Sequence
  ENSG00000126775_3 (sequence is synthesized)
ttgagatggaaaataatgtcctgcaagatgaggattgaacagttaaaacaaacaatatgtaaaggaaatgaagaaatggagaaaaattctgaaggccttctcaaaaccaaggaaaagaat

SEQ ID NO: 267863 - DNA, 120 bp, Artificial Sequence
  ENSG00000126775_4 (sequence is synthesized)
cagaagctttacagtcgagcacaacggcaccaagagaaaaaggagaagattcagaggcataatcgcaaacttggtgacctggtagaaaaaaagaccattgacttaagaagtcattatgag

SEQ ID NO: 267864 - DNA, 120 bp, Artificial Sequence
  ENSG00000126775_5 (sequence is synthesized)
cgtctggcaaatcttcgacgatcccatatattagagctcacctctgtcatttttccaatcgaggaagtaaagacgggtgtgagagaccccgcagatgtgtcttcagagagtgacagtgcc

SEQ ID NO: 267865 - DNA, 120 bp, Artificial Sequence
  ENSG00000126775_6 (sequence is synthesized)
atgacctccagcactgtgagcaagcttgctgaagcccggaggacaacttacctctcaggacgatgggtctgtgacgatcacaacggagacaccagcattagcattacagggccttggatt

SEQ ID NO: 267866 - DNA, 120 bp, Artificial Sequence
  ENSG00000126775_7 (sequence is synthesized)
agcctccctaacaatggggactactctgcctactacagctgggtggaggagaagaaaacaacccaggggcctgacatggagcagagtaaccctgcctacaccatcagtgctgcgctgtgc

SEQ ID NO: 267867 - DNA, 120 bp, Artificial Sequence
  ENSG00000126775_8 (sequence is synthesized)
tatgcaactcagctggtcaacattctgtctcatatacttgatgtaaatcttcccaaaaagctctgcaacagtgaattttgtggcgaaaatctaagcaagcagaaatttactcgagcagtg

SEQ ID NO: 267868 - DNA, 120 bp, Artificial Sequence
  ENSG00000126775_9 (sequence is synthesized)
aagaaactgaatgcaaatattctttacctttgtttttctcagcatgtaaatttagatcaattacaaccactgcataccctcaggaatctaatgtacctggtcagtccaagctctgaacac

SEQ ID NO: 267869 - DNA, 120 bp, Artificial Sequence
  ENSG00000126775_10 (sequence is synthesized)
ctaggcaggtcagggccctttgaagtacgagcagaccttgaggagtccatggaatttgtggatcccggagttgctggagaatcagatgagagcggagatgagcgcgtcagcgatgaagaa

SEQ ID NO: 267870 - DNA, 120 bp, Artificial Sequence
  ENSG00000126775_11 (sequence is synthesized)
accgacctgggcacagactgggagaacttgcctagtccccggttttgtgatatcccttcccagtctgtggaagtctcccagagtcagagcacccaggcgtccccacccatcgcgagcagc

SEQ ID NO: 267871 - DNA, 120 bp, Artificial Sequence
  ENSG00000126775_12 (sequence is synthesized)
agtgcaggtgggatgatctcctctgcagcagcctcggtgacctcctggtttaaagcttacactggacaccgttaacgagcatggaccaaaacataccaaatctgcatcaagaaagttctt

SEQ ID NO: 267872 - DNA, 120 bp, Artificial Sequence
  ENSG00000126775_13 (sequence is synthesized)
ctcccactacactctagtaaacattttctgtttaagttaagatagtgtctggaacaaagaggttaaagtgttgttttgttttgtctttttaagcagggagacaaacatttctatttgcca

SEQ ID NO: 267873 - DNA, 120 bp, Artificial Sequence
  ENSG00000126775_14 (sequence is synthesized)
agtggcctgtgatggtgaccaacatgcttatgataattaagagaacaggggtcgaaggtctttctacccagaccagtgctggtggaaggaggacctgtgcgtgtggccagttctgccaag

SEQ ID NO: 267874 - DNA, 120 bp, Artificial Sequence
  ENSG00000126775_15 (sequence is synthesized)
gaagcagttgatttgggttccctctgggcccgggccaccgggcccacagatatgggtcagtgtgctggtccttgcggtgctgagactgttcctgacactttaagttttagaggttggttg

SEQ ID NO: 267875 - DNA, 120 bp, Artificial Sequence
  ENSG00000126775_16 (sequence is synthesized)
aatcacaagaggtgattcttgattattaggacatgaaagataaaagctctttaataagagtttttctgccattgttttttgtatgagaaccagcaggcaatttaaaatttctaatttggt

SEQ ID NO: 267876 - DNA, 120 bp, Artificial Sequence
  ENSG00000126775_17 (sequence is synthesized)
cctttgattttgtttgggaggggtgagttacacgtattttattcatgctgctctgtcgtagtttgtcagacattcctgtttttctttcccccacacaccaaagaaaatgaaagtcttttt

SEQ ID NO: 267877 - DNA, 120 bp, Artificial Sequence
  ENSG00000126775_18 (sequence is synthesized)
ctttaggacccacatccataaatggaagaaatcctggctgcaataatgtctagagagtttttaactattttcttgtattctgaggggaattaagcttattcttacctagttgaattcctg

SEQ ID NO: 267878 - DNA, 120 bp, Artificial Sequence
  ENSG00000126775_19 (sequence is synthesized)
aggtcattcccttatgtaagctcaatgcctgcctgggcacaggggaaaagccacttagttaagtggcctctggtcattcttgtggtgtccactttctttctatgggattgagtaggtggc

SEQ ID NO: 267879 - DNA, 120 bp, Artificial Sequence
  ENSG00000126775_20 (sequence is synthesized)
aggtgttttcaggggaaaccatcctacttgtttccccgaactctttgttgctctgaggacacagctttgctcagaaatgcagcgcagatccttacggctgatgctactctgctctgttct

SEQ ID NO: 267880 - DNA, 69 bp, Artificial Sequence
  ENSG00000126775_21 (sequence is synthesized)
agcgcagatccttacggctgatgctactctgctctgttctggggaaagcacaatataaagaaagaattt

SEQ ID NO: 267881 - DNA, 72 bp, Artificial Sequence
  ENSG00000126775_22 (sequence is synthesized)
tttccctcagcaggagatcattttcagctcacgtgtcttgtcattcttttagtgacaatcttacaagaaaac

SEQ ID NO: 267882 - DNA, 120 bp, Artificial Sequence
  ENSG00000126775_23 (sequence is synthesized)
gtgtcttgtcattcttttagtgacaatcttacaagaaaactataatgagagaggcattatgtacaaatatgtaagtagtttatttttaataactgcaaaaaaatcctatgtaacaactac

SEQ ID NO: 267883 - DNA, 120 bp, Artificial Sequence
  ENSG00000126775_24 (sequence is synthesized)
caaaagaaatcctatgaaagagtcctaacaggcattattaccatatcttatgtgattggcatgatagcacctctgataaatcattcagaggtttgccatgccccagcttcttttctcatc

SEQ ID NO: 267884 - DNA, 120 bp, Artificial Sequence
  ENSG00000126775_25 (sequence is synthesized)
ataataattgtagttgatactttgcctccaagtccgaggtgctatatagcttttgctaatggtatatttggtgttttgtatagttttgggtagagttgcagaacggagtttatttctatc

SEQ ID NO: 267885 - DNA, 120 bp, Artificial Sequence
  ENSG00000126775_26 (sequence is synthesized)
ggagtttatttctatccggtagtcacaaattccttggctctatgaattttccatgaaaggaggaagtaggcttttctcgttgtgggtggtcttttttttttttggagacggagtctcact

SEQ ID NO: 267886 - DNA, 120 bp, Artificial Sequence
  ENSG00000126775_27 (sequence is synthesized)
cggagtctcactcagctgcccaggctggagtgtagtggcaccatctccgctcactgcaaccaccatctcctgggttcaagcaattcttccatctcaacctcccgagtagctgggattata

SEQ ID NO: 267887 - DNA, 63 bp, Artificial Sequence
  ENSG00000126775_28 (sequence is synthesized)
catgcccagctaatttttgtattttagtaaagacgttgccttggcctcctaaagtgctaggat

SEQ ID NO: 267888 - DNA, 120 bp, Artificial Sequence
  ENSG00000126775_29 (sequence is synthesized)
cgcgcccggccccttatgggttcttctacactgctgggatctctgttttaagtgctcagcttcatgattgattgctgggcttccattttcccatccagttctggagttcgtagagagtga

SEQ ID NO: 267889 - DNA, 120 bp, Artificial Sequence
  ENSG00000126775_30 (sequence is synthesized)
agatggtagacttgaacagataaataaacttaacgatcttgtaagagttgtctagctacttaaaaccctcagaagtaagagcttagtctcacgagttgtaagagtgggatttggagcttg

SEQ ID NO: 267890 - DNA, 120 bp, Artificial Sequence
  ENSG00000126775_31 (sequence is synthesized)
gtggtggagactgacttcagctgagagatgcacaacagtcatggttttcttaagcctcttatgaaaccatgaatgagagatgaagctaaagaatagaatccagagatcacaaactcatct

SEQ ID NO: 267891 - DNA, 120 bp, Artificial Sequence
  ENSG00000126775_32 (sequence is synthesized)
agagtacttccacaaaatttacaaagatgtgggaactttatggataggatatattttgtttgttgttgttaatatcaactagaggcactttacatagggttaagtgatcgaacccttttg

SEQ ID NO: 267892 - DNA, 120 bp, Artificial Sequence
  ENSG00000126775_33 (sequence is synthesized)
tggttttgaacaccaacatactggcttacactgctgaaatattttgggtttcattattttgcactggatccaccctgtaaatactcttaagtatacatttcaaccactgttttttctact

SEQ ID NO: 267893 - DNA, 120 bp, Artificial Sequence
  ENSG00000126775_34 (sequence is synthesized)
ctttttgctgctcattaaaatctttcatgtaggtgccagaaccatatgtaaacagctttttaaaaaattgaagctggtattttgtttaaacaaaaagccatagaacttggtcatgttttc

SEQ ID NO: 267894 - DNA, 120 bp, Artificial Sequence
  ENSG00000126775_35 (sequence is synthesized)
cattttaaaatgatttactgaaacaaagtaatactaataaaaacccacaggcaccaaacaggctgcttaaaatggtctgttaaagacattttttggttatggaatataagaaaagttttg

SEQ ID NO: 267895 - DNA, 120 bp, Artificial Sequence
  ENSG00000126775_36 (sequence is synthesized)
cacatctgtaagggggaaaaacagtatatcaccattgggtagagtggacgggactcatgtaaggactcaatttggggaagagcattcagtggcatgctgttagaggactagtgtccgaga

SEQ ID NO: 267896 - DNA, 120 bp, Artificial Sequence
  ENSG00000126775_37 (sequence is synthesized)
atctcctcacagtatcatgttgcaggaattccccattgctctgcaacttccaaaccagtttgagtcatacaaatgttttctaaacttttattgtattactgcaataaatcttttaacagt

SEQ ID NO: 267897 - DNA, 63 bp, Artificial Sequence
  ENSG00000126775_38 (sequence is synthesized)
acctcttggcctaatttctcttttctctgcattgaactagaaaaacatcgttctctttttcgt

SEQ ID NO: 267898 - DNA, 120 bp, Artificial Sequence
  ENSG00000126775_39 (sequence is synthesized)
tctctgcattgaactagaaaaacatcgttctctttttcgtaatgttccatagttacaaaagctataacataaggtctttttcttcattatgttttctgacatatctgaaaataagcagtg

SEQ ID NO: 267899 - DNA, 120 bp, Artificial Sequence
  ENSG00000126777_0 (sequence is synthesized)
cctgagcgactgcggcggcggcggcggcggcggcggcgcctcggagcgggcggcccgggctgtagtgccggcgccgccgcgtcttcccggtctcctttcccggccgcacagggttttata

SEQ ID NO: 267900 - DNA, 120 bp, Artificial Sequence
  ENSG00000126777_1 (sequence is synthesized)
tcccggtctcctttcccggccgcacagggttttataggatcacattgacaaaagtaccatggagttttatgagtcagcatattttattgttcttattccttcaatagttattacagtaat

SEQ ID NO: 267901 - DNA, 120 bp, Artificial Sequence
  ENSG00000126777_2 (sequence is synthesized)
tttcctcttcttctggcttttcatgaaagaaacattatatgatgaagttcttgcaaaacagaaaagagaacaaaagcttattcctaccaaaacagataaaaagaaagcagaaaagaaaaa

SEQ ID NO: 267902 - DNA, 120 bp, Artificial Sequence
  ENSG00000126777_3 (sequence is synthesized)
gaataaaaagaaagaaatccagaatggaaacctccatgaatccgactctgagagtgtacctcgagactttaaattatcagatgctttggcagtagaagatgatcaagttgcacctgttcc

SEQ ID NO: 267903 - DNA, 120 bp, Artificial Sequence
  ENSG00000126777_4 (sequence is synthesized)
attgaatgtcgttgaaacttcaagtagtgttagggaaagaaaaaagaaggaaaagaaacaaaagcctgtgcttgaagagcaggtcatcaaagaaagtgacgcatcaaagattcctggcaa

SEQ ID NO: 267904 - DNA, 120 bp, Artificial Sequence
  ENSG00000126777_5 (sequence is synthesized)
aaaagtagaacctgtcccagttactaaacagcccacccctccctctgaagcagctgcctcgaagaagaaaccagggcagaagaagtctaaaaatggaagcgatgaccaggataaaaaggt

SEQ ID NO: 267905 - DNA, 120 bp, Artificial Sequence
  ENSG00000126777_6 (sequence is synthesized)
ggaaactctcatggtaccatcaaaaaggcaagaagcattgcccctccaccaagagactaaacaagaaagtggatcagggaagaagaaagcttcatcaaagaaacaaaagacagaaaatgt

SEQ ID NO: 267906 - DNA, 120 bp, Artificial Sequence
  ENSG00000126777_7 (sequence is synthesized)
cttcgtagatgaaccccttattcatgcaactacttatattcctttgatggataatgctgactcaagtcctgtggtagataagagagaggttattgatttgcttaaacctgaccaagtaga

SEQ ID NO: 267907 - DNA, 120 bp, Artificial Sequence
  ENSG00000126777_8 (sequence is synthesized)
agggatccagaaatctgggactaaaaaactgaagaccgaaactgacaaagaaaatgctgaagtgaagtttaaagattttcttctgtccttgaagactatgatgttttctgaagatgaggc

SEQ ID NO: 267908 - DNA, 120 bp, Artificial Sequence
  ENSG00000126777_9 (sequence is synthesized)
tctttgtgttgtagacttgctaaaggagaagtctggtgtaatacaagatgctttaaagaagtcaagtaagggagaattgactacgcttatacatcagcttcaagaaaaggacaagttact

SEQ ID NO: 267909 - DNA, 120 bp, Artificial Sequence
  ENSG00000126777_10 (sequence is synthesized)
cgctgctgtgaaggaagatgctgctgctacaaaggatcggtgtaagcagttaacccaggaaatgatgacagagaaagaaagaagcaatgtggttataacaaggatgaaagatcgaattgg

SEQ ID NO: 267910 - DNA, 120 bp, Artificial Sequence
  ENSG00000126777_11 (sequence is synthesized)
aacattagaaaaggaacataatgtatttcaaaacaaaatacatgtcagttatcaagagactcaacagatgcagatgaagtttcagcaagttcgtgagcagatggaggcagagatagctca

SEQ ID NO: 267911 - DNA, 120 bp, Artificial Sequence
  ENSG00000126777_12 (sequence is synthesized)
cttgaagcaggaaaatggtatactgagagatgcagtcagcaacactacaaatcaactggaaagcaagcagtctgcagaactaaataaactacgccaggattatgctaggttggtgaatga

SEQ ID NO: 267912 - DNA, 120 bp, Artificial Sequence
  ENSG00000126777_13 (sequence is synthesized)
gctgactgagaaaacaggaaagctacagcaagaggaagtccaaaagaagaatgctgagcaagcagctactcagttgaaggttcaactacaagaagctgagagaaggtgggaagaagttca

SEQ ID NO: 267913 - DNA, 120 bp, Artificial Sequence
  ENSG00000126777_14 (sequence is synthesized)
gagctacatcaggaagagaacagcggaacatgaggcagcacagcaagatttacagagtaaatttgtggccaaagaaaatgaagtacagagtctgcatagtaagcttacagataccttggt

SEQ ID NO: 267914 - DNA, 120 bp, Artificial Sequence
  ENSG00000126777_15 (sequence is synthesized)
atcaaaacaacagttggagcaaagactaatgcagttaatggaatcagagcagaaaagggtgaacaaagaagagtctctacaaatgcaggttcaggatattttggagcagaatgaggcttt

SEQ ID NO: 267915 - DNA, 120 bp, Artificial Sequence
  ENSG00000126777_16 (sequence is synthesized)
gaaagctcaaattcagcagttccattcccagatagcagcccagacctccgcttcagttctagcagaagaattacataaagtgattgcagaaaaggataagcagataaaacagactgaaga

SEQ ID NO: 267916 - DNA, 120 bp, Artificial Sequence
  ENSG00000126777_17 (sequence is synthesized)
ttctttagcaagtgaacgtgatcgtttaacaagtaaagaagaggaacttaaggatatacagaatatgaatttcttattaaaagctgaagtgcagaaattacaggccctggcaaatgagca

SEQ ID NO: 267917 - DNA, 120 bp, Artificial Sequence
  ENSG00000126777_18 (sequence is synthesized)
ggctgctgctgcacatgaattggagaagatgcaacaaagtgtttatgttaaagatgataaaataagattgctggaagagcaactacaacatgaaatttcaaacaaaatggaagaatttaa

SEQ ID NO: 267918 - DNA, 120 bp, Artificial Sequence
  ENSG00000126777_19 (sequence is synthesized)
acagactcttgtttctgaacagcctaataaggatgttgtggaacaaatggaaaaatgcattcaagaaaaagatgagaagttaaagactgtggaagaattacttgaaactggacttattca

SEQ ID NO: 267919 - DNA, 120 bp, Artificial Sequence
  ENSG00000126777_20 (sequence is synthesized)
ggtggcaactaaagaagaggagctgaatgcaataagaacagaaaattcatctctgacaaaagaagttcaagacttaaaagctaagcaaaatgatcaggtttcttttgcctctctagttga

SEQ ID NO: 267920 - DNA, 120 bp, Artificial Sequence
  ENSG00000126777_21 (sequence is synthesized)
agaacttaagaaagtgatccatgagaaagatggaaagatcaagtctgtagaagagcttctggaggcagaacttctcaaagttgctaacaaggagaaaactgttcaggatttgaaacagga

SEQ ID NO: 267921 - DNA, 120 bp, Artificial Sequence
  ENSG00000126777_22 (sequence is synthesized)
aataaaggctctaaaagaagaaataggaaatgtccagcttgaaaaggctcaacagttatctatcacttccaaagttcaggagcttcagaacttattaaaaggaaaagaggaacagatgaa

SEQ ID NO: 267922 - DNA, 120 bp, Artificial Sequence
  ENSG00000126777_23 (sequence is synthesized)
taccatgaaggctgttttggaagagaaagagaaagacctagccaatacagggaagtggttacaggatcttcaagaagaaaatgaatctttaaaagcacatgttcaggaagtagcacaaca

SEQ ID NO: 267923 - DNA, 120 bp, Artificial Sequence
  ENSG00000126777_24 (sequence is synthesized)
taacttgaaagaggcctcttctgcatcacagtttgaagaacttgagattgtgttgaaagaaaaggaaaatgaattgaagaggttagaagccatgctaaaagagagggagagtgatctttc

SEQ ID NO: 267924 - DNA, 120 bp, Artificial Sequence
  ENSG00000126777_25 (sequence is synthesized)
tagcaaaacacagctgttacaggatgtacaagatgaaaacaaattgtttaagtcccaaattgagcagcttaaacaacaaaactaccaacaggcatcttcttttccccctcatgaagaatt

SEQ ID NO: 267925 - DNA, 120 bp, Artificial Sequence
  ENSG00000126777_26 (sequence is synthesized)
attaaaagtaatttcagaaagagagaaagaaataagtggtctctggaatgagttagattctttgaaggatgcagttgaacaccagaggaagaaaaacaatgaccttcgggagaaaaactg

SEQ ID NO: 267926 - DNA, 120 bp, Artificial Sequence
  ENSG00000126777_27 (sequence is synthesized)
ggaagcaatggaagcattggcatcaactgaaaaaatgctgcaggacaaagtgaacaagacttccaaggaaaggcagcaacaggtggaagctgttgagttggaggctaaagaagttctcaa

SEQ ID NO: 267927 - DNA, 120 bp, Artificial Sequence
  ENSG00000126777_28 (sequence is synthesized)
aaaattatttccaaaggtgtctgtcccttctaatttgagttatggtgaatggttgcatggatttgaaaaaaaggcaaaagaatgtatggctggaacttcagggtcagaggaggttaaggt

SEQ ID NO: 267928 - DNA, 120 bp, Artificial Sequence
  ENSG00000126777_29 (sequence is synthesized)
tctagagcacaagttgaaagaagctgatgaaatgcacacattgttacagctagagtgtgaaaaatacaaatccgtccttgcagaaacagaaggaattttacagaagctacagagaagtgt

SEQ ID NO: 267929 - DNA, 120 bp, Artificial Sequence
  ENSG00000126777_30 (sequence is synthesized)
tgagcaagaagaaaataaatggaaagttaaggtcgatgaatcacacaagactattaaacagatgcagtcatcatttacatcttcagaacaagagctagagcgattaagaagcgaaaataa

SEQ ID NO: 267930 - DNA, 120 bp, Artificial Sequence
  ENSG00000126777_31 (sequence is synthesized)
ggatattgaaaatctgagaagagaacgagaacatttggaaatggaactagaaaaggcagagatggaacgatctacctatgttacagaagtcagagagctgaaagatctgttgactgaatt

SEQ ID NO: 267931 - DNA, 120 bp, Artificial Sequence
  ENSG00000126777_32 (sequence is synthesized)
gcagaaaaaacttgatgattcatattctgaagcagtaagacagaatgaagagctaaatttgttgaaggcacagttaaatgaaacactcacaaaacttagaactgaacaaaatgaaagaca

SEQ ID NO: 267932 - DNA, 120 bp, Artificial Sequence
  ENSG00000126777_33 (sequence is synthesized)
gaaggtagctggtgatttgcataaggctcaacagtcactggagcttatccagtcaaaaatagtaaaagctgctggagacactactgttattgaaaatagtgatgtttccccagaaacgga

SEQ ID NO: 267933 - DNA, 120 bp, Artificial Sequence
  ENSG00000126777_34 (sequence is synthesized)
gtcttctgagaaggagacaatgtctgtaagtctaaatcagactgtaacacagttacagcagttgcttcaggcggtaaaccaacagctcacaaaggagaaagagcactaccaggtgttaga

SEQ ID NO: 267934 - DNA, 120 bp, Artificial Sequence
  ENSG00000126777_35 (sequence is synthesized)
gtgaagtaattgggaaactgttcatttgaggataaaaaaggcattgtattatattttgccaaattaaagccttatttatgttttcaccctttctactttgtcagaaacactgaacagagt

SEQ ID NO: 267935 - DNA, 120 bp, Artificial Sequence
  ENSG00000126777_36 (sequence is synthesized)
tttgtcttttctaatccttgttagactactgatttaaagaaggaaaaaaaaaagccaactctgtagacaccttcagagtttagttttataataaaaactgtttgaataattagaccttta

SEQ ID NO: 267936 - DNA, 120 bp, Artificial Sequence
  ENSG00000126777_37 (sequence is synthesized)
cattcctgaagataaacatgtaatcttttatcttattttgctcaataaaattgttcagaagatcaaagtggtaaagacaatgtaaaatttaacattttaatactgatgttgtacactgtt

SEQ ID NO: 267937 - DNA, 120 bp, Artificial Sequence
  ENSG00000126777_38 (sequence is synthesized)
ttacttaacattttgggaagtaactgcctctgacttcaactcaagaaaacacttttttgttgctaatgtaatcggtttttgtaatggcgtcagcaaataaaaggatgcttattattcaaa

SEQ ID NO: 267938 - DNA, 82 bp, Artificial Sequence
  ENSG00000126777_39 (sequence is synthesized)
agggtagattttcgttctgctgcaaccctttgcctcctgggttcaagtgattctcattgcctcagcctcctaagtagctggg

SEQ ID NO: 267939 - DNA, 120 bp, Artificial Sequence
  ENSG00000126777_40 (sequence is synthesized)
gagaattggccctaaaatcaatgaaactctcacccacccctttaacctcttgtctccagacttctgggtatgtaaaaacacaacacaacaaaacaaacaaacagaacaacaacaacaaca

SEQ ID NO: 267940 - DNA, 120 bp, Artificial Sequence
  ENSG00000126777_41 (sequence is synthesized)
cggtctcctttcccggccgcacaggtcaagtaagggagaattgactacgcttatacatcagcttcaagaaaaggacaagttactcgctgctgtgaaggaagatgctgctgctacaaagga

SEQ ID NO: 267941 - DNA, 120 bp, Artificial Sequence
  ENSG00000126777_42 (sequence is synthesized)
tcggtgtaagcagttaacccagtttcagcaagttcgtgagcagatggaggcagagatagctcacttgaagcaggaaaatggtatactgagagatgcagtcagcaacactacaaatcaact

SEQ ID NO: 267942 - DNA, 120 bp, Artificial Sequence
  ENSG00000126777_43 (sequence is synthesized)
atgagtctccctcccacccagatactaggtgtcattattggcatgttttttgagtaagtacccatgcataaaatgtgtgtatgtatgtatacttgtttattaaatactctgttgaactat

SEQ ID NO: 267943 - DNA, 120 bp, Artificial Sequence
  ENSG00000126777_44 (sequence is synthesized)
aagtgacagttgagagattgaacagtttagttatgtaaaaatttcagtccttttaccccatggatttttattctggaggaaaagattgagcgtataaaagcagaaaccaataatggtgcc

SEQ ID NO: 267944 - DNA, 120 bp, Artificial Sequence
  ENSG00000126777_45 (sequence is synthesized)
tatcttcataatatgtttcttaggggatgagatttctctttagcacaagcctgagcataccatattaggcataaaaacttatattagaaatcatttctgaaattcataggatgggctttg

SEQ ID NO: 267945 - DNA, 120 bp, Artificial Sequence
  ENSG00000126777_46 (sequence is synthesized)
gtataagttgtttgtggcagagcttccgagtagcatacaaaacatgggctatcataaggagatcaatcttaaactctaaacttcattgcagctgaaagatctgttgactgaattgcagaa

SEQ ID NO: 267946 - DNA, 120 bp, Artificial Sequence
  ENSG00000126777_47 (sequence is synthesized)
aaaacttgatgattcatattctgaagcagtaagacagaatgaagagctaaatttggtaagaagcttgtcctccactgggtatcaagtaggcactgaaaacactttattgacatgtggaga

SEQ ID NO: 267947 - DNA, 120 bp, Artificial Sequence
  ENSG00000126777_48 (sequence is synthesized)
aaccatccaggcttttttttctttgctaacatctttagcttggcctttttgtaagtctaagataatcttcatattccgatgattcctaagattatctttcttttcttgactcctaaaatg

SEQ ID NO: 267948 - DNA, 120 bp, Artificial Sequence
  ENSG00000126777_49 (sequence is synthesized)
atccttcttttcttagctcctaacaatggcatgtttggcttccaactctttttcaaaattttccatgttttataaatcctattttctcaaacagcagtcttttctgtgaataaagaaatg

SEQ ID NO: 267949 - DNA, 120 bp, Artificial Sequence
  ENSG00000126777_50 (sequence is synthesized)
agattttcttctcagactatcatagttaatggggccttttattttctaacctgggagaagattatattgaaagtcaaagacacatattcttcattcaagggcagtaatctaatccagttt

SEQ ID NO: 267950 - DNA, 120 bp, Artificial Sequence
  ENSG00000126777_51 (sequence is synthesized)
ttttaacctagtctctctatatattacaaatattaaaaagcgtataagagtctttattatcaacatattatttagagtatagtaatcctaaaagcataggctttgagataaagttagcta

SEQ ID NO: 267951 - DNA, 120 bp, Artificial Sequence
  ENSG00000126777_52 (sequence is synthesized)
gctaaatgtcttaaaacatataataccctgtattcctattctcaagttttctaaaaactgtactgattgtgacagacttagctattagacaaatatggctgtcttgctctctgtttcaaa

SEQ ID NO: 267952 - DNA, 120 bp, Artificial Sequence
  ENSG00000126777_53 (sequence is synthesized)
cagcaattgttatgtcttccttgtgagttaaaaattgttacagcacagggattagattttttttttttaagtaccttaataaactctcagaagattacagtagtaagttttttccttacc

SEQ ID NO: 267953 - DNA, 120 bp, Artificial Sequence
  ENSG00000126777_54 (sequence is synthesized)
caaagttcaccctgcccagtttggaattttcttgttagcattactccatgtaccaagaaaactttaactcattcatttgtggttggtatcctatgttatggcaaacatttatgggaatca

SEQ ID NO: 267954 - DNA, 120 bp, Artificial Sequence
  ENSG00000126777_55 (sequence is synthesized)
atttttagagtagagcggtatgaaatacaggttgcgtattctttatctggaatgcttggaaccagcaattttggggggggattttggattatttgtattatatgcttgctctgtatgtgt

SEQ ID NO: 267955 - DNA, 120 bp, Artificial Sequence
  ENSG00000126777_56 (sequence is synthesized)
ctaaaagaagaaataggaaatgtccagcttgaaaaggctcaacagattgagagttcaggaaagtcttctcctgaggaactgacatctaagccaagaatctgaagggcctgtgagaagaga

SEQ ID NO: 267956 - DNA, 120 bp, Artificial Sequence
  ENSG00000126777_57 (sequence is synthesized)
gatgagatttctctttagcacaagcctgagcataccatattaggcataaaaacttatattagaaatcatttctgaaattcataggatgggctttgtatggtcaacagtaggtagactctt

SEQ ID NO: 267957 - DNA, 120 bp, Artificial Sequence
  ENSG00000126777_58 (sequence is synthesized)
taatgtacttttcaaggtgctatctcttgatatttttattttgtaatagcaaatgttgataggtagggatctaagttgtattactgtttacctaaaatcttgctacatgtattcatgttc

SEQ ID NO: 267958 - DNA, 120 bp, Artificial Sequence
  ENSG00000126777_59 (sequence is synthesized)
cctccaattttaaatgtcactgccttgtctttccccctttgggcctctagaactgtttcaaaagtgcccatgggtgggaagcaaaaacaattaccttatgagaataagaagaaagttttt

SEQ ID NO: 267959 - DNA, 120 bp, Artificial Sequence
  ENSG00000126777_60 (sequence is synthesized)
tgggagcagtatagttcattttccttgctcatatttaattggaaaatcagagaagcggcattatatattcgcattggagttacagaactttctgttttgacagattgggttattcatagg

SEQ ID NO: 267960 - DNA, 120 bp, Artificial Sequence
  ENSG00000126777_61 (sequence is synthesized)
tatatcgtaaagcatttcttgatggtataatacaggccagtgtggtcttgtactaccccttagtgaagccttaaacgatggtcagtattttgggagttttaatttgactggatttgtagt

SEQ ID NO: 267961 - DNA, 120 bp, Artificial Sequence
  ENSG00000126777_62 (sequence is synthesized)
cttctattcagtgtttttaaaaatattgtataattgactctttaattgaactgtatagattaagaaagcctttaaaaactaacgggtaaagtatctatttggcttttaatttgaaataat

SEQ ID NO: 267962 - DNA, 120 bp, Artificial Sequence
  ENSG00000126777_63 (sequence is synthesized)
ttcagtgactgttataaatagtgatatctttaaaaggtactttactggaatttgatggttttgtttttgcatttgcagttttctactctaaactgtagttcatttctgtggcttttctta

SEQ ID NO: 267963 - DNA, 120 bp, Artificial Sequence
  ENSG00000126777_64 (sequence is synthesized)
tgtttagctttacagatgggaacctctactgcttagcctttctatacatctggtgcagcatattggctaatccactgtacataataactgttagcagtcccattcattcttcagtcctag

SEQ ID NO: 267964 - DNA, 120 bp, Artificial Sequence
  ENSG00000126777_65 (sequence is synthesized)
aggtatcagcataatcaaagaatgatgcaaattaagttaattgtggtgttcctttatttttacagttgaaggcacagttaaatgaaacactcacaaaacttagaactgaacaaaatgaaa

SEQ ID NO: 267965 - DNA, 120 bp, Artificial Sequence
  ENSG00000126777_66 (sequence is synthesized)
aaatgtagtgttttcattgatgtttgatctcatttttgcttattgaggtatgttaattttaagggttgtgttgagaggtatggagcgggggtccccaattcctggactgtggacaggtac

SEQ ID NO: 267966 - DNA, 120 bp, Artificial Sequence
  ENSG00000126777_67 (sequence is synthesized)
ccccaattcctggactgtggacaggtaccagtcaatggctttttaggaaccaggccacacagcaggagatgagtggtgggtgaatgaccattgccgcctgagctctgcctcctgtcagat

SEQ ID NO: 267967 - DNA, 120 bp, Artificial Sequence
  ENSG00000126777_68 (sequence is synthesized)
cacaaaactggtccctggtgccaaaacggttgggtattgctggcctagagtatagactctggagctagactgcctatgtttgaatcctggctctgccacttagtagccatgtgaatttgg

SEQ ID NO: 267968 - DNA, 120 bp, Artificial Sequence
  ENSG00000126777_69 (sequence is synthesized)
gcagatctttagccactttgtgctttagttgccccatctgtaaaaggcaatgataatagtacctatcctgtagggtttttgaaagaagtaaatgagttaatacataaaacacttaaaata

SEQ ID NO: 267969 - DNA, 120 bp, Artificial Sequence
  ENSG00000126777_70 (sequence is synthesized)
gtaggtggtacttacaacagtgcctggcacttacttactaagagctcagtatatgttaactttttttactgtttggaatgtactttcttttgcggggcaaattttctttttctgaaagaa

SEQ ID NO: 267970 - DNA, 120 bp, Artificial Sequence
  ENSG00000126777_71 (sequence is synthesized)
aaaatggatatatttctgatattcatagattctagattttttttccttttgtgtccaagtgacaacatttataacatagttttctttggtgccaactagtttgcaccactagttagcaaa

SEQ ID NO: 267971 - DNA, 120 bp, Artificial Sequence
  ENSG00000126777_72 (sequence is synthesized)
cagtatttctctatgtggtttttgttattgttgattttcatgtcattgttcagattttttaatgtttgtgtttaaatcagcaatataacattttctgttgtttggttttacatttctttt

SEQ ID NO: 267972 - DNA, 120 bp, Artificial Sequence
  ENSG00000126777_73 (sequence is synthesized)
ctcacttcactagaggaaatattccttctttatctctcagaacttccagatgacagccttaagctttcttggagctttagttctattttgtgcatatcttgaaggtcttgtagcttggag

SEQ ID NO: 267973 - DNA, 120 bp, Artificial Sequence
  ENSG00000126777_74 (sequence is synthesized)
gggttatctgtgcctcctttgacctttgtatcaaacagactctcttgtaacttggctgcctgggtttttgtgtgttgccttaatacctgcaacggcttcgttaatttattctgttcttag

SEQ ID NO: 267974 - DNA, 120 bp, Artificial Sequence
  ENSG00000126777_75 (sequence is synthesized)
tttagagtaagtatctgtgaccttttctcccccctcccttccttcctcctttcctccctcccaaaataaaatgaccataacattttaactgaggtaaggttgctaaactggaagtaaggt

SEQ ID NO: 267975 - DNA, 120 bp, Artificial Sequence
  ENSG00000126777_76 (sequence is synthesized)
catcacagtgtcttaaaattgaaagctggtttttattcaagtttgcttttgttaggtaatctaagaaattcgttcattagctcctgaagtgagatttttacttgaggatagctaaaccca

SEQ ID NO: 267976 - DNA, 120 bp, Artificial Sequence
  ENSG00000126777_77 (sequence is synthesized)
taattaaccaagtcatgttatgagcttttattgtctatattaccttggaaggctcagatttggtagcattttaaaatgacttgtattccagccggtgaatgcagtttttgtttttctggt

SEQ ID NO: 267977 - DNA, 120 bp, Artificial Sequence
  ENSG00000126777_78 (sequence is synthesized)
tgtagggtttttttttttttttctgttgctacctggattttacctgttttatgaataacttaagtcacactgcctagagtgtaattagagtattcagatatgcactgaatacttcagata

SEQ ID NO: 267978 - DNA, 120 bp, Artificial Sequence
  ENSG00000126777_79 (sequence is synthesized)
ttcttcttttgaagatattttctctaaaacaatcatgatatcctggagaccctgaggggcaactcatcactgaattatccctttcagaacccctgataatactgtgttgggctatacaag

SEQ ID NO: 267979 - DNA, 120 bp, Artificial Sequence
  ENSG00000126777_80 (sequence is synthesized)
cctcagggagagcttaggtatcctggaaaagttgggatggacttccattttgatcttacaggagcgttttgtctcactttagagtgatcatcctctggcctaccttgacacatgctctcc

SEQ ID NO: 267980 - DNA, 120 bp, Artificial Sequence
  ENSG00000126777_81 (sequence is synthesized)
ttcaaaatgctaattcaggtcagttatctctaacatgactttccatataataagcccagctcattcttcaacatatcaacaaaagtaattaagcctcagctcaaatcttttatccttggt

SEQ ID NO: 267981 - DNA, 120 bp, Artificial Sequence
  ENSG00000126777_82 (sequence is synthesized)
aagctgacttctccagtttcccaatgtaaaaattctgccacatttcctcgcttttccaaattaggaaataaccttgcttcctagggaaacttccatcgcttcttcccaggacttcagcct

SEQ ID NO: 267982 - DNA, 120 bp, Artificial Sequence
  ENSG00000126777_83 (sequence is synthesized)
tattctttccactggctccctctgttcagtcttgaaaacatgctcagatggcttattttaaccttgtacttccttcaggttaccacccttatttttttacttttttactatttagtattc

SEQ ID NO: 267983 - DNA, 120 bp, Artificial Sequence
  ENSG00000126777_84 (sequence is synthesized)
ttaagaaaatactctctatctacttatttattgttattgattactttatacactctagaatggcttttcttcctgctatttcaatgaaatcatttttgcaaaaatcattaatgatcccta

SEQ ID NO: 267984 - DNA, 120 bp, Artificial Sequence
  ENSG00000126777_85 (sequence is synthesized)
attgctagatccaatataggcccttcttttgcatgtgatcagatactgaaagtacttaatgaaatatgtcaaaaatgctgacattagacctttgtcttataagggaagggtttcatttct

SEQ ID NO: 267985 - DNA, 120 bp, Artificial Sequence
  ENSG00000126777_86 (sequence is synthesized)
agagagcttaaacaattaaaagattgcctattaccccttgcctttcgacctaagcgatattctctctttagcatctcatagatgttctttaatattttccttttcttcctaaatacatag

SEQ ID NO: 267986 - DNA, 120 bp, Artificial Sequence
  ENSG00000126777_87 (sequence is synthesized)
tctgctcattttaagtcttgtgaactatttttggcttgtccattgccacatttgttttaattgtattacacttgagacatatgaatcattgataataacactttttctttttgatttgca

SEQ ID NO: 267987 - DNA, 120 bp, Artificial Sequence
  ENSG00000126777_88 (sequence is synthesized)
gaattatagtaatttattaaaatatgtctgtataccctcacaacgcagttggcaggcagctcccctcctaactgatagcacaacattcttttgtcagctgataaacataagtccaagttt

SEQ ID NO: 267988 - DNA, 120 bp, Artificial Sequence
  ENSG00000126777_89 (sequence is synthesized)
ggcaagtgggtggttgacagtattatatcatgaatgataggctggattgttatgaaaatagaggcccaccaggcactctcgaacttcttcattccttaggctctacctggcattgacatt

SEQ ID NO: 267989 - DNA, 120 bp, Artificial Sequence
  ENSG00000126777_90 (sequence is synthesized)
gataattcttccttgtgtacttatgttttggttcccgtagctcttctttatacccgttaaatgtttgtgttaccctcaggtttttatccttagctatcatttttgctacatatattctcc

SEQ ID NO: 267990 - DNA, 120 bp, Artificial Sequence
  ENSG00000126777_91 (sequence is synthesized)
ctcctgtatactctatttaaactgacacgagatgattacattgaaaatacacatttctcaatcattagaatgtaggtaatagcttaatatatctaatgtcaagaaacctttaaaaatata

SEQ ID NO: 267991 - DNA, 120 bp, Artificial Sequence
  ENSG00000126777_92 (sequence is synthesized)
cacaagtacttatgaattgtttatgataatgctgcacatattcaataaagggagagttgtttttaaaaacaaatatgcaagaaataatatgcattgatgtagtttttctaaatcctgata

SEQ ID NO: 267992 - DNA, 120 bp, Artificial Sequence
  ENSG00000126777_93 (sequence is synthesized)
catagtacttagcgtttcttagagctgtaggggtaggtgtatttaactgatatctttaatttgtgaaaacttttcttttggaaatttttttccccattacctatttttcctccccccatc

SEQ ID NO: 267993 - DNA, 120 bp, Artificial Sequence
  ENSG00000126777_94 (sequence is synthesized)
aaaaaaagaaaagggtaccatcctccgctttccatttgtggggagtgggagattgattaagatgccttttatatgaattgacagtattggcattttataatatacttttttgttcccaga

SEQ ID NO: 267994 - DNA, 120 bp, Artificial Sequence
  ENSG00000126777_95 (sequence is synthesized)
tatctactctttatgtttcacatttgcctggtttctaagttttctaggtgtatttctaaccaaatcagaaaactttattatcccaggttaccttatcttggaaccagtttatagaatcct

SEQ ID NO: 267995 - DNA, 120 bp, Artificial Sequence
  ENSG00000126777_96 (sequence is synthesized)
gttgagggaggatgataatttaaatagctgatacttcatgagtatgcctgttagcataagcatgcttccaacatgtggcaactcctttaatcttcacaaccaccctgtgtgttaggtagg

SEQ ID NO: 267996 - DNA, 120 bp, Artificial Sequence
  ENSG00000126777_97 (sequence is synthesized)
taggtattattattaccatgttacaacagacccaaagagattctataacttgtccaaggtcatacggctaataaatgggcgagctggggtttaaatcaaggtaatttgggtacagggctt

SEQ ID NO: 267997 - DNA, 120 bp, Artificial Sequence
  ENSG00000126777_98 (sequence is synthesized)
gtgttcttaatcagtgcttttcttctccctaattcaggcactgtgttcactgatcccttttgtcactgttttcttttctcctcattttgtctttttatttttttttggccagcctcttag

SEQ ID NO: 267998 - DNA, 120 bp, Artificial Sequence
  ENSG00000126777_99 (sequence is synthesized)
aagttttgtcaatcaattctgactttttcctaaagttgatatttggtttgtcagtagcgtattggagaggcttacagtagtatccagaagaaatggaggtgaagctctgtgtgtactctc

SEQ ID NO: 267999 - DNA, 120 bp, Artificial Sequence
  ENSG00000126777_100 (sequence is synthesized)
tgtactccctttaacaaatagattcttaagtgtttctgaaagaaaaagtccttttgtagggctcctgaagtacaagagttaatgctctggagaaaaacttatcttatttctacactgaac

SEQ ID NO: 268000 - DNA, 120 bp, Artificial Sequence
  ENSG00000126777_101 (sequence is synthesized)
cttagctatcatatggatcaggttttcattttctgtgtttacatagcactttagagtttaatgtactagtgatctttttagactttccgatcaactgttaatagccagtgataactttgc

SEQ ID NO: 268001 - DNA, 120 bp, Artificial Sequence
  ENSG00000126777_102 (sequence is synthesized)
tttttaattttccaattgcttctttcctctaaactttttatttcaacacataaagttgaaagaatagtacaacacccgtaaaccctccacctgcttcatctctttctatatgtctacata

SEQ ID NO: 268002 - DNA, 120 bp, Artificial Sequence
  ENSG00000126777_103 (sequence is synthesized)
ttttgttgttaaactaattgaaagtaacttttagtcattatgacattttatctctaagtactttagcacacatctccgaaaacaagacattgttttaccaatcagtggtaccattattac

SEQ ID NO: 268003 - DNA, 120 bp, Artificial Sequence
  ENSG00000126777_104 (sequence is synthesized)
aaccaaaaagacaaaatagtagttatgtactatccaatattaaacgtttattcacattttgtcaattgtacccaaaatagctttttaactattttccccaaaccagaatccaaggcaaaa

SEQ ID NO: 268004 - DNA, 120 bp, Artificial Sequence
  ENSG00000126777_105 (sequence is synthesized)
tttaacatgttgtgttttgttaagtcctcttagtctctctaatggcttttgaagtttaatttctttagtcatcttatctgacttagaaaacttcatatgacctaaaaaaaaaaaaaaaaa

SEQ ID NO: 268005 - DNA, 120 bp, Artificial Sequence
  ENSG00000126777_106 (sequence is synthesized)
tctgctttgatcttaccacctgactaaagactttagtaccaagactatttattataacattgtttaataaaaatgaccaaaagggttattgaatgaacttcatcgctacttagaaaggtt

SEQ ID NO: 268006 - DNA, 120 bp, Artificial Sequence
  ENSG00000126777_107 (sequence is synthesized)
gaaatgtagtgtttccttataaaacactttgaaaccatttatcataatacagtattaagtactaaaacaaacttgaagcataaaactttctggtagaattatggagtttttctttatttc

SEQ ID NO: 268007 - DNA, 120 bp, Artificial Sequence
  ENSG00000126777_108 (sequence is synthesized)
ctacattttgattttactttaaatcattaccttcttccttcatggcctaaatagttttatcttggcattagaacatgaatttttcaaaacaactatgcttttgtctgtaggaaggaattt

SEQ ID NO: 268008 - DNA, 120 bp, Artificial Sequence
  ENSG00000126777_109 (sequence is synthesized)
atgtgtggggcttgaaccagcagcatcagcatcaccatgcacattcttgggccccaacccagctaccaaatccaaaacatgtatgtggggtggcagcagtctgtgttttcatgagccctc

SEQ ID NO: 268009 - DNA, 120 bp, Artificial Sequence
  ENSG00000126777_110 (sequence is synthesized)
cagaatagtctaatgcccacccaagtttgaaaatcactggttttaaagtatgactaaagggtaatcatatagaatgtagaatgctagttacagaactattgtgtgataaggtaaagaata

SEQ ID NO: 268010 - DNA, 120 bp, Artificial Sequence
  ENSG00000126777_111 (sequence is synthesized)
ctgggttcaaaatcagttttaaagtatttaacccataatatagaattcaagaaaaagtcattcttctattcctgggacctgaatgttattttgcaaccttaatttttctcccttttactt

SEQ ID NO: 268011 - DNA, 120 bp, Artificial Sequence
  ENSG00000126777_112 (sequence is synthesized)
cagcgtgataaagagtaccattactcacttattttttggggccaatgtgcagaatttacagttgctgatggtactctaatgcacttgcagaataaatacagctgaatatcagttaatact

SEQ ID NO: 268012 - DNA, 120 bp, Artificial Sequence
  ENSG00000126777_113 (sequence is synthesized)
aataaaaaattaatcacttttagccgagcctaatatacaaatggagtaggtttggaccacaatttaaatcaagttcaatgtgactcatttttaaggtcttttaaaattcatctcttttaa

SEQ ID NO: 268013 - DNA, 120 bp, Artificial Sequence
  ENSG00000126777_114 (sequence is synthesized)
atgagatgcatttcaaaaccttggaagtgtcttttaattgatcagaattctacaggatagaaactgctatatccttggtggttttacttggccatgtaattgtttcacatttcagatgca

SEQ ID NO: 268014 - DNA, 120 bp, Artificial Sequence
  ENSG00000126777_115 (sequence is synthesized)
gtcatcatttacatcttcagaacaagagctagagcgattaagaagcgaaaataaggatattgaaaatgtatgttatttgattgttttacttgtaacctatggatttgtttttagcattaa

SEQ ID NO: 268015 - DNA, 120 bp, Artificial Sequence
  ENSG00000126777_116 (sequence is synthesized)
cggttgtctgaagatctatagtttaagattactttatagttatgctcttaatatcttgggtagtgtttgagttgatatagttttatattcataagtgtcataattttgtcttgtggggaa

SEQ ID NO: 268016 - DNA, 120 bp, Artificial Sequence
  ENSG00000126777_117 (sequence is synthesized)
gctccagtgaacatttcctttgagtgtcatgtcagtgcttaaaaagtttaggattttggagcatttcaaagttcagattttcagattagggatgttcatacacacagagccctacacaca

SEQ ID NO: 268017 - DNA, 120 bp, Artificial Sequence
  ENSG00000126777_118 (sequence is synthesized)
cagagccctacacctctaatttttaaatctttgttttatgtaccaatgttttactttaactgaactcattcaccctgcattgtgagactggttctatgctatgcattgcacagattagga

SEQ ID NO: 268018 - DNA, 120 bp, Artificial Sequence
  ENSG00000126777_119 (sequence is synthesized)
ctgtgatatgtcatggctataagtcctcactctatgtttttaaaaaatcatttctaactagttgttagagttttacttattaactttggtgcttagtggctgactcaacagttacatggt

SEQ ID NO: 268019 - DNA, 120 bp, Artificial Sequence
  ENSG00000126777_120 (sequence is synthesized)
tacatctccacttggcttaatgctttattttgattttttatccctctacttctgtcaggagatcatttttagtggttgatacttactttttttccctagtcttgagtttgggatctttat

SEQ ID NO: 268020 - DNA, 120 bp, Artificial Sequence
  ENSG00000126777_121 (sequence is synthesized)
tttaatgtttgtttgctcagaataactgctgctactttttatgataaaatagctttgtttgcctgtacgtgctttgtgtattcttgggccaaaagattaatttctctgatggagaatatt

SEQ ID NO: 268021 - DNA, 120 bp, Artificial Sequence
  ENSG00000126777_122 (sequence is synthesized)
tttatagccttccagccttcccctttgctttgatcaactagctcatacaattcatgtaaggttgttttgtggcatgaatgtttggccatgccaagaaagacataggacacagtgggttac

SEQ ID NO: 268022 - DNA, 120 bp, Artificial Sequence
  ENSG00000126777_123 (sequence is synthesized)
tatgggattcctaggtagatttgaaacatgttaattgtattaaaccatagagaaaaaacgttacactgcagtggaaagtcctatgagtgttattgggcctcgtttaaacatcacatgaaa

SEQ ID NO: 268023 - DNA, 120 bp, Artificial Sequence
  ENSG00000126777_124 (sequence is synthesized)
agctttttataatacttctatatttgctctgtctttaatcttctaatgttcaatgtacctgaaatcatgtatgtattcttggtttgtgtctttacttttgaatgctttcttctttgtcac

SEQ ID NO: 268024 - DNA, 120 bp, Artificial Sequence
  ENSG00000126777_125 (sequence is synthesized)
atgtgcatagtaattattttaaaagctggcctatttgatatatatactaaaacatggaaagtgggcgtctttattttctcattcaaacttctaaacattgctttttatttttttgctaat

SEQ ID NO: 268025 - DNA, 120 bp, Artificial Sequence
  ENSG00000126777_126 (sequence is synthesized)
atgcatattttcccattgaaataattttgcagtaaccagcatttaaatgcagtgcaaaatactgatgaagtaaaaaagcaaaaatctttcaataatggataaactgaaatcattctttct

SEQ ID NO: 268026 - DNA, 120 bp, Artificial Sequence
  ENSG00000126777_127 (sequence is synthesized)
tagatctttatcagaatgaagcttttctttttattactttaacactgaaatatggttcaggaattttttttaaatctacttttactttagatttcttaatctttgtaagaaagtactatt

SEQ ID NO: 268027 - DNA, 120 bp, Artificial Sequence
  ENSG00000126777_128 (sequence is synthesized)
ttctgtgtgtagttttttcggggggcggggcattattggagaacagttttttttaaataagtgaaaagatgaattcttattcttataaatatttaaatgttgaagctataattattatac

SEQ ID NO: 268028 - DNA, 120 bp, Artificial Sequence
  ENSG00000126777_129 (sequence is synthesized)
tgaaaagagccaggacactggaggccagcagatagcagtgtcagtctttccttctagttttgccacttcgttttctgtgtatacttggctcagtttcctaacttacttgagctgtggttt

SEQ ID NO: 268029 - DNA, 120 bp, Artificial Sequence
  ENSG00000126777_130 (sequence is synthesized)
ccctatctatagaatgggaataaatacctcatggggttgttgtaacggtgagaatttgtgaactgccaagtacagtggttggcatatattaagtaataaatggtgattattggcttttta

SEQ ID NO: 268030 - DNA, 120 bp, Artificial Sequence
  ENSG00000126777_131 (sequence is synthesized)
aagtgattgcttcttagttttagcaacacttccttaatgtacttgatactatgaactaggctctttacattttaaaactcaagatttttggtcatctattaccttcttcaagcagaaatc

SEQ ID NO: 268031 - DNA, 120 bp, Artificial Sequence
  ENSG00000126777_132 (sequence is synthesized)
ttacagataatatagaacaacttggtttacttgaggtagtacatgttctcctttgttcagagaattaataattatttgagggcagagaaagtcagtgaatgtgcatgtgagtttcctaaa

SEQ ID NO: 268032 - DNA, 120 bp, Artificial Sequence
  ENSG00000126777_133 (sequence is synthesized)
atagagtgtagggtctttttttttttttcttatttaatggaaaactgttcaacagtagagagacgagcataatgaggcctgatgtacccaacatctctccatagcacttatcagtacatg

SEQ ID NO: 268033 - DNA, 120 bp, Artificial Sequence
  ENSG00000126777_134 (sequence is synthesized)
gcacgcatataagcaatcttcttttacctcccaccttgcattccctagattattttgaaggaactcaaacatcagagcatttcttctgtaaatatttcagtacacatttctaaaacataa

SEQ ID NO: 268034 - DNA, 120 bp, Artificial Sequence
  ENSG00000126777_135 (sequence is synthesized)
gcatttctttttaaaaagtgtgatattacacttaaaaatacattcttaattttgtatagtatgcatttctccagttgtcataaattgtctgttttattaaataataacttactgtagttt

SEQ ID NO: 268035 - DNA, 120 bp, Artificial Sequence
  ENSG00000126777_136 (sequence is synthesized)
gttttaatcaggatccgaataaggtcagtatgtaactggtttgagacatctcttagatattttttaatcctcgggttccccgactctttctcagcaacaccccacctcctttaaaaaaaa

SEQ ID NO: 268036 - DNA, 120 bp, Artificial Sequence
  ENSG00000126777_137 (sequence is synthesized)
aacaaaaacaaaacttagtggtttcctatgaagtttcccacagtttggatttagttgactgcatccctgtggtgttagcatgttcctcttttctttatgtatcttttatgtatcaaatct

SEQ ID NO: 268037 - DNA, 120 bp, Artificial Sequence
  ENSG00000126777_138 (sequence is synthesized)
gtaatcaggaatctgattcctggtcagattaaggctcagtattttgggggtagggtagagtaggggcaagaccacttcatgggcggtggtgtgcactttcatgaggagattcgtaatgtc

SEQ ID NO: 268038 - DNA, 120 bp, Artificial Sequence
  ENSG00000126777_139 (sequence is synthesized)
tgcttgtcttcctttggcccattggaacttatttaggtttgttaccaagtcgttttgacacaatgctgctaaactttgatagcttctatgctttgtggtatgataaggtgctcctgattt

SEQ ID NO: 268039 - DNA, 120 bp, Artificial Sequence
  ENSG00000126778_0 (sequence is synthesized)
aagttccccggcaactagcagcatccaccgggcgggaggtcggaggcagcaaggccttaaaggctactgagtgcgccggccgttccgtgtccagaacctcccctactcctccgccttctc

SEQ ID NO: 268040 - DNA, 120 bp, Artificial Sequence
  ENSG00000126778_1 (sequence is synthesized)
ttccttggccgcccaccgccaagttccgactccggttttcgcctttgcaaagcctaaggaggaggttaggaacagccgcgcccccctccctgcggccgccgccccctgcctctcggctct

SEQ ID NO: 268041 - DNA, 120 bp, Artificial Sequence
  ENSG00000126778_2 (sequence is synthesized)
gctccctgccgcgtgcgcctgggccgtgcgccccggcaggccccagccatgtcgatgctgccgtcgtttggctttacgcaggagcaagtggcgtgcgtgtgcgaggttctgcagcaaggc

SEQ ID NO: 268042 - DNA, 120 bp, Artificial Sequence
  ENSG00000126778_3 (sequence is synthesized)
ggaaacctggagcgcctgggcaggttcctgtggtcactgcccgcctgcgaccacctgcacaagaacgagagcgtactcaaggccaaggcggtggtcgccttccaccgcggcaacttccgt

SEQ ID NO: 268043 - DNA, 120 bp, Artificial Sequence
  ENSG00000126778_4 (sequence is synthesized)
gagctctacaagatcctggagagccaccagttctcgcctcacaaccaccccaaactgcagcaactgtggctgaaggcgcattacgtggaggccgagaagctgcgcggccgacccctgggc

SEQ ID NO: 268044 - DNA, 120 bp, Artificial Sequence
  ENSG00000126778_5 (sequence is synthesized)
gccgtgggcaaatatcgggtgcgccgaaaatttccactgccgcgcaccatctgggacggcgaggagaccagctactgcttcaaggagaagtcgaggggtgtcctgcgggagtggtacgcg

SEQ ID NO: 268045 - DNA, 120 bp, Artificial Sequence
  ENSG00000126778_6 (sequence is synthesized)
cacaatccctacccatcgccgcgtgagaagcgggagctggccgaggccaccggcctcaccaccacccaggtcagcaactggtttaagaaccggaggcaaagagaccgggccgcggaggcc

SEQ ID NO: 268046 - DNA, 120 bp, Artificial Sequence
  ENSG00000126778_7 (sequence is synthesized)
aaggaaagggagaacaccgaaaacaataactcctcctccaacaagcagaaccaactctctcctctggaagggggcaagccgctcatgtccagctcagaagaggaattctcacctccccaa

SEQ ID NO: 268047 - DNA, 120 bp, Artificial Sequence
  ENSG00000126778_8 (sequence is synthesized)
agtccagaccagaactcggtccttctgctgcagggcaatatgggccacgccaggagctcaaactattctctcccgggcttaacagcctcgcagcccagtcacggcctgcagacccaccag

SEQ ID NO: 268048 - DNA, 120 bp, Artificial Sequence
  ENSG00000126778_9 (sequence is synthesized)
catcagctccaagactctctgctcggccccctcacctccagtctggtggacttggggtcctaagtggggagggactggggcctcgaagggattcctggagcagcaaccactgcagcgact

SEQ ID NO: 268049 - DNA, 120 bp, Artificial Sequence
  ENSG00000126778_10 (sequence is synthesized)
agggacacttgtaaatagaaatcaggaacatttttgcagcttgtttctggagttgtttgcgcataaaggaatggtggactttcacaaatatctttttaaaaatcaaaaccaacagcgatc

SEQ ID NO: 268050 - DNA, 120 bp, Artificial Sequence
  ENSG00000126778_11 (sequence is synthesized)
aatcaaaaccaacagcgatctcaagcttaatctcctcttctctccaactctttccacttttgcattttccttcccaatgcagagatcagggaaaaaaaaaaaaaaaaacccaaacaaaca

SEQ ID NO: 268051 - DNA, 120 bp, Artificial Sequence
  ENSG00000126778_12 (sequence is synthesized)
ctgagttctgggcaactgatacgcctgtttcagcagcctttcttttttttcaatgaatgggaattgcaaatcaactggattttcattatttccttttaatttatatatggagaaatgtga

SEQ ID NO: 268052 - DNA, 120 bp, Artificial Sequence
  ENSG00000126778_13 (sequence is synthesized)
agagggaaaggaaatggaaagagaaagagaaagggagataaaaatagtgaaaataagagcctccaggctcagaagaactgattacattcttaaggtgaacaggaaaaatacaatctataa

SEQ ID NO: 268053 - DNA, 120 bp, Artificial Sequence
  ENSG00000126778_14 (sequence is synthesized)
ctttctttgatgaggaaaaattaagtttacatttttcatatttagtgttaaacaatttaatgtagattaaaataaaagaccagtattaggaggaaaaaacaagtgcctaaatgtcttaat

SEQ ID NO: 268054 - DNA, 120 bp, Artificial Sequence
  ENSG00000126778_15 (sequence is synthesized)
gctctctatgtgagacagaaatagacgtgaccattagtaatgcaactatttttgtcaaatttagtgggattttttggttgttgtttgttttcttgggttttttttttttaaatgacaaac

SEQ ID NO: 268055 - DNA, 120 bp, Artificial Sequence
  ENSG00000126778_16 (sequence is synthesized)
actcatgccctcaaagctttcatatctgtagcctactcctgtaaagggtttctcctgtttctagtttctagtttgcaaaggtatgccaacgaatctggcaacctggtatttgttactaaa

SEQ ID NO: 268056 - DNA, 120 bp, Artificial Sequence
  ENSG00000126778_17 (sequence is synthesized)
acagcatgtgttttcaggtttcttttctattgtacctaaagcagtctaaattaaaacttagtagaacaccaggagtatgattctgtttctgaaaggtgagtggtgtattgctgtcattgg

SEQ ID NO: 268057 - DNA, 120 bp, Artificial Sequence
  ENSG00000126778_18 (sequence is synthesized)
gccctatttttttttttaaatatatttttctttcttacttaatggtggctgtgaattgcagggtactttgaaggccatcatctgaaccaagagtagtaactagattaattatatgacaga

SEQ ID NO: 268058 - DNA, 120 bp, Artificial Sequence
  ENSG00000126778_19 (sequence is synthesized)
aagagtgaatttagccttggggtatttattaacttctattatttagatatgcaattttgtttaccactatctcttcacagcattcatatgttaactaagctcttttgtgttaacaagttt

SEQ ID NO: 268059 - DNA, 120 bp, Artificial Sequence
  ENSG00000126778_20 (sequence is synthesized)
atgacaagactgtgaaagtaaaaataatttatctgcttgaagacaaaaaagggaaggagaacaaggatagaaacattgtgaattaatttgtacaaatagaaagcagaccagcaggacagg

SEQ ID NO: 268060 - DNA, 120 bp, Artificial Sequence
  ENSG00000126778_21 (sequence is synthesized)
agctcttttgcagtgctgccggatggtgtctagaaaaatcccagtaatcatgtaggctccatattatttttgcctggggcaaaatgatgtatcttctgtatttagcttttaaaattagtg

SEQ ID NO: 268061 - DNA, 120 bp, Artificial Sequence
  ENSG00000126778_22 (sequence is synthesized)
aaacaaatggcattatttattaaaattctactcaggataacaggattggcttgcttgtgctttgtaaaatattgttccccagggagaatctatttattttctgacatgacagtttcataa

SEQ ID NO: 268062 - DNA, 120 bp, Artificial Sequence
  ENSG00000126778_23 (sequence is synthesized)
ttttgattttttcccatctataattgtcaccattaatatattatttctttcttactctttcctatttctgttctggtctagaaaactgaggtgtgcttggggaaatcaaggccttatttt

SEQ ID NO: 268063 - DNA, 120 bp, Artificial Sequence
  ENSG00000126778_24 (sequence is synthesized)
ttaaaactgtcaaatagctttgagttccagggagaaatggtcactgtacttaactgtacacacttttacttataaagtcgtttttccccctcagtgatggacagatgtgcacacagccac

SEQ ID NO: 268064 - DNA, 120 bp, Artificial Sequence
  ENSG00000126778_25 (sequence is synthesized)
tcagagaccatcatttggtttgggagctcagggtcccaatctcccttgttagtgttttggatcattaagtcggtgtttatttaagtcactagggtgtttattctccctgtcttgggccac

SEQ ID NO: 268065 - DNA, 120 bp, Artificial Sequence
  ENSG00000126778_26 (sequence is synthesized)
ggagaaatgccaccctctgcaggaggggctctcacagggaatctcctcacattcttcacattcactccccaaaacaaacaccctgcacaaagatagctttcaatgaccctgacaggcttc

SEQ ID NO: 268066 - DNA, 120 bp, Artificial Sequence
  ENSG00000126778_27 (sequence is synthesized)
aaaggacgctgcggaaatctctctggaaaataggaagggccaattactttaatttcttacatgccgtctcttcctactccggtgactaccctccactctcccagctccgcctgggataat

SEQ ID NO: 268067 - DNA, 120 bp, Artificial Sequence
  ENSG00000126778_28 (sequence is synthesized)
tttaggctcgtggaagttgtgtctcgcagggcgccccggcccacttcctgctcccttagttggtgaatcttggaaatgtctgcagatccggcgaggagcaagagcgctggtcctgtaaaa

SEQ ID NO: 268068 - DNA, 120 bp, Artificial Sequence
  ENSG00000126778_29 (sequence is synthesized)
gcccccgtgattactgcttgtaaacttgttaaaaggacaattttctgtcacagtcataaactctttgtaaaacccctggcactaaatccagagcgcgcatattccagatgtgtttaataa

SEQ ID NO: 268069 - DNA, 120 bp, Artificial Sequence
  ENSG00000126778_30 (sequence is synthesized)
gaaattgcacaatgtgcctccttccgccatcctcggctcagtctgggtaaaaggggcgagcaggaggaggcgagaaagctggatattgctttgagtttttttggcaatcatttcagagag

SEQ ID NO: 268070 - DNA, 120 bp, Artificial Sequence
  ENSG00000126778_31 (sequence is synthesized)
atcattaggggaaactaaccatatttttttcttccctcgaggaaatcttcgagaaccagctgttaagggacctccagtttaccttctgggcgtcgcagtttaactgaatctaaagccact

SEQ ID NO: 268071 - DNA, 120 bp, Artificial Sequence
  ENSG00000126778_32 (sequence is synthesized)
tttcgtttctcctctacagatgtcataacggtagccaaaagtaatgaacaacggcttataaatagtttgtaggacgaaaccatacagcattgtgccaagtgaaatgaaaaaaaaaaaaaa

SEQ ID NO: 268072 - DNA, 120 bp, Artificial Sequence
  ENSG00000126778_33 (sequence is synthesized)
aatctctctgcctgagccccaggcctattcagacctcgcggggagcggcgtcccccaggagcagttacgcgatctattggattaagcgggaggaaaaatgttggccggcccagtcacggc

SEQ ID NO: 268073 - DNA, 120 bp, Artificial Sequence
  ENSG00000126778_34 (sequence is synthesized)
ctccgaggaagagcacctcttttctgcccgggttcccgcaatcacaccttctacacgtcgtcttcccagatgacggcaatgtagtacgtcctggttccttttgaagacagataaaaagaa

SEQ ID NO: 268074 - DNA, 120 bp, Artificial Sequence
  ENSG00000126778_35 (sequence is synthesized)
tgtgtctaattgccatctctgctgtcatcctctgtaaatttatacctgcccttatttgtgcaggctatgcctcatttccttatacaaaattgttaattacaaagcacaccccatactcaa

SEQ ID NO: 268075 - DNA, 120 bp, Artificial Sequence
  ENSG00000126778_36 (sequence is synthesized)
acgtgatctatttttcagaacagcaagtggatgggaaagaaccttgacaacacaaaactcatttactaatggactggttttgggtttctcttctctgagtccgcaaatctctctgcctga

SEQ ID NO: 268076 - DNA, 120 bp, Artificial Sequence
  ENSG00000126778_37 (sequence is synthesized)
gccccaggcctattcagacctcgcggggagcggcgtcccccaggagcaggtgggctgctgctccggcgccacgccggccatcggagccggagttcccaagggtcgagggcacccggagtt

SEQ ID NO: 268077 - DNA, 120 bp, Artificial Sequence
  ENSG00000126778_38 (sequence is synthesized)
tccgactaagcagaggaaaaagaattttggcacttcagccggatttggggagtctccgcactgccccagagcgatgacacgaatttattgaagaaacacctctctatgccctccctttcc

SEQ ID NO: 268078 - DNA, 120 bp, Artificial Sequence
  ENSG00000126778_39 (sequence is synthesized)
aaatatttgtaggtagagtagaatcctcaccgtcgttctggatggtgaaagaattccaagaaagcggcccgggagcccctaactatcttgctacaagccagaagggaaacaagtgggtcc

SEQ ID NO: 268079 - DNA, 120 bp, Artificial Sequence
  ENSG00000126778_40 (sequence is synthesized)
cagctaggggtgtttgcatcaaggcctgtcaacccagccgagaaaccctagcaacagctaatgctgtcccactgaatgctttttcatcgactaaagcgcacgcggccgttacctgcacag

SEQ ID NO: 268080 - DNA, 120 bp, Artificial Sequence
  ENSG00000126778_41 (sequence is synthesized)
aggaggcactggagagccgaaacctggcatcgggcgctccttgccagcggtgttccctcccgagccgcgctgcagcgagggcagcagccggctggctagagttgctcatttcctttaaat

SEQ ID NO: 268081 - DNA, 120 bp, Artificial Sequence
  ENSG00000126778_42 (sequence is synthesized)
ctccaacgcatctctgcttttcgtgcgatttgcattgacagcaaaggttttatgttacgagaacaactcaaacctttctgtgtgcgatttaaaatggatcatttagtttaggtggtttgt

SEQ ID NO: 268082 - DNA, 120 bp, Artificial Sequence
  ENSG00000126778_43 (sequence is synthesized)
aaattcatgtcattttacctctttcagcggttttcagtgaaaggttccattttgggaaaccttatatatccgagccaataattaacatttataacaattggttcccctaaccgagggatc

SEQ ID NO: 268083 - DNA, 120 bp, Artificial Sequence
  ENSG00000126785_0 (sequence is synthesized)
attaaaaagcccagctttcctccatgttagatgtgacttggaaaatgagaaagatttagcaaaattccaccgtatcttttgccaggctagagacagggagagcagagtaaaaccctcagg

SEQ ID NO: 268084 - DNA, 120 bp, Artificial Sequence
  ENSG00000126785_1 (sequence is synthesized)
ctgctgaaatttctaggctgttaggaagcccctcgaattctgtgaaaatgagggtttcttaactcacactgagagcggaaaggggcagacccttttcataactccctcaagtgtgtgtta

SEQ ID NO: 268085 - DNA, 120 bp, Artificial Sequence
  ENSG00000126785_2 (sequence is synthesized)
cctttctttaccagcatggtaagcaacaggacatatcccagcctcggacatgtctgtatgatccaaggtacccaaagtcagacagagtaaactcaagcctggcactggctttctgccgct

SEQ ID NO: 268086 - DNA, 120 bp, Artificial Sequence
  ENSG00000126785_3 (sequence is synthesized)
tcatgtgctttggaaaaagcaggagaagcaatagcagcaggagtccccagcagctggagccgcaagaatgaactgcaaagagggaactgacagcagctgcggctgcaggggcaacgacga

SEQ ID NO: 268087 - DNA, 120 bp, Artificial Sequence
  ENSG00000126785_4 (sequence is synthesized)
gaagaagatgttgaagtgtgtggtggtgggggacggtgccgtggggaaaacctgcctgctgatgagctacgccaacgacgccttcccagaggaatacgtgcccactgtgtttgaccacta

SEQ ID NO: 268088 - DNA, 120 bp, Artificial Sequence
  ENSG00000126785_5 (sequence is synthesized)
tgcagttactgtgactgtgggaggcaagcaacacttgctcggactgtatgacaccgcgggacaggaggactacaaccagctgaggccactctcctaccccaacacggatgtgtttttgat

SEQ ID NO: 268089 - DNA, 120 bp, Artificial Sequence
  ENSG00000126785_6 (sequence is synthesized)
ctgcttctctgtcgtaaaccctgcctcttaccacaatgtccaggaggaatgggtccccgagctcaaggactgcatgcctcacgtgccttatgtcctcatagggacccagattgatctccg

SEQ ID NO: 268090 - DNA, 120 bp, Artificial Sequence
  ENSG00000126785_7 (sequence is synthesized)
tgatgacccaaaaaccttggcccgtttgctgtatatgaaagagaaacctctcacttacgagcatggtgtgaagctcgcaaaagcgatcggagcacagtgctacttggaatgttcagctct

SEQ ID NO: 268091 - DNA, 120 bp, Artificial Sequence
  ENSG00000126785_8 (sequence is synthesized)
gactcagaaaggtctcaaagcggtttttgatgaagcaatcctcaccattttccaccccaagaaaaagaagaaacgctgttctgagggtcacagctgctgttcaattatctgaggttgtct

SEQ ID NO: 268092 - DNA, 120 bp, Artificial Sequence
  ENSG00000126785_9 (sequence is synthesized)
gggacctgcctccaccccatccagggatgagaatggcagccaatctctgtggccaagctccagccaaaaaggagggcacgaccagaaaggaactccctttgcacggaggcttgccccatc

SEQ ID NO: 268093 - DNA, 120 bp, Artificial Sequence
  ENSG00000126785_10 (sequence is synthesized)
accctctgagccctcccaacacagcacactagtcagcccactgccacgacctccctgccagccagaagcatccgtactgcacgctgtctgagaatgctgggcctggattgcagacagtgc

SEQ ID NO: 268094 - DNA, 120 bp, Artificial Sequence
  ENSG00000126785_11 (sequence is synthesized)
cgctgctgatcgcatcaaaaacaaagtcaaaggccatctcacattttacaaatccccagctcatgaacgtgaagctgataggaaatcaccccagggaacccgaaaaagaaacttgattcc

SEQ ID NO: 268095 - DNA, 120 bp, Artificial Sequence
  ENSG00000126785_12 (sequence is synthesized)
tctattgctggccttacttgatgtcttttataaaacttgggactacaatactaacctttttttctgaatctgctgttctacccatgtgtctcacattcatttgtattatttcaagaaatg

SEQ ID NO: 268096 - DNA, 120 bp, Artificial Sequence
  ENSG00000126785_13 (sequence is synthesized)
tactaatttccagttcactcaggccttactaatccataccaaattagcctaaagacaaggcattttatattcatttctattttcagcatgtttctaccaaagctattagaaccaacacgt

SEQ ID NO: 268097 - DNA, 120 bp, Artificial Sequence
  ENSG00000126785_14 (sequence is synthesized)
aacctaattgaaagaaaaccatctgaattgttgcaggtccacatttttgccaaagatacactctatagatgcttagtagtggcctgatttttttccatgtattgccacgacaaactaaaa

SEQ ID NO: 268098 - DNA, 120 bp, Artificial Sequence
  ENSG00000126785_15 (sequence is synthesized)
atgaactgtgtttaagaatgtagtatttctgtttttcatccaagttgattgggggaagaatatggcaggatccatcttttacagtattttgtattcagtaaagtggacattcctgctcct

SEQ ID NO: 268099 - DNA, 120 bp, Artificial Sequence
  ENSG00000126785_16 (sequence is synthesized)
cccttcccccattgcatgccctcttcctcccttgatttcactttctctcatgcccggatccttttattctccccagttataacccagttataaaagaaagatctgagcataaagatacgt

SEQ ID NO: 268100 - DNA, 120 bp, Artificial Sequence
  ENSG00000126785_17 (sequence is synthesized)
gtttaaaaataactaaaagtaaaggaaagtgccttaatttttctatttgcttcaactgaaagtgcttctcagctcgccccatgtaagttctcattccatgtaaatgacattttccagtta

SEQ ID NO: 268101 - DNA, 120 bp, Artificial Sequence
  ENSG00000126785_18 (sequence is synthesized)
caactggtactgagattttgcctctctctttccttactcatcctcccaaatgtctttgtgggagccatatcagtggataccaagctctgtatccatttgtcccctgccctccacaatgtg

SEQ ID NO: 268102 - DNA, 120 bp, Artificial Sequence
  ENSG00000126785_19 (sequence is synthesized)
tgacatagaacagggactttggccctgggaaagcaaaagctcccagtaaggaatcctgtgcccaatgatgtaaaacaattccaaacatccaggaatttttgtatcatagagcgaattact

SEQ ID NO: 268103 - DNA, 120 bp, Artificial Sequence
  ENSG00000126785_20 (sequence is synthesized)
tcctatcttttcattagaggctatgaggacttctaattagtcttagttgcttataagtgccctggaatcacccaggtaggcacttaatttttttttcagttgcatgagcaaagtgcttct

SEQ ID NO: 268104 - DNA, 120 bp, Artificial Sequence
  ENSG00000126785_21 (sequence is synthesized)
tagtagtgtgaaattacaacaactttaagactttccagattcaagctcccactgttggaaaaagccagcctttctaatctcttctgctactggaataagcacttaagaattgcgtgatag

SEQ ID NO: 268105 - DNA, 83 bp, Artificial Sequence
  ENSG00000126785_22 (sequence is synthesized)
gaggctgaggtgggtgggcatagtgagatcctgtgtctctataaaaaaattaaaaattagtcagttgtagtgacacatacctg

SEQ ID NO: 268106 - DNA, 71 bp, Artificial Sequence
  ENSG00000126785_23 (sequence is synthesized)
aaggtaaggctgcagtgagctgtgactgtgccactacactccagcctgagtgacagagaaagaacctgtca

SEQ ID NO: 268107 - DNA, 120 bp, Artificial Sequence
  ENSG00000126785_24 (sequence is synthesized)
cactacactccagcctgagtgacagagaaagaacctgtcaaaaaaaaaaaaaaaacaacctacatttcaagtactatttcccttctctcccatctaattgctaaagattttctttcatac

SEQ ID NO: 268108 - DNA, 120 bp, Artificial Sequence
  ENSG00000126785_25 (sequence is synthesized)
gcacacactccagtgactggaaaaacgggagttttcagtcaaagcttgacatttagagaaaacaaggactttctgcctttataaatggaaatcaactgtgtatgaactataactctgcag

SEQ ID NO: 268109 - DNA, 120 bp, Artificial Sequence
  ENSG00000126785_26 (sequence is synthesized)
aggttatgaattcatcctttacaaacaataatgaacttttagtcctgtaataaatgaaatgttattaggcagctttgttgcatgattgcatagttatatcttgctaacgggccactcatt

SEQ ID NO: 268110 - DNA, 120 bp, Artificial Sequence
  ENSG00000126785_27 (sequence is synthesized)
tctcactgatgtggatgaaaaaatgagagcagtatgtttccaggtgtgtgcactcaacaggcaaatagctcccgaggtcaccacttccctaatgggccacaggaagtaagttgatcttga

SEQ ID NO: 268111 - DNA, 120 bp, Artificial Sequence
  ENSG00000126785_28 (sequence is synthesized)
tggggagatcacgtcacccagaaccagcaactggatagagactgttgttagtgtctgggtagagcacaggctcccaggggtcttaagagctaattactgaataaaacaatctagaacaaa

SEQ ID NO: 268112 - DNA, 120 bp, Artificial Sequence
  ENSG00000126785_29 (sequence is synthesized)
gctcgctctaaccattccccctgcttctgtggcaggcagtaatccccgctttccatcctctagtcagcttcttcccagccagccacaagcgaacaggctcgcaagcagcggatgaaacag

SEQ ID NO: 268113 - DNA, 120 bp, Artificial Sequence
  ENSG00000126785_30 (sequence is synthesized)
gaagtctgacagcttgagtctgcagtgggacccctagtgttttcccactccatgtcctggcatcgttccccagaagtacaaacacacacacacagagctcccattgttgcagccttcctc

SEQ ID NO: 268114 - DNA, 120 bp, Artificial Sequence
  ENSG00000126785_31 (sequence is synthesized)
tgtaggggagaaaaagatccatttgcttatgcagatgggactcatagcacagatattacccattctgatcatttggggccaatttattgtctgcctaaatgacgaccaaaagcacattct

SEQ ID NO: 268115 - DNA, 120 bp, Artificial Sequence
  ENSG00000126787_0 (sequence is synthesized)
aagtttgaatttcgtggaggctcgggttgtgagggttcctgcttcggagtcggcggtggtcgtccagaccgagtgttctttactttttgtttggttgaggtttcacgctagaaggtggct

SEQ ID NO: 268116 - DNA, 120 bp, Artificial Sequence
  ENSG00000126787_1 (sequence is synthesized)
caggatgtcttcatcacattttgccagtcgacacaggaaggatataagtactgaaatgattagaactaaaattgctcataggaaatcactgtctcagaaagaaaatagacataaggaata

SEQ ID NO: 268117 - DNA, 120 bp, Artificial Sequence
  ENSG00000126787_2 (sequence is synthesized)
cgaacgaaatagacactttggtttgaaagatgtaaacattccaaccttggaaggtagaattcttgttgaattagatgagacatctcaagggcttgttccagaaaagaccaatgttaagcc

SEQ ID NO: 268118 - DNA, 120 bp, Artificial Sequence
  ENSG00000126787_3 (sequence is synthesized)
aagggcaatgaaaactattctaggtgatcaacgaaaacagatgctccaaaaatacaaagaagaaaagcaacttcaaaaattgaaagagcagagagagaaagctaaacgaggaatatttaa

SEQ ID NO: 268119 - DNA, 120 bp, Artificial Sequence
  ENSG00000126787_4 (sequence is synthesized)
agtgggtcgttatagacctgatatgccttgttttcttttatcaaaccagaatgctgtgaaagctgagccaaaaaaggctattccatcttctgtacggattacaaggtcaaaggccaaaga

SEQ ID NO: 268120 - DNA, 120 bp, Artificial Sequence
  ENSG00000126787_5 (sequence is synthesized)
ccaaatggagcagactaagattgataacgagagtgatgttcgagcaatccgacctggtccaagacaaacttctgaaaagaaagtgtcagacaaagagaaaaaagttgtgcagcctgtaat

SEQ ID NO: 268121 - DNA, 120 bp, Artificial Sequence
  ENSG00000126787_6 (sequence is synthesized)
gcccacgtcgttgagaatgactcgatcagctactcaagcagcaaagcaggttcccagaacagtctcatctaccacagcaagaaagccagtcacaagagctgctaatgaaaacgaaccaga

SEQ ID NO: 268122 - DNA, 120 bp, Artificial Sequence
  ENSG00000126787_7 (sequence is synthesized)
aggaaaggtgccaagtaaaggaagacctgccaaaaatgtagaaacaaaacccgacaagggtatttcttgtaaagtcgatagtgaagaaaatactttgaattcacaaactaatgcaacaag

SEQ ID NO: 268123 - DNA, 120 bp, Artificial Sequence
  ENSG00000126787_8 (sequence is synthesized)
tggaatgaatccagatggagtcttatcaaaaatggaaaacttacctgagataaatactgcaaaaataaaagggaagaattcctttgcacctaaggattttatgtttcagccactggatgg

SEQ ID NO: 268124 - DNA, 120 bp, Artificial Sequence
  ENSG00000126787_9 (sequence is synthesized)
tctgaagacctatcaagtaacacctatgactcccagaagtgccaatgcttttttgacacccagttacacctggactcctttaaaaacagaagttgatgagtctcaagcaacaaaagaaat

SEQ ID NO: 268125 - DNA, 120 bp, Artificial Sequence
  ENSG00000126787_10 (sequence is synthesized)
tttggcacaaaaatgtaaaacttactctaccaagacaatacagcaagattcaaataaattgccatgtcctttgggtcctctaactgtttggcatgaagaacatgttttaaataaaaatga

SEQ ID NO: 268126 - DNA, 120 bp, Artificial Sequence
  ENSG00000126787_11 (sequence is synthesized)
agctactactaaaaatttaaatggccttccaataaaagaagtcccatcacttgaaagaaatgaaggtcgaattgctcagccccaccatggtgtgccatatttcagaaatatcctccagtc

SEQ ID NO: 268127 - DNA, 120 bp, Artificial Sequence
  ENSG00000126787_12 (sequence is synthesized)
gaaactgagaaattaacttcacattgcttcgagtgggacaggaaacttgaattggacattccagatgatgctaaagatcttattcgcacagcagttggtcaaacaagactccttatgaag

SEQ ID NO: 268128 - DNA, 120 bp, Artificial Sequence
  ENSG00000126787_13 (sequence is synthesized)
gaaaggtttaaacagtttgaaggactggttgatgattgtgaatataaacgaggtataaaggagactacctgtacagatctggatggattttgggatatggttagttttcagatagaagat

SEQ ID NO: 268129 - DNA, 120 bp, Artificial Sequence
  ENSG00000126787_14 (sequence is synthesized)
gtaatccacaaattcaacaatctgatcaaacttgaggaatctgggtggcaagtcaataataatatgaatcataatatgaacaaaaatgtctttaggaaaaaagttgtctcaggtatagca

SEQ ID NO: 268130 - DNA, 120 bp, Artificial Sequence
  ENSG00000126787_15 (sequence is synthesized)
agtaaaccaaaacaggatgatgctggaagaattgcagcgagaaatcgcctagctgccataaaaaatgcaatgagagagagaattaggcaggaagaatgtgctgaaacagcagtttctgtg

SEQ ID NO: 268131 - DNA, 120 bp, Artificial Sequence
  ENSG00000126787_16 (sequence is synthesized)
ataccaaaggaagttgataaaatagtgttcgatgctggatttttcagagttgaaagtcctgttaaattattctcaggactttctgtctcttctgaaggcccttctcaaagacttggaaca

SEQ ID NO: 268132 - DNA, 120 bp, Artificial Sequence
  ENSG00000126787_17 (sequence is synthesized)
cctaagtctgtcaacaaagctgtatctcagagtagaaatgagatgggcattccacaacaaactacatcaccagaaaatgccggtcctcagaatacgaaaagtgaacatgtgaagaagact

SEQ ID NO: 268133 - DNA, 120 bp, Artificial Sequence
  ENSG00000126787_18 (sequence is synthesized)
ttgtttttgagtattcctgaaagcaggagcagcatagaagatgctcagtgtcctggattaccagatttaattgaagaaaatcatgttgtaaataagacagacttgaaggtggattgttta

SEQ ID NO: 268134 - DNA, 120 bp, Artificial Sequence
  ENSG00000126787_19 (sequence is synthesized)
tccagtgagagaatgagtttgcctcttcttgctggtggagtagcagatgatattaatactaacaaaaaagaaggaatttcagatgttgtggaaggaatggaactgaattcttcaattaca

SEQ ID NO: 268135 - DNA, 120 bp, Artificial Sequence
  ENSG00000126787_20 (sequence is synthesized)
tcacaggatgttttgatgagtagccctgaaaaaaatacagcttcacaaaatagcatcttagaagaaggggaaactaaaatttctcagtcagaactatttgataataaaagtctcactact

SEQ ID NO: 268136 - DNA, 120 bp, Artificial Sequence
  ENSG00000126787_21 (sequence is synthesized)
gaatgccaccttcttgattcaccaggtctaaactgcagtaatccatttactcagctggagaggagacatcaagaacatgccagacacatttcttttggtggtaacctgattactttttca

SEQ ID NO: 268137 - DNA, 120 bp, Artificial Sequence
  ENSG00000126787_22 (sequence is synthesized)
cctctacaaccaggagaattttgaatttaaaaataaatccaaacattttccttcatattatcaatgcttatatattccttagactattgaaattttggagaaaatgtatttgtgttcact

SEQ ID NO: 268138 - DNA, 120 bp, Artificial Sequence
  ENSG00000126787_23 (sequence is synthesized)
tctatagcatataatgttttaatattctgtgttcatcaaagtgtattttagatatactctttctcaagggaagtggggatattttgtacattttcaacacagaataaaaaatgtactgtg

SEQ ID NO: 268139 - DNA, 120 bp, Artificial Sequence
  ENSG00000126787_24 (sequence is synthesized)
gcttactcactcttcatttttcacagaatgaagaaaaatttggtgtttatatactttaaaatatagtatgttttaatattaaccctgaagatatgtttttctatatggtttttctatcaa

SEQ ID NO: 268140 - DNA, 120 bp, Artificial Sequence
  ENSG00000126787_25 (sequence is synthesized)
atttgctctgacaaactgggtacttgaatatctgaatatatttctaagtgattcaagaaaaatataaggcaaagtttctgcccttctggggaaataatatctatcccaccttcagtcatc

SEQ ID NO: 268141 - DNA, 120 bp, Artificial Sequence
  ENSG00000126787_26 (sequence is synthesized)
attggttatttatgtcctgctattttagtggctacttccctgcttttacttctggtgacctcttgcctctaaatctagttcaaacagcccttttgtgaagccttctgtaaaagctcttat

SEQ ID NO: 268142 - DNA, 120 bp, Artificial Sequence
  ENSG00000126790_0 (sequence is synthesized)
agcgtcccgccctcctcccgcggagtcagtgggtgagggtcgggcttgaagccatagctgcgggaccgtactcgtctcccccgacgcagaccatggagagcgcgctggcggtgccccggc

SEQ ID NO: 268143 - DNA, 120 bp, Artificial Sequence
  ENSG00000126790_1 (sequence is synthesized)
tgcccccgcatgatccagggacgccggtgctgtcggtggtggacatgcacacgggcggcgagcccttgcgtatcgtgctggcggggtgtccggaggtgtctgggcccaccctgctggcca

SEQ ID NO: 268144 - DNA, 120 bp, Artificial Sequence
  ENSG00000126790_2 (sequence is synthesized)
agcggcgctacatgcgccagcaccttgaccacgtgcggcgacggctcatgttcgagccccgagggcaccgggacatgtacggggcggtcctagtcccgagcgagctgccggacgcgcatc

SEQ ID NO: 268145 - DNA, 120 bp, Artificial Sequence
  ENSG00000126790_3 (sequence is synthesized)
tgggcgtcctgttcctgcacaacgagggctacagctccatgtgcggccacgcagtgctggcgctgggccgcttcgctttggacttcgggcttgtgccggcgccccctgcgggcacccgcg

SEQ ID NO: 268146 - DNA, 120 bp, Artificial Sequence
  ENSG00000126790_4 (sequence is synthesized)
aggcccgcgtcaatatccactgcccctgcgggctggtgaccgccttcgtggcatgcgaggacggccgcagccacggaccggtgcgcttccacagcgtcccggccttcgtgctggccacag

SEQ ID NO: 268147 - DNA, 120 bp, Artificial Sequence
  ENSG00000126790_5 (sequence is synthesized)
atctcatggtggatgttcctggacatggaaaggtgatggtggacattgcatatggcggtgcattttatgcatttgttactgctgaaaagttaggactagacatttgttctgcaaagacca

SEQ ID NO: 268148 - DNA, 120 bp, Artificial Sequence
  ENSG00000126790_6 (sequence is synthesized)
agaccttgcctttttatatggaactatattaacagatggaaaagatgcttataccaaggaaccaaccaccaacatttgtgtttttgcagatgaacaggttgacagaagtcccactggctc

SEQ ID NO: 268149 - DNA, 120 bp, Artificial Sequence
  ENSG00000126790_7 (sequence is synthesized)
aggagtgacagcccgaattgccttacagtatcacaaagggcttctggaactgaaccagatgagagccttcaaaagcagtgcaactggctcagtattcacagggaaagctgtgagggaagc

SEQ ID NO: 268150 - DNA, 120 bp, Artificial Sequence
  ENSG00000126790_8 (sequence is synthesized)
gaaatgtggtgattttaaagctgttatagtggaagtatcaggacaagcccattacacgggtacagcaagctttataatagaagatgacgacccattgagggatggatttcttctcaagtg

SEQ ID NO: 268151 - DNA, 120 bp, Artificial Sequence
  ENSG00000126790_9 (sequence is synthesized)
acttcttccatgattttaagggctttctttttaaagtaatcattatccttaaggactgttttctctaaattatatgaaaacaaataaattatacatataaactaactctcattctttgta

SEQ ID NO: 268152 - DNA, 120 bp, Artificial Sequence
  ENSG00000126790_10 (sequence is synthesized)
aaatactaccctgtggctaaatataaagtcattatacctcgtatttgcaactgtatttgtataaatatcacttatgtctagcatacaaaatgccagaaattcagagtctttttctagtga

SEQ ID NO: 268153 - DNA, 120 bp, Artificial Sequence
  ENSG00000126790_11 (sequence is synthesized)
tctagtgattaacgtatcaggtaaaattaaaacagtagttacttttaaaatattgctctatagtaattactattaatatcatattttgtattaaaggctcttcgaataatatgtggaatt

SEQ ID NO: 268154 - DNA, 120 bp, Artificial Sequence
  ENSG00000126790_12 (sequence is synthesized)
agaaaggtaaatcactgccaacgtgtgtcagcagccttgcgtatttggtgcgtgtaatttcgattttccctgactcccatccgcctgtggttttgggagacccttgaggagcgaggaatt

SEQ ID NO: 268155 - DNA, 120 bp, Artificial Sequence
  ENSG00000126790_13 (sequence is synthesized)
ggctcagtattcacagggaaagctgtgaggggcaacttcctgggagctaaggctactaaaaggtagaagccacagtactcatctgcagagggcttacagcctcagcaaggaccttgtggc

SEQ ID NO: 268156 - DNA, 120 bp, Artificial Sequence
  ENSG00000126790_14 (sequence is synthesized)
agatacgcagatgagaaaaccaaggcacagaggtgttatgtgatcacacagctagtaagtgctaaacatgagatttgcacctggcagattggtgccagaagtcgtctcttaactgctatt

SEQ ID NO: 268157 - DNA, 120 bp, Artificial Sequence
  ENSG00000126790_15 (sequence is synthesized)
ctgtactgcctctgtcttttgaaaaagacaatgagaaccctggaaaagtgacaaggaagataaagacaactatcaaaggaatgggaaaacagcataacatttaaaagaaaagatttttgt

SEQ ID NO: 268158 - DNA, 120 bp, Artificial Sequence
  ENSG00000126790_16 (sequence is synthesized)
gtttccttaaggatctctacatcatatagtgatctgaaacatgtgaaaccatttatgttgtatgcaaaaatttggaacatactgtcttcaaaatctgaaatggaacataaaaataacaac

SEQ ID NO: 268159 - DNA, 120 bp, Artificial Sequence
  ENSG00000126790_17 (sequence is synthesized)
atacatttattggatacttcactgtgcatcagtttccaagctaagcacttgatacatgccatctcatttaatcctcacaagaatcctacaaggtcagtactgtgctgttattatcgtttt

SEQ ID NO: 268160 - DNA, 120 bp, Artificial Sequence
  ENSG00000126790_18 (sequence is synthesized)
tcaatagatgataaaacggagaattggagaagttaggtaatttaccagaggttagttagtgagtagcagatccaggtcatgaaggtgggtctctgaacagaccacatgctgttaagcatt

SEQ ID NO: 268161 - DNA, 120 bp, Artificial Sequence
  ENSG00000126790_19 (sequence is synthesized)
tgctgtcagacaaagcaaaaggtcaatgaggctttatattataggagctgttatgagaagaatctgggattgcaatgtccccccaaatagagagggagccgagagaccaaagaatgactc

SEQ ID NO: 268162 - DNA, 120 bp, Artificial Sequence
  ENSG00000126790_20 (sequence is synthesized)
gtgacagaggcagtgaaagctcaggtcagtaatactctgccttcataaccaattcccttctctgtggcatggaggaaatatacattattatgtctataaagaaaattaaatgatgtttaa

SEQ ID NO: 268163 - DNA, 120 bp, Artificial Sequence
  ENSG00000126790_21 (sequence is synthesized)
aatgatgtttaaattattaatagtactaagaatagggtacttattaaaatcttaggctctagagcaagcttgtcccacccgtggcctgtgagccacatgcagcccaggatggctttgaat

SEQ ID NO: 268164 - DNA, 120 bp, Artificial Sequence
  ENSG00000126790_22 (sequence is synthesized)
aaattttgtaaactttcttaaaacattatgagtttttttgcaatttttttttagctcatcagctctcgttagtgttagtgtatcttatgtgtggcccaagacaattcttctcccagtgtg

SEQ ID NO: 268165 - DNA, 120 bp, Artificial Sequence
  ENSG00000126790_23 (sequence is synthesized)
gcccagagaagccaaaagattggacattcctgctctagagcaaaactatctatgagttctagctttaccactggtaacgtatataaccttgggcaagttacgtaacctccatatgcctca

SEQ ID NO: 268166 - DNA, 120 bp, Artificial Sequence
  ENSG00000126790_24 (sequence is synthesized)
tttttttgttttattttataatagtgttttatttgatataataggatgtgaaagccctgaaaagttgtggaacatcaaatttttgtaatggaataaaattttaaatgtgctaacagctaa

SEQ ID NO: 268167 - DNA, 120 bp, Artificial Sequence
  ENSG00000126790_25 (sequence is synthesized)
gtaatgaatcttatctcagtagtaaatgaaatctactacagaatgatctacattcagtaaattattctactcataaagagtcctttaacatagcaaacaatctatcctaatatagctgtt

SEQ ID NO: 268168 - DNA, 120 bp, Artificial Sequence
  ENSG00000126803_0 (sequence is synthesized)
ccagcagcaggaggcgcgcgaggcaccacggcctggcggccgagagtcagggaggaacctcatttacataacggccgcccctctgtctcctggcgggggccggagtcccgcccctcgtcc

SEQ ID NO: 268169 - DNA, 120 bp, Artificial Sequence
  ENSG00000126803_1 (sequence is synthesized)
aacttgaaatctgttgggtcacgggccagtcactccgacctaggcaagcctgtggtggagctggaagagtttgtgagggcggtcccgggagcggattgggtctgggagttcccagaggcg

SEQ ID NO: 268170 - DNA, 120 bp, Artificial Sequence
  ENSG00000126803_2 (sequence is synthesized)
gctataagaaccgggaactgggcgcggggagctgagttgctggtagtgcccgtggtgcttggttcgaggtggccgttagttgactccgcggagttcatctccctggttttcccgtcctaa

SEQ ID NO: 268171 - DNA, 120 bp, Artificial Sequence
  ENSG00000126803_3 (sequence is synthesized)
cgtcgctcgcctttcagtcaggatgtctgcccgtggcccggctatcggcatcgacctgggcaccacctattcgtgcgtcggggtcttccaacatggcaaggtggagatcatcgccaacga

SEQ ID NO: 268172 - DNA, 120 bp, Artificial Sequence
  ENSG00000126803_4 (sequence is synthesized)
ccagggcaatcgcaccacccccagctacgtggccttcacggacaccgagcgcctcatcggcgacgccgccaagaaccaggtggccatgaaccccaccaacaccatcttcgacgccaagag

SEQ ID NO: 268173 - DNA, 120 bp, Artificial Sequence
  ENSG00000126803_5 (sequence is synthesized)
gctgattggacggaaattcgaggatgccacagtgcagtcggatatgaaacactggccgttccgggtggtgagcgagggaggcaagcccaaagtgcaagtagagtacaagggggagaccaa

SEQ ID NO: 268174 - DNA, 120 bp, Artificial Sequence
  ENSG00000126803_6 (sequence is synthesized)
gaccttcttcccagaggagatatcctccatggtcctcacgaagatgaaggagatcgcggaagcctacctggggggcaaggtgcacagcgcggtcataacggtcccggcctatttcaacga

SEQ ID NO: 268175 - DNA, 120 bp, Artificial Sequence
  ENSG00000126803_7 (sequence is synthesized)
ctcgcagcgccaggccaccaaggacgcaggcaccatcacggggctcaatgtgctgcgcatcatcaacgagcccacggcggcggccatcgcctacggcctggacaagaagggctgcgcggg

SEQ ID NO: 268176 - DNA, 120 bp, Artificial Sequence
  ENSG00000126803_8 (sequence is synthesized)
cggcgagaagaacgtgctcatctttgacctgggcggtggcactttcgacgtgtccatcctgaccatcgaggatggcatcttcgaggtgaagtccacggccggcgacacccacctgggcgg

SEQ ID NO: 268177 - DNA, 120 bp, Artificial Sequence
  ENSG00000126803_9 (sequence is synthesized)
tgaggacttcgacaaccgcatggtgagccacctggcggaggagttcaagcgcaagcacaagaaggacattgggcccaacaagcgcgccgtgaggcggctgcgcaccgcttgcgagcgcgc

SEQ ID NO: 268178 - DNA, 120 bp, Artificial Sequence
  ENSG00000126803_10 (sequence is synthesized)
caagcgcaccctgagctcgtccacgcaggcgagcatcgagatcgactcgctctacgagggcgtggacttctatacgtccatcacgcgcgcccgcttcgaggagctcaatgccgacctctt

SEQ ID NO: 268179 - DNA, 120 bp, Artificial Sequence
  ENSG00000126803_11 (sequence is synthesized)
accctggagccggtggagaaggcgctgcgcgacgccaagctggacaagggccagatccaggagatcgtgctggtgggcggctccactcgtatccccaagatccagaagctgctgcaggat

SEQ ID NO: 268180 - DNA, 120 bp, Artificial Sequence
  ENSG00000126803_12 (sequence is synthesized)
ttcttcaacggcaaggagctgaacaagagcatcaaccccgacgaggcggtggcctatggcgccgcggtgcaggcggccatcctcatcggcgacaaatcagagaatgtgcaggacctgctg

SEQ ID NO: 268181 - DNA, 120 bp, Artificial Sequence
  ENSG00000126803_13 (sequence is synthesized)
ctactcgacgtgaccccgttgtcgctgggcatcgagacagctggcggtgtcatgaccccactcatcaagaggaacaccacgatccccaccaagcagacgcagaccttcaccacctactcg

SEQ ID NO: 268182 - DNA, 120 bp, Artificial Sequence
  ENSG00000126803_14 (sequence is synthesized)
gacaaccagagcagcgtactggtgcaggtatacgagggcgaacgggccatgaccaaggacaataacctgctgggcaagttcgacctgaccgggattccccctgcgcctcgcggggtcccc

SEQ ID NO: 268183 - DNA, 120 bp, Artificial Sequence
  ENSG00000126803_15 (sequence is synthesized)
caaatcgaggttaccttcgacattgacgccaatggcatccttaacgttaccgccgccgacaagagcaccggtaaggaaaacaaaatcaccatcaccaatgacaaaggtcgtctgagcaag

SEQ ID NO: 268184 - DNA, 120 bp, Artificial Sequence
  ENSG00000126803_16 (sequence is synthesized)
gacgacattgaccggatggtgcaggaggcggagcggtacaaatcggaagatgaggcgaatcgcgaccgagtcgcggccaaaaacgccctggagtcctatacctacaacatcaagcagacg

SEQ ID NO: 268185 - DNA, 120 bp, Artificial Sequence
  ENSG00000126803_17 (sequence is synthesized)
gtggaagacgagaaactgaggggcaagattagcgagcaggacaaaaacaagatcctcgacaagtgtcaggaggtgatcaactggctcgaccgaaaccagatggcagagaaagatgagtat

SEQ ID NO: 268186 - DNA, 120 bp, Artificial Sequence
  ENSG00000126803_18 (sequence is synthesized)
gaacacaagcagaaagagctcgaaagagtttgcaaccccatcatcagcaaactttaccaaggtggtcctggcggcggcagcggcggcggcggttcaggagcctccgggggacccaccatc

SEQ ID NO: 268187 - DNA, 120 bp, Artificial Sequence
  ENSG00000126803_19 (sequence is synthesized)
gaagaagtggactaagcttgcactcaagtcagcgtaaacctctttgcctttctctctctctctttttttttgtttgtttctttgaaatgtccttgtgccaagtacgagatctattgttgg

SEQ ID NO: 268188 - DNA, 120 bp, Artificial Sequence
  ENSG00000126803_20 (sequence is synthesized)
aagtctttggtatatgcaaatgaaaggagaggtgcaacaacttagtttaattataaaagttccaaagtttgttttttaaaaacattattcgaggtttctctttaatgcattttgcgtgtt

SEQ ID NO: 268189 - DNA, 120 bp, Artificial Sequence
  ENSG00000126803_21 (sequence is synthesized)
tgctgacttgagcatttttgattagttcgtgcatggagatttgtttgagatgagaaaccttaagtttgcacacctgttctgtagaagcttggaaacagtaaaatatataggagcttaaat

SEQ ID NO: 268190 - DNA, 120 bp, Artificial Sequence
  ENSG00000126803_22 (sequence is synthesized)
tgtttatttttatgtactactttaaaactaaactgaacattgcagtaatgttaaggacaggtatactttttgcaaacaaatgcataaatgcaaatgtaaagtaaagctgaaattgatctc

SEQ ID NO: 268191 - DNA, 120 bp, Artificial Sequence
  ENSG00000126803_23 (sequence is synthesized)
tttaagatgttagtatgatgtgaaatttatctaaccaatcttgtttaattcccagatgagggtgctgccttgaattccaacaacttaaggggagaagaatctgggtaaacttcacccacc

SEQ ID NO: 268192 - DNA, 120 bp, Artificial Sequence
  ENSG00000126803_24 (sequence is synthesized)
cttaaatacagaaacctgacttggggtcttcctagtgtactcacactcctacaacttaagtgtccaaatgaaaattcacctgaatattccaggaaaatatgagctatattctggggttaa

SEQ ID NO: 268193 - DNA, 120 bp, Artificial Sequence
  ENSG00000126803_25 (sequence is synthesized)
atgtaaaatgagcctttaacaaaagctgggcagaagttgtcttataattgccaaaggaaatatggaaacaaattaattttgtgacatacaggagcctgaaacaagagacagcaggcaagc

SEQ ID NO: 268194 - DNA, 120 bp, Artificial Sequence
  ENSG00000126803_26 (sequence is synthesized)
tttcaagtgacttaatagtgagtataaatttagtcaaacttgtttaattttctagtaaaacagctcaacttctgagcttatggcaaattctaataacatgtttcccgcagttagaattac

SEQ ID NO: 268195 - DNA, 120 bp, Artificial Sequence
  ENSG00000126803_27 (sequence is synthesized)
ttgggtagggaaacataattattattatttttttctggtttggggatcataacgtttttgcaatacttgccttaaatcactacgatagatttcttttttaaaaggcaaactgtactagat

SEQ ID NO: 268196 - DNA, 120 bp, Artificial Sequence
  ENSG00000126803_28 (sequence is synthesized)
agtcttgtattttgttaatatacaacttgtccattttcctccatatccaatttgagattgttatagataagaatattgcaaccctttggtgatccactatcctggacttaatctttaaaa

SEQ ID NO: 268197 - DNA, 120 bp, Artificial Sequence
  ENSG00000126803_29 (sequence is synthesized)
ttcacatccttcagagaaaggaattcatttttattttttagtgaaatgacatgactactcttttcttactctctttaaggagaacttgagagaaattcagtaaaaccaataggaaaatgc

SEQ ID NO: 268198 - DNA, 120 bp, Artificial Sequence
  ENSG00000126803_30 (sequence is synthesized)
atagttaacctaatgtttttactgcacatagacgttttgatatctttccacatgatgcaggtttgcttcatgctgctcataagacaatagttatgaaagctttatcttcaatttagtagt

SEQ ID NO: 268199 - DNA, 120 bp, Artificial Sequence
  ENSG00000126803_31 (sequence is synthesized)
ggacccatctgtgtcattcagagagattaattttatgaataatggaatgagtaataattttaaaactagctaagaagttagcctaagaatactggcctttggtaatgaccctttcataca

SEQ ID NO: 268200 - DNA, 120 bp, Artificial Sequence
  ENSG00000126803_32 (sequence is synthesized)
agagttgactcttaagtacacataaggtgtttttttttttttcctttttagcaagcctcatttgggtaggggggaggaagataaatagccaacagtgaaattgcttcaacataaaaacct

SEQ ID NO: 268201 - DNA, 120 bp, Artificial Sequence
  ENSG00000126803_33 (sequence is synthesized)
ttttttttttttaaaggaaactgctttttatactctgaaaagctaaagataactccaatttatcagtgctggtgtcacattggtggaaatttttcagcaatgagcatttaagggtgtttc

SEQ ID NO: 268202 - DNA, 120 bp, Artificial Sequence
  ENSG00000126803_34 (sequence is synthesized)
atggactacaggcataaatatgtgacaaactactatggtactacaaaatcaggttaattgtagctttagagtgacgtttactgtgagttttaccaagataatacccattctgttaccctt

SEQ ID NO: 268203 - DNA, 120 bp, Artificial Sequence
  ENSG00000126803_35 (sequence is synthesized)
ttattagtcctttatttgttgaaagtgttcattccttgctctaacttcaaaatataatggagtccttctgtaaatgcagtttggtatgactcattttagacctcacttaagagattagtt

SEQ ID NO: 268204 - DNA, 120 bp, Artificial Sequence
  ENSG00000126803_36 (sequence is synthesized)
tctaaagtatcagaaaatgaccattggtagtttttgatcctacggcctgacctccggtagcttgctataatactaacatcaatctgggcagatacttcattttctattttgaaaagtaat

SEQ ID NO: 268205 - DNA, 120 bp, Artificial Sequence
  ENSG00000126803_37 (sequence is synthesized)
ttgtaaaactcaaattcttgagttttacattcttgagcattcttgagagtgtttcttatttaattctctcttttcaaatttaccaagatttgcatattaccaagataaagccaccaaagt

SEQ ID NO: 268206 - DNA, 120 bp, Artificial Sequence
  ENSG00000126803_38 (sequence is synthesized)
agccattcactttccaggggtcagttgaaacttgtaacctgataactcctgggaactccttagcagatgttagatcagccatagtcaaataacagtggaaaaagtacttgatgttaggat

SEQ ID NO: 268207 - DNA, 87 bp, Artificial Sequence
  ENSG00000126803_39 (sequence is synthesized)
atagtcaaataacagtggaaaaagtacttgatgttaggatggggctaaattacagtttaaggattctccgacaggcacttatctgaa

SEQ ID NO: 268208 - DNA, 120 bp, Artificial Sequence
  ENSG00000126803_40 (sequence is synthesized)
aaattcttatctgaatgtttgattaacatagttgtccctgttttgagggaacaaatatagacacctgtcaaacgaagacataactagttgtttacagtatttgagatgtgtgaaatttca

SEQ ID NO: 268209 - DNA, 120 bp, Artificial Sequence
  ENSG00000126803_41 (sequence is synthesized)
aaacaaactcactttaaattttttatagtattgatttgatatgtataatgaaaatgcattaaaacttgtacattaggagatcttagtacaatttacaactgttaatttaacatgtatgtg

SEQ ID NO: 268210 - DNA, 120 bp, Artificial Sequence
  ENSG00000126803_42 (sequence is synthesized)
taatattatgttacccattcaatatgtaatggagacttaatgagtatttcttttttatgtataatcttaaacagtaatacaacctggctatctagatgaaatcagaaaatctatttttat

SEQ ID NO: 268211 - DNA, 120 bp, Artificial Sequence
  ENSG00000126803_43 (sequence is synthesized)
gattttccaatagtggacctataacatattcttacttttaactgaatgtagtttataaaggttgtgttgtgaggcatgctcctcttgcttttgaacacgatttaaattgaagtttaaaaa

SEQ ID NO: 268212 - DNA, 120 bp, Artificial Sequence
  ENSG00000126803_44 (sequence is synthesized)
tatctcacatccgtatgtctcaactgttaagggaatatatatgtttggattcagaagcaggaatattcaattgtgtaatgtataaataggtgtgaataaacttctgaattagttacagaa

SEQ ID NO: 268213 - DNA, 120 bp, Artificial Sequence
  ENSG00000126804_0 (sequence is synthesized)
tagggacaagcctgagcgtcacaggctccccacaaacaaccgcgtgacccggggactttccccagggtgtgcaaaagcacaggcaccccctcagttctggggtgaagcacagtccctggc

SEQ ID NO: 268214 - DNA, 120 bp, Artificial Sequence
  ENSG00000126804_1 (sequence is synthesized)
agagccagagcctctccgcgcagcccagcccgagcgccgagcgccgcgcgccgccgccactgcagctcgcggccccttcgccttcgcccgcctttcccgcggctgatttgccttaaactc

SEQ ID NO: 268215 - DNA, 120 bp, Artificial Sequence
  ENSG00000126804_2 (sequence is synthesized)
cctaaaatctccgcagctctggttcctgttgcggccgtgccctctggtggtcagaagatgctgtgctgtctcgttaggatgaatggattaaaatgtacttttcctcctctgcttctggag

SEQ ID NO: 268216 - DNA, 120 bp, Artificial Sequence
  ENSG00000126804_3 (sequence is synthesized)
agggagagaggaatattccagaagccactgtgttccttctgctttctgtgtgggtctctaattaacagaagatggcaaagcccagccacagcagctatgtccttcagcagctaaacaacc

SEQ ID NO: 268217 - DNA, 120 bp, Artificial Sequence
  ENSG00000126804_4 (sequence is synthesized)
aaagagaatggggttttctctgtgactgctgtattgcaattgatgacatttactttcaagcacacaaggcagttctagctgcctgtagctcctattttagaatgtttttcatgaaccatc

SEQ ID NO: 268218 - DNA, 120 bp, Artificial Sequence
  ENSG00000126804_5 (sequence is synthesized)
agcatagtactgcacaactgaatctcagcaacatgaaaattagtgcagaatgttttgatctcattttgcagtttatgtatttaggaaaaattatgacagctccctccagttttgagcagt

SEQ ID NO: 268219 - DNA, 120 bp, Artificial Sequence
  ENSG00000126804_6 (sequence is synthesized)
ttaaagtggcaatgaactacctacagctatacaatgttcctgactgtttagaagacatccaggatgcagattgttctagttcaaaatgttcctcttctgcttccagcaaacagaacagca

SEQ ID NO: 268220 - DNA, 120 bp, Artificial Sequence
  ENSG00000126804_7 (sequence is synthesized)
aaatgatatttggggtaagaatgtatgaagatactgtggctcgaaatggcaatgaagccaacaggtggtgtgcagagccaagttcaacggtaaatacaccacataatagagaggctgatg

SEQ ID NO: 268221 - DNA, 120 bp, Artificial Sequence
  ENSG00000126804_8 (sequence is synthesized)
aagagtctttacaattaggtaattttcctgagccactatttgatgtatgtaaaaaaagttccgtgtccaaattatctactccaaaagaacgtgtgtcaagacgctttgggcggagtttta

SEQ ID NO: 268222 - DNA, 120 bp, Artificial Sequence
  ENSG00000126804_9 (sequence is synthesized)
cctgtgatagctgtggatttggctttagctgtgaaaaattattagatgagcatgtgctaacctgtactaacagacatttataccaaaacacaagatcttaccatagaatagtagatatta

SEQ ID NO: 268223 - DNA, 120 bp, Artificial Sequence
  ENSG00000126804_10 (sequence is synthesized)
gagatggaaaagacagtaacatcaaagctgaatttggtgaaaaagattcttccaaaacattttctgcacagacggacaaatacagaggagacacaagccaggctgctgatgattcagctt

SEQ ID NO: 268224 - DNA, 120 bp, Artificial Sequence
  ENSG00000126804_11 (sequence is synthesized)
gctgctgagaggaaaaggattattattaagatggagccagaagatattcctacagatgaactgaaagactttaacattattaaagttactgataaagactgtaatgaatccactgacaat

SEQ ID NO: 268225 - DNA, 120 bp, Artificial Sequence
  ENSG00000126804_12 (sequence is synthesized)
gatgaattagaagatgaacctgaagagccattttatagatactatgttgaagaagatgtcagcataaaaaaaagtggtaggaaaactctaaaacctcgaatgtcagtaagtgctgatgaa

SEQ ID NO: 268226 - DNA, 120 bp, Artificial Sequence
  ENSG00000126804_13 (sequence is synthesized)
agaggtggtttagagaatatgaggccccctaacaacagcagtccagtacaagaggatgctgaaaatgcatcttgtgagctgtgtggacttacaataaccgaggaggacctgtcatctcat

SEQ ID NO: 268227 - DNA, 120 bp, Artificial Sequence
  ENSG00000126804_14 (sequence is synthesized)
tacttagccaaacacattgaaaatatctgtgcatgtggtaaatgtggacaaatacttgtaaagggtaggcagcttcaggaacatgctcaacgatgtggcgagccccaagatctgaccatg

SEQ ID NO: 268228 - DNA, 120 bp, Artificial Sequence
  ENSG00000126804_15 (sequence is synthesized)
aatgggttaggaaatactgaggagaaaatggacttggaagagaatcctgatgagcagtccgaaataagagatatgtttgttgaaatgctggatgattttagggacaatcattaccagata

SEQ ID NO: 268229 - DNA, 120 bp, Artificial Sequence
  ENSG00000126804_16 (sequence is synthesized)
aacagtatccaaaaaaagcagttatttaaacattctgcctgcccttttcgatgtcctaattgtggccagcgttttgaaactgaaaatctagtggttgaacatatgtctagctgcttagat

SEQ ID NO: 268230 - DNA, 120 bp, Artificial Sequence
  ENSG00000126804_17 (sequence is synthesized)
caagatatgtttaagagtgccatcatggaagaaaatgaaagagatcacagacgaaagcatttttgtaatctgtgtggaaaaggattttatcagcggtgtcacttaagagaacactatact

SEQ ID NO: 268231 - DNA, 120 bp, Artificial Sequence
  ENSG00000126804_18 (sequence is synthesized)
gttcatactaaggaaaaacagtttgtttgtcaaacatgtggaaagcagtttttaagagagcgtcagttgcgactgcacaatgatatgcacaaaggcatggccaggtatgtctgttccatt

SEQ ID NO: 268232 - DNA, 120 bp, Artificial Sequence
  ENSG00000126804_19 (sequence is synthesized)
tgtgatcaaggaaacttcagaaaacatgaccatgtacggcatatgatttctcatttatctgctggtgagactatatgccaggtctgctttcagatattcccaaataatgaacagttggag

SEQ ID NO: 268233 - DNA, 120 bp, Artificial Sequence
  ENSG00000126804_20 (sequence is synthesized)
cagcacatggatgttcatctgtatacatgtggaatatgtggagcaaaatttaatttgaggaaagatatgagatcacattataatgccaagcatttgaaaagaacctgagtgattttctac

SEQ ID NO: 268234 - DNA, 120 bp, Artificial Sequence
  ENSG00000126804_21 (sequence is synthesized)
tgtactaatgtttagatgatagcagataaaacaccaaagcaaaggatatgagctatttaggaattgattatataagatgatttgttagaaacaaatttcaaggcccttttaactttaata

SEQ ID NO: 268235 - DNA, 120 bp, Artificial Sequence
  ENSG00000126804_22 (sequence is synthesized)
aggcccttttaactttaatatttttgtttaggattttaagtatctacatttaggtattaaatgtttatcatttttgttgtttcttaatagaattatttgtttttagtttttcttagctat

SEQ ID NO: 268236 - DNA, 120 bp, Artificial Sequence
  ENSG00000126804_23 (sequence is synthesized)
tcccaagccgcgcactgcaagcagtggcgccggctcacgcacccctcggccgcctctcgcgcggcttcccgcgccggcagcccgcgatggccccacgtgaccgcgtgtctggtagcaggg

SEQ ID NO: 268237 - DNA, 120 bp, Artificial Sequence
  ENSG00000126804_24 (sequence is synthesized)
cggcccgcgctctgagtgccgccgccacagttcgcagttgtgactctgtaggcggaagcatagggacaagcctgagcgtcacaggctccccacaaacaaccgcgtgacccggggactttc

SEQ ID NO: 268238 - DNA, 120 bp, Artificial Sequence
  ENSG00000126804_25 (sequence is synthesized)
cccagggtgtgcaaaagcacaggcaccccctcagttctggggtgaagtccctggcagagccagagcctctccgcgcagcccagcccgagcgccgagcgccgcgcgccgccgccactgcag

SEQ ID NO: 268239 - DNA, 120 bp, Artificial Sequence
  ENSG00000126804_26 (sequence is synthesized)
actgcaagcagtggcgccggctcacgcacccctcggccgcctctcgcgcggcttcccgcgccggcagcccgcgatggccccacgtgaccgcgtgtctggtctctaattaacagaagatgg

SEQ ID NO: 268240 - DNA, 120 bp, Artificial Sequence
  ENSG00000126804_27 (sequence is synthesized)
gcagaatacgtgttgaatgaaatcactgatctaggaaaagtaaaaattcctcaaatgaatacagaatacttgtgctactgctgatgatcaacactttatacagtgcctggtataccaaag

SEQ ID NO: 268241 - DNA, 120 bp, Artificial Sequence
  ENSG00000126804_28 (sequence is synthesized)
acagttcgcagttgtgactctgtaggcggaagcatagggacaagcctgagcgtcacaggctccccacaaacaaccgcgtgacccggggactttccccagggtctctaattaacagaagat

SEQ ID NO: 268242 - DNA, 120 bp, Artificial Sequence
  ENSG00000126804_29 (sequence is synthesized)
cgcagaaacttgttgcaacaaacaggcgaccgcgggtgcccctagcagccagcggcagagtgggtgggcgggcgagagggaggggaaggctggcggacgccgcagcgaactggtgggcag

SEQ ID NO: 268243 - DNA, 120 bp, Artificial Sequence
  ENSG00000126804_30 (sequence is synthesized)
gaagtgagagatctgaatttggagaggacatggggaagaatcaatcttcaacagataatctttaagtacagacccaggaatatcagatctgaagtggcaccatcttttctgtcttcctga

SEQ ID NO: 268244 - DNA, 120 bp, Artificial Sequence
  ENSG00000126804_31 (sequence is synthesized)
caaacttccatcaacccaaaaagttccagttgcaaagatccaagaaaactcagtaaagatcactttggaatcactttgttgtaacaaaattgattcatggtgactctaatatttgtgtaa

SEQ ID NO: 268245 - DNA, 120 bp, Artificial Sequence
  ENSG00000126804_32 (sequence is synthesized)
atctgctgaagaaaagtaactagaaaattcatacaacatcagtggttacagctatactaaaataaaactttatatgctaattatcttcaagggtctttctaaaataaaaggggttgttag

SEQ ID NO: 268246 - DNA, 120 bp, Artificial Sequence
  ENSG00000126804_33 (sequence is synthesized)
aggggttgttaggctactgcaaatataaagagacataatcacaaatctatttatatagatataaataattctaaacttaaaatcactagaattatagcttaaatattatgaaatgtactt

SEQ ID NO: 268247 - DNA, 120 bp, Artificial Sequence
  ENSG00000126804_34 (sequence is synthesized)
aacttacaccaaaaatctgtagtttagagtgtaagaagtaatgggtacagagaaaaaaaatttaagaccaatattttaacaggataatttggttattactcactatagtaaaacacttgc

SEQ ID NO: 268248 - DNA, 120 bp, Artificial Sequence
  ENSG00000126804_35 (sequence is synthesized)
ccttcttccttttccactgtatatgccagtcacaatcttgatcatttatatgaatgaaactcccttttaaacctgttaacttgaaggagaacagaaatggtattacttcaatagtggtag

SEQ ID NO: 268249 - DNA, 120 bp, Artificial Sequence
  ENSG00000126804_36 (sequence is synthesized)
atttccacaaatcagacacattattttcttctgaacttggcaatataacctaataaggcagaataagtttctgttaaaatacttattctcaatatttatgtataaaccatgcttctcagc

SEQ ID NO: 268250 - DNA, 120 bp, Artificial Sequence
  ENSG00000126804_37 (sequence is synthesized)
tttcaaatttcaagataaaatttaagtattcagtaaaatgatggttaacatgttttaaaaaatctttaatggagaagttaaatatttggtgagattttagtctggctataaatgctttgt

SEQ ID NO: 268251 - DNA, 120 bp, Artificial Sequence
  ENSG00000126804_38 (sequence is synthesized)
ttgtttgatatatatatgtgcacatatatatattacttaaccatatgaattttatttccttattctgaatatacttgtagttttacttctttctgtttatgtacccaattccttatgatt

SEQ ID NO: 268252 - DNA, 120 bp, Artificial Sequence
  ENSG00000126804_39 (sequence is synthesized)
tgtttcttctgcaatatcaagatgttatttattttgagaaatgcttatttttatgactatttattccaatgttttaacaagaagcacagagatttatagtattcttaatagtatgtgcag

SEQ ID NO: 268253 - DNA, 120 bp, Artificial Sequence
  ENSG00000126804_40 (sequence is synthesized)
aagttacatcatttaaaaaacccttgctgtaaagtaggataacttgaatattcattctaataattagactaagtgaaaatctgagaaagagttaattgcaatgtgatagtgggtagaaag

SEQ ID NO: 268254 - DNA, 120 bp, Artificial Sequence
  ENSG00000126804_41 (sequence is synthesized)
gagagaaaaacccactgaagggttcaaatacatgtgaattctactgctttaagagaaataaaacaaataagcctagggaaatattagagtctaaaaaaccctagagttaatctcttttgg

SEQ ID NO: 268255 - DNA, 120 bp, Artificial Sequence
  ENSG00000126804_42 (sequence is synthesized)
gaacataaggaggtatacagaactgcagacctctaaacataagtaggaaaaagaaaaataaaagaatattaccaataattaaaggtgccagatcaaaatagtaataaatcaacaaataat

SEQ ID NO: 268256 - DNA, 120 bp, Artificial Sequence
  ENSG00000126804_43 (sequence is synthesized)
ttttgattgactggtggaattagatttactaaataaaaatggcttaaattttgactgtactaactataaatgtaatgaattataataattataaatggtataaatgcattctacaatgtg

SEQ ID NO: 268257 - DNA, 120 bp, Artificial Sequence
  ENSG00000126804_44 (sequence is synthesized)
tgtgattattttctgtattttagtatatagtataaaatggaattattgggttaaagtacttttattacatttcttaatccattgtttttacctaataaaatttcctcctctatattccaa

SEQ ID NO: 268258 - DNA, 120 bp, Artificial Sequence
  ENSG00000126814_0 (sequence is synthesized)
atagaagacccgcccatccacccgcgacccacatccgatcggtaccggagcgggaggtgaggggtcggctcgcggatccagctgcagagcgacgtggggaattggaatggtgctttggat

SEQ ID NO: 268259 - DNA, 120 bp, Artificial Sequence
  ENSG00000126814_1 (sequence is synthesized)
cttatggaggccatttggattctcaggaagatttctgaaactggaaagccatagcataactgaatcaaaatcgttgattccagtagcttggacatccctgacacagatgcttttggaagc

SEQ ID NO: 268260 - DNA, 120 bp, Artificial Sequence
  ENSG00000126814_2 (sequence is synthesized)
acctggtattttcttattgggtcaaagaaaaagattctcaaccatgccagaaacagaaacacatgagagagagactgaattgttttcaccaccttctgatgtccgaggcatgacaaaact

SEQ ID NO: 268261 - DNA, 120 bp, Artificial Sequence
  ENSG00000126814_3 (sequence is synthesized)
tgatagaacagcttttaaaaagacagtcaacattccagtgcttaaagtgaggaaagaaatagtcagtaaattgatgcgatccctaaaaagggcagcattgcagcgcccaggcataagacg

SEQ ID NO: 268262 - DNA, 120 bp, Artificial Sequence
  ENSG00000126814_4 (sequence is synthesized)
tgtgattgaagatccggaagataaagaaagtagactaatcatgttggatccctataaaatatttactcatgattcctttgagaaagcagaactcagtgttttagagcagcttaatgtcag

SEQ ID NO: 268263 - DNA, 120 bp, Artificial Sequence
  ENSG00000126814_5 (sequence is synthesized)
tccacagatctctaaatacaatttggaactaacatatgaacactttaagtcagaagaaatcttgagagctgtgcttcctgaaggtcaagatgtaacttcagggtttagcaggattggaca

SEQ ID NO: 268264 - DNA, 120 bp, Artificial Sequence
  ENSG00000126814_6 (sequence is synthesized)
tattgcacacctaaaccttcgagatcatcagctgcctttcaaacatttaattggccaggttatgattgacaaaaatccaggaatcacctcagcagtaaataaaataaataatattgacaa

SEQ ID NO: 268265 - DNA, 120 bp, Artificial Sequence
  ENSG00000126814_7 (sequence is synthesized)
tatgtaccgaaatttccaaatggaagtgctatctggagagcagaacatgatgacaaaggttcgagaaaacaactacacctatgaatttgatttttcaaaagtctattggaatcctcgtct

SEQ ID NO: 268266 - DNA, 120 bp, Artificial Sequence
  ENSG00000126814_8 (sequence is synthesized)
gtctacagaacacagccgtatcacagaacttctcaaacctggggatgtcctatttgatgtttttgctggggttgggccctttgccattccagtagcaaagaaaaactgcactgtatttgc

SEQ ID NO: 268267 - DNA, 120 bp, Artificial Sequence
  ENSG00000126814_9 (sequence is synthesized)
caatgatctcaatcctgaatctcataaatggctgttgtacaactgtaaattaaataaagtggaccaaaaggtgaaagtcttcaacttggatgggaaagacttcctccaaggaccagtcaa

SEQ ID NO: 268268 - DNA, 120 bp, Artificial Sequence
  ENSG00000126814_10 (sequence is synthesized)
agaagagttaatgcagctgctgggtctgtcaaaagaaagaaaaccctctgtgcacgttgtcatgaacttgccagcaaaagctatagagtttcttagtgctttcaagtggcttttagatgg

SEQ ID NO: 268269 - DNA, 120 bp, Artificial Sequence
  ENSG00000126814_11 (sequence is synthesized)
gcagccatgcagcagtgagttccttcccatagtgcattgttatagcttttccaaagatgctaaccctgctgaggatgttcggcaaagggctggagctgtgttaggcatttctctggaggc

SEQ ID NO: 268270 - DNA, 120 bp, Artificial Sequence
  ENSG00000126814_12 (sequence is synthesized)
atgcagttcagttcacctggtaagaaatgtggccccaaacaaggaaatgctgtgcatcacgtttcagattcctgcctctgtcctctacaagaaccagaccagaaatccagagaatcatga

SEQ ID NO: 268271 - DNA, 120 bp, Artificial Sequence
  ENSG00000126814_13 (sequence is synthesized)
agatccacctcttaaaaggcagaggacggctgaagccttttcagacgaaaaaacacaaattgtttcaaacacttaattggaaatgttttctccatctccctaccagacttacatgtagtg

SEQ ID NO: 268272 - DNA, 120 bp, Artificial Sequence
  ENSG00000126814_14 (sequence is synthesized)
aaatagaatttgtattatttaataaaattttagggtttggtttttactattgaacccttgtactttgccttattttacaaattgaggattaccaattaaactttaactgaactaaggcta

SEQ ID NO: 268273 - DNA, 120 bp, Artificial Sequence
  ENSG00000126814_15 (sequence is synthesized)
aactgaactaaggctaccaaatacattccctgttatctaaattataacatacaattattttataacaaaatatatctaatttttattggataaatatgaataaatattttctctcaggga

SEQ ID NO: 268274 - DNA, 120 bp, Artificial Sequence
  ENSG00000126814_16 (sequence is synthesized)
tagggtgattgagtactaactaggaaggtattaacaccactttgtagttgtcctttacgtaactactcctttactgccaattaactatcaccataaaagtaataaaaaatgaaattattt

SEQ ID NO: 268275 - DNA, 120 bp, Artificial Sequence
  ENSG00000126814_17 (sequence is synthesized)
agaacggggcaggcaaactacatcctgcaggccaaatctgtcccaccacctgttttcatatggcctgtggcctaataatgttcttacgttttccattggttgaaaaataatcaaaagaac

SEQ ID NO: 268276 - DNA, 120 bp, Artificial Sequence
  ENSG00000126814_18 (sequence is synthesized)
attttgtgacgtgaaaattttatgacatctattatgtatcagttttaaaaattagaattgtatgaaattaagagtttcagagttcataaagtttgattggaacataccatgctcatttgt

SEQ ID NO: 268277 - DNA, 120 bp, Artificial Sequence
  ENSG00000126814_19 (sequence is synthesized)
ttacatatcatctgcagctgttttttgtttttaatatggaacgcttcacgaatttgcatgtcatccttgcgcagggaccattctgatcttctctgtaccattccagttttttagtatatg

SEQ ID NO: 268278 - DNA, 120 bp, Artificial Sequence
  ENSG00000126814_20 (sequence is synthesized)
tgctgctgaagtgaggactgcagctgctttcttgaacaatagcagagttgagtggttgcaacacacactgaatgtgactgtcatcacttcacactgctgtttgacacatcacaaatcact

SEQ ID NO: 268279 - DNA, 120 bp, Artificial Sequence
  ENSG00000126814_21 (sequence is synthesized)
gatgtggttgtaacgacagcattttgagtgccatgtatatcacatgaacccacattttattttttattaccagagcatatctattatagcaaaacaagaaaagtggactttgttgttatt

SEQ ID NO: 268280 - DNA, 120 bp, Artificial Sequence
  ENSG00000126814_22 (sequence is synthesized)
tattttgatgttgaattagacgacaaagcatctatatagctaagctaaaagaataaccattgacattaccagacaaaccactcatcacagtattcccaactcacaggcaagcaactgtta

SEQ ID NO: 268281 - DNA, 120 bp, Artificial Sequence
  ENSG00000126814_23 (sequence is synthesized)
gaaaaattagaaaatttaaaatggaaataacaaagcagaatttcttcacaaaatgaaaatgaggctgcaacaacagtaagtctctaagtcaatcatttgttagccaagcaaagccattta

SEQ ID NO: 268282 - DNA, 120 bp, Artificial Sequence
  ENSG00000126814_24 (sequence is synthesized)
ttgatggtgtgaattaattatgtttggatgcagcagctgaatatatccagagaaaataaacttaagattactggcctttggcaagaacagttgcttaaagagttaaggacattgaaagcg

SEQ ID NO: 268283 - DNA, 120 bp, Artificial Sequence
  ENSG00000126814_25 (sequence is synthesized)
gcttaaagagttaaggacattgaaagcgacataaatagtcactttaaaaaggaaatgattctggatggttctttgactctatttttatttttacttagagacagggtcttgctctgttgc

SEQ ID NO: 268284 - DNA, 120 bp, Artificial Sequence
  ENSG00000126814_26 (sequence is synthesized)
acctcaatgtaaccttgaactcctaggcttgagatcttcccatctcggcttcccaatgtgtgaaggttacaggtgtgagcccttatatgtggccctcgtgaatggtttagcactatcccc

SEQ ID NO: 268285 - DNA, 120 bp, Artificial Sequence
  ENSG00000126814_27 (sequence is synthesized)
ttggtggtgtccttaagataatgagttatgagatcttgttgtttcaaagtatgtggcactcgccccccacactctcttgctcctgccttcgccatgtgaagtgccttctcctattttgcc

SEQ ID NO: 268286 - DNA, 120 bp, Artificial Sequence
  ENSG00000126814_28 (sequence is synthesized)
ttctaccatgagtaaaagcttcctgaggcttccccagaagcagatgccagtgctatgcttcctatagcctggagaactgtgagccaattatacctcttttcttataaattacccagtatc

SEQ ID NO: 268287 - DNA, 120 bp, Artificial Sequence
  ENSG00000126814_29 (sequence is synthesized)
ctttatagcaatgcaagaatggcctaaaacacaaggcaaaacaactttgatatggtacagtcattttgacaatcgatatttgaatcacaatatttgatgacaatatccttacacatttgt

SEQ ID NO: 268288 - DNA, 120 bp, Artificial Sequence
  ENSG00000126814_30 (sequence is synthesized)
acatttgtcatactatcaaagagaaagaaacaagatttccattcccacaaattttagtgagtatattttctgagttcagcatttttagggacctaggtgcaagtgcaaaggaaatttccc

SEQ ID NO: 268289 - DNA, 120 bp, Artificial Sequence
  ENSG00000126814_31 (sequence is synthesized)
tgtttcaaaatctatttaactgcaattgaggtgattcaacctaattttcagtaagaagtgattaaaataatgacatgctaaaaggcaaatttcaagggaagaaatgtaaaagaattttac

SEQ ID NO: 268290 - DNA, 120 bp, Artificial Sequence
  ENSG00000126814_32 (sequence is synthesized)
aaatgctttccaagtgatgaatatgctcagttaatttcatatgctcctggattgatagcagtatttggcaatacctatctgtatgagaagacatttttaaagatgaaatgtgtaaaatct

SEQ ID NO: 268291 - DNA, 120 bp, Artificial Sequence
  ENSG00000126814_33 (sequence is synthesized)
tattaccattagtattaatggttaatgatggttaatgataaccattaataggcaatcatttacaactgattttgatcacagggaacacttacttagaaccctgattagaggcaatgttat

SEQ ID NO: 268292 - DNA, 120 bp, Artificial Sequence
  ENSG00000126814_34 (sequence is synthesized)
tctcaccaaaaaaggcattacaaaaaattgggctatattttgaattttgtcaattaaaaaagcgtgggagcagtgtgaaggagaagaggcaagaacgacccctggaccgaccaaagcccg

SEQ ID NO: 268293 - DNA, 120 bp, Artificial Sequence
  ENSG00000126814_35 (sequence is synthesized)
cgcgctgctgcgtcccacacccggtgcccacatcccgccgccgccgccgccgccatgcccaagagaaagactgaaggggatgctaaaggagataaagccaaggtgaaggatgaatcacag

SEQ ID NO: 268294 - DNA, 77 bp, Artificial Sequence
  ENSG00000126814_36 (sequence is synthesized)
agccagagcccaagcctaaaaaggaaaagctgatgctggcaaggagcgggaaggtgctggagatcccaagtgaagtg

SEQ ID NO: 268295 - DNA, 120 bp, Artificial Sequence
  ENSG00000126814_37 (sequence is synthesized)
aaggtacccaaagggaaaaagagaaaagctgatgctggcaaggagcgggaaggtgctggagatcccaagtgaagtgtgtgcattttttataactgtacttctggtgactgtacagtttga

SEQ ID NO: 268296 - DNA, 120 bp, Artificial Sequence
  ENSG00000126814_38 (sequence is synthesized)
ttgttagcacacagaacacttcattgttgtttttgggggaaggggtatgtgtcactaatagaatatctctgaagctggattgatacggggaaaacatctttcccttctagttttgagaga

SEQ ID NO: 268297 - DNA, 70 bp, Artificial Sequence
  ENSG00000126814_39 (sequence is synthesized)
aggaggagggattgaaaaacaaattcgtttttatgtcttcttttccctttccatctttcagcatagactt

SEQ ID NO: 268298 - DNA, 120 bp, Artificial Sequence
  ENSG00000126814_40 (sequence is synthesized)
ttatgtcttcttttccctttccatctttcagcatagacttaatccccttaagcccagacatctgttgggacctgacccccggtcattggttaccagtgtgtctggcaatctggactttcc

SEQ ID NO: 268299 - DNA, 89 bp, Artificial Sequence
  ENSG00000126814_41 (sequence is synthesized)
ggacttcattgggttttatagcggctgatttttggtagtccattgaagaagagagtttgaaagttgtatactgttaatgactgtctgcc

SEQ ID NO: 268300 - DNA, 71 bp, Artificial Sequence
  ENSG00000126814_42 (sequence is synthesized)
tgggttttatagcggctgatttttggtagtccattgaagaagagagtttgaaagttgtatactgttaatga

SEQ ID NO: 268301 - DNA, 120 bp, Artificial Sequence
  ENSG00000126814_43 (sequence is synthesized)
ccacatccgatcggtaccggagcgggaggtgaggggtcggctcgcggatccagctgcagagcgacgtggggaattggaatggtgctttggtgaggtggcggccgcgttaggggctaatgg

SEQ ID NO: 268302 - DNA, 120 bp, Artificial Sequence
  ENSG00000126814_44 (sequence is synthesized)
attccgtacttcaccagggcctggaaggagaggagcgagtcgacttgatctgatgacgcgcgccctcttcgcggcgaacagtgatgatgtcatagaagacccgcccatccacccgcgacc

SEQ ID NO: 268303 - DNA, 120 bp, Artificial Sequence
  ENSG00000126821_0 (sequence is synthesized)
gtcacccggcagactccggagggtagagcgctgtgccggttccgctgccgctggccaggagcgcggggacagttcggggctgcgccggaggccggcccgccttcccgggggttccgttat

SEQ ID NO: 268304 - DNA, 120 bp, Artificial Sequence
  ENSG00000126821_1 (sequence is synthesized)
catgtcgctgaggcagcgcctggcccagctggttggccgtctgcaggacccgcagaaagtggcccgtttccagcggctgtgcggggtggaagcgccgccgcgccgctcagcagaccggag

SEQ ID NO: 268305 - DNA, 120 bp, Artificial Sequence
  ENSG00000126821_2 (sequence is synthesized)
ggaggatgagaaagcggaggcgcctctcgccggagaccctcgactgcgagggcggcagccaggggcgcctggaggcccccagcctcccgggagcgaccgcaatcagtgcccggccaagcc

SEQ ID NO: 268306 - DNA, 120 bp, Artificial Sequence
  ENSG00000126821_3 (sequence is synthesized)
gcggccgagctgggcccggcctcgccgcggcgcgcgggcgctctgcgccgcaactcgctgacgggcgaggagggccagctggcccgcgtgagcaactggccgctctactgcctgttctgc

SEQ ID NO: 268307 - DNA, 120 bp, Artificial Sequence
  ENSG00000126821_4 (sequence is synthesized)
ggcccgcgtgagcaactggccgctctactgcctgttctgcttcggcacggagctgggcaacgaactcttctacatcctgttcttccccttctggatctggaacctggaccctctggtggg

SEQ ID NO: 268308 - DNA, 120 bp, Artificial Sequence
  ENSG00000126821_5 (sequence is synthesized)
ccggaggctcgtggtcatctgggtgctggtcatgtacctgggccagtgcaccaaggacatcatccgctggccgaggcccgcctcgccgcccgtggtcaagttggaggtcttctacaactc

SEQ ID NO: 268309 - DNA, 120 bp, Artificial Sequence
  ENSG00000126821_6 (sequence is synthesized)
tgagtacagcatgccctccacccatgccatgtccggcaccgccatccccatttctatggtcctcctcacctatggccgctggcagtaccctcttatatatggactgattcttattccctg

SEQ ID NO: 268310 - DNA, 120 bp, Artificial Sequence
  ENSG00000126821_7 (sequence is synthesized)
ctggtgttctctagtttgcctaagtagaatttacatgggaatgcactctattctggatattattgctggattcctatataccattttaatcttagctgtcttctatccatttgtggacct

SEQ ID NO: 268311 - DNA, 120 bp, Artificial Sequence
  ENSG00000126821_8 (sequence is synthesized)
gattgacaacttcaaccaaactcacaaatatgctccattcatcatcatcgggcttcatttagctttggggatcttttctttcactcttgacacctggagcacatcccgaggagacacagc

SEQ ID NO: 268312 - DNA, 120 bp, Artificial Sequence
  ENSG00000126821_9 (sequence is synthesized)
cgagatactaggaagtggtgctggaattgcatgtggatctcatgttacttataacatgggtctagtattagatccttctctagatacattacctttagctgggccccccattactgtgac

SEQ ID NO: 268313 - DNA, 120 bp, Artificial Sequence
  ENSG00000126821_10 (sequence is synthesized)
tctgtttggaaaagccatattgcggatcctcatagggatggtatttgtactaataatcagagatgtaatgaaaaagatcaccattcctttagcctgcaaaatcttcaatataccgtgtga

SEQ ID NO: 268314 - DNA, 120 bp, Artificial Sequence
  ENSG00000126821_11 (sequence is synthesized)
tgatattcgaaaagcaagacagcacatggaagttgaacttccttatcggtatattacctatggaatggttggtttctccatcacattttttgttccttacatatttttctttattggtat

SEQ ID NO: 268315 - DNA, 120 bp, Artificial Sequence
  ENSG00000126821_12 (sequence is synthesized)
ctcttgatggagaagtattgtttatgataagaaaggagggtatcagttactgatacccaaaaatatattccaggtaaagccaggtcagaattaggcttttgcaggaatttaacttaaata

SEQ ID NO: 268316 - DNA, 120 bp, Artificial Sequence
  ENSG00000126821_13 (sequence is synthesized)
actgagaaaatgataagtatccatttagaatgttcatgtaatgtttggagagttttgtattatggattcaacttatatataatatatataaggtacataatatgcaattatatatctgat

SEQ ID NO: 268317 - DNA, 120 bp, Artificial Sequence
  ENSG00000126821_14 (sequence is synthesized)
taaaataatatacctaagtgtttttttaaactatgggagtgtattataaaatcaataataatatgcaaacagttgtgcctgtgtatttgaactacatacaggtatgttgttattaacaga

SEQ ID NO: 268318 - DNA, 120 bp, Artificial Sequence
  ENSG00000126821_15 (sequence is synthesized)
tatatttaacatttatttactatgggagccatttcctaattgaattgcgtaattactagaccagaatgcatatgctactatacattgatttactgcctgtttttacactgccattacctt

SEQ ID NO: 268319 - DNA, 120 bp, Artificial Sequence
  ENSG00000126821_16 (sequence is synthesized)
tcatgttatccatgatgttgaacatgggaggcatttttaatggaccaaatttttagaaaaattagtttttggatttttttttaagttctgtatactgttttgaatgaactttatttgcag

SEQ ID NO: 268320 - DNA, 120 bp, Artificial Sequence
  ENSG00000126821_17 (sequence is synthesized)
ctattctggatgtcagtttaataattcaggtactgaattttattgcttgctaattgtgcctttccgttgctaaattaagaaatgctatgtgtactgtgatgtaaaaataagacattaact

SEQ ID NO: 268321 - DNA, 120 bp, Artificial Sequence
  ENSG00000126821_18 (sequence is synthesized)
ttatcttaagttacatataatcaagcaaatattttaaaaaatgtatgtcagggtgacaggcataaaagtaaattacccttaactctttagcctttatttagaaagaaatgtggaatgggc

SEQ ID NO: 268322 - DNA, 120 bp, Artificial Sequence
  ENSG00000126821_19 (sequence is synthesized)
taaactttctcaccaatttattagaaagctaaatggataaatacttccctttttgtagatatttttctgtgcattgtaagttataggagcaggacatattttttgtacattgtcttgatt

SEQ ID NO: 268323 - DNA, 120 bp, Artificial Sequence
  ENSG00000126821_20 (sequence is synthesized)
gtttatactgcaggtaggtatttccagtgaatggaaacgttgaaatttatagatgggacaatgcacatacttcatatgtaaacaaagcatttttctaaataatttggaaaggattggatt

SEQ ID NO: 268324 - DNA, 120 bp, Artificial Sequence
  ENSG00000126821_21 (sequence is synthesized)
tagcaccgttaacttttaatacccatttattggctatttaaggtaaattataaaacctaaaattagtatcagtattttagatcctattattttttcaactttctattattttcacagtgg

SEQ ID NO: 268325 - DNA, 120 bp, Artificial Sequence
  ENSG00000126821_22 (sequence is synthesized)
aaaatttgcgtatagtattaaactattcttttttctgtctacctttatattttgaagtgtggttgtacttacgttaatagtaagtgtatttgtagaaagtttttcataaagaagagatta

SEQ ID NO: 268326 - DNA, 120 bp, Artificial Sequence
  ENSG00000126821_23 (sequence is synthesized)
actttccatataaataaataccaggtatgaaattactgattttagtgcaatatctgtatgattatccagaactatcacttcagatgtttctattttgggcaccataactatttgagctca

SEQ ID NO: 268327 - DNA, 120 bp, Artificial Sequence
  ENSG00000126821_24 (sequence is synthesized)
tatttttataattctgattgagaatttaggggcatggtaatttttaccaaaactgaagctggtaattttaagtaaagcaactaaatttaccctttacttattagttaaaaggaaaccaag

SEQ ID NO: 268328 - DNA, 120 bp, Artificial Sequence
  ENSG00000126821_25 (sequence is synthesized)
gcatgtaggaaaatattggtacgttggaaaatgtgaaaagagctttactttcaaaatgtatgtttaatgaattgaattttagggaccgtttcccataatttgggcctatgctatcctgtt

SEQ ID NO: 268329 - DNA, 120 bp, Artificial Sequence
  ENSG00000126821_26 (sequence is synthesized)
gatttttatgtctagcttaaaaggtatttgaaaatgttccatttgtgttttattattttctgtcctatgacagttctatgctaaatgtattttaaaataaaagccaaattgaagattaaa

SEQ ID NO: 268330 - DNA, 120 bp, Artificial Sequence
  ENSG00000126822_0 (sequence is synthesized)
gctccctcgctccctcgctccctcctgccctcccgctgcagctccggctccgctcgacttcctgccgggcgctggcaagccgcgcgctgcctggggtctccgggggccgcgcttgcagct

SEQ ID NO: 268331 - DNA, 120 bp, Artificial Sequence
  ENSG00000126822_1 (sequence is synthesized)
ggccgagtccgggccagctgaggggctggcggtgggcgggagcggtcggcggcctcagccccttcagagagcgactttcaaactcgcgcccgcgtcgcggcagcacctgggcagccccgc

SEQ ID NO: 268332 - DNA, 120 bp, Artificial Sequence
  ENSG00000126822_2 (sequence is synthesized)
acgccgtgcgcgtcccgagcccgcggggcagctaccgctcgaatctccctggggtgccctccccaggcagcaatgccaggatgcctgtgtccacctccctccaccaggatggcagccagg

SEQ ID NO: 268333 - DNA, 120 bp, Artificial Sequence
  ENSG00000126822_3 (sequence is synthesized)
agcggccggtgagcctgacctctaccacctcctcgtcgggctcctcctgtgacagtcgcagtgccatggaggagcccagcagctccgaggctcccgccaagaatggggcaggctccctga

SEQ ID NO: 268334 - DNA, 120 bp, Artificial Sequence
  ENSG00000126822_4 (sequence is synthesized)
gaagccggcatctgcccaacagcaacaacaactccagcagctggttgaacgtgaaggggcccctctccccgttcaacagccgggcagcggcagggcctgcacaccacaagctcagctacc

SEQ ID NO: 268335 - DNA, 120 bp, Artificial Sequence
  ENSG00000126822_5 (sequence is synthesized)
tgggccgagtggtgcgggagatcgtggagacagagcgcatgtacgtacaggacctgcgcagcatcgtggaggactacctcttgaagatcattgacacacccgggctgctgaagccagaac

SEQ ID NO: 268336 - DNA, 120 bp, Artificial Sequence
  ENSG00000126822_6 (sequence is synthesized)
aggtcagcgccctctttgggaacatagaaaatatctacgcgctgaacagccagctcctcagagacctggacagctgcaatagtgaccccgtggctgtggccagctgctttgtggaaagga

SEQ ID NO: 268337 - DNA, 120 bp, Artificial Sequence
  ENSG00000126822_7 (sequence is synthesized)
gccaagagtttgatatctacactcagtattgcaacaattaccccaactccgtggccgccctgacggaatgcatgcgggacaagcagcaggccaagttctttcgggaccggcaggagctgc

SEQ ID NO: 268338 - DNA, 120 bp, Artificial Sequence
  ENSG00000126822_8 (sequence is synthesized)
tacagcactcgctgcccttgggctcctacctgctgaagccagtccagcgcatcctcaagtaccacctgctgctccaggaaattgccaagcattttgatgaagaagaggatggctttgagg

SEQ ID NO: 268339 - DNA, 120 bp, Artificial Sequence
  ENSG00000126822_9 (sequence is synthesized)
tggtggaggatgccattgacaccatgacctgtgtggcctggtacatcaacgacatgaagaggaggcatgagcacgcggtccggctccaggagattcagtcactcctcatcaactggaagg

SEQ ID NO: 268340 - DNA, 120 bp, Artificial Sequence
  ENSG00000126822_10 (sequence is synthesized)
ggcccgacctgaccacctacggggagcttgtcctggagggcacattccgcgtgcatcgcgtgcgcaatgaaaggacctttttcctctttgacaaaacactgcttatcaccaagaagcggg

SEQ ID NO: 268341 - DNA, 120 bp, Artificial Sequence
  ENSG00000126822_11 (sequence is synthesized)
gcgatcactttgtctacaagggcaacatcccgtgctcctccctgatgctgatcgaaagcaccagagactccctgtgcttcactgtcacccactacaagcacagcaagcagcagtacagca

SEQ ID NO: 268342 - DNA, 120 bp, Artificial Sequence
  ENSG00000126822_12 (sequence is synthesized)
tccaggccaagacagtggaggagaaacggaactggactcaccacatcaagaggctcatcctagagaaccaccatgccaccattccccagaaggccaaggaagccatcttggaaatggatt

SEQ ID NO: 268343 - DNA, 120 bp, Artificial Sequence
  ENSG00000126822_13 (sequence is synthesized)
cctattatcccaatcggtaccgctgcagcccagagcggctgaagaaggcttggtcctcccaggatgaggtgtccaccaatgtgcgccaggggcgccggcaatctgagccaaccaaacacc

SEQ ID NO: 268344 - DNA, 120 bp, Artificial Sequence
  ENSG00000126822_14 (sequence is synthesized)
tgctcaggcaactcaacgagaaagcccgagcagcaggaatgaagggaaaggggcgcagggagtctgaaagctccaggagcagcagaaggcccagtggccggtctccaaccagtactgaga

SEQ ID NO: 268345 - DNA, 120 bp, Artificial Sequence
  ENSG00000126822_15 (sequence is synthesized)
agcgcatgagcttcgagtccatttcttccctgccagaggttgagccggaccctgaggctgggagtgagcaagaggtattttctgctgtggaagggcccagtgccgaggagacgccttcag

SEQ ID NO: 268346 - DNA, 120 bp, Artificial Sequence
  ENSG00000126822_16 (sequence is synthesized)
acacagaatctccagaagtcctggagacacagcttgatgcccaccagggccttctggggatggaccccccaggtgacatggtggacttcgtggcagctgagagcactgaggaccttaagg

SEQ ID NO: 268347 - DNA, 120 bp, Artificial Sequence
  ENSG00000126822_17 (sequence is synthesized)
ccctgagcagcgaggaggaagaagaaatgggaggtgccgcccaggagcctgagagccttctgccaccctctgtgctggaccaggccagcgtcattgcggagcgatttgtcagcagcttct

SEQ ID NO: 268348 - DNA, 120 bp, Artificial Sequence
  ENSG00000126822_18 (sequence is synthesized)
ctcggcggagcagcgtggcacaggaggacagcaagtccagtggctttgggagcccgcggctggtcagccggagcagcagcgtgctcagcctggagggcagcgagaagggcctggcccggc

SEQ ID NO: 268349 - DNA, 120 bp, Artificial Sequence
  ENSG00000126822_19 (sequence is synthesized)
atggcagtgccacagactccctcagctgtcagctctccccagaagtggacatcagtgtgggggtggccacagaggacagcccttctgtcaatgggatggagcccccaagcccaggctgcc

SEQ ID NO: 268350 - DNA, 120 bp, Artificial Sequence
  ENSG00000126822_20 (sequence is synthesized)
cagtggagcctgaccggtcttcctgcaagaagaaggaatcagcactctccacccgagaccggctgttgctagacaagattaagagctattatgaaaatgcagaacaccatgatgcaggct

SEQ ID NO: 268351 - DNA, 120 bp, Artificial Sequence
  ENSG00000126822_21 (sequence is synthesized)
tcagcgtccgtcgccgggagagcctctcctacatccccaaaggactggtaagaaactccatctccaggttcaacagccttccccggccagacccagagccagtacctccagtggggagca

SEQ ID NO: 268352 - DNA, 120 bp, Artificial Sequence
  ENSG00000126822_22 (sequence is synthesized)
agagacaggtgggctcccggccgacttcgtgggccctgtttgagctcccaggaccaagccaggcagtcaaaggggacccacctcccatctcagatgctgagttccgcccatcttcagaaa

SEQ ID NO: 268353 - DNA, 120 bp, Artificial Sequence
  ENSG00000126822_23 (sequence is synthesized)
ttgtgaagatctgggagggaatggagtcttccggagggagccctgggaaggggccaggccagggccaggccaatggctttgacctgcatgagccactcttcatcctggaggagcatgagc

SEQ ID NO: 268354 - DNA, 120 bp, Artificial Sequence
  ENSG00000126822_24 (sequence is synthesized)
tgggagccatcacagaggagtcggccactgcctccccggaaagctcctctcccactgaggggcgcagcccggcccacctggcccgggagctgaaagagctggtgaaggagctgagcagca

SEQ ID NO: 268355 - DNA, 120 bp, Artificial Sequence
  ENSG00000126822_25 (sequence is synthesized)
gtacccagggggagctggtggccccactgcacccccgcatcgtgcagctctcccacgtaatggacagccacgtgagcgagcgcgtcaagaacaaggtctaccagctggcccgccagtaca

SEQ ID NO: 268356 - DNA, 120 bp, Artificial Sequence
  ENSG00000126822_26 (sequence is synthesized)
gcctccggatcaagagcaacaagccagtgatggccaggccaccactgcagtgggaaaaggtggcccctgagagggatgggaagagccccactgtgccctgtctacaggaagaggctggag

SEQ ID NO: 268357 - DNA, 120 bp, Artificial Sequence
  ENSG00000126822_27 (sequence is synthesized)
agccattaggtggcaaaggtaagaggaagccggtgctgtctctatttgactatgagcagctgatggcccaggagcacagccctcccaagccctcctcggctggggagatgtcaccacagc

SEQ ID NO: 268358 - DNA, 120 bp, Artificial Sequence
  ENSG00000126822_28 (sequence is synthesized)
gtttcttcttcaacccgtctgctgtcagccagaggaccacctcgcctgggggccggccctccgcccggagccccctcagccccacagagaccttcagctggcccgacgtccgtgagctct

SEQ ID NO: 268359 - DNA, 120 bp, Artificial Sequence
  ENSG00000126822_29 (sequence is synthesized)
gctccaagtatgcctcccgcgatgaggcacgccgagcagggggcggccggccccgcggcccacccgtcaacaggagccactcggtgccggagaacatggtagagccacctctgtcgggca

SEQ ID NO: 268360 - DNA, 120 bp, Artificial Sequence
  ENSG00000126822_30 (sequence is synthesized)
gggtgggccgctgccgcagcctgagcaccaagaggggccggggaggcggagaggctgcccaatcccctgggcctctgccccagagcaagccggatggaggcgagaccctgtatgtcactg

SEQ ID NO: 268361 - DNA, 120 bp, Artificial Sequence
  ENSG00000126822_31 (sequence is synthesized)
cagacctcaccctggaggacaaccggcgggtgattgtcatggagaagggaccccttcccagccccactgcagggctggaggagagcagtggccagggaccaagctcaccggtggccctgc

SEQ ID NO: 268362 - DNA, 120 bp, Artificial Sequence
  ENSG00000126822_32 (sequence is synthesized)
tggggcaggttcaggacttccagcagtctgcagagtgccagccgaaggaagagggttccagggacccggcagacccgagccagcagggcagagtgagaaaccttagagagaagttccagg

SEQ ID NO: 268363 - DNA, 120 bp, Artificial Sequence
  ENSG00000126822_33 (sequence is synthesized)
ccttgaactctgtcggttgatgctgactcctgggggagggaggagtcatgttggaggttggggaagaacctgggcatccttcccctcaagcctgggctcatggagcccctgcccagggcc

SEQ ID NO: 268364 - DNA, 120 bp, Artificial Sequence
  ENSG00000126822_34 (sequence is synthesized)
ctcaggtgggcggaaagtccatcccctccgcccttcaggaaggatgctcccgtgtgcaggggtctcctgcctgtgccatccactggggctcgagacaatttcccactcacctgtgaggcc

SEQ ID NO: 268365 - DNA, 120 bp, Artificial Sequence
  ENSG00000126822_35 (sequence is synthesized)
ggtgtggctgcttcccttgtaaatagttgttctctggtaagaagccaaatatttaagctcacttcttcccagagagaggaagctctgctcaggcctccagcgttggctggccatggccac

SEQ ID NO: 268366 - DNA, 120 bp, Artificial Sequence
  ENSG00000126822_36 (sequence is synthesized)
agccagatggaggagcccatccccaggagactcaggcagtggcctggagaggctttgttctgtaacggtgccttttcttagggtccaggcaggaatgaagccaataatttattgctttcc

SEQ ID NO: 268367 - DNA, 120 bp, Artificial Sequence
  ENSG00000126822_37 (sequence is synthesized)
attctgtggtatgatgtgcgtgtgcgtgagtgtgtggcccctgtttattcccctcctgtcaagaatgaagtggattcagttcaggtacttttgagggttgttgtgctgaccctgtggttg

SEQ ID NO: 268368 - DNA, 120 bp, Artificial Sequence
  ENSG00000126822_38 (sequence is synthesized)
tcgctgatgtacacacatttcattatttgccaatggtgcaataaccactgctgaccaacccactatgtgtgaactccttcctaggcttggctggggtagggaaggttattcatgggccag

SEQ ID NO: 268369 - DNA, 120 bp, Artificial Sequence
  ENSG00000126822_39 (sequence is synthesized)
ggatgtcttagggagatggagacatggaggttgttccttccacactcaattgtcacttgggcttatgaaacataaggcacccgggtactggtgggggaggtggggcaggaggatgtgagg

SEQ ID NO: 268370 - DNA, 120 bp, Artificial Sequence
  ENSG00000126822_40 (sequence is synthesized)
gcgggctttttctttctgctgcctagactcccatgggcttctctgtctagcagcagcctgctgtcctgtctagggtagggggtcccgcatgccagccttttgctcttttccccaagggcc

SEQ ID NO: 268371 - DNA, 120 bp, Artificial Sequence
  ENSG00000126822_41 (sequence is synthesized)
agagttggaccaagaaaaagggaggtggtgaggtggatagactgtttttctcataagcagatgctcccagtatctggtgccttttgcgtttctctccggtccccaggaaacatcctagaa

SEQ ID NO: 268372 - DNA, 61 bp, Artificial Sequence
  ENSG00000126822_42 (sequence is synthesized)
tgcggctgaaggtaaggattctaaactcggagactagaaatgtcctaaaggtgtctgcaac

SEQ ID NO: 268373 - DNA, 120 bp, Artificial Sequence
  ENSG00000126822_43 (sequence is synthesized)
taaactcggagactagaaatgtcctaaaggtgtctgcaacattggatgaggagtacaagtgcatttttctgggatgattcctccctttttatcacattctcagaagtatctttgattcag

SEQ ID NO: 268374 - DNA, 120 bp, Artificial Sequence
  ENSG00000126822_44 (sequence is synthesized)
aagagttaggaatgcctccctatttcagttgggttttctgccctttctccacagaggtccagactcattttgcttaattttttttctagctggggcctgggaggtagaggcttcagggcc

SEQ ID NO: 268375 - DNA, 120 bp, Artificial Sequence
  ENSG00000126822_45 (sequence is synthesized)
tgggtggtagagctgcctgacaagtgttcagcagggctgctgggtcagggccctgtgggccttctgacccaacctgaagatgggtctgctaagtctaacaaggtcaagggaagatcagag

SEQ ID NO: 268376 - DNA, 67 bp, Artificial Sequence
  ENSG00000126822_46 (sequence is synthesized)
tgggtctgctaagtctaacaaggtcaagggaagatcagagggacccagattcttttttatcccccac

SEQ ID NO: 268377 - DNA, 120 bp, Artificial Sequence
  ENSG00000126822_47 (sequence is synthesized)
cagtgcccttgtggttactcagcatcatatcttgagactggcctggcaggagccagtgactgtggaatgaccacagaagattcagggcagctgccagaccaggggctatctctgccctgc

SEQ ID NO: 268378 - DNA, 120 bp, Artificial Sequence
  ENSG00000126822_48 (sequence is synthesized)
gctgcttctgctcaagagaggttgtcactagcctctgatcttcccttgaagaacccgactggggctcttcagagggtggggcccaggaagttgtagttaaccccttccccaggcagtcct

SEQ ID NO: 268379 - DNA, 120 bp, Artificial Sequence
  ENSG00000126822_49 (sequence is synthesized)
tacacggccatctaggtatgcctgggaaccttgcaccaggtcggtggttctcactggctgcccattggaattatctggggagccttctggaaacgcagtgcttacattccatctccctag

SEQ ID NO: 268380 - DNA, 120 bp, Artificial Sequence
  ENSG00000126822_50 (sequence is synthesized)
accaacagaaactgccctctggaggtgaatcccaggcttagagattctgatgattctgcggtccagtgagtgctgagatctgtcctgagctctgtggggaggggcctggactgatcactg

SEQ ID NO: 268381 - DNA, 120 bp, Artificial Sequence
  ENSG00000126822_51 (sequence is synthesized)
cttggaaatgattttgccctacagtaggccttcaagttgatcaaatgcatgaatgagcaagcttttcttggagtttgtgatgaagcccaggaaccgggtgcttgcagtcgtcccataagg

SEQ ID NO: 268382 - DNA, 120 bp, Artificial Sequence
  ENSG00000126822_52 (sequence is synthesized)
ctcccagggacaagctagagaatctggctgtccctctgtctccatggtgccagccctcttaggctcagttcaaagggagaggaggctagttaaataagaaactgagagaaacatggagca

SEQ ID NO: 268383 - DNA, 120 bp, Artificial Sequence
  ENSG00000126822_53 (sequence is synthesized)
ttattgatttattagaaaaactagtaaatgggtttcctctggttggtggaagcacggttgagcaggtggaggacaggacccagctggccccagggccagccccagattgcatggtctgtg

SEQ ID NO: 268384 - DNA, 120 bp, Artificial Sequence
  ENSG00000126822_54 (sequence is synthesized)
cccaacagggttgcattcctctgcagccgccgcctcctcatttcctccctgagcttgtttgtccaagccaccaagccatgtggtcccgctggcttcatcctcctctggattcctgccccc

SEQ ID NO: 268385 - DNA, 120 bp, Artificial Sequence
  ENSG00000126822_55 (sequence is synthesized)
ctcccatgaagggaggaagaggattcagggtcagcctaggggaccctggctccctccgataggcaggaaggaggagggatgcggaggagaggctgagccttccacgggcctcctgttagg

SEQ ID NO: 268386 - DNA, 120 bp, Artificial Sequence
  ENSG00000126822_56 (sequence is synthesized)
ggtgttggtggaggccaggttggggagggaagcctaaggaccctccacacctcccacagccagagtcagttgaggctgggacaaaggggaaggagagagggaaggaggaccgcctgacct

SEQ ID NO: 268387 - DNA, 120 bp, Artificial Sequence
  ENSG00000126822_57 (sequence is synthesized)
tgcccagaaggagcttcctctaaactgccctgggaaggaagcctggtatgctggtgtggactggagctgtgtcaacctcgtttgggaatactgtcaaaagactgtagagtagaataagga

SEQ ID NO: 268388 - DNA, 120 bp, Artificial Sequence
  ENSG00000126822_58 (sequence is synthesized)
gagaaaaaaaaaaaaagaccttgctagggcactgggagagcttagccctggtgtggcacacacagggtctcccaaagctggatgcctgcattttcagtctagttggtcgaatgtcttgga

SEQ ID NO: 268389 - DNA, 120 bp, Artificial Sequence
  ENSG00000126822_59 (sequence is synthesized)
gcctgggtgacaggagggatgtgtggggagctggcaacagaatggtcacatgcagctggctgccctggaccaggccaggggacctggggtggtgagatgctagctcttccactagagccc

SEQ ID NO: 268390 - DNA, 120 bp, Artificial Sequence
  ENSG00000126822_60 (sequence is synthesized)
ttcctttctcgggtctgtggagttgcttgctggaaatgcctcacttcaggtgctgatttggcacacgtggaagggggagggtgggcccttgtccctaggctccctaaagactggcccagg

SEQ ID NO: 268391 - DNA, 120 bp, Artificial Sequence
  ENSG00000126822_61 (sequence is synthesized)
gaaacagttgagggagatgtttgccaccatctgcccttcagcaaggaacctgctctctgccccagaggaggacatgcctgcaagtgcaccaaaggcctactttattgctaggtgagtgca

SEQ ID NO: 268392 - DNA, 120 bp, Artificial Sequence
  ENSG00000126822_62 (sequence is synthesized)
gtcacctcactgccttggtttccccagatacagaaagaggctggtgagtgatacacactaggttccctgtatagggtcatatgtaccaaagccaaatgaagaccttgctcaccagggcgg

SEQ ID NO: 268393 - DNA, 120 bp, Artificial Sequence
  ENSG00000126822_63 (sequence is synthesized)
gaacctggggatgtcaggctccatcggatgacgtcttccttcctgtggctcctgcctgctgcagttggtgtcaccctgacatatagtgtcagggccacagggtggaactgatttctgccg

SEQ ID NO: 268394 - DNA, 120 bp, Artificial Sequence
  ENSG00000126822_64 (sequence is synthesized)
gcactggtcagcactcagggttcctcagggggcctcattctggatgcctgcccctgtggcttctacctgaacctcacccacttcatctccatggaactaaggtccttctcacggggaagg

SEQ ID NO: 268395 - DNA, 120 bp, Artificial Sequence
  ENSG00000126822_65 (sequence is synthesized)
tgatagaaacttgactgcaggccctggggactttcatggtttccttgggggaaaatgcctgctgccctccgccctcccccccacccccgacccgcttgactgctctcttggacctaaccc

SEQ ID NO: 268396 - DNA, 120 bp, Artificial Sequence
  ENSG00000126822_66 (sequence is synthesized)
tagtttgatactgggccagaactgtgttgctttcggagtagagtggtggggaaaatatggaatgagctttctcttcctccagaagtatgacctgagcagcaaggggaaggccattcctgg

SEQ ID NO: 268397 - DNA, 120 bp, Artificial Sequence
  ENSG00000126822_67 (sequence is synthesized)
ggacgttggttgcagagcttctggtgctcagggctggagggtggtagatatttgacctctgtactcatgtgaccccctccccgccaagacctggggccaggacgtggagaagctgatcaa

SEQ ID NO: 268398 - DNA, 120 bp, Artificial Sequence
  ENSG00000126822_68 (sequence is synthesized)
ggggtaccacaccttcatggctctggccctgacatttgtcccagttgtgcaggagtagctgtcacatgggtggtgataccaagacatggctgcgtctgccaccccgagaaaacagatgat

SEQ ID NO: 268399 - DNA, 120 bp, Artificial Sequence
  ENSG00000126822_69 (sequence is synthesized)
caactttactgtctgcccagccattaccctccaaagtcccagctgcagacaggatgcaattgagcatttggctttgggatgctttactgcaggtgcggggggtatccatcttatatctgg

SEQ ID NO: 268400 - DNA, 120 bp, Artificial Sequence
  ENSG00000126822_70 (sequence is synthesized)
gggcccacactgtcccgtagggggcctatgtctgttggatattgctggtttggctgccactgggagtggggcgagggtcccagcattgagagggagagccttaggcagtgttgtgacgca

SEQ ID NO: 268401 - DNA, 120 bp, Artificial Sequence
  ENSG00000126822_71 (sequence is synthesized)
cctgtcactccttcagatcagagccctgtgccctagccacggttttcaatgaggaatggtctgaccttgctgcccttcctgggaccgcctgtggtggcacaaagggtgctagaggcactc

SEQ ID NO: 268402 - DNA, 120 bp, Artificial Sequence
  ENSG00000126822_72 (sequence is synthesized)
agccaggccctgccaaccgtgggagggtaccctttgatctggggggagaagcagagaggagggatgtggtggcccctgaagtgagagtcccagttctgcggaagcccagtgggaaggagg

SEQ ID NO: 268403 - DNA, 120 bp, Artificial Sequence
  ENSG00000126822_73 (sequence is synthesized)
ctggcagctcccaaggccctgcacccagtctggtcccctcagccccccagagcccctggcccagagctagggctttgtgggccacctgaaggctccttcctcatgcccctagggggctgg

SEQ ID NO: 268404 - DNA, 120 bp, Artificial Sequence
  ENSG00000126822_74 (sequence is synthesized)
ccatgcatttccagtgtcttcttcctttcccctttccctggctgccaccaggtgggaggtgacccgaagcaagacttgctttaggaacgggcagcgtttgaagaaccccatcagccttct

SEQ ID NO: 268405 - DNA, 120 bp, Artificial Sequence
  ENSG00000126822_75 (sequence is synthesized)
ccagctcttttttttttttttttttggttgggggtaaggggcctgtgccccctcggctcaggaggagggtgggagaggagggcgtgtgcctcagagaaccgtttcctgcccccaggcctg

SEQ ID NO: 268406 - DNA, 120 bp, Artificial Sequence
  ENSG00000126822_76 (sequence is synthesized)
gaggccccaaaggcgccagaggagctgggagcccctgtccctggagcggagccagcgcgggcgagggcatggagggggcgtcggcccaggacacgcgggcgaaggcagcttttgcagtgc

SEQ ID NO: 268407 - DNA, 120 bp, Artificial Sequence
  ENSG00000126822_77 (sequence is synthesized)
gtgcagcgtggggcccgggggcccggcccgcgactcgactcatctcgattcgaccggcgggcggcggcgagaggaggccaaggcctgggctgcccggtctctgcgcgtcccgactccgcc

SEQ ID NO: 268408 - DNA, 120 bp, Artificial Sequence
  ENSG00000126822_78 (sequence is synthesized)
ccgccagccccacctgctacttctttttggggaagaagctgaatctcttctccttgtctttcttgccgaggctggcgtcggggccggagagggaaggcaggggcaggctctgcgccttga

SEQ ID NO: 268409 - DNA, 120 bp, Artificial Sequence
  ENSG00000126822_79 (sequence is synthesized)
cgcggatgctctgggactcgttgatggcggtgctcacgccctgcagccaggacagcatctcctcctgcggggcggagggtcacggtggagtctggaggcccacagccccccacctcccgg

SEQ ID NO: 268410 - DNA, 120 bp, Artificial Sequence
  ENSG00000126822_80 (sequence is synthesized)
gccaggcaacaatggtgggggctcttgggactgccccttctgagggggcctccagggcaagcggcctggggtcctccacctacccccttcttagccaggtctgggctaggctgcccgcgc

SEQ ID NO: 268411 - DNA, 120 bp, Artificial Sequence
  ENSG00000126822_81 (sequence is synthesized)
ttacctcatccttgccatggaagagccactcgctgccattactcagcctaggaggacaaagggtttcctgtcatggagacacctctggagggggcgctgggcagagggctggctctgatc

SEQ ID NO: 268412 - DNA, 120 bp, Artificial Sequence
  ENSG00000126822_82 (sequence is synthesized)
ccacaataccctgagccgaacatccagacccctctcaggcagcccagcactttctgagaggtcaaagtctggaccatcagcctctttgatttgaaaaacccctgaggagcagctcaggcc

SEQ ID NO: 268413 - DNA, 120 bp, Artificial Sequence
  ENSG00000126822_83 (sequence is synthesized)
tggcactggtcccctacagagggcctctgccctgccactaatgccaaatcaagccatcaacccgagctttcaaaggccaggaaggcctcacctcagcttaaagacgtgcttcttcttctt

SEQ ID NO: 268414 - DNA, 120 bp, Artificial Sequence
  ENSG00000126822_84 (sequence is synthesized)
gtagttggcagcaatctcacagatggcatgtctcagggccaggggttcctccccatggtagggcatccccagggccaggttcttggcatccttgtagaaggttagctcactgttcctgag

SEQ ID NO: 268415 - DNA, 120 bp, Artificial Sequence
  ENSG00000126822_85 (sequence is synthesized)
cacacagtacaggttgttccaggacctgcaaagatgcagacaggcaggtcacccacatcctgatatggtatctctagagtcaattcctatagcttcaccattaaaaaaaattacaccatg

SEQ ID NO: 268416 - DNA, 120 bp, Artificial Sequence
  ENSG00000126822_86 (sequence is synthesized)
tttcaggtctctctggaggacctgacagggcatgaaggcaacgagaagggggctgggccggagcccccaggctcagaggaggaggaggaggagcaggaggagagcctggcggtggcggag

SEQ ID NO: 268417 - DNA, 120 bp, Artificial Sequence
  ENSG00000126822_87 (sequence is synthesized)
caggtagccgactttgccagctccctgctggccgccctccactgctggcactatcgggccaacgctttacttttctcccggggcgctatgggaaaggggcgcagggagtctgaaagctcc

SEQ ID NO: 268418 - DNA, 120 bp, Artificial Sequence
  ENSG00000126822_88 (sequence is synthesized)
gtgagccatcatgcctggccgagaaagcgagttttctagaagactgattcactgattgatgactgactggattgattcatgttgcaagatggaagaggtcatggctggggcatacttaag

SEQ ID NO: 268419 - DNA, 120 bp, Artificial Sequence
  ENSG00000126822_89 (sequence is synthesized)
cctgacagggcatgaaggcaacgagaagggggctgggccggagcccccaggctcagaggaggaggaggaggagcaggaggagagcctggcggtggcggagcagggaaaggggcgcaggga

SEQ ID NO: 268420 - DNA, 120 bp, Artificial Sequence
  ENSG00000126822_90 (sequence is synthesized)
ctttgtctacaagggcaacatcccggtaaccaggccctgccccatctcctctgccatcttctctccttcccaaaggatctgggctccccttcttgtctgcttcttggggctccagcacca

SEQ ID NO: 268421 - DNA, 120 bp, Artificial Sequence
  ENSG00000126822_91 (sequence is synthesized)
gaggggaagcagccgacaacctggggtgtgacctgagggtggaggattgtcagaatagtgtagagggaactctgcctccattccccccagaagagggcctcgcccctggctggctgagga

SEQ ID NO: 268422 - DNA, 120 bp, Artificial Sequence
  ENSG00000126822_92 (sequence is synthesized)
gaggggctggagctctcccccatgcacaggcctcatgccctttcctccggaaacaatgagagccgagcaacaggcacagacctgcgctgctctgtggcccctgggcccctgctctgtcag

SEQ ID NO: 268423 - DNA, 120 bp, Artificial Sequence
  ENSG00000126822_93 (sequence is synthesized)
tcattcttttgaaagcccaggagactaggtgagggttctgggagcaggagcccccagtgaggacttccccagggagctgtccagaggtctttttcctgcttactgatctcttcccctccc

SEQ ID NO: 268424 - DNA, 120 bp, Artificial Sequence
  ENSG00000126822_94 (sequence is synthesized)
agtatcccctgtgcttaattgctggaggtttgtgcaggtcctcagccctgtggcgctcacctcccagggctgtggcctgggtccctacccagcggggacctgcagaattgtgtcgggaag

SEQ ID NO: 268425 - DNA, 120 bp, Artificial Sequence
  ENSG00000126822_95 (sequence is synthesized)
ttgcatttcctgggctagggccccccagcaatcaggaatgagagaaatgcagaaagtatgacccacacgcagaactggttctgaatagaacatttattgacgaagttttgcaggaggcgg

SEQ ID NO: 268426 - DNA, 120 bp, Artificial Sequence
  ENSG00000126838_0 (sequence is synthesized)
agggcgaggctgagggcagagagttggacacaaccctgagatttatccctcacaatgcggaaagacagacttcttcatttatgtcttgtgctacttcttatcctgctttctgccagtgac

SEQ ID NO: 268427 - DNA, 120 bp, Artificial Sequence
  ENSG00000126838_1 (sequence is synthesized)
tcaaactctacagaaccgcagtatatggtgctggtcccctccctgctccacactgaggcccctaagaagggctgtgtccttctgagccacctgaatgagacagtgactgtaagtgcttcc

SEQ ID NO: 268428 - DNA, 120 bp, Artificial Sequence
  ENSG00000126838_2 (sequence is synthesized)
ttggagtctggcagggaaaacaggagcctcttcactgacctggtggcggagaaggacttattccactgtgtctccttcactctcccaaggatctcagcctcttcagaggtggcattcctt

SEQ ID NO: 268429 - DNA, 120 bp, Artificial Sequence
  ENSG00000126838_3 (sequence is synthesized)
agcatccagataaaggggcctacgcaagatttcaggaagaggaacacagttctggtactgaacacccaaagtctggtctttgtccagacagacaaacccatgtataaaccaggacagaca

SEQ ID NO: 268430 - DNA, 120 bp, Artificial Sequence
  ENSG00000126838_4 (sequence is synthesized)
gtaagattccgtgttgtctccgtggatgaaaattttcgccctcgaaatgaactgattccactgatataccttgagaacccaagaagaaatcgaattgcacaatggcagagtctcaagcta

SEQ ID NO: 268431 - DNA, 120 bp, Artificial Sequence
  ENSG00000126838_5 (sequence is synthesized)
gaagctggcatcaatcagttgtcctttcccctctcatcagagcccattcagggctcctacagggtggtggtacagacagaatcaggtggaaggatacagcaccccttcaccgtggaggaa

SEQ ID NO: 268432 - DNA, 120 bp, Artificial Sequence
  ENSG00000126838_6 (sequence is synthesized)
tttgtgcttcccaagtttgaggtcaaagttcaggtgccaaagataatcagtatcatggatgaaaaagtgaacataacagtctgtggagaatacacttatgggaagcctgtcccaggactt

SEQ ID NO: 268433 - DNA, 120 bp, Artificial Sequence
  ENSG00000126838_7 (sequence is synthesized)
gcaactgtgagcctgtgtagaaaattatctcgtgttcttaattgtgacaagcaggaggtctgtgaggaattcagtcaacagcttaacagcaatggctgcatcacccaacaagtacacacc

SEQ ID NO: 268434 - DNA, 120 bp, Artificial Sequence
  ENSG00000126838_8 (sequence is synthesized)
aaaatgctccagattacaaatacgggctttgaaatgaagcttagagtggaagccaggatcagagaagaggggacagacctggaagtcactgcaaacaggatcagtgaaatcacaaacatt

SEQ ID NO: 268435 - DNA, 120 bp, Artificial Sequence
  ENSG00000126838_9 (sequence is synthesized)
gtatccaaactcaaattcgtgaaagtggattcacactttagacaaggaatccccttttttgcacaggtgcttctggtggatggaaaaggtgtgcccatccccaataaactcttcttcatc

SEQ ID NO: 268436 - DNA, 120 bp, Artificial Sequence
  ENSG00000126838_10 (sequence is synthesized)
tctgtgaatgacgccaattattactccaatgcaaccaccaatgagcagggtcttgcacagttttcaatcaatactaccagtatctcggttaataaactttttgtccgggttttcactgtg

SEQ ID NO: 268437 - DNA, 120 bp, Artificial Sequence
  ENSG00000126838_11 (sequence is synthesized)
catcccaacttgtgttttcactattcatgggtagcagaagaccaccagggtgctcagcacactgcaaatcgtgttttctccttaagtggaagttacattcacctggagcctgtggctggt

SEQ ID NO: 268438 - DNA, 120 bp, Artificial Sequence
  ENSG00000126838_12 (sequence is synthesized)
accctgccctgtggccacacggagactatcacggcacactatacactgaatagacaggccatgggagagttatcggagctcagtttccattacctgatcatggctaagggagtcatcgtc

SEQ ID NO: 268439 - DNA, 120 bp, Artificial Sequence
  ENSG00000126838_13 (sequence is synthesized)
agatctggaacccacactctgcctgtggagtcaggagacatgaaaggcagttttgccttatccttccctgtggagtcagacgttgcccccattgcacgaatgttcatctttgccatttta

SEQ ID NO: 268440 - DNA, 120 bp, Artificial Sequence
  ENSG00000126838_14 (sequence is synthesized)
ccagatggagaagttgttggagactctgaaaaatttgagattgaaaactgtctagccaacaaggtggatttgagcttcagcccagcacaaagtcccccagcctcacatgcccacctgcaa

SEQ ID NO: 268441 - DNA, 120 bp, Artificial Sequence
  ENSG00000126838_15 (sequence is synthesized)
gtagcagctgctccgcagtccctctgtgcccttcgtgctgtggaccaaagtgtgctgctcatgaagcctgaggctgagctctctgtgtcctcagtatataatctgctaactgtgaaggat

SEQ ID NO: 268442 - DNA, 120 bp, Artificial Sequence
  ENSG00000126838_16 (sequence is synthesized)
ctcaccaattttcctgacaatgtggaccagcaggaggaagaacaaggacactgtccccgtcctttcttcattcataatggagccatctatgttcccttatcaagtaatgaagcagatatt

SEQ ID NO: 268443 - DNA, 120 bp, Artificial Sequence
  ENSG00000126838_17 (sequence is synthesized)
tatagcttcctcaaggggatgggattgaaggtgttcactaactcaaaaatccgaaaaccaaagtcgtgttcagtcatcccttccgtgtctgcaggagcagtaggtcaaggatactatgga

SEQ ID NO: 268444 - DNA, 120 bp, Artificial Sequence
  ENSG00000126838_18 (sequence is synthesized)
gcaggtctaggagtagtagagagaccatatgttcctcaattaggcacatataatgtgatacccttaaataatgaacaaagttcagggccagtccctgaaacggtgcgaagctattttcct

SEQ ID NO: 268445 - DNA, 120 bp, Artificial Sequence
  ENSG00000126838_19 (sequence is synthesized)
atcaccgagtggaaggcaggggccttctgcctgtccgaagatgctggacttggtatctcttccactgcctctctccgagccttccagcccttctttgtggagctcacaatgccttactct

SEQ ID NO: 268446 - DNA, 120 bp, Artificial Sequence
  ENSG00000126838_20 (sequence is synthesized)
gtgattcgtggagaggtcttcacactcaaggccacggtcctaaactaccttcccaaatgcatccgggtcagtgtgcagctgaaagcctctccagccttcctagcttcccaaaatacaaag

SEQ ID NO: 268447 - DNA, 120 bp, Artificial Sequence
  ENSG00000126838_21 (sequence is synthesized)
ggagaagaatcctattgtatctgtggaaatgagagacaaaccttgtcttggacagtgactcctaaaactctggggaatgtgaacttctcagtgagtgcagaggcaatgcagtccttagaa

SEQ ID NO: 268448 - DNA, 120 bp, Artificial Sequence
  ENSG00000126838_22 (sequence is synthesized)
ctctgtggaaatgaggttgttgaggtccctgagattaaaagaaaagacacagtcatcaaaaccctgttggtggaggctgaaggtattgagcaagaaaagactttcagttctatgacctgt

SEQ ID NO: 268449 - DNA, 120 bp, Artificial Sequence
  ENSG00000126838_23 (sequence is synthesized)
gcctcaggtgctaatgtgtctgagcagttgtccttgaagctcccatcaaatgtggtcaaagaatctgccagagcttctttctcagttctgggtgacatattaggttctgctatgcaaaat

SEQ ID NO: 268450 - DNA, 120 bp, Artificial Sequence
  ENSG00000126838_24 (sequence is synthesized)
atacaaaatctcctccagatgccatatggctgtggagaacagaacatggtcctatttgctcctaacatctatgtcttgaactatctgaatgaaacccagcagctgacgcaggagatcaag

SEQ ID NO: 268451 - DNA, 120 bp, Artificial Sequence
  ENSG00000126838_25 (sequence is synthesized)
gccaaggccgttggctatctcatcactggttaccagagacagctgaactacaaacaccaagatggctcctacagcacctttggggaacgatatggcaggaaccagggcaacacttggctc

SEQ ID NO: 268452 - DNA, 120 bp, Artificial Sequence
  ENSG00000126838_26 (sequence is synthesized)
acagcttttgtactgaagactttcgcccaggctcgatcctacatcttcattgatgaagcacacattacccaatctctcacgtggctctcccagatgcagaaggacaatggctgtttcagg

SEQ ID NO: 268453 - DNA, 120 bp, Artificial Sequence
  ENSG00000126838_27 (sequence is synthesized)
agctctgggtcactgctcaacaatgccataaagggaggtgtagaagatgaagcgaccctctccgcctatgttactattgcccttctggaaattcctctcccagtcactaaccctattgtt

SEQ ID NO: 268454 - DNA, 120 bp, Artificial Sequence
  ENSG00000126838_28 (sequence is synthesized)
cgcaatgccctgttctgcctggagtcagcctggaatgtagcaaaggaggggacccatgggagccatgtctacaccaaggcattgctggcctatgctttttccctactgggaaagcaaaat

SEQ ID NO: 268455 - DNA, 120 bp, Artificial Sequence
  ENSG00000126838_29 (sequence is synthesized)
cagaatagagaaatactgaactcacttgataaggaagctgtgaaagaagacaacctcgtccattgggagcgccctcagagacccaaggcaccagtggggcatctttaccaaacccaggct

SEQ ID NO: 268456 - DNA, 120 bp, Artificial Sequence
  ENSG00000126838_30 (sequence is synthesized)
ccctctgctgaggtggagatgacatcctatgtgctcctcgcttatctcacggcccagccagcccccacctcaggggacctgacctctgcaactaacattgtgaagtggatcatgaagcag

SEQ ID NO: 268457 - DNA, 120 bp, Artificial Sequence
  ENSG00000126838_31 (sequence is synthesized)
cagaacgcccaaggtggtttctcctccacccaggacacagtggtggctctccatgccctgtccaggtatggagcagccactttcaccagaactgagaaaactgcacaggtcaccgttcag

SEQ ID NO: 268458 - DNA, 120 bp, Artificial Sequence
  ENSG00000126838_32 (sequence is synthesized)
gattcacagaccttttctacaaatttccaagtagacaacaacaacctcctattactgcagcagatctcattgccagagctccctggagaatatgtcataacagtaactggggaaagatgt

SEQ ID NO: 268459 - DNA, 120 bp, Artificial Sequence
  ENSG00000126838_33 (sequence is synthesized)
gtgtatcttcagacatccatgaaatacaatattcttccagagaaagaggactccccatttgctttaaaagtgcagactgtgccccaaacttgcgatggacacaaagcccacaccagcttt

SEQ ID NO: 268460 - DNA, 120 bp, Artificial Sequence
  ENSG00000126838_34 (sequence is synthesized)
cagatctcactgaccatcagttacacaggaaaccgtcctgcttccaatatggtgattgttgatgtaaagatggtatctggttttattcccctgaaaccaacagtaaaaatgcttgaaaga

SEQ ID NO: 268461 - DNA, 120 bp, Artificial Sequence
  ENSG00000126838_35 (sequence is synthesized)
tctagctctgtgagccggacagaagtgagcaacaaccatgtcctcatttatgtggaacaggtgacaaatcagacgctaagtttttccttcatggttctgcaagacatcccagtaggagac

SEQ ID NO: 268462 - DNA, 120 bp, Artificial Sequence
  ENSG00000126838_36 (sequence is synthesized)
ttgaagccagcaattgttaaagtctatgattactatgagacagatgagtctgtggttgctgagtatatcgccccctgcagcacagatacagagcatggaaatgtttgaggaccatacagg

SEQ ID NO: 268463 - DNA, 120 bp, Artificial Sequence
  ENSG00000126838_37 (sequence is synthesized)
ctgtatattttggtggattctctgtcctatacatttacttagaaggaatggagttatttgtctctataaaatagacactaaaaatatttgctgaataaatatgtacttctggtcaaacta

SEQ ID NO: 268464 - DNA, 120 bp, Artificial Sequence
  ENSG00000126838_38 (sequence is synthesized)
cccaaaatgctaaaatgaggtaatgtagccctatttccactttatacacacaaagaaaccaagattcaaattaattgtttcttgctgaggtgacttagctggtgatagctagaactgatc

SEQ ID NO: 268465 - DNA, 120 bp, Artificial Sequence
  ENSG00000126838_39 (sequence is synthesized)
agagatttttttttagatacatccgatacttcagggcacaaaatcagataaaatacaagattctgatgtactgtaagagagggaaaatgctgacaatggaaagaaagagtaattctgatt

SEQ ID NO: 268466 - DNA, 120 bp, Artificial Sequence
  ENSG00000126838_40 (sequence is synthesized)
atggaaacaggaaagacattcatagggatgctgtattttaaaaaacataaagaaggacaaagggcttcactggtgacaagaaacaacgtgaacatcacagaaatatctcataatccatgg

SEQ ID NO: 268467 - DNA, 120 bp, Artificial Sequence
  ENSG00000126838_41 (sequence is synthesized)
tcacactcaaggccacggtcctaaactaccttcccaaatgcatccggggaatgtgaacttctcagtgagtgcagaggcaatgcagtccttagaactctgtggaaatgaggttgttgaggt

SEQ ID NO: 268468 - DNA, 120 bp, Artificial Sequence
  ENSG00000126838_42 (sequence is synthesized)
agtgattgtgcgacctcgcctgggaaatcacatttctcccaaggatctctgcaacccatggatcaggagatacccttgtgagcccatgccaccagggtcttgggtctgatacacaaagct

SEQ ID NO: 268469 - DNA, 120 bp, Artificial Sequence
  ENSG00000126838_43 (sequence is synthesized)
ttgatgcagagactatgaaaggacacgtggaaagtcaagttgacagtaagagtaggaaggatatagccatggtccactaaatggagttgaaataacacataatgccatggtttgttaact

SEQ ID NO: 268470 - DNA, 120 bp, Artificial Sequence
  ENSG00000126838_44 (sequence is synthesized)
gcaataactggaggagttggagggcccttgacatatccagtagaaaatggaaaatagttcatttaggtgcatcatccttttagatatttcaatatttaagataagagtgaagacagagaa

SEQ ID NO: 268471 - DNA, 120 bp, Artificial Sequence
  ENSG00000126838_45 (sequence is synthesized)
gacaaaacagtgagaaatcagagtcagagatagaaattgttaccacttggaaggacatggggcaaggtgtatgatattcactaaagaaattactactgatgctttcttcagtggagaaaa

SEQ ID NO: 268472 - DNA, 120 bp, Artificial Sequence
  ENSG00000126838_46 (sequence is synthesized)
aacactgagaagggccacctgaacagccaaagtctccattatcctagccccgtagcctcctgtcttattacccaaattacctgctttatcatgtctgaatcttatcggagaactactttt

SEQ ID NO: 268473 - DNA, 120 bp, Artificial Sequence
  ENSG00000126838_47 (sequence is synthesized)
gtatttcagttgaaggtgctgcatttaataagctttttcattccactccgtaagtgctgcagaccgcagctgcttctaatgggccatctatacgattttctgtctgagaataagcctgag

SEQ ID NO: 268474 - DNA, 120 bp, Artificial Sequence
  ENSG00000126838_48 (sequence is synthesized)
tagacatagatgtttaacaggtggcaataataatatgtagctaaattcctcagggcattatgtattaattaaacacagatgcaagttacgtcttctttctatatttggtctatttttacc

SEQ ID NO: 268475 - DNA, 120 bp, Artificial Sequence
  ENSG00000126838_49 (sequence is synthesized)
gccacggtcctaaactaccttcccaaatgcatccgggtgctaatgtgtctgagcagttgtccttgaagctcccatcaaatgtggtcaaagaatctgccagagcttctttctcagttctgg

SEQ ID NO: 268476 - DNA, 120 bp, Artificial Sequence
  ENSG00000126856_0 (sequence is synthesized)
ctccgagaagacgcccggccagggtgaacaccgcggcaggagaaaacgggagactgtgaagagcatggggagcctttgtcgtgcagcgtgaaacccttgagcctttggcctaggagctgg

SEQ ID NO: 268477 - DNA, 120 bp, Artificial Sequence
  ENSG00000126856_1 (sequence is synthesized)
gagactcaggggcccttcccacactcagaattggagcagggccttctagacagtcccagcaccatgagccctgaaaggtcccaagaggagagcccagaaggagacacagagagaacagag

SEQ ID NO: 268478 - DNA, 120 bp, Artificial Sequence
  ENSG00000126856_2 (sequence is synthesized)
cggaagcccatggtcaaagatgccttcaaagacatttccatatacttcaccaaggaagaatgggcagaaatgggagactgggagaaaactcgctataggaatgtgaaaatgaactataat

SEQ ID NO: 268479 - DNA, 120 bp, Artificial Sequence
  ENSG00000126856_3 (sequence is synthesized)
gcactgattactgtaggtctcagagccactcgaccagctttcatgtgtcaccgaaggcaggccatcaaactccaggtggatgacacagaagattccgatgaagaatggacacctaggcag

SEQ ID NO: 268480 - DNA, 120 bp, Artificial Sequence
  ENSG00000126856_4 (sequence is synthesized)
caagtcaaacctccttggatggccttcagaggagaacagagtaaacaccagaagggaatgcccaaggcgtcattcaataatgaatctagtttgagagaattgtcaggaacgccaaattta

SEQ ID NO: 268481 - DNA, 120 bp, Artificial Sequence
  ENSG00000126856_5 (sequence is synthesized)
ctgaatacaagtgactcagagcaggctcagaaaccagtgtcccctcctggagaagcaagtacctctggacagcactctagactaaaactggaactcaggaggaaggagactgaaggaaag

SEQ ID NO: 268482 - DNA, 120 bp, Artificial Sequence
  ENSG00000126856_6 (sequence is synthesized)
atgtatagcctgcgagaaagaaagggtcatgcatacaaagagatcagcgagccacaggatgatgactacctctattgtgagatgtgtcagaacttcttcattgacagctgtgctgctcat

SEQ ID NO: 268483 - DNA, 120 bp, Artificial Sequence
  ENSG00000126856_7 (sequence is synthesized)
gggccccctacatttgtaaaggacagtgcagtggacaaggggcatcccaaccgttcagccctcagtctgcccccggggctgagaattgggccatcaggcatccctcaggctgggcttgga

SEQ ID NO: 268484 - DNA, 120 bp, Artificial Sequence
  ENSG00000126856_8 (sequence is synthesized)
gtatggaacgaggcatctgatctgccactgggtctgcactttggcccctatgagggccgaattacagaagacgaagaggcagccaacagtggatattcctggctaatcaccaaggggaga

SEQ ID NO: 268485 - DNA, 120 bp, Artificial Sequence
  ENSG00000126856_9 (sequence is synthesized)
gtatgtggatggaaaagataaatcctcggccaactggatgaggtatgtgaactgtgcccgggatgatgaagagcagaacctggtggccttccagtaccacaggcagatcttctatagaac

SEQ ID NO: 268486 - DNA, 120 bp, Artificial Sequence
  ENSG00000126856_10 (sequence is synthesized)
ctgccgagtcattaggccaggctgtgaactgctggtctggtctggggatgagtatggccaggaactgggcatcagatcttctatagaacctgccgagtcattaggccaggctgtgaactg

SEQ ID NO: 268487 - DNA, 120 bp, Artificial Sequence
  ENSG00000126856_11 (sequence is synthesized)
ctggtctggtatggggatgagtatggccaggaactgggcatcaagtggggcagcaagtggaagaaagagctcatggcagggagagaaccaaagccagagatccatccatgtccctcatgc

SEQ ID NO: 268488 - DNA, 120 bp, Artificial Sequence
  ENSG00000126856_12 (sequence is synthesized)
tgtctggccttttcaagtcaaaaatttctcagtcaacatgtggaacgcaatcactcctctcagaacttcccaggaccatctgcaagaaaacttctccaaccagagaatccctgcccaggg

SEQ ID NO: 268489 - DNA, 120 bp, Artificial Sequence
  ENSG00000126856_13 (sequence is synthesized)
gatcagaatcaggagcggcaatattctgatccacgctgctgtaatgacaaaaccaaaggtcaagagatcaaagaaaggtccaaactcttgaataaaaggacatggcagagggagatttca

SEQ ID NO: 268490 - DNA, 120 bp, Artificial Sequence
  ENSG00000126856_14 (sequence is synthesized)
agggccttttctagcccacccaaaggacaaatggggagctctagagtgggagaaagaatgatggaagaagagtccagaacaggccagaaagtgaatccagggaacacaggcaaattattt

SEQ ID NO: 268491 - DNA, 120 bp, Artificial Sequence
  ENSG00000126856_15 (sequence is synthesized)
gtgggggtaggaatctcaagaattgcgaaagtcaaatatggagagtgtgggcaaggtttcagtgataagtcagatgttattacacaccaaaggacacacacaggggggaagccctacgtc

SEQ ID NO: 268492 - DNA, 120 bp, Artificial Sequence
  ENSG00000126856_16 (sequence is synthesized)
tgcagagagtgtgggagggctttagccggaagtcagacctcctcagtcaccagaggacacacacaggggagaagccttatgtctgcagagagtgtgagcggggctttagccggaagtcag

SEQ ID NO: 268493 - DNA, 120 bp, Artificial Sequence
  ENSG00000126856_17 (sequence is synthesized)
tcctcctcattcaccagaggacacacaggggagacgccccagtctgcaggaaggatgagtaagtcattagtaataaaaccttatctcaatagccacaagaagacaaacgtgatcaccaca

SEQ ID NO: 268494 - DNA, 120 bp, Artificial Sequence
  ENSG00000126856_18 (sequence is synthesized)
ccagctctgaggtggcttcagcgaaagtctgctaaccccttacattccccgagagtgtaaagagatcggaaataactaattaaacaaatccgccactttcatgactagagttgaggaaga

SEQ ID NO: 268495 - DNA, 120 bp, Artificial Sequence
  ENSG00000126856_19 (sequence is synthesized)
acaggggatagttctgtaagtgttcgggggacgtcaacatgtgtggttgtttcccgcactgatcccctccattttttgtgttttgcctcctgttctaattaattttgtctccatacatat

SEQ ID NO: 268496 - DNA, 120 bp, Artificial Sequence
  ENSG00000126856_20 (sequence is synthesized)
ctgaaccccaagtgtgtacctcattcttcccttatcactgaaggaaggaagagtccagaagggccacagagaactcaaacgttcagttcaagtctccacaggaattcaaccccagaaaga

SEQ ID NO: 268497 - DNA, 120 bp, Artificial Sequence
  ENSG00000126856_21 (sequence is synthesized)
cataaacttggagtccatctggtttaattattggagaatcgattcccaagtccaggaagagaaatgtagggttttacagagtcgcagcaggaaagagagctccctggtctcctgggaagt

SEQ ID NO: 268498 - DNA, 120 bp, Artificial Sequence
  ENSG00000126856_22 (sequence is synthesized)
gtgacctcttctaatggacccctctcctctgctgccatactcccccttggctccccctgtctcctctcctgatttcctccaatctctgtagccccagaagtgaacgccagacaggaacac

SEQ ID NO: 268499 - DNA, 120 bp, Artificial Sequence
  ENSG00000126856_23 (sequence is synthesized)
gcatgtgtgtatatatgtgttcacgtgtgctatgtgtgttaagcctgcatgcatgggtgtgggggtatgtgccctctgtgtacgtatctgtgtgagtgtgggggtttcaagggtgtatta

SEQ ID NO: 268500 - DNA, 120 bp, Artificial Sequence
  ENSG00000126856_24 (sequence is synthesized)
tgagtgtgggggtttcaagggtgtattaggaataacgctcaaaatcctaaggaaattgaatactctgagagaagagagacagaccctctcatactgttttatattgttttatactcagaa

SEQ ID NO: 268501 - DNA, 89 bp, Artificial Sequence
  ENSG00000126856_25 (sequence is synthesized)
ttatactcagaaaaggaaaaagaagcaaaactaaaggcaggtagcctggcgcctaggaaccagacctgaaaccggcctgacctaagcct

SEQ ID NO: 268502 - DNA, 120 bp, Artificial Sequence
  ENSG00000126856_26 (sequence is synthesized)
tgatgttatctatagattatagaaagacattgtgaaacttcccggtctgttctgttccactctgaccatcggtgcatgcagcccctgtcacctaccccctgcttgctcaatcgatcacga

SEQ ID NO: 268503 - DNA, 120 bp, Artificial Sequence
  ENSG00000126856_27 (sequence is synthesized)
ttctagacagtcccagcaccatgagccctgaaaggtcccaagaggagagcccagaaggagacacagagagaacagagcggaagcccatggtctcagagccactcgaccagctttcatgtg

SEQ ID NO: 268504 - DNA, 120 bp, Artificial Sequence
  ENSG00000126856_28 (sequence is synthesized)
tcaccgaaggcaggccatcaaactccaggtggatgacacagaagattccgatgaagaatggacacctaggcagcaagacagagtttcgctcttgtcaccccggctggagtgcaatggcgt

SEQ ID NO: 268505 - DNA, 87 bp, Artificial Sequence
  ENSG00000126856_29 (sequence is synthesized)
ctcctcacctcaggtcatccactgatggttttataaaggggagtttccctacacaagctcttttgcctgctgccatgtaagagatgt

SEQ ID NO: 268506 - DNA, 120 bp, Artificial Sequence
  ENSG00000126856_30 (sequence is synthesized)
acctgccttctgccatgagtgtgaggcctctccgaccatgtgcaactgtgagtcaattaaacctctttttttataaattacccagcctcagatatgtctttattagcagcgtgagaacag

SEQ ID NO: 268507 - DNA, 120 bp, Artificial Sequence
  ENSG00000126856_31 (sequence is synthesized)
tggactctgacaggctgtacagaaagcatagcactggcttctgcttctggtgaagcctctgacaactgacaatcaaggtgaaaaataaatccggtgcttgcacatcacatgccgcaatac

SEQ ID NO: 268508 - DNA, 120 bp, Artificial Sequence
  ENSG00000126856_32 (sequence is synthesized)
tgacatgacagcagggcgcttggtacacagcttccactgacctggatttggattggtttggcctctataatgaagtttgatgtctctgctttactgacaaggtctcagagccactcgacc

SEQ ID NO: 268509 - DNA, 120 bp, Artificial Sequence
  ENSG00000126856_33 (sequence is synthesized)
atcattcccttactcgaatgaattaaagtacaggattggggctaaataatgtgagtgccacgctctttctgaagctcttatatcaaggaacatgcattacaactttcctaatccctgctt

SEQ ID NO: 268510 - DNA, 80 bp, Artificial Sequence
  ENSG00000126858_0 (sequence is synthesized)
cccgctgggccggaggaggcggagctggcgctgtcccggctctcttgcggggaagcaactgagggggcggcgcggcgggc

SEQ ID NO: 268511 - DNA, 120 bp, Artificial Sequence
  ENSG00000126858_1 (sequence is synthesized)
cccggcggccgaagaggctggcaggtggcgccgtggggtgggtgctcctggtgagaggagtccactccgtgcgtgcgggcggaggccggcccccgagagccgccgacatgaagaaagacg

SEQ ID NO: 268512 - DNA, 120 bp, Artificial Sequence
  ENSG00000126858_2 (sequence is synthesized)
tgcggatcctgctggtgggagaacctagagttgggaagacatcactgattatgtctctggtcagtgaagaatttccagaagaggttcctccccgggcagaagaaatcaccattccagctg

SEQ ID NO: 268513 - DNA, 120 bp, Artificial Sequence
  ENSG00000126858_3 (sequence is synthesized)
atgtcaccccagagagagttccaacacacattgtagattactcagaagcagaacagagtgatgaacaacttcatcaagaaatatctcaggctaatgtcatctgtatagtgtatgccgtta

SEQ ID NO: 268514 - DNA, 120 bp, Artificial Sequence
  ENSG00000126858_4 (sequence is synthesized)
acaacaagcattctattgataaggtaacaagtcgatggattcctctcataaatgaaagaacagacaaagacagcaggctgcctttaatattggttgggaacaaatctgatctggtggaat

SEQ ID NO: 268515 - DNA, 120 bp, Artificial Sequence
  ENSG00000126858_5 (sequence is synthesized)
atagtagtatggagaccatccttcctattatgaaccagtatacagaaatagaaacctgtgtggagtgttcagcgaaaaacctgaagaacatatcagagctcttttattacgcacagaaag

SEQ ID NO: 268516 - DNA, 120 bp, Artificial Sequence
  ENSG00000126858_6 (sequence is synthesized)
ctgttcttcatcctacagggcccctgtactgcccagaggagaaggagatgaaaccagcttgtataaaagcccttactcgtatatttaaaatatctgatcaagataatgatggtactctca

SEQ ID NO: 268517 - DNA, 120 bp, Artificial Sequence
  ENSG00000126858_7 (sequence is synthesized)
atgatgctgaactcaacttctttcagaggatttgtttcaacactccattagctcctcaagctctggaggatgtcaagaatgtagtcagaaaacatataagtgatggtgtggctgacagtg

SEQ ID NO: 268518 - DNA, 120 bp, Artificial Sequence
  ENSG00000126858_8 (sequence is synthesized)
ggttgaccctgaaaggttttctctttttacacacactttttatccagagagggagacacgaaactacttggactgtgcttcgacgatttggttatgatgatgacctggatttgacacctg

SEQ ID NO: 268519 - DNA, 120 bp, Artificial Sequence
  ENSG00000126858_9 (sequence is synthesized)
aatatttgttccccctgctgaaaatacctcctgattgcactactgaattaaatcatcatgcatatttatttctccaaagcacctttgacaagcatgatttggatagagactgtgctttgt

SEQ ID NO: 268520 - DNA, 120 bp, Artificial Sequence
  ENSG00000126858_10 (sequence is synthesized)
cacctgatgagcttaaagatttatttaaagttttcccttacataccttgggggccagatgtgaataacacagtttgtaccaatgaaagaggctggataacctaccagggattcctttccc

SEQ ID NO: 268521 - DNA, 120 bp, Artificial Sequence
  ENSG00000126858_11 (sequence is synthesized)
agtggacgctcacgacttatttagatgtacagcggtgcctggaatatttgggctatctaggctattcaatattgactgagcaagagtctcaagcttcagctgttacagtgacaagagata

SEQ ID NO: 268522 - DNA, 120 bp, Artificial Sequence
  ENSG00000126858_12 (sequence is synthesized)
aaaagatagacctgcagaaaaaacaaactcaaagaaatgtgttcagatgtaatgtaattggagtgaaaaactgtgggaaaagtggagttcttcaggctcttcttggaagaaacttaatga

SEQ ID NO: 268523 - DNA, 120 bp, Artificial Sequence
  ENSG00000126858_13 (sequence is synthesized)
tatatggacaagagaaatacttgttgttgcatgatatctcagaatcggaatttctaactgaagctgaaatcatttgtgatgttgtatgcctggtatatgatgtcagcaatcccaaatcct

SEQ ID NO: 268524 - DNA, 120 bp, Artificial Sequence
  ENSG00000126858_14 (sequence is synthesized)
ttgaatactgtgccaggatttttaagcaacactttatggacagcagaataccttgcttaatcgtagctgcaaagtcagacctgcatgaagttaaacaagaatacagtatttcacctactg

SEQ ID NO: 268525 - DNA, 120 bp, Artificial Sequence
  ENSG00000126858_15 (sequence is synthesized)
atttctgcaggaaacacaaaatgcctccaccacaagccttcacttgcaatactgctgatgcccccagtaaggatatctttgttaaattgacaacaatggccatgtatccagaggatcatt

SEQ ID NO: 268526 - DNA, 120 bp, Artificial Sequence
  ENSG00000126858_16 (sequence is synthesized)
acagagacagactctcccgagacatgggccacactgatagaatagagaatttgagaaaaatctgggtctttctaaaaactgctttccatgcccggttacgctgtatgtgcacctgcaaca

SEQ ID NO: 268527 - DNA, 120 bp, Artificial Sequence
  ENSG00000126858_17 (sequence is synthesized)
ggtgtacattttgcatctgtcagaacttcctcaactcagacttgctgcaatctgtaaagaacaaaatcttcactgcagttcttaacaggcacgtgacacaagctgacctcaagagctcca

SEQ ID NO: 268528 - DNA, 120 bp, Artificial Sequence
  ENSG00000126858_18 (sequence is synthesized)
cgttttggcttcgagcaagttttggtgctactgtttttgcagttttgggctttgctatgtacaaagcattattgaaacagcgatgatataaaaagaaatactgtccctaccaaaaacaaa

SEQ ID NO: 268529 - DNA, 120 bp, Artificial Sequence
  ENSG00000126858_19 (sequence is synthesized)
tacttttatgtacattctgaatgctttaagttctgctagaattattgagatatttatacatgcagagttactttattaatatttgtaattcatgcataagagtattttaatgatagttat

SEQ ID NO: 268530 - DNA, 120 bp, Artificial Sequence
  ENSG00000126858_20 (sequence is synthesized)
aactgcagtattggctagcatatggaaagaaaacagctaacagccaaactaaaatggctaaattccagaggccaaaagggaatattttgtaaatatatgtacatattcaggcaagatatg

SEQ ID NO: 268531 - DNA, 120 bp, Artificial Sequence
  ENSG00000126858_21 (sequence is synthesized)
gtctcccaagctgagttctagaaatgatgtttctagacatttctaagtggtattgttagtgctcacttggctcactcttctaggtttaagttagcccagagattgtatttactcatggat

SEQ ID NO: 268532 - DNA, 120 bp, Artificial Sequence
  ENSG00000126858_22 (sequence is synthesized)
cactttatttatttcacatttactcagaatgatcctttgggttctataaggacataaggtacaatttgccattgtctctccatttttaaaaacatacaagtcagtgtcagcttaccaaca

SEQ ID NO: 268533 - DNA, 120 bp, Artificial Sequence
  ENSG00000126858_23 (sequence is synthesized)
tgacattttttcagtcagttgtggtaggccagccttgaagccatcgcacagtctagaaacttgtgtagctgagtgtgcagctcacctttaagggtgaagttaggtaaaagcaattagcag

SEQ ID NO: 268534 - DNA, 120 bp, Artificial Sequence
  ENSG00000126858_24 (sequence is synthesized)
aggcgttatctatgtgattatgttgcttccttgtcagtatgttgaattttatagccctttcaatgaaataaaaaaaaaatttgtatattaccaatgtttttagtttaaataaagagtcac

SEQ ID NO: 268535 - DNA, 120 bp, Artificial Sequence
  ENSG00000126858_25 (sequence is synthesized)
ccttactactgttgaatttcatcccaagtgtaaatcattctataatggctgtgtctgttatagtatattacagtaactgcatgtgtcaccaagtgttctatatcaggctaggataaccta

SEQ ID NO: 268536 - DNA, 120 bp, Artificial Sequence
  ENSG00000126858_26 (sequence is synthesized)
gaggcagtaattttttaaatgataaaataaatctaatgaatataaactctcatgataaacctattttttccatcatcagccttttcaagtatttaaataaataactgctgtgtactgtga

SEQ ID NO: 268537 - DNA, 120 bp, Artificial Sequence
  ENSG00000126858_27 (sequence is synthesized)
gccatgtatccgtaagtacttgctgtcttcattttcatgttgcatggttcataacattgcatgccattattagccatgaagggaatatctttgtcacataggaattgttcagcaacagaa

SEQ ID NO: 268538 - DNA, 120 bp, Artificial Sequence
  ENSG00000126858_28 (sequence is synthesized)
agatactttgtaatgagaaggtacaaatttgagtaaatgcaagtttggtttgaatgccataataaaatgatataaacagtgcttctgacaatatctgtatatttttgagcaggctgtaac

SEQ ID NO: 268539 - DNA, 120 bp, Artificial Sequence
  ENSG00000126858_29 (sequence is synthesized)
tatcttaatagaatagtacaataaaacacaaccccccacccagcattaaaaaatagttttactggaataaaatgggtttggcatcatgttgttttatgcttataaagcattttcatatga

SEQ ID NO: 268540 - DNA, 120 bp, Artificial Sequence
  ENSG00000126858_30 (sequence is synthesized)
acagaaagtttatatttttctgtttttgaccttaggtatatgaagttttctaaaatattttattaatttatgttgaaattgtgggtatgcttcagttaggatatgtcttttttaagtgct

SEQ ID NO: 268541 - DNA, 120 bp, Artificial Sequence
  ENSG00000126858_31 (sequence is synthesized)
gtaaagagtagttgtaattggaatttctactgtataaatgttttacattaagtgttacgagccacaaatttcatgtacatttattatatatctatacatgcatatgcacaagcacataac

SEQ ID NO: 268542 - DNA, 120 bp, Artificial Sequence
  ENSG00000126858_32 (sequence is synthesized)
tgtggtcatctctgtagtttactaactgccttaaaattgcatggttcttaatggcattcgcctcaagtagtgtgtttgtataaattctgttttgtaacaaaatagtttttcaggcagtgc

SEQ ID NO: 268543 - DNA, 120 bp, Artificial Sequence
  ENSG00000126858_33 (sequence is synthesized)
gtttctcaggactttatagcttattctacttattcttatgttagtctctaaattatttttcttcttatgaaaactacagtgtaacacagagtaataatcaaacattgctataaaccaaga

SEQ ID NO: 268544 - DNA, 120 bp, Artificial Sequence
  ENSG00000126858_34 (sequence is synthesized)
atgacatttttcaaaaaggtgttgatttgtacagatttttaaagtcagttaactttactgctattttattacctaatactttttttagatgcaacaaacccttgaatttctatttgtatt

SEQ ID NO: 268545 - DNA, 120 bp, Artificial Sequence
  ENSG00000126858_35 (sequence is synthesized)
cgaagacaagtcattcctattattatagaataaccaaaaccttatttatgttttacctttgctttaaaactctcatgtatgttatctacagagaggatcattacagagacagactctccc

SEQ ID NO: 268546 - DNA, 120 bp, Artificial Sequence
  ENSG00000126858_36 (sequence is synthesized)
gagacatgggccacactgatagaatagagaatttgagaaaaatctgggtctttctaaaaactgctttgtaagttactttttctttatgacttctgtgggattttgttgatattttcttag

SEQ ID NO: 268547 - DNA, 120 bp, Artificial Sequence
  ENSG00000126858_37 (sequence is synthesized)
agaatgaccaaatctcctttcttgccataattaacatttagtaattatgtagaaacgcactgcttggtcaggcttcctgcctagctatatattacgttgtcttccttactacataaatgt

SEQ ID NO: 268548 - DNA, 120 bp, Artificial Sequence
  ENSG00000126858_38 (sequence is synthesized)
acttctttaatcttgtgattacagtaactgcaagtgtgtttttacatctgcatttttaaaacattttactgtaattctgttgtgtgtgtgtgtgttatatgataaatgtacatacatgga

SEQ ID NO: 268549 - DNA, 120 bp, Artificial Sequence
  ENSG00000126858_39 (sequence is synthesized)
tgctcctacagactatgactgaatgtaacttcatatggactttttatggaattgcagtgtggtgtttcctaaccacaaaaatgcaacaaaatcatgtgtattttaaaaatacatacatct

SEQ ID NO: 268550 - DNA, 120 bp, Artificial Sequence
  ENSG00000126858_40 (sequence is synthesized)
ttgttctaaagtggtagagtctcagacatacatatttctgaaagttttcgacatgtgattgtgaggtgcattcctgattgagaacttttacattaatgcaagctcttcccagctgttaaa

SEQ ID NO: 268551 - DNA, 120 bp, Artificial Sequence
  ENSG00000126858_41 (sequence is synthesized)
agttacatatgtctgccttctctctgatgaaaaaaaagagtagtacatatggattatatattgccaaatataccaagaataacagccagaggaaagggataaatctgaagcttagaaagt

SEQ ID NO: 268552 - DNA, 120 bp, Artificial Sequence
  ENSG00000126858_42 (sequence is synthesized)
ctatcagtcacttagggattatcaataagattcaataggagtaaaaagctatatgtacaaaggtgtttattctagcattgtttttaacaggaaaaaactggaaataatcaagatggctaa

SEQ ID NO: 268553 - DNA, 120 bp, Artificial Sequence
  ENSG00000126858_43 (sequence is synthesized)
ttgtggatttaaatacctcctcatttgcagagtatcttcagccttcaacaaaatagaatgaaaacaacatatttaaaaaatctaacaccgaaacaccaaattaatccaagaatccactga

SEQ ID NO: 268554 - DNA, 120 bp, Artificial Sequence
  ENSG00000126858_44 (sequence is synthesized)
ccaggtcactttagggaaactgcccagctctggcaccgcactgtgtgtctgtcagctctgtggggtgctatggcctcattttcccactagaggacactgtggctccaggacttcatgtgg

SEQ ID NO: 268555 - DNA, 120 bp, Artificial Sequence
  ENSG00000126858_45 (sequence is synthesized)
cgcccagccagtcttgctactccagcacctctaaggaggcaaagcctttagtgtgcatttattaggtaccaactgggtgctttctgtatcaagcagagaaataaaagaggtcaaacacaa

SEQ ID NO: 268556 - DNA, 120 bp, Artificial Sequence
  ENSG00000126858_46 (sequence is synthesized)
aaatcatttgtgatgttgtatgcctggtatatgatgtcagcaatcccaaatcctttgaatactgtgccaggatttttaaggaaaaaactggaaataatcaagatggctaacaatggacga

SEQ ID NO: 268557 - DNA, 120 bp, Artificial Sequence
  ENSG00000126858_47 (sequence is synthesized)
agatactcactacaaagacaagctgactgatgcccaactaacttccactaaaattctcactgtgatgacaatgtttagttttggaagcatccttaataatgtttttaaattaataggtat

SEQ ID NO: 268558 - DNA, 120 bp, Artificial Sequence
  ENSG00000126858_48 (sequence is synthesized)
tcagatgtaatgtaattggagtgaaaaactgtgggaaaagtggagttcttcaggctcttcttggaagaaacttaatggtgagaaggcagaagaaaattcgtgaagatcataaatcctact

SEQ ID NO: 268559 - DNA, 120 bp, Artificial Sequence
  ENSG00000126858_49 (sequence is synthesized)
gccacactgatagaatagagaatttgagaaaaatctgggtctttctaaaaactgctttccctagagaaacaggagctcagctgacaatgacctgaggggacccctacagtgcttcaaaca

SEQ ID NO: 268560 - DNA, 120 bp, Artificial Sequence
  ENSG00000126858_50 (sequence is synthesized)
agcacaggaaattctggaactacaagatgaaaatgtgtgccagcatgcttctactttcagggtacagtctgaggccctagggaggaggagttcctcaagtgctttgacctcttgccagga

SEQ ID NO: 268561 - DNA, 120 bp, Artificial Sequence
  ENSG00000126858_51 (sequence is synthesized)
caaagacggagaagtatttagaagcatctgaatttgttagctcttcagttttcctcctccactccctaccctgcacacagagcctcagaaggacagaccagcttcacccccttaccagca

SEQ ID NO: 268562 - DNA, 120 bp, Artificial Sequence
  ENSG00000126860_0 (sequence is synthesized)
agagaagttggagctttttcgttgtttttttttttttccctcctgtgacatgtgctttagttgcagtggaaaggaaatgtgtcatctgtggtttggttttaaaagtggaaaactagctgc

SEQ ID NO: 268563 - DNA, 120 bp, Artificial Sequence
  ENSG00000126860_1 (sequence is synthesized)
acatatccttttttactgcagatttactttaaggctcatattctccaagtctattctgctttaaaaagaagacaagaaaagaagtggtttatcaaaatcacgttataatcagattttgac

SEQ ID NO: 268564 - DNA, 120 bp, Artificial Sequence
  ENSG00000126860_2 (sequence is synthesized)
caagcattttgtaagtatacaaatgtcagccaatgacatataacaaccatttcttataaaaccttgatgttcaaaagcctgactagcagtggcatccatgttgcttaggagttggtttgg

SEQ ID NO: 268565 - DNA, 120 bp, Artificial Sequence
  ENSG00000126860_3 (sequence is synthesized)
aaacaaagactttcaggccctacctatactagctagattgccaagcatgcccacggacatggaacacacaggacattacctacatcttgcctttctgatgacaacagttttttctttgtc

SEQ ID NO: 268566 - DNA, 120 bp, Artificial Sequence
  ENSG00000126860_4 (sequence is synthesized)
tcctggaacaaaagcaaactatacccgtctgtgggctaacagtacttcttcctgggattcagttattcaaaacaagacaggcagaaaccaaaatgaaaacattaacacaaaccctataac

SEQ ID NO: 268567 - DNA, 120 bp, Artificial Sequence
  ENSG00000126860_5 (sequence is synthesized)
tcctgaagtagattataaaggtaattctacaaacatgcctgaaacatctcacatcgtagctttaacttctaaatctgaacaggagctttatataccttctgtcgtcagcaacagtccttc

SEQ ID NO: 268568 - DNA, 120 bp, Artificial Sequence
  ENSG00000126860_6 (sequence is synthesized)
aacagtacagagcattgaaaacacaagcaaaagtcatggtgaaattttcaaaaaggatgtctgtgcggaaaacaacaacaacatggctatgctaatttgcttaattataattgcagtgct

SEQ ID NO: 268569 - DNA, 120 bp, Artificial Sequence
  ENSG00000126860_7 (sequence is synthesized)
tctcagacgatcaaaacaagtaggcaagcgtcagcctagaagcaatggcgattttctggcaagcggtctatggcccgctgaatcagacacttggaaaagaacaaaacagctcacaggacc

SEQ ID NO: 268570 - DNA, 120 bp, Artificial Sequence
  ENSG00000126860_8 (sequence is synthesized)
caacctagtgatgcaatctactggagtgctcacagctacaagggaaagaaaagatgaagaaggaactgaaaaacttactaacaaacagataggttagtgaagaaaaatgcaaagtagcaa

SEQ ID NO: 268571 - DNA, 120 bp, Artificial Sequence
  ENSG00000126860_9 (sequence is synthesized)
tgagaaggcttatggagtaaaaatgaagtcagttggtatttaatcccaaagtgttgttctgattatctaaaatttgacatggtagaccttgcaatttagaatcaagcaggtgagacaggg

SEQ ID NO: 268572 - DNA, 120 bp, Artificial Sequence
  ENSG00000126860_10 (sequence is synthesized)
agaagtatgcctgcttaattatttaaactgtgtacttttgttttgacactgaatattttaaaaagcaaataataaaataactaagcatttgaggaaaattttaaggataaattgaggaaa

SEQ ID NO: 268573 - DNA, 120 bp, Artificial Sequence
  ENSG00000126860_11 (sequence is synthesized)
ctgattaatagagatagcaagggataattaaataaatattccctatgtagcaacagtggttagatgatctttgtctgaatgtaattaaactttgaatagttttagtgtgtccttaaagcc

SEQ ID NO: 268574 - DNA, 120 bp, Artificial Sequence
  ENSG00000126860_12 (sequence is synthesized)
aagtatatgctttaacatcaaatggaagtcaaattcctaatgcatagatagagagagctaaactgtgtaatttaatggtatcttccttgctggatgtggcagaatccacaccagcttatc

SEQ ID NO: 268575 - DNA, 120 bp, Artificial Sequence
  ENSG00000126860_13 (sequence is synthesized)
aaccaacacagctaattttagaatagatcctttatctttccatatggcacacgtaagaaagtgtttttctactattaatattaaattaaaacctttacttttgtataataaattaaaact

SEQ ID NO: 268576 - DNA, 120 bp, Artificial Sequence
  ENSG00000126860_14 (sequence is synthesized)
cagaataaacctgtgaccacgtatatttgcattcactttattactttagagaacacattgtaaagatcaataagaaatagagcacaactaaaataaataagatttatagccacaccaata

SEQ ID NO: 268577 - DNA, 120 bp, Artificial Sequence
  ENSG00000126860_15 (sequence is synthesized)
cttttgaatgacactaaagcatgtagcaggcctatagaatgagcatactgtcaaaaggcattaagtggaaaaccctccctgctctggaggcggggattggttctacaaagcctcctgtca

SEQ ID NO: 268578 - DNA, 120 bp, Artificial Sequence
  ENSG00000126861_0 (sequence is synthesized)
agaaacagttccgactctacagaacaagacgacctttaagtttcccagagaaaatgagatgctgatgttgaagacgacaccacggctttgatggaatatcagatattgaaaatgtctctc

SEQ ID NO: 268579 - DNA, 120 bp, Artificial Sequence
  ENSG00000126861_1 (sequence is synthesized)
tgcctgttcatccttctgtttctcacacctggtattttatgcatttgtcctctccaatgtatatgcacagagaggcacaggcatgtggactgttcaggcagaaacttgtctacattacca

SEQ ID NO: 268580 - DNA, 120 bp, Artificial Sequence
  ENSG00000126861_2 (sequence is synthesized)
tctggactgcaagagaatattatacatttaaacctgtcttataaccactttactgatctgcataaccagttaacccaatataccaatctgaggaccctggacatttcaaacaacaggctt

SEQ ID NO: 268581 - DNA, 120 bp, Artificial Sequence
  ENSG00000126861_3 (sequence is synthesized)
gaaagcctgcctgctcacttacctcggtctctgtggaacatgtctgctgctaacaacaacattaaacttcttgacaaatctgatactgcttatcagtggaatcttaaatatctggatgtt

SEQ ID NO: 268582 - DNA, 120 bp, Artificial Sequence
  ENSG00000126861_4 (sequence is synthesized)
tctaagaacatgctggaaaaggttgtcctcattaaaaatacactaagaagtctcgaggttctcaacctcagtagtaacaaactttggacagttccaaccaacatgccctccaaactacat

SEQ ID NO: 268583 - DNA, 120 bp, Artificial Sequence
  ENSG00000126861_5 (sequence is synthesized)
atcgtggacctgtctaataattctttgacacaaattcttccaggtacattaataaacctgacaaatctcacacatctttacctgcacaacaataagttcacattcattccagaccaatct

SEQ ID NO: 268584 - DNA, 120 bp, Artificial Sequence
  ENSG00000126861_6 (sequence is synthesized)
tttgaccaactctttcagttgcaagagataaccctttacaataacaggtggtcatgtgaccacaaacaaaacattacttacttactgaagtggatgatggaaacaaaagcccatgtgata

SEQ ID NO: 268585 - DNA, 120 bp, Artificial Sequence
  ENSG00000126861_7 (sequence is synthesized)
gatgcagacagtggacaccattaactctctgagtgtggtaactcaacccaaagtgaccaaaatacccaaacaatatcgaacaaaggaaacaacgtttggtgccactctaagcaaagacac

SEQ ID NO: 268586 - DNA, 120 bp, Artificial Sequence
  ENSG00000126861_8 (sequence is synthesized)
cacctttactagcactgataaggcttttgtgccctatccagaagatacatccacagagactatcaattcacatgaagcagcagctgcaactctaactattcatctccaagatggaatggt

SEQ ID NO: 268587 - DNA, 120 bp, Artificial Sequence
  ENSG00000126861_9 (sequence is synthesized)
cacaaacacaagcctcactagctcaacaaaatcatccccaacacccatgaccctaagtatcactagtggcatgccaaataatttctctgaaatgcctcaacaaagcacaacccttaactt

SEQ ID NO: 268588 - DNA, 120 bp, Artificial Sequence
  ENSG00000126861_10 (sequence is synthesized)
atggagggaagagacaaccacaaatgtaaagactccattaccttctgtggcaaatgcttggaaagtaaatgcttcatttctcttattgctcaatgttgtggtcatgctggctgtctgagg

SEQ ID NO: 268589 - DNA, 120 bp, Artificial Sequence
  ENSG00000126861_11 (sequence is synthesized)
gtctgcattttctgaaactaatgaaagcactcctccctgatgtacagttgggaaaatatgtccatatctaaccagtgattcgagctatatttaagtattcaagaaagccagtcttaacat

SEQ ID NO: 268590 - DNA, 120 bp, Artificial Sequence
  ENSG00000126861_12 (sequence is synthesized)
ttctaactctgatgtaaatgaagtaacttgtcttaaataaaagaaatgcacaatgtcttggtacttgctgctattttactgtcttaattaagtaaactaatgagtttcttttataaaaaa

SEQ ID NO: 268591 - DNA, 120 bp, Artificial Sequence
  ENSG00000126861_13 (sequence is synthesized)
aatgaaatgttttaaggcttcaatttattgcacaaaatataaagcatctaaactttaatatgtattttatgtatgtttacactgtcaaacatctggaaaataaaaggtctatgctcataa

SEQ ID NO: 268592 - DNA, 120 bp, Artificial Sequence
  ENSG00000126861_14 (sequence is synthesized)
tccgactctacagaacaagacgacctttaagtttcccagagaaaatgagatgctgatgttgaagacgacaccacgaattttggaagaatcaatacgtgagggaagacagttctggaaaca

SEQ ID NO: 268593 - DNA, 120 bp, Artificial Sequence
  ENSG00000126861_15 (sequence is synthesized)
caacaacctcaaattctatggcagtatccaatcctgcgtcaagcctgaatcccgggaccagacctaatcccaggaagagcaccaatcccagaatgaaccccaatcctgggataagcccag

SEQ ID NO: 268594 - DNA, 120 bp, Artificial Sequence
  ENSG00000126861_16 (sequence is synthesized)
atctcaaaatgacctcgagtcccaagatgactccaaattccaagacaagtctgaatagagcagtgaccccaaagagccacaactatgaatatgaatactgtgacaaatggtagcaccaat

SEQ ID NO: 268595 - DNA, 120 bp, Artificial Sequence
  ENSG00000126861_17 (sequence is synthesized)
ttaatgaggcaaatgttaaaatatggaacccaatctcagacaaatacatagaaaggagtaagggccaactctcatgcataaggtatcccatcctatagcaaatcagatatataggtacgc

SEQ ID NO: 268596 - DNA, 120 bp, Artificial Sequence
  ENSG00000126861_18 (sequence is synthesized)
ttgatgccacaaattttttaaaaaattgtccattttgttgcgtgtgcacctcttgccataaatttgagtcagcaccagcgacagctctgcagtcctcctatgtggtactgatcaggtggt

SEQ ID NO: 268597 - DNA, 120 bp, Artificial Sequence
  ENSG00000126861_19 (sequence is synthesized)
tgcagagcttcagctcacagcaacacaatgcagctgagcaggcaagcacagcccacagccagaaacagttccgactctacagaacaagacgacctttaagtttcccagagaaaatgagat

SEQ ID NO: 268598 - DNA, 120 bp, Artificial Sequence
  ENSG00000126861_20 (sequence is synthesized)
gctgatgttgaagacgacaccacggtaagatgttatttaaatcagtaaaaggctgactttggaatctttttcctttttcttttaagaaaaagtcaacgttaggattaaatatatattcaa

SEQ ID NO: 268599 - DNA, 120 bp, Artificial Sequence
  ENSG00000126861_21 (sequence is synthesized)
tagcaagtgcatgcaccagaaatttgctgcagtgtcagttgagggatattttttatacattcagtcactctgtaaatatacatattgttttcctttaaaatgggcactgaaatatacaga

SEQ ID NO: 268600 - DNA, 120 bp, Artificial Sequence
  ENSG00000126861_22 (sequence is synthesized)
aaaaaatcactttataaaatgtgaggtttataggtactgtgttggtctggatttttcaagtgctttttacaaagatatatttatcctaaaaacatacagataaaatttcgaagaactgct

SEQ ID NO: 268601 - DNA, 120 bp, Artificial Sequence
  ENSG00000126861_23 (sequence is synthesized)
ttaatatctaaataaaatctaccctatatacacacattgaattacattactgcagagattaaaaaaaaaagacacgacagccattttttctcatctgagtaagaaagcatatcatcaaaa

SEQ ID NO: 268602 - DNA, 120 bp, Artificial Sequence
  ENSG00000126861_24 (sequence is synthesized)
atagtaatagcctacaactgcaactatttatttgcaaagaatgctattttatcatattaaggctctagaaagataaataagaaagaatatggttagaaaaggggggagggagagagaaaa

SEQ ID NO: 268603 - DNA, 120 bp, Artificial Sequence
  ENSG00000126861_25 (sequence is synthesized)
taaaggagaaaatgcaggagagagtagggagagagtctctctctaccacatagcccaattgaaggattaagcatttggactataaatgaaggggagctttgttagtttaatcactggaac

SEQ ID NO: 268604 - DNA, 120 bp, Artificial Sequence
  ENSG00000126861_26 (sequence is synthesized)
aattataaaaggactcgacaacaacgaggtttattgaaaattttgcctaatgctaactgacccatgcagatgcctaaactgtatttgcatattaaaagaagggtgtatctgtttgtttct

SEQ ID NO: 268605 - DNA, 120 bp, Artificial Sequence
  ENSG00000126861_27 (sequence is synthesized)
ctggagaaagactgaattcttactcttcaaagaaaaatatcaaaagaggaggatgatgttcaagctatcaccgattggcctgctcttcatgtttgttaacattccggggacaaacttcaa

SEQ ID NO: 268606 - DNA, 120 bp, Artificial Sequence
  ENSG00000126861_28 (sequence is synthesized)
cagtgaccccaaagatagccacaactatgaatatgaacactgtgacaaatggtagcaccatactcaatccaatggacaacatttattttctatgtaatatttttgctgttttgtgtatac

SEQ ID NO: 268607 - DNA, 120 bp, Artificial Sequence
  ENSG00000126861_29 (sequence is synthesized)
ttgcactcaggctgaagtgaacttcaactgcctgcattcttatctcagtttcttattattgctgaatgacaagcatgctaggaaaatatcatttatttcaatttactatttaagaaatta

SEQ ID NO: 268608 - DNA, 120 bp, Artificial Sequence
  ENSG00000126861_30 (sequence is synthesized)
tcatcttgatttttttttgcaaattataattgtgtacgtttaaatattaacttaatatgatgttttccttccatatgaaagaagtatgcactaccttattaaatgctgaaacaagcaaaa

SEQ ID NO: 268609 - DNA, 120 bp, Artificial Sequence
  ENSG00000126870_0 (sequence is synthesized)
gggagaggccgcagggcacgctgggcagtgcttctgggccctctgctgctcctgcttgtcggttgctaggcgctgggacgcgcctcccgaagggtgcggggcacaggtggcctcttcggg

SEQ ID NO: 268610 - DNA, 120 bp, Artificial Sequence
  ENSG00000126870_1 (sequence is synthesized)
gtggaccgcgcctggccggggccgaggacaccgcggccgcccgggcctgcgggaagcgatggagcccgggaagagaagaaccaaagatgatacctggaaagcagatgacctcagaaaaca

SEQ ID NO: 268611 - DNA, 120 bp, Artificial Sequence
  ENSG00000126870_2 (sequence is synthesized)
tctctgggccatacagtcaggtggttccaaggaagaaagaaagcacagagagaagaagctgcgtaaggagtctgagatggaccttcctgaacataaggagccgaggtgcagggatcccga

SEQ ID NO: 268612 - DNA, 120 bp, Artificial Sequence
  ENSG00000126870_3 (sequence is synthesized)
ccaggatgccaggagcagagacagggtggccgaagtccacaccgctaaggagagtcctcgtggggagagggacagagacagacagagggagaggagaagagacgcaaaagaccgggagaa

SEQ ID NO: 268613 - DNA, 120 bp, Artificial Sequence
  ENSG00000126870_4 (sequence is synthesized)
agaaaagctgaaggagaaacatcgagaggcagaaaagtctcacagcagaggaaaggacagggaaaaagaaaaagacagaagggcccggaaggaagagctccggcagaccgtggcccacca

SEQ ID NO: 268614 - DNA, 120 bp, Artificial Sequence
  ENSG00000126870_5 (sequence is synthesized)
caacctgctgggccaggagacacgcgaccggcagctcctggagcgggcggagaggaaaggccgctcagtaagtaaagtaagaagtgaagagaaagatgaagactctgaaagaggagatga

SEQ ID NO: 268615 - DNA, 120 bp, Artificial Sequence
  ENSG00000126870_6 (sequence is synthesized)
agatagagaaagaagataccgagaaagaaagctgcagtacggagacagcaaggacaaccctctcaagtactggctttataaagaagaaggcgagaggagacacaggaagcccagagagcc

SEQ ID NO: 268616 - DNA, 120 bp, Artificial Sequence
  ENSG00000126870_7 (sequence is synthesized)
agatcgagacaacaaacaccgagaaaaaagcagcacaagggaaaaaagagagaaatattccaaagagaaaagtaattcattctctgacaaaggggaagaaagacataaagaaaagcgaca

SEQ ID NO: 268617 - DNA, 120 bp, Artificial Sequence
  ENSG00000126870_8 (sequence is synthesized)
caaagaaggttttcattttgatgatgagaggcaccaaagcaacgtggatagaaaagagaaatcggcaaaagatgagcccaggaaaagggaatcccagaatggtgaacacagaaatcgagg

SEQ ID NO: 268618 - DNA, 120 bp, Artificial Sequence
  ENSG00000126870_9 (sequence is synthesized)
tgcaagctcaaaaagagatgggaccagcagccagcatgctgagaatttagtaaggaatcatggaaaagataaagattcaagacggaagcatggccacgaggaaggctcttctgtgtggtg

SEQ ID NO: 268619 - DNA, 120 bp, Artificial Sequence
  ENSG00000126870_10 (sequence is synthesized)
gaagctggaccagaggccgggaggcgaggaaaccgtggaaattgaaaaggaagaaactgatttagaaaatgctagagctgatgcatatacagccagttgtgaagatgattttgaagacta

SEQ ID NO: 268620 - DNA, 120 bp, Artificial Sequence
  ENSG00000126870_11 (sequence is synthesized)
tgaagatgactttgaggtttgtgatggtgatgatgatgaaagcagtaatgaacctgagtcaagagaaaaactggaagaacttcctctagctcaaaaaaaggaaatacaagaaattcaaag

SEQ ID NO: 268621 - DNA, 120 bp, Artificial Sequence
  ENSG00000126870_12 (sequence is synthesized)
agctattaatgcagaaaatgaaaggattggcgagttatctttgaaactgtttcagaagcgaggtagaacagaatttgaaaaggagcccaggacagatacaaacagttccccttccagagc

SEQ ID NO: 268622 - DNA, 120 bp, Artificial Sequence
  ENSG00000126870_13 (sequence is synthesized)
ctctgtttgtggaatttttgtggattttgcctcagcttcacaccgtcaaaagagtcggactcaggcccttaagcaaaagatgcgaagtacaaaactgcttcggctcattgacttagattt

SEQ ID NO: 268623 - DNA, 120 bp, Artificial Sequence
  ENSG00000126870_14 (sequence is synthesized)
ttcatttactttctctctcttggatctaccaccagtaaatgaatatgacatgtatatcagaaactttgggaaaaaaaataccaagcaggcatatgttcagtgtaacgaagataatgttga

SEQ ID NO: 268624 - DNA, 120 bp, Artificial Sequence
  ENSG00000126870_15 (sequence is synthesized)
tgtatctggaggcagtgaacaaagagatacctctgatgctgtagttatgccaaagattgatactccaaggttatgtagctttctgcgggctgcttgtcaggtgatggccgttttgctgga

SEQ ID NO: 268625 - DNA, 120 bp, Artificial Sequence
  ENSG00000126870_16 (sequence is synthesized)
agaggatcgcttggcagctgaacccagctggaatcttagggctcaagacagggccctgtattttagtgacagctcatctcagctgaacaccagtctaccattccttcaaaatcgaaaagt

SEQ ID NO: 268626 - DNA, 120 bp, Artificial Sequence
  ENSG00000126870_17 (sequence is synthesized)
atcctccttgcacacctcccgagttcagaggcagatggtggtctccgttcacgacttacccgagaagagctttgtgcccctgctggacagcaaatacgtcctctgtgtgtgggatatttg

SEQ ID NO: 268627 - DNA, 120 bp, Artificial Sequence
  ENSG00000126870_18 (sequence is synthesized)
gcagccttcagggccacagaaagttctgatatgtgagtcccaggtcacgtgttgctgcttgagccctttgaaagcatttttactgtttgccggaacagcgcacggctcagttgtcgtctg

SEQ ID NO: 268628 - DNA, 120 bp, Artificial Sequence
  ENSG00000126870_19 (sequence is synthesized)
ggatttgagagaagactcaaggctgcattactctgtgacgctgagcgatggcttctggacgttccggaccgccacgttttccaccgatggaatccttacctcagtaaaccaccgaagccc

SEQ ID NO: 268629 - DNA, 120 bp, Artificial Sequence
  ENSG00000126870_20 (sequence is synthesized)
tcttcaagcagtagaacctatctcaacgtccgtccacaaaaagcagagctttgtgctttcacccttttctactcaagaagaaatgtcaggtttgtccttccacatcgcttccttggatga

SEQ ID NO: 268630 - DNA, 120 bp, Artificial Sequence
  ENSG00000126870_21 (sequence is synthesized)
gagtggggttctcaatgtatgggtggttgttgaattaccaaaggcagacatcgcaggttcaataagtgatttaggtctgatgcctggagggagggtcaagctggtacatagtgctctgat

SEQ ID NO: 268631 - DNA, 120 bp, Artificial Sequence
  ENSG00000126870_22 (sequence is synthesized)
ccagttgggtgacagtctttcccataaaggtaatgaattttggggcactacacaaacactgaatgttaaatttctgccttcagatcctaatcactttattattggcacagacatgggtct

SEQ ID NO: 268632 - DNA, 120 bp, Artificial Sequence
  ENSG00000126870_23 (sequence is synthesized)
cataagccatggcacaagacaagatttgagagtggctcccaaactattcaaacctcagcaacatggtataagaccagtgaaagttaatgtcattgatttttcaccatttggagaaccaat

SEQ ID NO: 268633 - DNA, 120 bp, Artificial Sequence
  ENSG00000126870_24 (sequence is synthesized)
atttttggccggctgttcggacggaagcatcaggctgcaccagctgagctccgcgtttccgctcctgcagtgggacagcagcacggacagccatgcggtcaccggcctgcagtggtcccc

SEQ ID NO: 268634 - DNA, 120 bp, Artificial Sequence
  ENSG00000126870_25 (sequence is synthesized)
aaccaggcctgccgtgttcctggtgcaggacgacacatccaacatctacatctgggacctcctccagagcgatctgggtcctgtcgccaaacagcaggtctcccccaacaggctggtggc

SEQ ID NO: 268635 - DNA, 120 bp, Artificial Sequence
  ENSG00000126870_26 (sequence is synthesized)
catggctgcggtgggtgagcctgagaaggctggtggcagcttcctggccctggtgctggccagggcgtctggctccatcgacatccagcacctgaagaggcggtgggcggccccggaggt

SEQ ID NO: 268636 - DNA, 120 bp, Artificial Sequence
  ENSG00000126870_27 (sequence is synthesized)
ggacgagtgcaacaggctgcgtctgcttttgcaggaagccctgtggccagagggaaaactgcacaagtagcgggtgtggctgagaggaccgcgtttctgtaatgacccagatttaaaaga

SEQ ID NO: 268637 - DNA, 120 bp, Artificial Sequence
  ENSG00000126870_28 (sequence is synthesized)
cataaggtggataattctacatttgtgtgcaagtatatttatgtatatagactatgtatattctgtatataatttattttacatgaatatgtctttggtattcccagtaaatagatgact

SEQ ID NO: 268638 - DNA, 120 bp, Artificial Sequence
  ENSG00000126870_29 (sequence is synthesized)
acttttgagtggaaacaaagaacattctagcatttacaaaacttccaggggaatgtagagccacgtccagggtgctcttttctgagagtatttcgagttatttttagaacagtttaaata

SEQ ID NO: 268639 - DNA, 120 bp, Artificial Sequence
  ENSG00000126870_30 (sequence is synthesized)
ttgtcacattactgctagattttaaacagcctaccatgaaaatgtatcttaatgaactattttcttatgcataaagtatgtgaacacatgtctaaattaaaaggaattactccaccgaaa

SEQ ID NO: 268640 - DNA, 120 bp, Artificial Sequence
  ENSG00000126870_31 (sequence is synthesized)
atgctactaatggtgtccgtgctcttagggctctgtgtactgagccctcacagatgctgtcacacacaggcctactctaataaggtgggtggagcagtaacatcttccacatgctggtgg

SEQ ID NO: 268641 - DNA, 120 bp, Artificial Sequence
  ENSG00000126870_32 (sequence is synthesized)
tgccatgcccttgcagctaccacataggaggcccctgaagacttgagcacgagcccatccagaattctcttacacagagaagttgcacgtcactttctgctcagcacccaggccttaggt

SEQ ID NO: 268642 - DNA, 120 bp, Artificial Sequence
  ENSG00000126870_33 (sequence is synthesized)
tagctgagggtgccgtggccccactcagtgagcactgatgctcctgttctccagagggagctgaggatgctgtggccctcctcagtgggagctgaggatgctgtggccctcctcagtggg

SEQ ID NO: 268643 - DNA, 120 bp, Artificial Sequence
  ENSG00000126870_34 (sequence is synthesized)
aagcctgactcatgttttctttgcaaccagcgttttatccgtctgtgagcacatgctcttatttttcctgatgatgtgctccttgagtttccacagaggaatcatcatggttttccctgg

SEQ ID NO: 268644 - DNA, 120 bp, Artificial Sequence
  ENSG00000126870_35 (sequence is synthesized)
aggcgtggcagtgtccactgatgagtgccttcatgaggcacgtggggactgaggggttgaggtgcctgtcaagtcttgggacacagctggactgagcctgacacgaagcatgctcttgat

SEQ ID NO: 268645 - DNA, 120 bp, Artificial Sequence
  ENSG00000126870_36 (sequence is synthesized)
ccattctttttttcctacaaggacctttttaaattaaatttagaaatgtattttttctccaaattcttggcatcaggatataatgttacttgtgagagtaggaattaatgtttcaaattg

SEQ ID NO: 268646 - DNA, 120 bp, Artificial Sequence
  ENSG00000126870_37 (sequence is synthesized)
ctttaaaggaaaactgacattctgataaaacatgggcactgaggataaaataggataatattaaaatactatttgatgacgtactactttaaattatctagtaaaatattcagtaattga

SEQ ID NO: 268647 - DNA, 120 bp, Artificial Sequence
  ENSG00000126870_38 (sequence is synthesized)
tgcagttaattatagttagtaattaatatgatgcactaatacaaatgaaggttttgcagaatgattctttgtctcacattttgtgcctgctacagaggtggcagaactcagctgggcagt

SEQ ID NO: 268648 - DNA, 120 bp, Artificial Sequence
  ENSG00000126870_39 (sequence is synthesized)
gctgatagagcgttctttaaacttatagctaaagggcacctgtcctggtagaggtaaggatctgccccttcttcagccctatcgcctggctgaggctcagggactgtttccctcagttcc

SEQ ID NO: 268649 - DNA, 120 bp, Artificial Sequence
  ENSG00000126870_40 (sequence is synthesized)
ccgtggggtagcgctgcacacagggagggtctttgtgccaccagcacacaggatttcctgacagcattaaagcttgtctgctctggagttgctgagacgcgagcaggattttattcttaa

SEQ ID NO: 268650 - DNA, 120 bp, Artificial Sequence
  ENSG00000126870_41 (sequence is synthesized)
cgttactggttttcttagcagatctttgaataacctttttttgttactcattttcaacatttatgcttagtgttatatctttattagcctgatttacaagattagaatttacaactctca

SEQ ID NO: 268651 - DNA, 120 bp, Artificial Sequence
  ENSG00000126870_42 (sequence is synthesized)
atatgagattatttttggcatatttcttatttgaaggagttattcactgtcatacacattgctccaggtaaagctggagctgctttcttggccctgtttaatgttgagctggcacaggtg

SEQ ID NO: 268652 - DNA, 120 bp, Artificial Sequence
  ENSG00000126870_43 (sequence is synthesized)
gacggtcgtaaagactagcacagtgttgacatcacagtctgtgctgaagcaggaatcacggagccatgctgactccggggtttcagataactgactagctgtgtgatcttgggcagttac

SEQ ID NO: 268653 - DNA, 120 bp, Artificial Sequence
  ENSG00000126870_44 (sequence is synthesized)
ttaacctgtctgtgcctcattttccttaactgtgaaatgagtgtcagactttctttagggttgttgtgaagattaattaagcaagctaaacatggaaggtgcttaaaggagtgccaggca

SEQ ID NO: 268654 - DNA, 120 bp, Artificial Sequence
  ENSG00000126870_45 (sequence is synthesized)
cgttctgagtgctaagcaccggtttgttttctgtgtcctccttggctgtactctgccacaccctgtggtgcttggactacttggttataaactgcacgccttatccttttttagggcagt

SEQ ID NO: 268655 - DNA, 120 bp, Artificial Sequence
  ENSG00000126870_46 (sequence is synthesized)
aagaaaccgtttggtaaataactttttcccgtgcactaaagttacaccatggcgtttgaaagcctttgtacacttccaaaaggtaaatggtccacttggtcagtgaaggagtctttgctg

SEQ ID NO: 268656 - DNA, 120 bp, Artificial Sequence
  ENSG00000126870_47 (sequence is synthesized)
agcgccaatgacttgcacagaggtgtgcgctctgctccagggatgtctttattcaagtcttaattctgtaactttaaacgttttctcatttttaaaaacagtcacatcttataatgtctg

SEQ ID NO: 268657 - DNA, 120 bp, Artificial Sequence
  ENSG00000126870_48 (sequence is synthesized)
tgtggtgctttctaattgctcataaatgtggcctcctgtggtctggtccttatcacagtcctgtacggcagatgtccagcaataagggaactgagatgcagagatgaggtaacctcccat

SEQ ID NO: 268658 - DNA, 120 bp, Artificial Sequence
  ENSG00000126870_49 (sequence is synthesized)
caagtagcggacagtgctgggacttgagctcaggcccctgacccagacaggcatcctccagagccacaccctctgcattgctggccgtaaagctttgttgtgaagatcagatgagataat

SEQ ID NO: 268659 - DNA, 120 bp, Artificial Sequence
  ENSG00000126870_50 (sequence is synthesized)
gtgtgggaaagggctctgagtttcataaaaccgtaagacgggagggcaagtgcaaaccaatatccaaaaggaatgaaaagacgataagatgcagtagaaataaatatacaaacaaataaa

SEQ ID NO: 268660 - DNA, 120 bp, Artificial Sequence
  ENSG00000126870_51 (sequence is synthesized)
tacacaggtaagtatgtacaagaagccaccgaaatccttagggggaagaggtggattgaggaatgacttgtgtccattacaaaggattggggatggagttgtttgttcttgtctttcttt

SEQ ID NO: 268661 - DNA, 120 bp, Artificial Sequence
  ENSG00000126870_52 (sequence is synthesized)
cttggagccggaacctcagcttgatgcccagatctgtggagcagccctgtccccaggcaagtcgccgactgcttcagatcccagtgcccggtggggactatacgtgccctgcttacctcc

SEQ ID NO: 268662 - DNA, 120 bp, Artificial Sequence
  ENSG00000126878_0 (sequence is synthesized)
acacgcagctagccggagcccggaccaggcgcctgtgcctcctcctcgtccctcgccgcgtccgcgaagcctggagccggcgggagccccgcgctcgccatgtcgggcgagctcagcaac

SEQ ID NO: 268663 - DNA, 120 bp, Artificial Sequence
  ENSG00000126878_1 (sequence is synthesized)
aggttccaaggagggaaggcgttcggcttgctcaaagcccggcaggagaggaggctggccgagatcaaccgggagtttctgtgtgaccagaagtacagtgatgaagagaaccttccagaa

SEQ ID NO: 268664 - DNA, 120 bp, Artificial Sequence
  ENSG00000126878_2 (sequence is synthesized)
aagctcacagccttcaaagagaagtacatggagtttgacctgaacaatgaaggcgagattgacctgatgtctttaaagaggatgatggagaagcttggtgtccccaagacccacctggag

SEQ ID NO: 268665 - DNA, 120 bp, Artificial Sequence
  ENSG00000126878_3 (sequence is synthesized)
atgaagaagatgatctcagaggtgacaggaggggtcagtgacactatatcctaccgagactttgtgaacatgatgctggggaaacggtcggctgtcctcaagttagtcatgatgtttgaa

SEQ ID NO: 268666 - DNA, 120 bp, Artificial Sequence
  ENSG00000126878_4 (sequence is synthesized)
ggaaaagccaacgagagcagccccaagccagttggcccccctccagagagagacattgctagcctgccctgaggaccccgcctggactccccagccttcccaccccatacctccctcccg

SEQ ID NO: 268667 - DNA, 120 bp, Artificial Sequence
  ENSG00000126878_5 (sequence is synthesized)
atcttgctgcccttcttgacacactgtgatctctctctctctcatttgtttggtcattgagggtttgtttgtgttttcatcaatgtctttgtaaagcacaaattatctgccttaaagggg

SEQ ID NO: 268668 - DNA, 120 bp, Artificial Sequence
  ENSG00000126878_6 (sequence is synthesized)
ctctgggtcggggaatcctgagccttgggtcccctccctctcttcttccctccttccccgctccctgtgcagaagggctgacatcaaaccaaaaactagagggggcagggccagggcagg

SEQ ID NO: 268669 - DNA, 120 bp, Artificial Sequence
  ENSG00000126878_7 (sequence is synthesized)
gaggcttccagcctgtgttcccctcacttggaggaaccagcactctccatcctttcagaaagtctccaagccaagttcaggctcactgacctggctctgacgaggaccccaggccactct

SEQ ID NO: 268670 - DNA, 120 bp, Artificial Sequence
  ENSG00000126878_8 (sequence is synthesized)
gagaagaccttggagtagggacaaggctgcagggcctctttcgggtttccttggacagtgccatggctccagtgctctggtgtcacccaggacacagccactcggggccccgctgcccca

SEQ ID NO: 268671 - DNA, 120 bp, Artificial Sequence
  ENSG00000126878_9 (sequence is synthesized)
gctgatccccactcattccacacctcttctcatcctcagtgatgtgaaggtgggaaggaaaggagcttggcattgggagcccttcaagaaggtaccagaaggaaccctccagtcctgctc

SEQ ID NO: 268672 - DNA, 120 bp, Artificial Sequence
  ENSG00000126878_10 (sequence is synthesized)
tctggccacacctgtgcaggcagctgagaggcagcgtgcagccctactgtcccttactggggcagcagagggcttcggaggcagaagtgaggcctggggttttgggggaaaggtcagctc

SEQ ID NO: 268673 - DNA, 120 bp, Artificial Sequence
  ENSG00000126878_11 (sequence is synthesized)
agtgctgttccaccttttagggaggttactgaggggaccaggatgggagaatgaggagtaaaatgctcacggcaaagtcagcagcactggtaagccaagactgagaaatacaaggttgct

SEQ ID NO: 268674 - DNA, 120 bp, Artificial Sequence
  ENSG00000126878_12 (sequence is synthesized)
tgtctgaccccaatctgcttgaaacctgactctgcttctctcatttgtcttcctaccctactcacataattcactcattgactcactcattcaccagatatttattgacctgctattata

SEQ ID NO: 268675 - DNA, 120 bp, Artificial Sequence
  ENSG00000126878_13 (sequence is synthesized)
agctttacatcctcccatgttgtcctggcatgtgcagtatacacggtctaactcatctctccccagatctctcagaaccttgagcttgggaattgaactggggtcacctgtgtcctttct

SEQ ID NO: 268676 - DNA, 120 bp, Artificial Sequence
  ENSG00000126878_14 (sequence is synthesized)
attttagaaccctaatgcaccctggagggtagctgggccagacttctcatttcacaggtgaggagactggtgccccacagggattaagtgccttgcccaaggtcaggcttatctccagag

SEQ ID NO: 268677 - DNA, 120 bp, Artificial Sequence
  ENSG00000126878_15 (sequence is synthesized)
ggaggtgccctggactggggcccagatgttcagggaccctgcctacacctcatttccagtgtgggctgccttagttagttatgagaacagggaagggctgggaagagacagcctccaagg

SEQ ID NO: 268678 - DNA, 120 bp, Artificial Sequence
  ENSG00000126878_16 (sequence is synthesized)
tcaacacttggagagggtttcacttgctctgaagaccctggtccaggattcgccctctcccatgccttcaagtcagcatcaggcttagggcaaagaccaggcctctgaagctgcctcttg

SEQ ID NO: 268679 - DNA, 120 bp, Artificial Sequence
  ENSG00000126878_17 (sequence is synthesized)
taattcatgcaggaagatgtcaaagtcagccccatcttggctgatcagggtgttcagccttaaccccacctgtgttctgaagtctcttaccctacctgctcaggactgagacagttattc

SEQ ID NO: 268680 - DNA, 120 bp, Artificial Sequence
  ENSG00000126878_18 (sequence is synthesized)
actgaacatatttattaagcacttgctgtaggccaacagttaagaatccaataatgaaatggacagattcatggaacttagagtccaataggaaagtgagacccagacaatgacaatgag

SEQ ID NO: 268681 - DNA, 120 bp, Artificial Sequence
  ENSG00000126878_19 (sequence is synthesized)
ataaatgttaggaagggggaggtatggggtgacttccctgcagtcctgggggcctagatgggcccaagactgggtgagagtcttggcagagcctttgcaacaccttaagtggacaggact

SEQ ID NO: 268682 - DNA, 120 bp, Artificial Sequence
  ENSG00000126878_20 (sequence is synthesized)
gggaggtcttggtggttggagccaacgtgggttccctgcggctccttagtcacctctgatagcagattgagggaggaaaacaggtaaggcatgaggaaatggccaggttgggttaaccca

SEQ ID NO: 268683 - DNA, 120 bp, Artificial Sequence
  ENSG00000126878_21 (sequence is synthesized)
ctggtttcaaccagttcaggaatgaggttatttggccatgactggctgatcttgagctcaaggatctgcttcaaatgcacacaggcctagttgaagtttaaaccccagcaaaacattcct

SEQ ID NO: 268684 - DNA, 120 bp, Artificial Sequence
  ENSG00000126878_22 (sequence is synthesized)
ccctgtaaatggaaaatcctacttctacccccaccctgccctgttttttgttttttttttccccaagatcattagatgtcctcacccctcctcactgcctctcctctctgggacaggctg

SEQ ID NO: 268685 - DNA, 120 bp, Artificial Sequence
  ENSG00000126878_23 (sequence is synthesized)
ggacctttgaggaagataaagccttccttcactacccatcatattcagtgtccctgttcctcactcagagaggaaggcagaaccagtcaggcttatttcagtaagttccacagttctaca

SEQ ID NO: 268686 - DNA, 120 bp, Artificial Sequence
  ENSG00000126878_24 (sequence is synthesized)
agactgcaggaattctccttaagggaggagagcaagcaggtgtggccccagcttctggaaatggcagaagagagggttttctcattgaatgggggtgggggctcgtgtgtcctgggaaac

SEQ ID NO: 268687 - DNA, 120 bp, Artificial Sequence
  ENSG00000126878_25 (sequence is synthesized)
cccatcagtcccttcatttcttgagactcaactcctgggaggagagggtctcaagagttgtccctggaaggagggcgggggcagtctgcatctatttcaggttgtggctcttggttctag

SEQ ID NO: 268688 - DNA, 120 bp, Artificial Sequence
  ENSG00000126878_26 (sequence is synthesized)
gactcttacttctctggctaagggctcagcttcttgggacttcaaccatcttctttctgaaagaccaaatctaatgtaaccagtaacgtgaggactgccaagtatggctttgtccctatg

SEQ ID NO: 268689 - DNA, 120 bp, Artificial Sequence
  ENSG00000126878_27 (sequence is synthesized)
actcagaggagggtttgtcgggcaaattcaggtggatgaagtatgtgtgtgcgtgtgcatgggagtgtgcgtggactgggatatcatctctacagcctgcaaataaaccagacaaactta

SEQ ID NO: 268690 - DNA, 120 bp, Artificial Sequence
  ENSG00000126878_28 (sequence is synthesized)
tggactgcttggatgtaggcagcctgtctgttttccatccgctggctacaggactcccattcggtccccagctacagggctctggggacctcagggttccccctccaggagtttctgtgt

SEQ ID NO: 268691 - DNA, 120 bp, Artificial Sequence
  ENSG00000126878_29 (sequence is synthesized)
caaccggtactgtgcagggagggagccgcagctacagaggatttcatgttcccagcacagctgcttgctggctctgctgtttcaggagtttctgtgtgaccagaagtacagtgatgaaga

SEQ ID NO: 268692 - DNA, 120 bp, Artificial Sequence
  ENSG00000126878_30 (sequence is synthesized)
aaacttcctacccacagggtggccagtgcagatctgcctccaaggggcgacaggaagccggggtgaacaagggacaaactgggtctggtcgcacctggttacccgataggagggaaggcc

SEQ ID NO: 268693 - DNA, 120 bp, Artificial Sequence
  ENSG00000126878_31 (sequence is synthesized)
cccggacagtgggcccatgtgtgggtgacttctgtccccagtcccttgctcagcactgtcctctcacctctgtaggagtttctgtgtgaccagaagtacagtgatgaagagaaccttcca

SEQ ID NO: 268694 - DNA, 120 bp, Artificial Sequence
  ENSG00000126878_32 (sequence is synthesized)
gctggccgagatcaaccgggagtttctgtgtgaccagaagtacagtgatgaagagaaccttccagaaaagctcacagccttcaaaggtaagctggggcgggctgccctgcatttattcct

SEQ ID NO: 268695 - DNA, 120 bp, Artificial Sequence
  ENSG00000126878_33 (sequence is synthesized)
gggggaggtgggctggcccctcatccttgcacacaggacccctcagccccacaggactaggctgtggccctgttttgtccagaatgcccttcttcctggagaaggcttggagacagggac

SEQ ID NO: 268696 - DNA, 120 bp, Artificial Sequence
  ENSG00000126878_34 (sequence is synthesized)
cccctgagaggtggggagaggcccctccacctgcctccctgcccctgcgggccccgtcacccctcgcctgcagcccggtcctggccctgcccctctctctcccctcactgcccacggggc

SEQ ID NO: 268697 - DNA, 120 bp, Artificial Sequence
  ENSG00000126878_35 (sequence is synthesized)
tcccgggccccgcacacaatcagctctttgtgagcaagccttgcctctccccctccccagcagagcgtctcaggagcccctgcggagaatggacgtttgtgtcaccgcagtggggcaggg

SEQ ID NO: 268698 - DNA, 120 bp, Artificial Sequence
  ENSG00000126878_36 (sequence is synthesized)
gggcagagtttctgcccattgaaacccggcagcacgggatgaaaagaaagcagggcctgggagccggcgcggggagaggggcagcataaaggtccctctgtttggggccctggcgcttgg

SEQ ID NO: 268699 - DNA, 120 bp, Artificial Sequence
  ENSG00000126878_37 (sequence is synthesized)
ttcccagccagcacctcgaaaggagaggagccgggcacatagggggcagcgcagacccaccttccctgccaggggaggcacttaggcgcaggagccctgggctgtcatggaaaatatcct

SEQ ID NO: 268700 - DNA, 120 bp, Artificial Sequence
  ENSG00000126878_38 (sequence is synthesized)
ggaggttgcattcccctccaaagtgtttgcagtgtgagcatcctcccggctccagggcaaagaacttggccaagtgttcctcaaatcacttccagttgtccttaggctggacatctaggg

SEQ ID NO: 268701 - DNA, 120 bp, Artificial Sequence
  ENSG00000126878_39 (sequence is synthesized)
gcttgctcaaagcccggcaggagaggaggctggccgagatcaaccggaggatggggtgagggagcagtgccgaagagctatgagagggagccaagaggaaaggaagtcctcgacagagcc

SEQ ID NO: 268702 - DNA, 120 bp, Artificial Sequence
  ENSG00000126878_40 (sequence is synthesized)
aactaggaggagggcggcctcccaggctgccgaagaaggatccagcgtcagctaagtggaggcggggccgtgcccagtgcattgcaatgaggcctggagtgaggctgtggccaagccagc

SEQ ID NO: 268703 - DNA, 120 bp, Artificial Sequence
  ENSG00000126878_41 (sequence is synthesized)
agtcagatagacccaggagtttctgtgtgaccagaagtacagtgatgaagagaaccttccagaaaagctcacagccttcaaagggggtgacctgcagaggccccacggtccgtttgacac

SEQ ID NO: 268704 - DNA, 120 bp, Artificial Sequence
  ENSG00000126878_42 (sequence is synthesized)
actgctcccatctgaacataccaagcccactgctccgacatcctccctcactgctagaagttttcctggactccttgatcagggaagtataactcagtctgtgtgtgaggtttggggtga

SEQ ID NO: 268705 - DNA, 120 bp, Artificial Sequence
  ENSG00000126878_43 (sequence is synthesized)
tggtctgtgtaccccgggaaactgtatgtccactttgtgggctagggcaggcctttttcctggtttcagaatcacaggtcccctgaatcagtggttcccacacccggttgcccatcagaa

SEQ ID NO: 268706 - DNA, 120 bp, Artificial Sequence
  ENSG00000126878_44 (sequence is synthesized)
ctgcctgggacgctaaaaagcacacccatgcctgcccccaccctgtccttccacacccatgagccagaatcctggggcagggaatcagagctagtcactttgctactaactcagatgcag

SEQ ID NO: 268707 - DNA, 120 bp, Artificial Sequence
  ENSG00000126882_0 (sequence is synthesized)
cctccgaagacttcagggagagtctgcgagctgccgtccccgcgtgtgaggcacagaagggctggatgtcagaaccgcataattattcattaaactacaaactttttttaacccaaagaa

SEQ ID NO: 268708 - DNA, 120 bp, Artificial Sequence
  ENSG00000126882_1 (sequence is synthesized)
tatcggtgatttttgtccactgcgaggagaagaagagagagcccagggctcatgaaatgcagcagaatccttatttataaacaggccgcggtagtgatatatgcaaccccagtctactca

SEQ ID NO: 268709 - DNA, 120 bp, Artificial Sequence
  ENSG00000126882_2 (sequence is synthesized)
gtgagttttctatcctatggatatcggtcttgagagttgagattggagagcagcgccgtctgtactgggtcctgcagcctctgtcctttcaatgcctggttttttctgtgactgctggcc

SEQ ID NO: 268710 - DNA, 120 bp, Artificial Sequence
  ENSG00000126882_3 (sequence is synthesized)
ttccctggagatcagagcgctcctgtatgccatgggctgtattcagagcatcggaggcaaagccagagtcttccgggaagggatcacggtgattgatgtgaaagcctccatcgaccccgt

SEQ ID NO: 268711 - DNA, 120 bp, Artificial Sequence
  ENSG00000126882_4 (sequence is synthesized)
ccccactagcatcgatgagtcctccagcgtggtgctccgctaccggacaccccacttccgggcctcggcccaggtggtcatgccgcccatccccaagaaggagacttgggtagttggctg

SEQ ID NO: 268712 - DNA, 120 bp, Artificial Sequence
  ENSG00000126882_5 (sequence is synthesized)
gatccaggcgtgcagccacatggagttctacaaccagtacggcgagcagggcatgtccagctgggagctccccgacctccaggagggcaagatccaagccatcagcgactcggatggggt

SEQ ID NO: 268713 - DNA, 120 bp, Artificial Sequence
  ENSG00000126882_6 (sequence is synthesized)
gaactacccctggtacggcaacaccacagagacctgcaccatcgtgggccccaccaagagggactccaagttcatcatcagcatgaatgacaacttttaccccagcgtcacatgggccgt

SEQ ID NO: 268714 - DNA, 120 bp, Artificial Sequence
  ENSG00000126882_7 (sequence is synthesized)
gcccgtcagcgagagcaacgtggccaagctcaccaatatctaccgggaccagagcttcaccacctggctggtggccaccaacacctccaccaacgacatgatcatcctgcagacgctgca

SEQ ID NO: 268715 - DNA, 120 bp, Artificial Sequence
  ENSG00000126882_8 (sequence is synthesized)
ctggcgcatgcagctcagcatcgaggtgaaccccaaccggcccctgggccagcgcgcccggctgcgggagcccatcgcccaggaccagcccaaaatcctgagcaagaatgagcccatccc

SEQ ID NO: 268716 - DNA, 120 bp, Artificial Sequence
  ENSG00000126882_9 (sequence is synthesized)
gcccagcgccctggtcaagcccaatgccaacgatgcccaggtcctcatgtggcggcccaagtacgggcagccgctggtggtgatcccgcccaagcaccggtgacagccaggaccacccgc

SEQ ID NO: 268717 - DNA, 120 bp, Artificial Sequence
  ENSG00000126882_10 (sequence is synthesized)
taggttagactcacaaataataataccgctgaaaacaaaactcagactcactcttcagtcattcagcaagatacaaccattctaccctctccagcgggcggatctcactgtgctgatgcc

SEQ ID NO: 268718 - DNA, 120 bp, Artificial Sequence
  ENSG00000126882_11 (sequence is synthesized)
cccgggaaggcctccccggctctcggcacctgcttcctttcagggagaggggagatctaagcaggacagacagaccccacgtgcgccctcagggtgacctctggtctccttgcctctcct

SEQ ID NO: 268719 - DNA, 120 bp, Artificial Sequence
  ENSG00000126882_12 (sequence is synthesized)
ttttctcagtttcagtcgctcacttgtaacagattccctgaaacactgctttttccgttttttaaaaaaactcctcttttgggggctcaggggcaggaggagggggagctgattaggagg

SEQ ID NO: 268720 - DNA, 120 bp, Artificial Sequence
  ENSG00000126882_13 (sequence is synthesized)
gaagctccagcccccgatcaaagagacagatccacactgctgccgatttgtggcgctggccggccttccccccaggtccctccgccctctgtcatgcggccttatgtagacttgctttgc

SEQ ID NO: 268721 - DNA, 120 bp, Artificial Sequence
  ENSG00000126882_14 (sequence is synthesized)
caaacttttgccttaagctgaattgaaaggaagaaaaccaatcggagaaagaaagcaggatctcttttctaccggacttttcctcttctgccagaggtggagggagggttggggtcgccc

SEQ ID NO: 268722 - DNA, 120 bp, Artificial Sequence
  ENSG00000126882_15 (sequence is synthesized)
gcgagagtctcttgagcccttcttcccggttgtcttgggagaagggtgaggatgggcatttagacccgaaaccagctgctcactctttctttttggcagaaataaaaccacaggtagatt

SEQ ID NO: 268723 - DNA, 120 bp, Artificial Sequence
  ENSG00000126882_16 (sequence is synthesized)
ctccaccagtcgcctggcctcttctcccctctcttcccagcagccttaacttcccttgggcggctctaggaggagagaggcaggctcctgtgagcccagggaattttcaccctctcagtc

SEQ ID NO: 268724 - DNA, 120 bp, Artificial Sequence
  ENSG00000126882_17 (sequence is synthesized)
ctcaggacccacccccagttgagtccctggcccttcctccaggtgtgtggctttttccttctccatccacactggtcccaaatgcctgggggccggccacctggaccgccgacacacagc

SEQ ID NO: 268725 - DNA, 120 bp, Artificial Sequence
  ENSG00000126882_18 (sequence is synthesized)
ctcaatgttagtctcaaaggtaaggaaggcattcacgtcccttcttgcagggcattttaagacttgaatcgggtgggccccggcccctgtggctggctggcccctggtgtactgtaaaag

SEQ ID NO: 268726 - DNA, 120 bp, Artificial Sequence
  ENSG00000126882_19 (sequence is synthesized)
ggccaagacagggctcgttctcaggggcgcccctcccaggccctcagggcagcgggacggtgcagtcaggctctgggtgccacagtgatggaggtggaaggcacccaagctctagggaag

SEQ ID NO: 268727 - DNA, 120 bp, Artificial Sequence
  ENSG00000126882_20 (sequence is synthesized)
tcttgggaggcagtcggccgagcccctgcttcctgtcctcaaataagtgaatccaggccaagggctgggagggctgggtgggcttatcgtcgagagggttcagagccactctggaggctg

SEQ ID NO: 268728 - DNA, 120 bp, Artificial Sequence
  ENSG00000126882_21 (sequence is synthesized)
ggctggcacagtggagagcaacaggtgaggacagacgtctggaagcccatccctgggacctgccctccctcggtcccaggtcactggagctccagggcttacttagtcctgacccattgt

SEQ ID NO: 268729 - DNA, 120 bp, Artificial Sequence
  ENSG00000126882_22 (sequence is synthesized)
gccagggttctgagcagtgtcggccttgtggccacttgcaggggctattaggggacatcccgctgaagccacgctccttccagcttgccaaacccacagctacccgcccgggacccacac

SEQ ID NO: 268730 - DNA, 120 bp, Artificial Sequence
  ENSG00000126882_23 (sequence is synthesized)
tcagcctaataattatcaagcacagaaaaccgtccatttagaaaaataatccatttctgctgcagatgagccacttgtaagagtctccgtgacagcgtgggacggtgtgggaaccaaagt

SEQ ID NO: 268731 - DNA, 120 bp, Artificial Sequence
  ENSG00000126882_24 (sequence is synthesized)
ccctgccctgctcctttgtccacgggctattgcgtttattcaaggggtgcttaatgaccgtttagccactgccgtcggtctccgggcccagctcgtgccaggaggctgtcctgggacaca

SEQ ID NO: 268732 - DNA, 120 bp, Artificial Sequence
  ENSG00000126882_25 (sequence is synthesized)
ctgggctggagctgccggctggcacggtgctcagggggcccctgatgggggccaggacctccccgcagaaactgcaggttctcttgtgaggatggaggccgtgccaccccgaaaggcagt

SEQ ID NO: 268733 - DNA, 120 bp, Artificial Sequence
  ENSG00000126882_26 (sequence is synthesized)
agccttaggggaacagtgggtcccagctgcatgtctgaggatgggtggggacagggctgggactcagctttcattcactggagacttctccactcaggtctttgttgcactaaagcaggg

SEQ ID NO: 268734 - DNA, 120 bp, Artificial Sequence
  ENSG00000126882_27 (sequence is synthesized)
acaggaccctgggggttcaggaagcgggtctcaggccgctggtttattcctggaggtggggctggagaccagaatggaaaggggcttcctgagctgctagggggtgaaggacccccgaac

SEQ ID NO: 268735 - DNA, 120 bp, Artificial Sequence
  ENSG00000126882_28 (sequence is synthesized)
ccgcatttcttgagtgagagcaaacactcgaggcaggagccagcacccctcccactgcatgcccggcccccagcccaccttgccccctgacccaccttcacccgtgccccttctttctgc

SEQ ID NO: 268736 - DNA, 120 bp, Artificial Sequence
  ENSG00000126882_29 (sequence is synthesized)
ccttcctcaccgaagaagggctaggaacaccctggagaggctgcaggtccggccacggacgctcagctgagccccggtctgctccttcagcctccttgctcatgttggagcacaggcccc

SEQ ID NO: 268737 - DNA, 120 bp, Artificial Sequence
  ENSG00000126882_30 (sequence is synthesized)
aggcttcctgccagggccccgattcttcttatgtcctccagccccgccctggcgtggacatccactcactccttccagcaataagaaccgtccttggtcgtggagagtactgtgaaacaa

SEQ ID NO: 268738 - DNA, 120 bp, Artificial Sequence
  ENSG00000126882_31 (sequence is synthesized)
accaatgcacttaccaggaggcacaagactcttgaagaagatgtacaatgaacctttttttttttacaaaaaacaaaaagcaaatattcataaagagaaataaaatgtaattttaaagta

SEQ ID NO: 268739 - DNA, 120 bp, Artificial Sequence
  ENSG00000126882_32 (sequence is synthesized)
gcttcaggtcaaattagggctttgggtcaaatcagggctacctggtctgggagaggcacacttctaactgctgatgccaccctcaaagggtctccagaagcttccactgactgctgttgg

SEQ ID NO: 268740 - DNA, 120 bp, Artificial Sequence
  ENSG00000126882_33 (sequence is synthesized)
ctgcaccaggcagtgagtatcagtacatttaatcatcacaaaaaccgggcaggcagatgttggcggattgtctgtgggctgctgaagagctggtagagctcagcgcgtctgtgactggac

SEQ ID NO: 268741 - DNA, 120 bp, Artificial Sequence
  ENSG00000126882_34 (sequence is synthesized)
cacagtgcgagtagctggggctgacagtggaccctgggctgctgcacccgctgcaacccccaggtggagggatccacgcagcctggtgacgatttggccctggccctgagccatgccccg

SEQ ID NO: 268742 - DNA, 120 bp, Artificial Sequence
  ENSG00000126882_35 (sequence is synthesized)
cgtgacgcagtgctgtctgccagcctgggaggctcctcacctgtctttgcctgagccagggcctgggagtttcaggactgggaaaggaaagaaaaccccaaggctggggtcaggaagagg

SEQ ID NO: 268743 - DNA, 120 bp, Artificial Sequence
  ENSG00000126882_36 (sequence is synthesized)
agggctattttgctgctcagtcctgctcccccaaaccagaccttcagctctttgcaaacgaaagagggggcaaggccaaagcggggttccttatgcaagtttgcttcctgccctgaaaaa

SEQ ID NO: 268744 - DNA, 120 bp, Artificial Sequence
  ENSG00000126882_37 (sequence is synthesized)
ccaaaaaaacggaaaacttttccaagcaagtgtaagcactgtgtgaggacagagtgggcgtttccttctgaaataggagactaggcccccagtgggcaaagagaccctgacccgcttctc

SEQ ID NO: 268745 - DNA, 120 bp, Artificial Sequence
  ENSG00000126882_38 (sequence is synthesized)
catctgtgcgggggaatgaatgagcaggctcaccctgttgtcatcctgcctgctgctgtggggcccccctagatcttaggaattgctgggtacttccggacagtgaggttgtctgagctg

SEQ ID NO: 268746 - DNA, 120 bp, Artificial Sequence
  ENSG00000126882_39 (sequence is synthesized)
cctgcaggttccctgagtctgggtactcaggggctgggcaggagatgcccattaagcaggtgttactctaatgagtgagcttttcaatgagatgaacaggaaaattagcaaaatcatgtt

SEQ ID NO: 268747 - DNA, 120 bp, Artificial Sequence
  ENSG00000126882_40 (sequence is synthesized)
cctaatcattcctcctgcggcggccccaattttgctaactgttaacattatatgatgcataagtaggggaatgcatttttaaaattatggtaaagcctatgtaacattttataaaattga

SEQ ID NO: 268748 - DNA, 120 bp, Artificial Sequence
  ENSG00000126882_41 (sequence is synthesized)
agcctcccgagtagctgggattacagcctgtgttggaacatccttccttcttaaggctgaagaacattccattgtccagctgggagctccccgacctccaggagggcaagatccaagcca

SEQ ID NO: 268749 - DNA, 120 bp, Artificial Sequence
  ENSG00000126882_42 (sequence is synthesized)
ggccaagggattgctgcagccctcatccaccttccaagcactggaaacaaacattggagaccaaggtctccagaagcttccactgactgctgttggctgcaccaggcaacagggtctggc

SEQ ID NO: 268750 - DNA, 120 bp, Artificial Sequence
  ENSG00000126882_43 (sequence is synthesized)
cttccaagcactggaaacaaacattggagaccaagtgaggcgtcactcaacagccgtagtaatcagggaaatgacaagttacatactgatatcctttgttttgctgattggagttgggtg

SEQ ID NO: 268751 - DNA, 120 bp, Artificial Sequence
  ENSG00000126882_44 (sequence is synthesized)
cattgaaaaagatcagtcgtgcccagtgtttgggggaaggaagcgtcttcacctgttgtttgtgggaggacagttgaggcaggtgaggatgctgagagggtctccagaagcttccactga

SEQ ID NO: 268752 - DNA, 120 bp, Artificial Sequence
  ENSG00000126883_0 (sequence is synthesized)
gaggtcaactgcgcgccgctggcgctgaggggaggaagtttgctgtcgagcggcctgggttccgtgggcaaggccgtgggaggcagcgttggctgcttcgacacactgagggcggcgcga

SEQ ID NO: 268753 - DNA, 120 bp, Artificial Sequence
  ENSG00000126883_1 (sequence is synthesized)
tgggagacgagatggatgccatgattcccgagcgggagatgaaggattttcagtttagagcgctaaagaaggtgagaatctttgactcccctgaggaattgcccaaggaacgctcgagtc

SEQ ID NO: 268754 - DNA, 120 bp, Artificial Sequence
  ENSG00000126883_2 (sequence is synthesized)
tgcttgctgtgtccaacaaatatggtctggtcttcgctggtggagccagtggcttgcagatttttcctactaaaaatcttcttattcaaaataaacccggagatgatcccaacaaaatag

SEQ ID NO: 268755 - DNA, 120 bp, Artificial Sequence
  ENSG00000126883_3 (sequence is synthesized)
ttgataaagtccaaggcttgctagttcctatgaaattcccaatccatcacctggccttgagctgtgataacctcacactctctgcgtgcatgatgtccagtgaatatggttccattattg

SEQ ID NO: 268756 - DNA, 120 bp, Artificial Sequence
  ENSG00000126883_4 (sequence is synthesized)
ctttttttgatgttcgcacattctcaaatgaggctaaacagcaaaaacgcccatttgcctatcataagcttttgaaagatgcaggaggcatggtgattgatatgaagtggaaccccactg

SEQ ID NO: 268757 - DNA, 120 bp, Artificial Sequence
  ENSG00000126883_5 (sequence is synthesized)
tcccctccatggtggcagtttgtctggctgatggtagtattgctgtcctgcaagtcacggaaacagtgaaagtatgtgcaactcttccttccacggtagcagtaacctctgtgtgctgga

SEQ ID NO: 268758 - DNA, 120 bp, Artificial Sequence
  ENSG00000126883_6 (sequence is synthesized)
gccccaaaggaaagcagctggcagtgggaaaacagaatggaactgtggtccagtatcttcctactttgcaggaaaaaaaagtcattccttgtcctccgttttatgagtcagatcatcctg

SEQ ID NO: 268759 - DNA, 120 bp, Artificial Sequence
  ENSG00000126883_7 (sequence is synthesized)
tcagagttctggatgtgctgtggattggtacctacgtcttcgccatagtgtatgctgctgcagatgggaccctggaaacgtctccagatgtggtgatggctctactaccgaaaaaagaag

SEQ ID NO: 268760 - DNA, 120 bp, Artificial Sequence
  ENSG00000126883_8 (sequence is synthesized)
aaaagcacccagagatatttgtgaactttatggagccctgttatggcagctgcacggagagacagcatcattactacctcagttacattgaggaatgggatttagtgctggcagcatctg

SEQ ID NO: 268761 - DNA, 120 bp, Artificial Sequence
  ENSG00000126883_9 (sequence is synthesized)
cggcttcaacagaagttagtatccttgctcgacaaagtgatcagattaattgggaatcttggctactggaggattctagtcgagctgaattgcctgtgacagacaagagtgatgactcct

SEQ ID NO: 268762 - DNA, 120 bp, Artificial Sequence
  ENSG00000126883_10 (sequence is synthesized)
tgcccatgggagttgtcgtagactatacaaaccaagtggaaatcaccatcagtgatgaaaagactcttcctcctgctccagttctcatgttactttcaacagatggtgtgctttgtccat

SEQ ID NO: 268763 - DNA, 120 bp, Artificial Sequence
  ENSG00000126883_11 (sequence is synthesized)
tttatatgattaatcaaaatcctggggttaagtctctcatcaaaacaccagagcgactttcattagaaggagagcgacagcccaagtcaccaggaagtactcccactaccccaacctcct

SEQ ID NO: 268764 - DNA, 120 bp, Artificial Sequence
  ENSG00000126883_12 (sequence is synthesized)
ctcaagccccacagaaactggatgcttctgcagctgcagcccctgcctctctgccaccttcatcacctgctgctcccattgccactttttctttgcttcctgctggtggagcccccactg

SEQ ID NO: 268765 - DNA, 120 bp, Artificial Sequence
  ENSG00000126883_13 (sequence is synthesized)
tgttctcctttggttcttcatctttgaagtcatctgctacggtcactggggagcccccttcatattccagtggctccgacagctccaaagcagccccaggccctggcccatcaaccttct

SEQ ID NO: 268766 - DNA, 120 bp, Artificial Sequence
  ENSG00000126883_14 (sequence is synthesized)
cttttgttcccccttctaaagcctccctagcccccacccctgcagcgtctcctgtggctccatcagctgcttcattctcctttggatcatctggttttaagcctaccctggaaagcacac

SEQ ID NO: 268767 - DNA, 120 bp, Artificial Sequence
  ENSG00000126883_15 (sequence is synthesized)
cagtgccaagtgtgtctgctccaaatatagcaatgaagccctccttcccaccctcaacctctgctgtcaaagtcaaccttagtgaaaagtttactgctgcagctacctctactcctgtta

SEQ ID NO: 268768 - DNA, 120 bp, Artificial Sequence
  ENSG00000126883_16 (sequence is synthesized)
gtagctcccagagcgcacccccgatgtcgccattctcttctgcctccaagccagctgcttctggaccactcagccaccccacacctctctcagcaccacctagttccgtgccattgaagt

SEQ ID NO: 268769 - DNA, 120 bp, Artificial Sequence
  ENSG00000126883_17 (sequence is synthesized)
cctcagtcttgccctcaccatcaggacgatctgctcagggcagttcaagcccagtgccctcaatggtacagaaatcacccaggataacccctccagcggcaaagccaggctctccccagg

SEQ ID NO: 268770 - DNA, 120 bp, Artificial Sequence
  ENSG00000126883_18 (sequence is synthesized)
caaagtcacttcagcctgctgttgcagaaaagcagggacatcagtggaaagattcagatcctgtaatggctggaattggggaggagattgcacactttcagaaggagttggaagagttaa

SEQ ID NO: 268771 - DNA, 120 bp, Artificial Sequence
  ENSG00000126883_19 (sequence is synthesized)
aagcccgaacttccaaagcctgtttccaagtgggcacttctgaggagatgaagatgctgcgaacagaatcagatgacttgcatacctttcttttggagattaaagagaccacagagtcgc

SEQ ID NO: 268772 - DNA, 120 bp, Artificial Sequence
  ENSG00000126883_20 (sequence is synthesized)
ttcatggagatataagtagcctgaaaacaactttacttgagggctttgctggtgttgaggaagccagagaacaaaatgaaagaaatcgtgactctggttatctgcatttgctttataaaa

SEQ ID NO: 268773 - DNA, 120 bp, Artificial Sequence
  ENSG00000126883_21 (sequence is synthesized)
gaccactggatcccaagagtgaagctcagcttcaggaaattcggcgccttcatcagtatgtgaaatttgctgtccaagatgtgaatgatgttctagacttggagtgggatcagcatctgg

SEQ ID NO: 268774 - DNA, 120 bp, Artificial Sequence
  ENSG00000126883_22 (sequence is synthesized)
aacaaaagaaaaaacaaaggcacctgcttgtgccagagcgagagacactgtttaacaccctagccaacaatcgggaaatcatcaaccaacagaggaagaggctgaatcacctggtggata

SEQ ID NO: 268775 - DNA, 120 bp, Artificial Sequence
  ENSG00000126883_23 (sequence is synthesized)
gtcttcagcagctccgcctttacaaacagacttccctgtggagcctgtcctcggctgttccttcccagagcagcattcacagttttgacagtgacctggaaagcctgtgcaatgctttgt

SEQ ID NO: 268776 - DNA, 120 bp, Artificial Sequence
  ENSG00000126883_24 (sequence is synthesized)
tgaaaaccaccatagaatctcacaccaaatccttgcccaaagtaccagccaaactgtcccccatgaaacaggcacaactgagaaacttcttggccaagaggaagaccccaccagtgagat

SEQ ID NO: 268777 - DNA, 120 bp, Artificial Sequence
  ENSG00000126883_25 (sequence is synthesized)
ccactgctccagccagcctgtctcgatcagcctttctgtctcagagatattatgaagacttggatgaagtcagctcaacgtcatctgtctcccagtctctggagagtgaagatgcacgga

SEQ ID NO: 268778 - DNA, 120 bp, Artificial Sequence
  ENSG00000126883_26 (sequence is synthesized)
cgtcctgtaaagatgacgaggcagtggttcaggcccctcggcacgcccccgtggttcgcactccttccatccagcccagtctcttgccccatgcagcaccttttgctaaatctcacctgg

SEQ ID NO: 268779 - DNA, 120 bp, Artificial Sequence
  ENSG00000126883_27 (sequence is synthesized)
ttcatggttcttcacctggtgtgatgggaacttcagtggctacatctgctagcaaaattattcctcaaggggccgatagcacaatgcttgccacgaaaaccgtgaaacatggtgcaccta

SEQ ID NO: 268780 - DNA, 120 bp, Artificial Sequence
  ENSG00000126883_28 (sequence is synthesized)
gtccttcccaccccatctcagccccgcaggcagctgccgcagcagcactcaggcggcagatggccagtcaggcaccagctgtaaacactttgactgaatcaacgttgaagaatgtccctc

SEQ ID NO: 268781 - DNA, 120 bp, Artificial Sequence
  ENSG00000126883_29 (sequence is synthesized)
aagtggtaaatgtgcaggaattgaagaataaccctgcaaccccttctacagccatgggttcttcagtgccctactccacagccaaaacacctcacccagtgttgaccccagtggctgcta

SEQ ID NO: 268782 - DNA, 120 bp, Artificial Sequence
  ENSG00000126883_30 (sequence is synthesized)
accaagccaagcaggggtctctaataaattcccttaagccatctgggcctacaccagcatccggtcagttatcatctggtgacaaagcttcagggacagccaagatagaaacagctgtga

SEQ ID NO: 268783 - DNA, 120 bp, Artificial Sequence
  ENSG00000126883_31 (sequence is synthesized)
ccatctgcttctgggcagttcagcaagcctttctcattttctccatcagggactggctttaattttgggataatcacaccaacaccgtcttctaatttcactgctgcacaaggggcaaca

SEQ ID NO: 268784 - DNA, 120 bp, Artificial Sequence
  ENSG00000126883_32 (sequence is synthesized)
ccctccactaaagagtcaagccagccggacgcattctcatctggtgggggaagcaaaccttcttatgaggccattcctgaaagctcacctccctcaggaatcacatccgcatcaaacacc

SEQ ID NO: 268785 - DNA, 120 bp, Artificial Sequence
  ENSG00000126883_33 (sequence is synthesized)
accccaggagaacctgccgcatctagcagcagacctgtggcaccttctggaactgctctttccaccacctctagtaagctggaaaccccaccgtccaagctgggagagcttctgtttcca

SEQ ID NO: 268786 - DNA, 120 bp, Artificial Sequence
  ENSG00000126883_34 (sequence is synthesized)
agttctttggctggagagactctgggaagtttttcaggactgcgggttggccaagcagatgattctacaaaaccaaccaataaggcttcatccacaagcctaactagtacccagccaacc

SEQ ID NO: 268787 - DNA, 120 bp, Artificial Sequence
  ENSG00000126883_35 (sequence is synthesized)
aagacgtcaggcgtgccctcagggtttaattttactgcccccccggtgttagggaagcacacggagccccctgtgacatcctctgcaaccaccacctcagtagcaccaccagcagccacc

SEQ ID NO: 268788 - DNA, 120 bp, Artificial Sequence
  ENSG00000126883_36 (sequence is synthesized)
agcacttcctcaactgccgtttttggcagtctgccagtcaccagtgcaggatcctctggggtcatcagttttggtgggacatctctaagtgctggcaagactagtttttcatttggaagc

SEQ ID NO: 268789 - DNA, 120 bp, Artificial Sequence
  ENSG00000126883_37 (sequence is synthesized)
caacagaccaatagcacagtgcccccatctgccccaccaccaactacagctgccactccccttccaacatcattccccacattgtcatttggtagcctcctgagttcagcaactaccccc

SEQ ID NO: 268790 - DNA, 120 bp, Artificial Sequence
  ENSG00000126883_38 (sequence is synthesized)
tccctgcctatgtccgctggcagaagcacagaagaggccacttcatcagctttgcctgagaagccaggtgacagtgaggtctcagcatcagcagcctcacttctagaggagcaacagtca

SEQ ID NO: 268791 - DNA, 120 bp, Artificial Sequence
  ENSG00000126883_39 (sequence is synthesized)
gcccagcttccccaggctcctccgcaaacttctgactctgttaaaaaagaacctgttcttgcccagcctgcagtcagcaactctggcactgcagcatctagtactagtcttgtagcactt

SEQ ID NO: 268792 - DNA, 120 bp, Artificial Sequence
  ENSG00000126883_40 (sequence is synthesized)
tctgcagaggctaccccagccaccacgggggtccctgatgccaggacggaggcagtaccacctgcttcctccttttctgtgcctgggcagactgctgtcacagcagctgctatctcaagt

SEQ ID NO: 268793 - DNA, 120 bp, Artificial Sequence
  ENSG00000126883_41 (sequence is synthesized)
gcaggccctgtggccgtcgaaacatcaagtacccccatagcctccagcaccacgtccattgttgctcccggcccatctgcagaggcagcagcatttggtaccgtcacttctggctcatcc

SEQ ID NO: 268794 - DNA, 120 bp, Artificial Sequence
  ENSG00000126883_42 (sequence is synthesized)
gtctttgctcagcctcctgctgccagttctagctcagctttcaaccagctcaccaacaacacagccactgccccctctgccacgcccgtgtttgggcaagtggcagccagcaccgcacca

SEQ ID NO: 268795 - DNA, 120 bp, Artificial Sequence
  ENSG00000126883_43 (sequence is synthesized)
agtctgtttgggcagcagactggtagcacagccagcacagcagctgccacaccacaggtcagcagctcagggtttagcagcccagcttttggtaccacagccccaggggtctttggacag

SEQ ID NO: 268796 - DNA, 120 bp, Artificial Sequence
  ENSG00000126883_44 (sequence is synthesized)
acaaccttcgggcaggcctcagtctttgggcagtcggcgagcagtgctgcaagtgtcttttccttcagtcagcctgggttcagttccgtgcctgccttcggtcagcctgcttcctccact

SEQ ID NO: 268797 - DNA, 120 bp, Artificial Sequence
  ENSG00000126883_45 (sequence is synthesized)
cccacatccaccagtggaagtgtctttggtgccgcctcaagtaccagtagctccagttccttctcatttggacagtcttctcccaacacaggaggggggctgtttggccaaagcaacgct

SEQ ID NO: 268798 - DNA, 120 bp, Artificial Sequence
  ENSG00000126883_46 (sequence is synthesized)
cctgcttttgggcagagtcctggctttggacagggaggctctgtctttggtggtacctcagctgccaccacaacagcagcaacctctgggttcagcttttgccaagcttcaggttttggg

SEQ ID NO: 268799 - DNA, 120 bp, Artificial Sequence
  ENSG00000126883_47 (sequence is synthesized)
tctagtaatactggttctgtgtttggtcaagcagccagtactggtggaatagtctttggccagcaatcatcctcttccagtggtagcgtgtttgggtctggaaacactggaagaggggga

SEQ ID NO: 268800 - DNA, 120 bp, Artificial Sequence
  ENSG00000126883_48 (sequence is synthesized)
ggtttcttcagtggccttggaggaaaacccagtcaggatgcagccaacaaaaacccattcagctcggccagtgggggctttggatccacagctacctcaaatacctctaacctatttgga

SEQ ID NO: 268801 - DNA, 120 bp, Artificial Sequence
  ENSG00000126883_49 (sequence is synthesized)
aacagtggggccaagacatttggtggatttgccagctcgtcgtttggagagcagaaacccactggcactttcagctctggaggaggaagtgtggcatcccaaggctttgggttttcctct

SEQ ID NO: 268802 - DNA, 120 bp, Artificial Sequence
  ENSG00000126883_50 (sequence is synthesized)
ccaaacaaaacaggtggcttcggtgctgctccagtgtttggcagccctcctacttttgggggatcccctgggtttggaggggtgccagcattcggttcagccccagcctttacaagccct

SEQ ID NO: 268803 - DNA, 120 bp, Artificial Sequence
  ENSG00000126883_51 (sequence is synthesized)
ctgggctcgacgggaggcaaagtgttcggagagggcactgcagctgccagcgcaggaggattcgggtttgggagcagcagcaacaccacatccttcggcacgctcgcgagtcagaatgcc

SEQ ID NO: 268804 - DNA, 120 bp, Artificial Sequence
  ENSG00000126883_52 (sequence is synthesized)
cccactttcggatcactgtcccaacagacttctggttttgggacccagagtagcggattctctggttttggatcaggcacaggagggttcagctttgggtcaaataactcgtctgtccag

SEQ ID NO: 268805 - DNA, 120 bp, Artificial Sequence
  ENSG00000126883_53 (sequence is synthesized)
ggttttggtggctggcgaagctgagggcgtgtcagcaggcctttcgatccctgggaccaaccgcatcctcagcttcttccccgagaaatgctggagcaggctgttcagaccgacgttgcc

SEQ ID NO: 268806 - DNA, 120 bp, Artificial Sequence
  ENSG00000126883_54 (sequence is synthesized)
atcaaaacacatacacccagaaagaaacaacagaaaccaaaactcacaaggcgcatgattacttgttttatatttcatgttgggttttccctcccactattaaacagtctgtttccgtac

SEQ ID NO: 268807 - DNA, 120 bp, Artificial Sequence
  ENSG00000126883_55 (sequence is synthesized)
agaacgtatgtgggttttttcagatcacagccaagaagattgccccgtttctgtggctctgagaagccagcagagcctccatcagccagaacactgtgtcttcaaggatggcatcagaag

SEQ ID NO: 268808 - DNA, 120 bp, Artificial Sequence
  ENSG00000126883_56 (sequence is synthesized)
tcaccagcgtcgggtgttgataaacagcatcgaatgtgccgtggtctcacttggacctagcgccctccacatagggaagaggttgaatgctggtgggtcatctttttgaggctgaaactt

SEQ ID NO: 268809 - DNA, 120 bp, Artificial Sequence
  ENSG00000126883_57 (sequence is synthesized)
ggttatctcctctccttgttcttttagccattgtgtatcaggaccatccaaggacgcactctgcgattgagtggaggcagaggaagccactcatgccagcagcagttgagtttcagaagc

SEQ ID NO: 268810 - DNA, 120 bp, Artificial Sequence
  ENSG00000126883_58 (sequence is synthesized)
agccatagcgcttttcagtacagtacaatagtagccagcgtgaggcaggacagtgctgcgccttagccggccttggctctcatctccatgtggctcttgggtgccatgtgtcctactcca

SEQ ID NO: 268811 - DNA, 120 bp, Artificial Sequence
  ENSG00000126883_59 (sequence is synthesized)
gagaggagggggccggtcacttgagaagacagcctttatattctgtatgtggcagtgacattggtagccacacctacccagtgtctactaaccacagtgcagatagcccttgggtagacc

SEQ ID NO: 268812 - DNA, 120 bp, Artificial Sequence
  ENSG00000126883_60 (sequence is synthesized)
caggaagtgtgaagacagacactgctgttgccagacaacactagcagaacgatgctggatttgacaacagtgtttgctaggacggcccagagctcatcactgcagttttattagagtgct

SEQ ID NO: 268813 - DNA, 120 bp, Artificial Sequence
  ENSG00000126883_61 (sequence is synthesized)
tctttatctttaatgcagtatctttgaggcctgtaacatcctagatagttgccatcaaacaaggaccgtctcgcattgaaaacagatgtaagaatttctctttcaggcccagaatctgac

SEQ ID NO: 268814 - DNA, 120 bp, Artificial Sequence
  ENSG00000126883_62 (sequence is synthesized)
agtgctttggcttgggtcatgagcagcggggagttgggaagagatttttttttttagagttttacatattggcaggttgtatttttttaatgttttaataaaagtttgacatgacattaa

SEQ ID NO: 268815 - DNA, 120 bp, Artificial Sequence
  ENSG00000126883_63 (sequence is synthesized)
gtggggtgtgtgtgtgtgcgcgcgcacatgcacgtgtgcatgtgtgagctagggtgctgtgtatgtgtgtgtaagtgtgtgtgtgttggttcttaataggggatagagaaaatgtctcca

SEQ ID NO: 268816 - DNA, 120 bp, Artificial Sequence
  ENSG00000126883_64 (sequence is synthesized)
gaatctgttgttaatctgaatagtggaataagaaccagcttatatatacttgatgaagcagcaaagtagtcgttttggcttttacactgttttctgcagtcctcaagttttatggcactg

SEQ ID NO: 268817 - DNA, 120 bp, Artificial Sequence
  ENSG00000126883_65 (sequence is synthesized)
attcacaagggtttgagataggctgagctggatcctagcctctgctttagccagagaaggtttacttttctgatttgtgttgggttttgagtaagtttgcatctgggaaaaaggcatttt

SEQ ID NO: 268818 - DNA, 120 bp, Artificial Sequence
  ENSG00000126883_66 (sequence is synthesized)
gtgccaggcactgtggtagtcatcgcggcagccctacgaagtagtcgttaacgtagaggagtaagttgaggctcggaaagtaatttccctaaagtcacatttgacgcggggctgaaagcc

SEQ ID NO: 268819 - DNA, 120 bp, Artificial Sequence
  ENSG00000126883_67 (sequence is synthesized)
agctgccagcgcaggaggattcgggtccctggccatgagcctgtctccgaccctgaagggcaggctgttgctgatgaggcccaaggcaggaggaggaagggagcaggccgctcctgggag

SEQ ID NO: 268820 - DNA, 120 bp, Artificial Sequence
  ENSG00000126883_68 (sequence is synthesized)
aaagtccaatgagagcagatcccttggccacctttgtatggaaagagccttgacctcaccattaaaagtttgggagcagcagcaacaccacatccttcggcacgctcgcgagtcagaatg

SEQ ID NO: 268821 - DNA, 120 bp, Artificial Sequence
  ENSG00000126883_69 (sequence is synthesized)
ggagtgatatggaaccacagttggtatcatgtacgcctcacatgagaaggaggtatctagcacttctcgaccggggcctaaagctttatgttaaaaggaaaattatatagtagaactgtc

SEQ ID NO: 268822 - DNA, 120 bp, Artificial Sequence
  ENSG00000126883_70 (sequence is synthesized)
aaagacttgagtattttacaaaaaggttttgaaagatcatatactcttttttcaaggacttcattggagaggtttttgtcactcttggagttagaatcaaagaaacctaaggaactttgc

SEQ ID NO: 268823 - DNA, 120 bp, Artificial Sequence
  ENSG00000126883_71 (sequence is synthesized)
tttatgcatgtctgggcaagtagtgtgacttgcaagaaatttccgagattcaccattcattgctgatcatgaaatcctctcttttgttacgaggtgttcacttctgttttcacttgccag

SEQ ID NO: 268824 - DNA, 120 bp, Artificial Sequence
  ENSG00000126883_72 (sequence is synthesized)
gttaacgtagaggagtaagttgaggctcggaaagtaatttccctaaagtcacatttgacgcggggctgaaagccagcatcatttaagacctttgctctcccagtacttctgtaagaatga

SEQ ID NO: 268825 - DNA, 120 bp, Artificial Sequence
  ENSG00000126883_73 (sequence is synthesized)
gcattcctgctctcactggaagatcacacctgagtcaccttgtcccatgttgaaatcttttctgattgattgattgatggattggcagggtctcactccattacccaggctggagtgcag

SEQ ID NO: 268826 - DNA, 82 bp, Artificial Sequence
  ENSG00000126883_74 (sequence is synthesized)
attggcagggtctcactccattacccaggctggagtgcagtggcacgattgtagctcacagaagcctggaagatgggactac

SEQ ID NO: 268827 - DNA, 120 bp, Artificial Sequence
  ENSG00000126883_75 (sequence is synthesized)
cgttcagatggcagcccgcagtgagggctttcttggccatctcatctgaagtagtgcccttttttattctctttatgtttccctgtttgttctccaactgaaattatcagatgtgtttat

SEQ ID NO: 268828 - DNA, 120 bp, Artificial Sequence
  ENSG00000126883_76 (sequence is synthesized)
caagcaggggtctctaataaattcccttaagccatctgggcctacaccagcatccggtcagttatcatctggtgacaaagcttcaggactggctttaattttgggataatcacaccaaca

SEQ ID NO: 268829 - DNA, 120 bp, Artificial Sequence
  ENSG00000126883_77 (sequence is synthesized)
agactctgtgttgagtagcattactcatgtgttttctctaaataagtacaggttatttttgcccacatgttagtatttgacttgttcctgaatcttacttacagtatctgcaataagctc

SEQ ID NO: 268830 - DNA, 120 bp, Artificial Sequence
  ENSG00000126883_78 (sequence is synthesized)
agtgttgataatgtgcattagaaatatgcttaatttaagaaactgatgtgaaggatttctatttttataattaaggacaaggaaaggatttgcttctagaaaatcagggctgtgctttaa

SEQ ID NO: 268831 - DNA, 120 bp, Artificial Sequence
  ENSG00000126883_79 (sequence is synthesized)
catttaaatgttaacatgtgaattaaaatttctccattttttgtctgtaatttaaaatttcttcaatttatagggtgattctgtagggcaagatagacatggtaatagatagactgtaga

SEQ ID NO: 268832 - DNA, 120 bp, Artificial Sequence
  ENSG00000126883_80 (sequence is synthesized)
agctacttcctggggcggtcacaatagtggcaataactgctgtttattgagtgttgactgtgtgccaggcactgtggtagtcatcgcggcagccctacgaagtagtcgttaacgtagagg

SEQ ID NO: 268833 - DNA, 120 bp, Artificial Sequence
  ENSG00000126883_81 (sequence is synthesized)
cttttcagtgggacctctcactgctcctttattttgtgcctataaaatcatgccaggaaatcctgagcctgggtgccagaatgattaaaaacttcccagcaaggtgcgtgaaaatcagag

SEQ ID NO: 268834 - DNA, 120 bp, Artificial Sequence
  ENSG00000126883_82 (sequence is synthesized)
aaagtacctgttgctgtcactgtcgctccgctcccttggcttctaggcggcttgtcactcccatctttccaaacacccaactgagactttttctgtgttctgagaagcaggtaaggacat

SEQ ID NO: 268835 - DNA, 79 bp, Artificial Sequence
  ENSG00000126883_83 (sequence is synthesized)
cagggacagccaagatagaaacagctgtgacttcaaccccatctgcttctgggcagttcagcaagcctttctcattttc

SEQ ID NO: 268836 - DNA, 120 bp, Artificial Sequence
  ENSG00000126883_84 (sequence is synthesized)
catttttaaaatttatccttcaaaaaaaatgtcaaatcagttgtattggggtcccatgcatctgtatcctacccaaaactggtattgtatattggacagaaggttggcttgagaatgaat

SEQ ID NO: 268837 - DNA, 120 bp, Artificial Sequence
  ENSG00000126883_85 (sequence is synthesized)
tgttgaattcatggtggacctcagctgtgttgctgttccctggtatgagaaatgctggtcatcagagcccctgttctcctgctggggctaaaggaaggcaccagccctgccttaactact

SEQ ID NO: 268838 - DNA, 120 bp, Artificial Sequence
  ENSG00000126883_86 (sequence is synthesized)
gctttgtagccaagaggtgccccggtgtggagcttctgttaggaagtcctcaatgaatggttttcaccagattctttcctcttgggattattctgtgttagacccgttgtccttgaacaa

SEQ ID NO: 268839 - DNA, 120 bp, Artificial Sequence
  ENSG00000126883_87 (sequence is synthesized)
acaactccctgtgtcccctgctcccctgcagccccccagagtgagtattcagttgcacaggtcctcccgtgggaagatcctggatgatcagggatttcgaagctgctctcattgcctcgt

SEQ ID NO: 268840 - DNA, 120 bp, Artificial Sequence
  ENSG00000126883_88 (sequence is synthesized)
gtgcgtctgcactggaaaaggccatttttagggagtcgcttttaagggcagaatttcagtgtggttgccaaaaccccaagggaaaaaaaccttcaccacaccacaacatcccaatttaaa

SEQ ID NO: 268841 - DNA, 120 bp, Artificial Sequence
  ENSG00000126883_89 (sequence is synthesized)
aaatgtacacgggatgactaccaagtctcttgttcaaaggaggtgtcgatgcctgaaaggagttctaaaacgcctcttgccgcagtactgggctcagcatgagctgaaggtttgggggag

SEQ ID NO: 268842 - DNA, 120 bp, Artificial Sequence
  ENSG00000126883_90 (sequence is synthesized)
gggagatgattttgtctaggggaattgttgagatacttggatctgagtcttggcaagatgacagcatctttatcttgaaaataaactatagtatgttcttactcacacccttcccctccg

SEQ ID NO: 268843 - DNA, 120 bp, Artificial Sequence
  ENSG00000126883_91 (sequence is synthesized)
tgcaagatgctggagcgcagcagcaggagtgagagggttggcgtgctgcttctcctgtttcacgggagactgatgccttaggtttgccctcaggaaaccccaagaattaaagttaaggaa

SEQ ID NO: 268844 - DNA, 120 bp, Artificial Sequence
  ENSG00000126883_92 (sequence is synthesized)
agctttgaaaggacagttagagacccacttaggctggtattctcagaggtcttaatggatgctgttctctgcagtgatgaaccagcacacagtaccacagagttggtagaaggtttgggt

SEQ ID NO: 268845 - DNA, 120 bp, Artificial Sequence
  ENSG00000126883_93 (sequence is synthesized)
tggctgggtatcttgtgaattgatttatttatttgaaaccagctgttttctttactagtagaaaagtatattctgccttggggcggctctcacacaaatcccgattggctggttagtcag

SEQ ID NO: 268846 - DNA, 120 bp, Artificial Sequence
  ENSG00000126883_94 (sequence is synthesized)
gtgggaaggcagagttttagatactttttcttgctttggggttgattcttgcccccaggtgctgccccttctcccagaaaccactgatccgtttccctcacctagtcacctccagacccc

SEQ ID NO: 268847 - DNA, 120 bp, Artificial Sequence
  ENSG00000126883_95 (sequence is synthesized)
gggagaactgagtgagggggcacaggggattgtctccaggtggggcgagcaggggaaggaaaatagtggccacttttacattggtttgggtagtaattattgattcaggaagcaaataca

SEQ ID NO: 268848 - DNA, 120 bp, Artificial Sequence
  ENSG00000126883_96 (sequence is synthesized)
aaatcctgaatgaaatgacttggaaaaagtaaatagaatcaagatcccaagaggagctgaagataaataaatgggagcaggatgtgggggaatggtcggtaagtgagaaatgctaaaatg

SEQ ID NO: 268849 - DNA, 120 bp, Artificial Sequence
  ENSG00000126883_97 (sequence is synthesized)
atagaataaagcttaaggattgttggaggtagagcaggaactgtgtactgcatagttcccaaatgccctggtgttccaatgggggatggaaactaaaacactggccaggttggatttcat

SEQ ID NO: 268850 - DNA, 120 bp, Artificial Sequence
  ENSG00000126883_98 (sequence is synthesized)
actgtagtcctgccatttttcttcctagagcagagataaaagttggccctgggcgatagctcattctctctgaaaggctgctagttaggcccagcctgtcaccctggatcatgagtgtcg

SEQ ID NO: 268851 - DNA, 120 bp, Artificial Sequence
  ENSG00000126883_99 (sequence is synthesized)
tgtgtattgggacttacagcagggggctgaggcttgcagatgggcaagtggtgagaggccccactgacctcagtctgtttctcactggagcgcaggtttgggagcagcagcaacaccaca

SEQ ID NO: 268852 - DNA, 120 bp, Artificial Sequence
  ENSG00000126883_100 (sequence is synthesized)
tcctgtttttagagtttgtcctggaagtgtgggggttcagcagcagggtttgggttttgtggacttgctcttctctgtagcaatatggcaggaggtgccaggcctcgccttcttaagagg

SEQ ID NO: 268853 - DNA, 120 bp, Artificial Sequence
  ENSG00000126883_101 (sequence is synthesized)
cgtggttcaaagagaaaagagcacgcctgccagtgagctgggcctgagggcagcgctgaggagatgctgctcctgacttccctggaggtttctcagaagctgcatgctaacccctgggct

SEQ ID NO: 268854 - DNA, 120 bp, Artificial Sequence
  ENSG00000126883_102 (sequence is synthesized)
ggctctgggccatcaccaggtctcatgtgttgatccaccctctgtgcttctgtgtaaaatttcatggcgttaaaattcagtcttagccaggtgggtggttcacgcctataatcccagcac

SEQ ID NO: 268855 - DNA, 84 bp, Artificial Sequence
  ENSG00000126883_103 (sequence is synthesized)
ctaaaaattaaaaaaattagccgtgcatgctggcttatgcctgtggtcccagctactccagaagctgaggcgggaggatcactt

SEQ ID NO: 268856 - DNA, 72 bp, Artificial Sequence
  ENSG00000126883_104 (sequence is synthesized)
aaattaaaaaaattagccgtgcatgctggcttatgcctgtggtcccagctactccagaagctgaggcggtac

SEQ ID NO: 268857 - DNA, 120 bp, Artificial Sequence
  ENSG00000126883_105 (sequence is synthesized)
agatttccttgtattgaattacaacttggaagcttcataggttaacccttgaagtttctctctagattaaaatatgggttaaaaaaaaatccttaattatagaatcatagatctttgaga

SEQ ID NO: 268858 - DNA, 120 bp, Artificial Sequence
  ENSG00000126883_106 (sequence is synthesized)
cagaagggacttcaagaaattctttcataacgccatctgccctaagttgttatcaggaggcttaggtgacttgcccaaagtcatagatgaatacataatgtcaaaagttcctacattttg

SEQ ID NO: 268859 - DNA, 120 bp, Artificial Sequence
  ENSG00000126890_0 (sequence is synthesized)
atcctcgtgggccctgaccttctctctgagagccgggcagaggctccggagccatgcaggccgaaggccggggcacagggggttcgacgggcgatgctgatggcccaggaggccctggca

SEQ ID NO: 268860 - DNA, 120 bp, Artificial Sequence
  ENSG00000126890_1 (sequence is synthesized)
ccctggcattcctgatggcccagggggcaatgctggcggcccaggagaggcgggtgccacgggcggcagaggtccccggggcgcaggggcagcaagggcctcggggccgagaggaggcgc

SEQ ID NO: 268861 - DNA, 120 bp, Artificial Sequence
  ENSG00000126890_2 (sequence is synthesized)
gtccgcatggcggtgccgcttctgcgcaggatggaaggtgcccctgcggggccaggaggccggacagccgcctgcttgagttgcacatcacgatgcctttctcgtcgcccatggaagcgg

SEQ ID NO: 268862 - DNA, 120 bp, Artificial Sequence
  ENSG00000126890_3 (sequence is synthesized)
tgccgcaccgctcccccgaccaggggcggttctgaaggacttcaccgtgtccggcaacctactgtttatccgactgactgctgcagaccaccgccaactgcagctctccatcagctcctg

SEQ ID NO: 268863 - DNA, 120 bp, Artificial Sequence
  ENSG00000126890_4 (sequence is synthesized)
tctccagcagctttccctgttgatgtggatcacgcagtgctttctgcccgtgtttttggctcaggctccctcagggcagaggcgctaagcccagcctggcgccccttcctaggtcatgcc

SEQ ID NO: 268864 - DNA, 120 bp, Artificial Sequence
  ENSG00000126890_5 (sequence is synthesized)
tcctcccctagggaatggtcccagcacgagtggccagttcattgtgggggcctgattgtttgtcgctggaggaggacggcttacatgtttgtttctgtagaaaataaagctgagctacga

SEQ ID NO: 268865 - DNA, 120 bp, Artificial Sequence
  ENSG00000126890_6 (sequence is synthesized)
ggtgggttgggggctgggatccgcctccccggaggggcagaaagctagagatctcagaacacccaaacacaaggtctcagaacagagacctggtacaccaggcccgccgccacccgaggg

SEQ ID NO: 268866 - DNA, 120 bp, Artificial Sequence
  ENSG00000126895_0 (sequence is synthesized)
cttgctcctcaggcagaggctgagtccgcacatcacctccaggccctcagaacacctgccccagccccaccatgctcatggcgtccaccacttccgctgtgcctgggcatccctctctgc

SEQ ID NO: 268867 - DNA, 120 bp, Artificial Sequence
  ENSG00000126895_1 (sequence is synthesized)
ccagcctgcccagcaacagcagccaggagaggccactggacacccgggacccgctgctagcccgggcggagctggcgctgctctccatagtctttgtggctgtggccctgagcaatggcc

SEQ ID NO: 268868 - DNA, 120 bp, Artificial Sequence
  ENSG00000126895_2 (sequence is synthesized)
tggtgctggcggccctagctcggcggggccggcggggccactgggcacccatacacgtcttcattggccacttgtgcctggccgacctggccgtggctctgttccaagtgctgccccagc

SEQ ID NO: 268869 - DNA, 120 bp, Artificial Sequence
  ENSG00000126895_3 (sequence is synthesized)
tggcctggaaggccaccgaccgcttccgtgggccagatgccctgtgtcgggccgtgaagtatctgcagatggtgggcatgtatgcctcctcctacatgatcctggccatgacgctggacc

SEQ ID NO: 268870 - DNA, 120 bp, Artificial Sequence
  ENSG00000126895_4 (sequence is synthesized)
gccaccgtgccatctgccgtcccatgctggcgtaccgccatggaagtggggctcactggaaccggccggtgctagtggcttgggccttctcgctccttctcagcctgccccagctcttca

SEQ ID NO: 268871 - DNA, 120 bp, Artificial Sequence
  ENSG00000126895_5 (sequence is synthesized)
tcttcgcccagcgcaacgtggaaggtggcagcggggtcactgactgctgggcctgctttgcggagccctggggccgtcgcacctatgtcacctggattgccctgatggtgttcgtggcac

SEQ ID NO: 268872 - DNA, 120 bp, Artificial Sequence
  ENSG00000126895_6 (sequence is synthesized)
ccagggccatcagagaggcctggggggcgccgcaggggacgccggacaggcagccccggtgagggagcccacgtgtcagcagctgtggccaagactgtgaggatgacgctagtgattgtg

SEQ ID NO: 268873 - DNA, 120 bp, Artificial Sequence
  ENSG00000126895_7 (sequence is synthesized)
gtcgtctatgtgctgtgctgggcacccttcttcctggtgcagctgtgggccgcgtgggacccggaggcacctctggaaggggcgccctttgtgctactcatgttgctggccagcctcaac

SEQ ID NO: 268874 - DNA, 120 bp, Artificial Sequence
  ENSG00000126895_8 (sequence is synthesized)
agctgcaccaacccctggatctatgcatctttcagcagcagcgtgtcctcagagctgcgaagcttgctctgctgtgcccggggacgcaccccacccagcctgggtccccaagatgagtcc

SEQ ID NO: 268875 - DNA, 120 bp, Artificial Sequence
  ENSG00000126895_9 (sequence is synthesized)
tgcaccaccgccagctcctccctggccaaggacacttcatcgtgaggagctgttgggtgtcttgcctctagaggctttgagaagctcagctgccttcctggggctggtcctgggagccac

SEQ ID NO: 268876 - DNA, 120 bp, Artificial Sequence
  ENSG00000126895_10 (sequence is synthesized)
tgggagggggacccgtggagaattggccagagcctgtggccccgaggctgggacactgtgtggccctggacaagccacagcccctgcctgggtctccacatccccagctgtatgaggaga

SEQ ID NO: 268877 - DNA, 120 bp, Artificial Sequence
  ENSG00000126895_11 (sequence is synthesized)
gcttcaggccccaggactgtgggggcccctcaggtcagctcactgagctgggtgtaggaggggctgcagcagaggcctgaggagtggcaggaaagagggagcaggtgcccccaggtgaga

SEQ ID NO: 268878 - DNA, 120 bp, Artificial Sequence
  ENSG00000126895_12 (sequence is synthesized)
cagcggtcccaggggcctgaaaaggaaggaccaggctggggccaggggaccttcctgtctccgcctttctaatccctccctcctcattctctccctaataaaaattggagctcattttcc

SEQ ID NO: 268879 - DNA, 120 bp, Artificial Sequence
  ENSG00000126895_13 (sequence is synthesized)
agatctgagcacccagccaccttcacgccaccgcccagctgcccaggagcccagccaggactggccatactgccaccgacacgtgcacacacgccaacaggcatctgccatgctggcatc

SEQ ID NO: 268880 - DNA, 120 bp, Artificial Sequence
  ENSG00000126895_14 (sequence is synthesized)
tgtagccgtggctagggctgacggggccacttgggcttggccgcatgcccctgtgccccaccagccatcctgaacccaacctagatcctccacctccacaggggcgccctttgtgctact

SEQ ID NO: 268881 - DNA, 120 bp, Artificial Sequence
  ENSG00000126895_15 (sequence is synthesized)
ctgcccagccccatctttcttggcccccgaggggtggctgcccagggcctctctcctggcacagttccatgtagtgcctgcccatgtggctcccagttcctccccggggtcctggctgag

SEQ ID NO: 268882 - DNA, 120 bp, Artificial Sequence
  ENSG00000126895_16 (sequence is synthesized)
cagaatggcactggatcctgatctggcttcttgcatcccagaggagaccgccatgcgggcccttcctccagattcttccctagtttaacaacaggaagcgaggagtccaggggggcagag

SEQ ID NO: 268883 - DNA, 120 bp, Artificial Sequence
  ENSG00000126895_17 (sequence is synthesized)
attgccacgggcctggccacattgctaggggaggtcccaacctgctgctgagatccggcactgcacagcctcgttcaggcagagaaactgataaggagatggttgtctgctcaccccaaa

SEQ ID NO: 268884 - DNA, 120 bp, Artificial Sequence
  ENSG00000126903_0 (sequence is synthesized)
gaggggcttcggtggggcggggccctgacaggccgagctcgcgggcgactgccggccaggcagacgctgcagctaagctgcgcggtggctgtggcaggtgagagcctccggaagggaggc

SEQ ID NO: 268885 - DNA, 80 bp, Artificial Sequence
  ENSG00000126903_1 (sequence is synthesized)
cggaagggaggcggcctctggccccgaccctgctccgcgatcgcccactcgggcgcccggccgggcctggcagggaaggg

SEQ ID NO: 268886 - DNA, 120 bp, Artificial Sequence
  ENSG00000126903_2 (sequence is synthesized)
aatggcgtaaggggcccccccagactccgagacggcccgagcgggtcgccggctgtgggacggcggcgtgcccttcctttcctccctcccaggttcgcgcccgagctctgctagccaccc

SEQ ID NO: 268887 - DNA, 120 bp, Artificial Sequence
  ENSG00000126903_3 (sequence is synthesized)
gtccgacaacttccggactcccagggacagccctgccatcaaggaagacagcacaggactgggacccacccatgaacccttctcaggacaacccaacagcaccagtggggatgttctcct

SEQ ID NO: 268888 - DNA, 120 bp, Artificial Sequence
  ENSG00000126903_4 (sequence is synthesized)
aagccgcagagggcctgggcacgccatccgtcctccaggaagagccatggtgttaatgcaggacaagggcagctctcagcagtggcctggtctggggggcgagggtggtggcacaggtcc

SEQ ID NO: 268889 - DNA, 120 bp, Artificial Sequence
  ENSG00000126903_5 (sequence is synthesized)
cttaagcatgctcagagctgccctgctgctcatcagcctgccatggggggcccaagggacagccagcaccagcctcagcactgctgggggtcacaccgtgccaccgactgggggccgcta

SEQ ID NO: 268890 - DNA, 120 bp, Artificial Sequence
  ENSG00000126903_6 (sequence is synthesized)
cttgagcattggagatggctctgtgatggagtttgagtttcctgaggacagtgagggcatcatcgtgatctccagccagtacccaggccaggccaacaggacggcgcctggccccatgct

SEQ ID NO: 268891 - DNA, 120 bp, Artificial Sequence
  ENSG00000126903_7 (sequence is synthesized)
cagggtcacctccctggacacagaggtgctgaccatcaagaacgtgagtgctataacctggggaggcgggggtggctttgtggtgagcatccactcaggcctggctgggctggccccact

SEQ ID NO: 268892 - DNA, 120 bp, Artificial Sequence
  ENSG00000126903_8 (sequence is synthesized)
ccacatccagctcgtggacgcccatgaggccccgcccacactgattgaggagcggagagacttctgcatcaaggtctcacctgctgaagacacgcctgccaccctcagcgccgacctggc

SEQ ID NO: 268893 - DNA, 120 bp, Artificial Sequence
  ENSG00000126903_9 (sequence is synthesized)
cacttctcggaaaacccaatcctctacctgctcctgcctcttatctttgtcaacaagtgttcgtttgggtgcaaagtggaactcgaggttctgaaggggctcatgcagagcccccagccc

SEQ ID NO: 268894 - DNA, 120 bp, Artificial Sequence
  ENSG00000126903_10 (sequence is synthesized)
atgctgctgggcctcctgggccagtttctggtcatgcccttgtacgctttcctcatggccaaggtcttcatgctgcccaaggccctggctctgggcctcatcatcacctgctcgtcgcct

SEQ ID NO: 268895 - DNA, 120 bp, Artificial Sequence
  ENSG00000126903_11 (sequence is synthesized)
ggcggcggggggagctacctcttcagcctccttcttggaggggacgtcaccctggccatctccatgactttcctctctacggtggctgccactggcttcttgcctctgtcttcggccatc

SEQ ID NO: 268896 - DNA, 120 bp, Artificial Sequence
  ENSG00000126903_12 (sequence is synthesized)
tacagccgcctgctcagcatccatgagacgctccacgtgcccatctccaagatcctggggaccctgctgttcattgccatccccatagccgtgggcgtgctgatcaagtccaagctcccc

SEQ ID NO: 268897 - DNA, 120 bp, Artificial Sequence
  ENSG00000126903_13 (sequence is synthesized)
aagttctcccagctgctgctgcaggtcgtcaagcccttcagctttgtgctcctcctgggcggcctcttcctggcctatcgcatgggggtcttcatcctggcaggcatccggctacccatc

SEQ ID NO: 268898 - DNA, 120 bp, Artificial Sequence
  ENSG00000126903_14 (sequence is synthesized)
gtactggtgggtatcacggtgcccctggttggcctgttggtgggctactgcctagccacgtgtctgaagctgccagtggcccagcggcggacggtcagcattgaggtaggggtgcagaac

SEQ ID NO: 268899 - DNA, 120 bp, Artificial Sequence
  ENSG00000126903_15 (sequence is synthesized)
agcctgctggccttggccatgctgcagctatccctccgccgccttcaagctgactatgcctcccaggcccccttcattgtggcgctgagcggcacctccgagatgctggccttggtcatt

SEQ ID NO: 268900 - DNA, 120 bp, Artificial Sequence
  ENSG00000126903_16 (sequence is synthesized)
ggccacttcatctacagcagcctgttcccagttccctgaggcctctgggtcaagctttcatcagccccagcccccacactccaccaaagttctcatgcactatgcactcagaaaaatcca

SEQ ID NO: 268901 - DNA, 120 bp, Artificial Sequence
  ENSG00000126903_17 (sequence is synthesized)
ggcttattttttttactgattttttattctccagctttcagtgccaaagaggccatgctgagttaggtaggtgggcgctgcccagaaaatatatttcaataaaagagagaagcaagcttg

SEQ ID NO: 268902 - DNA, 120 bp, Artificial Sequence
  ENSG00000126903_18 (sequence is synthesized)
gacgctgcagctaagctgcgcggtggctgtggcagctcctgtactttgcctctcccaccccactggttttcctgcctccctcttcagaggtaagacacatggctggaccaaggcctccag

SEQ ID NO: 268903 - DNA, 120 bp, Artificial Sequence
  ENSG00000126934_0 (sequence is synthesized)
cccctgcctctcggactcgggctgcggcgtcagccttcttcgggcctcggcagcggtagcggctcgctcgcctcagccccagcgcccctcggctaccctcggcccaggcccgcagcgccg

SEQ ID NO: 268904 - DNA, 120 bp, Artificial Sequence
  ENSG00000126934_1 (sequence is synthesized)
cccgcggagccccgatgctggcccggaggaagccggtgctgccggcgctcaccatcaaccctaccatcgccgagggcccatcccctaccagcgagggcgcctccgaggcaaacctggtgg

SEQ ID NO: 268905 - DNA, 120 bp, Artificial Sequence
  ENSG00000126934_2 (sequence is synthesized)
acctgcagaagaagctggaggagctggaacttgacgagcagcagaagaagcggctggaagcctttctcacccagaaagccaaggtcggcgaactcaaagacgatgacttcgaaaggatct

SEQ ID NO: 268906 - DNA, 120 bp, Artificial Sequence
  ENSG00000126934_3 (sequence is synthesized)
cagagctgggcgcgggcaacggcggggtggtcaccaaagtccagcacagaccctcgggcctcatcatggccaggaagctgatccaccttgagatcaagccggccatccggaaccagatca

SEQ ID NO: 268907 - DNA, 120 bp, Artificial Sequence
  ENSG00000126934_4 (sequence is synthesized)
tccgcgagctgcaggtcctgcacgaatgcaactcgccgtacatcgtgggcttctacggggccttctacagtgacggggagatcagcatttgcatggaacacatggacggcggctccctgg

SEQ ID NO: 268908 - DNA, 120 bp, Artificial Sequence
  ENSG00000126934_5 (sequence is synthesized)
accaggtgctgaaagaggccaagaggattcccgaggagatcctggggaaagtcagcatcgcggttctccggggcttggcgtacctccgagagaagcaccagatcatgcaccgagatgtga

SEQ ID NO: 268909 - DNA, 120 bp, Artificial Sequence
  ENSG00000126934_6 (sequence is synthesized)
gggtgagcggccagctcatcgactccatggccaactccttcgtgggcacgcgctcctacatggctccggagcggttgcagggcacacattactcggtgcagtcggacatctggagcatgg

SEQ ID NO: 268910 - DNA, 120 bp, Artificial Sequence
  ENSG00000126934_7 (sequence is synthesized)
gcctgtccctggtggagctggccgtcggaaggtaccccatccccccgcccgacgccaaagagctggaggccatctttggccggcccgtggtcgacggggaagaaggagagcctcacagca

SEQ ID NO: 268911 - DNA, 120 bp, Artificial Sequence
  ENSG00000126934_8 (sequence is synthesized)
tctcgcctcggccgaggccccccgggcgccccgtcagcggtcacgggatggatagccggcctgccatggccatctttgaactcctggactatattgtgaacgagccacctcctaagctgc

SEQ ID NO: 268912 - DNA, 120 bp, Artificial Sequence
  ENSG00000126934_9 (sequence is synthesized)
ccaacggtgtgttcacccccgacttccaggagtttgtcaataaatgcctcatcaagaacccagcggagcgggcggacctgaagatgctcacaaaccacaccttcatcaagcggtccgagg

SEQ ID NO: 268913 - DNA, 120 bp, Artificial Sequence
  ENSG00000126934_10 (sequence is synthesized)
tggaagaagtggattttgccggctggttgtgtaaaaccctgcggctgaaccagcccggcacacccacgcgcaccgccgtgtgacagtggccgggctccctgcgtcccgctggtgacctgc

SEQ ID NO: 268914 - DNA, 120 bp, Artificial Sequence
  ENSG00000126934_11 (sequence is synthesized)
ccaccgtccctgtccatgccccgcccttccagctgaggacaggctggcgcctccacccaccctcctgcctcacccctgcggagagcaccgtggcggggcgacagcgcatgcaggaacggg

SEQ ID NO: 268915 - DNA, 120 bp, Artificial Sequence
  ENSG00000126934_12 (sequence is synthesized)
ggtctcctctcctgcccgtcctggccggggtgcctctggggacgggcgacgctgctgtgtgtggtctcagaggctctgcttccttaggttacaaaacaaaacagggagagaaaaagcaaa

SEQ ID NO: 268916 - DNA, 120 bp, Artificial Sequence
  ENSG00000126934_13 (sequence is synthesized)
tgaggcgtcttccaccagctcctgaggctgcagcacagcgctccgcccgccctcatctccggggagaggctctttgaattttctcactaaacaaacattgattgcggccccaggagaaac

SEQ ID NO: 268917 - DNA, 120 bp, Artificial Sequence
  ENSG00000126934_14 (sequence is synthesized)
ttttatttgttaatttactaatcttttgtagacacggggtctcgctgtattgcccaggctgctcatgaactcctggactcaagtgaccttctttcctcagcctcccaaagtgctgggatt

SEQ ID NO: 268918 - DNA, 120 bp, Artificial Sequence
  ENSG00000126934_15 (sequence is synthesized)
ccactagcagtgagcctgagccaccacgcccggccagatctccccttcctgttggaattctctcttaggtttttgtctctagcagtgcctaccaggtttctttctttttttttttttttt

SEQ ID NO: 268919 - DNA, 120 bp, Artificial Sequence
  ENSG00000126934_16 (sequence is synthesized)
cagctggggctacaggcatgtgccaccacagctgggtaatttggtttttgtttttgttgttgttgttgttttttgagacacagtctcacactctcacccaggctggagtgcagtggcgcc

SEQ ID NO: 268920 - DNA, 120 bp, Artificial Sequence
  ENSG00000126934_17 (sequence is synthesized)
gcccggcagccttggctaacttttaaaaaaatgtttttagtagagatggggtctcgccatattggctagcctagtcttaactcctgggcttccacctcaacctcccaaagtgctgggatt

SEQ ID NO: 268921 - DNA, 120 bp, Artificial Sequence
  ENSG00000126934_18 (sequence is synthesized)
gcacccggcccttagttaatttctggaccaaggaattggaatctggggtctttcaggaaacgactggggattcagcaacctgccaaattgagccttggagcagcctctgagatgttagct

SEQ ID NO: 268922 - DNA, 120 bp, Artificial Sequence
  ENSG00000126934_19 (sequence is synthesized)
gtggaggaggaggcccctgcttcctggggcccatcatccattcccaaaagtgctgagcattgcaggctcttcaagagctgcggtcaacaccagctccaggcctcgggctggaagcctctt

SEQ ID NO: 268923 - DNA, 120 bp, Artificial Sequence
  ENSG00000126934_20 (sequence is synthesized)
cagcaagtgccgcagggaggccctgggtgggtgagccgggaggtagaattgcgtaacagctctctatccattgctgcggtcattagccatggagagggtgacgggggctgtaacggggca

SEQ ID NO: 268924 - DNA, 120 bp, Artificial Sequence
  ENSG00000126934_21 (sequence is synthesized)
agcctcccgggttccagctgccatcctcgcccctctgggctctttcctccctggctctgctgcagccggagcggttgcagggcacacattactcggtgcagtcggacatctggagcatgg

SEQ ID NO: 268925 - DNA, 120 bp, Artificial Sequence
  ENSG00000126934_22 (sequence is synthesized)
gtaggtggagccgggctgcccacacccctggccgggacccagatgtgccactccttccgggtcctgggtggggcccgtggcccagcctgcccatccagaatcccagtgcagcgttaggca

SEQ ID NO: 268926 - DNA, 120 bp, Artificial Sequence
  ENSG00000126934_23 (sequence is synthesized)
ggactcagcccaacgggaagccagattccttttcccagagctgtggggctgcagctcccggctgccatgccatcctgtccgtgagcccaggggtgaagcaggattgcaggccctgtgcac

SEQ ID NO: 268927 - DNA, 120 bp, Artificial Sequence
  ENSG00000126934_24 (sequence is synthesized)
atgacggtgtccccagctcactgtctgcagcaggagaagcctctgtctggtccccggacccctggtgtgctgactgtgggctccccgggatccgcccgcaggttctgggagggtcgccag

SEQ ID NO: 268928 - DNA, 120 bp, Artificial Sequence
  ENSG00000126934_25 (sequence is synthesized)
ccccactccattctcctgcccccaagcacccagcagcacctgtggcgtgggcttcacaggcatgtgccgcagaccacggggaaggagctgcggacaccccgctgcccacagggccggtcc

SEQ ID NO: 268929 - DNA, 120 bp, Artificial Sequence
  ENSG00000126934_26 (sequence is synthesized)
atgtgtgtgagctcgggacgccgtggaacggcaccgcactcctggtgccggagttgccccgggcccttggcgtgcgctccggcgatgttgccccgggcctggggttttattagacagtta

SEQ ID NO: 268930 - DNA, 120 bp, Artificial Sequence
  ENSG00000126934_27 (sequence is synthesized)
gctggggttgcgtccaggcttctgacccaccaggcggggtttcccaccctctttccctctcaccctcccgctggggggtgtcctgcccctggcaccaaagtgcagaggtggatccctcgt

SEQ ID NO: 268931 - DNA, 120 bp, Artificial Sequence
  ENSG00000126934_28 (sequence is synthesized)
cctctgccaggaggcagaacagagcagccactctgtgccactctctctggtcggagagatccaggccccctccgaccacggcccacacgcgggtgccccggggccaccagctgactgccc

SEQ ID NO: 268932 - DNA, 120 bp, Artificial Sequence
  ENSG00000126934_29 (sequence is synthesized)
aggatgcccggcacagtggcgaggagaccacaggctgtggggaggggccgaggttaccgtcacctgggctggcgtcactgggatccctcctgcagtccatgcaccccctggcccctggtc

SEQ ID NO: 268933 - DNA, 120 bp, Artificial Sequence
  ENSG00000126934_30 (sequence is synthesized)
ctactcggcctggcctttctgccctaggtggcagggacaggcgcagggcagacgcccagcagtggagccgcagggcttggcgagggagccccctgggggtctggacgggcacacagcgac

SEQ ID NO: 268934 - DNA, 120 bp, Artificial Sequence
  ENSG00000126934_31 (sequence is synthesized)
ccgccgcctcctcccacgcggggcagcacccgcgtctcctccgcgccctcaccctccccttcccttcgtgtgctgggaagaggacgcaggcccaagacgctggtctccagcctggccgcc

SEQ ID NO: 268935 - DNA, 120 bp, Artificial Sequence
  ENSG00000126934_32 (sequence is synthesized)
tcccgtggcgcacagacaagcccaccacgtaggctgcagggagtgcgggccccacagctgcctgagcccccggccgcggcttgggctggcccggagcagagcctctgccgtggcgacctc

SEQ ID NO: 268936 - DNA, 120 bp, Artificial Sequence
  ENSG00000126934_33 (sequence is synthesized)
aggagggccgagtcacgcaactgattcgaggatgggacgggaggcgggggaaccctgggccctgttccttccccaccttgtgggtgggtgttcagacccaaaggcagaactgtcagaaga

SEQ ID NO: 268937 - DNA, 120 bp, Artificial Sequence
  ENSG00000126934_34 (sequence is synthesized)
cgccctgcccttggcccgtgggtggagttgggctccggcccctgcttcccgtcaggaggcagaccaccccctcgccgggagtggggggacgcatccgtggcttcccggccacctgcgcag

SEQ ID NO: 268938 - DNA, 120 bp, Artificial Sequence
  ENSG00000126934_35 (sequence is synthesized)
agctctccccctcagctctcacccccatgtctcctgcgcagctgtccctcccagttctcctgcgcagctctccccgcctcccacgaggctttcccaactatttcgtgggcacacactcct

SEQ ID NO: 268939 - DNA, 120 bp, Artificial Sequence
  ENSG00000126934_36 (sequence is synthesized)
acatggctgttagcacccccgggacagtcccaccccagctgcaccctccccttcatcagctctccccacttgccacaaggcacgtctaaagctggtgcctcctgggagcctgcttttcgg

SEQ ID NO: 268940 - DNA, 120 bp, Artificial Sequence
  ENSG00000126945_0 (sequence is synthesized)
actcgcttacgtgagcagaagtagttctggtcgtcgtctaccgtctcgctatagccgtttgagggaagaaggaggaaaattacccggtatcgttagagctacaccaaaattgcattgagc

SEQ ID NO: 268941 - DNA, 120 bp, Artificial Sequence
  ENSG00000126945_1 (sequence is synthesized)
caaacttgccaccaagagcccaacaatcaccatgatgctgagcacggaaggcagggaggggttcgtggtgaaggtcaggggcctaccctggtcctgctcagccgatgaagtgatgcgctt

SEQ ID NO: 268942 - DNA, 120 bp, Artificial Sequence
  ENSG00000126945_2 (sequence is synthesized)
cttctctgattgcaagatccaaaatggcacatcaggtattcgtttcatctacaccagagaaggcagaccaagtggtgaagcatttgttgaacttgaatctgaagaggaagtgaaattggc

SEQ ID NO: 268943 - DNA, 120 bp, Artificial Sequence
  ENSG00000126945_3 (sequence is synthesized)
tttgaagaaggacagagaaaccatgggacacagatacgttgaagtattcaagtctaacagtgttgaaatggattgggtgttgaagcatacaggtccgaatagccctgatactgccaacga

SEQ ID NO: 268944 - DNA, 120 bp, Artificial Sequence
  ENSG00000126945_4 (sequence is synthesized)
tggcttcgtccggcttagaggactcccatttggctgtagcaaggaagagattgttcagttcttttcagggttggaaattgtgccaaatgggatgacactgccagtggactttcaggggcg

SEQ ID NO: 268945 - DNA, 120 bp, Artificial Sequence
  ENSG00000126945_5 (sequence is synthesized)
aagcacaggggaagcctttgtgcagtttgcttcacaggagatagctgagaaggccttaaagaaacacaaggaaagaatagggcacaggtacattgagatcttcaagagtagccgagctga

SEQ ID NO: 268946 - DNA, 120 bp, Artificial Sequence
  ENSG00000126945_6 (sequence is synthesized)
agttcgaacccactatgatccccctcgaaagctcatggctatgcagcggccaggtccctatgataggccgggggctggcagagggtataatagcattggcagaggagctgggtttgaaag

SEQ ID NO: 268947 - DNA, 120 bp, Artificial Sequence
  ENSG00000126945_7 (sequence is synthesized)
gatgaggcgtggtgcctatggtggagggtatggaggctatgatgactatggtggctataatgatggatatggctttgggtctgatagatttggaagagacctcaattactgtttttcagg

SEQ ID NO: 268948 - DNA, 120 bp, Artificial Sequence
  ENSG00000126945_8 (sequence is synthesized)
aatgtctgatcatagatacggagatggtgggtccagtttccagagcaccacagggcactgtgtacacatgagggggttaccttacagagccactgagaatgatatttataatttcttctc

SEQ ID NO: 268949 - DNA, 120 bp, Artificial Sequence
  ENSG00000126945_9 (sequence is synthesized)
agagtacatattgaaattggacccgatggcagagttaccggtgaggcagatgttgaatttgctactcatgaagatgctgtggcagctatggcaaaagacaaagctaatatgcaacacaga

SEQ ID NO: 268950 - DNA, 120 bp, Artificial Sequence
  ENSG00000126945_10 (sequence is synthesized)
tatgtggagctcttcttaaattctactgcaggaacaagtgggggtgcttacgatcacagctatgtagaactttttttgaattctacagcaggggcaagtggtggcgcttatggtagccaa

SEQ ID NO: 268951 - DNA, 120 bp, Artificial Sequence
  ENSG00000126945_11 (sequence is synthesized)
acagcaggggcaagtggtggcgcttatggtagccaaatgatgggagggatgggcttatccaaccagtctagttatggaggtcctgctagccagcagctgagtggtggttatggaggtggt

SEQ ID NO: 268952 - DNA, 120 bp, Artificial Sequence
  ENSG00000126945_12 (sequence is synthesized)
gttctgcaggaaaactccagtgactatcagtcaaaccttgcttaggtagagaaggagcactaaatagctactccagatataaaagctgtacatttgtgggagttgaatagaatgggaggg

SEQ ID NO: 268953 - DNA, 120 bp, Artificial Sequence
  ENSG00000126945_13 (sequence is synthesized)
atgtttagtatatccagtatgattggtaaatgggaaatataattgattctgatcactcttggtcagcttctctttctttatctttctttctccttttttaagaaaacgagttaagtttaa

SEQ ID NO: 268954 - DNA, 120 bp, Artificial Sequence
  ENSG00000126945_14 (sequence is synthesized)
cagttttgcattacaggcttgtgattcatgcttactgtaaagtggaagttgagattattttaaaacttcaagctcagtaattttgaacactgaaacattcatctaggacataataacaaa

SEQ ID NO: 268955 - DNA, 120 bp, Artificial Sequence
  ENSG00000126945_15 (sequence is synthesized)
gttcagtattgaccataactgttaaaacaatttttagctttcctcaagttagttatgttgtaggagtgtacctaagcagtaagcgtatttaggttaatgcagtttcacttatgttaaatg

SEQ ID NO: 268956 - DNA, 120 bp, Artificial Sequence
  ENSG00000126945_16 (sequence is synthesized)
ttgctcttataccacaaatacattgaaaacttcggatgcatgttgagaaacatgcctttctgtaaaactcaaatataggagctgtgtctacgattcaaagtgaaaacatttggcatgttt

SEQ ID NO: 268957 - DNA, 120 bp, Artificial Sequence
  ENSG00000126945_17 (sequence is synthesized)
gttaattctagctttttggtttaatatcctgtaaggcacgtgagtgtacactttttttttttttaaggatacgggacaattttaagatgtaataccaatactttagaagtttggtcgtgt

SEQ ID NO: 268958 - DNA, 120 bp, Artificial Sequence
  ENSG00000126945_18 (sequence is synthesized)
cgtttgtatgaaaatctgaggctttggtttaaatctttccttgtattgtgatttccatttagatgtattgtactaagtgaaacttgttaaataaatcttccttttaaaaactggaaaaaa

SEQ ID NO: 268959 - DNA, 120 bp, Artificial Sequence
  ENSG00000126947_0 (sequence is synthesized)
gtccttctaatcctagtcttcgtttggtccggttgcactcttcctatagcccagagggcgagagggcctgtggcctgggggaaggaggacgaggttctgcctggatcccagcagtaggac

SEQ ID NO: 268960 - DNA, 120 bp, Artificial Sequence
  ENSG00000126947_1 (sequence is synthesized)
gctgtgccatttgggaacaaaggaatagtctgcctggaatccctgcagatcttggggccggaggccagtccaacccttggagcaggaagaaacgcaaagttgtcaagaaccaagtcgagc

SEQ ID NO: 268961 - DNA, 120 bp, Artificial Sequence
  ENSG00000126947_2 (sequence is synthesized)
tgcctcagagccggcccgcagtagctgcagactccgcccgcgacgtgtgcgcgcttctctgggccagagcgagcctgttttgtgctcgggttaagagatttgtcccagctataccatggg

SEQ ID NO: 268962 - DNA, 120 bp, Artificial Sequence
  ENSG00000126947_3 (sequence is synthesized)
ccgcactcgggaagctggctgcgtggccgctggtgtggttatcggggctggtgcctgctactgtgtatacagactggcttggggaagagacgagaacgagaaaatctgggacgaagacga

SEQ ID NO: 268963 - DNA, 120 bp, Artificial Sequence
  ENSG00000126947_4 (sequence is synthesized)
ggagtctacggacacctcagagattggggttgagactgtgaaaggagctaaaactaacgctggggcagggtctggggccaaacttcagggtgattcagaggtcaagcctgaggtgagttt

SEQ ID NO: 268964 - DNA, 120 bp, Artificial Sequence
  ENSG00000126947_5 (sequence is synthesized)
gggactcgaggattgtccgggtgtaaaagagaaggcccattcaggatcccacagcggaggtggcctagaggccaaggccaaggcccttttcaacacgctgaaggaacaggcaagtgcaaa

SEQ ID NO: 268965 - DNA, 120 bp, Artificial Sequence
  ENSG00000126947_6 (sequence is synthesized)
ggcaggcaaaggggctagggtgggtaccatctctgggaacaggacccttgcaccgagtttaccctgcccaggaggcaggggtggaggctgccaccccaccaggagtggatctagggccgg

SEQ ID NO: 268966 - DNA, 120 bp, Artificial Sequence
  ENSG00000126947_7 (sequence is synthesized)
gggcagggcaagtggaaaatccaagggaaaggcccgaagtaagagcaccagggctccagctacaacatggcctgtccggagaggcaagttcaactttccttataaaattgatgatattct

SEQ ID NO: 268967 - DNA, 120 bp, Artificial Sequence
  ENSG00000126947_8 (sequence is synthesized)
ggtaacaatgcagcatattcatttaaccagaatgccatacgtgaattgggtggtgtcccaattattgcaaaactgataaaaacaaaagaccccataattagggaaaagacttacaatgcc

SEQ ID NO: 268968 - DNA, 120 bp, Artificial Sequence
  ENSG00000126947_9 (sequence is synthesized)
cttaataacttgagtgtgaacgcagaaaatcagggcaagattaagacgtacatcagtcaagtgtgtgatgacaccatggtctgtcgcttggactcagctgtgcagatggctgggctaaga

SEQ ID NO: 268969 - DNA, 120 bp, Artificial Sequence
  ENSG00000126947_10 (sequence is synthesized)
ctgttaaccaacatgactgtgactaatcattaccaacatttgctttcctattcttttccagacttttttgctttgttattcctgggaaatcacttcaccaagatacagattatgaaacta

SEQ ID NO: 268970 - DNA, 120 bp, Artificial Sequence
  ENSG00000126947_11 (sequence is synthesized)
attataaactttactgaaaatccagccatgacaagagagctggtcagttgtaaagtaccatcagaattgatttccctctttaataaagaatgggatagagagattcttcttaatatcctt

SEQ ID NO: 268971 - DNA, 120 bp, Artificial Sequence
  ENSG00000126947_12 (sequence is synthesized)
accctatttgagaatataaatgacaacataaaaaatgaagggctcgcatcatccaggaaagaattcagcagaagttcactttttttcttattcaaagagtctggagtttgtgttaagaaa

SEQ ID NO: 268972 - DNA, 120 bp, Artificial Sequence
  ENSG00000126947_13 (sequence is synthesized)
atcaaagcactagcaaatcacaatgatctggtggtgaaagtaaaagtcctgaaagtattaaccaaactctaatttggagtctgtcccaaacaatattgagatatttgcagttggtacgat

SEQ ID NO: 268973 - DNA, 120 bp, Artificial Sequence
  ENSG00000126947_14 (sequence is synthesized)
gtgatttgtaaattctttgtttttcattgtgcgtatatggtaaagagatcttttcagctgctattttggaataatgactatcatatatcataacagtgactgatgttggttgtaatggtt

SEQ ID NO: 268974 - DNA, 120 bp, Artificial Sequence
  ENSG00000126947_15 (sequence is synthesized)
gggtttaggatgaaccattttaaggatgccaaatgaaatattagtatttgtacacagaaagaatttattgatttgatcttattacctagattgagattttttaatctttcctctacctaa

SEQ ID NO: 268975 - DNA, 120 bp, Artificial Sequence
  ENSG00000126947_16 (sequence is synthesized)
actgacaatgaattggttatacatcatgcataagctacacttttatattagtttatatttgttattctaagacttgtgtttcatcaataaagttgtgttttaagcagcagaaaaaaaaaa

SEQ ID NO: 268976 - DNA, 120 bp, Artificial Sequence
  ENSG00000126950_0 (sequence is synthesized)
gtcattctagctgcctgctgcctccgcagcgtccccccagctctccctgtgctaactgcctgcaccttggacagagcgggtgcgcaaatcagaaggattagttgggacctgccttggcga

SEQ ID NO: 268977 - DNA, 120 bp, Artificial Sequence
  ENSG00000126950_1 (sequence is synthesized)
ccccatggcatcccccagaaccgtaactattgtggccctctcagtggccctgggactcttctttgttttcatggggactatcaagctgacccccaggctcagcaaggatgcctacagtga

SEQ ID NO: 268978 - DNA, 120 bp, Artificial Sequence
  ENSG00000126950_2 (sequence is synthesized)
gatgaaacgtgcttacaagagctatgttcgagccctccctctgctgaagaaaatggggatcaattccattctcctccgaaaaagcattggtgcccttgaagtggcctgtggcatcgtcat

SEQ ID NO: 268979 - DNA, 120 bp, Artificial Sequence
  ENSG00000126950_3 (sequence is synthesized)
gacccttgtgcctgggcgtcccaaagatgtggccaacttcttcctactgttgctggtgttggctgtgctcttcttccaccagctggtcggtgatcctctcaaacgctacgcccatgctct

SEQ ID NO: 268980 - DNA, 120 bp, Artificial Sequence
  ENSG00000126950_4 (sequence is synthesized)
ggtgtttggaatcctgctcacttgccgcctgctgattgctcgcaagcccgaagaccggtcttctgagaagaagcctttgccagggaatgctgaggagcaaccctccttatatgagaaggc

SEQ ID NO: 268981 - DNA, 120 bp, Artificial Sequence
  ENSG00000126950_5 (sequence is synthesized)
ccctcagggcaaagtgaaggtgtcatagaaaagtggaagtgcaaagagtggaccttccaggcagttgcgtccatgacaccaggaagatgtcagtgtgtgtttttcatttgatttatttat

SEQ ID NO: 268982 - DNA, 120 bp, Artificial Sequence
  ENSG00000126950_6 (sequence is synthesized)
cttggggaaagtgaaaaatgtaatctgcaagttaatgaccctattggcttgtgtacatctatatgctaaaatgacttccccacattgacatttgtgcgccacctttaatcactctggggc

SEQ ID NO: 268983 - DNA, 120 bp, Artificial Sequence
  ENSG00000126950_7 (sequence is synthesized)
aactctcacatcttgctgcatgtacatgtatacggctactattgaagtgtaattgtgagatggactccaacaagcatgtgactgtgagattgtgtgtgggaaaatgtatttaactactct

SEQ ID NO: 268984 - DNA, 120 bp, Artificial Sequence
  ENSG00000126950_8 (sequence is synthesized)
tgattccagcaaaggcggaataaaacaaatttcctatgaagagaatcctgatatgaaacaagtcatgtagtctcatggccgggaatctctccacagatactaacaacttaaacttactac

SEQ ID NO: 268985 - DNA, 120 bp, Artificial Sequence
  ENSG00000126950_9 (sequence is synthesized)
tttaggagaaaaaaaaaaacattcaatttcggacactgagttatatatgaaattaattaggctctagtccaacagttgtttacattttaaatagtccatattgaatttaattaaaacaag

SEQ ID NO: 268986 - DNA, 120 bp, Artificial Sequence
  ENSG00000126950_10 (sequence is synthesized)
ggatgcatgcagtcaaattgatagtttaattcttcaagtgataatataggaagtttcaccttgcctttgtccaagccccacctattaaaaccctttactcacagtttgaaactgaagcag

SEQ ID NO: 268987 - DNA, 120 bp, Artificial Sequence
  ENSG00000126950_11 (sequence is synthesized)
taaacttgtttccagacatctttttcagattgtcttaagcccaaagttgcctcacttccactattctcagcagccaaccaggatttggcagctgctccactgttacggttgagggaacag

SEQ ID NO: 268988 - DNA, 120 bp, Artificial Sequence
  ENSG00000126950_12 (sequence is synthesized)
ggatcagtcctgttagaagtctgtgagcctcaaactctacctgttctctgcaatcatccaaaatttgaaaaagaagctatatccagtgtttcactgccaaacagattcactactcttact

SEQ ID NO: 268989 - DNA, 120 bp, Artificial Sequence
  ENSG00000126950_13 (sequence is synthesized)
gattcttcactgagctttgctagtataagcagagttccaagtctcccctagggttgtctctacatttctttatcattccagtgggtagggtttagctgggggaaggacatttcataaggg

SEQ ID NO: 268990 - DNA, 120 bp, Artificial Sequence
  ENSG00000126950_14 (sequence is synthesized)
ttagttggactgagcagtatggacatttgcttttttcattacgtactgttgtttttccttgttaggtgtgctttggtggttttaatattattgtgccagggatggggaaatggggggggt

SEQ ID NO: 268991 - DNA, 120 bp, Artificial Sequence
  ENSG00000126950_15 (sequence is synthesized)
tgtgtgggaagagtacttattattgtgttttcttcagtgtaattgttcttggtaattgatacctctctgttttatttctctcattctttcaaaataaaactttttgaaatttggaggaaa

SEQ ID NO: 268992 - DNA, 120 bp, Artificial Sequence
  ENSG00000126950_16 (sequence is synthesized)
agatttctctgtttggctcttgattatgcagttcaggagccatttcttgcctcttagagggactctctaagaagcccctgtctctcagaggcagagtctctcagaaccccaaccctagat

SEQ ID NO: 268993 - DNA, 120 bp, Artificial Sequence
  ENSG00000126950_17 (sequence is synthesized)
cagctgggatgattatctgggattttttgttttccattaaggagtggattcctctgcatcgaggaggttagtcatgtattgactgcagtggcatttcttataagatctcaaagcgttgtt

SEQ ID NO: 268994 - DNA, 120 bp, Artificial Sequence
  ENSG00000126950_18 (sequence is synthesized)
gctgctgttgttgttttaagattatttgttctttagaacatgtctgtgaggtagatttagtgtattcgttatttttattttactgatggataaactaaagcagaacaagtttaatgacat

SEQ ID NO: 268995 - DNA, 120 bp, Artificial Sequence
  ENSG00000126952_0 (sequence is synthesized)
agaatgccgtatatgtagtagcacttttcaaagaaggaagaaaggtgggagtcatttccagggtaattttgacaagaggaactgtcattatgaacatggtgggtatgaacttctgccttc

SEQ ID NO: 268996 - DNA, 120 bp, Artificial Sequence
  ENSG00000126952_1 (sequence is synthesized)
acgctgccaggagaatgatggaagcatggagatgagggatgtccacaaggaccgccaactaagacacactccttatagaatccaatgcaacaggaagctagtgaaatgacatagtgaaga

SEQ ID NO: 268997 - DNA, 120 bp, Artificial Sequence
  ENSG00000126952_2 (sequence is synthesized)
tcaaatccatattaccatttggagaaatagaaaacctccagagagaaaaatgaggcggaacacacaagatgaaaacatgaggaaatggttcaaggtcacaattccttatgggataaagta

SEQ ID NO: 268998 - DNA, 120 bp, Artificial Sequence
  ENSG00000126952_3 (sequence is synthesized)
tgacaaggcatggctaatgaattcaatccagagcaattgcagtgtccccttcactccggttgatttccactacatccgaaatcgggcatgcttctttgtccaggttgctagtgctgcctc

SEQ ID NO: 268999 - DNA, 120 bp, Artificial Sequence
  ENSG00000126952_4 (sequence is synthesized)
tgcattgaaggatgtcagttataagatttatgatgatgagaaccaaaagatatgtatatttgtcagtcattttactgcgccctactctgtgaagaataagttgaagccaggccaaatgga

SEQ ID NO: 269000 - DNA, 120 bp, Artificial Sequence
  ENSG00000126952_5 (sequence is synthesized)
gatgctaaagctgaccatgaacaaacggtacaatgtctcccagcaagctcttgatctccagaatctccgctttgacccagacttgatgggccgtgacattgatataatcctgaatcgaag

SEQ ID NO: 269001 - DNA, 120 bp, Artificial Sequence
  ENSG00000126952_6 (sequence is synthesized)
tgacattacagagaaggctcccaaagtcaagaccctgaatctctccaaaaataagctggagtcggcgtgggagttgggcaaggtgaaagggctgaagctcgaagagctatggctagaagg

SEQ ID NO: 269002 - DNA, 120 bp, Artificial Sequence
  ENSG00000126952_7 (sequence is synthesized)
gaacccgttgtgcagcaccttctcggaccagtctgcctatgtaagtgccatccgggattgtttccccaagttgttacgcctggacggccgagagttatccgcaccagtgattgttgacat

SEQ ID NO: 269003 - DNA, 120 bp, Artificial Sequence
  ENSG00000126952_8 (sequence is synthesized)
tgacagctctgagacaatgaaaccctgcaaggaaaactttactggatctgagaccctaaagcatttagtcctgcaattcctgcagcagagcaacttgtgcaagtacttcaaggatagcag

SEQ ID NO: 269004 - DNA, 120 bp, Artificial Sequence
  ENSG00000126952_9 (sequence is synthesized)
gaatataaaaattctcaaagacccctacctgcagaggaagctgctaaagcacacaaaatgtccacgaaacgtggactccctcagtgcattgcctgaaactcagcatgacttcacctccat

SEQ ID NO: 269005 - DNA, 120 bp, Artificial Sequence
  ENSG00000126952_10 (sequence is synthesized)
cctggtggacatgtggtaccagaccgtgaacacctgcttcctccctcgggcaggcccagagagccagagcctaagaccactctaaggactggggttggaggcctggctgaccaagaagcc

SEQ ID NO: 269006 - DNA, 120 bp, Artificial Sequence
  ENSG00000126952_11 (sequence is synthesized)
aaagttaacttgcaggccacaggacatagccacctgaagagccagttgttctgtgtatttgccccactcatgatcaccgtttattttcataataaacagtgacgttacatgttgtatgtt

SEQ ID NO: 269007 - DNA, 120 bp, Artificial Sequence
  ENSG00000126952_12 (sequence is synthesized)
gtgaacacctgcttcctccctcgggcaggcccagagagccagagtggaaggatggtctcagggttctgatcttgccttcatgtggaccttcatcactacctctggccgcaattccagtct

SEQ ID NO: 269008 - DNA, 120 bp, Artificial Sequence
  ENSG00000126952_13 (sequence is synthesized)
gtgcatcatgaatgataagctgtttctgagggatgccagcccccaagagactcagagtgccttctccatcccagtgtccacactctcctccagctctgagccctccctctcctaggagca

SEQ ID NO: 269009 - DNA, 120 bp, Artificial Sequence
  ENSG00000126952_14 (sequence is synthesized)
caggaaatggtgcaggctttctctgcccagtctgggatgaaactagagtggtctcagaagtgccttcaggacaataagtggaactacattagagctggtcaggtcttcactatgctccag

SEQ ID NO: 269010 - DNA, 120 bp, Artificial Sequence
  ENSG00000126952_15 (sequence is synthesized)
ccctaaaaggagccctttgatgtcatctttgtcttccttctcatcctctttgtttcctcttttcaccagcctaagaccactctaaggactggggttggaggcctggctgaccaagaagcc

SEQ ID NO: 269011 - DNA, 120 bp, Artificial Sequence
  ENSG00000126952_16 (sequence is synthesized)
ccagaggtgggtaggaggttaaggaggatcctgagcacctgagcgcttccttttcaggaaaggatgctctgcttttctgtcaacggagtgttcaaggaaggtggtggtgtttgttgtctc

SEQ ID NO: 269012 - DNA, 120 bp, Artificial Sequence
  ENSG00000126953_0 (sequence is synthesized)
agctgtggttccggttccgtcgcggagacacgtgaaggtcggtgcggagttcgtctctgcaagcttggtcgccctgggatggattcctcctcctcttcctccgcggcgggtttgggtgca

SEQ ID NO: 269013 - DNA, 120 bp, Artificial Sequence
  ENSG00000126953_1 (sequence is synthesized)
gtggacccgcagttgcagcatttcatcgaggtagagactcaaaagcagcgcttccagcagctggtgcaccagatgactgaactttgttgggagaagtgcatggacaagcctgggccaaag

SEQ ID NO: 269014 - DNA, 120 bp, Artificial Sequence
  ENSG00000126953_2 (sequence is synthesized)
ttggacagtcgggctgaggcctgttttgtgaactgcgttgagcgcttcattgatacaagccagttcatcttgaatcgactggaacagacccagaaatccaagccagttttctcagaaagc

SEQ ID NO: 269015 - DNA, 120 bp, Artificial Sequence
  ENSG00000126953_3 (sequence is synthesized)
ctttctgactgatctcagcattacctctttggaaaaggaaggtagttcaagaaatgaagagctgttgatgggatgattgaagaaacagctatgagaggattggctcccatcttttgttac

SEQ ID NO: 269016 - DNA, 120 bp, Artificial Sequence
  ENSG00000126953_4 (sequence is synthesized)
tcttgggacatcctgtcatctgagaatgaacaaagaccaattttttgtgtgtgaagcttaagggtcatatgtttgcttgtattttttaatgctaatcttgtgaaaataattgacaggcga

SEQ ID NO: 269017 - DNA, 120 bp, Artificial Sequence
  ENSG00000126953_5 (sequence is synthesized)
tatttagatgcatattactgtacatgggactatgcttttctcaaagccccattaactgcttcctataattttgatagtgggaccacatacgtaaaaatctctcatttgtgtggagtcatt

SEQ ID NO: 269018 - DNA, 120 bp, Artificial Sequence
  ENSG00000126953_6 (sequence is synthesized)
tctgatttcaggggagatccttgtgtttatcagaaagggcagaagtaggggaagaataatttggtatccttatctagtgtttgattgtcaatgctggagaaaaatatctgtaagagtgtt

SEQ ID NO: 269019 - DNA, 120 bp, Artificial Sequence
  ENSG00000126953_7 (sequence is synthesized)
tatacagtacacttcagttatcttgatctccctttcctatatgatgatttgcttaaatatccatattaagtaagtctcaaggtagggtaggcagcctgagagtctagaggcctttagtta

SEQ ID NO: 269020 - DNA, 120 bp, Artificial Sequence
  ENSG00000126953_8 (sequence is synthesized)
taaaggaatctagccagtgaacataattcttattactagactgccacaaggaagaaattaacttaccctgtatatcagggtacaaaaaattcagtgatgtgcctaaataagttataaaga

SEQ ID NO: 269021 - DNA, 120 bp, Artificial Sequence
  ENSG00000126953_9 (sequence is synthesized)
tttaggccaatcagaagctaacagcagtttcaggtagaggtgcatgcctaatgttagttagtgtagattccatttactgcattcttctgatcactgaaataaaagctatataagattcaa

SEQ ID NO: 269022 - DNA, 120 bp, Artificial Sequence
  ENSG00000126953_10 (sequence is synthesized)
gtgactccgcttctctggggactgtcattccggacctcggctttgttggtgtagaggactgggtatcaaagaagacttatgccactggacacccagcactttcaggcacccgaggttgaa

SEQ ID NO: 269023 - DNA, 120 bp, Artificial Sequence
  ENSG00000126953_11 (sequence is synthesized)
gctgcctagtgctggtcaccaagactgatcggagcccccagtactgggattttatttttggcagcccgagtcccagagagtcagtgaatcagtgaatctgctattcctggactcctcggg

SEQ ID NO: 269024 - DNA, 120 bp, Artificial Sequence
  ENSG00000126953_12 (sequence is synthesized)
atttaccttcattacccagttctaaccctctccgctgaaaaatgagtggctccagcccagtaactataaaagtggtgtaatctcttccaacgtacatacttatttgctttcttgttggat

SEQ ID NO: 269025 - DNA, 120 bp, Artificial Sequence
  ENSG00000126953_13 (sequence is synthesized)
tgttgtgtaataccaagccgttttgggtctgaaggttgaggaattgagcctgccctgtgaggggactttggcaaaagggtggaaggtatttgcagcttgccaacaacgtgttctgcttgc

SEQ ID NO: 269026 - DNA, 120 bp, Artificial Sequence
  ENSG00000126953_14 (sequence is synthesized)
caaggacagatctcccttaatgtacacaattcacagaattcagaggccaaggataattttccttggaattagagggtctgaggcttgtgtacatggcagagaataatgaacgaaattttt

SEQ ID NO: 269027 - DNA, 120 bp, Artificial Sequence
  ENSG00000126953_15 (sequence is synthesized)
gaaccacttaacttgaactatatacagtcattggtttccataggccctttcccataaacttacagtattgctggactatgacacctaccagatgcttacttaactctggtctgccttgga

SEQ ID NO: 269028 - DNA, 120 bp, Artificial Sequence
  ENSG00000126953_16 (sequence is synthesized)
ccagagtgctttgattcttttttaaaaatatctgtgattcgttactttggggctaggagggcgtgtggttaagtactattgcaagaatctgtaagctgcccggcgcggtggctcatgcct

SEQ ID NO: 269029 - DNA, 69 bp, Artificial Sequence
  ENSG00000126953_17 (sequence is synthesized)
agaaaaaattagctgggcggggcttgaacctggcggaggttacagtgagatcatgccactgcactccag

SEQ ID NO: 269030 - DNA, 120 bp, Artificial Sequence
  ENSG00000126953_18 (sequence is synthesized)
aaaagaaaagaaaagaaaggaaaaaaaactgtaagctatgatgaaccccttaggaaaatgcattcaattttccattcatcatgacaggattcaagaatctctagcttaagtagacaaggt

SEQ ID NO: 269031 - DNA, 120 bp, Artificial Sequence
  ENSG00000126953_19 (sequence is synthesized)
aatgatttatcctttcacccttttattctgtagttaacttaaaggcatttagttcaaacagcattgtggagttaaaaccaaattcattgaaaggttacttcacttatattttgccatttt

SEQ ID NO: 269032 - DNA, 120 bp, Artificial Sequence
  ENSG00000126953_20 (sequence is synthesized)
cttgctctggaatatcccagctctgccattttctggccctatgattttgggtaaagtatctctgtgccacagttttcctctttgtaaaatgaggatttataatagtatctattccatagt

SEQ ID NO: 269033 - DNA, 120 bp, Artificial Sequence
  ENSG00000126953_21 (sequence is synthesized)
attgttgtaagaatttaatgtaaggctagagaacattgctatatacttggtcagctgccaaatgtgaactatcagtaacatatcagatattatttttaggtaaagtttttttttctctaa

SEQ ID NO: 269034 - DNA, 120 bp, Artificial Sequence
  ENSG00000126953_22 (sequence is synthesized)
gcgcttccagcagctggtgcaccagatgactgaactttgttgggtgaggagcctggggctgggacctgaacactgtacctactttccctctgtccttgtaccgcgggactcgcgacaacg

SEQ ID NO: 269035 - DNA, 120 bp, Artificial Sequence
  ENSG00000126970_0 (sequence is synthesized)
acattgtgtctattgtatcccttggctggtgtatttgtacatctctcgggacgtgaaattgacagtgaaaagtatggcagatgagcaagaaatcatgtgcaaattggaaagcattaaaga

SEQ ID NO: 269036 - DNA, 120 bp, Artificial Sequence
  ENSG00000126970_1 (sequence is synthesized)
gatcaggaacaagaccctgcagatggagaagatcaaggctcgtttgaaggctgagtttgaggcacttgagtcagaggaaaggcacctgaaggaatacaagcaggagatggaccttctgct

SEQ ID NO: 269037 - DNA, 120 bp, Artificial Sequence
  ENSG00000126970_2 (sequence is synthesized)
acaggagaagatggcccatgtggaggaactccgactgatccacgctgacatcaatgtgatggaaaacactatcaaacaatctgagaatgacctaaacaagctgctagagtctacaaggag

SEQ ID NO: 269038 - DNA, 120 bp, Artificial Sequence
  ENSG00000126970_3 (sequence is synthesized)
gctgcatgatgagtataagccactgaaagaacatgtggatgccctgcgcatgactctgggcctgcagaggctccctgacttgtgtgaagaagaggagaagctttccttggattactttga

SEQ ID NO: 269039 - DNA, 120 bp, Artificial Sequence
  ENSG00000126970_4 (sequence is synthesized)
gaagcagaaagcagaatggcagacagaacctcaggagccccccatccctgagtccctggccgctgcagccgctgccgcccaacagctccaagtggctaggaagcaggatactcggcagac

SEQ ID NO: 269040 - DNA, 120 bp, Artificial Sequence
  ENSG00000126970_5 (sequence is synthesized)
ggccaccttcaggcagcagcccccacctatgaaggcctgcttgtcatgtcaccagcaaattcaccggaatgcacctatatgccctctttgcaaggccaagagtcggtcccggaaccccaa

SEQ ID NO: 269041 - DNA, 120 bp, Artificial Sequence
  ENSG00000126970_6 (sequence is synthesized)
aaagccgaaacggaagcaggatgaataaagaaagggagagcacatgaagctttgctaattataacccctcaccttgaccagagtcattgatgtcctgatgtgaaacaacccttgcccaac

SEQ ID NO: 269042 - DNA, 120 bp, Artificial Sequence
  ENSG00000126970_7 (sequence is synthesized)
cccacgaagtctcctatttaatgtgatggaagcacaacccctctctcactttgctcctatttctttctgctcttgggatttctggtttaggaagagatgtggttcaggtgctaaacagtg

SEQ ID NO: 269043 - DNA, 120 bp, Artificial Sequence
  ENSG00000126970_8 (sequence is synthesized)
tgtctgatgatcccttctctcccactcacatttcaacccctgcccttgtttggagctaagggaagggcaaaaggctcagatatgattctctatctcttgtgcctgaggcctggagcctaa

SEQ ID NO: 269044 - DNA, 120 bp, Artificial Sequence
  ENSG00000126970_9 (sequence is synthesized)
ggagctgtagggtctgaggggcaggggaggcccatatcttgtttcaggtaaaggacccagtatttcccctccttgtacttttgccttaggttctcaagggacaatagtcttcatgttgga

SEQ ID NO: 269045 - DNA, 120 bp, Artificial Sequence
  ENSG00000126970_10 (sequence is synthesized)
ttctccaacaggctgggtgcatgtatccccctactcctaccctcatctcatccttaaggcccagaggtagcttggacaagccctccttttcataatcatttgggaggcatggctgtaatt

SEQ ID NO: 269046 - DNA, 120 bp, Artificial Sequence
  ENSG00000126970_11 (sequence is synthesized)
aacctttccccaatatctagtctttgcaaattctagtagaagatttccacagtgaaatcagtgagccagaccaactctacatctcctgcctaacctactgcctaagtcattagggctgag

SEQ ID NO: 269047 - DNA, 120 bp, Artificial Sequence
  ENSG00000126970_12 (sequence is synthesized)
ggctcggctgtaggggcttccttaggctgagagtgcccccaggctgacatctgtgttggcttttgttcagaaccattactctggcacatgctcaatggtatattgcagggaggagaggag

SEQ ID NO: 269048 - DNA, 120 bp, Artificial Sequence
  ENSG00000126970_13 (sequence is synthesized)
tagatttagatttgagtaaatgccaatcactttacacatgaaggtgggtgggactttccttccattcatcccttgctctcttggatctgaactcttctggagcctcagctcaggatagct

SEQ ID NO: 269049 - DNA, 120 bp, Artificial Sequence
  ENSG00000126970_14 (sequence is synthesized)
gctggccactcctgtcctgtggattgtgcaggtggcctttcctcccaaaagaaaaggcatcaggctccccaagccccacagctctcctttccaccaaagccaggtttcctggtaaggtca

SEQ ID NO: 269050 - DNA, 120 bp, Artificial Sequence
  ENSG00000126970_15 (sequence is synthesized)
ctcgaagataagggatggggatgggggctgactgacaaaaaattttagccccaggtctcagtacctggctggggagggggatatttttccttccttaagtagttttacattgccacagtg

SEQ ID NO: 269051 - DNA, 120 bp, Artificial Sequence
  ENSG00000126970_16 (sequence is synthesized)
tgtatgtgttcactatataaaatgttcctctgctctttgaaagtaagagtgttgtgtctgtacaaatccttttaacatgcattcattggagtaaattctgagtatctactgtgtattgga

SEQ ID NO: 269052 - DNA, 120 bp, Artificial Sequence
  ENSG00000126970_17 (sequence is synthesized)
taatacaaaagatgtaatgtcatttacctttctgggtagctcttgtttgctcttattcattccaccttacaaatgagaaagccaggcaccaaggacaataatttacctaattatcacaat

SEQ ID NO: 269053 - DNA, 120 bp, Artificial Sequence
  ENSG00000126970_18 (sequence is synthesized)
aatttccatttatttagcacctactctgtgccaggtacctatgcaagttgcttaatataaatgattgtatttgacttccaaaataccttacaagctaagtattcttatcaccattttaaa

SEQ ID NO: 269054 - DNA, 120 bp, Artificial Sequence
  ENSG00000126970_19 (sequence is synthesized)
aaaaaagggatactgaacctccaaaaacttaaaagctttttcagagttaaacagctagtaagaggaaattgcaggatttggagccagctttgtccaactccagagctcatttttttctac

SEQ ID NO: 269055 - DNA, 120 bp, Artificial Sequence
  ENSG00000126970_20 (sequence is synthesized)
ttcttctccatgatcatttttaagaaaacctttctccctttcagaatggcttgatgatgagagtggttgaaataactttggaactgaaatcaagaactgggtgtcaaatgactgattcag

SEQ ID NO: 269056 - DNA, 120 bp, Artificial Sequence
  ENSG00000126970_21 (sequence is synthesized)
ggatataaaggccaagggctctctaaataatatcctgtacactaatctgtctctgtgcttgtcagggaattcaacagctaaataaaacctctctgtgcctcagtgtcctcatctggaaaa

SEQ ID NO: 269057 - DNA, 79 bp, Artificial Sequence
  ENSG00000126970_22 (sequence is synthesized)
agaaatcatgtgcaaattggaaagcattaaagagatcagatataaggtctcactatgttgcccattgtcttccaaattg

SEQ ID NO: 269058 - DNA, 120 bp, Artificial Sequence
  ENSG00000126970_23 (sequence is synthesized)
ctgagattactggcatgagccattgcacctggccttcttttttgagatggcctcaggttggctctgcctggagagggggaagcttgtaaagatggcttagaaaaaaagtcctggctccat

SEQ ID NO: 269059 - DNA, 120 bp, Artificial Sequence
  ENSG00000126970_24 (sequence is synthesized)
gctgtcggagctcagaccagcaggcctacgacctagaaagtgctcaaaaccccacttcctaaggcctagaaggagcgacgtgaagatataaggtctcactatgttgcccatgctggtttc

SEQ ID NO: 269060 - DNA, 120 bp, Artificial Sequence
  ENSG00000126970_25 (sequence is synthesized)
cacatacatacttacatacctacacacacacgggcaggtatacatacacaaagcctagcctgaaagtcagagtgcctagttttagtcccaggcctttcagtggcttactcactgtgtgat

SEQ ID NO: 269061 - DNA, 120 bp, Artificial Sequence
  ENSG00000126970_26 (sequence is synthesized)
cttgggcaagtctctgtgccagcttgttaaaacagaaggaggattattaaactggatgaattactagatgaattagaacaactactaggtggctttttaaattctttgtgtgatattgac

SEQ ID NO: 269062 - DNA, 120 bp, Artificial Sequence
  ENSG00000126970_27 (sequence is synthesized)
aatacaagactatgtctataactcttaagagatcatttcccaagtcagggtctagaaggcgatatctagaaacctctaaaaacaaaaaagactgagctttcctggtcttcaggaagtggc

SEQ ID NO: 269063 - DNA, 120 bp, Artificial Sequence
  ENSG00000126970_28 (sequence is synthesized)
ctgggacttacttcatctcctggctcagagttaagaactaggcttgccttgcagagagacagaatttgacctggtagaggaaatcatttcctaaaggtagagcaaggtgtctgtggagtt

SEQ ID NO: 269064 - DNA, 120 bp, Artificial Sequence
  ENSG00000126970_29 (sequence is synthesized)
tgtgagcttcctactcttagagatatgtcaccagaggccttaggacacttaataggaatactcaaaagagcatgagatagcagataggactgaataccctttaaggatcttgctagccct

SEQ ID NO: 269065 - DNA, 120 bp, Artificial Sequence
  ENSG00000126970_30 (sequence is synthesized)
aagatttcttggtcttcttggcctatcagagctaaggacaaagaggattacccttctcatcagacattgggcctagtacccagggacaatagccttgtgcttgggaaggtgtggggacct

SEQ ID NO: 269066 - DNA, 120 bp, Artificial Sequence
  ENSG00000126970_31 (sequence is synthesized)
gccaccttcaggcagcagcccccacctatgaaggtaagtgagctgggtaatggttgtggaggaagcaaagtatcctcccatggaagggccgtggaaggctagttctgggtctttggcttt

SEQ ID NO: 269067 - DNA, 120 bp, Artificial Sequence
  ENSG00000126970_32 (sequence is synthesized)
atttatgctgggccttcttttaatggcctttgcttgtgacacagtggaaggggtgacatgggtgtgctgtgttggacacacacagcacaggttttgttgccccatgttcccagaggtgtt

SEQ ID NO: 269068 - DNA, 120 bp, Artificial Sequence
  ENSG00000126970_33 (sequence is synthesized)
agaatgcagggagattttcaggccctgctagagtgcaattctaaaagttagaaatgactcttacacaaagatgtaatgagcatgtatcataaatgagggaaccagcaggattataaagct

SEQ ID NO: 269069 - DNA, 120 bp, Artificial Sequence
  ENSG00000126970_34 (sequence is synthesized)
ggttccaggagcatttggaacaaatatctatatagtcaagaaaggagaggaaggctgaaacaaatttgcaaagttagatgcaaaactggtttacatcccacaggacaataaaactgtaac

SEQ ID NO: 269070 - DNA, 120 bp, Artificial Sequence
  ENSG00000126970_35 (sequence is synthesized)
ttatcagtgtaacatcacagagcctgggtcctaatcaattggtaaatagtcaaacaaagagacattcttctagagcaggggtcatcaaattacagcctacaggtcaaatctaatctgttc

SEQ ID NO: 269071 - DNA, 120 bp, Artificial Sequence
  ENSG00000126970_36 (sequence is synthesized)
cctgttttcgttaaagttttattggcccacatgcatgtctgtgtttgcaagctattgcaaacaacatgcatgcaagctattgtctatcacttctttcatgcaaaacagaattgagtagtt

SEQ ID NO: 269072 - DNA, 120 bp, Artificial Sequence
  ENSG00000126970_37 (sequence is synthesized)
gcagcaagtttatatgatgtaaaaagtctaaagtatttgctgtcctggcctttacagaaaatgtttgttgacccctgttctagaaaattaaatagtccttaagtgggcctgttagacaat

SEQ ID NO: 269073 - DNA, 120 bp, Artificial Sequence
  ENSG00000126970_38 (sequence is synthesized)
gcttcattataatgacgaaaagatgtgtagttctcattttgccttactttctagttttgtatactttttctcaacaccattctctgaactgggttatgtccttccttcccatcttccatg

SEQ ID NO: 269074 - DNA, 120 bp, Artificial Sequence
  ENSG00000126970_39 (sequence is synthesized)
gcatccaagaatacttgagtctactcactgattattgctctcttctgatgggaaatcactttgctttctgggcccctggggaatcagaagtctaagttgttgcctggaagaatctgacta

SEQ ID NO: 269075 - DNA, 120 bp, Artificial Sequence
  ENSG00000127022_0 (sequence is synthesized)
agcggtggccgaggcctcttggttctgcggcacgtgacggtcgggccgcctccgcctctctctttactgcggcgcggggcaaggtgtgcgggcgggaaggggcacgggcacccccgcggt

SEQ ID NO: 269076 - DNA, 120 bp, Artificial Sequence
  ENSG00000127022_1 (sequence is synthesized)
ccccgggaggctagagatcatggaagggaagtggttgctgtgtatgttactggtgcttggaactgctattgttgaggctcatgatggacatgatgatgatgtgattgatattgaggatga

SEQ ID NO: 269077 - DNA, 120 bp, Artificial Sequence
  ENSG00000127022_2 (sequence is synthesized)
ccttgacgatgtcattgaagaggtagaagactcaaaaccagataccactgctcctccttcatctcccaaggttacttacaaagctccagttccaacaggggaagtatattttgctgattc

SEQ ID NO: 269078 - DNA, 120 bp, Artificial Sequence
  ENSG00000127022_3 (sequence is synthesized)
ttttgacagaggaactctgtcagggtggattttatccaaagccaagaaagacgataccgatgatgaaattgccaaatatgatggaaagtgggaggtagaggaaatgaaggagtcaaagct

SEQ ID NO: 269079 - DNA, 120 bp, Artificial Sequence
  ENSG00000127022_4 (sequence is synthesized)
tccaggtgataaaggacttgtgttgatgtctcgggccaagcatcatgccatctctgctaaactgaacaagcccttcctgtttgacaccaagcctctcattgttcagtatgaggttaattt

SEQ ID NO: 269080 - DNA, 120 bp, Artificial Sequence
  ENSG00000127022_5 (sequence is synthesized)
ccaaaatggaatagaatgtggtggtgcctatgtgaaactgctttctaaaacaccagaactcaacctggatcagttccatgacaagaccccttatacgattatgtttggtccagataaatg

SEQ ID NO: 269081 - DNA, 120 bp, Artificial Sequence
  ENSG00000127022_6 (sequence is synthesized)
tggagaggactataaactgcacttcatcttccgacacaaaaaccccaaaacgggtatctatgaagaaaaacatgctaagaggccagatgcagatctgaagacctattttactgataagaa

SEQ ID NO: 269082 - DNA, 120 bp, Artificial Sequence
  ENSG00000127022_7 (sequence is synthesized)
aacacatctttacacactaatcttgaatccagataatagttttgaaatactggttgaccaatctgtggtgaatagtggaaatctgctcaatgacatgactcctcctgtaaatccttcacg

SEQ ID NO: 269083 - DNA, 120 bp, Artificial Sequence
  ENSG00000127022_8 (sequence is synthesized)
tgaaattgaggacccagaagaccggaagcccgaggattgggatgaaagaccaaaaatcccagatccagaagctgtcaagccagatgactgggatgaagatgcccctgctaagattccaga

SEQ ID NO: 269084 - DNA, 120 bp, Artificial Sequence
  ENSG00000127022_9 (sequence is synthesized)
tgaagaggccacaaaacccgaaggctggttagatgatgagcctgagtacgtacctgatccagacgcagagaaacctgaggattgggatgaagacatggatggagaatgggaggctcctca

SEQ ID NO: 269085 - DNA, 120 bp, Artificial Sequence
  ENSG00000127022_10 (sequence is synthesized)
gattgccaaccctagatgtgagtcagctcctggatgtggtgtctggcagcgacctgtgattgacaaccccaattataaaggcaaatggaagcctcctatgattgacaatcccagttacca

SEQ ID NO: 269086 - DNA, 120 bp, Artificial Sequence
  ENSG00000127022_11 (sequence is synthesized)
gggaatctggaaacccaggaaaataccaaatccagatttctttgaagatctggaacctttcagaatgactccttttagtgctattggtttggagctgtggtccatgacctctgacatttt

SEQ ID NO: 269087 - DNA, 120 bp, Artificial Sequence
  ENSG00000127022_12 (sequence is synthesized)
ttttgacaactttatcatttgtgctgatcgaagaatagttgatgattgggccaatgatggatggggcctgaagaaagctgctgatggggctgctgagccaggcgttgtggggcagatgat

SEQ ID NO: 269088 - DNA, 120 bp, Artificial Sequence
  ENSG00000127022_13 (sequence is synthesized)
cgaggcagctgaagagcgcccgtggctgtgggtagtctatattctaactgtagcccttcctgtgttcctggttatcctcttctgctgttctggaaagaaacagaccagtggtatggagta

SEQ ID NO: 269089 - DNA, 120 bp, Artificial Sequence
  ENSG00000127022_14 (sequence is synthesized)
taagaaaactgatgcacctcaaccggatgtgaaggaagaggaagaagagaaggaagaggaaaaggacaagggagatgaggaggaggaaggagaagagaaacttgaagagaaacagaaaag

SEQ ID NO: 269090 - DNA, 120 bp, Artificial Sequence
  ENSG00000127022_15 (sequence is synthesized)
tgatgctgaagaagatggtggcactgtcagtcaagaggaggaagacagaaaacctaaagcagaggaggatgaaattttgaacagatcaccaagaaacagaaagccacgaagagagtgaaa

SEQ ID NO: 269091 - DNA, 120 bp, Artificial Sequence
  ENSG00000127022_16 (sequence is synthesized)
caatcttaagagcttgatctgtgatttcttctccctcctcccctgcaagagtggtcctaggagaggacctggcacaccttaggttgacattcagaaaacttcaagacatcaccatcagca

SEQ ID NO: 269092 - DNA, 120 bp, Artificial Sequence
  ENSG00000127022_17 (sequence is synthesized)
ggctccagttgaacactagtctgtgtaactttaaacatctagcagtaaatacttgcagttgtgatataaaggaccctgtttctgtagaaaagaaaacatttaacataatggttgtgaaat

SEQ ID NO: 269093 - DNA, 120 bp, Artificial Sequence
  ENSG00000127022_18 (sequence is synthesized)
gtaacatgaagcaaactaacttttttttttttaacatctttgtttttaaaatagaatgatagaactttgccagtctttaagatcttggcttaatttaatgtattaatctgtttgtgcaaa

SEQ ID NO: 269094 - DNA, 120 bp, Artificial Sequence
  ENSG00000127022_19 (sequence is synthesized)
cataataccaccatttaaaaatgttagggagatgagttgcagtttttataatagattttttttaaagtttggtattgtaaaacattcacacctctgtccctcaaaattgataattacgtt

SEQ ID NO: 269095 - DNA, 120 bp, Artificial Sequence
  ENSG00000127022_20 (sequence is synthesized)
gtttaagttgtattaaaaatagatatataagaaaaaattctttcacttgatgtttgttagaccagaaagtgtgtgtgttctgtagctcagttcccagacagctttttaggtagtggagga

SEQ ID NO: 269096 - DNA, 120 bp, Artificial Sequence
  ENSG00000127022_21 (sequence is synthesized)
ggtggcttcatgtggcacttgggcatttatattccacttgggagggtcaggctgtggccttctggagcaggtggcttgttaaggaatgctagcagggcatggcacgtgagctccggaata

SEQ ID NO: 269097 - DNA, 120 bp, Artificial Sequence
  ENSG00000127022_22 (sequence is synthesized)
gatgtcttcatcacttcttccactgtgtgttgacactgttttccttacctatttcctcagatccccagctttctcctctgctatgcattttcttcacagtgcagcttgcagtccgttgct

SEQ ID NO: 269098 - DNA, 120 bp, Artificial Sequence
  ENSG00000127022_23 (sequence is synthesized)
gaaaatgattataagccctgcataatgttaagctttattgtgattacgtgtatgtttcttctttcttttaagcagacccatacctttccagggtcaaagtacagaatagaatacattgat

SEQ ID NO: 269099 - DNA, 120 bp, Artificial Sequence
  ENSG00000127022_24 (sequence is synthesized)
acaaagtacagaaaaatactttgatttttatccatttcttttactctgtgtaaagacttgagaagtctaattcacaggcaaaccaatacagaattgactgcagttgaacagactagaagt

SEQ ID NO: 269100 - DNA, 120 bp, Artificial Sequence
  ENSG00000127022_25 (sequence is synthesized)
atttgtgggaggagtgacatgaagcatgagttatctgattttttttgtagctgctatatattttaagccttcatttgcaattcatgtaacagttgtgtcataaattacacaataaagcag

SEQ ID NO: 269101 - DNA, 120 bp, Artificial Sequence
  ENSG00000127022_26 (sequence is synthesized)
tcctgttcaaatttttttttaacgtggcttgtagaatttttaaaaaagtgatcttaggtttgttttttcatgcgggatgcagatgggtgctatcagagcctctcccacaccactatagtg

SEQ ID NO: 269102 - DNA, 120 bp, Artificial Sequence
  ENSG00000127022_27 (sequence is synthesized)
taataatgttattattactctacactgaaacgtattcagagttagatattattttagcttcagttgttctttagaggctttcaaatgtaccgatgatactgtttcttgcactgaatatat

SEQ ID NO: 269103 - DNA, 120 bp, Artificial Sequence
  ENSG00000127022_28 (sequence is synthesized)
aaacactccacagtgtttatattgggaagatattgggaaggaaatatatttgtaaaagatgaaggctgtatctatttttttttctttttaaagtttgttcacttaaattcttttgaggat

SEQ ID NO: 269104 - DNA, 120 bp, Artificial Sequence
  ENSG00000127022_29 (sequence is synthesized)
gggatgtatttttcttgctgttcagtgctttttccttttcatctgttgttctgtggtcacagtgaccttagctacatagcagactttcccaaatgtattgattacaaataaacagttgtt

SEQ ID NO: 269105 - DNA, 120 bp, Artificial Sequence
  ENSG00000127022_30 (sequence is synthesized)
acttagcaagacctgaaaatatgtctgcaggtttctccttgaagcaaatgtgtgggatcattgcatttccagaaatctgcctccttcaccctccgttgacagtatatgtcatgcctcact

SEQ ID NO: 269106 - DNA, 120 bp, Artificial Sequence
  ENSG00000127022_31 (sequence is synthesized)
ttcttctagctgagctttaaatcattagagcttaaattgtcagatcgttcattgcctttccagggttatttagtaaagtttgttgaaaacaaaaacgccttttcttggttcttttttcag

SEQ ID NO: 269107 - DNA, 120 bp, Artificial Sequence
  ENSG00000127022_32 (sequence is synthesized)
ttattttgaaggtccagcatcctgattaaatgtctgacacattaatgaatgaccagcagcagctttcagctcttaaaaagacacttatattttgattttacatgctggttacctgttcca

SEQ ID NO: 269108 - DNA, 120 bp, Artificial Sequence
  ENSG00000127022_33 (sequence is synthesized)
ttgttgtcaaatgcccactctccatcagatgtgttcctccattttcttatccacaaagtactcctcacttttcaatttgtcatgttactaaatggtgttacattaaagccctgtgttaag

SEQ ID NO: 269109 - DNA, 120 bp, Artificial Sequence
  ENSG00000127022_34 (sequence is synthesized)
tgtctgcttttgactgaatttcttcatagtaaccttcagtgtgtgtgtgtgactatgttcaattagtgggttgatcttcgtataattggccactatgtgagagttcactactaggcagaa

SEQ ID NO: 269110 - DNA, 120 bp, Artificial Sequence
  ENSG00000127022_35 (sequence is synthesized)
actattatggacagtgaaataatgacttttatctcaccacgtgagtttgatgcagtcttttctgtctagcccttgcctcttcctgcccatgtgattgcggtgcagtagtttctgttgtat

SEQ ID NO: 269111 - DNA, 120 bp, Artificial Sequence
  ENSG00000127022_36 (sequence is synthesized)
aatagtgtggacagcagctcagaaaaggagggaatgctactgataatttgtagataatattctttaagacttaggggaaccattgaactttgaaatttttattagaaaattatttgttca

SEQ ID NO: 269112 - DNA, 120 bp, Artificial Sequence
  ENSG00000127022_37 (sequence is synthesized)
gaatcagactccattattttacatatacttaaatactttaggggtatttttgaaagttagcccagttttttatgtgctattaaatttttagattacatactaaagaaaagtatgtacaca

SEQ ID NO: 269113 - DNA, 120 bp, Artificial Sequence
  ENSG00000127022_38 (sequence is synthesized)
gaatgtagtgctcctagttactattttttctattaagaaatagtttagttctggtgtaaaatttgtttgaatgctaaaaaaaaaaaagcaggactgcattatggcacttttgccttggtg

SEQ ID NO: 269114 - DNA, 120 bp, Artificial Sequence
  ENSG00000127022_39 (sequence is synthesized)
gcccactttctccatttaaaacattaggatttgtatttttctgctgcgtttgtatgaagacatatttgattgttgttttctcttgattttaaaataaaacctcatgagccctagtaaaaa

SEQ ID NO: 269115 - DNA, 120 bp, Artificial Sequence
  ENSG00000127022_40 (sequence is synthesized)
aggggccaggggcgggcacagggccgggcttcgtgcggtggggctcgctcgcgcggcagcggtggccgaggcctcttggttctgcggcacgtgacggtcgggccgcctccgcctctctct

SEQ ID NO: 269116 - DNA, 120 bp, Artificial Sequence
  ENSG00000127022_41 (sequence is synthesized)
agtgcacgccaatccggccaggcgctcgcgctgggttctgctcacgcccgtaggggcccgcgttcgctgcaacgggcccttcctgatggccgatcgtcggactcctaccccttttgccgg

SEQ ID NO: 269117 - DNA, 120 bp, Artificial Sequence
  ENSG00000127022_42 (sequence is synthesized)
ctagagatctgtggtcctccgtggaaagagagccactaccccaagacacatctaatataatacacagggcgcttacgtggttagaaaagaagagataagccgggtgcggtggctcactcc

SEQ ID NO: 269118 - DNA, 120 bp, Artificial Sequence
  ENSG00000127022_43 (sequence is synthesized)
gggcatgacacaagtgattgctggttgagggaagttaaactgagcttaatattaaaagattgagaggacaagattaaccatagttaagtctttttacctctgatttaggaaatggaagat

SEQ ID NO: 269119 - DNA, 120 bp, Artificial Sequence
  ENSG00000127022_44 (sequence is synthesized)
tttgcttaattttttaataagtagatttttttaagggggaagaattttattgatctttaaaatcattctgtatctcagtcttttcccaacattgtttgagggtcatgaatagaagcaact

SEQ ID NO: 269120 - DNA, 120 bp, Artificial Sequence
  ENSG00000127022_45 (sequence is synthesized)
cccttgtagctgggactacagatcatggaagggaagtggttgctgtgtatgttactggtgcttggaactgctattgttgaggctcatgatggacatgatgatgatgtgattgatattgag

SEQ ID NO: 269121 - DNA, 120 bp, Artificial Sequence
  ENSG00000127022_46 (sequence is synthesized)
gctggcgcctgcgcgcttgcgcatcttcctctgcccggcgcgcgccgcagccgtcgggatcacctcggggttgcgctgcttctccagcaagtgcatgcgcgccatggtctcagtcagcat

SEQ ID NO: 269122 - DNA, 120 bp, Artificial Sequence
  ENSG00000127022_47 (sequence is synthesized)
cacagcaaccgacgcgggaacgcctgttaaaccagccccgccccgagacgcgcgcgcccggcggtctcgatccagcgtggcccgcccctcacctcccgcccaaccaacagccacttcctg

SEQ ID NO: 269123 - DNA, 120 bp, Artificial Sequence
  ENSG00000127022_48 (sequence is synthesized)
attataaggagagcaagaggatggaggctttctctaatttcttttttacattttatgagcattttctctgaaaaagaaggtcctgcgtagtgccatgccataactgaactgcagaaaaac

SEQ ID NO: 269124 - DNA, 120 bp, Artificial Sequence
  ENSG00000127022_49 (sequence is synthesized)
ctctttactgcggcgcggggcaaggtgtgcgggcgggaaggggcacgggcacccccgcggtccccgggaggctagaggttacttacaaagctccagttccaacaggggaagtatattttg

SEQ ID NO: 269125 - DNA, 120 bp, Artificial Sequence
  ENSG00000127022_50 (sequence is synthesized)
ttgttcttaccccaaagcctcagtcttgaatccagataatagttttgaaatactggttgaccaatctgtggtgaatagtggaaatctgctcaatgacatgactcctcctgtaaatccttc

SEQ ID NO: 269126 - DNA, 120 bp, Artificial Sequence
  ENSG00000127022_51 (sequence is synthesized)
cttggttctgcggcacgtgacggtcgggccgcctccgcctctctctttactgcggcgcggggcaaggtgtgcgggcgggaaggggcacgggcacccccgcggtccccgggaggctagagg

SEQ ID NO: 269127 - DNA, 120 bp, Artificial Sequence
  ENSG00000127022_52 (sequence is synthesized)
aaatttactgatgattgctggttattcctttttactaaacaaacttgtagttagcttttcctttaactgtcactaatatatttggaattttataagaggaattatcatacacttttgaaa

SEQ ID NO: 269128 - DNA, 120 bp, Artificial Sequence
  ENSG00000127054_0 (sequence is synthesized)
ccggaagttgcagcgaggtggttgcgcctgcgcagtgcatcaccgcaggcgggcctcgcgggtccgggagcgcggcggagacgatgcctgagatcagagtcacgcccttgggggccggcc

SEQ ID NO: 269129 - DNA, 120 bp, Artificial Sequence
  ENSG00000127054_1 (sequence is synthesized)
aggacgtgggccgaagctgcatcctggtctccattgcgggcaagaatgtcatgctggactgtggaatgcacatgggcttcaatgacgaccgacgcttccctgacttctcctacatcaccc

SEQ ID NO: 269130 - DNA, 120 bp, Artificial Sequence
  ENSG00000127054_2 (sequence is synthesized)
agaacggccgcctaacagacttcctggactgtgtgatcattagccacttccacctggaccactgcggggcactcccctacttcagcgagatggtgggctacgacgggcccatctacatga

SEQ ID NO: 269131 - DNA, 120 bp, Artificial Sequence
  ENSG00000127054_3 (sequence is synthesized)
ctcaccccacccaggccatctgccccatcttgctggaggactaccgcaagatcgccgtagacaagaagggcgaggccaacttcttcacctcccagatgatcaaagactgcatgaagaagg

SEQ ID NO: 269132 - DNA, 120 bp, Artificial Sequence
  ENSG00000127054_4 (sequence is synthesized)
tggtggctgtccacctccaccagacggtccaggtagatgatgagctggagatcaaggcctactatgcaggccacgtgctgggggcagccatgttccagattaaagtgggctcagagtctg

SEQ ID NO: 269133 - DNA, 120 bp, Artificial Sequence
  ENSG00000127054_5 (sequence is synthesized)
tggtctacacgggtgattataacatgaccccagaccgacacttaggagctgcctggattgacaagtgccgccccaacctgctcatcacagagtccacgtacgccacgaccatccgtgact

SEQ ID NO: 269134 - DNA, 120 bp, Artificial Sequence
  ENSG00000127054_6 (sequence is synthesized)
ccaagcgctgccgggagcgagacttcctgaagaaagtccacgagaccgtggagcgtggtgggaaggtgctgatacctgtgttcgcgctgggccgcgcccaggagctctgcatcctcctgg

SEQ ID NO: 269135 - DNA, 120 bp, Artificial Sequence
  ENSG00000127054_7 (sequence is synthesized)
agaccttctgggagcgcatgaacctgaaggtgcccatctacttctccacggggctgaccgagaaggccaaccactactacaagctgttcatcccctggaccaaccagaagatccgcaaga

SEQ ID NO: 269136 - DNA, 120 bp, Artificial Sequence
  ENSG00000127054_8 (sequence is synthesized)
acgctgggcagtccctgcagatcttccggaaatgggccggaaacgaaaagaacatggtcatcatgcccggctactgcgtgcagggcaccgtcggccacaagatcctcagcgggcagcgga

SEQ ID NO: 269137 - DNA, 120 bp, Artificial Sequence
  ENSG00000127054_9 (sequence is synthesized)
agctcgagatggaggggcggcaggtgctggaggtcaagatgcaggtggagtacatgtcattcagcgcacacgcggacgccaagggcatcatgcagctggtgggccaggcagagccggaga

SEQ ID NO: 269138 - DNA, 120 bp, Artificial Sequence
  ENSG00000127054_10 (sequence is synthesized)
gcgtgctgctggtgcatggcgaggccaagaagatggagttcctgaagcagaagatcgagcaggagctccgggtcaactgctacatgccggccaatggcgagacggtgacgctgcccacaa

SEQ ID NO: 269139 - DNA, 120 bp, Artificial Sequence
  ENSG00000127054_11 (sequence is synthesized)
gccccagcatccccgtaggcatctcgctggggctgctgaagcgggagatggcgcaggggctgctccctgaggccaagaagcctcggctcctgcacggcaccctgatcatgaaggacagca

SEQ ID NO: 269140 - DNA, 120 bp, Artificial Sequence
  ENSG00000127054_12 (sequence is synthesized)
acttccggctggtgtcctcagagcaagccctcaaagagctgggtctggctgagcaccagctgcgcttcacctgccgcgtgcacctgcatgacacacgcaaggagcaggagacggcattgc

SEQ ID NO: 269141 - DNA, 120 bp, Artificial Sequence
  ENSG00000127054_13 (sequence is synthesized)
gcgtctacagccacctcaagagcgtcctgaaggaccactgtgtgcagcacctcccagacggctctgtgactgtggagtccgtcctcctccaggccgccgccccttctgaggacccaggca

SEQ ID NO: 269142 - DNA, 120 bp, Artificial Sequence
  ENSG00000127054_14 (sequence is synthesized)
ccaaggtgctgctggtctcctggacctaccaggacgaggagctggggagcttcctcacatctctgctgaagaagggcctcccccaggcccccagctgaggccggcaactcacccagccgc

SEQ ID NO: 269143 - DNA, 120 bp, Artificial Sequence
  ENSG00000127054_15 (sequence is synthesized)
cacctctgccctctcccagctggacagaccctgggcctgcacttcaggactgtgggtgccctgggtgaacagaccctgcaggtcccatccctggggacagaggccttgtgtcacctgcct

SEQ ID NO: 269144 - DNA, 120 bp, Artificial Sequence
  ENSG00000127054_16 (sequence is synthesized)
gcccaggcagctgtttgcagctgaagaaacaaactggtctccaggctgtcttgcctttattcctggttagggcaggtggtcctagacagcagtttccagtaaaagctgaacaaaagacta

SEQ ID NO: 269145 - DNA, 120 bp, Artificial Sequence
  ENSG00000127054_17 (sequence is synthesized)
acagctggcacagtcactgcccacccccacaccaaccatgccctccgcccgttctacacagtttctggaaggctggggcctcagggtgagcccaccccacctcactcttgcgtccagcac

SEQ ID NO: 269146 - DNA, 120 bp, Artificial Sequence
  ENSG00000127054_18 (sequence is synthesized)
cgtggggacaccaggaggcgtcagcgcgaggatgcgggtcccagaccagactgggcgccgacccgggagagcacgtgcagggtgggggtatgcaccggcttatgaacccaccaggctctg

SEQ ID NO: 269147 - DNA, 120 bp, Artificial Sequence
  ENSG00000127054_19 (sequence is synthesized)
tccgagcggcattgaaatggccagagtgggacaggctggtgccctcagagcgcttggagcggccagagactcgctggagctcccggggtgttgccgggcagggaggcaggggctggaggg

SEQ ID NO: 269148 - DNA, 120 bp, Artificial Sequence
  ENSG00000127054_20 (sequence is synthesized)
gagatgggccagctctggagggtgcctggttctgggtgtgggtcagggaagaagtgaaggttaaatcagcgagtgacaggtgaaattccatttctgacaaagattatgggtttgtctgtg

SEQ ID NO: 269149 - DNA, 120 bp, Artificial Sequence
  ENSG00000127054_21 (sequence is synthesized)
tctcactcgaatctctgggtattgcttttatatttcttgaaactatattaggtacctatgtattttggaacatttaattttctgattgaacttgtcaaaatgaagtatgtttatcttttt

SEQ ID NO: 269150 - DNA, 120 bp, Artificial Sequence
  ENSG00000127054_22 (sequence is synthesized)
tgatcattagactttgagactgaaagttccagggagacagttttgtgtttgctcattactgactcttcggtactcgggatgaggcctggcgcacagcaggcgaatgaaggggccagtgac

SEQ ID NO: 269151 - DNA, 120 bp, Artificial Sequence
  ENSG00000127054_23 (sequence is synthesized)
ctttttgtcccgtgggcccccctggagctcaggacccttgcaggtgtcagggtgccagcccttgagtggccagcctggcagtgtctcccatgtcctgtgcggcctggagagcccccttcg

SEQ ID NO: 269152 - DNA, 120 bp, Artificial Sequence
  ENSG00000127054_24 (sequence is synthesized)
ttctgggcccaaatgcgcgaaggcacagggtccaggcaggggcctctgtccctccttctctctcttcccaagtctctgggtgggtgcctctgtctcgctcttccgaagtgtctgggtggg

SEQ ID NO: 269153 - DNA, 120 bp, Artificial Sequence
  ENSG00000127054_25 (sequence is synthesized)
gcctgcgcagtgcatcaccgcaggcgggcctcgcgggtccgggagcgcggcggagacgatgcctgagatcagagtcacgcccttgggtgcctgccctgtgctgtcctggaacctggtcct

SEQ ID NO: 269154 - DNA, 120 bp, Artificial Sequence
  ENSG00000127054_26 (sequence is synthesized)
gagccggccatccacagctggaccctgggcctcagagccgggacagtggggtggtgggcagcagtggttgtgcttggatggctgcaccctgtggggagcagggatgggtgggcctggccg

SEQ ID NO: 269155 - DNA, 120 bp, Artificial Sequence
  ENSG00000127054_27 (sequence is synthesized)
aggtgagcccctgcatggtggggtccccctgtgctggcgctgagccccagccccggggtcctgtaggctggactccgtgagaccctgggctcagcttccagctcacatctgtcagtgagg

SEQ ID NO: 269156 - DNA, 120 bp, Artificial Sequence
  ENSG00000127054_28 (sequence is synthesized)
ttgggggtaacctcggcccctccggatgctgtgagcagccaggggtcctggtgccacctgcgggatgggagtgcccagcctgagtctgcacatagaaccccccttcctgggggcccctcc

SEQ ID NO: 269157 - DNA, 120 bp, Artificial Sequence
  ENSG00000127054_29 (sequence is synthesized)
gcagggggtcgagggcaccttccagcacagacaccaggacgggattccatgtcctcccccatggcgtgagcgcttcctcggagggtgccccccgccccggtgtggacactgtgctgtgaa

SEQ ID NO: 269158 - DNA, 120 bp, Artificial Sequence
  ENSG00000127054_30 (sequence is synthesized)
tggcctcttggctgcctgttctgcccactctctggacatctgatctttctgatctttcatgtggcttcaattacccgcaatctgtacctgggtatattctcaaggtcacctcagccaagg

SEQ ID NO: 269159 - DNA, 120 bp, Artificial Sequence
  ENSG00000127054_31 (sequence is synthesized)
tatcatcaaagccgaagtcctgtttcaccgcttccctgcaccagggactgcctcgggctccgtgtccgcgctcactggaccactgctgtgtccttggggtcactcccacgccttggcctg

SEQ ID NO: 269160 - DNA, 120 bp, Artificial Sequence
  ENSG00000127054_32 (sequence is synthesized)
ggcagggcagggcagggtgctcggggcaggcggctgggagcggccctcacattgatggctcctgccacctcctccgcagggctgctccctgaggccaagaagcctcggctcctgcacggc

SEQ ID NO: 269161 - DNA, 120 bp, Artificial Sequence
  ENSG00000127054_33 (sequence is synthesized)
cgtggtactggggtccagcttgtcacacccagccctgcaaccgtggggacagtgcatcgtggctcacacccccacccccgtgttccagagctgcctggattgacaagtgccgccccaacc

SEQ ID NO: 269162 - DNA, 120 bp, Artificial Sequence
  ENSG00000127054_34 (sequence is synthesized)
gggtggggacatgggccctcggccatgctgggctggtctttctggcaggcttggctgcccttggcatgggtcagggtctcagggtggggggtactgcattttcaggcagggagggaagaa

SEQ ID NO: 269163 - DNA, 120 bp, Artificial Sequence
  ENSG00000127054_35 (sequence is synthesized)
gatttgctcaacattgaggaggaaaactcagagaccctttcctagggagccccttttccctcctacctcaggtgcggacgaagccctggccaggctccttctgtctctcatgcagctccc

SEQ ID NO: 269164 - DNA, 120 bp, Artificial Sequence
  ENSG00000127054_36 (sequence is synthesized)
ttctgtctctcatgcggctccctcctgtctctcatacggctcccttctgtctctggagagcggctgggacgggactgggagcagatgagaggctaaggtccctatgaggccgcagctctt

SEQ ID NO: 269165 - DNA, 120 bp, Artificial Sequence
  ENSG00000127054_37 (sequence is synthesized)
gggcacctggccgtgccctcactggacgctgcctgctgtgtcgaggggccatgtgcccagggctcctgccttgtgtccccctcaggtgctgatacctgtgttcgcgctgggccgcgccca

SEQ ID NO: 269166 - DNA, 120 bp, Artificial Sequence
  ENSG00000127054_38 (sequence is synthesized)
gcatcttggccctgcttgctgctgtcctggggggccgctcgtgtgctgtgtgaccccaggaagcctgtgacatcccgtcagcgccaccgtgtgcggctcttgtaggggttcctggttctc

SEQ ID NO: 269167 - DNA, 120 bp, Artificial Sequence
  ENSG00000127054_39 (sequence is synthesized)
cgctgagcccggctgctgcagggcttaatgggacaagtggtcgcgactggactcaacctggcccgtgcgtgggctgtgcagacacgggtgttgggggtgacccggccgagtcctgccctg

SEQ ID NO: 269168 - DNA, 120 bp, Artificial Sequence
  ENSG00000127054_40 (sequence is synthesized)
catggtgagggcatggtgaggtgtgggaatctggaagctggaggccgacgggttgtccttccacccatgctgtctctgagctctcactggcttggcctcgtgctggccaagggacgtggc

SEQ ID NO: 269169 - DNA, 120 bp, Artificial Sequence
  ENSG00000127054_41 (sequence is synthesized)
tgctgctgctggggaacgggggcgatgtccgcctggagctgctcagtctctgtgacacagcttgtccacctcgggcagaacagccccagcccagccctggacagtcttgtgccaaaacct

SEQ ID NO: 269170 - DNA, 120 bp, Artificial Sequence
  ENSG00000127054_42 (sequence is synthesized)
gagccctttggagtctgcagctaggcttggtcgggcgccgctggcaggtggaaacagcttccaggggttcaggcgggggcatcccgggcaaggccttgaggtgccaaggctggagttccc

SEQ ID NO: 269171 - DNA, 120 bp, Artificial Sequence
  ENSG00000127054_43 (sequence is synthesized)
gaagatggagttcctgaagcagaagatcgagcaggagctccgtaggcagccgggcgggcggcgtggggcccacctcgggtcagcacgggcagcctgggctgaggctctctcttcccccgg

SEQ ID NO: 269172 - DNA, 120 bp, Artificial Sequence
  ENSG00000127054_44 (sequence is synthesized)
gttgcgcctgcgcagtgcatcaccgcaggcgggcctcgcgggtccgggagcgcggcggagacgatgcctgagatcagagtcacgcccttgggcagcccctcggctgtggccccgtcatcc

SEQ ID NO: 269173 - DNA, 120 bp, Artificial Sequence
  ENSG00000127054_45 (sequence is synthesized)
cttccctgacttctcctacatcacccagaacggccgcctaacagacttcctggactgtgtgatcattaggtgggttcctgttgggggccttgagggtcccatgtctgtgcctgtggggct

SEQ ID NO: 269174 - DNA, 120 bp, Artificial Sequence
  ENSG00000127054_46 (sequence is synthesized)
tgggccaccttgcttggtctcggcagcgtttggcaaggggcctgtgccatccttgatcctcagggggcttctaggccccaggatctgctccctgcctgccttactggtcacacacatggc

SEQ ID NO: 269175 - DNA, 120 bp, Artificial Sequence
  ENSG00000127054_47 (sequence is synthesized)
ctggtctctgtctgttcttccggccctgccctctgaaccctactttctgaacccggccctccaggcttcaccctctctgatgccttcactgtctcaggatctttaaaccccactgtcttg

SEQ ID NO: 269176 - DNA, 120 bp, Artificial Sequence
  ENSG00000127054_48 (sequence is synthesized)
ttggcgattccagagtcccgagtctgccctgaccccagcctttagggttcagcagctcatgacccgctggtctgggtggcctcgtctggacggccacagcactcctgctggccccctgcc

SEQ ID NO: 269177 - DNA, 120 bp, Artificial Sequence
  ENSG00000127054_49 (sequence is synthesized)
cttccctgccctgtcctccccagcagccaggcccgtgaagcctggagaagccccttctcctctccggaggcagtgtcctcagctgcccctgagcccctcgtggttgtggtttcttctcag

SEQ ID NO: 269178 - DNA, 120 bp, Artificial Sequence
  ENSG00000127054_50 (sequence is synthesized)
gggcttgccaggcgctgcccttgccctcaggtctgtgccaccttcacctgcagctccactcagcctgtcctgactgcctgaaaagccagcggctcccctatgcgcggttccctcagcagc

SEQ ID NO: 269179 - DNA, 90 bp, Artificial Sequence
  ENSG00000127054_51 (sequence is synthesized)
tgatccacccgccttggtctcccaggcctggccaaaattttgtttttaaattagcctggcgtggtgggtgcgtgcctatagtcccagcta

SEQ ID NO: 269180 - DNA, 120 bp, Artificial Sequence
  ENSG00000127054_52 (sequence is synthesized)
ttagcctggcgtggtgggtgcgtgcctatagtcccagctatttgggaggcggaggtggaggcgggaggacgcttgagcccaggagtttgagtgagccatgattgcgccactgcagcctgg

SEQ ID NO: 269181 - DNA, 77 bp, Artificial Sequence
  ENSG00000127054_53 (sequence is synthesized)
aggagtttgagtgagccatgattgcgccactgcagcctgggtgacagccccaccctgtctctcaattttatttattt

SEQ ID NO: 269182 - DNA, 72 bp, Artificial Sequence
  ENSG00000127054_54 (sequence is synthesized)
acccggcaagttttaaatgaataaattaaatttaaaagaagtctagttttttgccaatttttgtttttgaca

SEQ ID NO: 269183 - DNA, 71 bp, Artificial Sequence
  ENSG00000127054_55 (sequence is synthesized)
ggccaggatggtcttgaactcctgacttcagatgatctgcccaccttggtctccccaagtgctgggattaa

SEQ ID NO: 269184 - DNA, 90 bp, Artificial Sequence
  ENSG00000127054_56 (sequence is synthesized)
ggtctcccctgcccagcccagtatttttttgtttgtttttaccgagatggagtcccgccccattgcccaggctagagtgcagtggcgtga

SEQ ID NO: 269185 - DNA, 78 bp, Artificial Sequence
  ENSG00000127054_57 (sequence is synthesized)
ttgggattacaggtagatgatgagctggagatcaaggcctactatgcaggccacgtgctgggggcagccatgttccag

SEQ ID NO: 269186 - DNA, 120 bp, Artificial Sequence
  ENSG00000127054_58 (sequence is synthesized)
gcagtgcatcaccgcaggcgggcctcgcgggtccgggagcgcggcggagacgatgcctgagatcagagtcacgcccttggccacttccacctggaccactgcggggcactcccctacttc

SEQ ID NO: 269187 - DNA, 120 bp, Artificial Sequence
  ENSG00000127074_0 (sequence is synthesized)
tcatactgaggccagagtgccatcgaaggtaattatagagacagtaaaatccttttactctgggaaaaataaaatgctgggtgtctcacaaaatttcagaacctgatttcaaacggatca

SEQ ID NO: 269188 - DNA, 120 bp, Artificial Sequence
  ENSG00000127074_1 (sequence is synthesized)
taacaaagaggagatcaaatttagcatggtggactgctcgacaggatatatttgtcaatggaatgtttccacatattataccaccaacatgagaaaaaaatgatcattgtttatttgaag

SEQ ID NO: 269189 - DNA, 120 bp, Artificial Sequence
  ENSG00000127074_2 (sequence is synthesized)
cttgatgatattctaacgctgccttttctcttctcattttagagaaaaatgagcaggcggaattgttggatttgtaagatgtgcagagatgaatctaagaggcccccttcaaaccttact

SEQ ID NO: 269190 - DNA, 120 bp, Artificial Sequence
  ENSG00000127074_3 (sequence is synthesized)
ttggaggaagtattacagtgggcccagtcttttgaaaatttaatggctacaaaatatggtccagtagtctatgcagcatatttaaaaatggagcacagtgacgagaatattcaattctgg

SEQ ID NO: 269191 - DNA, 120 bp, Artificial Sequence
  ENSG00000127074_4 (sequence is synthesized)
atggcatgtgaaacctataagaaaattgcctcacggtggagcagaatttctagggcaaagaagctttataagatttacatccagccacagtcccctagagagattaacattgacagttcg

SEQ ID NO: 269192 - DNA, 120 bp, Artificial Sequence
  ENSG00000127074_5 (sequence is synthesized)
acaagagagactatcatcaggaacattcaggaacccactgaaacatgttttgaagaagctcagaaaatagtctatatgcatatggaaagggattcctaccccagatttctaaagtcagaa

SEQ ID NO: 269193 - DNA, 120 bp, Artificial Sequence
  ENSG00000127074_6 (sequence is synthesized)
aaatagaaaacagtatattgaaagtggtgggtttgatctttttatttagaaacccacaaaatcagaaacacagtacaaataaaacagaaatcaaactataagttgacttttagttcctaa

SEQ ID NO: 269194 - DNA, 120 bp, Artificial Sequence
  ENSG00000127074_7 (sequence is synthesized)
aaagaaacatatttcaaaagcaatggaatctagaattcttataacatgaataacaaaatgtacagcaagcctatgtagttcaattaatatataaggaaaaggaaggtctttcttcatgat

SEQ ID NO: 269195 - DNA, 120 bp, Artificial Sequence
  ENSG00000127074_8 (sequence is synthesized)
acaagcattataaagtttttactgtagtagtcaattaatggatatttccttgttaataaaattttgtgtcataatttacaaattagttctttaaaaattgttgttatatgaattgtgttt

SEQ ID NO: 269196 - DNA, 120 bp, Artificial Sequence
  ENSG00000127074_9 (sequence is synthesized)
ctagcatgaatgttctatagagtactctaaataacttgaatttatagacaaatgctactcacagtacaatcaattgtattataccatgagaaaatcaaaaaggtgttcttcagagacatt

SEQ ID NO: 269197 - DNA, 120 bp, Artificial Sequence
  ENSG00000127074_10 (sequence is synthesized)
ctataaaattttcctactattatgttcattaacaaacttctttatcacatgtatcttctacatgtaaaacatttctgatgattttttaacaaaaaatatatgaatttcttcatttgctct

SEQ ID NO: 269198 - DNA, 120 bp, Artificial Sequence
  ENSG00000127074_11 (sequence is synthesized)
ctcttgcatctacattgctataaggatataaaatgtggtttctatattttgagatgttttttccttacaatgtgaactcatcgtgatcttggaaatcaataaagtcaaatatcaactaaa

SEQ ID NO: 269199 - DNA, 120 bp, Artificial Sequence
  ENSG00000127074_12 (sequence is synthesized)
tttcatcagaagagcagtcatatgttactaagattcttgttttcattattcatggtttacacttgagaattcagcaagttaaatgctttagaatctattatgaatagtctctgttctttt

SEQ ID NO: 269200 - DNA, 120 bp, Artificial Sequence
  ENSG00000127074_13 (sequence is synthesized)
taaaaaacaaagaatattgtttgtgttaaaatgagattcttcaatccaaaatattttcttggttccaaccctccacatacgaagtgccagaaagcttcatccctagataaagaaggtgag

SEQ ID NO: 269201 - DNA, 120 bp, Artificial Sequence
  ENSG00000127074_14 (sequence is synthesized)
actggaggaggaatcaaatgttaaccaagctcccaagtctcttcctccacacttttctataactcaaaatgttgccatttggatgagaacagtgaaaagaataatgcctgagaaaagtaa

SEQ ID NO: 269202 - DNA, 120 bp, Artificial Sequence
  ENSG00000127074_15 (sequence is synthesized)
cagaccattgcattggatttcctcacctgaaagaattcccaaaagttgagaacccctgttagattaaccatgagtgcctaacatagtccatgtccagccctcagttctggccacaccttt

SEQ ID NO: 269203 - DNA, 120 bp, Artificial Sequence
  ENSG00000127074_16 (sequence is synthesized)
ttgtatggtcagagcccctggcatgaatgctctttcactaaaataccaaaatgtccaaaaaggcttacaagctactgtgtggcaaggagaaggatgctgcaatggtggtcagaggagata

SEQ ID NO: 269204 - DNA, 120 bp, Artificial Sequence
  ENSG00000127074_17 (sequence is synthesized)
gtaagacccaaagctcagcattttaaatgacagtgaatgctactgcactgcacaggtgcatccaaggacaaaggtataatctgctaattaagggacagctctcctttcttcgaatgattc

SEQ ID NO: 269205 - DNA, 120 bp, Artificial Sequence
  ENSG00000127074_18 (sequence is synthesized)
ccatagaggatcactgtcagagctcgcctttcttctatctgccttatagactcaccatgagaaaaggggaagaccagaaaaattaaaaatcacattcatggaaagctgccagataacagt

SEQ ID NO: 269206 - DNA, 120 bp, Artificial Sequence
  ENSG00000127074_19 (sequence is synthesized)
tatttaataggtacttggcattcatgacctaatttaattttcattataacattgtgcgatagacgttattatccctattatatagacaataaaattggggtttgaagattttaagtaaga

SEQ ID NO: 269207 - DNA, 120 bp, Artificial Sequence
  ENSG00000127074_20 (sequence is synthesized)
ccaaggacaattaagtacagcactgggattagaacctaggactgtcagagactccaaacattcttcattcttttgtctgcaacatcatggtatcttaaaatgctttcatatccgtttggt

SEQ ID NO: 269208 - DNA, 120 bp, Artificial Sequence
  ENSG00000127074_21 (sequence is synthesized)
atccactgcccatccgcccagaagaatggaggggacacaagggagaacttgtatcaggaaaaaaggtatttcaaataatcctaataaaggcacctggatagccatgggccagcattaaac

SEQ ID NO: 269209 - DNA, 120 bp, Artificial Sequence
  ENSG00000127074_22 (sequence is synthesized)
ttgtgagaacctccaaaaaaaattataagcaaaaatggggttcaattaaaaacaaattgtatttcccatttttacccccaaccgtaattactccaatcatctctccccataaatctcatg

SEQ ID NO: 269210 - DNA, 120 bp, Artificial Sequence
  ENSG00000127074_23 (sequence is synthesized)
agtcttagagacaaaagaactctcttaccaacaatcatcgacacttaattttaagctaacccaacacattgatgactcttcactcgtgttgtagattttattcttccctatataatggga

SEQ ID NO: 269211 - DNA, 120 bp, Artificial Sequence
  ENSG00000127074_24 (sequence is synthesized)
atgattagaacggacaggcattcaataaaccttgcctagctctttccatttcaccagattgaaaaggttattttaggttactttttctaaagttttaacaagagaaaagaacaatgactc

SEQ ID NO: 269212 - DNA, 120 bp, Artificial Sequence
  ENSG00000127074_25 (sequence is synthesized)
agatactatttcatggaaatgttttttgaaagcaatcttaacacagtacactgttaagcctcagtactgatgcaagcagtccatccaaaactggcaggatccgtctgaatttttagaaaa

SEQ ID NO: 269213 - DNA, 120 bp, Artificial Sequence
  ENSG00000127074_26 (sequence is synthesized)
caaaagatatctgaccttttaaggactcccaatatttttccatgttctcggatattttttaatctctttaactaatcctccttcattgtgttaagaacctgctaatgctgatggctgttc

SEQ ID NO: 269214 - DNA, 120 bp, Artificial Sequence
  ENSG00000127074_27 (sequence is synthesized)
ctgcagcactaatttttaggctgctaattttaggtatagccaatggacagtgcttgcgtgtctatagccatcttcaattatctagttgttgaaagcagaacaattaagaatgcaccataa

SEQ ID NO: 269215 - DNA, 120 bp, Artificial Sequence
  ENSG00000127074_28 (sequence is synthesized)
caattaagaatgcaccataaactgaatggcaataaacacattgcctatttctgttttatttccaacctttattctaagttcatgggtacatgcgcaggatgtgcaggtttgttacatagg

SEQ ID NO: 269216 - DNA, 120 bp, Artificial Sequence
  ENSG00000127074_29 (sequence is synthesized)
ttgctgcacagatcatcctatcacctaggtagtaagcccagcatccaatagctattattcctgatgctctccctcctcccacgcccccaccctacaacaggccccagtgtgtgttgttct

SEQ ID NO: 269217 - DNA, 120 bp, Artificial Sequence
  ENSG00000127074_30 (sequence is synthesized)
tacaacaggccccagtgtgtgttgttctccccaatgtgtccatatgttctcatcattcagttcccacttataagtgagaacaggcagtatttgattttctgttcctgcattagtttgctg

SEQ ID NO: 269218 - DNA, 120 bp, Artificial Sequence
  ENSG00000127074_31 (sequence is synthesized)
atggctgcatagtattccatggtgtataaagttacttgtatttgagaatacagtcatttgccaattcacctcatgaagctcaccaaaatgaacagagttctggaatctttcacaactatt

SEQ ID NO: 269219 - DNA, 120 bp, Artificial Sequence
  ENSG00000127074_32 (sequence is synthesized)
tgaacagagttctggaatctttcacaactattttctaaatggtaaatggctttgtttataccgtttaggtaaaatgtaacttgacataatacaccttaataaaaattaaaactgatacaa

SEQ ID NO: 269220 - DNA, 120 bp, Artificial Sequence
  ENSG00000127074_33 (sequence is synthesized)
gttttgtggattaactctaagattctaatagataaataggtaaacacttggctggtggcagcggcaaacagtgcataacccttttaaaagcaatttggcagtctgtaccaaaaaccttaa

SEQ ID NO: 269221 - DNA, 120 bp, Artificial Sequence
  ENSG00000127074_34 (sequence is synthesized)
aaatctgcctcttttaaccaactttgattctactgctagtgccctggaattactctaatcatgtggccatggcaagccttaaacacagctgggctacatttgagtttttatggtgaaaaa

SEQ ID NO: 269222 - DNA, 120 bp, Artificial Sequence
  ENSG00000127074_35 (sequence is synthesized)
tgagagaaaatcaatatgctgtttgacaataattatgtaaactatggaatgccccccttgtagcatatttcaccatcaccataaacaatatgactatcaatgattatacatttgtaatta

SEQ ID NO: 269223 - DNA, 120 bp, Artificial Sequence
  ENSG00000127074_36 (sequence is synthesized)
taaattataacactacaaatgattaatacaattatgatgacataaaatgcataaagtataaacacacatagtgtgattacttcttgattaaaaacacacaaatacaaacataacaaaaag

SEQ ID NO: 269224 - DNA, 120 bp, Artificial Sequence
  ENSG00000127074_37 (sequence is synthesized)
tgattaaaaacacacaaatacaaacataacaaaaagactttaaaaaactacatcaaaatactaatagtggtaatttattaatagggagattataggactatggttctgaataatatttat

SEQ ID NO: 269225 - DNA, 120 bp, Artificial Sequence
  ENSG00000127074_38 (sequence is synthesized)
ttttataatttaaaaaatttaaatagtaaaaataaaatgtaaaatatcacaggaaaataactttccaaccaaagccacacacaaatggaatgtaaatatattttggtgtcattttcaaga

SEQ ID NO: 269226 - DNA, 120 bp, Artificial Sequence
  ENSG00000127074_39 (sequence is synthesized)
atatctgtcaagcatccataagtgccaggcactttacatccagtatctcctaaaatgctataaattcagtattgctaaccttattttacagataagaaacctgagactctgagaacttgt

SEQ ID NO: 269227 - DNA, 120 bp, Artificial Sequence
  ENSG00000127074_40 (sequence is synthesized)
ccagtgtcacacagccattaagtggtaaagttaagattcaaaattaaatctatctggctccaaagcttctccccattaaattatcttgatttctaggaaacttaaaaagaaaaaaaggag

SEQ ID NO: 269228 - DNA, 120 bp, Artificial Sequence
  ENSG00000127074_41 (sequence is synthesized)
tctgtggcgaaagcattggccttcccagcaggaactataaatatcatgaagagacatttgagaatcctgtgttgttgggcaatgagaaataaaaagtctgttaagggaataaagacagag

SEQ ID NO: 269229 - DNA, 120 bp, Artificial Sequence
  ENSG00000127074_42 (sequence is synthesized)
gacagtatatgagatttctatcgtacagggcaagcctacattgtggacatattctagaactcttgtctggaaaatacttggtttattgaaatagccacttctcccctctatttatccact

SEQ ID NO: 269230 - DNA, 120 bp, Artificial Sequence
  ENSG00000127074_43 (sequence is synthesized)
tctcttcattttcttcccatttcagagcatattcagttaaatcaacatttgtgactattaagggagataaatttttaaaaagcaccaatttctcttttctttaaaaagacatttgtctta

SEQ ID NO: 269231 - DNA, 120 bp, Artificial Sequence
  ENSG00000127074_44 (sequence is synthesized)
caaacttcctgatttgtagactgctactaagaaaccactgcatcttcctgagtaagccatggttttggaaacttccctggccttgagcctcatatttttcttttttgttcctcttggatg

SEQ ID NO: 269232 - DNA, 120 bp, Artificial Sequence
  ENSG00000127074_45 (sequence is synthesized)
tggagttggatatttacttttaaaagagcaaaatgtttattttttatatatcttcttagatgcctataaaactacaaagaaaattaccctattccactgaaaaggagagcagagaataaa

SEQ ID NO: 269233 - DNA, 120 bp, Artificial Sequence
  ENSG00000127080_0 (sequence is synthesized)
gctgacaggcgctcctcccccgaccgcagcggctggttcccagcgaggcgggcggcccccagctcgcgtccccgagtcctagcccgcgaggcgccagggctgcgcctgggcatggaagag

SEQ ID NO: 269234 - DNA, 120 bp, Artificial Sequence
  ENSG00000127080_1 (sequence is synthesized)
aggcgccagggctgcgcctgggcatggaagaggggaagatggacgagaatgaatgggggtaccacggagagggcaataagagcctggtggtggcccacgcgcagcgctgcgtcgtgctgc

SEQ ID NO: 269235 - DNA, 120 bp, Artificial Sequence
  ENSG00000127080_2 (sequence is synthesized)
ggtttctgaagtttcctccaaataggaagaagacctcggaagagatatttcaacacctgcagaacatagtggactttgggaaaaatgtcatgaaggagtttttgggggagaactatgttc

SEQ ID NO: 269236 - DNA, 120 bp, Artificial Sequence
  ENSG00000127080_3 (sequence is synthesized)
attatggggaggtcgttcagctacctttagagtttgtgaaacagctttgtttaaagatacaatctgaaagaccagagtctcgctgtgacaaggacctggatactctcagtggttacgcta

SEQ ID NO: 269237 - DNA, 120 bp, Artificial Sequence
  ENSG00000127080_4 (sequence is synthesized)
tgtgccttcctaatttaaccagactccaaacctaccgctttgcagagcaccggccgattctgtgtgtagagattaagccaaaatgtgggtttattcctttctcgagtgatgtcacgcatg

SEQ ID NO: 269238 - DNA, 120 bp, Artificial Sequence
  ENSG00000127080_5 (sequence is synthesized)
agatgaagcataaggtctgtcgatactgcatgcaccagcacctcaaggtagcaactgggaagtggaagcagatcagcaaatactgtccccttgatctctactcaggaaacaaacagagaa

SEQ ID NO: 269239 - DNA, 120 bp, Artificial Sequence
  ENSG00000127080_6 (sequence is synthesized)
tgcactttgccttgaagagtttgctgcaggaggcacagaacaacttgaagatatttaagaatggtgagctgatttacggctgcaaagatgcccggagccccgtggctgactggagcgagc

SEQ ID NO: 269240 - DNA, 120 bp, Artificial Sequence
  ENSG00000127080_7 (sequence is synthesized)
ttgcacaccacctgaagccgttcttcttcccttccaacggcctggccagtgggccccactgcacaagggctgtgatcagggagctggtgcacgtgatcacacgggtgctgctgagtggct

SEQ ID NO: 269241 - DNA, 120 bp, Artificial Sequence
  ENSG00000127080_8 (sequence is synthesized)
cggacaagggccgggcaggcaccctgagtccggggctcgggcctcagggcccgcgagtctgcgaagccagccctttcagtaggagccttcgctgccaaggaaaaaacaccccagagcgct

SEQ ID NO: 269242 - DNA, 120 bp, Artificial Sequence
  ENSG00000127080_9 (sequence is synthesized)
cggggttaccgaagggctgtcttctgtacaaaaccctccaggtgcagatgttggacctgctggacatcgaaggcctctaccctctgtacaaccgggttgagcgatacctggaagagtttc

SEQ ID NO: 269243 - DNA, 120 bp, Artificial Sequence
  ENSG00000127080_10 (sequence is synthesized)
ccgaggagagaaaaaccttacaaatagatgggccttatgatgaagcattttaccagaagctgcttgacctttccactgaggatgacgggacagtggccttcgcgctaacgaaggtgcagc

SEQ ID NO: 269244 - DNA, 120 bp, Artificial Sequence
  ENSG00000127080_11 (sequence is synthesized)
agtaccgcgtcgccatgactgccaaggactgctccatcatgattgcactgtctccctgtctgcaggatgccagctctgatcaaaggcctgtcgtcccttcatcgaggtccaggtttgcct

SEQ ID NO: 269245 - DNA, 120 bp, Artificial Sequence
  ENSG00000127080_12 (sequence is synthesized)
tttccgtgtctgtgctggaccttgacctcaagccctacgagagcattccccatcagtataaactggacggcaagatcgtcaactattattcaaagactgtacgtgccaaagacaacgccg

SEQ ID NO: 269246 - DNA, 120 bp, Artificial Sequence
  ENSG00000127080_13 (sequence is synthesized)
tgatgtcgactcggttcaaggaaagcgaagattgcacattagttctccacaaggtctaactctttccctgcagtgtctttgaaacttgaacataatgtgaaggctgaatgatagagatat

SEQ ID NO: 269247 - DNA, 120 bp, Artificial Sequence
  ENSG00000127080_14 (sequence is synthesized)
tttctgttgtgttgggtgacctttggttgtgaatgtttttgcttttaaccccttttgaggtgggattgcctcttggagacatggaattgaagagcactagaaacaacttcctggacaagg

SEQ ID NO: 269248 - DNA, 120 bp, Artificial Sequence
  ENSG00000127080_15 (sequence is synthesized)
aatgtaggaagtgagtgctgtgtcccaggaagctgctcacactcttaaaatggaagtgtccgttaagccctgggaagacgttctggatagttcttctttcccaaccagggctcatgtctg

SEQ ID NO: 269249 - DNA, 120 bp, Artificial Sequence
  ENSG00000127080_16 (sequence is synthesized)
attctctaatgcgaaaagccttattctaagacccaaggtttggatctgctaccaccagactcctaacatagaaaacttgaattgtcacatacattttacagtttggacttttaagaaaac

SEQ ID NO: 269250 - DNA, 120 bp, Artificial Sequence
  ENSG00000127080_17 (sequence is synthesized)
cacaggtttttaggtggttccctgctgcacagcgtgacctcgtggtcgcgcagatgccgattctgagcagtgtagactcagggtccctgtggaggtgctgaagcccacagttccacacag

SEQ ID NO: 269251 - DNA, 120 bp, Artificial Sequence
  ENSG00000127080_18 (sequence is synthesized)
ggcagcagggagcgcaaggctcaggtcaggatggacaccactcatgcgagcattgacctttttttttttgctttacaatttaatctttcacatgagggggagatgagctgttctttccca

SEQ ID NO: 269252 - DNA, 120 bp, Artificial Sequence
  ENSG00000127080_19 (sequence is synthesized)
ctaaaaattgctgctgtagaagttggaggtggagctgtgactggctgagctgctgtggccgggctgggcagtgtgccccaacagctcagtgctttcctgacactccagtgtctggggtgg

SEQ ID NO: 269253 - DNA, 120 bp, Artificial Sequence
  ENSG00000127080_20 (sequence is synthesized)
ttgaggagcgagttctctcttcctcccagaccaagttcctccctcgggtttgccttgagacgtgttgcgtttttgggccccgtggcctctccctgttaggctgccacaggccctgcttct

SEQ ID NO: 269254 - DNA, 120 bp, Artificial Sequence
  ENSG00000127080_21 (sequence is synthesized)
ggaaggtgaacagctcctggctgctgccgagagggttctcgttggggtcaccaaagtgtgcccggctgctatgaaaaacgttgggaatcttggtttcagttttttattctatgctaggtt

SEQ ID NO: 269255 - DNA, 120 bp, Artificial Sequence
  ENSG00000127080_22 (sequence is synthesized)
gtacagacttatttatatcatcgttttgagggactaatggaggcttattgtaacatataatattagtgaaaccatggaattatatgaaaatgatacatgagaaataaggaaactattttg

SEQ ID NO: 269256 - DNA, 120 bp, Artificial Sequence
  ENSG00000127080_23 (sequence is synthesized)
ctgattgtaaatttttgtgggaaattttgtgataacttgagaattatacttgtttgaatcaaggcaactcttctagaatttattgttcaattctgtcatatttacttctaattctactct

SEQ ID NO: 269257 - DNA, 120 bp, Artificial Sequence
  ENSG00000127080_24 (sequence is synthesized)
cagaggtgcaaaaagatacttatctaactggacacttttactgttttcttctcacttccaatgacaccgtctcatacacacgggtcctgtgtgctgggatgggggctttggtgaagtgca

SEQ ID NO: 269258 - DNA, 120 bp, Artificial Sequence
  ENSG00000127080_25 (sequence is synthesized)
cggagctcacggacaagccgcaggctctgggaagcgtggaggtagtggccgttgagtactgtcttgacccaagggagttcactgttgctgggctggggctggggcagcctggtttgggat

SEQ ID NO: 269259 - DNA, 120 bp, Artificial Sequence
  ENSG00000127080_26 (sequence is synthesized)
gattttgcccattgtcacggtgtgtggaggatgctgggtcctgggttcaagtgcacatgtgagggaaccccagtccgtgggaaggtgggctgggctccctaggtccttcagggctgcaag

SEQ ID NO: 269260 - DNA, 120 bp, Artificial Sequence
  ENSG00000127080_27 (sequence is synthesized)
agttattgcctagcacagggcccagacagggctggactagacacgatgaaaacagcctgtatttgagggagaagagaaaacagatggagacccccactctgtctggtcttggctcccacc

SEQ ID NO: 269261 - DNA, 120 bp, Artificial Sequence
  ENSG00000127080_28 (sequence is synthesized)
agcccgggctgtgaggagcccctgagccgcgggtgccactgctgtggatgcgtttctggcccgtcttggaaactgctgctgctgcgtagtcatgacggccctgactggtttgagacaaca

SEQ ID NO: 269262 - DNA, 120 bp, Artificial Sequence
  ENSG00000127080_29 (sequence is synthesized)
cgcgttcacagatcttaacaatgctaaatgggcgactgatgaggtcacggttcttaaggcacatccgggacgatcgatatagcacttaggctatgcaggggggtctttctttcataaagg

SEQ ID NO: 269263 - DNA, 120 bp, Artificial Sequence
  ENSG00000127080_30 (sequence is synthesized)
acctcattccttgcgtcccagcccaggaacagtgctgtctttgctgtcttaggccattcttgttattaagctgacagcttcactttcttgtggaagaccaagaacagcatgaggacttgc

SEQ ID NO: 269264 - DNA, 120 bp, Artificial Sequence
  ENSG00000127080_31 (sequence is synthesized)
tgagactgcctcacggtgccaccatgcggaccggggggaggcagggagtgagggtgtggctcccctgggctactaaggacagtttaaagatgaggcgccataggcatccgtctccagagc

SEQ ID NO: 269265 - DNA, 120 bp, Artificial Sequence
  ENSG00000127080_32 (sequence is synthesized)
ccccaggaggcaggaaccaggataagggtggcttctcccagctgagtaatgtggccaccatgtccaaggtggactcggtgtgaggctgcagtgggtgggggatggatcctccccacacat

SEQ ID NO: 269266 - DNA, 120 bp, Artificial Sequence
  ENSG00000127080_33 (sequence is synthesized)
ctgaggacacacaaccacttggtacattttctcagatgttaagcttatttttataaaccacattgtacgtgtcacttttatttggcattttatacttaactagttgtatttatttttcat

SEQ ID NO: 269267 - DNA, 120 bp, Artificial Sequence
  ENSG00000127080_34 (sequence is synthesized)
gtcatgagagtttccatataatgtgccataactgcatagacagcacgtcttcagggtgtggtttctaagcagaaaatagcaaatgtttatattgaataaaattgcatgttcctccacgca

SEQ ID NO: 269268 - DNA, 120 bp, Artificial Sequence
  ENSG00000127080_35 (sequence is synthesized)
ctttacgtatgtcgactctgacagtgtggtgtgtgttgagctgtccctggtcagtatggacagacccacatagcttggagcatgtgttgaagagtgtaaatgtcagagccagcgtaccgg

SEQ ID NO: 269269 - DNA, 120 bp, Artificial Sequence
  ENSG00000127080_36 (sequence is synthesized)
gtttgagtccctgccttgccattgacaagcagggcatgacagacaagtgatgtctgtgtctgttgcttgtctgtaaagtgggacgccggccgtgctgccctgttgggctgctgtgagggt

SEQ ID NO: 269270 - DNA, 120 bp, Artificial Sequence
  ENSG00000127080_37 (sequence is synthesized)
ggagcaagttaacacatgcacagcctgtagaagggtggccgtctgccgttgtctctggtggctgtatgatgttccggagggaatgtcgttctaagcgatgccttgctgaacaccccctgc

SEQ ID NO: 269271 - DNA, 120 bp, Artificial Sequence
  ENSG00000127080_38 (sequence is synthesized)
gctctccttgcaggtgtcgagtgatactcacttgatactctgagtgtggccaacatgcggggctcaggtggcttactgcttttccttccaaaggccgactgtggtgaccttgctgaagac

SEQ ID NO: 269272 - DNA, 120 bp, Artificial Sequence
  ENSG00000127080_39 (sequence is synthesized)
agatcatccgtctcagggtctggagtcggggtcccacactgcttgccgtgagaggtcagggggcggtgctggcctctgagcagccccgtggcactgagggctggcccaggtgctctcaca

SEQ ID NO: 269273 - DNA, 120 bp, Artificial Sequence
  ENSG00000127080_40 (sequence is synthesized)
gggcgacctcctgacgcccgtgctcaccgtggccctcgctcctaatcccaccctcaggttctgaggcaggaagcagttcccacacttggctactgggaaggaaggttgtgtgggggggca

SEQ ID NO: 269274 - DNA, 120 bp, Artificial Sequence
  ENSG00000127081_0 (sequence is synthesized)
atgcgcaaacccaggcagcgctgtaagaagtacctctaggcctgggaggcattgagaaaaaggaagtgggtcctgttctggttcttgcgactatagtcacctcccgaggcaaatgaccac

SEQ ID NO: 269275 - DNA, 120 bp, Artificial Sequence
  ENSG00000127081_1 (sequence is synthesized)
tgtcctgagaggacgtgggtgaggggcagatttctgcccctttgtccgaagagccaaaaatgaccaagtccctggaatcagtgtcattcaaggacgtaactgtagacttcagtagggatg

SEQ ID NO: 269276 - DNA, 120 bp, Artificial Sequence
  ENSG00000127081_2 (sequence is synthesized)
agtggcaacaattagaccttgctcagaaaagcctgtacagagaagtgatgctggaaaactatttcaacttgatctcagtgggatgtcaagttcccaaaccagaagtcatcttcagcttgg

SEQ ID NO: 269277 - DNA, 120 bp, Artificial Sequence
  ENSG00000127081_3 (sequence is synthesized)
aacaagaagagccatgtatgttggatggtgagatccccagtcagagccgtccagatggggacattggttttggacctttacaacagaggatgtctgaagaagtttctttccagtctgaga

SEQ ID NO: 269278 - DNA, 120 bp, Artificial Sequence
  ENSG00000127081_4 (sequence is synthesized)
ttaatattaatctcttcacaagagatgacccatattccattttagaagaattgtggaaagacgatgaacacacaagaaaatgtggagaaaaccagaacaaacctttaagtcgtgttgtct

SEQ ID NO: 269279 - DNA, 120 bp, Artificial Sequence
  ENSG00000127081_5 (sequence is synthesized)
tcattaacaagaaaacactagctaatgacagcatctttgaatataaggacattggggaaatagttcatgtaaacacacacctggtttcctcaagaaaaagaccccataactgtaactcgt

SEQ ID NO: 269280 - DNA, 120 bp, Artificial Sequence
  ENSG00000127081_6 (sequence is synthesized)
gtggaaagaatttggagcctatcataaccttatataatagaaacaatgcaacagaaaattctgataagactattggagatggtgatattttcactcatttgaattctcatacagaagtga

SEQ ID NO: 269281 - DNA, 120 bp, Artificial Sequence
  ENSG00000127081_7 (sequence is synthesized)
ctgcttgtgaatgtaaccaatgtgggaaacctctgcatcataagcaagctctcattcaacaacagaaaattcatactagagagagcctctatttgttttctgactacgtaaatgttttct

SEQ ID NO: 269282 - DNA, 120 bp, Artificial Sequence
  ENSG00000127081_8 (sequence is synthesized)
ccccgaagtcacatgcctttgcacatgagagtatttgtgctgaagaaaagcagcatgaatgccatgaatgtgaggcagtcttcactcagaagtcccagcttgatggcagtcagagggttt

SEQ ID NO: 269283 - DNA, 120 bp, Artificial Sequence
  ENSG00000127081_9 (sequence is synthesized)
atgcaggaatatgcactgaatatgagaaggatttttccctcaagtcaaaccgtcagaaaactccttatgaggggaattactataaatgcagtgactatggaagagcctttatccagaagt

SEQ ID NO: 269284 - DNA, 120 bp, Artificial Sequence
  ENSG00000127081_10 (sequence is synthesized)
cagatctgttcagatgccagagaattcattctggagaaaaaccttatgagtacagtgaatgtgagaaaaacctccctcagaattcaaaccttaatatacataaaaaaattcatactggag

SEQ ID NO: 269285 - DNA, 120 bp, Artificial Sequence
  ENSG00000127081_11 (sequence is synthesized)
ggaaacactttgaatgtactgaatgtggaaaagctttcacaaggaaatcaacactaagtatgcatcagaaaatccatacaggagaaaaaccttatgtatgtactgaatgtgggaaggcct

SEQ ID NO: 269286 - DNA, 120 bp, Artificial Sequence
  ENSG00000127081_12 (sequence is synthesized)
ttatccggaagtcacattttatcacacatgaaagaattcatactggagaaaaaccctatgaatgcagtgactgtgggaaatcctttattaaaaaatcacaactccatgtgcatcagcgaa

SEQ ID NO: 269287 - DNA, 120 bp, Artificial Sequence
  ENSG00000127081_13 (sequence is synthesized)
ttcacacaggagagaatccctttatatgttcagaatgtgggaaggtcttcactcacaagacaaatctcattatacaccagaaaattcatacaggagaaagaccctatatatgtactgtgt

SEQ ID NO: 269288 - DNA, 120 bp, Artificial Sequence
  ENSG00000127081_14 (sequence is synthesized)
gtggtaaggcctttactgacaggtcaaatctcattaagcaccaaaaaattcatactggagagaaaccttataaatgcagcgactgtggaaaatcattcacctggaagtctcggctcagga

SEQ ID NO: 269289 - DNA, 120 bp, Artificial Sequence
  ENSG00000127081_15 (sequence is synthesized)
tacatcagaagtgtcatactggagagagacattatgaatgcagtgaatgtgggaaagcattcattcagaagtcaacattaagtatgcaccagagaattcatagaggggaaaaaccatatg

SEQ ID NO: 269290 - DNA, 120 bp, Artificial Sequence
  ENSG00000127081_16 (sequence is synthesized)
tttgcactgaatgtggtaaggccttcttccacaaatcccattttattacacatgagagaattcatactggagagaaaccctatgaatgcagtatttgtgggaaatccttcactaagaaat

SEQ ID NO: 269291 - DNA, 120 bp, Artificial Sequence
  ENSG00000127081_17 (sequence is synthesized)
cacagctccacgtacatcagcagattcacacaggagagaaaccctataggtgtgctgaatgtggaaaggcttttactgacagatcaaatctctttacacaccagaaaattcacactggag

SEQ ID NO: 269292 - DNA, 120 bp, Artificial Sequence
  ENSG00000127081_18 (sequence is synthesized)
agaaaccttataaatgtagtgactgtgggaaagccttcactaggaagtcaggtctccatatacatcagcaatcccatactggagaaaggcattatgagtgcagtgaatgtgggaaagcct

SEQ ID NO: 269293 - DNA, 120 bp, Artificial Sequence
  ENSG00000127081_19 (sequence is synthesized)
aatagacacaggagaattcatactggagagaaaccctatgaatgcagtgactgtggcaagtctttcattaagaaatcacaactccatgagcatcatcgaattcacacaggagagaaacca

SEQ ID NO: 269294 - DNA, 120 bp, Artificial Sequence
  ENSG00000127081_20 (sequence is synthesized)
tatatatgtgctgagtgtggaaaggccttcaccatcagatcaaatcttattaaacaccagaaaattcatactaaacagaaaccctataagtgcagtgacttggggaaagccttaaactgg

SEQ ID NO: 269295 - DNA, 120 bp, Artificial Sequence
  ENSG00000127081_21 (sequence is synthesized)
aagccacaactcagtatgcctcagaaatctgacaatggggaagtagagtgctccatgccacaattatggtgtggggactcagaaggtgaccaaggccaactttcttctatctagttagaa

SEQ ID NO: 269296 - DNA, 120 bp, Artificial Sequence
  ENSG00000127081_22 (sequence is synthesized)
ttatgaacatctggatcatatagctgatgtgtagttacacatatggggagacacttttgagagtgtttaagcaatgtatagtggccatctttggttacttgatattggtgttgtcaagct

SEQ ID NO: 269297 - DNA, 120 bp, Artificial Sequence
  ENSG00000127081_23 (sequence is synthesized)
cctgcaaataatagtaaatgtgcaaggagatgattggcagtctttcttgtttcactttttgggcaaacagttttataaattcatggctgttgagtttttcatgttctgggtaccacaact

SEQ ID NO: 269298 - DNA, 120 bp, Artificial Sequence
  ENSG00000127081_24 (sequence is synthesized)
attcaatattgacccgcaaaaattcataatgagtagtatgatgagataattttacattgtctaagcagcctaaggacactgagatcaaggcaaagagagggcaatttaggtctataatga

SEQ ID NO: 269299 - DNA, 120 bp, Artificial Sequence
  ENSG00000127081_25 (sequence is synthesized)
aagtgaatcagcagtttttgtgaaaacactaaagacagaaagaaaggactctactttttttaaaattttctttgggaagtcaccattatttattgttatatctgttggcgtatgctgggg

SEQ ID NO: 269300 - DNA, 120 bp, Artificial Sequence
  ENSG00000127081_26 (sequence is synthesized)
cagcagttagccaagaggtctgaaattgctctttgcctatttctcaaaagtctatattattaccttagaactggccctacgatcatggaacttagatacagggacccaggtctagatagc

SEQ ID NO: 269301 - DNA, 120 bp, Artificial Sequence
  ENSG00000127081_27 (sequence is synthesized)
agcactttagatcctcagctttcaccacagaaacctgcacttttttgatgttgttgttaccaactcctgtttgaaaaataggacaaattaagaaaatggatatcaaatcctaaaattttt

SEQ ID NO: 269302 - DNA, 120 bp, Artificial Sequence
  ENSG00000127081_28 (sequence is synthesized)
tcccactaattttgttagtacattctctacatgttcgttacttgctagattaccatgagacacaagcatcttgaattttagtttgtgtccttagaagataaaatgtagttgaacatttgg

SEQ ID NO: 269303 - DNA, 120 bp, Artificial Sequence
  ENSG00000127081_29 (sequence is synthesized)
aagacttctccttttatctcctcacaatctctacaaactaatcttaattaattttgtttttcaaattctctgtatttgaatagacttttttgtcttttcttctatcaaatactgaaagaa

SEQ ID NO: 269304 - DNA, 120 bp, Artificial Sequence
  ENSG00000127081_30 (sequence is synthesized)
ctgtgttgtaattttacaaataattgtgaatttgtctcctttagagctactaatttttgctttatatattttgtctttgattttacatacaatttagaattgttgtaatcttcctggtta

SEQ ID NO: 269305 - DNA, 120 bp, Artificial Sequence
  ENSG00000127081_31 (sequence is synthesized)
attgacacattatcattattagatgtttctttttatctctagtaattttttgccttaaatgtactatgtcagatactaatatacatatggattaaaagctaatgtaaattagtactaaca

SEQ ID NO: 269306 - DNA, 120 bp, Artificial Sequence
  ENSG00000127081_32 (sequence is synthesized)
tttctggacaaggggagaagttataacattataatttcatttatttgtctcttatatggtattaattttgtatatttggattctgtacatggtgaacatagccaatcattatttgagtca

SEQ ID NO: 269307 - DNA, 120 bp, Artificial Sequence
  ENSG00000127081_33 (sequence is synthesized)
atatccatttaaattaacccacatatttatcattttaattacttttttattccttcctgtcctttaagttttcctctagaattattttgcttcttactgaggaacaccctttagtatttc

SEQ ID NO: 269308 - DNA, 120 bp, Artificial Sequence
  ENSG00000127081_34 (sequence is synthesized)
ttttactgtgagtttggtggtgacaaattgttcttcatttgttggcagtgttttattttgccttcatttttgaaggatacttttactgaatatagaattctaagttgaaagttgttttct

SEQ ID NO: 269309 - DNA, 120 bp, Artificial Sequence
  ENSG00000127081_35 (sequence is synthesized)
attagtattttgatgatattttattttggtttgtcttttattgttttattgagaagctttatataattacctttgcaggcaatctgcttttctgtctcctttgaaatttatctatttgtc

SEQ ID NO: 269310 - DNA, 120 bp, Artificial Sequence
  ENSG00000127081_36 (sequence is synthesized)
tttgttttttaactgttgcacattgatatgcctaggtgtaatttttccatgtatttatcctccttggagtttataatgttttttaaatctgtggtttagtggttttggggtgtgtgtgtg

SEQ ID NO: 269311 - DNA, 120 bp, Artificial Sequence
  ENSG00000127081_37 (sequence is synthesized)
cacgtgtgcgtgtacgtgtgtgcacatgtgcatttggggaaattcctagctattatctattcaaattatgcatctgcctcattctccttctctgtttcttttagggataaccttattacc

SEQ ID NO: 269312 - DNA, 120 bp, Artificial Sequence
  ENSG00000127081_38 (sequence is synthesized)
cagttctgttggcctgttttctaatggttatttttcttgaattttgctgatgtcctatctcctcatatggtgatttttatatcacttgccagacaatatatattaaaattttagaggtaa

SEQ ID NO: 269313 - DNA, 120 bp, Artificial Sequence
  ENSG00000127081_39 (sequence is synthesized)
tgtcctgagaggacgtgggtgaggggcaggtgagtagagggatggcagcatctgtggactgagcaagaagaatctctgatgtctgtcctgagccttccggaatcagtgtcattcaaggac

SEQ ID NO: 269314 - DNA, 120 bp, Artificial Sequence
  ENSG00000127083_0 (sequence is synthesized)
gaccaagaacacaagcatcttaatttgaatccacaaagtttcatgtaatgaaaagaaatacataattttaattcaacccgagtgttttccaagaagattgtatttgcttaaattgctaca

SEQ ID NO: 269315 - DNA, 120 bp, Artificial Sequence
  ENSG00000127083_1 (sequence is synthesized)
gtaattcaagagacagccctgtctggacacagagttactgtggatttttaagagactcagttaaagaatttaggaatttctgattcatttaaaggatttacaaattcatcaacccctgaa

SEQ ID NO: 269316 - DNA, 120 bp, Artificial Sequence
  ENSG00000127083_2 (sequence is synthesized)
aactaaagcaaattgaacaggaaaaaaaaaaagaagatgggttttttaagtccaatatatgttattttcttcttttttggagtcaaagtacattgccaatatgaaacttatcagtgggat

SEQ ID NO: 269317 - DNA, 120 bp, Artificial Sequence
  ENSG00000127083_3 (sequence is synthesized)
gaagactatgaccaagagccagatgatgattaccaaacaggattcccatttcgtcaaaatgtagactacggagttccttttcatcagtatactttaggctgtgtcagtgaatgcttctgt

SEQ ID NO: 269318 - DNA, 120 bp, Artificial Sequence
  ENSG00000127083_4 (sequence is synthesized)
ccaactaactttccatcatcaatgtactgtgataatcgcaaactcaagactatcccaaatattccgatgcacattcagcaactctaccttcagttcaatgaaattgaggctgtgactgca

SEQ ID NO: 269319 - DNA, 120 bp, Artificial Sequence
  ENSG00000127083_5 (sequence is synthesized)
aattcattcatcaatgcaactcatcttaaagaaattaacctcagccacaacaaaattaaatctcaaaagattgattatggtgtgtttgctaagcttccaaatctactacaacttcatcta

SEQ ID NO: 269320 - DNA, 120 bp, Artificial Sequence
  ENSG00000127083_6 (sequence is synthesized)
gagcataataatttagaagaatttccatttcctcttcctaaatctctggaaagactccttcttggttacaatgaaatctccaaactgcagacaaatgctatggatgggctagtaaacttg

SEQ ID NO: 269321 - DNA, 120 bp, Artificial Sequence
  ENSG00000127083_7 (sequence is synthesized)
accatgcttgatctctgttataattatcttcatgattctctgctaaaagacaaaatctttgccaaaatggaaaaactaatgcagctcaacctctgcagtaacagattagaatcaatgcct

SEQ ID NO: 269322 - DNA, 120 bp, Artificial Sequence
  ENSG00000127083_8 (sequence is synthesized)
cctggtttgccttcttcacttatgtatctgtctttagaaaataattcaatttcttctatacccgaaaaatacttcgacaaacttccaaaacttcatactctaagaatgtcacacaacaaa

SEQ ID NO: 269323 - DNA, 120 bp, Artificial Sequence
  ENSG00000127083_9 (sequence is synthesized)
ctacaagacatcccatataatatttttaatcttcccaacattgtagaactcagtgttggacacaacaaattgaagcaagcattctatattccaagaaatttggaacacctatacctacaa

SEQ ID NO: 269324 - DNA, 120 bp, Artificial Sequence
  ENSG00000127083_10 (sequence is synthesized)
acccactacattaccaccatttaacatacattcgtgtggaccaaaataaactaaaagaaccaataagctcatacatcttcttctgcttccctcatatacacactatttattatggtgaac

SEQ ID NO: 269325 - DNA, 120 bp, Artificial Sequence
  ENSG00000127083_11 (sequence is synthesized)
aacgaagcactaatggtcaaacaatacaactaaagacacaagttttcaggagatttccagatgatgatgatgaaagtgaagatcacgatgatcctgacaatgctcatgagagcccagaac

SEQ ID NO: 269326 - DNA, 120 bp, Artificial Sequence
  ENSG00000127083_12 (sequence is synthesized)
aagaaggagcagaagggcactttgaccttcattattatgaaaatcaagaatagcaagaaactatataggtatacacttacgacttcacaaaacctatacttaatatagtaaatctaagta

SEQ ID NO: 269327 - DNA, 120 bp, Artificial Sequence
  ENSG00000127083_13 (sequence is synthesized)
aacatgtattactcaaagtaatatatttagaattatgtattagtataagatcagaattgaatttaagttgttggtgacatctgcatcatttcataggattagaacttactcaaaataatg

SEQ ID NO: 269328 - DNA, 120 bp, Artificial Sequence
  ENSG00000127083_14 (sequence is synthesized)
taaatctttaaaaatataaattagaatgacaagtgggaatcataaattaaacgttaatggtttcttatgctctttttaaatatagaaatatcatgttaaagaaagtgagtgtatcatttc

SEQ ID NO: 269329 - DNA, 120 bp, Artificial Sequence
  ENSG00000127083_15 (sequence is synthesized)
tattaacagtaatttttctaaaaatgaggaaggaagtagcattagcagtaaagacccacaggccatgacctttttgatcactctgaggacaatatttaaatgacaggaaggtatattaat

SEQ ID NO: 269330 - DNA, 120 bp, Artificial Sequence
  ENSG00000127083_16 (sequence is synthesized)
gtaacaagcattcatttaaggaatagaccattttctctgacctcttcttcaggaaagctttcacactggtatttgtgatctcaccattatgacatccatccccctagctcaccacatagc

SEQ ID NO: 269331 - DNA, 120 bp, Artificial Sequence
  ENSG00000127083_17 (sequence is synthesized)
acatagaatgatatttttgatttgtaagaggccatccaggtactaaggacccaaggcatacagattcacaaaattaactaatctttttgcctcagaataccaaaacaacaaaattataaa

SEQ ID NO: 269332 - DNA, 120 bp, Artificial Sequence
  ENSG00000127083_18 (sequence is synthesized)
gctgtatttggacaactaaaaaacaccaaactatctcattgcaatttgtattttagcagatttcagcaactatcctaaacaatgttattgtgttccattttaactgggataaatgttttt

SEQ ID NO: 269333 - DNA, 120 bp, Artificial Sequence
  ENSG00000127083_19 (sequence is synthesized)
gtaaaaatacaaccatagaaaggcctctttgttacaaaatgatttgcaaagaaataactgctttgtttgcaagattaaattagtgttggcaaaataaagttctaaagataatactaaaca

SEQ ID NO: 269334 - DNA, 120 bp, Artificial Sequence
  ENSG00000127084_0 (sequence is synthesized)
gagcactcaggagactgtgtgtggtgggggtgctccaccatagagctggtcggcatccacagccaccaggacgctgccagagcccaggcctgcgccacgccctgcccagaggcacacctg

SEQ ID NO: 269335 - DNA, 120 bp, Artificial Sequence
  ENSG00000127084_1 (sequence is synthesized)
cctgctcaaggcaaccagggcaggctcaaggcagccagggccagctcactgtgtgcctgtcactgtgtgaagcctgcttcttctttatttcgcttagcaagtgaggcaggagcatgtaaa

SEQ ID NO: 269336 - DNA, 120 bp, Artificial Sequence
  ENSG00000127084_2 (sequence is synthesized)
gctgctggcagaggaatatctaatttacctcctaaatggctctactttgaacctgctgggcaaggaagagattttcaaggaaaccatctaccgtgtgcaagctcctgccggccaacccca

SEQ ID NO: 269337 - DNA, 120 bp, Artificial Sequence
  ENSG00000127084_3 (sequence is synthesized)
gaccccagcacggagccaggcgcctgtgcccgccgaccctcagcatcctcctcagaaaggctggtggcatcaggaagcccctggccagcctccacctgagcccagtgagctcagctttaa

SEQ ID NO: 269338 - DNA, 120 bp, Artificial Sequence
  ENSG00000127084_4 (sequence is synthesized)
ggatggagtcaggcagggggtcctcaacccctccaggacccattgctgccctagggatgccagacactgggcctggcagttcctccctagggaagcttcaggcgctccctgttgggccca

SEQ ID NO: 269339 - DNA, 120 bp, Artificial Sequence
  ENSG00000127084_5 (sequence is synthesized)
gagcccactgtggggaccctgtcagcctggctgcagcaggggacggctctccagacataggccccacgggagagctgagtggtagcttaaagatccccaaccgggacagcgggatcgaca

SEQ ID NO: 269340 - DNA, 120 bp, Artificial Sequence
  ENSG00000127084_6 (sequence is synthesized)
gtccctcctccagtgtggctggagagaactttccctgcgaggagggcttggaggctggcccaagccccactgtactgggggcgcacgcagagatggccctggacagccaggtcccgaagg

SEQ ID NO: 269341 - DNA, 120 bp, Artificial Sequence
  ENSG00000127084_7 (sequence is synthesized)
tcaccccccaggaggaggcggacagcgacgtgggtgaggaacctgactctgagaacaccccccagaaggctgacaaggatgccggcctggcccagcactctggcccccagaagcttctcc

SEQ ID NO: 269342 - DNA, 120 bp, Artificial Sequence
  ENSG00000127084_8 (sequence is synthesized)
acattgcccaggagctcctgcacaccgaggagacctatgtgaagcggctgcacctgctggaccaggttttctgcaccaggctgacggatgcggggatccctccagaagtcatcatgggca

SEQ ID NO: 269343 - DNA, 120 bp, Artificial Sequence
  ENSG00000127084_9 (sequence is synthesized)
tattctctaacatctcctccatccaccgcttccacgggcagttcctgctgccggagctgaagacgcggatcacggaggagtgggacacaaacccacggctcggggacatcctgcagaagc

SEQ ID NO: 269344 - DNA, 120 bp, Artificial Sequence
  ENSG00000127084_10 (sequence is synthesized)
tggccccattcctgaagatgtacggcgagtatgtcaagaactttgaccgagccgtagggctggtgagcacgtggacccagcgctccccactgtttaaagacgtcgtccacagcatccaga

SEQ ID NO: 269345 - DNA, 120 bp, Artificial Sequence
  ENSG00000127084_11 (sequence is synthesized)
agcaggaggtatgcgggaacctgacgctgcagcaccacatgctggagcccgtgcagagggtcccccggtacgagctgctgctcaaggactatctgaagaggctcccgcaggacgccccag

SEQ ID NO: 269346 - DNA, 120 bp, Artificial Sequence
  ENSG00000127084_12 (sequence is synthesized)
accggaaggatgcggagaggtccttggagctcatctccacagccgccaaccactccaatgctgccattcggaaagtggagaaaatgcacaagctcttggaggtgtacgagcagctgggtg

SEQ ID NO: 269347 - DNA, 120 bp, Artificial Sequence
  ENSG00000127084_13 (sequence is synthesized)
cagccaagaacggcaccccccaggaccgccacctcttcctgttcaacagcatgatcctttactgtgtgcccaagctgcggctcatgggccagaagttcagcgtccgggagaagatggaca

SEQ ID NO: 269348 - DNA, 120 bp, Artificial Sequence
  ENSG00000127084_14 (sequence is synthesized)
tctcaggcctccaggtgcaggatatcgtcaagccaaacacagcacatacattcatcataacaggaagaaaaaggtccctggagctgcagacgcggacagaggaagagaagaaagaatgga

SEQ ID NO: 269349 - DNA, 120 bp, Artificial Sequence
  ENSG00000127084_15 (sequence is synthesized)
ttcagatcatccaggccaccatcgagaagcacaaacagaacagcgaaaccttcaaggcttttggtggcgccttcagccaggatgaggaccccagcctctctccagacatgcctatcacga

SEQ ID NO: 269350 - DNA, 120 bp, Artificial Sequence
  ENSG00000127084_16 (sequence is synthesized)
gcaccagccctgtggagcctgtggtgaccaccgaaggcagttcgggtgcagcagggctcgagcccagaaaactatcctctaagaccagacgtgacaaggagaagcagagctgtaagagct

SEQ ID NO: 269351 - DNA, 120 bp, Artificial Sequence
  ENSG00000127084_17 (sequence is synthesized)
gtggtgagaccttcaactccatcaccaagaggaggcatcactgcaagctgtgtggggcggtcatctgtgggaagtgctccgagttcaaggccgagaacagccggcagagccgtgtctgca

SEQ ID NO: 269352 - DNA, 120 bp, Artificial Sequence
  ENSG00000127084_18 (sequence is synthesized)
gagattgtttcctgacacagccagtggcccctgagagcacagagaagacacccactgcagacccccagcccagcctgctctgcggccccctgcggctgtcagagagcggtgagacctgga

SEQ ID NO: 269353 - DNA, 120 bp, Artificial Sequence
  ENSG00000127084_19 (sequence is synthesized)
gcgaggtgtgggccgccatccccatgtcagatccccaggtgctgcacctgcagggaggcagccaggacggccggctgccccgcaccatccctctccccagctgcaaactgagtgtgccgg

SEQ ID NO: 269354 - DNA, 120 bp, Artificial Sequence
  ENSG00000127084_20 (sequence is synthesized)
accctgaggagaggctggactcggggcatgtgtggaagctgcagtgggccaagcagtcctggtacctgagcgcctcctccgcagagctgcagcagcagtggctggaaaccctaagcactg

SEQ ID NO: 269355 - DNA, 120 bp, Artificial Sequence
  ENSG00000127084_21 (sequence is synthesized)
ctgcccatggggacacggcccaggacagcccgggggccctgcagcttcaggtccctatgggcgcagctgctccgtgagctgagtctcccactgccctgcacaccaccacattggacctgt

SEQ ID NO: 269356 - DNA, 120 bp, Artificial Sequence
  ENSG00000127084_22 (sequence is synthesized)
gctgtcctgggaggtggtgttggaggccccatgaagagcgccctggactgctgagggtgggccaacagcccagagctcaggacacttggctttggggggaaggaaactgaggcccagaga

SEQ ID NO: 269357 - DNA, 120 bp, Artificial Sequence
  ENSG00000127084_23 (sequence is synthesized)
ggggcaaccactggccaagggtcacccagcaagttttggctaagagcctggcctccagccccagcagtgtggcccagagcaggggccgactgccaaagtaaccatcatccatatgggccg

SEQ ID NO: 269358 - DNA, 120 bp, Artificial Sequence
  ENSG00000127084_24 (sequence is synthesized)
tgtggtgatgctggcccggaaggcagaaagaggcagcatgggcactgccagggacagccacatcctgctggtctgcagcgtggtccaccccgcctctgcccagcctgtctacaccgtgtg

SEQ ID NO: 269359 - DNA, 120 bp, Artificial Sequence
  ENSG00000127084_25 (sequence is synthesized)
agctgaatcgtgacttgcttcccacctcctttctctgtcctctcctgaggttctgcctgcagcccccaggaggtgggcctgccccatcctagctggactcatggttcctaaataaccacg

SEQ ID NO: 269360 - DNA, 120 bp, Artificial Sequence
  ENSG00000127084_26 (sequence is synthesized)
ctcagaagctctgctaggacttaccccagccactgagtggcaggcgcatgagatttgtggctgttcctgatgctagtggcacacagtgcttatctgcataaataaacactggccaccagc

SEQ ID NO: 269361 - DNA, 120 bp, Artificial Sequence
  ENSG00000127084_27 (sequence is synthesized)
agtcctgggctgattggcgcgggaagcacagcccggccctccaggtccccaaggagaccccagcctcctgctgcccactgtgagcgacctccccggggctcctctggaagcggctccggc

SEQ ID NO: 269362 - DNA, 120 bp, Artificial Sequence
  ENSG00000127084_28 (sequence is synthesized)
attccctgctgggcccctcctccctgaagatctacacagcagatctactcacaaaagtccacccagcagaagcaggaggatggtggttgtgggtcctctgtgagcagccctgttaacctt

SEQ ID NO: 269363 - DNA, 120 bp, Artificial Sequence
  ENSG00000127084_29 (sequence is synthesized)
taaaccagcacggccgccgcagctgtgagcctagcacctgatcagtggagagctgtggattgcatgtttgtttgccattgcccccgccaccctgcaagttgcaccttctagaatcagcaa

SEQ ID NO: 269364 - DNA, 120 bp, Artificial Sequence
  ENSG00000127084_30 (sequence is synthesized)
gccaagctcctctcacccagcgtaatgatgcggaaatgcaaatgcaccatcatgttgtgacccatattgcgaaaattagaaaaaaggaagttgtgtttcgctattgcacgaagttcagcc

SEQ ID NO: 269365 - DNA, 120 bp, Artificial Sequence
  ENSG00000127084_31 (sequence is synthesized)
agacacctgctcctgtgccccagcagctccagctgcctctgctttcggagtgtccctgggaccaggatagatgtgggtgtgtctcagtggggcccccaggctgggaacacactcggaaga

SEQ ID NO: 269366 - DNA, 120 bp, Artificial Sequence
  ENSG00000127084_32 (sequence is synthesized)
tcccgtgtgtgcacgctggcttctcgggaccagccagggccaaggcttgggaaccatttgcatccaggagttagatgggaacaagtgtcactcctggtcacctggttggagggcatggat

SEQ ID NO: 269367 - DNA, 120 bp, Artificial Sequence
  ENSG00000127084_33 (sequence is synthesized)
ccaggccttgaggcccacctgaggggagatactgcccttctctctgcctgcctcacctccagctgtcagagggtgagcagggccctggaggcaggcaccccctcctcctcctccccgtcc

SEQ ID NO: 269368 - DNA, 120 bp, Artificial Sequence
  ENSG00000127084_34 (sequence is synthesized)
ccttctcctcctcctccccgtccccttctcctcctcctccccgtccccttctcctcttcctctccctccttcctctccctccgcctcgctgtctttctccttctcctctccctcctcctc

SEQ ID NO: 269369 - DNA, 120 bp, Artificial Sequence
  ENSG00000127084_35 (sequence is synthesized)
ctgctccttctcctccccgtaccctttttctactcttccctctccttctcctcctcctttctctccctcctcctccccctccccttctcctcctctctttctcttcctcttttcctcctc

SEQ ID NO: 269370 - DNA, 120 bp, Artificial Sequence
  ENSG00000127084_36 (sequence is synthesized)
cactcctctttctgagagtagctgctgctttccctgacttccttcctcaagaatacagtctattctggggggttgcaggacagctgaaaaagaaaacgtgagtttccagaaaagcacatc

SEQ ID NO: 269371 - DNA, 120 bp, Artificial Sequence
  ENSG00000127084_37 (sequence is synthesized)
gccctttctctccactcgacacagcctgcggtttgcagtgccagctgcacgttggagtctcctgggaagcttctagtgttgatctccctcctagaggctcagtgaggtgatcggggggtc

SEQ ID NO: 269372 - DNA, 120 bp, Artificial Sequence
  ENSG00000127084_38 (sequence is synthesized)
agtgtgttttcagagtcccagctgctctgacttacagctgtggttggagccctgacctaggtccttggtctaagaagtcaaggatgtaagtctattaggactgagtgttgaatggtcttg

SEQ ID NO: 269373 - DNA, 120 bp, Artificial Sequence
  ENSG00000127084_39 (sequence is synthesized)
atggtgaagaaggaccttgcactgcctaccgagctccctcatgcctgcaatttaaataccgaggtgtgttctgagagccccaggtccttggggcacgggcctccagggccctgtaaggtg

SEQ ID NO: 269374 - DNA, 120 bp, Artificial Sequence
  ENSG00000127084_40 (sequence is synthesized)
gactctggcctcgaaggggggcccaggtctgaggggtccagctctggcagggggtgtctaagccacgtccaaatggtggacagtagctccaacagtgacatgacagagggagggcctgtg

SEQ ID NO: 269375 - DNA, 120 bp, Artificial Sequence
  ENSG00000127084_41 (sequence is synthesized)
tgtgtggtgtgtgtgtgtgtgctgtgtgtgcacgcacgtgcatgtatatggtgtgtgtagaactgacacgcttgaagtccctgtcccgtgacccaccctcaggtacttgctgttgggttt

SEQ ID NO: 269376 - DNA, 120 bp, Artificial Sequence
  ENSG00000127084_42 (sequence is synthesized)
tcctatgattttgatgtgtcctgacccagcatatggatgccctccccttggagggcccagcctgcaaaccccatctgataccacacatgcctatgtcctgcaggcttctagtgacccttg

SEQ ID NO: 269377 - DNA, 120 bp, Artificial Sequence
  ENSG00000127084_43 (sequence is synthesized)
caagccgggtgaggctggtcccagtctctgtgcagatcttggccatgtctccacagccagctccccccaagcagtggccctggccctaccccagcctcctcagaacaggggtgaccactg

SEQ ID NO: 269378 - DNA, 120 bp, Artificial Sequence
  ENSG00000127084_44 (sequence is synthesized)
aaggatcccatgtgagaagctcactggggcccctggggggacctgcgggcagctctcgttcctcacctgtgccatccctcttgcagttcaacagcatgatcctttactgtgtgcccaagc

SEQ ID NO: 269379 - DNA, 120 bp, Artificial Sequence
  ENSG00000127124_0 (sequence is synthesized)
ggtctggactcctagtggaaaagacaagcgaggcatgggttggctctggattcagaaaacagctgctgattagattctgtgtctgcaggctgaatttattccgtgtttttcagcagcacg

SEQ ID NO: 269380 - DNA, 120 bp, Artificial Sequence
  ENSG00000127124_1 (sequence is synthesized)
aattcaagagggatgcttctgtttgggtttctgatcgtgatttatatttattcagaggaataacagagggtggatctgttcccggcgcgagcatgctcacaaccagccgactctcccatt

SEQ ID NO: 269381 - DNA, 120 bp, Artificial Sequence
  ENSG00000127124_2 (sequence is synthesized)
atccagctgcctagtttggtgcttcaatgtacatggctattccgtgtgcatatgtgtgtatacaaacacgcatgcatgcctggatggacatacgtatgcacaggttattttttaaggaca

SEQ ID NO: 269382 - DNA, 120 bp, Artificial Sequence
  ENSG00000127124_3 (sequence is synthesized)
attctttcaataaggtctttaccccttacttgaaacaggtgttcatgaaaaaaatgcacaaaatcctgcctggccggaataattcatgaagaaggggctggatccgtgggtcagagaaca

SEQ ID NO: 269383 - DNA, 120 bp, Artificial Sequence
  ENSG00000127124_4 (sequence is synthesized)
caggaccagtttgccatcccaaggccgaaggcctccctccaacacagttctccaagctctagaaatctctgacacatcttgaccatgagaccacggctggtttttggcaggattcgaggc

SEQ ID NO: 269384 - DNA, 120 bp, Artificial Sequence
  ENSG00000127124_5 (sequence is synthesized)
acaaacccagcagcctcaacctagttcatggaggagcctcgcggggtcctggccaagcaagcccgcccctctggtgggaagagcggcgcctaggtggagggtggctgccgtaggagtgga

SEQ ID NO: 269385 - DNA, 120 bp, Artificial Sequence
  ENSG00000127124_6 (sequence is synthesized)
catgaatgctggctttcagagagaacagcgtttcagttttggtcatcggaagtggtgccttcagcacagaagaagagcgtgatttctcctccaaggccgttgatctccaacccagaacta

SEQ ID NO: 269386 - DNA, 120 bp, Artificial Sequence
  ENSG00000127124_7 (sequence is synthesized)
aaggggagaagagccacccccagcatccagcgtggcatctcttgtgccaggaccagggatgactgggccatggacacagatgtctccaaccttcaaccgtttgcatagcacacgggggac

SEQ ID NO: 269387 - DNA, 120 bp, Artificial Sequence
  ENSG00000127124_8 (sequence is synthesized)
tcgtgggggccacctgccactgccagctgaaacaatacaatggcaatactgacatccttcatgacgttttcccgacagacattcaggcagaaagtgctggtgcgttttctgtctgcaaag

SEQ ID NO: 269388 - DNA, 120 bp, Artificial Sequence
  ENSG00000127124_9 (sequence is synthesized)
tagagggccatgcctcaccaatagaatagcgtgggccctgatgacctgctccgagtccactcacagccagtgacacttgcaaaaaactcccaaagccgtcttgggtttggctcccacagc

SEQ ID NO: 269389 - DNA, 120 bp, Artificial Sequence
  ENSG00000127124_10 (sequence is synthesized)
tcttgaccaatgtggccaaagctggacacctccttgggacactgggattattcataaatgcagcccgccctgactctccctgaatagcatctgaagtctttgtgaaggtcatggatcctg

SEQ ID NO: 269390 - DNA, 120 bp, Artificial Sequence
  ENSG00000127124_11 (sequence is synthesized)
aacaaagtgtcaagggcaccaagaaggctgagggaagtccccggaagcggctgaccaaaggagaggccattcagaccagtgtttcttccagcgtcccatacccaggcagcggcacagctg

SEQ ID NO: 269391 - DNA, 120 bp, Artificial Sequence
  ENSG00000127124_12 (sequence is synthesized)
ccacccaagagagccccgcccaagagctcttagccccgcagcccttcccgggcccctcatcagttcttagggaaggctctcaggagaaaacgggccagcagcagaagccccccaaaaggc

SEQ ID NO: 269392 - DNA, 120 bp, Artificial Sequence
  ENSG00000127124_13 (sequence is synthesized)
cccccatcgaagcatccgtccacatctcacagcttccgcagcaccctctgacaccagcattcatgtcgcctggcaaacctgagcatctcctggaggggtccacatggcaactggttgacc

SEQ ID NO: 269393 - DNA, 120 bp, Artificial Sequence
  ENSG00000127124_14 (sequence is synthesized)
ccatgagacctggaccctctggctccttcgtggcccctgggctccatcctcagagccagctccttccttcccacgcttccatcattccccccgaggaccttcctggagtccccaaagtct

SEQ ID NO: 269394 - DNA, 120 bp, Artificial Sequence
  ENSG00000127124_15 (sequence is synthesized)
tcgtgcctcgtccttcccaggtctccttgaagcccacagaagaggcacacaagaaggagaggaagccccagaagccaggcaagtacatctgccagtactgcagccggccctgtgccaagc

SEQ ID NO: 269395 - DNA, 120 bp, Artificial Sequence
  ENSG00000127124_16 (sequence is synthesized)
ccagcgtgctccagaagcacattcgctcacacacaggtgagaggccctacccctgcggcccctgtggcttctccttcaagaccaagagtaatctctacaagcacaggaagtcccatgccc

SEQ ID NO: 269396 - DNA, 120 bp, Artificial Sequence
  ENSG00000127124_17 (sequence is synthesized)
accgcatcaaagcaggcctggcctcaggcatgggtggcgagatgtacccacatgggctggagatggagcggatccctggggaagagtttgaggagcccactgagggagaaagcacagatt

SEQ ID NO: 269397 - DNA, 120 bp, Artificial Sequence
  ENSG00000127124_18 (sequence is synthesized)
ctgaagaggagactagtgccacctctggtcaccctgcagagctctccccaagacccaagcagccccttctctccagcgggctatacagctctgggagccacagttccagccacgaacgct

SEQ ID NO: 269398 - DNA, 120 bp, Artificial Sequence
  ENSG00000127124_19 (sequence is synthesized)
gttccctgtcccagtccagcacagcccagtcactcgaagacccccctccatttgtggaaccctcatctgagcaccccctgagccataaacctgaagacacccacacgattaagcagaagc

SEQ ID NO: 269399 - DNA, 120 bp, Artificial Sequence
  ENSG00000127124_20 (sequence is synthesized)
tggccctccgcttaagcgagaggaagaaggtgatcgatgagcaggcgtttctgagcccaggcagcaaagggagtactgagtctgggtatttctctcgctccgagagtgcagagcagcagg

SEQ ID NO: 269400 - DNA, 120 bp, Artificial Sequence
  ENSG00000127124_21 (sequence is synthesized)
tcagccccccaaacaccaacgccaagtcctacgctgagatcatctttggcaagtgtgggcgaataggacagcggaccgccatgctgacagccacctccacccagcccctcctgcccctgt

SEQ ID NO: 269401 - DNA, 120 bp, Artificial Sequence
  ENSG00000127124_22 (sequence is synthesized)
ccaccgaagacaagcccagcctggtgcctttgtctgtaccccggacgcaggtgatcgagcacatcacgaagctcatcaccatcaacgaggccgtggtggacaccagcgagatcgacagcg

SEQ ID NO: 269402 - DNA, 120 bp, Artificial Sequence
  ENSG00000127124_23 (sequence is synthesized)
tgaagccaaggcggagctcactgtccaggcgcagcagcatggagtccccaaaatccagcctctaccgggagcccctgtcatcccacagtgagaaaaccaagcctgaacaatcactgctga

SEQ ID NO: 269403 - DNA, 120 bp, Artificial Sequence
  ENSG00000127124_24 (sequence is synthesized)
gcctccagcacccgcccagtaccgccccccctgtgcctctcctgagaagccactcaatgccttctgccgcctgcactatcagcaccccccaccaccccttccgaggtagctactccttcg

SEQ ID NO: 269404 - DNA, 120 bp, Artificial Sequence
  ENSG00000127124_25 (sequence is synthesized)
atgaccatatcaccgactccgaagccctgagccacagcagtcacgtgtttacctcccacccccggatgctgaagcgccagccggcaatcgaattacctttgggaggggaatacagttctg

SEQ ID NO: 269405 - DNA, 120 bp, Artificial Sequence
  ENSG00000127124_26 (sequence is synthesized)
aggagcctggcccaagcagcaaagacacagcctccaagccctcggacgaagtggaacccaaggaaagcgagcttaccaaaaagaccaagaagggtttgaaaacaaaaggggtgatctacg

SEQ ID NO: 269406 - DNA, 120 bp, Artificial Sequence
  ENSG00000127124_27 (sequence is synthesized)
aatgtaacatatgtggtgctcggtacaagaaaagggataactacgaagcccacaaaaaatactactgctcagagcttcagatcgcaaagcccatctctgcaggcacccacacatctccag

SEQ ID NO: 269407 - DNA, 120 bp, Artificial Sequence
  ENSG00000127124_28 (sequence is synthesized)
aagctgaaaagagtcagattgagcatgagccgtggtcccaaatgatgcattacaaactgggaaccaccctggaactcactccactgaggaagaggaggaaagagaagagccttggggacg

SEQ ID NO: 269408 - DNA, 120 bp, Artificial Sequence
  ENSG00000127124_29 (sequence is synthesized)
aggaagagccacctgcctttgagtccacaaaaagtcagtttggcagccccgggccatctgatgctgctcggaaccttcccctggagtccaccaagtcaccagcagaaccaagtaaatcag

SEQ ID NO: 269409 - DNA, 120 bp, Artificial Sequence
  ENSG00000127124_30 (sequence is synthesized)
tgccctccttggagggacccacgggcttccagccaaggactcccaagccagggtccggttcagaatcagggaaggagaggagaacaacgtccaaagaaatttctgtcatccagcacacca

SEQ ID NO: 269410 - DNA, 120 bp, Artificial Sequence
  ENSG00000127124_31 (sequence is synthesized)
gctcctttgagaaatctgattctctcgagcagccgagtggcttggaaggggaagacaaacctctggcccagttcccatcacccccacctgccccacacggacgctctgctcactccctgc

SEQ ID NO: 269411 - DNA, 120 bp, Artificial Sequence
  ENSG00000127124_32 (sequence is synthesized)
agcctaagttggtccgccagcccaacattcaggttcctgagatcctagtaactgaggagcctgaccggccggacacagagccagagccgccccctaaggaacctgagaagactgaggagt

SEQ ID NO: 269412 - DNA, 120 bp, Artificial Sequence
  ENSG00000127124_33 (sequence is synthesized)
tccaatggccccagcgcagccagacacttgcccagctcccagctgagaagctgccacccaaaaagaagaggttgcgcctggcagagatggcccaatcatcaggggagtccagcttcgagt

SEQ ID NO: 269413 - DNA, 120 bp, Artificial Sequence
  ENSG00000127124_34 (sequence is synthesized)
cctctgtgcctctgtctcgcagcccgagccaggaaagcaatgtctctttgagtgggtccagccgctcagcctcgtttgagagggatgaccatgggaaagccgaggcccccagtccctcat

SEQ ID NO: 269414 - DNA, 120 bp, Artificial Sequence
  ENSG00000127124_35 (sequence is synthesized)
ctgacatgcgccccaaacccctgggcacccacatgttgactgtccccagccaccacccacatgcccgagagatgcggaggtcagcctcagagcagagccccaacgtttcccattctgccc

SEQ ID NO: 269415 - DNA, 120 bp, Artificial Sequence
  ENSG00000127124_36 (sequence is synthesized)
acatgaccgagacacgcagcaaatcctttgactatggcagcttgtccttgacaggcccttctgctccagccccagtggctccaccagcgcgggtggccccgccagagagaagaaaatgct

SEQ ID NO: 269416 - DNA, 120 bp, Artificial Sequence
  ENSG00000127124_37 (sequence is synthesized)
tcttggtgagacaggcctctctgagcaggcctccagaatctgagttggaggttgcccccaagggaagacaggagagcgaagaaccacagccctcatccagtaaaccctctgccaaaagct

SEQ ID NO: 269417 - DNA, 120 bp, Artificial Sequence
  ENSG00000127124_38 (sequence is synthesized)
cattgtcccagatttcctctgcggccacctcacatggtggacccccgggaggcaagggcccagggcaggacaggcccccattggggcccactgtgccctacacagaagcactgcaagtgt

SEQ ID NO: 269418 - DNA, 120 bp, Artificial Sequence
  ENSG00000127124_39 (sequence is synthesized)
tccaccaccccgttgcccagacacccctgcatgagaagccatacctgcccccaccagtctcccttttctccttccagcatctcgtgcagcatgagccaggacagtctccagaattcttct

SEQ ID NO: 269419 - DNA, 120 bp, Artificial Sequence
  ENSG00000127124_40 (sequence is synthesized)
ccacccaggccatgtccagcctcctgtcctcaccatactccatgcccccacttcctccctccttatttcaagccccaccgcttcctctccagcctactgttctgcacccaggccaactcc

SEQ ID NO: 269420 - DNA, 120 bp, Artificial Sequence
  ENSG00000127124_41 (sequence is synthesized)
atctcccccagctcatgcctcacccagccaacatccccttcaggcagcccccttccttcctccccatgccatacccgacctcctcagcactgtcttctgggtttttcctgcctctgcaat

SEQ ID NO: 269421 - DNA, 120 bp, Artificial Sequence
  ENSG00000127124_42 (sequence is synthesized)
cccagtttgcacttcagctccctggtgatgtggaaagccatctgccccagatcaaaaccagcctggccccactggcaacaggaagtgctggcctctcccccagcacagagtacagcagtg

SEQ ID NO: 269422 - DNA, 120 bp, Artificial Sequence
  ENSG00000127124_43 (sequence is synthesized)
acatccggctaccccctgtggctcccccagccagctcctcagcacctacatcagctcctccactggccctgcctgcctgtccagacaccatggtgtccctggttgtgcctgtccgtgttc

SEQ ID NO: 269423 - DNA, 120 bp, Artificial Sequence
  ENSG00000127124_44 (sequence is synthesized)
agaccaatatgccgtcctatgggagcgcaatgtacaccaccctttcccagatcttggtcacccagtcccaaggcagctcagcaactgtggcacttcccaagtttgaggaacccccatcaa

SEQ ID NO: 269424 - DNA, 120 bp, Artificial Sequence
  ENSG00000127124_45 (sequence is synthesized)
aggggacgactgtatgtggtgcagatgtgcatgaggttgggcccggcccttctgggttaagtgaagagcaaagcagagctttcccaactccatacctgagagtgcctgtgacattacctg

SEQ ID NO: 269425 - DNA, 120 bp, Artificial Sequence
  ENSG00000127124_46 (sequence is synthesized)
aaagaaaaggcacttccctgtcatcagagagtatcttgagcctggaggggagttcatcaacagcagggggaagcaaacgtgtcctttcaccagctggcagccttgaacttaccatggaaa

SEQ ID NO: 269426 - DNA, 120 bp, Artificial Sequence
  ENSG00000127124_47 (sequence is synthesized)
cccagcagcaaaaaagagtgaaggaggaggaggcttccaaggcagatgaaaaacttgagctggtaaaaccatgcagtgtggtccttaccagcaccgaggatgggaagaggccagagaaat

SEQ ID NO: 269427 - DNA, 120 bp, Artificial Sequence
  ENSG00000127124_48 (sequence is synthesized)
cccacttaggcaaccagggccaaggcaggagggagctagaaatgctgtccagcctgtcctcagatccatctgacacaaaggaaattcctcccctccctcaccctgcattgtcccatggga

SEQ ID NO: 269428 - DNA, 120 bp, Artificial Sequence
  ENSG00000127124_49 (sequence is synthesized)
cagccccaggctcagaagctttgaaggaatatccccagccatctggcaaacctcaccgaagagggttgaccccactgagcgtgaagaaagaagattccaaggaacaacctgatctcccct

SEQ ID NO: 269429 - DNA, 120 bp, Artificial Sequence
  ENSG00000127124_50 (sequence is synthesized)
ccttggcacctccgagctctctgcctctgtcagaaacgtcctccagaccagccaagtcacaagaaggtacggactcaaagaaggtactgcagttccccagcctccacacaaccactaatg

SEQ ID NO: 269430 - DNA, 120 bp, Artificial Sequence
  ENSG00000127124_51 (sequence is synthesized)
tcagttggtgctatttaaactacattaagccaaatcacatccagcatgcagataggaggtcctctgtttacgctggttggtgcataagtttgtacaaccccaaccttccgggggtttcca

SEQ ID NO: 269431 - DNA, 120 bp, Artificial Sequence
  ENSG00000127124_52 (sequence is synthesized)
ctcctgaggtctaagcagaaagtgagcaaagagacatacaccatggccacagctccgcatcctgaggcaggaaggcttgtgccatccagctcccgcaagccccgcatgacagaggttcac

SEQ ID NO: 269432 - DNA, 120 bp, Artificial Sequence
  ENSG00000127124_53 (sequence is synthesized)
ctcccttcactggtttccccggaaggccagaaagatctagctagagtggagaaggaagaagagaggagaggggagccggaggaggatgctcctgcctcccagagaggggagccggcgagg

SEQ ID NO: 269433 - DNA, 120 bp, Artificial Sequence
  ENSG00000127124_54 (sequence is synthesized)
atcaaaatcttcgaaggagggtacaaatcaaacgaagagtatgtatatgtgcgaggccgcggccgagggaaatatgtttgtgaggagtgtggaattcgctgcaagaagcccagcatgctg

SEQ ID NO: 269434 - DNA, 120 bp, Artificial Sequence
  ENSG00000127124_55 (sequence is synthesized)
aagaaacacatccgcacccacactgacgtccggccctatgtgtgcaagcactgtcactttgcttttaaaaccaaagggaatctgactaagcacatgaagtcgaaggcccacagcaaaaag

SEQ ID NO: 269435 - DNA, 120 bp, Artificial Sequence
  ENSG00000127124_56 (sequence is synthesized)
tgccaagagacaggggtgctggaggagctggaagccgaagaaggaaccagtgacgacctgttccaggactcggaaggacgagagggttcagaggctgtggaggagcaccagttttcggac

SEQ ID NO: 269436 - DNA, 120 bp, Artificial Sequence
  ENSG00000127124_57 (sequence is synthesized)
ctggaggactcggactcagactcagacctggacgaagacgaggatgaggatgaggaggagagccaggatgagctgtccagaccatcctcagaggcgcccccgcctggcccaccacatgca

SEQ ID NO: 269437 - DNA, 120 bp, Artificial Sequence
  ENSG00000127124_58 (sequence is synthesized)
ctgcgggcagactcctcacccatcctgggccctcagcccccagatgcccccgcctctggcacggaggctacacgaggcagctcggtctcggaagctgagcgcctgacagccagcagctgc

SEQ ID NO: 269438 - DNA, 120 bp, Artificial Sequence
  ENSG00000127124_59 (sequence is synthesized)
tccatgtccagccagagcatgccgggcctcccctggctgggaccggcccctctgggctctgtggagaaagacacaggctcagccttgagctacaagcctgtgtccccaagaagaccgtgg

SEQ ID NO: 269439 - DNA, 120 bp, Artificial Sequence
  ENSG00000127124_60 (sequence is synthesized)
tccccaagcaaagaagcaggcagccgtccaccactagcccgcaaacactcgctaaccaaaaacgactcatctccccagcgatgctccccggcccgagaaccacaggcctcagccccaagc

SEQ ID NO: 269440 - DNA, 120 bp, Artificial Sequence
  ENSG00000127124_61 (sequence is synthesized)
ccacctggcctgcacgtggacccaggaaggggcatgggcgctctcccttgtgggtctccaagacttcagctgtctcctctcaccctctgccccctgggaagagaactggcccctcgagca

SEQ ID NO: 269441 - DNA, 120 bp, Artificial Sequence
  ENSG00000127124_62 (sequence is synthesized)
catgtgctctccaaactcgagggtaccaccgacccaggcctccccagatactcgcccaccaggagatggtctccaggtcaggccgagtcaccaccacggtcagcgccgccagggaagtgg

SEQ ID NO: 269442 - DNA, 120 bp, Artificial Sequence
  ENSG00000127124_63 (sequence is synthesized)
gccttggctgggccgggcagcccctcagcgggggagcatggcccaggcttggggctggacccacgggttctcttcccgcccgcgcctctacctcacaagctcctcagcagaagcccagag

SEQ ID NO: 269443 - DNA, 120 bp, Artificial Sequence
  ENSG00000127124_64 (sequence is synthesized)
acctgcgcctccccgtggcagaaggccgagtcccgaagtccctcctgctcacccggccctgctcatcctctctcctcccgacccttctccgccctccatgacttccacggccacatcctg

SEQ ID NO: 269444 - DNA, 120 bp, Artificial Sequence
  ENSG00000127124_65 (sequence is synthesized)
gcccggacagaggagaacatcttcagccacctgcctctgcactcccagcacttgacccgtgccccatgtcccttgattcccatcggtgggatccagatggtgcaggcccggccaggagcc

SEQ ID NO: 269445 - DNA, 120 bp, Artificial Sequence
  ENSG00000127124_66 (sequence is synthesized)
caccccaccctgctgccagggcccaccgcagcctgggtcagtggcttctccgggggtggcagcgacctgacaggggcccgggaggcccaggagcgaggccgctggagtcccactgagagc

SEQ ID NO: 269446 - DNA, 120 bp, Artificial Sequence
  ENSG00000127124_67 (sequence is synthesized)
tcgtcagcctccgtgtcgcctgtggctaaggtctccaaattcacactctcctcagagctggagggcggggactaccccaaggagagggagaggaccggcggaggcccgggcaggcctcct

SEQ ID NO: 269447 - DNA, 120 bp, Artificial Sequence
  ENSG00000127124_68 (sequence is synthesized)
gactggacaccccatgggaccggggcacctgcagagcccacacccacgcacagcccctgcaccccacccgacaccttgccccggccgccccagggacgccgggcagcgcagtcctggagc

SEQ ID NO: 269448 - DNA, 120 bp, Artificial Sequence
  ENSG00000127124_69 (sequence is synthesized)
ccccgcttggagtccccgcgtgcaccgaccaaccccgagccttctgccaccccgccgctggaccgcagcagctctgtgggctgcctggcagaggcctctgcccgcttcccagcccggacg

SEQ ID NO: 269449 - DNA, 120 bp, Artificial Sequence
  ENSG00000127124_70 (sequence is synthesized)
aggaacctctccggggaacccaggaccaggcaggactcccccaagccctcaggaagtggggagcccagggcacatccacatcagcctgaggacagggttccccccaacgcttagcctctc

SEQ ID NO: 269450 - DNA, 120 bp, Artificial Sequence
  ENSG00000127124_71 (sequence is synthesized)
tccaactgcttcagcatctggcttccagtgtccagcaacagacgtttccagccactttcctcgaatcatcccacttcctcagccccatctgtccctccgtccaggagctctcacggcccc

SEQ ID NO: 269451 - DNA, 120 bp, Artificial Sequence
  ENSG00000127124_72 (sequence is synthesized)
atctgttgtaccttcccatgtatgcagttacctgtgcctttttctacaccttttgttgcttaaaaagaaacaaaacaaatcacatacatacatttaaaaaaaaaacaacaacccacgagg

SEQ ID NO: 269452 - DNA, 120 bp, Artificial Sequence
  ENSG00000127124_73 (sequence is synthesized)
agtctgaggctgtgaatagtttatggttttggggaaaggctgatggtgaagcctcctgaccctccccgctgtggttggcagccacccaccccagaggctggcagagggaaaggggtacac

SEQ ID NO: 269453 - DNA, 120 bp, Artificial Sequence
  ENSG00000127124_74 (sequence is synthesized)
tgagggagaaaggaaaaggaaacttcaaacaatatagaattaaatgtaaaaggaagcactcctgtgtacagatgcgatcaaggttcctgtttattgccacttcacccccctgcccagctc

SEQ ID NO: 269454 - DNA, 120 bp, Artificial Sequence
  ENSG00000127124_75 (sequence is synthesized)
gtagccacccctctctgccagcagaaaggccagtgtccccaggcagaggggcacaaacacaggcaggtgacccccacccaggccccagcaggcaggcccagaaaaactaatcttttcctt

SEQ ID NO: 269455 - DNA, 120 bp, Artificial Sequence
  ENSG00000127124_76 (sequence is synthesized)
ttttttttttttttttttttttgcaagaaaataaaatgatacttttcctaggatttcaacacaaaataataggtgcaggtagaaggaggagggctggctccccaagggctcctggatact

SEQ ID NO: 269456 - DNA, 120 bp, Artificial Sequence
  ENSG00000127124_77 (sequence is synthesized)
ctggtagtctgagtcatgggcccatcctggcactccacaggtgggcaggccaccccacccacgcacccccactccagacacctcccttctgcaccccaccctggccccctgggctgggga

SEQ ID NO: 269457 - DNA, 120 bp, Artificial Sequence
  ENSG00000127124_78 (sequence is synthesized)
aggagccctgactgtccgtccctggctcccaagcccctgaccgaggcctcactctcctgttgcctcctctgttctaaaaccaccaaaccacccacaaaggcagaagtggcagggcccgag

SEQ ID NO: 269458 - DNA, 120 bp, Artificial Sequence
  ENSG00000127124_79 (sequence is synthesized)
ccctagcggccgttcctgagactgggttttgggttttgtttcatcttggtccctggggtacaagggagcctgttcccctcatggctgggtttttccagttctccacagcagaggtttgcg

SEQ ID NO: 269459 - DNA, 120 bp, Artificial Sequence
  ENSG00000127124_80 (sequence is synthesized)
gggaactgtttcaggaccactttgccacaggaccgtttccccccgtccctgcccctgtctccactaccccaaggaaatacccacaactgtggctggtggatacggcctggacctgtttgc

SEQ ID NO: 269460 - DNA, 120 bp, Artificial Sequence
  ENSG00000127124_81 (sequence is synthesized)
tgtcttacacctcttttttaaaaagagagaggatggtgtttgatacttcacccagccaccacagattcttttgacctagaggatttttgaattgtcctaactcgttggaattctccaaag

SEQ ID NO: 269461 - DNA, 120 bp, Artificial Sequence
  ENSG00000127124_82 (sequence is synthesized)
caatcagtgtgagccagtgcctcttccttacccacatctctactttcaagaagctgccctgcatttcctggggcaaaactctactttgtaagaaaaataataggaccagaaatttaaatc

SEQ ID NO: 269462 - DNA, 120 bp, Artificial Sequence
  ENSG00000127124_83 (sequence is synthesized)
ccaaattgaactatggaacttgaactctagcgtgttcgccccaactgggagaggtgagctttttcccagtgtttcagaactgattttctttactttctacaagggagggcagcacaggga

SEQ ID NO: 269463 - DNA, 120 bp, Artificial Sequence
  ENSG00000127124_84 (sequence is synthesized)
ctacggttgaggcccgtgaaggctgggtttgatgccaccctatacagagcagggacctctctggctaatccccagtcctcagccaggctgtgtgaatcaagtgcctgccccagggctctt

SEQ ID NO: 269464 - DNA, 120 bp, Artificial Sequence
  ENSG00000127124_85 (sequence is synthesized)
gagctattgaagctgcttgggtacaggacacagtaggtggggagggttaagacccttctgtgagttccctgtgcggggctgtacttgcctcttccaattcgtggcctttccctgcttggt

SEQ ID NO: 269465 - DNA, 120 bp, Artificial Sequence
  ENSG00000127124_86 (sequence is synthesized)
ccctactagacagacaaaccagccacagtccagcctgcagccagaccaccttgttcactcattctcctttgcctcagagctaagacaaaaatgagacagaaggcagggctccctgggagt

SEQ ID NO: 269466 - DNA, 120 bp, Artificial Sequence
  ENSG00000127124_87 (sequence is synthesized)
ccactgtgctccagggttctggggaatcagggttagccagcagctcctggctgcttccctcagagactagggctctcatcctccccaagagaagcagcaagcccagcctggaccacactg

SEQ ID NO: 269467 - DNA, 120 bp, Artificial Sequence
  ENSG00000127124_88 (sequence is synthesized)
tccatattgctggacagtggcctgacagaaagtgactcctccaagtcccaggaggccagggcttttctcatccttgcctttcagccctaacccatgggactgcccacggattggagactt

SEQ ID NO: 269468 - DNA, 120 bp, Artificial Sequence
  ENSG00000127124_89 (sequence is synthesized)
caagggctgaggtctgggagctgcataaagggcattgcttcagcccaggttagaaatctgcctgggcaagctcttcctgccccagacctacaaagcagcagaccgggggctctggtggac

SEQ ID NO: 269469 - DNA, 120 bp, Artificial Sequence
  ENSG00000127124_90 (sequence is synthesized)
tagcccctgacattggtggggggccccacaccactccaccccaccctgccttccagctctcctgggcatttttctccctgtactcaaacagcctacccacccaaggtttcctccctgggc

SEQ ID NO: 269470 - DNA, 120 bp, Artificial Sequence
  ENSG00000127124_91 (sequence is synthesized)
agcctagcaatgaacagtgcagccggcagggcagaggcccggcagtcaccgggcccgtcaggctcaggcagagaagccacaggggccaggagtcactggagactatttctaaatgatggg

SEQ ID NO: 269471 - DNA, 120 bp, Artificial Sequence
  ENSG00000127124_92 (sequence is synthesized)
ggtaaatgcacaaatagaatctcaccaaagggctgcctccacattgatgccgtgcccagagggacagaaccaatgccaccagcctgggtatatgtcactgggcacagctctaaccccctc

SEQ ID NO: 269472 - DNA, 120 bp, Artificial Sequence
  ENSG00000127124_93 (sequence is synthesized)
ctccggactctagtcccgctcctctgcgcacagagcccccagcccacaggtacaccttcatgatttggagaaagacgctcgccccatgcacgccctcctctgggccttctgccctgctcc

SEQ ID NO: 269473 - DNA, 120 bp, Artificial Sequence
  ENSG00000127124_94 (sequence is synthesized)
cagtcacttccaagcttcctgtttgcctgtgatgttattgtgcctgttgagggaagcagcagaggaggcagtggctgacttggcacagatgcctgctacgtgctctgttgaaatgcgcgg

SEQ ID NO: 269474 - DNA, 120 bp, Artificial Sequence
  ENSG00000127124_95 (sequence is synthesized)
ggtggccattcctcggtacagactagtcctggtccttgggtgtgggcagtgggggaggaaccaactggtcgaggtttcagagccaaaccttgcctttggttggtgagtccttgcccccca

SEQ ID NO: 269475 - DNA, 120 bp, Artificial Sequence
  ENSG00000127124_96 (sequence is synthesized)
ggcctgcgctccacgatgcctttcacccttggcaatctcagggccatcctgggtagtaaccccactcctctctgctcccgcccgcacctgtggctctcactctgggctcaacccctgcaa

SEQ ID NO: 269476 - DNA, 120 bp, Artificial Sequence
  ENSG00000127124_97 (sequence is synthesized)
ccctccaggagcccgacagcagccagctgcctgcactgtcgcctccgtaagctccaacttccagacccagaagtccctctgcttccctctgttggaaaaagcctaaaagaattagcttcc

SEQ ID NO: 269477 - DNA, 120 bp, Artificial Sequence
  ENSG00000127124_98 (sequence is synthesized)
agattcctctagcccctgctccattcccacccagtccttctgaagaggaatgagcaatacatctgagctggatttctctctagtcctttctccagacaaatccttcttaaagcaaaagtc

SEQ ID NO: 269478 - DNA, 120 bp, Artificial Sequence
  ENSG00000127124_99 (sequence is synthesized)
ctggctgagcacctgtccttggggaccgatctgccgtgtgaccaggggaagaaagttcccgaaagcctgttccaccaattctgcttctgtgttgtgaatccagtctgctttccattagaa

SEQ ID NO: 269479 - DNA, 120 bp, Artificial Sequence
  ENSG00000127124_100 (sequence is synthesized)
aaccgcttcggcacttatggtcactttaataaatctagtatgtaaaaaaagaaagaaagaaaagaaacagaaaaaagaaacgtgcaggcaaatgtaaaatacaatgctctctgtaagata

SEQ ID NO: 269480 - DNA, 120 bp, Artificial Sequence
  ENSG00000127124_101 (sequence is synthesized)
aatatttgcctttttttctaaaaggtgtacgtattctgtatgtgaaattgtctgtagaaagtttctatgttcttaaatggcaatacattccaaaaattgtactgtagatatgtacagcaa

SEQ ID NO: 269481 - DNA, 120 bp, Artificial Sequence
  ENSG00000127124_102 (sequence is synthesized)
ccgcactgggatggggtagttttgcctgtaattttatttaaactccagtttccacacttgcatcttgcaatgttggtatggtatatatcagtgcaaaagaaaaaacaaaacagaaacaaa

SEQ ID NO: 269482 - DNA, 120 bp, Artificial Sequence
  ENSG00000127124_103 (sequence is synthesized)
caaaaaaaaaaaacaaaaatccacgcaggtctaaagcacagagtctgacgtacaaaaggaaaaatgctcagtattgatgtgtgtgacctttgttgtaaattacatctgtactgtgaatga

SEQ ID NO: 269483 - DNA, 120 bp, Artificial Sequence
  ENSG00000127124_104 (sequence is synthesized)
gaagtttttacaagtataataattgcctttattacagctctggctgagtgttcagcctgaggatattttttaaaaaaaaaagaattagcatgttggaataaatttgaaaatcccaacata

SEQ ID NO: 269484 - DNA, 120 bp, Artificial Sequence
  ENSG00000127124_105 (sequence is synthesized)
ccatcccaaggccgaagtctggtgtctcggatttgttcctgtgttgcccactcctgctggatcttgtccagtcgagggacaaacgtcctgaagaatgggaagaaaggaggttctgaaggc

SEQ ID NO: 269485 - DNA, 120 bp, Artificial Sequence
  ENSG00000127124_106 (sequence is synthesized)
acagattccaataccatgccagaggttgaggacactggtgcttgaagggaaactggcacactctggagccccaagaagagctggagctggaggcatgcggcccacgaagggtagaagtac

SEQ ID NO: 269486 - DNA, 120 bp, Artificial Sequence
  ENSG00000127124_107 (sequence is synthesized)
cagccatgaccaagagcccttcacatcatctggcaatccatccagaacccactgaatggaggacagcacagcgaggtctttctcattttgtaactgcaaaagctggaacaagagccagag

SEQ ID NO: 269487 - DNA, 120 bp, Artificial Sequence
  ENSG00000127124_108 (sequence is synthesized)
aagccaaagaagcagtacaagtccaacagcttttagaataaccctgagaaaatggttgaattttgaccagttttgcaattggatactatgagaagagaccttccctcctgcactggattt

SEQ ID NO: 269488 - DNA, 120 bp, Artificial Sequence
  ENSG00000127124_109 (sequence is synthesized)
catcatcatacctggaggccattcctcatgggactttggccatctcatatccacctttaagcatgttattcccatttcagctgtggtagctctgggtatccttccctaggagaaaatatt

SEQ ID NO: 269489 - DNA, 120 bp, Artificial Sequence
  ENSG00000127124_110 (sequence is synthesized)
tcactttaggctagaagcaccactagacattcctgttctcagaagttgccaagttcatgtcatatctgtttcattgttaacgggatccacttctgcaagaggctgcctggccagatcagt

SEQ ID NO: 269490 - DNA, 120 bp, Artificial Sequence
  ENSG00000127124_111 (sequence is synthesized)
gtgtctcctggtcagctccttgatgcccttctcctctcccctgcccaatcccagctgagacttgcactgtggtgactctgtcccctcctggtgctttgactggatgtgtgagagaaagta

SEQ ID NO: 269491 - DNA, 120 bp, Artificial Sequence
  ENSG00000127124_112 (sequence is synthesized)
tggtctgtggcactgacatctttgtgtgtttggaggtgactggaacacggatccacccctggaggaaggtggccgtgaaggaggccagcctcagctcagcgttctactctcatcgctctt

SEQ ID NO: 269492 - DNA, 120 bp, Artificial Sequence
  ENSG00000127124_113 (sequence is synthesized)
actcccgcctttttagtgcctgccctactccaggataattgtgcttttcttttttcagttaaatgttagcattgctatttttcattattgcaaagcagcacatgcttgttacaaaaactt

SEQ ID NO: 269493 - DNA, 120 bp, Artificial Sequence
  ENSG00000127124_114 (sequence is synthesized)
tggaagtgtagacaaataaaaagaagaaaaagctacttccaaatcctacttaccccaaagacaagatgatcatttagtcatatagtatcatacatatataatatgtacacatatatttta

SEQ ID NO: 269494 - DNA, 120 bp, Artificial Sequence
  ENSG00000127124_115 (sequence is synthesized)
atgtaagtgtagtgtcacaatatcatgtatagtctttcataaaacacgttggcacttaatatcttatatgaacaactttctagagcaacaagcttagtttacagcaattgtaatgtaaga

SEQ ID NO: 269495 - DNA, 120 bp, Artificial Sequence
  ENSG00000127124_116 (sequence is synthesized)
gtactcatttacatagctacagcatcctttgtttacctcatctcttatggtttgatgtttaggttgtttccaacttttctccacctaaacagcattaataaatgtggttttagtttcctc

SEQ ID NO: 269496 - DNA, 120 bp, Artificial Sequence
  ENSG00000127124_117 (sequence is synthesized)
cctcgcatgccgtggcccgggtggctgccagcgctgccgcccgccgcccgccaccccggcatcccaagccgcctcccgccgccccggcccggcgcgcaggtgttcatgaaaaaaatgcac

SEQ ID NO: 269497 - DNA, 120 bp, Artificial Sequence
  ENSG00000127124_118 (sequence is synthesized)
gattatagaacacatgtgctccttaaagaaaaacactgtgcagggagataacagtcatcaaacatggaaacctttgagttgaatagctcatccagtttccccacattatttccagtggag

SEQ ID NO: 269498 - DNA, 120 bp, Artificial Sequence
  ENSG00000127125_0 (sequence is synthesized)
aggcgccggccgctgcgctgcagatggcggaaatggatccggtagccgagttcccccagcctcccggtgctgcgcgctgggctgaggttatggctcgcttcgcggccaggctgggcgcgc

SEQ ID NO: 269499 - DNA, 120 bp, Artificial Sequence
  ENSG00000127125_1 (sequence is synthesized)
agggccggcgggtggtgttggttacgtcaggcggcaccaaggtcccactggaagcgcggccggtgcgcttcctggacaacttcagcagcgggcggcgcggtgcaacctcggccgaggcct

SEQ ID NO: 269500 - DNA, 120 bp, Artificial Sequence
  ENSG00000127125_2 (sequence is synthesized)
tcctagccgccggctacggggtcctgttcttgtatcgcgctcgctctgccttcccctatgcccaccgcttcccaccccagacttggctgtccgctctgcggccttcgggcccagcccttt

SEQ ID NO: 269501 - DNA, 120 bp, Artificial Sequence
  ENSG00000127125_3 (sequence is synthesized)
cgggcttgctgagcctggaggccgaggagaatgcacttccgggttttgctgaggctctgaggagctaccaggaggctgcggctgcaggcaccttcctggcagtagagttcaccactttgg

SEQ ID NO: 269502 - DNA, 120 bp, Artificial Sequence
  ENSG00000127125_4 (sequence is synthesized)
cggactatttgcatctgttgcaggctgcggcccaggcactcaatccgctaggcccttctgcgatgttttacctggctgcggctgtgtcagatttctatgttcctgtctctgaaatgcctg

SEQ ID NO: 269503 - DNA, 120 bp, Artificial Sequence
  ENSG00000127125_5 (sequence is synthesized)
aacacaagatccagtcatctgggggcccactgcagataacaatgaagatggtgccaaaactgctttctcctttggttaaagattgggctcccaaagcatttataatttcctttaagttgg

SEQ ID NO: 269504 - DNA, 120 bp, Artificial Sequence
  ENSG00000127125_6 (sequence is synthesized)
agactgaccccgccattgtaattaatcgagctcggaaggctttggaaatttatcagcatcaagtggtggtggctaatatccttgagtcacgacagtcctttgtgtttattgtaaccaaag

SEQ ID NO: 269505 - DNA, 120 bp, Artificial Sequence
  ENSG00000127125_7 (sequence is synthesized)
actcggaaaccaagttattgctatcagaggaagaaatagaaaaaggcgtagagatagaagagaagatagtggataatcttcagtctcgacacacagcttttataggtgacagaaactgaa

SEQ ID NO: 269506 - DNA, 120 bp, Artificial Sequence
  ENSG00000127125_8 (sequence is synthesized)
gtaaaaagcccttataggatcaaaaattgttcagggctcttagagatggtgaaaactacaaaaaaaaccatggctttcatatggacagataaaatgaaagaaagggaaaaggcagtggtg

SEQ ID NO: 269507 - DNA, 120 bp, Artificial Sequence
  ENSG00000127125_9 (sequence is synthesized)
tattgggaattatatattccttaaaatatacatgggggcctgaatgtcagccatctttatactatagaaaaaggattatggatgcatgaatggtcatgctttggagatcaaatattggtt

SEQ ID NO: 269508 - DNA, 120 bp, Artificial Sequence
  ENSG00000127125_10 (sequence is synthesized)
gaatgcctatgtatgtcaggccctgtgctgagccatgaggattaaaaagatgaataaacatatcttgtttaggaaatggatgtataaaaaaatcaagtgcaataaagtgtgtgtccaaaa

SEQ ID NO: 269509 - DNA, 120 bp, Artificial Sequence
  ENSG00000127125_11 (sequence is synthesized)
gctgacacaatggaaaggatgttttgttttgtttgaaatttatcaaatatagtagtaggaaagaaggatacctccctgaagatagattgtagaatggtgagcttttcactgcatttactt

SEQ ID NO: 269510 - DNA, 120 bp, Artificial Sequence
  ENSG00000127125_12 (sequence is synthesized)
tttgcttcttattgtagattcacctcatgtttgggtaatagtttacatttcaagtattttaggactgcttttcagtttaacttaatatgtccttccacctgggaccaggcaggggccact

SEQ ID NO: 269511 - DNA, 120 bp, Artificial Sequence
  ENSG00000127125_13 (sequence is synthesized)
tggtgatctctgtcctgagggatgcattacagtgtggtagagtatgggctagaagtcaacttagccagctgtgccacctattagctttataaacttaggcatttgacttaatctcagtgt

SEQ ID NO: 269512 - DNA, 120 bp, Artificial Sequence
  ENSG00000127125_14 (sequence is synthesized)
ccacatgcataaaatgaggataatctctctgcaaagtaatgccatttattgtgaggatcaaatgaaatagcaaaaagaaagcatcagtctggtgcctagcatttgattcacactcactaa

SEQ ID NO: 269513 - DNA, 120 bp, Artificial Sequence
  ENSG00000127125_15 (sequence is synthesized)
atggttgcaattattgtttttctcacttagcaaagcagtgttacaccactgccctgcttaatctttgaatccttgagaatctttgaaaaactttcaatacttctcttgctgtcctacgtt

SEQ ID NO: 269514 - DNA, 120 bp, Artificial Sequence
  ENSG00000127125_16 (sequence is synthesized)
ttgggtttggagtgcacaagtagcatagtgcaaaaaaattccctaaatgatctgtaggatagtccaggtgcaatttgaaaaattagcattgatgactaaggtagaagcaggtactgtgtt

SEQ ID NO: 269515 - DNA, 120 bp, Artificial Sequence
  ENSG00000127125_17 (sequence is synthesized)
tcacataaatatttgacttaaaatacaattcatggtgtttcatggagtagggaagggtagcccctgtgtctgtctgataatagaagtacaataaatttaattgagaagatttgacagaaa

SEQ ID NO: 269516 - DNA, 120 bp, Artificial Sequence
  ENSG00000127125_18 (sequence is synthesized)
cttcaccatcttgaaaaagaagaaatcaatccccttgctactacagaagaacaactctgtttggtgcttattccagccagcacagtgaagacaggctgaggactgctaccacagatgtag

SEQ ID NO: 269517 - DNA, 120 bp, Artificial Sequence
  ENSG00000127125_19 (sequence is synthesized)
aagagcttatagtgaagcacatgggtgaaacaaaagaagtgagaactaatagcatagaattttaaagacacctgtgattttgttcattgcccttcattaaattgacatattaaaaactaa

SEQ ID NO: 269518 - DNA, 120 bp, Artificial Sequence
  ENSG00000127125_20 (sequence is synthesized)
ggactatttgcatctgttgcaggctgcggcccaggcactcaatccgctaggtgcgtgccctaggagtaccccttttgcctggaagcacagcctttctttccagccacttatccccttacc

SEQ ID NO: 269519 - DNA, 120 bp, Artificial Sequence
  ENSG00000127125_21 (sequence is synthesized)
tcctgcttacccacggatctcagctggggaacccgagttgagaaggagctgatcctatatcgtacctcgccgatttgttaacaccttgtgtttctctttgcaggcccttctgcgatgttt

SEQ ID NO: 269520 - DNA, 69 bp, Artificial Sequence
  ENSG00000127125_22 (sequence is synthesized)
cctcaaccttccaaacaatgaagatggtgccaaaactgctttctcctttggttaaagattgggctccca

SEQ ID NO: 269521 - DNA, 120 bp, Artificial Sequence
  ENSG00000127125_23 (sequence is synthesized)
tgatctggagatggcctttctgcatctgtattcgctaggcacaggggatacagagatgaataagacaccgccctccctcatggacctcacaatctagtgagggagctggacacagacata

SEQ ID NO: 269522 - DNA, 120 bp, Artificial Sequence
  ENSG00000127125_24 (sequence is synthesized)
gggacgtgactcgactaacatctgggtgtattgctgaagttggaaaaggggaagaaagaaagaaaaagcagcacaaaacccacaagtcccacgggtcaaatggccgagaaacgactccca

SEQ ID NO: 269523 - DNA, 120 bp, Artificial Sequence
  ENSG00000127125_25 (sequence is synthesized)
aggagtccaagtccagaaaggcccgtacagtggccggtaagggtcaaacatggccagttcttcacccaggctaggaaacgaacgtgagggaacgtgaccctaccagatgcccacccagcc

SEQ ID NO: 269524 - DNA, 120 bp, Artificial Sequence
  ENSG00000127125_26 (sequence is synthesized)
ggggatccccctcgttgcagtgtcactttcgctgggctctggggcagaacaactacgcatttccagacttggcgagatcgggacctagtgtcaaaagaagggtagtgaaccgcccactca

SEQ ID NO: 269525 - DNA, 120 bp, Artificial Sequence
  ENSG00000127129_0 (sequence is synthesized)
gagctatctgctcagcttaatagcaggacgctggcaacaggcactccctgctccagtccagcctgcgcgctccaccgccgctatggtctccgtgcctaccacctggtgctccgttgcgct

SEQ ID NO: 269526 - DNA, 120 bp, Artificial Sequence
  ENSG00000127129_1 (sequence is synthesized)
agccctgctcgtggccctgcatgaagggaagggccaggctgctgccaccctggagcagccagcgtcctcatctcatgcccaaggcacccaccttcggcttcgccgttgctcctgcagctc

SEQ ID NO: 269527 - DNA, 120 bp, Artificial Sequence
  ENSG00000127129_2 (sequence is synthesized)
ctggctcgacaaggagtgcgtctacttctgccacttggacatcatctgggtgaacactcctgaacagacagctccttacggcctgggaaacccgccaagacgccggcgccgctccctgcc

SEQ ID NO: 269528 - DNA, 120 bp, Artificial Sequence
  ENSG00000127129_3 (sequence is synthesized)
aaggcgctgtcagtgctccagtgccagggaccccgcctgtgccaccttctgccttcgaaggccctggactgaagccggggcagtcccaagccggaagtcccctgcagacgtgttccagac

SEQ ID NO: 269529 - DNA, 120 bp, Artificial Sequence
  ENSG00000127129_4 (sequence is synthesized)
tggcaagacaggggccactacaggagagcttctccaaaggctgagggacatttccacagtcaagagcctctttgccaagcgacaacaggaggccatgcgggagcctcggtccacacattc

SEQ ID NO: 269530 - DNA, 120 bp, Artificial Sequence
  ENSG00000127129_5 (sequence is synthesized)
cgcggggagagaggaggagagaagtggccagggcttgtggactctctgcctgcttcctggaccggggccttggtcccagacagctggacccatttgccaggattggcacaagctccctgg

SEQ ID NO: 269531 - DNA, 120 bp, Artificial Sequence
  ENSG00000127129_6 (sequence is synthesized)
tgagggagcctcgtccaaggcagttctgtgtcctcgcactgcccagggaagccctcggcctccagactgcggagcagcctccagtgctggctgctggcccacagctctgctggaagaact

SEQ ID NO: 269532 - DNA, 120 bp, Artificial Sequence
  ENSG00000127129_7 (sequence is synthesized)
gcatggggagtacattcatctggaggctgcgtcctgaggagtgtcctgtctgctgggctacaaaccaggagcaaccgtgcagccacgaacacgcatgcctcagccagccctggaggctgg

SEQ ID NO: 269533 - DNA, 120 bp, Artificial Sequence
  ENSG00000127129_8 (sequence is synthesized)
atggctcccctgaggctggcatcctggctggctgtgtcctctccagctttccctccccagagttcttgcaccctcattccctcgggaccctcccagtgagaagggcctgctctgcttttc

SEQ ID NO: 269534 - DNA, 120 bp, Artificial Sequence
  ENSG00000127129_9 (sequence is synthesized)
ctgtctgtatataacttatttgccctaagaactttgagaatcccaattatttattttaatgtattttttagaccctctatttacctgcgaacttgtgtttataataaatgaggaaacata

SEQ ID NO: 269535 - DNA, 120 bp, Artificial Sequence
  ENSG00000127129_10 (sequence is synthesized)
ttctccaaaggctgaggcctggaagtggactttttagagggtttgaaggctcatgactgggaaggaccacagttgttcgttcaggctgtgctgaatggagcatctcacacatgctggggt

SEQ ID NO: 269536 - DNA, 120 bp, Artificial Sequence
  ENSG00000127129_11 (sequence is synthesized)
ccagaggggccaactgcccagcctgctccctctctgctgcccagattgcatctcctccctggtgcctcagtggacatttccacagtcaagagcctctttgccaagcgacaacaggaggcc

SEQ ID NO: 269537 - DNA, 120 bp, Artificial Sequence
  ENSG00000127129_12 (sequence is synthesized)
cttctgccacttggacatcatctgggtgaacactcctgaattcaagtgctgaggctcagagagcttaagcgcctcccccaagatcacacagacagacagctccttacggcctgggaaacc

SEQ ID NO: 269538 - DNA, 120 bp, Artificial Sequence
  ENSG00000127129_13 (sequence is synthesized)
cttctgccacttggacatcatctgggtgaacactcctgaattcaagtgctgaggctcagagagcttaagcgcctcccccaagatcacacaggcaagtggggaccagatgggggcagctta

SEQ ID NO: 269539 - DNA, 120 bp, Artificial Sequence
  ENSG00000127129_14 (sequence is synthesized)
tgagaacagggggaccagcctgtctgagaggggagagagactaggaggttcccaattcccaacttcagacagacagctccttacggcctgggaaacccgccaagacgccggcgccgctcc

SEQ ID NO: 269540 - DNA, 120 bp, Artificial Sequence
  ENSG00000127152_0 (sequence is synthesized)
agccatagagagaccgagagctcccagagaacccggactccgccatcttcacgttgcaatctatagctcccagtctgcgcccgcaccgacccaggcgcactgggcgagccgcccctccgc

SEQ ID NO: 269541 - DNA, 120 bp, Artificial Sequence
  ENSG00000127152_1 (sequence is synthesized)
ccgcggcgccaggggagcgctggggagcgctcgcggggactcggcagcccctccggccggcgccagcctgccaggtgaactgggaaggagcctctcctggtgtccccccagagcctcgga

SEQ ID NO: 269542 - DNA, 120 bp, Artificial Sequence
  ENSG00000127152_2 (sequence is synthesized)
cccccagagcctcggaagggtcagtctccgagaaaaaacaaaaacaaaaacaaaaacaggcagcccgcagaaaacccagaaacaaccgaaccggggcagttttacattgctttgggtttt

SEQ ID NO: 269543 - DNA, 120 bp, Artificial Sequence
  ENSG00000127152_3 (sequence is synthesized)
ttgagggggcggggtgagggggtacgagacaagtccccaagttttctttgcttttttttttcctttgctttttcttcttttatttttttatttgtttgcattttttttcccctcctggta

SEQ ID NO: 269544 - DNA, 120 bp, Artificial Sequence
  ENSG00000127152_4 (sequence is synthesized)
gaagtgcgctttccacctaccagaccctgaaagaaagtgtcaggagccggtgcaaaacccagtttaagttcaagaagacatttgcaagtgcaagaggccaagcagtttgaagaagtgtaa

SEQ ID NO: 269545 - DNA, 120 bp, Artificial Sequence
  ENSG00000127152_5 (sequence is synthesized)
gagattttttttccttcgaaagaatatatttttaaagaaaccagccagtccgcggaaagcaacagcagttttttttttttttgcctctttttcttattttagatcgagaggtttttcttg

SEQ ID NO: 269546 - DNA, 120 bp, Artificial Sequence
  ENSG00000127152_6 (sequence is synthesized)
cttttcttcccttttttttctttttgcaaacaaaacaaaaaacagcatagaagaaagagcaaaataaagaagaagaagaggaggaagagagggaaagagaggaagggaaaaaaaacacca

SEQ ID NO: 269547 - DNA, 120 bp, Artificial Sequence
  ENSG00000127152_7 (sequence is synthesized)
gaaagagaggaagggaaaaaaaacaccaacccgggcagaggaggaggtgcggcggcggcggcggcggcggcagcggcggcagcggcgcggcggcggctcggaccccctcccccggctccc

SEQ ID NO: 269548 - DNA, 120 bp, Artificial Sequence
  ENSG00000127152_8 (sequence is synthesized)
cagaatagatgccggggcaatgtcccgccgcaaacagggcaacccgcagcacttgtcccagagggagctcatcaccccagaggctgaccatgtggaggccgccatcctcgaagaagacga

SEQ ID NO: 269549 - DNA, 120 bp, Artificial Sequence
  ENSG00000127152_9 (sequence is synthesized)
gggtctggagatagaggagccaagtggcctggggctgatggtgggtggccccgaccctgacctgctcacctgtggccagtgtcaaatgaacttccccttgggggacatcctggtttttat

SEQ ID NO: 269550 - DNA, 120 bp, Artificial Sequence
  ENSG00000127152_10 (sequence is synthesized)
agagcacaaaaggaagcagtgtggcggcagcttgggtgcctgctatgacaaggccctggacaaggacagcccgccaccctcctcacgctccgagctcaggaaagtgtccgagccggtgga

SEQ ID NO: 269551 - DNA, 120 bp, Artificial Sequence
  ENSG00000127152_11 (sequence is synthesized)
gatcgggatccaagtcacccccgacgaagatgaccacctgctctcacccacgaaaggcatctgtcccaagcaggagaacattgcagggccgtgcaggcctgcccagctgccagcggtggc

SEQ ID NO: 269552 - DNA, 120 bp, Artificial Sequence
  ENSG00000127152_12 (sequence is synthesized)
ccccatagctgcctcctcccaccctcactcatccgtgatcacttcacctctgcgtgccctgggcgctctcccgccctgcctccccctgccgtgctgcagcgcgcgcccggtctcgggtga

SEQ ID NO: 269553 - DNA, 120 bp, Artificial Sequence
  ENSG00000127152_13 (sequence is synthesized)
cgggactcagggtgagggtcagacggaggctccctttggatgccagtgtcagttgtcaggtaaagatgagccttccagctacatttgcacaacatgcaagcagcccttcaacagcgcgtg

SEQ ID NO: 269554 - DNA, 120 bp, Artificial Sequence
  ENSG00000127152_14 (sequence is synthesized)
gttcctgctgcagcacgcgcagaacacgcacggcttccgcatctacctggagcccgggccggccagcagctcgctcacgccgcggctcaccatcccgccgccgctcgggccggaggccgt

SEQ ID NO: 269555 - DNA, 120 bp, Artificial Sequence
  ENSG00000127152_15 (sequence is synthesized)
ggcgcagtccccgctcatgaatttcctgggcgacagcaaccccttcaacctgctgcgcatgacgggccccatcctgcgggaccacccgggcttcggcgagggccgcctgccgggcacgcc

SEQ ID NO: 269556 - DNA, 120 bp, Artificial Sequence
  ENSG00000127152_16 (sequence is synthesized)
gcctctcttcagtcccccgccgcgccaccacctggacccgcaccgcctcagtgccgaggagatggggctcgtcgcccagcaccccagtgccttcgaccgagtcatgcgcctgaaccccat

SEQ ID NO: 269557 - DNA, 120 bp, Artificial Sequence
  ENSG00000127152_17 (sequence is synthesized)
ggccatcgactcgcccgccatggacttctcgcggcggctccgcgagctggcgggcaacagctccacgccgccgcccgtgtccccgggccgcggcaaccctatgcaccggctcctgaaccc

SEQ ID NO: 269558 - DNA, 120 bp, Artificial Sequence
  ENSG00000127152_18 (sequence is synthesized)
cttccagcccagccccaagtccccgttcctgagcacgccgccgctgccgcccatgccccctggcggcacgccgcccccgcagccgccagccaagagcaagtcgtgcgagttctgcggcaa

SEQ ID NO: 269559 - DNA, 120 bp, Artificial Sequence
  ENSG00000127152_19 (sequence is synthesized)
gaccttcaagttccagagcaatctcatcgtgcaccggcgcagtcacacgggcgagaagccctacaagtgccagctgtgcgaccacgcgtgctcgcaggccagcaagctcaagcgccacat

SEQ ID NO: 269560 - DNA, 120 bp, Artificial Sequence
  ENSG00000127152_20 (sequence is synthesized)
gaagacgcacatgcacaaggccggctcgctggccggccgctccgacgacgggctctcggccgccagctcccccgagcccggcaccagcgagctggcgggcgagggcctcaaggcggccga

SEQ ID NO: 269561 - DNA, 120 bp, Artificial Sequence
  ENSG00000127152_21 (sequence is synthesized)
cggtgacttccgccaccacgagagcgacccgtcgctgggccacgagccggaggaggaggacgaggaggaggaggaggaggaggaggagctgctactggagaacgagagccggcccgagtc

SEQ ID NO: 269562 - DNA, 120 bp, Artificial Sequence
  ENSG00000127152_22 (sequence is synthesized)
gagcttcagcatggactcggagctgagccgcaaccgcgagaacggcggtggtggggtgcccggggtcccgggcgcggggggcggcgcggccaaggcgctggctgacgagaaggcgctggt

SEQ ID NO: 269563 - DNA, 120 bp, Artificial Sequence
  ENSG00000127152_23 (sequence is synthesized)
gctgggcaaggtcatggagaacgtgggcctaggcgcactgccgcagtacggcgagctcctggccgacaagcagaagcgcggcgccttcctgaagcgtgcggcgggcggcggggacgcggg

SEQ ID NO: 269564 - DNA, 80 bp, Artificial Sequence
  ENSG00000127152_24 (sequence is synthesized)
ggcggcgcggtcaacgggcgcgggggcggcttcgcgccaggcaccgagcccttccccgggctcttcccgcgcaagcccgc

SEQ ID NO: 269565 - DNA, 120 bp, Artificial Sequence
  ENSG00000127152_25 (sequence is synthesized)
gccgctgcccagccccgggctcaacagcgccgccaagcgcatcaaggtggagaaggacctggagctgccgcccgccgcgctcatcccgtccgagaacgtgtactcgcagtggctggtggg

SEQ ID NO: 269566 - DNA, 120 bp, Artificial Sequence
  ENSG00000127152_26 (sequence is synthesized)
ctacgcggcgtcgcggcacttcatgaaggaccccttcctgggcttcacggacgcacgacagtcgcccttcgccacgtcgtccgagcactcgtccgagaacggcagcctgcgcttctccac

SEQ ID NO: 269567 - DNA, 120 bp, Artificial Sequence
  ENSG00000127152_27 (sequence is synthesized)
ccgagcactcgtccgagaacggcagcctgcgcttctccacgccgcccggggacctgctggacggcggcctctcgggccgcagcggcacggccagcggaggcagcaccccgcacctgggcg

SEQ ID NO: 269568 - DNA, 120 bp, Artificial Sequence
  ENSG00000127152_28 (sequence is synthesized)
cagcgacacgtgcgagtactgcggcaaggtgttcaagaactgcagcaacttgacggtgcaccggcggagccacaccggcgagcggccttacaagtgcgagctgtgcaactacgcgtgcgc

SEQ ID NO: 269569 - DNA, 120 bp, Artificial Sequence
  ENSG00000127152_29 (sequence is synthesized)
gcagagcagcaagctcacgcgccacatgaagacgcacgggcagatcggcaaggaggtgtaccgctgcgacatctgccagatgcccttcagcgtctacagcaccctggagaaacacatgaa

SEQ ID NO: 269570 - DNA, 120 bp, Artificial Sequence
  ENSG00000127152_30 (sequence is synthesized)
aaagtggcacggcgagcacttgctgactaacgacgtcaaaatcgagcaggccgagaggagctaagcgcgcgggccccggcgccccgcacctgtacagtggaaccgttgccaaccgagaga

SEQ ID NO: 269571 - DNA, 120 bp, Artificial Sequence
  ENSG00000127152_31 (sequence is synthesized)
atgctgacctgacttgcctccgtgtcaccgccaccccgcaccccgcgtgtccccggggcccaggggaggcggcactccaacctaacctgtgtctgcgaagtcctatggaaacccgagggt

SEQ ID NO: 269572 - DNA, 120 bp, Artificial Sequence
  ENSG00000127152_32 (sequence is synthesized)
tgattaaggcagtacaaattgtggagccttttaactgtgcaataatttctgtatttattgggttttgtaatttttttggcatgtgcaggtactttttattattattttttctgtttgaat

SEQ ID NO: 269573 - DNA, 120 bp, Artificial Sequence
  ENSG00000127152_33 (sequence is synthesized)
tcctttaagagattttgttgggtatccatcccttctttgttttttttttaacccggtagtagcctgagcaatgactcgcaagcaatgttagaggggaagcatatcttttaaattataatt

SEQ ID NO: 269574 - DNA, 120 bp, Artificial Sequence
  ENSG00000127152_34 (sequence is synthesized)
tggggggaggggtggtgctgcttttttgaaatttaagctaagcatgtgtaatttcttgtgaagaagccaacactcaaatgacttttaaagttgtttactttttcattccttccttttttt

SEQ ID NO: 269575 - DNA, 120 bp, Artificial Sequence
  ENSG00000127152_35 (sequence is synthesized)
ttttaattttttttttggtttttgtttttggggtggggggtgtggatgtacagcggataacaatctttcaagtcgtagcactttgtttcagaactggaatggagatgtagcactcatgtc

SEQ ID NO: 269576 - DNA, 120 bp, Artificial Sequence
  ENSG00000127152_36 (sequence is synthesized)
gtttcagaactggaatggagatgtagcactcatgtcgtcccgagtcaagcggccttttctgtgttgatttcggctttcatattacataagggaaaccttgagtggtggtgctgggggagg

SEQ ID NO: 269577 - DNA, 120 bp, Artificial Sequence
  ENSG00000127152_37 (sequence is synthesized)
caccccacagactcagcgccgccagagatagggtttttggagggctcctctgggaaatggcccgacagcattctgaggttgtgcatgaccagcagatactatcctgttggtgtgccctgg

SEQ ID NO: 269578 - DNA, 120 bp, Artificial Sequence
  ENSG00000127152_38 (sequence is synthesized)
ggtgccatggctgctattcgctgtagattaggctacataaaatgggctgagggtacctttttggggagatggggtggcctgcagtgacacagaaaggaagaaactagcggtgttctttta

SEQ ID NO: 269579 - DNA, 120 bp, Artificial Sequence
  ENSG00000127152_39 (sequence is synthesized)
ggcgttttctggcttgacggcttctctctttttttaaatcacccccaccacataaatctcaaatcctatgttgctacaaggggtcatccatcatttcccaagcagacgaatgccctaatt

SEQ ID NO: 269580 - DNA, 120 bp, Artificial Sequence
  ENSG00000127152_40 (sequence is synthesized)
aattgaagttagtgttctctcatttaatgcacactgatgatattgtagggatgggtggggtggggatcttgcaaatttctattctcttttactgaaaaagcaggggatgagttccatcag

SEQ ID NO: 269581 - DNA, 120 bp, Artificial Sequence
  ENSG00000127152_41 (sequence is synthesized)
aaggtgcccagcgctacttcccaggtttttattttttttttcctatctcattaggttggaaggtactaaatattgaactgttaagattagacatttgaattctgttgacccgcactttaa

SEQ ID NO: 269582 - DNA, 120 bp, Artificial Sequence
  ENSG00000127152_42 (sequence is synthesized)
agcttttgtttgcatttaaattaaatggcttctaaacaagaaattgcagcatattcttctctttggcccagaggtgggttaaactgtaagggacagctgagattgagtgtcagtattgct

SEQ ID NO: 269583 - DNA, 120 bp, Artificial Sequence
  ENSG00000127152_43 (sequence is synthesized)
aagcgtggcattcacaatactggcactataaagaacaaaataaaataataatttataggacagtttttctactgccattcaatttgatgtgagtgccttgaaaactgatcttcctatttg

SEQ ID NO: 269584 - DNA, 120 bp, Artificial Sequence
  ENSG00000127152_44 (sequence is synthesized)
agtctcttgagacaaatgcaaaactttttttttgaaatgaaaagactttttaaaaaagtaaaacaagaaaagtacattctttagaaactaacaaagccacatttactttaagtaaaaaaa

SEQ ID NO: 269585 - DNA, 120 bp, Artificial Sequence
  ENSG00000127152_45 (sequence is synthesized)
aaaaaaattctggttgaagatagaggatatgaaatgccataagacccaatcaaatgaagaaataaacccagcacaaccttggacatccattagctgaattatcctcagccccttttgttt

SEQ ID NO: 269586 - DNA, 120 bp, Artificial Sequence
  ENSG00000127152_46 (sequence is synthesized)
ttgggacaacgctgcttagatatggagtggaggtgatttactgctgaattaaaactcaagtgacacaagttacaagttgatatcgttgaatgaaaagcaaaacaaaaacaattcaggaac

SEQ ID NO: 269587 - DNA, 120 bp, Artificial Sequence
  ENSG00000127152_47 (sequence is synthesized)
aacggctaattttttctaaagttaaatttagtgcactctgtcttaaaaatacgtttacagtattgggtacatacaagggtaaaaaaaaaattgtgtgtatgtgtgttggagcgatctttt

SEQ ID NO: 269588 - DNA, 120 bp, Artificial Sequence
  ENSG00000127152_48 (sequence is synthesized)
tttttcaaagtttgcttaataggttatacaaaaatgccacagtggccgcgtgtatattgttttcttttggtgacggggttttagtatatattatatatattaaaatttcttgattactgt

SEQ ID NO: 269589 - DNA, 120 bp, Artificial Sequence
  ENSG00000127152_49 (sequence is synthesized)
aaaagtggaccagtatttgtaataatcgagaatgcctgggcattttacaaaacaagaaaaaaaatacccttttcttttccttgaaaatgttgcagtaaaatttaaatggtgggtctataa

SEQ ID NO: 269590 - DNA, 120 bp, Artificial Sequence
  ENSG00000127152_50 (sequence is synthesized)
atttgttcttgttacagtaactgtaaagtcggagttttagtaaatttttttctgccttgggtgttgaatttttatttcaaaaaaaatgtatagaaacttgtatttggggattcaaagggg

SEQ ID NO: 269591 - DNA, 120 bp, Artificial Sequence
  ENSG00000127152_51 (sequence is synthesized)
attgctacaccatgtagaaaaagtatgtagaaaaaaagtgcttaatattgttattgctttgcagaaaaaaaaaaaatcacatttctgacctgtacttatttttctcttcccgcctccctc

SEQ ID NO: 269592 - DNA, 120 bp, Artificial Sequence
  ENSG00000127152_52 (sequence is synthesized)
tggaatggatatattggttggttcatatgatgtaggcacttgctgtatttttactggagctcgtaattttttaactgtaagcttgtccttttaaagggatttaatgtacctttttgttag

SEQ ID NO: 269593 - DNA, 120 bp, Artificial Sequence
  ENSG00000127152_53 (sequence is synthesized)
taaaaagaaaaaaaaaacaaaaacaaacaggctgccataatatatttttttaatttggcaggataaaatattgcaaaaaaaacacatttgtatgttaagtcctattgtacaggagaaaaa

SEQ ID NO: 269594 - DNA, 120 bp, Artificial Sequence
  ENSG00000127152_54 (sequence is synthesized)
acaggagaaaaagggttgtttgacaacctttgagaaaaagaaacaaaaggaagtagttaaatgctttggttcacaaatcatttagttgtatatattttttgtcggaattggcctacacag

SEQ ID NO: 269595 - DNA, 120 bp, Artificial Sequence
  ENSG00000127152_55 (sequence is synthesized)
agaaccgttcgtgttgggcttctctctgaacgccccgaaccttgcatcaaggctccttggtgtggccacagcagaccagatgggaaattatttgtgttgagtggaaaaaaatcagttttt

SEQ ID NO: 269596 - DNA, 120 bp, Artificial Sequence
  ENSG00000127152_56 (sequence is synthesized)
gtaaagatgtcagtaacattccacatcgtcctccctttctctaagaggccatctctaagatgtcagatgtagaggagagagagcgagagaacatcttccttctctaccatcactcctgtg

SEQ ID NO: 269597 - DNA, 120 bp, Artificial Sequence
  ENSG00000127152_57 (sequence is synthesized)
gcggtcaccaccaccacctctcccgcccttaccagcagaaagcaatgcaaactgagctgctttagtccttgagaaattgtgaaacaaacacaaatatcataaaaggagctggtgattcag

SEQ ID NO: 269598 - DNA, 120 bp, Artificial Sequence
  ENSG00000127152_58 (sequence is synthesized)
ctgggtccaggtgaagtgacctgctgttgagaccggtacaaattggatttcaggaaggagactccatcacagccaggacctttcgtgccatggagagtgttggcctcttgtctttcttcc

SEQ ID NO: 269599 - DNA, 120 bp, Artificial Sequence
  ENSG00000127152_59 (sequence is synthesized)
ctgctttgctgctttgctctctgaaacctacattccgtcagtttccgaatgcgagggcctgggatgaatttggtgcctttccatatctcgttctctctccttcccctgcgtttcctctcc

SEQ ID NO: 269600 - DNA, 120 bp, Artificial Sequence
  ENSG00000127152_60 (sequence is synthesized)
atccttcatcctccattggtcctttttttttctttcattttttatttaatttcttttcttcctgtctgttcctcccctaatcctctattttatttttattttttgtaaagccaagtagct

SEQ ID NO: 269601 - DNA, 120 bp, Artificial Sequence
  ENSG00000127152_61 (sequence is synthesized)
ttaagataaagtggtggtcttttggatgagggaataatgcatttttaaataaaataccaatatcaggaagccattttttatttcaggaaatgtaagaaaccattatttcaggttatgaaa

SEQ ID NO: 269602 - DNA, 120 bp, Artificial Sequence
  ENSG00000127152_62 (sequence is synthesized)
gtataaccaagcatccttttgggcaattccttaccaaatgcagaagcttttctgttcgatgcactctttcctccttgccacttacctttgcaaagttaaaaaaaaggggggagggaatgg

SEQ ID NO: 269603 - DNA, 120 bp, Artificial Sequence
  ENSG00000127152_63 (sequence is synthesized)
gagagaaagctgagatttcagtttcctactgcagtttcctacctgcagatccaggggctgctgttgcctttggatgccccactgaggtcctagagtgcctccagggtggtcttcctgtag

SEQ ID NO: 269604 - DNA, 120 bp, Artificial Sequence
  ENSG00000127152_64 (sequence is synthesized)
tcataacagctagccagtgctcaccagcttaccagattgccaggactaagccatcccaaagcacaagcattgtgtgtctctgtgactgcagagaagagagaattttgcttctgttttgtg

SEQ ID NO: 269605 - DNA, 120 bp, Artificial Sequence
  ENSG00000127152_65 (sequence is synthesized)
tttaaaaaaccaacacggaagcagatgatcccgagagagaggcctctagcatgggtgacccagccgacctcaggccggtttccgcactgccacaactttgttcaaagttgcccccaattg

SEQ ID NO: 269606 - DNA, 120 bp, Artificial Sequence
  ENSG00000127152_66 (sequence is synthesized)
gaacctgccacttggcattagagggtctttcatggggagagaaggagactgaattactctaagcaaaatgtgaaaagtaaggaaatcagcctttcatcccggtcctaagtaaccgtcagc

SEQ ID NO: 269607 - DNA, 120 bp, Artificial Sequence
  ENSG00000127152_67 (sequence is synthesized)
cgaaggtctcgtggaacacaggcaaacccgtgattttggtgctccttgtaactcagccctgcaaagcaaagtcccattgatttaagttgtttgcatttgtactggcaaggcaaaatattt

SEQ ID NO: 269608 - DNA, 120 bp, Artificial Sequence
  ENSG00000127152_68 (sequence is synthesized)
ttattaccttttctattacttattgtatgagcttttgttgtttacttggaggttttgtcttttactacaagtttggaactatttattattgcttggtatttgtgctctgtttaagaaaca

SEQ ID NO: 269609 - DNA, 120 bp, Artificial Sequence
  ENSG00000127152_69 (sequence is synthesized)
ggcacttttttttattatggataaaatgttgagatgacaggaggtcatttcaatatggcttagtaaaatatttattgttcctttattctctgtacaagattttgggcctctttttttcct

SEQ ID NO: 269610 - DNA, 120 bp, Artificial Sequence
  ENSG00000127152_70 (sequence is synthesized)
taatgtcacaatgttgagttcagcatgtgtctgccatttcatttgtacgcttgttcaaaaccaagtttgttctggtttcaagttataaaaataaattggacatttaacttgatctccaaa

SEQ ID NO: 269611 - DNA, 120 bp, Artificial Sequence
  ENSG00000127184_0 (sequence is synthesized)
cttttcagtccttgcgcaccggggaacaaggtcgtgaaaaaaaaggtcttggtgaggtgccgccatttcatctgtcctcattctctgcgcctttcgcagagcttccagcagcggtatgtt

SEQ ID NO: 269612 - DNA, 120 bp, Artificial Sequence
  ENSG00000127184_1 (sequence is synthesized)
gggccagagcatccggaggttcacaacctctgtggtccgtaggagccactatgaggagggccctgggaagaatttgccattttcagtggaaaacaagtggtcgttactagctaagatgtg

SEQ ID NO: 269613 - DNA, 120 bp, Artificial Sequence
  ENSG00000127184_2 (sequence is synthesized)
ccttccttgtagtaagacaccaactgcttaaaacataaggatgtttcagttcctccatttaacagatatgaagagcattttaagaggtgcagcctctggaagtggatcaaactagaactc

SEQ ID NO: 269614 - DNA, 120 bp, Artificial Sequence
  ENSG00000127184_3 (sequence is synthesized)
atatgccatactagatatgtttgtcaataaacttatgacgtgaatgcttaatgcctcttttttgaaatagggaatgtaataattggccatttgcctactttattatttgggtaacattcc

SEQ ID NO: 269615 - DNA, 120 bp, Artificial Sequence
  ENSG00000127184_4 (sequence is synthesized)
agtattactctctgtgatttagcttatttaatggtgttaaactgaggttatattaaatttttgattcccaggtcaggattttgttggtaatttatataataaaagggaaatacaaatcga

SEQ ID NO: 269616 - DNA, 120 bp, Artificial Sequence
  ENSG00000127184_5 (sequence is synthesized)
attaagtagcctcttccccatcacccagaacacacacacaaatacattgttgtgtagggctgattcctgaggttatgtgtagatgtggcattggtggagactagttgtaaacctatataa

SEQ ID NO: 269617 - DNA, 120 bp, Artificial Sequence
  ENSG00000127184_6 (sequence is synthesized)
aaatatttcaataatggccagtgtttattgaatactactgcttatcaggtacactttacatcgatatctcatgttctctagcaagcttgtgaggcggatgatagtaaccccatctgagac

SEQ ID NO: 269618 - DNA, 120 bp, Artificial Sequence
  ENSG00000127184_7 (sequence is synthesized)
acagagatgttaagttgttcaacatctcataactagtataatggtggaccaggactcttgcccaggcagtttcttgttgcagaactcacacttttaaccaggtaaaactgataaactgat

SEQ ID NO: 269619 - DNA, 120 bp, Artificial Sequence
  ENSG00000127184_8 (sequence is synthesized)
gttactagaacagtagctgagaatgtgtcttttaaaacactataaacatttccatttcttttagaaagtggtcactgtgctcctagtttttaaattggcttacaatacttgtttaagttg

SEQ ID NO: 269620 - DNA, 120 bp, Artificial Sequence
  ENSG00000127184_9 (sequence is synthesized)
tgaaaaatccctgaagataaaacccttctagtgctccttgatacataagtcccagataattatgcaattgtaaatctgtgcctcaccaactcagccatgttgggaaactcaaacttttaa

SEQ ID NO: 269621 - DNA, 120 bp, Artificial Sequence
  ENSG00000127184_10 (sequence is synthesized)
atatactttcctcattaaggcagtggttcttaaatgaggatgattttacaacacaatggggcatttggcaatgtgagacatttttgatcgttccaacttgggggcaaaattaccagtggt

SEQ ID NO: 269622 - DNA, 120 bp, Artificial Sequence
  ENSG00000127184_11 (sequence is synthesized)
gctgaggttgagaagccttgtgtcaaggggatatgttaatatatgctcaaaggagtcgttcatattggaaggttagcagatttgctgtgtgtggataaaatatttagcttaattgtcatc

SEQ ID NO: 269623 - DNA, 120 bp, Artificial Sequence
  ENSG00000127184_12 (sequence is synthesized)
agagtttctcagagtaatactatagaacactaggatgattggaaagagtgtcatagtttagagggggaataacttatccaagctactaatgcggaaaggttgcggtgcatgtgatgaagc

SEQ ID NO: 269624 - DNA, 120 bp, Artificial Sequence
  ENSG00000127184_13 (sequence is synthesized)
aaatcagtatgaatgaattcatgatactgtaaacgctttctgatgtactactcaaactgatagaaaatattttcatgaaactacatgatttctgttaaatgaatgggatttttaaaatgc

SEQ ID NO: 269625 - DNA, 120 bp, Artificial Sequence
  ENSG00000127184_14 (sequence is synthesized)
cattaatttctgtttttattttgcagatatgaagagcattttaagaggtgcagcctctggaagtggatcaaactagaactcatatgccatactagatatgtttgtcaataaacttatgac

SEQ ID NO: 269626 - DNA, 120 bp, Artificial Sequence
  ENSG00000127184_15 (sequence is synthesized)
atttcccatctttcttttcagtccttgcgcaccggggaacaaggtcgtgaaaaaaaaggtcttggtgaggtgccgccatttcatctgtcctcattctctgcgcctttcgcagagcttcca

SEQ ID NO: 269627 - DNA, 120 bp, Artificial Sequence
  ENSG00000127184_16 (sequence is synthesized)
ggctgtgactcgcgcacctgcaaggccgcctccgggctgtggcgtgggagatgatagccagaaaccaggctgagacgcagactagcattccacttagcccaaggaccagtgaggaagctg

SEQ ID NO: 269628 - DNA, 120 bp, Artificial Sequence
  ENSG00000127184_17 (sequence is synthesized)
tttgctacacccttccttgtaatatgaagagcattttaagaggtgcagcctctggaagtggatcaaactagaactcatatgccatactagatatgtttgtcaataaacttatgacgtgaa

SEQ ID NO: 269629 - DNA, 120 bp, Artificial Sequence
  ENSG00000127191_0 (sequence is synthesized)
agttccgggcgcgctgcgaccgttggggctttgttcgcgggggtcacagctctcatggctgcagctagcgtgaccccccctggctccctggagttgctacagcccggcttctccaagacc

SEQ ID NO: 269630 - DNA, 120 bp, Artificial Sequence
  ENSG00000127191_1 (sequence is synthesized)
ctcctggggaccaagctggaagccaagtacctgtgctccgcctgcagaaacgtcctccgcaggcccttccaggcgcagtgtggccaccggtactgctccttctgcctggccagcatcctc

SEQ ID NO: 269631 - DNA, 120 bp, Artificial Sequence
  ENSG00000127191_2 (sequence is synthesized)
agctctgggcctcagaactgtgctgcctgtgttcacgagggcatatatgaagaaggcatttctattttagaaagcagttcggccttcccagataatgctgcccgcagggaggtggagagc

SEQ ID NO: 269632 - DNA, 120 bp, Artificial Sequence
  ENSG00000127191_3 (sequence is synthesized)
ctgccggccgtctgtcccagtgatggatgcacctggaaggggaccctgaaagaatacgagagctgccacgaaggccgctgcccgctcatgctgaccgaatgtcccgcgtgcaaaggcctg

SEQ ID NO: 269633 - DNA, 120 bp, Artificial Sequence
  ENSG00000127191_4 (sequence is synthesized)
gtccgccttggtgaaaaggagcgccacctggagcacgagtgcccggagagaagcctgagctgccggcattgccgggcaccctgctgcggagcagacgtgaaggcgcaccacgaggtctgc

SEQ ID NO: 269634 - DNA, 120 bp, Artificial Sequence
  ENSG00000127191_5 (sequence is synthesized)
cccaagttccccttaacttgtgacggctgcggcaagaagaagatcccccgggagaagtttcaggaccacgtcaagacttgtggcaagtgtcgagtcccttgcagattccacgccatcggc

SEQ ID NO: 269635 - DNA, 120 bp, Artificial Sequence
  ENSG00000127191_6 (sequence is synthesized)
tgcctcgagacggtagagggtgagaaacagcaggagcacgaggtgcagtggctgcgggagcacctggccatgctactgagctcggtgctggaggcaaagcccctcttgggagaccagagc

SEQ ID NO: 269636 - DNA, 120 bp, Artificial Sequence
  ENSG00000127191_7 (sequence is synthesized)
cacgcggggtcagagctcctgcagaggtgcgagagcctggagaagaagacggccacttttgagaacattgtctgcgtcctgaaccgggaggtggagagggtggccatgactgccgaggcc

SEQ ID NO: 269637 - DNA, 120 bp, Artificial Sequence
  ENSG00000127191_8 (sequence is synthesized)
tgcagccggcagcaccggctggaccaagacaagattgaagccctgagtagcaaggtgcagcagctggagaggagcattggcctcaaggacctggcgatggctgacttggagcagaaggtc

SEQ ID NO: 269638 - DNA, 120 bp, Artificial Sequence
  ENSG00000127191_9 (sequence is synthesized)
ccccagccttctacaccagcaggtacggctacaagatgtgtctgcgtatctacctgaacggcgacggcaccgggcgaggaacacacctgtccctcttctttgtggtgatgaagggcccga

SEQ ID NO: 269639 - DNA, 120 bp, Artificial Sequence
  ENSG00000127191_10 (sequence is synthesized)
atgacgccctgctgcggtggcccttcaaccagaaggtgaccttaatgctgctcgaccagaataaccgggagcacgtgattgacgccttcaggcccgacgtgacttcatcctcttttcaga

SEQ ID NO: 269640 - DNA, 120 bp, Artificial Sequence
  ENSG00000127191_11 (sequence is synthesized)
ggccagtcaacgacatgaacatcgcaagcggctgccccctcttctgccccgtctccaagatggaggcaaagaattcctacgtgcgggacgatgccatcttcatcaaggccattgtggacc

SEQ ID NO: 269641 - DNA, 120 bp, Artificial Sequence
  ENSG00000127191_12 (sequence is synthesized)
tgacagggctctaactgccccctactggtgtctgggggttgggggcagccaggcacagccggctcacggaggggccaccacgctgggccagggtctcactgtacaagtgggcaggggccg

SEQ ID NO: 269642 - DNA, 120 bp, Artificial Sequence
  ENSG00000127191_13 (sequence is synthesized)
cgcttgggcgcttgggagggtgtcggcctgcagccaagttcactgtcacgggggaaggagccaccagccagtcctcagatttcagagactgcggaggggcttggcagacggtcttagcca

SEQ ID NO: 269643 - DNA, 120 bp, Artificial Sequence
  ENSG00000127191_14 (sequence is synthesized)
agggctgtggtggcattggccgagggtcttcgggtgcttcccagcacaagctgcccttgctgtcctgtgcagtgaagggagaggccctgggtgggggacactcagagtgggagcacatcc

SEQ ID NO: 269644 - DNA, 120 bp, Artificial Sequence
  ENSG00000127191_15 (sequence is synthesized)
cagcagtgcccatgtagcaggagcacagtggatggccttgtgtccctcgggcatgacaggcagaaacgagggctgctccaggagaagggcctcctgctggccagagcaaggaaggctgag

SEQ ID NO: 269645 - DNA, 120 bp, Artificial Sequence
  ENSG00000127191_16 (sequence is synthesized)
cagcttggttctcccctctggcccctggagagaagggagcattcctagacccctgggtgcttgtctgcacagagctctggtctgtgccaccttggccaggctggctgtgggagagggtct

SEQ ID NO: 269646 - DNA, 120 bp, Artificial Sequence
  ENSG00000127191_17 (sequence is synthesized)
ggtcccacgccgcctctgctcagaccactgtgtgggaggtgcacagcacagcctgcgggtaaagtgtgagagcttgccatccagctcacgaagacagagttattaaaccattcaaatctc

SEQ ID NO: 269647 - DNA, 120 bp, Artificial Sequence
  ENSG00000127191_18 (sequence is synthesized)
agatgactgcagagtgagagtgaaaccagcttccctcggaggctgcagcacagggctgacatgcaaacgtctgaaaaagaggcaagctctcggtgtgagcaagtggactgcggctatttg

SEQ ID NO: 269648 - DNA, 120 bp, Artificial Sequence
  ENSG00000127191_19 (sequence is synthesized)
tctttgggctccaagtttcgttttttcagaagaactgccccagctgtgtctggggtgaacaagatgtgctttcctccctagcacggggattgcgtcctggacacggagcggtagctccag

SEQ ID NO: 269649 - DNA, 120 bp, Artificial Sequence
  ENSG00000127191_20 (sequence is synthesized)
ggcactgccctagagtgagactcctacctctgtgggcagagatgccagaccgccctcagccacgacgtgcgatgcaaagctttctaggctcctgtgtggctctgccgcacaaacggctgt

SEQ ID NO: 269650 - DNA, 120 bp, Artificial Sequence
  ENSG00000127191_21 (sequence is synthesized)
ggcgcatggcattgtaccccccactccctgctccttgaaagagatgcagcttggtcattgcccagtgctgtctgcaagggagatggctccctggggaggtggcccagggtcagggtctcc

SEQ ID NO: 269651 - DNA, 120 bp, Artificial Sequence
  ENSG00000127191_22 (sequence is synthesized)
gggtaccagctggctgcagggagtaggggtgctatgcgccatgccaccctttgagaggactgaggagtgtctgggggacagagctgccacgaaggccgctgcccgctcatgctgaccgaa

SEQ ID NO: 269652 - DNA, 120 bp, Artificial Sequence
  ENSG00000127191_23 (sequence is synthesized)
aagatcccccgggagaaggtgagtgtccttcacctccttggaggaccgcagggcggggcccatgtgttggacgtgagggtcccgtgggtgggggtggggcaggttatgacccttgtgccc

SEQ ID NO: 269653 - DNA, 78 bp, Artificial Sequence
  ENSG00000127191_24 (sequence is synthesized)
ctcctggcctgaagtggaatcgctcctagctgacccctcacgtctcttatgatacgtacagaaagcaagagcagccca

SEQ ID NO: 269654 - DNA, 120 bp, Artificial Sequence
  ENSG00000127191_25 (sequence is synthesized)
cacgtctcttatgatacgtacagaaagcaagagcagcccatgccgtccggccgcgcaccaggtctcagtctgtgtgtctggttcaggtgaccatggtgttcagttcagttcctcctgcct

SEQ ID NO: 269655 - DNA, 120 bp, Artificial Sequence
  ENSG00000127191_26 (sequence is synthesized)
atgctgggagctctgcactaagcgttgggtgaagggtcagcattgtggaggccctgccacggaggtggtcttcttgggagctgcactcagccttctacaccagcaggtacggctacaaga

SEQ ID NO: 269656 - DNA, 120 bp, Artificial Sequence
  ENSG00000127191_27 (sequence is synthesized)
accggtgtcgcccggcttgggctcccggctcacctctcgggtgtgcggcaggggtctccgccccggggccacgggaggggaagcaagggcctcgctgtctcgccgcacctggggaaggga

SEQ ID NO: 269657 - DNA, 120 bp, Artificial Sequence
  ENSG00000127220_0 (sequence is synthesized)
aaagggccggctgtttcggcggccgcgggatgcccctgcgctgaccgccaggggcaggtgcccgcccgcgtagacgcacccggcctgaccccgcgccaccatgtaaacggcgccagcagg

SEQ ID NO: 269658 - DNA, 120 bp, Artificial Sequence
  ENSG00000127220_1 (sequence is synthesized)
cggacgctggcttctccgcctgggacccctccgccccgacccgggccccgcggccctcgatgaggacacaccatgctgaccggggtgaccgacggtatcttctgttgcctgctgggcacg

SEQ ID NO: 269659 - DNA, 120 bp, Artificial Sequence
  ENSG00000127220_2 (sequence is synthesized)
ccccccaacgccgtggggccactggagagcgtcgagtccagcgatggctacacctttgtagaggtcaagcccggccgcgtgctgcgggtgaagcatgcaggacccgccccagccgctgcc

SEQ ID NO: 269660 - DNA, 120 bp, Artificial Sequence
  ENSG00000127220_3 (sequence is synthesized)
ccacctccaccatcatccgcatcctcggatgcagcccagggggacctctccggcttggtccgctgtcagcgccggatcaccgtgtaccgcaatgggcggttgctggtggaaaacctgggc

SEQ ID NO: 269661 - DNA, 120 bp, Artificial Sequence
  ENSG00000127220_4 (sequence is synthesized)
cgagcccctcgagccgacctcctacacgggcagaatggctctggggagccgccggccgccctggaggtggagctggcagatccggcgggcagcgatggccgcttggcccccggcagcgca

SEQ ID NO: 269662 - DNA, 120 bp, Artificial Sequence
  ENSG00000127220_5 (sequence is synthesized)
ggcagcggcagcggcagtggcagtggtgggcggcggcggcgagccaggcgccccaagaggaccatccatattgactgtgagaagcgcatcactagctgcaaaggcgcccaggccgacgtg

SEQ ID NO: 269663 - DNA, 120 bp, Artificial Sequence
  ENSG00000127220_6 (sequence is synthesized)
gtgctctttttcatccatggtgtcggcggttccctggccatctggaaggagcagctggacttctttgtgcgcctaggctatgaggtggtggctcctgacctggccggccacggggccagc

SEQ ID NO: 269664 - DNA, 120 bp, Artificial Sequence
  ENSG00000127220_7 (sequence is synthesized)
tctgcgccccaggtggccgcagcctacaccttctatgcgctggctgaggacatgcgagcaatcttcaagcgctatgccaagaagcgaaatgtgctcattggccattcctacggtgtctct

SEQ ID NO: 269665 - DNA, 120 bp, Artificial Sequence
  ENSG00000127220_8 (sequence is synthesized)
ctgcacattcctggcacatgagtacccagacctagtgcacaaggtgatcatgatcaatggcgggggccctacggcgctggagcccagcttctgctcaatcttcaacatgcccacctgcgt

SEQ ID NO: 269666 - DNA, 120 bp, Artificial Sequence
  ENSG00000127220_9 (sequence is synthesized)
cctgcactgcttgtcgccctgcctggcctggagcttcctcaaggccggcttcgcccgccaaggagccaaggagaagcagctgttaaaggagggcaacgctttcaacgtgtcatccttcgt

SEQ ID NO: 269667 - DNA, 120 bp, Artificial Sequence
  ENSG00000127220_10 (sequence is synthesized)
actccgggccatgatgagcggccagtactggcccgagggcgacgaggtctaccacgccgagctcaccgtgcccgtcctgcttgtccacggcatgcacgataagtttgtgccggtggagga

SEQ ID NO: 269668 - DNA, 120 bp, Artificial Sequence
  ENSG00000127220_11 (sequence is synthesized)
agaccagcgcatggccgagatcctgctcctggcattcctgaagctcatcgacgagggcagccacatggtgatgctggaatgccctgagacggtcaacacgctgctccacgaattcctgct

SEQ ID NO: 269669 - DNA, 120 bp, Artificial Sequence
  ENSG00000127220_12 (sequence is synthesized)
ctgggagcccgagccctcgcccaaggctctaccggagccactgccggcgcctccagaagacaagaagtagccgctgggccggcggggcatcgcttggtgagcacagccgcagcaggagga

SEQ ID NO: 269670 - DNA, 120 bp, Artificial Sequence
  ENSG00000127220_13 (sequence is synthesized)
cgagcctgcgccaggtctgcagcgcagaccacctgggcgggccgttcgctccggtgggcggggccaggtcagggagacgcccccaggctgcctgggcggggcgtggcatccgagggagcc

SEQ ID NO: 269671 - DNA, 120 bp, Artificial Sequence
  ENSG00000127220_14 (sequence is synthesized)
agcccagcggacattccgctctccgcttccgtcccgcggggcccatcggcgttttggggccgcagccgggaccctcacggaagatgaccttgtacagaagctctccctcaccttcccccc

SEQ ID NO: 269672 - DNA, 120 bp, Artificial Sequence
  ENSG00000127220_15 (sequence is synthesized)
aacgccacggccaaggcaggccccccaccccgctgtcttccgtgtcagccgtgcttgatcctgggacccacgagccccacagggaccctcgaggccccatcccgttatccgagacccttc

SEQ ID NO: 269673 - DNA, 120 bp, Artificial Sequence
  ENSG00000127220_16 (sequence is synthesized)
ctaccccccattcctcggcgctgggagctatttttgcccaagggggggggatgggggggctggcgccaccgaacctgcacatctcaacttgtaactcaataaacagaagtgacaatcgga

SEQ ID NO: 269674 - DNA, 120 bp, Artificial Sequence
  ENSG00000127220_17 (sequence is synthesized)
actgctaccctcatttcacagggacaatccatgcggatcggagataaaagtttttcattcttagaggcgggacacaccatgctgaccggggtgaccgacggtatcttctgttgcctgctg

SEQ ID NO: 269675 - DNA, 120 bp, Artificial Sequence
  ENSG00000127241_0 (sequence is synthesized)
acacacagagtgatacaaatacctgcttgagcccctcagttattttctctcaagggctgaagtcagccacacaggataaaggagggaagggaaggagcagatcttttcggtaggaagaca

SEQ ID NO: 269676 - DNA, 120 bp, Artificial Sequence
  ENSG00000127241_1 (sequence is synthesized)
gattttgttgtcaggttcctgggagtgcaagagcaagtcaaaggagagagagaggagagaggaaaagccagagggagagagggggagaggggatctgttgcaggcaggggaaggcgtgac

SEQ ID NO: 269677 - DNA, 120 bp, Artificial Sequence
  ENSG00000127241_2 (sequence is synthesized)
ctgaatggagaatgccagccaattccagagacacacagggacctcagaacaaagataaggcatcacggacaccacaccgggcacgagctcacaggcaagtcaagctgggaggaccaaggc

SEQ ID NO: 269678 - DNA, 120 bp, Artificial Sequence
  ENSG00000127241_3 (sequence is synthesized)
cgggcagccgggagcacccaaggcaggaaaatgaggtggctgcttctctattatgctctgtgcttctccctgtcaaaggcttcagcccacaccgtggagctaaacaatatgtttggccag

SEQ ID NO: 269679 - DNA, 120 bp, Artificial Sequence
  ENSG00000127241_4 (sequence is synthesized)
atccagtcgcctggttatccagactcctatcccagtgattcagaggtgacttggaatatcactgtcccagatgggtttcggatcaagctttacttcatgcacttcaacttggaatcctcc

SEQ ID NO: 269680 - DNA, 120 bp, Artificial Sequence
  ENSG00000127241_5 (sequence is synthesized)
tacctttgtgaatatgactatgtgaaggtagaaactgaggaccaggtgctggcaaccttctgtggcagggagaccacagacacagagcagactcccggccaggaggtggtcctctcccct

SEQ ID NO: 269681 - DNA, 120 bp, Artificial Sequence
  ENSG00000127241_6 (sequence is synthesized)
ggctccttcatgtccatcactttccggtcagatttctccaatgaggagcgtttcacaggctttgatgcccactacatggctgtggatgtggacgagtgcaaggagagggaggacgaggag

SEQ ID NO: 269682 - DNA, 120 bp, Artificial Sequence
  ENSG00000127241_7 (sequence is synthesized)
ctgtcctgtgaccactactgccacaactacattggcggctactactgctcctgccgcttcggctacatcctccacacagacaacaggacctgccgagtggagtgcagtgacaacctcttc

SEQ ID NO: 269683 - DNA, 120 bp, Artificial Sequence
  ENSG00000127241_8 (sequence is synthesized)
actcaaaggactggggtgatcaccagccctgacttcccaaacccttaccccaagagctctgaatgcctgtataccatcgagctggaggagggtttcatggtcaacctgcagtttgaggac

SEQ ID NO: 269684 - DNA, 120 bp, Artificial Sequence
  ENSG00000127241_9 (sequence is synthesized)
atatttgacattgaggaccatcctgaggtgccctgcccctatgactacatcaagatcaaagttggtccaaaagttttggggcctttctgtggagagaaagccccagaacccatcagcacc

SEQ ID NO: 269685 - DNA, 120 bp, Artificial Sequence
  ENSG00000127241_10 (sequence is synthesized)
cagagccacagtgtcctgatcctgttccatagtgacaactcgggagagaaccggggctggaggctctcatacagggctgcaggaaatgagtgcccagagctacagcctcctgtccatggg

SEQ ID NO: 269686 - DNA, 120 bp, Artificial Sequence
  ENSG00000127241_11 (sequence is synthesized)
aaaatcgagccctcccaagccaagtatttcttcaaagaccaagtgctcgtcagctgtgacacaggctacaaagtgctgaaggataatgtggagatggacacattccagattgagtgtctg

SEQ ID NO: 269687 - DNA, 120 bp, Artificial Sequence
  ENSG00000127241_12 (sequence is synthesized)
aaggatgggacgtggagtaacaagattcccacctgtaaaattgtagactgtagagccccaggagagctggaacacgggctgatcaccttctctacaaggaacaacctcaccacatacaag

SEQ ID NO: 269688 - DNA, 120 bp, Artificial Sequence
  ENSG00000127241_13 (sequence is synthesized)
tctgagatcaaatactcctgtcaggagccctattacaagatgctcaacaataacacaggtatatatacctgttctgcccaaggagtctggatgaataaagtattggggagaagcctaccc

SEQ ID NO: 269689 - DNA, 120 bp, Artificial Sequence
  ENSG00000127241_14 (sequence is synthesized)
acctgccttccagtgtgtgggctccccaagttctcccggaagctgatggccaggatcttcaatggacgcccagcccagaaaggcaccactccctggattgccatgctgtcacacctgaat

SEQ ID NO: 269690 - DNA, 120 bp, Artificial Sequence
  ENSG00000127241_15 (sequence is synthesized)
gggcagcccttctgcggaggctcccttctaggctccagctggatcgtgaccgccgcacactgcctccaccagtcactcgatccggaagatccgaccctacgtgattcagacttgctcagc

SEQ ID NO: 269691 - DNA, 120 bp, Artificial Sequence
  ENSG00000127241_16 (sequence is synthesized)
ccttctgacttcaaaatcatcctgggcaagcattggaggctccggtcagatgaaaatgaacagcatctcggcgtcaaacacaccactctccacccccagtatgatcccaacacattcgag

SEQ ID NO: 269692 - DNA, 120 bp, Artificial Sequence
  ENSG00000127241_17 (sequence is synthesized)
aatgacgtggctctggtggagctgttggagagcccagtgctgaatgccttcgtgatgcccatctgtctgcctgagggaccccagcaggaaggagccatggtcatcgtcagcggctggggg

SEQ ID NO: 269693 - DNA, 120 bp, Artificial Sequence
  ENSG00000127241_18 (sequence is synthesized)
aagcagttcttgcaaaggttcccagagaccctgatggagattgaaatcccgattgttgaccacagcacctgccagaaggcttatgccccgctgaagaagaaagtgaccagggacatgatc

SEQ ID NO: 269694 - DNA, 120 bp, Artificial Sequence
  ENSG00000127241_19 (sequence is synthesized)
tgtgctggggagaaggaagggggaaaggacgcctgtgcgggtgactctggaggccccatggtgaccctgaatagagaaagaggccagtggtacctggtgggcactgtgtcctggggtgat

SEQ ID NO: 269695 - DNA, 120 bp, Artificial Sequence
  ENSG00000127241_20 (sequence is synthesized)
gactgtgggaagaaggaccgctacggagtatactcttacatccaccacaacaaggactggatccagagggtcaccggagtgaggaactgaatttggctcctcagccccagcaccaccagc

SEQ ID NO: 269696 - DNA, 120 bp, Artificial Sequence
  ENSG00000127241_21 (sequence is synthesized)
cacccccttttcactctctttaaagagatggagcaagagagtggtcagaacacaggccgaatccaggctctatcacttactagtttgcagtgctgggcaggtgacttcatctcttcgaac

SEQ ID NO: 269697 - DNA, 120 bp, Artificial Sequence
  ENSG00000127241_22 (sequence is synthesized)
ttcagtttcttcataagatggaaatgctataccttacctacctcgtaaaagtctgatgaggaaaagattaactaatagatgcatagcacttaacagagtgcatagcatacactgttttca

SEQ ID NO: 269698 - DNA, 120 bp, Artificial Sequence
  ENSG00000127241_23 (sequence is synthesized)
ataaatgcaccttagcagaaggtcgatgtgtctaccaggcagacgaagctctcttacaaacccctgcctgggtcttagcattgatcagtgacacacctctcccctcaaccttgaccatct

SEQ ID NO: 269699 - DNA, 120 bp, Artificial Sequence
  ENSG00000127241_24 (sequence is synthesized)
ccatctgcccttaaatgctgtatgcttttttgccaccgtgcaacttgcccaacatcaatcttcaccctcatccctaaaaaagtaaaacagacaaggttctgagtcctgtggtatgtcccc

SEQ ID NO: 269700 - DNA, 120 bp, Artificial Sequence
  ENSG00000127241_25 (sequence is synthesized)
tagcaaatgtaactaggaacatgcactagatgacagattgcgggagggcctgagagaagcagggacaggagggagcctggggattgtggtttgggaaggcagacacctggttctagaact

SEQ ID NO: 269701 - DNA, 120 bp, Artificial Sequence
  ENSG00000127241_26 (sequence is synthesized)
agctctgcccttagccccctgtatgaccctatgcaagtcctcctccctcatctcaaagggtcctcaaagctctgacgatctaagatacaatgaagccattttccccctgataagatgagg

SEQ ID NO: 269702 - DNA, 120 bp, Artificial Sequence
  ENSG00000127241_27 (sequence is synthesized)
taaagccaatgtaaccaaaaggcaaaaattacaatcggttcaaaggaactttgatgcagacaaaatgctgctgctgctgctcctgaaatacccacccctttccactacgggtgggttccc

SEQ ID NO: 269703 - DNA, 120 bp, Artificial Sequence
  ENSG00000127241_28 (sequence is synthesized)
aaggacatgggacaggcaaagtgtgagccaaaggatccttccttattcctaagcagagcatctgctctgggccctggcctccttcccttcttgggaaactgggctgcatgaggtgggccc

SEQ ID NO: 269704 - DNA, 120 bp, Artificial Sequence
  ENSG00000127241_29 (sequence is synthesized)
tggtagtttgtaccccaggcccctatactcttccttcctatgtccacagctgaccccaagcagccgttccccgactcctcacccctgagcctcaccctgaactccctcatcttgcaaggc

SEQ ID NO: 269705 - DNA, 120 bp, Artificial Sequence
  ENSG00000127241_30 (sequence is synthesized)
cataagtgttttccaagcaaaatgcctctcccatcctctctcaggaagcttctagagactttatgccctccagagctccaagatataagccctccaagggatcagaagctccaagttcct

SEQ ID NO: 269706 - DNA, 120 bp, Artificial Sequence
  ENSG00000127241_31 (sequence is synthesized)
gtcttctgttttatagaaattgatcttccctgggggactttaactcttgacctgtatgcagctgttggagtaattccaggtctcttgaaaaaaaagaggaagataatggagaatgagaac

SEQ ID NO: 269707 - DNA, 120 bp, Artificial Sequence
  ENSG00000127241_32 (sequence is synthesized)
atatatatatatatattaagccccaggctgaatactcagggacagcaattcacagcctgcctctggttctataaacaagtcattctacctctttgtgccctgctgtttattctgtaaggg

SEQ ID NO: 269708 - DNA, 120 bp, Artificial Sequence
  ENSG00000127241_33 (sequence is synthesized)
gaaggtggcaatgggacccagctccatcagacacttgtcaagctagcagaaactccattttcaatgccaaagaagaactgtaatgctgttttggaatcatcccaaggcatcccaagacac

SEQ ID NO: 269709 - DNA, 120 bp, Artificial Sequence
  ENSG00000127241_34 (sequence is synthesized)
catatcttcccatttcaagcactgcctgggcacaccccaacatcccaggctgtggtggctcctgtgggaactacctagatgaagagagtatcatttataccttctaggagctcctattgg

SEQ ID NO: 269710 - DNA, 120 bp, Artificial Sequence
  ENSG00000127241_35 (sequence is synthesized)
gagacatgaaacatatgtaattgactaccatgtaatagaacaaaccctgccaagtgctgctttggaaagtcatggaggtaaaagaaagaccattctggtatgaaggttttgggggaggag

SEQ ID NO: 269711 - DNA, 120 bp, Artificial Sequence
  ENSG00000127241_36 (sequence is synthesized)
atatcaatcaagaaggcttcccagaagaggtgactggaccagagccttgtccacaggtaagacggaggaggccttccacatggagggagaacaatagtaaatgtccactcaagatgtcct

SEQ ID NO: 269712 - DNA, 120 bp, Artificial Sequence
  ENSG00000127241_37 (sequence is synthesized)
ttattataccagctcctcccacaaaaacacatgtccagtggactctttttctgggatcagaaccaacaccaaaaagagcttttctccttaaagttagaattctaaacaggacttgaaatg

SEQ ID NO: 269713 - DNA, 120 bp, Artificial Sequence
  ENSG00000127241_38 (sequence is synthesized)
gcctcaaggtttgtgcacaaatactgacttctggctggacccagcttattctgtttatttctccaattgcaatttcatccttatcctgagaaaatgtctaaataggccatggaacccagg

SEQ ID NO: 269714 - DNA, 120 bp, Artificial Sequence
  ENSG00000127241_39 (sequence is synthesized)
cttccccgtgacctacaagcacttattagctgtgccagctcctgcactgctgctaaggtccaagaaacccagatctctcacagagccatagaagcagagggctggagtatctgtgaggac

SEQ ID NO: 269715 - DNA, 120 bp, Artificial Sequence
  ENSG00000127241_40 (sequence is synthesized)
aacaaccttgtctaacttcgcgacctcattcttgagcatttctactgatgagaaactcactacccccaattgcagctcattcaactttaaaattgctgctttttgaatcactgattgtga

SEQ ID NO: 269716 - DNA, 120 bp, Artificial Sequence
  ENSG00000127241_41 (sequence is synthesized)
atattaatttaaaaaaataagtaagaaaatgttttaaatgtgctgcctctttaaaaggtctcctctttgtgcaaccaaaacccacctctctagaatacagtttgtataactgaagctata

SEQ ID NO: 269717 - DNA, 120 bp, Artificial Sequence
  ENSG00000127241_42 (sequence is synthesized)
atttcataccatgagtgctgctgttagcaataataatcatgcccggattttattaacaacagaagctgttgctcgtatgaaaaaacaaacattagttctaataaacatctgcattgagtc

SEQ ID NO: 269718 - DNA, 120 bp, Artificial Sequence
  ENSG00000127241_43 (sequence is synthesized)
aggcaggaaaatgagggtgctgcctgctggcgaatgtgactctcctcctgttcacccacaaggctgatttttccgtgttcctcctctggaaagagcattgctttctctcttccagcactt

SEQ ID NO: 269719 - DNA, 120 bp, Artificial Sequence
  ENSG00000127241_44 (sequence is synthesized)
cccacctgtaaaaaaaatgaaatcgatctggagagcgaactcaagtcagagcaagtgacagagtgaatgacgggaccccacacaatgcagacatccagaaatggatcactcccaagaccc

SEQ ID NO: 269720 - DNA, 120 bp, Artificial Sequence
  ENSG00000127241_45 (sequence is synthesized)
ctggggcccagagctgcaccacccctccccacccacaacacccccgtgcccctttccatgtggattagaatgggtgctgaacaacatgatctcagcagttgaagctgctacgtgtgtgaa

SEQ ID NO: 269721 - DNA, 120 bp, Artificial Sequence
  ENSG00000127241_46 (sequence is synthesized)
tgccaagcctggtcaagaggatcattgggggccgaaatgctgagcctggcctcttcccgtggcaggccctgatagtggtggaggacacttcgagagtgccaaatgacaagtggtttggga

SEQ ID NO: 269722 - DNA, 120 bp, Artificial Sequence
  ENSG00000127241_47 (sequence is synthesized)
gtggggccctgctctctgcgtcctggatcctcacagcagctcatgtgctgcgctcccagcgtagagacaccacggtgataccagtctccaaggagcatgtcaccgtctacctgggcttgc

SEQ ID NO: 269723 - DNA, 120 bp, Artificial Sequence
  ENSG00000127241_48 (sequence is synthesized)
atgatgtgcgagacaaatcgggggcagtcaacagctcagctgcccgagtggtgctccacccagacttcaacatccaaaactacaaccacgatatagctctggtgcagctgcaggagcctg

SEQ ID NO: 269724 - DNA, 120 bp, Artificial Sequence
  ENSG00000127241_49 (sequence is synthesized)
tgcccctgggaccccacgttatgcctgtctgcctgccaaggcttgagcctgaaggcccggccccccacatgctgggcctggtggccggctggggcatctccaatcccaatgtgacagtgg

SEQ ID NO: 269725 - DNA, 120 bp, Artificial Sequence
  ENSG00000127241_50 (sequence is synthesized)
ccgtggtgcctcacgctgagtgcaaaactagctatgagtcccgctcgggcaattacagcgtcacggagaacatgttctgtgctggctactacgagggcggcaaagacacgtgccttggag

SEQ ID NO: 269726 - DNA, 120 bp, Artificial Sequence
  ENSG00000127241_51 (sequence is synthesized)
atagcggtggggcctttgtcatctttgatgacttgagccagcgctgggtggtgcaaggcctggtgtcctgggggggacctgaagaatgcggcagcaagcaggtctatggagtctacacaa

SEQ ID NO: 269727 - DNA, 120 bp, Artificial Sequence
  ENSG00000127241_52 (sequence is synthesized)
aggtctccaattacgtggactgggtgtgggagcagatgggcttaccacaaagtgttgtggagccccaggtggaacggtgagctgacttacttcctcggggcctgcctcccctgagcgaag

SEQ ID NO: 269728 - DNA, 120 bp, Artificial Sequence
  ENSG00000127241_53 (sequence is synthesized)
ctacaccgcacttccgacagcacactccacattacttatcagaccatatggaatggaacacactgacctagcggtggcttctcctaccgagacagcccccaggaccctgagaggcagagt

SEQ ID NO: 269729 - DNA, 120 bp, Artificial Sequence
  ENSG00000127241_54 (sequence is synthesized)
gtggtatagggaaaaggctccaggcaggagacctgtgttcctgagcttgtccaagtctctttccctgtctgggcctcactctaccgagtaatacaatgcaggagctcaaccaaggcctct

SEQ ID NO: 269730 - DNA, 120 bp, Artificial Sequence
  ENSG00000127241_55 (sequence is synthesized)
gtgccaatcccagcactcctttccaggccatgcttcttaccccagtggcctttattcactcctgaccacttatcaaacccatcggtcctactgttggtataactgagcttggacctgact

SEQ ID NO: 269731 - DNA, 120 bp, Artificial Sequence
  ENSG00000127241_56 (sequence is synthesized)
attagaaaatggtttctaacattgaactgaatgccgcatctgtatattttcctgctctgccttctgggactagccttggcctaatccttcctctaggagaagagcattcaggttttggga

SEQ ID NO: 269732 - DNA, 120 bp, Artificial Sequence
  ENSG00000127241_57 (sequence is synthesized)
gatggctcatagccaagcccctctctcttagtgtgatcccttggagcaccttcatgcctggggtttctctcccaaaagcttcttgcagtctaagccttatcccttatgttccccattaaa

SEQ ID NO: 269733 - DNA, 120 bp, Artificial Sequence
  ENSG00000127241_58 (sequence is synthesized)
ggaatttcaaaagacatggagaaagttgggaaggtttgtgctgactgctgggagcagaatagccgtgggaggcccaccaagcccttaaattcccattgtcaactcagaacacatttgggc

SEQ ID NO: 269734 - DNA, 120 bp, Artificial Sequence
  ENSG00000127241_59 (sequence is synthesized)
ccatatgccaccctggaacaccagctgacaccatgggcgtccacacctgctgctccagacaagcacaaagcaatctttcagccttgaaatgtattatctgaaaggctacctgaagcccag

SEQ ID NO: 269735 - DNA, 120 bp, Artificial Sequence
  ENSG00000127241_60 (sequence is synthesized)
gcccgaatatggggacttagtcgattacctggaaaaagaaaagacccacactgtgtcctgctgtgcttttgggcaggaaaatggaagaaagagtggggtgggcacattagaagtcaccca

SEQ ID NO: 269736 - DNA, 120 bp, Artificial Sequence
  ENSG00000127241_61 (sequence is synthesized)
aatcctgccaggctgcctggcatccctggggcatgagctgggcggagaatccaccccgcaggatgttcagagggacccactccttcatttttcagagtcaaaggaatcagaggctcaccc

SEQ ID NO: 269737 - DNA, 120 bp, Artificial Sequence
  ENSG00000127241_62 (sequence is synthesized)
atggcaggcagtgaaaagagccaggagtcctgggttctagtccctgctctgcccccaactggctgtataacctttgaaaaatcattttctttgtctgagtctctggttctccgtcagcaa

SEQ ID NO: 269738 - DNA, 120 bp, Artificial Sequence
  ENSG00000127241_63 (sequence is synthesized)
caggctggcataaggtcccctgcaggttccttctagctggagcactcagagcttccctgactgctagcagcctctctggccctcacagggctgattgttctccttctccctggagctctc

SEQ ID NO: 269739 - DNA, 120 bp, Artificial Sequence
  ENSG00000127241_64 (sequence is synthesized)
tctcctgaaaatctccatcagagcaaggcagccagagaagcccctgagagggaatgattgggaagtgtccactttctcaaccggctcatcaaacacactcctttgtctatgaatggcaca

SEQ ID NO: 269740 - DNA, 120 bp, Artificial Sequence
  ENSG00000127241_65 (sequence is synthesized)
tgtaaatgatgttatattttgtatcttttatatcatatgcttcaccattctgtaaagggcctctgcattgttgctcccatcaggggtctcaagtggaaataaaccctcgtggataaccaa

SEQ ID NO: 269741 - DNA, 120 bp, Artificial Sequence
  ENSG00000127241_66 (sequence is synthesized)
ttttagcacctctgagtggactgtacttttctcaacggaaaaaaaaaatgcccttggtccttgagacaaaagatttaatatacaaccatgtggcctcaggctgaccagatcaaagtggtt

SEQ ID NO: 269742 - DNA, 120 bp, Artificial Sequence
  ENSG00000127241_67 (sequence is synthesized)
tctaatccattctacatgtcaagtttaaatgaaccagactgcctgtgactttatgaatctgaaggtattacctgttgctgctttcttaaccaccatgagtaggtaaagcaaataataact

SEQ ID NO: 269743 - DNA, 120 bp, Artificial Sequence
  ENSG00000127241_68 (sequence is synthesized)
cacagagtgtggatttttgagaatctgaatgttttctcattcacaaaagtatcccttctacccctatctggcgcagggctgaaatgtcatcattagaggttctgtcttctggggcttaca

SEQ ID NO: 269744 - DNA, 120 bp, Artificial Sequence
  ENSG00000127241_69 (sequence is synthesized)
agttctatgtttcttaaaattcgctgattaaaaattttaaaaagataggatcacacctgaaagcagtggtcccagctctgtgctgtgggacatcacaggtcctaaacagtgatagagaaa

SEQ ID NO: 269745 - DNA, 120 bp, Artificial Sequence
  ENSG00000127241_70 (sequence is synthesized)
gggctggggagtggcagctggaatctctgcttccgtctgaacatctggacacacatgtcagagaatctttgcattaaatggactgcccgatctatttggtgattaaatggctgtgcggtg

SEQ ID NO: 269746 - DNA, 120 bp, Artificial Sequence
  ENSG00000127241_71 (sequence is synthesized)
aggggagaaccctgggcagtctggagactgaggtgccattctcggctagagacaccacccaaagaagagatgggctggctactaaagacaagtgtcagttgaataaatgtctttaaacct

SEQ ID NO: 269747 - DNA, 120 bp, Artificial Sequence
  ENSG00000127241_72 (sequence is synthesized)
aggaccatcctgaggtgccctgcccctatgactacatcaaggtgagcctgcaatgaacacttgtcctggagatgctggaaaatcttggctgagttgggaaaattgatattgcggaacctt

SEQ ID NO: 269748 - DNA, 120 bp, Artificial Sequence
  ENSG00000127241_73 (sequence is synthesized)
aaacatttctcatgaatttcaattgtagtctccggtggaattctcccactccagagacaccaggacccaaacaccaattctagcttattcagaagaattagaaaatgaaaatgagcttgc

SEQ ID NO: 269749 - DNA, 120 bp, Artificial Sequence
  ENSG00000127241_74 (sequence is synthesized)
ttcaggaaagtgtaatgaaagctcattttatgccaaaagtgcaaacagcacaggcttcagggtgatggaaaacaaaaggaagctcgcagtgctgaggaagagcatgtgggtagaaactga

SEQ ID NO: 269750 - DNA, 120 bp, Artificial Sequence
  ENSG00000127241_75 (sequence is synthesized)
agctcacaggcaagtcaagctgggaggaccaaggccgggcagccgggagcacccaaggcaggaaaatgagggctctgagaagggagctgtgggtgggctgggtgccttccccaggactcc

SEQ ID NO: 269751 - DNA, 120 bp, Artificial Sequence
  ENSG00000127241_76 (sequence is synthesized)
ttgaaattatttgcattttgagtggactctctagctaatcaaaaagatgaatttggagtcctaaagttaaaatcacaatgtctaaatggcactcagggataaattatatctcactgtttc

SEQ ID NO: 269752 - DNA, 120 bp, Artificial Sequence
  ENSG00000127241_77 (sequence is synthesized)
ccaaaatgaccaggtaaaattcaggaggacatggaactttggaaattttaccagggctctggaaattctgacagttgatgtccaccattggccagctagtacctagaataggccatttaa

SEQ ID NO: 269753 - DNA, 120 bp, Artificial Sequence
  ENSG00000127241_78 (sequence is synthesized)
ctggaaaacagatccttaagaaccactagttccatttactaaaacagccctgggtttgaggtcaaatcttgctctcattctgatagtaacttgctgtatgtccttagacgagtcaagtct

SEQ ID NO: 269754 - DNA, 120 bp, Artificial Sequence
  ENSG00000127241_79 (sequence is synthesized)
cctctctgggctcatagataaaataaagaggacattctagattgcctacttcaggtttctttccagctgtgacattctatgattcatctatgattcttcgactctggcataggctgttat

SEQ ID NO: 269755 - DNA, 120 bp, Artificial Sequence
  ENSG00000127241_80 (sequence is synthesized)
acctaagattaggatttccttaagaatgaaaagattgacaaatttgggtccagagcctctgatatggccatgaaaagatgccctgactctcagctgactcacactgggctccatcagtgc

SEQ ID NO: 269756 - DNA, 120 bp, Artificial Sequence
  ENSG00000127241_81 (sequence is synthesized)
tgacaactcccctaagactgagctggactggaaagctccccaaagaccacctctgaggagcaggcatctttattcatgtcctgtactgggaattatggctcaaacatgcggccatcaaca

SEQ ID NO: 269757 - DNA, 120 bp, Artificial Sequence
  ENSG00000127241_82 (sequence is synthesized)
attatagaaaatgaacaggggaagactgaaagctgatccacctccaaccctgcctcctggcttctatggccaagcaagctgcctgtagagaggcagcagggtggggctgtgtactcatac

SEQ ID NO: 269758 - DNA, 120 bp, Artificial Sequence
  ENSG00000127241_83 (sequence is synthesized)
aggagctgggtttttttattttttgtgccaaactccaatgtgagcacattagctgctgttactcagcctaggattgggactagaagaacaaaagattatttagtttatgtcagctagagt

SEQ ID NO: 269759 - DNA, 120 bp, Artificial Sequence
  ENSG00000127241_84 (sequence is synthesized)
tttctcactaagccaagggcttcattcttgggcagaagaggcagagaggattgcacaataaaactagaagtaaaagaaagaggccctggtgggtaaaagactggagtctgcttaaacctc

SEQ ID NO: 269760 - DNA, 120 bp, Artificial Sequence
  ENSG00000127241_85 (sequence is synthesized)
agtagaccttcccctacccaaaattgacactgggcaggtgagttgaccacacagtagtaccataatgaatggaagagacctcaaaagcaggaccatgggtagcttcacaggctgtacact

SEQ ID NO: 269761 - DNA, 120 bp, Artificial Sequence
  ENSG00000127241_86 (sequence is synthesized)
gcacaccccaggggtgcccttcagaggcattataacattgctttctggaattgtgtgcagtgcacaacctgtacatctgcatgagatagatccatcagatagccaaaggaggatgagcaa

SEQ ID NO: 269762 - DNA, 120 bp, Artificial Sequence
  ENSG00000127241_87 (sequence is synthesized)
gatcaaatactcctgtcaggagccctattacaagatgctcaacaataacacaggtaagccatccatgctaagccatcccactcccgtttcacactctcggggcctcagggttggactggg

SEQ ID NO: 269763 - DNA, 120 bp, Artificial Sequence
  ENSG00000127241_88 (sequence is synthesized)
ggccgagacagctgtgaaaggaagaactgctcataagtgtgtagagcctgataatgcaaaacgtgtcactcacacatctcaggttctcacttttcatgagcttgtgttactgtgtccatg

SEQ ID NO: 269764 - DNA, 120 bp, Artificial Sequence
  ENSG00000127241_89 (sequence is synthesized)
tggagatgcagaaacagtctcaaaaccaaaaagcaggcttttttgtttttaactttaaagctagcactgatttactaatgagttgttggtgggagcgtgaaggagtcacacactgacaca

SEQ ID NO: 269765 - DNA, 120 bp, Artificial Sequence
  ENSG00000127241_90 (sequence is synthesized)
actaagagaagaaacgagaccctaaaggaagcctggaatcccccaagttaaactccttcatgtggtctgaggctgagttggggtttccaaaaaaaggccagtattactgcttcacccaga

SEQ ID NO: 269766 - DNA, 120 bp, Artificial Sequence
  ENSG00000127241_91 (sequence is synthesized)
ctctgccttggcttctgggtgagggcaacatctcaccaggccagacccattcagcaggtaagggaccttccttcaaagacctcttcccctggtacggacaggggtccaggcagggttggg

SEQ ID NO: 269767 - DNA, 120 bp, Artificial Sequence
  ENSG00000127241_92 (sequence is synthesized)
gagcgaggagtggatcctctgtctccccaggtagcccagcatatcccctgaccacagctcaagcacagccacagcagtccctgtccaggccccatccatgccacctggcagagacccctg

SEQ ID NO: 269768 - DNA, 120 bp, Artificial Sequence
  ENSG00000127241_93 (sequence is synthesized)
gctgccccaggggctgggcagcagcacactggccagagggtgaaggaccagcaataacctgaccattggccacactgggggtttgggaggaactgggaggagaaatgcttagagacataa

SEQ ID NO: 269769 - DNA, 120 bp, Artificial Sequence
  ENSG00000127241_94 (sequence is synthesized)
cccgcctctccctgccttgtggcagcccaacacccgctcacatgcactcatagtccctagcagaaaaggaactctcagggagaaaggagggcccatcggctctgcctctctggcatgcaa

SEQ ID NO: 269770 - DNA, 90 bp, Artificial Sequence
  ENSG00000127241_95 (sequence is synthesized)
agaaaggagggcccatcggctctgcctctctggcatgcaagcactgagaacattctcctgactcatctaagcctccaactcctctttgtt

SEQ ID NO: 269771 - DNA, 74 bp, Artificial Sequence
  ENSG00000127241_96 (sequence is synthesized)
gcaattctctcgcctcagcctcccaagcagctgtgattacagacgcttttgccatgttggtcaggctggtctca

SEQ ID NO: 269772 - DNA, 120 bp, Artificial Sequence
  ENSG00000127241_97 (sequence is synthesized)
tttaaaagagggaagagttacaaagctcttagagctatttcaaaatgccagtgagatggtggccacaaatgtatgcttattaaagagtctgtcaaatggagaagaaaggaaagggcatct

SEQ ID NO: 269773 - DNA, 120 bp, Artificial Sequence
  ENSG00000127241_98 (sequence is synthesized)
ccaggcaggagtgggattccccagagctttggacagacaccatgctgaagagtgtggtgtttatttttgggggtgacagcaagccattcgtgattctgagctgagaaaggacatggtcac

SEQ ID NO: 269774 - DNA, 120 bp, Artificial Sequence
  ENSG00000127241_99 (sequence is synthesized)
attcccattttagaaagatccttcatgttgcaaagggagtttgatagaaggactaggatggtagccctgtgggtatttgaagatatttggaggttaattggtccctttggaggattgtat

SEQ ID NO: 269775 - DNA, 120 bp, Artificial Sequence
  ENSG00000127241_100 (sequence is synthesized)
cccagagagtacctgccacattcttcctcattcttcttagtacatctaggctcagagacaatcgtatctgagcctagatgaccatttggaggactttgtaataactcactttagagaaat

SEQ ID NO: 269776 - DNA, 120 bp, Artificial Sequence
  ENSG00000127241_101 (sequence is synthesized)
taaatacccagatctattttccatgtgttacaaatcaaccattttctccctcctctcctaacctctttcactaatccaggtatatatacctgttctgcccaaggagtctggatgaataaa

SEQ ID NO: 269777 - DNA, 120 bp, Artificial Sequence
  ENSG00000127241_102 (sequence is synthesized)
tgaaagcatttgtcacactgtgtaatacctgcctgtgtctgtgttcctcaatctcaacactgctattgtgtgcacagcactgtgtctatctctcatcacctccatctcatgctttgctcg

SEQ ID NO: 269778 - DNA, 120 bp, Artificial Sequence
  ENSG00000127241_103 (sequence is synthesized)
ggaaaggggagtgaccaggccacagaaactctcgaaacctgcccctccccagggcagatgggctgccagaacttgtcatagttccagcacagaatttcctagctgcccatcaacttctca

SEQ ID NO: 269779 - DNA, 120 bp, Artificial Sequence
  ENSG00000127241_104 (sequence is synthesized)
aatgctccagaaattccaaagcatgcgtcccaggcggtctcacactctgaaagtggcacaaaagtttgttttttttttttttttaatcagagcatgagctggtttgaatttttaaaatat

SEQ ID NO: 269780 - DNA, 120 bp, Artificial Sequence
  ENSG00000127249_0 (sequence is synthesized)
agtcagctgaggagctgcggtggctcggcgagttggagttcatcctggaagcgtctgcacgacaaggtcagggaggaggtgtggaataactttttcatgggacactttgagaagggccag

SEQ ID NO: 269781 - DNA, 120 bp, Artificial Sequence
  ENSG00000127249_1 (sequence is synthesized)
cacgctctgctcaatgaaggagaagagaatgagatggagatatttggctatcggactcaaggctgccggaaaagtctctgccttgccggatccatcttctcatttggaatcctccccttg

SEQ ID NO: 269782 - DNA, 120 bp, Artificial Sequence
  ENSG00000127249_2 (sequence is synthesized)
gtgttttactggagaccagcatggcacgtatgggcacattgtgtcccatgttccttgcaagaagcagacactgtgttgctgaggacaacggatgaattccaaatttactcttggaaaaag

SEQ ID NO: 269783 - DNA, 120 bp, Artificial Sequence
  ENSG00000127249_3 (sequence is synthesized)
gtaatatggatctacctgtcagcattaaacagcgcatttggtctcactcctgaccaccctctcatgacagatgaggagtatatcataaatagagccataagaaagccagacctaaaggtg

SEQ ID NO: 269784 - DNA, 120 bp, Artificial Sequence
  ENSG00000127249_4 (sequence is synthesized)
agatgcatcaaagtgcagaaaataagatatgtttggaactacttagaaggacagttccagaaaattggttctttggaagactggcttagttctgccaagatacatcaaaaatttggatca

SEQ ID NO: 269785 - DNA, 120 bp, Artificial Sequence
  ENSG00000127249_5 (sequence is synthesized)
ggcttgacaagagaagaacaggagattaggaggttaatatgtgggcctaatactatcgatgttgaagttacaccaatttggaaactgctcatcaaggaggttctaaatccattttatata

SEQ ID NO: 269786 - DNA, 120 bp, Artificial Sequence
  ENSG00000127249_6 (sequence is synthesized)
tttcaactcttcagtgtctgtttgtggtttagtgaagactataaggaatatgcttttgccatcataatcatgtccataatttccatatctttgacagtatatgatctcagagagcaatct

SEQ ID NO: 269787 - DNA, 120 bp, Artificial Sequence
  ENSG00000127249_7 (sequence is synthesized)
gtaaaactccaccatctcgtcgagtcacataatagcattacggtctctgtatgtgggagaaaagctggagttcaagagctggaatcacgcgtcctggtgcctggagatttattaattttg

SEQ ID NO: 269788 - DNA, 120 bp, Artificial Sequence
  ENSG00000127249_8 (sequence is synthesized)
acagggaacaaagtgctaatgccatgtgatgccgttctgattgaaggcagctgtgtggtggatgaaggcatgctgacaggagaaagtattccagtcaccaaaactccgttacccaagatg

SEQ ID NO: 269789 - DNA, 120 bp, Artificial Sequence
  ENSG00000127249_9 (sequence is synthesized)
gatagctctgtgccctggaaaacacagagtgaagcggattacaagcggcatgtcctcttctgtggaacagaggttatccaggccaaggcagcttgctctgggaccgtgagagccgtggta

SEQ ID NO: 269790 - DNA, 120 bp, Artificial Sequence
  ENSG00000127249_10 (sequence is synthesized)
ctgcagactggattcaacactgcaaagggagaccttgtgagatccattctctaccctaagccagtgaattttcagttgtacagggatgccatcaggttcctcctgtgccttgtaggaaca

SEQ ID NO: 269791 - DNA, 120 bp, Artificial Sequence
  ENSG00000127249_11 (sequence is synthesized)
gccaccattgggatgatctatactctgtgtgtctatgtgcttagtggggaacctccagaggaggtggtgaggaaagcccttgacgtcatcacaattgcggttcctccggctctacctgct

SEQ ID NO: 269792 - DNA, 120 bp, Artificial Sequence
  ENSG00000127249_12 (sequence is synthesized)
gctctgaccacaggcattatctatgcccagaggaggctgaagaagagaggcatcttctgcattagcccccagaggatcaacgtatgtggacagttaaaccttgtctgctttgacaagaca

SEQ ID NO: 269793 - DNA, 120 bp, Artificial Sequence
  ENSG00000127249_13 (sequence is synthesized)
ggcaccttaacaagggacggcttggacctctggggagtcgtgtcctgtgataggaatggctttcaggaagttcacagctttgcctcaggccaggctttgccatggggcccactgtgtgca

SEQ ID NO: 269794 - DNA, 120 bp, Artificial Sequence
  ENSG00000127249_14 (sequence is synthesized)
gcgatggccagctgccactctctgatccttcttgatgggaccatccagggagaccctctggacctcaaaatgtttgaagccaccacctgggaaatggctttttctggggacgatttccac

SEQ ID NO: 269795 - DNA, 120 bp, Artificial Sequence
  ENSG00000127249_15 (sequence is synthesized)
atcaagggagtgccggcacatgccatggtagttaagccctgcagaacagccagccaggtcccagtggaaggaattgcaatcctgcatcagttcccattctcatcggcactgcaaagaatg

SEQ ID NO: 269796 - DNA, 120 bp, Artificial Sequence
  ENSG00000127249_16 (sequence is synthesized)
acagtcattgtccaagagatgggaggtgaccgactggcattcatgaaaggtgcaccagagagggtggccagcttttgccaacctgagacagtacccactagttttgttagcgaacttcag

SEQ ID NO: 269797 - DNA, 120 bp, Artificial Sequence
  ENSG00000127249_17 (sequence is synthesized)
atttacacgacacagggcttccgagtcatagcactggcctacaagaagctggaaaatgaccatcacgctactaccttgacgagggagacggtagaatcagacctgatatttctggggctg

SEQ ID NO: 269798 - DNA, 120 bp, Artificial Sequence
  ENSG00000127249_18 (sequence is synthesized)
ctgatcttggagaatcgattgaaggaagagacaaaacctgtcttggaagagctcatctcagcccggataaggactgtaatgatcacaggtgacaatcttcagactgcaataacagtggcc

SEQ ID NO: 269799 - DNA, 120 bp, Artificial Sequence
  ENSG00000127249_19 (sequence is synthesized)
agaaaatctggaatggtttctgaaagccagaaagtcattctcattgaggcaaatgaaaccaccgggtcctcatcagcatctatatcttggacgttagtagaagagaagaaacacattatg

SEQ ID NO: 269800 - DNA, 120 bp, Artificial Sequence
  ENSG00000127249_20 (sequence is synthesized)
tatgggaatcaggacaattacattaacatcagggatgaagtctctgataaaggcagagaaggaagttaccattttgccctaactggaaaatcctttcatgttataagtcaacatttcagc

SEQ ID NO: 269801 - DNA, 120 bp, Artificial Sequence
  ENSG00000127249_21 (sequence is synthesized)
agcctactgccaaagatattgatcaatgggaccatctttgcaagaatgtctcctgggcagaagtccagtctggtggaagaatttcagaaactggattactttgtaggtatgtgtggtgat

SEQ ID NO: 269802 - DNA, 120 bp, Artificial Sequence
  ENSG00000127249_22 (sequence is synthesized)
ggagccaatgactgtggggctctgaaaatggctcatgtgggcatctcattatcagagcaggaggcatctgtggcctcacctttcacttccaaaactccaaacattgagtgcgtacctcac

SEQ ID NO: 269803 - DNA, 120 bp, Artificial Sequence
  ENSG00000127249_23 (sequence is synthesized)
cttatcaaggaaggacgtgcagctctcgttacctccttttgcatgtttaagtacatggctctgtacagcatgattcagtatgttggtgttctgctgctctactgggagacaaacagcctt

SEQ ID NO: 269804 - DNA, 120 bp, Artificial Sequence
  ENSG00000127249_24 (sequence is synthesized)
tcaaattaccagtttctgttccaggatctggccattacaactcttattggtgtaacaatgaatctgaatggtgcctaccctaagctggtgcctttcagacctgcaggacggctgatctct

SEQ ID NO: 269805 - DNA, 120 bp, Artificial Sequence
  ENSG00000127249_25 (sequence is synthesized)
ccacctctgctactctctgtgattttcaacattcttctcagcctggccatgcatattgcaggcttcatcctggttcagaggcagccttggtattccgtggagatacacagtgcctgcaca

SEQ ID NO: 269806 - DNA, 120 bp, Artificial Sequence
  ENSG00000127249_26 (sequence is synthesized)
gtacaaaatgaaagcatctcagagttaaccatgtctccaactgctccagaaaaaatggaaagtaatagcaccttcacaagttttgagaacactacagtctggttcttgggaacaatcaac

SEQ ID NO: 269807 - DNA, 120 bp, Artificial Sequence
  ENSG00000127249_27 (sequence is synthesized)
tgtatcactgtggctcttgtgttctctaaaggaaaaccatttagacagccaacttatacaaactatatatttgtccttgtgctgataatacagcttggtgtatgtctattcattctattt

SEQ ID NO: 269808 - DNA, 120 bp, Artificial Sequence
  ENSG00000127249_28 (sequence is synthesized)
gctgatataccagaattatatagacgtttggatctgctctgcactcccgtcctgtggagggcctccattgtcatcatgctcagcttgaatttcattgtgtcccttgtggccgaggaggct

SEQ ID NO: 269809 - DNA, 120 bp, Artificial Sequence
  ENSG00000127249_29 (sequence is synthesized)
gttattgaaaatcgagccctgtggatgatgattaaaagatgtttcggctatcagtcaaaaagccagtatcggatatggcagagggacttggcaaatgaccctagttggcccccgctaaac

SEQ ID NO: 269810 - DNA, 120 bp, Artificial Sequence
  ENSG00000127249_30 (sequence is synthesized)
atccagtatttgagagcaatgaagaacaactctgaaggacatgtgatatccaagttgatattacagagaaacaatgacaaaagggaccagtttcattgattttaagaaatgagactcttg

SEQ ID NO: 269811 - DNA, 120 bp, Artificial Sequence
  ENSG00000127249_31 (sequence is synthesized)
taacatcagctggagttttggggctacctatcaaatcatggtgacaaactaaagtctgtttgataaaatactgtctacagagaagaacattgacccagaagagtgctttcctcttggctt

SEQ ID NO: 269812 - DNA, 120 bp, Artificial Sequence
  ENSG00000127249_32 (sequence is synthesized)
ctgaaggtattagaggcattcagtgaaggcaagaatgggccaagaatttctatgggccaagagacaagcaggctaaaggggaaaaatatgtgatctttcctcttaggacaggacaatact

SEQ ID NO: 269813 - DNA, 120 bp, Artificial Sequence
  ENSG00000127249_33 (sequence is synthesized)
ttcctttttataaaaatgagttgaggggaagtagtactgtgtatactcacggagttgtaatttttgaatttttacttcatcgatggaaaaactaatgcgtgggaaacattacaccaatct

SEQ ID NO: 269814 - DNA, 120 bp, Artificial Sequence
  ENSG00000127249_34 (sequence is synthesized)
ttactgtctgggttccttttctctgtagtacttttcagatttgaggctttttcttctgtttctggccttacccaacatattgttaaggataagcttagcctatgctgcaataaaaaacaa

SEQ ID NO: 269815 - DNA, 120 bp, Artificial Sequence
  ENSG00000127249_35 (sequence is synthesized)
ctctcagatatcagtgccttaacacacaagtgcttctttcgtgatccaggtgacactctggaactgccattcttacagcagtgactgcttcaacctgatggctccatcagctcgatgcaa

SEQ ID NO: 269816 - DNA, 120 bp, Artificial Sequence
  ENSG00000127249_36 (sequence is synthesized)
ggactgtgtgttgactgtgatgggggaaggaatagactggagatcacgtgtgggctcttcactgcctcaccccaaaagtggcacacattgctttccctactcatatctcattagtcaagg

SEQ ID NO: 269817 - DNA, 120 bp, Artificial Sequence
  ENSG00000127249_37 (sequence is synthesized)
atttggccagggagctggaaagtgcagtctcctgtgtttagggatgcttcatgggcttatgagctgtcactacacagggccccatgcttagaaggtccccacacttggctttaacactct

SEQ ID NO: 269818 - DNA, 120 bp, Artificial Sequence
  ENSG00000127249_38 (sequence is synthesized)
gctgtttccatcttaaaattcttaatttttgaacaggggtccccatattttcattttgtaccaggccccacaaatgatagagttggtctggaacgtagtcctgggaaggagaggaaaata

SEQ ID NO: 269819 - DNA, 120 bp, Artificial Sequence
  ENSG00000127249_39 (sequence is synthesized)
acagatcagaaagcacgagtgctgtccactacagcccacttttcctaaccccagtaacttatcctatgttttaggaatctctcatgtcacatggccaactccagaaattttcactcctct

SEQ ID NO: 269820 - DNA, 120 bp, Artificial Sequence
  ENSG00000127249_40 (sequence is synthesized)
gctttattatttttgagaaacattagtctcatgctacagcattatatggcactattgatgggagttcttacacaactagtacattttttttttaaagtttgtggcttgagtttccagaaa

SEQ ID NO: 269821 - DNA, 120 bp, Artificial Sequence
  ENSG00000127249_41 (sequence is synthesized)
actaaaattgtccttattttgtcactattacaatttggttatatttgatttgttcagcacaaggaagactcaggtttctgttacctcaggagacaacactgaactctaggagcacaccta

SEQ ID NO: 269822 - DNA, 120 bp, Artificial Sequence
  ENSG00000127249_42 (sequence is synthesized)
catataatattttaaggcaaaagcaaaatttgtattatgagcatcaaatcctaggtgaatgttctgatcaggggataagtgtcctggcccaggctggctttggaacttatcaatagcatt

SEQ ID NO: 269823 - DNA, 120 bp, Artificial Sequence
  ENSG00000127249_43 (sequence is synthesized)
tgcaagcattccttccccctaactgagctcttgagcatggctgatggctctatgattgcagctgattctaggaacatggtgtctcccagccatgagggtaccctgttacttctggtttta

SEQ ID NO: 269824 - DNA, 120 bp, Artificial Sequence
  ENSG00000127249_44 (sequence is synthesized)
aaatagggcgtgaagatattttagtgtttcaagactgcagaatcactgtcttttttggtacagaaagaaatgtttccttttgcaaagccagcctcagcaatgatatggcagttctgaatg

SEQ ID NO: 269825 - DNA, 120 bp, Artificial Sequence
  ENSG00000127249_45 (sequence is synthesized)
tccttctctaaaagtgtttctcattttccaaaagtagagggttgtaggcaggggcaagctagagatggtctgtgacctagtcatgagcaagatcagcctgcacagttcatacttaaatgt

SEQ ID NO: 269826 - DNA, 120 bp, Artificial Sequence
  ENSG00000127249_46 (sequence is synthesized)
gccctttgctaagtgcattcacctccactaactcacctgaatggtaccaattgtcccatgactgaacaaggaagggcttatcatctccaccatacagatgagaaagctgagattcagtaa

SEQ ID NO: 269827 - DNA, 120 bp, Artificial Sequence
  ENSG00000127249_47 (sequence is synthesized)
tggcaagagcagatctaggcctcaaatacagatcttctgagcaaaccttatattgctgccaaatacttccaaattccagagttccagcagggcaggttgcttagtgtgatctcacagtca

SEQ ID NO: 269828 - DNA, 120 bp, Artificial Sequence
  ENSG00000127249_48 (sequence is synthesized)
agcaaagaatgggcaaccctttgctaataccaggccctctgttcaaatgaatgccaggcatcctgccaggcctgggctagaggtgtattaaaaacaaaacaaaacaaaacaaaaaaatga

SEQ ID NO: 269829 - DNA, 120 bp, Artificial Sequence
  ENSG00000127249_49 (sequence is synthesized)
ttgtctgtctttctgagactttgagttgctcttgccttgatcctaagtgattctatcactagcaaaggctggcagggaacaggaagaaaagaatctagtcctccactagtcaagcagcca

SEQ ID NO: 269830 - DNA, 120 bp, Artificial Sequence
  ENSG00000127249_50 (sequence is synthesized)
taaaatctttgggaaaagagactcattttgaagactgtattcctgggattaactacatcttagaagcagtaattgaaggaacagggagtgcccagcctggaaagaaaacagtcaggggac

SEQ ID NO: 269831 - DNA, 120 bp, Artificial Sequence
  ENSG00000127249_51 (sequence is synthesized)
tgtgaagggttttcctgagaaagaaggatcctacttgtgccaggtggcatgagaaggcaaaatcaggacaaatgggtaaagatcacagtggggatggcttcaggccatctgccctaacca

SEQ ID NO: 269832 - DNA, 120 bp, Artificial Sequence
  ENSG00000127249_52 (sequence is synthesized)
ctgtcctaacagccagcactgatagcagtggaatgtactctaggacattggaggaacaagtggctattcaagggccaagtagagaaggaagtcaagtatcagatgaaactcaattacctg

SEQ ID NO: 269833 - DNA, 120 bp, Artificial Sequence
  ENSG00000127249_53 (sequence is synthesized)
aaggaagtcaagtatcagatgaaactcaattacctgcaagatctctttcaagcttgatacacccagtgtctcagtcttatgctgtgatgtgaaccttttttttttttttttttttttgag

SEQ ID NO: 269834 - DNA, 62 bp, Artificial Sequence
  ENSG00000127249_54 (sequence is synthesized)
acatgagccaccagatgtgaactattttctactactacccacacagaataccagacagacac

SEQ ID NO: 269835 - DNA, 120 bp, Artificial Sequence
  ENSG00000127249_55 (sequence is synthesized)
tattttctactactacccacacagaataccagacagacactcatgggaggatgggctctggagggagggctcccagccttgtcagatccgattgtgtggacatatagactcaattgccct

SEQ ID NO: 269836 - DNA, 120 bp, Artificial Sequence
  ENSG00000127249_56 (sequence is synthesized)
gtaccttgaaaggggacccctaatggagataagatcctaggaaagaggggcagagtaggggtcctgattgtcagattgaagctggggtaatacttctgatttgtgaattttcttaaagag

SEQ ID NO: 269837 - DNA, 120 bp, Artificial Sequence
  ENSG00000127249_57 (sequence is synthesized)
aggtgttaaaaaactttgcatgaaagagcgtgggagagtgccctaaacttgagggcggagcaacctgttatcaatacactttcttgagcagagtctgaaggagaaacgaacacagtcaca

SEQ ID NO: 269838 - DNA, 120 bp, Artificial Sequence
  ENSG00000127249_58 (sequence is synthesized)
tagtccaaatcatttgagacggtgccctgtatgttcatctcaaggcatctagctcttacccacagagaaccgtgactctgggcttccctcactaaatatgtctgtgacatctgtatcctt

SEQ ID NO: 269839 - DNA, 120 bp, Artificial Sequence
  ENSG00000127249_59 (sequence is synthesized)
atgtgcttatggaaatgttcacatacacacctgcagatgtgatgactgaaaaaaacgattatttattcagagctttgtatttagtttatgctataataaattcagttgttataaaaatca

SEQ ID NO: 269840 - DNA, 120 bp, Artificial Sequence
  ENSG00000127249_60 (sequence is synthesized)
aattaaggaggacaaaaaaaccttgctgcaggaaagtagaataactcatctggctaagtttccaagaggctgagacggttatatggatctttaacagccccgcagccagcagatggaggc

SEQ ID NO: 269841 - DNA, 120 bp, Artificial Sequence
  ENSG00000127249_61 (sequence is synthesized)
agtgcgtcgggaacggactggagcaatccatcgcctctcacggggccccgccctcttgcttccgatttggaattcggaattagccttgcagacttctcttttctgtcctcatcgaaaaga

SEQ ID NO: 269842 - DNA, 120 bp, Artificial Sequence
  ENSG00000127249_62 (sequence is synthesized)
cagccagcttttgtaaccttgccttggggatgttagcaggagaaatgttggcaattcaaggctcttctggttttataagaaaaccagattttgctgggaggcctggagtagaagagaggg

SEQ ID NO: 269843 - DNA, 120 bp, Artificial Sequence
  ENSG00000127249_63 (sequence is synthesized)
cagtttgacaagggcagtggtccgtacttcggctgcatgagataatcacttgggagctttggagaaaatagcagtaccaagggatctcaccattcagagatcctgattcagttgtttata

SEQ ID NO: 269844 - DNA, 120 bp, Artificial Sequence
  ENSG00000127249_64 (sequence is synthesized)
tggggcttaaaaaatcagtattttttttcacttaagtcaattttgcattcaatgctgagaaccactggactagaacctaagggtcctgaaagagtgtggggagaaataagaatggaaagg

SEQ ID NO: 269845 - DNA, 120 bp, Artificial Sequence
  ENSG00000127249_65 (sequence is synthesized)
tggcttgagctcagctcctggagggacagtgagaatttatttgtatatgccgtcatcacaatgatgatatagggatattcatatgacaagagattcatgcaacattaaaaatactaaaat

SEQ ID NO: 269846 - DNA, 120 bp, Artificial Sequence
  ENSG00000127249_66 (sequence is synthesized)
agcctctgctcttcagagaatctgagaagcttcttcaatgccagagcaacataggcaatatcagagctatctaattcttataaaaggtgaggtttccaatgtggagtacatttggtagtg

SEQ ID NO: 269847 - DNA, 120 bp, Artificial Sequence
  ENSG00000127249_67 (sequence is synthesized)
aagggcaaaccaatctaaggctggtttcctcatctgtgcaatgaagctaataatagcatctacataatgagattgtgaggattaaatgagatgatgcagtaagaaaatccttggcactat

SEQ ID NO: 269848 - DNA, 120 bp, Artificial Sequence
  ENSG00000127249_68 (sequence is synthesized)
gcctggcaaatattaaaggttcgatcatattaatataattgtacttattatgcagttatttcttgtctctctgtactgttctccgagcattgtctggtttcgaagattttccagaatatg

SEQ ID NO: 269849 - DNA, 120 bp, Artificial Sequence
  ENSG00000127249_69 (sequence is synthesized)
gggatcagaaaacattgctttctccagtgctcaggataactcatagattcacggggactataagtcttatttctattaatttcatattgattttatttccaagactagaaagaacaaaaa

SEQ ID NO: 269850 - DNA, 120 bp, Artificial Sequence
  ENSG00000127249_70 (sequence is synthesized)
ggaataagaggggtaaatggaatagctgcatagcaacttggctctcaagcatcttaaatgttatcccttgacttctggcttccatggtttctgatgagaaattggctgctaatcttactg

SEQ ID NO: 269851 - DNA, 80 bp, Artificial Sequence
  ENSG00000127252_0 (sequence is synthesized)
gtcagagcctcgtgccggctcggcagcgcccggacgccgagcccagcgcgtcggccccccggcgtgcgggcgtctcagag

SEQ ID NO: 269852 - DNA, 120 bp, Artificial Sequence
  ENSG00000127252_1 (sequence is synthesized)
tggtgctggcgttggccctggaggacggccccgagtgatggctggcgcctgcctcccgggtgtctcccgggtacagatggagtcgtcccgcggccgccggcggcaaggtcggcagctgcg

SEQ ID NO: 269853 - DNA, 120 bp, Artificial Sequence
  ENSG00000127252_2 (sequence is synthesized)
aggccaagagagaccccaggacacacacagctgcctcccggtgcgagaagaagaccccggcttgagagtgagatggcgtttaatgattgcttcagtttgaactaccctggcaacccctgc

SEQ ID NO: 269854 - DNA, 120 bp, Artificial Sequence
  ENSG00000127252_3 (sequence is synthesized)
ccaggggacttgatcgaagtgttccgtcctggctatcagcactgggccctgtacttgggtgatggttacgttatcaacatagcacctgtagatggcattcctgcgtcctttacaagcgcc

SEQ ID NO: 269855 - DNA, 120 bp, Artificial Sequence
  ENSG00000127252_4 (sequence is synthesized)
ttcagcagtaaggccctggtgaaaatgcagctcttgaaggatgttgtgggaaatgacacatacagaataaacaataaatacgatgaaacgtacccccctctccctgtggaagaaatcata

SEQ ID NO: 269856 - DNA, 120 bp, Artificial Sequence
  ENSG00000127252_5 (sequence is synthesized)
aagcggtcagagtttgtaattggacaggaggtggcctataacttacttgtcaacaactgtgaacattttgtgacattgcttcgctatggagaaggagtttcagagcaggccaaccgagcg

SEQ ID NO: 269857 - DNA, 120 bp, Artificial Sequence
  ENSG00000127252_6 (sequence is synthesized)
ataagtaccgttgagtttgtgacagctgctgttggtgtcttctcattcctgggcttgtttccaaaaggacaaagagcaaaatactattaacaatttaccaaagagatattgatattgaag

SEQ ID NO: 269858 - DNA, 120 bp, Artificial Sequence
  ENSG00000127252_7 (sequence is synthesized)
gaatttgggaggaggaaaagaaacctggggtgaatacttattttcagtgcatcattactgttccagattcctatgatggatggcagactctttaataaattgcttactgatattatctta

SEQ ID NO: 269859 - DNA, 120 bp, Artificial Sequence
  ENSG00000127252_8 (sequence is synthesized)
aggaaaagaaacctggggtggagacagtcttaatcaagttgtgaaatacagcaaattgtaaagggttgtttggattaaagggttgtttggaaaagctgggtcagattctagcagagaacc

SEQ ID NO: 269860 - DNA, 120 bp, Artificial Sequence
  ENSG00000127311_0 (sequence is synthesized)
catgaccatgcagttagccagggttttcccgagttgtttgggttgagttcaggagaagcatggccaggtcgagtccgtacctgcgccaacttcagggacctctgctcccacccagggatc

SEQ ID NO: 269861 - DNA, 120 bp, Artificial Sequence
  ENSG00000127311_1 (sequence is synthesized)
tggtggaggaggacgacgactacctaaacgacgacgtggaggaggatgaagagtccgtgttcatcgacgccgaggagctctgcagtgggggcgtaaaggctggcagcctccccgggtgcc

SEQ ID NO: 269862 - DNA, 120 bp, Artificial Sequence
  ENSG00000127311_2 (sequence is synthesized)
tccgcgtttctatttgtgatgaaaacacacaagagacatgtaaagtgtttggacgttttccgataacaggtgcttggtggagagtgaaggtacaagtaaagcctgtggtgggatcaagga

SEQ ID NO: 269863 - DNA, 120 bp, Artificial Sequence
  ENSG00000127311_3 (sequence is synthesized)
gctatcaatatcaagttcaaggatttccgtcttactttttgcagtctgatatgtcaccaccaaatcaaaaacatatctgtgctctctttcttaaagagtgtgaggtctccagtgatgatg

SEQ ID NO: 269864 - DNA, 120 bp, Artificial Sequence
  ENSG00000127311_4 (sequence is synthesized)
ttaataaatttttaacatgggtaaaggaggtatcaaactacaaaaacctaaactttgaaaatcttagggaaacactaagaactttccacaaggaaactggaaggaaagatcaaaagcagc

SEQ ID NO: 269865 - DNA, 120 bp, Artificial Sequence
  ENSG00000127311_5 (sequence is synthesized)
ctacacagaatggtcaggaagagttgttcctagacaatgagatgagtcttcctctggaaaacacaattccatttagaaatgtaatgacagctttgcagtttccgaagataatggaattcc

SEQ ID NO: 269866 - DNA, 120 bp, Artificial Sequence
  ENSG00000127311_6 (sequence is synthesized)
ttccagttcttctgcctcgacactttaaatggatcatagggtcaggttctaaagagatgttgaaagagatagaagagattttaggtacacatccgtggaaacttggatttagtaaaataa

SEQ ID NO: 269867 - DNA, 120 bp, Artificial Sequence
  ENSG00000127311_7 (sequence is synthesized)
cctacagagagtggaaactcctgcgatgtgaggcaagttggatagcattttgtcagtgtgagtctcttctccagctgatgactgatttggagaagaatgcattaataatgtattccagac

SEQ ID NO: 269868 - DNA, 120 bp, Artificial Sequence
  ENSG00000127311_8 (sequence is synthesized)
tgaagcagatatgtagagaagatgggcacacatatgttgaagtgaatgacttaactttgacattgtcaaatcatatgtcatttcatgctgcttcagagtctctgaagtttttgaaggata

SEQ ID NO: 269869 - DNA, 120 bp, Artificial Sequence
  ENSG00000127311_9 (sequence is synthesized)
ttggtgtggtgacatatgagaagtcctgtgtcttcccttatgacctttaccatgctgaaagagccatcgccttttcaatttgtgacctgatgaagaaacctccttggcatttatgtgtcg

SEQ ID NO: 269870 - DNA, 120 bp, Artificial Sequence
  ENSG00000127311_10 (sequence is synthesized)
atgtcgaaaaggtgcttgcctctattcacaccacaaaacctgagaattcaagcgatgatgcattgaatgagagcaaacctgatgaagtaagattagaaaatcctgtggatgttgtggaca

SEQ ID NO: 269871 - DNA, 120 bp, Artificial Sequence
  ENSG00000127311_11 (sequence is synthesized)
cacaggacaatggtgaccatatttggactaatggtgaaaatgaaattaatgcagaaataagtgaagttcagctggatcaggatcaggttgaagttccactggatcgggatcaggtggctg

SEQ ID NO: 269872 - DNA, 120 bp, Artificial Sequence
  ENSG00000127311_12 (sequence is synthesized)
ctttggaaatgatttgctccaatcctgtgacagtcataagtgggaaaggtggatgtgggaagaccacaatcgttagccgtctttttaagcatatagagcagttggaagaaagagaagtaa

SEQ ID NO: 269873 - DNA, 120 bp, Artificial Sequence
  ENSG00000127311_13 (sequence is synthesized)
aaaaagcctgtgaagattttgaacaagaccagaatgcttcagaagaatggattacctttactgagcaaagtcaactagaggcggacaaggctatagaagttttgctcacagcacctacag

SEQ ID NO: 269874 - DNA, 120 bp, Artificial Sequence
  ENSG00000127311_14 (sequence is synthesized)
ggaaagcagctggcttactaagacagaaaactggtcttcatgcctacacactgtgtcaggtcaattatagcttctattcatggactcaaacaatgatgaccacaaacaaaccatggaaat

SEQ ID NO: 269875 - DNA, 120 bp, Artificial Sequence
  ENSG00000127311_15 (sequence is synthesized)
tttcttcggttagagttctggttgtggatgaagggagtttggtatctgtaggaatcttcaaatcggtcttaaatttattgtgtgagcactccaaactttctaagcttattatccttggtg

SEQ ID NO: 269876 - DNA, 120 bp, Artificial Sequence
  ENSG00000127311_16 (sequence is synthesized)
acattagacagttacccagtattgaacctggtaacttgctgaaagatctttttgagactcttaagtcaagaaattgtgctattgagctaaagacaaaccatagagcagaatctcagctca

SEQ ID NO: 269877 - DNA, 120 bp, Artificial Sequence
  ENSG00000127311_17 (sequence is synthesized)
ttgtggacaatgctacaagaatctcaagacgccaatttccaaaatttgatgcagaactaaatatctctgataatccaacattacccatctcaattcaagataagacatttatttttgtca

SEQ ID NO: 269878 - DNA, 120 bp, Artificial Sequence
  ENSG00000127311_18 (sequence is synthesized)
ggctcccagaagaggatgccagttctcagtcatctaaaactaatcatcactcttgtttatattctgcagttaaaactttactacaagaaaataacttacaaaatgcaaaaacatcacaat

SEQ ID NO: 269879 - DNA, 120 bp, Artificial Sequence
  ENSG00000127311_19 (sequence is synthesized)
ttattgcatttagaaggcaagactgtgatctaattaatgactgctgctgcaaacactacacaggccacctcaccaaagaccatcagagtagacttgtttttggaattggtgataaaattt

SEQ ID NO: 269880 - DNA, 120 bp, Artificial Sequence
  ENSG00000127311_20 (sequence is synthesized)
gttgtaccaggaatgcatacctctcagacttactacctgaaaatatctctggaagtcagcaaaataatgatctagatgccagtagtgaagacttttctggtacgcttcctgattttgcta

SEQ ID NO: 269881 - DNA, 120 bp, Artificial Sequence
  ENSG00000127311_21 (sequence is synthesized)
aaaataagcgtgactttgaaagtaacgttcgactgtgcaatggagagatatttttcataacaaatgatgtaactgatgtaacttttggaaagagaagatctttgaccattaataatatgg

SEQ ID NO: 269882 - DNA, 120 bp, Artificial Sequence
  ENSG00000127311_22 (sequence is synthesized)
ctggcctggaagtaactgtggattttaagaaactaatgaaatattgtcgcataaaacatgcatgggcaagaactattcacacttttcaggggtccgaggagcaaacagttgtctatgtgg

SEQ ID NO: 269883 - DNA, 120 bp, Artificial Sequence
  ENSG00000127311_23 (sequence is synthesized)
tggggaaggcgggccgccagcactggcagcatgtctacaccgccgtgaccaggggccgctgccgagtgtatgtgattgcagaggagtctcagctccggaatgccattatgaaaaacagtt

SEQ ID NO: 269884 - DNA, 120 bp, Artificial Sequence
  ENSG00000127311_24 (sequence is synthesized)
ttcctagaaaaactcgtttgaaacatttcttgcaaagtaagctctcctctagcggcgcacctccagcagattttccgtccccacggaagagctctggagacagtggaggacccagcacac

SEQ ID NO: 269885 - DNA, 120 bp, Artificial Sequence
  ENSG00000127311_25 (sequence is synthesized)
cgtcagcatctccactccctgtagtcacagaccacgccatgacaaatgatgtcacctggagcgaggcctcttcgcctgatgagaggacactcacctttgctgaaagatggcaattatctt

SEQ ID NO: 269886 - DNA, 120 bp, Artificial Sequence
  ENSG00000127311_26 (sequence is synthesized)
cacctgatggagtagatacagatgatgatttaccaaaatcgcgagcatccaaaagaacctgtggtgtgaatgatgatgaaagtccaagcaaaatttttatggtgggagaatctccacaag

SEQ ID NO: 269887 - DNA, 120 bp, Artificial Sequence
  ENSG00000127311_27 (sequence is synthesized)
tgtcttccagacttcagaatttgagactgaataatttaattcccaggcaacttttcaagcccaccgataatcaagaaacttagttttatttcaaattgttccgagtaactatgtttttct

SEQ ID NO: 269888 - DNA, 120 bp, Artificial Sequence
  ENSG00000127311_28 (sequence is synthesized)
attggagacaaaatgaacatcgtaacgtcaaagtaccaagataaaaaaagtttcctataactggagttttaaggtatttgtgttagcaaatgttttaaatccatttcatcaaagtattaa

SEQ ID NO: 269889 - DNA, 120 bp, Artificial Sequence
  ENSG00000127311_29 (sequence is synthesized)
tgatttcaacacgtcatcatgagaactggtagcactggacataagtgaagagattagatattttatatacatatatatttttatacaattatgtacattaagccaggcacggtggctcat

SEQ ID NO: 269890 - DNA, 120 bp, Artificial Sequence
  ENSG00000127311_30 (sequence is synthesized)
acaaacaaacaaacaaacaaaaaaaaacaaacaattatgtacattaaaacattgtatttttaggataatgcctcgtaactttgatgatcgttgtgtgttacctttgccaatgggttgaag

SEQ ID NO: 269891 - DNA, 120 bp, Artificial Sequence
  ENSG00000127311_31 (sequence is synthesized)
cgttgtgtgttacctttgccaatgggttgaagcagtggcaaagaaaaggtgtaattacatctgttgatgttattgacatgcctcctaggatgttgaaatgtggtcattttacaagactgc

SEQ ID NO: 269892 - DNA, 120 bp, Artificial Sequence
  ENSG00000127311_32 (sequence is synthesized)
tgctcacttcatcactgctgcctggggcccagcctacctgggacttttccttggaagtgctttctgagttgggagcacattgttttgaatatgttccacttaggaaggttttttctctct

SEQ ID NO: 269893 - DNA, 120 bp, Artificial Sequence
  ENSG00000127311_33 (sequence is synthesized)
cagaatgatttgatttttaaatttttatttatgttaaatggtaaaagaaaaagtcaagatgaaaaatatatctgttaacccatttatgcctagtggtccattattgggacactaaacatg

SEQ ID NO: 269894 - DNA, 120 bp, Artificial Sequence
  ENSG00000127311_34 (sequence is synthesized)
tgagagttatttatatcccactgctcaaagtcctcaccaacgtctgattgcaaaaattcagaaagttgcaacctcaggcataaatggttaatagctttattgagatataattcacataca

SEQ ID NO: 269895 - DNA, 120 bp, Artificial Sequence
  ENSG00000127311_35 (sequence is synthesized)
tttcacccattttaagtatataattcagtggcttttagtatattcatcaaattggacaactaccattattatcaattttagaacttttttttttttttaatgatagagacaaggtctcac

SEQ ID NO: 269896 - DNA, 82 bp, Artificial Sequence
  ENSG00000127311_36 (sequence is synthesized)
agtgtgagccagtgtgcccaacctggaacattttcataccctacaaagaaacctcacactctggccgggcgtggtggctcat

SEQ ID NO: 269897 - DNA, 120 bp, Artificial Sequence
  ENSG00000127311_37 (sequence is synthesized)
gcggtgagctgagtcacgccattgcactccagcccggacaataagagcaaaactccgtctcaaaaaaaagagaaacctcacactccttagcagtaatcccctgacttcccccatccctag

SEQ ID NO: 269898 - DNA, 120 bp, Artificial Sequence
  ENSG00000127311_38 (sequence is synthesized)
gtaacctgatttacctagtcccaatagacttgcctattgcagacatgtggttctttgttccggacttatttgactagcataatgttttcagactccatccgtgttgtaccagtgatgtgt

SEQ ID NO: 269899 - DNA, 120 bp, Artificial Sequence
  ENSG00000127311_39 (sequence is synthesized)
cagtgcttcgtctcttttattgccaaataatatcccagtatatggataaaggatattgaatttgtccattcatcagttgatggacatttatttgggttatttcctaatttttggctatta

SEQ ID NO: 269900 - DNA, 120 bp, Artificial Sequence
  ENSG00000127311_40 (sequence is synthesized)
tgaaatgctgctatgaacatctgtgtataagtttttatgtggacatatgctttcacttcttttgggtatataactaggagtagaattgatgggtcatatggtaactctatgtttaacatt

SEQ ID NO: 269901 - DNA, 120 bp, Artificial Sequence
  ENSG00000127311_41 (sequence is synthesized)
ttgaggcactgccagactttttccaaactagctgcaccaatttatattctcaccagcagtgtatgagagttccagtttctccctattctctccaacgtttattattatctgacttcttga

SEQ ID NO: 269902 - DNA, 120 bp, Artificial Sequence
  ENSG00000127311_42 (sequence is synthesized)
ttatagccatcctagtgggtatgaagtagtatttcattgtggttttgatttgcatttttcttatggctagtgatgttaaatagctttcgtgtgactattggccatttgtatgtcccctag

SEQ ID NO: 269903 - DNA, 120 bp, Artificial Sequence
  ENSG00000127311_43 (sequence is synthesized)
agaaatgtatattcagatcttttgcacagttttaaattggatattttttctttctgtcactgaaatctgtattagtgagggttctccagagggatggaaccaataggatatatgtggata

SEQ ID NO: 269904 - DNA, 120 bp, Artificial Sequence
  ENSG00000127311_44 (sequence is synthesized)
tatatgtggatataaaagggactttattagtgtattagttagggtaccctagagggatacaactaataggatatatatatgtggggggggggcggggagtttattaagtattaacttaca

SEQ ID NO: 269905 - DNA, 120 bp, Artificial Sequence
  ENSG00000127311_45 (sequence is synthesized)
cccacaataggttgtctgcaagcctgaggagcaaggatagccagttggagtctcagaactgaagaacttggagtctgatgtttaagggcagaaagcatccagcacaggagaaggatgtag

SEQ ID NO: 269906 - DNA, 76 bp, Artificial Sequence
  ENSG00000127311_46 (sequence is synthesized)
ggccagtctcgttagattgtgcccaccagattaagggtggttctgccctccccagcccactgactcaaatgttaat

SEQ ID NO: 269907 - DNA, 60 bp, Artificial Sequence
  ENSG00000127311_47 (sequence is synthesized)
cccagaagagagaattggctcacacgattataaagcaaagtcccacgataggccatctgc

SEQ ID NO: 269908 - DNA, 120 bp, Artificial Sequence
  ENSG00000127311_48 (sequence is synthesized)
cacacgattataaagcaaagtcccacgataggccatctgcaagctggggaaggagagaagctgatagcatggctcagtccaagtctgaaagcctcaaaaccagggacgctgacagtgcag

SEQ ID NO: 269909 - DNA, 120 bp, Artificial Sequence
  ENSG00000127311_49 (sequence is synthesized)
gagcctctgggaagcaattggtgcaagtcccagagtccaaaggtggaaaaacctggagtctggtgtccaagggcagaaggagaggaagtcaagcattctgcacagcacaggaagaaagag

SEQ ID NO: 269910 - DNA, 120 bp, Artificial Sequence
  ENSG00000127311_50 (sequence is synthesized)
agggagcagactcagcaagcacgctgcttatctccattcgtccacctgctgtgttctagcctcactggcagccaactcgatggtgcccacccacactgagggtgggtcttcctctcccac

SEQ ID NO: 269911 - DNA, 120 bp, Artificial Sequence
  ENSG00000127311_51 (sequence is synthesized)
tccactgactccaatgtcagtctctgtcagcaacaccctcacagacacacaggggaacaatgcttcatcagccatccaggtatctctcaatctagttgacacctaatattaaccatcaca

SEQ ID NO: 269912 - DNA, 120 bp, Artificial Sequence
  ENSG00000127311_52 (sequence is synthesized)
aaatgtaagaattctttacattttcaacatttaagtccattatcagaaacataatttgcaaaattttcctcccattctgtgaattttattttaattaacctgatagtatctgatatggtt

SEQ ID NO: 269913 - DNA, 120 bp, Artificial Sequence
  ENSG00000127311_53 (sequence is synthesized)
ttttaattaacctgatagtatctgatatggtttggctctctgtccccacccaaatctcatctcacattgtaatacctatgtgttgaggaaggatcctggtgggaggtgattggatcatgg

SEQ ID NO: 269914 - DNA, 120 bp, Artificial Sequence
  ENSG00000127311_54 (sequence is synthesized)
tgagttctcatgatagctggtggttttaaagtatggcactcctgccccaacccccttctgccaccttgtaaagaaggtgcttgcttctcctttaccttttgccatgattgtggttttctg

SEQ ID NO: 269915 - DNA, 89 bp, Artificial Sequence
  ENSG00000127311_55 (sequence is synthesized)
gtgaaaatggactactaagtgtcctttgaggcccaagttttaaattctgatgatgaccagtgtatctgtttttgttgttgctgctgctt

SEQ ID NO: 269916 - DNA, 120 bp, Artificial Sequence
  ENSG00000127311_56 (sequence is synthesized)
atgatgaccagtgtatctgtttttgttgttgctgctgcttgtgcttttggtgttatatccaagaaactattgcctatccaaagtcatgatgatttactacaattttttcttctaataatt

SEQ ID NO: 269917 - DNA, 120 bp, Artificial Sequence
  ENSG00000127311_57 (sequence is synthesized)
tacaagttttggctcttatacttagatctttgattcacttttagttaatttttgtatatggtgtgaggtagggatcccacattattcctttgcatgtgacaattcaattgttcagctcca

SEQ ID NO: 269918 - DNA, 120 bp, Artificial Sequence
  ENSG00000127311_58 (sequence is synthesized)
tttattgaagagattattctttccccattgaattatcttggtacccttctcaaaaattagttgactgtaaatgtgagggtgtatttatggattttaaattctattcaattgattcatgca

SEQ ID NO: 269919 - DNA, 120 bp, Artificial Sequence
  ENSG00000127311_59 (sequence is synthesized)
tcttttttttttttttttttcttcttcgagacggagtcttgccctgttgcctaggctggagtgtggtggctcgatctcagctcactgcaagttccgcctctcaggttcatgccattctcc

SEQ ID NO: 269920 - DNA, 120 bp, Artificial Sequence
  ENSG00000127311_60 (sequence is synthesized)
aatggtgccatctcagctcactgcaaccaccacctccttgtttcaagcaattctcatgcctcaccctcccgagtagcaggcattacaggtgcttgccaccacgcctggctgattttttgt

SEQ ID NO: 269921 - DNA, 65 bp, Artificial Sequence
  ENSG00000127311_61 (sequence is synthesized)
ttaccttggcctcccaaagtgctggcattatagtcatgagccactgcgcccggcccatatgtcta

SEQ ID NO: 269922 - DNA, 120 bp, Artificial Sequence
  ENSG00000127311_62 (sequence is synthesized)
cattatagtcatgagccactgcgcccggcccatatgtctattctaatgccagcaccatattgtctttattattgtagctttgtagaaagttttgaaattaagaagtgtgagtccttcaac

SEQ ID NO: 269923 - DNA, 120 bp, Artificial Sequence
  ENSG00000127311_63 (sequence is synthesized)
tttgttcttctttttcaagtttgttttggctattatgggtccctacatttccatatgaattttaggatctacttgtcagtttctgcaaagaagcaaactggaattttgttcaggagtgtg

SEQ ID NO: 269924 - DNA, 120 bp, Artificial Sequence
  ENSG00000127311_64 (sequence is synthesized)
ttaaacctacagatttgggaactattgccattttaacagtattaaatcttctgactcatgaacacagatgtctttccatttgcttaggaaagacaggctggagtgcagtggtgcaatcac

SEQ ID NO: 269925 - DNA, 120 bp, Artificial Sequence
  ENSG00000127311_65 (sequence is synthesized)
agctcactgcagcctctacctctcaggctcaagcagtccaacctctttaaccaccccacctcaaccactcttgtagctgtgactacaggcctgcaccacctcacctggctaacttttgta

SEQ ID NO: 269926 - DNA, 89 bp, Artificial Sequence
  ENSG00000127311_66 (sequence is synthesized)
gactacaggcctgcaccacctcacctggctaacttttgtattttttgcagagataggggttcaccatggggcagtctgcccacctcgac

SEQ ID NO: 269927 - DNA, 120 bp, Artificial Sequence
  ENSG00000127311_67 (sequence is synthesized)
tgcttggttcttctttaattctttgtagttttcagagtataagttttgtatttcttttattaaatttacaatgctctttgttaaatttatttcaaaatatttaattttttatcctgttgt

SEQ ID NO: 269928 - DNA, 120 bp, Artificial Sequence
  ENSG00000127311_68 (sequence is synthesized)
ggattttcttaatttattttggttcattactgctactgtatagaaatgcagtcgatttttatatattgatcttgtatcttccaaccttgctgcacttgtttattagttacagtgggtttt

SEQ ID NO: 269929 - DNA, 120 bp, Artificial Sequence
  ENSG00000127311_69 (sequence is synthesized)
tagtggattccttaggattttctatataagtgatcatatcatctgcaaatagagatgcttttagtgcttcctttttcatctgtaggcctttaatttcattttcttgctaattgccctggt

SEQ ID NO: 269930 - DNA, 120 bp, Artificial Sequence
  ENSG00000127311_70 (sequence is synthesized)
tagagcccctagtatattgttgaatagaagtggcaagagtgaatatccttgtcttgttcatcatattagggagaaagcattaaatctgccaccattaactgtgtttgctgtggatctttc

SEQ ID NO: 269931 - DNA, 120 bp, Artificial Sequence
  ENSG00000127311_71 (sequence is synthesized)
ttttaagtcctttattgagatgaagaaattctcttttgttcctaggttgttgtgtatgaagggacattgaatttcgtcaaatcctttctctatgtattgagatcattgtgtagttttgtc

SEQ ID NO: 269932 - DNA, 120 bp, Artificial Sequence
  ENSG00000127311_72 (sequence is synthesized)
ctttattgatgcagtgtggtaatttttggatgttaaatcaatcttgtgtccctggagtaaatctcacttggtcatagtatacaatcctttgtatgtgctgctggatttggcttgctggtt

SEQ ID NO: 269933 - DNA, 120 bp, Artificial Sequence
  ENSG00000127311_73 (sequence is synthesized)
ttttgttggggacttttgcatctaaattcatgaaagatattggtctgtagtttctttttcttgtgatgcctttgtttggttttggtatcagagtaatagtgaccacatagaatgagttgt

SEQ ID NO: 269934 - DNA, 120 bp, Artificial Sequence
  ENSG00000127311_74 (sequence is synthesized)
gaagtgtccccttgtcttctattttggaagagtttgtgaagaattggtattaactcttctttaaattaatctggccctgggcttttctttgtggggagtttttgttttgttttgtttttg

SEQ ID NO: 269935 - DNA, 120 bp, Artificial Sequence
  ENSG00000127311_75 (sequence is synthesized)
ttacaagcatgagccactgcacccggcatgggaagttttaaagctactgattaaatttctttacttgttataggtgtatttagcttttctatttcttcttgagtcagttttgacagtttt

SEQ ID NO: 269936 - DNA, 120 bp, Artificial Sequence
  ENSG00000127311_76 (sequence is synthesized)
gagtcagttttgacagtttttctctagaaatttgctcatttaatctatattttttaattttctgacatacagttgatcatagtattcctttatggttttttaaatttctgtaaggctggt

SEQ ID NO: 269937 - DNA, 120 bp, Artificial Sequence
  ENSG00000127311_77 (sequence is synthesized)
agtaaagcctctgtttcattcctgattttagtaatttgagtctctttttttcttggtttagctaaaagtttatgaattttaatctttttaaaggaccaacttttggtttcattgattttc

SEQ ID NO: 269938 - DNA, 120 bp, Artificial Sequence
  ENSG00000127311_78 (sequence is synthesized)
tttactgtcttcctattctctatttcattaattttaactcttgtcctattacttttaggagggcctcttaaggaggggtcgtatgctgacttaaattgagggttggtcaaagttcaaaag

SEQ ID NO: 269939 - DNA, 120 bp, Artificial Sequence
  ENSG00000127311_79 (sequence is synthesized)
cctgggggaaggaagcttaatattttctctagatcagtaagtacaagcaattcagctaagaatttgcttcatttatgaagcaaagaatggtaattttcaggacagtctgtgtctgatttt

SEQ ID NO: 269940 - DNA, 120 bp, Artificial Sequence
  ENSG00000127311_80 (sequence is synthesized)
gttataagtaaatgggggaagggagataaacatctgtgagtcttatctaagtcacccggggaaggatggttctttataataagccatttcctggaacacgcaggcgatgggcaggggggt

SEQ ID NO: 269941 - DNA, 120 bp, Artificial Sequence
  ENSG00000127311_81 (sequence is synthesized)
tactacaaccttatagaaataaaatttctttaactctgcctatatttcagggtatagtcctcaggtaaagcttcacattgtcaagaagaacttgaaaataccttttttccataaaaacac

SEQ ID NO: 269942 - DNA, 120 bp, Artificial Sequence
  ENSG00000127311_82 (sequence is synthesized)
aatgaaactaatactatgtaacggaatattccaaagcactagttcttataaataactattggccaaaatacaaataactgacccaattcaaaattctctaagatttcattaagatccttt

SEQ ID NO: 269943 - DNA, 120 bp, Artificial Sequence
  ENSG00000127311_83 (sequence is synthesized)
tgtagttcataagcctgatgcatgggtgttcacacgcatgtgtgagatgtgcctccctcaaaccttgttatggcgccagcccattaccggtctgtcatgaaaaaaaaaatatttcagtaa

SEQ ID NO: 269944 - DNA, 120 bp, Artificial Sequence
  ENSG00000127311_84 (sequence is synthesized)
aagaggatacttctagtatcctttttaaaatttgaattggaagcaaatagtatttcatcccagcatgttaaaattgcaagggtcacctaccccagcttaccatttgctaaacacgcatca

SEQ ID NO: 269945 - DNA, 120 bp, Artificial Sequence
  ENSG00000127311_85 (sequence is synthesized)
gtcaccagtggaacacacatttccaatgctaaaggtcttgactgcttggtgaaaaccactttgcaacactggtgttggaaattactttcttatattaagctgaaatctacctcattggaa

SEQ ID NO: 269946 - DNA, 120 bp, Artificial Sequence
  ENSG00000127311_86 (sequence is synthesized)
cctctgctcataagtcctgagtctcatgtagttcagaccttgtctcttctgccccatctggctacttatctccagtttctcctgccagtcttccggtggcatagccccaaaccctttcat

SEQ ID NO: 269947 - DNA, 120 bp, Artificial Sequence
  ENSG00000127311_87 (sequence is synthesized)
ttcatagtttgtcactgccctttttaagaggactggggtgctcagaacttattggctgaccctagctcttcctttggcctggtcactatatttgaaaagtgctacctgaaatcataagag

SEQ ID NO: 269948 - DNA, 120 bp, Artificial Sequence
  ENSG00000127311_88 (sequence is synthesized)
cttttttgttttgtttttaacagccattttctattgttgattcattttagttttggttacaactgaaatatctgtctttcacatgaaatatagcttctcatttgcctttcttcacaaagt

SEQ ID NO: 269949 - DNA, 120 bp, Artificial Sequence
  ENSG00000127311_89 (sequence is synthesized)
ctgttctaactacacatttccttggcttcagcctcatgcttgatgcagaagtgaggagagtgcaataaaaatttgaacagttgcttggatttttgcaataatagattgtcagttggggtc

SEQ ID NO: 269950 - DNA, 120 bp, Artificial Sequence
  ENSG00000127311_90 (sequence is synthesized)
atatgactctcaggtgctagaaaatactctgcctttcagaacgtaaccgtgggcacactgaatgcaactgtataaaaatgaatgtgaatttttaaaggtagcataattaaagtttgtaca

SEQ ID NO: 269951 - DNA, 120 bp, Artificial Sequence
  ENSG00000127311_91 (sequence is synthesized)
ttttaacagtttatgtaaatctgtctcatagaatacatgtaattttctctgaggtggatgttgtgatacttgatcaatatttgtcacctacagtaaatgtaccattggtcttggaggtat

SEQ ID NO: 269952 - DNA, 120 bp, Artificial Sequence
  ENSG00000127311_92 (sequence is synthesized)
ttctgtgtgtgtttttagcccattctcatatatttcactcctcatcttccgaatgatcctgtggtacagacatgaccttcagtttcaggtagagaagctgactcgtggtgactaaatgtc

SEQ ID NO: 269953 - DNA, 120 bp, Artificial Sequence
  ENSG00000127311_93 (sequence is synthesized)
atactaccaataagtactggagcctgaaatcaaacctggactcaatttcaatacacaggttcctactcttcagtggtgcttctcaggttgataggaaaacctctcacctttagaaaatta

SEQ ID NO: 269954 - DNA, 85 bp, Artificial Sequence
  ENSG00000127311_94 (sequence is synthesized)
ctactaaaaaaatacaaaaacatacttgggaaactgaggtaggagaatcacttgagccccggaggcaggggttgcagtgagctga

SEQ ID NO: 269955 - DNA, 120 bp, Artificial Sequence
  ENSG00000127311_95 (sequence is synthesized)
gcctgggcaacagagtgaaactccatcatcatctcaaaacaaaacaaaacaaaaaaaaattgtgtaggactcaggctagaacattgaaatatattcaaaacaacaccaataatgcatatc

SEQ ID NO: 269956 - DNA, 120 bp, Artificial Sequence
  ENSG00000127311_96 (sequence is synthesized)
tgaaatatattcaaaacaacaccaataatgcatatcctctttatttggctttttaaaatcactgtttattccatttggtagagggttttatttttttccatacaaatatttgaacaattt

SEQ ID NO: 269957 - DNA, 120 bp, Artificial Sequence
  ENSG00000127311_97 (sequence is synthesized)
tgaattccccaaaaccatacatagacgataaataccatgctattaaagtattaaatttgtacaaaaatactttacagtttaatacttgtttgttacaaataaaaatacatatttaagtga

SEQ ID NO: 269958 - DNA, 120 bp, Artificial Sequence
  ENSG00000127311_98 (sequence is synthesized)
gattcattcagaatctaatgatatcagttgacattcttgtttcatgattttttgttaaggatttttggcatccatgtttatgaaggatatgggtagttatctggtaatgtcctgtctggc

SEQ ID NO: 269959 - DNA, 120 bp, Artificial Sequence
  ENSG00000127311_99 (sequence is synthesized)
tttaatatcaggataatactggcctcagaaaatgagttgggaagtgcttcttcttatattttctagaagattttatgaagaaacatttttaataaaatcgaagtacttgagtaacaaaaa

SEQ ID NO: 269960 - DNA, 120 bp, Artificial Sequence
  ENSG00000127311_100 (sequence is synthesized)
ggctgttttccagctaatatggaagtattgctatgttttatacaagtgtgtgccagttgaatatcagctctgaatataagagcacctaccacatgtgggtgtcctgcatattaagtgata

SEQ ID NO: 269961 - DNA, 120 bp, Artificial Sequence
  ENSG00000127311_101 (sequence is synthesized)
taacatataaggcctgtatattgtcaagttctaactgattactaacatgatcacaaggacttaaaacaggaagttttacattagtcatgctgttacacactttgtactcttgtttatttc

SEQ ID NO: 269962 - DNA, 120 bp, Artificial Sequence
  ENSG00000127311_102 (sequence is synthesized)
ttaaattcagtgttcataaaccatcagcaaatacacagtgagtctattacaaatggggaactgtcctggccaggggttgacctctctgttgagggtgggttgtcttggaacccttctttc

SEQ ID NO: 269963 - DNA, 120 bp, Artificial Sequence
  ENSG00000127311_103 (sequence is synthesized)
cattctctttcctattgccctggctgatgtggggaatgaggttgacattcccatggtgaacttgtattccatttggtgagatattttcccagggcccttagcaggaatcccagattagtt

SEQ ID NO: 269964 - DNA, 120 bp, Artificial Sequence
  ENSG00000127314_0 (sequence is synthesized)
gacatcgccaaacctcgcccagattcaggcgtgtaaaccagccggagcggcgcggcagcggcaggaccgccgtggcgcctagagtagcgacccggggggagcgcggggcgacgctggctg

SEQ ID NO: 269965 - DNA, 120 bp, Artificial Sequence
  ENSG00000127314_1 (sequence is synthesized)
cagggacccggtgacagcgtgagaggtactaggttttgacaagcttgcatcatgcgtgagtataagctagtcgttcttggctcaggaggcgttggaaagtctgctttgactgtacaattt

SEQ ID NO: 269966 - DNA, 120 bp, Artificial Sequence
  ENSG00000127314_2 (sequence is synthesized)
gttcaaggaatttttgtagaaaaatacgatcctacgatagaagattcttatagaaagcaagttgaagtagatgcacaacagtgtatgcttgaaatcttggatactgcaggaacggagcaa

SEQ ID NO: 269967 - DNA, 120 bp, Artificial Sequence
  ENSG00000127314_3 (sequence is synthesized)
tttacagcaatgagggatttatacatgaaaaatggacaaggatttgcattagtttattccatcacagcacagtccacatttaacgatttacaagacctgagagaacagattcttcgagtt

SEQ ID NO: 269968 - DNA, 120 bp, Artificial Sequence
  ENSG00000127314_4 (sequence is synthesized)
aaagacactgatgatgttccaatgattcttgttggtaataagtgtgacttggaagatgaaagagttgtagggaaggaacaaggtcaaaatctagcaagacaatggaacaactgtgcattc

SEQ ID NO: 269969 - DNA, 120 bp, Artificial Sequence
  ENSG00000127314_5 (sequence is synthesized)
ttagaatcttctgcaaaatcaaaaataaatgttaatgagatcttttatgacctagtgcggcaaattaacagaaaaactccagtgcctgggaaggctcgcaaaaagtcatcatgtcagctg

SEQ ID NO: 269970 - DNA, 120 bp, Artificial Sequence
  ENSG00000127314_6 (sequence is synthesized)
ctttaatatactaaatgcattgtagctctgagccaggtctgaagaactgttgcccaattcaacagtgccagcattccaactttgttaaacctaccaacatcttaaatggactttcctgtg

SEQ ID NO: 269971 - DNA, 120 bp, Artificial Sequence
  ENSG00000127314_7 (sequence is synthesized)
gtggtaccctttaagaggcggatgaaagctactatatcagtttgcacattctaatcactttccagtatcacaagagagatttttacttatataatagtcctagagtttgcagctggtaaa

SEQ ID NO: 269972 - DNA, 120 bp, Artificial Sequence
  ENSG00000127314_8 (sequence is synthesized)
accagaggctacatccagtattactgctaagagacattcttcatccaccaatgttgtacatgtatgaaaatggtgtactgtatactttaacatgccccatactttgtattggagagtaca

SEQ ID NO: 269973 - DNA, 120 bp, Artificial Sequence
  ENSG00000127314_9 (sequence is synthesized)
ataatgtaaatcctaaaagcaccactattttagcataataaaagaaagtccaaagagctcctatatagactactccagataacttcgcttctttgatacttgtagcttattgtaattttt

SEQ ID NO: 269974 - DNA, 120 bp, Artificial Sequence
  ENSG00000127314_10 (sequence is synthesized)
tttaagaaattcaaggtcattattattgtacaaaataagcgctttgattaacacagctatatagtttttttaatttttaaaaaacctgtggagacggtgatcttgtctttaaaacatgat

SEQ ID NO: 269975 - DNA, 120 bp, Artificial Sequence
  ENSG00000127314_11 (sequence is synthesized)
agtcctttcagtataatgtcttagattaaagacgttgcctttaatatctgttgggaaggaaatgtccagacttttcaaatctcttattatatgtttcctttttttgtttacatagggaac

SEQ ID NO: 269976 - DNA, 120 bp, Artificial Sequence
  ENSG00000127314_12 (sequence is synthesized)
aatgtttatagtcgtgtgtacagtgggggtctacaacaagaagtgtatattttcaaacaattttttaatgatttaacaatttttgtaaatcattttcaggcttctgcagctgtagattct

SEQ ID NO: 269977 - DNA, 120 bp, Artificial Sequence
  ENSG00000127314_13 (sequence is synthesized)
cactgtgaatcccttgcttgctcatgcataagtgtatttgcaataccaaatatacaggtttagtatttttgcctgttagtgattgtttcacatgtgtaacgttttggttgagatgttaaa

SEQ ID NO: 269978 - DNA, 120 bp, Artificial Sequence
  ENSG00000127314_14 (sequence is synthesized)
tggtggacgagtactgtggatgtgaatgtgggaagtaattttaatcatatgtaattggtcacaaggcctaatttgcagtaactattgctgttttatttaacaatgccttgttgctttgta

SEQ ID NO: 269979 - DNA, 120 bp, Artificial Sequence
  ENSG00000127314_15 (sequence is synthesized)
tgcattaatgtttggatgtaaagattgtgtgtctatccaacagggagccacagtatttaaattgaccaacctaatgttacaactactttgaggtggccaaatgtaaactaaaagccttaa

SEQ ID NO: 269980 - DNA, 120 bp, Artificial Sequence
  ENSG00000127314_16 (sequence is synthesized)
ttaaagtggtgcaattttgtataacttagcatcagtagttcaataaatttggattgccatgcaagggcttgcattataattacttgccacttgaatgtgttttgtgtaatgttttaacag

SEQ ID NO: 269981 - DNA, 120 bp, Artificial Sequence
  ENSG00000127314_17 (sequence is synthesized)
tgctagtaaataaatacgggtttaccctggttttaattgtaataggtgcattttacacagcatggtttcataatttaacatctgggcaagccagactcattaattacaggaataaggaag

SEQ ID NO: 269982 - DNA, 120 bp, Artificial Sequence
  ENSG00000127314_18 (sequence is synthesized)
tagcgagttttctggtattgtttgaatatccacataaccaccttttgaacttttccttgagaaataattttgtaaatcaagcagtattacttacgaataaatgcctttgggtaatgttca

SEQ ID NO: 269983 - DNA, 120 bp, Artificial Sequence
  ENSG00000127314_19 (sequence is synthesized)
gtagctatttgatgaggtaggtaaaagaggaacgatttaacatactttcatggatgttacactatggattttttaaaatacaggattgaagttagaatattgtggttataaaaatctttg

SEQ ID NO: 269984 - DNA, 120 bp, Artificial Sequence
  ENSG00000127314_20 (sequence is synthesized)
agtgatgtggattaagcacttagagaatcgatatttttcttaaatatgctataattgaattctgtaagaactgaattcttatagaattattttaaaactttttaaaaattgtaaagctct

SEQ ID NO: 269985 - DNA, 120 bp, Artificial Sequence
  ENSG00000127314_21 (sequence is synthesized)
taaaaaactttttgaaagtatttgccagctactggagcaattaatcagtgataatatctaatagaggggtatctgctaatcccctaaatacacgctgtttgaatgatacatttttaaagg

SEQ ID NO: 269986 - DNA, 120 bp, Artificial Sequence
  ENSG00000127314_22 (sequence is synthesized)
ctttcatgttaagaaaaagtctgattctttacaaaagggacttgttttggcagaactggttttatttataatcatttgggaaaaaaattaagcccaaaaaactgggactgtgaaacacta

SEQ ID NO: 269987 - DNA, 120 bp, Artificial Sequence
  ENSG00000127314_23 (sequence is synthesized)
aaattacttcaatttactatgtcctgttacatccattgataccgccattattcaataattacttttaataaatgtttgctgcctaccagctatgtaccaggcccagttctaggctcaaac

SEQ ID NO: 269988 - DNA, 120 bp, Artificial Sequence
  ENSG00000127314_24 (sequence is synthesized)
agctaaatattcattcattggacaaattaagtacttaagtataaaaattgttctaggcctaaggatgtagcagcaaccaagatcaactataaaatgctgccctcctagaatttatattct

SEQ ID NO: 269989 - DNA, 120 bp, Artificial Sequence
  ENSG00000127314_25 (sequence is synthesized)
attgaagagtttctcagcctcagcactattgatgttttatgtttgataatgtattctggcgactctcctgtgcattataggaattttaatatctgcccactagatgccagtcacaccacc

SEQ ID NO: 269990 - DNA, 120 bp, Artificial Sequence
  ENSG00000127314_26 (sequence is synthesized)
ccagcccccaagttgtggcaaccaaaaatgtttccagacattgccagatgttccccagttggattgttgggggacaagggaggtgaacttggagggcaaaatcaccctggtgaagaacta

SEQ ID NO: 269991 - DNA, 120 bp, Artificial Sequence
  ENSG00000127314_27 (sequence is synthesized)
ctgctctggtgggaaacaacacattagttacagatgagtgttagggttacaagatggatggtttactatatagtgaataagaatataaagtttggagccagacttcctgggtttttaatc

SEQ ID NO: 269992 - DNA, 120 bp, Artificial Sequence
  ENSG00000127314_28 (sequence is synthesized)
ccagctcttccagttcctactatatgcctttggttgggtgccttggtttcctcatctgtaaaatgagaatgataatacctacttcataggagagtgaaatgaatgccagtgctatcctct

SEQ ID NO: 269993 - DNA, 120 bp, Artificial Sequence
  ENSG00000127314_29 (sequence is synthesized)
tatatagtacatatatagagagagtatatatatatatgtagtacagtggaggtctatataatactatatatataatttatttttttcaatgctgataggaataaggctgtggtttggcaa

SEQ ID NO: 269994 - DNA, 120 bp, Artificial Sequence
  ENSG00000127314_30 (sequence is synthesized)
atgctgataggaataaggctgtggtttggcaaaaagcaccattttctcctatacaaaatagtaactgcagtttgggagcacaactcatgtagattgacttttctggtgcttaatgggaaa

SEQ ID NO: 269995 - DNA, 120 bp, Artificial Sequence
  ENSG00000127314_31 (sequence is synthesized)
atactaaaataattgagtcagaaaaggcatgaattccttttcacgtccccaaggatacttgaagaaacttgagttttaggagaaaatcagagtggtctttcacttacatttttctaaaaa

SEQ ID NO: 269996 - DNA, 120 bp, Artificial Sequence
  ENSG00000127314_32 (sequence is synthesized)
gtgtaaaaaccctgtattgactttcttgttgattcagttgtttcttaaacgtaaatagctcatctttaccatatgtgggcattacaaatagaaatttttaaaattccatttataaaatga

SEQ ID NO: 269997 - DNA, 120 bp, Artificial Sequence
  ENSG00000127314_33 (sequence is synthesized)
agttttgccgtttttttttttaaatcattccgtctttagttgtgggacagcaaacttagaatcgaaactcatcactacaacttttctttgagttaaactcttatctgtgttttcattgaa

SEQ ID NO: 269998 - DNA, 120 bp, Artificial Sequence
  ENSG00000127314_34 (sequence is synthesized)
tttaatctccatctattctatctcttcttaaatcttggaaatgtaaaagggagttatagtgttttacaattaatactcttactattaccttagaagccttaaaagtgcttgcaggcttgt

SEQ ID NO: 269999 - DNA, 120 bp, Artificial Sequence
  ENSG00000127314_35 (sequence is synthesized)
ctcataatctgtcagtgagccttaacattgtgatttgtaagactaaaatttttttttcaaacaaaacaaatctgacagcctgggcaacatagaccccatctctacaaaaaaaaatttttt

SEQ ID NO: 270000 - DNA, 120 bp, Artificial Sequence
  ENSG00000127314_36 (sequence is synthesized)
tttaattagctgggcatggtggtgcacgtctgtacctgtagtcccagctattcagaaggattgcttgatcccaggagatcaaggatacagtgaactgtgttcgcgccactgcacccccac

SEQ ID NO: 270001 - DNA, 120 bp, Artificial Sequence
  ENSG00000127314_37 (sequence is synthesized)
ctgcacccccacgatggcaatagagtgagaccctgtcttagaaaaaaaagataaataagtctgttctatttgttacagtgcatcaacacatttgaattttctttttttttctttttcttt

SEQ ID NO: 270002 - DNA, 82 bp, Artificial Sequence
  ENSG00000127314_38 (sequence is synthesized)
accacgcctggctaattttgtattttttggtagagatgaggtttctccatgttggttaggctggtttcgaactcccgaccca

SEQ ID NO: 270003 - DNA, 120 bp, Artificial Sequence
  ENSG00000127314_39 (sequence is synthesized)
ggtgtgagccaccgcacccagcctaatcaatacatttgatatttcaagaatacatgagagaagagaggtagattgagaacagaactaaactttatatatgtttccttaactattgggagg

SEQ ID NO: 270004 - DNA, 120 bp, Artificial Sequence
  ENSG00000127314_40 (sequence is synthesized)
cttaactattgggaggaaaatggatgagtctgtgttgggatacctgttgaaacaagactactaaacagattaatcaactaattccataggcttgacattagtttatctttgaaaagtaaa

SEQ ID NO: 270005 - DNA, 120 bp, Artificial Sequence
  ENSG00000127314_41 (sequence is synthesized)
agtaaagtgcttattgctaaataggtctgtattctaaatgctgccattttttaaaaaaagtattccatgttacacacattttaaacttgcttcttaaaacatccctgttggtggcctgta

SEQ ID NO: 270006 - DNA, 120 bp, Artificial Sequence
  ENSG00000127314_42 (sequence is synthesized)
ggttactgaccttaggaattacaggctttatccaaaattaggcatatctacctgatttttgtatctgagaatcaataaatgcattcagtattctctaccgtgtttcaggcgctgtttaca

SEQ ID NO: 270007 - DNA, 120 bp, Artificial Sequence
  ENSG00000127314_43 (sequence is synthesized)
atatcggaggtacagcagggattttctgcccacgtggggaaaacacacagcaaatgaacaaagctctattggtaacagtctgttaaactttctaagagctttccaactttctaagagaaa

SEQ ID NO: 270008 - DNA, 120 bp, Artificial Sequence
  ENSG00000127314_44 (sequence is synthesized)
attgtaatgattttagaaaagtgagctgtcatttttcatatatataaatttttttattcataggtaatctaatttttctcatttctccaaaagggtacgaagacagtttttactatgttg

SEQ ID NO: 270009 - DNA, 120 bp, Artificial Sequence
  ENSG00000127314_45 (sequence is synthesized)
ttttactatgaacctagtttaacctgactttccttacagacccacataaatgagacaatccaaatttagtatttgggtcaaaatgcagggttttttcctgaaaacaaaacagcacacaca

SEQ ID NO: 270010 - DNA, 120 bp, Artificial Sequence
  ENSG00000127314_46 (sequence is synthesized)
tatattacaggatttttatgtaataatatattcacttcagtcaggtttcagtttttaaataggcagagatcaaaagcctctaatgtttttgtcatccgccattattacccattcaaattt

SEQ ID NO: 270011 - DNA, 120 bp, Artificial Sequence
  ENSG00000127314_47 (sequence is synthesized)
ctatttatgtctggtagttatgtcccctgtgagcactaatttcagaacaggaaattctattaactgtcaaactctttaatgtgcagtgcagtaggtttggagcagaggggagtaggaagg

SEQ ID NO: 270012 - DNA, 120 bp, Artificial Sequence
  ENSG00000127314_48 (sequence is synthesized)
aaggagtaaatgatataatccagtctggcctggcatggtggctcacacttgtaatcccaatgctttgggaggccgagatgggtggatcactggaagccaggagtttgagacaagcctggc

SEQ ID NO: 270013 - DNA, 120 bp, Artificial Sequence
  ENSG00000127314_49 (sequence is synthesized)
ctgagatcacaccactgcacttcagcatgggcaacagagtgagactgcaaaaaaaagaaaaagaaaaaaaaatccagtctctgctggcaaggtgtttaacaagtcaatgatgggaaagac

SEQ ID NO: 270014 - DNA, 120 bp, Artificial Sequence
  ENSG00000127314_50 (sequence is synthesized)
gatgggaaagaccagtcaaataaactatcagatctaataacttttctaaccataggtgattcttcttccattatccatactaaagcaagtgactcataataaaaattgttattttgtaaa

SEQ ID NO: 270015 - DNA, 120 bp, Artificial Sequence
  ENSG00000127314_51 (sequence is synthesized)
atatatggactgtttgctttatattcccaactattacatctggttgactattaacaggtcaatgtcagatttcctgagcaaatcaaccaataatgaaaaactatgtggctggcagaaaaa

SEQ ID NO: 270016 - DNA, 120 bp, Artificial Sequence
  ENSG00000127314_52 (sequence is synthesized)
cccagctgcttgggaggctgaggtaggaggaactcttgagctccggtggtttgaggccagcatggataacatagggagaccctgtcacttgacaaaagtatctttccctactggaaatgg

SEQ ID NO: 270017 - DNA, 120 bp, Artificial Sequence
  ENSG00000127314_53 (sequence is synthesized)
caggtagttatggggagacctctactgttctaaatgagactaatagtaaatgttacataactaaagcaacagatttgccagctgtgtgaaagataacccagagaggggtaatggtagagc

SEQ ID NO: 270018 - DNA, 120 bp, Artificial Sequence
  ENSG00000127314_54 (sequence is synthesized)
cagaattaacacagccagcttgtcagctacctttgaacatgtattttctgtgcagtcagatttgaagggttggaccttggagttactgacattggaggcaactgaaaccatgagtgtgaa

SEQ ID NO: 270019 - DNA, 120 bp, Artificial Sequence
  ENSG00000127314_55 (sequence is synthesized)
tgaaattattttcgtaagaattacttggggttaaaaatagtaataaaaaggaaagcctggcctaaacagtcttgggatggggagaagggttggagtacaaaggattgctattacaaagac

SEQ ID NO: 270020 - DNA, 120 bp, Artificial Sequence
  ENSG00000127314_56 (sequence is synthesized)
atgggcagagaacaaggcaaatagctgagcagcaattgagaatacagcatcttttatggcaaagagcaaaatactattgttcctcttctagtatgctatagaccagcagtaattttgtgc

SEQ ID NO: 270021 - DNA, 120 bp, Artificial Sequence
  ENSG00000127314_57 (sequence is synthesized)
tctaaaatgcttatttttatctctctgtatatacttggtggtgaatttgctacaaatgtaaggagatgatgggatagtttttggaaataccatcctctaattagtaccaggtctatgtat

SEQ ID NO: 270022 - DNA, 120 bp, Artificial Sequence
  ENSG00000127314_58 (sequence is synthesized)
atctgcagcaactataaagtctgtttcagagtcagtattggcaaacttatatttaaattcagctgtaacaagacatctttttttttttttttgagagagtctggctctgtcacccaggct

SEQ ID NO: 270023 - DNA, 120 bp, Artificial Sequence
  ENSG00000127314_59 (sequence is synthesized)
cgcccggcaagttgtctttcaaatatatgcctttgcagtatttctctacttccccagtaatgtaaactttattttctctcaattttcgtaagtggtattttggtgctttacccaaaatat

SEQ ID NO: 270024 - DNA, 120 bp, Artificial Sequence
  ENSG00000127314_60 (sequence is synthesized)
tagggagaaaattcttctttttaattggattctcgtatgttgatctatttctattgttttctaaaaaaaagttagtgtcctagtttaaaagtatatattagtttcctagggctgctgtaa

SEQ ID NO: 270025 - DNA, 120 bp, Artificial Sequence
  ENSG00000127314_61 (sequence is synthesized)
caaattatcacaaatttggtggcttaaagcaacagaaatgtactctttcacagttctgaaggtcgaagtccaaaatcaaagtgttaggatgtactcctagaggctctcggagagaacctg

SEQ ID NO: 270026 - DNA, 120 bp, Artificial Sequence
  ENSG00000127314_62 (sequence is synthesized)
ttcccatggcattatgccacatcacatgtgcctctatctttgtatctcctcctctctataatctttcttttaaaaggacaattgttttgacatttagggcttacccacatacttcaggat

SEQ ID NO: 270027 - DNA, 120 bp, Artificial Sequence
  ENSG00000127314_63 (sequence is synthesized)
aatctcatctcaaaatgcttaatcacatctgcaaagacacttttttcaaataaagttaacagacagaagtttgggggttgggatgtggacatgcctttgggagccattaacaacctacca

SEQ ID NO: 270028 - DNA, 120 bp, Artificial Sequence
  ENSG00000127314_64 (sequence is synthesized)
aaacattttaacaatttttcagtaccaaagactagtatgggtctgctccaagataactcaaaacattctgaactgaatcagcagaccctcaggtctccctagagagatcctgagcaccta

SEQ ID NO: 270029 - DNA, 120 bp, Artificial Sequence
  ENSG00000127314_65 (sequence is synthesized)
ggaaagccccagaattaagctactctacaaggattctgagggaagtctgggattaggtgagactttaatgagtccatcagaggtttagtatggactagttctacagttccagaagcaaca

SEQ ID NO: 270030 - DNA, 120 bp, Artificial Sequence
  ENSG00000127314_66 (sequence is synthesized)
tactgggtatggaatattgttaaccattgtcatcccacagaattaccttctacttgtgtcagtatatatcctgcctaccctacatattttatatttatcaatgatgacagaaacttcccc

SEQ ID NO: 270031 - DNA, 120 bp, Artificial Sequence
  ENSG00000127314_67 (sequence is synthesized)
ccttttacttagatctaatagtaatataacaaacttttctttttcattttcagacatatccagagggttttctcttcatctcacgcatcccacctttaatcagacatatgtgattcatat

SEQ ID NO: 270032 - DNA, 120 bp, Artificial Sequence
  ENSG00000127314_68 (sequence is synthesized)
gagagaaaattagtgtttctgagaccaaatggtggtgtttataagattttgcttctgcactgaattcaatgttttatttactgcttggttattttgtttttgttttttaagaaatgggag

SEQ ID NO: 270033 - DNA, 120 bp, Artificial Sequence
  ENSG00000127314_69 (sequence is synthesized)
gagtgtaatatctagaggtacatgaaaaaaagaaatggaaggaatggacaggcccagaattaaatgataaaaactcatctggttggaatgaagtacactgaacatttgaggaagttagag

SEQ ID NO: 270034 - DNA, 120 bp, Artificial Sequence
  ENSG00000127314_70 (sequence is synthesized)
attaattcaacccagtgggttttggggtttttatatgtgttagtacattcagcgttagggttgggtttcttgtctctgtaatcacttctcaaaaatgaatttgggcttctccagatagcc

SEQ ID NO: 270035 - DNA, 120 bp, Artificial Sequence
  ENSG00000127314_71 (sequence is synthesized)
tttttatccatttattatttcaagtaatggtataaggaaattgtaaccatttgtgtgctttacatgtttaagatacaaacttacagttcccagaagtcaattcagtcattctctataaga

SEQ ID NO: 270036 - DNA, 120 bp, Artificial Sequence
  ENSG00000127314_72 (sequence is synthesized)
gctgttgtggaaaaagttctcacttcacttactcattcctttgcattttccaactttagtaaagcatgacttcatgccttggatcatacaggatttcaacgggagatttataagtctatt

SEQ ID NO: 270037 - DNA, 120 bp, Artificial Sequence
  ENSG00000127314_73 (sequence is synthesized)
ttgttagaataaaaagcaataatacttcctgaaatacatcttgggctctttgcagaagctgaactatctggtaattactatttagcaaacagctaacagctagctcttaatttttcagaa

SEQ ID NO: 270038 - DNA, 120 bp, Artificial Sequence
  ENSG00000127314_74 (sequence is synthesized)
ataagaggacatcattggccactatcataccactaattttattccaccaatgctttcacagaggatgtcaccaaagaaagaagtggcatccactacccctcccccatccttccactctga

SEQ ID NO: 270039 - DNA, 120 bp, Artificial Sequence
  ENSG00000127314_75 (sequence is synthesized)
accagtacaggatattctcatggtcagggcattctctccttggcaggatgtagttaatgacatatgcagaattaatgacttggttgccctaggccccccgtcaaggcttttgttcaaggg

SEQ ID NO: 270040 - DNA, 120 bp, Artificial Sequence
  ENSG00000127314_76 (sequence is synthesized)
agagtaaagaggataggtctcagtatgtcatccaaacaggatggatacagaatgccaaccaggttagccctggcaagttaagacattttacagtgccactacctacctccatactgtatc

SEQ ID NO: 270041 - DNA, 120 bp, Artificial Sequence
  ENSG00000127314_77 (sequence is synthesized)
agaggagccagttgcacagtgttgatctccctaagactattataataaggaaggggtttttttcttagcccagttactactaaaactcactcagaggagcaagtgaaatttgtcacaatt

SEQ ID NO: 270042 - DNA, 120 bp, Artificial Sequence
  ENSG00000127314_78 (sequence is synthesized)
ggctcgactgctttatctcactttgaaaaagaaaagttacaaattctagtaagcaaaagattttttgtgaccaggtctccctgacctgcacaaaataaactcttcatgagttaaaccaaa

SEQ ID NO: 270043 - DNA, 120 bp, Artificial Sequence
  ENSG00000127314_79 (sequence is synthesized)
acagatttaatgtctaaacttaaatctagtttgacattaacttcttttccaaagagaaataacgttaacaatctgaaatcatccctgcacagactttcttggctcttcttttctgccgtc

SEQ ID NO: 270044 - DNA, 120 bp, Artificial Sequence
  ENSG00000127314_80 (sequence is synthesized)
ctatgaatcacaaatagaagtttaagaaagctgtcaggtaggcgcctcaaattcatttaaaatgaggaatgatgaaagaataagaaaaaccagcaaatgatagcttacttattcagttat

SEQ ID NO: 270045 - DNA, 120 bp, Artificial Sequence
  ENSG00000127314_81 (sequence is synthesized)
ttggcttgatactgcttgaaagtgacatttctagattaaagatctgataagctctgatagttgggaaataatactagttatttcttggacaccctaagatgtgccaccattgctctaagc

SEQ ID NO: 270046 - DNA, 120 bp, Artificial Sequence
  ENSG00000127314_82 (sequence is synthesized)
actttacatgtgttgttcaaccctcagcaatgctatgaaataggggctgagtctcctaatagagctaatgaatgcattatatcaaaagaatgaaatgttaaatatagacactggaaaata

SEQ ID NO: 270047 - DNA, 120 bp, Artificial Sequence
  ENSG00000127314_83 (sequence is synthesized)
aaattacttttgcttgtattataagtgaataccttgaaagctcaaaaaaatctattagaagtattcaggaacttggctggatataagataagcatgccaaaaatcaatagcttttcttta

SEQ ID NO: 270048 - DNA, 120 bp, Artificial Sequence
  ENSG00000127314_84 (sequence is synthesized)
tatttataaaaaatacctacaagttgatatagtaaacacgacagataaaaactaaatgccttaaggtataaggctaagaaagaactattataaactcttattgaaggacataaatcaaga

SEQ ID NO: 270049 - DNA, 120 bp, Artificial Sequence
  ENSG00000127314_85 (sequence is synthesized)
tctgaacaaatacactgggaagataatatcataaaaatatcaattcccccaaattagcatgttaatgtataatgattacaatttaaatttcaactggctgaggctttgtttttgtttttg

SEQ ID NO: 270050 - DNA, 120 bp, Artificial Sequence
  ENSG00000127314_86 (sequence is synthesized)
attttttaatagactggatgttggtcttgaactcctgggctcaagcaagtgtcacaccttggcctcccaaagtggattataggcatgagccaccgtgccagacttgggtgaggttttgaa

SEQ ID NO: 270051 - DNA, 64 bp, Artificial Sequence
  ENSG00000127314_87 (sequence is synthesized)
aggcatgagccaccgtgccagacttgggtgaggttttgaaattgaaattaagcaaggggcggat

SEQ ID NO: 270052 - DNA, 120 bp, Artificial Sequence
  ENSG00000127314_88 (sequence is synthesized)
tgcactccagcctgggtgacagagcaaatctctatctcaagaaaaagaaaaaagaaaagaaattaagcaaaatgatcttaaagttcaagtgaaagagtagagtagaactgagtccagaac

SEQ ID NO: 270053 - DNA, 120 bp, Artificial Sequence
  ENSG00000127314_89 (sequence is synthesized)
aagcaaaatgatcttaaagttcaagtgaaagagtagagtagaactgagtccagaactagattccagtatatgacgtttatacgtgacaaaaatatatttctttttctttctttttttttt

SEQ ID NO: 270054 - DNA, 67 bp, Artificial Sequence
  ENSG00000127314_90 (sequence is synthesized)
ttttttttttttttgagacagtttccctcttgttgcccagactggagtataatggcacgatcttggt

SEQ ID NO: 270055 - DNA, 65 bp, Artificial Sequence
  ENSG00000127314_91 (sequence is synthesized)
atgtgccaccacgccttgcgaactcccaacctcaggtcatctgcccgcctcagcctcccaaagta

SEQ ID NO: 270056 - DNA, 120 bp, Artificial Sequence
  ENSG00000127314_92 (sequence is synthesized)
cactgtgcccggccgacaaaaatatatttcaatagaaaatagtatcagtaaaatgctagcacaactaactatctgtctaaagacaataaaagttcaacccctatatcatgcaaaaagcac

SEQ ID NO: 270057 - DNA, 120 bp, Artificial Sequence
  ENSG00000127314_93 (sequence is synthesized)
tttccagatatattaaaatgttttcaagctataaagtaaaacagtagaagtcttagaagaaaatctaagagactagaaatctagagatagggtagaccttcttagctaatttttaaaaat

SEQ ID NO: 270058 - DNA, 120 bp, Artificial Sequence
  ENSG00000127314_94 (sequence is synthesized)
gaagctatatttaagatatatatttcaagtaaataataagtgtgtgtgtgtgtacacacagatgcttctcagcttacaatggggttatgtcccaataagcccatcagaagtcaaaaatgt

SEQ ID NO: 270059 - DNA, 120 bp, Artificial Sequence
  ENSG00000127314_95 (sequence is synthesized)
aagtcgaaaatgcatttaataccctgataaatccatcacaaagctgaaaaattataagtaaaactgtaagtcacagactgtatatataaatttaaaatttggcaaaatatattgcaaagt

SEQ ID NO: 270060 - DNA, 120 bp, Artificial Sequence
  ENSG00000127314_96 (sequence is synthesized)
aatttaaaatttggcaaaatatattgcaaagtcaaatttgggaaagtatagcacagataaaagattaaactattcacggccaggcacggtggatcatgcctgtaatcccaacactttggg

SEQ ID NO: 270061 - DNA, 64 bp, Artificial Sequence
  ENSG00000127314_97 (sequence is synthesized)
aggagaattgcttgaacctaggaggcgatactccgtttaaaaaaaaaaaaaaaaaaaaaggtaa

SEQ ID NO: 270062 - DNA, 120 bp, Artificial Sequence
  ENSG00000127314_98 (sequence is synthesized)
aaagataaatggttgaaagatatataactaggcagtttagataagaacaaatccaaatggcccatcaacataaaaagatgctctaactgtagccagagaaatacgaatcaaagtaccaac

SEQ ID NO: 270063 - DNA, 120 bp, Artificial Sequence
  ENSG00000127314_99 (sequence is synthesized)
gagcccaacacatggacgaaaacttcagagaacactacagtcccagaagagaggtaaagggcaagaaatgaatcatttattgctgatggaaatgtgcattgtagagctgatatctgttca

SEQ ID NO: 270064 - DNA, 120 bp, Artificial Sequence
  ENSG00000127314_100 (sequence is synthesized)
aattaaatatgcatatttgacctcaattctactactgatatctacaccaaggaaatgaaaggaaatgcacaagattatttattgccacactctagaaggaaaaacagagtgcatgcccat

SEQ ID NO: 270065 - DNA, 120 bp, Artificial Sequence
  ENSG00000127314_101 (sequence is synthesized)
caatagaatagttgaataaattatgattcatgcataatatagaacattatgcattcatttaaaaatgagtttgatgtttaaaggttgacttagaaggattcccgtgcaaagtgaacaaaa

SEQ ID NO: 270066 - DNA, 120 bp, Artificial Sequence
  ENSG00000127314_102 (sequence is synthesized)
cagaataccgagaaggatgtatgtgagggatgcatgtgggcacctgggaaaggagatgaagaaagcaactgaaggatatttaccaagttgttaatatgcattacctgacatggtgatata

SEQ ID NO: 270067 - DNA, 120 bp, Artificial Sequence
  ENSG00000127314_103 (sequence is synthesized)
ggagtaggggtgaggaagtgaaggatctgagtaggtggaaaaagaaaagcaaaagtacaacagcgggagaaaaaacaggatgactcgtctagaagagacattgtcagtaacaagtaaata

SEQ ID NO: 270068 - DNA, 120 bp, Artificial Sequence
  ENSG00000127314_104 (sequence is synthesized)
acattttctggaatataaaaaaaaaagctatatgaatgtcatcattatatgtaaaatatgaatgtaaaatacatgggaggataatatgcattaataaaaattatggtgctggcaacagta

SEQ ID NO: 270069 - DNA, 87 bp, Artificial Sequence
  ENSG00000127314_105 (sequence is synthesized)
acccggggggagcgcggggcgacgctggctgcagggacccggtgacagcgtgagagccaggcatggtggtgtgaggagaatcgctgg

SEQ ID NO: 270070 - DNA, 120 bp, Artificial Sequence
  ENSG00000127314_106 (sequence is synthesized)
ggcgacagagtgagactccgtctcaaacaacaacaacaacaaaagctcctcgatggaaccatttgatagtgacaaggattgaagtactaggttttgacaagcttgcatcatgcgtgagta

SEQ ID NO: 270071 - DNA, 82 bp, Artificial Sequence
  ENSG00000127314_107 (sequence is synthesized)
cagcgtgagagggtctcagtcactgcagcctcgactcctgggctcgagtgatgctcccacctcagcctctcaagtagctggg

SEQ ID NO: 270072 - DNA, 120 bp, Artificial Sequence
  ENSG00000127314_108 (sequence is synthesized)
ttagctttataattattgaatgttttatacaaaggatggaggcagagttaatttataaaattagtgggaaaagtttacactttctggcattgcatagttaccagtttaagaggatcataa

SEQ ID NO: 270073 - DNA, 120 bp, Artificial Sequence
  ENSG00000127314_109 (sequence is synthesized)
acacccatactctcacatattcacagaattttttgtaatttgacacataaactttaaagcagaccatccatttcaagtagtagccccatgttactttcagtcccctacctagcaagactg

SEQ ID NO: 270074 - DNA, 120 bp, Artificial Sequence
  ENSG00000127314_110 (sequence is synthesized)
attactctcaagctcccttctttttaacctagaaataggtggacacaggtcttcctaagctttctacttactaacctcttgagaaagtgccaccactcacaatactggttgaatatccct

SEQ ID NO: 270075 - DNA, 120 bp, Artificial Sequence
  ENSG00000127314_111 (sequence is synthesized)
aaaccagccggagcggcgcggcagcggcaggaccgccgtggcgcctagagtagcgacccggggggagcgcggggcgacgctggctgcagggacccggtgacagcgtgagagaattctttt

SEQ ID NO: 270076 - DNA, 120 bp, Artificial Sequence
  ENSG00000127314_112 (sequence is synthesized)
agattcaggcgtgtaaaccagccggagcggcgcggcagcggcaggaccgccgtggcgcctagagtagcgacccggggggagcgcggggcgacgctggctgcagggacccgccaggcatgg

SEQ ID NO: 270077 - DNA, 120 bp, Artificial Sequence
  ENSG00000127314_113 (sequence is synthesized)
tactttacctaagcctttcactccaagacgttctttttctgttgagttttaggttttgatgatttgtctttgttaagataaaattccttaatgactttagaagcaatataatatttttct

SEQ ID NO: 270078 - DNA, 120 bp, Artificial Sequence
  ENSG00000127314_114 (sequence is synthesized)
tgtaattttattcaacttttaattatatctgggtggatcatattctctctggaacattgactccagaatgacacgagttatgctggaatacaatttgagctaagcacagagattgagagc

SEQ ID NO: 270079 - DNA, 120 bp, Artificial Sequence
  ENSG00000127314_115 (sequence is synthesized)
taagcacagagattgagagcgtacaaatacatgtctttttgcattcgcatttcagagccagataggaataaattttggtctttttatttatttatttttttgaaacagggtctcactctg

SEQ ID NO: 270080 - DNA, 120 bp, Artificial Sequence
  ENSG00000127314_116 (sequence is synthesized)
acgtgccaccatgccaggctaatttttaaaattttttgtagagatggcgtcttgctatattgcttaggctggtcttaaactcctggcctcaagtaatccacctttgcctcccaaagtgct

SEQ ID NO: 270081 - DNA, 120 bp, Artificial Sequence
  ENSG00000127314_117 (sequence is synthesized)
ataaatcaccatgcctggcttgctctttcttcttatgaatagtcttaccctgtacattttatgttagaaaatatcaaagcttataaaaagtcttcaaatattacctttgactgtccagct

SEQ ID NO: 270082 - DNA, 120 bp, Artificial Sequence
  ENSG00000127314_118 (sequence is synthesized)
ttacattttttaacggcacgttttctgcatcaaggaatggtatagcaagaatgaagacataactgggtaatgagggttgggaaagaggaaaaacgtagggaaaataatttgatgaatagt

SEQ ID NO: 270083 - DNA, 120 bp, Artificial Sequence
  ENSG00000127314_119 (sequence is synthesized)
tcagagcttagcaaagcctcacaagcaaatagattgaccttctgtctcactcataagataaaccatcttggccacttagaaaggccacctagctgagaagtgtcatgcttggaacaaact

SEQ ID NO: 270084 - DNA, 120 bp, Artificial Sequence
  ENSG00000127314_120 (sequence is synthesized)
gagaagtacatacaatgtgaaatgaactgctttttcatttgtatccaaagtgatggggaggtcagttgatcctgcatgtatgtgtgtatacataacaattagtcaatttctaatttaaaa

SEQ ID NO: 270085 - DNA, 120 bp, Artificial Sequence
  ENSG00000127314_121 (sequence is synthesized)
gaatccttgaagaccttctgtctattgttcatatactgaaattttataatgataagccttggtactaggttttgacaagcttgcatcatgcgtgagtataagctagtcgttcttggctca

SEQ ID NO: 270086 - DNA, 120 bp, Artificial Sequence
  ENSG00000127314_122 (sequence is synthesized)
ttcctctaacttttaatcactcaaccttattaagggcactctgtcatgaaagcaagtatagacttctttttgttggttctgaaaaataaatggtttatttttataagatatccatgagtt

SEQ ID NO: 270087 - DNA, 120 bp, Artificial Sequence
  ENSG00000127314_123 (sequence is synthesized)
aatggtttatttttataagatatccatgagttagtatgctatcttattaattatttacttatcatcatgagtaaagtatttcacataagtattctttttttgagatggagtttcactctg

SEQ ID NO: 270088 - DNA, 120 bp, Artificial Sequence
  ENSG00000127314_124 (sequence is synthesized)
atttgagctatttcgaaactatttttttctctagaattaagtgctgagaatccatattgagactggttcgtgtaggtttccctgtgttgacttgagaacacatggcttttgaacttgatt

SEQ ID NO: 270089 - DNA, 120 bp, Artificial Sequence
  ENSG00000127314_125 (sequence is synthesized)
ttagcttttttgtgtatattaaggtagttttatgtacattgaaaaaatgaacatgtattttaatttttctaccagcaagttgaagtagatgcacaacagtgtatgcttgaaatcttggat

SEQ ID NO: 270090 - DNA, 120 bp, Artificial Sequence
  ENSG00000127314_126 (sequence is synthesized)
ttaaccccaagttaatatgtactcagggtaatatgttgatgttacaggcaaaaaaaaaaaaccctcatgttaaatgtatctatgtagtaaataaacaatactatttcagtctctattaaa

SEQ ID NO: 270091 - DNA, 120 bp, Artificial Sequence
  ENSG00000127314_127 (sequence is synthesized)
ttcttaccaaatgtacacattcgaatgtagtattggctgtggttttttttttcattgatggtgtaactccctgtgtgaactcagtttacaattacattaaagattgaatgtactcttttc

SEQ ID NO: 270092 - DNA, 61 bp, Artificial Sequence
  ENSG00000127314_128 (sequence is synthesized)
acccggggggagcgcggggcgacgctggctgcagggacccggtgacagcgtgagagaccat

SEQ ID NO: 270093 - DNA, 120 bp, Artificial Sequence
  ENSG00000127314_129 (sequence is synthesized)
agccggagcggcgcggcagcggcaggaccgccgtggcgcctagagtagcgacccggggggagcgcggggcgacgctggctgcagggacccggtgacagcgtgagaggttcgcagagagct

SEQ ID NO: 270094 - DNA, 120 bp, Artificial Sequence
  ENSG00000127318_0 (sequence is synthesized)
tcgaccaggttctccttccccagtcaccagttgctcgagttagaattgtctgcaatggccgccctgcagaaatctgtgagctctttccttatggggaccctggccaccagctgcctcctt

SEQ ID NO: 270095 - DNA, 120 bp, Artificial Sequence
  ENSG00000127318_1 (sequence is synthesized)
ctcttggccctcttggtacagggaggagcagctgcgcccatcagctcccactgcaggcttgacaagtccaacttccagcagccctatatcaccaaccgcaccttcatgctggctaaggag

SEQ ID NO: 270096 - DNA, 120 bp, Artificial Sequence
  ENSG00000127318_2 (sequence is synthesized)
gcttggctgataacaacacagacgttcgtctcattggggagaaactgttccacggagtcagtatgagtgagcgctgctatctgatgaagcaggtgctgaacttcacccttgaagaagtgc

SEQ ID NO: 270097 - DNA, 120 bp, Artificial Sequence
  ENSG00000127318_3 (sequence is synthesized)
tgttccctcaatctgataggttccagccttatatgcaggaggtggtgcccttcctggccaggctcagcaacaggctaagcacatgtcatattgaaggtgatgacctgcatatccagagga

SEQ ID NO: 270098 - DNA, 120 bp, Artificial Sequence
  ENSG00000127318_4 (sequence is synthesized)
atgtgcaaaagctgaaggacacagtgaaaaagcttggagagagtggagagatcaaagcaattggagaactggatttgctgtttatgtctctgagaaatgcctgcatttgaccagagcaaa

SEQ ID NO: 270099 - DNA, 120 bp, Artificial Sequence
  ENSG00000127318_5 (sequence is synthesized)
tttttaaccaaaaggaagatgggaagccaaactccatcatgatgggtggattccaaatgaacccctgcgttagttacaaaggaaaccaatgccacttttgtttataagaccagaaggtag

SEQ ID NO: 270100 - DNA, 120 bp, Artificial Sequence
  ENSG00000127318_6 (sequence is synthesized)
actttctaagcatagatatttattgataacatttcattgtaactggtgttctatacacagaaaacaatttattttttaaataattgtctttttccataaaaaagattactttccattcct

SEQ ID NO: 270101 - DNA, 120 bp, Artificial Sequence
  ENSG00000127318_7 (sequence is synthesized)
ccattcctttaggggaaaaaacccctaaatagcttcatgtttccataatcagtactttatatttataaatgtatttattattattataagactgcattttatttatatcattttattaat

SEQ ID NO: 270102 - DNA, 120 bp, Artificial Sequence
  ENSG00000127318_8 (sequence is synthesized)
atttatagaaacatcattcgatattgctacttgagtgtaaggctaatattgatatttatgacaataattatagagctataacatgtttatttgacctcaataaacacttggatatcctaa

SEQ ID NO: 270103 - DNA, 120 bp, Artificial Sequence
  ENSG00000127324_0 (sequence is synthesized)
agtgccccaggagctatgacaagcaaaggaacatacttgcctggagatagcctttgcgatatttaaatgtccgtggatacagaaatctctgcaggcaagttgctccagagcatattgcag

SEQ ID NO: 270104 - DNA, 120 bp, Artificial Sequence
  ENSG00000127324_1 (sequence is synthesized)
gacaagcctgtaacgaatagttaaattcacggcatctggattcctaatccttttccgaaatggcaggtgtgagtgcctgtataaaatattctatgtttaccttcaacttcttgttctggc

SEQ ID NO: 270105 - DNA, 120 bp, Artificial Sequence
  ENSG00000127324_2 (sequence is synthesized)
tatgtggtatcttgatcctagcattagcaatatgggtacgagtaagcaatgactctcaagcaatttttggttctgaagatgtaggctctagctcctacgttgctgtggacatattgattg

SEQ ID NO: 270106 - DNA, 120 bp, Artificial Sequence
  ENSG00000127324_3 (sequence is synthesized)
ctgtaggtgccatcatcatgattctgggcttcctgggatgctgcggtgctataaaagaaagtcgctgcatgcttctgttgtttttcataggcttgcttctgatcctgctcctgcaggtgg

SEQ ID NO: 270107 - DNA, 120 bp, Artificial Sequence
  ENSG00000127324_4 (sequence is synthesized)
atgaaactctctatgaaaacacaaagcttttgagcgccacaggggaaagtgaaaaacaattccaggaagccataattgtgtttcaagaagagtttaaatgctgcggtttggtcaatggag

SEQ ID NO: 270108 - DNA, 120 bp, Artificial Sequence
  ENSG00000127324_5 (sequence is synthesized)
ctgctgattggggaaataattttcaacactatcctgaattatgtgcctgtctagataagcagagaccatgccaaagctataatggaaaacaagtttacaaagagacctgtatttctttca

SEQ ID NO: 270109 - DNA, 120 bp, Artificial Sequence
  ENSG00000127324_6 (sequence is synthesized)
taaaagacttcttggcaaaaaatttgattatagttattggaatatcatttggactggcagttattgagatactgggtttggtgttttctatggtcctgtattgccagatcgggaacaaat

SEQ ID NO: 270110 - DNA, 120 bp, Artificial Sequence
  ENSG00000127324_7 (sequence is synthesized)
gaatctgtggatgcatcaacctatcgtcagtcaaacccctttaaaatgttgctttggctttgtaaatttaaatatgtaagtgctatataagtcaggagcagctgtctttttaaaatgtct

SEQ ID NO: 270111 - DNA, 120 bp, Artificial Sequence
  ENSG00000127324_8 (sequence is synthesized)
cggctagctagaccacagatatcttctagacatattgaacacatttaagatttgagggatataagggaaaatgatatgaatgtgtatttttactcaaaataaaagtaactgtttacgttg

SEQ ID NO: 270112 - DNA, 120 bp, Artificial Sequence
  ENSG00000127324_9 (sequence is synthesized)
gctttgtagtagagatagctgttcaggaggaggaaatgtgaattctgagagcgtgatcatttaggagagatttccattcctggaacgatatcactaccacatgcacgagtgcaattgaag

SEQ ID NO: 270113 - DNA, 120 bp, Artificial Sequence
  ENSG00000127324_10 (sequence is synthesized)
ggaaacctggtggggaaacagttttaacattctttcagaaaaagaatcactacctagtggaaaatgttgtgcaagcctcttcatgtttcttccctccagaaaacaactaaacagatggaa

SEQ ID NO: 270114 - DNA, 120 bp, Artificial Sequence
  ENSG00000127324_11 (sequence is synthesized)
gaactggttcacaaacatcccaactctctcctgccaaggtccagtgggcttgttgctccagacctcatgccttctggacccagacatctctgcaatctcggaactggaatacaccacttc

SEQ ID NO: 270115 - DNA, 120 bp, Artificial Sequence
  ENSG00000127324_12 (sequence is synthesized)
ttgtcaaggtactagcaagttgactatgaactgctgggagataagaccatctgatttatccgtgtacatacagcagctagcacaccgtggatacagaaatctctgcaggcaagttgctcc

SEQ ID NO: 270116 - DNA, 120 bp, Artificial Sequence
  ENSG00000127324_13 (sequence is synthesized)
gtgtgggttaatagcctttgcgatatttaaatgtgtgggttaatttttttatccagtttaataactttttattcctccctctacttctttgctttctctttctgctctgaagccgtggat

SEQ ID NO: 270117 - DNA, 120 bp, Artificial Sequence
  ENSG00000127324_14 (sequence is synthesized)
ggaaaagctttccggaaagacaacgtggcagtacagtgctggtgtgtttgggaactgagaagccttgggtatggcaggagaccggcaaaactgtttccagtaaatgatggaagatgaatc

SEQ ID NO: 270118 - DNA, 120 bp, Artificial Sequence
  ENSG00000127324_15 (sequence is synthesized)
ttatgcaagaaaggggatcttgatataaatatcataaacaagaacagactgtacactagagaaataagagaagggggaaaatgtattttccatgtacttgtttggatttgtttgttcttt

SEQ ID NO: 270119 - DNA, 120 bp, Artificial Sequence
  ENSG00000127324_16 (sequence is synthesized)
ctttggttatttcagtaattgaaaatgagccaaggactcaaaaaagtgcacttcagaatgtgaggataaacatttcataaatgttttcatattgctgcaaaaaaaaatcacagaggaaca

SEQ ID NO: 270120 - DNA, 120 bp, Artificial Sequence
  ENSG00000127324_17 (sequence is synthesized)
caaatgccccttaattaaaggacaattttccttagttgtatatcaagcaggcctccctaatttaaggactctgtggtaaaaacatggtctgattccatccggagcccgggtcctgattcc

SEQ ID NO: 270121 - DNA, 120 bp, Artificial Sequence
  ENSG00000127324_18 (sequence is synthesized)
catagccttcgtgtgaaggccagtgaaacagcagctgagctaattcatgaggtatttgcccttctgaagttggaatctgtaatgatttaaaacatgagactggtccagtgggcttgttgc

SEQ ID NO: 270122 - DNA, 120 bp, Artificial Sequence
  ENSG00000127324_19 (sequence is synthesized)
cctcatgccttctggacccagacatctctgcaatctcggaactggaatacaccacttcttgtcaaggtactagcaagttgccgtggatacagaaatctctgcaggcaagttgctccagag

SEQ ID NO: 270123 - DNA, 120 bp, Artificial Sequence
  ENSG00000127324_20 (sequence is synthesized)
attgataactgatatctatcaatagataatggaaaaacaagctatgtggtatcttgatcctagcattagcaatatgggtacgagtaagcaatgactctcaagcaatttttggttctgaag

SEQ ID NO: 270124 - DNA, 120 bp, Artificial Sequence
  ENSG00000127325_0 (sequence is synthesized)
gacaccgggcgtgcagcaccgacctgaaggcacctcttcgggggagcccgaaatttgaagattctctttcctgtcggagactacaaaccaaataaatagaaaaaactatccaagatgact

SEQ ID NO: 270125 - DNA, 120 bp, Artificial Sequence
  ENSG00000127325_1 (sequence is synthesized)
gtcacttactccagtaaagtagcaaatgcaactttttttggatttcataggttactcctcaagtggagaggcagcatctacaaactactgtacagggaatttattgtttttgctgttctt

SEQ ID NO: 270126 - DNA, 120 bp, Artificial Sequence
  ENSG00000127325_2 (sequence is synthesized)
tatacagcaataagtttggtatacagattgttacttacaggagtccaaaaacgttactttgaaaaattatcaatttactgtgacagatatgctgaacaaattccagtaacctttgtgctt

SEQ ID NO: 270127 - DNA, 120 bp, Artificial Sequence
  ENSG00000127325_3 (sequence is synthesized)
gggttttatgttactctggtagtgaaccgatggtggaaccagtttgtgaatttgccctggccagacaggctaatgttcctcatctctagcagtgttcacggaagcgacgagcacgggcgc

SEQ ID NO: 270128 - DNA, 120 bp, Artificial Sequence
  ENSG00000127325_4 (sequence is synthesized)
ctgcttagaaggacgctgatgcgctacgtcaatctcacctccctgctcatctttcgctcggtgagcactgctgtgtacaaaagatttcccacaatggaccacgtggttgaagcaggtttt

SEQ ID NO: 270129 - DNA, 120 bp, Artificial Sequence
  ENSG00000127325_5 (sequence is synthesized)
atgacaacagatgaaaggaaattattcaaccacctcaagtctcctcatctgaaatattgggttccattcatctggtttggaaatcttgcaactaaagcccggaatgaaggtagaatcaga

SEQ ID NO: 270130 - DNA, 120 bp, Artificial Sequence
  ENSG00000127325_6 (sequence is synthesized)
gacagtgttgatctgcaatcattgatgactgaaatgaatcgataccgctcttggtgcagcctcttattcggttatgactgggttgggattccgctggtttacacccaggttgtcactctt

SEQ ID NO: 270131 - DNA, 120 bp, Artificial Sequence
  ENSG00000127325_7 (sequence is synthesized)
gctgtctataccttcttctttgcgtgcctgattggacgccagtttttggatcccaccaaaggctacgcagggcatgacttggatctttacattcccatcttcaccctcctacaattcttc

SEQ ID NO: 270132 - DNA, 120 bp, Artificial Sequence
  ENSG00000127325_8 (sequence is synthesized)
ttctatgcaggatggcttaaggtagcagagcagcttatcaacccttttggagaagatgatgatgattttgaaactaactggtgcattgacagaaatttgcaggtctctcttttagctgtg

SEQ ID NO: 270133 - DNA, 120 bp, Artificial Sequence
  ENSG00000127325_9 (sequence is synthesized)
gacgaaatgcacatgagcttacccaagatgaagaaggacatttactgggacgattctgctgctcgcccaccatacacattggcagctgctgactactgcataccctcatttctggggtca

SEQ ID NO: 270134 - DNA, 120 bp, Artificial Sequence
  ENSG00000127325_10 (sequence is synthesized)
acagtccagatggggctgtctgggtccgactttcctgacgaggagtggctgtgggattatgagaagcatggccatcggcattccatgataagaagagtcaagcggttcctgagtgcccac

SEQ ID NO: 270135 - DNA, 120 bp, Artificial Sequence
  ENSG00000127325_11 (sequence is synthesized)
gaacacccctccagccccagaagaagaagctacaggaggcagacaagtgacagctccatgttcttaccccgagatgacctcagcccagccagggacctactggatgtgccctcaagaaac

SEQ ID NO: 270136 - DNA, 120 bp, Artificial Sequence
  ENSG00000127325_12 (sequence is synthesized)
ccccccagggcctcacccacctggaagaaatcctgcttcccagaaggaagccccacgctgcacttcagcatgggagagctgtccaccatcagggagaccagccagacaagcactttacag

SEQ ID NO: 270137 - DNA, 120 bp, Artificial Sequence
  ENSG00000127325_13 (sequence is synthesized)
agcctgaccccacagtccagtgtgagaacttcccccatcaaaatgccactggtacctgaggtattgatcacagcagccgaagcaccagtgcccacatcagggggctaccaccatgattcc

SEQ ID NO: 270138 - DNA, 120 bp, Artificial Sequence
  ENSG00000127325_14 (sequence is synthesized)
gcagggccccatgggatccatcctgtctccctcagagaaggagacacctcctggaggccccagtccccagacagtttcagccagcgctgaggaaaatatattcaactgtgaagaagaccc

SEQ ID NO: 270139 - DNA, 120 bp, Artificial Sequence
  ENSG00000127325_15 (sequence is synthesized)
tggtgatacctttctaaaaaggtggagtcttccgggattcctggggtccagccacacttccctgggaaacctaagtccagaccccatgagctctcagccagctcttttaattgacacaga

SEQ ID NO: 270140 - DNA, 120 bp, Artificial Sequence
  ENSG00000127325_16 (sequence is synthesized)
aacatcctcagagatcagtgggatcaacattgtggctggctctcgagtctcttctgatatgctgtatttaatggaaaacctggacaccaaggaaacagatatcatagagctgaacaagga

SEQ ID NO: 270141 - DNA, 120 bp, Artificial Sequence
  ENSG00000127325_17 (sequence is synthesized)
aactgaggaatcacccaaatgagtgccaccaagttctaggacctggttctagcctagattcttacctccccaaaagcagcatattaggcccaggacatacctgaaggctggtcgactttt

SEQ ID NO: 270142 - DNA, 120 bp, Artificial Sequence
  ENSG00000127325_18 (sequence is synthesized)
taaaaaacatgatcacactgtataagctacttagaactttgaagggcattatgatcctgactttttgagagctgcgaaaaatcaaacgcattcacgtcatccaacacaacatggctttca

SEQ ID NO: 270143 - DNA, 120 bp, Artificial Sequence
  ENSG00000127325_19 (sequence is synthesized)
tcagaagttacacagaccacagtgatttagccaaataagtcttaaccaaaaaaaggaatctgaaaaacatacatgacttataaattcatagattattagttgtggaaagagtctcataga

SEQ ID NO: 270144 - DNA, 120 bp, Artificial Sequence
  ENSG00000127325_20 (sequence is synthesized)
tcatagtccaatcccctagacccaaaggcccagacacgcagggttctctatttctcttcttttttctctttctttttttctttagccataaagaaaggagatggatcacctaatgcctga

SEQ ID NO: 270145 - DNA, 120 bp, Artificial Sequence
  ENSG00000127325_21 (sequence is synthesized)
aagatcccctccttcctaacgtttttgtttgaggctttctaaccatctcattcctacttttataactattattgttattatcacttcctgattcttaagcttcatcagcaccagaacact

SEQ ID NO: 270146 - DNA, 120 bp, Artificial Sequence
  ENSG00000127325_22 (sequence is synthesized)
taattctcttcaatttccttttttacttttctctcttttccttttattctgtcatcctttttttcccttcccttctccctggttgtgctgcttttctagtaatctgtcccatttttcagg

SEQ ID NO: 270147 - DNA, 120 bp, Artificial Sequence
  ENSG00000127325_23 (sequence is synthesized)
ttataatatttcctcttgccaaatctgttgcttatgtcttgccatgaatttcaaaatataagacattggcaaagcctcctacagaatcatcaaaggtgtcaacaaatccagcctgatacc

SEQ ID NO: 270148 - DNA, 120 bp, Artificial Sequence
  ENSG00000127325_24 (sequence is synthesized)
cttccagtctcacttccagtggaaggcatataggagtgatggttccccccgtgcccttgcagccattgacatttctttctgcttccactatttggtgttgggcactggagaaaaacgaag

SEQ ID NO: 270149 - DNA, 120 bp, Artificial Sequence
  ENSG00000127325_25 (sequence is synthesized)
ccaagagaatatgaaatttgcatagccaaatgctatggaaccaaagaataagatgactcacatctgtttaacttgaactcttatgcaaaaatcctaatcgtgtcgcaacacgggaccagt

SEQ ID NO: 270150 - DNA, 120 bp, Artificial Sequence
  ENSG00000127325_26 (sequence is synthesized)
tactgtgtctatcgggtcatttgggaatgggcaggatactggagctgggaggctaatggggtccagagctgcataatggggatcggatgttggtactcctcccagggagctctcaggaca

SEQ ID NO: 270151 - DNA, 120 bp, Artificial Sequence
  ENSG00000127325_27 (sequence is synthesized)
gctgtttgtcgtgggctcccaagtgcctaggccatgccttacgactgctgcacttaccatttgtcatatgatggcacttgactacatatggctttagaaataaaataaccctcaaaacta

SEQ ID NO: 270152 - DNA, 120 bp, Artificial Sequence
  ENSG00000127325_28 (sequence is synthesized)
gatggggaaacagatgcctaagaatgagtggaagatggaagatataaaaatcccactccctcagcctcaattccagtgtgctaagagtgatcctggtggttaaaggtacaacactcgaat

SEQ ID NO: 270153 - DNA, 120 bp, Artificial Sequence
  ENSG00000127325_29 (sequence is synthesized)
ctttcaaaacaacttggctcctaaacacaagccaacaatctcatctgctgctcaactgaaaaacattctccactttttagcatccaggcatgtggagttcctaagaaatgcactttatta

SEQ ID NO: 270154 - DNA, 120 bp, Artificial Sequence
  ENSG00000127325_30 (sequence is synthesized)
agggcccacccttcacatatggtattactcactcaagggtttaaactggggcattccagaagtaccagtttccatgatgaaaagtggaacagcagaagcgcttaaagcaattttactgaa

SEQ ID NO: 270155 - DNA, 120 bp, Artificial Sequence
  ENSG00000127325_31 (sequence is synthesized)
atcagcagctgttgcttctgtttgttcccagctataactgtcatcagtggctaaactggcataaacaggcctctacaagtggaaaaacatttaacccctgttcttgtcacactctgggtc

SEQ ID NO: 270156 - DNA, 120 bp, Artificial Sequence
  ENSG00000127325_32 (sequence is synthesized)
gaaaggcaaaagacatctgcctcaacttcaatcaaggaaaaatagagcaactgtacagcaggcagaatctctatgatgactggaattttgtctatcaatggatgtaattaatcctttggc

SEQ ID NO: 270157 - DNA, 120 bp, Artificial Sequence
  ENSG00000127325_33 (sequence is synthesized)
tcgagggcaataaaattttgtcttaaagtagcagatcctgctccatcaaaccacaactcaattgggagtaaatgcaaacatgtatctatattgagagatagattttactctgattagaaa

SEQ ID NO: 270158 - DNA, 120 bp, Artificial Sequence
  ENSG00000127325_34 (sequence is synthesized)
gcaagagaaactgtaggcagatgcaacggcaggataaaatagctatgccaggggtgtgatggggcctgaggagagcatggcatggagacagacacgtgcagggaaccaagtggtgggagg

SEQ ID NO: 270159 - DNA, 120 bp, Artificial Sequence
  ENSG00000127325_35 (sequence is synthesized)
acaagcccactcagagtgttgccgaactgtagcaaatcagtaactataattagcacagcctcagcaatgacaataatgatcatattctgaaaaaaatattggtctctgcttaaaatggct

SEQ ID NO: 270160 - DNA, 120 bp, Artificial Sequence
  ENSG00000127325_36 (sequence is synthesized)
tgaagtcctgatgagggtgacattccatttcataacaaatacttttggaatggacttgaccaacaacctagagattttctttcagttgaccgactttgatttccaaaggtggagttactt

SEQ ID NO: 270161 - DNA, 87 bp, Artificial Sequence
  ENSG00000127325_37 (sequence is synthesized)
acccgtgacacagcctcaggtggtcctgatgacgtgtgcccaaagcggtcagaacagtttggttttatgcattgtaggaagacatga

SEQ ID NO: 270162 - DNA, 120 bp, Artificial Sequence
  ENSG00000127325_38 (sequence is synthesized)
gtcagaacagtttggttttatgcattgtaggaagacatgagacatcgatcaacatatgtaagataaacattggttcagtctggaaaagccagagatgactcaaagtggggagggggcttc

SEQ ID NO: 270163 - DNA, 120 bp, Artificial Sequence
  ENSG00000127325_39 (sequence is synthesized)
aaagccagagatgactcaaagtggggagggggcttccgggtcataggtaggtaagagacaaatggttgcattcttctgggtttctgattagtctctccaaaggaggcaatcagatatgca

SEQ ID NO: 270164 - DNA, 120 bp, Artificial Sequence
  ENSG00000127325_40 (sequence is synthesized)
acttttccctttagcttagtgattttggggacccaagatattttcctttcacactttggataagtaagatgtgtgaccctgcaaggaataacaaaaattattctgcttatatattcttag

SEQ ID NO: 270165 - DNA, 120 bp, Artificial Sequence
  ENSG00000127325_41 (sequence is synthesized)
ggaataacaaaaattattctgcttatatattcttagaggatacattaatgtctcagtgattgtcattcatctttcacagcacccagcaaaatactcaataaatttgtgctaaaaacaaaa

SEQ ID NO: 270166 - DNA, 120 bp, Artificial Sequence
  ENSG00000127325_42 (sequence is synthesized)
tttctggtgtgagccaccacacctggcctgccctggaatcttaatgtaaagattcttgactgtcttctatgactacagggagcctgatgagactccactggaattttcagtgacacttat

SEQ ID NO: 270167 - DNA, 120 bp, Artificial Sequence
  ENSG00000127325_43 (sequence is synthesized)
aggcacaaatgacattttttttctggaaggcaaaatcagaagatatggataataatatatttttgtcctccaacctctaaaaaggctaaaattcagctaaaagcatcagtgtcaccaacg

SEQ ID NO: 270168 - DNA, 120 bp, Artificial Sequence
  ENSG00000127325_44 (sequence is synthesized)
cctccgccactctctgactgtcctttgcctgtgccaaggtttctgggaagaacaggaagttcagggatggcggaaaatgtttggcagattccctgagtccaaagccggagcacctgctcc

SEQ ID NO: 270169 - DNA, 120 bp, Artificial Sequence
  ENSG00000127325_45 (sequence is synthesized)
tttgtggcacttctcttccaaaggggcctctgaggctgaaaacctttccagacccaaagaaaaggaagactgaaagtggaatttcagtagttccagcaaataatgagaacgatttaggag

SEQ ID NO: 270170 - DNA, 120 bp, Artificial Sequence
  ENSG00000127325_46 (sequence is synthesized)
ccaggagatttgccttgttgcccgcaaagcacatcttagagaaggttgcctactccaggctagatttgcttctgcttctagctagccttctaagaccagacccacccacccagggctcct

SEQ ID NO: 270171 - DNA, 120 bp, Artificial Sequence
  ENSG00000127325_47 (sequence is synthesized)
tccaggccagagagctcatccctgccctcagtgtattctcagtttccatggataggaatctcttgttgtatgcatgtctcagccttcatgataccttctgcaggggcagagcttcatgga

SEQ ID NO: 270172 - DNA, 120 bp, Artificial Sequence
  ENSG00000127325_48 (sequence is synthesized)
catccagcaatcatctcaattttcagaattaataagagctgttcttctgtgagtttgattttagataattaaatatgctttatccttttcctcactctcaccattgattaatgcaaagta

SEQ ID NO: 270173 - DNA, 120 bp, Artificial Sequence
  ENSG00000127325_49 (sequence is synthesized)
cttgacgatttaacttgaaaagaaaagagaccagcaatactgatagaatcagagcatcattgtgataactctatttagactgcaaatgctccaaacactctatttcttatgtccattgag

SEQ ID NO: 270174 - DNA, 120 bp, Artificial Sequence
  ENSG00000127325_50 (sequence is synthesized)
ttgttgttaccccatggttaagataattttttgaaggtctcaaaatttttatcctgacctacttatttatcctaatcatcataattctgcagattactacataaatgttcatgttcttta

SEQ ID NO: 270175 - DNA, 120 bp, Artificial Sequence
  ENSG00000127325_51 (sequence is synthesized)
gcaaatattaaaacacatttctcttgtttctaaatacagaaacagaaatagggattgacaagatctcagagaaaattccttccccaaaagatcattgggaagattagatgagattgtaaa

SEQ ID NO: 270176 - DNA, 80 bp, Artificial Sequence
  ENSG00000127328_0 (sequence is synthesized)
cagggccgtgacacctgcgacgagccccgcctggcgccagggggcgcggaagcgcgtccgcccccaggccccatgccggg

SEQ ID NO: 270177 - DNA, 120 bp, Artificial Sequence
  ENSG00000127328_1 (sequence is synthesized)
ccggctcccggcccccggccccgcttccggcgcaggcgcagtcccgcgttccctcggcggctgccggcgtagtgagcccgccgccgtggagtgtagcggaaagggctcgccgtcctcctc

SEQ ID NO: 270178 - DNA, 120 bp, Artificial Sequence
  ENSG00000127328_2 (sequence is synthesized)
gtagcggaaagggctcgccgtcctcctccgtttctcgctgcttcgggacgcgctctctgcggctctgtgagcgcccctgagcgccggcagcggccgcggtgggttcttcaggttatctta

SEQ ID NO: 270179 - DNA, 120 bp, Artificial Sequence
  ENSG00000127328_3 (sequence is synthesized)
tgatgaggcttttgctatggctaatgatcccttggaaggcttccatgaagtaaaccttgcttcacctacttctccggaccttcttggtgtgtatgaatcaggaactcaagagcagactac

SEQ ID NO: 270180 - DNA, 120 bp, Artificial Sequence
  ENSG00000127328_4 (sequence is synthesized)
ctcaccaagtgtcatctaccggccacacccttcagctttatcctctgtacctatccaggcaaatgcattagatgtttctgaacttcctacacaacccgtgtattcatcccccagacgttt

SEQ ID NO: 270181 - DNA, 120 bp, Artificial Sequence
  ENSG00000127328_5 (sequence is synthesized)
aaattgtgcggaaatatctagtatcagctttcatgttacagacccagccccttgctctacctctggagtcacagctggattaactaaattaactacaagaaaggacaactataatgcaga

SEQ ID NO: 270182 - DNA, 120 bp, Artificial Sequence
  ENSG00000127328_6 (sequence is synthesized)
gagagagtttttacagggtgctactataacagaggcttgcgatggcagtgatgatatttttgggttgagtactgatagtctgtctcgtttacgaagcccatctgttttggaagttagaga

SEQ ID NO: 270183 - DNA, 120 bp, Artificial Sequence
  ENSG00000127328_7 (sequence is synthesized)
aaagggctatgaacgattaaaagaagaactcgcaaaagctcagagggaactgaagttaaaagatgaagaatgtgagaggctttcaaaagtgcgagatcaacttggacaggaattggaaga

SEQ ID NO: 270184 - DNA, 120 bp, Artificial Sequence
  ENSG00000127328_8 (sequence is synthesized)
actcacagctagtctatttgaggaagctcataaaatggtgagagaagcaaatatcaagcaggcaacagcagaaaaacagctaaaagaagcacaaggaaaaattgatgtacttcaagctga

SEQ ID NO: 270185 - DNA, 120 bp, Artificial Sequence
  ENSG00000127328_9 (sequence is synthesized)
agtagctgcattgaagacacttgtattgtccagttctccaacatcacctacgcaggagcctttgccaggtggaaagacaccttttaaaaaggggcatacaagaaataaaagcacaagcag

SEQ ID NO: 270186 - DNA, 120 bp, Artificial Sequence
  ENSG00000127328_10 (sequence is synthesized)
tgctatgagtggcagtcatcaggacctcagtgtgatacagccaattgtaaaagactgcaaagaggctgacttatccttgtataatgaattccgattgtggaaggatgagcccacaatgga

SEQ ID NO: 270187 - DNA, 120 bp, Artificial Sequence
  ENSG00000127328_11 (sequence is synthesized)
caggacgtgtcctttcttagacaaaatctaccaggaagatatctttccatgtttaacattctcaaaaagtgagttggcttcagctgttctggaggctgtggaaaacaatactctaagcat

SEQ ID NO: 270188 - DNA, 120 bp, Artificial Sequence
  ENSG00000127328_12 (sequence is synthesized)
tgaaccagtgggattacaacctatccggtttgtgaaagcttctgcagttgaatgcggaggaccaaaaaaatgtgctctcactggccagagtaagtcctgtaaacacagaattaaattagg

SEQ ID NO: 270189 - DNA, 120 bp, Artificial Sequence
  ENSG00000127328_13 (sequence is synthesized)
ggactcaagcaactattattatatttctcctttttgcagatacaggatcacttctgtatgtaacttttttacatacattcgatacattcagcagggactcgtgaaacagcaggatgttga

SEQ ID NO: 270190 - DNA, 120 bp, Artificial Sequence
  ENSG00000127328_14 (sequence is synthesized)
tcagatgttttgggaggttatgcagttgagaaaagagatgtcattggcaaagctgggttatttcaaagaggaactctgatgctctgcgtgggaccatgcctgaactccccgaataactga

SEQ ID NO: 270191 - DNA, 120 bp, Artificial Sequence
  ENSG00000127328_15 (sequence is synthesized)
agtaccatgatttcttttaaactgatctatgctgtgtttgcttattctttagttgaacacactatgaagaattccaggtgtactagtgaatgtaatttatagttgccaaaaaaaaaaaaa

SEQ ID NO: 270192 - DNA, 120 bp, Artificial Sequence
  ENSG00000127328_16 (sequence is synthesized)
acctgaaataaataaatgttagattgaatgtgtgtacattttctcttctagctctgacatggcatttagggttagcagaatgtattaaatagtaattttcaaactacacagtagcttcct

SEQ ID NO: 270193 - DNA, 120 bp, Artificial Sequence
  ENSG00000127328_17 (sequence is synthesized)
tccttgtgagaggcaagaaagaagtctgagtggatagtactcactttccaaggcccccacctctagaatggctttatttttatctgttttctatattgggtttcaaaaaagattttattt

SEQ ID NO: 270194 - DNA, 120 bp, Artificial Sequence
  ENSG00000127328_18 (sequence is synthesized)
gaagaaatacttctgctgctacaaagtttgaaagttactattttaattattctgctctctgtaactgaaagaatccctttattttggttattcattaaaatataatagaaggcagtcaga

SEQ ID NO: 270195 - DNA, 120 bp, Artificial Sequence
  ENSG00000127328_19 (sequence is synthesized)
ttttatcccagagatgtattcctgagtgtcttgatatagtgtattcatgttttatatgtgttgaccactatattgtcattggagggacatagatgtaaatgagtttgacgtgtgtcaaag

SEQ ID NO: 270196 - DNA, 120 bp, Artificial Sequence
  ENSG00000127328_20 (sequence is synthesized)
gggtttaaaggggtgtggattgaatgaatggtacgtgcgaagtatatgctgattatagaaccacttgatctctgcattccaaattgtaaaactgactcaactggagaaattataacaaag

SEQ ID NO: 270197 - DNA, 120 bp, Artificial Sequence
  ENSG00000127328_21 (sequence is synthesized)
aggtttgtggtagacatgtaataagtatagaaaagcaaaaagaaaagagaaactgctttagtttctgtttagagaaagctgctgttaatatttttggatagtagcctttcagctttcaga

SEQ ID NO: 270198 - DNA, 120 bp, Artificial Sequence
  ENSG00000127328_22 (sequence is synthesized)
tattttctacttacatatgcatatttttgaaacaaaaagtaggctttttttttgctttttaaacctaaacattaaatatattttcccttgggtaaacctacacatcctaatccctgttta

SEQ ID NO: 270199 - DNA, 120 bp, Artificial Sequence
  ENSG00000127328_23 (sequence is synthesized)
tagaattttaacataatttaattgtgtttggagatgaggtggttttcagtttatttttcatattataatgctgtgacgagtatccttatctgtacacttctgaacattgtggagttcttt

SEQ ID NO: 270200 - DNA, 120 bp, Artificial Sequence
  ENSG00000127328_24 (sequence is synthesized)
catgtggatgcctggagataaaattgtgtcgagatatatatgtatttttaaatgtttgatctgcattgctagattgccatccagaaaagttaatcaatttgtattcacagcagcagtgta

SEQ ID NO: 270201 - DNA, 120 bp, Artificial Sequence
  ENSG00000127328_25 (sequence is synthesized)
caagagggctggttttctgaagataacatttttttcagtcctgttcagaggtttggtcaatcttacctgtagatgacttcagccaccaggctggatgggagcccacagacaaaaggacat

SEQ ID NO: 270202 - DNA, 120 bp, Artificial Sequence
  ENSG00000127328_26 (sequence is synthesized)
tggtgtatgttatggtgaaaaccatcagtaccatgcctagctcaagaatgtgaaattgaacctgaaaaaaactttgaacctacaattttatgttctgaaaatagttattctaatgtgagg

SEQ ID NO: 270203 - DNA, 120 bp, Artificial Sequence
  ENSG00000127328_27 (sequence is synthesized)
gcattaataagaatatgtaccatcaaagcttcagaagattttccgtacaaactaaaatcacttttggagaaagtacctaaataaaaagagaaacaaatccaggagatactgtacggtttg

SEQ ID NO: 270204 - DNA, 120 bp, Artificial Sequence
  ENSG00000127328_28 (sequence is synthesized)
aaagaaaggtaatcaaatactcagaaaaagtttgttgatgacttaaaaaggataaataaaaagtaagactaaagaaaatcagtatacccattaataataaatctttagtaatctataagg

SEQ ID NO: 270205 - DNA, 120 bp, Artificial Sequence
  ENSG00000127328_29 (sequence is synthesized)
ggaagaatgcttttcaaccttatacactagaagcatgctctttaaaattaatgcaacaggatgacgacttgatgtagaaactatatgtggaattatagattaaaatgtgattgaaacata

SEQ ID NO: 270206 - DNA, 120 bp, Artificial Sequence
  ENSG00000127328_30 (sequence is synthesized)
ggttacctggcggcgggcgggcgcggccgggagcggagggccgcggtcgcgaagaggatgaagagagagttcccgaacaagtcggaagcagctcacaacaccggacgccgcgcggcaggg

SEQ ID NO: 270207 - DNA, 120 bp, Artificial Sequence
  ENSG00000127328_31 (sequence is synthesized)
ctgtggacctggggtggtttcgtgtcccagtcttaggaaactacgcgcgaggcaccgtgctgaggcgtagaggtcaccctcgggaggtttcggtgaaacctggtgggaaattccgggcag

SEQ ID NO: 270208 - DNA, 120 bp, Artificial Sequence
  ENSG00000127328_32 (sequence is synthesized)
gcgcccggagtcgcgcccaagtaggcagctccgtgccgccagacttgtgttcgggggagttgagacgaactgcacgggtgggattgcatggctctgccctcccagcgttgacaactcgcc

SEQ ID NO: 270209 - DNA, 120 bp, Artificial Sequence
  ENSG00000127328_33 (sequence is synthesized)
aatggaataaccaatgttaacctgttttaattgaattgcattttgacgaattatcaataaaaatgatgctggctgacttatccttgtataatgaattccgattgtggaaggatgagccca

SEQ ID NO: 270210 - DNA, 120 bp, Artificial Sequence
  ENSG00000127328_34 (sequence is synthesized)
aggttatcttatgatgaggcttttgctatggctaatgatcccttggaaggcttccatgaagtaaaccttgcttcacctacttctccggaccttcttggcaaatgcattagatgtttctga

SEQ ID NO: 270211 - DNA, 120 bp, Artificial Sequence
  ENSG00000127328_35 (sequence is synthesized)
aaatatttgcttagcttcatgtatatttataagtcctctaagcaaaagagaaatctttaagcaatgtagagtttacaacttaagatgatgtgaaaagaaataaaaaacatctatgggcca

SEQ ID NO: 270212 - DNA, 120 bp, Artificial Sequence
  ENSG00000127328_36 (sequence is synthesized)
agccatagggtaacagatggctcattacttattcagcagtcattgaatgtgtgctgtgtgccaggcatttaaagatgaatcaaagtccctgccctcaagaggttgatagcctaatcccag

SEQ ID NO: 270213 - DNA, 120 bp, Artificial Sequence
  ENSG00000127328_37 (sequence is synthesized)
ccagaaagccctcatataaaattttagcttttgtcatatgcaaatagaaaggatcatgtgaaattcagtgaacttgttacatgattgttaagattcagtatttttataaggtggcttatt

SEQ ID NO: 270214 - DNA, 120 bp, Artificial Sequence
  ENSG00000127328_38 (sequence is synthesized)
cctttgtacttctccctaggtcccacattaaatgcatatagagcaaccaaccaaccaaataaacaaataccccatctggaaactattaccctgcaagctatcaataacatgctttgagac

SEQ ID NO: 270215 - DNA, 120 bp, Artificial Sequence
  ENSG00000127328_39 (sequence is synthesized)
ttgaacagtcatcatgaggatattttcagctgagaagctgaaatcctgatggaaagctgagagctgtcctgcagctgattactgatttgtaaatttgttccaagatgggacatacatgga

SEQ ID NO: 270216 - DNA, 120 bp, Artificial Sequence
  ENSG00000127328_40 (sequence is synthesized)
aaacacctagtttctgtttctagaatcatggttaatgttatggcattaaacttatactactaatagaatgtaagtctcacaagggcagagactttgtccttttcatcactttagcccagc

SEQ ID NO: 270217 - DNA, 120 bp, Artificial Sequence
  ENSG00000127328_41 (sequence is synthesized)
atctagaacggtgcctggtacacagtaggttctcaaatatttgttatctaactgaatgaataggcaacttgtacagaaggtaggggcaaatgcttttcatttcaaaaaactgaaatttat

SEQ ID NO: 270218 - DNA, 120 bp, Artificial Sequence
  ENSG00000127328_42 (sequence is synthesized)
acttaaccatgaattttaataaagcttgctttgatatgggacatttgaccattcatgacattttctccatttggcctagatcacttctgtatgtaacttttttacatacattcgatacat

SEQ ID NO: 270219 - DNA, 71 bp, Artificial Sequence
  ENSG00000127328_43 (sequence is synthesized)
atgggagtgacccgattttccaggaactgaagttaaaagatgaagaatgtgagaggctttcaaaagtgcga

SEQ ID NO: 270220 - DNA, 120 bp, Artificial Sequence
  ENSG00000127328_44 (sequence is synthesized)
cctgatcctactccctttaggaagaacttcttaaactggaagcaggaaaaaaaaaaaccataaaagataaccataaaagaatataagttatggtatattataaattcttaatttagaaat

SEQ ID NO: 270221 - DNA, 84 bp, Artificial Sequence
  ENSG00000127328_45 (sequence is synthesized)
tacttgagctgcttgagcccaggagtttgagacgggcctgggaaaaatagggaaactccatttacacacacacacacacacaca

SEQ ID NO: 270222 - DNA, 89 bp, Artificial Sequence
  ENSG00000127328_46 (sequence is synthesized)
cacacacactgtgtccatgaacttgggaggatcaagtccaacttgggcaacatagggagaccttgtctctaaaaaaaaaactaaagcta

SEQ ID NO: 270223 - DNA, 120 bp, Artificial Sequence
  ENSG00000127328_47 (sequence is synthesized)
acatagggagaccttgtctctaaaaaaaaaactaaagctaaactacaaactgtgaggcaatatctgcaacatttataactagtaatagcttagtatcaagaatgtatgcagaaattctac

SEQ ID NO: 270224 - DNA, 120 bp, Artificial Sequence
  ENSG00000127328_48 (sequence is synthesized)
aaaccaacaaaaaaggacagtgtcacagaaaaacaggcaaaagactgaaccaggccttccacacaattagaagtgcatgtgggccaataaacattaagaggttttcatctctcaatcagg

SEQ ID NO: 270225 - DNA, 120 bp, Artificial Sequence
  ENSG00000127328_49 (sequence is synthesized)
aaaacgtaaatcaagatgacaatgacatgttcaaattcattcgattggtgaaaatgaagaaacacaaagtcaagttttggagagggttttagtcattaggatcactcacatattgctgat

SEQ ID NO: 270226 - DNA, 120 bp, Artificial Sequence
  ENSG00000127328_50 (sequence is synthesized)
catattgctgatgggggtatcaattggtatatccactgtgaaaaaccattcactagaaaagttgggccaggcccagtggctcatgcctcttggctttgggaggccaaggtaggaggatca

SEQ ID NO: 270227 - DNA, 70 bp, Artificial Sequence
  ENSG00000127328_51 (sequence is synthesized)
cttgagcccaagagttcaagaccagcttgagcaacatagggagaccacatctgcacaaaaagattttttt

SEQ ID NO: 270228 - DNA, 120 bp, Artificial Sequence
  ENSG00000127328_52 (sequence is synthesized)
tgccactgcactcttaccttgggtgacagagtaagatcataccttaaaaaaaaaaaaaaagtatacccatgggtcagcaatttcacttttcagtatatacttgagaaatgcttgcacagg

SEQ ID NO: 270229 - DNA, 120 bp, Artificial Sequence
  ENSG00000127328_53 (sequence is synthesized)
tcccccagatcacacatataagaatgttctggaataaattaaaatgtctatttttaggaaggtgtaatgtgttcacagaatgggtgattattacatggcagcaaaatgaatgaataccag

SEQ ID NO: 270230 - DNA, 120 bp, Artificial Sequence
  ENSG00000127328_54 (sequence is synthesized)
ctacttgcagcacaataactcagaatgaaaaagcaattctgagaaaactatatgtgacatgatacttttcttataaaagtcaagaacaactaaaactgaacagctgtttaggcattgaca

SEQ ID NO: 270231 - DNA, 120 bp, Artificial Sequence
  ENSG00000127328_55 (sequence is synthesized)
tatgtgacaaaacttttaaaaagtaataaagttcaagatagtggttacctctggagaggtagaggaggagcaaatctatgagtaagtcactggtaatgttttagtccctgggttaggtgg

SEQ ID NO: 270232 - DNA, 120 bp, Artificial Sequence
  ENSG00000127328_56 (sequence is synthesized)
tgggttttggggtggttcatttgtcattaaaagtaagtacatgagctgggtgtagtggtgcgtgcttatagtcccagctacttgggagtctgagataggaagatccttgaggccagttca

SEQ ID NO: 270233 - DNA, 120 bp, Artificial Sequence
  ENSG00000127328_57 (sequence is synthesized)
aggctatagtgtgctatgatttcacctgtgaatagctactatattccaacctgggcaacgtagaccttgcccccctttaaaaaaattcaaaaacaaaataaatgcatggacaaatgaata

SEQ ID NO: 270234 - DNA, 120 bp, Artificial Sequence
  ENSG00000127328_58 (sequence is synthesized)
agagagttatgcatggaacatcggtggtgtattatgaatcaagcattattactagctcagttatatgtgccttcattccaaaacaaaaaataaaaggtaagaaaattgttgaattgcatt

SEQ ID NO: 270235 - DNA, 120 bp, Artificial Sequence
  ENSG00000127328_59 (sequence is synthesized)
tgagagagaggaaaggaaagaattcaggtctgaatcttaggcttttggcttgagctattgcagtttattgagatggggaaatacatggtggggaaagtttgggtatgtgcataacagaga

SEQ ID NO: 270236 - DNA, 120 bp, Artificial Sequence
  ENSG00000127328_60 (sequence is synthesized)
cagaaattcagtgtttgacagatcaagtgtgaggtgcccactgagcatcaaagtggatatgttaagcaggtattggatgtacaaatctaaattcagtaaggtcagtccaggagaaaattt

SEQ ID NO: 270237 - DNA, 120 bp, Artificial Sequence
  ENSG00000127328_61 (sequence is synthesized)
ggggagtagttagccatgggatcagatgggcgctttagggacactttggagatgaagtacagcactgagccctgagttcctgtgacagagaagcagcctgcaaagacgaaaggaggagct

SEQ ID NO: 270238 - DNA, 120 bp, Artificial Sequence
  ENSG00000127328_62 (sequence is synthesized)
gttaggaagagcaaggcaacagaaaaggaagaaccagcatgctgattatgttcaggagagtgtttctacgctgaatttaattgccaagattaccaattctaaagaagaggaggactcttg

SEQ ID NO: 270239 - DNA, 120 bp, Artificial Sequence
  ENSG00000127328_63 (sequence is synthesized)
gacaagtttttagaagttggtttggagctggggtgagagcctggcctaatggagacagctctggattgggagtcacttagacctacattctggtctaggtttggctcccaaaaactggga

SEQ ID NO: 270240 - DNA, 120 bp, Artificial Sequence
  ENSG00000127328_64 (sequence is synthesized)
aggttagttaggtggccactcctctctcttcatggtctctctcagcttgaagacaatttacagtctttgactaagcatccacactggaagaacaagatttggtttctgaacattgggtct

SEQ ID NO: 270241 - DNA, 120 bp, Artificial Sequence
  ENSG00000127328_65 (sequence is synthesized)
tagtccttaaaataacttgcaacctgttacgtcttcacttactcccatcgccaccacaagaatcctgtgtgtttttgttttgtgcatccagtctaaaacgggtctgcttttattcatagg

SEQ ID NO: 270242 - DNA, 120 bp, Artificial Sequence
  ENSG00000127328_66 (sequence is synthesized)
cttttgttttcagtggtttttgttgttgcatttttccctagataaaatgttttttctataagacactgcttaaaagagtccaatgcagtatgaatttgtatttgtgtttaacttttgtgc

SEQ ID NO: 270243 - DNA, 120 bp, Artificial Sequence
  ENSG00000127328_67 (sequence is synthesized)
ttaacagatctgccatggctgaactctcagttgcttaagcaaaattctggggcttattctaggttcctttatttgtcattgtcactcccattccagttatcagcaaattccatcagctgt

SEQ ID NO: 270244 - DNA, 120 bp, Artificial Sequence
  ENSG00000127328_68 (sequence is synthesized)
ctccgagacatcttaaatctgtctacctccctccatgtccactgctaccactctgcccaagctattatcatctttcacctgaactcctgcactaatgtctgctgtccttgcatccactcc

SEQ ID NO: 270245 - DNA, 120 bp, Artificial Sequence
  ENSG00000127328_69 (sequence is synthesized)
tgccctcctacaatcactgacggcagccgcagggatctttataaaacgaaaatcagataatgtcacttccctgcttaaagccctttgagtggcttcccattgcacttagaaaaaaaaaaa

SEQ ID NO: 270246 - DNA, 66 bp, Artificial Sequence
  ENSG00000127328_70 (sequence is synthesized)
acgctcgaacccaggaggcagaggttgtggtgagttgacatcacgccattgcactccagcctgggc

SEQ ID NO: 270247 - DNA, 120 bp, Artificial Sequence
  ENSG00000127328_71 (sequence is synthesized)
tgaaactccgtctgaaaaaaaaaaaaaaaaacccaaactcaatagaaaatcaagttttcatagtggtagttgttaacagagaaataacaatgaaagctttaaaaaactccatgaaaattt

SEQ ID NO: 270248 - DNA, 120 bp, Artificial Sequence
  ENSG00000127328_72 (sequence is synthesized)
gaaataacaatgaaagctttaaaaaactccatgaaaatttgcaaaacttaaaaaaaaaatgtagaagaggactaaacttgataaaatattaaaagaattgaaacccttcctaaaggcagc

SEQ ID NO: 270249 - DNA, 120 bp, Artificial Sequence
  ENSG00000127328_73 (sequence is synthesized)
ttctcaagggagcacaagttcacacacagtttacttttggaggaacgtctgaggtcatgaggactagattctagagctacaggtctcagggacagtctcgagggatacagggcccccatc

SEQ ID NO: 270250 - DNA, 120 bp, Artificial Sequence
  ENSG00000127328_74 (sequence is synthesized)
accacatccccagatttaaccgcagcagctcagcttttatctgtatctgttggagctctctaggaaatgtcaataccaaagcaaacccaaatcacaactagattagattactattcaaga

SEQ ID NO: 270251 - DNA, 120 bp, Artificial Sequence
  ENSG00000127328_75 (sequence is synthesized)
gaatgattctctaccgaaactctgcaaaatggggatatcaagagagttggaaaatgtaagacgtaaagaccataatcaggaaaatacgcatcatatttgttattcactgagagggaggaa

SEQ ID NO: 270252 - DNA, 120 bp, Artificial Sequence
  ENSG00000127328_76 (sequence is synthesized)
tttccacttaaatcctatttccagcagctggattgtgctctcagtggagtgctctggattctgattaatagagattttctagtcctcccagcaacttccttctcaattctcttcactttc

SEQ ID NO: 270253 - DNA, 120 bp, Artificial Sequence
  ENSG00000127328_77 (sequence is synthesized)
cgcagatctcggcaccagggttgcatcttgtgggctccattgtgttttcacacaatgtgctatttgtccttcacagtgttttggtttatttttctgtttgtccatcttgtttttgaacaa

SEQ ID NO: 270254 - DNA, 120 bp, Artificial Sequence
  ENSG00000127328_78 (sequence is synthesized)
ttgccagcatttaaaaatgaggaaatctaaaatctgcatttcaagctgctcttttttaaaatgtgccgtttcgacaacactgagcccacagtcttgaatgacaacacttgggtggagctg

SEQ ID NO: 270255 - DNA, 120 bp, Artificial Sequence
  ENSG00000127328_79 (sequence is synthesized)
agtgactccacctgtcgggtggctacacccttgctcagggtatgcactccatggtttgctctatggcccaccatcctggattgtctccctgacaccaaggctaagggacccactttactc

SEQ ID NO: 270256 - DNA, 120 bp, Artificial Sequence
  ENSG00000127328_80 (sequence is synthesized)
acttatctgctgggccttggaagtatttcagttcggaaccccaattctaaccttagcttctcaggccattaaatgaaatctcatttctatgatgcttcctgtcacatcactgtgctgctg

SEQ ID NO: 270257 - DNA, 120 bp, Artificial Sequence
  ENSG00000127328_81 (sequence is synthesized)
agaacatgaagtctgtgggtgaattggtggacgggatccagaatcattacttggcagtggattatagtgtgatgactcatttccggtggtctccaggagacttggctgggagcttctctt

SEQ ID NO: 270258 - DNA, 120 bp, Artificial Sequence
  ENSG00000127328_82 (sequence is synthesized)
ggagtctagggttagccagaggctacatgttttaggcatcttaattcatattttatctaaaggcatataaatccttaaaaaaaatcatttgacttcatccttgctccctacatccagcca

SEQ ID NO: 270259 - DNA, 120 bp, Artificial Sequence
  ENSG00000127328_83 (sequence is synthesized)
gtaaccattgctttgttttacatcgcgtgcttcaggctttactacagcctacctggattttgcagtagcttcttaaactgcttaaactttggatattgccccagccaacacattctgcca

SEQ ID NO: 270260 - DNA, 120 bp, Artificial Sequence
  ENSG00000127328_84 (sequence is synthesized)
cagagatctctctgagttaaatgggattgtatcatgccccacacccaagcagatagaaactgtcaatagatacacttagaatgaatatgcatggaatcaaattacattcagaatctacca

SEQ ID NO: 270261 - DNA, 120 bp, Artificial Sequence
  ENSG00000127328_85 (sequence is synthesized)
ctataggtagtgaatacaacaggatagcagaggctgggaagggtaatgggggttggggggtgggaggataaaggggttgggtaatgggtgtaaaaatctatagaaggaatatgatctgtt

SEQ ID NO: 270262 - DNA, 120 bp, Artificial Sequence
  ENSG00000127328_86 (sequence is synthesized)
gtttggtagcacaatagggtaaatacagttaataatttattgtatatttcacaataaaggagtggatttggaatgttctcaacacaaatgataaatgtttgaggtgatggataccccaat

SEQ ID NO: 270263 - DNA, 120 bp, Artificial Sequence
  ENSG00000127328_87 (sequence is synthesized)
taccctgatttgatcattatacgttgtatgtttgtatcaaaatatcatatgtaccccataaatatgtacaactattatgtatccataaaaattggaaataaactaccaccatctttcttc

SEQ ID NO: 270264 - DNA, 120 bp, Artificial Sequence
  ENSG00000127328_88 (sequence is synthesized)
agcctattttcctatctcctctcgcaccatactaggcacacaatctctgtacctgtgctgtcttccaagccattgctcatgttttaagaaatatacttattgtttaatatatcctgtacc

SEQ ID NO: 270265 - DNA, 120 bp, Artificial Sequence
  ENSG00000127328_89 (sequence is synthesized)
actgtaggatgactgtagttaacaataatgtgtagtttcaaatagctaatagctggaaggaagttgttgaatgtttccaacataaagaaatgataagtgtttgagatgatggatatgcta

SEQ ID NO: 270266 - DNA, 120 bp, Artificial Sequence
  ENSG00000127328_90 (sequence is synthesized)
attaccctgatctgatcactacacattatatgtatggaaatatcattgtgtaccccatgaatatgggcaattattatttgttaattaaaaaaataaaaaaaagacccacccactgtttaa

SEQ ID NO: 270267 - DNA, 120 bp, Artificial Sequence
  ENSG00000127328_91 (sequence is synthesized)
taatgcagtattaagatgggggaggctttatctagagctggctgctttcagggattcttcagttccattttctacctggctgaccttggagtacctgctggaaacttggtaagtttctta

SEQ ID NO: 270268 - DNA, 120 bp, Artificial Sequence
  ENSG00000127328_92 (sequence is synthesized)
atctcagtatttcattaagggaggaaactgtcatgtgttgtctagaggagagtgggtggctttaatgatctggctagtcaaaatttattgctagagtgcgcttacaaagtatggatataa

SEQ ID NO: 270269 - DNA, 120 bp, Artificial Sequence
  ENSG00000127328_93 (sequence is synthesized)
gaaatatgtgaaaataagatgattttcttaaagatcaatacattgcttttatttaaattcagagagaattttatgtcagcaagggagtcctagagttaatttagataattaagcaacaaa

SEQ ID NO: 270270 - DNA, 120 bp, Artificial Sequence
  ENSG00000127328_94 (sequence is synthesized)
aaaatagaaataatggtagccttacaatgacataaggctggaagacattttgctaagtgaaatttcaagttatagtagaacaattagtgtcatttttgatcccaaattaggtttcacagt

SEQ ID NO: 270271 - DNA, 120 bp, Artificial Sequence
  ENSG00000127328_95 (sequence is synthesized)
cagttcagccagtctgttattcagacacttacaactatgtaaggccaccattatcatgtatccataacaattaaaaatttaaaaacgaaataatgggccgggcatggtggctcatgcctg

SEQ ID NO: 270272 - DNA, 80 bp, Artificial Sequence
  ENSG00000127328_96 (sequence is synthesized)
aaatattttgagctgtttagagtaaaaatttttaatcattgtatactgtgagaatgcatttctaagaggattgatcaata

SEQ ID NO: 270273 - DNA, 120 bp, Artificial Sequence
  ENSG00000127328_97 (sequence is synthesized)
gtatactgtgagaatgcatttctaagaggattgatcaataatttatgaagctttcccatttcttcttagaagccatcttttacattgttaaattcaagtccatcattaatcttgaagaaa

SEQ ID NO: 270274 - DNA, 120 bp, Artificial Sequence
  ENSG00000127328_98 (sequence is synthesized)
tgtgtgtgcttgttaaatttttgtatggaagccaggagtttattaaatggaataaccaatgttaacctgttttaattgaattgcattttgacgaattatcaataaaaatgatgctggtaa

SEQ ID NO: 270275 - DNA, 120 bp, Artificial Sequence
  ENSG00000127329_0 (sequence is synthesized)
ttttttttttccccaagcgaagcatgaacagttgctaagtggaaaatggaggctgaattttacatggtgattcttacctgcttgatcttcaggaactcagaagggtttcagattgtccat

SEQ ID NO: 270276 - DNA, 120 bp, Artificial Sequence
  ENSG00000127329_1 (sequence is synthesized)
gtccagaaacaacagtgtcttttcaaaaatgagaaagtggtcgtgggctcatgcaacaggaccatccagaaccagcagtggatgtggactgaggatgaaaagctccttcatgttaaatct

SEQ ID NO: 270277 - DNA, 120 bp, Artificial Sequence
  ENSG00000127329_2 (sequence is synthesized)
gcactgtgcttggccatctccaactcttcccgcggcccctcccgctcagccatcttggaccgctgttcccaggcaccccgatggacctgctatgatcaggaaggcttccttgaggtggaa

SEQ ID NO: 270278 - DNA, 120 bp, Artificial Sequence
  ENSG00000127329_3 (sequence is synthesized)
aatgcctctctctttctccagaaacaaggctccagagtagtggtcaagaaggccaggaaatacctccatagctggatgaaaatagatgtcaacaaggagggaaaactggtcaatgaaagc

SEQ ID NO: 270279 - DNA, 120 bp, Artificial Sequence
  ENSG00000127329_4 (sequence is synthesized)
ctctgtttacaaaaagctggcctgggagcagaagtttcggtgaggagcactagaaacacggctccaccccagattctcactacctttaatgcagttccagatggcctggtattccttatt

SEQ ID NO: 270280 - DNA, 120 bp, Artificial Sequence
  ENSG00000127329_5 (sequence is synthesized)
aggaataccacagaggccttcatcagaaatgctgcagaaaactacagccaaaacagcagcgagaggcagcatcccaatctgcacatgactggaattacagacacatcatgggttttgtcg

SEQ ID NO: 270281 - DNA, 120 bp, Artificial Sequence
  ENSG00000127329_6 (sequence is synthesized)
actactcagcccttctccagcaccactgaagagactggactggcggagccagagagatgtaacttcaccctggcggagtccaaggcctccagccattctgtgtctatccagtggagaatt

SEQ ID NO: 270282 - DNA, 120 bp, Artificial Sequence
  ENSG00000127329_7 (sequence is synthesized)
ttgggctcaccctgtaactttagcctcatctatagcagtgacaccctgggggccgcgttgtgccctacctttcggatagacaacaccacatacggatgtaaccttcaagatttacaagca

SEQ ID NO: 270283 - DNA, 120 bp, Artificial Sequence
  ENSG00000127329_8 (sequence is synthesized)
ggaaccatctataacttcaggattatttctctggatgaagagagaacagtggtcttgcaaacagatcctttacctcctgctaggtttggagtcagtaaagagaagacgacttcaaccagc

SEQ ID NO: 270284 - DNA, 120 bp, Artificial Sequence
  ENSG00000127329_9 (sequence is synthesized)
ttgcatgtttggtggactccttcttccggaaaagtcacctcatatgaggtgcaattatttgatgaaaataaccaaaagatacagggggttcaaattcaagaaagtacttcatggaatgaa

SEQ ID NO: 270285 - DNA, 120 bp, Artificial Sequence
  ENSG00000127329_10 (sequence is synthesized)
tacacttttttcaatctcactgctggtagtaaatacaatattgccatcacagctgtttctggaggaaaacgttctttttcagtttataccaatggatcaacagtgccatctccagtgaaa

SEQ ID NO: 270286 - DNA, 120 bp, Artificial Sequence
  ENSG00000127329_11 (sequence is synthesized)
gatattggtatttccacaaaagccaattctctcctgatttcctggtcccatggttctgggaatgtggaacgataccggctgatgctaatggataaagggatcctagttcatggcggtgtt

SEQ ID NO: 270287 - DNA, 120 bp, Artificial Sequence
  ENSG00000127329_12 (sequence is synthesized)
gtggacaaacatgctacttcctatgcttttcacgggctgacccctggctacctctacaacctcactgttatgactgaggctgcagggctgcaaaactacaggtggaaactagtcaggaca

SEQ ID NO: 270288 - DNA, 120 bp, Artificial Sequence
  ENSG00000127329_13 (sequence is synthesized)
gcccccatggaagtctcaaatctgaaggtgacaaatgatggcagtttgacctctctaaaagtcaaatggcaaagacctcctggaaatgtggattcttacaatatcaccctgtctcacaaa

SEQ ID NO: 270289 - DNA, 120 bp, Artificial Sequence
  ENSG00000127329_14 (sequence is synthesized)
gggaccatcaaggaatccagagtattagcaccttggattactgaaactcactttaaagagttagtccccggtcgactttatcaagttactgtcagctgtgtctctggtgaactgtctgct

SEQ ID NO: 270290 - DNA, 120 bp, Artificial Sequence
  ENSG00000127329_15 (sequence is synthesized)
cagaagatggcagtgggcagaacatttccagacaaagttgcaaacctggaggcaaacaataatggcaggatgaggtctcttgtagtgagctggtcgccccctgctggagactgggagcag

SEQ ID NO: 270291 - DNA, 120 bp, Artificial Sequence
  ENSG00000127329_16 (sequence is synthesized)
tatcggatcctactcttcaatgattctgtggtgctgctcaacatcactgtgggaaaggaagaaacacagtatgtcatggatgacacggggctcgtaccgggaagacagtatgaggtggaa

SEQ ID NO: 270292 - DNA, 120 bp, Artificial Sequence
  ENSG00000127329_17 (sequence is synthesized)
gtcattgttgagagtggaaatttgaagaattctgagcgttgccaaggcaggacagtccccctggctgtcctccagcttcgtgtcaaacatgccaatgaaacctcactgagtatcatgtgg

SEQ ID NO: 270293 - DNA, 120 bp, Artificial Sequence
  ENSG00000127329_18 (sequence is synthesized)
cagacccctgtagcagaatgggagaaatacatcatttccctagctgacagagacctcttactgatccacaagtcactctccaaagatgccaaagaattcacttttactgacctggtgcct

SEQ ID NO: 270294 - DNA, 120 bp, Artificial Sequence
  ENSG00000127329_19 (sequence is synthesized)
ggacgaaaatacatggctacagtcaccagtattagtggagacttaaaaaattcctcttcagtaaaaggaagaacagtgcctgcccaagtgactgacttgcatgtggccaaccaaggaatg

SEQ ID NO: 270295 - DNA, 120 bp, Artificial Sequence
  ENSG00000127329_20 (sequence is synthesized)
accagtagtctgtttactaactggacccaggcacaaggagacgtagaattttaccaagtcttactgatccatgaaaatgtggtcattaaaaatgaaagcatctccagtgagaccagcaga

SEQ ID NO: 270296 - DNA, 120 bp, Artificial Sequence
  ENSG00000127329_21 (sequence is synthesized)
tacagcttccactctctcaagtccggcagcctgtactccgtggtggtaacaacagtgagtggagggatctcttcccgacaagtggttgtggagggaagaacagtcccttccagtgtgagt

SEQ ID NO: 270297 - DNA, 120 bp, Artificial Sequence
  ENSG00000127329_22 (sequence is synthesized)
ggagtaacggtgaacaattccggtcgtaatgactacctcagcgtttcctggctgctggcgcccggagatgtggataactatgaggtaacattgtctcatgacggcaaggtggttcagtcc

SEQ ID NO: 270298 - DNA, 120 bp, Artificial Sequence
  ENSG00000127329_23 (sequence is synthesized)
cttgtcattgccaagtctgtcagagaatgttccttcagctccctcaccccaggccgcctctacaccgtgaccataactacaaggagtggcaagtatgaaaatcactccttcagccaagag

SEQ ID NO: 270299 - DNA, 120 bp, Artificial Sequence
  ENSG00000127329_24 (sequence is synthesized)
cggacagtgcctgacaaagtccagggagtcagtgttagcaactcagccaggagtgactatttaagggtatcctgggtgcatgccactggagactttgatcactatgaagtcaccattaaa

SEQ ID NO: 270300 - DNA, 120 bp, Artificial Sequence
  ENSG00000127329_25 (sequence is synthesized)
aacaaaaacaacttcattcaaactaaaagcattcccaagtcagaaaacgaatgtgtatttgttcagctagtccctggacggttgtacagtgtcactgttactacaaaaagtggacaatat

SEQ ID NO: 270301 - DNA, 120 bp, Artificial Sequence
  ENSG00000127329_26 (sequence is synthesized)
gaagccaatgaacaagggaatgggagaacaattccagagcctgttaaggatctaacattgcgcaacaggagcactgaggacttgcatgtgacttggtcaggagctaatggggatgtcgac

SEQ ID NO: 270302 - DNA, 120 bp, Artificial Sequence
  ENSG00000127329_27 (sequence is synthesized)
caatatgagatccagctgctcttcaatgacatgaaagtatttcctccttttcaccttgtaaataccgcaaccgagtatcgatttacttccctaacaccaggccgccaatacaaaattctt

SEQ ID NO: 270303 - DNA, 120 bp, Artificial Sequence
  ENSG00000127329_28 (sequence is synthesized)
gtcttgacgattagcggggatgtacagcagtcagccttcattgagggcttcacagttcctagtgctgtcaaaaatattcacatttctcccaatggagcaacagatagcctgacggtgaac

SEQ ID NO: 270304 - DNA, 120 bp, Artificial Sequence
  ENSG00000127329_29 (sequence is synthesized)
tggactcctggtgggggagacgttgattcctacacggtgtcggcattcaggcacagtcaaaaggttgactctcagactattcccaagcacgtctttgagcacacgttccacagactggag

SEQ ID NO: 270305 - DNA, 120 bp, Artificial Sequence
  ENSG00000127329_30 (sequence is synthesized)
gccggggagcagtaccagatcatgattgcctcagtcagcgggtccctgaagaatcagataaatgtggttgggcggacagttccagcatctgtccaaggagtaattgcagacaatgcatac

SEQ ID NO: 270306 - DNA, 120 bp, Artificial Sequence
  ENSG00000127329_31 (sequence is synthesized)
agcagttattccttaatagtaagttggcaaaaagctgctggtgtggcagaaagatatgatatcctgcttctaactgaaaatggaatccttctgcgcaacacatcagagccagccaccact

SEQ ID NO: 270307 - DNA, 120 bp, Artificial Sequence
  ENSG00000127329_32 (sequence is synthesized)
aagcaacacaaatttgaagatctaacaccaggcaagaaatacaagatacagatcctaactgtcagtggaggcctctttagcaaggaagcccagactgaaggccgaacagtcccagcagct

SEQ ID NO: 270308 - DNA, 120 bp, Artificial Sequence
  ENSG00000127329_33 (sequence is synthesized)
gtcaccgacctgaggatcacagagaactccaccaggcacctgtccttccgctggaccgcctcagagggggagctcagctggtacaacatctttttgtacaacccagatgggaatctccag

SEQ ID NO: 270309 - DNA, 120 bp, Artificial Sequence
  ENSG00000127329_34 (sequence is synthesized)
gagagagctcaagttgacccactagtccagagcttctctttccagaacttgctacaaggcagaatgtacaagatggtgattgtaactcacagtggggagctgtctaatgagtctttcata

SEQ ID NO: 270310 - DNA, 120 bp, Artificial Sequence
  ENSG00000127329_35 (sequence is synthesized)
tttggtagaacagtcccagcctctgtgagtcatctcagggggtccaatcggaacacgacagacagcctttggttcaactggagtccagcctctggggactttgacttttatgagctgatt

SEQ ID NO: 270311 - DNA, 120 bp, Artificial Sequence
  ENSG00000127329_36 (sequence is synthesized)
ctctataatcccaatggcacaaagaaggaaaactggaaagacaaggacctgacggagtggcggtttcaaggccttgttcctggaaggaagtacgtgctgtgggtggtaactcacagtgga

SEQ ID NO: 270312 - DNA, 120 bp, Artificial Sequence
  ENSG00000127329_37 (sequence is synthesized)
gatctcagcaataaagtcacagcggagagcagaacagctccaagtcctcccagtcttatgtcatttgctgacattgcaaacacatccttggccatcacgtggaaagggcccccagactgg

SEQ ID NO: 270313 - DNA, 120 bp, Artificial Sequence
  ENSG00000127329_38 (sequence is synthesized)
acagactacaacgactttgagctgcagtggttgcccagagatgcacttactgtcttcaacccctacaacaacagaaaatcagaaggacgcattgtgtatggtcttcgtccagggagatcc

SEQ ID NO: 270314 - DNA, 120 bp, Artificial Sequence
  ENSG00000127329_39 (sequence is synthesized)
tatcaattcaacgtcaagactgtcagtggtgattcctggaaaacttacagcaaaccaatttttggatctgtgaggacaaagcctgacaagatacaaaacctgcattgccggcctcagaac

SEQ ID NO: 270315 - DNA, 120 bp, Artificial Sequence
  ENSG00000127329_40 (sequence is synthesized)
tccacggccattgcctgttcttggatccctcctgattctgactttgatggttatagtattgaatgccggaaaatggacacccaagaagttgagttttccagaaagctggagaaagaaaaa

SEQ ID NO: 270316 - DNA, 120 bp, Artificial Sequence
  ENSG00000127329_41 (sequence is synthesized)
tctctgctcaacatcatgatgctagtgccccataagaggtacctggtgtccatcaaagtgcagtcggccggcatgaccagcgaggtggttgaagacagcactatcacaatgatagaccgc

SEQ ID NO: 270317 - DNA, 120 bp, Artificial Sequence
  ENSG00000127329_42 (sequence is synthesized)
ccccctcctccacccccacacattcgtgtgaatgaaaaggatgtgctaattagcaagtcttccatcaactttactgtcaactgcagctggttcagcgacaccaatggagctgtgaaatac

SEQ ID NO: 270318 - DNA, 120 bp, Artificial Sequence
  ENSG00000127329_43 (sequence is synthesized)
ttcacagtggtggtgagagaggctgatggcagtgatgagctgaagccagaacagcagcaccctctcccttcctacctggagtacaggcacaatgcctccattcgggtgtatcagactaat

SEQ ID NO: 270319 - DNA, 120 bp, Artificial Sequence
  ENSG00000127329_44 (sequence is synthesized)
tattttgccagcaaatgtgccgaaaatcctaacagcaactccaagagttttaacattaagcttggagcagagatggagagcctaggtggaaaatgcgatcccactcagcaaaaattctgt

SEQ ID NO: 270320 - DNA, 120 bp, Artificial Sequence
  ENSG00000127329_45 (sequence is synthesized)
gatggaccactgaagccacacactgcctacagaatcagcattcgagcttttacacagctctttgatgaggacctgaaggaattcacaaagccactctattcagacacatttttttcttta

SEQ ID NO: 270321 - DNA, 120 bp, Artificial Sequence
  ENSG00000127329_46 (sequence is synthesized)
cccatcactactgaatcagagcccttgtttggagctattgaaggtgtgagtgctggtctgtttttaattggcatgctagtggctgttgttgccttattgatctgcagacagaaagtgagc

SEQ ID NO: 270322 - DNA, 120 bp, Artificial Sequence
  ENSG00000127329_47 (sequence is synthesized)
catggtcgagaaagaccctctgcccgtctgagcattcgtagggatcgaccattatctgtccacttaaacctgggccagaaaggtaaccggaaaacttcttgtccaataaaaataaatcag

SEQ ID NO: 270323 - DNA, 120 bp, Artificial Sequence
  ENSG00000127329_48 (sequence is synthesized)
tttgaagggcatttcatgaagctacaggctgactccaactaccttctatccaaggaatacgaggagttaaaagacgtgggccgaaaccagtcatgtgacattgcactcttgccggagaat

SEQ ID NO: 270324 - DNA, 120 bp, Artificial Sequence
  ENSG00000127329_49 (sequence is synthesized)
agagggaaaaatcgatacaacaatatattgccctatgatgccacgcgagtgaagctctccaatgtagatgatgatccttgctctgactacatcaatgccagctacatccctggcaacaac

SEQ ID NO: 270325 - DNA, 120 bp, Artificial Sequence
  ENSG00000127329_50 (sequence is synthesized)
ttcagaagagaatacattgtcactcagggaccgcttcctggcaccaaggatgacttctggaaaatggtgtgggaacaaaacgttcacaacatcgtcatggtgacccagtgtgttgagaag

SEQ ID NO: 270326 - DNA, 120 bp, Artificial Sequence
  ENSG00000127329_51 (sequence is synthesized)
tctcagagtccgtcctgcctgagtggaccatccgggagtttaagatatgcggtgaggaacagcttgatgcacacagactcatccgccactttcactatacggtgtggccagaccatggag

SEQ ID NO: 270327 - DNA, 120 bp, Artificial Sequence
  ENSG00000127329_52 (sequence is synthesized)
tcccagaaaccacccagtctctgatccagtttgtgagaactgtcagggactacatcaacagaagcccgggtgctgggcccactgtggtgcactgcagtgctggtgtgggtaggactggaa

SEQ ID NO: 270328 - DNA, 120 bp, Artificial Sequence
  ENSG00000127329_53 (sequence is synthesized)
cctttattgcattggaccgaatcctccagcagttagactccaaagactctgtggacatttatggagcagtgcacgacctaagacttcacagggttcacatggtccagactgagtgtcagt

SEQ ID NO: 270329 - DNA, 120 bp, Artificial Sequence
  ENSG00000127329_54 (sequence is synthesized)
atgtctacctacatcagtgtgtaagagatgtcctcagagcaagaaagctacggagtgaacaagaaaaccccttgtttccaatctatgaaaatgtgaatccagagtatcacagagatccag

SEQ ID NO: 270330 - DNA, 120 bp, Artificial Sequence
  ENSG00000127329_55 (sequence is synthesized)
tctattcaaggcattgagaatgtacctgaagagctcctggataaaaattattcactgtgtgatttgtttttaaaaacttgcttcatgccctacagaggtgccagctatttctgttgatac

SEQ ID NO: 270331 - DNA, 120 bp, Artificial Sequence
  ENSG00000127329_56 (sequence is synthesized)
ggtgccagctatttctgttgatactatgtataatttattaatctggagaatgtttaaaattttatataatttaaaggtaacagatattattgtacatagttgtattttgtagtttcttct

SEQ ID NO: 270332 - DNA, 120 bp, Artificial Sequence
  ENSG00000127329_57 (sequence is synthesized)
ttaatattaagctttatataatactatttttccacactaaagtgttcatgacttgttctacataaaactaattcaacctgtatgacaggactactggtaaaatgcatatggaggtggtgg

SEQ ID NO: 270333 - DNA, 120 bp, Artificial Sequence
  ENSG00000127329_58 (sequence is synthesized)
cagagacaatccttcaggccatgttttctacctgttttgatattcactggacaggaaaaagggcagggctagagagagcaaatactatggctagatttgctgcattgctgtcccatgaat

SEQ ID NO: 270334 - DNA, 120 bp, Artificial Sequence
  ENSG00000127329_59 (sequence is synthesized)
ctcgagagccaacagacatgtcctaacttgctattaggacaaatgtgacagtcaaaaaaaggattagagggagggagaaaaaagaattaagcagtaccaaagctgaactagatgcttgtg

SEQ ID NO: 270335 - DNA, 120 bp, Artificial Sequence
  ENSG00000127329_60 (sequence is synthesized)
tctgaactagttgctctctctctcctttctccttccagggattcaagccaaagtggtcagctcagggatcatgtaacttgcagtgcaagcccaggatggtaggatgcagggttgagggtt

SEQ ID NO: 270336 - DNA, 120 bp, Artificial Sequence
  ENSG00000127329_61 (sequence is synthesized)
ctgatagagaatgattccaaacagaagtgatgaattccttttgttaataagatgccagctatacccagactggaaacataacatgcaaagcactatctacagtgattagagatcctttca

SEQ ID NO: 270337 - DNA, 120 bp, Artificial Sequence
  ENSG00000127329_62 (sequence is synthesized)
ttgcattcatggtgtggagtgtgaacatccacacccatactgtaatgtatttatacacactagtttctgtctcattttcagtggtctccattcctagaaaagtcacaattatccattcct

SEQ ID NO: 270338 - DNA, 120 bp, Artificial Sequence
  ENSG00000127329_63 (sequence is synthesized)
acttgatttcccattaaaagaatattatggtagcagattgtgcccctcattaaaaggcttaatgccaacattttcatagaaatgactacaaacatcatatatagtaaatttaaaaacaat

SEQ ID NO: 270339 - DNA, 120 bp, Artificial Sequence
  ENSG00000127329_64 (sequence is synthesized)
agcaaaaacaaaaacagtggtcttcagtaaaattttcaaaacttcttttagtaaatcaatgaagtcaaaatgtcaagtaatcacccaaagttgcatttaataacaaaaggcactacatac

SEQ ID NO: 270340 - DNA, 120 bp, Artificial Sequence
  ENSG00000127329_65 (sequence is synthesized)
tgtaccaagtttatcttcaatatttgtgccttacttactttgactataacaaattccaatgagtcagaaagtatttccttcatcaaggtccagttccgacagcattcctgggaaaaattt

SEQ ID NO: 270341 - DNA, 120 bp, Artificial Sequence
  ENSG00000127329_66 (sequence is synthesized)
gaaaggagtttgtacggaatcttcatagatacctgagaagatgagctggagatgtttgcctttttcacactacaaatttttctgtaataaacttgggaattagaggtcaagtttgttgat

SEQ ID NO: 270342 - DNA, 120 bp, Artificial Sequence
  ENSG00000127329_67 (sequence is synthesized)
ggcatagcttcctttgcataaagagtatatttcttttcaaagtatatatttttgtaacctaccataaagtccgtaagtgaatacaacgaatgtaattgacataataattgaaaatcattg

SEQ ID NO: 270343 - DNA, 120 bp, Artificial Sequence
  ENSG00000127329_68 (sequence is synthesized)
actatacctaaaatagttctttataattaaataactctacacccaatctggaaatttttccaaggttatttgaagtttacaaaaatgtgaagcataatcataagcttcaaagattcacag

SEQ ID NO: 270344 - DNA, 120 bp, Artificial Sequence
  ENSG00000127329_69 (sequence is synthesized)
tttcattgtgctcaatgctcttgtgaaatgacagtcttaagctctgattctgtatcaaggaactaagtgaatcttctggaaatgaaaaggaacaacatatgtgtaagtgcagtagatgta

SEQ ID NO: 270345 - DNA, 120 bp, Artificial Sequence
  ENSG00000127329_70 (sequence is synthesized)
ccaccagcgagaaaatagaggtcagagatctacaacgtgtggcatccattagaaatcacctttcctacattgaaaagaaaaaagagaaaaagcagaattttacactaatgttgcttgatg

SEQ ID NO: 270346 - DNA, 120 bp, Artificial Sequence
  ENSG00000127329_71 (sequence is synthesized)
caaagcacattaatgcttggaaggatacattcattttcgacttttcattcactcagaaaacttctagtaagtatctgcaacctgctaggcactgttccagaatctacacatttctactca

SEQ ID NO: 270347 - DNA, 120 bp, Artificial Sequence
  ENSG00000127329_72 (sequence is synthesized)
cataaagagaatcctcataaagttaggattgttgttactaccttcaattgagcttaaaagacagcctcatcaagggaatgggataactgagccagtctaggacagtggtcaccttccaca

SEQ ID NO: 270348 - DNA, 120 bp, Artificial Sequence
  ENSG00000127329_73 (sequence is synthesized)
ggccacacactggaaagtgctaatgctactttaatagcaaacctctggatctaggagagagagcaattaattgcacaaaccaggagttaaaaccataaaaaaaacctatgcatctgtaat

SEQ ID NO: 270349 - DNA, 120 bp, Artificial Sequence
  ENSG00000127329_74 (sequence is synthesized)
agtaaataacactcacgtactctggcaacatctagggtagtatcagaattatgtaaatggacatgacagggaaaaatcgtaggtttttttagtctaatccaacccaggaaatgtttattc

SEQ ID NO: 270350 - DNA, 120 bp, Artificial Sequence
  ENSG00000127329_75 (sequence is synthesized)
ctaccctacacctaattttaaaccttcttagcaacaaatatttcactattcgctcctactcctgggaagactaaatatataattgacttatttattaaatttaggagaaaaaaaaagttt

SEQ ID NO: 270351 - DNA, 120 bp, Artificial Sequence
  ENSG00000127329_76 (sequence is synthesized)
tccttgacattcagctctattggatttatttccatttaattgcatcatgtgttatgtcttggtaaacactccatttcctgtcttggtgggcatcctgtctgtgtacctgtgcagtacact

SEQ ID NO: 270352 - DNA, 120 bp, Artificial Sequence
  ENSG00000127329_77 (sequence is synthesized)
ttaatcatcaagacttcaaagtgcttttgagctatcaaatcttgggagagtcccatctagcatcttaataattatttttccaagttcgttataattaactcctttaacctcatctcatta

SEQ ID NO: 270353 - DNA, 120 bp, Artificial Sequence
  ENSG00000127329_78 (sequence is synthesized)
aatcaattttgtattgtcattctgttgttctctggaaagcagccaattgttcagctcttgaatcagaattttcaaagactcacctctcttacctgggcttgcacatatttgtcctaagta

SEQ ID NO: 270354 - DNA, 120 bp, Artificial Sequence
  ENSG00000127329_79 (sequence is synthesized)
attctctatcccttaaacctctgagtccctctgttttattacttgccccactcctcctacttgaatatgtttgttttcccagttgaatgtgatttttatctactgttcatattatctttt

SEQ ID NO: 270355 - DNA, 120 bp, Artificial Sequence
  ENSG00000127329_80 (sequence is synthesized)
gttcatattatcttttatacccatgagtataatttcatagtcctttcaggttccacatcatcaaagagatgaccataatttcacttttttttgaaatgaagtcttgctctgttgcccagg

SEQ ID NO: 270356 - DNA, 77 bp, Artificial Sequence
  ENSG00000127329_81 (sequence is synthesized)
cgtgaccttagagtgagccaccgcacctggccaattcacttttaaatactaaaaggcacacagcacacagacatttt

SEQ ID NO: 270357 - DNA, 120 bp, Artificial Sequence
  ENSG00000127329_82 (sequence is synthesized)
acttttaaatactaaaaggcacacagcacacagacattttcggggcagttttctttgggagggtctttgataaattttgtaatcacctctcggaagaaagcccaaaatgacatgtgaaaa

SEQ ID NO: 270358 - DNA, 120 bp, Artificial Sequence
  ENSG00000127329_83 (sequence is synthesized)
taatattaaaccatttaccagatgtccagcaatataaaaatagacctcacatgctacccttcacatgctgattctcttgccttgctgtttaaggatccagtttcttatgttaaacatttt

SEQ ID NO: 270359 - DNA, 120 bp, Artificial Sequence
  ENSG00000127329_84 (sequence is synthesized)
ccttaccttttgcaataatattattggccatatactaaattctcattcacttagctttctaagaattctttgaggttggaatcctgaaatcataaagctaccagatctgcacaacagcag

SEQ ID NO: 270360 - DNA, 120 bp, Artificial Sequence
  ENSG00000127329_85 (sequence is synthesized)
tggtagtatctgagcccaaactctgagacgctctagagttttagtttacaaacatgagccagaccaaacctgacctggtgaaaatcaataggtaataaactgcttgtatatgatagcagt

SEQ ID NO: 270361 - DNA, 120 bp, Artificial Sequence
  ENSG00000127329_86 (sequence is synthesized)
tcaagggctttctgggttccatttcactgaggaaatgaaaatataactgattagccaagacagagtggcaataaggaataactgatcctcctccaagttgcagtgagcaagccctcaagc

SEQ ID NO: 270362 - DNA, 120 bp, Artificial Sequence
  ENSG00000127329_87 (sequence is synthesized)
ctacctcattcctgaagagttgaaggagaaaatgccgtgctaattttctgccctgctatttttaacctgaaatttagaattacatcaggtattcaaagaatgttccctatcaaaggaaaa

SEQ ID NO: 270363 - DNA, 120 bp, Artificial Sequence
  ENSG00000127329_88 (sequence is synthesized)
tctgtaaacgatgactgcaaaaagcaagtgaaatgatgcaaagagaaaatatttgcaaaacagaatctaaccagacatcatcatgaagataaaatggcatctcttctgtgtggcctgggt

SEQ ID NO: 270364 - DNA, 120 bp, Artificial Sequence
  ENSG00000127329_89 (sequence is synthesized)
gtgcttggacaatcctgtcacacgtttctattaggacatgttgcccttttgaggattcactctatgttggccagatggtttaactgattaaacaattgaatcaatttattttgctttttg

SEQ ID NO: 270365 - DNA, 120 bp, Artificial Sequence
  ENSG00000127329_90 (sequence is synthesized)
aattgaccagatatttaactaaatgtactgggtttggcattttagacacactgccttagattcttgtagtgcatgatgactttgaaaatgtttggccattttagttaaaatgcagggtaa

SEQ ID NO: 270366 - DNA, 120 bp, Artificial Sequence
  ENSG00000127329_91 (sequence is synthesized)
catttgatgcagccatgataacaggaaaaatctgttctgttctaaaaatgtttctagcaatagaagtatttctggctaagagaatactcttgacttgtagggaggctccctcggaataaa

SEQ ID NO: 270367 - DNA, 120 bp, Artificial Sequence
  ENSG00000127329_92 (sequence is synthesized)
tgtatgcaacacaaataaggcattttattttttaaaagattgtctatataagatacacttattaaataaagaaattgttggtgaatgctctgaaaatagaggcttatgtaatggaaataa

SEQ ID NO: 270368 - DNA, 120 bp, Artificial Sequence
  ENSG00000127329_93 (sequence is synthesized)
gagattaacaggtttaccaaagattatttttataacctctatgccaattcacatgatcttatataagacaccaaaataagttattcaaaactgtgaataatgtcagacaaatgcaatgtg

SEQ ID NO: 270369 - DNA, 120 bp, Artificial Sequence
  ENSG00000127329_94 (sequence is synthesized)
tcccttctagaacagtcacaaaaagaattggttatagctattttaataaataatatcctcaccccaagaacaaacgttcagttatgctgagatgttctaatagctgtgtgcgtagataag

SEQ ID NO: 270370 - DNA, 120 bp, Artificial Sequence
  ENSG00000127329_95 (sequence is synthesized)
cacctccatcaagaaaggaacacatgaaattgtggctttaagagtttgtggcagagttggacagcattccatctgcaggttagtaggaaagcctgtaccagcctttgtggaatgtcctag

SEQ ID NO: 270371 - DNA, 120 bp, Artificial Sequence
  ENSG00000127329_96 (sequence is synthesized)
tctgccacactgacaagagggtgcaccagtgctctactggaagagtatttctggttttctatgcaggactattgggcttataaattcctcaagaacaaggaccaagtctttaatctcgtc

SEQ ID NO: 270372 - DNA, 120 bp, Artificial Sequence
  ENSG00000127329_97 (sequence is synthesized)
tcgactcctaccttgtggaaattagtgcacagctcatagacattctacacacacttcttgaaattgctcctggcctgatattttggatgttaggtagtcagtgtccaataatactgttgt

SEQ ID NO: 270373 - DNA, 120 bp, Artificial Sequence
  ENSG00000127329_98 (sequence is synthesized)
ccgtgcaggttaatctagccattccttcatttgtgtgaagcataaataatgtaagtaaatacagcaactgaactttttatgttctataatagagcacttttatgtttttaatatcattta

SEQ ID NO: 270374 - DNA, 120 bp, Artificial Sequence
  ENSG00000127329_99 (sequence is synthesized)
ttatttctctgaaaatccagttaagatggcagatgattctattttttcatattatagcatctacccacaatatttctaactaactgtatttgaacaaagaacttccttagtctttcaatt

SEQ ID NO: 270375 - DNA, 120 bp, Artificial Sequence
  ENSG00000127329_100 (sequence is synthesized)
taaattatgtatttgcttaatacatttttatatttgtaactgtggtaaaaaaaaaatctatatagcatcttgcatacattctcactagtacaggaataaaactgcagtttgttgaaggag

SEQ ID NO: 270376 - DNA, 120 bp, Artificial Sequence
  ENSG00000127329_101 (sequence is synthesized)
aaaataagtcagcaggaaaactcctttcccaatctgagaagtggagcctatgtaactgaaggtgtctgtagtatggcccattcttctgagtcacttaggcaactgagtttggatttctga

SEQ ID NO: 270377 - DNA, 120 bp, Artificial Sequence
  ENSG00000127329_102 (sequence is synthesized)
atgatctgcatgttgtttctgtcttatgctttttcatgtcacgtcacttaagtagcataaatgcattagcattgataccagtatataaaacatttctgattcattcttacagtgagaacc

SEQ ID NO: 270378 - DNA, 120 bp, Artificial Sequence
  ENSG00000127329_103 (sequence is synthesized)
agttagcatttaaccatgttttccatacattattttattaatttatgtcctcacttatctatccagtgccttatatatgtaaattactgtactattgttaaaacgactaagacatgctac

SEQ ID NO: 270379 - DNA, 120 bp, Artificial Sequence
  ENSG00000127329_104 (sequence is synthesized)
ttgcctttaaggcaggatccagcagactaccccatctggtgccaaatctggtctgtggcctgattttgtttagccctcaagctaagagtggtttttacatgtttaaagggttgtacaaac

SEQ ID NO: 270380 - DNA, 120 bp, Artificial Sequence
  ENSG00000127329_105 (sequence is synthesized)
aacagtggtcttgcaaacaggtaaaggatgacaggtgcaattggatggccaagccacacggggttgggccctgccttttcaagctggtgtttcatttgagttccagggatacaaaaaatg

SEQ ID NO: 270381 - DNA, 120 bp, Artificial Sequence
  ENSG00000127329_106 (sequence is synthesized)
aaggtaaaaatacctgtgaagataaatattgacagaaatgtctggtttcctcggatctagccagaagcagcttggtggactttcagagactcccttagtgctgaaaacagccaactagct

SEQ ID NO: 270382 - DNA, 120 bp, Artificial Sequence
  ENSG00000127329_107 (sequence is synthesized)
actgaaagggtcggggtggggtgcagggcggtcagcaaagagaaactttgggctgcggtgggaattttttaaagtgatgtggtttacgcttccattgcattaaattgtcaaaccctggaa

SEQ ID NO: 270383 - DNA, 120 bp, Artificial Sequence
  ENSG00000127329_108 (sequence is synthesized)
cataatcagaataaaagttatctcccttatgtttcagccatggtcgagaaagaccctctgcccgtctgagcattcgtagggatcgaccattatctgtccacttaaacctgggccagaaag

SEQ ID NO: 270384 - DNA, 120 bp, Artificial Sequence
  ENSG00000127329_109 (sequence is synthesized)
gtaaccggaaaacttcttggtaagagagagaacacattaattactatattatctgcctttgaaatatgagtcagaatagttatggcactttcccttttctgcagtaactcttttctgttt

SEQ ID NO: 270385 - DNA, 120 bp, Artificial Sequence
  ENSG00000127329_110 (sequence is synthesized)
ccaactaccttctatccaaggaatacgaggtacaactcaggcagaatgaagcttcagcatccctagttcttagcagaatttccttcctaatgtttactgtgtcatcataggctgattgag

SEQ ID NO: 270386 - DNA, 120 bp, Artificial Sequence
  ENSG00000127329_111 (sequence is synthesized)
ctcagaagttaggaggctgcttagaatctcagctgagcactcttttatgcctaaactatgccctgaatagaatataccatctaatcttagaggccagcttgagctccagaataacacagc

SEQ ID NO: 270387 - DNA, 120 bp, Artificial Sequence
  ENSG00000127329_112 (sequence is synthesized)
gcttggattaaatccatatttttacatgggattggtctggatttgaattcaggcagaagtctctgtagatttgttcgttcattcaacattaacaacaagggacaataaatctctctctgc

SEQ ID NO: 270388 - DNA, 120 bp, Artificial Sequence
  ENSG00000127329_113 (sequence is synthesized)
cctcatggggcttacaattaggtaggacgtactatttgtaaatagacattatattttgggtgtgatgagggaagtaaatggtactatggagacacttgttaggtaatctgacccaataca

SEQ ID NO: 270389 - DNA, 120 bp, Artificial Sequence
  ENSG00000127329_114 (sequence is synthesized)
agagaacttcttggaaaaggaaacatccaaatagaaacctaaagcaagagatttaccaggtagaggtaggggaagaagtggagaatattccaggtagagagaataaaatattccaagatg

SEQ ID NO: 270390 - DNA, 120 bp, Artificial Sequence
  ENSG00000127329_115 (sequence is synthesized)
agagaggagggagagtacaagatctaccaataggggaacagaaagaagtttatttggccatagcataaaaggtgaggattaagggaatcagataataaaatattttgtattccatggtaa

SEQ ID NO: 270391 - DNA, 120 bp, Artificial Sequence
  ENSG00000127329_116 (sequence is synthesized)
agtattagtggagacttaaaaaattcctcttcagtaaaaggaagaacagtgtaattggaagcaaagtcatcaagatttccctttttagttggacgccgtggctcacatctgtaatcccag

SEQ ID NO: 270392 - DNA, 120 bp, Artificial Sequence
  ENSG00000127329_117 (sequence is synthesized)
ggaggctgaggcataagaatcacttaaacccaggaggtggaggttgcatgagtcgagatcctgccactgcacactagcctgggtgatagagcgagaacctgcctcaaaaaaaaaaaaaaa

SEQ ID NO: 270393 - DNA, 120 bp, Artificial Sequence
  ENSG00000127334_0 (sequence is synthesized)
gtgtgtgagtgcgcgggggcgcgcgcgcgcgggcccgggagaggctcccgagccaggcggtcttcggtcctcgcagcgcttccagctccccgcgcccctatgtgagggagacggggaggc

SEQ ID NO: 270394 - DNA, 120 bp, Artificial Sequence
  ENSG00000127334_1 (sequence is synthesized)
tgtgagggagacggggaggcccgcggcgcgcaggggagggcgaggcatgtgcacgggccggagggtgctgcagccgcccgaggaagaggaggacggcggcgaggaggagagcggggggct

SEQ ID NO: 270395 - DNA, 120 bp, Artificial Sequence
  ENSG00000127334_2 (sequence is synthesized)
gaggggatgcagtggactgtgtgtgtctggctgtagcagacgcgaggcggcgacgaggcgccggggacccgcgcgaggggcggccgggaggcggcggcggcggccgccagaagtagcagc

SEQ ID NO: 270396 - DNA, 120 bp, Artificial Sequence
  ENSG00000127334_3 (sequence is synthesized)
aggaccggcggcggcgacggcagccctgaaatgcattttcctctccagcggccatgttaaccaggaaaccttcggccgccgctcccgccgcctacccgaccggccgaggtggggacagcg

SEQ ID NO: 270397 - DNA, 120 bp, Artificial Sequence
  ENSG00000127334_4 (sequence is synthesized)
ccgttcgtcagcttcaggcttccccggggctcggtgcaggggccacccggagcggagtggggactggcccgccctcccccatcgccctgccgcctctccgggccagcaacgctgccgccg

SEQ ID NO: 270398 - DNA, 120 bp, Artificial Sequence
  ENSG00000127334_5 (sequence is synthesized)
cagcccacacgattggcggcagtaagcacacaatgaatgatcacctgcatgtcggcagccacgctcacggacagatccaggttcaacagttgtttgaggataacagtaacaagcggacag

SEQ ID NO: 270399 - DNA, 120 bp, Artificial Sequence
  ENSG00000127334_6 (sequence is synthesized)
tgctcacgacacaaccaaatgggcttacaacagtgggcaaaacgggcttgccagtggtgccagagcggcagctggacagcattcatagacggcaggggagctccacctctctaaagtcca

SEQ ID NO: 270400 - DNA, 120 bp, Artificial Sequence
  ENSG00000127334_7 (sequence is synthesized)
tggaaggcatggggaaggtgaaagccacccccatgacacctgaacaagcaatgaagcaatacatgcaaaaactcacagccttcgaacaccatgagattttcagctaccctgaaatatatt

SEQ ID NO: 270401 - DNA, 120 bp, Artificial Sequence
  ENSG00000127334_8 (sequence is synthesized)
tcttgggtctaaatgctaagaagcgccagggcatgacaggtgggcccaacaatggtggctatgatgatgaccagggatcatatgtgcaggtgccccacgatcacgtggcttacaggtatg

SEQ ID NO: 270402 - DNA, 120 bp, Artificial Sequence
  ENSG00000127334_9 (sequence is synthesized)
aggtcctcaaggtcattgggaaggggagctttgggcaggtggtcaaggcctacgatcacaaagtccaccagcacgtggccctaaagatggtgcggaatgagaagcgcttccaccggcaag

SEQ ID NO: 270403 - DNA, 120 bp, Artificial Sequence
  ENSG00000127334_10 (sequence is synthesized)
cagcggaggagatccgaatcctggaacacctgcggaagcaggacaaggataacacaatgaatgtcatccatatgctggagaatttcaccttccgcaaccacatctgcatgacgtttgagc

SEQ ID NO: 270404 - DNA, 120 bp, Artificial Sequence
  ENSG00000127334_11 (sequence is synthesized)
tgctgagcatgaacctctatgagctcatcaagaagaataaattccagggcttcagtctgcctttggttcgcaagtttgcccactcgattctgcagtgcttggatgctttgcacaaaaaca

SEQ ID NO: 270405 - DNA, 120 bp, Artificial Sequence
  ENSG00000127334_12 (sequence is synthesized)
gaataattcactgtgaccttaagcccgagaacattttgttaaagcagcagggtagaagcggtattaaagtaattgattttggctccagttgttacgagcatcagcgtgtctacacgtaca

SEQ ID NO: 270406 - DNA, 120 bp, Artificial Sequence
  ENSG00000127334_13 (sequence is synthesized)
tccagtcgcgtttttaccgggctccagaagtgatccttggggccaggtatggcatgcccattgatatgtggagcctgggctgcattttagcagagctcctgacgggttaccccctcttgc

SEQ ID NO: 270407 - DNA, 120 bp, Artificial Sequence
  ENSG00000127334_14 (sequence is synthesized)
ctggggaagatgaaggggaccagctggcctgtatgattgaactgttgggcatgccctcacagaaactgctggatgcatccaaacgagccaaaaattttgtgagctccaagggttatcccc

SEQ ID NO: 270408 - DNA, 120 bp, Artificial Sequence
  ENSG00000127334_15 (sequence is synthesized)
gttactgcactgtcacgactctctcagatggctctgtggtcctaaacggaggccgttcccggagggggaaactgaggggcccaccggagagcagagagtgggggaacgcgctgaaggggt

SEQ ID NO: 270409 - DNA, 120 bp, Artificial Sequence
  ENSG00000127334_16 (sequence is synthesized)
gtgatgatccccttttccttgacttcttaaaacagtgtttagagtgggatcctgcagtgcgcatgaccccaggccaggctttgcggcacccctggctgaggaggcggttgccaaagcctc

SEQ ID NO: 270410 - DNA, 120 bp, Artificial Sequence
  ENSG00000127334_17 (sequence is synthesized)
ccaccggggagaaaacgtcagtgaaaaggataactgagagcaccggtgctatcacatctatatccaagttacctccaccttctagctcagcttccaaactgaggactaatttggcgcaga

SEQ ID NO: 270411 - DNA, 120 bp, Artificial Sequence
  ENSG00000127334_18 (sequence is synthesized)
tgacagatgccaatgggaatattcagcagaggacagtgttgccaaaacttgttagctgagctcacgtcccctgatgctggtaacctgaaagatacgacattgctgagccttactgggttg

SEQ ID NO: 270412 - DNA, 120 bp, Artificial Sequence
  ENSG00000127334_19 (sequence is synthesized)
aaaaggagtagctcagacctgtttttatttgctcaataactctactcatttgtatcttttcagcacttaattttaatgtaagaaagttgttcattttgtttttataaaatacatgaggac

SEQ ID NO: 270413 - DNA, 120 bp, Artificial Sequence
  ENSG00000127334_20 (sequence is synthesized)
aatgctttaagtttttatactttcagaaactttttgtgttctaaaagtacaatgagccttactgtatttagtgtggcagaataataacatcagtggcaggccactgattacttcatgact

SEQ ID NO: 270414 - DNA, 120 bp, Artificial Sequence
  ENSG00000127334_21 (sequence is synthesized)
gccacgcatttacagattggtgtcaaagacattcactatgtttttatggttcatgttatatcctccccagggtgacagccccttaaggccctccttttccctccatgctccaggtccatg

SEQ ID NO: 270415 - DNA, 120 bp, Artificial Sequence
  ENSG00000127334_22 (sequence is synthesized)
cacaggtgtagcatgtcctgcttccgtttttcataaattaatctgggtgttgggggtagtgggaggagaacggtcagaatcaaagtgacattctaagaaaaactgtaccttagagatttt

SEQ ID NO: 270416 - DNA, 120 bp, Artificial Sequence
  ENSG00000127334_23 (sequence is synthesized)
cctctagtgctcaaacaaatacaaaataagatccccaaggtttaaactgcccagttagcattctgacattctaaaagccggcaaagcagcttttagtggataaatgggaatggaaacgtg

SEQ ID NO: 270417 - DNA, 120 bp, Artificial Sequence
  ENSG00000127334_24 (sequence is synthesized)
tgtgttcctccaaattttctagtatgatcggtgagctgttttgtaaagaagcctcatattacagagttgcttttgcacctaaatttagaattgtattccatgaactgttcctcccttttc

SEQ ID NO: 270418 - DNA, 120 bp, Artificial Sequence
  ENSG00000127334_25 (sequence is synthesized)
tctgcttttctcctctctgttcctcttttaataccacacgtctgttgcttgcatttagtttgtcttcttccttcagctgtgtatcccagactgttaatacagaaaagagacatttcagct

SEQ ID NO: 270419 - DNA, 120 bp, Artificial Sequence
  ENSG00000127334_26 (sequence is synthesized)
gtgattatgaccattgtttcatattccaattaaaaaaagaacagcagcctagctacttaaggtggggatttccatagttccaaagaagatttagcagattagagtgagttcacacttttc

SEQ ID NO: 270420 - DNA, 120 bp, Artificial Sequence
  ENSG00000127334_27 (sequence is synthesized)
aggtgccactgtaaggttctctcagcctgggaaactatcaactctttctttaaaaagaaagagggttgaaaatcctctggacgaacagaagtcactttggctgttcagtaaggccaatgt

SEQ ID NO: 270421 - DNA, 120 bp, Artificial Sequence
  ENSG00000127334_28 (sequence is synthesized)
taacaacacgtttagaggaggaaaagttcaacctcaagttaaatggtttgacttattcttcgtatcattagaagaaccccagagatagcattcctctattttattttactttcttttgga

SEQ ID NO: 270422 - DNA, 120 bp, Artificial Sequence
  ENSG00000127334_29 (sequence is synthesized)
ttgcactgattgtttttgtgggaatgacactttatctggcaaagtaactgagagtttggtaaaagaatattttcttctctgaataataattattttcacagtgaaaatttcagtatttta

SEQ ID NO: 270423 - DNA, 120 bp, Artificial Sequence
  ENSG00000127334_30 (sequence is synthesized)
tcactaatgtatgagcaatgatctatatcaatttcaaggcacgtgaaaaaaattttttagtatgtgcaatttaatatagaaagatttctgcctgtttggacaataggttttgggtagtac

SEQ ID NO: 270424 - DNA, 120 bp, Artificial Sequence
  ENSG00000127334_31 (sequence is synthesized)
agattaggataagtaagcttatatatgcacagagattattgtattacctgtaaattgatttacaagtacttaaaagcgtggtccccagtgaggccaagaaagtttccggttaagttcttt

SEQ ID NO: 270425 - DNA, 120 bp, Artificial Sequence
  ENSG00000127334_32 (sequence is synthesized)
aataataatcctacagtttatcttaagaaaaaaaaaaaggtttgaaaaaaacactttaatttaggcttcgttggttgatggtggaaaaaaatgctcaggaaatatttcagatatttgcca

SEQ ID NO: 270426 - DNA, 120 bp, Artificial Sequence
  ENSG00000127334_33 (sequence is synthesized)
aaaaaccagtaataaggttaccttattaaaatagtgatatttgctttactatttaaggtgtcactgataaattaatttgtacttctgtgtttagaaattatagcttcttttcccttagtc

SEQ ID NO: 270427 - DNA, 120 bp, Artificial Sequence
  ENSG00000127334_34 (sequence is synthesized)
aaattttttagcatattatacacatttctgtgtaatctgtggaagtgcaataatatgttagtaagttacattttaaataatgctcatgtgacaatactcccaatcaatggcttatagaat

SEQ ID NO: 270428 - DNA, 120 bp, Artificial Sequence
  ENSG00000127334_35 (sequence is synthesized)
ttaaagatctgtatattagattttggcttaaaggcatgagaagtataagacttggtttggtggctttgtaagaccaccagcctcttaatgatggttagcttctttaggtcattaaatcaa

SEQ ID NO: 270429 - DNA, 120 bp, Artificial Sequence
  ENSG00000127334_36 (sequence is synthesized)
taaaaacatataatgctgttttgctcttctaatgctcctcttccatttccagttatcttcacatttacatttaaatatacaaacctgagcctgccattattaatttccctataaaatgac

SEQ ID NO: 270430 - DNA, 120 bp, Artificial Sequence
  ENSG00000127334_37 (sequence is synthesized)
ctgcttgtctttcccccaccgcacaaaactggttcttaagatgccagcaatgaatttgagactatctttatttataaatggaaaccggaaacttttataccaaactataataatgtgcag

SEQ ID NO: 270431 - DNA, 120 bp, Artificial Sequence
  ENSG00000127334_38 (sequence is synthesized)
cactgtagggcttttttttttttccctccaaatacagtgaaatttttttattcacaagagctgccacatctcagcatttagtaatagagctgctttaataaaattctagtttgattgtca

SEQ ID NO: 270432 - DNA, 120 bp, Artificial Sequence
  ENSG00000127334_39 (sequence is synthesized)
tgtcaaaaaaagaaaaatgttgcatctttgtgattttaaaacataaattaatgaaggctctgataggctattaggagttggcttggaaacagtttttggtctcacaggttaccattgttt

SEQ ID NO: 270433 - DNA, 120 bp, Artificial Sequence
  ENSG00000127334_40 (sequence is synthesized)
ggggatgtctgagctgttttcagatctaggaatagcacagtgttgtcttgtctttggcagtctcatttggctctgtttcttgcaccaccagcgtgttcattaccacttaaatatattgct

SEQ ID NO: 270434 - DNA, 120 bp, Artificial Sequence
  ENSG00000127334_41 (sequence is synthesized)
acagcagtggaacaacagagtggtgcaagacactgtagattaacggtagaggagaaattgtgcccttagtgttaacaatgtgccttttgttctgaatgccatgttgtagggcatgcattt

SEQ ID NO: 270435 - DNA, 120 bp, Artificial Sequence
  ENSG00000127334_42 (sequence is synthesized)
tttggcctctttaactcttcgaattctagtcagtaagaatggaacccatctctgcaaagatacatctgtcttaaatatctagttacaggccttaatagaaaccataaggcatgactcatc

SEQ ID NO: 270436 - DNA, 120 bp, Artificial Sequence
  ENSG00000127334_43 (sequence is synthesized)
ttcaggcactgaaaaaagataaccatcaggtagtgttacacaaggacttcctatatttaaggggttaaagatggtctttgttgtatcttaacatcagactgatttttacatttttttttt

SEQ ID NO: 270437 - DNA, 120 bp, Artificial Sequence
  ENSG00000127334_44 (sequence is synthesized)
gttatgctaacactagacaaaaatcaactgtatttgtaaaaatttacctcaaaccatttaattttatagtgtgattaatcccagggcatttggtatgaaccaaagtgcattccttttata

SEQ ID NO: 270438 - DNA, 120 bp, Artificial Sequence
  ENSG00000127334_45 (sequence is synthesized)
tgtgcctggctctagtaaggatggccagggatttttacaatttgggtgcaaggcacttaagccacttttaaacttaatgggtggtttggggtcgtgttaaatgactccatcagaatgtta

SEQ ID NO: 270439 - DNA, 120 bp, Artificial Sequence
  ENSG00000127334_46 (sequence is synthesized)
gaaaacactttaggcatcagtagcattgggccatattggaatcctaaagtgtgaattattttaaggagagcattcatttttgtaatttttttcatcaaaaatatttctggtaagcagaag

SEQ ID NO: 270440 - DNA, 120 bp, Artificial Sequence
  ENSG00000127334_47 (sequence is synthesized)
actttttaaaaaaactgatctggtctcggtaaaggttttaatattgcccaacataatgctgtaatagcattaaaaaaagtatttgtgaactctgtttcttaggggcttgtacatctctct

SEQ ID NO: 270441 - DNA, 120 bp, Artificial Sequence
  ENSG00000127334_48 (sequence is synthesized)
gctatggacatacataaaattaattgtaattatactcagctcaactgctacagttctgtctaggcagtggcttgggtttttatcgagcaacaacttagacacgtgactgtaatatgctgc

SEQ ID NO: 270442 - DNA, 120 bp, Artificial Sequence
  ENSG00000127334_49 (sequence is synthesized)
aactgtgtgtactgaaaatatgtgaaaatggttgaatgtggactgtgtatatatgtatgtaaaaatttctgtgagatgctgctgtcgccacttaacattaaatatgttctagtggatttt

SEQ ID NO: 270443 - DNA, 120 bp, Artificial Sequence
  ENSG00000127334_50 (sequence is synthesized)
aatcctagtggccagttctatgatactgtatgtattatacagctgatgacaggagtaagactgtttagtgaatatctgttaaattttattgttgtggccagagataatttcagaataaaa

SEQ ID NO: 270444 - DNA, 120 bp, Artificial Sequence
  ENSG00000127334_51 (sequence is synthesized)
ttttaatgtcctaccttacttctctcccctttctaactataatttaactcctgatctatttctggtattatcctttgtcaattagcctggagagggtttagaatgcaaaatggatagctc

SEQ ID NO: 270445 - DNA, 120 bp, Artificial Sequence
  ENSG00000127334_52 (sequence is synthesized)
tatatcagggtcttgagaagttaaaataattcattctactagtttgttcatagcaatactttattagttcaatataagtatgcagattccaagtggaaaaacaaaggttttagtaagtag

SEQ ID NO: 270446 - DNA, 120 bp, Artificial Sequence
  ENSG00000127334_53 (sequence is synthesized)
ttcttgcttttcccaggatattctattccttcacctgtcagatttttatgttaacttttttatatatagcctctgctgtgttctttattatgctagagcttcatatcttcttttatttta

SEQ ID NO: 270447 - DNA, 120 bp, Artificial Sequence
  ENSG00000127334_54 (sequence is synthesized)
accttcacaatgatagttaagctgggggagcagaacctgtcaattattccccaccagtcttcattcttttctctgcacaagttctggtaaattattctaatgtgctctaaccagttccac

SEQ ID NO: 270448 - DNA, 120 bp, Artificial Sequence
  ENSG00000127334_55 (sequence is synthesized)
ccaatgttttttaatgcttatgagtttgcagtttttgtacttggtggtctctgtggttcacatttttttgtgttgtagtgtctcctgcctcggttggctcagaaaataaggcctaggaac

SEQ ID NO: 270449 - DNA, 120 bp, Artificial Sequence
  ENSG00000127334_56 (sequence is synthesized)
tgcaattagctcatgatttgtcaagttcagttagtaccaagctaagagtttacttacagatgacagcaagcagatgctctagtaattcgtcagacattgcagggatattgtgtagtcaga

SEQ ID NO: 270450 - DNA, 120 bp, Artificial Sequence
  ENSG00000127334_57 (sequence is synthesized)
tattaccctcttgtggaaagaactacctcacatcattatttatttcccttctgttaccaacagccaaggaattacttagtgtggctccctgcatcaatactgggatatgcttaaacaagg

SEQ ID NO: 270451 - DNA, 120 bp, Artificial Sequence
  ENSG00000127334_58 (sequence is synthesized)
gaatgccataagagttcccaattgcctcgtcatagcctgggccatagatttttgttactgctaatcttgcttcttaaagttcacacccagtgcaaaaaacccaatcagcaaactaacccc

SEQ ID NO: 270452 - DNA, 120 bp, Artificial Sequence
  ENSG00000127334_59 (sequence is synthesized)
aaaatccaatatatttagaaatgtaagtgttaagagatgtgcattatgtacaaaattgaaaattggtgctaaagtggcaatgtcaatttaaaatttcttgtccagatctgactgactgac

SEQ ID NO: 270453 - DNA, 120 bp, Artificial Sequence
  ENSG00000127334_60 (sequence is synthesized)
tcaggagattatagttcctactcattctctttccttttatcagatctttcaaaagcgctttttaaaattgatcaatgtgcaattctgtttgagtctctacagtcctatcccttttggaat

SEQ ID NO: 270454 - DNA, 120 bp, Artificial Sequence
  ENSG00000127334_61 (sequence is synthesized)
gaacagctacacaaataaatattcttggaacttcgaagttgtcttcaaactagctctagaaaatgtccctagttgacattagtgttggtctgttagaaggggaaattgatttgactgctt

SEQ ID NO: 270455 - DNA, 120 bp, Artificial Sequence
  ENSG00000127334_62 (sequence is synthesized)
catgttttgaaaagagcattaagagggatttgaggaaggtatatgtggctttctttttttttcttaagtttgaattacacttgatttcctttgggttattaggcagataaacccttgtca

SEQ ID NO: 270456 - DNA, 120 bp, Artificial Sequence
  ENSG00000127334_63 (sequence is synthesized)
ttagtaatacttagcactgtccaaaatgaaaaatgactgccagtgtgttgcacatacataagaaaattacatcttactgcgaagtctttggtttgtttccttatttggtttgactttgac

SEQ ID NO: 270457 - DNA, 120 bp, Artificial Sequence
  ENSG00000127334_64 (sequence is synthesized)
ttactattttgctatggtcatatccttaatatctgcggtacatttcatatatatatatggggtgggagcataattgccattcccatgtgtctcaaggaagcttaatgaggaaactaatga

SEQ ID NO: 270458 - DNA, 120 bp, Artificial Sequence
  ENSG00000127334_65 (sequence is synthesized)
gttaatattaactcttctgaagaaagctgacattttaggagtattaagtcatctgtcgttaaggagcagcaagaatatattatgattgtatcacatgttccagaagagcattacccctta

SEQ ID NO: 270459 - DNA, 120 bp, Artificial Sequence
  ENSG00000127334_66 (sequence is synthesized)
catagaaagctccttggagatttcatgatgttggatgaacatcagtttatccttatacatccctatgagctataattatcctcatttgatacttgaggaaactgaagtgacttgctccaa

SEQ ID NO: 270460 - DNA, 120 bp, Artificial Sequence
  ENSG00000127334_67 (sequence is synthesized)
agttgactacaaaaacattgcagtttgaggcttaggttgtaatcaggtaattttggtcttggacagtaagggaaaatccataatacataaaacacaaaagtttagaaagggggggaagtt

SEQ ID NO: 270461 - DNA, 120 bp, Artificial Sequence
  ENSG00000127334_68 (sequence is synthesized)
gagctagcaatgggcatttctattatttaagttacatatcagtttccaggaatatttttcaaatgggacaaactaaaaagttgaggactagagcatcgtagtgtctaagtgcacctaata

SEQ ID NO: 270462 - DNA, 120 bp, Artificial Sequence
  ENSG00000127334_69 (sequence is synthesized)
acttaatgcatgtgcacacaccctcagttaatttgtaagagagtgacttctcattgttatttgtggagaggctaattatagtagcttcattctttattttctgtgttcttaaattttttt

SEQ ID NO: 270463 - DNA, 120 bp, Artificial Sequence
  ENSG00000127334_70 (sequence is synthesized)
ttacatttgaaagtatgaaaatactatttttgacactttactgatactcagggattaaaagttaaattttactgactgtagcagcaggtaaatctcttaaatttactcaggtttcctatc

SEQ ID NO: 270464 - DNA, 120 bp, Artificial Sequence
  ENSG00000127334_71 (sequence is synthesized)
ctttgcctccatatttaagaaaatatagaatgcctgccagggaaatatataaaaataaaaatttcaaatacaattttaaaataccaatttgtaaataaaccaattttacaaactaaaata

SEQ ID NO: 270465 - DNA, 120 bp, Artificial Sequence
  ENSG00000127334_72 (sequence is synthesized)
ttgtgtctttccttgctttttatcccaatttatctcccctcctaagtttgaggagttttatatattaaggctatttcttcatttgtaaaaatgaagtatgctatttgcaaagcaaaagcc

SEQ ID NO: 270466 - DNA, 120 bp, Artificial Sequence
  ENSG00000127334_73 (sequence is synthesized)
catgaaaagccccaaatcatttaagtaaagcttactgaattgttttcaattgttttgggagaaatgtaactaattataagcaatttatgtggaccagcagcaaataaatgtatgagtaca

SEQ ID NO: 270467 - DNA, 120 bp, Artificial Sequence
  ENSG00000127334_74 (sequence is synthesized)
ttcctccgtctttctttggaagagggttgtcgctgcccagcggggttggagggggggtctgggtgactttctcccccctgaccctcttttgtctcctcccgcacgtggcttccaggccga

SEQ ID NO: 270468 - DNA, 120 bp, Artificial Sequence
  ENSG00000127334_75 (sequence is synthesized)
tacagcatttctaagatgacttcagaaaagtttttaaacgcccaagactattatcacagtggaatatctgctgtttgccattttcttattggaagaaatgaaaactaccaaactggttag

SEQ ID NO: 270469 - DNA, 120 bp, Artificial Sequence
  ENSG00000127334_76 (sequence is synthesized)
agatgaaacgacaagtctccactggagggagagcctgtggtgcaccagaaaaggaaggatgcgaatgtgcttctcagtactcctcataatggaggcctgtattttgctgtggcatatgcc

SEQ ID NO: 270470 - DNA, 120 bp, Artificial Sequence
  ENSG00000127337_0 (sequence is synthesized)
ctcttttcgcggcgttctccacctgcgcgggcctgaatggccttcaggagcacagtcggcctgaggagttgacggttactcaccgccgtgagcccaagtaactcgccctccttcggctag

SEQ ID NO: 270471 - DNA, 120 bp, Artificial Sequence
  ENSG00000127337_1 (sequence is synthesized)
aaaccctccgcctgggcccgcgcgacaggagcgcggtctctgaggggagcggcgaccccgccagccccggtctctttccctggcggcggcggcttcttccgtgggacaatatgttcaaga

SEQ ID NO: 270472 - DNA, 120 bp, Artificial Sequence
  ENSG00000127337_2 (sequence is synthesized)
gaatggccgaatttgggcctgactccggcgggagagtaaagggtgttactatcgttaaaccaatagtttacggtaatgttgctcggtattttggaaagaaaagagaagaagatgggcaca

SEQ ID NO: 270473 - DNA, 120 bp, Artificial Sequence
  ENSG00000127337_3 (sequence is synthesized)
ctcatcagtggacagtatatgtgaaaccatatagaaatgaggatatgtcagcatatgtgaagaaaatccagtttaaattacatgaaagctatggcaatcctttaagagttgttactaaac

SEQ ID NO: 270474 - DNA, 120 bp, Artificial Sequence
  ENSG00000127337_4 (sequence is synthesized)
ctccatatgaaattactgaaacaggatggggtgaattcgaaataatcatcaaaatatttttcattgaccctaatgaaagacctgtaaccctgtatcatttgctaaagctgtttcaatcag

SEQ ID NO: 270475 - DNA, 120 bp, Artificial Sequence
  ENSG00000127337_5 (sequence is synthesized)
acaccaatgcaatgctggggaaaaagacagtggtttcagagttctatgatgaaatgatatttcaagacccaacagcaatgatgcaacaattattgacaacatctcgtcagctaacattag

SEQ ID NO: 270476 - DNA, 120 bp, Artificial Sequence
  ENSG00000127337_6 (sequence is synthesized)
agagcttgaagtgaaaaccagagaaaaattagaagctgctaagaaaaaaacaagctttgagattgcagagcttaaggagagattaaaagcaagtcgtgaaactataaattgtttaaaaaa

SEQ ID NO: 270477 - DNA, 120 bp, Artificial Sequence
  ENSG00000127337_7 (sequence is synthesized)
tgaaatcagaaaacttgaagaagatgaccaagcaaaagacatataaacagttctcatgagaacttggtagtaagctaaactgaaaataaggtgggcttcactggagaaatggacttactg

SEQ ID NO: 270478 - DNA, 120 bp, Artificial Sequence
  ENSG00000127337_8 (sequence is synthesized)
caaatgctgtgatgtttcttagaggaacttcatatacagctgttgaccatgaatttcttagcaataggaatttgtactatttaagcaatctttaatggaaaatatgtgtgtaagaatgga

SEQ ID NO: 270479 - DNA, 120 bp, Artificial Sequence
  ENSG00000127337_9 (sequence is synthesized)
tgctatataggtattttaccaacccattttaagaaaattctatgatattaagcacagtttttaaaaatgtttattgtagtatatgtatagcttattacccttttgacaggcatcaaaatt

SEQ ID NO: 270480 - DNA, 120 bp, Artificial Sequence
  ENSG00000127337_10 (sequence is synthesized)
tcattataaagtattacttgtacaaattttgtacttctttagtggctagaattagtgaagaaacttaatgtgtatatttaatttcttcaagttcttacctgcccccatccttttttgtat

SEQ ID NO: 270481 - DNA, 120 bp, Artificial Sequence
  ENSG00000127337_11 (sequence is synthesized)
atgatgtgtccagtaagtattcaataaatgtagtttacagatcctatttctccctcctgatgtgtttcttcctctttgaagactttctggaactccctcaatacagttaaagtatcttta

SEQ ID NO: 270482 - DNA, 120 bp, Artificial Sequence
  ENSG00000127362_0 (sequence is synthesized)
tcagtgaggagattctatgtatcaacagaaagaacaaagatcagggctgcctaattgctgacatgatgggactcaccgagggggtgttcctgattctgtctggcactcagttcacactgg

SEQ ID NO: 270483 - DNA, 120 bp, Artificial Sequence
  ENSG00000127362_1 (sequence is synthesized)
gaattctggtcaattgtttcattgagttggtcaatggtagcagctggttcaagaccaagagaatgtctttgtctgacttcatcatcaccaccctggcactcttgaggatcattctgctgt

SEQ ID NO: 270484 - DNA, 120 bp, Artificial Sequence
  ENSG00000127362_2 (sequence is synthesized)
gtattatcttgactgatagttttttaatagaattctctcccaacacacatgattcagggataataatgcaaattattgatgtttcctggacatttacaaaccatctgagcatttggcttg

SEQ ID NO: 270485 - DNA, 120 bp, Artificial Sequence
  ENSG00000127362_3 (sequence is synthesized)
ccacctgtcttggtgtcctctactgcctgaaaatcgccagtttctctcaccccacattcctctggctcaagtggagagtttctagggtgatggtatggatgctgttgggtgcactgctct

SEQ ID NO: 270486 - DNA, 120 bp, Artificial Sequence
  ENSG00000127362_4 (sequence is synthesized)
ctctgatcaatgagtttaagctctattctgtctttaggggaattgaggccaccaggaatgtgactgaacacttcagaaagaagaggagtgagtattatctgatccatgttcttgggactc

SEQ ID NO: 270487 - DNA, 120 bp, Artificial Sequence
  ENSG00000127362_5 (sequence is synthesized)
tgtggtacctgcctcccttaattgtgtccctggcctcctactctttgctcatcttctccctggggaggcacacacggcagatgctgcaaaatgggacaagctccagagatccaaccactg

SEQ ID NO: 270488 - DNA, 120 bp, Artificial Sequence
  ENSG00000127362_6 (sequence is synthesized)
aggcccacaagagggccatcagaatcatcctttccttcttctttctcttcttactttactttcttgctttcttaattgcatcatttggtaatttcctaccaaaaaccaagatggctaaga

SEQ ID NO: 270489 - DNA, 120 bp, Artificial Sequence
  ENSG00000127362_7 (sequence is synthesized)
tgattggcgaagtaatgacaatgttttatcctgctggccactcatttattctcattctggggaacagtaagctgaagcagacatttgtagtgatgctccggtgtgagtctggtcatctga

SEQ ID NO: 270490 - DNA, 120 bp, Artificial Sequence
  ENSG00000127362_8 (sequence is synthesized)
agcctggatccaagggacccattttctcttagagtaacagagggcatggggtggagcccttgagccttttggcctggctcaagactacaggactcttcctgaccttcctatgttaccagt

SEQ ID NO: 270491 - DNA, 120 bp, Artificial Sequence
  ENSG00000127364_0 (sequence is synthesized)
tgcctccactatcagcaccacaactgctgaatcctcaatgagtaaagatgcttcggttattctatttctctgctattattgcctcagttattttaaattttgtaggaatcattatgaatc

SEQ ID NO: 270492 - DNA, 120 bp, Artificial Sequence
  ENSG00000127364_1 (sequence is synthesized)
tgtttattacagtggtcaattgcaaaacttgggtcaaaagccatagaatctcctcttctgataggattctgttcagcctgggcatcaccaggtttcttatgctgggactatttctggtga

SEQ ID NO: 270493 - DNA, 120 bp, Artificial Sequence
  ENSG00000127364_2 (sequence is synthesized)
acaccatctacttcgtctcttcaaatacggaaaggtcagtctacctgtctgctttttttgtgttgtgtttcatgtttttggactcgagcagtgtctggtttgtgaccttgctcaatatct

SEQ ID NO: 270494 - DNA, 120 bp, Artificial Sequence
  ENSG00000127364_3 (sequence is synthesized)
tgtactgtgtgaagattactaacttccaacactcagtgtttctcctgctgaagcggaatatctccccaaagatccccaggctgctgctggcctgtgtgctgatttctgctttcaccactt

SEQ ID NO: 270495 - DNA, 120 bp, Artificial Sequence
  ENSG00000127364_4 (sequence is synthesized)
gcctgtacatcacgcttagccaggcatcaccttttcctgaacttgtgactacgagaaataacacatcatttaatatcagtgagggcatcttgtctttagtggtttctttggtcttgagct

SEQ ID NO: 270496 - DNA, 120 bp, Artificial Sequence
  ENSG00000127364_5 (sequence is synthesized)
catctctccagttcatcattaatgtgacttctgcttccttgctaatacactccttgaggagacatatacagaagatgcagaaaaatgccactggtttctggaatccccagacggaagctc

SEQ ID NO: 270497 - DNA, 120 bp, Artificial Sequence
  ENSG00000127364_6 (sequence is synthesized)
atgtaggtgctatgaagctgatggtctatttcctcatcctctacattccatattcagttgctaccctggtccagtatctccccttttatgcagggatggatatggggaccaaatccattt

SEQ ID NO: 270498 - DNA, 120 bp, Artificial Sequence
  ENSG00000127364_7 (sequence is synthesized)
gtctgatttttgccaccctttactctccaggacattctgttctcattattatcacacatcctaaactgaaaacaacagcaaagaagattctttgtttcaaaaaatagtggaatttcagta

SEQ ID NO: 270499 - DNA, 120 bp, Artificial Sequence
  ENSG00000127364_8 (sequence is synthesized)
aacaatacctagatttacctgatggtttgggggcaagattttctgtttgcagttttcccagtgatctggggaattcagttttgtgattgctgatctgacatcataggcttttgagtgcct

SEQ ID NO: 270500 - DNA, 120 bp, Artificial Sequence
  ENSG00000127364_9 (sequence is synthesized)
gtattttgcatggccattgaatccatgtataatggaaatcatcacattgtttcattgtctattgaagtataatgggaaattcttccaaattagagaacacattggggtgcacgtgatgag

SEQ ID NO: 270501 - DNA, 120 bp, Artificial Sequence
  ENSG00000127364_10 (sequence is synthesized)
ttagatatttgtggtttagctgaggagccctgagtaagggctcagcagtggataggtggtcactgggagccactggactgaccgaaagcagaggaagggggttcagtgcaaagagaaaag

SEQ ID NO: 270502 - DNA, 120 bp, Artificial Sequence
  ENSG00000127364_11 (sequence is synthesized)
gggggttcagtgcaaagagaaaaggaaaaaaggaaggtttcagagagaaaagaaggaaagagaaaggtgaagagaaataggcgtacactgggccaggcgcggtggctcatgcttgtaatc

SEQ ID NO: 270503 - DNA, 120 bp, Artificial Sequence
  ENSG00000127364_12 (sequence is synthesized)
agacgtacactctgggacaagacagaaaaagtatcctcacacttgctgggtaatagtaactgtgctattcctagcaagaaaccctaaggtttctaggcttgttctggaaaagaggatatt

SEQ ID NO: 270504 - DNA, 120 bp, Artificial Sequence
  ENSG00000127364_13 (sequence is synthesized)
gccagagttggtaagtagaggaaagtgattagtatttaagaaactgaatcaagaatggttccaaaaatcttaaaatccagggaaaccagcttaaggtcaaaggcaagtgctagataatga

SEQ ID NO: 270505 - DNA, 120 bp, Artificial Sequence
  ENSG00000127364_14 (sequence is synthesized)
aattaacaccatatgagtacaaatttacaaaatactgtacttcaccataggctatggaactcagtggaaagccaaaaaagcactggacaggtggtgggagtgcttgacttgtggtgaatt

SEQ ID NO: 270506 - DNA, 120 bp, Artificial Sequence
  ENSG00000127364_15 (sequence is synthesized)
tatttcatctgcttatacatttgtacacagcacagttcttctccagaatgttgtttctgtggctgggaccattggactgtggctccaaaagaacaacagtctgaagatgggatgttgaca

SEQ ID NO: 270507 - DNA, 120 bp, Artificial Sequence
  ENSG00000127364_16 (sequence is synthesized)
agttttggaatgtcaattggggaatcataatttgtatttatttaggttttttttggtgttcataaaatgcttatgtaatatttacatatgtcaaataaatcttaaaattttataaattac

SEQ ID NO: 270508 - DNA, 120 bp, Artificial Sequence
  ENSG00000127366_0 (sequence is synthesized)
cagctgttcagtctcgcttgaagacagattacggaaggacgaggccaaatccagattttgtggtgtgaaaatttaccctggtgtgttatcactaccaggggatctgacctcagccaggag

SEQ ID NO: 270509 - DNA, 120 bp, Artificial Sequence
  ENSG00000127366_1 (sequence is synthesized)
cagtgagagcctcctctccccagccatgctgagcgctggcctaggactgctgatgctggtggcagtggttgaatttctcatcggtttaattggaaatggaagcctggtggtctggagttt

SEQ ID NO: 270510 - DNA, 120 bp, Artificial Sequence
  ENSG00000127366_2 (sequence is synthesized)
tagagaatggatcagaaaattcaactggtcctcatataacctcattatcctgggcctggctggctgccgatttctcctgcagtggctgatcattttggacttaagcttgtttccactttt

SEQ ID NO: 270511 - DNA, 120 bp, Artificial Sequence
  ENSG00000127366_3 (sequence is synthesized)
ccagagcagccgttggcttcgctatcttagtatcttctgggtcctggtaagccaggccagcttatggtttgccaccttcctcagtgtcttctattgcaagaagatcacgaccttcgatcg

SEQ ID NO: 270512 - DNA, 120 bp, Artificial Sequence
  ENSG00000127366_4 (sequence is synthesized)
tcaatttgttacttacagtccaaattggcttaacattctatcatcctccccaaggaaacagcagcattcggtatccctttgaaagctggcagtacctgtatgcatttcagctcaattcag

SEQ ID NO: 270513 - DNA, 120 bp, Artificial Sequence
  ENSG00000127366_5 (sequence is synthesized)
gaagttatttgcctttagtggtgtttcttgtttcctctgggatgctgattgtctctttgtatacacaccacaagaagatgaaggtccattcagctggtaggagggatgtccgggccaagg

SEQ ID NO: 270514 - DNA, 120 bp, Artificial Sequence
  ENSG00000127366_6 (sequence is synthesized)
ctcacatcactgcgctgaagtccttgggctgcttcctcttacttcacctggtttatatcatggccagccccttctccatcacctccaagacttatcctcctgatctcaccagtgtcttca

SEQ ID NO: 270515 - DNA, 120 bp, Artificial Sequence
  ENSG00000127366_7 (sequence is synthesized)
tctgggagacactcatggcagcctatccttctcttcattctctcatattgatcatggggattcctagggtgaagcagacttgtcagaagatcctgtggaagacagtgtgtgctcggagat

SEQ ID NO: 270516 - DNA, 120 bp, Artificial Sequence
  ENSG00000127366_8 (sequence is synthesized)
gctggggcccatgatctgggaagaaaagtgtggtcaggacactcttgggacgctcttttgatagctctctataagggagctgctttccatgtcttttaagattttccttcttttacacca

SEQ ID NO: 270517 - DNA, 120 bp, Artificial Sequence
  ENSG00000127377_0 (sequence is synthesized)
ggcttagcacgcccgacagcactaacgctccggggccggcccagcaaatcttttgtccggggcggcgctgagccagcagggcgctgcccggtgtaaacggggacccgcggaaggggcggg

SEQ ID NO: 270518 - DNA, 120 bp, Artificial Sequence
  ENSG00000127377_1 (sequence is synthesized)
gcgcaccatggcgcagcgctcggggaagatcactctctatgaaggcaagcacttcacagggcagaagctggaggtcttcggggactgtgacaacttccaggaccggggctttatgaaccg

SEQ ID NO: 270519 - DNA, 120 bp, Artificial Sequence
  ENSG00000127377_2 (sequence is synthesized)
agtgaactccatccacgtggagagcggagcctgggtctgcttcaatcaccccgacttccggggccagcagttcatcttggagcacggcgactaccccgacttcttccgctggaacagcca

SEQ ID NO: 270520 - DNA, 120 bp, Artificial Sequence
  ENSG00000127377_3 (sequence is synthesized)
gaatgcacggagaacatttccgcctagaaatcttcgagggttgcaacttcacgggccagtgcctggagttcctggaggacagccccttcctccagagcaggggctgggtcaagaactgtg

SEQ ID NO: 270521 - DNA, 120 bp, Artificial Sequence
  ENSG00000127377_4 (sequence is synthesized)
tgaacaccatcaaggtgtacggggacggagcgtgggtcctgtatgaggagcccaactaccacggccgcatgtacgtggtggagagtggcgacttccgcagcttctcggactgggaggccc

SEQ ID NO: 270522 - DNA, 120 bp, Artificial Sequence
  ENSG00000127377_5 (sequence is synthesized)
acagcgcacgagtgcagtcgctccacaagagcatggagccctagaagcttcggagctgaggacttccagctgagcagctctcttcaatcagatcaaggaccggaagaggccaccacaaaa

SEQ ID NO: 270523 - DNA, 120 bp, Artificial Sequence
  ENSG00000127377_6 (sequence is synthesized)
ccagcaacaacccagccacctttcctgactgcaaacctctgagcctggaaccgattgacatgtaaatgcacctgcaccgtttctgagccgggagagtgtttacttaaaatcatgccctca

SEQ ID NO: 270524 - DNA, 120 bp, Artificial Sequence
  ENSG00000127377_7 (sequence is synthesized)
ctgtctgccaagtgctcgttctgggccctggggaactctccctccgcggtggggctgctttgtgctgtaaactgatcctgggcgtccagggtggcttagttggtgcagcagagaggcaag

SEQ ID NO: 270525 - DNA, 120 bp, Artificial Sequence
  ENSG00000127377_8 (sequence is synthesized)
gggcagagcactgtacccccagctcagggcagcgcgggtcacctggtcaccctaggcaggatcttcaaggagagagggacccagggagggagagtgccagggagggaggcaggcaggaag

SEQ ID NO: 270526 - DNA, 120 bp, Artificial Sequence
  ENSG00000127377_9 (sequence is synthesized)
agagcgggaggagggaggcctgacctggcctggcgttttgtggggtgtgggggggtgcatcaggagctgggtgagttggagccggaggtctaaggtggggacctgggagctcagaccaga

SEQ ID NO: 270527 - DNA, 120 bp, Artificial Sequence
  ENSG00000127377_10 (sequence is synthesized)
gcagccaggggaggggcggtcaagggctgtctgtctgtccggggaagcttgggttgcatcctcgtggagacaaacaagttggcaccaaggcgagactacctgcagccagatcactctcta

SEQ ID NO: 270528 - DNA, 120 bp, Artificial Sequence
  ENSG00000127377_11 (sequence is synthesized)
gagtgggcccgtccaccgaaggctgagtcttcctgctggagggaccgagggtcagccctggcagacagtggcaaggaatcggggagcgtggtcctcccggctttaaagtctgtaagactg

SEQ ID NO: 270529 - DNA, 120 bp, Artificial Sequence
  ENSG00000127377_12 (sequence is synthesized)
tgccagcgggaggccctccccacccatggcaagggccctgtctcttctgaaacagccgtccaaccctccaccccacagcctccttgggccttggcaccctgctggcctcaggcctccaca

SEQ ID NO: 270530 - DNA, 120 bp, Artificial Sequence
  ENSG00000127377_13 (sequence is synthesized)
atctcgcacctcagcccacagctgatgatggtgatgatgttgatgaatatttatggagcactgacttaatgccaggctctgtagtagctggaatctgtgtaattttacttatcatataca

SEQ ID NO: 270531 - DNA, 120 bp, Artificial Sequence
  ENSG00000127377_14 (sequence is synthesized)
ataatgccaagatgatatgcttatcaccactgtacagttgaggagagccagccacagacaggttaagcaacttgcccagggtcacacagcagtcaggactaaaacccaggtctggctggc

SEQ ID NO: 270532 - DNA, 120 bp, Artificial Sequence
  ENSG00000127377_15 (sequence is synthesized)
tgattgatccttttcgttcctaaccactcctctatagagcaccacacatttgcatatttagatatatttttgtcatgaatttggcgcaaacccaaagcctctccaggcctcagaccctgt

SEQ ID NO: 270533 - DNA, 120 bp, Artificial Sequence
  ENSG00000127377_16 (sequence is synthesized)
tctgtgaaatgagtgcaatcatgtctgctgtaccaactgtatacccttgtaaaagccaaaggcgtgacccatgagcgggtgccatatgagggctggttagtagtaggtgacccagtaggt

SEQ ID NO: 270534 - DNA, 120 bp, Artificial Sequence
  ENSG00000127377_17 (sequence is synthesized)
gacggggtggggaagcaggcaggggagtggcatcacaggagagaaggtaacttggctccaaactccaacctgattcccactccatccctcactaggatgtgacattggagaagccactgc

SEQ ID NO: 270535 - DNA, 120 bp, Artificial Sequence
  ENSG00000127377_18 (sequence is synthesized)
tgtgtgtctcagtgtcttcagacgtacagcagtggtaatcattccgccccctcataggcaattaatgcctggggaatgaaatgagaactgcaggccccaccggttcagtccaggtccttg

SEQ ID NO: 270536 - DNA, 120 bp, Artificial Sequence
  ENSG00000127377_19 (sequence is synthesized)
ggagtcacgggaaaaaccaggcctagcagcccttcccatgagttccagaggcttcccctgaactcttcctctcctccccagcaccaaggcttagcagcatctcattaactggtgatttaa

SEQ ID NO: 270537 - DNA, 120 bp, Artificial Sequence
  ENSG00000127377_20 (sequence is synthesized)
tgcttctcgaatgggctttgtgctcctgggtgacctccccctcaccccagccccctgctccctaatctgtcagcaaatctgctttttgtctgaaagaggaaaaacaagattcccaccaaa

SEQ ID NO: 270538 - DNA, 120 bp, Artificial Sequence
  ENSG00000127377_21 (sequence is synthesized)
cctcaaagccaacgggcggcttctgagtgctctctcggcagtgggcatcccagccctgggaggagctggatgatccagggcgctttcccggactcccagggaccccctgggccagggagg

SEQ ID NO: 270539 - DNA, 120 bp, Artificial Sequence
  ENSG00000127377_22 (sequence is synthesized)
ggagagtggtggggagaggtggtgagaagcaatggggatggggcagggccggaacccaggccggttcaggactccccaggctcgcttggggctctgcctctctgtgactcggcaaggtga

SEQ ID NO: 270540 - DNA, 120 bp, Artificial Sequence
  ENSG00000127399_0 (sequence is synthesized)
gcaggctgcgcttccggaagtaacccctggcgcatcccggaatccagagcgcccactacggcctttggccaggccccctgggcgcgttccgggagctcaggcctgcggcgctgggagaag

SEQ ID NO: 270541 - DNA, 120 bp, Artificial Sequence
  ENSG00000127399_1 (sequence is synthesized)
gaagcacgctggccaacaagttgggtggtgggcacgcggcccaggggtcaggggccgccaggcggcgggcggcggggctgcggctcttacctgccgaggaggcgccggctctgcggtgcg

SEQ ID NO: 270542 - DNA, 120 bp, Artificial Sequence
  ENSG00000127399_2 (sequence is synthesized)
tgcgccggacttcccagcttggccagtggctccgcaggctgccggctccacccctcagggactggctggcttcgagcagggcatcggaaccaggcctcctggcactggcctgggtagagc

SEQ ID NO: 270543 - DNA, 120 bp, Artificial Sequence
  ENSG00000127399_3 (sequence is synthesized)
cagggcgagcaccagctgacccccagtggaaccctgtgacagtcctgccagggcccaggccatcccaaccgacttccatctcatggaccctccagcggagaagccgggagaggctggcgg

SEQ ID NO: 270544 - DNA, 120 bp, Artificial Sequence
  ENSG00000127399_4 (sequence is synthesized)
actgcagatcacaccccagctgctgaagtcacgcacaggcgagttctccctggagtccatcctgctactgaagctgcgtggcttgggactggctgacctgggctgcctgggagagtgcct

SEQ ID NO: 270545 - DNA, 120 bp, Artificial Sequence
  ENSG00000127399_5 (sequence is synthesized)
gggcctggagtggctggacctatcaggcaacgcgctcacccacctgggcccgctggcctccttgcgccagctagctgtgctcaatgtctccaacaatcggctgacgggcctggagccact

SEQ ID NO: 270546 - DNA, 120 bp, Artificial Sequence
  ENSG00000127399_6 (sequence is synthesized)
ggccacctgtgagaacttgcagagtctcaatgccgcaggcaacctactggccaccccgggccagctgcagtgtctggctgggctaccgtgcctggagtacctgcggctccgagacccttt

SEQ ID NO: 270547 - DNA, 120 bp, Artificial Sequence
  ENSG00000127399_7 (sequence is synthesized)
cggctcagcaacccgctctgtgccaacccctcctactgggctgcagtccgggagctgctgcctggcctgaaagtcatcgacggtgagcgtgtgattgggcgtggtagtgagttctaccag

SEQ ID NO: 270548 - DNA, 120 bp, Artificial Sequence
  ENSG00000127399_8 (sequence is synthesized)
ctgtgccgagacctggacagctccttgcgtcccagctccagtccaggccccagagccaccgaggcccagccctgggtggagccaggctactgggagtcctggcccagccggagcagctcc

SEQ ID NO: 270549 - DNA, 120 bp, Artificial Sequence
  ENSG00000127399_9 (sequence is synthesized)
atcctggaggaggcctgccggcagttccaggacacactgcaggagtgctgggacctggaccgccaggccagcgacagcctggcccaggcggagcaggtactcagctctgcgggccccacc

SEQ ID NO: 270550 - DNA, 120 bp, Artificial Sequence
  ENSG00000127399_10 (sequence is synthesized)
tcttccttcgtcttctgaacgtggcctatggcccaggacagcctggcaggtggcctcgctgcccccagttcccctctctgcccccacactcgtcttagttgcttcacactggtcactggc

SEQ ID NO: 270551 - DNA, 120 bp, Artificial Sequence
  ENSG00000127399_11 (sequence is synthesized)
cctgcacactgggctattgctttatccctatcctgagagcagcccctccccaccatccctccacatgctgcaaggacagactgaagggctgtgagcaggtgtaagggctcccacatccgt

SEQ ID NO: 270552 - DNA, 120 bp, Artificial Sequence
  ENSG00000127399_12 (sequence is synthesized)
gagcctgtgtccgcagctgctgccactctgggctgctccagcctgcaacttagtggaaggaattacttcctcctgaggctacaggcgagaaaggtagggatgggccagcctcccgtctca

SEQ ID NO: 270553 - DNA, 120 bp, Artificial Sequence
  ENSG00000127399_13 (sequence is synthesized)
gctgttgggagacagtaggcaggctgagtggcccagagcactcctggaagtgggactcccctgccttgcaaatgtgcctctccagactgctcctgcacttaccccctccccgcagcacct

SEQ ID NO: 270554 - DNA, 120 bp, Artificial Sequence
  ENSG00000127399_14 (sequence is synthesized)
ccagctgcactgtcatcctaaagtacttctgtggaagagaacatggtggtgtcactgttgtaccagtgatgacacaaaatcccagatctacctgacgggcctgcgagggttgaagattgt

SEQ ID NO: 270555 - DNA, 120 bp, Artificial Sequence
  ENSG00000127399_15 (sequence is synthesized)
gctccgcaggctgccggctccacccctcaggcacaagagaagtagaagagtggccgctttccttctgggcacgcacttgggaaaaggcttgattcatttggattcaaggttggctctcaa

SEQ ID NO: 270556 - DNA, 120 bp, Artificial Sequence
  ENSG00000127412_0 (sequence is synthesized)
agtcccctcagcgcacctgcatgcacacacaccacctcacaaccacacactgcatgcacacacatacaccacagccacacactgtgcatacacgcacaccccacaacccacatactgcat

SEQ ID NO: 270557 - DNA, 120 bp, Artificial Sequence
  ENSG00000127412_1 (sequence is synthesized)
gcacacacacacacctacaagctgcatgctgcatacacaagtcatacaggagataaactcagagtcccagccccaaatagaccccatctcttgctcagttgctgtcatcctagacctgtt

SEQ ID NO: 270558 - DNA, 120 bp, Artificial Sequence
  ENSG00000127412_2 (sequence is synthesized)
tctttcgccacatttctataatctgccagtgtctgcaaggagaagacatggggggttttctacctaaggcagaagggcccgggagccaactccagaaacttctgccctcctttctggtca

SEQ ID NO: 270559 - DNA, 120 bp, Artificial Sequence
  ENSG00000127412_3 (sequence is synthesized)
gagaacaagactgggaccagcacctggacaagcttcatatgctgcagcagaagaggattctagagtctccactgcttcgagcatccaaggaaaatgacctgtctgttcttaggcaacttc

SEQ ID NO: 270560 - DNA, 120 bp, Artificial Sequence
  ENSG00000127412_4 (sequence is synthesized)
tactggactgcacctgtgacgttcgacaaagaggagccctgggggagacggcgctgcacatagcagccctctatgacaacttggaggcggccttggtgctgatggaggctgccccagagc

SEQ ID NO: 270561 - DNA, 120 bp, Artificial Sequence
  ENSG00000127412_5 (sequence is synthesized)
tggtctttgagcccaccacatgtgaggcttttgcaggtcagactgcactgcacatcgctgttgtgaaccagaatgtgaacctggtgcgtgccctgctcacccgcagggccagtgtctctg

SEQ ID NO: 270562 - DNA, 120 bp, Artificial Sequence
  ENSG00000127412_6 (sequence is synthesized)
ccagagccacaggcactgccttccgccatagtccccgcaacctcatctactttggggagcaccctttgtcctttgctgcctgtgtgaacagcgaggagatcgtgcggctgctcattgagc

SEQ ID NO: 270563 - DNA, 120 bp, Artificial Sequence
  ENSG00000127412_7 (sequence is synthesized)
atggagctgacatcagggcccaggactccctgggaaacacagtattacacatcctcatcctccagcccaacaaaacctttgcctgccagatgtacaacctgctgctgtcctatgatggac

SEQ ID NO: 270564 - DNA, 120 bp, Artificial Sequence
  ENSG00000127412_8 (sequence is synthesized)
atggggaccacctgcagcccctggaccttgtgcccaatcaccagggtctcacccccttcaagctggctggagtggagggtaacactgtgatgttccagcacctgatgcagaagcggaggc

SEQ ID NO: 270565 - DNA, 120 bp, Artificial Sequence
  ENSG00000127412_9 (sequence is synthesized)
acatccagtggacgtatggacccctgacctccattctctacgacctcacggagatcgactcctggggagaggagctgtccttcctggagcttgtggtctcctctgataaacgagaggctc

SEQ ID NO: 270566 - DNA, 120 bp, Artificial Sequence
  ENSG00000127412_10 (sequence is synthesized)
gccaaattctggaacagaccccagtgaaggagctggtgagcttcaagtggaacaagtatggccggccgtacttctgcatcctggctgccttgtacctgctctacatgatctgctttacta

SEQ ID NO: 270567 - DNA, 120 bp, Artificial Sequence
  ENSG00000127412_11 (sequence is synthesized)
cgtgctgcgtctaccgcccccttaagtttcgtggtggcaaccgcactcattctcgagacatcaccatcctccagcaaaaactactacaggaggcctatgagacacgtgaagatatcatca

SEQ ID NO: 270568 - DNA, 120 bp, Artificial Sequence
  ENSG00000127412_12 (sequence is synthesized)
ggagctggtgagcatcgttggggctgtgatcatcctgctcctagagattccagacatcttcagggttggtgcctctcgctattttggaaagacgattcttggggggccattccatgtcat

SEQ ID NO: 270569 - DNA, 120 bp, Artificial Sequence
  ENSG00000127412_13 (sequence is synthesized)
catcatcacctatgcctccctggtgctggtgaccatggtgatgcggctcaccaacaccaatggggaggtggtgcccatgtcctttgccctggtgctgggctggtgcagtgtcatgtattt

SEQ ID NO: 270570 - DNA, 120 bp, Artificial Sequence
  ENSG00000127412_14 (sequence is synthesized)
cactcgaggattccagatgctgggtcccttcaccatcatgatccagaagatgatttttggagacctaatgcgtttctgctggctgatggctgtggtcatcttgggatttgcctccgcgtt

SEQ ID NO: 270571 - DNA, 120 bp, Artificial Sequence
  ENSG00000127412_15 (sequence is synthesized)
ctatatcattttccagacagaggacccaaccagtctggggcaattctatgactaccccatggcactgttcaccacctttgagctttttctcactgttattgatgcacctgccaactacga

SEQ ID NO: 270572 - DNA, 120 bp, Artificial Sequence
  ENSG00000127412_16 (sequence is synthesized)
cgtggacttgcccttcatgttcagcattgtcaacttcgccttcaccatcattgccacactgctcatgctcaacttgttcatcgccatgatgggcgacacccactggagggtggcccagga

SEQ ID NO: 270573 - DNA, 120 bp, Artificial Sequence
  ENSG00000127412_17 (sequence is synthesized)
gagggatgagctctggagggcccaggtcgtggccaccacagtgatgctggagcggaagctgcctcgctgcctgtggcctcgctccgggatctgtgggtgcgaattcgggctgggggaccg

SEQ ID NO: 270574 - DNA, 120 bp, Artificial Sequence
  ENSG00000127412_18 (sequence is synthesized)
ctggttcctgcgggttgagaaccacaatgatcagaatcctctgcgagtgcttcgctatgtggaagtgttcaagaactcagacaaggaggatgaccaggagcatccatctgagaaacagcc

SEQ ID NO: 270575 - DNA, 120 bp, Artificial Sequence
  ENSG00000127412_19 (sequence is synthesized)
ctctggggctgagagtgggactctagccagagcctctttggctcttccaacttcctccctgtcccggaccgcgtcccagagcagcagtcaccgaggctgggagatccttcgtcaaaacac

SEQ ID NO: 270576 - DNA, 120 bp, Artificial Sequence
  ENSG00000127412_20 (sequence is synthesized)
cctggggcacttgaatcttggactgaaccttagtgagggggatggagaggaggtctaccatttttgattaacatcgctatcactcttgaccttactcccggttggcctgggggcggggac

SEQ ID NO: 270577 - DNA, 120 bp, Artificial Sequence
  ENSG00000127412_21 (sequence is synthesized)
agagacggagacctctgcctatgcaagtgtctaacttctgtgcctgttaatcatgggagggtgagacagaacaatccctaaagggtcatgcctcacacttcacatcagaatttctggcaa

SEQ ID NO: 270578 - DNA, 120 bp, Artificial Sequence
  ENSG00000127412_22 (sequence is synthesized)
tgggcaatggtcatcgattgtctcacgtattttctgggctcttgcaagtcacccatctcaggaaaaaggaggttggcaactaaagacatgaggcagggatgctagattaatgtcaggacc

SEQ ID NO: 270579 - DNA, 120 bp, Artificial Sequence
  ENSG00000127412_23 (sequence is synthesized)
atttctcttctgccccacgcagcccctagaaagtagtaagctgtgaggcttttctggctccccagggcttacgtgggaagagccaggcatggcatagaggttgtggcccttctttttttc

SEQ ID NO: 270580 - DNA, 120 bp, Artificial Sequence
  ENSG00000127412_24 (sequence is synthesized)
aaggggatgagagagaattgcatcaaggggtgatggtgctggaaacgaagccatgctactcagggacgatgccacgctctgggttccagcaggtgtaggctcctaaacacccaggtagaa

SEQ ID NO: 270581 - DNA, 120 bp, Artificial Sequence
  ENSG00000127412_25 (sequence is synthesized)
attagacatgagaccaggaggccacagatggggtttaatgagcacaagagcatttgtccagggagctgtggattttctcacacaaactttgaaagagtgcttggcatgagtaagcctgtg

SEQ ID NO: 270582 - DNA, 120 bp, Artificial Sequence
  ENSG00000127412_26 (sequence is synthesized)
cttttgtgaaattttttggtaatttacaaaaagtatcagggttttttagtgggatgttcaaggtaaactctattgctcaaaaggaggaaaattgtgctccaagtccatttctgagtccat

SEQ ID NO: 270583 - DNA, 120 bp, Artificial Sequence
  ENSG00000127412_27 (sequence is synthesized)
ttttgttgtatttgggcaacacagacagccctgctggcctgcaccctcttctgtgtgctgtctatatgggcccatgggaataatgtgtcagctgtctgactgcctgtcagacactctgca

SEQ ID NO: 270584 - DNA, 120 bp, Artificial Sequence
  ENSG00000127412_28 (sequence is synthesized)
gaaggatgtctggattgggtatcaggctgaagtaaatactctctgaggctccatttagtgttgtgggcctgccattctgtgttgtggtggccaagggaaaactagggttaggaagaggac

SEQ ID NO: 270585 - DNA, 120 bp, Artificial Sequence
  ENSG00000127412_29 (sequence is synthesized)
tgattcgaggtacacagtaaatatagaaatctgctgttgaagaaagtaaacctcctttttgtgcaacagaaagggtagactctaatgagcacttctgaatatatatatttaacaactgta

SEQ ID NO: 270586 - DNA, 120 bp, Artificial Sequence
  ENSG00000127415_0 (sequence is synthesized)
gtcacatggggtgcgcgcccagactccgacccggaggcggaaccggcagtgcagcccgaagccccgcagtccccgagcacgcgtggccatgcgtcccctgcgcccccgcgccgcgctgct

SEQ ID NO: 270587 - DNA, 120 bp, Artificial Sequence
  ENSG00000127415_1 (sequence is synthesized)
cggtggccccggccgaggccccgcacctggtgcatgtggacgcggcccgcgcgctgtggcccctgcggcgcttctggaggagcacaggcttctgccccccgctgccacacagccaggctg

SEQ ID NO: 270588 - DNA, 120 bp, Artificial Sequence
  ENSG00000127415_2 (sequence is synthesized)
cttctgccccccgctgccacacagccaggctgaccagtacgtcctcagctgggaccagcagctcaacctcgcctatgtgggcgccgtccctcaccgcggcatcaagcaggtccggaccca

SEQ ID NO: 270589 - DNA, 120 bp, Artificial Sequence
  ENSG00000127415_3 (sequence is synthesized)
ctggctgctggagcttgtcaccaccagggggtccactggacggggcctgagctacaacttcacccacctggacgggtacctggaccttctcagggagaaccagctcctcccagggtttga

SEQ ID NO: 270590 - DNA, 120 bp, Artificial Sequence
  ENSG00000127415_4 (sequence is synthesized)
gctgatgggcagcgcctcgggccacttcactgactttgaggacaagcagcaggtgtttgagtggaaggacttggtctccagcctggccaggagatacatcggtaggtacggactggcgca

SEQ ID NO: 270591 - DNA, 120 bp, Artificial Sequence
  ENSG00000127415_5 (sequence is synthesized)
tgtttccaagtggaacttcgagacgtggaatgagccagaccaccacgactttgacaacgtctccatgaccatgcaaggcttcctgaactactacgatgcctgctcggagggtctgcgcgc

SEQ ID NO: 270592 - DNA, 120 bp, Artificial Sequence
  ENSG00000127415_6 (sequence is synthesized)
cgccagccccgccctgcggctgggaggccccggcgactccttccacaccccaccgcgatccccgctgagctggggcctcctgcgccactgccacgacggtaccaacttcttcactgggga

SEQ ID NO: 270593 - DNA, 120 bp, Artificial Sequence
  ENSG00000127415_7 (sequence is synthesized)
ggcgggcgtgcggctggactacatctccctccacaggaagggtgcgcgcagctccatctccatcctggagcaggagaaggtcgtcgcgcagcagatccggcagctcttccccaagttcgc

SEQ ID NO: 270594 - DNA, 120 bp, Artificial Sequence
  ENSG00000127415_8 (sequence is synthesized)
ggacacccccatttacaacgacgaggcggacccgctggtgggctggtccctgccacagccgtggagggcggacgtgacctacgcggccatggtggtgaaggtcatcgcgcagcatcagaa

SEQ ID NO: 270595 - DNA, 120 bp, Artificial Sequence
  ENSG00000127415_9 (sequence is synthesized)
ccttcccctacgcgctcctgagcaacgacaatgccttcctgagctaccacccgcaccccttcgcgcagcgcacgctcaccgcgcgcttccaggtcaacaacacccgcccgccgcacgtgc

SEQ ID NO: 270596 - DNA, 120 bp, Artificial Sequence
  ENSG00000127415_10 (sequence is synthesized)
agctgttgcgcaagccggtgctcacggccatggggctgctggcgctgctggatgaggagcagctctgggccgaagtgtcgcaggccgggaccgtcctggacagcaaccacacggtgggcg

SEQ ID NO: 270597 - DNA, 120 bp, Artificial Sequence
  ENSG00000127415_11 (sequence is synthesized)
cagcaaccacacggtgggcgtcctggccagcgcccaccgcccccagggcccggccgacgcctggcgcgccgcggtgctgatctacgcgagcgacgacacccgcgcccaccccaaccgcag

SEQ ID NO: 270598 - DNA, 120 bp, Artificial Sequence
  ENSG00000127415_12 (sequence is synthesized)
cggggtgccccccggcccgggcctggtctacgtcacgcgctacctggacaacgggctctgcagccccgacggcgagtggcggcgcctgggccggcccgtcttccccacggcagagcagtt

SEQ ID NO: 270599 - DNA, 80 bp, Artificial Sequence
  ENSG00000127415_13 (sequence is synthesized)
ggcgccccgccccttacccgccggcggccgcctgaccctgcgccccgcgctgcggctgccgtcgcttttgctggtgcacg

SEQ ID NO: 270600 - DNA, 120 bp, Artificial Sequence
  ENSG00000127415_14 (sequence is synthesized)
tgtgtgcgcgccccgagaagccgcccgggcaggtcacgcggctccgcgccctgcccctgacccaagggcagctggttctggtctggtcggatgaacacgtgggctccaagtgcctgtgga

SEQ ID NO: 270601 - DNA, 120 bp, Artificial Sequence
  ENSG00000127415_15 (sequence is synthesized)
catacgagatccagttctctcaggacggtaaggcgtacaccccggtcagcaggaagccatcgaccttcaacctctttgtgttcagcccagacacaggtgctgtctctggctcctaccgag

SEQ ID NO: 270602 - DNA, 120 bp, Artificial Sequence
  ENSG00000127415_16 (sequence is synthesized)
ttcgagccctggactactgggcccgaccaggccccttctcggaccctgtgccgtacctggaggtccctgtgccaagagggcccccatccccgggcaatccatgagcctgtgctgagcccc

SEQ ID NO: 270603 - DNA, 120 bp, Artificial Sequence
  ENSG00000127415_17 (sequence is synthesized)
agtgggttgcacctccaccggcagtcagcgagctggggctgcactgtgcccatgctgccctcccatcaccccctttgcaatatatttttatattttattattttcttttatatcttggta

SEQ ID NO: 270604 - DNA, 120 bp, Artificial Sequence
  ENSG00000127415_18 (sequence is synthesized)
gcaggctgctgcctggtcaggagatacattggtgggcaggcgcaggcccttgtggggggatgggggtgacaagggataggttggtggtcggcgcaggccctggggccccaggctgggggg

SEQ ID NO: 270605 - DNA, 120 bp, Artificial Sequence
  ENSG00000127415_19 (sequence is synthesized)
cggacccactggctgctggagcttgtcaccaccagccatgcaccctgcgtccagccccgtgaggctgtagagtgactgcaggaagaagtccttgttggcatagtacagcggccccccaaa

SEQ ID NO: 270606 - DNA, 120 bp, Artificial Sequence
  ENSG00000127415_20 (sequence is synthesized)
tgtccccgatgcgggccagcagggcggtgcgtgggcgttgggtgcggccggccaggctgagcagcgagaggatgacgccagccagcagcccggcctctgtgctgaccagcatacaggtgg

SEQ ID NO: 270607 - DNA, 120 bp, Artificial Sequence
  ENSG00000127415_21 (sequence is synthesized)
ccgcggtgcctgcccagaccagcgcgtcagccgggctcatccgccacagccgcgggaggtcccacaccttgcgcagggccccccgcaggctgaccacgatgacgcaggccagcacgcttc

SEQ ID NO: 270608 - DNA, 120 bp, Artificial Sequence
  ENSG00000127415_22 (sequence is synthesized)
ctcgcccacccagggccggggattggtgctgggccttctcctggcagcgcgggccccagccccctgcccggtatggatggacgctgggccctgctggatccagaatccatcgtgaggggg

SEQ ID NO: 270609 - DNA, 120 bp, Artificial Sequence
  ENSG00000127415_23 (sequence is synthesized)
cgcgggccccagccccctgcccggtatggatggacgctgggccctgctggatccagaatccatcgtgaggtgagatgggattacgacaccaagcccatgccatggggtgtgctgaggcca

SEQ ID NO: 270610 - DNA, 120 bp, Artificial Sequence
  ENSG00000127415_24 (sequence is synthesized)
gcagtgctgaggggcggcgtggcggcaccctgtccaggctcagctccggcctattggctctgcggttcctggctgaaaaccaccctgtagcctcctgaagctcacctccccaacggggca

SEQ ID NO: 270611 - DNA, 120 bp, Artificial Sequence
  ENSG00000127415_25 (sequence is synthesized)
ggaacaggctgggctgccaccacgcacatgtgcctaccgtcagaatgtcacagtcactggacacaggtgcaggcaagcctgagtccagctgctccgtgtccacctccctggctccccagg

SEQ ID NO: 270612 - DNA, 120 bp, Artificial Sequence
  ENSG00000127415_26 (sequence is synthesized)
atggtggtgaaggtgggccggcccaacgccctgcgcgccccccggccaccttcctcccgagacgggacaggcgagcggtggccgcgccacccggtcccagctgccctggacacccgcagg

SEQ ID NO: 270613 - DNA, 120 bp, Artificial Sequence
  ENSG00000127415_27 (sequence is synthesized)
agcccatctgcaagtgcagtggcagggcggcccccttctcccttgaggacgcctgtcccctcgtaatgcaggcctcgtgggaattcagcccatctgcaagtgcagtggcagggcggcccc

SEQ ID NO: 270614 - DNA, 120 bp, Artificial Sequence
  ENSG00000127415_28 (sequence is synthesized)
cttctcccttgaggacgcctgtcccctcgtaatgcaggcctcgtgggaattcagcccatctgcaagtgcagtggcagggcggcccccttctcccttgaggacgcctgtcccctcggaatg

SEQ ID NO: 270615 - DNA, 120 bp, Artificial Sequence
  ENSG00000127415_29 (sequence is synthesized)
caggcctcgtgggaattcagccccatctgcaagtgcagtggcagggcggcccccttctcccttgacgacgcctgtcccctcggaatgcaggcctcgtgggaattcagccccatcgggggt

SEQ ID NO: 270616 - DNA, 80 bp, Artificial Sequence
  ENSG00000127415_30 (sequence is synthesized)
ggggggtggggtccggggcgggggctccgaggcggtgtgggtgggaggtggagcggtgggccgggggcgttcgccctgag

SEQ ID NO: 270617 - DNA, 120 bp, Artificial Sequence
  ENSG00000127415_31 (sequence is synthesized)
gtgggtgggaggtggagcggtgggccgggggcgttcgccctgaggtcgggccgagcgtccccagctcccctggagaaccctgaggaccggccactgcgcccaggacccggtggccgcggc

SEQ ID NO: 270618 - DNA, 120 bp, Artificial Sequence
  ENSG00000127418_0 (sequence is synthesized)
ccccaatgtccccaggtccggacaggccgagatgacgccgagccccctgttgctgctcctgctgccgccgctgctgctgggggccttcccgccggccgccgccgcccgaggccccccaaa

SEQ ID NO: 270619 - DNA, 120 bp, Artificial Sequence
  ENSG00000127418_1 (sequence is synthesized)
caaagatggcggacaaggtggtcccacggcaggtggcccggctgggccgcactgtgcggctgcagtgcccagtggagggggacccgccgccgctgaccatgtggaccaaggatggccgca

SEQ ID NO: 270620 - DNA, 120 bp, Artificial Sequence
  ENSG00000127418_2 (sequence is synthesized)
ccatccacagcggctggagccgcttccgcgtgctgccgcaggggctgaaggtgaagcaggtggagcgggaggatgccggcgtgtacgtgtgcaaggccaccaacggcttcggcagcctga

SEQ ID NO: 270621 - DNA, 120 bp, Artificial Sequence
  ENSG00000127418_3 (sequence is synthesized)
gcgtcaactacaccctcgtcgtgctggatgacattagcccagggaaggagagcctggggcccgacagctcctctgggggtcaagaggaccccgccagccagcagtgggcacgaccgcgct

SEQ ID NO: 270622 - DNA, 120 bp, Artificial Sequence
  ENSG00000127418_4 (sequence is synthesized)
tcacacagccctccaagatgaggcgccgggtgatcgcacggcccgtgggtagctccgtgcggctcaagtgcgtggccagcgggcaccctcggcccgacatcacgtggatgaaggacgacc

SEQ ID NO: 270623 - DNA, 120 bp, Artificial Sequence
  ENSG00000127418_5 (sequence is synthesized)
aggccttgacgcgcccagaggccgctgagcccaggaagaagaagtggacactgagcctgaagaacctgcggccggaggacagcggcaaatacacctgccgcgtgtcgaaccgcgcgggcg

SEQ ID NO: 270624 - DNA, 120 bp, Artificial Sequence
  ENSG00000127418_6 (sequence is synthesized)
ccatcaacgccacctacaaggtggatgtgatccagcggacccgttccaagcccgtgctcacaggcacgcaccccgtgaacacgacggtggacttcggggggaccacgtccttccagtgca

SEQ ID NO: 270625 - DNA, 120 bp, Artificial Sequence
  ENSG00000127418_7 (sequence is synthesized)
aggtgcgcagcgacgtgaagccggtgatccagtggctgaagcgcgtggagtacggcgccgagggccgccacaactccaccatcgatgtgggcggccagaagtttgtggtgctgcccacgg

SEQ ID NO: 270626 - DNA, 120 bp, Artificial Sequence
  ENSG00000127418_8 (sequence is synthesized)
gtgacgtgtggtcgcggcccgacggctcctacctcaataagctgctcatcacccgtgcccgccaggacgatgcgggcatgtacatctgccttggcgccaacaccatgggctacagcttcc

SEQ ID NO: 270627 - DNA, 120 bp, Artificial Sequence
  ENSG00000127418_9 (sequence is synthesized)
gcagcgccttcctcaccgtgctgccagacccaaaaccgccagggccacctgtggcctcctcgtcctcggccactagcctgccgtggcccgtggtcatcggcatcccagccggcgctgtct

SEQ ID NO: 270628 - DNA, 120 bp, Artificial Sequence
  ENSG00000127418_10 (sequence is synthesized)
tcatcctgggcaccctgctcctgtggctttgccaggcccagaagaagccgtgcacccccgcgcctgcccctcccctgcctgggcaccgcccgccggggacggcccgcgaccgcagcggag

SEQ ID NO: 270629 - DNA, 120 bp, Artificial Sequence
  ENSG00000127418_11 (sequence is synthesized)
acaaggaccttccctcgttggccgccctcagcgctggccctggtgtggggctgtgtgaggagcatgggtctccggcagccccccagcacttactgggcccaggcccagttgctggcccta

SEQ ID NO: 270630 - DNA, 120 bp, Artificial Sequence
  ENSG00000127418_12 (sequence is synthesized)
tcagtgctagacggcaccgtatctgcagtgggcacgggggggccggccagacaggcagactgggaggatggaggacggagctgcagacgaaggcaggggacccatggcgaggaggaatgg

SEQ ID NO: 270631 - DNA, 120 bp, Artificial Sequence
  ENSG00000127418_13 (sequence is synthesized)
ccagcaccccaggcagtctgtgtgtgaggcatagcccctggacacacacacacagacacacacactgcctggatgcatgtatgcacacacatgcgcgcacacgtgctccctgaaggcaca

SEQ ID NO: 270632 - DNA, 120 bp, Artificial Sequence
  ENSG00000127418_14 (sequence is synthesized)
cgtacgcacacacgcacatgcacagatatgccgcctgggcacacagataagctgcccaaatgcacgcacacgcacagagacatgccagaacatacaaggacatgctgcctgaacatacac

SEQ ID NO: 270633 - DNA, 120 bp, Artificial Sequence
  ENSG00000127418_15 (sequence is synthesized)
acgcacacccatgcgcagatgtgctgcctggacacacacacacacacggatatgctgtctggacgcacacacgtgcagatatggtatccggacacacacgtgcacagatatgctgcctgg

SEQ ID NO: 270634 - DNA, 120 bp, Artificial Sequence
  ENSG00000127418_16 (sequence is synthesized)
acacacagataatgctgccttgacacacacatgcacggatattgcctggacacacacacacacacgtgtgcacagatatgctgtctggacacgcacacacatgcagatatgctgcctgga

SEQ ID NO: 270635 - DNA, 120 bp, Artificial Sequence
  ENSG00000127418_17 (sequence is synthesized)
cacacacttccagacacacgtgcacaggcgcagatatgctgcctggacacacgcagatatgctgtctagtcacacacacacgcagacatgctgtccggacacacacacgcatgcacagat

SEQ ID NO: 270636 - DNA, 120 bp, Artificial Sequence
  ENSG00000127418_18 (sequence is synthesized)
atgctgtccggacacacacacgcacgcagatatgctgcctggacacacacacagataatgctgcctcaacactcacacacgtgcagatattgcctggacacacacatgtgcacagatatg

SEQ ID NO: 270637 - DNA, 120 bp, Artificial Sequence
  ENSG00000127418_19 (sequence is synthesized)
ctgtctggacatgcacacacgtgcagatatgctgtccggatacacacgcacgcacacatgcagatatgctgcctgggcacacacttccggacacacatgcacacacaggtgcagatatgc

SEQ ID NO: 270638 - DNA, 120 bp, Artificial Sequence
  ENSG00000127418_20 (sequence is synthesized)
tgcctggacacacgcagactgacgtgcttttgggagggtgtgccgtgaagcctgcagtacgtgtgccgtgaggctcatagttgatgagggactttccctgctccaccgtcactcccccaa

SEQ ID NO: 270639 - DNA, 120 bp, Artificial Sequence
  ENSG00000127418_21 (sequence is synthesized)
ctctgcccgcctctgtccccgcctcagtccccgcctccatccccgcctctgtcccctggccttggcggctatttttgccacctgccttgggtgcccaggagtcccctactgctgtgggct

SEQ ID NO: 270640 - DNA, 120 bp, Artificial Sequence
  ENSG00000127418_22 (sequence is synthesized)
ggggttgggggcacagcagccccaagcctgagaggctggagcccatggctagtggctcatccccactgcattctccccctgacacagagaaggggccttggtatttatatttaagaaatg

SEQ ID NO: 270641 - DNA, 120 bp, Artificial Sequence
  ENSG00000127418_23 (sequence is synthesized)
aagataatattaataatgatggaaggaagactgggttgcagggactgtggtctctcctggggcccgggacccgcctggtctttcagccatgctgatgaccacaccccgtccaggccagac

SEQ ID NO: 270642 - DNA, 120 bp, Artificial Sequence
  ENSG00000127418_24 (sequence is synthesized)
accaccccccaccccactgtcgtggtggccccagatctctgtaattttatgtagagtttgagctgaagccccgtatatttaatttattttgttaaacatgaaagtgcatcctttccctcc

SEQ ID NO: 270643 - DNA, 120 bp, Artificial Sequence
  ENSG00000127418_25 (sequence is synthesized)
actttgcacgctcgcagccacgtttccgcacacctgtcccctttccacgcacctgtgtccggcagcccgcacatctgtgggagcgctgcctcctcgccagctgtccgggaagttcagcgc

SEQ ID NO: 270644 - DNA, 120 bp, Artificial Sequence
  ENSG00000127418_26 (sequence is synthesized)
cgctctcccacgggcgtgagaccgccccacccacctgtccgtgactgcagctccggccgggagggcggcagcaggtgagaggctgggaggcctcaggtgggaacatacctttggccaaag

SEQ ID NO: 270645 - DNA, 120 bp, Artificial Sequence
  ENSG00000127418_27 (sequence is synthesized)
gcaccaggtaacccgaacgccccggggaggacccctgcctgcatcgccgcggccgtccccccctaccccgtccccagcagctccggctgggcgaggccctgcttctcccttctgctcccg

SEQ ID NO: 270646 - DNA, 120 bp, Artificial Sequence
  ENSG00000127418_28 (sequence is synthesized)
aagaccccccggggcgcagacctggaagcctcgaagctcccgcggccgtccagtccgcccccttctgagcaaccagagagcggtctgggcccggcccggggctgcgcagaggtcagactg

SEQ ID NO: 270647 - DNA, 120 bp, Artificial Sequence
  ENSG00000127418_29 (sequence is synthesized)
aaatttgtccgctaatggcgcaggcgattatctgcggggcgctgagtgttgtgtgtcctgcgggcagggccggagttacaagcgccaggaatccagacggtgtttggagagggggggcgg

SEQ ID NO: 270648 - DNA, 80 bp, Artificial Sequence
  ENSG00000127418_30 (sequence is synthesized)
agagttgacaaagccccgcagggaaggacgcctcgcggcgcggcgccccgggcccctcgccccgccgccccgggatcccg

SEQ ID NO: 270649 - DNA, 120 bp, Artificial Sequence
  ENSG00000127418_31 (sequence is synthesized)
ccggccgggagggcggcaggtgagaggctgggaggcctcaggtgggaacatacctttggccaaaggcaccaggtaacccgaacgccccggggaggacccctgcctgcatcgccgcggccg

SEQ ID NO: 270650 - DNA, 120 bp, Artificial Sequence
  ENSG00000127418_32 (sequence is synthesized)
ccggtaattagtgtaaaccctttgtctgcctttgatacccacagcttctccccgctgcggcttcctccgcctggagcgcgggcggggagggcctgtggggagggcggccagacccctgat

SEQ ID NO: 270651 - DNA, 120 bp, Artificial Sequence
  ENSG00000127419_0 (sequence is synthesized)
gaacttccggctgtcaagctcccggccgggctgactcaagcggaggcgcgcggaacagtcgccgaggcgattcccgcccaggctcctgtaaccgccaggcagcggccccgccatgtccca

SEQ ID NO: 270652 - DNA, 120 bp, Artificial Sequence
  ENSG00000127419_1 (sequence is synthesized)
gccccggaccccagagcaggcactggatacaccgggggactgccccccaggcaggagagacgaggacgctggggaggggatccagtgctcccaacgcatgctcagcttcagtgacgccct

SEQ ID NO: 270653 - DNA, 120 bp, Artificial Sequence
  ENSG00000127419_2 (sequence is synthesized)
gctgtccatcatcgccaccgtcatgatcctgcctgtgacccacacggagatctccccagaacagcagttcgacagaagtgtacagaggcttctggcaacacggattgccgtctacctgat

SEQ ID NO: 270654 - DNA, 120 bp, Artificial Sequence
  ENSG00000127419_3 (sequence is synthesized)
gacctttctcatcgtgacagtggcctgggcagcacacacaaggttgttccaagttgttgggaaaacagacgacacacttgccctgctcaacctggcctgcatgatgaccatcaccttcct

SEQ ID NO: 270655 - DNA, 120 bp, Artificial Sequence
  ENSG00000127419_4 (sequence is synthesized)
gccttacacgttttcgttaatggtgaccttccctgatgtgcctctgggcatcttcttgttctgtgtgtgtgtgatcgccattggggtcgtgcaggcactgattgtggggtacgcattcca

SEQ ID NO: 270656 - DNA, 120 bp, Artificial Sequence
  ENSG00000127419_5 (sequence is synthesized)
cttcccgcacctgctgagcccgcagatccagcgctctgcccacagggctctgtaccgacgacacgtcctgggcatcgtcctccaaggcccggccctgtgctttgcagcggccatcttctc

SEQ ID NO: 270657 - DNA, 120 bp, Artificial Sequence
  ENSG00000127419_6 (sequence is synthesized)
tctcttctttgtccccttgtcttacctgctgatggtgactgtcatcctcctcccctatgtcagcaaggtcaccggctggtgcagagacaggctcctgggccacagggagccctcggctca

SEQ ID NO: 270658 - DNA, 120 bp, Artificial Sequence
  ENSG00000127419_7 (sequence is synthesized)
acatctgcgaagacaacgtcccggaccccaaggatgtgaaggagaggttcagcggcagcctcgtggccgccctgagtgcgaccgggccgcgcttcctggcgtacttcggctccttcgcca

SEQ ID NO: 270659 - DNA, 120 bp, Artificial Sequence
  ENSG00000127419_8 (sequence is synthesized)
cagtgggactgctgtggttcgcccaccactcactcttcctgcatgtgcgcaaggccacgcgggccatggggctgctgaacacgctctcgctggccttcgtgggtggcctcccactagcct

SEQ ID NO: 270660 - DNA, 120 bp, Artificial Sequence
  ENSG00000127419_9 (sequence is synthesized)
accagcagacctcggccttcgcccggcagccccgcgatgagctggagcgcgtgcgtgtcagctgcaccatcatcttcctggccagcatcttccagctggccatgtggaccacggcgctgc

SEQ ID NO: 270661 - DNA, 120 bp, Artificial Sequence
  ENSG00000127419_10 (sequence is synthesized)
tgcaccaggcggagacgctgcagccctcggtgtggtttggcggccgggagcatgtgctcatgttcgccaagctggcgctgtacccctgtgccagcctgctggccttcgcctccacctgcc

SEQ ID NO: 270662 - DNA, 120 bp, Artificial Sequence
  ENSG00000127419_11 (sequence is synthesized)
tgctgagcaggttcagtgtgggcatcttccacctcatgcagatcgccgtgccctgcgccttcctgttgctgcgcctgctcgtgggcctggccctggccaccctgcgggtcctgcggggcc

SEQ ID NO: 270663 - DNA, 120 bp, Artificial Sequence
  ENSG00000127419_12 (sequence is synthesized)
tcgcccggcccgaacaccccccgccagcccccacgggccaggacgacccacagtcccagctcctccctgccccctgctagcagccacagagcccactcccagccgtcctcaccagagatg

SEQ ID NO: 270664 - DNA, 120 bp, Artificial Sequence
  ENSG00000127419_13 (sequence is synthesized)
gaccagggaggacaggatgctgggcaggggaagccaagtcacgggcaggccgcagtggttcttgcgtggcctggttttattttcattgtgaaatatcatgctcttatttcagtcctcaaa

SEQ ID NO: 270665 - DNA, 120 bp, Artificial Sequence
  ENSG00000127419_14 (sequence is synthesized)
agaacagtggacaaaggcagcaccctggaagtgagccagaggacaggttggaagaggaaggttccgggcctgccccaaggacagaagtttcctctgcgggagggcagctgccccagcagg

SEQ ID NO: 270666 - DNA, 120 bp, Artificial Sequence
  ENSG00000127419_15 (sequence is synthesized)
caggccccttacgtagctgctctgagtaaacgcggccagcgccccgtctcagcggggacactcccaccccggctgctcctgcaggcctggagcagttcgacagaagtgtacagaggcttc

SEQ ID NO: 270667 - DNA, 120 bp, Artificial Sequence
  ENSG00000127419_16 (sequence is synthesized)
tcgccgggcttgcgatgaacttccggctgtcaagctcccggccgggctgactcaagcggaggcgcgcggaacagtcgccgaggcgattcccgcccagttcgacagaagtgtacagaggct

SEQ ID NO: 270668 - DNA, 120 bp, Artificial Sequence
  ENSG00000127419_17 (sequence is synthesized)
cagacctgtctaggtcttgccagcatccttgggtcccccagctcctcaggcagcttaggggggcccagcactgccctcgagtccccagtactgccacacccaatccaacaagcgtctctt

SEQ ID NO: 270669 - DNA, 120 bp, Artificial Sequence
  ENSG00000127419_18 (sequence is synthesized)
cctcagatcctgcctgtgacccacacggagatctccccagaacaggtaacggggcaggctgtgctctgcgtggtgtggccctgcgaagatatagggtccccgaggctcgacctggcacag

SEQ ID NO: 270670 - DNA, 120 bp, Artificial Sequence
  ENSG00000127419_19 (sequence is synthesized)
ggtgctgaccctgcacgcctcgaagcttctgaggcttaggaggcagaggcgggaggcgggggcctccttggaaagggagggagccaacaagtcctgctcagcctgtgctcaccccggcgg

SEQ ID NO: 270671 - DNA, 120 bp, Artificial Sequence
  ENSG00000127419_20 (sequence is synthesized)
gccccctcagatcctgcctgtgacccacacggagatctccccagaacagcagttcgacagaagtgtacagaggcttctggcaacacggattgccgtctacctgatgacctttctcatcgt

SEQ ID NO: 270672 - DNA, 120 bp, Artificial Sequence
  ENSG00000127419_21 (sequence is synthesized)
cggccgggctgactcaagcggaggcgcgcggaacagtcgccgaggcgattcccgcccagctcccctgccctgagacagcctccggtgcttctgctgtgtcccaggaaacaagcctgaagc

SEQ ID NO: 270673 - DNA, 120 bp, Artificial Sequence
  ENSG00000127419_22 (sequence is synthesized)
tccggctgtcaagctcccggccgggctgactcaagcggaggcgcgcggaacagtcgccgaggcgattcccgcccagcagttcgacagaagtgtacagaggcttctggcaacacggattgc

SEQ ID NO: 270674 - DNA, 120 bp, Artificial Sequence
  ENSG00000127419_23 (sequence is synthesized)
ccctgacaccctgaggctttgctgggcaccactggatttgacctgtcctcaaaagcagaccagctggatggcccagggcccaggccacacggttgtagagaagagagaaggttctgggga

SEQ ID NO: 270675 - DNA, 120 bp, Artificial Sequence
  ENSG00000127419_24 (sequence is synthesized)
gagccagctgttgggctgttgggggcttctttcaggctggcggggaggggaggcagtggccccgatgagggagtcaccggcgctcccagctcccacccggccctgagcccacagccccct

SEQ ID NO: 270676 - DNA, 120 bp, Artificial Sequence
  ENSG00000127419_25 (sequence is synthesized)
tctgtgccccccatcgcttcgcagcccctcctgctccctttggctggctgttgcttccttccagcgtctgctcctccgcggcctcatctgcctcttcgtctgttagagcgcgcgtctcgt

SEQ ID NO: 270677 - DNA, 90 bp, Artificial Sequence
  ENSG00000127419_26 (sequence is synthesized)
gtcgtcacgtttttgggagacagtcctgctgtgtcgcccaggctggagtatagtggctcaagctcagctcactgcaacctccgcctccca

SEQ ID NO: 270678 - DNA, 73 bp, Artificial Sequence
  ENSG00000127419_27 (sequence is synthesized)
gcctcccaagtagttgggattacaagcacccaccaccatgcccagctaactttttgcatttttaatagagatg

SEQ ID NO: 270679 - DNA, 69 bp, Artificial Sequence
  ENSG00000127419_28 (sequence is synthesized)
atcgtaatgtttgaatttgcttttttacatcttccatccttttggagtgtcttgttccctcgtcatagt

SEQ ID NO: 270680 - DNA, 120 bp, Artificial Sequence
  ENSG00000127419_29 (sequence is synthesized)
tcttccatccttttggagtgtcttgttccctcgtcatagttcagcactgtgaccaccttggggttagacactatggttttatatcctgtacttgatattctcgagtccaagtctcctgat

SEQ ID NO: 270681 - DNA, 120 bp, Artificial Sequence
  ENSG00000127419_30 (sequence is synthesized)
gcgcgtggaagccttcagcgacggagtctacgccatcgtggccacgcttctcatcctggacatctggtgaggaccccgcgtcacctgccccagctatcaggtggccaatgtgtcttgagt

SEQ ID NO: 270682 - DNA, 120 bp, Artificial Sequence
  ENSG00000127423_0 (sequence is synthesized)
ctgaggcgccgggagcctgcgccggcgtcctgccggcttcgtctcctcagcggccatgaggcggacaggccccgaggaggaggcctgcggcgtgtggctggacgcggcggcgctgaagag

SEQ ID NO: 270683 - DNA, 120 bp, Artificial Sequence
  ENSG00000127423_1 (sequence is synthesized)
gcggaaagtgcagacacatttaatcaaaccaggcaccaaaatgctaacactccttcctggagaaagaaaggctaatatttattttactcaaagaagagctccatctacaggcattcacca

SEQ ID NO: 270684 - DNA, 120 bp, Artificial Sequence
  ENSG00000127423_2 (sequence is synthesized)
gagaagcattgcttccttcttcaccttgcagccaggaaagacaaatggcagtgaccagaagagtgtttcatctcatacagaaagtcagatcaacaaagagtccaagaaaaatgcgaccca

SEQ ID NO: 270685 - DNA, 120 bp, Artificial Sequence
  ENSG00000127423_3 (sequence is synthesized)
gctagaccatttgatcccaggcttagcacacgattgcatggcatcccctttagccacttcaaccactgcagacatccaggaagctggactctctcctcagtccctccagacttctggcca

SEQ ID NO: 270686 - DNA, 120 bp, Artificial Sequence
  ENSG00000127423_4 (sequence is synthesized)
ccacagaatgaaaaccccattttcaactgagctatctttgctccagcctgatactccagactgtgctggagatagtcataccccactggctttttccttcaccgaggacttggaaagttc

SEQ ID NO: 270687 - DNA, 120 bp, Artificial Sequence
  ENSG00000127423_5 (sequence is synthesized)
ttgtttgctagaccgaaaggaagaaaaaggggattctgccaggaaatgggaatggcttcatgagtctaagaagaactatcagagtatggagaaacacaccaaactacctggggacaaatg

SEQ ID NO: 270688 - DNA, 120 bp, Artificial Sequence
  ENSG00000127423_6 (sequence is synthesized)
ctgtcagcccttaggcaagactaaattggaaagaaaggtgtctgccaaagaaaacaggcaggcccctgtcctccttcaaacatacagggaatcctggaatggagaaaacatagaatcagt

SEQ ID NO: 270689 - DNA, 120 bp, Artificial Sequence
  ENSG00000127423_7 (sequence is synthesized)
gaaacaaagccgtagtccagtttctgtgttttcctgggacaatgaaaagaatgacaaggactcctggagtcaacttttcactgaagattctcaaggccagcgggtcattgcccacaacac

SEQ ID NO: 270690 - DNA, 120 bp, Artificial Sequence
  ENSG00000127423_8 (sequence is synthesized)
tgccaggaggatgggccaactcaaaatctgaagcctgatttgctctttacccaggactctgaaggtaatcaagttatcagacaccaattctaaatgtttgaagctttgtttctaaaagta

SEQ ID NO: 270691 - DNA, 120 bp, Artificial Sequence
  ENSG00000127423_9 (sequence is synthesized)
ccttgaaatgatagagatgtaggaaaatatagttgtgggtggagagaggagtgagtttgtttaggtgggaaggtggcatgggatgaagttgtcattactgagcatcttctctgtgtaaat

SEQ ID NO: 270692 - DNA, 120 bp, Artificial Sequence
  ENSG00000127423_10 (sequence is synthesized)
aaagggcagtaccattgttaagacagtgggattggcatcatggctttccctcaggaaggtggtggctggtaaattccctgaatgagtctatgatgaacactgaggcagcacagtgggtat

SEQ ID NO: 270693 - DNA, 120 bp, Artificial Sequence
  ENSG00000127423_11 (sequence is synthesized)
gtatttatctctatgaaagtgccttttactcagcctgcacagagccatctctttgcccttccagatgtctgactgggaccttgcttatggatgtgtttttttttttttttttttgagatg

SEQ ID NO: 270694 - DNA, 120 bp, Artificial Sequence
  ENSG00000127423_12 (sequence is synthesized)
ttacaggcataagccaccgcgcccagccagatgtgtgagcttttaatctctggctgatcttaacccacatcagcctaagcttgggatgattactcttgacccttttttttcagtgattag

SEQ ID NO: 270695 - DNA, 120 bp, Artificial Sequence
  ENSG00000127423_13 (sequence is synthesized)
ttagcaaatctccccacaacccaggtgtggagagaagagaggtagaatggtgctagtttcctattttatttttgtggtaactgtacagcactttaaagttatatactctatgtttaaata

SEQ ID NO: 270696 - DNA, 120 bp, Artificial Sequence
  ENSG00000127423_14 (sequence is synthesized)
tctcccttaaaaagcctgagctgtacaacaatctggatgtgactctgttacccttttcccacaagataggagggaatcccctttgtaaaactatgaatccaaataaatgtttacaaagtg

SEQ ID NO: 270697 - DNA, 120 bp, Artificial Sequence
  ENSG00000127423_15 (sequence is synthesized)
ctctagcttgtcagcaagactgttgcagaagatctatccttaagaggcagaaacatctgcggtgaggaaggcagctattgaaggtattccaggagcatgagactgagtttgcagagctga

SEQ ID NO: 270698 - DNA, 120 bp, Artificial Sequence
  ENSG00000127423_16 (sequence is synthesized)
gggttgtcaatttccttttctactgatatcttcttcctttagagcaaacttcctccttaggacctcagagataagcacagcagggtcttcctccttcaataaactccggttcctagagac

SEQ ID NO: 270699 - DNA, 120 bp, Artificial Sequence
  ENSG00000127445_0 (sequence is synthesized)
aggcgctgcggcaggagggaagatggcggacgaggagaagctgccgcccggctgggagaagcgcatgagccgcagctcaggccgagtgtactacttcaaccacatcactaacgccagcca

SEQ ID NO: 270700 - DNA, 120 bp, Artificial Sequence
  ENSG00000127445_1 (sequence is synthesized)
gtgggagcggcccagcggcaacagcagcagtggtggcaaaaacgggcagggggagcctgccagggtccgctgctcgcacctgctggtgaagcacagccagtcacggcggccctcgtcctg

SEQ ID NO: 270701 - DNA, 120 bp, Artificial Sequence
  ENSG00000127445_2 (sequence is synthesized)
gcggcaggagaagatcacccggaccaaggaggaggccctggagctgatcaacggctacatccagaagatcaagtcgggagaggaggactttgagtctctggcctcacagttcagcgactg

SEQ ID NO: 270702 - DNA, 120 bp, Artificial Sequence
  ENSG00000127445_3 (sequence is synthesized)
cagctcagccaaggccaggggagacctgggtgccttcagcagaggtcagatgcagaagccatttgaagacgcctcgtttgcgctgcggacgggggagatgagcgggcccgtgttcacgga

SEQ ID NO: 270703 - DNA, 120 bp, Artificial Sequence
  ENSG00000127445_4 (sequence is synthesized)
tggggagcccaggcctggcctcggggcagggcagggcggctaggccggccagctcccccttgcccgccagccagtggccgaaccccccactccctgccaccgtcacacagtatttattgt

SEQ ID NO: 270704 - DNA, 120 bp, Artificial Sequence
  ENSG00000127445_5 (sequence is synthesized)
tcccacaatggctgggagggggcccttccagattgggggccctggggtccccactccctgtccatccccagttggggctgcgaccgccagattctcccttaaggaattgacttcagcagg

SEQ ID NO: 270705 - DNA, 120 bp, Artificial Sequence
  ENSG00000127445_6 (sequence is synthesized)
ggtgggaggctcccagacccagggcagtgtggtgggaggggtgttccaaagagaaggcctggtcagcagagccgccccgtgtccccccaggtgctggaggcagactcgagggccgaattg

SEQ ID NO: 270706 - DNA, 120 bp, Artificial Sequence
  ENSG00000127445_7 (sequence is synthesized)
tttctagttaggccacgctcctctgttcagtcgcaaaggtgaacactcatgcggcccagccatgggccctctgagcaactgtgcagcaccctttcacccccaattaaacccagaaccact

SEQ ID NO: 270707 - DNA, 120 bp, Artificial Sequence
  ENSG00000127445_8 (sequence is synthesized)
gcagaggtgcgcaaggaatgggcctcaccaggttgggggacccttaccaccctgaggggtagaggccaggagggtctgggcattgggctcccaggtgccacaccggccttcggggtccag

SEQ ID NO: 270708 - DNA, 120 bp, Artificial Sequence
  ENSG00000127445_9 (sequence is synthesized)
caggtggcagcacagccccttcctcaggcttcagaggctgctctgctgggcagggccagggccacacagggaggggggctgcagcactttcttcctggcatcatctctaccctggggggc

SEQ ID NO: 270709 - DNA, 120 bp, Artificial Sequence
  ENSG00000127445_10 (sequence is synthesized)
atggtctcttgtgtgtctgtgcacagatgtcctcatcccaggcccaccaaggtgggtacatcctgtcctctgcctcttcctttttgtggtttaaggttgagggccctgagagtcccaggg

SEQ ID NO: 270710 - DNA, 120 bp, Artificial Sequence
  ENSG00000127445_11 (sequence is synthesized)
cctgtcccccagaatccctctcaaaggtggggaaaccaggggtgagaggaggtggccctgagtttaggcctgtctggccaggacagtggaaatcagggacagaggggactaggcctcctc

SEQ ID NO: 270711 - DNA, 120 bp, Artificial Sequence
  ENSG00000127445_12 (sequence is synthesized)
tggcggacgaggagaagctgccgcccggctgggagaagcgcatgagccgcagctcaggtgagaacaccaaggcccagggaagatatatcacatttgaacccagattcagatttgaatcca

SEQ ID NO: 270712 - DNA, 120 bp, Artificial Sequence
  ENSG00000127445_13 (sequence is synthesized)
ggcggacgaggagaagctgccgcccggctgggagaagcgcatgagccgcagctcagagtaaacactcaggaagcgttacccactgctgccattcccagagatgcaaaaggtgagaacacc

SEQ ID NO: 270713 - DNA, 120 bp, Artificial Sequence
  ENSG00000127445_14 (sequence is synthesized)
cggcaggagggaagatggcggacgaggagaagctgccgcccggctgggagaagcgcatgagccgcagctcaggtgccgcgggggtcggggctggggcgggactgcgcgggcccgcgtaag

SEQ ID NO: 270714 - DNA, 120 bp, Artificial Sequence
  ENSG00000127445_15 (sequence is synthesized)
cagggctcgagctcgccccttgggcgcggcggcagcgctgcctccctcccatggggtcctggctcttccgcgtcgtccccggggtaacggccccggcccgccctgttgtggggactgcga

SEQ ID NO: 270715 - DNA, 120 bp, Artificial Sequence
  ENSG00000127445_16 (sequence is synthesized)
gcctcaggagccgccgggaagcctgaggaagctgaggcagggggctgggcgggtgagggtccggggagtccggggcgatggccctggccctgccggcccggctgatacctctcggcctaa

SEQ ID NO: 270716 - DNA, 120 bp, Artificial Sequence
  ENSG00000127445_17 (sequence is synthesized)
tgcacctgacaccccgggggacgtctctgcaccttgctgggcccgggggcacccctgggagggagacaccccagtaccctgcaaagggcgtagggtgttgcccggcctcgggtccacaac

SEQ ID NO: 270717 - DNA, 120 bp, Artificial Sequence
  ENSG00000127445_18 (sequence is synthesized)
ctacccctgctaacacccctactgtgtacacctaatgctgagtctgcgacatcgcccgtgacattctgccagacgatggcccctgtgcttaggcccgatttaagggttagccacaatgat

SEQ ID NO: 270718 - DNA, 120 bp, Artificial Sequence
  ENSG00000127445_19 (sequence is synthesized)
aatattgccagtaacagggcatgtttttctctgtgtcaagcgctttaagttctctctgaattgccgcaactctgggagccaggtagttattacttccaccttaccagcaaggaaactgag

SEQ ID NO: 270719 - DNA, 120 bp, Artificial Sequence
  ENSG00000127445_20 (sequence is synthesized)
gtcagaaaactgaaggaactcgtccaagatcattcatttcaggggccgggggttggattaggacctaggcagtttgcctacaaatccccctccccgtgtcactgcaaactcctgaggagc

SEQ ID NO: 270720 - DNA, 120 bp, Artificial Sequence
  ENSG00000127445_21 (sequence is synthesized)
aggcccagcatctgtgggcaggtcccgagtcactctgctgcctctagagcccatagcaatcgcatttgcaataataattctccttggttgagtgccaggttctggtgaactgtttggata

SEQ ID NO: 270721 - DNA, 120 bp, Artificial Sequence
  ENSG00000127445_22 (sequence is synthesized)
catggactctcctcattaaccccatgaggtttgatctccttattctctattccccatttttcagatgagaaaactgaggtgcagggagattagagcccattgccaaggttttagagtgag

SEQ ID NO: 270722 - DNA, 120 bp, Artificial Sequence
  ENSG00000127445_23 (sequence is synthesized)
tcagtagctcagctgcatttgcacctggaacccgcgctctcgcccaccctgctctagccctggcctgtggctgggacctccagcataaaccggatgctctgcccagctctgggcccattt

SEQ ID NO: 270723 - DNA, 120 bp, Artificial Sequence
  ENSG00000127445_24 (sequence is synthesized)
ctgctgtttctgctcagttcaaccctgatggcttcctttatgggtgacactccatgtcacccaggcgaactgtcagcctttggagtggcacccagtagggtctttacttccagtttcttg

SEQ ID NO: 270724 - DNA, 120 bp, Artificial Sequence
  ENSG00000127445_25 (sequence is synthesized)
ttcacagtcttcactccttcatacccctcactccctgggtaacatcgggccaccagtaatgctggttcctagctctgcaacaccatgcacggtgtagtagctaagagcagagctttcggg

SEQ ID NO: 270725 - DNA, 120 bp, Artificial Sequence
  ENSG00000127445_26 (sequence is synthesized)
tgtgaagtacctgagtacagttcctgccttcccctgtgtgtgcctggaacagagtaaacactcaggaagcgttacccactgctgccattcccagagatgcaaaaggtgaggtctccgttt

SEQ ID NO: 270726 - DNA, 120 bp, Artificial Sequence
  ENSG00000127445_27 (sequence is synthesized)
tgccatctatacaatagagataataaaggctatcccactcttaatgtgtgccagtttctgtcctaggcattttgtagatgtgtgagcttatttagtgctttcttattattatttttggag

SEQ ID NO: 270727 - DNA, 120 bp, Artificial Sequence
  ENSG00000127445_28 (sequence is synthesized)
atggtctcactgtgtggctcaggctgcagtgcagcctctgcctcccaggcttaagcaatcctcccacctcagcctttcaagtagctgagaccacaggcgtgtaccacccacccatggcta

SEQ ID NO: 270728 - DNA, 70 bp, Artificial Sequence
  ENSG00000127445_29 (sequence is synthesized)
gcctgttgtttttgtttttgttttgagacaagagtctcactctatcgctcaggctggagtgcagtggcat

SEQ ID NO: 270729 - DNA, 68 bp, Artificial Sequence
  ENSG00000127445_30 (sequence is synthesized)
acaccacaacgcccggctaatgttggtttgtttgtttgtttgtgacggagttttgctcttgttgccca

SEQ ID NO: 270730 - DNA, 120 bp, Artificial Sequence
  ENSG00000127445_31 (sequence is synthesized)
gtgagagccaccgtgcttagcccttttaaaaatgtttaaaaattattatttagtcctttcaatgaccctaaggtaggaactgttatctccattttgcaggtgagaacaccaaggcccagg

SEQ ID NO: 270731 - DNA, 120 bp, Artificial Sequence
  ENSG00000127445_32 (sequence is synthesized)
gaagatatatcacatttgaacccagattcagatttgaatccaggtggcctggctgctgagtgcatggtttgagtcactccctgtcccccagcttcctctgttccatcactctgggttatt

SEQ ID NO: 270732 - DNA, 120 bp, Artificial Sequence
  ENSG00000127445_33 (sequence is synthesized)
ttcctccttgaagttatcagggattgatactatcctgtgtttcatttgcttgtttagcacctgtctgctctcacctagaatgttagctctctaagggcagggactgtatcctgccacatt

SEQ ID NO: 270733 - DNA, 120 bp, Artificial Sequence
  ENSG00000127445_34 (sequence is synthesized)
ggcccacgtctggagagcctgtggcacatggtggatacaccatggatttgttgaatgaaggcgccccctgcaagccaggccctcaccctggcttctggctgtgggcccaggggtgtcctg

SEQ ID NO: 270734 - DNA, 120 bp, Artificial Sequence
  ENSG00000127445_35 (sequence is synthesized)
ggaagatggcggacgaggagaagctgccgcccggctgggagaagcgcatgagccgcagctcagagtaaacactcaggaagcgttacccactgctgccattcccagagatgcaaaaggccg

SEQ ID NO: 270735 - DNA, 120 bp, Artificial Sequence
  ENSG00000127445_36 (sequence is synthesized)
gcgtctagccaataggcagcggcggcgggcgggcgcgggcgacaggcggcgcagctgaggcggagcaggcgctgcggcaggagggaagatggcggacgaggagaagctgccgcccggctg

SEQ ID NO: 270736 - DNA, 120 bp, Artificial Sequence
  ENSG00000127452_0 (sequence is synthesized)
ggtcttagttcccagtcgcggccaaatcacgcctcagccacctcccgcaagcctctcactgcctcagccacgctttccaggctggtttctggtccccatccgcggctggtccggccctgg

SEQ ID NO: 270737 - DNA, 120 bp, Artificial Sequence
  ENSG00000127452_1 (sequence is synthesized)
gaccgaatcacttcccagcgagaggaaggtcaaatttctcgaccggctacgggaaggtcgcggccgccgccctgtcagccgcctcggcgcccccaggacccctcgggtctctttaaccgg

SEQ ID NO: 270738 - DNA, 120 bp, Artificial Sequence
  ENSG00000127452_2 (sequence is synthesized)
aagcggaagtgcgtgtcggcgggatcatggcgactttggtcgaactgccggactcggtcctgctcgagatcttctcttacctcccggtacgggaccggatccgcatctccagggtctgtc

SEQ ID NO: 270739 - DNA, 120 bp, Artificial Sequence
  ENSG00000127452_3 (sequence is synthesized)
accgctggaagaggctggtggacgaccggtggctgtggcgacatgtcgacctgacgctctacacgatgcgacctaaagtcatgtggcacctccttcgaaggtacatggcatcccggctcc

SEQ ID NO: 270740 - DNA, 120 bp, Artificial Sequence
  ENSG00000127452_4 (sequence is synthesized)
attccctgcggatgggtggctacctgttctctggctcccaggccccccagttgtcccctgctctgttgagagccctgggccagaagtgccccaacctgaagcgcctctgcctgcacgtgg

SEQ ID NO: 270741 - DNA, 120 bp, Artificial Sequence
  ENSG00000127452_5 (sequence is synthesized)
ccgacctgagcatggtgcccatcaccagcctgcccagcaccttgaggaccctggagctgcacagctgcgagatctccatggcctggctccacaagcagcaggaccccaccgtgctgcccc

SEQ ID NO: 270742 - DNA, 120 bp, Artificial Sequence
  ENSG00000127452_6 (sequence is synthesized)
tgcttgaatgcatcgtgctggaccgcgtccccgccttccgtgacgagcacctgcagggcctgacgcgcttccgggccttgcgctcgctggtgctgggtggtacctaccgtgtgaccgaga

SEQ ID NO: 270743 - DNA, 120 bp, Artificial Sequence
  ENSG00000127452_7 (sequence is synthesized)
cgacagcaccctgctggccatcagccgccacctccgagatgtgcgcaagatccggctgaccgtgaggggcctctctgcccctggcctggctgtgctggagggaatgccggccctggagag

SEQ ID NO: 270744 - DNA, 120 bp, Artificial Sequence
  ENSG00000127452_8 (sequence is synthesized)
tctgtgcctgcagggtcccctcgtcaccccagaaatgccctcccccactgaaatcctctcctcctgcctcactatgcccaagctcagagtccttgagctgcaggggctggggtgggaggg

SEQ ID NO: 270745 - DNA, 120 bp, Artificial Sequence
  ENSG00000127452_9 (sequence is synthesized)
tcaggaggcggagaagatcctgtgtaaggggctgccccactgtatggtcatcgtcagggcttgccccaaagagtctatggactggtggatgtaactactccacctgcccttgggacccat

SEQ ID NO: 270746 - DNA, 120 bp, Artificial Sequence
  ENSG00000127452_10 (sequence is synthesized)
cccagttttcatcattgagccccagaccctctgagcagcaccttgaagagggcagataatcagacttgaggaaactgaaagccccaggttgagagaacagaggcctagggacctccagac

SEQ ID NO: 270747 - DNA, 120 bp, Artificial Sequence
  ENSG00000127452_11 (sequence is synthesized)
cattggaatcactgtttgccagctgtgtggccttggtcatatcatcagcctctgggaagcctagttcccacatctggaaataaggatgatcatagctacctcacggttacattgcaaagc

SEQ ID NO: 270748 - DNA, 120 bp, Artificial Sequence
  ENSG00000127452_12 (sequence is synthesized)
cttactctaaaagctcccagcctccagaggctctcaatgaagagtcaccttcatggtcgtcttcaggaacaggacggatgaagaaggggtggggttaagactcaggggcacctgagggtc

SEQ ID NO: 270749 - DNA, 120 bp, Artificial Sequence
  ENSG00000127452_13 (sequence is synthesized)
tgagcccccttatgagtacccaagaaggactgtctatgcatgcacacccacaagcctatacaccatttatatacctacacgcacgcaagagacgcggagagataggcgatgcagactcgc

SEQ ID NO: 270750 - DNA, 120 bp, Artificial Sequence
  ENSG00000127452_14 (sequence is synthesized)
gattcaatgatcgatatgctcataaaagtgctcaattatattttctgtattttgtatgctgtattttccaagacgtatattattttactattaaagaaaaaaatcatttttttttcccga

SEQ ID NO: 270751 - DNA, 120 bp, Artificial Sequence
  ENSG00000127452_15 (sequence is synthesized)
gcgtgtcggcgggatcatggcgactttggtcgaactgccggactcggtcctgctcgagatcttctcttacctcccggtacgggaccggatccgcatctccaggtgcggccccgcctccgg

SEQ ID NO: 270752 - DNA, 83 bp, Artificial Sequence
  ENSG00000127452_16 (sequence is synthesized)
tgtcaccgctggaagaggctggtggacgaccggtggctgtggcgacatgtcgacctgacgctctacacgaaacggggttttgt

SEQ ID NO: 270753 - DNA, 120 bp, Artificial Sequence
  ENSG00000127452_17 (sequence is synthesized)
cggtcctgctcgagatcttctcttacctcccgggtctgtcaccgctggaagaggctggtggacgaccggtggctgtggcgacatgtcgacctgacgctctacacggctggagtgcagtgg

SEQ ID NO: 270754 - DNA, 86 bp, Artificial Sequence
  ENSG00000127452_18 (sequence is synthesized)
agtgattccatgcgacctaaagtcatgtggcacctccttcgaaggtacatggcatcccggctccattccctgcggatgggtggcta

SEQ ID NO: 270755 - DNA, 120 bp, Artificial Sequence
  ENSG00000127452_19 (sequence is synthesized)
gctcctcttcgacctcagggcctcaatttcctcatccctgcaatggggataaaggacagtacctgcctcacggggctattatgggacttcactgagatcacgcagggaaagggcttagaa

SEQ ID NO: 270756 - DNA, 120 bp, Artificial Sequence
  ENSG00000127452_20 (sequence is synthesized)
tcactgagatcacgcagggaaagggcttagaacagtctggcacatatttatcattcgataaatgctaatttatgactatgttatcaagtttttgttttgtttttgagacagagtctcgct

SEQ ID NO: 270757 - DNA, 120 bp, Artificial Sequence
  ENSG00000127452_21 (sequence is synthesized)
gccattgcactccagcctgggcaacaagcaaaactccgtctcaaaaaaaaagaaaagaaaagaaacacctttgtaagcacacataaagaatatgttattagacaattttcctttttccat

SEQ ID NO: 270758 - DNA, 120 bp, Artificial Sequence
  ENSG00000127463_0 (sequence is synthesized)
gcatgcgctcgcatcatggcggctgagtgggcttctcgtttctggctttgggctacgctgctgattcctgcggccgcggtctacgaagaccaagtgggcaagtttgattggagacagcaa

SEQ ID NO: 270759 - DNA, 120 bp, Artificial Sequence
  ENSG00000127463_1 (sequence is synthesized)
tatgttgggaaggtcaagtttgcctccttggaattttcccctggatccaagaagttggttgtagccacagagaagaatgtgattgcagcattaaattcccgaactggggagatcttgtgg

SEQ ID NO: 270760 - DNA, 120 bp, Artificial Sequence
  ENSG00000127463_2 (sequence is synthesized)
cgccatgttgacaagggcacggcagaaggggctgtggatgccatgctgctgcacggacaggatgtgatcactgtgtccaatggaggccgaatcatgcgttcctgggagactaacatcggg

SEQ ID NO: 270761 - DNA, 120 bp, Artificial Sequence
  ENSG00000127463_3 (sequence is synthesized)
ggcctgaactgggagataaccctggacagtggcagtttccaggcacttgggctggttggcctgcaggagtctgtaaggtacatcgcagtcctgaagaagactacacttgccctccatcac

SEQ ID NO: 270762 - DNA, 120 bp, Artificial Sequence
  ENSG00000127463_4 (sequence is synthesized)
ctctccagtgggcacctcaagtgggtggaacatctcccagaaagtgacagcatccactaccagatggtgtattcttacggctctggggtggtgtgggccctcggagttgttcccttcagc

SEQ ID NO: 270763 - DNA, 120 bp, Artificial Sequence
  ENSG00000127463_5 (sequence is synthesized)
catgtgaacattgtcaagtttaatgtggaagatggagagattgttcagcaggttagggtttcaactccgtggctgcagcacctgtctggagcctgtggtgtggtggatgaggctgtcctg

SEQ ID NO: 270764 - DNA, 120 bp, Artificial Sequence
  ENSG00000127463_6 (sequence is synthesized)
gtgtgtcctgacccgagctcacgttccctccaaactttggctctggagacggaatgggagttgagacagatcccactgcagtctctcgacttagaatttggaagtggattccaaccccgg

SEQ ID NO: 270765 - DNA, 120 bp, Artificial Sequence
  ENSG00000127463_7 (sequence is synthesized)
gtcctgcctacccagcccaacccagtggacgcttcccgggcccagttcttcctgcacttgtccccaagccactatgctctgctgcagtaccattatggaacgctgagtttgcttaaaaac

SEQ ID NO: 270766 - DNA, 120 bp, Artificial Sequence
  ENSG00000127463_8 (sequence is synthesized)
ttcccacagactgccctagtgagctttgccaccactggggagaagacggtggctgcagtcatggcctgtcggaatgaagtgcagaaaagtagcagttctgaagatgggtcaatggggagc

SEQ ID NO: 270767 - DNA, 120 bp, Artificial Sequence
  ENSG00000127463_9 (sequence is synthesized)
ttttcggagaagtctagttcaaaggactctctggcttgcttcaatcagacctacaccattaacctatacctcgtggagacaggtcggcggctgctggacaccacgataacatttagcctg

SEQ ID NO: 270768 - DNA, 120 bp, Artificial Sequence
  ENSG00000127463_10 (sequence is synthesized)
gaacagagcggcactcggcctgagcggctgtatatccaggtgttcttgaagaaggatgactcagtgggctaccgggctttggtgcagacagaggatcatctgctacttttcctgcagcag

SEQ ID NO: 270769 - DNA, 120 bp, Artificial Sequence
  ENSG00000127463_11 (sequence is synthesized)
ttggcagggaaggtggtgctgtggagccgtgaggagtccctggcagaagtggtgtgcctagagatggtggacctccccctgactggggcacaggccgagctggaaggagaatttggcaaa

SEQ ID NO: 270770 - DNA, 120 bp, Artificial Sequence
  ENSG00000127463_12 (sequence is synthesized)
aaggcagatggcttgctggggatgttcctgaaacgcctctcgtctcagcttatcctgctgcaagcatggacttcccacctctggaaaatgttttatgatgctcggaagccccggagtcag

SEQ ID NO: 270771 - DNA, 120 bp, Artificial Sequence
  ENSG00000127463_13 (sequence is synthesized)
attaagaatgagatcaacattgacaccctggccagagatgaattcaacctccagaagatgatggtgatggtaacagcctcaggcaagctttttggcattgagagcagctctggcaccatc

SEQ ID NO: 270772 - DNA, 120 bp, Artificial Sequence
  ENSG00000127463_14 (sequence is synthesized)
ctgtggaaacagtatctacccaatgtcaagccagactcctcctttaaactgatggtccagagaactactgctcatttcccccatcccccacagtgcaccctgctggtgaaggacaaggag

SEQ ID NO: 270773 - DNA, 120 bp, Artificial Sequence
  ENSG00000127463_15 (sequence is synthesized)
tcgggaatgagttctctgtatgtcttcaatcccatttttgggaagtggagtcaggtagctcccccagtgctgaagcgccccatcttgcagtccttgcttctcccagtcatggatcaagac

SEQ ID NO: 270774 - DNA, 120 bp, Artificial Sequence
  ENSG00000127463_16 (sequence is synthesized)
tacgccaaggtgttgctgttgatagatgatgaatacaaggtcacagcttttccagccactcggaatgtcttgcgacagctacatgagcttgccccttccatcttcttctatttggtggat

SEQ ID NO: 270775 - DNA, 120 bp, Artificial Sequence
  ENSG00000127463_17 (sequence is synthesized)
gcagagcagggacggctgtgtggatatcggcttcgaaaggatctcaccactgagctgagttgggagctgaccattcccccagaagtacagcggatcgtcaaggtgaaggggaaacgcagc

SEQ ID NO: 270776 - DNA, 120 bp, Artificial Sequence
  ENSG00000127463_18 (sequence is synthesized)
agtgagcacgttcattcccagggccgtgtgatgggggaccgcagtgtgctctacaagagcctgaaccccaacctgctggccgtggtgacagagagcacagacgcgcaccatgagcgcacc

SEQ ID NO: 270777 - DNA, 120 bp, Artificial Sequence
  ENSG00000127463_19 (sequence is synthesized)
tttattggcatcttcctcattgatggcgtcactgggcgtatcattcactcctctgtgcagaagaaagccaaaggccctgtccatatcgtgcattcagagaactgggtggtgtaccagtac

SEQ ID NO: 270778 - DNA, 120 bp, Artificial Sequence
  ENSG00000127463_20 (sequence is synthesized)
tggaacaccaaggctcggcgcaacgagtttaccgtactggagctctatgagggcactgagcaatacaacgccaccgccttcagctccctggaccgcccccagctgccccaggtcctccag

SEQ ID NO: 270779 - DNA, 120 bp, Artificial Sequence
  ENSG00000127463_21 (sequence is synthesized)
cagtcctatatcttcccgtcctccatcagtgccatggaggccaccatcaccgaacggggcatcaccagccgacacctgctgattggactaccttctggagcaattctttcccttcctaag

SEQ ID NO: 270780 - DNA, 120 bp, Artificial Sequence
  ENSG00000127463_22 (sequence is synthesized)
gctttgctggatccccgccgccccgagatcccaacagaacaaagcagagaggagaacttaatcccgtattctccagatgtacagatacacgcagagcgattcatcaactataaccagaca

SEQ ID NO: 270781 - DNA, 120 bp, Artificial Sequence
  ENSG00000127463_23 (sequence is synthesized)
gtttctcgaatgcgaggtatctacacagctccctcgggtctggagtccacttgtttggttgtggcctatggtttggacatttaccaaactcgagtctacccatccaagcagtttgacgtt

SEQ ID NO: 270782 - DNA, 120 bp, Artificial Sequence
  ENSG00000127463_24 (sequence is synthesized)
ctgaaggatgactatgactacgtgttaatcagcagcgtcctctttggcctggtttttgccaccatgatcactaagagactggcacaggtgaagctcctgaatcgggcctggcgataaaga

SEQ ID NO: 270783 - DNA, 120 bp, Artificial Sequence
  ENSG00000127463_25 (sequence is synthesized)
acaaagactgtgcctaaaagtggagagccaggggagtgtgggtcagataagcagctacagctgcagtttggtggattggtggagtatgtgtgtgtgtcagtgctcagctaagaactgtag

SEQ ID NO: 270784 - DNA, 120 bp, Artificial Sequence
  ENSG00000127463_26 (sequence is synthesized)
ggaagatggatgaccttcacgcagaactccttttgggatatacatgatgcagaaaggatcctacatggagagagacagaactctctcagctgacactctcagagattcctgatgggcttt

SEQ ID NO: 270785 - DNA, 120 bp, Artificial Sequence
  ENSG00000127463_27 (sequence is synthesized)
gcccatccatgaatgttctgttttgttttttttaataagaattccggctgatttttgtgaggcctgtttaaattgactttactttgccttttgtgtttctcaattttatctagaaatctt

SEQ ID NO: 270786 - DNA, 120 bp, Artificial Sequence
  ENSG00000127463_28 (sequence is synthesized)
tctgactttttccatctcttgcttcaaagtaagaggggaactctccttgccgactccaccttataggtacatttggtgttttgcactgggaagaaataggatccatccttagctgaggct

SEQ ID NO: 270787 - DNA, 120 bp, Artificial Sequence
  ENSG00000127463_29 (sequence is synthesized)
tgaggactgatccagcctctcatggcttccctccaaagtaacttagggttgagggatctatatgtgatgtcaaaacttactttaaacctctagtttcgtgctgtcatttattaggctggg

SEQ ID NO: 270788 - DNA, 120 bp, Artificial Sequence
  ENSG00000127463_30 (sequence is synthesized)
ccaccaaatctttgtttcaatttatcagaagccaagtgcatactagcgtcttgtttgttgcccattgcctatacttttcacctgagatgtgtgagttggggccttttaaaaactactgaa

SEQ ID NO: 270789 - DNA, 120 bp, Artificial Sequence
  ENSG00000127463_31 (sequence is synthesized)
ttgtctgagccttgaagacatttccagggagaagagataatctctcatttcacccacaggctggtctaatcataacctagttaaagatgtccttgtttaagaaccccattatttattttt

SEQ ID NO: 270790 - DNA, 120 bp, Artificial Sequence
  ENSG00000127463_32 (sequence is synthesized)
agtttttaatataaattaacatgtgggtcattatatttctccttaaatgaggaaattttaaattttattgatctaacctttgaagctttaaaaaaggagaaagagggtaggggtgggaaa

SEQ ID NO: 270791 - DNA, 120 bp, Artificial Sequence
  ENSG00000127463_33 (sequence is synthesized)
ctggcatactgtgtgtatagcactgccgattggctaggccactgtgtctctgctacaaattaaagaaatcctaaaagttttccttggtcatagagttggggaatgacagaatttttcttt

SEQ ID NO: 270792 - DNA, 120 bp, Artificial Sequence
  ENSG00000127463_34 (sequence is synthesized)
gttgtgaaatgtatgtacagagtagaccatctctagccctgtggtgaaagaggtacactcgaatgtttgcataaagcaagtgacaaatgacactgtttaagtcctcttttgtgtcttaga

SEQ ID NO: 270793 - DNA, 120 bp, Artificial Sequence
  ENSG00000127463_35 (sequence is synthesized)
agatcattttgaggctattttcacattagaggggataaaagcagtgaagacatggagtaagtgtattttattttagtaaggaaaggtcagtttaatcatatatgggttggttaggttatc

SEQ ID NO: 270794 - DNA, 120 bp, Artificial Sequence
  ENSG00000127463_36 (sequence is synthesized)
taaaaatttgtcatctttctatggtcatatgctgatggtagattatggcagagaaggaagaggaaatgacaaccattttattaattgtcagtttgatattgagtgactgaatgtctaaga

SEQ ID NO: 270795 - DNA, 120 bp, Artificial Sequence
  ENSG00000127463_37 (sequence is synthesized)
atctccagaaaaaaacaggcatctatcatcctgacccaaggcatattttaacataacctgggagaagagagttaagtacaagttaaaaaaaattctgccctagttttgagaaagcctggc

SEQ ID NO: 270796 - DNA, 120 bp, Artificial Sequence
  ENSG00000127463_38 (sequence is synthesized)
tggaattctgactgtcttacatacatatgtgcaaggttagcctgcaagattctagtttttatttaccagtgtgccagaatctgaaacaagctactgggagggaaggtatttgtcctttag

SEQ ID NO: 270797 - DNA, 89 bp, Artificial Sequence
  ENSG00000127463_39 (sequence is synthesized)
ctgaaacaagctactgggagggaaggtatttgtcctttagtaaaattccctgtatttcagctgtaatcaaagttacctcaaagcaggtg

SEQ ID NO: 270798 - DNA, 120 bp, Artificial Sequence
  ENSG00000127463_40 (sequence is synthesized)
ctgggattacaggtgtgagccaccgagcttggccaagtgcttaaaatagttaatgctaatgccacagtccaatttaaatcttttcttagttctcaactttccttaatcttaaagcagcat

SEQ ID NO: 270799 - DNA, 120 bp, Artificial Sequence
  ENSG00000127463_41 (sequence is synthesized)
ttttcttagttctcaactttccttaatcttaaagcagcattcggttctgagcagctacactcagtctccactaatggctgctgagactatgtttcctctctcaattctctgatctatttg

SEQ ID NO: 270800 - DNA, 120 bp, Artificial Sequence
  ENSG00000127463_42 (sequence is synthesized)
ctttcttgtcattccttgttttttgtgtgtattccttgacttacctcttctcctgtcttcattaattaggttaattttggggccccatggtgtttcacgtaaaaagatttggctgggcgt

SEQ ID NO: 270801 - DNA, 71 bp, Artificial Sequence
  ENSG00000127463_43 (sequence is synthesized)
agtggaggatcatctacaaaaaataaaaaaaaattagccgggcctggtggcatgtgcctgtggtcctagct

SEQ ID NO: 270802 - DNA, 120 bp, Artificial Sequence
  ENSG00000127463_44 (sequence is synthesized)
cagcctgggcaacagagtgagaccctggctcaaaaacaaaaacaaaaactagtttgttttagtattcattaattacgtatatgagcactggtagtctagtgtttgttcttgtatacagtg

SEQ ID NO: 270803 - DNA, 120 bp, Artificial Sequence
  ENSG00000127463_45 (sequence is synthesized)
ttttcttaaatgagatgatgctatttaattctgttacttgttttttcaactaatggatcttttaaagttttttatttaaattttttgtgggtacatattaggtacatatacttatggggt

SEQ ID NO: 270804 - DNA, 120 bp, Artificial Sequence
  ENSG00000127463_46 (sequence is synthesized)
acatgagatgtttttataaaggctcagctaatgtatcttgaatatcatgtattcataaagatgactgaaatagtttctggaacaaagtctgatagaaaaaatactcaattcctaatttaa

SEQ ID NO: 270805 - DNA, 120 bp, Artificial Sequence
  ENSG00000127463_47 (sequence is synthesized)
gtgttagagactttaatgtaagctatctaatctgaactagtttcattatttgtgtgtgggtacatgttatgtgctccgtaaggcatctttcaatttgaaaatttcataattgtaatttca

SEQ ID NO: 270806 - DNA, 89 bp, Artificial Sequence
  ENSG00000127463_48 (sequence is synthesized)
aggcatctttcaatttgaaaatttcataattgtaatttcactgcctttataaattgctttttttttggaggcagggtagtcatagctca

SEQ ID NO: 270807 - DNA, 120 bp, Artificial Sequence
  ENSG00000127463_49 (sequence is synthesized)
ccaaagtgccgggattacaggcatgagctactgcacctggcccataaattgtcatacttttaaagagcctattacacaaagtatcatcagaatcatcccaagactcatttcctgattcct

SEQ ID NO: 270808 - DNA, 75 bp, Artificial Sequence
  ENSG00000127463_50 (sequence is synthesized)
tacacaaagtatcatcagaatcatcccaagactcatttcctgattcctaattatttaaaattttgcttttaggcg

SEQ ID NO: 270809 - DNA, 88 bp, Artificial Sequence
  ENSG00000127463_51 (sequence is synthesized)
acttgggaggctgaggcaggagaatcgaacccaggaggcaaaggctgcagtaagccgagatcatgcctctgcactccagttaaataaa

SEQ ID NO: 270810 - DNA, 120 bp, Artificial Sequence
  ENSG00000127463_52 (sequence is synthesized)
taaggaacatgttggccaaaagatgcctctcctagtggattctgatactttttttttttcagtcttaccatctttgaatatttgtatgttcctataactgacctttgcggtttgttctct

SEQ ID NO: 270811 - DNA, 86 bp, Artificial Sequence
  ENSG00000127463_53 (sequence is synthesized)
tttgtatgttcctataactgacctttgcggtttgttctctcagcttgaatcctgagtgtccttaaataagatattgctgcaagccc

SEQ ID NO: 270812 - DNA, 120 bp, Artificial Sequence
  ENSG00000127463_54 (sequence is synthesized)
ctgcgccagccctaaaatctcatccttatgtaacctaagcccaggacttaggacttagtggttaacaggttcctgtgtttagttgattttaccgaagatgtttgggactctcagatctga

SEQ ID NO: 270813 - DNA, 84 bp, Artificial Sequence
  ENSG00000127463_55 (sequence is synthesized)
actggcctattgaattcttaaatatgaagaagccagccctgttggcagtttatcagctttaatcaccattactgaaactggtgc

SEQ ID NO: 270814 - DNA, 120 bp, Artificial Sequence
  ENSG00000127463_56 (sequence is synthesized)
gcagtttatcagctttaatcaccattactgaaactggtgctatgattgatcatgcctggtcctccagtcttccctggccactgtaccgcagctgcatgaacagctgcgtttgctcaatgg

SEQ ID NO: 270815 - DNA, 120 bp, Artificial Sequence
  ENSG00000127463_57 (sequence is synthesized)
gaaggagacttcctgctgggggaggtatgggagggaggccccggggagaggcatgaggaaatccaagtggccttctacatttttctctttcatcattatccatatcttgattctagaact

SEQ ID NO: 270816 - DNA, 120 bp, Artificial Sequence
  ENSG00000127463_58 (sequence is synthesized)
ttattttctggtgtctcagaaagttaagaaaccagtgtcttcaaaagtgagaaccttcattcagacccatgcgtatcattggattattatttttggctatgtaagggagcctcattgacc

SEQ ID NO: 270817 - DNA, 120 bp, Artificial Sequence
  ENSG00000127463_59 (sequence is synthesized)
catttttttgttttaaattcttatttaaatgtctgcaataatgacatttttgtaactggcccttgctggacactggatcggtgtgaacattcacttcctcctgtgtagttggactacctt

SEQ ID NO: 270818 - DNA, 120 bp, Artificial Sequence
  ENSG00000127463_60 (sequence is synthesized)
accatgaagaacctttgagcttaggacccccagtgggatgctggcagcaatattgctgttgggctgagagggaaatgtaaaaatctttcacgagcttcctgttaacgatgacttttctgt

SEQ ID NO: 270819 - DNA, 120 bp, Artificial Sequence
  ENSG00000127463_61 (sequence is synthesized)
ttcaggagatctctccaagacatggatgctagaaggcagtgcttttgaatctggaaacgtttgctcttaggcccaagattgatgacaccttcccgtaagtggtttgagagggggtaggta

SEQ ID NO: 270820 - DNA, 120 bp, Artificial Sequence
  ENSG00000127463_62 (sequence is synthesized)
ataaaactactttgaaagttagtaaacttgatagtaaggaagaaaagtgaggtgctagttgatggttctccttcatggatctgtagctaattagaggggtgccttccagtgcaatttccc

SEQ ID NO: 270821 - DNA, 120 bp, Artificial Sequence
  ENSG00000127463_63 (sequence is synthesized)
acataacttaacctcactgattaagcttggttcttggtctctgtgtgccttcatgctgtgctaggggctggggatgtagcagggggcaagtctgaaaaagtcacctgccctcatggagct

SEQ ID NO: 270822 - DNA, 120 bp, Artificial Sequence
  ENSG00000127463_64 (sequence is synthesized)
tacagtctgctgggaaatggacaataaatacataagataaacaagtaaaatatatactatgttaggtactcaaatgctaagcagagtaaaacaggaatgagctaggaagtggggatgggg

SEQ ID NO: 270823 - DNA, 120 bp, Artificial Sequence
  ENSG00000127463_65 (sequence is synthesized)
atgtgcgtgggtgtaatttgagaggtggcctgggaaagcccctttgagaaggtgcattttgagtgaaggcctgaaggaggtgaaggagctagctgtgtagatacctgaggaagaactttc

SEQ ID NO: 270824 - DNA, 120 bp, Artificial Sequence
  ENSG00000127463_66 (sequence is synthesized)
taggcagagggaacaggcaatgcaaatcccctgagatcatgtctggtgagtttgcggagggcaacgctaggaaatgagatcactgaggtaattcgggccagaccatgtgggcaagccaat

SEQ ID NO: 270825 - DNA, 120 bp, Artificial Sequence
  ENSG00000127463_67 (sequence is synthesized)
atcttattcactgttggtattgttgtattaacaaccaccatcttgtcgggttttcttacctccatcctgaatttctttgcctaggggcatgaggaatggagaggagtgtgttttggagaa

SEQ ID NO: 270826 - DNA, 120 bp, Artificial Sequence
  ENSG00000127463_68 (sequence is synthesized)
gaggttaaagctaggaaaagacacaggatgataatcaggtttcagagaaatggggactgagaggcaccctggagtggagagcaggaattagcttagtggttcagtgtgttggctttaaaa

SEQ ID NO: 270827 - DNA, 120 bp, Artificial Sequence
  ENSG00000127463_69 (sequence is synthesized)
tggtcggctttcctcttgtggtgtgaagtgccagtcatctgtatgttctttcttttcagatttagaacaaagtaggaatctagatctcagtcttactctccagagagcttcctttcttgt

SEQ ID NO: 270828 - DNA, 120 bp, Artificial Sequence
  ENSG00000127463_70 (sequence is synthesized)
agtccttcctaacattcagctgctaaatttttaactacctaatgcaagcagacctcctaggagatttgaggctagatatgtagcctggaaacctcccaggactcaggaagggcagccaag

SEQ ID NO: 270829 - DNA, 120 bp, Artificial Sequence
  ENSG00000127472_0 (sequence is synthesized)
agtcgggggctgagcagggttctacccggctgggtccaggcagaagtttttcctccccacctccgggtttgtcctcatcatcggtcactcccattcacagctttaagattctggaggcca

SEQ ID NO: 270830 - DNA, 120 bp, Artificial Sequence
  ENSG00000127472_1 (sequence is synthesized)
agaatttgactccccccggatccatggtctgtggataccaatgttccgactggagacggggagcccgcgagacccgggtctccagggtctgcccaaggaagttgctcatgggagcagacc

SEQ ID NO: 270831 - DNA, 120 bp, Artificial Sequence
  ENSG00000127472_2 (sequence is synthesized)
tctagagcaggatttgaggccaggccaaagagaaccccagagatgaaaggcctcctcccactggcttggttcctggcttgtagtgtgcctgctgtgcaaggaggcttgctggacctaaaa

SEQ ID NO: 270832 - DNA, 120 bp, Artificial Sequence
  ENSG00000127472_3 (sequence is synthesized)
tcaatgatcgagaaggtgacagggaagaacgccctgacaaactacggcttctacggctgttactgcggctggggcggccgaggaacccccaaggatggcaccgattggtgctgttgggcg

SEQ ID NO: 270833 - DNA, 120 bp, Artificial Sequence
  ENSG00000127472_4 (sequence is synthesized)
catgaccactgctatgggcggctggaggagaagggctgcaacattcgcacacagtcctacaaatacagattcgcgtggggcgtggtcacctgcgagcccgggcccttctgccatgtgaac

SEQ ID NO: 270834 - DNA, 120 bp, Artificial Sequence
  ENSG00000127472_5 (sequence is synthesized)
ctctgtgcctgtgaccggaagctcgtctactgcctcaagagaaacctacggagctacaacccacagtaccaatactttcccaacatcctctgctcctaggcctccccagcgagctcctcc

SEQ ID NO: 270835 - DNA, 120 bp, Artificial Sequence
  ENSG00000127472_6 (sequence is synthesized)
cagaccaagacttttgttctgtttttctacaacacagagtactgactctgcctggttcctgagagaggctcctaagtcacagacctcagtctttctcgaagcttggcggacccccagggc

SEQ ID NO: 270836 - DNA, 120 bp, Artificial Sequence
  ENSG00000127472_7 (sequence is synthesized)
tccaactcagggttggctgtgtctcttttcttctctgaagacagcgtcctggctccagttggaacactttcctgagatgcacttacttctcagcttctgcgatcagattatcatcaccac

SEQ ID NO: 270837 - DNA, 120 bp, Artificial Sequence
  ENSG00000127472_8 (sequence is synthesized)
caccctccagagaatttttacgcaagaagagccaaattgactctctaaatctggtgtatgggtattaaataaaattcattctcaaggctaataaaaaccacattggcattttcctctgct

SEQ ID NO: 270838 - DNA, 120 bp, Artificial Sequence
  ENSG00000127472_9 (sequence is synthesized)
gtgggggatcgctggtgcctctttctctgccactggggcaataaacccaaagatgtctacattatctccgaaacagaagggaagattagtaaatgcagggttttctgggatgagcttcag

SEQ ID NO: 270839 - DNA, 120 bp, Artificial Sequence
  ENSG00000127472_10 (sequence is synthesized)
gctttctcttgggctaattttcttacaccttggggtcctctccagtattgggtctcattcttcctcgatggggtcagggaaagataactggtgattatgccagcttcagcttccaggcca

SEQ ID NO: 270840 - DNA, 120 bp, Artificial Sequence
  ENSG00000127472_11 (sequence is synthesized)
gagagggtggcattcaaatcccagtgctggcttcttcagctgtgtggtcttggacccgttactgaacctctttgactttcagtctctttgagaaataaactgtcttgttccttgcaatgt

SEQ ID NO: 270841 - DNA, 120 bp, Artificial Sequence
  ENSG00000127472_12 (sequence is synthesized)
aaaatgagacttctaaagcccaccttgatgctgatatggagaatgctgaggttctaggatttcacacagcaggaatttttttttaataggtgtcagctgtggggtttattttttacaaag

SEQ ID NO: 270842 - DNA, 120 bp, Artificial Sequence
  ENSG00000127472_13 (sequence is synthesized)
taaggacattaaaaaaaccaacccgtctatcaattcataaaagaaaggatgttctgataccaagactgaaagaagaaaggatgtattccaaaacaaaggaacatccttccaagaaaggac

SEQ ID NO: 270843 - DNA, 120 bp, Artificial Sequence
  ENSG00000127472_14 (sequence is synthesized)
ctatggcttctttattccgacataccccaaaataactgcatgataaataggtctatatttaaaaagctctagtgtcgaatgttttcaaaataaaatttaattttatgagattaccctgaa

SEQ ID NO: 270844 - DNA, 120 bp, Artificial Sequence
  ENSG00000127472_15 (sequence is synthesized)
tgtcgaattaggggcactgtaaccagggtttgggttttgaagtagtgggtgttcgactttagagttgttttcctggaagcgctgatactggacttagtggaggagaacgacggtatcaat

SEQ ID NO: 270845 - DNA, 120 bp, Artificial Sequence
  ENSG00000127472_16 (sequence is synthesized)
gtgtttctggatgactgcctggacaagggagttcagcttttgggagactgactgggctatgaagtgtacctttctactctgcagaggctggaaaggcaaaaatgatggctaaggcttcct

SEQ ID NO: 270846 - DNA, 120 bp, Artificial Sequence
  ENSG00000127472_17 (sequence is synthesized)
tgcagccgctgatacagaagcctgagggaacacactcccccctacgtccttctccaacacagcagagccaggaaggacccggatggaagttaggacaaagaggcccagaattggcacaga

SEQ ID NO: 270847 - DNA, 120 bp, Artificial Sequence
  ENSG00000127472_18 (sequence is synthesized)
tgcaggagaggctgcccctccagaactagactcttccttggctttaagatgtgaagtcgagcagctggaaggacagacacctcatctgaccactgttctatggaccaaaggcaggatgag

SEQ ID NO: 270848 - DNA, 120 bp, Artificial Sequence
  ENSG00000127472_19 (sequence is synthesized)
aatgtcagtgcccgcccctgcttacaggctggggccatctgtaggcttggacaggaggggtttggggagacatggcctgctgtctgggaaaatattgataacatgttcccaggatgaggc

SEQ ID NO: 270849 - DNA, 120 bp, Artificial Sequence
  ENSG00000127472_20 (sequence is synthesized)
atttctgacccttgttgtggtggaacgtggtgttccttgtactttctcccagcagaatatgataagaggcaggctatttctcatggcctgaatccctgtggaatatttcactttaagcac

SEQ ID NO: 270850 - DNA, 120 bp, Artificial Sequence
  ENSG00000127472_21 (sequence is synthesized)
actgcctggacaagggagttcagcttttgggagactgactgggctatgaaggatggtagaggacagtcttcagcctgagacccatccctagttatatcttctggacagattcctagaagt

SEQ ID NO: 270851 - DNA, 120 bp, Artificial Sequence
  ENSG00000127472_22 (sequence is synthesized)
gggattactggctcaaaagtgtacctttctactctgcagaggctggaaaggcaaaaatgatggctaaggcttccttgcagtggccgtgccattttgaatttccactggcattgaatgaga

SEQ ID NO: 270852 - DNA, 120 bp, Artificial Sequence
  ENSG00000127481_0 (sequence is synthesized)
gcagtagtacgacggaagatggcgacgagcggcggcgaagaggcggcggcagcggctccggcgccggggaccccggcaacgggggcggacacgaccccgggctgggaggtggctgtgcgg

SEQ ID NO: 270853 - DNA, 120 bp, Artificial Sequence
  ENSG00000127481_1 (sequence is synthesized)
cccctgctgtccgcgtcctactccgccttcgagatgaaggagttgccgcagctggtggcctcagtcatcgagagtgaatcagaaatcctgcaccatgagaagcagtacgagccattctac

SEQ ID NO: 270854 - DNA, 120 bp, Artificial Sequence
  ENSG00000127481_2 (sequence is synthesized)
tcatcttttgttgcactttccacacactatattacaacagtttgcagtctcattccccggaaccaacttcagtcagtggcagcagcctgtaaagttctaattgagttttctctcctgcgt

SEQ ID NO: 270855 - DNA, 120 bp, Artificial Sequence
  ENSG00000127481_3 (sequence is synthesized)
ctggagaatccagatgaggcttgtgctgtgtcccagaaacacttgattctcctaatcaagggcctgtgcactggctgtagccgactagatagaactgaaattatcacatttacagcaatg

SEQ ID NO: 270856 - DNA, 120 bp, Artificial Sequence
  ENSG00000127481_4 (sequence is synthesized)
atgaaatccgccaagctgccccaaacagtgaagacactttcagacgtggaagatcagaaagagctggcctcaccagtaagccctgagttgaggcaaaaggaggtacagatgaattttttg

SEQ ID NO: 270857 - DNA, 120 bp, Artificial Sequence
  ENSG00000127481_5 (sequence is synthesized)
aaccagctgacctcagtttttaaccctagaactgtagcatcacaacctatcagtacacagactctggtggaaggagaaaatgatgagcagtcatctacagatcaagcctcagctatcaaa

SEQ ID NO: 270858 - DNA, 120 bp, Artificial Sequence
  ENSG00000127481_6 (sequence is synthesized)
accaagaatgtgttcatagctcagaacgtggctagtcttcaagagcttggtggctcggagaagctactgcgtgtatgtttgaacctgccatatttcctacgctatatcaatcggttccaa

SEQ ID NO: 270859 - DNA, 120 bp, Artificial Sequence
  ENSG00000127481_7 (sequence is synthesized)
gatgcagttttagctaattccttcttcataatgcctgcaacagtagcagatgccactgctgttcgtaatggctttcattcattggtgattgatgtaactatggcattggataccctttct

SEQ ID NO: 270860 - DNA, 120 bp, Artificial Sequence
  ENSG00000127481_8 (sequence is synthesized)
ctacctgtgttggaacctctcaatccttctcgtctacaagatgtgacagtcctcagcctaagttgtctgtatgcaggtgtgagtgtggcaacgtgcatggccatcctccatgtgggtagt

SEQ ID NO: 270861 - DNA, 120 bp, Artificial Sequence
  ENSG00000127481_9 (sequence is synthesized)
gcccagcaagtgcggacagggtccacgagctccaaagaagatgactatgaaagtgacgcagctacaattgtccagaaatgtctcgaaatctatgacatgattggacaagcaatcagcagt

SEQ ID NO: 270862 - DNA, 120 bp, Artificial Sequence
  ENSG00000127481_10 (sequence is synthesized)
tctcgccgggctggtggtgagcactatcagaatttccaattgctgggtgcttggtgcttgttaaacagccttttcctcatactgaacctcagtcctactgcgttggctgataaggggaaa

SEQ ID NO: 270863 - DNA, 120 bp, Artificial Sequence
  ENSG00000127481_11 (sequence is synthesized)
gagaaggacccactggctgccctccgagtcagagacatcctttctcgtactaaagagggagtgggctcccctaaactggggcctggaaaagggcatcagggatttggggtactctcagta

SEQ ID NO: 270864 - DNA, 120 bp, Artificial Sequence
  ENSG00000127481_12 (sequence is synthesized)
atattggcaaaccatgccatcaaactgctaacgtctctctttcaagacctacaagtggaggcccttcacaagggttgggagacagatggcccccctgcagccttgagcattatggcccag

SEQ ID NO: 270865 - DNA, 120 bp, Artificial Sequence
  ENSG00000127481_13 (sequence is synthesized)
agcacctccatacagaggattcaacggctgattgactctgtcccactgatgaacctgctcttgacgttactttcaacttcctacagaaaggcatgtgtcctgcagcggcagaggaagggc

SEQ ID NO: 270866 - DNA, 120 bp, Artificial Sequence
  ENSG00000127481_14 (sequence is synthesized)
tccatgagcagcgatgccagcgcctccaccgactccaatacttactatgaggacgatttcagtagcacggaggaggacagcagccaagacgatgacagtgagcctattttggggcaatgg

SEQ ID NO: 270867 - DNA, 120 bp, Artificial Sequence
  ENSG00000127481_15 (sequence is synthesized)
tttgaggagactatttctcccagtaaagagaaagcagcacctccgcctcctcccccacctcctccactggaaagctctcctcgggttaaaagccccagtaagcaggcccctggtgagaag

SEQ ID NO: 270868 - DNA, 120 bp, Artificial Sequence
  ENSG00000127481_16 (sequence is synthesized)
ggcaacattctggcgagtcgcaaagatcctgagttgttcttaggtctggcttccaacattttgaacttcatcacctcttccatgctgaactctcggaacaattttatccgaaactatctg

SEQ ID NO: 270869 - DNA, 120 bp, Artificial Sequence
  ENSG00000127481_17 (sequence is synthesized)
agtgtatctctttcagaacaccatatggccaccctagccagtatcatcaaggaggtggacaaagatggactcaagggttcatcagatgaagagtttgctgcagctctctatcacttcaac

SEQ ID NO: 270870 - DNA, 120 bp, Artificial Sequence
  ENSG00000127481_18 (sequence is synthesized)
cactcactggtaacctctgaccttcagtcacctaacctgcagaacacactgttgcagcagctaggagtggctcctttttctgagggcccttggcccttgtacattcaccctcaaagcctc

SEQ ID NO: 270871 - DNA, 120 bp, Artificial Sequence
  ENSG00000127481_19 (sequence is synthesized)
tctgtgctttcacgcctcctgctcatctggcaacataaagccagtgctcaaggtgaccctgacgtcccagaatgccttaaagtttgggacaggtttttgtctacaatgaagcagaatgcc

SEQ ID NO: 270872 - DNA, 120 bp, Artificial Sequence
  ENSG00000127481_20 (sequence is synthesized)
ctgcaaggtgtggtgcccagtgagacagaggatctgaatgtagaacacctgcagatgctcctcctcattttccacaatttcaccgagacaggccggcgggccatattgtcgctttttgtc

SEQ ID NO: 270873 - DNA, 120 bp, Artificial Sequence
  ENSG00000127481_21 (sequence is synthesized)
cagatcatccaggagttgagcgtcaacatggatgctcagatgcgcttcgtgccgcttatcttggctcgcctccttctcatctttgattatctgcttcatcagtactccaaagcccctgtg

SEQ ID NO: 270874 - DNA, 120 bp, Artificial Sequence
  ENSG00000127481_22 (sequence is synthesized)
tatctatttgagcaggtacagcataacctgctaagtcctccctttgggtgggcaagtggatcccaggacagcaacagccgccgggcaaccactcctctctatcatggattcaaagaagta

SEQ ID NO: 270875 - DNA, 120 bp, Artificial Sequence
  ENSG00000127481_23 (sequence is synthesized)
gaagaaaactggtctaagcatttctcatcagatgctgtcccacaccccagattctactgtgtcctgtccccagaagcctcagaggatgatttgaaccgacttgattctgtggcatgtgac

SEQ ID NO: 270876 - DNA, 120 bp, Artificial Sequence
  ENSG00000127481_24 (sequence is synthesized)
gtccttttctccaagcttgtcaagtatgatgagctttatgctgcactgacagccctgcttgcagctgggtcccagcttgatacagttaggagaaaggaaaacaagaatgtaacagccttg

SEQ ID NO: 270877 - DNA, 120 bp, Artificial Sequence
  ENSG00000127481_25 (sequence is synthesized)
gaggcctgtgcccttcaatattacttcttgatactgtggaggatcctaggaattttaccaccatcaaagacttacattaaccagctatccatgaactcacctgagatgagcgaatgtgac

SEQ ID NO: 270878 - DNA, 120 bp, Artificial Sequence
  ENSG00000127481_26 (sequence is synthesized)
atcttgcacactctgcgatggtcttctcggctccggatcagctcctatgtcaactggataaaggatcaccttatcaaacagggaatgaaggctgagcatgctagctcgcttctagaactg

SEQ ID NO: 270879 - DNA, 120 bp, Artificial Sequence
  ENSG00000127481_27 (sequence is synthesized)
gcatccaccactaagtgtagctcagtgaaatatgatgttgaaatagtagaggaatacttcgctcgacagatctcatccttctgtagtatcgactgtaccaccatcttgcagctgcatgaa

SEQ ID NO: 270880 - DNA, 120 bp, Artificial Sequence
  ENSG00000127481_28 (sequence is synthesized)
attcccagtctgcagtccatctacacccttgatgccgcgatctcaaaggtccaggtctctttggatgagcatttttctaagatggctgctgagactgatcctcataagtcgtctgagatt

SEQ ID NO: 270881 - DNA, 120 bp, Artificial Sequence
  ENSG00000127481_29 (sequence is synthesized)
accaagaacctacttccagccacgctgcaactcattgacacctatgcatcgttcaccagagcctatttgctgcaaaactttaatgaagagggaacaactgagaaaccttccaaggagaaa

SEQ ID NO: 270882 - DNA, 120 bp, Artificial Sequence
  ENSG00000127481_30 (sequence is synthesized)
ctgcaaggctttgctgctgttttggctattggctctagcaggtgcaaggcaaatactctgggtccgacactggttcagaatttgccatcgtcagtgcagactgtgtgtgagtcctggaac

SEQ ID NO: 270883 - DNA, 120 bp, Artificial Sequence
  ENSG00000127481_31 (sequence is synthesized)
aacatcaataccaatgaatttcccaatattggatcctggcgcaatgcctttgccaatgacaccatcccttcagagagttatattagtgcagtgcaggctgcacacctggggactctctgt

SEQ ID NO: 270884 - DNA, 120 bp, Artificial Sequence
  ENSG00000127481_32 (sequence is synthesized)
agccaaagtctgcccctggctgcttccctgaagcataccctcctctcactggtcaggttgactggagatcttattgtttggtcagatgagatgaacccaccacaggtaattcggacactg

SEQ ID NO: 270885 - DNA, 120 bp, Artificial Sequence
  ENSG00000127481_33 (sequence is synthesized)
ctacctcttcttttggaatcaagcactgagagtgttgccgagatcagtagcaactccctggaacgcatcttgggccctgctgagtctgatgagttcttggctcgtgtttatgagaagctg

SEQ ID NO: 270886 - DNA, 120 bp, Artificial Sequence
  ENSG00000127481_34 (sequence is synthesized)
atcactggttgttacaacattctggccaatcatgcagatcctaacagtggactggatgaatccatcctggaggaatgtctccagtacttggaaaagcagctggaaagtagccaggctcgt

SEQ ID NO: 270887 - DNA, 120 bp, Artificial Sequence
  ENSG00000127481_35 (sequence is synthesized)
aaagctatggaggagtttttctctgacagtggagaacttgtacagatcatgatggcaacagccaatgagaacctctctgctaaattctgtaaccgagttttgaaattcttcaccaaactc

SEQ ID NO: 270888 - DNA, 120 bp, Artificial Sequence
  ENSG00000127481_36 (sequence is synthesized)
ttccagctgactgagaagagccctaacccgagcctgttgcatctctgtggctccctggcacaactggcctgtgtggaacctgtgcgcctgcaggcctggctcacccgcatgactacatcg

SEQ ID NO: 270889 - DNA, 120 bp, Artificial Sequence
  ENSG00000127481_37 (sequence is synthesized)
cccccaaaagattctgatcagctggatgtaattcaggagaaccggcagctgctgcagttactgaccacatacattgttcgggaaaacagccaagttggggaaggtgtgtgtgctgttctt

SEQ ID NO: 270890 - DNA, 120 bp, Artificial Sequence
  ENSG00000127481_38 (sequence is synthesized)
ctgggcaccctgactcccatggcaacagagatgctggccaacggtgatgggactggcttccctgaacttatggttgtgatggccactctggccagtgcaggtcaaggtgctggtcacctt

SEQ ID NO: 270891 - DNA, 120 bp, Artificial Sequence
  ENSG00000127481_39 (sequence is synthesized)
cagcttcataatgctgctgtggattggctgagcagatgcaagaaatacctgtcacagaagaatgtagttgaaaaactgaatgccaatgtaatgcatggaaagcatgtgatgatcttggag

SEQ ID NO: 270892 - DNA, 120 bp, Artificial Sequence
  ENSG00000127481_40 (sequence is synthesized)
tgcacatgccatatcatgtcttacttggctgatgtcacgaatgccctgagccagagtaatggtcaaggcccaagtcatctctcagtggatggggaagagcgggccattgaagtagactca

SEQ ID NO: 270893 - DNA, 120 bp, Artificial Sequence
  ENSG00000127481_41 (sequence is synthesized)
gactgggtggaggagttggcggtggaagaggaagattcccaggctgaggattcagatgaagattctctttgcaataaactctgcacttttacgatcacacagaaagaattcatgaaccag

SEQ ID NO: 270894 - DNA, 120 bp, Artificial Sequence
  ENSG00000127481_42 (sequence is synthesized)
cattggtaccactgtcacacctgtaaaatggtggatggcgtgggtgtctgcacagtgtgtgctaaggtgtgccacaaggatcatgagatttcctatgccaagtatggatccttcttctgt

SEQ ID NO: 270895 - DNA, 120 bp, Artificial Sequence
  ENSG00000127481_43 (sequence is synthesized)
gactgtggagccaaggaagatggcagctgtttggctctggtgaagagaactcctagcagtggcatgagctctaccatgaaggagtcggcatttcagagtgaacccaggatttcagagagt

SEQ ID NO: 270896 - DNA, 120 bp, Artificial Sequence
  ENSG00000127481_44 (sequence is synthesized)
ctagtgcgtcatgccagcacctcctcgccagctgacaaagccaaggttaccatcagtgatggaaaggttgctgacgaagagaagcccaagaagagcagcctctgccgcacagtagagggc

SEQ ID NO: 270897 - DNA, 120 bp, Artificial Sequence
  ENSG00000127481_45 (sequence is synthesized)
tgccgggaggaattacagaaccaggccaatttctccttcgctcctctcgtgttagacatgcttaatttccttatggatgccattcagaccaacttccagcaagcttcagccgtcgggagc

SEQ ID NO: 270898 - DNA, 120 bp, Artificial Sequence
  ENSG00000127481_46 (sequence is synthesized)
agcagccgtgctcagcaagccctcagtgagctacacactgtggagaaggcagtggagatgacagaccagctgatggttcccaccttagggtcccaggaaggtgcctttgagaatgtgcgg

SEQ ID NO: 270899 - DNA, 120 bp, Artificial Sequence
  ENSG00000127481_47 (sequence is synthesized)
atgaattacagtggagaccagggccagaccatccggcagctgatcagtgctcatgtgctcaggcgggtggctatgtgtgtgctctcctctccccatgggcgccgccaacatttggctgtc

SEQ ID NO: 270900 - DNA, 120 bp, Artificial Sequence
  ENSG00000127481_48 (sequence is synthesized)
agccatgagaagggcaagatcaccgttctgcagctctctgcactcctgaagcaagcagattccagcaaaaggaagttaactctgacccgcttggcttctgccccagttccttttactgtg

SEQ ID NO: 270901 - DNA, 120 bp, Artificial Sequence
  ENSG00000127481_49 (sequence is synthesized)
ttgagcctcacaggaaatccctgcaaggaagactacttggcggtttgtgggctaaaggactgtcatgtgctcacctttagtagctcaggctctgtttcggatcacttggttttgcaccct

SEQ ID NO: 270902 - DNA, 120 bp, Artificial Sequence
  ENSG00000127481_50 (sequence is synthesized)
cagttggcaacggggaacttcatcatcaaagccgtgtggttacctggttcacagaccgagttagcaattgtcaccgcagactttgttaagatttatgacctgtgtgttgatgccttgagt

SEQ ID NO: 270903 - DNA, 120 bp, Artificial Sequence
  ENSG00000127481_51 (sequence is synthesized)
ccaaccttctattttctcctgccaagctcaaagataagagatgttaccttccttttcaatgaggagggaaagaacatcattgttataatgtcttcggctgggtacatctatactcagctt

SEQ ID NO: 270904 - DNA, 120 bp, Artificial Sequence
  ENSG00000127481_52 (sequence is synthesized)
atggaagaggccagcagtgcccagcagggacccttctatgtcactaatgtgttggaaatcaatcatgaggacctgaaggacagtaacagccaggtggcgggcggtggtgtgtccgtgtac

SEQ ID NO: 270905 - DNA, 120 bp, Artificial Sequence
  ENSG00000127481_53 (sequence is synthesized)
tactcccacgtgttgcagatgttgttcttcagctattgtcaaggcaaatcattcgcagccaccatcagcaggacaaccctggaggtgttgcaactcttccccatcaacatcaaaagttcc

SEQ ID NO: 270906 - DNA, 120 bp, Artificial Sequence
  ENSG00000127481_54 (sequence is synthesized)
aatggtggcagtaagacttctcctgctctttgccagtggtctgaggtgatgaaccaccctggcttggtgtgctgtgtccagcaaactacaggggtgccgctggtagttatggtgaaacca

SEQ ID NO: 270907 - DNA, 120 bp, Artificial Sequence
  ENSG00000127481_55 (sequence is synthesized)
gacacttttcttatccaggagattaagactcttcctgctaaagcgaagatccaagacatggttgctattaggcacacggcctgcaatgagcagcagcggacaacaatgattctgctgtgt

SEQ ID NO: 270908 - DNA, 120 bp, Artificial Sequence
  ENSG00000127481_56 (sequence is synthesized)
gaggatggcagcctgcgcatttacatggccaacgtggagaacacctcctactggctgcagccatccctgcagcccagcagtgtcatcagcatcatgaagcctgttcgaaagcgcaaaaca

SEQ ID NO: 270909 - DNA, 120 bp, Artificial Sequence
  ENSG00000127481_57 (sequence is synthesized)
gctacaatcacaacccgcacgtctagccaggtgactttccccattgacttttttgaacacaaccagcagctgacagatgtggagtttggtggtaacgacctcctacaggtctataatgca

SEQ ID NO: 270910 - DNA, 120 bp, Artificial Sequence
  ENSG00000127481_58 (sequence is synthesized)
caacagataaaacaccggctgaattccactggcatgtatgtggccaacaccaagcccggaggcttcaccattgagattagtaacaacaatagcactatggtgatgacaggcatgcggatc

SEQ ID NO: 270911 - DNA, 120 bp, Artificial Sequence
  ENSG00000127481_59 (sequence is synthesized)
cagattgggactcaagcaatagaacgggccccgtcatatatcgagatcttcggcagaactatgcagctcaacctgagtcgctcacgctggtttgacttccccttcaccagagaagaagcc

SEQ ID NO: 270912 - DNA, 120 bp, Artificial Sequence
  ENSG00000127481_60 (sequence is synthesized)
ctgcaggctgataagaagctgaacctcttcattggggcctcggtggatccagcaggtgtcaccatgatagatgctgtaaaaatttatggcaagactaaggagcagtttggctggcctgat

SEQ ID NO: 270913 - DNA, 120 bp, Artificial Sequence
  ENSG00000127481_61 (sequence is synthesized)
gagcccccagaagaattcccttctgcctctgtcagcaacatctgcccttcaaatctgaaccagagcaacggcactggagatagcgactcagctgcccccactacgaccagtggaactgtc

SEQ ID NO: 270914 - DNA, 120 bp, Artificial Sequence
  ENSG00000127481_62 (sequence is synthesized)
ctggagaggctggttgtgagttctttagaagccctggaaagctgctttgccgttggcccaatcatcgagaaggagagaaacaagaatgctgctcaggagctggccactttgctgttgtcc

SEQ ID NO: 270915 - DNA, 120 bp, Artificial Sequence
  ENSG00000127481_63 (sequence is synthesized)
ctgccagcacctgccagtgtccagcagcagtccaagagccttctggccagcctgcacaccagccgctcggcctaccacagccacaaggatcaggccttgctgagcaaagctgtgcagtgt

SEQ ID NO: 270916 - DNA, 120 bp, Artificial Sequence
  ENSG00000127481_64 (sequence is synthesized)
ctcaacacatctagcaaagagggcaaggatttggaccctgaggtgttccagaggctagtgatcacagctcgctccattgccatcatgcgccccaacaaccttgtccactttacggagtca

SEQ ID NO: 270917 - DNA, 120 bp, Artificial Sequence
  ENSG00000127481_65 (sequence is synthesized)
aagctgccccagatggaaacagaaggaatggatgaagggaaggaaccgcagaagcagttggaaggagattgctgtagtttcatcacccagcttgtgaaccacttctggaaactccatgca

SEQ ID NO: 270918 - DNA, 120 bp, Artificial Sequence
  ENSG00000127481_66 (sequence is synthesized)
atattgaagctactgtcaatgctctggtggacatcatccatggctactgtacctgtgagctggattgtattaacacagcatccaagatctacatgcagatgctcttgtgtcctgatcctg

SEQ ID NO: 270919 - DNA, 120 bp, Artificial Sequence
  ENSG00000127481_67 (sequence is synthesized)
ctgtgagcttctcttgtaaacaagctctaattcgagtcctaaggcccaggaacaaacggagacatgtgactttaccctcttcccctcgaagcaacactccaatgggagacaaggatgatg

SEQ ID NO: 270920 - DNA, 120 bp, Artificial Sequence
  ENSG00000127481_68 (sequence is synthesized)
atgacgatgatgatgcagatgagaaaatgcagtcatcagggatcccgaatggtggtcacatccgtcaggaaagccaggaacagagtgaggtggaccatggagattttgagatggtgtctg

SEQ ID NO: 270921 - DNA, 120 bp, Artificial Sequence
  ENSG00000127481_69 (sequence is synthesized)
agtcgatggtcctggagacagctgaaaatgtcaacaatggcaacccctctcccctggaggccctgctggcaggcgcagagggcttcccccccatgctggacatcccacctgatgcagatg

SEQ ID NO: 270922 - DNA, 120 bp, Artificial Sequence
  ENSG00000127481_70 (sequence is synthesized)
acgagaccatggttgaactagccattgccctgagcctgcagcaggaccaacaaggcagcagcagcagtgccctgggcctgcagagcctgggactgtccggccaggcacccagctcttcct

SEQ ID NO: 270923 - DNA, 120 bp, Artificial Sequence
  ENSG00000127481_71 (sequence is synthesized)
ctctggacgcaggaaccctctctgacaccacagcatcagctccagcctcagacgacgagggcagtacagcagcgacagatggttctacccttcggacctctcctgctgaccacggtggta

SEQ ID NO: 270924 - DNA, 120 bp, Artificial Sequence
  ENSG00000127481_72 (sequence is synthesized)
gtgtgggctcggagagcgggggcagtgcagtggactcagtggctggcgagcacagtgtatctggccggagcagtgcttatggcgatgctacagctgaggggcatccggctggaccaggaa

SEQ ID NO: 270925 - DNA, 120 bp, Artificial Sequence
  ENSG00000127481_73 (sequence is synthesized)
gtgtcagctcaagcactggagccatcagcaccaccactgggcaccaggagggagatggctccgagggagaaggagaaggagaaactgaaggagatgtccacactagcaacaggctgcaca

SEQ ID NO: 270926 - DNA, 120 bp, Artificial Sequence
  ENSG00000127481_74 (sequence is synthesized)
tggtccgtctaatgctgttggagagattactgcagaccctgcctcaattacgaaacgttggcggtgtccgggccatcccatacatgcaggtcattctaatgctcactacagatctggatg

SEQ ID NO: 270927 - DNA, 120 bp, Artificial Sequence
  ENSG00000127481_75 (sequence is synthesized)
gagaagatgagaaagacaagggggccctagacaacctgctctcccagcttattgctgagttgggtatggataaaaaggatgtctccaagaagaatgagcgcagcgccctgaatgaagtcc

SEQ ID NO: 270928 - DNA, 120 bp, Artificial Sequence
  ENSG00000127481_76 (sequence is synthesized)
atctggtagtaatgagactcctgagtgtcttcatgtcccgcaccaaatctggatccaagtcttccatatgtgagtcatcttccctcatctccagtgccacagcagcagctctactgagct

SEQ ID NO: 270929 - DNA, 120 bp, Artificial Sequence
  ENSG00000127481_77 (sequence is synthesized)
ctggggctgtggactactgcctgcacgtgctcaaatcactgctggaatattggaagagccaacagaatgacgaggagcctgtggctaccagccagttgctgaaaccacatactacctcct

SEQ ID NO: 270930 - DNA, 120 bp, Artificial Sequence
  ENSG00000127481_78 (sequence is synthesized)
ccccacctgacatgagcccattctttctccgccagtatgtgaagggtcatgctgctgatgtgtttgaggcctatactcagcttctaacagaaatggtactgaggcttccttaccaaatca

SEQ ID NO: 270931 - DNA, 120 bp, Artificial Sequence
  ENSG00000127481_79 (sequence is synthesized)
aaaagattactgacaccaattctcgaatcccacctcctgtctttgaccactcgtggttttactttctctccgagtacctcatgatccagcagactccatttgtgcgccgtcaagtccgca

SEQ ID NO: 270932 - DNA, 120 bp, Artificial Sequence
  ENSG00000127481_80 (sequence is synthesized)
aacttctgctcttcatctgtggatccaaagagaagtaccgccagctccgggatttgcacaccctggactctcacgtgcgtgggatcaagaagctgctagaagagcaggggatattcctcc

SEQ ID NO: 270933 - DNA, 120 bp, Artificial Sequence
  ENSG00000127481_81 (sequence is synthesized)
gggcaagtgtggttacagccagctcaggctccgccttgcaatatgacacactcatcagcctgatggagcacctgaaagcctgtgcagagattgccgcccagcgaaccatcaactggcaga

SEQ ID NO: 270934 - DNA, 120 bp, Artificial Sequence
  ENSG00000127481_82 (sequence is synthesized)
aattctgcatcaaagatgactccgtcctgtacttcctcctccaagtcagtttccttgtggatgagggcgtgtccccagtgctgctgcaactgctctcctgtgctctgtgcggcagcaagg

SEQ ID NO: 270935 - DNA, 120 bp, Artificial Sequence
  ENSG00000127481_83 (sequence is synthesized)
tgctcgctgcactggcagcctcttcgggatcctccagtgcttcttcctcctcagcccctgtggctgccagttctggacaagccacaacacagtccaagtcttccactaaaaagagcaaga

SEQ ID NO: 270936 - DNA, 120 bp, Artificial Sequence
  ENSG00000127481_84 (sequence is synthesized)
aagaagaaaaagaaaaggagaaagatggtgagacctctggcagccaggaggaccagctgtgcacagctctggtgaaccagctgaacaaatttgccgataaggaaaccctgatccagttcc

SEQ ID NO: 270937 - DNA, 120 bp, Artificial Sequence
  ENSG00000127481_85 (sequence is synthesized)
tgcgttgtttcctgttagagtccaattcttcctcggtgcgctggcaggcccactgtctgacactgcacatctacagaaattccagcaaatctcaacaggagctcctgctagatctgatgt

SEQ ID NO: 270938 - DNA, 120 bp, Artificial Sequence
  ENSG00000127481_86 (sequence is synthesized)
ggtccatctggccagaactcccagcctatggtcgtaaggctgcccagtttgtggacctactaggatatttctccctgaaaactccacaaacagagaagaagttgaaggagtattcacaga

SEQ ID NO: 270939 - DNA, 120 bp, Artificial Sequence
  ENSG00000127481_87 (sequence is synthesized)
aggctgtggagattctgcggactcaaaaccatattcttaccaaccaccccaactcgaacatttataacactttgtctggcttagtggagtttgatggctattacctggagagcgatccct

SEQ ID NO: 270940 - DNA, 120 bp, Artificial Sequence
  ENSG00000127481_88 (sequence is synthesized)
gcctggtgtgtaataacccggaagtaccgttctgttatatcaagctgtcttccattaaagtggacacgcggtacaccaccacccagcaggttgtgaagctcattggcagtcacaccatca

SEQ ID NO: 270941 - DNA, 120 bp, Artificial Sequence
  ENSG00000127481_89 (sequence is synthesized)
gcaaagtgacagtgaaaatcggggatctgaaacggaccaagatggtgcggaccatcaacctgtattataacaaccgaaccgtgcaggccatcgtggagttgaaaaacaagccagctcgct

SEQ ID NO: 270942 - DNA, 120 bp, Artificial Sequence
  ENSG00000127481_90 (sequence is synthesized)
ggcacaaagccaagaaggttcagctgacccctggacagacagaggtgaagattgacctgccgttgcccattgtggcctccaatctgatgattgagtttgcagacttctatgaaaactacc

SEQ ID NO: 270943 - DNA, 120 bp, Artificial Sequence
  ENSG00000127481_91 (sequence is synthesized)
aggcctccacagagaccctgcagtgccctcgctgtagtgcctcggtccctgccaacccaggagtctgtggcaactgtggagagaatgtgtaccagtgtcacaaatgcagatccatcaact

SEQ ID NO: 270944 - DNA, 120 bp, Artificial Sequence
  ENSG00000127481_92 (sequence is synthesized)
acgatgaaaaggatcccttcctctgcaatgcctgtggcttctgtaaatatgcccgcttcgacttcatgctctatgccaagccttgctgtgcagtggatcccattgagaatgaagaagacc

SEQ ID NO: 270945 - DNA, 120 bp, Artificial Sequence
  ENSG00000127481_93 (sequence is synthesized)
ggaagaaggctgtatccaacatcaatacacttttggacaaagctgatcgagtgtatcatcagctgatgggacaccggccacagctggagaacctgctctgcaaagtgaatgaggcagctc

SEQ ID NO: 270946 - DNA, 120 bp, Artificial Sequence
  ENSG00000127481_94 (sequence is synthesized)
cagaaaagccacaggatgactcaggaacagcagggggcatcagctccacttctgccagtgtgaatcgttacatcctgcagttggctcaggagtattgtggagactgcaagaactcttttg

SEQ ID NO: 270947 - DNA, 120 bp, Artificial Sequence
  ENSG00000127481_95 (sequence is synthesized)
atgaactctccaaaatcatccagaaagtctttgcttcgcgcaaagagttgttggaatatgacctacagcagagggaagcagccactaaatcatcccggacctccgtgcagcccacattca

SEQ ID NO: 270948 - DNA, 120 bp, Artificial Sequence
  ENSG00000127481_96 (sequence is synthesized)
ctgccagccagtaccgtgccttatccgtcctgggctgtggccacacatcctccaccaagtgctatggctgcgcctcggctgtcacagaacattgtatcacactacttcgggccctggcca

SEQ ID NO: 270949 - DNA, 120 bp, Artificial Sequence
  ENSG00000127481_97 (sequence is synthesized)
ccaacccagccttgaggcacatccttgtctcccagggccttatccgggagctctttgattataatcttcgccgaggggctgcggccatgcgggaggaggtccgccagctcatgtgcctcc

SEQ ID NO: 270950 - DNA, 120 bp, Artificial Sequence
  ENSG00000127481_98 (sequence is synthesized)
taactcgagacaacccagaagccacccaacagatgaatgacctgattattggcaaggtctccacagccctgaagggccactgggccaaccccgatctggcaagtagcctgcagtatgaaa

SEQ ID NO: 270951 - DNA, 120 bp, Artificial Sequence
  ENSG00000127481_99 (sequence is synthesized)
tgctgctgctgacggattctatctccaaggaggacagctgctgggagctccggttacgctgtgctctcagccttttcctcatggctgtgaacattaagactcctgtggtggttgaaaaca

SEQ ID NO: 270952 - DNA, 120 bp, Artificial Sequence
  ENSG00000127481_100 (sequence is synthesized)
ttaccctcatgtgcctgaggatcttgcagaagctgataaaaccacctgctcccactagcaagaagaacaaggatgtccccgttgaggccctcaccacggtgaagccatactgcaatgaga

SEQ ID NO: 270953 - DNA, 120 bp, Artificial Sequence
  ENSG00000127481_101 (sequence is synthesized)
tccatgcccaggctcaactgtggctcaagagagaccccaaggcatcctatgatgcctggaagaagtgtcttcctatcagagggatagatggcaatgggaaagcccccagcaaatcagagc

SEQ ID NO: 270954 - DNA, 120 bp, Artificial Sequence
  ENSG00000127481_102 (sequence is synthesized)
tccgccatctctatttgactgagaagtatgtgtggaggtggaaacagttcctgagtcgtcgggggaagaggacctcccccttggatctcaaactggggcataacaactggctgcgacaag

SEQ ID NO: 270955 - DNA, 120 bp, Artificial Sequence
  ENSG00000127481_103 (sequence is synthesized)
tgcttttcactccagcaacgcaggccgcacggcaggcagcctgtaccattgtggaagctctagccaccattcccagccgcaagcagcaggtcctggacctgcttaccagttacctggatg

SEQ ID NO: 270956 - DNA, 120 bp, Artificial Sequence
  ENSG00000127481_104 (sequence is synthesized)
agctgagcatagctggggagtgtgcagctgagtacctggctctctaccagaagctcatcacttctgcgcactggaaagtctacttggcagctcggggagtcctaccctatgtgggcaacc

SEQ ID NO: 270957 - DNA, 120 bp, Artificial Sequence
  ENSG00000127481_105 (sequence is synthesized)
tcatcaccaaggaaatagctcgtctgctggccctggaggaggctaccctgagtaccgatctgcagcagggttatgcccttaaaagtctcacaggccttctctcctcctttgttgaggtgg

SEQ ID NO: 270958 - DNA, 120 bp, Artificial Sequence
  ENSG00000127481_106 (sequence is synthesized)
aatccatcaaaagacattttaaaagtcgcttggtgggtactgtgctgaatggatacctgtgcttgcggaagctggtggtgcagaggaccaagctgatcgatgagacgcaggacatgctgc

SEQ ID NO: 270959 - DNA, 120 bp, Artificial Sequence
  ENSG00000127481_107 (sequence is synthesized)
tggagatgctggaggacatgaccacaggtacagaatcagaaaccaaggccttcatggctgtgtgcattgagacagccaagcgctacaatctggatgactaccggaccccggtgttcatct

SEQ ID NO: 270960 - DNA, 120 bp, Artificial Sequence
  ENSG00000127481_108 (sequence is synthesized)
tcgagaggctctgcagcatcatttatcctgaggagaatgaagtcactgagttctttgtgaccctggagaaggatccccaacaagaagacttcttacagggcaggatgcctgggaacccgt

SEQ ID NO: 270961 - DNA, 120 bp, Artificial Sequence
  ENSG00000127481_109 (sequence is synthesized)
atagcagcaatgagccaggcatcgggccgctgatgagggatataaagaacaagatttgccaggactgtgacttagtggccctcctggaagatgacagtggcatggagcttctagtgaaca

SEQ ID NO: 270962 - DNA, 120 bp, Artificial Sequence
  ENSG00000127481_110 (sequence is synthesized)
ataaaatcattagtttggaccttcctgtggctgaagtttacaagaaagtctggtgtaccacgaatgagggagagcccatgaggattgtttatcgtatgcgggggctgctgggcgatgcca

SEQ ID NO: 270963 - DNA, 120 bp, Artificial Sequence
  ENSG00000127481_111 (sequence is synthesized)
cagaggagttcattgagtccctggactctactacagatgaagaagaagatgaagaagaagtgtataaaatggctggtgtgatggcccagtgtgggggcctggaatgcatgcttaacagac

SEQ ID NO: 270964 - DNA, 120 bp, Artificial Sequence
  ENSG00000127481_112 (sequence is synthesized)
tcgcagggatcagagatttcaagcagggacgccaccttctaacagtgctactgaaattgttcagttactgcgtgaaggtgaaagtcaaccggcagcaactggtcaaactggaaatgaaca

SEQ ID NO: 270965 - DNA, 120 bp, Artificial Sequence
  ENSG00000127481_113 (sequence is synthesized)
ccttgaacgtcatgctggggaccctaaacctggcccttgtagctgaacaagaaagcaaggacagtgggggtgcagctgtggctgagcaggtgcttagcatcatggagatcattctagatg

SEQ ID NO: 270966 - DNA, 120 bp, Artificial Sequence
  ENSG00000127481_114 (sequence is synthesized)
agtccaatgctgagcccctgagtgaggacaagggcaacctcctcctgacaggtgacaaggatcaactggtgatgctcttggaccagatcaacagcacctttgttcgctccaaccccagtg

SEQ ID NO: 270967 - DNA, 120 bp, Artificial Sequence
  ENSG00000127481_115 (sequence is synthesized)
tgctccagggcctgcttcgcatcatcccgtacctttcctttggagaggtggagaaaatgcagatcttggtggagcgattcaaaccatactgcaactttgataaatatgatgaagatcaca

SEQ ID NO: 270968 - DNA, 120 bp, Artificial Sequence
  ENSG00000127481_116 (sequence is synthesized)
gtggtgatgataaagtcttcctggactgcttctgtaaaatagctgctggcatcaagaacaacagcaatgggcaccagctgaaggatctgattctccagaaggggatcacccagaatgcac

SEQ ID NO: 270969 - DNA, 120 bp, Artificial Sequence
  ENSG00000127481_117 (sequence is synthesized)
ttgactacatgaaaaagcacatccctagcgccaagaatttggatgccgacatctggaaaaagtttttgtctcgcccagccttgccatttatcctaaggctgcttcggggcctggccatcc

SEQ ID NO: 270970 - DNA, 120 bp, Artificial Sequence
  ENSG00000127481_118 (sequence is synthesized)
agcaccctggcacccaggttctgattggaactgattccatcccgaacctgcataagctggagcaggtgtccagtgatgagggcattgggaccttggcagagaacctgctggaagccctgc

SEQ ID NO: 270971 - DNA, 120 bp, Artificial Sequence
  ENSG00000127481_119 (sequence is synthesized)
gggaacaccctgacgtaaacaagaagattgacgcagcccgcagggagacccgggcagagaagaagcgcatggccatggcaatgaggcagaaggccctgggcaccctgggcatgacgacaa

SEQ ID NO: 270972 - DNA, 120 bp, Artificial Sequence
  ENSG00000127481_120 (sequence is synthesized)
atgaaaagggccaggtcgtgaccaagacagcactcctgaagcagatggaagagctgatcgaggagcctggcctcacgtgctgcatctgcagggagggatacaagttccagcccacaaagg

SEQ ID NO: 270973 - DNA, 120 bp, Artificial Sequence
  ENSG00000127481_121 (sequence is synthesized)
tcctgggcatttataccttcacgaagcgggtagccttggaggagatggagaataagccccggaaacagcagggctacagcaccgtgtcccacttcaacattgtgcactacgactgccatc

SEQ ID NO: 270974 - DNA, 120 bp, Artificial Sequence
  ENSG00000127481_122 (sequence is synthesized)
tggctgccgtcaggttggctcgaggccgggaagagtgggagagtgccgccctgcagaatgccaacaccaagtgcaacgggctccttccggtctggggacctcatgtccctgaatcagctt

SEQ ID NO: 270975 - DNA, 120 bp, Artificial Sequence
  ENSG00000127481_123 (sequence is synthesized)
ttgccacttgcttggcaagacacaacacttacctccaggaatgtacaggccagcgggagcccacgtatcagctcaacatccatgacatcaaactgctcttcctgcgcttcgccatggagc

SEQ ID NO: 270976 - DNA, 120 bp, Artificial Sequence
  ENSG00000127481_124 (sequence is synthesized)
agtcgttcagcgcagacactggcgggggcggccgggagagcaacatccacctgatcccgtacatcattcacactgtgctttacgtcctgaacacaacccgagcaacttcccgagaagaga

SEQ ID NO: 270977 - DNA, 120 bp, Artificial Sequence
  ENSG00000127481_125 (sequence is synthesized)
agaacctccaaggctttctggaacagcccaaggagaagtgggtggagagtgcctttgaagtggacgggccctactatttcacagtcttggcccttcacatcctgccccctgagcagtgga

SEQ ID NO: 270978 - DNA, 120 bp, Artificial Sequence
  ENSG00000127481_126 (sequence is synthesized)
gagccacacgtgtggaaatcttgcggaggctgttggtgacctcgcaggctcgggcagtggctccaggtggagccaccaggctgacagataaggcagtgaaggactattccgcttaccgtt

SEQ ID NO: 270979 - DNA, 120 bp, Artificial Sequence
  ENSG00000127481_127 (sequence is synthesized)
cttcccttctcttttgggccctcgtcgatctcatttacaacatgtttaagaaggtgcctaccagtaacacagagggaggctggtcctgctctctcgctgagtacatccgccacaacgaca

SEQ ID NO: 270980 - DNA, 120 bp, Artificial Sequence
  ENSG00000127481_128 (sequence is synthesized)
tgcccatctacgaagctgccgacaaagccctgaaaaccttccaggaggagttcatgccagtggagaccttctcagagttcctcgatgtggccggtcttttatcagaaatcaccgatccag

SEQ ID NO: 270981 - DNA, 120 bp, Artificial Sequence
  ENSG00000127481_129 (sequence is synthesized)
agagcttcctgaaggacctgttgaactcagtcccctgaccaccacacagcagctgcggcggcgaagacgaagctggcttgccttccaccctctgttctccctccttgtgcattaagttcc

SEQ ID NO: 270982 - DNA, 120 bp, Artificial Sequence
  ENSG00000127481_130 (sequence is synthesized)
ctccgcgggatgctgcattgttaccccgccctcccctctctcatttttcttggtgtggcttggggtttttaggcttcctgttttatctcgtgtgtgtggtgcaccagctatgaggttgtc

SEQ ID NO: 270983 - DNA, 120 bp, Artificial Sequence
  ENSG00000127481_131 (sequence is synthesized)
tgtaacccaagccatcaaagggcctgtacatacctaggagccatgagttgtcccggccagcttcatacttgagtgtgcacatcttgagaaataaacaagtgacttaacacacattgaaaa

SEQ ID NO: 270984 - DNA, 120 bp, Artificial Sequence
  ENSG00000127481_132 (sequence is synthesized)
ttttatgacttcattgtatttattatgtagctgtagcaaactcttgggagcatttggactgtttacagtttttaagcaatcccttaccagcgctgtgactgttggcttcctggaaaggag

SEQ ID NO: 270985 - DNA, 120 bp, Artificial Sequence
  ENSG00000127481_133 (sequence is synthesized)
ttctgcaagggttcgattaagaagatgtaactacagagtgtctggtgctgcaagctcctgggacagtggtggaggtaactggtatccttggcagtgatatcacactgactgcacttgtca

SEQ ID NO: 270986 - DNA, 120 bp, Artificial Sequence
  ENSG00000127481_134 (sequence is synthesized)
gagcatcacctcttccattaggaactgctgtcattgccgttgtattagagatggtagagatatatcccgccattggagctaccagcctaatgtgagagcccagccatctcaccatgtccc

SEQ ID NO: 270987 - DNA, 120 bp, Artificial Sequence
  ENSG00000127481_135 (sequence is synthesized)
ctgaagagccgcttctccctcctgtcctcttcatttcaggaggagcccctgctgatggtgtagaccctgcttagacatccctttcctactggcccccatgtcctacactctcatgtggcc

SEQ ID NO: 270988 - DNA, 120 bp, Artificial Sequence
  ENSG00000127481_136 (sequence is synthesized)
catcagttttgaaaagctgcttagtggtacgcacgtgctaggtgaaggcatgctttgtgactgcggtggttgacaccagcccttctcccttctcagtctgtcatgtcaagagtctaagct

SEQ ID NO: 270989 - DNA, 120 bp, Artificial Sequence
  ENSG00000127481_137 (sequence is synthesized)
gatggctggcaggttgcctggtcatttctgggttttctgttccgctactagaaaggtagagccagtcttacctactgtagaaaatgttaggaaggcagccaggcacagggtgataaaacc

SEQ ID NO: 270990 - DNA, 120 bp, Artificial Sequence
  ENSG00000127481_138 (sequence is synthesized)
aatgagatgatcagggctaagaacagtaatcaggttttccacatcttgctggtgttggcataagccaggaaagtttcagtgtggccacatggggtattttctaataattaaaaactcgtc

SEQ ID NO: 270991 - DNA, 120 bp, Artificial Sequence
  ENSG00000127481_139 (sequence is synthesized)
ttcattctctcttcttggttacattcctatcccatgcgtcccacattccatgaacctttcttcctctagaccactctcctatacgtgtggacacctccccaagaaagagcatgtcagaaa

SEQ ID NO: 270992 - DNA, 120 bp, Artificial Sequence
  ENSG00000127481_140 (sequence is synthesized)
ggaagtggtctttgatttatgaccttgggctgtgatttgggacagatggtctcaagagaaacagctggaaactgccaccacagcatctctttgaggacccccatggattgctgtgcgcag

SEQ ID NO: 270993 - DNA, 120 bp, Artificial Sequence
  ENSG00000127481_141 (sequence is synthesized)
aggagaccccatgggtaccactcaggctgccaatggccccacacagtctctacctttcctggggagctacggagcaggctctgggtttggcattttgcttctgtccctcgagtgaaatgt

SEQ ID NO: 270994 - DNA, 120 bp, Artificial Sequence
  ENSG00000127481_142 (sequence is synthesized)
gcctctgcttcatttctggaagatcgggtttgtgatttttgtgattctgctttagcccaggattcgagggatcatgtccacatttgtaggccatccagggagcagagagaaacttttagg

SEQ ID NO: 270995 - DNA, 120 bp, Artificial Sequence
  ENSG00000127481_143 (sequence is synthesized)
gccgtgataaagacaagccaagtggaaaatagcctgtgccctcattggcacacctggtgtctttatttccattagccctgattgatcaagcgttgctggtctgtgggcacttcacgctcc

SEQ ID NO: 270996 - DNA, 120 bp, Artificial Sequence
  ENSG00000127481_144 (sequence is synthesized)
cagagagaccagattggagctgtcctgttgaatctggcctgtaccagatcatcactggagagtgggagggggcgtcttgttagattcctaggtaacccctgcccccattcctaacatatc

SEQ ID NO: 270997 - DNA, 120 bp, Artificial Sequence
  ENSG00000127481_145 (sequence is synthesized)
actttccagtatttcccaagagcctgaattaatagttaactagctgctggaaatcaaaagttagatcttgagaatactaagttgataagtcaggcttggccagtatccatatgctgcatc

SEQ ID NO: 270998 - DNA, 120 bp, Artificial Sequence
  ENSG00000127481_146 (sequence is synthesized)
cacagcaaatagagtggccatttattgggcacagtctctccatggcgggtgtgcaatctgaacccacaggagctgttttgctctcacttaggagactagcattcattattgtcccaggca

SEQ ID NO: 270999 - DNA, 120 bp, Artificial Sequence
  ENSG00000127481_147 (sequence is synthesized)
gttcaggaaaagctgatttggtcacagcttaattaggaaatccagtgtgagctactacattcatgagttgctgttttctctgtagcagtttcgtcacctttactaattggccttaaataa

SEQ ID NO: 271000 - DNA, 120 bp, Artificial Sequence
  ENSG00000127481_148 (sequence is synthesized)
ttaagttgggcagggtcactcaggatttctgcttaccaaagcacaacagccacagcaaagggccaaatacggccgtggtccggggccgtgagcccggcactcatcaggcagactaggaaa

SEQ ID NO: 271001 - DNA, 120 bp, Artificial Sequence
  ENSG00000127481_149 (sequence is synthesized)
ggcactgtgggttagcccgatactgggaggagacccatgggggagagaccgcggctggaagggcgtgtagagatatcatcctgatgctggggcagcctcactggcggcaggctttgtcct

SEQ ID NO: 271002 - DNA, 120 bp, Artificial Sequence
  ENSG00000127481_150 (sequence is synthesized)
aagtcctgtaagtcatggggtaaggggtagtagcagagacacagaaatgtagctcagcagaagctggcctcttctgcacacttgacattcagaaaaaaagttcctctgccaggaacttgc

SEQ ID NO: 271003 - DNA, 120 bp, Artificial Sequence
  ENSG00000127481_151 (sequence is synthesized)
aagtacaaagcctgggacattctcaggcgtctgtcagaacttgatctgttatcttgtctgccagggtaaagagctgcagagaaatggattcttgtcctcatccacgggtccaccttccag

SEQ ID NO: 271004 - DNA, 120 bp, Artificial Sequence
  ENSG00000127481_152 (sequence is synthesized)
ggagagaaagtgggggcttgggaaggtactggggcagagggaggccacaggaagcatatttcagtagagagggaattgtccccatttaatattatttgttttttgcgagttatttattga

SEQ ID NO: 271005 - DNA, 120 bp, Artificial Sequence
  ENSG00000127481_153 (sequence is synthesized)
atgcaggtgtggatagcctgtctcatgctaggcagccccttcacttgaggcccatatagttttagcttctataatgaataccatctatgtttcttatttttatgattcttatatataccc

SEQ ID NO: 271006 - DNA, 120 bp, Artificial Sequence
  ENSG00000127481_154 (sequence is synthesized)
atgcattttaatactaaacattttaatatatgtccctttagtcatgggatgtgttccagtgtgttttgaggtgtagaatactctgtgacaagggctcacctaggctttacttattacaga

SEQ ID NO: 271007 - DNA, 120 bp, Artificial Sequence
  ENSG00000127481_155 (sequence is synthesized)
tgtgatggctgttggcaaacaaaacctccgtagagcttgggtggtagaaactgaatcctgacactgatatttcactgtctgtgccgaggggagcctgatatttctgtgtttcatactggc

SEQ ID NO: 271008 - DNA, 120 bp, Artificial Sequence
  ENSG00000127481_156 (sequence is synthesized)
tctacctggtgtaatcattcctcaaacctcaaaccaagaattctgctgagaaggcagtggacattgttagaggcagtctccccctgcctgtcgctccccatattccaaggaactggctgg

SEQ ID NO: 271009 - DNA, 120 bp, Artificial Sequence
  ENSG00000127481_157 (sequence is synthesized)
tctttaatcctgaactgaatcattggattaagtagcaacgatactggttagaaacaatggggtgtggtgagcaacttggattatcccaggatttaggtgatgtcagggtggctgcatgct

SEQ ID NO: 271010 - DNA, 120 bp, Artificial Sequence
  ENSG00000127481_158 (sequence is synthesized)
ccatcttagacattaccattgcttgataccaacttcctagcagcttgctgccatttaacacagcacatgtttgacaagttaccgtgtttgactggtttaggtctgctggcttttaagaaa

SEQ ID NO: 271011 - DNA, 120 bp, Artificial Sequence
  ENSG00000127481_159 (sequence is synthesized)
tttctcctagtgggaatgtaaagactgaattaaaaccttgtttcctacctcatttattaggttccatcaaattccaagagcttgtcggggcccaaacacaagggatacataggaatcctt

SEQ ID NO: 271012 - DNA, 120 bp, Artificial Sequence
  ENSG00000127481_160 (sequence is synthesized)
tgcctttctttaagtcactagccttgcatttgccacgtctgccctggcgatgtctcccccggttccattttaccctgatctggaagatgagcactgagagaatcagatgaatttcatgga

SEQ ID NO: 271013 - DNA, 120 bp, Artificial Sequence
  ENSG00000127481_161 (sequence is synthesized)
gcatttttgtaaccaataaacttctgggtcccagggctccagaggttcttgcccacagctgcttttttccaagcagaaggctagtcgctggaactccgagatgcatacaccactgtgact

SEQ ID NO: 271014 - DNA, 120 bp, Artificial Sequence
  ENSG00000127481_162 (sequence is synthesized)
cttcccttgctcccagcatgccttgctctgtccttgtgagtatcctcctagggacttcatgtgatggaactggattttcttttccaggctgacagataaggcagtgaaggactattccgc

SEQ ID NO: 271015 - DNA, 120 bp, Artificial Sequence
  ENSG00000127481_163 (sequence is synthesized)
cctgtgggaagctcagtcagcattctgaggagttatttgcatggtgataggctcttacataggaattgacaagcgcctgagagaagagcgaatctgcctagttgagattccaatcccctc

SEQ ID NO: 271016 - DNA, 120 bp, Artificial Sequence
  ENSG00000127481_164 (sequence is synthesized)
catgtaggccagggtcttgcaaatagaaggtactcaaaatgtcattgctgagttcagggtttggtgagtagtaatgtagaaaggtctgtatagcctgggcaacatagtgagacttcatct

SEQ ID NO: 271017 - DNA, 120 bp, Artificial Sequence
  ENSG00000127481_165 (sequence is synthesized)
aaggtctgtatagcctgggcaacatagtgagacttcatctcttaaaaaaaaatttaaaaaagttagccaggcgtggtggcgtgtacctgtggtcccagctgctggggaggctgaggcagg

SEQ ID NO: 271018 - DNA, 87 bp, Artificial Sequence
  ENSG00000127481_166 (sequence is synthesized)
tctttagtttcaagggtttaagttaaataaggtgaaacaaatttaaagaaaatgtcttcctttttttaaaaaaacttctaaaagagg

SEQ ID NO: 271019 - DNA, 120 bp, Artificial Sequence
  ENSG00000127481_167 (sequence is synthesized)
gaaaatgtcttcctttttttaaaaaaacttctaaaagaggatattggttaaattgacagtttattatttctctggtttagtagtgactgttctttaaaaaaaatttaaaaaaactttatt

SEQ ID NO: 271020 - DNA, 120 bp, Artificial Sequence
  ENSG00000127481_168 (sequence is synthesized)
gagataatttatgtattaacctattttaaatgtacagttcaatgatttttagtaaatttaattgtgactcttgagtcaaattttactactttttagaattcctctgaaggatagatcaaa

SEQ ID NO: 271021 - DNA, 120 bp, Artificial Sequence
  ENSG00000127481_169 (sequence is synthesized)
gattaggaaacatctaaggtcagttagttgaaatttctttcctgtggcttcgtaaccctattgggatttctcctgtgtccttgagttctcactagggtggggctcactttgggctcactt

SEQ ID NO: 271022 - DNA, 120 bp, Artificial Sequence
  ENSG00000127481_170 (sequence is synthesized)
tggctcacattgagccatggctttgtcatgatttttttgtgaaactcagtgcttcctaagatgaaaatgtgttcatgctaagactggtttcttccttagcactttgtctggcttagtgga

SEQ ID NO: 271023 - DNA, 120 bp, Artificial Sequence
  ENSG00000127481_171 (sequence is synthesized)
ttttgggtgtgttttgtccaagtgttactggtgttgttttcacagcagtcctgctgctctctcatctagcagtccaggtcttggtgttgtccctgcccaatctagctgaaaaggcaggca

SEQ ID NO: 271024 - DNA, 120 bp, Artificial Sequence
  ENSG00000127481_172 (sequence is synthesized)
gatggctgcaccaaacggcatctcccccaccgtgatttatggcgctggtcagaatgctgagttcatgctagataactgaacatactggtgatgggaaggtaacacagataagggtttttt

SEQ ID NO: 271025 - DNA, 120 bp, Artificial Sequence
  ENSG00000127481_173 (sequence is synthesized)
ttagccattaacaacccatctcttagtagaggggttactggtcttaaaaaatttgatgccaagattctgttccctcttctgataacgccgtgtttgcaggctgtagggtaagggcatacc

SEQ ID NO: 271026 - DNA, 120 bp, Artificial Sequence
  ENSG00000127481_174 (sequence is synthesized)
aactgcaatcaaccagggtgggccttgtgtcagttgcaatgtcacagacctaatctccatgagatgggaggctggccatagacagaggtacctcatataaggagagcatccagtttacct

SEQ ID NO: 271027 - DNA, 120 bp, Artificial Sequence
  ENSG00000127481_175 (sequence is synthesized)
tccccctcaaccccaaattgctggagtgccatctttgctacacgtgtattagcttctgacctttgtctttgttacatgggagttaagagcataagcctgccatctgagtctgagttctga

SEQ ID NO: 271028 - DNA, 120 bp, Artificial Sequence
  ENSG00000127481_176 (sequence is synthesized)
ctctgccacttatcttggtcaagccactttctccaagcttcagtttccttctctgtaaaatggagataaagcatctaaccagttgggttattgagaagattaagttatataatgcatgta

SEQ ID NO: 271029 - DNA, 120 bp, Artificial Sequence
  ENSG00000127481_177 (sequence is synthesized)
cactggcagccatgccaggagcgttagagagtgcacagaatagtgcttctgaccacccagcaagttaggtagcttataacaaaggaaagatggaaagagacacagggtgtaggtgagcga

SEQ ID NO: 271030 - DNA, 120 bp, Artificial Sequence
  ENSG00000127481_178 (sequence is synthesized)
gcttggggagcattgaaacccaggtttccttgtaaatggcatgattggcttgtgcttttttggttccagtacagtgtcttgaggaaactctccctgaggccttgtgagggaagggaaggg

SEQ ID NO: 271031 - DNA, 120 bp, Artificial Sequence
  ENSG00000127481_179 (sequence is synthesized)
agacacttgaactcgagaaagactcacatgaaagaagcagagcagtggggcctggagattaagagcttggactctggattggaaaggctcagtttcagtatctgataccttgtactatac

SEQ ID NO: 271032 - DNA, 120 bp, Artificial Sequence
  ENSG00000127481_180 (sequence is synthesized)
gccttggacagattccttaatttctctgagtctgtgttttcctcatctgaaaaatactgacagtaggctgggcacagtggctcttgcccgtaatcccagcactttggcacctgaggctgg

SEQ ID NO: 271033 - DNA, 120 bp, Artificial Sequence
  ENSG00000127481_181 (sequence is synthesized)
agtgagtcaccaacccctggtgcagactctgtcctcattgtgactgcgaaattgggagccactggcctgtggctgtccaacattctgggatctctccactctgctgatttttctgtcctt

SEQ ID NO: 271034 - DNA, 120 bp, Artificial Sequence
  ENSG00000127481_182 (sequence is synthesized)
tcatcaggaaactttgagcttcatttgatgtattaaagaggcaaggtgacaggaaaggagtacaccggagcatggtagcagtaaagatagggctgcactgtgttgagtattcatttcaat

SEQ ID NO: 271035 - DNA, 120 bp, Artificial Sequence
  ENSG00000127481_183 (sequence is synthesized)
agtgttgtgtccacctcactaatggggctacttctgtgtttaggccgagaggaggcagattgacatgaaattgcaaggctttcttaacgcacagaggaagacctcaggtcacacatggct

SEQ ID NO: 271036 - DNA, 120 bp, Artificial Sequence
  ENSG00000127481_184 (sequence is synthesized)
gagagatggttggcaatggcttgctatgccactgaaaactaaactctcagaatacaaatccttgagccttactcaagactgcatttctctgtcatttattggccactgtctgatattctt

SEQ ID NO: 271037 - DNA, 120 bp, Artificial Sequence
  ENSG00000127481_185 (sequence is synthesized)
tcttctagatatagttgctgttagtgtgaatgatcatgatctgtactttgaacaaagaaagtgtgtagagacccctgggagtgaggggtaggggatacaatactctgaagcagaagagga

SEQ ID NO: 271038 - DNA, 120 bp, Artificial Sequence
  ENSG00000127481_186 (sequence is synthesized)
cccttgcagtgatggttagggactcttctgagtaggagacgtaatcggcttttggtccatggaacttttaccacatgtattcagcatatatacacgattaaagtgctgcaaatatctcag

SEQ ID NO: 271039 - DNA, 120 bp, Artificial Sequence
  ENSG00000127481_187 (sequence is synthesized)
ttctgcgatattcctttcccagactgtttttttcctagatgtgcctgctggagtctagggatagttggcatattgattggggccccacttgaaactccctccccaggcaagcttccttga

SEQ ID NO: 271040 - DNA, 120 bp, Artificial Sequence
  ENSG00000127481_188 (sequence is synthesized)
cactgagtctggtgtggtcatcatcatcatcatcattgcaacttaggacgcatgaggacaagaagcagcgctcatctggaagaggctgttctaacgaaggcgggaggatcctagatcaga

SEQ ID NO: 271041 - DNA, 120 bp, Artificial Sequence
  ENSG00000127481_189 (sequence is synthesized)
agaagacaaaccggaagagggagcctaggaaaggaaccacatgcacatttagtgcaaaccatgtaaacataacataacaagactatgtggagcaagggggagtcaggctgtggacccacc

SEQ ID NO: 271042 - DNA, 120 bp, Artificial Sequence
  ENSG00000127481_190 (sequence is synthesized)
agggaatcttgattcatgtttttggccccatcactcactagcttgctgactttgggcaagtcacttcacttttctgggcctctggagttactagcacagttccatgttggggagattgtg

SEQ ID NO: 271043 - DNA, 120 bp, Artificial Sequence
  ENSG00000127481_191 (sequence is synthesized)
aacgtccctgatatatggtgctcaggaaccagtagttgcttggaattgtattagagctggggtaggagctagacatggggccagggaagaagggaagatgccgcgaagaagggcctggaa

SEQ ID NO: 271044 - DNA, 120 bp, Artificial Sequence
  ENSG00000127481_192 (sequence is synthesized)
ggggacgaagggcgtggattatcagaggaagtgggagtagtcggcaaggatgggtggggagtgttgagtcatccaagcgttcagcaaatgtcacaagacaacgacaaattgagcaaattc

SEQ ID NO: 271045 - DNA, 120 bp, Artificial Sequence
  ENSG00000127481_193 (sequence is synthesized)
aggcccagctgtcctctctgacttcccctcacatgccttgtgtttctcagcttcccctcccaggtcctgcggtgactgaggagggaaggagcagaacattaccccagaatggttttccca

SEQ ID NO: 271046 - DNA, 120 bp, Artificial Sequence
  ENSG00000127481_194 (sequence is synthesized)
gggaagagcctggagcacaagggtctccgtctgtcctttgtctctgttggagccacctaggaccagaaattgtattaatagttaagagtcgctggaccggagctgaccctcttgactcat

SEQ ID NO: 271047 - DNA, 120 bp, Artificial Sequence
  ENSG00000127483_0 (sequence is synthesized)
agtggttgattcttcaccacactgaaaccattaggaaaaatccttgtggttaacagcagaggcttcagagtgtaacctgtactcgggcctagaaattatttaaaatggcgactgatacgt

SEQ ID NO: 271048 - DNA, 120 bp, Artificial Sequence
  ENSG00000127483_1 (sequence is synthesized)
ctcaaggtgaactcgtccatcctaaggcactcccacttatagtaggagctcagctgatccacgcggacaagttaggtgagaaggtagaagatagcaccatgccgattcgtcgaactgtga

SEQ ID NO: 271049 - DNA, 120 bp, Artificial Sequence
  ENSG00000127483_2 (sequence is synthesized)
attctacccgggaaactcctcccaaaagcaagcttgctgaaggggaggaagaaaagccagaaccagacataagttcagaggaatctgtctccactgtagaagaacaagagaatgaaactc

SEQ ID NO: 271050 - DNA, 120 bp, Artificial Sequence
  ENSG00000127483_3 (sequence is synthesized)
cacctgctacttcgagtgaggcagagcagccaaagggggaacctgagaatgaagagaaggaagaaaataagtcttctgaggaaaccaaaaaggatgagaaagatcagtctaaagaaaagg

SEQ ID NO: 271051 - DNA, 120 bp, Artificial Sequence
  ENSG00000127483_4 (sequence is synthesized)
agaagaaagtgaaaaaaacaattccttcctgggctaccctttctgccagccagctagccagggcccagaaacaaacaccgatggcttcttccccacgtcccaagatggatgcaatcttaa

SEQ ID NO: 271052 - DNA, 120 bp, Artificial Sequence
  ENSG00000127483_5 (sequence is synthesized)
ctgaggccattaaggcatgcttccagaagagtggtgcatcagtggttgctattcgaaaatacatcatccataagtatccttctctggagctggagagaaggggttatctccttaaacaag

SEQ ID NO: 271053 - DNA, 120 bp, Artificial Sequence
  ENSG00000127483_6 (sequence is synthesized)
cactgaaaagagaattaaatagaggagtcatcaaacaggttaaaggaaaaggtgcttctggaagttttgttgtggttcagaaatcaagaaaaacacctcagaaatccagaaacagaaaga

SEQ ID NO: 271054 - DNA, 120 bp, Artificial Sequence
  ENSG00000127483_7 (sequence is synthesized)
ataggagctctgcagtggatccagaaccacaagtaaaattggaggatgtcctcccactggcctttactcgcctttgtgaacctaaagaagcttcctacagtctcatcaggaaatatgtgt

SEQ ID NO: 271055 - DNA, 120 bp, Artificial Sequence
  ENSG00000127483_8 (sequence is synthesized)
ctcagtattatcctaagcttagagtggacatcaggcctcagctgttgaagaacgctctgcagagagcagtagagaggggccagttagaacagataactggcaaaggtgcttcggggacat

SEQ ID NO: 271056 - DNA, 120 bp, Artificial Sequence
  ENSG00000127483_9 (sequence is synthesized)
tccagctgaagaaatcaggggagaaacccctgcttggtggaagcctgatggaatatgcaatcttgtctgccattgctgccatgaatgagccgaagacctgctctaccactgctctgaaga

SEQ ID NO: 271057 - DNA, 120 bp, Artificial Sequence
  ENSG00000127483_10 (sequence is synthesized)
agtatgtcctagagaatcacccaggaaccaattctaactatcaaatgcatttgctgaaaaaaaccctgcagaaatgcgaaaagaatgggtggatggaacagatctctgggaaagggttca

SEQ ID NO: 271058 - DNA, 120 bp, Artificial Sequence
  ENSG00000127483_11 (sequence is synthesized)
gtggcaccttccagctctgttttccctattatcccagcccaggagttctgtttccgaagaaagagccagatgattctagagatgaggatgaagatgaagatgagtcatcagaagaagact

SEQ ID NO: 271059 - DNA, 120 bp, Artificial Sequence
  ENSG00000127483_12 (sequence is synthesized)
ctgaggatgaagagccgccacctaagagaaggttgcagaagaaaaccccagccaagtccccagggaaggccgcatctgtgaagcagagagggtccaaacctgcacctaaagtctcagctg

SEQ ID NO: 271060 - DNA, 120 bp, Artificial Sequence
  ENSG00000127483_13 (sequence is synthesized)
cccagcgggggaaagctaggcccttgcctaagaaagcacctcctaaggccaaaacgcctgccaagaagaccagaccctcatccacagtcatcaagaaacctagtggtggctcctcaaaga

SEQ ID NO: 271061 - DNA, 120 bp, Artificial Sequence
  ENSG00000127483_14 (sequence is synthesized)
agcctgcaaccagtgcaagaaaggaagtaaaattgccgggcaagggcaaatccaccatgaagaagtctttcagagtgaaaaagtaaattttataggaaaaaagggtatcatgatgaaatt

SEQ ID NO: 271062 - DNA, 120 bp, Artificial Sequence
  ENSG00000127483_15 (sequence is synthesized)
caaaatcttattttctaaggtcagtgtgcatttgtttagttttgatgcttttcaaattacattattttcctcccctatgaacattgtggggagggactctaaataaaccagtttaggcat

SEQ ID NO: 271063 - DNA, 120 bp, Artificial Sequence
  ENSG00000127483_16 (sequence is synthesized)
ttcattttaatttctgcaataatcctggactttcctaaactatgtaatgtatacttgtcctttttctctgcctcccccaaccccctgttgtttttatggtcagctttgcctttttttttt

SEQ ID NO: 271064 - DNA, 120 bp, Artificial Sequence
  ENSG00000127483_17 (sequence is synthesized)
cttccaattttatctaaacagttgcagagatttttatatttgtagaaagcatcaagaacggtatgccagtcaggtcctggaagtaaaatggaggcacaatatagcactgactgagttgta

SEQ ID NO: 271065 - DNA, 120 bp, Artificial Sequence
  ENSG00000127483_18 (sequence is synthesized)
aagcctcctgcctggagacttcagttatagctgtaataattaatcttatttataaaagccactccactaaccttttctctccaactgtaaacacagagacagctttgggaataagccaaa

SEQ ID NO: 271066 - DNA, 120 bp, Artificial Sequence
  ENSG00000127483_19 (sequence is synthesized)
aacagggtgatctcattagattttgaagatatatgactcctttgggctacatttcatattgatcaatttctaggtatttttcactggcccaaagtattgcattcccttaacagcaagcac

SEQ ID NO: 271067 - DNA, 120 bp, Artificial Sequence
  ENSG00000127483_20 (sequence is synthesized)
ccttaacagcaagcacaagttctctatatcacttgttttttgttgttgttgttgttgtcgtcgttgttttgagacggagtcttgctcaggtgccccggagtgcagtggtgcaatctcagc

SEQ ID NO: 271068 - DNA, 66 bp, Artificial Sequence
  ENSG00000127483_21 (sequence is synthesized)
atcccacttggtttttgactgaaggggaagtgtagaaatatattgatttgtgatttctggtgtcac

SEQ ID NO: 271069 - DNA, 120 bp, Artificial Sequence
  ENSG00000127483_22 (sequence is synthesized)
gtttttgactgaaggggaagtgtagaaatatattgatttgtgatttctggtgtcacctgtgttaccaaaaatcaaaacaaatcttttttattttttattattattattatttttgagaca

SEQ ID NO: 271070 - DNA, 60 bp, Artificial Sequence
  ENSG00000127483_23 (sequence is synthesized)
atcctggggttacagatgtgagctaccactcacggcccaaatcttcttgatcatatgttt

SEQ ID NO: 271071 - DNA, 120 bp, Artificial Sequence
  ENSG00000127483_24 (sequence is synthesized)
agctaccactcacggcccaaatcttcttgatcatatgtttaaatatattttttaatatttggagcatgagttgtcacttcttgtttgccttttttataaggaaatgttggagagttacat

SEQ ID NO: 271072 - DNA, 120 bp, Artificial Sequence
  ENSG00000127483_25 (sequence is synthesized)
cattgctaatgtagaaatgttaagtggaaaaatatacagtttggtaaaataaactagattctacatttatttgtgggtttttttcccctcctttctttccacagcacttttgatatcaag

SEQ ID NO: 271073 - DNA, 120 bp, Artificial Sequence
  ENSG00000127483_26 (sequence is synthesized)
caagtggcttcctttttgagatattaaaaaaaaaaagaaaaggaaaaaagtaaatgaagcccaactacctaaccctttcttatttgtatttgttttagtattgtgaagttgtgttaaata

SEQ ID NO: 271074 - DNA, 120 bp, Artificial Sequence
  ENSG00000127483_27 (sequence is synthesized)
gtactagctagaaatacaaatttctggttatcatttctcttccctgtggcacttgacattttaattgtcttaaagtttttgaagtacatcttctggccccttgagtactgccagaggcaa

SEQ ID NO: 271075 - DNA, 120 bp, Artificial Sequence
  ENSG00000127483_28 (sequence is synthesized)
aagatgtttgtttcttattcattccacttttgtctcctgggatcccttctgtagcctaaagtatggctgggaaatggacttgagaagattggcttgaattagatcataatcatgtgtgat

SEQ ID NO: 271076 - DNA, 120 bp, Artificial Sequence
  ENSG00000127483_29 (sequence is synthesized)
cccatcatgaattcattggaatttgtgttgcatgtaaggcaatctttcctgttgtaaatcttccttttttaatgtacatatattttgaaaaatatgaataaacatgaaattttaaaagct

SEQ ID NO: 271077 - DNA, 120 bp, Artificial Sequence
  ENSG00000127483_30 (sequence is synthesized)
cggcagagctcggcggctgggactggaggacagcggtggcggaggcgactagcggcggcgggagcggcgccgagaggccgtgcgggacgcgggcgccaggaccggccgaacgcagaggtt

SEQ ID NO: 271078 - DNA, 120 bp, Artificial Sequence
  ENSG00000127483_31 (sequence is synthesized)
atttgaagaatgtgtaaaaggactttagattagattgttttaaagtgttataacattggtttatgctaggtatttgctatttggatttaatttttagaattaccatttgaaataggttta

SEQ ID NO: 271079 - DNA, 120 bp, Artificial Sequence
  ENSG00000127483_32 (sequence is synthesized)
ttatatagttgtttgacctgttagaatatgctgtagttagcagaacacaatggtttgaataatccaaaagtctttgtcattggctttggaatgtgtttttgagcttgtaatttattgtgg

SEQ ID NO: 271080 - DNA, 120 bp, Artificial Sequence
  ENSG00000127483_33 (sequence is synthesized)
agaaatgaaacataactataaaaatctgacctagaagacatttcactattttattcctacttctgtgccaggagtgggttgtttttgtgtgcttatgttagaaggcattgatttgtatca

SEQ ID NO: 271081 - DNA, 120 bp, Artificial Sequence
  ENSG00000127483_34 (sequence is synthesized)
agccattggtagtgtgacctaaaagtctatatatgtttgatgaaatattcagttgaagaattggctttgagaatctgaaagtaaaatttgctattgatgtgtatctatataaagtgatgg

SEQ ID NO: 271082 - DNA, 120 bp, Artificial Sequence
  ENSG00000127483_35 (sequence is synthesized)
aatttttaatttttttttttttttttttgcaggagagctgatagtattcattccactcttttcataattggtcagaacagttagaaattgcttttaactatagtcatgcattgcttaaca

SEQ ID NO: 271083 - DNA, 120 bp, Artificial Sequence
  ENSG00000127483_36 (sequence is synthesized)
cattgcttaacaatgggtatacattctgagagatacatctttaggcgatttcatcatcgtgccaacatcataaagtgtacttacacaaacctacgtggtacagcctactacatacctagg

SEQ ID NO: 271084 - DNA, 120 bp, Artificial Sequence
  ENSG00000127483_37 (sequence is synthesized)
aaacctgtacagcatgttactgtactaaatactgtaggcagttataacacaacggtaagtatttgtgtatttaaacatagaaaaggtacagtaaaaatataatataaaagataaaaaatg

SEQ ID NO: 271085 - DNA, 120 bp, Artificial Sequence
  ENSG00000127483_38 (sequence is synthesized)
cagtaaaaatataatataaaagataaaaaatggtatacctgtgtaggacacctaccatgaatggaccttaaaggattggaagttgtttgggtgagtgagtgagtggtaagtgaatgcaaa

SEQ ID NO: 271086 - DNA, 120 bp, Artificial Sequence
  ENSG00000127483_39 (sequence is synthesized)
ggcctaggactactgtgtgcaacttttaaaactaaaaagtttttatttttagcaacttttaaaactaaaaagtttttatttttaaaaacttttaaaactttaccaaaaacaaagacacaa

SEQ ID NO: 271087 - DNA, 120 bp, Artificial Sequence
  ENSG00000127483_40 (sequence is synthesized)
cctctgcctcccaaagtgctggggctataggtgtgagcacccagccaaaagaatcttaatttttagggacataactggttaacctgcttattgggtacagttgtcagtatctttgggtta

SEQ ID NO: 271088 - DNA, 120 bp, Artificial Sequence
  ENSG00000127483_41 (sequence is synthesized)
ggttggctattattttagggtggatggagggtagatggaaggagaaaatatccataggagggttgggacttctcagttagattgaatacctgttgaatgggaagagaaagtccctaagct

SEQ ID NO: 271089 - DNA, 120 bp, Artificial Sequence
  ENSG00000127483_42 (sequence is synthesized)
agtggtgagtgtgcggagcgccgaggctcgcgttccgccgctgcttccgtcgccggggcgggcgccgcggtgtccctgccgagcgtgagccccgaactgtcaccgcgccgagccccagcc

SEQ ID NO: 271090 - DNA, 120 bp, Artificial Sequence
  ENSG00000127483_43 (sequence is synthesized)
tcatccgtcggtgtccgcggtccgagctttccccgcctcgctggcggcccgcgctctcccccgccgtgcgcgttcgccgctgtggcctgtagctacctcgcctcgctgctttgtctccgc

SEQ ID NO: 271091 - DNA, 120 bp, Artificial Sequence
  ENSG00000127483_44 (sequence is synthesized)
tgctcttgccgtccttcccgcggccttctgcgggcggggctgtcggctgtcgctttgctgctccgcgacggcggccttgagtctcgctcccccggtgggaaacgtagaactggttactcg

SEQ ID NO: 271092 - DNA, 86 bp, Artificial Sequence
  ENSG00000127483_45 (sequence is synthesized)
ttcaagcgattctcctgcctcaacctgccaagtagctgggactacaggcgtgcacctccacacctagctaatttttgtattttcag

SEQ ID NO: 271093 - DNA, 120 bp, Artificial Sequence
  ENSG00000127483_46 (sequence is synthesized)
tacaggcatgagtcaccgcgcccagccaatatgctatatttttgtatgactggcagcactgtaggtttgtttacaccaatgtcaccacaaacaagtgagtaacgtgctgcgctgtgatat

SEQ ID NO: 271094 - DNA, 120 bp, Artificial Sequence
  ENSG00000127483_47 (sequence is synthesized)
ccacaaacaagtgagtaacgtgctgcgctgtgatattaccacagctatcatgttaaccaggtaataggaggttttcagttccattataatcttaagggaccaccattgtatatgtggtct

SEQ ID NO: 271095 - DNA, 120 bp, Artificial Sequence
  ENSG00000127483_48 (sequence is synthesized)
gttgaccaaatattgttacacagcacatgaccataaaagaataacttagtaataactataccttctagctataatcttcagggtattctttatctgagtttcataagtatagctaaggtc

SEQ ID NO: 271096 - DNA, 120 bp, Artificial Sequence
  ENSG00000127483_49 (sequence is synthesized)
tgtggaatttatagcaactatcgtgtgtgggtgtgggtgtgtttgtgtgtgtgtgtgtgtgtttaatggagatggcgtctcactatgttggctaggttgggcttgaactcctggcctcaa

SEQ ID NO: 271097 - DNA, 120 bp, Artificial Sequence
  ENSG00000127483_50 (sequence is synthesized)
aggcatgagccactgcacccagcctatcgtctgttgttaaatgttctaatgcacctattaggtgcacagagtactgttatatactcagaataaaatttacataatgctttaaatctcaca

SEQ ID NO: 271098 - DNA, 120 bp, Artificial Sequence
  ENSG00000127483_51 (sequence is synthesized)
atactcagaataaaatttacataatgctttaaatctcacaaaattgttttgataaacatactcttataattcttgcaacaccttgggaaatagttggttctatattactgttttatagct

SEQ ID NO: 271099 - DNA, 120 bp, Artificial Sequence
  ENSG00000127483_52 (sequence is synthesized)
gaggagaaagactcacatcatttactaagatcatatagctagctagtaaatgtttgagtgaaaatacaaacaaaggttttctgactttaagagcttgagttttttccactataccatatt

SEQ ID NO: 271100 - DNA, 120 bp, Artificial Sequence
  ENSG00000127483_53 (sequence is synthesized)
gcatctgttgtaattgttaactaatgtgcattttaaaattctcatttgtcttatgtactgagcccttataccagtgctaatttatgtgactcctttctcctgcagctaagagaaaaatac

SEQ ID NO: 271101 - DNA, 120 bp, Artificial Sequence
  ENSG00000127483_54 (sequence is synthesized)
ctttttaattcatttatagtacccagtttttaaagaagatttattttgtaaaattttgcttatggtacatgtcatcttagcctgtaaataaattaaagcattaatttttatccctccctg

SEQ ID NO: 271102 - DNA, 120 bp, Artificial Sequence
  ENSG00000127483_55 (sequence is synthesized)
cgcccatctgagcgtttgtaagagatggaggcaggagtggtgagaaggtagaagatagcaccatgccgattcgtcgaactgtgaattctacccgggaaactcctcccaaaagcaagcttg

SEQ ID NO: 271103 - DNA, 120 bp, Artificial Sequence
  ENSG00000127483_56 (sequence is synthesized)
gcggcagagctcggcggctgggactggaggacagcggtggcggaggcgactagcggcggcgggagcggcgccgagaggccgtgcgggacgcgggcgccaggaccggccgaacgcagagaa

SEQ ID NO: 271104 - DNA, 120 bp, Artificial Sequence
  ENSG00000127507_0 (sequence is synthesized)
agaaagaccagaaagatccggggggtctgctctgtgcggtgaagcttctcttcttggcacctgcctggcatcggaagagggccccttctccctccctgggcttttatgtggacactgtaa

SEQ ID NO: 271105 - DNA, 120 bp, Artificial Sequence
  ENSG00000127507_1 (sequence is synthesized)
tgcctcagttttctttctttctttttgtttttgacacagggtctcactctatcacccaagctggagtgcagtggcaccatcttagctcaccgcagcctcaaactccccagctcgggtgat

SEQ ID NO: 271106 - DNA, 120 bp, Artificial Sequence
  ENSG00000127507_2 (sequence is synthesized)
tcttcctgcctcagcctcctgagtagtagcagctgggaccacagacgtctgccaccaagcccagctgcaccgccagttccggggagggccctgggccagcggctgtccgccccccctcct

SEQ ID NO: 271107 - DNA, 120 bp, Artificial Sequence
  ENSG00000127507_3 (sequence is synthesized)
ttataaagtcctggcctcgggacagcccgcacagctgcccagcctgcggagacgggacagccctgtcccactcactctttcccctgctgctcctgccggcagctcagctggaaccatggg

SEQ ID NO: 271108 - DNA, 120 bp, Artificial Sequence
  ENSG00000127507_4 (sequence is synthesized)
aggccgcgtctttctcgtctttctcgcattctgtgtctggctgactctgccgggagctgaaacccaggactccaggggctgtgcccggtggtgccctcaggactcctcgtgtgtcaatgc

SEQ ID NO: 271109 - DNA, 120 bp, Artificial Sequence
  ENSG00000127507_5 (sequence is synthesized)
caccgcctgtcgctgcaatccagggttcagctctttttctgagatcatcaccacccccatggagacttgtgacgacatcaacgagtgtgcaacactgtcgaaagtgtcatgcggaaaatt

SEQ ID NO: 271110 - DNA, 120 bp, Artificial Sequence
  ENSG00000127507_6 (sequence is synthesized)
ctcggactgctggaacacagaggggagctacgactgcgtgtgcagcccaggatatgagcctgtttctggggcaaaaacattcaagaatgagagcgagaacacgtgtcaagatgtggacga

SEQ ID NO: 271111 - DNA, 120 bp, Artificial Sequence
  ENSG00000127507_7 (sequence is synthesized)
atgtcagcagaacccaaggctctgtaaaagctacggcacctgcgtcaacaccctcggcagctacacgtgccagtgcctgcctggcttcaagctcaaacctgaggacccgaagctctgcac

SEQ ID NO: 271112 - DNA, 120 bp, Artificial Sequence
  ENSG00000127507_8 (sequence is synthesized)
agatgtgaatgaatgcacctccggacaaaacccatgccacagctccacccactgcctcaacaacgtgggcagctatcagtgccgctgccgcccgggctggcaaccgattccggggtcccc

SEQ ID NO: 271113 - DNA, 120 bp, Artificial Sequence
  ENSG00000127507_9 (sequence is synthesized)
caatggcccaaacaataccgtctgtgaagatgtggacgagtgcagctccgggcagcatcagtgtgacagctccaccgtctgcttcaacaccgtgggttcatacagctgccgctgccgccc

SEQ ID NO: 271114 - DNA, 120 bp, Artificial Sequence
  ENSG00000127507_10 (sequence is synthesized)
aggctggaagcccagacacggaatcccgaataaccaaaaggacactgtctgtgaagatatgactttctccacctggaccccgccccctggagtccacagccagacgctttcccgattctt

SEQ ID NO: 271115 - DNA, 120 bp, Artificial Sequence
  ENSG00000127507_11 (sequence is synthesized)
cgacaaagtccaggacctgggcagagactacaagccaggcttggccaataacaccatccagagcatcttacaggcgctggatgagctgctggaggcccctggggacctggagaccctgcc

SEQ ID NO: 271116 - DNA, 120 bp, Artificial Sequence
  ENSG00000127507_12 (sequence is synthesized)
ccgcttacagcagcactgtgtggccagtcacctgctggatggcctagaggatgtcctcagaggcctgagcaagaacctttccaatgggctgttgaacttcagttatcctgcaggcacaga

SEQ ID NO: 271117 - DNA, 120 bp, Artificial Sequence
  ENSG00000127507_13 (sequence is synthesized)
attgtccctggaggtgcagaagcaagtagacaggagtgtcaccttgagacagaatcaggcagtgatgcagctcgactggaatcaggcacagaaatctggtgacccaggcccttctgtggt

SEQ ID NO: 271118 - DNA, 120 bp, Artificial Sequence
  ENSG00000127507_14 (sequence is synthesized)
gggccttgtctccattccagggatgggcaagttgctggctgaggcccctctggtcctggaacctgagaagcagatgcttctgcatgagacacaccagggcttgctgcaggacggctcccc

SEQ ID NO: 271119 - DNA, 120 bp, Artificial Sequence
  ENSG00000127507_15 (sequence is synthesized)
catcctgctctcagatgtgatctctgcctttctgagcaacaacgacacccaaaacctcagctccccagttaccttcaccttctcccaccgttcagtgatcccgagacagaaggtgctctg

SEQ ID NO: 271120 - DNA, 120 bp, Artificial Sequence
  ENSG00000127507_16 (sequence is synthesized)
tgtcttctgggagcatggccagaatggatgtggtcactgggccaccacaggctgcagcacaataggcaccagagacaccagcaccatctgccgttgcacccacctgagcagctttgccgt

SEQ ID NO: 271121 - DNA, 120 bp, Artificial Sequence
  ENSG00000127507_17 (sequence is synthesized)
cctcatggcccactacgatgtgcaggaggaggatcccgtgctgactgtcatcacctacatggggctgagcgtctctctgctgtgcctcctcctggcggccctcacttttctcctgtgtaa

SEQ ID NO: 271122 - DNA, 120 bp, Artificial Sequence
  ENSG00000127507_18 (sequence is synthesized)
agccatccagaacaccagcacctcactgcatctgcagctctcgctctgcctcttcctggcccacctcctcttcctcgtggcaattgatcaaaccggacacaaggtgctgtgctccatcat

SEQ ID NO: 271123 - DNA, 120 bp, Artificial Sequence
  ENSG00000127507_19 (sequence is synthesized)
cgccggtaccttgcactatctctacctggccaccttgacctggatgctgctggaggccctgtacctcttcctcactgcacggaacctgacggtggtcaactactcaagcatcaacagatt

SEQ ID NO: 271124 - DNA, 120 bp, Artificial Sequence
  ENSG00000127507_20 (sequence is synthesized)
catgaagaagctcatgttccctgtgggctacggagtcccagctgtgacagtggccatttctgcagcctccaggcctcacctttatggaacaccttcccgctgctggctccaaccagaaaa

SEQ ID NO: 271125 - DNA, 120 bp, Artificial Sequence
  ENSG00000127507_21 (sequence is synthesized)
gggatttatatggggcttccttggacctgtctgcgccatcttctctgtgaatttagttctctttctggtgactctctggattttgaaaaacagactctcctccctcaatagtgaagtgtc

SEQ ID NO: 271126 - DNA, 120 bp, Artificial Sequence
  ENSG00000127507_22 (sequence is synthesized)
caccctccggaacacaaggatgctggcatttaaagcgacagctcagctgttcatcctgggctgcacgtggtgtctgggcatcttgcaggtgggtccggctgcccgggtcatggcctacct

SEQ ID NO: 271127 - DNA, 120 bp, Artificial Sequence
  ENSG00000127507_23 (sequence is synthesized)
cttcaccatcatcaacagcctgcagggtgtcttcatcttcctggtgtactgcctcctcagccagcaggtccgggagcaatatgggaaatggtccaaagggatcaggaaattgaaaactga

SEQ ID NO: 271128 - DNA, 120 bp, Artificial Sequence
  ENSG00000127507_24 (sequence is synthesized)
gtctgagatgcacacactctccagcagtgctaaggctgacacctccaaacccagcacggttaactagaaaaatcttctgaataagatcttccctctttgcccgtggaaaatctgaacaat

SEQ ID NO: 271129 - DNA, 120 bp, Artificial Sequence
  ENSG00000127507_25 (sequence is synthesized)
ctttgagccatctagaggggaaagaaaagactttgttctgtgtgtttcaagaaattcaccatgtcagcaatatgaaggatgttatggaaggcgtgctaggcattcaattcctgcagaaac

SEQ ID NO: 271130 - DNA, 120 bp, Artificial Sequence
  ENSG00000127507_26 (sequence is synthesized)
cggaaatcttccatgccctgcaatgtgctcatcaaactctcagcatatggacggccagctgtggcccatatcttggtcactctgaagcacaatatttatgaagctatagaacgttaagac

SEQ ID NO: 271131 - DNA, 120 bp, Artificial Sequence
  ENSG00000127507_27 (sequence is synthesized)
ctctttcacagcctctccttcctacaaagactcctccaaatcttaaaatgaagcaggaaaacgagcctaagaggactttcataccgacaacatctgaaaggactagaatgttcacaccac

SEQ ID NO: 271132 - DNA, 120 bp, Artificial Sequence
  ENSG00000127507_28 (sequence is synthesized)
tgtgaaaaatattgattactcacacatagatcaagagagacacggctcctgccttcatggagcttttaggggaaaatgaagtggctcttgcagctagagttgactcagaagccgaaattc

SEQ ID NO: 271133 - DNA, 120 bp, Artificial Sequence
  ENSG00000127507_29 (sequence is synthesized)
ctagaaatcaggtttctactgctaggcaattgaagtataaactattttataaacactgtcttctttcgtcttcacaccaacatgcagaaaagtttctaatctcagatcggggatgtgcaa

SEQ ID NO: 271134 - DNA, 120 bp, Artificial Sequence
  ENSG00000127507_30 (sequence is synthesized)
caaattccatttcaaaggaatgacctgcaaaactcctaaatattccaagcaaatgcccttaaccctgtctgttatctgctttccttgaacagaaattctacatgaccataaaacctcgaa

SEQ ID NO: 271135 - DNA, 120 bp, Artificial Sequence
  ENSG00000127507_31 (sequence is synthesized)
gatgggtatggcacagttcatgccctgtaatcctagcactttgggagggtgaggcaggaggatggctcaagcccaggagtttgagaccagtgtgggcaacagagtgagaaccatctctac

SEQ ID NO: 271136 - DNA, 120 bp, Artificial Sequence
  ENSG00000127507_32 (sequence is synthesized)
ccaaaaaaaaaattaaaaattagccaagcatggtgatgatataggagttaaggagaaatcatttaggcaaatagcaagggtaggaagtcctcagtaaggttttccatttaatgaaaagca

SEQ ID NO: 271137 - DNA, 120 bp, Artificial Sequence
  ENSG00000127507_33 (sequence is synthesized)
cctgtaaaatcgagctgcagacatagacaagcaagctggaagcttccacgggtgaatgccggcagctgtgccaataggaaaaagctacctagactaggcatgtccaaaatggcggctcca

SEQ ID NO: 271138 - DNA, 120 bp, Artificial Sequence
  ENSG00000127507_34 (sequence is synthesized)
ctacctagactaggcatgtccaaaatggcggctccaagttcccttctctttgccagccatgtgtacagtaaaaagcaggcaacatagtgtcagccaaagctcatttgcataataagatta

SEQ ID NO: 271139 - DNA, 120 bp, Artificial Sequence
  ENSG00000127507_35 (sequence is synthesized)
gggtggggtggccagctcacataggggtaggccctaggtaaatcagacaccgccttctcaagcctgtctataaaatctggtacactatgacgagggtcagatttcccattcagacgcccc

SEQ ID NO: 271140 - DNA, 71 bp, Artificial Sequence
  ENSG00000127507_36 (sequence is synthesized)
tacactatgacgagggtcagatttcccattcagacgcccctctcccatgcaagagaagccaggcacagtgg

SEQ ID NO: 271141 - DNA, 120 bp, Artificial Sequence
  ENSG00000127507_37 (sequence is synthesized)
accagcctggtcaacatggtgaaatcttgtctctagtaaaaatacaaaaatatatgaaatctcacatagatgataatattaagttccaaaagcaactcaacctggtagattctaattttt

SEQ ID NO: 271142 - DNA, 120 bp, Artificial Sequence
  ENSG00000127507_38 (sequence is synthesized)
caactcaacctggtagattctaattttttttgaggcagggtcttgctttgtcacccatgctggagtacaatggcacaaacactgctcactgcagcctcgacctcccaaggcctaagcaat

SEQ ID NO: 271143 - DNA, 89 bp, Artificial Sequence
  ENSG00000127507_39 (sequence is synthesized)
actgctcactgcagcctcgacctcccaaggcctaagcaatcctcctgcctcagtccccctccaggtatttgaaactacaggtgtgttgt

SEQ ID NO: 271144 - DNA, 120 bp, Artificial Sequence
  ENSG00000127507_40 (sequence is synthesized)
aatctcctgagctcaggcaatccgcaggcctcagcctccctaagtgcggggattacaggcttgagccactgcacctagcctctatttgttttacaaaagagaaattgagatcctgaatgt

SEQ ID NO: 271145 - DNA, 120 bp, Artificial Sequence
  ENSG00000127507_41 (sequence is synthesized)
taagtgacttgcctgaggccatcccactaacaggagccagggttaggattcaaaccccatccaactggtcccagagctggagcttcttgcactgccctacactacctaccatctccatcc

SEQ ID NO: 271146 - DNA, 120 bp, Artificial Sequence
  ENSG00000127507_42 (sequence is synthesized)
tctgggcacctttttataagaaccaaaacattacagagcattgctttgtcaactcagctgggaacatttcccagtgcaactcacatttttcactgctctgtgcctgtccgtataagctca

SEQ ID NO: 271147 - DNA, 120 bp, Artificial Sequence
  ENSG00000127507_43 (sequence is synthesized)
atgagtattgatttaggggctttggagaactttgaatgctaccccccaagtaaccattgttggcaacctggtacctctacttttagccatttctccttctctataaatagtgcagaagta

SEQ ID NO: 271148 - DNA, 120 bp, Artificial Sequence
  ENSG00000127507_44 (sequence is synthesized)
acccacttggtaacaggcatccttgccaagcctccaccactaggtcagtgtaagaattaaagaaagaggaaagaaacacaaaaagtggcttgatggttaagacaggtttattttagagaa

SEQ ID NO: 271149 - DNA, 120 bp, Artificial Sequence
  ENSG00000127507_45 (sequence is synthesized)
aacacacctgagaggggctgctggctgaattaggttagagtcttttctacagactaagagtgtttaaggatttagggtgggagagtttcttagaggcttggactgcttctgtgttttttt

SEQ ID NO: 271150 - DNA, 120 bp, Artificial Sequence
  ENSG00000127507_46 (sequence is synthesized)
tgttgtgcttatatgggagggagagtggtgtgtttgcttttatacatttttctgcagctgtaggcataccccccaagtctgcttttagcttccctattttagtgcacctggagggaaagg

SEQ ID NO: 271151 - DNA, 81 bp, Artificial Sequence
  ENSG00000127507_47 (sequence is synthesized)
cctccaccttcctctgtgcccgagctgttttatctgcattttactgtctgctttttttggctgcttatagtttttaaaaaa

SEQ ID NO: 271152 - DNA, 120 bp, Artificial Sequence
  ENSG00000127507_48 (sequence is synthesized)
tactgtctgctttttttggctgcttatagtttttaaaaaagtaatttccttaaatccagaaggctaaaaatgaagctgaaacttaaagtggcggtgtttgtccaaaataacggggctcct

SEQ ID NO: 271153 - DNA, 120 bp, Artificial Sequence
  ENSG00000127507_49 (sequence is synthesized)
gctctgccagtcagtaccctcaagtcactcctgatcctcaacctccatgcctaaggctggttcaagagaccacataatatctgccttttattacatacatgatgggtgcatgggattctg

SEQ ID NO: 271154 - DNA, 120 bp, Artificial Sequence
  ENSG00000127507_50 (sequence is synthesized)
cgtgccctttgcttgatatagactgctaaggtgagatggggaatatcagagtcagctgctgcttgaggaagcagaacacacagctggaggcttggaacatgtgggtccctatgagtgtag

SEQ ID NO: 271155 - DNA, 120 bp, Artificial Sequence
  ENSG00000127507_51 (sequence is synthesized)
agcccatatccccatagagtctacctagagcaggggtcgccaaatgttttcttaaagagcctgatagtgtatatgttaggctttgtgagccaggtatttacagcaactcaattctaccac

SEQ ID NO: 271156 - DNA, 120 bp, Artificial Sequence
  ENSG00000127507_52 (sequence is synthesized)
tgtggtatgaaaacagctatagacaatcataaatgaatgatcatggctatgttttaataaaactttacagacactgaacttgaacttccattgtgatatgaaaacagctatagacaatca

SEQ ID NO: 271157 - DNA, 120 bp, Artificial Sequence
  ENSG00000127507_53 (sequence is synthesized)
taaatgaatgatcatggctatgttttaataaaactttatggacactgagcttgaacttcatatatcagtcatgtgacacaaaatatcattcttctttttatttgttttcacccatttgaa

SEQ ID NO: 271158 - DNA, 120 bp, Artificial Sequence
  ENSG00000127507_54 (sequence is synthesized)
aaatgtaaaaactattcttagctgtacagaaacagatggtgggtcagatttgactcactgcccatagtttccagaccatgatgttcaggttcatggaagcacttcactctacactaattt

SEQ ID NO: 271159 - DNA, 120 bp, Artificial Sequence
  ENSG00000127507_55 (sequence is synthesized)
attcatccattcatcacatatgtgatgagcacatacagacacacctcagagatattgcaggctccactccagatcaccacaataatgtgaatattgcaataaagcaagtcatacacattt

SEQ ID NO: 271160 - DNA, 120 bp, Artificial Sequence
  ENSG00000127507_56 (sequence is synthesized)
gttcaagcttgtaatgccagcactctgggaggccaaagcaggaagatcacttgagcccgggacaacttggggatcacttgaagccatattatcctatgcctcaatggcatgggataattc

SEQ ID NO: 271161 - DNA, 120 bp, Artificial Sequence
  ENSG00000127507_57 (sequence is synthesized)
atgacattgatgactaataaccaacatttattaatgtagacatacaaagttctgttgtatttttctcacctcttcttccatcttctccagattatatgtgtaattctaaccccatttcac

SEQ ID NO: 271162 - DNA, 89 bp, Artificial Sequence
  ENSG00000127507_58 (sequence is synthesized)
tcttctccagattatatgtgtaattctaaccccatttcactgatgagcaaagtaagactacttggatttgtgtcaaatgtacagagtct

SEQ ID NO: 271163 - DNA, 120 bp, Artificial Sequence
  ENSG00000127507_59 (sequence is synthesized)
agttcctggagtctgagatgagacaggtgtgcatgtacctgtttcgccagcccagagaggcagcgtggtgtgaaggccaagggaaaactctgggaccagctacctgggcccaaatcctgg

SEQ ID NO: 271164 - DNA, 120 bp, Artificial Sequence
  ENSG00000127507_60 (sequence is synthesized)
ctttgccacctgttacctaaatgatattaccaacatcactactgctcttagagccttggtttacccatctataaaatgaggatgataataatggcctactcctatgccttctaggaggac

SEQ ID NO: 271165 - DNA, 120 bp, Artificial Sequence
  ENSG00000127507_61 (sequence is synthesized)
ttctaggaggaccaaggaaagaataggtgcttctaacagagcccagcacacagcaggtgctacaggcatcttcattctttaaacgttattatgcactgtaatcccagcactttgggaggc

SEQ ID NO: 271166 - DNA, 120 bp, Artificial Sequence
  ENSG00000127507_62 (sequence is synthesized)
acatggtcaagcaggcactcacgggcacacggcgagaggggctggtggtgcttgggcacccccacaccccggcaggaactccagggtgctctcggagcctgctaccctgcccggagggat

SEQ ID NO: 271167 - DNA, 120 bp, Artificial Sequence
  ENSG00000127507_63 (sequence is synthesized)
gtctgtgaaggtcgagagctcagatcccacgttcccagagacccacaaacatctgatcacatgttcaacggcgcccacacaaaccaagcagaatgagcgctggaggcgcccgactgtgtc

SEQ ID NO: 271168 - DNA, 120 bp, Artificial Sequence
  ENSG00000127507_64 (sequence is synthesized)
aggcgttcattcttctgaggctagatgagaaaagagcaagggtcctgcggaaggagctggggtactgaggggggaggctcagggggaccccaggcaacagctgatgactcactgggagga

SEQ ID NO: 271169 - DNA, 120 bp, Artificial Sequence
  ENSG00000127507_65 (sequence is synthesized)
aggcgtttcaccatattcataacctgctcatctgcacggggcccacctgctgtgcccaggcctctccacgcttccataacccagcgtccacctctccaaggggggcactaatgccgggag

SEQ ID NO: 271170 - DNA, 120 bp, Artificial Sequence
  ENSG00000127507_66 (sequence is synthesized)
tccagaaatgaaggaggagggagatttgaaggcagggccactgtccccagtcgaacctgccactggccaacaaccccacctggagaagatgcctcgtggagccctgacctctttttctgc

SEQ ID NO: 271171 - DNA, 120 bp, Artificial Sequence
  ENSG00000127511_0 (sequence is synthesized)
gcggtggcagcggtgccggcggccccgcgggccgggggctgagcggcgcccgctggggtcgctcgggctccgcaggccacgagaagctgccggtgcacgtagaagacgccctcacctatc

SEQ ID NO: 271172 - DNA, 120 bp, Artificial Sequence
  ENSG00000127511_1 (sequence is synthesized)
agctgccggtgcacgtagaagacgccctcacctatctggaccaggtgaagatccgctttggcagcgaccctgccacctacaacggcttcctggagatcatgaaggagttcaaaagccaga

SEQ ID NO: 271173 - DNA, 120 bp, Artificial Sequence
  ENSG00000127511_2 (sequence is synthesized)
gcatcgatactcctggagtcatcagacgtgtctcgcagctcttccacgagcaccctgacctcattgttggattcaacgcttttcttcccctcggatatagaatagacattcccaagaatg

SEQ ID NO: 271174 - DNA, 120 bp, Artificial Sequence
  ENSG00000127511_3 (sequence is synthesized)
gcaagttaaacatacagtcgcctctgacaagccaggagaattcgcacaaccacggggacggtgcagaggacttcaagcagcaggtgccgtataaagaggacaaaccccaggtgcccctgg

SEQ ID NO: 271175 - DNA, 120 bp, Artificial Sequence
  ENSG00000127511_4 (sequence is synthesized)
agtccgattccgtggaattcaacaacgccatcagctatgtgaataagattaaaacccgcttcctagaccacccagaaatctacaggtcattcctggagatcctgcacacgtaccagaagg

SEQ ID NO: 271176 - DNA, 120 bp, Artificial Sequence
  ENSG00000127511_5 (sequence is synthesized)
agcagctgaacacgaggggccggccattccgaggcatgtctgaagaggaggtgttcaccgaggtggccaacctcttccggggccaggaggacctgctctcagagtttggacagttcctgc

SEQ ID NO: 271177 - DNA, 120 bp, Artificial Sequence
  ENSG00000127511_6 (sequence is synthesized)
ccgaagccaagcggtctctgttcacaggaaacgggccgtgcgagatgcacagcgtgcagaagaacgagcacgacaagaccccggagcacagcaggaagcgctcccggccctcgctcctcc

SEQ ID NO: 271178 - DNA, 120 bp, Artificial Sequence
  ENSG00000127511_7 (sequence is synthesized)
gccccgtgtctgcacccgccaagaaaaaaatgaaacttcgtggtaccaaagacctgtccatcgctgcagtggggaagtacgggactctgcaggaattttctttctttgacaaggtccgcc

SEQ ID NO: 271179 - DNA, 120 bp, Artificial Sequence
  ENSG00000127511_8 (sequence is synthesized)
gggtgctgaagagccaggaggtgtatgaaaacttcctccgctgcatcgcactcttcaaccaggagctggtgtctggctctgagctcctgcagctcgtcagcccatttctggggaaatttc

SEQ ID NO: 271180 - DNA, 120 bp, Artificial Sequence
  ENSG00000127511_9 (sequence is synthesized)
cagaactctttgcacagttcaagtccttcctgggggtaaaagagctgtccttcgcgccacccatgagcgacagatccggggacgggataagccgggaaattgattatgcatcctgcaagc

SEQ ID NO: 271181 - DNA, 120 bp, Artificial Sequence
  ENSG00000127511_10 (sequence is synthesized)
gcataggatccagctaccgggcactccccaaaacctaccagcagcccaagtgcagtgggaggacagccatctgcaaggagcttgaccattggacacttctccagggttcgtggacagacg

SEQ ID NO: 271182 - DNA, 120 bp, Artificial Sequence
  ENSG00000127511_11 (sequence is synthesized)
attactgcatgtccaagttcaagaatacctgctggattccaggatatagtgcaggggtactgaacgacacctgggtctccttcccttcctggtctgaggactccacgttcgtcagctcca

SEQ ID NO: 271183 - DNA, 120 bp, Artificial Sequence
  ENSG00000127511_12 (sequence is synthesized)
agaagacaccgtacgaggagcagcttcaccgctgtgaggacgagcgcttcgagttagacgttgtcctggagacgaacctggccacaatccgtgtgttggaaagtgtgcagaagaagctgt

SEQ ID NO: 271184 - DNA, 120 bp, Artificial Sequence
  ENSG00000127511_13 (sequence is synthesized)
ctcggatggcgccggaagaccaggagaagttccggctggacgactccctgggaggcacgtcggaggtgatccagcgccgtgccatttatcgcatctatggcgacaaggccccggagatca

SEQ ID NO: 271185 - DNA, 120 bp, Artificial Sequence
  ENSG00000127511_14 (sequence is synthesized)
tcgagagcctcaagaagaaccctgtcaccgctgtccccgttgtcctgaaaagactgaaggccaaggaagaggagtggcgggaggcccagcagggcttcaacaagatctggcgggagcagt

SEQ ID NO: 271186 - DNA, 120 bp, Artificial Sequence
  ENSG00000127511_15 (sequence is synthesized)
atgagaaggcgtacctcaagtcccttgaccaccaggctgtgaacttcaagcagaacgacaccaaggccctgcgctccaagagcttgctcaacgagatcgagagcgtctacgacgagcacc

SEQ ID NO: 271187 - DNA, 120 bp, Artificial Sequence
  ENSG00000127511_16 (sequence is synthesized)
aggagcagcactcggagggccgcagtgccccctctagcgagccgcacctcatctttgtgtacgaggaccggcagatcctggaggacgcagcagcgctcatcagctactacgtgaagcggc

SEQ ID NO: 271188 - DNA, 120 bp, Artificial Sequence
  ENSG00000127511_17 (sequence is synthesized)
agccggccatccagaaggaggaccagggcaccatccaccagctgctgcaccagttcgtgcccagcctcttcttctctcagcagctggacctgggcgcctccgaggagtcagctgatgagg

SEQ ID NO: 271189 - DNA, 120 bp, Artificial Sequence
  ENSG00000127511_18 (sequence is synthesized)
accgggacagcccccaggggcagaccacagaccccagtgagcggaagaagccggcgccaggaccccacagtagccccccagaggagaagggggccttcggggatgccccggccactgagc

SEQ ID NO: 271190 - DNA, 120 bp, Artificial Sequence
  ENSG00000127511_19 (sequence is synthesized)
agccacccctgccgcccccagccccgcacaagcccctggacgatgtctacagcctattttttgccaacaacaactggtacttcttcctgcgcctgcaccagaccctgtgctccaggctgc

SEQ ID NO: 271191 - DNA, 120 bp, Artificial Sequence
  ENSG00000127511_20 (sequence is synthesized)
tgaagatctaccgccaggcgcagaagcagcttctggagtatcggaccgagaaggagcgggagaagctgctgtgtgagggccgcagggagaagggcagcgaccccgccatggagctgcggc

SEQ ID NO: 271192 - DNA, 120 bp, Artificial Sequence
  ENSG00000127511_21 (sequence is synthesized)
acgcagtacgaggacaccctacgcgagatgttcaccatccatgcctacgtgggcttcaccatggacaagctggtgcagaacattgcgcggcagctgcaccacctcgtgagcgatgacgtc

SEQ ID NO: 271193 - DNA, 120 bp, Artificial Sequence
  ENSG00000127511_22 (sequence is synthesized)
tgcctgaaggtggtggagctctacctgaacgagaagaagcggggtgccgctggtgggaacctgtcctcccgctgcgtccgcgctgctagggagaccagctaccagtggaaggctgagcgc

SEQ ID NO: 271194 - DNA, 120 bp, Artificial Sequence
  ENSG00000127511_23 (sequence is synthesized)
tgcatggccgacgagaactgcttcaaggtgatgttcctgcagcgcaaagggcaggtgatcatgaccatcgagctcctggacaccgaggaggcccagacggaggaccctgtggaggtccag

SEQ ID NO: 271195 - DNA, 120 bp, Artificial Sequence
  ENSG00000127511_24 (sequence is synthesized)
cacctggctcggtacgtggagcagtatgtggggaccgagggcgcgtccagctcgcccactgagggcttcctcctgaaacctgtgttcctgcagaggaacctcaagaagttccgccgccgg

SEQ ID NO: 271196 - DNA, 120 bp, Artificial Sequence
  ENSG00000127511_25 (sequence is synthesized)
tggcagagcgagcaggcgcgggccctgcgcggtgaggccaggagctcctggaagcggctggtgggcgtggagagcgcctgcgacgtggactgccgcttcaagctcagcactcacaagatg

SEQ ID NO: 271197 - DNA, 120 bp, Artificial Sequence
  ENSG00000127511_26 (sequence is synthesized)
gtgttcatcgtgaactccgaggactacatgtaccgtcgcgggaccctctgccgggccaagcaggtgcagcccctggtcctgctccgccaccaccagcactttgaggagtggcacagccgc

SEQ ID NO: 271198 - DNA, 120 bp, Artificial Sequence
  ENSG00000127511_27 (sequence is synthesized)
tggctggaggacaatgtgacggtggaggcggctagcctggtgcaggactggctgatgggtgaggaggacgaggacatggtaccctgcaagacgctgtgtgagacagtgcacgtgcacggc

SEQ ID NO: 271199 - DNA, 120 bp, Artificial Sequence
  ENSG00000127511_28 (sequence is synthesized)
ctgcccgtgacccgctaccgcgtgcagtacagccgccgcccggcctcgccctgacccgccctcatgggcaccgggcaggcgcctcacagagcacagacgtgccctcggccttggtcgtgt

SEQ ID NO: 271200 - DNA, 120 bp, Artificial Sequence
  ENSG00000127511_29 (sequence is synthesized)
cggggccgttttcttgaacgacgtgagaggcatctcccagcccctctgctgccggacagcgcactccagggcaggacgccgcccccgtggctcccggtctcctgtgggcctgctgtgtgc

SEQ ID NO: 271201 - DNA, 120 bp, Artificial Sequence
  ENSG00000127511_30 (sequence is synthesized)
caaacctgagctacctgcacccgagccctggggctcagccccaccacaggggcgggtggacgtgctggccgaggaacaagcaatcatgtttgcgtccccgtccgtcacatgtgccaaatc

SEQ ID NO: 271202 - DNA, 120 bp, Artificial Sequence
  ENSG00000127511_31 (sequence is synthesized)
cctggcaggcagatggctcctgccccatattcttgccgtgtcttggaaaagtcacaggtgacagccctcctgaggcccacactttggagggggtccatgtccaagagaccctgacaagga

SEQ ID NO: 271203 - DNA, 120 bp, Artificial Sequence
  ENSG00000127511_32 (sequence is synthesized)
aggagttgagccctgggtaggcttgcttgaaaagtgagtccttccagaatattctcagagctgccagaaacatcatctgagggtttgggcatcagctctgcctggctggtgttcaggccc

SEQ ID NO: 271204 - DNA, 120 bp, Artificial Sequence
  ENSG00000127511_33 (sequence is synthesized)
tcagtcactttggaagtgagaagaacccttcagccaaacctttgggatcccattttgaagtccagagctggagcaggcgggcagtgccctgggagaccccgctctggataagacacccaa

SEQ ID NO: 271205 - DNA, 120 bp, Artificial Sequence
  ENSG00000127511_34 (sequence is synthesized)
ccccaactccagcagctggactctgggcccacaaggggagggaccccagccagtattccctcagagccggcacgaccctgctgtggggcggcgggcccagtcgtgttcctgcagtgggca

SEQ ID NO: 271206 - DNA, 120 bp, Artificial Sequence
  ENSG00000127511_35 (sequence is synthesized)
ccctaggcgtatgtgtatacacgcacagatatttattcctttcgcttttagtggttgttatttctgtagcagccaagtcctgcggctccctggggctgagatctccctttgtggaactcc

SEQ ID NO: 271207 - DNA, 120 bp, Artificial Sequence
  ENSG00000127511_36 (sequence is synthesized)
gagagccgccctgacagtcccagccgccacccaaggagccccatccgcccacccaccctgggacccacgcggccactccagggatcattgttgtccttttgtgaggggctgaggcgactg

SEQ ID NO: 271208 - DNA, 120 bp, Artificial Sequence
  ENSG00000127511_37 (sequence is synthesized)
tcccatggaggcatccaaggctttctgtgccaagaatcccaagtgactggggctggggaccacttctccaggcctctctccccgaccatgagagcccctggccctggcccctgcacacca

SEQ ID NO: 271209 - DNA, 120 bp, Artificial Sequence
  ENSG00000127511_38 (sequence is synthesized)
gtaggcccagaataaccgccacccttgccatcctgcaacagctggactcaagtttccaggaagtggagatgtgtttctagaagtttcctgtggaacctggaggctcctgatgcctttgac

SEQ ID NO: 271210 - DNA, 120 bp, Artificial Sequence
  ENSG00000127511_39 (sequence is synthesized)
tccaggctgggcgattccgatgctgacccgtcctcctgggctccccacccccgctccccaagtgtcacacaggcactttgtacacatcctggttttctaagaagggaacttgccatcaag

SEQ ID NO: 271211 - DNA, 120 bp, Artificial Sequence
  ENSG00000127511_40 (sequence is synthesized)
attcctgtaccaggcccacggccgtctcgggcagagccacctgggccccgggtgcagccggagaccccgccgagcccctcctcccagtattcccatccccgcatgcttctagggagcgcc

SEQ ID NO: 271212 - DNA, 120 bp, Artificial Sequence
  ENSG00000127511_41 (sequence is synthesized)
tcttttccgttcttgaggaatttctgttctggggcttgtccttcctttgcagctgttttgaatgtagttttccttttctatttatttgcacattaaagttaataattgaatattgacatc

SEQ ID NO: 271213 - DNA, 120 bp, Artificial Sequence
  ENSG00000127511_42 (sequence is synthesized)
actgcatgtccaagttcaagaatacctgctggattccaggatatagtgcaggggtcagcaaactctggcccacgggccctggcccgctgcccgtgtttgtaaataaagttttactgtcac

SEQ ID NO: 271214 - DNA, 120 bp, Artificial Sequence
  ENSG00000127511_43 (sequence is synthesized)
acagacacaaccattcctttacatattgcctgtggctgcttttctcaccacaaaggcagagttgagtattcatctgggatggcctgcaaaatctgagatggttgctgtctgaccctttgc

SEQ ID NO: 271215 - DNA, 120 bp, Artificial Sequence
  ENSG00000127511_44 (sequence is synthesized)
agagagaatttaccaatgtctgaaatgaaatcggccctccggatctgcaagttcctcatctgtggtttcaactaaccatggattgaaaatacgtggggaaagagaaaccaaaaaatgaca

SEQ ID NO: 271216 - DNA, 120 bp, Artificial Sequence
  ENSG00000127511_45 (sequence is synthesized)
acaaaccacgtggcttcaaacaacagaagtctattccctcaacgtcctggaggtcagcagtccacaaccacagtgtgggccgggcggtgctcctgccaaaggctctggggcggatccttc

SEQ ID NO: 271217 - DNA, 120 bp, Artificial Sequence
  ENSG00000127511_46 (sequence is synthesized)
tcatccctgtgtcatgcactctccatcctgatgtgtttctggcctttgtcgacttcctctgtgggtgaggtggggactcccgcaggaggcggggtggccgcaccacctgctttcctcccg

SEQ ID NO: 271218 - DNA, 120 bp, Artificial Sequence
  ENSG00000127511_47 (sequence is synthesized)
ccaaaaaatgacaatacagcaataaagcgtaatccacattttaagaatgcagtgtaacaatgatctacacagcatttacattgcattaggtataagtattctagagatgattttgcatag

SEQ ID NO: 271219 - DNA, 120 bp, Artificial Sequence
  ENSG00000127511_48 (sequence is synthesized)
gatatatgcaaataggattccattggacatcagggacttgagtatctgtggatttgggtcttcaggggtggttctggaaccaatctcccaggataccaagggagtgtccacttgaccaaa

SEQ ID NO: 271220 - DNA, 120 bp, Artificial Sequence
  ENSG00000127511_49 (sequence is synthesized)
gtcatgtttttccttaaaaactttatgcaccttcccatttgtataaggcagttggtattatgtatcaggatggtattatgtatcttggtactttctacactggctaacagtaaatcttgg

SEQ ID NO: 271221 - DNA, 120 bp, Artificial Sequence
  ENSG00000127511_50 (sequence is synthesized)
gtgagccgggccggggtggggccggccctgaggacggcggaaatggctctaccatcatttcactccccgctcgggagggggcccgtggtcagcacagcaaacctatcctgttttttctta

SEQ ID NO: 271222 - DNA, 120 bp, Artificial Sequence
  ENSG00000127511_51 (sequence is synthesized)
attgagacaaaattcgcataacgtaaaattaaccattttgaagtgtacagtttggtaacatttggtacattcacaatattgtgcaaccaccacctctgtctagttccagaacatttcatc

SEQ ID NO: 271223 - DNA, 120 bp, Artificial Sequence
  ENSG00000127511_52 (sequence is synthesized)
gaggagccacctgggcccagctcccagtcacaatttttgcggggacagatgtttcctgctcacctcccgcatcctggtgacagtgaggcattgacccgtgtgtgtccccagggtggtcat

SEQ ID NO: 271224 - DNA, 120 bp, Artificial Sequence
  ENSG00000127511_53 (sequence is synthesized)
gggggcttctggcgctcctcagctgtggcctggttgtgtgagtcccgctgtcactgggtcctctgtcaagagctatagtctgttggggtctccgtcagggatcagagtcctctgcagcgg

SEQ ID NO: 271225 - DNA, 120 bp, Artificial Sequence
  ENSG00000127511_54 (sequence is synthesized)
ctctcctcatgctctggcagtggggggcacagaacccctgtgagctcctgaactcagagtccagagtaagagtggccatagccctgctgtaggggcatcacgggctgtgtctctccctgt

SEQ ID NO: 271226 - DNA, 73 bp, Artificial Sequence
  ENSG00000127511_55 (sequence is synthesized)
tagccaggcatggtggtgcacacctatattcctagctacgtgggaggctattgattgtgccacagcactcaag

SEQ ID NO: 271227 - DNA, 120 bp, Artificial Sequence
  ENSG00000127511_56 (sequence is synthesized)
tttgattgtgccacagcactcaagtctgggtgacagagcaagaccctatctcttaaatacacacaccccccccccaaaaaaatcctctggtctctgaggtcccaggctcctctctgaggc

SEQ ID NO: 271228 - DNA, 120 bp, Artificial Sequence
  ENSG00000127511_57 (sequence is synthesized)
ctgacttcccagggctccctaggggggttctgttcctgtcaactccatctacttggtttttagttactgtttttgagcaatgattgtgcttttctaaaatcctgtttattaattgacgtg

SEQ ID NO: 271229 - DNA, 120 bp, Artificial Sequence
  ENSG00000127511_58 (sequence is synthesized)
agcaatacaccacctgggtaccctccagctggttcctttaccagtaacatctgtagtcagtatcctcaccagaatacagtgggtcctcgagtaatgccttttcatttaacactgttttaa

SEQ ID NO: 271230 - DNA, 120 bp, Artificial Sequence
  ENSG00000127511_59 (sequence is synthesized)
caccgatgagaaaagaagacattcatttctggtctgagtggagtttgcacgttctccccatgtctgcgtggattttctcccacatcccaaagatgtgcatgttaggttaagtctaggtta

SEQ ID NO: 271231 - DNA, 120 bp, Artificial Sequence
  ENSG00000127511_60 (sequence is synthesized)
agcggtgagtctccgtggtcccagcctgagtgagtgtggcggggtgagcgccctgcagtggggtggcgtcctgtccagggtgggtgccccactggtgctctgagctgctgggatagggtc

SEQ ID NO: 271232 - DNA, 120 bp, Artificial Sequence
  ENSG00000127511_61 (sequence is synthesized)
cggccacccaagatcctgaactggaataattgggtaaattgttattttacttgtttttactcatctttcttatctgtatgtgtggcttgcatttatttcagtgtttaatattagaagtgt

SEQ ID NO: 271233 - DNA, 120 bp, Artificial Sequence
  ENSG00000127511_62 (sequence is synthesized)
tttggtctctctttagaaatttggtgattgttttgtgaccaaaaatacgccgtaggaacgtcattcttgtttatgtgtcaattagcttgtggcaaaattggttttgttacacatcttttc

SEQ ID NO: 271234 - DNA, 120 bp, Artificial Sequence
  ENSG00000127511_63 (sequence is synthesized)
aacttaaagacacagctttctaacacctgttgatgatgttgagtgaggacttactgtactgactctcacacaacccccgttctttccagactctccgtgttcctcatacacgtctggtgt

SEQ ID NO: 271235 - DNA, 120 bp, Artificial Sequence
  ENSG00000127511_64 (sequence is synthesized)
gtgtgtttttatacagctttctcactgtggagggttgtgcgtccgccacagtgaagatactgaacggctccaggactgtcaagttctggccttgaccttttatctccatcccaaaaccct

SEQ ID NO: 271236 - DNA, 120 bp, Artificial Sequence
  ENSG00000127511_65 (sequence is synthesized)
gcctcagccggagtctgttccaaacccctggcaactacttatctgttctctagacaatgttacagtaatggaactgtacaggaggaaccctctgggagaaaccttccccccccccccccc

SEQ ID NO: 271237 - DNA, 120 bp, Artificial Sequence
  ENSG00000127511_66 (sequence is synthesized)
accttcccccccccccccccagcaaaattccctggagattcacctgataaatacttttaaaaattctaacacttgggccgggtgcggtggctcgtgtgtaatcccagcactttgggaggc

SEQ ID NO: 271238 - DNA, 120 bp, Artificial Sequence
  ENSG00000127515_0 (sequence is synthesized)
atgaaatcatggaacaatacaataattttagaatttcttctcctgggaatttcagaggaaccagaattgcaggccttcctctttgggctgttcctgtccatgtacctggtcactgtgctc

SEQ ID NO: 271239 - DNA, 76 bp, Artificial Sequence
  ENSG00000127515_1 (sequence is synthesized)
gtagacatctgttttgtctctaccactgtcccgaagatgctggtgaacatccagacacacaacaaagtcatcacct

SEQ ID NO: 271240 - DNA, 120 bp, Artificial Sequence
  ENSG00000127515_2 (sequence is synthesized)
atgctggtgaacatccagacacacaacaaagtcatcacctatgcaggctgcatcacccagatgtgctttttcttactctttgtaggattggataacttccttctgaccgtgatggcctat

SEQ ID NO: 271241 - DNA, 120 bp, Artificial Sequence
  ENSG00000127515_3 (sequence is synthesized)
atgagtgttctgaattccatgttacaaagcttaatggtgttgccactgcccttttgtacacacatggaaatccctcattttttctgtgaaattaatcaggtggtccaccttgcctgttct

SEQ ID NO: 271242 - DNA, 120 bp, Artificial Sequence
  ENSG00000127515_4 (sequence is synthesized)
gacacctttcttaatgacatagtgatgtattttgcagtagcgctgctgggcggtggtcccctcactgggatcctgtactcttactctaagatagtttcctccatacgtgcaatctcatca

SEQ ID NO: 271243 - DNA, 120 bp, Artificial Sequence
  ENSG00000127515_5 (sequence is synthesized)
gctcaggggaagtataaggcattttccacctgtgcatctcacctctcagttgtctccttattttatggtacatgcttaggggtgtaccttagttctgctgccacccacaattcacacaca

SEQ ID NO: 271244 - DNA, 84 bp, Artificial Sequence
  ENSG00000127515_6 (sequence is synthesized)
ggtgtaccttagttctgctgccacccacaattcacacacaggtgctgcagcctcagtgatgtacactctgaggaataaacacat

SEQ ID NO: 271245 - DNA, 120 bp, Artificial Sequence
  ENSG00000127515_7 (sequence is synthesized)
gttagacctttggaaggcagacaaatccatggagaaggaataataacgactcgattcgcctgatgtttaatctgatgtcttgggaactgagtatgcaagaaaaaaatttctttccatgaa

SEQ ID NO: 271246 - DNA, 120 bp, Artificial Sequence
  ENSG00000127515_8 (sequence is synthesized)
gagcaatgtcccacagggactgaatgtgatcaggggttgaataacaggaggaaatgtctccaatgagcaggcatatgaagctgtaaatttctccgctgcaggtgtccctcagcatatgca

SEQ ID NO: 271247 - DNA, 120 bp, Artificial Sequence
  ENSG00000127515_9 (sequence is synthesized)
accttgggctggatgggacatccttgtttctttcggagtctatatctgctggctcaggggtactgattctttcctttctcctactgtcttgtcttgggacacagcctcagtctccaccat

SEQ ID NO: 271248 - DNA, 120 bp, Artificial Sequence
  ENSG00000127515_10 (sequence is synthesized)
aggctatttttcaagaaaggcctgtgacttcagagctctaagccccagagccagaaatggtgatttgttaataagatggtggaaggaagacttgccccttccatttatttcctggagttt

SEQ ID NO: 271249 - DNA, 120 bp, Artificial Sequence
  ENSG00000127515_11 (sequence is synthesized)
aaacttctttgttcctcaactactttatagagcttacactgttcttcttagagtcagagatgaccttaaatatgacggaatataattttcaatcatacatgaaataactatggaatattt

SEQ ID NO: 271250 - DNA, 120 bp, Artificial Sequence
  ENSG00000127515_12 (sequence is synthesized)
gttttcgttggggtacatctactcattgaagtagaggagcctggtgtccacgcgtcactaggtttgttcatctgagtgaaggattgagtgccatggtgtatgtaatgtccttgcatcact

SEQ ID NO: 271251 - DNA, 120 bp, Artificial Sequence
  ENSG00000127515_13 (sequence is synthesized)
ctgctacttctgcctaatgttttccagtgctgcctacaaatatgactccttccattgtcctaacatctcttccttaaaaatgtcataagcatcaaagtgttgacaagtgaacaatatatg

SEQ ID NO: 271252 - DNA, 120 bp, Artificial Sequence
  ENSG00000127526_0 (sequence is synthesized)
gcgcgcgagggcgcgcgggtggcggcgctgtgcctgctgtggtacgcgctgagcgcgggcggcaacgtggtcaacaaggtgatcctgagcgccttcccgttcccggtgaccgtgtcgctg

SEQ ID NO: 271253 - DNA, 120 bp, Artificial Sequence
  ENSG00000127526_1 (sequence is synthesized)
accgtgtcgctgtgccacatcctggctctgtgcgctgggctcccgccgctgctgcgcgcctggcgcgtgccccccgcgccgcccgtctcgggccccggacccagtccgcatccgtcgtcc

SEQ ID NO: 271254 - DNA, 120 bp, Artificial Sequence
  ENSG00000127526_2 (sequence is synthesized)
ccgccgcgcttctacccgcgctacgtgctaccgctcgccttcggcaagtacttcgcgtccgtgtcagcgcacgtcagcatctggaaggtgcccgtgtcctatgcacacaccgtcaaggcc

SEQ ID NO: 271255 - DNA, 120 bp, Artificial Sequence
  ENSG00000127526_3 (sequence is synthesized)
accatgcccatctgggtggtcctcctgtcccggatcattatgaaggagaagcagagcaccaaggtatacttgtcactcatccccatcatcagcggtgtcctgctggccaccgtcaccgag

SEQ ID NO: 271256 - DNA, 120 bp, Artificial Sequence
  ENSG00000127526_4 (sequence is synthesized)
ttgtcttttgacatgtggggactcgtcagcgccctcgccgccacgctgtgcttctcgcttcagaacattttctccaaaaaggtcttgcgagattcacggatccaccatctccggctgctc

SEQ ID NO: 271257 - DNA, 120 bp, Artificial Sequence
  ENSG00000127526_5 (sequence is synthesized)
aacatcctgggctgccacgccgtcttctttatgatccccacctgggttctggtggacctctcggctttcctggtcagcagcgacttgacctacgtctaccagtggccctggacgctcctg

SEQ ID NO: 271258 - DNA, 120 bp, Artificial Sequence
  ENSG00000127526_6 (sequence is synthesized)
ctcctggctgtcagcggcttctgtaactttgcccagaatgttatcgccttcagcatcctcaacctcgttagccccctgagctactcggtcgccaatgccaccaaaagaatcatggtcatc

SEQ ID NO: 271259 - DNA, 120 bp, Artificial Sequence
  ENSG00000127526_7 (sequence is synthesized)
acggtgtccctgatcatgctgcgcaacccagtcaccagcaccaacgtcctgggcatgatgaccgccatcctgggggtcttcctctataacaagaccaagtacgatgcaaaccagcaagcc

SEQ ID NO: 271260 - DNA, 120 bp, Artificial Sequence
  ENSG00000127526_8 (sequence is synthesized)
aggaagcacctcctccccgtcaccacagcagacctgagcagcaaggagcgtcaccggagcccactggagaagccccacaacggcctcctcttcccccagcacggggactatcagtacggc

SEQ ID NO: 271261 - DNA, 120 bp, Artificial Sequence
  ENSG00000127526_9 (sequence is synthesized)
cgcaacaacatcttaacagaccacttccaatacagccggcagagctacccaaactcgtacagtttgaaccgctatgatgtgtagagtccaaaggacaggaccagactgttggtgactcct

SEQ ID NO: 271262 - DNA, 120 bp, Artificial Sequence
  ENSG00000127526_10 (sequence is synthesized)
tccccggcccccacagcagtatcagaaacttctgacaatcagtgaatgtacaacccagccgaggggacggtgcataactctccatcagaagccctggggttcctggccccccgtgagccg

SEQ ID NO: 271263 - DNA, 120 bp, Artificial Sequence
  ENSG00000127526_11 (sequence is synthesized)
caggaggatgcgttgcctgcagtgcagacggccgtgagctctgggcaaacctaaacagagaccagtgtctcatgctctttcttcctggagtctgtcatctgagggccgtgtccctgcgga

SEQ ID NO: 271264 - DNA, 120 bp, Artificial Sequence
  ENSG00000127526_12 (sequence is synthesized)
gatcttggccacgttgtacctttccatgtggaattattccccaagcagtgtagctcagagcacttgtgtctgcattccagataacattcaggacctgtgtgaaaagctggggtcactgtg

SEQ ID NO: 271265 - DNA, 120 bp, Artificial Sequence
  ENSG00000127526_13 (sequence is synthesized)
gctgtagaccatgaactggcagtgggggtgtccagggcggtgcttgagaacgtcagactggctagtttaattccctggcgcagatacgcataggaccaacagggtcaccaagcagacagg

SEQ ID NO: 271266 - DNA, 120 bp, Artificial Sequence
  ENSG00000127526_14 (sequence is synthesized)
gagcccgcgagaatcattcaaaacatccccagccacagagatggatccagtttcctggtcatccccttagcagttcacaagttcctggcaaatgttccaaagcaaaaagcgattgcaatt

SEQ ID NO: 271267 - DNA, 120 bp, Artificial Sequence
  ENSG00000127526_15 (sequence is synthesized)
agcatccagttcctgcagcctggtgctctgccctgcacgtcagggttggcatccacccagatccagatggaagggaaacttctctcttctcctttgcctcctcttccctcaccagagcag

SEQ ID NO: 271268 - DNA, 120 bp, Artificial Sequence
  ENSG00000127526_16 (sequence is synthesized)
ggcgcttctcttggggtggtgagaaggatcttcgagaaatcgtgttcagtatttcaagctctatttctgtggcacatgtcttttgagaggcatcttcacctcttctgtgatgacttggta

SEQ ID NO: 271269 - DNA, 120 bp, Artificial Sequence
  ENSG00000127526_17 (sequence is synthesized)
tgttgtttggtagagagatcttgattttcggaggatcttgcatttttctagggaatattttgtagttgtgtgtgtgtgtttttgccttggtccccattatgggatgcattaggactggcc

SEQ ID NO: 271270 - DNA, 87 bp, Artificial Sequence
  ENSG00000127526_18 (sequence is synthesized)
tttgccttggtccccattatgggatgcattaggactggcctatgcatcgaaaatctttttgtttgtaaacgtttaaaaacaaagttc

SEQ ID NO: 271271 - DNA, 71 bp, Artificial Sequence
  ENSG00000127526_19 (sequence is synthesized)
tcgcgtgcctgtagtcccagctcctcaggctgctgaggcaggcgaattgcttgaacctgggaggcagaagt

SEQ ID NO: 271272 - DNA, 120 bp, Artificial Sequence
  ENSG00000127526_20 (sequence is synthesized)
aaaaaaaaacaaaacaaaaccaagttcccactggtgatgcctgtctgacacgttttggtatttagtaggaaatgaagtgtttcgaagcttcgagagaagcttcaaaattgtcacaattgc

SEQ ID NO: 271273 - DNA, 120 bp, Artificial Sequence
  ENSG00000127526_21 (sequence is synthesized)
tgaaaacagaatgaatcgtgaacattatctcaatattttgtataatagacaagaccacagtgttttggttccctgacctgtttttgtgtttatgttaggatctgaatcatgttctgggta

SEQ ID NO: 271274 - DNA, 120 bp, Artificial Sequence
  ENSG00000127526_22 (sequence is synthesized)
aggatctgaatcatgttctgggtaaggggacgaggagcgaacactgcactaagatttggtttgccaaatcagattctttggtcaagagtcagtttggggccaggcgtggtggctcatgcc

SEQ ID NO: 271275 - DNA, 120 bp, Artificial Sequence
  ENSG00000127526_23 (sequence is synthesized)
aaaaggaatcagtttgggtcttggcagaaatcaacataaggaatatgacaagaccccagtaggtaaccctgagtgctcaggtccgagctgtggtctcttttacggcttcatgaaaggacc

SEQ ID NO: 271276 - DNA, 120 bp, Artificial Sequence
  ENSG00000127526_24 (sequence is synthesized)
gtgccctcacggaggggaccacggcttggcttgtggggtcttaggtgatggctgccttctttcttcatcaccacacccagcttcttgctggcacttaggggaagagagcagcaaatgaga

SEQ ID NO: 271277 - DNA, 120 bp, Artificial Sequence
  ENSG00000127526_25 (sequence is synthesized)
gatttaccttttatctcccagcgagcgagatgtttccctgttcagagaggaagtaacatcacttatgcttgactggtgtttcttttgttgttgtttgtttttctttcaattggaattctg

SEQ ID NO: 271278 - DNA, 120 bp, Artificial Sequence
  ENSG00000127526_26 (sequence is synthesized)
tatttaagatgttatgtcagctgacacatgggacactcctgaagaggtgactggccccccaccctgtttggcggtgagtttccgcaccaccggcctcagaagtgtccctcttgcttcgtc

SEQ ID NO: 271279 - DNA, 120 bp, Artificial Sequence
  ENSG00000127526_27 (sequence is synthesized)
tcttgttcgcttgctttgtaaatactttggtcccaagctgagacaattgctgtgtaaaacgtgaagagtcaatcccaaagggtgttatttgtcagaagaacttgccgtgtgccttcaccg

SEQ ID NO: 271280 - DNA, 120 bp, Artificial Sequence
  ENSG00000127526_28 (sequence is synthesized)
aaggcagtcaagtctgcagttggatttttctcactggtgaatgacaagaaacagggataattttgcactgcggagatattacgggagttgtctatatgattatatatagtacctgattct

SEQ ID NO: 271281 - DNA, 120 bp, Artificial Sequence
  ENSG00000127526_29 (sequence is synthesized)
ttgaacatattattgaactccaaaatgaattcgacctccattcaggcttcctgaaatctctgaagttgctgaaatttgtatattattttccttttccaatgcaagatctgctggtgacgg

SEQ ID NO: 271282 - DNA, 120 bp, Artificial Sequence
  ENSG00000127526_30 (sequence is synthesized)
gaaatgactgtctggttttattatggtttataaattaataaatgggctatttaattctgtatataaatttacagcaagtacgtacactggaatgaatgaggcaatcacgttacaccaaat

SEQ ID NO: 271283 - DNA, 120 bp, Artificial Sequence
  ENSG00000127526_31 (sequence is synthesized)
aaatcagcagatcaaaagacaaacacatatttctgagacttgaaggtccacatccccccgccccctgccaagatggagtcttgctttgttgctcaggctggagtgcagtggcgcagtctc

SEQ ID NO: 271284 - DNA, 63 bp, Artificial Sequence
  ENSG00000127526_32 (sequence is synthesized)
cgtgcccagcctgattgacaatggcctcttgaaggctgggttttcccagccggacagtgcccg

SEQ ID NO: 271285 - DNA, 120 bp, Artificial Sequence
  ENSG00000127526_33 (sequence is synthesized)
gcctcttgaaggctgggttttcccagccggacagtgcccgccccacatgctccactcccacgctttcatctgcaggcctgccttcctctcagccacctcactgctgagctctgtggtaga

SEQ ID NO: 271286 - DNA, 120 bp, Artificial Sequence
  ENSG00000127526_34 (sequence is synthesized)
gaatttcctttacccatcagggtatggtctggctggtaatactgactccaacccagctccttcattttatagaaggaggcatttctgaatcatgtttgttcaccatggcgagactcactg

SEQ ID NO: 271287 - DNA, 120 bp, Artificial Sequence
  ENSG00000127526_35 (sequence is synthesized)
cagaatttttaaccaccttattttaagtcattcattctaggaacagtcaagcccctaccacaaaggggccagatccgttcaagtgaggaagcacttgcagtttctgaattttgctgtata

SEQ ID NO: 271288 - DNA, 120 bp, Artificial Sequence
  ENSG00000127526_36 (sequence is synthesized)
tttgtcctatgtcacccaacaggccctttgctatagctgggacattaccagaccccaataccttagggtctcacagcctgaaggacacagagcattgaattattaaaagacctgaaaata

SEQ ID NO: 271289 - DNA, 120 bp, Artificial Sequence
  ENSG00000127526_37 (sequence is synthesized)
ttataatgtttttcaattgtcacctgttttcaagacttaaatgctatagacttttctgcaggaatgacgtgtatattcctcactggcatttaccaaaaataaatgatggtttccagggaa

SEQ ID NO: 271290 - DNA, 120 bp, Artificial Sequence
  ENSG00000127526_38 (sequence is synthesized)
gctgtgtggtgtcatgaggttctgaggtcatggacctaaagcacctagtgtctcttggtgacacatctggactggctgcctgtggaccatgaggctccagatgagcccctccacatccct

SEQ ID NO: 271291 - DNA, 120 bp, Artificial Sequence
  ENSG00000127526_39 (sequence is synthesized)
ttaaaccagattggttgggttcccttcccagaagatagatatctatgcaagcaggaagaaaatagcatggaaatcctaaccgatcaccttagggagcgacccctgggagaacaggctggc

SEQ ID NO: 271292 - DNA, 120 bp, Artificial Sequence
  ENSG00000127526_40 (sequence is synthesized)
ccaacatgaaggcatcctggtgggctcatatatattacaggggctattcctccagtgaggttccccgcagaagctgcagggtgtatggcacagacctacgtctaccagtggccctggacg

SEQ ID NO: 271293 - DNA, 120 bp, Artificial Sequence
  ENSG00000127526_41 (sequence is synthesized)
tttatgatccccacctgggttctggtggacctctcggctttcctggtcagcagcgacttgcaataggtgcagacccgtggctttcgtattaccaggtacttcgcaggctcagagccacct

SEQ ID NO: 271294 - DNA, 120 bp, Artificial Sequence
  ENSG00000127526_42 (sequence is synthesized)
tcccaggacctccaaccctgtagaatgcattgcgtccaacaagcagatccctgctttgccaaacccagggttcctggctgttcactgccagggaaggctttggcttacgtcttgcttggt

SEQ ID NO: 271295 - DNA, 120 bp, Artificial Sequence
  ENSG00000127526_43 (sequence is synthesized)
ttctagcactgtgggtcagcgtttctcccagcgggatgcccgccttcaccttgtgtacttcccatcccagagctgcagtcagcccctccttcaggactccagacctacgtctaccagtgg

SEQ ID NO: 271296 - DNA, 120 bp, Artificial Sequence
  ENSG00000127526_44 (sequence is synthesized)
ggtgagttgtacagcaccaagaacacgccattttcttggctagttccagaataggtgctttgttgaggagctgtagctgcatgttaacattgtggtatcttttgggcacctgacagccag

SEQ ID NO: 271297 - DNA, 120 bp, Artificial Sequence
  ENSG00000127526_45 (sequence is synthesized)
cgctttcagcagtcagtcctctgtaatgcctcacggtgacgatgcacgccatcgaggaagtgggtttcctgtgtatttccttctctggtgtgcttgatcccaggtgctgatagctgctgt

SEQ ID NO: 271298 - DNA, 80 bp, Artificial Sequence
  ENSG00000127526_46 (sequence is synthesized)
agcacattgactttttatttttactcattttttattttaaatgtttattttttagagacagaacctcgctctgttgccag

SEQ ID NO: 271299 - DNA, 120 bp, Artificial Sequence
  ENSG00000127526_47 (sequence is synthesized)
acagcctcccgagtaactgggactgcaggcgaataccaccatgcctggctaatttttttttgtttgatttttgtttttttactgtttttggagagacagggtctcactatgttgcccagg

SEQ ID NO: 271300 - DNA, 67 bp, Artificial Sequence
  ENSG00000127526_48 (sequence is synthesized)
ttaagagtgccagccctggaactttgaaaactatgcactggccaaaaaaaaaaaaaaaaaaaaaaaa

SEQ ID NO: 271301 - DNA, 66 bp, Artificial Sequence
  ENSG00000127526_49 (sequence is synthesized)
ccagcctgggtgacagagggagactccgtgtcaaaaaaaaaagaaaaaaacatgcgctgcctaatc

SEQ ID NO: 271302 - DNA, 120 bp, Artificial Sequence
  ENSG00000127527_0 (sequence is synthesized)
gctcggagcccgagtccgcgggaagatggcggcgccgctcatccccctctcccagcagattcccactggaaattcgttgtatgaatcttattacaagcaggtcgatccggcatacacagg

SEQ ID NO: 271303 - DNA, 120 bp, Artificial Sequence
  ENSG00000127527_1 (sequence is synthesized)
gagggtgggggcgagtgaagctgcgctttttctaaagaagtctggcctctcggacattatccttgggaagatatgggacttggccgatccagaaggtaaagggttcttggacaaacaggg

SEQ ID NO: 271304 - DNA, 120 bp, Artificial Sequence
  ENSG00000127527_2 (sequence is synthesized)
tttctatgttgcactgagactggtggcctgtgcacagagtggccatgaagttaccttgagcaatctgaatttgagcatgccaccgcctaaatttcacgacaccagcagccctctgatggt

SEQ ID NO: 271305 - DNA, 120 bp, Artificial Sequence
  ENSG00000127527_3 (sequence is synthesized)
cacaccgccctctgcagaggcccactgggctgtgagggtggaagaaaaggccaaatttgatgggatttttgaaagcctcttgcccatcaatggtttgctctctggagacaaagtcaagcc

SEQ ID NO: 271306 - DNA, 120 bp, Artificial Sequence
  ENSG00000127527_4 (sequence is synthesized)
agtcctcatgaactcaaagctgcctcttgatgtcctgggcagggtctgggacctcagtgacattgacaaggatgggcacttggatcgagatgagttcgctgtggccatgcacttggtgta

SEQ ID NO: 271307 - DNA, 120 bp, Artificial Sequence
  ENSG00000127527_5 (sequence is synthesized)
ccgagccctggagaaggagcccgtgccctccgccctgcccccgtccctcatcccaccctccaagagaaagaagactgtgttccctggcgccgtccccgtcctgcctgccagccccccacc

SEQ ID NO: 271308 - DNA, 120 bp, Artificial Sequence
  ENSG00000127527_6 (sequence is synthesized)
aaaagacagcctccgctccacgccgtcccacggcagcgtcagcagcctcaacagcacagggagcctgtcccccaagcacagcctcaagcaaacacagccaacagtgaactgggtggtgcc

SEQ ID NO: 271309 - DNA, 120 bp, Artificial Sequence
  ENSG00000127527_7 (sequence is synthesized)
cgtggcagacaagatgcgatttgatgagatattcctgaagaccgacctggacctggatggctacgtgagtggccaggaggtgaaggagatcttcatgcactcgggcctcacccagaacct

SEQ ID NO: 271310 - DNA, 120 bp, Artificial Sequence
  ENSG00000127527_8 (sequence is synthesized)
tctagcacacatatgggccctggccgatacgaggcaaacggggaagttaagcaaagaccaattcgcgttagctatgtatttcattcagcagaaggtcagtaaaggcatcgaccctcctca

SEQ ID NO: 271311 - DNA, 120 bp, Artificial Sequence
  ENSG00000127527_9 (sequence is synthesized)
agtcctctcgccggacatggtcccgccttcggagagaggcacgcccggcccggacagttcaggctctctcggctccggggagtttactggcgtgaaggagcttgatgacatcagtcaaga

SEQ ID NO: 271312 - DNA, 120 bp, Artificial Sequence
  ENSG00000127527_10 (sequence is synthesized)
gattgcccagttacaaagagagaaatattcactggaacaagacattcgagaaaaggaagaggcaatcagacagaaaaccagcgaggtgcaggaattacaaaatgacctagaccgggaaac

SEQ ID NO: 271313 - DNA, 120 bp, Artificial Sequence
  ENSG00000127527_11 (sequence is synthesized)
aagcagtttgcaggagctcgaggctcagaaacaggatgctcaagaccgcctggacgagatggaccagcagaaggccaagctccgagacatgctgagcgacgtccggcagaagtgccagga

SEQ ID NO: 271314 - DNA, 120 bp, Artificial Sequence
  ENSG00000127527_12 (sequence is synthesized)
tgagactcagatgatctcatcactgaaaacgcaaatccaatctcaggaatctgacttaaagtcccaggaagacgatctgaaccgagccaagtcggagctgaaccgattgcagcaggagga

SEQ ID NO: 271315 - DNA, 120 bp, Artificial Sequence
  ENSG00000127527_13 (sequence is synthesized)
gagcaaactttcccagctgcatgaaagccgccaggaggcccacaggagcctggagcagtatgaccaggtgctcgatggagcccatggtgccagcctgaccgacctggccaacctgagcga

SEQ ID NO: 271316 - DNA, 120 bp, Artificial Sequence
  ENSG00000127527_14 (sequence is synthesized)
aggcgtctccctggcagagaggggcagttttggagccatggatgatcctttcaaaaataaagccttgttatttagcaacaacacgcaagagttgcatccggatcctttccagacagaaga

SEQ ID NO: 271317 - DNA, 120 bp, Artificial Sequence
  ENSG00000127527_15 (sequence is synthesized)
ccccttcaaatctgacccatttaaaggagctgaccccttcaaaggcgacccgttccagaatgacccctttgcagaacagcagacaacttcaacagatccatttggaggggaccctttcaa

SEQ ID NO: 271318 - DNA, 120 bp, Artificial Sequence
  ENSG00000127527_16 (sequence is synthesized)
agaaagtgacccattccgtggctctgccactgacgacttcttcaagaaacagacaaagaatgacccatttacctcggatccattcacgaaaaacccttccttaccttcgaagctcgaccc

SEQ ID NO: 271319 - DNA, 120 bp, Artificial Sequence
  ENSG00000127527_17 (sequence is synthesized)
ctttgaatccagtgatcccttttcatcctccagtgtctcctcaaaaggatcagatccctttggaaccttagatcccttcggaagtgggtccttcaatagtgctgaaggctttgccgactt

SEQ ID NO: 271320 - DNA, 120 bp, Artificial Sequence
  ENSG00000127527_18 (sequence is synthesized)
cagccagatgtccaagcccccaccttctggccctttcacctcctccttgggaggggcaggattctcagatgacccctttaaaagtaaacaggacactcctgctctgcctccgaagaaacc

SEQ ID NO: 271321 - DNA, 120 bp, Artificial Sequence
  ENSG00000127527_19 (sequence is synthesized)
tgctcctccacggcctaaaccgcccagcggtaaaagtacacctgtaagccagcttggttccgcagactttcccgaggcccccgatccattccagccactcggggctgacagcggcgaccc

SEQ ID NO: 271322 - DNA, 120 bp, Artificial Sequence
  ENSG00000127527_20 (sequence is synthesized)
gttccaaagtaaaaaggggtttggggacccgtttagtggaaaagacccatttgtcccctcctctgcagctaaaccttctaaggcctctgcctcgggctttgcagacttcacctcttttgg

SEQ ID NO: 271323 - DNA, 120 bp, Artificial Sequence
  ENSG00000127527_21 (sequence is synthesized)
caatgaggagcagcagctggcgtgggccaagcgggagagcgagaaggcggaacaggagaggctggcgcggctgcggcggcaggagcaggaggacctggaactggccatcgcgctcagcaa

SEQ ID NO: 271324 - DNA, 120 bp, Artificial Sequence
  ENSG00000127527_22 (sequence is synthesized)
ggctgacatgcctgccgcctaggcgagggccgtgtgtaggcgggacagggcacgggcgggttccagagagggggcagtgcagatgtctatatatacacacacacaccgtcgccaccgtac

SEQ ID NO: 271325 - DNA, 120 bp, Artificial Sequence
  ENSG00000127527_23 (sequence is synthesized)
tccaaggaccgggactcgggggcttgttcagggtgagcagactcggctgcaagacctggaaaggtcacatctcctggggaagcccttacagaggccttggccaccacttctgcaggtccg

SEQ ID NO: 271326 - DNA, 120 bp, Artificial Sequence
  ENSG00000127527_24 (sequence is synthesized)
tctctccactgtgccatcccccccggggctgactgcctcccgctcttcctctggggacgaacacacagcggtcagtcgaggagaggaagcacccagggcttccccgcctcctccctactc

SEQ ID NO: 271327 - DNA, 120 bp, Artificial Sequence
  ENSG00000127527_25 (sequence is synthesized)
atagctgcagacatccccacccgccctcccacgcatcagtcagacactcccccagtggtgtatgcactcgttgtataaaatgaagtttgaatgattaatataaaatattttaatacaaaa

SEQ ID NO: 271328 - DNA, 120 bp, Artificial Sequence
  ENSG00000127527_26 (sequence is synthesized)
ttttgtctccttttaaaggcaaacctcccagcttctttagcctcttggtacctcacactctctgtccctcgcgttatttattctacactgccacttctgtaagaaaaacagtttctcaat

SEQ ID NO: 271329 - DNA, 120 bp, Artificial Sequence
  ENSG00000127527_27 (sequence is synthesized)
tacaaaggtatgttggaaacggcccttccctccacatccagatgttacacgaactctcccaggttgttatcggaaatatcagaggctcacctggaagtttgctcatcacaggtttattca

SEQ ID NO: 271330 - DNA, 120 bp, Artificial Sequence
  ENSG00000127527_28 (sequence is synthesized)
agaggacttcctgtactttaagttgattttgataattatttgctcaagcactaacatctgctcacacttttgtctttctggtacaagtgggctccttggaggcaggtgagactgatcttt

SEQ ID NO: 271331 - DNA, 120 bp, Artificial Sequence
  ENSG00000127527_29 (sequence is synthesized)
gtctccctgcaaagacactgccccaccatgggagactcctgccacactcaggcagcagctaggacgaaggacaagacccggggccagggcctccctcctgaggaccttggctcccagatc

SEQ ID NO: 271332 - DNA, 120 bp, Artificial Sequence
  ENSG00000127527_30 (sequence is synthesized)
cgaggttgccataacgttatttccttcagggtatatgttcactttggaaaccaaggggccaagactgttctaagatcattttgtgcttttagccaagggtgatgatgggtccgtggccat

SEQ ID NO: 271333 - DNA, 120 bp, Artificial Sequence
  ENSG00000127527_31 (sequence is synthesized)
tttcacttggctttcggtcagagctcggtctggacattcacacaggtgtgctctcctacttactcgggctatttctttccaactaggtggaagaaaaggccaaatttgatgggatttttg

SEQ ID NO: 271334 - DNA, 120 bp, Artificial Sequence
  ENSG00000127527_32 (sequence is synthesized)
aataaacgtattacagtatggggctctggtcccctggtgtgacagcagaacatcccacccgccagatctgttcatggccaacgttggttccagccaagtgcaggcggctgtctgttgttt

SEQ ID NO: 271335 - DNA, 120 bp, Artificial Sequence
  ENSG00000127527_33 (sequence is synthesized)
ttgctgccactttgcgcgttcacaccaggccttgcagcctggcacaggtggccatgctgaatcctggcttccagaacaaagtccaagataggcctggatcctttcagaacctgttttgaa

SEQ ID NO: 271336 - DNA, 120 bp, Artificial Sequence
  ENSG00000127527_34 (sequence is synthesized)
tgccctccatctctgcggaagtatttacattgggccaaccacccaagttcagagggcttctcaaacttaaccaaaattggatcagtttctgctcattgtggaaaccccacattctactaa

SEQ ID NO: 271337 - DNA, 120 bp, Artificial Sequence
  ENSG00000127527_35 (sequence is synthesized)
tcagggggcaggggacatctgaggggcatgtgtctatgtgtatgtgtgtttccacaaggaacaccttgaaaagcaaatgtgttgctaaagatgaggaagtaatggcaagcagcgccccag

SEQ ID NO: 271338 - DNA, 120 bp, Artificial Sequence
  ENSG00000127527_36 (sequence is synthesized)
ggtgttgctctttcaagtaagaattggcctctcctgaaattttggttatgtttaaaaacctctgcactttactctgacctcatgaccctggagttgtgatcaggcctggggcaggggact

SEQ ID NO: 271339 - DNA, 120 bp, Artificial Sequence
  ENSG00000127527_37 (sequence is synthesized)
gtcggccccttacatttttgagagctcttgagcccctgataccaagacaggtgtgaccttttccttaggtggtcacatcccccctgttcacaccagagtctgcccctgcagcctcgaacc

SEQ ID NO: 271340 - DNA, 120 bp, Artificial Sequence
  ENSG00000127527_38 (sequence is synthesized)
tggggacatgtagtttcccatttcgtcttggtgctgttccgggagcggatgggccgggccgcgcatgtctggatgtttccttggtgctctgctgcctccagcagctctctccgtgctgcc

SEQ ID NO: 271341 - DNA, 120 bp, Artificial Sequence
  ENSG00000127527_39 (sequence is synthesized)
accctctctcccagggctcctccctggagcccttctgctcctgggcctctgtacgtcatggattcctcttcctccctggaataagagtgagcgctcgtgctctctaaacaccacacttgc

SEQ ID NO: 271342 - DNA, 120 bp, Artificial Sequence
  ENSG00000127527_40 (sequence is synthesized)
ctctttatgttcaatgcttgatgtgtttcttttctcagcagccaagtcctcagtcccaaggatttatggggaagcacacgcgtcccctgggctgctgggaaggcactgctggcgagctca

SEQ ID NO: 271343 - DNA, 120 bp, Artificial Sequence
  ENSG00000127527_41 (sequence is synthesized)
tctgtctcttgtgtctggcccccgctgggtgcaccgcctccctctttcctcccatactctcttttctcgtggactcgtaatgaggtggtttccatagccgcccccgggcccgtcatcatc

SEQ ID NO: 271344 - DNA, 120 bp, Artificial Sequence
  ENSG00000127527_42 (sequence is synthesized)
agctttatcgtctaaatttaaacgatgagcattcatccttcatgagttacgagaagccagaactcctcgctttgctccctggctgttcttggcgtgtgtgtttccgtctcacaacccggc

SEQ ID NO: 271345 - DNA, 120 bp, Artificial Sequence
  ENSG00000127527_43 (sequence is synthesized)
tcctactttccccatctggcattgtcccctggcaccgcttttggcttgtcctgctcagtcttcgttcagggaacagcttcctcttaaatgtcccttttgcaggtttttagaaaccggttt

SEQ ID NO: 271346 - DNA, 120 bp, Artificial Sequence
  ENSG00000127527_44 (sequence is synthesized)
tcttggataaaagttggcagtgaagtggcagtttgcaagtggccagtgattcccccaactccaaagacagatttttacctttctggttatttttgttcatcttttgggcagggcaaaggt

SEQ ID NO: 271347 - DNA, 120 bp, Artificial Sequence
  ENSG00000127527_45 (sequence is synthesized)
tacctgagacacaattactttgggaatgtagattaagatacgttacatggaaacttgcaactggcatccgaaagaaaaactgtttttatcctgttgtacaaatacagtttttaaagcatt

SEQ ID NO: 271348 - DNA, 120 bp, Artificial Sequence
  ENSG00000127527_46 (sequence is synthesized)
ggcccactgggctgtgagggtaagtgaacgggaatagctccctccttggctctccttcagatagaattgttccagcagttgttctagaattgttctggaattgttctagtttgatgttgt

SEQ ID NO: 271349 - DNA, 120 bp, Artificial Sequence
  ENSG00000127527_47 (sequence is synthesized)
tcagaacattttataggatgattgtgtcagctcttctgtctcagtgtgagtggccacagcacttggatgaaacgcctcttctaatgaacaccttttacaaaggctgtggcccttcactgg

SEQ ID NO: 271350 - DNA, 120 bp, Artificial Sequence
  ENSG00000127527_48 (sequence is synthesized)
aattgggagttgcctacctggacaactaagtgtcaggagttggattattaaagggctgcagtttaaatcttgcatctttaggtcacattctgtggtttttgctgcttgtgttggttattc

SEQ ID NO: 271351 - DNA, 120 bp, Artificial Sequence
  ENSG00000127527_49 (sequence is synthesized)
atgggctctgtcttcggggggctgcaggggcctgctttcctcacgagttccacctgcagaggcccaggcattatccacgctgcgggaagaggcagtagccacaagcagaacacagccccc

SEQ ID NO: 271352 - DNA, 120 bp, Artificial Sequence
  ENSG00000127527_50 (sequence is synthesized)
ctcctggagcccatggcccaggtggtaaggggtggccggtgtggggggtcccctggagcagctgggcccagtccctgtgagcgctgctgtcagcctgaaggtggtgaggggagggagccc

SEQ ID NO: 271353 - DNA, 120 bp, Artificial Sequence
  ENSG00000127527_51 (sequence is synthesized)
gggagtacctggaagacgcgtgccccaggcatgaggccccctcggggccccaccggccccatgcccaggtgccccaggtgccagtgtgactgggcagtctcccttggctgccccgtgttc

SEQ ID NO: 271354 - DNA, 120 bp, Artificial Sequence
  ENSG00000127527_52 (sequence is synthesized)
actcagctggtggagcagatgagtctctgagcatcttggggttggcagcggtcgcaacttgtgatcacagaacacagattccgagaagcacttgagattctgttcaggttttcaaagacg

SEQ ID NO: 271355 - DNA, 120 bp, Artificial Sequence
  ENSG00000127527_53 (sequence is synthesized)
cgtgtgtgcgtgccctggcggcgcagcagatcccacttctgaccgaggcagggtgtgtgtttacacagatgagcctgggcagagggagcccagaggccctggcatggcgcccccctcctt

SEQ ID NO: 271356 - DNA, 120 bp, Artificial Sequence
  ENSG00000127527_54 (sequence is synthesized)
ccagcacacggagaaggcctccatccctcatatgccacgctgtgacacggtttgggactggcagaagatttagggcccagtgcacaggctcctgggcaggcgggaaaccatctcccgaaa

SEQ ID NO: 271357 - DNA, 120 bp, Artificial Sequence
  ENSG00000127527_55 (sequence is synthesized)
gcagaaaacgttggccacacggtggcagcagtccctcaggcgtcctggtcgtttctggttgtcgcaagtggactcctcttcctttgggaggctggatctgtcttcctcctctcactgtga

SEQ ID NO: 271358 - DNA, 120 bp, Artificial Sequence
  ENSG00000127527_56 (sequence is synthesized)
gcagagggagggagagctagcagagcctgagctagggccgggatctaatgaccgccctctgcctgtccttgggccctgaaaccaggggctcttcacacacatgcagctgtgatttcagag

SEQ ID NO: 271359 - DNA, 120 bp, Artificial Sequence
  ENSG00000127527_57 (sequence is synthesized)
ccggtctcacttcctattggcggtgccgggccaggacagagttggacagagctgtggaaaatgggtctccaatactatcttgttttgattccagcgttccatcagctgccttcatgacac

SEQ ID NO: 271360 - DNA, 120 bp, Artificial Sequence
  ENSG00000127527_58 (sequence is synthesized)
ttgtacagccgcattctgagctcaaccctgaccttgcagctctgtttttcctttttggttacctatctgtttttcaagaacaacattgtggatataaataaaatgctaagggaaatgaaa

SEQ ID NO: 271361 - DNA, 120 bp, Artificial Sequence
  ENSG00000127527_59 (sequence is synthesized)
tgtcaagtattactaggcatgagcacggctgtcaaacttaacacgggaagttttcattttgaaataaaggtcttttaaacacttggagccatctttcatggctagtgtatcttttattta

SEQ ID NO: 271362 - DNA, 120 bp, Artificial Sequence
  ENSG00000127527_60 (sequence is synthesized)
gcagctggtggatccaaatgcccaggtggcagcccccaccactactttggtagcagataagaaacccgagtacttttggggtcttgatagcttgtggacttttttttttttttttttttt

SEQ ID NO: 271363 - DNA, 120 bp, Artificial Sequence
  ENSG00000127528_0 (sequence is synthesized)
ggcccacagagccgtccccgcccgcccgcgccccgaccagcccggcctcgggcagccactcaccggtgtccccgtccgcgtcctttctccccgggtcccggccatggcgctgagtgaacc

SEQ ID NO: 271364 - DNA, 120 bp, Artificial Sequence
  ENSG00000127528_1 (sequence is synthesized)
aacccatcctgccgtccttctccactttcgccagcccgtgccgcgagcgcggcctgcaggagcgctggccgcgcgccgaacccgagtccggcggcaccgacgacgacctcaacagcgtgc

SEQ ID NO: 271365 - DNA, 120 bp, Artificial Sequence
  ENSG00000127528_2 (sequence is synthesized)
tggacttcatcctgtccatggggctggatggcctgggcgccgaggccgccccggagccgccgccgccgcccccgccgcctgcgttctattaccccgaacccggcgcgcccccgccctaca

SEQ ID NO: 271366 - DNA, 120 bp, Artificial Sequence
  ENSG00000127528_3 (sequence is synthesized)
tacagcgcccccgcgggtggcctggtgtctgagctgctgcgacccgagctggatgcgccgctggggcccgcactgcacggccgctttctgctggcgccgcccggccgcctggtcaaggcc

SEQ ID NO: 271367 - DNA, 80 bp, Artificial Sequence
  ENSG00000127528_4 (sequence is synthesized)
cccctgaagcggacggcggcggcggctacggctgcgcccccgggctgacccgtggaccgcgcggcctcaagcgcgagggc

SEQ ID NO: 271368 - DNA, 80 bp, Artificial Sequence
  ENSG00000127528_5 (sequence is synthesized)
ctcagccccgacggccccgcgcgcctgcccgcgcccggtccgcgcgcctccttcccgccgcctttcggtggccctggttt

SEQ ID NO: 271369 - DNA, 80 bp, Artificial Sequence
  ENSG00000127528_6 (sequence is synthesized)
ccgggcccggcctgcattacgcgccgcctgcgcccccagccttcggtctcttcgacgacgcggccgccgccgcggcagcc

SEQ ID NO: 271370 - DNA, 120 bp, Artificial Sequence
  ENSG00000127528_7 (sequence is synthesized)
cgcctgcgtccccgctggagctgctggaggccaagccaaagcgcggccgccgctcttggccccgcaaacgcaccgccactcacacctgcagctacgcgggctgcggcaagacctacacca

SEQ ID NO: 271371 - DNA, 120 bp, Artificial Sequence
  ENSG00000127528_8 (sequence is synthesized)
gagctcacgcgccactaccgaaagcacacgggccaccggccattccagtgccatctgtgcgatcgtgccttctcgcgctccgatcacctggcgctgcacatgaaacggcacatgtagccg

SEQ ID NO: 271372 - DNA, 120 bp, Artificial Sequence
  ENSG00000127528_9 (sequence is synthesized)
ggacgcccccgcccacctgcgcgcggccgtggcgggtcccacgcgccgggcgcggccccctcccaaactgtgactggtatttattggacccagagaaccgggccgggcacagcgtggcta

SEQ ID NO: 271373 - DNA, 120 bp, Artificial Sequence
  ENSG00000127528_10 (sequence is synthesized)
cagagggtctccctcgatgacgacgacgacgacgccaccaccccagcccccgtctgtgactgaaggcccggtgggaaaagaccacgatcctccttgacgagttttgtttttcaaaatggt

SEQ ID NO: 271374 - DNA, 120 bp, Artificial Sequence
  ENSG00000127528_11 (sequence is synthesized)
gcaataatttaagtggcatcttctctcccaccgggtctacactagaggatcgaggcttgtgatgccttgtgagaaataagggccttaatttgtactgtctgcggcattttttataatatt

SEQ ID NO: 271375 - DNA, 120 bp, Artificial Sequence
  ENSG00000127528_12 (sequence is synthesized)
gtatatagtgactgacaaatattgtattactgtacatagagagacaggtgggcatttttgggctacctggttcgtttttataagattttgctgggttggttttttttttaattaaaaagt

SEQ ID NO: 271376 - DNA, 120 bp, Artificial Sequence
  ENSG00000127528_13 (sequence is synthesized)
tttgcatcttttaaaaaaaatcacagcactggtctggttgcttggaactggggccttggggcacttgggaggaggggggagcggagagtttgatggagggcagccccactaaagcatcgt

SEQ ID NO: 271377 - DNA, 120 bp, Artificial Sequence
  ENSG00000127528_14 (sequence is synthesized)
gtgcagtgggtcctgcgtctgccagcaccgggactgccagctgctgtgcctgcctgccaggaacctgtgggtttttctgtaaatttagacactgcattttaggactgagggagggttatt

SEQ ID NO: 271378 - DNA, 120 bp, Artificial Sequence
  ENSG00000127528_15 (sequence is synthesized)
ttaaggttgttctttgagccataaattgcctctttgccccacagctggggaaagtgctggtcccactgacgtggcctcctctacgttgaaaaaaataaaactacttacctcttcctggaa

SEQ ID NO: 271379 - DNA, 120 bp, Artificial Sequence
  ENSG00000127529_0 (sequence is synthesized)
atggaaagaggaaaccaaacagaagttggaaactttctcctcctgggattcgcagaggactctgacatgcagcttctcctccatgggctgttcctctccatgtacctggttaccatcatc

SEQ ID NO: 271380 - DNA, 76 bp, Artificial Sequence
  ENSG00000127529_1 (sequence is synthesized)
gctgacatctgtttcacatccacgactgtcccaaagatgctggtgaatatccaaacacaaagcaaaatgatcactt

SEQ ID NO: 271381 - DNA, 120 bp, Artificial Sequence
  ENSG00000127529_2 (sequence is synthesized)
atgctggtgaatatccaaacacaaagcaaaatgatcacttttgcaggctgcctcactcagatattttttttcattgcatttggatgcctggacaatttgctcctgaccatgacggcctat

SEQ ID NO: 271382 - DNA, 120 bp, Artificial Sequence
  ENSG00000127529_3 (sequence is synthesized)
gaccgcttcgtggccatctgttaccccctgcactacacggtcatcatgaacccccggctctgtggactgctggttctggggtcctggtgcatcagtgtcatgggttccttgcttgagacc

SEQ ID NO: 271383 - DNA, 120 bp, Artificial Sequence
  ENSG00000127529_4 (sequence is synthesized)
ttgaccattttgaggctgtccttctgcacaaatatggaaattccgcactttttttgtgatccttccgaagtcctgaagctggcctgttctgacaccttcatcaataacatcgtgatgtat

SEQ ID NO: 271384 - DNA, 120 bp, Artificial Sequence
  ENSG00000127529_5 (sequence is synthesized)
tttgtgaccattgtcctgggtgtttttcctctctgtggaatcctattctcttattctcagattttctcctccgtcctaagagtatctgccagaggccagcacaaagccttttccacctgt

SEQ ID NO: 271385 - DNA, 120 bp, Artificial Sequence
  ENSG00000127529_6 (sequence is synthesized)
ggttcccacctctcagtggtcagcttgttctatggcactggccttggggtctatctcagttctgcagttacaccaccttctaggacaagtctggcagcctcggtgatgtacaccatggtc

SEQ ID NO: 271386 - DNA, 84 bp, Artificial Sequence
  ENSG00000127529_7 (sequence is synthesized)
aacaaggacatgaaggggtcactggggagactcctcctcagggcaacgtctctcaaagaggggaccattgctaagctctcatga

SEQ ID NO: 271387 - DNA, 120 bp, Artificial Sequence
  ENSG00000127530_0 (sequence is synthesized)
ccaaatttccatgttgccagtgtgttgataattgactgttgcttttttctctcttgtggcagttattttatccccatggaaacaggaaatcaaacacatgcccaagaatttctcctcctg

SEQ ID NO: 271388 - DNA, 120 bp, Artificial Sequence
  ENSG00000127530_1 (sequence is synthesized)
ggattttcagcaacgtcagagattcagttcattctctttgggctgttcctctccatgtacctagtcactttcaccgggaacctgctcatcatcctggccatatgctcagactcccacctc

SEQ ID NO: 271389 - DNA, 120 bp, Artificial Sequence
  ENSG00000127530_2 (sequence is synthesized)
catgtacttcttcctctccaacctgtcttttgctgacctctgttttacctccacgactgtcccaaagatgttactgaatatactgacacagaacaaattcataacatatgcaggctgtct

SEQ ID NO: 271390 - DNA, 120 bp, Artificial Sequence
  ENSG00000127530_3 (sequence is synthesized)
ggctgtctcagtcagattttttttttcacttcatttggatgcctggacaatttactcttgaccgtgatggcctatgaccgcttcgtggccgtctgtcaccccctgcactatacggtcatc

SEQ ID NO: 271391 - DNA, 120 bp, Artificial Sequence
  ENSG00000127530_4 (sequence is synthesized)
aaatggaaattccacactttttttgtgatctacttgaagtcctgaagctcgcctgttctgacaccttcattaataacgtggtgatatactttgcaactggcgtcctgggtgtgatttcct

SEQ ID NO: 271392 - DNA, 120 bp, Artificial Sequence
  ENSG00000127530_5 (sequence is synthesized)
tcactggaatatttttctcttactataaaattgttttctctatactgaggatttcctcagctgggagaaagcacaaagcgttttccacctgtggttcccacctctcagtggtcaccttgt

SEQ ID NO: 271393 - DNA, 120 bp, Artificial Sequence
  ENSG00000127530_6 (sequence is synthesized)
caccttgttctatggcacgggctttggggtctatctcagttctgcagccacaccatcttctaggacaagtctggtggcctcagtgatgtacaccatggtcacccccatgctgaacccctt

SEQ ID NO: 271394 - DNA, 120 bp, Artificial Sequence
  ENSG00000127530_7 (sequence is synthesized)
gcctgaggaacacggacatgaagagggccctggggagactcctcagtagggcaacattttttaatggtgacatcactgcaggactttcataagtagcaaggcttggaccattgggaggca

SEQ ID NO: 271395 - DNA, 120 bp, Artificial Sequence
  ENSG00000127530_8 (sequence is synthesized)
taaatatttcatctgctgttgtccctcaggcacccctgggttgaatggaatatcattgtttcttttgaagtcctaagtctagctcagagacagatgcttgactctttcctgctgcctagt

SEQ ID NO: 271396 - DNA, 120 bp, Artificial Sequence
  ENSG00000127530_9 (sequence is synthesized)
ctgctgagcagagcttcagtctccaccatcaatcatccagtgaggaatttgcacttacacaaggaactcttcctcggagagatcccctcctgaacccacctgcagttcaccagccccaga

SEQ ID NO: 271397 - DNA, 120 bp, Artificial Sequence
  ENSG00000127530_10 (sequence is synthesized)
ccaagagcaccttctctatgcctctctgaaatgtccatccactccagagaaccagcccctgacacccacccccttgccctgcctgcaccgattgtgcaaggagggaaggtcaacagagcc

SEQ ID NO: 271398 - DNA, 120 bp, Artificial Sequence
  ENSG00000127530_11 (sequence is synthesized)
aagtccattgagggatatcaagagaagccagagtaaacccttgatctgcgccatcttgtctgctcgtggctgacaaagagaagggaagatggagccaccatcttgaaaacttctagtcct

SEQ ID NO: 271399 - DNA, 120 bp, Artificial Sequence
  ENSG00000127530_12 (sequence is synthesized)
accatcttgaaaacttctagtccttagttcctgccggcattcacccgtgcaagctcccagcttgtttgtgtctgcagctcgcctttacaggatgctctttgttagaaaatgatttggggc

SEQ ID NO: 271400 - DNA, 120 bp, Artificial Sequence
  ENSG00000127530_13 (sequence is synthesized)
tcactgaggactcccataaccttactatctgcgtctgaccagggattctgcatttaaagaaactcttgttgatcttgttggttcatggacaacactttgagaagccaggctatagagggt

SEQ ID NO: 271401 - DNA, 120 bp, Artificial Sequence
  ENSG00000127530_14 (sequence is synthesized)
acaagtattatggaactaacactacatttccagatcccgatggtagcaaagaaaaggatggaagaatttcagatgccccagaaaaagacagcaagaaaaagttattttatccccatggaa

SEQ ID NO: 271402 - DNA, 120 bp, Artificial Sequence
  ENSG00000127530_15 (sequence is synthesized)
aagaaattatttaggtagatagggagggccacagagtccttggcaaggtttccccgttaacaaaaagcagccctcaaaatcatttcttttctaacaaagaacagcctgaaaaatcgagct

SEQ ID NO: 271403 - DNA, 120 bp, Artificial Sequence
  ENSG00000127530_16 (sequence is synthesized)
acatagataagcaagctggaagcttgcatgagtgaatgccggctgctgcgccaatagaaaagggctagctggggaccagtcatgttcaacatggaggctccctcttccttttctttgtca

SEQ ID NO: 271404 - DNA, 120 bp, Artificial Sequence
  ENSG00000127530_17 (sequence is synthesized)
gtcaaccatgtgtacagcaaaggaacaggcaacatggggctgcccaggtaaagaacccatctgtataataaaagattagggtggggcagccagcttctccacatgctatgcaaatggcac

SEQ ID NO: 271405 - DNA, 120 bp, Artificial Sequence
  ENSG00000127530_18 (sequence is synthesized)
acctgatccaaccaatcttttatggcctatgtaaatcagacaacacctcctcaagctagtttataaaaccctgtgcatttcaccatggaactggcaacccattttctctgggacccctct

SEQ ID NO: 271406 - DNA, 120 bp, Artificial Sequence
  ENSG00000127530_19 (sequence is synthesized)
ctgcacatagagctcttctctttctctcacctattaaacttctgctcttaacctcactctggtgtgtccgcatcccagtcttcttccatggctgtgggacaacaaacctcaggtgttacc

SEQ ID NO: 271407 - DNA, 120 bp, Artificial Sequence
  ENSG00000127530_20 (sequence is synthesized)
ccagacaactatgctgcttcatcttgattttgacaatttttgaagacggtgtattaactttctagggcatctgtaacaatgtgccacaaattgggtgagttaaacaatagcaattgattg

SEQ ID NO: 271408 - DNA, 120 bp, Artificial Sequence
  ENSG00000127530_21 (sequence is synthesized)
tctcacatttctgtagactatgacgcctgaaatcaagttgttggcagggctggttccacttgaaggctgtgagaaagattctgttccatgccttacccctagcttctgccggttgctggc

SEQ ID NO: 271409 - DNA, 120 bp, Artificial Sequence
  ENSG00000127530_22 (sequence is synthesized)
agtctttggctttccttgacaatatagaagcatcaccccaatctctgctttcatcttcaggtgatgttctccctctaggtgtgtctgtgtccaaatttccccttcttatatggacaacat

SEQ ID NO: 271410 - DNA, 120 bp, Artificial Sequence
  ENSG00000127530_23 (sequence is synthesized)
tcagattagaggccaactctactccactatggacctcatcttagcttaactaattacattcaccgcagccctatttctaactgagggctttaatgtaacatatgatcacataagcaatgc

SEQ ID NO: 271411 - DNA, 120 bp, Artificial Sequence
  ENSG00000127530_24 (sequence is synthesized)
aaactattgtgaacatctcagatatttgcaatgaaaaaactaaacattggcttcacaaaggtcagaatagctgagaccacattctgaagttttggcggtaaggacttcaacatatgaatt

SEQ ID NO: 271412 - DNA, 120 bp, Artificial Sequence
  ENSG00000127530_25 (sequence is synthesized)
tgtagagaatgaaaattcaacccataaaagacagtttcatcaagactagctttaaatgcaaagaatgaccagcatcccaaattgcccatttctgtttttttttgtttttttgcaaataaa

SEQ ID NO: 271413 - DNA, 120 bp, Artificial Sequence
  ENSG00000127530_26 (sequence is synthesized)
attttattggcatatagccacacccacttgtgtacatattatctgtggctgctttcatgttacaagagcagatatgagtaactgccacagaaatcatctgacctggaaaacctacctaaa

SEQ ID NO: 271414 - DNA, 120 bp, Artificial Sequence
  ENSG00000127530_27 (sequence is synthesized)
aacctacctaaaatatttactctctggcctttttcactgtgaaggtttgctgacccctgaattaaaacattgctctcacttcatctcgtctaagttagattttttttttttttttttttt

SEQ ID NO: 271415 - DNA, 120 bp, Artificial Sequence
  ENSG00000127530_28 (sequence is synthesized)
tctgggattacaagcatgagccacagcacccagcctaagttagattttttttaagcatctcagcataccattaaaattttctaatgtacatgaaattctttgcaaaactgcattcttatt

SEQ ID NO: 271416 - DNA, 120 bp, Artificial Sequence
  ENSG00000127530_29 (sequence is synthesized)
actgtgtaattagaagggttttgttctatacatagaatgctaactcaaacaataagtgatcctttcctagtaatctaaatattaattctcatgatgggtgggaccttcataccccctctg

SEQ ID NO: 271417 - DNA, 120 bp, Artificial Sequence
  ENSG00000127530_30 (sequence is synthesized)
tgtagcaaaatctctgacatagaaggaaagtgtggtaaattcttgttgaataggtaaacctaaactagtatatgcaaatcttgaaaaaataagtagaattaacaaagctgtgaagctaga

SEQ ID NO: 271418 - DNA, 120 bp, Artificial Sequence
  ENSG00000127530_31 (sequence is synthesized)
aaaactttcagctactctgtagttaagtctcacagagattttgagtaacacccttatgtgaagtcgccattgtaagattatgtcattattcaccatcacgcacatgttaaagctaattca

SEQ ID NO: 271419 - DNA, 120 bp, Artificial Sequence
  ENSG00000127530_32 (sequence is synthesized)
gtgccgtcgtcttccaggggagtgatgtagaacaggaaagactgaatgaatggtcaacttttcatgtaactcactcaattagtggaaacggtccttccatttctttgtcttttttttttt

SEQ ID NO: 271420 - DNA, 120 bp, Artificial Sequence
  ENSG00000127530_33 (sequence is synthesized)
ttacaggcgtgagccactgcaaccggcctggtccttccatttctaattgaggagagtgatgctgaaactgcctttgcaaaaaatcatcgctgagaacattatgacggtgaaagtggtctg

SEQ ID NO: 271421 - DNA, 120 bp, Artificial Sequence
  ENSG00000127530_34 (sequence is synthesized)
catcgctgagaacattatgacggtgaaagtggtctgacctaactaactccatcttgcctctaacctccaagctgtccttgctcattcctgggctctaactttgggagaaacttagtttat

SEQ ID NO: 271422 - DNA, 120 bp, Artificial Sequence
  ENSG00000127530_35 (sequence is synthesized)
tttgaaacaaagacggtaacagccctttcccaaaaccaattcccttcctgctgggagactagactgccttcgtaggactaacatattagccacaagatcagaaactatggtttaaaagtc

SEQ ID NO: 271423 - DNA, 71 bp, Artificial Sequence
  ENSG00000127530_36 (sequence is synthesized)
cacgcagctggagactgcaagattctgaacctccccaaattgcttctggggacaacatcactattgtaaaa

SEQ ID NO: 271424 - DNA, 120 bp, Artificial Sequence
  ENSG00000127530_37 (sequence is synthesized)
tccccaaattgcttctggggacaacatcactattgtaaaacctaagattggtgcttgagctactttgcagaccctgtactccattgctcagctggcaccacccagactgattaactcatc

SEQ ID NO: 271425 - DNA, 120 bp, Artificial Sequence
  ENSG00000127530_38 (sequence is synthesized)
tggtcttgtggcccctcccaggaactgactcagcacaaaaggacagctttgacttcctatgatttcatctctaacccaatcaatcagcactccccacttcccaactcctacccaccaaat

SEQ ID NO: 271426 - DNA, 120 bp, Artificial Sequence
  ENSG00000127530_39 (sequence is synthesized)
tattctttaaaaccccaatccccagattttcagggagactaatttgagtaataataaaactgcggtctcctgtacagctggctctacatgaatttaaactctattgcaattctcctgtct

SEQ ID NO: 271427 - DNA, 120 bp, Artificial Sequence
  ENSG00000127530_40 (sequence is synthesized)
tctaggcagcaggcaaggtgaacccattgggcagttacaatggtgcaatcaactctattgttggacagctcccagcattagagattgaaaaatctgagtcaaaattgccttccctataac

SEQ ID NO: 271428 - DNA, 120 bp, Artificial Sequence
  ENSG00000127530_41 (sequence is synthesized)
accactagtcatttcttagacaaaaggtttattcctgtcttcacccttacgagttttctatactccttagaaggtggaatgagttcctttgtcaacaactcctcttccactgacattcta

SEQ ID NO: 271429 - DNA, 120 bp, Artificial Sequence
  ENSG00000127530_42 (sequence is synthesized)
tattcactcagttctatcactgctgcttctaaattgtgagacacaagaatgcacccaacactccaggcatttactgatgagcactgagcatgcttccttgaataatctgcagccccaggc

SEQ ID NO: 271430 - DNA, 120 bp, Artificial Sequence
  ENSG00000127530_43 (sequence is synthesized)
caatgtgcatgtgtctgtgttgtaagccacaagacacatattaaacattaattagtaaagttggataaatagaaaaggtcagcgttagggggtgggcggggctgagagagtgggagaatt

SEQ ID NO: 271431 - DNA, 120 bp, Artificial Sequence
  ENSG00000127530_44 (sequence is synthesized)
gtcaaaagagtagaagagtttcatggaagaaatgttgggaagtgaaatgtcaggataattaaatgagtgaccatcagatgtggctactagtagatcaccagggatataaacaggtaccag

SEQ ID NO: 271432 - DNA, 120 bp, Artificial Sequence
  ENSG00000127530_45 (sequence is synthesized)
ttggttggtgttaaagctgaaacccagattggctcctcctcatcttctcaagttctcagtgctgcaacattccatgatttcgtcttctagcctcttcttttccctacctgtcctcacttt

SEQ ID NO: 271433 - DNA, 120 bp, Artificial Sequence
  ENSG00000127530_46 (sequence is synthesized)
tccctatctgtctctcaccatgtgtctctctagttaatgtcatgctgtctcatagacttaagatcatatatggaggctaaagaatccaaaatgcgtatcttcagacaagatgactccaga

SEQ ID NO: 271434 - DNA, 120 bp, Artificial Sequence
  ENSG00000127530_47 (sequence is synthesized)
ttcatagacccaactgcctcttagacaactccacttggaagcttaacacacatttcaaacctgacatgcccaaaatcttaatcctaattactcccagccttctccactcacaatcttccc

SEQ ID NO: 271435 - DNA, 120 bp, Artificial Sequence
  ENSG00000127530_48 (sequence is synthesized)
tctccactcacaatcttcccatctatgtacatggcaaaactccattattccagcatctcaagtcagaatcccttgagttgtacttaacttctttctctctctctctgtctctctctctct

SEQ ID NO: 271436 - DNA, 120 bp, Artificial Sequence
  ENSG00000127530_49 (sequence is synthesized)
atcatacactattttgactttgtgagtggcttctttcacttagcttaatgctttcaaggttcatccatgttgtagcatgtattggtatttcattatctattttgccaaatagtactccat

SEQ ID NO: 271437 - DNA, 120 bp, Artificial Sequence
  ENSG00000127530_50 (sequence is synthesized)
tgtatagatagactatattttgatatccactcatcaatatgagagacacttcagtttttccacttttggactattatgaatattcttataaacgcttgtgtacaattttttttttttttt

SEQ ID NO: 271438 - DNA, 120 bp, Artificial Sequence
  ENSG00000127530_51 (sequence is synthesized)
caggcgtgagccaccatgcccagccttgtgtacaaatttttgtgtagacatatgtttccatttctcttgaatatatgcctcggagtagaattactgggttgtatggtaatgctatgttta

SEQ ID NO: 271439 - DNA, 120 bp, Artificial Sequence
  ENSG00000127530_52 (sequence is synthesized)
ggtaatgctatgtttaacatattgaggaactgccaaaatatttttcttagtgactgcaccattttcatctccaccaacaatgtaggagtgttccaatttccccatattctcatcaaaact

SEQ ID NO: 271440 - DNA, 120 bp, Artificial Sequence
  ENSG00000127530_53 (sequence is synthesized)
tgttaattgcttgtcttttgttttattttagccattccaacagatgtggagtggtaactcggtgtggttttaatttgcattccctaatgacttatgataagactctttacaaatgtatat

SEQ ID NO: 271441 - DNA, 120 bp, Artificial Sequence
  ENSG00000127530_54 (sequence is synthesized)
tgaccatttgcatatcttctttggggaaatatctattcaaattatttgcccatttttaattgggttatttgaattttattgttaagttgtaaaagttctatgtatgttctggatataagt

SEQ ID NO: 271442 - DNA, 120 bp, Artificial Sequence
  ENSG00000127530_55 (sequence is synthesized)
ctcttgccagatgattttgatgcataaacatttttaattttgatgcagtcctatttatctaattttgtattttgtcatttgtgctttggataccatatctaaaaatccactgcctaaacc

SEQ ID NO: 271443 - DNA, 120 bp, Artificial Sequence
  ENSG00000127530_56 (sequence is synthesized)
aaggtcaaaaagatttacttctggttttttttctacaagttttacagttttagctcttacttttaggcctatgatccatgtggagttggttatttaatgcagtgtgaggtaggggcttaa

SEQ ID NO: 271444 - DNA, 120 bp, Artificial Sequence
  ENSG00000127530_57 (sequence is synthesized)
cttcattcttttttttttttttttacacatattgagccattttaataaaaaaagctagtccaaaaaagggtctcattctataaagattaaatcatttccaaatcacagtgaaacgaactt

SEQ ID NO: 271445 - DNA, 120 bp, Artificial Sequence
  ENSG00000127530_58 (sequence is synthesized)
aattaaccaattttgttttctactatatgccttagagatacctcactaaaatttcgtatctgatacaacagaataacatttgcagaatgtaatattgtagtgacagtactgaggttcatt

SEQ ID NO: 271446 - DNA, 120 bp, Artificial Sequence
  ENSG00000127530_59 (sequence is synthesized)
gttacagactattaaatggttacatcttaattatttatacagaatattggtccaataacattaaaatagagaacagcatctggaaatttatctcattcaatgttcggagataaaagagtt

SEQ ID NO: 271447 - DNA, 120 bp, Artificial Sequence
  ENSG00000127530_60 (sequence is synthesized)
aaacatcctttccattattttctgcagtaagtccttgttcacaatgaaatctgatggcaattaaattctggcattttccccagctactgtatgaagaggatgctgaaggccattactata

SEQ ID NO: 271448 - DNA, 120 bp, Artificial Sequence
  ENSG00000127530_61 (sequence is synthesized)
cagcatacttcaacataaggactcttccgttcaccaattctggcacacttccaaaatatacccaacaatccagttttatttctgtccaggaggctgggtgccaaggatcgaatataagca

SEQ ID NO: 271449 - DNA, 120 bp, Artificial Sequence
  ENSG00000127530_62 (sequence is synthesized)
caggtacatataagcagcaagattacagtcaatagactctgaatattgaaaatggcagacatagcgaggccggcgatgccacagccacatcacccttccaggccccaagcagaagcttaa

SEQ ID NO: 271450 - DNA, 120 bp, Artificial Sequence
  ENSG00000127530_63 (sequence is synthesized)
cttcattcttttgcatgctgaaatacagttgtcccagaaacatttcttaaatagaccattctttctccccagtgaattgtcttcacatccttgttgaaaatctatagaccataaatgtaa

SEQ ID NO: 271451 - DNA, 120 bp, Artificial Sequence
  ENSG00000127530_64 (sequence is synthesized)
gagtttatttctgtactcttgattctatttcatcgggctatatgtctaatccttatgcccataccacactgtcttgattactgtagctttgtagtaagttttaaaatcaggaaatgtgag

SEQ ID NO: 271452 - DNA, 120 bp, Artificial Sequence
  ENSG00000127530_65 (sequence is synthesized)
tcttcaagttggttcttcttttccaagattctttgactattgtgaatcctctaccattccacataaattttagggtcatcctgtcaatttacgcaaaaaagttaactgggcttgtggtag

SEQ ID NO: 271453 - DNA, 120 bp, Artificial Sequence
  ENSG00000127530_66 (sequence is synthesized)
ggactatgttaaattcatcatgttggggagtacttctatcttatgaatactaagcctcccaattcatgaacatgggatgtctttccatttctttagatctttaacttcttccaacaatgt

SEQ ID NO: 271454 - DNA, 120 bp, Artificial Sequence
  ENSG00000127530_67 (sequence is synthesized)
ttcataattttcaatgtacaagccttgtacttctttatacagtagtatttgtacatcttctttcacaggataattataatgagcagctaaaccagatgatcctgtctcctggaaaatgag

SEQ ID NO: 271455 - DNA, 120 bp, Artificial Sequence
  ENSG00000127530_68 (sequence is synthesized)
gacaatattgaactgtcattcactgagccaggagtatcttaaaaatgctttttcatgtttgttacaaataacttttcatggcaccattataaaagaaaatttccaggaaatgtttgacac

SEQ ID NO: 271456 - DNA, 120 bp, Artificial Sequence
  ENSG00000127530_69 (sequence is synthesized)
tcatttgctgtagaatttaggtgttctgatccgtagagcatgctcagctaactcccattgcaggtaaggtgctatggcccaatttcacacatactttggattaagtcctctgcttcaacc

SEQ ID NO: 271457 - DNA, 120 bp, Artificial Sequence
  ENSG00000127530_70 (sequence is synthesized)
tccttttctaaaaagatcttcctcaagttgaaaatatataaccaggaaaaccagccttaacagactttcttaaaatagcataagagaggaaattattgttcagtccaggaccttcatgta

SEQ ID NO: 271458 - DNA, 120 bp, Artificial Sequence
  ENSG00000127530_71 (sequence is synthesized)
aagcaaacaactgatctcaattgcccagcactttcctggtttagtacaaaaagccccaatcccagaaaaacatctcagttacaggaaaaccaggtcacctgagctccctacctgcatgcc

SEQ ID NO: 271459 - DNA, 120 bp, Artificial Sequence
  ENSG00000127530_72 (sequence is synthesized)
ccatgttcttcactctccttttctaaagagtcactaatttaattcattcaacaaatatatttttattactcaccaagtgcagcacacagatcaataaagattcaattcctgcctttacag

SEQ ID NO: 271460 - DNA, 120 bp, Artificial Sequence
  ENSG00000127530_73 (sequence is synthesized)
agcttacagataattttttaatgtttcctggctagagtaaaatcagaactttgtaaatagaatctcttcactcttccattttataaactgagctatggaagtaggcatatatttctactg

SEQ ID NO: 271461 - DNA, 120 bp, Artificial Sequence
  ENSG00000127530_74 (sequence is synthesized)
cacattttgtaaaatgtatttatagataacgttatttcatcctcggcatgatacctaaatccagagcagttccacctaaaataatattccctctgggctcccactgaccaaattcatacc

SEQ ID NO: 271462 - DNA, 120 bp, Artificial Sequence
  ENSG00000127530_75 (sequence is synthesized)
gattggaacatcaaggaaaatgactttaaattattataacctattaaataaaaaatatccatgagttcatagtgatacataaaataccagccaataaatgtagaagatatgatagaatta

SEQ ID NO: 271463 - DNA, 120 bp, Artificial Sequence
  ENSG00000127530_76 (sequence is synthesized)
gaaaatcatgatttttcaatatccagtaaatgaccactaaaaatgttgcatattggagaacagggtatccctacagtgccaaagaatcatctcacaaattactgattaattacaagtgcc

SEQ ID NO: 271464 - DNA, 120 bp, Artificial Sequence
  ENSG00000127530_77 (sequence is synthesized)
aaagtgtacatttacaatgtggagatctgatagtcactatctgaactcagtctcaggcttaacattatcaatacaggggcaacctgacattatatatctcctgataagacatgaagttac

SEQ ID NO: 271465 - DNA, 120 bp, Artificial Sequence
  ENSG00000127530_78 (sequence is synthesized)
aaaatcatgtttgtggcaaataaagaattattgacaaatcagcctaatcttaatctaatctagtctttagactgaaggttggcaaactacaacatgcagaccaaattcaccctgctgctt

SEQ ID NO: 271466 - DNA, 120 bp, Artificial Sequence
  ENSG00000127530_79 (sequence is synthesized)
gtttttacaaatatggttttattggaacatggctacacttattcactgatgtattattgacagctgctttcaacctacaatgtcagagttgagttgttgtaacagagactataaggccac

SEQ ID NO: 271467 - DNA, 120 bp, Artificial Sequence
  ENSG00000127530_80 (sequence is synthesized)
aaaaccaaaaaaaaaaaaaaaattactatctgactctttatagaaaaagtttggtggccccgttcttctagatctaaccttcaatctacatgaaatatgagggacagaagaagttaagtg

SEQ ID NO: 271468 - DNA, 120 bp, Artificial Sequence
  ENSG00000127530_81 (sequence is synthesized)
acatgatgaggaaacaaactggcaaatccagaacatgagacattcaacaagaaaattgacctagactcttctaaagtcattatcatgaaaaaagtggccagtagctactctagattaaga

SEQ ID NO: 271469 - DNA, 120 bp, Artificial Sequence
  ENSG00000127530_82 (sequence is synthesized)
cacaaaaccagaaaaacaatcaaattcaatatcagttttggtggaaactctagttcaaatatatagtataaaagatattttggagtcaagcgggataatttgactatgcattacatatta

SEQ ID NO: 271470 - DNA, 120 bp, Artificial Sequence
  ENSG00000127530_83 (sequence is synthesized)
aaagttattgtgaaattatttattcctttgggtgtaataatagtatcatggttatataaagaacattcttattcttagaatttgttgaagaattatttaagacagaagtgctggccgggc

SEQ ID NO: 271471 - DNA, 120 bp, Artificial Sequence
  ENSG00000127530_84 (sequence is synthesized)
gcctgggcaacaagagcgaaactctgctgcaaaaaaaaaaaaaagatggaagtgccatgatatctgccactgactaccaatgttttgtatgtgtaaatctgtgtatatagagagagatgt

SEQ ID NO: 271472 - DNA, 120 bp, Artificial Sequence
  ENSG00000127530_85 (sequence is synthesized)
atgttttctagggtgccactataataatattgttccatctctatggatgatatatgagtgtttattgtatcaatcttctgaattttttctatgttttaaaattataaataaaagtgtcag

SEQ ID NO: 271473 - DNA, 86 bp, Artificial Sequence
  ENSG00000127530_86 (sequence is synthesized)
aactcctgggctcaagcaatttaacgtgtgccaccacgcccagcctagatggcgtttcgccatattgcccaggctggtcttgaact

SEQ ID NO: 271474 - DNA, 120 bp, Artificial Sequence
  ENSG00000127533_0 (sequence is synthesized)
aacccacactccagtcctcccacgggctggctggcaagcggccctggtgggtctgcgggggcaggggcagccttcctggtttatctctaccggcgcgatctgctcgtccgcctcggctcc

SEQ ID NO: 271475 - DNA, 120 bp, Artificial Sequence
  ENSG00000127533_1 (sequence is synthesized)
agaagctggggctcagggtccggcgaggcaggaagcctgaggccacagcccagagcagcctgagtgcagtcatgtgggggcgactgctcctgtggcccctggtgctggggttcagcctgt

SEQ ID NO: 271476 - DNA, 120 bp, Artificial Sequence
  ENSG00000127533_2 (sequence is synthesized)
ctggcggcacccagacccccagcgtctacgacgagagcgggagcaccggaggtggtgatgacagcacgccctcaatcctgcctgccccccgcggctacccaggccaagtctgtgccaatg

SEQ ID NO: 271477 - DNA, 120 bp, Artificial Sequence
  ENSG00000127533_3 (sequence is synthesized)
acagtgacaccctggagctcccggacagctcacgggcactgcttctgggctgggtgcccaccaggctggtgcccgccctctatgggctggtcctggtggtggggctgccggccaatgggc

SEQ ID NO: 271478 - DNA, 120 bp, Artificial Sequence
  ENSG00000127533_4 (sequence is synthesized)
tggcgctgtgggtgctggccacgcaggcacctcggctgccctccaccatgctgctgatgaacctcgcggctgctgacctcctgctggccctggcgctgcccccgcggatcgcctaccacc

SEQ ID NO: 271479 - DNA, 120 bp, Artificial Sequence
  ENSG00000127533_5 (sequence is synthesized)
tgcgtggccagcgctggcccttcggggaggccgcctgccgcctggccacggccgcactctatggtcacatgtatggctcagtgctgctgctggccgccgtcagcctggatcgctacctgg

SEQ ID NO: 271480 - DNA, 120 bp, Artificial Sequence
  ENSG00000127533_6 (sequence is synthesized)
ccctggtgcacccgctgcgggcccgcgccctgcgtggccggcgcctggcccttggactctgcatggctgcttggctcatggcggccgccctggcactgcccctgacactgcagcggcaga

SEQ ID NO: 271481 - DNA, 120 bp, Artificial Sequence
  ENSG00000127533_7 (sequence is synthesized)
ccttccggctggcgcgctccgatcgcgtgctctgccatgacgcgctgcccctggacgcacaggcctcccactggcaaccggccttcacctgcctggcgctgttgggctgtttcctgcccc

SEQ ID NO: 271482 - DNA, 120 bp, Artificial Sequence
  ENSG00000127533_8 (sequence is synthesized)
tgctggccatgctgctgtgctacggggccaccctgcacacgctggcggccagcggccggcgctacggccacgcgctgaggctgaccgcagtggtgctggcctccgccgtggccttcttcg

SEQ ID NO: 271483 - DNA, 120 bp, Artificial Sequence
  ENSG00000127533_9 (sequence is synthesized)
tgcccagcaacctgctgctgctgctgcattactcggacccgagccccagcgcctggggcaacctctatggtgcctacgtgcccagcctggcgctgagcaccctcaacagctgcgtggatc

SEQ ID NO: 271484 - DNA, 120 bp, Artificial Sequence
  ENSG00000127533_10 (sequence is synthesized)
ccttcatctactactacgtgtcggccgagttcagggacaaggtgcgggcagggctcttccaacggtcgccgggggacaccgtggcctccaaggcctctgcggaagggggcagccggggca

SEQ ID NO: 271485 - DNA, 120 bp, Artificial Sequence
  ENSG00000127533_11 (sequence is synthesized)
tgggcacccactcctctttgctccagtgacacaaagtggggaaggctgtactgggtcgaacagggtcccttcccccacttcacgtccttcctgggacctcagaatgtgaccttatttgga

SEQ ID NO: 271486 - DNA, 120 bp, Artificial Sequence
  ENSG00000127533_12 (sequence is synthesized)
aatagggttgttacaactgtcactagcggaggtcactttggagaagggtgggccttacatccagtgtgggtggtgtcctcataagataaggagaggccaggcctggtggctcacgcctgt

SEQ ID NO: 271487 - DNA, 120 bp, Artificial Sequence
  ENSG00000127533_13 (sequence is synthesized)
tgcgccactggactccagcctgcgtgacagagagcctgtctctaaattaattaattaattaatttaattcaattttaaaaagacgaaaagtgacggccaggtgcagtggctcacgcctat

SEQ ID NO: 271488 - DNA, 89 bp, Artificial Sequence
  ENSG00000127533_14 (sequence is synthesized)
ggggatcccatctctacacacaaaaaaattttttaatgaaccaggcattgtggcatgcgcctatagtcccagccactcaagaggcacag

SEQ ID NO: 271489 - DNA, 120 bp, Artificial Sequence
  ENSG00000127533_15 (sequence is synthesized)
tttttaatgaaccaggcattgtggcatgcgcctatagtcccagccactcaagaggcacaggcgggaggatcacttgagcctgggaggttgtggttgcagtgagctatgattgtaccactg

SEQ ID NO: 271490 - DNA, 66 bp, Artificial Sequence
  ENSG00000127533_16 (sequence is synthesized)
ggcaacagagcaagaccttgtctcaaaaataaacaaactaaaattaaaaaaagaagacgagagata

SEQ ID NO: 271491 - DNA, 68 bp, Artificial Sequence
  ENSG00000127533_17 (sequence is synthesized)
acatggtgaaatccctggggaggtgcccacccagctactggggaggctgagtcaggagaatcgcttga

SEQ ID NO: 271492 - DNA, 76 bp, Artificial Sequence
  ENSG00000127533_18 (sequence is synthesized)
ggcggaggttgcggtcctctgtctccaaaaaaaagagaagaggagaggacacagagacacacagagaagaaagcca

SEQ ID NO: 271493 - DNA, 120 bp, Artificial Sequence
  ENSG00000127533_19 (sequence is synthesized)
gaagaggagaggacacagagacacacagagaagaaagccatgtggcggcagaggcagagatgggagtgatgcggacggacacaaactaagggatgccacgatgccaagcacagccaacag

SEQ ID NO: 271494 - DNA, 120 bp, Artificial Sequence
  ENSG00000127533_20 (sequence is synthesized)
ccaccagcagccaggagacaggcctgggacgggctctccctcacagcctccagagggaaccagccctgccaccaccttgaccctggacttctggcctgcagaactgtgagacaataaact

SEQ ID NO: 271495 - DNA, 120 bp, Artificial Sequence
  ENSG00000127533_21 (sequence is synthesized)
ctcattgttttaagctgcctggcatgtggcactttgtcagggcagcccaggaatctgaaacaggatcaaactctgcttcctgggccctgccagcatctctggctcggctttctgggctgg

SEQ ID NO: 271496 - DNA, 120 bp, Artificial Sequence
  ENSG00000127533_22 (sequence is synthesized)
atgcagcccacgacgcactggtgtctgagatggggctggagctggggctggggctgcattccctggagactcactgcaagttcctgcccaggaggctgagggcaccccatcctcagtgcc

SEQ ID NO: 271497 - DNA, 120 bp, Artificial Sequence
  ENSG00000127533_23 (sequence is synthesized)
caatgctgtggccccaccaggcccagagcctggttggccattctcatgcccaccagcttctggctttgggatgtctcttgagcaaccagaatagcacccccaactctgctccccaaaacc

SEQ ID NO: 271498 - DNA, 120 bp, Artificial Sequence
  ENSG00000127533_24 (sequence is synthesized)
catcactagcacggctcagcctcctgctatcccctgactgctggggaccctcgccttccctcctctcacctgcaggctgatccttcttttcactttctgtcaatgtcaccagggataagg

SEQ ID NO: 271499 - DNA, 120 bp, Artificial Sequence
  ENSG00000127533_25 (sequence is synthesized)
tgggacaatggggggtgggggtggacagtgtgtgctggggggttcgggtgctgcagacctggaactcccttctgccaggatgttggcagccggttgtaagccttgcacgggacagaccac

SEQ ID NO: 271500 - DNA, 120 bp, Artificial Sequence
  ENSG00000127533_26 (sequence is synthesized)
atgtgggggcgactgctcctgtggcccctggtgctggggttcagcctgtctggcggcacccagacccccagcgtctacgacgagagcgggagcaccggaggtggtgatgcacgccctcaa

SEQ ID NO: 271501 - DNA, 120 bp, Artificial Sequence
  ENSG00000127540_0 (sequence is synthesized)
cgcgcctgcgcagtgtagccgggtcagctggacagggtcatcctgagggtgcgactccgccgcgatggtgacccggttcctgggcccacgctaccgggagctggtcaagaactgggtccc

SEQ ID NO: 271502 - DNA, 120 bp, Artificial Sequence
  ENSG00000127540_1 (sequence is synthesized)
gacggcctacacatggggcgctgtgggcgccgtggggctggtgtgggccaccgattggcggctgatcctggactgggtaccttacatcaatggcaagtttaagaaggataattaattaca

SEQ ID NO: 271503 - DNA, 120 bp, Artificial Sequence
  ENSG00000127540_2 (sequence is synthesized)
caaacccttcacagactgctctggtaagtttcagtgggctgcggtgggtggactgcatgatggccggatggtggccgaagagtgggttctccaggctcccagagccggggcggcagccct

SEQ ID NO: 271504 - DNA, 120 bp, Artificial Sequence
  ENSG00000127540_3 (sequence is synthesized)
gtggggccctgggtgccccttctggcatctccggcccacgggcacagaactgtccgccccgcagccttgggttgtgtgattggggtgtgggcctcgccctccctctggacaatcccagtg

SEQ ID NO: 271505 - DNA, 120 bp, Artificial Sequence
  ENSG00000127540_4 (sequence is synthesized)
agtctttgaggcaaaccttgcttccgtctcagtgggcactgcagcctgaactgggtggggcccatgttacagacagagggggaaggtggaggctggcccacagtggctggacaccccatg

SEQ ID NO: 271506 - DNA, 120 bp, Artificial Sequence
  ENSG00000127540_5 (sequence is synthesized)
agctcttggaagcgcctgtgaggccctggacgcatccacgtgtttctccagcatgccagctgcccccttaaccacagtgcctgtggcatcttcccagtgcccacatgacagtcccacgtg

SEQ ID NO: 271507 - DNA, 120 bp, Artificial Sequence
  ENSG00000127540_6 (sequence is synthesized)
agaggcgtgagccactgcacccagcctggaagggacacttctactcaccctgcctcgtctgctctccctccaggtgcctggtggtgctagctcctcccacctcagcacctgctgcatctg

SEQ ID NO: 271508 - DNA, 120 bp, Artificial Sequence
  ENSG00000127540_7 (sequence is synthesized)
gagcagcccaagcctcaggatggacaagaggaaacccacagctcagcttcaggcttcttatgtttctgaaaacagcttggatattttaatgcacgttgcattaaacctcactgaaacctg

SEQ ID NO: 271509 - DNA, 120 bp, Artificial Sequence
  ENSG00000127540_8 (sequence is synthesized)
acaggtgacccaggcgtcctttcagctccagaatgttgcaagtctaggagagtgttccaatggctgacagaaactgcctatttgaaatggctcataagtagtatctgcagtgtgttcatc

SEQ ID NO: 271510 - DNA, 120 bp, Artificial Sequence
  ENSG00000127540_9 (sequence is synthesized)
ctgggtggttgtggcccagagtctctcatgaggttgcagttaagacatcagccaaggccacttcgtctgaggaaggctcaactggggctggagccacttccaagccagtgccctcacgtg

SEQ ID NO: 271511 - DNA, 120 bp, Artificial Sequence
  ENSG00000127540_10 (sequence is synthesized)
gctgtcggtgacagccacagttccttcccatgggggcccctacacgaagctgcttgagcatcctcacggcatggcctctgccttccccagagcaggtgaaccaagggagaggaaggagca

SEQ ID NO: 271512 - DNA, 120 bp, Artificial Sequence
  ENSG00000127540_11 (sequence is synthesized)
agccacagtgcttctatgagccaccctgagaagtctcacgtgatcacttccgccacagcctgtttatcaaaagcaagccccccaggcccagcccacgtgcagagggaggagaatgaggtt

SEQ ID NO: 271513 - DNA, 120 bp, Artificial Sequence
  ENSG00000127540_12 (sequence is synthesized)
ctgtgttttgaagggaagaatatcagaattggtagacatttcaaactgtcacattagggatacaaaaatgaacaggctgggagtggtggctcagcctacaatcccaacactttgggaggc

SEQ ID NO: 271514 - DNA, 120 bp, Artificial Sequence
  ENSG00000127540_13 (sequence is synthesized)
tacaatcccaacactttgggaggctgaggaaggggcatcacttgaaccaggagttcagtactaacctgggcaacaaagaggcccctgtctctgataaaaagaaaaaaaatgaaaaaataa

SEQ ID NO: 271515 - DNA, 120 bp, Artificial Sequence
  ENSG00000127540_14 (sequence is synthesized)
gacagggtcatcctgagggtgcgactccgccgcgatggtgacccggttcctgggcccacgctaccgggagctggtcaagaactgaatgccatcaagacaacacgtgcgaagattcctgcc

SEQ ID NO: 271516 - DNA, 120 bp, Artificial Sequence
  ENSG00000127554_0 (sequence is synthesized)
gacccggcaggccttgcgcgggcaacatggcggcgcccggcgagcggggccgcttccacggcgggaacctcttcttcctgccggggggcgcgcgctccgagatgatggacgacctggcga

SEQ ID NO: 271517 - DNA, 120 bp, Artificial Sequence
  ENSG00000127554_1 (sequence is synthesized)
atggacgacctggcgaccgacgcgcggggccggggcgcggggcggagagacgcggccgcctcggcctcgacgccagcccaggcgccgacctccgattctcctgtcgccgaggacgcctcc

SEQ ID NO: 271518 - DNA, 120 bp, Artificial Sequence
  ENSG00000127554_2 (sequence is synthesized)
gggcctgcgtcgacttcaagacgtggatgcggacgcagcagaagcgggacaccaagtttagggaggactgcccgccggatcgcgaggaactgggccgccacagctgggctgtcctccaca

SEQ ID NO: 271519 - DNA, 120 bp, Artificial Sequence
  ENSG00000127554_3 (sequence is synthesized)
ccctggccgcctactaccccgacctgcccaccccagaacagcagcaagacatggcccagttcatacatttattttctaagttttacccctgtgaggagtgtgctgaagacctaagaaaaa

SEQ ID NO: 271520 - DNA, 120 bp, Artificial Sequence
  ENSG00000127554_4 (sequence is synthesized)
ggctgtgcaggaaccacccagacacccgcacccgggcatgcttcacacagtggctgtgccacctgcacaatgaagtgaaccgcaagctgggcaagcctgacttcgactgctcaaaagtgg

SEQ ID NO: 271521 - DNA, 120 bp, Artificial Sequence
  ENSG00000127554_5 (sequence is synthesized)
atgagcgctggcgcgacggctggaaggatggctcctgtgactagagggtggtcagccagagctcatgggacagctagccaggcatggttggataggggcagggcactcattaaagtgcat

SEQ ID NO: 271522 - DNA, 120 bp, Artificial Sequence
  ENSG00000127554_6 (sequence is synthesized)
cacagccagagcctgttgtgtctcagttgggtggtccccaggacactgcctgtggggacctgccctgcccctcttaggtttggagcagaagtggaggtgcccacagcaggtacccactgg

SEQ ID NO: 271523 - DNA, 120 bp, Artificial Sequence
  ENSG00000127554_7 (sequence is synthesized)
ccccctcctcagtggagaccccaaggagctgcagctgaactgcaggggagggaaggaggagcagcctgggctgccccttgacattcaggatgtagcttcctgcccaccgcataccctggc

SEQ ID NO: 271524 - DNA, 120 bp, Artificial Sequence
  ENSG00000127554_8 (sequence is synthesized)
gcctcactcctcacacgggaagacagcgggcctggctgggcatccctgtgcctgtccctggcggccaggccattgccttcccactatgcagccagggatgcccctgccccccatggctct

SEQ ID NO: 271525 - DNA, 120 bp, Artificial Sequence
  ENSG00000127554_9 (sequence is synthesized)
cagccatcctaccctctccctgcctggcacatgcctgccagcgttgtgtcatgcctgtccacaggggattcgtggggctcacttcatcagagtttgaagcccaaatgaaacgctgaagtg

SEQ ID NO: 271526 - DNA, 120 bp, Artificial Sequence
  ENSG00000127554_10 (sequence is synthesized)
actgagaacctggcttcagtatattttctgctggggcttaataaagcagtagacagggcttgttccatccctctgtgctcagctgcatttcctgctggggtcctggttcctcaggagaga

SEQ ID NO: 271527 - DNA, 120 bp, Artificial Sequence
  ENSG00000127554_11 (sequence is synthesized)
gagaccacagggtgagagtgagccaggaacagcaaggacgttgattggttggggcaggggggccagagtagctgatgtaggagtactgggaggccagacggcacgaggtctccaaggccc

SEQ ID NO: 271528 - DNA, 120 bp, Artificial Sequence
  ENSG00000127554_12 (sequence is synthesized)
cagcaaagccatggcttctacccctagttcccctgacaggaagttcttggcgggtttggagccaggggatggcatggagtgatgtggctttgaagggtcctctggctgctgagctgggat

SEQ ID NO: 271529 - DNA, 120 bp, Artificial Sequence
  ENSG00000127554_13 (sequence is synthesized)
gaggcaggtaagggtggaacaggaggggtggggaggaagccggggcagtcaccgagtgaccaccaagaggaagacccaccccacggcggggacagatgcggggtacgttaaagggagagc

SEQ ID NO: 271530 - DNA, 120 bp, Artificial Sequence
  ENSG00000127554_14 (sequence is synthesized)
cagagaactcatggggtgaggatggagtccgaggagactgctgggagccgccgtgtgggtcagagatggagaaggctgagtgcagcaaggtggggggtgactgggacccagcctttgggc

SEQ ID NO: 271531 - DNA, 120 bp, Artificial Sequence
  ENSG00000127554_15 (sequence is synthesized)
ctccccagccagagcagcccagcaacagtgtgtcctgtggtcataaaactccagggacctctatcctccaggagtctcagcctttccctgggcgcaggcccaccttggcatggccgcctc

SEQ ID NO: 271532 - DNA, 120 bp, Artificial Sequence
  ENSG00000127554_16 (sequence is synthesized)
aggcctccatggagggagctgctatgtccccaccagattggccccgtgcggctgctggcttctgtagaggctgcccagaggggccaggtggcacaaataagagaggggagatggggggca

SEQ ID NO: 271533 - DNA, 120 bp, Artificial Sequence
  ENSG00000127554_17 (sequence is synthesized)
gccaggagaggaggtgtcccttcctcgcccagacacagcgcgcttctctctggcctttcccgaggcctgtgagtgcctcaggaagcagctgggccctctgggaaggctgtgttcagctta

SEQ ID NO: 271534 - DNA, 120 bp, Artificial Sequence
  ENSG00000127554_18 (sequence is synthesized)
ggaacataccgcctgtatctgctgtccctcccctgcccccctgccccccccaccgccttccctttttccctgtcttccttaaagtttcactcctgaataaaacttcactttgccttagaa

SEQ ID NO: 271535 - DNA, 120 bp, Artificial Sequence
  ENSG00000127554_19 (sequence is synthesized)
gacgtggatgcggacgcagcagaaggtgcagttccctgcccgatttctcccagccccgcgcagcccctgtccccgcccccgcccaggtaccccggcagagcttcccagggttgcctgtcc

SEQ ID NO: 271536 - DNA, 120 bp, Artificial Sequence
  ENSG00000127554_20 (sequence is synthesized)
ctgaaccttgccccccgggtaggcccggccttacagccttcatccgcgcgtgggttggatcgtctgcaggactttggccggagtccagtgggccaccggctgggccgtacagtggggagc

SEQ ID NO: 271537 - DNA, 120 bp, Artificial Sequence
  ENSG00000127561_0 (sequence is synthesized)
gaggcggcagcggctgcagcgttggtagcatcagcatcagcatcagcggcagcggcagcggcctcgggcggggccggccggacggacaggcggacagaaggcgccaggggcgcgcgtccc

SEQ ID NO: 271538 - DNA, 120 bp, Artificial Sequence
  ENSG00000127561_1 (sequence is synthesized)
gggccggccatggagggcgcctccttcggcgcgggccgcgcaggggccgccctggaccccgtgagctttgcgcggcggccccagaccctgctccgggtcgcgtcctgggtgttctccatc

SEQ ID NO: 271539 - DNA, 120 bp, Artificial Sequence
  ENSG00000127561_2 (sequence is synthesized)
catcgccgtcttcgggcccatcgtcaacgagggctacgtgaacaccgacagcggccccgagctgcgctgcgtgttcaacgggaacgcgggcgcctgccgcttcggcgtcgcgctgggcct

SEQ ID NO: 271540 - DNA, 120 bp, Artificial Sequence
  ENSG00000127561_3 (sequence is synthesized)
cggagccttcctcgcctgcgccgccttcctgctgctcgatgtgcgcttccagcaaatcagcagcgtccgcgaccgccggcgcgcggtgttgctggacctgggcttctcaggactctggtc

SEQ ID NO: 271541 - DNA, 120 bp, Artificial Sequence
  ENSG00000127561_4 (sequence is synthesized)
cttcctgtggttcgtgggcttctgcttcctcaccaatcagtggcagcgcacggcgccagggccggccacgacgcaggcgggggacgcggcgcgggccgccatcgccttcagcttcttctc

SEQ ID NO: 271542 - DNA, 120 bp, Artificial Sequence
  ENSG00000127561_5 (sequence is synthesized)
catcctcagctgggtggcgctcaccgtgaaggccctgcagcggttccgcctgggcaccgacatgtcactcttcgccaccgaacagctgagcaccggggcgagccaggcctaccccggcta

SEQ ID NO: 271543 - DNA, 120 bp, Artificial Sequence
  ENSG00000127561_6 (sequence is synthesized)
tccggtgggcagcggcgtggagggcaccgagacctaccagagcccgcccttcaccgagaccctggacaccagccccaaagggtaccaggtgcccgcctactagcggctggcaggcacaga

SEQ ID NO: 271544 - DNA, 120 bp, Artificial Sequence
  ENSG00000127561_7 (sequence is synthesized)
ccagggctccaaggccaccccaccaacgcaggccccagggtctccgggacctcccttgggtccttccagctcagtgccgcggacagagtaggtggccgctttgcgccatccggggccaag

SEQ ID NO: 271545 - DNA, 120 bp, Artificial Sequence
  ENSG00000127561_8 (sequence is synthesized)
gtgtgtccctagcctggaatggactggcctggggaaggctttcccctcttgggccacacctgctcactctggggttgggggtccagctgccctctacgatcaggtgcaggggctgcccag

SEQ ID NO: 271546 - DNA, 120 bp, Artificial Sequence
  ENSG00000127561_9 (sequence is synthesized)
gacaaagcgggggcaggggaaagacaccaccctcgccccaagactggggatcctggccactgttcccatcccatgtccctgtgggtagtgactgtctcgtttctgtcatggtggtgcgtc

SEQ ID NO: 271547 - DNA, 120 bp, Artificial Sequence
  ENSG00000127561_10 (sequence is synthesized)
ccgtccggagccactctccactttctctcacaggctgctagaacagcccagccctgtcagtgttgtgatcatggtccagtcttcgggtttcacctcctagtactccacaagctgctcctc

SEQ ID NO: 271548 - DNA, 120 bp, Artificial Sequence
  ENSG00000127561_11 (sequence is synthesized)
tctctgtggccccggcccctgcccaggtgtgggtggttctggccaggaaggcacaaggtagctgtgggccaagacaccagccctgtcctagcccttcagtaagaccttgccaggagagga

SEQ ID NO: 271549 - DNA, 120 bp, Artificial Sequence
  ENSG00000127561_12 (sequence is synthesized)
gaaggatgcctgggtgccaggcaagacaagcccctcagcaggagagaggcccagaggctccagctggccaccgtgccccacaagatggcccctgtgtggttccctttaccttggcttcct

SEQ ID NO: 271550 - DNA, 120 bp, Artificial Sequence
  ENSG00000127561_13 (sequence is synthesized)
ggcccagtccctgcctctccacctgcaccctgcttcctggcccagtcccaggttggagtccctctgcatagctgactactcatgcattgctcaaagctggcttttcacattaagtcaaca

SEQ ID NO: 271551 - DNA, 120 bp, Artificial Sequence
  ENSG00000127561_14 (sequence is synthesized)
ccaaacgtggttgccacatttcatcagacagacacctccctctggagatgcagttgagtgacaaccttgttacattgtagcctagaccaattctgtgtggatatttaagtgaacatgttt

SEQ ID NO: 271552 - DNA, 120 bp, Artificial Sequence
  ENSG00000127561_15 (sequence is synthesized)
acaatttttgtatatatcactctctccctctcctgaaagaccagagattgtgtattttcagtgtcccatgttccgactgcaccttctttacaataaagactgtaactgagctgactgtga

SEQ ID NO: 271553 - DNA, 120 bp, Artificial Sequence
  ENSG00000127561_16 (sequence is synthesized)
agctttgcgcggcggccccagaccctgctccgggtcgcgtcctggcccttactccgtttttcctgttctcgtgacctggaagcagggacggggtggggacggaattctccgaggggcagg

SEQ ID NO: 271554 - DNA, 120 bp, Artificial Sequence
  ENSG00000127561_17 (sequence is synthesized)
ccgtgcagcgctggttaaaatgactgcggtccccctcatgcctgtctcccggaactggtgggcaggaggcattgaggtttgacggaacctcagaggtcaacggtgtcatcttttcagccc

SEQ ID NO: 271555 - DNA, 120 bp, Artificial Sequence
  ENSG00000127561_18 (sequence is synthesized)
aaacacttacaggtgatattaataatcagtcacgtgggggctgtcatccctcgggtacccaccacgtgcaggaagctgggtggacatgtctgtcccagcactgcatgagctgtgcccgtc

SEQ ID NO: 271556 - DNA, 120 bp, Artificial Sequence
  ENSG00000127561_19 (sequence is synthesized)
accctatttgcatgctagaaaacaggccagacagttcccaaccgcgcaggaagcaacagctccgctgcctccataccctccctcccgccccgctctgcctgctgcactctcacctcccct

SEQ ID NO: 271557 - DNA, 120 bp, Artificial Sequence
  ENSG00000127561_20 (sequence is synthesized)
tcgccgttccggctccagcctgggaatcgcgggcccaggtgaaggctcctgttcccacactcttgagtgggctctgaggggactccacgggcccacgcggtgcagagtacctggcttgaa

SEQ ID NO: 271558 - DNA, 120 bp, Artificial Sequence
  ENSG00000127561_21 (sequence is synthesized)
tcaaccccggcttttgtcagccatgtgatcccggacaagtcacttcacctgttggggtcccaatgtcccccgcatttataaagagaataagaacaatggcgatcccacggggactttctg

SEQ ID NO: 271559 - DNA, 120 bp, Artificial Sequence
  ENSG00000127561_22 (sequence is synthesized)
aggatttggtgaggggacgcatgtaaagtggctgtttaacacaatgtctgggcatagtagatgctcactaaacggcccgtgttgtcaataattactaaatacgcgagggttcgggaaaga

SEQ ID NO: 271560 - DNA, 120 bp, Artificial Sequence
  ENSG00000127561_23 (sequence is synthesized)
aagaggtgacaccgccccccacccagatacgggcctgggaacgcagggacaggcccaggggcgtgggcgctcgaggcgggctcgcagaggtcgggtcgccgcagggccctgagcgccgcg

SEQ ID NO: 271561 - DNA, 120 bp, Artificial Sequence
  ENSG00000127561_24 (sequence is synthesized)
gtcagcgcaggagagggaggcgggacctcgcgccacgcggcgagcccaggcgaggcgccccaagcctcgggcccaccgacctttcctcctccgggcgaggccgccgtgggccaccgcgtg

SEQ ID NO: 271562 - DNA, 120 bp, Artificial Sequence
  ENSG00000127561_25 (sequence is synthesized)
cctacccctttactccctcacccaagtgcccttcccagaggagcggactcctcctgtctgtcctcccggctctagcaaagtctgcgcccagcacccgagccccaccctgcccccggggac

SEQ ID NO: 271563 - DNA, 120 bp, Artificial Sequence
  ENSG00000127564_0 (sequence is synthesized)
gcgcgttcacgggccgttccccctcacgggagtcctccgcccgggcgtccggaacagtcgacggcagactccggcccgctgagccacccgaggggtcccgtggcctccgcggacccggaa

SEQ ID NO: 271564 - DNA, 120 bp, Artificial Sequence
  ENSG00000127564_1 (sequence is synthesized)
tctgggccctcgcggacccgcgccccgcccagtcgccccagggcttccccacacccacggagtgaagtcagccgcggccctgcctgggaggaacttaccgtctaccgggaaaggtggcca

SEQ ID NO: 271565 - DNA, 120 bp, Artificial Sequence
  ENSG00000127564_2 (sequence is synthesized)
gcagatgtgtcgggcctggtgagagggtgaggcgagacggcccgatcgcccagggccccggaagctgcggaggtcacccccgcctggccttagctcagggacaccctggattcacgtggg

SEQ ID NO: 271566 - DNA, 120 bp, Artificial Sequence
  ENSG00000127564_3 (sequence is synthesized)
agcccctgctcctgcctcccccgtcccaccactgaggctgttgggccaggccagtcatgctagaacggcctcctgcactggccatgcccatgcccacggagggcaccccgccacctctga

SEQ ID NO: 271567 - DNA, 120 bp, Artificial Sequence
  ENSG00000127564_4 (sequence is synthesized)
gtggcacccccatcccagtcccagcctacttccgccacgcagaacctggattctccctcaagaggcccagggggctcagccggagcctcccacctccgccccctgccaagggcagcattc

SEQ ID NO: 271568 - DNA, 120 bp, Artificial Sequence
  ENSG00000127564_5 (sequence is synthesized)
ccatcagccgcctcttccctcctcggaccccaggctggcaccagctgcagccccggcgggtgtcattccggggcgaggcctcagagactctgcagagccctgggtatgacccaagccggc

SEQ ID NO: 271569 - DNA, 120 bp, Artificial Sequence
  ENSG00000127564_6 (sequence is synthesized)
cagagtccttcttccagcagagcttccagaggctcagccgcctgggccatggctcctacggagaggtcttcaaggtgcgctccaaggaggacggccggctctatgcggtaaagcgttcca

SEQ ID NO: 271570 - DNA, 120 bp, Artificial Sequence
  ENSG00000127564_7 (sequence is synthesized)
tgtcaccattccggggccccaaggaccgggcccgcaagttggccgaggtgggcagccacgagaaggtggggcagcacccatgctgcgtgcggctggagcaggcctgggaggagggcggca

SEQ ID NO: 271571 - DNA, 120 bp, Artificial Sequence
  ENSG00000127564_8 (sequence is synthesized)
tgtgcgggcccagcctgcagcaacactgtgaggcctggggtgccagcctgcctgaggcccaggtctggggctacctgcgggacacgctgcttgccctggcccatctgcacagccagggcc

SEQ ID NO: 271572 - DNA, 120 bp, Artificial Sequence
  ENSG00000127564_9 (sequence is synthesized)
tggtgcaccttgatgtcaagcctgccaacatcttcctggggccccggggccgctgcaagctgggtgacttcggactgctggtggagctgggtacagcaggagctggtgaggtccaggagg

SEQ ID NO: 271573 - DNA, 120 bp, Artificial Sequence
  ENSG00000127564_10 (sequence is synthesized)
gagacccccgctacatggcccccgagctgctgcagggctcctatgggacagcagcggatgtgttcagtctgggcctcaccatcctggaagtggcatgcaacatggagctgccccacggtg

SEQ ID NO: 271574 - DNA, 120 bp, Artificial Sequence
  ENSG00000127564_11 (sequence is synthesized)
gggagggctggcagcagctgcgccagggctacctgccccctgagttcactgccggtctgtcttccgagctgcgttctgtccttgtcatgatgctggagccagaccccaagctgcgggcca

SEQ ID NO: 271575 - DNA, 120 bp, Artificial Sequence
  ENSG00000127564_12 (sequence is synthesized)
cggccgaggccctgctggcactgcctgtgttgaggcagccgcgggcctggggtgtgctgtggtgcatggcagcggaggccctgagccgagggtgggccctgtggcaggccctgcttgccc

SEQ ID NO: 271576 - DNA, 120 bp, Artificial Sequence
  ENSG00000127564_13 (sequence is synthesized)
tgctctgctggctctggcatgggctggctcaccctgccagctggctacagcccctgggcccgccagccaccccgcctggctcaccaccctgcagtttgctcctggacagcagcctctcca

SEQ ID NO: 271577 - DNA, 120 bp, Artificial Sequence
  ENSG00000127564_14 (sequence is synthesized)
gcaactgggatgacgacagcctagggccttcactctcccctgaggctgtcctggcccggactgtggggagcacctccaccccccggagcaggtgcacacccagggatgccctggacctaa

SEQ ID NO: 271578 - DNA, 120 bp, Artificial Sequence
  ENSG00000127564_15 (sequence is synthesized)
gtgacatcaactcagagcctcctcggggctccttcccctcctttgagcctcggaacctcctcagcctgtttgaggacaccctagacccaacctgagccccagactctgcctctgcacttt

SEQ ID NO: 271579 - DNA, 120 bp, Artificial Sequence
  ENSG00000127564_16 (sequence is synthesized)
taaccttttatcctgtgtctctcccgtcgcccttgaaagctggggcccctcgggaactcccatggtcttctctgcctggccgtgtctaataaaaagtatttgaaccttgggagcacccaa

SEQ ID NO: 271580 - DNA, 120 bp, Artificial Sequence
  ENSG00000127564_17 (sequence is synthesized)
cccttccccctgcttccgcccctccctgactgatgaagacagcagccctctcccacccacctccaagaggcagccctggactgggtctgtgtcccagggccaaccctgcccctttctgtc

SEQ ID NO: 271581 - DNA, 120 bp, Artificial Sequence
  ENSG00000127564_18 (sequence is synthesized)
gcgccccgcccagtcgccccaggtgagcccagaccccgccgtgaggggcctcggcgtggccacctcgccgctcccctccgcctcgccagggcttccccacacccacggagtgaagtcagc

SEQ ID NO: 271582 - DNA, 120 bp, Artificial Sequence
  ENSG00000127564_19 (sequence is synthesized)
agaggtcccctggggtcagtgcaggtcggccctggctcctccgtcgctgggtctccacagacccagcccgagggatggaggtgcgctccaaggaggacggccggctctatgcggtaaagc

SEQ ID NO: 271583 - DNA, 120 bp, Artificial Sequence
  ENSG00000127564_20 (sequence is synthesized)
actgccattctggaagtggacaccactaactgggttttggcacgacagttatgaaaaagaaagacacttgagggattccgggttttcactttggaattggagataagggatcgtgggccc

SEQ ID NO: 271584 - DNA, 120 bp, Artificial Sequence
  ENSG00000127564_21 (sequence is synthesized)
gtgtagtctcggaagaggttgtgtagtttaggatcaaagagctggccgtgatgagggcagggatgcaggcgcagcccgtctgactccaaactgccttgctcttaacccgactgcaagacc

SEQ ID NO: 271585 - DNA, 120 bp, Artificial Sequence
  ENSG00000127564_22 (sequence is synthesized)
ctcaagaacacgggccccatggttttcctcttatgtttctatcatctctaaaatacaacagcctggtgggcagggcctcctgcactggccatgcccatgcccacggagggcaccccgcca

SEQ ID NO: 271586 - DNA, 120 bp, Artificial Sequence
  ENSG00000127564_23 (sequence is synthesized)
gacagagggggccttggagtgcagccagatggaaggactttgaaggctgtccaagtgctgctttcagagtgcaccaagtttttattgtccctgactgtggctccctgcctgtttgtcagg

SEQ ID NO: 271587 - DNA, 120 bp, Artificial Sequence
  ENSG00000127564_24 (sequence is synthesized)
ggaaaccacacgctcagggcagacagctcttggggactctgccgttagccccttccttacaaacacatcacctcatccctcggggcacttgatagcagacaagaagttccagaaaggctt

SEQ ID NO: 271588 - DNA, 120 bp, Artificial Sequence
  ENSG00000127564_25 (sequence is synthesized)
acatttactaaaagtttatttcaaatctgcctccaagtccatgtgttctgaaaaggacagagggggtcagtccacagggaagaacgggtgaacagggctcctgctgagacatctcatgag

SEQ ID NO: 271589 - DNA, 120 bp, Artificial Sequence
  ENSG00000127564_26 (sequence is synthesized)
tggtgggcagcccagagcaggtcgggcacgacgccggcgtgcagctgcaggatggagcccacgctcagcaggtgcatgatctggtgggagttgccccagtagtcaaagcggccaggtccc

SEQ ID NO: 271590 - DNA, 120 bp, Artificial Sequence
  ENSG00000127564_27 (sequence is synthesized)
cagcgctcgggcagacgggctacatttaccagtcccccaagcagcgccagtgcgtccatgcgcaggtagcagggcagggagcctggagcccctgaacccagacccactccccgggcccca

SEQ ID NO: 271591 - DNA, 120 bp, Artificial Sequence
  ENSG00000127564_28 (sequence is synthesized)
ggcgggggcgtcaggacggcggcgctgggaggctcctcccgggccctcctcatcgcagtcaacaccatctcccggctgggtgctggcgggagggggttcccagggcgctgggattacaga

SEQ ID NO: 271592 - DNA, 120 bp, Artificial Sequence
  ENSG00000127564_29 (sequence is synthesized)
ggccggacaccatgctccctacccctggggctcagagggattaagcaggctcagaccctactctgctcccctctcctgacccggcccccacccgccgggaaaacggaagctggcagcgcg

SEQ ID NO: 271593 - DNA, 120 bp, Artificial Sequence
  ENSG00000127564_30 (sequence is synthesized)
gcccgggacaatggcagctttgtcaccgcggctactggcggtgccagggccggggcagccctggacttgggcgctggggccctcctcggcctcagtgcccccggcccaacgcaggtcctt

SEQ ID NO: 271594 - DNA, 120 bp, Artificial Sequence
  ENSG00000127564_31 (sequence is synthesized)
attccaggcagctccaccaaagtctgcgtgcaacgcccttcatttgcatggacacacgcaaccctcggcgtttgtatggtcattaacatgctcctcccaccacggaagaactttcgaggc

SEQ ID NO: 271595 - DNA, 120 bp, Artificial Sequence
  ENSG00000127564_32 (sequence is synthesized)
ccgtaccaaagtagatcctttattcaaaatctgtgggggttttttgactgtttttgctgacctgtgacctctcactgaggacggcagtccaggaccacccccagaggggttcaaagacct

SEQ ID NO: 271596 - DNA, 120 bp, Artificial Sequence
  ENSG00000127564_33 (sequence is synthesized)
ccgaaaccagagaccacccccacatacaggtccatggagagggcctggaccatctggacccccacggtcaggccaagtcccagataatagcaccagatgtttcctgtccgacttttggtc

SEQ ID NO: 271597 - DNA, 120 bp, Artificial Sequence
  ENSG00000127564_34 (sequence is synthesized)
tccccaaggcgaccagaggccgagctgcccctacacaggcgcaaggccgaggcagggcgcagcacagcatctcaggtgtccatctcgccggcggcgggcccagcggaccctcggggccca

SEQ ID NO: 271598 - DNA, 120 bp, Artificial Sequence
  ENSG00000127564_35 (sequence is synthesized)
tccccgagtgtgccagggttgggcctggaggctgtgcttgtgaccagtgacctccaggatcccaacaccctggctcctgacttggagaaaccctgggctgggactctgaggtagttagag

SEQ ID NO: 271599 - DNA, 120 bp, Artificial Sequence
  ENSG00000127564_36 (sequence is synthesized)
tctgggtcctgcgggctgcgctagagtgaccctggcacctcgcgtccctcagaactgtgcatccgggctttccgcgtgacacccaggtctccgtacctttgggcacccaccctcgggggc

SEQ ID NO: 271600 - DNA, 120 bp, Artificial Sequence
  ENSG00000127564_37 (sequence is synthesized)
agcccagaccccgccgtgaggggcctcggcgtggccacctcgccgctcccctccgcctcgccagcccgtccactgctctgttcgccagggcttccccacacccacggagtgaagtcagcc

SEQ ID NO: 271601 - DNA, 120 bp, Artificial Sequence
  ENSG00000127578_0 (sequence is synthesized)
agacagaggggccaggctgaagctggagaggaaccagcgtcacacagacggcctctgagaacttggagaccccgttacccacccagcaggggtgtcaggacaagcatctgctgcaggctt

SEQ ID NO: 271602 - DNA, 120 bp, Artificial Sequence
  ENSG00000127578_1 (sequence is synthesized)
cagcctcaggggcaaaagggagccccggggtcctggtgggggcaccgaccacaggcccggagggtggatgcctgcaggaagctgggctctgtggagcccgaggaggggctggtggccaca

SEQ ID NO: 271603 - DNA, 120 bp, Artificial Sequence
  ENSG00000127578_2 (sequence is synthesized)
ccccccggccccctggctcggcggccctcatgcccgccctacgtccactcctgccgctcctgctcctcctccggctgacctcgggggctggcttgctgccagggctggggagccacccgg

SEQ ID NO: 271604 - DNA, 120 bp, Artificial Sequence
  ENSG00000127578_3 (sequence is synthesized)
gcgtgtgccccaaccagctcagccccaacctgtgggtggacgcccagagcacctgtgagcgcgagtgtagcagggaccaggactgtgcggctgctgagaagtgctgcatcaacgtgtgtg

SEQ ID NO: 271605 - DNA, 120 bp, Artificial Sequence
  ENSG00000127578_4 (sequence is synthesized)
gactgcacagctgcgtggcagcacgcttccccggcagcccagctgcgccgacgacagcggcctcctgcgagggctttgtgtgcccacagcagggctcggactgcgacatctgggacgggc

SEQ ID NO: 271606 - DNA, 120 bp, Artificial Sequence
  ENSG00000127578_5 (sequence is synthesized)
agcccgtgtgccgctgccgcgaccgctgtgagaaggagcccagcttcacctgcgcctcggacggcctcacctactacaaccgctgctatatggacgccgaggcctgcctgcggggcctgc

SEQ ID NO: 271607 - DNA, 120 bp, Artificial Sequence
  ENSG00000127578_6 (sequence is synthesized)
acctccacatcgtgccctgcaagcacgtgctcagctggccgcccagcagcccggggccgccggagaccactgcccgccccacacctggggccgcgcccgtgcctcctgccctgtacagca

SEQ ID NO: 271608 - DNA, 120 bp, Artificial Sequence
  ENSG00000127578_7 (sequence is synthesized)
gcccctccccacaggcggtgcaggttgggggtacggccagcctccactgcgacgtcagcggccgcccgccgcctgctgtgacctgggagaagcagagtcaccagcgagagaacctgatca

SEQ ID NO: 271609 - DNA, 120 bp, Artificial Sequence
  ENSG00000127578_8 (sequence is synthesized)
ctctacaacgcgcggcccgaagacgccggcctgtacacctgcaccgcgcgcaacgctgctgggctgctgcgggctgacttcccactctctgtggtccagcgagagccggccagggacgca

SEQ ID NO: 271610 - DNA, 120 bp, Artificial Sequence
  ENSG00000127578_9 (sequence is synthesized)
gcccccagcatcccagccccggccgagtgcctgccggatgtgcaggcctgcacgggccccacttccccacaccttgtcctctggcactacgacccgcagcggggcggctgcatgaccttc

SEQ ID NO: 271611 - DNA, 120 bp, Artificial Sequence
  ENSG00000127578_10 (sequence is synthesized)
cttcccggcccgtggctgtgatggggcggcccgcggctttgagacctacgaggcatgccagcaggcctgtgcccgcggccccggcgacgcctgcgtgctgcctgccgtgcagggcccctg

SEQ ID NO: 271612 - DNA, 120 bp, Artificial Sequence
  ENSG00000127578_11 (sequence is synthesized)
ggctgggagccgcgctgggcctacagcccgctgctgcagcagtgccatcccttcgtgtacggtggctgcgagggcaacggcaacaacttccacagccgcgagagctgcgaggatgcctgc

SEQ ID NO: 271613 - DNA, 120 bp, Artificial Sequence
  ENSG00000127578_12 (sequence is synthesized)
cccgtgccgcgcacaccgccctgccgcgcctgccgcctccggagcaagctggcgctgagcctgtgccgcagcgacttcgccatcgtggggcggctcacggaggtgctggaggagcccgag

SEQ ID NO: 271614 - DNA, 120 bp, Artificial Sequence
  ENSG00000127578_13 (sequence is synthesized)
gccgccggcggcatcgcccgcgtggcgctcgaggacgtgctcaaggatgacaagatgggcctcaagttcttgggcaccaagtacctggaggtgacgctgagtggcatggactgggcctgc

SEQ ID NO: 271615 - DNA, 120 bp, Artificial Sequence
  ENSG00000127578_14 (sequence is synthesized)
ccctgccccaacatgacggcgggcgacgggccgctggtcatcatgggtgaggtgcgcgatggcgtggccgtgctggacgccggcagctacgtccgcgccgccagcgagaagcgcgtcaag

SEQ ID NO: 271616 - DNA, 120 bp, Artificial Sequence
  ENSG00000127578_15 (sequence is synthesized)
aagatcttggagctgctggagaagcaggcctgcgagctgctcaaccgcttccaggactagcccccgcaggggcctgcgccaccccgtcctggtgaataaacgcactccctgtgcctcaga

SEQ ID NO: 271617 - DNA, 120 bp, Artificial Sequence
  ENSG00000127578_16 (sequence is synthesized)
ttgtacagtaaatgtaattcagctgtggtccccacgttttgctgtgtctggtggggtgggtctggcagtggcggtgccccgtgccaggggccagtgctgcttcatacccggcaaactgac

SEQ ID NO: 271618 - DNA, 120 bp, Artificial Sequence
  ENSG00000127578_17 (sequence is synthesized)
ctctggcctttgttttgcctgctgttccctgcgctgaccgggctgacctgccgcggttggctgggttcgcctcaaagtgagggctggagctgggctggagcagctgggcctggtcacggc

SEQ ID NO: 271619 - DNA, 120 bp, Artificial Sequence
  ENSG00000127578_18 (sequence is synthesized)
cattctcctcttcccggtggatggaatcccagctgggctgtgctgagccctcgctcacagtccccggcagcagatggcctggggcggactgtccccaacagcagcaggactccagagggc

SEQ ID NO: 271620 - DNA, 120 bp, Artificial Sequence
  ENSG00000127578_19 (sequence is synthesized)
caggtcctccagtcagtcggcccgctcagcagagccgcctgcacgctggccaatctggtgtctgctatgcccggcccaggggggtgtggacgccccggaggtcacagctgagctggaacg

SEQ ID NO: 271621 - DNA, 120 bp, Artificial Sequence
  ENSG00000127578_20 (sequence is synthesized)
gggcactccagttggtacagggaccagaccacagcctctggctcaggtgcctccctgtgctgtttcgtgggcatgtccgggccttaagcccctccctggcagctccagcccagccgcctg

SEQ ID NO: 271622 - DNA, 120 bp, Artificial Sequence
  ENSG00000127578_21 (sequence is synthesized)
ctgctgggtctggcctagctacccccacccccacgctatcagggcccacccccagtctccttgtagagcagggactggcgcctggagccgtctccgggtctcattctgaccagaccaggc

SEQ ID NO: 271623 - DNA, 120 bp, Artificial Sequence
  ENSG00000127578_22 (sequence is synthesized)
tcctgttaccctgcctcctgggtcagaggtcagacacagggtcagggggacactcccatccggtctcaagagaaccactccctgaggccccagacatctggagccacagagggtttggaa

SEQ ID NO: 271624 - DNA, 120 bp, Artificial Sequence
  ENSG00000127578_23 (sequence is synthesized)
gggtagattccaggcagccttttgtcctgctgcaccaggcaggccagccccctgccctccccaacgaagaggagccagcctggggatgtgtgccccgccgacggggggctggggcagggc

SEQ ID NO: 271625 - DNA, 120 bp, Artificial Sequence
  ENSG00000127578_24 (sequence is synthesized)
aaggctctggtgccctgggacacttgctcttttcagctgcagacgcccttgcacttggccttccctcgggcggtgccatcccacgcggagccacgtccagggctacacggtgcgtgggcc

SEQ ID NO: 271626 - DNA, 120 bp, Artificial Sequence
  ENSG00000127578_25 (sequence is synthesized)
gaggctccggcatcagcgtttcgggctgttcttatgcttgtggtggccacaggcctcttcctgctgcacctgccccgccttggggacaggcctgagccccaagcccgctgcctggtttca

SEQ ID NO: 271627 - DNA, 120 bp, Artificial Sequence
  ENSG00000127578_26 (sequence is synthesized)
gggatggggtctctgggaatgcagtcctgccgggttgggccccactccaacaggggcagcagagcagaggaggccgggctgtgctgggcgtcctgcagacccctgtgcccctgaaacagc

SEQ ID NO: 271628 - DNA, 120 bp, Artificial Sequence
  ENSG00000127578_27 (sequence is synthesized)
catggaggggggaaggaacctcggagcggagtgaagccctcggccgcacgtgaccgttgccagcctggacctggcccgggggacccaggctgtggtcagccacgctctgcggggagggcc

SEQ ID NO: 271629 - DNA, 120 bp, Artificial Sequence
  ENSG00000127578_28 (sequence is synthesized)
cgtgcctgccacccccatggcataggagcctggggtccagagggcgccagggacaaaagctgggatctgctggccctgcccccaccctactgagggtcgtcaaggagattgatctcagcc

SEQ ID NO: 271630 - DNA, 120 bp, Artificial Sequence
  ENSG00000127578_29 (sequence is synthesized)
caggggtggacgaaggggttcaggttacagggtcccctcccctccccctctccagccagagccagcccttccccgccccggtgaccctcatggccagtggctctgtgctcatgggcctct

SEQ ID NO: 271631 - DNA, 120 bp, Artificial Sequence
  ENSG00000127578_30 (sequence is synthesized)
gtgagcgcgagtgtagcagggaccaggtgagtgtggtcgggccggggtcctggggctcagagcagccagcctgggcaagaccctgctggaggtgccaccttctgcctgggctccccagac

SEQ ID NO: 271632 - DNA, 120 bp, Artificial Sequence
  ENSG00000127578_31 (sequence is synthesized)
ttctggggggtctgggtctgggccccttaaggggcccagagacacccccatcgttgccctcatttgtcttaagaataagagccctccccactccagctttcatgctccccatgtgcctcc

SEQ ID NO: 271633 - DNA, 120 bp, Artificial Sequence
  ENSG00000127578_32 (sequence is synthesized)
cctcccatccacttctcccaccccttcactgcctctccttccatcctctcctcccaccctctcctcccatccactcctcccatccacttcttccatcctcttctcccaccccgtcactgc

SEQ ID NO: 271634 - DNA, 120 bp, Artificial Sequence
  ENSG00000127578_33 (sequence is synthesized)
ctctccttccatcctctcctatccactcctcccatccacttcttccatcctcttctcccaccccatcactgcctctccttccatcctctcctatccactcctcccatccactttttccat

SEQ ID NO: 271635 - DNA, 120 bp, Artificial Sequence
  ENSG00000127578_34 (sequence is synthesized)
cctcttctctcaccccgtcattgcctctccttccatcctctcctcccatccacttctcccaccccttcactgcctctcctcccaccctctcctcccatccactcctcccatccactcctc

SEQ ID NO: 271636 - DNA, 120 bp, Artificial Sequence
  ENSG00000127578_35 (sequence is synthesized)
ccatccacttcttccatcctcttctcccaccccgtcactgcctctccttccatcctctcctcccaccctctccttccatcctctcctcccaccctctccttccatccactgtcctccctg

SEQ ID NO: 271637 - DNA, 120 bp, Artificial Sequence
  ENSG00000127578_36 (sequence is synthesized)
tcctcccaccctccttccatccgggaccagtgcagatggtggtgggggtgctgcagccgatgtccagcctttgtcctggcccgcaccacctgctgggtggtcctgagcactgtacgccct

SEQ ID NO: 271638 - DNA, 120 bp, Artificial Sequence
  ENSG00000127578_37 (sequence is synthesized)
ccttgggcctcagtttcctcgtctgtacaacgtaaagaataacggaacttgcttgtgggtgtgaggattctggaaggtaagccaggtggcacctctggcgaggtggctcctcacacagga

SEQ ID NO: 271639 - DNA, 120 bp, Artificial Sequence
  ENSG00000127578_38 (sequence is synthesized)
tggaaaggacactgagtccccggggaggcagccacagagcggggggctccctgctaccccacctgggcctccccttgcaggggccaggccagagccccggggcggggggcattggggctc

SEQ ID NO: 271640 - DNA, 120 bp, Artificial Sequence
  ENSG00000127580_0 (sequence is synthesized)
ggcttccggcgcggcggttccggacaaccgtgcgcttttagtaaaagattggggttcgcgcgggggagaagggctgccccgggccctctggttctcgtcccgcagcgtccgctcccccgc

SEQ ID NO: 271641 - DNA, 120 bp, Artificial Sequence
  ENSG00000127580_1 (sequence is synthesized)
gccactgcgccgctcccaggaaccctgtactccggggtcgccggcttctctcctgcctccggtcccgccagacacctcgagctccttaagtagctcggtccttgacgtccctctgggccc

SEQ ID NO: 271642 - DNA, 120 bp, Artificial Sequence
  ENSG00000127580_2 (sequence is synthesized)
ttcccgcgtctatcgcctgagtccccgggcccctctagccctctgttccctcccctcttttgttcctccctagagccccgccgccctcagggctgacagtgtggacggcgggagtctcct

SEQ ID NO: 271643 - DNA, 120 bp, Artificial Sequence
  ENSG00000127580_3 (sequence is synthesized)
cgctcccctgctgggattgactgaccgagcgtttagtgactgcccagatctggctgatgggggtaccgagaggtggcctgggccgggaatgtccagctagagtcttccgtggaagtcaga

SEQ ID NO: 271644 - DNA, 120 bp, Artificial Sequence
  ENSG00000127580_4 (sequence is synthesized)
catgaaactgacaggcctaagggaagctaggaagtcccctcaccgctcagccagggtgatgggctggactgacagactccagtgaatttgagcttgcctgtcaggctgattggctgatag

SEQ ID NO: 271645 - DNA, 120 bp, Artificial Sequence
  ENSG00000127580_5 (sequence is synthesized)
acagccctggattggctcactaagactgaccagcccgggaccaagcagttctggggtcccaacctgggtggaaggtctgaactgatgacccacccaggctgaccaggccagcccacctca

SEQ ID NO: 271646 - DNA, 120 bp, Artificial Sequence
  ENSG00000127580_6 (sequence is synthesized)
ctgacctcctgacccctgacctcatcacctgtgcagccatggagaagatgtcccgtgtgaccacagccctgggtggcagcgtgctgacaggccgcaccatgcactgccacctggatgctc

SEQ ID NO: 271647 - DNA, 120 bp, Artificial Sequence
  ENSG00000127580_7 (sequence is synthesized)
ccgccaatgccatcagtgtgtgccgcgacgcagcccaggtggtcgtggcaggccgtagcatcttcaagatctatgccatcgaggaggaacagttcgtggaaaagctgaacctgcgtgtgg

SEQ ID NO: 271648 - DNA, 120 bp, Artificial Sequence
  ENSG00000127580_8 (sequence is synthesized)
ggcgcaagccttcgcttaacctgagctgtgctgacgtggtctggcaccagatggatgagaacctgctggccacagcagccaccaatggcgtggtggtcacgtggaacctgggccggccat

SEQ ID NO: 271649 - DNA, 120 bp, Artificial Sequence
  ENSG00000127580_9 (sequence is synthesized)
cccgcaacaagcaggaccagctgttcacagaacacaagcgcacggtaaacaaagtctgcttccaccccaccgaagcccacgtgctgctcagtggctcccaggatggcttcatgaagtgct

SEQ ID NO: 271650 - DNA, 120 bp, Artificial Sequence
  ENSG00000127580_10 (sequence is synthesized)
ttgacctccgcagaaaggactctgtcagcaccttctcgggccagtcggagagcgtgcgggacgtgcagttcagtatccgggactacttcaccttcgcctccacctttgagaacggcaatg

SEQ ID NO: 271651 - DNA, 120 bp, Artificial Sequence
  ENSG00000127580_11 (sequence is synthesized)
tgcagctctgggacatccggcgtcccgaccggtgcgagaggatgttcacagcccacaacggacccgtcttctgctgcgactggcaccccgaggacaggggctggttggccactggagggc

SEQ ID NO: 271652 - DNA, 120 bp, Artificial Sequence
  ENSG00000127580_12 (sequence is synthesized)
gcgacaagatggtgaaggtctgggacatgaccacgcaccgtgccaaggagatgcactgtgtgcagaccatcgcctcggtggcccgtgtgaagtggcggccagagtgccgccaccacctgg

SEQ ID NO: 271653 - DNA, 120 bp, Artificial Sequence
  ENSG00000127580_13 (sequence is synthesized)
cgtgctccatgatggtggaccacaacatctatgtttgggacgtgcgccggcccttcgtgccagctgccatgtttgaggaacaccgagacgtcaccacgggaattgcctggcgccaccccc

SEQ ID NO: 271654 - DNA, 120 bp, Artificial Sequence
  ENSG00000127580_14 (sequence is synthesized)
acgacccctccttcctgctgtctggctccaaggacagctcgctgtgccagcacctgttccgcgacgccagccagcccgtcgagcgcgccaaccctgagggcctctgctacggcctcttcg

SEQ ID NO: 271655 - DNA, 120 bp, Artificial Sequence
  ENSG00000127580_15 (sequence is synthesized)
gggacctggccttcgccgccaaggagagcctcgtggctgccgagtcggggcgcaagccctacactggcgaccggcgccaccccatcttctttaagcgcaagctggaccctgccgagccct

SEQ ID NO: 271656 - DNA, 120 bp, Artificial Sequence
  ENSG00000127580_16 (sequence is synthesized)
tcgcaggcctcgcctccagtgccctcagtgtctttgagacggagccaggtggcggcggcatgcgctggtttgtggacacagctgagcgttatgcgctggctggccggccactggccgagc

SEQ ID NO: 271657 - DNA, 120 bp, Artificial Sequence
  ENSG00000127580_17 (sequence is synthesized)
tctgtgaccacaacgcaaaggtggctcgagagcttggccgcaaccaggtggcgcaaacgtggaccatgctgcggatcatctactgcagccctggcctagtgcccactgcaaacctcaacc

SEQ ID NO: 271658 - DNA, 120 bp, Artificial Sequence
  ENSG00000127580_18 (sequence is synthesized)
acagtgtgggcaagggtggctcctgtggcctcccgctcatgaacagtttcaacctgaaggatatggccccagggttgggcagtgagacgcggctggaccgcagcaaaggagatgcacgga

SEQ ID NO: 271659 - DNA, 120 bp, Artificial Sequence
  ENSG00000127580_19 (sequence is synthesized)
gcgacacagttctgctcgactcctcggccacactcatcaccaatgaggataacgaggaaaccgagggcagcgacgtacctgccgactacctgctgggtgacgtggaaggtgaggaggacg

SEQ ID NO: 271660 - DNA, 120 bp, Artificial Sequence
  ENSG00000127580_20 (sequence is synthesized)
agctgtacctgctggatccggaacacgcgcaccccgaggaccctgagtgcgtgctgccgcaggaggcctttccgctgcgccacgagatcgtggacacgcctcccgggcccgagcacctgc

SEQ ID NO: 271661 - DNA, 120 bp, Artificial Sequence
  ENSG00000127580_21 (sequence is synthesized)
aggacaaggccgactccccgcacgtgagcggcagcgaggcggatgtggcctccctggcccccgtggactcctccttctcgctcctgtctgtctcacacgcgctctacgacagccgcctgc

SEQ ID NO: 271662 - DNA, 120 bp, Artificial Sequence
  ENSG00000127580_22 (sequence is synthesized)
cgcccgacttcttcggcgtgctggtgcgcgacatgctgcacttctacgctgagcagggcgacgtgcagatggctgtgtctgtgctcatcgtcctgggtgaacgggtgcgcaaggacatcg

SEQ ID NO: 271663 - DNA, 120 bp, Artificial Sequence
  ENSG00000127580_23 (sequence is synthesized)
acgagcagacccaggagcactggtacacttcctacatcgacctgctgcagcgcttccgcctctggaacgtgtccaacgaggtggtcaagctgagcaccagccgcgccgtcagctgcctca

SEQ ID NO: 271664 - DNA, 120 bp, Artificial Sequence
  ENSG00000127580_24 (sequence is synthesized)
accaggcctccaccaccctgcacgtcaactgcagccactgcaagcggcccatgagcagccggggctgggtctgcgacaggtgccaccgctgcgccagcatgtgtgccgtctgccaccacg

SEQ ID NO: 271665 - DNA, 120 bp, Artificial Sequence
  ENSG00000127580_25 (sequence is synthesized)
tagtcaagggtctcttcgtgtggtgccagggctgcagccacggcggccacctgcagcacatcatgaagtggctggaaggcagctcccactgtcccgcaggctgcggccacctctgcgagt

SEQ ID NO: 271666 - DNA, 120 bp, Artificial Sequence
  ENSG00000127580_26 (sequence is synthesized)
actcctgacggggcatctgctgggcttgcccgggcggccgcgtgcagaaccccgcctggtcttgtgcccgagacgggcggaggctggaacttgagacctcaataaaggaagtagagccgc

SEQ ID NO: 271667 - DNA, 120 bp, Artificial Sequence
  ENSG00000127580_27 (sequence is synthesized)
atgggtaagaagaggaccacttccggcgagggacgggaaagacagcggcttccggcgcggcggttccggacaaccagccccgccgccctcagggctgacagtgtggacggcgggagtctc

SEQ ID NO: 271668 - DNA, 120 bp, Artificial Sequence
  ENSG00000127580_28 (sequence is synthesized)
attctcccagtgctcagctgccgcatcctgaggctgcaccacagctttgctcatggaccgatgcaggatgcagaatctacggcaaatgacgcccgggaatcttggggatgtccactctac

SEQ ID NO: 271669 - DNA, 120 bp, Artificial Sequence
  ENSG00000127580_29 (sequence is synthesized)
cttctcggtgctcagctgccgcatcctgaggctgcaccacagctttgctcatggaccgatgcaggatgcagaatctacggcaaatgacgcccgggagtatgtgttacaaatcacgtggtg

SEQ ID NO: 271670 - DNA, 120 bp, Artificial Sequence
  ENSG00000127580_30 (sequence is synthesized)
tcctgctcccgggcccaggctcttgtggcgactctgtgtggctgcttccttgggcagatcttggggatgtccactctaccctctgggcctctgttctgggccacaggcaggccagtcgga

SEQ ID NO: 271671 - DNA, 120 bp, Artificial Sequence
  ENSG00000127585_0 (sequence is synthesized)
aggggaggaggaggcgcccgcctggttccctgcaaagcggccttatttatctgggcacagcctcagcctccccggtgggaggcttggggcggccgatcctctcccaccggggagctcctt

SEQ ID NO: 271672 - DNA, 120 bp, Artificial Sequence
  ENSG00000127585_1 (sequence is synthesized)
tccgtgcgctccccatgacgggaggtcgcccggcggacagcgtggcatgagccaggagcccgggccgagagcgtgccaggaagatgtcgagcccgggcatcgacggcgaccccaagcctc

SEQ ID NO: 271673 - DNA, 120 bp, Artificial Sequence
  ENSG00000127585_2 (sequence is synthesized)
catgcttgcctcgaaacggtctggtgaagctgccgggccagcccaacggcctgggtgcggccagcatcaccaagggcacgccagccaccaagaaccgcccctgccagccaccacccccac

SEQ ID NO: 271674 - DNA, 120 bp, Artificial Sequence
  ENSG00000127585_3 (sequence is synthesized)
ccaccctcccaccacccagcctggctgctccactgtcccgggctgccctggctgggggcccgtgcaccccggcaggtggaccagcctcagccttggcacctgggcacccagcggagcggc

SEQ ID NO: 271675 - DNA, 120 bp, Artificial Sequence
  ENSG00000127585_4 (sequence is synthesized)
cgccgctggccacggacgagaagatcctcaatgggctcttctggtatttctcggcctgcgagaagtgtgtgctggcccaggtgtgcaaggcctggcggcgcgtgctgtaccagcccaagt

SEQ ID NO: 271676 - DNA, 120 bp, Artificial Sequence
  ENSG00000127585_5 (sequence is synthesized)
tctgggcaggcctcacgccggtgctgcatgccaaggagctctacaacgtgctgcctggtggcgagaaggagttcgtgaacctgcagggttttgccgccagaggcttcgagggcttctgcc

SEQ ID NO: 271677 - DNA, 120 bp, Artificial Sequence
  ENSG00000127585_6 (sequence is synthesized)
tggttggcgtctccgacctggacatctgtgagttcattgacaactatgcgctctccaagaagggtgtcaaagccatgagcctcaagcgctccaccatcacggacgcaggcctcgaggtta

SEQ ID NO: 271678 - DNA, 120 bp, Artificial Sequence
  ENSG00000127585_7 (sequence is synthesized)
tgcttgaacagatgcagggcgtggtgcgtctggagctgtcgggctgcaacgacttcaccgaggccgggctgtggtccagcctgagcgcgcgcatcacctcgctgagcgtgagtgactgca

SEQ ID NO: 271679 - DNA, 120 bp, Artificial Sequence
  ENSG00000127585_8 (sequence is synthesized)
tcaacgtggccgacgacgccatcgcggccatctcgcagctgctgcccaacctggcggagctgagcctgcaggcctaccacgtgacggacacggcgctggcctacttcacggcgcgccagg

SEQ ID NO: 271680 - DNA, 120 bp, Artificial Sequence
  ENSG00000127585_9 (sequence is synthesized)
gccacagcacgcacacgctgcgcctgctctcctgctgggagatcaccaaccacggcgtggtcaacgtggtgcacagcctgcccaacctcaccgcgctcagcctctcgggctgctccaagg

SEQ ID NO: 271681 - DNA, 120 bp, Artificial Sequence
  ENSG00000127585_10 (sequence is synthesized)
tcaccgacgacggcgtggagctcgtggccgagaacctgcgcaagctgcgcagccttgacctctcgtggtgcccacgcatcaccgacatggcgctggagtacgtggcctgcgacctgcacc

SEQ ID NO: 271682 - DNA, 120 bp, Artificial Sequence
  ENSG00000127585_11 (sequence is synthesized)
gcctagaggagctcgtgctcgacaggtgtgtacgcatcacggacactggcctcagctatctgtccaccatgtcgtccctccgcagcctctacctgcgatggtgctgccaggtgcaagact

SEQ ID NO: 271683 - DNA, 120 bp, Artificial Sequence
  ENSG00000127585_12 (sequence is synthesized)
tcgggctgaagcacctcctggccctggggagtttgcgcctcctgtctctggcaggctgcccgctgctcaccaccaccgggctgtcgggcctggtgcagctgcaggagctggaggagctgg

SEQ ID NO: 271684 - DNA, 120 bp, Artificial Sequence
  ENSG00000127585_13 (sequence is synthesized)
agctgaccaactgccccggggccacccccgagctcttcaagtatttctcgcagcacctgccccgctgcctcgtcattgagtagcgcgaggcccccgccccggtcgcgggaacccggccat

SEQ ID NO: 271685 - DNA, 80 bp, Artificial Sequence
  ENSG00000127585_14 (sequence is synthesized)
cgagccgagggaaagcccctccccgaccttcggtccctccgccctcccagccccgccccgggcaggggggcggcgggtgg

SEQ ID NO: 271686 - DNA, 120 bp, Artificial Sequence
  ENSG00000127585_15 (sequence is synthesized)
gtgggcccgccccacgcacgcacgcacactcggggactttgtgcatgcccctcgtgcccgcactgcacgccgccctccgccacgccacagccacagccgccgccatcactcgctcgccct

SEQ ID NO: 271687 - DNA, 120 bp, Artificial Sequence
  ENSG00000127585_16 (sequence is synthesized)
cccgcttggggggcggggctcggtccttgggggggctttgagctctccagactgtgcccttaccgccttccccgccacacccgctctgtcttcccactgtcccccccatcccgggcaggg

SEQ ID NO: 271688 - DNA, 120 bp, Artificial Sequence
  ENSG00000127585_17 (sequence is synthesized)
cccagtgggattgagggggctgggtcccccaggacacgggcccagaagagccccacgggcttcctgcatcttccaccgcaccatacctggagccctccgaggggtgtcaggggaaacagg

SEQ ID NO: 271689 - DNA, 120 bp, Artificial Sequence
  ENSG00000127585_18 (sequence is synthesized)
ccaccgccaaagccatggcccgccgccgagagcccaggccccacccgcacctcctcacccatccagcctgacccacgcggcctctcctcctccttgccgctgtgtggggcagtcccctgt

SEQ ID NO: 271690 - DNA, 120 bp, Artificial Sequence
  ENSG00000127585_19 (sequence is synthesized)
ccgccccaaaacccggccttggtccctggccaggctgagagaattgggcagggagagggcggaagggctggcgatcgcttggagtcattaacgtgatcccagctgactccggtcggcctc

SEQ ID NO: 271691 - DNA, 120 bp, Artificial Sequence
  ENSG00000127585_20 (sequence is synthesized)
aacccaggggtggcgcaggcaccttgcaagcctcgagctgtagccaccctcaggcctgggaagaggcctgggccgacctcacacctcagcccttgcacccggccgggctcagttcaggcc

SEQ ID NO: 271692 - DNA, 120 bp, Artificial Sequence
  ENSG00000127585_21 (sequence is synthesized)
tgggcaccgagcttcaccctgggtgggtctcctcaggtggagtctgcagagtggacccagccaagggtcagggtcagcactgggtcagcgactccaatcttccagtggccagcacaccct

SEQ ID NO: 271693 - DNA, 120 bp, Artificial Sequence
  ENSG00000127585_22 (sequence is synthesized)
agacaccccgaggagggagggctcctttctagcctgcccccccacccccacttcacccctccccagcttcccaaacttctgtctgcccaaatgggctctgaccgtgctctgtcggcccga

SEQ ID NO: 271694 - DNA, 120 bp, Artificial Sequence
  ENSG00000127585_23 (sequence is synthesized)
gacatttggaagtcctgggggatgctggcaaatctcagctgttgctgaggagggggctgggaccccttcccatcccaaccttgagccccaggagataccgcgcccacacccaatcttggg

SEQ ID NO: 271695 - DNA, 120 bp, Artificial Sequence
  ENSG00000127585_24 (sequence is synthesized)
acactccctatctggttggaagagagtaaccagtttccagagagccagagagtgagagagagaaagagagtgagagagagagagaaagagagagagagatgctgttgaatcagaaacaga

SEQ ID NO: 271696 - DNA, 120 bp, Artificial Sequence
  ENSG00000127585_25 (sequence is synthesized)
tcaacagcccaaagattttcctgtccctggagtgccagccccaggaagctccagggctgagtggtcaggagccagtttctccagcccctcctccccacaacccctagtggggaggggcag

SEQ ID NO: 271697 - DNA, 120 bp, Artificial Sequence
  ENSG00000127585_26 (sequence is synthesized)
ctgtccatttgcccaaagtattaatgcaactgaagctgtgatatttccaacgactgtaggaggaaaaattaaggggagagaggaaaacaaaaccaaccaacccctaaaatcattttctta

SEQ ID NO: 271698 - DNA, 120 bp, Artificial Sequence
  ENSG00000127585_27 (sequence is synthesized)
ttgtacataacgacctcattctcctgtatatgcggaagatataaccttatatttggtaagtgtttcttgtgctattttatcacgtgacctgtttataaaaatatatattaaaaaagttgt

SEQ ID NO: 271699 - DNA, 80 bp, Artificial Sequence
  ENSG00000127585_28 (sequence is synthesized)
gggggcgggggcttccggcggggctggggctgtggcgcggcgggcagagccctcggagcctggggagtgggaaccgcaga

SEQ ID NO: 271700 - DNA, 120 bp, Artificial Sequence
  ENSG00000127585_29 (sequence is synthesized)
cgggcagagccctcggagcctggggagtgggaaccgcagaaccgcagcacgggttggctggacccccgtccttcccggtgggtgggagcgaggaggggccagcggctgctccgggtgggg

SEQ ID NO: 271701 - DNA, 120 bp, Artificial Sequence
  ENSG00000127586_0 (sequence is synthesized)
gggcagtgcgcgacggcggcggcggcgcgggaggttcggagcgggagctcgggctcgcggacggtatggaggactacgagcaggagctgtgcggcgtcgaggatgatttccacaaccagt

SEQ ID NO: 271702 - DNA, 120 bp, Artificial Sequence
  ENSG00000127586_1 (sequence is synthesized)
tcgcggccgagctggaggtgctggcagagctggaaggggcgtcgactccgtcgccctccggggtccccctgttcaccgcgggccgacccccgcggacgttcgaggaggcccttgccagag

SEQ ID NO: 271703 - DNA, 120 bp, Artificial Sequence
  ENSG00000127586_2 (sequence is synthesized)
cgcggcctccagtcccgccccagccgcatctgtgggcagcagccagggcggcgccaggaagaggcaggtggacgccgacctgcagccggccgggtccctgccccacgcccccaggatcaa

SEQ ID NO: 271704 - DNA, 120 bp, Artificial Sequence
  ENSG00000127586_3 (sequence is synthesized)
tcaaacggcctaggctgcaggtggtcaagaggctgaacttcagatcggaggagatggaggagccgccccctcccgactcctcgccgacggacatcaccccgccgccgagccctgaggacc

SEQ ID NO: 271705 - DNA, 120 bp, Artificial Sequence
  ENSG00000127586_4 (sequence is synthesized)
tcgcagagctttggggccacggagtctcagaagctgctgccgacgtgggtctcacacgggcctcaccagctgcccgcaatcccgtcctgaggcggccccccatcttggaggactacgtcc

SEQ ID NO: 271706 - DNA, 120 bp, Artificial Sequence
  ENSG00000127586_5 (sequence is synthesized)
acgtgacatccacggagggcgtccgggcttatctggtgctgcgtgctgaccccatggccccgggggtgcagggctctctcctccacgtcccatggcgaggcggtggccagctggacctgc

SEQ ID NO: 271707 - DNA, 120 bp, Artificial Sequence
  ENSG00000127586_6 (sequence is synthesized)
tgggtgtgtccttagcctccctgaagaagcaggtcgacggcgagcggcgggagcggctgcttcaggaggcccagaagctttcagacaccctgcacagtctcaggtcgggggaggaggagg

SEQ ID NO: 271708 - DNA, 120 bp, Artificial Sequence
  ENSG00000127586_7 (sequence is synthesized)
cagcccagcccttgggggcccctgaggaggagccgactgacggtcaagacgcctccagtcactgcctctgggtggatgagtttgcaccccgccactacacggagctgctcagtgatgact

SEQ ID NO: 271709 - DNA, 120 bp, Artificial Sequence
  ENSG00000127586_8 (sequence is synthesized)
tcaccaaccgctgcctgctcaagtggctgaagttgtgggacctggtggtgtttggccacgagaggccttcccggaagcccaggcccagtgttgagccggcccgggtcagcaaggaggcca

SEQ ID NO: 271710 - DNA, 120 bp, Artificial Sequence
  ENSG00000127586_9 (sequence is synthesized)
cagccccaggcaagtggaagagccacgaacaggtgctggaggagatgctggaggctgggctggacccgagccagcgaccgaagcagaaggtggcactgctctgtgggcccccggggctgg

SEQ ID NO: 271711 - DNA, 120 bp, Artificial Sequence
  ENSG00000127586_10 (sequence is synthesized)
ggaagaccaccctggcacacgtgattgcgcgtcacgcggggtactctgtggtggagatgaacgccagtgacgaccgtagcccggaggtcttccgcacacgcatcgaggcggccacccaga

SEQ ID NO: 271712 - DNA, 120 bp, Artificial Sequence
  ENSG00000127586_11 (sequence is synthesized)
tggagtcggtgctgggtgctggcgggaagcccaactgcctggtcatcgatgagatcgacggggcccccgtggccgccatcaacgtcctcctgagcatcctgaaccgcaaggggccacagg

SEQ ID NO: 271713 - DNA, 120 bp, Artificial Sequence
  ENSG00000127586_12 (sequence is synthesized)
tgcaatgaccagttcgcaccgtccctgcggcagctgaagcagcaggccttcctgctccacttcccgccgactctgccctcgaggctggtgcagcggctccaggaggtctccctgcggcag

SEQ ID NO: 271714 - DNA, 120 bp, Artificial Sequence
  ENSG00000127586_13 (sequence is synthesized)
ggcatgagggccgacccaggggtgctggccgccctctgtgagaaaactgacaatgacatccgggcctgcatcaacaccctgcagttcctgtacagccggggccagcgggagctgagcgtg

SEQ ID NO: 271715 - DNA, 120 bp, Artificial Sequence
  ENSG00000127586_14 (sequence is synthesized)
cgggacgtgcaggccacacgcgtgggcctcaaggaccagcgcagagggctcttctcggtgtggcaggaggtcttccagctgcctcgagcccagaggcgccgtgtgggccaggaccccgcc

SEQ ID NO: 271716 - DNA, 120 bp, Artificial Sequence
  ENSG00000127586_15 (sequence is synthesized)
ctgcctgctgacacactcctgctgggtgacggggacgcgggctccctcacctccgcctcacagcgattctaccgtgtcctgcatgccgctgcctctgcgggcgagcacgagaaggtggtc

SEQ ID NO: 271717 - DNA, 120 bp, Artificial Sequence
  ENSG00000127586_16 (sequence is synthesized)
cagggcttgtttgacaacttcctgcgtctgcggctgcgagactccagcctgggtgctgtgtgtgtggccctcgactggctggccttcgatgacctgctggcgggggctgctcatcacagc

SEQ ID NO: 271718 - DNA, 120 bp, Artificial Sequence
  ENSG00000127586_17 (sequence is synthesized)
cagagcttccagctgctgcgctacccacccttcctgcccgtggccttccatgtgctgtttgcttccagccacacacccaggatcaccttccccagcagccagcaggaggcccagaaccgg

SEQ ID NO: 271719 - DNA, 120 bp, Artificial Sequence
  ENSG00000127586_18 (sequence is synthesized)
atgagccagatgaggaacctgatccagacgctggtgtccggcatcgcgccagccacgcgcagccgggccacgccccaggccctgctcctcgatgccctctgcctgctcctggacattctt

SEQ ID NO: 271720 - DNA, 120 bp, Artificial Sequence
  ENSG00000127586_19 (sequence is synthesized)
gcacccaagctccgccccgtgagcacacagctgtacagcacccgtgaaaagcaacagctggccagcctggtgggcacgatgctcgcttacagcctgacctaccgccaggagcgcacgccc

SEQ ID NO: 271721 - DNA, 120 bp, Artificial Sequence
  ENSG00000127586_20 (sequence is synthesized)
gatggccagtacatctacaggctggagccgaacgtggaggaactctgccgcttccctgagctgcctgcccgcaagcccctcacctaccagacgaagcagctcatcgcccgcgagatcgag

SEQ ID NO: 271722 - DNA, 120 bp, Artificial Sequence
  ENSG00000127586_21 (sequence is synthesized)
gtggagaagatgcggcgggcggaggcttctgcccgggtagagaacagcccccaggtggatgggagccccccagggctcgagggtctgctggggggcattggggagaaaggggtgcaccga

SEQ ID NO: 271723 - DNA, 120 bp, Artificial Sequence
  ENSG00000127586_22 (sequence is synthesized)
cctgccccacgcaaccatgagcagcggctggagcacatcatgaggcgagcggcccgggaggaacagcctgagaaggacttctttggacgtgtggtcgtcaggagcacagcagtcccgagt

SEQ ID NO: 271724 - DNA, 120 bp, Artificial Sequence
  ENSG00000127586_23 (sequence is synthesized)
gcaggggacacggccccggagcaggactcagtggagcggcgcatgggcacagcggtgggcaggagcgaggtctggttccgcttcaacgagggtgtctccaacgccgtgcggcgcagcctg

SEQ ID NO: 271725 - DNA, 120 bp, Artificial Sequence
  ENSG00000127586_24 (sequence is synthesized)
tacatcagggacttgctctagttctctgagccgcggacatgccctcgcattgcttcccgcagagtgcagagacaggaagctggagatgtctttataaagtcacacctttacagactgtaa

SEQ ID NO: 271726 - DNA, 120 bp, Artificial Sequence
  ENSG00000127586_25 (sequence is synthesized)
atgcacgtgaatgcctctgcccgacggtgggggcggggaggggctgcagcactaccaggcccggcagccagtccgcgcagacccgcgccccgcacaggcccggtgggcaggccgaccctg

SEQ ID NO: 271727 - DNA, 120 bp, Artificial Sequence
  ENSG00000127586_26 (sequence is synthesized)
ccacgcccacgccaagaccaacctgctgccgggccgtgcagtccaggcccccgatgccgtgcccggcgccggctccagccgcgcgcccgcgcgctggcgacccagagaccctggaagctc

SEQ ID NO: 271728 - DNA, 80 bp, Artificial Sequence
  ENSG00000127586_27 (sequence is synthesized)
cccagagaccctggaagctccgctccggacgcctggcagcgcttccgccctgcaccgctgcgcgcgcagccccgcccccc

SEQ ID NO: 271729 - DNA, 120 bp, Artificial Sequence
  ENSG00000127586_28 (sequence is synthesized)
ggaagggcggctgcggcggccaatggcgagctccccaggacaggacgcgggggctgcggagcaggaactcgccccgcccacccctcgcgcagccccgcctccgccacgccaaccaatggc

SEQ ID NO: 271730 - DNA, 120 bp, Artificial Sequence
  ENSG00000127586_29 (sequence is synthesized)
ctgcctcgagcccagaggagcagccagcatgtctctgtcctgacgtgccatgggaccccaggggatgctggcctggtcgtgctgcaggatatgggagacgctggcctgggcctgtgggat

SEQ ID NO: 271731 - DNA, 120 bp, Artificial Sequence
  ENSG00000127586_30 (sequence is synthesized)
tgtggctggcttcctctgttcccaagatggaagaacctgggcccagtgatttttgcacagccaatccactgggcctcggagacggagtgggctctggtttgcccttttgagttgtaggtg

SEQ ID NO: 271732 - DNA, 120 bp, Artificial Sequence
  ENSG00000127586_31 (sequence is synthesized)
gtgaactgagcacagggctgtgtgctactggtcccctgtgacctgtgaggcaggctaggggtccagggtgtcacctgatccaagtctctgttccctttcctaccttcacagcagctgaca

SEQ ID NO: 271733 - DNA, 120 bp, Artificial Sequence
  ENSG00000127586_32 (sequence is synthesized)
ctggagtgcccctggggagggcaggggcctcccagatgggttgtggccagagccgtgggggtggagcccctggtgtgagccttgcggtcactcgctggcaggaagacgggggtggccatt

SEQ ID NO: 271734 - DNA, 120 bp, Artificial Sequence
  ENSG00000127586_33 (sequence is synthesized)
gctttgcactcggcgccggcacccttgcagcctgttgactttctccaggagccgtgggtgtggtgacgtgtgggtcttggcgtgaagcgccattagcgtgagttagaactggagcgttgc

SEQ ID NO: 271735 - DNA, 120 bp, Artificial Sequence
  ENSG00000127586_34 (sequence is synthesized)
agtaacaactcgggggaagtcgttgtccctgaagggctctgcggctggccaggatgatctgggtggacggtgggtggtttctgggggccagtcacactggtatcagctgtgttttgtctg

SEQ ID NO: 271736 - DNA, 120 bp, Artificial Sequence
  ENSG00000127586_35 (sequence is synthesized)
cacgaactttgctttgtgtaggtttttttttccgttgccatcttggtgtgtgaaagtgctcaattttgttcttatttgatggctggagtggggtggagggagcgcccagcctgtgggaca

SEQ ID NO: 271737 - DNA, 120 bp, Artificial Sequence
  ENSG00000127586_36 (sequence is synthesized)
catgtggcagtccctggctgctaggccgggagcgtcctgtaggtgcggtgcacactacgccttcatctacctgggctgcaggtggcactgctctgtgggcccccggggctggggaagacc

SEQ ID NO: 271738 - DNA, 120 bp, Artificial Sequence
  ENSG00000127586_37 (sequence is synthesized)
accctggcacacgtgattgcgcgtcacgcggggtactctgtggtggagatgaacgccaggtgagtgatgtgaggtccgtctctggctcgccttctgtcctgacgtgtttgagttctggtg

SEQ ID NO: 271739 - DNA, 120 bp, Artificial Sequence
  ENSG00000127586_38 (sequence is synthesized)
gaaaccgggtgtggatgttcccgtcttgagggtggtgggggcctgggtgtgtgggccgggaaaacgtgtccttcctcggggttcacgggatcggcagcagccgcgtcatgtgacggtctc

SEQ ID NO: 271740 - DNA, 120 bp, Artificial Sequence
  ENSG00000127586_39 (sequence is synthesized)
cacgcaaatgcggcagccccggccttgggaggctgccctgccagggacgcccactgccctgacgacccctgacctccccattgcagtgacgaccgtagcccggaggtcttccgcacacgc

SEQ ID NO: 271741 - DNA, 120 bp, Artificial Sequence
  ENSG00000127586_40 (sequence is synthesized)
tggccttgtggcttttggggtttgcggttggagtgcccggcggctctctggccctgagcctggccccgctgacctgccctggtgtccccctgtgctgagcaggaacgtggaggaactctg

SEQ ID NO: 271742 - DNA, 120 bp, Artificial Sequence
  ENSG00000127586_41 (sequence is synthesized)
gccgggcgtgggctcataggatggtgtgagtggggccaggagtggggctcacaggatggtgggagtgggggacaatgacaacggccaggcgaccgcgagtgagagcgagggccaagtgat

SEQ ID NO: 271743 - DNA, 120 bp, Artificial Sequence
  ENSG00000127586_42 (sequence is synthesized)
agcttactggggttgtcccacccgggtccctgagcactgatgggggctgacgtgaatcctgtgacctaggaggggcccagaggcaattgtcctcccttccccacagggctctctcctcca

SEQ ID NO: 271744 - DNA, 120 bp, Artificial Sequence
  ENSG00000127586_43 (sequence is synthesized)
gccgccgagccctgaggacctcgcagagctttggggccacgggtgtgtggcttggacatgggcgtcccatcccatctgtccagtgggactcagatggagcccatcccgtgccctggatga

SEQ ID NO: 271745 - DNA, 120 bp, Artificial Sequence
  ENSG00000127586_44 (sequence is synthesized)
ggcctggggggtggggagggttccatggctgagagcagtctcggacacccatatccaagggtgaccccacgcttgagtttctgccactgagccccggtctctctccagagtctcagaagc

SEQ ID NO: 271746 - DNA, 120 bp, Artificial Sequence
  ENSG00000127586_45 (sequence is synthesized)
cgtggagcagcggcggggatagactcccccacggaacaggggtggggacgccacggcctggactctggtgggcggaacttcctcaggcagtctaaggaggggctgagtgaggctggatcc

SEQ ID NO: 271747 - DNA, 120 bp, Artificial Sequence
  ENSG00000127588_0 (sequence is synthesized)
acttggccctcgctctcactcgcggtcgcctggccgttgtcattgtccctccgctgtcaccttttcaagccccaggctggctgcttcagaagcccctgaccccatggaggagtgggacgt

SEQ ID NO: 271748 - DNA, 120 bp, Artificial Sequence
  ENSG00000127588_1 (sequence is synthesized)
gccacagatgaagaaagaggtggagagcctcaagtaccagctggccttccagcgggagatggcgtccaagaccatccccgagctgctgaagtggatcgaggacgggatccccaaggaccc

SEQ ID NO: 271749 - DNA, 120 bp, Artificial Sequence
  ENSG00000127588_2 (sequence is synthesized)
cttcctgaaccccgacctgatgaagaacaacccatgggtggaaaagggcaaatgcaccatcctgtgagccccgcacccggcccctctcacaccatcctgtgagaccacgcccggccccac

SEQ ID NO: 271750 - DNA, 120 bp, Artificial Sequence
  ENSG00000127588_3 (sequence is synthesized)
tcccaccatcttgtaagactgtgcccagccccactcactccatcctgtgagtcccactcccagccccactcccaccatcctgtgagcccatgcccggccccactcacaccaacctgtgag

SEQ ID NO: 271751 - DNA, 120 bp, Artificial Sequence
  ENSG00000127588_4 (sequence is synthesized)
atcttgtaagactatgcccagccccattcactccatcctgtgagtcccactcccagccccactcccaccatcctgtgagccccacttccagccccactcccaccatcctgtgagccccac

SEQ ID NO: 271752 - DNA, 120 bp, Artificial Sequence
  ENSG00000127588_5 (sequence is synthesized)
tcccagccccactcccaccatcctgtgagccccactcccggccccactcactccatcctgtgagccccactcccagccccactcacaccaacctgtgagccccactcccggccccactca

SEQ ID NO: 271753 - DNA, 120 bp, Artificial Sequence
  ENSG00000127588_6 (sequence is synthesized)
caacatcttgtaagactgtgcccggccccattcactccatcctgtgagaccacgcccggccccactcactctatcctgtgagaccacgcctggccccactcccaccatcctgtgagcccc

SEQ ID NO: 271754 - DNA, 120 bp, Artificial Sequence
  ENSG00000127588_7 (sequence is synthesized)
actcctggccccactcacaccatcctatgagcccacgcccggccccactcccaccatcctgtgaaccccactccactcgcacgtgattacagtctgtaaaggtgtgactttataaagaca

SEQ ID NO: 271755 - DNA, 120 bp, Artificial Sequence
  ENSG00000127603_0 (sequence is synthesized)
gaaactgaggtacagataggcaggactagaacctctgcttcccaagtcccagtgttccttatgggaccccttttgtctgctcacattcacccctttctccttcagatcacttctccctgg

SEQ ID NO: 271756 - DNA, 120 bp, Artificial Sequence
  ENSG00000127603_1 (sequence is synthesized)
gctcccaggccctcctgcagcagcccccgcctgggccatgtcttcctcagatgaagagacgctcagtgagcggtcatgtcggagtgagcggtcttgtcggagtgagcgatcttacaggag

SEQ ID NO: 271757 - DNA, 120 bp, Artificial Sequence
  ENSG00000127603_2 (sequence is synthesized)
cgagcggtcggggagcctgtctccctgtcccccaggggacaccttgccctggaacctgccactgcatgagcagaaaaagcggaaaagccaggattcggtgctggaccctgcagagcgtgc

SEQ ID NO: 271758 - DNA, 120 bp, Artificial Sequence
  ENSG00000127603_3 (sequence is synthesized)
tgtggtcagagtcgctgatgaacgggaccgggttcagaagaaaacgttcaccaagtgggtcaacaagcacttaatgaaggtccgcaagcacatcaatgatctttatgaagatctgcggga

SEQ ID NO: 271759 - DNA, 120 bp, Artificial Sequence
  ENSG00000127603_4 (sequence is synthesized)
tggccataacctgatctctctgttggaggtcctctcaggcatcaaactggagccagcagggctgaagaccctccgtctggtgagcatgccctcctggtgccatacaaacaacgaggagca

SEQ ID NO: 271760 - DNA, 120 bp, Artificial Sequence
  ENSG00000127603_5 (sequence is synthesized)
ggcggaggaagatgatgatgatgtaccccgggagaagggcaggatgcgttttcataggctgcagaatgtgcagattgccctggacttcctaaagcagcgacaggtgaaactagtgaatat

SEQ ID NO: 271761 - DNA, 120 bp, Artificial Sequence
  ENSG00000127603_6 (sequence is synthesized)
tcgcaatgatgacatcacagatggcaaccccaagttgaccctgggtctgatctggaccattattttgcatttccagatctctgacatctacattagtggagaatcaggggatatgtcagc

SEQ ID NO: 271762 - DNA, 120 bp, Artificial Sequence
  ENSG00000127603_7 (sequence is synthesized)
caaggagaaactactcctgtggacccagaaggtgacagctggttacacaggaatcaaatgcaccaacttttcctcctgctggagtgatgggaagatgttcaatgcactcattcaccgata

SEQ ID NO: 271763 - DNA, 120 bp, Artificial Sequence
  ENSG00000127603_8 (sequence is synthesized)
ccgacccgatctagtagacatggagagggtgcaaatccaaagtaaccgagagaatctggaacaggcttttgaagtggcagaaagactgggggtcactcgcctgctggatgcagaagatgt

SEQ ID NO: 271764 - DNA, 120 bp, Artificial Sequence
  ENSG00000127603_9 (sequence is synthesized)
ggatgtgccatctccagatgaaaagtctgtaatcacttatgtgtcttcgatttatgatgccttccctaaagttcctgagggtggagaagggatcagtgctacggaagtggactccaggtg

SEQ ID NO: 271765 - DNA, 120 bp, Artificial Sequence
  ENSG00000127603_10 (sequence is synthesized)
gcaagaataccaaagccgagtggactccctcattccctggatcaaacagcatacaatactgatgtcagataaaacttttccccaaaaccctgttgaactaaaggcactttataaccaata

SEQ ID NO: 271766 - DNA, 120 bp, Artificial Sequence
  ENSG00000127603_11 (sequence is synthesized)
tatacacttcaaagaaacagaaattctggccaaggagagagaaaaaggaagaattgaggaattatataaattactagaggtgtggattgaatttggccgaattaaactgcctcaaggtta

SEQ ID NO: 271767 - DNA, 120 bp, Artificial Sequence
  ENSG00000127603_12 (sequence is synthesized)
tcaccctaatgatgtggaagaagagtggggaaagctcatcatagagatgctggaacgagagaaatcacttcggccggctgtggagaggctggaattgctgctacagattgcaaacaaaat

SEQ ID NO: 271768 - DNA, 120 bp, Artificial Sequence
  ENSG00000127603_13 (sequence is synthesized)
ccagaatggtgctttgaactgtgaagaaaaactgacactagctaagaatacactgcaggctgatgctgctcacctggaatcaggacaaccggtacaatgtgagtcagatgtcattatgta

SEQ ID NO: 271769 - DNA, 120 bp, Artificial Sequence
  ENSG00000127603_14 (sequence is synthesized)
cattcaggagtgtgaaggtctcatcaggcagctgcaggtggatctccagatcctgcgggatgagaattactaccagctagaagagctggcttttagggtcatgcgtcttcaggatgagct

SEQ ID NO: 271770 - DNA, 120 bp, Artificial Sequence
  ENSG00000127603_15 (sequence is synthesized)
ggtcaccttgcgtctagagtgtacaaacctgtaccggaagggtcatttcacttcacttgaattggttccaccctctactttaaccaccactcatctgaaagcagaacccttaaccaaggc

SEQ ID NO: 271771 - DNA, 120 bp, Artificial Sequence
  ENSG00000127603_16 (sequence is synthesized)
aacccattcttcttctacctcctggttccgaaagcctatgactcgggctgaacttgtggccatcagctcctctgaagatgaaggcaatctccgatttgtgtatgaactactgtcttgggt

SEQ ID NO: 271772 - DNA, 120 bp, Artificial Sequence
  ENSG00000127603_17 (sequence is synthesized)
agaagagatgcagatgaaactggagcgagcagagtggggcaatgacctgcctagtgtggagttgcagctagaaacacagcagcacatccatacgagtgtagaagagctgggctcaagtgt

SEQ ID NO: 271773 - DNA, 120 bp, Artificial Sequence
  ENSG00000127603_18 (sequence is synthesized)
caaggaggccaggttgtatgagggaaagatgtcccagaatttccataccagctatgctgaaactcttggaaagctggagacacagtattgtaaattgaaggaaacttctagcttccggat

SEQ ID NO: 271774 - DNA, 120 bp, Artificial Sequence
  ENSG00000127603_19 (sequence is synthesized)
gaggcaccttcagagcctgcataaatttgtttccagagctacagctgagttgatctggttgaatgagaaggaggaggaggaactagcatatgactggagtgacaacaattccaatatctc

SEQ ID NO: 271775 - DNA, 120 bp, Artificial Sequence
  ENSG00000127603_20 (sequence is synthesized)
agccaagagaaattacttctctgagttgacaatggaactggaggagaaacaggatgtgtttcgttctctacaagatacagcagaactactttcacttgagaaccacccagccaagcagac

SEQ ID NO: 271776 - DNA, 120 bp, Artificial Sequence
  ENSG00000127603_21 (sequence is synthesized)
agtggaggcttacagtgctgctgtccagtcccagttgcagtggatgaagcagctgtgcctgtgtgttgagcagcatgtgaaagagaatactgcttattttcagttcttcagtgatgcacg

SEQ ID NO: 271777 - DNA, 120 bp, Artificial Sequence
  ENSG00000127603_22 (sequence is synthesized)
agagctggagtcattcttgaggaacctccaagattccattaaacgaaaatattcctgtgaccacaacaccagcttatcccgccttgaagacctgctccaggactccatggatgaaaagga

SEQ ID NO: 271778 - DNA, 120 bp, Artificial Sequence
  ENSG00000127603_23 (sequence is synthesized)
gcagcttatacagtccaagagttccgttgccagtctcgttgggagatcaaaaaccatcgttcagctaaaaccacgcagtccagaccatgtgttaaagaacaccatttctgtcaaggctgt

SEQ ID NO: 271779 - DNA, 120 bp, Artificial Sequence
  ENSG00000127603_24 (sequence is synthesized)
ctgtgactacaggcagatcgagattactatttgcaaaaatgatgaatgtgtgctagaagataattctcagcggaccaaatggaaagtgatcagccccacagggaacgaggcaatggtgcc

SEQ ID NO: 271780 - DNA, 120 bp, Artificial Sequence
  ENSG00000127603_25 (sequence is synthesized)
gtcagtctgcttcctcatccccccacccaataaggatgccattgagatggccagcagggtcgaacaatcttatcagaaggttatggccctttggcatcagctgcatgttaacaccaaaag

SEQ ID NO: 271781 - DNA, 120 bp, Artificial Sequence
  ENSG00000127603_26 (sequence is synthesized)
ccttatctcttggaactatctgcgtaaagaccttgaccttgtacagacctggaacctagaaaagcttcgatcctcagcaccaggggagtgccatcagattatgaagaaccttcaggccca

SEQ ID NO: 271782 - DNA, 120 bp, Artificial Sequence
  ENSG00000127603_27 (sequence is synthesized)
ctatgaagactttctgcaggatagtcgtgactctgtgctgttctcagtggctgatcgcttgcgcttggaagaggaggtggaagcttgtaaagcccgcttccagcacctgatgaagtccat

SEQ ID NO: 271783 - DNA, 120 bp, Artificial Sequence
  ENSG00000127603_28 (sequence is synthesized)
ggagaatgaggacaaagaggagactgtggccaagatgtacatttcagagttgaagaacatccggctacgcctggaggagtatgaacagagggtggtcaaacgaattcagtctctagccag

SEQ ID NO: 271784 - DNA, 120 bp, Artificial Sequence
  ENSG00000127603_29 (sequence is synthesized)
ctctaggactgacagagatgcctggcaggacaatgcattaaggattgcagagcaagagcacacccaggaggatttacagcaattgaggtcagacttggatgcagtttctatgaaatgtga

SEQ ID NO: 271785 - DNA, 120 bp, Artificial Sequence
  ENSG00000127603_30 (sequence is synthesized)
cagctttctccatcagtctccatctagttcaagtgtcccaactctgcgctcagaactgaatctgctggtggagaagatggaccatgtctatggtctctctactgtatatctgaataagtt

SEQ ID NO: 271786 - DNA, 120 bp, Artificial Sequence
  ENSG00000127603_31 (sequence is synthesized)
aaagacagttgatgttatagtacgtagcatacaggatgctgaactcttggtcaaaggttatgagattaagctgagtcaagaagaagtagtactggcagatctctcagctctggaggccca

SEQ ID NO: 271787 - DNA, 120 bp, Artificial Sequence
  ENSG00000127603_32 (sequence is synthesized)
ttggtcgacattacggcactggcttagtgatgtgaaggacaagaattcagtgttttcagtcctggatgaggaaattgccaaggccaaggtagtggcagagcagatgagtcgtctgacacc

SEQ ID NO: 271788 - DNA, 120 bp, Artificial Sequence
  ENSG00000127603_33 (sequence is synthesized)
agagcgaaatctggatttggagcgctatcaggaaaaaggctcccagctgcaggagcgttggcaccgagtcattgcccagctcgagattcgccaatctgagctagaaagtatccaggaagt

SEQ ID NO: 271789 - DNA, 120 bp, Artificial Sequence
  ENSG00000127603_34 (sequence is synthesized)
tctgggagattaccgagcctgccatggaactctcatcaagtggattgaggaaaccactgcccagcaggaaatgatgaagccaggccaggcagaggatagcagagtgctttcggagcagct

SEQ ID NO: 271790 - DNA, 120 bp, Artificial Sequence
  ENSG00000127603_35 (sequence is synthesized)
cagccagcagacggccctatttgcagaaattgagagaaatcagacaaaactggatcaatgtcaaaaattttcccagcagtactctactattgtaaaggactatgaattgcaactgatgac

SEQ ID NO: 271791 - DNA, 120 bp, Artificial Sequence
  ENSG00000127603_36 (sequence is synthesized)
atacaaggcctttgtggaatcgcagcagaaatcccctggcaagcgccgtcgcatgctttcctcttcagatgccatcactcaagagttcatggacttaaggactcgctacacggcattggt

SEQ ID NO: 271792 - DNA, 120 bp, Artificial Sequence
  ENSG00000127603_37 (sequence is synthesized)
gactttaacaactcagcacgtgaaatacatcagtgatgcactccggcgtctggaggaggaggagaaagtggtagaagaggagaaacaagaacatgtggagaaggttaaagaacttttggg

SEQ ID NO: 271793 - DNA, 120 bp, Artificial Sequence
  ENSG00000127603_38 (sequence is synthesized)
ctgggtgtctaccctagcgaggaatacacaaggaaaagctacctcatccgagaccaaagaatcaacagacattgaaaaagctattttggaacagcaggttctgtcagaagagctgacaac

SEQ ID NO: 271794 - DNA, 120 bp, Artificial Sequence
  ENSG00000127603_39 (sequence is synthesized)
aaagaaagaacaagtctctgaagctattaaaacatcacagatcttcttggccaagcatggtcataagctctcagaaaaagagaagaaacaaatatctgagcaattgaatgccctaaacaa

SEQ ID NO: 271795 - DNA, 120 bp, Artificial Sequence
  ENSG00000127603_40 (sequence is synthesized)
ggcttaccatgacctttgtgatggttctgcaaatcagcttcagcagcttcagagccagttggctcaccagacagaacaaaaggaatgcagagcagttgctggggtgattgacctaggcac

SEQ ID NO: 271796 - DNA, 120 bp, Artificial Sequence
  ENSG00000127603_41 (sequence is synthesized)
agtggagatatttcccatcttcaaagccatgcaaaagggcctccttgaccaagacacaggcctagtgcttctggaatctcaggttatcatgtctggcctcattgcccctgagacgggtga

SEQ ID NO: 271797 - DNA, 120 bp, Artificial Sequence
  ENSG00000127603_42 (sequence is synthesized)
aaacctctctttggaggagggcatagccagaaacctcattaatccccagatgtaccagcagctccgggagctacaggatgccctggccttaataagcaggcttactgagagcagaggccc

SEQ ID NO: 271798 - DNA, 120 bp, Artificial Sequence
  ENSG00000127603_43 (sequence is synthesized)
tctttctgtggtggaagcaattgaaaagagaataatcagtgagacagttggactgaaaatcttagaagctcacctggcaactggaggtttcagtctttcccctagtgagaactgtattaa

SEQ ID NO: 271799 - DNA, 120 bp, Artificial Sequence
  ENSG00000127603_44 (sequence is synthesized)
cctggaagaggcttttcatcaaggcctcatttctgcatggcttcattcagtattagagtcttatcttagaacatccaagaatttgatagaccctaacacagctgagaaaattggtttgct

SEQ ID NO: 271800 - DNA, 120 bp, Artificial Sequence
  ENSG00000127603_45 (sequence is synthesized)
ggatctgatgcagcgatgtattgtccaccaggaatcaggattcaaattactgcctgtcaaacaattggcaggggggatggtgagcttgaaatcaggccggaaggttagcattttccgtgc

SEQ ID NO: 271801 - DNA, 120 bp, Artificial Sequence
  ENSG00000127603_46 (sequence is synthesized)
agttcaggaagggctaatagataggcaggtcactgtccggttgctggaagctcagctttttgctggtggcatagtagatccaagaacaggacacagacttacagtggaagaggctgtaag

SEQ ID NO: 271802 - DNA, 120 bp, Artificial Sequence
  ENSG00000127603_47 (sequence is synthesized)
acataatctgattgaccaagatatggcctgtgctatcctcataaggcagcttcagacaggaggcatcatagacactgtcacggggcaaaggctaacaatagatgaagcagtgagcaatga

SEQ ID NO: 271803 - DNA, 120 bp, Artificial Sequence
  ENSG00000127603_48 (sequence is synthesized)
tctagtagctgctaagatcgcccttgtgattctggagtccctctggtcattcatggggttgctgtggcctgaatctggagagatcctcccaattacagatgccctagaacaaggtattgt

SEQ ID NO: 271804 - DNA, 120 bp, Artificial Sequence
  ENSG00000127603_49 (sequence is synthesized)
gtctactgaactagcacataaaatccttagtaaccgacagcatattaaggctctgtttctaccagcaaccacagagattttgtcctggaagaaagcaatagaaagtggtatcctggatag

SEQ ID NO: 271805 - DNA, 120 bp, Artificial Sequence
  ENSG00000127603_50 (sequence is synthesized)
agatcttgccaataacttaaaatcgatttgtatacctgatgtgatgccccacatgcaactagcagactctgcagaacaaaatattaatcctggagcagcagttctaccgtgcagcaagag

SEQ ID NO: 271806 - DNA, 120 bp, Artificial Sequence
  ENSG00000127603_51 (sequence is synthesized)
ccaccctaaggccacagcaagccagagtgagaatctgttgttccagctgatgactcacagctatattaatgtgcaaaatggacagaggctgcttctgttagataaagagctgatggagac

SEQ ID NO: 271807 - DNA, 120 bp, Artificial Sequence
  ENSG00000127603_52 (sequence is synthesized)
actaacatccagagatgagtatcaaacaagtcctccaaaagtggttgaaattgggcatcaaaggcaaaaaactcctgagggattgcaagaatcagctaatgtgaaaatctcaggaacttt

SEQ ID NO: 271808 - DNA, 120 bp, Artificial Sequence
  ENSG00000127603_53 (sequence is synthesized)
cagcagtgggtggactgtgaggctgcctgagttccagttttcttctcagaacaaagaatatcccgatcgggaagattgcactacagaaaaaggcaaaaagaccactgtagaaacagaaga

SEQ ID NO: 271809 - DNA, 120 bp, Artificial Sequence
  ENSG00000127603_54 (sequence is synthesized)
ttcttctgtagagaaccctgaacaggatctgtttgtagaacaaaaagagagaaatccaaacattgatgctttgaaggtaataaataaagtcaaattagaggtacaaaggcagttgatagg

SEQ ID NO: 271810 - DNA, 120 bp, Artificial Sequence
  ENSG00000127603_55 (sequence is synthesized)
tacccaaagggaagaccaaacagcagtgtctgtcagagaaaatgccagcaggggacacctcctgaccatacctcctgctgaggcggaaggtgtgccgttggtggttgacaaagatgtttt

SEQ ID NO: 271811 - DNA, 120 bp, Artificial Sequence
  ENSG00000127603_56 (sequence is synthesized)
ttctgttgaaacaccaaagaaagaacatcaacctctaagaaacacttcctttacatgtcagaatgaacaagcacacactcttgagactgaatatattcatgatgaaactggaggatctca

SEQ ID NO: 271812 - DNA, 120 bp, Artificial Sequence
  ENSG00000127603_57 (sequence is synthesized)
cataaaaccccaaagcaaaaagttacaagttcaggtaaagaaaactctaggtataaagttagaactaaagtctgaaactgatgggaatgttcatcctctggacaaaaaggaaatgttaaa

SEQ ID NO: 271813 - DNA, 120 bp, Artificial Sequence
  ENSG00000127603_58 (sequence is synthesized)
gaaaacatttctggctaaggatgaccataaagaaagtcaagaagcacagaacatcgcaggtggtagtatgatgatgtcagaaaagaccgatgaggaagatagtggcagggaaatttttct

SEQ ID NO: 271814 - DNA, 120 bp, Artificial Sequence
  ENSG00000127603_59 (sequence is synthesized)
gtcatgcagtcatccattagaattgcttgaagaagctaccttaaatgtattatctgcacagttactagatggtggtatctttcatgaacaaacaggtcaaaagctcttactaaatgaagc

SEQ ID NO: 271815 - DNA, 120 bp, Artificial Sequence
  ENSG00000127603_60 (sequence is synthesized)
aatatcccgaggcattgtgccaagtcacactgccgtgaagcttatggagaagctgaacatgtttcaggggttctttgactctcagacttgtgagtctttgacaactgaagaagtcattaa

SEQ ID NO: 271816 - DNA, 120 bp, Artificial Sequence
  ENSG00000127603_61 (sequence is synthesized)
tgaaggtctgatggatgagaaattattacataatgtcctcatggcagacaaagctataagtggtgtcttagacccccgtacccagacactgtgctctgtaaaggatgcagttacagttgg

SEQ ID NO: 271817 - DNA, 120 bp, Artificial Sequence
  ENSG00000127603_62 (sequence is synthesized)
acttcttgacaaggaaacagccaccagaattttagagaggcaggtggtgactggtggaattattgatctgaaacgaggcaaaaaagtttcagtaactttggcctcaactcttggcttggt

SEQ ID NO: 271818 - DNA, 120 bp, Artificial Sequence
  ENSG00000127603_63 (sequence is synthesized)
ggacgttgctgaccagccagaacttataaatctggagaaagcttccaaaggtagagatgctgaaaaaacagttagggagagattaattagtttacaaatggaaacaacaggacttataga

SEQ ID NO: 271819 - DNA, 120 bp, Artificial Sequence
  ENSG00000127603_64 (sequence is synthesized)
ccctgatagtaaagcacctttaacagttgtgcagtccattgacagaggtcttttggagagagaggaggccgttcgtttgttgactaagcaagtggtagatggaggtatcattcaccatat

SEQ ID NO: 271820 - DNA, 120 bp, Artificial Sequence
  ENSG00000127603_65 (sequence is synthesized)
atctgggatgagactttctgttgataatgccttcagacatggcttaattggtgaagatttagccgagaaactcaaaagagttgagaacttaaacatccatcagatttttaatcctgaaac

SEQ ID NO: 271821 - DNA, 120 bp, Artificial Sequence
  ENSG00000127603_66 (sequence is synthesized)
gaaggaaaatatttccctccctaaagccataaaattagatcttattacctcagacctgaaaagagaaatccaggaggttcaggcctttactggaaactttgtggatctcatttctggtca

SEQ ID NO: 271822 - DNA, 120 bp, Artificial Sequence
  ENSG00000127603_67 (sequence is synthesized)
gagattgaccttggcagaagctaaaaaagaaggactgttaactaatgaagcagtattgtctccaggaatgatgcatggcattgtagatcccgagaactgcagaattgtcccctactcaga

SEQ ID NO: 271823 - DNA, 120 bp, Artificial Sequence
  ENSG00000127603_68 (sequence is synthesized)
attagtcaagaaatgtaagattgatattgaatctggacagagatatctagaagtaattcccttctcagacattaaagatggggtgagcgacaaagtgcttacattgtctcaagcaattca

SEQ ID NO: 271824 - DNA, 120 bp, Artificial Sequence
  ENSG00000127603_69 (sequence is synthesized)
gcttggaaaagtagactttgcatctacgctgaaggttctagaagcccaggcaaatactggtggaatcatagatactgctactggaaaaagactgacattggcatcagctttggaagagaa

SEQ ID NO: 271825 - DNA, 120 bp, Artificial Sequence
  ENSG00000127603_70 (sequence is synthesized)
actggtggatgaaaacatggtcagaattattgcatctcatcaggtgttaaatggaggaattgttgacatatttagtgatcagagagtgactttagtagaagctattgagaaaagactgat

SEQ ID NO: 271826 - DNA, 120 bp, Artificial Sequence
  ENSG00000127603_71 (sequence is synthesized)
cagccctgaactggcaaatatgatccaaatagatagttcagagttcagcgatcacagggctcagattgaaaagcaagaagggattgaagtgtgtgcattacaaaatgaatttctaggaaa

SEQ ID NO: 271827 - DNA, 120 bp, Artificial Sequence
  ENSG00000127603_72 (sequence is synthesized)
ggatatgttaattgcttgtaatcagactgctgaaatgagttgtaataaagtagaagagagtgagagattatttcaagttgaaaatcagtctgcacaagaaaaggttaaagtgagagtttc

SEQ ID NO: 271828 - DNA, 120 bp, Artificial Sequence
  ENSG00000127603_73 (sequence is synthesized)
tgatggggagcaggcaaaaaagagcagggaaatttccttaaaggaatttgggtgcaaggatcaacgtaagccaagaatgtcttcagatgctaaagaatttatcagtatcataaatcctca

SEQ ID NO: 271829 - DNA, 120 bp, Artificial Sequence
  ENSG00000127603_74 (sequence is synthesized)
taatcttaaaggtaaatccttgggccaagtgtcattgacacacccttactctgaatgtgattttaaacttaaagaagtggctagaaataacatgggaaatgatacaaatgaagagcagga

SEQ ID NO: 271830 - DNA, 120 bp, Artificial Sequence
  ENSG00000127603_75 (sequence is synthesized)
aaaagcagtgacaaaaatagaaattatttctcatatgaagcagtctacctcatgtctagattctgaagaaataagagaaaatcaaggggaagtgattttggaagtacaagaaacatattg

SEQ ID NO: 271831 - DNA, 120 bp, Artificial Sequence
  ENSG00000127603_76 (sequence is synthesized)
tgaaacgtcaggcaaattgccgagtgagcaggttttgcagcaaccaatgaatgctcgggtgaaaagtaagagagagaagagggaggtgattgtagaagaaagtatcagaacatgcaaacc

SEQ ID NO: 271832 - DNA, 120 bp, Artificial Sequence
  ENSG00000127603_77 (sequence is synthesized)
agcatttctttctgaagaaaagttgtatcaggaaactgccattagagatgagcatgactcccatataaagagccaacctagggaaatgacctcaagtgaaaaagggaaagaagctgatac

SEQ ID NO: 271833 - DNA, 120 bp, Artificial Sequence
  ENSG00000127603_78 (sequence is synthesized)
agaaatgggattttctattacttttaaaattgaagagtcctcttcccaagtggtacctcaaggaatttctgtaaaacatttagatgctttaacactcttcagctctaaacaggccaatga

SEQ ID NO: 271834 - DNA, 120 bp, Artificial Sequence
  ENSG00000127603_79 (sequence is synthesized)
aggaaaagtaaacaatttaagtctctgcttgactttaaaaccagaagaaaacttatctcgagaaattgcctgtggggcccagagtgaaccattcccttgtatgaccccaagacctgaagg

SEQ ID NO: 271835 - DNA, 120 bp, Artificial Sequence
  ENSG00000127603_80 (sequence is synthesized)
attgcactaccaggaatcagatggaaaagcccaagtgacaggcccatcccaaatttccaaaacagacaagtctttccaaggaaccaccagacaggagaccaactatcaagattcctgggt

SEQ ID NO: 271836 - DNA, 120 bp, Artificial Sequence
  ENSG00000127603_81 (sequence is synthesized)
tacttcgaaaactaaggaaaccaaacatcaaatttcctcatctaatgaatgtaaagaaaagtcataccaagaagtatcttttgacccagcaagaggtcttaaattggaagaaatcacagt

SEQ ID NO: 271837 - DNA, 120 bp, Artificial Sequence
  ENSG00000127603_82 (sequence is synthesized)
ttctagaccagattcaaaagaagtcaggtatctagaattctcagacagaaaagaccttcatcatcagggcagcaaaagtgatgataaactttgtggaactctcaaatctgaaatagcaac

SEQ ID NO: 271838 - DNA, 120 bp, Artificial Sequence
  ENSG00000127603_83 (sequence is synthesized)
acaggaactaactggagagaaatttctagaaatggcaaaccctaatgttgcaggtctagaagcaggatccattgaggacatagtgactcagagaggttccagagtcttgggatcctttct

SEQ ID NO: 271839 - DNA, 120 bp, Artificial Sequence
  ENSG00000127603_84 (sequence is synthesized)
tccagagaaactgttcaaaggagtgtctcaaaaagagaatacagggcaacagaatgccatcattagtcctactgttctagagaccagtgaagaaaagacagtgtccctaacagtatgctc

SEQ ID NO: 271840 - DNA, 120 bp, Artificial Sequence
  ENSG00000127603_85 (sequence is synthesized)
tgcagtgaagacagagaagacaccacaggaaaagctcagagaaagccctggcagtgaacaaactcccttcatgactgcacctgaaggaaagggaaatggaggtgtaaacccagagccctt

SEQ ID NO: 271841 - DNA, 120 bp, Artificial Sequence
  ENSG00000127603_86 (sequence is synthesized)
cagagcaactcagaatgtatttacccggcaactctgtttagaacatgatgaaaagctagtatcctatctgtctctgttacggaacattgaaatgaggaccaaacagattcaacctttgga

SEQ ID NO: 271842 - DNA, 120 bp, Artificial Sequence
  ENSG00000127603_87 (sequence is synthesized)
gctaaacctggcagaactacaggatctgctgtgtcaggccaaggtattagaaagggagttaaaggatctgaccaccttggtcagtcaggagctggagtgtgtgaatcagattatcatcag

SEQ ID NO: 271843 - DNA, 120 bp, Artificial Sequence
  ENSG00000127603_88 (sequence is synthesized)
ccagcctcaagaagttcctgctcaactgttgaaggctctagagaaagatgccaagaatcttcagaagtctctcagctctgtgagtgacacttggaattccaggctactccacttccagaa

SEQ ID NO: 271844 - DNA, 120 bp, Artificial Sequence
  ENSG00000127603_89 (sequence is synthesized)
tgctgtggaaatagaaaagactaaagtgttaaatcagcacacacagctagaaggccgacttcaagatctgagagcctgggttggcaataaaaatcttattctgaacagcaagggatctaa

SEQ ID NO: 271845 - DNA, 120 bp, Artificial Sequence
  ENSG00000127603_90 (sequence is synthesized)
cagtgaaatagatgttgacagcctgaacctctgcctccaacagtatgaggatttgaaacagcccatggctgaaaggaaagctcagctggatgctcttgcttttgatattcagttctttat

SEQ ID NO: 271846 - DNA, 120 bp, Artificial Sequence
  ENSG00000127603_91 (sequence is synthesized)
ctcagaacatgcccaggacttgtcccctcagcagaatcgacagatgctgaggcttctgaatgaactgcagaggtccttccaggacattttggaacagactgccgctcaggtggatgcctt

SEQ ID NO: 271847 - DNA, 120 bp, Artificial Sequence
  ENSG00000127603_92 (sequence is synthesized)
gcagggccatcttcaacaaatggagcaggaagccctggtgaagaccctgcagaaacaacaaaatacctgtcaccagcaactggaggatctttgcagttgggtaggacaggcagaaagagc

SEQ ID NO: 271848 - DNA, 120 bp, Artificial Sequence
  ENSG00000127603_93 (sequence is synthesized)
actggcaggccaccaaggcagaaccacccagcaggatctctctgctttgcagaagaaccaaagtgacttgaaggatttacaggatgacattcagaatcgtgccacctcatttgccactgt

SEQ ID NO: 271849 - DNA, 120 bp, Artificial Sequence
  ENSG00000127603_94 (sequence is synthesized)
tgtcaaggacattgaggggttcatggaagagaatcagaccaagctgagcccacgtgagttgacagctcttcgggaaaagcttcatcaggctaaggagcaatatgaggcgctccaggaaga

SEQ ID NO: 271850 - DNA, 120 bp, Artificial Sequence
  ENSG00000127603_95 (sequence is synthesized)
gacacgtgtggcccagaaggaactggaggaagcagtgacctccgccttacagcaggagactgaaaagagtaaagcagcaaaggaactggcagagaacaagaagaagatcgatgctctcct

SEQ ID NO: 271851 - DNA, 120 bp, Artificial Sequence
  ENSG00000127603_96 (sequence is synthesized)
ggattgggtaacttcagtaggatcatctggtggacagctgctgaccaaccttccaggaatggagcagctctcgggagctagcttggagaaaggagccttggacaccactgatggttacat

SEQ ID NO: 271852 - DNA, 120 bp, Artificial Sequence
  ENSG00000127603_97 (sequence is synthesized)
gggggtgaatcaagccccagagaaactggacaagcaatgtgagatgatgaaggcccgtcaccaagaattgctgtcccagcagcaaaatttcattctggccacccagtcagctcaggcctt

SEQ ID NO: 271853 - DNA, 120 bp, Artificial Sequence
  ENSG00000127603_98 (sequence is synthesized)
cttggatcagcatggccacaatctcacacctgaggagcaacagatgctgcaacagaagctgggagagctaaaggaacaatactctacttccctggcccaatcagaggcagaactgaagca

SEQ ID NO: 271854 - DNA, 120 bp, Artificial Sequence
  ENSG00000127603_99 (sequence is synthesized)
ggtgcagacacttcaggatgagttgcagaaatttctgcaggatcataaagagtttgaaagctggttggaacgatccgagaaagagctggagaacatgcataagggaggcagcagccccga

SEQ ID NO: 271855 - DNA, 120 bp, Artificial Sequence
  ENSG00000127603_100 (sequence is synthesized)
gacccttccctccctgctaaagcggcaaggaagcttctcagaggatgtcatttcccacaaaggagacttgagatttgtgactatctcaggacagaaagtcttggacatggaaaacagttt

SEQ ID NO: 271856 - DNA, 120 bp, Artificial Sequence
  ENSG00000127603_101 (sequence is synthesized)
ctccactcaaagtgtacacgattaggatctcacctgaatatgctgttaggccagtatcatcaattccaaaacagtgctgacagcctgcaggcctggatgcaggcttgtgaggccaacgtg

SEQ ID NO: 271857 - DNA, 120 bp, Artificial Sequence
  ENSG00000127603_102 (sequence is synthesized)
gagaagctcctctcagatactgttgcctctgaccctggagttctccaggagcagcttgcaacaacaaagcagttgcaggaggaattggctgagcaccaagtacctgtggaaaaactccaa

SEQ ID NO: 271858 - DNA, 120 bp, Artificial Sequence
  ENSG00000127603_103 (sequence is synthesized)
aaagtagctcgtgacataatggaaattgaaggggagccagccccagaccacaggcatgttcaagaaactacagattccatactcagccacttccaaagcctctcctatagcctggctgag

SEQ ID NO: 271859 - DNA, 120 bp, Artificial Sequence
  ENSG00000127603_104 (sequence is synthesized)
cgatcttctctgctgcagaaagcaattgcccaatctcagagtgtccaggaaagcctggagagcctgttgcagtctattggggaagttgaacaaaacctggaagggaagcaggtgtcatca

SEQ ID NO: 271860 - DNA, 120 bp, Artificial Sequence
  ENSG00000127603_105 (sequence is synthesized)
ctctcatcaggagtcatccaggaagccttagccacaaatatgaaattgaagcaggacattgctcggcaaaagagcagcttggaggccacccgtgagatggtgacccgattcatggagaca

SEQ ID NO: 271861 - DNA, 120 bp, Artificial Sequence
  ENSG00000127603_106 (sequence is synthesized)
gcagacagtactacagcagcagtgctgcagggcaaactggcagaggtgagccagcggttcgaacagctctgtctacagcagcaagaaaaggagagctccctaaagaagcttctaccccag

SEQ ID NO: 271862 - DNA, 120 bp, Artificial Sequence
  ENSG00000127603_107 (sequence is synthesized)
gcagagatgtttgaacacctctctggtaagctgcagcagttcatggaaaacaaaagtcggatgctggcctctggaaatcagccagatcaagatattacacatttcttccaacagatccag

SEQ ID NO: 271863 - DNA, 120 bp, Artificial Sequence
  ENSG00000127603_108 (sequence is synthesized)
gagctcaatttggaaatggaagaccaacaggagaacctagatactcttgagcacctggtcactgaactgagctcttgtggctttgcgctggacttgtgccagcatcaggacagggtacag

SEQ ID NO: 271864 - DNA, 120 bp, Artificial Sequence
  ENSG00000127603_109 (sequence is synthesized)
aatctaagaaaagacttcacagagctacagaagacagttaaagagagagagaaagatgcatcatcttgccaggaacagttggatgaattccggaagctggtcaggaccttccagaaatgg

SEQ ID NO: 271865 - DNA, 120 bp, Artificial Sequence
  ENSG00000127603_110 (sequence is synthesized)
ttgaaagaaactgaagggagtattccacctacggaaacttctatgagtgctaaagagttagaaaagcagattgaacacctgaagagtctactagatgactgggcaagtaagggaactctg

SEQ ID NO: 271866 - DNA, 120 bp, Artificial Sequence
  ENSG00000127603_111 (sequence is synthesized)
gtggaagaaatcaattgcaaaggtacttctttagaaaatctcatcatggaaatcacagcacctgattcccaaggcaagacaggttccatactgccctctgtaggaagctctgtaggcagt

SEQ ID NO: 271867 - DNA, 120 bp, Artificial Sequence
  ENSG00000127603_112 (sequence is synthesized)
gtaaacggataccacacctgcaaagatctgacggagatccagtgtgacatgtcagatgtaaacttgaagtatgagaaactagggggagtacttcatgaacgccaggaaagccttcaggct

SEQ ID NO: 271868 - DNA, 120 bp, Artificial Sequence
  ENSG00000127603_113 (sequence is synthesized)
atcctcaacagaatggaggaggttcacaaggaggcaaactctgtgctgcagtggctggaatcaaaagaggaagtcctgaaatccatggatgccatgtcatctccaaccaagacagaaaca

SEQ ID NO: 271869 - DNA, 120 bp, Artificial Sequence
  ENSG00000127603_114 (sequence is synthesized)
gtgaaagcccaagctgaatctaacaaggccttcctggctgagttggaacagaattctccaaaaattcaaaaagtaaaggaagccctggctggattactggtgacatatcccaactcacag

SEQ ID NO: 271870 - DNA, 120 bp, Artificial Sequence
  ENSG00000127603_115 (sequence is synthesized)
gaagcagaaaattggaagaaaattcaggaagaactcaattcccgatgggaaagggccactgaggttactgtggctcggcaaaggcagctagaggaatctgcaagtcatctggcctgcttc

SEQ ID NO: 271871 - DNA, 120 bp, Artificial Sequence
  ENSG00000127603_116 (sequence is synthesized)
caggctgcagaatcccagctccggccgtggctgatggagaaagaactgatgatgggagtgctggggcccctgtctattgaccccaacatgttgaatgcacaaaagcaacaggtccagttt

SEQ ID NO: 271872 - DNA, 120 bp, Artificial Sequence
  ENSG00000127603_117 (sequence is synthesized)
atgctaaaggaatttgaagcacgcaggcaacagcatgagcaactgaatgaggcagctcagggcatcctaacaggccctggagatgtctctctgtccaccagccaagtacagaaagaactc

SEQ ID NO: 271873 - DNA, 120 bp, Artificial Sequence
  ENSG00000127603_118 (sequence is synthesized)
cagagcatcaatcagaaatgggttgagctgactgacaaactcaactcccgttccagccaaattgaccaagctattgttaagagcacccagtaccaggaactgctccaggacttatcagag

SEQ ID NO: 271874 - DNA, 120 bp, Artificial Sequence
  ENSG00000127603_119 (sequence is synthesized)
aaggtgagggcagttggacaacggctgagtgtccagtcagctatcagcacccaaccagaggctgtaaagcagcaattggaagagaccagtgaaattcgatctgacttggagcagttagac

SEQ ID NO: 271875 - DNA, 120 bp, Artificial Sequence
  ENSG00000127603_120 (sequence is synthesized)
cacgaggttaaggaggctcagacactgtgcgatgaactctcagtgctcattggtgagcagtacctcaaggatgaactgaagaagcgtttggagacagttgccctgcctctccaaggttta

SEQ ID NO: 271876 - DNA, 120 bp, Artificial Sequence
  ENSG00000127603_121 (sequence is synthesized)
gaagaccttgcagccgatcgcattaacagactccaggcagctcttgccagcacccagcagttccagcaaatgtttgatgagttgaggacctggttggatgataaacaaagccagcaagca

SEQ ID NO: 271877 - DNA, 120 bp, Artificial Sequence
  ENSG00000127603_122 (sequence is synthesized)
aaaaactgcccaatttctgcaaaattggagcggctacagtctcagctacaggagaatgaagagtttcagaaaagtcttaatcaacacagtggctcctatgaggtgattgtggctgaaggg

SEQ ID NO: 271878 - DNA, 120 bp, Artificial Sequence
  ENSG00000127603_123 (sequence is synthesized)
gaatctctacttctttctgtacctcctggagaagagaaaaggactctacaaaaccagttggttgagctcaaaaaccattgggaagagcttagtaaaaaaactgcagacagacaatccagg

SEQ ID NO: 271879 - DNA, 120 bp, Artificial Sequence
  ENSG00000127603_124 (sequence is synthesized)
ctcaaggattgtatgcagaaagctcagaaatatcagtggcatgtggaagaccttgtgccatggatagaagattgtaaagctaagatgtctgagttgcgagtcactctggatccagtgcag

SEQ ID NO: 271880 - DNA, 120 bp, Artificial Sequence
  ENSG00000127603_125 (sequence is synthesized)
ctagagtccagtctcctaagatcaaaggctatgctgaatgaggtggagaagcgccgctccctgctggaaatattgaatagtgctgctgacattctgatcaattcttcagaagcagatgag

SEQ ID NO: 271881 - DNA, 120 bp, Artificial Sequence
  ENSG00000127603_126 (sequence is synthesized)
gatggaatccgggatgagaaggctgggatcaaccagaacatggatgctgttacagaagagctgcaggccaaaacagggtcactcgaagaaatgactcagaggctcagggagttccaggaa

SEQ ID NO: 271882 - DNA, 120 bp, Artificial Sequence
  ENSG00000127603_127 (sequence is synthesized)
agctttaagaatattgaaaagaaggttgaaggagccaaacaccaacttgagatctttgatgctctgggttctcaagcctgtagcaacaagaacctggagaagctaagagctcaacaggaa

SEQ ID NO: 271883 - DNA, 120 bp, Artificial Sequence
  ENSG00000127603_128 (sequence is synthesized)
gtgctgcaggccctagagcctcaggtagactatctgaggaactttactcagggtctggtagaagatgccccagatggatctgatgcttctcaacttctccaccaagctgaggtcgcccag

SEQ ID NO: 271884 - DNA, 120 bp, Artificial Sequence
  ENSG00000127603_129 (sequence is synthesized)
caagagttcctcgaagttaagcaaagagtgaacagtggttgtgtgatgatggaaaacaagctggaggggattggccagtttcactgccgggtccgagagatgttctctcaattggcagac

SEQ ID NO: 271885 - DNA, 120 bp, Artificial Sequence
  ENSG00000127603_130 (sequence is synthesized)
ctggatgatgagctagatggcatgggtgctattggcagagacactgatagcctccagtcccaaatcgaggatgtccggctattccttaacaaaattcacgtcctcaaattagacatagag

SEQ ID NO: 271886 - DNA, 120 bp, Artificial Sequence
  ENSG00000127603_131 (sequence is synthesized)
gcctctgaagcagagtgtcgacatatgctagaagaagaggggactctggatttgttaggtctcaaaagggagctagaagccctgaacaaacagtgtggcaaactgacagagagggggaaa

SEQ ID NO: 271887 - DNA, 120 bp, Artificial Sequence
  ENSG00000127603_132 (sequence is synthesized)
gctcgtcaggaacagctggaactgacactaggccgtgtagaggacttctacaggaaattgaaaggactcaatgacgcgaccacagcagcagaggaggcagaggccctccagtgggtagtg

SEQ ID NO: 271888 - DNA, 120 bp, Artificial Sequence
  ENSG00000127603_133 (sequence is synthesized)
gggaccgaagtggaaatcatcaaccaacaattagcagattttaaaatgtttcagaaagaacaagtggatcctcttcagatgaaattgcagcaggtgaatggacttggccagggattaatt

SEQ ID NO: 271889 - DNA, 120 bp, Artificial Sequence
  ENSG00000127603_134 (sequence is synthesized)
cagagtgcaggaaaagactgtgatgtacagggtttagaacatgacatggaagagatcaatgctcgatggaatacattgaataaaaaggtcgcacaaagaattgcacagctacaggaagct

SEQ ID NO: 271890 - DNA, 120 bp, Artificial Sequence
  ENSG00000127603_135 (sequence is synthesized)
ttgttgcattgtgggaagtttcaagatgccttggagccattgctcagctggttggcagataccgaggagctcatagccaatcagaaacctccatctgctgagtataaagtggtgaaagca

SEQ ID NO: 271891 - DNA, 120 bp, Artificial Sequence
  ENSG00000127603_136 (sequence is synthesized)
cagatccaagaacagaagttgctccagcggctcctagatgatcgaaaggccacagtagacatgcttcaagcagaaggaggcagaatagcccagtcagcagagctggctgatagagagaaa

SEQ ID NO: 271892 - DNA, 120 bp, Artificial Sequence
  ENSG00000127603_137 (sequence is synthesized)
atcactggacagctggagagtcttgaaagtagatggactgaactactcagtaaggcagcagccaggcaaaaacagctggaagacatcctggttctggccaaacagttccatgagacagct

SEQ ID NO: 271893 - DNA, 120 bp, Artificial Sequence
  ENSG00000127603_138 (sequence is synthesized)
gagcctatttctgacttcttatctgtcacagagaaaaagcttgctaactcagaacctgttggcactcagactgccaaaatacagcagcagatcattcggcacaaggctctggaagaagac

SEQ ID NO: 271894 - DNA, 120 bp, Artificial Sequence
  ENSG00000127603_139 (sequence is synthesized)
atagaaaaccatgcaacagatgtgcaccaggcagtcaaaattgggcagtccctctcctccctgacatctcctgcagaacagggtgtgctgtcagaaaagatagactcattgcaggcccga

SEQ ID NO: 271895 - DNA, 120 bp, Artificial Sequence
  ENSG00000127603_140 (sequence is synthesized)
tacagtgaaattcaagaccgctgttgtcggaaggcagccctacttgaccaagctctgtctaatgctaggctgtttggggaggatgaggtggaggtgctcaactggctggctgaggttgag

SEQ ID NO: 271896 - DNA, 120 bp, Artificial Sequence
  ENSG00000127603_141 (sequence is synthesized)
gacaagctcagttcagtgttcgtaaaggatttcaaacaggatgtcctgcacaggcagcatgctgaccacctggctttaaatgaagaaattgttaatagaaagaagaatgtagatcaagct

SEQ ID NO: 271897 - DNA, 120 bp, Artificial Sequence
  ENSG00000127603_142 (sequence is synthesized)
attaaaaatggtcaggctcttctaaaacaaaccacaggtgaggaggtgttacttatccaggaaaaactagatggtataaagactcgttacgcagacatcacagttactagctccaaggcc

SEQ ID NO: 271898 - DNA, 120 bp, Artificial Sequence
  ENSG00000127603_143 (sequence is synthesized)
ctcagaactttagagcaagcccggcagctggccaccaagttccagtctacttatgaggaactgaccgggtggctgagggaggtggaggaggagctggcaaccagtggaggacagtctccc

SEQ ID NO: 271899 - DNA, 120 bp, Artificial Sequence
  ENSG00000127603_144 (sequence is synthesized)
acaggggaacagataccccagtttcagcagagacagaaggaattaaagaaggaggtcatggagcacaggctggtgttggacacagtgaatgaggtgagccgtgctctcttagagctggtg

SEQ ID NO: 271900 - DNA, 120 bp, Artificial Sequence
  ENSG00000127603_145 (sequence is synthesized)
ccctggagagccagagaagggctggataaacttgtgtccgatgctaacgagcagtacaaactagtcagtgacactattggacaaagggtggatgaaattgatgctgctattcagagatca

SEQ ID NO: 271901 - DNA, 120 bp, Artificial Sequence
  ENSG00000127603_146 (sequence is synthesized)
caacagtatgagcaagctgccgatgcagaactagcttgggttgctgaaacaaaacggaaactgatggctctgggtccaattcgcctggaacaggaccagaccacagctcagcttcaggta

SEQ ID NO: 271902 - DNA, 120 bp, Artificial Sequence
  ENSG00000127603_147 (sequence is synthesized)
cagaaggctttctccattgacattattcgacacaaagattcaatggatgaactcttcagtcaccgtagtgaaatctttggcacatgtggggaggagcaaaaaactgtattacaggaaaag

SEQ ID NO: 271903 - DNA, 120 bp, Artificial Sequence
  ENSG00000127603_148 (sequence is synthesized)
acagagtctctaatacagcaatatgaagccattagcctactcaattcagagcgttatgcccgcctagagcgggcccaggtcttagtaaaccagttttgggaaacttatgaagagctcagc

SEQ ID NO: 271904 - DNA, 120 bp, Artificial Sequence
  ENSG00000127603_149 (sequence is synthesized)
ccctggattgaggaaactcgggcactaatagcacagttaccctctccagccattgatcatgagcagctcaggcagcaacaagaggaaatgaggcaattaagggaatctattgctgaacac

SEQ ID NO: 271905 - DNA, 120 bp, Artificial Sequence
  ENSG00000127603_150 (sequence is synthesized)
aaacctcatattgacaaactactaaagataggcccacaactaaaggaattaaaccctgaggaaggggaaatggtggaagaaaaataccagaaagcagaaaacatgtatgcccaaataaag

SEQ ID NO: 271906 - DNA, 120 bp, Artificial Sequence
  ENSG00000127603_151 (sequence is synthesized)
gaggaggtgcgccagcgagccctggctctggatgaagccgtgtcccagtccacacagtttcatgataaaattgagcctatgttggagacactggagaatctttcctctcgcctgcgtatg

SEQ ID NO: 271907 - DNA, 120 bp, Artificial Sequence
  ENSG00000127603_152 (sequence is synthesized)
ccaccactgatccctgctgaagtagacaagatcagagagtgcatcagtgacaataagagtgccaccgtggagctagaaaaactgcagccatcctttgaggccttgaagcgccgtggagag

SEQ ID NO: 271908 - DNA, 120 bp, Artificial Sequence
  ENSG00000127603_153 (sequence is synthesized)
gagcttattggacgatctcagggagcagacaaggatctggctgcaaaagaaatccaggataaattggatcaaatggtattcttctgggaggacatcaaagctcgggctgaagaacgagaa

SEQ ID NO: 271909 - DNA, 120 bp, Artificial Sequence
  ENSG00000127603_154 (sequence is synthesized)
atcaaatttcttgatgtccttgaattagcagagaagttctggtatgacatggcagctctcctgaccaccatcaaagacacccaggatattgtccatgacttggaaagcccaggcattgat

SEQ ID NO: 271910 - DNA, 120 bp, Artificial Sequence
  ENSG00000127603_155 (sequence is synthesized)
ccttccatcatcaaacaacaggttgaagctgctgagactattaaggaagagacagatggtctgcatgaagagctggagtttattcggatccttggagcagatttgatttttgcctgtgga

SEQ ID NO: 271911 - DNA, 120 bp, Artificial Sequence
  ENSG00000127603_156 (sequence is synthesized)
gaaactgagaagcctgaagtgaggaagagcattgatgagatgaataatgcttgggagaacttaaacaaaacatggaaagagaggctagaaaaacttgaggatgctatgcaagctgctgtg

SEQ ID NO: 271912 - DNA, 120 bp, Artificial Sequence
  ENSG00000127603_157 (sequence is synthesized)
cagtatcaggacactcttcaggctatgtttgactggctagataacactgtgattaaactctgcaccatgccccctgttggcactgacctcaatactgttaaagatcagttaaatgaaatg

SEQ ID NO: 271913 - DNA, 120 bp, Artificial Sequence
  ENSG00000127603_158 (sequence is synthesized)
aaggagttcaaagtagaagtttaccaacagcaaattgagatggagaagcttaatcaccagggtgaactgatgttaaagaaagctactgatgagacggacagagacattatacgagaacca

SEQ ID NO: 271914 - DNA, 120 bp, Artificial Sequence
  ENSG00000127603_159 (sequence is synthesized)
ctgacagaactcaaacacctctgggagaacctgggtgagaaaattgcccaccgacagcacaaactagaaggggctctgttggcccttggtcagttccagcatgccttagaggaactaatg

SEQ ID NO: 271915 - DNA, 120 bp, Artificial Sequence
  ENSG00000127603_160 (sequence is synthesized)
agttggctgactcataccgaagagttgttagatgctcagagaccaataagtggagacccaaaagtcattgaagttgagctcgcaaagcaccatgtcctaaaaaatgatgttttggctcat

SEQ ID NO: 271916 - DNA, 120 bp, Artificial Sequence
  ENSG00000127603_161 (sequence is synthesized)
caagccacagtggaaacagtcaacaaagctggcaatgagcttcttgaatccagtgctggagatgatgccagcagcttaaggagccgtttggaagccatgaaccaatgctgggagtcagtg

SEQ ID NO: 271917 - DNA, 120 bp, Artificial Sequence
  ENSG00000127603_162 (sequence is synthesized)
ttacagaaaacagaggagagggagcagcagcttcagtcaactctgcagcaggcccagggcttccacagtgaaattgaagatttcctcttggaacttactagaatggagagccagctttct

SEQ ID NO: 271918 - DNA, 120 bp, Artificial Sequence
  ENSG00000127603_163 (sequence is synthesized)
gcatctaagcccacaggaggacttcctgaaactgctagggaacagcttgatacacatatggaactctattcccagctgaaagccaaggaagagacttataatcaactacttgacaagggc

SEQ ID NO: 271919 - DNA, 120 bp, Artificial Sequence
  ENSG00000127603_164 (sequence is synthesized)
agactcatgcttctaagccgtgacgactctgggtctggctccaagacagaacagagtgtagcacttttggagcagaagtggcatgtggtcagcagtaagatggaagaaagaaagtcaaag

SEQ ID NO: 271920 - DNA, 120 bp, Artificial Sequence
  ENSG00000127603_165 (sequence is synthesized)
ctggaagaggccctcaacttggcaacagaattccagaattccctacaagaatttatcaactggctcactctagcagagcagagtttaaacatcgcttctccaccaagcctgattctaaat

SEQ ID NO: 271921 - DNA, 120 bp, Artificial Sequence
  ENSG00000127603_166 (sequence is synthesized)
actgtcctttcccagatagaagagcacaaggtttttgctaatgaagtaaatgctcatcgagaccagatcattgagctggatcaaactgggaatcaattaaagttccttagccaaaagcag

SEQ ID NO: 271922 - DNA, 120 bp, Artificial Sequence
  ENSG00000127603_167 (sequence is synthesized)
gatgttgttctgatcaagaatttgttggtgagcgtgcagtctcgatgggagaaggttgtccagcgatctattgaaagagggcgatcactagatgatgccaggaagcgggcaaaacaattc

SEQ ID NO: 271923 - DNA, 120 bp, Artificial Sequence
  ENSG00000127603_168 (sequence is synthesized)
catgaagcttggaaaaaactgattgactggctagaagatgcagagagtcacctggactcagaactagagatatccaatgacccagacaaaattaaacttcagctttctaagcataaggag

SEQ ID NO: 271924 - DNA, 120 bp, Artificial Sequence
  ENSG00000127603_169 (sequence is synthesized)
tttcagaagactcttggtggcaagcagcctgtgtatgataccacaattagaactggcagagcactgaaagaaaagactttgcttcccgaagatagtcagaaacttgacaatttcctagga

SEQ ID NO: 271925 - DNA, 120 bp, Artificial Sequence
  ENSG00000127603_170 (sequence is synthesized)
gaagtcagagacaaatgggatactgtttgtggcaagtctgtggagcggcagcacaagttggaggaagccctgctcttttcgggtcagttcatggatgctttgcaggcattggttgactgg

SEQ ID NO: 271926 - DNA, 120 bp, Artificial Sequence
  ENSG00000127603_171 (sequence is synthesized)
ttatacaaggtggagccacagctggctgaggaccagcccgtgcacggggaccttgacctcgtcatgaacctcatggatgcacacaaggttttccagaaggaactgggaaagcgaacagga

SEQ ID NO: 271927 - DNA, 120 bp, Artificial Sequence
  ENSG00000127603_172 (sequence is synthesized)
accgttcaggtcctgaagcggtcaggccgagagctgattgagaatagtcgagatgacaccacttgggtaaaaggacagctccaggaactgagcactcgctgggacactgtctgtaaactc

SEQ ID NO: 271928 - DNA, 120 bp, Artificial Sequence
  ENSG00000127603_173 (sequence is synthesized)
tctgtttccaaacaaagccggcttgagcaggccttaaaacaagcggaagtgtttcgagacacagtccacatgctgttggagtggctttctgaagcagagcaaacgcttcgctttcgggga

SEQ ID NO: 271929 - DNA, 120 bp, Artificial Sequence
  ENSG00000127603_174 (sequence is synthesized)
gcacttcctgatgacacagaggccctgcagtctctcattgacacccataaggaattcatgaagaaagtagaagaaaagcgagtggacgttaactcagcagtagccatgggagaagtcatc

SEQ ID NO: 271930 - DNA, 120 bp, Artificial Sequence
  ENSG00000127603_175 (sequence is synthesized)
ctggctgtctgccaccccgattgcatcacaaccatcaaacactggatcaccatcatccgagctcgcttcgaggaggtcctgacatgggctaagcagcaccagcagcgtcttgaaacggcc

SEQ ID NO: 271931 - DNA, 120 bp, Artificial Sequence
  ENSG00000127603_176 (sequence is synthesized)
ttgtcagaactggtggctaatgctgagctcctggaagaacttctggcatggatccagtgggctgagaccaccctcattcagcgggatcaggagccaatcccgcagaacattgaccgagtt

SEQ ID NO: 271932 - DNA, 120 bp, Artificial Sequence
  ENSG00000127603_177 (sequence is synthesized)
aaagcccttatcgctgagcatcagacatttatggaggagatgactcgcaaacagcctgacgtggaccgggtcaccaagacatacaaaaggaaaaacatagagcctactcacgcgcctttc

SEQ ID NO: 271933 - DNA, 120 bp, Artificial Sequence
  ENSG00000127603_178 (sequence is synthesized)
atagagaaatcccgcagcggaggcaggaaatccctaagtcagccaacccctcctcccatgccaatcctttcacagtctgaagcaaaaaacccacggatcaaccagctttctgcccgctgg

SEQ ID NO: 271934 - DNA, 120 bp, Artificial Sequence
  ENSG00000127603_179 (sequence is synthesized)
cagcaggtgtggctgttagcactggagcggcaaaggaaactgaatgatgccttggatcggctggaggagttgaaagaatttgccaactttgactttgatgtctggaggaaaaagtatatg

SEQ ID NO: 271935 - DNA, 120 bp, Artificial Sequence
  ENSG00000127603_180 (sequence is synthesized)
cgttggatgaatcacaaaaagtctcgagtgatggatttcttccggcgcattgataaggaccaggatgggaagataacacgtcaggagtttatcgatggcattttagcatccaagttcccc

SEQ ID NO: 271936 - DNA, 120 bp, Artificial Sequence
  ENSG00000127603_181 (sequence is synthesized)
accaccaagttagagatgactgctgtggctgacattttcgaccgagatggggatggttacattgattattatgaatttgtggctgctcttcatcccaacaaggatgcgtatcgaccaaca

SEQ ID NO: 271937 - DNA, 120 bp, Artificial Sequence
  ENSG00000127603_182 (sequence is synthesized)
accgatgcagataaaatcgaagatgaggttacaagacaagtggctcagtgcaaatgtgcaaaaaggtttcaggtggagcagatcggagagaataaataccggttcttcctcggcaatcag

SEQ ID NO: 271938 - DNA, 120 bp, Artificial Sequence
  ENSG00000127603_183 (sequence is synthesized)
tttggggattctcagcagttgcggctggtccgtattctgcgcagcaccgtgatggttcgcgttggtggaggatggatggccttggatgaatttttagtgaaaaatgatccctgccgagtt

SEQ ID NO: 271939 - DNA, 120 bp, Artificial Sequence
  ENSG00000127603_184 (sequence is synthesized)
caccatcctgggagtaaaataaagcgctctgattccagctcttcgatttccagtcagtctcccatagcacgaggtagaactaacattgaacttagagagaaattcatcctaccagaggga

SEQ ID NO: 271940 - DNA, 120 bp, Artificial Sequence
  ENSG00000127603_185 (sequence is synthesized)
gcatcccagggaatgacccccttccgctcacggggtcgaaggtccaaaccatcttcccgggcagcttcccctactcgttccagctccagtgctagtcagagtaaccacagctgtacatcc

SEQ ID NO: 271941 - DNA, 120 bp, Artificial Sequence
  ENSG00000127603_186 (sequence is synthesized)
atgccatcttctccagccaccccagccagtggaaccaagacttcacttcagttctctcgctgttatgacaaaccctggttggtaaacagtaaagctggcacccctatcagggacagccat

SEQ ID NO: 271942 - DNA, 120 bp, Artificial Sequence
  ENSG00000127603_187 (sequence is synthesized)
tctcctgacctccagctgcccacccccgaggttatcccatcatcaggtagcaagttgaaacgaccaacaccaacttttcattctagtcggacatcccttgctggtgataccagcaatagt

SEQ ID NO: 271943 - DNA, 120 bp, Artificial Sequence
  ENSG00000127603_188 (sequence is synthesized)
tcttccccggcctccacaggtgccaaaactaatcgggcagaccctaaaaagtctgccagtcgccctgggagtcgggctgggagtcgagccgggagtcgagccagcagccggcgaggaagt

SEQ ID NO: 271944 - DNA, 120 bp, Artificial Sequence
  ENSG00000127603_189 (sequence is synthesized)
gacgcttctgactttgacctcttagagacgcagtctgcttgttccgacacttcagaaagcagcgctgcagggggccaaggcaactccaggagagggctaaacaaaccttccaaaatccca

SEQ ID NO: 271945 - DNA, 120 bp, Artificial Sequence
  ENSG00000127603_190 (sequence is synthesized)
accatgtctaagaagaccaccactgcctcccccaggactccaggtcccaagcgataacactgtctaagcacccccaagccactatccactttgaatcctgctccatacattgggtgtata

SEQ ID NO: 271946 - DNA, 120 bp, Artificial Sequence
  ENSG00000127603_191 (sequence is synthesized)
tttattctgaacgggagaagttatattgttaaaagtgtaaaagaataattgtgttatgaagctgccttattttttttctttttgtaagttactattttcatgtgaatatttatgtagata

SEQ ID NO: 271947 - DNA, 120 bp, Artificial Sequence
  ENSG00000127603_192 (sequence is synthesized)
aaatttgcctcctggtaaccctgtaatggatggggcccagaaatgaaatatttgagaaaaacaagtgaaaaggtcaagatacaaatgtgtattaaaaaaaaaaaagcctattaatagggt

SEQ ID NO: 271948 - DNA, 120 bp, Artificial Sequence
  ENSG00000127603_193 (sequence is synthesized)
ttctgcgcggtgcagggttgtaaacctgctttatcttttaggattattcctaaatgcatcttctttataaacttgacttgctatctcagcaagataaattatattaaaaaaataagaatc

SEQ ID NO: 271949 - DNA, 120 bp, Artificial Sequence
  ENSG00000127603_194 (sequence is synthesized)
ctgcagtgtttaaggaactctttttttgtaaatcacggacacctcaattagcaagaactgaggggagggctttttccattgtttaatgttttgtgatttttagctaaagagagggaacct

SEQ ID NO: 271950 - DNA, 120 bp, Artificial Sequence
  ENSG00000127603_195 (sequence is synthesized)
catctaagtaacatttgcacatgatacagcaaaaggagttcattgcaatactgtctttggatattgtttcagtactgggtgtttaaaggacaaatagctgctagaattcaggggtaaatg

SEQ ID NO: 271951 - DNA, 120 bp, Artificial Sequence
  ENSG00000127603_196 (sequence is synthesized)
taagtgttcagaaaacgtcagaacatttggggttttaaactgatttgttgctccctatccagcctagacaccagtaactcttgtgttcaccaggacccagacccttggcaagggataggc

SEQ ID NO: 271952 - DNA, 120 bp, Artificial Sequence
  ENSG00000127603_197 (sequence is synthesized)
tcgttggtgacattgtgaatttcagatttgttttatccactttttttgctatttatttaaatggtcgatcaacttcccacaaactgaggaatgaattccacgagcctgttctgaaaatgt

SEQ ID NO: 271953 - DNA, 120 bp, Artificial Sequence
  ENSG00000127603_198 (sequence is synthesized)
ggacgtaagacaaacacgtgctcgtcctttaatggagttcaccagcacacttgttaaccagtcctgtttgctttcgtctttttttgtgcgtaataaagtcaactgaccaagtgaccatga

SEQ ID NO: 271954 - DNA, 120 bp, Artificial Sequence
  ENSG00000127603_199 (sequence is synthesized)
aaaggggctgtctggggctcctgttttttagctgctgttcttcagctccgaccatgttgctgtgtgattatctcaattggttttaattgaggcagaaactgaagctctaccaatgaactg

SEQ ID NO: 271955 - DNA, 120 bp, Artificial Sequence
  ENSG00000127603_200 (sequence is synthesized)
tttagaaacaagacacacttttgtattaaaattgcttgcagtaacaaatattttgtatttcctgattttcttttcaactattaccttatctataaatgttaccctggggtataatcatgt

SEQ ID NO: 271956 - DNA, 120 bp, Artificial Sequence
  ENSG00000127603_201 (sequence is synthesized)
tgtaggtacttaaatgcattccgcaaatcaaaatatcttgatggataaattatagagcttaatagatcttgttttatttcatccttgttaattttgtttaatatggctgggcatggtggc

SEQ ID NO: 271957 - DNA, 120 bp, Artificial Sequence
  ENSG00000127603_202 (sequence is synthesized)
gggattacagccatgaaccactgcgcccagccagacggatttttttaacccttgagaagtaccccctaaatgagcagtttgctctcctcgctgatcttcatcacacctagatgtcaggtc

SEQ ID NO: 271958 - DNA, 120 bp, Artificial Sequence
  ENSG00000127603_203 (sequence is synthesized)
tgcttcatgggagcttgctctgtatgtatcctccctggactgatgttcaggctccttgcttctcctcccgggttgtgggtatggagggtttgccctctgacaactccagggtacttgtgg

SEQ ID NO: 271959 - DNA, 120 bp, Artificial Sequence
  ENSG00000127603_204 (sequence is synthesized)
tgctcatacatcctcatgtactttgctttctccccgcaagaggttccctaatgcttctgtgacttttttcttctggctacatcctgaagtctggccttgcaggcaggctgggaatggaaa

SEQ ID NO: 271960 - DNA, 120 bp, Artificial Sequence
  ENSG00000127603_205 (sequence is synthesized)
gttaagagtgtgacgtcctctgacaccctcccttcttgtagaagggtctgaggtttgtttatttaagctgagcagaggatgccaaagatagaggtttgagtcagcttgacactggcttag

SEQ ID NO: 271961 - DNA, 120 bp, Artificial Sequence
  ENSG00000127603_206 (sequence is synthesized)
gcgctccttttcactctccttgttccttcttccctttcccctcccccgctggccagttgtttcctgggctttgtctgagatacactgtacagttttagtcccagtctactagcgcctgct

SEQ ID NO: 271962 - DNA, 120 bp, Artificial Sequence
  ENSG00000127603_207 (sequence is synthesized)
gaaaaacagtcagaagtgagatggaggagaagctgccaggaagtttctgacaacactaagctccggcctctgcctctgctgatagtacaggacaacagtaacctcaggagaaaggcatcc

SEQ ID NO: 271963 - DNA, 120 bp, Artificial Sequence
  ENSG00000127603_208 (sequence is synthesized)
agaggcctgcgctgagcttgtggctaactcaagggaggagaaaggacgggcctggaaatgcccctcttagattcatcttatttaccaccaaccatctttattttgactcacgttcttgga

SEQ ID NO: 271964 - DNA, 120 bp, Artificial Sequence
  ENSG00000127603_209 (sequence is synthesized)
cacagccctttttgaggagctgcgaagggtgcacaggccagtagctggaggttctttggtaccccctccttttaggtggggtcagcagacacaggggcgccatgtggccgagttaccaag

SEQ ID NO: 271965 - DNA, 120 bp, Artificial Sequence
  ENSG00000127603_210 (sequence is synthesized)
caaagatctacaaatgaaagataacctttgtggagttttgatgaggccatgaaatgtctgaatgaacactggaccctttccctagcatgtcccagtatctaggtccttggctgcagagag

SEQ ID NO: 271966 - DNA, 120 bp, Artificial Sequence
  ENSG00000127603_211 (sequence is synthesized)
cagtggaaccaaggtatgtactgatctccattatgcccttcttccccaatcccaccctcacagatgttcattgttcacggtagcctctgaaagactccagtgaggagaagaaataaaaat

SEQ ID NO: 271967 - DNA, 120 bp, Artificial Sequence
  ENSG00000127603_212 (sequence is synthesized)
atgctttgaatttgtcttgttgcagctctgagcctgtaagatggctgtctgaatcggcagcggctggaagagacagagagaggcggggagggagggagaaagaattggagggattgccgg

SEQ ID NO: 271968 - DNA, 120 bp, Artificial Sequence
  ENSG00000127603_213 (sequence is synthesized)
catagtgcatgtttttaaatgtgcatcgaatccgatgaggccaaggttgggatttctgtgggatcccaggactggcttagctgcgtttttgctgagattaggagaggaaggaaatgggaa

SEQ ID NO: 271969 - DNA, 120 bp, Artificial Sequence
  ENSG00000127603_214 (sequence is synthesized)
attcactgggctgttttaaggagccgaaagagtcaatagctattcctgagaaggctcccatatctcctaagaaaagggttcggttcaaaaggaggtggagagggaagaaaatccctactc

SEQ ID NO: 271970 - DNA, 120 bp, Artificial Sequence
  ENSG00000127603_215 (sequence is synthesized)
cagaggcatctcaccaggaagaaacctcagaaggaactggagtcattgaagagactgaaaccctaacgaagttaacagagagtctccaaaaggaagacggagtgggaggggtagagcata

SEQ ID NO: 271971 - DNA, 120 bp, Artificial Sequence
  ENSG00000127603_216 (sequence is synthesized)
cccccccagatattttgctgcctggggactcagcccccaactcacgggtagtcgatcgggggatgatagtacaggtaaaggagagattccaaggggaggtccagaccgcccaccttttgt

SEQ ID NO: 271972 - DNA, 120 bp, Artificial Sequence
  ENSG00000127603_217 (sequence is synthesized)
tagagaatgagtcatcagttgctggaggggtctgggattccctggaagaggggatgactgtcattgctcacctgcttgataacccagcagaaaggaactgcgagaagtcagtgagccaac

SEQ ID NO: 271973 - DNA, 120 bp, Artificial Sequence
  ENSG00000127603_218 (sequence is synthesized)
tggtggaatttcctaggacagcatcctgcagcagcagggctgtgttgctgcctttgcaaggagagactgcagtggagaaaggaaatattcagcgtgggtttcggagctgtgctttgccta

SEQ ID NO: 271974 - DNA, 120 bp, Artificial Sequence
  ENSG00000127603_219 (sequence is synthesized)
ggacagactaccccactgataaaggaaatcaagaacaattttcagagggctggagtgtggaggaaggaaccaagagtgtttcaggtgcccctcagacagcttcctggattatagaatgtt

SEQ ID NO: 271975 - DNA, 120 bp, Artificial Sequence
  ENSG00000127603_220 (sequence is synthesized)
ctgtttcttcattactactggaccagcctggaggccaaagacgcacggagccttcccatgtgggtcaagtgcccccccaggattccagactgcctacttctcagagtgatttgtccatca

SEQ ID NO: 271976 - DNA, 120 bp, Artificial Sequence
  ENSG00000127603_221 (sequence is synthesized)
gtggtgtgactgtgagcattttgccctcctcctctggctatggcagtgatgggccacacatacatgggatccagcctaaagatacagaacctgaaaagagctctacttccttctcagaag

SEQ ID NO: 271977 - DNA, 120 bp, Artificial Sequence
  ENSG00000127603_222 (sequence is synthesized)
ggagcgcgagcgggccgggtgcgagcggactgaggagcggagcgcgactgccgggccgggcgaggcgggcggacggcggagagcgagggcgccgtcgccgtctctgagacgcacaaaggg

SEQ ID NO: 271978 - DNA, 120 bp, Artificial Sequence
  ENSG00000127603_223 (sequence is synthesized)
tctctgagacgcacaaagggtcgaggctggggccgccgccgcctcagcgcgcgggcctggaaccggcagcccccggggctcggcgagaaggcggtgcgggcggccatggccggctacgtg

SEQ ID NO: 271979 - DNA, 120 bp, Artificial Sequence
  ENSG00000127603_224 (sequence is synthesized)
cctgccccgtgacctacaagccaggctgagaatttggaaacaacagcctatgtggaatgtttcactgctcccaaggagcgggtaatgagagtggcacttagtgtgatgcccagaaagaca

SEQ ID NO: 271980 - DNA, 120 bp, Artificial Sequence
  ENSG00000127603_225 (sequence is synthesized)
gacctgcagatgctcaagtgacctttactttttctgtcattacagctagctttaagctttccttctgagatgagatgcttccacagccaaagctgggccatgcgttctcatcagaaatga

SEQ ID NO: 271981 - DNA, 120 bp, Artificial Sequence
  ENSG00000127603_226 (sequence is synthesized)
tcacatttgagagaatgtaaaaggaaatgtgggtcttcctcagacaccagtccagtgttgggatgagcagcttgctagtaatttttccaacacgtcatacttactatggctgctgttgaa

SEQ ID NO: 271982 - DNA, 120 bp, Artificial Sequence
  ENSG00000127603_227 (sequence is synthesized)
ctgttcctcatgggaacctaggaatcttccttcatttcctggctggctgcttcccctcattttgcctctatccatcctgcccatggattagcccggctggcaggctcacccacctgtgct

SEQ ID NO: 271983 - DNA, 120 bp, Artificial Sequence
  ENSG00000127603_228 (sequence is synthesized)
gaggtggttgagcaaccttgcttgcctccactttggggccatggaaggtgacagtgctgctgatagagtggctttctaatccccaggaggcagcttctcaagtagaatcacaaagccaga

SEQ ID NO: 271984 - DNA, 120 bp, Artificial Sequence
  ENSG00000127603_229 (sequence is synthesized)
aaaggcttcagcaacttctgtatggatgaggaaactggggtgcagaaaggctgtgagatttgcttaagatcacacaggatcagaaccctagcttctgctcacttgttcttccaccccatg

SEQ ID NO: 271985 - DNA, 120 bp, Artificial Sequence
  ENSG00000127603_230 (sequence is synthesized)
gtgtgtctgacactcataaccttgaattgtctactgttctaaacaagaggtctctgtatcaggtatgtctctgtgctcaggaatgtccagagcagcatgttaatacgtgatcggtagata

SEQ ID NO: 271986 - DNA, 120 bp, Artificial Sequence
  ENSG00000127603_231 (sequence is synthesized)
gaacagaaagcttagcctatcttcatttttattccaaggaacattggcatactgacattctaaggagagtgaaatgagtcttggctggtatatattgtctgttgatggtttctctgaaaa

SEQ ID NO: 271987 - DNA, 120 bp, Artificial Sequence
  ENSG00000127603_232 (sequence is synthesized)
gcggccgctgctgctgcccgcccgcccgcctgcctttccgaaggcctggcgcggggctccgctcgccttgttttgcagctacagcgcagggttggcctgggagccacaacaatgccatga

SEQ ID NO: 271988 - DNA, 120 bp, Artificial Sequence
  ENSG00000127603_233 (sequence is synthesized)
tgttttggagacaggaagccccaagctggccccgaatgaaggacttcctgtgtttaaagttgcaggaatatccgccgaccagcccagttcaaatgcaaacaccccagctagggaggacga

SEQ ID NO: 271989 - DNA, 120 bp, Artificial Sequence
  ENSG00000127603_234 (sequence is synthesized)
atggctaattcagaccagctggactctccagggctggaactgaggataaaatgaaaggaattcttaggagcttgggccatacttgaagactagagaggctgtgccattgttattaaagga

SEQ ID NO: 271990 - DNA, 120 bp, Artificial Sequence
  ENSG00000127603_235 (sequence is synthesized)
tacaatcggcataaatttgctgctcccaactctgcttcggtgagaagtgagtggaactagatatcgaaaaagactcgtcaatatcagatgatttttgttgactgtatttgaaagagcagt

SEQ ID NO: 271991 - DNA, 120 bp, Artificial Sequence
  ENSG00000127603_236 (sequence is synthesized)
gctcttaaaaaaaattaaaccataagccatacaaggaattattttaaattatatcgtctgtcaaccatgaggctgctagcctgtgaggaaaaagctgtttgtcttagagcttctcccaga

SEQ ID NO: 271992 - DNA, 120 bp, Artificial Sequence
  ENSG00000127603_237 (sequence is synthesized)
atggtttcaaaacggaacttccaggcctttctggagggcagatgcaattggtggtttggggtatgaacagctaaaaggatttataacttatgtagaatgcatttggggggaacctgtgaa

SEQ ID NO: 271993 - DNA, 120 bp, Artificial Sequence
  ENSG00000127603_238 (sequence is synthesized)
aaatacttttgaaagattgatggttcatcttgattgaaaaaggatgggtaagccactcagcagaccagactgtttaaggcggaaccccagctgcctggggaaaggagaggaggaggatgg

SEQ ID NO: 271994 - DNA, 120 bp, Artificial Sequence
  ENSG00000127603_239 (sequence is synthesized)
ctacatagaggactgctatgttccacaacggtctatatatgatacgatgaggataaatgagcaaattgaccaggggtcaaagcttaaccagacttcaaaaagcaccatggaaaagatgga

SEQ ID NO: 271995 - DNA, 120 bp, Artificial Sequence
  ENSG00000127603_240 (sequence is synthesized)
aggaagtactatatccagcaatggtacattaggagcagcatctaatgtttttgaatctagagcaccagaaggtaagaagctggatgagaggataatatttgatgcactaaagctaagcag

SEQ ID NO: 271996 - DNA, 120 bp, Artificial Sequence
  ENSG00000127603_241 (sequence is synthesized)
tgatgtgcagaagtcagcacctgtgccacccagaaggcggccaaatgcagaacgcaaagacaatgttaacaggagatcgtggaagtccttcatgccacccaacttcccagaatttgcaga

SEQ ID NO: 271997 - DNA, 120 bp, Artificial Sequence
  ENSG00000127603_242 (sequence is synthesized)
gaggatagaagcttctctcagtgaggtttcagaagctggtgcttcaaatccttccttgcaagagaagaaggagtccagttctgcattaacagaaagttctggtcatttggaccacaggga

SEQ ID NO: 271998 - DNA, 120 bp, Artificial Sequence
  ENSG00000127603_243 (sequence is synthesized)
acctcagtcagagtcagtaactctggaacatgtgtccaaatccataggtattccagaggtgcaagattttaaaaacttaagtggagactgccaggactttagatttcagcagcacagtgc

SEQ ID NO: 271999 - DNA, 120 bp, Artificial Sequence
  ENSG00000127603_244 (sequence is synthesized)
aaaccctcctcatgaattccagcctgtagaatcagaagctgtagcaacaagtggtaacacagatgtaatgcaggaatccagattctcaagtgcaacctggccgagggccacaaaaagttt

SEQ ID NO: 272000 - DNA, 120 bp, Artificial Sequence
  ENSG00000127603_245 (sequence is synthesized)
agctaagggaggcttcagtgagaagcagcacccccttggggacacagcctgcactgtggaaatgccacctctctccccttgcctgagtgaagagctgttagatccagaattgcatgttct

SEQ ID NO: 272001 - DNA, 120 bp, Artificial Sequence
  ENSG00000127603_246 (sequence is synthesized)
cataacccccagcctgagagagaaaacagagtctgagctaaagtttgaggaggatgagcgatggattatgatggaggctgagggagagtgggaggaagagaaactgtcagacagggaaaa

SEQ ID NO: 272002 - DNA, 120 bp, Artificial Sequence
  ENSG00000127603_247 (sequence is synthesized)
gacttttctgatggcagatgagaagaacagcctggcagatatttttgaagaaagagaacaagcaaacacagcagtggtggaggatggatccgattgcttagctgctgtcttgaggacttt

SEQ ID NO: 272003 - DNA, 120 bp, Artificial Sequence
  ENSG00000127603_248 (sequence is synthesized)
tggccacctatctcttggtcagatttgttgccctgatgacccacagccagccaaggaccagttggctactgttcccaaggatatacccctggattgcgattgtgttcttacaggtgagga

SEQ ID NO: 272004 - DNA, 120 bp, Artificial Sequence
  ENSG00000127603_249 (sequence is synthesized)
tattctcggtgaggtggcaaacagaactgctcaggggttagagggacttgtttcagattcagcatgtactgtgggtactattgatgcagaacagctctctgacacagactcagtgcagat

SEQ ID NO: 272005 - DNA, 120 bp, Artificial Sequence
  ENSG00000127603_250 (sequence is synthesized)
gtttcttgaacttgaaaaggagtgtttatgtgaagaaggagtaactcctctagttgagctacagaatcaaatctcttctgaagggctggctgcatcccaggatgcagaaaatttactcgt

SEQ ID NO: 272006 - DNA, 120 bp, Artificial Sequence
  ENSG00000127603_251 (sequence is synthesized)
aattagtcatttttcaggggctgccttagaaaaggaacagcatttaggccttttacatgtaagggcaaaagattatgatactagattggattgtggatattttaataccctggattcttc

SEQ ID NO: 272007 - DNA, 120 bp, Artificial Sequence
  ENSG00000127603_252 (sequence is synthesized)
tcaggtgcctaatgctgtggaacttattgcccacgttgatatcatgagagacacttccactgttagcaaggaggaatgtgaaaaagtgccttttagccccaggactgcagaatttaagtc

SEQ ID NO: 272008 - DNA, 120 bp, Artificial Sequence
  ENSG00000127603_253 (sequence is synthesized)
cagacagccagctgatctggattcactggaaaagctggacccaggaggactgctgaactctgatcacagggtttctcatgaagaaaaattatcaggcttcattgcttctgagctggccaa

SEQ ID NO: 272009 - DNA, 120 bp, Artificial Sequence
  ENSG00000127603_254 (sequence is synthesized)
agacaatggcagtttgtcccagggagactgcagtcaaactgaggggaatggtgaggagtgcattgagagggtcaccttcagttttgcttttaatcatgaactaacagatgttacctcagg

SEQ ID NO: 272010 - DNA, 120 bp, Artificial Sequence
  ENSG00000127603_255 (sequence is synthesized)
acctgaagtagaggtgttatatgaatcaaatttactaacagatgaaattcatttggaaagtgggaatgtaactgttaatcaagaaaataacagtctgacatcaatgggaaatgtggtcac

SEQ ID NO: 272011 - DNA, 120 bp, Artificial Sequence
  ENSG00000127603_256 (sequence is synthesized)
ttgtctgtggagaaagtttgtgatgaggatggtgaggcaaaagagctggattatcaagccacacttttggaggatcaagctccagcacatttccacagaaacttcccagagcaggtcttc

SEQ ID NO: 272012 - DNA, 120 bp, Artificial Sequence
  ENSG00000127603_257 (sequence is synthesized)
caggatctccagaggaagtccccagagtcagagattctgagtctgcacctgctggttgaagaactgagacttaatccagatggagtggaaactgtgaatgatacaaagcctgagctgaat

SEQ ID NO: 272013 - DNA, 120 bp, Artificial Sequence
  ENSG00000127603_258 (sequence is synthesized)
gtggcatcatcagagggaggggagatggaaaggagagattcagattcattcctaaatatttttccagagaaacaagttaccaaggctggtaatactgaaccagttttagaggaatggata

SEQ ID NO: 272014 - DNA, 120 bp, Artificial Sequence
  ENSG00000127603_259 (sequence is synthesized)
cccgtcctccagagaccttcccggactgctgcagtacccactgtcaaagatgccctagatgctgcactgcccagcccagaggagggtacctcaattgctgcagtgcctgccccagaggga

SEQ ID NO: 272015 - DNA, 120 bp, Artificial Sequence
  ENSG00000127603_260 (sequence is synthesized)
actgctgtagttgctgctttagtgccctttccacatgaggacatcctagttgcttcaatagtctccttagaggaggaggatgtcacagctgctgcagtatcagccccagagagggctact

SEQ ID NO: 272016 - DNA, 120 bp, Artificial Sequence
  ENSG00000127603_261 (sequence is synthesized)
gtcccagctgttacagtatctgtccctgaagggactgctgcagttgctgcagtgtcctccccagaggagactgctccagctgttgcagcagccatcacacaggagggtatgtcagctgtc

SEQ ID NO: 272017 - DNA, 120 bp, Artificial Sequence
  ENSG00000127603_262 (sequence is synthesized)
gcagggttctccccagagtgggctgctttagctattacagtacccatcacagaggaggatggtacaccagaagggcctgtcaccccagctaccacagtgcatgctccagaggagcctgat

SEQ ID NO: 272018 - DNA, 120 bp, Artificial Sequence
  ENSG00000127603_263 (sequence is synthesized)
actgcagctgtcagagtgtccaccccagaggagcccgcctccccagctgctgcagtgcccaccccagaggagcccacctccccagctgctgcagtgcccaccccagaggagcccacctcc

SEQ ID NO: 272019 - DNA, 120 bp, Artificial Sequence
  ENSG00000127603_264 (sequence is synthesized)
ccagctgctgcagtgccccccccagaggagcccacctccccagctgctgcagtgcccaccccagaggagcccacctccccagctgctgcagtgcccaccccagaggagcccacctcccca

SEQ ID NO: 272020 - DNA, 120 bp, Artificial Sequence
  ENSG00000127603_265 (sequence is synthesized)
gctgctgcagtgcccaccccagaggagcccacctccccagctgctgcagtgcccaccccagaggagcccacctccccagctgctgcagtgcccaccccagaggagcccacctccccagct

SEQ ID NO: 272021 - DNA, 120 bp, Artificial Sequence
  ENSG00000127603_266 (sequence is synthesized)
gctgcagtgcccaccccagaggagcccgcctccccagctgctgcagtgcccaccccagaggagcccgcctccccagctgctgcagtgcccaccccagaggagcctgccttcccagctcct

SEQ ID NO: 272022 - DNA, 120 bp, Artificial Sequence
  ENSG00000127603_267 (sequence is synthesized)
gcagtgcccaccccagaggaatccgcctccgcagctgttgcagtgcccacccccgaggaatctgcctccccagctgctgcagtgcccaccccagcagaatctgcctcctttgcagctgtg

SEQ ID NO: 272023 - DNA, 120 bp, Artificial Sequence
  ENSG00000127603_268 (sequence is synthesized)
gtggccaccctggaggaacccacttccccggcagcttcagtgcccacccctgcagctatggtggccaccctagaggaattcacttccccggcagcttcagtgcccacctctgaggagcct

SEQ ID NO: 272024 - DNA, 120 bp, Artificial Sequence
  ENSG00000127603_269 (sequence is synthesized)
gcctccctagcagctgcagtgtccaacccagaggagcccacctccccagcagcagcagtgcccaccctagaggaacccacctcctcagcagctgcagtgctcaccccagaggaactcagt

SEQ ID NO: 272025 - DNA, 120 bp, Artificial Sequence
  ENSG00000127603_270 (sequence is synthesized)
tccccagcagcttcagtgcccacccccgaggagcctgcctccccagcagctgcagtgtccaacctagaggagcccgcctccccagcagcagcagtgcccaccccagaggtggctgccatc

SEQ ID NO: 272026 - DNA, 120 bp, Artificial Sequence
  ENSG00000127603_271 (sequence is synthesized)
cctgctgcttcagtgcccaccccagaggtgcctgccatcccagctgctgcagtgcctcctatggaggaagtttcccccattggtgtgcccttcctgggagtttctgcccacactgactca

SEQ ID NO: 272027 - DNA, 120 bp, Artificial Sequence
  ENSG00000127603_272 (sequence is synthesized)
gtgcctatttcagaagaaggaacacctgttctagaggaggcttcctccactggaatgtggatcaaggaggaccttgattccctagtatttggcataaaagaggtgaccagcacagtgcta

SEQ ID NO: 272028 - DNA, 120 bp, Artificial Sequence
  ENSG00000127603_273 (sequence is synthesized)
tgctctttgcttttggcctttggagatgcctccttatataattaaagtgaaaatcaaggttggatatgaaaacaaagggcatgcccaaagcagtcttcccctgcaacctgacctgtcacc

SEQ ID NO: 272029 - DNA, 120 bp, Artificial Sequence
  ENSG00000127603_274 (sequence is synthesized)
ccttttgctatataacattgctccattttgcaaaattccttcccatgatggaaaaagtaaatgaactagttgtcccacttagaactatcaaatgaacactgaataattaaaatgagattt

SEQ ID NO: 272030 - DNA, 120 bp, Artificial Sequence
  ENSG00000127603_275 (sequence is synthesized)
tcatcttgagaatttcccttttttgaatgtgtaaatgggatgggtaagcatcatctttaaacttgggcactggccagccacgaagtcagaagatcaaaaccagcctggccaacatggtga

SEQ ID NO: 272031 - DNA, 120 bp, Artificial Sequence
  ENSG00000127603_276 (sequence is synthesized)
agctactcgggagtctgaaacaggagaatagcttgaacctggtaggtggaggtttcattgagccacgacagtgcatgcactccagcctgggcaacagacagagtgagactccatctcagg

SEQ ID NO: 272032 - DNA, 120 bp, Artificial Sequence
  ENSG00000127603_277 (sequence is synthesized)
aaaaaagaggggggaaaaggaaaaaaagaaaaaaagaaagacaggacaggctgctgagcaccactacattgagcatgatgtgtctcctgtatgtgtgtttcatgtgaagtattgttctga

SEQ ID NO: 272033 - DNA, 120 bp, Artificial Sequence
  ENSG00000127603_278 (sequence is synthesized)
caagtttcactaaccctttggagtttaagcacaaatgcacaaagggaaaagaggacgacctgtttggggttcttttttgcaaaaacaaacagtcgcatgctggacgctaacaccaagctt

SEQ ID NO: 272034 - DNA, 120 bp, Artificial Sequence
  ENSG00000127603_279 (sequence is synthesized)
acactgtgtgtgtgatacggctgagctgctccataaggctctatcttttatctgcccaaggcgtgccctgcaactctggaatgcagagcagttgctggggtgattgacctaggcacagtg

SEQ ID NO: 272035 - DNA, 120 bp, Artificial Sequence
  ENSG00000127603_280 (sequence is synthesized)
attgtgggagccgctcccctcggctccgccacgctcccctcgactgcgctccagcctggggcgcgcccggccgccgccgccttcgctgccgccacgggcccgtcttcttcctccttcggc

SEQ ID NO: 272036 - DNA, 120 bp, Artificial Sequence
  ENSG00000127603_281 (sequence is synthesized)
aaagaaaatcaaagaccaaaaggagaaagcctcagagcttttgcgactgtgtggtctggctataaatttagactgttgcttgaaagaagcgaaaaacctccccttcatagacttccttct

SEQ ID NO: 272037 - DNA, 120 bp, Artificial Sequence
  ENSG00000127603_282 (sequence is synthesized)
cattagaagaatgcattatttcaaaatctcctgggagcatttaaatgcaaattttgtcaagaaagcaatttgagtcttagagaagctctctagccacaacctaaagcagaagtttcttct

SEQ ID NO: 272038 - DNA, 120 bp, Artificial Sequence
  ENSG00000127603_283 (sequence is synthesized)
ttgatttgtgtgtttcttaaaaggaatctcaaccccttgccttctccctgcaacgcccccaggtcttctctgattctcacagcggactcttcccctttttgcccctgttctttcttcacc

SEQ ID NO: 272039 - DNA, 120 bp, Artificial Sequence
  ENSG00000127603_284 (sequence is synthesized)
tttggcaagcatcagtcacacatcttgaggaacctgctcacaaagtggcgcgtgtagcagccccaggtgggaatggagggacttttctatgtagtgtaatggacataaggaggcagatgt

SEQ ID NO: 272040 - DNA, 120 bp, Artificial Sequence
  ENSG00000127603_285 (sequence is synthesized)
ctgtgtgggggtgagatgtctgtgtggaggtgtttgtatgcgtgatttctgtctgggccttcttaggcctgctggtataaaataatatgggaaatgcagatgactcagcactgacacagt

SEQ ID NO: 272041 - DNA, 120 bp, Artificial Sequence
  ENSG00000127603_286 (sequence is synthesized)
caagatccccagagttagcatttctatattctctgctgtttacgaaaaatgtgcttgtgccatcaatcagcaactcatcctgcattttccgctaaaagccttttactgaaaaatgcatat

SEQ ID NO: 272042 - DNA, 120 bp, Artificial Sequence
  ENSG00000127603_287 (sequence is synthesized)
acttcaaacttattccccttctttttgtaaactgagctcattagcagctgacaccaaactgagaactagttttgtttgtttgtttgttttagcacggaggattaaactggaaggaaatga

SEQ ID NO: 272043 - DNA, 120 bp, Artificial Sequence
  ENSG00000127603_288 (sequence is synthesized)
agaagcgggagtagagatcattcggtttgcatgctttcacttctcagctgtcactgtgccatggtgcctactttcagccagtgaaccaactcaactgggccgggcatgaacgcttacaag

SEQ ID NO: 272044 - DNA, 120 bp, Artificial Sequence
  ENSG00000127603_289 (sequence is synthesized)
ctgctggtgacactgcaattagcaaatacttcgggttaattcctgaaaacctgatgcagaaaatcagattttcttctaagcttgtaatgatgctttgcaaaggtttccttaaggcttgaa

SEQ ID NO: 272045 - DNA, 120 bp, Artificial Sequence
  ENSG00000127603_290 (sequence is synthesized)
atagtattcactattttccatttagctttaaagcatactgtattcagaagttgatatccacaatctttcttttaggaaaacaaattagcatgccaagaatatgaatttttaattgagcag

SEQ ID NO: 272046 - DNA, 120 bp, Artificial Sequence
  ENSG00000127603_291 (sequence is synthesized)
taacactttgtctgttttcctacctctccttttggtgcagaggcagtggtgtgaccattaaaagtgatttttatcccaatagaaagtatattggcccggcgcagtgtctcatgcctgtat

SEQ ID NO: 272047 - DNA, 120 bp, Artificial Sequence
  ENSG00000127603_292 (sequence is synthesized)
ttccagacatgtccttccaacccagagttcccctcctttttcagctacgcttcttgttccctgtctcatctccttttttcccatcactccccaagtccctgtggtctggctgacactgtt

SEQ ID NO: 272048 - DNA, 120 bp, Artificial Sequence
  ENSG00000127603_293 (sequence is synthesized)
ctggtcacattctactggctaaatccaacagagttttttcagtctttattttgtttgacatgtaacctagctggctcttcatcccttcccaaaacttcccttttgacttctgtgtccttt

SEQ ID NO: 272049 - DNA, 120 bp, Artificial Sequence
  ENSG00000127603_294 (sequence is synthesized)
aatctttgtgttttcctctgatctctctgaccgttcctttttagcctttttagctggttcctcttccctgcctattcatcagtgttgttccctgacgtctcattcttgatgctctcctca

SEQ ID NO: 272050 - DNA, 120 bp, Artificial Sequence
  ENSG00000127603_295 (sequence is synthesized)
ctctgctaagatttatctggtctaacagctttagctattacctataaagcttctgcatctttttcatcttcagcactatcatctcctaaagtccagacatacagtaaactagaagcagtt

SEQ ID NO: 272051 - DNA, 120 bp, Artificial Sequence
  ENSG00000127603_296 (sequence is synthesized)
ctaaaatttccactttatctttgcccccttgcctgacgtcatttgtccattccagatctgccccccctttcctcattcagaggcctgtgatgtctggagttcctccttttcctcacatct

SEQ ID NO: 272052 - DNA, 120 bp, Artificial Sequence
  ENSG00000127603_297 (sequence is synthesized)
agccactcaccagggcttgtcagtcccactttcaaaatacctcttggttccatctttcctgccctggctctggccctcaccatgttttgcctcagttgctgcaatggtttcttaacctgt

SEQ ID NO: 272053 - DNA, 120 bp, Artificial Sequence
  ENSG00000127603_298 (sequence is synthesized)
cttctcactgctagccactccccatcccacacttacccccacccccacatcactccatgttttacactgaagccagagtgatagctgtaaagcatgggtctgatcatgtctcttacctgg

SEQ ID NO: 272054 - DNA, 120 bp, Artificial Sequence
  ENSG00000127603_299 (sequence is synthesized)
atcgaaatccttcagctgccccctgttgctctcagaataaatggccaacccttagcctgacacagaagcctttcgtgatctgtctcctgcctgcctctccaaccctgcctcttgccattc

SEQ ID NO: 272055 - DNA, 120 bp, Artificial Sequence
  ENSG00000127603_300 (sequence is synthesized)
ctctgattgcatcctctgcccagccagtgagtggaggggtcctggtcacagcactgtcaggcatccctgtctctgtttgggttgcaccctcttccaggactgccttcccaccatttgttg

SEQ ID NO: 272056 - DNA, 120 bp, Artificial Sequence
  ENSG00000127603_301 (sequence is synthesized)
actgtttcttcattgctcagtgtgtcagtccgtttgcattgctataaaggaattcctgagactgggtaatttataaagaaaataggtttattttggcttacggttctgcaggctgtacgg

SEQ ID NO: 272057 - DNA, 120 bp, Artificial Sequence
  ENSG00000127603_302 (sequence is synthesized)
gaagcatggtgccaatatctgcttctggtgagggcttcaggaagcttagaatcatggtggaaggcaaaggggagccagcgtgttacatggcaagagagggagagagagaaagaggaggag

SEQ ID NO: 272058 - DNA, 120 bp, Artificial Sequence
  ENSG00000127603_303 (sequence is synthesized)
atagcaggctccttttaaacagccagttctcatgtgaactaacagcaagaactcactcattaccatggggagggcaccaaggccattcatgaggaatttgcccccataactcaatcacat

SEQ ID NO: 272059 - DNA, 86 bp, Artificial Sequence
  ENSG00000127603_304 (sequence is synthesized)
catccctcagtaactcaactcaggcaccagcctccacacagcctttcctgccaccacaggccgtaaagtacccatcctagctcttc

SEQ ID NO: 272060 - DNA, 120 bp, Artificial Sequence
  ENSG00000127603_305 (sequence is synthesized)
cctgccaccacaggccgtaaagtacccatcctagctcttcctttgcccccataagagtaaaaatacaatatttaactctttttcctattttttgtgtttaacagacatttatggaggaga

SEQ ID NO: 272061 - DNA, 120 bp, Artificial Sequence
  ENSG00000127603_306 (sequence is synthesized)
cctgtgttaggatgcttcattcctgctaattgaggatgagcactttccaaatgcctatcaaaaaaaattatattccattttcaaaaaccgtgttggttttgaaccaaaatctctcatttt

SEQ ID NO: 272062 - DNA, 120 bp, Artificial Sequence
  ENSG00000127603_307 (sequence is synthesized)
tgaaactcacttttcttacattgacagacagtagctgtactccatattctttggtatgattggtatgaaattacgaggtggttaagcttattttttaacagtggcctttccattgttttg

SEQ ID NO: 272063 - DNA, 120 bp, Artificial Sequence
  ENSG00000127603_308 (sequence is synthesized)
agttgagttaacgtgtcatcagctcactaaggtaggacagaattgcttggagatatgtaggcagcaggtaagtatgtgctgggaggatcagtacttttggaattagtacacctccgtatc

SEQ ID NO: 272064 - DNA, 120 bp, Artificial Sequence
  ENSG00000127603_309 (sequence is synthesized)
taaatattgccaagtcccgtatttcttttctcagttattgactggatattattataaagatcttctaggtttatacatacagctatttctctttgtatactaaccagctgttctaatctt

SEQ ID NO: 272065 - DNA, 120 bp, Artificial Sequence
  ENSG00000127603_310 (sequence is synthesized)
tttgttgtggtggtttctcatatgtggctgatcccaccttttcctcctgatgcttagaggcccagagcccatcggacttgagatgtggtcactctctgacctcatctctatagatgccaa

SEQ ID NO: 272066 - DNA, 120 bp, Artificial Sequence
  ENSG00000127603_311 (sequence is synthesized)
gtgtcaggtaccctgttacatctgaaaactagtcccatatctacctagatagtagtagtttgtatttaagttttaagataggagatatttcagagctgtcacttcacatctgacaaagtt

SEQ ID NO: 272067 - DNA, 120 bp, Artificial Sequence
  ENSG00000127603_312 (sequence is synthesized)
cctagggggatgaaggtacctttggaaacaattatatctattgactgaccacttgcccacaaagagatggtcattgtgagcctgagtggctcccaggctagagaggcctggggaaactgt

SEQ ID NO: 272068 - DNA, 120 bp, Artificial Sequence
  ENSG00000127603_313 (sequence is synthesized)
gttgaagccccaacagacactgtgcctgctctgagctgggctacaaatggggcccaggagcactgaggagacatcaggctcagtggtcttccctggaaagccatgctaggtgtggccata

SEQ ID NO: 272069 - DNA, 120 bp, Artificial Sequence
  ENSG00000127603_314 (sequence is synthesized)
actgacagtgaactatacttgtgttttagcttcttttgggaccagggtcagggacatagaaggatctgaaacaggtctcctaaaatatatcaacagctcgtcaagattctctaaagtcct

SEQ ID NO: 272070 - DNA, 120 bp, Artificial Sequence
  ENSG00000127603_315 (sequence is synthesized)
aagaaaaatctatgattggcaaagaggatttagattgcactaagaaacacaggaaggtccatgtttcattagtatatccaaaatgtcctcaaagtacaccaaatctaccccatgctgcag

SEQ ID NO: 272071 - DNA, 120 bp, Artificial Sequence
  ENSG00000127603_316 (sequence is synthesized)
tctcctgaggagtgctgggtgaatctgctttgaatataacctagggcatttagttaataaagctccatataatcttatgcctgcttgttggattttgttttcttgttttttgtttttaat

SEQ ID NO: 272072 - DNA, 120 bp, Artificial Sequence
  ENSG00000127603_317 (sequence is synthesized)
tcttgttttttgtttttaattatctatgagagaaatgaattaacaagaacaacatagcatggagagttagttcatagtttataaaaccacatccctggccgggcgtggtggctcacacct

SEQ ID NO: 272073 - DNA, 75 bp, Artificial Sequence
  ENSG00000127603_318 (sequence is synthesized)
gatcacccctctctactaataacacaaaaattagctgggcttggtagcgcatgcctgtaatcccaactactaggg

SEQ ID NO: 272074 - DNA, 65 bp, Artificial Sequence
  ENSG00000127603_319 (sequence is synthesized)
taacacaaaaattagctgggcttggtagcgcggggtcggaggttgcagtgagccatgatcgcgcc

SEQ ID NO: 272075 - DNA, 120 bp, Artificial Sequence
  ENSG00000127603_320 (sequence is synthesized)
ggtgctttgaactgtgaagaaaaactgacactagctaagaatacactgcaggctgtaagtctctgactgttttgtccaacatctgtgtcacatgtttcctgcttctcaccctctgctcta

SEQ ID NO: 272076 - DNA, 120 bp, Artificial Sequence
  ENSG00000127603_321 (sequence is synthesized)
attgttgaagttagcaatcgaggaatccagatgtattatttccctttttttttttttttggaattgcagtagacttcttggctccctctgtcctagtgagtggggcaatggaagttttcc

SEQ ID NO: 272077 - DNA, 120 bp, Artificial Sequence
  ENSG00000127603_322 (sequence is synthesized)
tggtaaaatctttctagggagtaagtctccaagcttatcactgctggcttctaggtgaggtggtatgaaaaattgggtcctatagtttgtgtccatttattcaccaaatattaattttat

SEQ ID NO: 272078 - DNA, 120 bp, Artificial Sequence
  ENSG00000127603_323 (sequence is synthesized)
ggctgtgttggcattggggccctattcagagatgtttttagtgcccctagtaagctctcagtaaatgctaaatctgattgacccagttctgagtcttaacttgctagtgagcaattgtat

SEQ ID NO: 272079 - DNA, 120 bp, Artificial Sequence
  ENSG00000127603_324 (sequence is synthesized)
tctggttagagaaatcattcagtactcacacagaacttgtgacctccttgagaggaagaatgttcacggagaagaacatgatgataaagatggaattttgtggatgcaccttaggtgggg

SEQ ID NO: 272080 - DNA, 120 bp, Artificial Sequence
  ENSG00000127603_325 (sequence is synthesized)
catgggaaagtgcctctggctgcaaccgctggattaaattcagatgaggtaattgtccattttgattctgggaagggtctaaagagtaaagtgagatttgcagggctgacctggtggtga

SEQ ID NO: 272081 - DNA, 80 bp, Artificial Sequence
  ENSG00000127616_0 (sequence is synthesized)
gccgggagcggaagggcgggctggcgcgcgcacgaggccgggcaggcggcggaagctggagaggccgccgcggtgctgag

SEQ ID NO: 272082 - DNA, 120 bp, Artificial Sequence
  ENSG00000127616_1 (sequence is synthesized)
agcgggggcgcgggtggcgcgcgtgtgtgtgaagggggggcggtggccgaggcgggcgggcgcgcgcgcgaggcttcccctcgtttggcggcggcggcggcttctttgtttcgtgaagag

SEQ ID NO: 272083 - DNA, 120 bp, Artificial Sequence
  ENSG00000127616_2 (sequence is synthesized)
ggcggcggcttctttgtttcgtgaagagaagcgagacgcccattctgcccccggccccgcgcggaggggcgggggaggcgccgggaagtcgacggcgccggcggctcctgcaggaggcca

SEQ ID NO: 272084 - DNA, 120 bp, Artificial Sequence
  ENSG00000127616_3 (sequence is synthesized)
ctgtctgcagctcccgtgaagatgtccactccagacccacccctgggcggaactcctcggccaggtccttccccgggccctggcccttcccctggagccatgctgggccctagcccgggt

SEQ ID NO: 272085 - DNA, 120 bp, Artificial Sequence
  ENSG00000127616_4 (sequence is synthesized)
ccctcgccgggctccgcccacagcatgatggggcccagcccagggccgccctcagcaggacaccccatccccacccaggggcctggagggtaccctcaggacaacatgcaccagatgcac

SEQ ID NO: 272086 - DNA, 120 bp, Artificial Sequence
  ENSG00000127616_5 (sequence is synthesized)
aagcccatggagtccatgcatgagaagggcatgtcggacgacccgcgctacaaccagatgaaaggaatggggatgcggtcagggggccatgctgggatggggcccccgcccagccccatg

SEQ ID NO: 272087 - DNA, 120 bp, Artificial Sequence
  ENSG00000127616_6 (sequence is synthesized)
gaccagcactcccaaggttacccctcgcccctgggtggctctgagcatgcctctagtccagttccagccagtggcccgtcttcggggccccagatgtcttccgggccaggaggtgccccg

SEQ ID NO: 272088 - DNA, 120 bp, Artificial Sequence
  ENSG00000127616_7 (sequence is synthesized)
ctggatggtgctgacccccaggccttggggcagcagaaccggggcccaaccccatttaaccagaaccagctgcaccagctcagagctcagatcatggcctacaagatgctggccaggggg

SEQ ID NO: 272089 - DNA, 120 bp, Artificial Sequence
  ENSG00000127616_8 (sequence is synthesized)
cagcccctccccgaccacctgcagatggcggtgcagggcaagcggccgatgcccgggatgcagcagcagatgccaacgctacctccaccctcggtgtccgcaacaggacccggccctggc

SEQ ID NO: 272090 - DNA, 120 bp, Artificial Sequence
  ENSG00000127616_9 (sequence is synthesized)
cctggccctggccccggcccgggtcccggcccggcacctccaaattacagcaggcctcatggtatgggagggcccaacatgcctcccccaggaccctcgggcgtgccccccgggatgcca

SEQ ID NO: 272091 - DNA, 120 bp, Artificial Sequence
  ENSG00000127616_10 (sequence is synthesized)
ggccagcctcctggagggcctcccaagccctggcctgaaggacccatggcgaatgctgctgcccccacgagcacccctcagaagctgattcccccgcagccaacgggccgcccttccccc

SEQ ID NO: 272092 - DNA, 120 bp, Artificial Sequence
  ENSG00000127616_11 (sequence is synthesized)
gcgccccctgccgtcccacccgccgcctcgcccgtgatgccaccgcagacccagtcccccgggcagccggcccagcccgcgcccatggtgccactgcaccagaagcagagccgcatcacc

SEQ ID NO: 272093 - DNA, 120 bp, Artificial Sequence
  ENSG00000127616_12 (sequence is synthesized)
cccatccagaagccgcggggcctcgaccctgtggagatcctgcaggagcgcgagtacaggctgcaggctcgcatcgcacaccgaattcaggaacttgaaaaccttcccgggtccctggcc

SEQ ID NO: 272094 - DNA, 120 bp, Artificial Sequence
  ENSG00000127616_13 (sequence is synthesized)
ggggatttgcgaaccaaagcgaccattgagctcaaggccctcaggctgctgaacttccagaggcagctgcgccaggaggtggtggtgtgcatgcggagggacacagcgctggagacagcc

SEQ ID NO: 272095 - DNA, 120 bp, Artificial Sequence
  ENSG00000127616_14 (sequence is synthesized)
ctcaatgctaaggcctacaagcgcagcaagcgccagtccctgcgcgaggcccgcatcactgagaagctggagaagcagcagaagatcgagcaggagcgcaagcgccggcagaagcaccag

SEQ ID NO: 272096 - DNA, 120 bp, Artificial Sequence
  ENSG00000127616_15 (sequence is synthesized)
gaatacctcaatagcattctccagcatgccaaggatttcaaggaatatcacagatccgtcacaggcaaaatccagaagctgaccaaggcagtggccacgtaccatgccaacacggagcgg

SEQ ID NO: 272097 - DNA, 120 bp, Artificial Sequence
  ENSG00000127616_16 (sequence is synthesized)
gagcagaagaaagagaacgagcggatcgagaaggagcgcatgcggaggctcatggctgaagatgaggaggggtaccgcaagctcatcgaccagaagaaggacaagcgcctggcctacctc

SEQ ID NO: 272098 - DNA, 120 bp, Artificial Sequence
  ENSG00000127616_17 (sequence is synthesized)
ttgcagcagacagacgagtacgtggctaacctcacggagctggtgcggcagcacaaggctgcccaggtcgccaaggagaaaaagaagaaaaagaaaaagaagaaggcagaaaatgcagaa

SEQ ID NO: 272099 - DNA, 120 bp, Artificial Sequence
  ENSG00000127616_18 (sequence is synthesized)
ggacagacgcctgccattgggccggatggcgagcctctggacgagaccagccagatgagcgacctcccggtgaaggtgatccacgtggagagtgggaagatcctcacaggcacagatgcc

SEQ ID NO: 272100 - DNA, 120 bp, Artificial Sequence
  ENSG00000127616_19 (sequence is synthesized)
cccaaagccgggcagctggaggcctggctcgagatgaacccggggtatgaagtagctccgaggtctgatagtgaagaaagtggctcagaagaagaggaagaggaggaggaggaagagcag

SEQ ID NO: 272101 - DNA, 120 bp, Artificial Sequence
  ENSG00000127616_20 (sequence is synthesized)
ccgcaggcagcacagcctcccaccctgcccgtggaggagaagaagaagattccagatccagacagcgatgacgtctctgaggtggacgcgcggcacatcattgagaatgccaagcaagat

SEQ ID NO: 272102 - DNA, 120 bp, Artificial Sequence
  ENSG00000127616_21 (sequence is synthesized)
gtcgatgatgaatatggcgtgtcccaggcccttgcacgtggcctgcagtcctactatgccgtggcccatgctgtcactgagagagtggacaagcagtcagcgcttatggtcaatggtgtc

SEQ ID NO: 272103 - DNA, 120 bp, Artificial Sequence
  ENSG00000127616_22 (sequence is synthesized)
ctcaaacagtaccagatcaaaggtttggagtggctggtgtccctgtacaacaacaacctgaacggcatcctggccgacgagatgggcctggggaagaccatccagaccatcgcgctcatc

SEQ ID NO: 272104 - DNA, 120 bp, Artificial Sequence
  ENSG00000127616_23 (sequence is synthesized)
acgtacctcatggagcacaaacgcatcaatgggcccttcctcatcatcgtgcctctctcaacgctgtccaactgggcgtacgagtttgacaagtgggccccctccgtggtgaaggtgtct

SEQ ID NO: 272105 - DNA, 120 bp, Artificial Sequence
  ENSG00000127616_24 (sequence is synthesized)
ttgtcccccagctccggagtgggaagttcaacgtcttgctgacgacgtacgagtacatcatcaaagacaagcacatcctcgccaagatccgttggaagtacatgattgtggacgaaggtc

SEQ ID NO: 272106 - DNA, 120 bp, Artificial Sequence
  ENSG00000127616_25 (sequence is synthesized)
accgcatgaagaaccaccactgcaagctgacgcaggtgctcaacacgcactatgtggcaccccgccgcctgctgctgacgggcacaccgctgcagaacaagcttcccgagctctgggcgc

SEQ ID NO: 272107 - DNA, 120 bp, Artificial Sequence
  ENSG00000127616_26 (sequence is synthesized)
tgctcaacttcctgctgcccaccatcttcaagagctgcagcaccttcgagcagtggtttaacgcaccctttgccatgaccggggaaaaggtggacctgaatgaggaggaaaccattctca

SEQ ID NO: 272108 - DNA, 120 bp, Artificial Sequence
  ENSG00000127616_27 (sequence is synthesized)
tcatccggcgtctccacaaagtgctgcggcccttcttgctccgacgactcaagaaggaagtcgaggcccagttgcccgaaaaggtggagtacgtcatcaagtgcgacatgtctgcgctgc

SEQ ID NO: 272109 - DNA, 120 bp, Artificial Sequence
  ENSG00000127616_28 (sequence is synthesized)
agcgagtgctctaccgccacatgcaggccaagggcgtgctgctgactgatggctccgagaaggacaagaagggcaaaggcggcaccaagaccctgatgaacaccatcatgcagctgcgga

SEQ ID NO: 272110 - DNA, 120 bp, Artificial Sequence
  ENSG00000127616_29 (sequence is synthesized)
agatctgcaaccacccctacatgttccagcacatcgaggagtccttttccgagcacttggggttcactggcggcattgtccaagggctggacctgtaccgagcctcgggtaaatttgagc

SEQ ID NO: 272111 - DNA, 120 bp, Artificial Sequence
  ENSG00000127616_30 (sequence is synthesized)
ttcttgatagaattcttcccaaactccgagcaaccaaccacaaagtgctgctgttctgccaaatgacctccctcatgaccatcatggaagattactttgcgtatcgcggctttaaatacc

SEQ ID NO: 272112 - DNA, 120 bp, Artificial Sequence
  ENSG00000127616_31 (sequence is synthesized)
tcaggcttgatggaaccacgaaggcggaggaccggggcatgctgctgaaaaccttcaacgagcccggctctgagtacttcatcttcctgctcagcacccgggctggggggctcggcctga

SEQ ID NO: 272113 - DNA, 120 bp, Artificial Sequence
  ENSG00000127616_32 (sequence is synthesized)
acctccagtcggcagacactgtgatcatttttgacagcgactggaatcctcaccaggacctgcaagcgcaggaccgagcccaccgcatcgggcagcagaacgaggtgcgtgtgctccgcc

SEQ ID NO: 272114 - DNA, 120 bp, Artificial Sequence
  ENSG00000127616_33 (sequence is synthesized)
tctgcaccgtcaacagcgtggaggagaagatcctagctgcagccaagtacaagctcaacgtggaccagaaggtgatccaggccggcatgttcgaccagaagtcctccagccatgagcggc

SEQ ID NO: 272115 - DNA, 120 bp, Artificial Sequence
  ENSG00000127616_34 (sequence is synthesized)
gcgccttcctgcaggccatcctggagcacgaggagcaggatgagagcagacactgcagcacgggcagcggcagtgccagcttcgcccacactgcccctccgccagcgggcgtcaaccccg

SEQ ID NO: 272116 - DNA, 120 bp, Artificial Sequence
  ENSG00000127616_35 (sequence is synthesized)
acttggaggagccacctctaaaggaggaagacgaggtgcccgacgacgagaccgtcaaccagatgatcgcccggcacgaggaggagtttgatctgttcatgcgcatggacctggaccgca

SEQ ID NO: 272117 - DNA, 120 bp, Artificial Sequence
  ENSG00000127616_36 (sequence is synthesized)
ggcgcgaggaggcccgcaaccccaagcggaagccgcgcctcatggaggaggacgagctcccctcgtggatcatcaaggacgacgcggaggtggagcggctgacctgtgaggaggaggagg

SEQ ID NO: 272118 - DNA, 120 bp, Artificial Sequence
  ENSG00000127616_37 (sequence is synthesized)
agaagatgttcggccgtggctcccgccaccgcaaggaggtggactacagcgactcactgacggagaagcagtggctcaaggccatcgaggagggcacgctggaggagatcgaagaggagg

SEQ ID NO: 272119 - DNA, 120 bp, Artificial Sequence
  ENSG00000127616_38 (sequence is synthesized)
tccggcagaagaaatcatcacggaagcgcaagcgagacagcgacgccggctcctccaccccgaccaccagcacccgcagccgcgacaaggacgacgagagcaagaagcagaagaagcgcg

SEQ ID NO: 272120 - DNA, 120 bp, Artificial Sequence
  ENSG00000127616_39 (sequence is synthesized)
ggcggccgcctgccgagaaactctcccctaacccacccaacctcaccaagaagatgaagaagattgtggatgccgtgatcaagtacaaggacagcagcagtggacgtcagctcagcgagg

SEQ ID NO: 272121 - DNA, 120 bp, Artificial Sequence
  ENSG00000127616_40 (sequence is synthesized)
tcttcatccagctgccctcgcgaaaggagctgcccgagtactacgagctcatccgcaagcccgtggacttcaagaagataaaggagcgcattcgcaaccacaagtaccgcagcctcaacg

SEQ ID NO: 272122 - DNA, 120 bp, Artificial Sequence
  ENSG00000127616_41 (sequence is synthesized)
acctagagaaggacgtcatgctcctgtgccagaacgcacagaccttcaacctggagggctccctgatctatgaagactccatcgtcttgcagtcggtcttcaccagcgtgcggcagaaaa

SEQ ID NO: 272123 - DNA, 120 bp, Artificial Sequence
  ENSG00000127616_42 (sequence is synthesized)
tcgagaaggaggatgacagtgaaggcgaggagagtgaggaggaggaagagggcgaggaggaaggctccgaatccgaatctcggtccgtcaaagtgaagatcaagcttggccggaaggaga

SEQ ID NO: 272124 - DNA, 120 bp, Artificial Sequence
  ENSG00000127616_43 (sequence is synthesized)
aggcacaggaccggctgaagggcggccggcggcggccgagccgagggtcccgagccaagccggtcgtgagtgacgatgacagtgaggaggaacaagaggaggaccgctcaggaagtggca

SEQ ID NO: 272125 - DNA, 120 bp, Artificial Sequence
  ENSG00000127616_44 (sequence is synthesized)
gcgaagaagactgagccccgacattccagtctcgaccccgagcccctcgttccagagctgagatggcataggccttagcagtaacgggtagcagcagatgtagtttcagacttggagtaa

SEQ ID NO: 272126 - DNA, 120 bp, Artificial Sequence
  ENSG00000127616_45 (sequence is synthesized)
aactgtataaacaaaagaatcttccatatttatacagcagagaagctgtaggactgtttgtgactggccctgtcctggcatcagtagcatctgtaacagcattaactgtcttaaagagag

SEQ ID NO: 272127 - DNA, 120 bp, Artificial Sequence
  ENSG00000127616_46 (sequence is synthesized)
agagagagaattccgaattggggaacacacgatacctgtttttcttttccgttgctggcagtactgttgcgccgcagtttggagtcactgtagttaagtgtggatgcatgtgcgtcaccg

SEQ ID NO: 272128 - DNA, 120 bp, Artificial Sequence
  ENSG00000127616_47 (sequence is synthesized)
tccactcctcctactgtattttattggacaggtcagactcgccgggggcccggcgagggtatgtcagtgtcactggatgtcaaacagtaataaattaaaccaacaacaaaacgcacagcc

SEQ ID NO: 272129 - DNA, 120 bp, Artificial Sequence
  ENSG00000127616_48 (sequence is synthesized)
tttcgtgaagagaagcgagacgcccattctgcccccggccccgcgcggaggggcgggggaggcgccgggaagtcgacggcgccggcggctcctgggaaaggagcctctgcttcacatttt

SEQ ID NO: 272130 - DNA, 120 bp, Artificial Sequence
  ENSG00000127616_49 (sequence is synthesized)
gatgggagcatctgaggacctcatctgtgtgatgctcctagtgcgatacctttcacgtgctaagcagctgctcagtaaacctggggagagatggggcaccttggtttcaccagctgagcg

SEQ ID NO: 272131 - DNA, 80 bp, Artificial Sequence
  ENSG00000127616_50 (sequence is synthesized)
gggtgggtggggggcccgggccgcgtggaggccgcgcgatcctctccgcgcgcgctctcgccggggtcgccggacaaagc

SEQ ID NO: 272132 - DNA, 120 bp, Artificial Sequence
  ENSG00000127616_51 (sequence is synthesized)
cgcgcgctctcgccggggtcgccggacaaagctcgcccccctcgcccggcacccctacagtcgccctcccaattacagcggctgcaacaataggcaggcgttggggcttttctggctgcg

SEQ ID NO: 272133 - DNA, 120 bp, Artificial Sequence
  ENSG00000127616_52 (sequence is synthesized)
tggtaacgggtccgacccgaatgttgcgtttttggcgaagctgcgatcggggctcagccaaacctccagatatgtccggcgtcggccggacacgggcattagcggtccccttgggctagc

SEQ ID NO: 272134 - DNA, 120 bp, Artificial Sequence
  ENSG00000127616_53 (sequence is synthesized)
catgtccaggtccctgtccttctcctggcaccagaacccatggggcccgtttcacagaggaggatactgaggccccggcaggggaagaggacttgtctggtcacgcgtgtggcctttgcc

SEQ ID NO: 272135 - DNA, 120 bp, Artificial Sequence
  ENSG00000127616_54 (sequence is synthesized)
tatccatgacacagccagcagtgtggcacgtgggctacaattccagcgtggccttcagttctgcacacgtgcgtcaaaggtggggagagttctggtggtgggtggcgctgagggctgcac

SEQ ID NO: 272136 - DNA, 120 bp, Artificial Sequence
  ENSG00000127616_55 (sequence is synthesized)
aacactggggacgtgcctaatgcccctgaactgtgtactaaaacatggctgctttggtaaattttatgttatatatgatttataatatatttttttaaatgcccagctactcaggaggct

SEQ ID NO: 272137 - DNA, 120 bp, Artificial Sequence
  ENSG00000127616_56 (sequence is synthesized)
actcaggaggctaagatgggaagatcacttgagcccaggagttaaagtccaaccagggcaatgtagcaagaccacatgtctaagaaaatttaaaaatcggctgggcgcggtggctcacgc

SEQ ID NO: 272138 - DNA, 82 bp, Artificial Sequence
  ENSG00000127616_57 (sequence is synthesized)
ctccagcctggtgacagagcgagactgcgtctcaacaacaacaaaaaagaaaatttaaaaataatttttcatcccaggtact

SEQ ID NO: 272139 - DNA, 87 bp, Artificial Sequence
  ENSG00000127616_58 (sequence is synthesized)
gaatcctctcgccttggcctcacaaagcactgggcaactgtgtctggcctaacagtagagttcttgacccaggtatggggggatgga

SEQ ID NO: 272140 - DNA, 120 bp, Artificial Sequence
  ENSG00000127616_59 (sequence is synthesized)
cctaacagtagagttcttgacccaggtatggggggatggaggagctgtttatgggtggctccgcctctcagtgcatggctggagtgacagtactggaatactggggctgtgaactgggtg

SEQ ID NO: 272141 - DNA, 84 bp, Artificial Sequence
  ENSG00000127616_60 (sequence is synthesized)
ggagtgacagtactggaatactggggctgtgaactgggtggagacagagtctcacagctgtcacccaggctggagtgcagtgga

SEQ ID NO: 272142 - DNA, 120 bp, Artificial Sequence
  ENSG00000127616_61 (sequence is synthesized)
tgattctcctgcctcagccttccgaggactgggtgctttatcccggagccaacaagggaggaaactgaggcccagggagctgggtatcccacgtgcaggctcttacctcaggtccatgct

SEQ ID NO: 272143 - DNA, 120 bp, Artificial Sequence
  ENSG00000127616_62 (sequence is synthesized)
tgcttcaggtgcctcctttgtggctcacccctgctgactccttacaaagccaggccgttggcaggcacaggaaccaggctctgaaaccccgtgctcccctgccagtggctcagttgatgt

SEQ ID NO: 272144 - DNA, 120 bp, Artificial Sequence
  ENSG00000127616_63 (sequence is synthesized)
aatcaccctgcagtgggagtgctctttgagtgcggccactgcgccccctcccgacccgcatggccctgtatgtagtggcgctggcccctaccccatggggcccacattctgaaccacagg

SEQ ID NO: 272145 - DNA, 120 bp, Artificial Sequence
  ENSG00000127616_64 (sequence is synthesized)
ctgctcattagaaatgtaccgtcaccaacccagttcccctgagaccctccacaccagcaggacaagtcccccagtcagcaagatgtgtcttctgccagaacgtgctcggcatttttctgt

SEQ ID NO: 272146 - DNA, 120 bp, Artificial Sequence
  ENSG00000127616_65 (sequence is synthesized)
gctgtagattcatatgtgtgattttgcagggaagccagattgcttttttgcaatttgcattgttcacctgccaatagtcatggggtcacgggcctgtctctgcccaaggcttgcaagagg

SEQ ID NO: 272147 - DNA, 120 bp, Artificial Sequence
  ENSG00000127616_66 (sequence is synthesized)
ctacgttgtgtggctccaactcggtgagtcagccccggggcaggacgtcaggcctgtgctctccacccagctgcgctcttccacctggagccttcctggctgctgggcgcagagtgggag

SEQ ID NO: 272148 - DNA, 120 bp, Artificial Sequence
  ENSG00000127616_67 (sequence is synthesized)
gtcttacaaggtaggtcacagccactgaggtttcctctcttgctacggaggtgcaggcggtggtgggcaggacgtccacacatacctctggacagtgaacctgagaatgctgggtctcca

SEQ ID NO: 272149 - DNA, 120 bp, Artificial Sequence
  ENSG00000127616_68 (sequence is synthesized)
gtcgcatggagtctccaggacagcctggaactccagtcacatggatccgggagtttggactgggcagggacagggcagattagctcactggggaggagacaggagtgagcatggtggcca

SEQ ID NO: 272150 - DNA, 120 bp, Artificial Sequence
  ENSG00000127616_69 (sequence is synthesized)
gcactcagaggccagctcaggcgcctgagatggggacccaggaagaggggagcctgtcagccaccaggaatgtgcagatggcggtgcaggctgcgtggttccctcaggccccggccgccg

SEQ ID NO: 272151 - DNA, 120 bp, Artificial Sequence
  ENSG00000127616_70 (sequence is synthesized)
ctggcctgcactgcttcctcttccccctgcagcgcgtgttctgcgtggtgaggtctggggacgcgccagcggccctgccagcccctttccccactacccctgtgaggacgagccctcccg

SEQ ID NO: 272152 - DNA, 120 bp, Artificial Sequence
  ENSG00000127616_71 (sequence is synthesized)
ccgtgtcactgggcagttgcagggggtgcctgtgcccctcttgccacctggccacccggctccaaaagccgagctgtgcatcctgcttcccttgcagggatccccagcagcaagacgggc

SEQ ID NO: 272153 - DNA, 81 bp, Artificial Sequence
  ENSG00000127616_72 (sequence is synthesized)
tgggaggctaagatgggagcactatgagaccccgtatctacaaaaaatttttttaattagctgagtgtggtgacacgtgcc

SEQ ID NO: 272154 - DNA, 66 bp, Artificial Sequence
  ENSG00000127616_73 (sequence is synthesized)
caagaccagcctgggcaatattatgagaccccgtatctacaaaaaatttttttaattagctgagtt

SEQ ID NO: 272155 - DNA, 120 bp, Artificial Sequence
  ENSG00000127616_74 (sequence is synthesized)
cactgcactccagcctgggcaacaggtcgagaccctgtctctaaaaataaataagtaaataaaagaaatagatggggagagtgtggaacagaggtgtcaacatcacctccgggtgaaggg

SEQ ID NO: 272156 - DNA, 120 bp, Artificial Sequence
  ENSG00000127616_75 (sequence is synthesized)
agggatttcaggagcacgttcttttctgtacagagaagatagttctttttttttggtcaagaaattcaaccattagttttttaaagacaagcttgggtggggtgcctgctgggggcagtg

SEQ ID NO: 272157 - DNA, 120 bp, Artificial Sequence
  ENSG00000127616_76 (sequence is synthesized)
ctggtctttcactgcagcccaggcaccccttgagagtcccagtgtgtgttatgccccgagccagtcaagctgaagggagagcgggtgcgggggccctcctccgtgtcccagcccggcccc

SEQ ID NO: 272158 - DNA, 120 bp, Artificial Sequence
  ENSG00000127616_77 (sequence is synthesized)
gtggctagaatcccagccatccctagctgacattcagcactgtccagccagctgctactgtggaactacagagaccaaatttatttacttcacatttcatgtattttatagggatttaat

SEQ ID NO: 272159 - DNA, 120 bp, Artificial Sequence
  ENSG00000127616_78 (sequence is synthesized)
agagcaattgcattcgcatggttcaccatatgcttacgaggtacagtcaggtgtgcgggagaagccctcctcaccccgttctctgctccccggctccctccctttccactaccctccctg

SEQ ID NO: 272160 - DNA, 120 bp, Artificial Sequence
  ENSG00000127616_79 (sequence is synthesized)
cgcccctgacagccagtggctatgggtttgcacagtgagccattgatgagagaccggcacttgactctcatttccttgttccatcagaacgctgtccaactgggcgtacgagtttgacaa

SEQ ID NO: 272161 - DNA, 120 bp, Artificial Sequence
  ENSG00000127616_80 (sequence is synthesized)
tttgacagcgactggaatcctcaccaggtaaaagcgggccgggccccaggtcgaggagaaggaagggggtgcctgcaaaacctcgaggagacggccctggcttgagggtcctccagcctc

SEQ ID NO: 272162 - DNA, 120 bp, Artificial Sequence
  ENSG00000127616_81 (sequence is synthesized)
ctccacattgtcttggaccccaggagccgggaggagctgcacccatatctccataggtcatcagggagaaaagaggcggggtcctcctgtttcccaaaatacaaacagcctttccctctg

SEQ ID NO: 272163 - DNA, 120 bp, Artificial Sequence
  ENSG00000127616_82 (sequence is synthesized)
attgggaaagcagtgtataagccatccgtcggtttggtttttcttaaatcttggaatggcacccatgaggaggtggaaagtatcctgatcaatctgcgccgtcactgtggggcggcccct

SEQ ID NO: 272164 - DNA, 120 bp, Artificial Sequence
  ENSG00000127616_83 (sequence is synthesized)
gcagtgtgccctgtgagcacacacactggcgcttgttcagacacaattgggggtaaactccatgccacttcgtttacttcctcctcttgttccataaccatgtacccctcatgggcctcg

SEQ ID NO: 272165 - DNA, 120 bp, Artificial Sequence
  ENSG00000127616_84 (sequence is synthesized)
gcatcggtggataccaggtcatgctgttacatagctacaagaatttgaaaatgagttaaacttttctctgtgtttcattataagactgataagttcttattgtttttaacatgtaaacac

SEQ ID NO: 272166 - DNA, 120 bp, Artificial Sequence
  ENSG00000127616_85 (sequence is synthesized)
cagtgacagtcaggagtcccttttcccttcctctccaaccgtgctctcttctgagcctctgccagcccatctgccttcgcacatgtatgtactgagattaacacagatgcggcgtggcct

SEQ ID NO: 272167 - DNA, 120 bp, Artificial Sequence
  ENSG00000127616_86 (sequence is synthesized)
agcatgtgcctcttccaccaagcagtgggtgtcaaccgccgagtgcacatcggaagctacccagccatctaatcggccaccaggcgtcccggcagatggccacccctggacgtctgctct

SEQ ID NO: 272168 - DNA, 120 bp, Artificial Sequence
  ENSG00000127616_87 (sequence is synthesized)
caaactctggttggcaggcatccgtcttttctgttgatcagcctggtcaccaacccagcagggtccctctttctctcagagtgcttgtgcaaacaccctaggtctgcgcagccctcagac

SEQ ID NO: 272169 - DNA, 120 bp, Artificial Sequence
  ENSG00000127616_88 (sequence is synthesized)
atggggtcgctccaccccagacattgtcctcttcgtgttctggttgctactgccaaagtggtttcactcctacgctggggtgtgaatgtaccctgcccttccctgcagcgtgagggcagc

SEQ ID NO: 272170 - DNA, 120 bp, Artificial Sequence
  ENSG00000127616_89 (sequence is synthesized)
agcgttctcagtgtgtaaattgtcgcttgtctgatgggtgaatgccgtggtggtcactggtggccccttttacgatcaggctggggtgtagcttctgcccagaccctggtgaccagccag

SEQ ID NO: 272171 - DNA, 120 bp, Artificial Sequence
  ENSG00000127616_90 (sequence is synthesized)
tttcttaggaggtggttgagttgtgtgtccccgttggcaggccggcagcaggcggaagctgcacctcagggctgggggcgcgttggggagggctggccctgccaggaagtgtgctgacag

SEQ ID NO: 272172 - DNA, 120 bp, Artificial Sequence
  ENSG00000127616_91 (sequence is synthesized)
ggcaggagggctgagcggcagacacaaggcactcctggtccccaccagctgtggcctctgccaccccatgggtgccagtcttaagtttcagagcatcactggtactcaccctggtcctgc

SEQ ID NO: 272173 - DNA, 120 bp, Artificial Sequence
  ENSG00000127616_92 (sequence is synthesized)
agctcctgggcccagagacaggatttcgtgttagcctcctcgtactgtgctggggtgatgataaaactaacaacccaggctggacgcagtggctcacacccgaaatcccaacattttggg

SEQ ID NO: 272174 - DNA, 120 bp, Artificial Sequence
  ENSG00000127616_93 (sequence is synthesized)
cttcaacctggagggctccctggtgagggcaccgctgggggttggggatgggccactcccacagctgggctttgacccaacccgcccctccttcccttctgaattgatgggttaaaaaca

SEQ ID NO: 272175 - DNA, 62 bp, Artificial Sequence
  ENSG00000127616_94 (sequence is synthesized)
cccgcccctccttcccttctgaattgatgggttaaaaacaagtcccgctagctgtgaccagg

SEQ ID NO: 272176 - DNA, 120 bp, Artificial Sequence
  ENSG00000127616_95 (sequence is synthesized)
ttaaaaaaaaaaaagaaaaaattaaaaatttccaacttgggatattttagcaattacaaaagcagtatgtatttaccgaagaaaataaagataggcacaacagaagaaatagactcagag

SEQ ID NO: 272177 - DNA, 62 bp, Artificial Sequence
  ENSG00000127616_96 (sequence is synthesized)
ctctactaaaaataccgaggagaatcgcttgaaccaggaaggtggaggttgcagtgagctga

SEQ ID NO: 272178 - DNA, 120 bp, Artificial Sequence
  ENSG00000127616_97 (sequence is synthesized)
agtgagactcggtctcaaaaaaaaaaaaatgaattagaacttggccagaacttacttcctcaatccattacgaacatttccaaattttccttcataacgttatcttcagtttgcaaatag

SEQ ID NO: 272179 - DNA, 120 bp, Artificial Sequence
  ENSG00000127616_98 (sequence is synthesized)
gcaaatagtcttctgtttaaggcctgtatttcagaaagctcccaggctttggaaatccctctcttaatcttgaaatgatgttcaggcagtgaattcctcacgaagtcgccctgaagccct

SEQ ID NO: 272180 - DNA, 120 bp, Artificial Sequence
  ENSG00000127616_99 (sequence is synthesized)
cttggtttcctgagtgcaagtgtcccgtggtgtgggcaggtttttcctgtgtgctgtgtggggcatggacaggcagacaatgtaacaggtgggagtgagctgttgagatgtgtattagaa

SEQ ID NO: 272181 - DNA, 120 bp, Artificial Sequence
  ENSG00000127616_100 (sequence is synthesized)
atgtcacacgtgtccatcgttcgcacagtcatcctgcagcttcacagacgttattgctaaggatgaggctaagcgataaagaatcagtttggttcagaggaaaaatccgtggtaaaggca

SEQ ID NO: 272182 - DNA, 120 bp, Artificial Sequence
  ENSG00000127616_101 (sequence is synthesized)
gtagagggtgggatgtggcttaggcagaactcgtggctggcggtgtcttgactctctgaagtgggaggaccctctggtgtccgacccggccttcagtcctggcgtggccgcatctgtcct

SEQ ID NO: 272183 - DNA, 120 bp, Artificial Sequence
  ENSG00000127616_102 (sequence is synthesized)
tgagcctgtggactgggtttaccaacagttgcctgtggcagagccggccaccagcccgctcataggaaaaaggaagcctgtgcctccagggagggcccacgatgggaatgcagtctgaga

SEQ ID NO: 272184 - DNA, 120 bp, Artificial Sequence
  ENSG00000127616_103 (sequence is synthesized)
aacgtgatgagagtccccttcccccgagggacacatggcggcccaggctccaccagctctgttttcatgcggcggcaggtcaggctgggcagaattgtcaggccgagggtggcacgcaca

SEQ ID NO: 272185 - DNA, 120 bp, Artificial Sequence
  ENSG00000127616_104 (sequence is synthesized)
gcacacctctccagctagtgtcagaggccaccttcccttttatgacctcctgggctcctttgggactgactggcacctcttcccccaggacctgcaagcgcaggaccgagcccaccgcat

SEQ ID NO: 272186 - DNA, 120 bp, Artificial Sequence
  ENSG00000127616_105 (sequence is synthesized)
cctggctggagctgggggcccaggccaggagcagccccaggcaaaaatcacctcccgctgctcttccctgccactcagtactttttctggaataaacatttcctcactgggtgaacacct

SEQ ID NO: 272187 - DNA, 120 bp, Artificial Sequence
  ENSG00000127616_106 (sequence is synthesized)
ttgacgagatcttcacagtcctgggatggttgctttggacaattctgtttagctttattgttgcttttagggagaggatttgccaagatcttcactccaccatttgggaaaatccacatt

SEQ ID NO: 272188 - DNA, 120 bp, Artificial Sequence
  ENSG00000127616_107 (sequence is synthesized)
tgccaagatcttcactccaccatttgggaaaatccacatttcgtttgttgcaatagctttggctttattttaatagattataatttatttattttttatttatttatttttgagacaggg

SEQ ID NO: 272189 - DNA, 89 bp, Artificial Sequence
  ENSG00000127616_108 (sequence is synthesized)
cctgggctcaagcagtctgtccacgttggcctcccatcccagccagaatttattttaacgtttatggaaaaccaactcaccaaacctat

SEQ ID NO: 272190 - DNA, 120 bp, Artificial Sequence
  ENSG00000127616_109 (sequence is synthesized)
ttattttaacgtttatggaaaaccaactcaccaaacctatgatttcatggttttcagaatgaggccaatttaaaaataagtgccttagtctgggggtgttggcccatatccataatccca

SEQ ID NO: 272191 - DNA, 90 bp, Artificial Sequence
  ENSG00000127616_110 (sequence is synthesized)
tgaagattgcttgaggccaggaatttgagaccatcctagacgacatagagaccccccatctcaacaacaaaaataaaaaaattagccagg

SEQ ID NO: 272192 - DNA, 120 bp, Artificial Sequence
  ENSG00000127616_111 (sequence is synthesized)
cattctgcccccggccccgcgcggaggggcgggggaggcgccgggaagtcgacggcgccggcggctcctggcaggagtgcagtggtgcgatccgggctcaccgcgatctccgtctcccaa

SEQ ID NO: 272193 - DNA, 72 bp, Artificial Sequence
  ENSG00000127616_112 (sequence is synthesized)
gtagctgggaccacaggcgtgtgccaccatgtccagctgattttcgtatttttagtagagatggggttcgcc

SEQ ID NO: 272194 - DNA, 120 bp, Artificial Sequence
  ENSG00000127616_113 (sequence is synthesized)
cggatcgagaaggagcgcatgcggaggctcatgggacagagggaaaagagcaggcgcgggcttgggagtcagtcctgggctcggatatttgctgatctctctgatcatcagaatgactgt

SEQ ID NO: 272195 - DNA, 120 bp, Artificial Sequence
  ENSG00000127616_114 (sequence is synthesized)
gtgacctcagtgactgagtcgctggttgggcagatattggcagcgtgttctggtgaggagggggaagtggagtggaaggggagggacagggtaagaaggcttcgggctgaagatgaggag

SEQ ID NO: 272196 - DNA, 120 bp, Artificial Sequence
  ENSG00000127616_115 (sequence is synthesized)
tggaagaccttgcagcccaggtctttgtagaccaagattagattgtggtcaacaaacacctgaccttggcctttggaaccatcagccatgtcagctaaaataaaagcagaatctggctgg

SEQ ID NO: 272197 - DNA, 120 bp, Artificial Sequence
  ENSG00000127663_0 (sequence is synthesized)
ggcccgagcggggcctgggggtgcgacgccgagggcgggggagagcgcgccgctgctcccggaccgggccgcgcacgccgcctcaggaaccatcactgttgctggaggcacctgacaaat

SEQ ID NO: 272198 - DNA, 120 bp, Artificial Sequence
  ENSG00000127663_1 (sequence is synthesized)
accatcactgttgctggaggcacctgacaaatcctagcgaatttttggagcatctccacccaggaacctcgccatccagaagtgtgcttcccgcacagctgcagccatggggtctgagga

SEQ ID NO: 272199 - DNA, 120 bp, Artificial Sequence
  ENSG00000127663_2 (sequence is synthesized)
ccacggcgcccagaaccccagctgtaaaatcatgacgtttcgcccaaccatggaagaatttaaagacttcaacaaatacgtggcctacatagagtcgcagggagcccaccgggcgggcct

SEQ ID NO: 272200 - DNA, 120 bp, Artificial Sequence
  ENSG00000127663_3 (sequence is synthesized)
ggccaagatcatccccccgaaggagtggaagccgcggcagacgtatgatgacatcgacgacgtggtgatcccggcgcccatccagcaggtggtgacgggccagtcgggcctcttcacgca

SEQ ID NO: 272201 - DNA, 120 bp, Artificial Sequence
  ENSG00000127663_4 (sequence is synthesized)
gtacaatatccagaagaaggccatgacagtgggcgagtaccgccgcctggccaacagcgagaagtactgtaccccgcggcaccaggactttgatgaccttgaacgcaaatactggaagaa

SEQ ID NO: 272202 - DNA, 120 bp, Artificial Sequence
  ENSG00000127663_5 (sequence is synthesized)
cctcacctttgtctccccgatctacggggctgacatcagcggctctttgtatgatgacgacgtggcccagtggaacatcgggagcctccggaccatcctggacatggtggagcgcgagtg

SEQ ID NO: 272203 - DNA, 120 bp, Artificial Sequence
  ENSG00000127663_6 (sequence is synthesized)
cggcaccatcatcgagggcgtgaacacgccctacctgtacttcggcatgtggaagaccaccttcgcctggcacaccgaggacatggacctgtacagcatcaactacctgcactttgggga

SEQ ID NO: 272204 - DNA, 120 bp, Artificial Sequence
  ENSG00000127663_7 (sequence is synthesized)
gcctaagtcctggtacgccatcccaccagagcacggcaagcgcctggagcggctggccatcggcttcttccccgggagctcgcagggctgcgacgccttcctgcggcataagatgaccct

SEQ ID NO: 272205 - DNA, 120 bp, Artificial Sequence
  ENSG00000127663_8 (sequence is synthesized)
catctcgcccatcatcctgaagaagtacgggatccccttcagccggatcacgcaggaggccggggaattcatgatcacatttccctacggctaccacgccggcttcaatcacgggttcaa

SEQ ID NO: 272206 - DNA, 120 bp, Artificial Sequence
  ENSG00000127663_9 (sequence is synthesized)
ctgcgcagaatctaccaacttcgccaccctgcggtggattgactacggcaaagtggccactcagtgcacgtgccggaaggacatggtcaagatctccatggacgtgttcgtgcgcatcct

SEQ ID NO: 272207 - DNA, 120 bp, Artificial Sequence
  ENSG00000127663_10 (sequence is synthesized)
gcagcccgagcgctacgagctgtggaagcagggcaaggacctcacggtgctggaccacacgcggcccacggcgctcaccagccccgagctgagctcctggagtgcatcccgggcctcgct

SEQ ID NO: 272208 - DNA, 120 bp, Artificial Sequence
  ENSG00000127663_11 (sequence is synthesized)
gaaggccaagctcctccgcaggtctcaccggaaacggagccagcccaagaagccgaagcccgaagaccccaagttccctggggagggtacggctggggcagcgctcctagaggaggctgg

SEQ ID NO: 272209 - DNA, 120 bp, Artificial Sequence
  ENSG00000127663_12 (sequence is synthesized)
gggcagcgtgaaggaggaggctgggccggaggttgaccccgaggaggaggaggaggagccgcagccactgccacacggccgggaggccgagggcgcagaagaggacgggaggggcaagct

SEQ ID NO: 272210 - DNA, 120 bp, Artificial Sequence
  ENSG00000127663_13 (sequence is synthesized)
gcggccaaccaaggccaagagcgagcggaagaagaagagcttcggcctgctgcccccacagctgccgcccccgcctgctcacttcccctcagaggaggcgctgtggctgccatccccact

SEQ ID NO: 272211 - DNA, 120 bp, Artificial Sequence
  ENSG00000127663_14 (sequence is synthesized)
ggagcccccggtgctgggcccaggccctgcagccatggaggagagccccctgccggcaccccttaatgtcgtgccccctgaggtgcccagtgaggagctagaggccaagcctcggcccat

SEQ ID NO: 272212 - DNA, 120 bp, Artificial Sequence
  ENSG00000127663_15 (sequence is synthesized)
catccccatgctgtacgtggtgccgcggccgggcaaggcagccttcaaccaggagcacgtgtcctgccagcaggcctttgagcactttgcccagaagggtccgacctggaaggaaccagt

SEQ ID NO: 272213 - DNA, 120 bp, Artificial Sequence
  ENSG00000127663_16 (sequence is synthesized)
ttcccccatggagctgacggggccagaggacggtgcagccagcagtggggcaggtcgcatggagaccaaagcccgggccggagaggggcaggcaccgtccacattttccaaattgaagat

SEQ ID NO: 272214 - DNA, 120 bp, Artificial Sequence
  ENSG00000127663_17 (sequence is synthesized)
ggagatcaagaagagccggcgccatcccctgggccggccgcccacccggtccccactgtcggtggtgaagcaggaggcctcaagtgacgaggaggcatcccctttctccggggaggaaga

SEQ ID NO: 272215 - DNA, 120 bp, Artificial Sequence
  ENSG00000127663_18 (sequence is synthesized)
tgtgagtgacccggacgccttgaggccgctgctgtctctgcagtggaagaacagggcggccagcttccaggccgagaggaagttcaacgcagcggctgcgcgcacggagccctactgcgc

SEQ ID NO: 272216 - DNA, 120 bp, Artificial Sequence
  ENSG00000127663_19 (sequence is synthesized)
catctgcacgctcttctacccctactgccaggccctacagactgagaaggaggcacccatagcctccctcggagagggctgcccggccacattaccctccaaaagccgtcagaagacccg

SEQ ID NO: 272217 - DNA, 120 bp, Artificial Sequence
  ENSG00000127663_20 (sequence is synthesized)
accgctcatccctgagatgtgcttcacctctggcggtgagaacacggagccgctgcctgccaactcctacatcggcgacgacgggaccagccccctgatcgcctgcggcaagtgctgcct

SEQ ID NO: 272218 - DNA, 120 bp, Artificial Sequence
  ENSG00000127663_21 (sequence is synthesized)
gcaggtccatgccagttgctatggcatccgtcccgagctggtcaatgaaggctggacgtgttcccggtgcgcggcccacgcctggactgcggagtgctgcctgtgcaacctgcgaggagg

SEQ ID NO: 272219 - DNA, 120 bp, Artificial Sequence
  ENSG00000127663_22 (sequence is synthesized)
tgcgctgcagatgaccaccgataggaggtggatccacgtgatctgtgccatcgcagtccccgaggcgcgcttcctgaacgtgattgagcgccaccctgtggacatcagcgccatccccga

SEQ ID NO: 272220 - DNA, 120 bp, Artificial Sequence
  ENSG00000127663_23 (sequence is synthesized)
ctgctccacgtccttccacgtgacctgcgcccacgccgcaggcgtgctcatggagccggacgactggccctatgtggtctccatcacctgcctcaagcacaagtcggggggtcacgctgt

SEQ ID NO: 272221 - DNA, 120 bp, Artificial Sequence
  ENSG00000127663_24 (sequence is synthesized)
ccaactcctgagggccgtgtccctaggccaggtggtcatcaccaagaaccgcaacgggctgtactaccgctgtcgcgtcatcggtgccgcctcgcagacctgctacgaagtgaacttcga

SEQ ID NO: 272222 - DNA, 120 bp, Artificial Sequence
  ENSG00000127663_25 (sequence is synthesized)
cgatggctcctacagcgacaacctgtaccctgagagcatcacgagtagggactgtgtccagctgggacccccttccgagggggagctggtggagctccggtggactgacggcaacctcta

SEQ ID NO: 272223 - DNA, 120 bp, Artificial Sequence
  ENSG00000127663_26 (sequence is synthesized)
caaggccaagttcatctcctccgtcaccagccacatctaccaggtggagtttgaggacgggtcccagctgacggtgaagcgtggggacatcttcaccctggaggaggagctgcccaagag

SEQ ID NO: 272224 - DNA, 120 bp, Artificial Sequence
  ENSG00000127663_27 (sequence is synthesized)
ggtccgctctcggctgtcactgagcacgggggcaccgcaggagcccgccttctcgggggaggaggccaaggccgccaagcgcccgcgtgtgggcaccccgcttgccacggaggactccgg

SEQ ID NO: 272225 - DNA, 120 bp, Artificial Sequence
  ENSG00000127663_28 (sequence is synthesized)
gcggagccaggactacgtggccttcgtggagagcctcctgcaggtgcagggccggcccggagcccccttctaggacagctggccgctcaggcgaccctcagcccggcggggaggccatgg

SEQ ID NO: 272226 - DNA, 120 bp, Artificial Sequence
  ENSG00000127663_29 (sequence is synthesized)
catgccccgggcgttcgcttgctgtgaattcctgtcctcgtgtccccgacccccgagaggccacctccaagccgcgggtgccccctagggcgacaggagccagcgggacgccgcacgcgg

SEQ ID NO: 272227 - DNA, 120 bp, Artificial Sequence
  ENSG00000127663_30 (sequence is synthesized)
ccccagactcagggagcagggccaggcgggctcgggggccggccaggggagcaccccactcaactactcagaattttaaaccatgtaagctctcttcttctcgaaaaggtgctactgcaa

SEQ ID NO: 272228 - DNA, 120 bp, Artificial Sequence
  ENSG00000127663_31 (sequence is synthesized)
tgccctactgagcaacctttgagattgtcacttctgtacataaaccacctttgtgaggctctttctataaatacatattgtttaaaaaaaagcaagaaaaaaaggaaaacaaaggaaaat

SEQ ID NO: 272229 - DNA, 120 bp, Artificial Sequence
  ENSG00000127663_32 (sequence is synthesized)
atccccaaagttgttttctagatttgtggctttaagaaaaacaaaacaaaacaaacacattgtttttctcagaaccaggattctctgagaggtcagagcatctcgctgtttttttgttgt

SEQ ID NO: 272230 - DNA, 120 bp, Artificial Sequence
  ENSG00000127663_33 (sequence is synthesized)
tgttttaaaatattatgatttggctacagaccaggcagggaaagagacccggtaattggagggtgagcctcggggggggggcaggacgccccggtttcggcacagcccggtcactcacgg

SEQ ID NO: 272231 - DNA, 120 bp, Artificial Sequence
  ENSG00000127663_34 (sequence is synthesized)
cctcgctctcgcctcaccccggctcctgggctttgatggtctggtgccagtgcctgtgcccactctgtgcctgctgggaggaggcccaggctctctggtggccgcccctgtgcacctggc

SEQ ID NO: 272232 - DNA, 120 bp, Artificial Sequence
  ENSG00000127663_35 (sequence is synthesized)
caggggaagcccgggggtctggggcctccctccgtctgcgcccacctttgcagaataaactctctcctggggtttgtctatctttgtttctctcacctgagagaaacgcaggtgttccag

SEQ ID NO: 272233 - DNA, 120 bp, Artificial Sequence
  ENSG00000127663_36 (sequence is synthesized)
aggcttccttgcagacaaagcacccctgcacctcctatggctcaggatgagggaggcccccaggcccttctggttggtagtgagtgtggacagcttcccagctcttcgggtacaaccctg

SEQ ID NO: 272234 - DNA, 120 bp, Artificial Sequence
  ENSG00000127663_37 (sequence is synthesized)
agcaggtcgggggacacagggccgaggcaggccttcggggcccctttcgcctgcttccgggcagggacgaggcctggtgtcctcgctccacccacccacgctgctgtcacctgaggggaa

SEQ ID NO: 272235 - DNA, 120 bp, Artificial Sequence
  ENSG00000127663_38 (sequence is synthesized)
tctgcttcttaggagtgggttgagctgatagagaaaaaacggccttcagcccaggctgggaagcgccttctccaggtgcctctccctcaccagctctgcacccctctggggagccttccc

SEQ ID NO: 272236 - DNA, 120 bp, Artificial Sequence
  ENSG00000127663_39 (sequence is synthesized)
caccttagctgtctcctgccccagggagggatggaggagataatttgcttatattaaaaacaaaaaatggctgaggcaggagtttgggaccagcctgggctatatagcaagaccccatca

SEQ ID NO: 272237 - DNA, 89 bp, Artificial Sequence
  ENSG00000127663_40 (sequence is synthesized)
agtttgggaccagcctgggctatatagcaagaccccatcactacaaattttttacaaattagctaggtgtggtggtgctggtgggagga

SEQ ID NO: 272238 - DNA, 120 bp, Artificial Sequence
  ENSG00000127663_41 (sequence is synthesized)
gaccctgtctccaaaaaaaaaaaaaagcaatgtttatattataaaagagtgtcctaacagtccccgggctagagaggactaaggaaaacagagagagtgttacgcaggagcaagcctttc

SEQ ID NO: 272239 - DNA, 120 bp, Artificial Sequence
  ENSG00000127663_42 (sequence is synthesized)
aaaacagagagagtgttacgcaggagcaagcctttcatttccttggtgggggaggggggcggttgccctggagagggccggggtcggggaggttggggggtgtcagccaaaacgtggagg

SEQ ID NO: 272240 - DNA, 120 bp, Artificial Sequence
  ENSG00000127663_43 (sequence is synthesized)
tgtccctctgcacgcagccctcgcccggcgtggcgctgacactgtattcttatgttgtttgaaaatgctatttatattgtaaagaagcgggcgggtgcccctgctgcccttgtcccttgg

SEQ ID NO: 272241 - DNA, 120 bp, Artificial Sequence
  ENSG00000127663_44 (sequence is synthesized)
gggtcacacccatcccctggtgggctcctgggcggcctgcgcagatgggccacagaagggcaggccggagctgcacactctccccacgaaggtatctctgtgtcttactctgtgcaaaga

SEQ ID NO: 272242 - DNA, 120 bp, Artificial Sequence
  ENSG00000127663_45 (sequence is synthesized)
cgcggcaaaacccagtgccctggtttttccccacccgagatgaaggatacgctgtattttttgcctaatgtccctgcctctaggttcataatgaattaaaggttcatgaacgctgcgaaa

SEQ ID NO: 272243 - DNA, 120 bp, Artificial Sequence
  ENSG00000127663_46 (sequence is synthesized)
gaaggccaagctcctccgcagacaaattagtctgaaagaaaacagacactggagaaagactgaggaggagaggaaaccaagtctagaaaggaagaaagagcagaccaaaaggccggggct

SEQ ID NO: 272244 - DNA, 120 bp, Artificial Sequence
  ENSG00000127663_47 (sequence is synthesized)
cgagcaccccatgcagtttccaccttcccacaaaagcagaggcaccgcacgtgccccgacacaaccgggctgtctgatctttgctgtttttctaataattataacaagcctgggcaacac

SEQ ID NO: 272245 - DNA, 120 bp, Artificial Sequence
  ENSG00000127663_48 (sequence is synthesized)
agaacccctccctgcgtatcgccgcacagaccctcccagccaggtatctggtgtccgcctggaggagaggccaaagcatctgcagcctcttggcttctgaccacaagaggccatggggac

SEQ ID NO: 272246 - DNA, 120 bp, Artificial Sequence
  ENSG00000127663_49 (sequence is synthesized)
cctcctgtgtctcgacgtctcgactccgcatggcaactcaagacccttgcagatgatagacagcgaagaaatgcgcgtggctgtgtccgtgaagctttgtttacagaccctgaaatccag

SEQ ID NO: 272247 - DNA, 120 bp, Artificial Sequence
  ENSG00000127663_50 (sequence is synthesized)
atctcatgatttttacatgctaccaaatacgataatttttctgttttgagccacttaaaaatgtgaacattggccaggcacgatcgctcacacctgtaatctctgcactttggaggccaa

SEQ ID NO: 272248 - DNA, 120 bp, Artificial Sequence
  ENSG00000127663_51 (sequence is synthesized)
gggtttgagaccagcctgggcaacatattgagatgccatctctacaaaaaatttaaaaatcagctgggtgtggtggtgtgcgcctgtggtcccaactactgagaaggctgaggcaggaag

SEQ ID NO: 272249 - DNA, 78 bp, Artificial Sequence
  ENSG00000127663_52 (sequence is synthesized)
aggtcaaatgacagagcaagaccttgtctctccaggaaaacaaacaaacaaacaaaaaaacatgtaaacactgttcct

SEQ ID NO: 272250 - DNA, 120 bp, Artificial Sequence
  ENSG00000127663_53 (sequence is synthesized)
aacaaacaaacaaacaaaaaaacatgtaaacactgttcctagcttgtgggtcgtacccagacaggctgctggcaggtctggtctttgagccaacagtggtggccttggtgtgggggcagc

SEQ ID NO: 272251 - DNA, 120 bp, Artificial Sequence
  ENSG00000127663_54 (sequence is synthesized)
ctcccccttccctttgagcagtgaccttccctctgcagccatccagtctctgctgccttgatcttgtcccagctggcgatggatggtgcccactcgagacccagccactgagcaccaagg

SEQ ID NO: 272252 - DNA, 120 bp, Artificial Sequence
  ENSG00000127663_55 (sequence is synthesized)
ttgggggcggctcagccttggccccccaccacgctctgcagaaacaggccttggaactggtttctgaaaagtcacttctggtccagaaccttctcctctaaatgggcgccttctttttca

SEQ ID NO: 272253 - DNA, 120 bp, Artificial Sequence
  ENSG00000127663_56 (sequence is synthesized)
acacgtccatctgtctgtgagtctgggactcctgggcggtctgggcatctgtctcggcctcctctgtcttccccacctcgcggcctctctcggagaatgttccctctgccccgagtgttt

SEQ ID NO: 272254 - DNA, 120 bp, Artificial Sequence
  ENSG00000127663_57 (sequence is synthesized)
tcacagcccctcctgacagccctgccaaggtgaatctgtctcttctgctcttgttctgtccttttgatttcctgcctcctgtgtgctcctcatgaagagctgcctcctggtgaggctact

SEQ ID NO: 272255 - DNA, 120 bp, Artificial Sequence
  ENSG00000127663_58 (sequence is synthesized)
ccaggcggcccccgcagcacagagctcgtgcaccccagctcccaggcccagccagacgtgctatttgcataatggttaattgattgtggctcaggctaattggtcaacagagtggattgc

SEQ ID NO: 272256 - DNA, 120 bp, Artificial Sequence
  ENSG00000127663_59 (sequence is synthesized)
caataaaccggcaccacgttccaggagtggaatgggactagaggccgtctaaattgcctgccaggaggagatgcggaagccgctgcgctcaccgctgcttggaaccttctttgcacgcag

SEQ ID NO: 272257 - DNA, 120 bp, Artificial Sequence
  ENSG00000127663_60 (sequence is synthesized)
gaagtggaccccccagaaccagcccttgcgtggcctggcctggcctccctgccccggccaccccctcacttctagtcacgacctgctcctcccaggagccccctcccgccctctcccgcg

SEQ ID NO: 272258 - DNA, 120 bp, Artificial Sequence
  ENSG00000127663_61 (sequence is synthesized)
ccgccatcctgggggctgccttcacccagcagcaagcctgaataacaaatgaagtcagcttcccaaggatataattttcttgaaagccttcagtatgtaaaacaaggctgattcactttt

SEQ ID NO: 272259 - DNA, 120 bp, Artificial Sequence
  ENSG00000127663_62 (sequence is synthesized)
gagtgagaccctagtcacccttcagcagggcagagcagcttctaaaattctgggagccagcctggctgtgaaccccgaggagggtcaggaaggttgtgggatgtgtcagatgcctgcagc

SEQ ID NO: 272260 - DNA, 120 bp, Artificial Sequence
  ENSG00000127663_63 (sequence is synthesized)
tgcgtggaaacaccttgagtcccctgtggcctctggctcagggccctgccctcccctctggaaggcagctgggggcaggatggggcactaatggggaaagcctacccgaccccccttgtg

SEQ ID NO: 272261 - DNA, 120 bp, Artificial Sequence
  ENSG00000127663_64 (sequence is synthesized)
ttcctaggtgcccctcccagactctttttggggcaggcgatgtgttccatcgttgggacggtggaaggggtgtgcgagtaatatggaaaatgaatagctgtgctccaaatgggctcaccg

SEQ ID NO: 272262 - DNA, 120 bp, Artificial Sequence
  ENSG00000127663_65 (sequence is synthesized)
ggagagttgtggagcctatggagagagcattaatgtgctggcgccttattggtgctaatcacttaaaatgtgcgcctttgttagagctttaatgagagccacttaaactgtgcattaaaa

SEQ ID NO: 272263 - DNA, 120 bp, Artificial Sequence
  ENSG00000127663_66 (sequence is synthesized)
agaggaactgcggagaggccgccggcaggccgggcggcaggcagtcatcattctcgttgaaatgcttttagtgtggagaaaagttgctggattcggcaaacccctgtactttgcaaaacc

SEQ ID NO: 272264 - DNA, 120 bp, Artificial Sequence
  ENSG00000127663_67 (sequence is synthesized)
tcaccgtggtgtctgcgtggctgggtgtcagcagaagcaccgtggccccgctctcccgcctccccgtgcgcctgggcctccgtgtgctggtgctctcgcacacagctgtgccgccttcca

SEQ ID NO: 272265 - DNA, 120 bp, Artificial Sequence
  ENSG00000127663_68 (sequence is synthesized)
ccaatgacccaatgggtgtgtgtcccgtcctggaggcgcttgaggtctgtgcaggcttctagaagggccctcgggctggccgaggctgttggtcagtcctggcaggaggtggacgcctgt

SEQ ID NO: 272266 - DNA, 120 bp, Artificial Sequence
  ENSG00000127663_69 (sequence is synthesized)
gggcttcctgtctgctgcaggcgtgacaccccacacctctgtcgtccacatggcagtacctctctaccgtcacagggcaggggacgcaggcgcagccgggagagagccggcagccctgtt

SEQ ID NO: 272267 - DNA, 120 bp, Artificial Sequence
  ENSG00000127663_70 (sequence is synthesized)
ggggagcaggtcctagtctccgcagtctgtgctggagccgggcttcacccgggagtgcccctcctggtccacatctgacccccgtcctcctgcctcctgggccggcctcctgcccgttgc

SEQ ID NO: 272268 - DNA, 120 bp, Artificial Sequence
  ENSG00000127663_71 (sequence is synthesized)
cacttgcagagtgggtggtggagcaggaagtgcccgagatgaggcggtaagtcccctccctgaactgctcttcctggcttgggcccgtctggctcccctggtgttggttccgggggcccg

SEQ ID NO: 272269 - DNA, 120 bp, Artificial Sequence
  ENSG00000127663_72 (sequence is synthesized)
gctgcttcagggaagtccctttggcacagggattgtgttgcacactgaggggcgtgggcctcagcagctgctgccgggaagccggggcatccttaccttacccgccaaatgcacgggtct

SEQ ID NO: 272270 - DNA, 120 bp, Artificial Sequence
  ENSG00000127663_73 (sequence is synthesized)
gccggggcatccttaccttacccgccaaatgcacgggtcttcaccttgtgatttggaaacattcctgaactgtgctaattaggaagcttggtttattttttatttttatttttatttttg

SEQ ID NO: 272271 - DNA, 120 bp, Artificial Sequence
  ENSG00000127663_74 (sequence is synthesized)
tgcctcggcctcccaaagtgctgagattccctgtgtgagccaccgcgcccagcctggctgtgaggtttgtgaaggcgccaagctgctggtgtgagtgcctgtttcccaggcgctgcttta

SEQ ID NO: 272272 - DNA, 120 bp, Artificial Sequence
  ENSG00000127663_75 (sequence is synthesized)
gagtgcctgtttcccaggcgctgctttaagtcagctgcagagcgcactcctagacagacagccccacacacatgtacgcagcccaccatgctgagcacggcccaacaggaagaggttgtg

SEQ ID NO: 272273 - DNA, 120 bp, Artificial Sequence
  ENSG00000127663_76 (sequence is synthesized)
agctctgaccacagctcggggtcaggcccactctgccacttcctggtggtgctggggccgagggtgagtcagttggtggcccgggcctcgatttcctcacctgtgcagtgacagtgagga

SEQ ID NO: 272274 - DNA, 120 bp, Artificial Sequence
  ENSG00000127663_77 (sequence is synthesized)
cacccgctgtgctgtgtgggggggcaggtgcacagtctcattcatggccttgaaagcaggtgcccaagggggaggcagcactgctaactcctcaccgtccctggctggtctggttctaga

SEQ ID NO: 272275 - DNA, 120 bp, Artificial Sequence
  ENSG00000127663_78 (sequence is synthesized)
acatcagctccgagaggagagcggccacactgcgtcctttccccagggtcgtgctctctcgttgactgagtgacgagagcggccacactgcgtcctttccccagggtcgtgctctctcgt

SEQ ID NO: 272276 - DNA, 120 bp, Artificial Sequence
  ENSG00000127663_79 (sequence is synthesized)
tgaccgagtgacgagagcggccacactgcatcctttccccagggtcgtgctctctcgttgaccgagtgacgagagcggccacactgcgtcctttccccagggtcgtgctctctcgttgac

SEQ ID NO: 272277 - DNA, 120 bp, Artificial Sequence
  ENSG00000127663_80 (sequence is synthesized)
cgagtgacgagagcggccacactgcatcctttccccagggtcgtgctctctcgttgactgagtgacgagagcggccacactgcatcctttccccagggtcgtgctctctcgttgactgag

SEQ ID NO: 272278 - DNA, 120 bp, Artificial Sequence
  ENSG00000127663_81 (sequence is synthesized)
tgacgagagcggccacactgcatcctttccccagggtcgtgctctctcgttgactgagtgacgagagcggccacactgcgtcctttccccagggtcgtgctctctcgttgactgagtgac

SEQ ID NO: 272279 - DNA, 120 bp, Artificial Sequence
  ENSG00000127663_82 (sequence is synthesized)
gagagcggccacactgcatcctttccccagggtcgtgctctctcgttgaccgagtgatgagagcggccacactgcgtcctttccccagggttgtgctctctcgttgaccgagtgacgaga

SEQ ID NO: 272280 - DNA, 120 bp, Artificial Sequence
  ENSG00000127663_83 (sequence is synthesized)
tctcgttgaatgagtgatgagagcggccacactgcgtcctttccccagggttgtgctctctcgttgaccgagtgacgagggcggccaccctgtgtcctttccccagggtcgtgttgtctc

SEQ ID NO: 272281 - DNA, 120 bp, Artificial Sequence
  ENSG00000127663_84 (sequence is synthesized)
gttgaccgagtgacgagagcggccacgctgcgtcctttccccagggtcatgttgtctcgttgaccgagtgacgagagcggccacaccgtgtcctctccccaggatcgtgctctctcattg

SEQ ID NO: 272282 - DNA, 120 bp, Artificial Sequence
  ENSG00000127663_85 (sequence is synthesized)
accgagcgactgtgtgggctgtggtctggtggattttgtctggggaggtcggaggagaagtctctgcatagccgtgccctgtgagggacccaagtgtatgccatgggtgggcaccttgtc

SEQ ID NO: 272283 - DNA, 120 bp, Artificial Sequence
  ENSG00000127663_86 (sequence is synthesized)
acacaagtaaccctggtccttcccctggtgaggaggcccttggctgcccctgctgctgggcagagacgagaccaggcatctgctcacatggtcactgcgcagaggccagagggtgtcacc

SEQ ID NO: 272284 - DNA, 120 bp, Artificial Sequence
  ENSG00000127663_87 (sequence is synthesized)
actgtctgccacctgcagagctcacagcagggcactatggggcggctcctgcgcatctccttccccccgacctgcaggcactggggccctgagaaccaagggcagatctgggccgtgctc

SEQ ID NO: 272285 - DNA, 120 bp, Artificial Sequence
  ENSG00000127663_88 (sequence is synthesized)
tgtgctcccacacgcccgctctccatgggaggaaagagccagcctgcccagagggcagcatcctcgctgaccccggccggctgtggcccaggagactgacgtctgtcttttcggccctag

SEQ ID NO: 272286 - DNA, 120 bp, Artificial Sequence
  ENSG00000127663_89 (sequence is synthesized)
gcttcttccccgggagctcgcagggctgcgacgccttcctgcggcataagatgaccctcatctcgcccatcatcctgaagaagtacgggatccccttcagccgggtgcgtacgggtgggg

SEQ ID NO: 272287 - DNA, 120 bp, Artificial Sequence
  ENSG00000127663_90 (sequence is synthesized)
cctgcacgcctgtgggtgaagtgggtaccgggtccaagcccaggtggccgcacataccccaggagataagctgtttaaccctggagaagtttctagaacagtgattagcatgccagagga

SEQ ID NO: 272288 - DNA, 120 bp, Artificial Sequence
  ENSG00000127663_91 (sequence is synthesized)
gggccgcatggctcagcagttagcctccagctcttccacggggaagcgaagatggcagagcttgaatctggcggggtgttaacctcccctcccaaaccaaaccaaaacttcctcctgggt

SEQ ID NO: 272289 - DNA, 120 bp, Artificial Sequence
  ENSG00000127663_92 (sequence is synthesized)
gtggccatcagaggcccctccgcaggggctgcaggggtggaagggcaggggcaggccctgctgacctggcaggaagctgccaaagaaacagagggcagggcccctcgtcccgtgcaaggt

SEQ ID NO: 272290 - DNA, 120 bp, Artificial Sequence
  ENSG00000127663_93 (sequence is synthesized)
gggaacctggttcctaccgccccaggccacaccctaagtctcaggcacccccacggcccatgtcacccggccgtggagagaactgcctgtttagaagtgacatttcgggctctcctgcac

SEQ ID NO: 272291 - DNA, 120 bp, Artificial Sequence
  ENSG00000127663_94 (sequence is synthesized)
cgtgaagactgtgaactcattcagttcactgcttcaggggctgctggtggaggctgtgatggaggagacctgaggccggggggtggggcctccctacacctgatttgatggacagctggg

SEQ ID NO: 272292 - DNA, 120 bp, Artificial Sequence
  ENSG00000127663_95 (sequence is synthesized)
gtttggtgtcccaggagcagagcaggctgtgctcagggtccagctcagcaactgcacccactcgaggcagttccttccccatggagaagcctttgtccatgggagagtctaggcctgtgt

SEQ ID NO: 272293 - DNA, 120 bp, Artificial Sequence
  ENSG00000127663_96 (sequence is synthesized)
ccccagctctgtccaggtgagaggcacgtgccaagaacctgcaaggcaggtctgggccgcagcccagctcatgaggttccacgggaagagtgatgtgcaggctcgggagcgtgctctgtg

SEQ ID NO: 272294 - DNA, 120 bp, Artificial Sequence
  ENSG00000127663_97 (sequence is synthesized)
gtgaggccctgagtgtcagccagccggaaattgcttgtgacatttcaatcaaaccgccaaagcatcagctcacacatcggggatccgctcttcctggcggggctgcaacccagaggccgc

SEQ ID NO: 272295 - DNA, 120 bp, Artificial Sequence
  ENSG00000127663_98 (sequence is synthesized)
ctcccagccgctgcaggcattcatcagacagcacagatctcgctcggagaagtgcgcatttccggcctttcctcttctcccccgtcttctggttggaacatcattcagtaccagcaaaac

SEQ ID NO: 272296 - DNA, 120 bp, Artificial Sequence
  ENSG00000127663_99 (sequence is synthesized)
cagacagatcacggcattgctcagggaagtgagaagtactgattttctggctggtttgtctaaaaccttctccaaagtggtgcttcctggaggggggtgcccatcgaaggggtgggcagg

SEQ ID NO: 272297 - DNA, 120 bp, Artificial Sequence
  ENSG00000127663_100 (sequence is synthesized)
cagtgagtggcctggactcccaggtcagcatctgtatcgcactgcagtttatctgtaaagttcctgaacctgagccaaaggtggctcaccaccagcctcagagcggctgctggcaccatg

SEQ ID NO: 272298 - DNA, 120 bp, Artificial Sequence
  ENSG00000127663_101 (sequence is synthesized)
catggtagcaggcggggtccaggcagtacggctgcgctccccaacaccgccagctggttgctggggccgggcgccagtttctccagaggctgccacagtgaaggcccctgtcccactgca

SEQ ID NO: 272299 - DNA, 120 bp, Artificial Sequence
  ENSG00000127663_102 (sequence is synthesized)
gcgaacagcaccctgtgccgcccggcctggggaccgtccttcagcctctcagacgccatgggcttgagatgaacgtcccttccagacagcagcgtgggtcccctcatctgaattcctggc

SEQ ID NO: 272300 - DNA, 120 bp, Artificial Sequence
  ENSG00000127663_103 (sequence is synthesized)
agccttcaaacaagtgactccccacactccccttataaatctttgtaatggtatttacttctaggagaaaaagccgatcaatagcagagctttttaataattaaaagtgtgtacttctgt

SEQ ID NO: 272301 - DNA, 120 bp, Artificial Sequence
  ENSG00000127663_104 (sequence is synthesized)
ctgtgcatatttactcaggagaaatgaaaacatatgtctccagaaagattggtacataagtgttcttagcagttttcttcacgagagccccaaactggaaacagcccgcacgtccatcaa

SEQ ID NO: 272302 - DNA, 120 bp, Artificial Sequence
  ENSG00000127663_105 (sequence is synthesized)
caggaggatagataaataaataaccatagatccacgcgcaaccgagtactgtttagaaatgaaaaggagcggtcgcctggtgcacaggacagtgggaacaaatctcagaaacgcacgcca

SEQ ID NO: 272303 - DNA, 77 bp, Artificial Sequence
  ENSG00000127663_106 (sequence is synthesized)
agaaaaggtgtctgggctgggtatggcggctcatgcctgcagccccagcgcttggaggggccaaagtgggagggacc

SEQ ID NO: 272304 - DNA, 120 bp, Artificial Sequence
  ENSG00000127663_107 (sequence is synthesized)
ccctgcagggctgtctgctgcacaccctgtagcccacctgcgcacaaggcacttggggctgtccacgcctgctggaaaatgacactcagctggccctttaaatcagcttcctgcagagcc

SEQ ID NO: 272305 - DNA, 68 bp, Artificial Sequence
  ENSG00000127663_108 (sequence is synthesized)
gacactcagctggccctttaaatcagcttcctgcagagccttgggacctggcccagaaagaagatgag

SEQ ID NO: 272306 - DNA, 120 bp, Artificial Sequence
  ENSG00000127663_109 (sequence is synthesized)
tggccaacatatgaaaccccgtctctactgaaaatgcaaaacttagctctgcatggcgggacgtgcctgtgatcccagctactcgggagactaaggcgggagaattgcttgaacctgggc

SEQ ID NO: 272307 - DNA, 78 bp, Artificial Sequence
  ENSG00000127663_110 (sequence is synthesized)
gatgaggagagcaaaatgcagatgttgctggggccgcgtccccactaagggctgtgcatgtggcagcgctgatgggga

SEQ ID NO: 272308 - DNA, 120 bp, Artificial Sequence
  ENSG00000127663_111 (sequence is synthesized)
tccccactaagggctgtgcatgtggcagcgctgatggggaggacgcatttgtccctgtgcactccggcctctgcacacgtgtctcgtgggcccctggaggctgggcccgcagccagtagc

SEQ ID NO: 272309 - DNA, 120 bp, Artificial Sequence
  ENSG00000127663_112 (sequence is synthesized)
acccagcagcgtcctgcctgcttttcctgcctggtttatcttcccagccgcggacacagtgcctggtgttgacattcaggcttgcgtggaggtggggctggaagcagacagatcagtctg

SEQ ID NO: 272310 - DNA, 120 bp, Artificial Sequence
  ENSG00000127663_113 (sequence is synthesized)
gcagggtgggtctgctggggagaccacaagggtgggactgatgccggccacaaagcccgggctcccatgcactggtgcgaggtgcccacgagcccggcgggcttggatgccatgcttgga

SEQ ID NO: 272311 - DNA, 120 bp, Artificial Sequence
  ENSG00000127663_114 (sequence is synthesized)
gcccacaggtgctgggccacctgggcagggctgtgcaggcagtcacagaggctcatctggaaggggagccctctttccttgttcgtggagtggagtgtgcagtgggtcacgccggcctgg

SEQ ID NO: 272312 - DNA, 120 bp, Artificial Sequence
  ENSG00000127663_115 (sequence is synthesized)
ccgggcacggccaggcgattaggaagccggcagcccgcgggtgatgcttccgaggcaccagtgactcagtccacaaacgtgggcgtaaaaggcctcatgattcaggtggagtgatggtgc

SEQ ID NO: 272313 - DNA, 120 bp, Artificial Sequence
  ENSG00000127663_116 (sequence is synthesized)
gatgcgtggtgcagtgataagtcctcctgcccgacgccttatggatcatctgacatttccagaacgcagcctcttcattaccggtgcttgtaacgatgaattaaaaatccttttacacga

SEQ ID NO: 272314 - DNA, 120 bp, Artificial Sequence
  ENSG00000127663_117 (sequence is synthesized)
ggggcctgggggtgcgacgccgagggcgggggagagcgcgccgctgctcccggaccgggccgcgcacgccgcctcaggtgtgcttcccgcacagctgcagccatggggtctgaggaccac

SEQ ID NO: 272315 - DNA, 120 bp, Artificial Sequence
  ENSG00000127663_118 (sequence is synthesized)
agatgcttgctgttccagactcggccctcccagggtcccctcgccacccgcagttccaatccaatacttttgttttttgccttttcagcctcctcgaggtggagtgccgcttaaccggga

SEQ ID NO: 272316 - DNA, 120 bp, Artificial Sequence
  ENSG00000127663_119 (sequence is synthesized)
gcatccccactcctggctttctgagtgtgtcacaagccaccgagccatggtcctcactccccgctcctccacctgccccacctcgcttccttacggattccgtcctgaaagcccccaccc

SEQ ID NO: 272317 - DNA, 120 bp, Artificial Sequence
  ENSG00000127663_120 (sequence is synthesized)
ccggccatcccctccacacagtcctgaccatgactccactttgcttctgccctgggcactgtctgcgtctccccaaggctggtcccaccagggacacccccttgcgtggctgccaccgat

SEQ ID NO: 272318 - DNA, 120 bp, Artificial Sequence
  ENSG00000127666_0 (sequence is synthesized)
cagcgcgctacggtccgcgggcaactccgcagaagccccagcccccaggaccccaggacccagtggcgcagccggcagccccggatccctgatctgcttgggcagctcctgcagaacctg

SEQ ID NO: 272319 - DNA, 120 bp, Artificial Sequence
  ENSG00000127666_1 (sequence is synthesized)
gaacagtgaatgggtaggggacactgggcgtgcagaaggcggggggcagtgtggaacatgccttcaccacctccagcttctgctgccggaggctgcacccacctgtgcccatggcctgca

SEQ ID NO: 272320 - DNA, 120 bp, Artificial Sequence
  ENSG00000127666_2 (sequence is synthesized)
caggcccatcacttcctagcgccttcgacattctaggtgcagcaggccaggacaagctcttgtatctgaagcacaaactgaagaccccacgcccaggctgccaggggcaggacctcctgc

SEQ ID NO: 272321 - DNA, 120 bp, Artificial Sequence
  ENSG00000127666_3 (sequence is synthesized)
atgccatggttctcctgaagctgggccaggaaactgaggccaggatctctctagaggcattgaaggccgatgcggtggcccggctggtggcccgccagtgggctggcgtggacagcaccg

SEQ ID NO: 272322 - DNA, 120 bp, Artificial Sequence
  ENSG00000127666_4 (sequence is synthesized)
aggacccagaggagcccccagatgtgtcctgggctgtggcccgcttgtaccacctgctggctgaggagaagctgtgccccgcctcgctgcgggacgtggcctaccaggaagccgtccgca

SEQ ID NO: 272323 - DNA, 120 bp, Artificial Sequence
  ENSG00000127666_5 (sequence is synthesized)
ccctcagctccagggacgaccaccggctgggggaacttcaggatgaggcccgaaaccggtgtgggtgggacattgctggggatccagggagcatccggacgctccagtccaatctgggct

SEQ ID NO: 272324 - DNA, 120 bp, Artificial Sequence
  ENSG00000127666_6 (sequence is synthesized)
gcctcccaccatcctcggctttgccctctgggaccaggagcctcccacgccccattgacggtgtttcggactggagccaagggtgctccctgcgatccactggcagccctgcctccctgg

SEQ ID NO: 272325 - DNA, 120 bp, Artificial Sequence
  ENSG00000127666_7 (sequence is synthesized)
ccagcaacttggaaatcagccagtcccctaccatgcccttcctcagcctgcaccgcagcccacatgggcccagcaagctctgtgacgacccccaggccagcttggtgcccgagcctgtcc

SEQ ID NO: 272326 - DNA, 120 bp, Artificial Sequence
  ENSG00000127666_8 (sequence is synthesized)
ccggtggctgccaggagcctgaggagatgagctggccgccatcgggggagattgccagcccaccagagctgccaagcagcccacctcctgggcttcccgaagtggccccagatgcaacct

SEQ ID NO: 272327 - DNA, 120 bp, Artificial Sequence
  ENSG00000127666_9 (sequence is synthesized)
ccactggcctccctgatacccccgcagctccagaaaccagcaccaactacccagtggagtgcaccgaggggtctgcaggcccccagtctctccccttgcctattctggagccggtcaaaa

SEQ ID NO: 272328 - DNA, 120 bp, Artificial Sequence
  ENSG00000127666_10 (sequence is synthesized)
acccctgctctgtcaaagaccagacgccactccaactttctgtagaagataccacctctccaaataccaagccgtgcccacctactcccaccaccccagaaacatcccctcctcctcctc

SEQ ID NO: 272329 - DNA, 120 bp, Artificial Sequence
  ENSG00000127666_11 (sequence is synthesized)
tgaccccctcctccctgttcccttcctccctggaatcatcatcggaacagaaattctataactttgtgatcctccacgccagggcagacgaacacatcgccctgcgggttcgggagaagc

SEQ ID NO: 272330 - DNA, 120 bp, Artificial Sequence
  ENSG00000127666_12 (sequence is synthesized)
tggaggcccttggcgtgcccgacggggccaccttctgcgaggatttccaggtgccggggcgcggggagctgagctgcctgcaggacgccatagaccactcagctttcatcatcctacttc

SEQ ID NO: 272331 - DNA, 120 bp, Artificial Sequence
  ENSG00000127666_13 (sequence is synthesized)
tcacctccaacttcgactgtcgcctgagcctgcaccaggtgaaccaagccatgatgagcaacctcacgcgacaggggtcgccagactgtgtcatccccttcctgcccctggagagctccc

SEQ ID NO: 272332 - DNA, 120 bp, Artificial Sequence
  ENSG00000127666_14 (sequence is synthesized)
cggcccagctcagctccgacacggccagcctgctctccgggctggtgcggctggacgaacactcccagatcttcgccaggaaggtggccaacaccttcaagccccacaggcttcaggccc

SEQ ID NO: 272333 - DNA, 120 bp, Artificial Sequence
  ENSG00000127666_15 (sequence is synthesized)
gaaaggccatgtggaggaaggaacaggacacccgagccctgcgggaacagagccaacacctggacggtgagcggatgcaggcggcggcactgaacgcagcctactcagcctacctccaga

SEQ ID NO: 272334 - DNA, 120 bp, Artificial Sequence
  ENSG00000127666_16 (sequence is synthesized)
gctacttgtcctaccaggcacagatggagcagctccaggtggcttttgggagccacatgtcatttgggactggggcgccctatggggctcgaatgccctttgggggccaggtgcccctgg

SEQ ID NO: 272335 - DNA, 120 bp, Artificial Sequence
  ENSG00000127666_17 (sequence is synthesized)
gagccccgccaccctttcccacttggccggggtgcccgcagccgccacccctgcacgcatggcaggctggcacccccccaccgccctccccacagccagcagcctttccacagtcactgc

SEQ ID NO: 272336 - DNA, 120 bp, Artificial Sequence
  ENSG00000127666_18 (sequence is synthesized)
ccttcccgcagtccccagccttccctacggcctcacccgcaccccctcagagcccagggctgcaacccctcattatccaccacgcacagatggtacagctggggctgaacaaccacatgt

SEQ ID NO: 272337 - DNA, 120 bp, Artificial Sequence
  ENSG00000127666_19 (sequence is synthesized)
ggaaccagagagggtcccaggcgcccgaggacaagacgcaggaggcagaatgaccgcgtgtccttgcctgaccacctggggaacacccctggacccaggcatcggccaggaccccataga

SEQ ID NO: 272338 - DNA, 120 bp, Artificial Sequence
  ENSG00000127666_20 (sequence is synthesized)
gcaccccggtctgccctgtgccctgtggacagtggaagatgaggtcatctgccactttcaggacattgtccgggagcccttcatttaggacaaaacgggcgcgatgatgccctggctttc

SEQ ID NO: 272339 - DNA, 120 bp, Artificial Sequence
  ENSG00000127666_21 (sequence is synthesized)
agggtggtcagaactggatacggtgtttacaattccaatctctctatttctgggtgaagggtcttggtggtgggggtattgctacggtcttttaattataataaatatttattgaatgct

SEQ ID NO: 272340 - DNA, 120 bp, Artificial Sequence
  ENSG00000127720_0 (sequence is synthesized)
atgtttgcgccacctacagcctcggagggtgagcgtcatggcggcttcttgccctctcccggtgaccccggacctgcccacgctgcgtgccaagttgcagggactgctgcagttcctgag

SEQ ID NO: 272341 - DNA, 120 bp, Artificial Sequence
  ENSG00000127720_1 (sequence is synthesized)
ggatgccctgtccatttccaatgcacataccgtggatttctacacagaatccgtgtgggaggagctggtcgacttgccaccggagacagtgctggctgcgctgaggaagtcagcgtcgga

SEQ ID NO: 272342 - DNA, 120 bp, Artificial Sequence
  ENSG00000127720_2 (sequence is synthesized)
gacggaggccctgccctcagagacgcgccccctagtggaagcagagtgggaagcaggtatgactgattttcccaaaatattttgtgaaacttctcagaagttggtgagtgtggaagcctt

SEQ ID NO: 272343 - DNA, 120 bp, Artificial Sequence
  ENSG00000127720_3 (sequence is synthesized)
tgctctggctgcgaaatactattctgtacaaaacttgggaatatgtactccttttgaacagttgcttgtagcccttcgaggaaatcaaaaccagagaattggtgaaaatcagaaggcagt

SEQ ID NO: 272344 - DNA, 120 bp, Artificial Sequence
  ENSG00000127720_4 (sequence is synthesized)
tgagtttatgaatatgaagaaatctcatgaagttcaggcaatgtcagagctgatcagcagtattgctgactactatggaataaagcaggtgattgacttgggttccggtaaaggctacct

SEQ ID NO: 272345 - DNA, 120 bp, Artificial Sequence
  ENSG00000127720_5 (sequence is synthesized)
aagctcttttttgtccttgaagtatggcttaaaagtttatggaattgattcttcaaataccaatactcatggagctgaggagagaaacagaaaattgaagaaacattggaaactctgtca

SEQ ID NO: 272346 - DNA, 120 bp, Artificial Sequence
  ENSG00000127720_6 (sequence is synthesized)
tgctcagtcaagattagatgtcaatggactagcattaaaaatggcaaaagaaaggaaagtgcaaaataaagttaaaaataaagctgatactgaggaagtgtttaacaacagtcctacaaa

SEQ ID NO: 272347 - DNA, 120 bp, Artificial Sequence
  ENSG00000127720_7 (sequence is synthesized)
tcaagaaaagatgcctacctcagctattttgcctgatttttctggctctgtaatttctaatatcagaaaccaaatggaaacccttcattctcagccacatcaagaagaaaatttgtgttt

SEQ ID NO: 272348 - DNA, 120 bp, Artificial Sequence
  ENSG00000127720_8 (sequence is synthesized)
ccttttgcctattaatgctgtagagcctacttcttcacagcaaatacccaacagagaaacatctgaagccaataaagagagaagaaaaatgacatcaaagtcaagtgaatcaaatatata

SEQ ID NO: 272349 - DNA, 120 bp, Artificial Sequence
  ENSG00000127720_9 (sequence is synthesized)
ttcacctttaacctcttttatcactgctgattcagaactccatgacattattaaagatttggaggattgtttgatggtgggtctccacacttgtggtgatctggctccaaatactttgcg

SEQ ID NO: 272350 - DNA, 120 bp, Artificial Sequence
  ENSG00000127720_10 (sequence is synthesized)
aatatttacctccaactctgaaatcaagggagtttgcagtgtgggttgttgctaccacctcttatctgaagaatttgaaaaccagcataaagaacgtactcaggaaaagtggggatttcc

SEQ ID NO: 272351 - DNA, 120 bp, Artificial Sequence
  ENSG00000127720_11 (sequence is synthesized)
aatgtgccactatttaaaggaagagagatggtgctgtggtcgtaatgccagaatgtcagcatgtttggcattggagcgggttgcagctggccaagggctgcctactgaatcactcttcta

SEQ ID NO: 272352 - DNA, 120 bp, Artificial Sequence
  ENSG00000127720_12 (sequence is synthesized)
tcgtgctgttcttcaggatattattaaagattgttatggcatcaccaaatgtgatcggcatgttggtaaaatttattccaaatgttcttcttttctggattatgtcagacggtctctaaa

SEQ ID NO: 272353 - DNA, 120 bp, Artificial Sequence
  ENSG00000127720_13 (sequence is synthesized)
gaagcttggattagatgagtccaagctgccagaaaaaattataatgaactactacgagaagtataagcctcgaatgaatgagctggaagcttttaatatgttgaaagttgtactggctcc

SEQ ID NO: 272354 - DNA, 120 bp, Artificial Sequence
  ENSG00000127720_14 (sequence is synthesized)
ctgtatagagactttgattcttctggatcgactttgttacctgaaagagcaggaagatattgcatggtctgctcttgtgaagttgtttgatcccgtgaaatctcccagatgttatgctgt

SEQ ID NO: 272355 - DNA, 120 bp, Artificial Sequence
  ENSG00000127720_15 (sequence is synthesized)
tattgccctgaagaagcagcagtgatttccattgaagcaaattattagatgtatttctctatgagacctgttgctgagattgcttttctaaacatatatgtcctgttatacaaaaatttt

SEQ ID NO: 272356 - DNA, 120 bp, Artificial Sequence
  ENSG00000127720_16 (sequence is synthesized)
taaatgactgttatgtattttaaataataaaataatggctaacaacagaaggttataatccatttttccattgtcaaagcatacattaataaaagaagaacctgtcataataatataaaa

SEQ ID NO: 272357 - DNA, 120 bp, Artificial Sequence
  ENSG00000127720_17 (sequence is synthesized)
cgggaagggaggcggaggagaaggtcccggcagacgaagcgagccccctggtggaagccagcagaaccaggtatgactgattttcccaaaatattttgtgaaacttctcagaagttggtg

SEQ ID NO: 272358 - DNA, 120 bp, Artificial Sequence
  ENSG00000127720_18 (sequence is synthesized)
tttagtcttcaggtgaatttatgcagggtcactgttattagtagaagcaactttgaatttgagcataatgtcaataacaagtacacaacaactgtatcttaggttaattatcattaaagt

SEQ ID NO: 272359 - DNA, 120 bp, Artificial Sequence
  ENSG00000127720_19 (sequence is synthesized)
gggggctctaatgattccttcttgtcctgaaagcttgttgtaatgataaaataatctatgtaaaatgtactttagaatttttgaagtattaaaatattaaatagttcagtgacgatatta

SEQ ID NO: 272360 - DNA, 64 bp, Artificial Sequence
  ENSG00000127720_20 (sequence is synthesized)
tccgtgctgacttcaagaatgaagccgcggaccttcacggtatgactgattttcccaaaatatt

SEQ ID NO: 272361 - DNA, 120 bp, Artificial Sequence
  ENSG00000127720_21 (sequence is synthesized)
taaagtttaattttagtcaaaaaatgtttgatctcctcctgtgtgtccaaagcataataacaaatgaaagtaaatatttccttcttagttgttgaaattaaacaatattaatgggatgtt

SEQ ID NO: 272362 - DNA, 120 bp, Artificial Sequence
  ENSG00000127720_22 (sequence is synthesized)
gctggtggttttatttatgatgtgctgcataacctatatcagtgtaaaaattttaagtaatttagagttatcttgacttgcttcatgaatatccttagagcgagttcttcagacacctaa

SEQ ID NO: 272363 - DNA, 120 bp, Artificial Sequence
  ENSG00000127720_23 (sequence is synthesized)
ggttgtattaaattgatgtcatgtttattttactttaggatatgtttgacaaggaaaaatatttttaaactatcgttaaatttattgttgttttttatcttgaagctgccagaaaaaatt

SEQ ID NO: 272364 - DNA, 120 bp, Artificial Sequence
  ENSG00000127720_24 (sequence is synthesized)
tttttttttttttcagaattactttcacaatgagaattagcctcagggtaacactttcgctcgtaatggaaaaattattaagtcatcctctgtgtttagcaacaaaggtttctgacagtc

SEQ ID NO: 272365 - DNA, 75 bp, Artificial Sequence
  ENSG00000127720_25 (sequence is synthesized)
ttcttccttctggtgggttcgtcttgctgacttcaagaacgaagccacagaccttcacagcacagcaagatttat

SEQ ID NO: 272366 - DNA, 120 bp, Artificial Sequence
  ENSG00000127743_0 (sequence is synthesized)
attctctcggcggcatctggggttccaggcgggcagcagctgcaggctgaccttgcagcttggcggaatggactggcctcacaacctgctgtttcttcttaccatttccatcttcctggg

SEQ ID NO: 272367 - DNA, 120 bp, Artificial Sequence
  ENSG00000127743_1 (sequence is synthesized)
gctgggccagcccaggagccccaaaagcaagaggaaggggcaagggcggcctgggcccctggcccctggccctcaccaggtgccactggacctggtgtcacggatgaaaccgtatgcccg

SEQ ID NO: 272368 - DNA, 120 bp, Artificial Sequence
  ENSG00000127743_2 (sequence is synthesized)
aggagcctgtctccctggggctacagcatcaaccacgaccccagccgtatccccgtggacctgccggaggcacggtgcctgtgtctgggctgtgtgaaccccttcaccatgcaggaggac

SEQ ID NO: 272369 - DNA, 120 bp, Artificial Sequence
  ENSG00000127743_3 (sequence is synthesized)
cgcagcatggtgagcgtgccggtgttcagccaggttcctgtgcgccgccgcctctgcccgccaccgccccgcacagggccttgccgccagcgcgcagtcatggagaccatcgctgtgggc

SEQ ID NO: 272370 - DNA, 120 bp, Artificial Sequence
  ENSG00000127743_4 (sequence is synthesized)
tgcacctgcatcttctgaatcacctggcccagaagccaggccagcagcccgagaccatcctccttgcacctttgtgccaagaaaggcctatgaaaagtaaacactgacttttgaaagcaa

SEQ ID NO: 272371 - DNA, 120 bp, Artificial Sequence
  ENSG00000127743_5 (sequence is synthesized)
ctcattctgtgaagtggcttttctttccagactgggagaggcagccttgaaatccctccattcctagagaaaacaggtcgacagactgcggcttgctgtttcttcttaccatttccatct

SEQ ID NO: 272372 - DNA, 120 bp, Artificial Sequence
  ENSG00000127743_6 (sequence is synthesized)
cagcccgagaccatcctccttgcacctttgtgccaagaaaggcctatgaaaaagtggatactggttaaaattaccccaggaagcttcggctgggttccagacacatggaaaacagacttc

SEQ ID NO: 272373 - DNA, 120 bp, Artificial Sequence
  ENSG00000127743_7 (sequence is synthesized)
gcacagacgcctctagggggagcccaagatctgcctcctgcctccctctattatgccttcataggtgggtcagaacaaagaattccttatcaacctcccgggtcccccactgccaatcac

SEQ ID NO: 272374 - DNA, 120 bp, Artificial Sequence
  ENSG00000127743_8 (sequence is synthesized)
ccacctccattctaccctctacagctgccccttatcccccaaagtcctgaaattttgcttgggtcacctgctccaggaggcagagttcccatgaagggtattaaacgtctactacactgc

SEQ ID NO: 272375 - DNA, 120 bp, Artificial Sequence
  ENSG00000127774_0 (sequence is synthesized)
agtcttccgagcaagatggcgccgcgggcatttcttccactgcccgtctgagggaacgctaagtagtgtgtccggcgccgtgttccagctccgcgttgttccgcgagaaagcgagaggcc

SEQ ID NO: 272376 - DNA, 120 bp, Artificial Sequence
  ENSG00000127774_1 (sequence is synthesized)
gagcccgggctggtgcgatggccgcggtggtggccaagcgggaagggccgccgttcatcagcgaggcggccgtgcggggcaacgccgccgtcctggattattgccggacctcggtgtcag

SEQ ID NO: 272377 - DNA, 120 bp, Artificial Sequence
  ENSG00000127774_2 (sequence is synthesized)
ttctacctgctcgcctccgtcctgctctccctgctcctcattctcaaggcgggaaggaggtggaacaaatatttcaaatcacggagacctctctttacaggaggcctcatcgggggcctc

SEQ ID NO: 272378 - DNA, 120 bp, Artificial Sequence
  ENSG00000127774_3 (sequence is synthesized)
ttcacctacgtcctgttctggacgttcctctacggcatggtgcacgtctactgaaatgggggcccgggggacttttttaaaaaaccagatcgggaggactgtggccagcaattaacacca

SEQ ID NO: 272379 - DNA, 120 bp, Artificial Sequence
  ENSG00000127774_4 (sequence is synthesized)
tgtagacttccttagttcttaagtggttgaattcgctgcttgttctgtaacgttataaataatttatatctgaagacggagagcctgtaatattcttcagattaaatgaagcgtgagaca

SEQ ID NO: 272380 - DNA, 120 bp, Artificial Sequence
  ENSG00000127774_5 (sequence is synthesized)
gcaagatggcgccgcgggcatttcttccactgcccgtctgagggaacgctaagtagtgtgtccggcgccgtgttccaggtaactgggccaccgtggccggggaacgcagacgcgccacca

SEQ ID NO: 272381 - DNA, 120 bp, Artificial Sequence
  ENSG00000127780_0 (sequence is synthesized)
atgatgggacaaaatcaaaccagcatctcagacttcctgctcctgggcctgcccatccaaccagagcagcaaaacctgtgctatgccctgttcttggccatgtatcttaccaccctcctg

SEQ ID NO: 272382 - DNA, 120 bp, Artificial Sequence
  ENSG00000127780_1 (sequence is synthesized)
gggaacctcctcatcattgtcctcattcgactggactcccatctccacacgcctgtgtatttgtttctcagcaacttgtccttctctgacctctgcttttcctcagtcacaatgcccaaa

SEQ ID NO: 272383 - DNA, 120 bp, Artificial Sequence
  ENSG00000127780_2 (sequence is synthesized)
ttgctgcagaacatgcagaaccaagacccatccatcccctatgcagactgcctgacccaaatgtacttcttcttgtatttttcggatctagagagcttcctccttgtggccatggcctat

SEQ ID NO: 272384 - DNA, 120 bp, Artificial Sequence
  ENSG00000127780_3 (sequence is synthesized)
gaccgctatgtggccatctgcttccccatgcactacaccgccatctgcttcctcctgcactacaccgccatcatgagccccatgctctgtctctccgtggtggcgctgtcctgggtgctg

SEQ ID NO: 272385 - DNA, 120 bp, Artificial Sequence
  ENSG00000127780_4 (sequence is synthesized)
gccatgttacacactttactcatggccaggttgtgtttttgtgcagacaatgtgatcccccactttttctgtgatatgtctgctctgctgaagctggcctgctctgacactcgagttaat

SEQ ID NO: 272386 - DNA, 120 bp, Artificial Sequence
  ENSG00000127780_5 (sequence is synthesized)
gaatgggtgatatttatcatgggagggctcattcttgtcatcccattcctactcatccttgggtcctatgcaagaattgtctcctccatcctcaaggtcccttcttctaagggtatctgc

SEQ ID NO: 272387 - DNA, 120 bp, Artificial Sequence
  ENSG00000127780_6 (sequence is synthesized)
aaggccttctctacttgtggctcccacctctctgtggtgtcactgttctatgggaccgttattggtctctacttatgcccatcagctaatagttctactctaaaggacactgtcatggct

SEQ ID NO: 272388 - DNA, 120 bp, Artificial Sequence
  ENSG00000127780_7 (sequence is synthesized)
atgatgtacactgtggtgacccctatgctgacccccttcatctacagcctgaggaacagagacatgaagggagccctggaaagggtcatttgtaaaaggaaaaatcccttccttctatga

SEQ ID NO: 272389 - DNA, 120 bp, Artificial Sequence
  ENSG00000127804_0 (sequence is synthesized)
acaagatggcggcgcgctgggagcgtatcatctgcgtttctaggagcttcgctatgcggctgctttaagattctagggttgtacaggcccacgccagacacgacgtctggcaggaacctc

SEQ ID NO: 272390 - DNA, 120 bp, Artificial Sequence
  ENSG00000127804_1 (sequence is synthesized)
ggcctcagagatggctctgagtaaatcaatgcatgcaagaaatagatacaaggacaaacctcctgactttgcatatctggcatccaaatatccagattttaagcagcatgttcagataaa

SEQ ID NO: 272391 - DNA, 120 bp, Artificial Sequence
  ENSG00000127804_2 (sequence is synthesized)
tctgaatggaagagtgagccttaattttaaagaccccgaagcagtcagagctctgacgtgtactctcctaagggaagattttggactttctattgatattccattggagagactaattcc

SEQ ID NO: 272392 - DNA, 120 bp, Artificial Sequence
  ENSG00000127804_3 (sequence is synthesized)
cacagttcccttgagactcaactatattcactgggtagaagatctgatcggtcaccaggattctgacaaaagtactctccgaagaggaattgacataggcacgggggcatcttgcatcta

SEQ ID NO: 272393 - DNA, 120 bp, Artificial Sequence
  ENSG00000127804_4 (sequence is synthesized)
ccccttacttggagcaaccttgaatggctggtatttcctcgcaacagaagtggatgatatgtgtttcaactatgcaaagaaaaatgtggaacagaataacttatctgatctcataaaagt

SEQ ID NO: 272394 - DNA, 120 bp, Artificial Sequence
  ENSG00000127804_5 (sequence is synthesized)
ggtgaaagtgccacagaagacactcctgatggatgctcttaaagaagaatctgagataatctatgacttttgcatgtgcaaccctcccttttttgccaatcaattggaagccaagggagt

SEQ ID NO: 272395 - DNA, 120 bp, Artificial Sequence
  ENSG00000127804_6 (sequence is synthesized)
aaactcacgaaatcctcgaagacctccgcctagttctgttaatacaggaggcatcacagagatcatggcagaaggaggtgaattagagtttgttaaaaggatcatccatgacagtctaca

SEQ ID NO: 272396 - DNA, 120 bp, Artificial Sequence
  ENSG00000127804_7 (sequence is synthesized)
acttaaaaaaagattaagatggtatagctgcatgctgggaaagaaatgcagcctggcgcctctgaaggaggagcttcgcatacaaggggttcccaaagtaacgtacactgaattctgtca

SEQ ID NO: 272397 - DNA, 120 bp, Artificial Sequence
  ENSG00000127804_8 (sequence is synthesized)
aggtcggacaatgagatgggccttagcttggagtttttatgatgatgtcacagtaccatcaccaccaagtaagcgaagaaaattagagaaaccgagaaaacccataacattcgtggtgct

SEQ ID NO: 272398 - DNA, 120 bp, Artificial Sequence
  ENSG00000127804_9 (sequence is synthesized)
ggcgtccgtgatgaaggaattatccctcaaagcatcacctctgcgctcggagacggcggaaggcatagtcgttgtcacgacatggattgaaaaaattctcactgatttgaaggtccagca

SEQ ID NO: 272399 - DNA, 120 bp, Artificial Sequence
  ENSG00000127804_10 (sequence is synthesized)
taaacgagttccctgtggaaaagaggaagtcagccttttcctaacggccatagaaaactcctggattcatttaaggagaaagaaaagagagcgtgtgagacagctgagagaagttccccg

SEQ ID NO: 272400 - DNA, 120 bp, Artificial Sequence
  ENSG00000127804_11 (sequence is synthesized)
agctcctgaggacgtcattcaggccttggaagagaaaaagcccacccccaaagagtctggcaatagccaagaactggccaggggcccccaggagaggaccccctgtgggcctgctctgcg

SEQ ID NO: 272401 - DNA, 120 bp, Artificial Sequence
  ENSG00000127804_12 (sequence is synthesized)
ggaaggcgaggctgccgctgtggagggcccgtgcccgagccaggagtccctgtcccaggaggaaaacccggaacccacggaggatgaaaggagtgaggaaaagggaggggtggaggtttt

SEQ ID NO: 272402 - DNA, 120 bp, Artificial Sequence
  ENSG00000127804_13 (sequence is synthesized)
ggaaagttgtcaaggctctagcaacggagcccaggaccaagaggcttctgagcagttcggcagcccagtggctgaaagggggaaacgtctcccaggagtggccggacagtacctgtttaa

SEQ ID NO: 272403 - DNA, 120 bp, Artificial Sequence
  ENSG00000127804_14 (sequence is synthesized)
gtgtttgataaacgttaagaaggaggtggacgatgccttagtggagatgcactgggttgagggccagaacagggatctgatgaaccagctttgcacctacatacgtaaccaaattttcag

SEQ ID NO: 272404 - DNA, 120 bp, Artificial Sequence
  ENSG00000127804_15 (sequence is synthesized)
gcttgttgcagttaactagaaacctcctgcacagttggaaacgtgttgatagtaacttgctttggagtggcctgtggggtggcaagaggaatcctaccagcggcccattagtagcacgat

SEQ ID NO: 272405 - DNA, 120 bp, Artificial Sequence
  ENSG00000127804_16 (sequence is synthesized)
gtggaattatcttcgaaaacaaaaacctatgaatctgtcccccacctccccccgcctccttcccgctttttgagttacagggagtcgtagtgtggtcatttacaaggaggaattgtggtc

SEQ ID NO: 272406 - DNA, 120 bp, Artificial Sequence
  ENSG00000127804_17 (sequence is synthesized)
atcagtaacaacagaaagccctcagtaaactcccgagggattgcaagctggctcaagctggcccctcagctctggactgcctctgcaaggtcagaagggttgtttgtggagtctgggctg

SEQ ID NO: 272407 - DNA, 120 bp, Artificial Sequence
  ENSG00000127804_18 (sequence is synthesized)
ggcagcactgcctagaatatcatgctgtctctgtcacccaagggtgtttcttgaggaggggtggctctctctgcctccagctggaggccctggtaccctgttctaggtcactcttcaaga

SEQ ID NO: 272408 - DNA, 120 bp, Artificial Sequence
  ENSG00000127804_19 (sequence is synthesized)
tggggcctaccttgcatcaatcccacaaagggagctgtatggtgggtggtggggaatctgggagagaaaccttagtaatgctgggaaggagcagcagagtctggggaccacccggtaaat

SEQ ID NO: 272409 - DNA, 120 bp, Artificial Sequence
  ENSG00000127804_20 (sequence is synthesized)
ggcacattcctgacacctggctgttttgatgttgcttatttcagaagcagaattaggtaagcaaaactccccggtgtgactgaggcacacagaaggcacccatacccccacctccagcct

SEQ ID NO: 272410 - DNA, 120 bp, Artificial Sequence
  ENSG00000127804_21 (sequence is synthesized)
gttgacagtaccattttgtagcagttttactactgtgtgatttttgtttggacatctgaagtagagcttgttttgtttttaaataagaatattcacaaattaaaaaccagcggtcctatt

SEQ ID NO: 272411 - DNA, 120 bp, Artificial Sequence
  ENSG00000127804_22 (sequence is synthesized)
tgaatcctggggttagctgagtgagcggctgatgatagaaatgagaaatagaacaaaatagtatgtgccgtaggtagcttaagaaagtctcagatattttgttgctgatcaaatactgtt

SEQ ID NO: 272412 - DNA, 120 bp, Artificial Sequence
  ENSG00000127804_23 (sequence is synthesized)
aatgccagggttcagtagccgtccccccggaaaggggtgaccttttgctgtgcttgatgttgcatcagcagcctagggttctgtttagactaaaatcttggccagagctccttgccatct

SEQ ID NO: 272413 - DNA, 120 bp, Artificial Sequence
  ENSG00000127804_24 (sequence is synthesized)
gctaagaagactggggctgagtagttaagccagccttctgagaggtggctgttggtcaggacgggaagctggtgaccttggcatgtcttggcagcagctagatcaggccctcggcagaga

SEQ ID NO: 272414 - DNA, 120 bp, Artificial Sequence
  ENSG00000127804_25 (sequence is synthesized)
cacaggaagcggaactgctgtgccttaacttggctgtggagctggagctggagaaggcagcatactgaccagtggctttttgattgattgtttgttatgaggtggagttttactcttgtt

SEQ ID NO: 272415 - DNA, 70 bp, Artificial Sequence
  ENSG00000127804_26 (sequence is synthesized)
tgattgattgtttgttatgaggtggagttttactcttgttgtctaggctggagtgccgtggtgcgatctt

SEQ ID NO: 272416 - DNA, 60 bp, Artificial Sequence
  ENSG00000127804_27 (sequence is synthesized)
tgggatttcaccatgttggccaggctaatctcgaactcatgaactcccagcctctgacca

SEQ ID NO: 272417 - DNA, 120 bp, Artificial Sequence
  ENSG00000127804_28 (sequence is synthesized)
gtgagccactactcccagcctctgaccagtgttcttaacctggtccgtggacctccagagagtccatgtacctcctagagttacttctaaaagctctgtgagcatgtgtgtgtgtgtgtg

SEQ ID NO: 272418 - DNA, 120 bp, Artificial Sequence
  ENSG00000127804_29 (sequence is synthesized)
tgtgtgtgtgtattttttttcctggagagagggttcccagaaccctcagacacagacaaaggggtcaataacccactaaggattaagaatcattattctagtccaagcattcatgtgtca

SEQ ID NO: 272419 - DNA, 120 bp, Artificial Sequence
  ENSG00000127804_30 (sequence is synthesized)
ggctgcaaaaaacaatacccagggtcacacagagccaagactcaattcaggaccgtggattcccctggtctagaaattttctgctgtgccagcccacaccaccccactgtccttacctcg

SEQ ID NO: 272420 - DNA, 120 bp, Artificial Sequence
  ENSG00000127804_31 (sequence is synthesized)
agtgaatattacatttgagtcatttgctgggcccaaacctagtttccttggtataattttaggataattgtttaagtggcaactattcattcagtaagtagtaagtacttattgtttgct

SEQ ID NO: 272421 - DNA, 120 bp, Artificial Sequence
  ENSG00000127804_32 (sequence is synthesized)
tgtttcattatgaaagagtggcacatgctcattaaagatttggaaaaatgaaagtcaaaacaacaaaatcaccccgagtcccaaccttctgtaacataaccactcttggcattggcgtgt

SEQ ID NO: 272422 - DNA, 120 bp, Artificial Sequence
  ENSG00000127804_33 (sequence is synthesized)
tcctttctagtctctctgtagacggggtgtgtgagtgtgtgggtttaactttggttgtcctcatgctgcgtattcagttttgtattctggtcctttgttcatttaacatcttacaagtat

SEQ ID NO: 272423 - DNA, 120 bp, Artificial Sequence
  ENSG00000127804_34 (sequence is synthesized)
ttgtccatgttgtaacagtagtgtattagcttacactccttgcctgttcaaaatgtctttcaggcacagcactggcctttaagcctgtgtcgtagggatttccagagaatgctctgtgta

SEQ ID NO: 272424 - DNA, 120 bp, Artificial Sequence
  ENSG00000127804_35 (sequence is synthesized)
ttgaagcacagaaggtgtttctgtgtctcagtgtgtttctgtccctaggtttaaggcttcatgtcatggaggagattttatagatgtcaagctaatgaccttagagttttaaaaaatccg

SEQ ID NO: 272425 - DNA, 76 bp, Artificial Sequence
  ENSG00000127804_36 (sequence is synthesized)
gaccttagagttttaaaaaatccgtgacaggctgagatgggcgcatcgcatgaggtcgggagtttgagaccagcct

SEQ ID NO: 272426 - DNA, 82 bp, Artificial Sequence
  ENSG00000127804_37 (sequence is synthesized)
tgagcaggccagctttcagtctggagccgagtgccttctgtgcatttggatgtttccatttccttccctgagaagattttct

SEQ ID NO: 272427 - DNA, 120 bp, Artificial Sequence
  ENSG00000127804_38 (sequence is synthesized)
catttggatgtttccatttccttccctgagaagattttcttaggctacctagtgagagaacattgaaaatatttttaaaggacatctaagcattgttttggtcatgcatatgctttataa

SEQ ID NO: 272428 - DNA, 120 bp, Artificial Sequence
  ENSG00000127804_39 (sequence is synthesized)
ttgtgtgttgtttcatagcatatacctctggtacaggtgggcaagtttttctttgaagaaatgggttattgactcatatgtcataaccttgagtgttactctcccggtgtccagaggtca

SEQ ID NO: 272429 - DNA, 120 bp, Artificial Sequence
  ENSG00000127804_40 (sequence is synthesized)
cattcatgttgcggggttggtatgaaattaaatcttggtgatgtgaccctacattctcttctggtccctagaatcggcttctggtctcctgataactgaagtggagacagaagttgagcc

SEQ ID NO: 272430 - DNA, 120 bp, Artificial Sequence
  ENSG00000127804_41 (sequence is synthesized)
tgttgcccaggcaaactaaagctgcttttgttcttcggaatctgctttgcctccgtcagcctgcttccttccccacacatgctggccgcactgtccccactccagacctctgctgtgtgt

SEQ ID NO: 272431 - DNA, 120 bp, Artificial Sequence
  ENSG00000127804_42 (sequence is synthesized)
cctgggcagggccgcgttttggcagtaccctttcaactcatcctaagcttcgtgtagattactttagtatatattttttataaaacataaagcctttcctctcgatggaaatcaaagctt

SEQ ID NO: 272432 - DNA, 120 bp, Artificial Sequence
  ENSG00000127804_43 (sequence is synthesized)
accatgtgagcactcgaacttctaagttgtgacaggaataacaaaactgcaaggagtggaaaagatggaaaagcctgtgggaaatccgaggccttttgaaagaagggagctgatgacttc

SEQ ID NO: 272433 - DNA, 120 bp, Artificial Sequence
  ENSG00000127804_44 (sequence is synthesized)
acgaccagctcctggagcccctcctttctgctgaagccgcggcatttccctccgtggccacacgagggcacccttggcccttttatcaaagcgccttcacttccccgtgggaatggagac

SEQ ID NO: 272434 - DNA, 120 bp, Artificial Sequence
  ENSG00000127804_45 (sequence is synthesized)
aagtctgtccacggtgttttcttgaaatacccagttgctacccagatttgtatttttatgtaaacaaatacattttcacagaaataaaatttgaaaaataaaagtagaaagagaaaaaaa

SEQ ID NO: 272435 - DNA, 72 bp, Artificial Sequence
  ENSG00000127804_46 (sequence is synthesized)
ttcaaacagtaactttccaaaagccaggagtaataccaagatctccaagaaagcagctgggttcagaagagg

SEQ ID NO: 272436 - DNA, 120 bp, Artificial Sequence
  ENSG00000127804_47 (sequence is synthesized)
caggcagatcacaaggatcagatgtggccgcccagcagttgtgcacataggaggagaaggggccaggtgggaaaagggagcaagaggcaggaaagagcacagacttcgacgttcagacct

SEQ ID NO: 272437 - DNA, 120 bp, Artificial Sequence
  ENSG00000127804_48 (sequence is synthesized)
ccagttccattccttgcacagggaatccctgacatcgtcatccgtctcctgtgcctttccgctgggtcagcctcctcccaccaagcttctgacccactgtcatccgcagctgccactcta

SEQ ID NO: 272438 - DNA, 120 bp, Artificial Sequence
  ENSG00000127804_49 (sequence is synthesized)
gctgcagagctcgactgggctctggtttctcagaagagctcagaggacctggctcctccctctttgcttctgaactgcatttctttccttattactcagtgtccacacccacggtggctg

SEQ ID NO: 272439 - DNA, 120 bp, Artificial Sequence
  ENSG00000127804_50 (sequence is synthesized)
ataaaatttgaaaaataaaagtagaaagagaaaaaaacactagccatggtctctttacctggtataatccctttcgactttttaatgtttttttaatggtcccagctgactgttttttct

SEQ ID NO: 272440 - DNA, 120 bp, Artificial Sequence
  ENSG00000127804_51 (sequence is synthesized)
aaaaaaaaaaaaagcagctgggttcagtgttctgttgttgacccttgtttggggttcctctggttggctggctaccatgcatgtcgtgtgttgcttatatcagaaggtgagggttctgtg

SEQ ID NO: 272441 - DNA, 120 bp, Artificial Sequence
  ENSG00000127804_52 (sequence is synthesized)
tggtgtagatgctgtcggttagccggccttgcttctcacaaggggcgtttctggggagaacgctggggtctgtgtgggctcaaggaggatcccgtctccccttatgtttctggtacagga

SEQ ID NO: 272442 - DNA, 120 bp, Artificial Sequence
  ENSG00000127804_53 (sequence is synthesized)
aaaaatctgcccctttctcccgtcacctttcatgccagacaaaagccccagtgagtaatggtgacctacccaggtccagctagcagctctccattcctgagtggcctggggcagaacagg

SEQ ID NO: 272443 - DNA, 120 bp, Artificial Sequence
  ENSG00000127804_54 (sequence is synthesized)
tgcgagctcctggatcccaagtctgattccctttccctgtcttcccgcttatctgctaagcttgtttattggggaccactaagcaaagtgaatgattattcctgtctttaacgaggaggg

SEQ ID NO: 272444 - DNA, 120 bp, Artificial Sequence
  ENSG00000127804_55 (sequence is synthesized)
gtggagttccctctccatcttcacccacttctgggaggctttcagggactcaacaccccacactgatagcacttccccaggcctggcccagccagccaaagaggaggaccaggccacttc

SEQ ID NO: 272445 - DNA, 120 bp, Artificial Sequence
  ENSG00000127804_56 (sequence is synthesized)
tcaacctagctgatgcttggcagctttgtgaccttggatacaccttctcttgggaggtcagaccccatgatcccagctcttccagctatgacatcatgtgaggctgcaattttttttttt

SEQ ID NO: 272446 - DNA, 120 bp, Artificial Sequence
  ENSG00000127804_57 (sequence is synthesized)
ttttttttgagacagtatcttgctatgttgcccaggctggccttgaaatcctgggctcaggcgattctcctgtctcagcctcccacgtagctggaacttagggcgtgagccaccgcgccc

SEQ ID NO: 272447 - DNA, 120 bp, Artificial Sequence
  ENSG00000127804_58 (sequence is synthesized)
agcttctggaaaggacatgaatggggaggtggaacttgattggacctgttctgtgagttcaggagaggtcctctgacaactcacttggggtggggaaaggaggtaaagagtcctgtggaa

SEQ ID NO: 272448 - DNA, 120 bp, Artificial Sequence
  ENSG00000127804_59 (sequence is synthesized)
acttttggctgtggggaccccatttcactgatgattgaatgggtccacctctgtcaaaggaattcagagtcccactcatcattcagactgggggaatcaggctcagttgactggcccagc

SEQ ID NO: 272449 - DNA, 120 bp, Artificial Sequence
  ENSG00000127804_60 (sequence is synthesized)
cttaaatccactgaatttgtttttatctctacatagaaaaacggaattacagttgcttctcactgtccaatggggattggttcctggagcctccctgaatacctgtccatggatgatgct

SEQ ID NO: 272450 - DNA, 120 bp, Artificial Sequence
  ENSG00000127804_61 (sequence is synthesized)
caaatcccttacatgtaacctatgcacatcctcaggtatcctttaactcatctctgcgctactcaaatacctcataccatgtaaatgctgtgtaaatagttcttgtgctgtgttggtttt

SEQ ID NO: 272451 - DNA, 120 bp, Artificial Sequence
  ENSG00000127804_62 (sequence is synthesized)
taaatttgtattattttttcttgtatattttccatttttttttcctgaatatttttgatccacggttagttgcctccatgggtgcggacccacggacacggaggctgcaccttctgaaat

SEQ ID NO: 272452 - DNA, 120 bp, Artificial Sequence
  ENSG00000127804_63 (sequence is synthesized)
gagcatggcggcgccctctgggtcctcgtgtcgtcctgtctctggtgctgcatccagcacggtggcgaacagcagaactaatcttttgcaagttatcacagtggagtggagttccgctct

SEQ ID NO: 272453 - DNA, 120 bp, Artificial Sequence
  ENSG00000127804_64 (sequence is synthesized)
gtttgcttttgccccgctctggcttaccagaggtcccctggccttggccacagcatacctagcctagtgcttggcacctcaggcacacaataaatatttatgaaatggatcttctctggt

SEQ ID NO: 272454 - DNA, 120 bp, Artificial Sequence
  ENSG00000127804_65 (sequence is synthesized)
ttacaaggaggaattgtggtcatcagtaacaacagaaagccctcagtaaactcccgagggattgcaagctggctcaagctggcccctcagctctggactgcctctgcaagaatcggcttc

SEQ ID NO: 272455 - DNA, 120 bp, Artificial Sequence
  ENSG00000127804_66 (sequence is synthesized)
ctggccagactgaatgattttccgggcagtgacagaacagcatctgttgcttctcacagttccctcccaggtgtggttggcttcttgttgcctggagattcccagctgaagtgtctgcac

SEQ ID NO: 272456 - DNA, 120 bp, Artificial Sequence
  ENSG00000127804_67 (sequence is synthesized)
tcataagttttgcgagatcaaattctttgtaaacttttctactgggtatttgttgttgtacaaaagaagctggctacagatacaggttgagcatccttaatccgaaaatccgaaatgctt

SEQ ID NO: 272457 - DNA, 120 bp, Artificial Sequence
  ENSG00000127804_68 (sequence is synthesized)
caaaatctgcaacctttgagcactgatgtgttgctcaaaggcaatgtgcgttggagcgttccagatttgggggttagggatgttcagcctgtaaatatagtgcacatatttcaaaatctg

SEQ ID NO: 272458 - DNA, 120 bp, Artificial Sequence
  ENSG00000127804_69 (sequence is synthesized)
atagtggtgaaagtgccacagaagacactcctgatggatgctcttaaagaagaatctgagataatctatgacttttgcatgtgcaaccctcccttttttgccaatcaattggaagccaag

SEQ ID NO: 272459 - DNA, 120 bp, Artificial Sequence
  ENSG00000127824_0 (sequence is synthesized)
gcagttctcactgagacctgtcaccccgactcaacgtgagacgcaccgcccggactcaccatgcgtgaatgcatctcagtccacgtggggcaggcaggtgtccagatgggcaatgcctgc

SEQ ID NO: 272460 - DNA, 120 bp, Artificial Sequence
  ENSG00000127824_1 (sequence is synthesized)
tgggagctctattgcttggaacatgggattcagcctgatgggcagatgcccagtgacaagaccattggtggaggggacgactccttcaccaccttcttctgtgaaactggtgctggaaaa

SEQ ID NO: 272461 - DNA, 120 bp, Artificial Sequence
  ENSG00000127824_2 (sequence is synthesized)
cacgtaccccgggcagtttttgtggatctggagcctacggtcattgatgagatccgaaatggcccataccgacagctcttccacccagagcagctcatcactgggaaagaggatgctgcc

SEQ ID NO: 272462 - DNA, 120 bp, Artificial Sequence
  ENSG00000127824_3 (sequence is synthesized)
aacaactatgcccgtggtcactataccattggcaaggagatcattgacccagtgctggatcggatccgcaagctgtctgaccagtgcacaggacttcagggcttcctggtgttccacagc

SEQ ID NO: 272463 - DNA, 120 bp, Artificial Sequence
  ENSG00000127824_4 (sequence is synthesized)
tttggtgggggcactggctctggcttcacctcactcctgatggagcggctctctgttgactatggcaagaaatccaagctggaattctccatctacccagccccccaggtgtctacagcc

SEQ ID NO: 272464 - DNA, 120 bp, Artificial Sequence
  ENSG00000127824_5 (sequence is synthesized)
gtggtcgagccctacaactctatcctgaccacccacaccaccctggagcactcagactgtgccttcatggtggacaacgaagcaatctatgacatctgccgccgcaacctagacatcgag

SEQ ID NO: 272465 - DNA, 120 bp, Artificial Sequence
  ENSG00000127824_6 (sequence is synthesized)
cgcccaacctacaccaacctcaatcgcctcattagccaaattgtctcctccatcacagcttctctgcgctttgacggggccctcaatgtggacctgacagagttccagaccaacctggtg

SEQ ID NO: 272466 - DNA, 120 bp, Artificial Sequence
  ENSG00000127824_7 (sequence is synthesized)
ccctaccctcgcatccacttccccctggccacctatgcaccagtcatctctgcagaaaaggcataccacgagcagctgtcggtggcagagatcaccaatgcctgctttgagcctgccaac

SEQ ID NO: 272467 - DNA, 120 bp, Artificial Sequence
  ENSG00000127824_8 (sequence is synthesized)
aagtgtgatccccggcacggcaagtacatggcctgctgcctgctgtaccgtggagatgtggtgcccaaggatgtcaacgctgccattgccgccatcaagaccaagcgcagcattcagttt

SEQ ID NO: 272468 - DNA, 120 bp, Artificial Sequence
  ENSG00000127824_9 (sequence is synthesized)
gtggactggtgccccacaggcttcaaggttggtatcaactaccagcctcccactgtggtgcctgggggtgacctggccaaggtgcagcgtgccgtgtgcatgctgagcaacacgaccgcc

SEQ ID NO: 272469 - DNA, 120 bp, Artificial Sequence
  ENSG00000127824_10 (sequence is synthesized)
atcgccgaggcctgggcccgcctggaccacaagttcgacctgatgtatgccaagagggcgtttgtgcactggtatgtgggtgagggcatggaggagggtgagttctccgaggcccgtgag

SEQ ID NO: 272470 - DNA, 120 bp, Artificial Sequence
  ENSG00000127824_11 (sequence is synthesized)
gatatggctgccctggagaaggattatgaggaggtgggcatcgactcctatgaggacgaggatgagggagaagaataaagcagctgcctggagcctattcactatgtttattgcaaaatc

SEQ ID NO: 272471 - DNA, 120 bp, Artificial Sequence
  ENSG00000127824_12 (sequence is synthesized)
ctttcgaaataaacagtttccttgcacggtttcttgttccctctgagtgcttgagcttctgctgccttccccttcatgctgctgctgctctgtttgctgttcatgacccttatcccttcc

SEQ ID NO: 272472 - DNA, 120 bp, Artificial Sequence
  ENSG00000127824_13 (sequence is synthesized)
atcgctgaaggtgagacctgcaaaggggttcttgccaggcccaggaagcataaccccagggactttaaattgaagtcctagggttactcagtatagggaggaaatgaggaccaaaatcca

SEQ ID NO: 272473 - DNA, 120 bp, Artificial Sequence
  ENSG00000127824_14 (sequence is synthesized)
ggcacaaactgttgaaggatgagtcttcagctcctttccaagtaggagtataatccagtggtttctgtctttgaaagttagactgctaccctgttcttcctgctgcctctacatttacca

SEQ ID NO: 272474 - DNA, 120 bp, Artificial Sequence
  ENSG00000127824_15 (sequence is synthesized)
actctggaagcaaggcttggcccaggctcctctgtgcattatgagggtttgggagtggggctgggctggcccagagttcctgggcatggagccacgtcataagcttgggggatgggaggg

SEQ ID NO: 272475 - DNA, 120 bp, Artificial Sequence
  ENSG00000127824_16 (sequence is synthesized)
aacacaggcgatctcctagagttgtttgtgccactgcacctctgagcagctttgcatagcttcctgtcttgctgctttgctggagctggggctgtgccattaaaagtcaggtcatctccc

SEQ ID NO: 272476 - DNA, 120 bp, Artificial Sequence
  ENSG00000127824_17 (sequence is synthesized)
tcttgggagggagggaacttttgagactgtgctaatggtcaggaatattttttttcagatcctttcaggaggtcatctctaactatacatggtctcgagtgtggtgctgctatggcatcc

SEQ ID NO: 272477 - DNA, 120 bp, Artificial Sequence
  ENSG00000127824_18 (sequence is synthesized)
tcagtatttgccctgactgctgatgtatcttacgctttatggagccaggtgatagagtccctcaggcccctcccctacctaaactgttctttctcgttcttgcctttcagtctgaccagt

SEQ ID NO: 272478 - DNA, 120 bp, Artificial Sequence
  ENSG00000127824_19 (sequence is synthesized)
cgtaccccgggcagtttttgtggatctggagcctacggtcattggtgagaggaagtggggacaaaattgaagggggtggagcatgactcaaagcttctccctggagagagagggtattta

SEQ ID NO: 272479 - DNA, 120 bp, Artificial Sequence
  ENSG00000127824_20 (sequence is synthesized)
cgtacttgaagctgcagaaggcaagctgatctgagactggcctgggcagctggtctgggtttctctcacactctggtatctcaggctggcaggaggatgagtccttccatgcatctggcc

SEQ ID NO: 272480 - DNA, 120 bp, Artificial Sequence
  ENSG00000127824_21 (sequence is synthesized)
gtgactcagcaccccgcgtctgagctgagagggttggtgggaacggggttcggcctcctgaagcgagctggccctctccagccgaagcccgggtgcgcggatgggcagagacagctggcg

SEQ ID NO: 272481 - DNA, 120 bp, Artificial Sequence
  ENSG00000127824_22 (sequence is synthesized)
atttggaaaccgtcaccccgccatttcggtgtgggaagagcgcgcgggccctgccggactttagtgctttaggggttaatttcgggctgacagggacggagcctaaggcagtgagcgccc

SEQ ID NO: 272482 - DNA, 120 bp, Artificial Sequence
  ENSG00000127824_23 (sequence is synthesized)
cagtaccctcaaaccttattgctggcccctgctgtctgagcttacaagcattaccgccgctatttccgtgcgggctgacacgggagatgaaagtgcgtgaatgcatctcagtccacgtgg

SEQ ID NO: 272483 - DNA, 120 bp, Artificial Sequence
  ENSG00000127824_24 (sequence is synthesized)
gggtttgaggcggacgtgagagaagaaggtggtgtgagtgtcctggtttcctggctgcccaccatcagaacctcctgcctacatttggggaattcccatcgcaagggccctaatggaaag

SEQ ID NO: 272484 - DNA, 120 bp, Artificial Sequence
  ENSG00000127824_25 (sequence is synthesized)
caggccaccatttgccacaaagccccaatgcttgctctccctgactcggctctggggttgcaggcagaagacatgagctccgccaatcggatgctccaactgggactttgaatctggagc

SEQ ID NO: 272485 - DNA, 120 bp, Artificial Sequence
  ENSG00000127824_26 (sequence is synthesized)
aagtcacggaatagcaaggctggtttaggaattcatttctgcggcggcggtggaggcgatggggccaacagcggcctctagtgtctggaggaggaagtgtcagcgctactgccgcagcgt

SEQ ID NO: 272486 - DNA, 120 bp, Artificial Sequence
  ENSG00000127824_27 (sequence is synthesized)
gatgacagcgccactgacccgcgggcggccggcgagccgcggcagattccggggtcggccccggcagacaggctgcggggctcgactctgcgggagcgcctaaggcattggcaatctggg

SEQ ID NO: 272487 - DNA, 120 bp, Artificial Sequence
  ENSG00000127824_28 (sequence is synthesized)
gctcaggctgtgcagttctgggtcctcggccgcccacaggcgtcggcgaaaggctgccgccccggccggggaccaggaagcgtcaggcagctggcaagggctccccggggacgcgccaca

SEQ ID NO: 272488 - DNA, 120 bp, Artificial Sequence
  ENSG00000127824_29 (sequence is synthesized)
gcctcacagccggcccgagtctcctgggaggcagggctggaagggcaggggtgaaggccagctgtggccgcttgggaaggaccgcctcgcctgctcccgacctaagtcagaacacctgga

SEQ ID NO: 272489 - DNA, 120 bp, Artificial Sequence
  ENSG00000127824_30 (sequence is synthesized)
tgaccggtgcctccaggacgcaggtgcaggtgagactcgccctgccacagcaccctgcatctccgcggaggccctcgggagcccagcgtgtctgctcaaaacgaggaaagaatggttaaa

SEQ ID NO: 272490 - DNA, 120 bp, Artificial Sequence
  ENSG00000127824_31 (sequence is synthesized)
aaacccaatccccgctttgggctgggaaataactgtaaagactccagagggagagcggatgtagggctgggctgcaggatggcgcccatcctgcccgggacaaggcgggtcacctctggg

SEQ ID NO: 272491 - DNA, 120 bp, Artificial Sequence
  ENSG00000127831_0 (sequence is synthesized)
acaattccctgagatctcccaggtggcagctgcctccccaagacaggctcactcaccatgaccaagctgagcgcccaagtcaaaggctctctcaacatcaccaccccggggctgcagata

SEQ ID NO: 272492 - DNA, 120 bp, Artificial Sequence
  ENSG00000127831_1 (sequence is synthesized)
tggaggatcgaggccatgcagatggtgcctgttccttccagcacctttggaagcttcttcgatggtgactgctacatcatcctggctatccacaagacagccagcagcctgtcctatgac

SEQ ID NO: 272493 - DNA, 120 bp, Artificial Sequence
  ENSG00000127831_2 (sequence is synthesized)
atccactactggattggccaggactcatccctggatgagcagggggcagctgccatctacaccacacagatggatgacttcctgaagggccgggctgtgcagcaccgcgaggtccagggc

SEQ ID NO: 272494 - DNA, 120 bp, Artificial Sequence
  ENSG00000127831_3 (sequence is synthesized)
aacgagagcgaggccttccgaggctacttcaagcaaggccttgtgatccggaaagggggcgtggcttctggcatgaagcacgtggagaccaactcctatgacgtccagaggctgctgcat

SEQ ID NO: 272495 - DNA, 120 bp, Artificial Sequence
  ENSG00000127831_4 (sequence is synthesized)
gtcaagggcaagaggaacgtggtagctggagaggtagagatgtcctggaagagtttcaaccgaggggatgttttcctcctggaccttgggaagcttatcatccagtggaatggaccggaa

SEQ ID NO: 272496 - DNA, 120 bp, Artificial Sequence
  ENSG00000127831_5 (sequence is synthesized)
agcacccgtatggagagactcaggggcatgactctggccaaggagatccgagaccaggagcggggagggcgcacctatgtaggcgtggtggacggagagaatgaattggcatccccgaag

SEQ ID NO: 272497 - DNA, 120 bp, Artificial Sequence
  ENSG00000127831_6 (sequence is synthesized)
ctgatggaggtgatgaaccacgtgctgggcaagcgcagggagctgaaggcggccgtgcccgacacggtggtggagccggcactcaaggctgcactcaaactgtaccatgtgtctgactcc

SEQ ID NO: 272498 - DNA, 120 bp, Artificial Sequence
  ENSG00000127831_7 (sequence is synthesized)
gaggggaatctggtggtgagggaagtcgccacacggccactgacacaggacctgctcagtcacgaggactgttacatcctggaccaggggggcctgaagatctacgtgtggaaagggaag

SEQ ID NO: 272499 - DNA, 120 bp, Artificial Sequence
  ENSG00000127831_8 (sequence is synthesized)
aaagccaatgagcaggagaagaagggagccatgagccatgcgctgaacttcatcaaagccaagcagtacccaccaagcacacaggtggaggtgcagaatgatggggctgagtcggccgtc

SEQ ID NO: 272500 - DNA, 120 bp, Artificial Sequence
  ENSG00000127831_9 (sequence is synthesized)
tttcagcagctcttccagaagtggacagcgtccaaccggacctcaggcctaggcaaaacccacactgtgggctccgtggccaaagtggaacaggtgaagttcgatgccacatccatgcat

SEQ ID NO: 272501 - DNA, 120 bp, Artificial Sequence
  ENSG00000127831_10 (sequence is synthesized)
gtcaagcctcaggtggctgcccagcagaagatggtagatgatgggagtggggaagtgcaggtgtggcgcattgagaacctagagctggtacctgtggattccaagtggctaggccacttc

SEQ ID NO: 272502 - DNA, 120 bp, Artificial Sequence
  ENSG00000127831_11 (sequence is synthesized)
tatgggggcgactgctacctgctgctctacacctacctcatcggcgagaagcagcattacctgctctacgtttggcagggcagccaggccagccaagatgaaattacagcatcagcttat

SEQ ID NO: 272503 - DNA, 120 bp, Artificial Sequence
  ENSG00000127831_12 (sequence is synthesized)
caagccgtcatcctggaccagaagtacaatggtgaaccagtccagatccgggtcccaatgggcaaggagccacctcatcttatgtccatcttcaagggacgcatggtggtctaccaggga

SEQ ID NO: 272504 - DNA, 120 bp, Artificial Sequence
  ENSG00000127831_13 (sequence is synthesized)
ggcacctcccgaactaacaacttggagaccgggccctccacacggctgttccaggtccagggaactggcgccaacaacaccaaggcctttgaggtcccagcgcgggccaatttcctcaat

SEQ ID NO: 272505 - DNA, 120 bp, Artificial Sequence
  ENSG00000127831_14 (sequence is synthesized)
tccaatgatgtctttgtcctcaagacccagtcttgctgctatctatggtgtgggaagggttgtagcggggacgagcgggagatggccaagatggttgctgacaccatctcccggacggag

SEQ ID NO: 272506 - DNA, 120 bp, Artificial Sequence
  ENSG00000127831_15 (sequence is synthesized)
aagcaagtggtggtggaagggcaggagccagccaacttctggatggccctgggtgggaaggccccctatgccaacaccaagagactacaggaagaaaacctggtcatcaccccccggctc

SEQ ID NO: 272507 - DNA, 120 bp, Artificial Sequence
  ENSG00000127831_16 (sequence is synthesized)
tttgagtgttccaacaagactgggcgcttcctggccacagagatccctgacttcaatcaggatgacttggaagaggatgatgtgttcctactagatgtctgggaccaggtcttcttctgg

SEQ ID NO: 272508 - DNA, 120 bp, Artificial Sequence
  ENSG00000127831_17 (sequence is synthesized)
attgggaaacatgccaacgaggaggagaagaaggccgcagcaaccactgcacaggaatacctcaagacccatcccagcgggcgtgaccctgagacccccatcattgtggtgaagcaggga

SEQ ID NO: 272509 - DNA, 120 bp, Artificial Sequence
  ENSG00000127831_18 (sequence is synthesized)
cacgagccccccaccttcacaggctggttcctggcttgggatcccttcaagtggagtaacaccaaatcctatgaggacctgaaggcggagcttggcaactctagggactggagccagatc

SEQ ID NO: 272510 - DNA, 120 bp, Artificial Sequence
  ENSG00000127831_19 (sequence is synthesized)
actgctgaggtcacaagccccaaagtggacgtgttcaatgctaacagcaacctcagttctgggcctctgcccatcttccccctggagcagctagtgaacaagcctgtagaggagctcccc

SEQ ID NO: 272511 - DNA, 120 bp, Artificial Sequence
  ENSG00000127831_20 (sequence is synthesized)
gagggtgtggaccccagcaggaaggaggaacacctgtccattgaagatttcactcaggcctttgggatgactccagctgccttctctgctctgcctcgatggaagcaacaaaacctcaag

SEQ ID NO: 272512 - DNA, 120 bp, Artificial Sequence
  ENSG00000127831_21 (sequence is synthesized)
aaagaaaaaggactattttgagaagagtagctgtggttgtaaagcagtaccctaccctgattgtagggtctcattttctcaccgatattagtcctacaccaattgaagtgaaattttgca

SEQ ID NO: 272513 - DNA, 120 bp, Artificial Sequence
  ENSG00000127831_22 (sequence is synthesized)
gatgtgcctatgagcacaaacttctgtggcaaatgccagttttgtttaataatgtacctattccttcagaaagatgataccccaaaaggagcctatggtcctcatttcaacttctaaggt

SEQ ID NO: 272514 - DNA, 120 bp, Artificial Sequence
  ENSG00000127831_23 (sequence is synthesized)
cgctagattgtttctatcctgaggtattgcatcaattttaatactcctatagttttctcttcttagaagagcacaaacactccatggaacattagagttctgaggcactaccctagcttg

SEQ ID NO: 272515 - DNA, 120 bp, Artificial Sequence
  ENSG00000127831_24 (sequence is synthesized)
tcctctatcatgactcatttttatctatggcaggtaggctgaagcactttgcaggtttacatcttccccagagtaacagcttttccttttcacatatactttccttactgccttactcag

SEQ ID NO: 272516 - DNA, 120 bp, Artificial Sequence
  ENSG00000127831_25 (sequence is synthesized)
tgggtaagttaaagggctgaaggagagttgaatggtccacaagactaccctcttaagaggtttcacaaattccaaacagtaccagtgagagcagcacttccactggggctaggcttgaga

SEQ ID NO: 272517 - DNA, 120 bp, Artificial Sequence
  ENSG00000127831_26 (sequence is synthesized)
cctaaaggcaagtatgaaatgcatatgctacttcactccctctcccaacccttaataatgaggcaaagcaagagcctagtgaaggccaatgctaggtttacaaacttacccagaagcctc

SEQ ID NO: 272518 - DNA, 120 bp, Artificial Sequence
  ENSG00000127831_27 (sequence is synthesized)
tcagatgaaaataacaggaatcaatggggactacggccagacactggtttgccattctgttccttttaagaagtaacagtgctgcaaggaagtccatgtcagaaagccaacagaaggtga

SEQ ID NO: 272519 - DNA, 120 bp, Artificial Sequence
  ENSG00000127831_28 (sequence is synthesized)
tttccacaactttgaacaggttgttacaagtatcagcaagaatgtgtccttttcagaaataacagtcaaatcaaagaaggttaataaaggctttaatttcatacacacaaaaaaactcta

SEQ ID NO: 272520 - DNA, 120 bp, Artificial Sequence
  ENSG00000127831_29 (sequence is synthesized)
tgcataatttaaaaaggaaacaaaaacaaagaaaaaccgtaaaggatacagaggaacagttctgctaaaacacagataaaagtgccgctccatacaaaacataaagaatcagaatcaaaa

SEQ ID NO: 272521 - DNA, 120 bp, Artificial Sequence
  ENSG00000127831_30 (sequence is synthesized)
gtcactctgaacataaagaaaaaaaatcatctcacaaataatgtggccacagctgccagaaaacctggtagtggctcaattaggcaaagtgtaggaatctcatttttgtttttctctcct

SEQ ID NO: 272522 - DNA, 120 bp, Artificial Sequence
  ENSG00000127831_31 (sequence is synthesized)
taagtttaaagaaacaacaatgacaataggccagagaagttagggagggaaagaaaagctcaaagggagggaaacctggggacaagaggtgtgcacacccacatgtggtctcactcttca

SEQ ID NO: 272523 - DNA, 120 bp, Artificial Sequence
  ENSG00000127831_32 (sequence is synthesized)
cacaggcccactatttttgaagtagaccagtttagttgactgttcttctttgttctggcatctgactggaccaacctggaacctggtccagaccctcacccactctattcttatgccaat

SEQ ID NO: 272524 - DNA, 120 bp, Artificial Sequence
  ENSG00000127831_33 (sequence is synthesized)
ggacatacctatactttgaacctctgtacttttaagaaaagtccaatgttacaaaatcaaatgcttatattcagactggcacactttttaaataaaaactccatacacctcagacatata

SEQ ID NO: 272525 - DNA, 120 bp, Artificial Sequence
  ENSG00000127831_34 (sequence is synthesized)
gcacacatggagacaacttactaattgtgtgtaagtatgatacaatgaatgagactgcctgaagtctagtaatcaaagcatgccataaggtgaatgattgtggttaaacacagcaaaata

SEQ ID NO: 272526 - DNA, 120 bp, Artificial Sequence
  ENSG00000127831_35 (sequence is synthesized)
attgtcacaaaactttcaaggcctaacaaattagaattttccaataaaaaatatatattttttcagatgttaataagacatatcagtagagacaaaattaggattttgaagtaatgcaat

SEQ ID NO: 272527 - DNA, 120 bp, Artificial Sequence
  ENSG00000127831_36 (sequence is synthesized)
aaaaagatgttggagggcagaagtctatttagtttttgtatacacttgcaagagtgcattactcagtataaagcaaaatggggaggaaaaagacatccatccattttattggaacacttt

SEQ ID NO: 272528 - DNA, 120 bp, Artificial Sequence
  ENSG00000127831_37 (sequence is synthesized)
tatgtgacttgaatctggtgttaggttgttgatttttctaaaaatctcctatatatacaaaatccatatgtacttggagatccagctgttgccccctgtttaaaacaaaagaccacctcg

SEQ ID NO: 272529 - DNA, 120 bp, Artificial Sequence
  ENSG00000127831_38 (sequence is synthesized)
gggggtcaattaaattaaaaaggccctccaaccaccctaaatgggataactaagagtatctactgcagtcatttcagaggacagagaaggaaaatattttaatttgctttaatataacct

SEQ ID NO: 272530 - DNA, 120 bp, Artificial Sequence
  ENSG00000127831_39 (sequence is synthesized)
cttttcagtagatcacaaatgagtttacaaactacttttttttctctttaatttaggtgtttgcagataattttcattatatccgtagctgtatgtgtgtatagttacataatggtaact

SEQ ID NO: 272531 - DNA, 120 bp, Artificial Sequence
  ENSG00000127831_40 (sequence is synthesized)
acacacgatacagaagaatcagtaaattcatggattattttgctgaggttttaaattttaaagcctctgtttcagaattttatacttgatcaaggagaaaaataaatgtgtagtctaaca

SEQ ID NO: 272532 - DNA, 120 bp, Artificial Sequence
  ENSG00000127831_41 (sequence is synthesized)
tttgctttctggagttaattaactgatctgtaagaaccactgcatatgtcttaaaatgtaaacatatttacatttgttgtatttgttattgagcctttaaggttaggcccagaatgaaca

SEQ ID NO: 272533 - DNA, 120 bp, Artificial Sequence
  ENSG00000127831_42 (sequence is synthesized)
gaccatagcaagtaaacaaataatttttagaatcaaagtattaatagaagaccagttcatggatttgcttattctatcctgctgagacaaaactcatgagtgtgcacacacatgtgaata

SEQ ID NO: 272534 - DNA, 120 bp, Artificial Sequence
  ENSG00000127831_43 (sequence is synthesized)
tatccctacgaaacagtctatcttctcataggcttaaattatagtcatggctattaaagaaattaacagcatccagccacatgcaactttccaaccttcagtactattaggtgattaaaa

SEQ ID NO: 272535 - DNA, 120 bp, Artificial Sequence
  ENSG00000127831_44 (sequence is synthesized)
tcaacaaatatgaagtttagttcatttttcccttaaaattccaacaaagatcaaaaggttgtatctagaactaattgccatcaagttccaattcaatgtcatttaaagtaatgtaaccac

SEQ ID NO: 272536 - DNA, 120 bp, Artificial Sequence
  ENSG00000127831_45 (sequence is synthesized)
acatttggtattttcaataggaaggttaattaggtattgtgcaaactgcctgcaacggaagcactcagtccttatctaacttgtcccttcctggccccaacatgctaactgccccatccc

SEQ ID NO: 272537 - DNA, 120 bp, Artificial Sequence
  ENSG00000127831_46 (sequence is synthesized)
caattctgggcaaactgatcacaatgtgcaaaaaataatatattatctatttataattttaaaatatatacagccagctcaaaaacaacaacaaaccccatcaacatagtccagctgaaa

SEQ ID NO: 272538 - DNA, 120 bp, Artificial Sequence
  ENSG00000127831_47 (sequence is synthesized)
tctccactggtagtcaaagaagtagattaaaggagtaaaggaaggagaaggctgatagggccacaagaatggacagacatcaagtaaaatttgagtcccaaacatgcaagtacatgagca

SEQ ID NO: 272539 - DNA, 120 bp, Artificial Sequence
  ENSG00000127831_48 (sequence is synthesized)
gtgagataacttatatattccaataacctattttcaacaactcctgcccaagacatgaagatcaaatcaggtttctgaggtaagtgtacttctaaaccatacacacatgaaagctatgaa

SEQ ID NO: 272540 - DNA, 120 bp, Artificial Sequence
  ENSG00000127831_49 (sequence is synthesized)
agcaattcaaatgaggctgcttcatgaggcaatctagacttatggcattatttctacttttctccatgttttaattgcagcctgcactttaaatctttcccaataatttttaacagtgcc

SEQ ID NO: 272541 - DNA, 120 bp, Artificial Sequence
  ENSG00000127831_50 (sequence is synthesized)
tctcaaatgcaaagacacgtaaaagaattaataactagccaaagaattttatcaccgcttcactcatttataagaaaaccaattatttccaagcaaaatcaaaccaaaccaaagaggctc

SEQ ID NO: 272542 - DNA, 120 bp, Artificial Sequence
  ENSG00000127831_51 (sequence is synthesized)
ctggtagaaatgaaacaaaactttaaagctagttttaaaacaaatattttcctctgctctaaactactctggcgttttctaccactctaccattttggaacattcattacaataaggtat

SEQ ID NO: 272543 - DNA, 120 bp, Artificial Sequence
  ENSG00000127831_52 (sequence is synthesized)
ataggtagatggtaggaggcaaagcatttatcagtagttgagcaaaactgctgaggccatttataattcaaagaatgaaaacttagaatagtttactacattagaatacatccaagttcc

SEQ ID NO: 272544 - DNA, 120 bp, Artificial Sequence
  ENSG00000127831_53 (sequence is synthesized)
ttagaatacatccaagttccaagagtaggactggagctctcttaaggcaatctttcagaaaagatgttgcatcttctgtgatgatggtttgtgttttttttgtttttgttttcgtttttt

SEQ ID NO: 272545 - DNA, 120 bp, Artificial Sequence
  ENSG00000127831_54 (sequence is synthesized)
acccacactgtgggctccgtgggtgagggccaggcgggggcagtgagggagccaggatccaggagctgggccaggagagccacttggtccaccacccaccctccttccctgacgtgcatc

SEQ ID NO: 272546 - DNA, 120 bp, Artificial Sequence
  ENSG00000127831_55 (sequence is synthesized)
ttcaacgaagacttttacgctggctctgggcttgtcctagcagatggggacgtggacaaactctagttgtcacaaaaagggagctgagagggctgggcatggtggcacatgcctgtaatc

SEQ ID NO: 272547 - DNA, 120 bp, Artificial Sequence
  ENSG00000127837_0 (sequence is synthesized)
gcggccagccaaccttcgtagctattggccgaacggccgtcgctcttcctgctggggagtcgcctacgcctacttcctgccgggaggaggggctcgagttccgcgtcgtcgcgcagagct

SEQ ID NO: 272548 - DNA, 120 bp, Artificial Sequence
  ENSG00000127837_1 (sequence is synthesized)
gactctgggaggcgtttgggcccagagaagtggatccgccgcttgcgccgcatggagtccgaatcggaaagcggggctgctgctgacacccccccactggagaccctaagcttccatggt

SEQ ID NO: 272549 - DNA, 120 bp, Artificial Sequence
  ENSG00000127837_2 (sequence is synthesized)
gatgaagagattatcgaggtggtagaacttgatcccggtccgccggacccagatgacctggcccaggagatggaagatgtggactttgaggaagaagaggaggaagagggcaacgaagag

SEQ ID NO: 272550 - DNA, 120 bp, Artificial Sequence
  ENSG00000127837_3 (sequence is synthesized)
ggctgggttctagaaccccaggaaggggtggtcggcagcatggagggccccgacgatagcgaggtcacctttgcattgcactcagcatctgtgttttgtgtgagcctggaccccaagacc

SEQ ID NO: 272551 - DNA, 120 bp, Artificial Sequence
  ENSG00000127837_4 (sequence is synthesized)
aataccttggcagtgaccgggggtgaagatgacaaagccttcgtatggcggctcagcgatggggagctgctctttgagtgtgcaggccataaagactctgtgacttgtgctggtttcagc

SEQ ID NO: 272552 - DNA, 120 bp, Artificial Sequence
  ENSG00000127837_5 (sequence is synthesized)
catgactccactctagtggccacaggggacatgagtggcctcttgaaagtgtggcaggtggacactaaggaggaggtctggtcctttgaagcgggagacctggagtggatggagtggcat

SEQ ID NO: 272553 - DNA, 120 bp, Artificial Sequence
  ENSG00000127837_6 (sequence is synthesized)
cctcgggcacctgtcctgttggcgggcacagctgacggcaacacctggatgtggaaagtcccgaatggtgactgcaagaccttccagggtcccaactgcccagccacctgtggccgagtc

SEQ ID NO: 272554 - DNA, 120 bp, Artificial Sequence
  ENSG00000127837_7 (sequence is synthesized)
actgaaagggactgagggtcaccagggcccactcacctgtgttgctgccaaccaggatggcagcttgatcctaactggctctgtggactgccaggccaagctggtcagtgccaccaccgg

SEQ ID NO: 272555 - DNA, 120 bp, Artificial Sequence
  ENSG00000127837_8 (sequence is synthesized)
caaggtggtgggtgtttttagacctgagactgtggcctcccagcccagcctgggagaaggggaggagagtgagtccaactcggtggagtccttgggcttctgcagtgtgatgcccctggc

SEQ ID NO: 272556 - DNA, 120 bp, Artificial Sequence
  ENSG00000127837_9 (sequence is synthesized)
agctgttggctacctggatgggaccttggccatctatgacctggctacgcagactcttaggcatcagtgtcagcaccagtcgggcatcgtgcagctgctgtgggaggcaggcactgccgt

SEQ ID NO: 272557 - DNA, 120 bp, Artificial Sequence
  ENSG00000127837_10 (sequence is synthesized)
ggtatatacctgcagcctggatggcatcgtgcgcctctgggacgcccggaccggccgcctgcttactgactaccggggccacacggctgagatcctggactttgccctcagcaaagatgc

SEQ ID NO: 272558 - DNA, 120 bp, Artificial Sequence
  ENSG00000127837_11 (sequence is synthesized)
ctccctggtggtgaccacgtcaggagaccacaaagcgaaagtattttgtgtccaaaggcctgaccgttaatggctgcagcccctgcctgtgtgtctggtgttgaggggacgaagggaccc

SEQ ID NO: 272559 - DNA, 120 bp, Artificial Sequence
  ENSG00000127837_12 (sequence is synthesized)
ctgcccctgtctgccagcagaggcagtagggcacagagggaagaggagggtggggccctggatgactttccagcctcttcaactgacttgctcccctctccttttcttctctttagagac

SEQ ID NO: 272560 - DNA, 120 bp, Artificial Sequence
  ENSG00000127837_13 (sequence is synthesized)
ccagcccagggccctcccacccttgtccagacctggtgggcccttcagagggaggggtggacctgtttctctttcactttcatttgctggtgtgagccatggggtgtgtatttgtatgtg

SEQ ID NO: 272561 - DNA, 120 bp, Artificial Sequence
  ENSG00000127837_14 (sequence is synthesized)
gggagtaggtgtttgaggttcccgttctttcccttcccaagtctctgggggtggaaaggaggaagagatactagttaaagattttaaaaatgtaaataaaatatacttcccagagacaga

SEQ ID NO: 272562 - DNA, 120 bp, Artificial Sequence
  ENSG00000127837_15 (sequence is synthesized)
aagatcatcagagcgggagtcagctctgtggggccttgggttgttgggggtgcaagcttgggaggccagttctgcctttattgcgccaagccagctctgagccaatgcgccccaaggcac

SEQ ID NO: 272563 - DNA, 120 bp, Artificial Sequence
  ENSG00000127837_16 (sequence is synthesized)
aggaagaatatctacctgctacctggaaagtccccgcggaaccccagaggcaggaaaccttgggtggagctcatggggcaggcttctaggtgggatggggtgacgggcctccctgctgcc

SEQ ID NO: 272564 - DNA, 120 bp, Artificial Sequence
  ENSG00000127837_17 (sequence is synthesized)
gtgcaggtgagggggctggggtagaggcctgggagaggtcatattcttttgggagatcttaggaggctgacctgcagaggttgtgcatccaacagccacttagtgacatctcttttgtgc

SEQ ID NO: 272565 - DNA, 120 bp, Artificial Sequence
  ENSG00000127837_18 (sequence is synthesized)
tccccttggccctcccttaccgcacggtctctggccagccgtggcctcccgtcctgtgtcccgcgcgcccccgcggaccccggtgtgtctgactccaccttcccttctcgccacatgacc

SEQ ID NO: 272566 - DNA, 120 bp, Artificial Sequence
  ENSG00000127837_19 (sequence is synthesized)
cgccccagcctcaggcctcctcatgcttctctccgtacctcttaccgcctcccgagccccatcttctaaccctctccccaaagcagatgacctggcccaggagatggaagatgtggactt

SEQ ID NO: 272567 - DNA, 120 bp, Artificial Sequence
  ENSG00000127837_20 (sequence is synthesized)
aggccgaatcccgggatatacacctcccagagcagccttctgggtcacagccggcaaaatctgaggcctgctgtttgcagtgctgacctcctgggccccaaagttcacagcgcctccttc

SEQ ID NO: 272568 - DNA, 120 bp, Artificial Sequence
  ENSG00000127837_21 (sequence is synthesized)
ctgctctgaactcacctgtgattcctggggcagtgtctgggcccttccactcttctttcctctccctctccccattcccttgcttagtgtatgtgagcgtgccctctgccctctcttcat

SEQ ID NO: 272569 - DNA, 120 bp, Artificial Sequence
  ENSG00000127837_22 (sequence is synthesized)
ctgtgcctctcttcagggaagagagctgtggtaggctatgaagatgggaccatcaggatttgggacctgaagcagggaagccctatccatgtactgaaaggtatcagaggtgggggaagt

SEQ ID NO: 272570 - DNA, 120 bp, Artificial Sequence
  ENSG00000127837_23 (sequence is synthesized)
ccggctggggcctccgctttcccgactcctctccttccttcctgggtcttcactgtctcctctccccaccgtctttctctccatcaagcacccggattccgtgtcctcctctgatcctct

SEQ ID NO: 272571 - DNA, 120 bp, Artificial Sequence
  ENSG00000127838_0 (sequence is synthesized)
gggggtgggatctgaacatggcggcggtggtagctgctacggcgctgaagggccggggggcgagaaatgcccgcgtcctccgggggattctcgcaggagccacagctaacaaggcttctc

SEQ ID NO: 272572 - DNA, 120 bp, Artificial Sequence
  ENSG00000127838_1 (sequence is synthesized)
ataacaggacccgggccctgcaaagccacagctccccagagggcaaggaggaacctgaacccctatccccggagctggaatacattcccagaaagaggggcaagaaccccatgaaagctg

SEQ ID NO: 272573 - DNA, 120 bp, Artificial Sequence
  ENSG00000127838_2 (sequence is synthesized)
tgggactggcctggtacagcctgtacacccgcacctggctcgggtacctcttctaccgacagcagctgcgcagggctcggaatcgctaccctaaaggccactcgaaaacccagccccgcc

SEQ ID NO: 272574 - DNA, 120 bp, Artificial Sequence
  ENSG00000127838_3 (sequence is synthesized)
tcttcaatggagtgaaggtgcttcccatccctgtcctctcggacaactacagctacctcatcatcgacacccaggcccagctggctgtggctgtggacccttcagaccctcgggctgtgc

SEQ ID NO: 272575 - DNA, 120 bp, Artificial Sequence
  ENSG00000127838_4 (sequence is synthesized)
aggcttccattgaaaaggaaggggtcaccttggtcgccattctgtgtactcacaagcactgggaccacagtggagggaaccgtgacctcagccggcggcaccgggactgtcgggtgtacg

SEQ ID NO: 272576 - DNA, 120 bp, Artificial Sequence
  ENSG00000127838_5 (sequence is synthesized)
ggagccctcaggacggcatcccctacctcacccatcccctgtgtcatcaagatgtggtcagcgtgggacggcttcagatccgggccctggctacacctggccacacacaaggccatctgg

SEQ ID NO: 272577 - DNA, 120 bp, Artificial Sequence
  ENSG00000127838_6 (sequence is synthesized)
tctacctactggatggggagccctacaagggtccctcctgcctcttctcaggggacctgctcttcctctctggctgtgggcggacctttgagggcaatgcagagaccatgctgagctcac

SEQ ID NO: 272578 - DNA, 120 bp, Artificial Sequence
  ENSG00000127838_7 (sequence is synthesized)
tggacactgtgctggggctaggggatgacacccttctgtggcctggtcatgagtatgcagaggagaacctgggctttgcaggtgtggtggagcccgagaacctggcccgggagaggaaga

SEQ ID NO: 272579 - DNA, 120 bp, Artificial Sequence
  ENSG00000127838_8 (sequence is synthesized)
tgcagtgggtgcagcggcagcggctggagcgcaagggcacgtgcccatctaccctgggagaggagcgctcctacaacccgttcctgagaacccactgcctggcgctacaggaggctctgg

SEQ ID NO: 272580 - DNA, 120 bp, Artificial Sequence
  ENSG00000127838_9 (sequence is synthesized)
ggccggggccgggccccactggggatgatgactactcccgggcccagctcctggaagagctccgccggctgaaggatatgcacaagagcaagtgatgcccccagcgcccccagcccagcc

SEQ ID NO: 272581 - DNA, 120 bp, Artificial Sequence
  ENSG00000127838_10 (sequence is synthesized)
cactccccgcatggggaggccgccaccaccaacacctcatcatccttctcatcgctaacaccaccacctccatcggcacccaagcgggcatcatccccccacactgctcaggggagggga

SEQ ID NO: 272582 - DNA, 120 bp, Artificial Sequence
  ENSG00000127838_11 (sequence is synthesized)
gggatcaggcgatgagactgtgaggccaaaagaagggggcctgttggaggctgggaaccccgcagcgcgaggctgcctcatcaacggcaagaggaaaggaggggtctcgggacatctcca

SEQ ID NO: 272583 - DNA, 120 bp, Artificial Sequence
  ENSG00000127838_12 (sequence is synthesized)
agccctggaacccagggtccatcttgcccttcccccatccatggttgggaaagaagctcagcccctcacagtggcctcaagtgtgatgccttacaaaagcaccactcagatgggcagctg

SEQ ID NO: 272584 - DNA, 120 bp, Artificial Sequence
  ENSG00000127838_13 (sequence is synthesized)
gactctggtgtcctgagactctgccctcttcccacagcctccctgccccacccatccctgcaaagccatttttcagacagagccattcctaagaacactgaagggctggaatgctggctg

SEQ ID NO: 272585 - DNA, 120 bp, Artificial Sequence
  ENSG00000127838_14 (sequence is synthesized)
gccactctctgcctcagtggcctccctacagcctggaagaaggagggtcctgattgccaaggaaacctcctcattgggctaaggagacactggagtctggagtgtggagccccacagtct

SEQ ID NO: 272586 - DNA, 120 bp, Artificial Sequence
  ENSG00000127838_15 (sequence is synthesized)
tgcaggtcacatgctctccttgcacatctggcctggttgtacccactggcctctgcctctgccctgggccaaaagggcccctccttgccaggggagagacagccacggtcctctttggcc

SEQ ID NO: 272587 - DNA, 120 bp, Artificial Sequence
  ENSG00000127838_16 (sequence is synthesized)
gatgctgtattctcattttggcccttgttcttaggcccgtctgcccgccttcctccatctaacctttcctgttttatccgcagcccttttcttctttgagttagtaaagatttattctgt

SEQ ID NO: 272588 - DNA, 120 bp, Artificial Sequence
  ENSG00000127838_17 (sequence is synthesized)
aacctgacactcatctggccctttgcagtttgccagccatattcccatgtgatttcccactggatccaggcccccatccggctggcaggagggggctctgacgtgcaggttggaaatcag

SEQ ID NO: 272589 - DNA, 120 bp, Artificial Sequence
  ENSG00000127838_18 (sequence is synthesized)
aagtctgtgagagcgcgggagtgcatggcagctctgggtcccagacctggcccgacccctctgcttcacctccagctctgctgctcctctactcttgggtcgagatccctttggagccac

SEQ ID NO: 272590 - DNA, 120 bp, Artificial Sequence
  ENSG00000127838_19 (sequence is synthesized)
agcgaggaaccctgtggtcctcaggcaggtgtaccttgagtcagccaggagccctcttttcctgtgtcaaagcctgccctcgggctctgctcacctctggtgaccctccaagatgcccct

SEQ ID NO: 272591 - DNA, 120 bp, Artificial Sequence
  ENSG00000127838_20 (sequence is synthesized)
gccctcagtttcccctcatgatctggcctctgcccccttctctagccacagcctctagtacactttagcaataccaccagactagttagagttccccactcaccaagcaagacatgcagt

SEQ ID NO: 272592 - DNA, 120 bp, Artificial Sequence
  ENSG00000127838_21 (sequence is synthesized)
ttcatgcctctgtgccttcgctcatgctgtttcttccgactggaatgccttcccctgctcctcctgccttgtctgcctggcaagttcatctctcacgatcccctcaaaggccccctcctc

SEQ ID NO: 272593 - DNA, 120 bp, Artificial Sequence
  ENSG00000127838_22 (sequence is synthesized)
caggaaggcaacccctgtgcccctcccctccaggctacctctgcactttgtcaatgcttctcttgtggcacttatcacactgtattttacttgtttacatgtttgtctccccttctagac

SEQ ID NO: 272594 - DNA, 120 bp, Artificial Sequence
  ENSG00000127838_23 (sequence is synthesized)
tgtgaatccttaagggcatggactgtatcttatgcatctctgtatttctgcgcctagcacggtgcctagcacacagtaggcgctcaataaatgttgaatgaatgaatgatttaatcaaga

SEQ ID NO: 272595 - DNA, 80 bp, Artificial Sequence
  ENSG00000127838_24 (sequence is synthesized)
ggccgttgcctagcaacgccgagccccgcccggccggcgcgtgcctgcccccagcatggcttggcagggctggcccgcgg

SEQ ID NO: 272596 - DNA, 120 bp, Artificial Sequence
  ENSG00000127838_25 (sequence is synthesized)
cgtggcagtgggtcgccggctgctggctcctcctcgtccttgtcctcgtcctacttgtgagcccccgcggctgccgagcgcggcggggcctccgcggtctgctcatggcgcacagccagc

SEQ ID NO: 272597 - DNA, 120 bp, Artificial Sequence
  ENSG00000127838_26 (sequence is synthesized)
acaactgcagatgagatggggcctcagcaaaacggaactgccaagcactggtatcagggacttgggatggcctgaaccatcgcagccctgagtcatatgacacagcagttttcttcagcc

SEQ ID NO: 272598 - DNA, 120 bp, Artificial Sequence
  ENSG00000127838_27 (sequence is synthesized)
gaggtaggagactgtcaggttggttcaggtctgacaagatgtctcttttctctaacatttaaacagctccaaccatctcagctccttcatgattgtttcgtcatcatcaccatcgtcact

SEQ ID NO: 272599 - DNA, 120 bp, Artificial Sequence
  ENSG00000127838_28 (sequence is synthesized)
ggggtgggatctgaacatggcggcggtggtagctgctacggcgctgaagggccggggggcgagaaatgcccgcgtcctccggggtaaggagagggaccccggggagggcaggactgcaga

SEQ ID NO: 272600 - DNA, 120 bp, Artificial Sequence
  ENSG00000127838_29 (sequence is synthesized)
agatcccttttctttcacgtccagcccgacgatagcaggaggtcagggctcttggttcctccccacacttttctgcaagatcttagagtctgggggtgcagagatgctctttagaggtca

SEQ ID NO: 272601 - DNA, 120 bp, Artificial Sequence
  ENSG00000127838_30 (sequence is synthesized)
cccagtgcatccccccgccttcgggttgctcgacacctccggggtcttgctgcaagagggagctcctaggaagcctgttggactcccgcgctccaggtgtttcacactcaccgcagtgca

SEQ ID NO: 272602 - DNA, 120 bp, Artificial Sequence
  ENSG00000127838_31 (sequence is synthesized)
gaggaaagagccccgggcttctggaggtttgagttccagccccggataattagcagtttgaccttgggcaaagcagtttttctctcagggcttcagtttcctcttccgtacagtgcaagg

SEQ ID NO: 272603 - DNA, 120 bp, Artificial Sequence
  ENSG00000127838_32 (sequence is synthesized)
gatggagtagactatctttaaggtcccttccagtgctaacatttgcagtttcaaaaccttttcccggatttccttcatacgtcttatgtgagtcccactgcagtccttcccatgctgtcg

SEQ ID NO: 272604 - DNA, 120 bp, Artificial Sequence
  ENSG00000127838_33 (sequence is synthesized)
cagtgacgtggaagtggcttccaaaggtgccacctcggtggcgattttcccatttccctttggattctccttggcacttcttacttcagactgcagtcactccccttccccagatctcag

SEQ ID NO: 272605 - DNA, 120 bp, Artificial Sequence
  ENSG00000127838_34 (sequence is synthesized)
ccgctcctcccaagcccttactgccccccacctccccgcttgctttcttctcatctcttcttactgaccttccttacctccatccacagggattctcgcaggagccacagctaacaaggc

SEQ ID NO: 272606 - DNA, 120 bp, Artificial Sequence
  ENSG00000127838_35 (sequence is synthesized)
gtccaacacgggcgagtatgagagccagaggttcagggcttcctcccagagtgccccgtcccctgatgttgggtctggggtgcagacctgaggagcgctgcgaccctcctaggctattga

SEQ ID NO: 272607 - DNA, 120 bp, Artificial Sequence
  ENSG00000127838_36 (sequence is synthesized)
ctgttaagtcctcaggtttggcccagattccagttcgtgcctctgaggtccaccagagggcgcatgaagcccaggctgttgccaaaccctaccctgccccacaccaaggagccagccaaa

SEQ ID NO: 272608 - DNA, 120 bp, Artificial Sequence
  ENSG00000127838_37 (sequence is synthesized)
tgtactcacaagcactggtaaggggctcccgtcttccctggcccacccttgtcccagctgggcttgccaggactgggcccattgaggacggccggggccagagatcaagaagtcagtacg

SEQ ID NO: 272609 - DNA, 120 bp, Artificial Sequence
  ENSG00000127838_38 (sequence is synthesized)
catcatcatcaccaccagtgatttcctgaatgccaaccaagcaccagtcatcaagcgtgagccacggtgcaaagatggaggcaggctctccattctaagggaacctctcaggccagtagg

SEQ ID NO: 272610 - DNA, 120 bp, Artificial Sequence
  ENSG00000127838_39 (sequence is synthesized)
gaaggcaagattcagacaccagggacaggcagcctgggatgacaggtggaacaaggaggagacacaagaacccccaccccaacccaggaacccacatcacaggccagacctgcatgatcg

SEQ ID NO: 272611 - DNA, 120 bp, Artificial Sequence
  ENSG00000127838_40 (sequence is synthesized)
gagtagttctcctgggtccgctctgcgggcttctgggagatgtagtttctggtctgtaggcaggacggaaggagcgggggaggccccttacgcaaactacaattcccggcggggagcgcg

SEQ ID NO: 272612 - DNA, 120 bp, Artificial Sequence
  ENSG00000127863_0 (sequence is synthesized)
gttgccgggctacgggagagcgcggagccctgcgctgggaggtgcacggtgtgcacgctggactggacccccatgcaaccccgcgccctgcgccttaaccaggactgctccgcgcgcccc

SEQ ID NO: 272613 - DNA, 120 bp, Artificial Sequence
  ENSG00000127863_1 (sequence is synthesized)
tgagcctcgggctccggcccggacctgcagcctcccaggtggctgggaagaactctccaacaataaatacatttgataagaaagatggctttaaaagtgctactagaacaagagaaaacg

SEQ ID NO: 272614 - DNA, 120 bp, Artificial Sequence
  ENSG00000127863_2 (sequence is synthesized)
tttttcactcttttagtattactaggctatttgtcatgtaaagtgacttgtgaatcaggagactgtagacagcaagaattcagggatcggtctggaaactgtgttccctgcaaccagtgt

SEQ ID NO: 272615 - DNA, 120 bp, Artificial Sequence
  ENSG00000127863_3 (sequence is synthesized)
gggccaggcatggagttgtctaaggaatgtggcttcggctatggggaggatgcacagtgtgtgacgtgccggctgcacaggttcaaggaggactggggcttccagaaatgcaagccctgt

SEQ ID NO: 272616 - DNA, 120 bp, Artificial Sequence
  ENSG00000127863_4 (sequence is synthesized)
ctggactgcgcagtggtgaaccgctttcagaaggcaaattgttcagccaccagtgatgccatctgcggggactgcttgccaggattttataggaagacgaaacttgtcggctttcaagac

SEQ ID NO: 272617 - DNA, 120 bp, Artificial Sequence
  ENSG00000127863_5 (sequence is synthesized)
atggagtgtgtgccttgtggagaccctcctcctccttacgaaccgcactgtgccagcaaggtcaacctcgtgaagatcgcgtccacggcctccagcccacgggacacggcgctggctgcc

SEQ ID NO: 272618 - DNA, 120 bp, Artificial Sequence
  ENSG00000127863_6 (sequence is synthesized)
gagacagtttatggagaagaaacccagctggtctctgcggtcacaggacattcagtacaacggctctgagctgtcgtgttttgacagacctcagctccacgaatatgcccacagagcctg

SEQ ID NO: 272619 - DNA, 120 bp, Artificial Sequence
  ENSG00000127863_7 (sequence is synthesized)
ctgccagtgccgccgtgactcagtgcagacctgcgggccggtgcgcttgctcccatccatgtgctgtgaggaggcctgcagccccaacccggcgactcttggttgtggggtgcattctgc

SEQ ID NO: 272620 - DNA, 120 bp, Artificial Sequence
  ENSG00000127863_8 (sequence is synthesized)
agccagtcttcaggcaagaaacgcaggcccagccggggagatggtgccgactttcttcggatccctcacgcagtccatctgtggcgagttttcagatgcctggcctctgatgcagaatcc

SEQ ID NO: 272621 - DNA, 120 bp, Artificial Sequence
  ENSG00000127863_9 (sequence is synthesized)
catgggtggtgacaacatctctttttgtgactcttatcctgaactcactggagaagacattcattctctcaatccagaacttgaaagctcaacgtctttggattcaaatagcagtcaaga

SEQ ID NO: 272622 - DNA, 120 bp, Artificial Sequence
  ENSG00000127863_10 (sequence is synthesized)
tttggttggtggggctgttccagtccagtctcattctgaaaactttacagcagctactgatttatctagatataacaacacactggtagaatcagcatcaactcaggatgcactaactat

SEQ ID NO: 272623 - DNA, 120 bp, Artificial Sequence
  ENSG00000127863_11 (sequence is synthesized)
gagaagccagctagatcaggagagtggtgctgtcatccacccagccactcagacgtccctccaggtaaggcagcgactgggttccctgtgaacacagcactgacttacagtagatcagaa

SEQ ID NO: 272624 - DNA, 120 bp, Artificial Sequence
  ENSG00000127863_12 (sequence is synthesized)
ctctgttcccagcataagatttgggggaacctgatgagttttttttttgcatctttaataatttcttgtatgttgtagagtatgttttaaaataaatttcaagtatttttttaaaaaact

SEQ ID NO: 272625 - DNA, 120 bp, Artificial Sequence
  ENSG00000127863_13 (sequence is synthesized)
gcagttcagcgagatgaaagggataaagcagaacccgctggcactaggaaaagcttccaacacacagtccacaacacagcttgggaaccaaaaaagctacagatccagccactcagccca

SEQ ID NO: 272626 - DNA, 120 bp, Artificial Sequence
  ENSG00000127863_14 (sequence is synthesized)
agcatgggagaactaccagcattgcctcattgcaaaaaagaggaggaaaacaacgtgatccatgtttaacaaaagagtctgtggactaggaggtgggagggtaactacctgctgaaagtg

SEQ ID NO: 272627 - DNA, 120 bp, Artificial Sequence
  ENSG00000127863_15 (sequence is synthesized)
aactttctttgatatccatgcatatatataaactcagccctgcctttgatgttcagcaactgattcactgatcagattacaggcatttcatctccctgctcgtctgcctttgatctgcat

SEQ ID NO: 272628 - DNA, 120 bp, Artificial Sequence
  ENSG00000127863_16 (sequence is synthesized)
ggttaattttattttcctggatttgaagtttcgtctgggcttgtgctgacatacatttttgggaaggtagaagcatttggcacagaagtgctgccaggagaaactaagttgctgaacgga

SEQ ID NO: 272629 - DNA, 120 bp, Artificial Sequence
  ENSG00000127863_17 (sequence is synthesized)
agtggtgctgtcatccacccagccactcagacgtccctccaggaagcttaaagaacctgcttctttctgcagtagaagcgtgtgctggaacccaaagagtactcctttgttaggcttatg

SEQ ID NO: 272630 - DNA, 120 bp, Artificial Sequence
  ENSG00000127863_18 (sequence is synthesized)
gactgagcagtctggaccttgcatggcttctggggcaaaaataaatctgaaccaaactgacggcatttgaagcctttcagccagttgcttctgagccagaccagctgtaagctgaaacct

SEQ ID NO: 272631 - DNA, 120 bp, Artificial Sequence
  ENSG00000127863_19 (sequence is synthesized)
caatgaataacaagaaaagactccaggccgactcatgatactctgcatctttcctacatgagaagcttctctgccacaaaagtgacttcaaagacggatgggttgagctggcagcctatg

SEQ ID NO: 272632 - DNA, 120 bp, Artificial Sequence
  ENSG00000127863_20 (sequence is synthesized)
agattgtggacatataacaagaaacagaaatgccctcatgcttattttcatggtgattgtggttttacaagactgaagacccagagtatactttttctttccagaaataatttcataccg

SEQ ID NO: 272633 - DNA, 120 bp, Artificial Sequence
  ENSG00000127863_21 (sequence is synthesized)
cctatgaaatatcagataaattaccttagcttttatgtagaatgggttcaaaagtgagtgtttctatttgagaaggacactttttcatcatctaaactgattcgcataggtggttagaat

SEQ ID NO: 272634 - DNA, 120 bp, Artificial Sequence
  ENSG00000127863_22 (sequence is synthesized)
ggccctcatattgcctgcctaaatcttgggtttattagatgaagtttactgaatcagaggaatcagacagaggaggatagctctttccagaatccacacttctgacctcagcctcggtct

SEQ ID NO: 272635 - DNA, 120 bp, Artificial Sequence
  ENSG00000127863_23 (sequence is synthesized)
catgaacacccgctgatctcaggagaacacctgggctagggaatgtggtcgagaaagggcagcccattgcccagaattaacacatattgtagagacttgtatgcaaaggttggcatattt

SEQ ID NO: 272636 - DNA, 120 bp, Artificial Sequence
  ENSG00000127863_24 (sequence is synthesized)
atatgaaaattagttgctatagaaacatttgttgcatctgtccctctgcctgagcttagaaggttatagaaaaagggtatttataaacataaatgaccttttacttgcattgtatcttat

SEQ ID NO: 272637 - DNA, 120 bp, Artificial Sequence
  ENSG00000127863_25 (sequence is synthesized)
actaaaggctttagaaattacaacatatcaggttcccctactactgaagtagccttccgtgagaacacaccacatgttaggactagaagaaaatgcacaatttgtaggggtttggatgaa

SEQ ID NO: 272638 - DNA, 120 bp, Artificial Sequence
  ENSG00000127863_26 (sequence is synthesized)
gcagctgtaactgccctagtgtagtttgaccaggacattgtcgtgctccttccaattgtgtaagattagttagcacatcatctcctactttagccatccggtgttggatttaagaggacg

SEQ ID NO: 272639 - DNA, 120 bp, Artificial Sequence
  ENSG00000127863_27 (sequence is synthesized)
gtgcttctttctattaaagtgctccatcccctaccatctacacattagcattgtctctagagctaagacagaaattaaccccgttcagtcacaaagcagggaatggttcatttactctta

SEQ ID NO: 272640 - DNA, 120 bp, Artificial Sequence
  ENSG00000127863_28 (sequence is synthesized)
atctttatgccctggagaagacctacttgaacagggcatattttttagacttctgaacatcagtatgttcgagggtactatgatattttggtttggaattgccctgcccaagtcactgtc

SEQ ID NO: 272641 - DNA, 120 bp, Artificial Sequence
  ENSG00000127863_29 (sequence is synthesized)
ttttaacttttaaactgaatattaaaatgtatctgtctttcctagtatgtttttatcttctcatgtattatccatggttttctctgtttgtgacagattagtaaaatttaatgagccctc

SEQ ID NO: 272642 - DNA, 120 bp, Artificial Sequence
  ENSG00000127863_30 (sequence is synthesized)
ttgtggccgtttctccatagttttaggttttgatatgtgtttactagcttgcctgtgtctggtacatctcatgacctcaattccctcacctgaaataggaaatgagaatgtttcattgta

SEQ ID NO: 272643 - DNA, 120 bp, Artificial Sequence
  ENSG00000127863_31 (sequence is synthesized)
gccccaagcggtcatgtcaacctagtgcctagtcataattaattgacttttcctgtattacttctttttttaagtataaaccaatgatcctttggtagtcaagaactcttaggaacattg

SEQ ID NO: 272644 - DNA, 120 bp, Artificial Sequence
  ENSG00000127863_32 (sequence is synthesized)
ccttttggacatgtaaaatatttaggatttgaccacacaatggctatgaaaatgcaagtagtttcctcgcgtgacctcaccatgattcacatacgtgccactgtttgaaatctggtctgt

SEQ ID NO: 272645 - DNA, 120 bp, Artificial Sequence
  ENSG00000127863_33 (sequence is synthesized)
ttgcatttctgttatgacagagagatgatgtttgcatttctgttatgacagagagatgatgaaagtaggcagggctgtgttcctttgtgtagcctgtatatattttccatatgtagagcc

SEQ ID NO: 272646 - DNA, 120 bp, Artificial Sequence
  ENSG00000127863_34 (sequence is synthesized)
ctgattaacttcaaggacaaacactggctggagaaagccagactgatgggaatgagactttggccaaaaatcccaaaacatcattttcaatcagtagagaagtgcttagggttgaaaatt

SEQ ID NO: 272647 - DNA, 120 bp, Artificial Sequence
  ENSG00000127863_35 (sequence is synthesized)
gatttcatttgctactgaatttggtaaatcctgggtaacttttatcaagatgaagacattttaccctacctactctagaaatatacaacaatgttatattttacactccttggaaacatt

SEQ ID NO: 272648 - DNA, 120 bp, Artificial Sequence
  ENSG00000127863_36 (sequence is synthesized)
tgaggaaaaaaatgcaatttgcacttcactttgttggaatatcccatagcactcaataaactcagctgctagagtgccgatgtcaggagggctgtgtcgggtaatgcgtgtggctgaatg

SEQ ID NO: 272649 - DNA, 120 bp, Artificial Sequence
  ENSG00000127863_37 (sequence is synthesized)
ggcataaccactgtggcttcttgtgctgcagaagctcgttgacaagactgaggaggatttcaagagcaaccaagtaaagtcatgaattttctaattttgtgtatatggaatatattttta

SEQ ID NO: 272650 - DNA, 120 bp, Artificial Sequence
  ENSG00000127863_38 (sequence is synthesized)
aatagagatttttctactttagataatgtgttaatattgctattacctaggttaagcactattgtctgtgctagtaagaaaaagaaaggaaaaccatcattgctttatagtagcttatat

SEQ ID NO: 272651 - DNA, 120 bp, Artificial Sequence
  ENSG00000127863_39 (sequence is synthesized)
caatttagatttcatcattactattttgcatactggaatttataaatgtgtaaattatcattttcttagttttgtaataccttttttatttgtgaataaaattatcacctggtattctta

SEQ ID NO: 272652 - DNA, 69 bp, Artificial Sequence
  ENSG00000127863_40 (sequence is synthesized)
gaaccattcactcccctggaaagggggatgaagccagggagacaaatggtctagctcagcagatccaac

SEQ ID NO: 272653 - DNA, 120 bp, Artificial Sequence
  ENSG00000127870_0 (sequence is synthesized)
gcttccttgtgagaatctaggtctctaagggaagcgttacttgaggctcggttgggaagagatgggcagctctcaaaaaaggcacaaacaattgaaggatggataccatggcatatgtta

SEQ ID NO: 272654 - DNA, 120 bp, Artificial Sequence
  ENSG00000127870_1 (sequence is synthesized)
aaagcgtgttgaaaggaaaataagaaagccaggaatctcaggatgaatcagtctagatcgagatcagatggtggcagtgaagaaaccttacctcaagaccataatcatcatgaaaatgag

SEQ ID NO: 272655 - DNA, 120 bp, Artificial Sequence
  ENSG00000127870_2 (sequence is synthesized)
agaagatggcagcaagagcgtctccacagagaagaggcctattatcagtttattaatgaactcaatgatgaagattatcggcttatgagagaccataatcttttaggcacccctggagaa

SEQ ID NO: 272656 - DNA, 120 bp, Artificial Sequence
  ENSG00000127870_3 (sequence is synthesized)
ataacatcagaagaactgcaacagcggttagatggcgtcaaggaacaactagcatctcagcctgacttgagagatggaacgaattacagagactcagaagtccctagagaaagttcacat

SEQ ID NO: 272657 - DNA, 120 bp, Artificial Sequence
  ENSG00000127870_4 (sequence is synthesized)
gaagattctcttctagaatggttgaacacctttcggcgcacaggaaatgcaactcgaagtggacaaaatgggaaccaaacttggagagctgtgagtcgaacaaacccgaacaatggagag

SEQ ID NO: 272658 - DNA, 120 bp, Artificial Sequence
  ENSG00000127870_5 (sequence is synthesized)
tttcggtttagtttggaaatccacgtaaatcatgaaaatagaggatttgaaattcatggagaagattatacagacattccactttcagatagtaacagagatcatactgcaaataggcaa

SEQ ID NO: 272659 - DNA, 120 bp, Artificial Sequence
  ENSG00000127870_6 (sequence is synthesized)
caaaggtcaactagtcctgtggctaggcgaacaagaagccaaacctcagtgaatttcaatggtagtagttccaacattccaaggactaggcttgcttcaagggggcaaaatccagctgaa

SEQ ID NO: 272660 - DNA, 120 bp, Artificial Sequence
  ENSG00000127870_7 (sequence is synthesized)
ggatctttctcaacattgggaaggttaagaaatggaattgggggagcagctggcattcctcgagctaacgcttcacgcactaatttcagtagtcacacaaaccaatcaggtggtagtgaa

SEQ ID NO: 272661 - DNA, 120 bp, Artificial Sequence
  ENSG00000127870_8 (sequence is synthesized)
ctcaggcaaagggaggggcaacggtttggagcagcacatgtttgggaaaatggggctagaagtaatgttacagtgaggaatacaaaccaaagattagagccaataagattacgatctact

SEQ ID NO: 272662 - DNA, 120 bp, Artificial Sequence
  ENSG00000127870_9 (sequence is synthesized)
tccaatagtcgaagccgttcaccaattcagagacagagtggcactgtttatcataattcccaaagggaaagtagaccagtacagcaaaccactagaagatctgttaggaggagaggtaga

SEQ ID NO: 272663 - DNA, 120 bp, Artificial Sequence
  ENSG00000127870_10 (sequence is synthesized)
actcgagtctttttagagcaagatagagaacgagaacgcagaggtactgcatataccccattctctaattcaaggcttgtgtcaagaataacagtagaagaaggagaagaatccagcaga

SEQ ID NO: 272664 - DNA, 120 bp, Artificial Sequence
  ENSG00000127870_11 (sequence is synthesized)
tcctcaactgctgtacgacgacatccaacaatcacactggaccttcaagtgagaaggatccgtcctggagaaaatagagatcgggatagtattgcaaatagaactcgatccagagtaggg

SEQ ID NO: 272665 - DNA, 120 bp, Artificial Sequence
  ENSG00000127870_12 (sequence is synthesized)
ctagcagaaaatacagtcactattgaaagcaatagtgggggctttcgccgaaccatttctcgtttagagcggtcaggtattcgaacctatgttagtaccataacagttcctcttcgtagg

SEQ ID NO: 272666 - DNA, 120 bp, Artificial Sequence
  ENSG00000127870_13 (sequence is synthesized)
cggtcaattttaaggcagatcatgactgggtttggagaactgagttctctaatggaggccgattctgagtcagaacttcaaagaaatggccagcatttaccagacatgcactcagaactg

SEQ ID NO: 272667 - DNA, 120 bp, Artificial Sequence
  ENSG00000127870_14 (sequence is synthesized)
agtaacttaggtacagataacaacaggagccagcacagggaaggttcctctcaagacaggcaggcccaaggagacagcactgaaatgcatggtgaaaacgagaccacccagcctcatact

SEQ ID NO: 272668 - DNA, 120 bp, Artificial Sequence
  ENSG00000127870_15 (sequence is synthesized)
cgaaacagtgacagtaggggtggcaggcagttgcgaaatccaaacaatttagttgaaactggaacactacccattcttcgccttgctcacttttttttactaaatgaaagtgatgatgat

SEQ ID NO: 272669 - DNA, 120 bp, Artificial Sequence
  ENSG00000127870_16 (sequence is synthesized)
gatcgaatacgtggtttaaccaaagagcagattgacaatctttccaccaggcactatgagcataacagtattgatagtgaactaggtaaaatctgtagtgtttgtattagtgactatgta

SEQ ID NO: 272670 - DNA, 120 bp, Artificial Sequence
  ENSG00000127870_17 (sequence is synthesized)
actggaaacaagctcaggcaattaccttgcatgcatgaatttcacattcattgtattgaccgatggctctcagagaattgcacttgtccgatctgtcggcagcctgttttagggtctaac

SEQ ID NO: 272671 - DNA, 120 bp, Artificial Sequence
  ENSG00000127870_18 (sequence is synthesized)
atagcaaacaatgggtaaggtgatgggatctactcaaatactgttttttagtagaactgaatgttcaagcattgttttgctgagttatttgtgattagctaaccaggatgaaaaataaca

SEQ ID NO: 272672 - DNA, 120 bp, Artificial Sequence
  ENSG00000127870_19 (sequence is synthesized)
ttcgtgtgcttttttaaacttgttaaaaagaaatttatataaaatttaaaatacaaatgttaaattatccagaaatacagaatagttaatattgctagaaccaaataacctctaaaatgt

SEQ ID NO: 272673 - DNA, 120 bp, Artificial Sequence
  ENSG00000127870_20 (sequence is synthesized)
agaaccaaataacctctaaaatgtttttattttggtaattttgtcatgctaagcacttttgtatctgcacaattcagtaggttaagaatcaatcttctttttcttaatagtacagcagac

SEQ ID NO: 272674 - DNA, 120 bp, Artificial Sequence
  ENSG00000127870_21 (sequence is synthesized)
tttagcttcaagtttcataggcttagtacttatatctagacatttgtgtctaaataagcttttcattaactttttattttaaggacagtatcttttcatgaaagagtatttggctgaatg

SEQ ID NO: 272675 - DNA, 120 bp, Artificial Sequence
  ENSG00000127870_22 (sequence is synthesized)
tttgctatatatatgttacttgaaatgttaaatttaatatgcagcataccataggtgtatatataggtatataattttaaggttaaaatattcagtctacaagtttggttcttatttaag

SEQ ID NO: 272676 - DNA, 120 bp, Artificial Sequence
  ENSG00000127870_23 (sequence is synthesized)
cttttgggctaatactgcatatggcacaatgtttaatattggcaagttcatctcagagaaaggggattcagatataattttaaagtagagataatttactgaagcgtctctgacaatcta

SEQ ID NO: 272677 - DNA, 120 bp, Artificial Sequence
  ENSG00000127870_24 (sequence is synthesized)
acttattagacagcaagcaatatataatactgaaaaagtattcagaaatggaaaatttacatcatataggttatttaacttgtgttcagcctttttgtaacttttttgaaagtgcaaaca

SEQ ID NO: 272678 - DNA, 120 bp, Artificial Sequence
  ENSG00000127870_25 (sequence is synthesized)
attctttggattattaaataaggtatacagtatgcatggtttctcaaatttagttttaaaatctaaaagtctataaagaatcagatgcataggcaatatgttaagttcacttggaggcta

SEQ ID NO: 272679 - DNA, 120 bp, Artificial Sequence
  ENSG00000127870_26 (sequence is synthesized)
aaaatctccagtgaaaacaaaacgaaaacctttaagagaatgtagagtttatataaacacaaagtatgcattgaagatctgtttctaccaataaacattaaaacaaagactgtatgtgaa

SEQ ID NO: 272680 - DNA, 120 bp, Artificial Sequence
  ENSG00000127870_27 (sequence is synthesized)
gggaaagaaaccagtagcgggacggagggcgggggtggcaagaaagtcaaggtttagaagtaagccggagacgcctaaccctggtaacatccgaatgggaacgggataggaaggaaggcc

SEQ ID NO: 272681 - DNA, 120 bp, Artificial Sequence
  ENSG00000127870_28 (sequence is synthesized)
tttgagagaggaggcgtaaacccaggaacagtgacagtgtaggacgaaaggcctaagtttgttgcggaagatgggcagctctcaaaaaaggcacaaacaattgaaggatggataccatgg

SEQ ID NO: 272682 - DNA, 120 bp, Artificial Sequence
  ENSG00000127870_29 (sequence is synthesized)
agttgcacgggcgagctccgggccggctgcggagcgactccccgccgccaagtgggcggcgtggctgtcgggaaagaagggctggggcctgccgttcttcctcccgagtatcccctccag

SEQ ID NO: 272683 - DNA, 120 bp, Artificial Sequence
  ENSG00000127870_30 (sequence is synthesized)
ctggacgaccccacgctgcagcacgggcttccggcttctctcctcagtggccaattcgagggcacagcgggctccggaggcgcggcggcaagcctatcccgcctcccaaccacagcctcc

SEQ ID NO: 272684 - DNA, 120 bp, Artificial Sequence
  ENSG00000127870_31 (sequence is synthesized)
agcacccgagagaacggccgcccacagcacacgttctccggacaggagggcgaaggcccaagacctggagagatgggcagctctcaaaaaaggcacaaacaattgaaggatggataccat

SEQ ID NO: 272685 - DNA, 120 bp, Artificial Sequence
  ENSG00000127870_32 (sequence is synthesized)
ttagatggaaggatttcaagataaggagaattggtattctttttccttgcttctctttatgaaaatatagtatattgtttttgtgagtttaagaactttttagtataataaagtagaaaa

SEQ ID NO: 272686 - DNA, 120 bp, Artificial Sequence
  ENSG00000127870_33 (sequence is synthesized)
ccaaccacagcctccagcacccgagagaacggccgcccacagcacacgttctccggacaggagggcgaaggcccaagacctggagaggtgggctcgagggaaagatctgggtcccaccac

SEQ ID NO: 272687 - DNA, 120 bp, Artificial Sequence
  ENSG00000127870_34 (sequence is synthesized)
ctggtgattggttgggatgcaccgtctatcacctgcttccttatgggcagctctcaaaaaaggcacaaacaattgaaggatggataccatggcatatgttaaaagcgtgttgaaaggaaa

SEQ ID NO: 272688 - DNA, 120 bp, Artificial Sequence
  ENSG00000127870_35 (sequence is synthesized)
atgggaaccaaacttggagagctgctttgccagatacaagctgaagtgctaccagaaaaccagttgttaagtctatctggaaaaatagactgtgaagcacctcatcttcatttcaatagc

SEQ ID NO: 272689 - DNA, 120 bp, Artificial Sequence
  ENSG00000127870_36 (sequence is synthesized)
ttcgctggaacctggagcctaaggggtaaaatgtattatctttctcttcacaaacagttttttttcttttatggaacatagaatatgacaacatttgttttgtcaactgattacatttta

SEQ ID NO: 272690 - DNA, 120 bp, Artificial Sequence
  ENSG00000127870_37 (sequence is synthesized)
aaacattgtacttgttcatattgtacttggctttgaaataccctgaagcatctatggaattgtaatttattgtaatgcaataagcatttatgtaattaaaaaaaagcattcttaaatatg

SEQ ID NO: 272691 - DNA, 120 bp, Artificial Sequence
  ENSG00000127884_0 (sequence is synthesized)
gggcgaggagtccagagagccatggccgccctgcgtgtcctgctgtcctgcgtccgcggcccgctgaggcccccggttcgctgtcccgcctggcgtcccttcgcctcgggtgctaacttt

SEQ ID NO: 272692 - DNA, 120 bp, Artificial Sequence
  ENSG00000127884_1 (sequence is synthesized)
gagtacatcatcgcagaaaaaagagggaagaataacaccgtggggttgatccaactgaaccgccccaaggccctcaatgcactttgcgatggcctgattgacgagctcaaccaggccctg

SEQ ID NO: 272693 - DNA, 120 bp, Artificial Sequence
  ENSG00000127884_2 (sequence is synthesized)
aagaccttcgaggaggacccggccgtgggggccattgtcctcaccggcggggataaggcctttgcagctggagctgatatcaaggaaatgcagaacctgagtttccaggactgttactcc

SEQ ID NO: 272694 - DNA, 120 bp, Artificial Sequence
  ENSG00000127884_3 (sequence is synthesized)
agcaagttcttgaagcactgggaccacctcacccaggtcaagaagccagtcatcgctgctgtcaatggctatgcctttggcgggggctgtgagcttgccatgatgtgtgatatcatctat

SEQ ID NO: 272695 - DNA, 120 bp, Artificial Sequence
  ENSG00000127884_4 (sequence is synthesized)
gccggtgagaaggcccagtttgcacagccggagatcttaataggaaccatcccaggtgcgggcggcacccagagactcacccgtgctgttgggaagtcgctggcgatggagatggtcctc

SEQ ID NO: 272696 - DNA, 120 bp, Artificial Sequence
  ENSG00000127884_5 (sequence is synthesized)
ggaagaagccatccagtgtgcagaaaaaattgccagcaattctaaaattgtagtagcgatggccaaagaatcagtgaatgcagcttttgaaatgacattaacagaaggaagtaagttgga

SEQ ID NO: 272697 - DNA, 120 bp, Artificial Sequence
  ENSG00000127884_6 (sequence is synthesized)
gaagaaactcttttattcaacctttgccactgatgaccggaaagaagggatgaccgcgtttgtggaaaagagaaaggccaacttcaaagaccagtgagaaccagctgcccctgcttcaca

SEQ ID NO: 272698 - DNA, 120 bp, Artificial Sequence
  ENSG00000127884_7 (sequence is synthesized)
cctctgcttggagaggacaagtgcagcctgtcagttttagaagcaagtaaatcatcctcttttcaagagcagtgtccgtggtgtgcagttcctctccaattgctgcgtggtcgtggcccg

SEQ ID NO: 272699 - DNA, 120 bp, Artificial Sequence
  ENSG00000127884_8 (sequence is synthesized)
acctctcacggcatgacagccttcgtcacccagcctgtgagggtcctgactggagcaccttctaaatctaagattctgctgaggagcccccgctggtccctctgggcatgctgtgctcgg

SEQ ID NO: 272700 - DNA, 120 bp, Artificial Sequence
  ENSG00000127884_9 (sequence is synthesized)
acggaaagcggggcctgcgggtccttgtgtccctgccgctgaagaatggggctgctctgagggaaacgctgtctgctgccttcatacagatgctgattaaagtgatagcgattcagatta

SEQ ID NO: 272701 - DNA, 120 bp, Artificial Sequence
  ENSG00000127903_0 (sequence is synthesized)
ctggtgcgcgggctcctccgcagcagcagaagtcttgaccttagctcgtctaaggaaggaggcaccagggtctgcgttggcccaggaggacccgagactgagtagaagcggagccgactg

SEQ ID NO: 272702 - DNA, 120 bp, Artificial Sequence
  ENSG00000127903_1 (sequence is synthesized)
caccaggctaggagggggccggccagcgcgttcgaaggtgataccgggaggcgagagcaacgacccagagaaaagatgtgagatcaagacagcagcccagggatcgaggatggagggact

SEQ ID NO: 272703 - DNA, 120 bp, Artificial Sequence
  ENSG00000127903_2 (sequence is synthesized)
cttgagcgtcgccctccagggcgcagagttggaaggaaactggaaacacgagggccaggttgaggacctgcaggaaaaccaggaaagctgtccagagccagaggccgtggcctgcaaggg

SEQ ID NO: 272704 - DNA, 120 bp, Artificial Sequence
  ENSG00000127903_3 (sequence is synthesized)
agaccctgctggggacagcatgcaggaacgcgatgaattcagccgaatcccaagaaccatatcgagccctgctgctacccaagccagtgtccccgacgacagcagttcccggaggtgcag

SEQ ID NO: 272705 - DNA, 120 bp, Artificial Sequence
  ENSG00000127903_4 (sequence is synthesized)
cgcgcctggggagagcccgaaggagaggcatcctgacagccgccagcgggagagaggtggaggccccaagaagccgtggaaatgcggggactgcgggaaggccttcagctactgttcagc

SEQ ID NO: 272706 - DNA, 120 bp, Artificial Sequence
  ENSG00000127903_5 (sequence is synthesized)
gttcatcttacaccagagaatccacaccggggagaagccatttgcgtgccccgagtgcggcaaggccttcagccagagcgtgcacctgaccctgcaccagcgcacgcacacgggcgagaa

SEQ ID NO: 272707 - DNA, 120 bp, Artificial Sequence
  ENSG00000127903_6 (sequence is synthesized)
gccctacgcctgccacgagtgcggcaaggccttcagccagggctcgtacctggcgtcccactggcgcacgcacacgggcgagaagccgcaccgctgcgccgactgcggcaaggccttcac

SEQ ID NO: 272708 - DNA, 120 bp, Artificial Sequence
  ENSG00000127903_7 (sequence is synthesized)
gcgcgtcacgcacctgacccagcaccggcgcgtgcacacgggcgagcggccctacgcgtgcgcccagtgcgccaaggcgttccgcaaccgctcgtccctgatagagcaccagcgcatcca

SEQ ID NO: 272709 - DNA, 120 bp, Artificial Sequence
  ENSG00000127903_8 (sequence is synthesized)
caccggtgagaagccctacgagtgctccgcgtgcgccaaggccttccgcttctcctcagcgctcatccgccaccagcgcatccacacggaggagaagccctaccgctgcggccagtgcgc

SEQ ID NO: 272710 - DNA, 120 bp, Artificial Sequence
  ENSG00000127903_9 (sequence is synthesized)
caaggccttcgcgcagatcgcgcacctgacccagcaccggcgcgtgcacacgggcgagaagccctacacgtgccaggactgcggcgcgctcttcagccagagcgcctctctggccgagca

SEQ ID NO: 272711 - DNA, 120 bp, Artificial Sequence
  ENSG00000127903_10 (sequence is synthesized)
ccggcgcatccacacaggcgagaagccctacgcgtgcggccagtgcgccaaggccttcacccaggtgtcgcacctgacgcagcaccagcgcacgcacaccggagagcggccttacccctg

SEQ ID NO: 272712 - DNA, 120 bp, Artificial Sequence
  ENSG00000127903_11 (sequence is synthesized)
ccacgactgcggcaagcgcttcagcaaccgctcccacctcctccagcaccgcctcgtgcacaccggtgagcggccctacaggtgcctgcaatgcggggccgccttcagccacgtgtcctc

SEQ ID NO: 272713 - DNA, 120 bp, Artificial Sequence
  ENSG00000127903_12 (sequence is synthesized)
gcttatagagcaccagaagatccacaccggagagcggccctacaagtgcggcgagtgcggcaaagctttcagccagggctcctcgctcgccctgcaccagcgcacgcacacgggcgagcg

SEQ ID NO: 272714 - DNA, 120 bp, Artificial Sequence
  ENSG00000127903_13 (sequence is synthesized)
gccctacacctgccccgagtgcggcaaggccttcagcaaccgctcctacctgatccagcaccacatcgtgcacaccggggagaagccctacgagtgcagcggctgcgggaaggccttcag

SEQ ID NO: 272715 - DNA, 120 bp, Artificial Sequence
  ENSG00000127903_14 (sequence is synthesized)
gggctctcacagggaggagaaacctgtcaacaggggtgccctggcagaaacccgcgtggaccagcagaagattaagagctgagggcctcctttccaacctcacaatgctatgggggagat

SEQ ID NO: 272716 - DNA, 120 bp, Artificial Sequence
  ENSG00000127903_15 (sequence is synthesized)
actgtgttatccccgacgcttcctgtgaggaaaccgaggctcagagaagcttgttaacttgcctgagggcacacagtggggaagacacagggctaagactgtacctcacatctgccagac

SEQ ID NO: 272717 - DNA, 120 bp, Artificial Sequence
  ENSG00000127903_16 (sequence is synthesized)
tcccctgcggtcttcctggtgcaaaattataaatggggcacgggcaagtagacctgcagaaacacctatggctggcctttaatttctttctttttttctttgagacagtgtctctctctg

SEQ ID NO: 272718 - DNA, 120 bp, Artificial Sequence
  ENSG00000127903_17 (sequence is synthesized)
tctttttttctttgagacagtgtctctctctgtcacccaggctagagtgcagtggagcgatctcggctcactgaaacttctgcctcccgggtacaagtgattctcctgcctcaacctccc

SEQ ID NO: 272719 - DNA, 120 bp, Artificial Sequence
  ENSG00000127903_18 (sequence is synthesized)
gcctgccttggcatcccaaagtgctgggactacaggcctgagctacggtgcctggccagctggccttttcattgttgattttattgagtaagcccttgctcagtaaatttaattgaatta

SEQ ID NO: 272720 - DNA, 120 bp, Artificial Sequence
  ENSG00000127903_19 (sequence is synthesized)
cagtaaatttaattgaattaaagtgaataaaaggtttggtttctttggccaagttggcatatttactaaaggagcagagtctgaagaagaaatctggattcactaagatagaaatagtgc

SEQ ID NO: 272721 - DNA, 120 bp, Artificial Sequence
  ENSG00000127903_20 (sequence is synthesized)
ttagagaaaatgagcaggagaaatctagagctgaaagttattctagaagaagggagtgcttctcctctacaaaagatttttagagtgggcctagtctttttttcagtatgaggaaacacc

SEQ ID NO: 272722 - DNA, 120 bp, Artificial Sequence
  ENSG00000127903_21 (sequence is synthesized)
tacccatctccaccatttttccccctaactcaaagacctgactttaatgcttgtatcagtcagctcttgctgtgtaacaaaccatccagccctcatttatccatttactatttctcatgc

SEQ ID NO: 272723 - DNA, 120 bp, Artificial Sequence
  ENSG00000127903_22 (sequence is synthesized)
atctggaggtcagctgctggttctgttggtctggaccaggcttggtctggacctggaccaggagggctcagctgggccaatttgatcttcttctcctgactcacatctcacctgggtgtg

SEQ ID NO: 272724 - DNA, 120 bp, Artificial Sequence
  ENSG00000127903_23 (sequence is synthesized)
ttctcagggaggtggcaggagtctgagagggagtggacacacaggcatgctttcaagtctctgatattgtcacatttgcatctagtcccacaggccaaagcaagcctcctagccaagcct

SEQ ID NO: 272725 - DNA, 120 bp, Artificial Sequence
  ENSG00000127903_24 (sequence is synthesized)
aggatcagcacaggaagagccttcctaagcatgtggtcccagggaagggtgaaaagtaggagttatgaacgtaatccacctactacaatgttgaattaaagttataatctcataacttca

SEQ ID NO: 272726 - DNA, 120 bp, Artificial Sequence
  ENSG00000127914_0 (sequence is synthesized)
tacgtggagacgaagatggcggcggcggcggcggtgacggcgcttcccgtgcggctgaggacgatccgccagtgagcgcggagactgcttccacttcgggcgggggagcgccggaccgaa

SEQ ID NO: 272727 - DNA, 120 bp, Artificial Sequence
  ENSG00000127914_1 (sequence is synthesized)
tcggctctctaggccgtggagcttgccgtcccacctccgtccaaatcgacctttcctttctatccccaaccacccctcaacccctgttttcccctgccttccttgcagaggccatggagg

SEQ ID NO: 272728 - DNA, 120 bp, Artificial Sequence
  ENSG00000127914_2 (sequence is synthesized)
acgaggagagacagaagaagctggaggccggcaaagccaagcttgcccagtttcgacaaagaaaagctcagtcggatgggcagagtccttccaagaagcagaaaaaaaagagaaaaacgt

SEQ ID NO: 272729 - DNA, 120 bp, Artificial Sequence
  ENSG00000127914_3 (sequence is synthesized)
caagcagtaaacatgatgtgtcagcacaccatgatttgaatattgatcaatcacagtgtaatgaaatgtacataaatagttctcagagagtagaatcaactgtgattcctgaatctacaa

SEQ ID NO: 272730 - DNA, 120 bp, Artificial Sequence
  ENSG00000127914_4 (sequence is synthesized)
taatgagaactctacatagtggagaaataaccagtcatgagcagggcttctctgtggaactggaaagtgaaatttcaaccacagcagatgactgcagttcagaggtaaatggttgcagtt

SEQ ID NO: 272731 - DNA, 120 bp, Artificial Sequence
  ENSG00000127914_5 (sequence is synthesized)
ttgtgatgagaacaggaaagcctacaaatttattaagggaagaagaatttggtgttgatgattcttattctgaacaaggagcacaagacagtccgactcatctagagatgatggaaagtg

SEQ ID NO: 272732 - DNA, 120 bp, Artificial Sequence
  ENSG00000127914_6 (sequence is synthesized)
agttggctgggaagcagcatgagattgaagagctaaacagagagctggaagaaatgagggttacctatgggactgaaggactgcagcagttacaagaatttgaagctgccattaaacaaa

SEQ ID NO: 272733 - DNA, 120 bp, Artificial Sequence
  ENSG00000127914_7 (sequence is synthesized)
gagatggcattataacccagctcactgctaatttacaacaagcaagaagagaaaaggatgagacaatgagagaatttttagagttgacagaacagagtcaaaaattacagattcaatttc

SEQ ID NO: 272734 - DNA, 120 bp, Artificial Sequence
  ENSG00000127914_8 (sequence is synthesized)
agcaattacaggctagtgaaactctgagaaacagcactcatagtagcacagctgcagacttactacaagccaaacaacagatcctcactcatcaacagcagcttgaagaacaagaccact

SEQ ID NO: 272735 - DNA, 120 bp, Artificial Sequence
  ENSG00000127914_9 (sequence is synthesized)
tattagaagattatcagaaaaagaaagaagacttcacaatgcaaattagtttcttgcaagagaaaattaaagtatatgaaatggaacaagataaaaaagtagaaaactcaaataaagaag

SEQ ID NO: 272736 - DNA, 120 bp, Artificial Sequence
  ENSG00000127914_10 (sequence is synthesized)
aaatacaggaaaaggagacaatcattgaagaattaaacacaaaaataatagaagaagaaaagaaaactcttgagctaaaggataaattaacaactgctgataaattactaggagaattac

SEQ ID NO: 272737 - DNA, 120 bp, Artificial Sequence
  ENSG00000127914_11 (sequence is synthesized)
aagaacagattgtgcaaaagaaccaagaaataaaaaacatgaaattagagctgactaattctaagcaaaaagaaagacagtcttctgaagaaataaaacagttaatggggacagtcgaag

SEQ ID NO: 272738 - DNA, 120 bp, Artificial Sequence
  ENSG00000127914_12 (sequence is synthesized)
aacttcagaagagaaatcataaagacagccagttcgaaactgatatagtacaacgaatggaacaagaaacacaaagaaagttagaacaactccgggcagagctggatgagatgtatgggc

SEQ ID NO: 272739 - DNA, 120 bp, Artificial Sequence
  ENSG00000127914_13 (sequence is synthesized)
agcagatagtgcaaatgaaacaagaattaataagacaacacatggcacagatggaggaaatgaaaacacggcataagggagaaatggagaatgctttaaggtcatattcaaatattacag

SEQ ID NO: 272740 - DNA, 120 bp, Artificial Sequence
  ENSG00000127914_14 (sequence is synthesized)
ttaatgaagatcagataaagttaatgaatgtggcaataaatgaactgaatataaaattgcaagatactaactctcaaaaggaaaaactcaaggaagaactaggactaattttagaagaaa

SEQ ID NO: 272741 - DNA, 120 bp, Artificial Sequence
  ENSG00000127914_15 (sequence is synthesized)
agtgtgctctacagagacagcttgaagaccttgttgaagaattgagcttttcaagggaacagattcagagagctagacagacaatagctgaacaagaaagtaaacttaatgaagcacata

SEQ ID NO: 272742 - DNA, 120 bp, Artificial Sequence
  ENSG00000127914_16 (sequence is synthesized)
agtcccttagtacagtggaagatttgaaagctgagattgtttctgcatctgaatccagaaaggaactagaattaaaacatgaagcagaagttacaaattacaagataaaacttgaaatgt

SEQ ID NO: 272743 - DNA, 120 bp, Artificial Sequence
  ENSG00000127914_17 (sequence is synthesized)
tagaaaaagaaaagaatgctgtgttagacagaatggctgaatcacaagaagctgaattagagaggctgagaacacagcttctatttagtcacgaagaagagctttccaaactgaaggaag

SEQ ID NO: 272744 - DNA, 120 bp, Artificial Sequence
  ENSG00000127914_18 (sequence is synthesized)
atttagaaattgaacatcgaataaatattgaaaaacttaaagataatttaggcattcactataaacagcagatagatggtttacagaatgaaatgagtcaaaagatagaaaccatgcagt

SEQ ID NO: 272745 - DNA, 120 bp, Artificial Sequence
  ENSG00000127914_19 (sequence is synthesized)
ttgaaaaggacaatttgataactaagcagaatcaattaattttggaaatttcaaagctaaaagatttacagcagtctcttgtaaattcaaagtcagaagaaatgactcttcaaatcaatg

SEQ ID NO: 272746 - DNA, 120 bp, Artificial Sequence
  ENSG00000127914_20 (sequence is synthesized)
aacttcaaaaagaaattgaaatactcagacaagaagaaaaagaaaagggtacacttgaacaagaagttcaagaattacaacttaaaacagaattgttagaaaaacagatgaaggaaaaag

SEQ ID NO: 272747 - DNA, 120 bp, Artificial Sequence
  ENSG00000127914_21 (sequence is synthesized)
agaatgatcttcaagaaaaatttgcacaacttgaagcagagaatagcattcttaaagatgaaaagaaaacccttgaagacatgttgaaaatacatactcctgttagccaagaagaaagat

SEQ ID NO: 272748 - DNA, 120 bp, Artificial Sequence
  ENSG00000127914_22 (sequence is synthesized)
tgattttcttagactccattaagtccaaatccaaagactctgtgtgggaaaaagaaatagaaatacttatagaggaaaatgaggacctcaaacaacaatgtattcagctaaatgaagaga

SEQ ID NO: 272749 - DNA, 120 bp, Artificial Sequence
  ENSG00000127914_23 (sequence is synthesized)
ttgaaaagcaaaggaacactttttcatttgctgaaaaaaactttgaagttaactatcaagagttacaagaggagtatgcttgccttctcaaagtaaaagatgatttagaagacagtaaaa

SEQ ID NO: 272750 - DNA, 120 bp, Artificial Sequence
  ENSG00000127914_24 (sequence is synthesized)
ataaacaggaattagagtataaaagtaaacttaaagcacttaatgaagagcttcatttgcaaagaataaatccaactacagtgaaaatgaaaagttctgtctttgatgaagacaaaactt

SEQ ID NO: 272751 - DNA, 120 bp, Artificial Sequence
  ENSG00000127914_25 (sequence is synthesized)
ttgtagcagaaacattggaaatgggtgaggttgttgaaaaggatacaacagaactcatggaaaaacttgaggtaaccaagcgagagaaattagagctgtcacagagactgtctgatcttt

SEQ ID NO: 272752 - DNA, 120 bp, Artificial Sequence
  ENSG00000127914_26 (sequence is synthesized)
ctgaacaattgaaacagaaacatggtgagattagttttctaaatgaagaagttaaatctttaaagcaagagaaagaacaagtttcattgagatgtagagagctagaaatcattattaacc

SEQ ID NO: 272753 - DNA, 120 bp, Artificial Sequence
  ENSG00000127914_27 (sequence is synthesized)
acaacagggcagaaaatgtacagtcatgtgatactcaagtaagctctttattagatggagttgtgaccatgacaagcaggggtgctgaaggatcagtttctaaagtaaataaaagttttg

SEQ ID NO: 272754 - DNA, 120 bp, Artificial Sequence
  ENSG00000127914_28 (sequence is synthesized)
gtgaagaatcaaaaataatggtggaagataaagtttcttttgaaaatatgactgttggagaagaaagtaagcaagaacagttgattttggatcacttaccatctgtaacaaaggaatcat

SEQ ID NO: 272755 - DNA, 120 bp, Artificial Sequence
  ENSG00000127914_29 (sequence is synthesized)
cacttagagcaactcaaccaagtgaaaatgataaacttcagaaagaactcaatgtacttaaatcagaacagaatgatttaaggctacagatggaagcccaacgcatttgcctctctctgg

SEQ ID NO: 272756 - DNA, 120 bp, Artificial Sequence
  ENSG00000127914_30 (sequence is synthesized)
tttattcaactcatgtggatcaggttcgtgaatatatggaaaatgaaaaagataaagctctttgcagtcttaaagaagagcttatttttgctcaagaggaaaagatcaaggaacttcaga

SEQ ID NO: 272757 - DNA, 120 bp, Artificial Sequence
  ENSG00000127914_31 (sequence is synthesized)
aaatacaccagttagaactacagactatgaaaacacaagaaacaggtgatgaaggaaagcctttacatctgctcattggaaaacttcaaaaggcagtgtctgaagaatgttcttattttt

SEQ ID NO: 272758 - DNA, 120 bp, Artificial Sequence
  ENSG00000127914_32 (sequence is synthesized)
tacagactttatgcagtgtccttggtgaatattatactcctgctttaaaatgtgaagtaaatgcagaagacaaagagaattctggtgattacatttctgaaaatgaagatccagaattac

SEQ ID NO: 272759 - DNA, 120 bp, Artificial Sequence
  ENSG00000127914_33 (sequence is synthesized)
aagattatagatatgaagttcaagactttcaagaaaatatgcacactcttctcaacaaagtaacagaagaatacaacaaactcttggtacttcaaacacgactaagcaagatctggggac

SEQ ID NO: 272760 - DNA, 120 bp, Artificial Sequence
  ENSG00000127914_34 (sequence is synthesized)
agcagacagatggtatgaaacttgaatttggagaagaaaaccttccaaaagaggaaacagagtttttatcaatccattctcagatgaccaatttggaagacattgatgtcaatcataaaa

SEQ ID NO: 272761 - DNA, 120 bp, Artificial Sequence
  ENSG00000127914_35 (sequence is synthesized)
gcaagttatcttctctgcaagatcttgaaaaaactaaacttgaagaacaagttcaagaattagaaagcctcatatcctctttgcagcaacagttgaaagaaactgaacaaaactatgagg

SEQ ID NO: 272762 - DNA, 120 bp, Artificial Sequence
  ENSG00000127914_36 (sequence is synthesized)
cagagatccactgtttacagaagaggcttcaagctgttagtgagtccacggttccgccaagcttacctgttgattcggtggtaattacagaatctgatgcacagagaacaatgtaccctg

SEQ ID NO: 272763 - DNA, 120 bp, Artificial Sequence
  ENSG00000127914_37 (sequence is synthesized)
gaagttgtgtgaaaaagaatattgatggtacaatagagttttctggtgaatttggagtgaaagaggaaacaaatatcgttaagttgcttgaaaaacaataccaagaacaattagaagaag

SEQ ID NO: 272764 - DNA, 120 bp, Artificial Sequence
  ENSG00000127914_38 (sequence is synthesized)
aagtagctaaggttattgtgtcaatgagtatagcatttgctcaacaaactgaactgtctagaatatctgggggaaaagaaaatactgcatcatcaaagcaagcacatgctgtgtgtcagc

SEQ ID NO: 272765 - DNA, 120 bp, Artificial Sequence
  ENSG00000127914_39 (sequence is synthesized)
aagaacaacattattttaatgaaatgaaattatcacaggatcaaattggttttcagacttttgagacagtggatgtgaaatttaaagaagaatttaaaccacttagtaaagagttaggag

SEQ ID NO: 272766 - DNA, 120 bp, Artificial Sequence
  ENSG00000127914_40 (sequence is synthesized)
aacatggaaaggaaattttattatcaaatagtgatccccatgatataccagaatcaaaggactgtgtgctgactatttcagaagaaatgttctccaaagataaaacatttatagttagac

SEQ ID NO: 272767 - DNA, 120 bp, Artificial Sequence
  ENSG00000127914_41 (sequence is synthesized)
agtctattcatgatgagatttcagtgtcaagcatggatgcttctagacaactaatgttgaatgaagaacagttggaagatatgagacaggaacttgtacgacaataccaagaacatcaac

SEQ ID NO: 272768 - DNA, 120 bp, Artificial Sequence
  ENSG00000127914_42 (sequence is synthesized)
aggcaacggaattgttaaggcaagcacatatgcggcaaatggagagacagcgagaagaccaggaacagctacaagaagagattaagagacttaatagacaattagcccagagatcctcca

SEQ ID NO: 272769 - DNA, 120 bp, Artificial Sequence
  ENSG00000127914_43 (sequence is synthesized)
tagataatgaaaacctggtttcagagagagagagggtgcttttagaggagctggaagcactaaagcagctgtctttagctggaagagagaagctgtgttgtgagctgcgcaacagcagta

SEQ ID NO: 272770 - DNA, 120 bp, Artificial Sequence
  ENSG00000127914_44 (sequence is synthesized)
cgcaaacacagaatggaaatgaaaaccaaggagaagttgaagaacaaacatttaaagaaaaggaattagacagaaaacctgaagatgtgcctcctgagattttgtctaatgaaaggtatg

SEQ ID NO: 272771 - DNA, 120 bp, Artificial Sequence
  ENSG00000127914_45 (sequence is synthesized)
cactccagaaagctaataatagacttttgaagatcctcttagaagttgtaaagacaacagcagctgttgaagaaacaattggtcgccatgtccttgggattctagatagatctagtaaaa

SEQ ID NO: 272772 - DNA, 120 bp, Artificial Sequence
  ENSG00000127914_46 (sequence is synthesized)
gccagtcatctgccagcctaatttggaggtcagaagcagaggcatctgtaaagtcatgtgtccatgaggaacatacaagagttacagatgaatccattccctcttattctggaagtgata

SEQ ID NO: 272773 - DNA, 120 bp, Artificial Sequence
  ENSG00000127914_47 (sequence is synthesized)
tgccaagaaatgacattaacatgtggtcaaaagtaactgaggaaggaacagagctgtcacaacgacttgtgaggagtggttttgctggaactgaaatagaccctgaaaatgaagaactta

SEQ ID NO: 272774 - DNA, 120 bp, Artificial Sequence
  ENSG00000127914_48 (sequence is synthesized)
tgctgaacattagctctcgactacaagcagcagttgaaaaactcctagaagccataagtgaaactagcagtcagcttgaacatgcgaaagtgacacagacagagttgatgcgtgagtcat

SEQ ID NO: 272775 - DNA, 120 bp, Artificial Sequence
  ENSG00000127914_49 (sequence is synthesized)
ttagacagaaacaagaagcaacagagtcccttaagtgccaagaggaacttcgagagcgccttcatgaggagtccagggccagagaacagctagctgtggagctcagtaaggctgagggcg

SEQ ID NO: 272776 - DNA, 120 bp, Artificial Sequence
  ENSG00000127914_50 (sequence is synthesized)
tcattgatggctatgcagatgaaaaaactctttttgaaaggcaaattcaggaaaaaactgatataatagatcgtcttgagcaggagttgttatgtgcaagtaacaggttgcaagaattgg

SEQ ID NO: 272777 - DNA, 120 bp, Artificial Sequence
  ENSG00000127914_51 (sequence is synthesized)
aattaatgaaggaaaaactagaagtacaatgtcaagctgaaaaagtacgtgatgaccttcaaaaacaagtgaaagctctagaaatagatgtggaagaacaagtcagtaggtttatagagc

SEQ ID NO: 272778 - DNA, 120 bp, Artificial Sequence
  ENSG00000127914_52 (sequence is synthesized)
tggaacaagaaaaaaatactgaactaatggatttaagacagcaaaaccaagcattggaaaagcagttagaaaaaatgagaaaatttttagatgagcaagccattgacagagaacatgaga

SEQ ID NO: 272779 - DNA, 120 bp, Artificial Sequence
  ENSG00000127914_53 (sequence is synthesized)
gagatgtattccaacaggaaatacagaaactagaacagcaacttaaggttgttcctcgattccagcctatcagtgaacatcaaactagagaggttgaacagttagcaaatcatctgaaag

SEQ ID NO: 272780 - DNA, 120 bp, Artificial Sequence
  ENSG00000127914_54 (sequence is synthesized)
aaaaaacagacaaatgcagtgagcttttgctctctaaagagcagcttcaaagggatatacaagaaaggaatgaagaaatagagaaactggagttcagagtaagagaactggagcaggcgc

SEQ ID NO: 272781 - DNA, 120 bp, Artificial Sequence
  ENSG00000127914_55 (sequence is synthesized)
ttcttgtgagtgcagatacttttcaaaaggtagaggaccgaaaacactttggagctgtagaagctaaaccagaattgtccctagaagtacaattgcaggctgaacgagatgccatagaca

SEQ ID NO: 272782 - DNA, 120 bp, Artificial Sequence
  ENSG00000127914_56 (sequence is synthesized)
gaaaggaaaaagagattacaaacttagaagagcaattagaacagtttagagaagaactggaaaataagaatgaagaagttcaacaattacatatgcaattagaaatacagaaaaaggaat

SEQ ID NO: 272783 - DNA, 120 bp, Artificial Sequence
  ENSG00000127914_57 (sequence is synthesized)
ctactacccgcctacaagaacttgaacaggaaaacaaattatttaaggatgacatggagaaactgggacttgccataaaggaatctgatgccatgtctactcaagaccaacatgtgctat

SEQ ID NO: 272784 - DNA, 120 bp, Artificial Sequence
  ENSG00000127914_58 (sequence is synthesized)
ttgggaaatttgctcaaataatacaggaaaaagaggtagaaattgaccaattaaatgaacaagttacgaaactccagcagcaacttaaaattacaacagataacaaggttattgaagaaa

SEQ ID NO: 272785 - DNA, 120 bp, Artificial Sequence
  ENSG00000127914_59 (sequence is synthesized)
aaaatgaactgataagggatcttgaaacccaaatagaatgtttgatgagtgatcaagaatgtgtgaagagaaatagagaagaagaaatagagcagctcaatgaagtgattgaaaaacttc

SEQ ID NO: 272786 - DNA, 120 bp, Artificial Sequence
  ENSG00000127914_60 (sequence is synthesized)
aacaggaattggcaaatattggacagaagacatcaatgaatgctcattccctctcagaagaagcagacagtttaaaacatcaattggatgtggttatagctgaaaagctggccttggaac

SEQ ID NO: 272787 - DNA, 120 bp, Artificial Sequence
  ENSG00000127914_61 (sequence is synthesized)
agcaagtagaaaccgctaatgaagaaatgaccttcatgaaaaatgtacttaaagaaaccaattttaaaatgaatcagctaacacaggaattattcagcttaaagagagaacgtgaaagtg

SEQ ID NO: 272788 - DNA, 120 bp, Artificial Sequence
  ENSG00000127914_62 (sequence is synthesized)
tggaaaagattcaaagcataccagagaatagtgttaacgtggctatagatcatctgagcaaagacaaacctgaactagaagtagtccttacagaggatgctcttaaatccctagaaaatc

SEQ ID NO: 272789 - DNA, 120 bp, Artificial Sequence
  ENSG00000127914_63 (sequence is synthesized)
agacatacttcaaatcttttgaagaaaatggcaaaggttccataattaatttggaaacaaggttgctacaacttgagagcactgttagtgcaaaggacttagaacttacccagtgttata

SEQ ID NO: 272790 - DNA, 120 bp, Artificial Sequence
  ENSG00000127914_64 (sequence is synthesized)
aacaaataaaagacatgcaagaacaaggccagtttgaaacagaaatgcttcaaaagaagattgtaaacctacagaaaatagttgaagaaaaagtggctgctgctcttgtcagtcaaatcc

SEQ ID NO: 272791 - DNA, 120 bp, Artificial Sequence
  ENSG00000127914_65 (sequence is synthesized)
aacttgaggcagttcaggaatatgcaaaattctgtcaagataatcaaacaatttcatcagaacctgaaagaacaaatattcagaatttaaatcaactaagagaagatgagttggggtcag

SEQ ID NO: 272792 - DNA, 120 bp, Artificial Sequence
  ENSG00000127914_66 (sequence is synthesized)
atatatcagcattaaccttgagaatatcagaattagaaagccaggttgttgaaatgcatactagtttgattttagaaaaagaacaagtagaaattgcagaaaaaaatgttttagaaaaag

SEQ ID NO: 272793 - DNA, 120 bp, Artificial Sequence
  ENSG00000127914_67 (sequence is synthesized)
aaaagaagctgctagaactacagaagctattggagggcaatgagaaaaaacagagagagaaagaaaagaaaagaagccctcaagatgttgaagttctcaagacaactactgagctatttc

SEQ ID NO: 272794 - DNA, 120 bp, Artificial Sequence
  ENSG00000127914_68 (sequence is synthesized)
atagcaatgaagaaagtggattttttaatgaactcgaggctcttagagctgaatcagtggctaccaaagcagaacttgccagttataaagaaaaggctgaaaaacttcaagaagagcttt

SEQ ID NO: 272795 - DNA, 120 bp, Artificial Sequence
  ENSG00000127914_69 (sequence is synthesized)
tggtaaaagaaacaaatatgacatctcttcagaaagacttaagccaagttagggatcacctcgcagaggcaaaagagaaattgtccattttagaaaaagaagatgagactgaggtacaag

SEQ ID NO: 272796 - DNA, 120 bp, Artificial Sequence
  ENSG00000127914_70 (sequence is synthesized)
aaagcaaaaaggcctgcatgtttgagccacttcctataaaactgagtaagagcattgcatcccagacagatgggactctgaagatcagtagcagcaatcagactccacaaattcttgtta

SEQ ID NO: 272797 - DNA, 120 bp, Artificial Sequence
  ENSG00000127914_71 (sequence is synthesized)
aaaatgcaggaatacaaattaatttacagagtgaatgttcctcagaagaagttactgaaataatcagtcagtttactgaaaaaattgagaagatgcaagaactacatgctgctgaaattt

SEQ ID NO: 272798 - DNA, 120 bp, Artificial Sequence
  ENSG00000127914_72 (sequence is synthesized)
tggacatggaatccagacatatttcagaaactgaaaccttaaagagggaacactatgttgccgttcagttactgaaagaggaatgtggtaccttgaaggcagtgatacagtgtctgagaa

SEQ ID NO: 272799 - DNA, 120 bp, Artificial Sequence
  ENSG00000127914_73 (sequence is synthesized)
gtaaagagggatcctcaattcctgagctagcacattctgatgcttaccagactagagaaatatgctccagtgattctggatcagactggggtcagggaatttatcttacacacagtcagg

SEQ ID NO: 272800 - DNA, 120 bp, Artificial Sequence
  ENSG00000127914_74 (sequence is synthesized)
gatttgacatagcatcagaaggccgaggagaagaaagtgaaagtgcaacagattcctttccaaagaaaataaagggattactgagagctgtccataatgaaggcatgcaggtgctttctc

SEQ ID NO: 272801 - DNA, 120 bp, Artificial Sequence
  ENSG00000127914_75 (sequence is synthesized)
tcactgagtctccctatagtgatggagaggaccattctattcagcaggtttcagaaccttggctagaagagagaaaagcttacatcaatacaatctcatctctaaaggatttaattacaa

SEQ ID NO: 272802 - DNA, 120 bp, Artificial Sequence
  ENSG00000127914_76 (sequence is synthesized)
agatgcaactgcaaagagaagccgaggtttatgatagttctcaatctcatgagagcttctcagactggcgaggtgaactactgcttgcccttcaacaagttttcttagaagagcgtagtg

SEQ ID NO: 272803 - DNA, 120 bp, Artificial Sequence
  ENSG00000127914_77 (sequence is synthesized)
ttttactagcagcatttcggacggagctgacagctctaggtactacagatgcagttggtttactaaactgtttggaacagagaatacaagaacagggtgttgaatatcaagcagctatgg

SEQ ID NO: 272804 - DNA, 120 bp, Artificial Sequence
  ENSG00000127914_78 (sequence is synthesized)
aatgcctccagaaagcagatagaaggagtttgttatctgaaattcaggcactgcatgcacaaatgaatggtaggaaaattactctgaaaagagaacaagagagtgagaaaccaagccaag

SEQ ID NO: 272805 - DNA, 120 bp, Artificial Sequence
  ENSG00000127914_79 (sequence is synthesized)
aactcttggaatataatatacagcagaagcagtctcaaatgctggagatgcaagtggagctcagcagtatgaaagacagagcaacggaactgcaggagcagctgagttctgagaaaatgg

SEQ ID NO: 272806 - DNA, 120 bp, Artificial Sequence
  ENSG00000127914_80 (sequence is synthesized)
tggttgctgaactgaagagtgagcttgcacaaactaaattggaactagaaacaacactcaaggcacagcataaacacctaaaagaattggaggctttcaggttggaagttaaagataaga

SEQ ID NO: 272807 - DNA, 120 bp, Artificial Sequence
  ENSG00000127914_81 (sequence is synthesized)
cagatgaagtacatttgcttaatgacacattagcaagtgaacagaaaaaatcaagagagctccagtgggctttggagaaagagaaagccaagttgggacgcagtgaagaacgggataaag

SEQ ID NO: 272808 - DNA, 120 bp, Artificial Sequence
  ENSG00000127914_82 (sequence is synthesized)
aagaacttgaggatctgaagttttcacttgagagtcagaaacaaaggaatcttcagctaaatctacttttggaacaacagaaacaactactgaacgaatcccagcaaaaaatagaatcac

SEQ ID NO: 272809 - DNA, 120 bp, Artificial Sequence
  ENSG00000127914_83 (sequence is synthesized)
agagaatgctatatgatgcccagttgtcagaagaacaaggtcgaaacttagagcttcaggtacttcttgaatctgagaaagttcgaattcgggaaatgagtagtaccctagatagggagc

SEQ ID NO: 272810 - DNA, 120 bp, Artificial Sequence
  ENSG00000127914_84 (sequence is synthesized)
gggaattgcacgcacagctgcagagcagtgatggtactggacagtctcggccacccttgccctcagaggacctactgaaagagctgcagaaacagctagaggaaaaacacagtcgcatag

SEQ ID NO: 272811 - DNA, 120 bp, Artificial Sequence
  ENSG00000127914_85 (sequence is synthesized)
tagaattgttaaatgagactgaaaaatataaactggattctttgcaaacacgacagcaaatggaaaaagataggcaggttcacaggaaaacactgcagacagaacaggaggccaacactg

SEQ ID NO: 272812 - DNA, 120 bp, Artificial Sequence
  ENSG00000127914_86 (sequence is synthesized)
agggacagaaaaaaatgcatgagctccagtccaaagtggaagatcttcagcgccagctggaagagaaaagacaacaagtttataagttagaccttgaaggacagcgactacaaggaatca

SEQ ID NO: 272813 - DNA, 120 bp, Artificial Sequence
  ENSG00000127914_87 (sequence is synthesized)
tgcaggaattccagaagcaagaactagaacgagaagaaaaacgagaaagtagaagaattctgtatcagaaccttaatgagccaaccacgtggagcttaaccagtgatagaactagaaatt

SEQ ID NO: 272814 - DNA, 120 bp, Artificial Sequence
  ENSG00000127914_88 (sequence is synthesized)
gggttcttcaacagaaaatagaaggagaaacaaaagaatcaaactacgctaaattgattgaaatgaatggaggaggaaccggctgtaatcatgaattagaaatgatcagacaaaagcttc

SEQ ID NO: 272815 - DNA, 120 bp, Artificial Sequence
  ENSG00000127914_89 (sequence is synthesized)
aatgtgtagcttcaaaactacaggttctaccccagaaagcctctgagagactacagtttgaaacagcagatgatgaagatttcatttgggttcaggaaaatattgatgaaattattttac

SEQ ID NO: 272816 - DNA, 120 bp, Artificial Sequence
  ENSG00000127914_90 (sequence is synthesized)
aactacagaaattaactggccagcaaggtgaagagcccagcttggtgtccccaagtacttcttgtggctcattgactgaaagactactgagacaaaatgctgagctgacagggcatatca

SEQ ID NO: 272817 - DNA, 120 bp, Artificial Sequence
  ENSG00000127914_91 (sequence is synthesized)
gtcaactgactgaagagaagaatgacttaaggaacatggttatgaagctggaagagcagatcaggtggtatcgacagacaggagctggtagagataattcttccaggttttcattgaatg

SEQ ID NO: 272818 - DNA, 120 bp, Artificial Sequence
  ENSG00000127914_92 (sequence is synthesized)
gtggtgccaacattgaagccatcattgcctctgaaaaagaagtatggaacagagaaaaattgactctccagaaatctttgaaaagggcagaggctgaagtatacaaactgaaagctgaac

SEQ ID NO: 272819 - DNA, 120 bp, Artificial Sequence
  ENSG00000127914_93 (sequence is synthesized)
taagaaatgactctttacttcaaactctgagccctgattctgaacatgtcactttaaagagaatttatggtaaatacttgagggcagaaagttttcgaaaggctctcatttaccagaaga

SEQ ID NO: 272820 - DNA, 120 bp, Artificial Sequence
  ENSG00000127914_94 (sequence is synthesized)
aatacctgctgctgttactgggtgggttccaggaatgtgaagatgccaccttggccctgcttgcccggatgggggggcagccagctttcacggatctagaggtgatcaccaatcgcccaa

SEQ ID NO: 272821 - DNA, 120 bp, Artificial Sequence
  ENSG00000127914_95 (sequence is synthesized)
agggcttcaccaggtttcggtcggccgtcagagtatccattgcaatttccagaatgaaatttttggttcgacggtggcatcgagtcacaggttctgtttccatcaatattaacagagatg

SEQ ID NO: 272822 - DNA, 120 bp, Artificial Sequence
  ENSG00000127914_96 (sequence is synthesized)
gctttggactgaatcaaggtgcagaaaagactgactcattttatcattcttctggtgggctggagttatatggagaaccaagacatactacgtatcgctcaagatcagatctggactata

SEQ ID NO: 272823 - DNA, 120 bp, Artificial Sequence
  ENSG00000127914_97 (sequence is synthesized)
ttaggtcccctttaccatttcagaataggtacccaggcactccagctgatttcaatcctggttctttagcatgttctcagcttcagaattacgatcctgacagagccctaacagattata

SEQ ID NO: 272824 - DNA, 120 bp, Artificial Sequence
  ENSG00000127914_98 (sequence is synthesized)
tcactcggctagaggcactgcaaagacgacttggaactatacagtcaggttcaactactcaatttcatgctggcatgagaagataatcctttgaaacatcattaattgaagtgattttaa

SEQ ID NO: 272825 - DNA, 120 bp, Artificial Sequence
  ENSG00000127914_99 (sequence is synthesized)
atagatttccttttgtaaatcaatggttcttttgtgcttttgtattgtgaatattcaatgggaccaatatgaacacagcttatgattgtatacaaatcccttgccagcacatgaaaacaa

SEQ ID NO: 272826 - DNA, 120 bp, Artificial Sequence
  ENSG00000127914_100 (sequence is synthesized)
actggaatttgtatatataagcattgtgtatgtattcatgcacaataattattgaattacctgtatatttgtggaatgctaatttaaaacattaaattataaaccttgtgtatttatcaa

SEQ ID NO: 272827 - DNA, 120 bp, Artificial Sequence
  ENSG00000127914_101 (sequence is synthesized)
atgggtgaaaagattaaacttttacgcattacaatactgctgaatgtgtagctcgaggtgtcctgcacttttcttataaggctactgaagttacatgttttgcctaatatattctactgg

SEQ ID NO: 272828 - DNA, 120 bp, Artificial Sequence
  ENSG00000127914_102 (sequence is synthesized)
tgatgaagacagataatatcacttgtagagacctatttttgtataatggtagaagttttgaattttatggggtattttgtcaagtactgaaataaaaatgacttcaccattttcaccaca

SEQ ID NO: 272829 - DNA, 120 bp, Artificial Sequence
  ENSG00000127914_103 (sequence is synthesized)
atggaggacgaggagagacagaagaagctggaggccggcaaagccaaggtaggagagcccgagggttattttcttttttctcttgcccagtttcgacaaagaaaagctcagtcggatggg

SEQ ID NO: 272830 - DNA, 120 bp, Artificial Sequence
  ENSG00000127914_104 (sequence is synthesized)
tctgctgtctagttcaagttttaatcctgttaatgtaaaactatcacacacctgattcttaggatctgtagaaaattttatagggatgacaataataatattattactaagttataataa

SEQ ID NO: 272831 - DNA, 120 bp, Artificial Sequence
  ENSG00000127914_105 (sequence is synthesized)
ttccaaacaccaacttgaaccagatccccaattaaaacaacagtattttttatgtagccataatttttttttttttttgccgaaatctgaataaactacatatatttagcatcaggaaca

SEQ ID NO: 272832 - DNA, 120 bp, Artificial Sequence
  ENSG00000127914_106 (sequence is synthesized)
cactctatactaagacagcagctttagatcttgttagggacacctatctcaaccttggagtgggcattgtctttctgtcattttatttaactcctttttcaagcactggaaaagtggcta

SEQ ID NO: 272833 - DNA, 120 bp, Artificial Sequence
  ENSG00000127914_107 (sequence is synthesized)
cacggttttgtttttttcttttaaatcattccattagccatatatagcaaactcactttgacattttggaaataacattgtgctgaggtgctccattatgcagttactatcattcagttt

SEQ ID NO: 272834 - DNA, 120 bp, Artificial Sequence
  ENSG00000127914_108 (sequence is synthesized)
tactatcttcatttatagttttgtgagtccaccaattagcatctcgaaggtttacctttatctgtctttaatccatctttttaatcatgaatggaaatcggaagtagtatgcttctgaaa

SEQ ID NO: 272835 - DNA, 120 bp, Artificial Sequence
  ENSG00000127914_109 (sequence is synthesized)
ctctttccagggaaacatctcttcttgatttgagaaatgcaaatttatttaacattcttatccctttcttgactaaatttaaatacttcttggtatttgggagctggattcttgtcaact

SEQ ID NO: 272836 - DNA, 120 bp, Artificial Sequence
  ENSG00000127914_110 (sequence is synthesized)
gctgtataaaatatactcacaaaaccattgcagaaaagcaagaaatatttatgtagaagttcttatgaaaacttattgaatttaattttgaaaactgaagctaagagagataataaatat

SEQ ID NO: 272837 - DNA, 120 bp, Artificial Sequence
  ENSG00000127914_111 (sequence is synthesized)
ctagagataactattaacagtattctttcaaacataaaataataagataattgggagctgagcataaaacattatttggaaaaattaactttgcttttcttcattgcattttgtgaattc

SEQ ID NO: 272838 - DNA, 120 bp, Artificial Sequence
  ENSG00000127914_112 (sequence is synthesized)
tgtactttttcagtgcaaagtaaattaaaatggttgtttcaatgtaatagactttgtccttatttttatcttgtacattgatactttgtcttaaaaatcatcataccatctgtgtatgaa

SEQ ID NO: 272839 - DNA, 120 bp, Artificial Sequence
  ENSG00000127914_113 (sequence is synthesized)
acatgtccatgtatgtgtagtatgtaaaggattttcagtttttcatcattaaatagataacattttaaaaaaatcttttctatataaattttgattggatattaatcacatacttaactg

SEQ ID NO: 272840 - DNA, 120 bp, Artificial Sequence
  ENSG00000127914_114 (sequence is synthesized)
ttaatcacctgatgttagcaaaacttttccttactttgattttgtagaggttaatataaaaatgtgaaatattaagtgagaatagttatcctacattagtattaaagactttaagcacaa

SEQ ID NO: 272841 - DNA, 120 bp, Artificial Sequence
  ENSG00000127914_115 (sequence is synthesized)
gcggcaaatggagagacagcgagaagaccaggaacagacaagaagagattaagagacttaatagacaattagcccaggtaagggtcttgtagtcccctttctctccccagttattttttt

SEQ ID NO: 272842 - DNA, 120 bp, Artificial Sequence
  ENSG00000127914_116 (sequence is synthesized)
ccttttgaatagagtgaagcagcaagagcaagagaaataatgttacaactgcatttctcaagactgctgctatggagatttcaaacttgaccttccctgccaggttctgctttgaaggct

SEQ ID NO: 272843 - DNA, 120 bp, Artificial Sequence
  ENSG00000127914_117 (sequence is synthesized)
tacttattactacagacatcgctgatattaaaagcagttttattgctcgtctaattagatgtttatatttttattcttctcttcaaggacttaattatgctagtttaaaaggtgtttttg

SEQ ID NO: 272844 - DNA, 120 bp, Artificial Sequence
  ENSG00000127914_118 (sequence is synthesized)
tttgcttgcttttatttttgttttttgattttttttggtttttgttttggtttgggtttttttgagggggcatcaagattgatagagacctaagtttttttagatttgtagtttttttcc

SEQ ID NO: 272845 - DNA, 120 bp, Artificial Sequence
  ENSG00000127914_119 (sequence is synthesized)
tggactttccccttccttttattgtgcagttgtatgaattaattttataacatttatttgatagtgctaaaaaagaaactttttatactgctatggtagatcttgataaactaaaaagaa

SEQ ID NO: 272846 - DNA, 120 bp, Artificial Sequence
  ENSG00000127914_120 (sequence is synthesized)
ctttttaatgtattagaaaattgataaagcaaattaggaatctcggcagctgtatcttctgggatggattcttatagcacctatttggcaactgtcaaagtcagtggctcgtggttagaa

SEQ ID NO: 272847 - DNA, 120 bp, Artificial Sequence
  ENSG00000127914_121 (sequence is synthesized)
catttggatgaaaataactcagtaattgttaatacttctattttccattttattcataaaagaaacgggcatatattaaagcttatttctaaaatttcactgcctacccctccttattca

SEQ ID NO: 272848 - DNA, 120 bp, Artificial Sequence
  ENSG00000127914_122 (sequence is synthesized)
acaagctcatatggttacacaaacaggtgaaaagatttcactttgttttctttcttattattattaagttaaaacatattttcttggtcacattttcttctcattctcataatgttaagg

SEQ ID NO: 272849 - DNA, 120 bp, Artificial Sequence
  ENSG00000127914_123 (sequence is synthesized)
atacaatctatattaattactctaggggttagaggattgtctaattggtttaaacagctacgttgactttaaaataaactgccattcccctgataaggttaagcccattggattcattct

SEQ ID NO: 272850 - DNA, 120 bp, Artificial Sequence
  ENSG00000127914_124 (sequence is synthesized)
ttttctttattttagagctgtatgttaagaaaacagtctttccaatcataaaacagaaaatactctttagaggaaaatccacaatgcatgtaactaattattttttaatccttttttaaa

SEQ ID NO: 272851 - DNA, 120 bp, Artificial Sequence
  ENSG00000127914_125 (sequence is synthesized)
aaaattgtgagccataacatacagaaaattacaaattgcaaatatgcagtatgacgcatttttaaatgagtatctatggaaacatcacccatgtgaatatagccagtatcccaacagccc

SEQ ID NO: 272852 - DNA, 120 bp, Artificial Sequence
  ENSG00000127914_126 (sequence is synthesized)
cttctcccaagcacatgctcctctgagtaacttagaggtaatcattgttctgatttttctttagttttactatctatttatatattcctaaaacatttaagtttcaagtttttttctgtt

SEQ ID NO: 272853 - DNA, 120 bp, Artificial Sequence
  ENSG00000127914_127 (sequence is synthesized)
tttgaactttatcaatctgtatgtattttttatcttgtttctttcacctctctgtaacattcttccaacattcttccaagttactgcatttttcaagttactgcattcttccaaattagt

SEQ ID NO: 272854 - DNA, 120 bp, Artificial Sequence
  ENSG00000127914_128 (sequence is synthesized)
ttccaaattagtagtagaacattcttccaagttactgcatttatctctagttcattcattcttgttactctataactctatgaccctgtgtagggccaggcacggtggcttacacctgta

SEQ ID NO: 272855 - DNA, 65 bp, Artificial Sequence
  ENSG00000127914_129 (sequence is synthesized)
ccaggcgtggtggcgggtgcctgtaaggccagccactcaggagactgaagcagagaattagcctg

SEQ ID NO: 272856 - DNA, 120 bp, Artificial Sequence
  ENSG00000127914_130 (sequence is synthesized)
ttctttcacactcattaggataatcaaagcttccagtttagtgcatgagctaattattaagttagccaaagcttaaactcttgtaaccagcagagaaactgactttaaataatttaagtg

SEQ ID NO: 272857 - DNA, 120 bp, Artificial Sequence
  ENSG00000127914_131 (sequence is synthesized)
aaaatatgatttatcaccccagatcccactcctcccaaaaatgatttcctactatgttcattcagcggactgatgacacaaaatgcacaatgagcaccagtgtgcaaggtactctgagtc

SEQ ID NO: 272858 - DNA, 120 bp, Artificial Sequence
  ENSG00000127914_132 (sequence is synthesized)
ccagtgtgcaaggtactctgagtctacagagcctaactggagaacgtattcctaagtagcgcatggcagaaagtggtaaggccgtgccgcagcactccagcctgggcagcagagcgagac

SEQ ID NO: 272859 - DNA, 120 bp, Artificial Sequence
  ENSG00000127914_133 (sequence is synthesized)
taaggaagtcagctaacttgtagaagctttagagtttcaagttttttatgcaagtggtttttttttgttaggcacatgaatcacaaaatttcataattaagctctttgtgtaatttattt

SEQ ID NO: 272860 - DNA, 120 bp, Artificial Sequence
  ENSG00000127914_134 (sequence is synthesized)
caaaagcaaatgggaatctcagtaatgtagtttttaagataatagtcattactgagttccctaaaagtgatcagcctatgttaaactgaattagcaggaaaatacaaatttatagctata

SEQ ID NO: 272861 - DNA, 120 bp, Artificial Sequence
  ENSG00000127914_135 (sequence is synthesized)
tggaattgttaaatgtattaatatttaacagagataaatggacatttttagggctttgacttctttgcattgagatagacatctttgttatatataatttacataatatgaccaagtgcg

SEQ ID NO: 272862 - DNA, 120 bp, Artificial Sequence
  ENSG00000127914_136 (sequence is synthesized)
tagtattacatatttatggtagaatacagaaaagaatagagtgaaaatcatcccttgaatcacctaaatcctaaaataatgactacctaacacctgggtaaatatgtctccagacctttt

SEQ ID NO: 272863 - DNA, 120 bp, Artificial Sequence
  ENSG00000127914_137 (sequence is synthesized)
caatgtgcatgtgtacataagcttgtatttttcataaaaaaggaatcctgatacatattttataacatactttttttcatttaacatactgaggcatttaaaattttcagtttgttttta

SEQ ID NO: 272864 - DNA, 120 bp, Artificial Sequence
  ENSG00000127914_138 (sequence is synthesized)
ttgtagcaaacatgtagtaagggtttggttggctttcaatggataaaaggacggtatccaaaggggggtttgaatttcccacttctgggaacagactcctattaaagttccaggggacta

SEQ ID NO: 272865 - DNA, 120 bp, Artificial Sequence
  ENSG00000127914_139 (sequence is synthesized)
tctgcagtggggtgctgaacaaaagatatcagcagtgctcatcattgtagtaacttgggtaactcctccaaatactttgtgtgactatcagaaatctttggaattttttaatgtacattc

SEQ ID NO: 272866 - DNA, 120 bp, Artificial Sequence
  ENSG00000127914_140 (sequence is synthesized)
ttgaaattctgaatgtacaaatatgagttccatttaaagtttttttttttaattttaagtcttgcatccattaatgtattctcttaaacttttatccttatatatttatagctctgaaat

SEQ ID NO: 272867 - DNA, 120 bp, Artificial Sequence
  ENSG00000127914_141 (sequence is synthesized)
cttggccactagcactatgaggaaaacatgcctgaaatttatttttatacgttaccaaccctttttgtttgtttttttgagacagggtctcactgtcactgaggctggagtacagtggca

SEQ ID NO: 272868 - DNA, 90 bp, Artificial Sequence
  ENSG00000127914_142 (sequence is synthesized)
cagtggcatggtctcaactcatccccccacctcagcctcctgagtcgatgggactacaggcacatgccagcacgcccagctaatttttgt

SEQ ID NO: 272869 - DNA, 60 bp, Artificial Sequence
  ENSG00000127914_143 (sequence is synthesized)
actcctggccttaagcagtccttgcattaccaactcttgggactataatttttcatgttt

SEQ ID NO: 272870 - DNA, 120 bp, Artificial Sequence
  ENSG00000127914_144 (sequence is synthesized)
actgcattaccaactcttgggactataatttttcatgtttcctttgaagtaatctccttaactacaaatcagttcttatcaacaaatatttataaaccaaatatgagttgcttgattatg

SEQ ID NO: 272871 - DNA, 120 bp, Artificial Sequence
  ENSG00000127920_0 (sequence is synthesized)
agtcctgcagccccagcccagccgtcccccgcgggcgtggcaggtcctgagtcagggcctgtccgtggccagcatccctgctgggcgattgagcagcgggaagctgcttggacccagtct

SEQ ID NO: 272872 - DNA, 120 bp, Artificial Sequence
  ENSG00000127920_1 (sequence is synthesized)
caaacttaaccctcatctagcacccgggcaggcctcctgggttgcagggacttgagaaaaggcagagttctcaggtcctaggaagctggggcacgctggcgtgacaagcgtcccggagaa

SEQ ID NO: 272873 - DNA, 120 bp, Artificial Sequence
  ENSG00000127920_2 (sequence is synthesized)
agccaagccctcggggagctggggaccgcagcagggctgcagtcacatcctgcgcgggtgggcggcgggccaggccttcagttgtttcgggacgcgccgagcttcgccgctcttccagcg

SEQ ID NO: 272874 - DNA, 120 bp, Artificial Sequence
  ENSG00000127920_3 (sequence is synthesized)
gctccgctgccagagctagcccgagcccggttctggggcgaaaatgcctgcccttcacatcgaagatttgccagagaaggaaaaactgaaaatggaagttgagcagcttcgcaaagaagt

SEQ ID NO: 272875 - DNA, 120 bp, Artificial Sequence
  ENSG00000127920_4 (sequence is synthesized)
gaagttgcagagacaacaagtgtctaaatgttctgaagaaataaagaactatattgaagaacgttctggagaggatcctctagtaaagggaattccagaagacaagaacccctttaaaga

SEQ ID NO: 272876 - DNA, 120 bp, Artificial Sequence
  ENSG00000127920_5 (sequence is synthesized)
aaaaggcagctgtgttatttcataaataacttgggagaaactgcatcctaagtggaagaactagtttgttttagttttcccagataaaaccaacatgctttttaaggaaggaagaatgaa

SEQ ID NO: 272877 - DNA, 120 bp, Artificial Sequence
  ENSG00000127920_6 (sequence is synthesized)
attaaaaggagactttcttaagcaccatatagatagggttatgtataaaagcatatgtgctactcatctttgctcactatgcagtcttttttaagagagcagagagtatcagatgtacaa

SEQ ID NO: 272878 - DNA, 120 bp, Artificial Sequence
  ENSG00000127920_7 (sequence is synthesized)
ttatggaaataagaacattacttgagcatgacacttctttcagtatattgcttgatgcttcaaataaagttttgtcttgggaagatgagtgttggtgatttaagaagacacttttcatgc

SEQ ID NO: 272879 - DNA, 120 bp, Artificial Sequence
  ENSG00000127920_8 (sequence is synthesized)
attaacttttatatttctccccgtaatcttttgggtgtggagtatgattgggtttggaatatgattcagaaggttaggtggttcgacagatcacatctccaaaccctgcgtcaatggttt

SEQ ID NO: 272880 - DNA, 120 bp, Artificial Sequence
  ENSG00000127920_9 (sequence is synthesized)
agagtgctgagttctgacctctggaacgtgtttgatctaaccttaactattaagaaactgagcaggtagaattcctataacattgacagaagtcagattatctgagtcaggaacaaggcc

SEQ ID NO: 272881 - DNA, 120 bp, Artificial Sequence
  ENSG00000127920_10 (sequence is synthesized)
aagccacatctatgttagtacttccctagtttatcatcatttagatcttcttaatagtgttcctgtagtagtagccttgaagaaaatactgagttggggttcaggaagagtgccctgcct

SEQ ID NO: 272882 - DNA, 120 bp, Artificial Sequence
  ENSG00000127920_11 (sequence is synthesized)
ctctgccgtgtagtggccaggccagccctggctttgagagccagtacttattcctgcacagagctacatctcccatgtgctctccaggtcttgggcatggcactactccagttctgtggc

SEQ ID NO: 272883 - DNA, 120 bp, Artificial Sequence
  ENSG00000127920_12 (sequence is synthesized)
cctctgcactcatgcttgccagcattttccagcaggcctgggccaaacatgcctttttttcttctcctccaaaggaaccagtgaatctttgcccactttaaagattagttggtctttttc

SEQ ID NO: 272884 - DNA, 120 bp, Artificial Sequence
  ENSG00000127920_13 (sequence is synthesized)
ttactgatttgtaggaattcttcatatattctggccatttattcgtgtttggtgatatgtgttgcgaataccttctcccagtctgtggcttaccttttcacagtgaccttcccttcagtg

SEQ ID NO: 272885 - DNA, 120 bp, Artificial Sequence
  ENSG00000127920_14 (sequence is synthesized)
gttttatcctgcagggcaacacgtcagagtataactcctgctcaagttcataacaaaggtacctgaagcccaaacctcacaaaaagggacctttctttctcaccttgagcattctcccgc

SEQ ID NO: 272886 - DNA, 120 bp, Artificial Sequence
  ENSG00000127920_15 (sequence is synthesized)
ttcttctccgtcttttgggtcaaaattgctccaagtttgagccaaaagaaaaacgtggaaaaacccttgctggttagctctagctcaaatggacttagtcattaacttgacctgcaattt

SEQ ID NO: 272887 - DNA, 120 bp, Artificial Sequence
  ENSG00000127920_16 (sequence is synthesized)
tcaatgtggcaccagaagccaatgtttctccttgactagctcttttctcccacttacacatgtaggtataccttactatcaagcgagagaggcgcctgtaacctgtagcagctttctaaa

SEQ ID NO: 272888 - DNA, 120 bp, Artificial Sequence
  ENSG00000127920_17 (sequence is synthesized)
gtatatcagcatcctcgttctgaaattcctttcctttccctctctgggaaagaacagaataccccaggcttttgaaaaatagtttacacagaccaaaagcagaaactatttccttcagtt

SEQ ID NO: 272889 - DNA, 120 bp, Artificial Sequence
  ENSG00000127920_18 (sequence is synthesized)
tcctgacactgtccaagtgatgacatcaattggcattactgagagcccagggataattttagcccaaaactactactcctaggaaggagtagtatgatctactactcttaggaaggattt

SEQ ID NO: 272890 - DNA, 120 bp, Artificial Sequence
  ENSG00000127920_19 (sequence is synthesized)
aggaatagtaaaggtgtatttcttccaaacagcatagaactattagtactattagtcatttaacatttaacatggcatgggattttagagctttggtgcctgtaaagttttacttctatt

SEQ ID NO: 272891 - DNA, 120 bp, Artificial Sequence
  ENSG00000127920_20 (sequence is synthesized)
agctgtttcatttctttgcacttataaagttttcttctgttgcctatgaaagcaaacatttattccggttactggcaaggcagtttaaatcacctgcttctttcatgaaaggccaagaca

SEQ ID NO: 272892 - DNA, 120 bp, Artificial Sequence
  ENSG00000127920_21 (sequence is synthesized)
atacatttattccctaacttgttgggagttgcgattacaagtctatatcctgatttctattagcacattcagctatccatttgtgtacactcccaagtcctagcttttgctcttcatgtc

SEQ ID NO: 272893 - DNA, 120 bp, Artificial Sequence
  ENSG00000127920_22 (sequence is synthesized)
tctttcaaccatatgatcaatcagttggacgacttctggtttttcctgaataaatatctaatcttataggtgcttctattaaatataattctgtttctttttcttaccatttatcattat

SEQ ID NO: 272894 - DNA, 120 bp, Artificial Sequence
  ENSG00000127920_23 (sequence is synthesized)
aacccagccaacatgtagaagtgcaataaaaatattttaattttcaactgttcaactgctaaaattattagcttgtaattaaaaaagaaaaaatacatccactatatatttagatatatt

SEQ ID NO: 272895 - DNA, 120 bp, Artificial Sequence
  ENSG00000127920_24 (sequence is synthesized)
gtaaatgtaacctttggtgactgataatttgttaagtagaatttaaattatgtatccaatttattcaaagtgtatagttgtgtaattatttactatttgattaaaaatagttatcatgca

SEQ ID NO: 272896 - DNA, 120 bp, Artificial Sequence
  ENSG00000127922_0 (sequence is synthesized)
attctttccccaagtctctatggtagcgtcagcgtcggaggcggtagtgacggtggcgtttccttgaggaagagtgagggttccaacttttctgcttatctgggaggtgttgggcgcgga

SEQ ID NO: 272897 - DNA, 120 bp, Artificial Sequence
  ENSG00000127922_1 (sequence is synthesized)
cagtcgagatgtcagagaaaaagcagccggtagacttaggtctgttagaggaagacgacgagtttgaagagttccctgccgaagactgggctggcttagatgaagatgaagatgcacatg

SEQ ID NO: 272898 - DNA, 120 bp, Artificial Sequence
  ENSG00000127922_2 (sequence is synthesized)
tctgggaggataattgggatgatgacaatgtagaggatgacttctctaatcagttacgagctgaactagagaaacatggttataagatggagacttcatagcatccagaagaagtgttga

SEQ ID NO: 272899 - DNA, 120 bp, Artificial Sequence
  ENSG00000127922_3 (sequence is synthesized)
agtaacctaaacttgacctgcttaatacattctagggcagagaacccaggatgggacactaaaaaaatgtgtttatttcattatctgcttggatttatttgtgtttttgtaacacaaaaa

SEQ ID NO: 272900 - DNA, 120 bp, Artificial Sequence
  ENSG00000127922_4 (sequence is synthesized)
ataaatgttttgatataatcttggtttggttcagaagtcttaatcttttgcttctaatcaattttcttgtcatgattttccaaaaccttattatatatagatagtaaaatttcatattat

SEQ ID NO: 272901 - DNA, 120 bp, Artificial Sequence
  ENSG00000127922_5 (sequence is synthesized)
gttacttctattttataaggaatttcttttacatcacattgaaccttaatctcttctgtattttgatagcttaggcaacatttgctgacatttataaggtgacctttcaaaacctgtgtt

SEQ ID NO: 272902 - DNA, 120 bp, Artificial Sequence
  ENSG00000127922_6 (sequence is synthesized)
ttaaaaatattaatcattttaaattgctgtaatttacttagttcctgagccattaataatattattaatggttgttagcgtattattggtacttaaagtccaaagtagtttaatcacagt

SEQ ID NO: 272903 - DNA, 120 bp, Artificial Sequence
  ENSG00000127922_7 (sequence is synthesized)
aagaatggtgtcttctattaaaattgaggaagtgggctcaagatactttatcaacaagtgcatattttcaggtactacatagcaggctcatttagtacaactgagttttcacagagtgat

SEQ ID NO: 272904 - DNA, 120 bp, Artificial Sequence
  ENSG00000127922_8 (sequence is synthesized)
agctgttgccacatcacttttgtgaatgggagatttaatttggtttgtaaaggattctttgtgatgacttaaatgtacggggtattttttaggaatattttcaaatgtaaatgttgttac

SEQ ID NO: 272905 - DNA, 120 bp, Artificial Sequence
  ENSG00000127922_9 (sequence is synthesized)
taagaactacaatcaatctgtagtgttgagtaatttcaaatgtaaaatttatgtaacaatgcagtgcagataccaaaataggggttggtggcctgaaatacaagttatacttcaaaatga

SEQ ID NO: 272906 - DNA, 120 bp, Artificial Sequence
  ENSG00000127922_10 (sequence is synthesized)
acacagcatcatctctacccataaaagatggcattctgcaagactgagaagatgcccacctccattcccagagtccaggccttcattaactcacacgagaactacagaagcatcacccct

SEQ ID NO: 272907 - DNA, 120 bp, Artificial Sequence
  ENSG00000127922_11 (sequence is synthesized)
agttctcctattagtcactcctcctcaactgcctctaatccatccatccatctatccggcatgggtcatgtaaagttacagctgagaaggccctcagtggattgatgatgcctactcata

SEQ ID NO: 272908 - DNA, 120 bp, Artificial Sequence
  ENSG00000127922_12 (sequence is synthesized)
caaatgcctggcaccctgtgactcagggctggatacagtgaactggaggaatagcggggagaattgccaatactcaggagtcaggcttcacattgatcatgcagctaataagaaagaagg

SEQ ID NO: 272909 - DNA, 120 bp, Artificial Sequence
  ENSG00000127922_13 (sequence is synthesized)
caaaggtaccaagccccttgccatatgagagcttccagcaactttggcagaagatagaaaggaaaatactactactatttagaaactgcactgatatttcttgacttctcctgaatcgac

SEQ ID NO: 272910 - DNA, 78 bp, Artificial Sequence
  ENSG00000127922_14 (sequence is synthesized)
tgagggtgaagaacgcactgagacagccagaagagacatccatggacatgcatcagctggtctccttcaagagaaact

SEQ ID NO: 272911 - DNA, 120 bp, Artificial Sequence
  ENSG00000127922_15 (sequence is synthesized)
ttctgcatttccatctgagatcccaaaatgggtaggctctgtttgaccttgtggaattgttgaagatgcagttctcaacagcatcactagatgttgactccaacatttgtgctgtgtttg

SEQ ID NO: 272912 - DNA, 120 bp, Artificial Sequence
  ENSG00000127922_16 (sequence is synthesized)
ctgtacaaggaggaaaagtgggaagaaagcatggcataaaaagggggaggagacccagcataagaagcccagctcagcgggccagaggaccctggatccatgagagtaagcatccggcct

SEQ ID NO: 272913 - DNA, 120 bp, Artificial Sequence
  ENSG00000127922_17 (sequence is synthesized)
actcatcggggctccatgtggcttcaagattgaaaataaaactactgtgtatggtatataaacttaagctctcaagagtgtgcccactccctgtgctccagtcatggaacactctttgca

SEQ ID NO: 272914 - DNA, 120 bp, Artificial Sequence
  ENSG00000127922_18 (sequence is synthesized)
ccagagcgacaacagagttagcctgggtctgcaggtccctgactctttccactgctccactgagccccccaccatccttggtgcactgtgaagattgttcttgcctgcctggctgccatt

SEQ ID NO: 272915 - DNA, 120 bp, Artificial Sequence
  ENSG00000127922_19 (sequence is synthesized)
cgggtgacctctacaatctggccccagcagaaagaacttgctagcagcatatcaatagcagagatggaagtctggtcatatggtgcccacatctattgaagtaaacatgctgataccaga

SEQ ID NO: 272916 - DNA, 120 bp, Artificial Sequence
  ENSG00000127922_20 (sequence is synthesized)
tatccctggctctctgtcttcaaggcacatggtagaactatacttcctagctttctgtgtggctgggtgggtcacatgacaagttcagacagatgaattatgattagaagcatttaattg

SEQ ID NO: 272917 - DNA, 120 bp, Artificial Sequence
  ENSG00000127922_21 (sequence is synthesized)
ttaatacatattctagtgctctttccctctgtcatcacaactgacaatgtttcagacagtgacttctccaacaggctggttccagagtgaaaatagagcccagtagagtctgtagctgat

SEQ ID NO: 272918 - DNA, 120 bp, Artificial Sequence
  ENSG00000127922_22 (sequence is synthesized)
gcaatatggacatgtagggtgagtgagaaaatgcttttgttgggttaagcatctgaggtttgatggtttgttgctactgcagcacaaccttacccatcctaacaaatatgactattattg

SEQ ID NO: 272919 - DNA, 120 bp, Artificial Sequence
  ENSG00000127922_23 (sequence is synthesized)
actaacctgacaacagaagagtctttccacttctgctgtgatgaggaacagagttttttccctgttatatcttaatattagatagcagcagcctctggaaatagttctttctctaccact

SEQ ID NO: 272920 - DNA, 120 bp, Artificial Sequence
  ENSG00000127922_24 (sequence is synthesized)
tcttacccatgtggcataaagccagctactaaacctcttcacttttcagctttcccttttaaaagtgggagtaaataagacctttctcatggagttattgatcaaatgaaataattaaat

SEQ ID NO: 272921 - DNA, 120 bp, Artificial Sequence
  ENSG00000127922_25 (sequence is synthesized)
aacgagtatttaaattttaaatttaaatgaaaattcaaatgacataatgcctatgaagtacttatttagtccataatatcctcagtaaatggtagttagccttactaacacaaaggaaat

SEQ ID NO: 272922 - DNA, 120 bp, Artificial Sequence
  ENSG00000127922_26 (sequence is synthesized)
attcatccttcttcttagagtttagctatcagtcatcttgttgctgagaacaaagccagcctagttgtttgtaagcaagcctctagagagacagaaactgtcttgtatttctttgaatat

SEQ ID NO: 272923 - DNA, 120 bp, Artificial Sequence
  ENSG00000127922_27 (sequence is synthesized)
cctctactgcctctaacactgtgcctcggctatatttctggatctttatttaattgttttgaatgcttcttatgtttaatttctgccatatccattaggaaaacaacgtaatccttcctc

SEQ ID NO: 272924 - DNA, 120 bp, Artificial Sequence
  ENSG00000127922_28 (sequence is synthesized)
caacaccgatggtataagcctccatgaccgggaaacatttgcccccaagtttaaagaatttagttctgtaaggcttgttgacccatctgacaggaattcctgtaccaagtggtcagtcag

SEQ ID NO: 272925 - DNA, 120 bp, Artificial Sequence
  ENSG00000127922_29 (sequence is synthesized)
tgaagatctctttccactggtaactttatcaagaaagtaagatacaagactgtatgtaaagtatattatcctatgtgaaatcaagggacagaaaataactggaaggaaatattccaaaat

SEQ ID NO: 272926 - DNA, 120 bp, Artificial Sequence
  ENSG00000127922_30 (sequence is synthesized)
gttagcagtagtttctcccggagaatgtgatgtatacatttggatgggtgatatataaagtacttttcatagatctgggcaagagatattttagagggctccacataccacaatcaccca

SEQ ID NO: 272927 - DNA, 120 bp, Artificial Sequence
  ENSG00000127922_31 (sequence is synthesized)
caaataaatgtattaaagagcacacagatgcctttatcactcaggatgtggcactcagagctggcccagcatagtctataacacttaacatcactctcatgaccacactgctcaggtcct

SEQ ID NO: 272928 - DNA, 120 bp, Artificial Sequence
  ENSG00000127922_32 (sequence is synthesized)
agggaagtgtgcctctgtatctcttccctgtatccttaaaagaaaagatgacctaatttgaaagttgataaaaatcagggattatgatgatgttgcttcagaattcttggaggacgtaag

SEQ ID NO: 272929 - DNA, 120 bp, Artificial Sequence
  ENSG00000127922_33 (sequence is synthesized)
agaaaaatagtgctgggttatgagaagaacaaaacttaccaaattcctccctgaagataacataaatgcaatagattcttttacaacaaagtgtcatttctcaataatgccaagaatcct

SEQ ID NO: 272930 - DNA, 120 bp, Artificial Sequence
  ENSG00000127922_34 (sequence is synthesized)
ttttcatgcttctcttcttgttcacattcctggttcccatgctactcaattaacataatattcagaaaagttgcagatggtgatttaggaacatgttgtaatattaacatttcatattac

SEQ ID NO: 272931 - DNA, 120 bp, Artificial Sequence
  ENSG00000127922_35 (sequence is synthesized)
ccttaaatttgcatgcatgcatcatatgtgtatcatggtaccaattctttatattggtaactaggtggatatagaacatttacaatgtgaatagtgttatctctataaaaacaagattta

SEQ ID NO: 272932 - DNA, 120 bp, Artificial Sequence
  ENSG00000127922_36 (sequence is synthesized)
aggatgacttctctaatcagttacgctgtgagaaaaagccctgagctgtctccctaaatggctgtgtctcctgcagtggcttggtaccatcaagtcagatgaaggacacattgggcgagg

SEQ ID NO: 272933 - DNA, 120 bp, Artificial Sequence
  ENSG00000127922_37 (sequence is synthesized)
tgcccatctactgcctggagaacatgcccaggaggctggaacctgttccctttcagagatgaaatcctgtcttctcatcaactcacaagacaaagaggacttttctgacatctagctgaa

SEQ ID NO: 272934 - DNA, 120 bp, Artificial Sequence
  ENSG00000127922_38 (sequence is synthesized)
ggagagggattgtttcaagtcttgtgcagcggaatttcccatagtttgttctgttgatccttagtttttcaagatgcccataggaaaaaatatttttgtggtcaagtcagttatggaaac

SEQ ID NO: 272935 - DNA, 120 bp, Artificial Sequence
  ENSG00000127922_39 (sequence is synthesized)
ctctgcctttgagctatttatagcttcttaaggcatattagcatgaacatgttctgagacttcctgtgttgaaaagaaactctgtttaactttgtttagcttagtgatttccaaatttgt

SEQ ID NO: 272936 - DNA, 120 bp, Artificial Sequence
  ENSG00000127922_40 (sequence is synthesized)
tactaatatttcatggaactagtgggctacagaaaacacatgggatatactgatggacggtgttaggatgatggatcagatggagagtgggaagaacaatggatttaaagtcacagacct

SEQ ID NO: 272937 - DNA, 120 bp, Artificial Sequence
  ENSG00000127922_41 (sequence is synthesized)
atgttcaagtctaatcggctgtttaccaaaaatgcaacattttttagggagatctctaaacctctctcactcttggtttcctcatctaaaaatgggaaataataatatttattacacagg

SEQ ID NO: 272938 - DNA, 120 bp, Artificial Sequence
  ENSG00000127922_42 (sequence is synthesized)
gtgtttgtggggatgaaaggacacaatgtggaagaacatgggagcagggcttggttcaacttcaattaaatcagactcttcttgacaagtaaacactgggaccagatgacaatgggatac

SEQ ID NO: 272939 - DNA, 120 bp, Artificial Sequence
  ENSG00000127922_43 (sequence is synthesized)
tggcacagaagtgatctgcagaagtcttgttgctgtctacatacacatatgtgttccatgacttcatatattgttggaagtagcagcttattgatggcttggggtatagttgaaaaggat

SEQ ID NO: 272940 - DNA, 120 bp, Artificial Sequence
  ENSG00000127922_44 (sequence is synthesized)
aggggcccttctatagcaccaagttggctgtcttcagtgttggtcaagattagctgtcttaaagtccaaaggattggaccggctagatattttgttgtacctcagaaaaattatcttaat

SEQ ID NO: 272941 - DNA, 120 bp, Artificial Sequence
  ENSG00000127922_45 (sequence is synthesized)
ttcctagatattttgttgtacctcagaaaaattaccttaattttctaccctctccaaattttttcaccacagaatatttttttggagaaaaattatcaatattttatggaactagtgggc

SEQ ID NO: 272942 - DNA, 120 bp, Artificial Sequence
  ENSG00000127922_46 (sequence is synthesized)
tatagaaaacacacaggatgtactgataaaacacagtagtaaaacacattggtttatgaatgatctctgtattaaaccatctgtacatattggtttaataaaagttcattgctagatcta

SEQ ID NO: 272943 - DNA, 120 bp, Artificial Sequence
  ENSG00000127922_47 (sequence is synthesized)
acgagtttgaagagttccctgccgaagctcgctttcaagttgcttcataatccgccaacatagagctgtgtcgtagaaagctggcctattgaagagacagggtttctccatgttggtcaa

SEQ ID NO: 272944 - DNA, 66 bp, Artificial Sequence
  ENSG00000127922_48 (sequence is synthesized)
tcagcatagtttcttctcaatagcccttcaatgtaaagtgcaacatctggaaggagtctctgaagg

SEQ ID NO: 272945 - DNA, 120 bp, Artificial Sequence
  ENSG00000127922_49 (sequence is synthesized)
agagcctccaggaaggaatgcagtcggctaacaccttcctgttgttccagggagacccatatagacatatggcctgcagaattgtcctaaactgactctggggactaaagaaaaaaagta

SEQ ID NO: 272946 - DNA, 120 bp, Artificial Sequence
  ENSG00000127922_50 (sequence is synthesized)
taacttatcatggaagttgcttaagtgcaaaattaatcaggtcaggggaggattggatatggagattaaactgtcatgcttggatctggaagaagaaaaagagaggactgtgttgttagg

SEQ ID NO: 272947 - DNA, 120 bp, Artificial Sequence
  ENSG00000127922_51 (sequence is synthesized)
tcctgcccccaacacccaacttgtctacctgaggagcacttagtcattgttaaagacccagtccaagtttttcctccttggaaatacttccctgacctactttgtctggggtttgtgccc

SEQ ID NO: 272948 - DNA, 120 bp, Artificial Sequence
  ENSG00000127922_52 (sequence is synthesized)
gatgacaatgtagaggatgacttctctaatcagttacgggctggatacagtgaactggaggaatagcggggagaattgccaatactcaggagtcaggcttcacattgatcatgcagctaa

SEQ ID NO: 272949 - DNA, 120 bp, Artificial Sequence
  ENSG00000127922_53 (sequence is synthesized)
ttcgggaagattagggcaccatccaaaagaaaacggccatgttctcactgatgagatatttaggataccggatcgctagcatcctttcaagtagcccattatatccatgtctcaaagaaa

SEQ ID NO: 272950 - DNA, 120 bp, Artificial Sequence
  ENSG00000127922_54 (sequence is synthesized)
ggctgctatgttctccaccaaaagggaagaatgtgcagtgctttcctctgctgttaacagatcatcaacctgtatgtgttcatggccccacctaaatgtaaagagctgggatgcacagga

SEQ ID NO: 272951 - DNA, 120 bp, Artificial Sequence
  ENSG00000127922_55 (sequence is synthesized)
ttggagagctattattgagcactagtcatgtggatatgtgcatggagtcagtaaggagggagtggggtggtgctacagcatttcaggcaaagagagcagcctgggtgaaggtccagcctg

SEQ ID NO: 272952 - DNA, 120 bp, Artificial Sequence
  ENSG00000127922_56 (sequence is synthesized)
ggcaaggtaggattatggttagcatactgcagtattgttgggtagtaagagattatgatacttcctgtagctacataacaggggcttacttgaagggtgaccctatttattgtttcagtc

SEQ ID NO: 272953 - DNA, 120 bp, Artificial Sequence
  ENSG00000127922_57 (sequence is synthesized)
gcaattcacgatatgcagtctccgagatgaaaacaaaagtgagaaacaaatacatcagatgatgctatgcagctctgaaggaagaacatgtattgccaggactccaacatttgtgctgtg

SEQ ID NO: 272954 - DNA, 120 bp, Artificial Sequence
  ENSG00000127922_58 (sequence is synthesized)
actcatctcagtttcctcatctgtaatgcaaagggcaccatccaaaagaaaacggccatgttctcactgatgagatatttaggataccggatcgctagcatcctttcaagtagcccatta

SEQ ID NO: 272955 - DNA, 120 bp, Artificial Sequence
  ENSG00000127922_59 (sequence is synthesized)
tatccatgtctcaaagaaaccatacacacagcatcatctctacccataaaagatggcattctgcaagactgagaagatgcccacctccattcccagagtccaggccttcattaactcaca

SEQ ID NO: 272956 - DNA, 120 bp, Artificial Sequence
  ENSG00000127922_60 (sequence is synthesized)
gtgtctcaaagctctgaaataaggcatcttttcctgtcttttatttgatttaaggccagcttcaagcatttattgaactgattagcacattagttttattttttttttccatgtcctttt

SEQ ID NO: 272957 - DNA, 120 bp, Artificial Sequence
  ENSG00000127922_61 (sequence is synthesized)
atgttctggtgagtttattaggtgaggccagtttccttcagagaatttaatccaaaggcctttactagaaggctggcatgtttccttttctcataaagataaggaaacatcaacaggcat

SEQ ID NO: 272958 - DNA, 120 bp, Artificial Sequence
  ENSG00000127922_62 (sequence is synthesized)
aacatagcagaatgtctagcctaagttatggaaaagattccatgccatactccctggtgaggttgacttcacacttactggcttacttctcctgatacttggtttacaagtgagacaagt

SEQ ID NO: 272959 - DNA, 120 bp, Artificial Sequence
  ENSG00000127922_63 (sequence is synthesized)
aatcccctctgagggtaactggtcatgtttctttgtttactctgggggtcattttgccactaacagctatgctggctctatgcagaacttcaaacctcaggctgtctacctgagctatag

SEQ ID NO: 272960 - DNA, 120 bp, Artificial Sequence
  ENSG00000127922_64 (sequence is synthesized)
ggaagaagaagctacagagttccctttaataagacatcagcaatacatttagctgtcagagaagatgggtcatatttaggaatacatggagaataagttttaaaagagagagaatccaaa

SEQ ID NO: 272961 - DNA, 120 bp, Artificial Sequence
  ENSG00000127922_65 (sequence is synthesized)
tgtattgtactcttaattagaggtccctaaactgcaaattcatttgctaatataatttctcatgctttttatttcaataatgtatgtattcggtaatgtctgataaatacttgcacttca

SEQ ID NO: 272962 - DNA, 120 bp, Artificial Sequence
  ENSG00000127922_66 (sequence is synthesized)
accctggtgaccaggtgcctgaccctgtagaagaggaagtgttattgcatcttgcaggggcaggacagaggacagggaaaaggtatgcatatagtatgctaatgaggttatatttccttt

SEQ ID NO: 272963 - DNA, 120 bp, Artificial Sequence
  ENSG00000127922_67 (sequence is synthesized)
tggagttagtgtttatcctaagaatcagatttgggatggtgagaagccactattttgttagcttaactagagagtgtccttccagtggtgttattgttgttctttcatactaagtgtttt

SEQ ID NO: 272964 - DNA, 120 bp, Artificial Sequence
  ENSG00000127922_68 (sequence is synthesized)
agtatgtcttagatcttggatagctcagattttttaaatttaaagctagtcacagatgtaattctcaactagccaaagtgaagaaagcccaatttgggacaacgtctaaaataagaattg

SEQ ID NO: 272965 - DNA, 120 bp, Artificial Sequence
  ENSG00000127922_69 (sequence is synthesized)
ctagaaacttatgtattaggcatctgttactggttatttccaattctgactttttaaaatgtagggtttttttttttttttaaaccagtacacatctggaggcatacacattgaagcaaa

SEQ ID NO: 272966 - DNA, 120 bp, Artificial Sequence
  ENSG00000127922_70 (sequence is synthesized)
tacagctgtggttatttacatgattaatcacaattctggcaatgcatttagtgtttaaggtaaagtgtatgctttataaggccatctacatattgaaggatggcattagacatgaggtat

SEQ ID NO: 272967 - DNA, 120 bp, Artificial Sequence
  ENSG00000127922_71 (sequence is synthesized)
atcagatatcatgggtatcattgtttggttatattttgtccttttcaaaactatttctggagttaaccctttaaaactgagtgattaaaattgcttggttgtcagtgtagtgttagagtt

SEQ ID NO: 272968 - DNA, 120 bp, Artificial Sequence
  ENSG00000127922_72 (sequence is synthesized)
gaaaattaaaacacaattcagagatccaagaagatgtcagctaaacccagagattacaatagttacagctttttcatgttatacattgagtagagtttgtatgtattgtaacttacatat

SEQ ID NO: 272969 - DNA, 120 bp, Artificial Sequence
  ENSG00000127922_73 (sequence is synthesized)
attgtaacatgtatgtatagtatagagaatttgtaagtgttggacatactattttggggcattataccctatcacataagctttttatgtaatatagttaagtacataatccaggttaat

SEQ ID NO: 272970 - DNA, 120 bp, Artificial Sequence
  ENSG00000127922_74 (sequence is synthesized)
acactgtttaaaatatccatccaaaatagattctggtttgtcagtgttagcactatttttcttaacagtgctcatattaattttaactgcttaataagttgtaatagaaaggttatttct

SEQ ID NO: 272971 - DNA, 120 bp, Artificial Sequence
  ENSG00000127922_75 (sequence is synthesized)
cagattcctcatctatgataattggaagggtggtatgctattacgtagacattagtgcttcttactgcttaagataatggtattaaggctacaaagtttatctagatttatcagataatt

SEQ ID NO: 272972 - DNA, 120 bp, Artificial Sequence
  ENSG00000127922_76 (sequence is synthesized)
aacgaagaatttggccagctctttcgtctttgtttactcagtagtgtcataactatgaagtactgtatagtaatacgaaagaactatagaggtattgttatgaatcttttttatatgttc

SEQ ID NO: 272973 - DNA, 120 bp, Artificial Sequence
  ENSG00000127922_77 (sequence is synthesized)
tacctaaaatgttgctcacagtattctttttccccctcttcatgagccagttcctttttcctgggactttatctctactttttcctttcctttcccagccattaaaatagggtgagatgg

SEQ ID NO: 272974 - DNA, 120 bp, Artificial Sequence
  ENSG00000127922_78 (sequence is synthesized)
ttattagacgagggagagatgctttatctttgttgtaaatgatcatcagagtttaactttataaactaaaaaaattgtaccattcttaaatatttttcccctctctaagttaaaagaagt

SEQ ID NO: 272975 - DNA, 120 bp, Artificial Sequence
  ENSG00000127922_79 (sequence is synthesized)
agacatcacttaataactattgaaataacattttgaatcaaatcataattagatgaaaaattttgtttcttaaaagatagttgctttaaaagataaggctctacagtatttttcaaagac

SEQ ID NO: 272976 - DNA, 120 bp, Artificial Sequence
  ENSG00000127922_80 (sequence is synthesized)
ttacaaggttagcagaaaagtgtaaaatattattttatatttctggcttgaatcttttgacacatgattatttcctttttagggaccaatgcagatggaagcgacctacttaacagttta

SEQ ID NO: 272977 - DNA, 120 bp, Artificial Sequence
  ENSG00000127922_81 (sequence is synthesized)
ggaagctggttatttggaagtggttcaagctgagtagaatctgcttgttgtcttagaaccttgaaacagttctgttgtgattttgagttatgtcaccccctttactcaagaacatagtat

SEQ ID NO: 272978 - DNA, 120 bp, Artificial Sequence
  ENSG00000127922_82 (sequence is synthesized)
ctagtctttatttaaattatttttttgtaacataaaactccattagacatctttataaagactccttaaaataactatcaaatagataatttctatttccaggctcaacccacatagcat

SEQ ID NO: 272979 - DNA, 120 bp, Artificial Sequence
  ENSG00000127922_83 (sequence is synthesized)
atttaaagcttgagatttgaggttagagaatagtggtaatacgtacgtactttctcaccattctaaacaaaagctgaaatctcaatctaaacctcccctctaccactaccaaagggagga

SEQ ID NO: 272980 - DNA, 120 bp, Artificial Sequence
  ENSG00000127922_84 (sequence is synthesized)
agaaaatctagaaaactaaaaactacaatattcttctttatgcatatttatgtttattcttcctttaaaaatataaattttgtatcagttgtattaggcagatactagtggtggcttaca

SEQ ID NO: 272981 - DNA, 120 bp, Artificial Sequence
  ENSG00000127922_85 (sequence is synthesized)
gtttggtctacttttaaatatttgtatataagttatccttacgttttgcagttttgaatttcacactggtatcttcctgccattcaacttgctttagggttgttggtgttgtgttttgaa

SEQ ID NO: 272982 - DNA, 120 bp, Artificial Sequence
  ENSG00000127922_86 (sequence is synthesized)
agattgtgaagtcgaccttctaaaaatgagttcaaagaaaaatcagtaaagtaaatatcctcctgaaattgtaagtttcttggcaagtagaattttttgtattaacttctgttttaggtt

SEQ ID NO: 272983 - DNA, 120 bp, Artificial Sequence
  ENSG00000127922_87 (sequence is synthesized)
atctgcaaactcaagaattgagagaactagacagcataagctcagatttaaggaagataccatttttcatagatatggttttagctgtttttgaattgtgagtgttcagtagcaagcttt

SEQ ID NO: 272984 - DNA, 120 bp, Artificial Sequence
  ENSG00000127928_0 (sequence is synthesized)
agaattgttaagagagagagctcatatgaaattggttatcgtgggatatttaaaataaaacaaagaacagtttactttcaggcaaaaagatgccagtaatcaatattgaggacctgacag

SEQ ID NO: 272985 - DNA, 120 bp, Artificial Sequence
  ENSG00000127928_1 (sequence is synthesized)
aaaaggacaaattgaagatggaagttgaccagctcaagaaagaagtgacactggaaagaatgctagtttccaaatgttgtgaagaagtaagagattacgttgaagaacgatctggcgagg

SEQ ID NO: 272986 - DNA, 120 bp, Artificial Sequence
  ENSG00000127928_2 (sequence is synthesized)
tgtgatttcataatacaaacaaaaagaaaaaaaattaaacaaattcttggaaatatctcaaatgttaataacaatatgaatttttctcatgcatactattactactaagcatgtacgtga

SEQ ID NO: 272987 - DNA, 120 bp, Artificial Sequence
  ENSG00000127928_3 (sequence is synthesized)
atttttaaatttatagatgtaaacttttaataaaaattggggtgtggtaacccatcattctatgtttttcttaacatagctggcacagggtttaacacataattgccaataaatattgct

SEQ ID NO: 272988 - DNA, 120 bp, Artificial Sequence
  ENSG00000127928_4 (sequence is synthesized)
taaagttctttaaaaagaactatgttttataaatgattctatattattctgagttgtcagcatatatttactgttttatgttttttcacttccctttcaacacttacaattttctaccca

SEQ ID NO: 272989 - DNA, 120 bp, Artificial Sequence
  ENSG00000127928_5 (sequence is synthesized)
gctcatatgaaattggttatcgtgggatatttaaaataaaacaaagaacagtttactttgtaagttaagagctgagggaattgttggctaagactgacttgaaataactccagcaattca

SEQ ID NO: 272990 - DNA, 120 bp, Artificial Sequence
  ENSG00000127928_6 (sequence is synthesized)
tcaaaaccaatcccttatggactactgaattaaggacagcaagttacacctctgttcctgtcatctgggtgaagccaaaagtagtgacttttagagagagagtgtgggaccactgaggaa

SEQ ID NO: 272991 - DNA, 120 bp, Artificial Sequence
  ENSG00000127928_7 (sequence is synthesized)
gagggaaaaaagtgaatctaaattaatgcatatttcaaaagttatgtgaatctgcaagtatcatcctttgaaggaagaaactaacctgacaaatgcttcctggctccagttgaaaataat

SEQ ID NO: 272992 - DNA, 120 bp, Artificial Sequence
  ENSG00000127928_8 (sequence is synthesized)
ttgttttactatgtaattaatgagtctgcctagttataaaataatcttaagtcttatatcaaatgttccttggaatttacataaaagcggactaaagatttcatttgaaaaaaaaaaaaa

SEQ ID NO: 272993 - DNA, 120 bp, Artificial Sequence
  ENSG00000127928_9 (sequence is synthesized)
atgaaagatacactaactgaaaacaaacaagttgaagctaaaagagtttgaataatttgatttcgtgtgtatgtatatatatgtatatttatatatgtatagaacatcacctctctctac

SEQ ID NO: 272994 - DNA, 83 bp, Artificial Sequence
  ENSG00000127928_10 (sequence is synthesized)
aattatgatcctcttctgaaatcaggaatacgaccccaagaaatgacaggcaaaaagatgccagtaatcaatattgaggacct

SEQ ID NO: 272995 - DNA, 120 bp, Artificial Sequence
  ENSG00000127928_11 (sequence is synthesized)
gattttttactaaatcattaaacaataatggtgcagataagtgaagagcaagctcaaaaacaacatgaataattcagtccagcaaattattcactgagcactaaagaacacagcctctgt

SEQ ID NO: 272996 - DNA, 120 bp, Artificial Sequence
  ENSG00000127928_12 (sequence is synthesized)
tctagatggctgggatacactgaacaaatcagccaaaggtccctgaccccttgaagctcacctagtgcaccaccatgctcaatcattgtagatgagtgtaaagaaaaattacatgtgtat

SEQ ID NO: 272997 - DNA, 120 bp, Artificial Sequence
  ENSG00000127928_13 (sequence is synthesized)
acttctgagaatttagggatggtgataagccaggaatttaataattattcattctcctccacctttactagtcacatttttgggatgaggaaaaagatttaatcaatatgaactctggtg

SEQ ID NO: 272998 - DNA, 120 bp, Artificial Sequence
  ENSG00000127928_14 (sequence is synthesized)
acacccttgacttctgttgccagctgtgttgtgaaccctgggtcttgtctcctttgatgttggaggcagtgtctgctgggaatctttagctggagtgtggccagctgtttttcctttgtc

SEQ ID NO: 272999 - DNA, 120 bp, Artificial Sequence
  ENSG00000127928_15 (sequence is synthesized)
tggagatatatccagaaggagtgggaagggtgcaactttcttctttcctacaaagtaaatatgcattggtgtaaagtagagagaatcaaactgaaattatacaacctgaaaatttattgt

SEQ ID NO: 273000 - DNA, 120 bp, Artificial Sequence
  ENSG00000127928_16 (sequence is synthesized)
aataaataaattcctggcatctggagtattctgttttaaaccaaatgagtcatccctttttccttccccttaaggtttccaaatgttgtgaagaagtaagagattacgttgaagaacgat

SEQ ID NO: 273001 - DNA, 120 bp, Artificial Sequence
  ENSG00000127946_0 (sequence is synthesized)
gactcggctcctcgcggcgacatggatcggatggccagctccatgaagcaggtgcccaacccactgcccaaggtgctgagccggcgcggggtcggcgctgggctggaggcggcggagcgc

SEQ ID NO: 273002 - DNA, 120 bp, Artificial Sequence
  ENSG00000127946_1 (sequence is synthesized)
gagagcttcgagcggactcagactgtcagcatcaataaggccattaatacgcaggaagtggctgtaaaggaaaaacacgccagaacgtgcatactgggcacccaccatgagaaaggggca

SEQ ID NO: 273003 - DNA, 120 bp, Artificial Sequence
  ENSG00000127946_2 (sequence is synthesized)
cagaccttctggtctgttgtcaaccgcctgcctctgtctagcaacgcagtgctctgctggaagttctgccatgtgttccacaaactcctccgagatggacacccgaacgtcctgaaggac

SEQ ID NO: 273004 - DNA, 120 bp, Artificial Sequence
  ENSG00000127946_3 (sequence is synthesized)
tctctgagatacagaaatgaattgagtgacatgagcaggatgtggggccacctgagcgaggggtatggccagctgtgcagcatctacctgaaactgctaagaaccaagatggagtaccac

SEQ ID NO: 273005 - DNA, 120 bp, Artificial Sequence
  ENSG00000127946_4 (sequence is synthesized)
accaaaaatcccaggttcccaggcaacctgcagatgagtgaccgccagctggacgaggctggagaaagtgacgtgaacaactttttccagttaacagtggagatgtttgactacctggag

SEQ ID NO: 273006 - DNA, 120 bp, Artificial Sequence
  ENSG00000127946_5 (sequence is synthesized)
tgtgaactcaacctcttccaaacagtattcaactccctggacatgtcccgctctgtgtccgtgacggcagcagggcagtgccgcctcgccccgctgatccaggtcatcttggactgcagc

SEQ ID NO: 273007 - DNA, 120 bp, Artificial Sequence
  ENSG00000127946_6 (sequence is synthesized)
cacctttatgactacactgtcaagcttctcttcaaactccactcctgcctcccagctgacaccctgcaaggccaccgggaccgcttcatggagcagtttacaaagttgaaagatctgttc

SEQ ID NO: 273008 - DNA, 120 bp, Artificial Sequence
  ENSG00000127946_7 (sequence is synthesized)
taccgctccagcaacctgcagtacttcaagcggctcattcagatcccccagctgcctgagaacccacccaacttcctgcgagcctcagccctgtcagaacatatcagccctgtggtggtg

SEQ ID NO: 273009 - DNA, 120 bp, Artificial Sequence
  ENSG00000127946_8 (sequence is synthesized)
atccctgcagaggcctcatcccccgacagcgagccagtcctagagaaggatgacctcatggacatggatgcctctcagcagaatttatttgacaacaagtttgatgacatctttggcagt

SEQ ID NO: 273010 - DNA, 120 bp, Artificial Sequence
  ENSG00000127946_9 (sequence is synthesized)
tcattcagcagtgatcccttcaatttcaacagtcaaaatggtgtgaacaaggatgagaaggaccacttaattgagcgactatacagagagatcagtggattgaaggcacagctagaaaac

SEQ ID NO: 273011 - DNA, 120 bp, Artificial Sequence
  ENSG00000127946_10 (sequence is synthesized)
atgaagactgagagccagcgggttgtgctgcagctgaagggccacgtcagcgagctggaagcagatctggccgagcagcagcacctgcggcagcaggcggccgacgactgtgaattcctg

SEQ ID NO: 273012 - DNA, 120 bp, Artificial Sequence
  ENSG00000127946_11 (sequence is synthesized)
cgggcagaactggacgagctcaggaggcagcgggaggacaccgagaaggctcagcggagcctgtctgagatagaaaggaaagctcaagccaatgaacagcgatatagcaagctaaaggag

SEQ ID NO: 273013 - DNA, 120 bp, Artificial Sequence
  ENSG00000127946_12 (sequence is synthesized)
aagtacagcgagctggttcagaaccacgctgacctgctgcggaagaatgcagaggtgaccaaacaggtgtccatggccagacaagcccaggtagatttggaacgagagaaaaaagagctg

SEQ ID NO: 273014 - DNA, 120 bp, Artificial Sequence
  ENSG00000127946_13 (sequence is synthesized)
gaggattcgttggagcgcatcagtgaccagggccagcggaagactcaagaacagctggaagttctagagagcttgaagcaggaacttgccacaagccaacgggagcttcaggttctgcaa

SEQ ID NO: 273015 - DNA, 120 bp, Artificial Sequence
  ENSG00000127946_14 (sequence is synthesized)
ggcagcctggaaacttctgcccagtcagaagcaaactgggcagccgagttcgccgagctagagaaggagcgggacagcctggtgagtggcgcagctcatagggaggaggaattatctgct

SEQ ID NO: 273016 - DNA, 120 bp, Artificial Sequence
  ENSG00000127946_15 (sequence is synthesized)
cttcggaaagaactgcaggacactcagctcaaactggccagcacagaggaatctatgtgccagcttgccaaagaccaacgaaaaatgcttctggtggggtccaggaaggctgcggagcag

SEQ ID NO: 273017 - DNA, 120 bp, Artificial Sequence
  ENSG00000127946_16 (sequence is synthesized)
gtgatacaagacgccctgaaccagcttgaagaacctcctctcatcagctgcgctgggtctgcagatcacctcctctccacggtcacatccatttccagctgcatcgagcaactggagaaa

SEQ ID NO: 273018 - DNA, 120 bp, Artificial Sequence
  ENSG00000127946_17 (sequence is synthesized)
agctggagccagtatctggcctgcccagaagacatcagtggacttctccattccataaccctgctggcccacttgaccagcgacgccattgctcatggtgccaccacctgcctcagagcc

SEQ ID NO: 273019 - DNA, 120 bp, Artificial Sequence
  ENSG00000127946_18 (sequence is synthesized)
ccacctgagcctgccgactcactgaccgaggcctgtaagcagtatggcagggaaaccctcgcctacctggcctccctggaggaagagggaagccttgagaatgccgacagcacagccatg

SEQ ID NO: 273020 - DNA, 120 bp, Artificial Sequence
  ENSG00000127946_19 (sequence is synthesized)
aggaactgcctgagcaagatcaaggccatcggcgaggagctcctgcccaggggactggacatcaagcaggaggagctgggggacctggtggacaaggagatggcggccacttcagctgct

SEQ ID NO: 273021 - DNA, 120 bp, Artificial Sequence
  ENSG00000127946_20 (sequence is synthesized)
attgaaactgccacggccagaatagaggagatgctcagcaaatcccgagcaggagacacaggagtcaaattggaggtgaatgaaaggatccttggttgctgtaccagcctcatgcaagct

SEQ ID NO: 273022 - DNA, 120 bp, Artificial Sequence
  ENSG00000127946_21 (sequence is synthesized)
attcaggtgctcatcgtggcctctaaggacctccagagagagattgtggagagcggcaggggtacagcatcccctaaagagttttatgccaagaactctcgatggacagaaggacttatc

SEQ ID NO: 273023 - DNA, 120 bp, Artificial Sequence
  ENSG00000127946_22 (sequence is synthesized)
tcagcctccaaggctgtgggctggggagccactgtcatggtggatgcagctgatctggtggtacaaggcagagggaaatttgaggagctaatggtgtgttctcatgaaattgctgctagc

SEQ ID NO: 273024 - DNA, 120 bp, Artificial Sequence
  ENSG00000127946_23 (sequence is synthesized)
acagcccagcttgtggctgcatccaaggtgaaagctgataaggacagccccaacctagcccagctgcagcaggcctctcggggagtgaaccaggccactgccggcgttgtggcctcaacc

SEQ ID NO: 273025 - DNA, 120 bp, Artificial Sequence
  ENSG00000127946_24 (sequence is synthesized)
atttccggcaaatcacagatcgaagagacagacaacatggacttctcaagcatgacgctgacacagatcaaacgccaagagatggattctcaggttagggtgctagagctagaaaatgaa

SEQ ID NO: 273026 - DNA, 120 bp, Artificial Sequence
  ENSG00000127946_25 (sequence is synthesized)
ttgcagaaggagcgtcaaaaactgggagagcttcggaaaaagcactacgagcttgctggtgttgctgagggctgggaagaaggaacagaggcatctccacctacactgcaagaagtggta

SEQ ID NO: 273027 - DNA, 120 bp, Artificial Sequence
  ENSG00000127946_26 (sequence is synthesized)
accgaaaaagaatagagccaaaccaacaccccatatgtcagtgtaaatccttgttacctatctcgtgtgtgttatttccccagccacaggccaaatccttggagtcccaggggcagccac

SEQ ID NO: 273028 - DNA, 120 bp, Artificial Sequence
  ENSG00000127946_27 (sequence is synthesized)
accactgccattacccagtgccgaggacatgcatgacacttccaaagactccctccatagcgacaccctttctgtttggacccatggtcatctctgttcttttcccgcctccctagttag

SEQ ID NO: 273029 - DNA, 120 bp, Artificial Sequence
  ENSG00000127946_28 (sequence is synthesized)
catccaggctggccagtgctgcccatgagcaagcctaggtacgaagaggggtggtggggggcagggccactcaacagagaggaccaacatccagtcctgctgactatttgacccccacaa

SEQ ID NO: 273030 - DNA, 120 bp, Artificial Sequence
  ENSG00000127946_29 (sequence is synthesized)
caatgggtatccttaatagaggagctgcttgttgtttgttgacagcttggaaagggaagatcttatgccttttcttttctgttttcttctcagtcttttcagtttcatcatttgcacaaa

SEQ ID NO: 273031 - DNA, 120 bp, Artificial Sequence
  ENSG00000127946_30 (sequence is synthesized)
cttgtgagcatcagagggctgatggattccaaaccaggacactaccctgagatctgcacagtcagaaggacggcaggagtgtcctggctgtgaatgccaaagccattctccccctctttg

SEQ ID NO: 273032 - DNA, 120 bp, Artificial Sequence
  ENSG00000127946_31 (sequence is synthesized)
ggcagtgccatggatttccactgcttcttatggtggttggttgggttttttggttttgtttttttttttaagtttcactcacatagccaactctcccaaagggcacacccctggggctga

SEQ ID NO: 273033 - DNA, 120 bp, Artificial Sequence
  ENSG00000127946_32 (sequence is synthesized)
gtctccagggccccccaactgtggtagctccagcgatggtgctgcccaggcctctcggtgctccatctccgcctccacactgaccaagtgctggcccacccagtccatgctccagggtca

SEQ ID NO: 273034 - DNA, 120 bp, Artificial Sequence
  ENSG00000127946_33 (sequence is synthesized)
ctgtccgcctttacaagggagaagacaacagaaagagggacaagagggttcacacagcccagttcccgtgacgaggctcaaaaacttgatcacatgcttgaatggagctggtgagatcaa

SEQ ID NO: 273035 - DNA, 120 bp, Artificial Sequence
  ENSG00000127946_34 (sequence is synthesized)
caacactacttccctgccggaatgaactgtccgtgaatggtctctgtcaagcgggccgtctcccttggcccagagacggagtgtgggagtgattcccaactcctttctgcagacgtctgc

SEQ ID NO: 273036 - DNA, 120 bp, Artificial Sequence
  ENSG00000127946_35 (sequence is synthesized)
cttggcatcctcttgaataggaagatcgttccaccttctacgcaattgacaaacccggaagatcagatgcaattgctcccatcagggaagaaccctatacttggtttgctacccttagta

SEQ ID NO: 273037 - DNA, 120 bp, Artificial Sequence
  ENSG00000127946_36 (sequence is synthesized)
tttattactaacctcccttaagcagcaacagcctacaaagagatgcttggagcaatcagaacttcaggtgtgactctagcaaggctcatctttctgcccggctacatcagccttcaagaa

SEQ ID NO: 273038 - DNA, 120 bp, Artificial Sequence
  ENSG00000127946_37 (sequence is synthesized)
tcagaagaaaggccaaggtgctggactgttactgacttggatcccaaagcaaggagatcatttggagctcttgggtcagagaaaatgagaaaggacagagccagcggctccaactccttt

SEQ ID NO: 273039 - DNA, 120 bp, Artificial Sequence
  ENSG00000127946_38 (sequence is synthesized)
cagccacatgccccaggctctcgctgccctgtggacaggatgaggacagagggcacatgaacagcttgccagggatgggcagcccaacagcacttttcctcttctagatggaccccagca

SEQ ID NO: 273040 - DNA, 120 bp, Artificial Sequence
  ENSG00000127946_39 (sequence is synthesized)
tttaagtgaccttctgatcttggaaaaacagcgtcttccttctttatctatagcaactcattggtggtagccatcaagcacttcccaggatctgctccaacagaatattgctaggttttg

SEQ ID NO: 273041 - DNA, 120 bp, Artificial Sequence
  ENSG00000127946_40 (sequence is synthesized)
ctacatgacgggttgtgagacttctgtttgatcactgtgaaccaacccccatctccctagcccacccccctccccaactccctctctgtgcattttctaagtgggacattcaaaaaactc

SEQ ID NO: 273042 - DNA, 120 bp, Artificial Sequence
  ENSG00000127946_41 (sequence is synthesized)
tctcccaggacctcggatgaccatactcagacgtgtgacctccatactgggctaaggaagtatcagcactagaaattgggcagtcttaatgttgaatgctgctttctgcttagtattttt

SEQ ID NO: 273043 - DNA, 120 bp, Artificial Sequence
  ENSG00000127946_42 (sequence is synthesized)
ttgattcaaggctcagaaggaatggtgcgtggcttccctgtcccagttgtggcaactaaaccaatcggtgtgttcttgatgcgggtcaacatttccaaaagtggctagtcctcacttcta

SEQ ID NO: 273044 - DNA, 80 bp, Artificial Sequence
  ENSG00000127946_43 (sequence is synthesized)
gcgggtcaacatttccaaaagtggctagtcctcacttctagatctcagccattctaactcatatgttcccaattaccaag

SEQ ID NO: 273045 - DNA, 90 bp, Artificial Sequence
  ENSG00000127946_44 (sequence is synthesized)
ctccgtctcaaaaaaaaaaaaaaattacaaatggggcaaacagtctagtgtaatggatcaaattaagattctctgcccagccaactttgg

SEQ ID NO: 273046 - DNA, 120 bp, Artificial Sequence
  ENSG00000127946_45 (sequence is synthesized)
gaccaggctgggcatcatagcaagacctcatctctactaaaattcaaaaacaaaattagccgggcatgatggtgcatgcctgtagtctcagctagttggggagctaaggtgggagaattg

SEQ ID NO: 273047 - DNA, 86 bp, Artificial Sequence
  ENSG00000127946_46 (sequence is synthesized)
tgtagtctcagctagttggggagctaaggtgggagaattgcttgagcttgggaagtcgaggctgcagtcagccctgattgtgccag

SEQ ID NO: 273048 - DNA, 88 bp, Artificial Sequence
  ENSG00000127946_47 (sequence is synthesized)
tttaaaaacaaacaaaaaattatctgaatgatcctgtctctaaaaagaagccacagaaatgtttaaaaacttcatcgacttagcctga

SEQ ID NO: 273049 - DNA, 120 bp, Artificial Sequence
  ENSG00000127946_48 (sequence is synthesized)
agccacagaaatgtttaaaaacttcatcgacttagcctgagtcataacggttaagaaagcacttaaacagaagcagaggctaattcagtgtcacatgaggaagtagctgtcagatgtcac

SEQ ID NO: 273050 - DNA, 120 bp, Artificial Sequence
  ENSG00000127946_49 (sequence is synthesized)
ataattactttcgtaatagctcagattagaatggctaccccattctctagacaaaatcaaattgtcctattgtgactcttctaaaaatgaagatgaagagctatttaatgacacaccttg

SEQ ID NO: 273051 - DNA, 120 bp, Artificial Sequence
  ENSG00000127946_50 (sequence is synthesized)
gattaaaacgggaatcacatcttaaagctaaaaatgaacctgcaagccttctaaatgagtcactgagcatcactagtgacaagtctcgggtgagcgtaaatgggtcatgacaagatggga

SEQ ID NO: 273052 - DNA, 120 bp, Artificial Sequence
  ENSG00000127946_51 (sequence is synthesized)
cagcaacaaaatcatggcttaggatcgacaagaagttaaaaaacagctgcatctgttacttaagtttgtaagacagtgccctgagacctctagagaaaagatgtttgtttacataagaga

SEQ ID NO: 273053 - DNA, 120 bp, Artificial Sequence
  ENSG00000127946_52 (sequence is synthesized)
ctgagacctctagagaaaagatgtttgtttacataagagaaagaggccagacatggtgtctcacacgtttaatcccagcactttgggaggcaggggcgggtggatcacctgaggtcagga

SEQ ID NO: 273054 - DNA, 120 bp, Artificial Sequence
  ENSG00000127946_53 (sequence is synthesized)
tgagactccatctcaaaaaaaaaaaagagagagagagagaaagaaatagaagagaagagccatcttggcagggttattttatatctgagcaaggagtttaaatgagactagtttagattg

SEQ ID NO: 273055 - DNA, 120 bp, Artificial Sequence
  ENSG00000127946_54 (sequence is synthesized)
gcaaggagtttaaatgagactagtttagattgtctgctgatgcagccgtccatagcagtacccctaaaatcccaccagaatacgggtccctctaacccagtggctggaagaaccactgtc

SEQ ID NO: 273056 - DNA, 120 bp, Artificial Sequence
  ENSG00000127946_55 (sequence is synthesized)
tagagcaacttttcttggaactgtcccagctaccaagtcagacaccaaggtttatgccaccaggtaacacgggaatcacaggtacatgtcgctccggtcagattagttggctttggcccc

SEQ ID NO: 273057 - DNA, 120 bp, Artificial Sequence
  ENSG00000127946_56 (sequence is synthesized)
tcgaccctgtgcaggagctagttctcagcttgcagctggaagttccctcttagctccttagtctagaggggtctcctggctccatttgaccctggtctttaataaccggtcagcatcttg

SEQ ID NO: 273058 - DNA, 120 bp, Artificial Sequence
  ENSG00000127946_57 (sequence is synthesized)
ctaccttctaccacctttccaaatctctggaaatcctgccagggaaagcctccagttccaacattggctttccaagcaaactggctttgccctctctctgccatccttgtcctccagaga

SEQ ID NO: 273059 - DNA, 120 bp, Artificial Sequence
  ENSG00000127946_58 (sequence is synthesized)
ctgcaccacctgtagcatagaaaaccaccaccacggacctgccagccatcggcgcagcaaaccagccagctgtttgctgccaaattccttcctctcccaggtccagaccaaatacaagat

SEQ ID NO: 273060 - DNA, 120 bp, Artificial Sequence
  ENSG00000127946_59 (sequence is synthesized)
cagcaccacaccgtggtgttgtcaggagccaaagcaacaggaaacaattcaatgctgttgggttcgattctgagagtagatttttccagacatgtctttcaggtgaccctcaactacctc

SEQ ID NO: 273061 - DNA, 120 bp, Artificial Sequence
  ENSG00000127946_60 (sequence is synthesized)
aggtttgaaggccctaaatgaaactgattaccactcatagggacaaaccgagggggttcggttacatcttggtgataatgcagttgtctcaaacttataacagactctttcacatttcag

SEQ ID NO: 273062 - DNA, 120 bp, Artificial Sequence
  ENSG00000127946_61 (sequence is synthesized)
tttgcagggatagggttgggtttgtttttcttctgtttttaacctttcccctgggtttccattagggtagttccttgaaatgaatttcatttttcactgagtgcctaccttcccagggca

SEQ ID NO: 273063 - DNA, 120 bp, Artificial Sequence
  ENSG00000127946_62 (sequence is synthesized)
ggtggccactggcttctgtttccctccaacaatacttttattatggtattaagacctttctttgtataatacattgcatctgtgttttcaatttttcaaataaatatttccgcctggcaa

SEQ ID NO: 273064 - DNA, 120 bp, Artificial Sequence
  ENSG00000127946_63 (sequence is synthesized)
gtaattggctctccggaaccagccggggacacgagggcctgctgggtcaggaagtggtggacaatgccaccctttcaggggagacacggcttggtcttaggtcctgtgtgactccaggga

SEQ ID NO: 273065 - DNA, 120 bp, Artificial Sequence
  ENSG00000127946_64 (sequence is synthesized)
ggagccctgttcttaaccgagttttgcagtcacctccccgtattcctctctcactctgaagccgagcacagaacccagcctctggtggtaccgagtgaaggttggcctggttggttggat

SEQ ID NO: 273066 - DNA, 120 bp, Artificial Sequence
  ENSG00000127946_65 (sequence is synthesized)
ggatggccaaatgaactccagaccactggattgtataacaggacagcaagaggcagcacagagccgtggaaagaacctgtagccataacatttgatgaatgaatcagacatgtgacatta

SEQ ID NO: 273067 - DNA, 120 bp, Artificial Sequence
  ENSG00000127946_66 (sequence is synthesized)
atctccttgacagcctgtgcctttgggctggggagggggcaggaaagccaggtggctgctctgtcccctacatggggctgatgaagacacccagcacccctcaggtccttctccacccct

SEQ ID NO: 273068 - DNA, 120 bp, Artificial Sequence
  ENSG00000127946_67 (sequence is synthesized)
ggcgtctataccctcagaccagccttgcatacctactcctgccagcctcctccaggaagccttgcctcctcaactctcctgcaccatcctcacatttcacctggccactgtcactgccag

SEQ ID NO: 273069 - DNA, 120 bp, Artificial Sequence
  ENSG00000127946_68 (sequence is synthesized)
aggaggcaccactgacctgcctcatggcccagccactgcacccatctccaaccagacccttggtgtgttccccacccaatccatcacaagccactttcaagctttagggaagtgaaaagt

SEQ ID NO: 273070 - DNA, 120 bp, Artificial Sequence
  ENSG00000127947_0 (sequence is synthesized)
gctagcgcagcggctcgcctggtactgtgggagagcggcggctgctcctggaagttgtggtgtcgggagcccagccggtgccgccgcagccgccgcctagggcggtggggaggaggaggg

SEQ ID NO: 273071 - DNA, 120 bp, Artificial Sequence
  ENSG00000127947_1 (sequence is synthesized)
ctagggcggtggggaggaggagggagccgcggggcttggcggggtcgggagggagggacgtgctgggggaacgagctggggaagacggagcgggctctgtgccgggcgggcgggcggcgg

SEQ ID NO: 273072 - DNA, 120 bp, Artificial Sequence
  ENSG00000127947_2 (sequence is synthesized)
ggacgcgggaggatggagcaagtggagatcctgaggaaattcatccagagggtccaggccatgaagagtcctgaccacaatggggaggacaacttcgcccgggacttcatgcggttaaga

SEQ ID NO: 273073 - DNA, 120 bp, Artificial Sequence
  ENSG00000127947_3 (sequence is synthesized)
agattgtctaccaaatatagaacagaaaagatatatcccacagccactggagaaaaagaagaaaatgttaaaaagaacagatacaaggacatactgccatttgatcacagccgagttaaa

SEQ ID NO: 273074 - DNA, 120 bp, Artificial Sequence
  ENSG00000127947_4 (sequence is synthesized)
ttgacattaaagactccttcacaagattcagactatatcaatgcaaattttataaagggcgtctatgggccaaaagcatatgtagcaactcaaggacctttagcaaatacagtaatagat

SEQ ID NO: 273075 - DNA, 120 bp, Artificial Sequence
  ENSG00000127947_5 (sequence is synthesized)
ttttggaggatgatatgggagtataatgttgtgatcattgtaatggcctgccgagaatttgagatgggaaggaaaaaatgtgagcgctattggcctttgtatggagaagaccccataacg

SEQ ID NO: 273076 - DNA, 120 bp, Artificial Sequence
  ENSG00000127947_6 (sequence is synthesized)
tttgcaccatttaaaatttcttgtgaggatgaacaagcaagaacagactacttcatcaggacactcttacttgaatttcaaaatgaatctcgtaggctgtatcagtttcattatgtgaac

SEQ ID NO: 273077 - DNA, 120 bp, Artificial Sequence
  ENSG00000127947_7 (sequence is synthesized)
tggccagaccatgatgttccttcatcatttgattctattctggacatgataagcttaatgaggaaatatcaagaacatgaagatgttcctatttgtattcattgcagtgcaggctgtgga

SEQ ID NO: 273078 - DNA, 120 bp, Artificial Sequence
  ENSG00000127947_8 (sequence is synthesized)
agaacaggtgccatttgtgccatagattatacgtggaatttactaaaagctgggaaaataccagaggaatttaatgtatttaatttaatacaagaaatgagaacacaaaggcattctgca

SEQ ID NO: 273079 - DNA, 120 bp, Artificial Sequence
  ENSG00000127947_9 (sequence is synthesized)
gtacaaacaaaggagcaatatgaacttgttcatagagctattgcccaactgtttgaaaaacagctacaactatatgaaattcatggagctcagaaaattgctgatggagtgaatgaaatt

SEQ ID NO: 273080 - DNA, 120 bp, Artificial Sequence
  ENSG00000127947_10 (sequence is synthesized)
aacactgaaaacatggtcagctccatagagcctgaaaaacaagattctcctcctccaaaaccaccaaggacccgcagttgccttgttgaaggggatgctaaagaagaaatactgcagcca

SEQ ID NO: 273081 - DNA, 120 bp, Artificial Sequence
  ENSG00000127947_11 (sequence is synthesized)
ccggaacctcatccagtgccacccatcttgacaccttctcccccttcagcttttccaacagtcactactgtgtggcaggacaatgatagataccatccaaagccagtgttgcatatggtt

SEQ ID NO: 273082 - DNA, 120 bp, Artificial Sequence
  ENSG00000127947_12 (sequence is synthesized)
tcatcagaacaacattcagcagacctcaacagaaactatagtaaatcaacagaacttccagggaaaaatgaatcaacaattgaacagatagataaaaaattggaacgaaatttaagtttt

SEQ ID NO: 273083 - DNA, 120 bp, Artificial Sequence
  ENSG00000127947_13 (sequence is synthesized)
gagattaagaaggtccctctccaagagggaccaaaaagttttgatgggaacacacttttgaataggggacatgcaattaaaattaaatctgcttcaccttgtatagctgataaaatctct

SEQ ID NO: 273084 - DNA, 120 bp, Artificial Sequence
  ENSG00000127947_14 (sequence is synthesized)
ctaaatgtcggtgatacttcccagaattcttgtgtggactgcagtgtaacacaatcaaacaaagtttcagttactccaccagaagaatcccagaattcagacacacctccaaggccagac

SEQ ID NO: 273085 - DNA, 120 bp, Artificial Sequence
  ENSG00000127947_15 (sequence is synthesized)
cgcttgcctcttgatgagaaaggacatgtaacgtggtcatttcatggacctgaaaatgccatacccatacctgatttatctgaaggcaattcctcagatatcaactatcaaactaggaaa

SEQ ID NO: 273086 - DNA, 120 bp, Artificial Sequence
  ENSG00000127947_16 (sequence is synthesized)
actgtgagtttaacaccaagtcctacaacacaagttgaaacacctgatcttgtggatcatgataacacttcaccactcttcagaacacccctcagttttactaatccacttcactctgat

SEQ ID NO: 273087 - DNA, 120 bp, Artificial Sequence
  ENSG00000127947_17 (sequence is synthesized)
gactcagactcagatgaaagaaactctgatggtgctgtgacccagaataaaactaatatttcaacagcaagtgccacagtttctgctgccactagtactgaaagcatttctactaggaaa

SEQ ID NO: 273088 - DNA, 120 bp, Artificial Sequence
  ENSG00000127947_18 (sequence is synthesized)
gtattgccaatgtccattgctagacataatatagcaggaacaacacattcaggtgctgaaaaagatgttgatgttagtgaagattcacctcctcccctacctgaaagaactcctgaatcg

SEQ ID NO: 273089 - DNA, 120 bp, Artificial Sequence
  ENSG00000127947_19 (sequence is synthesized)
tttgtgttagcaagtgaacataatacacctgtaagatcggaatggagtgaacttcaaagtcaggaacgatctgaacaaaaaaagtctgaaggcttgataacctctgaaaatgagaaatgt

SEQ ID NO: 273090 - DNA, 120 bp, Artificial Sequence
  ENSG00000127947_20 (sequence is synthesized)
gatcatccagcgggaggtattcactatgaaatgtgcatagaatgtccacctactttcagtgacaagagagaacaaatatcagaaaatccaacagaagccacagatattggttttggtaat

SEQ ID NO: 273091 - DNA, 120 bp, Artificial Sequence
  ENSG00000127947_21 (sequence is synthesized)
cgatgtggaaaacccaaaggaccaagagatccaccttcagaatggacatgattcagggagctagaagacactttaagttatactggaaaattcaggtgccactgaaagccagatttatag

SEQ ID NO: 273092 - DNA, 120 bp, Artificial Sequence
  ENSG00000127947_22 (sequence is synthesized)
tattccatctttaatatgtgggactaacagcagtgtagattgttaccttaatattttttgctgggaccatctacctgccttatactacacttaggaaaaagtattacatatggtttattt

SEQ ID NO: 273093 - DNA, 120 bp, Artificial Sequence
  ENSG00000127947_23 (sequence is synthesized)
tgaaacttcaagtattattgccttaatgtctcttaaccctgttacacgctgcttgtagacatgttaatatagtaatacctttatgatatattgagtttaaggactactctttttctgttt

SEQ ID NO: 273094 - DNA, 120 bp, Artificial Sequence
  ENSG00000127947_24 (sequence is synthesized)
tatcatgtatgcattattttgtatatgtacagggcaagtaggtatataatttgataaagttgcaattgaaatattattaacagaagatgtaagaaatttctgcatggtctaaatctttgt

SEQ ID NO: 273095 - DNA, 120 bp, Artificial Sequence
  ENSG00000127947_25 (sequence is synthesized)
gtactttatttgtaaattatttgccctggagttttagaaaatagtttctgaattttaaacttgctggattcatgcagccagctttgcaggttatcagagatcaaagattgtaataataat

SEQ ID NO: 273096 - DNA, 120 bp, Artificial Sequence
  ENSG00000127947_26 (sequence is synthesized)
tttgtaaattgtaagcaaaaagttatttttatattatatacagtctaattgttcatcctaattgttcctgttttcatctagtcagagattcagtaagtgccttggaacaatattgaattc

SEQ ID NO: 273097 - DNA, 120 bp, Artificial Sequence
  ENSG00000127947_27 (sequence is synthesized)
tcttagcttgtgtgtgtttctttaatatttgaactcaagtgggattagaagactatcaaaatacatgtatgtttcaggatatttgacctgtcattaaaaaaaacaaacagttttacagtg

SEQ ID NO: 273098 - DNA, 120 bp, Artificial Sequence
  ENSG00000127947_28 (sequence is synthesized)
aggagggtcgaggcaaggtatctggctgtgaccgggaggagtgcagatcgtggctgacagaggaacgggggtattgagggttgtttcccggcttaggaggcggtggttgcggctgctgct

SEQ ID NO: 273099 - DNA, 120 bp, Artificial Sequence
  ENSG00000127947_29 (sequence is synthesized)
aagtggagatcctgaggaaattcatccagagggtccaggccatgaagagtcctgaccacaatggggaggacaacttcgcccgggacttcatgatggagctctgtcgcccaggctggagtg

SEQ ID NO: 273100 - DNA, 120 bp, Artificial Sequence
  ENSG00000127947_30 (sequence is synthesized)
agaattcactgttattgcaggctgtggaagaacaggtgccatttgtgccatagattatacgtggaatttactaaaagctgggaaaataccagaggaatttaatgtatttaatttaataca

SEQ ID NO: 273101 - DNA, 120 bp, Artificial Sequence
  ENSG00000127947_31 (sequence is synthesized)
caaagtaaatctgtaagatttacatgatttaattcaaaccaaaaacatcatgttaattggaaccaatttaatttgttgctgtatagttagcccttgtttggaaagtctaattttgataat

SEQ ID NO: 273102 - DNA, 120 bp, Artificial Sequence
  ENSG00000127947_32 (sequence is synthesized)
tacttttttaggcaagccaattatacttctcggtgcaaaattcttgaaatctgtattttattaaaaagtaaaattgtgtttaactgatacgttctttatctcactccccaccatcacttt

SEQ ID NO: 273103 - DNA, 120 bp, Artificial Sequence
  ENSG00000127947_33 (sequence is synthesized)
ttagatcattgtaatggcctgccgagaatttgagatgggaaggaaaaaatgtgagcgctattggcctttgtatggagaagaccccataacgtttgcaccatttaaaatttcttgtgtaag

SEQ ID NO: 273104 - DNA, 120 bp, Artificial Sequence
  ENSG00000127947_34 (sequence is synthesized)
tatccatttttgtaaacacttttttcagaaaattggcatgctatactgatgaataattaaattataatgtggtatgaacccaggcttatagacgccaaggactcacaaacctatgcttac

SEQ ID NO: 273105 - DNA, 120 bp, Artificial Sequence
  ENSG00000127947_35 (sequence is synthesized)
agaataaaacatgattttccaaagttgcttggactagtcatgaaataaatgaaatacttaattctatttcacattgagattaaaaactaaaatagaaaactgcagtataaaaaatctttt

SEQ ID NO: 273106 - DNA, 120 bp, Artificial Sequence
  ENSG00000127947_36 (sequence is synthesized)
aacacagctgtatgttccttcatgcagtagcccatgcttttcagtgctcatccagaaacatttactccaaggagaaatagcataacattttaaaattttaagcctaattaaaaaacaatt

SEQ ID NO: 273107 - DNA, 120 bp, Artificial Sequence
  ENSG00000127947_37 (sequence is synthesized)
gtttgcttttcctctgatgctgaaaatgataggccttgatttcttgggatatatacccataacagacccagctttctattatttgtatataaaatgaatgtattgtaataggtattaaat

SEQ ID NO: 273108 - DNA, 120 bp, Artificial Sequence
  ENSG00000127947_38 (sequence is synthesized)
ataggctattttactgaataaggaatgaggggatttttaaaaaatccataattatgtttacttattgctgatgtttactaaaaagatggacccatttttaggatgtctcattaaattttt

SEQ ID NO: 273109 - DNA, 88 bp, Artificial Sequence
  ENSG00000127947_39 (sequence is synthesized)
ttaatctcttgttgtgcctgcatataggaaaaatcatagtgtatatgtatatgtattctgtgtaacagatgttgccatgaacacactg

SEQ ID NO: 273110 - DNA, 120 bp, Artificial Sequence
  ENSG00000127947_40 (sequence is synthesized)
atatgtattctgtgtaacagatgttgccatgaacacactgtaagttgtattttgtttattactaagtagaattttgtcaaacttcttaaatgattttttgtttctgaatattaacatgtc

SEQ ID NO: 273111 - DNA, 120 bp, Artificial Sequence
  ENSG00000127947_41 (sequence is synthesized)
agtttgatgttacacaaggttttatttctgcattaatatgttagtaatcttgaatttctcctagccttgatacaatgtttgggactagggccttgtaagttgatgtggtctcatttggtt

SEQ ID NO: 273112 - DNA, 120 bp, Artificial Sequence
  ENSG00000127948_0 (sequence is synthesized)
gcagagagcagccgggctgccagcgtttcatgatcaacatgggagactcccacgtggacaccagctccaccgtgtccgaggcggtggccgaagaagtatctcttttcagcatgacggaca

SEQ ID NO: 273113 - DNA, 120 bp, Artificial Sequence
  ENSG00000127948_1 (sequence is synthesized)
tgattctgttttcgctcatcgtgggtctcctaacctactggttcctcttcagaaagaaaaaagaagaagtccccgagttcaccaaaattcagacattgacctcctctgtcagagagagca

SEQ ID NO: 273114 - DNA, 120 bp, Artificial Sequence
  ENSG00000127948_2 (sequence is synthesized)
gctttgtggaaaagatgaagaaaacggggaggaacatcatcgtgttctacggctcccagacggggactgcagaggagtttgccaaccgcctgtccaaggacgcccaccgctacgggatgc

SEQ ID NO: 273115 - DNA, 120 bp, Artificial Sequence
  ENSG00000127948_3 (sequence is synthesized)
gaggcatgtcagcggaccctgaggagtatgacctggccgacctgagcagcctgccagagatcgacaacgccctggtggttttctgcatggccacctacggtgagggagaccccaccgaca

SEQ ID NO: 273116 - DNA, 120 bp, Artificial Sequence
  ENSG00000127948_4 (sequence is synthesized)
atgcccaggacttctacgactggctgcaggagacagacgtggatctctctggggtcaagttcgcggtgtttggtcttgggaacaagacctacgagcacttcaatgccatgggcaagtacg

SEQ ID NO: 273117 - DNA, 120 bp, Artificial Sequence
  ENSG00000127948_5 (sequence is synthesized)
tggacaagcggctggagcagctcggcgcccagcgcatctttgagctggggttgggcgacgacgatgggaacttggaggaggacttcatcacctggcgagagcagttctggccggccgtgt

SEQ ID NO: 273118 - DNA, 120 bp, Artificial Sequence
  ENSG00000127948_6 (sequence is synthesized)
gtgaacactttggggtggaagccactggcgaggagtccagcattcgccagtacgagcttgtggtccacaccgacatagatgcggccaaggtgtacatgggggagatgggccggctgaaga

SEQ ID NO: 273119 - DNA, 120 bp, Artificial Sequence
  ENSG00000127948_7 (sequence is synthesized)
gctacgagaaccagaagcccccctttgatgccaagaatccgttcctggctgcagtcaccaccaaccggaagctgaaccagggaaccgagcgccacctcatgcacctggaattggacatct

SEQ ID NO: 273120 - DNA, 120 bp, Artificial Sequence
  ENSG00000127948_8 (sequence is synthesized)
cggactccaaaatcaggtatgaatctggggaccacgtggctgtgtacccagccaacgactctgctctcgtcaaccagctgggcaaaatcctgggtgccgacctggacgtcgtcatgtccc

SEQ ID NO: 273121 - DNA, 120 bp, Artificial Sequence
  ENSG00000127948_9 (sequence is synthesized)
tgaacaacctggatgaggagtccaacaagaagcacccattcccgtgccctacgtcctaccgcacggccctcacctactacctggacatcaccaacccgccgcgtaccaacgtgctgtacg

SEQ ID NO: 273122 - DNA, 120 bp, Artificial Sequence
  ENSG00000127948_10 (sequence is synthesized)
caagatggcctcctcctccggcgagggcaaggagctgtacctgagctgggtggtggaggcccggaggcacatcctggccatcctgcaggactgcccgtccctgcggccccccatcgacca

SEQ ID NO: 273123 - DNA, 120 bp, Artificial Sequence
  ENSG00000127948_11 (sequence is synthesized)
cctgtgtgagctgctgccgcgcctgcaggcccgctactactccatcgcctcatcctccaaggtccaccccaactctgtgcacatctgtgcggtggttgtggagtacgagaccaaggctgg

SEQ ID NO: 273124 - DNA, 120 bp, Artificial Sequence
  ENSG00000127948_12 (sequence is synthesized)
ccgcatcaacaagggcgtggccaccaactggctgcgggccaaggagcctgccggggagaacggcggccgtgcgctggtgcccatgttcgtgcgcaagtcccagttccgcctgcccttcaa

SEQ ID NO: 273125 - DNA, 120 bp, Artificial Sequence
  ENSG00000127948_13 (sequence is synthesized)
ggccaccacgcctgtcatcatggtgggccccggcaccggggtggcacccttcataggcttcatccaggagcgggcctggctgcgacagcagggcaaggaggtgggggagacgctgctgta

SEQ ID NO: 273126 - DNA, 120 bp, Artificial Sequence
  ENSG00000127948_14 (sequence is synthesized)
ctacggctgccgccgctcggatgaggactacctgtaccgggaggagctggcgcagttccacagggacggtgcgctcacccagctcaacgtggccttctcccgggagcagtcccacaaggt

SEQ ID NO: 273127 - DNA, 120 bp, Artificial Sequence
  ENSG00000127948_15 (sequence is synthesized)
ctacgtccagcacctgctaaagcaagaccgagagcacctgtggaagttgatcgaaggcggtgcccacatctacgtctgtggggatgcacggaacatggccagggatgtgcagaacacctt

SEQ ID NO: 273128 - DNA, 120 bp, Artificial Sequence
  ENSG00000127948_16 (sequence is synthesized)
ctacgacatcgtggctgagctcggggccatggagcacgcgcaggcggtggactacatcaagaaactgatgaccaagggccgctactccctggacgtgtggagctaggggcctgcctgccc

SEQ ID NO: 273129 - DNA, 120 bp, Artificial Sequence
  ENSG00000127948_17 (sequence is synthesized)
cacccaccccacagactccggcctgtaatcagctctcctggctccctcccgtagtctcctgggtgtgtttggcttggccttggcatgggcgcaggcccagtgacaaagactcctctgggc

SEQ ID NO: 273130 - DNA, 120 bp, Artificial Sequence
  ENSG00000127948_18 (sequence is synthesized)
ctggggtgcatcctcctcagcccccaggccaggtgaggtccaccggcccctggcagcacagcccagggcctgcatgggggcaccgggctccatgcctctggaggcctctggccctcggtg

SEQ ID NO: 273131 - DNA, 120 bp, Artificial Sequence
  ENSG00000127948_19 (sequence is synthesized)
gctgcacagaagggctctttctctctgctgagctgggcccagcccctccacgtgatttccagtgagtgtaaataattttaaataacctctggcccttggaataaagttctgttttctgta

SEQ ID NO: 273132 - DNA, 120 bp, Artificial Sequence
  ENSG00000127948_20 (sequence is synthesized)
atgttgcagagttcttgggctcatgggggcagacgcaggcaggagctcagggaaattccgagaggactttggggtgtccaggagcactttgaggccacgggcccaggcaacttcctcacc

SEQ ID NO: 273133 - DNA, 120 bp, Artificial Sequence
  ENSG00000127948_21 (sequence is synthesized)
agtacggaacaggggatgcacagggccgaactttccatctgctggcccctgctggtgtccaggagagagctgtgaccctcctttttccttaagtcctggagctgagagtgagaagccatg

SEQ ID NO: 273134 - DNA, 120 bp, Artificial Sequence
  ENSG00000127948_22 (sequence is synthesized)
gagcgaaactctgtctcaaaaaaaaaaaagagaactgcattggaccaggctgggagagcccttgatgtaaccggtgagatttcctcatggagatctctgagattccctgtgctttgtgca

SEQ ID NO: 273135 - DNA, 120 bp, Artificial Sequence
  ENSG00000127948_23 (sequence is synthesized)
cccagccctgctcacagcaggcagagtgcaaggcggcacaggagctccgagatctgagccctgagctccagttccagccccagcgcagctccaaatgcctccccaggctgtggactcagt

SEQ ID NO: 273136 - DNA, 120 bp, Artificial Sequence
  ENSG00000127948_24 (sequence is synthesized)
ggcatgtcagcggaccctgaggagtatgacctggtaagctgccaccgcgtgctggccccagatggaggcagtgggtaggacagggagcaggtctgtagggcgcccctcagcagggggagg

SEQ ID NO: 273137 - DNA, 120 bp, Artificial Sequence
  ENSG00000127948_25 (sequence is synthesized)
ccggcagggagtggggtcctgggaagacgtcctcggaagttgccttcccgtgagggtcattgccatccctgcccgggctgactgacggaagggccattcctgcagttgcagccacgtgcc

SEQ ID NO: 273138 - DNA, 120 bp, Artificial Sequence
  ENSG00000127948_26 (sequence is synthesized)
tcactggaatagggggcagggaggacaaggccctgcctgccacagttggcccagcccccagcaccccctcttcctgcccagggatgcacggaacatggccagggatgtgcagaacacctt

SEQ ID NO: 273139 - DNA, 120 bp, Artificial Sequence
  ENSG00000127948_27 (sequence is synthesized)
tccctggggactccagatccatgtatctgaaaggcagccctccagacccccaccctgtcctcagcagccagggcaggccacttgtgagaccctctcctctgccccagaccccagcactac

SEQ ID NO: 273140 - DNA, 120 bp, Artificial Sequence
  ENSG00000127948_28 (sequence is synthesized)
gagaatgtcccctccctgtccccagccccagtcggctccagggggcattgggtgctggagactaaaggtgtttggtcttgggaacaagacctacgagcacttcaatgccatgggcaagta

SEQ ID NO: 273141 - DNA, 120 bp, Artificial Sequence
  ENSG00000127948_29 (sequence is synthesized)
ccagcggtgagtgctatctttcgcggcgacggcgggcatcaggtgggctgagtcgatggatcacgggagccccccagcccggcctgcatccctgagggcagtgcccctcgcagtcaggtg

SEQ ID NO: 273142 - DNA, 120 bp, Artificial Sequence
  ENSG00000127948_30 (sequence is synthesized)
agagagcagccgggctgccagcggtgagtgctatctttcgcggcgacggcggggtgggtgaggtcgggccccaagactcggggtttgccgggcgcctcagttcaccgcggccgcctggct

SEQ ID NO: 273143 - DNA, 120 bp, Artificial Sequence
  ENSG00000127948_31 (sequence is synthesized)
ctctgcgtcggggtgggccctcgggcctgggcactgcgcgtctggcccgacgctcgggcggaaggcatggctcccaccccggccctcctccgcgtcgcccttcccctagagctgatctcc

SEQ ID NO: 273144 - DNA, 120 bp, Artificial Sequence
  ENSG00000127948_32 (sequence is synthesized)
cttgggccgagagagcccggcaggccctcggctgagggttagggctcggtatctcagggctcggggtccagtccccgcgccgccgccccccacgggctaagccactttaactctccgagc

SEQ ID NO: 273145 - DNA, 120 bp, Artificial Sequence
  ENSG00000127948_33 (sequence is synthesized)
ctcagtttccccatctgtacgatgaatgggcctcgggaggcagcgaattctgggggtacctaacgtgagaggcgctcgatgcatgctcatgggacccgaatctaaccctgcagcatcagt

SEQ ID NO: 273146 - DNA, 120 bp, Artificial Sequence
  ENSG00000127948_34 (sequence is synthesized)
ataacgttcctctctgtgcccttgatggcccctgggtgctgcccgggcttccttaccttctcccagatggaagcctgcccagccctgccccggcttctgggcgtctggcccccggcagct

SEQ ID NO: 273147 - DNA, 120 bp, Artificial Sequence
  ENSG00000127948_35 (sequence is synthesized)
tgcaggtgttgccagcagctcagccagtgctgtggggcctcccgccctgcccccatggcccctcccactggtcaggtcgagggccaggcctcagagcggcccctgtgtccacgcaggtgt

SEQ ID NO: 273148 - DNA, 120 bp, Artificial Sequence
  ENSG00000127948_36 (sequence is synthesized)
catagaggatgtcccggtggccaggagagggaacgcagcccggctcgcttgggagtcattcttgcctaaccaaagccctgaagcagctctgctgttgctgggacagtttgtttccttgaa

SEQ ID NO: 273149 - DNA, 120 bp, Artificial Sequence
  ENSG00000127948_37 (sequence is synthesized)
cttggccaggggacgcctgcaccctcactcgagtgtgggagacttcctcctggcggggacctgctggaggcctgaagatgcggctgcctggagttaacagcaaggacctcctctgtcaga

SEQ ID NO: 273150 - DNA, 120 bp, Artificial Sequence
  ENSG00000127948_38 (sequence is synthesized)
aagaaaagttgctatattttgcaaaagacataaatctacagattcaagaaactgagtgaaccccacagaaggtataaagaagaaactcagagattaaagactctttcagggcagaaggct

SEQ ID NO: 273151 - DNA, 120 bp, Artificial Sequence
  ENSG00000127948_39 (sequence is synthesized)
cacacaggcttccagaacctcctcggagcgattgtagggactgcctgacccggaagagagttgtcagtcaagaccgccagagttttcccatcagagtatttggcatagcagaggtggctc

SEQ ID NO: 273152 - DNA, 120 bp, Artificial Sequence
  ENSG00000127948_40 (sequence is synthesized)
ccaaactgtgccagggcactgcagcaaactcacaagtgatcattctcaatgcggcggacgctcaagtctgttgaactccatgcgaagtgctagcttgggacagttcacggttccaacgtg

SEQ ID NO: 273153 - DNA, 120 bp, Artificial Sequence
  ENSG00000127948_41 (sequence is synthesized)
ccttcttaggattttacatctttgcgaagctgggtttgcagtggttgttcagacctaactatacgtggaactgttaggcatttttttttggcctacggataccattaaaaatttgctgag

SEQ ID NO: 273154 - DNA, 120 bp, Artificial Sequence
  ENSG00000127951_0 (sequence is synthesized)
ctgctggggtgagcagcactgtaaagatgaagctggctaactggtactggctgagctcagctgttcttgccacttacggttttttggttgtggcaaacaatgaaacagaggaaattaaag

SEQ ID NO: 273155 - DNA, 120 bp, Artificial Sequence
  ENSG00000127951_1 (sequence is synthesized)
atgaaagagcaaaggatgtctgcccagtgagactagaaagcagagggaaatgcgaagaggcaggggagtgcccctaccaggtaagcctgccccccttgactattcagctcccgaagcaat

SEQ ID NO: 273156 - DNA, 120 bp, Artificial Sequence
  ENSG00000127951_2 (sequence is synthesized)
tcagcaggatcgaggaggtgttcaaagaagtccaaaacctcaaggaaatcgtaaatagtctaaagaaatcttgccaagactgcaagctgcaggctgatgacaacggagacccaggcagaa

SEQ ID NO: 273157 - DNA, 120 bp, Artificial Sequence
  ENSG00000127951_3 (sequence is synthesized)
acggactgttgttacccagtacaggagccccgggagaggttggtgataacagagttagagaattagagagtgaggttaacaagctgtcctctgagctaaagaatgccaaagaggagatca

SEQ ID NO: 273158 - DNA, 120 bp, Artificial Sequence
  ENSG00000127951_4 (sequence is synthesized)
atgtacttcatggtcgcctggagaagctgaatcttgtaaatatgaacaacatagaaaattatgttgacagcaaagtggcaaatctaacatttgttgtcaatagtttggatggcaaatgtt

SEQ ID NO: 273159 - DNA, 120 bp, Artificial Sequence
  ENSG00000127951_5 (sequence is synthesized)
caaagtgtcccagccaagaacaaatacagtcacgtccagttcaacatctaatatataaagattgctctgactactacgcaataggcaaaagaagcagtgagacctacagagttacacctg

SEQ ID NO: 273160 - DNA, 120 bp, Artificial Sequence
  ENSG00000127951_6 (sequence is synthesized)
atcccaaaaatagtagctttgaagtttactgtgacatggagaccatggggggaggctggacagtgctgcaggcacgtctcgatgggagcaccaacttcaccagaacatggcaagactaca

SEQ ID NO: 273161 - DNA, 120 bp, Artificial Sequence
  ENSG00000127951_7 (sequence is synthesized)
aagcaggctttggaaacctcagaagggaattttggctggggaacgataaaattcatcttctgaccaagagtaaggaaatgattctgagaatagatcttgaagactttaatggtgtcgaac

SEQ ID NO: 273162 - DNA, 120 bp, Artificial Sequence
  ENSG00000127951_8 (sequence is synthesized)
tatatgccttgtatgatcagttttatgtggctaatgagtttctcaaatatcgtttacacgttggtaactataatggcacagctggagatgcattacgtttcaacaaacattacaaccacg

SEQ ID NO: 273163 - DNA, 120 bp, Artificial Sequence
  ENSG00000127951_9 (sequence is synthesized)
atctgaagtttttcaccactccagataaagacaatgatcgatatccttctgggaactgtgggctgtactacagttcaggctggtggtttgatgcatgtctttctgcaaacttaaatggca

SEQ ID NO: 273164 - DNA, 120 bp, Artificial Sequence
  ENSG00000127951_10 (sequence is synthesized)
aatattatcaccaaaaatacagaggtgtccgtaatgggattttctggggtacctggcctggtgtaagtgaggcacaccctggtggctacaagtcctccttcaaagaggctaagatgatga

SEQ ID NO: 273165 - DNA, 120 bp, Artificial Sequence
  ENSG00000127951_11 (sequence is synthesized)
tcagacccaagcactttaagccataaatcactctgttcattcctccaggtattcgttatctaatagggcaattaattccttcagcactttagaatatgccttgtttcatatttttcatag

SEQ ID NO: 273166 - DNA, 120 bp, Artificial Sequence
  ENSG00000127951_12 (sequence is synthesized)
ctaaaaaatgatgtctgacggctaggttcttatgctacacagcatttgaaataaagctgaaaaacaatgcattttaaaggagtcctttgttgttatgctgttatccaatgaacacttgca

SEQ ID NO: 273167 - DNA, 120 bp, Artificial Sequence
  ENSG00000127951_13 (sequence is synthesized)
agcaattagcaatattgagaattatacattagatttacaattcttttaatttctattgaaactttttctattgcttgtattacttgctgtatttaaaaaataattgttggctgggtgtgg

SEQ ID NO: 273168 - DNA, 66 bp, Artificial Sequence
  ENSG00000127951_14 (sequence is synthesized)
tcacgcctgtaatcccagcactttggaatatgtgaaacgctgtctctattaaaaatacaaaaatta

SEQ ID NO: 273169 - DNA, 120 bp, Artificial Sequence
  ENSG00000127951_15 (sequence is synthesized)
agcatgggtgacagagaaaactctgtctcaaacaaaaaaataataaaatttattcagtaggctggattctacacaaagtaatctgtatttgggccatgatttaagcacatctgaaggtat

SEQ ID NO: 273170 - DNA, 120 bp, Artificial Sequence
  ENSG00000127951_16 (sequence is synthesized)
tctatatcatttactttgcaacagaacaaccctacagcattttggttcccagactaagggaactaatatctatataattaaacttgttcatttatcattcatgaaatataaaatacttgt

SEQ ID NO: 273171 - DNA, 120 bp, Artificial Sequence
  ENSG00000127951_17 (sequence is synthesized)
catttaaaccgtttaaaaatgtggtagcataatgtcaccccaaaaagcattcagaaagcaatgtaactgtgaagaccagggtttaaaggtaattcatttatagtttataactccttagat

SEQ ID NO: 273172 - DNA, 120 bp, Artificial Sequence
  ENSG00000127951_18 (sequence is synthesized)
gtttgatgttgaaaactgctttaacatgaaaattatcttcctctgctctgtgtgaacaatagcttttaatttaagattgctcactactgtactagactactggtaggtttttttgggggg

SEQ ID NO: 273173 - DNA, 120 bp, Artificial Sequence
  ENSG00000127951_19 (sequence is synthesized)
ggtgggtagggatatgtgggtaatgaagcatttacttacaggctatcatactctgaggccaattttatctccaaagcaataatatcattaagtgattcacttcatagaaggctaagtttc

SEQ ID NO: 273174 - DNA, 120 bp, Artificial Sequence
  ENSG00000127951_20 (sequence is synthesized)
tctaggacagatagaaaacatgaattttgaaatatatagaacagtagttaaaatactatatatttcaaccctggctggtagattgcttattttactatcagaaactaaaagatagatttt

SEQ ID NO: 273175 - DNA, 120 bp, Artificial Sequence
  ENSG00000127951_21 (sequence is synthesized)
tacccaaacagaagtatctgtaatttttataattcatcaattctggaatgctatatataatatttaaaagactttttaaatgtgtttaatttcatcatcgtaaaaagggatcatctcaga

SEQ ID NO: 273176 - DNA, 120 bp, Artificial Sequence
  ENSG00000127951_22 (sequence is synthesized)
gagaacagcagtattctgcgtatttttaaaaatgctctagagtaacatttgaagtaattcactgtagtgtatgccagtcctagaaataatttttttaatttctggtgtctgtttctaata

SEQ ID NO: 273177 - DNA, 120 bp, Artificial Sequence
  ENSG00000127951_23 (sequence is synthesized)
cactaaccaagttttcaaaatatatttacaaagatgcatctttacccattattttaaaatgattaaggaggatagttgcttcaggtaacaagctaatttttcaaatattaggcccttaca

SEQ ID NO: 273178 - DNA, 120 bp, Artificial Sequence
  ENSG00000127951_24 (sequence is synthesized)
gaactatttagtcaaaaagtaagatattcctttaaaatatataacccaaagctttcagttaaacatgatatatcacaaatactattaaaatgttaaagagaaatgcaaatagcattaaat

SEQ ID NO: 273179 - DNA, 120 bp, Artificial Sequence
  ENSG00000127951_25 (sequence is synthesized)
gatgaccaaaatgtaaaatattgtagatttcaaaagctgtgtctctattaggtgggataccaaatgtaaatgatgtaactgacgttgttttttactttttactttttaaaaaagactaaa

SEQ ID NO: 273180 - DNA, 120 bp, Artificial Sequence
  ENSG00000127951_26 (sequence is synthesized)
aacgttttgatattatacaatgtatttgtttcagataaggtcattgtcatttagtatatataattaatatatgtacaagtttaagtaaattcctgtgagtaaaaatggacttatcacaaa

SEQ ID NO: 273181 - DNA, 120 bp, Artificial Sequence
  ENSG00000127951_27 (sequence is synthesized)
acatagttctaaagaaaggtatatgctcatatacacggtgtccattaatttaatgggaactaggtataacttcaggagaatttggcaaataattcattaatccatgtaaatattcaaaag

SEQ ID NO: 273182 - DNA, 120 bp, Artificial Sequence
  ENSG00000127951_28 (sequence is synthesized)
cttgttctatccacattatttcaagggatcactttatttttcattatactttcacagcacttttctagtaaattctgtaacacagaaattccattttggaatcatttcatgttaccaata

SEQ ID NO: 273183 - DNA, 120 bp, Artificial Sequence
  ENSG00000127951_29 (sequence is synthesized)
attctagacttttataacatttaacatgttgatggaaatagattacatctgctagaaccttttgccttaactattcaccaatatatgctaatattcataaatatggattgactgtttaca

SEQ ID NO: 273184 - DNA, 120 bp, Artificial Sequence
  ENSG00000127951_30 (sequence is synthesized)
aacattagaatcttgtcttggttccattttgatggctaatatttgttatcttaattaagactatttctgaggtcatgattacttgaaaatattgactaaaactgggtccttagaaattcc

SEQ ID NO: 273185 - DNA, 120 bp, Artificial Sequence
  ENSG00000127951_31 (sequence is synthesized)
aggtggagctgatttacctatgactgaggggaaaaaaaaatcaaattttactgataatagtaatgctccaaatgaattaatgacacatctgttcaataaataaagagcttaaatatacaa

SEQ ID NO: 273186 - DNA, 120 bp, Artificial Sequence
  ENSG00000127951_32 (sequence is synthesized)
aacataagaaatctgggcaacaaaacttgtggtctttacttttgaatagctacccaagaaaaggttttaaaggtaaaagttatgagtaatgtcatcacaataagctcttgtttaaaattc

SEQ ID NO: 273187 - DNA, 120 bp, Artificial Sequence
  ENSG00000127951_33 (sequence is synthesized)
catcacaataagctcttgtttaaaattcttttcttttatgtataattaggtttatgtttcatgtctttttaaaaccttataaaagatttaattatcacatctattcttcaatgtggaaat

SEQ ID NO: 273188 - DNA, 120 bp, Artificial Sequence
  ENSG00000127951_34 (sequence is synthesized)
caaagtgtcccagccaagaacaaatacagtcacgtccaggtatgtataataatgttttcttatcatatgttcataaatgttatacagctagagagtatctataaacattaacctgagtca

SEQ ID NO: 273189 - DNA, 120 bp, Artificial Sequence
  ENSG00000127951_35 (sequence is synthesized)
gtaagttaaatagatgacagattaagtcttttatttatcaaggtgcacaggaaaaaataaatatcttctcaaatatgaccacataaatatgacctaattacaaaaatcatagttagttct

SEQ ID NO: 273190 - DNA, 120 bp, Artificial Sequence
  ENSG00000127951_36 (sequence is synthesized)
gtatccactggaagtcactttcaattttaagatcttatttgttaatgccagacctacttgcaagcagaagtagagagaatttcttgatgttttagtgcatttaacttgtctcttcaatga

SEQ ID NO: 273191 - DNA, 120 bp, Artificial Sequence
  ENSG00000127952_0 (sequence is synthesized)
gccacttccgggagtcggaaaggaaagctgtgggaccatcctggcaaccccggtgtttggctgggttctagcgtagccgtctgtgtggccggtgggggacctgcggtcggagtgggaggg

SEQ ID NO: 273192 - DNA, 120 bp, Artificial Sequence
  ENSG00000127952_1 (sequence is synthesized)
ccagtctgcacccaagaggtggaagaggacgggctttaggctggaagcgccttagaggagccatttttccaggtggggccccaggcagaggctccgacagggagcctggccatagtcgcg

SEQ ID NO: 273193 - DNA, 120 bp, Artificial Sequence
  ENSG00000127952_2 (sequence is synthesized)
cagccggggaggtggagcgcgtcccagacccgagcccccgacctcagccaaacccattccttctgcccttggaggccagaggggactctgagctccggaaaggatgcctggtttgctttt

SEQ ID NO: 273194 - DNA, 120 bp, Artificial Sequence
  ENSG00000127952_3 (sequence is synthesized)
atgtgaaccaacagagctttacaacatcctgaatcaggccacaaaactctccagattaacagaccccaactatctctgtttattggatgtccgttccaaatgggagtatgacgaaagcca

SEQ ID NO: 273195 - DNA, 120 bp, Artificial Sequence
  ENSG00000127952_4 (sequence is synthesized)
tgtgatcactgcccttcgagtgaagaagaaaaataatgaatatcttctcccggagtctgtggacctggagtgtgtgaagtactgcgtggtgtatgataacaacagcagcaccctggagat

SEQ ID NO: 273196 - DNA, 120 bp, Artificial Sequence
  ENSG00000127952_5 (sequence is synthesized)
gcctcacccaccaccccgtctacatcctgaaagggggctatgagcgcttctcaggcacgtaccactttctccggacccagaagatcatctggatgcctcaggaactggatgcatttcagc

SEQ ID NO: 273197 - DNA, 120 bp, Artificial Sequence
  ENSG00000127952_6 (sequence is synthesized)
cataccccattgaaatcgtgccagggaaggtcttcgttggcaatttcagtcaagcctgtgaccccaagattcagaaggacttgaaaatcaaagcccatgtcaatgtctccatggatacag

SEQ ID NO: 273198 - DNA, 120 bp, Artificial Sequence
  ENSG00000127952_7 (sequence is synthesized)
ggcccttttttgcaggcgatgctgacaagcttctgcacatccggatagaagattccccggaagcccagattcttcccttcttacgccacatgtgtcacttcattgaaattcaccatcacc

SEQ ID NO: 273199 - DNA, 120 bp, Artificial Sequence
  ENSG00000127952_8 (sequence is synthesized)
ttggctctgtcattctgatcttttccacccaaggtatcagccgcagttgtgccgccatcatagcctacctcatgcatagtaacgagcagaccttgcagaggtcctgggcctatgtcaaga

SEQ ID NO: 273200 - DNA, 120 bp, Artificial Sequence
  ENSG00000127952_9 (sequence is synthesized)
agtgcaaaaacaacatgtgtccaaatcggggattggtgagccagctgctggaatgggagaagactatccttggagattccatcacaaacatcatggatccgctctactgatcttctccga

SEQ ID NO: 273201 - DNA, 120 bp, Artificial Sequence
  ENSG00000127952_10 (sequence is synthesized)
ggcccaccgaagggtactgaagagcctcacctgggggcattttgtgggtggagggccagagtgtgtatacccaggcttgtctggaaggagaaggcctttgctgcctgaaagtctcatgtt

SEQ ID NO: 273202 - DNA, 80 bp, Artificial Sequence
  ENSG00000127952_11 (sequence is synthesized)
gtgccgccatcatagcctacctcatgcatagtaacgagcagaccttgagcacaatctcgactcactgcaagctctgcctc

SEQ ID NO: 273203 - DNA, 120 bp, Artificial Sequence
  ENSG00000127952_12 (sequence is synthesized)
ctgggactacaggcatctgccaccactcaatttctttaatatatgtaggcctattcagattgtctgtttcttcttgtgtgagttttggcagtctgtgtctttcaaggaattgatcaatca

SEQ ID NO: 273204 - DNA, 120 bp, Artificial Sequence
  ENSG00000127952_13 (sequence is synthesized)
catttgtggatatgaatattcttctattatccttttaatgtctgtgggatctgtagcaatgtcttctctttcacttctgtattagtaatttgtgtcttctgtttaagttagcctggctag

SEQ ID NO: 273205 - DNA, 120 bp, Artificial Sequence
  ENSG00000127952_14 (sequence is synthesized)
cggtgtatcgattttattgatcttttcaaagaaccggcttttggtttttttgattttctctattgatttcctgttttcaatttcattctttgcatggcgtatctagttttcctagcacca

SEQ ID NO: 273206 - DNA, 120 bp, Artificial Sequence
  ENSG00000127952_15 (sequence is synthesized)
gcgtatctagttttcctagcaccatttgttgaaatgactgtccttttcccccatcgaatggtcttggcatactatcaaaaattccttgacaggcccggtgcagtggctcacacctgtaat

SEQ ID NO: 273207 - DNA, 120 bp, Artificial Sequence
  ENSG00000127954_0 (sequence is synthesized)
gctgagctgcaggcgcggcgaaacttccctctacccgcccggcccgcggcgcgcaccgttggcgctggacgcttcctccttggaagcgcctctccctcagttatggagaaaacttgtata

SEQ ID NO: 273208 - DNA, 120 bp, Artificial Sequence
  ENSG00000127954_1 (sequence is synthesized)
gatgcacttcctcttactatgaattcttcagaaaagcaagagactgtatgtatttttggaactggtgattttggaagatcactgggattgaaaatgctccagtgtggttattctgttgtt

SEQ ID NO: 273209 - DNA, 120 bp, Artificial Sequence
  ENSG00000127954_2 (sequence is synthesized)
tttggaagtcgaaacccccagaagaccaccctactgcccagtggtgcagaagtcttgagctattcagaagcagccaagaagtctggcatcataatcatagcaatccacagagagcattat

SEQ ID NO: 273210 - DNA, 120 bp, Artificial Sequence
  ENSG00000127954_3 (sequence is synthesized)
gattttctcacagaattaactgaggttctcaatggaaaaatattggtagacatcagcaacaacctcaaaatcaatcaatatccagaatctaatgcagagtaccttgctcatttggtgcca

SEQ ID NO: 273211 - DNA, 120 bp, Artificial Sequence
  ENSG00000127954_4 (sequence is synthesized)
ggagcccacgtggtaaaagcatttaacaccatctcagcctgggctctccagtcaggagcactggatgcaagtcggcaggtgtttgtgtgtggaaatgacagcaaagccaagcaaagagtg

SEQ ID NO: 273212 - DNA, 120 bp, Artificial Sequence
  ENSG00000127954_5 (sequence is synthesized)
atggatattgttcgtaatcttggacttactccaatggatcaaggatcactcatggcagccaaagaaattgaaaagtaccccctgcagctatttccaatgtggaggttccccttctatttg

SEQ ID NO: 273213 - DNA, 120 bp, Artificial Sequence
  ENSG00000127954_6 (sequence is synthesized)
tctgctgtgctgtgtgtcttcttgtttttctattgtgttataagagacgtaatctacccttatgtttatgaaaagaaagataatacatttcgtatggctatttccattccaaatcgtatc

SEQ ID NO: 273214 - DNA, 120 bp, Artificial Sequence
  ENSG00000127954_7 (sequence is synthesized)
tttccaataacagcacttacactgcttgctttggtttacctccctggtgttattgctgccattctacaactgtaccgaggcacaaaataccgtcgattcccagactggcttgaccactgg

SEQ ID NO: 273215 - DNA, 120 bp, Artificial Sequence
  ENSG00000127954_8 (sequence is synthesized)
atgctttgccgaaagcagcttggcttggtagctctgggatttgccttccttcatgtcctctacacacttgtgattcctattcgatattatgtacgatggagattgggaaacttaaccgtt

SEQ ID NO: 273216 - DNA, 120 bp, Artificial Sequence
  ENSG00000127954_9 (sequence is synthesized)
acccaggcaatactcaagaaggagaatccatttagcacctcctcagcctggctcagtgattcatatgtggctttgggaatacttgggttttttctgtttgtactcttgggaatcacttct

SEQ ID NO: 273217 - DNA, 120 bp, Artificial Sequence
  ENSG00000127954_10 (sequence is synthesized)
ttgccatctgttagcaatgcagtcaactggagagagttccgatttgtccagtccaaactgggttatttgaccctgatcttgtgtacagcccacaccctggtgtacggtgggaagagattc

SEQ ID NO: 273218 - DNA, 120 bp, Artificial Sequence
  ENSG00000127954_11 (sequence is synthesized)
ctcagcccttcaaatctcagatggtatcttcctgcagcctacgtgttagggcttatcattccttgcactgtgctggtgatcaagtttgtcctaatcatgccatgtgtagacaacaccctt

SEQ ID NO: 273219 - DNA, 120 bp, Artificial Sequence
  ENSG00000127954_12 (sequence is synthesized)
acaaggatccgccagggctgggaaaggaactcaaaacactagaaaaagcattgaatggaaaatcaatatttaaaacaaagttcaatttagctggatttctgaactatggttttgaatgtt

SEQ ID NO: 273220 - DNA, 120 bp, Artificial Sequence
  ENSG00000127954_13 (sequence is synthesized)
taaagaagaatgatgggtacagttaggaaagtttttttcttacaccgtgactgagggaaacattgcttgtctttgagaaattgactgacatactggaagagaacaccattttatctcagg

SEQ ID NO: 273221 - DNA, 120 bp, Artificial Sequence
  ENSG00000127954_14 (sequence is synthesized)
ttagtgaagaatcagtgcaggtccctgactcttattttcccagaggccatggagctgagattgagactagccttgtggtttcacactaaagagtttccttgttatgggcaacatgcatga

SEQ ID NO: 273222 - DNA, 120 bp, Artificial Sequence
  ENSG00000127954_15 (sequence is synthesized)
cctaatgtcttgcaaaatccaatagaagtattgcagcttccttctctggctcaagggctgagttaagtgaaaggaaaaacagcacaatggtgaccactgataaaggctttattaggtata

SEQ ID NO: 273223 - DNA, 120 bp, Artificial Sequence
  ENSG00000127954_16 (sequence is synthesized)
tctgaggaagtgggtcacatgaaatgtaaaaagggaatgaggtttttgttgttttttggaagtaaaggcaaacataaatattaccatgatgaattctagtgaaatgaccccttgactttg

SEQ ID NO: 273224 - DNA, 120 bp, Artificial Sequence
  ENSG00000127954_17 (sequence is synthesized)
cttttcttaatacagatatttactgagaggaactatttttataacacaagaaaaatttacaattgattaaaagtatccatgtcttggatacatacgtatctatagagctggcatgtaatt

SEQ ID NO: 273225 - DNA, 120 bp, Artificial Sequence
  ENSG00000127954_18 (sequence is synthesized)
cttcctctataaagaataggtataggaaagactgaataaaaatggagggatatccccttggatttcacttgcattgtgcaataagcaaagaagggttgataaaagttcttgatcaaaaag

SEQ ID NO: 273226 - DNA, 120 bp, Artificial Sequence
  ENSG00000127954_19 (sequence is synthesized)
aaagttcaaagaaaccagaattttagacagcaagctaaataaatattgtaaaattgcactatattaggttaagtattatttaggtattataatatgctttgtaaattttatattccaaat

SEQ ID NO: 273227 - DNA, 120 bp, Artificial Sequence
  ENSG00000127954_20 (sequence is synthesized)
attgctcaatatttttcatctattaaattaatttctagtgtaaataagtagcttctatatctgtcttagtctattataattgtaaggagtaaaattaaatgaatagtctgcaggtataaa

SEQ ID NO: 273228 - DNA, 120 bp, Artificial Sequence
  ENSG00000127954_21 (sequence is synthesized)
aacaatgcatagatgatcgaaaattacggaaaatcatagggcagagaggtgtgaagattcatcattatgtgaaatttggatctttctcaaatccttgctgaaatttaggatggttctcac

SEQ ID NO: 273229 - DNA, 120 bp, Artificial Sequence
  ENSG00000127954_22 (sequence is synthesized)
tgtttttctgtgctgatagtaccctttccaaggtgaccttcagggggattaaccttcctagctcaagcaatgagctaaaaggagccttatgcatgatcttcccacatatcaaaataacta

SEQ ID NO: 273230 - DNA, 120 bp, Artificial Sequence
  ENSG00000127954_23 (sequence is synthesized)
aaaggcactgagtttggcatttttctgcctgctctgctaagacctttttttttttttactttcattataacatattatacatgacattatacaaaaatgattaaaatatattaaaacaac

SEQ ID NO: 273231 - DNA, 120 bp, Artificial Sequence
  ENSG00000127954_24 (sequence is synthesized)
atcaacaatccaggatatttttctataaaactttttaaaaataattgtatctatatattcaattttacatcctttttcaaaggctttgtttttctaaaggctttgttttcctttttatta

SEQ ID NO: 273232 - DNA, 120 bp, Artificial Sequence
  ENSG00000127954_25 (sequence is synthesized)
gatctgcctgcctccgcctcacaaagcactgggattacaggcatgaatctggccttacgtaatatattttcttaatggctgcataatatcacatcaaataggcatttttcaaacctcttt

SEQ ID NO: 273233 - DNA, 120 bp, Artificial Sequence
  ENSG00000127954_26 (sequence is synthesized)
ccttattaaacatgtagactatatccattttttactaaaataaataacatttcagataatatctttgcactgataatgttgccaagccatttctaaagtgaccttatcaatttaattacc

SEQ ID NO: 273234 - DNA, 120 bp, Artificial Sequence
  ENSG00000127954_27 (sequence is synthesized)
attggatgagggtgttgctttcatcgcaccattgtagattgtcttttttatttcaatttgcgtttatttataactggttgcaaaggtacacagaacacacgctccttcaacttatctttg

SEQ ID NO: 273235 - DNA, 120 bp, Artificial Sequence
  ENSG00000127954_28 (sequence is synthesized)
ataaacccaagcaaggatacaaaaagttggacgacattgagtagagtcatggtatacggtgctgaccctacagtatcagtggaaaagataaggaaaatgtcactactcacctatgttatg

SEQ ID NO: 273236 - DNA, 120 bp, Artificial Sequence
  ENSG00000127954_29 (sequence is synthesized)
caaaacagttaggtgtgctggggctggatactgctcttttacttgagcattggttgattaaagtttaggtaccatccaggctggtctagagaagtctttggagttaaccatgctcttttt

SEQ ID NO: 273237 - DNA, 120 bp, Artificial Sequence
  ENSG00000127954_30 (sequence is synthesized)
gttaaagaagagagtaatgtgtttatcctggctcatagtccgtcaccgaaaatagaaaatgccatccataggtaaaatgctgacctatagaaaaaaatgaactctacttttatagcctag

SEQ ID NO: 273238 - DNA, 120 bp, Artificial Sequence
  ENSG00000127954_31 (sequence is synthesized)
taaaaatgctctacctgagtagttaaaagcaattcatgaagcctgaagctaaagagcactctgatggttttggcataatagctgcatttccagacctgacctttggccccaaccacaagt

SEQ ID NO: 273239 - DNA, 120 bp, Artificial Sequence
  ENSG00000127954_32 (sequence is synthesized)
gctccaagccccaccagctgaccaaagaaagcccaagttctccttctgtccttcccacaacctccctgctcccaaaactatgaaattaatttgaccatattaacacagctgactcctcca

SEQ ID NO: 273240 - DNA, 120 bp, Artificial Sequence
  ENSG00000127954_33 (sequence is synthesized)
gtttacttaaggtagaaagaatgagtttacaacagatgaaaataagtgctttgggcgaactgtattccttttaacagatccaaactattttacatttaaaaaaaaagttaaactaaactt

SEQ ID NO: 273241 - DNA, 120 bp, Artificial Sequence
  ENSG00000127954_34 (sequence is synthesized)
ctttactgctgatatgtttcctgtattctagaaaaatttttacactttcacattatttttgtacactttccccatgttaagggatgatggcttttataaatgtgtattcattaaatgtta

SEQ ID NO: 273242 - DNA, 120 bp, Artificial Sequence
  ENSG00000127954_35 (sequence is synthesized)
ctttaaaaatatttcctagttttgtttaattctggttttaactcatcagcattccaaataaagttactaaaaggttttgaatcacagtagttccagcatctgggactaaaaatacttccc

SEQ ID NO: 273243 - DNA, 120 bp, Artificial Sequence
  ENSG00000127954_36 (sequence is synthesized)
ttcagggataagcaaaagagaaggcagtgcatgggtttgaaagtgcattaacagatctgcagcttcttgcaatgtaagcttgagctcagcggggtggcacagtccagtatgctgtgtgtg

SEQ ID NO: 273244 - DNA, 120 bp, Artificial Sequence
  ENSG00000127954_37 (sequence is synthesized)
cttcagtattaccctcagagaggggagagcatcagatggctaaatggggaggactgcactatcccacgctggatttttgtgagaatttggaggtaaaaaaggctttccttctccatgcag

SEQ ID NO: 273245 - DNA, 120 bp, Artificial Sequence
  ENSG00000127954_38 (sequence is synthesized)
acgccacagggataaggctaatggcttgacaagcagacttcaggttggattcagactgcgtgactgggcattaaatgccttgcacaactggactgctgcagctctgatgggtgttatcct

SEQ ID NO: 273246 - DNA, 120 bp, Artificial Sequence
  ENSG00000127954_39 (sequence is synthesized)
aataaagagaggactgacaacctggaggaagctggaagcaaatggaaagcccctactgaaaaagccatttcaattagaaattcattcaggagctcttcattcatctattgttcagggatc

SEQ ID NO: 273247 - DNA, 120 bp, Artificial Sequence
  ENSG00000127954_40 (sequence is synthesized)
acaaaagagccatgataatgataaatgcatattatgcatttcacctctgagagcataaaagcttctggaactctgttccaaaattaaggtgtaatggcagtcatggtactgcacacagta

SEQ ID NO: 273248 - DNA, 88 bp, Artificial Sequence
  ENSG00000127954_41 (sequence is synthesized)
aaattaaggtgtaatggcagtcatggtactgcacacagtagttgcaattttcattctccatcatcacaaccatcatcttcactaccac

SEQ ID NO: 273249 - DNA, 120 bp, Artificial Sequence
  ENSG00000127954_42 (sequence is synthesized)
ggtcctacttcaattttctataatgaattaggtttacattctagaaaaatccttcactcttctaaaggtttgttcagtagaatttgggaaaagagtataagttactcttcaatgtatcag

SEQ ID NO: 273250 - DNA, 120 bp, Artificial Sequence
  ENSG00000127954_43 (sequence is synthesized)
tgggaaaagagtataagttactcttcaatgtatcagaagcatttggaccaggtgactccatcttcaatagaggctgagtaaaataagcctgagactggccgggcgcagtgactcacacct

SEQ ID NO: 273251 - DNA, 120 bp, Artificial Sequence
  ENSG00000127954_44 (sequence is synthesized)
aaataaataaataagactgagacctactgggctgcattcccaggacagcaggtgttcttagtcacaggatgagataggagtaagcacaaggtacaggtcacaaagaccttgctgataaaa

SEQ ID NO: 273252 - DNA, 120 bp, Artificial Sequence
  ENSG00000127954_45 (sequence is synthesized)
aataaagaagccgtccaaaacctaccaaaaccaagatggcaatgaaagtgatctttggctgtctcagctgttcattatatgctaattataatatattagcagcctaaaatacactcccac

SEQ ID NO: 273253 - DNA, 120 bp, Artificial Sequence
  ENSG00000127954_46 (sequence is synthesized)
tagcaccatgacagtttacaaattccatggccacatccagaagttaccctatatgttctaaaagcaggaggagccctcagttctgggaatcatctgcccctttcctgaacatctcatgaa

SEQ ID NO: 273254 - DNA, 120 bp, Artificial Sequence
  ENSG00000127954_47 (sequence is synthesized)
tgtttagcatataatcaagaaataactataactatactcagccaggcagcccatgccactgctctgcctatgaaatagcccttttattcctttacagtcttaataaacttgctttcattt

SEQ ID NO: 273255 - DNA, 120 bp, Artificial Sequence
  ENSG00000127954_48 (sequence is synthesized)
ttgctttcattttatggattcacctcaaattctttcttgtgcaagatccaagaactctctcttggggtctgtattggaccccctttctggtaacatatgcattacctctcctcaagctcg

SEQ ID NO: 273256 - DNA, 120 bp, Artificial Sequence
  ENSG00000127954_49 (sequence is synthesized)
aggcaaagtcctaaagtttcggataagacccatatgagggaggtgaaggatgaagggattgagggcaaagggactgagaaaaggggagtgtggaagagcaagacagtgctcttgccatta

SEQ ID NO: 273257 - DNA, 120 bp, Artificial Sequence
  ENSG00000127954_50 (sequence is synthesized)
cccagcaaaagccaaaaggatccagtactacttgctttctgctgtaagggaattttggaaggcttttaatgatacttacagcagagtgccatgcgtaaagcctatgctaacaatttcaca

SEQ ID NO: 273258 - DNA, 120 bp, Artificial Sequence
  ENSG00000127954_51 (sequence is synthesized)
tgcattatcttatttaatcctcataacagttctctaaggttctcttcttatccttatttatcagaagaggaaactgagctttgaaatctcagtactttgactaagttcacacaactaatg

SEQ ID NO: 273259 - DNA, 120 bp, Artificial Sequence
  ENSG00000127954_52 (sequence is synthesized)
agaggcagagctgggatctaggcagtctgactccaggcccatctccttttaacacaacgatataataggggacacccatgctgtcctcttaaatgtccctttgaatccacaaaatagact

SEQ ID NO: 273260 - DNA, 120 bp, Artificial Sequence
  ENSG00000127954_53 (sequence is synthesized)
aagtgaacgaaaccactgcaactcttcttaaaaacatttttaaagacaagaagcttattcgcattttaaatattcctgattgcccagtcctcaatactccaggtttatctatgctgattt

SEQ ID NO: 273261 - DNA, 120 bp, Artificial Sequence
  ENSG00000127954_54 (sequence is synthesized)
caattcgtcctctaaggttgtagaaacacaggatctgtggttcccgcattaagttcaattccattgcaattgccattttaatcttcccactctagtctggccacaaggtttcctaaactc

SEQ ID NO: 273262 - DNA, 120 bp, Artificial Sequence
  ENSG00000127954_55 (sequence is synthesized)
taaagggagctttgttctggtggagggaggtaaaatccccagacctgaggactcgaaggggcagtcaaggagaggatagctcttctccagagcttaaaggcaaatattttctttttccct

SEQ ID NO: 273263 - DNA, 120 bp, Artificial Sequence
  ENSG00000127954_56 (sequence is synthesized)
ggtttctcaccttattgctttgtgtactgagtgaacttatttgtttttgagatccagtaacccatgcaagaaatttcataacacttctcatttagtactttaatactagttgaagaatct

SEQ ID NO: 273264 - DNA, 120 bp, Artificial Sequence
  ENSG00000127954_57 (sequence is synthesized)
agggttacacacacacacacacacacacaccaggcttagttccattacctatagctgtaaaaatgagatttttttctcagttttgtgaaaatgaaaggctgctggactggaactcacagt

SEQ ID NO: 273265 - DNA, 120 bp, Artificial Sequence
  ENSG00000127954_58 (sequence is synthesized)
attgtatatcaaaaagtatcagattgtgataaaatagaaacccagaattaaacttggccttatgatttttagaaagtcaacagattttgaaggagcccacccagtgtattcatttcattt

SEQ ID NO: 273266 - DNA, 120 bp, Artificial Sequence
  ENSG00000127954_59 (sequence is synthesized)
ttactaatcctttctttcatgctaagatagagatgaaaaagaatgacagacttcctgttctcatttcattacagcaaaataaataagttttagtgttccatagctctgtaggatgactat

SEQ ID NO: 273267 - DNA, 88 bp, Artificial Sequence
  ENSG00000127954_60 (sequence is synthesized)
aaataagttttagtgttccatagctctgtaggatgactatagttaaaaataacatataatttcaaatagccaggaggacattgaccaa

SEQ ID NO: 273268 - DNA, 120 bp, Artificial Sequence
  ENSG00000127954_61 (sequence is synthesized)
tgtacatacataaacatgactatgtacctcatggatatgtacaactgttatttgtcagttttagaaaataaaaaagcagaagagatctgctaccaaatgcaggaattttctatagagtct

SEQ ID NO: 273269 - DNA, 120 bp, Artificial Sequence
  ENSG00000127954_62 (sequence is synthesized)
gttatagctagccttctacaggcttaactcttctcatgatggagtattgaccatcaccaacaggaaatcttttgttttaggcactccaggaaattatcagggagttctctctgtagataa

SEQ ID NO: 273270 - DNA, 120 bp, Artificial Sequence
  ENSG00000127954_63 (sequence is synthesized)
ccaaagtttccctagttgtacttctacccatttttcttagtgtgatcatttaaagcagtgcctcaccaactatcagagatgggggccagtaatttttgtttcatttttttccagttcatt

SEQ ID NO: 273271 - DNA, 120 bp, Artificial Sequence
  ENSG00000127954_64 (sequence is synthesized)
acaaatcaatgcatatgtctgtaaaacacaaaatcacacccttaaatgtgatggcaacatcaaattgccataaaagtttctaaacttttcaccccaatttctgaatttatcacagactgg

SEQ ID NO: 273272 - DNA, 120 bp, Artificial Sequence
  ENSG00000127954_65 (sequence is synthesized)
taaaaaacagctcacaagccagcaccacgggcagaccacactttgcacagtgctcaaacgtaggcctaacaacctggcttggcttggcacttctaaaaaccgatcctgaggcaaggcttc

SEQ ID NO: 273273 - DNA, 120 bp, Artificial Sequence
  ENSG00000127954_66 (sequence is synthesized)
ttgtaaaagagtttatactggaagttaaaaatcatcaaattattagatactgggaatggagtagtaaagtagacagagcagggaaggaataaagtatgaattttcaagctggttacccat

SEQ ID NO: 273274 - DNA, 120 bp, Artificial Sequence
  ENSG00000127954_67 (sequence is synthesized)
ctgggcaactggagctcagttttgctgggaaagtctggaagacagtgtcagatataactaagagttattcccatcaaggggaaaggaaactgtgcttttcatccaccaaatccttgctta

SEQ ID NO: 273275 - DNA, 120 bp, Artificial Sequence
  ENSG00000127954_68 (sequence is synthesized)
acattggaatacagatgcttccaagacattaactttgtggcacttctggcttttcctacacacttattgtgtatgccaccatgtctagggggaaaaaggcccacaggcaaagaggtacca

SEQ ID NO: 273276 - DNA, 120 bp, Artificial Sequence
  ENSG00000127954_69 (sequence is synthesized)
gcattcataccaccagctttcagcttgtagaggtggccgccaagaggaactcgtagttggcagtgccaactacaactactacaccaaccagctggaaactatacaaagagtatgaacaaa

SEQ ID NO: 273277 - DNA, 120 bp, Artificial Sequence
  ENSG00000127954_70 (sequence is synthesized)
gttcacaggagaaacaaggctctgcaacatatgaaaatatattctacttcattcataatgagacgcatgaaaattgtaactgtatcaataccatttctcacctagtagatgggcaaaaat

SEQ ID NO: 273278 - DNA, 120 bp, Artificial Sequence
  ENSG00000127954_71 (sequence is synthesized)
ccaaatgtttgagcacacattctgtgggtgaggctgtggaaacgtaggttcacatacattgctcttggatatgcagattaggaccgctcctgtggagagcagttagggaatatctttcaa

SEQ ID NO: 273279 - DNA, 120 bp, Artificial Sequence
  ENSG00000127954_72 (sequence is synthesized)
aattaaaaaatgcagagttaagttttgatccaggagtctcactcctgagaatttatgctatagatatgcctacaagcatttgagatgaaaaagaagcattgctatttgtttttcttgttt

SEQ ID NO: 273280 - DNA, 120 bp, Artificial Sequence
  ENSG00000127954_73 (sequence is synthesized)
ttcatgaataacattgtaaaagtagaatatgggcagtgattcaagcattcatctttgggactggttaaggaaactatgatgctttcacagaatgaaattctatgcagctgtttaaaacaa

SEQ ID NO: 273281 - DNA, 120 bp, Artificial Sequence
  ENSG00000127954_74 (sequence is synthesized)
accaagacaccttctttcacatatatggaaagatgtccaaaatatactgttcagtttttaaaaaggtacaaaataacatatatagtatgattccttttgcatatgtgtatttgcttttaa

SEQ ID NO: 273282 - DNA, 120 bp, Artificial Sequence
  ENSG00000127954_75 (sequence is synthesized)
ttgcctaaagaaactctcagaaggattcaaaagatccataccaaacaagatgggagaacagaggagtagtgacaggagtagaagcactgtagaccttttcatatcattttggtttttaaa

SEQ ID NO: 273283 - DNA, 120 bp, Artificial Sequence
  ENSG00000127954_76 (sequence is synthesized)
ttacatgagtaggttacctaattattaaaataaatttaatttaaaaggtaatgggggataggaagaaatttgttaaaagatacaaaattacagctagataggaagattaagttgtagtgt

SEQ ID NO: 273284 - DNA, 120 bp, Artificial Sequence
  ENSG00000127954_77 (sequence is synthesized)
tctatagctctgtaggatgactacagttaacaataatatatattctaaatagctagaaggaggatattgaatgttctcaacagaaagaaatgataaatgcttaagatgatggatatacta

SEQ ID NO: 273285 - DNA, 120 bp, Artificial Sequence
  ENSG00000127954_78 (sequence is synthesized)
attaccctaatctgatcactgtatattttgtgtattgcaatgtcactatgtaccccataaatatgtataattatcgtgtgtcaattaaaaatttttaattaaaaaattataaacaaaaaa

SEQ ID NO: 273286 - DNA, 120 bp, Artificial Sequence
  ENSG00000127954_79 (sequence is synthesized)
ggcgcggcgaaacttccctctacccgcccggcccgcggcgcgcaccgttggcgctggacgcttcctccttggaagcgcctctccctcaggtctcaagaactgttttgagatgcaggaatt

SEQ ID NO: 273287 - DNA, 120 bp, Artificial Sequence
  ENSG00000127954_80 (sequence is synthesized)
agaaagtcactcttctaagcatcttcttttttaaagtaactagaattagaaatgtcatgtcagttttttaaaatgaatccagtttagatctcatacaactattaagaataaaagtttgcc

SEQ ID NO: 273288 - DNA, 120 bp, Artificial Sequence
  ENSG00000127954_81 (sequence is synthesized)
tctcatacaactattaagaataaaagtttgccgggggcggtggctcactcccataatcccagcactttgggattccgaggcaggtgaatcatgtggtcaagagatcaagaccatcctggc

SEQ ID NO: 273289 - DNA, 87 bp, Artificial Sequence
  ENSG00000127954_82 (sequence is synthesized)
ctttccaggttcgcttgggtccagatctgtattcccagggctcatagagatattggcaaactgacagatttcatggctcaagaaacc

SEQ ID NO: 273290 - DNA, 120 bp, Artificial Sequence
  ENSG00000127954_83 (sequence is synthesized)
agatattggcaaactgacagatttcatggctcaagaaacctaaagacacctacttgaattcctttggttggcagtcaaatgttaactagtgtgttttcaagcttctattcttaggcatgt

SEQ ID NO: 273291 - DNA, 120 bp, Artificial Sequence
  ENSG00000127954_84 (sequence is synthesized)
tacttccttttggaagtcaaaaccaaccatcttttaagtaagagggctaaccaaatatgtgccacactaaagcaaacaaattcacaaaagagcgcttataattcccttaatgtttgactt

SEQ ID NO: 273292 - DNA, 120 bp, Artificial Sequence
  ENSG00000127954_85 (sequence is synthesized)
gggggaagttgacctcaataactagaaaaccaaataattctgagcaaatatcaaatattgtcttatgcataatcaaaagattcagtgagaatcagctgaaggagttttaagacattctca

SEQ ID NO: 273293 - DNA, 120 bp, Artificial Sequence
  ENSG00000127954_86 (sequence is synthesized)
gaggaagtgctataagtcagttctagtttagaaatagctagttttgatagatcttacttcagtctcaaaaattattagttagtcattaatgatgcttctatgggtttctctacattattt

SEQ ID NO: 273294 - DNA, 120 bp, Artificial Sequence
  ENSG00000127954_87 (sequence is synthesized)
tcccaacaaatacatgtaagtttcctgggtaagagtcacactacaagtgtctgattcctctcaacttgtggtgcaagactgatgtattatattatgatgtatttattatcatgtataata

SEQ ID NO: 273295 - DNA, 120 bp, Artificial Sequence
  ENSG00000127955_0 (sequence is synthesized)
gtgcccatctctggtttcaccaggctccattccttccccagttccctgtttctcacggccctgaaaccagccgacagggatttgcattttgaaaaaccttgcgtggctgccggcgctggg

SEQ ID NO: 273296 - DNA, 120 bp, Artificial Sequence
  ENSG00000127955_1 (sequence is synthesized)
catgctcaaacgcccagaactggcttttttcggcaactttggcagctctcccacccccacccgaaggggcagcgtctccctcgactccgcttaggaagtggtgggggcggcgtggccccc

SEQ ID NO: 273297 - DNA, 120 bp, Artificial Sequence
  ENSG00000127955_2 (sequence is synthesized)
gtcgggaggcgttcgaacgcccgctaggagagagaaaggattcccctgtgcttggagcccgcactcgggcgcggagggagcggcggcaggctctcgctttcggcaccatgggctgcacgc

SEQ ID NO: 273298 - DNA, 120 bp, Artificial Sequence
  ENSG00000127955_3 (sequence is synthesized)
tgagcgccgaggacaaggcggcggtggagcggagtaagatgatcgaccgcaacctccgtgaggacggcgagaaggcggcgcgcgaggtcaagctgctgctgctcggtgctggtgaatctg

SEQ ID NO: 273299 - DNA, 120 bp, Artificial Sequence
  ENSG00000127955_4 (sequence is synthesized)
gtaaaagtacaattgtgaagcagatgaaaattatccatgaagctggttattcagaagaggagtgtaaacaatacaaagcagtggtctacagtaacaccatccagtcaattattgctatca

SEQ ID NO: 273300 - DNA, 120 bp, Artificial Sequence
  ENSG00000127955_5 (sequence is synthesized)
ttagggctatggggaggttgaagatagactttggtgactcagcccgggcggatgatgcacgccaactctttgtgctagctggagctgctgaagaaggctttatgactgcagaacttgctg

SEQ ID NO: 273301 - DNA, 120 bp, Artificial Sequence
  ENSG00000127955_6 (sequence is synthesized)
gagttataaagagattgtggaaagatagtggtgtacaagcctgtttcaacagatcccgagagtaccagcttaatgattctgcagcatactatttgaatgacttggacagaatagctcaac

SEQ ID NO: 273302 - DNA, 120 bp, Artificial Sequence
  ENSG00000127955_7 (sequence is synthesized)
caaattacatcccgactcaacaagatgttctcagaactagagtgaaaactacaggaattgttgaaacccattttactttcaaagatcttcattttaaaatgtttgatgtgggaggtcaga

SEQ ID NO: 273303 - DNA, 120 bp, Artificial Sequence
  ENSG00000127955_8 (sequence is synthesized)
gatctgagcggaagaagtggattcattgcttcgaaggagtgacggcgatcatcttctgtgtagcactgagtgactacgacctggttctagctgaagatgaagaaatgaaccgaatgcatg

SEQ ID NO: 273304 - DNA, 120 bp, Artificial Sequence
  ENSG00000127955_9 (sequence is synthesized)
aaagcatgaaattgtttgacagcatatgtaacaacaagtggtttacagatacatccattatactttttctaaacaagaaggatctctttgaagaaaaaatcaaaaagagccctctcacta

SEQ ID NO: 273305 - DNA, 120 bp, Artificial Sequence
  ENSG00000127955_10 (sequence is synthesized)
tatgctatccagaatatgcaggatcaaacacatatgaagaggcagctgcatatattcaatgtcagtttgaagacctcaataaaagaaaggacacaaaggaaatatacacccacttcacat

SEQ ID NO: 273306 - DNA, 120 bp, Artificial Sequence
  ENSG00000127955_11 (sequence is synthesized)
gtgccacagatactaagaatgtgcagtttgtttttgatgctgtaacagatgtcatcataaaaaataatctaaaagattgtggtctcttttaagttttgcagttcatggtaaaatgcattt

SEQ ID NO: 273307 - DNA, 120 bp, Artificial Sequence
  ENSG00000127955_12 (sequence is synthesized)
tcaaaccaaatgagtacttatatatggatctctgtagactagagtcttgcagcaacacagaatgtaatataaggcaaatgcatctgggacttgaccaaagttgttctgttttgttttttt

SEQ ID NO: 273308 - DNA, 120 bp, Artificial Sequence
  ENSG00000127955_13 (sequence is synthesized)
tgacagatggtcctgcagtgtgaaactgaaggacagtgttaaagctgggctctagtatattgatgatttctgcataagtgtaaatatgcaaatgtatgtatacatgtatttatgacttta

SEQ ID NO: 273309 - DNA, 120 bp, Artificial Sequence
  ENSG00000127955_14 (sequence is synthesized)
gttttcgacattatttttaggttttaagagtggcaacttaggattttagggtgatggctttggaaataacataaatataccttgtactgaatgacagactattactacgtttgccagttt

SEQ ID NO: 273310 - DNA, 120 bp, Artificial Sequence
  ENSG00000127955_15 (sequence is synthesized)
taaacagctttatttatgttcatgtcctgtaaatttttaagtacagtaattaatattaggaaacattacagcccttatctagattatatgtatacttgtattaataaaaatgttatttgt

SEQ ID NO: 273311 - DNA, 120 bp, Artificial Sequence
  ENSG00000127955_16 (sequence is synthesized)
acaaacattgcacagactattttaataacatgatttgttctttaaattttatgtgttttattgaaatgttcttaagatgaatacacctgcctttggatcaactatttaaacattgtatgc

SEQ ID NO: 273312 - DNA, 120 bp, Artificial Sequence
  ENSG00000127955_17 (sequence is synthesized)
attttgatttttcctactttaagaaaataaaataatttaattttacattagattccacgttagatttggtttgaaaaactaaaatttcagatttctgaggatatactgtcttagacttat

SEQ ID NO: 273313 - DNA, 120 bp, Artificial Sequence
  ENSG00000127955_18 (sequence is synthesized)
tgtacacacttagtttttattcacttgttttcactctgaattttaatatttggctgatatgaatgcattgcctcaaaggtgatgtcatcttaatttttattcactttaaataactacatt

SEQ ID NO: 273314 - DNA, 120 bp, Artificial Sequence
  ENSG00000127955_19 (sequence is synthesized)
tttgtttataactaagtttggagggatcctaagagcatttttgtgggtaaaaaaaaaacctgtggacataatgaattttgagacattgattggtgaggcttttatttcccttgaggagtc

SEQ ID NO: 273315 - DNA, 120 bp, Artificial Sequence
  ENSG00000127955_20 (sequence is synthesized)
tcttgtacctagcatacatgatagctccttgttgggaagataacaagaaggatctttgaatactctattgctgatataatgcaagatttaaatttatacatataactaatttcaaatgta

SEQ ID NO: 273316 - DNA, 120 bp, Artificial Sequence
  ENSG00000127955_21 (sequence is synthesized)
attatcacactatgttaaaattacttttttcccttagataattcaaatttctccacttgcttgagattatatcatttctttttcaattatactattatttctgagaatgaaatggacgat

SEQ ID NO: 273317 - DNA, 120 bp, Artificial Sequence
  ENSG00000127955_22 (sequence is synthesized)
tacacttagaaaatgagtaatagtgtttaataagtcagtgattatatgtgtgctcaaataagtgttatgtatcagctagatactgagctttgatagaataattttcttttgattattcat

SEQ ID NO: 273318 - DNA, 120 bp, Artificial Sequence
  ENSG00000127955_23 (sequence is synthesized)
gatgtgtcatctctgaccttgtttcagcaaagtaaacagcactccccaccccaccctcctttttttactcatcttggaaaaggttagtctttcagtacacgttgctggtaagtagtttcc

SEQ ID NO: 273319 - DNA, 120 bp, Artificial Sequence
  ENSG00000127955_24 (sequence is synthesized)
gtgtgtgtgtgtgtgtgtgtgtgtgtaaccataaactatattcatatctgtttcatttggaggattttcttctttgtaatgtaaagaaattcaaagttatcaaagttccttaaatgtgtt

SEQ ID NO: 273320 - DNA, 120 bp, Artificial Sequence
  ENSG00000127955_25 (sequence is synthesized)
gtaaagaaattcaaagttatcaaagttccttaaatgtgttagtttagattctttatgtgcctttcatgaaagatatgttttcattaattttactggtggacctgtaatatccacattgtg

SEQ ID NO: 273321 - DNA, 120 bp, Artificial Sequence
  ENSG00000127955_26 (sequence is synthesized)
aagctgtgtatgaaattcaactataatatgaataaatttgaatcatgagaattatgggttaaaaagccacaaagaagcacatattggtgaccatcattaatgaaatcctgaactttattc

SEQ ID NO: 273322 - DNA, 120 bp, Artificial Sequence
  ENSG00000127955_27 (sequence is synthesized)
gcctcccgcgggccacaggaacttatctccgccgattgttacagctggaaggatggggagatagcaccatagatccactcctcattttatgggcaaagaagctaaggcctgtaaaaatgg

SEQ ID NO: 273323 - DNA, 120 bp, Artificial Sequence
  ENSG00000127955_28 (sequence is synthesized)
catgcccaatggttacgaggaaatccttcaaaatgcgttcttgtgaaaaacgtgagagtgcaaggaaagagggagggataggaagaaggaaagagaagcaaaagttccctgtttctcacg

SEQ ID NO: 273324 - DNA, 120 bp, Artificial Sequence
  ENSG00000127955_29 (sequence is synthesized)
agcttatgtgctgctctagaggagatctgctacgatgtggagattggcttgtgtgggtgtgttttattgctcttgtcatttaaaaatacttttgattatttgtcttccattttttttagg

SEQ ID NO: 273325 - DNA, 120 bp, Artificial Sequence
  ENSG00000127955_30 (sequence is synthesized)
ctccctgttcagtggtttctcctggcctgttcagttcaagcaacactagcagtattttccacccaatgacattttcaggtggtgatgggagaagttttgaagccgcagcctctgccagac

SEQ ID NO: 273326 - DNA, 120 bp, Artificial Sequence
  ENSG00000127955_31 (sequence is synthesized)
gcccatggagggagtgagaggctcaggcatggcggactgcaggtcccgagacctgcccgcgggaaggcagctaaggccagatctgttttgtggaaaggaaaggagtggctctactgaaca

SEQ ID NO: 273327 - DNA, 120 bp, Artificial Sequence
  ENSG00000127955_32 (sequence is synthesized)
tctgtgatacccagctgcacattggcatttgggattatgagaaaaagcaataaaggaagacatcaattctcaagcgaataatttcttctatagagcctgctaaacaacaccaacggcaag

SEQ ID NO: 273328 - DNA, 120 bp, Artificial Sequence
  ENSG00000127955_33 (sequence is synthesized)
tgatgaggaaggctgacaagatgtttcccagtgagctttgccaggtgtcggcatattcgtgaagtcaccatggatacaagttctgttcctcaattttgttacgaggaaatccttcaaaat

SEQ ID NO: 273329 - DNA, 120 bp, Artificial Sequence
  ENSG00000127955_34 (sequence is synthesized)
gagctcggctgggcttggcgaggctgcggcgcggccaccggcgggagtgcagcggccactgtacccagagattcaaaaccccaaacccgggacttgggggcgctgagccgggccgggaag

SEQ ID NO: 273330 - DNA, 120 bp, Artificial Sequence
  ENSG00000127955_35 (sequence is synthesized)
ttcttcatttcttctttttctatgctctttttacaatttcagctactccagaagctcagattttccctgttccaagctatgagatgtgatgccacatttggaattgccttcttgatatcc

SEQ ID NO: 273331 - DNA, 120 bp, Artificial Sequence
  ENSG00000127955_36 (sequence is synthesized)
ccttctgagaatgcattgcctgctttttaactcattatattcaaaactaaattcatcatcattctctccttacaccagttctcaccctgactttgccatttttccttactaagtaccatc

SEQ ID NO: 273332 - DNA, 120 bp, Artificial Sequence
  ENSG00000127955_37 (sequence is synthesized)
gactttgccatttttccttactaagtaccatcatcatttattccttcaatggggaactttttagtttaagttctgggatacgtgtgctgaacatgcaggttggttacatatgtatacatg

SEQ ID NO: 273333 - DNA, 120 bp, Artificial Sequence
  ENSG00000127955_38 (sequence is synthesized)
tcatctaagttttaagccctgcatgcattaggtggaactcttctgattcctaatctccatttcaatttactgacagttctacaaagccttaaatctgttttttgtttgttttcctttcta

SEQ ID NO: 273334 - DNA, 120 bp, Artificial Sequence
  ENSG00000127955_39 (sequence is synthesized)
ttcctactactacctattcaagtctttgctaaacttcctcttaaaatggcattattagttaaattccccacctcccatttctctcttctcgaaaaacccaggttagttatcctaatgtag

SEQ ID NO: 273335 - DNA, 120 bp, Artificial Sequence
  ENSG00000127955_40 (sequence is synthesized)
aactgtggccctatcaccttctattccttgatctgcattggctctgatttgtcaataaaattaagtataagttagcctgccatttaatgctcttcatcacctgaggcctgttcctttcta

SEQ ID NO: 273336 - DNA, 120 bp, Artificial Sequence
  ENSG00000127955_41 (sequence is synthesized)
cactgtatccaaatagtgtcctgtgcataacctgggctttcctccaagtactgtattacttactacatgtgatatgcttagagcagtgcctacaatgtgggaagtgttcatttgtgtctg

SEQ ID NO: 273337 - DNA, 120 bp, Artificial Sequence
  ENSG00000127955_42 (sequence is synthesized)
tcaatgttatttttattagcacttttaaaatggtgtgtaaaatgtattggcacttttaaatttggcacttttaaatttgtttgtgatacctcttttagactcctctggcatctgttcttc

SEQ ID NO: 273338 - DNA, 120 bp, Artificial Sequence
  ENSG00000127955_43 (sequence is synthesized)
agggtgcccttctgggaactacatgattctgatagagctgccaatcgcatttcttacttctccgtctctaggcttagacctgaccaatccgagtcctccagcattggacgagtgagccaa

SEQ ID NO: 273339 - DNA, 120 bp, Artificial Sequence
  ENSG00000127955_44 (sequence is synthesized)
tcattgtcccagttgccattcttaaagtccctaaggcgcttgtggtttctaaaattctcttcatttcagtaaccttctaaaagtctacttttttatgcctaatctagtttaatcgaattc

SEQ ID NO: 273340 - DNA, 120 bp, Artificial Sequence
  ENSG00000127955_45 (sequence is synthesized)
agtttgttactgaaaaagtactgattaaaatccatatgttctcattgaatactgacagtaactagagatcaaaaaaggcttaaagaggttaattaacttgagcaagaccagatgaaggtt

SEQ ID NO: 273341 - DNA, 120 bp, Artificial Sequence
  ENSG00000127955_46 (sequence is synthesized)
ttaaacctagagcttctgactccatgtctgtcagaggaccccaaagatgctaccttatttccagaaaatgtgtaagtagtgtttcgcctatccccactctgcccttgagttcctctgagc

SEQ ID NO: 273342 - DNA, 120 bp, Artificial Sequence
  ENSG00000127955_47 (sequence is synthesized)
cataatagtttttcagatttaaaaaaggagatacttattaatgtctttcatcagagctattttttactccttagatgtgaagctacttaagagcacagttaccattttttacatcatttg

SEQ ID NO: 273343 - DNA, 120 bp, Artificial Sequence
  ENSG00000127955_48 (sequence is synthesized)
ccgtttgcagaaccaccttatgtaaatgaatttagttgatactgtaatcattattacagatggtagcatcatcattgcttagtgtgttatgttggaagtagaaagtgatggtgaaaatcc

SEQ ID NO: 273344 - DNA, 120 bp, Artificial Sequence
  ENSG00000127955_49 (sequence is synthesized)
gctctggcaccccgtctggcttcaaatcctggctcaatttcttattaactgggaaaatctgggcaaataatttagttttgctctgcctccatttatatcatctgaaaataaataaggatt

SEQ ID NO: 273345 - DNA, 120 bp, Artificial Sequence
  ENSG00000127955_50 (sequence is synthesized)
aaataatccattaattttaatggttgttgtcagcattaaataagttcacagtacatgttaagtacctagaggggagtgtggaatgtataagccgtcaatacaatttgctgttatttgatt

SEQ ID NO: 273346 - DNA, 120 bp, Artificial Sequence
  ENSG00000127955_51 (sequence is synthesized)
ataaataatagttttaaggtgcctttaaaatcataatcagtgcttaacaaatggttgttgatacgtgctttgaatgaaatgcctcaaaaacaaaactctcataattcgttttcataatga

SEQ ID NO: 273347 - DNA, 120 bp, Artificial Sequence
  ENSG00000127955_52 (sequence is synthesized)
aaactaagtgtctcacatattgatactggaaaatgagaaaatgcaatctctaatcaacttgaggacacttctgtcgttttaatgtaaccaatagtatgagagagtttatattttaatgtt

SEQ ID NO: 273348 - DNA, 120 bp, Artificial Sequence
  ENSG00000127955_53 (sequence is synthesized)
ttttttttttttttttttttggtatggagtcttgctccttcaccaggctggagtgcagtcgtgcaatctccactctctgcaacctccaactccatggttcaagcaattgtcctgcctcag

SEQ ID NO: 273349 - DNA, 81 bp, Artificial Sequence
  ENSG00000127955_54 (sequence is synthesized)
gttttcttttttagttcttttcaaaaccctttcttaacagttgaaatgcatttatataaagaagtttacgtttcacaatcc

SEQ ID NO: 273350 - DNA, 120 bp, Artificial Sequence
  ENSG00000127955_55 (sequence is synthesized)
tgaaatgcatttatataaagaagtttacgtttcacaatcccactggcctgtttcccaggcatttttttaaaccaattactgtttgctttggtgtctgttgtgatttctcttatttagttg

SEQ ID NO: 273351 - DNA, 120 bp, Artificial Sequence
  ENSG00000127955_56 (sequence is synthesized)
gattttgtagttactttaaaagttacgaaatttcacatttcatcaagtccagaggccagagacacccaaatatgcacagacaggaatcagctgcaattgtccaagccagagctgattagg

SEQ ID NO: 273352 - DNA, 120 bp, Artificial Sequence
  ENSG00000127955_57 (sequence is synthesized)
cctcaactggaatagtcccaccatgtaataaatcttcctgagtattgtgtataaggtcaaatatttccagcttctttgattttactgcccgtcttcctaggtctccatccgtaaagtgga

SEQ ID NO: 273353 - DNA, 89 bp, Artificial Sequence
  ENSG00000127955_58 (sequence is synthesized)
atttcgttcttgtttcccaggctggagcgcaatggtgcgatctcggctcaccgcaacatccgcctcccgggtacaagcaattctcctgc

SEQ ID NO: 273354 - DNA, 74 bp, Artificial Sequence
  ENSG00000127955_59 (sequence is synthesized)
ttgtttcccaggctggagcgcaatggtgcgatctcggctcaccgcaacatccgcctcccgggtacaagcaacac

SEQ ID NO: 273355 - DNA, 62 bp, Artificial Sequence
  ENSG00000127955_60 (sequence is synthesized)
ggtaatccgcccatttttaattgattaaaaatgagataatttgaggaaacatgcatagaata

SEQ ID NO: 273356 - DNA, 120 bp, Artificial Sequence
  ENSG00000127955_61 (sequence is synthesized)
gattaaaaatgagataatttgaggaaacatgcatagaatactagacagagactattttagcagataagagtgccacttttagtaaaagaagttgtcacctagaagaaagtacaggtgctc

SEQ ID NO: 273357 - DNA, 120 bp, Artificial Sequence
  ENSG00000127955_62 (sequence is synthesized)
cttgacttaccgtgggttaagtcctgaaaagcccactgtaagttgataataccttattttgaaaatgcatttaatacacctaacctaccaaatgtagcttagcctggcctaacttaaagg

SEQ ID NO: 273358 - DNA, 120 bp, Artificial Sequence
  ENSG00000127955_63 (sequence is synthesized)
tgctcagaacacttagattagcatacagttggacaagatagcataaagcctattttacaataaaggatatctcatgtaattttcttggatactgtactgaaaatgaaaaacagattgatt

SEQ ID NO: 273359 - DNA, 120 bp, Artificial Sequence
  ENSG00000127955_64 (sequence is synthesized)
gcatgggtacttgaaatatggtttctaactgaatgcataccagtttcgcaccaatgtaaagttgaaaaattgttaagttggaccatcatacgttggggaccatctgtacatagagtagga

SEQ ID NO: 273360 - DNA, 120 bp, Artificial Sequence
  ENSG00000127955_65 (sequence is synthesized)
ctcttgagagcctaagggccacagaaattccttttccaactgcagtgtctatggagggattcttataattaattttattcctgtgcaaacacactatctgtgtattctctattttaccag

SEQ ID NO: 273361 - DNA, 120 bp, Artificial Sequence
  ENSG00000127955_66 (sequence is synthesized)
gattttttgtttttgctaaattagacatacaattttgcagttattttttactaagttgacaaatgtttgtacaatttcagtgtaaagctagtcttcaaaataaaccactgtgaagattgg

SEQ ID NO: 273362 - DNA, 120 bp, Artificial Sequence
  ENSG00000127955_67 (sequence is synthesized)
atattaccttggattttctgttgtgcactcttgaattttaattatgttctgtggaaacttcacagagttttagctttgatccttccttcacttttgaaaatcaagagtaaagttaagtca

SEQ ID NO: 273363 - DNA, 120 bp, Artificial Sequence
  ENSG00000127955_68 (sequence is synthesized)
aagctacttctaaacagctctatctttaatttctattaaatagtactgaggtatcaattttgtagcttgtggaatgcggactatcccagcagcaaattcattaatatggtttgtatagga

SEQ ID NO: 273364 - DNA, 120 bp, Artificial Sequence
  ENSG00000127955_69 (sequence is synthesized)
ctcactttgcagcattcaattttagtataacatgttttcctgtttacaaatataagtaattacctttccgttttaagtgaccaattgtcctagcaatctacttcacaaggcaatttacct

SEQ ID NO: 273365 - DNA, 120 bp, Artificial Sequence
  ENSG00000127955_70 (sequence is synthesized)
gtaataaatataacttttttgcagacttgagcatacgtttaaaccatttaaccattcttgaatttcttaacatagtaagttacaaattttaactatgaatcttcttcttcgaaaggaatc

SEQ ID NO: 273366 - DNA, 120 bp, Artificial Sequence
  ENSG00000127955_71 (sequence is synthesized)
ttgtctaaatctaataaagcatttttctggctgaagctgcaatggaaagcttcagtatgaagctggcataaggaaagccagtaaaaagtgccctttcttctttctgagagccccacctct

SEQ ID NO: 273367 - DNA, 120 bp, Artificial Sequence
  ENSG00000127955_72 (sequence is synthesized)
gatcctcctacacttaaggcttctagatgcagatttatacaatagtgctaaatcaagaccttgaaaaatgtactcatatagtaagatttactcaaaaccacgaactcctccattatttaa

SEQ ID NO: 273368 - DNA, 120 bp, Artificial Sequence
  ENSG00000127955_73 (sequence is synthesized)
aatatgttagagatacataaatatatagagaaaatgcatacatacataatttattgagtgcctactgtgtgctaggtacttttctgggtaccttactaatgctctcatttagtcatcaga

SEQ ID NO: 273369 - DNA, 120 bp, Artificial Sequence
  ENSG00000127955_74 (sequence is synthesized)
gcagtcctgcaatattggtaaaatttccattttctatataaggaaacacatttaagagaggttagtattttgtgcaatgttggctatctaggaagtggcagagctgggtgtaaaatctag

SEQ ID NO: 273370 - DNA, 120 bp, Artificial Sequence
  ENSG00000127955_75 (sequence is synthesized)
agttaagacctttgttagccatatcttcaaaatccagtgtcatttcttagccatatcttcaaaatccagtgtcatttcttagccatatcttcaaaatccagtgtcatttcttagccatat

SEQ ID NO: 273371 - DNA, 120 bp, Artificial Sequence
  ENSG00000127955_76 (sequence is synthesized)
cttcaaaatccaatggcataaagaagtttttcacaagggtgccacatggtgtagtgcagcatgtccaacagcattgcctgaacagatgttaataagtatgcatgatgcacattagcatgt

SEQ ID NO: 273372 - DNA, 120 bp, Artificial Sequence
  ENSG00000127955_77 (sequence is synthesized)
caatggctgtgaaaagccagtgcagtaaagaagtaaagagctctctgtgtgttaaccctccatttcacaaacataggaactgcacagacacagcagccactacccaggtgtgaatgcaga

SEQ ID NO: 273373 - DNA, 120 bp, Artificial Sequence
  ENSG00000127955_78 (sequence is synthesized)
gcacttaaaacgtagctagtccaaagtgagttggcctattagtgtaaaatacaagagttcagatacacagaatttaaaaattacatgttgaactgatttgtgatatattgggttatataa

SEQ ID NO: 273374 - DNA, 120 bp, Artificial Sequence
  ENSG00000127955_79 (sequence is synthesized)
ttttaaaattctacttttttttacatttttaatgtggttttggaaaataggtactcatgtgtctttgcattatatttgtatttgggaaatgaaatgctttatttttcttccacaacaact

SEQ ID NO: 273375 - DNA, 120 bp, Artificial Sequence
  ENSG00000127955_80 (sequence is synthesized)
ctatttgcattgcatggaaatgttcccaagttttagagaaacacatacaaaaactaaaaaggatagaatgctaaaatttgaatgtggaagatgtgggtcttggtgtcttgaataaatcac

SEQ ID NO: 273376 - DNA, 120 bp, Artificial Sequence
  ENSG00000127955_81 (sequence is synthesized)
accttcagtgactttcttgggaaatggtgggcctcagtaaagacttggactattccagttttaaatgctatcgtttggtttggtgtaatatagcctttcctgtggggggaaaacccatct

SEQ ID NO: 273377 - DNA, 120 bp, Artificial Sequence
  ENSG00000127955_82 (sequence is synthesized)
cattttcactttaaatatgtcagctataataaaagagagacatacacattttaagatctatactctaaaacagggttttgaaattagcagctctctttatttttagttccaatacatgga

SEQ ID NO: 273378 - DNA, 120 bp, Artificial Sequence
  ENSG00000127955_83 (sequence is synthesized)
gggggagttgacccttcaagatactggaaaattattaaatccagtttacagactcatctctttagtctgcagccaaatcaaaagattagtggggttttttttaatgttgttattgtgttg

SEQ ID NO: 273379 - DNA, 120 bp, Artificial Sequence
  ENSG00000127955_84 (sequence is synthesized)
tgttttgtttttttaatatgtttcaattcccctagccaaattcctttctttctccacacctcccacaggactgggctgagcacagtcatgcattaaaaaagcttctgaacttattttgga

SEQ ID NO: 273380 - DNA, 120 bp, Artificial Sequence
  ENSG00000127955_85 (sequence is synthesized)
aagagtagctccctggagtgtggaggaggacaggaatttgctatctgcaggacttaaatcaggatagagtatcaaatattccaaggccttacatgcatgttttgttttttgataaagaca

SEQ ID NO: 273381 - DNA, 120 bp, Artificial Sequence
  ENSG00000127955_86 (sequence is synthesized)
gaagattgcaaatggtttgctctttaacagtcaataaaatcatatctactaatcaatacatttgaagtttactagattctcaaactttccataagatttgagttcattagtttaatggga

SEQ ID NO: 273382 - DNA, 120 bp, Artificial Sequence
  ENSG00000127955_87 (sequence is synthesized)
tcgatctgagaaaaattagatttatgtgcagattttagctacccttgtccttggaatgtgtatgcacacacacacacatctgtgagaatgattattttctacttgatacagtgtgcatca

SEQ ID NO: 273383 - DNA, 120 bp, Artificial Sequence
  ENSG00000127955_88 (sequence is synthesized)
aataaaagtttactatattggaatatgggaataaattcatttataattagttgaaattgtccagacacatattttagaaaagtatgttatttttgttttaagtttggaagaacctgaatg

SEQ ID NO: 273384 - DNA, 120 bp, Artificial Sequence
  ENSG00000127955_89 (sequence is synthesized)
attaaacctgatttaagtccctctaacaattatgaagaaaaaaaaagactagattttatatcaacttaattgtcttttggtttaaaattatgtatccaataaagacatttaaaaagtaaa

SEQ ID NO: 273385 - DNA, 120 bp, Artificial Sequence
  ENSG00000127955_90 (sequence is synthesized)
atcatcagttcagcctcaccttggaaaactcaagcccagttttcccaaatgatttttagagaataagatttccagatgaaaaccagggagcatgttccaatttttagtacatcaaggacc

SEQ ID NO: 273386 - DNA, 120 bp, Artificial Sequence
  ENSG00000127955_91 (sequence is synthesized)
atgtttttccttgctaccagccccattttctaatcagttaacgcttcctgtgatatctgtaggggaaaggtgtagtgcaactgacagggagagatgagatcttaagcctctgctcattca

SEQ ID NO: 273387 - DNA, 120 bp, Artificial Sequence
  ENSG00000127955_92 (sequence is synthesized)
caggtattttccttttctgggaataacttgtcaagttacatatttctaagtgaaacttcccctaaggcaagaattcagttgttaatttaaatctcttggcttagtgattcttagaccttt

SEQ ID NO: 273388 - DNA, 120 bp, Artificial Sequence
  ENSG00000127955_93 (sequence is synthesized)
aaggggtattatttatcaaactgcagttgagcataaaaatttccttaagatgtagatgaaattactgaaaataatgtattcattttatggaaaagcagttagataatttttagtgatgac

SEQ ID NO: 273389 - DNA, 120 bp, Artificial Sequence
  ENSG00000127955_94 (sequence is synthesized)
tccaagttaaaatactattttttaaatccagttaacagatttcatatcaggtactgtgtgatgtacaataaataagacatgtctctgcccaccatctaatctgaaagacagacatactta

SEQ ID NO: 273390 - DNA, 120 bp, Artificial Sequence
  ENSG00000127955_95 (sequence is synthesized)
aacaacaggcaatagcagtgcaacctactgctaaaataaggaacatgaacattatagtaaggggaaatgaagacaggatcattgaggcagctaactcttccagaagggcagggaaggttt

SEQ ID NO: 273391 - DNA, 120 bp, Artificial Sequence
  ENSG00000127955_96 (sequence is synthesized)
cacaagaagccaaaactttggtaatgagactgttaatagtgctttaattttactatgatggaaaattccctggagtgaggaaagtagacctgaagtacagtcctgacttttccataatta

SEQ ID NO: 273392 - DNA, 120 bp, Artificial Sequence
  ENSG00000127955_97 (sequence is synthesized)
gctctttgatcttgaacaaggcagttagttcacctaggtctcagtattccatctgtgaagtcaggagttgggctaaaacattagttttagtttaatttagttccttggagcacctcctgg

SEQ ID NO: 273393 - DNA, 120 bp, Artificial Sequence
  ENSG00000127955_98 (sequence is synthesized)
gttgctgttgaaggcggaaatgggagagggaacagagctaattactgccccctgcacccaccaccttataactttttcattaaagcagagtaactcagctttcatctggtttatgtattg

SEQ ID NO: 273394 - DNA, 120 bp, Artificial Sequence
  ENSG00000127955_99 (sequence is synthesized)
agtaaagttttactttagtgaagagcattcagtatgccttaaaaaaacagggagtttgattaccactggtttatgtaatctccaaatctagatagtttgaagagtttagttatttaccct

SEQ ID NO: 273395 - DNA, 120 bp, Artificial Sequence
  ENSG00000127955_100 (sequence is synthesized)
caccccactcttcctgtttttttttttaaaagtctcaagaatttgtttttttataaacagaattttcctcagtcttgtgttgagtaaattgtacgatgagtattcactgccattttacag

SEQ ID NO: 273396 - DNA, 120 bp, Artificial Sequence
  ENSG00000127955_101 (sequence is synthesized)
gaaatgttaagacaaccctgtgatgtcagtgctcaggtatccctacccatacaaatgagaataccggggcttcctgaagccagagtccagttccagacccaagtccattgtcctcctgct

SEQ ID NO: 273397 - DNA, 120 bp, Artificial Sequence
  ENSG00000127955_102 (sequence is synthesized)
cctagaccatgaacgactaggctacatttaattaaacattcagtggaaccaaaaggggagggttctttggtaaatataatcatgttacttatagctctttttgtgtacggtgaaattaca

SEQ ID NO: 273398 - DNA, 120 bp, Artificial Sequence
  ENSG00000127955_103 (sequence is synthesized)
aaagtcaaagtcctaaatcactgtattcagcaacatttttttgtgcttattagaaataagctacccagagtcaagatggcttaatttttcccttatttgaatatatttttcagtttattt

SEQ ID NO: 273399 - DNA, 120 bp, Artificial Sequence
  ENSG00000127955_104 (sequence is synthesized)
ttatcatattctatgatgtagccattttgtactaattcatagtaccagattccccaagtgaatccataaatattgtatacctacggggattttagagcaactaagaatatacttgttagc

SEQ ID NO: 273400 - DNA, 120 bp, Artificial Sequence
  ENSG00000127955_105 (sequence is synthesized)
tctttccttgccaagtagacagtgtgtttaggaatttttgcttgtgttttgcttaagttaataagaatacctgacttcagaatctttgcacaaaaagaatattacataattctttcacat

SEQ ID NO: 273401 - DNA, 120 bp, Artificial Sequence
  ENSG00000127955_106 (sequence is synthesized)
ccccagagttaagattattgtttaagatctccatggcatgcccaaagtattgattcagttgcttcttgcttcagccgcaactctcaatttcctgtggctgtggaagaaccctgtgtagcc

SEQ ID NO: 273402 - DNA, 120 bp, Artificial Sequence
  ENSG00000127955_107 (sequence is synthesized)
cctaaacaactcacttgatttatctcctgtctgtctgctcctgtgttacccttctcctcctcttctttttcctgtatgttgccacttcaccagtttcatctgcagtcacgtcatcttagc

SEQ ID NO: 273403 - DNA, 120 bp, Artificial Sequence
  ENSG00000127955_108 (sequence is synthesized)
tctcttatcctttcatagtcgtatctattctcaataggttaaattttgtggtcagccctaatttctctctggagccttagatttacattagcaactgcttgaacatacatgttttgttgt

SEQ ID NO: 273404 - DNA, 120 bp, Artificial Sequence
  ENSG00000127955_109 (sequence is synthesized)
tgtttggttggttgggttggtcggttggttggttggttagcacctgaagctcaaacagaactctttttcttgtttacactcagatctcttctctttcccttttgattgtgtcatcagcct

SEQ ID NO: 273405 - DNA, 120 bp, Artificial Sequence
  ENSG00000127955_110 (sequence is synthesized)
cccagttcttcatttttgaacctggttatcacctatacttacctttgttcaggacaattctatcacacattaaaaaacaatctatcatatttgctctcctgtccctgctttgccatttgt

SEQ ID NO: 273406 - DNA, 120 bp, Artificial Sequence
  ENSG00000127955_111 (sequence is synthesized)
ttcttaagacttaaaatcagaatgaagaatgttcattcatatgtgttgtagcttttagggtaatctagctagctgcctaggatatatagagcaaattgagctaggcactcaatgtaagct

SEQ ID NO: 273407 - DNA, 120 bp, Artificial Sequence
  ENSG00000127955_112 (sequence is synthesized)
gtttggctgaagcatagtttaatttagcagttgcattagcttctgtgggccaacaagatgctgttgattgctttaaaattttggagaacgaaacttatgatttaataaaatttgattttt

SEQ ID NO: 273408 - DNA, 120 bp, Artificial Sequence
  ENSG00000127955_113 (sequence is synthesized)
aaaagtatgtgatttctagtgatataaaagagttaaaatgtaaacttaaagacgatagctttagtacctttttatccctaataaaaatctcataatctatgctgtcatagcacattacac

SEQ ID NO: 273409 - DNA, 120 bp, Artificial Sequence
  ENSG00000127955_114 (sequence is synthesized)
aacattcctatgggcatttgtcacattgtattacactggattctataagatataaaaggagtatgaggcttgtggggtatgatatttactcttgaagagttcacattctagtttaggaga

SEQ ID NO: 273410 - DNA, 120 bp, Artificial Sequence
  ENSG00000127955_115 (sequence is synthesized)
ttcagcactgaaaaagaatttaagactctataaagcaatataacaaaaactgaaatagttatttctaggaggaggaaaaagtttttaagtgatagagaacccagctagatttgattaatt

SEQ ID NO: 273411 - DNA, 120 bp, Artificial Sequence
  ENSG00000127955_116 (sequence is synthesized)
aggaaaagttagatggagtgccaattttgagcaaatgtgaaggcaggcagagatctcagccggtgaagtagaatgaagaggaagtactacagtaccacaggtggcagtttgcatgttagg

SEQ ID NO: 273412 - DNA, 120 bp, Artificial Sequence
  ENSG00000127955_117 (sequence is synthesized)
tcctcacgacatggacctggggtgagcgccagtgtggaggagaggatctcagaatgatggcactgcagagcaggctgggtagtagaggaccttgaaagtctggcagataattttggatta

SEQ ID NO: 273413 - DNA, 120 bp, Artificial Sequence
  ENSG00000127955_118 (sequence is synthesized)
ttactacaaaagaggggtttaaacagtttttttccaaatgaaatttgaatgtttttcagtttttttattgaagcattacatagagcattacattatatacattaatgtatattataatat

SEQ ID NO: 273414 - DNA, 120 bp, Artificial Sequence
  ENSG00000127955_119 (sequence is synthesized)
gtcggggcccgggggtcggcgggggaccgggtgcggcgctgcgcggccctcggcgtttggaaacccggagggaagggggaggaagcgcccgaggaggcttctgagcgggagctgggtccg

SEQ ID NO: 273415 - DNA, 87 bp, Artificial Sequence
  ENSG00000127955_120 (sequence is synthesized)
tgaggatcgcttgagcccaggaattccagaccatcctggccaacatactgagaccttgtctctacaaaaagtaaaaataaaaaattt

SEQ ID NO: 273416 - DNA, 120 bp, Artificial Sequence
  ENSG00000127955_121 (sequence is synthesized)
ctgagaccttgtctctacaaaaagtaaaaataaaaaatttagccagcatggtggcccatccctgtagtcctagctacttgagaggctgagtcaggagaatcacccaagcccagaaggttg

SEQ ID NO: 273417 - DNA, 120 bp, Artificial Sequence
  ENSG00000127955_122 (sequence is synthesized)
aggctatagtgagctatgactgcacagctgtattccagcctgggtgacagagcaagaccatgtctcaaagaaaaaaaaattaaaattataaaatgaaaaatatgttgctttagttttaca

SEQ ID NO: 273418 - DNA, 120 bp, Artificial Sequence
  ENSG00000127955_123 (sequence is synthesized)
ttattttatttctaatagttgtgaccttaagatggcactaatgcggctgctttttaggaatgaagaaagtcttagaaacatttttctccatagtgattagagggcatcgtgatctatgag

SEQ ID NO: 273419 - DNA, 120 bp, Artificial Sequence
  ENSG00000127955_124 (sequence is synthesized)
ttcttgactggggatgctaagatgcagtcaagttgcccattaggactgactagccaccaattcacactttaaatttgtaatcatttaaaacaatcagaatttttcacagtgcctgctttt

SEQ ID NO: 273420 - DNA, 120 bp, Artificial Sequence
  ENSG00000127955_125 (sequence is synthesized)
cttctttgtcttattgaaatactatttttagagatttttttgaactatagcagtttttttgttgttgttgtttctggtttttttgttttttgagatggagtcgggctttgtccccaggct

SEQ ID NO: 273421 - DNA, 65 bp, Artificial Sequence
  ENSG00000127955_126 (sequence is synthesized)
caggatggtcttgattgcagccaccacgcctggcgaactgtaacggttttaagcaaagaaatctg

SEQ ID NO: 273422 - DNA, 120 bp, Artificial Sequence
  ENSG00000127955_127 (sequence is synthesized)
acgcctggcgaactgtaacggttttaagcaaagaaatctgtgagtaatcaaagaacattttaaataagagtagctcattattttaaagaggcagtaaaatcttgccatggcttgtttgat

SEQ ID NO: 273423 - DNA, 120 bp, Artificial Sequence
  ENSG00000127955_128 (sequence is synthesized)
ttgttaagtcggattttcttacagtaaagtagaacatttagaattaaaagcacagagaaagtactggaggattatcaccaatgtgataataagattctcttaaattcagtaaatacaata

SEQ ID NO: 273424 - DNA, 120 bp, Artificial Sequence
  ENSG00000127955_129 (sequence is synthesized)
caggtaactcaggctgtcatctctctatgtattctagtataattaccacatacatacacttgactgtctaaaacattttttatttctaagttatcagtcaccttataggtctcgtaataa

SEQ ID NO: 273425 - DNA, 120 bp, Artificial Sequence
  ENSG00000127955_130 (sequence is synthesized)
aaacactgcggtgatggtctctacattcagctgaccttaggactcattccaaactcctcatttaaggctttatatagcttactagtggctttactttccaagaaagaccatgcaactgtt

SEQ ID NO: 273426 - DNA, 120 bp, Artificial Sequence
  ENSG00000127955_131 (sequence is synthesized)
cccatctccatactgatttacagcttctcctggggcagtgtcattccttttcttccatccccattattcatgtttctgtttagacccctcgctatccatgaatccttctttaatcaccta

SEQ ID NO: 273427 - DNA, 120 bp, Artificial Sequence
  ENSG00000127955_132 (sequence is synthesized)
ggtccacattaatctctccatacctgtattttctgtgaattactgactataccatataatttgacacaagataacttaatctcttacattgcatggtatgatactactacatttttatat

SEQ ID NO: 273428 - DNA, 120 bp, Artificial Sequence
  ENSG00000127955_133 (sequence is synthesized)
tgagtgactaaaacatgtattgatttagagagcagtaaagtgcagcgtaaaggagtatgtgctgttttcctgtatgtaacataagactggttgaaaagaaacatctcgttcagcctttgg

SEQ ID NO: 273429 - DNA, 120 bp, Artificial Sequence
  ENSG00000127955_134 (sequence is synthesized)
gaagagctttcatcactacttgctccaaaattaagactttaaaaatcttcagtaaaaaaagaatgatgtctggatcataaacacagtgctatatccaaaaggtgtgataaagaattctaa

SEQ ID NO: 273430 - DNA, 120 bp, Artificial Sequence
  ENSG00000127955_135 (sequence is synthesized)
gaaacaaactcatggtgtgtattagctttttttttttaagttattctttttcctttgaatcactgataactgtccctaagaaataaagtacacatttaaaaaatactaaaagagctttgt

SEQ ID NO: 273431 - DNA, 120 bp, Artificial Sequence
  ENSG00000127955_136 (sequence is synthesized)
ggttgcagaggtgtaaacatttttatttccgtgggagtttgtaagataagatacaagcttaaactggattatatctttacacacaaatttaaaaacttttagtgatttcagattatcgct

SEQ ID NO: 273432 - DNA, 120 bp, Artificial Sequence
  ENSG00000127955_137 (sequence is synthesized)
tgtattgaaatgtgttttaatttttgttttggatgatctttattggctatatttaccattaacatgttgttttgtttaatttttttcagctatttgaatgacttggacagaatagctcaa

SEQ ID NO: 273433 - DNA, 120 bp, Artificial Sequence
  ENSG00000127955_138 (sequence is synthesized)
tgggtcagtgtgacagaaagcaacctcatacctggctctcatagctgggaaatcaaggtggatttgtctgcagttacgactagagtgatatatttcctgcttggcccaggtgctggtgaa

SEQ ID NO: 273434 - DNA, 120 bp, Artificial Sequence
  ENSG00000127955_139 (sequence is synthesized)
aaggcctgtggacatttccacccggatgcctgaccataaatgctcaattcccttccaagatggccgaataggaagagctccggtctgaaactcccagcgtgatcgacacagaagatggag

SEQ ID NO: 273435 - DNA, 120 bp, Artificial Sequence
  ENSG00000127955_140 (sequence is synthesized)
gatttctgcatttccaactgaggattatgagaaaaagcaataaaggaagacatcaattctcaagcgaataatttcttctatagagcctgctaaacaacaccaacggtgctggctctgtta

SEQ ID NO: 273436 - DNA, 78 bp, Artificial Sequence
  ENSG00000127955_141 (sequence is synthesized)
tagagcctgctaaacaacaccaacggtgctggctctgttacccaggagtgtggtggcacgatcttggctcactggaac

SEQ ID NO: 273437 - DNA, 120 bp, Artificial Sequence
  ENSG00000127955_142 (sequence is synthesized)
cctaacagtgaatcttcaccttgaaaactcaatgacaaatctccaaagaggaaatacgttctttaataatcttcatctcagaaatgtacacaatccaatgtcttggaaattgatacaaag

SEQ ID NO: 273438 - DNA, 120 bp, Artificial Sequence
  ENSG00000127955_143 (sequence is synthesized)
aacatgaatttctgttcttactgtatttggttcaaaattagagttgttttttataattattatctcctctttttcatttctttctgtagttttattctctgtatatgtctagtattcttg

SEQ ID NO: 273439 - DNA, 120 bp, Artificial Sequence
  ENSG00000127955_144 (sequence is synthesized)
cattgcaattagaatcatgttttatttattgtcttagatgaataaaatgaatttaatgctaaatttggaataggacacacattttcagaaatagtgtagcactaaatttaaagttaaatc

SEQ ID NO: 273440 - DNA, 120 bp, Artificial Sequence
  ENSG00000127955_145 (sequence is synthesized)
taggacttatttattttcttcatgtaaatagcaaaatagttgccacaggtcaagaagaaatcaaatgacaaattgattttgattaattatcaagaaaatagagaatatgatatgactttg

SEQ ID NO: 273441 - DNA, 120 bp, Artificial Sequence
  ENSG00000127955_146 (sequence is synthesized)
actttctgatacaagacctaactcatgagcctgagcgtagtgtggtctgggacctctgctgcatactttttggtggcaattatatatttgcttctctctctctcattgacacactctcct

SEQ ID NO: 273442 - DNA, 120 bp, Artificial Sequence
  ENSG00000127955_147 (sequence is synthesized)
gtcaccttgctctcctatcaacatgtcattttttagaaggggcagcaggagataggaaggacatagatctcaacctgagatctatggtgtctaaatattaacagttattgtctattggac

SEQ ID NO: 273443 - DNA, 120 bp, Artificial Sequence
  ENSG00000127955_148 (sequence is synthesized)
atcaacaattgtattggaccaccttcaagattttgccatacctgtatttcttctctgttactatttacttaatatttttctccaaattcattcactttaatagttacatttctgaaaaca

SEQ ID NO: 273444 - DNA, 120 bp, Artificial Sequence
  ENSG00000127955_149 (sequence is synthesized)
cattaaaattaaaacataactaatgaaaggaaaattactttgcatttcacctaaaatcaagtaaatgctcctagtggtataggtctcacagcatgggaaatactgctctatactatccta

SEQ ID NO: 273445 - DNA, 120 bp, Artificial Sequence
  ENSG00000127955_150 (sequence is synthesized)
tttatcaatgaataggaatactacatgatgtttctcttacccattgagcagttaaaatattttttagcacttcctcatttgcaccttttcttaccaccagagatcacaaatttcctgcaa

SEQ ID NO: 273446 - DNA, 120 bp, Artificial Sequence
  ENSG00000127955_151 (sequence is synthesized)
gtgcagattaagataacaaccataatagccatcatttttaagtcctgaaagcatgaagcaggaatcgtgttcctagtatgtactgaattaaatatttggttctcacctgcaaattttata

SEQ ID NO: 273447 - DNA, 120 bp, Artificial Sequence
  ENSG00000127955_152 (sequence is synthesized)
tggatcctcaacctacttcacttgccttatctcccttatatgtgtttccttatcaatatttcactcctttcccttttttttttgcatcactcattttttcatacccttacttttgctact

SEQ ID NO: 273448 - DNA, 120 bp, Artificial Sequence
  ENSG00000127955_153 (sequence is synthesized)
ttctctgtttagaataaactttccctttctccactggataatgccgtgctcatgtttcagatgagtgaaggcatctacaactctccctggcagatttagccatgtgctctcctgtgtctc

SEQ ID NO: 273449 - DNA, 120 bp, Artificial Sequence
  ENSG00000127955_154 (sequence is synthesized)
tcgcatattcatatttcatagttcatatttttattatatcccttaccaccttcataatggagtctcttctcatagcctgagttccttgagggcagggatctccagtgtctagtaacattt

SEQ ID NO: 273450 - DNA, 120 bp, Artificial Sequence
  ENSG00000127955_155 (sequence is synthesized)
ctagcacactataagtgcttaatgcaattttaatacaatttgagttggtttaaagtgaattcaattgaaattaagtaaaatctaattgaaaattcagagcagacatcttccagttgttgc

SEQ ID NO: 273451 - DNA, 120 bp, Artificial Sequence
  ENSG00000127955_156 (sequence is synthesized)
gtattacatgttctcaagaacactaaaatgaagtttaaagagaaaccagagtccggtaaaataattaattttactgctataatagcaacagagacaatgtttttctcttaccaaagccct

SEQ ID NO: 273452 - DNA, 120 bp, Artificial Sequence
  ENSG00000127955_157 (sequence is synthesized)
gagtacacagttagactgcatttctcagtgtccttgaagccaggtaaagccatgggacgaagttctggtcagtaaaatctgagcaaaattggtgatcagcataagtatctaaaaatactt

SEQ ID NO: 273453 - DNA, 120 bp, Artificial Sequence
  ENSG00000127955_158 (sequence is synthesized)
attctgtcaaggtgtggaggatccgacggagtattaaaaggtcctagggtaaaagaaccttgggttcttcgataaataggtgagcagagcttcttgacccaccaacatttgacccttgat

SEQ ID NO: 273454 - DNA, 120 bp, Artificial Sequence
  ENSG00000127955_159 (sequence is synthesized)
ctgaacaaaaataaatgtcttatgtgatttcagtcactgagatttttagttttattgtttgtaagtgtatgtctgtttgctagagaaaagttattctaccttaatacacattggaagtta

SEQ ID NO: 273455 - DNA, 120 bp, Artificial Sequence
  ENSG00000127955_160 (sequence is synthesized)
ttttcttaaaccttaggttttaattgttctgcttcatctttccagtgtatatgtcatgagcagtgatggaggaacagtttttaagggtagtaggaaagaaagtaattaaatacttctttt

SEQ ID NO: 273456 - DNA, 120 bp, Artificial Sequence
  ENSG00000127955_161 (sequence is synthesized)
aggtatatatgtctttaacataatgcaatgcttataagatactcgaaatattaggaagtagatatccaatgttttatcactgttattccaaattttattattaaacatcttttcttgaaa

SEQ ID NO: 273457 - DNA, 120 bp, Artificial Sequence
  ENSG00000127955_162 (sequence is synthesized)
attctaatcattcacttggaattatctgtatagaagatgtattgccactgtacatatctgagacctgcttccaacatattaaatttaatttgaaatttaaatgcatattagaacctaaat

SEQ ID NO: 273458 - DNA, 120 bp, Artificial Sequence
  ENSG00000127955_163 (sequence is synthesized)
tctactttctagttaaatctaagagtctatggccttaggaatacattagtatataattaagttgtaaaacctcagtctaaaattcttttaatgtatactttgaaccaagatattcaagta

SEQ ID NO: 273459 - DNA, 120 bp, Artificial Sequence
  ENSG00000127955_164 (sequence is synthesized)
aatgtttgtgaattatattatcaattagttttagaaggcctgatctagtagttctttaaacatttatattaattgcaattcactctaataattttaccgtgaatagcaaaaggctcatct

SEQ ID NO: 273460 - DNA, 120 bp, Artificial Sequence
  ENSG00000127955_165 (sequence is synthesized)
tcagaattaaataattcagaaattaatctggtctcagctttttttcaccacactttcttcgttttcttagtttatctccagtaacatcaatcattctgctggacttgacagaggatgtca

SEQ ID NO: 273461 - DNA, 120 bp, Artificial Sequence
  ENSG00000127955_166 (sequence is synthesized)
tgagggtcagcatatagctaagtacctgcctcaaaagcaaatgtcgaacattcatatgctcgcaggtttccttccacaacccctaaaaagggaagctatcttgataattcaaataagaac

SEQ ID NO: 273462 - DNA, 120 bp, Artificial Sequence
  ENSG00000127955_167 (sequence is synthesized)
cattcctgcctgatgcttcttcctcttgcaagaattagctccagagaatcttctagcaaaagatctgaaggggaatgctgaatatacatctttgaattggttttagaaactacaaagttc

SEQ ID NO: 273463 - DNA, 120 bp, Artificial Sequence
  ENSG00000127955_168 (sequence is synthesized)
tggtactttagtctctgtcactcttctgtcatgttggcctcgggggcatttaaataaagcaagcctaggatattccaaaatttagaatggacagtaataggtttctctcaagtagctaag

SEQ ID NO: 273464 - DNA, 120 bp, Artificial Sequence
  ENSG00000127955_169 (sequence is synthesized)
aagttgcagtgggcagcaatgaaacagggtcacacacttcagaagaaatcaccagtttcatttcattaactaagagaaaatgttaagttataaaagcattaaggtattatagttctgctt

SEQ ID NO: 273465 - DNA, 120 bp, Artificial Sequence
  ENSG00000127955_170 (sequence is synthesized)
taactaaacttgggactaattttttaaatgaatagactttattttttagagcagttttagatttacagaaaaatttagcagaaactgcagtttccatataccacaaccccttaaaacaca

SEQ ID NO: 273466 - DNA, 120 bp, Artificial Sequence
  ENSG00000127955_171 (sequence is synthesized)
agtacatacacagttttctccatcattaacctcttgcattagtgtgatatatttatcaacaattgaggatccaatatttatccatttgtaaaaacttaagcccatagtttatataatggt

SEQ ID NO: 273467 - DNA, 120 bp, Artificial Sequence
  ENSG00000127955_172 (sequence is synthesized)
tcacttttttgtgttgtaaattctataggtttaagaaatacataatgataaatattctccattgcaataccatacagaatagttacactactctaaaaattctatgttccacttattcat

SEQ ID NO: 273468 - DNA, 120 bp, Artificial Sequence
  ENSG00000127955_173 (sequence is synthesized)
ccctgtatcttctcctccaagccttaagcaactactgatctttttactatcttcataattttgccttttctaaaatctcgtatagttggagtcatacagtaaatacctttttcagattga

SEQ ID NO: 273469 - DNA, 120 bp, Artificial Sequence
  ENSG00000127955_174 (sequence is synthesized)
cctttctcatgtgtcaatgtgcatttaagtttcctccatatctttttgtctcttgatagcttatttccttttattgccaaataatattccattgtctggatataccatagtttatttatt

SEQ ID NO: 273470 - DNA, 120 bp, Artificial Sequence
  ENSG00000127955_175 (sequence is synthesized)
cacctactgaggaacattttgcttgctttcaagtttttgcagttatgaataaagctgctataaacatctgtgctcaggccttggtgtgggcatgctttccattcctttaggtaaatacca

SEQ ID NO: 273471 - DNA, 120 bp, Artificial Sequence
  ENSG00000127955_176 (sequence is synthesized)
cagaatgtgattgctggatcatatgttaagtgcatgtttagttttgtaagaaactgccaaactgtcttcccacatggcagtagcatttttcattcccacgagcaaagaatgacagttcct

SEQ ID NO: 273472 - DNA, 120 bp, Artificial Sequence
  ENSG00000127955_177 (sequence is synthesized)
gttgttccacatccttgtcagcatttggctttgtcagtgttctggatttgggccattctagtaggtgtatagcagtacttcattgttttaatttgcacttcctgatgacatattatgtta

SEQ ID NO: 273473 - DNA, 120 bp, Artificial Sequence
  ENSG00000127955_178 (sequence is synthesized)
accatgggtttccatatgtttatatgccatctatatatcctatgtgatgagatatattttgatcttttggttatatttttattgggtggtttattttcttattgagttttaactgttctt

SEQ ID NO: 273474 - DNA, 120 bp, Artificial Sequence
  ENSG00000127955_179 (sequence is synthesized)
agtgtgagggtattttgggaaaatttcttacatatcaaaccacaagtaaaatttagggagttttatcctcagattttcaaatagggcatttaactatgacctcttttcagatgcctctga

SEQ ID NO: 273475 - DNA, 89 bp, Artificial Sequence
  ENSG00000127955_180 (sequence is synthesized)
tctggagagggaaagaggtaaagggagagatgaggcccagaagttgaccatcagttgtatcagtcagaaatagcttaaataaattcaag

SEQ ID NO: 273476 - DNA, 120 bp, Artificial Sequence
  ENSG00000127955_181 (sequence is synthesized)
atcagttgtatcagtcagaaatagcttaaataaattcaagtacatttctggttggttgattttgtgtatagcacaagctagcttctgagaattcaaatacaaacatgtgcaaagtgagag

SEQ ID NO: 273477 - DNA, 120 bp, Artificial Sequence
  ENSG00000127955_182 (sequence is synthesized)
gtgtgcggtgtaggttgtgtttcgactgtggttttctcatgcccagagtgccacgtttggtgaaatcagtgcaccttttgtggggcctctgagatggggctgaagcgtctttcctgttaa

SEQ ID NO: 273478 - DNA, 120 bp, Artificial Sequence
  ENSG00000127955_183 (sequence is synthesized)
cttcctatggcgactccttaagtggtcaaggagcgctgattacattccccctgcgctgagaaaaggctgcgctggatgcttgatttttcttgctgtgggggcatggaagccacccaagtg

SEQ ID NO: 273479 - DNA, 120 bp, Artificial Sequence
  ENSG00000127955_184 (sequence is synthesized)
gggttgggaagctttgctttagtagtaggcaaggcagatactcgagtggtgaaaactgctgtgaaagagcgagagggtcacgccagacaacagggttctgtctccgctgccaccgtttct

SEQ ID NO: 273480 - DNA, 120 bp, Artificial Sequence
  ENSG00000127955_185 (sequence is synthesized)
tcgcatagtgttttcattatataagtggttatttctaggttgcataatgtagtctatgcaaattttaacttttgcttaactttataaagtcttataagagaaaaggaatagactattgtc

SEQ ID NO: 273481 - DNA, 120 bp, Artificial Sequence
  ENSG00000127955_186 (sequence is synthesized)
tttatattgtttgattttgctactactttgttcactaacctatagtggttcactcttgtataaaaattgaatttttttcattctaaattttaaggccattcagtaggatccctcatttat

SEQ ID NO: 273482 - DNA, 120 bp, Artificial Sequence
  ENSG00000127955_187 (sequence is synthesized)
ttcatatttcagttctctcattttgtaatgtatcatgattttactttttatgcaaacctaccctatctgaatttcatttgcttgccctacattttcttacctgaaatggtttcttcttta

SEQ ID NO: 273483 - DNA, 120 bp, Artificial Sequence
  ENSG00000127955_188 (sequence is synthesized)
catcaaagccttgcttattatttctgagttaaaacgacatgttttagtaggaggaggggtctctgttctctgccttcaatgttccgtgactgtggcaaatggaatatttactctttgatc

SEQ ID NO: 273484 - DNA, 120 bp, Artificial Sequence
  ENSG00000127955_189 (sequence is synthesized)
tctgcattccccagttgcttcatgtgacttctcagtgtttacacatagtgcagtccattcatttgtatttgctttaatgttctaagtgttctcatgtgtgttaatgtctcgtttttttga

SEQ ID NO: 273485 - DNA, 120 bp, Artificial Sequence
  ENSG00000127955_190 (sequence is synthesized)
ttgtttttgcttttttttttttttttagagataccctcccttcaatcaaaaattttaaaaactagcaggtttttttccccttttgagaagtccagtttgtgacatttttttctcccataa

SEQ ID NO: 273486 - DNA, 120 bp, Artificial Sequence
  ENSG00000127980_0 (sequence is synthesized)
ctccggctccgacgtcctcggcctgccgggtcccgggtcctttgcggcgctagggtgggcgaacccagagcgacgctccgggacgatgtggggcagcgatcgcctggcgggtgctggggg

SEQ ID NO: 273487 - DNA, 120 bp, Artificial Sequence
  ENSG00000127980_1 (sequence is synthesized)
aggcggggcggcagtgactgtggccttcaccaacgctcgcgactgcttcctccacctgccgcggcgtctcgtggcccagctgcatctgctgcagaatcaagctatagaagtggtctggag

SEQ ID NO: 273488 - DNA, 120 bp, Artificial Sequence
  ENSG00000127980_2 (sequence is synthesized)
tcaccagcctgcattcttgagctgggtggaaggcaggcattttagtgatcaaggtgaaaatgtggctgaaattaacagacaagttggtcaaaaacttggactctcaaatgggggacaggt

SEQ ID NO: 273489 - DNA, 120 bp, Artificial Sequence
  ENSG00000127980_3 (sequence is synthesized)
atttctcaagccatgttcccatgtggtatcttgtcaacaagttgaggtggaacccctctcagcagatgattgggagatactggagctgcatgctgtttcccttgaacaacatcttctaga

SEQ ID NO: 273490 - DNA, 120 bp, Artificial Sequence
  ENSG00000127980_4 (sequence is synthesized)
tcaaattcgaatagtttttccaaaagccatttttcctgtttgggttgatcaacaaacgtacatatttatccaaattgttgcactaataccagctgcctcttatggaaggctggaaactga

SEQ ID NO: 273491 - DNA, 120 bp, Artificial Sequence
  ENSG00000127980_5 (sequence is synthesized)
caccaaactccttattcagccaaagacacgccgagccaaagagaatacattttcaaaagctgatgctgaatataaaaaacttcatagttatggaagagaccagaaaggaatgatgaaaga

SEQ ID NO: 273492 - DNA, 120 bp, Artificial Sequence
  ENSG00000127980_6 (sequence is synthesized)
acttcaaaccaagcaacttcagtcaaatactgtgggaatcactgaatctaatgaaaacgagtcagagattccagttgactcatcatcagtagcaagtttatggactatgataggaagcat

SEQ ID NO: 273493 - DNA, 120 bp, Artificial Sequence
  ENSG00000127980_7 (sequence is synthesized)
tttttcctttcaatctgagaagaaacaagagacatcttggggtttaactgaaatcaatgcattcaaaaatatgcagtcaaaggttgttcctctagacaatattttcagagtatgcaaatc

SEQ ID NO: 273494 - DNA, 120 bp, Artificial Sequence
  ENSG00000127980_8 (sequence is synthesized)
tcaacctcctagtatatataacgcgtcagcaacctctgtttttcataaacactgtgccattcatgtatttccatgggaccaggaatattttgatgtagagcccagctttactgtgacata

SEQ ID NO: 273495 - DNA, 120 bp, Artificial Sequence
  ENSG00000127980_9 (sequence is synthesized)
tggaaagctagttaagctactttctccaaagcaacagcaaagtaaaacaaaacaaaatgtgttatcacctgaaaaagagaagcagatgtcagagccactagatcaaaaaaaaattaggtc

SEQ ID NO: 273496 - DNA, 120 bp, Artificial Sequence
  ENSG00000127980_10 (sequence is synthesized)
agatcataatgaagaagatgagaaggcctgtgtgctacaagtagtctggaatggacttgaagaattgaacaatgccatcaaatataccaaaaatgtagaagttctccatcttgggaaagt

SEQ ID NO: 273497 - DNA, 120 bp, Artificial Sequence
  ENSG00000127980_11 (sequence is synthesized)
ctggattccagatgacctgaggaagagactaaatatagaaatgcatgccgtagtcaggataactccagtggaagttacccctaaaattccaagatctctaaagttacaacctagagagaa

SEQ ID NO: 273498 - DNA, 120 bp, Artificial Sequence
  ENSG00000127980_12 (sequence is synthesized)
tttacctaaagacataagtgaagaagacataaaaactgtattttattcatggctacagcagtctactaccaccatgcttcctttggtaatatcagaggaagaatttattaagctggaaac

SEQ ID NO: 273499 - DNA, 120 bp, Artificial Sequence
  ENSG00000127980_13 (sequence is synthesized)
taaagatggactgaaggaattttctctgagtatagttcattcttgggaaaaagaaaaagataaaaatatttttctgttgagtcccaatttgctgcagaagactacaatacaagtccttct

SEQ ID NO: 273500 - DNA, 120 bp, Artificial Sequence
  ENSG00000127980_14 (sequence is synthesized)
agatcctatggtaaaagaagaaaacagtgaggaaattgactttattcttccttttttaaagctgagctctttgggaggagtgaattccttaggcgtatcctccttggagcacatcactca

SEQ ID NO: 273501 - DNA, 120 bp, Artificial Sequence
  ENSG00000127980_15 (sequence is synthesized)
cagcctcctgggacgccctttgtctcggcagctgatgtctcttgttgcaggacttaggaatggagctcttttactcacaggaggaaagggaagtggaaaatcaactttagccaaagcaat

SEQ ID NO: 273502 - DNA, 120 bp, Artificial Sequence
  ENSG00000127980_16 (sequence is synthesized)
ctgtaaagaagcatttgacaaactggatgcccatgtggagagagttgactgtaaagctttacgaggaaaaaggcttgaaaacatacaaaaaaccctagaggtggctttctcagaggcagt

SEQ ID NO: 273503 - DNA, 120 bp, Artificial Sequence
  ENSG00000127980_17 (sequence is synthesized)
gtggatgcagccatctgttgtcctgctggatgaccttgacctcattgctggactgcctgctgtcccggaacatgagcacagtcctgatgcggtgcagagccagcggcttgctcatgcttt

SEQ ID NO: 273504 - DNA, 120 bp, Artificial Sequence
  ENSG00000127980_18 (sequence is synthesized)
attgccacaagtcagtctcagcaatctctacatcctttacttgtttctgctcaaggagttcacatatttcagtgcgtccaacacattcagcctcctaatcaggaacaaagatgtgaaatt

SEQ ID NO: 273505 - DNA, 120 bp, Artificial Sequence
  ENSG00000127980_19 (sequence is synthesized)
ctgtgtaatgtaataaaaaataaattggactgtgatataaacaagttcaccgatcttgacctgcagcatgtagctaaagaaactggcgggtttgtggctagagattttacagtacttgtg

SEQ ID NO: 273506 - DNA, 120 bp, Artificial Sequence
  ENSG00000127980_20 (sequence is synthesized)
gatcgagccatacattctcgactctctcgtcagagtatatccaccagagaaaaattagttttaacaacattggacttccaaaaggctctccgcggatttcttcctgcgtctttgcgaagt

SEQ ID NO: 273507 - DNA, 120 bp, Artificial Sequence
  ENSG00000127980_21 (sequence is synthesized)
gtcaacctgcataaacctagagacctgggttgggacaagattggtgggttacatgaagttaggcagatactcatggatactatccagttacctgccaagtatccagaattatttgcaaac

SEQ ID NO: 273508 - DNA, 120 bp, Artificial Sequence
  ENSG00000127980_22 (sequence is synthesized)
ttgcccatacgacaaagaacaggaatactgttgtatggtccgcctggaacaggaaaaaccttactagctggggtaattgcacgagagagtagaatgaattttataagtgtcaaggggcca

SEQ ID NO: 273509 - DNA, 120 bp, Artificial Sequence
  ENSG00000127980_23 (sequence is synthesized)
gagttactcagcaaatacattggagcaagtgaacaagctgttcgggatatttttattagagcacaggctgcaaagccctgcattcttttctttgatgaatttgaatccattgctcctcgg

SEQ ID NO: 273510 - DNA, 120 bp, Artificial Sequence
  ENSG00000127980_24 (sequence is synthesized)
cggggtcatgataatacaggagttacagaccgagtagttaaccagttgctgactcagttggatggagtagaaggcttacagggtgtttatgtattggctgctactagtcgccctgacttg

SEQ ID NO: 273511 - DNA, 120 bp, Artificial Sequence
  ENSG00000127980_25 (sequence is synthesized)
attgaccctgccctgcttaggcctggtcgactagataaatgtgtatactgtcctcctcctgatcaggtgtcacgtcttgaaattttaaatgtcctcagtgactctctacctctggcagat

SEQ ID NO: 273512 - DNA, 120 bp, Artificial Sequence
  ENSG00000127980_26 (sequence is synthesized)
gatgttgaccttcagcatgtagcatcagtaactgactcctttactggagctgatctgaaagctttactttacaatgcccaattggaggccttacatggaatgctgctctcgagtggactc

SEQ ID NO: 273513 - DNA, 120 bp, Artificial Sequence
  ENSG00000127980_27 (sequence is synthesized)
caggatggaagttccagctctgatagtgacctaagtctgtcttcaatggtctttcttaaccatagcagtggctctgacgattcagctggagatggagaatgtggcttagatcagtccctt

SEQ ID NO: 273514 - DNA, 120 bp, Artificial Sequence
  ENSG00000127980_28 (sequence is synthesized)
gtttctttagagatgtccgagatccttccagatgaatcaaaattcaatatgtaccggctctactttggaagctcttatgaatcagaacttggaaatggaacctcttctgatttgagctca

SEQ ID NO: 273515 - DNA, 120 bp, Artificial Sequence
  ENSG00000127980_29 (sequence is synthesized)
caatgtctctctgcaccaagctccatgactcaggatttgcctggagttcctgggaaagaccagttgttttcacagcctccagtgttaaggacagcttcacaagagggttgccaagaactt

SEQ ID NO: 273516 - DNA, 120 bp, Artificial Sequence
  ENSG00000127980_30 (sequence is synthesized)
acacaagaacaaagagatcaactgagggcagatatcagtattatcaaaggcagataccggagccaaagtggagaggacgaatccatgaaccaaccaggaccaatcaaaaccagactggct

SEQ ID NO: 273517 - DNA, 120 bp, Artificial Sequence
  ENSG00000127980_31 (sequence is synthesized)
attagtcagtcacatttaatgactgcacttggtcacacaagaccatccattagtgaagatgactggaagaattttgctgagctatatgaaagctttcaaaatccaaagaggagaaaaaat

SEQ ID NO: 273518 - DNA, 120 bp, Artificial Sequence
  ENSG00000127980_32 (sequence is synthesized)
caaagtggaacaatgtttcgacctggacagaaagtaactttagcataaaatatacttctttttgatttggttctgttaagttttttgatggcttttccatatgttgtaacaggaaaaaaa

SEQ ID NO: 273519 - DNA, 120 bp, Artificial Sequence
  ENSG00000127980_33 (sequence is synthesized)
tggtgtctatgaatttcttcttaatttaacaaatttggttaatttataaaatcacagattggtaaatgctataattatgtaatgatcaggattgagattaatactgtagtataaattggg

SEQ ID NO: 273520 - DNA, 120 bp, Artificial Sequence
  ENSG00000127980_34 (sequence is synthesized)
acattataacagattccatattttatttcctaaaatctaaattcagtctttaatgaaataatattagccaaatggtggaactaatttatttcttttgaggaaaagataataaagaatgta

SEQ ID NO: 273521 - DNA, 120 bp, Artificial Sequence
  ENSG00000127980_35 (sequence is synthesized)
attaaatttaaatttcttggaattcccagttgtatattcatcacctttgtagcatttgacaaattttatgcttagcagcttcttcactgttttgaaataaaatatcctattacctactga

SEQ ID NO: 273522 - DNA, 120 bp, Artificial Sequence
  ENSG00000127980_36 (sequence is synthesized)
gaaatgtcccagaaacttagtataactttactttctgaaaatgaagaaacctgtccttgggcattagtgtgttggatttaagcaacaaagttaaaaaaacctaccctgtgttatggcaat

SEQ ID NO: 273523 - DNA, 120 bp, Artificial Sequence
  ENSG00000127980_37 (sequence is synthesized)
tttcacttgatggtggttctataacacaggtatcagtgaacctttataaaagatgaacaacttttcagcttgcttaatttcagttaattaacatgtatacttatctatgttaatgtttta

SEQ ID NO: 273524 - DNA, 120 bp, Artificial Sequence
  ENSG00000127980_38 (sequence is synthesized)
caagaacttacacaagaacaaagagatcaactgagggcagatatcagtattatcaaaggcagataccggagccaaagtggagtatggctttttccccctcattataattgttaaaacttc

SEQ ID NO: 273525 - DNA, 120 bp, Artificial Sequence
  ENSG00000127980_39 (sequence is synthesized)
ttaaaaattgtttcacccttttgatatatatttctttgacttataaacgagctatatttataaacaagggaccagaacacattaactcagtcatggttatgtgcttccttgctttcaatg

SEQ ID NO: 273526 - DNA, 120 bp, Artificial Sequence
  ENSG00000127980_40 (sequence is synthesized)
tttcattatcttataaggaagagaacgtatggtctcttgaaaaaactgacaataagaagtaacaactggactaccacatttttttttacatccttaatttaactcttcgtcaatttcttt

SEQ ID NO: 273527 - DNA, 120 bp, Artificial Sequence
  ENSG00000127980_41 (sequence is synthesized)
ccgtctcaaaaaaaaaaaaaaaaaaaagcttgaagtcagattcgacattaatcagtatactttctctcaagtaggggacaatttctaagattttagtcttttaaaatttattaactagtc

SEQ ID NO: 273528 - DNA, 120 bp, Artificial Sequence
  ENSG00000127980_42 (sequence is synthesized)
ctaagattttagtcttttaaaatttattaactagtctgagcatggtggcttgtgtctataatcccagcactttgtggggccgaggcagatggatcacttgagcccaggagttggagacta

SEQ ID NO: 273529 - DNA, 79 bp, Artificial Sequence
  ENSG00000127980_43 (sequence is synthesized)
agttgcaaatgcacacacaaaaaacccaatcagctgggtgtggtgttacactcctgaagtcccagctactcgggaggct

SEQ ID NO: 273530 - DNA, 120 bp, Artificial Sequence
  ENSG00000127980_44 (sequence is synthesized)
tcacctttgccagggcgtttgaggctgcagggagctgggttcacaccactgcgctccagcctggatgacacagcaagcccctttctcaaaaaaaaaaagataaaaaattaaattaaatta

SEQ ID NO: 273531 - DNA, 120 bp, Artificial Sequence
  ENSG00000127980_45 (sequence is synthesized)
attaactacactgggaaggcaaaattcagcatttttttatagctaaattttatcctgcttcagtcttttatcatgtaactatgtatattttttacagaggagtgaattccttaggcgtat

SEQ ID NO: 273532 - DNA, 120 bp, Artificial Sequence
  ENSG00000127980_46 (sequence is synthesized)
aaggtgtgttcatttttctgtaacatttaataacttttcatttatctttctttgggttttgaccatctattatatagggtgggttttgaccatctattatatagggtttatacgacatat

SEQ ID NO: 273533 - DNA, 120 bp, Artificial Sequence
  ENSG00000127980_47 (sequence is synthesized)
ggaaagcattcatttattcactaatatttctgtgtgtctgcttttaggtgttgggggagtgatgacgaataagactgatgttctccatgccctttttctgtgtcagttgatacaattata

SEQ ID NO: 273534 - DNA, 120 bp, Artificial Sequence
  ENSG00000127980_48 (sequence is synthesized)
tggtttttcttttttaggctattaggtgttgatagggttgagtaacttacaaatgttgaaccagccttgcatacctgtgataaataccacgtagttgtggtgtatcattctttctacatt

SEQ ID NO: 273535 - DNA, 120 bp, Artificial Sequence
  ENSG00000127980_49 (sequence is synthesized)
gctgagttttatctgctaatgttctgttgagcttttgtccatttaagtttgaaagtgattagtttgcagttttctgtttttgtgttgtctttgtctggttttgctatccgtgtaaatctg

SEQ ID NO: 273536 - DNA, 120 bp, Artificial Sequence
  ENSG00000127980_50 (sequence is synthesized)
gcctcataaaatgagatgggaagtattctctcctcttcttttgtttttttggaagaggttgtataaaattgaggctgaatcttggtggttgccacaatgacaggaactatttctgtgact

SEQ ID NO: 273537 - DNA, 120 bp, Artificial Sequence
  ENSG00000127980_51 (sequence is synthesized)
gatcgagccatacattctcgactctctcgtcagagtatatccaccagagaaagtatgttttactattaaaacctgaacttggaatcttctttctattgtggagaaatgtaattgtagtaa

SEQ ID NO: 273538 - DNA, 120 bp, Artificial Sequence
  ENSG00000127980_52 (sequence is synthesized)
gacaagaattaaatatattccattgtagtatttgaataagcagttatttgagtagaaaattagtgtttccagctaagatgatggcatattttgaaaattcatatagtgaatataactagt

SEQ ID NO: 273539 - DNA, 120 bp, Artificial Sequence
  ENSG00000127980_53 (sequence is synthesized)
atatttagagtccaaaacccaacaaatgctacactctttccttgtgagctttacttctgccaggtaatggcaattgtccttagaagaccagctttcttagggaaaagctttagccactgt

SEQ ID NO: 273540 - DNA, 120 bp, Artificial Sequence
  ENSG00000127980_54 (sequence is synthesized)
ttgctcaaagcataaaaagattctgaattagatgcaaagcctttttttggcccagtgcaagtctgaaaactttgtaatccttctgtgttggctgattggggaaaaaaaaatgcaagaaac

SEQ ID NO: 273541 - DNA, 120 bp, Artificial Sequence
  ENSG00000127980_55 (sequence is synthesized)
ctaatgtattatattttcacattatcttctgttcaaagattacatacttccattatcctgtcaaaaaaaaaactctgatacagaatcaagcatgtgaatcgtaagcatgtaagcaggttt

SEQ ID NO: 273542 - DNA, 120 bp, Artificial Sequence
  ENSG00000127980_56 (sequence is synthesized)
catagagataatttttcaactcttccttgtcctgtgttgttccaactcttattctccaatttagaagcaaacaaataaatgaatgaaagaacagatagacaaatgaatagtcaaaggtat

SEQ ID NO: 273543 - DNA, 120 bp, Artificial Sequence
  ENSG00000127980_57 (sequence is synthesized)
aaagtatctgtatatatgttacatgtagctattatttaaattatttagattttccttttgaaataccttcttggcacacttgcctaaatctagaaaataagcactgtgtgaataagaaat

SEQ ID NO: 273544 - DNA, 90 bp, Artificial Sequence
  ENSG00000127980_58 (sequence is synthesized)
tgcctaaatctagaaaataagcactgtgtgaataagaaattatttacactgaatattttgtaggtttttgggtttttgtttttcagacaa

SEQ ID NO: 273545 - DNA, 90 bp, Artificial Sequence
  ENSG00000127980_59 (sequence is synthesized)
ccgagtagctgggaccacaggcacacgctaccatgcccagataattttattattaatttttgtatattcttgaactccagggctcaagtg

SEQ ID NO: 273546 - DNA, 69 bp, Artificial Sequence
  ENSG00000127980_60 (sequence is synthesized)
aagagtgtttgattttcattcattttcctatatatattatttctgttggggaaaaaattccaaggaaga

SEQ ID NO: 273547 - DNA, 120 bp, Artificial Sequence
  ENSG00000127980_61 (sequence is synthesized)
atatatattatttctgttggggaaaaaattccaaggaagataaatagtaggctgttggtacatttctcaacttacttataaagctttttagatatataaggttaatttatgaagaaaatc

SEQ ID NO: 273548 - DNA, 120 bp, Artificial Sequence
  ENSG00000127980_62 (sequence is synthesized)
ataagatacacaatttaagataatatttttaattttattttttatttgttaaataaatttttctcctttcaggtgtcacgtcttgaaattttaaatgtcctcagtgactctctacctctg

SEQ ID NO: 273549 - DNA, 120 bp, Artificial Sequence
  ENSG00000127989_0 (sequence is synthesized)
agaggcggaagtaaaagcgaactacagtggatgggtgcagttcaggagatagctgttctccagcctttctggagggatgcagagcctttccttaggacaaacaagcatttcaaaaggttt

SEQ ID NO: 273550 - DNA, 120 bp, Artificial Sequence
  ENSG00000127989_1 (sequence is synthesized)
gaactacctaaccattatggcaccaggaaacctctggcatatgagaaataactttctctttggttcaagatgttggatgactcgattttcagcagaaaacatcttcaaatcagtttcatt

SEQ ID NO: 273551 - DNA, 120 bp, Artificial Sequence
  ENSG00000127989_2 (sequence is synthesized)
taggctttttggtgtgaagtgtcataatacagacagtgagcctttgaaaaatgaggacctactgaaaaacttacttactatgggagtagatattgacatggcaaggaaacgacagcctgg

SEQ ID NO: 273552 - DNA, 120 bp, Artificial Sequence
  ENSG00000127989_3 (sequence is synthesized)
agtttttcataggatgattaccaatgagcaggacctgaagatgttccttctttccaaaggagctagcaaagaagtgatcgctagcatcatatcaagatatccacgagcaataacacgtac

SEQ ID NO: 273553 - DNA, 120 bp, Artificial Sequence
  ENSG00000127989_4 (sequence is synthesized)
tcccgagaatctttcaaaacggtgggatctgtggagaaagattgtgacatcagaccttgaaattgtaaatattttggaacgttctcctgaatccttttttcggtccaataacaacctaaa

SEQ ID NO: 273554 - DNA, 120 bp, Artificial Sequence
  ENSG00000127989_5 (sequence is synthesized)
cttagagaataatataaagttcctctactcagttggattgacccgtaaatgcctttgtcgattgttgaccaatgcccctcgtaccttctccaatagtcttgatctgaataaacagatggt

SEQ ID NO: 273555 - DNA, 120 bp, Artificial Sequence
  ENSG00000127989_6 (sequence is synthesized)
tgaatttttgcaggcagccggtttgtcattgggtcacaatgatcccgcagattttgtcagaaagataatttttaaaaacccttttatcttaattcagagcaccaagcgggtgaaagctaa

SEQ ID NO: 273556 - DNA, 120 bp, Artificial Sequence
  ENSG00000127989_7 (sequence is synthesized)
cattgaattcttacggtcaactttcaatttgaacagtgaggaactgctggttctgatatgtggtccaggagctgaaatcctagacctttccaatgactatgccagaagaagctacgcaaa

SEQ ID NO: 273557 - DNA, 120 bp, Artificial Sequence
  ENSG00000127989_8 (sequence is synthesized)
catcaaagagaagctgttttctcttggatgtactgaagaagaggtacagaagtttgtcttaagctatccagatgtgatcttcttggcagagaaaaagtttaatgataaaatagactgcct

SEQ ID NO: 273558 - DNA, 120 bp, Artificial Sequence
  ENSG00000127989_9 (sequence is synthesized)
catggaagaaaacattagcatttcacaaataatcgaaaatcctcgggttctggattcaagcataagtactttaaaaagtcgaatcaaagaattggtaaatgctggctgtaacttgagtac

SEQ ID NO: 273559 - DNA, 120 bp, Artificial Sequence
  ENSG00000127989_10 (sequence is synthesized)
tttaaacatcactcttctatcttggagtaaaaaaagatatgaagctaaattgaaaaagttaagcagatttgcctaaggatgccaatgtttttaattctcaggaactgtgaatatgttatg

SEQ ID NO: 273560 - DNA, 120 bp, Artificial Sequence
  ENSG00000127989_11 (sequence is synthesized)
ccacattgcaaaagaattttgcagaagtgattaatttaaaatgttattaagggccttgagatggggagattatcctgaattactttggagggcctaatataattgtagggatctttaaaa

SEQ ID NO: 273561 - DNA, 120 bp, Artificial Sequence
  ENSG00000127989_12 (sequence is synthesized)
gttgaagagggaggcaaaagaggaggtcagagtgatcctgtataagaaagacaactacttttgaaggaagttaaaaggtggctttgaaggaggaagacaccttgagccaaggaatgaagg

SEQ ID NO: 273562 - DNA, 120 bp, Artificial Sequence
  ENSG00000127989_13 (sequence is synthesized)
gggcctgtaaaaaaagattgaaaaggcaaggaaacagattctccattagagtccccagaaaggaatgcagccttgctggcacctttttagcccagtgagatcaatgtcaaacttctgacc

SEQ ID NO: 273563 - DNA, 120 bp, Artificial Sequence
  ENSG00000127989_14 (sequence is synthesized)
cacagaaccataagatggtaaatttgtgttgttttaaaccactgagtcagtgataatttgctgaagaagcaaatagattaacatagcaactaagtagatgattagttgcattataggtga

SEQ ID NO: 273564 - DNA, 120 bp, Artificial Sequence
  ENSG00000127989_15 (sequence is synthesized)
agtcaaaaatacagtcctttagtaaagtctctatttcttccttttataagagtaattatatttaaaaaatctacctacccttctggaattgctaatgttagtgtttataaagtcttaaat

SEQ ID NO: 273565 - DNA, 120 bp, Artificial Sequence
  ENSG00000127989_16 (sequence is synthesized)
gcatttcagctaatattaaagagtaattttcagaggcattgacttaaaaaatggcaaatcagataatgtcggtattttcaagatacaatctagctctgacataaactgaaagacgtgaga

SEQ ID NO: 273566 - DNA, 120 bp, Artificial Sequence
  ENSG00000127989_17 (sequence is synthesized)
caaattatatgaccttaattttaattgttttccagaggcatttgttttctagatgtggtttttgaattaaataacataatggtgctcaaccttttaaacctcatttgctatcagtgatac

SEQ ID NO: 273567 - DNA, 120 bp, Artificial Sequence
  ENSG00000127989_18 (sequence is synthesized)
ttcaaaaaaccttattcctactattgataaaaacaatatgtctgcttttctaaggccatttatatattcaacgatactcctattataatttggttaactatttgatggcaagcatggcat

SEQ ID NO: 273568 - DNA, 120 bp, Artificial Sequence
  ENSG00000127989_19 (sequence is synthesized)
agtttagaaagcaagagctttagagtgatgtatctgggcaccattcctgagtaacttgtgttaatgttttaaatttactaaacctgtttttctcatctgtaacaccagaaattgaccttc

SEQ ID NO: 273569 - DNA, 120 bp, Artificial Sequence
  ENSG00000127989_20 (sequence is synthesized)
cagagttggtaggaatcaaatgaaaaagcacctctaaggtttcttgcacatagtaatgatgcaatcagtgatagctataataaaaagatagtattttaaaaagcagctttatacataatt

SEQ ID NO: 273570 - DNA, 120 bp, Artificial Sequence
  ENSG00000127989_21 (sequence is synthesized)
cacatattcaatttacctatttaaagtctaacacagttcaatttatatatagagttgtgcaactttatcttccattgcttataatacatttataatttattggaaaatttataaggaaaa

SEQ ID NO: 273571 - DNA, 120 bp, Artificial Sequence
  ENSG00000127989_22 (sequence is synthesized)
tgaatttcttacagttatggaagctgagaaatcctaggttgaggggccacatctggtgagagccttcttgctggtggggactctgaagagtcctgaggcggcacagtgtatcacatggcg

SEQ ID NO: 273572 - DNA, 120 bp, Artificial Sequence
  ENSG00000127989_23 (sequence is synthesized)
attgctaatgtacttaggtctcttttcctcttataaagccaccagtccactcccatgatagcctattaattcattaatccatgaatagattaatcaatttctgatgacatagcccttatg

SEQ ID NO: 273573 - DNA, 120 bp, Artificial Sequence
  ENSG00000127989_24 (sequence is synthesized)
atccagtcacctcttaaaggccccacctctcaatactgccacattggggattaaatttcaacatgagttttggaggggatggatagtcaaaccatagcagcaaccatcaccacaatctag

SEQ ID NO: 273574 - DNA, 120 bp, Artificial Sequence
  ENSG00000127989_25 (sequence is synthesized)
ttttagaatatgtttgcagtcctaacagaaaccttgtacctgttagtgaatccccattatttccctccatttgttcccccaagcctaagcaaaaatgaatctgttttctgtgtctataaa

SEQ ID NO: 273575 - DNA, 120 bp, Artificial Sequence
  ENSG00000127989_26 (sequence is synthesized)
tttgtttattctgagcatttcatataaatggaatcatacagtatggtcttttgtgactggcttctttcacttagcatattttcaaggttcatccatgtagcacatattagtatttcattt

SEQ ID NO: 273576 - DNA, 120 bp, Artificial Sequence
  ENSG00000127989_27 (sequence is synthesized)
tttttggcaagtaatattccattgtatgggtacagtagtattgggaatacattttactgttatggcttaaagtattgatttcttaagtcttctgaattgtacgcgagtgttttctgaggt

SEQ ID NO: 273577 - DNA, 120 bp, Artificial Sequence
  ENSG00000127989_28 (sequence is synthesized)
attgttttggaatctaacaagctcataagggacttgaaggaggtgggtagaagagataatagtttattgacatcagcagatcataggattgtagctgggctgatgagaaatggtatagca

SEQ ID NO: 273578 - DNA, 120 bp, Artificial Sequence
  ENSG00000127989_29 (sequence is synthesized)
acgatagttgcaagtggccagagagaatgtgggttgcactgaagtacagtacagcacttgatcattgggcagtaggggatgggggaaggaaaactttggagaaacaaacagataatgcct

SEQ ID NO: 273579 - DNA, 120 bp, Artificial Sequence
  ENSG00000127989_30 (sequence is synthesized)
gtcaggcaaaattaacatgtcatactttaaggtttgagtctgatcaagggagagtcaattctttttttttaaagatagaattatagaaatattggccagccatgtaatcccagctcacgc

SEQ ID NO: 273580 - DNA, 120 bp, Artificial Sequence
  ENSG00000127989_31 (sequence is synthesized)
gtaaaagcgaactacagtggatgggtgcagttcaggagatagctgttctccagcctttctggagggatgcagagcctttccttaggacaaacaagaaagtactgatctgatttccagctg

SEQ ID NO: 273581 - DNA, 120 bp, Artificial Sequence
  ENSG00000127989_32 (sequence is synthesized)
acagtggatgggtgcagttcaggagatagctgttctccagcctttctggagggatgcagagcctttccttaggacaaacaagaggtcagtcgagcatctggaagagaaaacaggctgttg

SEQ ID NO: 273582 - DNA, 120 bp, Artificial Sequence
  ENSG00000127989_33 (sequence is synthesized)
gttcagggtgagattgggaaggtggtgaggctgtgctttcctttctttttgttaagaagtgggtgtgggtgactgctgtacagtgcagccctttgcagatttgtctttggaggaggaaga

SEQ ID NO: 273583 - DNA, 120 bp, Artificial Sequence
  ENSG00000127989_34 (sequence is synthesized)
gggatggaaagagccttcggtgtggaattaccttggttttgagttaagaaagacccacctgggttcgaaccctaatgcttcagctagcgaaggcaggctagtatgggagctcggcgctgt

SEQ ID NO: 273584 - DNA, 120 bp, Artificial Sequence
  ENSG00000127989_35 (sequence is synthesized)
ttcagattttgtaattttaaggcttatgcctaccttttaaattgttgtggggagtaaagcgagacaatatatatgaagcacttagctttggtacaaaacgtattcgtgattccgctacct

SEQ ID NO: 273585 - DNA, 120 bp, Artificial Sequence
  ENSG00000127989_36 (sequence is synthesized)
tttcccatcatatgtaggcatgtacttgccgttttcttttctgtatgtctgagaaatgttgtttgcaagaggtaatgcatctcacgagaacataatgcaacgagaacgttagctgggatc

SEQ ID NO: 273586 - DNA, 120 bp, Artificial Sequence
  ENSG00000127989_37 (sequence is synthesized)
aaaagcgaactacagtggatgggtgcagttcaggagatagctgttctccagcctttctggagggatgcagagcctttccttaggacaaacaagagagaacaacctgacataaactagcaa

SEQ ID NO: 273587 - DNA, 120 bp, Artificial Sequence
  ENSG00000127989_38 (sequence is synthesized)
cacacctcctttaataaagcctttgcttagggagcaactttcgaagtaaatgacaatgccacatttggaagaattctagagtaaaagaaactcgtgccattgcctcacttgttgcaatga

SEQ ID NO: 273588 - DNA, 120 bp, Artificial Sequence
  ENSG00000127989_39 (sequence is synthesized)
ataaattggtataattttacaatggaacaactgcatggagtcttttgctgcctgaagacctgagtgttgggctcctcttcataaaagtttccatgacgatctggcctgagagaatgacag

SEQ ID NO: 273589 - DNA, 120 bp, Artificial Sequence
  ENSG00000127990_0 (sequence is synthesized)
gagaatcgaggacggacggcctagccaggccaagaatgcaattgccccggtggtgggagctgggagacccctgtgcttggacgggacagggtcgggggacacgcaggatgagccccgcga

SEQ ID NO: 273590 - DNA, 120 bp, Artificial Sequence
  ENSG00000127990_1 (sequence is synthesized)
ccactggcacattcttgctgacagtgtacagtattttctccaaggtacactccgatcggaatgtatacccatcagcaggtgtcctctttgttcatgttttggaaagagaatattttaagg

SEQ ID NO: 273591 - DNA, 120 bp, Artificial Sequence
  ENSG00000127990_2 (sequence is synthesized)
gggaatttccaccttacccaaaacctggcgagattagtaatgatcccataacatttaatacaaatttaatgggttacccagaccgacctggatggcttcgatatatccaaaggacaccat

SEQ ID NO: 273592 - DNA, 120 bp, Artificial Sequence
  ENSG00000127990_3 (sequence is synthesized)
atagtgatggagtcctatatgggtccccaacagctgaaaatgtggggaagccaacaatcattgagataactgcctacaacaggcgcacctttgagactgcaaggcataatttgataatta

SEQ ID NO: 273593 - DNA, 120 bp, Artificial Sequence
  ENSG00000127990_4 (sequence is synthesized)
atataatgtctgcagaagacttcccgttgccatatcaagcagaattcttcattaagaatatgaatgtagaagaaatgttggccagtgaggttcttggagactttcttggcgcagtgaaaa

SEQ ID NO: 273594 - DNA, 120 bp, Artificial Sequence
  ENSG00000127990_5 (sequence is synthesized)
atgtgtggcagccagagcgcctgaacgccataaacatcacatcggccctagacaggggtggcagggtgccacttcccattaatgacctgaaggagggcgtttatgtcatggttggtgcag

SEQ ID NO: 273595 - DNA, 120 bp, Artificial Sequence
  ENSG00000127990_6 (sequence is synthesized)
atgtcccgttttcttcttgtttacgagaagttgaaaatccacagaatcaattgagatgtagtcaagaaatggagcctgtaataacatgtgataaaaaatttcgtactcaattttacattg

SEQ ID NO: 273596 - DNA, 120 bp, Artificial Sequence
  ENSG00000127990_7 (sequence is synthesized)
gaggggattttacctgatggtggagaatacaaacccccttctgattctttgaaaagcagagactattacacggatttcctaattacactggctgtgccctcggcagtggcactggtcctt

SEQ ID NO: 273597 - DNA, 120 bp, Artificial Sequence
  ENSG00000127990_8 (sequence is synthesized)
tttctaatacttgcttatatcatgtgctgccgacgggaaggcgtggaaaagagaaacatgcaaacaccagacatccaactggtccatcacagtgctattcagaaatctaccaaggagctt

SEQ ID NO: 273598 - DNA, 120 bp, Artificial Sequence
  ENSG00000127990_9 (sequence is synthesized)
cgagacatgtccaagaatagagagatagcatggcccctgtcaacgcttcctgtgttccaccctgtgactggggaaatcatacctcctttacacacagacaactatgatagcacaaacatg

SEQ ID NO: 273599 - DNA, 120 bp, Artificial Sequence
  ENSG00000127990_10 (sequence is synthesized)
ccattgatgcaaacgcagcagaacttgccacatcagactcagattccccaacagcagactacaggtaaatggtatccctgaagaaagaaaactgactgaagcaatgaatttataatcaga

SEQ ID NO: 273600 - DNA, 120 bp, Artificial Sequence
  ENSG00000127990_11 (sequence is synthesized)
caatatagcagttacatcacatttcttttctcttccaataatgcatgagcttttctggcatatgttatgcatgttggcagtattaagtgtataccaaataatacaacataactttcattt

SEQ ID NO: 273601 - DNA, 120 bp, Artificial Sequence
  ENSG00000127990_12 (sequence is synthesized)
aatgtatttttttgtacttaaagcatttttgacaatttgtaaaacattgatgactttatatttgttacaataaaagttgatctttaaaataaatattattaatgaagcctaatgactggt

SEQ ID NO: 273602 - DNA, 120 bp, Artificial Sequence
  ENSG00000127990_13 (sequence is synthesized)
tggtgaaatttacttcagtaaactatttgcttcctatttagtagaaatcttttaatcgctagaaacaggtttatgtgttcattctcattccacaagactttagtgcttcctatgaatata

SEQ ID NO: 273603 - DNA, 120 bp, Artificial Sequence
  ENSG00000127990_14 (sequence is synthesized)
taaaatgcctgtgcctccgtgttccagttgagcaacccatttaaataatactttaactcttgtggcctgtaaatcctgttgttttatataccacttgggagtgttttcgaataaacctag

SEQ ID NO: 273604 - DNA, 120 bp, Artificial Sequence
  ENSG00000127990_15 (sequence is synthesized)
tgccacatcagactcagattccccaacagcagactacaggagattttcgtttgacaacttttcaaagatttgaggtaaatggtatccctgaagaaagaaaactgactgaagcaatgaatt

SEQ ID NO: 273605 - DNA, 120 bp, Artificial Sequence
  ENSG00000127990_16 (sequence is synthesized)
gcaaatttttaaacaattatattaaaatgtagaaaaatctctttgacctatggatagggaaggatttgttaagtaagacctaaatatttttaagagaaaaaatttatcaatttcactata

SEQ ID NO: 273606 - DNA, 120 bp, Artificial Sequence
  ENSG00000127990_17 (sequence is synthesized)
tgaaatttgtgaatgtctgtttatcaaccattaaaccagagcatgatttaaaaagacaacccacaaactgggagaagatattttcaacacatatagctgactaagagtatctaaaataaa

SEQ ID NO: 273607 - DNA, 120 bp, Artificial Sequence
  ENSG00000127990_18 (sequence is synthesized)
aacgaaatcctgcaatttaataagaaacagatatttcactaaagaggagacacaaacgccaataaacttaagtagcttgctcttatgggtaatgaggaatattcagatggagatcacaat

SEQ ID NO: 273608 - DNA, 120 bp, Artificial Sequence
  ENSG00000127990_19 (sequence is synthesized)
gaaaattttgccatcagtaaaatgcattgcaggtggatgtgggagttggcatcactactttggaaagcagtactgaatatctcatacagttgagtatccctgtaccttattatctggcag

SEQ ID NO: 273609 - DNA, 120 bp, Artificial Sequence
  ENSG00000127990_20 (sequence is synthesized)
tcctacttctagcaatatgccccaaagaagtacttgcaaatgccctcctggaggcaggtacaatcatgctcatcaagcaacatttgtatagcacaacactggaaagccacaaaacaatag

SEQ ID NO: 273610 - DNA, 120 bp, Artificial Sequence
  ENSG00000127990_21 (sequence is synthesized)
agacccaaaagtctatcagcaagagaatatattaatcttggtgtattcacacagtgaatgttcagagcaatagtgaacttaagcttgcccagcaatatggataagtgttttaaacacaat

SEQ ID NO: 273611 - DNA, 120 bp, Artificial Sequence
  ENSG00000127990_22 (sequence is synthesized)
gttcaattaaaaaaaagtactagaagaccacctgtaatagtttgccattttggtagagctcaaaaacaggcaaactaaaccatatgctttaagcattcatgcaattataataaaactgta

SEQ ID NO: 273612 - DNA, 120 bp, Artificial Sequence
  ENSG00000127990_23 (sequence is synthesized)
ttttaaatgaatggatcgttaaacaccaaatccagaatgactacttctggttggggagaggtaagggcttaggctaggagagaaacacatgtactgggatggtttcataagagttcattg

SEQ ID NO: 273613 - DNA, 120 bp, Artificial Sequence
  ENSG00000127990_24 (sequence is synthesized)
tcataagagttcattgtgagtgcattcattatatactttatgactaacatactgtgttatgaatatgtataaaaatatagtaaaaagataaaaaaaagaaagtttaccatatctttcata

SEQ ID NO: 273614 - DNA, 120 bp, Artificial Sequence
  ENSG00000127990_25 (sequence is synthesized)
ttcattcagtagatttttatctgaaatatttagattttaagtatctaaaatagatcagctctgttttagaaattggggaatcaaaaataaagtatgcacacgtagacactcacattttct

SEQ ID NO: 273615 - DNA, 120 bp, Artificial Sequence
  ENSG00000127990_26 (sequence is synthesized)
tctgctttgacggtcttcacatcatcataataagtaaaatctgaggatattacagcagttaaatgtctcattggaagtgatagaaggactacattctgttatagctgttaaaattaagca

SEQ ID NO: 273616 - DNA, 120 bp, Artificial Sequence
  ENSG00000127990_27 (sequence is synthesized)
tcaactataaaatcaggtaataaaattcttcctcctgatatgaaatattcttcactcccttcaatagtctgcattatttaaaaataaagacatttattggaatttatgaaacttataata

SEQ ID NO: 273617 - DNA, 120 bp, Artificial Sequence
  ENSG00000127990_28 (sequence is synthesized)
atgaaatttgtgatgattaagggaaggctacccataaaaatattgctattaatttgaaaaaatctattttttttctaagctgaagcttcatgatattgtaacaaatagtagaggatcata

SEQ ID NO: 273618 - DNA, 120 bp, Artificial Sequence
  ENSG00000127990_29 (sequence is synthesized)
ctttttattgaaaatgtgattaaattttttgcagggtaaacttttcaaatgattaagtttctcaaacaaaatctattttgcattttttgtatgtttcatttgagcaaaagttcctagttt

SEQ ID NO: 273619 - DNA, 120 bp, Artificial Sequence
  ENSG00000127990_30 (sequence is synthesized)
gtttaatggctagtcttaattttaatgtccggtgtgaaattaattgatcatgtgtcccaacagataacagcaaggaaataattaaatatgatggaaatttggcaaatcctggagagagag

SEQ ID NO: 273620 - DNA, 120 bp, Artificial Sequence
  ENSG00000127990_31 (sequence is synthesized)
caatgactgcaacttattttttgacacatgtaatgtataaaaatctttgatatttgttttaaaatgcacaagatatttatttttagttgaagtcagttttatcctactcttttgtctcag

SEQ ID NO: 273621 - DNA, 120 bp, Artificial Sequence
  ENSG00000127990_32 (sequence is synthesized)
tgtcacctccagctgcaatcattgccagaaggttagtgctgggattctaagattttgacacaatcatttgtttttttttttttttttgaggtactgcagatgtgtccgaatgatttaata

SEQ ID NO: 273622 - DNA, 120 bp, Artificial Sequence
  ENSG00000127990_33 (sequence is synthesized)
tctgttataaagttaaataggccttaagttttgaagccatatcctgttgttggcctttgctttgtgtgttgtttgcactggctgtttctgaattgactttgatgtaagtctattggctct

SEQ ID NO: 273623 - DNA, 120 bp, Artificial Sequence
  ENSG00000127990_34 (sequence is synthesized)
gcaaatgtttactaatatttgcccgtatgaagggattgatttgtgtttttgagcatgttccataagcttcatggactatgatccttactactttactcccatcgtaagtgagatatgatt

SEQ ID NO: 273624 - DNA, 120 bp, Artificial Sequence
  ENSG00000127990_35 (sequence is synthesized)
tccaaagggttatttatgacattttttgactgattggggtgcagtttagtactaaatgcaaaaaaacacaaagatatgcttgttttaaagtgtacttttcattataattcttaaactcca

SEQ ID NO: 273625 - DNA, 120 bp, Artificial Sequence
  ENSG00000127990_36 (sequence is synthesized)
tttaaaagtacaaaaattattgttttttttttgaaatcttagaacatcactggtaagtaattcataatggttaatccatttactaatgatgcatctgcattgctaccagtgcttaatggc

SEQ ID NO: 273626 - DNA, 120 bp, Artificial Sequence
  ENSG00000127990_37 (sequence is synthesized)
cttctatgaaagagtctttctgattttaactttttgtttcagtatattaaatagacctgactaattatttattttcccataatattgctaaaagctctgagttctcattgcccagagaag

SEQ ID NO: 273627 - DNA, 120 bp, Artificial Sequence
  ENSG00000127990_38 (sequence is synthesized)
gaatattttgtaagtatatcaacaaataatgaaaatggaaagaatgacaatttgttttcattttaatccttaatgaatttcattttacaaagaacatttcacttctttaatatggttttc

SEQ ID NO: 273628 - DNA, 120 bp, Artificial Sequence
  ENSG00000127990_39 (sequence is synthesized)
gctaagaataataaattaatgtttatgaatgaatctaatagattaaaagataattatggcactatataatttatgaagctttatcttcaccaaataaggcaaaacacttgtgtcattcct

SEQ ID NO: 273629 - DNA, 120 bp, Artificial Sequence
  ENSG00000127990_40 (sequence is synthesized)
taatcagacttaaaacctcagaataatagcttagattattacatagattggcatcagaatgataaacacagggtaaatgatcttagagcaaaagcatccatggaggtcctgtctaattaa

SEQ ID NO: 273630 - DNA, 120 bp, Artificial Sequence
  ENSG00000127990_41 (sequence is synthesized)
ggaagactgaatgaaacccctttccttcagtgaagttccctattcttccccttggtatgaaagattcttagcttggatgcatccaggatttgtctcagtaagtgagcagcttgaagtttc

SEQ ID NO: 273631 - DNA, 120 bp, Artificial Sequence
  ENSG00000127990_42 (sequence is synthesized)
aagctctcttacaaaaggaaaccattgtgactaatcactgaggcttcagggggataaatgagaaatggctggcctggttttaaagccgctttaaaaagctgttataacatgaccaatgac

SEQ ID NO: 273632 - DNA, 120 bp, Artificial Sequence
  ENSG00000127990_43 (sequence is synthesized)
agacaaatgaagtagtggacagagaaagacttgacagtttgcttttaagcttttttattaagctgtgctgatggcataaatggaacagttaactggaagaccagacaggccaacaatttt

SEQ ID NO: 273633 - DNA, 120 bp, Artificial Sequence
  ENSG00000127990_44 (sequence is synthesized)
tctgcagaaggtgtttaccggtatcaattgtagacaacaaatgtgcaagtttaaaatttaaaatgaccttcatatatgaaaagcaagtccaagtgccagttctgtgggcctggactgaag

SEQ ID NO: 273634 - DNA, 120 bp, Artificial Sequence
  ENSG00000127990_45 (sequence is synthesized)
taaaaattttccacagccaattatttcattcatctctatactgagtagataacttattcatgattgtcttctaattagtggttgattcctagttctaattgccagggaaccattaatgcc

SEQ ID NO: 273635 - DNA, 120 bp, Artificial Sequence
  ENSG00000127990_46 (sequence is synthesized)
tttgtagctcttttggaaaagcaagagaagttttaaaaatgtaagttgggtgtggaattctgagtatgaatagcggcattgtggtagggaaactattaagtaagtctcttaaaaacttca

SEQ ID NO: 273636 - DNA, 120 bp, Artificial Sequence
  ENSG00000127990_47 (sequence is synthesized)
atggggtcccacacctgagccaggcgcggtctccactgggtgctccgcagcccggagtggctccggacgacagcccgctcagcggacctttcgccaggctcggtggaccttctccgctgt

SEQ ID NO: 273637 - DNA, 120 bp, Artificial Sequence
  ENSG00000127990_48 (sequence is synthesized)
tagcttttcttagttgttttgccaaattctataactataaattgccctgatgagcctctgatgagccttggattttattatattgtagataaagttctgtttctaatgtcagttatgttt

SEQ ID NO: 273638 - DNA, 120 bp, Artificial Sequence
  ENSG00000127990_49 (sequence is synthesized)
ttagatacatcctctgttaaacagaaagcctttaaagtcagtattaatattgcttcctgctgccaggattatgacagaactcaacaaatcgcaaattgttcttttgtttcctttttaaaa

SEQ ID NO: 273639 - DNA, 83 bp, Artificial Sequence
  ENSG00000127990_50 (sequence is synthesized)
aaggcataatttgataattaatataatgtctgcagaagatggagtcttgctctcaactgcaacctccgcctcctgggttcagg

SEQ ID NO: 273640 - DNA, 120 bp, Artificial Sequence
  ENSG00000127990_51 (sequence is synthesized)
gcagcagaacttgccacatcagactcagattccccaacagcagactacaggtatcttttggtgaatagatactctttatcttaaggtatcttttggtgaatagatactctttatcttaag

SEQ ID NO: 273641 - DNA, 120 bp, Artificial Sequence
  ENSG00000127990_52 (sequence is synthesized)
atgcatgtatatttttactaatatctgtaaagaacagagctttctgttgttgtgtttgtttgtttataactggaagagaaaataacaaaaggacattgtgtaaatctcacccctactctc

SEQ ID NO: 273642 - DNA, 120 bp, Artificial Sequence
  ENSG00000127990_53 (sequence is synthesized)
ctgaaatatacaatacaattacttttaggaaatgcactttttttcccccactgatccaaacaagactacatataccttaatatttaagaaattgacactgatattaaactcaacattaca

SEQ ID NO: 273643 - DNA, 120 bp, Artificial Sequence
  ENSG00000127990_54 (sequence is synthesized)
tgtttgctcaaagatgagttaattataaaaaaaagaaccatatcctaagcatttcaaattgattatttttagagatattagaattatttggtttaaacctattaaaatgttattaccata

SEQ ID NO: 273644 - DNA, 120 bp, Artificial Sequence
  ENSG00000127990_55 (sequence is synthesized)
gtgtgtgtgtgtgtgtgtgtgtgtgtattgtaatttgagttttaagtgttgaaactaaagttacctgatggtggtttttaatattttgtgcatggaaacacagtagataacatttggaaa

SEQ ID NO: 273645 - DNA, 120 bp, Artificial Sequence
  ENSG00000127990_56 (sequence is synthesized)
aacatttggaaatgtgccattcttctctgtttataaagtttttgtttcagcttttatattaaaaatgacagtctaaatttgtgaaaaaaatatgaccttaaaagagattattataatatg

SEQ ID NO: 273646 - DNA, 120 bp, Artificial Sequence
  ENSG00000127990_57 (sequence is synthesized)
aattctatttgagaaaataattgtagacttgatagacttatttgctctgtattttgaattcaagttttatgttcattgaaatatagccatcaacagacatatacccctgctacttgccaa

SEQ ID NO: 273647 - DNA, 120 bp, Artificial Sequence
  ENSG00000127990_58 (sequence is synthesized)
ataggtgaatcttgcccagtcttcttacaattcaggggttggaggactgggatgtaaacaaatacttagccaacactgtaataactgctatagtaagaaggtgctgtttgatgcagagtt

SEQ ID NO: 273648 - DNA, 120 bp, Artificial Sequence
  ENSG00000127990_59 (sequence is synthesized)
gtaagaaggtaaagaatttacttgacaaagtagaaggaaggccatcttgggcggaggaaacaacacatcaaaatcttagaggtataagaaaagtcacatggtctcagagaactataagtg

SEQ ID NO: 273649 - DNA, 120 bp, Artificial Sequence
  ENSG00000127990_60 (sequence is synthesized)
tggctggaataggatgtaccctagtaggtaaatgatgggaatgggaggcgttgatgctggtaggggcagatctttgagggctctgtaagccatcctggtacgtttagcctttattctaga

SEQ ID NO: 273650 - DNA, 120 bp, Artificial Sequence
  ENSG00000127990_61 (sequence is synthesized)
agtgatggtgatgttaccattcatcaggtcctcaccagcacctagcattgtagctgggagatactagaaattaacaacaacaaaacaactgttacattgaatctttagtaggaattaata

SEQ ID NO: 273651 - DNA, 120 bp, Artificial Sequence
  ENSG00000127990_62 (sequence is synthesized)
caatactttaaaaaaatgaatggatgtataaactaaaagaatacagcctttcagaggattacatactatgaatttttctccaaagttttagtcagctgtgtactgtggatgtgagcttcc

SEQ ID NO: 273652 - DNA, 120 bp, Artificial Sequence
  ENSG00000127990_63 (sequence is synthesized)
acattggccaattcagttggaattgaagtttgtattaactgttcagtgatttctatctataaatcatattccttaaggcagtgtaactataagatagacaggtacttagaagaagcatgt

SEQ ID NO: 273653 - DNA, 120 bp, Artificial Sequence
  ENSG00000127990_64 (sequence is synthesized)
attcagaaattatcttctctattactgctttcgtgaatttaaggagattttcgtttgacaacttttcaaagatttgaggcaagtataatgaaattgttcatcagatttcaattacaagat

SEQ ID NO: 273654 - DNA, 120 bp, Artificial Sequence
  ENSG00000127990_65 (sequence is synthesized)
gtttatcagaatttttccctacaattttgattacttgctttaattaaatgctaacatgtttcaacaagactgttcaatatattgatgtgttggtgctactttgtaagcattcaggagatt

SEQ ID NO: 273655 - DNA, 120 bp, Artificial Sequence
  ENSG00000127990_66 (sequence is synthesized)
gatgaaggaacaaactttgttataaaaatgagtcacctaaagagagaaaaaagataaatgaatccctactaccactaatttcacagctattttttaaaaggaaaatttctaaaagaatac

SEQ ID NO: 273656 - DNA, 120 bp, Artificial Sequence
  ENSG00000127990_67 (sequence is synthesized)
ttctacgatagaaatgatagaacttcttcgttattaaccttgtagcttccatctcgcctaagatttctatcttctgattcttaattatttcaggcatggagtgagtaggaagcaggcaat

SEQ ID NO: 273657 - DNA, 120 bp, Artificial Sequence
  ENSG00000127990_68 (sequence is synthesized)
ttctagaaaaacagtaaatatttattttgagtatttaaaaatccagattttacttacttacccactaggggaattaggaaacttgagtagatgatattagggcaatttgtttagtagtca

SEQ ID NO: 273658 - DNA, 120 bp, Artificial Sequence
  ENSG00000127990_69 (sequence is synthesized)
catagattttttagcaagtactcttgttaacttgctacattttagtaatacagagcacttccaaatacaaggacaatttatgcctaaacaaatataagagccaaagagttttcctagggg

SEQ ID NO: 273659 - DNA, 120 bp, Artificial Sequence
  ENSG00000127990_70 (sequence is synthesized)
attttaaggttgtttaacctaatttataaaattatttttctgaaacagattttagggagcaggtattttgcttgagtcaagaaagctttgctctcctttttagttaacactagagcctat

SEQ ID NO: 273660 - DNA, 120 bp, Artificial Sequence
  ENSG00000127990_71 (sequence is synthesized)
taccttcttgttttcttacatttttctgcaatttggatcatattatagactaaagtacagtatctcctcttggttgttttgttgttattgttttatttagtgagtccccaaaatatctta

SEQ ID NO: 273661 - DNA, 120 bp, Artificial Sequence
  ENSG00000127990_72 (sequence is synthesized)
cttaagtgccaaagggagagagaccaccctagcatttttttttataattatgcaagattggtgtgtttgtgcctctggtacatttaaaactaaatggaggctgggtgcggtggctcacac

SEQ ID NO: 273662 - DNA, 120 bp, Artificial Sequence
  ENSG00000127990_73 (sequence is synthesized)
agtgctgggattacaggcacgaaccaccacacctggcctgtagttgaattgtataaatcatggaatgatcctccctatgttagatatcatttatgagaatgacaggagggaaactgatcc

SEQ ID NO: 273663 - DNA, 120 bp, Artificial Sequence
  ENSG00000127990_74 (sequence is synthesized)
actgatccagaattttttccctctaaaaacaagaaaacaattgtgcattcttgataggggaatttttgcttctatttactagtgcaactaaaaacaaatgagcaaacaccaaacatttta

SEQ ID NO: 273664 - DNA, 120 bp, Artificial Sequence
  ENSG00000127990_75 (sequence is synthesized)
tcagaacctactaatttagcattaatgataatgcagtcaaggctgggttaaaaattacttttacacgatatgaaagaaggaatttctgtaaaattaaacgtgtatggagagattgcttga

SEQ ID NO: 273665 - DNA, 120 bp, Artificial Sequence
  ENSG00000127990_76 (sequence is synthesized)
atgcttacatgctgtctaagctggccctgtagaattggaatacacttaatgagcagaataattgaaaagtttccttcctccttaggaattcatcattacagttataaagttatactacag

SEQ ID NO: 273666 - DNA, 120 bp, Artificial Sequence
  ENSG00000127990_77 (sequence is synthesized)
acaaattgaaagcttgttctatagtttgaacttcttccttctcaaatctagtctcagtgctgtagatacagattactcaaggcatctcaatagatgttgttgttgacgtatgaggacctg

SEQ ID NO: 273667 - DNA, 120 bp, Artificial Sequence
  ENSG00000127990_78 (sequence is synthesized)
tggtcaagtagatactaatggaagactgctagacaactgtaggattgaaaattggcagcagggctctttgtctaaataacgggtttggaaggtgtgctagtgagaaggagtagtagacag

SEQ ID NO: 273668 - DNA, 120 bp, Artificial Sequence
  ENSG00000127990_79 (sequence is synthesized)
gttttagaagcctccacctttactccaggcagtgcttgttcctctgctttttgtgtagggttagtggcccaaacctatttgaaccactgcactaaagtccatgcatttgtccttgctggt

SEQ ID NO: 273669 - DNA, 120 bp, Artificial Sequence
  ENSG00000127990_80 (sequence is synthesized)
ctagacagaaatgtatatgtgcagtaggatgtacatgtttgagcatggcctacactcatgttatttatcccagattagatttaggaaaagaaataacaaaagttatatatcagggtaatc

SEQ ID NO: 273670 - DNA, 120 bp, Artificial Sequence
  ENSG00000127990_81 (sequence is synthesized)
atgctctgtccaactccctgcccagctgtctcctgttctgagagatctaatgggaaattagtcatgtagactcacaccgcatgaagctcaaggagagtacataaagtgattctctaaatt

SEQ ID NO: 273671 - DNA, 120 bp, Artificial Sequence
  ENSG00000127990_82 (sequence is synthesized)
gggtttagtgcctcagaggcctgccaccaatctgttggcctactgttctcttggcctctgtgatttccaaatatagcaggcatgggatttccccagagttagaaagctgctgtgactcat

SEQ ID NO: 273672 - DNA, 120 bp, Artificial Sequence
  ENSG00000127990_83 (sequence is synthesized)
ctctgggaggcctggcagcagctcttggatgggtagatagcaggcagctgcccagctcaaagcctctgaggggtgtggtggcaaccacaggctttgcagcaggtctcagaaaaggagcca

SEQ ID NO: 273673 - DNA, 120 bp, Artificial Sequence
  ENSG00000127990_84 (sequence is synthesized)
tgaagctgggtcacgtggaacaggaaaagccagataataattctccaaaaagtagcactgatcataagaaaaaagttttagatactttttaagaaaactggatgtaaaaacattgaatga

SEQ ID NO: 273674 - DNA, 120 bp, Artificial Sequence
  ENSG00000127990_85 (sequence is synthesized)
aatgaatagattttagacttctggcatattcaaaagctgtatttgtattatttataaatattttattatttattgccaagaaactttctcataacacatttctgcatgactatttctagg

SEQ ID NO: 273675 - DNA, 120 bp, Artificial Sequence
  ENSG00000127990_86 (sequence is synthesized)
tatgcagataaatgtagcatgattaagctatttatctgtataaaacaggaaatatgtctataaaacgaaatttatttgcatatatgagaataaatatattttaaattgcagatgggctat

SEQ ID NO: 273676 - DNA, 120 bp, Artificial Sequence
  ENSG00000127990_87 (sequence is synthesized)
caaacgcagcaattgttgtatttggaacataatatttgcctggctgaaataattcatatcaatggttttcaaactgttttttacagatttcttagaattgctgtaggggccagcatgagg

SEQ ID NO: 273677 - DNA, 120 bp, Artificial Sequence
  ENSG00000127990_88 (sequence is synthesized)
gacaaagaaaacaaagctgacaggattcctaactcccttgtttcaacccaggcaacctcacatttatctcttttgtacatcacagttctgcttagggtttcaattaagaggaatcccagt

SEQ ID NO: 273678 - DNA, 120 bp, Artificial Sequence
  ENSG00000127990_89 (sequence is synthesized)
gctaaagagaaaacaaaaaactgaaaatccccagcttggatcaaactttattacaaaggactgactcctggagtttcttccatacagaacctaaattgtacattttcataaactaatttt

SEQ ID NO: 273679 - DNA, 120 bp, Artificial Sequence
  ENSG00000127990_90 (sequence is synthesized)
tattgaaatgtgtgttatttaaatgacataatcagatttgtgtcttagaacagtggtccccaagctttttggcaccaggaactggtttcatgtcagaccaggagtgggggatggtttggg

SEQ ID NO: 273680 - DNA, 67 bp, Artificial Sequence
  ENSG00000127990_91 (sequence is synthesized)
actggtttcatgtcagaccaggagtgggggatggtttggggtggtccaagtgcattgtatataactc

SEQ ID NO: 273681 - DNA, 75 bp, Artificial Sequence
  ENSG00000127990_92 (sequence is synthesized)
accataatgtagaatcagtgggagccctcagcttgttttcctgcaactagacagtaccatcagggggtgatgggg

SEQ ID NO: 273682 - DNA, 120 bp, Artificial Sequence
  ENSG00000127990_93 (sequence is synthesized)
tgctcctatgaccgtctactgctgccgctggtctgacaggaggcagaacccaggtggtaatgcaagtgatggggagcacctgtaaatacagatgaggcttcgatggcttacctgccactc

SEQ ID NO: 273683 - DNA, 120 bp, Artificial Sequence
  ENSG00000127990_94 (sequence is synthesized)
acctcctgctgggcagcccagttccgtgtcccaggggttggggacccctgtcttagaagattattctgacagcaatgtgcagagtggattataaggggacaagaatgtaaatgaggaaac

SEQ ID NO: 273684 - DNA, 120 bp, Artificial Sequence
  ENSG00000127990_95 (sequence is synthesized)
aagtcaatccccttacaaggatccaagtgagaaatgatgatggcttcaaccaagttagcaatggagatggggaggaatggggcagatccaaatgagacaaaaagaaatgtcaaaagtccc

SEQ ID NO: 273685 - DNA, 120 bp, Artificial Sequence
  ENSG00000127990_96 (sequence is synthesized)
cacgaagataaaagagcacagatgtttgggatagtgaatgaaggtggttatatatgttgttccatgaaaatgtgtgatctggatctgaaagtgtataggttaagagcacaagccactgtg

SEQ ID NO: 273686 - DNA, 120 bp, Artificial Sequence
  ENSG00000127990_97 (sequence is synthesized)
ttcacatctttacctaccatgtcctagctatgtggccctggatctccaaggctatttcttcacccataaaatgggaaaaatattaacacctacctcttagggttgttgtgaggtacttta

SEQ ID NO: 273687 - DNA, 120 bp, Artificial Sequence
  ENSG00000127990_98 (sequence is synthesized)
gagtatagcccgcagtgaaaatttcatgcatgttatcaaatattgttaatttttattctcctcagacctcagtttcctcatctgtaagctcatgaaaggggaggggaattgtgctggatt

SEQ ID NO: 273688 - DNA, 120 bp, Artificial Sequence
  ENSG00000127990_99 (sequence is synthesized)
gcagcagaacttgccacatcagactcagattccccaacagcagactacagaaattatcttctctattactgctttcgtgaatttaaggagattttcgtttgacaacttttcaaagatttg

SEQ ID NO: 273689 - DNA, 120 bp, Artificial Sequence
  ENSG00000127990_100 (sequence is synthesized)
cattattagattaaagaaggaaaaacagcataattgtcatgatagttatggaaaaagtgtttattaaaatttactacctattcttgataagaaaaaatagctcttggcaaactaggaata

SEQ ID NO: 273690 - DNA, 120 bp, Artificial Sequence
  ENSG00000127990_101 (sequence is synthesized)
gaagtgaagttccttaatttgccagtttttaccaaaagtaatagcaaacatcattcttcatagtaaaatgttagagaaatttcatttaaattcaggaacaaaacaagaatgactctgtct

SEQ ID NO: 273691 - DNA, 120 bp, Artificial Sequence
  ENSG00000127990_102 (sequence is synthesized)
gataaatctattacagaatgtattggaggtcccagccagtacagtaaagaaagaaaaagaaattaaatccctaaggatttaaaaagaagaaatggaaaccatcaatgatataaatggtct

SEQ ID NO: 273692 - DNA, 120 bp, Artificial Sequence
  ENSG00000127990_103 (sequence is synthesized)
gtagactattaagaatcttaagaaaggctagcagtgaactgtgagatcattataaattactgttatatttctacacatgaatagcatgtattgagaaaatacacgtttttaaaaatacca

SEQ ID NO: 273693 - DNA, 120 bp, Artificial Sequence
  ENSG00000127990_104 (sequence is synthesized)
ggggaagccaacaatcattgagtgtcacctccagctgcaatcattgccagaagctctgagttctcattgcccagagaaggaatattttataactgcctacaacaggcgcacctttgagac

SEQ ID NO: 273694 - DNA, 120 bp, Artificial Sequence
  ENSG00000127990_105 (sequence is synthesized)
aacgaaatttatttgcatatatgagaataaatatattttaaattgcagatgggctatacattaaggaaatctaacaaaattgtaagcagaacaagtgacaatataggagataagcaaaga

SEQ ID NO: 273695 - DNA, 120 bp, Artificial Sequence
  ENSG00000127990_106 (sequence is synthesized)
actttctatgattagggctttgaaaaactaaatctttaaaaagtgatgaccacactctagaaaactctgttgaaaattctgaagcgttagtttcttctttgacttcatctcaggcatcaa

SEQ ID NO: 273696 - DNA, 120 bp, Artificial Sequence
  ENSG00000127990_107 (sequence is synthesized)
atgtcctttaataggatgcttcataagaaataagttaaccaagattttaggtacttaatgtaatttttattttttgttcattaaataaaagtggaatatcttacagatacatgaatttta

SEQ ID NO: 273697 - DNA, 120 bp, Artificial Sequence
  ENSG00000127990_108 (sequence is synthesized)
ttgaaataaatgagaggatatacatagtgtaattactactggggactttaaatctgtgtagcacctagaaacattttcttgtctttttaaagtaaaaattcagataatcaaccttttcat

SEQ ID NO: 273698 - DNA, 120 bp, Artificial Sequence
  ENSG00000127990_109 (sequence is synthesized)
attattataattagagctaacatttaatattttataggctcctactatgttttgggagctctgctgagcaccttatatatgcagtctcttttagcatagataaaagtcgtacaaggtaag

SEQ ID NO: 273699 - DNA, 120 bp, Artificial Sequence
  ENSG00000127990_110 (sequence is synthesized)
ttcacattatgagataagcttctggacctctctaaagataagctttcacgtatgaaagtacaatgaaaaacacaagcagctacacaccctcttgttgtgagaattaaatgttctaattca

SEQ ID NO: 273700 - DNA, 120 bp, Artificial Sequence
  ENSG00000127990_111 (sequence is synthesized)
cctaagtcccctagcttggcctgcctcacagtacatacatttaaaaaattaacctttattcttacagaaatattattaaataaacagaaagctattatttatcgtaagagaacaattaga

SEQ ID NO: 273701 - DNA, 120 bp, Artificial Sequence
  ENSG00000127990_112 (sequence is synthesized)
atatagagagtgatgatttgtaattgaagagtagcatttgagtaacaaattatatttacttacagtttctcatattgaaaggctgaatttgacatggggttgttttaagatgttaatcat

SEQ ID NO: 273702 - DNA, 120 bp, Artificial Sequence
  ENSG00000127990_113 (sequence is synthesized)
gaaatatttagagggaaattttgatgacacattgaggaggaaaaaacactaaatctccaacaatgtgaagtggaattccatgagaactttataatttttctagaatatttaattatagtg

SEQ ID NO: 273703 - DNA, 120 bp, Artificial Sequence
  ENSG00000127990_114 (sequence is synthesized)
aagagaaacatgcaaacaccagaagaacagatgaaaagacctttcatacaagttttccagaatctacagtaataacctaccataaaatgaaacttctcatccaactggtccatcacagtg

SEQ ID NO: 273704 - DNA, 120 bp, Artificial Sequence
  ENSG00000127990_115 (sequence is synthesized)
gcagatctttatctcattgccttaaatatagatttttaaatacggtgatcttatcaaacttattatagatggaagatggcctattgcatttttcgttttaataagaaatagatattgtaa

SEQ ID NO: 273705 - DNA, 120 bp, Artificial Sequence
  ENSG00000127990_116 (sequence is synthesized)
agatatgaacatactagtaattttctatattggcaaagatgttgtgttagtggttttttatatctcaagttcctggtctgtgaaatctaattgtagatgaggatcagcatcataaattat

SEQ ID NO: 273706 - DNA, 120 bp, Artificial Sequence
  ENSG00000127990_117 (sequence is synthesized)
agcactaagtcttttgtaccttccattaagaagctgattatttagggccatgaatttcaaaggaaattgacgccccagttattagctgcagaaggatgcacagactgctgtaactttatt

SEQ ID NO: 273707 - DNA, 120 bp, Artificial Sequence
  ENSG00000127990_118 (sequence is synthesized)
ctaggaaactatttcttcatctttaacattctttccaccatgtgtcagtgactgatggctggggtggatttgaaacccattcctgtgacacaaaggcctaaagcctgaccttgtcactca

SEQ ID NO: 273708 - DNA, 120 bp, Artificial Sequence
  ENSG00000127990_119 (sequence is synthesized)
ttgttataatgattaagtgagataatgcatttgaaaggtatttgtcagttctgaagctgtgcagatagaaagcatgacttctgaccttgtggaggtcaagaaagaatcctgcctgggtaa

SEQ ID NO: 273709 - DNA, 120 bp, Artificial Sequence
  ENSG00000127990_120 (sequence is synthesized)
agttattatcaagacaaactttgatctttaatttttaatctgtaggttgaggcagatttgcttttcctacctcaatcctataaaagtatagtctgtggaataaatcacattttgcatagc

SEQ ID NO: 273710 - DNA, 120 bp, Artificial Sequence
  ENSG00000127990_121 (sequence is synthesized)
atattcccctttcaacttcttcgcccataatcctggaaacacttttatacaggtgatatctagaattagctagaatacctggattagtaagaattaaatttaaggatagctttaaaggag

SEQ ID NO: 273711 - DNA, 120 bp, Artificial Sequence
  ENSG00000127990_122 (sequence is synthesized)
aactatgtacacatggatgcagtctgtgggtaggtaaaaggcagatggggaaaaacagtgagctgtaaagtccaacttaaaaatttcagaattaaattttatcttctgttttatagcaat

SEQ ID NO: 273712 - DNA, 120 bp, Artificial Sequence
  ENSG00000127990_123 (sequence is synthesized)
ggattttgaaatcagtcaagcatacatagaagtcctttgaggaaaatggttgctttatctcttgtctatgtacctagttggctttctatatgaaaacataattctagagcttaaattttt

SEQ ID NO: 273713 - DNA, 120 bp, Artificial Sequence
  ENSG00000127990_124 (sequence is synthesized)
acttcatagttacagttacaacatggttctctttcctataaagtaattaaagcagaaccgtggaatgagatgaatgggggtatcttccctgaaggcattctccaaatatggggtttttaa

SEQ ID NO: 273714 - DNA, 120 bp, Artificial Sequence
  ENSG00000127990_125 (sequence is synthesized)
aacagttttcttaaggtaatgtgttccacaattgttaaaacaatgaccaaataatgttggaggaaacagcacaaaaacaaggcattggtagagtttttcattgttgtgctttattctggt

SEQ ID NO: 273715 - DNA, 120 bp, Artificial Sequence
  ENSG00000127990_126 (sequence is synthesized)
ctcactttttctcgttagtagtgcaggtcccacccgtcgaggtacttttagaacctgaactaaactaaattgaaccaagcaactccataaaccaaactgtgacctaaagcactgctttcc

SEQ ID NO: 273716 - DNA, 120 bp, Artificial Sequence
  ENSG00000127990_127 (sequence is synthesized)
aactatgtctagcctgaaaattgccaatagaacattactaaaaatatagataggttcctggcctttgttccccctagagactgattctttgagcctagggctgggcctgagcatgtgact

SEQ ID NO: 273717 - DNA, 120 bp, Artificial Sequence
  ENSG00000127990_128 (sequence is synthesized)
ctatattaagaacagaatttttgtcctacaagtacttgtttgagaattcaatcactaactgactgacccccaacacccaacacctgctagagggtggcacatgccgtcagatatttgaga

SEQ ID NO: 273718 - DNA, 120 bp, Artificial Sequence
  ENSG00000127990_129 (sequence is synthesized)
gaatcagtcccgtggcatttatttggactcttgtctcagatcccttcccaacttgaaacgctttccatgagttttaatttaatgttaagccttaacctttacaaaatattcatatggagt

SEQ ID NO: 273719 - DNA, 120 bp, Artificial Sequence
  ENSG00000127990_130 (sequence is synthesized)
tattaaaagtatgtgagatgtatgcctttctgaaatagtttattgaatgcccaaagtgccataatgtcttattattttaaaagataaaaatacttcataagtttttcaaattgatgaccc

SEQ ID NO: 273720 - DNA, 120 bp, Artificial Sequence
  ENSG00000127990_131 (sequence is synthesized)
attaacattatttcaaatggtctaaatatgtgataaattgttgtaggatatttctcatttacagattagaaatttaattacagacaaaaataatttatttttgaatgttaaggaaagcat

SEQ ID NO: 273721 - DNA, 120 bp, Artificial Sequence
  ENSG00000127990_132 (sequence is synthesized)
atttttgaatgttaaggaaagcatatttctggattctcagtcttgagttttatgtctctgacaagtgatctacctatattcacatggaaataattatagctgtaaacttatgattttcta

SEQ ID NO: 273722 - DNA, 120 bp, Artificial Sequence
  ENSG00000127990_133 (sequence is synthesized)
tattaagacctagattctcacatagtacattgatttttggaaaactatacatatgttgtagaggagaatgaaaaatggcattaggtaagagcttttaaaaagcttttacaataggagata

SEQ ID NO: 273723 - DNA, 120 bp, Artificial Sequence
  ENSG00000127990_134 (sequence is synthesized)
tatataactccataataatattatggagattaatttttccttttaagtgataccaattatgaagtcttacttaattcactattggtttaaatatgttattttgagtgatcataaatgcca

SEQ ID NO: 273724 - DNA, 120 bp, Artificial Sequence
  ENSG00000127990_135 (sequence is synthesized)
gccatcaagttaatgaagatatacaaagaatagcaagagaaaacatatcattacagctcttccttaagcagcaaataaaagtgaattttctgaaaattatattgtataagaatgttttta

SEQ ID NO: 273725 - DNA, 120 bp, Artificial Sequence
  ENSG00000127990_136 (sequence is synthesized)
tgaatactgtacctgaaaactcttccacaatatagttagccatgttcctaatagtattcaagaagatgaaatacggcttgtaaagcatttaacacagggccaggatgtgctaataaatga

SEQ ID NO: 273726 - DNA, 120 bp, Artificial Sequence
  ENSG00000127990_137 (sequence is synthesized)
tgctgttattattgcttgtgattaataaatgctgtcgttagtacagttgttatggatttgtaacgtctttttcatcctatcctccagtgttttaaaattacattatttttgttttgatga

SEQ ID NO: 273727 - DNA, 120 bp, Artificial Sequence
  ENSG00000127990_138 (sequence is synthesized)
gacttttataattttggaatatctttcatactcatatgatagtgtccagagtttcatgaacggaatatttcgcaaaagaatgagtacattagcatgattagggaattctcctgaaagata

SEQ ID NO: 273728 - DNA, 120 bp, Artificial Sequence
  ENSG00000127990_139 (sequence is synthesized)
gttgtctcactggcagaactatatcactgttaggtgaccaaaaatatatttccaagaaaattgtatgaatctgctttctttgttgcatcagattttgaaacaaattaaacaaccaaaagg

SEQ ID NO: 273729 - DNA, 120 bp, Artificial Sequence
  ENSG00000127990_140 (sequence is synthesized)
attttttttaacgtggtgccctaatttaaattcccagatgggttttgtatgtgtgtatttagttggctacaaatgtaagaaaaaaattttagacagaatgttttgattgaaactaccaaa

SEQ ID NO: 273730 - DNA, 120 bp, Artificial Sequence
  ENSG00000127990_141 (sequence is synthesized)
agaatttatttcaatcaaggccttgattcttaatctccatttttttcatttttctatgtgtttctcatcagtattccatcgctgtatgtgtactcatccaagcaatgtcataaacctggt

SEQ ID NO: 273731 - DNA, 120 bp, Artificial Sequence
  ENSG00000127990_142 (sequence is synthesized)
ggcaaatgctgcctggttgcatttaatagtgacaatgtcagcatttccacatcatgcaagatcccatgagcatatagtcttaatgttccaaatatcaatgctattatttaattcataaat

SEQ ID NO: 273732 - DNA, 120 bp, Artificial Sequence
  ENSG00000127990_143 (sequence is synthesized)
attagagatcctgctaagataacaacatagaagattccattaaaagcaaagtttcatttggttcataaaacactttgtaaatgaattgaaattgtgtccaaactgcaatactttattcct

SEQ ID NO: 273733 - DNA, 120 bp, Artificial Sequence
  ENSG00000127990_144 (sequence is synthesized)
ttaaaatgaattaaaatagttttgagtctagtaaatcaaattaggggatataattactttattcaaaaattattaaggctagatgtaaattcacactggcaaaacagtcccaagaataat

SEQ ID NO: 273734 - DNA, 120 bp, Artificial Sequence
  ENSG00000127990_145 (sequence is synthesized)
tgaggctagatattttggttatacaagccatcttgcatgagcagagactgcagaatctactgacatggtaattgcacttaaaaaaattgtgttagtttgatcagaagtgatggtcaaaac

SEQ ID NO: 273735 - DNA, 120 bp, Artificial Sequence
  ENSG00000127990_146 (sequence is synthesized)
tcttgaaatcattctgctgtcaaacagggtaacacaatttaatgtttaaaatatatttttaaaacccaacttaggagtaaattaatgaaaataaggtataatttgagtaacaagtcttca

SEQ ID NO: 273736 - DNA, 120 bp, Artificial Sequence
  ENSG00000127990_147 (sequence is synthesized)
cttcatgaatagttagtaccttcaggacatctatgtcaattaaggtaatctcccaagattatctggaagtcagggcaacaaagcaaaggataaaaaattaataaagcagcaagtaacaaa

SEQ ID NO: 273737 - DNA, 120 bp, Artificial Sequence
  ENSG00000127990_148 (sequence is synthesized)
aagcagctccaatttggactataaacacctattttattagtgcaaaccttgtctagtgctatagggatcagggttagaaaggctagaaggactttgtaaggagtagacaagggtgagggg

SEQ ID NO: 273738 - DNA, 120 bp, Artificial Sequence
  ENSG00000127990_149 (sequence is synthesized)
tgaggaaactgtacagttgcatttgggagaccatgctatataatgctgtaatgcagcattatgctacatcatatattgctgatataatgtagcctagtggccacatttttatataaggga

SEQ ID NO: 273739 - DNA, 120 bp, Artificial Sequence
  ENSG00000127990_150 (sequence is synthesized)
taatgtagcctagtggccacatttttatataagggaatggtgggtaaaactgttatttataagaatatgtctctttttttcttttttttttttaagatggagtttcgctcctgttgccca

SEQ ID NO: 273740 - DNA, 71 bp, Artificial Sequence
  ENSG00000127990_151 (sequence is synthesized)
ctgcctgcctcagccctttttaaccaaatgttaaaatgagttgaattcaattgccctaagcactagaagtc

SEQ ID NO: 273741 - DNA, 120 bp, Artificial Sequence
  ENSG00000127990_152 (sequence is synthesized)
taaaatgagttgaattcaattgccctaagcactagaagtcatgaagttggcttttgaggtcctcctctttttcactttacttttatagatggaatggctatgcagaaaaatctctctttc

SEQ ID NO: 273742 - DNA, 120 bp, Artificial Sequence
  ENSG00000127990_153 (sequence is synthesized)
tcactctctcagtctctctttctctctctctcatacacacagacacatacacaccccttaggatataatattaaagtgaacacatttacctgggaactctgctgggtacatttttcccat

SEQ ID NO: 273743 - DNA, 120 bp, Artificial Sequence
  ENSG00000127990_154 (sequence is synthesized)
tgagtgcttattctgtaaccaggtagaatgcatgtggtaatttgaagattaaataataattaatataagtagtatagatagactagataagtttatccagaatacttcagaaacccaaaa

SEQ ID NO: 273744 - DNA, 120 bp, Artificial Sequence
  ENSG00000127990_155 (sequence is synthesized)
gtattatgaatatttttctaaagttctctaacatcacttagggtcatacagactaaggtgcctgtttatgtgcatgtgtgtatgagagtgtaagtaatgggtagtgggtaatttaagaaa

SEQ ID NO: 273745 - DNA, 120 bp, Artificial Sequence
  ENSG00000127993_0 (sequence is synthesized)
gaggatcaaagtaggcaagatggcgtcgagcggcggggagctagggagtttatttgatcaccacgtccagagggcggtatgcgacacacgggccaaatatcgagagggacgacggcctcg

SEQ ID NO: 273746 - DNA, 120 bp, Artificial Sequence
  ENSG00000127993_1 (sequence is synthesized)
tgctgtgaaggtatatacaatcaatttggaatctcagtacttattaatacaaggagttcctgctgtgggagtcatgaaggaattagttgagcgattcgctttatatggtgcaattgaaca

SEQ ID NO: 273747 - DNA, 120 bp, Artificial Sequence
  ENSG00000127993_2 (sequence is synthesized)
gtacaatgctctagatgaatacccagcagaagactttactgaagtttatcttattaaatttatgaacttacaaagtgcaaggacagccaagagaaaaatggatgaacagagtttcttcgg

SEQ ID NO: 273748 - DNA, 120 bp, Artificial Sequence
  ENSG00000127993_3 (sequence is synthesized)
tggattgcttcatgtgtgctatgctccagaatttgaaacagttgaagaaactagaaaaaaactacaaatgcggaaggcatatgtagtaaaaactactgaaaataaagaccattacgtgac

SEQ ID NO: 273749 - DNA, 120 bp, Artificial Sequence
  ENSG00000127993_4 (sequence is synthesized)
aaagaagaaattggttacagagcataaagacacagaggattttagacaagacttccactcagagatgtctggattttgtaaagctgctttgaacacttctgcagggaactcaaatcctta

SEQ ID NO: 273750 - DNA, 120 bp, Artificial Sequence
  ENSG00000127993_5 (sequence is synthesized)
tcttccgtattcctgtgaattgcctttatgttatttctcctcaaaatgtatgtgttcatccgggggacctgtagacagagcaccagactcctctaaggatggtagaaaccatcataaaac

SEQ ID NO: 273751 - DNA, 120 bp, Artificial Sequence
  ENSG00000127993_6 (sequence is synthesized)
aatggggcattataaccacaatgactctttgcggaaaacacagataaactctttgaaaaactcagtggcctgccctggtgcacaaaaggctattacgtcttcagaggcagttgacagatt

SEQ ID NO: 273752 - DNA, 120 bp, Artificial Sequence
  ENSG00000127993_7 (sequence is synthesized)
tatgcctaggacaacacaactgcaggagcgcaaaagaagaagagaagatgatcgtaaacttggaacttttcttcaaacaaacccaactggtaatgagattatgattggacctctgttacc

SEQ ID NO: 273753 - DNA, 120 bp, Artificial Sequence
  ENSG00000127993_8 (sequence is synthesized)
agacatctctaaagtggatatgcacgatgactcattgaatacaacggcgaatttaattcggcataaacttaaagaggtaatttcatctgtgccaaagcctccagaggacaagccagaaga

SEQ ID NO: 273754 - DNA, 120 bp, Artificial Sequence
  ENSG00000127993_9 (sequence is synthesized)
tgtacatacaagtcatccattaaaacaaagaagaagaatatagagtgccagcagcaacttagtattttctaaaaagaacatttattatttatttttagcctgtcattttaattcttcaag

SEQ ID NO: 273755 - DNA, 120 bp, Artificial Sequence
  ENSG00000127993_10 (sequence is synthesized)
tcttcaagagattttactgctggtattttttaatgcactcctctttgtaatttcattcaagccatttgtctaaagtcatttctttgttttttgggagatggagtcttgctctgttgccca

SEQ ID NO: 273756 - DNA, 90 bp, Artificial Sequence
  ENSG00000127993_11 (sequence is synthesized)
acacctgcctcagcctcccaaagggatgagccaccgcgcctggcccatttcttctttttttgacccatacttaatgttgcagaaactatt

SEQ ID NO: 273757 - DNA, 120 bp, Artificial Sequence
  ENSG00000127993_12 (sequence is synthesized)
cttctttttttgacccatacttaatgttgcagaaactattcttgtcataacattatctctcatgtacagtaattatatgtaaattaattgaagcaaatatggaaactttacaatagaaat

SEQ ID NO: 273758 - DNA, 120 bp, Artificial Sequence
  ENSG00000127993_13 (sequence is synthesized)
aaagataggcagccagcgtctgtttccaattataatacaagtattgaatgaaccattgaaacactagaagtcaggatgtttccgaatgccagggtttcaaaatcaagacaattctatgaa

SEQ ID NO: 273759 - DNA, 120 bp, Artificial Sequence
  ENSG00000127993_14 (sequence is synthesized)
gtaaaaagtagattagctattagaacaaagctgaaattagaaccttatatgctttaaataacttttaagaatttgcttgacctgtggcaatccaaaaatacatcagtatttataaattct

SEQ ID NO: 273760 - DNA, 120 bp, Artificial Sequence
  ENSG00000127993_15 (sequence is synthesized)
agacttctgttactacttctggcatatccacacttttttctgtcagtggattacataattggaaatttcagtacatctagactgtctctattttctttttctttttttatttttagtaga

SEQ ID NO: 273761 - DNA, 120 bp, Artificial Sequence
  ENSG00000127993_16 (sequence is synthesized)
gacagggtctcactgtgttgcccaggcaggtattgaactcctgggctcaagtgattcacccacctcggcctcccaaagtactaggattatgggtgtgacccactgtgcctggccattttc

SEQ ID NO: 273762 - DNA, 120 bp, Artificial Sequence
  ENSG00000127993_17 (sequence is synthesized)
tttactgataaaaataacttgagaaggtccataccgtggtgtgttgttttcatttctccctatctttaatggcctcttgcctagtggattgaatttgaacataccagttaataaggttca

SEQ ID NO: 273763 - DNA, 120 bp, Artificial Sequence
  ENSG00000127993_18 (sequence is synthesized)
gtgtctcaagaaccgtgctccctgaagaaaaagttcctggtccttttaagggcttacaactgtaagagggtctgcgtgaaagggttgtgatagacggagcaagtgatctataggcaacac

SEQ ID NO: 273764 - DNA, 120 bp, Artificial Sequence
  ENSG00000127993_19 (sequence is synthesized)
atggttagagttggggggttaatctttaacctcaggcctggtcagtggcgtcggttggttttgccactggctccattcctgttgtttttcagcttttactccctcctcctcttcagagat

SEQ ID NO: 273765 - DNA, 120 bp, Artificial Sequence
  ENSG00000127993_20 (sequence is synthesized)
gggagacaggaagagaaatggcctctctcctcacactgatccaaattaactaggatggctccaagtggtagatggtactaacagcaagctgcagataaggagggtaggccctacttccat

SEQ ID NO: 273766 - DNA, 120 bp, Artificial Sequence
  ENSG00000127993_21 (sequence is synthesized)
gtgaggtaattagatacagtttttgctgaaatctcaggtaaaggatatattagagacctaagcatagaattggaaggagcaaattgctgtctggttcaggcttctcagactataagttgc

SEQ ID NO: 273767 - DNA, 120 bp, Artificial Sequence
  ENSG00000127993_22 (sequence is synthesized)
tatgatctccacctcaggatcttgttaaaatgcagattctggtggtggtggtggccaggggctgtggggagggaaaatgaggagttacggtttaatgggcatagaatttcagttttggaa

SEQ ID NO: 273768 - DNA, 120 bp, Artificial Sequence
  ENSG00000127993_23 (sequence is synthesized)
gatgaaaagagttctagagatctgttgcatgacaaacgttacctgacagttaaggagaggagctgctaaatgggtcgtgtgtttctgaatgggttcctgatagtcctgtgaccatgcgga

SEQ ID NO: 273769 - DNA, 120 bp, Artificial Sequence
  ENSG00000127993_24 (sequence is synthesized)
agccagcactcctcatccccaccaacataattcatcatgaggagagacagaaagaaacctttgtggtgtcaagcagcaaaacaaaacaaaaagattcaaattaagttggtttgggtgggg

SEQ ID NO: 273770 - DNA, 120 bp, Artificial Sequence
  ENSG00000127993_25 (sequence is synthesized)
cctgagattctgcatttttcccaagtccctaggtgctgccagtgctgctggtgcacagaccatctttgaatagcaaggctctagataactgggctacagatgaactctggaagcagctga

SEQ ID NO: 273771 - DNA, 120 bp, Artificial Sequence
  ENSG00000127993_26 (sequence is synthesized)
agaacggttggctgttccatcctaagcagttactctgatctagtccattatgctatatactgttttcgctcatctcttttcagattggaagcctgccttttacacattgctttttaccac

SEQ ID NO: 273772 - DNA, 120 bp, Artificial Sequence
  ENSG00000127993_27 (sequence is synthesized)
acgtttccagaaagttaaaatgcggggtagagggaataaactacagggagacaaataaattaaagagatgagttgaggtggataaggatagcttaataacatgcaagctaatttacaaaa

SEQ ID NO: 273773 - DNA, 120 bp, Artificial Sequence
  ENSG00000127993_28 (sequence is synthesized)
tgagttgagattgtaccactgcactccagtctgggcaacagacggagactgtgtctcaaaaaaaagtgttcttgtataccatgtttgaaaagcatagttgataaaggaagaacatgtaag

SEQ ID NO: 273774 - DNA, 120 bp, Artificial Sequence
  ENSG00000127993_29 (sequence is synthesized)
gcaattttatgagccaaatcaattattagactgatacttgcagctcagaaaacttttgtcagatgcatacatgaaaaaccttcataagcacaaagtactctatgtctccaaaattttaaa

SEQ ID NO: 273775 - DNA, 120 bp, Artificial Sequence
  ENSG00000127993_30 (sequence is synthesized)
aacattgacagcaattgtattgaaagagatcaagtgttctagcagtttgtggtgtacttgctgaaactctattcagtgttctatcccttaagcaagccaatataccctggatttggtttg

SEQ ID NO: 273776 - DNA, 120 bp, Artificial Sequence
  ENSG00000127993_31 (sequence is synthesized)
ggaaatacaccatacttacaggaaacaggaattgtctattgctaaagaggttaaaagctcaatggaagtcttgaatatagttactgaaataatcatgaatgtcttcttggggcccaaatg

SEQ ID NO: 273777 - DNA, 120 bp, Artificial Sequence
  ENSG00000127993_32 (sequence is synthesized)
ccaggatggggctgaactctcaatgattgccttgacttcagcagtgggctgcagcccaacagaggagagtgtctagcaagtattactctctgaccctttaaaatttttcctgaatctata

SEQ ID NO: 273778 - DNA, 120 bp, Artificial Sequence
  ENSG00000127993_33 (sequence is synthesized)
tgggctattggcactagtaactatacatttgcttctggtaaacatggtccaaacacctccaacagaagtctgtcttctcttactgtttttcaaagtctgcaagcgatagcttgccatcat

SEQ ID NO: 273779 - DNA, 120 bp, Artificial Sequence
  ENSG00000127993_34 (sequence is synthesized)
tgtcataatcttaggaagatgtttcttggtaaatactagttttaaattttgcatggcaaatagctctctagactaaaaaaattttaccaaataaaagttcacacttctgtagacacccta

SEQ ID NO: 273780 - DNA, 120 bp, Artificial Sequence
  ENSG00000127993_35 (sequence is synthesized)
attctaagacacgatttggttataggattaaatggagaattatttgtgggaacaatagtactgtaattttttttcactttttagtgttttgatgtgtttttctacagttctctgttgaaa

SEQ ID NO: 273781 - DNA, 120 bp, Artificial Sequence
  ENSG00000127993_36 (sequence is synthesized)
taactgaatttggctaacattttatttgctttaaactgttaatacttgctttaaacaatgaacagacattttatatcactgtagatacaaaatattaaagcagtggtttcagccaattaa

SEQ ID NO: 273782 - DNA, 120 bp, Artificial Sequence
  ENSG00000127993_37 (sequence is synthesized)
atcaatctgtgagagtggagcccaggcctgccatttttgttaaaagctccccaggtagttctaatatgagccaaagttgagaagcaaaagtattgtaaattatttctctcaaatttagag

SEQ ID NO: 273783 - DNA, 120 bp, Artificial Sequence
  ENSG00000127993_38 (sequence is synthesized)
ttattacagtttatatcaaattcaaaatgcttaatttgcttttgtgataaagagcaatagaaggtggtgagatttctaaaaattaggcctccaggtatgcatttcaaatgtagacttctt

SEQ ID NO: 273784 - DNA, 120 bp, Artificial Sequence
  ENSG00000127993_39 (sequence is synthesized)
aaatgatcgggatcagattgtgctgcctaggtagtctgtttttttttttaatgtcatttacataatcattttccatttcctaagcacaaatgaagttaacatctgagttagcttttgaaa

SEQ ID NO: 273785 - DNA, 120 bp, Artificial Sequence
  ENSG00000127993_40 (sequence is synthesized)
gacacctttttgtggggtagggactactgttacaaatcataaactgagggttatgacattctcttatacttactccaagatgcagaaactgcttttcacatagttttactcatattttac

SEQ ID NO: 273786 - DNA, 120 bp, Artificial Sequence
  ENSG00000127993_41 (sequence is synthesized)
aatgtgattaagggaggctaaggtagtttaatttcatatatgtacattttttacctaaaaatatctgattaaaggtattatttaataataattaaaatccgtgggcacagttttgaagcc

SEQ ID NO: 273787 - DNA, 120 bp, Artificial Sequence
  ENSG00000127993_42 (sequence is synthesized)
tttaataataattaaaatccgtgggcacagttttgaagccttctttagcttttcagtttaggctgggcccagtgcctcacaccaataacttcagcactttgggaggctgaggtgagcaga

SEQ ID NO: 273788 - DNA, 89 bp, Artificial Sequence
  ENSG00000127993_43 (sequence is synthesized)
atgaaaccccatctttaccatgaactcttgtagctacttgggaagcttaggtggaagggtacttgagtctgggaggcggaggttgcagt

SEQ ID NO: 273789 - DNA, 120 bp, Artificial Sequence
  ENSG00000127993_44 (sequence is synthesized)
acagtgtgagaccctgtctcaaaaaaaaaggttttcagtttgtgctgccacccttacttccttccttcagttacagctgaactgaggcatagacatagatacatacctgtctcaaccaga

SEQ ID NO: 273790 - DNA, 120 bp, Artificial Sequence
  ENSG00000127993_45 (sequence is synthesized)
agatacatacctgtctcaaccagagctgattacattttcaagataaacgtgtgaagtccaaattctaggtccagaaatagaacaacaaaaaaaagatattaaatacagtttactatagtt

SEQ ID NO: 273791 - DNA, 120 bp, Artificial Sequence
  ENSG00000127993_46 (sequence is synthesized)
tctaataattttccatttcaaatgaagactcttactttgctttgacttattgtatactctttgtacactctttttctgatggtgtgtttgcttttcctttttctccaggaaattgaggat

SEQ ID NO: 273792 - DNA, 120 bp, Artificial Sequence
  ENSG00000127993_47 (sequence is synthesized)
tatactgcttcctgctcatttctccaaaggttttcatccccccaaatctatcaaacgttatcagtgtttcaagaatgcaaaaccaggatatctatctgaatccgtaatataacaagtgtc

SEQ ID NO: 273793 - DNA, 120 bp, Artificial Sequence
  ENSG00000127993_48 (sequence is synthesized)
tttagatctataaaggaatgttaaagtagagcatatgttcacttttcttcctccaaattttttttctttttaaatagctttagaaattttactgtcatcagtattcaaatggaagactcc

SEQ ID NO: 273794 - DNA, 120 bp, Artificial Sequence
  ENSG00000127993_49 (sequence is synthesized)
actctgtgcctaggtcataggctgtaccttgaacttaggcgaactctgcctcgaaagtgacatcaaggattgaactattggatgtagtcttacctcttctaatagcttatttactcctgt

SEQ ID NO: 273795 - DNA, 120 bp, Artificial Sequence
  ENSG00000127993_50 (sequence is synthesized)
aaagtgattttggtttcattcgctctcctcggtagctttatgtgagtgctagcgccatatgaccagcctacggaaataaaggcacgacaaggcttccgtcagatctgtctctcgttagag

SEQ ID NO: 273796 - DNA, 80 bp, Artificial Sequence
  ENSG00000127995_0 (sequence is synthesized)
gagacaggcgtccagggcgcctggggaaccggcacggcggagcagcggcggcggggctggggggaggccgccgagtcggc

SEQ ID NO: 273797 - DNA, 120 bp, Artificial Sequence
  ENSG00000127995_1 (sequence is synthesized)
gcgcaggtggcggcctggggagctggcggccgctcctcgcctggctgcagcggcggcagccccagtgctgcccctgtgcggcgcccctttcccgctccgccgcgcactgttgtcatggag

SEQ ID NO: 273798 - DNA, 120 bp, Artificial Sequence
  ENSG00000127995_2 (sequence is synthesized)
cgctccgccgcgcactgttgtcatggaggaaccaagatggcggctctggcctacaacctgggcaagcgggagatcaaccactacttcagcgtgaggagcgccaaggtgctggcgctggtg

SEQ ID NO: 273799 - DNA, 120 bp, Artificial Sequence
  ENSG00000127995_3 (sequence is synthesized)
gccgtgctgctgctcgcagcgtgccacctcgcctcccgccgctaccgaggcaatgattcgtgtgaataccttctctcaagtggcagatttcttggagagaaagtttggcaacctcacagt

SEQ ID NO: 273800 - DNA, 120 bp, Artificial Sequence
  ENSG00000127995_4 (sequence is synthesized)
tgtatgatgcataaatacaaaatcagtgaagcaaagaactgccttgtagataaacatattgcatttattggagattccagaattcgtcaattgttttattcttttgtaaaaataattaat

SEQ ID NO: 273801 - DNA, 120 bp, Artificial Sequence
  ENSG00000127995_5 (sequence is synthesized)
ccccaattcaaagaagaaggaaataagcatgaaaacattccttttgaagacaagactgcatcagttaaagtggattttctgtggcatcctgaagttaatggttctatgaaacagtgtatc

SEQ ID NO: 273802 - DNA, 120 bp, Artificial Sequence
  ENSG00000127995_6 (sequence is synthesized)
aaagtgtggactgaggattccattgcaaagccacatgtgattgtagcaggagctgccacatggtccatcaagattcacaatggtagcagtgaagcgctttctcaatataaaatgaacatc

SEQ ID NO: 273803 - DNA, 120 bp, Artificial Sequence
  ENSG00000127995_7 (sequence is synthesized)
acctccatagcaccacttttagaaaaattggcaaagactagtgatgtttattgggtcttacaagatcctgtttatgaagatctattaagtgaaaataggaagatgatcactaatgagaag

SEQ ID NO: 273804 - DNA, 120 bp, Artificial Sequence
  ENSG00000127995_8 (sequence is synthesized)
atagatgcttacaatgaagctgcagtcagtattttgaatagtagcaccagaaattctaaatcaaatgttaagatgttcagtgtttccaaattaattgctcaagaaaccatcatggaatct

SEQ ID NO: 273805 - DNA, 120 bp, Artificial Sequence
  ENSG00000127995_9 (sequence is synthesized)
ttggatggcttacatcttcctgaatcgagcagagaaactactgcaatgattcttatgaatgtgtattgcaataagattttgaagcctgtagatgggtcctgttgtcaacctcggcctcct

SEQ ID NO: 273806 - DNA, 120 bp, Artificial Sequence
  ENSG00000127995_10 (sequence is synthesized)
gttactctcatacagaagctagctgcttgttttttcactttatctattatcggatatttaattttttacataattcatcgtaatgctcatcggaagaataagccgtgtactgatttggaa

SEQ ID NO: 273807 - DNA, 120 bp, Artificial Sequence
  ENSG00000127995_11 (sequence is synthesized)
agtggagaggaaaagaaaaatattatcaatacccctgtgtcttcattagaaatacttttacaatctttctgcaaacttggcctgattatggcatatttctatatgtgtgaccgtgcaaat

SEQ ID NO: 273808 - DNA, 120 bp, Artificial Sequence
  ENSG00000127995_12 (sequence is synthesized)
ctgttcatgaaggaaaacaaattttatacacattcatctttctttattccaattatctacattttggttttgggagtattttataatgaaaatactaaagagactaaagtattaaataga

SEQ ID NO: 273809 - DNA, 120 bp, Artificial Sequence
  ENSG00000127995_13 (sequence is synthesized)
gaacaaacagacgaatggaaaggctggatgcaacttgtgattttgatttatcacatttctggagcaagtacatttttgcctgtatacatgcacattcgagttctggttgctgcatattta

SEQ ID NO: 273810 - DNA, 120 bp, Artificial Sequence
  ENSG00000127995_14 (sequence is synthesized)
tttcagacagggtatgggcatttctcatacttttggataaaaggagattttggaatctatagagtatgtcaggttttatttcgtctcaatttcctggtagtggtgttatgtatagtaatg

SEQ ID NO: 273811 - DNA, 120 bp, Artificial Sequence
  ENSG00000127995_15 (sequence is synthesized)
gatcgaccttatcaattctattactttgtccccttggtcactgtatggttcatggtcatatatgttactttagcactatggccacaaataatccaaaaaaaagcaaacggaaattgtttc

SEQ ID NO: 273812 - DNA, 120 bp, Artificial Sequence
  ENSG00000127995_16 (sequence is synthesized)
ctctttggccattgtccaagtgttttgaactgaaagggaatgtatatgaatggtggttcagatggaggttagaccgttatgtagttttccacggaatgctgtttgcttttatttatctgg

SEQ ID NO: 273813 - DNA, 120 bp, Artificial Sequence
  ENSG00000127995_17 (sequence is synthesized)
ctttgcagaagcgtcaaatactttctgaaggaaagggtgaacctcttttttcaaacaaaatttcaaattttctgttgtttatttcagtagtttctttcttgacctattccatctgggcta

SEQ ID NO: 273814 - DNA, 120 bp, Artificial Sequence
  ENSG00000127995_18 (sequence is synthesized)
gcagttgtaaaaacaaagcagagtgcaatgaactccatccgtctgtttctgtggtacagattttagccttcatcctaataagaaacatccctggatatgcccgttcagtttacagttcat

SEQ ID NO: 273815 - DNA, 120 bp, Artificial Sequence
  ENSG00000127995_19 (sequence is synthesized)
tttttgcttggtttggaaaaatttcattagagctatttatttgccagtatcacatatggctggcagcggacacaaggggtatcttggtactgatacctggaaaccctatgctcaacatca

SEQ ID NO: 273816 - DNA, 120 bp, Artificial Sequence
  ENSG00000127995_20 (sequence is synthesized)
ttgtcagcactttcatatttgtttgtgtggcacatgaaatttctcagatcactaatgatcttgcacagattattattcctaaagataactcatctctcttgaaaaggttggcatgtatag

SEQ ID NO: 273817 - DNA, 120 bp, Artificial Sequence
  ENSG00000127995_21 (sequence is synthesized)
ctgcatttttttgtggactcctcatcttatcatccattcaagataaatcaaaacattaggttccaaaaattctaaaaaacctaaactcttcaggctacctttgtgtgtctctagaagaga

SEQ ID NO: 273818 - DNA, 120 bp, Artificial Sequence
  ENSG00000127995_22 (sequence is synthesized)
aaagcatctatctggagatataaatgtgtatgtaaatataaacgtttgtggcaagaggacagttctgtgacatctgttgaacatatgtggttgtatatattggaaatgtacatatccaat

SEQ ID NO: 273819 - DNA, 120 bp, Artificial Sequence
  ENSG00000127995_23 (sequence is synthesized)
atgaaatactaaaacaaacaaacaaacaaaaaaccagaatgcattgtataggattgcatgtgaagtcttttctactgaatctatatttccatttgtaagtgattttaagttaacatatga

SEQ ID NO: 273820 - DNA, 120 bp, Artificial Sequence
  ENSG00000127995_24 (sequence is synthesized)
aggcagggaaatgattacctttccagtaaaaagtatagataatttaattaacttagtgacaccaccaagtgttttgatataactaaatttgtggtaataagactgtctgcacctgtattc

SEQ ID NO: 273821 - DNA, 120 bp, Artificial Sequence
  ENSG00000127995_25 (sequence is synthesized)
attgtggaacttcctctttcattggaaactttcttactcaagaatgacggcagtattgttttcttatatgtgcaatgaagtggaatgataaacagtatgcctttaatttatatgtgttct

SEQ ID NO: 273822 - DNA, 120 bp, Artificial Sequence
  ENSG00000127995_26 (sequence is synthesized)
tgttctgatgttgtttcctgaaatgatttttcttcctaactgtggttttcgggtatgcaagcctaaatctttgtacactttgtctcacagaatagttctgaggctccatgacagggtttt

SEQ ID NO: 273823 - DNA, 120 bp, Artificial Sequence
  ENSG00000127995_27 (sequence is synthesized)
gtcattgttgatgttattgttgcttcgttttataaaaaagccaaaattttttttccaatccaaacgttcacctgtttcctttcctcaagctataccagtgtaataccagttaccctgtgg

SEQ ID NO: 273824 - DNA, 120 bp, Artificial Sequence
  ENSG00000127995_28 (sequence is synthesized)
atccatttaatatgttatccccactaattaattttcgtatattatttccaatatttggaaagctctttatagccatttggtatttcctattacccacctcctattttaaatatttatcag

SEQ ID NO: 273825 - DNA, 120 bp, Artificial Sequence
  ENSG00000127995_29 (sequence is synthesized)
tctaaacttgtgcagtgtagtaaacatgcaagttgttacgattgagctgtattaccataagtagaattttaagtaaactggtgaatttgggcaataaatgtttttgctttttgtttgatt

SEQ ID NO: 273826 - DNA, 120 bp, Artificial Sequence
  ENSG00000127995_30 (sequence is synthesized)
tttttttacaagctaactgttagaggtatacatttatttatctgttgtacagatttgattatgattttaatgtttgaaagattgcacttgtttgcttttactatatgtggggtaaaatat

SEQ ID NO: 273827 - DNA, 120 bp, Artificial Sequence
  ENSG00000127995_31 (sequence is synthesized)
attttctgttcacagtatatgaaaatatggagtaatttaaacagtaaataaacattctgtggatgcttatttttgtattggcaaagtatcaattaaactatatgtgttctttttcaaaaa

SEQ ID NO: 273828 - DNA, 120 bp, Artificial Sequence
  ENSG00000127995_32 (sequence is synthesized)
agattgttccacctggtacaaaaggacaggggagaggagtaaaggccaggatcccaaaagctggagattctttcgggagagaaaagatccagagaggaaaatatattacatgtgaatata

SEQ ID NO: 273829 - DNA, 120 bp, Artificial Sequence
  ENSG00000127995_33 (sequence is synthesized)
gttcaagacatcattcgccaggccatgcagagcaaacatgaagacatgttaaaagccatgccatttcccgtactatcatggctgtcagcggaaggaggattttgaagggagtcaagagag

SEQ ID NO: 273830 - DNA, 120 bp, Artificial Sequence
  ENSG00000127995_34 (sequence is synthesized)
ggaatgactgtcaaccaagcagatactttatgagagcagcaaaattatatgattttgtgaagtgttgctacataaatatgatagcaactttttctacacaaagggccttaggcaaatctg

SEQ ID NO: 273831 - DNA, 120 bp, Artificial Sequence
  ENSG00000127995_35 (sequence is synthesized)
taatttttccagtatacataaaattgttcagccatgtactacttaaaatgttcattggtatgcagcataccgaccatgtgttgagaaatccagtttgggtagactttagaacaaaaataa

SEQ ID NO: 273832 - DNA, 120 bp, Artificial Sequence
  ENSG00000127995_36 (sequence is synthesized)
ctttctaatacttttagaatataaaaagactgttgtatatgtgtcaagttcacaaacataaagaataaggttatcatttaaaagaaagctttatacaaaatacttttcaataaagagatt

SEQ ID NO: 273833 - DNA, 120 bp, Artificial Sequence
  ENSG00000127995_37 (sequence is synthesized)
atgcatgcaaaatgtttgccaagataaactatatttttatctataaaaatagtttcaataattttttaaaattgtttgtttttaattatgaatacatattagttcatatttatggggcac

SEQ ID NO: 273834 - DNA, 120 bp, Artificial Sequence
  ENSG00000127995_38 (sequence is synthesized)
catatttatggggcacatgtgatattttgatacaagcatacaatgcataatgatcaaatcaaggtaatgttaaatgcttgaggcgatgtatatctccttatttttctaactggacttaaa

SEQ ID NO: 273835 - DNA, 120 bp, Artificial Sequence
  ENSG00000127995_39 (sequence is synthesized)
ttctaaagagactatatataagttaaaaatgaagaataaataagagctcaattaaacgggaattttaaaagttacaataaatttgggataaaatgtaatgtaaggtgtttcatatggaga

SEQ ID NO: 273836 - DNA, 120 bp, Artificial Sequence
  ENSG00000127995_40 (sequence is synthesized)
gccatcactgccttttgatcactgtttccagaaaagcacagacttgtgcacctccctctgtgctttcttatgtttggacagttgaacataccaaaacaggtgatgagcaaacttgcaagc

SEQ ID NO: 273837 - DNA, 120 bp, Artificial Sequence
  ENSG00000127995_41 (sequence is synthesized)
agtttttactgatagtttttacatagcataatgaagtataatgttataaataaagaactgtaaaaaaaaaacactgtgaggcttatgcctcttccagacttgcttttttgaacttttcca

SEQ ID NO: 273838 - DNA, 120 bp, Artificial Sequence
  ENSG00000127995_42 (sequence is synthesized)
aactttggtgtactttcgcccaccagaactgggcaaactgaggacattaaaaaaacggtttaagagaaactggccagagcggcaatgattcgtgtgaataccttctctcaagtggcagat

SEQ ID NO: 273839 - DNA, 120 bp, Artificial Sequence
  ENSG00000127995_43 (sequence is synthesized)
atacaaaatcagcatgaaaacattccttttgaagacaagactgcatcagttaaagtggattttctgtggcatcctgaagttaatggttctatgaaacagtgtatcaaagtgtggactgag

SEQ ID NO: 273840 - DNA, 120 bp, Artificial Sequence
  ENSG00000128000_0 (sequence is synthesized)
agcggttccacttcctgtctcctggggttgacgacctagctgggggagaagcccgaggaagattgaccaattttgtaattctagaaacatggtccatggatcagtgacattcagggatgt

SEQ ID NO: 273841 - DNA, 120 bp, Artificial Sequence
  ENSG00000128000_1 (sequence is synthesized)
ggccattgacttctctcaggaggagtgggagtgcctgcagcctgatcagaggaccttgtacagggatgtgatgttggagaactacagccacctgatatcactgggaagttccatttctaa

SEQ ID NO: 273842 - DNA, 120 bp, Artificial Sequence
  ENSG00000128000_2 (sequence is synthesized)
gccagatgtgattacattactagagcaagagaaagagccctggattgttgtaagtaaagaaacaagcagatggtatccagatttggagtcaaaatatggacctgagaaaatatctccaga

SEQ ID NO: 273843 - DNA, 120 bp, Artificial Sequence
  ENSG00000128000_3 (sequence is synthesized)
aaatgatatttttgaaataaatttacccaaacatgttataaagcaaataagtaaaacacttggcctcgaggccttttattttagaaatgactcagaatatagaagtagatttgagggacg

SEQ ID NO: 273844 - DNA, 120 bp, Artificial Sequence
  ENSG00000128000_4 (sequence is synthesized)
acagggacatcaagaaggatatatcaaccagaagatcatcagctatgaagaaatgcctgcttatactcatgcttctcctattcataatacacataaaccatatgaatgtaaggaatgtgg

SEQ ID NO: 273845 - DNA, 120 bp, Artificial Sequence
  ENSG00000128000_5 (sequence is synthesized)
gaaatactttagttgtggttcaaatcttattcagcatcagagtattcatactggagagaaaccctataaatgcaaagaatgtgggaaagcctttcaacttcacatacaacttactcgaca

SEQ ID NO: 273846 - DNA, 120 bp, Artificial Sequence
  ENSG00000128000_6 (sequence is synthesized)
tcagaaatttcatactggtgagaaaacttttgaatgtaaggaatgtggaaaagcctttaatcttcccacccagcttaatcgccataagaacattcacacagttaagaaactgtttgaatg

SEQ ID NO: 273847 - DNA, 120 bp, Artificial Sequence
  ENSG00000128000_7 (sequence is synthesized)
taaggaatgtgggaagtcttttaatcgtagctcaaaccttactcagcatcaaagtattcatgctggtgtaaaaccatatcaatgtaaggagtgtgggaaagcctttaatcgtggttcaaa

SEQ ID NO: 273848 - DNA, 120 bp, Artificial Sequence
  ENSG00000128000_8 (sequence is synthesized)
tcttattcagcatcaaaaaattcattccaatgagaaaccctttgtatgtagggaatgtgagatggcctttcgatatcattaccaactcattgaacattgccgaattcatactggcgagaa

SEQ ID NO: 273849 - DNA, 120 bp, Artificial Sequence
  ENSG00000128000_9 (sequence is synthesized)
accctttgaatgtaaagaatgcagaaaggcctttactcttctgacaaagcttgttcgacatcagaagattcatatgggtgagaagccctttgaatgcagggaatgcgggaaggcctttag

SEQ ID NO: 273850 - DNA, 120 bp, Artificial Sequence
  ENSG00000128000_10 (sequence is synthesized)
tctcctcaatcagcttaatcgccataagaatattcacacaggtgaaaaaccatttgaatgtaaagaatgtgggaagtcctttaatcgtagttcaaaccttattcaacaccagagtattca

SEQ ID NO: 273851 - DNA, 120 bp, Artificial Sequence
  ENSG00000128000_11 (sequence is synthesized)
tgctgatgtaaaaccatatgaatgtaaggagtgtgggaaaggctttaatcgtggtgcaaatcttattcagcatcaaaaaattcattccaatgagaaaccctttgtatgtagggaatgtga

SEQ ID NO: 273852 - DNA, 120 bp, Artificial Sequence
  ENSG00000128000_12 (sequence is synthesized)
gatggcctttcgatatcattaccaacttattcaacattgccaaattcatactggtgggaaaccctttgaatgtaaagaatgtggaaaggcctttagtcttctgacacagcttgctcgaca

SEQ ID NO: 273853 - DNA, 120 bp, Artificial Sequence
  ENSG00000128000_13 (sequence is synthesized)
taagaacattcatactggtgagaaaccatttgaatgtaaagactgtgggaaggccttcaatcgtggctcgaaccttgttcaacatcagagtattcacactggtgagaagccctatgaatg

SEQ ID NO: 273854 - DNA, 120 bp, Artificial Sequence
  ENSG00000128000_14 (sequence is synthesized)
taaggagtgtgggaaggcttttagacttcacctacaactttctcaacatgagaaaactcatacaggtgagaaaccctttgaatgtaaggaatgtgggaaattctttcgtcgtggttcaaa

SEQ ID NO: 273855 - DNA, 120 bp, Artificial Sequence
  ENSG00000128000_15 (sequence is synthesized)
tcttaatcaacatcgaagtattcataccggaaagaaaccctttgaatgtaaggaatgtgggaaagcctttcgacttcatatgcaccttattcgacatcagaaatttcatactggtgagaa

SEQ ID NO: 273856 - DNA, 120 bp, Artificial Sequence
  ENSG00000128000_16 (sequence is synthesized)
gccctttgaatgtaaggaatgtggcaaggccttcagtcttcacacccagcttaatcaccataagaacattcacacaggtgagaagccatttaaatgtaaagaatgtgggaagtcctttaa

SEQ ID NO: 273857 - DNA, 120 bp, Artificial Sequence
  ENSG00000128000_17 (sequence is synthesized)
tcgtgtctcaaaccttgttcaacatcagagtattcatgctggtgtaaaaccatatgaatgtaaggagtgtgggaaaggctttagtcgtgtttcaaaccttattcagcatcagaaaactca

SEQ ID NO: 273858 - DNA, 120 bp, Artificial Sequence
  ENSG00000128000_18 (sequence is synthesized)
ttccagtgcgaaaccctttgtatgtaaggagtgtaggaagacctttagatatcattaccagcttactgaacattaccgaattcatactggtgagaaaccctttgaatgtaaagaatgcgg

SEQ ID NO: 273859 - DNA, 120 bp, Artificial Sequence
  ENSG00000128000_19 (sequence is synthesized)
aaaggcctttggtcttctgacacagcttgctcaacatcagatcattcatactggtgagaagccatttaaatgtaaggagtgtgggaaggcctttaatcgtggctcaaaccttgttcaacc

SEQ ID NO: 273860 - DNA, 120 bp, Artificial Sequence
  ENSG00000128000_20 (sequence is synthesized)
ggtgagaaaccctatgaatgtaaggagtgtgggaaggcttttagacttcacctacaactttctctgcatcaaaaacttgtacaggtgagaaaccctttgaatgtaagaaatgtgggacag

SEQ ID NO: 273861 - DNA, 120 bp, Artificial Sequence
  ENSG00000128000_21 (sequence is synthesized)
aagaaatgtgggacagccttcagacatcagtagcaacttactgaacatcagaaaattcatacttgggtgaaaacctttgaatgtaaggaatgtgggaaggcctttcaatatcattaccaa

SEQ ID NO: 273862 - DNA, 120 bp, Artificial Sequence
  ENSG00000128000_22 (sequence is synthesized)
tttcatggacattatagatttcatattcgtgagaacccttatgaatgtcaaggatgtgggaaatgctttaccagtggtagaaaccttagagtacatcagagaattcatactggtgagaaa

SEQ ID NO: 273863 - DNA, 120 bp, Artificial Sequence
  ENSG00000128000_23 (sequence is synthesized)
ccatatcaatgtgaagaatgtgggaaagcctttagtcatagttcaaacctgttaaacatgttaaaattcatactgatgagaaaccctatgaatgtaaggaatgtgaaaaggcctttagca

SEQ ID NO: 273864 - DNA, 120 bp, Artificial Sequence
  ENSG00000128000_24 (sequence is synthesized)
gtaattatgatcttactgtacatctgagaatccgtactgctgagaaaccctgtgagtgtaaagaatgtggaaaacttttggatttagcttagtctttactgcacatcaaagaattcatac

SEQ ID NO: 273865 - DNA, 120 bp, Artificial Sequence
  ENSG00000128000_25 (sequence is synthesized)
tggtatgaaccgtatgaatgtaaagaatgtggaaagacctttacttgtagctcgagccttgttcaacatgttaaaattcatactggtgagcaaccctgtgaatgtaaaggatgtgggaag

SEQ ID NO: 273866 - DNA, 120 bp, Artificial Sequence
  ENSG00000128000_26 (sequence is synthesized)
acctttagacttagttcagtcctttctgcacatcacagaattcatactggcatgaaaccctatgaatgtaaagaatgtgagcaaacccttactgtgaatgatctgcttacgcaacatcag

SEQ ID NO: 273867 - DNA, 120 bp, Artificial Sequence
  ENSG00000128000_27 (sequence is synthesized)
aaaattcattatagttagaagttttatgaatataaggagtgtagacaagccttcactgtgtatgaaaaatttactcaacaccagagaattcatattgatgagaaatcctgtgaacataaa

SEQ ID NO: 273868 - DNA, 120 bp, Artificial Sequence
  ENSG00000128000_28 (sequence is synthesized)
agaatgtgtgaagaactttcatcgtggcctgggatttgctcaacatcagagtattcatactgctgagaactcctttgagtgtaaagaatgtgggatattttatagccacactaaatgcct

SEQ ID NO: 273869 - DNA, 120 bp, Artificial Sequence
  ENSG00000128000_29 (sequence is synthesized)
tagagttcagagaagataattttggtgagaaagttactgatgtgaggaatgtagagtagctgccatgttcacagtttactgcccgtgaaatattttactggatacaggcgtaccttgctt

SEQ ID NO: 273870 - DNA, 120 bp, Artificial Sequence
  ENSG00000128000_30 (sequence is synthesized)
aattgtgcattgcagttactgcattttatacacactgaaggtttgcagcaaccttgcagtgaataagtctatcagcaccattttccaaacagcatatgcacatttcatgtctttgtgtca

SEQ ID NO: 273871 - DNA, 120 bp, Artificial Sequence
  ENSG00000128000_31 (sequence is synthesized)
cactttgctagttttcataatatttcaaactttttcattgttaaatctgttatggtgatctgtgaccagtgttttttgattactagtgtaattgttactagtgtaattgtttggggatac

SEQ ID NO: 273872 - DNA, 120 bp, Artificial Sequence
  ENSG00000128000_32 (sequence is synthesized)
cacaaatcctgcccataaaagatggtgaacctagttgataattgttgtgggttttgaaagaatagtaaaatatatacacatatcccccccacctagattcaaaattgttaacaatttgcc

SEQ ID NO: 273873 - DNA, 120 bp, Artificial Sequence
  ENSG00000128000_33 (sequence is synthesized)
acatttattttttgtatatttgttgtaccattgagaataagttttagaccattgagaataagttttagatatcatgacactttactccttgttacatcagcatgtgtgttacccaaacat

SEQ ID NO: 273874 - DNA, 120 bp, Artificial Sequence
  ENSG00000128000_34 (sequence is synthesized)
aaagacaatatcatataaccatagtaccataattacccttaaggaaaatattcataattctgtaatatcattccatcttcagatttcttccttggcctgcaaaccatcttttacagctat

SEQ ID NO: 273875 - DNA, 120 bp, Artificial Sequence
  ENSG00000128000_35 (sequence is synthesized)
ggcatgagccagcatgcctggcctacagctattcattttctaaggagagtccattgcagattctgcattgcatttggttatctctctttagtgtattgtagcatggaaaccccatgaaag

SEQ ID NO: 273876 - DNA, 120 bp, Artificial Sequence
  ENSG00000128000_36 (sequence is synthesized)
tatgctctcaaattatggtgggtatcagaatcccctgtggaacttagtaaacctacagaagtgtagccctagtttataagcctgggcctctgttttttattatttctccaggttttgtgt

SEQ ID NO: 273877 - DNA, 120 bp, Artificial Sequence
  ENSG00000128000_37 (sequence is synthesized)
ctgtgataccaaccagagttagagagccactggtctagaacatttctcattttaaaaaaatgacattgaattttgagtagcccagaaatgttgttggctatgtgtttagatttctttctt

SEQ ID NO: 273878 - DNA, 120 bp, Artificial Sequence
  ENSG00000128000_38 (sequence is synthesized)
tatagtgtcatttagccttgttcttggttgtattttctttacaagggaaagtaagtccagaggctttcttaggtctagattaaacgttttggggaagaatactttgtaggttatttctat

SEQ ID NO: 273879 - DNA, 120 bp, Artificial Sequence
  ENSG00000128000_39 (sequence is synthesized)
gtcatattgtactgtcagaaaacatttaagtacaggtccttgcattagtgaaactaaggatgatcatttgggtaagctggtaaccgccgtaagtccattgtaaagatttagtttgtagtg

SEQ ID NO: 273880 - DNA, 120 bp, Artificial Sequence
  ENSG00000128000_40 (sequence is synthesized)
ggtaagtaatctatggagagacgttgtcatctctgaaaagttatagtcacgtgtacttaagccctggattgaatacaaaatgaaaattgaaatagactattgagaaatgaatgccattaa

SEQ ID NO: 273881 - DNA, 120 bp, Artificial Sequence
  ENSG00000128000_41 (sequence is synthesized)
agcgtcaacataattcaacttgtgtgatatggctgacactgtactcagtacaaaactggcaccctttggattgtatagggagccaagattgtccggaacctcttttttgttcagcattta

SEQ ID NO: 273882 - DNA, 120 bp, Artificial Sequence
  ENSG00000128000_42 (sequence is synthesized)
tcaccagcacctataccatggctggtacatgagctgttgataaaaatttgaaaaaatattaaccctttaaatcaagctgtaaaacatgataccattaagccgggagcagtggcctcatgc

SEQ ID NO: 273883 - DNA, 68 bp, Artificial Sequence
  ENSG00000128000_43 (sequence is synthesized)
caaaactccatctctcctaaaaataaaaaaattagctggacatggtggtgcattcctgtaatcccagc

SEQ ID NO: 273884 - DNA, 120 bp, Artificial Sequence
  ENSG00000128000_44 (sequence is synthesized)
acaaagtgagacttcatctcaaaaaaaccccaaaacaaaacatgataccgatgtggcatcatgaattagattaaattttttttaagattaagaataatcctttgtgattttattccattg

SEQ ID NO: 273885 - DNA, 120 bp, Artificial Sequence
  ENSG00000128000_45 (sequence is synthesized)
tgttgaaaaatctataaagtgataatttatattgatagctttcttctttttatgaatataccctggtcagatgattattctttcaatagactacttaattctatcttttaccatttaatt

SEQ ID NO: 273886 - DNA, 120 bp, Artificial Sequence
  ENSG00000128000_46 (sequence is synthesized)
gcatctataatcataagtaaagttataattttccaagtatttttcaggtattgatattgcaatgatgttatacaacttataaaacaagattatataaaacttggctttcaaatcttatgt

SEQ ID NO: 273887 - DNA, 120 bp, Artificial Sequence
  ENSG00000128000_47 (sequence is synthesized)
tcctattttttatttccagtttcatcttttttctatccattctcttgaactttcttctttgaaatcagcagagtccctgggtattaacctagcacaactcctttctgggtcattgcacat

SEQ ID NO: 273888 - DNA, 120 bp, Artificial Sequence
  ENSG00000128000_48 (sequence is synthesized)
cccggtagtatcattaagagttgtcagaaagatccctggcagcctttcggtgaaactctatcatcatgcaatcatggcagtactatgttggaagtcagagtccctttgcaaacataataa

SEQ ID NO: 273889 - DNA, 120 bp, Artificial Sequence
  ENSG00000128000_49 (sequence is synthesized)
atgttggaagtcagagtccctttgcaaacataataaaacactttaatatatttgttaaagttacaaaccaagtatgtacaaatttaaaaatcacggccaggcacggtggctcacgcctgt

SEQ ID NO: 273890 - DNA, 120 bp, Artificial Sequence
  ENSG00000128000_50 (sequence is synthesized)
agctttataatagtacaaaagtgatatgctgctatagtttggatatttatcccctccaaatctcatattgaagtttgatcccaatgttggaggtggggcctaatgggaggtgtgtgggtc

SEQ ID NO: 273891 - DNA, 120 bp, Artificial Sequence
  ENSG00000128000_51 (sequence is synthesized)
atgggagaagatccctcatgaataaattaatgtcctctctggattggggggtgaattatcactctgttagttcctatgagagctggttgtacaaaagagcctggcacctccttcctcacc

SEQ ID NO: 273892 - DNA, 120 bp, Artificial Sequence
  ENSG00000128000_52 (sequence is synthesized)
agctggttgtacaaaagagcctggcacctccttcctcaccctcttgcttcctctcttgccatgtgatgtctgcatacactgccccctttcatctgccatgagtggaagcagcctgaggcc

SEQ ID NO: 273893 - DNA, 120 bp, Artificial Sequence
  ENSG00000128000_53 (sequence is synthesized)
ctacagaacactgagccaaataaacctctttctttattaataacccaacctcagacattcctttatagcaacacaaaactaagacatactcagtcagagtatgctccttgacttaaaatg

SEQ ID NO: 273894 - DNA, 120 bp, Artificial Sequence
  ENSG00000128000_54 (sequence is synthesized)
gggctatatctagataaacccattgttaaattgaaaatattgtagaccataaatgcacatatggtgtatgatgttttcaatttatgatgggtttatttggacataactccccgtaagttg

SEQ ID NO: 273895 - DNA, 120 bp, Artificial Sequence
  ENSG00000128000_55 (sequence is synthesized)
agaagcacctgtagtaattattattatttatgctcaaattgacataatgtggccagtaggaatccatttacattttttttttactacttatttttttcttttgatgttttaaaggaatat

SEQ ID NO: 273896 - DNA, 120 bp, Artificial Sequence
  ENSG00000128000_56 (sequence is synthesized)
tgttttcaggccgtaagaggatgtttaagactgaccctgtttgttggttcatgtcccccatgcctcttgtcctgagtcatggaatcaactcatgatttaataccctcttatcttagggag

SEQ ID NO: 273897 - DNA, 120 bp, Artificial Sequence
  ENSG00000128000_57 (sequence is synthesized)
tcctggttccttttagaggaaaaaagaattagagaccaaaaaatctggctgctgtgagtgcacatggcagttacaggtatggaaaaaaagatgctgcttttgttagaattcttttaatag

SEQ ID NO: 273898 - DNA, 120 bp, Artificial Sequence
  ENSG00000128000_58 (sequence is synthesized)
tttcagagttgaaaatgtcatcctaaggtcagaagttccctctgaattttctcaacttacatttctatgatctgctcttgtttgcatttggtattttattgaattatgttttatgtatgg

SEQ ID NO: 273899 - DNA, 120 bp, Artificial Sequence
  ENSG00000128000_59 (sequence is synthesized)
tgatagctgagaagtttatctccttttaaggcctggctgaaatgatacattaatctgcctcccatttttggagatattgctctgatttaaatttgtcatggtgtttctgagcagcgttgt

SEQ ID NO: 273900 - DNA, 120 bp, Artificial Sequence
  ENSG00000128000_60 (sequence is synthesized)
aaagaaacttgttttagaatattcagtcatggatgttatcttgaatgttcatagactccccagaaaagaagaaaaagtagacacaagatttctgtcatccttttacagggtattgtgatc

SEQ ID NO: 273901 - DNA, 120 bp, Artificial Sequence
  ENSG00000128000_61 (sequence is synthesized)
atccagcttggggtatgagggataacggacctgtgtgtcttaatttccagaataccattccatttcaatgagtcttctgcacaagttgtggtctcagggattcactgtcttcatttgtaa

SEQ ID NO: 273902 - DNA, 120 bp, Artificial Sequence
  ENSG00000128000_62 (sequence is synthesized)
ttgatcaaaatgaaaccatctccaggattcctcagtgggtcaggatctgttatttattaggcccgcatatccattctaccctgctttcatgattatagaaccagtaatttttattgatag

SEQ ID NO: 273903 - DNA, 120 bp, Artificial Sequence
  ENSG00000128000_63 (sequence is synthesized)
ttggctgtgactatctagaataaggactgcagttatttctccaaggtgttgtcatgtgacataacttatggcaagtaggatgtaagtgaatattttggcaattctggaaacctcttaaaa

SEQ ID NO: 273904 - DNA, 120 bp, Artificial Sequence
  ENSG00000128000_64 (sequence is synthesized)
caaactagcttaatatattaatatttgagaaatctgggtgaagggtaaccagaattatttactattcttccaagttctgtataagtctgagtgctcattccattctgatgccagaatggt

SEQ ID NO: 273905 - DNA, 120 bp, Artificial Sequence
  ENSG00000128000_65 (sequence is synthesized)
aaaattcatgattggtttagagcaaggccacagtatcaggcttacatccatattatatgacagagaaattaacttttattatattttatccactttaatttggggcagttttactatttt

SEQ ID NO: 273906 - DNA, 120 bp, Artificial Sequence
  ENSG00000128000_66 (sequence is synthesized)
actcacaaccaaatttaatcttaaacgctacaactagattgtcacatgtaaaaagtaataaccatcattatatcttttatgttctgtaattccaaagcacggatctgtagagaacagagt

SEQ ID NO: 273907 - DNA, 120 bp, Artificial Sequence
  ENSG00000128000_67 (sequence is synthesized)
gtctatcccatgcatgttgtcatgtacttatcccacaccctattgaaatcacagtacccataagggagacattttttttcttcaagaatatgtatttctgccacatctatgattctccag

SEQ ID NO: 273908 - DNA, 120 bp, Artificial Sequence
  ENSG00000128000_68 (sequence is synthesized)
aatgagatgacagaaaatgctaaactattgttaaatgactatatgtagttccacttctggatggtagatgggggggctctgcaaactcattttctaataaaactggcaaaaaaaaatgta

SEQ ID NO: 273909 - DNA, 120 bp, Artificial Sequence
  ENSG00000128000_69 (sequence is synthesized)
gtcctaggaagaaatcggtggctgcgggaggtcttcgtggactgggactcgaacctgaccgacccggcagtgcggtgagggaagttgtggccatggagggtgctttcaaacttagtctgc

SEQ ID NO: 273910 - DNA, 120 bp, Artificial Sequence
  ENSG00000128000_70 (sequence is synthesized)
gctccaagaaaagcctggagtctcacgcttgccgtatccttctccagtcgtattattatccaaaagaaggaccgagaggaggatgagagcgttattgttgcacacttaagtcaaggggga

SEQ ID NO: 273911 - DNA, 120 bp, Artificial Sequence
  ENSG00000128000_71 (sequence is synthesized)
gttgacgacctagctgggtaaggtcttcacgtcctaggaagaaatcggtggctgcgggaggtcttcgtggactgggactcgaacctgaccgacccggcagtgcgggggagaagcccgagg

SEQ ID NO: 273912 - DNA, 120 bp, Artificial Sequence
  ENSG00000128000_72 (sequence is synthesized)
aagattgaccaattttgtaattctagaaacatggtccatggagtgcatctcgttatgttgcccaggctgtttgccaactcctgggctcaagcagtccttccaccttggtctcccaaagtg

SEQ ID NO: 273913 - DNA, 120 bp, Artificial Sequence
  ENSG00000128000_73 (sequence is synthesized)
taaagaaacaagcagatggtatccaggtaagtgagagtaaagcaggcagggggaagccatcattgtcccggacagcccatgtgctcagagaggagtcacacccctgagatgtggtttgga

SEQ ID NO: 273914 - DNA, 120 bp, Artificial Sequence
  ENSG00000128011_0 (sequence is synthesized)
atggctccaggacccttctcctcggccctcctctcgccgccgcccgctgccctgccctttctgctgctgctctgggcgggggcatctcgtggccagccctgccccggccgctgcatctgc

SEQ ID NO: 273915 - DNA, 120 bp, Artificial Sequence
  ENSG00000128011_1 (sequence is synthesized)
cagaacgtggcgcccacactgacaatgctgtgcgccaagaccggcttgctctttgtgccgcccgccatcgaccggcgcgtggtggagctgcggctcaccgacaacttcatcgccgccgtg

SEQ ID NO: 273916 - DNA, 120 bp, Artificial Sequence
  ENSG00000128011_2 (sequence is synthesized)
cgccgccgagacttcgccaacatgaccagcctggtgcacctcactctctcccggaacaccatcggccaggtggcagctggcgccttcgccgacctgcgtgccctccgggccctgcacctg

SEQ ID NO: 273917 - DNA, 120 bp, Artificial Sequence
  ENSG00000128011_3 (sequence is synthesized)
gacagcaaccgcctggcggaggtgcgcggcgaccagctccgcggcctgggcaacctccgccacctgatccttggaaacaaccagatccgccgggtggagtcggcggcctttgacgccttc

SEQ ID NO: 273918 - DNA, 120 bp, Artificial Sequence
  ENSG00000128011_4 (sequence is synthesized)
ctgtccaccgtggaggacctggatctgtcctacaacaacctggaggccctgccgtgggaggcggtgggccagatggtgaacctaaacaccctcacgctggaccacaacctcatcgaccac

SEQ ID NO: 273919 - DNA, 120 bp, Artificial Sequence
  ENSG00000128011_5 (sequence is synthesized)
atcgcggaggggaccttcgtgcagcttcacaagctggtccgtctggacatgacctccaaccgcctgcataaactcccgcccgacgggctcttcctgaggtcgcagggcaccgggcccaag

SEQ ID NO: 273920 - DNA, 120 bp, Artificial Sequence
  ENSG00000128011_6 (sequence is synthesized)
ccgcccaccccgctgaccgtcagcttcggcggcaaccccctgcactgcaactgcgagctgctctggctgcggcggctgacccgcgaggacgacttagagacctgcgccacgcccgaacac

SEQ ID NO: 273921 - DNA, 120 bp, Artificial Sequence
  ENSG00000128011_7 (sequence is synthesized)
ctcaccgaccgctacttctggtccatccccgaggaggagttcctgtgtgagcccccgctgatcacacggcaggcggggggccgggccctggtggtggaaggccaggcggtgagcctgcgc

SEQ ID NO: 273922 - DNA, 120 bp, Artificial Sequence
  ENSG00000128011_8 (sequence is synthesized)
tgccgagcggtgggtgaccccgagccggtggtgcactgggtggcacctgatgggcggctgctggggaactccagccggacccgggtccggggggacgggacgctggatgtgaccatcacc

SEQ ID NO: 273923 - DNA, 120 bp, Artificial Sequence
  ENSG00000128011_9 (sequence is synthesized)
accttgagggacagtggcaccttcacttgtatcgcctccaatgctgctggggaagcgacggcgcccgtggaggtgtgcgtggtacctctgcctctgatggcacccccgccggctgccccg

SEQ ID NO: 273924 - DNA, 120 bp, Artificial Sequence
  ENSG00000128011_10 (sequence is synthesized)
ccgcctctcaccgagcccggctcctctgacatcgccacgccgggcagaccaggtgccaacgattctgcggctgagcgtcggctcgtggcagccgagctcacctcgaactccgtgctcatc

SEQ ID NO: 273925 - DNA, 120 bp, Artificial Sequence
  ENSG00000128011_11 (sequence is synthesized)
cgctggccagcccagaggcctgtgcccggaatacgcatgtaccaggttcagtacaacagttccgttgatgactccctcgtctacaggatgatcccgtccaccagtcagaccttcctggtg

SEQ ID NO: 273926 - DNA, 120 bp, Artificial Sequence
  ENSG00000128011_12 (sequence is synthesized)
aatgacctggcggcgggccgtgcctacgacttgtgcgtgctggcggtctacgacgacggggccacagcgctgccggcaacgcgagtggtgggctgtgtacagttcaccaccgctggggat

SEQ ID NO: 273927 - DNA, 120 bp, Artificial Sequence
  ENSG00000128011_13 (sequence is synthesized)
ccggcgccctgccgcccgctgagggcccatttcttgggcggcaccatgatcatcgccatcgggggcgtcatcgtcgcctcggtcctcgtcttcatcgttctgctcatgatccgctataag

SEQ ID NO: 273928 - DNA, 120 bp, Artificial Sequence
  ENSG00000128011_14 (sequence is synthesized)
cgccgcgtcaagggctccaggtcgctcccgcgggtcagccacgtgtgctcgcagaccaacggcgcaggcacaggcgcggcacaggccccggccctgccggcccaggaccactacgaggcg

SEQ ID NO: 273929 - DNA, 120 bp, Artificial Sequence
  ENSG00000128011_15 (sequence is synthesized)
ctgcgcgaggtggagtcccaggctgcccccgccgtcgccgtcgaggccaaggccatggaggccgagacggcatccgcggagccggaggtggtccttggacgttctctgggcggctcggcc

SEQ ID NO: 273930 - DNA, 120 bp, Artificial Sequence
  ENSG00000128011_16 (sequence is synthesized)
acctcgctgtgcctgctgccatccgaggaaacttccggggaggagtctcgggccgcggtgggccctcgaaggagccgatccggcgccctggagccaccaacctcggcgccccctactcta

SEQ ID NO: 273931 - DNA, 120 bp, Artificial Sequence
  ENSG00000128011_17 (sequence is synthesized)
gctctagttcctgggggagccgcggcccggccgaggccgcagcagcgctattcgttcgacggggactacggggcactattccagagccacagttacccgcgccgcgcccggcggacaaag

SEQ ID NO: 273932 - DNA, 120 bp, Artificial Sequence
  ENSG00000128011_18 (sequence is synthesized)
cgccaccggtccacgccgcacctggacggggctggagggggcgcggccggggaggatggagacctggggctgggctccgccagggcgtgcctggctttcaccagcaccgagtggatgctg

SEQ ID NO: 273933 - DNA, 120 bp, Artificial Sequence
  ENSG00000128011_19 (sequence is synthesized)
gagagtaccgtgtgagcggcgggcgggcgccgggacgcctgggtgccgcagaccaaacgcccagccgcacggacgctggggcgggactgggagaaagcgcagcgccaagacattggacca

SEQ ID NO: 273934 - DNA, 120 bp, Artificial Sequence
  ENSG00000128011_20 (sequence is synthesized)
ccaagacattggaccagagtggagacgcgcccttgtccccgggagggggcggggcagcctcgggctgcggctcgaggccacgcccccgtgcccagggcggggttcggggaccggctgccg

SEQ ID NO: 273935 - DNA, 120 bp, Artificial Sequence
  ENSG00000128011_21 (sequence is synthesized)
ggactcctcgacccccctcctacccctcccctcgcgcgctcgcggacctcgctggagccggtgccttacacagcgaagcgcggggaggggcagggccccctgacactgcagcactgagac

SEQ ID NO: 273936 - DNA, 120 bp, Artificial Sequence
  ENSG00000128011_22 (sequence is synthesized)
acgagccccctcccccagcccgtcacccggggccggggcgaggggcccatttcttgtatctggctggactagatcctattctgtcccgcggcggcctccaaagcctcccaccccacccca

SEQ ID NO: 273937 - DNA, 120 bp, Artificial Sequence
  ENSG00000128011_23 (sequence is synthesized)
cgcacattcctggtccggtcgggtctggcttggggtccccctttctctgtttccctcgtttgtctctatcccgccctcttgtcgtctctctgtagtgcctgtctttccctatttgcctct

SEQ ID NO: 273938 - DNA, 120 bp, Artificial Sequence
  ENSG00000128011_24 (sequence is synthesized)
cctttctctctgtcctgtcgtctcttgtccctcggccctccctggttttgtctagtctccctgtctctcctgatttcttctctttactcattctcccgggcaggtcccactggaaggacc

SEQ ID NO: 273939 - DNA, 120 bp, Artificial Sequence
  ENSG00000128011_25 (sequence is synthesized)
agactctcccaaataaatccccacacgaacaaaatccaaaaccaaatccccctccctaccggagccgggaccctccgccgcagcagaattaaacttttttctgtgtctgaggccctgctg

SEQ ID NO: 273940 - DNA, 73 bp, Artificial Sequence
  ENSG00000128011_26 (sequence is synthesized)
tgacctagattgcagcataaggactctaagtgagactgaaggaagatgggaagatgactaactggggccggag

SEQ ID NO: 273941 - DNA, 120 bp, Artificial Sequence
  ENSG00000128011_27 (sequence is synthesized)
gactgaaggaagatgggaagatgactaactggggccggaggagactggcagacaggcttttatcctctgagagacttagaggtggggaataatcacaaaaataaaatgatcataatagct

SEQ ID NO: 273942 - DNA, 120 bp, Artificial Sequence
  ENSG00000128016_0 (sequence is synthesized)
agcctgacttcagcgctcccactctcggccgacacccctcatggccaaccgttacaccatggatctgactgccatctacgagagcctcctgtcgctgagccctgacgtgcccgtgccatc

SEQ ID NO: 273943 - DNA, 120 bp, Artificial Sequence
  ENSG00000128016_1 (sequence is synthesized)
cgaccatggagggactgagtccagcccaggctggggctcctcgggaccctggagcctgagcccctccgactccagcccgtctggggtcacctcccgcctgcctggccgctccaccagcct

SEQ ID NO: 273944 - DNA, 120 bp, Artificial Sequence
  ENSG00000128016_2 (sequence is synthesized)
agtggagggccgcagctgtggctgggtgcccccaccccctggcttcgcaccgctggctccccgcctgggccctgagctgtcaccctcacccacttcgcccactgcaacctccaccacccc

SEQ ID NO: 273945 - DNA, 120 bp, Artificial Sequence
  ENSG00000128016_3 (sequence is synthesized)
ctcgcgctacaagactgagctatgtcggaccttctcagagagtgggcgctgccgctacggggccaagtgccagtttgcccatggcctgggcgagctgcgccaggccaatcgccaccccaa

SEQ ID NO: 273946 - DNA, 120 bp, Artificial Sequence
  ENSG00000128016_4 (sequence is synthesized)
atacaagacggaactctgtcacaagttctacctccagggccgctgcccctacggctctcgctgccacttcatccacaaccctagcgaagacctggcggccccgggccaccctcctgtgct

SEQ ID NO: 273947 - DNA, 120 bp, Artificial Sequence
  ENSG00000128016_5 (sequence is synthesized)
tcgccagagcatcagcttctccggcctgccctctggccgccggacctcaccaccaccaccaggcctggccggcccttccctgtcctccagctccttctcgccctccagctccccaccacc

SEQ ID NO: 273948 - DNA, 120 bp, Artificial Sequence
  ENSG00000128016_6 (sequence is synthesized)
acctggggaccttccactgtcaccctctgccttctctgctgcccctggcacccccctggctcgaagagaccccaccccagtctgttgcccctcctgccgaagggccactcctatcagcgt

SEQ ID NO: 273949 - DNA, 120 bp, Artificial Sequence
  ENSG00000128016_7 (sequence is synthesized)
cagcagcggcagcagcctggggggctctgactctcccgtcttcgaggcgggagtttttgcaccaccccagcccgtggcagccccccggcgactccccatcttcaatcgcatctctgtttc

SEQ ID NO: 273950 - DNA, 120 bp, Artificial Sequence
  ENSG00000128016_8 (sequence is synthesized)
tgagtgacaaagtgactgcccggtcagatcagctggatctcagcggggagccacgtctcttgcactgtggtctctgcatggaccccagggctgtggggacttgggggacagtaatcaagt

SEQ ID NO: 273951 - DNA, 120 bp, Artificial Sequence
  ENSG00000128016_9 (sequence is synthesized)
aatccccttttccagaatgcattaacccactcccctgacctcacgctggggcaggtccccaagtgtgcaagctcagtattcatgatggtgggggatggagtgtcttccgaggttcttggg

SEQ ID NO: 273952 - DNA, 120 bp, Artificial Sequence
  ENSG00000128016_10 (sequence is synthesized)
ggaaaaaaaattgtagcatatttaagggaggcaatgaaccctctcccccacctcttccctgcccaaatctgtctcctagaatcttatgtgctgtgaataataggccttcactgcccctcc

SEQ ID NO: 273953 - DNA, 120 bp, Artificial Sequence
  ENSG00000128016_11 (sequence is synthesized)
agtttttatagacctgaggttccagtgtctcctggtaactggaacctctcctgagggggaatcctggtgctcaaattaccctccaaaagcaagtagccaaagccgttgccaaaccccacc

SEQ ID NO: 273954 - DNA, 120 bp, Artificial Sequence
  ENSG00000128016_12 (sequence is synthesized)
cataaatcaatgggccctttatttatgacgactttatttattctaatatgattttatagtatttatatatattgggtcgtctgcttcccttgtatttttcttcctttttttgtaatattg

SEQ ID NO: 273955 - DNA, 120 bp, Artificial Sequence
  ENSG00000128016_13 (sequence is synthesized)
cagcgctcccactctcggccgacacccctcatggccaaccgttacaccatggatctgactgccatctacgaggtgagtccccgccgcacggcatccccggtacctgcatgcctgagtccg

SEQ ID NO: 273956 - DNA, 120 bp, Artificial Sequence
  ENSG00000128016_14 (sequence is synthesized)
agtccccacctctctagcgccgcaaactccagcccgggacgcttgcctcccttctccaactggggctccctagcgccgcgccctccagcctggggcccctgcctcccgctcagaccagct

SEQ ID NO: 273957 - DNA, 80 bp, Artificial Sequence
  ENSG00000128039_0 (sequence is synthesized)
aggctgagaccggtgcgccgcgcgctagtggccgctcttccgcgggctagcgggcggtgggggcgccagcagcgcggaag

SEQ ID NO: 273958 - DNA, 120 bp, Artificial Sequence
  ENSG00000128039_1 (sequence is synthesized)
actcggcgctgaacccgctgcgcgcggtgtggctcacgctgaccgccgccttcctgctgaccctactgctgcagctcctgccgcccggcctgctcccgggctgcgcgatcttccaggacc

SEQ ID NO: 273959 - DNA, 120 bp, Artificial Sequence
  ENSG00000128039_2 (sequence is synthesized)
tgatccgctatgggaaaaccaagtgtggggagccgtcgcgccccgccgcctgccgagcctttgatgtccccaagagatatttttcccacttttatatcatctcagtgctgtggaatggct

SEQ ID NO: 273960 - DNA, 120 bp, Artificial Sequence
  ENSG00000128039_3 (sequence is synthesized)
tcctgctttggtgccttactcaatctctgttcctgggagcaccttttccaagctggcttcatggtttgctcagaattctcggggcggcacagttccagggaggggagctggcactgtctg

SEQ ID NO: 273961 - DNA, 120 bp, Artificial Sequence
  ENSG00000128039_4 (sequence is synthesized)
cattcttagtgctagtatttctgtggctgcacagcttacgaagactcttcgagtgcctctacgtcagtgtcttctccaatgtcatgattcacgtcgtgcagtactgttttggacttgtct

SEQ ID NO: 273962 - DNA, 120 bp, Artificial Sequence
  ENSG00000128039_5 (sequence is synthesized)
attatgtccttgttggcctaactgtgctgagccaagtgccaatggatggcaggaatgcctacataacagggaaaaatctattgatgcaagcacggtggttccatattcttgggatgatga

SEQ ID NO: 273963 - DNA, 120 bp, Artificial Sequence
  ENSG00000128039_6 (sequence is synthesized)
tgttcatctggtcatctgcccatcagtataagtgccatgttattctcggcaatctcaggaaaaataaagcaggagtggtcattcactgtaaccacaggatcccatttggagactggtttg

SEQ ID NO: 273964 - DNA, 120 bp, Artificial Sequence
  ENSG00000128039_7 (sequence is synthesized)
aatatgtttcttcccctaactacttagcagagctgatgatctacgtttccatggccgtcacctttgggttccacaacttaacttggtggctagtggtgacaaatgtcttctttaatcagg

SEQ ID NO: 273965 - DNA, 120 bp, Artificial Sequence
  ENSG00000128039_8 (sequence is synthesized)
ccctgtctgcctttctcagccaccaattctacaaaagcaaatttgtctcttacccgaagcataggaaagctttcctaccatttttgttttaagttaacctcagtcatgaagaatgcaaac

SEQ ID NO: 273966 - DNA, 120 bp, Artificial Sequence
  ENSG00000128039_9 (sequence is synthesized)
caggtgatggtttcaatgcctaaggacagtgaagtctggagcccaaagtacagtttcagcaaagctgtttgaaactctccattccatttctataccccacaagttttcactgaatgagca

SEQ ID NO: 273967 - DNA, 120 bp, Artificial Sequence
  ENSG00000128039_10 (sequence is synthesized)
tggcagtgccactcaagaaaatgaatctccaaagtatcttcaaagaataaatactaatggcagatctgcgatttctgggtccactttctgagatgctttctaaaaccaaccaactgataa

SEQ ID NO: 273968 - DNA, 120 bp, Artificial Sequence
  ENSG00000128039_11 (sequence is synthesized)
tttctaaaaccaaccaactgataaaaagtagatgagacttctccaagctgcttcacaagcaaactaaccgaaaaaccgaaaatatacaaacagcttcacacacacacacacacacacaca

SEQ ID NO: 273969 - DNA, 120 bp, Artificial Sequence
  ENSG00000128039_12 (sequence is synthesized)
gatcatcaatggctgcggtagcctagtaggaatggactatataataatatagcaggtgctcaataactgtttgttgcatttcagtaaaagcagaataacctttcaaaataataacaggct

SEQ ID NO: 273970 - DNA, 86 bp, Artificial Sequence
  ENSG00000128039_13 (sequence is synthesized)
tcagtaaaagcagaataacctttcaaaataataacaggctgggtgcaatggctcacacctgtttcgcttgggcccaagagttcgag

SEQ ID NO: 273971 - DNA, 120 bp, Artificial Sequence
  ENSG00000128039_14 (sequence is synthesized)
aaatatgaaaattagccaagagtggtggcacatgcctgtagtcccagatacttgggagtgggctgagatgggagaatcgcttgagcccaggaggtcaagggtacagtgagccgaggtcat

SEQ ID NO: 273972 - DNA, 120 bp, Artificial Sequence
  ENSG00000128039_15 (sequence is synthesized)
ggcaacagagcaagaccctgtctcaaaataataataatatataattttacaccaaaagtttcaggaaaaaacgagtttgttggagttagtttatactttcacatatcaccacaaagatct

SEQ ID NO: 273973 - DNA, 120 bp, Artificial Sequence
  ENSG00000128039_16 (sequence is synthesized)
cttttatttaatatttttttacatcctttgaagggagtgcttcaaaaatgaaagcatcagaagataaaatatttttatatttatgcatagcaagccttcgtgaacggaagtgacacactc

SEQ ID NO: 273974 - DNA, 120 bp, Artificial Sequence
  ENSG00000128039_17 (sequence is synthesized)
tggattgaataatactgtagcctcattcatatgtagttattcaaattggattaatgtctgtgtgagtttatttgaactagcagaaagtatctgaagatattcaggaataaagtttatact

SEQ ID NO: 273975 - DNA, 120 bp, Artificial Sequence
  ENSG00000128039_18 (sequence is synthesized)
taaaatagcttatgttaaagaaaatacctgtgattaattcagagggaaataaatgcatggtataaaagaaaaccaaaaacttaaaaaataatactatagcctgagcaacacattaaaact

SEQ ID NO: 273976 - DNA, 120 bp, Artificial Sequence
  ENSG00000128039_19 (sequence is synthesized)
gcacacttgtgcagcgtaagattctctggcttattggctgaggtgttaagtttattccttttatgaagatgtcctattacagtcagctaagcactaaagctttgcatttatatgtacttt

SEQ ID NO: 273977 - DNA, 120 bp, Artificial Sequence
  ENSG00000128039_20 (sequence is synthesized)
gctatgggggaaagaaccttatgattaataagacacatatcaaatgcatagtcaatcattcccacccccatccctggagctgtaacccaaaactgttaaactaagattcctttgtttttt

SEQ ID NO: 273978 - DNA, 61 bp, Artificial Sequence
  ENSG00000128039_21 (sequence is synthesized)
tgtaacccaaaactgttaaactaagattcctttgtggatcctggctcactgcaacctccgc

SEQ ID NO: 273979 - DNA, 120 bp, Artificial Sequence
  ENSG00000128039_22 (sequence is synthesized)
ctgggattacaggtgtaagtcactgctcccggatgcatgtcaagcacattggaaagttcttacaacaattctgatggaggattttctctcccatcaaccaaacaccacttaagattaacc

SEQ ID NO: 273980 - DNA, 120 bp, Artificial Sequence
  ENSG00000128039_23 (sequence is synthesized)
aacaccacttaagattaacctgtggctcagtctacttaaataaatgccatatttattttacttatcatttagaatttgccattctcaggaacaaaactttttgtacattggaaatggaaa

SEQ ID NO: 273981 - DNA, 120 bp, Artificial Sequence
  ENSG00000128039_24 (sequence is synthesized)
acattgcagtttggtcttaatttccacatgaatatcaagtgtaatttttaataaattatttggagaaaaatgtattttattttagcatgcaattttatgcccaggttagactagagattt

SEQ ID NO: 273982 - DNA, 120 bp, Artificial Sequence
  ENSG00000128039_25 (sequence is synthesized)
ggctgatgttctggaatctcattgtactcttaagtaaaataacgagcatcccatgacgcaccctgtcaggggttgtgagaaagctgcagtgtccagtttcccacccctgtttcctgctgt

SEQ ID NO: 273983 - DNA, 120 bp, Artificial Sequence
  ENSG00000128039_26 (sequence is synthesized)
ctctctcccactcatccctgtttcttactcatcccttttccttctttgcccaaacatcatatttctaggcaaagataagagaggagatagtgatgtcctgaaaggggttcagaacaacgt

SEQ ID NO: 273984 - DNA, 120 bp, Artificial Sequence
  ENSG00000128039_27 (sequence is synthesized)
agcatggcctttggtgaaagcgtcaccgatgggaaataattgagaattgtgcagtgcttgcagcgtcagaatcagcactgttttttgtgttggtgaaaatattccatgtgcgtaaaggga

SEQ ID NO: 273985 - DNA, 120 bp, Artificial Sequence
  ENSG00000128039_28 (sequence is synthesized)
gagcatcagggactttgcaaattcttcacaaggacccagaaatagcttaaagattcatggttttcctgttggcttaaatagccttaatctttcattttctactaccattaagtcggggaa

SEQ ID NO: 273986 - DNA, 120 bp, Artificial Sequence
  ENSG00000128039_29 (sequence is synthesized)
atgacattgaactacctcattagcagccttcccttgattaactactgactaaaagtgtgctgaaaatggcctttgtttttgtgaagctcatcctatacactaacatttgcttaaccatgg

SEQ ID NO: 273987 - DNA, 120 bp, Artificial Sequence
  ENSG00000128039_30 (sequence is synthesized)
attattttgtctctacaaagctgtgccctgtattcgatttttacttcaatgagtggttattgctagaattcctacaaaaaaaaaaaaaaccgttgcagatatttttgtatgtagcttaat

SEQ ID NO: 273988 - DNA, 120 bp, Artificial Sequence
  ENSG00000128039_31 (sequence is synthesized)
agatatttagtttaaggagactgcaacatttgcataaggtgcctaaaaactcaagaaccattgataagtgagatcactcaaaatgagctgatatattaaagaagaccttaaaacagtaaa

SEQ ID NO: 273989 - DNA, 120 bp, Artificial Sequence
  ENSG00000128039_32 (sequence is synthesized)
ctctttgcaagggcctgcagcctccgttttgggaacttgagtccaattctgttacccagcaatcagagagattgctaactaaactttattctaagtttaacacagttggttgtgttcttg

SEQ ID NO: 273990 - DNA, 120 bp, Artificial Sequence
  ENSG00000128039_33 (sequence is synthesized)
ttaacctcagagaggcctctttttcctgaaagttaactggtcccgttatttgaaaggaaattttaagaacctgaacacctataggattcagattctattaaaaagcaaagatatttttcc

SEQ ID NO: 273991 - DNA, 120 bp, Artificial Sequence
  ENSG00000128040_0 (sequence is synthesized)
cgcgccccgtcgcacgagcgctccctgcgagtggcgcaggtaacagaccgcaggggcaagacagccggcgcgggaggaggatggcgctgtcggtgctgcgcttggcgctgctgctcctgg

SEQ ID NO: 273992 - DNA, 120 bp, Artificial Sequence
  ENSG00000128040_1 (sequence is synthesized)
cagttaccttcgcagcctctctgatccctcaatttggtctgttttcaaaatatagaacgccaaactgctctcagtatagattaccaggatgtcccagacactttaaccctgtgtgtggca

SEQ ID NO: 273993 - DNA, 120 bp, Artificial Sequence
  ENSG00000128040_2 (sequence is synthesized)
ttatgccaatgaatgtactctgtgcatgaaaatcagggaaggtggtcataatattaaaatcattcgaaatggaccctgctgatggagcagtttacagaaaagaagatggagagaccacct

SEQ ID NO: 273994 - DNA, 120 bp, Artificial Sequence
  ENSG00000128040_3 (sequence is synthesized)
tcactggcagactagataaattgcatttcccctttttctcttttcctgtgtttctttacatgagatttgttaacacacattttctgagagcaggtatggaagacagccatgtgtagtgat

SEQ ID NO: 273995 - DNA, 120 bp, Artificial Sequence
  ENSG00000128040_4 (sequence is synthesized)
ggataatttaaagaaaaaaagaatccttgtttcttggcttttgctcctggagttaagcttactgcccaggtgacttgtgcattgctttatttagttgaaataaaatcagcattgaattca

SEQ ID NO: 273996 - DNA, 120 bp, Artificial Sequence
  ENSG00000128040_5 (sequence is synthesized)
cggggacctccggagaaaagcgggtttgggagtcagaccggcggcggaccctgccctgctccgggcggcctcggcgacggtacccgcgcgcccgttactggcggttccccagaggacctg

SEQ ID NO: 273997 - DNA, 120 bp, Artificial Sequence
  ENSG00000128045_0 (sequence is synthesized)
agtctgggtctggagcctgagccctgcggaacctcggcgctcggccccaccccgcccgtacctgcacttatttattgttgttatttcttaccgcggagccccgcagtcgggtcctcccgc

SEQ ID NO: 273998 - DNA, 120 bp, Artificial Sequence
  ENSG00000128045_1 (sequence is synthesized)
ccgctcccgcgcagcgctagcattctccagtccctcagtcccttcccgcgcggtgcgccgcagccgaggcgatgcgcctcattcagaacatgtgcaccatcgccgagtaccccgcgccgg

SEQ ID NO: 273999 - DNA, 120 bp, Artificial Sequence
  ENSG00000128045_2 (sequence is synthesized)
gcaacgccgcggcctccgactgctgtgtgggcgccgccggccgccgcctggtcaagatcgccgtggtgggcgccagcggcgtgggcaagaccgcactggtggtccggttcctcaccaaac

SEQ ID NO: 274000 - DNA, 120 bp, Artificial Sequence
  ENSG00000128045_3 (sequence is synthesized)
gattcatcggtgactatgaaagaaatgcaggtaatctctatactagacaagttcagatagaaggtgaaaccctggctcttcaggttcaagacactccaggtattcaggtccatgagaaca

SEQ ID NO: 274001 - DNA, 120 bp, Artificial Sequence
  ENSG00000128045_4 (sequence is synthesized)
gcctgagctgcagtgaacagctgaataggtgcattcgctgggcagatgctgtggtgatcgttttctccatcactgactacaagagctatgaactcatcagccagctccaccagcacgtgc

SEQ ID NO: 274002 - DNA, 120 bp, Artificial Sequence
  ENSG00000128045_5 (sequence is synthesized)
agcagctacacctgggcacccggctgcctgtggtggtcgtggccaacaaagctgacctgttgcacatcaaacaggttgaccctcagcttggactgcagctagccagcatgctaggctgct

SEQ ID NO: 274003 - DNA, 120 bp, Artificial Sequence
  ENSG00000128045_6 (sequence is synthesized)
cattctatgaagtgtctgtcagtgaaaattataatgatgtctacagcgccttccacgtcctctgtaaagaggtcagtcacaaacagcagcctagcagtacacccgagaagcgaagaacct

SEQ ID NO: 274004 - DNA, 120 bp, Artificial Sequence
  ENSG00000128045_7 (sequence is synthesized)
ccctcattcccaggcccaagtcacccaacatgcaggacctgaagaggaggtttaagcaagccctctctgccaaagtgaggactgtcacctccgtctgaagcaggaggagcactcaagggg

SEQ ID NO: 274005 - DNA, 120 bp, Artificial Sequence
  ENSG00000128045_8 (sequence is synthesized)
gttgaatattggcaatgattcctggttccagaaagggctggagcagaagggccaagagggcctgtggaactgctacagaaaaggaagtgttgttctgagcagggggacaggattgatgag

SEQ ID NO: 274006 - DNA, 120 bp, Artificial Sequence
  ENSG00000128045_9 (sequence is synthesized)
gcttgaaagagcccactgagccactctctgaatatgtgaaatgtactctgtgtcttttcctttagagtggggagggggcataatcgtttcggtttctgcattcaactaccttgtaaatgg

SEQ ID NO: 274007 - DNA, 120 bp, Artificial Sequence
  ENSG00000128045_10 (sequence is synthesized)
tggtccgttgcagtttcaccaaatgtattgatgtgatttacagtgggaatgaaagaacagattaagcattgataggctttcttttttcccccttttttcttttttctcttttcttctttc

SEQ ID NO: 274008 - DNA, 120 bp, Artificial Sequence
  ENSG00000128045_11 (sequence is synthesized)
ttttcctctttttccccaagaggaagaattgcttttctcttaccagtatgatttgtaactctggaacactattcttacagaatgcctttctaacctgaaggatacccagatttctttctt

SEQ ID NO: 274009 - DNA, 120 bp, Artificial Sequence
  ENSG00000128045_12 (sequence is synthesized)
tatgtacaagatggaaaatcccctacccctcaaaaacaggttgagtttatgggccagaatattttgtataccagacattggtaagctctcatggtttacaggaaggctctggttccccct

SEQ ID NO: 274010 - DNA, 120 bp, Artificial Sequence
  ENSG00000128045_13 (sequence is synthesized)
cacaggatgagcatgctcagttgggcgtgtgtggaggagctgtgaacttcacgctcttcaaccccagactttgactgtatagttttttgtttttttaactgttccatcaggaaaaaaatg

SEQ ID NO: 274011 - DNA, 120 bp, Artificial Sequence
  ENSG00000128045_14 (sequence is synthesized)
tgtcagttgattttggtgtgacttgtgtaaatggttcatggcaatgacgttgggttgcttcctaggcctggctgagttgtgcctaagggtggctgaaatactaaaacacttatcttacag

SEQ ID NO: 274012 - DNA, 120 bp, Artificial Sequence
  ENSG00000128045_15 (sequence is synthesized)
caagtgaacaggggctacctgccacatcccctccacagatgcactttaaaaagccactcatgctttggcttaaactgtaattaatttattttatgtacaataaatcgcatttgaaaaaga

SEQ ID NO: 274013 - DNA, 120 bp, Artificial Sequence
  ENSG00000128045_16 (sequence is synthesized)
atcaagtactcaagaaaacagaaacctcacataggctgagcaagataatttgcatcaagggagtactctaaaaatggaaactttgtttaaaactagataaataagttttcaaaaacttgc

SEQ ID NO: 274014 - DNA, 120 bp, Artificial Sequence
  ENSG00000128045_17 (sequence is synthesized)
tgcggttcccattttccagcgcttcccagggaggttctttcagtgacagtccgagcctgaggatcccgccacttaaaactttccccagtccccagccctccatggcgcccccctcccata

SEQ ID NO: 274015 - DNA, 120 bp, Artificial Sequence
  ENSG00000128045_18 (sequence is synthesized)
actaccatctggcctcattccattccaagcccattcatcattttatcaagtgcctgaaagtattccccttggtatgttttaactatagtgaccccagttggaagcaccctttgtagtcaa

SEQ ID NO: 274016 - DNA, 120 bp, Artificial Sequence
  ENSG00000128050_0 (sequence is synthesized)
gctagccttcccctaagagctgcctggaaagctgtatttgctgcacgtggaaatctccgttattttccagcacccaacagtagcgtaatgggagtaacggacttaacctcatttctcttt

SEQ ID NO: 274017 - DNA, 120 bp, Artificial Sequence
  ENSG00000128050_1 (sequence is synthesized)
cagagcatttagccttcatatgcccttccctgcatgcttcccccaggccgtcaagacttgagttctgcctcgcttcccggcgcggtcgcagccctcagcccacttaggataatggcgaca

SEQ ID NO: 274018 - DNA, 120 bp, Artificial Sequence
  ENSG00000128050_2 (sequence is synthesized)
gctgaggtactgaacattggtaaaaaattatatgagggtaaaacaaaagaagtctacgaattgttagacagtccaggaaaagtcctcctgcagtccaaggaccagattacagcaggaaat

SEQ ID NO: 274019 - DNA, 120 bp, Artificial Sequence
  ENSG00000128050_3 (sequence is synthesized)
gcagctagaaaaaaccacctggaaggaaaagctgcaatctcaaataaaatcaccagttgtatttttcagttattacaggaagcaggtattaaaactgccttcaccagaaaatgtggggag

SEQ ID NO: 274020 - DNA, 120 bp, Artificial Sequence
  ENSG00000128050_4 (sequence is synthesized)
acagctttcattgcaccgcagtgtgaaatgattccaattgaatgggtttgcagaagaatagcaactggttcttttctcaaaagaaatcctggtgtcaaggaaggatataagttttaccca

SEQ ID NO: 274021 - DNA, 120 bp, Artificial Sequence
  ENSG00000128050_5 (sequence is synthesized)
cctaaagtggagttgtttttcaaggatgatgccaataatgacccacagtggtctgaggaacagctgattgctgcaaaattttgctttgctggacttcttataggccagactgaagtggat

SEQ ID NO: 274022 - DNA, 120 bp, Artificial Sequence
  ENSG00000128050_6 (sequence is synthesized)
atcatgagtcatgctacacaggctatatttgaaatactggagaaatcctggttgccccagaattgtacactggttgatatgaagattgaatttggtgttgatgtaaccaccaaagaaatt

SEQ ID NO: 274023 - DNA, 120 bp, Artificial Sequence
  ENSG00000128050_7 (sequence is synthesized)
gttcttgctgatgttattgacaatgattcctggagactctggccatcaggagatcgaagccaacagaaagacaaacagtcttatcgggacctcaaagaagtaactcctgaagggctccaa

SEQ ID NO: 274024 - DNA, 120 bp, Artificial Sequence
  ENSG00000128050_8 (sequence is synthesized)
atggtaaagaaaaactttgagtgggttgcagagagagtagagttgcttttgaaatcagaaagtcagtgcagggttgtagtgttgatgggctctacttctgatcttggtcactgtgaaaaa

SEQ ID NO: 274025 - DNA, 120 bp, Artificial Sequence
  ENSG00000128050_9 (sequence is synthesized)
atcaagaaggcctgtggaaattttggcattccatgtgaacttcgagtaacatctgcgcataaaggaccagatgaaactctgaggattaaagctgagtatgaaggggatggcattcctact

SEQ ID NO: 274026 - DNA, 120 bp, Artificial Sequence
  ENSG00000128050_10 (sequence is synthesized)
gtatttgtggcagtggcaggcagaagtaatggtttgggaccagtgatgtctgggaacactgcatatccagttatcagctgtcctcccctcacaccagactggggagttcaggatgtgtgg

SEQ ID NO: 274027 - DNA, 120 bp, Artificial Sequence
  ENSG00000128050_11 (sequence is synthesized)
tcttctcttcgactacccagtggtcttggctgttcaaccgtactttctccagaaggatcagctcaatttgctgctcagatatttgggttaagcaaccatttggtatggagcaaactgcga

SEQ ID NO: 274028 - DNA, 120 bp, Artificial Sequence
  ENSG00000128050_12 (sequence is synthesized)
gcaagcattttgaacacatggatttccttgaagcaggctgacaagaaaatcagagaatgtaatttataagaaagaatgccattgaattttttaggggaaaaactacaaatttctaattta

SEQ ID NO: 274029 - DNA, 120 bp, Artificial Sequence
  ENSG00000128050_13 (sequence is synthesized)
aacatgagcatctaacccctcctttcttaggctagacaccaagatatttcagccagcctttatcattcctcttactttatcctttttccttaagtattggtggtcactactattgagttt

SEQ ID NO: 274030 - DNA, 120 bp, Artificial Sequence
  ENSG00000128050_14 (sequence is synthesized)
ttgagtttcttccttaacactgattaaatgatcttaactccctcagctaaaactggcattactgactcccagctatatttctccagacttgcatttttttttttttttttgagacagggt

SEQ ID NO: 274031 - DNA, 120 bp, Artificial Sequence
  ENSG00000128050_15 (sequence is synthesized)
agtgcagtggcgtgatctcagttcactgctgctttccctcctgggctcaagcagttctcccacctcagcctctcgactaacagggactataatcttgcagcaccatgccgagctaatttt

SEQ ID NO: 274032 - DNA, 120 bp, Artificial Sequence
  ENSG00000128050_16 (sequence is synthesized)
cgagctaattttattttttgtagagatgagctctcactatgtcacccaggttcgtctcaaactcctgaaccctagtaattctcctatctcagcctcccaaagtgctagggttacagacat

SEQ ID NO: 274033 - DNA, 120 bp, Artificial Sequence
  ENSG00000128050_17 (sequence is synthesized)
gagccactgtgcctgtctagacttgtactttcaactgtccatttctccctgtctgtcccatgggcactcatgaaaaaacagaatgctcccaactttattcatcttccaagcctgtagctc

SEQ ID NO: 274034 - DNA, 120 bp, Artificial Sequence
  ENSG00000128050_18 (sequence is synthesized)
ttggtatactcactgttgcaagtcagaagcttgatttcatcattgatgtttttctcacgtttcacatctcactcatcaccaagtcatgttggtgttaatttctgattaacccttgaattt

SEQ ID NO: 274035 - DNA, 120 bp, Artificial Sequence
  ENSG00000128050_19 (sequence is synthesized)
accgtcttctcatcctctgtacaaaagcctcaagtgagggtcaaattcaacattatcctgatctagacagcccccattctcaatccacccttttccaagttgattgcccaaggacttcta

SEQ ID NO: 274036 - DNA, 120 bp, Artificial Sequence
  ENSG00000128050_20 (sequence is synthesized)
acaataaactctcttttgcaccacagacttctttgaaaatatacatgctgttgaccctctctgtagaaaaccgcacacataaaacttaccaacagatttcattggttcttgggttctccc

SEQ ID NO: 274037 - DNA, 120 bp, Artificial Sequence
  ENSG00000128050_21 (sequence is synthesized)
tcccgaagcctatccatggtttatagattaagaattgatgaggtagctgggcacagtggctcacacctacgatcacagcacttcgggaggctgaagcaagcagatcacttgaggtcagga

SEQ ID NO: 274038 - DNA, 88 bp, Artificial Sequence
  ENSG00000128050_22 (sequence is synthesized)
ccactgcactccaaggggaaaaaaaaaattgctgatgtgacccatgaagggaactcattttcctcgtaattttggactgccacacatt

SEQ ID NO: 274039 - DNA, 120 bp, Artificial Sequence
  ENSG00000128050_23 (sequence is synthesized)
gggaactcattttcctcgtaattttggactgccacacattggtacctttagttctctgaaggcccacgtttttatcattaagacctatttgttagctagtagagctttatgttcgctgtc

SEQ ID NO: 274040 - DNA, 120 bp, Artificial Sequence
  ENSG00000128050_24 (sequence is synthesized)
catgaaaccttctgtaaccacagtgactacaagtagttctttctctattgaattattaggtccagaatagaagatgtcattgtacactttatttccctcacactgtgttatgctctgatg

SEQ ID NO: 274041 - DNA, 120 bp, Artificial Sequence
  ENSG00000128050_25 (sequence is synthesized)
tgctatgcttagctatctgtcagagattagtaaattataaaactcatgtgtactacttaagtttatatcttatgctagtttataagaacaattaaaaggacttagaagattaactttggt

SEQ ID NO: 274042 - DNA, 120 bp, Artificial Sequence
  ENSG00000128050_26 (sequence is synthesized)
cccctccgggttaggcggctgtagcggagctcgaaaagagtggcgcagggtcgcgcggccccgcctccttccccgcccagcgaagctctctgaccacccctcttttctagagttctgcct

SEQ ID NO: 274043 - DNA, 120 bp, Artificial Sequence
  ENSG00000128050_27 (sequence is synthesized)
atttttaaactttcatttagactggtggataggactgaccattacaaattgtcgttatcaattttttttcctttttttttttaagagccaagttctcactgtctcccaggctggagtgca

SEQ ID NO: 274044 - DNA, 120 bp, Artificial Sequence
  ENSG00000128050_28 (sequence is synthesized)
gtggcatgattatggctccctgcagccttgaactcctggactcaagctgcagcctctcgagtagctgggtgcatgtgctaccacacccaattatgaatttcatcattagtttcttagtag

SEQ ID NO: 274045 - DNA, 120 bp, Artificial Sequence
  ENSG00000128050_29 (sequence is synthesized)
agtccacatgtcctcagtagtaagttcatcagtgctaaatatttgaaggtatttctactgttttgtaaaagtaacttaagcctacctggtctgctatcttttgagtatttatactttcta

SEQ ID NO: 274046 - DNA, 120 bp, Artificial Sequence
  ENSG00000128050_30 (sequence is synthesized)
cgggcttgtaggtaaacataaaaagagaaaaaatatcccaataatacagtttttaaccttttatgataaagacatgcttagaattgctgttaagctttctgagatttaaccactgaaact

SEQ ID NO: 274047 - DNA, 120 bp, Artificial Sequence
  ENSG00000128050_31 (sequence is synthesized)
aagtaaaagacaaagcacttaggtaaagcttcattcagtatccattcacccaatactggtttgattctagggcctaggaaaataggactgagcaaagcccttgtccagatggaacttatg

SEQ ID NO: 274048 - DNA, 120 bp, Artificial Sequence
  ENSG00000128050_32 (sequence is synthesized)
ttttagaggggaaaacaaaccataaaaaggtaaacagtataaaatcaggaaaggataaatgtatatgaagaatcaaaatgaggacggtgatggggataagaggggaaggtttttgaggag

SEQ ID NO: 274049 - DNA, 120 bp, Artificial Sequence
  ENSG00000128050_33 (sequence is synthesized)
agcagagcaatgatgtaaaagcaagacacacagatagggaaatagctttccatactaagggaatgggaaataaagctgagttttgccttgaggacctccaaacatgagaattgctagagc

SEQ ID NO: 274050 - DNA, 120 bp, Artificial Sequence
  ENSG00000128050_34 (sequence is synthesized)
tctgtgaacaaggatgagagtggaagacaatataagcaaaggctacatcacttagggcctataggccacactgaagtgtgacaggaaaaactcagtttgagcagaggcttgacatactta

SEQ ID NO: 274051 - DNA, 120 bp, Artificial Sequence
  ENSG00000128050_35 (sequence is synthesized)
acatatttaaaggttctctggctgttgtgtggacaagaggagaagcagagattagttaagaggctattgtagcccaggtgagggatgatgtatgatcttcaacatgtctaatttttttgt

SEQ ID NO: 274052 - DNA, 120 bp, Artificial Sequence
  ENSG00000128050_36 (sequence is synthesized)
gcctcaatttcatgaaatgaaaatgcgactaataccacctcataaagttgtgagaattacatgagtcaatatatgtaaggcccatcatggcacacaaatgtgttatgtaatatccatttg

SEQ ID NO: 274053 - DNA, 120 bp, Artificial Sequence
  ENSG00000128050_37 (sequence is synthesized)
ggcacacaaatgtgttatgtaatatccatttggcagactgaagaacaacagtatgaatggaattcattcaccatgagaattacctggaattctctgggcatggtagctcatgcctgtaat

SEQ ID NO: 274054 - DNA, 62 bp, Artificial Sequence
  ENSG00000128050_38 (sequence is synthesized)
tggtgagccgaggaaagaaagaaaattacctggaattcaatattgccatcggctgatttaat

SEQ ID NO: 274055 - DNA, 120 bp, Artificial Sequence
  ENSG00000128050_39 (sequence is synthesized)
aaattacctggaattcaatattgccatcggctgatttaatttctaatatgaagaaaggggcagtgtgatgtgccacggagcatccacaacctgccatttcagcccagccaaccttagaaa

SEQ ID NO: 274056 - DNA, 120 bp, Artificial Sequence
  ENSG00000128050_40 (sequence is synthesized)
gccattgaaaagagttgtttttaatggtgtttttacatccagcttcccacacctcaaatacttggggtggaattgttaatctcacattgcagtacaatgaaaatagtggaatggaaatca

SEQ ID NO: 274057 - DNA, 120 bp, Artificial Sequence
  ENSG00000128050_41 (sequence is synthesized)
agttataaaatggagctaaatatttcttctgcttgcctctgagttgataagataccataagatactgtacatgaggctgggcgcggtggctcacgtcttatttcttctgcttgcctctga

SEQ ID NO: 274058 - DNA, 68 bp, Artificial Sequence
  ENSG00000128050_42 (sequence is synthesized)
gcgcggtggctcacgtcttatttcttctgcttgcctctgagttgacaagataccataagatactgtac

SEQ ID NO: 274059 - DNA, 68 bp, Artificial Sequence
  ENSG00000128050_43 (sequence is synthesized)
ggtcgggagttcaagaccagcctgactgacatggagaaacccctccaactactcgggaggctgaggca

SEQ ID NO: 274060 - DNA, 88 bp, Artificial Sequence
  ENSG00000128050_44 (sequence is synthesized)
gccaaaaaaaaaaaaaaaaagatactgtacatggaagcttctcaggctaaatccattaatataaaaatacattgtggatactgatgag

SEQ ID NO: 274061 - DNA, 120 bp, Artificial Sequence
  ENSG00000128050_45 (sequence is synthesized)
aaatccattaatataaaaatacattgtggatactgatgagatggctaattctgtcaacttgactaggctacgggatgccttgatagctggtcaaacaacatttctaggtacatctgtgat

SEQ ID NO: 274062 - DNA, 120 bp, Artificial Sequence
  ENSG00000128050_46 (sequence is synthesized)
ggtgtttctggaagagactagcacttgaatcagtagacttgagtaaagaagactgccttcacccatgtgggtgagcgtcatctaatccattgagggcctgaatagaacaaaaaaggggaa

SEQ ID NO: 274063 - DNA, 120 bp, Artificial Sequence
  ENSG00000128050_47 (sequence is synthesized)
gaagggtgaactgctgggacatccatttcgtgcccccagatgttggtgctcctggtcctcaggccttcagactaggacttaacgttattgcctcccctgattctcaagccctcgggtttg

SEQ ID NO: 274064 - DNA, 120 bp, Artificial Sequence
  ENSG00000128050_48 (sequence is synthesized)
gaactacactggctttcctgggccttcagcctgcagaaggcagactgtgggacttcacctccattttgcagagccaatttctcataatctgtacatatcctattggttctgtatttttta

SEQ ID NO: 274065 - DNA, 120 bp, Artificial Sequence
  ENSG00000128050_49 (sequence is synthesized)
gagaacaaatacagcctattatgtatatataagaccctgggaatgcaaagatgaacaaaattaaccttctgctctcaatgaatcttggaagtctccagaggcagacaatttcaaaacacc

SEQ ID NO: 274066 - DNA, 120 bp, Artificial Sequence
  ENSG00000128050_50 (sequence is synthesized)
gtatatagtcttaatatggaattaacaatagggtattgtgaatacacaaaagtaggaaggactctgatctctagaaaacaattgtatactgtgaatgaaaaagactaattctccacagtc

SEQ ID NO: 274067 - DNA, 120 bp, Artificial Sequence
  ENSG00000128050_51 (sequence is synthesized)
tatactcaatctctcttacctttccataattttcttcagcaaacttattaccaccaaacatagtacatgtttatttattacccatctctcccaactagaaaataaatgtattacactggg

SEQ ID NO: 274068 - DNA, 120 bp, Artificial Sequence
  ENSG00000128050_52 (sequence is synthesized)
agcatttagccttcatatgcccttccctgcatgcttcccccaggccgtcaagacttggtacgctccaacttctgagtcgctcccgcagccgagaaggggccgggagttctgcctcgcttc

SEQ ID NO: 274069 - DNA, 120 bp, Artificial Sequence
  ENSG00000128050_53 (sequence is synthesized)
gtcgatgtctttcatgtgaagttggcattaatatgaacaacttgtttgcagatgtctcaaaagctaagtgaatttaaatcaaaccaagaacccttaaacttcactataacaccttatttg

SEQ ID NO: 274070 - DNA, 75 bp, Artificial Sequence
  ENSG00000128050_54 (sequence is synthesized)
cttcagtgactttgaaagtgaggaacacttttaggaaatgtatcagctgggctatccttactaggatactggaac

SEQ ID NO: 274071 - DNA, 120 bp, Artificial Sequence
  ENSG00000128052_0 (sequence is synthesized)
actgagtcccgggaccccgggagagcggtcaatgtgtggtcgctgcgtttcctctgcctgcgccgggcatcacttgcgcgccgcagaaagtccgtctggcagcctggatatcctctccta

SEQ ID NO: 274072 - DNA, 120 bp, Artificial Sequence
  ENSG00000128052_1 (sequence is synthesized)
ccggcacccgcagacgcccctgcagccgcggtcggcgcccgggctccctagccctgtgcgctcaactgtcctgcgctgcggggtgccgcgagttccacctccgcgcctccttctctagac

SEQ ID NO: 274073 - DNA, 120 bp, Artificial Sequence
  ENSG00000128052_2 (sequence is synthesized)
aggcgctgggagaaagaaccggctcccgagttctgggcatttcgcccggctcgaggtgcaggatgcagagcaaggtgctgctggccgtcgccctgtggctctgcgtggagacccgggccg

SEQ ID NO: 274074 - DNA, 120 bp, Artificial Sequence
  ENSG00000128052_3 (sequence is synthesized)
cctctgtgggtttgcctagtgtttctcttgatctgcccaggctcagcatacaaaaagacatacttacaattaaggctaatacaactcttcaaattacttgcaggggacagagggacttgg

SEQ ID NO: 274075 - DNA, 120 bp, Artificial Sequence
  ENSG00000128052_4 (sequence is synthesized)
actggctttggcccaataatcagagtggcagtgagcaaagggtggaggtgactgagtgcagcgatggcctcttctgtaagacactcacaattccaaaagtgatcggaaatgacactggag

SEQ ID NO: 274076 - DNA, 120 bp, Artificial Sequence
  ENSG00000128052_5 (sequence is synthesized)
cctacaagtgcttctaccgggaaactgacttggcctcggtcatttatgtctatgttcaagattacagatctccatttattgcttctgttagtgaccaacatggagtcgtgtacattactg

SEQ ID NO: 274077 - DNA, 120 bp, Artificial Sequence
  ENSG00000128052_6 (sequence is synthesized)
agaacaaaaacaaaactgtggtgattccatgtctcgggtccatttcaaatctcaacgtgtcactttgtgcaagatacccagaaaagagatttgttcctgatggtaacagaatttcctggg

SEQ ID NO: 274078 - DNA, 120 bp, Artificial Sequence
  ENSG00000128052_7 (sequence is synthesized)
acagcaagaagggctttactattcccagctacatgatcagctatgctggcatggtcttctgtgaagcaaaaattaatgatgaaagttaccagtctattatgtacatagttgtcgttgtag

SEQ ID NO: 274079 - DNA, 120 bp, Artificial Sequence
  ENSG00000128052_8 (sequence is synthesized)
ggtataggatttatgatgtggttctgagtccgtctcatggaattgaactatctgttggagaaaagcttgtcttaaattgtacagcaagaactgaactaaatgtggggattgacttcaact

SEQ ID NO: 274080 - DNA, 120 bp, Artificial Sequence
  ENSG00000128052_9 (sequence is synthesized)
gggaatacccttcttcgaagcatcagcataagaaacttgtaaaccgagacctaaaaacccagtctgggagtgagatgaagaaatttttgagcaccttaactatagatggtgtaacccgga

SEQ ID NO: 274081 - DNA, 120 bp, Artificial Sequence
  ENSG00000128052_10 (sequence is synthesized)
gtgaccaaggattgtacacctgtgcagcatccagtgggctgatgaccaagaagaacagcacatttgtcagggtccatgaaaaaccttttgttgcttttggaagtggcatggaatctctgg

SEQ ID NO: 274082 - DNA, 120 bp, Artificial Sequence
  ENSG00000128052_11 (sequence is synthesized)
tggaagccacggtgggggagcgtgtcagaatccctgcgaagtaccttggttacccacccccagaaataaaatggtataaaaatggaataccccttgagtccaatcacacaattaaagcgg

SEQ ID NO: 274083 - DNA, 120 bp, Artificial Sequence
  ENSG00000128052_12 (sequence is synthesized)
ggcatgtactgacgattatggaagtgagtgaaagagacacaggaaattacactgtcatccttaccaatcccatttcaaaggagaagcagagccatgtggtctctctggttgtgtatgtcc

SEQ ID NO: 274084 - DNA, 120 bp, Artificial Sequence
  ENSG00000128052_13 (sequence is synthesized)
caccccagattggtgagaaatctctaatctctcctgtggattcctaccagtacggcaccactcaaacgctgacatgtacggtctatgccattcctcccccgcatcacatccactggtatt

SEQ ID NO: 274085 - DNA, 120 bp, Artificial Sequence
  ENSG00000128052_14 (sequence is synthesized)
ggcagttggaggaagagtgcgccaacgagcccagccaagctgtctcagtgacaaacccatacccttgtgaagaatggagaagtgtggaggacttccagggaggaaataaaattgaagtta

SEQ ID NO: 274086 - DNA, 120 bp, Artificial Sequence
  ENSG00000128052_15 (sequence is synthesized)
ataaaaatcaatttgctctaattgaaggaaaaaacaaaactgtaagtacccttgttatccaagcggcaaatgtgtcagctttgtacaaatgtgaagcggtcaacaaagtcgggagaggag

SEQ ID NO: 274087 - DNA, 120 bp, Artificial Sequence
  ENSG00000128052_16 (sequence is synthesized)
agagggtgatctccttccacgtgaccaggggtcctgaaattactttgcaacctgacatgcagcccactgagcaggagagcgtgtctttgtggtgcactgcagacagatctacgtttgaga

SEQ ID NO: 274088 - DNA, 120 bp, Artificial Sequence
  ENSG00000128052_17 (sequence is synthesized)
acctcacatggtacaagcttggcccacagcctctgccaatccatgtgggagagttgcccacacctgtttgcaagaacttggatactctttggaaattgaatgccaccatgttctctaata

SEQ ID NO: 274089 - DNA, 120 bp, Artificial Sequence
  ENSG00000128052_18 (sequence is synthesized)
gcacaaatgacattttgatcatggagcttaagaatgcatccttgcaggaccaaggagactatgtctgccttgctcaagacaggaagaccaagaaaagacattgcgtggtcaggcagctca

SEQ ID NO: 274090 - DNA, 120 bp, Artificial Sequence
  ENSG00000128052_19 (sequence is synthesized)
cagtcctagagcgtgtggcacccacgatcacaggaaacctggagaatcagacgacaagtattggggaaagcatcgaagtctcatgcacggcatctgggaatccccctccacagatcatgt

SEQ ID NO: 274091 - DNA, 120 bp, Artificial Sequence
  ENSG00000128052_20 (sequence is synthesized)
ggtttaaagataatgagacccttgtagaagactcaggcattgtattgaaggatgggaaccggaacctcactatccgcagagtgaggaaggaggacgaaggcctctacacctgccaggcat

SEQ ID NO: 274092 - DNA, 120 bp, Artificial Sequence
  ENSG00000128052_21 (sequence is synthesized)
gcagtgttcttggctgtgcaaaagtggaggcatttttcataatagaaggtgcccaggaaaagacgaacttggaaatcattattctagtaggcacggcggtgattgccatgttcttctggc

SEQ ID NO: 274093 - DNA, 120 bp, Artificial Sequence
  ENSG00000128052_22 (sequence is synthesized)
tacttcttgtcatcatcctacggaccgttaagcgggccaatggaggggaactgaagacaggctacttgtccatcgtcatggatccagatgaactcccattggatgaacattgtgaacgac

SEQ ID NO: 274094 - DNA, 120 bp, Artificial Sequence
  ENSG00000128052_23 (sequence is synthesized)
tgccttatgatgccagcaaatgggaattccccagagaccggctgaagctaggtaagcctcttggccgtggtgcctttggccaagtgattgaagcagatgcctttggaattgacaagacag

SEQ ID NO: 274095 - DNA, 120 bp, Artificial Sequence
  ENSG00000128052_24 (sequence is synthesized)
tgaactcaagatcctcattcatattggtcaccatctcaatgtggtcaaccttctaggtgcctgtaccaagccaggagggccactcatggtgattgtggaattctgcaaatttggaaacct

SEQ ID NO: 274096 - DNA, 120 bp, Artificial Sequence
  ENSG00000128052_25 (sequence is synthesized)
gtccacttacctgaggagcaagagaaatgaatttgtcccctacaagaccaaaggggcacgattccgtcaagggaaagactacgttggagcaatccctgtggatctgaaacggcgcttgga

SEQ ID NO: 274097 - DNA, 120 bp, Artificial Sequence
  ENSG00000128052_26 (sequence is synthesized)
cagcatcaccagtagccagagctcagccagctctggatttgtggaggagaagtccctcagtgatgtagaagaagaggaagctcctgaagatctgtataaggacttcctgaccttggagca

SEQ ID NO: 274098 - DNA, 120 bp, Artificial Sequence
  ENSG00000128052_27 (sequence is synthesized)
tctcatctgttacagcttccaagtggctaagggcatggagttcttggcatcgcgaaagtgtatccacagggacctggcggcacgaaatatcctcttatcggagaagaacgtggttaaaat

SEQ ID NO: 274099 - DNA, 120 bp, Artificial Sequence
  ENSG00000128052_28 (sequence is synthesized)
ctgtgactttggcttggcccgggatatttataaagatccagattatgtcagaaaaggagatgctcgcctccctttgaaatggatggccccagaaacaatttttgacagagtgtacacaat

SEQ ID NO: 274100 - DNA, 120 bp, Artificial Sequence
  ENSG00000128052_29 (sequence is synthesized)
ccagagtgacgtctggtcttttggtgttttgctgtgggaaatattttccttaggtgcttctccatatcctggggtaaagattgatgaagaattttgtaggcgattgaaagaaggaactag

SEQ ID NO: 274101 - DNA, 120 bp, Artificial Sequence
  ENSG00000128052_30 (sequence is synthesized)
aatgagggcccctgattatactacaccagaaatgtaccagaccatgctggactgctggcacggggagcccagtcagagacccacgttttcagagttggtggaacatttgggaaatctctt

SEQ ID NO: 274102 - DNA, 120 bp, Artificial Sequence
  ENSG00000128052_31 (sequence is synthesized)
gcaagctaatgctcagcaggatggcaaagactacattgttcttccgatatcagagactttgagcatggaagaggattctggactctctctgcctacctcacctgtttcctgtatggagga

SEQ ID NO: 274103 - DNA, 120 bp, Artificial Sequence
  ENSG00000128052_32 (sequence is synthesized)
ggaggaagtatgtgaccccaaattccattatgacaacacagcaggaatcagtcagtatctgcagaacagtaagcgaaagagccggcctgtgagtgtaaaaacatttgaagatatcccgtt

SEQ ID NO: 274104 - DNA, 120 bp, Artificial Sequence
  ENSG00000128052_33 (sequence is synthesized)
agaagaaccagaagtaaaagtaatcccagatgacaaccagacggacagtggtatggttcttgcctcagaagagctgaaaactttggaagacagaaccaaattatctccatcttttggtgg

SEQ ID NO: 274105 - DNA, 120 bp, Artificial Sequence
  ENSG00000128052_34 (sequence is synthesized)
aatggtgcccagcaaaagcagggagtctgtggcatctgaaggctcaaaccagacaagcggctaccagtccggatatcactccgatgacacagacaccaccgtgtactccagtgaggaagc

SEQ ID NO: 274106 - DNA, 120 bp, Artificial Sequence
  ENSG00000128052_35 (sequence is synthesized)
agaacttttaaagctgatagagattggagtgcaaaccggtagcacagcccagattctccagcctgactcggggaccacactgagctctcctcctgtttaaaaggaagcatccacaccccc

SEQ ID NO: 274107 - DNA, 120 bp, Artificial Sequence
  ENSG00000128052_36 (sequence is synthesized)
aactcctggacatcacatgagaggtgctgctcagattttcaagtgttgttctttccaccagcaggaagtagccgcatttgattttcatttcgacaacagaaaaaggacctcggactgcag

SEQ ID NO: 274108 - DNA, 120 bp, Artificial Sequence
  ENSG00000128052_37 (sequence is synthesized)
ggagccagtcttctaggcatatcctggaagaggcttgtgacccaagaatgtgtctgtgtcttctcccagtgttgacctgatcctctttttcattcatttaaaaagcatttatcatgcccc

SEQ ID NO: 274109 - DNA, 120 bp, Artificial Sequence
  ENSG00000128052_38 (sequence is synthesized)
ctgctgcgggtctcaccatgggtttagaacaaagacgttcaagaaatggccccatcctcaaagaagtagcagtacctggggagctgacacttctgtaaaactagaagataaaccaggcaa

SEQ ID NO: 274110 - DNA, 120 bp, Artificial Sequence
  ENSG00000128052_39 (sequence is synthesized)
tgtaagtgttcgaggtgttgaagatgggaaggatttgcagggctgagtctatccaagaggctttgtttaggacgtgggtcccaagccaagccttaagtgtggaattcggattgatagaaa

SEQ ID NO: 274111 - DNA, 120 bp, Artificial Sequence
  ENSG00000128052_40 (sequence is synthesized)
ggaagactaacgttaccttgctttggagagtactggagcctgcaaatgcattgtgtttgctctggtggaggtgggcatggggtctgttctgaaatgtaaagggttcagacggggtttctg

SEQ ID NO: 274112 - DNA, 120 bp, Artificial Sequence
  ENSG00000128052_41 (sequence is synthesized)
gttttagaaggttgcgtgttcttcgagttgggctaaagtagagttcgttgtgctgtttctgactcctaatgagagttccttccagaccgttacgtgtctcctggccaagccccaggaagg

SEQ ID NO: 274113 - DNA, 120 bp, Artificial Sequence
  ENSG00000128052_42 (sequence is synthesized)
aaatgatgcagctctggctccttgtctcccaggctgatcctttattcagaataccacaaagaaaggacattcagctcaaggctccctgccgtgttgaagagttctgactgcacaaaccag

SEQ ID NO: 274114 - DNA, 120 bp, Artificial Sequence
  ENSG00000128052_43 (sequence is synthesized)
cttctggtttcttctggaatgaataccctcatatctgtcctgatgtgatatgtctgagactgaatgcgggaggttcaatgtgaagctgtgtgtggtgtcaaagtttcaggaaggatttta

SEQ ID NO: 274115 - DNA, 120 bp, Artificial Sequence
  ENSG00000128052_44 (sequence is synthesized)
cccttttgttcttccccctgtccccaacccactctcaccccgcaacccatcagtattttagttatttggcctctactccagtaaacctgattgggtttgttcactctctgaatgattatt

SEQ ID NO: 274116 - DNA, 120 bp, Artificial Sequence
  ENSG00000128052_45 (sequence is synthesized)
agccagacttcaaaattattttatagcccaaattataacatctattgtattatttagacttttaacatatagagctatttctactgatttttgcccttgttctgtcctttttttcaaaaa

SEQ ID NO: 274117 - DNA, 120 bp, Artificial Sequence
  ENSG00000128052_46 (sequence is synthesized)
agaaaatgtgttttttgtttggtaccatagtgtgaaatgctgggaacaatgactataagacatgctatggcacatatatttatagtctgtttatgtagaaacaaatgtaatatattaaag

SEQ ID NO: 274118 - DNA, 120 bp, Artificial Sequence
  ENSG00000128052_47 (sequence is synthesized)
ccttatatataatgaactttgtactattcacattttgtatcagtattatgtagcataacaaaggtcataatgctttcagcaattgatgtcattttattaaagaacattgaaaaacttgaa

SEQ ID NO: 274119 - DNA, 120 bp, Artificial Sequence
  ENSG00000128052_48 (sequence is synthesized)
tgcttccttatgaggaagtgctgaaatgatcagaccctcagaatcatagtgaacctgaaatgcaaaaatccagttttgcagaagaagagaatctgggcatgattccactgcagatgtatt

SEQ ID NO: 274120 - DNA, 120 bp, Artificial Sequence
  ENSG00000128052_49 (sequence is synthesized)
ctccgctttgcaaaaggtttcacaatgggttcctttaaatatcaaactttctggctcacttaaaatatgaattttatttcaaattagaaaatagaatttacacttcacttttgaggaaat

SEQ ID NO: 274121 - DNA, 120 bp, Artificial Sequence
  ENSG00000128059_0 (sequence is synthesized)
agtagctggggccaccctcgggaaggaagagcctgtcgcgagcgcgagcttctgagctcgacgggccgagctggcagctggttggtgcttacaccttggccgcagcggcaggtccttcca

SEQ ID NO: 274122 - DNA, 120 bp, Artificial Sequence
  ENSG00000128059_1 (sequence is synthesized)
cgtgctttcggcggcgacatggagctggaggagttggggatccgagaggaatgtggcgtgttcgggtgcatcgcctcaggagagtggcccacgcagctggatgtaccgcatgtgatcact

SEQ ID NO: 274123 - DNA, 120 bp, Artificial Sequence
  ENSG00000128059_2 (sequence is synthesized)
ctgggactcgtggggctgcagcaccggggtcaggagagtgctggtattgtgactagtgatgggagttcggtgccaacattcaaatcacacaagggaatgggtcttgtaaatcacgtcttt

SEQ ID NO: 274124 - DNA, 120 bp, Artificial Sequence
  ENSG00000128059_3 (sequence is synthesized)
actgaagacaatttgaaaaaattatatgtttcaaatcttggaattggacacaccaggtatgccaccacaggaaaatgtgaactagaaaattgtcagcccttcgttgttgaaacacttcat

SEQ ID NO: 274125 - DNA, 120 bp, Artificial Sequence
  ENSG00000128059_4 (sequence is synthesized)
gggaagatagctgtggcacataatggcgaattggtaaatgctgctcgattaaggaaaaagcttctgcgtcatggtattggtctgtctacaagttctgatagtgaaatgattacccagtta

SEQ ID NO: 274126 - DNA, 120 bp, Artificial Sequence
  ENSG00000128059_5 (sequence is synthesized)
ctggcgtatacccctcctcaggaacaagatgacaccccagactgggtagccaggattaaaaacttgatgaaggaagcacccacagcatactccctgcttataatgcacagagatgttatt

SEQ ID NO: 274127 - DNA, 120 bp, Artificial Sequence
  ENSG00000128059_6 (sequence is synthesized)
tatgcagtacgagatccttatggaaatcgtcccttatgcattggtcgtcttattccagtgtctgatataaatgacaaagagaaaaaaacatcagaaacagaaggatgggtggtgtcttca

SEQ ID NO: 274128 - DNA, 120 bp, Artificial Sequence
  ENSG00000128059_7 (sequence is synthesized)
gaatcttgtagcttcttatctattggtgcaagatattaccgtgaagtcttgcctggagaaattgtggaaatatccagacacaatgtccaaactcttgatattatatcaaggtctgaagga

SEQ ID NO: 274129 - DNA, 120 bp, Artificial Sequence
  ENSG00000128059_8 (sequence is synthesized)
aacccagtggctttttgtatctttgaatatgtttattttgcaagaccagacagtatgttcgaagaccaaatggtttatacagtaagataccgttgtggccagcagctagcgattgaagca

SEQ ID NO: 274130 - DNA, 120 bp, Artificial Sequence
  ENSG00000128059_9 (sequence is synthesized)
cctgtggatgcagatttggttagcactgttccagaatctgctacgcctgctgctcttgcttacgcaggaaagtgtggacttccatatgtggaggtgctgtgtaaaaaccggtatgtaggg

SEQ ID NO: 274131 - DNA, 120 bp, Artificial Sequence
  ENSG00000128059_10 (sequence is synthesized)
agaaccttcattcagccaaacatgaggttaagacaacttggtgttgcaaaaaaatttggagtattgtcagacaactttaaaggcaaaagaattgttcttgtagatgattcaattgtcaga

SEQ ID NO: 274132 - DNA, 120 bp, Artificial Sequence
  ENSG00000128059_11 (sequence is synthesized)
ggcaataccatctcacctataataaaactgctcaaagaatctggtgcaaaagaggtacacattcgagtagcttcaccaccaattaaatatccatgcttcatgggaataaacattcctaca

SEQ ID NO: 274133 - DNA, 120 bp, Artificial Sequence
  ENSG00000128059_12 (sequence is synthesized)
aaagaagagctcattgccaataaaccagaatttgatcaccttgcagaatatctaggagcaaacagtgttgtgtatctgtcagtagaaggactggtttcatctgtacaagaagggataaag

SEQ ID NO: 274134 - DNA, 120 bp, Artificial Sequence
  ENSG00000128059_13 (sequence is synthesized)
tttaaaaaacagaaagagaaaaagcacgatattatgatccaagaaaatggaaatggtctggaatgttttgaaaagagtggtcattgtacagcttgtctcactggaaaatatcctgtagaa

SEQ ID NO: 274135 - DNA, 120 bp, Artificial Sequence
  ENSG00000128059_14 (sequence is synthesized)
ttagaatggtagctggtagggttggatgtgtgtagtttcaagatagaaagttggtcaagaagttatagtggtcacacctcatctatttactgttactcagttggtacaatgtaaaatgcc

SEQ ID NO: 274136 - DNA, 120 bp, Artificial Sequence
  ENSG00000128059_15 (sequence is synthesized)
tataatacaacaatatgtggtgttcttttttttacacaagcattggctagcctttttaacctggtcagagaaggcaggtggtcactgacatttcccaagtccatgctttaaagggtttgc

SEQ ID NO: 274137 - DNA, 120 bp, Artificial Sequence
  ENSG00000128059_16 (sequence is synthesized)
aagaagttagggttaaggagaggtgatgccaacaagacaggtgagttaaatataccatttcacacaaagtttgaatagaatacattatacctcataggtgtctagcctctacagttctgg

SEQ ID NO: 274138 - DNA, 120 bp, Artificial Sequence
  ENSG00000128059_17 (sequence is synthesized)
ctgtagttatgaccttggcttccctgtctaactgtagacaaatctttaaaaaaaaataataataatctggtgcctcagtttccccacatgtgcaatgggatacttattaaataattaata

SEQ ID NO: 274139 - DNA, 120 bp, Artificial Sequence
  ENSG00000128059_18 (sequence is synthesized)
agaatgtgaataagtgtcatacttttgtgatttgagccatcatttcacttctgattttaagacaactcatgattgttagctttcagaaagctaatgattgttaactttttgaaattagtt

SEQ ID NO: 274140 - DNA, 120 bp, Artificial Sequence
  ENSG00000128059_19 (sequence is synthesized)
tacaattaattaagatttcattatgatggaaggagacataattggcagatctttgccatctctctttgagatgtcctaaaaagggttgtaaaaatctgtgaaaaagtttttcctacattt

SEQ ID NO: 274141 - DNA, 120 bp, Artificial Sequence
  ENSG00000128059_20 (sequence is synthesized)
gactagaaaatgtgatccatagtatttagtgccctgatactataagctcagcaagtaacctggtacatttgaaataaaaaccaaatttttagattcaaacaatccctttatccttaattt

SEQ ID NO: 274142 - DNA, 120 bp, Artificial Sequence
  ENSG00000128059_21 (sequence is synthesized)
aattaattatcatatgctttttttaatgaagtgcttgatcacttgcaaacatatatacatgtagatgtacatatacatgtacacatacacataaatattattgcaattaagtgatcaagt

SEQ ID NO: 274143 - DNA, 120 bp, Artificial Sequence
  ENSG00000128059_22 (sequence is synthesized)
acagacacaataggggccagttttgtttaaggatcaaagagacaaccactttggggaattagtatcaacttacaatccaagtccaagtatcatcttataatcacttttttctactatatt

SEQ ID NO: 274144 - DNA, 120 bp, Artificial Sequence
  ENSG00000128059_23 (sequence is synthesized)
aagatctaatgaatttgatttcttttttgaagttttttcttgtaacatctgagattagaagtttaagatgacttgaccccaaacctttgtttatgtaagaatttttaaacataaaagtgt

SEQ ID NO: 274145 - DNA, 120 bp, Artificial Sequence
  ENSG00000128059_24 (sequence is synthesized)
ttgtttctgttatgttaccataatttgatgtatatagtgtccagatccatttagaaatttaatatttattaataactgaaactgtttgtcttcctttggtatatagtctcgcatattata

SEQ ID NO: 274146 - DNA, 120 bp, Artificial Sequence
  ENSG00000128059_25 (sequence is synthesized)
ttatagcaggccaagataaaattttgacagctctttaagcccacatgcagcagtgggtcagataaccctgtggcagtgacacgggcaaattggcatttgaataaagccctgggaccacct

SEQ ID NO: 274147 - DNA, 120 bp, Artificial Sequence
  ENSG00000128059_26 (sequence is synthesized)
caacatgcgtagcctcttgtcttaaatgtactccccatggcagcatggaggaggcaagacctgtgggtcaattttgaactggccttactttgatttttaaaacaagagactcagggaaag

SEQ ID NO: 274148 - DNA, 120 bp, Artificial Sequence
  ENSG00000128059_27 (sequence is synthesized)
tactaaaccaaaatctctgattttactttgcgttttctgtagtttttgttttactgagatgcttttgtaaaggaaaataatactgtgacagtttagtaattctacagattcttaatattt

SEQ ID NO: 274149 - DNA, 120 bp, Artificial Sequence
  ENSG00000128059_28 (sequence is synthesized)
ctccatcatggccttttacttcacaattttctgaagtctgaattcaattacaatttttttttaccaatttaatctcaaatgttgtttaactgctttaaattcatatacgtagagtattat

SEQ ID NO: 274150 - DNA, 120 bp, Artificial Sequence
  ENSG00000128059_29 (sequence is synthesized)
aaactgcagagatgaaaaatgtgttttcacgggatttatattgtgaactaaactaagcctactttttgtgacttatttgtgatgccttgttgataaatatgtgtaataagtatgtttaaa

SEQ ID NO: 274151 - DNA, 120 bp, Artificial Sequence
  ENSG00000128059_30 (sequence is synthesized)
caggcgtgagccaccgtacccggctgtctctgatgtcttttaattctctctagtcattgtatagaacaagaaaaataagaaagggtcaggagagtgctggtattgtgactagtgatggga

SEQ ID NO: 274152 - DNA, 120 bp, Artificial Sequence
  ENSG00000128059_31 (sequence is synthesized)
cagccatggtcatccgttattagtatatacatactattagcgcaggagtccccaacccctgtgctagggactagtaccagtctgtggcttgttaggaaccaggccacacagcaggaggtg

SEQ ID NO: 274153 - DNA, 120 bp, Artificial Sequence
  ENSG00000128059_32 (sequence is synthesized)
ttacgcaggaaaggtattttctcttaattaacatgcagtgaattgctctcccagctgtggaataagaaacccttgcctataaagagaaactcatcaacatttctaaggagaaaggaagct

SEQ ID NO: 274154 - DNA, 120 bp, Artificial Sequence
  ENSG00000128059_33 (sequence is synthesized)
ttggtggttaatgttggtttgtttacaagcgttttttattttccaggctttttatccaatggcactattttagtgaaaaccactaaaaggttcactgaaaagaaaaaaacgttcactaaa

SEQ ID NO: 274155 - DNA, 120 bp, Artificial Sequence
  ENSG00000128059_34 (sequence is synthesized)
gcgttcagaaattggcacccttctttttaaaaagataacatcatgaatatacagttgacccttgaacaatttgggagttaaaggtgccaaccctctgcacagtcaaatctgtgtatgcat

SEQ ID NO: 274156 - DNA, 120 bp, Artificial Sequence
  ENSG00000128059_35 (sequence is synthesized)
tttaatgcccccaaacttaaatactgataacctactgttgactggaagcctgaccaataacataaacagttgattaacatattttgtatatgtattatatgctgtattcttgcaataacg

SEQ ID NO: 274157 - DNA, 120 bp, Artificial Sequence
  ENSG00000128059_36 (sequence is synthesized)
taagctagagaaaagtaaatgctttgaagaaaatcataaggaggagaaaatatatttactattccttatgtgaaagtggatcttcataaaggtcttcatcctcattgttgtcttcacgtt

SEQ ID NO: 274158 - DNA, 120 bp, Artificial Sequence
  ENSG00000128059_37 (sequence is synthesized)
gagtaggctgaggagggaagaggaaaaggggctggacttgctgtcccaggggtggcagagatggaagaaaacccacctataagtagactcatgtacttcaaacccatggtgttcatcaac

SEQ ID NO: 274159 - DNA, 120 bp, Artificial Sequence
  ENSG00000128059_38 (sequence is synthesized)
tatatattcagtggaaaaatttacttaatattaaaataaacgtcttgaattatcttcacaagtcactggaatatttgcttgctactaagtatgggtaataataaagctgtttatgttcat

SEQ ID NO: 274160 - DNA, 120 bp, Artificial Sequence
  ENSG00000128059_39 (sequence is synthesized)
ttagcatgatgttgtcagtgttacgctttattttcataaccaggtagatggtgtaactgtagtaatcctggggtataacatccaatattcactaccttggatactttattaacttctaaa

SEQ ID NO: 274161 - DNA, 120 bp, Artificial Sequence
  ENSG00000128059_40 (sequence is synthesized)
agaattaatatgcatacattttagaaaagattaccttgataaatgggttaattacttcctatccctaaaaagtatctcattggtctactggtttttatttatttattttaattcatttct

SEQ ID NO: 274162 - DNA, 120 bp, Artificial Sequence
  ENSG00000128059_41 (sequence is synthesized)
ttaaaaattatcattttgataatgaatttttctgacagtgatttaatctttgtcatgtcttcatatgcttactgttatctttcaaaacagaggaataatgtttaagacaaaaacattatg

SEQ ID NO: 274163 - DNA, 120 bp, Artificial Sequence
  ENSG00000128059_42 (sequence is synthesized)
agtcctcacaaaatgaattggtttttccaccaagtatattttgtttagtggtttttctttttgccttttttccaaataataaaggaaaattattttgaaattttacttgaatattgtggc

SEQ ID NO: 274164 - DNA, 120 bp, Artificial Sequence
  ENSG00000128059_43 (sequence is synthesized)
ggcaacacaacctagagaaaatatttgcctattctgtatattactcctcattatcctttcatttcttctctatcagtgtggacttccatatgtggaggtgctgtgtaaaaaccggtatgt

SEQ ID NO: 274165 - DNA, 120 bp, Artificial Sequence
  ENSG00000128159_0 (sequence is synthesized)
acactggcgcggctgtgacgcgacggaggcggcgagagcggcagccgtgggcactttccacgggtgaggcctggagaacgggtggacgtgcaggccagaacccgggacccacccggctga

SEQ ID NO: 274166 - DNA, 120 bp, Artificial Sequence
  ENSG00000128159_1 (sequence is synthesized)
gcccccagactctccgctgcccacgaccctcggagtggcaccctctcctggccgtctcctctcgtgggtcccgaagaacgggtgcaaagccgagttcgtccgctgtactgcgcgggcgcg

SEQ ID NO: 274167 - DNA, 120 bp, Artificial Sequence
  ENSG00000128159_2 (sequence is synthesized)
cgtttcgttcttcggttttgccacggttctgtgactccctaaaggttgagggctactgaattagaagaaacgccgagctggcttctggtgggctgccgggcgccgggcagcgtgcttgga

SEQ ID NO: 274168 - DNA, 120 bp, Artificial Sequence
  ENSG00000128159_3 (sequence is synthesized)
ctggggagggcagggcgtgtttactctgagtagagcaaccgcaagacctcctttaaaaaataccagttctgagcttcggcattggagaggccgcctgtcattcagcctcttcggaccctc

SEQ ID NO: 274169 - DNA, 120 bp, Artificial Sequence
  ENSG00000128159_4 (sequence is synthesized)
tctcactccctgtcttccggagcgtgagtgaagcccgggtgaggtgttttcccacacgccgggggcccggagctgagaaggggcatggccagcatcacgcagctgttcgacgacctgtgt

SEQ ID NO: 274170 - DNA, 120 bp, Artificial Sequence
  ENSG00000128159_5 (sequence is synthesized)
gaggccctcctgccggctgccaagactcacctgggccagcgcagtgtgaaccggaagagggcaaagcggagcctcaagaaggtggcctacaatgctcttttcacaaatctttttcaagat

SEQ ID NO: 274171 - DNA, 120 bp, Artificial Sequence
  ENSG00000128159_6 (sequence is synthesized)
gagactcaacagctgcagcctgacatgtcaaaactaccagcgagaaacaagatcctcatgttgtcctttgacttgagagtgggtggcctgggccccaaggccgaccgtttggaggagctt

SEQ ID NO: 274172 - DNA, 120 bp, Artificial Sequence
  ENSG00000128159_7 (sequence is synthesized)
gtggaggagctggaagcagccccttgctgtccgcttttggaggtggggtctgttttggacctcctggttcagctggcagggagtggtccccctcaagttctgccgagaaaacgagactac

SEQ ID NO: 274173 - DNA, 120 bp, Artificial Sequence
  ENSG00000128159_8 (sequence is synthesized)
ttccttaacaacaagcatgtggggagaaacgttccgtacagcggctatgattgcgacgacctgagtgtgtttgagatggacgttcagtctctgatctccagagaagagtgtttgtgtcac

SEQ ID NO: 274174 - DNA, 120 bp, Artificial Sequence
  ENSG00000128159_9 (sequence is synthesized)
agcatgatccaggaaacacttcaggttatggaggctgctccaggcactggcctgcccaccgtcgggctcttctcatttggtgacccttgtggtgacaggttcgagagagacacccgggtc

SEQ ID NO: 274175 - DNA, 120 bp, Artificial Sequence
  ENSG00000128159_10 (sequence is synthesized)
tcgctcttcggggcccttgtgcacagccgcacttatgacatggacgtccgactgggcctgccccccgtgccagacaatgcggacctctctgggctggctattaaggtcccaccgagtgtg

SEQ ID NO: 274176 - DNA, 120 bp, Artificial Sequence
  ENSG00000128159_11 (sequence is synthesized)
gatcagtgggaagacgaaggattccagtcagcgtccaacttgactcctgattcccagtctgagcccagcgtgaccccagacgtggacctgtgggaagccgcacttacctatgaggccagc

SEQ ID NO: 274177 - DNA, 120 bp, Artificial Sequence
  ENSG00000128159_12 (sequence is synthesized)
aagcggaggtgctgggagcgagttggctgcccccctggccacagagaggagccttacctgacggaggcgggaagggacgctttcgacaagttctgcaggctccaccaaggggagctccag

SEQ ID NO: 274178 - DNA, 120 bp, Artificial Sequence
  ENSG00000128159_13 (sequence is synthesized)
ctgcttgctgggggcgtcctacaggccccgcagcccgtgctggtgaaggagtgcgagctggtgaaagacgtgctgaacgtcttgattggggtcgtgtctgccacgttttcgctctgccag

SEQ ID NO: 274179 - DNA, 120 bp, Artificial Sequence
  ENSG00000128159_14 (sequence is synthesized)
ccggcccaggcctttgtggtgaagcggggcgtccacgtgtcaggagcgtctcccgagagcatcagcagcctgctctcggaagtggccgagtatgggacctgctacacgcgcctgagtcat

SEQ ID NO: 274180 - DNA, 120 bp, Artificial Sequence
  ENSG00000128159_15 (sequence is synthesized)
ttctctctgcagcccgtcctggactctttgtacagcaagggcctcgtgttccaggccttcaccagtggcctgaggaggtacctgcagtattaccgggcctgcgtcctttccactccgccc

SEQ ID NO: 274181 - DNA, 120 bp, Artificial Sequence
  ENSG00000128159_16 (sequence is synthesized)
accctgagcctcctcaccattggttttctcttcaagaaacttggccggcagctcaggtacctggccgagctctgtggcgttggcgctgtgctcccgggcacctgtggaggaggccccagg

SEQ ID NO: 274182 - DNA, 120 bp, Artificial Sequence
  ENSG00000128159_17 (sequence is synthesized)
gccgcgtttcccaccggcgtgaagctgctgtcctacctctaccaggaggctctgcacaactgcagcaacgagcactaccctgtactgctgtccctgctgaagaccagctgcgagccctac

SEQ ID NO: 274183 - DNA, 120 bp, Artificial Sequence
  ENSG00000128159_18 (sequence is synthesized)
acccggttcatccacgactgggtgtacagcggggtgttcagagacgcttatggcgagttcatgattcaggtgaaccacgagtacctcagcttccgagataagttgtactggacacatggc

SEQ ID NO: 274184 - DNA, 120 bp, Artificial Sequence
  ENSG00000128159_19 (sequence is synthesized)
tacgtgctcatctccaaagaggtggaggactgtgttcccgtgtttctgaagcacattgcccacgacatatacgtctgcggaaagaccattaacctgctgaagctctgctgcccccggcat

SEQ ID NO: 274185 - DNA, 120 bp, Artificial Sequence
  ENSG00000128159_20 (sequence is synthesized)
tacctctgttggtccgacgtccctgtcccccggatctcggtgattttctcccttgaggagttgaaggagattgagaaggactgtgccgtctacgttgggcgcatggagagggtggcccgc

SEQ ID NO: 274186 - DNA, 120 bp, Artificial Sequence
  ENSG00000128159_21 (sequence is synthesized)
cacagctctgtcagcaaggaggagaaggaattacgtatggaaattgcaaaacaagaattaatcgctcatgcccgggaagcagcatccagggtcctgagtgcactgagtgaccggcagatg

SEQ ID NO: 274187 - DNA, 120 bp, Artificial Sequence
  ENSG00000128159_22 (sequence is synthesized)
tcagaacggatggccttggatgcccggaagcgtgagcagtttcagaggctgaaagaacaatttgtgaaggaccaggagcgacgccaggcggccaggcaggaggagctggatgatgacttc

SEQ ID NO: 274188 - DNA, 120 bp, Artificial Sequence
  ENSG00000128159_23 (sequence is synthesized)
agctacgcccgtgaactccgagacagggagagaaggctgaagtccctggaggaggagctggagaggaaggcgaggcaggcactggtcgaccactacagcaagctctctgcagaggcagct

SEQ ID NO: 274189 - DNA, 120 bp, Artificial Sequence
  ENSG00000128159_24 (sequence is synthesized)
cgtcgggagcagaaggcactgtggagaatccagaggcaccgactggagagtgcacggcttcgttttctcttagaagatgagaaacacattcaggagatgctgaaagcagtgtctgaggct

SEQ ID NO: 274190 - DNA, 120 bp, Artificial Sequence
  ENSG00000128159_25 (sequence is synthesized)
gagcacccagagggaggccaaggctgtgattctgggtctgcagagcaacactcgcctgcctgggatggctggaacaggccaggcctgctgaccccacagccccttaagcctctagcagtg

SEQ ID NO: 274191 - DNA, 120 bp, Artificial Sequence
  ENSG00000128159_26 (sequence is synthesized)
ggggctggtggcagggggctgcagcaggcggagggggccagacccttctctgacagcctcagcattggagacttcctacctgtgggcccaggggctgagccgtccgtgcagactggcatg

SEQ ID NO: 274192 - DNA, 120 bp, Artificial Sequence
  ENSG00000128159_27 (sequence is synthesized)
gtccctctcctggaggtggcgctgcagaccattaacttggacctgcccccctcagctcctggggaggcacccgcagcagccagcactcagccctccaggccacaggagtacgactttagt

SEQ ID NO: 274193 - DNA, 120 bp, Artificial Sequence
  ENSG00000128159_28 (sequence is synthesized)
actgtcctgaggccagctgtggccacctcacctgcaccagggcccctgcaggctgcagagtgcagcttgggcagctcagggctacagctgtgggaggacagttgtgggaagatggatgcc

SEQ ID NO: 274194 - DNA, 120 bp, Artificial Sequence
  ENSG00000128159_29 (sequence is synthesized)
tgtggctccgcctcgcgggagactctgctcccctcacacccacccaggcgtgctgctctggaggaggggagcagccagcccacagagcggctctttgggcaggtgtcagggggtggtctt

SEQ ID NO: 274195 - DNA, 120 bp, Artificial Sequence
  ENSG00000128159_30 (sequence is synthesized)
cccacaggggactacgcttctgaaatagctcccacccggccacggtggaacacccacgggcacgtgtctgacgccagcatcagggtcggggagaatgtgtcagatgtggctcccacccag

SEQ ID NO: 274196 - DNA, 120 bp, Artificial Sequence
  ENSG00000128159_31 (sequence is synthesized)
ccacggtggaacacccacggacacgtatccaatgccagcatcagcttaggggagtctgtgtcagatgtggctcccactcggccacggtggaacatccatggacatgtgtccaacgccagc

SEQ ID NO: 274197 - DNA, 120 bp, Artificial Sequence
  ENSG00000128159_32 (sequence is synthesized)
atcagggtcggggagaatgtgtcagatgtggctcccaccaggccacggtggaatacccacgggcacgtgtccaacgccagcatcagggttggggagaacgtgtcggacgtggctcccacc

SEQ ID NO: 274198 - DNA, 120 bp, Artificial Sequence
  ENSG00000128159_33 (sequence is synthesized)
cggccacggtggaacacccatggacacgtgtccgatgccagcatcagcttgggggagtctgtgtcagacatggctcccgcccggccacggtggaacacccatggacacgtgtctgatgcc

SEQ ID NO: 274199 - DNA, 120 bp, Artificial Sequence
  ENSG00000128159_34 (sequence is synthesized)
agcatcagcttgggggagtctgtgtcagacatggctcccacccggccacggtggaacacccacggacatgtgtctgacaccagcatcagggttggggagaacgtatcggacgtggctccc

SEQ ID NO: 274200 - DNA, 120 bp, Artificial Sequence
  ENSG00000128159_35 (sequence is synthesized)
atccggtcacggtgcaacacccatggacacgtgtccgacgccagcatcagcttgggggagcctgtgtcggatgtggtttccacccggccacggtggaacacccatgtacccatccctccg

SEQ ID NO: 274201 - DNA, 120 bp, Artificial Sequence
  ENSG00000128159_36 (sequence is synthesized)
ccccacatggtgctgggggctctctcaccagaagctgagcccaacacacccaggccccaacagagcccccctggccacacgtcccagtcagcgctcagcctgggagcacagagcactgtg

SEQ ID NO: 274202 - DNA, 120 bp, Artificial Sequence
  ENSG00000128159_37 (sequence is synthesized)
ctggactgtgggccacggctgcctgtagaagtggggccatctctgtcctcccccagctcgggctgcggggaggggagcatcagcgtgggggagaacgtgtcagacgtggctcccacccaa

SEQ ID NO: 274203 - DNA, 120 bp, Artificial Sequence
  ENSG00000128159_38 (sequence is synthesized)
ccatggtggcccaacaccccgggagacagtgtctctgaagaactaggccctgggaggagcggggacactgaggacctctctccaaattggcctctcaactcacaggaagacacagctgcc

SEQ ID NO: 274204 - DNA, 120 bp, Artificial Sequence
  ENSG00000128159_39 (sequence is synthesized)
cagagcagcccaggccgtggtgaggaggcggaggcatcggcggcggaggctcagggtggggagcaggcctacctggcaggcctggcagggcagtaccacttggagcggtacccggacagt

SEQ ID NO: 274205 - DNA, 120 bp, Artificial Sequence
  ENSG00000128159_40 (sequence is synthesized)
tacgagtccatgtccgagccgcccattgctcatcttttgcgccccgtgcttccccgggccttcgccttccccgtggacccccaggtccagtctgccgctgatgagactgctgtgcagctg

SEQ ID NO: 274206 - DNA, 120 bp, Artificial Sequence
  ENSG00000128159_41 (sequence is synthesized)
agcgagttgctgacgctgcccgtgctcatgaagcgctccatcacggcaccgctggccgcccacatctccttggtgaacaaggccgctgtcgactacttcttcgtggagctgcacctggag

SEQ ID NO: 274207 - DNA, 120 bp, Artificial Sequence
  ENSG00000128159_42 (sequence is synthesized)
gcgcactatgaggcactgcggcacttcctgctgatggaggacggcgagttcgcccagtccctcagcgacctgctctttgagaagcttggagctgggcaaacgcccggagagctgctcaac

SEQ ID NO: 274208 - DNA, 120 bp, Artificial Sequence
  ENSG00000128159_43 (sequence is synthesized)
ccgctggtgctgaactctgtgctgagcaaggccctgcagtgcagcctgcatggggacaccccgcacgcctccaacctctccctcgctctcaagtacctgcccgaggtgtttgcccccaac

SEQ ID NO: 274209 - DNA, 120 bp, Artificial Sequence
  ENSG00000128159_44 (sequence is synthesized)
gccccggatgtgctgagctgcctggagctcaggtacaaggtggactggcctctcaacattgtcatcaccgagggctgcgtgagcaagtacagcggcgtcttctccttcctgctgcagctg

SEQ ID NO: 274210 - DNA, 120 bp, Artificial Sequence
  ENSG00000128159_45 (sequence is synthesized)
aagctcatgatgtgggcgctcaaggacgtctgcttccacctcaagcgcacagccctgctgagccacatggccggctctgtgcagttccgtcagctgcagctgttcaagcacgagatgcag

SEQ ID NO: 274211 - DNA, 120 bp, Artificial Sequence
  ENSG00000128159_46 (sequence is synthesized)
catttcgtgaaggtcatccagggctacatcgccaaccagatcctgcacgtcacctggtgcgagttcagggccaggttggccaccgtgggcgacctggaggagatccagcgtgcgcacgca

SEQ ID NO: 274212 - DNA, 120 bp, Artificial Sequence
  ENSG00000128159_47 (sequence is synthesized)
gagtacctgcacaaggccgtcttcaggggcctgctcacggagaaggcggcgcccgtcatgaacgtcatccacagcatcttcagcctcgtgctcaagttccgcagccagctcatctcccag

SEQ ID NO: 274213 - DNA, 120 bp, Artificial Sequence
  ENSG00000128159_48 (sequence is synthesized)
gcctgggggccccctgggggcccgcggggtgcagagcaccccaactttgcactcatgcagcagtcctacaacaccttcaagtactactcccactttctcttcaaagtggtgaccaagctg

SEQ ID NO: 274214 - DNA, 120 bp, Artificial Sequence
  ENSG00000128159_49 (sequence is synthesized)
gtgaaccgcggctaccagccccacctggaggactttctgctgcgcatcaacttcaacaactactaccaggacgcctgaggctgctctgcgggggacgtgcacaataaaggtgttctcgga

SEQ ID NO: 274215 - DNA, 120 bp, Artificial Sequence
  ENSG00000128159_50 (sequence is synthesized)
cagttgctgttggcagggagccctgggctggctggttcccagcacgtgctccacctcctgtgggttggggcggagccctgggctagccagttcccagcacgtgctccatctcctgtggat

SEQ ID NO: 274216 - DNA, 120 bp, Artificial Sequence
  ENSG00000128159_51 (sequence is synthesized)
gcccaggggtgcagtgcggcaggggccccatagctctggcttaatcttactgatgattttactttttgttttgaaaaccttcaaacatacattaaggtagaaagaccaatatgctgaacc

SEQ ID NO: 274217 - DNA, 120 bp, Artificial Sequence
  ENSG00000128159_52 (sequence is synthesized)
cagagtggctgtgggcgttctgccttatccaggcatccttagctgttctgcgcgttgtcttgtggtggtttgtatggattagggtccaggcgaggcctgcgtactgtttggggtcctgtc

SEQ ID NO: 274218 - DNA, 86 bp, Artificial Sequence
  ENSG00000128159_53 (sequence is synthesized)
tctttctgaacatccttccttatttatttttaagtctgttattggtctgacagagacagggcgttttttttttttttttttttttt

SEQ ID NO: 274219 - DNA, 76 bp, Artificial Sequence
  ENSG00000128159_54 (sequence is synthesized)
tcggctgagacagggcatttgtccagcacagcatctgcgtctgtctccctgtgctgttatcaacctgtcctgtgct

SEQ ID NO: 274220 - DNA, 120 bp, Artificial Sequence
  ENSG00000128159_55 (sequence is synthesized)
gcgtctgtctccctgtgctgttatcaacctgtcctgtgctgtcatcaggctgtcccaggctgagtagtgctggatccttcaaggggctgtttggggttttggagagagcccctcacggga

SEQ ID NO: 274221 - DNA, 120 bp, Artificial Sequence
  ENSG00000128159_56 (sequence is synthesized)
ggggctggccgcttcctgctcagccccacgcgatgctgtaggtcccaaccttagatctctttatggagcgagtgagggatgtgtgtggaggggtgcgcgtgcctgtgtgcacgtgtgtcc

SEQ ID NO: 274222 - DNA, 120 bp, Artificial Sequence
  ENSG00000128159_57 (sequence is synthesized)
gtgtatgcatttatgcatgagtacgtgttcatgcatgtatgtcagtcgatactgtcctgttaacacatggagaaaaccaggcctagacactacgtctctggcctgtggcagccaaattag

SEQ ID NO: 274223 - DNA, 120 bp, Artificial Sequence
  ENSG00000128159_58 (sequence is synthesized)
agctggccagtccaggtttgagcccagttgcctgctggtgagaagctcaaaatcatggggcacgatcggtgaagcaggctttgaattcagcaaataaagcgtttgtgttggttttgcttc

SEQ ID NO: 274224 - DNA, 120 bp, Artificial Sequence
  ENSG00000128159_59 (sequence is synthesized)
agtggggttggtggcatgtgaagttcccctcaggcctccttgtcagccaggacctgggctgctgtgggggacatgggaggggctgcttgagccagggccggctcggctctgtacccgcca

SEQ ID NO: 274225 - DNA, 120 bp, Artificial Sequence
  ENSG00000128165_0 (sequence is synthesized)
ggaaaggctacgtattcagccctggaggtgccatcccgggccgcgactccgctccaggcaggacccccaacccgcccagcccgctccgccttgcgccccggacccgcggccgaccccaga

SEQ ID NO: 274226 - DNA, 80 bp, Artificial Sequence
  ENSG00000128165_1 (sequence is synthesized)
cagacccgctgcccgcttcgcgcccgaggcctgcgccccgacggacgcccgtgcccagcttgccacgcccacgcccggcg

SEQ ID NO: 274227 - DNA, 120 bp, Artificial Sequence
  ENSG00000128165_2 (sequence is synthesized)
gatcccgacggccgccctgggttgcatcagcctcctctgcctgcagctccctggctcgctgtcccgcagcctgggcggggacccgcgacccgtcaaacccagggagcccccagcccggag

SEQ ID NO: 274228 - DNA, 120 bp, Artificial Sequence
  ENSG00000128165_3 (sequence is synthesized)
cccttccagcagcctgcagcccaggcaccccgcaccccgacctgtggtctggaagcttcaccgggccctccaggcacagaggggtgccggcctggcccctgttatgggtcagcctctccg

SEQ ID NO: 274229 - DNA, 120 bp, Artificial Sequence
  ENSG00000128165_4 (sequence is synthesized)
ggatggtggccgccaacactcgggcccccgaagacactcgggcccccgcaggacccaagcccagctcctgcgagtgggctgtgtgctgggcacctgccaggtgcagaatctcagccaccg

SEQ ID NO: 274230 - DNA, 120 bp, Artificial Sequence
  ENSG00000128165_5 (sequence is synthesized)
cctgtggcaactcatgggaccggccggccggcaggactcagctcctgtggaccccagcagcccccacagctatggctgaggtggggccgggccacacccctgcccatcccagccagggtg

SEQ ID NO: 274231 - DNA, 120 bp, Artificial Sequence
  ENSG00000128165_6 (sequence is synthesized)
ctgtgcccccgtccagagctgcagctgagccccatctgaagcccagtccctcggagctgcagacagcaggtcctgcagcaacaatacctgcacggctttgcacacgtaaacctaggctgg

SEQ ID NO: 274232 - DNA, 120 bp, Artificial Sequence
  ENSG00000128165_7 (sequence is synthesized)
tctacacgcagtgctggtacgtcaaggagcctaaacaccctgaaattgtgaccccctgggggacagctgccagacacagctggcggcagcaccagatgctaagcgcttcagagaggaggt

SEQ ID NO: 274233 - DNA, 120 bp, Artificial Sequence
  ENSG00000128165_8 (sequence is synthesized)
gtctgcccagagatgtggagcagaagctgggccctgaacacacggggccatgtctggacgagcaggggagagaggctgaactggccagaagtggcccctccgctgctggtccagtcagac

SEQ ID NO: 274234 - DNA, 120 bp, Artificial Sequence
  ENSG00000128165_9 (sequence is synthesized)
tgaagcccggccttgtgcctgggctgttcctgctctcatgcacaaccagcccttccacgtgcctgcctgtgggacaggagggggagcgtgggatgctgtagcccccggggttgggcaagg

SEQ ID NO: 274235 - DNA, 120 bp, Artificial Sequence
  ENSG00000128165_10 (sequence is synthesized)
gaaggatggtggccctccagaggtcatgaagggacctctgtggctccagctgccaaccctggagcccagaccgaggtggccatggagactccacctggatcccctgtaggaggccaggga

SEQ ID NO: 274236 - DNA, 120 bp, Artificial Sequence
  ENSG00000128165_11 (sequence is synthesized)
ggggaactcagcagttcaggagccaccccaaaccattctgggacagggacacccctttctaccccagggcagggcagggctgggtggggcaagatcccccagcccgactagacccacctc

SEQ ID NO: 274237 - DNA, 120 bp, Artificial Sequence
  ENSG00000128165_12 (sequence is synthesized)
acctgaagggggtgagacccttgttggcagccagacaagggtggggctccacaggcagcacaggcgccccaccaccacccagtttggggacccagtgggaccaggtgcgggggcagaggg

SEQ ID NO: 274238 - DNA, 120 bp, Artificial Sequence
  ENSG00000128165_13 (sequence is synthesized)
tgacttaccaagagccagggagggcagcccaggcccaagtgacagcaagaacaagaaccactgccggcgtgcacagacttggtgtgtgtccttccctggggggacgggggactcacatgt

SEQ ID NO: 274239 - DNA, 120 bp, Artificial Sequence
  ENSG00000128165_14 (sequence is synthesized)
gcctgccactggagcctctcaaccgtccagcagaacacggggttcagaaagggctccttctgctatttagcgaacactgagcatttaatttacaaatgtttgctagggtcaccctctcgg

SEQ ID NO: 274240 - DNA, 120 bp, Artificial Sequence
  ENSG00000128165_15 (sequence is synthesized)
ccatcccacgagggtcgccatgatcaccccaactctagaggccgcagcagagctcaggacattcccccacagagcttgcccctcagttcctacctccaagggggagggtcctggaagcgc

SEQ ID NO: 274241 - DNA, 120 bp, Artificial Sequence
  ENSG00000128165_16 (sequence is synthesized)
ccacccaggcgccgcccctgtgcttgctccccgagctcagggattgccgagtccacgtaactgacctgtactccacgaggccctgtgggaacggtccaggctggtcctgccctgtggagg

SEQ ID NO: 274242 - DNA, 120 bp, Artificial Sequence
  ENSG00000128165_17 (sequence is synthesized)
agagatgtactaggattgcagcaaaggtggtcagggtgatgggccgcacagcgaggcagtcaaggccagctccctgggagaagcactgggtcaggtgaggtctgaggacagcaggccttc

SEQ ID NO: 274243 - DNA, 120 bp, Artificial Sequence
  ENSG00000128165_18 (sequence is synthesized)
cctaggggaaggagctgggagtgccaaggccccaggtgcacaggaggcgtggctgctgagaggctgcagggtggaggggcctcggcctcagagtcatgtgccctgtgaccactgaagggt

SEQ ID NO: 274244 - DNA, 120 bp, Artificial Sequence
  ENSG00000128165_19 (sequence is synthesized)
gtcagcagagcacacggcatgaggacagagggaggggcacggggagtgaaggagggggccctggggcaaggctcgggggtcaggagctcagcgtccgctactcagcccagccaaaaccct

SEQ ID NO: 274245 - DNA, 120 bp, Artificial Sequence
  ENSG00000128165_20 (sequence is synthesized)
cccagacgtctcctctcctgcctgggcaaagtccagcttggcaccccgtctggggcctgcctgtggtcagggccaagtgttccctcctccaggaaagcctttaccctcctcatgccctgt

SEQ ID NO: 274246 - DNA, 120 bp, Artificial Sequence
  ENSG00000128165_21 (sequence is synthesized)
agtcaggaggccgcctgctgtaaccctccgtgtcgcctcgggtgcgaaatcagacccacctgacaccatcacgcggaggcccagcagcacctgcacccacttccagctgctctggccaaa

SEQ ID NO: 274247 - DNA, 120 bp, Artificial Sequence
  ENSG00000128165_22 (sequence is synthesized)
ccacttccagctgctctggccaaaatctccgctcggccaggccccgtggctcacacctgtaatcctagcacattgggaggccaaggcaggcacatcacctgagttcaggagttcaagacc

SEQ ID NO: 274248 - DNA, 81 bp, Artificial Sequence
  ENSG00000128165_23 (sequence is synthesized)
cagcctgggcaacaagagcaaaattctgcctcaaaaaaaaaaatagagtaattccatctactcgggaggctgaggcaggag

SEQ ID NO: 274249 - DNA, 90 bp, Artificial Sequence
  ENSG00000128165_24 (sequence is synthesized)
ctaagcccgggaggtggaggttgcagtgagcccagatggcgctgctgcactcaagcttggatgacagagcaagactccgtttcaaaaaaa

SEQ ID NO: 274250 - DNA, 120 bp, Artificial Sequence
  ENSG00000128165_25 (sequence is synthesized)
acctcctctcttccttcacaccttcctctgaatcccacccggtcccacctcctgaacctatccagacaccttctcctgacccaggcaccacctgctttcggggcgatggccgtagcctcc

SEQ ID NO: 274251 - DNA, 120 bp, Artificial Sequence
  ENSG00000128165_26 (sequence is synthesized)
tcccaggcacctgtctgcatccctctggccagtgcatgctgagcacgtgacctacccgtgttgggacacgtgaggatacagccttgacccccaggggctgacattctagggggagataga

SEQ ID NO: 274252 - DNA, 120 bp, Artificial Sequence
  ENSG00000128165_27 (sequence is synthesized)
aggagacaaacgtagaaggtagaataagtgggtggtggagtggcagggagtgctgagtgccacaggaagtcagacaaggaaggagagtgtggggcaggtgccgtttaaatggggggcgct

SEQ ID NO: 274253 - DNA, 120 bp, Artificial Sequence
  ENSG00000128165_28 (sequence is synthesized)
ggggtctcctcacagttgcttctcagctcagctgtgccaggatcttgttgagtcaggtcagctgcccacagccctcttgcctgacccctgaagcccagaactctgatcttcacagcccta

SEQ ID NO: 274254 - DNA, 120 bp, Artificial Sequence
  ENSG00000128165_29 (sequence is synthesized)
ggtatggccccagcaccccactgccctctctcctgccccagccgactgctgttcccagacttccctggccacgctccaagacgccagctctgccgcgggcactttgttctcacggtgtcc

SEQ ID NO: 274255 - DNA, 120 bp, Artificial Sequence
  ENSG00000128165_30 (sequence is synthesized)
tccatgcctgcagggcccatgcatgggaagttgcgttggcggcctgggtgttggcggttccgtgcctgctccaactctccgtgaggcccctctcccagagcctgacacactctgtggccg

SEQ ID NO: 274256 - DNA, 120 bp, Artificial Sequence
  ENSG00000128165_31 (sequence is synthesized)
aactctaggcaggtgcccctgagtcctttcctcgacgaggcctgaccccatccccatcctcgctgggcccgccgaccccggtgttagcaagaatcctctaaatcagtttatggagaatta

SEQ ID NO: 274257 - DNA, 120 bp, Artificial Sequence
  ENSG00000128165_32 (sequence is synthesized)
cccaccctcgatatctgatcccattcctcatctcccacccttgatctcatcaccctgccggcctcctgcaagatcctcattgagccactccagtgagaatccccctaccctcgaaggccg

SEQ ID NO: 274258 - DNA, 120 bp, Artificial Sequence
  ENSG00000128165_33 (sequence is synthesized)
ccctaacaacttcccatccgctgacccctccaacgccatcaatctccagctgtggttgttgaactcggaggtgagctcctctcaccactctcttgaataaagcttttctcaccattttaa

SEQ ID NO: 274259 - DNA, 120 bp, Artificial Sequence
  ENSG00000128185_0 (sequence is synthesized)
gcgccgcgctcgggatgtcgtgaagctgggggagctcgtcgccgccgccggcggctagcgggcgtccgcgccatggagcgctacgcggccgccttggaggaggtggcggacggtgcccgg

SEQ ID NO: 274260 - DNA, 120 bp, Artificial Sequence
  ENSG00000128185_1 (sequence is synthesized)
cagcaggagcgacactaccagttgctgtcggcgctacagagcctggtgaaggagttgcccagctctttccagcagcgcctgtcctacaccacgctcagcgacctggccctggcgcttctc

SEQ ID NO: 274261 - DNA, 120 bp, Artificial Sequence
  ENSG00000128185_2 (sequence is synthesized)
gacggcaccgtgttcgaaatcgtgcaggggctactggagatccagcacctcaccgaaaagagcctgtacaaccagcgcctgcgcctacagaacgagcaccgagtgctcaggcaggcgctg

SEQ ID NO: 274262 - DNA, 120 bp, Artificial Sequence
  ENSG00000128185_3 (sequence is synthesized)
cggcagaagcaccaggaagcccagcaggcctgccggccccacaacctgcctgtggttcaggcggctcagcagcgagaactagaggccgtggaacaccggatccgtgaggagcagcgggcg

SEQ ID NO: 274263 - DNA, 120 bp, Artificial Sequence
  ENSG00000128185_4 (sequence is synthesized)
caccaacccacaggagctgatgctgcagatgaacctgctggaactcatccgaaagctgcagcagaggggctgccgggcagggaatgcagccctgggactgggaggtccctggcagtcgcc

SEQ ID NO: 274264 - DNA, 120 bp, Artificial Sequence
  ENSG00000128185_5 (sequence is synthesized)
tgctgcccagtgtgaccagaaaggcagccctgtcccaccatagccacaggcagcagaagtctgggcagagttcatcttcttgacctttggccactgccttcccagctgcccgcagggggt

SEQ ID NO: 274265 - DNA, 120 bp, Artificial Sequence
  ENSG00000128185_6 (sequence is synthesized)
tccccctgctgaggagagaccaggtggaccccagctgcctgtcacccttcatctgggacttgctgtcaaaccctaggatagtctcataaaggggaggctgggccagcctgctgctgtctg

SEQ ID NO: 274266 - DNA, 120 bp, Artificial Sequence
  ENSG00000128185_7 (sequence is synthesized)
cttcaggaccaggcagagagtgaggctgggggttctcacaccttactccaccgggcacatcccaacctgcactggggcccacccgagcgcttgttctggtctcagccgctcccttggcag

SEQ ID NO: 274267 - DNA, 120 bp, Artificial Sequence
  ENSG00000128185_8 (sequence is synthesized)
ctgcagcccccatgcagaagaggctcccaggcccaagctctgtgtgacccagagaaataaagatgcctcagtgtggcccaaatgtggcttgtgtgatagctgcaggttctgccataaccg

SEQ ID NO: 274268 - DNA, 120 bp, Artificial Sequence
  ENSG00000128191_0 (sequence is synthesized)
ctccgctcgcccggcgcggcaggcgggtgccggcgaccggagagcctggacaggctttccagatggctgcggcggtcggtcggtgaggctttcccggctgtggtttggctgcgggcggct

SEQ ID NO: 274269 - DNA, 120 bp, Artificial Sequence
  ENSG00000128191_1 (sequence is synthesized)
tgggcagcccgcgggcgcctcaggtagaagaagaaaggtgccactccggcatgaagacagactcgcttagtcgccagtcacttaagctgagtgcattgtgatttccaataattgaggcag

SEQ ID NO: 274270 - DNA, 120 bp, Artificial Sequence
  ENSG00000128191_2 (sequence is synthesized)
tggttctaaaagctgtctacattaatgaaaagagcaatgtggccagcttgactaagccgccagcgcacagcgcggcaggacgcgcccgggtctcagcggacttgtgcatgttagctgtgt

SEQ ID NO: 274271 - DNA, 120 bp, Artificial Sequence
  ENSG00000128191_3 (sequence is synthesized)
agatttatgtgagggcttgtaaaactctggtcttgtaaactagtcttaagcgcttttaatatggagacagatgagagcccctctccgctcccgtgtgggcccgcaggagaagcggtgatg

SEQ ID NO: 274272 - DNA, 120 bp, Artificial Sequence
  ENSG00000128191_4 (sequence is synthesized)
gagagccgagctcgccccttccaagcgctgccccgtgagcagtctccaccacctcccctgcaaacgtccagtggtgcagaggtaatggacgttggctctggtggtgatggacagtccgaa

SEQ ID NO: 274273 - DNA, 120 bp, Artificial Sequence
  ENSG00000128191_5 (sequence is synthesized)
ctccctgctgaggaccccttcaacttctacggagcttctcttctctccaaaggatccttctctaagggccgcctcctcatagacccgaactgtagtggccacagcccgcgcaccgcccgg

SEQ ID NO: 274274 - DNA, 120 bp, Artificial Sequence
  ENSG00000128191_6 (sequence is synthesized)
cacgcacctgcggtccggaagttctcccctgaccttaagttgcttaaggatgtaaagattagcgtgagctttaccgagagctgcaggagtaaggacaggaaggtgctgtacacaggagca

SEQ ID NO: 274275 - DNA, 120 bp, Artificial Sequence
  ENSG00000128191_7 (sequence is synthesized)
gagcgcgacgtgcgggcggagtgcggtctgctccttagccctgtcagtggggacgtgcatgcttgtccctttggcgggagtgttggtgacggggtaggcatagggggtgagagtgctgat

SEQ ID NO: 274276 - DNA, 120 bp, Artificial Sequence
  ENSG00000128191_8 (sequence is synthesized)
aagaaggatgaggagaatgagctggatcaggaaaagagagtggagtatgcagtgctcgatgagttagaagattttactgacaatttggagctagatgaagaaggagcaggcgggttcacg

SEQ ID NO: 274277 - DNA, 120 bp, Artificial Sequence
  ENSG00000128191_9 (sequence is synthesized)
gctaaagcaatcgttcagagagacagagtggatgaagaggccttgaatttcccctacgaggatgactttgacaacgatgtggatgctctgctggaagaaggcctttgtgcccccaaaaag

SEQ ID NO: 274278 - DNA, 120 bp, Artificial Sequence
  ENSG00000128191_10 (sequence is synthesized)
aggcgaacagaggaaaaatatggcggagacagcgaccatccgtccgatggagagacaagtgtgcagccgatgatgaccaagattaaaacagtgctcaaaagtcgtggccgcccacctaca

SEQ ID NO: 274279 - DNA, 120 bp, Artificial Sequence
  ENSG00000128191_11 (sequence is synthesized)
gagccgctgcccgacgggtggatcatgacattccataactctggagtcccggtgtacctacacagagagtctcgggtggtcacctggtccaggccatacttcttgggaacgggaagcata

SEQ ID NO: 274280 - DNA, 120 bp, Artificial Sequence
  ENSG00000128191_12 (sequence is synthesized)
cggaaacacgaccctcctctgagtagcatcccttgtctgcattataagaaaatgaaggacaacgaggaacgggagcaaagcagtgacctcacccctagtggggatgtgtcccccgtcaag

SEQ ID NO: 274281 - DNA, 120 bp, Artificial Sequence
  ENSG00000128191_13 (sequence is synthesized)
cccctgagccgatctgcagagctggagtttcccctggatgagcctgactctatgggtgctgacccggggcccccggacgagaaagacccactaggggctgaggcagcccctggggccctg

SEQ ID NO: 274282 - DNA, 120 bp, Artificial Sequence
  ENSG00000128191_14 (sequence is synthesized)
gggcaggtgaaggccaaagtcgaggtgtgcaaagatgaatccgttgatctcgaggaatttcgaagctacctggagaagcgttttgactttgagcaagttactgtgaaaaaattcaggact

SEQ ID NO: 274283 - DNA, 120 bp, Artificial Sequence
  ENSG00000128191_15 (sequence is synthesized)
tgggctgagcggcggcaattcaatcgggaaatgaagcggaagcaggcggagtccgagaggcccatcttgccagccaatcagaagctcattactttatcagtgcaagatgcacccacaaag

SEQ ID NO: 274284 - DNA, 120 bp, Artificial Sequence
  ENSG00000128191_16 (sequence is synthesized)
aaagagtttgttattaaccccaacgggaaatccgaggtctgcatcctgcacgagtacatgcagcgtgtcctcaaggtccgccctgtctataatttctttgaatgtgagaacccaagtgag

SEQ ID NO: 274285 - DNA, 120 bp, Artificial Sequence
  ENSG00000128191_17 (sequence is synthesized)
ccttttggtgcctcggtgaccattgatggtgtgacttacggatctggaactgcaagcagcaaaaaacttgcgaagaataaagctgcccgagctacactggaaatcctcatccctgacttt

SEQ ID NO: 274286 - DNA, 120 bp, Artificial Sequence
  ENSG00000128191_18 (sequence is synthesized)
atcgaggactcgcgggtctacgagctgaccagcaaggctgggctgttgtctccatatcagatcctccacgagtgccttaaaagaaaccatgggatgggtgacacgtctatcaagtttgaa

SEQ ID NO: 274287 - DNA, 120 bp, Artificial Sequence
  ENSG00000128191_19 (sequence is synthesized)
gtggttcctgggaaaaaccagaagagtgaatacgtcatggcgtgtggcaagcacacagtgcgcgggtggtgtaagaacaagagagttggaaagcagttagcctcacagaagatccttcag

SEQ ID NO: 274288 - DNA, 120 bp, Artificial Sequence
  ENSG00000128191_20 (sequence is synthesized)
ctgctgcacccacatgtcaagaactgggggtctttactgcgcatgtatggccgtgagagcagcaagatggtcaagcaggagacatcggacaagagtgtgattgagctgcagcagtatgcc

SEQ ID NO: 274289 - DNA, 120 bp, Artificial Sequence
  ENSG00000128191_21 (sequence is synthesized)
aagaagaacaagcccaacctgcacatcctcagcaagctccaagaggagatgaagaggctagctgaggaaagggaggagactcgaaagaagcccaagatgtccattgtggcgtccgcccag

SEQ ID NO: 274290 - DNA, 120 bp, Artificial Sequence
  ENSG00000128191_22 (sequence is synthesized)
cctggcggtgagcccctgtgcaccgtggacgtgtgagggaggtggcacgggccagggcgcgggggccgccagccgcacttctgaggagaccagcagtcatgcatcgtgcaccacagtgtc

SEQ ID NO: 274291 - DNA, 120 bp, Artificial Sequence
  ENSG00000128191_23 (sequence is synthesized)
aggcctccaacccacgctccttccctgtggccaacctgtgggcccggccttagggtggaggctttagtgtacagggacagccatggccacacagcacacatgtggagcagcggctctccc

SEQ ID NO: 274292 - DNA, 120 bp, Artificial Sequence
  ENSG00000128191_24 (sequence is synthesized)
tggaaagctccaggcctgaatggatggactcagcgactgcaccagtggcagctggtgactgtggacagtggtggaccctgcttctgtgcacctgctgcaggctctttttatgaaggcttt

SEQ ID NO: 274293 - DNA, 120 bp, Artificial Sequence
  ENSG00000128191_25 (sequence is synthesized)
catgaattttagtatgtaatacgcactgacgacacatgatgcttggatgacagatgagaggggatggctgagtcctgtggctggcccgtgatgccaggtggcccatgtgcccagggcgcc

SEQ ID NO: 274294 - DNA, 120 bp, Artificial Sequence
  ENSG00000128191_26 (sequence is synthesized)
tgcagggctgctacagggacctggtcaggaggtgcacatggtgccctgccctcacccaccctctgtgtttccccttctttgaaaaggtagaagagaaaggaatattttaaacctttttgg

SEQ ID NO: 274295 - DNA, 120 bp, Artificial Sequence
  ENSG00000128191_27 (sequence is synthesized)
cttaaacagaattttagcatcagaactagctttctgggattggaggcaaaccatcaaggtggtccctctccagtctggacacgatgccagcaaggatgacgtcctgccacctcctggagt

SEQ ID NO: 274296 - DNA, 120 bp, Artificial Sequence
  ENSG00000128191_28 (sequence is synthesized)
taccctggcctcctagggtccctttttctgatgaagtcttaattccctaaaagcgcctctttggacactgaggccctctctgcctttcctggcctccggcaacagttttttacaaagatt

SEQ ID NO: 274297 - DNA, 120 bp, Artificial Sequence
  ENSG00000128191_29 (sequence is synthesized)
ttttgcagtcgagtccatatgtccacccattgatttttaaagcttttgtgatattttagcattttgaaagactttcacagtgagagtagaaggtagatttggaatcatgcattttagcaa

SEQ ID NO: 274298 - DNA, 120 bp, Artificial Sequence
  ENSG00000128191_30 (sequence is synthesized)
gtggacttgttgaaacaggaagcaagggccttcagtgtagcccattcttgatccagagctgttgcctgtgacagcggtttctctggatgtcaaaggcagctgcctggtgcccagcttgct

SEQ ID NO: 274299 - DNA, 120 bp, Artificial Sequence
  ENSG00000128191_31 (sequence is synthesized)
tctcgactggtggcccctatgggtgggtgtgcgatggaaatgtgttcctgccggagtctgaggcaccagggtgtgctcaaaggctggccctggtggtggactggcacctgtgcagagtgc

SEQ ID NO: 274300 - DNA, 120 bp, Artificial Sequence
  ENSG00000128191_32 (sequence is synthesized)
cgtgtgcttgtggtgcgccatctgaagcaagagtccagcgttctgccgtgtctgtcccccaccatgccccctacaggcggtactgatggcgcttttttttttttttctgtcaggaaaaca

SEQ ID NO: 274301 - DNA, 120 bp, Artificial Sequence
  ENSG00000128191_33 (sequence is synthesized)
atgttggcctgtgggccgcccacaacatatccttccctcactacctgtgtgaccaaggttggcttctgttgacctttaaaaaagaaaccctcaactcaaattgctataattagacacttg

SEQ ID NO: 274302 - DNA, 120 bp, Artificial Sequence
  ENSG00000128191_34 (sequence is synthesized)
cttctgtcttgcctcctgtctgcagctgtgaatagtcatttgactgtgactgttgcccttagccagccagatgcgcctgtgaaccaaagcttcgtgcacatgtgttcccctaaaggttgg

SEQ ID NO: 274303 - DNA, 120 bp, Artificial Sequence
  ENSG00000128191_35 (sequence is synthesized)
ggagcctcgctgtgtcttgctgttcccaggcaccaccacagcaggtgctgccatactcttgtggtctctgtgcgccccccccccccccccacccgtctgccaagcatgggtatgaatcgt

SEQ ID NO: 274304 - DNA, 120 bp, Artificial Sequence
  ENSG00000128191_36 (sequence is synthesized)
gcacacagccatgcttcaaggccggggcaggggagcctgtgctgatgccatccagggcactgggctgtgcctggaaggcgagccttgattgtctgaacacataaagcaaactgtccagaa

SEQ ID NO: 274305 - DNA, 120 bp, Artificial Sequence
  ENSG00000128191_37 (sequence is synthesized)
gaggccttgaatttcccctacgaggtatgttggcagcccctcctctagagggctcttagcaaaacccaaagagagatttgggaattgcagcatcttttgaaagcagggaaattaaaaaaa

SEQ ID NO: 274306 - DNA, 120 bp, Artificial Sequence
  ENSG00000128191_38 (sequence is synthesized)
aaaaaaacaaaaaccaaaatcccctctgaggtggaataatgttaatgtggagaagagaaagatgtaaggagtccagatttttaaagtttcctaatgaaaagtttggcccatgggtaggcc

SEQ ID NO: 274307 - DNA, 120 bp, Artificial Sequence
  ENSG00000128191_39 (sequence is synthesized)
ctgcatccctgatctagcgcgtggggcagcaggtgctgctgagttacgctccttggcagtgtgtgcccctggaccaggtgtgttggtgtcagctggtagcttcatcctgtttgtttttca

SEQ ID NO: 274308 - DNA, 120 bp, Artificial Sequence
  ENSG00000128191_40 (sequence is synthesized)
gatgatcatgcaccctaagggcacatctaggccccctgagagcacctcctttctgtgtctgttctcaggaatgctgttgagctctcctgttgcaggagcatgagcgccaggggctctggt

SEQ ID NO: 274309 - DNA, 120 bp, Artificial Sequence
  ENSG00000128191_41 (sequence is synthesized)
ggacagcagaccccaggacccgtgcctgagctgacaccttggaaatgcttggatcctccttccaaaatcagatacaggcttttctttgagcttcgacatgtgtgatagttttataaatca

SEQ ID NO: 274310 - DNA, 120 bp, Artificial Sequence
  ENSG00000128191_42 (sequence is synthesized)
aagcacacagtgcgcgggtggtgtaaggactccttctctgctgcctggtggccgctgggcgggcggcccctggtgtggccctgcgcctctgtggcttggtctcagctgttgccctggcat

SEQ ID NO: 274311 - DNA, 120 bp, Artificial Sequence
  ENSG00000128191_43 (sequence is synthesized)
tgtccctgagcccagctgtgtgtgctggccaccacacgttcagcctaaggcggactggcagccgtcctgcctgcactttccctgtcttttccctttcccccgctgtcacccctgtctccg

SEQ ID NO: 274312 - DNA, 120 bp, Artificial Sequence
  ENSG00000128191_44 (sequence is synthesized)
tccagcccttgtccctgtggcaggaggaaaggccctcctcctcgaacagccagcagaatcctgctgctccctgtttctggaggtgtgcgtcttggcgggagggaggctctcggctgcgtg

SEQ ID NO: 274313 - DNA, 120 bp, Artificial Sequence
  ENSG00000128191_45 (sequence is synthesized)
ctgaggctctgtgctcagagggggcagagctgggcagctctgctgttgctcacagctgcctctctcctgggccacttgtgtggctttgtgggcaggggtggggtcgtcccagctacatct

SEQ ID NO: 274314 - DNA, 120 bp, Artificial Sequence
  ENSG00000128191_46 (sequence is synthesized)
atctcctatcccagcctgctgggcatggtcagtgaagtgtgggtgattgggaacgcaggctgggcccagctatgtggcttgtagggagatggccaaagtgcaaggcagggccaggcagga

SEQ ID NO: 274315 - DNA, 120 bp, Artificial Sequence
  ENSG00000128191_47 (sequence is synthesized)
gatgctgaaggtgcgcccggctcggaggtgtgcaaaggctcaggagccagggccagctctccctgcttgaaggagagcgagtgtgtcagggtagctctccctggtaccagtgccggtcca

SEQ ID NO: 274316 - DNA, 120 bp, Artificial Sequence
  ENSG00000128191_48 (sequence is synthesized)
tctctaacagaagagcatatgtgtaccatctgtcttgtttctgctgttgtggccaacatcctgcagtgtaagccagtgcccactcctgaggggtggagggtaacatggggaggtgagtgt

SEQ ID NO: 274317 - DNA, 120 bp, Artificial Sequence
  ENSG00000128191_49 (sequence is synthesized)
aatcattttcctcaaatgattacagaaactctctgggttcttgccctcctggtcattggaaggggaagtagttgtggaggggttaggcctgcaggtggggcagccctaggactgtgtggt

SEQ ID NO: 274318 - DNA, 120 bp, Artificial Sequence
  ENSG00000128191_50 (sequence is synthesized)
gggtgggccctctgcccaagccagctgccaagagcagggcctgcctttaggtccctgagaccgaggcctcggcactgtccccgaagaggcctttactctggacatgataagggagggtga

SEQ ID NO: 274319 - DNA, 120 bp, Artificial Sequence
  ENSG00000128191_51 (sequence is synthesized)
gggggctcacacgggccaccagggcatgttaaggaacttgagagagatttttgggaagcaagttgaaatgtaggtagcacttgcttctgcccttgctgtgcatggtccttggctgtgacg

SEQ ID NO: 274320 - DNA, 120 bp, Artificial Sequence
  ENSG00000128191_52 (sequence is synthesized)
gagggagagaaggcaagccccactctggcccgggggtgggaaacttccctgagcaggagggggaaaggtcccagccaggcacagccacagcttgggggagctctggcatcccgaggaacc

SEQ ID NO: 274321 - DNA, 120 bp, Artificial Sequence
  ENSG00000128191_53 (sequence is synthesized)
acagcacccttggggctggcctaagacgggaaggggctgaggccagcctgatgctgctctgcattcatggagtgtgcagagagctcagtgcctgaggctgatgggctgggctgcagcgtg

SEQ ID NO: 274322 - DNA, 120 bp, Artificial Sequence
  ENSG00000128191_54 (sequence is synthesized)
ctgttcttactggctatggccacactctggtttcactccttgatgaggactctgggcaccacgagcacctcacctccctactctgcccatggcaggaggccatataagtggcgtggtgtg

SEQ ID NO: 274323 - DNA, 120 bp, Artificial Sequence
  ENSG00000128191_55 (sequence is synthesized)
ggcagaaaggcctggcagctatggactgcccctcgctctctgctgctgtcagtgggcctggcatcactgaggcgggccagtcagcatgcagttatgttgccacagctcctggctgtttcg

SEQ ID NO: 274324 - DNA, 120 bp, Artificial Sequence
  ENSG00000128191_56 (sequence is synthesized)
tgtctgccagaccctgggcgcgcctgccttcagggtcccaggcacacagctgctgggcagcgggcaggccgtagagctacagcctgcagtcctgagcgtgaggtgctatacttcccagga

SEQ ID NO: 274325 - DNA, 120 bp, Artificial Sequence
  ENSG00000128191_57 (sequence is synthesized)
ggggctggggggcgggccccgggcccaggcgttgccgactctcgtcgctgtccgcccgggtaaagaggctcctctcccggagggcccgaagcctagcatcgccttcaggcgggaaaggta

SEQ ID NO: 274326 - DNA, 80 bp, Artificial Sequence
  ENSG00000128203_0 (sequence is synthesized)
agttgtggtcttcgcggccccgcggagcgcagcgcggcgtcggcaccggcaggggcaccggcgcggcttaggctcgggct

SEQ ID NO: 274327 - DNA, 120 bp, Artificial Sequence
  ENSG00000128203_1 (sequence is synthesized)
gctccgcggcgccgggcaggggccgtccgcgggtccgcgccctcgggcggcggcgtctcctgggtcccggcagccgtccgcgcgcccgggcgcaggtttggttttcctaaacaaatcctt

SEQ ID NO: 274328 - DNA, 120 bp, Artificial Sequence
  ENSG00000128203_2 (sequence is synthesized)
aaacaaatcctttcacagggaccgacggcacttgataatgtgacaaaaaccagcctcttccaccccactgcagtgacttttgccggaaagtggagcagtgggcacggccaaccttgtcgt

SEQ ID NO: 274329 - DNA, 120 bp, Artificial Sequence
  ENSG00000128203_3 (sequence is synthesized)
tcatcaatgccgcccctggcagtatctgaggatcggtggcagccatgcctccccctgccccagccgctccttcccccccacgctaatctgcatggtgtgggcgcccttgggacccccgag

SEQ ID NO: 274330 - DNA, 120 bp, Artificial Sequence
  ENSG00000128203_4 (sequence is synthesized)
gactgattgtctgaccttgcttcacacgcccagtaaggactcccccaagatgtcgctcgagtggctggtggcctggagctggtcgctggatggcctgagggactgcatcgccaccggcat

SEQ ID NO: 274331 - DNA, 120 bp, Artificial Sequence
  ENSG00000128203_5 (sequence is synthesized)
ccagtccgtgcgggactgcgacaccaccgctgtcatcactgtggcctgcctcctggtcctcttcgtgtggtactgttatcacgtgggcagggagcagccccggccctacgtctccgtcaa

SEQ ID NO: 274332 - DNA, 120 bp, Artificial Sequence
  ENSG00000128203_6 (sequence is synthesized)
ctccctcatgcaggctgccgatgccaacgggctgcagaatggctacgtgtactgccagtcccctgagtgcgtgcgctgcacccacaacgagggcctcaaccagaagctgtaccacaacct

SEQ ID NO: 274333 - DNA, 120 bp, Artificial Sequence
  ENSG00000128203_7 (sequence is synthesized)
gcaggagtacgccaagcgctactcctggtccggcatgggccgcatccacaagggcatccgcgagcagggccggtacctcaacagccggccctccatccagaagcccgaggtcttcttcct

SEQ ID NO: 274334 - DNA, 120 bp, Artificial Sequence
  ENSG00000128203_8 (sequence is synthesized)
gcccgacctgcccaccacgccctatttctcccgggacgcacagaaacatgatgtggaagtgctggaacggaacttccagaccatcctgtgtgagtttgagaccctctacaaagctttctc

SEQ ID NO: 274335 - DNA, 120 bp, Artificial Sequence
  ENSG00000128203_9 (sequence is synthesized)
aaactgcagcctcccgcaaggatggaaaatgaacagcacccccagcggggagtggttcaccttttacttggtcaatcagggggtttgtgttcccaggaactgtaggaagtgcccacggac

SEQ ID NO: 274336 - DNA, 120 bp, Artificial Sequence
  ENSG00000128203_10 (sequence is synthesized)
gtaccgcttgctcggaagccttcggacctgtattgggaacaatgtttttgggaacgcgtgcatctctgtgctgagccctgggactgtgataacggagcactatggacccaccaacatccg

SEQ ID NO: 274337 - DNA, 120 bp, Artificial Sequence
  ENSG00000128203_11 (sequence is synthesized)
catccgatgccatttaggtctgaaaactccaaatggctgtgagctggtggtggggggagagccccagtgctgggcagaagggcgctgccttctctttgatgactctttcctgcatgctgc

SEQ ID NO: 274338 - DNA, 120 bp, Artificial Sequence
  ENSG00000128203_12 (sequence is synthesized)
gttccatgaaggttcagcagaggatggcccacgggtggttttcatggtggatttgtggcatccaaacgtcgcagcggccgaacggcaggctcttgatttcatctttgctccgggacgatg

SEQ ID NO: 274339 - DNA, 120 bp, Artificial Sequence
  ENSG00000128203_13 (sequence is synthesized)
agagtatttcccatgctggagtcggcgagaagggccgaggcggggcctgggcagactgtggtccggtccagtccctaccggtgttgtttccatgctcagaaacctgcctcagcggaaagc

SEQ ID NO: 274340 - DNA, 120 bp, Artificial Sequence
  ENSG00000128203_14 (sequence is synthesized)
gattttatatcatgtcgggtccctctttcccttggttattgtaaatggaaacttttcggcttgtatttccttagattttttttttttccttccaatcatttgcttcagagactcctttct

SEQ ID NO: 274341 - DNA, 120 bp, Artificial Sequence
  ENSG00000128203_15 (sequence is synthesized)
ggcctaacagcgcattcctttgattggtccttgagtgaccagagacttagtgcccttgtaagtctgtcttctgttgctacttgtttttttcagtgctctgaaatagagtaactaaatggt

SEQ ID NO: 274342 - DNA, 120 bp, Artificial Sequence
  ENSG00000128203_16 (sequence is synthesized)
tatttgtctgaatataataatgtaaaacttcttgtggtcatcttaaaaaaaaaaaaaaaaaactaaaaactgcaaaccagagagctagagaacttggcctctgatgctggcacactgggg

SEQ ID NO: 274343 - DNA, 120 bp, Artificial Sequence
  ENSG00000128203_17 (sequence is synthesized)
acccttcagccacctgacggcagggggacagtctgcagcccccacacctgactggcttcagtagccaggtggaggggctgccagacacagtcagggtggcacacagtgtccaggcccagg

SEQ ID NO: 274344 - DNA, 120 bp, Artificial Sequence
  ENSG00000128203_18 (sequence is synthesized)
gatactgtcaccatcgctcacctcattctaaaccttgtcaggtccctgatggcaaaagcattgggccagtaggactggaggctactctttaaacatggctttcctgcaaagctgaagctg

SEQ ID NO: 274345 - DNA, 120 bp, Artificial Sequence
  ENSG00000128203_19 (sequence is synthesized)
gtgtcccccagcaccaagctgcggctcacacagatcagccacggaacgtgtgatccgcttacctcactgcctacagaagccctactgccaaactgggcctggaaaattcccagttttagg

SEQ ID NO: 274346 - DNA, 120 bp, Artificial Sequence
  ENSG00000128203_20 (sequence is synthesized)
tgttttgagtccacagtgatgaacgttaaggccaccaggttggctgataggagctgtagggggataggaccgcgctcacccagcgacatttggggaaagcctttctctggcaaaactgga

SEQ ID NO: 274347 - DNA, 120 bp, Artificial Sequence
  ENSG00000128203_21 (sequence is synthesized)
ataatagatctgaccaaagtttctgttttgctttggagttctgttgcctatgtttttttttttttcatttatttgtctgtacataaatgttcaaacactagacttggagatagtggaaga

SEQ ID NO: 274348 - DNA, 120 bp, Artificial Sequence
  ENSG00000128203_22 (sequence is synthesized)
gttggccctgtgtctttgtcatggcacaaaggtgtgcactgcgtgacaatgacccaagccagtgtgtgctagtgaggagacagagaagacctacatgcccagaggacccgtggccgttgt

SEQ ID NO: 274349 - DNA, 120 bp, Artificial Sequence
  ENSG00000128203_23 (sequence is synthesized)
gctggttttctggtctcctgtgaagaacatgtggatctcttcccgaaggaaaaggtcccaggagaccagtttgaggcactcactctagaaatagcctgtgttagctgatgtgtgaaagcg

SEQ ID NO: 274350 - DNA, 120 bp, Artificial Sequence
  ENSG00000128203_24 (sequence is synthesized)
tagccggccagccacactagagatgccttttctgaataatgtattatgagcagtgtcagatttataaagccgaggagtggtttggaatatacagctggtcgcaggtgcaggtccagtgtt

SEQ ID NO: 274351 - DNA, 120 bp, Artificial Sequence
  ENSG00000128203_25 (sequence is synthesized)
tagatccaaatggaaaacagcagcttctaagaggtacaactgttggaagaaaacacagttgaaatgcaccaggcaggtactagcaagtgtgcaaagagcacgtctacatttgagtaaaat

SEQ ID NO: 274352 - DNA, 120 bp, Artificial Sequence
  ENSG00000128203_26 (sequence is synthesized)
gtctacacagatatttgtcagtgatgagaatgcaggaaaaggcagacatttcaaacatacctgaagtctttttactcattatcttgttaaagaatcactgaggtgcatgatttctacaca

SEQ ID NO: 274353 - DNA, 120 bp, Artificial Sequence
  ENSG00000128203_27 (sequence is synthesized)
tcgtgactgctctgctctgcgtttacaaaaccaacagcccgcgcaggtacctagctacctgcattcatgtgacatgtctggggaacagaagataaataaaggatcttgctgaaaaccaga

SEQ ID NO: 274354 - DNA, 120 bp, Artificial Sequence
  ENSG00000128218_0 (sequence is synthesized)
caaagcacctggagcatatagccttgcagaacttctacttgcctgcctccctgcctctggccatggcctgccggtgcctcagcttccttctgatggggaccttcctgtcagtttcccaga

SEQ ID NO: 274355 - DNA, 120 bp, Artificial Sequence
  ENSG00000128218_1 (sequence is synthesized)
cagtcctggcccagctggatgcactgctggtcttcccaggccaagtggctcaactctcctgcacgctcagcccccagcacgtcaccatcagggactacggtgtgtcctggtaccagcagc

SEQ ID NO: 274356 - DNA, 120 bp, Artificial Sequence
  ENSG00000128218_2 (sequence is synthesized)
cagccaaggatgaggcccacaatgcctgtgtcctcaccattagtcccgtgcagcctgaagacgacgcggattactactgctctgttggctacggctttagtccctaggggtggggtgtga

SEQ ID NO: 274357 - DNA, 120 bp, Artificial Sequence
  ENSG00000128218_3 (sequence is synthesized)
gatgggtgcctcccctctgcctcccatttctgcccctgaccttgggtcccttttaaactttctctgagccttgcttcccctctgtaaaatgggttaataatattcaacatgtcaacaaca

SEQ ID NO: 274358 - DNA, 120 bp, Artificial Sequence
  ENSG00000128218_4 (sequence is synthesized)
tatagccttgcagaacttctacttgcctgcctccctgcctctggccatggcctgccggtgcctcagcttccttctgatggggaccttcctgtcaggccaagtggctcaactctcctgcac

SEQ ID NO: 274359 - DNA, 120 bp, Artificial Sequence
  ENSG00000128228_0 (sequence is synthesized)
cggggcgatgtggagcgcgggccgcggcggggctgcctggccggtgctgttggggctgctgctggcgctgttagtgccgggcggtggtgccgccaagaccggtgcggagctcgtgacctg

SEQ ID NO: 274360 - DNA, 120 bp, Artificial Sequence
  ENSG00000128228_1 (sequence is synthesized)
ccaagaccggtgcggagctcgtgacctgcgggtcggtgctgaagctgctcaatacgcaccaccgcgtgcggctgcactcgcacgacatcaaatacggatccggcagcggccagcaatcgg

SEQ ID NO: 274361 - DNA, 120 bp, Artificial Sequence
  ENSG00000128228_2 (sequence is synthesized)
tgaccggcgtagaggcgtcggacgacgccaatagctactggcggatccgcggcggctcggagggcgggtgcccgcgcgggtccccggtgcgctgcgggcaggcggtgaggctcacgcatg

SEQ ID NO: 274362 - DNA, 120 bp, Artificial Sequence
  ENSG00000128228_3 (sequence is synthesized)
tatggacagtgcgctgctctggacagcactgggagcgtgaggctgctgtgcgcttccagcatgtgggcacctctgtgttcctgtcagtcacgggtgagcagtatggaagccccatccgtg

SEQ ID NO: 274363 - DNA, 120 bp, Artificial Sequence
  ENSG00000128228_4 (sequence is synthesized)
ggcagcatgaggtccacggcatgcccagtgccaacacgcacaatacgtggaaggccatggaaggcatcttcatcaagcctagtgtggagccctctgcaggtcacgatgaactctgagtgt

SEQ ID NO: 274364 - DNA, 120 bp, Artificial Sequence
  ENSG00000128228_5 (sequence is synthesized)
gtggatggatgggtggatggagggtggcaggtggggcgtctgcagggccactcttggcagagactttgggtttgtaggggtcctcaagtgcctttgtgattaaagaatgttggtctatga

SEQ ID NO: 274365 - DNA, 120 bp, Artificial Sequence
  ENSG00000128228_6 (sequence is synthesized)
aaccaggtgagcccctcccggagcccccagagagactcctggcctgtgtgaggggccagagacagagccctgggttccaatccgagcctcagcttcttcgtgaaatggaaatttcacttc

SEQ ID NO: 274366 - DNA, 120 bp, Artificial Sequence
  ENSG00000128228_7 (sequence is synthesized)
agagatggttactgagcgccccctcgggggacacagagtaactccgccaggatcctgccctcaggtgctcccggcccggcagggagaacgacgggagagagatccggagagatacgcctg

SEQ ID NO: 274367 - DNA, 120 bp, Artificial Sequence
  ENSG00000128242_0 (sequence is synthesized)
ctggggctgtctctttccaggtggttgtcagtctatctctccagtgcctctctgtccctgtctggaccctgctggggggccacagagcaggcaaaggcagggctcaactgccaggcctgg

SEQ ID NO: 274368 - DNA, 120 bp, Artificial Sequence
  ENSG00000128242_1 (sequence is synthesized)
gcagccttgggggctccctggggccagcttcctgacacttgccctactctgtgctgcccctgcaggtgtctgagatgctgccaccgcagaagaagccctgggagtccatggctaaggggc

SEQ ID NO: 274369 - DNA, 120 bp, Artificial Sequence
  ENSG00000128242_2 (sequence is synthesized)
tggtgctgggcgcgctcttcactagtttcctgctgctggtgtactcctatgccgtgcccccgctgcatgccggcctggcctccacgaccccggaggccgcagcgtcctgctctccacctg

SEQ ID NO: 274370 - DNA, 120 bp, Artificial Sequence
  ENSG00000128242_3 (sequence is synthesized)
cactcgagccagaggcagtgatccgggccaacggctcggcgggggagtgccagccgcggcgcaacatcgtgttcttgaagacgcacaagacggccagcagcaccctgctcaacatcctgt

SEQ ID NO: 274371 - DNA, 120 bp, Artificial Sequence
  ENSG00000128242_4 (sequence is synthesized)
tccgcttcggccagaagcaccggctcaagttcgccttccctaacggccgcaatgacttcgactacccgaccttcttcgcccgcagcctggtgcaggactatcggcccggggcctgcttca

SEQ ID NO: 274372 - DNA, 120 bp, Artificial Sequence
  ENSG00000128242_5 (sequence is synthesized)
acatcatctgcaaccacatgcgcttccactacgacgaggtgcgcggcctggtgccgaccaacgccatcttcatcacggtgctccgcgaccccgcccgcttgttcgagtcctccttccact

SEQ ID NO: 274373 - DNA, 120 bp, Artificial Sequence
  ENSG00000128242_6 (sequence is synthesized)
acttcgggccggtggtgcccctcacgtggaagctctcggccggcgacaagctgaccgagttcctgcaagacccggatcgctactacgaccccaacggcttcaatgcccactacctccgaa

SEQ ID NO: 274374 - DNA, 120 bp, Artificial Sequence
  ENSG00000128242_7 (sequence is synthesized)
tccttcaagagtacttcgacgagtcgctggtgctgctgaaggacctgctgtgctgggagctggaggacgtgctctacttcaagctcaacgcccgccgcgactcgcccgtgccgcggctct

SEQ ID NO: 274375 - DNA, 120 bp, Artificial Sequence
  ENSG00000128242_8 (sequence is synthesized)
cgggggagctgtatgggcgcgccaccgcctggaacatgctggactcccacctctaccgccacttcaacgccagcttctggcgcaaggtggaggccttcgggcgggagcgcatggcccgcg

SEQ ID NO: 274376 - DNA, 120 bp, Artificial Sequence
  ENSG00000128242_9 (sequence is synthesized)
aggtggccgccctgcgccatgccaacgagcgcatgcggaccatctgcatcgacgggggccacgccgtggacgccgccgccatccaggacgaggccatgcagccctggcagccgctgggca

SEQ ID NO: 274377 - DNA, 120 bp, Artificial Sequence
  ENSG00000128242_10 (sequence is synthesized)
ccaagtccatcctgggctacaacctcaagaagagcatcgggcagcggcacgcgcagctctgccggcgcatgctcacgcccgagatccagtacctgatggacctcggcgccaacctgtggg

SEQ ID NO: 274378 - DNA, 120 bp, Artificial Sequence
  ENSG00000128242_11 (sequence is synthesized)
tcaccaagctctggaagttcattcgcgatttcctgcggtggtgacgtcccaccgcccagcggcttgcctgcctgctcgctccctgcagaggggctgagcaggacgccgctggtgctggcc

SEQ ID NO: 274379 - DNA, 120 bp, Artificial Sequence
  ENSG00000128242_12 (sequence is synthesized)
gcccccagccccctcctggtgccacctcagaccccggggtgagggggggctccctggggggaggcagccagccaagactgggcccatgaacacagagagggcctaaccgagatcagtatt

SEQ ID NO: 274380 - DNA, 120 bp, Artificial Sequence
  ENSG00000128242_13 (sequence is synthesized)
taactaattataccagtttttattaaacccctttccctccccgataaagaatgttctatttctgcctccccttaaaggggagacctcagaagtaaaggaatttgatgttgtgtttttgtt

SEQ ID NO: 274381 - DNA, 120 bp, Artificial Sequence
  ENSG00000128242_14 (sequence is synthesized)
ggcagcctgggagttggacgtggctcaggcagtgggtagaaaggggcagccagccacagcccgagggtctcactgtgtcatccagagctggagtgcagcggcacagtcatggctcactgg

SEQ ID NO: 274382 - DNA, 120 bp, Artificial Sequence
  ENSG00000128242_15 (sequence is synthesized)
aactcaggctcaagcaatcctcccgcctcagccttccaagtaactaggactacaggcatgtgccaccacgcctggtgtctgagatgctgccaccgcagaagaagccctgggagtccatgg

SEQ ID NO: 274383 - DNA, 120 bp, Artificial Sequence
  ENSG00000128242_16 (sequence is synthesized)
gaatctttctgtgcccttggatgaaagagctgcttgcttgttggggtccaaagagaggtgaggactggccagagctgtccagtggaggcagaaggcctgggcaacacctgcagggtactg

SEQ ID NO: 274384 - DNA, 120 bp, Artificial Sequence
  ENSG00000128242_17 (sequence is synthesized)
gggtgtgccacctgctatccccaggaagcaaactcatgaatattcacaccactggagtgggagggagccagccagcttgctgctgggtgtcattggagcattcctgtctcccagtgatcg

SEQ ID NO: 274385 - DNA, 120 bp, Artificial Sequence
  ENSG00000128242_18 (sequence is synthesized)
cagaggcagcctgggagttggacgtggctcaggcagtgggtagaaaggggcagccagccacagcccgaggtgtctgagatgctgccaccgcagaagaagccctgggagtccatggctaag

SEQ ID NO: 274386 - DNA, 120 bp, Artificial Sequence
  ENSG00000128242_19 (sequence is synthesized)
gccgggtgcgccccgccgcccagtgagcgcccgggcggcgcggcccgggccgagccagccacgctgaggcggaggaggacggggacaaggtgtctgagatgctgccaccgcagaagaagc

SEQ ID NO: 274387 - DNA, 120 bp, Artificial Sequence
  ENSG00000128242_20 (sequence is synthesized)
gccccgccgcccagtgagcgcccgggcggcgcggcccgggccgagccagccacgctgaggcggaggaggacggggacaagggtctcactgtgtcatccagagctggagtgcagcggcaca

SEQ ID NO: 274388 - DNA, 120 bp, Artificial Sequence
  ENSG00000128242_21 (sequence is synthesized)
tcctgaagggctccttgcttcactttgactgggtgaggaatatggatgagcccttttaggggctccacacgactccaaacagggcagagcaggatggaacacaggtgcccatgggggtca

SEQ ID NO: 274389 - DNA, 120 bp, Artificial Sequence
  ENSG00000128242_22 (sequence is synthesized)
gattccagaaggtaccttgaaaagttctccagagaatggctaggggcgcctccagctttctcattttacagatgaaaaactgagactccatgagggttcttggcttgtctgaaatcacag

SEQ ID NO: 274390 - DNA, 120 bp, Artificial Sequence
  ENSG00000128242_23 (sequence is synthesized)
gatgcacaaatggaattctgggcccggctgcaggctcctgaagggctccttgcttcactttgactggccttagagcctgttctgggctctctgcaggcgtctgcggttgctgtgtccttg

SEQ ID NO: 274391 - DNA, 120 bp, Artificial Sequence
  ENSG00000128242_24 (sequence is synthesized)
gcccaaggatacctggaatctttctgtgcccttggatgaaagagctgcttgcttgttggggtccaaagagaggatgctaaataaacctgcgctttgactgagacctgtcacgtgaggtca

SEQ ID NO: 274392 - DNA, 120 bp, Artificial Sequence
  ENSG00000128242_25 (sequence is synthesized)
agtgatcgcagaggcagcctgggagttggacgtggctcaggcagtgggtagaaaggggcagccagccacagcccgaggatgctaaataaacctgcgctttgactgagacctgtcacgtga

SEQ ID NO: 274393 - DNA, 120 bp, Artificial Sequence
  ENSG00000128242_26 (sequence is synthesized)
tcagccagcttaaaaattaaaaggagtggaaagtttggggccctggttctctacccggttcattttaatttttaaattttaaccttctccctgccccattccccaacctctctttgagtt

SEQ ID NO: 274394 - DNA, 80 bp, Artificial Sequence
  ENSG00000128245_0 (sequence is synthesized)
gcgagccagcgagagggcgcgagcggcggcgctgcctgcagcctgcagcctgcagcctccggccggccggcgagccagtg

SEQ ID NO: 274395 - DNA, 120 bp, Artificial Sequence
  ENSG00000128245_1 (sequence is synthesized)
accggggagcggactgaccggcgggagggctagcgagccagcggtgtgaggcgcgaggcgaggccgagccgcgagcgacatgggggaccgggagcagctgctgcagcgggcgcggctggc

SEQ ID NO: 274396 - DNA, 120 bp, Artificial Sequence
  ENSG00000128245_2 (sequence is synthesized)
cgagcaggcggagcgctacgacgacatggcctccgctatgaaggcggtgacagagctgaatgaacctctctccaatgaagatcgaaatctcctctctgtggcctacaagaatgtggttgg

SEQ ID NO: 274397 - DNA, 120 bp, Artificial Sequence
  ENSG00000128245_3 (sequence is synthesized)
tgccaggcgatcttcctggagggtcattagcagcattgagcagaaaaccatggctgatggaaacgaaaagaaattggagaaagttaaagcttaccgggagaagattgagaaggagctgga

SEQ ID NO: 274398 - DNA, 120 bp, Artificial Sequence
  ENSG00000128245_4 (sequence is synthesized)
gacagtttgcaatgatgtcctgtctctgcttgacaagttcctgatcaagaactgcaatgatttccagtatgagagcaaggtgttttacctgaaaatgaagggtgattactaccgctactt

SEQ ID NO: 274399 - DNA, 120 bp, Artificial Sequence
  ENSG00000128245_5 (sequence is synthesized)
agcagaggtcgcttctggggagaagaaaaacagtgtggtcgaagcttctgaagctgcctacaaggaagcctttgaaatcagcaaagagcagatgcaacccacgcatcccatccggctggg

SEQ ID NO: 274400 - DNA, 120 bp, Artificial Sequence
  ENSG00000128245_6 (sequence is synthesized)
cctggccctcaacttctccgtgttctactatgagatccagaatgcacctgagcaagcctgcctcttagccaaacaagccttcgatgatgccatagctgagctggacacactaaacgagga

SEQ ID NO: 274401 - DNA, 120 bp, Artificial Sequence
  ENSG00000128245_7 (sequence is synthesized)
aggatgaagaagcaggagaaggcaactgaagatccttcaggtcccctggcccttccttcacccaccacccccatcatcaccgattcttccttgccacaatcactaaatatctagtgctaa

SEQ ID NO: 274402 - DNA, 120 bp, Artificial Sequence
  ENSG00000128245_8 (sequence is synthesized)
acctatctgtattggcagcacagctactcagatctgcactcctgtctcttgggaagcagtttcagataaatcatgggcattgctggactgatggttgctttgagcccacaggagctccct

SEQ ID NO: 274403 - DNA, 120 bp, Artificial Sequence
  ENSG00000128245_9 (sequence is synthesized)
ttttgaattgtgtggagaagtgtgttctgatgaggcattttactatgcctgttgatctatgggaaatctaggcgaaagtaatggggaagattagaaagaattagccaaccaggctacagt

SEQ ID NO: 274404 - DNA, 120 bp, Artificial Sequence
  ENSG00000128245_10 (sequence is synthesized)
tgatatttaaaagatccatttaaaacaagctgatagtgtttcgttaagcagtacatcttgtgcatgcaaaaatgaattcacccctcccacctctttcttcaattaatggaaaactgttaa

SEQ ID NO: 274405 - DNA, 120 bp, Artificial Sequence
  ENSG00000128245_11 (sequence is synthesized)
gggaagctgatacagagagacaacttgctcctttccatcagctttataataaactgtttaacgtgaggtttcagtagctccttggttttgcctctttaaattatgacgtgcacaaacctt

SEQ ID NO: 274406 - DNA, 120 bp, Artificial Sequence
  ENSG00000128245_12 (sequence is synthesized)
cttttcaatgcaatgcatctgaaagttttgatacttgtaacttttttttttttttggttgcaattgtttaagaatcatggatttattttttgtaactctttggctattgtccttgtgtat

SEQ ID NO: 274407 - DNA, 120 bp, Artificial Sequence
  ENSG00000128245_13 (sequence is synthesized)
cctgacagcgccatgtgtgtcagcccatgtcaatcaagatgggtgattatgaaatgccagacttctaaaataaatgttttggaattcaatgggtaaataaatgctgctttggggatatta

SEQ ID NO: 274408 - DNA, 120 bp, Artificial Sequence
  ENSG00000128245_14 (sequence is synthesized)
agcagctgctgcagcgggcgcggctggccgagcaggcggagcgctacgacgacatggcctccgctatgaaggcgcttctccggtggatgagtcgtgcccagccacaccctagcaaaatac

SEQ ID NO: 274409 - DNA, 120 bp, Artificial Sequence
  ENSG00000128245_15 (sequence is synthesized)
cgtgggtcacacaccacctgcatttctgagttccggttaccatctcactctctctccacgttattttacgttttctgtgacagagctgaatgaacctctctccaatgaagatcgaaatct

SEQ ID NO: 274410 - DNA, 120 bp, Artificial Sequence
  ENSG00000128245_16 (sequence is synthesized)
ctcccgctgggcgccccgccacttcctgaggctgggcccagggtgggggatccgggagggtgcagttcgggatcgcgaaggcagccccggaaggggggcgggccggtcggggtcgccaca

SEQ ID NO: 274411 - DNA, 120 bp, Artificial Sequence
  ENSG00000128245_17 (sequence is synthesized)
tcgccacatcttagttcggaacccggccgggggcagagggtgccctaggggacgcgaaggagccgcatttctcctagagcgtttcaccggacccgggggctccccctctcgtcttcctcc

SEQ ID NO: 274412 - DNA, 120 bp, Artificial Sequence
  ENSG00000128250_0 (sequence is synthesized)
gccgtgtcactggctcaggctcagttgctgggtcaccagtagaatggacccttcctccacctcagttcagagcacagtgatgattcgtgactttctttcccaatagaacttcaaatctct

SEQ ID NO: 274413 - DNA, 120 bp, Artificial Sequence
  ENSG00000128250_1 (sequence is synthesized)
gaagacggggggtggggggatgtgcttgagtgtttgtactcatggtcttgttctagaagtgacaaagctgggacacaatacctttatgcatgaaaaggttgtcacttgtcacaactaaca

SEQ ID NO: 274414 - DNA, 120 bp, Artificial Sequence
  ENSG00000128250_2 (sequence is synthesized)
ggctttcacctcacggaaattttcttcccttgtgcacttttcccctggcagtggacatggctgcactcttccaagaagcaagcagctgtcccgtctgctcagactatctagagaaaccaa

SEQ ID NO: 274415 - DNA, 120 bp, Artificial Sequence
  ENSG00000128250_3 (sequence is synthesized)
tgtccctggagtgtggatgcgctgtctgcttcaagtgcatcaattcactgcagaaggagccccatggggaggatctactttgctgttgctgttccatggtctctcagaagaacaaaatca

SEQ ID NO: 274416 - DNA, 120 bp, Artificial Sequence
  ENSG00000128250_4 (sequence is synthesized)
ggcccagttggcagctagagaggctggcttcccacatcaaggaactggagcccaagctgaagaagattctgcagatgaacccaaggatgcggaagttccaagtggatatgaccttggatg

SEQ ID NO: 274417 - DNA, 120 bp, Artificial Sequence
  ENSG00000128250_5 (sequence is synthesized)
ccgacacagccaacaacttcctcctcatttctgacgacctcaggagcgtccgaagtgggtgcatcacacagaatcggcaagaccttgccgagagatttgacgtgtccatttgcatcctgg

SEQ ID NO: 274418 - DNA, 120 bp, Artificial Sequence
  ENSG00000128250_6 (sequence is synthesized)
acagaatgggacctgggagtctgcagagaatctgttcaccgcaaagggaggatccatctgaccacagagcgtggattctggactgtgagtttgagggatggaagccgcctctctgccagc

SEQ ID NO: 274419 - DNA, 120 bp, Artificial Sequence
  ENSG00000128250_7 (sequence is synthesized)
acggtgccgctgactttcctcttcgtagaccgcaagttacagcgagtggggatttttctggatatgggcatgcagaacgtttccttttttgatgctgaaggtggttcccatgtctataca

SEQ ID NO: 274420 - DNA, 120 bp, Artificial Sequence
  ENSG00000128250_8 (sequence is synthesized)
ttcaggagtgtctctgctgaggagccactgcacttgttttttgctcctccaagtccacctaatggtgataagagtgtcttgagtatctgtcctgtgataaacccgggcactactgatgct

SEQ ID NO: 274421 - DNA, 120 bp, Artificial Sequence
  ENSG00000128250_9 (sequence is synthesized)
ccagtccatcctggggaggccaaataagcccccactgcaaaaaaacaaaaaacaggttaagaaaattacttgggtgggcagacttaggaacgctctactcggtaaaagcgttatacaaag

SEQ ID NO: 274422 - DNA, 120 bp, Artificial Sequence
  ENSG00000128250_10 (sequence is synthesized)
tcataggagaaaaatatgggacaattcatgattatacttaatctaatttgattagtttataaattgagtcctaagtattaattattgccaccatccaactcattgagtcttatggttcac

SEQ ID NO: 274423 - DNA, 120 bp, Artificial Sequence
  ENSG00000128250_11 (sequence is synthesized)
atcttgtttcctatagaaatattctgtattctgggatcaatttccaaatgcttttttatttctgtaagttcaaattaatgtattatagaagttatgagttaaataaacattggaatatca

SEQ ID NO: 274424 - DNA, 120 bp, Artificial Sequence
  ENSG00000128253_0 (sequence is synthesized)
atggaggtggctgaattaggcttcccagagactgcagtgtcccaatccaggatctgtctatgtgctgtattgtgtggccactgggactttgcagacatgatggtgataaggagcctgagc

SEQ ID NO: 274425 - DNA, 120 bp, Artificial Sequence
  ENSG00000128253_1 (sequence is synthesized)
ctcatcaggttagagggtgtggaagggcgtgacccagtgggaggtgggaatctcaccaataaaaggccctcgtgtgccccttccccacaagacctgagcgcccagtggaagcagctggag

SEQ ID NO: 274426 - DNA, 120 bp, Artificial Sequence
  ENSG00000128253_2 (sequence is synthesized)
gacagaggagcttccagcagaagagtggacatggctgcactcttccaagaagcaagcagctgtcccgtctgctcagactatctggaaaaaccaatgtccctggagtgtggatgcgccgtc

SEQ ID NO: 274427 - DNA, 120 bp, Artificial Sequence
  ENSG00000128253_3 (sequence is synthesized)
tgcctcaagtgcattaattcactgcagaaggagccccatggggaggatctactttgctgttgctcttccatggtctctcggaagaacaaaatcaggcgcaatcggcagctagagaggctg

SEQ ID NO: 274428 - DNA, 120 bp, Artificial Sequence
  ENSG00000128253_4 (sequence is synthesized)
gcttcccacatcaaggaactggagcccaagctgaagaagattctgcagatgaacccaaggatgcggaagttccaagtggatatgaccttggatgccaacacagccaacaacttcctcctc

SEQ ID NO: 274429 - DNA, 120 bp, Artificial Sequence
  ENSG00000128253_5 (sequence is synthesized)
atttctgacgacctcaggagcgtccgaagtgggcgcatcagacagaatcggcaagaccttgccgagagatttgacgtgtccgtttgcatcctgggctcccctcgctttacctgtggccgc

SEQ ID NO: 274430 - DNA, 120 bp, Artificial Sequence
  ENSG00000128253_6 (sequence is synthesized)
aatgggacctgggagtctgcagagaatctgttcaccgcaaagggaggatccagctgaccacagagcttggattctggactgtgagtttgagggatggaggccgcctctctgccaccacgg

SEQ ID NO: 274431 - DNA, 120 bp, Artificial Sequence
  ENSG00000128253_7 (sequence is synthesized)
tgccgctgactttcctcttcgtagaccgcaagttacagcgagtggggatttttctggatatgggcatgcagaacgtttccttttttgatgctgaaagtggttcccatgtctatacattca

SEQ ID NO: 274432 - DNA, 120 bp, Artificial Sequence
  ENSG00000128253_8 (sequence is synthesized)
ggagcgtatctgctgaggagccattgcgcccatttttggctccttcagttccacctaatggtgatcaaggtgtcttgagcatctgtcctttgatgaactcaggcactactgatgctccag

SEQ ID NO: 274433 - DNA, 120 bp, Artificial Sequence
  ENSG00000128253_9 (sequence is synthesized)
tccgtcctggggaggccaaataagccctcactccaaaaaaacaaaaaacagggtaagaaaattacttgggtgggtagacttaggaacgctctacttcgtaaaagcattatacaaagtcac

SEQ ID NO: 274434 - DNA, 120 bp, Artificial Sequence
  ENSG00000128253_10 (sequence is synthesized)
gggagaaaaatatgggacatttcttgattgtacttaatctaatttgattagattatagagtcctaagtattaattattgccaccatcaaactcattgagtcctatggttcacatcttgtt

SEQ ID NO: 274435 - DNA, 120 bp, Artificial Sequence
  ENSG00000128253_11 (sequence is synthesized)
tcctatagaaatgtcctgtattctgggatcaatttccaaatgctttacttttttatttctgcaagttcaaattaatgtattatagaagttatgagttaaataaagattggaatatcacct

SEQ ID NO: 274436 - DNA, 120 bp, Artificial Sequence
  ENSG00000128253_12 (sequence is synthesized)
tatcgctacactgccgcggcgagtaccgggttggcggcgctatcctgggctacaccgccggtggcgggaggcgttttaggggcgctatctggtgctgcactgcccgcgcaggagttgggt

SEQ ID NO: 274437 - DNA, 120 bp, Artificial Sequence
  ENSG00000128253_13 (sequence is synthesized)
tgggtgacctactccaggcgtcactgcccgaggctgggggctgatttggggcgctatcccgggagtcatttcctgtggcgaggggctggttgagggtggtatccgtggctgcactgccca

SEQ ID NO: 274438 - DNA, 120 bp, Artificial Sequence
  ENSG00000128253_14 (sequence is synthesized)
cagcacagagcgggtttggggagttatcccgggctgcgctgcccgtggcagggggcaggctgccagcgccattgggtgctgcatgtactaggcacggatgagttaggggcgccatctggg

SEQ ID NO: 274439 - DNA, 120 bp, Artificial Sequence
  ENSG00000128253_15 (sequence is synthesized)
actgcactgccggtggcgggcggtggaggtgtcagtgacagcggtggtctgcaagagaggagcggtcctcctcttcccggccacctcctcctgttcttgctcaagtgcggcgggcgcaca

SEQ ID NO: 274440 - DNA, 120 bp, Artificial Sequence
  ENSG00000128253_16 (sequence is synthesized)
gcatttcctgagcgcggcaggggccccagccccgtggtgcttcctggacccgcctcctattgctctgtgttgcagagaccgcctgggaccccggggcacgcagtagtggacacgaggagg

SEQ ID NO: 274441 - DNA, 120 bp, Artificial Sequence
  ENSG00000128253_17 (sequence is synthesized)
ctacagggccctgtgggtggaggaggcatcaggaacgggaaccggcacttgggtggggagggctggctggggttgagtttctgctgctcctgcttcccgaggagtgcagccagggtggct

SEQ ID NO: 274442 - DNA, 120 bp, Artificial Sequence
  ENSG00000128253_18 (sequence is synthesized)
gcagctgttcctgtggagtgggaagcccgggcactgtggtgtctgcagtccccactccaggccgcagttcctggccagcttgcgctaaaaggagaggctggactttgaagtgtgggtgct

SEQ ID NO: 274443 - DNA, 120 bp, Artificial Sequence
  ENSG00000128253_19 (sequence is synthesized)
gagtttaatgcaaatgaagtttctcgactacatagtctgatcggatgagagaaacctctaggcctactctgatcgggctttgttatcttgttctgattggttatcctaagacttgctgtc

SEQ ID NO: 274444 - DNA, 120 bp, Artificial Sequence
  ENSG00000128253_20 (sequence is synthesized)
atccagtcagaacgtgaaaataaagcacaatcagagtagacctagaggtttttctctcatccaatctgaacatgtagtccagaaaccttacttgcataacctcggtctgtggggggaggg

SEQ ID NO: 274445 - DNA, 120 bp, Artificial Sequence
  ENSG00000128253_21 (sequence is synthesized)
gttcttgccattccaggcacttctgcgtctgccagcccatctgctccatgcccaggcttttctggctttgtctgcccggatgcccagtgccctgagaaggagctacatgccacgggctgg

SEQ ID NO: 274446 - DNA, 120 bp, Artificial Sequence
  ENSG00000128253_22 (sequence is synthesized)
gatgattcgtgactttcccaatagaacttcaaatctctgaagacggggggtggggggatgtgcttgagtgtttgtactcatggtcttattctcggagtgacaaagctggaacacaatacc

SEQ ID NO: 274447 - DNA, 120 bp, Artificial Sequence
  ENSG00000128266_0 (sequence is synthesized)
gccccgccctgcccggagcagctcggcagatgctctgtgctgcggcccggaggtgaagggctggatgcacagtgggagccggaggcggggggctgcagggagcacaccagcgaccggccc

SEQ ID NO: 274448 - DNA, 120 bp, Artificial Sequence
  ENSG00000128266_1 (sequence is synthesized)
tccaaccctccagccactcagcaacatcgccacagcaaccagcaaccagacggcagcagccgaggcaaacacaagcggacggcttcccaccgtcgccgaggacagggaatgactacggca

SEQ ID NO: 274449 - DNA, 120 bp, Artificial Sequence
  ENSG00000128266_2 (sequence is synthesized)
aatcaggccactttgccaactagggaggtggagtgtcactagtggggaggggcggccaccgcccgctgcacagagcgccatgccggctggagaagaggcgctggggcaggggctgcagtg

SEQ ID NO: 274450 - DNA, 120 bp, Artificial Sequence
  ENSG00000128266_3 (sequence is synthesized)
tggctcggcctcacccccctgctggcactgagtgcctccagggcagctgggctcttgtctgcctggtctcagtgtcccctgtggcaagagggagaggtgccccatcccgtgctccttgtc

SEQ ID NO: 274451 - DNA, 120 bp, Artificial Sequence
  ENSG00000128266_4 (sequence is synthesized)
tgggcccgctgctgccagaccatgggatgtcggcaaagctcagaggaaaaagaagcagcccggcggtcccggagaattgaccgccacctgcgctcagagagccagcggcaacgccgcgaa

SEQ ID NO: 274452 - DNA, 120 bp, Artificial Sequence
  ENSG00000128266_5 (sequence is synthesized)
atcaagctgctcctgctgggcaccagcaactcaggcaagagcaccatcgtcaaacagatgaagatcatccacagcggcggcttcaacctggaggcctgcaaggagtacaagcccctcatc

SEQ ID NO: 274453 - DNA, 120 bp, Artificial Sequence
  ENSG00000128266_6 (sequence is synthesized)
atctacaatgccatcgactcgctgacccgcatcatccgggccctggccgccctcaggatcgacttccacaaccccgaccgcgcctacgacgctgtgcagctctttgcgctgacgggcccc

SEQ ID NO: 274454 - DNA, 120 bp, Artificial Sequence
  ENSG00000128266_7 (sequence is synthesized)
gctgagagcaagggcgagatcacacccgagctgctgggtgtcatgcgacggctctgggccgacccaggggcacaggcctgcttcagccgctccagcgagtaccacctggaggacaacgcg

SEQ ID NO: 274455 - DNA, 120 bp, Artificial Sequence
  ENSG00000128266_8 (sequence is synthesized)
gcctactacctgaacgacctggagcgcatcgccgcagctgactatatccccactgtcgaggacatcctgcgctcccgggacatgaccacgggcattgtggagaacaagttcaccttcaag

SEQ ID NO: 274456 - DNA, 120 bp, Artificial Sequence
  ENSG00000128266_9 (sequence is synthesized)
gagctcaccttcaagatggtggacgtgggggggcagaggtcagagcgcaaaaagtggatccactgcttcgagggcgtcacagccatcatcttctgtgtggagctcagcggctacgacctg

SEQ ID NO: 274457 - DNA, 120 bp, Artificial Sequence
  ENSG00000128266_10 (sequence is synthesized)
aaactctacgaggataaccagacaagtcggatggcagagagcttgcgcctctttgactccatctgcaacaacaactggttcatcaacacctcactcatcctcttcctgaacaagaaggac

SEQ ID NO: 274458 - DNA, 120 bp, Artificial Sequence
  ENSG00000128266_11 (sequence is synthesized)
ctgctggcagagaagatccgccgcatcccgctcaccatctgctttcccgagtacaagggccagaacacgtacgaggaggccgctgtctacatccagcggcagtttgaagacctgaaccgc

SEQ ID NO: 274459 - DNA, 120 bp, Artificial Sequence
  ENSG00000128266_12 (sequence is synthesized)
aacaaggagaccaaggagatctactcccacttcacctgcgccaccgacaccagtaacatccagtttgtcttcgacgcggtgacagacgtcatcatacagaacaatctcaagtacattggc

SEQ ID NO: 274460 - DNA, 120 bp, Artificial Sequence
  ENSG00000128266_13 (sequence is synthesized)
ggggtgtcatgccccaacgcgtgctagagaggcccaatccaggggcagaaaacagggggcctaaagaatgtcccccaccccttggcctctgcctccttggccccacatttctgcaaacat

SEQ ID NO: 274461 - DNA, 120 bp, Artificial Sequence
  ENSG00000128266_14 (sequence is synthesized)
aaatatttacggatagattgctaggtagatagacacacacacatgcacacacacacatctggagatggcaaaatcctctaaaatgtcgaggtctcttgaagacttgagaagctgtcacaa

SEQ ID NO: 274462 - DNA, 120 bp, Artificial Sequence
  ENSG00000128266_15 (sequence is synthesized)
ggtcactacaagcccaacctgccccttcactttgccttcctgagttggccccactccacttgggggtctgcattggattgttagggataggcagcagggctgaggcaaggtaggccaact

SEQ ID NO: 274463 - DNA, 120 bp, Artificial Sequence
  ENSG00000128266_16 (sequence is synthesized)
gcacccctgtcgcctggaggagggccagctcgctgcccgagctctggcctagggaccttgccgctgaccaagagggaggaccagtgcagggtctgtgcaccttccctgctggcctgcaca

SEQ ID NO: 274464 - DNA, 120 bp, Artificial Sequence
  ENSG00000128266_17 (sequence is synthesized)
cagctgctcagcaccactttcattctggacctgggaccttaggagccgggtgacagcactaaccagacctccagccactcacagctctttttaaaaaacagcttcaaaatatgcagcaaa

SEQ ID NO: 274465 - DNA, 120 bp, Artificial Sequence
  ENSG00000128266_18 (sequence is synthesized)
aaccaatacaacaaaacgagtggcacgatttatttcaaactaggccagctgggattccagcttttcttctactagtctgatgttttataaatcaaaacctggttttccttctctgacatt

SEQ ID NO: 274466 - DNA, 120 bp, Artificial Sequence
  ENSG00000128266_19 (sequence is synthesized)
tgttttttggtttttttttttttttggccaaatctcgtggtgtttcgcagaaaaaaatccagaaaatttcaaatgcagttgagtattcttttttaaatgcagattttcaaaacatatttt

SEQ ID NO: 274467 - DNA, 120 bp, Artificial Sequence
  ENSG00000128266_20 (sequence is synthesized)
aaaacatattttttttcaggtggtcttttttgtgtctggcttgctgagtgtaaaagttgttatctggacgatctgtctctctgctccaaagaaattttggagtgagtggcagtcctgcgc

SEQ ID NO: 274468 - DNA, 120 bp, Artificial Sequence
  ENSG00000128266_21 (sequence is synthesized)
cagcctcgcgggacacgtgttgtacataagcctctgcagtgtcctcttgttaatggtggggttttctgctttgtttttatttaagaaaataaacacgacatatttaaagaaggttctttc

SEQ ID NO: 274469 - DNA, 120 bp, Artificial Sequence
  ENSG00000128266_22 (sequence is synthesized)
acctgggagcaaatgaacaatagctaagtgtcttggtatttaaagagtaaattatttgtggctttgctgagtgaaggaaggggagcaaggggtggtgcccctggtcccagcatgccccgc

SEQ ID NO: 274470 - DNA, 120 bp, Artificial Sequence
  ENSG00000128266_23 (sequence is synthesized)
gcctgagactggctggaaatgctctgactcctgtgaaggcacagccagcgttgtggcctgagggaggccctgctgggaccctgatctgggccttcctgtcccagggcctatgggcaactg

SEQ ID NO: 274471 - DNA, 120 bp, Artificial Sequence
  ENSG00000128266_24 (sequence is synthesized)
cgttgaaaggacgttcgccaagggccgtgtgtaaatacgaactgcgccatggagaggagaggcactgccggagcccttgccagatctccctccctctctccgtgcagtagctgtgtgtcc

SEQ ID NO: 274472 - DNA, 120 bp, Artificial Sequence
  ENSG00000128266_25 (sequence is synthesized)
gaggtcagtgtgcggaatcacagccaaggacgtgaagagatgtacgggggaaagagaagctggggattggatgaaagtcaaaggttgtctactttaagaaaataaaataccctgaatgga

SEQ ID NO: 274473 - DNA, 120 bp, Artificial Sequence
  ENSG00000128266_26 (sequence is synthesized)
caggatgccagggtcctgcctcggcagagaggcggtgccagatgccccacagcagctggtgggagtgcccacagctggagggcaggggaggagcctggcctctggctggtgtttccttcc

SEQ ID NO: 274474 - DNA, 120 bp, Artificial Sequence
  ENSG00000128266_27 (sequence is synthesized)
cagctctcaagaactggagactttggttacagaagtgaaggctgctccctcacagacttcctagtgtccgatggtaccacatggaaggatcagagttttgaaggactgggccagaaccca

SEQ ID NO: 274475 - DNA, 120 bp, Artificial Sequence
  ENSG00000128266_28 (sequence is synthesized)
agtgagccgacccgcggccggccgcgcgccgctgagcctcaggggtcgggggcacggccggggcatccaccttgcccccacttgggactcttcccaggcctttgtgccccggatccgcca

SEQ ID NO: 274476 - DNA, 80 bp, Artificial Sequence
  ENSG00000128268_0 (sequence is synthesized)
actcacacacactcgctcgcacacgcacacactcgatccagcacgcgcgggcggcgcggggcggcggcggccggagtctg

SEQ ID NO: 274477 - DNA, 80 bp, Artificial Sequence
  ENSG00000128268_1 (sequence is synthesized)
cgatgccgggcgcccgccgcagccgctgccgccggagcccgggatggggcgagaggctgcggcggacgccagcatctccc

SEQ ID NO: 274478 - DNA, 120 bp, Artificial Sequence
  ENSG00000128268_2 (sequence is synthesized)
accccgggggccgcggagccgccgccgccgctgctgccgccgttgctgagacccagcgggcgatgggatgaagatgagacgctacaagctctttctcatgttctgtatggccggcctgtg

SEQ ID NO: 274479 - DNA, 120 bp, Artificial Sequence
  ENSG00000128268_3 (sequence is synthesized)
cctcatctccttcctgcacttcttcaagaccctgtcctatgtcaccttcccccgagaactggcctccctcagccctaacctggtgtccagctttttctggaacaatgccccggtcacgcc

SEQ ID NO: 274480 - DNA, 120 bp, Artificial Sequence
  ENSG00000128268_4 (sequence is synthesized)
ccaggccagccccgagccaggaggccctgacctgctgcgtaccccactctactcccactcgcccctgctgcagccgctgccgcccagcaaggcggccgaggagctccaccgggtggactt

SEQ ID NO: 274481 - DNA, 120 bp, Artificial Sequence
  ENSG00000128268_5 (sequence is synthesized)
ggtgctgcccgaggacaccaccgagtatttcgtgcgcaccaaggccggcggcgtctgcttcaaacccggcaccaagatgctggagaggccgcccccgggacggccggaggagaagcctga

SEQ ID NO: 274482 - DNA, 120 bp, Artificial Sequence
  ENSG00000128268_6 (sequence is synthesized)
ccaccccggtacctcctgagcgcccgggagcgcacggggggccgaggcgcccggcgcaagtgggtggagtgcgtgtgcctgcccggctggcacggacccagctgcggcgtgcccactgtg

SEQ ID NO: 274483 - DNA, 120 bp, Artificial Sequence
  ENSG00000128268_7 (sequence is synthesized)
cggacccagctgcggcgtgcccactgtggtgcagtactccaacctgcccaccaaggagcggctggtgcccagggaggtgccgcgccgcgtcatcaacgccatcaacgtcaaccacgagtt

SEQ ID NO: 274484 - DNA, 120 bp, Artificial Sequence
  ENSG00000128268_8 (sequence is synthesized)
cgacctgctggacgtgcgcttccacgagctgggcgacgtggtggacgcctttgtggtgtgcgagtccaacttcacggcttatggggagccgcggccgctcaagttccgggagatgctgac

SEQ ID NO: 274485 - DNA, 120 bp, Artificial Sequence
  ENSG00000128268_9 (sequence is synthesized)
caatggcaccttcgagtacatccgccacaaggtgctctatgtcttcctggaccacttcccgcccggcggccggcaggacggctggatcgccgacgactacctgcgcaccttcctcaccca

SEQ ID NO: 274486 - DNA, 120 bp, Artificial Sequence
  ENSG00000128268_10 (sequence is synthesized)
ggacggcgtctcgcggctgcgcaacctgcggcccgacgacgtcttcatcattgacgatgcggacgagatcccggcccgtgacggcgtccttttcctcaagctctacgatggctggaccga

SEQ ID NO: 274487 - DNA, 120 bp, Artificial Sequence
  ENSG00000128268_11 (sequence is synthesized)
gcccttcgccttccacatgcgcaagtcgctctacggcttcttctggaagcagccgggcaccctggaggtggtgtcaggctgcacggtggacatgctgcaggcagtgtatgggctggacgg

SEQ ID NO: 274488 - DNA, 120 bp, Artificial Sequence
  ENSG00000128268_12 (sequence is synthesized)
catccgcctgcgccgccgccagtactacaccatgcccaacttcagacagtatgagaaccgcaccggccacatcctggtgcagtggtcgctgggcagccccctgcacttcgccggctggca

SEQ ID NO: 274489 - DNA, 120 bp, Artificial Sequence
  ENSG00000128268_13 (sequence is synthesized)
ctgctcctggtgcttcacgcccgagggcatctacttcaagctcgtgtccgcccagaatggcgacttcccacgctggggtgactacgaggacaagcgggacctgaactacatccgcggcct

SEQ ID NO: 274490 - DNA, 120 bp, Artificial Sequence
  ENSG00000128268_14 (sequence is synthesized)
gatccgcaccgggggctggttcgacggcacgcagcaggagtacccgcctgcagaccccagcgagcacatgtatgcgcccaagtacctgctgaagaactacgaccggttccactacctgct

SEQ ID NO: 274491 - DNA, 120 bp, Artificial Sequence
  ENSG00000128268_15 (sequence is synthesized)
ggacaacccctaccaggagcccaggagcacggcggcgggcgggtggcgccacaggggtcccgagggaaggccgcccgcccggggcaaactggacgaggcggaagtctagagctgcatgat

SEQ ID NO: 274492 - DNA, 120 bp, Artificial Sequence
  ENSG00000128268_16 (sequence is synthesized)
ctgatagggtttgtgacagggcgggggtggcggcggcccctagcgctatctccctgcctcctgccggctccttggttcttgaggggaccaggagtgggtggggagtgggggtgggggtag

SEQ ID NO: 274493 - DNA, 120 bp, Artificial Sequence
  ENSG00000128268_17 (sequence is synthesized)
ggtttccctactgaagcccttgtgaatcaagggtcaggcctttgagctcagaaaatatccctcctgttgggagagggcgcaggccgtgacgtctgggtggcccttatgactgccaagact

SEQ ID NO: 274494 - DNA, 120 bp, Artificial Sequence
  ENSG00000128268_18 (sequence is synthesized)
gctgtggccaggaggtgccactggagtgtgcgtggtggtccctgggtagcgggggagggtaggcaggattggggaagagagcctgcaggatctcaccaggcagcctctggggggtggcca

SEQ ID NO: 274495 - DNA, 120 bp, Artificial Sequence
  ENSG00000128268_19 (sequence is synthesized)
ggccgggaaaaagcccaccatttggcatccctgggccttgggctccgtgtgggagaccggcctgccaggaggacccagggctctgtaagtagatgcatttgggtccaggaggaagcgtgg

SEQ ID NO: 274496 - DNA, 120 bp, Artificial Sequence
  ENSG00000128268_20 (sequence is synthesized)
gccgcaaaggacaggacctggctgccctgggatgctggtgcctgagtctgtctctgtgcacccctcaggctgtcgtgagccaacacaggggcctggagaaccctgaggagctttcctttt

SEQ ID NO: 274497 - DNA, 120 bp, Artificial Sequence
  ENSG00000128268_21 (sequence is synthesized)
ggttctaaacccggcgttgacgttccttctccctttcacattgctgtcttgtggactgtgcactcagtccttgcaaggccaagagtccagttgtaggtgtggccttgagggggaagtggg

SEQ ID NO: 274498 - DNA, 120 bp, Artificial Sequence
  ENSG00000128268_22 (sequence is synthesized)
gaggagaagactgacatgagtcctctgcacggatccgtctctccctccccatcaccccttccttctgacacccagtcccagctgtccactgtcccaggtgcagtcactgttgtgcccttc

SEQ ID NO: 274499 - DNA, 120 bp, Artificial Sequence
  ENSG00000128268_23 (sequence is synthesized)
cttggggcaggctggctgggggccagaaaggggccatgaggctgtcttgggcccaaaaagggacaataaggccagttgtatgcttcctgttcctcatagcttgccttggtggggatgtct

SEQ ID NO: 274500 - DNA, 120 bp, Artificial Sequence
  ENSG00000128268_24 (sequence is synthesized)
ttgttggagttgattctgagctgctgtgattaggagaccctgaaatacagtggtttaagcaagatggaagcttgtttctaattagtctagattgagatggcccagagctggtagggcagc

SEQ ID NO: 274501 - DNA, 120 bp, Artificial Sequence
  ENSG00000128268_25 (sequence is synthesized)
tctgcgtttcttcatacgcaccttccaattctgggtacacagcggctgctccagcgcccaccctcctgtgtgcatccaagcctgggggaagcagaaatagacaagagggcacacccactt

SEQ ID NO: 274502 - DNA, 120 bp, Artificial Sequence
  ENSG00000128268_26 (sequence is synthesized)
tttgctaaaggcatgagccagaattggcaggctcacctctgctggcctctcattggctgggactcagtcacatggccacaagcagctgctagggaacctgggaagtgtagtcttcagcgg

SEQ ID NO: 274503 - DNA, 120 bp, Artificial Sequence
  ENSG00000128268_27 (sequence is synthesized)
ggccgccatgtgcctggcctcaccttgggagttatcttattgatggaggagaagagaatggatatgggggaccagtagcatctctgggagagggggagggagcagcaataactcagtcgt

SEQ ID NO: 274504 - DNA, 120 bp, Artificial Sequence
  ENSG00000128268_28 (sequence is synthesized)
cggatccagctctcattgtcagagtttccggaacagcttgctcctgtttccctcactgtgcagcccagggctgggggcagtgaggagcttgcagctctgtgggaaggggaaacaccccct

SEQ ID NO: 274505 - DNA, 120 bp, Artificial Sequence
  ENSG00000128268_29 (sequence is synthesized)
cccctcggcccctcagacgctacccaatgatgccggtttgcagagttggcctgtggaatggctcatgtttgtgcgtgtgtgtgtgtatatttatgggcatgggtgcatgcttggtgtgta

SEQ ID NO: 274506 - DNA, 120 bp, Artificial Sequence
  ENSG00000128268_30 (sequence is synthesized)
tttgtacatgtctgtattgctgtgtccctgtaaatacatgcttgtgtatggatggaagaggccaggcccaggcctggcctcttcctcgggcctgtggccacacctcctgcagctccccaa

SEQ ID NO: 274507 - DNA, 120 bp, Artificial Sequence
  ENSG00000128268_31 (sequence is synthesized)
aatgactgaggcagaaagcccttggggagcctagaaagcaaagctaaaggggatgcagggtctgtctgtctgtctgtctttcagtctgaggaatgagaatcctgacctgagggctgtgca

SEQ ID NO: 274508 - DNA, 120 bp, Artificial Sequence
  ENSG00000128268_32 (sequence is synthesized)
gctgagagcccactacctccccagcccctctcggccccagccgcatcatcccacctgtcccctcccccccacctccagtggggctttctccagatgtcttatggttgggggtttcctgat

SEQ ID NO: 274509 - DNA, 120 bp, Artificial Sequence
  ENSG00000128268_33 (sequence is synthesized)
gggccaggagaggagggcatcttcttgcgacagcactgtctgggttaagtgcccagtgagggcatggtgtggggagctggcctcagaggagccgctggtgggcaagcgtgaagtgggctg

SEQ ID NO: 274510 - DNA, 120 bp, Artificial Sequence
  ENSG00000128268_34 (sequence is synthesized)
aggggctctgagccactttgctcccatctaggggactgccccccatggaactcctttgaagtcacagcagccttcctttctgtttgctcttggggctgagaggtggctcaaacactcggg

SEQ ID NO: 274511 - DNA, 120 bp, Artificial Sequence
  ENSG00000128268_35 (sequence is synthesized)
gtccctatggctctgggtcaatctaggccaggctgcaccccatggacagggagtctcagggctcctgatcatgcccaggccctggcctggggcctccctccttggcagctttcccacccc

SEQ ID NO: 274512 - DNA, 120 bp, Artificial Sequence
  ENSG00000128268_36 (sequence is synthesized)
cacgcccctggcatcctcagttgctatgggatgcccctccagggcaccagctcagggctaagcgaaggaagataggagcagctcagagctgccaggctctgccttcctcacagacctggt

SEQ ID NO: 274513 - DNA, 120 bp, Artificial Sequence
  ENSG00000128268_37 (sequence is synthesized)
ggggcaggtcctgttcacagcagcaggagtgaaggcctggccatcggtggagagggcagctgtcagagggctgggggccagggcacaggattgaagagtttcacatatcatcacagcata

SEQ ID NO: 274514 - DNA, 120 bp, Artificial Sequence
  ENSG00000128268_38 (sequence is synthesized)
cactgggaatttggtgggggcagaagaacccagggccactccctcaatatgaagggaaaccaagctgaatgtgaccaccggcacactgctgccatgtcccatgtccacctttctccccgg

SEQ ID NO: 274515 - DNA, 120 bp, Artificial Sequence
  ENSG00000128268_39 (sequence is synthesized)
gaataactggccctgagacccctagacccaaggaggcctgtccatgccaagcatccgggaagcatggctggccttatccacccatgggtcacgtcggttcccaggggcagcatgggagat

SEQ ID NO: 274516 - DNA, 120 bp, Artificial Sequence
  ENSG00000128268_40 (sequence is synthesized)
ctttgggggcaacagggagagtctgggtggggagacgggacttgtccaagcagaaggcaggaccctgggaaatgcataatgtaaggacatcaataatagtattattttttttgtaaggga

SEQ ID NO: 274517 - DNA, 120 bp, Artificial Sequence
  ENSG00000128268_41 (sequence is synthesized)
aaatcaatatgtacattctgaaatcattttctctgtaaatggttggatttcatttcacccttaaagggatgcttaaaggagaagataatattaataataaaaacagctacaaagtctgaa

SEQ ID NO: 274518 - DNA, 120 bp, Artificial Sequence
  ENSG00000128268_42 (sequence is synthesized)
acacctgggctcagcctctagggaggaaactgctgccatagagccttgaaagccaggcagaggggactagacactgtgcctcaaggatgaagatgagacgctacaagctctttctcatgt

SEQ ID NO: 274519 - DNA, 120 bp, Artificial Sequence
  ENSG00000128268_43 (sequence is synthesized)
gtatttggtcgtccagcgggaaacccaaatggaaggaaagaaaaaaaaaaaaaaccatgcatttatagaacctctgccaatggccaggctccatgcagaatgctttgacaccgtggctca

SEQ ID NO: 274520 - DNA, 120 bp, Artificial Sequence
  ENSG00000128268_44 (sequence is synthesized)
gccaggtctcccacaggactgcaaaacagagggtgacatctttcttttagatcggagaagactgaggaccagagaagctaagtaacttgccaaagggcacacagcaaatggagtcttgct

SEQ ID NO: 274521 - DNA, 120 bp, Artificial Sequence
  ENSG00000128271_0 (sequence is synthesized)
gaagctctgcctgggcctcagggactgtgacatggagcaggagccgcccccagccaagctgctttcagcacagcgtgggcccccagcaccttggtgcggggtgcggcccctcggaggagg

SEQ ID NO: 274522 - DNA, 120 bp, Artificial Sequence
  ENSG00000128271_1 (sequence is synthesized)
gctgtcaggtgaagcctcgtgtgagggggtgcctcaggaaccctgaagctgggctgagccatgatgctgctgccagaacccctgcagagggcctggtttcaggagactcagagtcctctg

SEQ ID NO: 274523 - DNA, 120 bp, Artificial Sequence
  ENSG00000128271_2 (sequence is synthesized)
tgaaaaagcccttggagagcgccccagcagggctgcacttggctcctgtgaggaaggggctcaggggtctgggcccctccgcctgggccgggctgggagccaggcgggcggctgggctgc

SEQ ID NO: 274524 - DNA, 120 bp, Artificial Sequence
  ENSG00000128271_3 (sequence is synthesized)
agcaatggaccgtgagctggcccagcccgcgtccgtgctgagcctgcctgtcgtctgtggccatgcccatcatgggctcctcggtgtacatcacggtggagctggccattgctgtgctgg

SEQ ID NO: 274525 - DNA, 120 bp, Artificial Sequence
  ENSG00000128271_4 (sequence is synthesized)
ccatcctgggcaatgtgctggtgtgctgggccgtgtggctcaacagcaacctgcagaacgtcaccaactactttgtggtgtcactggcggcggccgacatcgcagtgggtgtgctcgcca

SEQ ID NO: 274526 - DNA, 120 bp, Artificial Sequence
  ENSG00000128271_5 (sequence is synthesized)
tcccctttgccatcaccatcagcaccgggttctgcgctgcctgccacggctgcctcttcattgcctgcttcgtcctggtcctcacgcagagctccatcttcagtctcctggccatcgcca

SEQ ID NO: 274527 - DNA, 120 bp, Artificial Sequence
  ENSG00000128271_6 (sequence is synthesized)
ttgaccgctacattgccatccgcatcccgctccggtacaatggcttggtgaccggcacgagggctaagggcatcattgccatctgctgggtgctgtcgtttgccatcggcctgactccca

SEQ ID NO: 274528 - DNA, 120 bp, Artificial Sequence
  ENSG00000128271_7 (sequence is synthesized)
tgctaggttggaacaactgcggtcagccaaaggagggcaagaaccactcccagggctgcggggagggccaagtggcctgtctctttgaggatgtggtccccatgaactacatggtgtact

SEQ ID NO: 274529 - DNA, 120 bp, Artificial Sequence
  ENSG00000128271_8 (sequence is synthesized)
tcaacttctttgcctgtgtgctggtgcccctgctgctcatgctgggtgtctatttgcggatcttcctggcggcgcgacgacagctgaagcagatggagagccagcctctgccgggggagc

SEQ ID NO: 274530 - DNA, 120 bp, Artificial Sequence
  ENSG00000128271_9 (sequence is synthesized)
gggcacggtccacactgcagaaggaggtccatgctgccaagtcactggccatcattgtggggctctttgccctctgctggctgcccctacacatcatcaactgcttcactttcttctgcc

SEQ ID NO: 274531 - DNA, 120 bp, Artificial Sequence
  ENSG00000128271_10 (sequence is synthesized)
gccacgcccctctctggctcatgtacctggccatcgtcctctcccacaccaattcggttgtgaatcccttcatctacgcctaccgtatccgcgagttccgccagaccttccgcaagatca

SEQ ID NO: 274532 - DNA, 120 bp, Artificial Sequence
  ENSG00000128271_11 (sequence is synthesized)
ttcgcagccacgtcctgaggcagcaagaacctttcaaggcagctggcaccagtgcccgggtcttggcagctcatggcagtgacggagagcaggtcagcctccgtctcaacggccacccgc

SEQ ID NO: 274533 - DNA, 120 bp, Artificial Sequence
  ENSG00000128271_12 (sequence is synthesized)
caggagtgtgggccaacggcagtgctccccaccctgagcggaggcccaatggctatgccctggggctggtgagtggagggagtgcccaagagtcccaggggaacacgggcctcccagacg

SEQ ID NO: 274534 - DNA, 120 bp, Artificial Sequence
  ENSG00000128271_13 (sequence is synthesized)
tggagctccttagccatgagctcaagggagtgtgcccagagccccctggcctagatgaccccctggcccaggatggagcaggagtgtcctgatgattcatggagtttgccccttcctaag

SEQ ID NO: 274535 - DNA, 120 bp, Artificial Sequence
  ENSG00000128271_14 (sequence is synthesized)
ggaaggagatctttatctttctggttggcttgaccagtcacgttgggagaagagagagagtgccaggagaccctgagggcagccggttcctactttggactgagagaagggagccccagg

SEQ ID NO: 274536 - DNA, 120 bp, Artificial Sequence
  ENSG00000128271_15 (sequence is synthesized)
ctggagcagcatgaggcccagcaagaagggcttgggttctgaggaagcagatgtttcatgctgtgaggccttgcaccaggtgggggccacagcaccagcagcatctttgctgggcagggc

SEQ ID NO: 274537 - DNA, 120 bp, Artificial Sequence
  ENSG00000128271_16 (sequence is synthesized)
ccagccctccactgcagaagcatctggaagcaccaccttgtctccacagagcagcttgggcacagcagactggcctggccctgagactggggagtggctccaacagcctcctgccaccca

SEQ ID NO: 274538 - DNA, 120 bp, Artificial Sequence
  ENSG00000128271_17 (sequence is synthesized)
cacaccactctccctagactctcctagggttcaggagctgctgggcccagaggtgacatttgacttttttccaggaaaaatgtaagtgtgaggaaaccctttttattttattacctttca

SEQ ID NO: 274539 - DNA, 120 bp, Artificial Sequence
  ENSG00000128271_18 (sequence is synthesized)
ctctctggctgctgggtctgccgtcggtcctgctgctaacctggcaccagagcctctgcccggggagcctcaggcagtcctctcctgctgtcacagctgccatccacttctcagtcccag

SEQ ID NO: 274540 - DNA, 120 bp, Artificial Sequence
  ENSG00000128271_19 (sequence is synthesized)
ggccatctcttggagtgacaaagctgggatcaaggacagggagttgtaacagagcagtgccagagcatgggcccaggtcccaggggagaggttggggctggcaggccactggcatgtgct

SEQ ID NO: 274541 - DNA, 120 bp, Artificial Sequence
  ENSG00000128271_20 (sequence is synthesized)
gagtagcgcagagctacccagtgagaggccttgtctaactgcctttccttctaaagggaatgtttttttctgagataaaataaaaacgagccacatcgtgttttaagcttgtccaaatga

SEQ ID NO: 274542 - DNA, 120 bp, Artificial Sequence
  ENSG00000128271_21 (sequence is synthesized)
gagggcgtgggaggagggaggtgaggcagctccctccgagtggaagctcacagtcagctgcagcgccgcccctgccctgactgcagctgactggcaggggcacctggaggcagcgggttc

SEQ ID NO: 274543 - DNA, 120 bp, Artificial Sequence
  ENSG00000128271_22 (sequence is synthesized)
gggcgcagtatgagagggcttaccctctgcggcagtgggagacaggaccaggcagctccccacatccttccacatccgagctccaggggtctctggcttgtcctttcacagggcggctgg

SEQ ID NO: 274544 - DNA, 120 bp, Artificial Sequence
  ENSG00000128271_23 (sequence is synthesized)
tgtcccttaggaaaaaaacagaccacatctgatccttggccctgagtccagagtgggaggcaccgtgacaacaatgcgcagagcagggaatgcagggagccatggatagtgctggggtgc

SEQ ID NO: 274545 - DNA, 120 bp, Artificial Sequence
  ENSG00000128271_24 (sequence is synthesized)
gagtgtggcgctgaggaagcggcgggacggatgcgagcccgggaggagcgcgctggggggccgcaggcgggggatgtggcgcggtccaggcccgtcgcggcctcgtcctgacagggacac

SEQ ID NO: 274546 - DNA, 120 bp, Artificial Sequence
  ENSG00000128271_25 (sequence is synthesized)
ctgcgggatcgtccttccaggatcgcctgcgggcctcgcgggccgatgcctcgggtccccctccggcctcggtttctccgcgcagcggggcggggcgggggcagcgcgggtctcaaagct

SEQ ID NO: 274547 - DNA, 120 bp, Artificial Sequence
  ENSG00000128271_26 (sequence is synthesized)
ccgcgcgctcgcatgaaccttcgcgagctcctccagcagggatggaccgggggcgcagaggcgcttcctgaggggtggcgggccgggccccggggcgagggagattccccaggtggagga

SEQ ID NO: 274548 - DNA, 120 bp, Artificial Sequence
  ENSG00000128271_27 (sequence is synthesized)
gacatggagcaggagccgcccccagccaagctgctttcagcacagcgtgggcccccagcaccttggtgcggggtgcggcccctcggaggagggctgtcaggtacaatggcttggtgaccg

SEQ ID NO: 274549 - DNA, 120 bp, Artificial Sequence
  ENSG00000128271_28 (sequence is synthesized)
atttattttttctttttttttttttggtagaaatgggcttttcgccatgttgcccaagctggtcttgcacttctgggctgaagcaatcctctcgccttggcctcccagagccttgggatt

SEQ ID NO: 274550 - DNA, 120 bp, Artificial Sequence
  ENSG00000128271_29 (sequence is synthesized)
gattacaggtgtgagtcactacagtgattgtgaatgcactgagctggcctggagaacacttaccaccttgtccacgtcacatgcaaaaggcccatggtggtggtgcttcctgcacacgag

SEQ ID NO: 274551 - DNA, 120 bp, Artificial Sequence
  ENSG00000128271_30 (sequence is synthesized)
aggactccctgcctccttgttcagggaagtaggggaggatcaaggccacactgggcaccaggagctggaagaacaagagggtctctggcccagagtctgggatggggagaggcagagggg

SEQ ID NO: 274552 - DNA, 120 bp, Artificial Sequence
  ENSG00000128271_31 (sequence is synthesized)
gcggccggagccggagacccagcggccgccgagacagcgggagccggcgtgcgagcggcaggttgccagtcctgctccatccctcatgtcctggaagagagagagagacgaggtggctgc

SEQ ID NO: 274553 - DNA, 120 bp, Artificial Sequence
  ENSG00000128271_32 (sequence is synthesized)
ccgagtccacgtgaaaggcagcctctgacctcttgtccccaggtgcctcaggaaccctgaagctgggctgagccatgatgctgctgccagaacccctgcagagggcctggtttcaggaga

SEQ ID NO: 274554 - DNA, 120 bp, Artificial Sequence
  ENSG00000128272_0 (sequence is synthesized)
tttctactttgcccgcccacagatgtagttttctctgcgcgtgtgcgttttccctcctccccgccctcagggtccacggccaccatggcgtattaggggcagcagtgcctgcggcagcat

SEQ ID NO: 274555 - DNA, 120 bp, Artificial Sequence
  ENSG00000128272_1 (sequence is synthesized)
tggcctttgcagcggcggcagcagcaccaggctctgcagcggcaacccccagcggcttaagccatggcgtgagtaccggggcgggtcgtccagctgtgctcctggggccggcgcgggttt

SEQ ID NO: 274556 - DNA, 120 bp, Artificial Sequence
  ENSG00000128272_2 (sequence is synthesized)
tggattggtggggtgcggcctggggccagggcggtgccgccaagggggaagcgatttaacgagcgcccgggacgcgtggtctttgcttgggtgtccccgagacgctcgcgtgcctgggat

SEQ ID NO: 274557 - DNA, 120 bp, Artificial Sequence
  ENSG00000128272_3 (sequence is synthesized)
cgggaaagcgtagtcgggtgcccggactgcttccccaggagccctacagccctcggaccccgagccccgcaagggtcccaggggtcttggctgttgccccacgaaacgtggcaggaacca

SEQ ID NO: 274558 - DNA, 120 bp, Artificial Sequence
  ENSG00000128272_4 (sequence is synthesized)
accaagatggcggcggcagggcggcggcgcgggcgtgagtcaagggcgggcggtgggcggggcgcggccgccctggccgtatttggacgtggggacggagcgctttcctcttggcggccg

SEQ ID NO: 274559 - DNA, 120 bp, Artificial Sequence
  ENSG00000128272_5 (sequence is synthesized)
aagaatcccctggtctccgtgagcgtccattttgtggaacctgagttgcaagcagggaggggcaaatacaactgccctgttcccgattctctagatggccgatctagagaagtcccgcct

SEQ ID NO: 274560 - DNA, 120 bp, Artificial Sequence
  ENSG00000128272_6 (sequence is synthesized)
cataagtggaaggatgaaattctcagaacagctaacctctaatgggagttggcttctgattctcattcaggcttctcacggcattcagcagcagcgttgctgtaaccgacaaagacacct

SEQ ID NO: 274561 - DNA, 120 bp, Artificial Sequence
  ENSG00000128272_7 (sequence is synthesized)
tcgaattaagcacattcctcgattccagcaaagcaccgcaacatgaccgaaatgagcttcctgagcagcgaggtgttggtgggggacttgatgtcccccttcgaccagtcgggtttgggg

SEQ ID NO: 274562 - DNA, 120 bp, Artificial Sequence
  ENSG00000128272_8 (sequence is synthesized)
gaatggctggctgtggatgggttggtcagtccctccaacaacagcaaggaggatgccttctccgggacagattggatgttggagaaaatggatttgaaggagttcgacttggatgccctg

SEQ ID NO: 274563 - DNA, 120 bp, Artificial Sequence
  ENSG00000128272_9 (sequence is synthesized)
ttgggtatagatgacctggaaaccatgccagatgaccttctgaccacgttggatgacacttgtgatctctttgcccccctagtccaggagactaataagcagcccccccagacggtgaac

SEQ ID NO: 274564 - DNA, 120 bp, Artificial Sequence
  ENSG00000128272_10 (sequence is synthesized)
ccaattggccatctcccagaaagtttaacaaaacccgaccaggttgcccccttcaccttcttacaacctcttcccctttccccaggggtcctgtcctccactccagatcattcctttagt

SEQ ID NO: 274565 - DNA, 120 bp, Artificial Sequence
  ENSG00000128272_11 (sequence is synthesized)
ttagagctgggcagtgaagtggatatcactgaaggagataggaagccagactacactgcttacgttgccatgatccctcagtgcataaaggaggaagacaccccttcagataatgatagt

SEQ ID NO: 274566 - DNA, 120 bp, Artificial Sequence
  ENSG00000128272_12 (sequence is synthesized)
ggcatctgtatgagcccagagtcctatctggggtctcctcagcacagcccctctaccaggggctctccaaataggagcctcccatctccaggtgttctctgtgggtctgcccgtcccaaa

SEQ ID NO: 274567 - DNA, 120 bp, Artificial Sequence
  ENSG00000128272_13 (sequence is synthesized)
ccttacgatcctcctggagagaagatggtagcagcaaaagtaaagggtgagaaactggataagaagctgaaaaaaatggagcaaaacaagacagcagccactaggtaccgccagaagaag

SEQ ID NO: 274568 - DNA, 120 bp, Artificial Sequence
  ENSG00000128272_14 (sequence is synthesized)
agggcggagcaggaggctcttactggtgagtgcaaagagctggaaaagaagaacgaggctctaaaagagagggcggattccctggccaaggagatccagtacctgaaagatttgatagaa

SEQ ID NO: 274569 - DNA, 120 bp, Artificial Sequence
  ENSG00000128272_15 (sequence is synthesized)
gaggtccgcaaggcaagggggaagaaaagggtcccctagttgaggatagtcaggagcgtcaatgtgcttgtacatagagtgctgtagctgtgtgttccaataaattattttgtagggaaa

SEQ ID NO: 274570 - DNA, 120 bp, Artificial Sequence
  ENSG00000128272_16 (sequence is synthesized)
aggtggacaggcccggcgcgccctctcgaggccccttcaacctcccgggggcagcagcgccgtgtcggctatgaatggggcctctggaaaactcaggcttggaacagcacctcgcgcgat

SEQ ID NO: 274571 - DNA, 120 bp, Artificial Sequence
  ENSG00000128272_17 (sequence is synthesized)
aacctggcgtcctcggccttcacaataaaaactcttcgccggaaaacgacctttccccgcccactgcgctgacaccggaagcgaggcgtgtctgggagatcactccgcgctccggcggcg

SEQ ID NO: 274572 - DNA, 120 bp, Artificial Sequence
  ENSG00000128272_18 (sequence is synthesized)
aaggaaagaacggactctgatcatagaagcctagtaaagtagtacacctctctcctttcgtgaggccataagaacaaactccttttctcgtcacagctacgccctgggcataaacggttg

SEQ ID NO: 274573 - DNA, 120 bp, Artificial Sequence
  ENSG00000128272_19 (sequence is synthesized)
gggcgtcaaagggagggagggaagggagcgggcgggaggagacggtcacgtggtcgcggcggaaggatgcgtctgtgctgcgtccccatagagacgaagtctataaagggccggcgggcg

SEQ ID NO: 274574 - DNA, 120 bp, Artificial Sequence
  ENSG00000128274_0 (sequence is synthesized)
agatggatttgcagccgctgcaagtgtgtggaagggccgtgttcgtgttggcaaagaaggtcggctgctgagccagggcgtgtctcccggaggcctgtgggctgccaggatccccacctc

SEQ ID NO: 274575 - DNA, 120 bp, Artificial Sequence
  ENSG00000128274_1 (sequence is synthesized)
tctgcaatgggctgcccaggctgaccagccggttcctgctggaagctcctggtctgatctggggataccatgtccaagccccccgacctcctgctgcggctgctccggggcgccccaagg

SEQ ID NO: 274576 - DNA, 120 bp, Artificial Sequence
  ENSG00000128274_2 (sequence is synthesized)
cagcgggtctgcaccctgttcatcatcggcttcaagttcacgtttttcgtctccatcatgatctactggcacgttgtgggagagcccaaggagaaagggcagctctataacctgccagca

SEQ ID NO: 274577 - DNA, 120 bp, Artificial Sequence
  ENSG00000128274_3 (sequence is synthesized)
gagatcccctgccccaccttgacaccccccaccccaccctcccacggccccactccaggcaacatcttcttcctggagacttcagaccggaccaaccccaacttcctgttcatgtgctcg

SEQ ID NO: 274578 - DNA, 120 bp, Artificial Sequence
  ENSG00000128274_4 (sequence is synthesized)
gtggagtcggccgccagaactcaccccgaatcccacgtgctggtcctgatgaaagggcttccgggtggcaacgcctctctgccccggcacctgggcatctcacttctgagctgcttcccg

SEQ ID NO: 274579 - DNA, 120 bp, Artificial Sequence
  ENSG00000128274_5 (sequence is synthesized)
aatgtccagatgctcccgctggacctgcgggagctgttccgggacacacccctggccgactggtacgcggccgtgcaggggcgctgggagccctacctgctgcccgtgctctccgacgcc

SEQ ID NO: 274580 - DNA, 120 bp, Artificial Sequence
  ENSG00000128274_6 (sequence is synthesized)
tccaggatcgcactcatgtggaagttcggcggcatctacctggacacggacttcattgttctcaagaacctgcggaacctgaccaacgtgctgggcacccagtcccgctacgtcctcaac

SEQ ID NO: 274581 - DNA, 120 bp, Artificial Sequence
  ENSG00000128274_7 (sequence is synthesized)
ggcgcgttcctggccttcgagcgccggcacgagttcatggcgctgtgcatgcgggacttcgtggaccactacaacggctggatctggggtcaccagggcccgcagctgctcacgcgggtc

SEQ ID NO: 274582 - DNA, 120 bp, Artificial Sequence
  ENSG00000128274_8 (sequence is synthesized)
gactggaagaagtactttgaggacatcaaccccgaggagctgccgcggctgctcagtgccacctatgctgtccacgtgtggaacaagaagagccagggcacgcggttcgaggccacgtcc

SEQ ID NO: 274583 - DNA, 120 bp, Artificial Sequence
  ENSG00000128274_9 (sequence is synthesized)
agggcactgctggcccagctgcatgcccgctactgccccacgacgcacgaggccatgaaaatgtacttgtgaggggcccgccaggtcacctccccaacctgctcctgatggggcactggg

SEQ ID NO: 274584 - DNA, 120 bp, Artificial Sequence
  ENSG00000128274_10 (sequence is synthesized)
ccgcccttcccggggaggcaagattgagggcccgggagagggaggcccgagctgccaccgggcttaggcaggctgttgaggagctgtgggagcaggcccagtgggaggctgtggacaccc

SEQ ID NO: 274585 - DNA, 120 bp, Artificial Sequence
  ENSG00000128274_11 (sequence is synthesized)
cgaggacagtgtcctgtctcgaggcagggctgacacatggtgccatagccagcggagggcgctcagtgagtgccccgggccttctagacaacaggcaggaaggatgaacctcagggcacc

SEQ ID NO: 274586 - DNA, 120 bp, Artificial Sequence
  ENSG00000128274_12 (sequence is synthesized)
cccaggtggtgcggaaagccaggcagttgggacagaggtgcccacgagggcagaggccggtgctaaggggatggggaagaagggacaagattcccagagaggagaggaggctgttggtag

SEQ ID NO: 274587 - DNA, 120 bp, Artificial Sequence
  ENSG00000128274_13 (sequence is synthesized)
gaaagtggcagggctgggggagacccagccccaagggtccggggcggaggatgctttgttcttttctggttttggttcctctttcgcggggggtgggggaggtcaacagggactgagtgg

SEQ ID NO: 274588 - DNA, 120 bp, Artificial Sequence
  ENSG00000128274_14 (sequence is synthesized)
ggcagaggcccagaagtgccagcctggggagccgtttgggggcagccccttctgcccaccccatccttcttcctctccagagatgccaggggggcgtgtatgctctgccccttccctcag

SEQ ID NO: 274589 - DNA, 120 bp, Artificial Sequence
  ENSG00000128274_15 (sequence is synthesized)
acaggggctgggtggggaggctctttaggctcaggagaagcattttaaagaaacccccaccctgccgcccgcattataaacacaggagaataatcaatagaataaaagtgaccgactgtc

SEQ ID NO: 274590 - DNA, 120 bp, Artificial Sequence
  ENSG00000128274_16 (sequence is synthesized)
tgcacttctgtgcctcaatttcctcatctgtagggtgggggtggtgattgccaccccatagggtggttataaggggccacacatgttcctatgtgtgagatgctgagaaagtcacctggc

SEQ ID NO: 274591 - DNA, 120 bp, Artificial Sequence
  ENSG00000128274_17 (sequence is synthesized)
atggacaggatggacagccagtatttatcgaactatgaatgaatgaatgttaccctttagtgggttccagcgtcctatcctgtcggtgggaagactgaggctcagagagctccgtaactt

SEQ ID NO: 274592 - DNA, 120 bp, Artificial Sequence
  ENSG00000128274_18 (sequence is synthesized)
gccccaggtcacacagccggttcaggcagagttggggtctcatgcctcccaggtgttcccacagtcttttccccaggagcagggtccaagcctgctgctcctccaaccacctgcgaggca

SEQ ID NO: 274593 - DNA, 120 bp, Artificial Sequence
  ENSG00000128274_19 (sequence is synthesized)
gtccttgggaggggaccgactcttagctccccttagcaatcaggttgcacccagtcccttgactttatgcccaggtttcctggcacctaaagtagaaacgatgcaactgcccctcgggct

SEQ ID NO: 274594 - DNA, 120 bp, Artificial Sequence
  ENSG00000128274_20 (sequence is synthesized)
tgctgagggtcaaagggggtgtgactttgtcatggagcgtagaagtcagagtcgatggtgatcccgctggctgttaacatcgatacagttcagaccagccggttcctgctggaagctcct

SEQ ID NO: 274595 - DNA, 88 bp, Artificial Sequence
  ENSG00000128274_21 (sequence is synthesized)
ccggccgccgcgccgcccgcccgccggggccccgctgtccgccgcccgccgccgctggagctagagacctttaaaaacacgtttttcc

SEQ ID NO: 274596 - DNA, 66 bp, Artificial Sequence
  ENSG00000128274_22 (sequence is synthesized)
accagcctggccaacttggtgaaaccccccatctccactaaaaatacaataaattaactgggcgtg

SEQ ID NO: 274597 - DNA, 120 bp, Artificial Sequence
  ENSG00000128274_23 (sequence is synthesized)
aaataactggaattccgcaaacactggggtgatgcaggcaatgcccttagcacggtcccggcaggaggcggtgggatcaggccgacccgggtcccaggggtgacagcgtcccttctccac

SEQ ID NO: 274598 - DNA, 120 bp, Artificial Sequence
  ENSG00000128276_0 (sequence is synthesized)
cggcagcagcgagtggacatggctgcactcttccaagaagcaagcagctgtcccgtctgctcagactatctggaaaaaccaatgtccctggagtgtggatgcaccgtctgcctcaagtgc

SEQ ID NO: 274599 - DNA, 120 bp, Artificial Sequence
  ENSG00000128276_1 (sequence is synthesized)
atcaattcgctgcagaaggagccccatggggaggatctgctttgctgttgctgttccatggtctctcagaggaacaaaatcaggcccaatcggcagctagagaggctggtttcccacatc

SEQ ID NO: 274600 - DNA, 120 bp, Artificial Sequence
  ENSG00000128276_2 (sequence is synthesized)
aaggaactggagcccaagctgaagaagattctacagatgaacccaaggatgcggaagttccaagtggatatgaccttggatgccgacacagccaacaacttcctcctcatttctgacgac

SEQ ID NO: 274601 - DNA, 120 bp, Artificial Sequence
  ENSG00000128276_3 (sequence is synthesized)
ctcaggagcgtccgaagtgggctcatcacacagaatcggcaagaccttgccgagagatttgacgtgtccgtttgcatcctgggctcccctcgctttacctgtggccgccactactgggag

SEQ ID NO: 274602 - DNA, 120 bp, Artificial Sequence
  ENSG00000128276_4 (sequence is synthesized)
gtggacgtgggaacaagcacagaatgggacctgggagtctgcagagaatctgttcactgcaaagggaagatccagctgaccacagagcttggattctggactgtgagtttgagggatgga

SEQ ID NO: 274603 - DNA, 120 bp, Artificial Sequence
  ENSG00000128276_5 (sequence is synthesized)
cagcacggtgccgctgactttcctcttagtagaccgcaagttacagcgagtggggatttttctggatatgggcatgcagaacgtttccttttttgatgctgaaagtggttcccatgtcta

SEQ ID NO: 274604 - DNA, 120 bp, Artificial Sequence
  ENSG00000128276_6 (sequence is synthesized)
tacattcaggagcgtctctgctgaggagccactgcgcccatttttggctccttcaattccacctaatggtgatcaaggtgtcttgagcatctgtcctttgatgaactcaggcactactga

SEQ ID NO: 274605 - DNA, 120 bp, Artificial Sequence
  ENSG00000128276_7 (sequence is synthesized)
tgctccagtccgtcctggggaggccaaataagccgccactgcaaaaaaaaacagggtcagaaaattacttgggtgggtagacttaggaattttctacttggtaaaagcattatacagtca

SEQ ID NO: 274606 - DNA, 120 bp, Artificial Sequence
  ENSG00000128276_8 (sequence is synthesized)
taggagaaagatatgggacatttctataatctatattctaatttgattcgattattgagtcgtaagtattaattattgccaccatccaactcattgagtcttatggttcacatcttgttt

SEQ ID NO: 274607 - DNA, 120 bp, Artificial Sequence
  ENSG00000128276_9 (sequence is synthesized)
cctatagaaatgttctgtattctcggatcaatttccaaatgctttactttttcatttctgtaagttcaaatcaatgtttaaattatagaagttatgaggtaaataaacatttggatatca

SEQ ID NO: 274608 - DNA, 120 bp, Artificial Sequence
  ENSG00000128276_10 (sequence is synthesized)
gccacgtcactggctcaggctcagctgctgggtcaccaggagaatggacccttcctccacctcagctcagagcacagtgatgattcgtgactttcccaatagaacttcaaatctctgagg

SEQ ID NO: 274609 - DNA, 120 bp, Artificial Sequence
  ENSG00000128276_11 (sequence is synthesized)
acggggggtggggggatgtgcttgagtgtttgtactcatggtcttgttctcggagtgacaaagctggaacacaatacctctatgcatgaaaaggttgtcacttgtcacaactaacaggct

SEQ ID NO: 274610 - DNA, 120 bp, Artificial Sequence
  ENSG00000128283_0 (sequence is synthesized)
agcgactctcccgggctgccagccgggacgcgcggccgccgccgctgcagacgacgagtccgccctcgtcccgcgcccccggggctcgcggagccaggtctccacctctgggcaggagag

SEQ ID NO: 274611 - DNA, 120 bp, Artificial Sequence
  ENSG00000128283_1 (sequence is synthesized)
tgggcaggagagttgccgaccacctcgggggtgctttctctgcgcttgaacatctatagctgcttctgaggggctgggagccgggcccctgggagagacgagccatgaaccccccacagc

SEQ ID NO: 274612 - DNA, 120 bp, Artificial Sequence
  ENSG00000128283_2 (sequence is synthesized)
ctctgcatttggggacctcaccttaggagagtgccatttacagcttccgccagggcaaaggagctgagcagccatcccaagcccagcccacctccctcccccggcccctggtaggcatgg

SEQ ID NO: 274613 - DNA, 120 bp, Artificial Sequence
  ENSG00000128283_3 (sequence is synthesized)
actagcagctgtgagcagccagagctgatgcccggcccccaggggggcagaggcgccgccaccatgagcctgggcaagctctcgcctgtgggctgggtgtccagttcacagggaaagagg

SEQ ID NO: 274614 - DNA, 120 bp, Artificial Sequence
  ENSG00000128283_4 (sequence is synthesized)
cggctgactgcagacatgatcagccacccactcggggacttccgccacaccatgcatgtgggccgtggcggggatgtcttcggggacacgtccttcctcagcaaccacggtggcagctcc

SEQ ID NO: 274615 - DNA, 120 bp, Artificial Sequence
  ENSG00000128283_5 (sequence is synthesized)
gggagcacccatcgctcaccccgcagcttcctggccaagaagctgcagctggtgcggagggtgggggcgcccccccggaggatggcatctccccctgcaccctccccggctccaccggcc

SEQ ID NO: 274616 - DNA, 120 bp, Artificial Sequence
  ENSG00000128283_6 (sequence is synthesized)
atctcccccatcatcaagaacgccatctccctgccccagctcaaccaggccgcctacgacagcctcgtggttggcaagctcagcttcgacagcagccccaccagctccacggacggccac

SEQ ID NO: 274617 - DNA, 120 bp, Artificial Sequence
  ENSG00000128283_7 (sequence is synthesized)
tccagctacggcctggactctgggttctgcaccatctcccgcctgccccgctcggaaaagccgcatgaccgagaccgggatggttccttcccctctgagcccgggcttcgccgctctgac

SEQ ID NO: 274618 - DNA, 120 bp, Artificial Sequence
  ENSG00000128283_8 (sequence is synthesized)
gctgcaaaccccccagcccctactgcaaaccccacgggtcctgctgcaaaccccccagccactactgcaaaccccccagcgcctgctgcaaacccctcagcacctgccgcaacccccacg

SEQ ID NO: 274619 - DNA, 120 bp, Artificial Sequence
  ENSG00000128283_9 (sequence is synthesized)
ggtcctgctgcaaatcccccagcccctgccgcaagctccacaccccatggacactgtcccaatggggtaacagctgggttgggcccagtggctgaggtgaagtccagcccagtgggaggg

SEQ ID NO: 274620 - DNA, 120 bp, Artificial Sequence
  ENSG00000128283_10 (sequence is synthesized)
ggtccccgaggacctgctggccctgccctcggcaggcactggggagcaggctgggatggcggccaccactacccagagatggatgcgcggcaggagcgggtggaggtgctgccccaagcc

SEQ ID NO: 274621 - DNA, 120 bp, Artificial Sequence
  ENSG00000128283_11 (sequence is synthesized)
cgggcctcctgggagagcctggacgaagagtggagggcgccccaggcaggcagcaggaccccagtgcccagcacagtgcaagcaaacacctttgaatttgcggatgctgaggaggatgat

SEQ ID NO: 274622 - DNA, 120 bp, Artificial Sequence
  ENSG00000128283_12 (sequence is synthesized)
gaggtcaaggtgtgaggggctggggcacggtcccagggccccacctaggtgcagagccggcccctcacctaacagctggttcctaccagaccggagaggggagaagtcatgttgccccta

SEQ ID NO: 274623 - DNA, 120 bp, Artificial Sequence
  ENSG00000128283_13 (sequence is synthesized)
aacccctccccacctctgcaggacagacatgggagggaggacagggaaggccaggcttgctctgggacttttatgctcccagaggccctgccaaactgaccacctcccccgactgccact

SEQ ID NO: 274624 - DNA, 120 bp, Artificial Sequence
  ENSG00000128283_14 (sequence is synthesized)
ctggacctaatagctgttccttaggccccactccatgccacccccaccagctggaggacccagcctcacagtgtgtcctttgtgccagaccaagcggcccgtggggggtggggggcaggg

SEQ ID NO: 274625 - DNA, 120 bp, Artificial Sequence
  ENSG00000128283_15 (sequence is synthesized)
agtgtaccacacagggccattgtctcacctcccaaagggaccgcctgcccccagctcatcccagagcgtccctgctgcaaccctgacagccgtctcccaggccgcttccccaacatcccc

SEQ ID NO: 274626 - DNA, 120 bp, Artificial Sequence
  ENSG00000128283_16 (sequence is synthesized)
gccccagcctccctcttaccccagaaaggtcaggtatgacctcccggggaggaatcccacctgcctgtataccccagacttgcctctggggcctgattaaataaggctgttttgataaaa

SEQ ID NO: 274627 - DNA, 120 bp, Artificial Sequence
  ENSG00000128283_17 (sequence is synthesized)
ttgaatatgctcacgcatggaggaggcagctggaaaaagccacttttgaccacaggatccttattccaggaagctccttgaaggtggatggttcagaggaacctctgctctggctgttta

SEQ ID NO: 274628 - DNA, 120 bp, Artificial Sequence
  ENSG00000128283_18 (sequence is synthesized)
agtattgagatttctatgcttggaggtggcagcaatggttttaaaaaaggaagaaggctgagccgcagacataggtgttcttaaggatcattattgacttttatcagctgaggtcccagg

SEQ ID NO: 274629 - DNA, 120 bp, Artificial Sequence
  ENSG00000128283_19 (sequence is synthesized)
gcagaccggcccagcgactctcccgggctgccagccgggacgcgcggccgccgccgctgcagacgacgagtccgccctcgtcccgcgcccccggggctcgcggagccagacggaatgttg

SEQ ID NO: 274630 - DNA, 76 bp, Artificial Sequence
  ENSG00000128283_20 (sequence is synthesized)
acagcttcctgggtagctgggattacaggtctccacctctgggcaggagagttgccgaccacctcgggggtgcttt

SEQ ID NO: 274631 - DNA, 120 bp, Artificial Sequence
  ENSG00000128284_0 (sequence is synthesized)
agcaggagggtgggaccaagggtgctgctggaccaaggatgggactgggccaagggtggggctgggaagcatcctgttttgcatgtttgatcaggagctgctgccaagttgtgactttca

SEQ ID NO: 274632 - DNA, 120 bp, Artificial Sequence
  ENSG00000128284_1 (sequence is synthesized)
ctttcccttttgggttccagggtatatctcagagcctggagaacgtgtctggttattatgcagatgcacggctggaggtgggatccacacagctcagaacagctggatcttgctcacact

SEQ ID NO: 274633 - DNA, 120 bp, Artificial Sequence
  ENSG00000128284_2 (sequence is synthesized)
ctttcaagagaagcttccttgaaaagaaacgctttactgaagaggccaccaaatacttccgggagagagtcagcccagtgcatctgcaaatcctgctgactaacaatgaagcctggaaga

SEQ ID NO: 274634 - DNA, 120 bp, Artificial Sequence
  ENSG00000128284_3 (sequence is synthesized)
gattcgtgactgcggctgaattgcccagggatgaggcagatgctctctacgaagctctgaagaagcttagaacatatgcagctattgaggacgaatatgtgcagcagaaagatgagcagt

SEQ ID NO: 274635 - DNA, 120 bp, Artificial Sequence
  ENSG00000128284_4 (sequence is synthesized)
ttagggaatggtttttgaaagagtttccccaagtcaagaggaagatccaggagtccatagaaaagcttcgtgcccttgcaaatggtattgaagaggtccacagaggctgcaccatctcca

SEQ ID NO: 274636 - DNA, 120 bp, Artificial Sequence
  ENSG00000128284_5 (sequence is synthesized)
atgtggtgtccagctccactggcgctgcctctggcatcatgtcccttgctggtcttgttttggcaccatttacagcagggacgagtctggcccttactgcagctggggtagggctgggag

SEQ ID NO: 274637 - DNA, 120 bp, Artificial Sequence
  ENSG00000128284_6 (sequence is synthesized)
cagcgtctgctgtgactgggatcaccaccagcatcgtggagcactcatacacatcatcagcagaagctgaagccagcaggctgactgcaaccagcattgaccgattgaaggtatttaagg

SEQ ID NO: 274638 - DNA, 120 bp, Artificial Sequence
  ENSG00000128284_7 (sequence is synthesized)
aagttatgcgtgacatcacacccaacttactttcccttcttaataattattacgaagccacacaaaccattgggagtgaaatccgtgccatcaggcaagccagagccagggcccgactcc

SEQ ID NO: 274639 - DNA, 120 bp, Artificial Sequence
  ENSG00000128284_8 (sequence is synthesized)
agcagaggagcccggatcctgagtgcgaccacttcaggcatcttccttgcactggatgtggtcaaccttgtatacgagtcaaagcacttgcatgagggggcaaagtctgcatctgctgag

SEQ ID NO: 274640 - DNA, 120 bp, Artificial Sequence
  ENSG00000128284_9 (sequence is synthesized)
gagctgaggcggcaggctcaggagctggaggagaatctaatggagctcactcagatctatcagcgtctgaatccatgccatacccactgaccccagaccagtgcagccagcaggggaggt

SEQ ID NO: 274641 - DNA, 120 bp, Artificial Sequence
  ENSG00000128284_10 (sequence is synthesized)
gagccatacacaggccacgacaaaatgcaggcattttattagggggataaagagggcaaggtaaagtttatggagctgagtgttagtgactttggcatttctgtagctgagcacagcagg

SEQ ID NO: 274642 - DNA, 120 bp, Artificial Sequence
  ENSG00000128284_11 (sequence is synthesized)
ggaggggttaatgcagatggcaagtgcaccaaggagaaggcaggaatgctggagcctggaataagggaggagaggggactggagagtgtggggaataggaagaagaaatttcctttagac

SEQ ID NO: 274643 - DNA, 120 bp, Artificial Sequence
  ENSG00000128284_12 (sequence is synthesized)
taacgaatatattggggggaggaatagaggggaggtgtgcaggaaccagcaatgagaaggccaggaaaagaaagagctgaaaatgcagaaagccgaagagttagaacttttggatacagc

SEQ ID NO: 274644 - DNA, 120 bp, Artificial Sequence
  ENSG00000128284_13 (sequence is synthesized)
agaagaaacagcggctccactaccgacctgcccccggttcgatgtccttccaagaatgaagtctttccctggtgatggtcccctgccctgtctttccagcatccactctgtcttgtcctc

SEQ ID NO: 274645 - DNA, 120 bp, Artificial Sequence
  ENSG00000128284_14 (sequence is synthesized)
ctggaagtgtatctcagtcagccagtggcttcttgatgatggcggtggaggtggtggttgtagtgtgatggatcccctttaggttatttaggggtatatgtcccctgcttgaaccctgaa

SEQ ID NO: 274646 - DNA, 120 bp, Artificial Sequence
  ENSG00000128284_15 (sequence is synthesized)
ggccaggtaatgagccatggccattgtccccagctgaggaccaggtgtctctaaaaacccaaacatcctggagagtatgcgagaacctaccaagaaaaacagtctcattactcatataca

SEQ ID NO: 274647 - DNA, 120 bp, Artificial Sequence
  ENSG00000128284_16 (sequence is synthesized)
gcaggcaaagagacagaaaattaactgaaaagcagtttagagactgggggaggccggatctctagagccatcctgctgagtgccctgtgtgtaagtcctaataaactcacctactcacca

SEQ ID NO: 274648 - DNA, 120 bp, Artificial Sequence
  ENSG00000128284_17 (sequence is synthesized)
attatgcagatgcacggctggaggtgggatccacacagctcagaacagctggatcttgctcacactctttcaagagaagcttccttggcctctgggtgatagagaagaaagaagctgtgc

SEQ ID NO: 274649 - DNA, 120 bp, Artificial Sequence
  ENSG00000128284_18 (sequence is synthesized)
tgttccctagtgggaaagatggcccagacaggggcagtgagaacggcatgttgcagaatggtgtctgccacatgatcccagcttgacaatcatgagattaaaagtcaaactgtggaagcg

SEQ ID NO: 274650 - DNA, 120 bp, Artificial Sequence
  ENSG00000128284_19 (sequence is synthesized)
cctggaagattttggattattaacattatactttcttgcttcaatgtcagagtcaggaggtcaggtgttgaccttccccctgccctccaagaggtgtgtgacactggggaagtcacttcc

SEQ ID NO: 274651 - DNA, 120 bp, Artificial Sequence
  ENSG00000128284_20 (sequence is synthesized)
cctctctgagcctcagggtttttcacctgccttagggggttaggatgccctaccctgctgacccccagcaggctgctgaccccatctggggtgaggtgggaggcggggcagtgcgagtca

SEQ ID NO: 274652 - DNA, 120 bp, Artificial Sequence
  ENSG00000128284_21 (sequence is synthesized)
atgttgtccagaggctggttgcttttagtccaagtgctgcctcccacacctcggatttcagccaggctgtgccacggagggcagaggccacccaggacaaaaggaccctgccttggtgtg

SEQ ID NO: 274653 - DNA, 120 bp, Artificial Sequence
  ENSG00000128284_22 (sequence is synthesized)
gggattgcagagatccagcccctccaacctccctctgtccacaggtggctcacattcagtcccacaatttgctttctcctcctcaagggttaagaaaaaaaacgaacccttccagtcagg

SEQ ID NO: 274654 - DNA, 120 bp, Artificial Sequence
  ENSG00000128284_23 (sequence is synthesized)
attatgcagatgcacggctggaggtgggatccacacagctcagaacagctggatcttgctcacactctttcaagagaagcttccttgcgtggtggtatgtacctgtagggacaactactt

SEQ ID NO: 274655 - DNA, 120 bp, Artificial Sequence
  ENSG00000128284_24 (sequence is synthesized)
cacttgggcatagagtgcaagacacagatttggaatgaggagtcatttacaataagcatgacaaaaggaccctgccttggtgtgagagtgagggcagagggagctggagcaagtagaatt

SEQ ID NO: 274656 - DNA, 120 bp, Artificial Sequence
  ENSG00000128284_25 (sequence is synthesized)
tctctaaataccagctggctggggcccaggagattaaaaaacaccgggctagggttaagaaaaaaaacgaacccttccagtcaggtcagtgactggagagctccatggaaagtctctcag

SEQ ID NO: 274657 - DNA, 120 bp, Artificial Sequence
  ENSG00000128284_26 (sequence is synthesized)
attatgcagatgcacggctggaggtgggatccacacagctcagaacagctggatcttgctcacactctttcaagagaagcttccttgagatgagcatctagatagcaaggaaaaacattc

SEQ ID NO: 274658 - DNA, 120 bp, Artificial Sequence
  ENSG00000128284_27 (sequence is synthesized)
aatccctcaactgaaagtgaaactgaagctgggccatgttgtccagaggctggttgcttttagtccaagtgctgcctcccacacctcggatttcagccaggctgtgccacggagggcaga

SEQ ID NO: 274659 - DNA, 120 bp, Artificial Sequence
  ENSG00000128284_28 (sequence is synthesized)
caataggcacatggcagaaggaagcgatcactggaatatttcccgtacatggggagaaagcatggtggaaagctcactttctggtgattctcagctgaaatagatcggttcctccacaaa

SEQ ID NO: 274660 - DNA, 120 bp, Artificial Sequence
  ENSG00000128284_29 (sequence is synthesized)
ggatttcagccaggctgtgccacggagggcagaggccacccaggaggaggccccacagccacttgcagggagctgctttgctgagagtctctgtcctctgcatctggagagcttggctca

SEQ ID NO: 274661 - DNA, 120 bp, Artificial Sequence
  ENSG00000128284_30 (sequence is synthesized)
agctgaggcaggagggagggctccctgtctgggcctcctccaggaactaaagtccctttccgggaattgaccaaactgcaggcttgcccagggaggacatgctgtgtcctagttcagctc

SEQ ID NO: 274662 - DNA, 120 bp, Artificial Sequence
  ENSG00000128284_31 (sequence is synthesized)
gaggggcagtatccagcttcaaccctcagcggatgccccagacaagattccgagccaggccaacaacgcctaaggaggacgagaccctgggtgtagctcatcagaggtgtcaggtgtggt

SEQ ID NO: 274663 - DNA, 120 bp, Artificial Sequence
  ENSG00000128284_32 (sequence is synthesized)
aagaaaagaaacgctttactgaagaggccaccaaatacttccgggagagagtcagcccagtgcatctgcaaatcctgctgactaacaatgaagcctggaagagattcgtgactgcggctg

SEQ ID NO: 274664 - DNA, 120 bp, Artificial Sequence
  ENSG00000128284_33 (sequence is synthesized)
gaagctgggccatgttgtccagaggctggttgcttttagtccaagtgctgcctcccacacctcggatttcagccaggctgtgccacggagggcagaggccacccaggtggctcacattca

SEQ ID NO: 274665 - DNA, 120 bp, Artificial Sequence
  ENSG00000128284_34 (sequence is synthesized)
attatgcagatgcacggctggaggtgggatccacacagctcagaacagctggatcttgctcacactctttcaagagaagcttccttgcttggttaccccagccaccgaggtttctctgaa

SEQ ID NO: 274666 - DNA, 120 bp, Artificial Sequence
  ENSG00000128284_35 (sequence is synthesized)
gctgacatttctcccatcaggaggcaggtgtatttctctttggcacttgctcacacttctccatcaactttaaggtggtggcaccacaatccaaaccattattgaggacaaaaggaccct

SEQ ID NO: 274667 - DNA, 120 bp, Artificial Sequence
  ENSG00000128284_36 (sequence is synthesized)
tctcagagcctggagaacgtgtctggttattatgcagatgcacggctggaggtgggatccacacagctcagaacagctggatcttgctcacactctttcaagagaagcttccttggagaa

SEQ ID NO: 274668 - DNA, 120 bp, Artificial Sequence
  ENSG00000128284_37 (sequence is synthesized)
ccttcattctcaacacttacgaacaggaacataaataaatagaaggaaaaatatccatttatattaagatgctcttcttgttaaaaccaattaacaattaaacattctctgttacgataa

SEQ ID NO: 274669 - DNA, 120 bp, Artificial Sequence
  ENSG00000128284_38 (sequence is synthesized)
actctggggaaaggagggtacaaccacatgtaaattttattataatgatggtataatgaacttggggtgacctgagggcatgtttttgtgttactgggcatgtgcccctttaggagactt

SEQ ID NO: 274670 - DNA, 120 bp, Artificial Sequence
  ENSG00000128284_39 (sequence is synthesized)
ccacctgtgccttactttctctttctttgggatgtgctggccacagactttaccaaaaactccatccattaggatggcattaggacggttctggggctaaacttaggtgggccaggggct

SEQ ID NO: 274671 - DNA, 120 bp, Artificial Sequence
  ENSG00000128284_40 (sequence is synthesized)
gtttcactgtcagcctttctactctcttttcttacccactcctagctgctaatgtctatttaactacctaatatttccccctttagagaaaaaaagccaaatttttgggtagatcggtga

SEQ ID NO: 274672 - DNA, 120 bp, Artificial Sequence
  ENSG00000128284_41 (sequence is synthesized)
caattaatctggctacttcctgctgacaagaggcagtggtaataattgggttctcttttttgctctcttgtagctggtaggttgggcagagaaaagtggtggccatccaaggggcccacg

SEQ ID NO: 274673 - DNA, 120 bp, Artificial Sequence
  ENSG00000128284_42 (sequence is synthesized)
tagatatcagacatggttgagacctcgcggtaaccttgtgtagaatcatttggagttttatggattctaggtgggaagaaacaaaacaaccttgtaaatcaaatgagcatcgtttgaaag

SEQ ID NO: 274674 - DNA, 120 bp, Artificial Sequence
  ENSG00000128284_43 (sequence is synthesized)
ctataagttgtataaagctgttttaggaccaagaaagggggctaaccaggaaaaccaggaccagttgttaaatttccaccagtcaaagcctcctgaaactctgttttccattaacttgtt

SEQ ID NO: 274675 - DNA, 120 bp, Artificial Sequence
  ENSG00000128284_44 (sequence is synthesized)
ggccctgtctgtaatttttttaagttggtttgcactttacctgattggttgatgaaaacagcaatgtttatcaagtgttgcacaagctcccccttgattggctgtgagcaaattaaaagc

SEQ ID NO: 274676 - DNA, 120 bp, Artificial Sequence
  ENSG00000128284_45 (sequence is synthesized)
tcatcaatttcataagactatgcttgctaatgaagcaatttgttctgaaagggtattgacctggttagttagattaataatttgttgagtaatttttaagaagagtttctgggcagtaaa

SEQ ID NO: 274677 - DNA, 120 bp, Artificial Sequence
  ENSG00000128284_46 (sequence is synthesized)
aatggagttaaggaggtcctccagttcccgtgccaataccagccagaacgccaattatagtcagtgctgttaaaactcctctttcagttttaccagattgagcgtgtatagggaggggaa

SEQ ID NO: 274678 - DNA, 120 bp, Artificial Sequence
  ENSG00000128284_47 (sequence is synthesized)
tgctatcgataagagtgagtttggggatgatgtaaactagggccaaatccccgtttaattagcagacaagcagagatatgccttgtttctatacaaaaatgtgatttgtcatgttaagac

SEQ ID NO: 274679 - DNA, 120 bp, Artificial Sequence
  ENSG00000128284_48 (sequence is synthesized)
aaatatcaacagtgatactaaagtagggtttttccatgctgtgtaagtctgctttaataccctcagaagtggaagtcaaggctagttcatgtaatgggggaacacaggcagtacttgaca

SEQ ID NO: 274680 - DNA, 120 bp, Artificial Sequence
  ENSG00000128284_49 (sequence is synthesized)
gaatgaaagaggaatcaaaagcccaattagaggaaggagtgatgggatcccaaccaatattgtgaaattatggggagctgcagttttttgcaatgattttgcccgaagttgtgagactga

SEQ ID NO: 274681 - DNA, 120 bp, Artificial Sequence
  ENSG00000128284_50 (sequence is synthesized)
aaccagaagttgttatgtttaaaatgatattctggtgtgggtctggggaaaagggtagatccagaatagctggcttctttccacatagtggttctgttggggggcttgggaaatgaataa

SEQ ID NO: 274682 - DNA, 120 bp, Artificial Sequence
  ENSG00000128284_51 (sequence is synthesized)
gatttcagccaggctgtgccacggagggcagaggccacccaggtcagtcataggggatgcagctgggaacaccgcagggtccctgccggatgctcagagtttaacggggagacagaggcc

SEQ ID NO: 274683 - DNA, 120 bp, Artificial Sequence
  ENSG00000128285_0 (sequence is synthesized)
cagatatttgtctcaaagagtcccaggccaaacctcagggacctcagagcgtttagaaaaataacacctctgtgagcttggtccaggcagatcccatgcagagaggagtttgtccccttc

SEQ ID NO: 274684 - DNA, 120 bp, Artificial Sequence
  ENSG00000128285_1 (sequence is synthesized)
cagtccccgaggtcctggctattgccagcatggagtgacctgtgtcacctctgagtgccaggcaagggttcagcagctgacgactcagcttctgcaggatgctggcagcatagccagcga

SEQ ID NO: 274685 - DNA, 120 bp, Artificial Sequence
  ENSG00000128285_2 (sequence is synthesized)
gatagttggaagccgtcagggcacagggaaggggccgagggtgccctgagtgtgcatggggggcagccctgctgcagtccaagcctttgattcccaagctatgtgcacagtttcctctgg

SEQ ID NO: 274686 - DNA, 120 bp, Artificial Sequence
  ENSG00000128285_3 (sequence is synthesized)
actctgccatgtggcccagccacccatacctggaataggggctaagccaagctgctctctcctccaaagggaggcagcctgtgtgctttgtccgtttgcctttgcagagacctcgatctt

SEQ ID NO: 274687 - DNA, 120 bp, Artificial Sequence
  ENSG00000128285_4 (sequence is synthesized)
cacgcaaggcaagcagcagcccctgtaagcacacgagacaatcccaagtgtcagtgggaaggagatccctttcctgatggggctgcctgtgtccagtccctcccagcttccccagggccc

SEQ ID NO: 274688 - DNA, 120 bp, Artificial Sequence
  ENSG00000128285_5 (sequence is synthesized)
tggggctctgcaggcattcagaagtggaagccagccacagcctgggactgaagaggttaatgtgcatctgcctccgaatgttaatgtgtctaggtgatgtcagtgggagccatgaagaag

SEQ ID NO: 274689 - DNA, 120 bp, Artificial Sequence
  ENSG00000128285_6 (sequence is synthesized)
ggagtggggagggcagttgggcttggaggcggcagcggctgccaggctacggaggaagacccccttcccaactgcggggcttgcgctccgggacaaggtggcaggcgctggaggctgccg

SEQ ID NO: 274690 - DNA, 120 bp, Artificial Sequence
  ENSG00000128285_7 (sequence is synthesized)
cagcctgcgtgggtggaggggagctcagctcggttgtgggagcaggcgaccggcactggctggatggacctggaagcctcgctgctgcccactggtcccaacgccagcaacacctctgat

SEQ ID NO: 274691 - DNA, 120 bp, Artificial Sequence
  ENSG00000128285_8 (sequence is synthesized)
ggccccgataacctcacttcggcaggatcacctcctcgcacggggagcatctcctacatcaacatcatcatgccttcggtgttcggcaccatctgcctcctgggcatcatcgggaactcc

SEQ ID NO: 274692 - DNA, 120 bp, Artificial Sequence
  ENSG00000128285_9 (sequence is synthesized)
acggtcatcttcgcggtcgtgaagaagtccaagctgcactggtgcaacaacgtccccgacatcttcatcatcaacctctcggtagtagatctcctctttctcctgggcatgcccttcatg

SEQ ID NO: 274693 - DNA, 120 bp, Artificial Sequence
  ENSG00000128285_10 (sequence is synthesized)
atccaccagctcatgggcaatggggtgtggcactttggggagaccatgtgcaccctcatcacggccatggatgccaatagtcagttcaccagcacctacatcctgaccgccatggccatt

SEQ ID NO: 274694 - DNA, 120 bp, Artificial Sequence
  ENSG00000128285_11 (sequence is synthesized)
tctccttcatcagcatcacccctgtgtggctgtatgccagactcatccccttcccaggaggtgcagtgggctgcggcatacgcctgcccaacccagacactgacctctactggttcaccc

SEQ ID NO: 274695 - DNA, 120 bp, Artificial Sequence
  ENSG00000128285_12 (sequence is synthesized)
tgtaccagtttttcctggcctttgccctgccttttgtggtcatcacagccgcatacgtgaggatcctgcagcgcatgacgtcctcagtggcccccgcctcccagcgcagcatccggctgc

SEQ ID NO: 274696 - DNA, 120 bp, Artificial Sequence
  ENSG00000128285_13 (sequence is synthesized)
ggacaaagagggtgacccgcacagccatcgccatctgtctggtcttctttgtgtgctgggcaccctactatgtgctacagctgacccagttgtccatcagccgcccgaccctcacctttg

SEQ ID NO: 274697 - DNA, 120 bp, Artificial Sequence
  ENSG00000128285_14 (sequence is synthesized)
tctacttatacaatgcggccatcagcttgggctatgccaacagctgcctcaacccctttgtgtacatcgtgctctgtgagacgttccgcaaacgcttggtcctgtcggtgaagcctgcag

SEQ ID NO: 274698 - DNA, 120 bp, Artificial Sequence
  ENSG00000128285_15 (sequence is synthesized)
cccaggggcagcttcgcgctgtcagcaacgctcagacggctgacgaggagaggacagaaagcaaaggcacctgatacttcccctgccaccctgcacacctccaagtcagggcaccacaac

SEQ ID NO: 274699 - DNA, 120 bp, Artificial Sequence
  ENSG00000128285_16 (sequence is synthesized)
acgccaccgggagagatgctgagaaaaacccaagaccgctcgggaaatgcaggaaggccgggttgtgaggggttgttgcaatgaaataaatacattccatggggctcacacgttgctggg

SEQ ID NO: 274700 - DNA, 120 bp, Artificial Sequence
  ENSG00000128285_17 (sequence is synthesized)
gaggcctggagtcaggtttggggttttcagatatcagaaatccccttgggggagcaggatgagacctttggatagaacagaagctgagcaagagaacatgttggtttggataaccggttg

SEQ ID NO: 274701 - DNA, 120 bp, Artificial Sequence
  ENSG00000128285_18 (sequence is synthesized)
cactatatctgtgagctctcaaatgtcttcttcccaaggcaagaggtggaagggtactgactgggtttgtttaaagtcaggcagggctggagtgagcagccagggccatgttgcacaagg

SEQ ID NO: 274702 - DNA, 120 bp, Artificial Sequence
  ENSG00000128285_19 (sequence is synthesized)
cctgagagacgggaaagggcccgatcgctctttcccgcctctcactggtgcgatggaaggtggcctttctcccaagctggtggataatgaaaaataaagcatcccatctctcggcgttcc

SEQ ID NO: 274703 - DNA, 120 bp, Artificial Sequence
  ENSG00000128285_20 (sequence is synthesized)
agcatcctgtcaatttcccttttgctctagaggatgcatgtttatttgaggggatgtggcactgagcccacaggagtaaaagcccagtttgctaggaggtctgcttactgaaaacaagga

SEQ ID NO: 274704 - DNA, 120 bp, Artificial Sequence
  ENSG00000128285_21 (sequence is synthesized)
gacctggggtgggtgtggttgggggtcttaaaactaataaaagctggggtcggggggcttttgcagctctggtgacattctctccacggggcacatttgctcagtcactaatccagcttg

SEQ ID NO: 274705 - DNA, 120 bp, Artificial Sequence
  ENSG00000128285_22 (sequence is synthesized)
agtgtccgtgtgttctgcatgtgcaggggtcattctagtgcccggtgtgttggcatcatctttttgctctagcccttcctctccaaaataaaatcaaataaaggaaaatctccacccaca

SEQ ID NO: 274706 - DNA, 120 bp, Artificial Sequence
  ENSG00000128285_23 (sequence is synthesized)
agctttttactcccacttggatgatgaggtctgagacatccttactgccacctgggagaggccctgggaagggaagacttcacagagccatgaggggattaacttttctggatcacctcc

SEQ ID NO: 274707 - DNA, 120 bp, Artificial Sequence
  ENSG00000128294_0 (sequence is synthesized)
cctcccccttccccggctggggcggctggagagccgggagtcgctgggtgcgtggggctgcctcgccgcgtctcgccacgggctctgccagcagacagccttggcacacaggcacaaggg

SEQ ID NO: 274708 - DNA, 120 bp, Artificial Sequence
  ENSG00000128294_1 (sequence is synthesized)
ctggagcccagagatgagagtgcccaagggagatgtgagcctggcgggctgcccgctaacctgtcgctgaagccccagaagcgggccctcaggccaggcctaccctgcctccggcccagc

SEQ ID NO: 274709 - DNA, 120 bp, Artificial Sequence
  ENSG00000128294_2 (sequence is synthesized)
atgcgcctgtcggtgcggagggtgctgctggcagccggctgcgccctggtcctggtgctggcggttcagctgggacagcaggtgctagagtgccgggcggtgctggcgggcctgcggagc

SEQ ID NO: 274710 - DNA, 120 bp, Artificial Sequence
  ENSG00000128294_3 (sequence is synthesized)
ccccggggggccatgcggcctgagcaggaggagctggtgatggtgggcaccaaccacgtggaataccgctatggcaaggccatgccgctcatcttcgtgggtggcgtgcctcgcagtggc

SEQ ID NO: 274711 - DNA, 120 bp, Artificial Sequence
  ENSG00000128294_4 (sequence is synthesized)
accacgttgatgcgcgccatgctggacgcgcaccccgaggtgcgctgcggcgaggagacccgcatcatcccgcgcgtgctggccatgcgccaggcctggtccaagtctggccgtgagaag

SEQ ID NO: 274712 - DNA, 120 bp, Artificial Sequence
  ENSG00000128294_5 (sequence is synthesized)
ctgcggctggatgaggcgggggtgacggatgaggtgctggacgccgccatgcaggccttcatcctggaggtgattgccaagcacggagagccggcccgcgtgctctgcaacaaggaccca

SEQ ID NO: 274713 - DNA, 120 bp, Artificial Sequence
  ENSG00000128294_6 (sequence is synthesized)
tttacgctcaagtcctcggtctacctgtcgcgcctgttccccaactccaagttcctgctgatggtgcgggacggccgggcctccgtgcactccatgatcacgcgcaaagtcaccattgcg

SEQ ID NO: 274714 - DNA, 120 bp, Artificial Sequence
  ENSG00000128294_7 (sequence is synthesized)
ggctttgacctcagcagctaccgtgactgcctcaccaagtggaacaaggccatcgaggtgatgtacgcccagtgcatggaggtaggcaaggagaagtgcctgcctgtgtactacgagcag

SEQ ID NO: 274715 - DNA, 120 bp, Artificial Sequence
  ENSG00000128294_8 (sequence is synthesized)
ctggtgctgcaccccaggcgctcactcaagctcatcctcgacttcctcggcatcgcctggagcgacgctgtcctccaccatgaagacctcattggcaagcccggtggtgtctccctgtcc

SEQ ID NO: 274716 - DNA, 120 bp, Artificial Sequence
  ENSG00000128294_9 (sequence is synthesized)
aagatcgagcggtccacggaccaggtcatcaagcctgttaacctggaagcgctctccaagtggactggccacatccctggggatgtggtgcgggacatggcccagatcgcccccatgctg

SEQ ID NO: 274717 - DNA, 120 bp, Artificial Sequence
  ENSG00000128294_10 (sequence is synthesized)
gctcagctcggctatgacccttatgcaaacccccccaactatggcaaccctgaccccttcgtcatcaacaacacacagcgggtcttgaaaggggactataaaacaccagccaatctgaaa

SEQ ID NO: 274718 - DNA, 120 bp, Artificial Sequence
  ENSG00000128294_11 (sequence is synthesized)
ggatattttcaggtgaaccagaacagcacctcctcccacttaggaagctcgtgatttccagatctccgcaaatgacttcattgccaagaagagaagaaaatgcatttaagtggaaatcgg

SEQ ID NO: 274719 - DNA, 120 bp, Artificial Sequence
  ENSG00000128294_12 (sequence is synthesized)
acctctaatccaagcatattgcttgctattaatcgccaaaacaggactgctgatgaggaatgtatttgcatatgtttgcaaaagctgaatcattgaaaacgtaccttgaaactctctatc

SEQ ID NO: 274720 - DNA, 120 bp, Artificial Sequence
  ENSG00000128294_13 (sequence is synthesized)
tctggacactccagggtagagaatgaagggtatggaagtagtccggcttttgaaacttaggtattttatatttttcccctcaagaacttttttttaagagacagatttgccatcctcctt

SEQ ID NO: 274721 - DNA, 120 bp, Artificial Sequence
  ENSG00000128294_14 (sequence is synthesized)
aatttgcaggactgccttggtggctttgtttgctgggacaaggcccacaacctgtgcctctcctattgacccttactttgaattcaaagaatctatttaagagtttaatatatgaggctt

SEQ ID NO: 274722 - DNA, 120 bp, Artificial Sequence
  ENSG00000128294_15 (sequence is synthesized)
tctttgattcctcctcagttctacctagtttcacagaggaaaaaaatactctttgaataaagtgaacagaggctcatttgtttgtgccttactttactgaatgaatagggtttttttttt

SEQ ID NO: 274723 - DNA, 120 bp, Artificial Sequence
  ENSG00000128294_16 (sequence is synthesized)
ctttccatactggattttgtcaggtagatttgtgatgagcaaaaagctggagaatataggtgcatgtaaggcacagctgaattcctgtgtcagggtccccagggccacccccaggatcga

SEQ ID NO: 274724 - DNA, 120 bp, Artificial Sequence
  ENSG00000128294_17 (sequence is synthesized)
tgattggctagaagaactcagaattcagaagagctattatccttatggttatggtttattacagcaaaaggataaacattaaaatcagcaaaagaggccgggtggagtggctcacgcctg

SEQ ID NO: 274725 - DNA, 120 bp, Artificial Sequence
  ENSG00000128294_18 (sequence is synthesized)
aaaataaaatcaacaaaagaaaaaggtgcatagggcagagtccgggagagaccggcctcaagcttccagttgtcatctcctggtagagtcttacagacacacttaattttcccagcaatg

SEQ ID NO: 274726 - DNA, 120 bp, Artificial Sequence
  ENSG00000128294_19 (sequence is synthesized)
atatgtgacaacacgtactaaatattaccagccagaaagctcaccctagccttggggtctaggtttttattgcatgtcagtcacatagggcaatcacatgaccgactttagttacttaat

SEQ ID NO: 274727 - DNA, 120 bp, Artificial Sequence
  ENSG00000128294_20 (sequence is synthesized)
caccagctgctccagaggtcaaaatgatacagcatggcccaaggtccccaccataaatcacattattagcacaaactatctggcctggtatggcccaaggcctgaggtatacaaagacac

SEQ ID NO: 274728 - DNA, 120 bp, Artificial Sequence
  ENSG00000128294_21 (sequence is synthesized)
gatattccaaggacttagaggttatctcccaggagcccattaaggccagttttttctttgagatgtgctgggtttggacacttcaagcctgctgagttaacccttatagcacagtcccca

SEQ ID NO: 274729 - DNA, 120 bp, Artificial Sequence
  ENSG00000128294_22 (sequence is synthesized)
aatgctgagggaccaactgggcctacaataagtttgtatctttaagggttaaggtgttttacccatacctccttgccttatatctcatgataatatgaggcttttggaaggcagtgactt

SEQ ID NO: 274730 - DNA, 120 bp, Artificial Sequence
  ENSG00000128294_23 (sequence is synthesized)
attgtggcttggggcatgggtttttggagtcaggctgacctactggctgtatggcttgagactttgtctcttcatctgtaaaatggggaagttaaaacttcatggtgtgtatgtgtgtat

SEQ ID NO: 274731 - DNA, 84 bp, Artificial Sequence
  ENSG00000128294_24 (sequence is synthesized)
aaatggggaagttaaaacttcatggtgtgtatgtgtgtatgtgtgtgtttagacagaatctcgctctgtcactcaggctaggtc

SEQ ID NO: 274732 - DNA, 120 bp, Artificial Sequence
  ENSG00000128294_25 (sequence is synthesized)
atgtgccaccacacctggctactttttaaatttttttttttctgtagagacgaggtctttctatgctgttcaggctgaacttcatgggtttattggggatggctaatggatgacattggc

SEQ ID NO: 274733 - DNA, 120 bp, Artificial Sequence
  ENSG00000128294_26 (sequence is synthesized)
acattggcggtggtccttgataccagataagccctcagtgtgaagcagctcttatttttccttgtcttgagattgctctggaatggaaattaggcttttttgaaggtgtgaccctttttg

SEQ ID NO: 274734 - DNA, 120 bp, Artificial Sequence
  ENSG00000128294_27 (sequence is synthesized)
ttcatttcttcagcagttactttttattttttaaatgtttgacacacagtctctgataaatgatcattcaccaatcaccgattactctccttgctctgttaagtgtgacactgtcccttt

SEQ ID NO: 274735 - DNA, 120 bp, Artificial Sequence
  ENSG00000128294_28 (sequence is synthesized)
gagaatctggcgacagctatgtatcccatcaccacacaccccaaaaaaaaaatttatgtctggttccaggagttaccttttatgagaagtccatctgtgaagaccctggatgttcagaga

SEQ ID NO: 274736 - DNA, 81 bp, Artificial Sequence
  ENSG00000128294_29 (sequence is synthesized)
tatgagaagtccatctgtgaagaccctggatgttcagagaacttcctgggaaaacactgaaagaaaataaagaggccgggc

SEQ ID NO: 274737 - DNA, 73 bp, Artificial Sequence
  ENSG00000128294_30 (sequence is synthesized)
taaaacaaaataaaataaatacaatttctgtttctagcccctaagtggtagcactgggtcttgttccctgaaa

SEQ ID NO: 274738 - DNA, 120 bp, Artificial Sequence
  ENSG00000128294_31 (sequence is synthesized)
ctagcccctaagtggtagcactgggtcttgttccctgaaaaaaactaggctcagaatccactctcatttcatctcccctgatttgatctgaaaagattttgtttagagtactacatgaat

SEQ ID NO: 274739 - DNA, 120 bp, Artificial Sequence
  ENSG00000128294_32 (sequence is synthesized)
atattataaaacatgggacaatcagaattgatagtaagaaggcaagtggctctatttgtacttcctctcaatagctcctaaaggtaatgctaccattttctgtttgtacatagtcttcca

SEQ ID NO: 274740 - DNA, 120 bp, Artificial Sequence
  ENSG00000128294_33 (sequence is synthesized)
gactttaaatttttgaacatataaatattatcatcttaaagacgtatggaaaaaaccattttgaataggttattccaaaatgtaatttaacagattgctctggaggattgtttgtttgtt

SEQ ID NO: 274741 - DNA, 120 bp, Artificial Sequence
  ENSG00000128294_34 (sequence is synthesized)
gtgcagtggcacaaacacagctcactgcaacctctaactcctgcaaacacagctcactgcaacctctaactcctgcaaacacagctcactgcaacctctaactcctgcaaacacagctca

SEQ ID NO: 274742 - DNA, 120 bp, Artificial Sequence
  ENSG00000128294_35 (sequence is synthesized)
acagctcactgcaacctctaactcctgcaaacacagctcactgcaacctctaactcctgcaaacacagctcactgcaacctctaactcctgggctcaagcagtcctttcacctcagcctc

SEQ ID NO: 274743 - DNA, 120 bp, Artificial Sequence
  ENSG00000128294_36 (sequence is synthesized)
actcctgggctcaagcagtcctttcacctcagcctcctgagtagctggaccatgacacctacctaactttttattttttgtaaagaggggaatcactatgttgcccaggctggtctcaaa

SEQ ID NO: 274744 - DNA, 120 bp, Artificial Sequence
  ENSG00000128294_37 (sequence is synthesized)
agagttgggtttacaggcgtgagccaccgcacctggctcctggagcatttctgatgtgaacatgtgctgatctaacaccactccttttaccagctgcctgttctagagcaaaccatcttt

SEQ ID NO: 274745 - DNA, 120 bp, Artificial Sequence
  ENSG00000128294_38 (sequence is synthesized)
tttgagcattccactttggctaggcccttaggctgttagcagttttcatcgctactggcaaagctgcagtggacgttctcctgcacatataacctcttgatgccactgtatgagtgagtc

SEQ ID NO: 274746 - DNA, 120 bp, Artificial Sequence
  ENSG00000128294_39 (sequence is synthesized)
tctgcaaaatgagaagtagaattgctggggtgaaaggcatacatactaacttttttgattaattccacccatgtaccctgatttgggcagaattttaatctcactgtgaaatcagagctt

SEQ ID NO: 274747 - DNA, 120 bp, Artificial Sequence
  ENSG00000128294_40 (sequence is synthesized)
tgttctagagcctttcttgggggttccatggatcagtgggtcagccgtcacttgtgccctggcccatcctctgtccagcttgggcagcatgcatcattcattctgattccttaatttgcc

SEQ ID NO: 274748 - DNA, 120 bp, Artificial Sequence
  ENSG00000128294_41 (sequence is synthesized)
atatgtgaaaacatggtaatctatacattacttgggtgctattattatatataactagctttggagtcagaattagcgtctcatcctggctctaccactttccaactgtgcgactgtggc

SEQ ID NO: 274749 - DNA, 120 bp, Artificial Sequence
  ENSG00000128294_42 (sequence is synthesized)
caagtgactccccttctctgagcctcagttttcctcttctgtaaaatgggggtaaagggataagaactatagggggatctcaggggatggttaagagaaatccatgagataagcaaacac

SEQ ID NO: 274750 - DNA, 120 bp, Artificial Sequence
  ENSG00000128294_43 (sequence is synthesized)
attatctagtttagtaaagctaagcaatgaagacttaacagccccatggtgaaggcttaatacatggtagctataatgattactattaatattgtgaaataaaaggttgtgatgaaccaa

SEQ ID NO: 274751 - DNA, 120 bp, Artificial Sequence
  ENSG00000128294_44 (sequence is synthesized)
aaaggagcctcccagctaaaagccagcaggagagagaccttggccaccaagggtctgccagctcctggtggtccccactccagccacctgccagctcgagcctgaccctcgcctccaccc

SEQ ID NO: 274752 - DNA, 120 bp, Artificial Sequence
  ENSG00000128294_45 (sequence is synthesized)
aaattctactgcagtggagtccatcttcacagtcatatgagccccctgaaattgacttccatagttctttaccttcaaggtcttattgttgggctctgccagcagacagccttggcacac

SEQ ID NO: 274753 - DNA, 120 bp, Artificial Sequence
  ENSG00000128294_46 (sequence is synthesized)
ttacttctgtaacatagctactggaaaactgagaatttgaagtgtgtctcacactgcatttctattgggtggcgctgttacaaactacaggaaggagctagaattctgtggaaggtttta

SEQ ID NO: 274754 - DNA, 120 bp, Artificial Sequence
  ENSG00000128294_47 (sequence is synthesized)
ggcaggggctgacatcctctggccaaaatgacaagagggaattccagagaccagggcaagtctggccacagggagactgcatggcctaggagacctgagccacagccgccaagagaagcc

SEQ ID NO: 274755 - DNA, 120 bp, Artificial Sequence
  ENSG00000128294_48 (sequence is synthesized)
ccagagatgagagtgcccaagggagaccctgaatcgagggtacaaatgaagccccaacctcttcagcagaacttcatcagcacgtttttctgaagagagggaaattatccaatgcacaga

SEQ ID NO: 274756 - DNA, 120 bp, Artificial Sequence
  ENSG00000128294_49 (sequence is synthesized)
cttccccggctggggcggctggagagccgggagtcgctgggtgcgtggggctgcctcgccgcgtctcgccacgtgtggtttctatttgttggcgattttgctgtgtggtagagtcgtgct

SEQ ID NO: 274757 - DNA, 120 bp, Artificial Sequence
  ENSG00000128294_50 (sequence is synthesized)
cttggggatatggggcttctgcagatgtggaaactccagccacctgaggaaatgttcagtctctcaattcctggtcatctgatttgttcctgtctgatggacacagtgaactacatgatt

SEQ ID NO: 274758 - DNA, 120 bp, Artificial Sequence
  ENSG00000128294_51 (sequence is synthesized)
gcttgtatttccattttgcttgggctgcagggaagctcaaagccaactggtagcctgtctctcatactctaacatctaacagcaggccagcttgtacactaatttcatcttatttctcta

SEQ ID NO: 274759 - DNA, 120 bp, Artificial Sequence
  ENSG00000128294_52 (sequence is synthesized)
attttatttacatttttacccctatttccctggctatttgtttatctgtttgtaaggcacctcaagtctttgttgagagggggtataaataaataaactattggtccctttcttgtctta

SEQ ID NO: 274760 - DNA, 120 bp, Artificial Sequence
  ENSG00000128298_0 (sequence is synthesized)
gccactcctctgaggcaggcctccatctccaggtccctctccgaggcttcctcgctgccagctgagtcgtgggcacctgagggactacctaccactgctcccggctgtgccatcgccacc

SEQ ID NO: 274761 - DNA, 120 bp, Artificial Sequence
  ENSG00000128298_1 (sequence is synthesized)
agctcccagcctcctgctcagacccgggacagcccctccatggcccccgagatggaccagttctacaggtccaccatggccatctacaagagcatcatggagcagtttaaccccgccctg

SEQ ID NO: 274762 - DNA, 120 bp, Artificial Sequence
  ENSG00000128298_2 (sequence is synthesized)
gagaacctggtgtacctgggcaacaactacctgcgtgccttccacgctctgtccgaggcggccgaggtctacttcagtgccatccagaagattggggagcgtgccctgcagagccccacc

SEQ ID NO: 274763 - DNA, 120 bp, Artificial Sequence
  ENSG00000128298_3 (sequence is synthesized)
tcacagattctgggggagatcttggtgcagatgtctgacacccagcggcacttgaactctgacctggaggtggtggtgcagacattccatggaggcctgctgcagcacatggagaagaac

SEQ ID NO: 274764 - DNA, 120 bp, Artificial Sequence
  ENSG00000128298_4 (sequence is synthesized)
accaagctggacatgcagttcatcaaagacagccgccagcactatgagctcgagtaccgccaccgagcggccaacctggagaagtgcatgtctgagctgtggcgcatggagcgcaagaga

SEQ ID NO: 274765 - DNA, 120 bp, Artificial Sequence
  ENSG00000128298_5 (sequence is synthesized)
gacaagaacgtgcgggagatgaaggagagtgtgaaccggctgcacgcacagatgcaggccttcgtgtctgagagtcagcgggcggctgaattggaagagaagcggcgctatcgcttccta

SEQ ID NO: 274766 - DNA, 120 bp, Artificial Sequence
  ENSG00000128298_6 (sequence is synthesized)
gcagagaagcacctgctactttccaacaccttcctgcagttcttcggccgggcccgggggatgctccagaaccgcgtgctgctgtggaaggagcagtctgaggccagccgcagcccgtcg

SEQ ID NO: 274767 - DNA, 120 bp, Artificial Sequence
  ENSG00000128298_7 (sequence is synthesized)
gctggggccgccctacccctcgggccgcctgacgcccacctgcctggacatgcccccgaggcccctgggagagttcagctccccccgcagccggcacggctccggctcctacggcaccga

SEQ ID NO: 274768 - DNA, 120 bp, Artificial Sequence
  ENSG00000128298_8 (sequence is synthesized)
acagcggcagcgcccaaagctcgcgctccaactcctttggcgagcgcccgggcggcggcgggggcgccaggagagtccgcgccctggtctcccactcggagggcgccaaccacacgctgc

SEQ ID NO: 274769 - DNA, 120 bp, Artificial Sequence
  ENSG00000128298_9 (sequence is synthesized)
tgcgcttctccgctggggacgtggtggaggtgttggtgcccgaggcccagaacggctggctctacggcaagctggagggctcgtccgcgagcggttggttccccgaggcgtacgtgaagg

SEQ ID NO: 274770 - DNA, 120 bp, Artificial Sequence
  ENSG00000128298_10 (sequence is synthesized)
ctctggaggaggggcccgtgaatcccatgacccccgtgacccccatgacctccatgacctccatgtcccccatgacacccatgaaccccgggaacgagctgccttccaggtcctacccac

SEQ ID NO: 274771 - DNA, 120 bp, Artificial Sequence
  ENSG00000128298_11 (sequence is synthesized)
tccggggcagccacagcctcgatgacctcctggaccggccgggcaactccatagcaccctcggagtactgggatggccagtcccgctcccgcaccccaagccgggtgccaagccgtgccc

SEQ ID NO: 274772 - DNA, 120 bp, Artificial Sequence
  ENSG00000128298_12 (sequence is synthesized)
ccagccctgcacctccacccttgcccagcagccgccgcagcagcatgggcagcacagcagttgccactgacgtcaagaaactgatgtcctcagagcagtacccaccacaggagctcttcc

SEQ ID NO: 274773 - DNA, 120 bp, Artificial Sequence
  ENSG00000128298_13 (sequence is synthesized)
cgaggggcacaaatccttttgccactgtcaagcttcgtcccaccatcaccaatgaccgctcagcacccctcatccgctgaggcggggtccgaggtcgtaccccacagtgcacctgcccag

SEQ ID NO: 274774 - DNA, 120 bp, Artificial Sequence
  ENSG00000128298_14 (sequence is synthesized)
gggctgttcagagctggcaatggcagcgacagcagcaacagcagcagatccaagaagcgggtccctgagacggggggtggctgccctccccagaccaccccggcagcctgagcagctcca

SEQ ID NO: 274775 - DNA, 120 bp, Artificial Sequence
  ENSG00000128298_15 (sequence is synthesized)
aagcactggcttggggtccgagaccttcaaagtaaagcaggcggaatggggggacaggacaatttctccccctccaggggctccaggactctccctggggggcccacctcttgcccccta

SEQ ID NO: 274776 - DNA, 120 bp, Artificial Sequence
  ENSG00000128298_16 (sequence is synthesized)
acctctttcccccttttctgcccccgtggggaggagccccttgtacctgctccgtgcccaacacatgccctctctgtacatcttttgtaaatgatgagaaataaaggaagtggacgcaaa

SEQ ID NO: 274777 - DNA, 120 bp, Artificial Sequence
  ENSG00000128309_0 (sequence is synthesized)
gctgcaggttggtggcgggaggaggggacagctgcgggcgcggggagggggcgccgcgccgcgggggccatggcggagccaggaagccgggagtccgagacccgggtcgccaatataaat

SEQ ID NO: 274778 - DNA, 120 bp, Artificial Sequence
  ENSG00000128309_1 (sequence is synthesized)
gcttgatgagtgaatgaatgacttccgtctgggacttggttgcaaataaagccgagctgcatcttagggaggggtggagactttgcccctgtttgtgccttgaagccagcagggccttgc

SEQ ID NO: 274779 - DNA, 120 bp, Artificial Sequence
  ENSG00000128309_2 (sequence is synthesized)
cctaggatacctccacccaccctcctgcccagcaagtggaggcccgcagcccgagtgtcgccgccatggcttcgccgcagctctgccgcgcgctggtgtcggcgcaatgggtggcggagg

SEQ ID NO: 274780 - DNA, 120 bp, Artificial Sequence
  ENSG00000128309_3 (sequence is synthesized)
cgctgcgggccccgcgcgctgggcagcctctgcagctgctggacgcctcctggtacctgccgaagctggggcgcgacgcgcgacgcgagttcgaggagcgccacatcccgggcgccgctt

SEQ ID NO: 274781 - DNA, 120 bp, Artificial Sequence
  ENSG00000128309_4 (sequence is synthesized)
tcttcgacatcgaccagtgcagcgaccgcacctcgccctacgaccacatgctgcccggggccgagcatttcgcggagtacgcaggccgcctgggcgtgggcgcggccacccacgtcgtga

SEQ ID NO: 274782 - DNA, 120 bp, Artificial Sequence
  ENSG00000128309_5 (sequence is synthesized)
tctacgacgccagcgaccagggcctctactccgccccgcgcgtctggtggatgttccgcgccttcggccaccacgccgtgtcactgcttgatggcggcctccgccactggctgcgccaga

SEQ ID NO: 274783 - DNA, 120 bp, Artificial Sequence
  ENSG00000128309_6 (sequence is synthesized)
cgccttcatcaagacctacgaggacatcaaggagaacctggaatcccggcgcttccaggtggtggactcccgagccactggcaggttccgcggcaccgagcccgagccccgagacggcat

SEQ ID NO: 274784 - DNA, 120 bp, Artificial Sequence
  ENSG00000128309_7 (sequence is synthesized)
tgaacctggccacatcccaggtaccgtgaacatccccttcacagacttcctgagccaggaggggctggagaagagccctgaggagatccgccatctgttccaggagaagaaagtggacct

SEQ ID NO: 274785 - DNA, 120 bp, Artificial Sequence
  ENSG00000128309_8 (sequence is synthesized)
gtctaagccactggtggccacgtgtggctctggcgtcacagcctgccacgtggcactaggggcctacctctgcggcaagccagacgtgcccatctacgatggctcctgggtggagtggta

SEQ ID NO: 274786 - DNA, 120 bp, Artificial Sequence
  ENSG00000128309_9 (sequence is synthesized)
catgcgcgcccggcccgaggatgtcatctcagagggccgggggaagacccactgaagctgggcaggacacaggcgagctcaggtgatgccggccaccagcaatgcctggcctggtagctc

SEQ ID NO: 274787 - DNA, 120 bp, Artificial Sequence
  ENSG00000128309_10 (sequence is synthesized)
cgcttctgctttcaccaagagagtgtttcttcactcaactcaggtggcatttggggtgacatctcaaaggccaggaattccgttgacttgttggctgccagtaggggcgggaggaaaggc

SEQ ID NO: 274788 - DNA, 120 bp, Artificial Sequence
  ENSG00000128309_11 (sequence is synthesized)
ggaggcgagccctggaggagggaggccacaactccgagctgcccacctggtgctgagctggggccccgcctcctttctgttttatttttgaggaaataaaataaccaagtgctaaatctt

SEQ ID NO: 274789 - DNA, 120 bp, Artificial Sequence
  ENSG00000128309_12 (sequence is synthesized)
ctctggtatgcaggaaagatagagaggagagggagggaggtgcgaagtcactgttgctgctgctagaagggccagagagagcccaggctggacaggcaaaacctggcctcgccagactcc

SEQ ID NO: 274790 - DNA, 120 bp, Artificial Sequence
  ENSG00000128309_13 (sequence is synthesized)
tggagcctgcacagagtgtgtgtctgagaagtccggattctggtgccagactgactgcctagtgagaagcctggcaccgccgggtcaggctagtgcactttttcttgtttgttttttgtt

SEQ ID NO: 274791 - DNA, 78 bp, Artificial Sequence
  ENSG00000128309_14 (sequence is synthesized)
cgggtcaggctagtgcactttttcttgtttgttttttgtttttgagacagagttttgctcttgttccccaggctggat

SEQ ID NO: 274792 - DNA, 120 bp, Artificial Sequence
  ENSG00000128309_15 (sequence is synthesized)
ggattacaagcgtgagccaccgcaccaggccaggttagtgcacttctgtgagcctgagtgtcctccttgaaacggtgacaataatataccaggcctcttaagatcactcattcaacacat

SEQ ID NO: 274793 - DNA, 120 bp, Artificial Sequence
  ENSG00000128309_16 (sequence is synthesized)
cactcattcaacacatactggagagtctactgtgtcaggcattgttctaggatattgttaggattcagtggtacccagcaaggactcagtaaattccagctactgttcctattaggtcgc

SEQ ID NO: 274794 - DNA, 120 bp, Artificial Sequence
  ENSG00000128309_17 (sequence is synthesized)
tgggctgggcggagcgggcgtacccccacggcccggccagtggaaggcgcgggcagcagcggctccgagtggccgcggcggtgggctgtgccggagtctcctccctttggtccgctgcag

SEQ ID NO: 274795 - DNA, 120 bp, Artificial Sequence
  ENSG00000128309_18 (sequence is synthesized)
taatttatcttgctttcatttcctttccttttttctttcctttccttccctttcccttccctcctttcccccttttccctacccttgccttcttttcacagggtctggctctaccgccca

SEQ ID NO: 274796 - DNA, 120 bp, Artificial Sequence
  ENSG00000128309_19 (sequence is synthesized)
tgcagcctcaacctcctgggctcaggtgaccctccccgctcagcctgaccttgcctttaaaggccactgcatgaggtggggaaggagatttgacttccacttgcctcggtgactttgtct

SEQ ID NO: 274797 - DNA, 120 bp, Artificial Sequence
  ENSG00000128309_20 (sequence is synthesized)
tttgacttccacttgcctcggtgactttgtctgttaagcagaaccataatactggcccttcccctcctgtgctttgggcagtgactctccctagctcattgggaaccctggttgcccaaa

SEQ ID NO: 274798 - DNA, 120 bp, Artificial Sequence
  ENSG00000128309_21 (sequence is synthesized)
cagctctcaatccaacactagaggtgtggggggtcactgtggaatgttggggggcaggccccagtatgagagaaaaacccagagggatggtcctgatcagggctacccatgcccctgagg

SEQ ID NO: 274799 - DNA, 120 bp, Artificial Sequence
  ENSG00000128309_22 (sequence is synthesized)
atggtggaatgaaggcagagtcgggggctgcataaaggaaagtctcttccagggaccaaagcttggagaactgagggtggaagggggattaaacagaagtgggtagggcagagccttctg

SEQ ID NO: 274800 - DNA, 120 bp, Artificial Sequence
  ENSG00000128309_23 (sequence is synthesized)
cctgtgggctggatttcctcaggcaagaagcctgtgggtaagctctgtataatgcgaggaggagtccccacaaagcaggctggtcagtggtcacgctagtgtgagtctttcaaacatccc

SEQ ID NO: 274801 - DNA, 120 bp, Artificial Sequence
  ENSG00000128309_24 (sequence is synthesized)
gtgtaagtagatactgtcattgcacagaggaggaaatggaacctggcccaaggtctcaagaaacaacccagccgggattcagactcggcagcctgcgcacttaacagccgtgagcaacca

SEQ ID NO: 274802 - DNA, 120 bp, Artificial Sequence
  ENSG00000128309_25 (sequence is synthesized)
ggaactccccagccctttctcttgtgccttcaagagtgcaagaaactgaccactgcccctagagagctctctgaagagcattcccatggctacagattgggtttggagccgcttgggctc

SEQ ID NO: 274803 - DNA, 120 bp, Artificial Sequence
  ENSG00000128309_26 (sequence is synthesized)
accatgggccagcattgttttggatggcctgagggcaaggactgtccctgctcttcatgcatcctgaagattagctcagtacctggcacagagtcgatgttccagagaggtttggtgaat

SEQ ID NO: 274804 - DNA, 120 bp, Artificial Sequence
  ENSG00000128309_27 (sequence is synthesized)
acagaaggtccctgttgcatggaatcctgcaaagcaatgttggtgttaccggaaccataggaaacagctgatatccaaccatttttgaacctacacaggtgtcagtttcatgtggttcag

SEQ ID NO: 274805 - DNA, 120 bp, Artificial Sequence
  ENSG00000128309_28 (sequence is synthesized)
cctaatgagagcaccaccttaatcctgttgggttctccatctcagccccaggggaatgagcaacacaggggagctagctggtggtgccagactggggttcagatccctgccacatttaca

SEQ ID NO: 274806 - DNA, 120 bp, Artificial Sequence
  ENSG00000128309_29 (sequence is synthesized)
tgggctttgtgacacacgacgggtcatctaatgtctctgaactgcagcttctgcctatgtagaatgggagcagtaacacagagcataaagacatgataggggcaaggagagcaagtgtgt

SEQ ID NO: 274807 - DNA, 120 bp, Artificial Sequence
  ENSG00000128309_30 (sequence is synthesized)
aaagcactcagctccgggttttcatgcacaagtgtgctgcacacttgtgcctgacacttattcagtcgcactagctcatctatagaatgggaggtgatacacgcctagcaggcttgttgt

SEQ ID NO: 274808 - DNA, 120 bp, Artificial Sequence
  ENSG00000128309_31 (sequence is synthesized)
caaaacaaactaagctcactgcagctggatcagtgatgaatgtcactgtcgtcatcattcccactccacagcctgaggcctggccaagtgctcctgtgatgtgccacaccagtccagcag

SEQ ID NO: 274809 - DNA, 120 bp, Artificial Sequence
  ENSG00000128309_32 (sequence is synthesized)
gcaggggaaacatgctttgcttggtgggattcaaggtgtagggatggccctccctttacagtcaccaccctgggttgagagtttgttcctcctccttgctctgggctggtctctatgtga

SEQ ID NO: 274810 - DNA, 120 bp, Artificial Sequence
  ENSG00000128309_33 (sequence is synthesized)
tatctgaccaagcccggtaactgtgtctgttaggtgggatgcatgacccattccagcctctccacagactcgggagtgctgtctctatgccagggtctgagaatagataccgatacatgg

SEQ ID NO: 274811 - DNA, 120 bp, Artificial Sequence
  ENSG00000128309_34 (sequence is synthesized)
gaatcattcgtttttggggggttttttgtttgtgtttgtttctgttgttgttgttgttattgttttgagacggagttttgctcttgtttcccagctggagtacagtggcgcaatctcggc

SEQ ID NO: 274812 - DNA, 77 bp, Artificial Sequence
  ENSG00000128309_35 (sequence is synthesized)
gcgttagttgtgaaggtttattttgttgcaaatcccagtcctgcatgaaaatgggaatgttagtaacccctgcctca

SEQ ID NO: 274813 - DNA, 120 bp, Artificial Sequence
  ENSG00000128309_36 (sequence is synthesized)
gtcctgcatgaaaatgggaatgttagtaacccctgcctcaaggtggggcagtgaaaacaaaaaacaccctgggagtctgcagaggtgtgggcctttcccatcccattctttctgctacaa

SEQ ID NO: 274814 - DNA, 120 bp, Artificial Sequence
  ENSG00000128309_37 (sequence is synthesized)
tcccattctttctgctacaatcaaaatgatcgtttaaaaatggaaatctaggttgggcaaggtaactcctacctataatcctcacactttggaaggctgaggtgggaggatcccttgagc

SEQ ID NO: 274815 - DNA, 120 bp, Artificial Sequence
  ENSG00000128309_38 (sequence is synthesized)
tggacatgatggcaagccccttctcaataaaaaaaattaaaagtaacagtaaaaaagtaaacgcagaagcctgagttccccctgcagtcaggtcaaagcccccaagtcttactccaggcc

SEQ ID NO: 274816 - DNA, 120 bp, Artificial Sequence
  ENSG00000128309_39 (sequence is synthesized)
tgctaaggcgttcccatccccttcagcttcccctttgggcctctggcttctcactgtctgggctttcgtgacaatgacctttaacccctccgggcaacaggtggttccctcgcctttcag

SEQ ID NO: 274817 - DNA, 120 bp, Artificial Sequence
  ENSG00000128309_40 (sequence is synthesized)
attccctctgcctgggatgctctaggcctccatccacccagacccctttatgtgactgaatcctactcatccttcggggcattctcagagaaacttcctccacccactgagcccccagcc

SEQ ID NO: 274818 - DNA, 120 bp, Artificial Sequence
  ENSG00000128309_41 (sequence is synthesized)
agtgtggcgtgaaggtgggaagcatagacttgcctgggtttactcctccctgccctctgctagcttgcacaagctagtctttgtacttcattctcttcatctttacaaaagagaggataa

SEQ ID NO: 274819 - DNA, 120 bp, Artificial Sequence
  ENSG00000128309_42 (sequence is synthesized)
taatttctttcccagagaattttggggtggattcaaggagaaagtatagctgaccgtctccaaacagtgcctggcagaaagtaagcattcaataacatcagctattggccaggcaaggtg

SEQ ID NO: 274820 - DNA, 120 bp, Artificial Sequence
  ENSG00000128309_43 (sequence is synthesized)
gcttactcctatattcccagcactttgggaagctgaggcagaaggattacttgaggccaggaattcaagaccatcctgagccacatactgagaccccatgtctataaaaaccaaattagg

SEQ ID NO: 274821 - DNA, 69 bp, Artificial Sequence
  ENSG00000128309_44 (sequence is synthesized)
ctgcagtgagcctgtaataataatatcagctattgctgttactggcgttattttttttttacatgcccc

SEQ ID NO: 274822 - DNA, 120 bp, Artificial Sequence
  ENSG00000128309_45 (sequence is synthesized)
ctattgctgttactggcgttattttttttttacatgccccaggccacccagtagggcacttttggaacacccattatgcttgtaattattcagttgcctgtctgccctgccagattaaag

SEQ ID NO: 274823 - DNA, 120 bp, Artificial Sequence
  ENSG00000128309_46 (sequence is synthesized)
ctccttgcctgcaggtactgcacgttctagctaggcaggggtcttgtttattgctttgctgtccctagggtgcatagtcaggaaaccttggggcccagttcttaggttcaaagttcagtc

SEQ ID NO: 274824 - DNA, 120 bp, Artificial Sequence
  ENSG00000128309_47 (sequence is synthesized)
agcaatttgctagatgtgttagcctcaggtggtacttaacctcagcatcaccgtgtataaaatgggggctcctctaaacagtgctcaggttttatggttgtgagaattaaatgagatggt

SEQ ID NO: 274825 - DNA, 120 bp, Artificial Sequence
  ENSG00000128309_48 (sequence is synthesized)
ggatataaaggatttagcaccatgcttgcatgggatgctctcaatatctcgagcaccacaaatacgaggtaccattcatagcatccttctatttgtcccctcctccctgctcccctgctg

SEQ ID NO: 274826 - DNA, 80 bp, Artificial Sequence
  ENSG00000128309_49 (sequence is synthesized)
gagggggcgccgcgccgcgggggccatggcggagccaggaagccgggagtccgagacccgggcccgcagcccgagtgtcg

SEQ ID NO: 274827 - DNA, 120 bp, Artificial Sequence
  ENSG00000128310_0 (sequence is synthesized)
tcccaggtgcccgtctgatggggagatggctgatgcccagaacatttcactggacagcccagggagtgtgggggccgtggcagtgcctgtggtctttgccctaatcttcctgctgggcac

SEQ ID NO: 274828 - DNA, 120 bp, Artificial Sequence
  ENSG00000128310_1 (sequence is synthesized)
agtgggcaatgggctggtgctggcagtgctcctgcagcctggcccgagtgcctggcaggagcctggcagcaccacggacctgttcatcctcaacctggcggtggctgacctctgcttcat

SEQ ID NO: 274829 - DNA, 120 bp, Artificial Sequence
  ENSG00000128310_2 (sequence is synthesized)
cctgtgctgcgtgcccttccaggccaccatctacacgctggatgcctggctctttggggccctcgtctgcaaggccgtgcacctgctcatctacctcaccatgtacgccagcagctttac

SEQ ID NO: 274830 - DNA, 120 bp, Artificial Sequence
  ENSG00000128310_3 (sequence is synthesized)
gctggctgctgtctccgtggacaggtacctggccgtgcggcacccgctgcgctcgcgcgccctgcgcacgccgcgtaacgcccgcgccgcagtggggctggtgtggctgctggcggcgct

SEQ ID NO: 274831 - DNA, 120 bp, Artificial Sequence
  ENSG00000128310_4 (sequence is synthesized)
gcctgggaggacgcgcgccgccgcgccctggacgtggccaccttcgctgccggctacctgctgcccgtggctgtggtgagcctggcctacgggcgcacgctgcgcttcctgtgggccgcc

SEQ ID NO: 274832 - DNA, 120 bp, Artificial Sequence
  ENSG00000128310_5 (sequence is synthesized)
ggcggccgaggcgcggcggagggcgacgggccgcgcggggcgcgccatgctggcggtggccgcgctctacgcgctctgctggggtccgcaccacgcgctcatcctgtgcttctggtacgg

SEQ ID NO: 274833 - DNA, 120 bp, Artificial Sequence
  ENSG00000128310_6 (sequence is synthesized)
atcctgtgcttctggtacggccgcttcgccttcagcccggccacctacgcctgccgcctggcctcacactgcctggcctacgccaactcctgcctcaacccgctcgtctacgcgctcgcc

SEQ ID NO: 274834 - DNA, 120 bp, Artificial Sequence
  ENSG00000128310_7 (sequence is synthesized)
aactcctgcctcaacccgctcgtctacgcgctcgcctcgcgccacttccgcgcgcgcttccgccgcctgtggccgtgcggccgccgacgccgccaccgtgcccgccgcgccttgcgtcgc

SEQ ID NO: 274835 - DNA, 120 bp, Artificial Sequence
  ENSG00000128310_8 (sequence is synthesized)
ggagacgcccggcctagcgggaggctgctggctggtggcggccagggcccggagcccagggagggacccgtccacggcggagaggctgcccgaggaccggaataaaccctgccgcctgga

SEQ ID NO: 274836 - DNA, 120 bp, Artificial Sequence
  ENSG00000128311_0 (sequence is synthesized)
aacttctccagccggccggggcgagcgccagcgcggcgtccggggcgagtgacacgcagagctgaagccatggttcatcaggtgctctaccgggcgctggtctccaccaagtggctggcg

SEQ ID NO: 274837 - DNA, 120 bp, Artificial Sequence
  ENSG00000128311_1 (sequence is synthesized)
gagtccatcaggactggcaagctggggcccggcctgcgggtgctggacgcgtcctggtactcaccaggcacccgagaggcccgcaaggagtacctcgagcgccacgtacccggcgcctct

SEQ ID NO: 274838 - DNA, 120 bp, Artificial Sequence
  ENSG00000128311_2 (sequence is synthesized)
ttctttgacatagaagagtgccgggacacggcgtcgccctacgagatgatgctgcccagcgaggctggcttcgccgagtatgtgggccgcctgggcatcagcaaccacacgcacgtggtg

SEQ ID NO: 274839 - DNA, 120 bp, Artificial Sequence
  ENSG00000128311_3 (sequence is synthesized)
gtgtatgatggtgaacacctgggcagcttctatgctccccgggtctggtggatgttccgtgtgtttggccaccgcaccgtatcagtgctcaatggtggcttccggaactggctgaaggag

SEQ ID NO: 274840 - DNA, 120 bp, Artificial Sequence
  ENSG00000128311_4 (sequence is synthesized)
ttcaaagccacactggaccgctccctgctcaagacctacgagcaggtgctggagaaccttgaatctaagaggttccagctggtggattcaaggtctcaagggcggttcctgggcaccgag

SEQ ID NO: 274841 - DNA, 120 bp, Artificial Sequence
  ENSG00000128311_5 (sequence is synthesized)
ccggagccggatgcagtaggactggactcgggccatatccgtggtgccgtcaacatgcctttcatggacttcctgactgaggatggcttcgagaagggcccagaagagctccgtgctctg

SEQ ID NO: 274842 - DNA, 120 bp, Artificial Sequence
  ENSG00000128311_6 (sequence is synthesized)
ttccagaccaagaaggtggatctctcgcagcctctcattgccacgtgccgcaagggagtcaccgcctgccacgtggccttggctgcctacctctgcggcaagcctgatgtggccgtgtac

SEQ ID NO: 274843 - DNA, 120 bp, Artificial Sequence
  ENSG00000128311_7 (sequence is synthesized)
gatggctcctggtccgagtggtttcgccgggcccccccagagagccgtgtgtcccagggaaagtctgagaaggcctgagccgtgacctcttctgcttactgtaactgcggccggtttagt

SEQ ID NO: 274844 - DNA, 120 bp, Artificial Sequence
  ENSG00000128311_8 (sequence is synthesized)
gaccccatgacttacagccggttcttacctcttaggtgaaggagatgacatgtttttagaattgctgtgcaaggctcaccctctctctgtcaacactggaataaactttgccttttctga

SEQ ID NO: 274845 - DNA, 80 bp, Artificial Sequence
  ENSG00000128311_9 (sequence is synthesized)
gccgggggtttgaaccggccaacttctccagccggccggggcgagcgccagcgcggcgtccggggcgagtgagtgcgggg

SEQ ID NO: 274846 - DNA, 120 bp, Artificial Sequence
  ENSG00000128311_10 (sequence is synthesized)
cctgctgcccggggaaggatagcgttgcgagagtgggacggggtgccccgggaacccctgatccacctagggcagagggcagcgagctacgggccggactcgggcactctggaggcgggc

SEQ ID NO: 274847 - DNA, 120 bp, Artificial Sequence
  ENSG00000128311_11 (sequence is synthesized)
gagctcgggctgcctggggaggccgcaggcgatggcgtgtgcgcggctcgcggagcttcctagccgtgcgcccaccccctctgccttggaaggaaaggggattctaagcccaagatgcca

SEQ ID NO: 274848 - DNA, 120 bp, Artificial Sequence
  ENSG00000128311_12 (sequence is synthesized)
tcgccccccatcccgggcatgctttcattgctctttcctggcgggatcgagtactgtaacttctaggagccagatccccgccccaggaagcgcccctacttggagtcctcggaaactctt

SEQ ID NO: 274849 - DNA, 120 bp, Artificial Sequence
  ENSG00000128311_13 (sequence is synthesized)
gccccacccgcttctgcgctgggcccccgggccggctgggaggggcggggccggctttccagagggaatctgcaaacttatcccgctgcacgccccagcctcgctggcttgctgtaaaca

SEQ ID NO: 274850 - DNA, 120 bp, Artificial Sequence
  ENSG00000128311_14 (sequence is synthesized)
aggaacccgggggagtgcggagggagaaagagcttctcccaggcctcaccctactgcacacaccgacttccttcctcacgcctgtctctctttcctggttcccacccgtgccaggtgaca

SEQ ID NO: 274851 - DNA, 120 bp, Artificial Sequence
  ENSG00000128313_0 (sequence is synthesized)
atgccatgtggcaaacaaggaaatttgcaagttcccggttccaaggtgttacctggcttgggagaaggttgtaaagaaatgtggcttcgaaaggtaatctacggaggtgaggtctggggg

SEQ ID NO: 274852 - DNA, 120 bp, Artificial Sequence
  ENSG00000128313_1 (sequence is synthesized)
aagtccccagaacctgagttcccctcactcgtgaacctgtgccagagttggaaaattaacaatttgatgtcaactgtccacagtgatgaggctggtatgctgtcctactttctgtttgaa

SEQ ID NO: 274853 - DNA, 120 bp, Artificial Sequence
  ENSG00000128313_2 (sequence is synthesized)
gagctgatgcgatgtgacaaagattccatgccagatggaaatctgtcagaggaggaaaaattgtttctctcatattttcctttgcacaagtttgagctagaacagaacatcaaagaactt

SEQ ID NO: 274854 - DNA, 120 bp, Artificial Sequence
  ENSG00000128313_3 (sequence is synthesized)
aacacccttgcggaccaagttgacaccactcacgagttgcttaccaagaccagcctggtggccagctcttccggggctgtttctggggtcatgaacatcctgggtttggccctagcacct

SEQ ID NO: 274855 - DNA, 120 bp, Artificial Sequence
  ENSG00000128313_4 (sequence is synthesized)
gtgacagcaggaggcagtctcatgctctcagcaactgggacagggttgggggcagcagctgccatcaccaacatagtaacaaatgtcttagaaaatagaagcaattcagcagcaagagac

SEQ ID NO: 274856 - DNA, 120 bp, Artificial Sequence
  ENSG00000128313_5 (sequence is synthesized)
tcaaggatcttcatgcctaccagatggccaaatccaactctggcttcatggctatggtcaagaattttgtggccaagagacacatccctttctggacggctagaggggtgcagagagcct

SEQ ID NO: 274857 - DNA, 120 bp, Artificial Sequence
  ENSG00000128313_6 (sequence is synthesized)
ttgagggcacaactctggccatgaccaatggtgcctgggtgatgggtgctgctggggctggcttcttacttatgaaagacatgagcagcttcctgcagagctggaagcacctggaggatg

SEQ ID NO: 274858 - DNA, 120 bp, Artificial Sequence
  ENSG00000128313_7 (sequence is synthesized)
gggcaaggacggagacagcagaggaactgagagcacttgctaagaagctggagcaggagctggaccggctcacccagcaccaccggcacctgccgcagaaggcgagccagacctgttcca

SEQ ID NO: 274859 - DNA, 120 bp, Artificial Sequence
  ENSG00000128313_8 (sequence is synthesized)
gctcccggggcagggctgttcgaggatcccgtgtggttaaaccagaagggtctcgctcacctctcccctggcctgttgtggagcaccagcctaggctgggccctggcgtggcactgagga

SEQ ID NO: 274860 - DNA, 120 bp, Artificial Sequence
  ENSG00000128313_9 (sequence is synthesized)
caccaaagaggacagtctctgccccaaggatgcttggccaccagccagccccaccagcaccagcaagaaaggggagacaggccccgggaagacaccgacaatgagaagagttggtcaccc

SEQ ID NO: 274861 - DNA, 120 bp, Artificial Sequence
  ENSG00000128313_10 (sequence is synthesized)
tgtcaccactgaaccttgatttaacagaggcaaaatgcaagtcttccctgaagaatactgggggtagggaaacttctagtggcaatgataaaaccagcagcaatgataatagaaggcaaa

SEQ ID NO: 274862 - DNA, 120 bp, Artificial Sequence
  ENSG00000128322_0 (sequence is synthesized)
gcaatgggacagctgctgccagcgagagggaccagggcaccactctctagggagcccacactgcaagtcaggccacaaggacctctgaccctgagggccgatgaggccagggacaggcca

SEQ ID NO: 274863 - DNA, 120 bp, Artificial Sequence
  ENSG00000128322_1 (sequence is synthesized)
ggggggccttgaggcccctggtgagccaggccccaacctcaggcagcgctggcccctgctgctgctgggtctggccgtggtaacccatggcctgctgcgcccaacagctgcatcgcagag

SEQ ID NO: 274864 - DNA, 120 bp, Artificial Sequence
  ENSG00000128322_2 (sequence is synthesized)
cagggccctgggccctggagcccctggaggaagcagccggtccagcctgaggagccggtggggcaggttcctgctccagcgcggctcctggactggccccaggtgctggccccgggggtt

SEQ ID NO: 274865 - DNA, 120 bp, Artificial Sequence
  ENSG00000128322_3 (sequence is synthesized)
acccagctcaccgttttaagtcagcccaaggccaccccctcggtcactctgttcccgccgtcctctgaggagctccaagccaacaaggctacactggtgtgtctcatgaatgacttttat

SEQ ID NO: 274866 - DNA, 120 bp, Artificial Sequence
  ENSG00000128322_4 (sequence is synthesized)
ccgggaatcttgacggtgacctggaaggcagatggtacccccatcacccagggcgtggagatgaccacgccctccaaacagagcaacaacaagtacgcggccagcagctacctgagcctg

SEQ ID NO: 274867 - DNA, 120 bp, Artificial Sequence
  ENSG00000128322_5 (sequence is synthesized)
acgcccgagcagtggaggtcccgcagaagctacagctgccaggtcatgcacgaagggagcaccgtggagaagacggtggcccctgcagaatgttcataggttcccagccccgaccccacc

SEQ ID NO: 274868 - DNA, 120 bp, Artificial Sequence
  ENSG00000128322_6 (sequence is synthesized)
caaaggggcctggagctgcaggatcccaggggaagggtctctctctgcatcccaagccatccagcccttctccctgtacccagtaaaccctaaataaataccctctttgtcaaccagaaa

SEQ ID NO: 274869 - DNA, 120 bp, Artificial Sequence
  ENSG00000128335_0 (sequence is synthesized)
atcagacagtaaaacaggggcagagcctggaattgcactgaggcttgagtctgacttctctcccccacctgctgtgcccttaaactgcagagatcggggcgggggttggggggcaagcgg

SEQ ID NO: 274870 - DNA, 120 bp, Artificial Sequence
  ENSG00000128335_1 (sequence is synthesized)
ctcagatgggttcaaaaaactccccaggctcaactctggttctgactgcctgagacatgggcagctgacacagcagaccttgaatcctgaggatgtgaggcagggtatatctgggaggcc

SEQ ID NO: 274871 - DNA, 120 bp, Artificial Sequence
  ENSG00000128335_2 (sequence is synthesized)
ggaggacgtgtctggttattacacagatgcacagctggacgtgggatccacacagctcagaacagttggatcttgctcagtctctgtcagaggaagatcccttggacaagaggaccctgc

SEQ ID NO: 274872 - DNA, 120 bp, Artificial Sequence
  ENSG00000128335_3 (sequence is synthesized)
cttggtgtgagagtgagggaagaggaagctggaacgagggttaaggaaaaccttccagtctggacagtgactggagagctccaaggaaagcccctcggtaacccagccgctggcaccatg

SEQ ID NO: 274873 - DNA, 120 bp, Artificial Sequence
  ENSG00000128335_4 (sequence is synthesized)
aacccagagagcagtatctttattgaggattaccttaagtatttccaggaccaagtgagcagagagaatctgctacaactgctgactgatgatgaagcctggaatggattcgtggctgct

SEQ ID NO: 274874 - DNA, 120 bp, Artificial Sequence
  ENSG00000128335_5 (sequence is synthesized)
gctgaactgcccagggatgaggcagatgagctccgtaaagctctgaacaagcttgcaagtcacatggtcatgaaggacaaaaaccgccacgataaagaccagcagcacaggcagtggttt

SEQ ID NO: 274875 - DNA, 120 bp, Artificial Sequence
  ENSG00000128335_6 (sequence is synthesized)
ttgaaagagtttcctcggttgaaaagggagcttgaggatcacataaggaagctccgtgcccttgcagaggaggttgagcaggtccacagaggcaccaccattgccaatgtggtgtccaac

SEQ ID NO: 274876 - DNA, 120 bp, Artificial Sequence
  ENSG00000128335_7 (sequence is synthesized)
tctgttggcactacctctggcatcctgaccctcctcggcctgggtctggcacccttcacagaaggaatcagttttgtgctcttggacactggcatgggtctgggagcagcagctgctgtg

SEQ ID NO: 274877 - DNA, 120 bp, Artificial Sequence
  ENSG00000128335_8 (sequence is synthesized)
gctgggattacctgcagtgtggtagaactagtaaacaaattgcgggcacgagcccaagcccgcaacttggaccaaagcggcaccaatgtagcaaaggtgatgaaggagtttgtgggtggg

SEQ ID NO: 274878 - DNA, 120 bp, Artificial Sequence
  ENSG00000128335_9 (sequence is synthesized)
aacacacccaatgttcttaccttagttgacaattggtaccaagtcacacaagggattgggaggaacatccgtgccatcagacgagccagagccaaccctcagttaggagcgtatgcccca

SEQ ID NO: 274879 - DNA, 120 bp, Artificial Sequence
  ENSG00000128335_10 (sequence is synthesized)
cccccgcatgtcattgggcgaatctcagctgaaggcggtgaacaggttgagagggttgttgaaggccccgcccaggcaatgagcagaggaaccatgatcgtgggtgcagccactggaggc

SEQ ID NO: 274880 - DNA, 120 bp, Artificial Sequence
  ENSG00000128335_11 (sequence is synthesized)
cacttgcttgagggggcaaagtcagagtcagctgaggagctgaagaagcgggctcaggagctggaggggaagctcaactttctcaccaagatccatgagatgctgcagccaggccaagac

SEQ ID NO: 274881 - DNA, 120 bp, Artificial Sequence
  ENSG00000128335_12 (sequence is synthesized)
ccatgagatgctgcagccaggccaagaccaatgaccccagagcagtgcagccaccagggcagaaatgccgggcacaggccaggacaaaatgcagactttttttttttttttttttttttt

SEQ ID NO: 274882 - DNA, 120 bp, Artificial Sequence
  ENSG00000128335_13 (sequence is synthesized)
gccaccgcgcctggccaaaatgcagacattttattagggggataaggagggcaaggtaaagcttatggaactgagtgttagtgactttggcatttgtgtagctgagcacagcaagggagg

SEQ ID NO: 274883 - DNA, 120 bp, Artificial Sequence
  ENSG00000128335_14 (sequence is synthesized)
ggttaatgcagatggcaagtgcaccaaggagaaggcaggaacactggagcctgcaataagggaggagagaggactggagagtgtggggaatgggaagaagtagtttactttggactaaag

SEQ ID NO: 274884 - DNA, 120 bp, Artificial Sequence
  ENSG00000128335_15 (sequence is synthesized)
aatatattgggcgaagaatagagggggagcttgcaggaaccagcaatgagaaggccaggaaaagaaagagctgaaaatggagaaaaccagagttagaactgttggatacaggagaagaaa

SEQ ID NO: 274885 - DNA, 120 bp, Artificial Sequence
  ENSG00000128335_16 (sequence is synthesized)
cagcagctccactaccgacccccccccaggtttgatgtccttccaagaataaagtctttccctggtgatggtctctcgctctgtctttccagcatccactctcccttgtccttctggggg

SEQ ID NO: 274886 - DNA, 120 bp, Artificial Sequence
  ENSG00000128335_17 (sequence is synthesized)
tgtatcacagtcagccagtggcttcttcatgatggtggttggggtggttgtcatgtgacgggtcccctccaggttactaaagggtgcatgtcccctgcttgaaccctgagaggcaggtgg

SEQ ID NO: 274887 - DNA, 120 bp, Artificial Sequence
  ENSG00000128335_18 (sequence is synthesized)
taggccatggccacaatccccagctgaggagcaggtgtccctgagaacccaaacttcccagagagtatctgagaaccaaccaatgaaaacagtcccatcgctcttagccggtaagtaaac

SEQ ID NO: 274888 - DNA, 120 bp, Artificial Sequence
  ENSG00000128335_19 (sequence is synthesized)
agtcagaagattagcatgaaagcagtttagcattgggaggaagcacagatctctagagctgtcctgtcgctgcccaggattgacctgtgtgtaagtcccaataaactcacctactcacca

SEQ ID NO: 274889 - DNA, 120 bp, Artificial Sequence
  ENSG00000128335_20 (sequence is synthesized)
attacacagatgcacagctggacgtgggatccacacagctcagaacagttggatcttgctcagtctctgtcagaggaagatcccttgtcaagcctgaggggcagtatccagcctcaaccc

SEQ ID NO: 274890 - DNA, 120 bp, Artificial Sequence
  ENSG00000128335_21 (sequence is synthesized)
ctctgtctgccctcctgctcctcttctccctcctggtcctcctggttctcatggctcatgagatggcgttgagacagctcccctggcctagggtgtcacagagtgaacaaagcaggaaga

SEQ ID NO: 274891 - DNA, 120 bp, Artificial Sequence
  ENSG00000128335_22 (sequence is synthesized)
gtagagagaggtggggaaaacagcttagatgggttcacaaagctccccgggctcagctctggttctgacaccctcagacacggccagctgaccccagaagaaaggaggatgccccacaac

SEQ ID NO: 274892 - DNA, 120 bp, Artificial Sequence
  ENSG00000128335_23 (sequence is synthesized)
cacttggagggagatgctttgctgagagtccctgtcctctgcatctggagagcttggctcagagctgaggtgggagggagggctcctcttccaggtcgctcagttggacaccggaattga

SEQ ID NO: 274893 - DNA, 120 bp, Artificial Sequence
  ENSG00000128340_0 (sequence is synthesized)
ctcctgccccaccaccgctgctcctcagcaggcgcctcaccagcctccacaccccttgcgcccgcagaaacgcgcctggccctgagctgtcaccaccgacactctccaggctccggacac

SEQ ID NO: 274894 - DNA, 120 bp, Artificial Sequence
  ENSG00000128340_1 (sequence is synthesized)
gatgcaggccatcaagtgtgtggtggtgggagatggggccgtgggcaagacctgccttctcatcagctacaccaccaacgcctttcccggagagtacatccccaccgtgtttgacaacta

SEQ ID NO: 274895 - DNA, 120 bp, Artificial Sequence
  ENSG00000128340_2 (sequence is synthesized)
ttcagccaatgtgatggtggacagcaagccagtgaacctggggctgtgggacactgctgggcaggaggactacgaccgtctccggccgctctcctatccacagacggacgtcttcctcat

SEQ ID NO: 274896 - DNA, 120 bp, Artificial Sequence
  ENSG00000128340_3 (sequence is synthesized)
ctgcttctccctcgtcagcccagcctcttatgagaacgtccgcgccaagtggttcccagaagtgcggcaccactgccccagcacacccatcatcctggtgggcaccaagctggacctgcg

SEQ ID NO: 274897 - DNA, 120 bp, Artificial Sequence
  ENSG00000128340_4 (sequence is synthesized)
ggacgacaaggacaccatcgagaaactgaaggagaagaagctggctcccatcacctacccgcagggcctggcactggccaaggagattgactcggtgaaatacctggagtgctcagctct

SEQ ID NO: 274898 - DNA, 120 bp, Artificial Sequence
  ENSG00000128340_5 (sequence is synthesized)
cacccagagaggcctgaaaaccgtgttcgacgaggccatccgggccgtgctgtgccctcagcccacgcggcagcagaagcgcgcctgcagcctcctctaggggttgcaccccagcgctcc

SEQ ID NO: 274899 - DNA, 120 bp, Artificial Sequence
  ENSG00000128340_6 (sequence is synthesized)
acccaaagcctgatggcaccccggctggccatgctgtcccctccctgtggcgtttcttagcagatggctgcagagcttcgttgatggtcttttctgtactggaggcctcctgaggccagg

SEQ ID NO: 274900 - DNA, 120 bp, Artificial Sequence
  ENSG00000128340_7 (sequence is synthesized)
aacgtgcaaatttgcaggtgctgcatcccaagcccctcatgctcctgccttcctgagggccagaggggagccccaggacccattaagccacccccgtgttcctgccgtcagtgccaactg

SEQ ID NO: 274901 - DNA, 120 bp, Artificial Sequence
  ENSG00000128340_8 (sequence is synthesized)
ccgcatgtggaagcatctacccgttcactccagtcccaccccacgcctgactcccctctggaaactgcaggccagatggttgctgccacaacttgtgtaccttcagggatggggctctta

SEQ ID NO: 274902 - DNA, 120 bp, Artificial Sequence
  ENSG00000128340_9 (sequence is synthesized)
ctccctcctgaggccagctgctctaatatcgatggtcctgcttgccagagagttcctctacccagcaaaaatgagtgtctcagaagtgtgctcctctggcctcagttctcctcttttgga

SEQ ID NO: 274903 - DNA, 120 bp, Artificial Sequence
  ENSG00000128340_10 (sequence is synthesized)
acaacataaaacaaatttaattttctacgcctctggggatatctgctcagccaatggaaaatctgggttcaaccagcccctgccatttcttaagactttctgctgcactcacaggatcct

SEQ ID NO: 274904 - DNA, 120 bp, Artificial Sequence
  ENSG00000128340_11 (sequence is synthesized)
gagctgcacttacctgtgagagtcttcaaacttttaaaccttgccagtcaggacttttgctattgcaaatagaaaacccaactcaacctgcttaagcagaaaataaatttattgattcaa

SEQ ID NO: 274905 - DNA, 120 bp, Artificial Sequence
  ENSG00000128340_12 (sequence is synthesized)
gctgtctctgttccctctgcttgggatgcccttccagccagctcagcctgggaaaccctacctctccccttaaggcccagctcagggagtctgcctgccttgcatgtcccaggcagagaa

SEQ ID NO: 274906 - DNA, 120 bp, Artificial Sequence
  ENSG00000128340_13 (sequence is synthesized)
gggcttcctcttgcactccctcagccctgcattggttcccggtcctcaatgtgcccatcttcccaccccattgcctcctgggctctggcaccccctgtttccagtggtggggcaggtgga

SEQ ID NO: 274907 - DNA, 120 bp, Artificial Sequence
  ENSG00000128340_14 (sequence is synthesized)
ttctgcacagggccccaggaggcagcccagcatggtgagccctgggagtgctgggggaggggagaggtggaggatgcctgcaggtggctgctgggtcctcgcccttcctccagggtatgc

SEQ ID NO: 274908 - DNA, 120 bp, Artificial Sequence
  ENSG00000128340_15 (sequence is synthesized)
caggtctcctgctggagcctccacgcagggggcctgtggggatggccagggctcagcccagcacctgagcgcccctcccaccagctgctctgccagaccgcatgctccgccccctgcaaa

SEQ ID NO: 274909 - DNA, 120 bp, Artificial Sequence
  ENSG00000128340_16 (sequence is synthesized)
ggccagccctcaggggtccccatcactcctaggacatttccccgactccctagcatggcactcaaggctcctgatggccttcactcaacctcccacctggccttattacccattactttg

SEQ ID NO: 274910 - DNA, 120 bp, Artificial Sequence
  ENSG00000128340_17 (sequence is synthesized)
cttcacactctgcctcctccggaccctactgttcgccacaagctccctgcacatttctaccccagggcctttgctcaagctgttctctctccccatagtgctttttctccccacatccac

SEQ ID NO: 274911 - DNA, 120 bp, Artificial Sequence
  ENSG00000128340_18 (sequence is synthesized)
ggcaacttgctgcctctcctctccctacaccctcacactccctctgatccccgcacagcctcgcgccccctcttgacccatacaaccttgtgtccccccacccacctgcccagtggttcc

SEQ ID NO: 274912 - DNA, 120 bp, Artificial Sequence
  ENSG00000128342_0 (sequence is synthesized)
atgaacctctgaaaactgccggcatctgaggtttcctccaaggccctctgaagtgcagcccataatgaaggtcttggcggcaggagttgtgcccctgctgttggttctgcactggaaaca

SEQ ID NO: 274913 - DNA, 120 bp, Artificial Sequence
  ENSG00000128342_1 (sequence is synthesized)
tggggcggggagccccctccccatcacccctgtcaacgccacctgtgccatacgccacccatgtcacaacaacctcatgaaccagatcaggagccaactggcacagctcaatggcagtgc

SEQ ID NO: 274914 - DNA, 120 bp, Artificial Sequence
  ENSG00000128342_2 (sequence is synthesized)
caatgccctctttattctctattacacagcccagggggagccgttccccaacaacctggacaagctatgtggccccaacgtgacggacttcccgcccttccacgccaacggcacggagaa

SEQ ID NO: 274915 - DNA, 120 bp, Artificial Sequence
  ENSG00000128342_3 (sequence is synthesized)
ggccaagctggtggagctgtaccgcatagtcgtgtaccttggcacctccctgggcaacatcacccgggaccagaagatcctcaaccccagtgccctcagcctccacagcaagctcaacgc

SEQ ID NO: 274916 - DNA, 120 bp, Artificial Sequence
  ENSG00000128342_4 (sequence is synthesized)
caccgccgacatcctgcgaggcctccttagcaacgtgctgtgccgcctgtgcagcaagtaccacgtgggccatgtggacgtgacctacggccctgacacctcgggtaaggatgtcttcca

SEQ ID NO: 274917 - DNA, 120 bp, Artificial Sequence
  ENSG00000128342_5 (sequence is synthesized)
gaagaagaagctgggctgtcaactcctggggaagtataagcagatcatcgccgtgttggcccaggccttctagcaggaggtcttgaagtgtgctgtgaaccgagggatctcaggagttgg

SEQ ID NO: 274918 - DNA, 120 bp, Artificial Sequence
  ENSG00000128342_6 (sequence is synthesized)
gtccagatgtgggggcctgtccaagggtggctggggcccagggcatcgctaaacccaaatgggggctgctggcagaccccgagggtgcctggccagtccactccactctgggctgggctg

SEQ ID NO: 274919 - DNA, 120 bp, Artificial Sequence
  ENSG00000128342_7 (sequence is synthesized)
tgatgaagctgagcagagtggaaacttccatagggagggagctagaagaaggtgccccttcctctgggagattgtggactggggagcgtgggctggacttctgcctctacttgtcccttt

SEQ ID NO: 274920 - DNA, 120 bp, Artificial Sequence
  ENSG00000128342_8 (sequence is synthesized)
ggccccttgctcactttgtgcagtgaacaaactacacaagtcatctacaagagccctgaccacagggtgagacagcagggcccaggggagtggaccagcccccagcaaattatcaccatc

SEQ ID NO: 274921 - DNA, 120 bp, Artificial Sequence
  ENSG00000128342_9 (sequence is synthesized)
tgtgcctttgctgccccttaggttgggacttaggtgggccagaggggctaggatcccaaaggactccttgtcccctagaagtttgatgagtggaagatagagaggggcctctgggatgga

SEQ ID NO: 274922 - DNA, 120 bp, Artificial Sequence
  ENSG00000128342_10 (sequence is synthesized)
aggctgtcttcttttgaggatgatcagagaacttgggcataggaacaatctggcagaagtttccagaaggaggtcacttggcattcaggctcttggggaggcagagaagccaccttcagg

SEQ ID NO: 274923 - DNA, 120 bp, Artificial Sequence
  ENSG00000128342_11 (sequence is synthesized)
cctgggaaggaagacactgggaggaggagaggcctggaaagctttggtaggttcttcgttctcttccccgtgatcttccctgcagcctgggatggccagggtctgatggctggacctgca

SEQ ID NO: 274924 - DNA, 120 bp, Artificial Sequence
  ENSG00000128342_12 (sequence is synthesized)
gcaggggtttgtggaggtgggtagggcaggggcaggttgctaagtcaggtgcagaggttctgagggacccaggctcttcctctgggtaaaggtctgtaagaaggggctggggtagctcag

SEQ ID NO: 274925 - DNA, 120 bp, Artificial Sequence
  ENSG00000128342_13 (sequence is synthesized)
agtagcagctcacatctgaggccctgggaggccttgtgaggtcacacagaggtacttgagggggactggaggccgtctctggtccccagggcaagggaacagcagaacttagggtcaggg

SEQ ID NO: 274926 - DNA, 120 bp, Artificial Sequence
  ENSG00000128342_14 (sequence is synthesized)
tctcagggaaccctgagctccaagcgtgctgtgcgtctgacctggcatgatttctatttattatgatatcctatttatattaacttattggtgctttcagtggccaagttaattcccctt

SEQ ID NO: 274927 - DNA, 120 bp, Artificial Sequence
  ENSG00000128342_15 (sequence is synthesized)
tccctggtccctactcaacaaaatatgatgatggctcccgacacaagcgccagggccagggcttagcagggcctggtctggaagtcgacaatgttacaagtggaataagccttacgggtg

SEQ ID NO: 274928 - DNA, 120 bp, Artificial Sequence
  ENSG00000128342_16 (sequence is synthesized)
ggggaggcctgagtgggagtggggggccttgctccacccccccccatcccctactgtgacttgctttagggtgtcagggtccaggctgcaggggctgggccaatttgtggagaggccggg

SEQ ID NO: 274929 - DNA, 120 bp, Artificial Sequence
  ENSG00000128342_17 (sequence is synthesized)
tgcctttctgtcttgattccagggggctggttcacactgttcttgggcgccccagcattgtgttgtgaggcgcactgttcctggcagatattgtgccccctggagcagtgggcaagacag

SEQ ID NO: 274930 - DNA, 120 bp, Artificial Sequence
  ENSG00000128342_18 (sequence is synthesized)
tccttgtggcccaccctgtccttgtttctgtgtccccatgctgcctctgaaatagcgccctggaacaaccctgcccctgcacccagcatgctccgacacagcagggaagctcctcctgtg

SEQ ID NO: 274931 - DNA, 120 bp, Artificial Sequence
  ENSG00000128342_19 (sequence is synthesized)
gcccggacacccatagacggtgcggggggcctggctgggccagaccccaggaaggtggggtagactggggggatcagctgcccattgctcccaagaggaggagagggaggctgcagatgc

SEQ ID NO: 274932 - DNA, 120 bp, Artificial Sequence
  ENSG00000128342_20 (sequence is synthesized)
ctgggactcagaccaggaagctgtgggccctcctgctccacccccatcccactcccacccatgtctgggctcccaggcagggaacccgatctcttcctttgtgctggggccaggcgagtg

SEQ ID NO: 274933 - DNA, 120 bp, Artificial Sequence
  ENSG00000128342_21 (sequence is synthesized)
gagaaacgccctccagtctgagagcaggggagggaaggaggcagcagagttggggcagctgctcagagcagtgttctggcttcttctcaaaccctgagcgggctgccggcctccaagttc

SEQ ID NO: 274934 - DNA, 120 bp, Artificial Sequence
  ENSG00000128342_22 (sequence is synthesized)
ctccgacaagatgatggtactaattatggtacttttcactcactttgcacctttccctgtcgctctctaagcactttacctggatggcgcgtgggcagtgtgcaggcaggtcctgaggcc

SEQ ID NO: 274935 - DNA, 120 bp, Artificial Sequence
  ENSG00000128342_23 (sequence is synthesized)
tggggttggggtggagggtgcggcccggagttgtccatctgtccatcccaacagcaagacgaggatgtggctgttgagatgtgggccacactcacccttgtccaggatgcagggactgcc

SEQ ID NO: 274936 - DNA, 120 bp, Artificial Sequence
  ENSG00000128342_24 (sequence is synthesized)
ttctccttcctgcttcatccggcttagcttggggctggctgcattcccccaggatgggcttcgagaaagacaaacttgtctggaaaccagagttgctgattccacccggggggcccggct

SEQ ID NO: 274937 - DNA, 120 bp, Artificial Sequence
  ENSG00000128342_25 (sequence is synthesized)
gactcgcccatcacctcatctccctgtggacttgggagctctgtgccaggcccaccttgcggccctggctctgagtcgctctcccacccagcctggacttggccccatgggacccatcct

SEQ ID NO: 274938 - DNA, 120 bp, Artificial Sequence
  ENSG00000128342_26 (sequence is synthesized)
cagtgctccctccagatcccgtccggcagcttggcgtccaccctgcacagcatcactgaatcacagagcctttgcgtgaaacagctctgccaggccgggagctgggtttctcttcccttt

SEQ ID NO: 274939 - DNA, 120 bp, Artificial Sequence
  ENSG00000128342_27 (sequence is synthesized)
ttatctgctggtgtggaccacacctgggcctggccggaggaagagagagtttaccaagagagatgtctccgggcccttatttattatttaaacatttttttaaaaagcactgctagttta

SEQ ID NO: 274940 - DNA, 120 bp, Artificial Sequence
  ENSG00000128342_28 (sequence is synthesized)
cttgtctctcctccccatcgtccccatcgtcctccttgtccctgacttggggcacttccaccctgacccagccagtccagctctgccttgccggctctccagagtagacatagtgtgtgg

SEQ ID NO: 274941 - DNA, 120 bp, Artificial Sequence
  ENSG00000128342_29 (sequence is synthesized)
ggttggagctctggcacccggggaggtagcatttccctgcagatggtacagatgttcctgccttagagtcatctctagttccccacctcaatcccggcatccagccttcagtcccgccca

SEQ ID NO: 274942 - DNA, 120 bp, Artificial Sequence
  ENSG00000128342_30 (sequence is synthesized)
cgtgctagctccgtgggcccaccgtgcggccttagaggtttccctccttcctttccactgaaaagcacatggccttgggtgacaaattcctctttgatgaatgtaccctgtggggatgtt

SEQ ID NO: 274943 - DNA, 120 bp, Artificial Sequence
  ENSG00000128342_31 (sequence is synthesized)
accctgtggggatgtttcatactgacagattatttttatttattcaatgtcatatttaaaatatttattttttataccaaatgaatacttttttttttaagaaaaaaaagagaaatgaat

SEQ ID NO: 274944 - DNA, 120 bp, Artificial Sequence
  ENSG00000128346_0 (sequence is synthesized)
agcgagaggcgctagctgccagctccagcagcccagatcgcgcagtatttctgcgtggcaccggtgcggatgcggctgtaaagcagtggtcaccgcctccgggagcccacttctatgtgg

SEQ ID NO: 274945 - DNA, 120 bp, Artificial Sequence
  ENSG00000128346_1 (sequence is synthesized)
agaggggagcacccagagagggtcttagggtgaaatttcaattttggcatatcactcagtgggtactgttgtgaccatggctgtgttaacactccctcccgaggagacttccctgccaca

SEQ ID NO: 274946 - DNA, 120 bp, Artificial Sequence
  ENSG00000128346_2 (sequence is synthesized)
ggcgctggagtcctcccatggcttcacagaagcagatggaggtagtgaccaaaggaactgggttccggcgccgccccaagaccatcacttacaccccggggacctgcgagctgctcagag

SEQ ID NO: 274947 - DNA, 120 bp, Artificial Sequence
  ENSG00000128346_3 (sequence is synthesized)
tgatgatgaaggaatccaaactgacgaacatccagcagcgccacatcatggacatcatgaaaagaggagatgctttgcccctacagtgcagcccaacatccagccagagagtcttacctt

SEQ ID NO: 274948 - DNA, 120 bp, Artificial Sequence
  ENSG00000128346_4 (sequence is synthesized)
ccaagcaaatagcctcgcccatctacctgcctcccatcctcgcagcccgtccccacctccggcctgccaacatgtgtcaagccaatggggcctacagccgggagcagttcaagcctcaag

SEQ ID NO: 274949 - DNA, 120 bp, Artificial Sequence
  ENSG00000128346_5 (sequence is synthesized)
ccaccagggatttggagaaggagaaacaaagactccaaaatatctttgccacagggaaggacatggaggaacggaaaagaaaggcccctcctgcacgacagaaggctccagcccctgagc

SEQ ID NO: 274950 - DNA, 120 bp, Artificial Sequence
  ENSG00000128346_6 (sequence is synthesized)
tagaccgatttgaagagctggtgaaggaaatccaggagaggaaagaattcctggctgacatggaggccctgggacagggcaaacagtaccgaggaatcatccttgctgaaatctcccaga

SEQ ID NO: 274951 - DNA, 120 bp, Artificial Sequence
  ENSG00000128346_7 (sequence is synthesized)
aactccgggaaatggaagacattgaccacagaaggagtgaggaacttaggaagggtcttgccaccacttaatctgtctccagagacgggcagggtagcccaagctcgaccactggagtcc

SEQ ID NO: 274952 - DNA, 120 bp, Artificial Sequence
  ENSG00000128346_8 (sequence is synthesized)
actcctctgccaggcagggccatcctcaggccagcccatcctaccagccttctgccacgtcaggtggtggcatagcactgccctgcagtaccccaaggcatactcagcagcctagcccct

SEQ ID NO: 274953 - DNA, 120 bp, Artificial Sequence
  ENSG00000128346_9 (sequence is synthesized)
gccccggaatgcagatggagcctctgagactcacagccccgtccgcagagaagcaaagcccgagcatccctactaggacatgtgtctaaaggtatccactgggcctgcttcccaccactt

SEQ ID NO: 274954 - DNA, 120 bp, Artificial Sequence
  ENSG00000128346_10 (sequence is synthesized)
ctgacctgtggcctgttcatttagttttctgaattcaggaatgaatatgattcctttcttcctgttttaggatttacttatttgatttcttaccgccttaggcaagtattcaaccacaat

SEQ ID NO: 274955 - DNA, 120 bp, Artificial Sequence
  ENSG00000128346_11 (sequence is synthesized)
gattaactggccaataaaacatatttaacgtgggtcattacaagcaccattttgttttcagagggataagcttatttgttcaaggcattagactttgtcaagcccagatggtttctagct

SEQ ID NO: 274956 - DNA, 120 bp, Artificial Sequence
  ENSG00000128346_12 (sequence is synthesized)
acctgtttgcatatttcaagtggcaacgggaaccaacctcttgggcaccccatggctggctgctgtggcgggtgctgaattccactctgttaatgatctcaataaacctctgcaacggtt

SEQ ID NO: 274957 - DNA, 120 bp, Artificial Sequence
  ENSG00000128346_13 (sequence is synthesized)
cccatggccacagaaagaaacatgaaaaggtgggagcgacctagagccctggcctgggagttccaatccctgcatgtgccgcgtgacctttcttgggcaaaacccaccagctccgtgctt

SEQ ID NO: 274958 - DNA, 120 bp, Artificial Sequence
  ENSG00000128346_14 (sequence is synthesized)
gtgcatctgcgaggccctgctgggaaggagtcacctgacaccttgtcctgtacacagcacatctgtccccctcccctctggctcctgacacccacgatccctgccttctccggtattctg

SEQ ID NO: 274959 - DNA, 120 bp, Artificial Sequence
  ENSG00000128346_15 (sequence is synthesized)
tcatttgcttgtcccactaaatcaccaaaatattttggaaatatcaaccttgtctcgggcacctggagggagtcccataatcccatcaggtcacatgacccaagtttcggtttgcagaat

SEQ ID NO: 274960 - DNA, 120 bp, Artificial Sequence
  ENSG00000128346_16 (sequence is synthesized)
gaggtttgggcactgtcgcaatattaactggcggcatcattctctggctcgatccccgcttccagacttctgggggtgttgggcgtcggggaacagagattagggacaggagacaggggg

SEQ ID NO: 274961 - DNA, 120 bp, Artificial Sequence
  ENSG00000128383_0 (sequence is synthesized)
gttggtgaagatcttaacaccacgccttgagcaagtcgcaagagcgggaggacacagaccaggaaccgagaagggacaagcacatggaagccagcccagcatccgggcccagacacttga

SEQ ID NO: 274962 - DNA, 120 bp, Artificial Sequence
  ENSG00000128383_1 (sequence is synthesized)
tggatccacacatattcacttccaactttaacaatggcattggaaggcataagacctacctgtgctacgaagtggagcgcctggacaatggcacctcggtcaagatggaccagcacaggg

SEQ ID NO: 274963 - DNA, 120 bp, Artificial Sequence
  ENSG00000128383_2 (sequence is synthesized)
gctttctacacaaccaggctaagaatcttctctgtggcttttacggccgccatgcggagctgcgcttcttggacctggttccttctttgcagttggacccggcccagatctacagggtca

SEQ ID NO: 274964 - DNA, 120 bp, Artificial Sequence
  ENSG00000128383_3 (sequence is synthesized)
cttggttcatctcctggagcccctgcttctcctggggctgtgccggggaagtgcgtgcgttccttcaggagaacacacacgtgagactgcgtatcttcgctgcccgcatctatgattacg

SEQ ID NO: 274965 - DNA, 120 bp, Artificial Sequence
  ENSG00000128383_4 (sequence is synthesized)
accccctatataaggaggcactgcaaatgctgcgggatgctggggcccaagtctccatcatgacctacgatgaatttaagcactgctgggacacctttgtggaccaccagggatgtccct

SEQ ID NO: 274966 - DNA, 120 bp, Artificial Sequence
  ENSG00000128383_5 (sequence is synthesized)
ctgagtgggaggctgcgggccattctccagaatcagggaaactgaaggatgggcctcagtctctaaggaaggcagagacctgggttgagcagcagaataaaagatcttcttccaagaaat

SEQ ID NO: 274967 - DNA, 120 bp, Artificial Sequence
  ENSG00000128383_6 (sequence is synthesized)
aaatgcaaacagaccgttcaccaccatctccagctgctcacagacgccagcaaagcagtatgctcccgatcaagtagatttttaaaaaatcagagtgggccgggcgcggtggctcacgcc

SEQ ID NO: 274968 - DNA, 120 bp, Artificial Sequence
  ENSG00000128383_7 (sequence is synthesized)
cagactccatctcaaaaaaaaaaaaaccagactgaattaattttaactgaaaatttctcttatgttccaagtacacaatagtaagattatgctcaatattctcagaataattttcaatgt

SEQ ID NO: 274969 - DNA, 120 bp, Artificial Sequence
  ENSG00000128383_8 (sequence is synthesized)
attaatgaaatgaaatgataatttggcttcatatctagactaacacaaaattaagaatcttccataattgcttttgctcagtaactgtgtcatgaattgcaagagtttccacaaacacta

SEQ ID NO: 274970 - DNA, 120 bp, Artificial Sequence
  ENSG00000128383_9 (sequence is synthesized)
ggcctccctgccacggggatgctgccttttctgctccgggtgtttccacgaggcaggcatggaatcttccctggacaagcgacataccgtggagagacaggctcctgaatcctaagagaa

SEQ ID NO: 274971 - DNA, 120 bp, Artificial Sequence
  ENSG00000128383_10 (sequence is synthesized)
accatctccagctgctcacagacaccagcaaagcaatgtgctcctgatcaagtagattttttaaaaatcagagtcaattaattttaattgaaaatttctcttatgttccaagtgtacaag

SEQ ID NO: 274972 - DNA, 120 bp, Artificial Sequence
  ENSG00000128383_11 (sequence is synthesized)
agtaagattatgctcaatattcccagaatagttttcaatgtattaatgaagtgattaattggctccatatttagactaataaaacattaagaatcttccataattgtttccacaaacact

SEQ ID NO: 274973 - DNA, 120 bp, Artificial Sequence
  ENSG00000128383_12 (sequence is synthesized)
atggccttcaggcctccctgccacggggatgctgccttttctgctccgggtgtttccacgaggcaggcatggaatcttccctggacaagcgacataccgtggagagacagcggaagacac

SEQ ID NO: 274974 - DNA, 120 bp, Artificial Sequence
  ENSG00000128383_13 (sequence is synthesized)
catacagtaaacacaggagcctgcgagagaacctctgccgagcaccagtgaacggccaagtgacacgagtgacaccatgagcttggtgccctctccatcccaagccagaggcggaagcca

SEQ ID NO: 274975 - DNA, 120 bp, Artificial Sequence
  ENSG00000128383_14 (sequence is synthesized)
agctgagctgcatccagaaacagacctaggagctcacagacccaaggcctgggtctccacccctggaagagggtggtgccgagagcagggcccccggctgtcactggcccggagctcacc

SEQ ID NO: 274976 - DNA, 120 bp, Artificial Sequence
  ENSG00000128383_15 (sequence is synthesized)
gtgcaggggcagcccaggccctccggggatggcactggggtgtcggaggccaaggagcagaaacagctgtggatgcttccctcggaggactgggtggggccgggaccaccaggacctgcc

SEQ ID NO: 274977 - DNA, 120 bp, Artificial Sequence
  ENSG00000128394_0 (sequence is synthesized)
actttagggagggctgtcctgaaacctggagcctggagcagaaagtgaaaccctggtgctccagacaaagatcttagtcgggactagccggccaaggatgaagcctcacttcagaaacac

SEQ ID NO: 274978 - DNA, 120 bp, Artificial Sequence
  ENSG00000128394_1 (sequence is synthesized)
agtggagcgaatgtatcgagacacattctcctacaacttttataatagacccatcctttctcgtcggaataccgtctggctgtgctacgaagtgaaaacaaagggtccctcaaggccccg

SEQ ID NO: 274979 - DNA, 120 bp, Artificial Sequence
  ENSG00000128394_2 (sequence is synthesized)
tttggacgcaaagatctttcgaggccaggtgtattcccagcctgagcaccacgcagaaatgtgcttcctctcttggttctgtggcaaccagctgcctgcttacaagtgtttccagatcac

SEQ ID NO: 274980 - DNA, 120 bp, Artificial Sequence
  ENSG00000128394_3 (sequence is synthesized)
ctggtttgtatcctggaccccctgcccggactgtgtggcgaagctggccgaattcctggctgagcaccccaatgtcaccctgaccatctccgccgcccgcctctactactactgggaaag

SEQ ID NO: 274981 - DNA, 120 bp, Artificial Sequence
  ENSG00000128394_4 (sequence is synthesized)
agattaccgaagggcgctctgcaggctgagtcaggcaggggcccgcgtgaagattatggacgatgaagaatttgcatactgctgggaaaactttgtgtacagtgaaggtcagccattcat

SEQ ID NO: 274982 - DNA, 120 bp, Artificial Sequence
  ENSG00000128394_5 (sequence is synthesized)
gccttggtacaaattcgatgacaattatgcattcctgcaccgcacgctaaaggagattctcagaaacccgatggaggcaatgtatccacacatattctacttccactttaaaaacctacg

SEQ ID NO: 274983 - DNA, 120 bp, Artificial Sequence
  ENSG00000128394_6 (sequence is synthesized)
caaagcctatggtcggaacgaaagctggctgtgcttcaccatggaagttgtaaagcaccactcacctgtctcctggaagaggggcgtcttccgaaaccaggtggatcctgagacccattg

SEQ ID NO: 274984 - DNA, 120 bp, Artificial Sequence
  ENSG00000128394_7 (sequence is synthesized)
tcatgcagaaaggtgcttcctctcttggttctgtgacgacatactgtctcctaacacaaactacgaggtcacctggtacacatcttggagcccttgcccagagtgtgcaggggaggtggc

SEQ ID NO: 274985 - DNA, 120 bp, Artificial Sequence
  ENSG00000128394_8 (sequence is synthesized)
cgagttcctggccaggcacagcaacgtgaatctcaccatcttcaccgcccgcctctactacttctgggatacagattaccaggaggggctccgcagcctgagtcaggaaggggcctccgt

SEQ ID NO: 274986 - DNA, 120 bp, Artificial Sequence
  ENSG00000128394_9 (sequence is synthesized)
ggagatcatgggctacaaagattttaaatattgttgggaaaactttgtgtacaatgatgatgagccattcaagccttggaaaggactaaaatacaactttctattcctggacagcaagct

SEQ ID NO: 274987 - DNA, 120 bp, Artificial Sequence
  ENSG00000128394_10 (sequence is synthesized)
gcaggagattctcgagtgaggggtctccccgggcctcatggtctgtctcctctagcctcctgctcatgttgtgcaggcctcccctccatcctggaccagctgtgcttttgcctggtcatc

SEQ ID NO: 274988 - DNA, 120 bp, Artificial Sequence
  ENSG00000128394_11 (sequence is synthesized)
ctgagcccctcctggcctcagggccattccatagtgctcccctgcctcaccacctcctctccgctctcccaggctcttcctgcagaggcctctttctgcctccatggctatccatccacc

SEQ ID NO: 274989 - DNA, 120 bp, Artificial Sequence
  ENSG00000128394_12 (sequence is synthesized)
tccatggctatccatccacccaccaagaccctgttccctgagcctgcatgcccctaacctgccttttcccatctccccagcataacctaatattttttttttttttttgagacggaattt

SEQ ID NO: 274990 - DNA, 76 bp, Artificial Sequence
  ENSG00000128394_13 (sequence is synthesized)
aaattacagacgcctgccaccacgcacagctaactttttttttttttgtatttttagtagtgactgggtttcacca

SEQ ID NO: 274991 - DNA, 65 bp, Artificial Sequence
  ENSG00000128394_14 (sequence is synthesized)
gctggaattacagacgcctgccaccacgcacagctaactttttttttttttgtatttttagtagt

SEQ ID NO: 274992 - DNA, 120 bp, Artificial Sequence
  ENSG00000128394_15 (sequence is synthesized)
tgagccactggcccggcggcacaaccaaatcttattaaactcaccctaggctggccgcggtgactcatgcctataatcccccagcaatttgggaggcagaggtgagagaatcgcttgagc

SEQ ID NO: 274993 - DNA, 120 bp, Artificial Sequence
  ENSG00000128394_16 (sequence is synthesized)
ccaggaattcgagaccagcctgggccacatgacaaagccccatctctacaaaaaaattacaaaaaaaaaaaaaacaggtgtggtggcatgcacctgtagttgaagctacttggaaggatg

SEQ ID NO: 274994 - DNA, 120 bp, Artificial Sequence
  ENSG00000128394_17 (sequence is synthesized)
aagtgggaggattgcttgagccggggaggtggaggctgcagtgaactgagatcacgtcactgaactccagtctgagcaacagatcgagaccctgcctgaaaataaatcaataaataaact

SEQ ID NO: 274995 - DNA, 120 bp, Artificial Sequence
  ENSG00000128394_18 (sequence is synthesized)
tgagaaacatcctttgttaactttcatcctacaaattgggtcattcatgtcctacgcagctaaaacagagcccaggagccagggaggaaaagcagtcaggccacacaccattgctcccaa

SEQ ID NO: 274996 - DNA, 120 bp, Artificial Sequence
  ENSG00000128394_19 (sequence is synthesized)
aatggacttctctgcaagcctgactcctgaaactgtgcattgtaccctgaaaccagctttatccatagcttctgcaataaatggctgtaagtcttggactccttgctataatcgcagcta

SEQ ID NO: 274997 - DNA, 120 bp, Artificial Sequence
  ENSG00000128394_20 (sequence is synthesized)
ttcagcaatggaacctcccagttcccaacccttcctagtgcccatgggctttcccataggacaagagaacatttctccttttctttttttttttctttgaaatggagtctcgccctgtca

SEQ ID NO: 274998 - DNA, 120 bp, Artificial Sequence
  ENSG00000128394_21 (sequence is synthesized)
tgggattacaggcgtccaccaccaaaccaggctaatttttgtatttttcataaaaacgggtttcatcatgtttcccaggctggtcttatttttattttattttttgagatggagtcttgc

SEQ ID NO: 274999 - DNA, 120 bp, Artificial Sequence
  ENSG00000128394_22 (sequence is synthesized)
gcaatctgggttcactgcagcctctgccgcctgagttcaagctattttcctacctaagcctcccaagtagctgggattacatgcgcgtgccaccacgcctagctaatttttgtgttttta

SEQ ID NO: 275000 - DNA, 120 bp, Artificial Sequence
  ENSG00000128394_23 (sequence is synthesized)
gtcttaaactcctgacctcaagtgatccaacctccttggcctcccaaattgctgggattgctggtgtgagccacagcgcctagcccatttctccttttaataggacctgttgctgtctct

SEQ ID NO: 275001 - DNA, 120 bp, Artificial Sequence
  ENSG00000128394_24 (sequence is synthesized)
ctctgttctcccaacatggtgaacaccacccggactgcgtgtatgtcccaaattacaattctttctttgcaaatgaaatgtgaaatttagaggcccttctccacactttaaatttgactt

SEQ ID NO: 275002 - DNA, 120 bp, Artificial Sequence
  ENSG00000128394_25 (sequence is synthesized)
gacattttctaggcagatataagttattagagaatgagattctctataaaaatgatcccttcatgctgtggcctccacagaagatgccctgggccaggtgcccacatgaataatgcgggc

SEQ ID NO: 275003 - DNA, 120 bp, Artificial Sequence
  ENSG00000128394_26 (sequence is synthesized)
cacaggcaggcatttattttctcacagatatggaggctacaagtccaaggtggaggggtcggcggggttgtttgctctgaggccgctcctcctggatggcagggatcccttctggctgtg

SEQ ID NO: 275004 - DNA, 120 bp, Artificial Sequence
  ENSG00000128394_27 (sequence is synthesized)
tcctctgtggcctttcctctatgaacctgtactgtacctctggggtctctctgcttccaaatatcttttttttttttttcagacagttttgctcttgttttctaggctggagtgcaatgg

SEQ ID NO: 275005 - DNA, 76 bp, Artificial Sequence
  ENSG00000128394_28 (sequence is synthesized)
gctcaggctggtcttgaactcatgagctcaggcaagccaccatacacaacttttttttttttttgagatggagttt

SEQ ID NO: 275006 - DNA, 68 bp, Artificial Sequence
  ENSG00000128394_29 (sequence is synthesized)
tacagatataagccaccatacacaataaatagcagaatcactgctcactgcaacctctgcctgctggg

SEQ ID NO: 275007 - DNA, 87 bp, Artificial Sequence
  ENSG00000128394_30 (sequence is synthesized)
taatgaggaaggagaccacctctctcattgtctcctatttcagaaggaagcaaaaagttagaaagatgcagaagtaagatcaatggc

SEQ ID NO: 275008 - DNA, 120 bp, Artificial Sequence
  ENSG00000128394_31 (sequence is synthesized)
aagcaaaaagttagaaagatgcagaagtaagatcaatggccagactgtttggcgctgctacctgggcctggtagttaaagatcaactcctgacctgaccgcttgttttatctaaagattc

SEQ ID NO: 275009 - DNA, 120 bp, Artificial Sequence
  ENSG00000128394_32 (sequence is synthesized)
cagacattgtatgaggaagcattgtgaaactttctggtctgttctgctagcccccaccactgatgcatgtagccccccagtcacgtagcccacgcttgcacaatctatcacgaccctttc

SEQ ID NO: 275010 - DNA, 120 bp, Artificial Sequence
  ENSG00000128394_33 (sequence is synthesized)
acgtggaccccttagaattgtaagcccttaaaagggccagggacttcttcagggagctccaatcttcagatgcaagtctgtcaacgctcccagctgattaaagcctcttccttcctaaaa

SEQ ID NO: 275011 - DNA, 120 bp, Artificial Sequence
  ENSG00000128394_34 (sequence is synthesized)
caggcaggggcccgcgtgaagattatggacgatgaaggtgagaggtggaggggtcaggggagcgtgagcgggaggaacagcatgaaagatggatggatctgcaatgccatggctgggggt

SEQ ID NO: 275012 - DNA, 120 bp, Artificial Sequence
  ENSG00000128394_35 (sequence is synthesized)
gtcccagggcagcctgcaggggcggggccagcactgacagcaactgacagccaggagaccaggcctgggagcgcgggcccagggtcagggcagagcctgactgcttcctgcctcttcgtc

SEQ ID NO: 275013 - DNA, 120 bp, Artificial Sequence
  ENSG00000128394_36 (sequence is synthesized)
aaagatctttcgaggccaggtgcccaggtctttcatcagagccccatttcaagtgctcagtagcccctttggccagtgcgccccaccacatgggacagcgcaggtccagtggcctcccca

SEQ ID NO: 275014 - DNA, 120 bp, Artificial Sequence
  ENSG00000128394_37 (sequence is synthesized)
gctgaccgcaggcagggaacaaggcagaccctagagggccaggccacagcaggggctgaggatgcctggtgaatggatgcctgggagaatggatgccagaattcacgcatgaggctctga

SEQ ID NO: 275015 - DNA, 120 bp, Artificial Sequence
  ENSG00000128394_38 (sequence is synthesized)
acagggctgggaaaacttccaaacgaagggaagctcatgtcttggtgcactttgtgatgatgcttcaacagcaggactgagatggggacatttacaataaacagaaatgtatgggctcga

SEQ ID NO: 275016 - DNA, 120 bp, Artificial Sequence
  ENSG00000128394_39 (sequence is synthesized)
gtgctctgctggctcagcctggtgtggacccacctcgcgggcgctggctgcaatgactttctctttccctttgcaattgccttgggtcctgccgcacagagcggcctgtctttatcagag

SEQ ID NO: 275017 - DNA, 120 bp, Artificial Sequence
  ENSG00000128408_0 (sequence is synthesized)
gttgttgacatttccgagagagcgggagcgtctgtacctctgcggcgtcactgggagcccgacggaaaactgcgctaaaggcttgtctttcccctgcccgaccgaaggagccgaccttgc

SEQ ID NO: 275018 - DNA, 120 bp, Artificial Sequence
  ENSG00000128408_1 (sequence is synthesized)
ctgcgctacagcttccttattttcgtcgcctgttctcctgatcctgcgtgttctaaaaaccccttaggctttccatgggttcccagaccatggcggtggcgctgcccagggacttgcggc

SEQ ID NO: 275019 - DNA, 120 bp, Artificial Sequence
  ENSG00000128408_2 (sequence is synthesized)
aggacgccaacctggcaaagaggaggcacgcggagctgtgcaggcagaagcgggtcttcaacgccagaaacaggataattgggggagacactgaagcctgggatgttcaagttcatgacc

SEQ ID NO: 275020 - DNA, 120 bp, Artificial Sequence
  ENSG00000128408_3 (sequence is synthesized)
agaagataaaagaagctactgaaaaagctagacatgaaacctttgctgctgaaatgaggcaaaatgacaaaatcatgtgcatattggaaaaccggaaaaagagggataggaaaaatctct

SEQ ID NO: 275021 - DNA, 120 bp, Artificial Sequence
  ENSG00000128408_4 (sequence is synthesized)
gtagggctatcaatgacttccaacagagctttcagaagccagaaactcgccgtgaatttgatctgtccgaccccctagcccttaagaaagatcttccagcccggcagtcagataatgatg

SEQ ID NO: 275022 - DNA, 120 bp, Artificial Sequence
  ENSG00000128408_5 (sequence is synthesized)
ttcggaatacgatatcaggaatgcagaaattcatgggagaggatttaaacttccatgagaggaagaaattccaagaggaacaaaacagagaatggtctttgcagcagcaaagggaatgga

SEQ ID NO: 275023 - DNA, 120 bp, Artificial Sequence
  ENSG00000128408_6 (sequence is synthesized)
aggctgcagtttgacgagacagccaagcacctccagaagctggaaagcaccaccagaaaggcagtttgtgcatctgtgaaagacttcaacaagagccaggccatcgagtcagtggaaagg

SEQ ID NO: 275024 - DNA, 120 bp, Artificial Sequence
  ENSG00000128408_7 (sequence is synthesized)
aaaaagcaagagaaaaagcaagaacaagaggacaacttggccgagatcaccaacctcctgcgtggggacctgctctccgagaacccgcagcaggcagccagctccttcgggccccaccgc

SEQ ID NO: 275025 - DNA, 120 bp, Artificial Sequence
  ENSG00000128408_8 (sequence is synthesized)
gtggtccctgaccgctggaagggcatgacccaggagcagctggagcagatccgcctagtccagaagcagcaaatccaggagaagctgaggctccaggaagaaaagcgccagcgagacctg

SEQ ID NO: 275026 - DNA, 120 bp, Artificial Sequence
  ENSG00000128408_9 (sequence is synthesized)
gactgggaccggcggaggattcagggggctcgcgccaccctgctgtttgagcggcagcagtggcggcggcagcgcgacctgcgcagagctctggacagcagcaacctcagcctggccaag

SEQ ID NO: 275027 - DNA, 120 bp, Artificial Sequence
  ENSG00000128408_10 (sequence is synthesized)
gagcagcatttgcagaaaaaatatatgaatgaagtctatacaaatcaacccacgggagactatttcacacaatttaatacaggaagtcgataatgaggaacacacccttgttcccgtcat

SEQ ID NO: 275028 - DNA, 120 bp, Artificial Sequence
  ENSG00000128408_11 (sequence is synthesized)
tcacgtataaagagtggctaccttaaagagtcacgtttcttttttaaagatacactccttgggccacaagtacccttcagctgtaatcgtccactgtggacaaaacatttatctaacctc

SEQ ID NO: 275029 - DNA, 120 bp, Artificial Sequence
  ENSG00000128408_12 (sequence is synthesized)
tttttttttttttttaagcaaccctacagtttttttttttttttaagcaaccctacagtttttgtgggatttgtttaaagtcctaccaatgtgcacagacagccacatgctactttggcc

SEQ ID NO: 275030 - DNA, 120 bp, Artificial Sequence
  ENSG00000128408_13 (sequence is synthesized)
ctgtggggaaagaaaagtcagagcctgccctccaggagggaaacacctgcaatgacacctcagtcatgtggaaaacactttccgtgtcggggtcccagttggatgccggcgtgcagagag

SEQ ID NO: 275031 - DNA, 120 bp, Artificial Sequence
  ENSG00000128422_0 (sequence is synthesized)
acacaacttggggcccctctcctctccagcccttctcctgtgtgcctgcctcctgccgccgccaccatgaccacctccatccgccagttcacctcctccagctccatcaagggctcctcc

SEQ ID NO: 275032 - DNA, 120 bp, Artificial Sequence
  ENSG00000128422_1 (sequence is synthesized)
ggcctggggggcggctcgtcccgcacctcctgccggctgtctggcggcctgggtgccggctcctgcaggctgggatctgctggcggcctgggcagcaccctcgggggtagcagctactcc

SEQ ID NO: 275033 - DNA, 120 bp, Artificial Sequence
  ENSG00000128422_2 (sequence is synthesized)
agctgctacagctttggctctggtggtggctatggcagcagctttgggggtgttgatgggctgctggctggaggtgagaaggccaccatgcagaacctcaatgaccgcctggcctcctac

SEQ ID NO: 275034 - DNA, 120 bp, Artificial Sequence
  ENSG00000128422_3 (sequence is synthesized)
ctggacaaggtgcgtgccctggaggaggccaacactgagctggaggtgaagatccgtgactggtaccagaggcaggccccggggcccgcccgtgactacagccagtactacaggacaatt

SEQ ID NO: 275035 - DNA, 120 bp, Artificial Sequence
  ENSG00000128422_4 (sequence is synthesized)
gaggagctgcagaacaagatcctcacagccaccgtggacaatgccaacatcctgctacagattgacaatgcccgtctggctgctgatgacttccgcaccaagtttgagacagagcaggcc

SEQ ID NO: 275036 - DNA, 120 bp, Artificial Sequence
  ENSG00000128422_5 (sequence is synthesized)
ctgcgcctgagtgtggaggccgacatcaatggcctgcgcagggtgctggatgagctgaccctggccagagccgacctggagatgcagattgagaacctcaaggaggagctggcctacctg

SEQ ID NO: 275037 - DNA, 120 bp, Artificial Sequence
  ENSG00000128422_6 (sequence is synthesized)
cccaggcgtggacctgagccgcatcctcaacgagatgcgtgaccagtatgagaagatggcagagaagaaccgcaaggatgccgaggattggttcttcagcaagacagaggaactgaaccg

SEQ ID NO: 275038 - DNA, 120 bp, Artificial Sequence
  ENSG00000128422_7 (sequence is synthesized)
cgaggtggccaccaacagtgagctggtgcagagtggcaagagtgagatctcggagctccggcgcaccatgcaggccttggagatagagctgcagtcccagctcagcatgaaagcatccct

SEQ ID NO: 275039 - DNA, 120 bp, Artificial Sequence
  ENSG00000128422_8 (sequence is synthesized)
ggagggcaacctggcggagacagagaaccgctactgcgtgcagctgtcccagatccaggggctgattggcagcgtggaggagcagctggcccagcttcgctgcgagatggagcagcagaa

SEQ ID NO: 275040 - DNA, 120 bp, Artificial Sequence
  ENSG00000128422_9 (sequence is synthesized)
ccaggaatacaaaatcctgctggatgtgaagacgcggctggagcaggagattgccacctaccgccgcctgctggagggagaggatgcccacctgactcagtacaagaaagaaccggtgac

SEQ ID NO: 275041 - DNA, 120 bp, Artificial Sequence
  ENSG00000128422_10 (sequence is synthesized)
cacccgtcaggtgcgtaccattgtggaagaggtccaggatggcaaggtcatctcctcccgcgagcaggtccaccagaccacccgctgaggactcagctaccccggccggccacccaggag

SEQ ID NO: 275042 - DNA, 120 bp, Artificial Sequence
  ENSG00000128422_11 (sequence is synthesized)
gcagggaggcagccgccccatctgccccacagtctccggcctctccagcctcagccccctgcttcagtcccttccccatgcttccttgcctgatgacaataaagcttgttgactcagcta

SEQ ID NO: 275043 - DNA, 120 bp, Artificial Sequence
  ENSG00000128422_12 (sequence is synthesized)
gtcaaagatgctgaggagtgggtggcagagccctggggctgggcaatggctgaggccgtgggagagagcagagcaggtgcaccgggattagtcaccttagagggcttccctgtctgcaga

SEQ ID NO: 275044 - DNA, 120 bp, Artificial Sequence
  ENSG00000128422_13 (sequence is synthesized)
gccctgatccttggggtccagtgtgcagggcagactcctctttgtaccacactgcttctctgtacacaaggaacctcccaggggcctgcagaggctccctctacctaccctgcctccctc

SEQ ID NO: 275045 - DNA, 120 bp, Artificial Sequence
  ENSG00000128422_14 (sequence is synthesized)
atgagggtgggggataagtaaggaaatcttgtcccatttcaaactctcaaagctgaacatctacatagaagcttggaaattagaggggaacttttgggggcataggcctaataattagat

SEQ ID NO: 275046 - DNA, 120 bp, Artificial Sequence
  ENSG00000128422_15 (sequence is synthesized)
atagagtctgatggtggaggcaatactgagcagatgaataaaaatcatttagagggtcagatagagcagagggagaacaaaggaggggtccttgtgggaagtggggtccccttgtggggg

SEQ ID NO: 275047 - DNA, 120 bp, Artificial Sequence
  ENSG00000128422_16 (sequence is synthesized)
aaggcttgggagtgagaggtcaggatgggtccagatgcgcacatccacatcccctttttccataggagatgaacgccctgcgaggccaggtgggtggtgagatcaatgtggagatggacg

SEQ ID NO: 275048 - DNA, 120 bp, Artificial Sequence
  ENSG00000128422_17 (sequence is synthesized)
gtgggaagctggtgagaaggcacactctctccacagttagatttgggaggaggcctgacttgggagagggatccaggctcacaccgccctgtcctgtgtcctgtctgcagacagaggaac

SEQ ID NO: 275049 - DNA, 120 bp, Artificial Sequence
  ENSG00000128422_18 (sequence is synthesized)
tcctttaaggccgagcctgccatgggggtctggtggggtactgagtatcgggggaagaagaggcacctttcagcccttcagactcctgtttgcccctcctctgccaataatacagcacgg

SEQ ID NO: 275050 - DNA, 120 bp, Artificial Sequence
  ENSG00000128422_19 (sequence is synthesized)
ggcaagggaggggctgggcgagaagagaggccctgaggcaggaagatctgctcagaaccctggtgtgggctcagccacccccatccaatgacctgactactctcccttctcctcagatcc

SEQ ID NO: 275051 - DNA, 120 bp, Artificial Sequence
  ENSG00000128422_20 (sequence is synthesized)
agggagaagtgactcattagcactgaggattgatactcaggaaaagatcaaatgagagagacactgtctggtctgatgggggtggggcagggaactggtccttaccttggagatcctagt

SEQ ID NO: 275052 - DNA, 120 bp, Artificial Sequence
  ENSG00000128422_21 (sequence is synthesized)
ctgatggaggagacaggtcccagctctggagattgtcatctgatgggaagataggaacatggtctcatgatctttgctcttgacagcttttggatgagcaaaaacagtcctgtctctggg

SEQ ID NO: 275053 - DNA, 120 bp, Artificial Sequence
  ENSG00000128463_0 (sequence is synthesized)
gcatttgcagagtgagacaaagcggagaacgctggtgggcctgttgtggagtacgctttggactgagaagcatcgaggctataggacgcagctgttgccatgacggcccaggggggcctg

SEQ ID NO: 275054 - DNA, 120 bp, Artificial Sequence
  ENSG00000128463_1 (sequence is synthesized)
gtggctaaccgaggccggcgcttcaagtgggccattgagctaagcgggcctggaggaggcagcaggggtcgaagtgaccggggcagtggccagggagactcgctctacccagtcggttac

SEQ ID NO: 275055 - DNA, 120 bp, Artificial Sequence
  ENSG00000128463_2 (sequence is synthesized)
ttggacaagcaagtgcctgataccagcgtgcaagagacagaccggatcctggtggagaagcgctgctgggacatcgccttgggtcccctcaaacagattcccatgaatctcttcatcatg

SEQ ID NO: 275056 - DNA, 120 bp, Artificial Sequence
  ENSG00000128463_3 (sequence is synthesized)
tacatggcaggcaatactatctccatcttccctactatgatggtgtgtatgatggcctggcgacccattcaggcacttatggccatttcagccactttcaagatgttagaaagttcaagc

SEQ ID NO: 275057 - DNA, 120 bp, Artificial Sequence
  ENSG00000128463_4 (sequence is synthesized)
tgtttacaagtgccagtccatgggactgttacctacacatgcatcggattggttagccttcattgagccccctgagagaatggagttcagtggtggaggactgcttttgtgaacatgaga

SEQ ID NO: 275058 - DNA, 120 bp, Artificial Sequence
  ENSG00000128463_5 (sequence is synthesized)
aagcagcgcctggtccctatgtatttgggtcttatttacatccttctttaagcccagtggctcctcagcatactcttaaactaatcacttatgttaaaaagaaccaaaagactcttttct

SEQ ID NO: 275059 - DNA, 120 bp, Artificial Sequence
  ENSG00000128463_6 (sequence is synthesized)
ccatggtggggtgacaggtcctagaaggacaatgtgcatattacgacaaacacaaagaaactataccataacccaaggctgaaaataatgtagaaaactttatttttgtttccagtacag

SEQ ID NO: 275060 - DNA, 120 bp, Artificial Sequence
  ENSG00000128463_7 (sequence is synthesized)
agcaaaacaacaacaaaaaaacataactatgtaaacaagagaataactgctgctaaatcaagaactgttgcagcatctcctttcaataaattaaatggttgagaacaatgcataaaaaaa

SEQ ID NO: 275061 - DNA, 120 bp, Artificial Sequence
  ENSG00000128463_8 (sequence is synthesized)
gatggcctggcgacccattcaggcacttatggccatttcagccagtaagtattcttgaaacaataacccttccataagtttgaagaattaaaggcaggccgggcatggtggctcacgcct

SEQ ID NO: 275062 - DNA, 120 bp, Artificial Sequence
  ENSG00000128463_9 (sequence is synthesized)
tctccatcttccctactatgatggcgtgagccactgcgcctggcctagggtttcttaaaaaataagagccattaggagtttttaagttattatttttaattaattaattaatttatttat

SEQ ID NO: 275063 - DNA, 120 bp, Artificial Sequence
  ENSG00000128463_10 (sequence is synthesized)
gacaagcaagtgcctgataccagcgtgcaagagacagaccggatcctggtggagaaggtacagaggtatagatgttaccgtagcccatgggccagtcctgagttacacactcatcctctt

SEQ ID NO: 275064 - DNA, 120 bp, Artificial Sequence
  ENSG00000128463_11 (sequence is synthesized)
ctcctaggtggagttaacgtagatagctcttatcctgaagatttggaaactaaactgcttgaggctggtatttcggtattttatatatcagctacaaaagtgcttaataatttgaaaaat

SEQ ID NO: 275065 - DNA, 120 bp, Artificial Sequence
  ENSG00000128463_12 (sequence is synthesized)
agaagatgtttggaacataaggtataagaaagtaggttgaaaactatcttttggtggcaacatcttccagttgaagtgatcctttttctactctggttcccttacaccacatatccaact

SEQ ID NO: 275066 - DNA, 120 bp, Artificial Sequence
  ENSG00000128463_13 (sequence is synthesized)
tcaggatactctgttggctttacctactactttttcctgtgttcacctctcatcctaatccaagccaccatccttcatctagatttctgcagtagcccggctaatttttgtatttttagt

SEQ ID NO: 275067 - DNA, 120 bp, Artificial Sequence
  ENSG00000128463_14 (sequence is synthesized)
ggctatttatatttctaatttctcctgtcattttgttacattttttctagaaacttatccatttcctaaaatttcaaatgtattgatataaagttgttcataatatgatcacttccatat

SEQ ID NO: 275068 - DNA, 120 bp, Artificial Sequence
  ENSG00000128463_15 (sequence is synthesized)
atgcaagatctgtgatgttcattttttcattcctgatattgaatattttgtctcctctcctttcttcatcaggctcaccagtattgattttttaaaaattattttcatttatttttacag

SEQ ID NO: 275069 - DNA, 120 bp, Artificial Sequence
  ENSG00000128463_16 (sequence is synthesized)
gtcactgtacccatcaccagtattgattttattaatcttttcaaaaatacttgggtttttttctagtttcttgaaatggatgcttagtttatttttagactgccattactttttttcttt

SEQ ID NO: 275070 - DNA, 120 bp, Artificial Sequence
  ENSG00000128463_17 (sequence is synthesized)
ggatgcttagtttatttttagactgccattactttttttcttttcttttgagacagtcttgctgttgtcgccgaggctggaatgcaatagcacgaccttggctcactgcaacctctgcct

SEQ ID NO: 275071 - DNA, 72 bp, Artificial Sequence
  ENSG00000128463_18 (sequence is synthesized)
ggccacattgccattacttttaatggcaacaaccgcagttacttttgcagcaacctggtagtatgtatttaa

SEQ ID NO: 275072 - DNA, 120 bp, Artificial Sequence
  ENSG00000128463_19 (sequence is synthesized)
ccgcagttacttttgcagcaacctggtagtatgtatttaaggttataaatttctcagaactctagctgtgtcccacgagttttaaaatgtggtacttttgctatcatataaatctatttt

SEQ ID NO: 275073 - DNA, 120 bp, Artificial Sequence
  ENSG00000128463_20 (sequence is synthesized)
ccattataatttcttcatgtatcattgttaattcccaaacataagagattttctagttactataaaattatttctagtttaatatcattgtagtcaaagaatatgttttgtacaatttgc

SEQ ID NO: 275074 - DNA, 120 bp, Artificial Sequence
  ENSG00000128463_21 (sequence is synthesized)
attctttgagattgacattttcttcatggctcagcgagtggtcagtttttgtgaatatcttgtttgaaaagaatgtgaattctgcaattgttgagtgcagtgttacatgtcagttgggtt

SEQ ID NO: 275075 - DNA, 120 bp, Artificial Sequence
  ENSG00000128463_22 (sequence is synthesized)
aagtttgttaatgtcattcaaatcttctatgtcttgatttgcctgctaattctattatttctggaactaaattagttcgatggttctattagttattgactgaggtgtgctaatctccca

SEQ ID NO: 275076 - DNA, 120 bp, Artificial Sequence
  ENSG00000128463_23 (sequence is synthesized)
ttatgtggatttatctatttcttcagttgtagataggacattgatagatacataagtaccaggacaaaagcagggagatcttttttccaaaatcaggagaaaaaaatgacatctggaaaa

SEQ ID NO: 275077 - DNA, 120 bp, Artificial Sequence
  ENSG00000128463_24 (sequence is synthesized)
gagtcagctcagttagaagcagggagttgggaattccgttcatgtgatttagcatcagtgatatggcaaatgtgggactaagggtagtgatcagagggttaaaattgtgtgttttgtttt

SEQ ID NO: 275078 - DNA, 85 bp, Artificial Sequence
  ENSG00000128463_25 (sequence is synthesized)
atctccatcttccctactatgatggtgtgtatgatggcctggcgacccattcaggcaaccccaatggctcgctaatttttgtatt

SEQ ID NO: 275079 - DNA, 120 bp, Artificial Sequence
  ENSG00000128463_26 (sequence is synthesized)
ctgcctgccttggcctcccaaagtgtttagctaagattagctactgcgcctggcctggaagttcttttttaaggataggcaaaatagagcttgtggttaaagtattaagtaattgattca

SEQ ID NO: 275080 - DNA, 120 bp, Artificial Sequence
  ENSG00000128463_27 (sequence is synthesized)
ttaaagtattaagtaattgattcaggaagttattttaacactcatttgccactcacctatttattctttctttcttctttcagagaatggagttcagtggtggaggactgcttttgtgaa

SEQ ID NO: 275081 - DNA, 79 bp, Artificial Sequence
  ENSG00000128463_28 (sequence is synthesized)
ctctacccagtcggttacttggacaagcaagtgcctgataccagcgtgcaagagacagaccggatcctggtggagaagg

SEQ ID NO: 275082 - DNA, 120 bp, Artificial Sequence
  ENSG00000128463_29 (sequence is synthesized)
aagaattaaaggtaaattcttagggacagtttttggctaacaggtatataggggagtggggtaatggtggtggcatggaggggagtgtagtgcttaccatggttttctgtttgcctttaa

SEQ ID NO: 275083 - DNA, 120 bp, Artificial Sequence
  ENSG00000128463_30 (sequence is synthesized)
acagttggcttgattcgtattgggggaaagagttcttttggtttgacaacttctgttaccgcaacagctttcaagatgttagaaagttcaagccagaagtttcttcagggtttggtctat

SEQ ID NO: 275084 - DNA, 120 bp, Artificial Sequence
  ENSG00000128463_31 (sequence is synthesized)
cccctgaggtaaggcaaaagaaaagctgaattttgggtagttgtagtatacagtgaatagctgacctacttgatggtaggaaattggagttggtatttgagtttcttttttttttttttt

SEQ ID NO: 275085 - DNA, 120 bp, Artificial Sequence
  ENSG00000128482_0 (sequence is synthesized)
acatttcttttccagctctgaccgggagtcagctcctcggggataccatcccccgacctcaccttctacctaccgcagcctgctagcctttccgggagaaaaggcatccttacctctggt

SEQ ID NO: 275086 - DNA, 120 bp, Artificial Sequence
  ENSG00000128482_1 (sequence is synthesized)
tgaaggtctcggggcctccccctctgcatccggaccctctccccatcccagcctcccatgccaaggcccgccttgtcagtcacttccttttgtcatcggcttggcaaacgggagagaaaa

SEQ ID NO: 275087 - DNA, 120 bp, Artificial Sequence
  ENSG00000128482_2 (sequence is synthesized)
cagagcttcatgggaaacagcggcaacagttggtcccatacacctttccccaagttggagctaggcctggggccccagcccatggcgccccgggagctccctacctgctccatctgcctg

SEQ ID NO: 275088 - DNA, 120 bp, Artificial Sequence
  ENSG00000128482_3 (sequence is synthesized)
gagaggttgcgcgaccccatctcgctggactgtggccacgacttctgcatacggtgcttcagcacacaccgtctcccgggctgtgagccgccctgctgtcctgagtgccggaagatatgc

SEQ ID NO: 275089 - DNA, 120 bp, Artificial Sequence
  ENSG00000128482_4 (sequence is synthesized)
aagcagaagaggggcctccggagcctgggcgagaagatgaagctcctgccgcagcggccgctgccccctgcactgcaggagacgtgtcctgtgagggcggagccgctgctgctggttcgc

SEQ ID NO: 275090 - DNA, 120 bp, Artificial Sequence
  ENSG00000128482_5 (sequence is synthesized)
atcaatgcctctgggggcctcatccttaggatgggggccatcaaccgctgcctgaagcaccctctggccagggacaccccagtctgcctcctcgctgtcctgggggagcagcactcaggg

SEQ ID NO: 275091 - DNA, 120 bp, Artificial Sequence
  ENSG00000128482_6 (sequence is synthesized)
aagtccttcctcctcaaccatttgcttcagggcttgccgggcctggagtctggtgagggcggccggccaagaggaggagaggcatccctgcagggctgcaggtggggcgccaatggcctc

SEQ ID NO: 275092 - DNA, 120 bp, Artificial Sequence
  ENSG00000128482_7 (sequence is synthesized)
gccaggggcatatggatgtggagccaccccttcttgctggggaaagaagggaagaaggtggcggtgttcctggtggacacaggggatgccatgagccctgagctgagcagggaaacaagg

SEQ ID NO: 275093 - DNA, 120 bp, Artificial Sequence
  ENSG00000128482_8 (sequence is synthesized)
atcaagctctgtgctctcaccacgatgctgagctcctaccagatcctcagcacctcccaggagctgaaggatacagacctggactatctggagatgtttgtccacgtggccgaggtgatg

SEQ ID NO: 275094 - DNA, 120 bp, Artificial Sequence
  ENSG00000128482_9 (sequence is synthesized)
ggcaagcattatgggatggtgccaatccagcatctggacctcttagttcgtgactcatcccaccccaacaaggcagggcaggggcatgtaggcaacatcttccagagattgtctggcaga

SEQ ID NO: 275095 - DNA, 120 bp, Artificial Sequence
  ENSG00000128482_10 (sequence is synthesized)
taccccaaggtgcaggagctgctgcaagggaagcgagcccgttgctgcctcttgcctgccccagggaggcggcggatgaaccaaggccatgcaagccctggtgacacagatgatgacttc

SEQ ID NO: 275096 - DNA, 120 bp, Artificial Sequence
  ENSG00000128482_11 (sequence is synthesized)
cgccaccttctgggggcctacgtctcagatgtgctgagtgcggccccccagcacgctaagagccgctgccaggggtactggaacgaggggcgcgccgtggccaggggggacagacgccta

SEQ ID NO: 275097 - DNA, 120 bp, Artificial Sequence
  ENSG00000128482_12 (sequence is synthesized)
ctcacggggcagcagctagctcaggaaatcaagaacctctcaggatggatggggaggacagggcccggtttcacctctccggatgagatggctgctcagctgcacgacctgaggaaggtg

SEQ ID NO: 275098 - DNA, 120 bp, Artificial Sequence
  ENSG00000128482_13 (sequence is synthesized)
aagcgcatattctctgcgctgcgggtcctgccagacaccatgcggaacctcctctccacccagaaagatgccattctggcccgccatggtgtggccttactctgcaaggggagagatcag

SEQ ID NO: 275099 - DNA, 120 bp, Artificial Sequence
  ENSG00000128482_14 (sequence is synthesized)
accttggaggcactggaagctgagctgcaggccacggccaaggccttcatggactcctacacgatgcgcttctgtggccacctagctgctgtggggggtgctgtgggggccgggctcatg

SEQ ID NO: 275100 - DNA, 120 bp, Artificial Sequence
  ENSG00000128482_15 (sequence is synthesized)
ggcctggcagggggcgtggtgggtgctggcatggcagcagctgcactggctgcagaggctgggatggtggctgctggagctgccgtgggggccacaggggccgctgtggttgggggtggc

SEQ ID NO: 275101 - DNA, 120 bp, Artificial Sequence
  ENSG00000128482_16 (sequence is synthesized)
gtgggtgctgggttggctgccacagtgggctgcatggagaaggaggaggatgagaggcttctggaaggggaccgagagccccttctccaggaagagtaacagccccaggaggtattgaag

SEQ ID NO: 275102 - DNA, 120 bp, Artificial Sequence
  ENSG00000128482_17 (sequence is synthesized)
gacaggagagatgtcaggtggggatgaagaagaggggcaggtcgggggagggtgatgccagggattccaaggcaccgccatgtactgcactgccctggtcgaatgctcggtgtctgggtg

SEQ ID NO: 275103 - DNA, 120 bp, Artificial Sequence
  ENSG00000128482_18 (sequence is synthesized)
gcagctgagctgggactcaaggtggctcttggaacctgggaggcagcatctgggggcagtggatagaacacccggcctgtttctggttgcagatggttgccgatctgcccttgtcacaga

SEQ ID NO: 275104 - DNA, 120 bp, Artificial Sequence
  ENSG00000128482_19 (sequence is synthesized)
taggctacatcccagggtttctggctgcaagtgagactccaccctccccacctggctcatttccccgatgaccctggattgtaggaaagttaagcaggcaccatcctggaagtctacccc

SEQ ID NO: 275105 - DNA, 120 bp, Artificial Sequence
  ENSG00000128482_20 (sequence is synthesized)
taggtggtcgagagacctgttctttcacagatgtgagaagccccaggatgattgaccatggtgttcaggagcggggagcactgatgaggtgctggggatgacaggaaggaaggaacactg

SEQ ID NO: 275106 - DNA, 120 bp, Artificial Sequence
  ENSG00000128482_21 (sequence is synthesized)
ggcagaaccagagagatgggacatggtagactgtggcccagaccccagagcagagaaacttgttcccatgacccttcccaaatctgctccagcaggactaaggtggctttcccactcctg

SEQ ID NO: 275107 - DNA, 120 bp, Artificial Sequence
  ENSG00000128482_22 (sequence is synthesized)
gcccacagccccagagagcctgtctgtgcatcctgaaccactctttgctgggcctccgcaagggcctctcttgggtctgtgtcctttttcaagcctgtttagatgggggagtgcccatgc

SEQ ID NO: 275108 - DNA, 120 bp, Artificial Sequence
  ENSG00000128482_23 (sequence is synthesized)
cctctgtgaagtgcccaaatgcgaaagaataacaccttttcttgcattctgagctaagccagacagcctttatactagattctatcaaaatcttgcaaaggaaaacaaaatgaacaactt

SEQ ID NO: 275109 - DNA, 120 bp, Artificial Sequence
  ENSG00000128482_24 (sequence is synthesized)
ctacccttaaacacatcctttctcccctgggcttgtaagaagatgcagcttgatgcagctcctcaaacaccaggccccctgggaactgggggtgcgggagttctccctctgggggacaga

SEQ ID NO: 275110 - DNA, 120 bp, Artificial Sequence
  ENSG00000128482_25 (sequence is synthesized)
aaatctgactactaggaagacttctaggctatgaaactgacttctaggctatgaaacttacagggtatgggtgggcacattatcctttattttatgaaaaataaaatgtgtgtatgtgaa

SEQ ID NO: 275111 - DNA, 120 bp, Artificial Sequence
  ENSG00000128482_26 (sequence is synthesized)
gaggcggggagcaaggatgggggttcctgcctgggggaagctgggtctggtattccggtctgtggggacaaggaaccgaccaactgatgctctcccttctctcccctgcaggagtctggt

SEQ ID NO: 275112 - DNA, 120 bp, Artificial Sequence
  ENSG00000128482_27 (sequence is synthesized)
aggctgggatgggtgcagtgaggccaggcaggtcagttgaaatggccggtcctggaacacagagcccggcagcccagccgggagggctgtccgcctgaggctggatccgccaggctgtgg

SEQ ID NO: 275113 - DNA, 120 bp, Artificial Sequence
  ENSG00000128482_28 (sequence is synthesized)
gggtctgtgtgccctgggagtggagatgaggaaacaagcagcgcccctggctgagaaggaaggaaggaggcagcctgggttttcccgtggacagatggctgctcagctgcacgacctgag

SEQ ID NO: 275114 - DNA, 120 bp, Artificial Sequence
  ENSG00000128487_0 (sequence is synthesized)
agaagcagaaaaggttggataaaagataaggacagacccacgaagtcaagcatgcggagtgcagccaagccctggaacccagccatcagagcagggggccacggcccagaccgggtgcgg

SEQ ID NO: 275115 - DNA, 120 bp, Artificial Sequence
  ENSG00000128487_1 (sequence is synthesized)
cctctgcctgcagcctcttccggcatgaagagttctaagtcttcaacttccttggcttttgagtcccgactcagcaggctcaagagggccagcagtgaggacacgctcaacaagccagga

SEQ ID NO: 275116 - DNA, 120 bp, Artificial Sequence
  ENSG00000128487_2 (sequence is synthesized)
agtaccgctgcatcgggggtggttcgcctgaagaagaccgccactgccggagccatctcggagctcacggagagccgcctgaggagcggcacaggggcctttacaacaactaaacggaca

SEQ ID NO: 275117 - DNA, 120 bp, Artificial Sequence
  ENSG00000128487_3 (sequence is synthesized)
ggcattccagccccacgggaattttcagtaactgtctcaagagagaggtctgtgccacgtggtccctccaaccccaggaaatcagtgtccagtccaacttcttccaacactcccactcct

SEQ ID NO: 275118 - DNA, 120 bp, Artificial Sequence
  ENSG00000128487_4 (sequence is synthesized)
acgaaacacctgaggaccccttccacaaagcccaagcaagagaatgaaggtggagaaaaggctgcgcttgagtcccaagttcgggaacttttggcagaagccaaagcaaaagatagtgaa

SEQ ID NO: 275119 - DNA, 120 bp, Artificial Sequence
  ENSG00000128487_5 (sequence is synthesized)
attaacaggcttcgaagtgaactaaagaaatacaaagagaaaaggactctgaacgctgaggggactgatgctttgggcccaaatgtcgatggaacatcagtctccccaggtgacacggaa

SEQ ID NO: 275120 - DNA, 120 bp, Artificial Sequence
  ENSG00000128487_6 (sequence is synthesized)
cctatgataagagctcttgaggagaagaacaagaactttcagaaagagctttccgatctagaggaagaaaaccgggtcctgaaggagaaactgatctatcttgagcactccccaaattca

SEQ ID NO: 275121 - DNA, 120 bp, Artificial Sequence
  ENSG00000128487_7 (sequence is synthesized)
gaaggggcagcaagtcacactggcgacagcagctgcccaacatccataactcaagagtcaagcttcggaagcccaactggaaatcagatgtccagtgacattgatgagtataaaaaaaac

SEQ ID NO: 275122 - DNA, 120 bp, Artificial Sequence
  ENSG00000128487_8 (sequence is synthesized)
atacatggaaatgcattacggacatcaggctcctcaagtagcgatgttaccaaagcttctttgtcgccagatgcttccgactttgagcacattacagcagagacaccctcaaggcccctg

SEQ ID NO: 275123 - DNA, 120 bp, Artificial Sequence
  ENSG00000128487_9 (sequence is synthesized)
tcctccaccagtaacccctttaagagttcaaagtgttctactgctgggagttccccaaacagcgtaagtgaattgtccctggcttccctcacagagaagatacaaaagatggaagaaaac

SEQ ID NO: 275124 - DNA, 120 bp, Artificial Sequence
  ENSG00000128487_10 (sequence is synthesized)
caccatagcactgcagaagaactacaggctactctacaagaattatcagaccagcaacaaatggtacaggaattgacagctgaaaatgagaagctggtggatgaaaagacgattttagag

SEQ ID NO: 275125 - DNA, 120 bp, Artificial Sequence
  ENSG00000128487_11 (sequence is synthesized)
acatcctttcatcagcatcgagagagggcagagcagctaagtcaagaaaatgagaagctgatgaatcttttacaagagcgagtaaagaatgaagagcccaccactcaggaaggaaaaatt

SEQ ID NO: 275126 - DNA, 120 bp, Artificial Sequence
  ENSG00000128487_12 (sequence is synthesized)
attgaactggagcagaagtgcacaggtattcttgaacagggccgctttgaaagagagaagctactcaacattcagcagcagttgacctgtagcttgcggaaggttgaggaagaaaaccaa

SEQ ID NO: 275127 - DNA, 120 bp, Artificial Sequence
  ENSG00000128487_13 (sequence is synthesized)
ggagctttagaaatgattaaacgtctgaaggaagaaaatgaaaaactgaatgagtttctagaactggaacggcataataataacatgatggccaaaactttggaagagtgtagagttacc

SEQ ID NO: 275128 - DNA, 120 bp, Artificial Sequence
  ENSG00000128487_14 (sequence is synthesized)
ttggaagggctaaaaatggagaatggatctttgaagtctcatttgcagggtgagaagcagaaagccacagaggccagtgctgtggagcagacggcagagagctgcgaagttcaagaaatg

SEQ ID NO: 275129 - DNA, 120 bp, Artificial Sequence
  ENSG00000128487_15 (sequence is synthesized)
ttgaaagtagcccgagcagagaaagatctactggaactgtcttgcaatgagctcagacaagaattactaaaggcaaacggtgaaattaaacatgtttccagtctgctggccaaggtggaa

SEQ ID NO: 275130 - DNA, 120 bp, Artificial Sequence
  ENSG00000128487_16 (sequence is synthesized)
gacatgaaagaaaccatatttgaattggaagatcaggtggaacagcaccgggctgtcaagttacacaataatcaactcatcagtgagctagaaagtagtgtgatcaagctggaggaacag

SEQ ID NO: 275131 - DNA, 120 bp, Artificial Sequence
  ENSG00000128487_17 (sequence is synthesized)
aagtcagacctggagaggcagctgaagactctgaccaagcagatgaaggaggagaccgaggaatggaggcggttccaggcggatctgcagaccgcagtggtggtggccaatgacatcaag

SEQ ID NO: 275132 - DNA, 120 bp, Artificial Sequence
  ENSG00000128487_18 (sequence is synthesized)
tgtgaggcccagcaggagctgcgcaccgtgaagaggaaactgctggaggaggaggagaagaatgcccggttgcagaaggagctgggggatgtgcagggccacggcagggtggtcaccagc

SEQ ID NO: 275133 - DNA, 120 bp, Artificial Sequence
  ENSG00000128487_19 (sequence is synthesized)
agagccgcccctccacctgtggatgaagagccagagtcctctgaggtcgatgctgctggtcggtggcctggtgtctgtgttagcagaacatctccaacacccccagagtcggcaaccacc

SEQ ID NO: 275134 - DNA, 120 bp, Artificial Sequence
  ENSG00000128487_20 (sequence is synthesized)
gttaagtcacttatcaagtcatttgacttgggacgcccaggtggagctggacagaatatttctgtccataagacccccagaagtcccctaagtgggataccagtgaggactgctccagca

SEQ ID NO: 275135 - DNA, 120 bp, Artificial Sequence
  ENSG00000128487_21 (sequence is synthesized)
gctgctgtctctccaatgcagaggcattcgacttacagcagtgtgcggccagccagcagaggggtgactcaacgcttggaccttcctgaccttcccctctcagatattctaaagggaagg

SEQ ID NO: 275136 - DNA, 120 bp, Artificial Sequence
  ENSG00000128487_22 (sequence is synthesized)
actgagaccctgaagccagacccccacctccgcaagagtccctcactagagtcactgagcagacccccgtctctgggctttggggacacaagactgctgagtgcttccacccgggcatgg

SEQ ID NO: 275137 - DNA, 120 bp, Artificial Sequence
  ENSG00000128487_23 (sequence is synthesized)
aaaccacaaagcaaactcagtgtggaaagaaaagaccctctggcagccttggcccgggaatacggtggttccaagcgcaatgctctactgaaatggtgccagaagaagacacaaggttat

SEQ ID NO: 275138 - DNA, 120 bp, Artificial Sequence
  ENSG00000128487_24 (sequence is synthesized)
gcgaacattgacatcaccaatttcagcagcagctggagcgatggcctggccttctgtgctctgctccacacctacctgcctgcccacatcccctaccaggagctgaatagtcaggagaaa

SEQ ID NO: 275139 - DNA, 120 bp, Artificial Sequence
  ENSG00000128487_25 (sequence is synthesized)
aagaggaatctcttgttggcatttgaagcggctgaaagtgtaggcatcaaacccagcctggaactcagcgagatgctgtacacagaccggcccgactggcagagtgtgatgcagtacgtg

SEQ ID NO: 275140 - DNA, 120 bp, Artificial Sequence
  ENSG00000128487_26 (sequence is synthesized)
gcccaaatctacaagtactttgagacgtaaccctggagggcctggggcagccaccattgccacctactgcagcttttcctggaagcgcctgattactgtccactgaccctgctctgccca

SEQ ID NO: 275141 - DNA, 120 bp, Artificial Sequence
  ENSG00000128487_27 (sequence is synthesized)
ccacccagctgcctagacttcaaagacaggctcaatccaagtggaccaacacccaaataagaaacagagtgggtcccacgatgtacctgtctgaaatgcaaatgcagctggactgtaaat

SEQ ID NO: 275142 - DNA, 120 bp, Artificial Sequence
  ENSG00000128487_28 (sequence is synthesized)
tggggactctttgatctcttgtgggatgcttctaaagagggcagcctccctccttccagaccaagaccccacacccaggcttgttttgctgattatattgggtggctgaacgaacacatt

SEQ ID NO: 275143 - DNA, 120 bp, Artificial Sequence
  ENSG00000128487_29 (sequence is synthesized)
atctgcagaaattcagacaaagaacatctccaaatcagtcttttggttgctgttgttaaaaatatcccggctttgcctttatgaaacctttgcccttggctgggtgtggtagctcgtggc

SEQ ID NO: 275144 - DNA, 84 bp, Artificial Sequence
  ENSG00000128487_30 (sequence is synthesized)
tgcataccactgcactccagcctgtgtgaaagagccagaccctgtctcaaaaaaatgataaaacccaaaactttgcccttgtga

SEQ ID NO: 275145 - DNA, 120 bp, Artificial Sequence
  ENSG00000128487_31 (sequence is synthesized)
ccagcctgtgtgaaagagccagaccctgtctcaaaaaaatgataaaacccaaaactttgcccttgtgaaccctcccttcccccctccccccccaaaaaaaaacaacaaaacacaaaaaat

SEQ ID NO: 275146 - DNA, 120 bp, Artificial Sequence
  ENSG00000128487_32 (sequence is synthesized)
gatgcagatgagggggcggggcccacgggcgcgggagagcagcggctccgccggcagctgctgggaactggaaggcgcccggtcctttctttgactggagcggacccgccggacgcaacc

SEQ ID NO: 275147 - DNA, 120 bp, Artificial Sequence
  ENSG00000128487_33 (sequence is synthesized)
gcctcgccagccggagccagcgcgagctcggcacggtggacacccggtccgaggccggcaagccggctggtgcccgagtcggccaagcatgggcaaccactcaggacggcccgaggatcc

SEQ ID NO: 275148 - DNA, 120 bp, Artificial Sequence
  ENSG00000128487_34 (sequence is synthesized)
ccaccaaagtctgtgtgctcctgagcagctcgcggctttcacagtagggaaaccgcagtcctcgtcacctgcgcctttgtcctcccattcgtttaccctcccgttcacatccacacaggc

SEQ ID NO: 275149 - DNA, 120 bp, Artificial Sequence
  ENSG00000128487_35 (sequence is synthesized)
ttgtaccccacagaacttgacaggaggtcacatgtgtgaatggcctgtgtctgctttacagggttgagcaggctgagggtgtgtgcctctggggatgctgggctgacagcaaatcccaac

SEQ ID NO: 275150 - DNA, 120 bp, Artificial Sequence
  ENSG00000128487_36 (sequence is synthesized)
agtatttcggctctggactgatttggcctttagtgcttccccaggcctctttcatcggcatgggaaaagcccttaggggtgggcggtgagggcacatttataactaacaaagaagaatgc

SEQ ID NO: 275151 - DNA, 120 bp, Artificial Sequence
  ENSG00000128487_37 (sequence is synthesized)
agttgccccagcatcctactggtcaccttaagtggcagcagagccctccccagcggtgccccagtccctcagaagtgctcagtccggcccgagtgcccatctggtggctctgccgtgttc

SEQ ID NO: 275152 - DNA, 120 bp, Artificial Sequence
  ENSG00000128487_38 (sequence is synthesized)
ttctgggcggatctgtgtgcactacacagcgagtgagggcgtggctcacacagttgtttgagggaaatgggtaatgcccatcccttgctgttttaagtgccaaatagcgtgttagcgccc

SEQ ID NO: 275153 - DNA, 120 bp, Artificial Sequence
  ENSG00000128487_39 (sequence is synthesized)
ctccaacaaaggatcatccttccagtgagtcaccgagaatgacagtgactgccattactattcaaagtacatctctgattgctgatctgagccactggttcagagccaggttctagaggc

SEQ ID NO: 275154 - DNA, 120 bp, Artificial Sequence
  ENSG00000128487_40 (sequence is synthesized)
tgcaggtccagccccttaccattcctggagaggtaggagctcagtcccttcctccaagccagacctttgcagaggtggcaactgggctgcacgggtcagcagatccctgattctcaagcc

SEQ ID NO: 275155 - DNA, 120 bp, Artificial Sequence
  ENSG00000128487_41 (sequence is synthesized)
accttgagacaagaactccgcccccctgttagtgcatcccagctgcagctctgcatcagaacctacagtggacccttttgaaaacactcttggctgccctagttggttaacttcagaatg

SEQ ID NO: 275156 - DNA, 120 bp, Artificial Sequence
  ENSG00000128487_42 (sequence is synthesized)
tctggaatgggaccagagatgcagttcacatgttttgtaagttctttaggcgactgaagcacagctgcttggagaaccactgaggggtggacaccttcccctggcagccacaaggcaggc

SEQ ID NO: 275157 - DNA, 120 bp, Artificial Sequence
  ENSG00000128487_43 (sequence is synthesized)
agcctgcgggagctcctgagcagctgttgggcgatggtcattacatcacccatgcctttgtatttaaatgaaactcgacacatagaaccaattcaacctgaaagttactacttctgctga

SEQ ID NO: 275158 - DNA, 120 bp, Artificial Sequence
  ENSG00000128487_44 (sequence is synthesized)
ttcaggcacttgtttgaagcattttttttttattaaccctgtacttcttctttgcccaccattaaagtgggggaaagtaatatcccaagtagttgagttgagctgttggttgttagattt

SEQ ID NO: 275159 - DNA, 120 bp, Artificial Sequence
  ENSG00000128487_45 (sequence is synthesized)
aagctggaattagtccagggttttatgtggggaggcagttgctgtcttgggatacccggagtgggagtgggtgttttctgtgattggttctgttttttatttttacttatttattttgag

SEQ ID NO: 275160 - DNA, 120 bp, Artificial Sequence
  ENSG00000128487_46 (sequence is synthesized)
acttatttattttgagatggagtttcatccttattgcccaggctggagggcaatagcaccgtctcagctcactgcaacctccgccgcccgtgtttaagcgattctcctgcctcagcctcc

SEQ ID NO: 275161 - DNA, 120 bp, Artificial Sequence
  ENSG00000128487_47 (sequence is synthesized)
agtgccagtggcgcgatttcagctcactcaggagtgagccaccacacctggcctgtgattggctctattttgagtgattacgtgtaaatcatctagaaccagctctgagcaatggcgttg

SEQ ID NO: 275162 - DNA, 120 bp, Artificial Sequence
  ENSG00000128487_48 (sequence is synthesized)
cggtgtccctccctccccgctggggccataccagcccctctccactgggagcccaagttgccaatgactgtggccaaactcccccatttttgtctgtatcctgctctctttaggttaaaa

SEQ ID NO: 275163 - DNA, 120 bp, Artificial Sequence
  ENSG00000128487_49 (sequence is synthesized)
agaaggaaagaaacatgaaaggccatgtacaatttatttttacaactccaggagtttccccgactaccattttttttttttttatttgccagtggtgtgcatgtagaagaggaatgccat

SEQ ID NO: 275164 - DNA, 65 bp, Artificial Sequence
  ENSG00000128487_50 (sequence is synthesized)
tttatttgccagtggtgtgcatgtagaagaggaatgccatgtcctgtccatagaaatacacatgg

SEQ ID NO: 275165 - DNA, 120 bp, Artificial Sequence
  ENSG00000128487_51 (sequence is synthesized)
caacatggcaagacctctgactctataaaaaaatttttttttttttttttttttgagagagcgtctcacttctctgtcacccaggctagagtagtgtgatcttggcttattacaacttcc

SEQ ID NO: 275166 - DNA, 120 bp, Artificial Sequence
  ENSG00000128487_52 (sequence is synthesized)
tcttgaactcctgacctcaagtgataagcctgcctcaacctcccaaagtgctgggactacaggggtaagccaccgcgcctggcccaaaattttgttttttaattagctgggtacaatgat

SEQ ID NO: 275167 - DNA, 88 bp, Artificial Sequence
  ENSG00000128487_53 (sequence is synthesized)
gaggtgggagcaagctgtgtttgtgccactgcactctggcctgggccaaagagcaagaccctgtcacacacacacacaaaaaaaagaa

SEQ ID NO: 275168 - DNA, 120 bp, Artificial Sequence
  ENSG00000128487_54 (sequence is synthesized)
aagagcaagaccctgtcacacacacacacaaaaaaaagaaatacaggtggtgttttggggaagggaaggttctgctggggtcctggaactgtgactgatggcctcaggagtccaggaata

SEQ ID NO: 275169 - DNA, 120 bp, Artificial Sequence
  ENSG00000128487_55 (sequence is synthesized)
ggccttctagcacagcagctagtagggctcccccaagccatccgctggcgtgtggaggtgcaggacctgggggaggcagtccccaacccagctaggccaaggggtagggtttttaggtct

SEQ ID NO: 275170 - DNA, 120 bp, Artificial Sequence
  ENSG00000128487_56 (sequence is synthesized)
gtttttaacagagctcagagcaccaggtgaaggtggaaagttggcaggaaaacaaggtcagcatcttattttttctatactcagcagagtgtgccattcccagtttctgtcctgaggatt

SEQ ID NO: 275171 - DNA, 120 bp, Artificial Sequence
  ENSG00000128487_57 (sequence is synthesized)
tcaaagaccacaacagccacatttctttccatcttccctcagccagtagtcatttaaaattcttcagttgttctgaagatcctttttttaatgtatcatttttacatgaaagacagctgc

SEQ ID NO: 275172 - DNA, 120 bp, Artificial Sequence
  ENSG00000128487_58 (sequence is synthesized)
aaaatgcaagccccagtagagttggagagtttttcaaggtgagaagtcgctgttctctgcattgaacatggattgaattttccttgtctgatggtaacccatggcccccgccctgcgggg

SEQ ID NO: 275173 - DNA, 120 bp, Artificial Sequence
  ENSG00000128487_59 (sequence is synthesized)
ataacattctcaggagcttctcttgtcctagccccttctcatttcaaaaatattagtcttttattttcctttttcattcagtttttgttttacagcttttgtagagaccaacccaagtag

SEQ ID NO: 275174 - DNA, 120 bp, Artificial Sequence
  ENSG00000128487_60 (sequence is synthesized)
atgcaggtgggtgttagataaaaacacacatccccaggggacaagccatccagcggtgaggaatctctgccatgttctcttccctgctgcccacaaacgttacggagactcccttagcct

SEQ ID NO: 275175 - DNA, 120 bp, Artificial Sequence
  ENSG00000128487_61 (sequence is synthesized)
ccccctcctcttccccactgaggggcagcttgtggagatggaggactcgggcccatagatgcagaccccctaccaaatctagcaatagttctcacccttccaaagctcgagtgccatttt

SEQ ID NO: 275176 - DNA, 120 bp, Artificial Sequence
  ENSG00000128487_62 (sequence is synthesized)
gagatgacctaccaatgacatgcagtaaaggacataacctcacagcctttttagaagcatttcgaatatctacagttgcctcaattcacggggcatttcactcctctgatccaggttaga

SEQ ID NO: 275177 - DNA, 120 bp, Artificial Sequence
  ENSG00000128487_63 (sequence is synthesized)
attttgctaaatctgtagcatcctgaatagcacactaatttttttttttagcacactaactttaactacattagttgagtgtagttgatacatctgtggcctcgtgtctataaagagcac

SEQ ID NO: 275178 - DNA, 120 bp, Artificial Sequence
  ENSG00000128487_64 (sequence is synthesized)
actagattgtacccagcacttttggatatgacatgctaattagatgtatttaactattcataggaaagtgtatgataaatgactgtaatatttctaataaatatattttgtttctaatta

SEQ ID NO: 275179 - DNA, 120 bp, Artificial Sequence
  ENSG00000128487_65 (sequence is synthesized)
attgctcaagcgctctctgcccggccccctccgagtgtggttttcctcccaggccagcaccaaacccagaatagagtggctgacttgctgattgaggtcggcagctcccgagaagcagga

SEQ ID NO: 275180 - DNA, 120 bp, Artificial Sequence
  ENSG00000128487_66 (sequence is synthesized)
gtgagagtggcagttagaattggttgtcacttgtgggtgttttgtaaagtgcatttctgatgttctttgaaaggacagaacatcatgggtttggtgccctgtgtcacaccctgagtccat

SEQ ID NO: 275181 - DNA, 120 bp, Artificial Sequence
  ENSG00000128487_67 (sequence is synthesized)
gccatctctagatgaaagggggaatgtgtagaggagaaattgcctctttataaagagcccagttgtctccttgtgacattctctgtttctcagagtcattgccgtcgagtctctgctttt

SEQ ID NO: 275182 - DNA, 120 bp, Artificial Sequence
  ENSG00000128487_68 (sequence is synthesized)
tgtccacattttgggatcagcttactgcatgatcaaagatgatgtttccctctttttacttttcctcagaagattgagctgtcttttatttggagaataaaatgaagttctgaaaaaaac

SEQ ID NO: 275183 - DNA, 120 bp, Artificial Sequence
  ENSG00000128487_69 (sequence is synthesized)
ctccctgttgtgccttgggggtgctgcgtggtgcagaggaccgagaagcccttcgccctcggcgtccgccgcgctcccgccccttcctggccggggtgacaggggaagggctagggctgc

SEQ ID NO: 275184 - DNA, 120 bp, Artificial Sequence
  ENSG00000128487_70 (sequence is synthesized)
gtttcccggtggtgcggacctgcgggcgtgcggaagtaacgacctccttccccagtgcccatgcaaggaaattagtgttatgtgcttgctttttttttttttttttcctaaggaagtttg

SEQ ID NO: 275185 - DNA, 120 bp, Artificial Sequence
  ENSG00000128487_71 (sequence is synthesized)
actctgaatatcttattttgctggagctccatttgccagcacgacagacccacgaagtcaagcatgcggagtgcagccaagccctggaacccagccatcagagcagggggccacggccca

SEQ ID NO: 275186 - DNA, 60 bp, Artificial Sequence
  ENSG00000128487_72 (sequence is synthesized)
acagtggcagagcagatgcagagctgggtacagcgcaggcccgagttcttttgttttttg

SEQ ID NO: 275187 - DNA, 65 bp, Artificial Sequence
  ENSG00000128487_73 (sequence is synthesized)
caggtgataacctaaggcccaagttctactttttggtgttcatttctctgcttccttttgatcgt

SEQ ID NO: 275188 - DNA, 120 bp, Artificial Sequence
  ENSG00000128487_74 (sequence is synthesized)
ctactttttggtgttcatttctctgcttccttttgatcgtggtgtctgatcatcttggaattcacattactcaaggcaaaataggaagccatctgcgtgatgtcacattccgaagaagtc

SEQ ID NO: 275189 - DNA, 73 bp, Artificial Sequence
  ENSG00000128487_75 (sequence is synthesized)
ataggaagccatctgcgtgatgtcacattccgaagaagtcagaaggttcggcgagttggagctttactcgctc

SEQ ID NO: 275190 - DNA, 120 bp, Artificial Sequence
  ENSG00000128487_76 (sequence is synthesized)
ccaaagtgctgggattacaggcttgagaccccatgtctggccccttctgtggggtcttgattgagccccttcacttggagtctgacttcattacctcgtctgaaacaaggtgcctccaag

SEQ ID NO: 275191 - DNA, 120 bp, Artificial Sequence
  ENSG00000128487_77 (sequence is synthesized)
ggtgcctccaagctttgggttgatttccagaatcttgttgggttaaacataagtagaagtttgatcataaaggatgttattaagccggataggtaagcacggtgacaatggcaatagaaa

SEQ ID NO: 275192 - DNA, 120 bp, Artificial Sequence
  ENSG00000128487_78 (sequence is synthesized)
tctaatggaaaacgattgaatgacaactacaccaaagtttcatggatgaaactcaccccagaaacttagtgttcaaatcagagtgatacacaattcaaaatgtgattttaaacttctgga

SEQ ID NO: 275193 - DNA, 120 bp, Artificial Sequence
  ENSG00000128487_79 (sequence is synthesized)
aatatgtgtgtttgtgaagatccaaatccaattcagcaacctccatcaggcagaaaccttctgcaatcctcacatgaggaactggttcacagtgtacacagcatggagccattagtgacg

SEQ ID NO: 275194 - DNA, 120 bp, Artificial Sequence
  ENSG00000128487_80 (sequence is synthesized)
ttatccaaaggatgagacaagacaaaagttactgtctaataaaaggaaaattaggaacaggaatgctctttaaactcaggaagatcttttggggtgtcaaactggacagcacagaatcat

SEQ ID NO: 275195 - DNA, 120 bp, Artificial Sequence
  ENSG00000128487_81 (sequence is synthesized)
tagaaaaattagcttggcgtgagaagagacattgaggtcttctctgtaaaatttacttagatacttgtgaataggactgaaatttatattttgggcactctttacctcagattcagagtt

SEQ ID NO: 275196 - DNA, 120 bp, Artificial Sequence
  ENSG00000128487_82 (sequence is synthesized)
cttaggattatttaaaattcatttgctggatgttttcaagtataaacaataagaaaactgcaacttcaacttaaaaggcactgctgtatttgcaccctatattttgacctgtcgttaggt

SEQ ID NO: 275197 - DNA, 120 bp, Artificial Sequence
  ENSG00000128487_83 (sequence is synthesized)
actgttgaatatttttatctgtaagcatttatgaagtgcaaaataaacatgttattatatagaagcgtctgctgcttagttttaatcaccagctacgtttctgcagggcctttatgtcgt

SEQ ID NO: 275198 - DNA, 120 bp, Artificial Sequence
  ENSG00000128487_84 (sequence is synthesized)
tttgttctacatttttttctgaatacagtttcagaacttcaaagtcacatcaagtaactagaatttgaggtagaaaaaagctggatgtaagttgtaaataggaggttgacatggaatatg

SEQ ID NO: 275199 - DNA, 120 bp, Artificial Sequence
  ENSG00000128487_85 (sequence is synthesized)
aacagtttcattagtagaacaaaagggcatggagtaaaaatgctaattttgcataaatttttaaaactctagggtctcagaaaatatagcatggacttaaagtctagatgtgttttgttg

SEQ ID NO: 275200 - DNA, 120 bp, Artificial Sequence
  ENSG00000128487_86 (sequence is synthesized)
atatgaatagattgatgatttaatgtattggattttttcttaattatgaagtattatttaggtatactaataacaaaatggagacgtgtgaagaaaaatattaatctttcttctccctca

SEQ ID NO: 275201 - DNA, 120 bp, Artificial Sequence
  ENSG00000128487_87 (sequence is synthesized)
ctccctcagtaccacctgtgaggaaatcagtgttaacagtgtgtacatttttctttactcatgaatatgtatagggttcattttcatatttttaataaaaattggattatattcttttca

SEQ ID NO: 275202 - DNA, 120 bp, Artificial Sequence
  ENSG00000128487_88 (sequence is synthesized)
tgcacgagatagaaccagtcataccactaatggtttttttagtcctaaatatttttactgcaagatttcgttgttctaagtgttttcactgtcagatgaaggatgaaagtcgttcagggt

SEQ ID NO: 275203 - DNA, 120 bp, Artificial Sequence
  ENSG00000128487_89 (sequence is synthesized)
gcagtggggtttttccagcctaccttgtgcagctgcggttctcagcatccgcgggcggaggcctgcagccggtcagccggtgcgtcccgcccacggcgcggggccttctggcagccaaga

SEQ ID NO: 275204 - DNA, 120 bp, Artificial Sequence
  ENSG00000128487_90 (sequence is synthesized)
tatatatactataatatatgcatttattactttgataatttttttgatatagcatcatgattaagcaactttgttatgcaacagaatgtttatgccataaatcttgcaaagtatgaatta

SEQ ID NO: 275205 - DNA, 120 bp, Artificial Sequence
  ENSG00000128487_91 (sequence is synthesized)
cctaaatcttgacaaaggtaaacaaaaatttatctttgataggtgtcaatcagtaatgttagttttggtgcagttgcaacctgttgatttttttttttcttaaactgagatcaaatattg

SEQ ID NO: 275206 - DNA, 120 bp, Artificial Sequence
  ENSG00000128487_92 (sequence is synthesized)
tacacttgacttactattcttcgctttataatagtgaataatctatatgggaatatcagttgatattctttcctggcaaaagctatatattttaaattactgattccagtctctttgtct

SEQ ID NO: 275207 - DNA, 120 bp, Artificial Sequence
  ENSG00000128487_93 (sequence is synthesized)
agtgagcgcccggagccgtggccgctgggggttgcggcggcgctgagccagcggggccggcgtagcgtgcctcctgtgattgttgaagagctgtggtgtgctgctgagtggcgtgtgtat

SEQ ID NO: 275208 - DNA, 120 bp, Artificial Sequence
  ENSG00000128487_94 (sequence is synthesized)
tgagtggcgtgtgtattccatgtgaggggaagggtccaacagtcctggtcattcagactgcagttccccagagacagagttttgctatgttgctcaggctggtcttgagctcctggcctc

SEQ ID NO: 275209 - DNA, 83 bp, Artificial Sequence
  ENSG00000128487_95 (sequence is synthesized)
tcagtgagcgcccggagccgtggccgctgggggttgcggcggcgctgagccagcggggccgatgtagattccaatgatgtcat

SEQ ID NO: 275210 - DNA, 64 bp, Artificial Sequence
  ENSG00000128487_96 (sequence is synthesized)
actacaggtgcacaccaccacgcccagctgatttttgtaaaggacagacccacgaagtcaagca

SEQ ID NO: 275211 - DNA, 120 bp, Artificial Sequence
  ENSG00000128487_97 (sequence is synthesized)
gcgggtccctctcctgagcatcagtgagcgcccggagccgtggccgctgggggttgcggcggcgctgagccagcggggccggtggaaaaggattattcatacctgaaggagatatgtgat

SEQ ID NO: 275212 - DNA, 120 bp, Artificial Sequence
  ENSG00000128487_98 (sequence is synthesized)
ctgaaagtgtaggcatcaaacccagcctggtacgtatcctattttgtatccttgtgatactttaattgtatgagaaatgactttatgccatctgataaacagtttctcgtagaacattga

SEQ ID NO: 275213 - DNA, 120 bp, Artificial Sequence
  ENSG00000128487_99 (sequence is synthesized)
ggtaacgtgctgcggtcgcattccgcgctgctgaaggtttgtccttttgatgtttggaatgcgttcttattactgctcactctttgggtctgcactgtctatatgagctgcaacacacac

SEQ ID NO: 275214 - DNA, 120 bp, Artificial Sequence
  ENSG00000128487_100 (sequence is synthesized)
ctcgaaggtctgcagcttcactcctgaagctagcgagaccacgaactcaccaggaggaacgaacaactctagatgcgcccccttaagagctgtaacactcgccgcgaaggtctgcagctt

SEQ ID NO: 275215 - DNA, 83 bp, Artificial Sequence
  ENSG00000128487_101 (sequence is synthesized)
atcagaaggaacaaactccagacacaccgcctttaagaactgttacgctcaccgcgagggtccacggcttcattctccggtgt

SEQ ID NO: 275216 - DNA, 120 bp, Artificial Sequence
  ENSG00000128510_0 (sequence is synthesized)
atgactgactccccggggacatgaggtggatactgttcattggggcccttattgggtccagcatctgtggccaagaaaaattttttggggaccaagttttgaggattaatgtcagaaatg

SEQ ID NO: 275217 - DNA, 120 bp, Artificial Sequence
  ENSG00000128510_1 (sequence is synthesized)
gagacgagatcagcaaattgagtcaactagtgaattcaaacaacttgaagctcaatttctggaaatctccctcctccttcaatcggcctgtggatgtcctggtcccatctgtcagtctgc

SEQ ID NO: 275218 - DNA, 120 bp, Artificial Sequence
  ENSG00000128510_2 (sequence is synthesized)
aggcatttaaatccttcctgagatcccagggcttagagtacgcagtgacaattgaggacctgcaggcccttttagacaatgaagatgatgaaatgcaacacaatgaagggcaagaacgga

SEQ ID NO: 275219 - DNA, 120 bp, Artificial Sequence
  ENSG00000128510_3 (sequence is synthesized)
gcagtaataacttcaactacggggcttaccattccctggaagctatttaccacgagatggacaacattgccgcagactttcctgacctggcgaggagggtgaagattggacattcgtttg

SEQ ID NO: 275220 - DNA, 120 bp, Artificial Sequence
  ENSG00000128510_4 (sequence is synthesized)
aaaaccggccgatgtatgtactgaagttcagcactgggaaaggcgtgaggcggccggccgtttggctgaatgcaggcatccattcccgagagtggatctcccaggccactgcaatctgga

SEQ ID NO: 275221 - DNA, 120 bp, Artificial Sequence
  ENSG00000128510_5 (sequence is synthesized)
cggcaaggaagattgtatctgattaccagagggatccagctatcacctccatcttggagaaaatggatattttcttgttgcctgtggccaatcctgatggatatgtgtatactcaaactc

SEQ ID NO: 275222 - DNA, 120 bp, Artificial Sequence
  ENSG00000128510_6 (sequence is synthesized)
aaaaccgattatggaggaagacgcggtcccgaaatcctggaagctcctgcattggtgctgacccaaatagaaactggaacgctagttttgcaggaaagggagccagcgacaacccttgct

SEQ ID NO: 275223 - DNA, 120 bp, Artificial Sequence
  ENSG00000128510_7 (sequence is synthesized)
ccgaagtgtaccatggaccccacgccaattcggaagtggaggtgaaatcagtggtagatttcatccaaaaacatgggaatttcaagggcttcatcgacctgcacagctactcgcagctgc

SEQ ID NO: 275224 - DNA, 120 bp, Artificial Sequence
  ENSG00000128510_8 (sequence is synthesized)
tgatgtatccatatgggtactcagtcaaaaaggccccagatgccgaggaactcgacaaggtggcgaggcttgcggccaaagctctggcttctgtgtcgggcactgagtaccaagtgggtc

SEQ ID NO: 275225 - DNA, 120 bp, Artificial Sequence
  ENSG00000128510_9 (sequence is synthesized)
ccacctgcaccactgtctatccagctagcgggagcagcatcgactgggcatatgacaacggcatcaaatttgcattcacatttgagttgagagataccgggacctatggcttcctcctgc

SEQ ID NO: 275226 - DNA, 120 bp, Artificial Sequence
  ENSG00000128510_10 (sequence is synthesized)
cagctaaccagatcatccccactgcagaggagacgtggctggggctgaagaccatcatggagcatgtgcgggacaacctctactaggcgatggctctgctctgtctacatttatttgtac

SEQ ID NO: 275227 - DNA, 120 bp, Artificial Sequence
  ENSG00000128510_11 (sequence is synthesized)
aaggagctctttcctacctgtgtgagtcagagccctctgggtttgtggagcacacaggcctgcccctctccagccagctccctggagtcgtgtgtcctggcagtgtccctgcaagaactg

SEQ ID NO: 275228 - DNA, 120 bp, Artificial Sequence
  ENSG00000128510_12 (sequence is synthesized)
gttctgccagcctgctcaattttggtcctgctgtttttgatgagccttttgtctgtttctccttccaccctgctggctgggcggctgcactcagcatcaccccttcctgggtggcatgtc

SEQ ID NO: 275229 - DNA, 120 bp, Artificial Sequence
  ENSG00000128510_13 (sequence is synthesized)
tctctctacctcatttttagaaccaaagaacatctgagatgattctctaccctcatccacatctagccaagccagtgaccttgctctggtggcactgtgggagacaccacttgtctttag

SEQ ID NO: 275230 - DNA, 120 bp, Artificial Sequence
  ENSG00000128510_14 (sequence is synthesized)
gtgggtctcaaagatgatgtagaatttcctttaatttctcgcagtcttcctggaaaatattttcctttgagcagcaaatcttgtagggatatcagtgaaggtctctccctccctcctctc

SEQ ID NO: 275231 - DNA, 69 bp, Artificial Sequence
  ENSG00000128510_15 (sequence is synthesized)
ttgtagggatatcagtgaaggtctctccctccctcctctcctggatggctcgatcttggctcaccacaa

SEQ ID NO: 275232 - DNA, 120 bp, Artificial Sequence
  ENSG00000128510_16 (sequence is synthesized)
gattacaggtgtgagccactgtgccgggcccgtcccctccttttttaggcctgaatacaaagtagaagatcactttccttcactgtgctgagaatttctagatactacagttcttactcc

SEQ ID NO: 275233 - DNA, 120 bp, Artificial Sequence
  ENSG00000128510_17 (sequence is synthesized)
aatttctagatactacagttcttactcctctcttccctttgttattcagtgtgaccaggatggcgggaggggatctgtgtcactgtaggtactgtgcccaggaaggctgggtgaagtgac

SEQ ID NO: 275234 - DNA, 120 bp, Artificial Sequence
  ENSG00000128510_18 (sequence is synthesized)
catctaaattgcaggatggtgaaattatccccatctgtcctaatgggcttacctcctctttgccttttgaactcacttcaaagatctaggcctcatcttacaggtcctaaatcactcatc

SEQ ID NO: 275235 - DNA, 120 bp, Artificial Sequence
  ENSG00000128510_19 (sequence is synthesized)
cttacaggtcctaaatcactcatctggcctggataatctcactgccctggcacattcccatttgtgctgtggtgtatcctgtgtttccttgtcctggtttgtgtgtgtgtgtgtgtgtgt

SEQ ID NO: 275236 - DNA, 120 bp, Artificial Sequence
  ENSG00000128510_20 (sequence is synthesized)
gtgtgtgtgtctgtctattttgtatcctggaccacaagttcctaagtagagcaagaattcatcaaccagctgcctcttgtttcatttcacctcagcacgtaccatctgtccttttgttgt

SEQ ID NO: 275237 - DNA, 120 bp, Artificial Sequence
  ENSG00000128510_21 (sequence is synthesized)
tgttttgtttttgtttttttgcttttaccaaacatgtctgtaaatcttaacctcctgcctaggatttgtacagcatctggtgtgtgcttataagccaataaatattcaatgtgagtttca

SEQ ID NO: 275238 - DNA, 120 bp, Artificial Sequence
  ENSG00000128510_22 (sequence is synthesized)
atttcagaaatatgggagccaaatggaactgaaaatgaatggctgataatagctcacatggaggaagaagacctgggctcttgttccagctttgcccctgtgtcatcctggacaagtcca

SEQ ID NO: 275239 - DNA, 120 bp, Artificial Sequence
  ENSG00000128510_23 (sequence is synthesized)
ctctcttctctgagaccccatttcatctgtgaaatcaggactagatgatcattgcagtctctccccagctccctcatctcctgccagttctttttctgcctagttcttacttataaggga

SEQ ID NO: 275240 - DNA, 120 bp, Artificial Sequence
  ENSG00000128510_24 (sequence is synthesized)
gactgactccccggggacatgaggtggatactgttcattggggcccttattgggtccagcatctgtggccaagaaaaattttttgggcccttttagacaatgaagatgatgaaatgcaac

SEQ ID NO: 275241 - DNA, 120 bp, Artificial Sequence
  ENSG00000128510_25 (sequence is synthesized)
atactcctctctctgcaggaggagagacaactgctcaatgaggactaggagccccagggccctcctggcagaactgcaagcagcctgccctgcctgcgtgtcatctccaccctagccctc

SEQ ID NO: 275242 - DNA, 120 bp, Artificial Sequence
  ENSG00000128510_26 (sequence is synthesized)
tatgcctcctgcctcctgctcttgcataggaccaggcagccagtccagagtagaccggagtgatttgcaagttctggttttatccttttctattttatagaccaggaaatggaggcaaat

SEQ ID NO: 275243 - DNA, 120 bp, Artificial Sequence
  ENSG00000128510_27 (sequence is synthesized)
ggaagtaaagtgcagtgacttgttagaggaacaacattttgtagtagaaagggcataaataggccagggaaccacacagatttggatccaaatcctgattttgctaactactagtgctat

SEQ ID NO: 275244 - DNA, 120 bp, Artificial Sequence
  ENSG00000128510_28 (sequence is synthesized)
gaaggtcatgctgcgtggtattagccaggaatgctgatggtgccggggtgcccctgcagcatgccatgtggctgggcctggggcacgaggtgggagggttctctactaagacccagtcgg

SEQ ID NO: 275245 - DNA, 120 bp, Artificial Sequence
  ENSG00000128510_29 (sequence is synthesized)
ctggggggccttttcagattggagaagcaaatggtcaaaaccccttggtcagctcactgcggccaaattgattgcgttcctggtggtgcacaagctgatatgcagcagaggtgggcctga

SEQ ID NO: 275246 - DNA, 120 bp, Artificial Sequence
  ENSG00000128510_30 (sequence is synthesized)
gcctctgagagcagtccactccgcagaaagggagcagagcaacacccagacaaggccccatagaccctcggggacctcacgccatctccatctcctagaaaggctgctgggagggcagca

SEQ ID NO: 275247 - DNA, 120 bp, Artificial Sequence
  ENSG00000128512_0 (sequence is synthesized)
gaatcagaacaatgactgcgccgccgggtacccgggagcgcgtcggaggactgtgagcagccgccgccgggagagctgcgggcggcgcagtgtcaacgctgggctcgggagcctccagcg

SEQ ID NO: 275248 - DNA, 120 bp, Artificial Sequence
  ENSG00000128512_1 (sequence is synthesized)
cagatcctgcccagcgcccgcagcccgcgcgaagccgctgggctccggcactgcagcgctgctcggggactgtgcattgttgtgagccggagaaggggcgcggggattacaaagcctgaa

SEQ ID NO: 275249 - DNA, 120 bp, Artificial Sequence
  ENSG00000128512_2 (sequence is synthesized)
gaccccggagcccctttagccatgtggatacctacggagcacgagaaatacggcgtggttattgccagtttccgaggaaccgttccatatggcctgtcattggaaattggagatacagtt

SEQ ID NO: 275250 - DNA, 120 bp, Artificial Sequence
  ENSG00000128512_3 (sequence is synthesized)
cagatcctggagaagtgtgatggctggtacagaggatttgccttaaaaaacccaaatatcaagggtatatttccttccagctacgttcacttgaaaaatgcctgtgtaaagaacaaagga

SEQ ID NO: 275251 - DNA, 120 bp, Artificial Sequence
  ENSG00000128512_4 (sequence is synthesized)
caatttgaaatggttattcccactgaagactctgttatcacagaaatgacatcaacattaagagactggggaaccatgtggaaacaactctatgtgcgtaatgaaggcgatctcttccac

SEQ ID NO: 275252 - DNA, 120 bp, Artificial Sequence
  ENSG00000128512_5 (sequence is synthesized)
cggctgtggcacatcatgaatgaaatcctggacctgaggcggcaggtgctggtgggccacctcacccacgaccggatgaaggacgtgaagcgccacattactgcccggcttgactggggc

SEQ ID NO: 275253 - DNA, 120 bp, Artificial Sequence
  ENSG00000128512_6 (sequence is synthesized)
aatgaacaactgggactggacctggtgcctaggaaagagtacgcaatggtggatccggaagacatcagcattactgagctctaccgattgatggaacatcgacatcggaagaaagacacc

SEQ ID NO: 275254 - DNA, 120 bp, Artificial Sequence
  ENSG00000128512_7 (sequence is synthesized)
ccggtgcaggccagcagtcaccacctctttgtccagatgaagagcctcatgtgttccaacctgggagaggagctggaggtcatcttctcactctttgacagtaaagagaaccggccaatc

SEQ ID NO: 275255 - DNA, 120 bp, Artificial Sequence
  ENSG00000128512_8 (sequence is synthesized)
agtgagagatttttcttgaggctgaatagaaacgggcttcccaaagcccctgataaaccggaacgacattgctccctctttgtggatttgggcagcagtgagctaagaaaggacatttat

SEQ ID NO: 275256 - DNA, 120 bp, Artificial Sequence
  ENSG00000128512_9 (sequence is synthesized)
atcaccgtgcacattatccgaatcggtcgaatgggagcaggagaaaaaaagaatgcctgtagtgtccagtaccgacgaccctttggctgtgcagttcttagcatcgctgacctgctaaca

SEQ ID NO: 275257 - DNA, 120 bp, Artificial Sequence
  ENSG00000128512_10 (sequence is synthesized)
ggagagacaaaggatgacctcattctgaaagtatacatgtgtaacacagagagtgagtggtaccaaatccatgagaacatcatcaaaaagctgaatgcacgttataacttgactggctcc

SEQ ID NO: 275258 - DNA, 120 bp, Artificial Sequence
  ENSG00000128512_11 (sequence is synthesized)
aatgcaggtttagcagtttccttacagctattgcacggagacattgaacaaatcagaagggaatattcatcagtattttctcatggagtatccataacaaggaagctgggattttcaaat

SEQ ID NO: 275259 - DNA, 120 bp, Artificial Sequence
  ENSG00000128512_12 (sequence is synthesized)
attattatgcctggtgaaatgaggaatgatttatatatcactattgaaaggggagaatttgagaaaggagggaagagcgtggccagaaatgtggaagttacgatgttcattgtagacagt

SEQ ID NO: 275260 - DNA, 120 bp, Artificial Sequence
  ENSG00000128512_13 (sequence is synthesized)
agtggccaaaccctgaaggattttatctccttcggctctggggagccaccagccagtgagtaccactcctttgtgctttaccataacaacagtcccaggtggtctgaactgctgaaactt

SEQ ID NO: 275261 - DNA, 120 bp, Artificial Sequence
  ENSG00000128512_14 (sequence is synthesized)
cccattcctgtggataaattccggggtgcacacatccgcttcgagtttcggcattgttccacaaaggagaaaggagagaagaagttgtttgggttttcttttgtccctctgatgcaagaa

SEQ ID NO: 275262 - DNA, 120 bp, Artificial Sequence
  ENSG00000128512_15 (sequence is synthesized)
gatggtaggactcttccagatggcactcatgagctcatcgtgcataagtgtgaagaaaacacaaatcttcaggatactacccgctacctcaaacttcccttttccaagggcattttcctt

SEQ ID NO: 275263 - DNA, 120 bp, Artificial Sequence
  ENSG00000128512_16 (sequence is synthesized)
gggaataataatcaagccatgaaggccacaaaggagtccttttgtattacatcttttctctgttccacaaaactcacacaaaatggtgatatgcttgatcttttgaaatggagaacccac

SEQ ID NO: 275264 - DNA, 120 bp, Artificial Sequence
  ENSG00000128512_17 (sequence is synthesized)
ccagacaagatcactggctgtctctctaaattaaaagaaattgatggctcagagatagtaaagtttctgcaggatacactggataccttatttggaattttagatgaaaattcccaaaaa

SEQ ID NO: 275265 - DNA, 120 bp, Artificial Sequence
  ENSG00000128512_18 (sequence is synthesized)
tatgggtctaaagtgtttgattctttggttcacataataaatttgctgcaagatagcaaatttcatcattttaaacctgtaatggacacttacattgagagtcattttgctggggcactt

SEQ ID NO: 275266 - DNA, 120 bp, Artificial Sequence
  ENSG00000128512_19 (sequence is synthesized)
gcatacagagatctcatcaaagtgctcaaatggtacgtggaccggatcacagaagcagagcggcaagagcatatccaggaggtgctgaaggcacaagaatacatttttaagtatatagtt

SEQ ID NO: 275267 - DNA, 120 bp, Artificial Sequence
  ENSG00000128512_20 (sequence is synthesized)
caatctcgaaggctgttttcccttgccactggtgggcaaaacgaagaggagttccgctgctgcattcaggagcttctcatgtcagtccgtttctttctttcgcaagagagcaaagggtct

SEQ ID NO: 275268 - DNA, 120 bp, Artificial Sequence
  ENSG00000128512_21 (sequence is synthesized)
ggagcattatctcagtcacaggctgtgtttctgagctctttccctgccgtgtactcagaactgttgaagctctttgatgtccgggaagtagccaacttggtccaggacaccctgggcagt

SEQ ID NO: 275269 - DNA, 120 bp, Artificial Sequence
  ENSG00000128512_22 (sequence is synthesized)
ctgccgaccatcctgcatgtggatgattccctgcaggccatcaaactgcagtgcattggcaaaaccgtggaaagccagctttataccaacccagattcccgatacattcttctgcctgtc

SEQ ID NO: 275270 - DNA, 120 bp, Artificial Sequence
  ENSG00000128512_23 (sequence is synthesized)
gtgttacatcacctccacattcacttgcaagaacagaaggacctgatcatgtgtgcacgtatccttagcaacgtattttgtcttatcaagaaaaatagctcagaaaaatctgtgctggag

SEQ ID NO: 275271 - DNA, 120 bp, Artificial Sequence
  ENSG00000128512_24 (sequence is synthesized)
gaaatagatgtgatagtggccagcttgctggatattctgctgaggaccatattggagatcaccagccgacctcagccatccagctcagcaatgcggttccagttccaggatgtcactggg

SEQ ID NO: 275272 - DNA, 120 bp, Artificial Sequence
  ENSG00000128512_25 (sequence is synthesized)
gagtttgttgcttgtctcctgtccctattacgacaaatgacagatagacattatcaacagcttcttgatagttttaatacaaaggaagaactaagggatttcctgctgcagatatttact

SEQ ID NO: 275273 - DNA, 120 bp, Artificial Sequence
  ENSG00000128512_26 (sequence is synthesized)
gtgttccgaatattgatacgcccggagatgtttccaaaggactggactgttatgcgcttggttgctaacaatgttattattacaacagttctatacctctcagatgcacttcgtaagaac

SEQ ID NO: 275274 - DNA, 120 bp, Artificial Sequence
  ENSG00000128512_27 (sequence is synthesized)
ttcttaaatgaaaactttgattataagatctgggattcctacttttacctcgcagtcatttttataaaccagttgtgtctgcagttggagatgttcacaccttccaagaagaaaaaggtg

SEQ ID NO: 275275 - DNA, 120 bp, Artificial Sequence
  ENSG00000128512_28 (sequence is synthesized)
ttagaaaagtatggtgacatgcgggtaacaatgggttgtgaaattttcagcatgtggcaaaacctaggagagcacaagcttcattttatccctgccctgattggccccttcctagaagtg

SEQ ID NO: 275276 - DNA, 120 bp, Artificial Sequence
  ENSG00000128512_29 (sequence is synthesized)
accttgataccccagccagatcttcggaatgtcatgattccaatttttcatgatatgatggactgggagcagaggcggagtggcaactttaaacaggtggaagccaagctaattgacaaa

SEQ ID NO: 275277 - DNA, 120 bp, Artificial Sequence
  ENSG00000128512_30 (sequence is synthesized)
ctggatagcctgatgtcagaaggcaaaggtgacgaaacataccgcgagctcttcaacagtattctactaaagaaaattgagcgggaaacatggcgggaaagtggcgtttcattaattgct

SEQ ID NO: 275278 - DNA, 120 bp, Artificial Sequence
  ENSG00000128512_31 (sequence is synthesized)
actgtaactcgtctaatggagaggttgttagattacagggactgcatgaaaatgggagaggtagatggcaaaaagattggctgcacagttagccttctgaacttctataagactgaactg

SEQ ID NO: 275279 - DNA, 120 bp, Artificial Sequence
  ENSG00000128512_32 (sequence is synthesized)
aacaaggaggagatgtatatacgctacattcacaaactctatgatctgcatctcaaagcacagaactttacagaagctgcatataccctcctcttatatgacgagctactggaatggtct

SEQ ID NO: 275280 - DNA, 120 bp, Artificial Sequence
  ENSG00000128512_33 (sequence is synthesized)
gatcggcccctcagggagttcctgacctaccccatgcaaacagaatggcagcgcaaagagcacctgcacctcaccatcatccagaactttgacagaggcaaatgttgggagaatggcatt

SEQ ID NO: 275281 - DNA, 120 bp, Artificial Sequence
  ENSG00000128512_34 (sequence is synthesized)
acagaaacctgagcaagatgcggatgatggaagcctctttgtatgacaaaattatggaccagcaacgtcttgaaccagagttcttcagagttggattttatggaaaaaaatttccatttt

SEQ ID NO: 275282 - DNA, 120 bp, Artificial Sequence
  ENSG00000128512_35 (sequence is synthesized)
tcttaagaaataaggagtttgtgtgtcgagggcatgactacgagaggctggaagccttccaacagagaatgctgaacgagttcccccatgccatcgccatgcagcacgccaaccagcccg

SEQ ID NO: 275283 - DNA, 120 bp, Artificial Sequence
  ENSG00000128512_36 (sequence is synthesized)
atgagaccatcttccaggcagaagctcagtatttgcagatatatgctgtgactcccattccagagagccaggaggtcctgcagagagagggtgttccggacaacatcaaaagcttctata

SEQ ID NO: 275284 - DNA, 120 bp, Artificial Sequence
  ENSG00000128512_37 (sequence is synthesized)
aagtgaatcacatctggaaattccgctatgaccgaccatttcacaaaggcacaaaagataaagagaatgaattcaagagtctctgggtggagagaacgtcattatacttggtgcagagtt

SEQ ID NO: 275285 - DNA, 120 bp, Artificial Sequence
  ENSG00000128512_38 (sequence is synthesized)
tgcctggcatctctcgctggtttgaagtggaaaagcgtgaagtggtagaaatgagtcctctggaaaatgcaattgaagtgctagaaaataagaatcagcagctgaagactctgattagtc

SEQ ID NO: 275286 - DNA, 120 bp, Artificial Sequence
  ENSG00000128512_39 (sequence is synthesized)
agtgtcagacaagacagatgcagaatattaatcccctgactatgtgcctgaatggagttatagatgctgcagttaatggtggcgtttccaggtatcaagaggcattctttgtcaaagaat

SEQ ID NO: 275287 - DNA, 120 bp, Artificial Sequence
  ENSG00000128512_40 (sequence is synthesized)
atatcttaagtcaccctgaagatggggagaaaattgcacgattaagagagctgatgcttgagcaggcacagattctggaatttggtttggccgtgcatgagaagtttgtacctcaagata

SEQ ID NO: 275288 - DNA, 120 bp, Artificial Sequence
  ENSG00000128512_41 (sequence is synthesized)
tgagaccccttcacaaaaagctggttgaccaattctttgtgatgaagtcgagcttagggatacaggagttctctgcttgtatgcaagccagtcctgtccattttcctaatggaagccctc

SEQ ID NO: 275289 - DNA, 120 bp, Artificial Sequence
  ENSG00000128512_42 (sequence is synthesized)
gtgtgtgtagaaactcagcacctgcttctgtgagcccagatggtaccagggtaattcctagacgcagcccgttaagttacccagctgtcaaccgatattcttcctcctcactgtcctcac

SEQ ID NO: 275290 - DNA, 120 bp, Artificial Sequence
  ENSG00000128512_43 (sequence is synthesized)
aagcttctgctgaagtaagcaatattacagggcaatcagaaagctctgatgaagtctttaacatgcagccaagtccatctacctcaagcttgagttctactcactcggcttcacctaatg

SEQ ID NO: 275291 - DNA, 120 bp, Artificial Sequence
  ENSG00000128512_44 (sequence is synthesized)
tgacaagttctgctccatcgagtgccagagcttctcctttgttgtctgacaaacacaaacattcccgagaaaactcttgcctgtcaccaagagagagaccatgcagtgccatctatccaa

SEQ ID NO: 275292 - DNA, 120 bp, Artificial Sequence
  ENSG00000128512_45 (sequence is synthesized)
cacctgtggagccttcgcagaggatgctgtttaatcatattggagacggggccttgccacgcagtgacccaaatctctctgcacctgaaaaagctgtgaaccccacccctagcagctgga

SEQ ID NO: 275293 - DNA, 120 bp, Artificial Sequence
  ENSG00000128512_46 (sequence is synthesized)
gcctggacagtgggaaggaagccaagaacatgtcggatagtgggaaacttatctctccccctgtccctccaagacccacacagactgcttcaccagcaagacacacgacatcagtatccc

SEQ ID NO: 275294 - DNA, 120 bp, Artificial Sequence
  ENSG00000128512_47 (sequence is synthesized)
cctcgcctgccgggcgatctccattgaagggctctgtgcagtctttcaccccctctccagtggagtaccactcgccaggactcatctccaactcccctgtcttgtcgggcagctacagca

SEQ ID NO: 275295 - DNA, 120 bp, Artificial Sequence
  ENSG00000128512_48 (sequence is synthesized)
gtgggatttcttctctcagccggtgcagcacgtcggaaacctcaggctttgaaaatcaggtgaatgaacagtcggcccccctgccggtgccagtgccggtgcccgtgccgagctacggcg

SEQ ID NO: 275296 - DNA, 120 bp, Artificial Sequence
  ENSG00000128512_49 (sequence is synthesized)
gggaggagccagtgcgcaaggagagcaagactccgcccccgtacagcgtctacgagcggactctgcggcgccccgtcccgctacctcacagcctctccatccccgtcacgtcggagccgc

SEQ ID NO: 275297 - DNA, 120 bp, Artificial Sequence
  ENSG00000128512_50 (sequence is synthesized)
ccgcgctgccccccaagcctctggcagcgcgatccagccacctggagaatggggcccggaggactgaccccggcccgcggcccaggcccctgccccgcaaggtctctcagttataagtca

SEQ ID NO: 275298 - DNA, 120 bp, Artificial Sequence
  ENSG00000128512_51 (sequence is synthesized)
cttttctatgtacctgcgatgcattctttgcccgtttacaaaataagaagtatgatgagaagacatttagtgtaggcactttaataacttactcagctccttcgatgaatggaattaaaa

SEQ ID NO: 275299 - DNA, 120 bp, Artificial Sequence
  ENSG00000128512_52 (sequence is synthesized)
cttgcttattaaatatcatgttgcacaatattaaaagttgctgatctaaaacgccagatgttaaatgaagtatggctgaatttcattaaaacgtttctcatttggaagtggtaaatagtg

SEQ ID NO: 275300 - DNA, 120 bp, Artificial Sequence
  ENSG00000128512_53 (sequence is synthesized)
ataaagactccttttgtacctttttatgttcacttttttttatatagtttaatcttaaaaccaatacgatattgtcaaacgatacaatgtgtgacaatgttgtatcgtttttactgaata

SEQ ID NO: 275301 - DNA, 120 bp, Artificial Sequence
  ENSG00000128512_54 (sequence is synthesized)
cttgatacttggagaaagcttattaagtcagtgcacatcctaacacagtggtccttattttagaagacttctgtaaataaggcaaggtttatcagtgcagatcatcagaattaaagttca

SEQ ID NO: 275302 - DNA, 120 bp, Artificial Sequence
  ENSG00000128512_55 (sequence is synthesized)
agcaggcgagcaagacagtatacttaaggggttgcaaagcttgggactggaaattgttttgttcttgaaacaaaatacttctttaaggttgcttttgctgtttgactgctgtctacattc

SEQ ID NO: 275303 - DNA, 120 bp, Artificial Sequence
  ENSG00000128512_56 (sequence is synthesized)
gtaaaattctattttgtgaattggtagctaaatcccttactaccctgacaccgtggtatctactgtatttcttttcaaggtgcaatttgcttcagagttccaatcagctagattaagcaa

SEQ ID NO: 275304 - DNA, 120 bp, Artificial Sequence
  ENSG00000128512_57 (sequence is synthesized)
gaggctccagaagaaatgtttacttgaattttgcgcttcctttcttgatagtttcctatataaaatttgtcattgaacaagagcaaatgctgaagtattaatgaggcacaaatgactgtg

SEQ ID NO: 275305 - DNA, 120 bp, Artificial Sequence
  ENSG00000128512_58 (sequence is synthesized)
ccccattagcaagaattcaggaatcaatacagacagtattaaattaatagcttaagtgaagaaaaaaaaaacttagtgaaaatgtattagcacgattaaatggcaaaaggacttataaaa

SEQ ID NO: 275306 - DNA, 120 bp, Artificial Sequence
  ENSG00000128512_59 (sequence is synthesized)
ggcaagggcattaactttcagtcctgcacaaaataaaaaattcctcacgactctccacttttaccagtggagtttgtcttagctgacctgtcgtctttctcttgaaggaggattgctgta

SEQ ID NO: 275307 - DNA, 120 bp, Artificial Sequence
  ENSG00000128512_60 (sequence is synthesized)
gacttctctagcttgaatattgcaacatagcatcttaggtctagatagggatgctaatgccagttgtagaagtgtgaaaaaagcaccttgtatgtagtaatgtattttatatctttgttt

SEQ ID NO: 275308 - DNA, 120 bp, Artificial Sequence
  ENSG00000128512_61 (sequence is synthesized)
tttcttttactgactgtttataacactcaattgacaatagatatgaactgtattttaaatcatactgttaaatattttccctcttttgttgggaagctcattttagtttaaccatgtttg

SEQ ID NO: 275309 - DNA, 120 bp, Artificial Sequence
  ENSG00000128512_62 (sequence is synthesized)
ttttgttggtagcttacctggaaggcagtgaccacttttttatattctcttaatgaaaccattcagcaggtatatgctgttgaggctggttatagaggttttctataataaatgttcaag

SEQ ID NO: 275310 - DNA, 120 bp, Artificial Sequence
  ENSG00000128512_63 (sequence is synthesized)
tatttttgtatataactggttaattttaataagagataccattatgtgtaaaaaaaagtaaaaataaacgcaaacagttgttgatgcagtatgattgttataattatgccaaatacttta

SEQ ID NO: 275311 - DNA, 120 bp, Artificial Sequence
  ENSG00000128512_64 (sequence is synthesized)
cgtatggaaaaagaatatttgtacatatgtgcttttaacaattctgccatattgactttacaattttgaatgtcggaaaaattaatatatgttaaatatttatgtttagtgaaagtgttc

SEQ ID NO: 275312 - DNA, 120 bp, Artificial Sequence
  ENSG00000128512_65 (sequence is synthesized)
ataattgagaaaaggaacatatgcattttagctttgtatcttgcaagttttgcagtcagaaattttttgaactagcttttgcttttgataacacttcgtgtttgtaaccacattcatata

SEQ ID NO: 275313 - DNA, 120 bp, Artificial Sequence
  ENSG00000128512_66 (sequence is synthesized)
tatatacatatatatgtgaagctccatatttctgttgctttaaagaagtaaaaccttccatttaaataagatgacatgcataagataacaaagcttccttgatttccttttcctgtgtaa

SEQ ID NO: 275314 - DNA, 120 bp, Artificial Sequence
  ENSG00000128512_67 (sequence is synthesized)
tttaatagatttgttgactagtgcttgggcacattataaatcagtgttatttgctcttggagccattttttaaaaaaaattttggcagtgagcagttgaatttatcttgaatttatcatg

SEQ ID NO: 275315 - DNA, 120 bp, Artificial Sequence
  ENSG00000128512_68 (sequence is synthesized)
tgtgtgtatttctgaagcagctacatagcagaacattttaagagattctgttagcccacatgttcatgttggttgctgctgaatggtaaatattaaataaaattaccagattaatcttaa

SEQ ID NO: 275316 - DNA, 120 bp, Artificial Sequence
  ENSG00000128512_69 (sequence is synthesized)
aaggaaattatcagccctttgtttttctgtctattcactccctaactttaaaaatgctcaatgaacattctggtatgtcttcctatgctatgatagggttgtacttataactccctataa

SEQ ID NO: 275317 - DNA, 120 bp, Artificial Sequence
  ENSG00000128512_70 (sequence is synthesized)
aaaatgtattctattcttgttgaaacgaaaaagataatctgaatttgttctttggtaccaagtcttcatactcctaagttgttattgaaaactaaaaatcagccaggcacggtggctcac

SEQ ID NO: 275318 - DNA, 120 bp, Artificial Sequence
  ENSG00000128512_71 (sequence is synthesized)
ctgaaggtgataacatgctgttgataacagcagagtctaacaaagctgttgcatgctgatgcttaaactaattggttcctctacacagacagtaatgggtgatgatgtattactgacatt

SEQ ID NO: 275319 - DNA, 120 bp, Artificial Sequence
  ENSG00000128512_72 (sequence is synthesized)
tttctcaccagtagaactctgagtttctaagctgcctgttctttggatgtttctgtgagggatgatgaatgcagcattctttgaaaaattcataagggctatagaatcagaataattgat

SEQ ID NO: 275320 - DNA, 120 bp, Artificial Sequence
  ENSG00000128512_73 (sequence is synthesized)
attaaatggaagtatggcatggatatcaaatctgttatttgttttaattattttgtattggtaacataaagaagatacagattctctggagaagtttgcttatcacagtcagcatgctgt

SEQ ID NO: 275321 - DNA, 120 bp, Artificial Sequence
  ENSG00000128512_74 (sequence is synthesized)
atctttcagattttcagtaaaccattctgttattcttatcctatctggatcatatggtttaaagagacaactaaatacttagaaaccttcccattaaagtctcagagctttgagatgata

SEQ ID NO: 275322 - DNA, 120 bp, Artificial Sequence
  ENSG00000128512_75 (sequence is synthesized)
actaattttcacatatttctttttctttcgcagttctctgagtcttacctattacaattctcttttggttctctttttcagtatttagaaaagatatatggtgtatgttttggtttttat

SEQ ID NO: 275323 - DNA, 120 bp, Artificial Sequence
  ENSG00000128512_76 (sequence is synthesized)
atgataacttttcactgatgctcccatatcttggcagtgccaccctttgtgagaacccattctagacaggcatcatttagcttctcccccatcctcaccaccccctttgcttagaaggtc

SEQ ID NO: 275324 - DNA, 120 bp, Artificial Sequence
  ENSG00000128512_77 (sequence is synthesized)
cttatgcactggatcatctgtttgggtttgtaacacagagggcatgtgcagatagtcaatcgtctggtttttcttaattgaaatgttatctctctccccattgacagcttcaccagcaag

SEQ ID NO: 275325 - DNA, 120 bp, Artificial Sequence
  ENSG00000128512_78 (sequence is synthesized)
atttggtgtcagtactgagcctctctgcaccacggtagctgagagctgcaaagacagcttaggtctcacaggagggctttgtctttgtggagtgtgaaataaaggataattgcctaactc

SEQ ID NO: 275326 - DNA, 86 bp, Artificial Sequence
  ENSG00000128512_79 (sequence is synthesized)
tgagccgagagcatgtgtgtctcaaagaaaaaagaaaaaaagacatgatttgagggtctgttttaaaattatctttacttatgtac

SEQ ID NO: 275327 - DNA, 120 bp, Artificial Sequence
  ENSG00000128512_80 (sequence is synthesized)
gatttgagggtctgttttaaaattatctttacttatgtacatatcagaaagtttccaaaggtattttttttatacaagaaaaatgtagtttttagggattttagagccagtataactcct

SEQ ID NO: 275328 - DNA, 120 bp, Artificial Sequence
  ENSG00000128512_81 (sequence is synthesized)
gcaagcaaacattttatttaaacactactaatatggcatttatgatagttcagtaagactaagctgaaattttcctcaccactatctttggaaaggagacataacacttatttccaaatt

SEQ ID NO: 275329 - DNA, 120 bp, Artificial Sequence
  ENSG00000128512_82 (sequence is synthesized)
catgctttgaacatacttgtacagataacaagaaggcatattttatgccttttagacgcactcgcctgtttttgggccctaggctggaagtcattctacttatacctcaatgaaggaatg

SEQ ID NO: 275330 - DNA, 120 bp, Artificial Sequence
  ENSG00000128512_83 (sequence is synthesized)
cactgctaactggtacgaagtcacagtgtatagctgaatctaacacgaaggcattcctttggcaggagtcaaaatctcagacttttcattaattcatgcagacttctttgtcaatctaag

SEQ ID NO: 275331 - DNA, 120 bp, Artificial Sequence
  ENSG00000128512_84 (sequence is synthesized)
ttattaagattttctatattgttaaacggactttttgttgctaatttgaaaaaaagttgatgattttgtttcaaatacgtcagtgtcgtgggaagcctttaatcagggtatgataatagc

SEQ ID NO: 275332 - DNA, 120 bp, Artificial Sequence
  ENSG00000128512_85 (sequence is synthesized)
tccctgtgtgtttccagccaagtccatctacctcaagcttgagttctactcactcggcttcacctaatgtgacaagttctgctccatcgagtgccagaggtcagtgccagagtgtgggga

SEQ ID NO: 275333 - DNA, 120 bp, Artificial Sequence
  ENSG00000128512_86 (sequence is synthesized)
agactgagggtgcccagagaaccttctagtcctgggaactgtggccagctgccacacgttcaggctctcgcctccaaacaggtgcagcaccactaccatgctgatgatcctctctctcct

SEQ ID NO: 275334 - DNA, 120 bp, Artificial Sequence
  ENSG00000128512_87 (sequence is synthesized)
aaactgggctgcaagcatttgtgtttgaatcaacaaatagatagatgtctttggcagcagtaaacgctacccagccaggagtgtgaagtcatgtaactctatctagattagtcccttaga

SEQ ID NO: 275335 - DNA, 120 bp, Artificial Sequence
  ENSG00000128512_88 (sequence is synthesized)
attccaaagggttgcctgctattaaccgtagctgataatgtcactttcacaaaatttaccatggctttttccttggcacaaagaaatacgttttaacttgcctagaaatcctacttgtga

SEQ ID NO: 275336 - DNA, 120 bp, Artificial Sequence
  ENSG00000128512_89 (sequence is synthesized)
aaaaaacgcaaaacgtcataccagctgtacaaggattttcctgtagcagttgcattgcagtaaaattgcttggatgaagatgcattccactgagagaattccactatttggtccctatcc

SEQ ID NO: 275337 - DNA, 120 bp, Artificial Sequence
  ENSG00000128512_90 (sequence is synthesized)
gtctcttggaggaaattgtgcctctgaaaagccattttgtatattttgtagccattggtcagcagatgcaattaaaaacaaaacactaaaaggcattttctcaaaaccattgtttatttg

SEQ ID NO: 275338 - DNA, 120 bp, Artificial Sequence
  ENSG00000128512_91 (sequence is synthesized)
gatggtaaatgtatttagtagtcaaatacaaaagtatggcaattaaaactttatttctggaaagaatgaaaactaatgattacattattgttttttatgtttaatgggatttaacactcc

SEQ ID NO: 275339 - DNA, 120 bp, Artificial Sequence
  ENSG00000128512_92 (sequence is synthesized)
ttcagagatgcttacaggtacctgataggatccttatttttctcttttgtttttaaaagtttttcatcaatttatgttctgaagctatatgaaactttgcattattgttgttttttactt

SEQ ID NO: 275340 - DNA, 120 bp, Artificial Sequence
  ENSG00000128512_93 (sequence is synthesized)
taccccaagagcaagtggtcagtgactcaaattaattttgttataataactgttagtaagttccattgcctcttgttttcttctgtttttttttcccgaataaataacagagtgagtact

SEQ ID NO: 275341 - DNA, 120 bp, Artificial Sequence
  ENSG00000128513_0 (sequence is synthesized)
aaactcttcctagggttctttctagagtacggcagcaagttgtcagattccctagttgaatttgctttggacatcagtgtgaagcagaactgatatgccacttgaattaataaaggaagt

SEQ ID NO: 275342 - DNA, 120 bp, Artificial Sequence
  ENSG00000128513_1 (sequence is synthesized)
caatggggtgcctgaagttcagccgctgagtaaattacataaagtagatttcggatccctacagccaggttacaattatagcaagaaatatattcagggaaaactttcacttatctcttc

SEQ ID NO: 275343 - DNA, 120 bp, Artificial Sequence
  ENSG00000128513_2 (sequence is synthesized)
tttaacttatcgtggaaataaaacagctgttttgcagattggactacaaggacaccattgcagtggctagatttattgtttttttagcttcttcatctacaagcagagatggtaaacctt

SEQ ID NO: 275344 - DNA, 120 bp, Artificial Sequence
  ENSG00000128513_3 (sequence is synthesized)
gcatatttttgaaagcatttgaagacctcaaatcaactgtttatgtttatgtcaaatctttaagagatttttctacagaatcaatgtctttggttccagcaacaaattatatatatacac

SEQ ID NO: 275345 - DNA, 120 bp, Artificial Sequence
  ENSG00000128513_4 (sequence is synthesized)
ccctgaatcaacttaagggtggtacaattgtcaatgtctatggtgttgtgaagttctttaagcccccatatctaagcaaaggaactgattattgctcagttgtaactattgtggaccaga

SEQ ID NO: 275346 - DNA, 120 bp, Artificial Sequence
  ENSG00000128513_5 (sequence is synthesized)
caaatgtaaaactaacttgcctgctctttagtggaaactatgaagcccttccaataatttataaaaatggagatattgttcgctttcacaggctgaagattcaagtatataaaaaggaga

SEQ ID NO: 275347 - DNA, 120 bp, Artificial Sequence
  ENSG00000128513_6 (sequence is synthesized)
ctcagggtatcaccagctctggctttgcatctttgacgtttgagggaactttgggagcccctatcatacctcgcacttcaagcaagtattttaacttcactactgaggaccacaaaatgg

SEQ ID NO: 275348 - DNA, 120 bp, Artificial Sequence
  ENSG00000128513_7 (sequence is synthesized)
tagaagccttacgtgtttgggcatctactcatatgtcaccgtcttggacattactaaaattgtgtgatgttcagccaatgcagtattttgacctgacttgtcagctcttgggcaaagcag

SEQ ID NO: 275349 - DNA, 120 bp, Artificial Sequence
  ENSG00000128513_8 (sequence is synthesized)
aagtggacggagcatcatttcttctaaaggtatgggatggcaccaggacaccatttccatcttggagagtcttaatacaagaccttgttcttgaaggtgatttaagtcacatccatcggc

SEQ ID NO: 275350 - DNA, 120 bp, Artificial Sequence
  ENSG00000128513_9 (sequence is synthesized)
tacaaaatctgacaatagacattttagtctacgataaccatgttcatgtggcaagatctctgaaggttggaagctttcttagaatctatagccttcataccaaacttcaatcaatgaatt

SEQ ID NO: 275351 - DNA, 120 bp, Artificial Sequence
  ENSG00000128513_10 (sequence is synthesized)
cagagaatcagacaatgttaagtttagagtttcatcttcatggaggtaccagttacggtcggggaatcagggtcttgccagaaagtaactctgatgtggatcaactgaaaaaggatttag

SEQ ID NO: 275352 - DNA, 120 bp, Artificial Sequence
  ENSG00000128513_11 (sequence is synthesized)
aatctgcaaatttgacagccaatcagcattcagatgttatctgtcaatcagaacctgacgacagctttccaagctctggatcagtatcattatacgaggtagaaagatgtcaacagctat

SEQ ID NO: 275353 - DNA, 120 bp, Artificial Sequence
  ENSG00000128513_12 (sequence is synthesized)
ctgctacaatacttacagatcatcagtatttggagaggacaccactatgtgccattttgaaacaaaaagctcctcaacaataccgcatccgagcaaaattgaggtcatataagcccagaa

SEQ ID NO: 275354 - DNA, 120 bp, Artificial Sequence
  ENSG00000128513_13 (sequence is synthesized)
gactatttcagtctgttaaacttcattgccctaaatgtcatttgctgcaagaagttccacatgagggcgatttggatataatttttcaggatggtgcaactaaaaccccagatgtcaagc

SEQ ID NO: 275355 - DNA, 120 bp, Artificial Sequence
  ENSG00000128513_14 (sequence is synthesized)
tacaaaatacatcattatatgattcaaaaatctggaccactaaaaatcaaaaaggacgaaaagtagcagttcattttgtgaaaaataatggtattctcccgctttcaaatgaatgtctac

SEQ ID NO: 275356 - DNA, 120 bp, Artificial Sequence
  ENSG00000128513_15 (sequence is synthesized)
ttttgatagaaggaggtacactcagtgaaatttgcaaactctcgaacaagtttaatagtgtaattcctgtgagatctggccacgaagacctggaacttttggacctttcagcaccatttc

SEQ ID NO: 275357 - DNA, 120 bp, Artificial Sequence
  ENSG00000128513_16 (sequence is synthesized)
aaacatcgtggattccttcttctgtggcagaagcactgggtattgtacccctccaatatgtgtttgttatgacctttacacttgatgatggaacaggagtactagaagcctatctcatgg

SEQ ID NO: 275358 - DNA, 120 bp, Artificial Sequence
  ENSG00000128513_17 (sequence is synthesized)
attctgacaaattcttccagattccagcatcagaagttctgatggatgatgaccttcagaaaagtgtggatatgatcatggatatgttttgtcctccaggaataaaaattgatgcatatc

SEQ ID NO: 275359 - DNA, 120 bp, Artificial Sequence
  ENSG00000128513_18 (sequence is synthesized)
cgtggttggaatgcttcatcaagtcatacaatgtcacaaatggaacagataatcaaatttgctatcagatttttgacaccacagttgcagaagatgtaatctaatattgccatccaattt

SEQ ID NO: 275360 - DNA, 120 bp, Artificial Sequence
  ENSG00000128513_19 (sequence is synthesized)
agcatacataaaatgttgccactcaccttccctgtttgagcttcttttcctgacctgagttttgtatcagcaatgttgatgatgttagcatgggtatgggattagaaaatgtccttacct

SEQ ID NO: 275361 - DNA, 120 bp, Artificial Sequence
  ENSG00000128513_20 (sequence is synthesized)
taaatctcttggcttttactgggtgcaaggtaaataatggctatggattttgttttgctttctgttttgcttttgtacaaagagacctgcttaaacaagtactgctgagataagtgtctg

SEQ ID NO: 275362 - DNA, 120 bp, Artificial Sequence
  ENSG00000128513_21 (sequence is synthesized)
atcaagctacagtgtactttaagtagaaatggcaaagttgctttgttggggtgctgatactgatgattttaggataaattcatttctttaaacttgtaatacatggttttattgcttgtt

SEQ ID NO: 275363 - DNA, 120 bp, Artificial Sequence
  ENSG00000128513_22 (sequence is synthesized)
tctctccaggatagtagagatttctctatttcacctcaacctaataaaagtggtcagatttataatgttaatgacttaatattatccttttctaatagtctcatgtaaaatatgccgcta

SEQ ID NO: 275364 - DNA, 120 bp, Artificial Sequence
  ENSG00000128513_23 (sequence is synthesized)
gctattacaacttacaactaattgaatgagatgttaacttagtaaaatagtttgatttttacctgacagtgtttgtcaaatttaaaatcatgaatattcaattttatacaaacatttata

SEQ ID NO: 275365 - DNA, 120 bp, Artificial Sequence
  ENSG00000128513_24 (sequence is synthesized)
tatatatagatttgtgtatgttatttgccaaagacagatataaattacctggtttaatattagtgaagaataaataagtgcacacatttcaactgtttcatttatttgccctaagttgag

SEQ ID NO: 275366 - DNA, 120 bp, Artificial Sequence
  ENSG00000128513_25 (sequence is synthesized)
ctgaaaaatgatatgaggcaaagaatcgaaataggtgtggcaatgcagcagatgtttagggctgtctacatcccaggtactgtgctaagcactaaacatgtatttgatcctcacagcaac

SEQ ID NO: 275367 - DNA, 120 bp, Artificial Sequence
  ENSG00000128513_26 (sequence is synthesized)
ctatttttccgataagaaatctgaggcttgattgataagctgacttgactaagttcacacagtttgtaaaagctagagtctgtgccttaattcacataatctctattcagagcctgtact

SEQ ID NO: 275368 - DNA, 120 bp, Artificial Sequence
  ENSG00000128513_27 (sequence is synthesized)
gttaaccactcaaggattctggaacagaagctaacagttttctgcaacgagtctttgacttaaacatctgaaataacattggaaatagattataagaggagtcagtgtgtttttctatag

SEQ ID NO: 275369 - DNA, 120 bp, Artificial Sequence
  ENSG00000128513_28 (sequence is synthesized)
tttcaaaatacttttaacatcttattgtcaaaaagattggataactgactttctttgctcataataactctaaattctagttcctgagtacattaacacatcttctttacctaactacca

SEQ ID NO: 275370 - DNA, 120 bp, Artificial Sequence
  ENSG00000128513_29 (sequence is synthesized)
atgtcccccatcatcgacttatcagcttgtttgagacaatgagaaagactgattttattttcaagaatatagactcttggttcaaaacattttcaggaaaaatattttaaaaccctacag

SEQ ID NO: 275371 - DNA, 120 bp, Artificial Sequence
  ENSG00000128513_30 (sequence is synthesized)
ttgaacaggtgtgtttccgtgttgatgatgtgctcaggatacaaaggtgaaataaacattttttctgccttcaggaagccctcaatctagaagagtagaggtccaaaggtgccatatgtt

SEQ ID NO: 275372 - DNA, 120 bp, Artificial Sequence
  ENSG00000128513_31 (sequence is synthesized)
cacactgtgagcctgcaagatctccacgttaacaaaggaaaactcttcctatgaatcttcatgatgataggccatgtctcttcttatttttgttttaaataaacatccaccttatcatga

SEQ ID NO: 275373 - DNA, 120 bp, Artificial Sequence
  ENSG00000128513_32 (sequence is synthesized)
gtcagtatttcgccaaacctccaggcgccatcagtgtgtgaaccgttacgcagctggtccaccgcgggcggagaacaagcgactatgcccagggatcctgcacgcatgcgtggagctgaa

SEQ ID NO: 275374 - DNA, 120 bp, Artificial Sequence
  ENSG00000128513_33 (sequence is synthesized)
tgctccttgatttacaatgaagttacatccagtgtacccatcataagtcaaaaattttataaatacaaaatgcattaaattgcctaatagacccattctaaagtcagaagattgttccag

SEQ ID NO: 275375 - DNA, 120 bp, Artificial Sequence
  ENSG00000128513_34 (sequence is synthesized)
agagtacgggtgagtgaaatttgtaaggtttggtgtgttcatttgagtgggtgccagacgtaacgggcccgggattgaattagtttagatcaaaatttgatgtaattatcgcagagaaac

SEQ ID NO: 275376 - DNA, 120 bp, Artificial Sequence
  ENSG00000128513_35 (sequence is synthesized)
gctttcttacgagtgtttatctcgagcctgctgtgttcagcatctttcttggtgttttgggagaagcagacaggagttaagtccaagtccccgccctcacagagctcaggtggcttgggg

SEQ ID NO: 275377 - DNA, 120 bp, Artificial Sequence
  ENSG00000128513_36 (sequence is synthesized)
gaaggttggtgcgcaaacattaaaattagatatcgacactagtgagtgtccccgtcaagaggtctgtgaaataaggttgagcctacgatgcagaagttaatctcacaagttgtcagattc

SEQ ID NO: 275378 - DNA, 120 bp, Artificial Sequence
  ENSG00000128513_37 (sequence is synthesized)
cgacagctttccaaatggagtctcgcttcgtcctccaggctggagttcagtggcacggtctcggctcattgcagcctccacctcctgagttcaagcttctcctgcctcagcctcccaagt

SEQ ID NO: 275379 - DNA, 63 bp, Artificial Sequence
  ENSG00000128513_38 (sequence is synthesized)
aagcggtgggattacaggtgtgagcccccacgaccggttgattactcttttttttaatggacc

SEQ ID NO: 275380 - DNA, 120 bp, Artificial Sequence
  ENSG00000128513_39 (sequence is synthesized)
gcccccacgaccggttgattactcttttttttaatggacctctcctttcttatcagctccctttcttctgctccaatctagagtagttgtttgctaggcctgctctctatctatctatct

SEQ ID NO: 275381 - DNA, 120 bp, Artificial Sequence
  ENSG00000128513_40 (sequence is synthesized)
gggagatccattactattgtccgtactctgcttttttctgttttatggtttttcccattgtattgctggagaattacctaagaaagatactgtggaggtaaaatatctgattggccaaaa

SEQ ID NO: 275382 - DNA, 120 bp, Artificial Sequence
  ENSG00000128513_41 (sequence is synthesized)
tctggaaatgttcttcatctgtctttatgcttgattgatagttttgtcaggttttataaagttgaagtatcgaaattattccttagacttttgaagccattgatttgttgtctttttagt

SEQ ID NO: 275383 - DNA, 120 bp, Artificial Sequence
  ENSG00000128513_42 (sequence is synthesized)
aaccccagtcatgttgatagaaaagtctgatgttaatctgcttcacagtcttgcattggtaacttgttttattctctacagaagttttcagaattttaaaaaatatttggtgttccctaa

SEQ ID NO: 275384 - DNA, 120 bp, Artificial Sequence
  ENSG00000128513_43 (sequence is synthesized)
tttcacaattatgtgacttggtgtgatcatttatcctgtttgccttcaatgggcccttttaattggaagactgcatcttcatttctagtaaatgttcttcctctattcttgaacaattta

SEQ ID NO: 275385 - DNA, 120 bp, Artificial Sequence
  ENSG00000128513_44 (sequence is synthesized)
attttatggaataagattgttagctgttctttggttctgacttttttgcctggggtacagaatttaacagaaacaaagtctatgtagagtagaacagtcagtagaatatttttgtatggc

SEQ ID NO: 275386 - DNA, 120 bp, Artificial Sequence
  ENSG00000128513_45 (sequence is synthesized)
ttttcttttgctcctgtattttttacagagtatgtatttgctgtggaatgtccacaaaagtgcacaagtgctgcagttgagaacaagggcccattcttgccacatgaatttcctttaata

SEQ ID NO: 275387 - DNA, 120 bp, Artificial Sequence
  ENSG00000128513_46 (sequence is synthesized)
tgtatgttccagaaaaatttacagaaacagtctgtatacttcagtaatggtacatatgttcagtgcccctgagttttgaaccaaattgcgtaagtgaggatataacctcattgtggggaa

SEQ ID NO: 275388 - DNA, 120 bp, Artificial Sequence
  ENSG00000128513_47 (sequence is synthesized)
gcaggtgcaccatatccagatatccataaagaggatctctttctcagaaggcagagttcagaaggcccaattctttgagtttgctgtctcattcatttttttccttctattttctgtcct

SEQ ID NO: 275389 - DNA, 120 bp, Artificial Sequence
  ENSG00000128513_48 (sequence is synthesized)
tttgtcattctttttccttttgctttaagttctaggagatatcagttttttgacacctaagcataataggaaaaacaatcattatcttttactatatgagtccagaccttttaaagtttt

SEQ ID NO: 275390 - DNA, 120 bp, Artificial Sequence
  ENSG00000128513_49 (sequence is synthesized)
tgaatgtttaagtcatttttcaaatattatacagcagtgcgaataaagaggtaataaagtcattaaagattataaaaaggatataaacatagcaaagtcatttttatttcataatcccat

SEQ ID NO: 275391 - DNA, 120 bp, Artificial Sequence
  ENSG00000128513_50 (sequence is synthesized)
attttcctagttttaaagatatacaaacaaatggttctagcttattactgcttttggtttttcttcttgcacttgcatcatcaaaatacttttgaaaactttgtcgactcaaaaattttt

SEQ ID NO: 275392 - DNA, 120 bp, Artificial Sequence
  ENSG00000128513_51 (sequence is synthesized)
ttggagagagcagctgtttttgctccataattacaaagcagtttctattttagatttctgaacatcaattcaaatgattaaagattgatctttcattttgatatcacctattctttccac

SEQ ID NO: 275393 - DNA, 120 bp, Artificial Sequence
  ENSG00000128513_52 (sequence is synthesized)
tacctttatttatacatttgcctactgcatatccacttccatgccattttatgtaaattttggtatgtaaatatcatgtaagatgaaagaatgccatcacaagtcattttagcaaaatgg

SEQ ID NO: 275394 - DNA, 120 bp, Artificial Sequence
  ENSG00000128513_53 (sequence is synthesized)
aatggtcctcagtcatgtcccagaataacgtatggtgaaatcatttttgttgaatgacttactggataagaataccatatttcctctctgttttcagaaatattttgtattttctcccta

SEQ ID NO: 275395 - DNA, 120 bp, Artificial Sequence
  ENSG00000128513_54 (sequence is synthesized)
tttttagaaacatattttcatgcatcaatttttgagcttgagaaactttatataggatatcatctggagataaatagcctgagatttcacttatgtgatcaattttatcatcattagcta

SEQ ID NO: 275396 - DNA, 120 bp, Artificial Sequence
  ENSG00000128513_55 (sequence is synthesized)
aagtgctgctgttttgcatttagcttctgattcatctaataatggttaaatgacttcctccatcagtgttctcactgaccatgggcacaaattttaaaattctgaatttttaaccatgtt

SEQ ID NO: 275397 - DNA, 120 bp, Artificial Sequence
  ENSG00000128513_56 (sequence is synthesized)
ggaaaaattttgaatatcagctctgattttccacttctattggactgataggagttggcattcttttacattctatcctgagaactgtcctgagaactgaatattgctgtgcttcagatt

SEQ ID NO: 275398 - DNA, 120 bp, Artificial Sequence
  ENSG00000128513_57 (sequence is synthesized)
ggtatgtgcaaagaaacgcacatccagacaaaactttctcaatgtgaaaccattgagaaagagaaaaatcttgaaatcaactggagaaaaaaatgatgcattgttggagaacaatgatac

SEQ ID NO: 275399 - DNA, 120 bp, Artificial Sequence
  ENSG00000128513_58 (sequence is synthesized)
tccttcttctgtggcagaagcaatcagcgcagaagacttatgtgaccaaatgcataggggttttcacccacacaccaagcaggcaatccctcagcagacgccagctgggtgtcctccagt

SEQ ID NO: 275400 - DNA, 120 bp, Artificial Sequence
  ENSG00000128513_59 (sequence is synthesized)
aaatttaacaaaattgaatatatatgttaactaggttcaaatatatataagcacacgttcataaatttatcttaattacatttgaaattgtacttcagactcaagtgttaacatttaact

SEQ ID NO: 275401 - DNA, 120 bp, Artificial Sequence
  ENSG00000128513_60 (sequence is synthesized)
tttgaaattgtacttcagactcaagtgttaacatttaactatattgttggattgcattttattttgtcaatgctaagctgattgtctagttaagtaataataaaagaggctgattgctta

SEQ ID NO: 275402 - DNA, 120 bp, Artificial Sequence
  ENSG00000128513_61 (sequence is synthesized)
attttcagaaaccttagtcaaatagagggcttgaattccgtttaggtaatgggtttcttaaccattatattttattgatgctaagacacaatattttttcacattttaatagatctgaaa

SEQ ID NO: 275403 - DNA, 120 bp, Artificial Sequence
  ENSG00000128513_62 (sequence is synthesized)
tggaaatatctcttacagttgaatgtgtgtgtatatgtatgtgtgtgcacacacgcatatgcatgcacatgtccatatatttagttttgatgtagtgtccatgcagctgatattcaacca

SEQ ID NO: 275404 - DNA, 120 bp, Artificial Sequence
  ENSG00000128513_63 (sequence is synthesized)
aaccttgcttttttgaatgcttactaggcagttaagttacttatttcttcccccaaattatccagcgtttatttagtacacatttgttgagtacctactgtgcctggcactatgctagtg

SEQ ID NO: 275405 - DNA, 120 bp, Artificial Sequence
  ENSG00000128513_64 (sequence is synthesized)
ggccttgggtatacatcagggaataaagacataacccttcctttcatggagtgacacttaatagagcttaaattaattagattttatagtatatatttggttcaggaggatgcatgtcat

SEQ ID NO: 275406 - DNA, 120 bp, Artificial Sequence
  ENSG00000128519_0 (sequence is synthesized)
tctctacctggaaattggtacagagattcagagtctttgtccaggaagacactttggagtagaagaatgatacccatccaactcactgtcttcttcatgatcatctatgtgcttgagtcc

SEQ ID NO: 275407 - DNA, 120 bp, Artificial Sequence
  ENSG00000128519_1 (sequence is synthesized)
ttgacaattattgtgcagagcagcctaattgttgcagtgctgggcagagaatggctgcaagtcagaaggctgatgcctgtggacatgattctcatcagcctgggcatctctcgcttctgt

SEQ ID NO: 275408 - DNA, 120 bp, Artificial Sequence
  ENSG00000128519_2 (sequence is synthesized)
ctacagtgggcatcaatgctgaacaatttttgctcctattttaatttgaattatgtactttgcaacttaacaatcacctgggaattttttaatatccttacattctggttaaacagcttg

SEQ ID NO: 275409 - DNA, 120 bp, Artificial Sequence
  ENSG00000128519_3 (sequence is synthesized)
cttaccgtgttctactgcatcaaggtctcttctttcacccatcacatctttctctggctgaggtggagaattttgaggttgtttccctggatattactgggttctctgatgattacttgt

SEQ ID NO: 275410 - DNA, 120 bp, Artificial Sequence
  ENSG00000128519_4 (sequence is synthesized)
aaattcagttactcaccatggagcatctaccaagaaacagcactgtaactgacaaacttgaaaattttcatcagtatcagttccaggctcatacagttgcattggttattcctttcatcc

SEQ ID NO: 275411 - DNA, 120 bp, Artificial Sequence
  ENSG00000128519_5 (sequence is synthesized)
tgttcctggcctccaccatctttctcatggcatcactgaccaagcagatacaacatcatagcactggtcactgcaatccaagcatgaaagcgcgcttcactgccctgaggtcccttgccg

SEQ ID NO: 275412 - DNA, 120 bp, Artificial Sequence
  ENSG00000128519_6 (sequence is synthesized)
tcttatttattgtgtttacctcttactttctaaccatactcatcaccattataggtactctatttgataagagatgttggttatgggtctgggaagcttttgtctatgctttcatcttaa

SEQ ID NO: 275413 - DNA, 120 bp, Artificial Sequence
  ENSG00000128519_7 (sequence is synthesized)
tgcattccacttcactgatgctgagcagccctacgttgaaaaggattctaaagggaaagtgctaggcctagaggttgcctgaggcacaggataaaagactcccgagcaattgatataatt

SEQ ID NO: 275414 - DNA, 120 bp, Artificial Sequence
  ENSG00000128524_0 (sequence is synthesized)
gtttcagtggcttctggtgctctagggtgagctctgcccggctgcagggatggcggggaggggtaagctcatcgcagtgatcggagacgaggacacggtgactggtttcctgctgggcgg

SEQ ID NO: 275415 - DNA, 120 bp, Artificial Sequence
  ENSG00000128524_1 (sequence is synthesized)
cataggggagcttaacaagaaccgccatcccaatttcctggtggtggagaaggatacaaccatcaatgagatcgaagacactttccggcaatttctaaaccgggatgacattggcatcat

SEQ ID NO: 275416 - DNA, 120 bp, Artificial Sequence
  ENSG00000128524_2 (sequence is synthesized)
gatcccctccaaggagcacccatatgacgccgccaaggactccatcctgcgcagggccaggggcatgttcactgccgaagacctgcgctaggggactcctcatagccctcagcccttccc

SEQ ID NO: 275417 - DNA, 120 bp, Artificial Sequence
  ENSG00000128524_3 (sequence is synthesized)
tcgtttccaggcctctccccaggcttgccatcagccttctttactttttgagcctctgatttccaattccctgctccttcccactccattaagaggctaggtgaggcgcttctaggttgc

SEQ ID NO: 275418 - DNA, 120 bp, Artificial Sequence
  ENSG00000128524_4 (sequence is synthesized)
tggggctctgctggttaaggaacaggaagcctgaccatctccctccactacctcttccctgtgctgttacacagtgtcattgttgatgttaaattaaagtcatattcttgcttctctcca

SEQ ID NO: 275419 - DNA, 120 bp, Artificial Sequence
  ENSG00000128534_0 (sequence is synthesized)
ctttcagttctgcttgctgtcggcaccgctgcgttacccggaaccgccgggccgaacagcatgacgtccgctttggagaactacatcaaccgaactgttgccgttattacatcagatggg

SEQ ID NO: 275420 - DNA, 120 bp, Artificial Sequence
  ENSG00000128534_1 (sequence is synthesized)
agaatgattgtgggaacactgaaaggttttgaccagaccattaatttgattttggatgaaagccatgaacgagtattcagctcttcacagggggtagaacaagtggtactaggattatac

SEQ ID NO: 275421 - DNA, 120 bp, Artificial Sequence
  ENSG00000128534_2 (sequence is synthesized)
attgtaagaggtgacaacgttgcagtcattggagaaatcgatgaagaaacagattctgcgcttgatttggggaatattcgagcagaacctttaaattctgtagcacactgaggaaaaact

SEQ ID NO: 275422 - DNA, 120 bp, Artificial Sequence
  ENSG00000128534_3 (sequence is synthesized)
acatacttggacatctgtaaatctttgtacagaaactgattattctgaggatgatatatggagtttttatgagtgtgtcactggattttgactccttattgattcattgtaatatgtaaa

SEQ ID NO: 275423 - DNA, 120 bp, Artificial Sequence
  ENSG00000128534_4 (sequence is synthesized)
ttaaaatatttctacattttattgaaaaaaaaacctttttttttgcctaaatataagtttggtagcttggtttcttttttttattaaatagtgtgaaaatataatgggcattttgaaaac

SEQ ID NO: 275424 - DNA, 120 bp, Artificial Sequence
  ENSG00000128534_5 (sequence is synthesized)
ttttagaaaaaagtagtactttttgatactttagtatttatggaaactagtggaaaagagaaattagtgtgctatataaatcaggcattcaagtaacagtaatacaggatatatgtgttt

SEQ ID NO: 275425 - DNA, 120 bp, Artificial Sequence
  ENSG00000128534_6 (sequence is synthesized)
tctttccctgatgtttaggaaaatcacaggagggtaaatctttgctggagttatctgaatcattggcatttatccgattccactggtggtagtttgctagtgcttctaaaagttgctccc

SEQ ID NO: 275426 - DNA, 120 bp, Artificial Sequence
  ENSG00000128534_7 (sequence is synthesized)
tagcactgagaggtgtgggtaggtaaaaatgtgtttgcttgagaaaagcaaaaatgctaacaaggttttgatagattggcccaaaattctaacttgaatattaagaatgactaggaatgg

SEQ ID NO: 275427 - DNA, 120 bp, Artificial Sequence
  ENSG00000128534_8 (sequence is synthesized)
tagaattgacagagatgattagtaaagtctcttgatgcccaattggttaggtatgaaagtaatatgaacacattaatgttgaattttacagacagtatatttgaaaaaaattgattccat

SEQ ID NO: 275428 - DNA, 120 bp, Artificial Sequence
  ENSG00000128534_9 (sequence is synthesized)
gtagtcttcaatttttaatttttaagaattggagaatttctaatgttaaagttagtttataaatgtgagtaaataaactctaagtttgtattgaagtagtgctagctattattgtcagca

SEQ ID NO: 275429 - DNA, 120 bp, Artificial Sequence
  ENSG00000128534_10 (sequence is synthesized)
attttccatgattcattatccataaacctgatttcagaagacgtcaactcagttttttaaataattgaaagaaacaatgtaagtagtgtttagatattcaggctagtccataaaatttct

SEQ ID NO: 275430 - DNA, 120 bp, Artificial Sequence
  ENSG00000128534_11 (sequence is synthesized)
gatcaactcatgtataggcccaagtgtgtgtctttgtgatgagaagaacatagaaaaatatttacatccttgtaattgaaacaaatttaaatagtttatttgttttgtttttatgaaagt

SEQ ID NO: 275431 - DNA, 120 bp, Artificial Sequence
  ENSG00000128534_12 (sequence is synthesized)
gcttaaaaatagtagttggcaagctttttctatgaagatccagatagtcttttaggctttgaaggccatgtggtctgtcacagctactcacctctgctattgtggcctacaaataaccat

SEQ ID NO: 275432 - DNA, 120 bp, Artificial Sequence
  ENSG00000128534_13 (sequence is synthesized)
agataatacataaatgaatagtggctgtcttccagtaaaacttcatttataaaaatggaggtgggggttggattgggcttgaaggcatagttgctgacccttggcttaatacaagttcaa

SEQ ID NO: 275433 - DNA, 120 bp, Artificial Sequence
  ENSG00000128534_14 (sequence is synthesized)
taagaaaaaatgaacaatttgtataaattctggaatagatccttatagagagtttagaggtgggtttcattcatattttaaaatattttaaacttcatacttattaaacataatagcttt

SEQ ID NO: 275434 - DNA, 120 bp, Artificial Sequence
  ENSG00000128534_15 (sequence is synthesized)
ttgggggaggaaaatatcttcactcaaatcagccttataaggggagaagcactattctctagaattatttggttgatgttaagggctgtctctgggagaattagagaagttagctagtat

SEQ ID NO: 275435 - DNA, 120 bp, Artificial Sequence
  ENSG00000128534_16 (sequence is synthesized)
tggctattcataagtacttgacttgtagtataatgttttataatcaatttattaataaaatgatggaaagtgggtaaggcaaacaggcaaatttagggactgtgaatgaaatattgtagt

SEQ ID NO: 275436 - DNA, 120 bp, Artificial Sequence
  ENSG00000128534_17 (sequence is synthesized)
atatggcattttgaattggtaaagtaattccaaaaattaaataagaatacacattgttcagttgctaagaaaaatgcattctaacagtacaaatgaagtccagagtcagatcttttctca

SEQ ID NO: 275437 - DNA, 120 bp, Artificial Sequence
  ENSG00000128534_18 (sequence is synthesized)
aaatacttggcatatcaacacattacacataaacaaataaaaaccagtcctgtccctcatgataatgggtttctaatgtgatgtattcttgcaatctgaaacaccttataaagctgtatt

SEQ ID NO: 275438 - DNA, 120 bp, Artificial Sequence
  ENSG00000128534_19 (sequence is synthesized)
ttcctgattgatgttggaaaaagcattcccaaaatgtgaattattgtttttatgaatagttacagaggatgtgatgacaatatgccagataatctatgtaattctttattcctggataca

SEQ ID NO: 275439 - DNA, 120 bp, Artificial Sequence
  ENSG00000128534_20 (sequence is synthesized)
agcacatggtggactgttttctcacaaccgattaaaattggatttatttttgcatgagaattgtaagggagccacaaccatgagtagtaacataattaatatacagtgtcaatattttat

SEQ ID NO: 275440 - DNA, 120 bp, Artificial Sequence
  ENSG00000128534_21 (sequence is synthesized)
atttaatgagacatttattctataatcagttcttatttataaagaggcgcaaatcaatttcaacctgtaattacctctgtgctttgtgactcaggcacaatctaaacccagcttaatgaa

SEQ ID NO: 275441 - DNA, 120 bp, Artificial Sequence
  ENSG00000128534_22 (sequence is synthesized)
tcaaagagatgtttcttggcaagatattttcattaaagttatttggaaagggcaattaactgcaaaagggacttttttttttttaactgacaagatactatctaaactaatagtttaaaa

SEQ ID NO: 275442 - DNA, 120 bp, Artificial Sequence
  ENSG00000128534_23 (sequence is synthesized)
taacattgcttttatgtcaaagcactttggtaacttggcctcacatgctgacagttttggctaaatattacaaatcttgatcccagaagagcaagagagaaagttttactaatatttgct

SEQ ID NO: 275443 - DNA, 120 bp, Artificial Sequence
  ENSG00000128534_24 (sequence is synthesized)
taaacatcctgtttaacaactttataacatccttcggaatttttaaggtaataatgtgagatataagtatgataaaaacaacttttaaatggtatttaatgcaaatacagaataacgatg

SEQ ID NO: 275444 - DNA, 120 bp, Artificial Sequence
  ENSG00000128534_25 (sequence is synthesized)
tcaacattttcctcagccgtgtaacctgagattcatcatgggaatgagaaagtaaaggccctttgtaatggcatgtgaaccagacaatttagtagccagggttgtaaggcaactcttaac

SEQ ID NO: 275445 - DNA, 120 bp, Artificial Sequence
  ENSG00000128534_26 (sequence is synthesized)
tgacaatatagttagtatattctgggccttcatcttcaaaattagtaggtagtatttattgagtgcatatcatgtgccaggcctggtgctgagtgcttacaatgatcattttatatatgg

SEQ ID NO: 275446 - DNA, 120 bp, Artificial Sequence
  ENSG00000128534_27 (sequence is synthesized)
gaaaattgaggctcagcagggtcaagtgacttgtaagaggtagcactagtaagtaacagtgctcaaattcaactaggtctttcagctttttatacaatactgcctgttatcagaaagtat

SEQ ID NO: 275447 - DNA, 120 bp, Artificial Sequence
  ENSG00000128534_28 (sequence is synthesized)
agtcttaaaatctgctatcaagcatctatcagaagcctgatgagaaatattcagatgatctaacgcagttcccaaacctgcattgtgggccgttttcattacaattacctaaggtgcttt

SEQ ID NO: 275448 - DNA, 120 bp, Artificial Sequence
  ENSG00000128534_29 (sequence is synthesized)
aaaaattttcttgggccctactcgttgtggttcagcagctgtgtaatggagcaaaaaggaatagtcactaaacagcgaaggaaagtggtggaattattaaaagacctagcacttacctgc

SEQ ID NO: 275449 - DNA, 120 bp, Artificial Sequence
  ENSG00000128534_30 (sequence is synthesized)
tgggatgagtctctaaccccacagaattgatttcaaacacaggatcttattcaagataaggataataacagctatcttcttgggttgtaaaaagtagcattagactgcattttaaacatt

SEQ ID NO: 275450 - DNA, 120 bp, Artificial Sequence
  ENSG00000128534_31 (sequence is synthesized)
tggtatgattttgaggacataaccgtaaacagctatttaatactattccaggtagtcaaaggccaatgtataaaagttaaaaatataggtcttgtcagctttttaagcgtctgtcccact

SEQ ID NO: 275451 - DNA, 120 bp, Artificial Sequence
  ENSG00000128534_32 (sequence is synthesized)
gactaccatatctctacaagagaatagatgaggaattgaggttatgtgggaagtacgtgtaagtttacagtattaagaaatgtacaataaaatttgtttctatgtcagcgaatattcttg

SEQ ID NO: 275452 - DNA, 120 bp, Artificial Sequence
  ENSG00000128534_33 (sequence is synthesized)
actcaaggagtttgaaagtgtaaactcaaaggtctttcacatgtaaagaggaacctctccattctgtacttgtatagtcattacctcatatagatttaattttattaaattaaattttac

SEQ ID NO: 275453 - DNA, 120 bp, Artificial Sequence
  ENSG00000128534_34 (sequence is synthesized)
ttattttgggtttaaaaaaacttgggctgtgaatctcagttttaagtcatgggcaaatttgataaaaattcctttctgtctacatgtaatactgaaaaaaatgttgataaggtaaagcta

SEQ ID NO: 275454 - DNA, 120 bp, Artificial Sequence
  ENSG00000128534_35 (sequence is synthesized)
tctccatttagattgatacccattaaatagcatagtgctcccattaaactagcgacaaattcatttaattgtgagatatctagtacttatgctccatcctgtttatagggattattgatg

SEQ ID NO: 275455 - DNA, 120 bp, Artificial Sequence
  ENSG00000128534_36 (sequence is synthesized)
tgagatttggtcagatgctttgatgtgatcttcattcctctgtatagtgggaaaccatgagacgtgcttagtcttcataaatcgatgctgcctcctagtggccattgctttcttttctac

SEQ ID NO: 275456 - DNA, 120 bp, Artificial Sequence
  ENSG00000128534_37 (sequence is synthesized)
ctgtccacaaacttcaaaaaaatagattttggaattttgtcagggacacttatcaagccattaatacatgccaggcagtatgctcaaagctgtggataggccagggaacagtattcttgt

SEQ ID NO: 275457 - DNA, 120 bp, Artificial Sequence
  ENSG00000128534_38 (sequence is synthesized)
gcttgtgaagcttctatctgtctgtatctacctcaaccaaatcatcttgactcagatttactgtcgaaggtcgtgttatttcatcagattctttcagtattctgggatataatttatggg

SEQ ID NO: 275458 - DNA, 120 bp, Artificial Sequence
  ENSG00000128534_39 (sequence is synthesized)
ttctggattcattcaaaacaactagaaacagtctttttaaaataaatataattcaagtcaattattttccccatctattttttttcttttaagattgctaagtctgtaggttgcataatt

SEQ ID NO: 275459 - DNA, 120 bp, Artificial Sequence
  ENSG00000128534_40 (sequence is synthesized)
ctaaggataaaggcgaaataggacttcaccaggagaatttctttcattagttaacagtatgccatctcctacttactggcatcatctggggaatgaaggagctgagaattgttcttccag

SEQ ID NO: 275460 - DNA, 120 bp, Artificial Sequence
  ENSG00000128534_41 (sequence is synthesized)
atacctttccgacctcttcttggttttggcattaagtttttttttaactcaatttttgtgttagttttttgttatgccttttcatttccttctttttttaatgtttctttttttttaagt

SEQ ID NO: 275461 - DNA, 69 bp, Artificial Sequence
  ENSG00000128534_42 (sequence is synthesized)
atttatttatttatttatttttgagacacttcttgctctatcctgggttcaagcgattcccctgcctta

SEQ ID NO: 275462 - DNA, 84 bp, Artificial Sequence
  ENSG00000128534_43 (sequence is synthesized)
ccacttcggcggcccagcctaagtccttttattttacagagtattacttgttagaaatggcacagatcaagcattgctacaact

SEQ ID NO: 275463 - DNA, 120 bp, Artificial Sequence
  ENSG00000128534_44 (sequence is synthesized)
tacttgttagaaatggcacagatcaagcattgctacaactggtatcaaattcccatcaatgtccctacaaggatatgatacgctttctctcttctctttagggtaatgttcaattacact

SEQ ID NO: 275464 - DNA, 120 bp, Artificial Sequence
  ENSG00000128534_45 (sequence is synthesized)
gcatatattttgctattatgtaggttttttttttttttccacatatactggctttacaaatgccatataattagtatggtaccaaattgttattacatttgaaatacgttaaaaagaatc

SEQ ID NO: 275465 - DNA, 120 bp, Artificial Sequence
  ENSG00000128534_46 (sequence is synthesized)
caggagtcagggtgggtggggagacaactccagggacacaatacattgtgtcttgtattaaaaactagtgtgtgttggggtggggaacaggcaggaaactaatatgtttctgtttgatat

SEQ ID NO: 275466 - DNA, 120 bp, Artificial Sequence
  ENSG00000128534_47 (sequence is synthesized)
atgaaaatatgcacaagctatcatgtttcatctcatatcaacaaaatgattataataaatcatactctagaaaactcattaactgatacaagttgccagaaaatgctgcactatggctta

SEQ ID NO: 275467 - DNA, 120 bp, Artificial Sequence
  ENSG00000128534_48 (sequence is synthesized)
tttcacattttaaaataaatgccctgaaagtgatcacaatgatagttaaaagttaaattttttattttaaaatttaaatttttattttaaaaaatagctctctgaatctgacttggataa

SEQ ID NO: 275468 - DNA, 120 bp, Artificial Sequence
  ENSG00000128534_49 (sequence is synthesized)
gctttattttaattgtgattctgctaattacagagacacttcaattcacactcataggaggtatgatttttaaaaggaaattgttgattagggtcttgggctagtccagtgtagcatggc

SEQ ID NO: 275469 - DNA, 120 bp, Artificial Sequence
  ENSG00000128534_50 (sequence is synthesized)
catacttagtttgcagagcttagcatattaatcttaccatgtcttagttgctatgaaaatgagtacctgcttccttgtactgtcaagattaagataagcagttagcactccctagaacat

SEQ ID NO: 275470 - DNA, 120 bp, Artificial Sequence
  ENSG00000128534_51 (sequence is synthesized)
actaatttgtcaatattaatgatagctaacaattatcctgatattgaatgatggactccaaattatttattgtggcctaggaaaagtactaagaagtaattgatagcattccctgataat

SEQ ID NO: 275471 - DNA, 120 bp, Artificial Sequence
  ENSG00000128534_52 (sequence is synthesized)
tttggtgaaaagaaaaactatgaaaattctggacaggactggaaatttattgtaaatgaaagtatgcttccctggtgcaaaggtaatgtgatgtttttaatcacatattttaaaattaaa

SEQ ID NO: 275472 - DNA, 120 bp, Artificial Sequence
  ENSG00000128534_53 (sequence is synthesized)
aatttgatcaaatttttaaaagtaacacgaggcagagaaagtacagaaaggagcaaccagagtcaaagtgattaagttataaaaaggttagatttctttggtgtgaaaagataaatgaga

SEQ ID NO: 275473 - DNA, 120 bp, Artificial Sequence
  ENSG00000128534_54 (sequence is synthesized)
aatgagaatatgccagagatctgaaatgaagaatggataagagcttgcatatttaattttgtatattaaaaccaaatattctatgaagattggaaggataattttaggtcaaatgaaatt

SEQ ID NO: 275474 - DNA, 120 bp, Artificial Sequence
  ENSG00000128534_55 (sequence is synthesized)
ctacattaaagaaagaagaataaaccttaacaactcattagtaatccttcatttcctgagtatttactgcatgacagtaacagagatgacatgcccggtaaactggtgtttgaaggcaat

SEQ ID NO: 275475 - DNA, 120 bp, Artificial Sequence
  ENSG00000128534_56 (sequence is synthesized)
atataaaagcttcccatgcatggcaaagatgcattttcctctatgcatagcaatatgggagagattggaggagaatcttcatggaaatggatgacttgtgcttgaccctaaggatagtaa

SEQ ID NO: 275476 - DNA, 120 bp, Artificial Sequence
  ENSG00000128534_57 (sequence is synthesized)
ggatttccatagatggttaggaaaacttcaaattggcagacaggaaggcaagaaggagtaagatgtggttgagtaataaggagtagactgacctctctgtacagtaaaggctcaaatcct

SEQ ID NO: 275477 - DNA, 120 bp, Artificial Sequence
  ENSG00000128534_58 (sequence is synthesized)
ttttattgcaaagaaaggacctgtccttcaccagttcctggaagaaaatctcttgagtccttgggatgtcttacctgttaagagtgcttttgtatgcctgagaccataggccttgctgtt

SEQ ID NO: 275478 - DNA, 120 bp, Artificial Sequence
  ENSG00000128534_59 (sequence is synthesized)
acagtttaagctctgggaaacgagattcaggagctaaggtcagttatgagggaactgaatatttatgtgactgaaccctcataaaaaccctgaacaccaaggctcaagagagcttattag

SEQ ID NO: 275479 - DNA, 120 bp, Artificial Sequence
  ENSG00000128534_60 (sequence is synthesized)
caatactttgcatgtgttggtaaacaccgttgctgaactaggtgctgtctgtgcagctccactgggagaggacatcttgaagtttgtgcctggtttctcctgattttcaccctgcacacc

SEQ ID NO: 275480 - DNA, 120 bp, Artificial Sequence
  ENSG00000128534_61 (sequence is synthesized)
ttttccatttactgattttaatctatatcctctcactataatctgcaactgggagcatagcagcttttctgagtcctatgattccaagtgtatcaatgaacctcagtatgatcttgggga

SEQ ID NO: 275481 - DNA, 120 bp, Artificial Sequence
  ENSG00000128534_62 (sequence is synthesized)
cccccaactcactatctaaataaaattttcattgaaaattagtgagaagggaagagatggccttcaatactagtgcaaagttaatactttattcttagagcagcaagttgattttagggg

SEQ ID NO: 275482 - DNA, 120 bp, Artificial Sequence
  ENSG00000128534_63 (sequence is synthesized)
attaaaaatctaagacgtttaagggaacatgaatttggatgcattgaacagaattggtaacctgaaggagaaactggaggcaaattgtttcaagttaggaagctattgcagtaattaaac

SEQ ID NO: 275483 - DNA, 120 bp, Artificial Sequence
  ENSG00000128534_64 (sequence is synthesized)
tgagctgacacattttcatgtcagattttcagatatgataaaggctggaagtacagagtttcaaaagatgtacataaatttatggaaaggaaattttggaatggtgattctaacctttaa

SEQ ID NO: 275484 - DNA, 120 bp, Artificial Sequence
  ENSG00000128534_65 (sequence is synthesized)
ggttggtgccatggaaggaaaacaagtaactttgcaacaatctgttcaacaatgagagttaccaaatgccagacactgctaagtgctgggaacttagatgtaaccaaagacttaaaagat

SEQ ID NO: 275485 - DNA, 120 bp, Artificial Sequence
  ENSG00000128534_66 (sequence is synthesized)
actagtctttaagacaggctttgagaaattcaagtgtagggtaaggccacctccccagcaagtaaatactgacatggtgaagatatgtattgggtgatatgagagcccataggagagaca

SEQ ID NO: 275486 - DNA, 120 bp, Artificial Sequence
  ENSG00000128534_67 (sequence is synthesized)
tctaaagtttaatagcaacactaggctggactgagtggtgaatacgttgatatagcaatttaataaatgtgttattgtcaatgtaggcattttgctcatagcttagggcaagtgataaaa

SEQ ID NO: 275487 - DNA, 120 bp, Artificial Sequence
  ENSG00000128534_68 (sequence is synthesized)
aacagagcttaacaaaggactggatgttttagtttgacagcagtgtctaaattacagattagagaactaatgactagccataccgaagacatttatctggaaatgccttccctaagtgcc

SEQ ID NO: 275488 - DNA, 120 bp, Artificial Sequence
  ENSG00000128534_69 (sequence is synthesized)
aacagagaatgaaaatatagtcaatagctttaagtgaccccatgcatcttaatgcctttcaagcaacatgtttttctgacttccaaatataaacaacctaagcattgtgcagtagccatg

SEQ ID NO: 275489 - DNA, 120 bp, Artificial Sequence
  ENSG00000128534_70 (sequence is synthesized)
agggactaggtatccaagtgcacattatattggctttgtagagccattggagggagtaatagtttcagagtcatgaaacaaatcataagtagctgctctggtgctctctagaggcagaac

SEQ ID NO: 275490 - DNA, 120 bp, Artificial Sequence
  ENSG00000128534_71 (sequence is synthesized)
ttgctgaatttgaagactattaatgatgcagctctcactggtacaagtgaaaaacctctcagccctacacagcatctttaagaaagctttaattttggtttttcagagcaatattcacat

SEQ ID NO: 275491 - DNA, 120 bp, Artificial Sequence
  ENSG00000128534_72 (sequence is synthesized)
gacatctttcggatctggaatcttaattaccattaggttggaactctacctgaactaaaaataagtggtctctatcacgttgaaattactttaatattttcatttatgtttatactattt

SEQ ID NO: 275492 - DNA, 120 bp, Artificial Sequence
  ENSG00000128534_73 (sequence is synthesized)
atttaaatgcggagaacatggctaaccattcaggaccatttaattatcaaattattaatgattcttccataataaacaagcaaactgtcatacttgttgacttatatttcattccatgga

SEQ ID NO: 275493 - DNA, 120 bp, Artificial Sequence
  ENSG00000128534_74 (sequence is synthesized)
attcaaatttaattaattgataaatcacattgtactttataagagtttattccttaagtgtttgaatttacacttttttctcctgtgacagcatctattcccaaggcaatcaacatttta

SEQ ID NO: 275494 - DNA, 120 bp, Artificial Sequence
  ENSG00000128534_75 (sequence is synthesized)
atggaacgaactgaggtttgcaattgctaatgttattctcccatcccagtttctacttgtttcttgtaaaaaaggaggtttctaaatcttgactgttgattgacaattaatgggctaaat

SEQ ID NO: 275495 - DNA, 120 bp, Artificial Sequence
  ENSG00000128534_76 (sequence is synthesized)
ttcccattagcaaacacttttcacatatacactaatattagtatctaaattatattaaaatctaatttggtagcaattgacttgaaatttgtgatacttcaacttgtgctaggttgtagt

SEQ ID NO: 275496 - DNA, 120 bp, Artificial Sequence
  ENSG00000128534_77 (sequence is synthesized)
tttgcttgtatcactcatagttactaaaaatgcaaaaggcaaatttgaaataactataaaaataaacctttaatgaactttttaatatgcaatactcaattgtaaataaccattatcttt

SEQ ID NO: 275497 - DNA, 120 bp, Artificial Sequence
  ENSG00000128534_78 (sequence is synthesized)
actgaatcagatgtttcattaactgttagcagttatttcgagttatttatatatcacagaattttgaactaaagatcatctagctgaatttcctttatattaaagaagaggagaaaatct

SEQ ID NO: 275498 - DNA, 120 bp, Artificial Sequence
  ENSG00000128534_79 (sequence is synthesized)
taatactaagtatgtgtgagcctggagctgccatggagcatgtagagagagtctcctagttgataccaactcaggaaagcagaatcaagcaataaagagacattttgggcctgatgacat

SEQ ID NO: 275499 - DNA, 120 bp, Artificial Sequence
  ENSG00000128534_80 (sequence is synthesized)
catttcagcacctggatccagcgatgcctaaagatgtgactcctagacttttcacttacatgagccaaaacggttcctttgcatcaataaatcgctctgtgatgcattttataatgtaca

SEQ ID NO: 275500 - DNA, 120 bp, Artificial Sequence
  ENSG00000128534_81 (sequence is synthesized)
accaagaatctcaatatttattattttgcattaaatatcagtaagtttgatataaaaagctcagtaaaattcattaatttgagaatgtgtctatatcatagtaaagttttaaacctacat

SEQ ID NO: 275501 - DNA, 120 bp, Artificial Sequence
  ENSG00000128534_82 (sequence is synthesized)
aattttcaatatttataccttttactgcaaaaataaaaatgagtttatccttgccctaaagctgtaaaattaaactctgtacaattctagttatttgaaatataaaataaaattattggt

SEQ ID NO: 275502 - DNA, 120 bp, Artificial Sequence
  ENSG00000128534_83 (sequence is synthesized)
catttcatgtatacatttgtggtaacactttaactttttccctgtaaggccatcttttgtatgtttctgtttccatcaagcaggcttttaatgcaactttatcttctgggtttccctagt

SEQ ID NO: 275503 - DNA, 120 bp, Artificial Sequence
  ENSG00000128534_84 (sequence is synthesized)
cataattaagggtttggccctagttcacaagtaatcttccagcacaaattttataaacaaatgccctgtgaatctgcatggcataaatcaagtctctagatcctgatcacttctatgtga

SEQ ID NO: 275504 - DNA, 120 bp, Artificial Sequence
  ENSG00000128534_85 (sequence is synthesized)
atttgtaatattctgcttttggacttgtaagaccaagagcagactccctaaacacagaggaggcagtaatttaggacagcttaaacattctggctgactgcctcatcaatgctatttaat

SEQ ID NO: 275505 - DNA, 120 bp, Artificial Sequence
  ENSG00000128534_86 (sequence is synthesized)
aacagaattctggggatgtcttgaaatagatacattggcagtttttttgtttttgtttttgcttgtgtcacacataatgctgatgaagaaaccatgaagtgtcatatgaaaggaagttac

SEQ ID NO: 275506 - DNA, 120 bp, Artificial Sequence
  ENSG00000128534_87 (sequence is synthesized)
gattattattggtgagtacatcagttagaatggtatttggctataagcactggaaactctgactgccagtggctttaacaggcaggaggagttcatttatctcgagagaaaagaacagaa

SEQ ID NO: 275507 - DNA, 120 bp, Artificial Sequence
  ENSG00000128534_88 (sequence is synthesized)
aagtgaaaagcaaggcagttcagactggggcacctactcaaagaagtgacccagtacccaggccactattttctctttgccatccttttgttctaataatttgcctgtcatctcgtgact

SEQ ID NO: 275508 - DNA, 120 bp, Artificial Sequence
  ENSG00000128534_89 (sequence is synthesized)
catattttccatctaattagaataaagaaagatgaaataggaaagtgagattatcatatgggaaaaataaatgctttcccaactataaccagcagactatactggcaaaatatactgctt

SEQ ID NO: 275509 - DNA, 120 bp, Artificial Sequence
  ENSG00000128534_90 (sequence is synthesized)
gaatgccattggccagatctttgtcatatggttaccctaactacaagggaggctaggaaggtgagggatttttttccttttatagtgacattttgccactccaaataaaaaaagggttgc

SEQ ID NO: 275510 - DNA, 120 bp, Artificial Sequence
  ENSG00000128534_91 (sequence is synthesized)
tgttaggaaaaagagaagaatggggatggggtgaacaaccaacaatgctgccattgtgctagtatagaagcaagtatctcagaggcaggtgaaaacaacttctatgcccaaacagaattc

SEQ ID NO: 275511 - DNA, 120 bp, Artificial Sequence
  ENSG00000128534_92 (sequence is synthesized)
ttttttatctctgatataaaatgcagaatatgaattttaataaattccccaggtgagtcatatgcacattaaagtttgagaagcactgatctatactgtctttctacacacttttttacc

SEQ ID NO: 275512 - DNA, 120 bp, Artificial Sequence
  ENSG00000128534_93 (sequence is synthesized)
ttactttatccttcaggattctggcgtcaagtccctccctatcagtctttaaaaactgtagccttaaatcagtagggatatagaagacatgaacaatactttcatccatcttgacctaac

SEQ ID NO: 275513 - DNA, 120 bp, Artificial Sequence
  ENSG00000128534_94 (sequence is synthesized)
tgccatttatagaacgttctatcccaagacatcagaatatatattctttttaaacatttaatgaaaggatttaactcccaaactccaaagcaagatgttctaagaagactcatttaaaaa

SEQ ID NO: 275514 - DNA, 120 bp, Artificial Sequence
  ENSG00000128534_95 (sequence is synthesized)
attaatctcaaaaaacagattttaaattgtacaggagaaatgcttatatgagaacagaattatggggcactctgaatactaatttaagaaagaaatataaaccccttttaaaactcacat

SEQ ID NO: 275515 - DNA, 120 bp, Artificial Sequence
  ENSG00000128534_96 (sequence is synthesized)
aattttcccatttcccttgaagaagatactaatatttctgatatcatataggagtaaaaattgcggggaggtcctaatatccaatattaatagagctgtgattattcaagctgtagactt

SEQ ID NO: 275516 - DNA, 120 bp, Artificial Sequence
  ENSG00000128534_97 (sequence is synthesized)
aaattttttaaatagagtaatggttgtttagtagagattaatatctaaataaggaaaatgaagaaagggactaaaaatcaagtaaataggataattgagtttcaatgggcaagaattttt

SEQ ID NO: 275517 - DNA, 120 bp, Artificial Sequence
  ENSG00000128534_98 (sequence is synthesized)
atatcatgattttaccactctgaatatcaaagtcagtgatgtctccaaaaggcaaagggaagtgtaccaatttttggagcactataaaaagtgaaaagtcatctgccagatctaacatgg

SEQ ID NO: 275518 - DNA, 120 bp, Artificial Sequence
  ENSG00000128534_99 (sequence is synthesized)
tatactctaatggaaaaatcatcaagattctcttcctttttatgattctatagtaacagtttagttgagaaaataaatcataatttgtgatttcaaacatttaatatgtgcacatgtata

SEQ ID NO: 275519 - DNA, 120 bp, Artificial Sequence
  ENSG00000128534_100 (sequence is synthesized)
ttataatatactcatcctttatatttatcatgcttttttgaataaatttgccaccttattgcatatgaagaatatctccatattcttacagctgtttttcttggttgctttctaattcct

SEQ ID NO: 275520 - DNA, 120 bp, Artificial Sequence
  ENSG00000128534_101 (sequence is synthesized)
ttcctcccttattggttacctatgaattgctcagttctaacaatgatttgtaaattttaatactatagatatattgctgttaattattacacctaaaaataaattattttacagaggcta

SEQ ID NO: 275521 - DNA, 120 bp, Artificial Sequence
  ENSG00000128534_102 (sequence is synthesized)
ggcgcgccctttcagttctgcttgctgtcggcaccgctgcgttacccggaaccgccgggccgaacagcatgacgtccgctttggagaactacatcaaccgtatcctcaagctggccgccg

SEQ ID NO: 275522 - DNA, 120 bp, Artificial Sequence
  ENSG00000128534_103 (sequence is synthesized)
cgggcgtgagccggggtcgcggagaggccgcggtcggggatcggtgggaggttgggaggcctggcctcggcgggatcctgggggcgggcgaggagatgagggccccggaacgacccagag

SEQ ID NO: 275523 - DNA, 120 bp, Artificial Sequence
  ENSG00000128534_104 (sequence is synthesized)
ttcgccggcggcgcctcgagccttcccgctgctgcgggcccaggggtcctttccattttgcctgcaaaacccaaataaaaacccagtgtgattattccgaacttttctgtcttaaaaaaa

SEQ ID NO: 275524 - DNA, 120 bp, Artificial Sequence
  ENSG00000128534_105 (sequence is synthesized)
atgtacgctcttgattcttacttactatttccctatggcataagtgttaaagtttgtgaataagatgaacagtcgtcctggcggcgacaacagttttgcaaatctttgtacttgttttat

SEQ ID NO: 275525 - DNA, 120 bp, Artificial Sequence
  ENSG00000128534_106 (sequence is synthesized)
tcacataatttgctcgttcgaggatagcaaaaagtttaacgatggttcacagactgtttctgtccctttaccacttgaagtcccaacttgttggtagaatgaaaaaaaatggttgctgtt

SEQ ID NO: 275526 - DNA, 120 bp, Artificial Sequence
  ENSG00000128534_107 (sequence is synthesized)
gtaatggattatagtgaggagcaagtaacaaccccatgggaagtcttaaaatagactttacaagtgttaccgttttaaagtcttaggacaaaaacactacgttaagctcaggtacaaact

SEQ ID NO: 275527 - DNA, 120 bp, Artificial Sequence
  ENSG00000128534_108 (sequence is synthesized)
gggtgacaaaaattaaataccgaatgcttttaatgatgcgttattggtaccctgtgacactgcttatatagtttctttacttttgaattacagaagcctgtcctggaagacagtttttta

SEQ ID NO: 275528 - DNA, 120 bp, Artificial Sequence
  ENSG00000128534_109 (sequence is synthesized)
acatgctggaaaatcgtccaacatcgattaatttagtactcatccacttttcattttagaaataaacaggcctaagaaacgaaatatcctgcctgaaataatagattggtaaccttccta

SEQ ID NO: 275529 - DNA, 120 bp, Artificial Sequence
  ENSG00000128534_110 (sequence is synthesized)
gtagaaaagtgtcaaaaatccaggatattttgagataagatacaccgatcacatacagaaagaggttttctttttctattttttcccttttttaatcatgtaattatcacaaagacaaaa

SEQ ID NO: 275530 - DNA, 75 bp, Artificial Sequence
  ENSG00000128534_111 (sequence is synthesized)
tgagtcatggctcaatgcaaccttgaactcctgagcccaagcaatcctcctgcctctgcctctgcctcctgagta

SEQ ID NO: 275531 - DNA, 120 bp, Artificial Sequence
  ENSG00000128534_112 (sequence is synthesized)
ctctgcctcctgagtagctgggactataggtcaccaggccagggtaatagagatgggggtatcgctgtgttgcccaagctggtctcacctcaagtgatcctcctgccttggcgtctaaga

SEQ ID NO: 275532 - DNA, 120 bp, Artificial Sequence
  ENSG00000128534_113 (sequence is synthesized)
atcctcctgccttggcgtctaagaaacttttaacgtttttatgtagtgaacttagtggctgtgttgaatacttatacctagttgtcatatttattctaaaaattcaaatcattcccttgc

SEQ ID NO: 275533 - DNA, 120 bp, Artificial Sequence
  ENSG00000128534_114 (sequence is synthesized)
tgtattgtccatacatagttaatagaatcttgcattcatttctttcgtaaatataccttttcttatgtttgtgtaaaataaggcatatgtatacattttatgtcagcacttctttaggtt

SEQ ID NO: 275534 - DNA, 120 bp, Artificial Sequence
  ENSG00000128534_115 (sequence is synthesized)
tcaaccaaagctgtctctctacaaattaaacttttacctgagatttgcccatttttctactagttaagtagcctgggtagagtccagaaagggctctgccttatattaaatacttcatta

SEQ ID NO: 275535 - DNA, 120 bp, Artificial Sequence
  ENSG00000128534_116 (sequence is synthesized)
gagagacttcttaaaacgttctttcaaatacccagaattttagaggaacatatttctagagtccaaggccaaagtttgaaaaatgttttgaaatctctgatttgaacaatattaattcat

SEQ ID NO: 275536 - DNA, 120 bp, Artificial Sequence
  ENSG00000128534_117 (sequence is synthesized)
gctcaataacataggtgtatttataaataagtacttactcgttattcattttcttttaattttttagtatcattgacacacttaagatgtccctgtggcctcagtttacttgggacagac

SEQ ID NO: 275537 - DNA, 85 bp, Artificial Sequence
  ENSG00000128534_118 (sequence is synthesized)
cttaagatgtccctgtggcctcagtttacttgggacagacagatataaaagttcaagagtaattggccaggcatggagtggatca

SEQ ID NO: 275538 - DNA, 88 bp, Artificial Sequence
  ENSG00000128534_119 (sequence is synthesized)
gtgagccgagatcaccctaccaattcaaaaaaaaaaaggccgggcacagtggttcaagcatgtaatcccagcactttgggaggtggag

SEQ ID NO: 275539 - DNA, 75 bp, Artificial Sequence
  ENSG00000128534_120 (sequence is synthesized)
tgcagtgagccgagatcgcagcactaaaaaagaaaagtggctaatgtggttcacgtgccgtggctcatgcctata

SEQ ID NO: 275540 - DNA, 64 bp, Artificial Sequence
  ENSG00000128534_121 (sequence is synthesized)
caacaagagcaaaactccgtgtcaaaaaataaaaaagaaaagtggctaatgtggttcacgtgcc

SEQ ID NO: 275541 - DNA, 70 bp, Artificial Sequence
  ENSG00000128534_122 (sequence is synthesized)
tcttgaacctggtagatggaggttgcagtgagccaaggttgcgcctttgcactccagcctgggcaaaaag

SEQ ID NO: 275542 - DNA, 120 bp, Artificial Sequence
  ENSG00000128534_123 (sequence is synthesized)
ctgggcaaaaagagtgaaactccatcttgaaaaaaaaaagaaaagtggctgatgtgacagaggaactgaattttaaattttatttaattgtaattaattttaatagttacatgtggccag

SEQ ID NO: 275543 - DNA, 120 bp, Artificial Sequence
  ENSG00000128534_124 (sequence is synthesized)
attaattttaatagttacatgtggccagtattagtatagttatagaggctagaagaatgccaaatcagttttctagtgagtactacactgaatcaaaatatagttggaaagaagcaaaag

SEQ ID NO: 275544 - DNA, 120 bp, Artificial Sequence
  ENSG00000128534_125 (sequence is synthesized)
aaaagtgcaggaataatttactcatttaagttgtttatgttagcatcacctttagatgaataaataatttgatctgtaatcaaaaatcaagagtttataaaatattttagagatgacttt

SEQ ID NO: 275545 - DNA, 120 bp, Artificial Sequence
  ENSG00000128534_126 (sequence is synthesized)
taggtggagttacaaggtgagctgtaagtaatgagagagagacagagcagatagggcccaggtctctggatcagaacaacactgtttatattggagctgtgcatagtaattgattttaag

SEQ ID NO: 275546 - DNA, 120 bp, Artificial Sequence
  ENSG00000128534_127 (sequence is synthesized)
gtttctcctacttaaaacaatttttttttcttgaacttcagtgaaaaaagtcttgtgctagagccagcttctactggcccatgaaagcatattgttatattttaaggaattttacaagct

SEQ ID NO: 275547 - DNA, 120 bp, Artificial Sequence
  ENSG00000128534_128 (sequence is synthesized)
ggttaattgatgtcttgttagtagcttgaaattggccgtggtgggagtgtttgcacaatggatattagtaaatgcagcaaatcagtctcccgctttttttccagagagctggtttttaaa

SEQ ID NO: 275548 - DNA, 120 bp, Artificial Sequence
  ENSG00000128534_129 (sequence is synthesized)
aatgtatcagcatttccctgcttaccatagggattttaaatgatactgaatattatcatttaaaatttaagaatatttaagagtggaattgaggcctttagtttgagaaaacttaattca

SEQ ID NO: 275549 - DNA, 120 bp, Artificial Sequence
  ENSG00000128534_130 (sequence is synthesized)
ttctgccagagtttcatatttttcatttattagatgatttaagactttatatactttaaagcaaaatttggcaaatcccttattactagtattcgtctttagaatttggccgggcacagt

SEQ ID NO: 275550 - DNA, 120 bp, Artificial Sequence
  ENSG00000128534_131 (sequence is synthesized)
cgaaactctatctcaaaaaaaaaaaaaaagaatttactctcattaaaaccaaacaaatgtaaacccaaccaatactttttaaaaataatatttcatagacatcttgtggtctgagtgata

SEQ ID NO: 275551 - DNA, 120 bp, Artificial Sequence
  ENSG00000128534_132 (sequence is synthesized)
tgtggtctgagtgataacattgaatatttccagttagagggctatgggttggttatctagcgtggtattaatgaatttaaagttatagatactatgttagtgttgaacaagaaaaaattt

SEQ ID NO: 275552 - DNA, 120 bp, Artificial Sequence
  ENSG00000128534_133 (sequence is synthesized)
tctagcttttaacctgagccaatcacgtcaaaaatgatttgttagataccaaagtacttgttcctactattatttttgtatatgaagaactggctttggatttaactgaaaacttaggaa

SEQ ID NO: 275553 - DNA, 120 bp, Artificial Sequence
  ENSG00000128534_134 (sequence is synthesized)
aacaatctaatcgctgttgtctatatcattgatttaattcatcaaagttactcaaatgattgatatttttacttgctaattattttaggagtgattttgtgaaatttatttttaatacag

SEQ ID NO: 275554 - DNA, 120 bp, Artificial Sequence
  ENSG00000128534_135 (sequence is synthesized)
tcctagaattgaattgaaatatggtttggaagtttgagggttttttactgtgtctatccttgtgtgtctgtttcctttaaagattcatgatacaatcactgtgtacaatgtgtcctttaa

SEQ ID NO: 275555 - DNA, 120 bp, Artificial Sequence
  ENSG00000128534_136 (sequence is synthesized)
tattggttcctgtaataatgtgccttcaaattatttcttgagttttgtgacttaaatatgcagttcactgactcacgccaatgttgtttgctttttaccttaattctttttactgtgctc

SEQ ID NO: 275556 - DNA, 120 bp, Artificial Sequence
  ENSG00000128534_137 (sequence is synthesized)
tctcagttttattttttggaagaatggtactcagtgctttgatttgattagtaagatttttgaaacacatgtaatttatttcagaaatgtgattgttttaactctgacttttttagtgca

SEQ ID NO: 275557 - DNA, 120 bp, Artificial Sequence
  ENSG00000128534_138 (sequence is synthesized)
tcagttctgcttgctgtcggcaccgctgcgttacccggaaccgccgggccgaacagcatgacgtccgctttggagaactacatcaaccgtatcctcaagctggccgccgcgggcttatca

SEQ ID NO: 275558 - DNA, 120 bp, Artificial Sequence
  ENSG00000128536_0 (sequence is synthesized)
gggattcaggctgtggctaatgtgctggaagcacgcacagttgtgaccatcaagtatgcaggaagcaatcattctcctggctctcctgggtgccatgtcagggggagaagcactacacct

SEQ ID NO: 275559 - DNA, 120 bp, Artificial Sequence
  ENSG00000128536_1 (sequence is synthesized)
aatcctcttacctgctacaggcaatgtggcagagaattctccacctgggacttcagtgcacaagttttctgtgaagttatcagcatcattgtcacctgtgatcccaggatttccccagat

SEQ ID NO: 275560 - DNA, 120 bp, Artificial Sequence
  ENSG00000128536_2 (sequence is synthesized)
agtcaactcaaatcccctcactgaagcttttagggtgaattggctgtcaggcacctactttgaggttgtcaccactgggatggaacaactagattttgaaacaggaccaaacatatttga

SEQ ID NO: 275561 - DNA, 120 bp, Artificial Sequence
  ENSG00000128536_3 (sequence is synthesized)
tttgcagatttatgtgaaggatgaggttggtgtcacagacctgcaagtcctgactgtccaggtaacagatgtgaacgagccacctcagtttcaaggcaacttggcagaaggtctacacct

SEQ ID NO: 275562 - DNA, 120 bp, Artificial Sequence
  ENSG00000128536_4 (sequence is synthesized)
ctacatagtagaaagagcaaaccctggattcatttaccaggttgaggccttcgatccagaagacacaagccgaaacattcccctcagttatttcctgatttctcccccaaagagcttcag

SEQ ID NO: 275563 - DNA, 120 bp, Artificial Sequence
  ENSG00000128536_5 (sequence is synthesized)
aatgtctgctaatggcaccctcttctccacaacagaattggactttgaagcaggacacagaagtttccatctcatcgtggaggtgagggacagtggaggcctcaaagcctccacagagct

SEQ ID NO: 275564 - DNA, 120 bp, Artificial Sequence
  ENSG00000128536_6 (sequence is synthesized)
ccaggtgaacatcgtgaacctcaacgacgaagtccctcgctttaccagcccgacacgagtgtacacagtcctggaggaactgagtccaggaaccatcgtggccaatatcacagcggagga

SEQ ID NO: 275565 - DNA, 120 bp, Artificial Sequence
  ENSG00000128536_7 (sequence is synthesized)
tcctgatgatgaaggttttcccagccacctcctctacagcattaccactgttagcaaatatttcatgataaatcagttgactggtacaatccaagtggcccaaaggatagaccgagatgc

SEQ ID NO: 275566 - DNA, 120 bp, Artificial Sequence
  ENSG00000128536_8 (sequence is synthesized)
aggtgaattgagacaaaatcccaccatttccctggaagttctagtgaaggacagaccatatgggggtcaggagaatcgcatccagataaccttcattgtggaagacgtcaacgacaatcc

SEQ ID NO: 275567 - DNA, 120 bp, Artificial Sequence
  ENSG00000128536_9 (sequence is synthesized)
tgccacatgccaaaagttcaccttcagcattatggtgccggaaagaacagccaaggggacgttgcttcttgacctaaacaagttctgctttgatgatgacagtgaggcaccaaacaacag

SEQ ID NO: 275568 - DNA, 120 bp, Artificial Sequence
  ENSG00000128536_10 (sequence is synthesized)
attcaacttcaccatgccatctggagtggggagcggcagcagatttttacaggatccagctggctctgggaagattgtgctgattggtgatctagactacgaaaatccaagtaacctagc

SEQ ID NO: 275569 - DNA, 120 bp, Artificial Sequence
  ENSG00000128536_11 (sequence is synthesized)
agccggcaataaatatacggtgataatccaggtgcaggatgtggcccccccttactataaaaataacgtctacgtttatatcctaacaagcccagaaaatgagtttcctctcatttttga

SEQ ID NO: 275570 - DNA, 120 bp, Artificial Sequence
  ENSG00000128536_12 (sequence is synthesized)
taggccatcctatgtatttgatgtgtcagaaagaaggcccgccagaacccgagtgggacaggtgcgagccactgataaagacctcccccagagcagcctcctgtactccatctccactgg

SEQ ID NO: 275571 - DNA, 120 bp, Artificial Sequence
  ENSG00000128536_13 (sequence is synthesized)
aggggccagcctccagtatccaaatgtattttggattaatcccaagacaggagaactccagctggtaactaaagtggactgtgaaacaacccccatctatattctcagaatccaggccac

SEQ ID NO: 275572 - DNA, 120 bp, Artificial Sequence
  ENSG00000128536_14 (sequence is synthesized)
caacaacgaagacacaagctctgtcactgttactgtgaacatccttgaagaaaatgatgaaaagccaatttgtactccaaactcttatttcctggccctcccagtggatctgaaagttgg

SEQ ID NO: 275573 - DNA, 120 bp, Artificial Sequence
  ENSG00000128536_15 (sequence is synthesized)
cacaaatattcagaatttcaagctgacatgtaccgaccttgattccagccccagatctttccgttattccattggcccaggtaacgtcaacaatcatttcaccttctctcccaatgctgg

SEQ ID NO: 275574 - DNA, 120 bp, Artificial Sequence
  ENSG00000128536_16 (sequence is synthesized)
ttccaatgtcacacgcctgctgcttacatctcgctttgactatgctggtgggtttgataagatctgggactacaagctacttgtctacgtaactgatgacaacttgatgtctgacaggaa

SEQ ID NO: 275575 - DNA, 120 bp, Artificial Sequence
  ENSG00000128536_17 (sequence is synthesized)
gaaagcggaggctcttgttgagacaggaacagtgacactgagtattaaagtcattccccacccaaccactatcatcaccacgacccccaggcccagggtcacctatcaggtcctgaggaa

SEQ ID NO: 275576 - DNA, 120 bp, Artificial Sequence
  ENSG00000128536_18 (sequence is synthesized)
aaacgtttactctccatctgcatggtacgtgccgtttgtcatcactttgggctccatattgcttctgggtctcctcgtgtacctggtcgtcctattggccaaagccatccacagacactg

SEQ ID NO: 275577 - DNA, 120 bp, Artificial Sequence
  ENSG00000128536_19 (sequence is synthesized)
cccctgcaagactgggaagaacaaggaacctctgacaaagaaaggagaaacgaagactgcagagagagacgtcgtggtggaaactatccagatgaacactatctttgatggagaagccat

SEQ ID NO: 275578 - DNA, 120 bp, Artificial Sequence
  ENSG00000128536_20 (sequence is synthesized)
agatccagtgaccggggaaacatatgaattcaactcaaaaactggagccagaaagtggaaagatccactaacccaaatgccaaaatggaaagagtccagccaccagggagctgccccacg

SEQ ID NO: 275579 - DNA, 120 bp, Artificial Sequence
  ENSG00000128536_21 (sequence is synthesized)
cagagtcactgctggggaagggatggggtcactgagaagtgccaactgggaagaagatgagctgagtggcaaagcgtgggctgaggatgctggtctgggttccagaaatgagggtggcaa

SEQ ID NO: 275580 - DNA, 120 bp, Artificial Sequence
  ENSG00000128536_22 (sequence is synthesized)
gctgggcaacccaaagaacagaaatccagccttcatgaacagggcttaccccaaaccacacccaggaaagtaaacggggtctaaggaggggcctgtcaatcactgagatgctgcctcacc

SEQ ID NO: 275581 - DNA, 120 bp, Artificial Sequence
  ENSG00000128536_23 (sequence is synthesized)
ctaaattctatggggatggtgtgggcatggtgtaggggggaaaatgtgggctgaggggattcagacatccagggtcaaacatgggatgtttgacaaatttttaaacaaatagaaaggggt

SEQ ID NO: 275582 - DNA, 120 bp, Artificial Sequence
  ENSG00000128536_24 (sequence is synthesized)
ttgatcacatagttgcgtgttctgaaatgatacaggaacattttctatcagatttcagaactacctgtgcttctgataagcaagactgttaactttggggtgtggaattgttgtgtttct

SEQ ID NO: 275583 - DNA, 120 bp, Artificial Sequence
  ENSG00000128536_25 (sequence is synthesized)
tctttgcattgactgctaggaagctctattctgttcaccatagaaagtttgtaggaattcctgacataaatagtgaagactatccttacatctggtttccaccttattttcctgccctcg

SEQ ID NO: 275584 - DNA, 120 bp, Artificial Sequence
  ENSG00000128536_26 (sequence is synthesized)
tgaaaaaaacagatgagtaagttaagagttggtcatctggaaagaagaaaactcagtaggcaccttcttttgttttttcttgtggtgtccggatcagcatcctgcatgtgagattcatcc

SEQ ID NO: 275585 - DNA, 120 bp, Artificial Sequence
  ENSG00000128536_27 (sequence is synthesized)
acgttgtcctgtctagcagtagttcagttctcttcatggttatgtctggtttcattctatgattatatcacaatttatctattctacacttgggtggcagctgcttcagattttttactt

SEQ ID NO: 275586 - DNA, 120 bp, Artificial Sequence
  ENSG00000128536_28 (sequence is synthesized)
gcagctgcttcagattttttacttttaaaaaatatacttaaaagtgaactacaggcagggcatgatggctcatgcctgtaatgccagcactttgccaaggtgggcagatcacctaaggtc

SEQ ID NO: 275587 - DNA, 70 bp, Artificial Sequence
  ENSG00000128536_29 (sequence is synthesized)
agcttggagaactgcttaaacctgagaggtggaggttacagtgagttgagattgtgccactgcactctag

SEQ ID NO: 275588 - DNA, 120 bp, Artificial Sequence
  ENSG00000128536_30 (sequence is synthesized)
cctgggtgacaaagcaagactccatctcagaaaaaaaaaataaaagtgaattacaacactatgaactttcttgtacatgtcttttggtgaacataaacactcacttttttgctcatatat

SEQ ID NO: 275589 - DNA, 120 bp, Artificial Sequence
  ENSG00000128536_31 (sequence is synthesized)
cttttggtgaacataaacactcacttttttgctcatatatctaagagtgggattgctggagcaattgctggatctgccaaagagttccaaagtggtggctctgattcacattccagcagc

SEQ ID NO: 275590 - DNA, 120 bp, Artificial Sequence
  ENSG00000128536_32 (sequence is synthesized)
aaacactgagagttgcaattgctctctatccttgccaacacttgggattgtcaatccttttaactttagccattctggttaaaattactattgaagtgaaatcactttttcctcaaagct

SEQ ID NO: 275591 - DNA, 120 bp, Artificial Sequence
  ENSG00000128536_33 (sequence is synthesized)
gaaacaccatcagccttacaacctacctgccttgctccttcccacttcctatgattggaaggaactgcaggactctgagtggggacatactggaagccccatctagacataaaactcaga

SEQ ID NO: 275592 - DNA, 120 bp, Artificial Sequence
  ENSG00000128536_34 (sequence is synthesized)
cttccacctgtaggcatgagcaatgaactgggaataaatggtattatgatggaataggaaatgtaactttccaatgtgtgcctagcagagcctgagcaagcttcactcgagctctatgcc

SEQ ID NO: 275593 - DNA, 120 bp, Artificial Sequence
  ENSG00000128536_35 (sequence is synthesized)
ctgctgcccagctgctgcgaccctagtccagtaaccctaagaaaggtccaggtgagtgttcattagggaagcactcccttcccaactggggagtcaggtgagagcctaccaggtccacaa

SEQ ID NO: 275594 - DNA, 120 bp, Artificial Sequence
  ENSG00000128536_36 (sequence is synthesized)
ggtcctgtgggagacagactggatccagcaaatgtagagcttcagagagagcagcagcttgtttactgtgtgcctagtgccagtgtcacttctcaagcaaaagaagcatttgcaaaatgc

SEQ ID NO: 275595 - DNA, 120 bp, Artificial Sequence
  ENSG00000128536_37 (sequence is synthesized)
ctgtcctggcctagattgagcgtgatttattaataagggttggttgccagggaactcccttgaatggatttaaactttgcaaaagaaggcagaactgttcatttatgcaggttaaagtga

SEQ ID NO: 275596 - DNA, 120 bp, Artificial Sequence
  ENSG00000128536_38 (sequence is synthesized)
gtgaagtggctgattgcccatttaaggcattgcaaatctgtggggcccggagtcaaatgctttccttggaagctctcagcttcaatgcaagtaaaatgaggttctgagaaggctgaaggg

SEQ ID NO: 275597 - DNA, 81 bp, Artificial Sequence
  ENSG00000128536_39 (sequence is synthesized)
ttcaatgcaagtaaaatgaggttctgagaaggctgaagggggacttaataactgcttataagcccattaagaatgattaaa

SEQ ID NO: 275598 - DNA, 120 bp, Artificial Sequence
  ENSG00000128536_40 (sequence is synthesized)
agagagtggtgagcagctggtctttcttctccagtgatgacagggcaagagggaattgtgcttaatggccagagaagagatttaagtcaggcaccaagagggacttcctgaagcctgggg

SEQ ID NO: 275599 - DNA, 120 bp, Artificial Sequence
  ENSG00000128536_41 (sequence is synthesized)
cctctctgaagagctcagtgtcttctctggtgataggcaggaagagctgagtgtcttcctagtcgcaaggcaagcctcgagaaactcaagaaataggggcaagagtgcgccaggaggaga

SEQ ID NO: 275600 - DNA, 120 bp, Artificial Sequence
  ENSG00000128536_42 (sequence is synthesized)
gaacacctgctgccccgtttcttttgtatatccggctatttggttcggggaaatccagaagtcaaagtgtcaccggtggagggtcttgactgcaagttgtccaagttcttggagttttga

SEQ ID NO: 275601 - DNA, 120 bp, Artificial Sequence
  ENSG00000128536_43 (sequence is synthesized)
acaaagaatggaacaaaatgcccagcaaagcagagaaagaatgaggcaacgaaagaatgaaagcagggatttattgaaaaccaaagtacactccacagtgtgggaacgggcctgagcaag

SEQ ID NO: 275602 - DNA, 120 bp, Artificial Sequence
  ENSG00000128536_44 (sequence is synthesized)
tgactcaagggcccagatacagtcttctcagtccaaataccccttggaggtttccccttggccacttcatgctcacctcatggaaatgaagtagtggaccacaattggtctgattggttg

SEQ ID NO: 275603 - DNA, 120 bp, Artificial Sequence
  ENSG00000128536_45 (sequence is synthesized)
caggaagcaaccaatcagagactgaagtggagttacaaaggtcacgctcctgtgcaaacatctgattggttgcaaaaagcaaccaatcagaggctaaggtgaagttacaacgttgcaacg

SEQ ID NO: 275604 - DNA, 120 bp, Artificial Sequence
  ENSG00000128536_46 (sequence is synthesized)
aagactcggctggcaatcagtctgattggttacagacagccaatttcccagcgttgaccaggttttggggggaacaaaattatctgaataaaatgaagacagcaaccgtcgtggatttgg

SEQ ID NO: 275605 - DNA, 120 bp, Artificial Sequence
  ENSG00000128536_47 (sequence is synthesized)
tgaaagttttctcccatctccctctcaaggccttaaacaggtatgagttgattatagccaatgtttacttttctcattctgattcattataaaactggggtaaatacgttcaggaattag

SEQ ID NO: 275606 - DNA, 120 bp, Artificial Sequence
  ENSG00000128536_48 (sequence is synthesized)
accacgtaacaattataattgtcgaagactttgaaactgcatagtagattgtgacattggagctttttgttgtgctcattagaaagcagggtctgaaactcagcctgtgtagcaagcacg

SEQ ID NO: 275607 - DNA, 120 bp, Artificial Sequence
  ENSG00000128536_49 (sequence is synthesized)
ggtggctcacaagcagaactgggaaatgacacttctgctccccagagccccctttcacatctggggttctcattgtttgcctttttacttaatgtattttgtaatggctgtgaaaattaa

SEQ ID NO: 275608 - DNA, 120 bp, Artificial Sequence
  ENSG00000128536_50 (sequence is synthesized)
gctacaaaatgagtgaacattgaagacaatgattgctattgaaacttaggatttctcatttcaaacttagcgtgtgtttatccttcgtattcattcaataaatatctgtggagcaactac

SEQ ID NO: 275609 - DNA, 120 bp, Artificial Sequence
  ENSG00000128536_51 (sequence is synthesized)
gagacgggattcaggctgtggctaatgtgctggaagcacgcacagttgtgaccatcaagtatgcaggaagcaatcattctcctggctctcctgggtgccatgtcaggttgtcaccactgg

SEQ ID NO: 275610 - DNA, 120 bp, Artificial Sequence
  ENSG00000128536_52 (sequence is synthesized)
agagcgaaggctgcagcgcgcccggcagccgggatgcagcggcgccgcccaagcctggggcgcaggggtcggggcacacggggataggcccgacgcggggccgaaggaagggtggtcttt

SEQ ID NO: 275611 - DNA, 120 bp, Artificial Sequence
  ENSG00000128536_53 (sequence is synthesized)
cccgcagagttgccgctggaggaccgaaagttttgcaggcagcccttgcttccagcttgtcgctctctccccgcgtccctgtcgcccaacgcgaggcgcccccgctggggtcccgacggc

SEQ ID NO: 275612 - DNA, 120 bp, Artificial Sequence
  ENSG00000128536_54 (sequence is synthesized)
ttggtggggaggagccgtgaggggttgcgccccccacccccacccgagccagggaagggaccctggtgacctcgcctcccagccctcacccccgtcacccctttcttctctttcctggag

SEQ ID NO: 275613 - DNA, 120 bp, Artificial Sequence
  ENSG00000128536_55 (sequence is synthesized)
gactttggaccatggagattctgcagttgttgctctaggagctgaaaccagtgggtagatgtcgttctgaaacgcagttcttctttttgtaaaggtgtgtcctgaggaacctcagatttg

SEQ ID NO: 275614 - DNA, 120 bp, Artificial Sequence
  ENSG00000128536_56 (sequence is synthesized)
aaagaagagtgaatggaagtcaaatgtggaaaccactcaaatgtccatcaactgatgaatgaataaacaaatcatggtatatccatacaaggaatattattcacccataaaaaggaatga

SEQ ID NO: 275615 - DNA, 120 bp, Artificial Sequence
  ENSG00000128536_57 (sequence is synthesized)
agtcttaatacacctacaactggatgaacattgaaaacattatgctatccattctgcttcagaccggaaaggagaaacagtctaaactgcatgaaagtcctggtactgctgtatctcgta

SEQ ID NO: 275616 - DNA, 120 bp, Artificial Sequence
  ENSG00000128536_58 (sequence is synthesized)
ttgggctggacattctatctctttggtggccctctgcccttctgcttctctggtatattctcaggagaattataagcatttggagaaacagctcagtagaataaatcgatgtgaactgtt

SEQ ID NO: 275617 - DNA, 120 bp, Artificial Sequence
  ENSG00000128536_59 (sequence is synthesized)
gtcaggagggaaagatgagtgagacccatcctcaccctcacagagatgcagtctggtggtctctggaagaaggaagttgtgaaacttaccgattccttgggaaaacaggcagcagagtct

SEQ ID NO: 275618 - DNA, 120 bp, Artificial Sequence
  ENSG00000128536_60 (sequence is synthesized)
gtcaagtggaggttactacacaggaccttgaagagagtctgacagcccaaatattatttccttctatttgggatgattttactccacagtacggtaaattgtgggctagaatctaaaagt

SEQ ID NO: 275619 - DNA, 120 bp, Artificial Sequence
  ENSG00000128536_61 (sequence is synthesized)
atttaattgataacagagtatgtctacattgttgcagttagttatggagtataattgtagagttgctttactctaagccttctccagtctctccattgactatagacataataatactga

SEQ ID NO: 275620 - DNA, 120 bp, Artificial Sequence
  ENSG00000128536_62 (sequence is synthesized)
cttgttgaaactataacccatctatgactgtgttggataacatgactgtcaatcaaattgcataactgagaggcagagaataaagaaagcatcgctcatcaaactactagacatttacac

SEQ ID NO: 275621 - DNA, 68 bp, Artificial Sequence
  ENSG00000128536_63 (sequence is synthesized)
tggctaattttttattttttactctaactcctgaccccaggtaatccacctacctcagcctcccaaag

SEQ ID NO: 275622 - DNA, 120 bp, Artificial Sequence
  ENSG00000128536_64 (sequence is synthesized)
aaagtgctgggattacaggtttgagccacagtgcccagcctatgattatttctttaggatgcttttctgtaaatggaattgccaagtcaaagtggatgcacatttacaattttgaaattg

SEQ ID NO: 275623 - DNA, 120 bp, Artificial Sequence
  ENSG00000128536_65 (sequence is synthesized)
attttgaaattgccaaactttgccagggtgtatgagaattcccatttcctcatggcctcataggtgctgtatggatgattctttttcatctttcagtctgaggagagaatttcatctcca

SEQ ID NO: 275624 - DNA, 120 bp, Artificial Sequence
  ENSG00000128536_66 (sequence is synthesized)
gcttgtttcagttgtatctctgcttattgatgatttgtatttcatttttttgtaaattgcctacctttcttttagagtgttcacctttctcttaatgaattgtgaaagctctttatattt

SEQ ID NO: 275625 - DNA, 120 bp, Artificial Sequence
  ENSG00000128536_67 (sequence is synthesized)
ctttgctgtgtctgcaagactgagatcgaagcctatttaggggaaataccgttgtggaggtggaattttaaggtcaatttaccacccaagaagcttaacttctgcctgttctgttctctg

SEQ ID NO: 275626 - DNA, 120 bp, Artificial Sequence
  ENSG00000128536_68 (sequence is synthesized)
acttgagggtgtcatgtcaaccttgtctcatgcaccagctgaattcagtgacactaacatcctggatcctgcagatgagagtattatgactgcactaccagggaggctgcccagggctgg

SEQ ID NO: 275627 - DNA, 120 bp, Artificial Sequence
  ENSG00000128536_69 (sequence is synthesized)
agattgctctgctccagaggtgcttggtttgcagtgtgggcggactcaacctgagcgaaagccacacaaaagcgccttgagctggagccccatgctagtgttggttccaccagtggttct

SEQ ID NO: 275628 - DNA, 89 bp, Artificial Sequence
  ENSG00000128536_70 (sequence is synthesized)
ttggttccaccagtggtttctctttttgcccaggctggcgtgcaatggtgtgatctcggcttaccacaacctccacctcccaggttcaa

SEQ ID NO: 275629 - DNA, 120 bp, Artificial Sequence
  ENSG00000128536_71 (sequence is synthesized)
ttgtgagatccatgagagcccagaaaatatcttaggatccctagtgcttagcacagagcttggcatatggagcatccacctgatttctggaaggcattgcttcactttcatagacagaag

SEQ ID NO: 275630 - DNA, 120 bp, Artificial Sequence
  ENSG00000128536_72 (sequence is synthesized)
tgcctggcgattctcactcccactgggtagctgacaaattttccctgagaagacatggtttcctccagcagcagcagaaggagtcatgggtttttctgtttcatggctcaaactgttgtg

SEQ ID NO: 275631 - DNA, 120 bp, Artificial Sequence
  ENSG00000128536_73 (sequence is synthesized)
actcggaattatactaggacagggccctgacttattcttctgggctgggctgagtaaggcctggctgagtgtagctgggtacacaggtaggggtggaatcaaagctggaggtacccataa

SEQ ID NO: 275632 - DNA, 120 bp, Artificial Sequence
  ENSG00000128536_74 (sequence is synthesized)
tgctggttaggaggataactagctagaataaggttggcaagaactgggtgagcagggataggaattaagactgaggactgggctgagggtaggtcaggggttctggcagcaacacagctg

SEQ ID NO: 275633 - DNA, 120 bp, Artificial Sequence
  ENSG00000128536_75 (sequence is synthesized)
gaatgaatggagaagcacacaaacaaaaccaagctaagaagagcctagatcaagcttgtccaacccatggcccacaggctccatgtggcccaggatggctttgaatgtggcccagcacaa

SEQ ID NO: 275634 - DNA, 120 bp, Artificial Sequence
  ENSG00000128563_0 (sequence is synthesized)
atacttgcgcgccgacgccgccgctcgcttgtgaaactggaaggctgccatggctagcccagccgcctcctcggtgcgaccaccgaggcccaagaaagagccgcagacgctcgtcatccc

SEQ ID NO: 275635 - DNA, 120 bp, Artificial Sequence
  ENSG00000128563_1 (sequence is synthesized)
caagaatgcggcggaggagcagaagctcaagctggagcggctcatgaagaacccggacaaagcagttccaattccagagaaaatgagtgaatgggcacctcgacctcccccagaatttgt

SEQ ID NO: 275636 - DNA, 120 bp, Artificial Sequence
  ENSG00000128563_2 (sequence is synthesized)
ccgagatgtcatgggttcaagtgctggggccggcagtggagagttccacgtgtacagacatctgcgccggagagaatatcagcgacaggactacatggatgccatggctgagaagcaaaa

SEQ ID NO: 275637 - DNA, 120 bp, Artificial Sequence
  ENSG00000128563_3 (sequence is synthesized)
attggatgcagagtttcagaaaagactggaaaagaataaaattgctgcagaggagcagaccgcaaagcgccggaagaagcgccagaagttaaaagagaagaaattactggcaaagaagat

SEQ ID NO: 275638 - DNA, 120 bp, Artificial Sequence
  ENSG00000128563_4 (sequence is synthesized)
gaaacttgaacagaagaaacaagaaggacccggtcagcccaaggagcaggggtccagcagctctgcggaggcatctggaacagaggaggaggaggaagtgcccagtttcaccatggggcg

SEQ ID NO: 275639 - DNA, 120 bp, Artificial Sequence
  ENSG00000128563_5 (sequence is synthesized)
atgacaatgtttgccacagcctctgcctggaacctggctcgtgctgtgaccagaagggaaaggcggctgtttggctctttctcccccgcaaggacccgctgacccgctggatggagagca

SEQ ID NO: 275640 - DNA, 120 bp, Artificial Sequence
  ENSG00000128563_6 (sequence is synthesized)
aaggagacccctcccgagccgctcacagtcctgtatttggcaggtttgggagcctgaggggccatctccctgacactcagaggcactgccttgcagacaccatccgtgctcctggtaaag

SEQ ID NO: 275641 - DNA, 120 bp, Artificial Sequence
  ENSG00000128563_7 (sequence is synthesized)
ggggacagagagcctcaccttgccacatatttgaacagtgatgagtttggggctggtttctgggaagggaacgtttatttagtaaagagcagaacacccttgcgttttgttgggacatgt

SEQ ID NO: 275642 - DNA, 120 bp, Artificial Sequence
  ENSG00000128563_8 (sequence is synthesized)
ctggtccatgttgcccactcactccagtgggaagtggggaccacgccatagagggtctgctcccactgcagctcccggtgctctcgtgttctgggaaggcctgggtgtgtgcacaaggag

SEQ ID NO: 275643 - DNA, 120 bp, Artificial Sequence
  ENSG00000128563_9 (sequence is synthesized)
gcccgggccagggacttcaccaggggctgggtcacaagggcacagggtgtgtggaaagcgctgtgggggaagagccggtcaccggagagtgagcaggcggagactccaagctgggctgag

SEQ ID NO: 275644 - DNA, 120 bp, Artificial Sequence
  ENSG00000128563_10 (sequence is synthesized)
ccagagcagaaggcgagggattcccagccggacgggggttctctcaccaacagctgtgatttcatcccgaagtggaagggggtctaaacagaacaggctgagagaggcgggactgggtca

SEQ ID NO: 275645 - DNA, 120 bp, Artificial Sequence
  ENSG00000128563_11 (sequence is synthesized)
agtgggtggagctcctccttgcatgactgcaactgtcggggctttccgccggctcacagcagttggggccagcggggagaagagaggcggaactgctgtgtcctcatgtggcgcagcctc

SEQ ID NO: 275646 - DNA, 120 bp, Artificial Sequence
  ENSG00000128563_12 (sequence is synthesized)
aaactggcatccaggcactgggcccatgcagagaaggcacctgcagagagcagggcagcccggcgcaggggcatgcgcctagaatcccagctactcggaaggccaaggcaggaggaccgc

SEQ ID NO: 275647 - DNA, 120 bp, Artificial Sequence
  ENSG00000128563_13 (sequence is synthesized)
ttgagtccagggattcaaggccaacctgggcaatagagcgagaccctgtctcttaaaaaacgatgatgatgaacacagaggacggggcactgtgctgggagccagggggcctgggaggag

SEQ ID NO: 275648 - DNA, 120 bp, Artificial Sequence
  ENSG00000128563_14 (sequence is synthesized)
ccgagaccagccttttacctcggggttttgaggccaacagggacgacagagacagtttctagttagagccttggctccatttttggatgatttagccccgagttcctgagtctattttat

SEQ ID NO: 275649 - DNA, 120 bp, Artificial Sequence
  ENSG00000128563_15 (sequence is synthesized)
gccccttacgtactttgatagaactaaggaaatagtggttttgagtgaagggaaaggaaacccagaaacattttacgttgcttttacttctgtagtgtagattgccccggcccctctctg

SEQ ID NO: 275650 - DNA, 120 bp, Artificial Sequence
  ENSG00000128563_16 (sequence is synthesized)
agccctgtagcatctgtgatagcttctgtcccttcatcggttcatgtcacagggattttctttcccaggaagcggacacggagagtcagccctaataaatgagcacatgccctggctgta

SEQ ID NO: 275651 - DNA, 120 bp, Artificial Sequence
  ENSG00000128563_17 (sequence is synthesized)
ctgcgcctcttcaggtcatcgcttgctctcgttcccaggctttggcctctagtggacgagaatcaccgagtctgcggggctggacgctgactgcccgggccagcacctaggcgggcggga

SEQ ID NO: 275652 - DNA, 120 bp, Artificial Sequence
  ENSG00000128563_18 (sequence is synthesized)
cgctgactgcccgggccagcacctaggcgggcgggagctgtgcggcccagggttcacgcgggccgggtagaggctcgagccgggacccccgagcgtgaaccccggagccggcggcgctgg

SEQ ID NO: 275653 - DNA, 120 bp, Artificial Sequence
  ENSG00000128563_19 (sequence is synthesized)
gaaggggcgacgggacctgggcctggcccgtgtgtgtcctcggcggcctggcgccggccgtcgctgtacggtgagccccagggaggcggatctgggccccgagaaggacccccgcctgga

SEQ ID NO: 275654 - DNA, 120 bp, Artificial Sequence
  ENSG00000128563_20 (sequence is synthesized)
tttgccccgtaggcccggcccgggcccctcgggagcagaacagctttggtgaggtggacaggaggtgacctcgcgagcagacgcgcgcgccagcgacagcagcccgccccggcctctcgg

SEQ ID NO: 275655 - DNA, 120 bp, Artificial Sequence
  ENSG00000128563_21 (sequence is synthesized)
gagccgtggggcagaggctgcggagccccaggagggtgatttctgcctttgcaggccggagccctcatgacttcagtgacctgcttctgcccctctaggtctatcagccacagtctctgc

SEQ ID NO: 275656 - DNA, 120 bp, Artificial Sequence
  ENSG00000128563_22 (sequence is synthesized)
aagtttccaagagcagcagaaaatgaacacattgcaggggccagtgtcattcaaagatgtggctgtggatttcacccaggaggagtggcagcaactggaccctgatgagaagatagcata

SEQ ID NO: 275657 - DNA, 120 bp, Artificial Sequence
  ENSG00000128563_23 (sequence is synthesized)
cggggatgtgatgttggagaactacagccatctagtttctgtggggtatgattatcaccaagccaaacatcatcatggagtggaggtgaaggaagtggagcagggagaggagccgtggat

SEQ ID NO: 275658 - DNA, 120 bp, Artificial Sequence
  ENSG00000128563_24 (sequence is synthesized)
aatggaaggtgaatttccatgtcaacatagtccaggagattgtcagaaatggaggagggggcaccagatccaaggaagtgcccggacaaagccgggaggcgaggagagccgacggggagg

SEQ ID NO: 275659 - DNA, 120 bp, Artificial Sequence
  ENSG00000128563_25 (sequence is synthesized)
aggtgccgagagcatcagcggggctgctcggtggcacgaagacgcccgcggggactggagaggtcggctagggccaggctactcaggcacggagggccacctccccttcagggacgtgag

SEQ ID NO: 275660 - DNA, 120 bp, Artificial Sequence
  ENSG00000128563_26 (sequence is synthesized)
catctagctgcactgatttgttgttcaggaacaggaaatgaaaccccgcagctttgaacacaataacccacgccagcctcaggctcatgaatattcagcaggctgcttgcgccttgcaac

SEQ ID NO: 275661 - DNA, 120 bp, Artificial Sequence
  ENSG00000128563_27 (sequence is synthesized)
ctatgcatgagtggtgcctcagtcaactaaaagagttacttcgccatcggagacctatgtattgattacctgccctgcctctgggacagccttttaaagttaaaatggccctggggaccc

SEQ ID NO: 275662 - DNA, 120 bp, Artificial Sequence
  ENSG00000128563_28 (sequence is synthesized)
gggtagtgcctccgtcacccccagtggtgtgacttctagaactctcctactttgcctgagcaaaacctcccacagtctgcccagaccagagcgtgtctaaatgatgtgggttttgttgca

SEQ ID NO: 275663 - DNA, 120 bp, Artificial Sequence
  ENSG00000128564_0 (sequence is synthesized)
agcgtgctgaagccggagcgagctagccgcccggagccgcgccgacccagctgagcccagcccacgggacgccagacctcgaccgtcgctcctaccccggccaccgctcggagccgaggc

SEQ ID NO: 275664 - DNA, 120 bp, Artificial Sequence
  ENSG00000128564_1 (sequence is synthesized)
ggacgcgtcccgatcttcccctgtccccaccctgccccgaccctcctctccacctctcgcgtcgtgacaccagctgtctccggcagcctcttggtcatgaaagccctcagattgtcggct

SEQ ID NO: 275665 - DNA, 120 bp, Artificial Sequence
  ENSG00000128564_2 (sequence is synthesized)
tccgccctcttctgccttctgctgatcaacgggttaggggcagcaccccctggtcgccctgaggcgcagcctcctcctctcagctctgagcataaagagccggtagccggggacgcagtg

SEQ ID NO: 275666 - DNA, 120 bp, Artificial Sequence
  ENSG00000128564_3 (sequence is synthesized)
cccgggccaaaggatggcagcgccccagaggtccgaggcgctcggaattccgagccgcaggacgagggagagcttttccagggcgtggatccccgggcgctggccgcggtgctgctgcag

SEQ ID NO: 275667 - DNA, 120 bp, Artificial Sequence
  ENSG00000128564_4 (sequence is synthesized)
gcactcgaccgtcccgcctcacccccggcaccaagcggctcccagcaggggccggaggaagaagcagctgaagctctgctgaccgagaccgtgcgcagccagacccacagcctcccggcg

SEQ ID NO: 275668 - DNA, 120 bp, Artificial Sequence
  ENSG00000128564_5 (sequence is synthesized)
ccggagagcccggagcccgcggctccgcctcgccctcagactccggagaatgggcccgaggcgagcgatccctccgaggagctcgaggcgctagcgtccctgctccaggaactgcgagat

SEQ ID NO: 275669 - DNA, 120 bp, Artificial Sequence
  ENSG00000128564_6 (sequence is synthesized)
ttcagtccaagtagcgccaagcgccagcaggagacggcggcagcagagacggaaacccgcacgcacacgctgacccgagtgaatctggagagcccggggccagagcgcgtatggcgcgct

SEQ ID NO: 275670 - DNA, 120 bp, Artificial Sequence
  ENSG00000128564_7 (sequence is synthesized)
tcctggggagagttccaggcgcgtgtcccggagcgcgcgcccctgccgcccccggccccctctcaattccaggcgcgtatgcccgacagcgggccccttcccgaaacccacaagttcggg

SEQ ID NO: 275671 - DNA, 120 bp, Artificial Sequence
  ENSG00000128564_8 (sequence is synthesized)
gaaggagtgtcctcccccaaaacacacctaggcgaggcattggcacccctgtccaaggcgtaccaaggcgtggccgccccgttccccaaggcgcgccggccggagagcgcactcctgggc

SEQ ID NO: 275672 - DNA, 120 bp, Artificial Sequence
  ENSG00000128564_9 (sequence is synthesized)
ccttctccagcaagggctggcgcaggtggaggccgggcggcggcaggcggaggccacgcggcaggccgcggcgcaggaagagcggctggccgacctcgcctcggacctgctgctccagta

SEQ ID NO: 275673 - DNA, 120 bp, Artificial Sequence
  ENSG00000128564_10 (sequence is synthesized)
gcggggcccggcagcgcggcctcgggggtcgggggctgcaggaggcggcggaggagcgagagagtgcaagggaggaggaggaggcggagcaggagagacgcggcggggaggagagggtgg

SEQ ID NO: 275674 - DNA, 120 bp, Artificial Sequence
  ENSG00000128564_11 (sequence is synthesized)
gggaagaggatgaggaggcggccgaggcggaggcagaggcggaggaggcggagagggcgcggcagaacgcgctcctgttcgcggaggaggaggacggggaagccggcgccgaggacaagc

SEQ ID NO: 275675 - DNA, 120 bp, Artificial Sequence
  ENSG00000128564_12 (sequence is synthesized)
gctcccaggaggagacgccgggccaccggcggaaggaggccgaggggacagaggagggcggggaggaggaggacgacgaggagatggatccgcagacgatcgacagcctcattgagctgt

SEQ ID NO: 275676 - DNA, 120 bp, Artificial Sequence
  ENSG00000128564_13 (sequence is synthesized)
ccaccaaactccacctgccagcggacgacgtggtcagcatcatcgaggaggtggaggagaagcggaagcggaagaagaacgcccctcccgagcccgtgccgcccccccgtgccgcccccg

SEQ ID NO: 275677 - DNA, 120 bp, Artificial Sequence
  ENSG00000128564_14 (sequence is synthesized)
cccccacccacgtccgctccccgcagcccccgccccccgcccccgctcccgcacgagacgagctgccggactggaacgaggtgctcccgccctgggatcgggaggaggacgaggtgtacc

SEQ ID NO: 275678 - DNA, 120 bp, Artificial Sequence
  ENSG00000128564_15 (sequence is synthesized)
cgccagggccgtaccaccctttccccaactacatccggccgcggacactgcagccgccctcggccttgcgccgccgccactaccaccacgccttgccgccttcgcgccactatcccggcc

SEQ ID NO: 275679 - DNA, 120 bp, Artificial Sequence
  ENSG00000128564_16 (sequence is synthesized)
gggaggcccaggcgcggcgcgcgcaggaggaggcggaggcggaggagcgccggctgcaggagcaggaggagctggagaattacatcgagcacgtgctgctccggcgcccgtgactgccct

SEQ ID NO: 275680 - DNA, 80 bp, Artificial Sequence
  ENSG00000128564_17 (sequence is synthesized)
ccggcgcccccctccgtgttgcccgctccccctcggtgtttgcatgcgccccggccctgccccttggccctgcccctgtc

SEQ ID NO: 275681 - DNA, 120 bp, Artificial Sequence
  ENSG00000128564_18 (sequence is synthesized)
cccgggctgcgtcgggacctgccagacccccctcccgggtcctgagcccgaactcccagagctcacccgcgggtgaccgggggccagcccaggagggcgggtggtttgtgcgagttccct

SEQ ID NO: 275682 - DNA, 120 bp, Artificial Sequence
  ENSG00000128564_19 (sequence is synthesized)
tgccacgcggggccccggccccatcaagtccctctggggacgtccccgtcggaaaccggaaaaagcagttccagttaattgtgtgaagtgtgtctgtctccagcccttcgggcctcccac

SEQ ID NO: 275683 - DNA, 120 bp, Artificial Sequence
  ENSG00000128564_20 (sequence is synthesized)
gagcccctccagcctctccaagtcgctgtgaattgaccccttctttcctttctctgttgtaaatacccctcacggaggaaatagttttgctaagaaataaaagtgactattttattagga

SEQ ID NO: 275684 - DNA, 120 bp, Artificial Sequence
  ENSG00000128564_21 (sequence is synthesized)
agatggctcagggaaggggccgaggaggccctgggtaagcgagggcttcgggggttattttcccatttacacggctccagagatcggcacaacatcttcctcctttgctcctaaacgttc

SEQ ID NO: 275685 - DNA, 120 bp, Artificial Sequence
  ENSG00000128567_0 (sequence is synthesized)
cgcagacgccgcccaggacgcagccgccgccgccgccgctcctctgccactggctctgcgccccagcccggctctgctgcagcggcagggaggaagagccgccgcagcgcgactcgggag

SEQ ID NO: 275686 - DNA, 120 bp, Artificial Sequence
  ENSG00000128567_1 (sequence is synthesized)
ggcctccggagccacccacaggcctccccgggcggcgcccacgctcctaccgcccggacgcgcggatcctccgccggcaccgcagccacctgctcccggcccagaggcgacgacacgatg

SEQ ID NO: 275687 - DNA, 120 bp, Artificial Sequence
  ENSG00000128567_2 (sequence is synthesized)
cctgctcccggcccagaggcgacgacacgatgcgctgcgcgctggcgctctcggcgctgctgctactgttgtcaacgccgccgctgctgccgtcgtcgccgtcgccgtcgccgtcgccct

SEQ ID NO: 275688 - DNA, 120 bp, Artificial Sequence
  ENSG00000128567_3 (sequence is synthesized)
cccagaatgcaacccagactactacggactcatctaacaaaacagcaccgactccagcatccagtgtcaccatcatggctacagatacagcccagcagagcacagtccccacttccaagg

SEQ ID NO: 275689 - DNA, 120 bp, Artificial Sequence
  ENSG00000128567_4 (sequence is synthesized)
ccaacgaaatcttggcctcggtcaaggcgaccacccttggtgtatccagtgactcaccggggactacaaccctggctcagcaagtctcaggcccagtcaacactaccgtggctagaggag

SEQ ID NO: 275690 - DNA, 120 bp, Artificial Sequence
  ENSG00000128567_5 (sequence is synthesized)
gcggctcaggcaaccctactaccaccatcgagagccccaagagcacaaaaagtgcagacaccactacagttgcaacctccacagccacagctaaacctaacaccacaagcagccagaatg

SEQ ID NO: 275691 - DNA, 120 bp, Artificial Sequence
  ENSG00000128567_6 (sequence is synthesized)
gagcagaagatacaacaaactctggggggaaaagcagccacagtgtgaccacagacctcacatccactaaggcagaacatctgacgacccctcaccctacaagtccacttagcccccgac

SEQ ID NO: 275692 - DNA, 120 bp, Artificial Sequence
  ENSG00000128567_7 (sequence is synthesized)
aacccacttcgacgcatcctgtggccaccccaacaagctcgggacatgaccatcttatgaaaatttcaagcagttcaagcactgtggctatccctggctacaccttcacaagcccgggga

SEQ ID NO: 275693 - DNA, 64 bp, Artificial Sequence
  ENSG00000128567_8 (sequence is synthesized)
actgtggctatccctggctacaccttcacaagcccggggatgaccaccaccctactagagacag

SEQ ID NO: 275694 - DNA, 120 bp, Artificial Sequence
  ENSG00000128567_9 (sequence is synthesized)
ttatctcgcaaagaactcaacagacctccagtcagatgccagccagctctacggccccttcctcccaggagacagtgcagcccacgagcccggcaacggcattgagaacacctaccctgc

SEQ ID NO: 275695 - DNA, 120 bp, Artificial Sequence
  ENSG00000128567_10 (sequence is synthesized)
cagagaccatgagctccagccccacagcagcatcaactacccaccgataccccaaaacaccttctcccactgtggctcatgagagtaactgggcaaagtgtgaggatcttgagacacaga

SEQ ID NO: 275696 - DNA, 120 bp, Artificial Sequence
  ENSG00000128567_11 (sequence is synthesized)
cacagagtgagaagcagctcgtcctgaacctcacaggaaacaccctctgtgcagggggcgcttcggatgagaaattgatctcactgatatgccgagcagtcaaagccaccttcaacccgg

SEQ ID NO: 275697 - DNA, 120 bp, Artificial Sequence
  ENSG00000128567_12 (sequence is synthesized)
cccaagataagtgcggcatacggctggcatctgttccaggaagtcagaccgtggtcgtcaaagaaatcactattcacactaagctccctgccaaggatgtgtacgagcggctgaaggaca

SEQ ID NO: 275698 - DNA, 120 bp, Artificial Sequence
  ENSG00000128567_13 (sequence is synthesized)
aatgggatgaactaaaggaggcaggggtcagtgacatgaagctaggggaccaggggccaccggaggaggccgaggaccgcttcagcatgcccctcatcatcaccatcgtctgcatggcat

SEQ ID NO: 275699 - DNA, 120 bp, Artificial Sequence
  ENSG00000128567_14 (sequence is synthesized)
cattcctgctcctcgtggcggccctctatggctgctgccaccagcgcctctcccagaggaaggaccagcagcggctaacagaggagctgcagacagtggagaatggttaccatgacaacc

SEQ ID NO: 275700 - DNA, 120 bp, Artificial Sequence
  ENSG00000128567_15 (sequence is synthesized)
caacactggaagtgatggagacctcttctgagatgcaggagaagaaggtggtcagcctcaacggggagctgggggacagctggatcgtccctctggacaacctgaccaaggacgacctgg

SEQ ID NO: 275701 - DNA, 120 bp, Artificial Sequence
  ENSG00000128567_16 (sequence is synthesized)
atgaggaggaagacacacacctctagtccggtctgccggtggcctccagcagcaccacagagctccagaccaaccaccccaagtgccgtttggatggggaagggaaagactggggaggga

SEQ ID NO: 275702 - DNA, 120 bp, Artificial Sequence
  ENSG00000128567_17 (sequence is synthesized)
gagtgaactccgaggggtgtcccctcccaatccccccagggccttaatttttcccttttcaacctgaacaaatcacattctgtccagattcctcttgtaaaataacccactagtgcctga

SEQ ID NO: 275703 - DNA, 120 bp, Artificial Sequence
  ENSG00000128567_18 (sequence is synthesized)
gctcagtgctgctggatgatgagggagatcaagaaaaagccacgtaagggactttatagatgaactagtggaatcccttcattctgcagtgagattgccgagacctgaagagggtaagtg

SEQ ID NO: 275704 - DNA, 120 bp, Artificial Sequence
  ENSG00000128567_19 (sequence is synthesized)
acttgcccaaggtcagagccacttggtgacagagccaggatgagaacaaagattccatttgcaccatgccacactgctgtgttcacatgtgccttccgtccagagcagtcccgggcaggg

SEQ ID NO: 275705 - DNA, 120 bp, Artificial Sequence
  ENSG00000128567_20 (sequence is synthesized)
gtgaaactccagcaggtggctgggctggaaaggagggcagggctacatcctggctcggtgggatctgacgacctgaaagtccagctcccaagttttccttctcctaccccagcctcgtgt

SEQ ID NO: 275706 - DNA, 120 bp, Artificial Sequence
  ENSG00000128567_21 (sequence is synthesized)
acccatcttcccaccctctatgttcttacccctccctacactcagtgtttgttcccacttactctgtcctggggcctctgggattagcacaggttattcataaccttgaaccccttgttc

SEQ ID NO: 275707 - DNA, 120 bp, Artificial Sequence
  ENSG00000128567_22 (sequence is synthesized)
tggattcggattttctcacatttgcttcgtgagatgggggcttaacccacacaggtctccgtgcgtgaaccaggtctgcttaggggacctgcgtgcaggtgaggagagaaggggacactc

SEQ ID NO: 275708 - DNA, 120 bp, Artificial Sequence
  ENSG00000128567_23 (sequence is synthesized)
gagtccaggctggtatctcagggcagctgatgaggggtcagcaggaacactggcccattgcccctggcactccttgcagaggccacccacgatcttctttgggcttccatttccaccagg

SEQ ID NO: 275709 - DNA, 120 bp, Artificial Sequence
  ENSG00000128567_24 (sequence is synthesized)
caggagaggccttcccggggccccccatcagcgatgtgtcttcagagacaatccattaaagcagccaggaaggacaggctttcccctgtatatcataggaaactcagggacatttcaagt

SEQ ID NO: 275710 - DNA, 120 bp, Artificial Sequence
  ENSG00000128567_25 (sequence is synthesized)
tgctgagagttttgttatagttgttttctaacccagccctccactgccaaaggccaaaagctcagacagttggcagacgtccagttagctcatctcactcactctgattctcctgtgcca

SEQ ID NO: 275711 - DNA, 120 bp, Artificial Sequence
  ENSG00000128567_26 (sequence is synthesized)
caggaaaagagggcctggaaagcgcagtgcatgctgggtgcatgaagggcagcctgggggacagactgttgtgggaacgtcccactgtcctggcctggagctaggccttgctgttcctct

SEQ ID NO: 275712 - DNA, 120 bp, Artificial Sequence
  ENSG00000128567_27 (sequence is synthesized)
tctctgtgagcctagtggggctgctgcggttctcttgcagtttctggtggcatctcaggggaacacaaagctatgtctattccccaatataggacttttatgggctcggcagttagctgc

SEQ ID NO: 275713 - DNA, 120 bp, Artificial Sequence
  ENSG00000128567_28 (sequence is synthesized)
catgtagaaggctcctaagcagtgggcatggtgaggtttcatctgattgagaagggggaatcctgtgtggaatgttgaactttcgccatggtctccatcgttctgggcgtaaattccctg

SEQ ID NO: 275714 - DNA, 120 bp, Artificial Sequence
  ENSG00000128567_29 (sequence is synthesized)
ggatcaagtaggaaaatgggcagaactgcttaggggaatgaaattgccatttttcgggtgaaacgccacacctccagggtcttaagagtcaggctccggctgtagtagctctgatgaaat

SEQ ID NO: 275715 - DNA, 120 bp, Artificial Sequence
  ENSG00000128567_30 (sequence is synthesized)
aggctatccactcgggatggcttactttttaaaagggtagggggaggggctggggaagatctgtcctgcaccatctgcctaattccttcctcacagtctgtagccatctgatatcctagg

SEQ ID NO: 275716 - DNA, 120 bp, Artificial Sequence
  ENSG00000128567_31 (sequence is synthesized)
ggaaaaggaaggccaggggttcacatagggccccagcgagtttcccaggagttagagggatgcgaggctaacaagttccaaaaacatctgccccgatgctctagtgtttggaggtgggca

SEQ ID NO: 275717 - DNA, 120 bp, Artificial Sequence
  ENSG00000128567_32 (sequence is synthesized)
ggatggagaacagtgcctgtttgggggaaaacaggaaatcttgttaggcttgagtgaggtgtttgcttccttcttgcccagcgctgggttctctccacccagtaggttttctgttgtggt

SEQ ID NO: 275718 - DNA, 120 bp, Artificial Sequence
  ENSG00000128567_33 (sequence is synthesized)
cccgtgggagaggccagactggattattcctcctttgctgatcctgggtcacacttcaccagccagggcttttgacggagacagcaaataggcctctgcaaatcaatcaaaggctgcaac

SEQ ID NO: 275719 - DNA, 120 bp, Artificial Sequence
  ENSG00000128567_34 (sequence is synthesized)
cctatggcctcttggagacagatgatgactggcaaggactagagagcaggagtgcctggccaggtcggtcctgactctcctgactctccatcgctctgtccaaggagaacccggagaggc

SEQ ID NO: 275720 - DNA, 120 bp, Artificial Sequence
  ENSG00000128567_35 (sequence is synthesized)
tctgggctgattcagaggttactgctttatattcgtccaaactgtgttagtctaggcttaggacagcttcagaatctgacaccttgccttgctcttgccaccaggacacctatgtcaaca

SEQ ID NO: 275721 - DNA, 120 bp, Artificial Sequence
  ENSG00000128567_36 (sequence is synthesized)
ggccaaacagccatgcatctataaaggtcatcatcttctgccacctttactgggttctaaatgctctctgataattcagagagcattgggtctgggaagaggtaagaggaacactagaag

SEQ ID NO: 275722 - DNA, 120 bp, Artificial Sequence
  ENSG00000128567_37 (sequence is synthesized)
ctcagcatgacttaaacaggttgtagcaaagacagtttatcatcagctctttcagtggtaaactgtggtttccccaagctgcacaggaggccagaaaccacaagtatgatgactaggaag

SEQ ID NO: 275723 - DNA, 120 bp, Artificial Sequence
  ENSG00000128567_38 (sequence is synthesized)
cctactgtcatgagagtggggagacaggcagcaaagcttatgaaggaggtacagaatattctttgcgttgtaagacagaatacgggtttaatctagtctaggcaccagatttttttcccg

SEQ ID NO: 275724 - DNA, 120 bp, Artificial Sequence
  ENSG00000128567_39 (sequence is synthesized)
cttgataaggaaagctagcagaaagtttatttaaaccacttcttgagctttatcttttttgacaatatactggagaaactttgaagaacaagttcaaactgatacatatacacatatttt

SEQ ID NO: 275725 - DNA, 120 bp, Artificial Sequence
  ENSG00000128567_40 (sequence is synthesized)
tttgataatgtaaatacagtgaccatgttaacctaccctgcactgctttaagtgaacatactttgaaaaagcattatgttagctgagtgatggccaagttttttctctggacaggaatgt

SEQ ID NO: 275726 - DNA, 120 bp, Artificial Sequence
  ENSG00000128567_41 (sequence is synthesized)
aaatgtcttactggaaatgacaagtttttgcttgatttttttttttaaacaaaaaatgaaatataacaagacaaacttatgataaagtatttgtcttgtagatcaggtgttttgttttgt

SEQ ID NO: 275727 - DNA, 120 bp, Artificial Sequence
  ENSG00000128567_42 (sequence is synthesized)
ttttttaattttaaaatgcaaccctgccccctccccagcaaagtcacagctccatttcagtaaaggttggagtcaatatgctctggttggcaggcaaccctgtagtcatggagaaaggta

SEQ ID NO: 275728 - DNA, 120 bp, Artificial Sequence
  ENSG00000128567_43 (sequence is synthesized)
tttcaagatctagtccaatctttttctagagaaaaagataatctgaagctcacaaagatgaagtgacttcctcaaaatcacatggttcaggacagaaacaagattaaaacctggatccac

SEQ ID NO: 275729 - DNA, 120 bp, Artificial Sequence
  ENSG00000128567_44 (sequence is synthesized)
agactgtgcgcctcagaaggaataatcggtaaattaagaattgctactcgaaggtgccagaatgacacaaaggacagaattcctttcccagttgttaccctagcaaggctagggagggca

SEQ ID NO: 275730 - DNA, 120 bp, Artificial Sequence
  ENSG00000128567_45 (sequence is synthesized)
tgaacacaaacataagaactggtcttctacactttctctgaatcatttaggtttaagatgtaagtgaacaattctttctttctgccaagaaacaaagttttggatgagcttttatatatg

SEQ ID NO: 275731 - DNA, 120 bp, Artificial Sequence
  ENSG00000128567_46 (sequence is synthesized)
gaacttactccaacaggactgagggaccaaggaaacatgatgggggaggcagagagggcaagagtaaaactgtagcatagcttttgtcacggtcactagctgatccctcaggtctgctgc

SEQ ID NO: 275732 - DNA, 120 bp, Artificial Sequence
  ENSG00000128567_47 (sequence is synthesized)
aaacacagcatggaggacacagatgactctttggtgttggtctttttgtctgcagtgaatgttcaacagtttgcccaggaactgggggatcatatatgtcttagtggacaggggtctgaa

SEQ ID NO: 275733 - DNA, 120 bp, Artificial Sequence
  ENSG00000128567_48 (sequence is synthesized)
gtacactggaatttactgagaaacttgtttgtaaaaactatagttaataattattgcattttcttacaaaaatatattttggaaaattgtatactgtcaattaaagtgtttttgtgtaaa

SEQ ID NO: 275734 - DNA, 120 bp, Artificial Sequence
  ENSG00000128567_49 (sequence is synthesized)
ttaagacaaggttttctgttctttcctccaacgcagggcccctggctggggctttgagcagcacttacccattccctcctccctctccctggttagcctggtcctggcttgagctgccct

SEQ ID NO: 275735 - DNA, 120 bp, Artificial Sequence
  ENSG00000128567_50 (sequence is synthesized)
caagccacgcagccaggacatacctggctctggaatgggtccagccatgcctccagcttgccgtgaactctttcctatctgggtcaccccttagttggggggaaatgtcaaagattccat

SEQ ID NO: 275736 - DNA, 120 bp, Artificial Sequence
  ENSG00000128567_51 (sequence is synthesized)
ggaggcaggaactggcccaggagaacagcatgcaacccttgattcctggcaggcctgcgtggagcaccagctggggctagagagggaggcaggttctagcacagcaacagcactgtcccg

SEQ ID NO: 275737 - DNA, 120 bp, Artificial Sequence
  ENSG00000128567_52 (sequence is synthesized)
accttagctgggagggcagccccacaggcctaggctgctgtcacgctccccgcggagtcacctgcgctctccccaccataggcagggggcgcttcggatgagaaattgatctcactgata

SEQ ID NO: 275738 - DNA, 120 bp, Artificial Sequence
  ENSG00000128567_53 (sequence is synthesized)
agcgcttccttcgcggctccagggacgcagtgccctgcaggcatcgcctgcttgcagccgacttgaggggctcacggagtcccctgtgcccgggacgcggctagatcctggagaaaaccc

SEQ ID NO: 275739 - DNA, 120 bp, Artificial Sequence
  ENSG00000128567_54 (sequence is synthesized)
ctccacccagccccatctggcagatagactccagattagcaaccccggagtcacgtaaggaacctacccttggagaggtgaaggagtgaattagtccagcttgcccgctgcacacctagc

SEQ ID NO: 275740 - DNA, 120 bp, Artificial Sequence
  ENSG00000128573_0 (sequence is synthesized)
acagacatgaaagctaaccgaggacttgagagactcaaactggtgcttttgtctctctctctctgtctttctctctctcacacacacactcacacactcacacacatgcacacacacaca

SEQ ID NO: 275741 - DNA, 120 bp, Artificial Sequence
  ENSG00000128573_1 (sequence is synthesized)
tacacacacacaaaaatgaagcacttactttagaaagattatggtaagcatgctggctcagtcttgaacctttgtcacccctcacgttgcacaccaaagacataccctagtgattaaatg

SEQ ID NO: 275742 - DNA, 120 bp, Artificial Sequence
  ENSG00000128573_2 (sequence is synthesized)
ctgattttgtgtacgattgtccacggacgccaaaacaatcacagagctgcttgatttgttttaattaccagcacaaaatgccatcagtctgggacgtgatcgggcagaggtgtactcaca

SEQ ID NO: 275743 - DNA, 120 bp, Artificial Sequence
  ENSG00000128573_3 (sequence is synthesized)
gtagtgtaaatactgctgtaaatagttgtctgatggtggctttgacagtgagctagcttctgagttttcccttctttttatactgttttctgtgctggcttttttgaatcttcctaattt

SEQ ID NO: 275744 - DNA, 120 bp, Artificial Sequence
  ENSG00000128573_4 (sequence is synthesized)
ttcatctctttaacaaactcctatgaagttgaaaccgggaagtttgctctaacatttccagagaaggtattaagtcatgatgcaggaatctgcgacagagacaataagcaacagttcaat

SEQ ID NO: 275745 - DNA, 120 bp, Artificial Sequence
  ENSG00000128573_5 (sequence is synthesized)
gaatcaaaatggaatgagcactctaagcagccaattagatgctggcagcagagatggaagatcaagtggtgacaccagctctgaagtaagcacagtagaactgctgcatctgcaacaaca

SEQ ID NO: 275746 - DNA, 120 bp, Artificial Sequence
  ENSG00000128573_6 (sequence is synthesized)
gcaggctctccaggcagcaagacaacttcttttacagcagcaaacaagtggattgaaatctcctaagagcagtgataaacagagaccactgcaggtgcctgtgtcagtggccatgatgac

SEQ ID NO: 275747 - DNA, 120 bp, Artificial Sequence
  ENSG00000128573_7 (sequence is synthesized)
tccccaggtgatcacccctcagcaaatgcagcagatccttcagcaacaagtcctgtctcctcagcagctacaagcccttctccaacaacagcaggctgtcatgctgcagcagcaacaact

SEQ ID NO: 275748 - DNA, 120 bp, Artificial Sequence
  ENSG00000128573_8 (sequence is synthesized)
acaagagttttacaagaaacagcaagagcagttacatcttcagcttttgcagcagcagcagcaacagcagcagcagcaacaacagcagcaacaacagcagcagcaacaacaacaacaaca

SEQ ID NO: 275749 - DNA, 120 bp, Artificial Sequence
  ENSG00000128573_9 (sequence is synthesized)
cagcaacaacaacaacaacagcagcaacaacagcagcagcagcagcaacagcagcagcagcagcaacagcatcctggaaagcaagcgaaagagcagcagcagcagcagcagcagcaacag

SEQ ID NO: 275750 - DNA, 120 bp, Artificial Sequence
  ENSG00000128573_10 (sequence is synthesized)
tgtcttccagcagcagcttctccagatgcaacaactccagcagcagcagcatctgctcagccttcagcgtcagggactcatctccattccacctggccaggcagcacttcctgtccaatc

SEQ ID NO: 275751 - DNA, 120 bp, Artificial Sequence
  ENSG00000128573_11 (sequence is synthesized)
gctgcctcaagctggcttaagtcctgctgagattcagcagttatggaaagaagtgactggagttcacagtatggaagacaatggcattaaacatggagggctagacctcactactaacaa

SEQ ID NO: 275752 - DNA, 120 bp, Artificial Sequence
  ENSG00000128573_12 (sequence is synthesized)
ttcctcctcgactacctcctccaacacttccaaagcatcaccaccaataactcatcattccatagtgaatggacagtcttcagttctaagtgcaagacgagacagctcgtcacatgagga

SEQ ID NO: 275753 - DNA, 120 bp, Artificial Sequence
  ENSG00000128573_13 (sequence is synthesized)
gactggggcctctcacactctctatggccatggagtttgcaaatggccaggctgtgaaagcatttgtgaagattttggacagtttttaaagcaccttaacaatgaacacgcattggatga

SEQ ID NO: 275754 - DNA, 120 bp, Artificial Sequence
  ENSG00000128573_14 (sequence is synthesized)
ccgaagcactgctcagtgtcgagtgcaaatgcaggtggtgcaacagttagaaatacagctttctaaagaacgcgaacgtcttcaagcaatgatgacccacttgcacatgcgaccctcaga

SEQ ID NO: 275755 - DNA, 120 bp, Artificial Sequence
  ENSG00000128573_15 (sequence is synthesized)
gcccaaaccatctcccaaacctctaaatctggtgtctagtgtcaccatgtcgaagaatatgttggagacatccccacagagcttacctcaaacccctaccacaccaacggccccagtcac

SEQ ID NO: 275756 - DNA, 120 bp, Artificial Sequence
  ENSG00000128573_16 (sequence is synthesized)
cccgattacccagggaccctcagtaatcaccccagccagtgtgcccaatgtgggagccatacgaaggcgacattcagacaaatacaacattcccatgtcatcagaaattgccccaaacta

SEQ ID NO: 275757 - DNA, 120 bp, Artificial Sequence
  ENSG00000128573_17 (sequence is synthesized)
tgaattttataaaaatgcagatgtcagacctccatttacttatgcaactctcataaggcaggctatcatggagtcatctgacaggcagttaacacttaatgaaatttacagctggtttac

SEQ ID NO: 275758 - DNA, 120 bp, Artificial Sequence
  ENSG00000128573_18 (sequence is synthesized)
acggacatttgcttacttcaggcgtaatgcagcaacttggaagaatgcagtacgtcataatcttagcctgcacaagtgttttgttcgagtagaaaatgttaaaggagcagtatggactgt

SEQ ID NO: 275759 - DNA, 120 bp, Artificial Sequence
  ENSG00000128573_19 (sequence is synthesized)
ggatgaagtagaataccagaagcgaaggtcacaaaagataacaggaagtccaaccttagtaaaaaatatacctaccagtttaggctatggagcagctcttaatgccagtttgcaggctgc

SEQ ID NO: 275760 - DNA, 120 bp, Artificial Sequence
  ENSG00000128573_20 (sequence is synthesized)
cttggcagagagcagtttacctttgctaagtaatcctggactgataaataatgcatccagtggcctactgcaggccgtccacgaagacctcaatggttctctggatcacattgacagcaa

SEQ ID NO: 275761 - DNA, 120 bp, Artificial Sequence
  ENSG00000128573_21 (sequence is synthesized)
tggaaacagtagtccgggctgctcacctcagccgcacatacattcaatccacgtcaaggaagagccagtgattgcagaggatgaagactgcccaatgtccttagtgacaacagctaatca

SEQ ID NO: 275762 - DNA, 120 bp, Artificial Sequence
  ENSG00000128573_22 (sequence is synthesized)
cagtccagaattagaagacgacagagagattgaagaagagcctttatctgaagatctggaatgagaactgacttgtgaaacctcagcgtgaagggacatatcactgaccttcataaccac

SEQ ID NO: 275763 - DNA, 120 bp, Artificial Sequence
  ENSG00000128573_23 (sequence is synthesized)
tccacaaccatgaatatttgacaaatttttactgtgactatttattaagcatggataaaggagacagccctaaaggaacttactaagccagccctttgggattcagtaccaacaggcaaa

SEQ ID NO: 275764 - DNA, 120 bp, Artificial Sequence
  ENSG00000128573_24 (sequence is synthesized)
tcttcttcttctttttttttttttttttagaaaaaaagacaaaaactgattttcttgaaaaaaaaaaatgaactgttctttctataatggctttgcccatttaaaaaatgtggctcttaa

SEQ ID NO: 275765 - DNA, 120 bp, Artificial Sequence
  ENSG00000128573_25 (sequence is synthesized)
aaaatgtggctcttaagggttcatgaaatgactgaatatgaggatacatgtcctgtagaaagcaaatgcgcctcatatactgccaaaaatagtgttagtttcattaatgtgaattttcca

SEQ ID NO: 275766 - DNA, 120 bp, Artificial Sequence
  ENSG00000128573_26 (sequence is synthesized)
gcattcagtagttgtaatgttagaaacaattgctggtcaagttcaacttgttgctattgtttttaatttgcacaggagtagtatcagaaattagtgtcactgcttgtatctagctgaatt

SEQ ID NO: 275767 - DNA, 120 bp, Artificial Sequence
  ENSG00000128573_27 (sequence is synthesized)
attacaaaacacagtaattagactgttgcaaccatctaaaaccttaggcttccagtctgtgctgttagtgttaagatgtaaagtgcaatcctaagctaacattatctgtgcaagcaccat

SEQ ID NO: 275768 - DNA, 120 bp, Artificial Sequence
  ENSG00000128573_28 (sequence is synthesized)
agaaacatttgcatatctgcatagatcttacaactgtactctttacctccttgtgataaagctttgtctacctgcaaacacagtcaaaggctacagctgcaaaccaaagccaactctaac

SEQ ID NO: 275769 - DNA, 120 bp, Artificial Sequence
  ENSG00000128573_29 (sequence is synthesized)
catggccaagagctcaaggacagaagcagccacatgctttggtcagccttctgtaacttcaattagtacaaaggaaccttttccatgaactacctgctgttttctgatgacctctgggat

SEQ ID NO: 275770 - DNA, 120 bp, Artificial Sequence
  ENSG00000128573_30 (sequence is synthesized)
cttttcatttagccctaaacaaagaaacaaatatgacaaaaaccacaactaaaaaatgttaattcagtcacagagtaatcttctgaggccaaaagtccatctaaatgcaatgaagatttg

SEQ ID NO: 275771 - DNA, 120 bp, Artificial Sequence
  ENSG00000128573_31 (sequence is synthesized)
ctttcattaaagacagaggtgaggacaaaatccgcagtggaagttatgatatgctagaaagcaacaaatgtggatcactgaccaaaacgattatgtacttgatgcaaatgcagattgcat

SEQ ID NO: 275772 - DNA, 120 bp, Artificial Sequence
  ENSG00000128573_32 (sequence is synthesized)
attgttatatatatagtactttgtgtttttgttttccctcattcagtcagttattttcagtggtgaatacatgttgttagaagatgtcttgtatggtcttaatctttgttgtgtactatt

SEQ ID NO: 275773 - DNA, 120 bp, Artificial Sequence
  ENSG00000128573_33 (sequence is synthesized)
tttttatagtcttaagttataatgaaaaaacaaaaagtaggaaccaaacataaaaggtctagtaaagccaaaaattaatttcatattgattttaaagtgatctagctgagtttttacact

SEQ ID NO: 275774 - DNA, 120 bp, Artificial Sequence
  ENSG00000128573_34 (sequence is synthesized)
gaaagcaaagattatagcaattgtagtccatggtatttattttcagtcaaaccaaagttacatataattctgcctctgcttatacgggatattaacactaacaatacactcccttcaaag

SEQ ID NO: 275775 - DNA, 120 bp, Artificial Sequence
  ENSG00000128573_35 (sequence is synthesized)
acttgcacaggccaaattgttggaatgctggttttcttgacaattccaaaccccaaaactatgataatgagttatgatgtagttgaaaatagcatagtcagatgtttgcttaaaacctag

SEQ ID NO: 275776 - DNA, 120 bp, Artificial Sequence
  ENSG00000128573_36 (sequence is synthesized)
aaacttaacatgttgcttttcatgtgctgtgccaagtcttgataatactttttcccccaaccaagggacctcataacctgattatggttattgctttacaaacagttttgacagaaggtg

SEQ ID NO: 275777 - DNA, 120 bp, Artificial Sequence
  ENSG00000128573_37 (sequence is synthesized)
gctgctagagcttaacatacgttcccgttccatgtgatggaaccggttcttgcaaactaagctcatcattgattctttgctgaagtcagcaaatagagttagagagatacccagtcatct

SEQ ID NO: 275778 - DNA, 120 bp, Artificial Sequence
  ENSG00000128573_38 (sequence is synthesized)
acccagtcatctatcacaccaaataaaaggacataacggctttcaaaagggttttcccacttacccaaaaggctttctgaaagcttctacctctgcaaaaaaaaaaaaagaaaaaaaaaa

SEQ ID NO: 275779 - DNA, 120 bp, Artificial Sequence
  ENSG00000128573_39 (sequence is synthesized)
tagaacaattatggcagattgcatgaaacgtgagaacgtcacagtaactgctacttttcattatgtttgtctttgggtcatgatcaacgaaccggaagtttacaatatggtattaaaaga

SEQ ID NO: 275780 - DNA, 120 bp, Artificial Sequence
  ENSG00000128573_40 (sequence is synthesized)
aagatgggtatggtgaaagatggttttcagtcatctaggatcctactgtaaggattatctgaaaggaaaaatgggtctttcaggtgcatgttcaaaaggctttgagggactggaagtaac

SEQ ID NO: 275781 - DNA, 120 bp, Artificial Sequence
  ENSG00000128573_41 (sequence is synthesized)
tgcgagagttgtaccatcagaagggtggcctaagactacaatgctaaagtatgcatacctcagttagaaaacttttgaaaggaagtctcagccacagaatgcatatacctgtagagtttt

SEQ ID NO: 275782 - DNA, 120 bp, Artificial Sequence
  ENSG00000128573_42 (sequence is synthesized)
gcatgggttttatatgaatacaattttaaaaaatagctgcttgcacattataccagaaaaacctccaaaactgcaattgctttgaaaatagattttaggttttttggagtttcctgaaat

SEQ ID NO: 275783 - DNA, 120 bp, Artificial Sequence
  ENSG00000128573_43 (sequence is synthesized)
gcttggtctgtattttgataattgtgcatattatgtaaaaatgttggtggacccataaatgaccagactttttctaagaaaaatgttgctttaatgcatttcatgaatttttactcttat

SEQ ID NO: 275784 - DNA, 120 bp, Artificial Sequence
  ENSG00000128573_44 (sequence is synthesized)
atcattgcttgctagtaatagcaaatctgcttttctgcatctgctttgcgtagctattgtaaggctttgaactaatgtatgtatttattgcttgaacttctgtgcataccttataaagca

SEQ ID NO: 275785 - DNA, 120 bp, Artificial Sequence
  ENSG00000128573_45 (sequence is synthesized)
taatgtctgacaatttaaatggctcatgtattcttgcttctatcataagctgattatggggactatgatcttttgtatacagcaaattttaaactgtagcacaaacatctgtttatgtat

SEQ ID NO: 275786 - DNA, 120 bp, Artificial Sequence
  ENSG00000128573_46 (sequence is synthesized)
tggtggaatatacctgttttatttatcttttttgaggtaaactaatttttgatacttttcattactgtgtactatgttcatactttgaattctctgacgttagaagtcatggttgagaat

SEQ ID NO: 275787 - DNA, 120 bp, Artificial Sequence
  ENSG00000128573_47 (sequence is synthesized)
tgtaacagctgttattcgttctgtattcatggctttcactgctgaataaaataaaggaccaaacctaggatttgaaagaaaactgtctacctctaacaccagggagttatcagattttat

SEQ ID NO: 275788 - DNA, 120 bp, Artificial Sequence
  ENSG00000128573_48 (sequence is synthesized)
tttacatagttttagtctacaaagacacaattgcttaaacctagtgggcttaaggcttatattctatgtggttggattcgtggcacagttgtactatttgaaaatcaattaaaattttat

SEQ ID NO: 275789 - DNA, 120 bp, Artificial Sequence
  ENSG00000128573_49 (sequence is synthesized)
gtgaatgttacaagtatttggtagaattaccactaactgggttttctttagataactcagatatggagaaaatgtcatcagcattctgtgtctacagctgcttaacttcataagaatgca

SEQ ID NO: 275790 - DNA, 120 bp, Artificial Sequence
  ENSG00000128573_50 (sequence is synthesized)
tttctttgtgattagggaatcgaagaatagtcagctaggaatagagctacagaagtacacttacataaaccatcctggactttaatgtccctgggcagattcagtcgcaaaatccaatat

SEQ ID NO: 275791 - DNA, 120 bp, Artificial Sequence
  ENSG00000128573_51 (sequence is synthesized)
gatattttgtaaagttttcaagttggacatttacatttttgagaattttgagacttcatcttacacatgccagtattaacacacatttggacaatagctttattaagtctataaagctat

SEQ ID NO: 275792 - DNA, 120 bp, Artificial Sequence
  ENSG00000128573_52 (sequence is synthesized)
tgaaaggaacatggcttacccttgttatttcactagttcaggttgcaacgaaaggtttttttgtccatgaacacttggcatatcttacttagcaaaaaagaaggatgtacattttactat

SEQ ID NO: 275793 - DNA, 120 bp, Artificial Sequence
  ENSG00000128573_53 (sequence is synthesized)
agaattaatgtatgaacagtgtgtcactgctgttggatgtaaaaatgtatatgaaaccatttcattcacttgattacatttctgaagtataaataaaaaaatctaattctttttgaccca

SEQ ID NO: 275794 - DNA, 120 bp, Artificial Sequence
  ENSG00000128573_54 (sequence is synthesized)
tgcatctgctgtgtacagacttggctttgtactcttttcctgggggagagaaagtctttcttctctgctagttgattcctgtttttgtgaaacagctaagaaaacatctgtggcaggcag

SEQ ID NO: 275795 - DNA, 120 bp, Artificial Sequence
  ENSG00000128573_55 (sequence is synthesized)
aaaaattgacaaaggattgacaaacaccattagctgaaaattttccatttcattgcaactatgcattgtttactttactgtaaatatcttaatacatcatcctctgaatatgctggcaga

SEQ ID NO: 275796 - DNA, 120 bp, Artificial Sequence
  ENSG00000128573_56 (sequence is synthesized)
aagattcctcaatcctgagagagagaattaaagtctaactctccaaatgtctactctaatgtgatgctgggattgaattttcctaggactccgtttcaaggttaattcgaaagtcttgtg

SEQ ID NO: 275797 - DNA, 120 bp, Artificial Sequence
  ENSG00000128573_57 (sequence is synthesized)
gagcttgtttatgatgcaagccagtataaacacagtcggaggatgacacagatagctgcacttttcccagtgacatgagcaagttcttactgcaacaccaacagctttttcctctgacca

SEQ ID NO: 275798 - DNA, 120 bp, Artificial Sequence
  ENSG00000128573_58 (sequence is synthesized)
gtgtggaccctcacttgctgtgggtgttggggcctctctagagcagggaggaaaagttaccctcactattctcagactctggaatctcttagatcaaacaaataatagaagtctgttgaa

SEQ ID NO: 275799 - DNA, 120 bp, Artificial Sequence
  ENSG00000128573_59 (sequence is synthesized)
ctttataaacagtaaatagctctaccaatgtaacagactaagaaaatgaacaatttagtgacagttagaaaacaatgagtgtgatgaaaaatacggcaataaaatgaaagtaaaatgtaa

SEQ ID NO: 275800 - DNA, 120 bp, Artificial Sequence
  ENSG00000128573_60 (sequence is synthesized)
atattgcaatttagaccagttcaatgaaaggaaggttttgacacagctattattaaaatagcttggaaggttctcttatcacaaagttcaaactgcagattccagtaatttgtaagtttg

SEQ ID NO: 275801 - DNA, 80 bp, Artificial Sequence
  ENSG00000128573_61 (sequence is synthesized)
ccctccccgggcgcgccccccactcgcggcagcagctgcccggactcgcgcgtgggtgtgttgtttgggggcttctgcct

SEQ ID NO: 275802 - DNA, 120 bp, Artificial Sequence
  ENSG00000128573_62 (sequence is synthesized)
cgccgccgcgggtgccacctcccgggacgctgcccacggcgtccccggtcgcgatcaaacaaataatagaagtctgttgaagctttgtcctgacctatcctggaagtagaagaatactct

SEQ ID NO: 275803 - DNA, 120 bp, Artificial Sequence
  ENSG00000128573_63 (sequence is synthesized)
ggtgcaatcataactcactgcaacctggaactcctgggctcaagcagtcctccgacctcagcctctgaagtagctaggactacaggaggatgttgtctcttacacccaggttatttgtta

SEQ ID NO: 275804 - DNA, 120 bp, Artificial Sequence
  ENSG00000128573_64 (sequence is synthesized)
cagcaacagcatcaccgggaacttgttagaaatgcacattctcaggccactccctagacctactgaatcagaaaccctggggttggagctcagcaattaccctgcaggctctccaggcag

SEQ ID NO: 275805 - DNA, 120 bp, Artificial Sequence
  ENSG00000128573_65 (sequence is synthesized)
gagagaaaggtctactctaatgtgatgctgggattgaattttcctaggactccgtttcaaggttaattcgaaagtcttgtggaagatctggaagaaacagccagtactcatatatataga

SEQ ID NO: 275806 - DNA, 120 bp, Artificial Sequence
  ENSG00000128573_66 (sequence is synthesized)
aagaggagttggatgtttgtcaataaactcatctggctttaaataaatcaaaacaaaaagaataatttgctactagtcttccaacatgtttgaagaacagcctgctgtttggggaggtat

SEQ ID NO: 275807 - DNA, 120 bp, Artificial Sequence
  ENSG00000128573_67 (sequence is synthesized)
tggttaacagactctctaaagggaagaatctatattaatatgcttcttaaatttagaatttttccgaagtttttactgttgtataagttgaaaatacaaatttaagtggagttaaattat

SEQ ID NO: 275808 - DNA, 120 bp, Artificial Sequence
  ENSG00000128573_68 (sequence is synthesized)
accacgttcataatatgacaaagtttatcaaaatcggttttaatacattttttagatgatctcaaatgccatatcattattgttccagcagtcctctacagattcttagtactactaatg

SEQ ID NO: 275809 - DNA, 120 bp, Artificial Sequence
  ENSG00000128573_69 (sequence is synthesized)
ttctcttgggcataaagcagtgtctaagatgaatctacatcttatgggtcattatcacaggttggtttgtatggtgcaataagaatattcatgatggaataagttgttataatttttact

SEQ ID NO: 275810 - DNA, 120 bp, Artificial Sequence
  ENSG00000128573_70 (sequence is synthesized)
actgttacaggtctctaaaccatttatgaactgtagtcaagatattgcccgtttttataaaccgtaaaatgcaaagtttaactgttacccacagtttacatagaagctagtaaagtgtaa

SEQ ID NO: 275811 - DNA, 120 bp, Artificial Sequence
  ENSG00000128573_71 (sequence is synthesized)
ctttttgcctgtcttataaatcagtgtaattatatattcaactttaattactggtgcgtctgtattggcaaggtttataagttatattttatgcaagactacgattcctattaatattta

SEQ ID NO: 275812 - DNA, 120 bp, Artificial Sequence
  ENSG00000128573_72 (sequence is synthesized)
gcagctaactatatcattaattactctaaaatctttcccctaccatctttttaatggagctgagagagtagaagtattaaaaattgatgtattgtggatttcagaaatgtgtatgacact

SEQ ID NO: 275813 - DNA, 120 bp, Artificial Sequence
  ENSG00000128573_73 (sequence is synthesized)
ttaaaaaatgcctggcttttttcaatagtgtcaagcatattagtgtcttgtttactaaaatgtattgaccgtggtagaactcagaattcagaggaaaaaaatttgaatctgaataatgaa

SEQ ID NO: 275814 - DNA, 120 bp, Artificial Sequence
  ENSG00000128573_74 (sequence is synthesized)
gtgtgtacaccatttagctgtcaggatgagttgtaactcatgtctatacttcctagaattaaacgtcacatacttctaattacaagttattgaggtaagattagtcctttctcttatttt

SEQ ID NO: 275815 - DNA, 120 bp, Artificial Sequence
  ENSG00000128573_75 (sequence is synthesized)
tatattgtcttcctttatttttccattcaatatctagtaaaaggtctgaaagagaaatatactctttatatgtacccattttcacttgacctttcacagggtattatttttgttgtcttt

SEQ ID NO: 275816 - DNA, 120 bp, Artificial Sequence
  ENSG00000128573_76 (sequence is synthesized)
ttaaacattttattctgtttgacatattaatgtctttaagagcatatgtctaattgctttatagcacttttactctatcacctttgcaaaaaaacacactgtgaacattaatgtgtttta

SEQ ID NO: 275817 - DNA, 120 bp, Artificial Sequence
  ENSG00000128573_77 (sequence is synthesized)
tcaggttccgaaccattacttcttcaaaatggaaaaatttgtcttttggaagtgtctttagatgtattaaataatacaaaagaagtaataaaactcaaagtagaaagaacatgaatatat

SEQ ID NO: 275818 - DNA, 120 bp, Artificial Sequence
  ENSG00000128573_78 (sequence is synthesized)
ctaaaacaaggaaagtgagcaatcagacaaaagtttttatatccccgctttatcctatcagccatgcagtgggtagcttgcggccttttactttcagcagttctcctgagtatgctaaat

SEQ ID NO: 275819 - DNA, 120 bp, Artificial Sequence
  ENSG00000128573_79 (sequence is synthesized)
agtttattaaacattatatttcagaacctgaaataataattgggctaaattgtagcattgttagatgggtattggttttcgtttggcaattgctacttcagatttttcattttattatta

SEQ ID NO: 275820 - DNA, 120 bp, Artificial Sequence
  ENSG00000128573_80 (sequence is synthesized)
ctacttcagatttttcattttattattaaagtttatgaaatatttcagagaaatattagtatgtattagataacacctaaaaattatacatataatgtccagtatattgctgctatgggt

SEQ ID NO: 275821 - DNA, 120 bp, Artificial Sequence
  ENSG00000128573_81 (sequence is synthesized)
atataacacattttatgcttatatgaattagtgcatttgaaaaatacttatgtttattttccatagataaaaggaaagcttgttgaaaatagatttcagaaaaaataaaaattaaaaggg

SEQ ID NO: 275822 - DNA, 120 bp, Artificial Sequence
  ENSG00000128573_82 (sequence is synthesized)
gtgtaaattgtccctttttctaagttacatcaattataatcaaaattttaattatcttgcagaatattgagtcaatattcattcttaaatctgtttctgctgctgtcattaggtttttgc

SEQ ID NO: 275823 - DNA, 120 bp, Artificial Sequence
  ENSG00000128573_83 (sequence is synthesized)
ataatagatgtcaaatatttatgaaatatttcagtattctctatcttcacctttataaagttctaagatgcttgtacttaaaccatgttatgtattttattaggcaaaggaagaaatatt

SEQ ID NO: 275824 - DNA, 120 bp, Artificial Sequence
  ENSG00000128573_84 (sequence is synthesized)
gatataattctctcagtcaaaatttggttgtatataattgagtgcatttcaaaatactttggaaattaaacagaagtgaaataatttttataagacatttacacagcatacttatatctc

SEQ ID NO: 275825 - DNA, 120 bp, Artificial Sequence
  ENSG00000128573_85 (sequence is synthesized)
ctaaaatgaagtcatgttacttgttgttttagaggggggtagttgtgctgatgcaattgtaaacaagaggaaatagggcctagtggtatcagaacataggttgtaatgccagactgtcag

SEQ ID NO: 275826 - DNA, 120 bp, Artificial Sequence
  ENSG00000128573_86 (sequence is synthesized)
ggttccaattccagattcaatagttaatagccaagtgggattgagcacgttacttaatatttctttcctcagctttctcagctgaaaatgaggtaagtaataatataatgcttcttattt

SEQ ID NO: 275827 - DNA, 120 bp, Artificial Sequence
  ENSG00000128573_87 (sequence is synthesized)
cataagattcttgcaaagaaatgagtgcctggaacataataattgctccttgtgtctctcatagtgctgtgtaaataggtactgatttatattacttcctgtaatacctcactgttacta

SEQ ID NO: 275828 - DNA, 120 bp, Artificial Sequence
  ENSG00000128573_88 (sequence is synthesized)
aaaatgagtctataaacaatatgaaaatatttttgtattttgcattttaaggcactctgtaagtttgtggttagtcattgacaatccattttcttctccttctttcttctcttataattc

SEQ ID NO: 275829 - DNA, 120 bp, Artificial Sequence
  ENSG00000128573_89 (sequence is synthesized)
attcataaagtaagcagatccataaaactgaaacaacatgaggccaggcatggtggcttatgccagtaatcccagcattttgggaggggagggcaggaggattgcttgaggccaggagtt

SEQ ID NO: 275830 - DNA, 120 bp, Artificial Sequence
  ENSG00000128573_90 (sequence is synthesized)
gcctggacaacatagtgagaccctgtatctacaaaaataattttaaaaattagttgggtgtggtgtgtgcctgtatacagtcctagctactcaggaggctcaggcaggaggaaagcttga

SEQ ID NO: 275831 - DNA, 120 bp, Artificial Sequence
  ENSG00000128573_91 (sequence is synthesized)
ttgagcctagggatttcgaggttacagtaagctatgatcatggcatggaactccagcctgcaccacagagtgagactctatctgtctctaaaaataaaaagtgaaacaatatgacacaag

SEQ ID NO: 275832 - DNA, 120 bp, Artificial Sequence
  ENSG00000128573_92 (sequence is synthesized)
gacttattataggtagcacattacctatatttaggtatctgaagttacctagttatctgaagttttaggcaatgaacaactcaaatagaacaacaccaacccagaatcagggacatatca

SEQ ID NO: 275833 - DNA, 120 bp, Artificial Sequence
  ENSG00000128573_93 (sequence is synthesized)
tatatgtcttgaaaacattgagtattagttttgaaaggaatttagaatacataagggaatacagaatttagaatataggaagtgggaccagactgctgagtgacttaaatatcaagctat

SEQ ID NO: 275834 - DNA, 120 bp, Artificial Sequence
  ENSG00000128573_94 (sequence is synthesized)
ggtgtttgtttcagtcagtatacagcttgttactgttatcagcttgactttgacacgatcagagctatgcattagaaacagtaatctaaaagtgtactgaatgaaccatgacttaatgaa

SEQ ID NO: 275835 - DNA, 120 bp, Artificial Sequence
  ENSG00000128573_95 (sequence is synthesized)
actcatgtataggagaatattctgaaattgggagagactggaagcagaaaattaattcttgcagtatgtaatatctaacataaatacaagactaggagtggagagcaaagaatccgtata

SEQ ID NO: 275836 - DNA, 120 bp, Artificial Sequence
  ENSG00000128573_96 (sequence is synthesized)
agaagtgctgtgaaaagaaatactggaacaagacaaccaactgaatgctagggacaaagatgaaaattgggaaaattcatagccactttaaaagtctgcaaagagaaatagaggacacaa

SEQ ID NO: 275837 - DNA, 120 bp, Artificial Sequence
  ENSG00000128573_97 (sequence is synthesized)
gaagcaggttcaaaagggaagatgaagaattcagcattttacttggggaatctaagaacctaaatatcattagattcaggagaaaacactgatgatttttttgattagtcttttaattca

SEQ ID NO: 275838 - DNA, 120 bp, Artificial Sequence
  ENSG00000128573_98 (sequence is synthesized)
actccattatagtaaaattctacgtggtagaatatgaatatatacctgaggttgatagagaagatgttttttgaagcattagaagagtgaaatagatatggtctggtgcttcttataaat

SEQ ID NO: 275839 - DNA, 120 bp, Artificial Sequence
  ENSG00000128573_99 (sequence is synthesized)
tgtggagaacaagagatgccaaattatcatttatattccatactccatattttaacccttttcttccactccagttttcgctttattcagtgtcctgaataaaggcctcttccaaattaa

SEQ ID NO: 275840 - DNA, 120 bp, Artificial Sequence
  ENSG00000128573_100 (sequence is synthesized)
tgcatttatttcgctcacactatttgaatttctgccctttcccttttctggttcccctctactctcttacctaaattctacctttccttacaggactagtcctatttttttccaagaggg

SEQ ID NO: 275841 - DNA, 120 bp, Artificial Sequence
  ENSG00000128573_101 (sequence is synthesized)
tttcccaaggaattttactatcaggaccatgcactctgctccacacttctaaagagcttgcttcttataccactattttggactaatactttgtgtacatgtgtgagtgtgtgtgcacac

SEQ ID NO: 275842 - DNA, 120 bp, Artificial Sequence
  ENSG00000128573_102 (sequence is synthesized)
acacatgcacgtgtgtttatgcatacatctgtgttcattttgcagatatccctaccttaatgacaagtcccttaaagacagattatgttttagacaaattatagtataagaaacccctag

SEQ ID NO: 275843 - DNA, 120 bp, Artificial Sequence
  ENSG00000128573_103 (sequence is synthesized)
cacattctactatgtcaagtaagcattcagtaaaagtatgatactgattatgaagaatcaaattggagattacagttaattagaaatggtttgacttcacaaagtcatacttacaggagt

SEQ ID NO: 275844 - DNA, 120 bp, Artificial Sequence
  ENSG00000128573_104 (sequence is synthesized)
ataaaatccagggttctcctagaatcttgaagaaggagaacaaaagagattttaggaagaacagatgagtaaatataatgttcatttttatgtgggagctaggaaaattttctaaatatt

SEQ ID NO: 275845 - DNA, 120 bp, Artificial Sequence
  ENSG00000128573_105 (sequence is synthesized)
ggtagactatactttttaagttttatttttagttttaattatttaattaatatgtattttataaccattccaatttacgtgagtaaaaagtggctttccactttgagtagaatgaggccc

SEQ ID NO: 275846 - DNA, 120 bp, Artificial Sequence
  ENSG00000128573_106 (sequence is synthesized)
cttcacctcattcatgattatcatctcaaccttgttaaattttatttacattgttgaaagattgaaaacaattatcaaaatttaggcaatataaatcagatgaatgtttaaggggatttc

SEQ ID NO: 275847 - DNA, 120 bp, Artificial Sequence
  ENSG00000128573_107 (sequence is synthesized)
agcaaaaagtaggaaaggttaaagccaggcgacattgtatagattctacataataattttttgaaacttctttgactgttttgactcaactacttattgattcaaagcaagtacttcact

SEQ ID NO: 275848 - DNA, 120 bp, Artificial Sequence
  ENSG00000128573_108 (sequence is synthesized)
tttaaaacatttttattttctattgctgttcaaagagtcctagaaacatccatggtatgaataaaggaaaacgatactttaagtgtccgagctgagtatcattacaatttataatattgt

SEQ ID NO: 275849 - DNA, 120 bp, Artificial Sequence
  ENSG00000128573_109 (sequence is synthesized)
tcccttatgcacctgaatgccaatattccctttttcagagttatatagaatatgaattaaaaatgactagcttcctattttatatagacatttacctctagaaatgtttaaaaggttagg

SEQ ID NO: 275850 - DNA, 120 bp, Artificial Sequence
  ENSG00000128573_110 (sequence is synthesized)
attgatgctgtctttaagcagaaataatttgaacttactgtcttctctcatgtgttggacttaagtgaatgacaagagaagaaaacatgtagactagacttggaagatgaacgcatactg

SEQ ID NO: 275851 - DNA, 120 bp, Artificial Sequence
  ENSG00000128573_111 (sequence is synthesized)
atacaatcaatccatttcctgtctacttcccaacctaaggcaagaagtggaatttaatgatgtacccaccatgtttagttctactcagttgtttctttttgtattaagtaattgtttctc

SEQ ID NO: 275852 - DNA, 120 bp, Artificial Sequence
  ENSG00000128573_112 (sequence is synthesized)
ctcattctcaataagttggttcagatttgctgttcttcctcgtataaaatgttaaatgagattcccatttttatattttcaaatgttgtgtctagagatcaaaataaatattcttcccta

SEQ ID NO: 275853 - DNA, 120 bp, Artificial Sequence
  ENSG00000128573_113 (sequence is synthesized)
gcagtgggcatatttgacaattcagtctccatttgaaaggacaacctattagcgtgctagaacataaatgtaacattttaattatagaactcgtaagaaaatctagattgcttatttttt

SEQ ID NO: 275854 - DNA, 120 bp, Artificial Sequence
  ENSG00000128573_114 (sequence is synthesized)
taaaaaaattattaaagtctagaataagagcagagagaggtgtaatttgaaaatggaatgagccaatatttaaatattcaaatgcttaggtacattcaatttgttgacttgccaaaaaaa

SEQ ID NO: 275855 - DNA, 85 bp, Artificial Sequence
  ENSG00000128573_115 (sequence is synthesized)
cagcatcctgtccaaattggcagcccagcagcttgtcttccagcagcagcttctccagatgcaacaactccagcagcagcagcat

SEQ ID NO: 275856 - DNA, 120 bp, Artificial Sequence
  ENSG00000128573_116 (sequence is synthesized)
atattaaaatccagtaagtttcttgatcttgaggattattcctggagtactcttcgctccctggtgggcaggctttggccatgcaaggtgcgctaggtggcctggatcaaacaaataata

SEQ ID NO: 275857 - DNA, 120 bp, Artificial Sequence
  ENSG00000128573_117 (sequence is synthesized)
ggcctagaagaaatgaactactgcaacttatgaggaatcatgagatccagctcacttttgctcaatacctatcaaaagcttgtcccagagtgattatggaggattgcatgcaggatacac

SEQ ID NO: 275858 - DNA, 120 bp, Artificial Sequence
  ENSG00000128573_118 (sequence is synthesized)
acttcattaaatcctctaaaatctaactttgattaattaagtacagggttattgctgatagcctcataactctaccaccattataatggatctatataaaattgcttaatatcagtagcc

SEQ ID NO: 275859 - DNA, 120 bp, Artificial Sequence
  ENSG00000128573_119 (sequence is synthesized)
taaatttaggagcactatagttttaaaaatacttaattggctactttatttaacaatgttttagggatgtcgttcagtatcttttccagtgtttgctacctaagatcccattggggtaaa

SEQ ID NO: 275860 - DNA, 120 bp, Artificial Sequence
  ENSG00000128573_120 (sequence is synthesized)
aatataactcagatttcactgttaggaatagttctgtttgtgagcaacttacttcctttcatcttacacaatgaaccttgtaatttaattatgattttctcttcatacgagctgttagaa

SEQ ID NO: 275861 - DNA, 120 bp, Artificial Sequence
  ENSG00000128573_121 (sequence is synthesized)
agctcagcattaaatttgtggctcacctctagcaaatatataacacttaatgatgtgactgtcctgattctaaaactttttctcttggttttttactttttaaataaaaacacatttaac

SEQ ID NO: 275862 - DNA, 120 bp, Artificial Sequence
  ENSG00000128573_122 (sequence is synthesized)
tgaaggaggaatgtaaaagtccattataagtcatacttcaagatttttgtgggttccaacaagtggattagtaagatcaggcttcatcttttcattaagatattttacaaatcatttagt

SEQ ID NO: 275863 - DNA, 120 bp, Artificial Sequence
  ENSG00000128573_123 (sequence is synthesized)
gcttcatcttttcattaagatattttacaaatcatttagtaaagatttttgaatgaatgaaaaatattagcctacaataatatgtcattaatcactggagacatttataacagaactatt

SEQ ID NO: 275864 - DNA, 120 bp, Artificial Sequence
  ENSG00000128573_124 (sequence is synthesized)
tttttaaaatagtagtatttagtatatacatgtaactacaagaattaaaagtgaaagtttatactggctaaaattaaaaaaactacatttcatttacattgttactttttgcccttagaa

SEQ ID NO: 275865 - DNA, 120 bp, Artificial Sequence
  ENSG00000128573_125 (sequence is synthesized)
acatcaagaaacacacatggctatatgtttgtataacagattacatggcttctctagcttaaaaccaaaactttgtgtattcttaatttttaatagaaaattttatttttaaaaaaatca

SEQ ID NO: 275866 - DNA, 120 bp, Artificial Sequence
  ENSG00000128573_126 (sequence is synthesized)
taaggggttctttttcaagtgaaaatcttcatctttcatgaaatgttttccttacacaattctggtgtacaagagatctaaacagagagctacagataggcttatggagatgagtaactt

SEQ ID NO: 275867 - DNA, 120 bp, Artificial Sequence
  ENSG00000128573_127 (sequence is synthesized)
cacaggctgagactcttatgttgtcatggtgcagctaacagggtgagtgaactgtttcatgcttcatcaacaattaagttaattagctcatttgaaattgcactgctttgttgccaggat

SEQ ID NO: 275868 - DNA, 120 bp, Artificial Sequence
  ENSG00000128573_128 (sequence is synthesized)
gttggcagaaacatcaaaaagatgtgtttacaaatggaagactgactacagggtatagagcaaaagcaccttaacaaccaggcacaagtacttggcatcacaataactttataaatgaat

SEQ ID NO: 275869 - DNA, 120 bp, Artificial Sequence
  ENSG00000128578_0 (sequence is synthesized)
caaagcgagctgaaccctgaggggagccgctgaccagcagcatggaggaccccgccgcgcctgggaccgggggcccgcccgcaaatggcaatggcaacggcggcggcaaagggaagcagg

SEQ ID NO: 275870 - DNA, 120 bp, Artificial Sequence
  ENSG00000128578_1 (sequence is synthesized)
cggcgcccaagggccgcgaagcgttccgaagccagcggcgggagtcagagggctctgtggactgtcccactctggagtttgagtatggagatgcagatgggcatgcagccgagttgtcag

SEQ ID NO: 275871 - DNA, 120 bp, Artificial Sequence
  ENSG00000128578_2 (sequence is synthesized)
aattgtatagttacactgagaacctggaattcaccaataacaggaggtgctttgaagaagatttcaagactcaagtgcagggcaaggaatggctggagttggaagaagatgcccaaaagg

SEQ ID NO: 275872 - DNA, 120 bp, Artificial Sequence
  ENSG00000128578_3 (sequence is synthesized)
cctatataatgggactcttggaccggctagaggtggtcagtagggaacggcggctgaaggtggcccgggctgttctctacctggcccaaggtacttttggggaatgtgattcagaggtcg

SEQ ID NO: 275873 - DNA, 120 bp, Artificial Sequence
  ENSG00000128578_4 (sequence is synthesized)
atgtgctacactggtccaggtacaactgcttcctgctgtatcagatggggaccttctccaccttcctggagctactccacatggaaattgacaacagccaggcctgtagcagtgcccttc

SEQ ID NO: 275874 - DNA, 120 bp, Artificial Sequence
  ENSG00000128578_5 (sequence is synthesized)
ggaaaccagctgtctccatagctgatagcacagagctcagggtgctgctgagtgttatgtacctaatggtggaaaatattcgcctggagcgagagacagacccctgtgggtggagaacag

SEQ ID NO: 275875 - DNA, 120 bp, Artificial Sequence
  ENSG00000128578_6 (sequence is synthesized)
cccgggagaccttccgcactgaattaagcttctccatgcataatgaggagccttttgcccttttactcttctccatggttaccaagttctgcagtggcctggctcctcacttccccataa

SEQ ID NO: 275876 - DNA, 120 bp, Artificial Sequence
  ENSG00000128578_7 (sequence is synthesized)
agaaggtcctgctcctgctctggaaggtggtcatgtttaccctcggtggatttgagcatctgcagactctcaaagtacagaagcgggcagaattgggcctgcctccactggctgaagaca

SEQ ID NO: 275877 - DNA, 120 bp, Artificial Sequence
  ENSG00000128578_8 (sequence is synthesized)
gtatccaggtggtgaagagcatgcgtgctgcctccccgccctcttacactcttgacctgggagagtctcagctggcacccccaccctccaagctgcgaggccgccgtggctctcgaaggc

SEQ ID NO: 275878 - DNA, 120 bp, Artificial Sequence
  ENSG00000128578_9 (sequence is synthesized)
aactcctcactaagcaggacagcctggacatctacaatgaaagggatctcttcaagactgaggagcccgccacagaggaggaagaggagtctgctggtgatggagaacgaaccttggatg

SEQ ID NO: 275879 - DNA, 120 bp, Artificial Sequence
  ENSG00000128578_10 (sequence is synthesized)
gagagctagacctgctagagcaggaccctctggtgccacctccaccctcacaggcacccctctctgctgagcgggtggcttttcccaagggcctgccctgggccccaaaggtcagacaga

SEQ ID NO: 275880 - DNA, 120 bp, Artificial Sequence
  ENSG00000128578_11 (sequence is synthesized)
aggacattgagcacttcttggagatgagcaggaacaagttcatcggattcaccctggggcaggacacagatacattggttggattacccaggcccatccatgagagtgtgaagaccctaa

SEQ ID NO: 275881 - DNA, 120 bp, Artificial Sequence
  ENSG00000128578_12 (sequence is synthesized)
agcagcacaagtatatctccatcgcagatgtgcagatcaagaatgaagaggagctggagaagtgccctatgtctttgggggaagaggtggtaccagagacgccatgtgaaatcctctacc

SEQ ID NO: 275882 - DNA, 120 bp, Artificial Sequence
  ENSG00000128578_13 (sequence is synthesized)
agggaatgctgtacagccttccgcagtatatgatcgctctgcttaagattctgctggctgcagctcccacctctaaggctaagacagactctatcaatatcctggcagatgtcctacctg

SEQ ID NO: 275883 - DNA, 120 bp, Artificial Sequence
  ENSG00000128578_14 (sequence is synthesized)
aggagatgcccatcactgttctccagagcatgaagctgggcatcgatgtgaacaggcacaaggagattattgtaaagagtatctctaccctgcttctgctactcctcaaacacttcaaac

SEQ ID NO: 275884 - DNA, 120 bp, Artificial Sequence
  ENSG00000128578_15 (sequence is synthesized)
tcaaccatatctaccagtttgaatatgtatcgcaacatttggtatttgccaactgcatccccttgatcctgaagttcttcaatcaaaatatcttgtcatacatcactgccaaaaacagca

SEQ ID NO: 275885 - DNA, 120 bp, Artificial Sequence
  ENSG00000128578_16 (sequence is synthesized)
tctcagtcctggattatccttgctgtaccatccaggatttgccggagcttactactgaaagtctggaagctggagacaacagccagttctgctggaggaacctcttttcctgcatcaacc

SEQ ID NO: 275886 - DNA, 120 bp, Artificial Sequence
  ENSG00000128578_17 (sequence is synthesized)
tcctgaggctgctcaataaactgaccaaatggaaacattcccggaccatgatgctggtagtgtttaaatcggcaccaatcttaaagcgggccctcaaggtcaaacaggccatgctgcaac

SEQ ID NO: 275887 - DNA, 120 bp, Artificial Sequence
  ENSG00000128578_18 (sequence is synthesized)
tttatgtcctaaagctactaaagttacagaccaagtacctggggcgccaatggaggaaaagcaacatgaaaaccatgtcagccatttaccagaaagtgcgtcaccgcatgaacgatgact

SEQ ID NO: 275888 - DNA, 120 bp, Artificial Sequence
  ENSG00000128578_19 (sequence is synthesized)
gggcttacgggaatgacatcgatgccagaccatgggacttccaagcagaagaatgtaccttgagggccaacattgaggcttttaacagccgtcgctatgacagaccccaggactctgagt

SEQ ID NO: 275889 - DNA, 120 bp, Artificial Sequence
  ENSG00000128578_20 (sequence is synthesized)
tttcacctgtggataactgcttgcagagcgtactggggcagaggttggatctgcctgaagatttccactattcatatgagctctggctcgagagagaggtgttttcacagcccatctgtt

SEQ ID NO: 275890 - DNA, 120 bp, Artificial Sequence
  ENSG00000128578_21 (sequence is synthesized)
tgtgctctgcctaccctgtccatacaggcgctgttaccagttcagggctcttctgggggctcttgggcctaaagatggtgcaagggtgggatcctgaatcacaataaaatgatcaacttg

SEQ ID NO: 275891 - DNA, 120 bp, Artificial Sequence
  ENSG00000128578_22 (sequence is synthesized)
ccctggggtcagttgggtgcccagttggccttggaaatcttttggtggatcaattctagacaagctctttggtaggaccttttcctgctttagtcttggctacaaccaggctagactttg

SEQ ID NO: 275892 - DNA, 120 bp, Artificial Sequence
  ENSG00000128578_23 (sequence is synthesized)
ctggctctaaaagaggaaatttgttatggcatttgacccatggcattcatcacagatagtgggaggtacaagtcataaaatagggagaaagttttcttcttgctcacactggattcctag

SEQ ID NO: 275893 - DNA, 120 bp, Artificial Sequence
  ENSG00000128578_24 (sequence is synthesized)
gacttatcagagatttggaaaaaccaactttgaaattaagtttgcattttaaatttcaaatttggaagcctctttctgaaatcattagctctaagattattttagagcacctgcaccttc

SEQ ID NO: 275894 - DNA, 120 bp, Artificial Sequence
  ENSG00000128578_25 (sequence is synthesized)
tttgtgaaggatgatgatttactattccctcaatactgcatgttatcgaaaagtgtgttgtgtaaagtgtttttttcctcattctgtaagagatctatattcaatgtgaaaattatttcc

SEQ ID NO: 275895 - DNA, 120 bp, Artificial Sequence
  ENSG00000128578_26 (sequence is synthesized)
ttgtgtactctgtatagggcatggaatgctctgccatttttaaagagccacaaccaatatgaaataattaggtcctctctaaggatgtttcatgtttttcttaaatgactccagtcttca

SEQ ID NO: 275896 - DNA, 120 bp, Artificial Sequence
  ENSG00000128578_27 (sequence is synthesized)
aatggctgagcatactgcagaaaattatccttttcatctaattcattttttaaatgacaagttaactacaggaggctttatttattcagatggtatgtccacttgtggtcgtgatcaata

SEQ ID NO: 275897 - DNA, 120 bp, Artificial Sequence
  ENSG00000128578_28 (sequence is synthesized)
tatttttctaattgaaaagtaaaagcatcacagcttaccatttttctttttctgcagtgttgattaatgatttttttcccgtttattgctagcagtttcaaagtgtcatgtggagattta

SEQ ID NO: 275898 - DNA, 120 bp, Artificial Sequence
  ENSG00000128578_29 (sequence is synthesized)
gcaatactgtctctacttaaaagtattgcacatttcattgaaaatgtgagagttgatataccagcctctttatatttctcttttacagcagaatcacatacttctcaagataaacaaggt

SEQ ID NO: 275899 - DNA, 69 bp, Artificial Sequence
  ENSG00000128578_30 (sequence is synthesized)
ttttacagcagaatcacatacttctcaagataaacaaggtttttaaaaaagtttctgatttagttagga

SEQ ID NO: 275900 - DNA, 78 bp, Artificial Sequence
  ENSG00000128578_31 (sequence is synthesized)
cctgacctcaggtgatccgcccgcctccacctcccagcaagcttttttactatacatgttgcccctctcccccaactt

SEQ ID NO: 275901 - DNA, 120 bp, Artificial Sequence
  ENSG00000128578_32 (sequence is synthesized)
aagcttttttactatacatgttgcccctctcccccaacttaggcactactgaattttttatgatggcaccaggtcactttatgctgggtgatatagtcaaaatttgcttatttactctgc

SEQ ID NO: 275902 - DNA, 120 bp, Artificial Sequence
  ENSG00000128578_33 (sequence is synthesized)
ccctcgtcaaccacagtatcatttcaaggacatgaataaaatacttgacagtatccaaaggagctataccaaaatctaacaagtaaattttggattttgcctctttgtgctttaaagtac

SEQ ID NO: 275903 - DNA, 120 bp, Artificial Sequence
  ENSG00000128578_34 (sequence is synthesized)
caggatttctgtctctatggataggtcttggagaatgttaagtaatggatgaaactttttaaaataatttgtaaattttacctaagtaggacagtagtccttactgcaatcaaaataatt

SEQ ID NO: 275904 - DNA, 120 bp, Artificial Sequence
  ENSG00000128578_35 (sequence is synthesized)
tactgagcacaactcctgtaaattaatctacagtcaggctagtatgattttaatatgatttgagtaaaaagataattttcaaggaaagagtaatcatccatcaatttattataaagccag

SEQ ID NO: 275905 - DNA, 120 bp, Artificial Sequence
  ENSG00000128578_36 (sequence is synthesized)
atagtattcaatttatgtcaagaacaaagaaattgcccttttaaaagcatgtacgtgaatgctttttgaggcacagaagtatgctaagctttaacattttgtatttatttacaacccttt

SEQ ID NO: 275906 - DNA, 120 bp, Artificial Sequence
  ENSG00000128578_37 (sequence is synthesized)
tctaagggaaggttacttctcagtgcagatggagaaactgaagcactaaggataaatgattagtttccaatcacatcatttttttccacagacttgctgggactagctttcaggtattga

SEQ ID NO: 275907 - DNA, 120 bp, Artificial Sequence
  ENSG00000128578_38 (sequence is synthesized)
cagacttgctgggactagctttcaggtattgacagccagccccatatattaaggtaaccaggttgaatcttccaatttgagaacccatgtatgggttgcagtgagccgagatcatgccac

SEQ ID NO: 275908 - DNA, 120 bp, Artificial Sequence
  ENSG00000128578_39 (sequence is synthesized)
ccgtctcaaaaacaaagaaggatataataaagttaatatataaaccatgtatgtggttaggaataaattcaaattcaccagtctccaatggtgattacttttactacatagaaaaacatt

SEQ ID NO: 275909 - DNA, 120 bp, Artificial Sequence
  ENSG00000128578_40 (sequence is synthesized)
ttagtgacttacagaggatttttatttgtgaatatttcagtaaagtttgtgttgattgttgataacactgttcatctactgaagcactttaataaaaataaaatgagctggaattagaaa

SEQ ID NO: 275910 - DNA, 120 bp, Artificial Sequence
  ENSG00000128578_41 (sequence is synthesized)
tgtcacagagcatgtgtgcatgcattcattcagcatattaggctgtaactgtgttccaggcaagacaaggtccctactttcatgatatattgaagttggggaagaaagataaaaaataaa

SEQ ID NO: 275911 - DNA, 120 bp, Artificial Sequence
  ENSG00000128578_42 (sequence is synthesized)
gggcttacgggaatggtgagtcttcccaaagctcttgacttcctggagtttcctggggtttagacaaaactaaataaatatttatcactcctcttttggcatgaattgttacatatttta

SEQ ID NO: 275912 - DNA, 120 bp, Artificial Sequence
  ENSG00000128578_43 (sequence is synthesized)
gatgaaaaaatatgtgattataggtcaggcgctgatacaccaaactttaaggttatgcctcaaattctagtatgtacccttgtcctatgtaaactatgaaaatccgttttataaaacaag

SEQ ID NO: 275913 - DNA, 120 bp, Artificial Sequence
  ENSG00000128578_44 (sequence is synthesized)
taaattgagagataattaattgcctttccaaaacattcttttaaatgacagctttctccaaaagatttaaattaaaacaactttttattattacaaagcagttagaaaaaaagatagaaa

SEQ ID NO: 275914 - DNA, 120 bp, Artificial Sequence
  ENSG00000128578_45 (sequence is synthesized)
atacaagtaaacaaacattttactatattatatttatgccatatttgtactatgcagaaattgccaccattaacatcttattgtatattcctccagatctttttctatgcatatacatgc

SEQ ID NO: 275915 - DNA, 120 bp, Artificial Sequence
  ENSG00000128578_46 (sequence is synthesized)
atattttatcaaaatgaaagcaagttatgtatgctattttgtaattttctcttttaacattatctctaccttttcatgtcagtacattttcatttcatctaataaagttcatattcacaa

SEQ ID NO: 275916 - DNA, 120 bp, Artificial Sequence
  ENSG00000128581_0 (sequence is synthesized)
gggcctctctccgtcgccatggaaacgaaagcggccaagtagagctccgtcctgacgcgccgcctcccgtgggctccggccggctaagccgcggcggacaactatgctgaaagccaagat

SEQ ID NO: 275917 - DNA, 120 bp, Artificial Sequence
  ENSG00000128581_1 (sequence is synthesized)
cctcttcgtggggccttgcgagagtggaaaaactgttttggccaactttctgacagaatcttctgacatcactgaatacagcccaacccaaggagtgaggatcctagaatttgagaaccc

SEQ ID NO: 275918 - DNA, 120 bp, Artificial Sequence
  ENSG00000128581_2 (sequence is synthesized)
gcatgttaccagcaacaacaaaggcacgggctgtgaattcgagctatgggactgtggtggcgatgctaagtttgagtcctgctggccggccctgatgaaggatgctcatggagtggtgat

SEQ ID NO: 275919 - DNA, 120 bp, Artificial Sequence
  ENSG00000128581_3 (sequence is synthesized)
cgtcttcaatgctgacatcccaagccaccggaaggaaatggagatgtggtattcctgctttgtccaacagccgtccttacaggacacacagtgtatgctaattgcacaccacaaaccagg

SEQ ID NO: 275920 - DNA, 120 bp, Artificial Sequence
  ENSG00000128581_4 (sequence is synthesized)
ctctggagatgataaaggaagcctgtctttgtcgccacccttgaacaagctgaagctggtgcactcaaacctggaagatgaccctgaggagatccggatggaattcataaagtatttaaa

SEQ ID NO: 275921 - DNA, 120 bp, Artificial Sequence
  ENSG00000128581_5 (sequence is synthesized)
aagcataatcaactccatgtctgagagcagagacagggaggagatgtcaattatgacctagccagccttcacctgggactgccacatccccagtgaaatcagcatgtttctcggtgcaga

SEQ ID NO: 275922 - DNA, 120 bp, Artificial Sequence
  ENSG00000128581_6 (sequence is synthesized)
tctgaaatcacatccagctcctgatgttttcttctccctctgactgcagaggaagtgttcctacctgcaggaaggcacctgtcacacagggcgttcactcagaccatctgtgctctgccc

SEQ ID NO: 275923 - DNA, 120 bp, Artificial Sequence
  ENSG00000128581_7 (sequence is synthesized)
tgagttcagttgagaaaatcctattatcaaatttggatttcctggccccagaacttcccaaagacctgtaaaatggagggatttaccacctcacatatgtccagttaaacagtttgtgga

SEQ ID NO: 275924 - DNA, 120 bp, Artificial Sequence
  ENSG00000128581_8 (sequence is synthesized)
cttgtaaccgtcgcagcccaatgatacaacagtagtttaatcacgtgtattggcttgaatgtgattttcattccttgattcacccaacaaataccgactggctgagcacctgctgtgtgt

SEQ ID NO: 275925 - DNA, 120 bp, Artificial Sequence
  ENSG00000128581_9 (sequence is synthesized)
gcactgctgttctagctgctgaccatagacagcataaatgaaaaagacagaaattcccaccttcgtggaactctccattttcctaaatgttaggttggtgcaaaactaatcgtggttttt

SEQ ID NO: 275926 - DNA, 120 bp, Artificial Sequence
  ENSG00000128581_10 (sequence is synthesized)
gccatttttaatttttaatggcaaaagccactattacttttgcaccaacctaataggccgattcagaaacttgagtgcaatgtcttggatatgcaaaaaagaaaatcaaaacgcattctt

SEQ ID NO: 275927 - DNA, 63 bp, Artificial Sequence
  ENSG00000128581_11 (sequence is synthesized)
tgtcttggatatgcaaaaaagaaaatcaaaacgcattcttcattctctataagagttctaggc

SEQ ID NO: 275928 - DNA, 71 bp, Artificial Sequence
  ENSG00000128581_12 (sequence is synthesized)
accccatctctactaaaaatagaaaaatcagctgggtgtggtgcttgagcccgggagacagaggttgcagt

SEQ ID NO: 275929 - DNA, 66 bp, Artificial Sequence
  ENSG00000128581_13 (sequence is synthesized)
acagggtgtgttggcacacgcctgtaataccagctactcaggtggctgaggcataagaattgcttg

SEQ ID NO: 275930 - DNA, 120 bp, Artificial Sequence
  ENSG00000128581_14 (sequence is synthesized)
ataccagctactcaggtggctgaggcataagaattgcttgagcctgggaggcagagattgcactgagccgagatcgcgccactatactccagcctgggcaacagacatcctgtctcaaat

SEQ ID NO: 275931 - DNA, 120 bp, Artificial Sequence
  ENSG00000128581_15 (sequence is synthesized)
aaattaaattacattaaatgtttaagaagaagtctaaataagtttcatatgctgccctccctcagataatgagggaacctggggtacttaaaatgccaaatgaacgtatacttgatcctt

SEQ ID NO: 275932 - DNA, 120 bp, Artificial Sequence
  ENSG00000128581_16 (sequence is synthesized)
attcatagattttgtatttgagaatttgcctactcactaaaatatgtttgtaacccccaaatcaatactgtggcactttctcagttattcgcagacacacagagacaaaaaatttgaagt

SEQ ID NO: 275933 - DNA, 63 bp, Artificial Sequence
  ENSG00000128581_17 (sequence is synthesized)
tgcctgtagtcccagctactcagaagggtgaggcagaattgcctgaacccgcgaggcaaaaaa

SEQ ID NO: 275934 - DNA, 120 bp, Artificial Sequence
  ENSG00000128581_18 (sequence is synthesized)
aaatacaaaaattcgccaggcatgttggcacacacctgtaataccagctactcatgtggctgaggcataagaattgcttgagcctggaggccgggtgcagtggcttacgcctgtaatccc

SEQ ID NO: 275935 - DNA, 120 bp, Artificial Sequence
  ENSG00000128581_19 (sequence is synthesized)
tccgtcacaaaaaaaaaaaaaaaaaaaacaactctctccaaaacattatatttatttagatgaccttgatatggacactatatccagttggaaagtggagtacagacacaattttttgtt

SEQ ID NO: 275936 - DNA, 120 bp, Artificial Sequence
  ENSG00000128581_20 (sequence is synthesized)
tggaaagtggagtacagacacaattttttgttttttgtttttttgagacacggtgtcactctgtcatcccggctggagtgcagtggcatgaccacagctcacagcagcctcaatctcctg

SEQ ID NO: 275937 - DNA, 120 bp, Artificial Sequence
  ENSG00000128581_21 (sequence is synthesized)
cctgggctccactgatctcgccagctcagcctctgagtagttgagactagagatacacacaccagtaatggtccagcccactaattagtgcacgcctggctaatttttgtactttttgta

SEQ ID NO: 275938 - DNA, 71 bp, Artificial Sequence
  ENSG00000128581_22 (sequence is synthesized)
gtccttgatcattgtgcccagcccatacacaacctctaaaaaatttttcataacaccaaattggtaaacat

SEQ ID NO: 275939 - DNA, 120 bp, Artificial Sequence
  ENSG00000128581_23 (sequence is synthesized)
acctctaaaaaatttttcataacaccaaattggtaaacatgttcaaaagatttaatgtacagaatcactagatacggtgagtttacggtttattgtagaagcaagtttgttttaatcatc

SEQ ID NO: 275940 - DNA, 120 bp, Artificial Sequence
  ENSG00000128581_24 (sequence is synthesized)
gcaagtttgttttaatcatcttaggagatttttttgtgttgttttgtttttttgagagtctcactgcaatctccaccctccgggttcaactgattctcctccctcagcctcccaagcagc

SEQ ID NO: 275941 - DNA, 120 bp, Artificial Sequence
  ENSG00000128581_25 (sequence is synthesized)
aggtgtgagccactgcacccagccatggagttatttttcattcataattgttatgtttgtaattttttaacatagccaataagaaaatacactaagtagatgaaatggtagatgtagctc

SEQ ID NO: 275942 - DNA, 120 bp, Artificial Sequence
  ENSG00000128581_26 (sequence is synthesized)
ttttcagctgagagtgggagaaaaagttgaggcacctaagggagatgaataaaaatgctagggtgtctgtcactttcacagtgaggagggctgacatgtagctgtgtgagcagtctactg

SEQ ID NO: 275943 - DNA, 120 bp, Artificial Sequence
  ENSG00000128581_27 (sequence is synthesized)
gagagagtggcttttctagaccatgacaattccctggcaatttagtttgaaccacattcacctgttaggattaccatgcgtattattaatgtcaactgaactaaatcatctttccatgac

SEQ ID NO: 275944 - DNA, 120 bp, Artificial Sequence
  ENSG00000128581_28 (sequence is synthesized)
agctgcctaacaagaatccatctcacaaaattgaccacctcaaaaggaaattattttcatttcacctttaatgattattcaagaccccagtataacaacccaaggccaggcgcagtggct

SEQ ID NO: 275945 - DNA, 68 bp, Artificial Sequence
  ENSG00000128581_29 (sequence is synthesized)
gcagattttgttcacctgaatggccagagtacaacccattaaatatttgaattgagtaaaagccttca

SEQ ID NO: 275946 - DNA, 120 bp, Artificial Sequence
  ENSG00000128581_30 (sequence is synthesized)
ggcagggaggctcattcctctaatcccagtgctctgggaggtcaaagcgggaggatcgcctgaggcctgggcaatatagggagaccccgtctcaactaaaaataaaacattagccaggtg

SEQ ID NO: 275947 - DNA, 120 bp, Artificial Sequence
  ENSG00000128581_31 (sequence is synthesized)
gtctcaactaaaaataaaacattagccaggtgtgttggcatgtgtctgtagtctcagctacatgttaggttgaagcagaaggattgtttgaggccaggagttggaggctgcagtgagcta

SEQ ID NO: 275948 - DNA, 120 bp, Artificial Sequence
  ENSG00000128581_32 (sequence is synthesized)
agagtgagaccctgtctcaaaacaaaattaataataaaacaattttaaaagactgcccagccatcacccacttcctacttttgttgctgttggcattccaaaagtgtaatgcagcctcat

SEQ ID NO: 275949 - DNA, 120 bp, Artificial Sequence
  ENSG00000128581_33 (sequence is synthesized)
tccaaaagtgtaatgcagcctcattattggtgctgctactgttcgtcttttttttttgggatggagtctcgtcctgtcgctgaggctggagtgtggtggcacgatctcagctcactgcaa

SEQ ID NO: 275950 - DNA, 82 bp, Artificial Sequence
  ENSG00000128581_34 (sequence is synthesized)
ttctcctgccttagcctccccagtagctgagatcacaggtgcacaccatcatgcccagctaattcttttatttttagtgtag

SEQ ID NO: 275951 - DNA, 120 bp, Artificial Sequence
  ENSG00000128581_35 (sequence is synthesized)
aagtagagctccgtcctgacgcgccgcctcccgtgggctccggccggctaagccgcggcggacaactatgctgaaagccaagatcctcttcgtggggccttgcgagaccttgattccaac

SEQ ID NO: 275952 - DNA, 120 bp, Artificial Sequence
  ENSG00000128581_36 (sequence is synthesized)
aatgttttggacacctacatattgtcccatgtcctagaaaccagcagctctgtccagttactgagcacctactgtaccctaggcaattgttaccctctccatgtgagtccactacgtctc

SEQ ID NO: 275953 - DNA, 87 bp, Artificial Sequence
  ENSG00000128581_37 (sequence is synthesized)
cagggggctagattgcagtgagttgagatctcaccactacactccagtttgtgtgacagggcgagacaccatctcaaaaaaaaaaaa

SEQ ID NO: 275954 - DNA, 76 bp, Artificial Sequence
  ENSG00000128581_38 (sequence is synthesized)
aaaaaaagagaaaagaccgggtgcggtggctcagttgaggtcgggagttctagaccaacctggccaacacggtgaa

SEQ ID NO: 275955 - DNA, 120 bp, Artificial Sequence
  ENSG00000128581_39 (sequence is synthesized)
gacaacaagagtgaaactctgtttcaaaaaaaaaaagagcagaatacagagtgggaaaatccttgtagctattcttgggtacaactaggggggcactctttctgaaagaacttttctgga

SEQ ID NO: 275956 - DNA, 120 bp, Artificial Sequence
  ENSG00000128581_40 (sequence is synthesized)
gaaaaacctccaattcacataacacacatcccagaggtgacacagtcatcctgaaaaagaactcacaaaatattcagaaacaaaatgagaataatagagaatctattcctttctggttta

SEQ ID NO: 275957 - DNA, 120 bp, Artificial Sequence
  ENSG00000128581_41 (sequence is synthesized)
aaagcggccaagtagagctccgtcctgacgcgccgcctcccgtgggctccggccggctaagccgcggcggacaactatgctgaaagccaagatcctcttcgtggggccttgcgaggatcc

SEQ ID NO: 275958 - DNA, 120 bp, Artificial Sequence
  ENSG00000128585_0 (sequence is synthesized)
ggcggccgctacggtgctgacaagatggcggctggcggagctgtcgctgcggcgcccgagtgccggcttctcccctacgcgctacacaagtggagctccttttcctccacctaccttccc

SEQ ID NO: 275959 - DNA, 120 bp, Artificial Sequence
  ENSG00000128585_1 (sequence is synthesized)
gagaacattttagtggacaaaccaaatgaccaatcttcaagatggtcttcagagagcaactatcctccccagtacttgattctaaagctcgaaaggcctgctatagttcagaatatcaca

SEQ ID NO: 275960 - DNA, 120 bp, Artificial Sequence
  ENSG00000128585_2 (sequence is synthesized)
tttggaaaatatgagaaaactcatgtttgcaatttgaagaaatttaaagtctttggtggaatgaatgaagaaaatatgacagagctgttgtccagtggcttaaagaatgattataacaaa

SEQ ID NO: 275961 - DNA, 120 bp, Artificial Sequence
  ENSG00000128585_3 (sequence is synthesized)
gaaacattcaccttgaagcataaaattgatgaacagatgttcccttgtcgattcattaaaatagttccactcttgtcctggggacccagctttaactttagcatctggtatgttgaactt

SEQ ID NO: 275962 - DNA, 120 bp, Artificial Sequence
  ENSG00000128585_4 (sequence is synthesized)
agtggcattgatgatcctgatatagtacaaccttgtctcaactggtatagcaagtaccgtgaacaggaagctattcgcctttgcctaaaacacttcagacaacacaactatacagaagct

SEQ ID NO: 275963 - DNA, 120 bp, Artificial Sequence
  ENSG00000128585_5 (sequence is synthesized)
tttgagtcactgcaaaagaaaaccaagattgcactggaacatcccatgttaacagatattcatgacaagctggtgttgaagggtgattttgatgcttgcgaagagttgattgaaaaggct

SEQ ID NO: 275964 - DNA, 120 bp, Artificial Sequence
  ENSG00000128585_6 (sequence is synthesized)
gtaaatgatggcttgttcaatcagtatatcagtcaacaggaatataagccacgatggagtcaaatcattcccaaaagtaccaaaggtgatggggaagataaccgtccaggaatgagagga

SEQ ID NO: 275965 - DNA, 120 bp, Artificial Sequence
  ENSG00000128585_7 (sequence is synthesized)
ggccatcagatggttattgatgttcaaacagagactgtttatttgtttggtggctgggatggaacacaagatcttgctgacttctgggcgtacagtgtgaaggagaaccagtggacatgt

SEQ ID NO: 275966 - DNA, 120 bp, Artificial Sequence
  ENSG00000128585_8 (sequence is synthesized)
atctctagagacactgaaaaagagaatggtcctagtgccagatcgtgtcataaaatgtgcattgatattcaacggaggcaaatctacacattggggcgttacttggattcctctgtgagg

SEQ ID NO: 275967 - DNA, 120 bp, Artificial Sequence
  ENSG00000128585_9 (sequence is synthesized)
aacagcaaatctctgaaaagtgacttctatcgttatgacattgatacaaacacatggatgttactaagtgaggatactgctgctgatggagggccgaaattggtgtttgatcatcagatg

SEQ ID NO: 275968 - DNA, 120 bp, Artificial Sequence
  ENSG00000128585_10 (sequence is synthesized)
tgtatggactcagaaaaacatatgatctacacttttggtggtagaattttgacttgtaatggcagcgtagatgacagcagagccagtgaaccacaattcagtggcttgtttgctttcaac

SEQ ID NO: 275969 - DNA, 120 bp, Artificial Sequence
  ENSG00000128585_11 (sequence is synthesized)
tgtcaatgtcaaacctggaaacttcttcgagaggactcctgtaatgctgggcctgaggacatccagtctcgaataggacactgcatgttattccactcaaaaaatcgttgcttatatgta

SEQ ID NO: 275970 - DNA, 120 bp, Artificial Sequence
  ENSG00000128585_12 (sequence is synthesized)
tttggtggccagcgatcaaagacctatttgaatgatttctttagttatgatgtggactctgatcatgtagacataatatcagatggcaccaagaaagactctgggatggttccaatgaca

SEQ ID NO: 275971 - DNA, 120 bp, Artificial Sequence
  ENSG00000128585_13 (sequence is synthesized)
ggatttacacagagagcaactattgatccagaactgaatgaaatacacgtcttatctggactcagcaaagataaggaaaagagggaagaaaatgttagaaattcattctggatttatgac

SEQ ID NO: 275972 - DNA, 120 bp, Artificial Sequence
  ENSG00000128585_14 (sequence is synthesized)
attgtgaggaatagttggtcttgtgtctataagaatgatcaagctgcaaaggataatccaactaaaagtcttcaggaagaagaaccatgtccaaggtttgcccatcagcttgtatacgat

SEQ ID NO: 275973 - DNA, 120 bp, Artificial Sequence
  ENSG00000128585_15 (sequence is synthesized)
gagctacacaaggttcattacttatttggtgggaatccaggaaaatcttgctctccaaagatgagattagatgacttctggtcactgaagttgtgtagaccttcaaaagattatttactg

SEQ ID NO: 275974 - DNA, 120 bp, Artificial Sequence
  ENSG00000128585_16 (sequence is synthesized)
aggcattgcaagtacctcataagaaaacacaggtttgaagaaaaggcccaagtggatccccttagtgctctgaaatatttacaaaatgatctttatataactgtggatcattcagaccca

SEQ ID NO: 275975 - DNA, 120 bp, Artificial Sequence
  ENSG00000128585_17 (sequence is synthesized)
gaagagacaaaagagtttcagctcctggcatcagctctattcaaatctggttcagattttacagctctgggcttttctgatgtggatcacacctatgctcaaagaactcagctctttgac

SEQ ID NO: 275976 - DNA, 120 bp, Artificial Sequence
  ENSG00000128585_18 (sequence is synthesized)
accttagtaaatttctttcctgacagcatgactcctcctaaaggcaacctggtagacctcatcacactgtaactgaagagtcactggacacagaaatggaaaacaggagtcgattttccg

SEQ ID NO: 275977 - DNA, 120 bp, Artificial Sequence
  ENSG00000128585_19 (sequence is synthesized)
tcttttggattgcagctccactgactgacagtaaagctgcagtgattgaggactgcaccagagttctgaagggatcttaaccatcacaagtttttaccctcttccttcatgcctgacctc

SEQ ID NO: 275978 - DNA, 120 bp, Artificial Sequence
  ENSG00000128585_20 (sequence is synthesized)
aaccccgctctcctcatcctattcctaaattaggctaataaagtgaaattggtatactttccagttaaatatatatatatatatattttttcttactttatcttttaagaattaatgagt

SEQ ID NO: 275979 - DNA, 120 bp, Artificial Sequence
  ENSG00000128585_21 (sequence is synthesized)
ataaaagaaaaattaggcagtttacccttttcagatttttatttcttttttttttaattgggggaaataagcactattaacagattcagcactacaagtattttgaatgttgttgctgtt

SEQ ID NO: 275980 - DNA, 120 bp, Artificial Sequence
  ENSG00000128585_22 (sequence is synthesized)
ggtcatttggcctgccttttcccttcctatttcactttgcctcccatcacacaactgcgtgtaaatggtgtcacttgttcacctctttacttcattcttaacaagtgtatagttctctag

SEQ ID NO: 275981 - DNA, 120 bp, Artificial Sequence
  ENSG00000128585_23 (sequence is synthesized)
gacagttgatgtatgttaaggtgatatctgtgtctgtattgacttgtcttgtgttacattaaacagtaggcagaactgaggtctcaagtttgcactcttggccatagaactaaaaatgaa

SEQ ID NO: 275982 - DNA, 120 bp, Artificial Sequence
  ENSG00000128585_24 (sequence is synthesized)
acctgagattgacccaagcacctatctgagattggtatataatatttctataatgatatattttatagtagatattacaatagcatctgactttgagtcacagaaaccttaaactgagga

SEQ ID NO: 275983 - DNA, 120 bp, Artificial Sequence
  ENSG00000128585_25 (sequence is synthesized)
gacaatagttcagaacctttttaagagccattctaaaagtgaccagcaggagggatctagtagtgaataatatcttaatagcaattttaggagaaaatgactctttcgtccagaagagct

SEQ ID NO: 275984 - DNA, 120 bp, Artificial Sequence
  ENSG00000128585_26 (sequence is synthesized)
ctgcagaaccagggctcccgtttatcttgtgctatctctgtagtattttcatttgagagaggaggctgagtttccagagctttgctttcatttatttttatacacattgtctctctatat

SEQ ID NO: 275985 - DNA, 120 bp, Artificial Sequence
  ENSG00000128585_27 (sequence is synthesized)
ctgcttgtggatattgttattttgaagagaaatggtttgtggttgtccagtggtatacaactgacaggcatttcattaagcacatagaccagactttgtgaatggttcagatattttttc

SEQ ID NO: 275986 - DNA, 120 bp, Artificial Sequence
  ENSG00000128585_28 (sequence is synthesized)
attaaaaaacaaggtatggcagatggacttttccatgggtcaaattttttgtgtgagagatagaggtacatgtcttctgatgatgtgctgtggaatgcaatgtgggaaacctacatctgg

SEQ ID NO: 275987 - DNA, 120 bp, Artificial Sequence
  ENSG00000128585_29 (sequence is synthesized)
ctagtgcttacatttgctcaaaaagcatgttgtatgaagctgactgccaccatgctaaagcagattcatattaagaagtgtcggtcgatccagtggctcttaagagtgaatagctttatg

SEQ ID NO: 275988 - DNA, 120 bp, Artificial Sequence
  ENSG00000128585_30 (sequence is synthesized)
gaatcaagtatgtccctgagtagcaagattaggcctcaccaaagaagaaattaacctgcactttcaaaaagtaccatgtataggaatgaaacattgaggtcccactttattctgtcttta

SEQ ID NO: 275989 - DNA, 120 bp, Artificial Sequence
  ENSG00000128585_31 (sequence is synthesized)
gtacatggttttacttattttggggatggatagaaatatatttttgctagttctaggcttgaatcatgggctccttggctttcctagcatcccaaagcagtcaacagtgatttcttaagc

SEQ ID NO: 275990 - DNA, 120 bp, Artificial Sequence
  ENSG00000128585_32 (sequence is synthesized)
aatttgatctgtacctttacttgtgaaaggtatgctatataattcagcaagtaccaacttgtgtagctgcagaataaccaagtggctatccagtcaagtaaatacagtttgcttacatac

SEQ ID NO: 275991 - DNA, 120 bp, Artificial Sequence
  ENSG00000128585_33 (sequence is synthesized)
ttcaacagtttcataaaacgattcccctgagtgacacaagaacataaaatgttaatatcactaatatagcctgttaaatcttttgtggagacaggtgcaaatcagaagattgacaaggaa

SEQ ID NO: 275992 - DNA, 120 bp, Artificial Sequence
  ENSG00000128585_34 (sequence is synthesized)
gaacttgagcttgctaaataagacttcctaaatttaaaagctctagttttgcttagtgtgaattctggcactttaaaaagattaagcaagtgaaattctgctgccctccaccatttattt

SEQ ID NO: 275993 - DNA, 120 bp, Artificial Sequence
  ENSG00000128585_35 (sequence is synthesized)
ttacagtgctttgtaatttttttcatcagttccttaaatgttatttggaggaaactaagttcttgacctcagtaattttatttttgtttttccctaaatgtttccctactagtctttttg

SEQ ID NO: 275994 - DNA, 120 bp, Artificial Sequence
  ENSG00000128585_36 (sequence is synthesized)
gaaaacatgtttgttttaatttcatcttccctcactttatttaggtagaatttttcccccttcatttctgaaattttttgctcaccgccatgtttaaatggggttgaatcatagcgagcc

SEQ ID NO: 275995 - DNA, 120 bp, Artificial Sequence
  ENSG00000128585_37 (sequence is synthesized)
atttgctcttgccaaagtgagatagatgtactgaggagataattgaaaagtcagactctgtactgtggggctttaatcggagcactgctggaaatgattgcagagaatgtagtgcttcat

SEQ ID NO: 275996 - DNA, 120 bp, Artificial Sequence
  ENSG00000128585_38 (sequence is synthesized)
atatccatgaccaagattgacatgttgctcacaacatgtcacaatttagtgaggagctacatgtatttccaagaattccagcatagattataatttaaataatcgaatttggtatttagg

SEQ ID NO: 275997 - DNA, 120 bp, Artificial Sequence
  ENSG00000128585_39 (sequence is synthesized)
tacattgtttatatagccaagtgtatatgctttactacctaacaattattctagcctaggtgaatccctaattgaaacacctggctaacactttagacacataaattaagtgggatacag

SEQ ID NO: 275998 - DNA, 120 bp, Artificial Sequence
  ENSG00000128585_40 (sequence is synthesized)
ttttctcatttgtattatctccagcttcaacctcatttatcctttttcctagtataatacattgttttcaaccagaaattaaagtagatatccaacattattttcagtgcttgtacttca

SEQ ID NO: 275999 - DNA, 120 bp, Artificial Sequence
  ENSG00000128585_41 (sequence is synthesized)
tgagaaataatctgattttcaagacacctcttaagtgcatttgcattttattttggtaatggcagagacctcatgtggccagtttgattgattgaagaatgtatcactcttattcaagca

SEQ ID NO: 276000 - DNA, 120 bp, Artificial Sequence
  ENSG00000128585_42 (sequence is synthesized)
aaggaattcagacttaaatgcctacctctgtgctgaagctgacagacagtattaactcttatcaaggccatcttttagacctgattttcatttatatgaaaacagacctgtccatgtcta

SEQ ID NO: 276001 - DNA, 120 bp, Artificial Sequence
  ENSG00000128585_43 (sequence is synthesized)
ataagtaaaaactgatagaatacattaaaaagtcactggtttatcatagaaaagtttgatgggtttagagctcagtgatttaagcttgtaaaactgcattcttgggcaaaatatttatat

SEQ ID NO: 276002 - DNA, 120 bp, Artificial Sequence
  ENSG00000128585_44 (sequence is synthesized)
tgtatataaatggttggcagcttattccagttgatctcttcacatctgccttaaaagtgctatgtagagatacattaacagagttataataaaacagtgttttaaaatctagcctataaa

SEQ ID NO: 276003 - DNA, 120 bp, Artificial Sequence
  ENSG00000128585_45 (sequence is synthesized)
caaaaactagtttgaggcacccaagcatttagtgagagattgagaatgatgcttaatggatcaaaaaagcaattaggagtatgttcctgattttattctctaaattatactcaatttcat

SEQ ID NO: 276004 - DNA, 120 bp, Artificial Sequence
  ENSG00000128585_46 (sequence is synthesized)
atccttagctggttgaatgttgcacagtatttgagaattacggtttgaagtgatttctgtgggagggaatcattgcaatgtatattctaaataaagtcatctaactattaaaaaaaaaac

SEQ ID NO: 276005 - DNA, 120 bp, Artificial Sequence
  ENSG00000128585_47 (sequence is synthesized)
acccttcctaacccttcttttcttaaaattccacattcatccacaatctcatccctttgtagaaattcttgcctgaattctcaccaagttttgaattcctaaggtagccccgatctagga

SEQ ID NO: 276006 - DNA, 120 bp, Artificial Sequence
  ENSG00000128585_48 (sequence is synthesized)
tgtgaaggctgcccagaaaaagtttatggctggaggagtatcatacagtgtctacatatgatagtacttacagattaggtctttggatgctttaacacaaaagatttttgttatccttat

SEQ ID NO: 276007 - DNA, 120 bp, Artificial Sequence
  ENSG00000128585_49 (sequence is synthesized)
tagtcaaataacgctattcttttgtggttctagaccctggcttctatctccctgtgatttgttttaatgctgaaatgacttggctatccaaagcttctagtctagaggtctgttggttga

SEQ ID NO: 276008 - DNA, 120 bp, Artificial Sequence
  ENSG00000128585_50 (sequence is synthesized)
aggcagacatttccaagtttgttgaaataatacgaagctgactagcttacgtgaatgatgttgccctcatttgttttgggtgaggactcattactgcagtatattgatctcttcaccaaa

SEQ ID NO: 276009 - DNA, 120 bp, Artificial Sequence
  ENSG00000128585_51 (sequence is synthesized)
tgctttttctttttctgaataaatgctgtattagaggttctatttatatatgatttttaaaactttggtttccttctatccaccaaatactgtgaattgtttttccatttatttttctta

SEQ ID NO: 276010 - DNA, 120 bp, Artificial Sequence
  ENSG00000128585_52 (sequence is synthesized)
gctaatgtaactttattcttcacttttttttagccctagacttcctagattttctgtggcattctgtaggacattgtattgcttggaaaaaaaaagatcaaaatcattctggggcaaatg

SEQ ID NO: 276011 - DNA, 120 bp, Artificial Sequence
  ENSG00000128585_53 (sequence is synthesized)
ctctattatccttatttatgacaagagaataatgaaattcataagaaattaataacattcagatattgctataaatgtacttgagtcattttcatttggggatagtaataatggctgtgg

SEQ ID NO: 276012 - DNA, 120 bp, Artificial Sequence
  ENSG00000128585_54 (sequence is synthesized)
cagctttaatggagaaacctgtgttggcctctttttctggcattaggatctcttgtcatagaactattggtaaagtacaggtttgatagcagagttcctgaattcagcatatcatcagaa

SEQ ID NO: 276013 - DNA, 120 bp, Artificial Sequence
  ENSG00000128585_55 (sequence is synthesized)
tttccatttaccttttgtcttttctttttattgtattttttaacctttttgtttctattcctacctcccatgagtaacattgatttctgctgaagttagaatttgtgttaagaattgact

SEQ ID NO: 276014 - DNA, 120 bp, Artificial Sequence
  ENSG00000128585_56 (sequence is synthesized)
ttaaacttctgaaatagttgaatattagaagtggcttcagttgccatgaaatgattgcttttctttttctttttttttccttaaataaaaataatgcagccttatatatgtctcttcccc

SEQ ID NO: 276015 - DNA, 120 bp, Artificial Sequence
  ENSG00000128585_57 (sequence is synthesized)
tcaagaatgtgaatttaggctgggcatagtgactcacgcctgtaatcccagacctttgggaggctgacacgggaagattgcttgagcccaggaatttcagaccagcctgggcaacacagg

SEQ ID NO: 276016 - DNA, 74 bp, Artificial Sequence
  ENSG00000128585_58 (sequence is synthesized)
cttgagcccaggaatttcagaccagcctgggcaacacaggaagactccatctctacttaaaatatttttgtttt

SEQ ID NO: 276017 - DNA, 74 bp, Artificial Sequence
  ENSG00000128585_59 (sequence is synthesized)
tgaatttagctccaattccaaatgactaactcttaggccagtcatagccaatgaaatcatctgacggtagcttc

SEQ ID NO: 276018 - DNA, 120 bp, Artificial Sequence
  ENSG00000128585_60 (sequence is synthesized)
aggccagtcatagccaatgaaatcatctgacggtagcttctgtagcccttaacctaaggagtcattagaggttatagtaaattagtttctctagtggtgcagagagaaatgccatcgggg

SEQ ID NO: 276019 - DNA, 120 bp, Artificial Sequence
  ENSG00000128585_61 (sequence is synthesized)
aaattatcactgtctttttggctaaagttttatattgtgaactggatcccacttaacagcttaaaaacacaaaaatgaaagggtagtcctagtttatcttcttaattagaatcattattt

SEQ ID NO: 276020 - DNA, 120 bp, Artificial Sequence
  ENSG00000128585_62 (sequence is synthesized)
ggaaataagatttgcaatgtgctgtctatccccaaacactgctgagcttgctggaaaacagaatttaacatgaatgttgtctgaaagctgtaggatcaatggcaaaaaaggggaaatgtt

SEQ ID NO: 276021 - DNA, 120 bp, Artificial Sequence
  ENSG00000128585_63 (sequence is synthesized)
tggtagggaattggaccagttctaaggtatcacttttaattataaaataatgtcttcctttttatctgcttttcagacagcctcagtgaactattaaacatttgtgtgcaaagtcctatt

SEQ ID NO: 276022 - DNA, 120 bp, Artificial Sequence
  ENSG00000128585_64 (sequence is synthesized)
ttgcttatctaaggcattttgacttggaagtattaaacttcaggaacgagctagagaagacaatgagggtatgttagagaaggaaaaataggagctttttgcttatggattttagaggtc

SEQ ID NO: 276023 - DNA, 120 bp, Artificial Sequence
  ENSG00000128585_65 (sequence is synthesized)
cacaaatcgaaaggaaaaataaatttcttcatttctaaccctaaaataattttgttaatgagatgctgggaagaagactaccaaaaggcctcaaagctcatgcttctagaatattcagta

SEQ ID NO: 276024 - DNA, 120 bp, Artificial Sequence
  ENSG00000128585_66 (sequence is synthesized)
attctgaatagtctttgggaagtagcatttcttgggaagtagcatttcccttcttccaaataactgtttgagatcttaaaacagaaaatccagtgttaatgggctctagatcttaaacta

SEQ ID NO: 276025 - DNA, 120 bp, Artificial Sequence
  ENSG00000128585_67 (sequence is synthesized)
ggtgagcagcttcttacatacaaccagttccttgttaaggatccagcaggaaaaccagccataaaacatttcaacatgcagtttgggggctcccttgcttattcactgagtttaagctct

SEQ ID NO: 276026 - DNA, 120 bp, Artificial Sequence
  ENSG00000128585_68 (sequence is synthesized)
tgctgcaacatagctctgtaccatctgggatgctagcagtcacagcagttagctcagatatctgagctgtctgccacacaaagcctgaggagatcatcattcttcagtttcattcattac

SEQ ID NO: 276027 - DNA, 120 bp, Artificial Sequence
  ENSG00000128585_69 (sequence is synthesized)
ttaatgaatgccaaattaattggcaggaagaagaaacactgtgtgatatactgaacaagcctgtgtgcatgaataaggagccactcaaaaagccaattttgagctttatttctccgttgt

SEQ ID NO: 276028 - DNA, 120 bp, Artificial Sequence
  ENSG00000128585_70 (sequence is synthesized)
taacaaatctcaagaaagcctttgttacagtttagctcatgtcatttggttggttttattttctagccctttaacataggaggaaaattgtcatttcatgtataacttgtaacacagaat

SEQ ID NO: 276029 - DNA, 120 bp, Artificial Sequence
  ENSG00000128585_71 (sequence is synthesized)
tgaactgatactagtttccttgccttaaattaattatatgtcatcccaagggtctctgttaattctgctttgccaagcaataatgagatctgggtttggcattagaagtatttcataatt

SEQ ID NO: 276030 - DNA, 120 bp, Artificial Sequence
  ENSG00000128585_72 (sequence is synthesized)
ttggttttttatttaggtttcctccacatctgtaaagtgattgattaaattagaggaggcgtgtagaataaatcccaatcccattgcaactggcagagctttataaatctttataaattc

SEQ ID NO: 276031 - DNA, 120 bp, Artificial Sequence
  ENSG00000128585_73 (sequence is synthesized)
agttacaacaaaggagaggatcctacaccattagagccatgccatcaggtgtttgcaagtgacagctgtagtgtgttgcctcaaataataccaagttataaataataccaagtaattatc

SEQ ID NO: 276032 - DNA, 120 bp, Artificial Sequence
  ENSG00000128585_74 (sequence is synthesized)
aactcactcccaaatttaataagatatcaaagtccaaaaggttacttaggagtagtcttccgtgggggaagataaatttattaaagagtcatgtactgatctttttcttgggattttttt

SEQ ID NO: 276033 - DNA, 120 bp, Artificial Sequence
  ENSG00000128585_75 (sequence is synthesized)
tcctttcccagaaaaaaaaattattttggtgactgatcaattgtaaacaattttcttccttacttacaaatcatccgttcagaaaaataaaagtggacttcctttcctaagcattacaat

SEQ ID NO: 276034 - DNA, 120 bp, Artificial Sequence
  ENSG00000128585_76 (sequence is synthesized)
tagcctgggcaagaggtgttatgattgtcttattctttaagccggcttactttttggatttgtgtgaaatgtcttttgaaaagaaagtagatagtatagtattaattaactactttgtat

SEQ ID NO: 276035 - DNA, 120 bp, Artificial Sequence
  ENSG00000128585_77 (sequence is synthesized)
agtcttctgcataatttagagttgaaaataatgtaacattttcctgtgaacagattcctttatgcgtacatactttataaatatacatacatacacatacacatacatttttaaaatgct

SEQ ID NO: 276036 - DNA, 120 bp, Artificial Sequence
  ENSG00000128585_78 (sequence is synthesized)
ctttttaaagagattcttatcttgctcccactccaaaagctatgtacagttgagttattagcctcagaggaagagtacaggaaagcgaagatgaggacctccttttcttgtgttggtctt

SEQ ID NO: 276037 - DNA, 120 bp, Artificial Sequence
  ENSG00000128585_79 (sequence is synthesized)
gggaacaaacagtattccgtctttcaaatatggcatatttctaaacagtttgggaaagatgttagaattttttaaaagtcagctcttttataaattggaagtactcagtagtcagaaatt

SEQ ID NO: 276038 - DNA, 120 bp, Artificial Sequence
  ENSG00000128585_80 (sequence is synthesized)
aagatcccctctgatagagatagattctcaaaaccaaaattggactgaaaattagattgagaagaaagatacaacttcctccatagccaataaaatctgtctttccaagtctgcttatta

SEQ ID NO: 276039 - DNA, 120 bp, Artificial Sequence
  ENSG00000128585_81 (sequence is synthesized)
atgctgtgaatcgctccttctgtttgtgaaaacatctcctggactggaaatgtggtgctgtaaccagctgagccgaaagttggagaatgttaaatatcttatatgggacttacgataaaa

SEQ ID NO: 276040 - DNA, 120 bp, Artificial Sequence
  ENSG00000128585_82 (sequence is synthesized)
tgtattgatgttagtgattgtcaaaataggtttatcatttaaaaaactaggaaattactaagtataaagaagaaaaaccagtattaattaagtgatgagacctgttcattttgttttccc

SEQ ID NO: 276041 - DNA, 120 bp, Artificial Sequence
  ENSG00000128585_83 (sequence is synthesized)
tgacttatttccattaccaaacatagtaaaggccagaaaagattaaaaaaaaaattaacacagccattccattgttttttaccacatggagaaaggaccaggctggaagcatatgtcccc

SEQ ID NO: 276042 - DNA, 120 bp, Artificial Sequence
  ENSG00000128585_84 (sequence is synthesized)
ccacccttatttatattcctttgagcattgccgttttctagacagacaatccgaaaataattgtgttgataggtctgtttaagcctgaactctgggtgtaaaatgttatccagaagctat

SEQ ID NO: 276043 - DNA, 120 bp, Artificial Sequence
  ENSG00000128585_85 (sequence is synthesized)
agggagctgccttgctcaggtcattggaaatttcaaccctaagactcattggaatttctaagtccgttatgcaccattatgggcatatggagcatattcataccatgaggaggagtcttt

SEQ ID NO: 276044 - DNA, 120 bp, Artificial Sequence
  ENSG00000128585_86 (sequence is synthesized)
gtttatgatggactttttaatatggccataattaaactcacactcaaaaaggatgagctattgtcaaaagccaaaagaaaaacagacaaaatgaacatgaagcaaggagtccataaaaca

SEQ ID NO: 276045 - DNA, 120 bp, Artificial Sequence
  ENSG00000128585_87 (sequence is synthesized)
agagttctttaccacgtttaagcaaatgtctctcaaaaaaaattgtatttctgtgcacattagctgagattcacacattttgcacctcagtagtatttcagatgagactcaatgtgtgga

SEQ ID NO: 276046 - DNA, 120 bp, Artificial Sequence
  ENSG00000128585_88 (sequence is synthesized)
gaaaaccgctaacttgtttggttctactcttaccccctcttctgtggcaatgtggggtcagggccgtatcctaaagtatccacatggtcttaaatggaaatcatgggactctggaaagct

SEQ ID NO: 276047 - DNA, 120 bp, Artificial Sequence
  ENSG00000128585_89 (sequence is synthesized)
ggcatgagctggttggagcttttaaacagaagtgctttatgggtatcagatctcttctgacatcaattgtttcaaatcattgttgggctctgtcgtgttctgcaatcttccccattcccc

SEQ ID NO: 276048 - DNA, 120 bp, Artificial Sequence
  ENSG00000128585_90 (sequence is synthesized)
tcatgatctctggcttatcttttatccaatctgtatggactttttaggattttttttttcttatagtacaaataattttcagatcccagctttggtaaatgtgttaattctactttgtga

SEQ ID NO: 276049 - DNA, 120 bp, Artificial Sequence
  ENSG00000128585_91 (sequence is synthesized)
ataaataaatgagtgatctgctaaaaatggcaattgtagaattatgttgtatgtaatgtacatatggagaaagaatgtattttgttcattttcttaataaaatgttatatatggatgcta

SEQ ID NO: 276050 - DNA, 120 bp, Artificial Sequence
  ENSG00000128585_92 (sequence is synthesized)
aacctgatcctccggtagcgaagggctagaggcaaacaccgagctcctccagagccgcccgggagcagggagggctccgctagcccggggggccctccccgcggggcagatgagttccat

SEQ ID NO: 276051 - DNA, 120 bp, Artificial Sequence
  ENSG00000128585_93 (sequence is synthesized)
ttggaaggttggattttggtttcttttacgtgaaacatcaggtgagatgtttcagtcaaatagatgagcaaatgaagtttcaaggtatcatgcaaaatttctaataacctgctacaaggt

SEQ ID NO: 276052 - DNA, 120 bp, Artificial Sequence
  ENSG00000128585_94 (sequence is synthesized)
tgctttgaggtatcattttgcagttcagtttgcaatgactattataccaattgctgtgttagtatgcaaacagatagcaatagaaacacagtcaaaataaattaatttgtatagcactgc

SEQ ID NO: 276053 - DNA, 120 bp, Artificial Sequence
  ENSG00000128585_95 (sequence is synthesized)
cttgccactatttggtgaatagacctatgtcacacatatgcagaaatacgtagttgctgataaatggtcaaagttatagaaggctattttccttcagtgcacttagccagctaatttgct

SEQ ID NO: 276054 - DNA, 120 bp, Artificial Sequence
  ENSG00000128585_96 (sequence is synthesized)
tcctcctgactccataaactattggattcataacctgctccatgcttgaaaacatggggattggaattcgtttctggcgcagaaatgtttcttgatgaatgttctgaaaagaataaagta

SEQ ID NO: 276055 - DNA, 120 bp, Artificial Sequence
  ENSG00000128585_97 (sequence is synthesized)
aaagaggtaaagaaaggtggtaataaatttcagaaattaagtatttttaaatgtcttcctaacttatatttaatgattttgctcttgagtgtgtaaaggaaaacgaagaaaatatgatga

SEQ ID NO: 276056 - DNA, 120 bp, Artificial Sequence
  ENSG00000128585_98 (sequence is synthesized)
catcagtaatctttaaaatgtcacagagcaggtgaaataaaaattgaataggcatgttttcgtgtgataagattcaagtcaccaaaaacccttggtccattcagaaaaggattatcaggt

SEQ ID NO: 276057 - DNA, 120 bp, Artificial Sequence
  ENSG00000128585_99 (sequence is synthesized)
ctaggtttgaagaaaaggcccaagtggatccccttagtgctctgaaatatttacaaaatgatctttatataactgtggatcattcagacccagaagagacaaaagaggcatccttgttca

SEQ ID NO: 276058 - DNA, 120 bp, Artificial Sequence
  ENSG00000128585_100 (sequence is synthesized)
tctagcaatatctgaactgcagtgcatttgccttccactcacagaattcgtgctgattatatgtagttctgacccttaggtctctttccgtgttagctcctgccttgctttggctttgta

SEQ ID NO: 276059 - DNA, 120 bp, Artificial Sequence
  ENSG00000128585_101 (sequence is synthesized)
atagcagtatcaagctgtgcccggcatgcttgagcattgacacaggtgtcagatttaatgttgaatcactttcaggctccaggttcattgtactttcaagcaatagaggctgcatgtctt

SEQ ID NO: 276060 - DNA, 120 bp, Artificial Sequence
  ENSG00000128585_102 (sequence is synthesized)
agagatactctttcatagtttcgtactataaaattaagtcctaagtctctcaatattgattatggcccttcagtaggtagagaatctgcaggacatgctttagaacccccatgaaggggg

SEQ ID NO: 276061 - DNA, 120 bp, Artificial Sequence
  ENSG00000128585_103 (sequence is synthesized)
acagttaattgtctttccttgagttttcagtcaattcatgacactgtgcaaataggagaaataattatagttttgccaagtggcagaatatgtttgatttaatcttttatgacttataac

SEQ ID NO: 276062 - DNA, 120 bp, Artificial Sequence
  ENSG00000128585_104 (sequence is synthesized)
tgtacttagttgtgaagagtccattaatgttaattttgttatgccatgcatttgagagttatgcatagatttccttgtattttctccatattctatgtaaaatagctgtaactgggaaca

SEQ ID NO: 276063 - DNA, 120 bp, Artificial Sequence
  ENSG00000128590_0 (sequence is synthesized)
gaggtggtggcgccagcggctacctcctgcctgtgaggagctggctgagaggggactgggcgccggcggggaaggaggagcgctaggtcggtgtacgaccgagattagggtgcgtgccag

SEQ ID NO: 276064 - DNA, 120 bp, Artificial Sequence
  ENSG00000128590_1 (sequence is synthesized)
ctccgggaggccgcggtgaggggccgggcccaagctgccgacccgagccgatcgtcagggtcgccagcgcctcagctctgtggaggagcagcagtagtcggagggtgcaggatattagaa

SEQ ID NO: 276065 - DNA, 120 bp, Artificial Sequence
  ENSG00000128590_2 (sequence is synthesized)
atggctactccccagtcaattttcatctttgcaatctgcattttaatgataacagaattaattctggcctcaaaaagctactatgatatcttaggtgtgccaaaatcggcatcagagcgc

SEQ ID NO: 276066 - DNA, 120 bp, Artificial Sequence
  ENSG00000128590_3 (sequence is synthesized)
caaatcaagaaggcctttcacaagttggccatgaagtaccaccctgacaaaaataagagcccggatgctgaagcaaaattcagagagattgcagaagcatatgaaacactctcagatgct

SEQ ID NO: 276067 - DNA, 120 bp, Artificial Sequence
  ENSG00000128590_4 (sequence is synthesized)
aatagacgaaaagagtatgatacacttggacacagtgcttttactagtggtaaaggacaaagaggtagtggaagttcttttgagcagtcatttaacttcaattttgatgacttatttaaa

SEQ ID NO: 276068 - DNA, 120 bp, Artificial Sequence
  ENSG00000128590_5 (sequence is synthesized)
gactttggcttttttggtcaaaaccaaaacactggatccaagaagcgttttgaaaatcatttccagacacgccaggatggtggttccagtagacaaaggcatcatttccaagaattttct

SEQ ID NO: 276069 - DNA, 120 bp, Artificial Sequence
  ENSG00000128590_6 (sequence is synthesized)
tttggaggtggattatttgatgacatgtttgaagatatggagaaaatgttttcttttagtggttttgactctaccaatcagcatacagtacagactgaaaatagatttcatggatctagc

SEQ ID NO: 276070 - DNA, 120 bp, Artificial Sequence
  ENSG00000128590_7 (sequence is synthesized)
aagcactgcaggactgtcactcaacgaagaggaaatatggttactacatacactgactgttcaggacagtagttcttattctattctcactaaatccaactggttgactcttcctcatta

SEQ ID NO: 276071 - DNA, 120 bp, Artificial Sequence
  ENSG00000128590_8 (sequence is synthesized)
tctttgatgctaaacaattttctgtgaactattttgacaagtgcatgatttcactttaaacaatttgatatagctattaaatatatttaagggttttttttttttgacaaattcaacatt

SEQ ID NO: 276072 - DNA, 120 bp, Artificial Sequence
  ENSG00000128590_9 (sequence is synthesized)
caacgagtagacaaaatgctaattatttccctgattaggaaagtttctttaaaaaacacgtaattttgcctagtgctttttctctacctgcccttgggctcactaatatcaccagtatta

SEQ ID NO: 276073 - DNA, 120 bp, Artificial Sequence
  ENSG00000128590_10 (sequence is synthesized)
aaatattgagtttacctgattaaactttaaaagttaattgtagatttaaattgtgtgaacctaatgatttttgcagtgaaacctttactaattcaaagttgcatgttctatgacatctgt

SEQ ID NO: 276074 - DNA, 120 bp, Artificial Sequence
  ENSG00000128590_11 (sequence is synthesized)
gacttgcgttgcagagtgtacatgaaactgtataattgagtcattcagtaaaggagaacagtatcttggttaattgctactgaaaggttgagaaaggaatggtttgatatttaccacagc

SEQ ID NO: 276075 - DNA, 120 bp, Artificial Sequence
  ENSG00000128590_12 (sequence is synthesized)
gctgtgcctttctacagtagaactggggtaaaggaaatggttttattgcccatagtcatttaggctggaaaaaagttgaaaacttaacgaaatattgccaagagattgttatgtgtttgg

SEQ ID NO: 276076 - DNA, 120 bp, Artificial Sequence
  ENSG00000128590_13 (sequence is synthesized)
ttccagcctaaaaatgattttgtagtgttgaaatcatagctacttacatagctttttcatatttctttcttagttgttggcactcttaggtcttagtatggatttatgtgtttgtgtgtg

SEQ ID NO: 276077 - DNA, 120 bp, Artificial Sequence
  ENSG00000128590_14 (sequence is synthesized)
tgtagtttatcctctctctcatctttatctagagattgactgatacctcattctgtttgtaaaaccagccagtaatttctgtgcaaccttactatgtgcaatatttttaaatcctgagaa

SEQ ID NO: 276078 - DNA, 120 bp, Artificial Sequence
  ENSG00000128590_15 (sequence is synthesized)
atgtgtgcttttgttttcggatagacttatttctttagttctgcacttttccacattatactccatatgagtattaatcctatggatacatattaaaacaagtgtctcatacaacattgt

SEQ ID NO: 276079 - DNA, 120 bp, Artificial Sequence
  ENSG00000128590_16 (sequence is synthesized)
atgtgagagaaatataaatatttacaacctgatattcgttgttgttttattgttaaaagtttattatgcaactctggaggtatagagggcatataagctatgggacatatgctgatcaca

SEQ ID NO: 276080 - DNA, 120 bp, Artificial Sequence
  ENSG00000128590_17 (sequence is synthesized)
ggctatattcatgaagttacttttgaccaacctgaaaactgataggattttgtttgtcatttggtaatttctactgcattcttaccatccttctctcacaaattttgatagcttgaagat

SEQ ID NO: 276081 - DNA, 120 bp, Artificial Sequence
  ENSG00000128590_18 (sequence is synthesized)
ctttttaattataattttgttgtatttgtttcctaggagcaagtgttcctgctgccagttctttcctctttaggcgtggttgagaaaaagcagaaactttacataaagctgtatttctta

SEQ ID NO: 276082 - DNA, 120 bp, Artificial Sequence
  ENSG00000128590_19 (sequence is synthesized)
agcagaaactttacataaagctgtatttcttaatcatctttaatttgaaacttaagaaaatgaatttattctgttatatttatgtaacttatttcctggaagttatatctactagttttg

SEQ ID NO: 276083 - DNA, 120 bp, Artificial Sequence
  ENSG00000128590_20 (sequence is synthesized)
gtaaataaatgacaatctctgaagtgtcatgggtattaactagtaaggagaatgatagctaagaagtgtttgtatttgaaggttttgtggagatgggaggtggagtgggatttatgtata

SEQ ID NO: 276084 - DNA, 120 bp, Artificial Sequence
  ENSG00000128590_21 (sequence is synthesized)
cagaaggagcaagtgttcctgctgccagttctttcctctttaggcgtggttgagaaaaagcagaaactttacataaagctgtatttcttaatcatctttaatttgaaacttaagaaaatg

SEQ ID NO: 276085 - DNA, 120 bp, Artificial Sequence
  ENSG00000128591_0 (sequence is synthesized)
cggccctggagggagagagagccagagagcggccgagcgcctaggaggcccgccgagcctcgccgagccccgccagccccggcgcgagagaagttggagaggagagcagcgcagcgcagc

SEQ ID NO: 276086 - DNA, 120 bp, Artificial Sequence
  ENSG00000128591_1 (sequence is synthesized)
gagtcccgtggtcgcgccccaacagcgcccgacagcccccgatagcccaaaccgcggccctagccccggccgcacccccagcccgcgccagcatgatgaacaacagcggctactcagacg

SEQ ID NO: 276087 - DNA, 120 bp, Artificial Sequence
  ENSG00000128591_2 (sequence is synthesized)
ccggcctcggcctgggcgatgagacagacgagatgccgtccacggagaaggacctggcggaggacgcgccgtggaagaagatccagcagaacacattcacgcgctggtgcaatgagcacc

SEQ ID NO: 276088 - DNA, 120 bp, Artificial Sequence
  ENSG00000128591_3 (sequence is synthesized)
tcaagtgcgtgggcaagcgcctgaccgacctgcagcgcgacctcagcgacgggctccggctcatcgcgctgctcgaggtgctcagccagaagcgcatgtaccgcaagttccatccgcgcc

SEQ ID NO: 276089 - DNA, 120 bp, Artificial Sequence
  ENSG00000128591_4 (sequence is synthesized)
ccaacttccgccaaatgaagctggagaacgtgtccgtggccctcgagttcctcgagcgcgagcacatcaagctcgtgtccatagacagcaaggccatcgtggatgggaacctgaagctga

SEQ ID NO: 276090 - DNA, 120 bp, Artificial Sequence
  ENSG00000128591_5 (sequence is synthesized)
tcctgggcctgatctggacgctgatcctgcactactccatctccatgcccatgtgggaggatgaagatgatgaggatgcccgcaaacagacgcccaagcagcggctgcttggctggatcc

SEQ ID NO: 276091 - DNA, 120 bp, Artificial Sequence
  ENSG00000128591_6 (sequence is synthesized)
agaacaaggtgccccagctgcccatcaccaacttcaaccgtgactggcaggacggcaaagctctgggcgccctggtggacaactgcgcccccggtctctgccccgactgggaggcctggg

SEQ ID NO: 276092 - DNA, 120 bp, Artificial Sequence
  ENSG00000128591_7 (sequence is synthesized)
accccaaccagcccgtggagaacgcccgggaggccatgcagcaggccgacgactggcttggggtgccccaggtcattgcccctgaggagattgtggaccccaacgtggatgagcattctg

SEQ ID NO: 276093 - DNA, 120 bp, Artificial Sequence
  ENSG00000128591_8 (sequence is synthesized)
ttatgacctacctgtcccagttccccaaggccaagctcaaacctggtgcccctgttcgatccaagcagctgaaccccaagaaagccatcgcctatgggcctggcatcgagccacagggca

SEQ ID NO: 276094 - DNA, 120 bp, Artificial Sequence
  ENSG00000128591_9 (sequence is synthesized)
acaccgtgctgcagcctgcccacttcaccgtgcagacggtggacgcgggcgtgggcgaggtgctggtctacatcgaggaccctgaaggccacaccgaggaggctaaggtggttcccaaca

SEQ ID NO: 276095 - DNA, 120 bp, Artificial Sequence
  ENSG00000128591_10 (sequence is synthesized)
atgacaaggatcgcacctatgctgtctcctatgtgcccaaggtcgctgggttacacaaggtgaccgtgctctttgctggccagaacattgaacgcagtccctttgaggtgaacgtgggca

SEQ ID NO: 276096 - DNA, 120 bp, Artificial Sequence
  ENSG00000128591_11 (sequence is synthesized)
tggccctgggagatgccaacaaggtgtcagcccgtggccctggcctggaacctgtgggcaatgtggccaacaaacccacctactttgacatctacactgcgggggccggcactggcgatg

SEQ ID NO: 276097 - DNA, 120 bp, Artificial Sequence
  ENSG00000128591_12 (sequence is synthesized)
ttgctgtggtgatcgtggacccacagggccggcgggacacagtggaggtggccctggaggacaagggtgacagcacgttccgctgcacatacagacctgccatggaggggccacataccg

SEQ ID NO: 276098 - DNA, 120 bp, Artificial Sequence
  ENSG00000128591_13 (sequence is synthesized)
tgcatgtggcctttgcgggtgcccccatcacccgcagtcccttccctgtccatgtgtcggaagcctgtaaccccaacgcctgccgcgcctctgggcgaggcctgcagcccaagggtgttc

SEQ ID NO: 276099 - DNA, 120 bp, Artificial Sequence
  ENSG00000128591_14 (sequence is synthesized)
gcgtgaaagaggtggctgacttcaaggtgtttaccaagggtgccggcagcggggagctcaaggtcacggtcaaggggccaaagggcacagaggagccagtgaaggtgcgggaggctgggg

SEQ ID NO: 276100 - DNA, 120 bp, Artificial Sequence
  ENSG00000128591_15 (sequence is synthesized)
atggtgtgttcgagtgcgagtactacccggtggtgcctgggaagtatgtggtgaccatcacgtggggcggctacgccatccctcgcagcccctttgaggtacaggtgagcccagaggcag

SEQ ID NO: 276101 - DNA, 120 bp, Artificial Sequence
  ENSG00000128591_16 (sequence is synthesized)
gagtgcaaaaggtccgggcctggggtcctggtttggagactggccaggtgggcaagtcagccgattttgtggtggaagccattggcaccgaggtggggacactgggcttctccatcgagg

SEQ ID NO: 276102 - DNA, 120 bp, Artificial Sequence
  ENSG00000128591_17 (sequence is synthesized)
ggccctcacaagccaagatcgaatgtgacgacaagggggatggctcctgcgatgtgcggtactggcccacggagcctggggagtacgctgtgcacgtcatctgtgacgatgaggacatcc

SEQ ID NO: 276103 - DNA, 120 bp, Artificial Sequence
  ENSG00000128591_18 (sequence is synthesized)
gagactcacccttcattgcccacatcctgcccgccccacctgactgcttcccagataaggtgaaggcctttgggcctggcctggagcctaccggctgcatcgtggacaagcccgctgagt

SEQ ID NO: 276104 - DNA, 120 bp, Artificial Sequence
  ENSG00000128591_19 (sequence is synthesized)
tcaccattgatgctcgtgcagctggcaagggagacctgaagctctatgcccaggacgccgacggctgtcccatcgacatcaaggtgatccccaacggcgacggcaccttccgctgctcct

SEQ ID NO: 276105 - DNA, 120 bp, Artificial Sequence
  ENSG00000128591_20 (sequence is synthesized)
acgtgcccaccaagcccattaagcacaccatcatcatctcctggggaggcgtaaacgtgcccaagagccccttccgggtgaacgtgggcgagggcagccaccccgagcgggtaaaggtgt

SEQ ID NO: 276106 - DNA, 120 bp, Artificial Sequence
  ENSG00000128591_21 (sequence is synthesized)
acggccccggagtggagaagacaggcctcaaggccaatgagcccacctacttcacggtggactgcagcgaggcggggcaaggcgacgtgagcatcggcatcaagtgcgccccaggcgtgg

SEQ ID NO: 276107 - DNA, 120 bp, Artificial Sequence
  ENSG00000128591_22 (sequence is synthesized)
tgggccctgcagaggctgacattgacttcgacatcatcaagaatgacaacgacaccttcaccgtcaagtacacgccaccaggggcgggccgctacaccatcatggtgctgtttgccaacc

SEQ ID NO: 276108 - DNA, 120 bp, Artificial Sequence
  ENSG00000128591_23 (sequence is synthesized)
aggagatccccgccagccccttccacatcaaggtggacccatcccacgatgccagcaaagtcaaggccgagggccctgggctgaatcgcacaggtgtggaagtcgggaagcccacccact

SEQ ID NO: 276109 - DNA, 120 bp, Artificial Sequence
  ENSG00000128591_24 (sequence is synthesized)
tcacggtgctgaccaagggagccggcaaggccaagctggatgtgcagtttgcagggacagccaagggcgaggttgtgcgggactttgagatcatagacaaccatgactactcctacactg

SEQ ID NO: 276110 - DNA, 120 bp, Artificial Sequence
  ENSG00000128591_25 (sequence is synthesized)
tcaagtacaccgctgtccagcagggcaacatggcagtgacagtgacttatggcggggaccctgtccccaagagcccctttgtggtgaatgtggcacccccgctggacctcagcaaaatca

SEQ ID NO: 276111 - DNA, 120 bp, Artificial Sequence
  ENSG00000128591_26 (sequence is synthesized)
aagttcagggccttaatagcaaggtggctgtgggacaggaacaagcattctctgtgaacacacgaggggctggcggtcagggccaactggatgtgcggatgacttcgccctctcgccggc

SEQ ID NO: 276112 - DNA, 120 bp, Artificial Sequence
  ENSG00000128591_27 (sequence is synthesized)
ccatcccctgcaagctggagccaggcggtggagcggaagcccaggctgtgcgctacatgcccccggaggaggggccctacaaggtggatatcacctacgatggtcacccggtgcctggca

SEQ ID NO: 276113 - DNA, 120 bp, Artificial Sequence
  ENSG00000128591_28 (sequence is synthesized)
gcccgtttgctgtggagggtgtcctgccccctgatccctccaaggtctgtgcttatggcccgggtctcaagggtggactggtaggcacccccgcgccattctccatcgacaccaaggggg

SEQ ID NO: 276114 - DNA, 120 bp, Artificial Sequence
  ENSG00000128591_29 (sequence is synthesized)
ctggcacaggtggcctggggctgaccgtagagggcccctgcgaggccaagatcgagtgccaggacaatggtgatggctcatgtgctgtcagctacctgcccacggagcctggcgagtaca

SEQ ID NO: 276115 - DNA, 120 bp, Artificial Sequence
  ENSG00000128591_30 (sequence is synthesized)
ccatcaacatcctgtttgctgaggcccacatccctggctcgcccttcaaagccaccattcggcctgtgtttgacccgagcaaggtgcgggccagtggaccgggcctggagcgcggcaagg

SEQ ID NO: 276116 - DNA, 120 bp, Artificial Sequence
  ENSG00000128591_31 (sequence is synthesized)
tcggtgaggcagccaccttcactgtggactgctcagaggcaggcgaggcggagctgaccattgagatcctgtcggatgccggggtcaaggccgaggtgctgatccacaacaacgcggatg

SEQ ID NO: 276117 - DNA, 120 bp, Artificial Sequence
  ENSG00000128591_32 (sequence is synthesized)
gcacctaccacatcacctacagccctgccttccctggcacctacaccattaccatcaagtatggcgggcatcccgtgcccaaattccccacccgtgtccatgtgcagcctgcggtcgata

SEQ ID NO: 276118 - DNA, 120 bp, Artificial Sequence
  ENSG00000128591_33 (sequence is synthesized)
ccagtggcgtcaaggtctcagggcctggtgttgagccacacggtgtcctgcgggaggtgaccactgagttcactgtggatgcaagatccctaacagccacaggcggcaaccacgtgacgg

SEQ ID NO: 276119 - DNA, 120 bp, Artificial Sequence
  ENSG00000128591_34 (sequence is synthesized)
ctcgtgtgctcaacccctcgggggccaagacagacacctatgtgacagacaatggggacggcacctaccgagtgcagtacaccgcctacgaggagggcgtgcatctggtggaggtcctgt

SEQ ID NO: 276120 - DNA, 120 bp, Artificial Sequence
  ENSG00000128591_35 (sequence is synthesized)
atgatgaggtcgctgtgcccaagagccccttccgagtgggcgtgaccgagggctgtgatcccacccgcgtccgagccttcgggccaggcctggagggtggcttggtcaacaaggccaacc

SEQ ID NO: 276121 - DNA, 120 bp, Artificial Sequence
  ENSG00000128591_36 (sequence is synthesized)
gattcactgtggagaccaggggagcgggcaccgggggccttggcctagccatcgagggtccctcggaagccaagatgtcctgcaaggacaacaaggatggtagctgcaccgtggagtaca

SEQ ID NO: 276122 - DNA, 120 bp, Artificial Sequence
  ENSG00000128591_37 (sequence is synthesized)
gggggcggcccatcccagggagcccgttccgcgtgccagtgaaggatgtggtggaccctgggaaggtgaagtgctcagggccagggctgggggctggtgtcagggcccgggttcctcaga

SEQ ID NO: 276123 - DNA, 120 bp, Artificial Sequence
  ENSG00000128591_38 (sequence is synthesized)
ccttcacagtggattgcagtcaagctggccgggcgcccctgcaggtggctgtgctgggccccacaggtgtggccgagcctgtggaggtgcgggacaatggagatggcacccacactgtcc

SEQ ID NO: 276124 - DNA, 120 bp, Artificial Sequence
  ENSG00000128591_39 (sequence is synthesized)
actacaccccagccactgacgggccctacacggtagccgtcaagtatgctgaccaggaggtgccacgcagccccttcaagatcaaggtcctcccagctcatgatgccagcaaggtgcggg

SEQ ID NO: 276125 - DNA, 120 bp, Artificial Sequence
  ENSG00000128591_40 (sequence is synthesized)
ccagcggcccaggcctcaacgcctctggcatccctgccagcctgcctgtggagttcaccatcgacgcacgggacgcgggcgaggggttgctcactgtccagatcttggaccccgagggta

SEQ ID NO: 276126 - DNA, 120 bp, Artificial Sequence
  ENSG00000128591_41 (sequence is synthesized)
agcccaagaaggccaacatccgggacaatggggatggcacgtacactgtgtcctacctgccggacatgagtggccggtacaccatcaccatcaagtatggcggtgatgagatcccctact

SEQ ID NO: 276127 - DNA, 120 bp, Artificial Sequence
  ENSG00000128591_42 (sequence is synthesized)
cgcccttccgcatccatgctctgcccactggggatgccagcaagtgcctcgtcacagtgtccattggaggccatggcctgggtgcctgcctgggccctcgaatccagattgggcaggaga

SEQ ID NO: 276128 - DNA, 120 bp, Artificial Sequence
  ENSG00000128591_43 (sequence is synthesized)
cggtgatcacggtggatgccaaggcagccggtgaggggaaggtgacatgcacggtgtccacgccggatggggcagagctcgatgtggatgtggttgagaaccatgacggtacctttgaca

SEQ ID NO: 276129 - DNA, 120 bp, Artificial Sequence
  ENSG00000128591_44 (sequence is synthesized)
tctactacacagcgcccgagccgggcaagtacgtcatcaccatccgcttcgggggtgagcacatccccaacagccccttccacgtgctggccacagaggagccagtggtgcctgtggagc

SEQ ID NO: 276130 - DNA, 120 bp, Artificial Sequence
  ENSG00000128591_45 (sequence is synthesized)
caatggagtccatgctgaggcccttcaacctggtcatccccttcgcggtgcagaaaggggagctcacaggagaggtgcggatgccctcggggaagacggcacggcccaacatcaccgaca

SEQ ID NO: 276131 - DNA, 120 bp, Artificial Sequence
  ENSG00000128591_46 (sequence is synthesized)
acaaggacggcaccatcacggtgaggtatgcacccactgagaaaggcctgcaccagatggggatcaagtatgacggcaaccacatccctgggagccccttacagttctatgtggatgcca

SEQ ID NO: 276132 - DNA, 120 bp, Artificial Sequence
  ENSG00000128591_47 (sequence is synthesized)
tcaacagccgccatgtcagtgcctatgggccaggcctgagccatggcatggtcaacaagccagccaccttcactattgtcaccaaagatgctggagaagggggtctgtcactggccgtgg

SEQ ID NO: 276133 - DNA, 120 bp, Artificial Sequence
  ENSG00000128591_48 (sequence is synthesized)
agggcccatccaaggcagagatcacctgtaaggacaacaaggatggcacctgcaccgtgtcctatctgccgactgcgcctggagactacagcatcatcgtgcgcttcgatgacaagcaca

SEQ ID NO: 276134 - DNA, 120 bp, Artificial Sequence
  ENSG00000128591_49 (sequence is synthesized)
tcccggggagccccttcacagccaagatcacaggtgatgactccatgaggacctcacagctgaatgtgggcacctccacggacgtgtcactgaagatcaccgagagtgatctgagccagc

SEQ ID NO: 276135 - DNA, 120 bp, Artificial Sequence
  ENSG00000128591_50 (sequence is synthesized)
tgaccgccagcatccgtgccccctcgggcaacgaggagccctgcctgctgaagcgcctgcccaaccggcacattgggatctccttcacccccaaggaggtcggggagcacgtggtgagcg

SEQ ID NO: 276136 - DNA, 120 bp, Artificial Sequence
  ENSG00000128591_51 (sequence is synthesized)
tgcgcaagagtggcaagcatgtcaccaacagccccttcaagatcctggtggggccatctgagatcggggacgccagcaaggtgcgggtctggggcaaggggctttccgagggacacacat

SEQ ID NO: 276137 - DNA, 120 bp, Artificial Sequence
  ENSG00000128591_52 (sequence is synthesized)
tccaggtggcagagttcatcgtggacactcgcaatgcaggttatgggggcttggggctgagtattgaaggcccaagcaaggtggacatcaactgtgaggacatggaggacgggacatgca

SEQ ID NO: 276138 - DNA, 120 bp, Artificial Sequence
  ENSG00000128591_53 (sequence is synthesized)
aagtcacctactgccccaccgagcccggcacctacatcatcaacatcaagtttgctgacaagcacgtgcctggaagccccttcactgtgaaggtgaccggcgagggccgcatgaaggaga

SEQ ID NO: 276139 - DNA, 120 bp, Artificial Sequence
  ENSG00000128591_54 (sequence is synthesized)
gcatcacccggcggagacaggcaccttccatcgccaccatcggcagcacctgtgacctcaacctcaagatcccaggaaactggttccagatggtgtctgcccaggagcgcctgacacgca

SEQ ID NO: 276140 - DNA, 120 bp, Artificial Sequence
  ENSG00000128591_55 (sequence is synthesized)
ccttcacacgcagcagccacacctacacccgcacggagcgcacggagatcagcaagacgcggggcggggagacaaagcgcgaggtgcgggtggaggagtccacccaggtcggcggggacc

SEQ ID NO: 276141 - DNA, 120 bp, Artificial Sequence
  ENSG00000128591_56 (sequence is synthesized)
ccttccctgctgtgtttggggacttcctgggccgggagcgcctgggatccttcggcagcatcacccggcagcaggagggtgaggccagctctcaggacatgactgcacaggtgaccagcc

SEQ ID NO: 276142 - DNA, 120 bp, Artificial Sequence
  ENSG00000128591_57 (sequence is synthesized)
catcgggcaaggtggaagccgcagagatcgtcgagggcgaggacagcgcctacagcgtgcgctttgtgccccaggaaatggggccccatacggtcgctgtcaagtaccgtggccagcacg

SEQ ID NO: 276143 - DNA, 120 bp, Artificial Sequence
  ENSG00000128591_58 (sequence is synthesized)
tgcccggcagcccctttcagttcactgtggggccgctgggtgaaggtggtgcccacaaggtgcgggccggaggcacagggctggagcgaggtgtggccggcgtgccagccgagttcagca

SEQ ID NO: 276144 - DNA, 120 bp, Artificial Sequence
  ENSG00000128591_59 (sequence is synthesized)
tctggacccgggaggctggcgctgggggcctgtccattgctgtggagggtcctagcaaagcggagattgcatttgaggatcgcaaagatggctcctgcggcgtctcctatgtcgtccagg

SEQ ID NO: 276145 - DNA, 120 bp, Artificial Sequence
  ENSG00000128591_60 (sequence is synthesized)
aaccaggtgactatgaggtctccatcaagttcaatgatgagcacatcccagacagcccctttgtggtgcctgtggcctccctctcggatgacgctcgccgtctcactgtcaccagcctcc

SEQ ID NO: 276146 - DNA, 120 bp, Artificial Sequence
  ENSG00000128591_61 (sequence is synthesized)
aggagacggggctcaaggtgaaccagccagcgtcctttgccgtgcagctgaacggtgcccggggcgtgattgatgcccgggtgcacacaccctcgggggctgtggaggagtgctacgtct

SEQ ID NO: 276147 - DNA, 120 bp, Artificial Sequence
  ENSG00000128591_62 (sequence is synthesized)
ctgagctggacagtgacaagcacaccatccgcttcatcccccacgagaatggcgtccactccatcgatgtcaagttcaacggtgcccacatccctggaagtcccttcaagatccgcgttg

SEQ ID NO: 276148 - DNA, 120 bp, Artificial Sequence
  ENSG00000128591_63 (sequence is synthesized)
gggagcagagccaggctggggacccaggcttggtgtcagcctacggtcctgggctcgagggaggcactaccggtgtgtcatcagagttcatcgtgaacaccctgaatgccggctcggggg

SEQ ID NO: 276149 - DNA, 120 bp, Artificial Sequence
  ENSG00000128591_64 (sequence is synthesized)
ccttgtctgtcaccattgatggcccctccaaggtgcagctggactgtcgggagtgtcctgagggccatgtggtcacttatactcccatggcccctggcaactacctcattgccatcaagt

SEQ ID NO: 276150 - DNA, 120 bp, Artificial Sequence
  ENSG00000128591_65 (sequence is synthesized)
acggtggcccccagcacatcgtgggcagccccttcaaggccaaggtcactggtccgaggctgtccggaggccacagccttcacgaaacatccacggttctggtggagactgtgaccaagt

SEQ ID NO: 276151 - DNA, 120 bp, Artificial Sequence
  ENSG00000128591_66 (sequence is synthesized)
cctcctcaagccggggctccagctacagctccatccccaagttctcctcagatgccagcaaggtggtgactcggggccctgggctgtcccaggccttcgtgggccagaagaactccttca

SEQ ID NO: 276152 - DNA, 120 bp, Artificial Sequence
  ENSG00000128591_67 (sequence is synthesized)
ccgtggactgcagcaaagcaggcaccaacatgatgatggtgggcgtgcacggccccaagaccccctgtgaggaggtgtacgtgaagcacatggggaaccgggtgtacaatgtcacctaca

SEQ ID NO: 276153 - DNA, 120 bp, Artificial Sequence
  ENSG00000128591_68 (sequence is synthesized)
ctgtcaaggagaaaggggactacatcctcattgtcaagtggggtgacgaaagtgtccctggaagccccttcaaagtcaaggtcccttgaatcccaaaagtgcctccccagcctcagcccc

SEQ ID NO: 276154 - DNA, 120 bp, Artificial Sequence
  ENSG00000128591_69 (sequence is synthesized)
cacctccagccacacacacattacacacacacacacacacacacaaatgtgccacacccagacacgcacagaatcagacactacaaacacctgccttgggggtgaagtgaaggcccagcc

SEQ ID NO: 276155 - DNA, 120 bp, Artificial Sequence
  ENSG00000128591_70 (sequence is synthesized)
tccccaccccaccgcgccccaggggttggaggaccttgtctgtgtcaggacagtgtccctccctgggaatgtgacatgagggccgactggggccaggctcaggggcagaggctgggacac

SEQ ID NO: 276156 - DNA, 120 bp, Artificial Sequence
  ENSG00000128591_71 (sequence is synthesized)
aaggggctggcgagggctgcgaggccagggaagccctgagtttctggcggggctgagcagtgggggagcattgtgttgtgggtgtctgtgtgtgaggtcaccctcaaactgcaccgccgg

SEQ ID NO: 276157 - DNA, 120 bp, Artificial Sequence
  ENSG00000128591_72 (sequence is synthesized)
ccagataccctcctgaccccgaggacttggtctggtctctctggtggctacaaccccagagttttaaggacttggaaaggaaagcacaatcagagaagaaaacagcccccgaaccagcag

SEQ ID NO: 276158 - DNA, 120 bp, Artificial Sequence
  ENSG00000128591_73 (sequence is synthesized)
gagtggcctggcacatggaccggcctgagcgatgtgcactccacccaagccaggctcccagggggcctgatttctctctcactgtctctttttttaaaatggttgcacggctctgcccca

SEQ ID NO: 276159 - DNA, 120 bp, Artificial Sequence
  ENSG00000128591_74 (sequence is synthesized)
tggggggccttttttacacactgcgaggcccagctttctaggggacttttgcacatgtcatgcagctcagctgggagctgcttaggtggaaaactccaaataaagtgcggctgtcgcaga

SEQ ID NO: 276160 - DNA, 120 bp, Artificial Sequence
  ENSG00000128591_75 (sequence is synthesized)
ctgcccgccccacctgactgcttcccagataaggtgtggtcccagctcacacacacctgccccgggggtggggcaagctggttctcctcccctccccaactcagccttcttccctccgca

SEQ ID NO: 276161 - DNA, 120 bp, Artificial Sequence
  ENSG00000128591_76 (sequence is synthesized)
ccccctgccgcacgaggaggagccctctgaagtgccacagctgcgccagccctacgctcctccccggcccggcgcccgccccacacactgggccacagaggagccagtggtgcctgtgga

SEQ ID NO: 276162 - DNA, 80 bp, Artificial Sequence
  ENSG00000128594_0 (sequence is synthesized)
gaccgcaatcagctgccgccggcccggagcggccgacgccgggagagggagcgcagcatccagcgagtgcggcctgggcg

SEQ ID NO: 276163 - DNA, 120 bp, Artificial Sequence
  ENSG00000128594_1 (sequence is synthesized)
agagcgggccggggccgccggagcgcactttggcgatgaagcgccttcccccgcggctggagcgagccggtgccagggtccaaggacaaagccgggaagcgctggtggcgccgctccttg

SEQ ID NO: 276164 - DNA, 120 bp, Artificial Sequence
  ENSG00000128594_2 (sequence is synthesized)
ggcggaggggggggcatgcacctgcatagcccgccgggccttggctctcccaggcgcgcctcaactccgcggcttcgccggctccggctccggatttactagaggccattttgtctcccc

SEQ ID NO: 276165 - DNA, 120 bp, Artificial Sequence
  ENSG00000128594_3 (sequence is synthesized)
caccccttccctcccctcccctcccctcccctctgccctccccgcccccaccacttcccccttttgttaattaaaactaagaagtcggaatgggaacgaggtgcccagctcccgtggaga

SEQ ID NO: 276166 - DNA, 120 bp, Artificial Sequence
  ENSG00000128594_4 (sequence is synthesized)
aagcttaaggacaccacgccagtgctttcctgccttccttccgagatggaaagaggagctcctagctcacttaagccggggtagggctggttctcctttccgagccaaaatcccaggcga

SEQ ID NO: 276167 - DNA, 120 bp, Artificial Sequence
  ENSG00000128594_5 (sequence is synthesized)
tggtgaattatgaacgtgccacaccatgaagctcttgtggcaggtaactgtgcaccaccacacctggaatgccatcctgctcccgttcgtctacctcacggcgcaagtgtggattctgtg

SEQ ID NO: 276168 - DNA, 120 bp, Artificial Sequence
  ENSG00000128594_6 (sequence is synthesized)
tgcagccatcgctgctgccgcctcagccgggccccagaactgcccctccgtctgctcgtgcagtaaccagttcagcaaggtggtgtgcacgcgccggggcctctccgaggtcccgcaggg

SEQ ID NO: 276169 - DNA, 120 bp, Artificial Sequence
  ENSG00000128594_7 (sequence is synthesized)
tattccctcgaacacccggtacctcaacctcatggagaacaacatccagatgatccaggccgacaccttccgccacctccaccacctggaggtcctgcagttgggcaggaactccatccg

SEQ ID NO: 276170 - DNA, 120 bp, Artificial Sequence
  ENSG00000128594_8 (sequence is synthesized)
gcagattgaggtgggggccttcaacggcctggccagcctcaacaccctggagctgttcgacaactggctgacagtcatccctagcggggcctttgaatacctgtccaagctgcgggagct

SEQ ID NO: 276171 - DNA, 120 bp, Artificial Sequence
  ENSG00000128594_9 (sequence is synthesized)
ctggcttcgcaacaaccccatcgaaagcatcccctcttacgccttcaaccgggtgccctccctcatgcgcctggacttgggggagctcaagaagctggagtatatctctgagggagcttt

SEQ ID NO: 276172 - DNA, 120 bp, Artificial Sequence
  ENSG00000128594_10 (sequence is synthesized)
tgaggggctgttcaacctcaagtatctgaacttgggcatgtgcaacattaaagacatgcccaatctcacccccctggtggggctggaggagctggagatgtcagggaaccacttccctga

SEQ ID NO: 276173 - DNA, 120 bp, Artificial Sequence
  ENSG00000128594_11 (sequence is synthesized)
gatcaggcctggctccttccatggcctgagctccctcaagaagctctgggtcatgaactcacaggtcagcctgattgagcggaatgcttttgacgggctggcttcacttgtggaactcaa

SEQ ID NO: 276174 - DNA, 120 bp, Artificial Sequence
  ENSG00000128594_12 (sequence is synthesized)
cttggcccacaataacctctcttctttgccccatgacctctttaccccgctgaggtacctggtggagttgcatctacaccacaacccttggaactgtgattgtgacattctgtggctagc

SEQ ID NO: 276175 - DNA, 120 bp, Artificial Sequence
  ENSG00000128594_13 (sequence is synthesized)
ctggtggcttcgagagtatatacccaccaattccacctgctgtggccgctgtcatgctcccatgcacatgcgaggccgctacctcgtggaggtggaccaggcctccttccagtgctctgc

SEQ ID NO: 276176 - DNA, 120 bp, Artificial Sequence
  ENSG00000128594_14 (sequence is synthesized)
ccccttcatcatggacgcacctcgagacctcaacatttctgagggtcggatggcagaacttaagtgtcggactccccctatgtcctccgtgaagtggttgctgcccaatgggacagtgct

SEQ ID NO: 276177 - DNA, 120 bp, Artificial Sequence
  ENSG00000128594_15 (sequence is synthesized)
cagccacgcctcccgccacccaaggatctctgtcctcaacgacggcaccttgaacttttcccacgtgctgctttcagacactggggtgtacacatgcatggtgaccaatgttgcaggcaa

SEQ ID NO: 276178 - DNA, 120 bp, Artificial Sequence
  ENSG00000128594_16 (sequence is synthesized)
ctccaacgcctcggcctacctcaatgtgagcacggctgagcttaacacctccaactacagcttcttcaccacagtaacagtggagaccacggagatctcgcctgaggacacaacgcgaaa

SEQ ID NO: 276179 - DNA, 120 bp, Artificial Sequence
  ENSG00000128594_17 (sequence is synthesized)
accactgacaagatgcagaccagcctggatgaagtcatgaagaccaccaagatcatcattggctgctttgtggcagtgactctgctagctgccgccatgttgattgtcttctataaactt

SEQ ID NO: 276180 - DNA, 120 bp, Artificial Sequence
  ENSG00000128594_18 (sequence is synthesized)
cgtaagcggcaccagcagcggagtacagtcacagccgcccggactgttgagataatccaggtggacgaagacatcccagcagcaacatccgcagcagcaacagcagctccgtccggtgta

SEQ ID NO: 276181 - DNA, 120 bp, Artificial Sequence
  ENSG00000128594_19 (sequence is synthesized)
tcaggtgagggggcagtagtgctgcccacaattcatgaccatattaactacaacacctacaaaccagcacatggggcccactggacagaaaacagcctggggaactctctgcaccccaca

SEQ ID NO: 276182 - DNA, 120 bp, Artificial Sequence
  ENSG00000128594_20 (sequence is synthesized)
gtcaccactatctctgaaccttatataattcagacccataccaaggacaaggtacaggaaactcaaatatgactcccctcccccaaaaaacttataaaatgcaatagaatgcacacaaag

SEQ ID NO: 276183 - DNA, 120 bp, Artificial Sequence
  ENSG00000128594_21 (sequence is synthesized)
acagcaacttttgtacagagtggggagagactttttcttgtatatgcttatatattaagtctatgggctggttaaaaaaaacagattatattaaaatttaaagacaaaaagtcaaaacaa

SEQ ID NO: 276184 - DNA, 120 bp, Artificial Sequence
  ENSG00000128594_22 (sequence is synthesized)
aaatattttctaacttgtaagttctatttaaagggggtgggggggaatcttgggaacgttgtggggtacaagccacaagttaacttgctatgctgccagaagggatttctggtataaggt

SEQ ID NO: 276185 - DNA, 120 bp, Artificial Sequence
  ENSG00000128594_23 (sequence is synthesized)
tgaaattgctgagataaaataaactaaaacaacaaacatccttaaagaggtagggtgtgggctgctgagggggcaagagggatagactgaatctgtcattttttagaagatgcttcatag

SEQ ID NO: 276186 - DNA, 120 bp, Artificial Sequence
  ENSG00000128594_24 (sequence is synthesized)
gacacaggactatccatttctacagacatctttcttaagccgagagctgtctttgcagaattatcttattaaaaaaaaatacaaaaaaaaagcaccatgaatttgtactgtgccaaaatg

SEQ ID NO: 276187 - DNA, 120 bp, Artificial Sequence
  ENSG00000128594_25 (sequence is synthesized)
atagtggcaataatatttttcttcagaggctaaggggaagatagacctgtacatgtattttaagcaggaaaaccaccaaaattcaaacgaacccttaaaggggctgagtctttgtccatg

SEQ ID NO: 276188 - DNA, 120 bp, Artificial Sequence
  ENSG00000128594_26 (sequence is synthesized)
tgcacaagtcttgggggtctgtgcactggacacacatgtgccttgcctgacagaattgcttagaaaggagcagagaaggacgggagctggcgtagctctcagtctaatgctttcacattg

SEQ ID NO: 276189 - DNA, 120 bp, Artificial Sequence
  ENSG00000128594_27 (sequence is synthesized)
caccagattcctgcagttgggcttaacccactctgcaaggcatgtgtctattcagggtttcccaggaggaggaggcccctgaaggggtgcggcagcaggggggtgggaagggagggtaaa

SEQ ID NO: 276190 - DNA, 120 bp, Artificial Sequence
  ENSG00000128594_28 (sequence is synthesized)
gcagagagaatgtattcacaggaggccataaattagcattgtgccatgtccacctgttgttcctggactctgacacatgattgtagacaatgatggcattttatgatttttaaaaaagat

SEQ ID NO: 276191 - DNA, 120 bp, Artificial Sequence
  ENSG00000128594_29 (sequence is synthesized)
tttgtttgttttaaggtggagagggaggagaagcctgaattggggagcttgggagtggaagcttttctcatgcttgtgatttggtgactcttctaaatgctgattcattagggattatta

SEQ ID NO: 276192 - DNA, 120 bp, Artificial Sequence
  ENSG00000128594_30 (sequence is synthesized)
cagcggatgtcaactggttgtggtgatggggtgggggcagaacatgagtagcaaagaaaagggagagacgaaaagggtacaggctcacgtaaagtaatgaagcctttcccaaccaggatg

SEQ ID NO: 276193 - DNA, 120 bp, Artificial Sequence
  ENSG00000128594_31 (sequence is synthesized)
gttcacaaaaaagctgtgagatccacagttacaagtgacacgcatgcacacatggagttccacatggggtactgttgaatggagcacactgatgggaagcttccctctcccaggccccct

SEQ ID NO: 276194 - DNA, 120 bp, Artificial Sequence
  ENSG00000128594_32 (sequence is synthesized)
caggagaaggtggaagagaaagggtgggcgtgggtggggaaggcagagatctctgttattctggtccatctaatgatgtaacttctttcagttattattttagctttaaaaggaaataag

SEQ ID NO: 276195 - DNA, 120 bp, Artificial Sequence
  ENSG00000128594_33 (sequence is synthesized)
gggttcagatttgaaagggggtggtatgggtgggggaggggaattgccaacaaaagaacactgattgtaatgtgagaaaagtgtatttttgtattttaataaatattgttgaatttttaa

SEQ ID NO: 276196 - DNA, 120 bp, Artificial Sequence
  ENSG00000128594_34 (sequence is synthesized)
acattcacgttctgactgaaggacaaaaggatgagagagcagtctgcgtggctgccgcctgcaacaccgcgagcccggcgcgaggaggagacgaagtcggaatgggaacgaggtgcccag

SEQ ID NO: 276197 - DNA, 120 bp, Artificial Sequence
  ENSG00000128594_35 (sequence is synthesized)
aaaactaagaagtcggaatgggaacgaggtgcccagctcccgtggagaaagcttaaggacaccacgccagtgctttcctgccttccttccgaggtaactgtgcaccaccacacctggaat

SEQ ID NO: 276198 - DNA, 120 bp, Artificial Sequence
  ENSG00000128594_36 (sequence is synthesized)
tggtcctcgggggccggacggagcgccgccccgcgtgccggcagccggcggactggagaactgaccccccgtttttgtctcttccaccctccgagaagaggcgaggagaaaggggaagtc

SEQ ID NO: 276199 - DNA, 120 bp, Artificial Sequence
  ENSG00000128595_0 (sequence is synthesized)
gcgcgcgtgagctgagccggtgggtgagcggcggccacggcatcctgtgctgtgggggctacgaggaaagatctaattatcatggacctgcgacagtttcttatgtgcctgtccctgtgc

SEQ ID NO: 276200 - DNA, 120 bp, Artificial Sequence
  ENSG00000128595_1 (sequence is synthesized)
acagcctttgccttgagcaaacccacagaaaagaaggaccgtgtacatcatgagcctcagctcagtgacaaggttcacaatgatgctcagagttttgattatgaccatgatgccttcttg

SEQ ID NO: 276201 - DNA, 120 bp, Artificial Sequence
  ENSG00000128595_2 (sequence is synthesized)
ggtgctgaagaagcaaagacctttgatcagctgacaccagaagagagcaaggaaaggcttggaatgattgtagataaaatagacgcggataaagatgggtttgtgacggagggggagctg

SEQ ID NO: 276202 - DNA, 120 bp, Artificial Sequence
  ENSG00000128595_3 (sequence is synthesized)
aaatcctggattaagcacgcccagaagaaatacatatatgacaatgttgaaaaccaatggcaggagtttgatatgaatcaagacggcttaatctcctgggatgagtacagaaacgtgact

SEQ ID NO: 276203 - DNA, 120 bp, Artificial Sequence
  ENSG00000128595_4 (sequence is synthesized)
tatggcacttacctggatgatccagatcctgatgatggatttaactataaacagatgatggttagagatgagcggaggtttaaaatggcagacaaggatggagacctcattgccaccaag

SEQ ID NO: 276204 - DNA, 120 bp, Artificial Sequence
  ENSG00000128595_5 (sequence is synthesized)
gaggagttcacagctttcctgcaccctgaggagtatgactacatgaaagatatagtagtacaggaaacaatggaagatatagataagaatgctgatggtttcattgatctagaagagtat

SEQ ID NO: 276205 - DNA, 120 bp, Artificial Sequence
  ENSG00000128595_6 (sequence is synthesized)
attggtgacatgtacagccatgatgggaatactgatgagccagaatgggtaaagacagagcgagagcagtttgttgagtttcgggataagaaccgtgatgggaagatggacaaggaagag

SEQ ID NO: 276206 - DNA, 120 bp, Artificial Sequence
  ENSG00000128595_7 (sequence is synthesized)
accaaagactggatccttccctcagactatgatcatgcagaggcagaagccaggcacctggtctatgaatcagaccaaaacaaggatggcaagcttaccaaggaggagatcgttgacaag

SEQ ID NO: 276207 - DNA, 120 bp, Artificial Sequence
  ENSG00000128595_8 (sequence is synthesized)
tatgacttatttgttggcagccaggccacagattttggggaggccttagtacggcatgatgagttctgagctacggaggaaccctcatttcctcaaaagtaatttatttttacagcttct

SEQ ID NO: 276208 - DNA, 120 bp, Artificial Sequence
  ENSG00000128595_9 (sequence is synthesized)
ggtttcacatgaaattgtttgcgctactgagactgttactacaaactttttaagacatgaaaaggcgtaatgaaaaccatcccgtccccattcctcctcctctctgagggactggaggga

SEQ ID NO: 276209 - DNA, 120 bp, Artificial Sequence
  ENSG00000128595_10 (sequence is synthesized)
gtgtttgtagatttacactttgtattatgtattaacatggcgtgtttatttttgtatttttctctggttgggagtatgatatgaaggatcaagatcctcaactcacacatgtagacaaac

SEQ ID NO: 276210 - DNA, 120 bp, Artificial Sequence
  ENSG00000128595_11 (sequence is synthesized)
attagctctttactctttctcaaccccttttatgattttaataattctcacttaactaattttgtaagcctgagatcaataagaaatgttcaggagagaggaaagaaaaaaaatatatgc

SEQ ID NO: 276211 - DNA, 120 bp, Artificial Sequence
  ENSG00000128595_12 (sequence is synthesized)
tccacaatttatatttagagagagaacacttagtcttgcctgtcaaaaagtccaacatttcataggtagtaggggccacatattacattcagttgctataggtccagcaactgaacctgc

SEQ ID NO: 276212 - DNA, 120 bp, Artificial Sequence
  ENSG00000128595_13 (sequence is synthesized)
cattacctgggcaaggaaagatccctttgctctaggaaagcttggcccaaattgattttcttctttttccccctgtaggactgactgttggctaattttgtcaagcacagctgtggtggg

SEQ ID NO: 276213 - DNA, 120 bp, Artificial Sequence
  ENSG00000128595_14 (sequence is synthesized)
aagagttagggccagtgtcttgaaaatcaatcaagtagtgaatgtgatctctttgcagagctatagatagaaacagctggaaaactaaaggaaaaatacaagtgttttcggggcatacat

SEQ ID NO: 276214 - DNA, 120 bp, Artificial Sequence
  ENSG00000128595_15 (sequence is synthesized)
tttttttctgggtgtgcatctgttgaaatgctcaagacttaattatttgccttttgaaatcactgtaaatgcccccatccggttcctcttcttcccaggtgtgccaaggaattaatcttg

SEQ ID NO: 276215 - DNA, 120 bp, Artificial Sequence
  ENSG00000128595_16 (sequence is synthesized)
gtttcactacaattaaaattcactcctttccaatcatgtcattgaaagtgcctttaacgaaagaaatggtcactgaatgggaattctcttaagaaaccctgagattaaaaaaagactatt

SEQ ID NO: 276216 - DNA, 120 bp, Artificial Sequence
  ENSG00000128595_17 (sequence is synthesized)
tggataacttataggaaagcctagaacctcccagtagagtggggatttttttcttcttccctttctcttttggacaatagttaaattagcagtattagttatgagtttggttgcagtgtt

SEQ ID NO: 276217 - DNA, 120 bp, Artificial Sequence
  ENSG00000128595_18 (sequence is synthesized)
cttatcttgtgggctgatttccaaaaaccacatgctgctgaatttaccagggatcctcatacctcacaatgcaaaccacttactaccaggcctttttctgtgtccactggagagcttgag

SEQ ID NO: 276218 - DNA, 120 bp, Artificial Sequence
  ENSG00000128595_19 (sequence is synthesized)
ctcacactcaaagatcagaggacctacagagagggctctttggtttgaggaccatggcttacctttcctgcctttgacccatcacaccccatttcctcctctttccctctccccgctgcc

SEQ ID NO: 276219 - DNA, 120 bp, Artificial Sequence
  ENSG00000128595_20 (sequence is synthesized)
atcctgtgctgtgggggctacgaggaaaggacctcccaccctcccccactgagctgccttcccagtgatgaaagaaaaaatgtaaaagcctgaaaacccttcttcttgatttttaatttt

SEQ ID NO: 276220 - DNA, 120 bp, Artificial Sequence
  ENSG00000128595_21 (sequence is synthesized)
tttttttccctctaagaccttaaccactctggatagtatcacggggtatcagtagagtgtgctaaacagatgtgtactctgcagcttctttgcaggttttttgtcacatttttcagtcaa

SEQ ID NO: 276221 - DNA, 120 bp, Artificial Sequence
  ENSG00000128595_22 (sequence is synthesized)
gtgttccagctttgtgcttgttcattagagtcacctgtgactacagagattctgaaagtttgaatcagggcctgggaatctgtactttgaacagtactacaggtggtatttatgcctagg

SEQ ID NO: 276222 - DNA, 120 bp, Artificial Sequence
  ENSG00000128595_23 (sequence is synthesized)
caagtatgggaaacaactgtgcagaaggataaagacgttcttatctatgactagaccatctgaatgatttggcctttgaaggtgactcaaggttgagcctggatgttggagacttggtgc

SEQ ID NO: 276223 - DNA, 120 bp, Artificial Sequence
  ENSG00000128595_24 (sequence is synthesized)
tatagaccaaggaagctgccaagtatttcgctggttcctaatctcatgaacatcagaatcacctgaaaaacatttaaagctacgaatgtctgaattcagcttcagagactctaaatcaat

SEQ ID NO: 276224 - DNA, 120 bp, Artificial Sequence
  ENSG00000128595_25 (sequence is synthesized)
aggagaaacttaaagcttcctagatgattctaataaccagccatgtttgaagaccagaccaccaatgcgtacaagaagtaaaggatttggagtcaacatttaaaccttggttctttcact

SEQ ID NO: 276225 - DNA, 120 bp, Artificial Sequence
  ENSG00000128595_26 (sequence is synthesized)
tttaattcttatgaacttgggcaaaaggattaaaattctactttggtatcttttgaaagaaaacagaaagtggacattttaactataagtttcttatcagcctacaatcagatgaaggaa

SEQ ID NO: 276226 - DNA, 120 bp, Artificial Sequence
  ENSG00000128595_27 (sequence is synthesized)
attgtaagtaaaatagatggcgacaaggacgggtttgtcactgtggatgagctcaaagactggattaaatttgcacaaaagcgctggatttacgaggatgtagagcgacagtggaagggg

SEQ ID NO: 276227 - DNA, 120 bp, Artificial Sequence
  ENSG00000128595_28 (sequence is synthesized)
gagatgtggaaagagctaaagaaaccaccctttgttcccaactccactttacccatattttatgcaacacaaacactgtccttttgggtccctttcttacagatggacctcttgagaaga

SEQ ID NO: 276228 - DNA, 120 bp, Artificial Sequence
  ENSG00000128595_29 (sequence is synthesized)
attatcgtattccacgtttttagccctcaggttaccaagataaatatatgtatatataacctttattattgctatatctttgtggataatacattcaggtggtgctgggtgatttattat

SEQ ID NO: 276229 - DNA, 120 bp, Artificial Sequence
  ENSG00000128595_30 (sequence is synthesized)
aatctgaacctaggtatatcctttggtcttccacagtcatgttgaggtgggctccctggtatggtaaaaagccaggtataatgtaacttcaccccagcctttgtactaagctcttgatag

SEQ ID NO: 276230 - DNA, 120 bp, Artificial Sequence
  ENSG00000128595_31 (sequence is synthesized)
tggatatactcttttaagtttagccccaatatagggtaatggaaatttcctgccctctgggttccccatttttactattaagaagaccagtgataatttaataatgccaccaactctggc

SEQ ID NO: 276231 - DNA, 120 bp, Artificial Sequence
  ENSG00000128595_32 (sequence is synthesized)
ttagttaagtgagagtgtgaactgtgtggcaagagagcctcacacctcactaggtgcagagagcccaggccttatgttaaaatcatgcacttgaaaagcaaaccttaatctgcaaagaca

SEQ ID NO: 276232 - DNA, 120 bp, Artificial Sequence
  ENSG00000128595_33 (sequence is synthesized)
gcagcaagcattatacggtcatcttgaatgatccctttgaaattttttttttgtttgtttgtttaaatcaagcctgaggctggtgaacagtagctacacacccatattgtgtgttctgtg

SEQ ID NO: 276233 - DNA, 120 bp, Artificial Sequence
  ENSG00000128595_34 (sequence is synthesized)
aatgctagctctcttgaatttggatattggttattttttatagagtgtaaaccaagttttatattctgcaatgcgaacaggtacctatctgtttctaaataaaactgtttacattcatta

SEQ ID NO: 276234 - DNA, 120 bp, Artificial Sequence
  ENSG00000128595_35 (sequence is synthesized)
ggtatgtatgaccttcattttccaagaaatagaactctagcttagaattatggatgctctaaaatgtcagaatgggaactctcctcgaagttctcccaaactcagagacagcactgcctt

SEQ ID NO: 276235 - DNA, 120 bp, Artificial Sequence
  ENSG00000128595_36 (sequence is synthesized)
ctcctaaatgattattcttttctccctgttttctggtattttctagcatccttctcaccacagccataacccttttttacttccattaggccgtataactggagagacctgctgctcgtt

SEQ ID NO: 276236 - DNA, 120 bp, Artificial Sequence
  ENSG00000128595_37 (sequence is synthesized)
atataattatctgataccaaacacaagcgattctgaatgtacacacacgtttatctatagagcataaggtaaaacaattttgtttaacattttggtattgtttacaaatgttattaaaac

SEQ ID NO: 276237 - DNA, 120 bp, Artificial Sequence
  ENSG00000128595_38 (sequence is synthesized)
atgcaaattcattttgagaacctcgagagaattaaactattaactttagtaaacacacagtttaagacaaatataaaggtttagccaaatgcaacggggaggaagcacctggaataattt

SEQ ID NO: 276238 - DNA, 120 bp, Artificial Sequence
  ENSG00000128595_39 (sequence is synthesized)
gtgcttgctcaggggcttgtggacatggctgttcctgccaaagctgtagcagttatccaaaagttctttcaaactcatatttggggccactgagttttttttgtttttttttttgttttg

SEQ ID NO: 276239 - DNA, 120 bp, Artificial Sequence
  ENSG00000128595_40 (sequence is synthesized)
ttttgttttttctttatgtctctcccatttctaaagtgttttcttaagtttgttctaattcagcatatatcatctcagaatggatccccagcaggaaaaaaaaaaaaagttactaaaaag

SEQ ID NO: 276240 - DNA, 120 bp, Artificial Sequence
  ENSG00000128595_41 (sequence is synthesized)
gaaagtatccatacactgaaaacttaaagcatattcctttttggttgccttgtatgtagaaatcagttctccaagtgctgtgaatggtgccacttaggagtagaaactgatgattgttga

SEQ ID NO: 276241 - DNA, 120 bp, Artificial Sequence
  ENSG00000128595_42 (sequence is synthesized)
aatggcctttgggtggtctgaaatagaccagtggaaacagtagctttgtaggcaagaaggcaatagtaagaaaatgaaaaattgactccccaaactgccatcactccttttaccatcttt

SEQ ID NO: 276242 - DNA, 120 bp, Artificial Sequence
  ENSG00000128595_43 (sequence is synthesized)
tttgtgtttttagtagtttggtttctgacggagacaatagaaacttacttaaaagtaaaatttaattctagctgttgcaaacaggccaatattgggtcctcagttggggccaacttgggt

SEQ ID NO: 276243 - DNA, 120 bp, Artificial Sequence
  ENSG00000128595_44 (sequence is synthesized)
agacgagacagtagaaacttctgttttctgggagctgcatgtgtcggattcatctgtcatggccttcccacacaccatcttcatgatgcaagcttggaactggagagaaaggtacaattg

SEQ ID NO: 276244 - DNA, 120 bp, Artificial Sequence
  ENSG00000128595_45 (sequence is synthesized)
gagataaccttggcagatgaggaagtatgggaaaaaagaccttattctctgtatcaccaaagccttgcacaatgctttgtacccagaatgcccttaggtggttttgaatctatcttcccc

SEQ ID NO: 276245 - DNA, 120 bp, Artificial Sequence
  ENSG00000128595_46 (sequence is synthesized)
atcctgaaaactatctagattccagtctagaactactcctgggtctacggtaatcctaaactggtcaagtctgagacctcactgttggtaaattcacaaaccatcctgcttcataaaagc

SEQ ID NO: 276246 - DNA, 120 bp, Artificial Sequence
  ENSG00000128595_47 (sequence is synthesized)
actgtcagcagaggcccctccattactagcaggtgctcccagctggaaaggactgccaattctcttctatccagggaggtttcaaattagttttgagtctacctctgggattgaggaaac

SEQ ID NO: 276247 - DNA, 120 bp, Artificial Sequence
  ENSG00000128595_48 (sequence is synthesized)
aataccatctgaaagtagggtttttgccacttagggtttggtgtttattagctcggatttcagatgggataggaaatcccccagtaccttcagatgataagatattttagagatttttgc

SEQ ID NO: 276248 - DNA, 120 bp, Artificial Sequence
  ENSG00000128595_49 (sequence is synthesized)
atgtggtatgatttctgtgcttcacacatgctcgtgcaggctaaaagttggaagggaaatgattaagaaattattaaatgcaaggactgaaaattgagaggaatctgagtttttattttt

SEQ ID NO: 276249 - DNA, 120 bp, Artificial Sequence
  ENSG00000128595_50 (sequence is synthesized)
aagccgtataactggagagacctgctgctcgttatataattatctgataccaaacacaagcgattctgaatgtacacacacgtttatctatagagcataaggtaaaacaattttgtttaa

SEQ ID NO: 276250 - DNA, 120 bp, Artificial Sequence
  ENSG00000128596_0 (sequence is synthesized)
ctccatctgtaggccacctcagcctttcagcctcttcttcactggctcccgccctctttcagtcttggccctctcctccctgtccccccggactaaatacgcacaccccctctttctttc

SEQ ID NO: 276251 - DNA, 120 bp, Artificial Sequence
  ENSG00000128596_1 (sequence is synthesized)
tgtgcaagcaagagggtcctggaacagcgggttctgaggaggctgggaggcagggctgagaggtggccgagagagaggagtcgcagagccgccagagtgagtcaggcacctccactggga

SEQ ID NO: 276252 - DNA, 120 bp, Artificial Sequence
  ENSG00000128596_2 (sequence is synthesized)
ttacagatcccagagcctcgaggagctggaagacatgtccccttctttcctctgcaccccagcccgcagccagccccccaccccccagcccctcctttctccctgctctcaggacccaca

SEQ ID NO: 276253 - DNA, 120 bp, Artificial Sequence
  ENSG00000128596_3 (sequence is synthesized)
gtgaccactctaggctcctatgaggcttccgagggctgtgagaggaagaagggccaacgctgggggtccctggaacgacgggggatgcaagctatggagggggaggtgttactcccagct

SEQ ID NO: 276254 - DNA, 120 bp, Artificial Sequence
  ENSG00000128596_4 (sequence is synthesized)
ctctatgaggaggaagaggaagaggaagaggaggaagaagaggtggaagaagaagaagaacaagtgcagaaaggtggcagtgttggctctctgtcagtcaacaagcaccggggactgagc

SEQ ID NO: 276255 - DNA, 120 bp, Artificial Sequence
  ENSG00000128596_5 (sequence is synthesized)
ctcacggagacagagctggaggagctgcgggctcaggtgctgcagctggtggcagaactggaggagacccgggaactggcagggcagcatgaggatgactccttggagctacaggggctc

SEQ ID NO: 276256 - DNA, 120 bp, Artificial Sequence
  ENSG00000128596_6 (sequence is synthesized)
ctggaggatgaacggctagccagcgcccagcaggcagaggtgttcaccaagcagatccagcagctccaaggtgagctgcgttctctacgggaggagatttccctgttagagcatgagaaa

SEQ ID NO: 276257 - DNA, 120 bp, Artificial Sequence
  ENSG00000128596_7 (sequence is synthesized)
gaaagcgaacttaaggaaatagaacaggaattgcatttggcccaggctgagatccagagtctgcggcaagcagcagaggattccgcaactgaacatgagagtgacatagcatccctgcag

SEQ ID NO: 276258 - DNA, 120 bp, Artificial Sequence
  ENSG00000128596_8 (sequence is synthesized)
gaggatctctgccggatgcagaatgaacttgaagacatggaacgcattcggggagattatgagatggagatcgcctccctccgtgcagaaatggaaatgaagagctctgaaccatccggt

SEQ ID NO: 276259 - DNA, 120 bp, Artificial Sequence
  ENSG00000128596_9 (sequence is synthesized)
agtttaggtctctcagattactctgggttacaagaagaactgcaggagctgcgggaacgctaccatttcctgaatgaggaataccgggccctgcaggagagcaacagcagcctcacgggg

SEQ ID NO: 276260 - DNA, 120 bp, Artificial Sequence
  ENSG00000128596_10 (sequence is synthesized)
cagcttgcagatctggagagtgagaggacacagagagcaacagagagatggctgcagtcccaaacactgagtatgacgtcagcagagtctcagacttcagaaatggatttcttagagcct

SEQ ID NO: 276261 - DNA, 120 bp, Artificial Sequence
  ENSG00000128596_11 (sequence is synthesized)
gatcctgaaatgcagttgttacggcagcagctacgggatgctgaagagcagatgcatggcatgaagaacaagtgtcaggaattgtgttgtgagttggaagagctacagcatcatcgccag

SEQ ID NO: 276262 - DNA, 120 bp, Artificial Sequence
  ENSG00000128596_12 (sequence is synthesized)
gtcagtgaggaggagcagaggcggctgcagagggagctcaagtgtgctcagaatgaggtgcttcggtttcagacctcccacagtgtcacccagaatgaggagctgaagtccagactctgt

SEQ ID NO: 276263 - DNA, 120 bp, Artificial Sequence
  ENSG00000128596_13 (sequence is synthesized)
accctgcagaaaaaatatgatactagccaggatgagcagaacgagctcttgaagatgcagctgcaacttcagactgagctccggcagctcaaagtcatgaaatccacacttgtagaaaac

SEQ ID NO: 276264 - DNA, 120 bp, Artificial Sequence
  ENSG00000128596_14 (sequence is synthesized)
cagagtgagaaggagttactgtgccggctgcagaagctgcacctccagcaccagaacgtcacatgtgagaaggaaaagctgctggaacggcagcagcagctgcaggaggagctgcagtgc

SEQ ID NO: 276265 - DNA, 120 bp, Artificial Sequence
  ENSG00000128596_15 (sequence is synthesized)
catgaggcagagctgcagcacctcagggatacggtggcctccttcaaagagagcaatgagaaggacacagagacgcacgctcagcttcaggagatgaagcagctgtaccaggccagcaag

SEQ ID NO: 276266 - DNA, 120 bp, Artificial Sequence
  ENSG00000128596_16 (sequence is synthesized)
gacgagctggagcggcagaagcacatgtatgaccagctggagcaggacctcctgctctgccagctggagctgaaagagctcaaggcctcccaccccattccggaggacaaaggaaagtgt

SEQ ID NO: 276267 - DNA, 120 bp, Artificial Sequence
  ENSG00000128596_17 (sequence is synthesized)
aaaagtacaaggccagccagaaggagatggggcagctgcagatggagcagtgtgagctcctggaggatcagaggaggatgcaggaggagcagggccagctgcaggaagagctgcacaggc

SEQ ID NO: 276268 - DNA, 120 bp, Artificial Sequence
  ENSG00000128596_18 (sequence is synthesized)
tcacactgccactgccaaagagtggcctcttactcaagagtcaggagctactcaccaagttagaagacctgtgtgagctgcagctgctctaccaaggcatgcaggaggaacagaagaagc

SEQ ID NO: 276269 - DNA, 120 bp, Artificial Sequence
  ENSG00000128596_19 (sequence is synthesized)
tgatacagaaccaagactgtgtattaaaagaacaattagagatccacgaagagctgcgacgtttcaaagagtctcatttccaggaagtgttggagaatcccgatgattccaaattggcta

SEQ ID NO: 276270 - DNA, 120 bp, Artificial Sequence
  ENSG00000128596_20 (sequence is synthesized)
agtcctccaaatgtaatcgaaacaagcaatccaagctgctcatggagcagatgcaggccctgcaggtgatgtatgacgccggtcaggcgaagcaggagctcttgcagcaagagcaaggga

SEQ ID NO: 276271 - DNA, 120 bp, Artificial Sequence
  ENSG00000128596_21 (sequence is synthesized)
ggctcctagaggagcggaagaggctgcaggcagacttgcagctctgcctggaagaaatgcagctgcttcaagtccagtccccttctataaaaatgagccttgagtcctacgggaagagct

SEQ ID NO: 276272 - DNA, 120 bp, Artificial Sequence
  ENSG00000128596_22 (sequence is synthesized)
atggtagcatggtccccagcaatgagaactgtcgcaagacttatgataccactgtggatgacaatgagagctattacaagagttacaccagcacccagaccagcagcaagagctttctca

SEQ ID NO: 276273 - DNA, 120 bp, Artificial Sequence
  ENSG00000128596_23 (sequence is synthesized)
agagctatgacagcagcaccagtgccagtgaggcctatgggaagagttactgcactaccagcaacagcagcattacctataagaagagttacggcagcaccagtagctctgacacctgcc

SEQ ID NO: 276274 - DNA, 120 bp, Artificial Sequence
  ENSG00000128596_24 (sequence is synthesized)
agaagagttttgtcagcagctgcactgacgaggaacctgctgagcctgaagacatggagcgctttgaggaaatggttgtgaaagtgctgatcaagctgcaggcggtgcaggccatgtacc

SEQ ID NO: 276275 - DNA, 120 bp, Artificial Sequence
  ENSG00000128596_25 (sequence is synthesized)
agataagccaggaggaacacagccagctgcaagagcagatggaaaagttactggccaagcagaaagacctgaaggaagagctggatgcctgtgaaagggagttcaaggagtgcatggaat

SEQ ID NO: 276276 - DNA, 120 bp, Artificial Sequence
  ENSG00000128596_26 (sequence is synthesized)
gccttgaaaagcccatggccccccagaacgacaagaatgagatcaaagaactgcagaccaagctgcgggagctgcagctgcaataccaggctagcatggatgagcaggggcggcttctgg

SEQ ID NO: 276277 - DNA, 120 bp, Artificial Sequence
  ENSG00000128596_27 (sequence is synthesized)
tagtgcaggagcagctggaggggcagctgcagtgctgccaggaggagctccgccagctcagggagaagaggccttctgttgtcaaagaagcccgggggaagaatgctaataagaacatga

SEQ ID NO: 276278 - DNA, 120 bp, Artificial Sequence
  ENSG00000128596_28 (sequence is synthesized)
acaagaatgccaatggggttaaaatgaaaaaggtgaccaagccatgctcggatacttctgagagcgaccttgagaccagaaagagtctggaggtagtgctgtactacaaggccagccaga

SEQ ID NO: 276279 - DNA, 120 bp, Artificial Sequence
  ENSG00000128596_29 (sequence is synthesized)
ggaaattagatggactagcaaaagaggaggaaaagaaagaggagatggaggaggaaaaaaagcaagtgaaagaggaagcaaaggagcagtgtggggatgagctagttgctgagccagcag

SEQ ID NO: 276280 - DNA, 120 bp, Artificial Sequence
  ENSG00000128596_30 (sequence is synthesized)
atcctgaggaagctaaatccacagaagatcaggaggaaaatgaagaggacaaagaggaagaggagaaggaagaagacagtgaagaggaggaggatgacgccgactcttcccttgaaagtc

SEQ ID NO: 276281 - DNA, 120 bp, Artificial Sequence
  ENSG00000128596_31 (sequence is synthesized)
ccgaagaaaataaccccctcagactttccgagagcaaaaagtcatcccctacccccaatccccccatcttctccttgcctcttgtaggcctggtggtcatctcggctttgctctggtgct

SEQ ID NO: 276282 - DNA, 120 bp, Artificial Sequence
  ENSG00000128596_32 (sequence is synthesized)
ggtgggctgagacgtcgtcctaatgcagaacatgtttgggttgtggaagcctatggtattcttggctattgcagctgtggctctgtatgtgttacccaacatgcgacagcaggagtcaga

SEQ ID NO: 276283 - DNA, 120 bp, Artificial Sequence
  ENSG00000128596_33 (sequence is synthesized)
gttctgcctcatggagtgatggcagaccttggccagcgcgagggcagatccccagtggccaccaccctcagctttgggcaggacacactgtgccagaaccctccccatatgttccatgtg

SEQ ID NO: 276284 - DNA, 120 bp, Artificial Sequence
  ENSG00000128596_34 (sequence is synthesized)
tccccatctcctcagcctcagtcacccaggctgaaaaggcttgtggggagcggctgacttccatctcctgccttgtgtaagaacctgagttccttgtaattaaatatcaactgaattaca

SEQ ID NO: 276285 - DNA, 120 bp, Artificial Sequence
  ENSG00000128596_35 (sequence is synthesized)
agacccccaggtgctcccggcctccgcggctcccctttctccgcccaaagtcttcctccctccatcctggcctccaccggggcccggtctccatccttccggcctgggactgaggcttcc

SEQ ID NO: 276286 - DNA, 120 bp, Artificial Sequence
  ENSG00000128596_36 (sequence is synthesized)
gcgcaccggccgcatcctgcctggtggtccctccccagcgcgtctctccacttcagtccgacggtgcttccagccttcgggactgcagaccctacacctcctgcagccccggagactcct

SEQ ID NO: 276287 - DNA, 120 bp, Artificial Sequence
  ENSG00000128596_37 (sequence is synthesized)
ttgctctggtgctggtgggctgagacgtcgtcctaatgcaggtactggtattgcttcctctccttctgagggatagagggagggtgcaggttgccctggcctctcctctttcccttttct

SEQ ID NO: 276288 - DNA, 120 bp, Artificial Sequence
  ENSG00000128596_38 (sequence is synthesized)
tgcaaagcctctgacatctctgagcatgtcttcgtaatgcataggaggttggaatgcttgccagagacatggtttgtttcaatccttggctgggaaaaacttggataagcccagcttggt

SEQ ID NO: 276289 - DNA, 120 bp, Artificial Sequence
  ENSG00000128596_39 (sequence is synthesized)
tgctgctgtcaaagctgcctcactacttctttatccccgctcatcctctgtgtgatggctagcctgaccacttctgatgagctgatatttgcaaggctggcctggactctctttgtcttg

SEQ ID NO: 276290 - DNA, 80 bp, Artificial Sequence
  ENSG00000128596_40 (sequence is synthesized)
cctccctgcgcacccggctcgggtccccgggctcgcggctgcggcttctgctcagggaggcggaaggcggcggcgggagc

SEQ ID NO: 276291 - DNA, 120 bp, Artificial Sequence
  ENSG00000128596_41 (sequence is synthesized)
agaagaggtacagaggcaaaaagtgaaggcacccaacccaagggcttgatggccttcctaggcaggaagcagaggcagggccacatgctgctaacttcaaaattgtttgccctgaccttg

SEQ ID NO: 276292 - DNA, 120 bp, Artificial Sequence
  ENSG00000128596_42 (sequence is synthesized)
actttgagccagagccacagcttagtaggatcaatacctttggatcccagtctgaacccctgaaagttttacacatgattccatgtatgtagacatttatacaatggtattagaactgta

SEQ ID NO: 276293 - DNA, 120 bp, Artificial Sequence
  ENSG00000128596_43 (sequence is synthesized)
gggggtcttccggccctgaggcttgatggggccaccggagggctcctcctaagagggtccttggccctggctcggtggggggtcgcggaaagcggagaggtcagggccctgccgttcgcc

SEQ ID NO: 276294 - DNA, 120 bp, Artificial Sequence
  ENSG00000128596_44 (sequence is synthesized)
ttggggaaggtggataagagtagtgagttaaaaataattccagcaaccacataggcagcaccacaggtaaagaactccagccctgctcgagtactacattagatatgaggacattaggaa

SEQ ID NO: 276295 - DNA, 120 bp, Artificial Sequence
  ENSG00000128596_45 (sequence is synthesized)
gtgaagggcaggaagaagcaaatcttagactgttggtgtcttcaagtgactcacacagaagagtgagtgggttaaggagcccaaaggcactgcccaaagccccctctaccataggagtta

SEQ ID NO: 276296 - DNA, 120 bp, Artificial Sequence
  ENSG00000128596_46 (sequence is synthesized)
cgatagcattccccatcaaactgcccccagaaaggaatggtggaagtttagagcaaggccagccaccagtctagagcaacctgctctgaaggagcagcctgcaggggatccccaatcggt

SEQ ID NO: 276297 - DNA, 120 bp, Artificial Sequence
  ENSG00000128596_47 (sequence is synthesized)
atctaaacagccagaatgcattgtggcttggggtgaccagtccaaggtgactgcacagggagaggatcacaagaggcaggagagcgcagaagtgctctgttagccacccaagaagcttac

SEQ ID NO: 276298 - DNA, 80 bp, Artificial Sequence
  ENSG00000128596_48 (sequence is synthesized)
gcgggagccgcgggctggagctgcccgggcccagcccgcagccagccccccaccccccagcccctcctttctccctgctc

SEQ ID NO: 276299 - DNA, 120 bp, Artificial Sequence
  ENSG00000128602_0 (sequence is synthesized)
attccagagagcccagcgagctagagcaacaaaggagccgggtcgccggcggggagagttcggggggctgcggcgcgctggggcgaaggtggctgctgggccgcgggctggcgcgggggc

SEQ ID NO: 276300 - DNA, 120 bp, Artificial Sequence
  ENSG00000128602_1 (sequence is synthesized)
ggagccggagctgcactcgcacccccggcccgcgtctggcctccctcgcggggcggggaggtggctttaatggtgggagagggaatggggctggggattgggggcccaggggtctcctag

SEQ ID NO: 276301 - DNA, 120 bp, Artificial Sequence
  ENSG00000128602_2 (sequence is synthesized)
ggctgaagacaacttggattgcgaggctagggcttggggagtcgtgcatcccgttccgggcctccgcagcccaacatgggccccgggttccaaagtttgcgaagttgggcgccgaggggc

SEQ ID NO: 276302 - DNA, 120 bp, Artificial Sequence
  ENSG00000128602_3 (sequence is synthesized)
cgggcccggattctctgggcgcacaggtcgcctgagccgcctccgcggccgccgaggtcgtgcgtgtggccggggggctccgaggagcaggcgggggcgccggggcttttgctgagttgg

SEQ ID NO: 276303 - DNA, 80 bp, Artificial Sequence
  ENSG00000128602_4 (sequence is synthesized)
gggggcgccggggcttttgctgagttggcggggttggccatggccgctgcccgcccagcgcgggggccggagctcccgct

SEQ ID NO: 276304 - DNA, 80 bp, Artificial Sequence
  ENSG00000128602_5 (sequence is synthesized)
ctcggagcgcgggcgggagcgcgaggaggagcgcggcggtgactggccctccgccgccgctgagccactgcggccgggct

SEQ ID NO: 276305 - DNA, 120 bp, Artificial Sequence
  ENSG00000128602_6 (sequence is synthesized)
gccccctgcgagccgctgcgctacaacgtgtgcctgggctcggtgctgccctacggggccacctccacactgctggccggagactcggactcccaggaggaagcgcacggcaagctcgtg

SEQ ID NO: 276306 - DNA, 120 bp, Artificial Sequence
  ENSG00000128602_7 (sequence is synthesized)
ctctggtcgggcctccggaatgccccccgctgctgggcagtgatccagcccctgctgtgtgccgtatacatgcccaagtgtgagaatgaccgggtggagctgcccagccgtaccctctgc

SEQ ID NO: 276307 - DNA, 120 bp, Artificial Sequence
  ENSG00000128602_8 (sequence is synthesized)
caggccacccgaggcccctgtgccatcgtggagagggagcggggctggcctgacttcctgcgctgcactcctgaccgcttccctgaaggctgcacgaatgaggtgcagaacatcaagttc

SEQ ID NO: 276308 - DNA, 120 bp, Artificial Sequence
  ENSG00000128602_9 (sequence is synthesized)
aacagttcaggccagtgcgaagtgcccttggttcggacagacaaccccaagagctggtacgaggacgtggagggctgcggcatccagtgccagaacccgctcttcacagaggctgagcac

SEQ ID NO: 276309 - DNA, 120 bp, Artificial Sequence
  ENSG00000128602_10 (sequence is synthesized)
caggacatgcacagctacatcgcggccttcggggccgtcacgggcctctgcacgctcttcaccctggccacattcgtggctgactggcggaactcgaatcgctaccctgctgttattctc

SEQ ID NO: 276310 - DNA, 120 bp, Artificial Sequence
  ENSG00000128602_11 (sequence is synthesized)
ttctacgtcaatgcgtgcttctttgtgggcagcattggctggctggcccagttcatggatggtgcccgccgagagatcgtctgccgtgcagatggcaccatgaggcttggggagcccacc

SEQ ID NO: 276311 - DNA, 120 bp, Artificial Sequence
  ENSG00000128602_12 (sequence is synthesized)
tccaatgagactctgtcctgcgtcatcatctttgtcatcgtgtactacgccctgatggctggtgtggtttggtttgtggtcctcacctatgcctggcacacttccttcaaagccctgggc

SEQ ID NO: 276312 - DNA, 120 bp, Artificial Sequence
  ENSG00000128602_13 (sequence is synthesized)
accacctaccagcctctctcgggcaagacctcctacttccacctgctcacctggtcactcccctttgtcctcactgtggcaatccttgctgtggcgcaggtggatggggactctgtgagt

SEQ ID NO: 276313 - DNA, 120 bp, Artificial Sequence
  ENSG00000128602_14 (sequence is synthesized)
gggatttgttttgtgggctacaagaactaccgataccgtgcgggcttcgtgctggccccaatcggcctggtgctcatcgtgggaggctacttcctcatccgaggagtcatgactctgttc

SEQ ID NO: 276314 - DNA, 120 bp, Artificial Sequence
  ENSG00000128602_15 (sequence is synthesized)
tccatcaagagcaaccaccccgggctgctgagtgagaaggctgccagcaagatcaacgagaccatgctgcgcctgggcatttttggcttcctggcctttggctttgtgctcattaccttc

SEQ ID NO: 276315 - DNA, 120 bp, Artificial Sequence
  ENSG00000128602_16 (sequence is synthesized)
cttcttcaaccaggctgagtgggagcgcagcttccgggactatgtgctatgtcaggccaatgtgaccatcgggctgcccaccaagcagcccatccctgactgtgagatcaagaatcgccc

SEQ ID NO: 276316 - DNA, 120 bp, Artificial Sequence
  ENSG00000128602_17 (sequence is synthesized)
gagccttctggtggagaagatcaacctgtttgccatgtttggaactggcatcgccatgagcacctgggtctggaccaaggccacgctgctcatctggaggcgtacctggtgcaggttgac

SEQ ID NO: 276317 - DNA, 120 bp, Artificial Sequence
  ENSG00000128602_18 (sequence is synthesized)
tgggcagagtgacgatgagccaaagcggatcaagaagagcaagatgattgccaaggccttctctaagcggcacgagctcctgcagaacccaggccaggagctgtccttcagcatgcacac

SEQ ID NO: 276318 - DNA, 120 bp, Artificial Sequence
  ENSG00000128602_19 (sequence is synthesized)
tgtgtcccacgacgggcccgtggcgggcttggcctttgacctcaatgagccctcagctgatgtctcctctgcctgggcccagcatgtcaccaagatggtggctcggagaggagccatact

SEQ ID NO: 276319 - DNA, 120 bp, Artificial Sequence
  ENSG00000128602_20 (sequence is synthesized)
gccccaggatatttctgtcacccctgtggcaactccagtgcccccagaggaacaagccaacctgtggctggttgaggcagagatctccccagagctgcagaagcgcctgggccggaagaa

SEQ ID NO: 276320 - DNA, 120 bp, Artificial Sequence
  ENSG00000128602_21 (sequence is synthesized)
gaagaggaggaagaggaagaaggaggtgtgcccgctggcgccgccccctgagcttcacccccctgcccctgcccccagtaccattcctcgactgcctcagctgccccggcagaaatgcct

SEQ ID NO: 276321 - DNA, 120 bp, Artificial Sequence
  ENSG00000128602_22 (sequence is synthesized)
ggtggctgcaggtgcctggggagctggggactcttgccgacagggagcgtggaccctggtctccaacccattctgcccagagcccagtccccctcaggatccatttctgcccagtgcacc

SEQ ID NO: 276322 - DNA, 120 bp, Artificial Sequence
  ENSG00000128602_23 (sequence is synthesized)
ggcccccgtggcatgggctcatggccgccgacagggcctggggcctattcactcccgcaccaacctgatggacacagaactcatggatgcagactcggacttctgagcctgcagagcagg

SEQ ID NO: 276323 - DNA, 120 bp, Artificial Sequence
  ENSG00000128602_24 (sequence is synthesized)
acctgggacaggaaagagaggaaccaataccttcaaggctcttcttcctcaccgagcatgcttccctaggatcccgtcttccagagaacctgtgggctgactgccctccgaagagagttc

SEQ ID NO: 276324 - DNA, 120 bp, Artificial Sequence
  ENSG00000128602_25 (sequence is synthesized)
tggatgtctggctcaaagcagcaggactgtgggaaagagcctaacatctccatggggaggcctcaccccagggacagggccctggagctcagggtccttgtttctgccctgccagctgca

SEQ ID NO: 276325 - DNA, 120 bp, Artificial Sequence
  ENSG00000128602_26 (sequence is synthesized)
gcctggttggcagcatctgctccatcggggcagggggtatgcagagcttgtggtggggcaggaacggtggaggcagaggtgacagttcccagagtgggctttggtggccagggaggcagc

SEQ ID NO: 276326 - DNA, 120 bp, Artificial Sequence
  ENSG00000128602_27 (sequence is synthesized)
ctagcctatgtctggcagatgagggctggctgccgttttctgggctgatgggtgccctttcctggcagtctcagtccaaaagtgttgactgtgtcattagtcctttgtctaagtagggcc

SEQ ID NO: 276327 - DNA, 120 bp, Artificial Sequence
  ENSG00000128602_28 (sequence is synthesized)
agggcaccgtattcctctcccaggtgtttgtggggctggaaggacctgctcccacaggggccatgtcctctcttaataggtggcactaccccaaacccatcttttgttctcctatatcct

SEQ ID NO: 276328 - DNA, 120 bp, Artificial Sequence
  ENSG00000128602_29 (sequence is synthesized)
ccttcttctgttccatttcagttcagtttcagcggtgccaacctctttgcgtttcctttttgttgatgaggacccagagctgctgcacacactcacctctaaccccctcccctcgctgct

SEQ ID NO: 276329 - DNA, 120 bp, Artificial Sequence
  ENSG00000128602_30 (sequence is synthesized)
gggccccatctccacaggagagactggttcagctctagggcctcagtctggagtgggataggagcagtgagtgacaaagcctctgaaagatgcatcatctcttcctcacacccatttagt

SEQ ID NO: 276330 - DNA, 120 bp, Artificial Sequence
  ENSG00000128602_31 (sequence is synthesized)
gggggatgggtcctctagacttgaggggctaccctgggaagctgccgtagcttcagccaggcaagaaagcttccttcaacctgcatagccggtgggtgaggagattcccaccttccatag

SEQ ID NO: 276331 - DNA, 120 bp, Artificial Sequence
  ENSG00000128602_32 (sequence is synthesized)
cctccaaacatgttcccaaggccccactttcaagaatcagacagcaggaagccatagatgctggctgggttccaggttatggggagaagaaatacagtcaataaaaggtttttgtataaa

SEQ ID NO: 276332 - DNA, 120 bp, Artificial Sequence
  ENSG00000128602_33 (sequence is synthesized)
agcactttgggaggccgaggcgggaagattgctcaataccaggagtttaagaccagcctgagaccttgcctctaaaaaaaaaaaaggaagacagataattcaacaggctttggaaatacc

SEQ ID NO: 276333 - DNA, 120 bp, Artificial Sequence
  ENSG00000128602_34 (sequence is synthesized)
gaccggcaggatgcagtaagtcagtgggacaagttagccatagggacaaggacaaggggtgtgtgtaggtggtagtggtagtggcagctcaaaagaagggggtctactcggggggaagaa

SEQ ID NO: 276334 - DNA, 120 bp, Artificial Sequence
  ENSG00000128602_35 (sequence is synthesized)
ttcagtcaagttcatgccgggactggttcctcctgcccactacgtcccacgtggtccctcccacagttgcttcaagtgcccttcttattttattttagagaaagcagttcttggactgag

SEQ ID NO: 276335 - DNA, 120 bp, Artificial Sequence
  ENSG00000128602_36 (sequence is synthesized)
cccagcatgagttcaccccagccccagctgggtgaactttgaggcccagtggggcagactctctcctccccactgctgctgcgggactgggcttggtaacgtcctgtcctgcccctgtcc

SEQ ID NO: 276336 - DNA, 120 bp, Artificial Sequence
  ENSG00000128604_0 (sequence is synthesized)
gtccagctgcgcctggaaagcgagctcggacccctctgccatgaaccagtccatcccagtggctcccaccccaccccgccgcgtgcggctgaagccctggctggtggcccaggtgaacag

SEQ ID NO: 276337 - DNA, 120 bp, Artificial Sequence
  ENSG00000128604_1 (sequence is synthesized)
ctgccagtacccagggcttcaatgggtcaacggggaaaagaaattattctgcatcccctggaggcatgccacaaggcatggtcccagccaggacggagataacaccatcttcaaggcctg

SEQ ID NO: 276338 - DNA, 120 bp, Artificial Sequence
  ENSG00000128604_2 (sequence is synthesized)
ggccaaggagacagggaaatacaccgaaggcgtggatgaagccgatccggccaagtggaaggccaacctgcgctgtgcccttaacaagagccgggacttccgcctcatctacgacgggcc

SEQ ID NO: 276339 - DNA, 120 bp, Artificial Sequence
  ENSG00000128604_3 (sequence is synthesized)
ccgggacatgccacctcagccctacaagatctacgaggtctgctccaatggccctgctcccacagactcccagccccctgaggattactcttttggtgcaggagaggaggaggaagaaga

SEQ ID NO: 276340 - DNA, 120 bp, Artificial Sequence
  ENSG00000128604_4 (sequence is synthesized)
ggaagagctgcagaggatgttgccaagcctgagcctcacagaggatgtcaagtggccgcccactctgcagccgcccactctgcggccgcctactctgcagccgcccactctgcagccgcc

SEQ ID NO: 276341 - DNA, 120 bp, Artificial Sequence
  ENSG00000128604_5 (sequence is synthesized)
cgtggtgctgggtccccctgctccagaccccagccccctggctcctccccctggcaaccctgctggcttcagggagcttctctctgaggtcctggagcctgggcccctgcctgccagcct

SEQ ID NO: 276342 - DNA, 120 bp, Artificial Sequence
  ENSG00000128604_6 (sequence is synthesized)
gccccctgcaggcgaacagctcctgccagacctgctgatcagcccccacatgctgcctctgaccgacctggagatcaagtttcagtaccgggggcggccaccccgggccctcaccatcag

SEQ ID NO: 276343 - DNA, 120 bp, Artificial Sequence
  ENSG00000128604_7 (sequence is synthesized)
caacccccatggctgccggctcttctacagccagctggaggccacccaggagcaggtggaactcttcggccccataagcctggagcaagtgcgcttccccagccctgaggacatccccag

SEQ ID NO: 276344 - DNA, 120 bp, Artificial Sequence
  ENSG00000128604_8 (sequence is synthesized)
tgacaagcagcgcttctacacgaaccagctgctggatgtcctggaccgcgggctcatcctccagctacagggccaggacctttatgccatccgcctgtgtcagtgcaaggtgttctggag

SEQ ID NO: 276345 - DNA, 120 bp, Artificial Sequence
  ENSG00000128604_9 (sequence is synthesized)
cgggccttgtgcctcagcccatgactcatgccccaaccccatccagcgggaggtcaagaccaagcttttcagcctggagcattttctcaatgagctcatcctgttccaaaagggccagac

SEQ ID NO: 276346 - DNA, 120 bp, Artificial Sequence
  ENSG00000128604_10 (sequence is synthesized)
caacaccccaccacccttcgagatcttcttctgctttggggaagaatggcctgaccgcaaaccccgagagaagaagctcattactgtacaggtggtgcctgtagcagctcgactgctgct

SEQ ID NO: 276347 - DNA, 120 bp, Artificial Sequence
  ENSG00000128604_11 (sequence is synthesized)
atctggcagtcccagcagcggttgcagcctgtggcccaggcccctcctggagcaggccttggtgttggccaggggccctggcctatgcacccagctggcatgcaataacaaggctgcaga

SEQ ID NO: 276348 - DNA, 120 bp, Artificial Sequence
  ENSG00000128604_12 (sequence is synthesized)
cggtgactggccctggcttcctgggtggcggtgcggactgatgtggagatgtgacagccccgatgagcacctggctggctgcagggtcctacctctgggtttcctggaagtggatttggg

SEQ ID NO: 276349 - DNA, 120 bp, Artificial Sequence
  ENSG00000128604_13 (sequence is synthesized)
ccaagaaggagagggagaaaggcccgagcccctgccttcccgggcctttctctcctgggctgtctctggtctggtcagcctggctctcgggaaattcagccatgagcagggaaagaactc

SEQ ID NO: 276350 - DNA, 120 bp, Artificial Sequence
  ENSG00000128604_14 (sequence is synthesized)
tcccaaccctggggcctagctgtataggaggaattgcctaagggtggcccactcttgtgattgccccatttcctctggcaacaaaagccagagtgttgtgggccaagtccccccacaggg

SEQ ID NO: 276351 - DNA, 120 bp, Artificial Sequence
  ENSG00000128604_15 (sequence is synthesized)
cctctgcagggcatggccctgatttccctggtttgagactcacttcctcatctccctgtcctctgagataatatgagtgagcacttaggtatcatatcagatgctcaaggctggcagcta

SEQ ID NO: 276352 - DNA, 120 bp, Artificial Sequence
  ENSG00000128604_16 (sequence is synthesized)
cccccttcttgagagtccaagaacctggagcagaaataatttttatgtatttttggattaatgaatgttaaaaacagactcagctgtttctttccttttactactaccagttgctcccat

SEQ ID NO: 276353 - DNA, 120 bp, Artificial Sequence
  ENSG00000128604_17 (sequence is synthesized)
gctgctccaccaggccctgtttcggatgccaactggcccactccccaagcacttgcccccagcttgcgaccattggcactgggagggcctggcttctgggctgatgggtcagttgggcct

SEQ ID NO: 276354 - DNA, 120 bp, Artificial Sequence
  ENSG00000128604_18 (sequence is synthesized)
tcataaacactcacctggctggctttgccttccaggaggaagctggctgaagcaagggtgtggaattttaaatgtgtgcacagtctggaaaactgtcagaatcagttttcccataaaagg

SEQ ID NO: 276355 - DNA, 120 bp, Artificial Sequence
  ENSG00000128604_19 (sequence is synthesized)
gtgggctagcattgcagctgcatttgggaccattcaaatctgtcactctcttgtgtatattcctgtgctattaaatatatcagggcagtgcatgtaaatcatcctgatatatttaatata

SEQ ID NO: 276356 - DNA, 120 bp, Artificial Sequence
  ENSG00000128604_20 (sequence is synthesized)
tttattatattgtcccccgaggtggggacagtgagtgagttctcttagtccccccagagctggttgttaaagagcctggcacctacccgctctcacttcatctgtgtcatctctgcacac

SEQ ID NO: 276357 - DNA, 120 bp, Artificial Sequence
  ENSG00000128604_21 (sequence is synthesized)
tccagcccactttctgccttcagccattgagtggaagctgccccaggcccttaccaggtgcagatgcccaatcttgatgcccagccatcagaactgtgagccaaataaacctttttctgt

SEQ ID NO: 276358 - DNA, 120 bp, Artificial Sequence
  ENSG00000128604_22 (sequence is synthesized)
agaaagcggaactgagcccgcgtgttctgaggccagggcagggctggagcgttctgaacacctccccgtcccagcccctgggccaggcaagggccggccttacctctcctgggttggtgg

SEQ ID NO: 276359 - DNA, 120 bp, Artificial Sequence
  ENSG00000128604_23 (sequence is synthesized)
aagacgcggaagtgcccggcaggttggcggaccggcgggaggcgcagcctgggcagagctcagcttggtcccgccgcccggccggtgctccctggcgcagccacgcaggcgcaccgcaga

SEQ ID NO: 276360 - DNA, 120 bp, Artificial Sequence
  ENSG00000128604_24 (sequence is synthesized)
ctcatttgtgtgcagccccggaggaccagagtggggaagcaccccaccctctcccagggcccaactgagcactgcagcgggaggtacggggttgtcaaatgacagttttgccattccaga

SEQ ID NO: 276361 - DNA, 120 bp, Artificial Sequence
  ENSG00000128604_25 (sequence is synthesized)
ttgccaaaagagccagtggccagtctagggcaccgcgccgtctggcatctccctggaggccctgggcctggcccgaggctcagcccggatctgcagttgccagacccctctgccatgaac

SEQ ID NO: 276362 - DNA, 120 bp, Artificial Sequence
  ENSG00000128604_26 (sequence is synthesized)
agcctgggcagagctcagcttggtcccgccgcccggccggtgctccctggcgcagccacgcaggcgcaccgcagacagccttcctaacaggctccggcaggcgttagggccttcctaagt

SEQ ID NO: 276363 - DNA, 120 bp, Artificial Sequence
  ENSG00000128604_27 (sequence is synthesized)
gctacccgaatgcgtgtccagtgggaggagaagggggaggaccaagaacctagatgaatggccctagagaggtaacatctgtttggtgcctgctgtcattggagacccctctgccatgaa

SEQ ID NO: 276364 - DNA, 120 bp, Artificial Sequence
  ENSG00000128604_28 (sequence is synthesized)
caggtggagccctggacgagctctctgctgtccccatcggccttaggtttccgcagccccactcccatggagccccgtggccctctcaatagttctccttgtttcttctcctgggattct

SEQ ID NO: 276365 - DNA, 120 bp, Artificial Sequence
  ENSG00000128604_29 (sequence is synthesized)
gaacgataggagcacagtccccacctgctccttcccagggcattgtcattaccctgtgtgtgtgacccacgcagcagttggggcttggtaggtctgactccctgcagaaggcaaatgagg

SEQ ID NO: 276366 - DNA, 120 bp, Artificial Sequence
  ENSG00000128604_30 (sequence is synthesized)
aaagtgaggcaaagggcttttctgacctgcctgggatggacgagctgggaccggaggcagggtcttgcctgagctaaactgaggctaggggagttgcctcatagttctcgcctgttattt

SEQ ID NO: 276367 - DNA, 120 bp, Artificial Sequence
  ENSG00000128604_31 (sequence is synthesized)
acagagtgactagaggattcccgcctgcaagcacatctggaaggggtgtctggatcctgggggcagcgactgtgttctagggcgagagccaccctcgccaggggtgtaggcaggcgagag

SEQ ID NO: 276368 - DNA, 120 bp, Artificial Sequence
  ENSG00000128604_32 (sequence is synthesized)
gtggttgggggtctagtatacagagaagctataggtaccataggtacctggaagggggctgatgggaggctagggtggcccagggctgggaggaggtgtgcctgggaggcagttcgtgga

SEQ ID NO: 276369 - DNA, 120 bp, Artificial Sequence
  ENSG00000128604_33 (sequence is synthesized)
ggtggcactgacagccgtccacacgcactctctgtagatgcagtgcagtctggcccccacatgacaccctattctttactcaaagaggatgtcaagtggccgcccactctgcagccgccc

SEQ ID NO: 276370 - DNA, 120 bp, Artificial Sequence
  ENSG00000128604_34 (sequence is synthesized)
attaaacagccgtgttgggcagggccagactgctggactgacagtagggggcaggcagccggaccctctgagctccccaacggcaccagcgcctgcacggcctcagcccagggggtcatt

SEQ ID NO: 276371 - DNA, 120 bp, Artificial Sequence
  ENSG00000128604_35 (sequence is synthesized)
agggaagctctccccgattctgtgcagacagagcttcctctgtccacccttgctcggccagaattgtgtgccgctggtgactggcacccctctattctagggccaaggcctctcaggggt

SEQ ID NO: 276372 - DNA, 120 bp, Artificial Sequence
  ENSG00000128606_0 (sequence is synthesized)
attagtataacgtgagggctgaatgcagcccattctctggagaacttcctcacacaccgcagcaaagagaagactgaaagacaaacctgggtgcagccagagaggtccagatagatgagc

SEQ ID NO: 276373 - DNA, 120 bp, Artificial Sequence
  ENSG00000128606_1 (sequence is synthesized)
ttgtggcatccattccccaagttcagcctagggactccacgtaccccagctgggtctcattgttccagaactgcattagttaagattacccagacttggatttcaaaggaatactttcat

SEQ ID NO: 276374 - DNA, 120 bp, Artificial Sequence
  ENSG00000128606_2 (sequence is synthesized)
tgttccgtctgtaacacgaagtaattggggccagctggatgtcaggatgcgtgtggttaccattgtaatcttgctctgcttttgcaaagcggctgagctgcgcaaagcaagcccaggcag

SEQ ID NO: 276375 - DNA, 120 bp, Artificial Sequence
  ENSG00000128606_3 (sequence is synthesized)
tgtgagaagccgagtgaatcatggccgggcgggtggaggccggagaggctccaacccggtcaaacgctacgcaccaggcctcccgtgtgacgtgtacacatatctccatgagaaatactt

SEQ ID NO: 276376 - DNA, 120 bp, Artificial Sequence
  ENSG00000128606_4 (sequence is synthesized)
agattgtcaagaaagaaaattagtttatgtgctgcctggttggcctcaggatttgctgcacatgctgctagcaagaaacaagatccgcacattgaagaacaacatgttttccaagtttaa

SEQ ID NO: 276377 - DNA, 120 bp, Artificial Sequence
  ENSG00000128606_5 (sequence is synthesized)
aaagctgaaaagcctggatctgcagcagaatgagatctctaaaattgagagtgaggcgttctttggtttaaacaaactcaccaccctcttactgcagcacaaccagatcaaagtcttgac

SEQ ID NO: 276378 - DNA, 120 bp, Artificial Sequence
  ENSG00000128606_6 (sequence is synthesized)
ggaggaagtgttcatttacacacctctcttgagctacctgcgtctttatgacaacccctggcactgtacttgtgagatagaaacgcttatttcaatgttgcagattcccaggaaccggaa

SEQ ID NO: 276379 - DNA, 120 bp, Artificial Sequence
  ENSG00000128606_7 (sequence is synthesized)
tttggggaactacgccaagtgtgaaagtccacaagaacaaaaaaataaaaaactgcggcagataaaatctgaacagttgtgtaatgaagaagaaaaggaacaattggacccgaaacccca

SEQ ID NO: 276380 - DNA, 120 bp, Artificial Sequence
  ENSG00000128606_8 (sequence is synthesized)
acactggactgcaaaaggaaagagttgaaaaaagtgccaaacaacatccctccagatattgttaaacttgacttgtcatacaataaaatcaaccaacttcgacccaaggaatttgaagat

SEQ ID NO: 276381 - DNA, 120 bp, Artificial Sequence
  ENSG00000128606_9 (sequence is synthesized)
gttcatgagctgaagaaattaaacctcagcagcaatggcattgaattcatcgatcctgccgcttttttagggctcacacatttagaagaattagatttatcaaacaacagtctgcaaaac

SEQ ID NO: 276382 - DNA, 120 bp, Artificial Sequence
  ENSG00000128606_10 (sequence is synthesized)
tttgactatggcgtattagaagacttgtattttttgaaactcttgtggctcagagataacccttggagatgtgactacaacattcactacctctactactggttaaagcaccactacaat

SEQ ID NO: 276383 - DNA, 120 bp, Artificial Sequence
  ENSG00000128606_11 (sequence is synthesized)
gtccattttaatggcctggaatgcaaaacgcctgaagaatacaaaggatggtctgtgggaaaatatattagaagttactatgaagaatgccccaaagacaagttaccagcatatcctgag

SEQ ID NO: 276384 - DNA, 120 bp, Artificial Sequence
  ENSG00000128606_12 (sequence is synthesized)
tcatttgaccaagacacagaagatgatgaatgggaaaaaaaacatagagatcacaccgcaaagaagcaaagcgtaataattactatagtaggataaggtagaaattgttctgattgtaat

SEQ ID NO: 276385 - DNA, 120 bp, Artificial Sequence
  ENSG00000128606_13 (sequence is synthesized)
tagttttgtattttctatactggtgttagaaaacatatgtttacatttgattaactgtgttgcctatttatgcagggtaatccagctaaaggaagctttctttaattataagtattattg

SEQ ID NO: 276386 - DNA, 120 bp, Artificial Sequence
  ENSG00000128606_14 (sequence is synthesized)
tgactattatagtaatcaagagaatgctatcatcctgcttgcctgtccatttgtggaacagcatctggtgatatgcaattccacactggtaacctgcagcagttgggtcctaatgatggc

SEQ ID NO: 276387 - DNA, 120 bp, Artificial Sequence
  ENSG00000128606_15 (sequence is synthesized)
attagactttcataatgtcctgtataaatgtttttactgcttttagaaaataaagaaaaaaaacttggttcatgtttacatgcctttcgatagctgtttgtgcatacttaaagatgatca

SEQ ID NO: 276388 - DNA, 120 bp, Artificial Sequence
  ENSG00000128606_16 (sequence is synthesized)
aaatgattttatacaaatgctgttataataaaatgtcattccctacccctctactttttttcagtaagtcatcttatacattaaataaatttccatttctgatttctgtgcattccaaaa

SEQ ID NO: 276389 - DNA, 120 bp, Artificial Sequence
  ENSG00000128606_17 (sequence is synthesized)
ttgtggcatccattccccaagttcagatggtggtaagtgccatggagaagaaagaagaaaagggattgggagcacccaacaagtgggaagaagtgtgatttaaaatagggctgaacagga

SEQ ID NO: 276390 - DNA, 120 bp, Artificial Sequence
  ENSG00000128606_18 (sequence is synthesized)
gccatttactccaagcatctctggagcccacacccaacatggttggtgactgggagacagaaaaggatagaaaaaaaaaaggctcaggaagacaacaattcaagtcctacccttgtgtgt

SEQ ID NO: 276391 - DNA, 120 bp, Artificial Sequence
  ENSG00000128606_19 (sequence is synthesized)
gcatctcaaggctgtgttcttttaaagaaggagaattctttgaatttcttaaatccgatgtgatggtgaactgcaggcttcggttttcatcatgctgagtcctaacatttgtgactactt

SEQ ID NO: 276392 - DNA, 120 bp, Artificial Sequence
  ENSG00000128606_20 (sequence is synthesized)
gaagaaattaaacctcagcagcaatggcattgaattcatcgatcctgggtctttgagatgaaaccctgcaagtagacttacgtgaatgatttttgctgtgccgcttttttagggctcaca

SEQ ID NO: 276393 - DNA, 120 bp, Artificial Sequence
  ENSG00000128606_21 (sequence is synthesized)
aagcatcttatgcgcatgagcctattttatcctcccaacaatattaggaggtatcctcggtccgttttacagatgctgaagatgacccaggttgatacagttaagcagcctagggactcc

SEQ ID NO: 276394 - DNA, 120 bp, Artificial Sequence
  ENSG00000128606_22 (sequence is synthesized)
ctgggacatgccattctaggctccaggtacccacacacgcatgctgtctacaacttccaggaagatagtaacattcccatttacagatgaggaaaatgaggctcaaagaggttcagtcac

SEQ ID NO: 276395 - DNA, 120 bp, Artificial Sequence
  ENSG00000128607_0 (sequence is synthesized)
gcccccttcccctgtctcctgggtctctggaggagcccaggaaggaggctccgctggttccgctgggtcaggcgctgacgggaccgggctgcggcaatcgttagcgggtcatgtcggccg

SEQ ID NO: 276396 - DNA, 120 bp, Artificial Sequence
  ENSG00000128607_1 (sequence is synthesized)
gaaccgccggaggggaggaggcgccgccggcgctggtggcggaggtagcggggccggcgggggcagtgggggcagcgggggtcgggggactggccagctcaaccgcttcgtgcaactctc

SEQ ID NO: 276397 - DNA, 120 bp, Artificial Sequence
  ENSG00000128607_2 (sequence is synthesized)
gcttcgtgcaactctccgggcggccgcacctgccaggtaagaagaaaatacgatgggacccagttaggaggcgcttcattcagtcctgtcccatcataaggatccctaacaggtttttga

SEQ ID NO: 276398 - DNA, 120 bp, Artificial Sequence
  ENSG00000128607_3 (sequence is synthesized)
gaggccacagacctccaccagcacgaagtggacatcgttgtgtggcagataataccaacctatatgtgtttggaggttataacccagattatgatgaatcgggagggcctgataatgaag

SEQ ID NO: 276399 - DNA, 120 bp, Artificial Sequence
  ENSG00000128607_4 (sequence is synthesized)
actatcctctcttcagggaactctggaggtatcattttgctacaggagtatggcaccagatgggcacagatggctacatgccccgggaattggcatctatgtcacttgtgctgcatggaa

SEQ ID NO: 276400 - DNA, 120 bp, Artificial Sequence
  ENSG00000128607_5 (sequence is synthesized)
acaacctgttagtatttggaggtacgggcatcccatttggagagagcaacggcaatgacgtccatgtgtgtaatgtgaagtataagagatgggctttgctcagctgtcgggggaagaaac

SEQ ID NO: 276401 - DNA, 120 bp, Artificial Sequence
  ENSG00000128607_6 (sequence is synthesized)
ccagtcgtatatatggacaggctatggccatcatcaatggctccctttatgtctttggaggtacaaccggctatatttacagcacagacctgcacaagttagatctcaataccagagagt

SEQ ID NO: 276402 - DNA, 120 bp, Artificial Sequence
  ENSG00000128607_7 (sequence is synthesized)
ggacacaactgaaaccaaacaacctatcctgtgatctaccagaagagagataccgacatgaaattgcacatgacgggcagaggatttacatcttgggaggtggtacttcctggacagcat

SEQ ID NO: 276403 - DNA, 120 bp, Artificial Sequence
  ENSG00000128607_8 (sequence is synthesized)
attccttaaacaagatccatgcatacaaccttgaaacgaatgcctgggaggaaattgcaacaaaaccccatgaaaaaataggctttcctgcagcccgaaggtgtcacagttgtgttcaaa

SEQ ID NO: 276404 - DNA, 120 bp, Artificial Sequence
  ENSG00000128607_9 (sequence is synthesized)
taaaaaatgatgtatttatttgtgggggctataatggagaggtgatcctgggagatatctggaagttgaatctgcagactttccaatgggtgaagctcccagctaccatgccagagccag

SEQ ID NO: 276405 - DNA, 120 bp, Artificial Sequence
  ENSG00000128607_10 (sequence is synthesized)
tttattttcactgtgcagctgttacaccagctggttgcatgtacattcatggaggagtggtgaacatccatgaaaacaaacggactgggtcattgtttaagatctggctggtggtaccta

SEQ ID NO: 276406 - DNA, 120 bp, Artificial Sequence
  ENSG00000128607_11 (sequence is synthesized)
gcctgctggaactggcatgggagaagctgcttgcggccttccctaaccttgcaaacctctcccgaacacaacttctgcaccttggactcacacagggactcatcgaacgcttgaaatgag

SEQ ID NO: 276407 - DNA, 120 bp, Artificial Sequence
  ENSG00000128607_12 (sequence is synthesized)
gatttctggactgttcattgatactggaaatgttaatttaaagagactcctttatttatgggcagtgtagaatgtgctacaaagaggattggttaccctgatcaaggccttatttagaaa

SEQ ID NO: 276408 - DNA, 120 bp, Artificial Sequence
  ENSG00000128607_13 (sequence is synthesized)
atacatcagatgcctttctgtaaattggtttttcagtttatggacatctcactttcccacgtgcttccttctttgcttctgttcctcctgacccattacatgcacatgtactcacatact

SEQ ID NO: 276409 - DNA, 120 bp, Artificial Sequence
  ENSG00000128607_14 (sequence is synthesized)
ccctcttccttctcgatggagttaagggaaagcctgaaagtaccttaataatgttattaatcaagacagattcctttttaaaggaattctgaatagttccatgtcatacaatattctaga

SEQ ID NO: 276410 - DNA, 120 bp, Artificial Sequence
  ENSG00000128607_15 (sequence is synthesized)
aattaaaacatcatcaacataaagaaaaatgaaattaaaaaatttttacatctagcaacagcaacaaccacaaatttaggggaagctgagaaggctaaccttgggaatcttgcaggttat

SEQ ID NO: 276411 - DNA, 120 bp, Artificial Sequence
  ENSG00000128607_16 (sequence is synthesized)
acttaaacctagatgtttaacttagtgttttcaagatgtgtctaactgagtagtagctgggtctgatggcagcagtgcttgccatcttgttgcacagataactcaaacctaccctttggc

SEQ ID NO: 276412 - DNA, 120 bp, Artificial Sequence
  ENSG00000128607_17 (sequence is synthesized)
tttgaaggaaggttaagcagcccagcaactcttggttagtgatttctttctcatcctcatggtgccagcagtggttagagttggtttgtcaaaagacttacgtgtgtgtcgtggtcgtgc

SEQ ID NO: 276413 - DNA, 120 bp, Artificial Sequence
  ENSG00000128607_18 (sequence is synthesized)
tctttgttgttgctcttagaaattatggcaccaagaatgtttcaaacggaaaaacttgtggtggccaaagttcttcattctggcagttttgaaactctcttatgcttattaatggtttta

SEQ ID NO: 276414 - DNA, 120 bp, Artificial Sequence
  ENSG00000128607_19 (sequence is synthesized)
aatatctctttgacttcttcatggggaattgtagaccctaagtatgtggtgtaaatgccatgtaacatgaacacaagctcccgagggaggccagagaagagccaggcagagaaaacctgc

SEQ ID NO: 276415 - DNA, 120 bp, Artificial Sequence
  ENSG00000128607_20 (sequence is synthesized)
atcctctgggcttgttaacttggcttccactcgggctgtggtctttggctatcatcttggccatttccttttgagaacttgtttcttttctaatctctgggccaggtacctgccattttc

SEQ ID NO: 276416 - DNA, 120 bp, Artificial Sequence
  ENSG00000128607_21 (sequence is synthesized)
tcaggcagttggtccttgatttttcccttagcttgttgccttcttttccgtctgctttaatgtgcatggtgctgtgaataattgtctagtaattggatacaaggtcttgggggtaaagcc

SEQ ID NO: 276417 - DNA, 120 bp, Artificial Sequence
  ENSG00000128607_22 (sequence is synthesized)
acaggtcatccttcctgaagaaccaagtatcatttaaaaactagcatgaggaaggaatgaaactgagtagcattcattttgtgtgtgtgaaattttagttctggtttgtttgatttgttt

SEQ ID NO: 276418 - DNA, 120 bp, Artificial Sequence
  ENSG00000128607_23 (sequence is synthesized)
tttttttaattctaaaaagaatgacataaattttcactcgctttgccatctggctgctaggggagctgagcaagaggctcaccatgcgcatgtgtaagccgcaggtgtactcaaggtgct

SEQ ID NO: 276419 - DNA, 120 bp, Artificial Sequence
  ENSG00000128607_24 (sequence is synthesized)
gaaggcgtgcaaggggcagcgctggtcctcccggggccaactcacagcaggagactcgcatgggagagttggaacacatctttcctttaagtgcctcttttttcacctagcttttaaagt

SEQ ID NO: 276420 - DNA, 120 bp, Artificial Sequence
  ENSG00000128607_25 (sequence is synthesized)
tattctttgtccttcatctcagaagggatctctttagcttatgtgtggatttaaaatgacctttgagctacggttaaaaagctaccatctggtgttcagttctgggaaagagaaaaccgt

SEQ ID NO: 276421 - DNA, 120 bp, Artificial Sequence
  ENSG00000128607_26 (sequence is synthesized)
accatcccctctgtgatgggttgagttcatggagcctgtattctgggaagtcttataataaccacgcacctgtgaacgtgggtcctttctggggagtgaggaatgtgggagagaggcaga

SEQ ID NO: 276422 - DNA, 120 bp, Artificial Sequence
  ENSG00000128607_27 (sequence is synthesized)
aaaaggagcagctcctctaggggcccatcctcccacatcttgccattaccagtctgtgtagcacttaacctcctgccaccactgccaggcttgctcctccgttctctcccagagcaagtc

SEQ ID NO: 276423 - DNA, 120 bp, Artificial Sequence
  ENSG00000128607_28 (sequence is synthesized)
agtctgagcagctccattagtccaaaacagagctttgctgcatgacttcagcctggcctctggatatttggtggaaatatattctaaattgaacaagccaggctgtccagggtggcaaga

SEQ ID NO: 276424 - DNA, 120 bp, Artificial Sequence
  ENSG00000128607_29 (sequence is synthesized)
ggatttttgacctggatttatacagggaccaaagactgaatgctcagcctctgtgcttagactttcatggtccttaggatagaagtgagtctctagccctgctacaccagagagctgaag

SEQ ID NO: 276425 - DNA, 120 bp, Artificial Sequence
  ENSG00000128607_30 (sequence is synthesized)
agagatgtggtctggttccatccatacttgctggcatcctttgttaagccttctgagggcagtcttctttgaggtagaccttggaggcctgacatcgaagacctgtgtgttttattttca

SEQ ID NO: 276426 - DNA, 120 bp, Artificial Sequence
  ENSG00000128607_31 (sequence is synthesized)
taaaagtatatatccttggtctaaagtgtcttcttttaatataacactagtaaaaatgacatggtatgaccagcactgagtgctatagaaccacacatgtgtacatgttctggatgccaa

SEQ ID NO: 276427 - DNA, 120 bp, Artificial Sequence
  ENSG00000128607_32 (sequence is synthesized)
atgagactgtgtgtaaatgactaagtgtagataactagaaattagataggggtcatcaggcgtttcggtatacctataaccagcactcggaattcctgacactgtttacttgatttagga

SEQ ID NO: 276428 - DNA, 120 bp, Artificial Sequence
  ENSG00000128607_33 (sequence is synthesized)
aagtttatgcctgctgcttctctgcctctttgaggtactcccagccgtcttactacagtcctgtaaatttaagtgcaatatatagaaacatatggatatatacagattatatatagggtg

SEQ ID NO: 276429 - DNA, 120 bp, Artificial Sequence
  ENSG00000128607_34 (sequence is synthesized)
taactataaagcaggtagactacttttttgcatcttggggaagtgagctcattactttaggttcaaattatgccaagaattttagatgtgatcagctggcttaagccaactcatgtcatg

SEQ ID NO: 276430 - DNA, 120 bp, Artificial Sequence
  ENSG00000128607_35 (sequence is synthesized)
ataaagctggattttcaagtccatgttttcttactccaactcttagagactcattgttccttaggtttgttagagttgagattttttttctccctgtcatctttgtactctctcatgttt

SEQ ID NO: 276431 - DNA, 120 bp, Artificial Sequence
  ENSG00000128607_36 (sequence is synthesized)
gcatgtcttacattttgttgccggagaacaaggaagtccatctgtaaggagtttcctaaacggagaattaaaacctagtatttaacactaaccattctcctatgtatatactaatttatc

SEQ ID NO: 276432 - DNA, 120 bp, Artificial Sequence
  ENSG00000128607_37 (sequence is synthesized)
tgggaatgtaatactttattaaatgaagaaaatgatgctttcttcatttaatattttccacatcctggaaaaactataaactgacacagaataggttgaaatcttaactggggctaaaca

SEQ ID NO: 276433 - DNA, 120 bp, Artificial Sequence
  ENSG00000128607_38 (sequence is synthesized)
aaaccctttccattggcagaatctccttttttcagggccataatgacatgatgtaaaaatttgctttaaaccattcatgcccttaaatagctagattttaaagcataataagcatattaa

SEQ ID NO: 276434 - DNA, 120 bp, Artificial Sequence
  ENSG00000128607_39 (sequence is synthesized)
catttttaagcaaaagatacgttaacagtgacctttggttatccacagtagcaagagtaaagcacagatcattgaaatccatagataatcagtgaatcaactttcctaccaaacaataga

SEQ ID NO: 276435 - DNA, 120 bp, Artificial Sequence
  ENSG00000128607_40 (sequence is synthesized)
ttcatttacatttctttttcctccctatcctttcctgtaagcacctgtttttccatggaatggggttaatgagtaggtagaaaaggaaaaggaataatcagtaggagctgacaaccagtg

SEQ ID NO: 276436 - DNA, 120 bp, Artificial Sequence
  ENSG00000128607_41 (sequence is synthesized)
accatataagcagctgattgcctgtaattagtcaggctgaacaattagagttgaatgctgaaattaggaaccacaggtggtaatcctgagtagatgtagctcttcagcgtcatctcctgc

SEQ ID NO: 276437 - DNA, 120 bp, Artificial Sequence
  ENSG00000128607_42 (sequence is synthesized)
cctgagctccaggccatctctctaaccaccaaagaactcttagtacctacgggaaggaaaagctgtgtgcgacacagaggaaactccattatttgaacacatttctttggctcttgacaa

SEQ ID NO: 276438 - DNA, 120 bp, Artificial Sequence
  ENSG00000128607_43 (sequence is synthesized)
atacttgcttttcctctaatcttgcaagagctatggctcttctattttccaatcacacagcttggcatgtaggaaaggttgaatgatcctctaagactgtgttggtcttcgtattctgta

SEQ ID NO: 276439 - DNA, 120 bp, Artificial Sequence
  ENSG00000128607_44 (sequence is synthesized)
aaacccattttttttttgtggtcttacagatgtttagaaagtggcacaggttactgaattgtctacctgccagcattctgatatagcacaaaaagctattttcctttattttttgtatta

SEQ ID NO: 276440 - DNA, 120 bp, Artificial Sequence
  ENSG00000128607_45 (sequence is synthesized)
ttttttatttttctggcattgagctctagggtggatgagggtttatggtcctctgatcataagctccattctaaaaactggtcactgttagctgaaattgctttggttccccaaatgcct

SEQ ID NO: 276441 - DNA, 120 bp, Artificial Sequence
  ENSG00000128607_46 (sequence is synthesized)
tggaactccagacgcacccgcagggcctgaggtaggcttcatagagttctaggacttccgtgtgcgttgccaccagatcctgcccagcaatggcctttcccttctaaggtcattagattc

SEQ ID NO: 276442 - DNA, 120 bp, Artificial Sequence
  ENSG00000128607_47 (sequence is synthesized)
agccaaaagcgacctcttctctagtccggtgttacgaacagaagttctgagttgtgctacaaaagtagttccatctttttggtgtaattttcatgtttttaatttgaaaaaaaaaaaaaa

SEQ ID NO: 276443 - DNA, 120 bp, Artificial Sequence
  ENSG00000128607_48 (sequence is synthesized)
aaaaaaacaactttttataagttttttaagggccctgcttagtcagtgtacagggtggagtcagaggcagttttcagaaaaaaacaaaaaacaatttcaccaagcggtagtaattgttgt

SEQ ID NO: 276444 - DNA, 120 bp, Artificial Sequence
  ENSG00000128607_49 (sequence is synthesized)
tttactagttatacatttagaatataaaggaggcatcagaaaacacactctctaaagccacttccttgtgcacagagtctgcacagggagagcacaggcatctccctggaaaagcacctg

SEQ ID NO: 276445 - DNA, 120 bp, Artificial Sequence
  ENSG00000128607_50 (sequence is synthesized)
ccaatgacgaatttcatggaagaacctaggcaagaaaggaagcctctttctgagacacagtctctgagaggtgagcctagctttgctcttcctacagggtatgcttgggccatacacaat

SEQ ID NO: 276446 - DNA, 120 bp, Artificial Sequence
  ENSG00000128607_51 (sequence is synthesized)
gctcgccttactttaaagctattttgccacagtcctgttaaatagtgtggacgtccttttgcagtctggtgtgcatgccatatgatcaggacagcttttccactttactcggtttcctac

SEQ ID NO: 276447 - DNA, 120 bp, Artificial Sequence
  ENSG00000128607_52 (sequence is synthesized)
aagcaagtaggaaatacagtgaatttaccctaaaatgtccaatctgtatttatgtaccttgtcagtgttttgctgttggttttctaaaacaatctgatcaataaatcttatccaaatcaa

SEQ ID NO: 276448 - DNA, 68 bp, Artificial Sequence
  ENSG00000128607_53 (sequence is synthesized)
catctatgtcactgttcacagcatcttcactaggagtagattctatctcaagaaaccactttcactga

SEQ ID NO: 276449 - DNA, 120 bp, Artificial Sequence
  ENSG00000128609_0 (sequence is synthesized)
gtcaccgagtcgttggcgctgtcatggcgggtgtgctgaagaagaccactggccttgtgggattggctgtgtgcaatactcctcacgagaggctaagaatattgtacacaaagattcttg
